United States Patent Application Publication US 2015/0141320 A1 - sequence listing, part 20

SEQ ID NO: 650534 - DNA, 15 bp, Homo sapiens
gatagtccaagatat

SEQ ID NO: 650535 - DNA, 15 bp, Homo sapiens
atagtccaagatata

SEQ ID NO: 650536 - DNA, 15 bp, Homo sapiens
tagtccaagatatat

SEQ ID NO: 650537 - DNA, 15 bp, Homo sapiens
agtccaagatatata

SEQ ID NO: 650538 - DNA, 15 bp, Homo sapiens
gtccaagatatatac

SEQ ID NO: 650539 - DNA, 15 bp, Homo sapiens
tccaagatatatact

SEQ ID NO: 650540 - DNA, 15 bp, Homo sapiens
ccaagatatatacta

SEQ ID NO: 650541 - DNA, 15 bp, Homo sapiens
caagatatatactaa

SEQ ID NO: 650542 - DNA, 15 bp, Homo sapiens
aagatatatactaat

SEQ ID NO: 650543 - DNA, 15 bp, Homo sapiens
agatatatactaata

SEQ ID NO: 650544 - DNA, 15 bp, Homo sapiens
gatatatactaataa

SEQ ID NO: 650545 - DNA, 15 bp, Homo sapiens
atatatactaataaa

SEQ ID NO: 650546 - DNA, 15 bp, Homo sapiens
tatatactaataaat

SEQ ID NO: 650547 - DNA, 15 bp, Homo sapiens
atatactaataaatg

SEQ ID NO: 650548 - DNA, 15 bp, Homo sapiens
tatactaataaatgt

SEQ ID NO: 650549 - DNA, 15 bp, Homo sapiens
atactaataaatgta

SEQ ID NO: 650550 - DNA, 15 bp, Homo sapiens
tactaataaatgtac

SEQ ID NO: 650551 - DNA, 15 bp, Homo sapiens
actaataaatgtact

SEQ ID NO: 650552 - DNA, 15 bp, Homo sapiens
ctaataaatgtactt

SEQ ID NO: 650553 - DNA, 15 bp, Homo sapiens
taataaatgtacttg

SEQ ID NO: 650554 - DNA, 15 bp, Homo sapiens
aataaatgtacttgt

SEQ ID NO: 650555 - DNA, 15 bp, Homo sapiens
ataaatgtacttgtg

SEQ ID NO: 650556 - DNA, 15 bp, Homo sapiens
taaatgtacttgtga

SEQ ID NO: 650557 - DNA, 15 bp, Homo sapiens
aaatgtacttgtgaa

SEQ ID NO: 650558 - DNA, 15 bp, Homo sapiens
aatgtacttgtgaaa

SEQ ID NO: 650559 - DNA, 15 bp, Homo sapiens
atgtacttgtgaaac

SEQ ID NO: 650560 - DNA, 15 bp, Homo sapiens
tgtacttgtgaaaca

SEQ ID NO: 650561 - DNA, 15 bp, Homo sapiens
gtacttgtgaaacat

SEQ ID NO: 650562 - DNA, 15 bp, Homo sapiens
tacttgtgaaacata

SEQ ID NO: 650563 - DNA, 15 bp, Homo sapiens
acttgtgaaacataa

SEQ ID NO: 650564 - DNA, 15 bp, Homo sapiens
cttgtgaaacataat

SEQ ID NO: 650565 - DNA, 15 bp, Homo sapiens
ttgtgaaacataatg

SEQ ID NO: 650566 - DNA, 15 bp, Homo sapiens
tgtgaaacataatga

SEQ ID NO: 650567 - DNA, 15 bp, Homo sapiens
gtgaaacataatgag

SEQ ID NO: 650568 - DNA, 15 bp, Homo sapiens
tgaaacataatgagt

SEQ ID NO: 650569 - DNA, 15 bp, Homo sapiens
gaaacataatgagtt

SEQ ID NO: 650570 - DNA, 15 bp, Homo sapiens
aaacataatgagtta

SEQ ID NO: 650571 - DNA, 15 bp, Homo sapiens
aacataatgagttac

SEQ ID NO: 650572 - DNA, 15 bp, Homo sapiens
acataatgagttact

SEQ ID NO: 650573 - DNA, 15 bp, Homo sapiens
cataatgagttacta

SEQ ID NO: 650574 - DNA, 15 bp, Homo sapiens
ataatgagttactaa

SEQ ID NO: 650575 - DNA, 15 bp, Homo sapiens
taatgagttactaaa

SEQ ID NO: 650576 - DNA, 15 bp, Homo sapiens
aatgagttactaaaa

SEQ ID NO: 650577 - DNA, 15 bp, Homo sapiens
atgagttactaaaat

SEQ ID NO: 650578 - DNA, 15 bp, Homo sapiens
tgagttactaaaatg

SEQ ID NO: 650579 - DNA, 15 bp, Homo sapiens
gagttactaaaatgc

SEQ ID NO: 650580 - DNA, 15 bp, Homo sapiens
agttactaaaatgcc

SEQ ID NO: 650581 - DNA, 15 bp, Homo sapiens
gttactaaaatgcca

SEQ ID NO: 650582 - DNA, 15 bp, Homo sapiens
ttactaaaatgccag

SEQ ID NO: 650583 - DNA, 15 bp, Homo sapiens
tactaaaatgccagg

SEQ ID NO: 650584 - DNA, 15 bp, Homo sapiens
actaaaatgccaggt

SEQ ID NO: 650585 - DNA, 15 bp, Homo sapiens
ctaaaatgccaggtc

SEQ ID NO: 650586 - DNA, 15 bp, Homo sapiens
taaaatgccaggtca

SEQ ID NO: 650587 - DNA, 15 bp, Homo sapiens
aaaatgccaggtcaa

SEQ ID NO: 650588 - DNA, 15 bp, Homo sapiens
aaatgccaggtcaat

SEQ ID NO: 650589 - DNA, 15 bp, Homo sapiens
aatgccaggtcaata

SEQ ID NO: 650590 - DNA, 15 bp, Homo sapiens
atgccaggtcaataa

SEQ ID NO: 650591 - DNA, 15 bp, Homo sapiens
tgccaggtcaataac

SEQ ID NO: 650592 - DNA, 15 bp, Homo sapiens
gccaggtcaataaca

SEQ ID NO: 650593 - DNA, 15 bp, Homo sapiens
ccaggtcaataacag

SEQ ID NO: 650594 - DNA, 15 bp, Homo sapiens
caggtcaataacagc

SEQ ID NO: 650595 - DNA, 15 bp, Homo sapiens
aggtcaataacagcc

SEQ ID NO: 650596 - DNA, 15 bp, Homo sapiens
ggtcaataacagcct

SEQ ID NO: 650597 - DNA, 15 bp, Homo sapiens
gtcaataacagcctt

SEQ ID NO: 650598 - DNA, 15 bp, Homo sapiens
tcaataacagcctta

SEQ ID NO: 650599 - DNA, 15 bp, Homo sapiens
caataacagccttaa

SEQ ID NO: 650600 - DNA, 15 bp, Homo sapiens
aataacagccttaac

SEQ ID NO: 650601 - DNA, 15 bp, Homo sapiens
ataacagccttaact

SEQ ID NO: 650602 - DNA, 15 bp, Homo sapiens
taacagccttaactg

SEQ ID NO: 650603 - DNA, 15 bp, Homo sapiens
aacagccttaactga

SEQ ID NO: 650604 - DNA, 15 bp, Homo sapiens
acagccttaactgaa

SEQ ID NO: 650605 - DNA, 15 bp, Homo sapiens
cagccttaactgaac

SEQ ID NO: 650606 - DNA, 15 bp, Homo sapiens
agccttaactgaaca

SEQ ID NO: 650607 - DNA, 15 bp, Homo sapiens
gccttaactgaacag

SEQ ID NO: 650608 - DNA, 15 bp, Homo sapiens
ccttaactgaacagg

SEQ ID NO: 650609 - DNA, 15 bp, Homo sapiens
cttaactgaacaggt

SEQ ID NO: 650610 - DNA, 15 bp, Homo sapiens
ttaactgaacaggtg

SEQ ID NO: 650611 - DNA, 15 bp, Homo sapiens
taactgaacaggtgc

SEQ ID NO: 650612 - DNA, 15 bp, Homo sapiens
aactgaacaggtgct

SEQ ID NO: 650613 - DNA, 15 bp, Homo sapiens
actgaacaggtgcta

SEQ ID NO: 650614 - DNA, 15 bp, Homo sapiens
ctgaacaggtgctac

SEQ ID NO: 650615 - DNA, 15 bp, Homo sapiens
tgaacaggtgctaca

SEQ ID NO: 650616 - DNA, 15 bp, Homo sapiens
gaacaggtgctacaa

SEQ ID NO: 650617 - DNA, 15 bp, Homo sapiens
aacaggtgctacaaa

SEQ ID NO: 650618 - DNA, 15 bp, Homo sapiens
acaggtgctacaaat

SEQ ID NO: 650619 - DNA, 15 bp, Homo sapiens
caggtgctacaaatg

SEQ ID NO: 650620 - DNA, 15 bp, Homo sapiens
aggtgctacaaatgt

SEQ ID NO: 650621 - DNA, 15 bp, Homo sapiens
ggtgctacaaatgta

SEQ ID NO: 650622 - DNA, 15 bp, Homo sapiens
gtgctacaaatgtac

SEQ ID NO: 650623 - DNA, 15 bp, Homo sapiens
tgctacaaatgtact

SEQ ID NO: 650624 - DNA, 15 bp, Homo sapiens
gctacaaatgtactt

SEQ ID NO: 650625 - DNA, 15 bp, Homo sapiens
ctacaaatgtacttt

SEQ ID NO: 650626 - DNA, 15 bp, Homo sapiens
tacaaatgtacttta

SEQ ID NO: 650627 - DNA, 15 bp, Homo sapiens
acaaatgtactttat

SEQ ID NO: 650628 - DNA, 15 bp, Homo sapiens
caaatgtactttatt

SEQ ID NO: 650629 - DNA, 15 bp, Homo sapiens
aaatgtactttattg

SEQ ID NO: 650630 - DNA, 15 bp, Homo sapiens
aatgtactttattgc

SEQ ID NO: 650631 - DNA, 15 bp, Homo sapiens
atgtactttattgct

SEQ ID NO: 650632 - DNA, 15 bp, Homo sapiens
tgtactttattgctc

SEQ ID NO: 650633 - DNA, 15 bp, Homo sapiens
gtactttattgctca

SEQ ID NO: 650634 - DNA, 15 bp, Homo sapiens
tactttattgctcac

SEQ ID NO: 650635 - DNA, 15 bp, Homo sapiens
actttattgctcact

SEQ ID NO: 650636 - DNA, 15 bp, Homo sapiens
ctttattgctcactt

SEQ ID NO: 650637 - DNA, 15 bp, Homo sapiens
tttattgctcacttg

SEQ ID NO: 650638 - DNA, 15 bp, Homo sapiens
ttattgctcacttgt

SEQ ID NO: 650639 - DNA, 15 bp, Homo sapiens
tattgctcacttgtg

SEQ ID NO: 650640 - DNA, 15 bp, Homo sapiens
attgctcacttgtgc

SEQ ID NO: 650641 - DNA, 15 bp, Homo sapiens
ttgctcacttgtgct

SEQ ID NO: 650642 - DNA, 15 bp, Homo sapiens
tgctcacttgtgcta

SEQ ID NO: 650643 - DNA, 15 bp, Homo sapiens
gctcacttgtgctaa

SEQ ID NO: 650644 - DNA, 15 bp, Homo sapiens
ctcacttgtgctaaa

SEQ ID NO: 650645 - DNA, 15 bp, Homo sapiens
tcacttgtgctaaag

SEQ ID NO: 650646 - DNA, 15 bp, Homo sapiens
cacttgtgctaaagt

SEQ ID NO: 650647 - DNA, 15 bp, Homo sapiens
acttgtgctaaagta

SEQ ID NO: 650648 - DNA, 15 bp, Homo sapiens
cttgtgctaaagtag

SEQ ID NO: 650649 - DNA, 15 bp, Homo sapiens
ttgtgctaaagtagc

SEQ ID NO: 650650 - DNA, 15 bp, Homo sapiens
tgtgctaaagtagct

SEQ ID NO: 650651 - DNA, 15 bp, Homo sapiens
gtgctaaagtagcta

SEQ ID NO: 650652 - DNA, 15 bp, Homo sapiens
tgctaaagtagctaa

SEQ ID NO: 650653 - DNA, 15 bp, Homo sapiens
gctaaagtagctaat

SEQ ID NO: 650654 - DNA, 15 bp, Homo sapiens
ctaaagtagctaatg

SEQ ID NO: 650655 - DNA, 15 bp, Homo sapiens
taaagtagctaatgc

SEQ ID NO: 650656 - DNA, 15 bp, Homo sapiens
aaagtagctaatgcc

SEQ ID NO: 650657 - DNA, 15 bp, Homo sapiens
aagtagctaatgcct

SEQ ID NO: 650658 - DNA, 15 bp, Homo sapiens
agtagctaatgcctt

SEQ ID NO: 650659 - DNA, 15 bp, Homo sapiens
gtagctaatgccttt

SEQ ID NO: 650660 - DNA, 15 bp, Homo sapiens
tagctaatgccttta

SEQ ID NO: 650661 - DNA, 15 bp, Homo sapiens
agctaatgcctttaa

SEQ ID NO: 650662 - DNA, 15 bp, Homo sapiens
gctaatgcctttaat

SEQ ID NO: 650663 - DNA, 15 bp, Homo sapiens
ctaatgcctttaatt

SEQ ID NO: 650664 - DNA, 15 bp, Homo sapiens
taatgcctttaattt

SEQ ID NO: 650665 - DNA, 15 bp, Homo sapiens
aatgcctttaatttt

SEQ ID NO: 650666 - DNA, 15 bp, Homo sapiens
atgcctttaattttc

SEQ ID NO: 650667 - DNA, 15 bp, Homo sapiens
tgcctttaattttca

SEQ ID NO: 650668 - DNA, 15 bp, Homo sapiens
gcctttaattttcat

SEQ ID NO: 650669 - DNA, 15 bp, Homo sapiens
cctttaattttcatt

SEQ ID NO: 650670 - DNA, 15 bp, Homo sapiens
ctttaattttcattg

SEQ ID NO: 650671 - DNA, 15 bp, Homo sapiens
tttaattttcattgt

SEQ ID NO: 650672 - DNA, 15 bp, Homo sapiens
ttaattttcattgtc

SEQ ID NO: 650673 - DNA, 15 bp, Homo sapiens
taattttcattgtct

SEQ ID NO: 650674 - DNA, 15 bp, Homo sapiens
aattttcattgtctt

SEQ ID NO: 650675 - DNA, 15 bp, Homo sapiens
attttcattgtcttt

SEQ ID NO: 650676 - DNA, 15 bp, Homo sapiens
ttttcattgtcttta

SEQ ID NO: 650677 - DNA, 15 bp, Homo sapiens
tttcattgtctttac

SEQ ID NO: 650678 - DNA, 15 bp, Homo sapiens
ttcattgtctttaca

SEQ ID NO: 650679 - DNA, 15 bp, Homo sapiens
tcattgtctttacag

SEQ ID NO: 650680 - DNA, 15 bp, Homo sapiens
cattgtctttacagt

SEQ ID NO: 650681 - DNA, 15 bp, Homo sapiens
attgtctttacagtt

SEQ ID NO: 650682 - DNA, 15 bp, Homo sapiens
ttgtctttacagtta

SEQ ID NO: 650683 - DNA, 15 bp, Homo sapiens
tgtctttacagttat

SEQ ID NO: 650684 - DNA, 15 bp, Homo sapiens
gtctttacagttatt

SEQ ID NO: 650685 - DNA, 15 bp, Homo sapiens
tctttacagttattc

SEQ ID NO: 650686 - DNA, 15 bp, Homo sapiens
ctttacagttattca

SEQ ID NO: 650687 - DNA, 15 bp, Homo sapiens
tttacagttattcat

SEQ ID NO: 650688 - DNA, 15 bp, Homo sapiens
ttacagttattcatt

SEQ ID NO: 650689 - DNA, 15 bp, Homo sapiens
tacagttattcattc

SEQ ID NO: 650690 - DNA, 15 bp, Homo sapiens
acagttattcattca

SEQ ID NO: 650691 - DNA, 15 bp, Homo sapiens
cagttattcattcaa

SEQ ID NO: 650692 - DNA, 15 bp, Homo sapiens
agttattcattcaat

SEQ ID NO: 650693 - DNA, 15 bp, Homo sapiens
gttattcattcaata

SEQ ID NO: 650694 - DNA, 15 bp, Homo sapiens
ttattcattcaataa

SEQ ID NO: 650695 - DNA, 15 bp, Homo sapiens
tattcattcaataag

SEQ ID NO: 650696 - DNA, 15 bp, Homo sapiens
attcattcaataagt

SEQ ID NO: 650697 - DNA, 15 bp, Homo sapiens
ttcattcaataagta

SEQ ID NO: 650698 - DNA, 15 bp, Homo sapiens
tcattcaataagtaa

SEQ ID NO: 650699 - DNA, 15 bp, Homo sapiens
cattcaataagtaat

SEQ ID NO: 650700 - DNA, 15 bp, Homo sapiens
attcaataagtaatt

SEQ ID NO: 650701 - DNA, 15 bp, Homo sapiens
ttcaataagtaatta

SEQ ID NO: 650702 - DNA, 15 bp, Homo sapiens
tcaataagtaattat

SEQ ID NO: 650703 - DNA, 15 bp, Homo sapiens
caataagtaattatt

SEQ ID NO: 650704 - DNA, 15 bp, Homo sapiens
aataagtaattattc

SEQ ID NO: 650705 - DNA, 15 bp, Homo sapiens
ataagtaattattca

SEQ ID NO: 650706 - DNA, 15 bp, Homo sapiens
taagtaattattcag

SEQ ID NO: 650707 - DNA, 15 bp, Homo sapiens
aagtaattattcagc

SEQ ID NO: 650708 - DNA, 15 bp, Homo sapiens
agtaattattcagca

SEQ ID NO: 650709 - DNA, 15 bp, Homo sapiens
gtaattattcagcat

SEQ ID NO: 650710 - DNA, 15 bp, Homo sapiens
taattattcagcatc

SEQ ID NO: 650711 - DNA, 15 bp, Homo sapiens
aattattcagcatct

SEQ ID NO: 650712 - DNA, 15 bp, Homo sapiens
attattcagcatcta

SEQ ID NO: 650713 - DNA, 15 bp, Homo sapiens
ttattcagcatctac

SEQ ID NO: 650714 - DNA, 15 bp, Homo sapiens
tattcagcatctact

SEQ ID NO: 650715 - DNA, 15 bp, Homo sapiens
attcagcatctacta

SEQ ID NO: 650716 - DNA, 15 bp, Homo sapiens
ttcagcatctactat

SEQ ID NO: 650717 - DNA, 15 bp, Homo sapiens
tcagcatctactatg

SEQ ID NO: 650718 - DNA, 15 bp, Homo sapiens
cagcatctactatgt

SEQ ID NO: 650719 - DNA, 15 bp, Homo sapiens
agcatctactatgtg

SEQ ID NO: 650720 - DNA, 15 bp, Homo sapiens
gcatctactatgtgc

SEQ ID NO: 650721 - DNA, 15 bp, Homo sapiens
catctactatgtgcc

SEQ ID NO: 650722 - DNA, 15 bp, Homo sapiens
atctactatgtgcca

SEQ ID NO: 650723 - DNA, 15 bp, Homo sapiens
tctactatgtgccag

SEQ ID NO: 650724 - DNA, 15 bp, Homo sapiens
ctactatgtgccaga

SEQ ID NO: 650725 - DNA, 15 bp, Homo sapiens
tactatgtgccagac

SEQ ID NO: 650726 - DNA, 15 bp, Homo sapiens
actatgtgccagaca

SEQ ID NO: 650727 - DNA, 15 bp, Homo sapiens
ctatgtgccagacac

SEQ ID NO: 650728 - DNA, 15 bp, Homo sapiens
tatgtgccagacact

SEQ ID NO: 650729 - DNA, 15 bp, Homo sapiens
atgtgccagacactt

SEQ ID NO: 650730 - DNA, 15 bp, Homo sapiens
tgtgccagacactta

SEQ ID NO: 650731 - DNA, 15 bp, Homo sapiens
gtgccagacacttag

SEQ ID NO: 650732 - DNA, 15 bp, Homo sapiens
tgccagacacttaga

SEQ ID NO: 650733 - DNA, 15 bp, Homo sapiens
gccagacacttagaa

SEQ ID NO: 650734 - DNA, 15 bp, Homo sapiens
ccagacacttagaaa

SEQ ID NO: 650735 - DNA, 15 bp, Homo sapiens
cagacacttagaaaa

SEQ ID NO: 650736 - DNA, 15 bp, Homo sapiens
agacacttagaaaat

SEQ ID NO: 650737 - DNA, 15 bp, Homo sapiens
gacacttagaaaatg

SEQ ID NO: 650738 - DNA, 15 bp, Homo sapiens
acacttagaaaatgc

SEQ ID NO: 650739 - DNA, 15 bp, Homo sapiens
cacttagaaaatgca

SEQ ID NO: 650740 - DNA, 15 bp, Homo sapiens
acttagaaaatgcag

SEQ ID NO: 650741 - DNA, 15 bp, Homo sapiens
cttagaaaatgcagg

SEQ ID NO: 650742 - DNA, 15 bp, Homo sapiens
ttagaaaatgcaggg

SEQ ID NO: 650743 - DNA, 15 bp, Homo sapiens
tagaaaatgcagggg

SEQ ID NO: 650744 - DNA, 15 bp, Homo sapiens
agaaaatgcagggga

SEQ ID NO: 650745 - DNA, 15 bp, Homo sapiens
gaaaatgcaggggat

SEQ ID NO: 650746 - DNA, 15 bp, Homo sapiens
aaaatgcaggggatt

SEQ ID NO: 650747 - DNA, 15 bp, Homo sapiens
aaatgcaggggattc

SEQ ID NO: 650748 - DNA, 15 bp, Homo sapiens
aatgcaggggattca

SEQ ID NO: 650749 - DNA, 15 bp, Homo sapiens
atgcaggggattcaa

SEQ ID NO: 650750 - DNA, 15 bp, Homo sapiens
tgcaggggattcaac

SEQ ID NO: 650751 - DNA, 15 bp, Homo sapiens
gcaggggattcaaca

SEQ ID NO: 650752 - DNA, 15 bp, Homo sapiens
caggggattcaacag

SEQ ID NO: 650753 - DNA, 15 bp, Homo sapiens
aggggattcaacagt

SEQ ID NO: 650754 - DNA, 15 bp, Homo sapiens
ggggattcaacagtg

SEQ ID NO: 650755 - DNA, 15 bp, Homo sapiens
gggattcaacagtga

SEQ ID NO: 650756 - DNA, 15 bp, Homo sapiens
ggattcaacagtgag

SEQ ID NO: 650757 - DNA, 15 bp, Homo sapiens
gattcaacagtgagc

SEQ ID NO: 650758 - DNA, 15 bp, Homo sapiens
attcaacagtgagca

SEQ ID NO: 650759 - DNA, 15 bp, Homo sapiens
ttcaacagtgagcaa

SEQ ID NO: 650760 - DNA, 15 bp, Homo sapiens
tcaacagtgagcaac

SEQ ID NO: 650761 - DNA, 15 bp, Homo sapiens
caacagtgagcaacg

SEQ ID NO: 650762 - DNA, 15 bp, Homo sapiens
aacagtgagcaacgg

SEQ ID NO: 650763 - DNA, 15 bp, Homo sapiens
acagtgagcaacgga

SEQ ID NO: 650764 - DNA, 15 bp, Homo sapiens
cagtgagcaacggaa

SEQ ID NO: 650765 - DNA, 15 bp, Homo sapiens
agtgagcaacggaaa

SEQ ID NO: 650766 - DNA, 15 bp, Homo sapiens
gtgagcaacggaaat

SEQ ID NO: 650767 - DNA, 15 bp, Homo sapiens
tgagcaacggaaatg

SEQ ID NO: 650768 - DNA, 15 bp, Homo sapiens
gagcaacggaaatgt

SEQ ID NO: 650769 - DNA, 15 bp, Homo sapiens
agcaacggaaatgtg

SEQ ID NO: 650770 - DNA, 15 bp, Homo sapiens
gcaacggaaatgtgg

SEQ ID NO: 650771 - DNA, 15 bp, Homo sapiens
caacggaaatgtggt

SEQ ID NO: 650772 - DNA, 15 bp, Homo sapiens
aacggaaatgtggtt

SEQ ID NO: 650773 - DNA, 15 bp, Homo sapiens
acggaaatgtggttt

SEQ ID NO: 650774 - DNA, 15 bp, Homo sapiens
cggaaatgtggtttt

SEQ ID NO: 650775 - DNA, 15 bp, Homo sapiens
ggaaatgtggttttg

SEQ ID NO: 650776 - DNA, 15 bp, Homo sapiens
gaaatgtggttttgt

SEQ ID NO: 650777 - DNA, 15 bp, Homo sapiens
aaatgtggttttgtt

SEQ ID NO: 650778 - DNA, 15 bp, Homo sapiens
aatgtggttttgttt

SEQ ID NO: 650779 - DNA, 15 bp, Homo sapiens
atgtggttttgtttt

SEQ ID NO: 650780 - DNA, 15 bp, Homo sapiens
tgtggttttgttttt

SEQ ID NO: 650781 - DNA, 15 bp, Homo sapiens
gtggttttgtttttg

SEQ ID NO: 650782 - DNA, 15 bp, Homo sapiens
tggttttgtttttgt

SEQ ID NO: 650783 - DNA, 15 bp, Homo sapiens
ggttttgtttttgtt

SEQ ID NO: 650784 - DNA, 15 bp, Homo sapiens
gttttgtttttgttt

SEQ ID NO: 650785 - DNA, 15 bp, Homo sapiens
ttttgtttttgtttt

SEQ ID NO: 650786 - DNA, 15 bp, Homo sapiens
tttgtttttgttttt

SEQ ID NO: 650787 - DNA, 15 bp, Homo sapiens
ttgtttttgtttttg

SEQ ID NO: 650788 - DNA, 15 bp, Homo sapiens
tgtttttgtttttgt

SEQ ID NO: 650789 - DNA, 15 bp, Homo sapiens
gtttttgtttttgtt

SEQ ID NO: 650790 - DNA, 15 bp, Homo sapiens
tttttgtttttgttt

SEQ ID NO: 650791 - DNA, 15 bp, Homo sapiens
ttgtttttgtttttt

SEQ ID NO: 650792 - DNA, 15 bp, Homo sapiens
tgtttttgttttttt

SEQ ID NO: 650793 - DNA, 15 bp, Homo sapiens
gtttttgtttttttg

SEQ ID NO: 650794 - DNA, 15 bp, Homo sapiens
tttttgtttttttgc

SEQ ID NO: 650795 - DNA, 15 bp, Homo sapiens
ttttgtttttttgcc

SEQ ID NO: 650796 - DNA, 15 bp, Homo sapiens
tttgtttttttgcct

SEQ ID NO: 650797 - DNA, 15 bp, Homo sapiens
ttgtttttttgcctt

SEQ ID NO: 650798 - DNA, 15 bp, Homo sapiens
tgtttttttgccttg

SEQ ID NO: 650799 - DNA, 15 bp, Homo sapiens
gtttttttgccttga

SEQ ID NO: 650800 - DNA, 15 bp, Homo sapiens
tttttttgccttgat

SEQ ID NO: 650801 - DNA, 15 bp, Homo sapiens
ttttttgccttgatg

SEQ ID NO: 650802 - DNA, 15 bp, Homo sapiens
tttttgccttgatgg

SEQ ID NO: 650803 - DNA, 15 bp, Homo sapiens
ttttgccttgatggg

SEQ ID NO: 650804 - DNA, 15 bp, Homo sapiens
tttgccttgatggga

SEQ ID NO: 650805 - DNA, 15 bp, Homo sapiens
ttgccttgatgggat

SEQ ID NO: 650806 - DNA, 15 bp, Homo sapiens
tgccttgatgggatt

SEQ ID NO: 650807 - DNA, 15 bp, Homo sapiens
gccttgatgggattt

SEQ ID NO: 650808 - DNA, 15 bp, Homo sapiens
ccttgatgggattta

SEQ ID NO: 650809 - DNA, 15 bp, Homo sapiens
cttgatgggatttac

SEQ ID NO: 650810 - DNA, 15 bp, Homo sapiens
ttgatgggatttaca

SEQ ID NO: 650811 - DNA, 15 bp, Homo sapiens
tgatgggatttacac

SEQ ID NO: 650812 - DNA, 15 bp, Homo sapiens
gatgggatttacact

SEQ ID NO: 650813 - DNA, 15 bp, Homo sapiens
atgggatttacactt

SEQ ID NO: 650814 - DNA, 15 bp, Homo sapiens
tgggatttacacttt

SEQ ID NO: 650815 - DNA, 15 bp, Homo sapiens
gggatttacacttta

SEQ ID NO: 650816 - DNA, 15 bp, Homo sapiens
ggatttacactttaa

SEQ ID NO: 650817 - DNA, 15 bp, Homo sapiens
gatttacactttaat

SEQ ID NO: 650818 - DNA, 15 bp, Homo sapiens
atttacactttaatg

SEQ ID NO: 650819 - DNA, 15 bp, Homo sapiens
tttacactttaatgg

SEQ ID NO: 650820 - DNA, 15 bp, Homo sapiens
ttacactttaatgga

SEQ ID NO: 650821 - DNA, 15 bp, Homo sapiens
tacactttaatggag

SEQ ID NO: 650822 - DNA, 15 bp, Homo sapiens
acactttaatggaga

SEQ ID NO: 650823 - DNA, 15 bp, Homo sapiens
cactttaatggagaa

SEQ ID NO: 650824 - DNA, 15 bp, Homo sapiens
actttaatggagaag

SEQ ID NO: 650825 - DNA, 15 bp, Homo sapiens
ctttaatggagaaga

SEQ ID NO: 650826 - DNA, 15 bp, Homo sapiens
tttaatggagaagac

SEQ ID NO: 650827 - DNA, 15 bp, Homo sapiens
ttaatggagaagaca

SEQ ID NO: 650828 - DNA, 15 bp, Homo sapiens
taatggagaagacaa

SEQ ID NO: 650829 - DNA, 15 bp, Homo sapiens
aatggagaagacaag

SEQ ID NO: 650830 - DNA, 15 bp, Homo sapiens
atggagaagacaagc

SEQ ID NO: 650831 - DNA, 15 bp, Homo sapiens
tggagaagacaagca

SEQ ID NO: 650832 - DNA, 15 bp, Homo sapiens
ggagaagacaagcaa

SEQ ID NO: 650833 - DNA, 15 bp, Homo sapiens
gagaagacaagcaat

SEQ ID NO: 650834 - DNA, 15 bp, Homo sapiens
agaagacaagcaata

SEQ ID NO: 650835 - DNA, 15 bp, Homo sapiens
gaagacaagcaataa

SEQ ID NO: 650836 - DNA, 15 bp, Homo sapiens
aagacaagcaataaa

SEQ ID NO: 650837 - DNA, 15 bp, Homo sapiens
agacaagcaataaat

SEQ ID NO: 650838 - DNA, 15 bp, Homo sapiens
gacaagcaataaata

SEQ ID NO: 650839 - DNA, 15 bp, Homo sapiens
acaagcaataaataa

SEQ ID NO: 650840 - DNA, 15 bp, Homo sapiens
caagcaataaataag

SEQ ID NO: 650841 - DNA, 15 bp, Homo sapiens
aagcaataaataagt

SEQ ID NO: 650842 - DNA, 15 bp, Homo sapiens
agcaataaataagta

SEQ ID NO: 650843 - DNA, 15 bp, Homo sapiens
gcaataaataagtaa

SEQ ID NO: 650844 - DNA, 15 bp, Homo sapiens
caataaataagtaac

SEQ ID NO: 650845 - DNA, 15 bp, Homo sapiens
aataaataagtaacc

SEQ ID NO: 650846 - DNA, 15 bp, Homo sapiens
ataaataagtaacca

SEQ ID NO: 650847 - DNA, 15 bp, Homo sapiens
taaataagtaaccat

SEQ ID NO: 650848 - DNA, 15 bp, Homo sapiens
aaataagtaaccatg

SEQ ID NO: 650849 - DNA, 15 bp, Homo sapiens
aataagtaaccatgt

SEQ ID NO: 650850 - DNA, 15 bp, Homo sapiens
ataagtaaccatgta

SEQ ID NO: 650851 - DNA, 15 bp, Homo sapiens
taagtaaccatgtaa

SEQ ID NO: 650852 - DNA, 15 bp, Homo sapiens
aagtaaccatgtaaa

SEQ ID NO: 650853 - DNA, 15 bp, Homo sapiens
agtaaccatgtaaat

SEQ ID NO: 650854 - DNA, 15 bp, Homo sapiens
gtaaccatgtaaatg

SEQ ID NO: 650855 - DNA, 15 bp, Homo sapiens
taaccatgtaaatga

SEQ ID NO: 650856 - DNA, 15 bp, Homo sapiens
aaccatgtaaatgaa

SEQ ID NO: 650857 - DNA, 15 bp, Homo sapiens
accatgtaaatgaat

SEQ ID NO: 650858 - DNA, 15 bp, Homo sapiens
ccatgtaaatgaata

SEQ ID NO: 650859 - DNA, 15 bp, Homo sapiens
catgtaaatgaatac

SEQ ID NO: 650860 - DNA, 15 bp, Homo sapiens
atgtaaatgaataca

SEQ ID NO: 650861 - DNA, 15 bp, Homo sapiens
tgtaaatgaatacag

SEQ ID NO: 650862 - DNA, 15 bp, Homo sapiens
gtaaatgaatacaga

SEQ ID NO: 650863 - DNA, 15 bp, Homo sapiens
taaatgaatacagac

SEQ ID NO: 650864 - DNA, 15 bp, Homo sapiens
aaatgaatacagaca

SEQ ID NO: 650865 - DNA, 15 bp, Homo sapiens
aatgaatacagacaa

SEQ ID NO: 650866 - DNA, 15 bp, Homo sapiens
atgaatacagacaaa

SEQ ID NO: 650867 - DNA, 15 bp, Homo sapiens
tgaatacagacaaat

SEQ ID NO: 650868 - DNA, 15 bp, Homo sapiens
gaatacagacaaata

SEQ ID NO: 650869 - DNA, 15 bp, Homo sapiens
aatacagacaaatag

SEQ ID NO: 650870 - DNA, 15 bp, Homo sapiens
atacagacaaataga

SEQ ID NO: 650871 - DNA, 15 bp, Homo sapiens
tacagacaaatagag

SEQ ID NO: 650872 - DNA, 15 bp, Homo sapiens
acagacaaatagaga

SEQ ID NO: 650873 - DNA, 15 bp, Homo sapiens
cagacaaatagagac

SEQ ID NO: 650874 - DNA, 15 bp, Homo sapiens
agacaaatagagaca

SEQ ID NO: 650875 - DNA, 15 bp, Homo sapiens
gacaaatagagacat

SEQ ID NO: 650876 - DNA, 15 bp, Homo sapiens
acaaatagagacatg

SEQ ID NO: 650877 - DNA, 15 bp, Homo sapiens
caaatagagacatgc

SEQ ID NO: 650878 - DNA, 15 bp, Homo sapiens
aaatagagacatgct

SEQ ID NO: 650879 - DNA, 15 bp, Homo sapiens
aatagagacatgcta

SEQ ID NO: 650880 - DNA, 15 bp, Homo sapiens
atagagacatgctat

SEQ ID NO: 650881 - DNA, 15 bp, Homo sapiens
tagagacatgctata

SEQ ID NO: 650882 - DNA, 15 bp, Homo sapiens
agagacatgctatag

SEQ ID NO: 650883 - DNA, 15 bp, Homo sapiens
gagacatgctataga

SEQ ID NO: 650884 - DNA, 15 bp, Homo sapiens
agacatgctatagag

SEQ ID NO: 650885 - DNA, 15 bp, Homo sapiens
gacatgctatagagg

SEQ ID NO: 650886 - DNA, 15 bp, Homo sapiens
acatgctatagagga

SEQ ID NO: 650887 - DNA, 15 bp, Homo sapiens
catgctatagaggac

SEQ ID NO: 650888 - DNA, 15 bp, Homo sapiens
atgctatagaggaca

SEQ ID NO: 650889 - DNA, 15 bp, Homo sapiens
tgctatagaggacag

SEQ ID NO: 650890 - DNA, 15 bp, Homo sapiens
gctatagaggacaga

SEQ ID NO: 650891 - DNA, 15 bp, Homo sapiens
ctatagaggacagag

SEQ ID NO: 650892 - DNA, 15 bp, Homo sapiens
tatagaggacagaga

SEQ ID NO: 650893 - DNA, 15 bp, Homo sapiens
atagaggacagagaa

SEQ ID NO: 650894 - DNA, 15 bp, Homo sapiens
tagaggacagagaac

SEQ ID NO: 650895 - DNA, 15 bp, Homo sapiens
agaggacagagaacc

SEQ ID NO: 650896 - DNA, 15 bp, Homo sapiens
gaggacagagaacct

SEQ ID NO: 650897 - DNA, 15 bp, Homo sapiens
aggacagagaacctt

SEQ ID NO: 650898 - DNA, 15 bp, Homo sapiens
ggacagagaaccttg

SEQ ID NO: 650899 - DNA, 15 bp, Homo sapiens
gacagagaaccttga

SEQ ID NO: 650900 - DNA, 15 bp, Homo sapiens
acagagaaccttgac

SEQ ID NO: 650901 - DNA, 15 bp, Homo sapiens
cagagaaccttgaca

SEQ ID NO: 650902 - DNA, 15 bp, Homo sapiens
agagaaccttgacag

SEQ ID NO: 650903 - DNA, 15 bp, Homo sapiens
gagaaccttgacagt

SEQ ID NO: 650904 - DNA, 15 bp, Homo sapiens
agaaccttgacagtg

SEQ ID NO: 650905 - DNA, 15 bp, Homo sapiens
gaaccttgacagtga

SEQ ID NO: 650906 - DNA, 15 bp, Homo sapiens
aaccttgacagtgaa

SEQ ID NO: 650907 - DNA, 15 bp, Homo sapiens
accttgacagtgaat

SEQ ID NO: 650908 - DNA, 15 bp, Homo sapiens
ccttgacagtgaata

SEQ ID NO: 650909 - DNA, 15 bp, Homo sapiens
cttgacagtgaatag

SEQ ID NO: 650910 - DNA, 15 bp, Homo sapiens
ttgacagtgaatagc

SEQ ID NO: 650911 - DNA, 15 bp, Homo sapiens
tgacagtgaatagca

SEQ ID NO: 650912 - DNA, 15 bp, Homo sapiens
gacagtgaatagcag

SEQ ID NO: 650913 - DNA, 15 bp, Homo sapiens
acagtgaatagcagg

SEQ ID NO: 650914 - DNA, 15 bp, Homo sapiens
cagtgaatagcagga

SEQ ID NO: 650915 - DNA, 15 bp, Homo sapiens
agtgaatagcaggat

SEQ ID NO: 650916 - DNA, 15 bp, Homo sapiens
gtgaatagcaggata

SEQ ID NO: 650917 - DNA, 15 bp, Homo sapiens
tgaatagcaggataa

SEQ ID NO: 650918 - DNA, 15 bp, Homo sapiens
gaatagcaggataac

SEQ ID NO: 650919 - DNA, 15 bp, Homo sapiens
aatagcaggataacc

SEQ ID NO: 650920 - DNA, 15 bp, Homo sapiens
atagcaggataacca

SEQ ID NO: 650921 - DNA, 15 bp, Homo sapiens
tagcaggataaccag

SEQ ID NO: 650922 - DNA, 15 bp, Homo sapiens
agcaggataaccagg

SEQ ID NO: 650923 - DNA, 15 bp, Homo sapiens
gcaggataaccaggt

SEQ ID NO: 650924 - DNA, 15 bp, Homo sapiens
caggataaccaggtg

SEQ ID NO: 650925 - DNA, 15 bp, Homo sapiens
aggataaccaggtgt

SEQ ID NO: 650926 - DNA, 15 bp, Homo sapiens
ggataaccaggtgtg

SEQ ID NO: 650927 - DNA, 15 bp, Homo sapiens
gataaccaggtgtgg

SEQ ID NO: 650928 - DNA, 15 bp, Homo sapiens
ataaccaggtgtggc

SEQ ID NO: 650929 - DNA, 15 bp, Homo sapiens
taaccaggtgtggcg

SEQ ID NO: 650930 - DNA, 15 bp, Homo sapiens
aaccaggtgtggcgg

SEQ ID NO: 650931 - DNA, 15 bp, Homo sapiens
accaggtgtggcggg

SEQ ID NO: 650932 - DNA, 15 bp, Homo sapiens
ccaggtgtggcgggg

SEQ ID NO: 650933 - DNA, 15 bp, Homo sapiens
caggtgtggcggggg

SEQ ID NO: 650934 - DNA, 15 bp, Homo sapiens
aggtgtggcgggggt

SEQ ID NO: 650935 - DNA, 15 bp, Homo sapiens
ggtgtggcgggggtc

SEQ ID NO: 650936 - DNA, 15 bp, Homo sapiens
gtgtggcgggggtcc

SEQ ID NO: 650937 - DNA, 15 bp, Homo sapiens
tgtggcgggggtcca

SEQ ID NO: 650938 - DNA, 15 bp, Homo sapiens
gtggcgggggtccag

SEQ ID NO: 650939 - DNA, 15 bp, Homo sapiens
tggcgggggtccagg

SEQ ID NO: 650940 - DNA, 15 bp, Homo sapiens
ggcgggggtccagga

SEQ ID NO: 650941 - DNA, 15 bp, Homo sapiens
gcgggggtccaggaa

SEQ ID NO: 650942 - DNA, 15 bp, Homo sapiens
cgggggtccaggaag

SEQ ID NO: 650943 - DNA, 15 bp, Homo sapiens
gggggtccaggaagg

SEQ ID NO: 650944 - DNA, 15 bp, Homo sapiens
ggggtccaggaaggc

SEQ ID NO: 650945 - DNA, 15 bp, Homo sapiens
gggtccaggaaggct

SEQ ID NO: 650946 - DNA, 15 bp, Homo sapiens
ggtccaggaaggctt

SEQ ID NO: 650947 - DNA, 15 bp, Homo sapiens
gtccaggaaggcttc

SEQ ID NO: 650948 - DNA, 15 bp, Homo sapiens
tccaggaaggcttct

SEQ ID NO: 650949 - DNA, 15 bp, Homo sapiens
ccaggaaggcttctt

SEQ ID NO: 650950 - DNA, 15 bp, Homo sapiens
caggaaggcttctta

SEQ ID NO: 650951 - DNA, 15 bp, Homo sapiens
aggaaggcttcttat

SEQ ID NO: 650952 - DNA, 15 bp, Homo sapiens
ggaaggcttcttatc

SEQ ID NO: 650953 - DNA, 15 bp, Homo sapiens
gaaggcttcttatcc

SEQ ID NO: 650954 - DNA, 15 bp, Homo sapiens
aaggcttcttatcct

SEQ ID NO: 650955 - DNA, 15 bp, Homo sapiens
aggcttcttatcctg

SEQ ID NO: 650956 - DNA, 15 bp, Homo sapiens
ggcttcttatcctgc

SEQ ID NO: 650957 - DNA, 15 bp, Homo sapiens
gcttcttatcctgct

SEQ ID NO: 650958 - DNA, 15 bp, Homo sapiens
cttcttatcctgctc

SEQ ID NO: 650959 - DNA, 15 bp, Homo sapiens
ttcttatcctgctcc

SEQ ID NO: 650960 - DNA, 15 bp, Homo sapiens
tcttatcctgctccc

SEQ ID NO: 650961 - DNA, 15 bp, Homo sapiens
cttatcctgctccct

SEQ ID NO: 650962 - DNA, 15 bp, Homo sapiens
ttatcctgctccctc

SEQ ID NO: 650963 - DNA, 15 bp, Homo sapiens
tatcctgctccctct

SEQ ID NO: 650964 - DNA, 15 bp, Homo sapiens
atcctgctccctctc

SEQ ID NO: 650965 - DNA, 15 bp, Homo sapiens
tcctgctccctctcc

SEQ ID NO: 650966 - DNA, 15 bp, Homo sapiens
cctgctccctctccc

SEQ ID NO: 650967 - DNA, 15 bp, Homo sapiens
ctgctccctctccca

SEQ ID NO: 650968 - DNA, 15 bp, Homo sapiens
tgctccctctcccaa

SEQ ID NO: 650969 - DNA, 15 bp, Homo sapiens
gctccctctcccaag

SEQ ID NO: 650970 - DNA, 15 bp, Homo sapiens
ctccctctcccaagg

SEQ ID NO: 650971 - DNA, 15 bp, Homo sapiens
tccctctcccaaggc

SEQ ID NO: 650972 - DNA, 15 bp, Homo sapiens
ccctctcccaaggcc

SEQ ID NO: 650973 - DNA, 15 bp, Homo sapiens
cctctcccaaggcct

SEQ ID NO: 650974 - DNA, 15 bp, Homo sapiens
ctctcccaaggcctt

SEQ ID NO: 650975 - DNA, 15 bp, Homo sapiens
tctcccaaggccttt

SEQ ID NO: 650976 - DNA, 15 bp, Homo sapiens
ctcccaaggcctttc

SEQ ID NO: 650977 - DNA, 15 bp, Homo sapiens
tcccaaggcctttcc

SEQ ID NO: 650978 - DNA, 15 bp, Homo sapiens
cccaaggcctttcct

SEQ ID NO: 650979 - DNA, 15 bp, Homo sapiens
ccaaggcctttcctc

SEQ ID NO: 650980 - DNA, 15 bp, Homo sapiens
caaggcctttcctcc

SEQ ID NO: 650981 - DNA, 15 bp, Homo sapiens
aaggcctttcctcct

SEQ ID NO: 650982 - DNA, 15 bp, Homo sapiens
aggcctttcctcctt

SEQ ID NO: 650983 - DNA, 15 bp, Homo sapiens
ggcctttcctcctta

SEQ ID NO: 650984 - DNA, 15 bp, Homo sapiens
gcctttcctccttag

SEQ ID NO: 650985 - DNA, 15 bp, Homo sapiens
cctttcctccttagc

SEQ ID NO: 650986 - DNA, 15 bp, Homo sapiens
ctttcctccttagct

SEQ ID NO: 650987 - DNA, 15 bp, Homo sapiens
tttcctccttagctt

SEQ ID NO: 650988 - DNA, 15 bp, Homo sapiens
ttcctccttagctta

SEQ ID NO: 650989 - DNA, 15 bp, Homo sapiens
tcctccttagcttat

SEQ ID NO: 650990 - DNA, 15 bp, Homo sapiens
cctccttagcttatg

SEQ ID NO: 650991 - DNA, 15 bp, Homo sapiens
ctccttagcttatgg

SEQ ID NO: 650992 - DNA, 15 bp, Homo sapiens
tccttagcttatggc

SEQ ID NO: 650993 - DNA, 15 bp, Homo sapiens
ccttagcttatggct

SEQ ID NO: 650994 - DNA, 15 bp, Homo sapiens
cttagcttatggctc

SEQ ID NO: 650995 - DNA, 15 bp, Homo sapiens
ttagcttatggctct

SEQ ID NO: 650996 - DNA, 15 bp, Homo sapiens
tagcttatggctctc

SEQ ID NO: 650997 - DNA, 15 bp, Homo sapiens
agcttatggctctct

SEQ ID NO: 650998 - DNA, 15 bp, Homo sapiens
gcttatggctctctc

SEQ ID NO: 650999 - DNA, 15 bp, Homo sapiens
cttatggctctctct

SEQ ID NO: 651000 - DNA, 15 bp, Homo sapiens
ttatggctctctctt

SEQ ID NO: 651001 - DNA, 15 bp, Homo sapiens
tatggctctctcttg

SEQ ID NO: 651002 - DNA, 15 bp, Homo sapiens
atggctctctcttgt

SEQ ID NO: 651003 - DNA, 15 bp, Homo sapiens
tggctctctcttgtt

SEQ ID NO: 651004 - DNA, 15 bp, Homo sapiens
ggctctctcttgttg

SEQ ID NO: 651005 - DNA, 15 bp, Homo sapiens
gctctctcttgttgc

SEQ ID NO: 651006 - DNA, 15 bp, Homo sapiens
ctctctcttgttgca

SEQ ID NO: 651007 - DNA, 15 bp, Homo sapiens
tctctcttgttgcaa

SEQ ID NO: 651008 - DNA, 15 bp, Homo sapiens
ctctcttgttgcaac

SEQ ID NO: 651009 - DNA, 15 bp, Homo sapiens
tctcttgttgcaact

SEQ ID NO: 651010 - DNA, 15 bp, Homo sapiens
ctcttgttgcaactg

SEQ ID NO: 651011 - DNA, 15 bp, Homo sapiens
tcttgttgcaactgg

SEQ ID NO: 651012 - DNA, 15 bp, Homo sapiens
cttgttgcaactgga

SEQ ID NO: 651013 - DNA, 15 bp, Homo sapiens
ttgttgcaactggac

SEQ ID NO: 651014 - DNA, 15 bp, Homo sapiens
tgttgcaactggact

SEQ ID NO: 651015 - DNA, 15 bp, Homo sapiens
gttgcaactggactc

SEQ ID NO: 651016 - DNA, 15 bp, Homo sapiens
ttgcaactggactct

SEQ ID NO: 651017 - DNA, 15 bp, Homo sapiens
tgcaactggactctg

SEQ ID NO: 651018 - DNA, 15 bp, Homo sapiens
gcaactggactctga

SEQ ID NO: 651019 - DNA, 15 bp, Homo sapiens
caactggactctgat

SEQ ID NO: 651020 - DNA, 15 bp, Homo sapiens
aactggactctgatc

SEQ ID NO: 651021 - DNA, 15 bp, Homo sapiens
actggactctgatca

SEQ ID NO: 651022 - DNA, 15 bp, Homo sapiens
ctggactctgatcat

SEQ ID NO: 651023 - DNA, 15 bp, Homo sapiens
tggactctgatcatt

SEQ ID NO: 651024 - DNA, 15 bp, Homo sapiens
ggactctgatcattg

SEQ ID NO: 651025 - DNA, 15 bp, Homo sapiens
gactctgatcattgt

SEQ ID NO: 651026 - DNA, 15 bp, Homo sapiens
actctgatcattgtt

SEQ ID NO: 651027 - DNA, 15 bp, Homo sapiens
ctctgatcattgttt

SEQ ID NO: 651028 - DNA, 15 bp, Homo sapiens
tctgatcattgtttg

SEQ ID NO: 651029 - DNA, 15 bp, Homo sapiens
ctgatcattgtttga

SEQ ID NO: 651030 - DNA, 15 bp, Homo sapiens
tgatcattgtttgaa

SEQ ID NO: 651031 - DNA, 15 bp, Homo sapiens
gatcattgtttgaat

SEQ ID NO: 651032 - DNA, 15 bp, Homo sapiens
atcattgtttgaatt

SEQ ID NO: 651033 - DNA, 15 bp, Homo sapiens
tcattgtttgaattc

SEQ ID NO: 651034 - DNA, 15 bp, Homo sapiens
cattgtttgaattct

SEQ ID NO: 651035 - DNA, 15 bp, Homo sapiens
attgtttgaattctc

SEQ ID NO: 651036 - DNA, 15 bp, Homo sapiens
ttgtttgaattctca

SEQ ID NO: 651037 - DNA, 15 bp, Homo sapiens
tgtttgaattctcag

SEQ ID NO: 651038 - DNA, 15 bp, Homo sapiens
gtttgaattctcagc

SEQ ID NO: 651039 - DNA, 15 bp, Homo sapiens
tttgaattctcagct

SEQ ID NO: 651040 - DNA, 15 bp, Homo sapiens
ttgaattctcagcta

SEQ ID NO: 651041 - DNA, 15 bp, Homo sapiens
tgaattctcagctaa

SEQ ID NO: 651042 - DNA, 15 bp, Homo sapiens
gaattctcagctaaa

SEQ ID NO: 651043 - DNA, 15 bp, Homo sapiens
aattctcagctaaat

SEQ ID NO: 651044 - DNA, 15 bp, Homo sapiens
attctcagctaaatg

SEQ ID NO: 651045 - DNA, 15 bp, Homo sapiens
ttctcagctaaatgc

SEQ ID NO: 651046 - DNA, 15 bp, Homo sapiens
tctcagctaaatgcc

SEQ ID NO: 651047 - DNA, 15 bp, Homo sapiens
ctcagctaaatgcca

SEQ ID NO: 651048 - DNA, 15 bp, Homo sapiens
tcagctaaatgccac

SEQ ID NO: 651049 - DNA, 15 bp, Homo sapiens
cagctaaatgccact

SEQ ID NO: 651050 - DNA, 15 bp, Homo sapiens
agctaaatgccactt

SEQ ID NO: 651051 - DNA, 15 bp, Homo sapiens
gctaaatgccacttt

SEQ ID NO: 651052 - DNA, 15 bp, Homo sapiens
ctaaatgccactttc

SEQ ID NO: 651053 - DNA, 15 bp, Homo sapiens
taaatgccactttcc

SEQ ID NO: 651054 - DNA, 15 bp, Homo sapiens
aaatgccactttccc

SEQ ID NO: 651055 - DNA, 15 bp, Homo sapiens
aatgccactttccca

SEQ ID NO: 651056 - DNA, 15 bp, Homo sapiens
atgccactttcccag

SEQ ID NO: 651057 - DNA, 15 bp, Homo sapiens
tgccactttcccagt

SEQ ID NO: 651058 - DNA, 15 bp, Homo sapiens
gccactttcccagtc

SEQ ID NO: 651059 - DNA, 15 bp, Homo sapiens
ccactttcccagtca

SEQ ID NO: 651060 - DNA, 15 bp, Homo sapiens
cactttcccagtcag

SEQ ID NO: 651061 - DNA, 15 bp, Homo sapiens
actttcccagtcagg

SEQ ID NO: 651062 - DNA, 15 bp, Homo sapiens
ctttcccagtcaggc

SEQ ID NO: 651063 - DNA, 15 bp, Homo sapiens
tttcccagtcaggcc

SEQ ID NO: 651064 - DNA, 15 bp, Homo sapiens
ttcccagtcaggcct

SEQ ID NO: 651065 - DNA, 15 bp, Homo sapiens
tcccagtcaggcctt

SEQ ID NO: 651066 - DNA, 15 bp, Homo sapiens
cccagtcaggccttt

SEQ ID NO: 651067 - DNA, 15 bp, Homo sapiens
ccagtcaggcctttt

SEQ ID NO: 651068 - DNA, 15 bp, Homo sapiens
cagtcaggcctttta

SEQ ID NO: 651069 - DNA, 15 bp, Homo sapiens
agtcaggccttttac

SEQ ID NO: 651070 - DNA, 15 bp, Homo sapiens
gtcaggccttttaca

SEQ ID NO: 651071 - DNA, 15 bp, Homo sapiens
tcaggccttttacac

SEQ ID NO: 651072 - DNA, 15 bp, Homo sapiens
caggccttttacact

SEQ ID NO: 651073 - DNA, 15 bp, Homo sapiens
aggccttttacactc

SEQ ID NO: 651074 - DNA, 15 bp, Homo sapiens
ggccttttacactca

SEQ ID NO: 651075 - DNA, 15 bp, Homo sapiens
gccttttacactcac

SEQ ID NO: 651076 - DNA, 15 bp, Homo sapiens
ccttttacactcacc

SEQ ID NO: 651077 - DNA, 15 bp, Homo sapiens
cttttacactcaccc

SEQ ID NO: 651078 - DNA, 15 bp, Homo sapiens
ttttacactcaccca

SEQ ID NO: 651079 - DNA, 15 bp, Homo sapiens
tttacactcacccat

SEQ ID NO: 651080 - DNA, 15 bp, Homo sapiens
ttacactcacccatt

SEQ ID NO: 651081 - DNA, 15 bp, Homo sapiens
tacactcacccattt

SEQ ID NO: 651082 - DNA, 15 bp, Homo sapiens
acactcacccatttt

SEQ ID NO: 651083 - DNA, 15 bp, Homo sapiens
cactcacccattttt

SEQ ID NO: 651084 - DNA, 15 bp, Homo sapiens
actcacccatttttc

SEQ ID NO: 651085 - DNA, 15 bp, Homo sapiens
ctcacccatttttca

SEQ ID NO: 651086 - DNA, 15 bp, Homo sapiens
tcacccatttttcat

SEQ ID NO: 651087 - DNA, 15 bp, Homo sapiens
cacccatttttcatt

SEQ ID NO: 651088 - DNA, 15 bp, Homo sapiens
acccatttttcattc

SEQ ID NO: 651089 - DNA, 15 bp, Homo sapiens
cccatttttcattct

SEQ ID NO: 651090 - DNA, 15 bp, Homo sapiens
ccatttttcattctc

SEQ ID NO: 651091 - DNA, 15 bp, Homo sapiens
catttttcattctct

SEQ ID NO: 651092 - DNA, 15 bp, Homo sapiens
atttttcattctctt

SEQ ID NO: 651093 - DNA, 15 bp, Homo sapiens
tttttcattctcttt

SEQ ID NO: 651094 - DNA, 15 bp, Homo sapiens
ttttcattctctttt

SEQ ID NO: 651095 - DNA, 15 bp, Homo sapiens
tttcattctcttttg

SEQ ID NO: 651096 - DNA, 15 bp, Homo sapiens
ttcattctcttttgt

SEQ ID NO: 651097 - DNA, 15 bp, Homo sapiens
tcattctcttttgtg

SEQ ID NO: 651098 - DNA, 15 bp, Homo sapiens
cattctcttttgtga

SEQ ID NO: 651099 - DNA, 15 bp, Homo sapiens
attctcttttgtgat

SEQ ID NO: 651100 - DNA, 15 bp, Homo sapiens
ttctcttttgtgatc

SEQ ID NO: 651101 - DNA, 15 bp, Homo sapiens
tctcttttgtgatct

SEQ ID NO: 651102 - DNA, 15 bp, Homo sapiens
ctcttttgtgatctg

SEQ ID NO: 651103 - DNA, 15 bp, Homo sapiens
tcttttgtgatctgc

SEQ ID NO: 651104 - DNA, 15 bp, Homo sapiens
cttttgtgatctgct

SEQ ID NO: 651105 - DNA, 15 bp, Homo sapiens
ttttgtgatctgctg

SEQ ID NO: 651106 - DNA, 15 bp, Homo sapiens
tttgtgatctgctgt

SEQ ID NO: 651107 - DNA, 15 bp, Homo sapiens
ttgtgatctgctgta

SEQ ID NO: 651108 - DNA, 15 bp, Homo sapiens
tgtgatctgctgtac

SEQ ID NO: 651109 - DNA, 15 bp, Homo sapiens
gtgatctgctgtact

SEQ ID NO: 651110 - DNA, 15 bp, Homo sapiens
tgatctgctgtactt

SEQ ID NO: 651111 - DNA, 15 bp, Homo sapiens
gatctgctgtacttt

SEQ ID NO: 651112 - DNA, 15 bp, Homo sapiens
atctgctgtactttt

SEQ ID NO: 651113 - DNA, 15 bp, Homo sapiens
tctgctgtacttttt

SEQ ID NO: 651114 - DNA, 15 bp, Homo sapiens
ctgctgtactttttt

SEQ ID NO: 651115 - DNA, 15 bp, Homo sapiens
tgctgtacttttttt

SEQ ID NO: 651116 - DNA, 15 bp, Homo sapiens
gctgtactttttttt

SEQ ID NO: 651117 - DNA, 15 bp, Homo sapiens
ctgtacttttttttc

SEQ ID NO: 651118 - DNA, 15 bp, Homo sapiens
tgtacttttttttca

SEQ ID NO: 651119 - DNA, 15 bp, Homo sapiens
gtacttttttttcaa

SEQ ID NO: 651120 - DNA, 15 bp, Homo sapiens
tacttttttttcaaa

SEQ ID NO: 651121 - DNA, 15 bp, Homo sapiens
acttttttttcaaag

SEQ ID NO: 651122 - DNA, 15 bp, Homo sapiens
cttttttttcaaagc

SEQ ID NO: 651123 - DNA, 15 bp, Homo sapiens
ttttttttcaaagca

SEQ ID NO: 651124 - DNA, 15 bp, Homo sapiens
tttttttcaaagcac

SEQ ID NO: 651125 - DNA, 15 bp, Homo sapiens
ttttttcaaagcact

SEQ ID NO: 651126 - DNA, 15 bp, Homo sapiens
tttttcaaagcactt

SEQ ID NO: 651127 - DNA, 15 bp, Homo sapiens
ttttcaaagcacttt

SEQ ID NO: 651128 - DNA, 15 bp, Homo sapiens
tttcaaagcactttt

SEQ ID NO: 651129 - DNA, 15 bp, Homo sapiens
ttcaaagcacttttg

SEQ ID NO: 651130 - DNA, 15 bp, Homo sapiens
tcaaagcacttttgt

SEQ ID NO: 651131 - DNA, 15 bp, Homo sapiens
caaagcacttttgtg

SEQ ID NO: 651132 - DNA, 15 bp, Homo sapiens
aaagcacttttgtga

SEQ ID NO: 651133 - DNA, 15 bp, Homo sapiens
aagcacttttgtgat

SEQ ID NO: 651134 - DNA, 15 bp, Homo sapiens
agcacttttgtgata

SEQ ID NO: 651135 - DNA, 15 bp, Homo sapiens
gcacttttgtgatat

SEQ ID NO: 651136 - DNA, 15 bp, Homo sapiens
cacttttgtgatatg

SEQ ID NO: 651137 - DNA, 15 bp, Homo sapiens
acttttgtgatatgg

SEQ ID NO: 651138 - DNA, 15 bp, Homo sapiens
cttttgtgatatgga

SEQ ID NO: 651139 - DNA, 15 bp, Homo sapiens
ttttgtgatatggaa

SEQ ID NO: 651140 - DNA, 15 bp, Homo sapiens
tttgtgatatggaat

SEQ ID NO: 651141 - DNA, 15 bp, Homo sapiens
ttgtgatatggaata

SEQ ID NO: 651142 - DNA, 15 bp, Homo sapiens
tgtgatatggaatat

SEQ ID NO: 651143 - DNA, 15 bp, Homo sapiens
gtgatatggaatatt

SEQ ID NO: 651144 - DNA, 15 bp, Homo sapiens
tgatatggaatattt

SEQ ID NO: 651145 - DNA, 15 bp, Homo sapiens
gatatggaatatttg

SEQ ID NO: 651146 - DNA, 15 bp, Homo sapiens
atatggaatatttgc

SEQ ID NO: 651147 - DNA, 15 bp, Homo sapiens
tatggaatatttgca

SEQ ID NO: 651148 - DNA, 15 bp, Homo sapiens
atggaatatttgcat

SEQ ID NO: 651149 - DNA, 15 bp, Homo sapiens
tggaatatttgcatt

SEQ ID NO: 651150 - DNA, 15 bp, Homo sapiens
ggaatatttgcattt

SEQ ID NO: 651151 - DNA, 15 bp, Homo sapiens
gaatatttgcattta

SEQ ID NO: 651152 - DNA, 15 bp, Homo sapiens
aatatttgcatttat

SEQ ID NO: 651153 - DNA, 15 bp, Homo sapiens
atatttgcatttatt

SEQ ID NO: 651154 - DNA, 15 bp, Homo sapiens
tatttgcatttattt

SEQ ID NO: 651155 - DNA, 15 bp, Homo sapiens
atttgcatttattta

SEQ ID NO: 651156 - DNA, 15 bp, Homo sapiens
tttgcatttatttac

SEQ ID NO: 651157 - DNA, 15 bp, Homo sapiens
ttgcatttatttaca

SEQ ID NO: 651158 - DNA, 15 bp, Homo sapiens
tgcatttatttacac

SEQ ID NO: 651159 - DNA, 15 bp, Homo sapiens
gcatttatttacact

SEQ ID NO: 651160 - DNA, 15 bp, Homo sapiens
catttatttacactt

SEQ ID NO: 651161 - DNA, 15 bp, Homo sapiens
atttatttacacttg

SEQ ID NO: 651162 - DNA, 15 bp, Homo sapiens
tttatttacacttgt

SEQ ID NO: 651163 - DNA, 15 bp, Homo sapiens
ttatttacacttgtg

SEQ ID NO: 651164 - DNA, 15 bp, Homo sapiens
tatttacacttgtgc

SEQ ID NO: 651165 - DNA, 15 bp, Homo sapiens
atttacacttgtgcc

SEQ ID NO: 651166 - DNA, 15 bp, Homo sapiens
tttacacttgtgccc

SEQ ID NO: 651167 - DNA, 15 bp, Homo sapiens
ttacacttgtgccca

SEQ ID NO: 651168 - DNA, 15 bp, Homo sapiens
tacacttgtgcccac

SEQ ID NO: 651169 - DNA, 15 bp, Homo sapiens
acacttgtgcccacc

SEQ ID NO: 651170 - DNA, 15 bp, Homo sapiens
cacttgtgcccaccc

SEQ ID NO: 651171 - DNA, 15 bp, Homo sapiens
acttgtgcccacccg

SEQ ID NO: 651172 - DNA, 15 bp, Homo sapiens
cttgtgcccacccgt

SEQ ID NO: 651173 - DNA, 15 bp, Homo sapiens
ttgtgcccacccgtt

SEQ ID NO: 651174 - DNA, 15 bp, Homo sapiens
tgtgcccacccgttt

SEQ ID NO: 651175 - DNA, 15 bp, Homo sapiens
gtgcccacccgtttc

SEQ ID NO: 651176 - DNA, 15 bp, Homo sapiens
tgcccacccgtttct

SEQ ID NO: 651177 - DNA, 15 bp, Homo sapiens
gcccacccgtttcta

SEQ ID NO: 651178 - DNA, 15 bp, Homo sapiens
cccacccgtttctac

SEQ ID NO: 651179 - DNA, 15 bp, Homo sapiens
ccacccgtttctacc

SEQ ID NO: 651180 - DNA, 15 bp, Homo sapiens
cacccgtttctaccc

SEQ ID NO: 651181 - DNA, 15 bp, Homo sapiens
acccgtttctaccct

SEQ ID NO: 651182 - DNA, 15 bp, Homo sapiens
cccgtttctaccctc

SEQ ID NO: 651183 - DNA, 15 bp, Homo sapiens
ccgtttctaccctca

SEQ ID NO: 651184 - DNA, 15 bp, Homo sapiens
cgtttctaccctcag

SEQ ID NO: 651185 - DNA, 15 bp, Homo sapiens
gtttctaccctcaga

SEQ ID NO: 651186 - DNA, 15 bp, Homo sapiens
tttctaccctcagac

SEQ ID NO: 651187 - DNA, 15 bp, Homo sapiens
ttctaccctcagaca

SEQ ID NO: 651188 - DNA, 15 bp, Homo sapiens
tctaccctcagacag

SEQ ID NO: 651189 - DNA, 15 bp, Homo sapiens
ctaccctcagacagt

SEQ ID NO: 651190 - DNA, 15 bp, Homo sapiens
taccctcagacagta

SEQ ID NO: 651191 - DNA, 15 bp, Homo sapiens
accctcagacagtaa

SEQ ID NO: 651192 - DNA, 15 bp, Homo sapiens
ccctcagacagtaaa

SEQ ID NO: 651193 - DNA, 15 bp, Homo sapiens
cctcagacagtaaaa

SEQ ID NO: 651194 - DNA, 15 bp, Homo sapiens
ctcagacagtaaaat

SEQ ID NO: 651195 - DNA, 15 bp, Homo sapiens
tcagacagtaaaatc

SEQ ID NO: 651196 - DNA, 15 bp, Homo sapiens
cagacagtaaaatct

SEQ ID NO: 651197 - DNA, 15 bp, Homo sapiens
agacagtaaaatcta

SEQ ID NO: 651198 - DNA, 15 bp, Homo sapiens
gacagtaaaatctac

SEQ ID NO: 651199 - DNA, 15 bp, Homo sapiens
acagtaaaatctacg

SEQ ID NO: 651200 - DNA, 15 bp, Homo sapiens
cagtaaaatctacga

SEQ ID NO: 651201 - DNA, 15 bp, Homo sapiens
agtaaaatctacgag

SEQ ID NO: 651202 - DNA, 15 bp, Homo sapiens
gtaaaatctacgagg

SEQ ID NO: 651203 - DNA, 15 bp, Homo sapiens
taaaatctacgaggt

SEQ ID NO: 651204 - DNA, 15 bp, Homo sapiens
aaaatctacgaggtc

SEQ ID NO: 651205 - DNA, 15 bp, Homo sapiens
aaatctacgaggtca

SEQ ID NO: 651206 - DNA, 15 bp, Homo sapiens
aatctacgaggtcag

SEQ ID NO: 651207 - DNA, 15 bp, Homo sapiens
atctacgaggtcagg

SEQ ID NO: 651208 - DNA, 15 bp, Homo sapiens
tctacgaggtcaggg

SEQ ID NO: 651209 - DNA, 15 bp, Homo sapiens
ctacgaggtcaggga

SEQ ID NO: 651210 - DNA, 15 bp, Homo sapiens
tacgaggtcagggaa

SEQ ID NO: 651211 - DNA, 15 bp, Homo sapiens
acgaggtcagggaaa

SEQ ID NO: 651212 - DNA, 15 bp, Homo sapiens
cgaggtcagggaaac

SEQ ID NO: 651213 - DNA, 15 bp, Homo sapiens
gaggtcagggaaaca

SEQ ID NO: 651214 - DNA, 15 bp, Homo sapiens
aggtcagggaaacaa

SEQ ID NO: 651215 - DNA, 15 bp, Homo sapiens
ggtcagggaaacaaa

SEQ ID NO: 651216 - DNA, 15 bp, Homo sapiens
gtcagggaaacaaaa

SEQ ID NO: 651217 - DNA, 15 bp, Homo sapiens
tcagggaaacaaaaa

SEQ ID NO: 651218 - DNA, 15 bp, Homo sapiens
cagggaaacaaaaaa

SEQ ID NO: 651219 - DNA, 15 bp, Homo sapiens
agggaaacaaaaaat

SEQ ID NO: 651220 - DNA, 15 bp, Homo sapiens
gggaaacaaaaaatg

SEQ ID NO: 651221 - DNA, 15 bp, Homo sapiens
ggaaacaaaaaatga

SEQ ID NO: 651222 - DNA, 15 bp, Homo sapiens
gaaacaaaaaatgaa

SEQ ID NO: 651223 - DNA, 15 bp, Homo sapiens
aaacaaaaaatgaaa

SEQ ID NO: 651224 - DNA, 15 bp, Homo sapiens
aacaaaaaatgaaat

SEQ ID NO: 651225 - DNA, 15 bp, Homo sapiens
acaaaaaatgaaata

SEQ ID NO: 651226 - DNA, 15 bp, Homo sapiens
caaaaaatgaaatat

SEQ ID NO: 651227 - DNA, 15 bp, Homo sapiens
aaaaaatgaaatatc

SEQ ID NO: 651228 - DNA, 15 bp, Homo sapiens
aaaaatgaaatatct

SEQ ID NO: 651229 - DNA, 15 bp, Homo sapiens
aaaatgaaatatctg

SEQ ID NO: 651230 - DNA, 15 bp, Homo sapiens
aaatgaaatatctgt

SEQ ID NO: 651231 - DNA, 15 bp, Homo sapiens
aatgaaatatctgtt

SEQ ID NO: 651232 - DNA, 15 bp, Homo sapiens
atgaaatatctgttt

SEQ ID NO: 651233 - DNA, 15 bp, Homo sapiens
tgaaatatctgtttc

SEQ ID NO: 651234 - DNA, 15 bp, Homo sapiens
gaaatatctgtttca

SEQ ID NO: 651235 - DNA, 15 bp, Homo sapiens
aaatatctgtttcat

SEQ ID NO: 651236 - DNA, 15 bp, Homo sapiens
aatatctgtttcatt

SEQ ID NO: 651237 - DNA, 15 bp, Homo sapiens
atatctgtttcattt

SEQ ID NO: 651238 - DNA, 15 bp, Homo sapiens
tatctgtttcatttg

SEQ ID NO: 651239 - DNA, 15 bp, Homo sapiens
atctgtttcatttgc

SEQ ID NO: 651240 - DNA, 15 bp, Homo sapiens
tctgtttcatttgcc

SEQ ID NO: 651241 - DNA, 15 bp, Homo sapiens
ctgtttcatttgccc

SEQ ID NO: 651242 - DNA, 15 bp, Homo sapiens
tgtttcatttgccct

SEQ ID NO: 651243 - DNA, 15 bp, Homo sapiens
gtttcatttgccctg

SEQ ID NO: 651244 - DNA, 15 bp, Homo sapiens
tttcatttgccctgc

SEQ ID NO: 651245 - DNA, 15 bp, Homo sapiens
ttcatttgccctgca

SEQ ID NO: 651246 - DNA, 15 bp, Homo sapiens
tcatttgccctgcaa

SEQ ID NO: 651247 - DNA, 15 bp, Homo sapiens
catttgccctgcaag

SEQ ID NO: 651248 - DNA, 15 bp, Homo sapiens
atttgccctgcaagt

SEQ ID NO: 651249 - DNA, 15 bp, Homo sapiens
tttgccctgcaagta

SEQ ID NO: 651250 - DNA, 15 bp, Homo sapiens
ttgccctgcaagtaa

SEQ ID NO: 651251 - DNA, 15 bp, Homo sapiens
tgccctgcaagtaaa

SEQ ID NO: 651252 - DNA, 15 bp, Homo sapiens
gccctgcaagtaaat

SEQ ID NO: 651253 - DNA, 15 bp, Homo sapiens
ccctgcaagtaaata

SEQ ID NO: 651254 - DNA, 15 bp, Homo sapiens
cctgcaagtaaatag

SEQ ID NO: 651255 - DNA, 15 bp, Homo sapiens
ctgcaagtaaatagg

SEQ ID NO: 651256 - DNA, 15 bp, Homo sapiens
tgcaagtaaataggg

SEQ ID NO: 651257 - DNA, 15 bp, Homo sapiens
gcaagtaaataggga

SEQ ID NO: 651258 - DNA, 15 bp, Homo sapiens
caagtaaatagggag

SEQ ID NO: 651259 - DNA, 15 bp, Homo sapiens
aagtaaatagggagt

SEQ ID NO: 651260 - DNA, 15 bp, Homo sapiens
agtaaatagggagtc

SEQ ID NO: 651261 - DNA, 15 bp, Homo sapiens
gtaaatagggagtcg

SEQ ID NO: 651262 - DNA, 15 bp, Homo sapiens
taaatagggagtcgt

SEQ ID NO: 651263 - DNA, 15 bp, Homo sapiens
aaatagggagtcgtt

SEQ ID NO: 651264 - DNA, 15 bp, Homo sapiens
aatagggagtcgttt

SEQ ID NO: 651265 - DNA, 15 bp, Homo sapiens
atagggagtcgtttt

SEQ ID NO: 651266 - DNA, 15 bp, Homo sapiens
tagggagtcgtttta

SEQ ID NO: 651267 - DNA, 15 bp, Homo sapiens
agggagtcgttttat

SEQ ID NO: 651268 - DNA, 15 bp, Homo sapiens
gggagtcgttttata

SEQ ID NO: 651269 - DNA, 15 bp, Homo sapiens
ggagtcgttttatat

SEQ ID NO: 651270 - DNA, 15 bp, Homo sapiens
gagtcgttttatatc

SEQ ID NO: 651271 - DNA, 15 bp, Homo sapiens
agtcgttttatatca

SEQ ID NO: 651272 - DNA, 15 bp, Homo sapiens
gtcgttttatatcaa

SEQ ID NO: 651273 - DNA, 15 bp, Homo sapiens
tcgttttatatcaaa

SEQ ID NO: 651274 - DNA, 15 bp, Homo sapiens
cgttttatatcaaat

SEQ ID NO: 651275 - DNA, 15 bp, Homo sapiens
gttttatatcaaatt

SEQ ID NO: 651276 - DNA, 15 bp, Homo sapiens
ttttatatcaaattc

SEQ ID NO: 651277 - DNA, 15 bp, Homo sapiens
tttatatcaaattct

SEQ ID NO: 651278 - DNA, 15 bp, Homo sapiens
ttatatcaaattctt

SEQ ID NO: 651279 - DNA, 15 bp, Homo sapiens
tatatcaaattctta

SEQ ID NO: 651280 - DNA, 15 bp, Homo sapiens
atatcaaattcttaa

SEQ ID NO: 651281 - DNA, 15 bp, Homo sapiens
tatcaaattcttaag

SEQ ID NO: 651282 - DNA, 15 bp, Homo sapiens
atcaaattcttaagt

SEQ ID NO: 651283 - DNA, 15 bp, Homo sapiens
tcaaattcttaagta

SEQ ID NO: 651284 - DNA, 15 bp, Homo sapiens
caaattcttaagtaa

SEQ ID NO: 651285 - DNA, 15 bp, Homo sapiens
aaattcttaagtaaa

SEQ ID NO: 651286 - DNA, 15 bp, Homo sapiens
aattcttaagtaaaa

SEQ ID NO: 651287 - DNA, 15 bp, Homo sapiens
attcttaagtaaaat

SEQ ID NO: 651288 - DNA, 15 bp, Homo sapiens
ttcttaagtaaaatt

SEQ ID NO: 651289 - DNA, 15 bp, Homo sapiens
tcttaagtaaaattt

SEQ ID NO: 651290 - DNA, 15 bp, Homo sapiens
cttaagtaaaatttt

SEQ ID NO: 651291 - DNA, 15 bp, Homo sapiens
ttaagtaaaattttt

SEQ ID NO: 651292 - DNA, 15 bp, Homo sapiens
taagtaaaatttttt

SEQ ID NO: 651293 - DNA, 15 bp, Homo sapiens
aagtaaaatttttta

SEQ ID NO: 651294 - DNA, 15 bp, Homo sapiens
agtaaaattttttag

SEQ ID NO: 651295 - DNA, 15 bp, Homo sapiens
gtaaaattttttagc

SEQ ID NO: 651296 - DNA, 15 bp, Homo sapiens
taaaattttttagct

SEQ ID NO: 651297 - DNA, 15 bp, Homo sapiens
aaaattttttagctc

SEQ ID NO: 651298 - DNA, 15 bp, Homo sapiens
aaattttttagctcc

SEQ ID NO: 651299 - DNA, 15 bp, Homo sapiens
aattttttagctcca

SEQ ID NO: 651300 - DNA, 15 bp, Homo sapiens
attttttagctccag

SEQ ID NO: 651301 - DNA, 15 bp, Homo sapiens
ttttttagctccaga

SEQ ID NO: 651302 - DNA, 15 bp, Homo sapiens
tttttagctccagat

SEQ ID NO: 651303 - DNA, 15 bp, Homo sapiens
ttttagctccagatt

SEQ ID NO: 651304 - DNA, 15 bp, Homo sapiens
tttagctccagattc

SEQ ID NO: 651305 - DNA, 15 bp, Homo sapiens
ttagctccagattcc

SEQ ID NO: 651306 - DNA, 15 bp, Homo sapiens
tagctccagattccg

SEQ ID NO: 651307 - DNA, 15 bp, Homo sapiens
agctccagattccgg

SEQ ID NO: 651308 - DNA, 15 bp, Homo sapiens
gctccagattccgga

SEQ ID NO: 651309 - DNA, 15 bp, Homo sapiens
ctccagattccggat

SEQ ID NO: 651310 - DNA, 15 bp, Homo sapiens
tccagattccggata

SEQ ID NO: 651311 - DNA, 15 bp, Homo sapiens
ccagattccggatag

SEQ ID NO: 651312 - DNA, 15 bp, Homo sapiens
cagattccggataga

SEQ ID NO: 651313 - DNA, 15 bp, Homo sapiens
agattccggatagag

SEQ ID NO: 651314 - DNA, 15 bp, Homo sapiens
gattccggatagagc

SEQ ID NO: 651315 - DNA, 15 bp, Homo sapiens
attccggatagagca

SEQ ID NO: 651316 - DNA, 15 bp, Homo sapiens
ttccggatagagcaa

SEQ ID NO: 651317 - DNA, 15 bp, Homo sapiens
tccggatagagcaaa

SEQ ID NO: 651318 - DNA, 15 bp, Homo sapiens
ccggatagagcaaac

SEQ ID NO: 651319 - DNA, 15 bp, Homo sapiens
cggatagagcaaaca

SEQ ID NO: 651320 - DNA, 15 bp, Homo sapiens
ggatagagcaaacaa

SEQ ID NO: 651321 - DNA, 15 bp, Homo sapiens
gatagagcaaacaat

SEQ ID NO: 651322 - DNA, 15 bp, Homo sapiens
atagagcaaacaatg

SEQ ID NO: 651323 - DNA, 15 bp, Homo sapiens
tagagcaaacaatga

SEQ ID NO: 651324 - DNA, 15 bp, Homo sapiens
agagcaaacaatgaa

SEQ ID NO: 651325 - DNA, 15 bp, Homo sapiens
gagcaaacaatgaaa

SEQ ID NO: 651326 - DNA, 15 bp, Homo sapiens
agcaaacaatgaaaa

SEQ ID NO: 651327 - DNA, 15 bp, Homo sapiens
gcaaacaatgaaaaa

SEQ ID NO: 651328 - DNA, 15 bp, Homo sapiens
caaacaatgaaaaat

SEQ ID NO: 651329 - DNA, 15 bp, Homo sapiens
aaacaatgaaaaata

SEQ ID NO: 651330 - DNA, 15 bp, Homo sapiens
aacaatgaaaaatat

SEQ ID NO: 651331 - DNA, 15 bp, Homo sapiens
acaatgaaaaatatc

SEQ ID NO: 651332 - DNA, 15 bp, Homo sapiens
caatgaaaaatatca

SEQ ID NO: 651333 - DNA, 15 bp, Homo sapiens
aatgaaaaatatcaa

SEQ ID NO: 651334 - DNA, 15 bp, Homo sapiens
atgaaaaatatcaaa

SEQ ID NO: 651335 - DNA, 15 bp, Homo sapiens
tgaaaaatatcaaaa

SEQ ID NO: 651336 - DNA, 15 bp, Homo sapiens
gaaaaatatcaaaac

SEQ ID NO: 651337 - DNA, 15 bp, Homo sapiens
aaaaatatcaaaacc

SEQ ID NO: 651338 - DNA, 15 bp, Homo sapiens
aaaatatcaaaacct

SEQ ID NO: 651339 - DNA, 15 bp, Homo sapiens
aaatatcaaaacctt

SEQ ID NO: 651340 - DNA, 15 bp, Homo sapiens
aatatcaaaaccttg

SEQ ID NO: 651341 - DNA, 15 bp, Homo sapiens
atatcaaaaccttgt

SEQ ID NO: 651342 - DNA, 15 bp, Homo sapiens
tatcaaaaccttgta

SEQ ID NO: 651343 - DNA, 15 bp, Homo sapiens
atcaaaaccttgtat

SEQ ID NO: 651344 - DNA, 15 bp, Homo sapiens
tcaaaaccttgtata

SEQ ID NO: 651345 - DNA, 15 bp, Homo sapiens
caaaaccttgtatac

SEQ ID NO: 651346 - DNA, 15 bp, Homo sapiens
aaaaccttgtatacc

SEQ ID NO: 651347 - DNA, 15 bp, Homo sapiens
aaaccttgtatacca

SEQ ID NO: 651348 - DNA, 15 bp, Homo sapiens
aaccttgtataccag

SEQ ID NO: 651349 - DNA, 15 bp, Homo sapiens
accttgtataccaga

SEQ ID NO: 651350 - DNA, 15 bp, Homo sapiens
ccttgtataccagaa

SEQ ID NO: 651351 - DNA, 15 bp, Homo sapiens
cttgtataccagaaa

SEQ ID NO: 651352 - DNA, 15 bp, Homo sapiens
ttgtataccagaaat

SEQ ID NO: 651353 - DNA, 15 bp, Homo sapiens
tgtataccagaaatt

SEQ ID NO: 651354 - DNA, 15 bp, Homo sapiens
gtataccagaaattt

SEQ ID NO: 651355 - DNA, 15 bp, Homo sapiens
tataccagaaatttg

SEQ ID NO: 651356 - DNA, 15 bp, Homo sapiens
ataccagaaatttgc

SEQ ID NO: 651357 - DNA, 15 bp, Homo sapiens
taccagaaatttgct

SEQ ID NO: 651358 - DNA, 15 bp, Homo sapiens
accagaaatttgcta

SEQ ID NO: 651359 - DNA, 15 bp, Homo sapiens
ccagaaatttgctag

SEQ ID NO: 651360 - DNA, 15 bp, Homo sapiens
cagaaatttgctagc

SEQ ID NO: 651361 - DNA, 15 bp, Homo sapiens
agaaatttgctagct

SEQ ID NO: 651362 - DNA, 15 bp, Homo sapiens
gaaatttgctagctg

SEQ ID NO: 651363 - DNA, 15 bp, Homo sapiens
aaatttgctagctga

SEQ ID NO: 651364 - DNA, 15 bp, Homo sapiens
aatttgctagctgag

SEQ ID NO: 651365 - DNA, 15 bp, Homo sapiens
atttgctagctgaga

SEQ ID NO: 651366 - DNA, 15 bp, Homo sapiens
tttgctagctgagag

SEQ ID NO: 651367 - DNA, 15 bp, Homo sapiens
ttgctagctgagagc

SEQ ID NO: 651368 - DNA, 15 bp, Homo sapiens
tgctagctgagagct

SEQ ID NO: 651369 - DNA, 15 bp, Homo sapiens
gctagctgagagctt

SEQ ID NO: 651370 - DNA, 15 bp, Homo sapiens
ctagctgagagctta

SEQ ID NO: 651371 - DNA, 15 bp, Homo sapiens
tagctgagagcttaa

SEQ ID NO: 651372 - DNA, 15 bp, Homo sapiens
agctgagagcttaaa

SEQ ID NO: 651373 - DNA, 15 bp, Homo sapiens
gctgagagcttaaaa

SEQ ID NO: 651374 - DNA, 15 bp, Homo sapiens
ctgagagcttaaaat

SEQ ID NO: 651375 - DNA, 15 bp, Homo sapiens
tgagagcttaaaatt

SEQ ID NO: 651376 - DNA, 15 bp, Homo sapiens
gagagcttaaaattc

SEQ ID NO: 651377 - DNA, 15 bp, Homo sapiens
agagcttaaaattca

SEQ ID NO: 651378 - DNA, 15 bp, Homo sapiens
gagcttaaaattcaa

SEQ ID NO: 651379 - DNA, 15 bp, Homo sapiens
agcttaaaattcaaa

SEQ ID NO: 651380 - DNA, 15 bp, Homo sapiens
gcttaaaattcaaaa

SEQ ID NO: 651381 - DNA, 15 bp, Homo sapiens
cttaaaattcaaaat

SEQ ID NO: 651382 - DNA, 15 bp, Homo sapiens
ttaaaattcaaaatc

SEQ ID NO: 651383 - DNA, 15 bp, Homo sapiens
taaaattcaaaatct

SEQ ID NO: 651384 - DNA, 15 bp, Homo sapiens
aaaattcaaaatcta

SEQ ID NO: 651385 - DNA, 15 bp, Homo sapiens
aaattcaaaatctac

SEQ ID NO: 651386 - DNA, 15 bp, Homo sapiens
aattcaaaatctact

SEQ ID NO: 651387 - DNA, 15 bp, Homo sapiens
attcaaaatctactg

SEQ ID NO: 651388 - DNA, 15 bp, Homo sapiens
ttcaaaatctactgc

SEQ ID NO: 651389 - DNA, 15 bp, Homo sapiens
tcaaaatctactgct

SEQ ID NO: 651390 - DNA, 15 bp, Homo sapiens
caaaatctactgctt

SEQ ID NO: 651391 - DNA, 15 bp, Homo sapiens
aaaatctactgcttt

SEQ ID NO: 651392 - DNA, 15 bp, Homo sapiens
aaatctactgcttta

SEQ ID NO: 651393 - DNA, 15 bp, Homo sapiens
aatctactgctttaa

SEQ ID NO: 651394 - DNA, 15 bp, Homo sapiens
atctactgctttaag

SEQ ID NO: 651395 - DNA, 15 bp, Homo sapiens
tctactgctttaaga

SEQ ID NO: 651396 - DNA, 15 bp, Homo sapiens
ctactgctttaagat

SEQ ID NO: 651397 - DNA, 15 bp, Homo sapiens
tactgctttaagata

SEQ ID NO: 651398 - DNA, 15 bp, Homo sapiens
actgctttaagataa

SEQ ID NO: 651399 - DNA, 15 bp, Homo sapiens
ctgctttaagataaa

SEQ ID NO: 651400 - DNA, 15 bp, Homo sapiens
tgctttaagataaat

SEQ ID NO: 651401 - DNA, 15 bp, Homo sapiens
gctttaagataaata

SEQ ID NO: 651402 - DNA, 15 bp, Homo sapiens
ctttaagataaatac

SEQ ID NO: 651403 - DNA, 15 bp, Homo sapiens
tttaagataaataca

SEQ ID NO: 651404 - DNA, 15 bp, Homo sapiens
ttaagataaatacat

SEQ ID NO: 651405 - DNA, 15 bp, Homo sapiens
taagataaatacatt

SEQ ID NO: 651406 - DNA, 15 bp, Homo sapiens
aagataaatacattg

SEQ ID NO: 651407 - DNA, 15 bp, Homo sapiens
agataaatacattgc

SEQ ID NO: 651408 - DNA, 15 bp, Homo sapiens
gataaatacattgcc

SEQ ID NO: 651409 - DNA, 15 bp, Homo sapiens
ataaatacattgcca

SEQ ID NO: 651410 - DNA, 15 bp, Homo sapiens
taaatacattgccag

SEQ ID NO: 651411 - DNA, 15 bp, Homo sapiens
aaatacattgccagg

SEQ ID NO: 651412 - DNA, 15 bp, Homo sapiens
aatacattgccaggg

SEQ ID NO: 651413 - DNA, 15 bp, Homo sapiens
atacattgccaggga

SEQ ID NO: 651414 - DNA, 15 bp, Homo sapiens
tacattgccagggaa

SEQ ID NO: 651415 - DNA, 15 bp, Homo sapiens
acattgccagggaaa

SEQ ID NO: 651416 - DNA, 15 bp, Homo sapiens
cattgccagggaaaa

SEQ ID NO: 651417 - DNA, 15 bp, Homo sapiens
attgccagggaaaat

SEQ ID NO: 651418 - DNA, 15 bp, Homo sapiens
ttgccagggaaaatt

SEQ ID NO: 651419 - DNA, 15 bp, Homo sapiens
tgccagggaaaattg

SEQ ID NO: 651420 - DNA, 15 bp, Homo sapiens
gccagggaaaattga

SEQ ID NO: 651421 - DNA, 15 bp, Homo sapiens
ccagggaaaattgag

SEQ ID NO: 651422 - DNA, 15 bp, Homo sapiens
cagggaaaattgagt

SEQ ID NO: 651423 - DNA, 15 bp, Homo sapiens
agggaaaattgagta

SEQ ID NO: 651424 - DNA, 15 bp, Homo sapiens
gggaaaattgagtag

SEQ ID NO: 651425 - DNA, 15 bp, Homo sapiens
ggaaaattgagtagg

SEQ ID NO: 651426 - DNA, 15 bp, Homo sapiens
gaaaattgagtagga

SEQ ID NO: 651427 - DNA, 15 bp, Homo sapiens
aaaattgagtaggat

SEQ ID NO: 651428 - DNA, 15 bp, Homo sapiens
aaattgagtaggatt

SEQ ID NO: 651429 - DNA, 15 bp, Homo sapiens
aattgagtaggattt

SEQ ID NO: 651430 - DNA, 15 bp, Homo sapiens
attgagtaggatttt

SEQ ID NO: 651431 - DNA, 15 bp, Homo sapiens
ttgagtaggattttg

SEQ ID NO: 651432 - DNA, 15 bp, Homo sapiens
tgagtaggattttga

SEQ ID NO: 651433 - DNA, 15 bp, Homo sapiens
gagtaggattttgat

SEQ ID NO: 651434 - DNA, 15 bp, Homo sapiens
agtaggattttgatt

SEQ ID NO: 651435 - DNA, 15 bp, Homo sapiens
gtaggattttgattt

SEQ ID NO: 651436 - DNA, 15 bp, Homo sapiens
taggattttgatttg

SEQ ID NO: 651437 - DNA, 15 bp, Homo sapiens
aggattttgatttgc

SEQ ID NO: 651438 - DNA, 15 bp, Homo sapiens
ggattttgatttgca

SEQ ID NO: 651439 - DNA, 15 bp, Homo sapiens
gattttgatttgcaa

SEQ ID NO: 651440 - DNA, 15 bp, Homo sapiens
attttgatttgcaaa

SEQ ID NO: 651441 - DNA, 15 bp, Homo sapiens
ttttgatttgcaaat

SEQ ID NO: 651442 - DNA, 15 bp, Homo sapiens
tttgatttgcaaatg

SEQ ID NO: 651443 - DNA, 15 bp, Homo sapiens
ttgatttgcaaatgg

SEQ ID NO: 651444 - DNA, 15 bp, Homo sapiens
tgatttgcaaatgga

SEQ ID NO: 651445 - DNA, 15 bp, Homo sapiens
gatttgcaaatggaa

SEQ ID NO: 651446 - DNA, 15 bp, Homo sapiens
atttgcaaatggaag

SEQ ID NO: 651447 - DNA, 15 bp, Homo sapiens
tttgcaaatggaagt

SEQ ID NO: 651448 - DNA, 15 bp, Homo sapiens
ttgcaaatggaagtg

SEQ ID NO: 651449 - DNA, 15 bp, Homo sapiens
tgcaaatggaagtga

SEQ ID NO: 651450 - DNA, 15 bp, Homo sapiens
gcaaatggaagtgat

SEQ ID NO: 651451 - DNA, 15 bp, Homo sapiens
caaatggaagtgatt

SEQ ID NO: 651452 - DNA, 15 bp, Homo sapiens
aaatggaagtgatta

SEQ ID NO: 651453 - DNA, 15 bp, Homo sapiens
aatggaagtgattat

SEQ ID NO: 651454 - DNA, 15 bp, Homo sapiens
atggaagtgattatc

SEQ ID NO: 651455 - DNA, 15 bp, Homo sapiens
tggaagtgattatca

SEQ ID NO: 651456 - DNA, 15 bp, Homo sapiens
ggaagtgattatcag

SEQ ID NO: 651457 - DNA, 15 bp, Homo sapiens
gaagtgattatcaga

SEQ ID NO: 651458 - DNA, 15 bp, Homo sapiens
aagtgattatcagag

SEQ ID NO: 651459 - DNA, 15 bp, Homo sapiens
agtgattatcagagg

SEQ ID NO: 651460 - DNA, 15 bp, Homo sapiens
gtgattatcagaggt

SEQ ID NO: 651461 - DNA, 15 bp, Homo sapiens
tgattatcagaggtc

SEQ ID NO: 651462 - DNA, 15 bp, Homo sapiens
gattatcagaggtca

SEQ ID NO: 651463 - DNA, 15 bp, Homo sapiens
attatcagaggtcaa

SEQ ID NO: 651464 - DNA, 15 bp, Homo sapiens
ttatcagaggtcaaa

SEQ ID NO: 651465 - DNA, 15 bp, Homo sapiens
tatcagaggtcaaac

SEQ ID NO: 651466 - DNA, 15 bp, Homo sapiens
atcagaggtcaaacc

SEQ ID NO: 651467 - DNA, 15 bp, Homo sapiens
tcagaggtcaaacca

SEQ ID NO: 651468 - DNA, 15 bp, Homo sapiens
cagaggtcaaaccat

SEQ ID NO: 651469 - DNA, 15 bp, Homo sapiens
agaggtcaaaccata

SEQ ID NO: 651470 - DNA, 15 bp, Homo sapiens
gaggtcaaaccataa

SEQ ID NO: 651471 - DNA, 15 bp, Homo sapiens
aggtcaaaccataat

SEQ ID NO: 651472 - DNA, 15 bp, Homo sapiens
ggtcaaaccataatc

SEQ ID NO: 651473 - DNA, 15 bp, Homo sapiens
gtcaaaccataatca

SEQ ID NO: 651474 - DNA, 15 bp, Homo sapiens
tcaaaccataatcat

SEQ ID NO: 651475 - DNA, 15 bp, Homo sapiens
caaaccataatcatt

SEQ ID NO: 651476 - DNA, 15 bp, Homo sapiens
aaaccataatcattc

SEQ ID NO: 651477 - DNA, 15 bp, Homo sapiens
aaccataatcattcc

SEQ ID NO: 651478 - DNA, 15 bp, Homo sapiens
accataatcattcca

SEQ ID NO: 651479 - DNA, 15 bp, Homo sapiens
ccataatcattccaa

SEQ ID NO: 651480 - DNA, 15 bp, Homo sapiens
cataatcattccaaa

SEQ ID NO: 651481 - DNA, 15 bp, Homo sapiens
ataatcattccaaac

SEQ ID NO: 651482 - DNA, 15 bp, Homo sapiens
taatcattccaaacc

SEQ ID NO: 651483 - DNA, 15 bp, Homo sapiens
aatcattccaaacca

SEQ ID NO: 651484 - DNA, 15 bp, Homo sapiens
atcattccaaaccac

SEQ ID NO: 651485 - DNA, 15 bp, Homo sapiens
tcattccaaaccacg

SEQ ID NO: 651486 - DNA, 15 bp, Homo sapiens
cattccaaaccacgg

SEQ ID NO: 651487 - DNA, 15 bp, Homo sapiens
attccaaaccacgga

SEQ ID NO: 651488 - DNA, 15 bp, Homo sapiens
ttccaaaccacggac

SEQ ID NO: 651489 - DNA, 15 bp, Homo sapiens
tccaaaccacggact

SEQ ID NO: 651490 - DNA, 15 bp, Homo sapiens
ccaaaccacggactt

SEQ ID NO: 651491 - DNA, 15 bp, Homo sapiens
caaaccacggacttt

SEQ ID NO: 651492 - DNA, 15 bp, Homo sapiens
aaaccacggacttta

SEQ ID NO: 651493 - DNA, 15 bp, Homo sapiens
aaccacggactttat

SEQ ID NO: 651494 - DNA, 15 bp, Homo sapiens
accacggactttatt

SEQ ID NO: 651495 - DNA, 15 bp, Homo sapiens
ccacggactttattt

SEQ ID NO: 651496 - DNA, 15 bp, Homo sapiens
cacggactttatttc

SEQ ID NO: 651497 - DNA, 15 bp, Homo sapiens
acggactttatttca

SEQ ID NO: 651498 - DNA, 15 bp, Homo sapiens
cggactttatttcat

SEQ ID NO: 651499 - DNA, 15 bp, Homo sapiens
ggactttatttcatt

SEQ ID NO: 651500 - DNA, 15 bp, Homo sapiens
gactttatttcatta

SEQ ID NO: 651501 - DNA, 15 bp, Homo sapiens
actttatttcattaa

SEQ ID NO: 651502 - DNA, 15 bp, Homo sapiens
ctttatttcattaag

SEQ ID NO: 651503 - DNA, 15 bp, Homo sapiens
tttatttcattaaga

SEQ ID NO: 651504 - DNA, 15 bp, Homo sapiens
ttatttcattaagaa

SEQ ID NO: 651505 - DNA, 15 bp, Homo sapiens
tatttcattaagaac

SEQ ID NO: 651506 - DNA, 15 bp, Homo sapiens
atttcattaagaaca

SEQ ID NO: 651507 - DNA, 15 bp, Homo sapiens
tttcattaagaacat

SEQ ID NO: 651508 - DNA, 15 bp, Homo sapiens
ttcattaagaacatg

SEQ ID NO: 651509 - DNA, 15 bp, Homo sapiens
tcattaagaacatga

SEQ ID NO: 651510 - DNA, 15 bp, Homo sapiens
cattaagaacatgat

SEQ ID NO: 651511 - DNA, 15 bp, Homo sapiens
attaagaacatgata

SEQ ID NO: 651512 - DNA, 15 bp, Homo sapiens
ttaagaacatgataa

SEQ ID NO: 651513 - DNA, 15 bp, Homo sapiens
taagaacatgataat

SEQ ID NO: 651514 - DNA, 15 bp, Homo sapiens
aagaacatgataata

SEQ ID NO: 651515 - DNA, 15 bp, Homo sapiens
agaacatgataatac

SEQ ID NO: 651516 - DNA, 15 bp, Homo sapiens
gaacatgataataca

SEQ ID NO: 651517 - DNA, 15 bp, Homo sapiens
aacatgataatacac

SEQ ID NO: 651518 - DNA, 15 bp, Homo sapiens
acatgataatacaca

SEQ ID NO: 651519 - DNA, 15 bp, Homo sapiens
catgataatacacaa

SEQ ID NO: 651520 - DNA, 15 bp, Homo sapiens
atgataatacacaaa

SEQ ID NO: 651521 - DNA, 15 bp, Homo sapiens
tgataatacacaaag

SEQ ID NO: 651522 - DNA, 15 bp, Homo sapiens
gataatacacaaaga

SEQ ID NO: 651523 - DNA, 15 bp, Homo sapiens
ataatacacaaagaa

SEQ ID NO: 651524 - DNA, 15 bp, Homo sapiens
taatacacaaagaac

SEQ ID NO: 651525 - DNA, 15 bp, Homo sapiens
aatacacaaagaaca

SEQ ID NO: 651526 - DNA, 15 bp, Homo sapiens
atacacaaagaacaa

SEQ ID NO: 651527 - DNA, 15 bp, Homo sapiens
tacacaaagaacaac

SEQ ID NO: 651528 - DNA, 15 bp, Homo sapiens
acacaaagaacaact

SEQ ID NO: 651529 - DNA, 15 bp, Homo sapiens
cacaaagaacaactt

SEQ ID NO: 651530 - DNA, 15 bp, Homo sapiens
acaaagaacaacttt

SEQ ID NO: 651531 - DNA, 15 bp, Homo sapiens
caaagaacaactttt

SEQ ID NO: 651532 - DNA, 15 bp, Homo sapiens
aaagaacaacttttt

SEQ ID NO: 651533 - DNA, 15 bp, Homo sapiens
aagaacaactttttc

SEQ ID NO: 651534 - DNA, 15 bp, Homo sapiens
agaacaactttttca

SEQ ID NO: 651535 - DNA, 15 bp, Homo sapiens
gaacaactttttcaa

SEQ ID NO: 651536 - DNA, 15 bp, Homo sapiens
aacaactttttcaat

SEQ ID NO: 651537 - DNA, 15 bp, Homo sapiens
acaactttttcaatt

SEQ ID NO: 651538 - DNA, 15 bp, Homo sapiens
caactttttcaattc

SEQ ID NO: 651539 - DNA, 15 bp, Homo sapiens
aactttttcaattca

SEQ ID NO: 651540 - DNA, 15 bp, Homo sapiens
actttttcaattcag

SEQ ID NO: 651541 - DNA, 15 bp, Homo sapiens
ctttttcaattcagt

SEQ ID NO: 651542 - DNA, 15 bp, Homo sapiens
tttttcaattcagtt

SEQ ID NO: 651543 - DNA, 15 bp, Homo sapiens
ttttcaattcagttt

SEQ ID NO: 651544 - DNA, 15 bp, Homo sapiens
tttcaattcagttta

SEQ ID NO: 651545 - DNA, 15 bp, Homo sapiens
ttcaattcagtttat

SEQ ID NO: 651546 - DNA, 15 bp, Homo sapiens
tcaattcagtttatc

SEQ ID NO: 651547 - DNA, 15 bp, Homo sapiens
caattcagtttatct

SEQ ID NO: 651548 - DNA, 15 bp, Homo sapiens
aattcagtttatctt

SEQ ID NO: 651549 - DNA, 15 bp, Homo sapiens
attcagtttatcttg

SEQ ID NO: 651550 - DNA, 15 bp, Homo sapiens
ttcagtttatcttgg

SEQ ID NO: 651551 - DNA, 15 bp, Homo sapiens
tcagtttatcttggc

SEQ ID NO: 651552 - DNA, 15 bp, Homo sapiens
cagtttatcttggca

SEQ ID NO: 651553 - DNA, 15 bp, Homo sapiens
agtttatcttggcag

SEQ ID NO: 651554 - DNA, 15 bp, Homo sapiens
gtttatcttggcagc

SEQ ID NO: 651555 - DNA, 15 bp, Homo sapiens
tttatcttggcagca

SEQ ID NO: 651556 - DNA, 15 bp, Homo sapiens
ttatcttggcagcat

SEQ ID NO: 651557 - DNA, 15 bp, Homo sapiens
tatcttggcagcatg

SEQ ID NO: 651558 - DNA, 15 bp, Homo sapiens
atcttggcagcatga

SEQ ID NO: 651559 - DNA, 15 bp, Homo sapiens
tcttggcagcatgaa

SEQ ID NO: 651560 - DNA, 15 bp, Homo sapiens
cttggcagcatgaac

SEQ ID NO: 651561 - DNA, 15 bp, Homo sapiens
ttggcagcatgaaca

SEQ ID NO: 651562 - DNA, 15 bp, Homo sapiens
tggcagcatgaacag

SEQ ID NO: 651563 - DNA, 15 bp, Homo sapiens
ggcagcatgaacagc

SEQ ID NO: 651564 - DNA, 15 bp, Homo sapiens
gcagcatgaacagct

SEQ ID NO: 651565 - DNA, 15 bp, Homo sapiens
cagcatgaacagctg

SEQ ID NO: 651566 - DNA, 15 bp, Homo sapiens
agcatgaacagctga

SEQ ID NO: 651567 - DNA, 15 bp, Homo sapiens
gcatgaacagctgac

SEQ ID NO: 651568 - DNA, 15 bp, Homo sapiens
catgaacagctgaca

SEQ ID NO: 651569 - DNA, 15 bp, Homo sapiens
atgaacagctgacat

SEQ ID NO: 651570 - DNA, 15 bp, Homo sapiens
tgaacagctgacatc

SEQ ID NO: 651571 - DNA, 15 bp, Homo sapiens
gaacagctgacatct

SEQ ID NO: 651572 - DNA, 15 bp, Homo sapiens
aacagctgacatctt

SEQ ID NO: 651573 - DNA, 15 bp, Homo sapiens
acagctgacatcttt

SEQ ID NO: 651574 - DNA, 15 bp, Homo sapiens
cagctgacatctttt

SEQ ID NO: 651575 - DNA, 15 bp, Homo sapiens
agctgacatcttttg

SEQ ID NO: 651576 - DNA, 15 bp, Homo sapiens
gctgacatcttttga

SEQ ID NO: 651577 - DNA, 15 bp, Homo sapiens
ctgacatcttttgaa

SEQ ID NO: 651578 - DNA, 15 bp, Homo sapiens
tgacatcttttgaac

SEQ ID NO: 651579 - DNA, 15 bp, Homo sapiens
gacatcttttgaact

SEQ ID NO: 651580 - DNA, 15 bp, Homo sapiens
acatcttttgaactt

SEQ ID NO: 651581 - DNA, 15 bp, Homo sapiens
catcttttgaacttt

SEQ ID NO: 651582 - DNA, 15 bp, Homo sapiens
atcttttgaactttg

SEQ ID NO: 651583 - DNA, 15 bp, Homo sapiens
tcttttgaactttgt

SEQ ID NO: 651584 - DNA, 15 bp, Homo sapiens
cttttgaactttgtt

SEQ ID NO: 651585 - DNA, 15 bp, Homo sapiens
ttttgaactttgtta

SEQ ID NO: 651586 - DNA, 15 bp, Homo sapiens
tttgaactttgttaa

SEQ ID NO: 651587 - DNA, 15 bp, Homo sapiens
ttgaactttgttaaa

SEQ ID NO: 651588 - DNA, 15 bp, Homo sapiens
tgaactttgttaaag

SEQ ID NO: 651589 - DNA, 15 bp, Homo sapiens
gaactttgttaaaga

SEQ ID NO: 651590 - DNA, 15 bp, Homo sapiens
aactttgttaaagaa

SEQ ID NO: 651591 - DNA, 15 bp, Homo sapiens
actttgttaaagaaa

SEQ ID NO: 651592 - DNA, 15 bp, Homo sapiens
ctttgttaaagaaaa

SEQ ID NO: 651593 - DNA, 15 bp, Homo sapiens
tttgttaaagaaaat

SEQ ID NO: 651594 - DNA, 15 bp, Homo sapiens
ttgttaaagaaaata

SEQ ID NO: 651595 - DNA, 15 bp, Homo sapiens
tgttaaagaaaataa

SEQ ID NO: 651596 - DNA, 15 bp, Homo sapiens
gttaaagaaaataaa

SEQ ID NO: 651597 - DNA, 15 bp, Homo sapiens
ttaaagaaaataaat

SEQ ID NO: 651598 - DNA, 15 bp, Homo sapiens
taaagaaaataaata

SEQ ID NO: 651599 - DNA, 15 bp, Homo sapiens
aaagaaaataaatat

SEQ ID NO: 651600 - DNA, 15 bp, Homo sapiens
aagaaaataaatatg

SEQ ID NO: 651601 - DNA, 15 bp, Homo sapiens
agaaaataaatatga

SEQ ID NO: 651602 - DNA, 15 bp, Homo sapiens
gaaaataaatatgat

SEQ ID NO: 651603 - DNA, 15 bp, Homo sapiens
aaaataaatatgata

SEQ ID NO: 651604 - DNA, 15 bp, Homo sapiens
aaataaatatgataa

SEQ ID NO: 651605 - DNA, 15 bp, Homo sapiens
aataaatatgataat

SEQ ID NO: 651606 - DNA, 15 bp, Homo sapiens
ataaatatgataata

SEQ ID NO: 651607 - DNA, 15 bp, Homo sapiens
taaatatgataatac

SEQ ID NO: 651608 - DNA, 15 bp, Homo sapiens
aaatatgataataca

SEQ ID NO: 651609 - DNA, 15 bp, Homo sapiens
aatatgataatacag

SEQ ID NO: 651610 - DNA, 15 bp, Homo sapiens
atatgataatacagg

SEQ ID NO: 651611 - DNA, 15 bp, Homo sapiens
tatgataatacaggt

SEQ ID NO: 651612 - DNA, 15 bp, Homo sapiens
atgataatacaggtt

SEQ ID NO: 651613 - DNA, 15 bp, Homo sapiens
tgataatacaggtta

SEQ ID NO: 651614 - DNA, 15 bp, Homo sapiens
gataatacaggttaa

SEQ ID NO: 651615 - DNA, 15 bp, Homo sapiens
ataatacaggttaat

SEQ ID NO: 651616 - DNA, 15 bp, Homo sapiens
taatacaggttaatg

SEQ ID NO: 651617 - DNA, 15 bp, Homo sapiens
aatacaggttaatgt

SEQ ID NO: 651618 - DNA, 15 bp, Homo sapiens
atacaggttaatgtg

SEQ ID NO: 651619 - DNA, 15 bp, Homo sapiens
tacaggttaatgtgt

SEQ ID NO: 651620 - DNA, 15 bp, Homo sapiens
acaggttaatgtgtt

SEQ ID NO: 651621 - DNA, 15 bp, Homo sapiens
caggttaatgtgttt

SEQ ID NO: 651622 - DNA, 15 bp, Homo sapiens
aggttaatgtgtttt

SEQ ID NO: 651623 - DNA, 15 bp, Homo sapiens
ggttaatgtgttttg

SEQ ID NO: 651624 - DNA, 15 bp, Homo sapiens
gttaatgtgttttgt

SEQ ID NO: 651625 - DNA, 15 bp, Homo sapiens
ttaatgtgttttgta

SEQ ID NO: 651626 - DNA, 15 bp, Homo sapiens
taatgtgttttgtaa

SEQ ID NO: 651627 - DNA, 15 bp, Homo sapiens
aatgtgttttgtaaa

SEQ ID NO: 651628 - DNA, 15 bp, Homo sapiens
atgtgttttgtaaac

SEQ ID NO: 651629 - DNA, 15 bp, Homo sapiens
tgtgttttgtaaact

SEQ ID NO: 651630 - DNA, 15 bp, Homo sapiens
gtgttttgtaaactt

SEQ ID NO: 651631 - DNA, 15 bp, Homo sapiens
tgttttgtaaacttt

SEQ ID NO: 651632 - DNA, 15 bp, Homo sapiens
gttttgtaaacttta

SEQ ID NO: 651633 - DNA, 15 bp, Homo sapiens
ttttgtaaactttaa

SEQ ID NO: 651634 - DNA, 15 bp, Homo sapiens
tttgtaaactttaaa

SEQ ID NO: 651635 - DNA, 15 bp, Homo sapiens
ttgtaaactttaaag

SEQ ID NO: 651636 - DNA, 15 bp, Homo sapiens
tgtaaactttaaaga

SEQ ID NO: 651637 - DNA, 15 bp, Homo sapiens
gtaaactttaaagag

SEQ ID NO: 651638 - DNA, 15 bp, Homo sapiens
taaactttaaagaga

SEQ ID NO: 651639 - DNA, 15 bp, Homo sapiens
aaactttaaagagat

SEQ ID NO: 651640 - DNA, 15 bp, Homo sapiens
aactttaaagagata

SEQ ID NO: 651641 - DNA, 15 bp, Homo sapiens
actttaaagagatag

SEQ ID NO: 651642 - DNA, 15 bp, Homo sapiens
ctttaaagagatagt

SEQ ID NO: 651643 - DNA, 15 bp, Homo sapiens
tttaaagagatagta

SEQ ID NO: 651644 - DNA, 15 bp, Homo sapiens
ttaaagagatagtat

SEQ ID NO: 651645 - DNA, 15 bp, Homo sapiens
taaagagatagtatg

SEQ ID NO: 651646 - DNA, 15 bp, Homo sapiens
aaagagatagtatgg

SEQ ID NO: 651647 - DNA, 15 bp, Homo sapiens
aagagatagtatgga

SEQ ID NO: 651648 - DNA, 15 bp, Homo sapiens
agagatagtatggat

SEQ ID NO: 651649 - DNA, 15 bp, Homo sapiens
gagatagtatggatg

SEQ ID NO: 651650 - DNA, 15 bp, Homo sapiens
agatagtatggatgg

SEQ ID NO: 651651 - DNA, 15 bp, Homo sapiens
gatagtatggatggg

SEQ ID NO: 651652 - DNA, 15 bp, Homo sapiens
atagtatggatggga

SEQ ID NO: 651653 - DNA, 15 bp, Homo sapiens
tagtatggatgggaa

SEQ ID NO: 651654 - DNA, 15 bp, Homo sapiens
agtatggatgggaag

SEQ ID NO: 651655 - DNA, 15 bp, Homo sapiens
gtatggatgggaagt

SEQ ID NO: 651656 - DNA, 15 bp, Homo sapiens
tatggatgggaagtg

SEQ ID NO: 651657 - DNA, 15 bp, Homo sapiens
atggatgggaagtgt

SEQ ID NO: 651658 - DNA, 15 bp, Homo sapiens
tggatgggaagtgtt

SEQ ID NO: 651659 - DNA, 15 bp, Homo sapiens
ggatgggaagtgtta

SEQ ID NO: 651660 - DNA, 15 bp, Homo sapiens
gatgggaagtgttac

SEQ ID NO: 651661 - DNA, 15 bp, Homo sapiens
atgggaagtgttacc

SEQ ID NO: 651662 - DNA, 15 bp, Homo sapiens
tgggaagtgttacca

SEQ ID NO: 651663 - DNA, 15 bp, Homo sapiens
gggaagtgttaccaa

SEQ ID NO: 651664 - DNA, 15 bp, Homo sapiens
ggaagtgttaccaat

SEQ ID NO: 651665 - DNA, 15 bp, Homo sapiens
gaagtgttaccaatt

SEQ ID NO: 651666 - DNA, 15 bp, Homo sapiens
aagtgttaccaattt

SEQ ID NO: 651667 - DNA, 15 bp, Homo sapiens
agtgttaccaatttt

SEQ ID NO: 651668 - DNA, 15 bp, Homo sapiens
gtgttaccaatttta

SEQ ID NO: 651669 - DNA, 15 bp, Homo sapiens
tgttaccaattttat

SEQ ID NO: 651670 - DNA, 15 bp, Homo sapiens
gttaccaattttata

SEQ ID NO: 651671 - DNA, 15 bp, Homo sapiens
ttaccaattttataa

SEQ ID NO: 651672 - DNA, 15 bp, Homo sapiens
taccaattttataat

SEQ ID NO: 651673 - DNA, 15 bp, Homo sapiens
accaattttataatt

SEQ ID NO: 651674 - DNA, 15 bp, Homo sapiens
ccaattttataattt

SEQ ID NO: 651675 - DNA, 15 bp, Homo sapiens
caattttataattta

SEQ ID NO: 651676 - DNA, 15 bp, Homo sapiens
aattttataatttaa

SEQ ID NO: 651677 - DNA, 15 bp, Homo sapiens
attttataatttaac

SEQ ID NO: 651678 - DNA, 15 bp, Homo sapiens
ttttataatttaacc

SEQ ID NO: 651679 - DNA, 15 bp, Homo sapiens
tttataatttaacca

SEQ ID NO: 651680 - DNA, 15 bp, Homo sapiens
ttataatttaaccac

SEQ ID NO: 651681 - DNA, 15 bp, Homo sapiens
tataatttaaccact

SEQ ID NO: 651682 - DNA, 15 bp, Homo sapiens
ataatttaaccactt

SEQ ID NO: 651683 - DNA, 15 bp, Homo sapiens
taatttaaccacttc

SEQ ID NO: 651684 - DNA, 15 bp, Homo sapiens
aatttaaccacttct

SEQ ID NO: 651685 - DNA, 15 bp, Homo sapiens
atttaaccacttctt

SEQ ID NO: 651686 - DNA, 15 bp, Homo sapiens
tttaaccacttctta

SEQ ID NO: 651687 - DNA, 15 bp, Homo sapiens
ttaaccacttcttaa

SEQ ID NO: 651688 - DNA, 15 bp, Homo sapiens
taaccacttcttaac

SEQ ID NO: 651689 - DNA, 15 bp, Homo sapiens
aaccacttcttaaca

SEQ ID NO: 651690 - DNA, 15 bp, Homo sapiens
accacttcttaacaa

SEQ ID NO: 651691 - DNA, 15 bp, Homo sapiens
ccacttcttaacaac

SEQ ID NO: 651692 - DNA, 15 bp, Homo sapiens
cacttcttaacaact

SEQ ID NO: 651693 - DNA, 15 bp, Homo sapiens
acttcttaacaactt

SEQ ID NO: 651694 - DNA, 15 bp, Homo sapiens
cttcttaacaactta

SEQ ID NO: 651695 - DNA, 15 bp, Homo sapiens
ttcttaacaacttag

SEQ ID NO: 651696 - DNA, 15 bp, Homo sapiens
tcttaacaacttaga

SEQ ID NO: 651697 - DNA, 15 bp, Homo sapiens
cttaacaacttagat

SEQ ID NO: 651698 - DNA, 15 bp, Homo sapiens
ttaacaacttagata

SEQ ID NO: 651699 - DNA, 15 bp, Homo sapiens
taacaacttagatac

SEQ ID NO: 651700 - DNA, 15 bp, Homo sapiens
aacaacttagataca

SEQ ID NO: 651701 - DNA, 15 bp, Homo sapiens
acaacttagatacag

SEQ ID NO: 651702 - DNA, 15 bp, Homo sapiens
caacttagatacagt

SEQ ID NO: 651703 - DNA, 15 bp, Homo sapiens
aacttagatacagtt

SEQ ID NO: 651704 - DNA, 15 bp, Homo sapiens
acttagatacagttt

SEQ ID NO: 651705 - DNA, 15 bp, Homo sapiens
cttagatacagtttt

SEQ ID NO: 651706 - DNA, 15 bp, Homo sapiens
ttagatacagttttt

SEQ ID NO: 651707 - DNA, 15 bp, Homo sapiens
tagatacagttttta

SEQ ID NO: 651708 - DNA, 15 bp, Homo sapiens
agatacagtttttac

SEQ ID NO: 651709 - DNA, 15 bp, Homo sapiens
gatacagtttttaca

SEQ ID NO: 651710 - DNA, 15 bp, Homo sapiens
atacagtttttacag

SEQ ID NO: 651711 - DNA, 15 bp, Homo sapiens
tacagtttttacaga

SEQ ID NO: 651712 - DNA, 15 bp, Homo sapiens
acagtttttacagat

SEQ ID NO: 651713 - DNA, 15 bp, Homo sapiens
cagtttttacagatt

SEQ ID NO: 651714 - DNA, 15 bp, Homo sapiens
agtttttacagattg

SEQ ID NO: 651715 - DNA, 15 bp, Homo sapiens
gtttttacagattgg

SEQ ID NO: 651716 - DNA, 15 bp, Homo sapiens
tttttacagattgga

SEQ ID NO: 651717 - DNA, 15 bp, Homo sapiens
ttttacagattggaa

SEQ ID NO: 651718 - DNA, 15 bp, Homo sapiens
tttacagattggaaa

SEQ ID NO: 651719 - DNA, 15 bp, Homo sapiens
ttacagattggaaaa

SEQ ID NO: 651720 - DNA, 15 bp, Homo sapiens
tacagattggaaaag

SEQ ID NO: 651721 - DNA, 15 bp, Homo sapiens
acagattggaaaagc

SEQ ID NO: 651722 - DNA, 15 bp, Homo sapiens
cagattggaaaagcc

SEQ ID NO: 651723 - DNA, 15 bp, Homo sapiens
agattggaaaagcca

SEQ ID NO: 651724 - DNA, 15 bp, Homo sapiens
gattggaaaagccac

SEQ ID NO: 651725 - DNA, 15 bp, Homo sapiens
attggaaaagccact

SEQ ID NO: 651726 - DNA, 15 bp, Homo sapiens
ttggaaaagccactg

SEQ ID NO: 651727 - DNA, 15 bp, Homo sapiens
tggaaaagccactga

SEQ ID NO: 651728 - DNA, 15 bp, Homo sapiens
ggaaaagccactgaa

SEQ ID NO: 651729 - DNA, 15 bp, Homo sapiens
gaaaagccactgaag

SEQ ID NO: 651730 - DNA, 15 bp, Homo sapiens
aaaagccactgaagt

SEQ ID NO: 651731 - DNA, 15 bp, Homo sapiens
aaagccactgaagta

SEQ ID NO: 651732 - DNA, 15 bp, Homo sapiens
aagccactgaagtat

SEQ ID NO: 651733 - DNA, 15 bp, Homo sapiens
agccactgaagtatt

SEQ ID NO: 651734 - DNA, 15 bp, Homo sapiens
gccactgaagtattg

SEQ ID NO: 651735 - DNA, 15 bp, Homo sapiens
ccactgaagtattgc

SEQ ID NO: 651736 - DNA, 15 bp, Homo sapiens
cactgaagtattgca

SEQ ID NO: 651737 - DNA, 15 bp, Homo sapiens
actgaagtattgcag

SEQ ID NO: 651738 - DNA, 15 bp, Homo sapiens
ctgaagtattgcagg

SEQ ID NO: 651739 - DNA, 15 bp, Homo sapiens
tgaagtattgcaggt

SEQ ID NO: 651740 - DNA, 15 bp, Homo sapiens
gaagtattgcaggtc

SEQ ID NO: 651741 - DNA, 15 bp, Homo sapiens
aagtattgcaggtcc

SEQ ID NO: 651742 - DNA, 15 bp, Homo sapiens
agtattgcaggtcca

SEQ ID NO: 651743 - DNA, 15 bp, Homo sapiens
gtattgcaggtccag

SEQ ID NO: 651744 - DNA, 15 bp, Homo sapiens
tattgcaggtccaga

SEQ ID NO: 651745 - DNA, 15 bp, Homo sapiens
attgcaggtccagat

SEQ ID NO: 651746 - DNA, 15 bp, Homo sapiens
ttgcaggtccagatt

SEQ ID NO: 651747 - DNA, 15 bp, Homo sapiens
tgcaggtccagattt

SEQ ID NO: 651748 - DNA, 15 bp, Homo sapiens
gcaggtccagatttt

SEQ ID NO: 651749 - DNA, 15 bp, Homo sapiens
caggtccagatttta

SEQ ID NO: 651750 - DNA, 15 bp, Homo sapiens
aggtccagattttaa

SEQ ID NO: 651751 - DNA, 15 bp, Homo sapiens
ggtccagattttaac

SEQ ID NO: 651752 - DNA, 15 bp, Homo sapiens
gtccagattttaact

SEQ ID NO: 651753 - DNA, 15 bp, Homo sapiens
tccagattttaacta

SEQ ID NO: 651754 - DNA, 15 bp, Homo sapiens
ccagattttaactat

SEQ ID NO: 651755 - DNA, 15 bp, Homo sapiens
cagattttaactata

SEQ ID NO: 651756 - DNA, 15 bp, Homo sapiens
agattttaactatag

SEQ ID NO: 651757 - DNA, 15 bp, Homo sapiens
gattttaactatagt

SEQ ID NO: 651758 - DNA, 15 bp, Homo sapiens
attttaactatagtc

SEQ ID NO: 651759 - DNA, 15 bp, Homo sapiens
ttttaactatagtcc

SEQ ID NO: 651760 - DNA, 15 bp, Homo sapiens
tttaactatagtccc

SEQ ID NO: 651761 - DNA, 15 bp, Homo sapiens
ttaactatagtccct

SEQ ID NO: 651762 - DNA, 15 bp, Homo sapiens
taactatagtccctt

SEQ ID NO: 651763 - DNA, 15 bp, Homo sapiens
aactatagtcccttg

SEQ ID NO: 651764 - DNA, 15 bp, Homo sapiens
actatagtcccttgt

SEQ ID NO: 651765 - DNA, 15 bp, Homo sapiens
ctatagtcccttgtc

SEQ ID NO: 651766 - DNA, 15 bp, Homo sapiens
tatagtcccttgtct

SEQ ID NO: 651767 - DNA, 15 bp, Homo sapiens
atagtcccttgtctt

SEQ ID NO: 651768 - DNA, 15 bp, Homo sapiens
tagtcccttgtcttt

SEQ ID NO: 651769 - DNA, 15 bp, Homo sapiens
agtcccttgtcttta

SEQ ID NO: 651770 - DNA, 15 bp, Homo sapiens
gtcccttgtctttat

SEQ ID NO: 651771 - DNA, 15 bp, Homo sapiens
tcccttgtctttatt

SEQ ID NO: 651772 - DNA, 15 bp, Homo sapiens
cccttgtctttattg

SEQ ID NO: 651773 - DNA, 15 bp, Homo sapiens
ccttgtctttattga

SEQ ID NO: 651774 - DNA, 15 bp, Homo sapiens
cttgtctttattgat

SEQ ID NO: 651775 - DNA, 15 bp, Homo sapiens
ttgtctttattgatc

SEQ ID NO: 651776 - DNA, 15 bp, Homo sapiens
tgtctttattgatcc

SEQ ID NO: 651777 - DNA, 15 bp, Homo sapiens
gtctttattgatcca

SEQ ID NO: 651778 - DNA, 15 bp, Homo sapiens
tctttattgatccaa

SEQ ID NO: 651779 - DNA, 15 bp, Homo sapiens
ctttattgatccaat

SEQ ID NO: 651780 - DNA, 15 bp, Homo sapiens
tttattgatccaatt

SEQ ID NO: 651781 - DNA, 15 bp, Homo sapiens
ttattgatccaattc

SEQ ID NO: 651782 - DNA, 15 bp, Homo sapiens
tattgatccaattcc

SEQ ID NO: 651783 - DNA, 15 bp, Homo sapiens
attgatccaattcct

SEQ ID NO: 651784 - DNA, 15 bp, Homo sapiens
ttgatccaattcctc

SEQ ID NO: 651785 - DNA, 15 bp, Homo sapiens
tgatccaattcctcc

SEQ ID NO: 651786 - DNA, 15 bp, Homo sapiens
gatccaattcctcct

SEQ ID NO: 651787 - DNA, 15 bp, Homo sapiens
atccaattcctccta

SEQ ID NO: 651788 - DNA, 15 bp, Homo sapiens
tccaattcctcctaa

SEQ ID NO: 651789 - DNA, 15 bp, Homo sapiens
ccaattcctcctaag

SEQ ID NO: 651790 - DNA, 15 bp, Homo sapiens
caattcctcctaaga

SEQ ID NO: 651791 - DNA, 15 bp, Homo sapiens
aattcctcctaagaa

SEQ ID NO: 651792 - DNA, 15 bp, Homo sapiens
attcctcctaagaac

SEQ ID NO: 651793 - DNA, 15 bp, Homo sapiens
ttcctcctaagaact

SEQ ID NO: 651794 - DNA, 15 bp, Homo sapiens
tcctcctaagaactt

SEQ ID NO: 651795 - DNA, 15 bp, Homo sapiens
cctcctaagaacttt

SEQ ID NO: 651796 - DNA, 15 bp, Homo sapiens
ctcctaagaactttg

SEQ ID NO: 651797 - DNA, 15 bp, Homo sapiens
tcctaagaactttga

SEQ ID NO: 651798 - DNA, 15 bp, Homo sapiens
cctaagaactttgac

SEQ ID NO: 651799 - DNA, 15 bp, Homo sapiens
ctaagaactttgaca

SEQ ID NO: 651800 - DNA, 15 bp, Homo sapiens
taagaactttgacat

SEQ ID NO: 651801 - DNA, 15 bp, Homo sapiens
aagaactttgacatt

SEQ ID NO: 651802 - DNA, 15 bp, Homo sapiens
agaactttgacattt

SEQ ID NO: 651803 - DNA, 15 bp, Homo sapiens
gaactttgacattta

SEQ ID NO: 651804 - DNA, 15 bp, Homo sapiens
aactttgacatttac

SEQ ID NO: 651805 - DNA, 15 bp, Homo sapiens
actttgacatttacc

SEQ ID NO: 651806 - DNA, 15 bp, Homo sapiens
ctttgacatttacca

SEQ ID NO: 651807 - DNA, 15 bp, Homo sapiens
tttgacatttaccaa

SEQ ID NO: 651808 - DNA, 15 bp, Homo sapiens
ttgacatttaccaaa

SEQ ID NO: 651809 - DNA, 15 bp, Homo sapiens
tgacatttaccaaaa

SEQ ID NO: 651810 - DNA, 15 bp, Homo sapiens
gacatttaccaaaat

SEQ ID NO: 651811 - DNA, 15 bp, Homo sapiens
acatttaccaaaata

SEQ ID NO: 651812 - DNA, 15 bp, Homo sapiens
catttaccaaaatag

SEQ ID NO: 651813 - DNA, 15 bp, Homo sapiens
atttaccaaaatagg

SEQ ID NO: 651814 - DNA, 15 bp, Homo sapiens
tttaccaaaataggg

SEQ ID NO: 651815 - DNA, 15 bp, Homo sapiens
ttaccaaaataggga

SEQ ID NO: 651816 - DNA, 15 bp, Homo sapiens
taccaaaatagggat

SEQ ID NO: 651817 - DNA, 15 bp, Homo sapiens
accaaaatagggata

SEQ ID NO: 651818 - DNA, 15 bp, Homo sapiens
ccaaaatagggatat

SEQ ID NO: 651819 - DNA, 15 bp, Homo sapiens
caaaatagggatatc

SEQ ID NO: 651820 - DNA, 15 bp, Homo sapiens
aaaatagggatatca

SEQ ID NO: 651821 - DNA, 15 bp, Homo sapiens
aaatagggatatcag

SEQ ID NO: 651822 - DNA, 15 bp, Homo sapiens
aatagggatatcagt

SEQ ID NO: 651823 - DNA, 15 bp, Homo sapiens
atagggatatcagta

SEQ ID NO: 651824 - DNA, 15 bp, Homo sapiens
tagggatatcagtag

SEQ ID NO: 651825 - DNA, 15 bp, Homo sapiens
agggatatcagtagt

SEQ ID NO: 651826 - DNA, 15 bp, Homo sapiens
gggatatcagtagtt

SEQ ID NO: 651827 - DNA, 15 bp, Homo sapiens
ggatatcagtagttg

SEQ ID NO: 651828 - DNA, 15 bp, Homo sapiens
gatatcagtagttgg

SEQ ID NO: 651829 - DNA, 15 bp, Homo sapiens
atatcagtagttggc

SEQ ID NO: 651830 - DNA, 15 bp, Homo sapiens
tatcagtagttggct

SEQ ID NO: 651831 - DNA, 15 bp, Homo sapiens
atcagtagttggctt

SEQ ID NO: 651832 - DNA, 15 bp, Homo sapiens
tcagtagttggcttt

SEQ ID NO: 651833 - DNA, 15 bp, Homo sapiens
cagtagttggcttta

SEQ ID NO: 651834 - DNA, 15 bp, Homo sapiens
agtagttggctttag

SEQ ID NO: 651835 - DNA, 15 bp, Homo sapiens
gtagttggctttagt

SEQ ID NO: 651836 - DNA, 15 bp, Homo sapiens
tagttggctttagtc

SEQ ID NO: 651837 - DNA, 15 bp, Homo sapiens
agttggctttagtcc

SEQ ID NO: 651838 - DNA, 15 bp, Homo sapiens
gttggctttagtcct

SEQ ID NO: 651839 - DNA, 15 bp, Homo sapiens
ttggctttagtccta

SEQ ID NO: 651840 - DNA, 15 bp, Homo sapiens
tggctttagtcctag

SEQ ID NO: 651841 - DNA, 15 bp, Homo sapiens
ggctttagtcctagc

SEQ ID NO: 651842 - DNA, 15 bp, Homo sapiens
gctttagtcctagct

SEQ ID NO: 651843 - DNA, 15 bp, Homo sapiens
ctttagtcctagctg

SEQ ID NO: 651844 - DNA, 15 bp, Homo sapiens
tttagtcctagctgc

SEQ ID NO: 651845 - DNA, 15 bp, Homo sapiens
ttagtcctagctgct

SEQ ID NO: 651846 - DNA, 15 bp, Homo sapiens
tagtcctagctgctt

SEQ ID NO: 651847 - DNA, 15 bp, Homo sapiens
agtcctagctgctta

SEQ ID NO: 651848 - DNA, 15 bp, Homo sapiens
gtcctagctgcttat

SEQ ID NO: 651849 - DNA, 15 bp, Homo sapiens
tcctagctgcttata

SEQ ID NO: 651850 - DNA, 15 bp, Homo sapiens
cctagctgcttatac

SEQ ID NO: 651851 - DNA, 15 bp, Homo sapiens
ctagctgcttataca

SEQ ID NO: 651852 - DNA, 15 bp, Homo sapiens
tagctgcttatacat

SEQ ID NO: 651853 - DNA, 15 bp, Homo sapiens
agctgcttatacata

SEQ ID NO: 651854 - DNA, 15 bp, Homo sapiens
gctgcttatacatac

SEQ ID NO: 651855 - DNA, 15 bp, Homo sapiens
ctgcttatacatact

SEQ ID NO: 651856 - DNA, 15 bp, Homo sapiens
tgcttatacatactt

SEQ ID NO: 651857 - DNA, 15 bp, Homo sapiens
gcttatacatacttg

SEQ ID NO: 651858 - DNA, 15 bp, Homo sapiens
cttatacatacttgc

SEQ ID NO: 651859 - DNA, 15 bp, Homo sapiens
ttatacatacttgct

SEQ ID NO: 651860 - DNA, 15 bp, Homo sapiens
tatacatacttgcta

SEQ ID NO: 651861 - DNA, 15 bp, Homo sapiens
atacatacttgctat

SEQ ID NO: 651862 - DNA, 15 bp, Homo sapiens
tacatacttgctatg

SEQ ID NO: 651863 - DNA, 15 bp, Homo sapiens
acatacttgctatgc

SEQ ID NO: 651864 - DNA, 15 bp, Homo sapiens
catacttgctatgca

SEQ ID NO: 651865 - DNA, 15 bp, Homo sapiens
atacttgctatgcaa

SEQ ID NO: 651866 - DNA, 15 bp, Homo sapiens
tacttgctatgcaag

SEQ ID NO: 651867 - DNA, 15 bp, Homo sapiens
acttgctatgcaaga

SEQ ID NO: 651868 - DNA, 15 bp, Homo sapiens
cttgctatgcaagaa

SEQ ID NO: 651869 - DNA, 15 bp, Homo sapiens
ttgctatgcaagaag

SEQ ID NO: 651870 - DNA, 15 bp, Homo sapiens
tgctatgcaagaaga

SEQ ID NO: 651871 - DNA, 15 bp, Homo sapiens
gctatgcaagaagac

SEQ ID NO: 651872 - DNA, 15 bp, Homo sapiens
ctatgcaagaagaca

SEQ ID NO: 651873 - DNA, 15 bp, Homo sapiens
tatgcaagaagacaa

SEQ ID NO: 651874 - DNA, 15 bp, Homo sapiens
atgcaagaagacaag

SEQ ID NO: 651875 - DNA, 15 bp, Homo sapiens
tgcaagaagacaagc

SEQ ID NO: 651876 - DNA, 15 bp, Homo sapiens
gcaagaagacaagca

SEQ ID NO: 651877 - DNA, 15 bp, Homo sapiens
caagaagacaagcat

SEQ ID NO: 651878 - DNA, 15 bp, Homo sapiens
aagaagacaagcatt

SEQ ID NO: 651879 - DNA, 15 bp, Homo sapiens
agaagacaagcattg

SEQ ID NO: 651880 - DNA, 15 bp, Homo sapiens
gaagacaagcattga

SEQ ID NO: 651881 - DNA, 15 bp, Homo sapiens
aagacaagcattgag

SEQ ID NO: 651882 - DNA, 15 bp, Homo sapiens
agacaagcattgaga

SEQ ID NO: 651883 - DNA, 15 bp, Homo sapiens
gacaagcattgagaa

SEQ ID NO: 651884 - DNA, 15 bp, Homo sapiens
acaagcattgagaaa

SEQ ID NO: 651885 - DNA, 15 bp, Homo sapiens
caagcattgagaaaa

SEQ ID NO: 651886 - DNA, 15 bp, Homo sapiens
aagcattgagaaaac

SEQ ID NO: 651887 - DNA, 15 bp, Homo sapiens
agcattgagaaaact

SEQ ID NO: 651888 - DNA, 15 bp, Homo sapiens
gcattgagaaaactt

SEQ ID NO: 651889 - DNA, 15 bp, Homo sapiens
cattgagaaaactta

SEQ ID NO: 651890 - DNA, 15 bp, Homo sapiens
attgagaaaacttat

SEQ ID NO: 651891 - DNA, 15 bp, Homo sapiens
ttgagaaaacttatt

SEQ ID NO: 651892 - DNA, 15 bp, Homo sapiens
tgagaaaacttattt

SEQ ID NO: 651893 - DNA, 15 bp, Homo sapiens
gagaaaacttatttt

SEQ ID NO: 651894 - DNA, 15 bp, Homo sapiens
agaaaacttattttt

SEQ ID NO: 651895 - DNA, 15 bp, Homo sapiens
gaaaacttatttttc

SEQ ID NO: 651896 - DNA, 15 bp, Homo sapiens
aaaacttatttttcc

SEQ ID NO: 651897 - DNA, 15 bp, Homo sapiens
aaacttatttttcct

SEQ ID NO: 651898 - DNA, 15 bp, Homo sapiens
aacttatttttcctt

SEQ ID NO: 651899 - DNA, 15 bp, Homo sapiens
acttatttttccttt

SEQ ID NO: 651900 - DNA, 15 bp, Homo sapiens
cttatttttcctttt

SEQ ID NO: 651901 - DNA, 15 bp, Homo sapiens
ttatttttccttttg

SEQ ID NO: 651902 - DNA, 15 bp, Homo sapiens
tatttttccttttgt

SEQ ID NO: 651903 - DNA, 15 bp, Homo sapiens
atttttccttttgtt

SEQ ID NO: 651904 - DNA, 15 bp, Homo sapiens
tttttccttttgttc

SEQ ID NO: 651905 - DNA, 15 bp, Homo sapiens
ttttccttttgttcc

SEQ ID NO: 651906 - DNA, 15 bp, Homo sapiens
tttccttttgttcca

SEQ ID NO: 651907 - DNA, 15 bp, Homo sapiens
ttccttttgttccat

SEQ ID NO: 651908 - DNA, 15 bp, Homo sapiens
tccttttgttccatg

SEQ ID NO: 651909 - DNA, 15 bp, Homo sapiens
ccttttgttccatgc

SEQ ID NO: 651910 - DNA, 15 bp, Homo sapiens
cttttgttccatgcc

SEQ ID NO: 651911 - DNA, 15 bp, Homo sapiens
ttttgttccatgcct

SEQ ID NO: 651912 - DNA, 15 bp, Homo sapiens
tttgttccatgccta

SEQ ID NO: 651913 - DNA, 15 bp, Homo sapiens
ttgttccatgcctac

SEQ ID NO: 651914 - DNA, 15 bp, Homo sapiens
tgttccatgcctaca

SEQ ID NO: 651915 - DNA, 15 bp, Homo sapiens
gttccatgcctacaa

SEQ ID NO: 651916 - DNA, 15 bp, Homo sapiens
ttccatgcctacaag

SEQ ID NO: 651917 - DNA, 15 bp, Homo sapiens
tccatgcctacaagg

SEQ ID NO: 651918 - DNA, 15 bp, Homo sapiens
ccatgcctacaagga

SEQ ID NO: 651919 - DNA, 15 bp, Homo sapiens
catgcctacaaggag

SEQ ID NO: 651920 - DNA, 15 bp, Homo sapiens
atgcctacaaggaga

SEQ ID NO: 651921 - DNA, 15 bp, Homo sapiens
tgcctacaaggagag

SEQ ID NO: 651922 - DNA, 15 bp, Homo sapiens
gcctacaaggagagg

SEQ ID NO: 651923 - DNA, 15 bp, Homo sapiens
cctacaaggagagga

SEQ ID NO: 651924 - DNA, 15 bp, Homo sapiens
ctacaaggagaggat

SEQ ID NO: 651925 - DNA, 15 bp, Homo sapiens
tacaaggagaggata

SEQ ID NO: 651926 - DNA, 15 bp, Homo sapiens
acaaggagaggatag

SEQ ID NO: 651927 - DNA, 15 bp, Homo sapiens
caaggagaggataga

SEQ ID NO: 651928 - DNA, 15 bp, Homo sapiens
aaggagaggatagag

SEQ ID NO: 651929 - DNA, 15 bp, Homo sapiens
aggagaggatagagg

SEQ ID NO: 651930 - DNA, 15 bp, Homo sapiens
ggagaggatagaggt

SEQ ID NO: 651931 - DNA, 15 bp, Homo sapiens
gagaggatagaggta

SEQ ID NO: 651932 - DNA, 15 bp, Homo sapiens
agaggatagaggtat

SEQ ID NO: 651933 - DNA, 15 bp, Homo sapiens
gaggatagaggtata

SEQ ID NO: 651934 - DNA, 15 bp, Homo sapiens
aggatagaggtatac

SEQ ID NO: 651935 - DNA, 15 bp, Homo sapiens
ggatagaggtataca

SEQ ID NO: 651936 - DNA, 15 bp, Homo sapiens
gatagaggtatacaa

SEQ ID NO: 651937 - DNA, 15 bp, Homo sapiens
atagaggtatacaat

SEQ ID NO: 651938 - DNA, 15 bp, Homo sapiens
tagaggtatacaata

SEQ ID NO: 651939 - DNA, 15 bp, Homo sapiens
agaggtatacaataa

SEQ ID NO: 651940 - DNA, 15 bp, Homo sapiens
gaggtatacaataat

SEQ ID NO: 651941 - DNA, 15 bp, Homo sapiens
aggtatacaataata

SEQ ID NO: 651942 - DNA, 15 bp, Homo sapiens
ggtatacaataataa

SEQ ID NO: 651943 - DNA, 15 bp, Homo sapiens
gtatacaataataat

SEQ ID NO: 651944 - DNA, 15 bp, Homo sapiens
tatacaataataatg

SEQ ID NO: 651945 - DNA, 15 bp, Homo sapiens
atacaataataatgg

SEQ ID NO: 651946 - DNA, 15 bp, Homo sapiens
tacaataataatggt

SEQ ID NO: 651947 - DNA, 15 bp, Homo sapiens
acaataataatggtt

SEQ ID NO: 651948 - DNA, 15 bp, Homo sapiens
caataataatggttc

SEQ ID NO: 651949 - DNA, 15 bp, Homo sapiens
aataataatggttca

SEQ ID NO: 651950 - DNA, 15 bp, Homo sapiens
ataataatggttcag

SEQ ID NO: 651951 - DNA, 15 bp, Homo sapiens
taataatggttcaga

SEQ ID NO: 651952 - DNA, 15 bp, Homo sapiens
aataatggttcagag

SEQ ID NO: 651953 - DNA, 15 bp, Homo sapiens
ataatggttcagagg

SEQ ID NO: 651954 - DNA, 15 bp, Homo sapiens
taatggttcagaggg

SEQ ID NO: 651955 - DNA, 15 bp, Homo sapiens
aatggttcagaggga

SEQ ID NO: 651956 - DNA, 15 bp, Homo sapiens
atggttcagagggaa

SEQ ID NO: 651957 - DNA, 15 bp, Homo sapiens
tggttcagagggaaa

SEQ ID NO: 651958 - DNA, 15 bp, Homo sapiens
ggttcagagggaaaa

SEQ ID NO: 651959 - DNA, 15 bp, Homo sapiens
gttcagagggaaaag

SEQ ID NO: 651960 - DNA, 15 bp, Homo sapiens
ttcagagggaaaagt

SEQ ID NO: 651961 - DNA, 15 bp, Homo sapiens
tcagagggaaaagtg

SEQ ID NO: 651962 - DNA, 15 bp, Homo sapiens
cagagggaaaagtga

SEQ ID NO: 651963 - DNA, 15 bp, Homo sapiens
agagggaaaagtgaa

SEQ ID NO: 651964 - DNA, 15 bp, Homo sapiens
gagggaaaagtgaat

SEQ ID NO: 651965 - DNA, 15 bp, Homo sapiens
agggaaaagtgaatt

SEQ ID NO: 651966 - DNA, 15 bp, Homo sapiens
gggaaaagtgaattg

SEQ ID NO: 651967 - DNA, 15 bp, Homo sapiens
ggaaaagtgaattgg

SEQ ID NO: 651968 - DNA, 15 bp, Homo sapiens
gaaaagtgaattggt

SEQ ID NO: 651969 - DNA, 15 bp, Homo sapiens
aaaagtgaattggta

SEQ ID NO: 651970 - DNA, 15 bp, Homo sapiens
aaagtgaattggtaa

SEQ ID NO: 651971 - DNA, 15 bp, Homo sapiens
aagtgaattggtaaa

SEQ ID NO: 651972 - DNA, 15 bp, Homo sapiens
agtgaattggtaaat

SEQ ID NO: 651973 - DNA, 15 bp, Homo sapiens
gtgaattggtaaatt

SEQ ID NO: 651974 - DNA, 15 bp, Homo sapiens
tgaattggtaaattg

SEQ ID NO: 651975 - DNA, 15 bp, Homo sapiens
gaattggtaaattga

SEQ ID NO: 651976 - DNA, 15 bp, Homo sapiens
aattggtaaattgaa

SEQ ID NO: 651977 - DNA, 15 bp, Homo sapiens
attggtaaattgaaa

SEQ ID NO: 651978 - DNA, 15 bp, Homo sapiens
ttggtaaattgaaaa

SEQ ID NO: 651979 - DNA, 15 bp, Homo sapiens
tggtaaattgaaaat

SEQ ID NO: 651980 - DNA, 15 bp, Homo sapiens
ggtaaattgaaaatc

SEQ ID NO: 651981 - DNA, 15 bp, Homo sapiens
gtaaattgaaaatca

SEQ ID NO: 651982 - DNA, 15 bp, Homo sapiens
taaattgaaaatcaa

SEQ ID NO: 651983 - DNA, 15 bp, Homo sapiens
aaattgaaaatcaaa

SEQ ID NO: 651984 - DNA, 15 bp, Homo sapiens
aattgaaaatcaaat

SEQ ID NO: 651985 - DNA, 15 bp, Homo sapiens
attgaaaatcaaata

SEQ ID NO: 651986 - DNA, 15 bp, Homo sapiens
ttgaaaatcaaataa

SEQ ID NO: 651987 - DNA, 15 bp, Homo sapiens
tgaaaatcaaataat

SEQ ID NO: 651988 - DNA, 15 bp, Homo sapiens
gaaaatcaaataata

SEQ ID NO: 651989 - DNA, 15 bp, Homo sapiens
aaaatcaaataatac

SEQ ID NO: 651990 - DNA, 15 bp, Homo sapiens
aaatcaaataataca

SEQ ID NO: 651991 - DNA, 15 bp, Homo sapiens
aatcaaataatacac

SEQ ID NO: 651992 - DNA, 15 bp, Homo sapiens
atcaaataatacaca

SEQ ID NO: 651993 - DNA, 15 bp, Homo sapiens
tcaaataatacacaa

SEQ ID NO: 651994 - DNA, 15 bp, Homo sapiens
caaataatacacaat

SEQ ID NO: 651995 - DNA, 15 bp, Homo sapiens
aaataatacacaata

SEQ ID NO: 651996 - DNA, 15 bp, Homo sapiens
aataatacacaatac

SEQ ID NO: 651997 - DNA, 15 bp, Homo sapiens
ataatacacaatacc

SEQ ID NO: 651998 - DNA, 15 bp, Homo sapiens
taatacacaatacca

SEQ ID NO: 651999 - DNA, 15 bp, Homo sapiens
aatacacaataccaa

SEQ ID NO: 652000 - DNA, 15 bp, Homo sapiens
atacacaataccaac

SEQ ID NO: 652001 - DNA, 15 bp, Homo sapiens
tacacaataccaact

SEQ ID NO: 652002 - DNA, 15 bp, Homo sapiens
acacaataccaactg

SEQ ID NO: 652003 - DNA, 15 bp, Homo sapiens
cacaataccaactgg

SEQ ID NO: 652004 - DNA, 15 bp, Homo sapiens
acaataccaactgga

SEQ ID NO: 652005 - DNA, 15 bp, Homo sapiens
caataccaactggaa

SEQ ID NO: 652006 - DNA, 15 bp, Homo sapiens
aataccaactggaag

SEQ ID NO: 652007 - DNA, 15 bp, Homo sapiens
ataccaactggaagc

SEQ ID NO: 652008 - DNA, 15 bp, Homo sapiens
taccaactggaagca

SEQ ID NO: 652009 - DNA, 15 bp, Homo sapiens
accaactggaagcac

SEQ ID NO: 652010 - DNA, 15 bp, Homo sapiens
ccaactggaagcact

SEQ ID NO: 652011 - DNA, 15 bp, Homo sapiens
caactggaagcactt

SEQ ID NO: 652012 - DNA, 15 bp, Homo sapiens
aactggaagcacttg

SEQ ID NO: 652013 - DNA, 15 bp, Homo sapiens
actggaagcacttga

SEQ ID NO: 652014 - DNA, 15 bp, Homo sapiens
ctggaagcacttgaa

SEQ ID NO: 652015 - DNA, 15 bp, Homo sapiens
tggaagcacttgaat

SEQ ID NO: 652016 - DNA, 15 bp, Homo sapiens
ggaagcacttgaata

SEQ ID NO: 652017 - DNA, 15 bp, Homo sapiens
gaagcacttgaataa

SEQ ID NO: 652018 - DNA, 15 bp, Homo sapiens
aagcacttgaataaa

SEQ ID NO: 652019 - DNA, 15 bp, Homo sapiens
agcacttgaataaaa

SEQ ID NO: 652020 - DNA, 15 bp, Homo sapiens
gcacttgaataaaaa

SEQ ID NO: 652021 - DNA, 15 bp, Homo sapiens
cacttgaataaaaat

SEQ ID NO: 652022 - DNA, 15 bp, Homo sapiens
acttgaataaaaatc

SEQ ID NO: 652023 - DNA, 15 bp, Homo sapiens
cttgaataaaaatcc

SEQ ID NO: 652024 - DNA, 15 bp, Homo sapiens
ttgaataaaaatccc

SEQ ID NO: 652025 - DNA, 15 bp, Homo sapiens
tgaataaaaatccct

SEQ ID NO: 652026 - DNA, 15 bp, Homo sapiens
gaataaaaatccctt

SEQ ID NO: 652027 - DNA, 15 bp, Homo sapiens
aataaaaatcccttt

SEQ ID NO: 652028 - DNA, 15 bp, Homo sapiens
ataaaaatccctttg

SEQ ID NO: 652029 - DNA, 15 bp, Homo sapiens
taaaaatccctttgg

SEQ ID NO: 652030 - DNA, 15 bp, Homo sapiens
aaaaatccctttggt

SEQ ID NO: 652031 - DNA, 15 bp, Homo sapiens
aaaatccctttggta

SEQ ID NO: 652032 - DNA, 15 bp, Homo sapiens
aaatccctttggtaa

SEQ ID NO: 652033 - DNA, 15 bp, Homo sapiens
aatccctttggtaac

SEQ ID NO: 652034 - DNA, 15 bp, Homo sapiens
atccctttggtaact

SEQ ID NO: 652035 - DNA, 15 bp, Homo sapiens
tccctttggtaactc

SEQ ID NO: 652036 - DNA, 15 bp, Homo sapiens
ccctttggtaactct

SEQ ID NO: 652037 - DNA, 15 bp, Homo sapiens
cctttggtaactctc

SEQ ID NO: 652038 - DNA, 15 bp, Homo sapiens
ctttggtaactctct

SEQ ID NO: 652039 - DNA, 15 bp, Homo sapiens
tttggtaactctctg

SEQ ID NO: 652040 - DNA, 15 bp, Homo sapiens
ttggtaactctctgt

SEQ ID NO: 652041 - DNA, 15 bp, Homo sapiens
tggtaactctctgta

SEQ ID NO: 652042 - DNA, 15 bp, Homo sapiens
ggtaactctctgtag

SEQ ID NO: 652043 - DNA, 15 bp, Homo sapiens
gtaactctctgtagt

SEQ ID NO: 652044 - DNA, 15 bp, Homo sapiens
taactctctgtagta

SEQ ID NO: 652045 - DNA, 15 bp, Homo sapiens
aactctctgtagtag

SEQ ID NO: 652046 - DNA, 15 bp, Homo sapiens
actctctgtagtagg

SEQ ID NO: 652047 - DNA, 15 bp, Homo sapiens
ctctctgtagtagga

SEQ ID NO: 652048 - DNA, 15 bp, Homo sapiens
tctctgtagtaggaa

SEQ ID NO: 652049 - DNA, 15 bp, Homo sapiens
ctctgtagtaggaat

SEQ ID NO: 652050 - DNA, 15 bp, Homo sapiens
tctgtagtaggaatc

SEQ ID NO: 652051 - DNA, 15 bp, Homo sapiens
ctgtagtaggaatcc

SEQ ID NO: 652052 - DNA, 15 bp, Homo sapiens
tgtagtaggaatcca

SEQ ID NO: 652053 - DNA, 15 bp, Homo sapiens
gtagtaggaatccaa

SEQ ID NO: 652054 - DNA, 15 bp, Homo sapiens
tagtaggaatccaat

SEQ ID NO: 652055 - DNA, 15 bp, Homo sapiens
agtaggaatccaatt

SEQ ID NO: 652056 - DNA, 15 bp, Homo sapiens
gtaggaatccaattt

SEQ ID NO: 652057 - DNA, 15 bp, Homo sapiens
taggaatccaatttt

SEQ ID NO: 652058 - DNA, 15 bp, Homo sapiens
aggaatccaatttta

SEQ ID NO: 652059 - DNA, 15 bp, Homo sapiens
ggaatccaattttat

SEQ ID NO: 652060 - DNA, 15 bp, Homo sapiens
gaatccaattttatg

SEQ ID NO: 652061 - DNA, 15 bp, Homo sapiens
aatccaattttatgt

SEQ ID NO: 652062 - DNA, 15 bp, Homo sapiens
atccaattttatgtc

SEQ ID NO: 652063 - DNA, 15 bp, Homo sapiens
tccaattttatgtct

SEQ ID NO: 652064 - DNA, 15 bp, Homo sapiens
ccaattttatgtctc

SEQ ID NO: 652065 - DNA, 15 bp, Homo sapiens
caattttatgtctct

SEQ ID NO: 652066 - DNA, 15 bp, Homo sapiens
aattttatgtctctc

SEQ ID NO: 652067 - DNA, 15 bp, Homo sapiens
attttatgtctctca

SEQ ID NO: 652068 - DNA, 15 bp, Homo sapiens
ttttatgtctctcat

SEQ ID NO: 652069 - DNA, 15 bp, Homo sapiens
tttatgtctctcatc

SEQ ID NO: 652070 - DNA, 15 bp, Homo sapiens
ttatgtctctcatct

SEQ ID NO: 652071 - DNA, 15 bp, Homo sapiens
tatgtctctcatctt

SEQ ID NO: 652072 - DNA, 15 bp, Homo sapiens
atgtctctcatcttt

SEQ ID NO: 652073 - DNA, 15 bp, Homo sapiens
tgtctctcatcttta

SEQ ID NO: 652074 - DNA, 15 bp, Homo sapiens
gtctctcatctttaa

SEQ ID NO: 652075 - DNA, 15 bp, Homo sapiens
tctctcatctttaaa

SEQ ID NO: 652076 - DNA, 15 bp, Homo sapiens
ctctcatctttaaat

SEQ ID NO: 652077 - DNA, 15 bp, Homo sapiens
tctcatctttaaatt

SEQ ID NO: 652078 - DNA, 15 bp, Homo sapiens
ctcatctttaaattt

SEQ ID NO: 652079 - DNA, 15 bp, Homo sapiens
tcatctttaaatttc

SEQ ID NO: 652080 - DNA, 15 bp, Homo sapiens
catctttaaatttcc

SEQ ID NO: 652081 - DNA, 15 bp, Homo sapiens
atctttaaatttcct

SEQ ID NO: 652082 - DNA, 15 bp, Homo sapiens
tctttaaatttcctg

SEQ ID NO: 652083 - DNA, 15 bp, Homo sapiens
ctttaaatttcctgc

SEQ ID NO: 652084 - DNA, 15 bp, Homo sapiens
tttaaatttcctgcc

SEQ ID NO: 652085 - DNA, 15 bp, Homo sapiens
ttaaatttcctgccc

SEQ ID NO: 652086 - DNA, 15 bp, Homo sapiens
taaatttcctgccca

SEQ ID NO: 652087 - DNA, 15 bp, Homo sapiens
aaatttcctgcccat

SEQ ID NO: 652088 - DNA, 15 bp, Homo sapiens
aatttcctgcccatt

SEQ ID NO: 652089 - DNA, 15 bp, Homo sapiens
atttcctgcccattg

SEQ ID NO: 652090 - DNA, 15 bp, Homo sapiens
tttcctgcccattgt

SEQ ID NO: 652091 - DNA, 15 bp, Homo sapiens
ttcctgcccattgta

SEQ ID NO: 652092 - DNA, 15 bp, Homo sapiens
tcctgcccattgtac

SEQ ID NO: 652093 - DNA, 15 bp, Homo sapiens
cctgcccattgtaca

SEQ ID NO: 652094 - DNA, 15 bp, Homo sapiens
ctgcccattgtacag

SEQ ID NO: 652095 - DNA, 15 bp, Homo sapiens
tgcccattgtacagt

SEQ ID NO: 652096 - DNA, 15 bp, Homo sapiens
gcccattgtacagtg

SEQ ID NO: 652097 - DNA, 15 bp, Homo sapiens
cccattgtacagtga

SEQ ID NO: 652098 - DNA, 15 bp, Homo sapiens
ccattgtacagtgag

SEQ ID NO: 652099 - DNA, 15 bp, Homo sapiens
cattgtacagtgagc

SEQ ID NO: 652100 - DNA, 15 bp, Homo sapiens
attgtacagtgagct

SEQ ID NO: 652101 - DNA, 15 bp, Homo sapiens
ttgtacagtgagcta

SEQ ID NO: 652102 - DNA, 15 bp, Homo sapiens
tgtacagtgagctac

SEQ ID NO: 652103 - DNA, 15 bp, Homo sapiens
gtacagtgagctact

SEQ ID NO: 652104 - DNA, 15 bp, Homo sapiens
tacagtgagctactc

SEQ ID NO: 652105 - DNA, 15 bp, Homo sapiens
acagtgagctactct

SEQ ID NO: 652106 - DNA, 15 bp, Homo sapiens
cagtgagctactcta

SEQ ID NO: 652107 - DNA, 15 bp, Homo sapiens
agtgagctactctac

SEQ ID NO: 652108 - DNA, 15 bp, Homo sapiens
gtgagctactctact

SEQ ID NO: 652109 - DNA, 15 bp, Homo sapiens
tgagctactctactt

SEQ ID NO: 652110 - DNA, 15 bp, Homo sapiens
gagctactctacttt

SEQ ID NO: 652111 - DNA, 15 bp, Homo sapiens
agctactctactttt

SEQ ID NO: 652112 - DNA, 15 bp, Homo sapiens
gctactctacttttg

SEQ ID NO: 652113 - DNA, 15 bp, Homo sapiens
ctactctacttttgt

SEQ ID NO: 652114 - DNA, 15 bp, Homo sapiens
tactctacttttgta

SEQ ID NO: 652115 - DNA, 15 bp, Homo sapiens
actctacttttgtaa

SEQ ID NO: 652116 - DNA, 15 bp, Homo sapiens
ctctacttttgtaaa

SEQ ID NO: 652117 - DNA, 15 bp, Homo sapiens
tctacttttgtaaat

SEQ ID NO: 652118 - DNA, 15 bp, Homo sapiens
ctacttttgtaaata

SEQ ID NO: 652119 - DNA, 15 bp, Homo sapiens
tacttttgtaaataa

SEQ ID NO: 652120 - DNA, 15 bp, Homo sapiens
acttttgtaaataat

SEQ ID NO: 652121 - DNA, 15 bp, Homo sapiens
cttttgtaaataatt

SEQ ID NO: 652122 - DNA, 15 bp, Homo sapiens
ttttgtaaataattt

SEQ ID NO: 652123 - DNA, 15 bp, Homo sapiens
tttgtaaataattta

SEQ ID NO: 652124 - DNA, 15 bp, Homo sapiens
ttgtaaataatttat

SEQ ID NO: 652125 - DNA, 15 bp, Homo sapiens
tgtaaataatttatt

SEQ ID NO: 652126 - DNA, 15 bp, Homo sapiens
gtaaataatttattc

SEQ ID NO: 652127 - DNA, 15 bp, Homo sapiens
taaataatttattct

SEQ ID NO: 652128 - DNA, 15 bp, Homo sapiens
aaataatttattctt

SEQ ID NO: 652129 - DNA, 15 bp, Homo sapiens
aataatttattcttt

SEQ ID NO: 652130 - DNA, 15 bp, Homo sapiens
ataatttattctttc

SEQ ID NO: 652131 - DNA, 15 bp, Homo sapiens
taatttattctttca

SEQ ID NO: 652132 - DNA, 15 bp, Homo sapiens
aatttattctttcaa

SEQ ID NO: 652133 - DNA, 15 bp, Homo sapiens
atttattctttcaac

SEQ ID NO: 652134 - DNA, 15 bp, Homo sapiens
tttattctttcaacc

SEQ ID NO: 652135 - DNA, 15 bp, Homo sapiens
ttattctttcaacca

SEQ ID NO: 652136 - DNA, 15 bp, Homo sapiens
tattctttcaaccaa

SEQ ID NO: 652137 - DNA, 15 bp, Homo sapiens
attctttcaaccaat

SEQ ID NO: 652138 - DNA, 15 bp, Homo sapiens
ttctttcaaccaata

SEQ ID NO: 652139 - DNA, 15 bp, Homo sapiens
tctttcaaccaatat

SEQ ID NO: 652140 - DNA, 15 bp, Homo sapiens
ctttcaaccaatatt

SEQ ID NO: 652141 - DNA, 15 bp, Homo sapiens
tttcaaccaatattt

SEQ ID NO: 652142 - DNA, 15 bp, Homo sapiens
ttcaaccaatatttc

SEQ ID NO: 652143 - DNA, 15 bp, Homo sapiens
tcaaccaatatttct

SEQ ID NO: 652144 - DNA, 15 bp, Homo sapiens
caaccaatatttctt

SEQ ID NO: 652145 - DNA, 15 bp, Homo sapiens
aaccaatatttcttg

SEQ ID NO: 652146 - DNA, 15 bp, Homo sapiens
accaatatttcttga

SEQ ID NO: 652147 - DNA, 15 bp, Homo sapiens
ccaatatttcttgag

SEQ ID NO: 652148 - DNA, 15 bp, Homo sapiens
caatatttcttgagt

SEQ ID NO: 652149 - DNA, 15 bp, Homo sapiens
aatatttcttgagtc

SEQ ID NO: 652150 - DNA, 15 bp, Homo sapiens
atatttcttgagtcc

SEQ ID NO: 652151 - DNA, 15 bp, Homo sapiens
tatttcttgagtcct

SEQ ID NO: 652152 - DNA, 15 bp, Homo sapiens
atttcttgagtcctt

SEQ ID NO: 652153 - DNA, 15 bp, Homo sapiens
tttcttgagtccttg

SEQ ID NO: 652154 - DNA, 15 bp, Homo sapiens
ttcttgagtccttgc

SEQ ID NO: 652155 - DNA, 15 bp, Homo sapiens
tcttgagtccttgct

SEQ ID NO: 652156 - DNA, 15 bp, Homo sapiens
cttgagtccttgcta

SEQ ID NO: 652157 - DNA, 15 bp, Homo sapiens
ttgagtccttgctat

SEQ ID NO: 652158 - DNA, 15 bp, Homo sapiens
tgagtccttgctatg

SEQ ID NO: 652159 - DNA, 15 bp, Homo sapiens
gagtccttgctatgt

SEQ ID NO: 652160 - DNA, 15 bp, Homo sapiens
agtccttgctatgtg

SEQ ID NO: 652161 - DNA, 15 bp, Homo sapiens
gtccttgctatgtgc

SEQ ID NO: 652162 - DNA, 15 bp, Homo sapiens
tccttgctatgtgca

SEQ ID NO: 652163 - DNA, 15 bp, Homo sapiens
ccttgctatgtgcag

SEQ ID NO: 652164 - DNA, 15 bp, Homo sapiens
cttgctatgtgcaga

SEQ ID NO: 652165 - DNA, 15 bp, Homo sapiens
ttgctatgtgcagac

SEQ ID NO: 652166 - DNA, 15 bp, Homo sapiens
tgctatgtgcagaca

SEQ ID NO: 652167 - DNA, 15 bp, Homo sapiens
gctatgtgcagacat

SEQ ID NO: 652168 - DNA, 15 bp, Homo sapiens
ctatgtgcagacatg

SEQ ID NO: 652169 - DNA, 15 bp, Homo sapiens
tatgtgcagacatgg

SEQ ID NO: 652170 - DNA, 15 bp, Homo sapiens
atgtgcagacatggc

SEQ ID NO: 652171 - DNA, 15 bp, Homo sapiens
tgtgcagacatggca

SEQ ID NO: 652172 - DNA, 15 bp, Homo sapiens
gtgcagacatggcat

SEQ ID NO: 652173 - DNA, 15 bp, Homo sapiens
tgcagacatggcata

SEQ ID NO: 652174 - DNA, 15 bp, Homo sapiens
gcagacatggcatac

SEQ ID NO: 652175 - DNA, 15 bp, Homo sapiens
cagacatggcatact

SEQ ID NO: 652176 - DNA, 15 bp, Homo sapiens
agacatggcatacta

SEQ ID NO: 652177 - DNA, 15 bp, Homo sapiens
gacatggcatactat

SEQ ID NO: 652178 - DNA, 15 bp, Homo sapiens
acatggcatactatg

SEQ ID NO: 652179 - DNA, 15 bp, Homo sapiens
catggcatactatgg

SEQ ID NO: 652180 - DNA, 15 bp, Homo sapiens
atggcatactatggg

SEQ ID NO: 652181 - DNA, 15 bp, Homo sapiens
tggcatactatgggt

SEQ ID NO: 652182 - DNA, 15 bp, Homo sapiens
ggcatactatgggtc

SEQ ID NO: 652183 - DNA, 15 bp, Homo sapiens
gcatactatgggtct

SEQ ID NO: 652184 - DNA, 15 bp, Homo sapiens
catactatgggtctc

SEQ ID NO: 652185 - DNA, 15 bp, Homo sapiens
atactatgggtctct

SEQ ID NO: 652186 - DNA, 15 bp, Homo sapiens
tactatgggtctcta

SEQ ID NO: 652187 - DNA, 15 bp, Homo sapiens
actatgggtctctaa

SEQ ID NO: 652188 - DNA, 15 bp, Homo sapiens
ctatgggtctctaac

SEQ ID NO: 652189 - DNA, 15 bp, Homo sapiens
tatgggtctctaaca

SEQ ID NO: 652190 - DNA, 15 bp, Homo sapiens
atgggtctctaacat

SEQ ID NO: 652191 - DNA, 15 bp, Homo sapiens
tgggtctctaacatt

SEQ ID NO: 652192 - DNA, 15 bp, Homo sapiens
gggtctctaacattt

SEQ ID NO: 652193 - DNA, 15 bp, Homo sapiens
ggtctctaacatttt

SEQ ID NO: 652194 - DNA, 15 bp, Homo sapiens
gtctctaacatttta

SEQ ID NO: 652195 - DNA, 15 bp, Homo sapiens
tctctaacattttaa

SEQ ID NO: 652196 - DNA, 15 bp, Homo sapiens
ctctaacattttaat

SEQ ID NO: 652197 - DNA, 15 bp, Homo sapiens
tctaacattttaatc

SEQ ID NO: 652198 - DNA, 15 bp, Homo sapiens
ctaacattttaatca

SEQ ID NO: 652199 - DNA, 15 bp, Homo sapiens
taacattttaatcaa

SEQ ID NO: 652200 - DNA, 15 bp, Homo sapiens
aacattttaatcaac

SEQ ID NO: 652201 - DNA, 15 bp, Homo sapiens
acattttaatcaact

SEQ ID NO: 652202 - DNA, 15 bp, Homo sapiens
cattttaatcaactg

SEQ ID NO: 652203 - DNA, 15 bp, Homo sapiens
attttaatcaactga

SEQ ID NO: 652204 - DNA, 15 bp, Homo sapiens
ttttaatcaactgat

SEQ ID NO: 652205 - DNA, 15 bp, Homo sapiens
tttaatcaactgatt

SEQ ID NO: 652206 - DNA, 15 bp, Homo sapiens
ttaatcaactgatta

SEQ ID NO: 652207 - DNA, 15 bp, Homo sapiens
taatcaactgattat

SEQ ID NO: 652208 - DNA, 15 bp, Homo sapiens
aatcaactgattatt

SEQ ID NO: 652209 - DNA, 15 bp, Homo sapiens
atcaactgattatta

SEQ ID NO: 652210 - DNA, 15 bp, Homo sapiens
tcaactgattattaa

SEQ ID NO: 652211 - DNA, 15 bp, Homo sapiens
caactgattattaac

SEQ ID NO: 652212 - DNA, 15 bp, Homo sapiens
aactgattattaacc

SEQ ID NO: 652213 - DNA, 15 bp, Homo sapiens
actgattattaacct

SEQ ID NO: 652214 - DNA, 15 bp, Homo sapiens
ctgattattaacctg

SEQ ID NO: 652215 - DNA, 15 bp, Homo sapiens
tgattattaacctgt

SEQ ID NO: 652216 - DNA, 15 bp, Homo sapiens
gattattaacctgtt

SEQ ID NO: 652217 - DNA, 15 bp, Homo sapiens
attattaacctgtta

SEQ ID NO: 652218 - DNA, 15 bp, Homo sapiens
ttattaacctgttac

SEQ ID NO: 652219 - DNA, 15 bp, Homo sapiens
tattaacctgttact

SEQ ID NO: 652220 - DNA, 15 bp, Homo sapiens
attaacctgttactc

SEQ ID NO: 652221 - DNA, 15 bp, Homo sapiens
ttaacctgttactcc

SEQ ID NO: 652222 - DNA, 15 bp, Homo sapiens
taacctgttactccc

SEQ ID NO: 652223 - DNA, 15 bp, Homo sapiens
aacctgttactccca

SEQ ID NO: 652224 - DNA, 15 bp, Homo sapiens
acctgttactcccaa

SEQ ID NO: 652225 - DNA, 15 bp, Homo sapiens
cctgttactcccaac

SEQ ID NO: 652226 - DNA, 15 bp, Homo sapiens
ctgttactcccaacg

SEQ ID NO: 652227 - DNA, 15 bp, Homo sapiens
tgttactcccaacgt

SEQ ID NO: 652228 - DNA, 15 bp, Homo sapiens
gttactcccaacgtc

SEQ ID NO: 652229 - DNA, 15 bp, Homo sapiens
ttactcccaacgtct

SEQ ID NO: 652230 - DNA, 15 bp, Homo sapiens
tactcccaacgtctt

SEQ ID NO: 652231 - DNA, 15 bp, Homo sapiens
actcccaacgtcttt

SEQ ID NO: 652232 - DNA, 15 bp, Homo sapiens
ctcccaacgtctttc

SEQ ID NO: 652233 - DNA, 15 bp, Homo sapiens
tcccaacgtctttct

SEQ ID NO: 652234 - DNA, 15 bp, Homo sapiens
cccaacgtctttctg

SEQ ID NO: 652235 - DNA, 15 bp, Homo sapiens
ccaacgtctttctgt

SEQ ID NO: 652236 - DNA, 15 bp, Homo sapiens
caacgtctttctgta

SEQ ID NO: 652237 - DNA, 15 bp, Homo sapiens
aacgtctttctgtaa

SEQ ID NO: 652238 - DNA, 15 bp, Homo sapiens
acgtctttctgtaag

SEQ ID NO: 652239 - DNA, 15 bp, Homo sapiens
cgtctttctgtaagc

SEQ ID NO: 652240 - DNA, 15 bp, Homo sapiens
gtctttctgtaagcc

SEQ ID NO: 652241 - DNA, 15 bp, Homo sapiens
tctttctgtaagcct

SEQ ID NO: 652242 - DNA, 15 bp, Homo sapiens
ctttctgtaagcctc

SEQ ID NO: 652243 - DNA, 15 bp, Homo sapiens
tttctgtaagcctct

SEQ ID NO: 652244 - DNA, 15 bp, Homo sapiens
ttctgtaagcctctg

SEQ ID NO: 652245 - DNA, 15 bp, Homo sapiens
tctgtaagcctctgc

SEQ ID NO: 652246 - DNA, 15 bp, Homo sapiens
ctgtaagcctctgct

SEQ ID NO: 652247 - DNA, 15 bp, Homo sapiens
tgtaagcctctgctt

SEQ ID NO: 652248 - DNA, 15 bp, Homo sapiens
gtaagcctctgctta

SEQ ID NO: 652249 - DNA, 15 bp, Homo sapiens
taagcctctgcttat

SEQ ID NO: 652250 - DNA, 15 bp, Homo sapiens
aagcctctgcttata

SEQ ID NO: 652251 - DNA, 15 bp, Homo sapiens
agcctctgcttatat

SEQ ID NO: 652252 - DNA, 15 bp, Homo sapiens
gcctctgcttatatc

SEQ ID NO: 652253 - DNA, 15 bp, Homo sapiens
cctctgcttatatct

SEQ ID NO: 652254 - DNA, 15 bp, Homo sapiens
ctctgcttatatctt

SEQ ID NO: 652255 - DNA, 15 bp, Homo sapiens
tctgcttatatctta

SEQ ID NO: 652256 - DNA, 15 bp, Homo sapiens
ctgcttatatcttaa

SEQ ID NO: 652257 - DNA, 15 bp, Homo sapiens
tgcttatatcttaag

SEQ ID NO: 652258 - DNA, 15 bp, Homo sapiens
gcttatatcttaaga

SEQ ID NO: 652259 - DNA, 15 bp, Homo sapiens
cttatatcttaagag

SEQ ID NO: 652260 - DNA, 15 bp, Homo sapiens
ttatatcttaagaga

SEQ ID NO: 652261 - DNA, 15 bp, Homo sapiens
tatatcttaagagaa

SEQ ID NO: 652262 - DNA, 15 bp, Homo sapiens
atatcttaagagaaa

SEQ ID NO: 652263 - DNA, 15 bp, Homo sapiens
tatcttaagagaaaa

SEQ ID NO: 652264 - DNA, 15 bp, Homo sapiens
atcttaagagaaaat

SEQ ID NO: 652265 - DNA, 15 bp, Homo sapiens
tcttaagagaaaatt

SEQ ID NO: 652266 - DNA, 15 bp, Homo sapiens
cttaagagaaaattt

SEQ ID NO: 652267 - DNA, 15 bp, Homo sapiens
ttaagagaaaatttc

SEQ ID NO: 652268 - DNA, 15 bp, Homo sapiens
taagagaaaatttcc

SEQ ID NO: 652269 - DNA, 15 bp, Homo sapiens
aagagaaaatttcct

SEQ ID NO: 652270 - DNA, 15 bp, Homo sapiens
agagaaaatttcctt

SEQ ID NO: 652271 - DNA, 15 bp, Homo sapiens
gagaaaatttccttt

SEQ ID NO: 652272 - DNA, 15 bp, Homo sapiens
agaaaatttcctttg

SEQ ID NO: 652273 - DNA, 15 bp, Homo sapiens
gaaaatttcctttgg

SEQ ID NO: 652274 - DNA, 15 bp, Homo sapiens
aaaatttcctttggg

SEQ ID NO: 652275 - DNA, 15 bp, Homo sapiens
aaatttcctttggga

SEQ ID NO: 652276 - DNA, 15 bp, Homo sapiens
aatttcctttgggaa

SEQ ID NO: 652277 - DNA, 15 bp, Homo sapiens
atttcctttgggaag

SEQ ID NO: 652278 - DNA, 15 bp, Homo sapiens
tttcctttgggaaga

SEQ ID NO: 652279 - DNA, 15 bp, Homo sapiens
ttcctttgggaagat

SEQ ID NO: 652280 - DNA, 15 bp, Homo sapiens
tcctttgggaagatg

SEQ ID NO: 652281 - DNA, 15 bp, Homo sapiens
cctttgggaagatga

SEQ ID NO: 652282 - DNA, 15 bp, Homo sapiens
ctttgggaagatgaa

SEQ ID NO: 652283 - DNA, 15 bp, Homo sapiens
tttgggaagatgaaa

SEQ ID NO: 652284 - DNA, 15 bp, Homo sapiens
ttgggaagatgaaat

SEQ ID NO: 652285 - DNA, 15 bp, Homo sapiens
tgggaagatgaaatg

SEQ ID NO: 652286 - DNA, 15 bp, Homo sapiens
gggaagatgaaatgc

SEQ ID NO: 652287 - DNA, 15 bp, Homo sapiens
ggaagatgaaatgca

SEQ ID NO: 652288 - DNA, 15 bp, Homo sapiens
gaagatgaaatgcat

SEQ ID NO: 652289 - DNA, 15 bp, Homo sapiens
aagatgaaatgcatc

SEQ ID NO: 652290 - DNA, 15 bp, Homo sapiens
agatgaaatgcatcc

SEQ ID NO: 652291 - DNA, 15 bp, Homo sapiens
gatgaaatgcatcct

SEQ ID NO: 652292 - DNA, 15 bp, Homo sapiens
atgaaatgcatcctt

SEQ ID NO: 652293 - DNA, 15 bp, Homo sapiens
tgaaatgcatccttt

SEQ ID NO: 652294 - DNA, 15 bp, Homo sapiens
gaaatgcatccttta

SEQ ID NO: 652295 - DNA, 15 bp, Homo sapiens
aaatgcatcctttaa

SEQ ID NO: 652296 - DNA, 15 bp, Homo sapiens
aatgcatcctttaac

SEQ ID NO: 652297 - DNA, 15 bp, Homo sapiens
atgcatcctttaaca

SEQ ID NO: 652298 - DNA, 15 bp, Homo sapiens
tgcatcctttaacac

SEQ ID NO: 652299 - DNA, 15 bp, Homo sapiens
gcatcctttaacact

SEQ ID NO: 652300 - DNA, 15 bp, Homo sapiens
catcctttaacacta

SEQ ID NO: 652301 - DNA, 15 bp, Homo sapiens
atcctttaacactat

SEQ ID NO: 652302 - DNA, 15 bp, Homo sapiens
tcctttaacactata

SEQ ID NO: 652303 - DNA, 15 bp, Homo sapiens
cctttaacactatat

SEQ ID NO: 652304 - DNA, 15 bp, Homo sapiens
ctttaacactatatt

SEQ ID NO: 652305 - DNA, 15 bp, Homo sapiens
tttaacactatattc

SEQ ID NO: 652306 - DNA, 15 bp, Homo sapiens
ttaacactatattcc

SEQ ID NO: 652307 - DNA, 15 bp, Homo sapiens
taacactatattcct

SEQ ID NO: 652308 - DNA, 15 bp, Homo sapiens
aacactatattcctt

SEQ ID NO: 652309 - DNA, 15 bp, Homo sapiens
acactatattccttg

SEQ ID NO: 652310 - DNA, 15 bp, Homo sapiens
cactatattccttgc

SEQ ID NO: 652311 - DNA, 15 bp, Homo sapiens
actatattccttgct

SEQ ID NO: 652312 - DNA, 15 bp, Homo sapiens
ctatattccttgctc

SEQ ID NO: 652313 - DNA, 15 bp, Homo sapiens
tatattccttgctct

SEQ ID NO: 652314 - DNA, 15 bp, Homo sapiens
atattccttgctctc

SEQ ID NO: 652315 - DNA, 15 bp, Homo sapiens
tattccttgctctct

SEQ ID NO: 652316 - DNA, 15 bp, Homo sapiens
attccttgctctctc

SEQ ID NO: 652317 - DNA, 15 bp, Homo sapiens
ttccttgctctctct

SEQ ID NO: 652318 - DNA, 15 bp, Homo sapiens
tccttgctctctctc

SEQ ID NO: 652319 - DNA, 15 bp, Homo sapiens
ccttgctctctctct

SEQ ID NO: 652320 - DNA, 15 bp, Homo sapiens
cttgctctctctctc

SEQ ID NO: 652321 - DNA, 15 bp, Homo sapiens
ttgctctctctctct

SEQ ID NO: 652322 - DNA, 15 bp, Homo sapiens
tgctctctctctctc

SEQ ID NO: 652323 - DNA, 15 bp, Homo sapiens
gctctctctctctct

SEQ ID NO: 652324 - DNA, 15 bp, Homo sapiens
ctctctctctctctt

SEQ ID NO: 652325 - DNA, 15 bp, Homo sapiens
tctctctctctcttc

SEQ ID NO: 652326 - DNA, 15 bp, Homo sapiens
ctctctctctcttct

SEQ ID NO: 652327 - DNA, 15 bp, Homo sapiens
tctctctctcttctc

SEQ ID NO: 652328 - DNA, 15 bp, Homo sapiens
ctctctctcttctct

SEQ ID NO: 652329 - DNA, 15 bp, Homo sapiens
tctctctcttctctc

SEQ ID NO: 652330 - DNA, 15 bp, Homo sapiens
ctctctcttctctct

SEQ ID NO: 652331 - DNA, 15 bp, Homo sapiens
tctctcttctctctc

SEQ ID NO: 652332 - DNA, 15 bp, Homo sapiens
ctctcttctctctct

SEQ ID NO: 652333 - DNA, 15 bp, Homo sapiens
tctcttctctctctc

SEQ ID NO: 652334 - DNA, 15 bp, Homo sapiens
ctcttctctctctct

SEQ ID NO: 652335 - DNA, 15 bp, Homo sapiens
tcttctctctctctc

SEQ ID NO: 652336 - DNA, 15 bp, Homo sapiens
cttctctctctctct

SEQ ID NO: 652337 - DNA, 15 bp, Homo sapiens
ttctctctctctctc

SEQ ID NO: 652338 - DNA, 15 bp, Homo sapiens
tctctctctctctct

SEQ ID NO: 652339 - DNA, 15 bp, Homo sapiens
ctctctctctctctc

SEQ ID NO: 652340 - DNA, 15 bp, Homo sapiens
tctctctctctctcg

SEQ ID NO: 652341 - DNA, 15 bp, Homo sapiens
ctctctctctctcgc

SEQ ID NO: 652342 - DNA, 15 bp, Homo sapiens
tctctctctctcgct

SEQ ID NO: 652343 - DNA, 15 bp, Homo sapiens
ctctctctctcgctc

SEQ ID NO: 652344 - DNA, 15 bp, Homo sapiens
tctctctctcgctcg

SEQ ID NO: 652345 - DNA, 15 bp, Homo sapiens
ctctctctcgctcgc

SEQ ID NO: 652346 - DNA, 15 bp, Homo sapiens
tctctctcgctcgct

SEQ ID NO: 652347 - DNA, 15 bp, Homo sapiens
ctctctcgctcgctc

SEQ ID NO: 652348 - DNA, 15 bp, Homo sapiens
tctctcgctcgctct

SEQ ID NO: 652349 - DNA, 15 bp, Homo sapiens
ctctcgctcgctctc

SEQ ID NO: 652350 - DNA, 15 bp, Homo sapiens
tctcgctcgctctct

SEQ ID NO: 652351 - DNA, 15 bp, Homo sapiens
ctcgctcgctctctc

SEQ ID NO: 652352 - DNA, 15 bp, Homo sapiens
tcgctcgctctctct

SEQ ID NO: 652353 - DNA, 15 bp, Homo sapiens
cgctcgctctctctc

SEQ ID NO: 652354 - DNA, 15 bp, Homo sapiens
gctcgctctctctct

SEQ ID NO: 652355 - DNA, 15 bp, Homo sapiens
ctcgctctctctctc

SEQ ID NO: 652356 - DNA, 15 bp, Homo sapiens
tcgctctctctctca

SEQ ID NO: 652357 - DNA, 15 bp, Homo sapiens
cgctctctctctcag

SEQ ID NO: 652358 - DNA, 15 bp, Homo sapiens
gctctctctctcagg

SEQ ID NO: 652359 - DNA, 15 bp, Homo sapiens
ctctctctctcaggt

SEQ ID NO: 652360 - DNA, 15 bp, Homo sapiens
tctctctctcaggtc

SEQ ID NO: 652361 - DNA, 15 bp, Homo sapiens
ctctctctcaggtct

SEQ ID NO: 652362 - DNA, 15 bp, Homo sapiens
tctctctcaggtctt

SEQ ID NO: 652363 - DNA, 15 bp, Homo sapiens
gaatttatcctttta

SEQ ID NO: 652364 - DNA, 15 bp, Homo sapiens
aatttatccttttat

SEQ ID NO: 652365 - DNA, 15 bp, Homo sapiens
atttatccttttatg

SEQ ID NO: 652366 - DNA, 15 bp, Homo sapiens
tttatccttttatgt

SEQ ID NO: 652367 - DNA, 15 bp, Homo sapiens
ttatccttttatgtc

SEQ ID NO: 652368 - DNA, 15 bp, Homo sapiens
tatccttttatgtct

SEQ ID NO: 652369 - DNA, 15 bp, Homo sapiens
atccttttatgtctg

SEQ ID NO: 652370 - DNA, 15 bp, Homo sapiens
tccttttatgtctgg

SEQ ID NO: 652371 - DNA, 15 bp, Homo sapiens
ccttttatgtctggc

SEQ ID NO: 652372 - DNA, 15 bp, Homo sapiens
cttttatgtctggct

SEQ ID NO: 652373 - DNA, 15 bp, Homo sapiens
ttttatgtctggctt

SEQ ID NO: 652374 - DNA, 15 bp, Homo sapiens
tttatgtctggctta

SEQ ID NO: 652375 - DNA, 15 bp, Homo sapiens
ttatgtctggcttat

SEQ ID NO: 652376 - DNA, 15 bp, Homo sapiens
tatgtctggcttatt

SEQ ID NO: 652377 - DNA, 15 bp, Homo sapiens
atgtctggcttattt

SEQ ID NO: 652378 - DNA, 15 bp, Homo sapiens
tgtctggcttatttc

SEQ ID NO: 652379 - DNA, 15 bp, Homo sapiens
gtctggcttatttca

SEQ ID NO: 652380 - DNA, 15 bp, Homo sapiens
tctggcttatttcac

SEQ ID NO: 652381 - DNA, 15 bp, Homo sapiens
ctggcttatttcaca

SEQ ID NO: 652382 - DNA, 15 bp, Homo sapiens
tggcttatttcacat

SEQ ID NO: 652383 - DNA, 15 bp, Homo sapiens
ggcttatttcacata

SEQ ID NO: 652384 - DNA, 15 bp, Homo sapiens
gcttatttcacataa

SEQ ID NO: 652385 - DNA, 15 bp, Homo sapiens
cttatttcacataac

SEQ ID NO: 652386 - DNA, 15 bp, Homo sapiens
ttatttcacataaca

SEQ ID NO: 652387 - DNA, 15 bp, Homo sapiens
tatttcacataacat

SEQ ID NO: 652388 - DNA, 15 bp, Homo sapiens
atttcacataacatg

SEQ ID NO: 652389 - DNA, 15 bp, Homo sapiens
tttcacataacatga

SEQ ID NO: 652390 - DNA, 15 bp, Homo sapiens
ttcacataacatgat

SEQ ID NO: 652391 - DNA, 15 bp, Homo sapiens
tcacataacatgatg

SEQ ID NO: 652392 - DNA, 15 bp, Homo sapiens
cacataacatgatgt

SEQ ID NO: 652393 - DNA, 15 bp, Homo sapiens
acataacatgatgtt

SEQ ID NO: 652394 - DNA, 15 bp, Homo sapiens
cataacatgatgttt

SEQ ID NO: 652395 - DNA, 15 bp, Homo sapiens
ataacatgatgtttt

SEQ ID NO: 652396 - DNA, 15 bp, Homo sapiens
taacatgatgttttt

SEQ ID NO: 652397 - DNA, 15 bp, Homo sapiens
aacatgatgtttttg

SEQ ID NO: 652398 - DNA, 15 bp, Homo sapiens
acatgatgtttttga

SEQ ID NO: 652399 - DNA, 15 bp, Homo sapiens
catgatgtttttgaa

SEQ ID NO: 652400 - DNA, 15 bp, Homo sapiens
atgatgtttttgaag

SEQ ID NO: 652401 - DNA, 15 bp, Homo sapiens
tgatgtttttgaagt

SEQ ID NO: 652402 - DNA, 15 bp, Homo sapiens
gatgtttttgaagtt

SEQ ID NO: 652403 - DNA, 15 bp, Homo sapiens
atgtttttgaagttt

SEQ ID NO: 652404 - DNA, 15 bp, Homo sapiens
tgtttttgaagtttc

SEQ ID NO: 652405 - DNA, 15 bp, Homo sapiens
gtttttgaagtttct

SEQ ID NO: 652406 - DNA, 15 bp, Homo sapiens
tttttgaagtttctc

SEQ ID NO: 652407 - DNA, 15 bp, Homo sapiens
ttttgaagtttctct

SEQ ID NO: 652408 - DNA, 15 bp, Homo sapiens
tttgaagtttctcta

SEQ ID NO: 652409 - DNA, 15 bp, Homo sapiens
ttgaagtttctctat

SEQ ID NO: 652410 - DNA, 15 bp, Homo sapiens
tgaagtttctctatg

SEQ ID NO: 652411 - DNA, 15 bp, Homo sapiens
gaagtttctctatgc

SEQ ID NO: 652412 - DNA, 15 bp, Homo sapiens
aagtttctctatgct

SEQ ID NO: 652413 - DNA, 15 bp, Homo sapiens
agtttctctatgcta

SEQ ID NO: 652414 - DNA, 15 bp, Homo sapiens
gtttctctatgctat

SEQ ID NO: 652415 - DNA, 15 bp, Homo sapiens
tttctctatgctata

SEQ ID NO: 652416 - DNA, 15 bp, Homo sapiens
ttctctatgctatag

SEQ ID NO: 652417 - DNA, 15 bp, Homo sapiens
tctctatgctatagt

SEQ ID NO: 652418 - DNA, 15 bp, Homo sapiens
ctctatgctatagta

SEQ ID NO: 652419 - DNA, 15 bp, Homo sapiens
tctatgctatagtat

SEQ ID NO: 652420 - DNA, 15 bp, Homo sapiens
ctatgctatagtatg

SEQ ID NO: 652421 - DNA, 15 bp, Homo sapiens
tatgctatagtatgt

SEQ ID NO: 652422 - DNA, 15 bp, Homo sapiens
atgctatagtatgtg

SEQ ID NO: 652423 - DNA, 15 bp, Homo sapiens
tgctatagtatgtgt

SEQ ID NO: 652424 - DNA, 15 bp, Homo sapiens
gctatagtatgtgtc

SEQ ID NO: 652425 - DNA, 15 bp, Homo sapiens
ctatagtatgtgtca

SEQ ID NO: 652426 - DNA, 15 bp, Homo sapiens
tatagtatgtgtcag

SEQ ID NO: 652427 - DNA, 15 bp, Homo sapiens
atagtatgtgtcaga

SEQ ID NO: 652428 - DNA, 15 bp, Homo sapiens
tagtatgtgtcagag

SEQ ID NO: 652429 - DNA, 15 bp, Homo sapiens
agtatgtgtcagagc

SEQ ID NO: 652430 - DNA, 15 bp, Homo sapiens
gtatgtgtcagagct

SEQ ID NO: 652431 - DNA, 15 bp, Homo sapiens
tatgtgtcagagcta

SEQ ID NO: 652432 - DNA, 15 bp, Homo sapiens
atgtgtcagagctac

SEQ ID NO: 652433 - DNA, 15 bp, Homo sapiens
tgtgtcagagctaca

SEQ ID NO: 652434 - DNA, 15 bp, Homo sapiens
gtgtcagagctacat

SEQ ID NO: 652435 - DNA, 15 bp, Homo sapiens
tgtcagagctacatt

SEQ ID NO: 652436 - DNA, 15 bp, Homo sapiens
gtcagagctacattt

SEQ ID NO: 652437 - DNA, 15 bp, Homo sapiens
tcagagctacatttt

SEQ ID NO: 652438 - DNA, 15 bp, Homo sapiens
cagagctacattttt

SEQ ID NO: 652439 - DNA, 15 bp, Homo sapiens
agagctacattttta

SEQ ID NO: 652440 - DNA, 15 bp, Homo sapiens
gagctacatttttat

SEQ ID NO: 652441 - DNA, 15 bp, Homo sapiens
agctacatttttatg

SEQ ID NO: 652442 - DNA, 15 bp, Homo sapiens
gctacatttttatgg

SEQ ID NO: 652443 - DNA, 15 bp, Homo sapiens
ctacatttttatgga

SEQ ID NO: 652444 - DNA, 15 bp, Homo sapiens
tacatttttatggat

SEQ ID NO: 652445 - DNA, 15 bp, Homo sapiens
acatttttatggatg

SEQ ID NO: 652446 - DNA, 15 bp, Homo sapiens
catttttatggatgt

SEQ ID NO: 652447 - DNA, 15 bp, Homo sapiens
atttttatggatgtt

SEQ ID NO: 652448 - DNA, 15 bp, Homo sapiens
tttttatggatgttt

SEQ ID NO: 652449 - DNA, 15 bp, Homo sapiens
ttttatggatgttta

SEQ ID NO: 652450 - DNA, 15 bp, Homo sapiens
tttatggatgtttat

SEQ ID NO: 652451 - DNA, 15 bp, Homo sapiens
ttatggatgtttatt

SEQ ID NO: 652452 - DNA, 15 bp, Homo sapiens
tatggatgtttattt

SEQ ID NO: 652453 - DNA, 15 bp, Homo sapiens
atggatgtttatttt

SEQ ID NO: 652454 - DNA, 15 bp, Homo sapiens
tggatgtttatttta

SEQ ID NO: 652455 - DNA, 15 bp, Homo sapiens
ggatgtttattttat

SEQ ID NO: 652456 - DNA, 15 bp, Homo sapiens
gatgtttattttatg

SEQ ID NO: 652457 - DNA, 15 bp, Homo sapiens
atgtttattttatgg

SEQ ID NO: 652458 - DNA, 15 bp, Homo sapiens
tgtttattttatgga

SEQ ID NO: 652459 - DNA, 15 bp, Homo sapiens
gtttattttatggat

SEQ ID NO: 652460 - DNA, 15 bp, Homo sapiens
tttattttatggata

SEQ ID NO: 652461 - DNA, 15 bp, Homo sapiens
ttattttatggatat

SEQ ID NO: 652462 - DNA, 15 bp, Homo sapiens
tattttatggatata

SEQ ID NO: 652463 - DNA, 15 bp, Homo sapiens
attttatggatatat

SEQ ID NO: 652464 - DNA, 15 bp, Homo sapiens
ttttatggatatatc

SEQ ID NO: 652465 - DNA, 15 bp, Homo sapiens
tttatggatatatca

SEQ ID NO: 652466 - DNA, 15 bp, Homo sapiens
ttatggatatatcat

SEQ ID NO: 652467 - DNA, 15 bp, Homo sapiens
tatggatatatcatg

SEQ ID NO: 652468 - DNA, 15 bp, Homo sapiens
atggatatatcatgt

SEQ ID NO: 652469 - DNA, 15 bp, Homo sapiens
tggatatatcatgtt

SEQ ID NO: 652470 - DNA, 15 bp, Homo sapiens
ggatatatcatgttt

SEQ ID NO: 652471 - DNA, 15 bp, Homo sapiens
gatatatcatgtttt

SEQ ID NO: 652472 - DNA, 15 bp, Homo sapiens
atatatcatgttttc

SEQ ID NO: 652473 - DNA, 15 bp, Homo sapiens
tatatcatgttttct

SEQ ID NO: 652474 - DNA, 15 bp, Homo sapiens
atatcatgttttctt

SEQ ID NO: 652475 - DNA, 15 bp, Homo sapiens
tatcatgttttcttt

SEQ ID NO: 652476 - DNA, 15 bp, Homo sapiens
atcatgttttcttta

SEQ ID NO: 652477 - DNA, 15 bp, Homo sapiens
tcatgttttctttat

SEQ ID NO: 652478 - DNA, 15 bp, Homo sapiens
catgttttctttatt

SEQ ID NO: 652479 - DNA, 15 bp, Homo sapiens
atgttttctttattc

SEQ ID NO: 652480 - DNA, 15 bp, Homo sapiens
tgttttctttattca

SEQ ID NO: 652481 - DNA, 15 bp, Homo sapiens
gttttctttattcat

SEQ ID NO: 652482 - DNA, 15 bp, Homo sapiens
ttttctttattcatt

SEQ ID NO: 652483 - DNA, 15 bp, Homo sapiens
tttctttattcattc

SEQ ID NO: 652484 - DNA, 15 bp, Homo sapiens
ttctttattcattca

SEQ ID NO: 652485 - DNA, 15 bp, Homo sapiens
tctttattcattcat

SEQ ID NO: 652486 - DNA, 15 bp, Homo sapiens
ctttattcattcatc

SEQ ID NO: 652487 - DNA, 15 bp, Homo sapiens
tttattcattcatct

SEQ ID NO: 652488 - DNA, 15 bp, Homo sapiens
ttattcattcatctg

SEQ ID NO: 652489 - DNA, 15 bp, Homo sapiens
tattcattcatctgt

SEQ ID NO: 652490 - DNA, 15 bp, Homo sapiens
attcattcatctgtc

SEQ ID NO: 652491 - DNA, 15 bp, Homo sapiens
ttcattcatctgtct

SEQ ID NO: 652492 - DNA, 15 bp, Homo sapiens
tcattcatctgtctg

SEQ ID NO: 652493 - DNA, 15 bp, Homo sapiens
cattcatctgtctgt

SEQ ID NO: 652494 - DNA, 15 bp, Homo sapiens
attcatctgtctgtg

SEQ ID NO: 652495 - DNA, 15 bp, Homo sapiens
ttcatctgtctgtgg

SEQ ID NO: 652496 - DNA, 15 bp, Homo sapiens
tcatctgtctgtgga

SEQ ID NO: 652497 - DNA, 15 bp, Homo sapiens
catctgtctgtggac

SEQ ID NO: 652498 - DNA, 15 bp, Homo sapiens
atctgtctgtggaca

SEQ ID NO: 652499 - DNA, 15 bp, Homo sapiens
tctgtctgtggacat

SEQ ID NO: 652500 - DNA, 15 bp, Homo sapiens
ctgtctgtggacatt

SEQ ID NO: 652501 - DNA, 15 bp, Homo sapiens
tgtctgtggacattc

SEQ ID NO: 652502 - DNA, 15 bp, Homo sapiens
gtctgtggacattca

SEQ ID NO: 652503 - DNA, 15 bp, Homo sapiens
tctgtggacattcag

SEQ ID NO: 652504 - DNA, 15 bp, Homo sapiens
ctgtggacattcagg

SEQ ID NO: 652505 - DNA, 15 bp, Homo sapiens
tgtggacattcaggt

SEQ ID NO: 652506 - DNA, 15 bp, Homo sapiens
gtggacattcaggtt

SEQ ID NO: 652507 - DNA, 15 bp, Homo sapiens
tggacattcaggttg

SEQ ID NO: 652508 - DNA, 15 bp, Homo sapiens
ggacattcaggttgt

SEQ ID NO: 652509 - DNA, 15 bp, Homo sapiens
gacattcaggttgtt

SEQ ID NO: 652510 - DNA, 15 bp, Homo sapiens
acattcaggttgttt

SEQ ID NO: 652511 - DNA, 15 bp, Homo sapiens
cattcaggttgtttg

SEQ ID NO: 652512 - DNA, 15 bp, Homo sapiens
attcaggttgtttgg

SEQ ID NO: 652513 - DNA, 15 bp, Homo sapiens
ttcaggttgtttggc

SEQ ID NO: 652514 - DNA, 15 bp, Homo sapiens
tcaggttgtttggct

SEQ ID NO: 652515 - DNA, 15 bp, Homo sapiens
caggttgtttggctg

SEQ ID NO: 652516 - DNA, 15 bp, Homo sapiens
aggttgtttggctgt

SEQ ID NO: 652517 - DNA, 15 bp, Homo sapiens
ggttgtttggctgtt

SEQ ID NO: 652518 - DNA, 15 bp, Homo sapiens
gttgtttggctgttg

SEQ ID NO: 652519 - DNA, 15 bp, Homo sapiens
ttgtttggctgttgt

SEQ ID NO: 652520 - DNA, 15 bp, Homo sapiens
tgtttggctgttgtg

SEQ ID NO: 652521 - DNA, 15 bp, Homo sapiens
gtttggctgttgtga

SEQ ID NO: 652522 - DNA, 15 bp, Homo sapiens
tttggctgttgtgat

SEQ ID NO: 652523 - DNA, 15 bp, Homo sapiens
ttggctgttgtgatt

SEQ ID NO: 652524 - DNA, 15 bp, Homo sapiens
tggctgttgtgatta

SEQ ID NO: 652525 - DNA, 15 bp, Homo sapiens
ggctgttgtgattaa

SEQ ID NO: 652526 - DNA, 15 bp, Homo sapiens
gctgttgtgattaat

SEQ ID NO: 652527 - DNA, 15 bp, Homo sapiens
ctgttgtgattaatt

SEQ ID NO: 652528 - DNA, 15 bp, Homo sapiens
tgttgtgattaattc

SEQ ID NO: 652529 - DNA, 15 bp, Homo sapiens
gttgtgattaattct

SEQ ID NO: 652530 - DNA, 15 bp, Homo sapiens
ttgtgattaattctg

SEQ ID NO: 652531 - DNA, 15 bp, Homo sapiens
tgtgattaattctgc

SEQ ID NO: 652532 - DNA, 15 bp, Homo sapiens
gtgattaattctgct

SEQ ID NO: 652533 - DNA, 15 bp, Homo sapiens
tgattaattctgctc

SEQ ID NO: 652534 - DNA, 15 bp, Homo sapiens
gattaattctgctct

SEQ ID NO: 652535 - DNA, 15 bp, Homo sapiens
attaattctgctctg

SEQ ID NO: 652536 - DNA, 15 bp, Homo sapiens
ttaattctgctctga

SEQ ID NO: 652537 - DNA, 15 bp, Homo sapiens
taattctgctctgaa

SEQ ID NO: 652538 - DNA, 15 bp, Homo sapiens
aattctgctctgaac

SEQ ID NO: 652539 - DNA, 15 bp, Homo sapiens
attctgctctgaacg

SEQ ID NO: 652540 - DNA, 15 bp, Homo sapiens
ttctgctctgaacgt

SEQ ID NO: 652541 - DNA, 15 bp, Homo sapiens
tctgctctgaacgtg

SEQ ID NO: 652542 - DNA, 15 bp, Homo sapiens
ctgctctgaacgtgg

SEQ ID NO: 652543 - DNA, 15 bp, Homo sapiens
tgctctgaacgtggg

SEQ ID NO: 652544 - DNA, 15 bp, Homo sapiens
gctctgaacgtgggt

SEQ ID NO: 652545 - DNA, 15 bp, Homo sapiens
ctctgaacgtgggtg

SEQ ID NO: 652546 - DNA, 15 bp, Homo sapiens
tctgaacgtgggtgt

SEQ ID NO: 652547 - DNA, 15 bp, Homo sapiens
ctgaacgtgggtgta

SEQ ID NO: 652548 - DNA, 15 bp, Homo sapiens
tgaacgtgggtgtac

SEQ ID NO: 652549 - DNA, 15 bp, Homo sapiens
gaacgtgggtgtaca

SEQ ID NO: 652550 - DNA, 15 bp, Homo sapiens
aacgtgggtgtacaa

SEQ ID NO: 652551 - DNA, 15 bp, Homo sapiens
acgtgggtgtacaaa

SEQ ID NO: 652552 - DNA, 15 bp, Homo sapiens
cgtgggtgtacaaat

SEQ ID NO: 652553 - DNA, 15 bp, Homo sapiens
gtgggtgtacaaatg

SEQ ID NO: 652554 - DNA, 15 bp, Homo sapiens
tgggtgtacaaatga

SEQ ID NO: 652555 - DNA, 15 bp, Homo sapiens
gggtgtacaaatgag

SEQ ID NO: 652556 - DNA, 15 bp, Homo sapiens
ggtgtacaaatgaga

SEQ ID NO: 652557 - DNA, 15 bp, Homo sapiens
gtgtacaaatgagaa

SEQ ID NO: 652558 - DNA, 15 bp, Homo sapiens
tgtacaaatgagaaa

SEQ ID NO: 652559 - DNA, 15 bp, Homo sapiens
gtacaaatgagaaat

SEQ ID NO: 652560 - DNA, 15 bp, Homo sapiens
tacaaatgagaaatt

SEQ ID NO: 652561 - DNA, 15 bp, Homo sapiens
acaaatgagaaattc

SEQ ID NO: 652562 - DNA, 15 bp, Homo sapiens
caaatgagaaattct

SEQ ID NO: 652563 - DNA, 15 bp, Homo sapiens
aaatgagaaattctt

SEQ ID NO: 652564 - DNA, 15 bp, Homo sapiens
aatgagaaattcttg

SEQ ID NO: 652565 - DNA, 15 bp, Homo sapiens
atgagaaattcttga

SEQ ID NO: 652566 - DNA, 15 bp, Homo sapiens
tgagaaattcttgat

SEQ ID NO: 652567 - DNA, 15 bp, Homo sapiens
gagaaattcttgatt

SEQ ID NO: 652568 - DNA, 15 bp, Homo sapiens
agaaattcttgattt

SEQ ID NO: 652569 - DNA, 15 bp, Homo sapiens
gaaattcttgattta

SEQ ID NO: 652570 - DNA, 15 bp, Homo sapiens
aaattcttgatttag

SEQ ID NO: 652571 - DNA, 15 bp, Homo sapiens
aattcttgatttagc

SEQ ID NO: 652572 - DNA, 15 bp, Homo sapiens
attcttgatttagcc

SEQ ID NO: 652573 - DNA, 15 bp, Homo sapiens
ttcttgatttagcct

SEQ ID NO: 652574 - DNA, 15 bp, Homo sapiens
tcttgatttagcctg

SEQ ID NO: 652575 - DNA, 15 bp, Homo sapiens
cttgatttagcctgt

SEQ ID NO: 652576 - DNA, 15 bp, Homo sapiens
ttgatttagcctgtt

SEQ ID NO: 652577 - DNA, 15 bp, Homo sapiens
tgatttagcctgtta

SEQ ID NO: 652578 - DNA, 15 bp, Homo sapiens
gatttagcctgttag

SEQ ID NO: 652579 - DNA, 15 bp, Homo sapiens
atttagcctgttagt

SEQ ID NO: 652580 - DNA, 15 bp, Homo sapiens
tttagcctgttagtc

SEQ ID NO: 652581 - DNA, 15 bp, Homo sapiens
ttagcctgttagtct

SEQ ID NO: 652582 - DNA, 15 bp, Homo sapiens
tagcctgttagtctc

SEQ ID NO: 652583 - DNA, 15 bp, Homo sapiens
agcctgttagtctcc

SEQ ID NO: 652584 - DNA, 15 bp, Homo sapiens
gcctgttagtctcca

SEQ ID NO: 652585 - DNA, 15 bp, Homo sapiens
cctgttagtctccaa

SEQ ID NO: 652586 - DNA, 15 bp, Homo sapiens
ctgttagtctccaag

SEQ ID NO: 652587 - DNA, 15 bp, Homo sapiens
tgttagtctccaagg

SEQ ID NO: 652588 - DNA, 15 bp, Homo sapiens
gttagtctccaagga

SEQ ID NO: 652589 - DNA, 15 bp, Homo sapiens
ttagtctccaaggaa

SEQ ID NO: 652590 - DNA, 15 bp, Homo sapiens
tagtctccaaggaag

SEQ ID NO: 652591 - DNA, 15 bp, Homo sapiens
agtctccaaggaagt

SEQ ID NO: 652592 - DNA, 15 bp, Homo sapiens
gtctccaaggaagtc

SEQ ID NO: 652593 - DNA, 15 bp, Homo sapiens
tctccaaggaagtca

SEQ ID NO: 652594 - DNA, 15 bp, Homo sapiens
ctccaaggaagtcag

SEQ ID NO: 652595 - DNA, 15 bp, Homo sapiens
tccaaggaagtcagc

SEQ ID NO: 652596 - DNA, 15 bp, Homo sapiens
ccaaggaagtcagca

SEQ ID NO: 652597 - DNA, 15 bp, Homo sapiens
caaggaagtcagcac

SEQ ID NO: 652598 - DNA, 15 bp, Homo sapiens
aaggaagtcagcact

SEQ ID NO: 652599 - DNA, 15 bp, Homo sapiens
aggaagtcagcacta

SEQ ID NO: 652600 - DNA, 15 bp, Homo sapiens
ggaagtcagcactaa

SEQ ID NO: 652601 - DNA, 15 bp, Homo sapiens
gaagtcagcactaac

SEQ ID NO: 652602 - DNA, 15 bp, Homo sapiens
aagtcagcactaaca

SEQ ID NO: 652603 - DNA, 15 bp, Homo sapiens
agtcagcactaacac

SEQ ID NO: 652604 - DNA, 15 bp, Homo sapiens
gtcagcactaacaca

SEQ ID NO: 652605 - DNA, 15 bp, Homo sapiens
tcagcactaacacat

SEQ ID NO: 652606 - DNA, 15 bp, Homo sapiens
cagcactaacacatg

SEQ ID NO: 652607 - DNA, 15 bp, Homo sapiens
agcactaacacatgg

SEQ ID NO: 652608 - DNA, 15 bp, Homo sapiens
gcactaacacatggg

SEQ ID NO: 652609 - DNA, 15 bp, Homo sapiens
cactaacacatggga

SEQ ID NO: 652610 - DNA, 15 bp, Homo sapiens
actaacacatgggaa

SEQ ID NO: 652611 - DNA, 15 bp, Homo sapiens
ctaacacatgggaat

SEQ ID NO: 652612 - DNA, 15 bp, Homo sapiens
taacacatgggaatg

SEQ ID NO: 652613 - DNA, 15 bp, Homo sapiens
aacacatgggaatgc

SEQ ID NO: 652614 - DNA, 15 bp, Homo sapiens
acacatgggaatgct

SEQ ID NO: 652615 - DNA, 15 bp, Homo sapiens
cacatgggaatgctt

SEQ ID NO: 652616 - DNA, 15 bp, Homo sapiens
acatgggaatgcttt

SEQ ID NO: 652617 - DNA, 15 bp, Homo sapiens
catgggaatgctttg

SEQ ID NO: 652618 - DNA, 15 bp, Homo sapiens
atgggaatgctttgg

SEQ ID NO: 652619 - DNA, 15 bp, Homo sapiens
tgggaatgctttggg

SEQ ID NO: 652620 - DNA, 15 bp, Homo sapiens
gggaatgctttggga

SEQ ID NO: 652621 - DNA, 15 bp, Homo sapiens
ggaatgctttgggac

SEQ ID NO: 652622 - DNA, 15 bp, Homo sapiens
gaatgctttgggaca

SEQ ID NO: 652623 - DNA, 15 bp, Homo sapiens
aatgctttgggacac

SEQ ID NO: 652624 - DNA, 15 bp, Homo sapiens
atgctttgggacaca

SEQ ID NO: 652625 - DNA, 15 bp, Homo sapiens
tgctttgggacacaa

SEQ ID NO: 652626 - DNA, 15 bp, Homo sapiens
gctttgggacacaat

SEQ ID NO: 652627 - DNA, 15 bp, Homo sapiens
ctttgggacacaatt

SEQ ID NO: 652628 - DNA, 15 bp, Homo sapiens
tttgggacacaattt

SEQ ID NO: 652629 - DNA, 15 bp, Homo sapiens
ttgggacacaatttt

SEQ ID NO: 652630 - DNA, 15 bp, Homo sapiens
tgggacacaatttta

SEQ ID NO: 652631 - DNA, 15 bp, Homo sapiens
gggacacaattttat

SEQ ID NO: 652632 - DNA, 15 bp, Homo sapiens
ggacacaattttata

SEQ ID NO: 652633 - DNA, 15 bp, Homo sapiens
gacacaattttatat

SEQ ID NO: 652634 - DNA, 15 bp, Homo sapiens
acacaattttatatt

SEQ ID NO: 652635 - DNA, 15 bp, Homo sapiens
cacaattttatattc

SEQ ID NO: 652636 - DNA, 15 bp, Homo sapiens
acaattttatattcc

SEQ ID NO: 652637 - DNA, 15 bp, Homo sapiens
caattttatattcca

SEQ ID NO: 652638 - DNA, 15 bp, Homo sapiens
aattttatattccat

SEQ ID NO: 652639 - DNA, 15 bp, Homo sapiens
attttatattccatt

SEQ ID NO: 652640 - DNA, 15 bp, Homo sapiens
ttttatattccattt

SEQ ID NO: 652641 - DNA, 15 bp, Homo sapiens
tttatattccatttg

SEQ ID NO: 652642 - DNA, 15 bp, Homo sapiens
ttatattccatttgt

SEQ ID NO: 652643 - DNA, 15 bp, Homo sapiens
tatattccatttgtg

SEQ ID NO: 652644 - DNA, 15 bp, Homo sapiens
atattccatttgtgt

SEQ ID NO: 652645 - DNA, 15 bp, Homo sapiens
tattccatttgtgtc

SEQ ID NO: 652646 - DNA, 15 bp, Homo sapiens
attccatttgtgtct

SEQ ID NO: 652647 - DNA, 15 bp, Homo sapiens
ttccatttgtgtctt

SEQ ID NO: 652648 - DNA, 15 bp, Homo sapiens
tccatttgtgtcttc

SEQ ID NO: 652649 - DNA, 15 bp, Homo sapiens
ccatttgtgtcttca

SEQ ID NO: 652650 - DNA, 15 bp, Homo sapiens
catttgtgtcttcaa

SEQ ID NO: 652651 - DNA, 15 bp, Homo sapiens
atttgtgtcttcaat

SEQ ID NO: 652652 - DNA, 15 bp, Homo sapiens
tttgtgtcttcaatt

SEQ ID NO: 652653 - DNA, 15 bp, Homo sapiens
ttgtgtcttcaattc

SEQ ID NO: 652654 - DNA, 15 bp, Homo sapiens
tgtgtcttcaattca

SEQ ID NO: 652655 - DNA, 15 bp, Homo sapiens
gtgtcttcaattcag

SEQ ID NO: 652656 - DNA, 15 bp, Homo sapiens
tgtcttcaattcagt

SEQ ID NO: 652657 - DNA, 15 bp, Homo sapiens
gtcttcaattcagta

SEQ ID NO: 652658 - DNA, 15 bp, Homo sapiens
tcttcaattcagtat

SEQ ID NO: 652659 - DNA, 15 bp, Homo sapiens
cttcaattcagtata

SEQ ID NO: 652660 - DNA, 15 bp, Homo sapiens
ttcaattcagtataa

SEQ ID NO: 652661 - DNA, 15 bp, Homo sapiens
tcaattcagtataaa

SEQ ID NO: 652662 - DNA, 15 bp, Homo sapiens
caattcagtataaag

SEQ ID NO: 652663 - DNA, 15 bp, Homo sapiens
aattcagtataaaga

SEQ ID NO: 652664 - DNA, 15 bp, Homo sapiens
attcagtataaagat

SEQ ID NO: 652665 - DNA, 15 bp, Homo sapiens
ttcagtataaagatg

SEQ ID NO: 652666 - DNA, 15 bp, Homo sapiens
tcagtataaagatgc

SEQ ID NO: 652667 - DNA, 15 bp, Homo sapiens
cagtataaagatgca

SEQ ID NO: 652668 - DNA, 15 bp, Homo sapiens
agtataaagatgcaa

SEQ ID NO: 652669 - DNA, 15 bp, Homo sapiens
gtataaagatgcaaa

SEQ ID NO: 652670 - DNA, 15 bp, Homo sapiens
tataaagatgcaaat

SEQ ID NO: 652671 - DNA, 15 bp, Homo sapiens
ataaagatgcaaatt

SEQ ID NO: 652672 - DNA, 15 bp, Homo sapiens
taaagatgcaaatta

SEQ ID NO: 652673 - DNA, 15 bp, Homo sapiens
aaagatgcaaattat

SEQ ID NO: 652674 - DNA, 15 bp, Homo sapiens
aagatgcaaattatt

SEQ ID NO: 652675 - DNA, 15 bp, Homo sapiens
agatgcaaattattc

SEQ ID NO: 652676 - DNA, 15 bp, Homo sapiens
gatgcaaattattcc

SEQ ID NO: 652677 - DNA, 15 bp, Homo sapiens
atgcaaattattcct

SEQ ID NO: 652678 - DNA, 15 bp, Homo sapiens
tgcaaattattcctg

SEQ ID NO: 652679 - DNA, 15 bp, Homo sapiens
gcaaattattcctga

SEQ ID NO: 652680 - DNA, 15 bp, Homo sapiens
caaattattcctgaa

SEQ ID NO: 652681 - DNA, 15 bp, Homo sapiens
aaattattcctgaat

SEQ ID NO: 652682 - DNA, 15 bp, Homo sapiens
aattattcctgaata

SEQ ID NO: 652683 - DNA, 15 bp, Homo sapiens
attattcctgaataa

SEQ ID NO: 652684 - DNA, 15 bp, Homo sapiens
ttattcctgaataac

SEQ ID NO: 652685 - DNA, 15 bp, Homo sapiens
tattcctgaataaca

SEQ ID NO: 652686 - DNA, 15 bp, Homo sapiens
attcctgaataacag

SEQ ID NO: 652687 - DNA, 15 bp, Homo sapiens
ttcctgaataacagt

SEQ ID NO: 652688 - DNA, 15 bp, Homo sapiens
tcctgaataacagtg

SEQ ID NO: 652689 - DNA, 15 bp, Homo sapiens
cctgaataacagtgc

SEQ ID NO: 652690 - DNA, 15 bp, Homo sapiens
ctgaataacagtgcc

SEQ ID NO: 652691 - DNA, 15 bp, Homo sapiens
tgaataacagtgcct

SEQ ID NO: 652692 - DNA, 15 bp, Homo sapiens
gaataacagtgcctt

SEQ ID NO: 652693 - DNA, 15 bp, Homo sapiens
aataacagtgcctta

SEQ ID NO: 652694 - DNA, 15 bp, Homo sapiens
ataacagtgccttag

SEQ ID NO: 652695 - DNA, 15 bp, Homo sapiens
taacagtgccttagc

SEQ ID NO: 652696 - DNA, 15 bp, Homo sapiens
aacagtgccttagca

SEQ ID NO: 652697 - DNA, 15 bp, Homo sapiens
acagtgccttagcat

SEQ ID NO: 652698 - DNA, 15 bp, Homo sapiens
cagtgccttagcatc

SEQ ID NO: 652699 - DNA, 15 bp, Homo sapiens
agtgccttagcatcg

SEQ ID NO: 652700 - DNA, 15 bp, Homo sapiens
gtgccttagcatcga

SEQ ID NO: 652701 - DNA, 15 bp, Homo sapiens
tgccttagcatcgaa

SEQ ID NO: 652702 - DNA, 15 bp, Homo sapiens
gccttagcatcgaat

SEQ ID NO: 652703 - DNA, 15 bp, Homo sapiens
ccttagcatcgaatg

SEQ ID NO: 652704 - DNA, 15 bp, Homo sapiens
cttagcatcgaatgg

SEQ ID NO: 652705 - DNA, 15 bp, Homo sapiens
ttagcatcgaatggt

SEQ ID NO: 652706 - DNA, 15 bp, Homo sapiens
tagcatcgaatggtt

SEQ ID NO: 652707 - DNA, 15 bp, Homo sapiens
agcatcgaatggtta

SEQ ID NO: 652708 - DNA, 15 bp, Homo sapiens
gcatcgaatggttac

SEQ ID NO: 652709 - DNA, 15 bp, Homo sapiens
catcgaatggttact

SEQ ID NO: 652710 - DNA, 15 bp, Homo sapiens
atcgaatggttacta

SEQ ID NO: 652711 - DNA, 15 bp, Homo sapiens
tcgaatggttactaa

SEQ ID NO: 652712 - DNA, 15 bp, Homo sapiens
cgaatggttactaac

SEQ ID NO: 652713 - DNA, 15 bp, Homo sapiens
gaatggttactaaca

SEQ ID NO: 652714 - DNA, 15 bp, Homo sapiens
aatggttactaacag

SEQ ID NO: 652715 - DNA, 15 bp, Homo sapiens
atggttactaacagg

SEQ ID NO: 652716 - DNA, 15 bp, Homo sapiens
tggttactaacaggt

SEQ ID NO: 652717 - DNA, 15 bp, Homo sapiens
ggttactaacaggtt

SEQ ID NO: 652718 - DNA, 15 bp, Homo sapiens
gttactaacaggtta

SEQ ID NO: 652719 - DNA, 15 bp, Homo sapiens
ttactaacaggttac

SEQ ID NO: 652720 - DNA, 15 bp, Homo sapiens
tactaacaggttacc

SEQ ID NO: 652721 - DNA, 15 bp, Homo sapiens
actaacaggttacct

SEQ ID NO: 652722 - DNA, 15 bp, Homo sapiens
ctaacaggttacctt

SEQ ID NO: 652723 - DNA, 15 bp, Homo sapiens
taacaggttaccttt

SEQ ID NO: 652724 - DNA, 15 bp, Homo sapiens
aacaggttacctttt

SEQ ID NO: 652725 - DNA, 15 bp, Homo sapiens
acaggttaccttttg

SEQ ID NO: 652726 - DNA, 15 bp, Homo sapiens
caggttaccttttgt

SEQ ID NO: 652727 - DNA, 15 bp, Homo sapiens
aggttaccttttgtc

SEQ ID NO: 652728 - DNA, 15 bp, Homo sapiens
ggttaccttttgtcg

SEQ ID NO: 652729 - DNA, 15 bp, Homo sapiens
gttaccttttgtcgt

SEQ ID NO: 652730 - DNA, 15 bp, Homo sapiens
ttaccttttgtcgtt

SEQ ID NO: 652731 - DNA, 15 bp, Homo sapiens
taccttttgtcgttt

SEQ ID NO: 652732 - DNA, 15 bp, Homo sapiens
accttttgtcgtttt

SEQ ID NO: 652733 - DNA, 15 bp, Homo sapiens
ccttttgtcgtttta

SEQ ID NO: 652734 - DNA, 15 bp, Homo sapiens
cttttgtcgttttac

SEQ ID NO: 652735 - DNA, 15 bp, Homo sapiens
ttttgtcgttttaca

SEQ ID NO: 652736 - DNA, 15 bp, Homo sapiens
tttgtcgttttacat

SEQ ID NO: 652737 - DNA, 15 bp, Homo sapiens
ttgtcgttttacatt

SEQ ID NO: 652738 - DNA, 15 bp, Homo sapiens
tgtcgttttacattt

SEQ ID NO: 652739 - DNA, 15 bp, Homo sapiens
gtcgttttacatttt

SEQ ID NO: 652740 - DNA, 15 bp, Homo sapiens
tcgttttacattttt

SEQ ID NO: 652741 - DNA, 15 bp, Homo sapiens
cgttttacatttttt

SEQ ID NO: 652742 - DNA, 15 bp, Homo sapiens
gttttacattttttt

SEQ ID NO: 652743 - DNA, 15 bp, Homo sapiens
ttttacatttttttg

SEQ ID NO: 652744 - DNA, 15 bp, Homo sapiens
tttacatttttttgt

SEQ ID NO: 652745 - DNA, 15 bp, Homo sapiens
ttacatttttttgtc

SEQ ID NO: 652746 - DNA, 15 bp, Homo sapiens
tacatttttttgtct

SEQ ID NO: 652747 - DNA, 15 bp, Homo sapiens
acatttttttgtctt

SEQ ID NO: 652748 - DNA, 15 bp, Homo sapiens
catttttttgtctta

SEQ ID NO: 652749 - DNA, 15 bp, Homo sapiens
atttttttgtcttaa

SEQ ID NO: 652750 - DNA, 15 bp, Homo sapiens
tttttttgtcttaaa

SEQ ID NO: 652751 - DNA, 15 bp, Homo sapiens
ttttttgtcttaaat

SEQ ID NO: 652752 - DNA, 15 bp, Homo sapiens
tttttgtcttaaata

SEQ ID NO: 652753 - DNA, 15 bp, Homo sapiens
ttttgtcttaaataa

SEQ ID NO: 652754 - DNA, 15 bp, Homo sapiens
tttgtcttaaataaa

SEQ ID NO: 652755 - DNA, 15 bp, Homo sapiens
tgtcttaaataaaaa

SEQ ID NO: 652756 - DNA, 15 bp, Homo sapiens
gtcttaaataaaaat

SEQ ID NO: 652757 - DNA, 15 bp, Homo sapiens
tcttaaataaaaatg

SEQ ID NO: 652758 - DNA, 15 bp, Homo sapiens
cttaaataaaaatgt

SEQ ID NO: 652759 - DNA, 15 bp, Homo sapiens
ttaaataaaaatgtg

SEQ ID NO: 652760 - DNA, 15 bp, Homo sapiens
taaataaaaatgtgt

SEQ ID NO: 652761 - DNA, 15 bp, Homo sapiens
aaataaaaatgtgtt

SEQ ID NO: 652762 - DNA, 15 bp, Homo sapiens
aataaaaatgtgttt

SEQ ID NO: 652763 - DNA, 15 bp, Homo sapiens
ataaaaatgtgtttc

SEQ ID NO: 652764 - DNA, 15 bp, Homo sapiens
taaaaatgtgtttct

SEQ ID NO: 652765 - DNA, 15 bp, Homo sapiens
aaaaatgtgtttcta

SEQ ID NO: 652766 - DNA, 15 bp, Homo sapiens
aaaatgtgtttctac

SEQ ID NO: 652767 - DNA, 15 bp, Homo sapiens
aaatgtgtttctaca

SEQ ID NO: 652768 - DNA, 15 bp, Homo sapiens
aatgtgtttctacaa

SEQ ID NO: 652769 - DNA, 15 bp, Homo sapiens
atgtgtttctacaat

SEQ ID NO: 652770 - DNA, 15 bp, Homo sapiens
tgtgtttctacaatt

SEQ ID NO: 652771 - DNA, 15 bp, Homo sapiens
gtgtttctacaattt

SEQ ID NO: 652772 - DNA, 15 bp, Homo sapiens
tgtttctacaatttt

SEQ ID NO: 652773 - DNA, 15 bp, Homo sapiens
gtttctacaatttta

SEQ ID NO: 652774 - DNA, 15 bp, Homo sapiens
tttctacaattttaa

SEQ ID NO: 652775 - DNA, 15 bp, Homo sapiens
ttctacaattttaaa

SEQ ID NO: 652776 - DNA, 15 bp, Homo sapiens
tctacaattttaaaa

SEQ ID NO: 652777 - DNA, 15 bp, Homo sapiens
ctacaattttaaaaa

SEQ ID NO: 652778 - DNA, 15 bp, Homo sapiens
tacaattttaaaaag

SEQ ID NO: 652779 - DNA, 15 bp, Homo sapiens
acaattttaaaaaga

SEQ ID NO: 652780 - DNA, 15 bp, Homo sapiens
caattttaaaaagaa

SEQ ID NO: 652781 - DNA, 15 bp, Homo sapiens
aattttaaaaagaag

SEQ ID NO: 652782 - DNA, 15 bp, Homo sapiens
attttaaaaagaagt

SEQ ID NO: 652783 - DNA, 15 bp, Homo sapiens
ttttaaaaagaagtg

SEQ ID NO: 652784 - DNA, 15 bp, Homo sapiens
tttaaaaagaagtga

SEQ ID NO: 652785 - DNA, 15 bp, Homo sapiens
ttaaaaagaagtgat

SEQ ID NO: 652786 - DNA, 15 bp, Homo sapiens
taaaaagaagtgatg

SEQ ID NO: 652787 - DNA, 15 bp, Homo sapiens
aaaaagaagtgatgt

SEQ ID NO: 652788 - DNA, 15 bp, Homo sapiens
aaaagaagtgatgta

SEQ ID NO: 652789 - DNA, 15 bp, Homo sapiens
aaagaagtgatgtaa

SEQ ID NO: 652790 - DNA, 15 bp, Homo sapiens
aagaagtgatgtaat

SEQ ID NO: 652791 - DNA, 15 bp, Homo sapiens
agaagtgatgtaatt

SEQ ID NO: 652792 - DNA, 15 bp, Homo sapiens
gaagtgatgtaattg

SEQ ID NO: 652793 - DNA, 15 bp, Homo sapiens
aagtgatgtaattgt

SEQ ID NO: 652794 - DNA, 15 bp, Homo sapiens
agtgatgtaattgtc

SEQ ID NO: 652795 - DNA, 15 bp, Homo sapiens
gtgatgtaattgtcc

SEQ ID NO: 652796 - DNA, 15 bp, Homo sapiens
tgatgtaattgtcct

SEQ ID NO: 652797 - DNA, 15 bp, Homo sapiens
gatgtaattgtcctc

SEQ ID NO: 652798 - DNA, 15 bp, Homo sapiens
atgtaattgtcctca

SEQ ID NO: 652799 - DNA, 15 bp, Homo sapiens
tgtaattgtcctcac

SEQ ID NO: 652800 - DNA, 15 bp, Homo sapiens
gtaattgtcctcacc

SEQ ID NO: 652801 - DNA, 15 bp, Homo sapiens
taattgtcctcaccc

SEQ ID NO: 652802 - DNA, 15 bp, Homo sapiens
aattgtcctcaccca

SEQ ID NO: 652803 - DNA, 15 bp, Homo sapiens
attgtcctcacccaa

SEQ ID NO: 652804 - DNA, 15 bp, Homo sapiens
ttgtcctcacccaag

SEQ ID NO: 652805 - DNA, 15 bp, Homo sapiens
tgtcctcacccaagt

SEQ ID NO: 652806 - DNA, 15 bp, Homo sapiens
gtcctcacccaagta

SEQ ID NO: 652807 - DNA, 15 bp, Homo sapiens
tcctcacccaagtat

SEQ ID NO: 652808 - DNA, 15 bp, Homo sapiens
cctcacccaagtatt

SEQ ID NO: 652809 - DNA, 15 bp, Homo sapiens
ctcacccaagtattt

SEQ ID NO: 652810 - DNA, 15 bp, Homo sapiens
tcacccaagtatttt

SEQ ID NO: 652811 - DNA, 15 bp, Homo sapiens
cacccaagtattttc

SEQ ID NO: 652812 - DNA, 15 bp, Homo sapiens
acccaagtattttct

SEQ ID NO: 652813 - DNA, 15 bp, Homo sapiens
cccaagtattttcta

SEQ ID NO: 652814 - DNA, 15 bp, Homo sapiens
ccaagtattttctac

SEQ ID NO: 652815 - DNA, 15 bp, Homo sapiens
caagtattttctaca

SEQ ID NO: 652816 - DNA, 15 bp, Homo sapiens
aagtattttctacag

SEQ ID NO: 652817 - DNA, 15 bp, Homo sapiens
agtattttctacaga

SEQ ID NO: 652818 - DNA, 15 bp, Homo sapiens
gtattttctacagag

SEQ ID NO: 652819 - DNA, 15 bp, Homo sapiens
tattttctacagagt

SEQ ID NO: 652820 - DNA, 15 bp, Homo sapiens
attttctacagagtg

SEQ ID NO: 652821 - DNA, 15 bp, Homo sapiens
ttttctacagagtgt

SEQ ID NO: 652822 - DNA, 15 bp, Homo sapiens
tttctacagagtgtg

SEQ ID NO: 652823 - DNA, 15 bp, Homo sapiens
ttctacagagtgtgc

SEQ ID NO: 652824 - DNA, 15 bp, Homo sapiens
tctacagagtgtgcc

SEQ ID NO: 652825 - DNA, 15 bp, Homo sapiens
ctacagagtgtgcca

SEQ ID NO: 652826 - DNA, 15 bp, Homo sapiens
tacagagtgtgccaa

SEQ ID NO: 652827 - DNA, 15 bp, Homo sapiens
acagagtgtgccaag

SEQ ID NO: 652828 - DNA, 15 bp, Homo sapiens
cagagtgtgccaagc

SEQ ID NO: 652829 - DNA, 15 bp, Homo sapiens
agagtgtgccaagct

SEQ ID NO: 652830 - DNA, 15 bp, Homo sapiens
gagtgtgccaagctt

SEQ ID NO: 652831 - DNA, 15 bp, Homo sapiens
agtgtgccaagcttt

SEQ ID NO: 652832 - DNA, 15 bp, Homo sapiens
gtgtgccaagctttg

SEQ ID NO: 652833 - DNA, 15 bp, Homo sapiens
tgtgccaagctttgg

SEQ ID NO: 652834 - DNA, 15 bp, Homo sapiens
gtgccaagctttggt

SEQ ID NO: 652835 - DNA, 15 bp, Homo sapiens
tgccaagctttggtc

SEQ ID NO: 652836 - DNA, 15 bp, Homo sapiens
gccaagctttggtcg

SEQ ID NO: 652837 - DNA, 15 bp, Homo sapiens
ccaagctttggtcgt

SEQ ID NO: 652838 - DNA, 15 bp, Homo sapiens
caagctttggtcgta

SEQ ID NO: 652839 - DNA, 15 bp, Homo sapiens
aagctttggtcgtac

SEQ ID NO: 652840 - DNA, 15 bp, Homo sapiens
agctttggtcgtacc

SEQ ID NO: 652841 - DNA, 15 bp, Homo sapiens
gctttggtcgtacct

SEQ ID NO: 652842 - DNA, 15 bp, Homo sapiens
ctttggtcgtacctg

SEQ ID NO: 652843 - DNA, 15 bp, Homo sapiens
tttggtcgtacctgc

SEQ ID NO: 652844 - DNA, 15 bp, Homo sapiens
ttggtcgtacctgcc

SEQ ID NO: 652845 - DNA, 15 bp, Homo sapiens
tggtcgtacctgcct

SEQ ID NO: 652846 - DNA, 15 bp, Homo sapiens
ggtcgtacctgccta

SEQ ID NO: 652847 - DNA, 15 bp, Homo sapiens
gtcgtacctgcctag

SEQ ID NO: 652848 - DNA, 15 bp, Homo sapiens
tcgtacctgcctagc

SEQ ID NO: 652849 - DNA, 15 bp, Homo sapiens
cgtacctgcctagct

SEQ ID NO: 652850 - DNA, 15 bp, Homo sapiens
gtacctgcctagctg

SEQ ID NO: 652851 - DNA, 15 bp, Homo sapiens
tacctgcctagctgc

SEQ ID NO: 652852 - DNA, 15 bp, Homo sapiens
acctgcctagctgca

SEQ ID NO: 652853 - DNA, 15 bp, Homo sapiens
cctgcctagctgcaa

SEQ ID NO: 652854 - DNA, 15 bp, Homo sapiens
ctgcctagctgcaac

SEQ ID NO: 652855 - DNA, 15 bp, Homo sapiens
tgcctagctgcaact

SEQ ID NO: 652856 - DNA, 15 bp, Homo sapiens
gcctagctgcaactg

SEQ ID NO: 652857 - DNA, 15 bp, Homo sapiens
cctagctgcaactga

SEQ ID NO: 652858 - DNA, 15 bp, Homo sapiens
ctagctgcaactgaa

SEQ ID NO: 652859 - DNA, 15 bp, Homo sapiens
tagctgcaactgaaa

SEQ ID NO: 652860 - DNA, 15 bp, Homo sapiens
agctgcaactgaaac

SEQ ID NO: 652861 - DNA, 15 bp, Homo sapiens
gctgcaactgaaacg

SEQ ID NO: 652862 - DNA, 15 bp, Homo sapiens
ctgcaactgaaacga

SEQ ID NO: 652863 - DNA, 15 bp, Homo sapiens
tgcaactgaaacgac

SEQ ID NO: 652864 - DNA, 15 bp, Homo sapiens
gcaactgaaacgacg

SEQ ID NO: 652865 - DNA, 15 bp, Homo sapiens
caactgaaacgacga

SEQ ID NO: 652866 - DNA, 15 bp, Homo sapiens
aactgaaacgacgat

SEQ ID NO: 652867 - DNA, 15 bp, Homo sapiens
actgaaacgacgatt

SEQ ID NO: 652868 - DNA, 15 bp, Homo sapiens
ctgaaacgacgattt

SEQ ID NO: 652869 - DNA, 15 bp, Homo sapiens
tgaaacgacgatttg

SEQ ID NO: 652870 - DNA, 15 bp, Homo sapiens
gaaacgacgatttgg

SEQ ID NO: 652871 - DNA, 15 bp, Homo sapiens
aaacgacgatttgga

SEQ ID NO: 652872 - DNA, 15 bp, Homo sapiens
aacgacgatttggaa

SEQ ID NO: 652873 - DNA, 15 bp, Homo sapiens
acgacgatttggaac

SEQ ID NO: 652874 - DNA, 15 bp, Homo sapiens
cgacgatttggaacc

SEQ ID NO: 652875 - DNA, 15 bp, Homo sapiens
gacgatttggaacca

SEQ ID NO: 652876 - DNA, 15 bp, Homo sapiens
acgatttggaaccat

SEQ ID NO: 652877 - DNA, 15 bp, Homo sapiens
cgatttggaaccatt

SEQ ID NO: 652878 - DNA, 15 bp, Homo sapiens
gatttggaaccattg

SEQ ID NO: 652879 - DNA, 15 bp, Homo sapiens
atttggaaccattgg

SEQ ID NO: 652880 - DNA, 15 bp, Homo sapiens
tttggaaccattgga

SEQ ID NO: 652881 - DNA, 15 bp, Homo sapiens
ttggaaccattggat

SEQ ID NO: 652882 - DNA, 15 bp, Homo sapiens
tggaaccattggata

SEQ ID NO: 652883 - DNA, 15 bp, Homo sapiens
ggaaccattggatac

SEQ ID NO: 652884 - DNA, 15 bp, Homo sapiens
gaaccattggatact

SEQ ID NO: 652885 - DNA, 15 bp, Homo sapiens
aaccattggatactc

SEQ ID NO: 652886 - DNA, 15 bp, Homo sapiens
accattggatactct

SEQ ID NO: 652887 - DNA, 15 bp, Homo sapiens
ccattggatactctg

SEQ ID NO: 652888 - DNA, 15 bp, Homo sapiens
cattggatactctga

SEQ ID NO: 652889 - DNA, 15 bp, Homo sapiens
attggatactctgat

SEQ ID NO: 652890 - DNA, 15 bp, Homo sapiens
ttggatactctgatt

SEQ ID NO: 652891 - DNA, 15 bp, Homo sapiens
tggatactctgatta

SEQ ID NO: 652892 - DNA, 15 bp, Homo sapiens
ggatactctgattag

SEQ ID NO: 652893 - DNA, 15 bp, Homo sapiens
gatactctgattagt

SEQ ID NO: 652894 - DNA, 15 bp, Homo sapiens
atactctgattagta

SEQ ID NO: 652895 - DNA, 15 bp, Homo sapiens
tactctgattagtat

SEQ ID NO: 652896 - DNA, 15 bp, Homo sapiens
actctgattagtata

SEQ ID NO: 652897 - DNA, 15 bp, Homo sapiens
ctctgattagtatag

SEQ ID NO: 652898 - DNA, 15 bp, Homo sapiens
tctgattagtataga

SEQ ID NO: 652899 - DNA, 15 bp, Homo sapiens
ctgattagtatagat

SEQ ID NO: 652900 - DNA, 15 bp, Homo sapiens
tgattagtatagata

SEQ ID NO: 652901 - DNA, 15 bp, Homo sapiens
gattagtatagatat

SEQ ID NO: 652902 - DNA, 15 bp, Homo sapiens
attagtatagatata

SEQ ID NO: 652903 - DNA, 15 bp, Homo sapiens
ttagtatagatataa

SEQ ID NO: 652904 - DNA, 15 bp, Homo sapiens
tagtatagatataat

SEQ ID NO: 652905 - DNA, 15 bp, Homo sapiens
agtatagatataatt

SEQ ID NO: 652906 - DNA, 15 bp, Homo sapiens
gtatagatataatta

SEQ ID NO: 652907 - DNA, 15 bp, Homo sapiens
tatagatataattac

SEQ ID NO: 652908 - DNA, 15 bp, Homo sapiens
atagatataattacc

SEQ ID NO: 652909 - DNA, 15 bp, Homo sapiens
tagatataattacca

SEQ ID NO: 652910 - DNA, 15 bp, Homo sapiens
agatataattaccac

SEQ ID NO: 652911 - DNA, 15 bp, Homo sapiens
gatataattaccaca

SEQ ID NO: 652912 - DNA, 15 bp, Homo sapiens
atataattaccacag

SEQ ID NO: 652913 - DNA, 15 bp, Homo sapiens
tataattaccacagt

SEQ ID NO: 652914 - DNA, 15 bp, Homo sapiens
ataattaccacagtg

SEQ ID NO: 652915 - DNA, 15 bp, Homo sapiens
taattaccacagtgg

SEQ ID NO: 652916 - DNA, 15 bp, Homo sapiens
aattaccacagtggt

SEQ ID NO: 652917 - DNA, 15 bp, Homo sapiens
attaccacagtggtc

SEQ ID NO: 652918 - DNA, 15 bp, Homo sapiens
ttaccacagtggtcc

SEQ ID NO: 652919 - DNA, 15 bp, Homo sapiens
taccacagtggtcca

SEQ ID NO: 652920 - DNA, 15 bp, Homo sapiens
accacagtggtccat

SEQ ID NO: 652921 - DNA, 15 bp, Homo sapiens
ccacagtggtccatt

SEQ ID NO: 652922 - DNA, 15 bp, Homo sapiens
cacagtggtccattc

SEQ ID NO: 652923 - DNA, 15 bp, Homo sapiens
acagtggtccattct

SEQ ID NO: 652924 - DNA, 15 bp, Homo sapiens
cagtggtccattctc

SEQ ID NO: 652925 - DNA, 15 bp, Homo sapiens
agtggtccattctcc

SEQ ID NO: 652926 - DNA, 15 bp, Homo sapiens
gtggtccattctcca

SEQ ID NO: 652927 - DNA, 15 bp, Homo sapiens
tggtccattctccat

SEQ ID NO: 652928 - DNA, 15 bp, Homo sapiens
ggtccattctccatc

SEQ ID NO: 652929 - DNA, 15 bp, Homo sapiens
gtccattctccatct

SEQ ID NO: 652930 - DNA, 15 bp, Homo sapiens
tccattctccatcta

SEQ ID NO: 652931 - DNA, 15 bp, Homo sapiens
ccattctccatctat

SEQ ID NO: 652932 - DNA, 15 bp, Homo sapiens
cattctccatctata

SEQ ID NO: 652933 - DNA, 15 bp, Homo sapiens
attctccatctatat

SEQ ID NO: 652934 - DNA, 15 bp, Homo sapiens
ttctccatctatatt

SEQ ID NO: 652935 - DNA, 15 bp, Homo sapiens
tctccatctatattg

SEQ ID NO: 652936 - DNA, 15 bp, Homo sapiens
ctccatctatattgg

SEQ ID NO: 652937 - DNA, 15 bp, Homo sapiens
tccatctatattggg

SEQ ID NO: 652938 - DNA, 15 bp, Homo sapiens
ccatctatattggga

SEQ ID NO: 652939 - DNA, 15 bp, Homo sapiens
catctatattgggac

SEQ ID NO: 652940 - DNA, 15 bp, Homo sapiens
atctatattgggact

SEQ ID NO: 652941 - DNA, 15 bp, Homo sapiens
tctatattgggactg

SEQ ID NO: 652942 - DNA, 15 bp, Homo sapiens
ctatattgggactga

SEQ ID NO: 652943 - DNA, 15 bp, Homo sapiens
tatattgggactgaa

SEQ ID NO: 652944 - DNA, 15 bp, Homo sapiens
atattgggactgaat

SEQ ID NO: 652945 - DNA, 15 bp, Homo sapiens
tattgggactgaatc

SEQ ID NO: 652946 - DNA, 15 bp, Homo sapiens
attgggactgaatcc

SEQ ID NO: 652947 - DNA, 15 bp, Homo sapiens
ttgggactgaatcca

SEQ ID NO: 652948 - DNA, 15 bp, Homo sapiens
tgggactgaatccat

SEQ ID NO: 652949 - DNA, 15 bp, Homo sapiens
gggactgaatccatt

SEQ ID NO: 652950 - DNA, 15 bp, Homo sapiens
ggactgaatccattt

SEQ ID NO: 652951 - DNA, 15 bp, Homo sapiens
gactgaatccatttt

SEQ ID NO: 652952 - DNA, 15 bp, Homo sapiens
actgaatccattttg

SEQ ID NO: 652953 - DNA, 15 bp, Homo sapiens
ctgaatccattttgt

SEQ ID NO: 652954 - DNA, 15 bp, Homo sapiens
tgaatccattttgtc

SEQ ID NO: 652955 - DNA, 15 bp, Homo sapiens
gaatccattttgtcc

SEQ ID NO: 652956 - DNA, 15 bp, Homo sapiens
aatccattttgtcca

SEQ ID NO: 652957 - DNA, 15 bp, Homo sapiens
atccattttgtccat

SEQ ID NO: 652958 - DNA, 15 bp, Homo sapiens
tccattttgtccatc

SEQ ID NO: 652959 - DNA, 15 bp, Homo sapiens
ccattttgtccatct

SEQ ID NO: 652960 - DNA, 15 bp, Homo sapiens
cattttgtccatctg

SEQ ID NO: 652961 - DNA, 15 bp, Homo sapiens
attttgtccatctgc

SEQ ID NO: 652962 - DNA, 15 bp, Homo sapiens
ttttgtccatctgca

SEQ ID NO: 652963 - DNA, 15 bp, Homo sapiens
tttgtccatctgcat

SEQ ID NO: 652964 - DNA, 15 bp, Homo sapiens
ttgtccatctgcatt

SEQ ID NO: 652965 - DNA, 15 bp, Homo sapiens
tgtccatctgcattg

SEQ ID NO: 652966 - DNA, 15 bp, Homo sapiens
gtccatctgcattga

SEQ ID NO: 652967 - DNA, 15 bp, Homo sapiens
tccatctgcattgac

SEQ ID NO: 652968 - DNA, 15 bp, Homo sapiens
ccatctgcattgact

SEQ ID NO: 652969 - DNA, 15 bp, Homo sapiens
catctgcattgacta

SEQ ID NO: 652970 - DNA, 15 bp, Homo sapiens
atctgcattgactaa

SEQ ID NO: 652971 - DNA, 15 bp, Homo sapiens
tctgcattgactaaa

SEQ ID NO: 652972 - DNA, 15 bp, Homo sapiens
ctgcattgactaaat

SEQ ID NO: 652973 - DNA, 15 bp, Homo sapiens
tgcattgactaaata

SEQ ID NO: 652974 - DNA, 15 bp, Homo sapiens
gcattgactaaatag

SEQ ID NO: 652975 - DNA, 15 bp, Homo sapiens
cattgactaaatagc

SEQ ID NO: 652976 - DNA, 15 bp, Homo sapiens
attgactaaatagct

SEQ ID NO: 652977 - DNA, 15 bp, Homo sapiens
ttgactaaatagctg

SEQ ID NO: 652978 - DNA, 15 bp, Homo sapiens
tgactaaatagctgt

SEQ ID NO: 652979 - DNA, 15 bp, Homo sapiens
gactaaatagctgtg

SEQ ID NO: 652980 - DNA, 15 bp, Homo sapiens
actaaatagctgtgt

SEQ ID NO: 652981 - DNA, 15 bp, Homo sapiens
ctaaatagctgtgta

SEQ ID NO: 652982 - DNA, 15 bp, Homo sapiens
taaatagctgtgtat

SEQ ID NO: 652983 - DNA, 15 bp, Homo sapiens
aaatagctgtgtatt

SEQ ID NO: 652984 - DNA, 15 bp, Homo sapiens
aatagctgtgtatta

SEQ ID NO: 652985 - DNA, 15 bp, Homo sapiens
atagctgtgtattac

SEQ ID NO: 652986 - DNA, 15 bp, Homo sapiens
tagctgtgtattaca

SEQ ID NO: 652987 - DNA, 15 bp, Homo sapiens
agctgtgtattacag

SEQ ID NO: 652988 - DNA, 15 bp, Homo sapiens
gctgtgtattacagc

SEQ ID NO: 652989 - DNA, 15 bp, Homo sapiens
ctgtgtattacagca

SEQ ID NO: 652990 - DNA, 15 bp, Homo sapiens
tgtgtattacagcag

SEQ ID NO: 652991 - DNA, 15 bp, Homo sapiens
gtgtattacagcagc

SEQ ID NO: 652992 - DNA, 15 bp, Homo sapiens
tgtattacagcagca

SEQ ID NO: 652993 - DNA, 15 bp, Homo sapiens
gtattacagcagcat

SEQ ID NO: 652994 - DNA, 15 bp, Homo sapiens
tattacagcagcatg

SEQ ID NO: 652995 - DNA, 15 bp, Homo sapiens
attacagcagcatgt

SEQ ID NO: 652996 - DNA, 15 bp, Homo sapiens
ttacagcagcatgta

SEQ ID NO: 652997 - DNA, 15 bp, Homo sapiens
tacagcagcatgtaa

SEQ ID NO: 652998 - DNA, 15 bp, Homo sapiens
acagcagcatgtaac

SEQ ID NO: 652999 - DNA, 15 bp, Homo sapiens
cagcagcatgtaact

SEQ ID NO: 653000 - DNA, 15 bp, Homo sapiens
agcagcatgtaactt

SEQ ID NO: 653001 - DNA, 15 bp, Homo sapiens
gcagcatgtaacttt

SEQ ID NO: 653002 - DNA, 15 bp, Homo sapiens
cagcatgtaactttg

SEQ ID NO: 653003 - DNA, 15 bp, Homo sapiens
agcatgtaactttgt

SEQ ID NO: 653004 - DNA, 15 bp, Homo sapiens
gcatgtaactttgta

SEQ ID NO: 653005 - DNA, 15 bp, Homo sapiens
catgtaactttgtac

SEQ ID NO: 653006 - DNA, 15 bp, Homo sapiens
atgtaactttgtacc

SEQ ID NO: 653007 - DNA, 15 bp, Homo sapiens
tgtaactttgtacca

SEQ ID NO: 653008 - DNA, 15 bp, Homo sapiens
gtaactttgtaccaa

SEQ ID NO: 653009 - DNA, 15 bp, Homo sapiens
taactttgtaccaac

SEQ ID NO: 653010 - DNA, 15 bp, Homo sapiens
aactttgtaccaacg

SEQ ID NO: 653011 - DNA, 15 bp, Homo sapiens
actttgtaccaacga

SEQ ID NO: 653012 - DNA, 15 bp, Homo sapiens
ctttgtaccaacgag

SEQ ID NO: 653013 - DNA, 15 bp, Homo sapiens
tttgtaccaacgagc

SEQ ID NO: 653014 - DNA, 15 bp, Homo sapiens
ttgtaccaacgagca

SEQ ID NO: 653015 - DNA, 15 bp, Homo sapiens
tgtaccaacgagcag

SEQ ID NO: 653016 - DNA, 15 bp, Homo sapiens
gtaccaacgagcagg

SEQ ID NO: 653017 - DNA, 15 bp, Homo sapiens
taccaacgagcaggc

SEQ ID NO: 653018 - DNA, 15 bp, Homo sapiens
accaacgagcaggct

SEQ ID NO: 653019 - DNA, 15 bp, Homo sapiens
ccaacgagcaggcta

SEQ ID NO: 653020 - DNA, 15 bp, Homo sapiens
caacgagcaggctaa

SEQ ID NO: 653021 - DNA, 15 bp, Homo sapiens
aacgagcaggctaac

SEQ ID NO: 653022 - DNA, 15 bp, Homo sapiens
acgagcaggctaact

SEQ ID NO: 653023 - DNA, 15 bp, Homo sapiens
cgagcaggctaactt

SEQ ID NO: 653024 - DNA, 15 bp, Homo sapiens
gagcaggctaacttc

SEQ ID NO: 653025 - DNA, 15 bp, Homo sapiens
agcaggctaacttca

SEQ ID NO: 653026 - DNA, 15 bp, Homo sapiens
gcaggctaacttcaa

SEQ ID NO: 653027 - DNA, 15 bp, Homo sapiens
caggctaacttcaat

SEQ ID NO: 653028 - DNA, 15 bp, Homo sapiens
aggctaacttcaatg

SEQ ID NO: 653029 - DNA, 15 bp, Homo sapiens
ggctaacttcaatga

SEQ ID NO: 653030 - DNA, 15 bp, Homo sapiens
gctaacttcaatgag

SEQ ID NO: 653031 - DNA, 15 bp, Homo sapiens
ctaacttcaatgaga

SEQ ID NO: 653032 - DNA, 15 bp, Homo sapiens
taacttcaatgagaa

SEQ ID NO: 653033 - DNA, 15 bp, Homo sapiens
aacttcaatgagaat

SEQ ID NO: 653034 - DNA, 15 bp, Homo sapiens
acttcaatgagaatc

SEQ ID NO: 653035 - DNA, 15 bp, Homo sapiens
cttcaatgagaatca

SEQ ID NO: 653036 - DNA, 15 bp, Homo sapiens
ttcaatgagaatcaa

SEQ ID NO: 653037 - DNA, 15 bp, Homo sapiens
tcaatgagaatcaaa

SEQ ID NO: 653038 - DNA, 15 bp, Homo sapiens
caatgagaatcaaag

SEQ ID NO: 653039 - DNA, 15 bp, Homo sapiens
aatgagaatcaaagt

SEQ ID NO: 653040 - DNA, 15 bp, Homo sapiens
atgagaatcaaagtg

SEQ ID NO: 653041 - DNA, 15 bp, Homo sapiens
tgagaatcaaagtgg

SEQ ID NO: 653042 - DNA, 15 bp, Homo sapiens
gagaatcaaagtggt

SEQ ID NO: 653043 - DNA, 15 bp, Homo sapiens
agaatcaaagtggta

SEQ ID NO: 653044 - DNA, 15 bp, Homo sapiens
gaatcaaagtggtat

SEQ ID NO: 653045 - DNA, 15 bp, Homo sapiens
aatcaaagtggtatc

SEQ ID NO: 653046 - DNA, 15 bp, Homo sapiens
atcaaagtggtatct

SEQ ID NO: 653047 - DNA, 15 bp, Homo sapiens
tcaaagtggtatctt

SEQ ID NO: 653048 - DNA, 15 bp, Homo sapiens
caaagtggtatctta

SEQ ID NO: 653049 - DNA, 15 bp, Homo sapiens
aaagtggtatcttat

SEQ ID NO: 653050 - DNA, 15 bp, Homo sapiens
aagtggtatcttata

SEQ ID NO: 653051 - DNA, 15 bp, Homo sapiens
agtggtatcttataa

SEQ ID NO: 653052 - DNA, 15 bp, Homo sapiens
gtggtatcttataat

SEQ ID NO: 653053 - DNA, 15 bp, Homo sapiens
tggtatcttataata

SEQ ID NO: 653054 - DNA, 15 bp, Homo sapiens
ggtatcttataatag

SEQ ID NO: 653055 - DNA, 15 bp, Homo sapiens
gtatcttataatagt

SEQ ID NO: 653056 - DNA, 15 bp, Homo sapiens
tatcttataatagtc

SEQ ID NO: 653057 - DNA, 15 bp, Homo sapiens
atcttataatagtct

SEQ ID NO: 653058 - DNA, 15 bp, Homo sapiens
tcttataatagtctt

SEQ ID NO: 653059 - DNA, 15 bp, Homo sapiens
cttataatagtcttg

SEQ ID NO: 653060 - DNA, 15 bp, Homo sapiens
ttataatagtcttgt

SEQ ID NO: 653061 - DNA, 15 bp, Homo sapiens
tataatagtcttgta

SEQ ID NO: 653062 - DNA, 15 bp, Homo sapiens
ataatagtcttgtat

SEQ ID NO: 653063 - DNA, 15 bp, Homo sapiens
taatagtcttgtatc

SEQ ID NO: 653064 - DNA, 15 bp, Homo sapiens
aatagtcttgtatca

SEQ ID NO: 653065 - DNA, 15 bp, Homo sapiens
atagtcttgtatcaa

SEQ ID NO: 653066 - DNA, 15 bp, Homo sapiens
tagtcttgtatcaac

SEQ ID NO: 653067 - DNA, 15 bp, Homo sapiens
agtcttgtatcaact

SEQ ID NO: 653068 - DNA, 15 bp, Homo sapiens
gtcttgtatcaactt

SEQ ID NO: 653069 - DNA, 15 bp, Homo sapiens
tcttgtatcaacttc

SEQ ID NO: 653070 - DNA, 15 bp, Homo sapiens
cttgtatcaacttca

SEQ ID NO: 653071 - DNA, 15 bp, Homo sapiens
ttgtatcaacttcaa

SEQ ID NO: 653072 - DNA, 15 bp, Homo sapiens
tgtatcaacttcaaa

SEQ ID NO: 653073 - DNA, 15 bp, Homo sapiens
gtatcaacttcaaaa

SEQ ID NO: 653074 - DNA, 15 bp, Homo sapiens
tatcaacttcaaaaa

SEQ ID NO: 653075 - DNA, 15 bp, Homo sapiens
atcaacttcaaaaat

SEQ ID NO: 653076 - DNA, 15 bp, Homo sapiens
tcaacttcaaaaata

SEQ ID NO: 653077 - DNA, 15 bp, Homo sapiens
caacttcaaaaatat

SEQ ID NO: 653078 - DNA, 15 bp, Homo sapiens
aacttcaaaaatata

SEQ ID NO: 653079 - DNA, 15 bp, Homo sapiens
acttcaaaaatataa

SEQ ID NO: 653080 - DNA, 15 bp, Homo sapiens
cttcaaaaatataat

SEQ ID NO: 653081 - DNA, 15 bp, Homo sapiens
ttcaaaaatataatt

SEQ ID NO: 653082 - DNA, 15 bp, Homo sapiens
tcaaaaatataatta

SEQ ID NO: 653083 - DNA, 15 bp, Homo sapiens
caaaaatataattat

SEQ ID NO: 653084 - DNA, 15 bp, Homo sapiens
aaaaatataattata

SEQ ID NO: 653085 - DNA, 15 bp, Homo sapiens
aaaatataattatag

SEQ ID NO: 653086 - DNA, 15 bp, Homo sapiens
aaatataattataga

SEQ ID NO: 653087 - DNA, 15 bp, Homo sapiens
aatataattatagag

SEQ ID NO: 653088 - DNA, 15 bp, Homo sapiens
atataattatagagc

SEQ ID NO: 653089 - DNA, 15 bp, Homo sapiens
tataattatagagca

SEQ ID NO: 653090 - DNA, 15 bp, Homo sapiens
ataattatagagcaa

SEQ ID NO: 653091 - DNA, 15 bp, Homo sapiens
taattatagagcaag

SEQ ID NO: 653092 - DNA, 15 bp, Homo sapiens
aattatagagcaagc

SEQ ID NO: 653093 - DNA, 15 bp, Homo sapiens
attatagagcaagca

SEQ ID NO: 653094 - DNA, 15 bp, Homo sapiens
ttatagagcaagcat

SEQ ID NO: 653095 - DNA, 15 bp, Homo sapiens
tatagagcaagcatt

SEQ ID NO: 653096 - DNA, 15 bp, Homo sapiens
atagagcaagcatta

SEQ ID NO: 653097 - DNA, 15 bp, Homo sapiens
tagagcaagcattaa

SEQ ID NO: 653098 - DNA, 15 bp, Homo sapiens
agagcaagcattaat

SEQ ID NO: 653099 - DNA, 15 bp, Homo sapiens
gagcaagcattaatc

SEQ ID NO: 653100 - DNA, 15 bp, Homo sapiens
agcaagcattaatct

SEQ ID NO: 653101 - DNA, 15 bp, Homo sapiens
gcaagcattaatctt

SEQ ID NO: 653102 - DNA, 15 bp, Homo sapiens
caagcattaatcttc

SEQ ID NO: 653103 - DNA, 15 bp, Homo sapiens
aagcattaatcttca

SEQ ID NO: 653104 - DNA, 15 bp, Homo sapiens
agcattaatcttcat

SEQ ID NO: 653105 - DNA, 15 bp, Homo sapiens
gcattaatcttcatt

SEQ ID NO: 653106 - DNA, 15 bp, Homo sapiens
cattaatcttcattg

SEQ ID NO: 653107 - DNA, 15 bp, Homo sapiens
attaatcttcattga

SEQ ID NO: 653108 - DNA, 15 bp, Homo sapiens
ttaatcttcattgaa

SEQ ID NO: 653109 - DNA, 15 bp, Homo sapiens
taatcttcattgaat

SEQ ID NO: 653110 - DNA, 15 bp, Homo sapiens
aatcttcattgaata

SEQ ID NO: 653111 - DNA, 15 bp, Homo sapiens
atcttcattgaataa

SEQ ID NO: 653112 - DNA, 15 bp, Homo sapiens
tcttcattgaataag

SEQ ID NO: 653113 - DNA, 15 bp, Homo sapiens
cttcattgaataagt

SEQ ID NO: 653114 - DNA, 15 bp, Homo sapiens
ttcattgaataagta

SEQ ID NO: 653115 - DNA, 15 bp, Homo sapiens
tcattgaataagtaa

SEQ ID NO: 653116 - DNA, 15 bp, Homo sapiens
cattgaataagtaat

SEQ ID NO: 653117 - DNA, 15 bp, Homo sapiens
attgaataagtaata

SEQ ID NO: 653118 - DNA, 15 bp, Homo sapiens
ttgaataagtaatat

SEQ ID NO: 653119 - DNA, 15 bp, Homo sapiens
tgaataagtaatatt

SEQ ID NO: 653120 - DNA, 15 bp, Homo sapiens
gaataagtaatatta

SEQ ID NO: 653121 - DNA, 15 bp, Homo sapiens
aataagtaatattac

SEQ ID NO: 653122 - DNA, 15 bp, Homo sapiens
ataagtaatattacc

SEQ ID NO: 653123 - DNA, 15 bp, Homo sapiens
taagtaatattacct

SEQ ID NO: 653124 - DNA, 15 bp, Homo sapiens
aagtaatattacctc

SEQ ID NO: 653125 - DNA, 15 bp, Homo sapiens
agtaatattacctca

SEQ ID NO: 653126 - DNA, 15 bp, Homo sapiens
gtaatattacctcaa

SEQ ID NO: 653127 - DNA, 15 bp, Homo sapiens
taatattacctcaag

SEQ ID NO: 653128 - DNA, 15 bp, Homo sapiens
aatattacctcaagc

SEQ ID NO: 653129 - DNA, 15 bp, Homo sapiens
atattacctcaagcc

SEQ ID NO: 653130 - DNA, 15 bp, Homo sapiens
tattacctcaagccc

SEQ ID NO: 653131 - DNA, 15 bp, Homo sapiens
attacctcaagccca

SEQ ID NO: 653132 - DNA, 15 bp, Homo sapiens
ttacctcaagcccaa

SEQ ID NO: 653133 - DNA, 15 bp, Homo sapiens
tacctcaagcccaat

SEQ ID NO: 653134 - DNA, 15 bp, Homo sapiens
acctcaagcccaatg

SEQ ID NO: 653135 - DNA, 15 bp, Homo sapiens
cctcaagcccaatgg

SEQ ID NO: 653136 - DNA, 15 bp, Homo sapiens
ctcaagcccaatggc

SEQ ID NO: 653137 - DNA, 15 bp, Homo sapiens
tcaagcccaatggct

SEQ ID NO: 653138 - DNA, 15 bp, Homo sapiens
caagcccaatggctg

SEQ ID NO: 653139 - DNA, 15 bp, Homo sapiens
aagcccaatggctgg

SEQ ID NO: 653140 - DNA, 15 bp, Homo sapiens
agcccaatggctgga

SEQ ID NO: 653141 - DNA, 15 bp, Homo sapiens
gcccaatggctggat

SEQ ID NO: 653142 - DNA, 15 bp, Homo sapiens
cccaatggctggata

SEQ ID NO: 653143 - DNA, 15 bp, Homo sapiens
ccaatggctggatat

SEQ ID NO: 653144 - DNA, 15 bp, Homo sapiens
caatggctggatatc

SEQ ID NO: 653145 - DNA, 15 bp, Homo sapiens
aatggctggatatct

SEQ ID NO: 653146 - DNA, 15 bp, Homo sapiens
atggctggatatctt

SEQ ID NO: 653147 - DNA, 15 bp, Homo sapiens
tggctggatatcttc

SEQ ID NO: 653148 - DNA, 15 bp, Homo sapiens
ggctggatatcttca

SEQ ID NO: 653149 - DNA, 15 bp, Homo sapiens
gctggatatcttcaa

SEQ ID NO: 653150 - DNA, 15 bp, Homo sapiens
ctggatatcttcaaa

SEQ ID NO: 653151 - DNA, 15 bp, Homo sapiens
tggatatcttcaaac

SEQ ID NO: 653152 - DNA, 15 bp, Homo sapiens
ggatatcttcaaaca

SEQ ID NO: 653153 - DNA, 15 bp, Homo sapiens
gatatcttcaaacaa

SEQ ID NO: 653154 - DNA, 15 bp, Homo sapiens
atatcttcaaacaag

SEQ ID NO: 653155 - DNA, 15 bp, Homo sapiens
tatcttcaaacaagc

SEQ ID NO: 653156 - DNA, 15 bp, Homo sapiens
atcttcaaacaagcc

SEQ ID NO: 653157 - DNA, 15 bp, Homo sapiens
tcttcaaacaagcca

SEQ ID NO: 653158 - DNA, 15 bp, Homo sapiens
cttcaaacaagccaa

SEQ ID NO: 653159 - DNA, 15 bp, Homo sapiens
ttcaaacaagccaaa

SEQ ID NO: 653160 - DNA, 15 bp, Homo sapiens
tcaaacaagccaaat

SEQ ID NO: 653161 - DNA, 15 bp, Homo sapiens
caaacaagccaaatg

SEQ ID NO: 653162 - DNA, 15 bp, Homo sapiens
aaacaagccaaatgc

SEQ ID NO: 653163 - DNA, 15 bp, Homo sapiens
aacaagccaaatgca

SEQ ID NO: 653164 - DNA, 15 bp, Homo sapiens
acaagccaaatgcat

SEQ ID NO: 653165 - DNA, 15 bp, Homo sapiens
caagccaaatgcatc

SEQ ID NO: 653166 - DNA, 15 bp, Homo sapiens
aagccaaatgcatca

SEQ ID NO: 653167 - DNA, 15 bp, Homo sapiens
agccaaatgcatcag

SEQ ID NO: 653168 - DNA, 15 bp, Homo sapiens
gccaaatgcatcagt

SEQ ID NO: 653169 - DNA, 15 bp, Homo sapiens
ccaaatgcatcagta

SEQ ID NO: 653170 - DNA, 15 bp, Homo sapiens
caaatgcatcagtac

SEQ ID NO: 653171 - DNA, 15 bp, Homo sapiens
aaatgcatcagtact

SEQ ID NO: 653172 - DNA, 15 bp, Homo sapiens
aatgcatcagtactt

SEQ ID NO: 653173 - DNA, 15 bp, Homo sapiens
atgcatcagtacttg

SEQ ID NO: 653174 - DNA, 15 bp, Homo sapiens
tgcatcagtacttga

SEQ ID NO: 653175 - DNA, 15 bp, Homo sapiens
gcatcagtacttgac

SEQ ID NO: 653176 - DNA, 15 bp, Homo sapiens
catcagtacttgaca

SEQ ID NO: 653177 - DNA, 15 bp, Homo sapiens
atcagtacttgacac

SEQ ID NO: 653178 - DNA, 15 bp, Homo sapiens
tcagtacttgacaca

SEQ ID NO: 653179 - DNA, 15 bp, Homo sapiens
cagtacttgacacat

SEQ ID NO: 653180 - DNA, 15 bp, Homo sapiens
agtacttgacacatg

SEQ ID NO: 653181 - DNA, 15 bp, Homo sapiens
gtacttgacacatgt

SEQ ID NO: 653182 - DNA, 15 bp, Homo sapiens
tacttgacacatgtg

SEQ ID NO: 653183 - DNA, 15 bp, Homo sapiens
acttgacacatgtgt

SEQ ID NO: 653184 - DNA, 15 bp, Homo sapiens
cttgacacatgtgta

SEQ ID NO: 653185 - DNA, 15 bp, Homo sapiens
ttgacacatgtgtag

SEQ ID NO: 653186 - DNA, 15 bp, Homo sapiens
tgacacatgtgtagc

SEQ ID NO: 653187 - DNA, 15 bp, Homo sapiens
gacacatgtgtagcc

SEQ ID NO: 653188 - DNA, 15 bp, Homo sapiens
acacatgtgtagccc

SEQ ID NO: 653189 - DNA, 15 bp, Homo sapiens
cacatgtgtagccca

SEQ ID NO: 653190 - DNA, 15 bp, Homo sapiens
acatgtgtagcccat

SEQ ID NO: 653191 - DNA, 15 bp, Homo sapiens
catgtgtagcccatg

SEQ ID NO: 653192 - DNA, 15 bp, Homo sapiens
atgtgtagcccatgt

SEQ ID NO: 653193 - DNA, 15 bp, Homo sapiens
tgtgtagcccatgtt

SEQ ID NO: 653194 - DNA, 15 bp, Homo sapiens
gtgtagcccatgttt

SEQ ID NO: 653195 - DNA, 15 bp, Homo sapiens
tgtagcccatgttta

SEQ ID NO: 653196 - DNA, 15 bp, Homo sapiens
gtagcccatgtttag

SEQ ID NO: 653197 - DNA, 15 bp, Homo sapiens
tagcccatgtttagg

SEQ ID NO: 653198 - DNA, 15 bp, Homo sapiens
agcccatgtttaggg

SEQ ID NO: 653199 - DNA, 15 bp, Homo sapiens
gcccatgtttagggc

SEQ ID NO: 653200 - DNA, 15 bp, Homo sapiens
cccatgtttagggct

SEQ ID NO: 653201 - DNA, 15 bp, Homo sapiens
ccatgtttagggctg

SEQ ID NO: 653202 - DNA, 15 bp, Homo sapiens
catgtttagggctgc

SEQ ID NO: 653203 - DNA, 15 bp, Homo sapiens
atgtttagggctgca

SEQ ID NO: 653204 - DNA, 15 bp, Homo sapiens
tgtttagggctgcat

SEQ ID NO: 653205 - DNA, 15 bp, Homo sapiens
gtttagggctgcatt

SEQ ID NO: 653206 - DNA, 15 bp, Homo sapiens
tttagggctgcatta

SEQ ID NO: 653207 - DNA, 15 bp, Homo sapiens
ttagggctgcattaa

SEQ ID NO: 653208 - DNA, 15 bp, Homo sapiens
tagggctgcattaat

SEQ ID NO: 653209 - DNA, 15 bp, Homo sapiens
agggctgcattaatc

SEQ ID NO: 653210 - DNA, 15 bp, Homo sapiens
gggctgcattaatct

SEQ ID NO: 653211 - DNA, 15 bp, Homo sapiens
ggctgcattaatctc

SEQ ID NO: 653212 - DNA, 15 bp, Homo sapiens
gctgcattaatctca

SEQ ID NO: 653213 - DNA, 15 bp, Homo sapiens
ctgcattaatctcag

SEQ ID NO: 653214 - DNA, 15 bp, Homo sapiens
tgcattaatctcaga

SEQ ID NO: 653215 - DNA, 15 bp, Homo sapiens
gcattaatctcagac

SEQ ID NO: 653216 - DNA, 15 bp, Homo sapiens
cattaatctcagaca

SEQ ID NO: 653217 - DNA, 15 bp, Homo sapiens
attaatctcagacag

SEQ ID NO: 653218 - DNA, 15 bp, Homo sapiens
ttaatctcagacaga

SEQ ID NO: 653219 - DNA, 15 bp, Homo sapiens
taatctcagacagac

SEQ ID NO: 653220 - DNA, 15 bp, Homo sapiens
aatctcagacagact

SEQ ID NO: 653221 - DNA, 15 bp, Homo sapiens
atctcagacagactg

SEQ ID NO: 653222 - DNA, 15 bp, Homo sapiens
tctcagacagactgc

SEQ ID NO: 653223 - DNA, 15 bp, Homo sapiens
ctcagacagactgct

SEQ ID NO: 653224 - DNA, 15 bp, Homo sapiens
tcagacagactgctc

SEQ ID NO: 653225 - DNA, 15 bp, Homo sapiens
cagacagactgctct

SEQ ID NO: 653226 - DNA, 15 bp, Homo sapiens
agacagactgctcta

SEQ ID NO: 653227 - DNA, 15 bp, Homo sapiens
gacagactgctctag

SEQ ID NO: 653228 - DNA, 15 bp, Homo sapiens
acagactgctctagc

SEQ ID NO: 653229 - DNA, 15 bp, Homo sapiens
cagactgctctagca

SEQ ID NO: 653230 - DNA, 15 bp, Homo sapiens
agactgctctagcac

SEQ ID NO: 653231 - DNA, 15 bp, Homo sapiens
gactgctctagcact

SEQ ID NO: 653232 - DNA, 15 bp, Homo sapiens
actgctctagcactg

SEQ ID NO: 653233 - DNA, 15 bp, Homo sapiens
ctgctctagcactga

SEQ ID NO: 653234 - DNA, 15 bp, Homo sapiens
tgctctagcactgac

SEQ ID NO: 653235 - DNA, 15 bp, Homo sapiens
gctctagcactgaca

SEQ ID NO: 653236 - DNA, 15 bp, Homo sapiens
ctctagcactgacac

SEQ ID NO: 653237 - DNA, 15 bp, Homo sapiens
tctagcactgacact

SEQ ID NO: 653238 - DNA, 15 bp, Homo sapiens
ctagcactgacactc

SEQ ID NO: 653239 - DNA, 15 bp, Homo sapiens
tagcactgacactct

SEQ ID NO: 653240 - DNA, 15 bp, Homo sapiens
agcactgacactctt

SEQ ID NO: 653241 - DNA, 15 bp, Homo sapiens
gcactgacactctta

SEQ ID NO: 653242 - DNA, 15 bp, Homo sapiens
cactgacactcttaa

SEQ ID NO: 653243 - DNA, 15 bp, Homo sapiens
actgacactcttaaa

SEQ ID NO: 653244 - DNA, 15 bp, Homo sapiens
ctgacactcttaaaa

SEQ ID NO: 653245 - DNA, 15 bp, Homo sapiens
tgacactcttaaaat

SEQ ID NO: 653246 - DNA, 15 bp, Homo sapiens
gacactcttaaaatg

SEQ ID NO: 653247 - DNA, 15 bp, Homo sapiens
acactcttaaaatga

SEQ ID NO: 653248 - DNA, 15 bp, Homo sapiens
cactcttaaaatgag

SEQ ID NO: 653249 - DNA, 15 bp, Homo sapiens
actcttaaaatgaga

SEQ ID NO: 653250 - DNA, 15 bp, Homo sapiens
ctcttaaaatgagat

SEQ ID NO: 653251 - DNA, 15 bp, Homo sapiens
tcttaaaatgagatt

SEQ ID NO: 653252 - DNA, 15 bp, Homo sapiens
cttaaaatgagatta

SEQ ID NO: 653253 - DNA, 15 bp, Homo sapiens
ttaaaatgagattag

SEQ ID NO: 653254 - DNA, 15 bp, Homo sapiens
taaaatgagattagt

SEQ ID NO: 653255 - DNA, 15 bp, Homo sapiens
aaaatgagattagtc

SEQ ID NO: 653256 - DNA, 15 bp, Homo sapiens
aaatgagattagtca

SEQ ID NO: 653257 - DNA, 15 bp, Homo sapiens
aatgagattagtcaa

SEQ ID NO: 653258 - DNA, 15 bp, Homo sapiens
atgagattagtcaat

SEQ ID NO: 653259 - DNA, 15 bp, Homo sapiens
tgagattagtcaata

SEQ ID NO: 653260 - DNA, 15 bp, Homo sapiens
gagattagtcaataa

SEQ ID NO: 653261 - DNA, 15 bp, Homo sapiens
agattagtcaataaa

SEQ ID NO: 653262 - DNA, 15 bp, Homo sapiens
gattagtcaataaat

SEQ ID NO: 653263 - DNA, 15 bp, Homo sapiens
attagtcaataaatg

SEQ ID NO: 653264 - DNA, 15 bp, Homo sapiens
ttagtcaataaatga

SEQ ID NO: 653265 - DNA, 15 bp, Homo sapiens
tagtcaataaatgaa

SEQ ID NO: 653266 - DNA, 15 bp, Homo sapiens
agtcaataaatgaac

SEQ ID NO: 653267 - DNA, 15 bp, Homo sapiens
gtcaataaatgaact

SEQ ID NO: 653268 - DNA, 15 bp, Homo sapiens
tcaataaatgaactt

SEQ ID NO: 653269 - DNA, 15 bp, Homo sapiens
caataaatgaacttc

SEQ ID NO: 653270 - DNA, 15 bp, Homo sapiens
aataaatgaacttcg

SEQ ID NO: 653271 - DNA, 15 bp, Homo sapiens
ataaatgaacttcgg

SEQ ID NO: 653272 - DNA, 15 bp, Homo sapiens
taaatgaacttcgga

SEQ ID NO: 653273 - DNA, 15 bp, Homo sapiens
aaatgaacttcggat

SEQ ID NO: 653274 - DNA, 15 bp, Homo sapiens
aatgaacttcggata

SEQ ID NO: 653275 - DNA, 15 bp, Homo sapiens
atgaacttcggataa

SEQ ID NO: 653276 - DNA, 15 bp, Homo sapiens
tgaacttcggataag

SEQ ID NO: 653277 - DNA, 15 bp, Homo sapiens
gaacttcggataagc

SEQ ID NO: 653278 - DNA, 15 bp, Homo sapiens
aacttcggataagct

SEQ ID NO: 653279 - DNA, 15 bp, Homo sapiens
acttcggataagcta

SEQ ID NO: 653280 - DNA, 15 bp, Homo sapiens
cttcggataagctat

SEQ ID NO: 653281 - DNA, 15 bp, Homo sapiens
ttcggataagctatg

SEQ ID NO: 653282 - DNA, 15 bp, Homo sapiens
tcggataagctatga

SEQ ID NO: 653283 - DNA, 15 bp, Homo sapiens
cggataagctatgaa

SEQ ID NO: 653284 - DNA, 15 bp, Homo sapiens
ggataagctatgaat

SEQ ID NO: 653285 - DNA, 15 bp, Homo sapiens
gataagctatgaata

SEQ ID NO: 653286 - DNA, 15 bp, Homo sapiens
ataagctatgaataa

SEQ ID NO: 653287 - DNA, 15 bp, Homo sapiens
taagctatgaataaa

SEQ ID NO: 653288 - DNA, 15 bp, Homo sapiens
aagctatgaataaag

SEQ ID NO: 653289 - DNA, 15 bp, Homo sapiens
agctatgaataaaga

SEQ ID NO: 653290 - DNA, 15 bp, Homo sapiens
gctatgaataaagaa

SEQ ID NO: 653291 - DNA, 15 bp, Homo sapiens
ctatgaataaagaac

SEQ ID NO: 653292 - DNA, 15 bp, Homo sapiens
tatgaataaagaacc

SEQ ID NO: 653293 - DNA, 15 bp, Homo sapiens
atgaataaagaacct

SEQ ID NO: 653294 - DNA, 15 bp, Homo sapiens
tgaataaagaacctt

SEQ ID NO: 653295 - DNA, 15 bp, Homo sapiens
gaataaagaaccttt

SEQ ID NO: 653296 - DNA, 15 bp, Homo sapiens
aataaagaacctttt

SEQ ID NO: 653297 - DNA, 15 bp, Homo sapiens
ataaagaacctttta

SEQ ID NO: 653298 - DNA, 15 bp, Homo sapiens
taaagaaccttttaa

SEQ ID NO: 653299 - DNA, 15 bp, Homo sapiens
aaagaaccttttaat

SEQ ID NO: 653300 - DNA, 15 bp, Homo sapiens
aagaaccttttaatt

SEQ ID NO: 653301 - DNA, 15 bp, Homo sapiens
agaaccttttaatta

SEQ ID NO: 653302 - DNA, 15 bp, Homo sapiens
gaaccttttaattaa

SEQ ID NO: 653303 - DNA, 15 bp, Homo sapiens
aaccttttaattaat

SEQ ID NO: 653304 - DNA, 15 bp, Homo sapiens
accttttaattaatt

SEQ ID NO: 653305 - DNA, 15 bp, Homo sapiens
ccttttaattaattc

SEQ ID NO: 653306 - DNA, 15 bp, Homo sapiens
cttttaattaattca

SEQ ID NO: 653307 - DNA, 15 bp, Homo sapiens
ttttaattaattcag

SEQ ID NO: 653308 - DNA, 15 bp, Homo sapiens
tttaattaattcagc

SEQ ID NO: 653309 - DNA, 15 bp, Homo sapiens
ttaattaattcagcc

SEQ ID NO: 653310 - DNA, 15 bp, Homo sapiens
taattaattcagcct

SEQ ID NO: 653311 - DNA, 15 bp, Homo sapiens
aattaattcagcctt

SEQ ID NO: 653312 - DNA, 15 bp, Homo sapiens
attaattcagccttc

SEQ ID NO: 653313 - DNA, 15 bp, Homo sapiens
ttaattcagccttca

SEQ ID NO: 653314 - DNA, 15 bp, Homo sapiens
taattcagccttcag

SEQ ID NO: 653315 - DNA, 15 bp, Homo sapiens
aattcagccttcaga

SEQ ID NO: 653316 - DNA, 15 bp, Homo sapiens
attcagccttcagat

SEQ ID NO: 653317 - DNA, 15 bp, Homo sapiens
ttcagccttcagata

SEQ ID NO: 653318 - DNA, 15 bp, Homo sapiens
tcagccttcagatac

SEQ ID NO: 653319 - DNA, 15 bp, Homo sapiens
cagccttcagatacg

SEQ ID NO: 653320 - DNA, 15 bp, Homo sapiens
agccttcagatacgt

SEQ ID NO: 653321 - DNA, 15 bp, Homo sapiens
gccttcagatacgtt

SEQ ID NO: 653322 - DNA, 15 bp, Homo sapiens
ccttcagatacgtta

SEQ ID NO: 653323 - DNA, 15 bp, Homo sapiens
cttcagatacgttat

SEQ ID NO: 653324 - DNA, 15 bp, Homo sapiens
ttcagatacgttatg

SEQ ID NO: 653325 - DNA, 15 bp, Homo sapiens
tcagatacgttatgt

SEQ ID NO: 653326 - DNA, 15 bp, Homo sapiens
cagatacgttatgtg

SEQ ID NO: 653327 - DNA, 15 bp, Homo sapiens
agatacgttatgtga

SEQ ID NO: 653328 - DNA, 15 bp, Homo sapiens
gatacgttatgtgag

SEQ ID NO: 653329 - DNA, 15 bp, Homo sapiens
atacgttatgtgagc

SEQ ID NO: 653330 - DNA, 15 bp, Homo sapiens
tacgttatgtgagct

SEQ ID NO: 653331 - DNA, 15 bp, Homo sapiens
acgttatgtgagctc

SEQ ID NO: 653332 - DNA, 15 bp, Homo sapiens
cgttatgtgagctca

SEQ ID NO: 653333 - DNA, 15 bp, Homo sapiens
gttatgtgagctcat

SEQ ID NO: 653334 - DNA, 15 bp, Homo sapiens
ttatgtgagctcatc

SEQ ID NO: 653335 - DNA, 15 bp, Homo sapiens
tatgtgagctcatca

SEQ ID NO: 653336 - DNA, 15 bp, Homo sapiens
atgtgagctcatcat

SEQ ID NO: 653337 - DNA, 15 bp, Homo sapiens
tgtgagctcatcatt

SEQ ID NO: 653338 - DNA, 15 bp, Homo sapiens
gtgagctcatcattt

SEQ ID NO: 653339 - DNA, 15 bp, Homo sapiens
tgagctcatcattta

SEQ ID NO: 653340 - DNA, 15 bp, Homo sapiens
gagctcatcatttaa

SEQ ID NO: 653341 - DNA, 15 bp, Homo sapiens
agctcatcatttaaa

SEQ ID NO: 653342 - DNA, 15 bp, Homo sapiens
gctcatcatttaaaa

SEQ ID NO: 653343 - DNA, 15 bp, Homo sapiens
ctcatcatttaaaag

SEQ ID NO: 653344 - DNA, 15 bp, Homo sapiens
tcatcatttaaaaga

SEQ ID NO: 653345 - DNA, 15 bp, Homo sapiens
catcatttaaaagaa

SEQ ID NO: 653346 - DNA, 15 bp, Homo sapiens
atcatttaaaagaac

SEQ ID NO: 653347 - DNA, 15 bp, Homo sapiens
tcatttaaaagaact

SEQ ID NO: 653348 - DNA, 15 bp, Homo sapiens
catttaaaagaactt

SEQ ID NO: 653349 - DNA, 15 bp, Homo sapiens
atttaaaagaactta

SEQ ID NO: 653350 - DNA, 15 bp, Homo sapiens
tttaaaagaacttaa

SEQ ID NO: 653351 - DNA, 15 bp, Homo sapiens
ttaaaagaacttaat

SEQ ID NO: 653352 - DNA, 15 bp, Homo sapiens
taaaagaacttaatc

SEQ ID NO: 653353 - DNA, 15 bp, Homo sapiens
aaaagaacttaatca

SEQ ID NO: 653354 - DNA, 15 bp, Homo sapiens
aaagaacttaatcat

SEQ ID NO: 653355 - DNA, 15 bp, Homo sapiens
aagaacttaatcatt

SEQ ID NO: 653356 - DNA, 15 bp, Homo sapiens
agaacttaatcattt

SEQ ID NO: 653357 - DNA, 15 bp, Homo sapiens
gaacttaatcattta

SEQ ID NO: 653358 - DNA, 15 bp, Homo sapiens
aacttaatcatttaa

SEQ ID NO: 653359 - DNA, 15 bp, Homo sapiens
acttaatcatttaaa

SEQ ID NO: 653360 - DNA, 15 bp, Homo sapiens
cttaatcatttaaaa

SEQ ID NO: 653361 - DNA, 15 bp, Homo sapiens
ttaatcatttaaaag

SEQ ID NO: 653362 - DNA, 15 bp, Homo sapiens
taatcatttaaaaga

SEQ ID NO: 653363 - DNA, 15 bp, Homo sapiens
aatcatttaaaagaa

SEQ ID NO: 653364 - DNA, 15 bp, Homo sapiens
ttaaaagaacttaac

SEQ ID NO: 653365 - DNA, 15 bp, Homo sapiens
taaaagaacttaact

SEQ ID NO: 653366 - DNA, 15 bp, Homo sapiens
aaaagaacttaactt

SEQ ID NO: 653367 - DNA, 15 bp, Homo sapiens
aaagaacttaacttt

SEQ ID NO: 653368 - DNA, 15 bp, Homo sapiens
aagaacttaactttt

SEQ ID NO: 653369 - DNA, 15 bp, Homo sapiens
agaacttaacttttt

SEQ ID NO: 653370 - DNA, 15 bp, Homo sapiens
gaacttaactttttg

SEQ ID NO: 653371 - DNA, 15 bp, Homo sapiens
aacttaactttttga

SEQ ID NO: 653372 - DNA, 15 bp, Homo sapiens
acttaactttttgaa

SEQ ID NO: 653373 - DNA, 15 bp, Homo sapiens
cttaactttttgaac

SEQ ID NO: 653374 - DNA, 15 bp, Homo sapiens
ttaactttttgaaca

SEQ ID NO: 653375 - DNA, 15 bp, Homo sapiens
taactttttgaacag

SEQ ID NO: 653376 - DNA, 15 bp, Homo sapiens
aactttttgaacagg

SEQ ID NO: 653377 - DNA, 15 bp, Homo sapiens
actttttgaacaggg

SEQ ID NO: 653378 - DNA, 15 bp, Homo sapiens
ctttttgaacagggg

SEQ ID NO: 653379 - DNA, 15 bp, Homo sapiens
tttttgaacagggga

SEQ ID NO: 653380 - DNA, 15 bp, Homo sapiens
ttttgaacaggggac

SEQ ID NO: 653381 - DNA, 15 bp, Homo sapiens
tttgaacaggggact

SEQ ID NO: 653382 - DNA, 15 bp, Homo sapiens
ttgaacaggggacta

SEQ ID NO: 653383 - DNA, 15 bp, Homo sapiens
tgaacaggggactac

SEQ ID NO: 653384 - DNA, 15 bp, Homo sapiens
gaacaggggactacc

SEQ ID NO: 653385 - DNA, 15 bp, Homo sapiens
aacaggggactacca

SEQ ID NO: 653386 - DNA, 15 bp, Homo sapiens
acaggggactaccat

SEQ ID NO: 653387 - DNA, 15 bp, Homo sapiens
caggggactaccata

SEQ ID NO: 653388 - DNA, 15 bp, Homo sapiens
aggggactaccatat

SEQ ID NO: 653389 - DNA, 15 bp, Homo sapiens
ggggactaccatatg

SEQ ID NO: 653390 - DNA, 15 bp, Homo sapiens
gggactaccatatga

SEQ ID NO: 653391 - DNA, 15 bp, Homo sapiens
ggactaccatatgac

SEQ ID NO: 653392 - DNA, 15 bp, Homo sapiens
gactaccatatgacc

SEQ ID NO: 653393 - DNA, 15 bp, Homo sapiens
actaccatatgaccc

SEQ ID NO: 653394 - DNA, 15 bp, Homo sapiens
ctaccatatgaccca

SEQ ID NO: 653395 - DNA, 15 bp, Homo sapiens
taccatatgacccag

SEQ ID NO: 653396 - DNA, 15 bp, Homo sapiens
accatatgacccagc

SEQ ID NO: 653397 - DNA, 15 bp, Homo sapiens
ccatatgacccagca

SEQ ID NO: 653398 - DNA, 15 bp, Homo sapiens
catatgacccagcaa

SEQ ID NO: 653399 - DNA, 15 bp, Homo sapiens
atatgacccagcaat

SEQ ID NO: 653400 - DNA, 15 bp, Homo sapiens
tatgacccagcaatt

SEQ ID NO: 653401 - DNA, 15 bp, Homo sapiens
atgacccagcaattc

SEQ ID NO: 653402 - DNA, 15 bp, Homo sapiens
tgacccagcaattcc

SEQ ID NO: 653403 - DNA, 15 bp, Homo sapiens
gacccagcaattcca

SEQ ID NO: 653404 - DNA, 15 bp, Homo sapiens
acccagcaattccac

SEQ ID NO: 653405 - DNA, 15 bp, Homo sapiens
cccagcaattccact

SEQ ID NO: 653406 - DNA, 15 bp, Homo sapiens
ccagcaattccactc

SEQ ID NO: 653407 - DNA, 15 bp, Homo sapiens
cagcaattccactcc

SEQ ID NO: 653408 - DNA, 15 bp, Homo sapiens
agcaattccactcct

SEQ ID NO: 653409 - DNA, 15 bp, Homo sapiens
gcaattccactccta

SEQ ID NO: 653410 - DNA, 15 bp, Homo sapiens
caattccactcctag

SEQ ID NO: 653411 - DNA, 15 bp, Homo sapiens
aattccactcctagg

SEQ ID NO: 653412 - DNA, 15 bp, Homo sapiens
attccactcctaggt

SEQ ID NO: 653413 - DNA, 15 bp, Homo sapiens
ttccactcctaggtc

SEQ ID NO: 653414 - DNA, 15 bp, Homo sapiens
tccactcctaggtct

SEQ ID NO: 653415 - DNA, 15 bp, Homo sapiens
ccactcctaggtcta

SEQ ID NO: 653416 - DNA, 15 bp, Homo sapiens
cactcctaggtctat

SEQ ID NO: 653417 - DNA, 15 bp, Homo sapiens
actcctaggtctata

SEQ ID NO: 653418 - DNA, 15 bp, Homo sapiens
ctcctaggtctatat

SEQ ID NO: 653419 - DNA, 15 bp, Homo sapiens
tcctaggtctatatc

SEQ ID NO: 653420 - DNA, 15 bp, Homo sapiens
cctaggtctatatcc

SEQ ID NO: 653421 - DNA, 15 bp, Homo sapiens
ctaggtctatatcca

SEQ ID NO: 653422 - DNA, 15 bp, Homo sapiens
taggtctatatccaa

SEQ ID NO: 653423 - DNA, 15 bp, Homo sapiens
aggtctatatccaaa

SEQ ID NO: 653424 - DNA, 15 bp, Homo sapiens
ggtctatatccaaaa

SEQ ID NO: 653425 - DNA, 15 bp, Homo sapiens
gtctatatccaaaag

SEQ ID NO: 653426 - DNA, 15 bp, Homo sapiens
tctatatccaaaaga

SEQ ID NO: 653427 - DNA, 15 bp, Homo sapiens
ctatatccaaaagaa

SEQ ID NO: 653428 - DNA, 15 bp, Homo sapiens
tatatccaaaagaat

SEQ ID NO: 653429 - DNA, 15 bp, Homo sapiens
atatccaaaagaatt

SEQ ID NO: 653430 - DNA, 15 bp, Homo sapiens
tatccaaaagaattg

SEQ ID NO: 653431 - DNA, 15 bp, Homo sapiens
atccaaaagaattga

SEQ ID NO: 653432 - DNA, 15 bp, Homo sapiens
tccaaaagaattgaa

SEQ ID NO: 653433 - DNA, 15 bp, Homo sapiens
ccaaaagaattgaaa

SEQ ID NO: 653434 - DNA, 15 bp, Homo sapiens
caaaagaattgaaag

SEQ ID NO: 653435 - DNA, 15 bp, Homo sapiens
aaaagaattgaaagc

SEQ ID NO: 653436 - DNA, 15 bp, Homo sapiens
aaagaattgaaagca

SEQ ID NO: 653437 - DNA, 15 bp, Homo sapiens
aagaattgaaagcag

SEQ ID NO: 653438 - DNA, 15 bp, Homo sapiens
agaattgaaagcagg

SEQ ID NO: 653439 - DNA, 15 bp, Homo sapiens
gaattgaaagcaggg

SEQ ID NO: 653440 - DNA, 15 bp, Homo sapiens
aattgaaagcaggga

SEQ ID NO: 653441 - DNA, 15 bp, Homo sapiens
attgaaagcagggac

SEQ ID NO: 653442 - DNA, 15 bp, Homo sapiens
ttgaaagcagggact

SEQ ID NO: 653443 - DNA, 15 bp, Homo sapiens
tgaaagcagggactt

SEQ ID NO: 653444 - DNA, 15 bp, Homo sapiens
gaaagcagggacttg

SEQ ID NO: 653445 - DNA, 15 bp, Homo sapiens
aaagcagggacttga

SEQ ID NO: 653446 - DNA, 15 bp, Homo sapiens
aagcagggacttgaa

SEQ ID NO: 653447 - DNA, 15 bp, Homo sapiens
agcagggacttgaaa

SEQ ID NO: 653448 - DNA, 15 bp, Homo sapiens
gcagggacttgaaag

SEQ ID NO: 653449 - DNA, 15 bp, Homo sapiens
cagggacttgaaagg

SEQ ID NO: 653450 - DNA, 15 bp, Homo sapiens
agggacttgaaaggt

SEQ ID NO: 653451 - DNA, 15 bp, Homo sapiens
gggacttgaaaggtg

SEQ ID NO: 653452 - DNA, 15 bp, Homo sapiens
ggacttgaaaggtgc

SEQ ID NO: 653453 - DNA, 15 bp, Homo sapiens
gacttgaaaggtgct

SEQ ID NO: 653454 - DNA, 15 bp, Homo sapiens
acttgaaaggtgctt

SEQ ID NO: 653455 - DNA, 15 bp, Homo sapiens
cttgaaaggtgctta

SEQ ID NO: 653456 - DNA, 15 bp, Homo sapiens
ttgaaaggtgcttat

SEQ ID NO: 653457 - DNA, 15 bp, Homo sapiens
tgaaaggtgcttata

SEQ ID NO: 653458 - DNA, 15 bp, Homo sapiens
gaaaggtgcttatac

SEQ ID NO: 653459 - DNA, 15 bp, Homo sapiens
aaaggtgcttataca

SEQ ID NO: 653460 - DNA, 15 bp, Homo sapiens
aaggtgcttatacac

SEQ ID NO: 653461 - DNA, 15 bp, Homo sapiens
aggtgcttatacacc

SEQ ID NO: 653462 - DNA, 15 bp, Homo sapiens
ggtgcttatacacca

SEQ ID NO: 653463 - DNA, 15 bp, Homo sapiens
gtgcttatacaccag

SEQ ID NO: 653464 - DNA, 15 bp, Homo sapiens
tgcttatacaccagt

SEQ ID NO: 653465 - DNA, 15 bp, Homo sapiens
gcttatacaccagtg

SEQ ID NO: 653466 - DNA, 15 bp, Homo sapiens
cttatacaccagtgt

SEQ ID NO: 653467 - DNA, 15 bp, Homo sapiens
ttatacaccagtgtt

SEQ ID NO: 653468 - DNA, 15 bp, Homo sapiens
tatacaccagtgttc

SEQ ID NO: 653469 - DNA, 15 bp, Homo sapiens
atacaccagtgttca

SEQ ID NO: 653470 - DNA, 15 bp, Homo sapiens
tacaccagtgttcat

SEQ ID NO: 653471 - DNA, 15 bp, Homo sapiens
acaccagtgttcata

SEQ ID NO: 653472 - DNA, 15 bp, Homo sapiens
caccagtgttcatag

SEQ ID NO: 653473 - DNA, 15 bp, Homo sapiens
accagtgttcatagc

SEQ ID NO: 653474 - DNA, 15 bp, Homo sapiens
ccagtgttcatagca

SEQ ID NO: 653475 - DNA, 15 bp, Homo sapiens
cagtgttcatagcag

SEQ ID NO: 653476 - DNA, 15 bp, Homo sapiens
agtgttcatagcagc

SEQ ID NO: 653477 - DNA, 15 bp, Homo sapiens
gtgttcatagcagca

SEQ ID NO: 653478 - DNA, 15 bp, Homo sapiens
tgttcatagcagcat

SEQ ID NO: 653479 - DNA, 15 bp, Homo sapiens
gttcatagcagcatt

SEQ ID NO: 653480 - DNA, 15 bp, Homo sapiens
ttcatagcagcatta

SEQ ID NO: 653481 - DNA, 15 bp, Homo sapiens
tcatagcagcattat

SEQ ID NO: 653482 - DNA, 15 bp, Homo sapiens
catagcagcattatt

SEQ ID NO: 653483 - DNA, 15 bp, Homo sapiens
atagcagcattattc

SEQ ID NO: 653484 - DNA, 15 bp, Homo sapiens
tagcagcattattca

SEQ ID NO: 653485 - DNA, 15 bp, Homo sapiens
agcagcattattcac

SEQ ID NO: 653486 - DNA, 15 bp, Homo sapiens
gcagcattattcaca

SEQ ID NO: 653487 - DNA, 15 bp, Homo sapiens
cagcattattcacaa

SEQ ID NO: 653488 - DNA, 15 bp, Homo sapiens
agcattattcacaat

SEQ ID NO: 653489 - DNA, 15 bp, Homo sapiens
gcattattcacaata

SEQ ID NO: 653490 - DNA, 15 bp, Homo sapiens
ttcacaatagccaaa

SEQ ID NO: 653491 - DNA, 15 bp, Homo sapiens
tcacaatagccaaaa

SEQ ID NO: 653492 - DNA, 15 bp, Homo sapiens
cacaatagccaaaag

SEQ ID NO: 653493 - DNA, 15 bp, Homo sapiens
acaatagccaaaagt

SEQ ID NO: 653494 - DNA, 15 bp, Homo sapiens
caatagccaaaagtt

SEQ ID NO: 653495 - DNA, 15 bp, Homo sapiens
aatagccaaaagttg

SEQ ID NO: 653496 - DNA, 15 bp, Homo sapiens
atagccaaaagttgg

SEQ ID NO: 653497 - DNA, 15 bp, Homo sapiens
tagccaaaagttgga

SEQ ID NO: 653498 - DNA, 15 bp, Homo sapiens
agccaaaagttggaa

SEQ ID NO: 653499 - DNA, 15 bp, Homo sapiens
gccaaaagttggaaa

SEQ ID NO: 653500 - DNA, 15 bp, Homo sapiens
ccaaaagttggaaat

SEQ ID NO: 653501 - DNA, 15 bp, Homo sapiens
caaaagttggaaata

SEQ ID NO: 653502 - DNA, 15 bp, Homo sapiens
aaaagttggaaataa

SEQ ID NO: 653503 - DNA, 15 bp, Homo sapiens
aaagttggaaataac

SEQ ID NO: 653504 - DNA, 15 bp, Homo sapiens
aagttggaaataacc

SEQ ID NO: 653505 - DNA, 15 bp, Homo sapiens
agttggaaataaccc

SEQ ID NO: 653506 - DNA, 15 bp, Homo sapiens
gttggaaataacccc

SEQ ID NO: 653507 - DNA, 15 bp, Homo sapiens
ttggaaataacccca

SEQ ID NO: 653508 - DNA, 15 bp, Homo sapiens
tggaaataaccccag

SEQ ID NO: 653509 - DNA, 15 bp, Homo sapiens
ggaaataaccccagt

SEQ ID NO: 653510 - DNA, 15 bp, Homo sapiens
gaaataaccccagtg

SEQ ID NO: 653511 - DNA, 15 bp, Homo sapiens
aaataaccccagtgt

SEQ ID NO: 653512 - DNA, 15 bp, Homo sapiens
aataaccccagtgtc

SEQ ID NO: 653513 - DNA, 15 bp, Homo sapiens
ataaccccagtgtcc

SEQ ID NO: 653514 - DNA, 15 bp, Homo sapiens
taaccccagtgtcca

SEQ ID NO: 653515 - DNA, 15 bp, Homo sapiens
aaccccagtgtccat

SEQ ID NO: 653516 - DNA, 15 bp, Homo sapiens
accccagtgtccatc

SEQ ID NO: 653517 - DNA, 15 bp, Homo sapiens
ccccagtgtccatca

SEQ ID NO: 653518 - DNA, 15 bp, Homo sapiens
cccagtgtccatcaa

SEQ ID NO: 653519 - DNA, 15 bp, Homo sapiens
ccagtgtccatcaat

SEQ ID NO: 653520 - DNA, 15 bp, Homo sapiens
cagtgtccatcaatg

SEQ ID NO: 653521 - DNA, 15 bp, Homo sapiens
agtgtccatcaatgg

SEQ ID NO: 653522 - DNA, 15 bp, Homo sapiens
gtgtccatcaatgga

SEQ ID NO: 653523 - DNA, 15 bp, Homo sapiens
tgtccatcaatggat

SEQ ID NO: 653524 - DNA, 15 bp, Homo sapiens
gtccatcaatggatg

SEQ ID NO: 653525 - DNA, 15 bp, Homo sapiens
tccatcaatggatga

SEQ ID NO: 653526 - DNA, 15 bp, Homo sapiens
ccatcaatggatgaa

SEQ ID NO: 653527 - DNA, 15 bp, Homo sapiens
catcaatggatgaat

SEQ ID NO: 653528 - DNA, 15 bp, Homo sapiens
atcaatggatgaatg

SEQ ID NO: 653529 - DNA, 15 bp, Homo sapiens
tcaatggatgaatgg

SEQ ID NO: 653530 - DNA, 15 bp, Homo sapiens
caatggatgaatgga

SEQ ID NO: 653531 - DNA, 15 bp, Homo sapiens
aatggatgaatggat

SEQ ID NO: 653532 - DNA, 15 bp, Homo sapiens
atggatgaatggata

SEQ ID NO: 653533 - DNA, 15 bp, Homo sapiens
tggatgaatggatat

SEQ ID NO: 653534 - DNA, 15 bp, Homo sapiens
ggatgaatggatata

SEQ ID NO: 653535 - DNA, 15 bp, Homo sapiens
gatgaatggatatac

SEQ ID NO: 653536 - DNA, 15 bp, Homo sapiens
atgaatggatataca

SEQ ID NO: 653537 - DNA, 15 bp, Homo sapiens
tgaatggatatacaa

SEQ ID NO: 653538 - DNA, 15 bp, Homo sapiens
gaatggatatacaaa

SEQ ID NO: 653539 - DNA, 15 bp, Homo sapiens
aatggatatacaaaa

SEQ ID NO: 653540 - DNA, 15 bp, Homo sapiens
atggatatacaaaat

SEQ ID NO: 653541 - DNA, 15 bp, Homo sapiens
tggatatacaaaatg

SEQ ID NO: 653542 - DNA, 15 bp, Homo sapiens
ggatatacaaaatgt

SEQ ID NO: 653543 - DNA, 15 bp, Homo sapiens
gatatacaaaatgtg

SEQ ID NO: 653544 - DNA, 15 bp, Homo sapiens
atatacaaaatgtga

SEQ ID NO: 653545 - DNA, 15 bp, Homo sapiens
tatacaaaatgtgat

SEQ ID NO: 653546 - DNA, 15 bp, Homo sapiens
atacaaaatgtgata

SEQ ID NO: 653547 - DNA, 15 bp, Homo sapiens
tacaaaatgtgatat

SEQ ID NO: 653548 - DNA, 15 bp, Homo sapiens
acaaaatgtgatata

SEQ ID NO: 653549 - DNA, 15 bp, Homo sapiens
caaaatgtgatatac

SEQ ID NO: 653550 - DNA, 15 bp, Homo sapiens
aaaatgtgatataca

SEQ ID NO: 653551 - DNA, 15 bp, Homo sapiens
aaatgtgatatacac

SEQ ID NO: 653552 - DNA, 15 bp, Homo sapiens
aatgtgatatacaca

SEQ ID NO: 653553 - DNA, 15 bp, Homo sapiens
atgtgatatacacat

SEQ ID NO: 653554 - DNA, 15 bp, Homo sapiens
tgtgatatacacata

SEQ ID NO: 653555 - DNA, 15 bp, Homo sapiens
gtgatatacacatac

SEQ ID NO: 653556 - DNA, 15 bp, Homo sapiens
tgatatacacataca

SEQ ID NO: 653557 - DNA, 15 bp, Homo sapiens
gatatacacatacaa

SEQ ID NO: 653558 - DNA, 15 bp, Homo sapiens
atatacacatacaat

SEQ ID NO: 653559 - DNA, 15 bp, Homo sapiens
tatacacatacaatg

SEQ ID NO: 653560 - DNA, 15 bp, Homo sapiens
atacacatacaatgg

SEQ ID NO: 653561 - DNA, 15 bp, Homo sapiens
tacacatacaatgga

SEQ ID NO: 653562 - DNA, 15 bp, Homo sapiens
acacatacaatggaa

SEQ ID NO: 653563 - DNA, 15 bp, Homo sapiens
cacatacaatggaat

SEQ ID NO: 653564 - DNA, 15 bp, Homo sapiens
acatacaatggaata

SEQ ID NO: 653565 - DNA, 15 bp, Homo sapiens
catacaatggaatat

SEQ ID NO: 653566 - DNA, 15 bp, Homo sapiens
atacaatggaatatt

SEQ ID NO: 653567 - DNA, 15 bp, Homo sapiens
tacaatggaatattc

SEQ ID NO: 653568 - DNA, 15 bp, Homo sapiens
acaatggaatattca

SEQ ID NO: 653569 - DNA, 15 bp, Homo sapiens
caatggaatattcag

SEQ ID NO: 653570 - DNA, 15 bp, Homo sapiens
aatggaatattcagt

SEQ ID NO: 653571 - DNA, 15 bp, Homo sapiens
atggaatattcagtt

SEQ ID NO: 653572 - DNA, 15 bp, Homo sapiens
tggaatattcagttt

SEQ ID NO: 653573 - DNA, 15 bp, Homo sapiens
ggaatattcagtttt

SEQ ID NO: 653574 - DNA, 15 bp, Homo sapiens
gaatattcagtttta

SEQ ID NO: 653575 - DNA, 15 bp, Homo sapiens
aatattcagttttaa

SEQ ID NO: 653576 - DNA, 15 bp, Homo sapiens
atattcagttttaaa

SEQ ID NO: 653577 - DNA, 15 bp, Homo sapiens
tattcagttttaaaa

SEQ ID NO: 653578 - DNA, 15 bp, Homo sapiens
attcagttttaaaag

SEQ ID NO: 653579 - DNA, 15 bp, Homo sapiens
ttcagttttaaaagg

SEQ ID NO: 653580 - DNA, 15 bp, Homo sapiens
tcagttttaaaaggg

SEQ ID NO: 653581 - DNA, 15 bp, Homo sapiens
cagttttaaaaggga

SEQ ID NO: 653582 - DNA, 15 bp, Homo sapiens
agttttaaaagggaa

SEQ ID NO: 653583 - DNA, 15 bp, Homo sapiens
gttttaaaagggaat

SEQ ID NO: 653584 - DNA, 15 bp, Homo sapiens
ttttaaaagggaatg

SEQ ID NO: 653585 - DNA, 15 bp, Homo sapiens
tttaaaagggaatga

SEQ ID NO: 653586 - DNA, 15 bp, Homo sapiens
ttaaaagggaatgaa

SEQ ID NO: 653587 - DNA, 15 bp, Homo sapiens
taaaagggaatgaag

SEQ ID NO: 653588 - DNA, 15 bp, Homo sapiens
aaaagggaatgaagc

SEQ ID NO: 653589 - DNA, 15 bp, Homo sapiens
aaagggaatgaagct

SEQ ID NO: 653590 - DNA, 15 bp, Homo sapiens
aagggaatgaagcta

SEQ ID NO: 653591 - DNA, 15 bp, Homo sapiens
agggaatgaagctag

SEQ ID NO: 653592 - DNA, 15 bp, Homo sapiens
gggaatgaagctagg

SEQ ID NO: 653593 - DNA, 15 bp, Homo sapiens
ggaatgaagctaggt

SEQ ID NO: 653594 - DNA, 15 bp, Homo sapiens
gaatgaagctaggtg

SEQ ID NO: 653595 - DNA, 15 bp, Homo sapiens
aatgaagctaggtgt

SEQ ID NO: 653596 - DNA, 15 bp, Homo sapiens
atgaagctaggtgtg

SEQ ID NO: 653597 - DNA, 15 bp, Homo sapiens
tgaagctaggtgtga

SEQ ID NO: 653598 - DNA, 15 bp, Homo sapiens
gaagctaggtgtgat

SEQ ID NO: 653599 - DNA, 15 bp, Homo sapiens
aagctaggtgtgatg

SEQ ID NO: 653600 - DNA, 15 bp, Homo sapiens
agctaggtgtgatgg

SEQ ID NO: 653601 - DNA, 15 bp, Homo sapiens
gctaggtgtgatggc

SEQ ID NO: 653602 - DNA, 15 bp, Homo sapiens
ctaggtgtgatggct

SEQ ID NO: 653603 - DNA, 15 bp, Homo sapiens
taggtgtgatggctc

SEQ ID NO: 653604 - DNA, 15 bp, Homo sapiens
aggtgtgatggctcg

SEQ ID NO: 653605 - DNA, 15 bp, Homo sapiens
ggtgtgatggctcgt

SEQ ID NO: 653606 - DNA, 15 bp, Homo sapiens
gtgtgatggctcgtg

SEQ ID NO: 653607 - DNA, 15 bp, Homo sapiens
tgtgatggctcgtgc

SEQ ID NO: 653608 - DNA, 15 bp, Homo sapiens
gtgatggctcgtgcc

SEQ ID NO: 653609 - DNA, 15 bp, Homo sapiens
tgatggctcgtgcct

SEQ ID NO: 653610 - DNA, 15 bp, Homo sapiens
gatggctcgtgcctg

SEQ ID NO: 653611 - DNA, 15 bp, Homo sapiens
atggctcgtgcctgc

SEQ ID NO: 653612 - DNA, 15 bp, Homo sapiens
tggctcgtgcctgca

SEQ ID NO: 653613 - DNA, 15 bp, Homo sapiens
ggctcgtgcctgcaa

SEQ ID NO: 653614 - DNA, 15 bp, Homo sapiens
gctcgtgcctgcaat

SEQ ID NO: 653615 - DNA, 15 bp, Homo sapiens
ctcgtgcctgcaatc

SEQ ID NO: 653616 - DNA, 15 bp, Homo sapiens
tcgtgcctgcaatcc

SEQ ID NO: 653617 - DNA, 15 bp, Homo sapiens
cgtgcctgcaatccc

SEQ ID NO: 653618 - DNA, 15 bp, Homo sapiens
gtgcctgcaatccca

SEQ ID NO: 653619 - DNA, 15 bp, Homo sapiens
tgcctgcaatcccag

SEQ ID NO: 653620 - DNA, 15 bp, Homo sapiens
gcctgcaatcccagc

SEQ ID NO: 653621 - DNA, 15 bp, Homo sapiens
cctgcaatcccagca

SEQ ID NO: 653622 - DNA, 15 bp, Homo sapiens
ctgcaatcccagcac

SEQ ID NO: 653623 - DNA, 15 bp, Homo sapiens
tgcaatcccagcact

SEQ ID NO: 653624 - DNA, 15 bp, Homo sapiens
gcaatcccagcacta

SEQ ID NO: 653625 - DNA, 15 bp, Homo sapiens
caatcccagcactat

SEQ ID NO: 653626 - DNA, 15 bp, Homo sapiens
aatcccagcactatg

SEQ ID NO: 653627 - DNA, 15 bp, Homo sapiens
atcccagcactatgg

SEQ ID NO: 653628 - DNA, 15 bp, Homo sapiens
tcccagcactatggg

SEQ ID NO: 653629 - DNA, 15 bp, Homo sapiens
cccagcactatggga

SEQ ID NO: 653630 - DNA, 15 bp, Homo sapiens
ccagcactatgggag

SEQ ID NO: 653631 - DNA, 15 bp, Homo sapiens
cagcactatgggagg

SEQ ID NO: 653632 - DNA, 15 bp, Homo sapiens
agcactatgggaggc

SEQ ID NO: 653633 - DNA, 15 bp, Homo sapiens
gcactatgggaggcc

SEQ ID NO: 653634 - DNA, 15 bp, Homo sapiens
cactatgggaggcca

SEQ ID NO: 653635 - DNA, 15 bp, Homo sapiens
actatgggaggccaa

SEQ ID NO: 653636 - DNA, 15 bp, Homo sapiens
ctatgggaggccaag

SEQ ID NO: 653637 - DNA, 15 bp, Homo sapiens
tatgggaggccaagg

SEQ ID NO: 653638 - DNA, 15 bp, Homo sapiens
atgggaggccaaggt

SEQ ID NO: 653639 - DNA, 15 bp, Homo sapiens
gaggccaaggtggga

SEQ ID NO: 653640 - DNA, 15 bp, Homo sapiens
aggccaaggtgggag

SEQ ID NO: 653641 - DNA, 15 bp, Homo sapiens
ggccaaggtgggagg

SEQ ID NO: 653642 - DNA, 15 bp, Homo sapiens
gccaaggtgggagga

SEQ ID NO: 653643 - DNA, 15 bp, Homo sapiens
ccaaggtgggaggat

SEQ ID NO: 653644 - DNA, 15 bp, Homo sapiens
caaggtgggaggatc

SEQ ID NO: 653645 - DNA, 15 bp, Homo sapiens
aaggtgggaggatca

SEQ ID NO: 653646 - DNA, 15 bp, Homo sapiens
ggtgggaggatcact

SEQ ID NO: 653647 - DNA, 15 bp, Homo sapiens
gtgggaggatcactt

SEQ ID NO: 653648 - DNA, 15 bp, Homo sapiens
tgggaggatcacttg

SEQ ID NO: 653649 - DNA, 15 bp, Homo sapiens
gggaggatcacttga

SEQ ID NO: 653650 - DNA, 15 bp, Homo sapiens
ggaggatcacttgag

SEQ ID NO: 653651 - DNA, 15 bp, Homo sapiens
gaggatcacttgagc

SEQ ID NO: 653652 - DNA, 15 bp, Homo sapiens
aggatcacttgagct

SEQ ID NO: 653653 - DNA, 15 bp, Homo sapiens
ggatcacttgagctt

SEQ ID NO: 653654 - DNA, 15 bp, Homo sapiens
gatcacttgagctta

SEQ ID NO: 653655 - DNA, 15 bp, Homo sapiens
atcacttgagcttag

SEQ ID NO: 653656 - DNA, 15 bp, Homo sapiens
tcacttgagcttagg

SEQ ID NO: 653657 - DNA, 15 bp, Homo sapiens
cacttgagcttagga

SEQ ID NO: 653658 - DNA, 15 bp, Homo sapiens
acttgagcttaggag

SEQ ID NO: 653659 - DNA, 15 bp, Homo sapiens
cttgagcttaggagt

SEQ ID NO: 653660 - DNA, 15 bp, Homo sapiens
ttgagcttaggagtt

SEQ ID NO: 653661 - DNA, 15 bp, Homo sapiens
tgagcttaggagttt

SEQ ID NO: 653662 - DNA, 15 bp, Homo sapiens
gagcttaggagttta

SEQ ID NO: 653663 - DNA, 15 bp, Homo sapiens
agcttaggagtttaa

SEQ ID NO: 653664 - DNA, 15 bp, Homo sapiens
gcttaggagtttaag

SEQ ID NO: 653665 - DNA, 15 bp, Homo sapiens
cttaggagtttaaga

SEQ ID NO: 653666 - DNA, 15 bp, Homo sapiens
ttaggagtttaagac

SEQ ID NO: 653667 - DNA, 15 bp, Homo sapiens
taggagtttaagacc

SEQ ID NO: 653668 - DNA, 15 bp, Homo sapiens
aggagtttaagacca

SEQ ID NO: 653669 - DNA, 15 bp, Homo sapiens
ggagtttaagaccag

SEQ ID NO: 653670 - DNA, 15 bp, Homo sapiens
gagtttaagaccagc

SEQ ID NO: 653671 - DNA, 15 bp, Homo sapiens
agtttaagaccagcc

SEQ ID NO: 653672 - DNA, 15 bp, Homo sapiens
gtttaagaccagcct

SEQ ID NO: 653673 - DNA, 15 bp, Homo sapiens
tttaagaccagcctg

SEQ ID NO: 653674 - DNA, 15 bp, Homo sapiens
ttaagaccagcctgg

SEQ ID NO: 653675 - DNA, 15 bp, Homo sapiens
taagaccagcctggg

SEQ ID NO: 653676 - DNA, 15 bp, Homo sapiens
aagaccagcctgggc

SEQ ID NO: 653677 - DNA, 15 bp, Homo sapiens
aacatagtgagacct

SEQ ID NO: 653678 - DNA, 15 bp, Homo sapiens
acatagtgagacctc

SEQ ID NO: 653679 - DNA, 15 bp, Homo sapiens
catagtgagacctca

SEQ ID NO: 653680 - DNA, 15 bp, Homo sapiens
atagtgagacctcat

SEQ ID NO: 653681 - DNA, 15 bp, Homo sapiens
tagtgagacctcatt

SEQ ID NO: 653682 - DNA, 15 bp, Homo sapiens
agtgagacctcattt

SEQ ID NO: 653683 - DNA, 15 bp, Homo sapiens
gtgagacctcatttc

SEQ ID NO: 653684 - DNA, 15 bp, Homo sapiens
tgagacctcatttct

SEQ ID NO: 653685 - DNA, 15 bp, Homo sapiens
gagacctcatttcta

SEQ ID NO: 653686 - DNA, 15 bp, Homo sapiens
agacctcatttctac

SEQ ID NO: 653687 - DNA, 15 bp, Homo sapiens
gacctcatttctact

SEQ ID NO: 653688 - DNA, 15 bp, Homo sapiens
acctcatttctacta

SEQ ID NO: 653689 - DNA, 15 bp, Homo sapiens
cctcatttctactaa

SEQ ID NO: 653690 - DNA, 15 bp, Homo sapiens
ctcatttctactaag

SEQ ID NO: 653691 - DNA, 15 bp, Homo sapiens
tcatttctactaaga

SEQ ID NO: 653692 - DNA, 15 bp, Homo sapiens
catttctactaagat

SEQ ID NO: 653693 - DNA, 15 bp, Homo sapiens
atttctactaagatt

SEQ ID NO: 653694 - DNA, 15 bp, Homo sapiens
tttctactaagatta

SEQ ID NO: 653695 - DNA, 15 bp, Homo sapiens
ttctactaagattaa

SEQ ID NO: 653696 - DNA, 15 bp, Homo sapiens
tctactaagattaaa

SEQ ID NO: 653697 - DNA, 15 bp, Homo sapiens
ctactaagattaaaa

SEQ ID NO: 653698 - DNA, 15 bp, Homo sapiens
tactaagattaaaaa

SEQ ID NO: 653699 - DNA, 15 bp, Homo sapiens
actaagattaaaaaa

SEQ ID NO: 653700 - DNA, 15 bp, Homo sapiens
ctaagattaaaaaat

SEQ ID NO: 653701 - DNA, 15 bp, Homo sapiens
taagattaaaaaatt

SEQ ID NO: 653702 - DNA, 15 bp, Homo sapiens
aagattaaaaaatta

SEQ ID NO: 653703 - DNA, 15 bp, Homo sapiens
agattaaaaaattag

SEQ ID NO: 653704 - DNA, 15 bp, Homo sapiens
gattaaaaaattagc

SEQ ID NO: 653705 - DNA, 15 bp, Homo sapiens
attaaaaaattagca

SEQ ID NO: 653706 - DNA, 15 bp, Homo sapiens
ttaaaaaattagcag

SEQ ID NO: 653707 - DNA, 15 bp, Homo sapiens
taaaaaattagcagg

SEQ ID NO: 653708 - DNA, 15 bp, Homo sapiens
aaaaaattagcaggt

SEQ ID NO: 653709 - DNA, 15 bp, Homo sapiens
aaaaattagcaggtg

SEQ ID NO: 653710 - DNA, 15 bp, Homo sapiens
aaaattagcaggtgt

SEQ ID NO: 653711 - DNA, 15 bp, Homo sapiens
aaattagcaggtgta

SEQ ID NO: 653712 - DNA, 15 bp, Homo sapiens
aattagcaggtgtag

SEQ ID NO: 653713 - DNA, 15 bp, Homo sapiens
attagcaggtgtagt

SEQ ID NO: 653714 - DNA, 15 bp, Homo sapiens
ttagcaggtgtagtg

SEQ ID NO: 653715 - DNA, 15 bp, Homo sapiens
tagcaggtgtagtgg

SEQ ID NO: 653716 - DNA, 15 bp, Homo sapiens
agcaggtgtagtggc

SEQ ID NO: 653717 - DNA, 15 bp, Homo sapiens
gcaggtgtagtggca

SEQ ID NO: 653718 - DNA, 15 bp, Homo sapiens
caggtgtagtggcat

SEQ ID NO: 653719 - DNA, 15 bp, Homo sapiens
aggtgtagtggcatg

SEQ ID NO: 653720 - DNA, 15 bp, Homo sapiens
ggtgtagtggcatgc

SEQ ID NO: 653721 - DNA, 15 bp, Homo sapiens
gtgtagtggcatgca

SEQ ID NO: 653722 - DNA, 15 bp, Homo sapiens
tgtagtggcatgcat

SEQ ID NO: 653723 - DNA, 15 bp, Homo sapiens
gtagtggcatgcatc

SEQ ID NO: 653724 - DNA, 15 bp, Homo sapiens
tagtggcatgcatct

SEQ ID NO: 653725 - DNA, 15 bp, Homo sapiens
agtggcatgcatctg

SEQ ID NO: 653726 - DNA, 15 bp, Homo sapiens
gtggcatgcatctgt

SEQ ID NO: 653727 - DNA, 15 bp, Homo sapiens
tggcatgcatctgtg

SEQ ID NO: 653728 - DNA, 15 bp, Homo sapiens
ggcatgcatctgtgg

SEQ ID NO: 653729 - DNA, 15 bp, Homo sapiens
gcatgcatctgtggt

SEQ ID NO: 653730 - DNA, 15 bp, Homo sapiens
catgcatctgtggtc

SEQ ID NO: 653731 - DNA, 15 bp, Homo sapiens
atgcatctgtggtcc

SEQ ID NO: 653732 - DNA, 15 bp, Homo sapiens
tgcatctgtggtccc

SEQ ID NO: 653733 - DNA, 15 bp, Homo sapiens
gcatctgtggtccca

SEQ ID NO: 653734 - DNA, 15 bp, Homo sapiens
catctgtggtcccag

SEQ ID NO: 653735 - DNA, 15 bp, Homo sapiens
atctgtggtcccagc

SEQ ID NO: 653736 - DNA, 15 bp, Homo sapiens
tctgtggtcccagct

SEQ ID NO: 653737 - DNA, 15 bp, Homo sapiens
ctgtggtcccagcta

SEQ ID NO: 653738 - DNA, 15 bp, Homo sapiens
tgtggtcccagctac

SEQ ID NO: 653739 - DNA, 15 bp, Homo sapiens
gtggtcccagctact

SEQ ID NO: 653740 - DNA, 15 bp, Homo sapiens
tggtcccagctactt

SEQ ID NO: 653741 - DNA, 15 bp, Homo sapiens
ggtcccagctactta

SEQ ID NO: 653742 - DNA, 15 bp, Homo sapiens
gtcccagctacttag

SEQ ID NO: 653743 - DNA, 15 bp, Homo sapiens
tcccagctacttagc

SEQ ID NO: 653744 - DNA, 15 bp, Homo sapiens
cccagctacttagca

SEQ ID NO: 653745 - DNA, 15 bp, Homo sapiens
ccagctacttagcat

SEQ ID NO: 653746 - DNA, 15 bp, Homo sapiens
cagctacttagcatg

SEQ ID NO: 653747 - DNA, 15 bp, Homo sapiens
agctacttagcatgc

SEQ ID NO: 653748 - DNA, 15 bp, Homo sapiens
gctacttagcatgct

SEQ ID NO: 653749 - DNA, 15 bp, Homo sapiens
ctacttagcatgctg

SEQ ID NO: 653750 - DNA, 15 bp, Homo sapiens
tacttagcatgctgg

SEQ ID NO: 653751 - DNA, 15 bp, Homo sapiens
acttagcatgctggg

SEQ ID NO: 653752 - DNA, 15 bp, Homo sapiens
cttagcatgctgggg

SEQ ID NO: 653753 - DNA, 15 bp, Homo sapiens
ttagcatgctggggc

SEQ ID NO: 653754 - DNA, 15 bp, Homo sapiens
tagcatgctggggca

SEQ ID NO: 653755 - DNA, 15 bp, Homo sapiens
agcatgctggggcag

SEQ ID NO: 653756 - DNA, 15 bp, Homo sapiens
gcatgctggggcagg

SEQ ID NO: 653757 - DNA, 15 bp, Homo sapiens
catgctggggcagga

SEQ ID NO: 653758 - DNA, 15 bp, Homo sapiens
atgctggggcaggag

SEQ ID NO: 653759 - DNA, 15 bp, Homo sapiens
tgctggggcaggagg

SEQ ID NO: 653760 - DNA, 15 bp, Homo sapiens
gctggggcaggaggg

SEQ ID NO: 653761 - DNA, 15 bp, Homo sapiens
ctggggcaggagggc

SEQ ID NO: 653762 - DNA, 15 bp, Homo sapiens
tggggcaggagggct

SEQ ID NO: 653763 - DNA, 15 bp, Homo sapiens
ggggcaggagggctg

SEQ ID NO: 653764 - DNA, 15 bp, Homo sapiens
gggcaggagggctgc

SEQ ID NO: 653765 - DNA, 15 bp, Homo sapiens
ggcaggagggctgct

SEQ ID NO: 653766 - DNA, 15 bp, Homo sapiens
gcaggagggctgctt

SEQ ID NO: 653767 - DNA, 15 bp, Homo sapiens
caggagggctgcttg

SEQ ID NO: 653768 - DNA, 15 bp, Homo sapiens
aggagggctgcttga

SEQ ID NO: 653769 - DNA, 15 bp, Homo sapiens
ggagggctgcttgag

SEQ ID NO: 653770 - DNA, 15 bp, Homo sapiens
gagggctgcttgagt

SEQ ID NO: 653771 - DNA, 15 bp, Homo sapiens
agggctgcttgagtc

SEQ ID NO: 653772 - DNA, 15 bp, Homo sapiens
gggctgcttgagtcc

SEQ ID NO: 653773 - DNA, 15 bp, Homo sapiens
ggctgcttgagtcca

SEQ ID NO: 653774 - DNA, 15 bp, Homo sapiens
gctgcttgagtccag

SEQ ID NO: 653775 - DNA, 15 bp, Homo sapiens
ctgcttgagtccagg

SEQ ID NO: 653776 - DNA, 15 bp, Homo sapiens
tgcttgagtccagga

SEQ ID NO: 653777 - DNA, 15 bp, Homo sapiens
gcttgagtccaggag

SEQ ID NO: 653778 - DNA, 15 bp, Homo sapiens
cttgagtccaggagg

SEQ ID NO: 653779 - DNA, 15 bp, Homo sapiens
ttgagtccaggaggt

SEQ ID NO: 653780 - DNA, 15 bp, Homo sapiens
tgagtccaggaggtc

SEQ ID NO: 653781 - DNA, 15 bp, Homo sapiens
gagtccaggaggtca

SEQ ID NO: 653782 - DNA, 15 bp, Homo sapiens
agtccaggaggtcaa

SEQ ID NO: 653783 - DNA, 15 bp, Homo sapiens
gtccaggaggtcaag

SEQ ID NO: 653784 - DNA, 15 bp, Homo sapiens
tccaggaggtcaagg

SEQ ID NO: 653785 - DNA, 15 bp, Homo sapiens
ccaggaggtcaaggc

SEQ ID NO: 653786 - DNA, 15 bp, Homo sapiens
caggaggtcaaggct

SEQ ID NO: 653787 - DNA, 15 bp, Homo sapiens
aggaggtcaaggcta

SEQ ID NO: 653788 - DNA, 15 bp, Homo sapiens
ggaggtcaaggctac

SEQ ID NO: 653789 - DNA, 15 bp, Homo sapiens
gaggtcaaggctaca

SEQ ID NO: 653790 - DNA, 15 bp, Homo sapiens
aggtcaaggctacag

SEQ ID NO: 653791 - DNA, 15 bp, Homo sapiens
ggtcaaggctacagt

SEQ ID NO: 653792 - DNA, 15 bp, Homo sapiens
gtcaaggctacagtg

SEQ ID NO: 653793 - DNA, 15 bp, Homo sapiens
tcaaggctacagtga

SEQ ID NO: 653794 - DNA, 15 bp, Homo sapiens
caaggctacagtgag

SEQ ID NO: 653795 - DNA, 15 bp, Homo sapiens
aaggctacagtgagc

SEQ ID NO: 653796 - DNA, 15 bp, Homo sapiens
aggctacagtgagcc

SEQ ID NO: 653797 - DNA, 15 bp, Homo sapiens
ggctacagtgagcca

SEQ ID NO: 653798 - DNA, 15 bp, Homo sapiens
gctacagtgagccat

SEQ ID NO: 653799 - DNA, 15 bp, Homo sapiens
ctacagtgagccata

SEQ ID NO: 653800 - DNA, 15 bp, Homo sapiens
tacagtgagccataa

SEQ ID NO: 653801 - DNA, 15 bp, Homo sapiens
acagtgagccataat

SEQ ID NO: 653802 - DNA, 15 bp, Homo sapiens
cagtgagccataatt

SEQ ID NO: 653803 - DNA, 15 bp, Homo sapiens
agtgagccataatta

SEQ ID NO: 653804 - DNA, 15 bp, Homo sapiens
gtgagccataattat

SEQ ID NO: 653805 - DNA, 15 bp, Homo sapiens
tgagccataattatg

SEQ ID NO: 653806 - DNA, 15 bp, Homo sapiens
gagccataattatgc

SEQ ID NO: 653807 - DNA, 15 bp, Homo sapiens
agccataattatgcc

SEQ ID NO: 653808 - DNA, 15 bp, Homo sapiens
gccataattatgcca

SEQ ID NO: 653809 - DNA, 15 bp, Homo sapiens
ccataattatgccac

SEQ ID NO: 653810 - DNA, 15 bp, Homo sapiens
cataattatgccact

SEQ ID NO: 653811 - DNA, 15 bp, Homo sapiens
ataattatgccactg

SEQ ID NO: 653812 - DNA, 15 bp, Homo sapiens
taattatgccactgc

SEQ ID NO: 653813 - DNA, 15 bp, Homo sapiens
aattatgccactgcc

SEQ ID NO: 653814 - DNA, 15 bp, Homo sapiens
attatgccactgccc

SEQ ID NO: 653815 - DNA, 15 bp, Homo sapiens
ttatgccactgccct

SEQ ID NO: 653816 - DNA, 15 bp, Homo sapiens
tatgccactgccctc

SEQ ID NO: 653817 - DNA, 15 bp, Homo sapiens
atgccactgccctcc

SEQ ID NO: 653818 - DNA, 15 bp, Homo sapiens
tgccactgccctcca

SEQ ID NO: 653819 - DNA, 15 bp, Homo sapiens
gccactgccctccag

SEQ ID NO: 653820 - DNA, 15 bp, Homo sapiens
ccactgccctccagc

SEQ ID NO: 653821 - DNA, 15 bp, Homo sapiens
cactgccctccagcc

SEQ ID NO: 653822 - DNA, 15 bp, Homo sapiens
actgccctccagcct

SEQ ID NO: 653823 - DNA, 15 bp, Homo sapiens
ctgccctccagcctg

SEQ ID NO: 653824 - DNA, 15 bp, Homo sapiens
tgccctccagcctgg

SEQ ID NO: 653825 - DNA, 15 bp, Homo sapiens
gccctccagcctggg

SEQ ID NO: 653826 - DNA, 15 bp, Homo sapiens
ccctccagcctgggt

SEQ ID NO: 653827 - DNA, 15 bp, Homo sapiens
cctccagcctgggtg

SEQ ID NO: 653828 - DNA, 15 bp, Homo sapiens
gacagagtgagacct

SEQ ID NO: 653829 - DNA, 15 bp, Homo sapiens
acagagtgagacctt

SEQ ID NO: 653830 - DNA, 15 bp, Homo sapiens
cagagtgagaccttg

SEQ ID NO: 653831 - DNA, 15 bp, Homo sapiens
agagtgagaccttgt

SEQ ID NO: 653832 - DNA, 15 bp, Homo sapiens
gagtgagaccttgtc

SEQ ID NO: 653833 - DNA, 15 bp, Homo sapiens
agtgagaccttgtct

SEQ ID NO: 653834 - DNA, 15 bp, Homo sapiens
gtgagaccttgtctc

SEQ ID NO: 653835 - DNA, 15 bp, Homo sapiens
tgagaccttgtctca

SEQ ID NO: 653836 - DNA, 15 bp, Homo sapiens
gagaccttgtctcaa

SEQ ID NO: 653837 - DNA, 15 bp, Homo sapiens
agaccttgtctcaaa

SEQ ID NO: 653838 - DNA, 15 bp, Homo sapiens
gaccttgtctcaaaa

SEQ ID NO: 653839 - DNA, 15 bp, Homo sapiens
accttgtctcaaaat

SEQ ID NO: 653840 - DNA, 15 bp, Homo sapiens
ccttgtctcaaaata

SEQ ID NO: 653841 - DNA, 15 bp, Homo sapiens
cttgtctcaaaataa

SEQ ID NO: 653842 - DNA, 15 bp, Homo sapiens
ttgtctcaaaataaa

SEQ ID NO: 653843 - DNA, 15 bp, Homo sapiens
tgtctcaaaataaaa

SEQ ID NO: 653844 - DNA, 15 bp, Homo sapiens
gtctcaaaataaaat

SEQ ID NO: 653845 - DNA, 15 bp, Homo sapiens
tctcaaaataaaata

SEQ ID NO: 653846 - DNA, 15 bp, Homo sapiens
ctcaaaataaaataa

SEQ ID NO: 653847 - DNA, 15 bp, Homo sapiens
tcaaaataaaataaa

SEQ ID NO: 653848 - DNA, 15 bp, Homo sapiens
caaaataaaataaaa

SEQ ID NO: 653849 - DNA, 15 bp, Homo sapiens
aaaataaaataaaat

SEQ ID NO: 653850 - DNA, 15 bp, Homo sapiens
aaataaaataaaata

SEQ ID NO: 653851 - DNA, 15 bp, Homo sapiens
aataaaataaaataa

SEQ ID NO: 653852 - DNA, 15 bp, Homo sapiens
ataaaataaaataaa

SEQ ID NO: 653853 - DNA, 15 bp, Homo sapiens
taaaataaaataaac

SEQ ID NO: 653854 - DNA, 15 bp, Homo sapiens
aaaataaaataaaca

SEQ ID NO: 653855 - DNA, 15 bp, Homo sapiens
aaataaaataaacaa

SEQ ID NO: 653856 - DNA, 15 bp, Homo sapiens
aataaaataaacaaa

SEQ ID NO: 653857 - DNA, 15 bp, Homo sapiens
ataaaataaacaaaa

SEQ ID NO: 653858 - DNA, 15 bp, Homo sapiens
taaaataaacaaaaa

SEQ ID NO: 653859 - DNA, 15 bp, Homo sapiens
aaaataaacaaaaaa

SEQ ID NO: 653860 - DNA, 15 bp, Homo sapiens
aaataaacaaaaaat

SEQ ID NO: 653861 - DNA, 15 bp, Homo sapiens
aataaacaaaaaata

SEQ ID NO: 653862 - DNA, 15 bp, Homo sapiens
ataaacaaaaaataa

SEQ ID NO: 653863 - DNA, 15 bp, Homo sapiens
taaacaaaaaataaa

SEQ ID NO: 653864 - DNA, 15 bp, Homo sapiens
aaacaaaaaataaaa

SEQ ID NO: 653865 - DNA, 15 bp, Homo sapiens
aacaaaaaataaaaa

SEQ ID NO: 653866 - DNA, 15 bp, Homo sapiens
acaaaaaataaaaat

SEQ ID NO: 653867 - DNA, 15 bp, Homo sapiens
caaaaaataaaaata

SEQ ID NO: 653868 - DNA, 15 bp, Homo sapiens
aaaaaataaaaataa

SEQ ID NO: 653869 - DNA, 15 bp, Homo sapiens
aaaaataaaaataaa

SEQ ID NO: 653870 - DNA, 15 bp, Homo sapiens
aaaataaaaataaaa

SEQ ID NO: 653871 - DNA, 15 bp, Homo sapiens
aaataaaaataaaaa

SEQ ID NO: 653872 - DNA, 15 bp, Homo sapiens
aataaaaataaaaag

SEQ ID NO: 653873 - DNA, 15 bp, Homo sapiens
ataaaaataaaaagg

SEQ ID NO: 653874 - DNA, 15 bp, Homo sapiens
taaaaataaaaagga

SEQ ID NO: 653875 - DNA, 15 bp, Homo sapiens
aaaaataaaaaggaa

SEQ ID NO: 653876 - DNA, 15 bp, Homo sapiens
aaaataaaaaggaat

SEQ ID NO: 653877 - DNA, 15 bp, Homo sapiens
aaataaaaaggaatg

SEQ ID NO: 653878 - DNA, 15 bp, Homo sapiens
aataaaaaggaatga

SEQ ID NO: 653879 - DNA, 15 bp, Homo sapiens
ataaaaaggaatgaa

SEQ ID NO: 653880 - DNA, 15 bp, Homo sapiens
taaaaaggaatgaaa

SEQ ID NO: 653881 - DNA, 15 bp, Homo sapiens
aaaaaggaatgaaat

SEQ ID NO: 653882 - DNA, 15 bp, Homo sapiens
aaaaggaatgaaatt

SEQ ID NO: 653883 - DNA, 15 bp, Homo sapiens
aaaggaatgaaattt

SEQ ID NO: 653884 - DNA, 15 bp, Homo sapiens
aaggaatgaaatttg

SEQ ID NO: 653885 - DNA, 15 bp, Homo sapiens
aggaatgaaatttgt

SEQ ID NO: 653886 - DNA, 15 bp, Homo sapiens
ggaatgaaatttgta

SEQ ID NO: 653887 - DNA, 15 bp, Homo sapiens
gaatgaaatttgtat

SEQ ID NO: 653888 - DNA, 15 bp, Homo sapiens
aatgaaatttgtata

SEQ ID NO: 653889 - DNA, 15 bp, Homo sapiens
atgaaatttgtatac

SEQ ID NO: 653890 - DNA, 15 bp, Homo sapiens
tgaaatttgtatacc

SEQ ID NO: 653891 - DNA, 15 bp, Homo sapiens
gaaatttgtatacct

SEQ ID NO: 653892 - DNA, 15 bp, Homo sapiens
aaatttgtatacctg

SEQ ID NO: 653893 - DNA, 15 bp, Homo sapiens
aatttgtatacctgc

SEQ ID NO: 653894 - DNA, 15 bp, Homo sapiens
atttgtatacctgct

SEQ ID NO: 653895 - DNA, 15 bp, Homo sapiens
tttgtatacctgcta

SEQ ID NO: 653896 - DNA, 15 bp, Homo sapiens
ttgtatacctgctac

SEQ ID NO: 653897 - DNA, 15 bp, Homo sapiens
tgtatacctgctaca

SEQ ID NO: 653898 - DNA, 15 bp, Homo sapiens
gtatacctgctacaa

SEQ ID NO: 653899 - DNA, 15 bp, Homo sapiens
tatacctgctacaac

SEQ ID NO: 653900 - DNA, 15 bp, Homo sapiens
atacctgctacaaca

SEQ ID NO: 653901 - DNA, 15 bp, Homo sapiens
tacctgctacaacat

SEQ ID NO: 653902 - DNA, 15 bp, Homo sapiens
acctgctacaacatg

SEQ ID NO: 653903 - DNA, 15 bp, Homo sapiens
cctgctacaacatgc

SEQ ID NO: 653904 - DNA, 15 bp, Homo sapiens
ctgctacaacatgcc

SEQ ID NO: 653905 - DNA, 15 bp, Homo sapiens
tgctacaacatgcct

SEQ ID NO: 653906 - DNA, 15 bp, Homo sapiens
gctacaacatgcctg

SEQ ID NO: 653907 - DNA, 15 bp, Homo sapiens
ctacaacatgcctga

SEQ ID NO: 653908 - DNA, 15 bp, Homo sapiens
tacaacatgcctgaa

SEQ ID NO: 653909 - DNA, 15 bp, Homo sapiens
acaacatgcctgaag

SEQ ID NO: 653910 - DNA, 15 bp, Homo sapiens
caacatgcctgaagc

SEQ ID NO: 653911 - DNA, 15 bp, Homo sapiens
aacatgcctgaagct

SEQ ID NO: 653912 - DNA, 15 bp, Homo sapiens
acatgcctgaagctt

SEQ ID NO: 653913 - DNA, 15 bp, Homo sapiens
catgcctgaagcttg

SEQ ID NO: 653914 - DNA, 15 bp, Homo sapiens
atgcctgaagcttga

SEQ ID NO: 653915 - DNA, 15 bp, Homo sapiens
tgcctgaagcttgaa

SEQ ID NO: 653916 - DNA, 15 bp, Homo sapiens
gcctgaagcttgaaa

SEQ ID NO: 653917 - DNA, 15 bp, Homo sapiens
cctgaagcttgaaaa

SEQ ID NO: 653918 - DNA, 15 bp, Homo sapiens
ctgaagcttgaaaac

SEQ ID NO: 653919 - DNA, 15 bp, Homo sapiens
tgaagcttgaaaaca

SEQ ID NO: 653920 - DNA, 15 bp, Homo sapiens
gaagcttgaaaacat

SEQ ID NO: 653921 - DNA, 15 bp, Homo sapiens
aagcttgaaaacatt

SEQ ID NO: 653922 - DNA, 15 bp, Homo sapiens
agcttgaaaacatta

SEQ ID NO: 653923 - DNA, 15 bp, Homo sapiens
gcttgaaaacattat

SEQ ID NO: 653924 - DNA, 15 bp, Homo sapiens
cttgaaaacattatg

SEQ ID NO: 653925 - DNA, 15 bp, Homo sapiens
ttgaaaacattatgc

SEQ ID NO: 653926 - DNA, 15 bp, Homo sapiens
tgaaaacattatgct

SEQ ID NO: 653927 - DNA, 15 bp, Homo sapiens
gaaaacattatgctt

SEQ ID NO: 653928 - DNA, 15 bp, Homo sapiens
aaaacattatgctta

SEQ ID NO: 653929 - DNA, 15 bp, Homo sapiens
aaacattatgcttag

SEQ ID NO: 653930 - DNA, 15 bp, Homo sapiens
aacattatgcttagc

SEQ ID NO: 653931 - DNA, 15 bp, Homo sapiens
acattatgcttagca

SEQ ID NO: 653932 - DNA, 15 bp, Homo sapiens
cattatgcttagcaa

SEQ ID NO: 653933 - DNA, 15 bp, Homo sapiens
attatgcttagcaaa

SEQ ID NO: 653934 - DNA, 15 bp, Homo sapiens
ttatgcttagcaaaa

SEQ ID NO: 653935 - DNA, 15 bp, Homo sapiens
tatgcttagcaaaat

SEQ ID NO: 653936 - DNA, 15 bp, Homo sapiens
atgcttagcaaaata

SEQ ID NO: 653937 - DNA, 15 bp, Homo sapiens
tgcttagcaaaataa

SEQ ID NO: 653938 - DNA, 15 bp, Homo sapiens
gcttagcaaaataag

SEQ ID NO: 653939 - DNA, 15 bp, Homo sapiens
cttagcaaaataagc

SEQ ID NO: 653940 - DNA, 15 bp, Homo sapiens
ttagcaaaataagcc

SEQ ID NO: 653941 - DNA, 15 bp, Homo sapiens
tagcaaaataagcca

SEQ ID NO: 653942 - DNA, 15 bp, Homo sapiens
agcaaaataagccag

SEQ ID NO: 653943 - DNA, 15 bp, Homo sapiens
gcaaaataagccaga

SEQ ID NO: 653944 - DNA, 15 bp, Homo sapiens
caaaataagccagac

SEQ ID NO: 653945 - DNA, 15 bp, Homo sapiens
aaaataagccagaca

SEQ ID NO: 653946 - DNA, 15 bp, Homo sapiens
aaataagccagacac

SEQ ID NO: 653947 - DNA, 15 bp, Homo sapiens
aataagccagacaca

SEQ ID NO: 653948 - DNA, 15 bp, Homo sapiens
ataagccagacacag

SEQ ID NO: 653949 - DNA, 15 bp, Homo sapiens
taagccagacacaga

SEQ ID NO: 653950 - DNA, 15 bp, Homo sapiens
aagccagacacagaa

SEQ ID NO: 653951 - DNA, 15 bp, Homo sapiens
agccagacacagaag

SEQ ID NO: 653952 - DNA, 15 bp, Homo sapiens
gccagacacagaagg

SEQ ID NO: 653953 - DNA, 15 bp, Homo sapiens
ccagacacagaagga

SEQ ID NO: 653954 - DNA, 15 bp, Homo sapiens
cagacacagaaggaa

SEQ ID NO: 653955 - DNA, 15 bp, Homo sapiens
agacacagaaggaaa

SEQ ID NO: 653956 - DNA, 15 bp, Homo sapiens
gacacagaaggaaaa

SEQ ID NO: 653957 - DNA, 15 bp, Homo sapiens
acacagaaggaaaaa

SEQ ID NO: 653958 - DNA, 15 bp, Homo sapiens
cacagaaggaaaaat

SEQ ID NO: 653959 - DNA, 15 bp, Homo sapiens
acagaaggaaaaata

SEQ ID NO: 653960 - DNA, 15 bp, Homo sapiens
cagaaggaaaaatat

SEQ ID NO: 653961 - DNA, 15 bp, Homo sapiens
agaaggaaaaatatt

SEQ ID NO: 653962 - DNA, 15 bp, Homo sapiens
gaaggaaaaatattg

SEQ ID NO: 653963 - DNA, 15 bp, Homo sapiens
aaggaaaaatattgt

SEQ ID NO: 653964 - DNA, 15 bp, Homo sapiens
aggaaaaatattgta

SEQ ID NO: 653965 - DNA, 15 bp, Homo sapiens
ggaaaaatattgtat

SEQ ID NO: 653966 - DNA, 15 bp, Homo sapiens
gaaaaatattgtatg

SEQ ID NO: 653967 - DNA, 15 bp, Homo sapiens
aaaaatattgtatga

SEQ ID NO: 653968 - DNA, 15 bp, Homo sapiens
aaaatattgtatgat

SEQ ID NO: 653969 - DNA, 15 bp, Homo sapiens
aaatattgtatgatt

SEQ ID NO: 653970 - DNA, 15 bp, Homo sapiens
aatattgtatgattc

SEQ ID NO: 653971 - DNA, 15 bp, Homo sapiens
atattgtatgattct

SEQ ID NO: 653972 - DNA, 15 bp, Homo sapiens
tattgtatgattcta

SEQ ID NO: 653973 - DNA, 15 bp, Homo sapiens
attgtatgattctac

SEQ ID NO: 653974 - DNA, 15 bp, Homo sapiens
ttgtatgattctact

SEQ ID NO: 653975 - DNA, 15 bp, Homo sapiens
tgtatgattctactt

SEQ ID NO: 653976 - DNA, 15 bp, Homo sapiens
gtatgattctacttc

SEQ ID NO: 653977 - DNA, 15 bp, Homo sapiens
tatgattctacttct

SEQ ID NO: 653978 - DNA, 15 bp, Homo sapiens
atgattctacttcta

SEQ ID NO: 653979 - DNA, 15 bp, Homo sapiens
tgattctacttctag

SEQ ID NO: 653980 - DNA, 15 bp, Homo sapiens
gattctacttctaga

SEQ ID NO: 653981 - DNA, 15 bp, Homo sapiens
attctacttctagag

SEQ ID NO: 653982 - DNA, 15 bp, Homo sapiens
ttctacttctagaga

SEQ ID NO: 653983 - DNA, 15 bp, Homo sapiens
tctacttctagagat

SEQ ID NO: 653984 - DNA, 15 bp, Homo sapiens
ctacttctagagata

SEQ ID NO: 653985 - DNA, 15 bp, Homo sapiens
tacttctagagatac

SEQ ID NO: 653986 - DNA, 15 bp, Homo sapiens
acttctagagatacc

SEQ ID NO: 653987 - DNA, 15 bp, Homo sapiens
cttctagagatacct

SEQ ID NO: 653988 - DNA, 15 bp, Homo sapiens
ttctagagataccta

SEQ ID NO: 653989 - DNA, 15 bp, Homo sapiens
tctagagatacctag

SEQ ID NO: 653990 - DNA, 15 bp, Homo sapiens
ctagagatacctagg

SEQ ID NO: 653991 - DNA, 15 bp, Homo sapiens
tagagatacctaggg

SEQ ID NO: 653992 - DNA, 15 bp, Homo sapiens
agagatacctagggt

SEQ ID NO: 653993 - DNA, 15 bp, Homo sapiens
gagatacctagggta

SEQ ID NO: 653994 - DNA, 15 bp, Homo sapiens
agatacctagggtag

SEQ ID NO: 653995 - DNA, 15 bp, Homo sapiens
gatacctagggtagg

SEQ ID NO: 653996 - DNA, 15 bp, Homo sapiens
atacctagggtaggc

SEQ ID NO: 653997 - DNA, 15 bp, Homo sapiens
tacctagggtaggca

SEQ ID NO: 653998 - DNA, 15 bp, Homo sapiens
acctagggtaggcaa

SEQ ID NO: 653999 - DNA, 15 bp, Homo sapiens
cctagggtaggcaaa

SEQ ID NO: 654000 - DNA, 15 bp, Homo sapiens
ctagggtaggcaaat

SEQ ID NO: 654001 - DNA, 15 bp, Homo sapiens
tagggtaggcaaatt

SEQ ID NO: 654002 - DNA, 15 bp, Homo sapiens
agggtaggcaaattt

SEQ ID NO: 654003 - DNA, 15 bp, Homo sapiens
gggtaggcaaattta

SEQ ID NO: 654004 - DNA, 15 bp, Homo sapiens
ggtaggcaaatttat

SEQ ID NO: 654005 - DNA, 15 bp, Homo sapiens
gtaggcaaatttata

SEQ ID NO: 654006 - DNA, 15 bp, Homo sapiens
taggcaaatttatac

SEQ ID NO: 654007 - DNA, 15 bp, Homo sapiens
aggcaaatttataca

SEQ ID NO: 654008 - DNA, 15 bp, Homo sapiens
ggcaaatttatacag

SEQ ID NO: 654009 - DNA, 15 bp, Homo sapiens
gcaaatttatacaga

SEQ ID NO: 654010 - DNA, 15 bp, Homo sapiens
caaatttatacagac

SEQ ID NO: 654011 - DNA, 15 bp, Homo sapiens
aaatttatacagaca

SEQ ID NO: 654012 - DNA, 15 bp, Homo sapiens
aatttatacagacag

SEQ ID NO: 654013 - DNA, 15 bp, Homo sapiens
atttatacagacaga

SEQ ID NO: 654014 - DNA, 15 bp, Homo sapiens
tttatacagacagag

SEQ ID NO: 654015 - DNA, 15 bp, Homo sapiens
ttatacagacagaga

SEQ ID NO: 654016 - DNA, 15 bp, Homo sapiens
tatacagacagagag

SEQ ID NO: 654017 - DNA, 15 bp, Homo sapiens
atacagacagagagt

SEQ ID NO: 654018 - DNA, 15 bp, Homo sapiens
tacagacagagagtt

SEQ ID NO: 654019 - DNA, 15 bp, Homo sapiens
acagacagagagtta

SEQ ID NO: 654020 - DNA, 15 bp, Homo sapiens
cagacagagagttag

SEQ ID NO: 654021 - DNA, 15 bp, Homo sapiens
agacagagagttaga

SEQ ID NO: 654022 - DNA, 15 bp, Homo sapiens
gacagagagttagaa

SEQ ID NO: 654023 - DNA, 15 bp, Homo sapiens
acagagagttagaat

SEQ ID NO: 654024 - DNA, 15 bp, Homo sapiens
cagagagttagaata

SEQ ID NO: 654025 - DNA, 15 bp, Homo sapiens
agagagttagaatag

SEQ ID NO: 654026 - DNA, 15 bp, Homo sapiens
gagagttagaataga

SEQ ID NO: 654027 - DNA, 15 bp, Homo sapiens
agagttagaatagaa

SEQ ID NO: 654028 - DNA, 15 bp, Homo sapiens
gagttagaatagaag

SEQ ID NO: 654029 - DNA, 15 bp, Homo sapiens
agttagaatagaagt

SEQ ID NO: 654030 - DNA, 15 bp, Homo sapiens
gttagaatagaagtc

SEQ ID NO: 654031 - DNA, 15 bp, Homo sapiens
ttagaatagaagtca

SEQ ID NO: 654032 - DNA, 15 bp, Homo sapiens
tagaatagaagtcac

SEQ ID NO: 654033 - DNA, 15 bp, Homo sapiens
agaatagaagtcacc

SEQ ID NO: 654034 - DNA, 15 bp, Homo sapiens
gaatagaagtcacca

SEQ ID NO: 654035 - DNA, 15 bp, Homo sapiens
aatagaagtcaccaa

SEQ ID NO: 654036 - DNA, 15 bp, Homo sapiens
atagaagtcaccaag

SEQ ID NO: 654037 - DNA, 15 bp, Homo sapiens
tagaagtcaccaaga

SEQ ID NO: 654038 - DNA, 15 bp, Homo sapiens
agaagtcaccaagag

SEQ ID NO: 654039 - DNA, 15 bp, Homo sapiens
gaagtcaccaagagc

SEQ ID NO: 654040 - DNA, 15 bp, Homo sapiens
aagtcaccaagagct

SEQ ID NO: 654041 - DNA, 15 bp, Homo sapiens
agtcaccaagagctt

SEQ ID NO: 654042 - DNA, 15 bp, Homo sapiens
gtcaccaagagcttg

SEQ ID NO: 654043 - DNA, 15 bp, Homo sapiens
tcaccaagagcttgg

SEQ ID NO: 654044 - DNA, 15 bp, Homo sapiens
caccaagagcttggg

SEQ ID NO: 654045 - DNA, 15 bp, Homo sapiens
accaagagcttgggg

SEQ ID NO: 654046 - DNA, 15 bp, Homo sapiens
ccaagagcttggggg

SEQ ID NO: 654047 - DNA, 15 bp, Homo sapiens
caagagcttggggga

SEQ ID NO: 654048 - DNA, 15 bp, Homo sapiens
aagagcttgggggag

SEQ ID NO: 654049 - DNA, 15 bp, Homo sapiens
agagcttgggggaga

SEQ ID NO: 654050 - DNA, 15 bp, Homo sapiens
gagcttgggggagag

SEQ ID NO: 654051 - DNA, 15 bp, Homo sapiens
agcttgggggagaga

SEQ ID NO: 654052 - DNA, 15 bp, Homo sapiens
gcttgggggagagag

SEQ ID NO: 654053 - DNA, 15 bp, Homo sapiens
cttgggggagagaga

SEQ ID NO: 654054 - DNA, 15 bp, Homo sapiens
ttgggggagagagaa

SEQ ID NO: 654055 - DNA, 15 bp, Homo sapiens
tgggggagagagaag

SEQ ID NO: 654056 - DNA, 15 bp, Homo sapiens
gggggagagagaaga

SEQ ID NO: 654057 - DNA, 15 bp, Homo sapiens
ggggagagagaagaa

SEQ ID NO: 654058 - DNA, 15 bp, Homo sapiens
gggagagagaagaaa

SEQ ID NO: 654059 - DNA, 15 bp, Homo sapiens
ggagagagaagaaag

SEQ ID NO: 654060 - DNA, 15 bp, Homo sapiens
gagagagaagaaagg

SEQ ID NO: 654061 - DNA, 15 bp, Homo sapiens
agagagaagaaaggg

SEQ ID NO: 654062 - DNA, 15 bp, Homo sapiens
gagagaagaaaggga

SEQ ID NO: 654063 - DNA, 15 bp, Homo sapiens
agagaagaaagggag

SEQ ID NO: 654064 - DNA, 15 bp, Homo sapiens
gagaagaaagggagg

SEQ ID NO: 654065 - DNA, 15 bp, Homo sapiens
agaagaaagggaggt

SEQ ID NO: 654066 - DNA, 15 bp, Homo sapiens
gaagaaagggaggtt

SEQ ID NO: 654067 - DNA, 15 bp, Homo sapiens
aagaaagggaggtta

SEQ ID NO: 654068 - DNA, 15 bp, Homo sapiens
agaaagggaggttat

SEQ ID NO: 654069 - DNA, 15 bp, Homo sapiens
gaaagggaggttatt

SEQ ID NO: 654070 - DNA, 15 bp, Homo sapiens
aaagggaggttattg

SEQ ID NO: 654071 - DNA, 15 bp, Homo sapiens
aagggaggttattgt

SEQ ID NO: 654072 - DNA, 15 bp, Homo sapiens
agggaggttattgtt

SEQ ID NO: 654073 - DNA, 15 bp, Homo sapiens
gggaggttattgttt

SEQ ID NO: 654074 - DNA, 15 bp, Homo sapiens
ggaggttattgttta

SEQ ID NO: 654075 - DNA, 15 bp, Homo sapiens
gaggttattgtttaa

SEQ ID NO: 654076 - DNA, 15 bp, Homo sapiens
aggttattgtttaat

SEQ ID NO: 654077 - DNA, 15 bp, Homo sapiens
ggttattgtttaatg

SEQ ID NO: 654078 - DNA, 15 bp, Homo sapiens
gttattgtttaatgg

SEQ ID NO: 654079 - DNA, 15 bp, Homo sapiens
ttattgtttaatgga

SEQ ID NO: 654080 - DNA, 15 bp, Homo sapiens
tattgtttaatggat

SEQ ID NO: 654081 - DNA, 15 bp, Homo sapiens
attgtttaatggata

SEQ ID NO: 654082 - DNA, 15 bp, Homo sapiens
ttgtttaatggatac

SEQ ID NO: 654083 - DNA, 15 bp, Homo sapiens
tgtttaatggataca

SEQ ID NO: 654084 - DNA, 15 bp, Homo sapiens
gtttaatggatacag

SEQ ID NO: 654085 - DNA, 15 bp, Homo sapiens
tttaatggatacaga

SEQ ID NO: 654086 - DNA, 15 bp, Homo sapiens
ttaatggatacagag

SEQ ID NO: 654087 - DNA, 15 bp, Homo sapiens
taatggatacagagt

SEQ ID NO: 654088 - DNA, 15 bp, Homo sapiens
aatggatacagagtt

SEQ ID NO: 654089 - DNA, 15 bp, Homo sapiens
atggatacagagttt

SEQ ID NO: 654090 - DNA, 15 bp, Homo sapiens
tggatacagagtttt

SEQ ID NO: 654091 - DNA, 15 bp, Homo sapiens
ggatacagagttttt

SEQ ID NO: 654092 - DNA, 15 bp, Homo sapiens
gatacagagtttttg

SEQ ID NO: 654093 - DNA, 15 bp, Homo sapiens
atacagagtttttgt

SEQ ID NO: 654094 - DNA, 15 bp, Homo sapiens
tacagagtttttgtt

SEQ ID NO: 654095 - DNA, 15 bp, Homo sapiens
acagagtttttgttg

SEQ ID NO: 654096 - DNA, 15 bp, Homo sapiens
cagagtttttgttgg

SEQ ID NO: 654097 - DNA, 15 bp, Homo sapiens
agagtttttgttgga

SEQ ID NO: 654098 - DNA, 15 bp, Homo sapiens
gagtttttgttggac

SEQ ID NO: 654099 - DNA, 15 bp, Homo sapiens
agtttttgttggaca

SEQ ID NO: 654100 - DNA, 15 bp, Homo sapiens
gtttttgttggacat

SEQ ID NO: 654101 - DNA, 15 bp, Homo sapiens
tttttgttggacatg

SEQ ID NO: 654102 - DNA, 15 bp, Homo sapiens
ttttgttggacatga

SEQ ID NO: 654103 - DNA, 15 bp, Homo sapiens
tttgttggacatgat

SEQ ID NO: 654104 - DNA, 15 bp, Homo sapiens
ttgttggacatgatt

SEQ ID NO: 654105 - DNA, 15 bp, Homo sapiens
tgttggacatgattt

SEQ ID NO: 654106 - DNA, 15 bp, Homo sapiens
gttggacatgatttt

SEQ ID NO: 654107 - DNA, 15 bp, Homo sapiens
ttggacatgatttta

SEQ ID NO: 654108 - DNA, 15 bp, Homo sapiens
tggacatgattttaa

SEQ ID NO: 654109 - DNA, 15 bp, Homo sapiens
ggacatgattttaaa

SEQ ID NO: 654110 - DNA, 15 bp, Homo sapiens
gacatgattttaaaa

SEQ ID NO: 654111 - DNA, 15 bp, Homo sapiens
acatgattttaaaag

SEQ ID NO: 654112 - DNA, 15 bp, Homo sapiens
catgattttaaaagc

SEQ ID NO: 654113 - DNA, 15 bp, Homo sapiens
atgattttaaaagct

SEQ ID NO: 654114 - DNA, 15 bp, Homo sapiens
tgattttaaaagctt

SEQ ID NO: 654115 - DNA, 15 bp, Homo sapiens
gattttaaaagcttt

SEQ ID NO: 654116 - DNA, 15 bp, Homo sapiens
attttaaaagcttta

SEQ ID NO: 654117 - DNA, 15 bp, Homo sapiens
ttttaaaagctttag

SEQ ID NO: 654118 - DNA, 15 bp, Homo sapiens
tttaaaagctttagg

SEQ ID NO: 654119 - DNA, 15 bp, Homo sapiens
ttaaaagctttaggt

SEQ ID NO: 654120 - DNA, 15 bp, Homo sapiens
taaaagctttaggta

SEQ ID NO: 654121 - DNA, 15 bp, Homo sapiens
aaaagctttaggtat

SEQ ID NO: 654122 - DNA, 15 bp, Homo sapiens
aaagctttaggtata

SEQ ID NO: 654123 - DNA, 15 bp, Homo sapiens
aagctttaggtatag

SEQ ID NO: 654124 - DNA, 15 bp, Homo sapiens
agctttaggtataga

SEQ ID NO: 654125 - DNA, 15 bp, Homo sapiens
gctttaggtatagat

SEQ ID NO: 654126 - DNA, 15 bp, Homo sapiens
ctttaggtatagatg

SEQ ID NO: 654127 - DNA, 15 bp, Homo sapiens
tttaggtatagatgt

SEQ ID NO: 654128 - DNA, 15 bp, Homo sapiens
ttaggtatagatgtg

SEQ ID NO: 654129 - DNA, 15 bp, Homo sapiens
taggtatagatgtgt

SEQ ID NO: 654130 - DNA, 15 bp, Homo sapiens
aggtatagatgtgtg

SEQ ID NO: 654131 - DNA, 15 bp, Homo sapiens
ggtatagatgtgtga

SEQ ID NO: 654132 - DNA, 15 bp, Homo sapiens
gtatagatgtgtgat

SEQ ID NO: 654133 - DNA, 15 bp, Homo sapiens
tatagatgtgtgatg

SEQ ID NO: 654134 - DNA, 15 bp, Homo sapiens
atagatgtgtgatgg

SEQ ID NO: 654135 - DNA, 15 bp, Homo sapiens
tagatgtgtgatggt

SEQ ID NO: 654136 - DNA, 15 bp, Homo sapiens
agatgtgtgatggtt

SEQ ID NO: 654137 - DNA, 15 bp, Homo sapiens
gatgtgtgatggtta

SEQ ID NO: 654138 - DNA, 15 bp, Homo sapiens
atgtgtgatggttac

SEQ ID NO: 654139 - DNA, 15 bp, Homo sapiens
tgtgtgatggttaca

SEQ ID NO: 654140 - DNA, 15 bp, Homo sapiens
gtgtgatggttacaa

SEQ ID NO: 654141 - DNA, 15 bp, Homo sapiens
tgtgatggttacaaa

SEQ ID NO: 654142 - DNA, 15 bp, Homo sapiens
gtgatggttacaaaa

SEQ ID NO: 654143 - DNA, 15 bp, Homo sapiens
tgatggttacaaaac

SEQ ID NO: 654144 - DNA, 15 bp, Homo sapiens
gatggttacaaaaca

SEQ ID NO: 654145 - DNA, 15 bp, Homo sapiens
atggttacaaaacat

SEQ ID NO: 654146 - DNA, 15 bp, Homo sapiens
tggttacaaaacatt

SEQ ID NO: 654147 - DNA, 15 bp, Homo sapiens
ggttacaaaacattg

SEQ ID NO: 654148 - DNA, 15 bp, Homo sapiens
gttacaaaacattgt

SEQ ID NO: 654149 - DNA, 15 bp, Homo sapiens
ttacaaaacattgtg

SEQ ID NO: 654150 - DNA, 15 bp, Homo sapiens
tacaaaacattgtga

SEQ ID NO: 654151 - DNA, 15 bp, Homo sapiens
acaaaacattgtgaa

SEQ ID NO: 654152 - DNA, 15 bp, Homo sapiens
caaaacattgtgaaa

SEQ ID NO: 654153 - DNA, 15 bp, Homo sapiens
aaaacattgtgaaat

SEQ ID NO: 654154 - DNA, 15 bp, Homo sapiens
aaacattgtgaaatg

SEQ ID NO: 654155 - DNA, 15 bp, Homo sapiens
aacattgtgaaatgc

SEQ ID NO: 654156 - DNA, 15 bp, Homo sapiens
acattgtgaaatgcc

SEQ ID NO: 654157 - DNA, 15 bp, Homo sapiens
cattgtgaaatgcca

SEQ ID NO: 654158 - DNA, 15 bp, Homo sapiens
attgtgaaatgccac

SEQ ID NO: 654159 - DNA, 15 bp, Homo sapiens
ttgtgaaatgccact

SEQ ID NO: 654160 - DNA, 15 bp, Homo sapiens
tgtgaaatgccactg

SEQ ID NO: 654161 - DNA, 15 bp, Homo sapiens
gtgaaatgccactga

SEQ ID NO: 654162 - DNA, 15 bp, Homo sapiens
tgaaatgccactgaa

SEQ ID NO: 654163 - DNA, 15 bp, Homo sapiens
gaaatgccactgaat

SEQ ID NO: 654164 - DNA, 15 bp, Homo sapiens
aaatgccactgaatt

SEQ ID NO: 654165 - DNA, 15 bp, Homo sapiens
aatgccactgaattg

SEQ ID NO: 654166 - DNA, 15 bp, Homo sapiens
atgccactgaattgt

SEQ ID NO: 654167 - DNA, 15 bp, Homo sapiens
tgccactgaattgta

SEQ ID NO: 654168 - DNA, 15 bp, Homo sapiens
gccactgaattgtac

SEQ ID NO: 654169 - DNA, 15 bp, Homo sapiens
ccactgaattgtaca

SEQ ID NO: 654170 - DNA, 15 bp, Homo sapiens
cactgaattgtacac

SEQ ID NO: 654171 - DNA, 15 bp, Homo sapiens
actgaattgtacact

SEQ ID NO: 654172 - DNA, 15 bp, Homo sapiens
ctgaattgtacactt

SEQ ID NO: 654173 - DNA, 15 bp, Homo sapiens
tgaattgtacactta

SEQ ID NO: 654174 - DNA, 15 bp, Homo sapiens
gaattgtacacttaa

SEQ ID NO: 654175 - DNA, 15 bp, Homo sapiens
aattgtacacttaag

SEQ ID NO: 654176 - DNA, 15 bp, Homo sapiens
attgtacacttaaga

SEQ ID NO: 654177 - DNA, 15 bp, Homo sapiens
ttgtacacttaagaa

SEQ ID NO: 654178 - DNA, 15 bp, Homo sapiens
tgtacacttaagaat

SEQ ID NO: 654179 - DNA, 15 bp, Homo sapiens
gtacacttaagaatg

SEQ ID NO: 654180 - DNA, 15 bp, Homo sapiens
tacacttaagaatgg

SEQ ID NO: 654181 - DNA, 15 bp, Homo sapiens
acacttaagaatggt

SEQ ID NO: 654182 - DNA, 15 bp, Homo sapiens
cacttaagaatggtt

SEQ ID NO: 654183 - DNA, 15 bp, Homo sapiens
acttaagaatggtta

SEQ ID NO: 654184 - DNA, 15 bp, Homo sapiens
cttaagaatggttaa

SEQ ID NO: 654185 - DNA, 15 bp, Homo sapiens
ttaagaatggttaaa

SEQ ID NO: 654186 - DNA, 15 bp, Homo sapiens
taagaatggttaaaa

SEQ ID NO: 654187 - DNA, 15 bp, Homo sapiens
aagaatggttaaaat

SEQ ID NO: 654188 - DNA, 15 bp, Homo sapiens
agaatggttaaaatg

SEQ ID NO: 654189 - DNA, 15 bp, Homo sapiens
gaatggttaaaatga

SEQ ID NO: 654190 - DNA, 15 bp, Homo sapiens
aatggttaaaatgat

SEQ ID NO: 654191 - DNA, 15 bp, Homo sapiens
atggttaaaatgata

SEQ ID NO: 654192 - DNA, 15 bp, Homo sapiens
tggttaaaatgatat

SEQ ID NO: 654193 - DNA, 15 bp, Homo sapiens
ggttaaaatgatata

SEQ ID NO: 654194 - DNA, 15 bp, Homo sapiens
gttaaaatgatatat

SEQ ID NO: 654195 - DNA, 15 bp, Homo sapiens
ttaaaatgatatata

SEQ ID NO: 654196 - DNA, 15 bp, Homo sapiens
taaaatgatatatat

SEQ ID NO: 654197 - DNA, 15 bp, Homo sapiens
aaaatgatatatatt

SEQ ID NO: 654198 - DNA, 15 bp, Homo sapiens
aaatgatatatattg

SEQ ID NO: 654199 - DNA, 15 bp, Homo sapiens
aatgatatatattgt

SEQ ID NO: 654200 - DNA, 15 bp, Homo sapiens
atgatatatattgtt

SEQ ID NO: 654201 - DNA, 15 bp, Homo sapiens
tgatatatattgtta

SEQ ID NO: 654202 - DNA, 15 bp, Homo sapiens
gatatatattgttat

SEQ ID NO: 654203 - DNA, 15 bp, Homo sapiens
atatatattgttatg

SEQ ID NO: 654204 - DNA, 15 bp, Homo sapiens
tatatattgttatgt

SEQ ID NO: 654205 - DNA, 15 bp, Homo sapiens
atatattgttatgta

SEQ ID NO: 654206 - DNA, 15 bp, Homo sapiens
tatattgttatgtat

SEQ ID NO: 654207 - DNA, 15 bp, Homo sapiens
atattgttatgtata

SEQ ID NO: 654208 - DNA, 15 bp, Homo sapiens
tattgttatgtatat

SEQ ID NO: 654209 - DNA, 15 bp, Homo sapiens
attgttatgtatatt

SEQ ID NO: 654210 - DNA, 15 bp, Homo sapiens
ttgttatgtatattt

SEQ ID NO: 654211 - DNA, 15 bp, Homo sapiens
tgttatgtatatttt

SEQ ID NO: 654212 - DNA, 15 bp, Homo sapiens
gttatgtatatttta

SEQ ID NO: 654213 - DNA, 15 bp, Homo sapiens
ttatgtatattttat

SEQ ID NO: 654214 - DNA, 15 bp, Homo sapiens
tatgtatattttatc

SEQ ID NO: 654215 - DNA, 15 bp, Homo sapiens
atgtatattttatca

SEQ ID NO: 654216 - DNA, 15 bp, Homo sapiens
tgtatattttatcac

SEQ ID NO: 654217 - DNA, 15 bp, Homo sapiens
gtatattttatcaca

SEQ ID NO: 654218 - DNA, 15 bp, Homo sapiens
tatattttatcacaa

SEQ ID NO: 654219 - DNA, 15 bp, Homo sapiens
atattttatcacaac

SEQ ID NO: 654220 - DNA, 15 bp, Homo sapiens
tattttatcacaact

SEQ ID NO: 654221 - DNA, 15 bp, Homo sapiens
attttatcacaactt

SEQ ID NO: 654222 - DNA, 15 bp, Homo sapiens
ttttatcacaacttt

SEQ ID NO: 654223 - DNA, 15 bp, Homo sapiens
tttatcacaacttta

SEQ ID NO: 654224 - DNA, 15 bp, Homo sapiens
ttatcacaactttat

SEQ ID NO: 654225 - DNA, 15 bp, Homo sapiens
tatcacaactttata

SEQ ID NO: 654226 - DNA, 15 bp, Homo sapiens
atcacaactttataa

SEQ ID NO: 654227 - DNA, 15 bp, Homo sapiens
tcacaactttataaa

SEQ ID NO: 654228 - DNA, 15 bp, Homo sapiens
cacaactttataaaa

SEQ ID NO: 654229 - DNA, 15 bp, Homo sapiens
acaactttataaaag

SEQ ID NO: 654230 - DNA, 15 bp, Homo sapiens
caactttataaaagg

SEQ ID NO: 654231 - DNA, 15 bp, Homo sapiens
aactttataaaaggt

SEQ ID NO: 654232 - DNA, 15 bp, Homo sapiens
actttataaaaggtc

SEQ ID NO: 654233 - DNA, 15 bp, Homo sapiens
ctttataaaaggtct

SEQ ID NO: 654234 - DNA, 15 bp, Homo sapiens
tttataaaaggtctg

SEQ ID NO: 654235 - DNA, 15 bp, Homo sapiens
ttataaaaggtctga

SEQ ID NO: 654236 - DNA, 15 bp, Homo sapiens
tataaaaggtctgac

SEQ ID NO: 654237 - DNA, 15 bp, Homo sapiens
ataaaaggtctgacc

SEQ ID NO: 654238 - DNA, 15 bp, Homo sapiens
taaaaggtctgacct

SEQ ID NO: 654239 - DNA, 15 bp, Homo sapiens
aaaaggtctgacctt

SEQ ID NO: 654240 - DNA, 15 bp, Homo sapiens
aaaggtctgaccttt

SEQ ID NO: 654241 - DNA, 15 bp, Homo sapiens
aaggtctgacctttt

SEQ ID NO: 654242 - DNA, 15 bp, Homo sapiens
aggtctgaccttttt

SEQ ID NO: 654243 - DNA, 15 bp, Homo sapiens
ggtctgacctttttg

SEQ ID NO: 654244 - DNA, 15 bp, Homo sapiens
gtctgacctttttgt

SEQ ID NO: 654245 - DNA, 15 bp, Homo sapiens
tctgacctttttgtg

SEQ ID NO: 654246 - DNA, 15 bp, Homo sapiens
ctgacctttttgtgt

SEQ ID NO: 654247 - DNA, 15 bp, Homo sapiens
tgacctttttgtgta

SEQ ID NO: 654248 - DNA, 15 bp, Homo sapiens
gacctttttgtgtaa

SEQ ID NO: 654249 - DNA, 15 bp, Homo sapiens
acctttttgtgtaat

SEQ ID NO: 654250 - DNA, 15 bp, Homo sapiens
cctttttgtgtaatg

SEQ ID NO: 654251 - DNA, 15 bp, Homo sapiens
ctttttgtgtaatgg

SEQ ID NO: 654252 - DNA, 15 bp, Homo sapiens
tttttgtgtaatggt

SEQ ID NO: 654253 - DNA, 15 bp, Homo sapiens
ttttgtgtaatggta

SEQ ID NO: 654254 - DNA, 15 bp, Homo sapiens
tttgtgtaatggtaa

SEQ ID NO: 654255 - DNA, 15 bp, Homo sapiens
ttgtgtaatggtaat

SEQ ID NO: 654256 - DNA, 15 bp, Homo sapiens
tgtgtaatggtaatt

SEQ ID NO: 654257 - DNA, 15 bp, Homo sapiens
gtgtaatggtaattg

SEQ ID NO: 654258 - DNA, 15 bp, Homo sapiens
tgtaatggtaattgg

SEQ ID NO: 654259 - DNA, 15 bp, Homo sapiens
gtaatggtaattggt

SEQ ID NO: 654260 - DNA, 15 bp, Homo sapiens
taatggtaattggta

SEQ ID NO: 654261 - DNA, 15 bp, Homo sapiens
aatggtaattggtaa

SEQ ID NO: 654262 - DNA, 15 bp, Homo sapiens
atggtaattggtaaa

SEQ ID NO: 654263 - DNA, 15 bp, Homo sapiens
tggtaattggtaaaa

SEQ ID NO: 654264 - DNA, 15 bp, Homo sapiens
ggtaattggtaaaag

SEQ ID NO: 654265 - DNA, 15 bp, Homo sapiens
gtaattggtaaaagc

SEQ ID NO: 654266 - DNA, 15 bp, Homo sapiens
taattggtaaaagcg

SEQ ID NO: 654267 - DNA, 15 bp, Homo sapiens
aattggtaaaagcga

SEQ ID NO: 654268 - DNA, 15 bp, Homo sapiens
attggtaaaagcgac

SEQ ID NO: 654269 - DNA, 15 bp, Homo sapiens
ttggtaaaagcgact

SEQ ID NO: 654270 - DNA, 15 bp, Homo sapiens
tggtaaaagcgactg

SEQ ID NO: 654271 - DNA, 15 bp, Homo sapiens
ggtaaaagcgactgt

SEQ ID NO: 654272 - DNA, 15 bp, Homo sapiens
gtaaaagcgactgtg

SEQ ID NO: 654273 - DNA, 15 bp, Homo sapiens
taaaagcgactgtgt

SEQ ID NO: 654274 - DNA, 15 bp, Homo sapiens
aaaagcgactgtgtg

SEQ ID NO: 654275 - DNA, 15 bp, Homo sapiens
aaagcgactgtgtgt

SEQ ID NO: 654276 - DNA, 15 bp, Homo sapiens
aagcgactgtgtgtc

SEQ ID NO: 654277 - DNA, 15 bp, Homo sapiens
agcgactgtgtgtct

SEQ ID NO: 654278 - DNA, 15 bp, Homo sapiens
gcgactgtgtgtctg

SEQ ID NO: 654279 - DNA, 15 bp, Homo sapiens
cgactgtgtgtctga

SEQ ID NO: 654280 - DNA, 15 bp, Homo sapiens
gactgtgtgtctgag

SEQ ID NO: 654281 - DNA, 15 bp, Homo sapiens
actgtgtgtctgaga

SEQ ID NO: 654282 - DNA, 15 bp, Homo sapiens
ctgtgtgtctgagac

SEQ ID NO: 654283 - DNA, 15 bp, Homo sapiens
tgtgtgtctgagacg

SEQ ID NO: 654284 - DNA, 15 bp, Homo sapiens
gtgtgtctgagacgg

SEQ ID NO: 654285 - DNA, 15 bp, Homo sapiens
tgtgtctgagacggg

SEQ ID NO: 654286 - DNA, 15 bp, Homo sapiens
gtgtctgagacgggt

SEQ ID NO: 654287 - DNA, 15 bp, Homo sapiens
tgtctgagacgggtt

SEQ ID NO: 654288 - DNA, 15 bp, Homo sapiens
gtctgagacgggttg

SEQ ID NO: 654289 - DNA, 15 bp, Homo sapiens
tctgagacgggttga

SEQ ID NO: 654290 - DNA, 15 bp, Homo sapiens
ctgagacgggttgat

SEQ ID NO: 654291 - DNA, 15 bp, Homo sapiens
tgagacgggttgatt

SEQ ID NO: 654292 - DNA, 15 bp, Homo sapiens
gagacgggttgattg

SEQ ID NO: 654293 - DNA, 15 bp, Homo sapiens
agacgggttgattgc

SEQ ID NO: 654294 - DNA, 15 bp, Homo sapiens
gacgggttgattgct

SEQ ID NO: 654295 - DNA, 15 bp, Homo sapiens
acgggttgattgctt

SEQ ID NO: 654296 - DNA, 15 bp, Homo sapiens
cgggttgattgcttt

SEQ ID NO: 654297 - DNA, 15 bp, Homo sapiens
gggttgattgctttt

SEQ ID NO: 654298 - DNA, 15 bp, Homo sapiens
ggttgattgcttttt

SEQ ID NO: 654299 - DNA, 15 bp, Homo sapiens
gttgattgctttttg

SEQ ID NO: 654300 - DNA, 15 bp, Homo sapiens
ttgattgctttttgg

SEQ ID NO: 654301 - DNA, 15 bp, Homo sapiens
tgattgctttttggt

SEQ ID NO: 654302 - DNA, 15 bp, Homo sapiens
gattgctttttggtt

SEQ ID NO: 654303 - DNA, 15 bp, Homo sapiens
attgctttttggttt

SEQ ID NO: 654304 - DNA, 15 bp, Homo sapiens
ttgctttttggtttg

SEQ ID NO: 654305 - DNA, 15 bp, Homo sapiens
tgctttttggtttgc

SEQ ID NO: 654306 - DNA, 15 bp, Homo sapiens
gctttttggtttgca

SEQ ID NO: 654307 - DNA, 15 bp, Homo sapiens
ctttttggtttgcag

SEQ ID NO: 654308 - DNA, 15 bp, Homo sapiens
tttttggtttgcagg

SEQ ID NO: 654309 - DNA, 15 bp, Homo sapiens
ttttggtttgcaggc

SEQ ID NO: 654310 - DNA, 15 bp, Homo sapiens
tttggtttgcaggct

SEQ ID NO: 654311 - DNA, 15 bp, Homo sapiens
ttggtttgcaggctg

SEQ ID NO: 654312 - DNA, 15 bp, Homo sapiens
tggtttgcaggctgc

SEQ ID NO: 654313 - DNA, 15 bp, Homo sapiens
ggtttgcaggctgcc

SEQ ID NO: 654314 - DNA, 15 bp, Homo sapiens
gtttgcaggctgccg

SEQ ID NO: 654315 - DNA, 15 bp, Homo sapiens
tttgcaggctgccgg

SEQ ID NO: 654316 - DNA, 15 bp, Homo sapiens
ttgcaggctgccggc

SEQ ID NO: 654317 - DNA, 15 bp, Homo sapiens
tgcaggctgccggct

SEQ ID NO: 654318 - DNA, 15 bp, Homo sapiens
gcaggctgccggctc

SEQ ID NO: 654319 - DNA, 15 bp, Homo sapiens
caggctgccggctct

SEQ ID NO: 654320 - DNA, 15 bp, Homo sapiens
aggctgccggctctc

SEQ ID NO: 654321 - DNA, 15 bp, Homo sapiens
ggctgccggctctca

SEQ ID NO: 654322 - DNA, 15 bp, Homo sapiens
gctgccggctctcag

SEQ ID NO: 654323 - DNA, 15 bp, Homo sapiens
ctgccggctctcaga

SEQ ID NO: 654324 - DNA, 15 bp, Homo sapiens
tgccggctctcagat

SEQ ID NO: 654325 - DNA, 15 bp, Homo sapiens
gccggctctcagatc

SEQ ID NO: 654326 - DNA, 15 bp, Homo sapiens
ccggctctcagatcg

SEQ ID NO: 654327 - DNA, 15 bp, Homo sapiens
cggctctcagatcgg

SEQ ID NO: 654328 - DNA, 15 bp, Homo sapiens
ggctctcagatcggg

SEQ ID NO: 654329 - DNA, 15 bp, Homo sapiens
gctctcagatcggga

SEQ ID NO: 654330 - DNA, 15 bp, Homo sapiens
ctctcagatcgggat

SEQ ID NO: 654331 - DNA, 15 bp, Homo sapiens
tctcagatcgggatg

SEQ ID NO: 654332 - DNA, 15 bp, Homo sapiens
ctcagatcgggatga

SEQ ID NO: 654333 - DNA, 15 bp, Homo sapiens
tcagatcgggatgat

SEQ ID NO: 654334 - DNA, 15 bp, Homo sapiens
cagatcgggatgata

SEQ ID NO: 654335 - DNA, 15 bp, Homo sapiens
agatcgggatgatag

SEQ ID NO: 654336 - DNA, 15 bp, Homo sapiens
gatcgggatgatagt

SEQ ID NO: 654337 - DNA, 15 bp, Homo sapiens
atcgggatgatagtc

SEQ ID NO: 654338 - DNA, 15 bp, Homo sapiens
tcgggatgatagtca

SEQ ID NO: 654339 - DNA, 15 bp, Homo sapiens
cgggatgatagtcaa

SEQ ID NO: 654340 - DNA, 15 bp, Homo sapiens
gggatgatagtcaat

SEQ ID NO: 654341 - DNA, 15 bp, Homo sapiens
ggatgatagtcaatt

SEQ ID NO: 654342 - DNA, 15 bp, Homo sapiens
gatgatagtcaattc

SEQ ID NO: 654343 - DNA, 15 bp, Homo sapiens
atgatagtcaattcc

SEQ ID NO: 654344 - DNA, 15 bp, Homo sapiens
tgatagtcaattcct

SEQ ID NO: 654345 - DNA, 15 bp, Homo sapiens
gatagtcaattcctt

SEQ ID NO: 654346 - DNA, 15 bp, Homo sapiens
atagtcaattccttc

SEQ ID NO: 654347 - DNA, 15 bp, Homo sapiens
tagtcaattccttca

SEQ ID NO: 654348 - DNA, 15 bp, Homo sapiens
agtcaattccttcac

SEQ ID NO: 654349 - DNA, 15 bp, Homo sapiens
gtcaattccttcact

SEQ ID NO: 654350 - DNA, 15 bp, Homo sapiens
tcaattccttcacta

SEQ ID NO: 654351 - DNA, 15 bp, Homo sapiens
caattccttcactaa

SEQ ID NO: 654352 - DNA, 15 bp, Homo sapiens
aattccttcactaac

SEQ ID NO: 654353 - DNA, 15 bp, Homo sapiens
attccttcactaacg

SEQ ID NO: 654354 - DNA, 15 bp, Homo sapiens
ttccttcactaacgt

SEQ ID NO: 654355 - DNA, 15 bp, Homo sapiens
tccttcactaacgtc

SEQ ID NO: 654356 - DNA, 15 bp, Homo sapiens
ccttcactaacgtca

SEQ ID NO: 654357 - DNA, 15 bp, Homo sapiens
cttcactaacgtcac

SEQ ID NO: 654358 - DNA, 15 bp, Homo sapiens
ttcactaacgtcact

SEQ ID NO: 654359 - DNA, 15 bp, Homo sapiens
tcactaacgtcactg

SEQ ID NO: 654360 - DNA, 15 bp, Homo sapiens
cactaacgtcactgt

SEQ ID NO: 654361 - DNA, 15 bp, Homo sapiens
actaacgtcactgtg

SEQ ID NO: 654362 - DNA, 15 bp, Homo sapiens
ctaacgtcactgtgg

SEQ ID NO: 654363 - DNA, 15 bp, Homo sapiens
taacgtcactgtggc

SEQ ID NO: 654364 - DNA, 15 bp, Homo sapiens
aacgtcactgtggcc

SEQ ID NO: 654365 - DNA, 15 bp, Homo sapiens
acgtcactgtggcca

SEQ ID NO: 654366 - DNA, 15 bp, Homo sapiens
cgtcactgtggccat

SEQ ID NO: 654367 - DNA, 15 bp, Homo sapiens
gtcactgtggccatg

SEQ ID NO: 654368 - DNA, 15 bp, Homo sapiens
tcactgtggccatga

SEQ ID NO: 654369 - DNA, 15 bp, Homo sapiens
cactgtggccatgat

SEQ ID NO: 654370 - DNA, 15 bp, Homo sapiens
actgtggccatgatc

SEQ ID NO: 654371 - DNA, 15 bp, Homo sapiens
ctgtggccatgatca

SEQ ID NO: 654372 - DNA, 15 bp, Homo sapiens
tgtggccatgatcat

SEQ ID NO: 654373 - DNA, 15 bp, Homo sapiens
gtggccatgatcatt

SEQ ID NO: 654374 - DNA, 15 bp, Homo sapiens
tggccatgatcattg

SEQ ID NO: 654375 - DNA, 15 bp, Homo sapiens
ggccatgatcattgc

SEQ ID NO: 654376 - DNA, 15 bp, Homo sapiens
gccatgatcattgcc

SEQ ID NO: 654377 - DNA, 15 bp, Homo sapiens
ccatgatcattgcct

SEQ ID NO: 654378 - DNA, 15 bp, Homo sapiens
catgatcattgcctt

SEQ ID NO: 654379 - DNA, 15 bp, Homo sapiens
atgatcattgccttc

SEQ ID NO: 654380 - DNA, 15 bp, Homo sapiens
tgatcattgccttct

SEQ ID NO: 654381 - DNA, 15 bp, Homo sapiens
gatcattgccttctc

SEQ ID NO: 654382 - DNA, 15 bp, Homo sapiens
atcattgccttctcc

SEQ ID NO: 654383 - DNA, 15 bp, Homo sapiens
tcattgccttctcct

SEQ ID NO: 654384 - DNA, 15 bp, Homo sapiens
cattgccttctcctt

SEQ ID NO: 654385 - DNA, 15 bp, Homo sapiens
attgccttctccttt

SEQ ID NO: 654386 - DNA, 15 bp, Homo sapiens
ttgccttctccttta

SEQ ID NO: 654387 - DNA, 15 bp, Homo sapiens
tgccttctcctttag

SEQ ID NO: 654388 - DNA, 15 bp, Homo sapiens
gccttctcctttagc

SEQ ID NO: 654389 - DNA, 15 bp, Homo sapiens
ccttctcctttagct

SEQ ID NO: 654390 - DNA, 15 bp, Homo sapiens
cttctcctttagctg

SEQ ID NO: 654391 - DNA, 15 bp, Homo sapiens
ttctcctttagctgg

SEQ ID NO: 654392 - DNA, 15 bp, Homo sapiens
tctcctttagctgga

SEQ ID NO: 654393 - DNA, 15 bp, Homo sapiens
ctcctttagctggaa

SEQ ID NO: 654394 - DNA, 15 bp, Homo sapiens
tcctttagctggaag

SEQ ID NO: 654395 - DNA, 15 bp, Homo sapiens
cctttagctggaagc

SEQ ID NO: 654396 - DNA, 15 bp, Homo sapiens
ctttagctggaagct

SEQ ID NO: 654397 - DNA, 15 bp, Homo sapiens
tttagctggaagctg

SEQ ID NO: 654398 - DNA, 15 bp, Homo sapiens
ttagctggaagctga

SEQ ID NO: 654399 - DNA, 15 bp, Homo sapiens
tagctggaagctgag

SEQ ID NO: 654400 - DNA, 15 bp, Homo sapiens
agctggaagctgagc

SEQ ID NO: 654401 - DNA, 15 bp, Homo sapiens
gctggaagctgagcc

SEQ ID NO: 654402 - DNA, 15 bp, Homo sapiens
ctggaagctgagcct

SEQ ID NO: 654403 - DNA, 15 bp, Homo sapiens
tggaagctgagcctg

SEQ ID NO: 654404 - DNA, 15 bp, Homo sapiens
ggaagctgagcctgg

SEQ ID NO: 654405 - DNA, 15 bp, Homo sapiens
gaagctgagcctggt

SEQ ID NO: 654406 - DNA, 15 bp, Homo sapiens
aagctgagcctggtc

SEQ ID NO: 654407 - DNA, 15 bp, Homo sapiens
agctgagcctggtca

SEQ ID NO: 654408 - DNA, 15 bp, Homo sapiens
gctgagcctggtcat

SEQ ID NO: 654409 - DNA, 15 bp, Homo sapiens
ctgagcctggtcatc

SEQ ID NO: 654410 - DNA, 15 bp, Homo sapiens
tgagcctggtcatct

SEQ ID NO: 654411 - DNA, 15 bp, Homo sapiens
gagcctggtcatctt

SEQ ID NO: 654412 - DNA, 15 bp, Homo sapiens
agcctggtcatcttg

SEQ ID NO: 654413 - DNA, 15 bp, Homo sapiens
gcctggtcatcttgt

SEQ ID NO: 654414 - DNA, 15 bp, Homo sapiens
cctggtcatcttgtg

SEQ ID NO: 654415 - DNA, 15 bp, Homo sapiens
ctggtcatcttgtgc

SEQ ID NO: 654416 - DNA, 15 bp, Homo sapiens
tggtcatcttgtgct

SEQ ID NO: 654417 - DNA, 15 bp, Homo sapiens
ggtcatcttgtgctt

SEQ ID NO: 654418 - DNA, 15 bp, Homo sapiens
gtcatcttgtgcttc

SEQ ID NO: 654419 - DNA, 15 bp, Homo sapiens
tcatcttgtgcttct

SEQ ID NO: 654420 - DNA, 15 bp, Homo sapiens
catcttgtgcttctt

SEQ ID NO: 654421 - DNA, 15 bp, Homo sapiens
atcttgtgcttcttc

SEQ ID NO: 654422 - DNA, 15 bp, Homo sapiens
tcttgtgcttcttcc

SEQ ID NO: 654423 - DNA, 15 bp, Homo sapiens
cttgtgcttcttccc

SEQ ID NO: 654424 - DNA, 15 bp, Homo sapiens
ttgtgcttcttcccc

SEQ ID NO: 654425 - DNA, 15 bp, Homo sapiens
tgtgcttcttcccct

SEQ ID NO: 654426 - DNA, 15 bp, Homo sapiens
gtgcttcttcccctt

SEQ ID NO: 654427 - DNA, 15 bp, Homo sapiens
tgcttcttccccttc

SEQ ID NO: 654428 - DNA, 15 bp, Homo sapiens
gcttcttccccttct

SEQ ID NO: 654429 - DNA, 15 bp, Homo sapiens
cttcttccccttctt

SEQ ID NO: 654430 - DNA, 15 bp, Homo sapiens
ttcttccccttcttg

SEQ ID NO: 654431 - DNA, 15 bp, Homo sapiens
tcttccccttcttgg

SEQ ID NO: 654432 - DNA, 15 bp, Homo sapiens
cttccccttcttggc

SEQ ID NO: 654433 - DNA, 15 bp, Homo sapiens
ttccccttcttggct

SEQ ID NO: 654434 - DNA, 15 bp, Homo sapiens
tccccttcttggctt

SEQ ID NO: 654435 - DNA, 15 bp, Homo sapiens
ccccttcttggcttt

SEQ ID NO: 654436 - DNA, 15 bp, Homo sapiens
cccttcttggcttta

SEQ ID NO: 654437 - DNA, 15 bp, Homo sapiens
ccttcttggctttat

SEQ ID NO: 654438 - DNA, 15 bp, Homo sapiens
cttcttggctttatc

SEQ ID NO: 654439 - DNA, 15 bp, Homo sapiens
ttcttggctttatca

SEQ ID NO: 654440 - DNA, 15 bp, Homo sapiens
tcttggctttatcag

SEQ ID NO: 654441 - DNA, 15 bp, Homo sapiens
cttggctttatcagg

SEQ ID NO: 654442 - DNA, 15 bp, Homo sapiens
ttggctttatcagga

SEQ ID NO: 654443 - DNA, 15 bp, Homo sapiens
tggctttatcaggag

SEQ ID NO: 654444 - DNA, 15 bp, Homo sapiens
ggctttatcaggagc

SEQ ID NO: 654445 - DNA, 15 bp, Homo sapiens
gctttatcaggagcc

SEQ ID NO: 654446 - DNA, 15 bp, Homo sapiens
ctttatcaggagcca

SEQ ID NO: 654447 - DNA, 15 bp, Homo sapiens
tttatcaggagccac

SEQ ID NO: 654448 - DNA, 15 bp, Homo sapiens
ttatcaggagccaca

SEQ ID NO: 654449 - DNA, 15 bp, Homo sapiens
tatcaggagccacac

SEQ ID NO: 654450 - DNA, 15 bp, Homo sapiens
atcaggagccacaca

SEQ ID NO: 654451 - DNA, 15 bp, Homo sapiens
tcaggagccacacag

SEQ ID NO: 654452 - DNA, 15 bp, Homo sapiens
caggagccacacaga

SEQ ID NO: 654453 - DNA, 15 bp, Homo sapiens
aggagccacacagac

SEQ ID NO: 654454 - DNA, 15 bp, Homo sapiens
ggagccacacagacc

SEQ ID NO: 654455 - DNA, 15 bp, Homo sapiens
gagccacacagacca

SEQ ID NO: 654456 - DNA, 15 bp, Homo sapiens
agccacacagaccag

SEQ ID NO: 654457 - DNA, 15 bp, Homo sapiens
gccacacagaccagg

SEQ ID NO: 654458 - DNA, 15 bp, Homo sapiens
ccacacagaccagga

SEQ ID NO: 654459 - DNA, 15 bp, Homo sapiens
cacacagaccaggat

SEQ ID NO: 654460 - DNA, 15 bp, Homo sapiens
acacagaccaggatg

SEQ ID NO: 654461 - DNA, 15 bp, Homo sapiens
cacagaccaggatgt

SEQ ID NO: 654462 - DNA, 15 bp, Homo sapiens
acagaccaggatgtt

SEQ ID NO: 654463 - DNA, 15 bp, Homo sapiens
cagaccaggatgttg

SEQ ID NO: 654464 - DNA, 15 bp, Homo sapiens
agaccaggatgttga

SEQ ID NO: 654465 - DNA, 15 bp, Homo sapiens
gaccaggatgttgac

SEQ ID NO: 654466 - DNA, 15 bp, Homo sapiens
accaggatgttgaca

SEQ ID NO: 654467 - DNA, 15 bp, Homo sapiens
ccaggatgttgacag

SEQ ID NO: 654468 - DNA, 15 bp, Homo sapiens
caggatgttgacagg

SEQ ID NO: 654469 - DNA, 15 bp, Homo sapiens
aggatgttgacagga

SEQ ID NO: 654470 - DNA, 15 bp, Homo sapiens
ggatgttgacaggat

SEQ ID NO: 654471 - DNA, 15 bp, Homo sapiens
gatgttgacaggatt

SEQ ID NO: 654472 - DNA, 15 bp, Homo sapiens
atgttgacaggattt

SEQ ID NO: 654473 - DNA, 15 bp, Homo sapiens
tgttgacaggatttg

SEQ ID NO: 654474 - DNA, 15 bp, Homo sapiens
gttgacaggatttgc

SEQ ID NO: 654475 - DNA, 15 bp, Homo sapiens
ttgacaggatttgcc

SEQ ID NO: 654476 - DNA, 15 bp, Homo sapiens
tgacaggatttgcct

SEQ ID NO: 654477 - DNA, 15 bp, Homo sapiens
gacaggatttgcctc

SEQ ID NO: 654478 - DNA, 15 bp, Homo sapiens
acaggatttgcctct

SEQ ID NO: 654479 - DNA, 15 bp, Homo sapiens
caggatttgcctctc

SEQ ID NO: 654480 - DNA, 15 bp, Homo sapiens
aggatttgcctctcg

SEQ ID NO: 654481 - DNA, 15 bp, Homo sapiens
ggatttgcctctcga

SEQ ID NO: 654482 - DNA, 15 bp, Homo sapiens
gatttgcctctcgag

SEQ ID NO: 654483 - DNA, 15 bp, Homo sapiens
atttgcctctcgaga

SEQ ID NO: 654484 - DNA, 15 bp, Homo sapiens
tttgcctctcgagat

SEQ ID NO: 654485 - DNA, 15 bp, Homo sapiens
ttgcctctcgagata

SEQ ID NO: 654486 - DNA, 15 bp, Homo sapiens
tgcctctcgagataa

SEQ ID NO: 654487 - DNA, 15 bp, Homo sapiens
gcctctcgagataag

SEQ ID NO: 654488 - DNA, 15 bp, Homo sapiens
cctctcgagataagc

SEQ ID NO: 654489 - DNA, 15 bp, Homo sapiens
ctctcgagataagca

SEQ ID NO: 654490 - DNA, 15 bp, Homo sapiens
tctcgagataagcag

SEQ ID NO: 654491 - DNA, 15 bp, Homo sapiens
ctcgagataagcagg

SEQ ID NO: 654492 - DNA, 15 bp, Homo sapiens
tcgagataagcaggc

SEQ ID NO: 654493 - DNA, 15 bp, Homo sapiens
cgagataagcaggcc

SEQ ID NO: 654494 - DNA, 15 bp, Homo sapiens
gagataagcaggccc

SEQ ID NO: 654495 - DNA, 15 bp, Homo sapiens
agataagcaggccct

SEQ ID NO: 654496 - DNA, 15 bp, Homo sapiens
gataagcaggccctg

SEQ ID NO: 654497 - DNA, 15 bp, Homo sapiens
ataagcaggccctgg

SEQ ID NO: 654498 - DNA, 15 bp, Homo sapiens
taagcaggccctgga

SEQ ID NO: 654499 - DNA, 15 bp, Homo sapiens
aagcaggccctggag

SEQ ID NO: 654500 - DNA, 15 bp, Homo sapiens
agcaggccctggaga

SEQ ID NO: 654501 - DNA, 15 bp, Homo sapiens
gcaggccctggagat

SEQ ID NO: 654502 - DNA, 15 bp, Homo sapiens
caggccctggagatg

SEQ ID NO: 654503 - DNA, 15 bp, Homo sapiens
aggccctggagatgg

SEQ ID NO: 654504 - DNA, 15 bp, Homo sapiens
ggccctggagatggt

SEQ ID NO: 654505 - DNA, 15 bp, Homo sapiens
gccctggagatggtg

SEQ ID NO: 654506 - DNA, 15 bp, Homo sapiens
ccctggagatggtgg

SEQ ID NO: 654507 - DNA, 15 bp, Homo sapiens
cctggagatggtggg

SEQ ID NO: 654508 - DNA, 15 bp, Homo sapiens
ctggagatggtggga

SEQ ID NO: 654509 - DNA, 15 bp, Homo sapiens
tggagatggtgggac

SEQ ID NO: 654510 - DNA, 15 bp, Homo sapiens
ggagatggtgggaca

SEQ ID NO: 654511 - DNA, 15 bp, Homo sapiens
gagatggtgggacag

SEQ ID NO: 654512 - DNA, 15 bp, Homo sapiens
agatggtgggacagg

SEQ ID NO: 654513 - DNA, 15 bp, Homo sapiens
gatggtgggacaggt

SEQ ID NO: 654514 - DNA, 15 bp, Homo sapiens
atggtgggacaggta

SEQ ID NO: 654515 - DNA, 15 bp, Homo sapiens
tggtgggacaggtaa

SEQ ID NO: 654516 - DNA, 15 bp, Homo sapiens
ggtgggacaggtaat

SEQ ID NO: 654517 - DNA, 15 bp, Homo sapiens
gtgggacaggtaatc

SEQ ID NO: 654518 - DNA, 15 bp, Homo sapiens
tgggacaggtaatct

SEQ ID NO: 654519 - DNA, 15 bp, Homo sapiens
gggacaggtaatctt

SEQ ID NO: 654520 - DNA, 15 bp, Homo sapiens
ggacaggtaatcttg

SEQ ID NO: 654521 - DNA, 15 bp, Homo sapiens
gacaggtaatcttgc

SEQ ID NO: 654522 - DNA, 15 bp, Homo sapiens
acaggtaatcttgca

SEQ ID NO: 654523 - DNA, 15 bp, Homo sapiens
caggtaatcttgcag

SEQ ID NO: 654524 - DNA, 15 bp, Homo sapiens
aggtaatcttgcaga

SEQ ID NO: 654525 - DNA, 15 bp, Homo sapiens
ggtaatcttgcagat

SEQ ID NO: 654526 - DNA, 15 bp, Homo sapiens
gtaatcttgcagatc

SEQ ID NO: 654527 - DNA, 15 bp, Homo sapiens
taatcttgcagatct

SEQ ID NO: 654528 - DNA, 15 bp, Homo sapiens
aatcttgcagatcta

SEQ ID NO: 654529 - DNA, 15 bp, Homo sapiens
atcttgcagatctaa

SEQ ID NO: 654530 - DNA, 15 bp, Homo sapiens
tcttgcagatctaat

SEQ ID NO: 654531 - DNA, 15 bp, Homo sapiens
cttgcagatctaatt

SEQ ID NO: 654532 - DNA, 15 bp, Homo sapiens
ttgcagatctaattt

SEQ ID NO: 654533 - DNA, 15 bp, Homo sapiens
tgcagatctaatttt

SEQ ID NO: 654534 - DNA, 15 bp, Homo sapiens
gcagatctaattttc

SEQ ID NO: 654535 - DNA, 15 bp, Homo sapiens
cagatctaattttcc

SEQ ID NO: 654536 - DNA, 15 bp, Homo sapiens
agatctaattttccc

SEQ ID NO: 654537 - DNA, 15 bp, Homo sapiens
gatctaattttccca

SEQ ID NO: 654538 - DNA, 15 bp, Homo sapiens
atctaattttcccat

SEQ ID NO: 654539 - DNA, 15 bp, Homo sapiens
tctaattttcccatt

SEQ ID NO: 654540 - DNA, 15 bp, Homo sapiens
ctaattttcccattc

SEQ ID NO: 654541 - DNA, 15 bp, Homo sapiens
taattttcccattcc

SEQ ID NO: 654542 - DNA, 15 bp, Homo sapiens
aattttcccattcct

SEQ ID NO: 654543 - DNA, 15 bp, Homo sapiens
attttcccattcctc

SEQ ID NO: 654544 - DNA, 15 bp, Homo sapiens
ttttcccattcctca

SEQ ID NO: 654545 - DNA, 15 bp, Homo sapiens
tttcccattcctcat

SEQ ID NO: 654546 - DNA, 15 bp, Homo sapiens
ttcccattcctcatg

SEQ ID NO: 654547 - DNA, 15 bp, Homo sapiens
tcccattcctcatgg

SEQ ID NO: 654548 - DNA, 15 bp, Homo sapiens
cccattcctcatggc

SEQ ID NO: 654549 - DNA, 15 bp, Homo sapiens
ccattcctcatggct

SEQ ID NO: 654550 - DNA, 15 bp, Homo sapiens
cattcctcatggctg

SEQ ID NO: 654551 - DNA, 15 bp, Homo sapiens
attcctcatggctga

SEQ ID NO: 654552 - DNA, 15 bp, Homo sapiens
ttcctcatggctgag

SEQ ID NO: 654553 - DNA, 15 bp, Homo sapiens
tcctcatggctgagt

SEQ ID NO: 654554 - DNA, 15 bp, Homo sapiens
cctcatggctgagtg

SEQ ID NO: 654555 - DNA, 15 bp, Homo sapiens
ctcatggctgagtgg

SEQ ID NO: 654556 - DNA, 15 bp, Homo sapiens
tcatggctgagtggc

SEQ ID NO: 654557 - DNA, 15 bp, Homo sapiens
catggctgagtggct

SEQ ID NO: 654558 - DNA, 15 bp, Homo sapiens
atggctgagtggcta

SEQ ID NO: 654559 - DNA, 15 bp, Homo sapiens
tggctgagtggctat

SEQ ID NO: 654560 - DNA, 15 bp, Homo sapiens
ggctgagtggctatc

SEQ ID NO: 654561 - DNA, 15 bp, Homo sapiens
gctgagtggctatca

SEQ ID NO: 654562 - DNA, 15 bp, Homo sapiens
ctgagtggctatcag

SEQ ID NO: 654563 - DNA, 15 bp, Homo sapiens
tgagtggctatcaga

SEQ ID NO: 654564 - DNA, 15 bp, Homo sapiens
gagtggctatcagac

SEQ ID NO: 654565 - DNA, 15 bp, Homo sapiens
agtggctatcagaca

SEQ ID NO: 654566 - DNA, 15 bp, Homo sapiens
gtggctatcagacaa

SEQ ID NO: 654567 - DNA, 15 bp, Homo sapiens
tggctatcagacaaa

SEQ ID NO: 654568 - DNA, 15 bp, Homo sapiens
ggctatcagacaaac

SEQ ID NO: 654569 - DNA, 15 bp, Homo sapiens
gctatcagacaaact

SEQ ID NO: 654570 - DNA, 15 bp, Homo sapiens
ctatcagacaaactg

SEQ ID NO: 654571 - DNA, 15 bp, Homo sapiens
tatcagacaaactgt

SEQ ID NO: 654572 - DNA, 15 bp, Homo sapiens
atcagacaaactgtt

SEQ ID NO: 654573 - DNA, 15 bp, Homo sapiens
tcagacaaactgtta

SEQ ID NO: 654574 - DNA, 15 bp, Homo sapiens
cagacaaactgttaa

SEQ ID NO: 654575 - DNA, 15 bp, Homo sapiens
agacaaactgttaaa

SEQ ID NO: 654576 - DNA, 15 bp, Homo sapiens
gacaaactgttaaaa

SEQ ID NO: 654577 - DNA, 15 bp, Homo sapiens
acaaactgttaaaaa

SEQ ID NO: 654578 - DNA, 15 bp, Homo sapiens
caaactgttaaaaac

SEQ ID NO: 654579 - DNA, 15 bp, Homo sapiens
aaactgttaaaaacg

SEQ ID NO: 654580 - DNA, 15 bp, Homo sapiens
aactgttaaaaacga

SEQ ID NO: 654581 - DNA, 15 bp, Homo sapiens
actgttaaaaacgag

SEQ ID NO: 654582 - DNA, 15 bp, Homo sapiens
ctgttaaaaacgagt

SEQ ID NO: 654583 - DNA, 15 bp, Homo sapiens
tgttaaaaacgagta

SEQ ID NO: 654584 - DNA, 15 bp, Homo sapiens
gttaaaaacgagtag

SEQ ID NO: 654585 - DNA, 15 bp, Homo sapiens
ttaaaaacgagtagt

SEQ ID NO: 654586 - DNA, 15 bp, Homo sapiens
taaaaacgagtagta

SEQ ID NO: 654587 - DNA, 15 bp, Homo sapiens
aaaaacgagtagtac

SEQ ID NO: 654588 - DNA, 15 bp, Homo sapiens
aaaacgagtagtacg

SEQ ID NO: 654589 - DNA, 15 bp, Homo sapiens
aaacgagtagtacga

SEQ ID NO: 654590 - DNA, 15 bp, Homo sapiens
aacgagtagtacgaa

SEQ ID NO: 654591 - DNA, 15 bp, Homo sapiens
acgagtagtacgaag

SEQ ID NO: 654592 - DNA, 15 bp, Homo sapiens
cgagtagtacgaaga

SEQ ID NO: 654593 - DNA, 15 bp, Homo sapiens
gagtagtacgaagag

SEQ ID NO: 654594 - DNA, 15 bp, Homo sapiens
agtagtacgaagaga

SEQ ID NO: 654595 - DNA, 15 bp, Homo sapiens
gtagtacgaagagac

SEQ ID NO: 654596 - DNA, 15 bp, Homo sapiens
tagtacgaagagact

SEQ ID NO: 654597 - DNA, 15 bp, Homo sapiens
agtacgaagagactg

SEQ ID NO: 654598 - DNA, 15 bp, Homo sapiens
gtacgaagagactga

SEQ ID NO: 654599 - DNA, 15 bp, Homo sapiens
tacgaagagactgaa

SEQ ID NO: 654600 - DNA, 15 bp, Homo sapiens
acgaagagactgaag

SEQ ID NO: 654601 - DNA, 15 bp, Homo sapiens
cgaagagactgaagg

SEQ ID NO: 654602 - DNA, 15 bp, Homo sapiens
gaagagactgaagga

SEQ ID NO: 654603 - DNA, 15 bp, Homo sapiens
aagagactgaaggaa

SEQ ID NO: 654604 - DNA, 15 bp, Homo sapiens
agagactgaaggaag

SEQ ID NO: 654605 - DNA, 15 bp, Homo sapiens
gagactgaaggaagc

SEQ ID NO: 654606 - DNA, 15 bp, Homo sapiens
agactgaaggaagct

SEQ ID NO: 654607 - DNA, 15 bp, Homo sapiens
gactgaaggaagctg

SEQ ID NO: 654608 - DNA, 15 bp, Homo sapiens
actgaaggaagctgt

SEQ ID NO: 654609 - DNA, 15 bp, Homo sapiens
ctgaaggaagctgtc

SEQ ID NO: 654610 - DNA, 15 bp, Homo sapiens
tgaaggaagctgtca

SEQ ID NO: 654611 - DNA, 15 bp, Homo sapiens
gaaggaagctgtcag

SEQ ID NO: 654612 - DNA, 15 bp, Homo sapiens
aaggaagctgtcagc

SEQ ID NO: 654613 - DNA, 15 bp, Homo sapiens
aggaagctgtcagcc

SEQ ID NO: 654614 - DNA, 15 bp, Homo sapiens
ggaagctgtcagccc

SEQ ID NO: 654615 - DNA, 15 bp, Homo sapiens
gaagctgtcagccca

SEQ ID NO: 654616 - DNA, 15 bp, Homo sapiens
aagctgtcagcccac

SEQ ID NO: 654617 - DNA, 15 bp, Homo sapiens
agctgtcagcccaca

SEQ ID NO: 654618 - DNA, 15 bp, Homo sapiens
gctgtcagcccacaa

SEQ ID NO: 654619 - DNA, 15 bp, Homo sapiens
ctgtcagcccacaag

SEQ ID NO: 654620 - DNA, 15 bp, Homo sapiens
tgtcagcccacaaga

SEQ ID NO: 654621 - DNA, 15 bp, Homo sapiens
gtcagcccacaagac

SEQ ID NO: 654622 - DNA, 15 bp, Homo sapiens
tcagcccacaagaca

SEQ ID NO: 654623 - DNA, 15 bp, Homo sapiens
cagcccacaagacag

SEQ ID NO: 654624 - DNA, 15 bp, Homo sapiens
agcccacaagacagg

SEQ ID NO: 654625 - DNA, 15 bp, Homo sapiens
gcccacaagacaggc

SEQ ID NO: 654626 - DNA, 15 bp, Homo sapiens
cccacaagacaggca

SEQ ID NO: 654627 - DNA, 15 bp, Homo sapiens
ccacaagacaggcac

SEQ ID NO: 654628 - DNA, 15 bp, Homo sapiens
cacaagacaggcaca

SEQ ID NO: 654629 - DNA, 15 bp, Homo sapiens
acaagacaggcacac

SEQ ID NO: 654630 - DNA, 15 bp, Homo sapiens
caagacaggcacact

SEQ ID NO: 654631 - DNA, 15 bp, Homo sapiens
aagacaggcacactt

SEQ ID NO: 654632 - DNA, 15 bp, Homo sapiens
agacaggcacactta

SEQ ID NO: 654633 - DNA, 15 bp, Homo sapiens
gacaggcacacttaa

SEQ ID NO: 654634 - DNA, 15 bp, Homo sapiens
acaggcacacttaag

SEQ ID NO: 654635 - DNA, 15 bp, Homo sapiens
caggcacacttaaga

SEQ ID NO: 654636 - DNA, 15 bp, Homo sapiens
aggcacacttaagaa

SEQ ID NO: 654637 - DNA, 15 bp, Homo sapiens
ggcacacttaagaac

SEQ ID NO: 654638 - DNA, 15 bp, Homo sapiens
gcacacttaagaacc

SEQ ID NO: 654639 - DNA, 15 bp, Homo sapiens
cacacttaagaacct

SEQ ID NO: 654640 - DNA, 15 bp, Homo sapiens
acacttaagaacctt

SEQ ID NO: 654641 - DNA, 15 bp, Homo sapiens
cacttaagaaccttc

SEQ ID NO: 654642 - DNA, 15 bp, Homo sapiens
acttaagaaccttcc

SEQ ID NO: 654643 - DNA, 15 bp, Homo sapiens
cttaagaaccttcca

SEQ ID NO: 654644 - DNA, 15 bp, Homo sapiens
ttaagaaccttccac

SEQ ID NO: 654645 - DNA, 15 bp, Homo sapiens
taagaaccttccacc

SEQ ID NO: 654646 - DNA, 15 bp, Homo sapiens
aagaaccttccacca

SEQ ID NO: 654647 - DNA, 15 bp, Homo sapiens
agaaccttccaccac

SEQ ID NO: 654648 - DNA, 15 bp, Homo sapiens
gaaccttccaccacc

SEQ ID NO: 654649 - DNA, 15 bp, Homo sapiens
aaccttccaccaccc

SEQ ID NO: 654650 - DNA, 15 bp, Homo sapiens
accttccaccaccct

SEQ ID NO: 654651 - DNA, 15 bp, Homo sapiens
ccttccaccaccctt

SEQ ID NO: 654652 - DNA, 15 bp, Homo sapiens
cttccaccacccttt

SEQ ID NO: 654653 - DNA, 15 bp, Homo sapiens
ttccaccaccctttc

SEQ ID NO: 654654 - DNA, 15 bp, Homo sapiens
tccaccaccctttct

SEQ ID NO: 654655 - DNA, 15 bp, Homo sapiens
ccaccaccctttcta

SEQ ID NO: 654656 - DNA, 15 bp, Homo sapiens
caccaccctttctat

SEQ ID NO: 654657 - DNA, 15 bp, Homo sapiens
accaccctttctatg

SEQ ID NO: 654658 - DNA, 15 bp, Homo sapiens
ccaccctttctatgc

SEQ ID NO: 654659 - DNA, 15 bp, Homo sapiens
caccctttctatgcg

SEQ ID NO: 654660 - DNA, 15 bp, Homo sapiens
accctttctatgcgt

SEQ ID NO: 654661 - DNA, 15 bp, Homo sapiens
ccctttctatgcgtg

SEQ ID NO: 654662 - DNA, 15 bp, Homo sapiens
cctttctatgcgtgc

SEQ ID NO: 654663 - DNA, 15 bp, Homo sapiens
ctttctatgcgtgct

SEQ ID NO: 654664 - DNA, 15 bp, Homo sapiens
tttctatgcgtgctt

SEQ ID NO: 654665 - DNA, 15 bp, Homo sapiens
ttctatgcgtgcttg

SEQ ID NO: 654666 - DNA, 15 bp, Homo sapiens
tctatgcgtgcttgg

SEQ ID NO: 654667 - DNA, 15 bp, Homo sapiens
ctatgcgtgcttggc

SEQ ID NO: 654668 - DNA, 15 bp, Homo sapiens
tatgcgtgcttggcg

SEQ ID NO: 654669 - DNA, 15 bp, Homo sapiens
atgcgtgcttggcgc

SEQ ID NO: 654670 - DNA, 15 bp, Homo sapiens
tgcgtgcttggcgca

SEQ ID NO: 654671 - DNA, 15 bp, Homo sapiens
gcgtgcttggcgcaa

SEQ ID NO: 654672 - DNA, 15 bp, Homo sapiens
cgtgcttggcgcaaa

SEQ ID NO: 654673 - DNA, 15 bp, Homo sapiens
gtgcttggcgcaaag

SEQ ID NO: 654674 - DNA, 15 bp, Homo sapiens
tgcttggcgcaaagg

SEQ ID NO: 654675 - DNA, 15 bp, Homo sapiens
gcttggcgcaaaggc

SEQ ID NO: 654676 - DNA, 15 bp, Homo sapiens
cttggcgcaaaggct

SEQ ID NO: 654677 - DNA, 15 bp, Homo sapiens
ttggcgcaaaggctg

SEQ ID NO: 654678 - DNA, 15 bp, Homo sapiens
tggcgcaaaggctga

SEQ ID NO: 654679 - DNA, 15 bp, Homo sapiens
ggcgcaaaggctgag

SEQ ID NO: 654680 - DNA, 15 bp, Homo sapiens
gcgcaaaggctgagg

SEQ ID NO: 654681 - DNA, 15 bp, Homo sapiens
cgcaaaggctgaggc

SEQ ID NO: 654682 - DNA, 15 bp, Homo sapiens
gcaaaggctgaggca

SEQ ID NO: 654683 - DNA, 15 bp, Homo sapiens
caaaggctgaggcaa

SEQ ID NO: 654684 - DNA, 15 bp, Homo sapiens
aaaggctgaggcaat

SEQ ID NO: 654685 - DNA, 15 bp, Homo sapiens
aaggctgaggcaata

SEQ ID NO: 654686 - DNA, 15 bp, Homo sapiens
aggctgaggcaataa

SEQ ID NO: 654687 - DNA, 15 bp, Homo sapiens
ggctgaggcaataaa

SEQ ID NO: 654688 - DNA, 15 bp, Homo sapiens
gctgaggcaataaag

SEQ ID NO: 654689 - DNA, 15 bp, Homo sapiens
ctgaggcaataaagc

SEQ ID NO: 654690 - DNA, 15 bp, Homo sapiens
tgaggcaataaagct

SEQ ID NO: 654691 - DNA, 15 bp, Homo sapiens
gaggcaataaagctc

SEQ ID NO: 654692 - DNA, 15 bp, Homo sapiens
aggcaataaagctcc

SEQ ID NO: 654693 - DNA, 15 bp, Homo sapiens
ggcaataaagctccg

SEQ ID NO: 654694 - DNA, 15 bp, Homo sapiens
gcaataaagctccga

SEQ ID NO: 654695 - DNA, 15 bp, Homo sapiens
caataaagctccgag

SEQ ID NO: 654696 - DNA, 15 bp, Homo sapiens
aataaagctccgaga

SEQ ID NO: 654697 - DNA, 15 bp, Homo sapiens
ataaagctccgagac

SEQ ID NO: 654698 - DNA, 15 bp, Homo sapiens
taaagctccgagact

SEQ ID NO: 654699 - DNA, 15 bp, Homo sapiens
aaagctccgagactc

SEQ ID NO: 654700 - DNA, 15 bp, Homo sapiens
aagctccgagactct

SEQ ID NO: 654701 - DNA, 15 bp, Homo sapiens
agctccgagactctg

SEQ ID NO: 654702 - DNA, 15 bp, Homo sapiens
gctccgagactctga

SEQ ID NO: 654703 - DNA, 15 bp, Homo sapiens
ctccgagactctgag

SEQ ID NO: 654704 - DNA, 15 bp, Homo sapiens
tccgagactctgagt

SEQ ID NO: 654705 - DNA, 15 bp, Homo sapiens
ccgagactctgagta

SEQ ID NO: 654706 - DNA, 15 bp, Homo sapiens
cgagactctgagtat

SEQ ID NO: 654707 - DNA, 15 bp, Homo sapiens
gagactctgagtatg

SEQ ID NO: 654708 - DNA, 15 bp, Homo sapiens
agactctgagtatga

SEQ ID NO: 654709 - DNA, 15 bp, Homo sapiens
gactctgagtatgag

SEQ ID NO: 654710 - DNA, 15 bp, Homo sapiens
actctgagtatgagc

SEQ ID NO: 654711 - DNA, 15 bp, Homo sapiens
ctctgagtatgagcc

SEQ ID NO: 654712 - DNA, 15 bp, Homo sapiens
tctgagtatgagcca

SEQ ID NO: 654713 - DNA, 15 bp, Homo sapiens
ctgagtatgagccag

SEQ ID NO: 654714 - DNA, 15 bp, Homo sapiens
tgagtatgagccagt

SEQ ID NO: 654715 - DNA, 15 bp, Homo sapiens
gagtatgagccagtg

SEQ ID NO: 654716 - DNA, 15 bp, Homo sapiens
agtatgagccagtgt

SEQ ID NO: 654717 - DNA, 15 bp, Homo sapiens
gtatgagccagtgtg

SEQ ID NO: 654718 - DNA, 15 bp, Homo sapiens
tatgagccagtgtgg

SEQ ID NO: 654719 - DNA, 15 bp, Homo sapiens
atgagccagtgtgga

SEQ ID NO: 654720 - DNA, 15 bp, Homo sapiens
tgagccagtgtggag

SEQ ID NO: 654721 - DNA, 15 bp, Homo sapiens
gagccagtgtggaga

SEQ ID NO: 654722 - DNA, 15 bp, Homo sapiens
agccagtgtggagaa

SEQ ID NO: 654723 - DNA, 15 bp, Homo sapiens
gccagtgtggagaaa

SEQ ID NO: 654724 - DNA, 15 bp, Homo sapiens
ccagtgtggagaaat

SEQ ID NO: 654725 - DNA, 15 bp, Homo sapiens
cagtgtggagaaata

SEQ ID NO: 654726 - DNA, 15 bp, Homo sapiens
agtgtggagaaatag

SEQ ID NO: 654727 - DNA, 15 bp, Homo sapiens
gtgtggagaaatagc

SEQ ID NO: 654728 - DNA, 15 bp, Homo sapiens
tgtggagaaatagcg

SEQ ID NO: 654729 - DNA, 15 bp, Homo sapiens
gtggagaaatagcgg

SEQ ID NO: 654730 - DNA, 15 bp, Homo sapiens
tggagaaatagcgga

SEQ ID NO: 654731 - DNA, 15 bp, Homo sapiens
ggagaaatagcggag

SEQ ID NO: 654732 - DNA, 15 bp, Homo sapiens
gagaaatagcggagt

SEQ ID NO: 654733 - DNA, 15 bp, Homo sapiens
agaaatagcggagtg

SEQ ID NO: 654734 - DNA, 15 bp, Homo sapiens
gaaatagcggagtga

SEQ ID NO: 654735 - DNA, 15 bp, Homo sapiens
aaatagcggagtgaa

SEQ ID NO: 654736 - DNA, 15 bp, Homo sapiens
aatagcggagtgaac

SEQ ID NO: 654737 - DNA, 15 bp, Homo sapiens
atagcggagtgaaca

SEQ ID NO: 654738 - DNA, 15 bp, Homo sapiens
tagcggagtgaacac

SEQ ID NO: 654739 - DNA, 15 bp, Homo sapiens
agcggagtgaacaca

SEQ ID NO: 654740 - DNA, 15 bp, Homo sapiens
gcggagtgaacacag

SEQ ID NO: 654741 - DNA, 15 bp, Homo sapiens
cggagtgaacacagg

SEQ ID NO: 654742 - DNA, 15 bp, Homo sapiens
ggagtgaacacagga

SEQ ID NO: 654743 - DNA, 15 bp, Homo sapiens
gagtgaacacaggat

SEQ ID NO: 654744 - DNA, 15 bp, Homo sapiens
agtgaacacaggatt

SEQ ID NO: 654745 - DNA, 15 bp, Homo sapiens
gtgaacacaggattg

SEQ ID NO: 654746 - DNA, 15 bp, Homo sapiens
tgaacacaggattgc

SEQ ID NO: 654747 - DNA, 15 bp, Homo sapiens
gaacacaggattgcc

SEQ ID NO: 654748 - DNA, 15 bp, Homo sapiens
aacacaggattgcct

SEQ ID NO: 654749 - DNA, 15 bp, Homo sapiens
acacaggattgcctg

SEQ ID NO: 654750 - DNA, 15 bp, Homo sapiens
cacaggattgcctgt

SEQ ID NO: 654751 - DNA, 15 bp, Homo sapiens
acaggattgcctgtt

SEQ ID NO: 654752 - DNA, 15 bp, Homo sapiens
caggattgcctgttc

SEQ ID NO: 654753 - DNA, 15 bp, Homo sapiens
aggattgcctgttca

SEQ ID NO: 654754 - DNA, 15 bp, Homo sapiens
ggattgcctgttcaa

SEQ ID NO: 654755 - DNA, 15 bp, Homo sapiens
gattgcctgttcaat

SEQ ID NO: 654756 - DNA, 15 bp, Homo sapiens
attgcctgttcaatt

SEQ ID NO: 654757 - DNA, 15 bp, Homo sapiens
ttgcctgttcaattt

SEQ ID NO: 654758 - DNA, 15 bp, Homo sapiens
tgcctgttcaatttc

SEQ ID NO: 654759 - DNA, 15 bp, Homo sapiens
gcctgttcaatttcc

SEQ ID NO: 654760 - DNA, 15 bp, Homo sapiens
cctgttcaatttcct

SEQ ID NO: 654761 - DNA, 15 bp, Homo sapiens
ctgttcaatttcctc

SEQ ID NO: 654762 - DNA, 15 bp, Homo sapiens
tgttcaatttcctct

SEQ ID NO: 654763 - DNA, 15 bp, Homo sapiens
gttcaatttcctctc

SEQ ID NO: 654764 - DNA, 15 bp, Homo sapiens
ttcaatttcctctcg

SEQ ID NO: 654765 - DNA, 15 bp, Homo sapiens
tcaatttcctctcgc

SEQ ID NO: 654766 - DNA, 15 bp, Homo sapiens
caatttcctctcgca

SEQ ID NO: 654767 - DNA, 15 bp, Homo sapiens
aatttcctctcgcat

SEQ ID NO: 654768 - DNA, 15 bp, Homo sapiens
atttcctctcgcata

SEQ ID NO: 654769 - DNA, 15 bp, Homo sapiens
tttcctctcgcatag

SEQ ID NO: 654770 - DNA, 15 bp, Homo sapiens
ttcctctcgcatagt

SEQ ID NO: 654771 - DNA, 15 bp, Homo sapiens
tcctctcgcatagtg

SEQ ID NO: 654772 - DNA, 15 bp, Homo sapiens
cctctcgcatagtga

SEQ ID NO: 654773 - DNA, 15 bp, Homo sapiens
ctctcgcatagtgat

SEQ ID NO: 654774 - DNA, 15 bp, Homo sapiens
tctcgcatagtgatt

SEQ ID NO: 654775 - DNA, 15 bp, Homo sapiens
ctcgcatagtgattc

SEQ ID NO: 654776 - DNA, 15 bp, Homo sapiens
tcgcatagtgattca

SEQ ID NO: 654777 - DNA, 15 bp, Homo sapiens
cgcatagtgattcat

SEQ ID NO: 654778 - DNA, 15 bp, Homo sapiens
gcatagtgattcatt

SEQ ID NO: 654779 - DNA, 15 bp, Homo sapiens
catagtgattcattc

SEQ ID NO: 654780 - DNA, 15 bp, Homo sapiens
atagtgattcattcc

SEQ ID NO: 654781 - DNA, 15 bp, Homo sapiens
tagtgattcattcca

SEQ ID NO: 654782 - DNA, 15 bp, Homo sapiens
agtgattcattccac

SEQ ID NO: 654783 - DNA, 15 bp, Homo sapiens
gtgattcattccaca

SEQ ID NO: 654784 - DNA, 15 bp, Homo sapiens
tgattcattccacat

SEQ ID NO: 654785 - DNA, 15 bp, Homo sapiens
gattcattccacatt

SEQ ID NO: 654786 - DNA, 15 bp, Homo sapiens
attcattccacattc

SEQ ID NO: 654787 - DNA, 15 bp, Homo sapiens
ttcattccacattcc

SEQ ID NO: 654788 - DNA, 15 bp, Homo sapiens
tcattccacattcca

SEQ ID NO: 654789 - DNA, 15 bp, Homo sapiens
cattccacattccaa

SEQ ID NO: 654790 - DNA, 15 bp, Homo sapiens
attccacattccaat

SEQ ID NO: 654791 - DNA, 15 bp, Homo sapiens
ttccacattccaatt

SEQ ID NO: 654792 - DNA, 15 bp, Homo sapiens
tccacattccaattt

SEQ ID NO: 654793 - DNA, 15 bp, Homo sapiens
ccacattccaatttg

SEQ ID NO: 654794 - DNA, 15 bp, Homo sapiens
cacattccaatttgg

SEQ ID NO: 654795 - DNA, 15 bp, Homo sapiens
acattccaatttggt

SEQ ID NO: 654796 - DNA, 15 bp, Homo sapiens
cattccaatttggtg

SEQ ID NO: 654797 - DNA, 15 bp, Homo sapiens
attccaatttggtgt

SEQ ID NO: 654798 - DNA, 15 bp, Homo sapiens
ttccaatttggtgta

SEQ ID NO: 654799 - DNA, 15 bp, Homo sapiens
tccaatttggtgtac

SEQ ID NO: 654800 - DNA, 15 bp, Homo sapiens
ccaatttggtgtact

SEQ ID NO: 654801 - DNA, 15 bp, Homo sapiens
caatttggtgtactc

SEQ ID NO: 654802 - DNA, 15 bp, Homo sapiens
aatttggtgtactct

SEQ ID NO: 654803 - DNA, 15 bp, Homo sapiens
atttggtgtactctc

SEQ ID NO: 654804 - DNA, 15 bp, Homo sapiens
tttggtgtactctca

SEQ ID NO: 654805 - DNA, 15 bp, Homo sapiens
ttggtgtactctcat

SEQ ID NO: 654806 - DNA, 15 bp, Homo sapiens
tggtgtactctcatt

SEQ ID NO: 654807 - DNA, 15 bp, Homo sapiens
ggtgtactctcattt

SEQ ID NO: 654808 - DNA, 15 bp, Homo sapiens
gtgtactctcatttg

SEQ ID NO: 654809 - DNA, 15 bp, Homo sapiens
tgtactctcatttgc

SEQ ID NO: 654810 - DNA, 15 bp, Homo sapiens
gtactctcatttgca

SEQ ID NO: 654811 - DNA, 15 bp, Homo sapiens
tactctcatttgcag

SEQ ID NO: 654812 - DNA, 15 bp, Homo sapiens
actctcatttgcagg

SEQ ID NO: 654813 - DNA, 15 bp, Homo sapiens
ctctcatttgcaggg

SEQ ID NO: 654814 - DNA, 15 bp, Homo sapiens
tctcatttgcagggg

SEQ ID NO: 654815 - DNA, 15 bp, Homo sapiens
ctcatttgcaggggt

SEQ ID NO: 654816 - DNA, 15 bp, Homo sapiens
tcatttgcaggggtg

SEQ ID NO: 654817 - DNA, 15 bp, Homo sapiens
catttgcaggggtgg

SEQ ID NO: 654818 - DNA, 15 bp, Homo sapiens
atttgcaggggtgga

SEQ ID NO: 654819 - DNA, 15 bp, Homo sapiens
tttgcaggggtggat

SEQ ID NO: 654820 - DNA, 15 bp, Homo sapiens
ttgcaggggtggata

SEQ ID NO: 654821 - DNA, 15 bp, Homo sapiens
tgcaggggtggatag

SEQ ID NO: 654822 - DNA, 15 bp, Homo sapiens
gcaggggtggatagt

SEQ ID NO: 654823 - DNA, 15 bp, Homo sapiens
caggggtggatagtt

SEQ ID NO: 654824 - DNA, 15 bp, Homo sapiens
aggggtggatagttc

SEQ ID NO: 654825 - DNA, 15 bp, Homo sapiens
ggggtggatagttca

SEQ ID NO: 654826 - DNA, 15 bp, Homo sapiens
gggtggatagttcag

SEQ ID NO: 654827 - DNA, 15 bp, Homo sapiens
ggtggatagttcagt

SEQ ID NO: 654828 - DNA, 15 bp, Homo sapiens
gtggatagttcagtt

SEQ ID NO: 654829 - DNA, 15 bp, Homo sapiens
tggatagttcagttt

SEQ ID NO: 654830 - DNA, 15 bp, Homo sapiens
ggatagttcagtttt

SEQ ID NO: 654831 - DNA, 15 bp, Homo sapiens
gatagttcagttttc

SEQ ID NO: 654832 - DNA, 15 bp, Homo sapiens
atagttcagttttct

SEQ ID NO: 654833 - DNA, 15 bp, Homo sapiens
tagttcagttttctg

SEQ ID NO: 654834 - DNA, 15 bp, Homo sapiens
agttcagttttctgg

SEQ ID NO: 654835 - DNA, 15 bp, Homo sapiens
gttcagttttctggc

SEQ ID NO: 654836 - DNA, 15 bp, Homo sapiens
ttcagttttctggcc

SEQ ID NO: 654837 - DNA, 15 bp, Homo sapiens
tcagttttctggccg

SEQ ID NO: 654838 - DNA, 15 bp, Homo sapiens
cagttttctggccgt

SEQ ID NO: 654839 - DNA, 15 bp, Homo sapiens
agttttctggccgtg

SEQ ID NO: 654840 - DNA, 15 bp, Homo sapiens
gttttctggccgtga

SEQ ID NO: 654841 - DNA, 15 bp, Homo sapiens
ttttctggccgtgaa

SEQ ID NO: 654842 - DNA, 15 bp, Homo sapiens
tttctggccgtgaag

SEQ ID NO: 654843 - DNA, 15 bp, Homo sapiens
ttctggccgtgaagc

SEQ ID NO: 654844 - DNA, 15 bp, Homo sapiens
tctggccgtgaagct

SEQ ID NO: 654845 - DNA, 15 bp, Homo sapiens
ctggccgtgaagctt

SEQ ID NO: 654846 - DNA, 15 bp, Homo sapiens
tggccgtgaagcttt

SEQ ID NO: 654847 - DNA, 15 bp, Homo sapiens
ggccgtgaagctttt

SEQ ID NO: 654848 - DNA, 15 bp, Homo sapiens
gccgtgaagcttttg

SEQ ID NO: 654849 - DNA, 15 bp, Homo sapiens
ccgtgaagcttttgc

SEQ ID NO: 654850 - DNA, 15 bp, Homo sapiens
cgtgaagcttttgca

SEQ ID NO: 654851 - DNA, 15 bp, Homo sapiens
gtgaagcttttgcaa

SEQ ID NO: 654852 - DNA, 15 bp, Homo sapiens
tgaagcttttgcaat

SEQ ID NO: 654853 - DNA, 15 bp, Homo sapiens
gaagcttttgcaatt

SEQ ID NO: 654854 - DNA, 15 bp, Homo sapiens
aagcttttgcaattt

SEQ ID NO: 654855 - DNA, 15 bp, Homo sapiens
agcttttgcaattta

SEQ ID NO: 654856 - DNA, 15 bp, Homo sapiens
gcttttgcaatttaa

SEQ ID NO: 654857 - DNA, 15 bp, Homo sapiens
cttttgcaatttaat

SEQ ID NO: 654858 - DNA, 15 bp, Homo sapiens
ttttgcaatttaatg

SEQ ID NO: 654859 - DNA, 15 bp, Homo sapiens
tttgcaatttaatgg

SEQ ID NO: 654860 - DNA, 15 bp, Homo sapiens
ttgcaatttaatggt

SEQ ID NO: 654861 - DNA, 15 bp, Homo sapiens
tgcaatttaatggtt

SEQ ID NO: 654862 - DNA, 15 bp, Homo sapiens
gcaatttaatggttc

SEQ ID NO: 654863 - DNA, 15 bp, Homo sapiens
caatttaatggttcc

SEQ ID NO: 654864 - DNA, 15 bp, Homo sapiens
aatttaatggttccc

SEQ ID NO: 654865 - DNA, 15 bp, Homo sapiens
atttaatggttcccc

SEQ ID NO: 654866 - DNA, 15 bp, Homo sapiens
tttaatggttcccct

SEQ ID NO: 654867 - DNA, 15 bp, Homo sapiens
ttaatggttcccctg

SEQ ID NO: 654868 - DNA, 15 bp, Homo sapiens
taatggttcccctga

SEQ ID NO: 654869 - DNA, 15 bp, Homo sapiens
aatggttcccctgag

SEQ ID NO: 654870 - DNA, 15 bp, Homo sapiens
atggttcccctgagc

SEQ ID NO: 654871 - DNA, 15 bp, Homo sapiens
tggttcccctgagcc

SEQ ID NO: 654872 - DNA, 15 bp, Homo sapiens
ggttcccctgagcca

SEQ ID NO: 654873 - DNA, 15 bp, Homo sapiens
gttcccctgagccat

SEQ ID NO: 654874 - DNA, 15 bp, Homo sapiens
ttcccctgagccatg

SEQ ID NO: 654875 - DNA, 15 bp, Homo sapiens
tcccctgagccatgc

SEQ ID NO: 654876 - DNA, 15 bp, Homo sapiens
cccctgagccatgct

SEQ ID NO: 654877 - DNA, 15 bp, Homo sapiens
ccctgagccatgctt

SEQ ID NO: 654878 - DNA, 15 bp, Homo sapiens
cctgagccatgcttt

SEQ ID NO: 654879 - DNA, 15 bp, Homo sapiens
ctgagccatgctttc

SEQ ID NO: 654880 - DNA, 15 bp, Homo sapiens
tgagccatgctttcc

SEQ ID NO: 654881 - DNA, 15 bp, Homo sapiens
gagccatgctttcca

SEQ ID NO: 654882 - DNA, 15 bp, Homo sapiens
agccatgctttccac

SEQ ID NO: 654883 - DNA, 15 bp, Homo sapiens
gccatgctttccaca

SEQ ID NO: 654884 - DNA, 15 bp, Homo sapiens
ccatgctttccacac

SEQ ID NO: 654885 - DNA, 15 bp, Homo sapiens
catgctttccacaca

SEQ ID NO: 654886 - DNA, 15 bp, Homo sapiens
atgctttccacacac

SEQ ID NO: 654887 - DNA, 15 bp, Homo sapiens
tgctttccacacaca

SEQ ID NO: 654888 - DNA, 15 bp, Homo sapiens
gctttccacacacac

SEQ ID NO: 654889 - DNA, 15 bp, Homo sapiens
ctttccacacacaca

SEQ ID NO: 654890 - DNA, 15 bp, Homo sapiens
tttccacacacacag

SEQ ID NO: 654891 - DNA, 15 bp, Homo sapiens
ttccacacacacagg

SEQ ID NO: 654892 - DNA, 15 bp, Homo sapiens
tccacacacacagga

SEQ ID NO: 654893 - DNA, 15 bp, Homo sapiens
ccacacacacaggag

SEQ ID NO: 654894 - DNA, 15 bp, Homo sapiens
cacacacacaggagc

SEQ ID NO: 654895 - DNA, 15 bp, Homo sapiens
acacacacaggagct

SEQ ID NO: 654896 - DNA, 15 bp, Homo sapiens
cacacacaggagcta

SEQ ID NO: 654897 - DNA, 15 bp, Homo sapiens
acacacaggagctat

SEQ ID NO: 654898 - DNA, 15 bp, Homo sapiens
cacacaggagctatg

SEQ ID NO: 654899 - DNA, 15 bp, Homo sapiens
acacaggagctatga

SEQ ID NO: 654900 - DNA, 15 bp, Homo sapiens
cacaggagctatgat

SEQ ID NO: 654901 - DNA, 15 bp, Homo sapiens
acaggagctatgatg

SEQ ID NO: 654902 - DNA, 15 bp, Homo sapiens
caggagctatgatgg

SEQ ID NO: 654903 - DNA, 15 bp, Homo sapiens
aggagctatgatggt

SEQ ID NO: 654904 - DNA, 15 bp, Homo sapiens
ggagctatgatggtt

SEQ ID NO: 654905 - DNA, 15 bp, Homo sapiens
gagctatgatggttt

SEQ ID NO: 654906 - DNA, 15 bp, Homo sapiens
agctatgatggtttt

SEQ ID NO: 654907 - DNA, 15 bp, Homo sapiens
gctatgatggtttta

SEQ ID NO: 654908 - DNA, 15 bp, Homo sapiens
ctatgatggttttaa

SEQ ID NO: 654909 - DNA, 15 bp, Homo sapiens
tatgatggttttaat

SEQ ID NO: 654910 - DNA, 15 bp, Homo sapiens
atgatggttttaatg

SEQ ID NO: 654911 - DNA, 15 bp, Homo sapiens
tgatggttttaatgg

SEQ ID NO: 654912 - DNA, 15 bp, Homo sapiens
gatggttttaatggc

SEQ ID NO: 654913 - DNA, 15 bp, Homo sapiens
atggttttaatggca

SEQ ID NO: 654914 - DNA, 15 bp, Homo sapiens
tggttttaatggcac

SEQ ID NO: 654915 - DNA, 15 bp, Homo sapiens
ggttttaatggcaca

SEQ ID NO: 654916 - DNA, 15 bp, Homo sapiens
gttttaatggcacat

SEQ ID NO: 654917 - DNA, 15 bp, Homo sapiens
ttttaatggcacatg

SEQ ID NO: 654918 - DNA, 15 bp, Homo sapiens
tttaatggcacatgc

SEQ ID NO: 654919 - DNA, 15 bp, Homo sapiens
ttaatggcacatgcc

SEQ ID NO: 654920 - DNA, 15 bp, Homo sapiens
taatggcacatgcct

SEQ ID NO: 654921 - DNA, 15 bp, Homo sapiens
aatggcacatgcctt

SEQ ID NO: 654922 - DNA, 15 bp, Homo sapiens
atggcacatgccttt

SEQ ID NO: 654923 - DNA, 15 bp, Homo sapiens
tggcacatgcctttg

SEQ ID NO: 654924 - DNA, 15 bp, Homo sapiens
ggcacatgcctttgc

SEQ ID NO: 654925 - DNA, 15 bp, Homo sapiens
gcacatgcctttgct

SEQ ID NO: 654926 - DNA, 15 bp, Homo sapiens
cacatgcctttgctc

SEQ ID NO: 654927 - DNA, 15 bp, Homo sapiens
acatgcctttgctct

SEQ ID NO: 654928 - DNA, 15 bp, Homo sapiens
catgcctttgctctt

SEQ ID NO: 654929 - DNA, 15 bp, Homo sapiens
atgcctttgctcttc

SEQ ID NO: 654930 - DNA, 15 bp, Homo sapiens
tgcctttgctcttca

SEQ ID NO: 654931 - DNA, 15 bp, Homo sapiens
gcctttgctcttcat

SEQ ID NO: 654932 - DNA, 15 bp, Homo sapiens
cctttgctcttcata

SEQ ID NO: 654933 - DNA, 15 bp, Homo sapiens
ctttgctcttcatac

SEQ ID NO: 654934 - DNA, 15 bp, Homo sapiens
tttgctcttcatact

SEQ ID NO: 654935 - DNA, 15 bp, Homo sapiens
ttgctcttcatactt

SEQ ID NO: 654936 - DNA, 15 bp, Homo sapiens
tgctcttcatacttt

SEQ ID NO: 654937 - DNA, 15 bp, Homo sapiens
gctcttcatacttta

SEQ ID NO: 654938 - DNA, 15 bp, Homo sapiens
ctcttcatactttag

SEQ ID NO: 654939 - DNA, 15 bp, Homo sapiens
tcttcatactttaga

SEQ ID NO: 654940 - DNA, 15 bp, Homo sapiens
cttcatactttagag

SEQ ID NO: 654941 - DNA, 15 bp, Homo sapiens
ttcatactttagagt

SEQ ID NO: 654942 - DNA, 15 bp, Homo sapiens
tcatactttagagtc

SEQ ID NO: 654943 - DNA, 15 bp, Homo sapiens
catactttagagtcc

SEQ ID NO: 654944 - DNA, 15 bp, Homo sapiens
atactttagagtccc

SEQ ID NO: 654945 - DNA, 15 bp, Homo sapiens
tactttagagtcccc

SEQ ID NO: 654946 - DNA, 15 bp, Homo sapiens
actttagagtccccc

SEQ ID NO: 654947 - DNA, 15 bp, Homo sapiens
ctttagagtccccca

SEQ ID NO: 654948 - DNA, 15 bp, Homo sapiens
tttagagtcccccag

SEQ ID NO: 654949 - DNA, 15 bp, Homo sapiens
ttagagtcccccagg

SEQ ID NO: 654950 - DNA, 15 bp, Homo sapiens
tagagtcccccaggc

SEQ ID NO: 654951 - DNA, 15 bp, Homo sapiens
agagtcccccaggct

SEQ ID NO: 654952 - DNA, 15 bp, Homo sapiens
gagtcccccaggctt

SEQ ID NO: 654953 - DNA, 15 bp, Homo sapiens
agtcccccaggcttg

SEQ ID NO: 654954 - DNA, 15 bp, Homo sapiens
gtcccccaggcttgg

SEQ ID NO: 654955 - DNA, 15 bp, Homo sapiens
tcccccaggcttggg

SEQ ID NO: 654956 - DNA, 15 bp, Homo sapiens
cccccaggcttgggg

SEQ ID NO: 654957 - DNA, 15 bp, Homo sapiens
ccccaggcttggggc

SEQ ID NO: 654958 - DNA, 15 bp, Homo sapiens
cccaggcttggggca

SEQ ID NO: 654959 - DNA, 15 bp, Homo sapiens
ccaggcttggggcaa

SEQ ID NO: 654960 - DNA, 15 bp, Homo sapiens
caggcttggggcaag

SEQ ID NO: 654961 - DNA, 15 bp, Homo sapiens
aggcttggggcaagt

SEQ ID NO: 654962 - DNA, 15 bp, Homo sapiens
ggcttggggcaagtg

SEQ ID NO: 654963 - DNA, 15 bp, Homo sapiens
gcttggggcaagtgt

SEQ ID NO: 654964 - DNA, 15 bp, Homo sapiens
cttggggcaagtgtc

SEQ ID NO: 654965 - DNA, 15 bp, Homo sapiens
ttggggcaagtgtct

SEQ ID NO: 654966 - DNA, 15 bp, Homo sapiens
tggggcaagtgtctt

SEQ ID NO: 654967 - DNA, 15 bp, Homo sapiens
ggggcaagtgtcttt

SEQ ID NO: 654968 - DNA, 15 bp, Homo sapiens
gggcaagtgtctttc

SEQ ID NO: 654969 - DNA, 15 bp, Homo sapiens
ggcaagtgtctttcc

SEQ ID NO: 654970 - DNA, 15 bp, Homo sapiens
gcaagtgtctttccc

SEQ ID NO: 654971 - DNA, 15 bp, Homo sapiens
caagtgtctttccca

SEQ ID NO: 654972 - DNA, 15 bp, Homo sapiens
aagtgtctttcccaa

SEQ ID NO: 654973 - DNA, 15 bp, Homo sapiens
agtgtctttcccaac

SEQ ID NO: 654974 - DNA, 15 bp, Homo sapiens
gtgtctttcccaacc

SEQ ID NO: 654975 - DNA, 15 bp, Homo sapiens
tgtctttcccaacca

SEQ ID NO: 654976 - DNA, 15 bp, Homo sapiens
gtctttcccaaccag

SEQ ID NO: 654977 - DNA, 15 bp, Homo sapiens
tctttcccaaccaga

SEQ ID NO: 654978 - DNA, 15 bp, Homo sapiens
ctttcccaaccagaa

SEQ ID NO: 654979 - DNA, 15 bp, Homo sapiens
tttcccaaccagaat

SEQ ID NO: 654980 - DNA, 15 bp, Homo sapiens
ttcccaaccagaatt

SEQ ID NO: 654981 - DNA, 15 bp, Homo sapiens
tcccaaccagaatta

SEQ ID NO: 654982 - DNA, 15 bp, Homo sapiens
cccaaccagaattat

SEQ ID NO: 654983 - DNA, 15 bp, Homo sapiens
ccaaccagaattatg

SEQ ID NO: 654984 - DNA, 15 bp, Homo sapiens
caaccagaattatga

SEQ ID NO: 654985 - DNA, 15 bp, Homo sapiens
aaccagaattatgaa

SEQ ID NO: 654986 - DNA, 15 bp, Homo sapiens
accagaattatgaac

SEQ ID NO: 654987 - DNA, 15 bp, Homo sapiens
ccagaattatgaact

SEQ ID NO: 654988 - DNA, 15 bp, Homo sapiens
cagaattatgaacta

SEQ ID NO: 654989 - DNA, 15 bp, Homo sapiens
agaattatgaactac

SEQ ID NO: 654990 - DNA, 15 bp, Homo sapiens
gaattatgaactaca

SEQ ID NO: 654991 - DNA, 15 bp, Homo sapiens
aattatgaactacag

SEQ ID NO: 654992 - DNA, 15 bp, Homo sapiens
attatgaactacagt

SEQ ID NO: 654993 - DNA, 15 bp, Homo sapiens
ttatgaactacagtt

SEQ ID NO: 654994 - DNA, 15 bp, Homo sapiens
tatgaactacagttt

SEQ ID NO: 654995 - DNA, 15 bp, Homo sapiens
atgaactacagttta

SEQ ID NO: 654996 - DNA, 15 bp, Homo sapiens
tgaactacagtttag

SEQ ID NO: 654997 - DNA, 15 bp, Homo sapiens
gaactacagtttagg

SEQ ID NO: 654998 - DNA, 15 bp, Homo sapiens
aactacagtttaggt

SEQ ID NO: 654999 - DNA, 15 bp, Homo sapiens
actacagtttaggtt

SEQ ID NO: 655000 - DNA, 15 bp, Homo sapiens
ctacagtttaggttt

SEQ ID NO: 655001 - DNA, 15 bp, Homo sapiens
tacagtttaggtttt

SEQ ID NO: 655002 - DNA, 15 bp, Homo sapiens
acagtttaggttttg

SEQ ID NO: 655003 - DNA, 15 bp, Homo sapiens
cagtttaggttttgg

SEQ ID NO: 655004 - DNA, 15 bp, Homo sapiens
agtttaggttttgga

SEQ ID NO: 655005 - DNA, 15 bp, Homo sapiens
gtttaggttttggat

SEQ ID NO: 655006 - DNA, 15 bp, Homo sapiens
tttaggttttggata

SEQ ID NO: 655007 - DNA, 15 bp, Homo sapiens
ttaggttttggatac

SEQ ID NO: 655008 - DNA, 15 bp, Homo sapiens
taggttttggataca

SEQ ID NO: 655009 - DNA, 15 bp, Homo sapiens
aggttttggatacac

SEQ ID NO: 655010 - DNA, 15 bp, Homo sapiens
ggttttggatacact

SEQ ID NO: 655011 - DNA, 15 bp, Homo sapiens
gttttggatacactt

SEQ ID NO: 655012 - DNA, 15 bp, Homo sapiens
ttttggatacactta

SEQ ID NO: 655013 - DNA, 15 bp, Homo sapiens
tttggatacacttag

SEQ ID NO: 655014 - DNA, 15 bp, Homo sapiens
ttggatacacttagg

SEQ ID NO: 655015 - DNA, 15 bp, Homo sapiens
tggatacacttaggt

SEQ ID NO: 655016 - DNA, 15 bp, Homo sapiens
ggatacacttaggtt

SEQ ID NO: 655017 - DNA, 15 bp, Homo sapiens
gatacacttaggttt

SEQ ID NO: 655018 - DNA, 15 bp, Homo sapiens
atacacttaggtttt

SEQ ID NO: 655019 - DNA, 15 bp, Homo sapiens
tacacttaggtttta

SEQ ID NO: 655020 - DNA, 15 bp, Homo sapiens
acacttaggttttag

SEQ ID NO: 655021 - DNA, 15 bp, Homo sapiens
cacttaggttttagc

SEQ ID NO: 655022 - DNA, 15 bp, Homo sapiens
acttaggttttagct

SEQ ID NO: 655023 - DNA, 15 bp, Homo sapiens
cttaggttttagcta

SEQ ID NO: 655024 - DNA, 15 bp, Homo sapiens
ttaggttttagctac

SEQ ID NO: 655025 - DNA, 15 bp, Homo sapiens
taggttttagctaca

SEQ ID NO: 655026 - DNA, 15 bp, Homo sapiens
aggttttagctacac

SEQ ID NO: 655027 - DNA, 15 bp, Homo sapiens
ggttttagctacaca

SEQ ID NO: 655028 - DNA, 15 bp, Homo sapiens
gttttagctacacat

SEQ ID NO: 655029 - DNA, 15 bp, Homo sapiens
ttttagctacacatt

SEQ ID NO: 655030 - DNA, 15 bp, Homo sapiens
tttagctacacattt

SEQ ID NO: 655031 - DNA, 15 bp, Homo sapiens
ttagctacacatttt

SEQ ID NO: 655032 - DNA, 15 bp, Homo sapiens
tagctacacatttta

SEQ ID NO: 655033 - DNA, 15 bp, Homo sapiens
agctacacattttaa

SEQ ID NO: 655034 - DNA, 15 bp, Homo sapiens
gctacacattttaaa

SEQ ID NO: 655035 - DNA, 15 bp, Homo sapiens
ctacacattttaaag

SEQ ID NO: 655036 - DNA, 15 bp, Homo sapiens
tacacattttaaagt

SEQ ID NO: 655037 - DNA, 15 bp, Homo sapiens
acacattttaaagtg

SEQ ID NO: 655038 - DNA, 15 bp, Homo sapiens
cacattttaaagtgt

SEQ ID NO: 655039 - DNA, 15 bp, Homo sapiens
acattttaaagtgtg

SEQ ID NO: 655040 - DNA, 15 bp, Homo sapiens
cattttaaagtgtgt

SEQ ID NO: 655041 - DNA, 15 bp, Homo sapiens
attttaaagtgtgtt

SEQ ID NO: 655042 - DNA, 15 bp, Homo sapiens
ttttaaagtgtgttc

SEQ ID NO: 655043 - DNA, 15 bp, Homo sapiens
tttaaagtgtgttct

SEQ ID NO: 655044 - DNA, 15 bp, Homo sapiens
ttaaagtgtgttcta

SEQ ID NO: 655045 - DNA, 15 bp, Homo sapiens
taaagtgtgttctaa

SEQ ID NO: 655046 - DNA, 15 bp, Homo sapiens
aaagtgtgttctaat

SEQ ID NO: 655047 - DNA, 15 bp, Homo sapiens
aagtgtgttctaatt

SEQ ID NO: 655048 - DNA, 15 bp, Homo sapiens
agtgtgttctaatta

SEQ ID NO: 655049 - DNA, 15 bp, Homo sapiens
gtgtgttctaattaa

SEQ ID NO: 655050 - DNA, 15 bp, Homo sapiens
tgtgttctaattaat

SEQ ID NO: 655051 - DNA, 15 bp, Homo sapiens
gtgttctaattaata

SEQ ID NO: 655052 - DNA, 15 bp, Homo sapiens
tgttctaattaatat

SEQ ID NO: 655053 - DNA, 15 bp, Homo sapiens
gttctaattaatatc

SEQ ID NO: 655054 - DNA, 15 bp, Homo sapiens
ttctaattaatatct

SEQ ID NO: 655055 - DNA, 15 bp, Homo sapiens
tctaattaatatctt

SEQ ID NO: 655056 - DNA, 15 bp, Homo sapiens
ctaattaatatcttg

SEQ ID NO: 655057 - DNA, 15 bp, Homo sapiens
taattaatatcttgt

SEQ ID NO: 655058 - DNA, 15 bp, Homo sapiens
aattaatatcttgtc

SEQ ID NO: 655059 - DNA, 15 bp, Homo sapiens
attaatatcttgtcc

SEQ ID NO: 655060 - DNA, 15 bp, Homo sapiens
ttaatatcttgtcct

SEQ ID NO: 655061 - DNA, 15 bp, Homo sapiens
taatatcttgtcctt

SEQ ID NO: 655062 - DNA, 15 bp, Homo sapiens
aatatcttgtccttg

SEQ ID NO: 655063 - DNA, 15 bp, Homo sapiens
atatcttgtccttgg

SEQ ID NO: 655064 - DNA, 15 bp, Homo sapiens
tatcttgtccttggg

SEQ ID NO: 655065 - DNA, 15 bp, Homo sapiens
atcttgtccttgggg

SEQ ID NO: 655066 - DNA, 15 bp, Homo sapiens
tcttgtccttggggg

SEQ ID NO: 655067 - DNA, 15 bp, Homo sapiens
cttgtccttgggggg

SEQ ID NO: 655068 - DNA, 15 bp, Homo sapiens
ttgtccttggggggt

SEQ ID NO: 655069 - DNA, 15 bp, Homo sapiens
tgtccttggggggta

SEQ ID NO: 655070 - DNA, 15 bp, Homo sapiens
gtccttggggggtaa

SEQ ID NO: 655071 - DNA, 15 bp, Homo sapiens
tccttggggggtaaa

SEQ ID NO: 655072 - DNA, 15 bp, Homo sapiens
ccttggggggtaaat

SEQ ID NO: 655073 - DNA, 15 bp, Homo sapiens
cttggggggtaaatg

SEQ ID NO: 655074 - DNA, 15 bp, Homo sapiens
ttggggggtaaatga

SEQ ID NO: 655075 - DNA, 15 bp, Homo sapiens
tggggggtaaatgag

SEQ ID NO: 655076 - DNA, 15 bp, Homo sapiens
ggggggtaaatgagg

SEQ ID NO: 655077 - DNA, 15 bp, Homo sapiens
gggggtaaatgaggg

SEQ ID NO: 655078 - DNA, 15 bp, Homo sapiens
ggggtaaatgaggga

SEQ ID NO: 655079 - DNA, 15 bp, Homo sapiens
gggtaaatgagggat

SEQ ID NO: 655080 - DNA, 15 bp, Homo sapiens
ggtaaatgagggatg

SEQ ID NO: 655081 - DNA, 15 bp, Homo sapiens
gtaaatgagggatgg

SEQ ID NO: 655082 - DNA, 15 bp, Homo sapiens
taaatgagggatggt

SEQ ID NO: 655083 - DNA, 15 bp, Homo sapiens
aaatgagggatggta

SEQ ID NO: 655084 - DNA, 15 bp, Homo sapiens
aatgagggatggtag

SEQ ID NO: 655085 - DNA, 15 bp, Homo sapiens
atgagggatggtagc

SEQ ID NO: 655086 - DNA, 15 bp, Homo sapiens
tgagggatggtagca

SEQ ID NO: 655087 - DNA, 15 bp, Homo sapiens
gagggatggtagcat

SEQ ID NO: 655088 - DNA, 15 bp, Homo sapiens
agggatggtagcata

SEQ ID NO: 655089 - DNA, 15 bp, Homo sapiens
gggatggtagcataa

SEQ ID NO: 655090 - DNA, 15 bp, Homo sapiens
ggatggtagcataaa

SEQ ID NO: 655091 - DNA, 15 bp, Homo sapiens
gatggtagcataaac

SEQ ID NO: 655092 - DNA, 15 bp, Homo sapiens
atggtagcataaaca

SEQ ID NO: 655093 - DNA, 15 bp, Homo sapiens
tggtagcataaacac

SEQ ID NO: 655094 - DNA, 15 bp, Homo sapiens
ggtagcataaacact

SEQ ID NO: 655095 - DNA, 15 bp, Homo sapiens
gtagcataaacactt

SEQ ID NO: 655096 - DNA, 15 bp, Homo sapiens
tagcataaacacttc

SEQ ID NO: 655097 - DNA, 15 bp, Homo sapiens
agcataaacacttct

SEQ ID NO: 655098 - DNA, 15 bp, Homo sapiens
gcataaacacttctc

SEQ ID NO: 655099 - DNA, 15 bp, Homo sapiens
cataaacacttctca

SEQ ID NO: 655100 - DNA, 15 bp, Homo sapiens
ataaacacttctcaa

SEQ ID NO: 655101 - DNA, 15 bp, Homo sapiens
taaacacttctcaag

SEQ ID NO: 655102 - DNA, 15 bp, Homo sapiens
aaacacttctcaagt

SEQ ID NO: 655103 - DNA, 15 bp, Homo sapiens
aacacttctcaagta

SEQ ID NO: 655104 - DNA, 15 bp, Homo sapiens
acacttctcaagtat

SEQ ID NO: 655105 - DNA, 15 bp, Homo sapiens
cacttctcaagtata

SEQ ID NO: 655106 - DNA, 15 bp, Homo sapiens
acttctcaagtataa

SEQ ID NO: 655107 - DNA, 15 bp, Homo sapiens
cttctcaagtataag

SEQ ID NO: 655108 - DNA, 15 bp, Homo sapiens
ttctcaagtataaga

SEQ ID NO: 655109 - DNA, 15 bp, Homo sapiens
tctcaagtataagaa

SEQ ID NO: 655110 - DNA, 15 bp, Homo sapiens
ctcaagtataagaat

SEQ ID NO: 655111 - DNA, 15 bp, Homo sapiens
tcaagtataagaatt

SEQ ID NO: 655112 - DNA, 15 bp, Homo sapiens
caagtataagaatta

SEQ ID NO: 655113 - DNA, 15 bp, Homo sapiens
aagtataagaattaa

SEQ ID NO: 655114 - DNA, 15 bp, Homo sapiens
agtataagaattaag

SEQ ID NO: 655115 - DNA, 15 bp, Homo sapiens
gtataagaattaagg

SEQ ID NO: 655116 - DNA, 15 bp, Homo sapiens
tataagaattaaggg

SEQ ID NO: 655117 - DNA, 15 bp, Homo sapiens
ataagaattaaggga

SEQ ID NO: 655118 - DNA, 15 bp, Homo sapiens
taagaattaagggaa

SEQ ID NO: 655119 - DNA, 15 bp, Homo sapiens
aagaattaagggaaa

SEQ ID NO: 655120 - DNA, 15 bp, Homo sapiens
agaattaagggaaac

SEQ ID NO: 655121 - DNA, 15 bp, Homo sapiens
gaattaagggaaact

SEQ ID NO: 655122 - DNA, 15 bp, Homo sapiens
aattaagggaaactt

SEQ ID NO: 655123 - DNA, 15 bp, Homo sapiens
attaagggaaacttg

SEQ ID NO: 655124 - DNA, 15 bp, Homo sapiens
ttaagggaaacttga

SEQ ID NO: 655125 - DNA, 15 bp, Homo sapiens
taagggaaacttgaa

SEQ ID NO: 655126 - DNA, 15 bp, Homo sapiens
aagggaaacttgaat

SEQ ID NO: 655127 - DNA, 15 bp, Homo sapiens
agggaaacttgaatt

SEQ ID NO: 655128 - DNA, 15 bp, Homo sapiens
gggaaacttgaattt

SEQ ID NO: 655129 - DNA, 15 bp, Homo sapiens
ggaaacttgaattta

SEQ ID NO: 655130 - DNA, 15 bp, Homo sapiens
gaaacttgaatttaa

SEQ ID NO: 655131 - DNA, 15 bp, Homo sapiens
aaacttgaatttaac

SEQ ID NO: 655132 - DNA, 15 bp, Homo sapiens
aacttgaatttaact

SEQ ID NO: 655133 - DNA, 15 bp, Homo sapiens
acttgaatttaactg

SEQ ID NO: 655134 - DNA, 15 bp, Homo sapiens
cttgaatttaactga

SEQ ID NO: 655135 - DNA, 15 bp, Homo sapiens
ttgaatttaactgaa

SEQ ID NO: 655136 - DNA, 15 bp, Homo sapiens
tgaatttaactgaaa

SEQ ID NO: 655137 - DNA, 15 bp, Homo sapiens
atttaactgaaaaat

SEQ ID NO: 655138 - DNA, 15 bp, Homo sapiens
tttaactgaaaaatt

SEQ ID NO: 655139 - DNA, 15 bp, Homo sapiens
ttaactgaaaaattg

SEQ ID NO: 655140 - DNA, 15 bp, Homo sapiens
taactgaaaaattgt

SEQ ID NO: 655141 - DNA, 15 bp, Homo sapiens
aactgaaaaattgtc

SEQ ID NO: 655142 - DNA, 15 bp, Homo sapiens
actgaaaaattgtct

SEQ ID NO: 655143 - DNA, 15 bp, Homo sapiens
ctgaaaaattgtctc

SEQ ID NO: 655144 - DNA, 15 bp, Homo sapiens
tgaaaaattgtctcg

SEQ ID NO: 655145 - DNA, 15 bp, Homo sapiens
gaaaaattgtctcgt

SEQ ID NO: 655146 - DNA, 15 bp, Homo sapiens
aaaaattgtctcgtg

SEQ ID NO: 655147 - DNA, 15 bp, Homo sapiens
aaaattgtctcgtgg

SEQ ID NO: 655148 - DNA, 15 bp, Homo sapiens
aaattgtctcgtggt

SEQ ID NO: 655149 - DNA, 15 bp, Homo sapiens
aattgtctcgtggtc

SEQ ID NO: 655150 - DNA, 15 bp, Homo sapiens
attgtctcgtggtcc

SEQ ID NO: 655151 - DNA, 15 bp, Homo sapiens
ttgtctcgtggtcca

SEQ ID NO: 655152 - DNA, 15 bp, Homo sapiens
tgtctcgtggtccag

SEQ ID NO: 655153 - DNA, 15 bp, Homo sapiens
gtctcgtggtccagt

SEQ ID NO: 655154 - DNA, 15 bp, Homo sapiens
tctcgtggtccagtt

SEQ ID NO: 655155 - DNA, 15 bp, Homo sapiens
ctcgtggtccagttg

SEQ ID NO: 655156 - DNA, 15 bp, Homo sapiens
tcgtggtccagttgg

SEQ ID NO: 655157 - DNA, 15 bp, Homo sapiens
cgtggtccagttggg

SEQ ID NO: 655158 - DNA, 15 bp, Homo sapiens
gtggtccagttgggt

SEQ ID NO: 655159 - DNA, 15 bp, Homo sapiens
tggtccagttgggtt

SEQ ID NO: 655160 - DNA, 15 bp, Homo sapiens
ggtccagttgggttg

SEQ ID NO: 655161 - DNA, 15 bp, Homo sapiens
gtccagttgggttga

SEQ ID NO: 655162 - DNA, 15 bp, Homo sapiens
tccagttgggttgat

SEQ ID NO: 655163 - DNA, 15 bp, Homo sapiens
ccagttgggttgatc

SEQ ID NO: 655164 - DNA, 15 bp, Homo sapiens
cagttgggttgatct

SEQ ID NO: 655165 - DNA, 15 bp, Homo sapiens
agttgggttgatctc

SEQ ID NO: 655166 - DNA, 15 bp, Homo sapiens
gttgggttgatctcc

SEQ ID NO: 655167 - DNA, 15 bp, Homo sapiens
ttgggttgatctcca

SEQ ID NO: 655168 - DNA, 15 bp, Homo sapiens
tgggttgatctccag

SEQ ID NO: 655169 - DNA, 15 bp, Homo sapiens
gggttgatctccagc

SEQ ID NO: 655170 - DNA, 15 bp, Homo sapiens
ggttgatctccagcc

SEQ ID NO: 655171 - DNA, 15 bp, Homo sapiens
gttgatctccagcca

SEQ ID NO: 655172 - DNA, 15 bp, Homo sapiens
ttgatctccagccac

SEQ ID NO: 655173 - DNA, 15 bp, Homo sapiens
tgatctccagccacg

SEQ ID NO: 655174 - DNA, 15 bp, Homo sapiens
gatctccagccacgt

SEQ ID NO: 655175 - DNA, 15 bp, Homo sapiens
atctccagccacgtc

SEQ ID NO: 655176 - DNA, 15 bp, Homo sapiens
tctccagccacgtct

SEQ ID NO: 655177 - DNA, 15 bp, Homo sapiens
ctccagccacgtctt

SEQ ID NO: 655178 - DNA, 15 bp, Homo sapiens
tccagccacgtcttt

SEQ ID NO: 655179 - DNA, 15 bp, Homo sapiens
ccagccacgtctttg

SEQ ID NO: 655180 - DNA, 15 bp, Homo sapiens
cagccacgtctttgt

SEQ ID NO: 655181 - DNA, 15 bp, Homo sapiens
agccacgtctttgta

SEQ ID NO: 655182 - DNA, 15 bp, Homo sapiens
gccacgtctttgtat

SEQ ID NO: 655183 - DNA, 15 bp, Homo sapiens
ccacgtctttgtatt

SEQ ID NO: 655184 - DNA, 15 bp, Homo sapiens
cacgtctttgtattc

SEQ ID NO: 655185 - DNA, 15 bp, Homo sapiens
acgtctttgtattcc

SEQ ID NO: 655186 - DNA, 15 bp, Homo sapiens
cgtctttgtattccc

SEQ ID NO: 655187 - DNA, 15 bp, Homo sapiens
gtctttgtattccca

SEQ ID NO: 655188 - DNA, 15 bp, Homo sapiens
tctttgtattcccag

SEQ ID NO: 655189 - DNA, 15 bp, Homo sapiens
ctttgtattcccaga

SEQ ID NO: 655190 - DNA, 15 bp, Homo sapiens
tttgtattcccagat

SEQ ID NO: 655191 - DNA, 15 bp, Homo sapiens
ttgtattcccagatg

SEQ ID NO: 655192 - DNA, 15 bp, Homo sapiens
tgtattcccagatga

SEQ ID NO: 655193 - DNA, 15 bp, Homo sapiens
gtattcccagatgat

SEQ ID NO: 655194 - DNA, 15 bp, Homo sapiens
tattcccagatgatg

SEQ ID NO: 655195 - DNA, 15 bp, Homo sapiens
attcccagatgatgc

SEQ ID NO: 655196 - DNA, 15 bp, Homo sapiens
ttcccagatgatgca

SEQ ID NO: 655197 - DNA, 15 bp, Homo sapiens
tcccagatgatgcat

SEQ ID NO: 655198 - DNA, 15 bp, Homo sapiens
cccagatgatgcatt

SEQ ID NO: 655199 - DNA, 15 bp, Homo sapiens
ccagatgatgcattc

SEQ ID NO: 655200 - DNA, 15 bp, Homo sapiens
cagatgatgcattct

SEQ ID NO: 655201 - DNA, 15 bp, Homo sapiens
agatgatgcattctc

SEQ ID NO: 655202 - DNA, 15 bp, Homo sapiens
gatgatgcattctct

SEQ ID NO: 655203 - DNA, 15 bp, Homo sapiens
atgatgcattctctg

SEQ ID NO: 655204 - DNA, 15 bp, Homo sapiens
tgatgcattctctga

SEQ ID NO: 655205 - DNA, 15 bp, Homo sapiens
gatgcattctctgat

SEQ ID NO: 655206 - DNA, 15 bp, Homo sapiens
atgcattctctgatt

SEQ ID NO: 655207 - DNA, 15 bp, Homo sapiens
tgcattctctgattt

SEQ ID NO: 655208 - DNA, 15 bp, Homo sapiens
gcattctctgatttg

SEQ ID NO: 655209 - DNA, 15 bp, Homo sapiens
cattctctgatttgt

SEQ ID NO: 655210 - DNA, 15 bp, Homo sapiens
attctctgatttgta

SEQ ID NO: 655211 - DNA, 15 bp, Homo sapiens
ttctctgatttgtac

SEQ ID NO: 655212 - DNA, 15 bp, Homo sapiens
tctctgatttgtacc

SEQ ID NO: 655213 - DNA, 15 bp, Homo sapiens
ctctgatttgtacca

SEQ ID NO: 655214 - DNA, 15 bp, Homo sapiens
tctgatttgtaccac

SEQ ID NO: 655215 - DNA, 15 bp, Homo sapiens
ctgatttgtaccaca

SEQ ID NO: 655216 - DNA, 15 bp, Homo sapiens
tgatttgtaccacat

SEQ ID NO: 655217 - DNA, 15 bp, Homo sapiens
gatttgtaccacatt

SEQ ID NO: 655218 - DNA, 15 bp, Homo sapiens
atttgtaccacattc

SEQ ID NO: 655219 - DNA, 15 bp, Homo sapiens
tttgtaccacattct

SEQ ID NO: 655220 - DNA, 15 bp, Homo sapiens
ttgtaccacattctg

SEQ ID NO: 655221 - DNA, 15 bp, Homo sapiens
tgtaccacattctgc

SEQ ID NO: 655222 - DNA, 15 bp, Homo sapiens
gtaccacattctgcc

SEQ ID NO: 655223 - DNA, 15 bp, Homo sapiens
taccacattctgcca

SEQ ID NO: 655224 - DNA, 15 bp, Homo sapiens
accacattctgccat

SEQ ID NO: 655225 - DNA, 15 bp, Homo sapiens
ccacattctgccatt

SEQ ID NO: 655226 - DNA, 15 bp, Homo sapiens
cacattctgccattt

SEQ ID NO: 655227 - DNA, 15 bp, Homo sapiens
acattctgccatttg

SEQ ID NO: 655228 - DNA, 15 bp, Homo sapiens
cattctgccatttgc

SEQ ID NO: 655229 - DNA, 15 bp, Homo sapiens
attctgccatttgca

SEQ ID NO: 655230 - DNA, 15 bp, Homo sapiens
ttctgccatttgcac

SEQ ID NO: 655231 - DNA, 15 bp, Homo sapiens
tctgccatttgcacc

SEQ ID NO: 655232 - DNA, 15 bp, Homo sapiens
ctgccatttgcacca

SEQ ID NO: 655233 - DNA, 15 bp, Homo sapiens
tgccatttgcaccat

SEQ ID NO: 655234 - DNA, 15 bp, Homo sapiens
gccatttgcaccatc

SEQ ID NO: 655235 - DNA, 15 bp, Homo sapiens
ccatttgcaccatct

SEQ ID NO: 655236 - DNA, 15 bp, Homo sapiens
catttgcaccatcta

SEQ ID NO: 655237 - DNA, 15 bp, Homo sapiens
atttgcaccatctaa

SEQ ID NO: 655238 - DNA, 15 bp, Homo sapiens
tttgcaccatctaat

SEQ ID NO: 655239 - DNA, 15 bp, Homo sapiens
ttgcaccatctaatc

SEQ ID NO: 655240 - DNA, 15 bp, Homo sapiens
tgcaccatctaatcc

SEQ ID NO: 655241 - DNA, 15 bp, Homo sapiens
gcaccatctaatcca

SEQ ID NO: 655242 - DNA, 15 bp, Homo sapiens
caccatctaatccag

SEQ ID NO: 655243 - DNA, 15 bp, Homo sapiens
accatctaatccagg

SEQ ID NO: 655244 - DNA, 15 bp, Homo sapiens
ccatctaatccaggc

SEQ ID NO: 655245 - DNA, 15 bp, Homo sapiens
catctaatccaggca

SEQ ID NO: 655246 - DNA, 15 bp, Homo sapiens
atctaatccaggcag

SEQ ID NO: 655247 - DNA, 15 bp, Homo sapiens
tctaatccaggcagc

SEQ ID NO: 655248 - DNA, 15 bp, Homo sapiens
ctaatccaggcagcc

SEQ ID NO: 655249 - DNA, 15 bp, Homo sapiens
taatccaggcagcca

SEQ ID NO: 655250 - DNA, 15 bp, Homo sapiens
aatccaggcagccac

SEQ ID NO: 655251 - DNA, 15 bp, Homo sapiens
atccaggcagccact

SEQ ID NO: 655252 - DNA, 15 bp, Homo sapiens
tccaggcagccactg

SEQ ID NO: 655253 - DNA, 15 bp, Homo sapiens
ccaggcagccactga

SEQ ID NO: 655254 - DNA, 15 bp, Homo sapiens
caggcagccactgaa

SEQ ID NO: 655255 - DNA, 15 bp, Homo sapiens
aggcagccactgaaa

SEQ ID NO: 655256 - DNA, 15 bp, Homo sapiens
ggcagccactgaaat

SEQ ID NO: 655257 - DNA, 15 bp, Homo sapiens
gcagccactgaaatg

SEQ ID NO: 655258 - DNA, 15 bp, Homo sapiens
cagccactgaaatgt

SEQ ID NO: 655259 - DNA, 15 bp, Homo sapiens
agccactgaaatgtc

SEQ ID NO: 655260 - DNA, 15 bp, Homo sapiens
gccactgaaatgtca

SEQ ID NO: 655261 - DNA, 15 bp, Homo sapiens
ccactgaaatgtcac

SEQ ID NO: 655262 - DNA, 15 bp, Homo sapiens
cactgaaatgtcacg

SEQ ID NO: 655263 - DNA, 15 bp, Homo sapiens
actgaaatgtcacga

SEQ ID NO: 655264 - DNA, 15 bp, Homo sapiens
ctgaaatgtcacgaa

SEQ ID NO: 655265 - DNA, 15 bp, Homo sapiens
tgaaatgtcacgaaa

SEQ ID NO: 655266 - DNA, 15 bp, Homo sapiens
gaaatgtcacgaaag

SEQ ID NO: 655267 - DNA, 15 bp, Homo sapiens
aaatgtcacgaaagg

SEQ ID NO: 655268 - DNA, 15 bp, Homo sapiens
aatgtcacgaaagga

SEQ ID NO: 655269 - DNA, 15 bp, Homo sapiens
atgtcacgaaaggag

SEQ ID NO: 655270 - DNA, 15 bp, Homo sapiens
tgtcacgaaaggagt

SEQ ID NO: 655271 - DNA, 15 bp, Homo sapiens
gtcacgaaaggagtt

SEQ ID NO: 655272 - DNA, 15 bp, Homo sapiens
tcacgaaaggagtta

SEQ ID NO: 655273 - DNA, 15 bp, Homo sapiens
cacgaaaggagttat

SEQ ID NO: 655274 - DNA, 15 bp, Homo sapiens
acgaaaggagttatt

SEQ ID NO: 655275 - DNA, 15 bp, Homo sapiens
cgaaaggagttattt

SEQ ID NO: 655276 - DNA, 15 bp, Homo sapiens
gaaaggagttatttc

SEQ ID NO: 655277 - DNA, 15 bp, Homo sapiens
aaaggagttatttct

SEQ ID NO: 655278 - DNA, 15 bp, Homo sapiens
aaggagttatttctg

SEQ ID NO: 655279 - DNA, 15 bp, Homo sapiens
aggagttatttctgc

SEQ ID NO: 655280 - DNA, 15 bp, Homo sapiens
ggagttatttctgcc

SEQ ID NO: 655281 - DNA, 15 bp, Homo sapiens
gagttatttctgccc

SEQ ID NO: 655282 - DNA, 15 bp, Homo sapiens
agttatttctgccct

SEQ ID NO: 655283 - DNA, 15 bp, Homo sapiens
gttatttctgccctt

SEQ ID NO: 655284 - DNA, 15 bp, Homo sapiens
ttatttctgcccttg

SEQ ID NO: 655285 - DNA, 15 bp, Homo sapiens
tatttctgcccttgt

SEQ ID NO: 655286 - DNA, 15 bp, Homo sapiens
atttctgcccttgta

SEQ ID NO: 655287 - DNA, 15 bp, Homo sapiens
tttctgcccttgtat

SEQ ID NO: 655288 - DNA, 15 bp, Homo sapiens
ttctgcccttgtatt

SEQ ID NO: 655289 - DNA, 15 bp, Homo sapiens
tctgcccttgtattc

SEQ ID NO: 655290 - DNA, 15 bp, Homo sapiens
ctgcccttgtattcc

SEQ ID NO: 655291 - DNA, 15 bp, Homo sapiens
tgcccttgtattcct

SEQ ID NO: 655292 - DNA, 15 bp, Homo sapiens
gcccttgtattccta

SEQ ID NO: 655293 - DNA, 15 bp, Homo sapiens
cccttgtattcctaa

SEQ ID NO: 655294 - DNA, 15 bp, Homo sapiens
ccttgtattcctaag

SEQ ID NO: 655295 - DNA, 15 bp, Homo sapiens
cttgtattcctaaga

SEQ ID NO: 655296 - DNA, 15 bp, Homo sapiens
ttgtattcctaagac

SEQ ID NO: 655297 - DNA, 15 bp, Homo sapiens
tgtattcctaagact

SEQ ID NO: 655298 - DNA, 15 bp, Homo sapiens
gtattcctaagactc

SEQ ID NO: 655299 - DNA, 15 bp, Homo sapiens
tattcctaagactct

SEQ ID NO: 655300 - DNA, 15 bp, Homo sapiens
attcctaagactctt

SEQ ID NO: 655301 - DNA, 15 bp, Homo sapiens
ttcctaagactcttt

SEQ ID NO: 655302 - DNA, 15 bp, Homo sapiens
tcctaagactctttt

SEQ ID NO: 655303 - DNA, 15 bp, Homo sapiens
cctaagactcttttt

SEQ ID NO: 655304 - DNA, 15 bp, Homo sapiens
ctaagactctttttc

SEQ ID NO: 655305 - DNA, 15 bp, Homo sapiens
taagactctttttca

SEQ ID NO: 655306 - DNA, 15 bp, Homo sapiens
aagactctttttcaa

SEQ ID NO: 655307 - DNA, 15 bp, Homo sapiens
agactctttttcaat

SEQ ID NO: 655308 - DNA, 15 bp, Homo sapiens
gactctttttcaatc

SEQ ID NO: 655309 - DNA, 15 bp, Homo sapiens
actctttttcaatct

SEQ ID NO: 655310 - DNA, 15 bp, Homo sapiens
ctctttttcaatctt

SEQ ID NO: 655311 - DNA, 15 bp, Homo sapiens
tctttttcaatcttc

SEQ ID NO: 655312 - DNA, 15 bp, Homo sapiens
ctttttcaatcttca

SEQ ID NO: 655313 - DNA, 15 bp, Homo sapiens
tttttcaatcttcag

SEQ ID NO: 655314 - DNA, 15 bp, Homo sapiens
ttttcaatcttcaga

SEQ ID NO: 655315 - DNA, 15 bp, Homo sapiens
tttcaatcttcagat

SEQ ID NO: 655316 - DNA, 15 bp, Homo sapiens
ttcaatcttcagatt

SEQ ID NO: 655317 - DNA, 15 bp, Homo sapiens
tcaatcttcagatta

SEQ ID NO: 655318 - DNA, 15 bp, Homo sapiens
caatcttcagattac

SEQ ID NO: 655319 - DNA, 15 bp, Homo sapiens
aatcttcagattaca

SEQ ID NO: 655320 - DNA, 15 bp, Homo sapiens
atcttcagattacaa

SEQ ID NO: 655321 - DNA, 15 bp, Homo sapiens
tcttcagattacaaa

SEQ ID NO: 655322 - DNA, 15 bp, Homo sapiens
cttcagattacaaat

SEQ ID NO: 655323 - DNA, 15 bp, Homo sapiens
ttcagattacaaatg

SEQ ID NO: 655324 - DNA, 15 bp, Homo sapiens
tcagattacaaatga

SEQ ID NO: 655325 - DNA, 15 bp, Homo sapiens
cagattacaaatgaa

SEQ ID NO: 655326 - DNA, 15 bp, Homo sapiens
agattacaaatgaag

SEQ ID NO: 655327 - DNA, 15 bp, Homo sapiens
gattacaaatgaagc

SEQ ID NO: 655328 - DNA, 15 bp, Homo sapiens
attacaaatgaagcc

SEQ ID NO: 655329 - DNA, 15 bp, Homo sapiens
ttacaaatgaagccc

SEQ ID NO: 655330 - DNA, 15 bp, Homo sapiens
tacaaatgaagccct

SEQ ID NO: 655331 - DNA, 15 bp, Homo sapiens
acaaatgaagccctc

SEQ ID NO: 655332 - DNA, 15 bp, Homo sapiens
caaatgaagccctca

SEQ ID NO: 655333 - DNA, 15 bp, Homo sapiens
aaatgaagccctcag

SEQ ID NO: 655334 - DNA, 15 bp, Homo sapiens
aatgaagccctcagt

SEQ ID NO: 655335 - DNA, 15 bp, Homo sapiens
atgaagccctcagta

SEQ ID NO: 655336 - DNA, 15 bp, Homo sapiens
tgaagccctcagtaa

SEQ ID NO: 655337 - DNA, 15 bp, Homo sapiens
gaagccctcagtaac

SEQ ID NO: 655338 - DNA, 15 bp, Homo sapiens
aagccctcagtaaca

SEQ ID NO: 655339 - DNA, 15 bp, Homo sapiens
agccctcagtaacat

SEQ ID NO: 655340 - DNA, 15 bp, Homo sapiens
gccctcagtaacatc

SEQ ID NO: 655341 - DNA, 15 bp, Homo sapiens
ccctcagtaacatcc

SEQ ID NO: 655342 - DNA, 15 bp, Homo sapiens
cctcagtaacatccg

SEQ ID NO: 655343 - DNA, 15 bp, Homo sapiens
ctcagtaacatccgc

SEQ ID NO: 655344 - DNA, 15 bp, Homo sapiens
tcagtaacatccgca

SEQ ID NO: 655345 - DNA, 15 bp, Homo sapiens
cagtaacatccgcac

SEQ ID NO: 655346 - DNA, 15 bp, Homo sapiens
agtaacatccgcact

SEQ ID NO: 655347 - DNA, 15 bp, Homo sapiens
gtaacatccgcactg

SEQ ID NO: 655348 - DNA, 15 bp, Homo sapiens
taacatccgcactgt

SEQ ID NO: 655349 - DNA, 15 bp, Homo sapiens
aacatccgcactgtt

SEQ ID NO: 655350 - DNA, 15 bp, Homo sapiens
acatccgcactgttg

SEQ ID NO: 655351 - DNA, 15 bp, Homo sapiens
catccgcactgttgc

SEQ ID NO: 655352 - DNA, 15 bp, Homo sapiens
atccgcactgttgct

SEQ ID NO: 655353 - DNA, 15 bp, Homo sapiens
tccgcactgttgctg

SEQ ID NO: 655354 - DNA, 15 bp, Homo sapiens
ccgcactgttgctgg

SEQ ID NO: 655355 - DNA, 15 bp, Homo sapiens
cgcactgttgctgga

SEQ ID NO: 655356 - DNA, 15 bp, Homo sapiens
gcactgttgctggaa

SEQ ID NO: 655357 - DNA, 15 bp, Homo sapiens
cactgttgctggaat

SEQ ID NO: 655358 - DNA, 15 bp, Homo sapiens
actgttgctggaatt

SEQ ID NO: 655359 - DNA, 15 bp, Homo sapiens
ctgttgctggaattg

SEQ ID NO: 655360 - DNA, 15 bp, Homo sapiens
tgttgctggaattgg

SEQ ID NO: 655361 - DNA, 15 bp, Homo sapiens
gttgctggaattgga

SEQ ID NO: 655362 - DNA, 15 bp, Homo sapiens
ttgctggaattggaa

SEQ ID NO: 655363 - DNA, 15 bp, Homo sapiens
tgctggaattggaaa

SEQ ID NO: 655364 - DNA, 15 bp, Homo sapiens
gctggaattggaaag

SEQ ID NO: 655365 - DNA, 15 bp, Homo sapiens
ctggaattggaaagg

SEQ ID NO: 655366 - DNA, 15 bp, Homo sapiens
tggaattggaaagga

SEQ ID NO: 655367 - DNA, 15 bp, Homo sapiens
ggaattggaaaggag

SEQ ID NO: 655368 - DNA, 15 bp, Homo sapiens
gaattggaaaggaga

SEQ ID NO: 655369 - DNA, 15 bp, Homo sapiens
aattggaaaggagag

SEQ ID NO: 655370 - DNA, 15 bp, Homo sapiens
attggaaaggagagg

SEQ ID NO: 655371 - DNA, 15 bp, Homo sapiens
ttggaaaggagaggc

SEQ ID NO: 655372 - DNA, 15 bp, Homo sapiens
tggaaaggagaggcg

SEQ ID NO: 655373 - DNA, 15 bp, Homo sapiens
ggaaaggagaggcgg

SEQ ID NO: 655374 - DNA, 15 bp, Homo sapiens
gaaaggagaggcggt

SEQ ID NO: 655375 - DNA, 15 bp, Homo sapiens
aaaggagaggcggtt

SEQ ID NO: 655376 - DNA, 15 bp, Homo sapiens
aaggagaggcggttc

SEQ ID NO: 655377 - DNA, 15 bp, Homo sapiens
aggagaggcggttca

SEQ ID NO: 655378 - DNA, 15 bp, Homo sapiens
ggagaggcggttcat

SEQ ID NO: 655379 - DNA, 15 bp, Homo sapiens
gagaggcggttcatt

SEQ ID NO: 655380 - DNA, 15 bp, Homo sapiens
agaggcggttcattg

SEQ ID NO: 655381 - DNA, 15 bp, Homo sapiens
gaggcggttcattga

SEQ ID NO: 655382 - DNA, 15 bp, Homo sapiens
aggcggttcattgaa

SEQ ID NO: 655383 - DNA, 15 bp, Homo sapiens
ggcggttcattgaag

SEQ ID NO: 655384 - DNA, 15 bp, Homo sapiens
gcggttcattgaagc

SEQ ID NO: 655385 - DNA, 15 bp, Homo sapiens
cggttcattgaagca

SEQ ID NO: 655386 - DNA, 15 bp, Homo sapiens
ggttcattgaagcac

SEQ ID NO: 655387 - DNA, 15 bp, Homo sapiens
gttcattgaagcact

SEQ ID NO: 655388 - DNA, 15 bp, Homo sapiens
ttcattgaagcactt

SEQ ID NO: 655389 - DNA, 15 bp, Homo sapiens
tcattgaagcacttg

SEQ ID NO: 655390 - DNA, 15 bp, Homo sapiens
cattgaagcacttga

SEQ ID NO: 655391 - DNA, 15 bp, Homo sapiens
attgaagcacttgag

SEQ ID NO: 655392 - DNA, 15 bp, Homo sapiens
ttgaagcacttgaga

SEQ ID NO: 655393 - DNA, 15 bp, Homo sapiens
tgaagcacttgagac

SEQ ID NO: 655394 - DNA, 15 bp, Homo sapiens
gaagcacttgagact

SEQ ID NO: 655395 - DNA, 15 bp, Homo sapiens
aagcacttgagactg

SEQ ID NO: 655396 - DNA, 15 bp, Homo sapiens
agcacttgagactga

SEQ ID NO: 655397 - DNA, 15 bp, Homo sapiens
gcacttgagactgag

SEQ ID NO: 655398 - DNA, 15 bp, Homo sapiens
cacttgagactgagc

SEQ ID NO: 655399 - DNA, 15 bp, Homo sapiens
acttgagactgagct

SEQ ID NO: 655400 - DNA, 15 bp, Homo sapiens
cttgagactgagctg

SEQ ID NO: 655401 - DNA, 15 bp, Homo sapiens
ttgagactgagctgg

SEQ ID NO: 655402 - DNA, 15 bp, Homo sapiens
tgagactgagctgga

SEQ ID NO: 655403 - DNA, 15 bp, Homo sapiens
gagactgagctggag

SEQ ID NO: 655404 - DNA, 15 bp, Homo sapiens
agactgagctggaga

SEQ ID NO: 655405 - DNA, 15 bp, Homo sapiens
gactgagctggagaa

SEQ ID NO: 655406 - DNA, 15 bp, Homo sapiens
actgagctggagaag

SEQ ID NO: 655407 - DNA, 15 bp, Homo sapiens
ctgagctggagaagc

SEQ ID NO: 655408 - DNA, 15 bp, Homo sapiens
tgagctggagaagcc

SEQ ID NO: 655409 - DNA, 15 bp, Homo sapiens
gagctggagaagccc

SEQ ID NO: 655410 - DNA, 15 bp, Homo sapiens
agctggagaagccct

SEQ ID NO: 655411 - DNA, 15 bp, Homo sapiens
gctggagaagccctt

SEQ ID NO: 655412 - DNA, 15 bp, Homo sapiens
ctggagaagcccttc

SEQ ID NO: 655413 - DNA, 15 bp, Homo sapiens
tggagaagcccttca

SEQ ID NO: 655414 - DNA, 15 bp, Homo sapiens
ggagaagcccttcaa

SEQ ID NO: 655415 - DNA, 15 bp, Homo sapiens
gagaagcccttcaag

SEQ ID NO: 655416 - DNA, 15 bp, Homo sapiens
agaagcccttcaaga

SEQ ID NO: 655417 - DNA, 15 bp, Homo sapiens
gaagcccttcaagac

SEQ ID NO: 655418 - DNA, 15 bp, Homo sapiens
aagcccttcaagaca

SEQ ID NO: 655419 - DNA, 15 bp, Homo sapiens
agcccttcaagacag

SEQ ID NO: 655420 - DNA, 15 bp, Homo sapiens
gcccttcaagacagc

SEQ ID NO: 655421 - DNA, 15 bp, Homo sapiens
cccttcaagacagcc

SEQ ID NO: 655422 - DNA, 15 bp, Homo sapiens
ccttcaagacagcca

SEQ ID NO: 655423 - DNA, 15 bp, Homo sapiens
cttcaagacagccat

SEQ ID NO: 655424 - DNA, 15 bp, Homo sapiens
ttcaagacagccatt

SEQ ID NO: 655425 - DNA, 15 bp, Homo sapiens
tcaagacagccattc

SEQ ID NO: 655426 - DNA, 15 bp, Homo sapiens
caagacagccattca

SEQ ID NO: 655427 - DNA, 15 bp, Homo sapiens
aagacagccattcag

SEQ ID NO: 655428 - DNA, 15 bp, Homo sapiens
agacagccattcaga

SEQ ID NO: 655429 - DNA, 15 bp, Homo sapiens
gacagccattcagaa

SEQ ID NO: 655430 - DNA, 15 bp, Homo sapiens
acagccattcagaaa

SEQ ID NO: 655431 - DNA, 15 bp, Homo sapiens
cagccattcagaaag

SEQ ID NO: 655432 - DNA, 15 bp, Homo sapiens
agccattcagaaagc

SEQ ID NO: 655433 - DNA, 15 bp, Homo sapiens
gccattcagaaagcc

SEQ ID NO: 655434 - DNA, 15 bp, Homo sapiens
ccattcagaaagcca

SEQ ID NO: 655435 - DNA, 15 bp, Homo sapiens
cattcagaaagccaa

SEQ ID NO: 655436 - DNA, 15 bp, Homo sapiens
attcagaaagccaat

SEQ ID NO: 655437 - DNA, 15 bp, Homo sapiens
ttcagaaagccaata

SEQ ID NO: 655438 - DNA, 15 bp, Homo sapiens
tcagaaagccaatat

SEQ ID NO: 655439 - DNA, 15 bp, Homo sapiens
cagaaagccaatatt

SEQ ID NO: 655440 - DNA, 15 bp, Homo sapiens
agaaagccaatattt

SEQ ID NO: 655441 - DNA, 15 bp, Homo sapiens
gaaagccaatattta

SEQ ID NO: 655442 - DNA, 15 bp, Homo sapiens
aaagccaatatttac

SEQ ID NO: 655443 - DNA, 15 bp, Homo sapiens
aagccaatatttacg

SEQ ID NO: 655444 - DNA, 15 bp, Homo sapiens
agccaatatttacgg

SEQ ID NO: 655445 - DNA, 15 bp, Homo sapiens
gccaatatttacgga

SEQ ID NO: 655446 - DNA, 15 bp, Homo sapiens
ccaatatttacggat

SEQ ID NO: 655447 - DNA, 15 bp, Homo sapiens
caatatttacggatt

SEQ ID NO: 655448 - DNA, 15 bp, Homo sapiens
aatatttacggattc

SEQ ID NO: 655449 - DNA, 15 bp, Homo sapiens
atatttacggattct

SEQ ID NO: 655450 - DNA, 15 bp, Homo sapiens
tatttacggattctg

SEQ ID NO: 655451 - DNA, 15 bp, Homo sapiens
atttacggattctgc

SEQ ID NO: 655452 - DNA, 15 bp, Homo sapiens
tttacggattctgct

SEQ ID NO: 655453 - DNA, 15 bp, Homo sapiens
ttacggattctgctt

SEQ ID NO: 655454 - DNA, 15 bp, Homo sapiens
tacggattctgcttt

SEQ ID NO: 655455 - DNA, 15 bp, Homo sapiens
acggattctgctttg

SEQ ID NO: 655456 - DNA, 15 bp, Homo sapiens
cggattctgctttgc

SEQ ID NO: 655457 - DNA, 15 bp, Homo sapiens
ggattctgctttgcc

SEQ ID NO: 655458 - DNA, 15 bp, Homo sapiens
gattctgctttgcct

SEQ ID NO: 655459 - DNA, 15 bp, Homo sapiens
attctgctttgcctt

SEQ ID NO: 655460 - DNA, 15 bp, Homo sapiens
ttctgctttgccttt

SEQ ID NO: 655461 - DNA, 15 bp, Homo sapiens
tctgctttgcctttg

SEQ ID NO: 655462 - DNA, 15 bp, Homo sapiens
ctgctttgcctttgc

SEQ ID NO: 655463 - DNA, 15 bp, Homo sapiens
tgctttgcctttgcc

SEQ ID NO: 655464 - DNA, 15 bp, Homo sapiens
gctttgcctttgccc

SEQ ID NO: 655465 - DNA, 15 bp, Homo sapiens
ctttgcctttgccca

SEQ ID NO: 655466 - DNA, 15 bp, Homo sapiens
tttgcctttgcccag

SEQ ID NO: 655467 - DNA, 15 bp, Homo sapiens
ttgcctttgcccagt

SEQ ID NO: 655468 - DNA, 15 bp, Homo sapiens
tgcctttgcccagtg

SEQ ID NO: 655469 - DNA, 15 bp, Homo sapiens
gcctttgcccagtgc

SEQ ID NO: 655470 - DNA, 15 bp, Homo sapiens
cctttgcccagtgca

SEQ ID NO: 655471 - DNA, 15 bp, Homo sapiens
ctttgcccagtgcat

SEQ ID NO: 655472 - DNA, 15 bp, Homo sapiens
tttgcccagtgcatc

SEQ ID NO: 655473 - DNA, 15 bp, Homo sapiens
ttgcccagtgcatca

SEQ ID NO: 655474 - DNA, 15 bp, Homo sapiens
tgcccagtgcatcat

SEQ ID NO: 655475 - DNA, 15 bp, Homo sapiens
gcccagtgcatcatg

SEQ ID NO: 655476 - DNA, 15 bp, Homo sapiens
cccagtgcatcatgt

SEQ ID NO: 655477 - DNA, 15 bp, Homo sapiens
ccagtgcatcatgtt

SEQ ID NO: 655478 - DNA, 15 bp, Homo sapiens
cagtgcatcatgttt

SEQ ID NO: 655479 - DNA, 15 bp, Homo sapiens
agtgcatcatgttta

SEQ ID NO: 655480 - DNA, 15 bp, Homo sapiens
gtgcatcatgtttat

SEQ ID NO: 655481 - DNA, 15 bp, Homo sapiens
tgcatcatgtttatt

SEQ ID NO: 655482 - DNA, 15 bp, Homo sapiens
gcatcatgtttattg

SEQ ID NO: 655483 - DNA, 15 bp, Homo sapiens
catcatgtttattgc

SEQ ID NO: 655484 - DNA, 15 bp, Homo sapiens
atcatgtttattgcg

SEQ ID NO: 655485 - DNA, 15 bp, Homo sapiens
tcatgtttattgcga

SEQ ID NO: 655486 - DNA, 15 bp, Homo sapiens
catgtttattgcgaa

SEQ ID NO: 655487 - DNA, 15 bp, Homo sapiens
atgtttattgcgaat

SEQ ID NO: 655488 - DNA, 15 bp, Homo sapiens
tgtttattgcgaatt

SEQ ID NO: 655489 - DNA, 15 bp, Homo sapiens
gtttattgcgaattc

SEQ ID NO: 655490 - DNA, 15 bp, Homo sapiens
tttattgcgaattct

SEQ ID NO: 655491 - DNA, 15 bp, Homo sapiens
ttattgcgaattctg

SEQ ID NO: 655492 - DNA, 15 bp, Homo sapiens
tattgcgaattctgc

SEQ ID NO: 655493 - DNA, 15 bp, Homo sapiens
attgcgaattctgct

SEQ ID NO: 655494 - DNA, 15 bp, Homo sapiens
ttgcgaattctgctt

SEQ ID NO: 655495 - DNA, 15 bp, Homo sapiens
tgcgaattctgcttc

SEQ ID NO: 655496 - DNA, 15 bp, Homo sapiens
gcgaattctgcttcc

SEQ ID NO: 655497 - DNA, 15 bp, Homo sapiens
cgaattctgcttcct

SEQ ID NO: 655498 - DNA, 15 bp, Homo sapiens
gaattctgcttccta

SEQ ID NO: 655499 - DNA, 15 bp, Homo sapiens
aattctgcttcctac

SEQ ID NO: 655500 - DNA, 15 bp, Homo sapiens
attctgcttcctaca

SEQ ID NO: 655501 - DNA, 15 bp, Homo sapiens
ttctgcttcctacag

SEQ ID NO: 655502 - DNA, 15 bp, Homo sapiens
tctgcttcctacaga

SEQ ID NO: 655503 - DNA, 15 bp, Homo sapiens
ctgcttcctacagat

SEQ ID NO: 655504 - DNA, 15 bp, Homo sapiens
tgcttcctacagata

SEQ ID NO: 655505 - DNA, 15 bp, Homo sapiens
gcttcctacagatat

SEQ ID NO: 655506 - DNA, 15 bp, Homo sapiens
cttcctacagatatg

SEQ ID NO: 655507 - DNA, 15 bp, Homo sapiens
ttcctacagatatgg

SEQ ID NO: 655508 - DNA, 15 bp, Homo sapiens
tcctacagatatgga

SEQ ID NO: 655509 - DNA, 15 bp, Homo sapiens
cctacagatatggag

SEQ ID NO: 655510 - DNA, 15 bp, Homo sapiens
ctacagatatggagg

SEQ ID NO: 655511 - DNA, 15 bp, Homo sapiens
tacagatatggaggt

SEQ ID NO: 655512 - DNA, 15 bp, Homo sapiens
acagatatggaggtt

SEQ ID NO: 655513 - DNA, 15 bp, Homo sapiens
cagatatggaggtta

SEQ ID NO: 655514 - DNA, 15 bp, Homo sapiens
agatatggaggttac

SEQ ID NO: 655515 - DNA, 15 bp, Homo sapiens
gatatggaggttact

SEQ ID NO: 655516 - DNA, 15 bp, Homo sapiens
atatggaggttactt

SEQ ID NO: 655517 - DNA, 15 bp, Homo sapiens
tatggaggttactta

SEQ ID NO: 655518 - DNA, 15 bp, Homo sapiens
atggaggttacttaa

SEQ ID NO: 655519 - DNA, 15 bp, Homo sapiens
tggaggttacttaat

SEQ ID NO: 655520 - DNA, 15 bp, Homo sapiens
ggaggttacttaatc

SEQ ID NO: 655521 - DNA, 15 bp, Homo sapiens
gaggttacttaatct

SEQ ID NO: 655522 - DNA, 15 bp, Homo sapiens
aggttacttaatctc

SEQ ID NO: 655523 - DNA, 15 bp, Homo sapiens
ggttacttaatctcc

SEQ ID NO: 655524 - DNA, 15 bp, Homo sapiens
gttacttaatctcca

SEQ ID NO: 655525 - DNA, 15 bp, Homo sapiens
ttacttaatctccaa

SEQ ID NO: 655526 - DNA, 15 bp, Homo sapiens
tacttaatctccaat

SEQ ID NO: 655527 - DNA, 15 bp, Homo sapiens
acttaatctccaatg

SEQ ID NO: 655528 - DNA, 15 bp, Homo sapiens
cttaatctccaatga

SEQ ID NO: 655529 - DNA, 15 bp, Homo sapiens
ttaatctccaatgag

SEQ ID NO: 655530 - DNA, 15 bp, Homo sapiens
taatctccaatgagg

SEQ ID NO: 655531 - DNA, 15 bp, Homo sapiens
aatctccaatgaggg

SEQ ID NO: 655532 - DNA, 15 bp, Homo sapiens
atctccaatgagggg

SEQ ID NO: 655533 - DNA, 15 bp, Homo sapiens
tctccaatgaggggc

SEQ ID NO: 655534 - DNA, 15 bp, Homo sapiens
ctccaatgaggggct

SEQ ID NO: 655535 - DNA, 15 bp, Homo sapiens
tccaatgaggggctc

SEQ ID NO: 655536 - DNA, 15 bp, Homo sapiens
ccaatgaggggctcc

SEQ ID NO: 655537 - DNA, 15 bp, Homo sapiens
caatgaggggctcca

SEQ ID NO: 655538 - DNA, 15 bp, Homo sapiens
aatgaggggctccat

SEQ ID NO: 655539 - DNA, 15 bp, Homo sapiens
atgaggggctccatt

SEQ ID NO: 655540 - DNA, 15 bp, Homo sapiens
tgaggggctccattt

SEQ ID NO: 655541 - DNA, 15 bp, Homo sapiens
gaggggctccatttc

SEQ ID NO: 655542 - DNA, 15 bp, Homo sapiens
aggggctccatttca

SEQ ID NO: 655543 - DNA, 15 bp, Homo sapiens
ggggctccatttcag

SEQ ID NO: 655544 - DNA, 15 bp, Homo sapiens
gggctccatttcagc

SEQ ID NO: 655545 - DNA, 15 bp, Homo sapiens
ggctccatttcagct

SEQ ID NO: 655546 - DNA, 15 bp, Homo sapiens
gctccatttcagcta

SEQ ID NO: 655547 - DNA, 15 bp, Homo sapiens
ctccatttcagctat

SEQ ID NO: 655548 - DNA, 15 bp, Homo sapiens
tccatttcagctatg

SEQ ID NO: 655549 - DNA, 15 bp, Homo sapiens
ccatttcagctatgt

SEQ ID NO: 655550 - DNA, 15 bp, Homo sapiens
catttcagctatgtg

SEQ ID NO: 655551 - DNA, 15 bp, Homo sapiens
atttcagctatgtgt

SEQ ID NO: 655552 - DNA, 15 bp, Homo sapiens
tttcagctatgtgtt

SEQ ID NO: 655553 - DNA, 15 bp, Homo sapiens
ttcagctatgtgttc

SEQ ID NO: 655554 - DNA, 15 bp, Homo sapiens
tcagctatgtgttca

SEQ ID NO: 655555 - DNA, 15 bp, Homo sapiens
cagctatgtgttcag

SEQ ID NO: 655556 - DNA, 15 bp, Homo sapiens
agctatgtgttcagg

SEQ ID NO: 655557 - DNA, 15 bp, Homo sapiens
gctatgtgttcaggt

SEQ ID NO: 655558 - DNA, 15 bp, Homo sapiens
ctatgtgttcaggtg

SEQ ID NO: 655559 - DNA, 15 bp, Homo sapiens
tatgtgttcaggtga

SEQ ID NO: 655560 - DNA, 15 bp, Homo sapiens
atgtgttcaggtgag

SEQ ID NO: 655561 - DNA, 15 bp, Homo sapiens
tgtgttcaggtgagg

SEQ ID NO: 655562 - DNA, 15 bp, Homo sapiens
gtgttcaggtgagga

SEQ ID NO: 655563 - DNA, 15 bp, Homo sapiens
tgttcaggtgaggaa

SEQ ID NO: 655564 - DNA, 15 bp, Homo sapiens
gttcaggtgaggaat

SEQ ID NO: 655565 - DNA, 15 bp, Homo sapiens
ttcaggtgaggaata

SEQ ID NO: 655566 - DNA, 15 bp, Homo sapiens
tcaggtgaggaatat

SEQ ID NO: 655567 - DNA, 15 bp, Homo sapiens
caggtgaggaatatc

SEQ ID NO: 655568 - DNA, 15 bp, Homo sapiens
aggtgaggaatatct

SEQ ID NO: 655569 - DNA, 15 bp, Homo sapiens
ggtgaggaatatcta

SEQ ID NO: 655570 - DNA, 15 bp, Homo sapiens
gtgaggaatatctag

SEQ ID NO: 655571 - DNA, 15 bp, Homo sapiens
tgaggaatatctagc

SEQ ID NO: 655572 - DNA, 15 bp, Homo sapiens
gaggaatatctagcc

SEQ ID NO: 655573 - DNA, 15 bp, Homo sapiens
aggaatatctagcca

SEQ ID NO: 655574 - DNA, 15 bp, Homo sapiens
ggaatatctagccaa

SEQ ID NO: 655575 - DNA, 15 bp, Homo sapiens
gaatatctagccaag

SEQ ID NO: 655576 - DNA, 15 bp, Homo sapiens
aatatctagccaagg

SEQ ID NO: 655577 - DNA, 15 bp, Homo sapiens
atatctagccaaggt

SEQ ID NO: 655578 - DNA, 15 bp, Homo sapiens
tatctagccaaggtg

SEQ ID NO: 655579 - DNA, 15 bp, Homo sapiens
atctagccaaggtga

SEQ ID NO: 655580 - DNA, 15 bp, Homo sapiens
tctagccaaggtgag

SEQ ID NO: 655581 - DNA, 15 bp, Homo sapiens
ctagccaaggtgaga

SEQ ID NO: 655582 - DNA, 15 bp, Homo sapiens
tagccaaggtgagaa

SEQ ID NO: 655583 - DNA, 15 bp, Homo sapiens
agccaaggtgagaaa

SEQ ID NO: 655584 - DNA, 15 bp, Homo sapiens
gccaaggtgagaaaa

SEQ ID NO: 655585 - DNA, 15 bp, Homo sapiens
ccaaggtgagaaaag

SEQ ID NO: 655586 - DNA, 15 bp, Homo sapiens
caaggtgagaaaaga

SEQ ID NO: 655587 - DNA, 15 bp, Homo sapiens
aaggtgagaaaagat

SEQ ID NO: 655588 - DNA, 15 bp, Homo sapiens
aggtgagaaaagatc

SEQ ID NO: 655589 - DNA, 15 bp, Homo sapiens
ggtgagaaaagatca

SEQ ID NO: 655590 - DNA, 15 bp, Homo sapiens
gtgagaaaagatcaa

SEQ ID NO: 655591 - DNA, 15 bp, Homo sapiens
tgagaaaagatcaac

SEQ ID NO: 655592 - DNA, 15 bp, Homo sapiens
gagaaaagatcaaca

SEQ ID NO: 655593 - DNA, 15 bp, Homo sapiens
agaaaagatcaacac

SEQ ID NO: 655594 - DNA, 15 bp, Homo sapiens
gaaaagatcaacaca

SEQ ID NO: 655595 - DNA, 15 bp, Homo sapiens
aaaagatcaacacac

SEQ ID NO: 655596 - DNA, 15 bp, Homo sapiens
aaagatcaacacaca

SEQ ID NO: 655597 - DNA, 15 bp, Homo sapiens
aagatcaacacacaa

SEQ ID NO: 655598 - DNA, 15 bp, Homo sapiens
agatcaacacacaag

SEQ ID NO: 655599 - DNA, 15 bp, Homo sapiens
gatcaacacacaagg

SEQ ID NO: 655600 - DNA, 15 bp, Homo sapiens
atcaacacacaagga

SEQ ID NO: 655601 - DNA, 15 bp, Homo sapiens
tcaacacacaaggaa

SEQ ID NO: 655602 - DNA, 15 bp, Homo sapiens
caacacacaaggaag

SEQ ID NO: 655603 - DNA, 15 bp, Homo sapiens
aacacacaaggaagg

SEQ ID NO: 655604 - DNA, 15 bp, Homo sapiens
acacacaaggaagga

SEQ ID NO: 655605 - DNA, 15 bp, Homo sapiens
cacacaaggaaggaa

SEQ ID NO: 655606 - DNA, 15 bp, Homo sapiens
acacaaggaaggaat

SEQ ID NO: 655607 - DNA, 15 bp, Homo sapiens
cacaaggaaggaata

SEQ ID NO: 655608 - DNA, 15 bp, Homo sapiens
acaaggaaggaatag

SEQ ID NO: 655609 - DNA, 15 bp, Homo sapiens
caaggaaggaatagc

SEQ ID NO: 655610 - DNA, 15 bp, Homo sapiens
aaggaaggaatagcc

SEQ ID NO: 655611 - DNA, 15 bp, Homo sapiens
aggaaggaatagcct

SEQ ID NO: 655612 - DNA, 15 bp, Homo sapiens
ggaaggaatagcctg

SEQ ID NO: 655613 - DNA, 15 bp, Homo sapiens
gaaggaatagcctgg

SEQ ID NO: 655614 - DNA, 15 bp, Homo sapiens
aaggaatagcctggt

SEQ ID NO: 655615 - DNA, 15 bp, Homo sapiens
aggaatagcctggtt

SEQ ID NO: 655616 - DNA, 15 bp, Homo sapiens
ggaatagcctggttc

SEQ ID NO: 655617 - DNA, 15 bp, Homo sapiens
gaatagcctggttct

SEQ ID NO: 655618 - DNA, 15 bp, Homo sapiens
aatagcctggttctg

SEQ ID NO: 655619 - DNA, 15 bp, Homo sapiens
atagcctggttctgt

SEQ ID NO: 655620 - DNA, 15 bp, Homo sapiens
tagcctggttctgtc

SEQ ID NO: 655621 - DNA, 15 bp, Homo sapiens
agcctggttctgtca

SEQ ID NO: 655622 - DNA, 15 bp, Homo sapiens
gcctggttctgtcag

SEQ ID NO: 655623 - DNA, 15 bp, Homo sapiens
cctggttctgtcagt

SEQ ID NO: 655624 - DNA, 15 bp, Homo sapiens
ctggttctgtcagtt

SEQ ID NO: 655625 - DNA, 15 bp, Homo sapiens
tggttctgtcagtta

SEQ ID NO: 655626 - DNA, 15 bp, Homo sapiens
ggttctgtcagttag

SEQ ID NO: 655627 - DNA, 15 bp, Homo sapiens
gttctgtcagttagc

SEQ ID NO: 655628 - DNA, 15 bp, Homo sapiens
ttctgtcagttagct

SEQ ID NO: 655629 - DNA, 15 bp, Homo sapiens
tctgtcagttagctt

SEQ ID NO: 655630 - DNA, 15 bp, Homo sapiens
ctgtcagttagcttt

SEQ ID NO: 655631 - DNA, 15 bp, Homo sapiens
tgtcagttagctttt

SEQ ID NO: 655632 - DNA, 15 bp, Homo sapiens
gtcagttagcttttt

SEQ ID NO: 655633 - DNA, 15 bp, Homo sapiens
tcagttagctttttg

SEQ ID NO: 655634 - DNA, 15 bp, Homo sapiens
cagttagctttttgc

SEQ ID NO: 655635 - DNA, 15 bp, Homo sapiens
agttagctttttgct

SEQ ID NO: 655636 - DNA, 15 bp, Homo sapiens
gttagctttttgctg

SEQ ID NO: 655637 - DNA, 15 bp, Homo sapiens
ttagctttttgctgc

SEQ ID NO: 655638 - DNA, 15 bp, Homo sapiens
tagctttttgctgct

SEQ ID NO: 655639 - DNA, 15 bp, Homo sapiens
agctttttgctgctt

SEQ ID NO: 655640 - DNA, 15 bp, Homo sapiens
gctttttgctgctta

SEQ ID NO: 655641 - DNA, 15 bp, Homo sapiens
ctttttgctgcttag

SEQ ID NO: 655642 - DNA, 15 bp, Homo sapiens
tttttgctgcttagc

SEQ ID NO: 655643 - DNA, 15 bp, Homo sapiens
ttttgctgcttagca

SEQ ID NO: 655644 - DNA, 15 bp, Homo sapiens
tttgctgcttagcaa

SEQ ID NO: 655645 - DNA, 15 bp, Homo sapiens
ttgctgcttagcaaa

SEQ ID NO: 655646 - DNA, 15 bp, Homo sapiens
tgctgcttagcaaac

SEQ ID NO: 655647 - DNA, 15 bp, Homo sapiens
gctgcttagcaaacc

SEQ ID NO: 655648 - DNA, 15 bp, Homo sapiens
ctgcttagcaaacca

SEQ ID NO: 655649 - DNA, 15 bp, Homo sapiens
tgcttagcaaaccat

SEQ ID NO: 655650 - DNA, 15 bp, Homo sapiens
gcttagcaaaccatc

SEQ ID NO: 655651 - DNA, 15 bp, Homo sapiens
cttagcaaaccatcc

SEQ ID NO: 655652 - DNA, 15 bp, Homo sapiens
ttagcaaaccatccc

SEQ ID NO: 655653 - DNA, 15 bp, Homo sapiens
tagcaaaccatccca

SEQ ID NO: 655654 - DNA, 15 bp, Homo sapiens
agcaaaccatcccaa

SEQ ID NO: 655655 - DNA, 15 bp, Homo sapiens
gcaaaccatcccaag

SEQ ID NO: 655656 - DNA, 15 bp, Homo sapiens
caaaccatcccaagc

SEQ ID NO: 655657 - DNA, 15 bp, Homo sapiens
aaaccatcccaagct

SEQ ID NO: 655658 - DNA, 15 bp, Homo sapiens
aaccatcccaagctt

SEQ ID NO: 655659 - DNA, 15 bp, Homo sapiens
accatcccaagcttg

SEQ ID NO: 655660 - DNA, 15 bp, Homo sapiens
ccatcccaagcttgg

SEQ ID NO: 655661 - DNA, 15 bp, Homo sapiens
catcccaagcttggt

SEQ ID NO: 655662 - DNA, 15 bp, Homo sapiens
atcccaagcttggtg

SEQ ID NO: 655663 - DNA, 15 bp, Homo sapiens
tcccaagcttggtgt

SEQ ID NO: 655664 - DNA, 15 bp, Homo sapiens
cccaagcttggtgtc

SEQ ID NO: 655665 - DNA, 15 bp, Homo sapiens
ccaagcttggtgtct

SEQ ID NO: 655666 - DNA, 15 bp, Homo sapiens
caagcttggtgtctt

SEQ ID NO: 655667 - DNA, 15 bp, Homo sapiens
aagcttggtgtctta

SEQ ID NO: 655668 - DNA, 15 bp, Homo sapiens
agcttggtgtcttac

SEQ ID NO: 655669 - DNA, 15 bp, Homo sapiens
gcttggtgtcttaca

SEQ ID NO: 655670 - DNA, 15 bp, Homo sapiens
cttggtgtcttacaa

SEQ ID NO: 655671 - DNA, 15 bp, Homo sapiens
ttggtgtcttacaat

SEQ ID NO: 655672 - DNA, 15 bp, Homo sapiens
tggtgtcttacaata

SEQ ID NO: 655673 - DNA, 15 bp, Homo sapiens
ggtgtcttacaatag

SEQ ID NO: 655674 - DNA, 15 bp, Homo sapiens
gtgtcttacaatagc

SEQ ID NO: 655675 - DNA, 15 bp, Homo sapiens
tgtcttacaatagct

SEQ ID NO: 655676 - DNA, 15 bp, Homo sapiens
gtcttacaatagctg

SEQ ID NO: 655677 - DNA, 15 bp, Homo sapiens
tcttacaatagctgg

SEQ ID NO: 655678 - DNA, 15 bp, Homo sapiens
cttacaatagctggg

SEQ ID NO: 655679 - DNA, 15 bp, Homo sapiens
ttacaatagctggga

SEQ ID NO: 655680 - DNA, 15 bp, Homo sapiens
tacaatagctgggat

SEQ ID NO: 655681 - DNA, 15 bp, Homo sapiens
acaatagctgggatt

SEQ ID NO: 655682 - DNA, 15 bp, Homo sapiens
caatagctgggatta

SEQ ID NO: 655683 - DNA, 15 bp, Homo sapiens
aatagctgggattaa

SEQ ID NO: 655684 - DNA, 15 bp, Homo sapiens
atagctgggattaat

SEQ ID NO: 655685 - DNA, 15 bp, Homo sapiens
tagctgggattaatt

SEQ ID NO: 655686 - DNA, 15 bp, Homo sapiens
agctgggattaatta

SEQ ID NO: 655687 - DNA, 15 bp, Homo sapiens
gctgggattaattat

SEQ ID NO: 655688 - DNA, 15 bp, Homo sapiens
ctgggattaattatt

SEQ ID NO: 655689 - DNA, 15 bp, Homo sapiens
tgggattaattattt

SEQ ID NO: 655690 - DNA, 15 bp, Homo sapiens
gggattaattatttc

SEQ ID NO: 655691 - DNA, 15 bp, Homo sapiens
ggattaattatttct

SEQ ID NO: 655692 - DNA, 15 bp, Homo sapiens
gattaattatttctc

SEQ ID NO: 655693 - DNA, 15 bp, Homo sapiens
attaattatttctca

SEQ ID NO: 655694 - DNA, 15 bp, Homo sapiens
ttaattatttctcaa

SEQ ID NO: 655695 - DNA, 15 bp, Homo sapiens
taattatttctcaag

SEQ ID NO: 655696 - DNA, 15 bp, Homo sapiens
aattatttctcaaga

SEQ ID NO: 655697 - DNA, 15 bp, Homo sapiens
attatttctcaagat

SEQ ID NO: 655698 - DNA, 15 bp, Homo sapiens
ttatttctcaagatt

SEQ ID NO: 655699 - DNA, 15 bp, Homo sapiens
tatttctcaagattc

SEQ ID NO: 655700 - DNA, 15 bp, Homo sapiens
atttctcaagattct

SEQ ID NO: 655701 - DNA, 15 bp, Homo sapiens
tttctcaagattctg

SEQ ID NO: 655702 - DNA, 15 bp, Homo sapiens
ttctcaagattctgt

SEQ ID NO: 655703 - DNA, 15 bp, Homo sapiens
tctcaagattctgtg

SEQ ID NO: 655704 - DNA, 15 bp, Homo sapiens
ctcaagattctgtgg

SEQ ID NO: 655705 - DNA, 15 bp, Homo sapiens
tcaagattctgtggg

SEQ ID NO: 655706 - DNA, 15 bp, Homo sapiens
caagattctgtgggt

SEQ ID NO: 655707 - DNA, 15 bp, Homo sapiens
aagattctgtgggtc

SEQ ID NO: 655708 - DNA, 15 bp, Homo sapiens
agattctgtgggtca

SEQ ID NO: 655709 - DNA, 15 bp, Homo sapiens
gattctgtgggtcat

SEQ ID NO: 655710 - DNA, 15 bp, Homo sapiens
attctgtgggtcatc

SEQ ID NO: 655711 - DNA, 15 bp, Homo sapiens
ttctgtgggtcatca

SEQ ID NO: 655712 - DNA, 15 bp, Homo sapiens
tctgtgggtcatcag

SEQ ID NO: 655713 - DNA, 15 bp, Homo sapiens
ctgtgggtcatcagg

SEQ ID NO: 655714 - DNA, 15 bp, Homo sapiens
tgtgggtcatcaggg

SEQ ID NO: 655715 - DNA, 15 bp, Homo sapiens
gtgggtcatcagggc

SEQ ID NO: 655716 - DNA, 15 bp, Homo sapiens
tgggtcatcagggcg

SEQ ID NO: 655717 - DNA, 15 bp, Homo sapiens
gggtcatcagggcgg

SEQ ID NO: 655718 - DNA, 15 bp, Homo sapiens
ggtcatcagggcggt

SEQ ID NO: 655719 - DNA, 15 bp, Homo sapiens
gtcatcagggcggtt

SEQ ID NO: 655720 - DNA, 15 bp, Homo sapiens
tcatcagggcggttc

SEQ ID NO: 655721 - DNA, 15 bp, Homo sapiens
catcagggcggttct

SEQ ID NO: 655722 - DNA, 15 bp, Homo sapiens
atcagggcggttctt

SEQ ID NO: 655723 - DNA, 15 bp, Homo sapiens
tcagggcggttcttc

SEQ ID NO: 655724 - DNA, 15 bp, Homo sapiens
cagggcggttcttct

SEQ ID NO: 655725 - DNA, 15 bp, Homo sapiens
agggcggttcttctg

SEQ ID NO: 655726 - DNA, 15 bp, Homo sapiens
gggcggttcttctga

SEQ ID NO: 655727 - DNA, 15 bp, Homo sapiens
ggcggttcttctgac

SEQ ID NO: 655728 - DNA, 15 bp, Homo sapiens
gcggttcttctgacc

SEQ ID NO: 655729 - DNA, 15 bp, Homo sapiens
cggttcttctgacct

SEQ ID NO: 655730 - DNA, 15 bp, Homo sapiens
ggttcttctgacctg

SEQ ID NO: 655731 - DNA, 15 bp, Homo sapiens
gttcttctgacctgg

SEQ ID NO: 655732 - DNA, 15 bp, Homo sapiens
ttcttctgacctggg

SEQ ID NO: 655733 - DNA, 15 bp, Homo sapiens
tcttctgacctgggc

SEQ ID NO: 655734 - DNA, 15 bp, Homo sapiens
cttctgacctgggct

SEQ ID NO: 655735 - DNA, 15 bp, Homo sapiens
ttctgacctgggctg

SEQ ID NO: 655736 - DNA, 15 bp, Homo sapiens
tctgacctgggctga

SEQ ID NO: 655737 - DNA, 15 bp, Homo sapiens
ctgacctgggctgac

SEQ ID NO: 655738 - DNA, 15 bp, Homo sapiens
tgacctgggctgact

SEQ ID NO: 655739 - DNA, 15 bp, Homo sapiens
gacctgggctgactc

SEQ ID NO: 655740 - DNA, 15 bp, Homo sapiens
acctgggctgactca

SEQ ID NO: 655741 - DNA, 15 bp, Homo sapiens
cctgggctgactcag

SEQ ID NO: 655742 - DNA, 15 bp, Homo sapiens
ctgggctgactcagt

SEQ ID NO: 655743 - DNA, 15 bp, Homo sapiens
tgggctgactcagtc

SEQ ID NO: 655744 - DNA, 15 bp, Homo sapiens
gggctgactcagtca

SEQ ID NO: 655745 - DNA, 15 bp, Homo sapiens
ggctgactcagtcag

SEQ ID NO: 655746 - DNA, 15 bp, Homo sapiens
gctgactcagtcagg

SEQ ID NO: 655747 - DNA, 15 bp, Homo sapiens
ctgactcagtcaggc

SEQ ID NO: 655748 - DNA, 15 bp, Homo sapiens
tgactcagtcaggct

SEQ ID NO: 655749 - DNA, 15 bp, Homo sapiens
gactcagtcaggctt

SEQ ID NO: 655750 - DNA, 15 bp, Homo sapiens
actcagtcaggcttc

SEQ ID NO: 655751 - DNA, 15 bp, Homo sapiens
ctcagtcaggcttct

SEQ ID NO: 655752 - DNA, 15 bp, Homo sapiens
tcagtcaggcttctg

SEQ ID NO: 655753 - DNA, 15 bp, Homo sapiens
cagtcaggcttctgt

SEQ ID NO: 655754 - DNA, 15 bp, Homo sapiens
agtcaggcttctgtg

SEQ ID NO: 655755 - DNA, 15 bp, Homo sapiens
gtcaggcttctgtgt

SEQ ID NO: 655756 - DNA, 15 bp, Homo sapiens
tcaggcttctgtgta

SEQ ID NO: 655757 - DNA, 15 bp, Homo sapiens
caggcttctgtgtat

SEQ ID NO: 655758 - DNA, 15 bp, Homo sapiens
aggcttctgtgtatt

SEQ ID NO: 655759 - DNA, 15 bp, Homo sapiens
ggcttctgtgtattc

SEQ ID NO: 655760 - DNA, 15 bp, Homo sapiens
gcttctgtgtattct

SEQ ID NO: 655761 - DNA, 15 bp, Homo sapiens
cttctgtgtattctt

SEQ ID NO: 655762 - DNA, 15 bp, Homo sapiens
ttctgtgtattcttc

SEQ ID NO: 655763 - DNA, 15 bp, Homo sapiens
tctgtgtattcttct

SEQ ID NO: 655764 - DNA, 15 bp, Homo sapiens
ctgtgtattcttctg

SEQ ID NO: 655765 - DNA, 15 bp, Homo sapiens
tgtgtattcttctgt

SEQ ID NO: 655766 - DNA, 15 bp, Homo sapiens
gtgtattcttctgtc

SEQ ID NO: 655767 - DNA, 15 bp, Homo sapiens
tgtattcttctgtct

SEQ ID NO: 655768 - DNA, 15 bp, Homo sapiens
gtattcttctgtctc

SEQ ID NO: 655769 - DNA, 15 bp, Homo sapiens
tattcttctgtctcc

SEQ ID NO: 655770 - DNA, 15 bp, Homo sapiens
attcttctgtctcca

SEQ ID NO: 655771 - DNA, 15 bp, Homo sapiens
ttcttctgtctccac

SEQ ID NO: 655772 - DNA, 15 bp, Homo sapiens
tcttctgtctccaca

SEQ ID NO: 655773 - DNA, 15 bp, Homo sapiens
cttctgtctccacat

SEQ ID NO: 655774 - DNA, 15 bp, Homo sapiens
ttctgtctccacatg

SEQ ID NO: 655775 - DNA, 15 bp, Homo sapiens
tctgtctccacatgg

SEQ ID NO: 655776 - DNA, 15 bp, Homo sapiens
ctgtctccacatggc

SEQ ID NO: 655777 - DNA, 15 bp, Homo sapiens
tgtctccacatggcc

SEQ ID NO: 655778 - DNA, 15 bp, Homo sapiens
gtctccacatggcct

SEQ ID NO: 655779 - DNA, 15 bp, Homo sapiens
tctccacatggcctg

SEQ ID NO: 655780 - DNA, 15 bp, Homo sapiens
ctccacatggcctgt

SEQ ID NO: 655781 - DNA, 15 bp, Homo sapiens
tccacatggcctgtc

SEQ ID NO: 655782 - DNA, 15 bp, Homo sapiens
ccacatggcctgtct

SEQ ID NO: 655783 - DNA, 15 bp, Homo sapiens
cacatggcctgtcta

SEQ ID NO: 655784 - DNA, 15 bp, Homo sapiens
acatggcctgtctag

SEQ ID NO: 655785 - DNA, 15 bp, Homo sapiens
catggcctgtctagc

SEQ ID NO: 655786 - DNA, 15 bp, Homo sapiens
atggcctgtctagca

SEQ ID NO: 655787 - DNA, 15 bp, Homo sapiens
tggcctgtctagcag

SEQ ID NO: 655788 - DNA, 15 bp, Homo sapiens
ggcctgtctagcaga

SEQ ID NO: 655789 - DNA, 15 bp, Homo sapiens
gcctgtctagcagat

SEQ ID NO: 655790 - DNA, 15 bp, Homo sapiens
cctgtctagcagatg

SEQ ID NO: 655791 - DNA, 15 bp, Homo sapiens
ctgtctagcagatga

SEQ ID NO: 655792 - DNA, 15 bp, Homo sapiens
tgtctagcagatgag

SEQ ID NO: 655793 - DNA, 15 bp, Homo sapiens
gtctagcagatgagc

SEQ ID NO: 655794 - DNA, 15 bp, Homo sapiens
tctagcagatgagct

SEQ ID NO: 655795 - DNA, 15 bp, Homo sapiens
ctagcagatgagctt

SEQ ID NO: 655796 - DNA, 15 bp, Homo sapiens
tagcagatgagcttc

SEQ ID NO: 655797 - DNA, 15 bp, Homo sapiens
agcagatgagcttct

SEQ ID NO: 655798 - DNA, 15 bp, Homo sapiens
gcagatgagcttctt

SEQ ID NO: 655799 - DNA, 15 bp, Homo sapiens
cagatgagcttcttt

SEQ ID NO: 655800 - DNA, 15 bp, Homo sapiens
agatgagcttctttt

SEQ ID NO: 655801 - DNA, 15 bp, Homo sapiens
gatgagcttcttttc

SEQ ID NO: 655802 - DNA, 15 bp, Homo sapiens
atgagcttcttttct

SEQ ID NO: 655803 - DNA, 15 bp, Homo sapiens
tgagcttcttttctt

SEQ ID NO: 655804 - DNA, 15 bp, Homo sapiens
gagcttcttttcttc

SEQ ID NO: 655805 - DNA, 15 bp, Homo sapiens
agcttcttttcttca

SEQ ID NO: 655806 - DNA, 15 bp, Homo sapiens
gcttcttttcttcat

SEQ ID NO: 655807 - DNA, 15 bp, Homo sapiens
cttcttttcttcata

SEQ ID NO: 655808 - DNA, 15 bp, Homo sapiens
ttcttttcttcatat

SEQ ID NO: 655809 - DNA, 15 bp, Homo sapiens
tcttttcttcatatt

SEQ ID NO: 655810 - DNA, 15 bp, Homo sapiens
cttttcttcatatta

SEQ ID NO: 655811 - DNA, 15 bp, Homo sapiens
ttttcttcatattat

SEQ ID NO: 655812 - DNA, 15 bp, Homo sapiens
tttcttcatattatg

SEQ ID NO: 655813 - DNA, 15 bp, Homo sapiens
ttcttcatattatgg

SEQ ID NO: 655814 - DNA, 15 bp, Homo sapiens
tcttcatattatggc

SEQ ID NO: 655815 - DNA, 15 bp, Homo sapiens
cttcatattatggcc

SEQ ID NO: 655816 - DNA, 15 bp, Homo sapiens
ttcatattatggcct

SEQ ID NO: 655817 - DNA, 15 bp, Homo sapiens
tcatattatggcctc

SEQ ID NO: 655818 - DNA, 15 bp, Homo sapiens
catattatggcctca

SEQ ID NO: 655819 - DNA, 15 bp, Homo sapiens
atattatggcctcag

SEQ ID NO: 655820 - DNA, 15 bp, Homo sapiens
tattatggcctcaga

SEQ ID NO: 655821 - DNA, 15 bp, Homo sapiens
attatggcctcagag

SEQ ID NO: 655822 - DNA, 15 bp, Homo sapiens
ttatggcctcagagt

SEQ ID NO: 655823 - DNA, 15 bp, Homo sapiens
tatggcctcagagtt

SEQ ID NO: 655824 - DNA, 15 bp, Homo sapiens
atggcctcagagttc

SEQ ID NO: 655825 - DNA, 15 bp, Homo sapiens
tggcctcagagttcc

SEQ ID NO: 655826 - DNA, 15 bp, Homo sapiens
ggcctcagagttcca

SEQ ID NO: 655827 - DNA, 15 bp, Homo sapiens
gcctcagagttccaa

SEQ ID NO: 655828 - DNA, 15 bp, Homo sapiens
cctcagagttccaag

SEQ ID NO: 655829 - DNA, 15 bp, Homo sapiens
ctcagagttccaagt

SEQ ID NO: 655830 - DNA, 15 bp, Homo sapiens
tcagagttccaagtg

SEQ ID NO: 655831 - DNA, 15 bp, Homo sapiens
cagagttccaagtgc

SEQ ID NO: 655832 - DNA, 15 bp, Homo sapiens
agagttccaagtgcc

SEQ ID NO: 655833 - DNA, 15 bp, Homo sapiens
gagttccaagtgcca

SEQ ID NO: 655834 - DNA, 15 bp, Homo sapiens
agttccaagtgccac

SEQ ID NO: 655835 - DNA, 15 bp, Homo sapiens
gttccaagtgccaca

SEQ ID NO: 655836 - DNA, 15 bp, Homo sapiens
ttccaagtgccacaa

SEQ ID NO: 655837 - DNA, 15 bp, Homo sapiens
tccaagtgccacaaa

SEQ ID NO: 655838 - DNA, 15 bp, Homo sapiens
ccaagtgccacaaaa

SEQ ID NO: 655839 - DNA, 15 bp, Homo sapiens
caagtgccacaaaag

SEQ ID NO: 655840 - DNA, 15 bp, Homo sapiens
aagtgccacaaaaga

SEQ ID NO: 655841 - DNA, 15 bp, Homo sapiens
agtgccacaaaagag

SEQ ID NO: 655842 - DNA, 15 bp, Homo sapiens
gtgccacaaaagagg

SEQ ID NO: 655843 - DNA, 15 bp, Homo sapiens
tgccacaaaagaggg

SEQ ID NO: 655844 - DNA, 15 bp, Homo sapiens
gccacaaaagagggc

SEQ ID NO: 655845 - DNA, 15 bp, Homo sapiens
ccacaaaagagggca

SEQ ID NO: 655846 - DNA, 15 bp, Homo sapiens
cacaaaagagggcaa

SEQ ID NO: 655847 - DNA, 15 bp, Homo sapiens
acaaaagagggcaag

SEQ ID NO: 655848 - DNA, 15 bp, Homo sapiens
caaaagagggcaagc

SEQ ID NO: 655849 - DNA, 15 bp, Homo sapiens
aaaagagggcaagcc

SEQ ID NO: 655850 - DNA, 15 bp, Homo sapiens
aaagagggcaagccc

SEQ ID NO: 655851 - DNA, 15 bp, Homo sapiens
aagagggcaagcccc

SEQ ID NO: 655852 - DNA, 15 bp, Homo sapiens
agagggcaagcccca

SEQ ID NO: 655853 - DNA, 15 bp, Homo sapiens
gagggcaagccccac

SEQ ID NO: 655854 - DNA, 15 bp, Homo sapiens
agggcaagccccact

SEQ ID NO: 655855 - DNA, 15 bp, Homo sapiens
gggcaagccccactg

SEQ ID NO: 655856 - DNA, 15 bp, Homo sapiens
ggcaagccccactgt

SEQ ID NO: 655857 - DNA, 15 bp, Homo sapiens
gcaagccccactgtg

SEQ ID NO: 655858 - DNA, 15 bp, Homo sapiens
caagccccactgtgc

SEQ ID NO: 655859 - DNA, 15 bp, Homo sapiens
aagccccactgtgca

SEQ ID NO: 655860 - DNA, 15 bp, Homo sapiens
agccccactgtgcaa

SEQ ID NO: 655861 - DNA, 15 bp, Homo sapiens
gccccactgtgcaag

SEQ ID NO: 655862 - DNA, 15 bp, Homo sapiens
ccccactgtgcaagt

SEQ ID NO: 655863 - DNA, 15 bp, Homo sapiens
cccactgtgcaagta

SEQ ID NO: 655864 - DNA, 15 bp, Homo sapiens
ccactgtgcaagtac

SEQ ID NO: 655865 - DNA, 15 bp, Homo sapiens
cactgtgcaagtact

SEQ ID NO: 655866 - DNA, 15 bp, Homo sapiens
actgtgcaagtactt

SEQ ID NO: 655867 - DNA, 15 bp, Homo sapiens
ctgtgcaagtacttt

SEQ ID NO: 655868 - DNA, 15 bp, Homo sapiens
tgtgcaagtactttt

SEQ ID NO: 655869 - DNA, 15 bp, Homo sapiens
gtgcaagtacttttc

SEQ ID NO: 655870 - DNA, 15 bp, Homo sapiens
tgcaagtacttttca

SEQ ID NO: 655871 - DNA, 15 bp, Homo sapiens
gcaagtacttttcaa

SEQ ID NO: 655872 - DNA, 15 bp, Homo sapiens
caagtacttttcaag

SEQ ID NO: 655873 - DNA, 15 bp, Homo sapiens
aagtacttttcaagt

SEQ ID NO: 655874 - DNA, 15 bp, Homo sapiens
agtacttttcaagtc

SEQ ID NO: 655875 - DNA, 15 bp, Homo sapiens
gtacttttcaagtct

SEQ ID NO: 655876 - DNA, 15 bp, Homo sapiens
tacttttcaagtctc

SEQ ID NO: 655877 - DNA, 15 bp, Homo sapiens
acttttcaagtctct

SEQ ID NO: 655878 - DNA, 15 bp, Homo sapiens
cttttcaagtctctc

SEQ ID NO: 655879 - DNA, 15 bp, Homo sapiens
ttttcaagtctctcc

SEQ ID NO: 655880 - DNA, 15 bp, Homo sapiens
tttcaagtctctcca

SEQ ID NO: 655881 - DNA, 15 bp, Homo sapiens
ttcaagtctctccac

SEQ ID NO: 655882 - DNA, 15 bp, Homo sapiens
tcaagtctctccacg

SEQ ID NO: 655883 - DNA, 15 bp, Homo sapiens
caagtctctccacgc

SEQ ID NO: 655884 - DNA, 15 bp, Homo sapiens
aagtctctccacgca

SEQ ID NO: 655885 - DNA, 15 bp, Homo sapiens
agtctctccacgcaa

SEQ ID NO: 655886 - DNA, 15 bp, Homo sapiens
gtctctccacgcaaa

SEQ ID NO: 655887 - DNA, 15 bp, Homo sapiens
tctctccacgcaaag

SEQ ID NO: 655888 - DNA, 15 bp, Homo sapiens
ctctccacgcaaaga

SEQ ID NO: 655889 - DNA, 15 bp, Homo sapiens
tctccacgcaaagaa

SEQ ID NO: 655890 - DNA, 15 bp, Homo sapiens
ctccacgcaaagaaa

SEQ ID NO: 655891 - DNA, 15 bp, Homo sapiens
tccacgcaaagaaac

SEQ ID NO: 655892 - DNA, 15 bp, Homo sapiens
ccacgcaaagaaact

SEQ ID NO: 655893 - DNA, 15 bp, Homo sapiens
cacgcaaagaaactt

SEQ ID NO: 655894 - DNA, 15 bp, Homo sapiens
acgcaaagaaacttt

SEQ ID NO: 655895 - DNA, 15 bp, Homo sapiens
cgcaaagaaactttc

SEQ ID NO: 655896 - DNA, 15 bp, Homo sapiens
gcaaagaaactttct

SEQ ID NO: 655897 - DNA, 15 bp, Homo sapiens
caaagaaactttcta

SEQ ID NO: 655898 - DNA, 15 bp, Homo sapiens
aaagaaactttctaa

SEQ ID NO: 655899 - DNA, 15 bp, Homo sapiens
aagaaactttctaat

SEQ ID NO: 655900 - DNA, 15 bp, Homo sapiens
agaaactttctaatt

SEQ ID NO: 655901 - DNA, 15 bp, Homo sapiens
gaaactttctaattt

SEQ ID NO: 655902 - DNA, 15 bp, Homo sapiens
aaactttctaatttt

SEQ ID NO: 655903 - DNA, 15 bp, Homo sapiens
aactttctaattttc

SEQ ID NO: 655904 - DNA, 15 bp, Homo sapiens
actttctaattttct

SEQ ID NO: 655905 - DNA, 15 bp, Homo sapiens
ctttctaattttctg

SEQ ID NO: 655906 - DNA, 15 bp, Homo sapiens
tttctaattttctgt

SEQ ID NO: 655907 - DNA, 15 bp, Homo sapiens
ttctaattttctgtt

SEQ ID NO: 655908 - DNA, 15 bp, Homo sapiens
tctaattttctgttt

SEQ ID NO: 655909 - DNA, 15 bp, Homo sapiens
ctaattttctgtttg

SEQ ID NO: 655910 - DNA, 15 bp, Homo sapiens
taattttctgtttgg

SEQ ID NO: 655911 - DNA, 15 bp, Homo sapiens
aattttctgtttggc

SEQ ID NO: 655912 - DNA, 15 bp, Homo sapiens
attttctgtttggcc

SEQ ID NO: 655913 - DNA, 15 bp, Homo sapiens
ttttctgtttggcca

SEQ ID NO: 655914 - DNA, 15 bp, Homo sapiens
tttctgtttggccaa

SEQ ID NO: 655915 - DNA, 15 bp, Homo sapiens
ttctgtttggccaaa

SEQ ID NO: 655916 - DNA, 15 bp, Homo sapiens
tctgtttggccaaag

SEQ ID NO: 655917 - DNA, 15 bp, Homo sapiens
ctgtttggccaaaga

SEQ ID NO: 655918 - DNA, 15 bp, Homo sapiens
tgtttggccaaagaa

SEQ ID NO: 655919 - DNA, 15 bp, Homo sapiens
gtttggccaaagaaa

SEQ ID NO: 655920 - DNA, 15 bp, Homo sapiens
tttggccaaagaaag

SEQ ID NO: 655921 - DNA, 15 bp, Homo sapiens
ttggccaaagaaagt

SEQ ID NO: 655922 - DNA, 15 bp, Homo sapiens
tggccaaagaaagtc

SEQ ID NO: 655923 - DNA, 15 bp, Homo sapiens
ggccaaagaaagtca

SEQ ID NO: 655924 - DNA, 15 bp, Homo sapiens
gccaaagaaagtcat

SEQ ID NO: 655925 - DNA, 15 bp, Homo sapiens
ccaaagaaagtcata

SEQ ID NO: 655926 - DNA, 15 bp, Homo sapiens
caaagaaagtcatac

SEQ ID NO: 655927 - DNA, 15 bp, Homo sapiens
aaagaaagtcatacc

SEQ ID NO: 655928 - DNA, 15 bp, Homo sapiens
aagaaagtcatacca

SEQ ID NO: 655929 - DNA, 15 bp, Homo sapiens
agaaagtcataccat

SEQ ID NO: 655930 - DNA, 15 bp, Homo sapiens
gaaagtcataccatc

SEQ ID NO: 655931 - DNA, 15 bp, Homo sapiens
aaagtcataccatca

SEQ ID NO: 655932 - DNA, 15 bp, Homo sapiens
aagtcataccatcaa

SEQ ID NO: 655933 - DNA, 15 bp, Homo sapiens
agtcataccatcaag

SEQ ID NO: 655934 - DNA, 15 bp, Homo sapiens
gtcataccatcaagc

SEQ ID NO: 655935 - DNA, 15 bp, Homo sapiens
tcataccatcaagcc

SEQ ID NO: 655936 - DNA, 15 bp, Homo sapiens
cataccatcaagccc

SEQ ID NO: 655937 - DNA, 15 bp, Homo sapiens
ataccatcaagccca

SEQ ID NO: 655938 - DNA, 15 bp, Homo sapiens
taccatcaagcccag

SEQ ID NO: 655939 - DNA, 15 bp, Homo sapiens
accatcaagcccagg

SEQ ID NO: 655940 - DNA, 15 bp, Homo sapiens
ccatcaagcccaggt

SEQ ID NO: 655941 - DNA, 15 bp, Homo sapiens
catcaagcccaggtt

SEQ ID NO: 655942 - DNA, 15 bp, Homo sapiens
atcaagcccaggttt

SEQ ID NO: 655943 - DNA, 15 bp, Homo sapiens
tcaagcccaggttta

SEQ ID NO: 655944 - DNA, 15 bp, Homo sapiens
caagcccaggtttaa

SEQ ID NO: 655945 - DNA, 15 bp, Homo sapiens
aagcccaggtttaag

SEQ ID NO: 655946 - DNA, 15 bp, Homo sapiens
agcccaggtttaagg

SEQ ID NO: 655947 - DNA, 15 bp, Homo sapiens
gcccaggtttaagga

SEQ ID NO: 655948 - DNA, 15 bp, Homo sapiens
cccaggtttaaggaa

SEQ ID NO: 655949 - DNA, 15 bp, Homo sapiens
ccaggtttaaggaat

SEQ ID NO: 655950 - DNA, 15 bp, Homo sapiens
caggtttaaggaata

SEQ ID NO: 655951 - DNA, 15 bp, Homo sapiens
aggtttaaggaatag

SEQ ID NO: 655952 - DNA, 15 bp, Homo sapiens
ggtttaaggaataga

SEQ ID NO: 655953 - DNA, 15 bp, Homo sapiens
gtttaaggaatagaa

SEQ ID NO: 655954 - DNA, 15 bp, Homo sapiens
tttaaggaatagaaa

SEQ ID NO: 655955 - DNA, 15 bp, Homo sapiens
ttaaggaatagaaaa

SEQ ID NO: 655956 - DNA, 15 bp, Homo sapiens
taaggaatagaaaaa

SEQ ID NO: 655957 - DNA, 15 bp, Homo sapiens
aaggaatagaaaaaa

SEQ ID NO: 655958 - DNA, 15 bp, Homo sapiens
aggaatagaaaaaaa

SEQ ID NO: 655959 - DNA, 15 bp, Homo sapiens
ggaatagaaaaaaat

SEQ ID NO: 655960 - DNA, 15 bp, Homo sapiens
gaatagaaaaaaata

SEQ ID NO: 655961 - DNA, 15 bp, Homo sapiens
aatagaaaaaaatag

SEQ ID NO: 655962 - DNA, 15 bp, Homo sapiens
atagaaaaaaataga

SEQ ID NO: 655963 - DNA, 15 bp, Homo sapiens
tagaaaaaaatagaa

SEQ ID NO: 655964 - DNA, 15 bp, Homo sapiens
agaaaaaaatagaat

SEQ ID NO: 655965 - DNA, 15 bp, Homo sapiens
gaaaaaaatagaatc

SEQ ID NO: 655966 - DNA, 15 bp, Homo sapiens
aaaaaaatagaatcc

SEQ ID NO: 655967 - DNA, 15 bp, Homo sapiens
aaaaaatagaatcca

SEQ ID NO: 655968 - DNA, 15 bp, Homo sapiens
aaaaatagaatccac

SEQ ID NO: 655969 - DNA, 15 bp, Homo sapiens
aaaatagaatccact

SEQ ID NO: 655970 - DNA, 15 bp, Homo sapiens
aaatagaatccactt

SEQ ID NO: 655971 - DNA, 15 bp, Homo sapiens
aatagaatccacttt

SEQ ID NO: 655972 - DNA, 15 bp, Homo sapiens
atagaatccactttt

SEQ ID NO: 655973 - DNA, 15 bp, Homo sapiens
tagaatccacttttt

SEQ ID NO: 655974 - DNA, 15 bp, Homo sapiens
agaatccactttttg

SEQ ID NO: 655975 - DNA, 15 bp, Homo sapiens
gaatccactttttga

SEQ ID NO: 655976 - DNA, 15 bp, Homo sapiens
aatccactttttgat

SEQ ID NO: 655977 - DNA, 15 bp, Homo sapiens
atccactttttgatg

SEQ ID NO: 655978 - DNA, 15 bp, Homo sapiens
tccactttttgatga

SEQ ID NO: 655979 - DNA, 15 bp, Homo sapiens
ccactttttgatgag

SEQ ID NO: 655980 - DNA, 15 bp, Homo sapiens
cactttttgatgaga

SEQ ID NO: 655981 - DNA, 15 bp, Homo sapiens
actttttgatgagag

SEQ ID NO: 655982 - DNA, 15 bp, Homo sapiens
ctttttgatgagagg

SEQ ID NO: 655983 - DNA, 15 bp, Homo sapiens
tttttgatgagagga

SEQ ID NO: 655984 - DNA, 15 bp, Homo sapiens
ttttgatgagaggag

SEQ ID NO: 655985 - DNA, 15 bp, Homo sapiens
tttgatgagaggagt

SEQ ID NO: 655986 - DNA, 15 bp, Homo sapiens
ttgatgagaggagta

SEQ ID NO: 655987 - DNA, 15 bp, Homo sapiens
tgatgagaggagtaa

SEQ ID NO: 655988 - DNA, 15 bp, Homo sapiens
gatgagaggagtaaa

SEQ ID NO: 655989 - DNA, 15 bp, Homo sapiens
atgagaggagtaaaa

SEQ ID NO: 655990 - DNA, 15 bp, Homo sapiens
tgagaggagtaaaaa

SEQ ID NO: 655991 - DNA, 15 bp, Homo sapiens
gagaggagtaaaaaa

SEQ ID NO: 655992 - DNA, 15 bp, Homo sapiens
agaggagtaaaaaag

SEQ ID NO: 655993 - DNA, 15 bp, Homo sapiens
gaggagtaaaaaagc

SEQ ID NO: 655994 - DNA, 15 bp, Homo sapiens
aggagtaaaaaagcc

SEQ ID NO: 655995 - DNA, 15 bp, Homo sapiens
ggagtaaaaaagcca

SEQ ID NO: 655996 - DNA, 15 bp, Homo sapiens
gagtaaaaaagccat

SEQ ID NO: 655997 - DNA, 15 bp, Homo sapiens
agtaaaaaagccatg

SEQ ID NO: 655998 - DNA, 15 bp, Homo sapiens
gtaaaaaagccatgt

SEQ ID NO: 655999 - DNA, 15 bp, Homo sapiens
taaaaaagccatgtt

SEQ ID NO: 656000 - DNA, 15 bp, Homo sapiens
aaaaaagccatgttg

SEQ ID NO: 656001 - DNA, 15 bp, Homo sapiens
aaaaagccatgttgc

SEQ ID NO: 656002 - DNA, 15 bp, Homo sapiens
aaaagccatgttgca

SEQ ID NO: 656003 - DNA, 15 bp, Homo sapiens
aaagccatgttgcaa

SEQ ID NO: 656004 - DNA, 15 bp, Homo sapiens
aagccatgttgcaaa

SEQ ID NO: 656005 - DNA, 15 bp, Homo sapiens
agccatgttgcaaag

SEQ ID NO: 656006 - DNA, 15 bp, Homo sapiens
gccatgttgcaaagg

SEQ ID NO: 656007 - DNA, 15 bp, Homo sapiens
ccatgttgcaaaggg

SEQ ID NO: 656008 - DNA, 15 bp, Homo sapiens
catgttgcaaaggga

SEQ ID NO: 656009 - DNA, 15 bp, Homo sapiens
atgttgcaaagggat

SEQ ID NO: 656010 - DNA, 15 bp, Homo sapiens
tgttgcaaagggatg

SEQ ID NO: 656011 - DNA, 15 bp, Homo sapiens
gttgcaaagggatgc

SEQ ID NO: 656012 - DNA, 15 bp, Homo sapiens
ttgcaaagggatgca

SEQ ID NO: 656013 - DNA, 15 bp, Homo sapiens
tgcaaagggatgcat

SEQ ID NO: 656014 - DNA, 15 bp, Homo sapiens
gcaaagggatgcatg

SEQ ID NO: 656015 - DNA, 15 bp, Homo sapiens
caaagggatgcatga

SEQ ID NO: 656016 - DNA, 15 bp, Homo sapiens
aaagggatgcatgaa

SEQ ID NO: 656017 - DNA, 15 bp, Homo sapiens
aagggatgcatgaaa

SEQ ID NO: 656018 - DNA, 15 bp, Homo sapiens
agggatgcatgaaag

SEQ ID NO: 656019 - DNA, 15 bp, Homo sapiens
gggatgcatgaaagt

SEQ ID NO: 656020 - DNA, 15 bp, Homo sapiens
ggatgcatgaaagtg

SEQ ID NO: 656021 - DNA, 15 bp, Homo sapiens
gatgcatgaaagtgt

SEQ ID NO: 656022 - DNA, 15 bp, Homo sapiens
atgcatgaaagtgtg

SEQ ID NO: 656023 - DNA, 15 bp, Homo sapiens
tgcatgaaagtgtga

SEQ ID NO: 656024 - DNA, 15 bp, Homo sapiens
gcatgaaagtgtgaa

SEQ ID NO: 656025 - DNA, 15 bp, Homo sapiens
catgaaagtgtgaat

SEQ ID NO: 656026 - DNA, 15 bp, Homo sapiens
atgaaagtgtgaatt

SEQ ID NO: 656027 - DNA, 15 bp, Homo sapiens
tgaaagtgtgaatta

SEQ ID NO: 656028 - DNA, 15 bp, Homo sapiens
gaaagtgtgaattaa

SEQ ID NO: 656029 - DNA, 15 bp, Homo sapiens
aaagtgtgaattaat

SEQ ID NO: 656030 - DNA, 15 bp, Homo sapiens
aagtgtgaattaata

SEQ ID NO: 656031 - DNA, 15 bp, Homo sapiens
agtgtgaattaatat

SEQ ID NO: 656032 - DNA, 15 bp, Homo sapiens
gtgtgaattaatatg

SEQ ID NO: 656033 - DNA, 15 bp, Homo sapiens
tgtgaattaatatga

SEQ ID NO: 656034 - DNA, 15 bp, Homo sapiens
gtgaattaatatgat

SEQ ID NO: 656035 - DNA, 15 bp, Homo sapiens
tgaattaatatgatc

SEQ ID NO: 656036 - DNA, 15 bp, Homo sapiens
gaattaatatgatcg

SEQ ID NO: 656037 - DNA, 15 bp, Homo sapiens
aattaatatgatcgt

SEQ ID NO: 656038 - DNA, 15 bp, Homo sapiens
attaatatgatcgtt

SEQ ID NO: 656039 - DNA, 15 bp, Homo sapiens
ttaatatgatcgttg

SEQ ID NO: 656040 - DNA, 15 bp, Homo sapiens
taatatgatcgttgt

SEQ ID NO: 656041 - DNA, 15 bp, Homo sapiens
aatatgatcgttgtt

SEQ ID NO: 656042 - DNA, 15 bp, Homo sapiens
atatgatcgttgttt

SEQ ID NO: 656043 - DNA, 15 bp, Homo sapiens
tatgatcgttgttta

SEQ ID NO: 656044 - DNA, 15 bp, Homo sapiens
atgatcgttgtttat

SEQ ID NO: 656045 - DNA, 15 bp, Homo sapiens
tgatcgttgtttata

SEQ ID NO: 656046 - DNA, 15 bp, Homo sapiens
gatcgttgtttataa

SEQ ID NO: 656047 - DNA, 15 bp, Homo sapiens
atcgttgtttataaa

SEQ ID NO: 656048 - DNA, 15 bp, Homo sapiens
tcgttgtttataaac

SEQ ID NO: 656049 - DNA, 15 bp, Homo sapiens
cgttgtttataaaca

SEQ ID NO: 656050 - DNA, 15 bp, Homo sapiens
gttgtttataaacaa

SEQ ID NO: 656051 - DNA, 15 bp, Homo sapiens
ttgtttataaacaat

SEQ ID NO: 656052 - DNA, 15 bp, Homo sapiens
tgtttataaacaatc

SEQ ID NO: 656053 - DNA, 15 bp, Homo sapiens
gtttataaacaatct

SEQ ID NO: 656054 - DNA, 15 bp, Homo sapiens
tttataaacaatctg

SEQ ID NO: 656055 - DNA, 15 bp, Homo sapiens
ttataaacaatctgc

SEQ ID NO: 656056 - DNA, 15 bp, Homo sapiens
tataaacaatctgcc

SEQ ID NO: 656057 - DNA, 15 bp, Homo sapiens
ataaacaatctgcca

SEQ ID NO: 656058 - DNA, 15 bp, Homo sapiens
taaacaatctgccac

SEQ ID NO: 656059 - DNA, 15 bp, Homo sapiens
aaacaatctgccaca

SEQ ID NO: 656060 - DNA, 15 bp, Homo sapiens
aacaatctgccacac

SEQ ID NO: 656061 - DNA, 15 bp, Homo sapiens
acaatctgccacaca

SEQ ID NO: 656062 - DNA, 15 bp, Homo sapiens
caatctgccacacat

SEQ ID NO: 656063 - DNA, 15 bp, Homo sapiens
aatctgccacacatg

SEQ ID NO: 656064 - DNA, 15 bp, Homo sapiens
atctgccacacatgt

SEQ ID NO: 656065 - DNA, 15 bp, Homo sapiens
tctgccacacatgtt

SEQ ID NO: 656066 - DNA, 15 bp, Homo sapiens
ctgccacacatgtta

SEQ ID NO: 656067 - DNA, 15 bp, Homo sapiens
tgccacacatgttaa

SEQ ID NO: 656068 - DNA, 15 bp, Homo sapiens
gccacacatgttaat

SEQ ID NO: 656069 - DNA, 15 bp, Homo sapiens
ccacacatgttaatg

SEQ ID NO: 656070 - DNA, 15 bp, Homo sapiens
cacacatgttaatgc

SEQ ID NO: 656071 - DNA, 15 bp, Homo sapiens
acacatgttaatgct

SEQ ID NO: 656072 - DNA, 15 bp, Homo sapiens
cacatgttaatgctg

SEQ ID NO: 656073 - DNA, 15 bp, Homo sapiens
acatgttaatgctga

SEQ ID NO: 656074 - DNA, 15 bp, Homo sapiens
catgttaatgctgag

SEQ ID NO: 656075 - DNA, 15 bp, Homo sapiens
atgttaatgctgaga

SEQ ID NO: 656076 - DNA, 15 bp, Homo sapiens
tgttaatgctgagaa

SEQ ID NO: 656077 - DNA, 15 bp, Homo sapiens
gttaatgctgagaaa

SEQ ID NO: 656078 - DNA, 15 bp, Homo sapiens
ttaatgctgagaaaa

SEQ ID NO: 656079 - DNA, 15 bp, Homo sapiens
taatgctgagaaaat

SEQ ID NO: 656080 - DNA, 15 bp, Homo sapiens
aatgctgagaaaatc

SEQ ID NO: 656081 - DNA, 15 bp, Homo sapiens
atgctgagaaaatct

SEQ ID NO: 656082 - DNA, 15 bp, Homo sapiens
tgctgagaaaatcta

SEQ ID NO: 656083 - DNA, 15 bp, Homo sapiens
gctgagaaaatctag

SEQ ID NO: 656084 - DNA, 15 bp, Homo sapiens
ctgagaaaatctaga

SEQ ID NO: 656085 - DNA, 15 bp, Homo sapiens
tgagaaaatctagag

SEQ ID NO: 656086 - DNA, 15 bp, Homo sapiens
gagaaaatctagagg

SEQ ID NO: 656087 - DNA, 15 bp, Homo sapiens
agaaaatctagaggt

SEQ ID NO: 656088 - DNA, 15 bp, Homo sapiens
gaaaatctagaggtc

SEQ ID NO: 656089 - DNA, 15 bp, Homo sapiens
aaaatctagaggtct

SEQ ID NO: 656090 - DNA, 15 bp, Homo sapiens
aaatctagaggtctt

SEQ ID NO: 656091 - DNA, 15 bp, Homo sapiens
aatctagaggtcttg

SEQ ID NO: 656092 - DNA, 15 bp, Homo sapiens
atctagaggtcttgg

SEQ ID NO: 656093 - DNA, 15 bp, Homo sapiens
tctagaggtcttggc

SEQ ID NO: 656094 - DNA, 15 bp, Homo sapiens
ctagaggtcttggct

SEQ ID NO: 656095 - DNA, 15 bp, Homo sapiens
tagaggtcttggcta

SEQ ID NO: 656096 - DNA, 15 bp, Homo sapiens
agaggtcttggctaa

SEQ ID NO: 656097 - DNA, 15 bp, Homo sapiens
gaggtcttggctaag

SEQ ID NO: 656098 - DNA, 15 bp, Homo sapiens
aggtcttggctaaga

SEQ ID NO: 656099 - DNA, 15 bp, Homo sapiens
ggtcttggctaagat

SEQ ID NO: 656100 - DNA, 15 bp, Homo sapiens
gtcttggctaagatg

SEQ ID NO: 656101 - DNA, 15 bp, Homo sapiens
tcttggctaagatgg

SEQ ID NO: 656102 - DNA, 15 bp, Homo sapiens
cttggctaagatggt

SEQ ID NO: 656103 - DNA, 15 bp, Homo sapiens
ttggctaagatggtt

SEQ ID NO: 656104 - DNA, 15 bp, Homo sapiens
tggctaagatggttc

SEQ ID NO: 656105 - DNA, 15 bp, Homo sapiens
ggctaagatggttca

SEQ ID NO: 656106 - DNA, 15 bp, Homo sapiens
gctaagatggttcat

SEQ ID NO: 656107 - DNA, 15 bp, Homo sapiens
ctaagatggttcata

SEQ ID NO: 656108 - DNA, 15 bp, Homo sapiens
taagatggttcatag

SEQ ID NO: 656109 - DNA, 15 bp, Homo sapiens
aagatggttcataga

SEQ ID NO: 656110 - DNA, 15 bp, Homo sapiens
agatggttcatagag

SEQ ID NO: 656111 - DNA, 15 bp, Homo sapiens
gatggttcatagaga

SEQ ID NO: 656112 - DNA, 15 bp, Homo sapiens
atggttcatagagaa

SEQ ID NO: 656113 - DNA, 15 bp, Homo sapiens
tggttcatagagaac

SEQ ID NO: 656114 - DNA, 15 bp, Homo sapiens
ggttcatagagaact

SEQ ID NO: 656115 - DNA, 15 bp, Homo sapiens
gttcatagagaactg

SEQ ID NO: 656116 - DNA, 15 bp, Homo sapiens
ttcatagagaactgt

SEQ ID NO: 656117 - DNA, 15 bp, Homo sapiens
tcatagagaactgtt

SEQ ID NO: 656118 - DNA, 15 bp, Homo sapiens
catagagaactgttt

SEQ ID NO: 656119 - DNA, 15 bp, Homo sapiens
atagagaactgtttt

SEQ ID NO: 656120 - DNA, 15 bp, Homo sapiens
tagagaactgttttg

SEQ ID NO: 656121 - DNA, 15 bp, Homo sapiens
agagaactgttttgt

SEQ ID NO: 656122 - DNA, 15 bp, Homo sapiens
gagaactgttttgtt

SEQ ID NO: 656123 - DNA, 15 bp, Homo sapiens
agaactgttttgttt

SEQ ID NO: 656124 - DNA, 15 bp, Homo sapiens
gaactgttttgtttg

SEQ ID NO: 656125 - DNA, 15 bp, Homo sapiens
aactgttttgtttga

SEQ ID NO: 656126 - DNA, 15 bp, Homo sapiens
actgttttgtttgaa

SEQ ID NO: 656127 - DNA, 15 bp, Homo sapiens
ctgttttgtttgaac

SEQ ID NO: 656128 - DNA, 15 bp, Homo sapiens
tgttttgtttgaact

SEQ ID NO: 656129 - DNA, 15 bp, Homo sapiens
gttttgtttgaactc

SEQ ID NO: 656130 - DNA, 15 bp, Homo sapiens
ttttgtttgaactcc

SEQ ID NO: 656131 - DNA, 15 bp, Homo sapiens
tttgtttgaactcct

SEQ ID NO: 656132 - DNA, 15 bp, Homo sapiens
ttgtttgaactcctc

SEQ ID NO: 656133 - DNA, 15 bp, Homo sapiens
tgtttgaactcctct

SEQ ID NO: 656134 - DNA, 15 bp, Homo sapiens
gtttgaactcctctc

SEQ ID NO: 656135 - DNA, 15 bp, Homo sapiens
tttgaactcctctct

SEQ ID NO: 656136 - DNA, 15 bp, Homo sapiens
ttgaactcctctctt

SEQ ID NO: 656137 - DNA, 15 bp, Homo sapiens
tgaactcctctcttg

SEQ ID NO: 656138 - DNA, 15 bp, Homo sapiens
gaactcctctcttgc

SEQ ID NO: 656139 - DNA, 15 bp, Homo sapiens
aactcctctcttgca

SEQ ID NO: 656140 - DNA, 15 bp, Homo sapiens
actcctctcttgcaa

SEQ ID NO: 656141 - DNA, 15 bp, Homo sapiens
ctcctctcttgcaaa

SEQ ID NO: 656142 - DNA, 15 bp, Homo sapiens
tcctctcttgcaaag

SEQ ID NO: 656143 - DNA, 15 bp, Homo sapiens
cctctcttgcaaaga

SEQ ID NO: 656144 - DNA, 15 bp, Homo sapiens
ctctcttgcaaagag

SEQ ID NO: 656145 - DNA, 15 bp, Homo sapiens
tctcttgcaaagagg

SEQ ID NO: 656146 - DNA, 15 bp, Homo sapiens
ctcttgcaaagaggg

SEQ ID NO: 656147 - DNA, 15 bp, Homo sapiens
tcttgcaaagagggc

SEQ ID NO: 656148 - DNA, 15 bp, Homo sapiens
cttgcaaagagggct

SEQ ID NO: 656149 - DNA, 15 bp, Homo sapiens
ttgcaaagagggctg

SEQ ID NO: 656150 - DNA, 15 bp, Homo sapiens
tgcaaagagggctga

SEQ ID NO: 656151 - DNA, 15 bp, Homo sapiens
gcaaagagggctgac

SEQ ID NO: 656152 - DNA, 15 bp, Homo sapiens
caaagagggctgact

SEQ ID NO: 656153 - DNA, 15 bp, Homo sapiens
aaagagggctgactc

SEQ ID NO: 656154 - DNA, 15 bp, Homo sapiens
aagagggctgactcc

SEQ ID NO: 656155 - DNA, 15 bp, Homo sapiens
agagggctgactcct

SEQ ID NO: 656156 - DNA, 15 bp, Homo sapiens
gagggctgactcctc

SEQ ID NO: 656157 - DNA, 15 bp, Homo sapiens
agggctgactcctcc

SEQ ID NO: 656158 - DNA, 15 bp, Homo sapiens
gggctgactcctccc

SEQ ID NO: 656159 - DNA, 15 bp, Homo sapiens
ggctgactcctccca

SEQ ID NO: 656160 - DNA, 15 bp, Homo sapiens
gctgactcctcccaa

SEQ ID NO: 656161 - DNA, 15 bp, Homo sapiens
ctgactcctcccaac

SEQ ID NO: 656162 - DNA, 15 bp, Homo sapiens
tgactcctcccaact

SEQ ID NO: 656163 - DNA, 15 bp, Homo sapiens
gactcctcccaactg

SEQ ID NO: 656164 - DNA, 15 bp, Homo sapiens
actcctcccaactga

SEQ ID NO: 656165 - DNA, 15 bp, Homo sapiens
ctcctcccaactgac

SEQ ID NO: 656166 - DNA, 15 bp, Homo sapiens
tcctcccaactgact

SEQ ID NO: 656167 - DNA, 15 bp, Homo sapiens
cctcccaactgactc

SEQ ID NO: 656168 - DNA, 15 bp, Homo sapiens
ctcccaactgactcc

SEQ ID NO: 656169 - DNA, 15 bp, Homo sapiens
tcccaactgactcct

SEQ ID NO: 656170 - DNA, 15 bp, Homo sapiens
cccaactgactcctc

SEQ ID NO: 656171 - DNA, 15 bp, Homo sapiens
ccaactgactcctcc

SEQ ID NO: 656172 - DNA, 15 bp, Homo sapiens
caactgactcctcct

SEQ ID NO: 656173 - DNA, 15 bp, Homo sapiens
aactgactcctccta

SEQ ID NO: 656174 - DNA, 15 bp, Homo sapiens
actgactcctcctag

SEQ ID NO: 656175 - DNA, 15 bp, Homo sapiens
ctgactcctcctagg

SEQ ID NO: 656176 - DNA, 15 bp, Homo sapiens
tgactcctcctaggc

SEQ ID NO: 656177 - DNA, 15 bp, Homo sapiens
gactcctcctaggca

SEQ ID NO: 656178 - DNA, 15 bp, Homo sapiens
actcctcctaggcag

SEQ ID NO: 656179 - DNA, 15 bp, Homo sapiens
ctcctcctaggcaga

SEQ ID NO: 656180 - DNA, 15 bp, Homo sapiens
tcctcctaggcagag

SEQ ID NO: 656181 - DNA, 15 bp, Homo sapiens
cctcctaggcagaga

SEQ ID NO: 656182 - DNA, 15 bp, Homo sapiens
ctcctaggcagagac

SEQ ID NO: 656183 - DNA, 15 bp, Homo sapiens
tcctaggcagagaca

SEQ ID NO: 656184 - DNA, 15 bp, Homo sapiens
cctaggcagagacag

SEQ ID NO: 656185 - DNA, 15 bp, Homo sapiens
ctaggcagagacagc

SEQ ID NO: 656186 - DNA, 15 bp, Homo sapiens
taggcagagacagca

SEQ ID NO: 656187 - DNA, 15 bp, Homo sapiens
aggcagagacagcat

SEQ ID NO: 656188 - DNA, 15 bp, Homo sapiens
ggcagagacagcatg

SEQ ID NO: 656189 - DNA, 15 bp, Homo sapiens
gcagagacagcatgg

SEQ ID NO: 656190 - DNA, 15 bp, Homo sapiens
cagagacagcatggg

SEQ ID NO: 656191 - DNA, 15 bp, Homo sapiens
agagacagcatgggc

SEQ ID NO: 656192 - DNA, 15 bp, Homo sapiens
gagacagcatgggcc

SEQ ID NO: 656193 - DNA, 15 bp, Homo sapiens
agacagcatgggcca

SEQ ID NO: 656194 - DNA, 15 bp, Homo sapiens
gacagcatgggccat

SEQ ID NO: 656195 - DNA, 15 bp, Homo sapiens
acagcatgggccata

SEQ ID NO: 656196 - DNA, 15 bp, Homo sapiens
cagcatgggccatac

SEQ ID NO: 656197 - DNA, 15 bp, Homo sapiens
agcatgggccataca

SEQ ID NO: 656198 - DNA, 15 bp, Homo sapiens
gcatgggccatacag

SEQ ID NO: 656199 - DNA, 15 bp, Homo sapiens
catgggccatacagg

SEQ ID NO: 656200 - DNA, 15 bp, Homo sapiens
atgggccatacaggt

SEQ ID NO: 656201 - DNA, 15 bp, Homo sapiens
tgggccatacaggtg

SEQ ID NO: 656202 - DNA, 15 bp, Homo sapiens
gggccatacaggtga

SEQ ID NO: 656203 - DNA, 15 bp, Homo sapiens
ggccatacaggtgaa

SEQ ID NO: 656204 - DNA, 15 bp, Homo sapiens
gccatacaggtgaag

SEQ ID NO: 656205 - DNA, 15 bp, Homo sapiens
ccatacaggtgaagg

SEQ ID NO: 656206 - DNA, 15 bp, Homo sapiens
catacaggtgaagga

SEQ ID NO: 656207 - DNA, 15 bp, Homo sapiens
atacaggtgaaggat

SEQ ID NO: 656208 - DNA, 15 bp, Homo sapiens
tacaggtgaaggatg

SEQ ID NO: 656209 - DNA, 15 bp, Homo sapiens
acaggtgaaggatgt

SEQ ID NO: 656210 - DNA, 15 bp, Homo sapiens
caggtgaaggatgtt

SEQ ID NO: 656211 - DNA, 15 bp, Homo sapiens
aggtgaaggatgttc

SEQ ID NO: 656212 - DNA, 15 bp, Homo sapiens
ggtgaaggatgttcc

SEQ ID NO: 656213 - DNA, 15 bp, Homo sapiens
gtgaaggatgttcca

SEQ ID NO: 656214 - DNA, 15 bp, Homo sapiens
tgaaggatgttccat

SEQ ID NO: 656215 - DNA, 15 bp, Homo sapiens
gaaggatgttccatt

SEQ ID NO: 656216 - DNA, 15 bp, Homo sapiens
aaggatgttccattc

SEQ ID NO: 656217 - DNA, 15 bp, Homo sapiens
aggatgttccattcg

SEQ ID NO: 656218 - DNA, 15 bp, Homo sapiens
ggatgttccattcgt

SEQ ID NO: 656219 - DNA, 15 bp, Homo sapiens
gatgttccattcgta

SEQ ID NO: 656220 - DNA, 15 bp, Homo sapiens
atgttccattcgtat

SEQ ID NO: 656221 - DNA, 15 bp, Homo sapiens
tgttccattcgtata

SEQ ID NO: 656222 - DNA, 15 bp, Homo sapiens
gttccattcgtatag

SEQ ID NO: 656223 - DNA, 15 bp, Homo sapiens
ttccattcgtatagc

SEQ ID NO: 656224 - DNA, 15 bp, Homo sapiens
tccattcgtatagcc

SEQ ID NO: 656225 - DNA, 15 bp, Homo sapiens
ccattcgtatagcca

SEQ ID NO: 656226 - DNA, 15 bp, Homo sapiens
cattcgtatagccaa

SEQ ID NO: 656227 - DNA, 15 bp, Homo sapiens
attcgtatagccaaa

SEQ ID NO: 656228 - DNA, 15 bp, Homo sapiens
ttcgtatagccaaag

SEQ ID NO: 656229 - DNA, 15 bp, Homo sapiens
tcgtatagccaaagc

SEQ ID NO: 656230 - DNA, 15 bp, Homo sapiens
cgtatagccaaagcc

SEQ ID NO: 656231 - DNA, 15 bp, Homo sapiens
gtatagccaaagcct

SEQ ID NO: 656232 - DNA, 15 bp, Homo sapiens
tatagccaaagcctg

SEQ ID NO: 656233 - DNA, 15 bp, Homo sapiens
atagccaaagcctgc

SEQ ID NO: 656234 - DNA, 15 bp, Homo sapiens
tagccaaagcctgct

SEQ ID NO: 656235 - DNA, 15 bp, Homo sapiens
agccaaagcctgctt

SEQ ID NO: 656236 - DNA, 15 bp, Homo sapiens
gccaaagcctgcttt

SEQ ID NO: 656237 - DNA, 15 bp, Homo sapiens
ccaaagcctgctttt

SEQ ID NO: 656238 - DNA, 15 bp, Homo sapiens
caaagcctgcttttc

SEQ ID NO: 656239 - DNA, 15 bp, Homo sapiens
aaagcctgcttttct

SEQ ID NO: 656240 - DNA, 15 bp, Homo sapiens
aagcctgcttttcta

SEQ ID NO: 656241 - DNA, 15 bp, Homo sapiens
agcctgcttttctaa

SEQ ID NO: 656242 - DNA, 15 bp, Homo sapiens
gcctgcttttctaat

SEQ ID NO: 656243 - DNA, 15 bp, Homo sapiens
cctgcttttctaata

SEQ ID NO: 656244 - DNA, 15 bp, Homo sapiens
ctgcttttctaataa

SEQ ID NO: 656245 - DNA, 15 bp, Homo sapiens
tgcttttctaataag

SEQ ID NO: 656246 - DNA, 15 bp, Homo sapiens
gcttttctaataaga

SEQ ID NO: 656247 - DNA, 15 bp, Homo sapiens
cttttctaataagat

SEQ ID NO: 656248 - DNA, 15 bp, Homo sapiens
ttttctaataagatt

SEQ ID NO: 656249 - DNA, 15 bp, Homo sapiens
tttctaataagatta

SEQ ID NO: 656250 - DNA, 15 bp, Homo sapiens
ttctaataagattag

SEQ ID NO: 656251 - DNA, 15 bp, Homo sapiens
tctaataagattagc

SEQ ID NO: 656252 - DNA, 15 bp, Homo sapiens
ctaataagattagct

SEQ ID NO: 656253 - DNA, 15 bp, Homo sapiens
taataagattagctt

SEQ ID NO: 656254 - DNA, 15 bp, Homo sapiens
aataagattagcttt

SEQ ID NO: 656255 - DNA, 15 bp, Homo sapiens
ataagattagctttt

SEQ ID NO: 656256 - DNA, 15 bp, Homo sapiens
taagattagctttta

SEQ ID NO: 656257 - DNA, 15 bp, Homo sapiens
aagattagcttttag

SEQ ID NO: 656258 - DNA, 15 bp, Homo sapiens
agattagcttttagt

SEQ ID NO: 656259 - DNA, 15 bp, Homo sapiens
gattagcttttagtc

SEQ ID NO: 656260 - DNA, 15 bp, Homo sapiens
attagcttttagtcc

SEQ ID NO: 656261 - DNA, 15 bp, Homo sapiens
ttagcttttagtcca

SEQ ID NO: 656262 - DNA, 15 bp, Homo sapiens
tagcttttagtccaa

SEQ ID NO: 656263 - DNA, 15 bp, Homo sapiens
agcttttagtccaat

SEQ ID NO: 656264 - DNA, 15 bp, Homo sapiens
gcttttagtccaatt

SEQ ID NO: 656265 - DNA, 15 bp, Homo sapiens
cttttagtccaattt

SEQ ID NO: 656266 - DNA, 15 bp, Homo sapiens
ttttagtccaatttc

SEQ ID NO: 656267 - DNA, 15 bp, Homo sapiens
tttagtccaatttct

SEQ ID NO: 656268 - DNA, 15 bp, Homo sapiens
ttagtccaatttctc

SEQ ID NO: 656269 - DNA, 15 bp, Homo sapiens
tagtccaatttctca

SEQ ID NO: 656270 - DNA, 15 bp, Homo sapiens
agtccaatttctcac

SEQ ID NO: 656271 - DNA, 15 bp, Homo sapiens
gtccaatttctcaca

SEQ ID NO: 656272 - DNA, 15 bp, Homo sapiens
tccaatttctcacat

SEQ ID NO: 656273 - DNA, 15 bp, Homo sapiens
ccaatttctcacatt

SEQ ID NO: 656274 - DNA, 15 bp, Homo sapiens
caatttctcacattt

SEQ ID NO: 656275 - DNA, 15 bp, Homo sapiens
aatttctcacatttc

SEQ ID NO: 656276 - DNA, 15 bp, Homo sapiens
atttctcacatttcc

SEQ ID NO: 656277 - DNA, 15 bp, Homo sapiens
tttctcacatttcca

SEQ ID NO: 656278 - DNA, 15 bp, Homo sapiens
ttctcacatttccag

SEQ ID NO: 656279 - DNA, 15 bp, Homo sapiens
tctcacatttccaga

SEQ ID NO: 656280 - DNA, 15 bp, Homo sapiens
ctcacatttccagag

SEQ ID NO: 656281 - DNA, 15 bp, Homo sapiens
tcacatttccagagg

SEQ ID NO: 656282 - DNA, 15 bp, Homo sapiens
cacatttccagaggt

SEQ ID NO: 656283 - DNA, 15 bp, Homo sapiens
acatttccagaggtg

SEQ ID NO: 656284 - DNA, 15 bp, Homo sapiens
catttccagaggtga

SEQ ID NO: 656285 - DNA, 15 bp, Homo sapiens
atttccagaggtgaa

SEQ ID NO: 656286 - DNA, 15 bp, Homo sapiens
tttccagaggtgaaa

SEQ ID NO: 656287 - DNA, 15 bp, Homo sapiens
ttccagaggtgaaag

SEQ ID NO: 656288 - DNA, 15 bp, Homo sapiens
tccagaggtgaaagc

SEQ ID NO: 656289 - DNA, 15 bp, Homo sapiens
ccagaggtgaaagcc

SEQ ID NO: 656290 - DNA, 15 bp, Homo sapiens
cagaggtgaaagcct

SEQ ID NO: 656291 - DNA, 15 bp, Homo sapiens
agaggtgaaagccta

SEQ ID NO: 656292 - DNA, 15 bp, Homo sapiens
gaggtgaaagcctaa

SEQ ID NO: 656293 - DNA, 15 bp, Homo sapiens
aggtgaaagcctaag

SEQ ID NO: 656294 - DNA, 15 bp, Homo sapiens
ggtgaaagcctaagg

SEQ ID NO: 656295 - DNA, 15 bp, Homo sapiens
gtgaaagcctaaggg

SEQ ID NO: 656296 - DNA, 15 bp, Homo sapiens
tgaaagcctaagggt

SEQ ID NO: 656297 - DNA, 15 bp, Homo sapiens
gaaagcctaagggtg

SEQ ID NO: 656298 - DNA, 15 bp, Homo sapiens
aaagcctaagggtgt

SEQ ID NO: 656299 - DNA, 15 bp, Homo sapiens
aagcctaagggtgtc

SEQ ID NO: 656300 - DNA, 15 bp, Homo sapiens
agcctaagggtgtca

SEQ ID NO: 656301 - DNA, 15 bp, Homo sapiens
gcctaagggtgtcag

SEQ ID NO: 656302 - DNA, 15 bp, Homo sapiens
cctaagggtgtcagg

SEQ ID NO: 656303 - DNA, 15 bp, Homo sapiens
ctaagggtgtcaggg

SEQ ID NO: 656304 - DNA, 15 bp, Homo sapiens
taagggtgtcagggt

SEQ ID NO: 656305 - DNA, 15 bp, Homo sapiens
aagggtgtcagggta

SEQ ID NO: 656306 - DNA, 15 bp, Homo sapiens
agggtgtcagggtac

SEQ ID NO: 656307 - DNA, 15 bp, Homo sapiens
gggtgtcagggtact

SEQ ID NO: 656308 - DNA, 15 bp, Homo sapiens
ggtgtcagggtactg

SEQ ID NO: 656309 - DNA, 15 bp, Homo sapiens
gtgtcagggtactgg

SEQ ID NO: 656310 - DNA, 15 bp, Homo sapiens
tgtcagggtactggg

SEQ ID NO: 656311 - DNA, 15 bp, Homo sapiens
gtcagggtactgggg

SEQ ID NO: 656312 - DNA, 15 bp, Homo sapiens
tcagggtactgggga

SEQ ID NO: 656313 - DNA, 15 bp, Homo sapiens
cagggtactggggaa

SEQ ID NO: 656314 - DNA, 15 bp, Homo sapiens
agggtactggggaac

SEQ ID NO: 656315 - DNA, 15 bp, Homo sapiens
gggtactggggaacg

SEQ ID NO: 656316 - DNA, 15 bp, Homo sapiens
ggtactggggaacga

SEQ ID NO: 656317 - DNA, 15 bp, Homo sapiens
gtactggggaacgag

SEQ ID NO: 656318 - DNA, 15 bp, Homo sapiens
tactggggaacgagg

SEQ ID NO: 656319 - DNA, 15 bp, Homo sapiens
actggggaacgaggt

SEQ ID NO: 656320 - DNA, 15 bp, Homo sapiens
ctggggaacgaggta

SEQ ID NO: 656321 - DNA, 15 bp, Homo sapiens
tggggaacgaggtac

SEQ ID NO: 656322 - DNA, 15 bp, Homo sapiens
ggggaacgaggtaca

SEQ ID NO: 656323 - DNA, 15 bp, Homo sapiens
gggaacgaggtacac

SEQ ID NO: 656324 - DNA, 15 bp, Homo sapiens
ggaacgaggtacaca

SEQ ID NO: 656325 - DNA, 15 bp, Homo sapiens
gaacgaggtacacat

SEQ ID NO: 656326 - DNA, 15 bp, Homo sapiens
aacgaggtacacatg

SEQ ID NO: 656327 - DNA, 15 bp, Homo sapiens
acgaggtacacatgt

SEQ ID NO: 656328 - DNA, 15 bp, Homo sapiens
cgaggtacacatgta

SEQ ID NO: 656329 - DNA, 15 bp, Homo sapiens
gaggtacacatgtat

SEQ ID NO: 656330 - DNA, 15 bp, Homo sapiens
aggtacacatgtata

SEQ ID NO: 656331 - DNA, 15 bp, Homo sapiens
ggtacacatgtatat

SEQ ID NO: 656332 - DNA, 15 bp, Homo sapiens
gtacacatgtatatg

SEQ ID NO: 656333 - DNA, 15 bp, Homo sapiens
tacacatgtatatgg

SEQ ID NO: 656334 - DNA, 15 bp, Homo sapiens
acacatgtatatggg

SEQ ID NO: 656335 - DNA, 15 bp, Homo sapiens
cacatgtatatgggc

SEQ ID NO: 656336 - DNA, 15 bp, Homo sapiens
acatgtatatgggcg

SEQ ID NO: 656337 - DNA, 15 bp, Homo sapiens
catgtatatgggcga

SEQ ID NO: 656338 - DNA, 15 bp, Homo sapiens
atgtatatgggcgag

SEQ ID NO: 656339 - DNA, 15 bp, Homo sapiens
tgtatatgggcgagt

SEQ ID NO: 656340 - DNA, 15 bp, Homo sapiens
gtatatgggcgagtc

SEQ ID NO: 656341 - DNA, 15 bp, Homo sapiens
tatatgggcgagtcg

SEQ ID NO: 656342 - DNA, 15 bp, Homo sapiens
atatgggcgagtcgg

SEQ ID NO: 656343 - DNA, 15 bp, Homo sapiens
tatgggcgagtcggg

SEQ ID NO: 656344 - DNA, 15 bp, Homo sapiens
atgggcgagtcgggg

SEQ ID NO: 656345 - DNA, 15 bp, Homo sapiens
tgggcgagtcggggg

SEQ ID NO: 656346 - DNA, 15 bp, Homo sapiens
gggcgagtcgggggg

SEQ ID NO: 656347 - DNA, 15 bp, Homo sapiens
ggcgagtcggggggt

SEQ ID NO: 656348 - DNA, 15 bp, Homo sapiens
gcgagtcggggggta

SEQ ID NO: 656349 - DNA, 15 bp, Homo sapiens
cgagtcggggggtaa

SEQ ID NO: 656350 - DNA, 15 bp, Homo sapiens
gagtcggggggtaag

SEQ ID NO: 656351 - DNA, 15 bp, Homo sapiens
agtcggggggtaagg

SEQ ID NO: 656352 - DNA, 15 bp, Homo sapiens
gtcggggggtaaggg

SEQ ID NO: 656353 - DNA, 15 bp, Homo sapiens
tcggggggtaagggt

SEQ ID NO: 656354 - DNA, 15 bp, Homo sapiens
cggggggtaagggtg

SEQ ID NO: 656355 - DNA, 15 bp, Homo sapiens
ggggggtaagggtgg

SEQ ID NO: 656356 - DNA, 15 bp, Homo sapiens
gggggtaagggtgga

SEQ ID NO: 656357 - DNA, 15 bp, Homo sapiens
ggggtaagggtggag

SEQ ID NO: 656358 - DNA, 15 bp, Homo sapiens
gggtaagggtggaga

SEQ ID NO: 656359 - DNA, 15 bp, Homo sapiens
ggtaagggtggagat

SEQ ID NO: 656360 - DNA, 15 bp, Homo sapiens
gtaagggtggagatg

SEQ ID NO: 656361 - DNA, 15 bp, Homo sapiens
taagggtggagatgg

SEQ ID NO: 656362 - DNA, 15 bp, Homo sapiens
aagggtggagatggt

SEQ ID NO: 656363 - DNA, 15 bp, Homo sapiens
agggtggagatggtc

SEQ ID NO: 656364 - DNA, 15 bp, Homo sapiens
gggtggagatggtct

SEQ ID NO: 656365 - DNA, 15 bp, Homo sapiens
ggtggagatggtctg

SEQ ID NO: 656366 - DNA, 15 bp, Homo sapiens
gtggagatggtctga

SEQ ID NO: 656367 - DNA, 15 bp, Homo sapiens
tggagatggtctgag

SEQ ID NO: 656368 - DNA, 15 bp, Homo sapiens
ggagatggtctgaga

SEQ ID NO: 656369 - DNA, 15 bp, Homo sapiens
gagatggtctgagaa

SEQ ID NO: 656370 - DNA, 15 bp, Homo sapiens
agatggtctgagaaa

SEQ ID NO: 656371 - DNA, 15 bp, Homo sapiens
gatggtctgagaaag

SEQ ID NO: 656372 - DNA, 15 bp, Homo sapiens
atggtctgagaaagg

SEQ ID NO: 656373 - DNA, 15 bp, Homo sapiens
tggtctgagaaaggt

SEQ ID NO: 656374 - DNA, 15 bp, Homo sapiens
ggtctgagaaaggtt

SEQ ID NO: 656375 - DNA, 15 bp, Homo sapiens
gtctgagaaaggttt

SEQ ID NO: 656376 - DNA, 15 bp, Homo sapiens
tctgagaaaggtttg

SEQ ID NO: 656377 - DNA, 15 bp, Homo sapiens
ctgagaaaggtttgg

SEQ ID NO: 656378 - DNA, 15 bp, Homo sapiens
tgagaaaggtttgga

SEQ ID NO: 656379 - DNA, 15 bp, Homo sapiens
gagaaaggtttggag

SEQ ID NO: 656380 - DNA, 15 bp, Homo sapiens
agaaaggtttggagg

SEQ ID NO: 656381 - DNA, 15 bp, Homo sapiens
gaaaggtttggaggg

SEQ ID NO: 656382 - DNA, 15 bp, Homo sapiens
aaaggtttggagggc

SEQ ID NO: 656383 - DNA, 15 bp, Homo sapiens
aaggtttggagggca

SEQ ID NO: 656384 - DNA, 15 bp, Homo sapiens
aggtttggagggcat

SEQ ID NO: 656385 - DNA, 15 bp, Homo sapiens
ggtttggagggcatt

SEQ ID NO: 656386 - DNA, 15 bp, Homo sapiens
gtttggagggcatta

SEQ ID NO: 656387 - DNA, 15 bp, Homo sapiens
tttggagggcattag

SEQ ID NO: 656388 - DNA, 15 bp, Homo sapiens
ttggagggcattagg

SEQ ID NO: 656389 - DNA, 15 bp, Homo sapiens
tggagggcattagga

SEQ ID NO: 656390 - DNA, 15 bp, Homo sapiens
ggagggcattaggaa

SEQ ID NO: 656391 - DNA, 15 bp, Homo sapiens
gagggcattaggaaa

SEQ ID NO: 656392 - DNA, 15 bp, Homo sapiens
agggcattaggaaaa

SEQ ID NO: 656393 - DNA, 15 bp, Homo sapiens
gggcattaggaaaag

SEQ ID NO: 656394 - DNA, 15 bp, Homo sapiens
ggcattaggaaaagt

SEQ ID NO: 656395 - DNA, 15 bp, Homo sapiens
gcattaggaaaagtg

SEQ ID NO: 656396 - DNA, 15 bp, Homo sapiens
cattaggaaaagtgg

SEQ ID NO: 656397 - DNA, 15 bp, Homo sapiens
attaggaaaagtggt

SEQ ID NO: 656398 - DNA, 15 bp, Homo sapiens
ttaggaaaagtggtc

SEQ ID NO: 656399 - DNA, 15 bp, Homo sapiens
taggaaaagtggtcc

SEQ ID NO: 656400 - DNA, 15 bp, Homo sapiens
aggaaaagtggtcct

SEQ ID NO: 656401 - DNA, 15 bp, Homo sapiens
ggaaaagtggtccta

SEQ ID NO: 656402 - DNA, 15 bp, Homo sapiens
gaaaagtggtcctat

SEQ ID NO: 656403 - DNA, 15 bp, Homo sapiens
aaaagtggtcctata

SEQ ID NO: 656404 - DNA, 15 bp, Homo sapiens
aaagtggtcctatag

SEQ ID NO: 656405 - DNA, 15 bp, Homo sapiens
aagtggtcctatagg

SEQ ID NO: 656406 - DNA, 15 bp, Homo sapiens
agtggtcctatagga

SEQ ID NO: 656407 - DNA, 15 bp, Homo sapiens
gtggtcctataggaa

SEQ ID NO: 656408 - DNA, 15 bp, Homo sapiens
tggtcctataggaat

SEQ ID NO: 656409 - DNA, 15 bp, Homo sapiens
ggtcctataggaatc

SEQ ID NO: 656410 - DNA, 15 bp, Homo sapiens
gtcctataggaatcg

SEQ ID NO: 656411 - DNA, 15 bp, Homo sapiens
tcctataggaatcgg

SEQ ID NO: 656412 - DNA, 15 bp, Homo sapiens
cctataggaatcggt

SEQ ID NO: 656413 - DNA, 15 bp, Homo sapiens
ctataggaatcggtt

SEQ ID NO: 656414 - DNA, 15 bp, Homo sapiens
tataggaatcggttc

SEQ ID NO: 656415 - DNA, 15 bp, Homo sapiens
ataggaatcggttct

SEQ ID NO: 656416 - DNA, 15 bp, Homo sapiens
taggaatcggttctt

SEQ ID NO: 656417 - DNA, 15 bp, Homo sapiens
aggaatcggttcttg

SEQ ID NO: 656418 - DNA, 15 bp, Homo sapiens
ggaatcggttcttgg

SEQ ID NO: 656419 - DNA, 15 bp, Homo sapiens
gaatcggttcttggg

SEQ ID NO: 656420 - DNA, 15 bp, Homo sapiens
aatcggttcttgggt

SEQ ID NO: 656421 - DNA, 15 bp, Homo sapiens
atcggttcttgggtt

SEQ ID NO: 656422 - DNA, 15 bp, Homo sapiens
tcggttcttgggttt

SEQ ID NO: 656423 - DNA, 15 bp, Homo sapiens
cggttcttgggtttc

SEQ ID NO: 656424 - DNA, 15 bp, Homo sapiens
ggttcttgggtttcc

SEQ ID NO: 656425 - DNA, 15 bp, Homo sapiens
gttcttgggtttcct

SEQ ID NO: 656426 - DNA, 15 bp, Homo sapiens
ttcttgggtttcctt

SEQ ID NO: 656427 - DNA, 15 bp, Homo sapiens
tcttgggtttccttc

SEQ ID NO: 656428 - DNA, 15 bp, Homo sapiens
cttgggtttccttct

SEQ ID NO: 656429 - DNA, 15 bp, Homo sapiens
ttgggtttccttctc

SEQ ID NO: 656430 - DNA, 15 bp, Homo sapiens
tgggtttccttctct

SEQ ID NO: 656431 - DNA, 15 bp, Homo sapiens
gggtttccttctcta

SEQ ID NO: 656432 - DNA, 15 bp, Homo sapiens
ggtttccttctctag

SEQ ID NO: 656433 - DNA, 15 bp, Homo sapiens
gtttccttctctagc

SEQ ID NO: 656434 - DNA, 15 bp, Homo sapiens
tttccttctctagcc

SEQ ID NO: 656435 - DNA, 15 bp, Homo sapiens
ttccttctctagcca

SEQ ID NO: 656436 - DNA, 15 bp, Homo sapiens
tccttctctagccat

SEQ ID NO: 656437 - DNA, 15 bp, Homo sapiens
ccttctctagccatg

SEQ ID NO: 656438 - DNA, 15 bp, Homo sapiens
cttctctagccatga

SEQ ID NO: 656439 - DNA, 15 bp, Homo sapiens
ttctctagccatgag

SEQ ID NO: 656440 - DNA, 15 bp, Homo sapiens
tctctagccatgagt

SEQ ID NO: 656441 - DNA, 15 bp, Homo sapiens
ctctagccatgagtc

SEQ ID NO: 656442 - DNA, 15 bp, Homo sapiens
tctagccatgagtcc

SEQ ID NO: 656443 - DNA, 15 bp, Homo sapiens
ctagccatgagtccc

SEQ ID NO: 656444 - DNA, 15 bp, Homo sapiens
tagccatgagtcccg

SEQ ID NO: 656445 - DNA, 15 bp, Homo sapiens
agccatgagtcccgc

SEQ ID NO: 656446 - DNA, 15 bp, Homo sapiens
gccatgagtcccgcc

SEQ ID NO: 656447 - DNA, 15 bp, Homo sapiens
ccatgagtcccgcct

SEQ ID NO: 656448 - DNA, 15 bp, Homo sapiens
catgagtcccgcctt

SEQ ID NO: 656449 - DNA, 15 bp, Homo sapiens
atgagtcccgccttc

SEQ ID NO: 656450 - DNA, 15 bp, Homo sapiens
tgagtcccgccttct

SEQ ID NO: 656451 - DNA, 15 bp, Homo sapiens
gagtcccgccttctc

SEQ ID NO: 656452 - DNA, 15 bp, Homo sapiens
agtcccgccttctca

SEQ ID NO: 656453 - DNA, 15 bp, Homo sapiens
gtcccgccttctcac

SEQ ID NO: 656454 - DNA, 15 bp, Homo sapiens
tcccgccttctcacc

SEQ ID NO: 656455 - DNA, 15 bp, Homo sapiens
cccgccttctcacct

SEQ ID NO: 656456 - DNA, 15 bp, Homo sapiens
ccgccttctcacctg

SEQ ID NO: 656457 - DNA, 15 bp, Homo sapiens
cgccttctcacctgg

SEQ ID NO: 656458 - DNA, 15 bp, Homo sapiens
gccttctcacctggt

SEQ ID NO: 656459 - DNA, 15 bp, Homo sapiens
ccttctcacctggta

SEQ ID NO: 656460 - DNA, 15 bp, Homo sapiens
cttctcacctggtat

SEQ ID NO: 656461 - DNA, 15 bp, Homo sapiens
ttctcacctggtatc

SEQ ID NO: 656462 - DNA, 15 bp, Homo sapiens
tctcacctggtatct

SEQ ID NO: 656463 - DNA, 15 bp, Homo sapiens
ctcacctggtatctc

SEQ ID NO: 656464 - DNA, 15 bp, Homo sapiens
tcacctggtatctct

SEQ ID NO: 656465 - DNA, 15 bp, Homo sapiens
cacctggtatctctt

SEQ ID NO: 656466 - DNA, 15 bp, Homo sapiens
acctggtatctcttt

SEQ ID NO: 656467 - DNA, 15 bp, Homo sapiens
cctggtatctctttc

SEQ ID NO: 656468 - DNA, 15 bp, Homo sapiens
ctggtatctctttca

SEQ ID NO: 656469 - DNA, 15 bp, Homo sapiens
tggtatctctttcag

SEQ ID NO: 656470 - DNA, 15 bp, Homo sapiens
ggtatctctttcagc

SEQ ID NO: 656471 - DNA, 15 bp, Homo sapiens
gtatctctttcagca

SEQ ID NO: 656472 - DNA, 15 bp, Homo sapiens
tatctctttcagcac

SEQ ID NO: 656473 - DNA, 15 bp, Homo sapiens
atctctttcagcact

SEQ ID NO: 656474 - DNA, 15 bp, Homo sapiens
tctctttcagcactt

SEQ ID NO: 656475 - DNA, 15 bp, Homo sapiens
ctctttcagcacttc

SEQ ID NO: 656476 - DNA, 15 bp, Homo sapiens
tctttcagcacttct

SEQ ID NO: 656477 - DNA, 15 bp, Homo sapiens
ctttcagcacttctc

SEQ ID NO: 656478 - DNA, 15 bp, Homo sapiens
tttcagcacttctct

SEQ ID NO: 656479 - DNA, 15 bp, Homo sapiens
ttcagcacttctctc

SEQ ID NO: 656480 - DNA, 15 bp, Homo sapiens
tcagcacttctctcc

SEQ ID NO: 656481 - DNA, 15 bp, Homo sapiens
cagcacttctctccc

SEQ ID NO: 656482 - DNA, 15 bp, Homo sapiens
agcacttctctccca

SEQ ID NO: 656483 - DNA, 15 bp, Homo sapiens
gcacttctctcccac

SEQ ID NO: 656484 - DNA, 15 bp, Homo sapiens
cacttctctcccact

SEQ ID NO: 656485 - DNA, 15 bp, Homo sapiens
acttctctcccactc

SEQ ID NO: 656486 - DNA, 15 bp, Homo sapiens
cttctctcccactcc

SEQ ID NO: 656487 - DNA, 15 bp, Homo sapiens
ttctctcccactcca

SEQ ID NO: 656488 - DNA, 15 bp, Homo sapiens
tctctcccactccac

SEQ ID NO: 656489 - DNA, 15 bp, Homo sapiens
ctctcccactccact

SEQ ID NO: 656490 - DNA, 15 bp, Homo sapiens
tctcccactccacta

SEQ ID NO: 656491 - DNA, 15 bp, Homo sapiens
ctcccactccactac

SEQ ID NO: 656492 - DNA, 15 bp, Homo sapiens
tcccactccactaca

SEQ ID NO: 656493 - DNA, 15 bp, Homo sapiens
cccactccactacac

SEQ ID NO: 656494 - DNA, 15 bp, Homo sapiens
ccactccactacacc

SEQ ID NO: 656495 - DNA, 15 bp, Homo sapiens
cactccactacaccc

SEQ ID NO: 656496 - DNA, 15 bp, Homo sapiens
actccactacaccca

SEQ ID NO: 656497 - DNA, 15 bp, Homo sapiens
ctccactacacccac

SEQ ID NO: 656498 - DNA, 15 bp, Homo sapiens
tccactacacccacc

SEQ ID NO: 656499 - DNA, 15 bp, Homo sapiens
ccactacacccaccc

SEQ ID NO: 656500 - DNA, 15 bp, Homo sapiens
cactacacccaccca

SEQ ID NO: 656501 - DNA, 15 bp, Homo sapiens
actacacccacccag

SEQ ID NO: 656502 - DNA, 15 bp, Homo sapiens
ctacacccacccagc

SEQ ID NO: 656503 - DNA, 15 bp, Homo sapiens
tacacccacccagct

SEQ ID NO: 656504 - DNA, 15 bp, Homo sapiens
acacccacccagcta

SEQ ID NO: 656505 - DNA, 15 bp, Homo sapiens
cacccacccagctag

SEQ ID NO: 656506 - DNA, 15 bp, Homo sapiens
acccacccagctagg

SEQ ID NO: 656507 - DNA, 15 bp, Homo sapiens
cccacccagctagga

SEQ ID NO: 656508 - DNA, 15 bp, Homo sapiens
ccacccagctaggaa

SEQ ID NO: 656509 - DNA, 15 bp, Homo sapiens
cacccagctaggaaa

SEQ ID NO: 656510 - DNA, 15 bp, Homo sapiens
acccagctaggaaag

SEQ ID NO: 656511 - DNA, 15 bp, Homo sapiens
cccagctaggaaagt

SEQ ID NO: 656512 - DNA, 15 bp, Homo sapiens
ccagctaggaaagtg

SEQ ID NO: 656513 - DNA, 15 bp, Homo sapiens
cagctaggaaagtgt

SEQ ID NO: 656514 - DNA, 15 bp, Homo sapiens
agctaggaaagtgtc

SEQ ID NO: 656515 - DNA, 15 bp, Homo sapiens
gctaggaaagtgtct

SEQ ID NO: 656516 - DNA, 15 bp, Homo sapiens
ctaggaaagtgtctc

SEQ ID NO: 656517 - DNA, 15 bp, Homo sapiens
taggaaagtgtctct

SEQ ID NO: 656518 - DNA, 15 bp, Homo sapiens
aggaaagtgtctctt

SEQ ID NO: 656519 - DNA, 15 bp, Homo sapiens
ggaaagtgtctcttt

SEQ ID NO: 656520 - DNA, 15 bp, Homo sapiens
gaaagtgtctctttt

SEQ ID NO: 656521 - DNA, 15 bp, Homo sapiens
aaagtgtctcttttc

SEQ ID NO: 656522 - DNA, 15 bp, Homo sapiens
aagtgtctcttttct

SEQ ID NO: 656523 - DNA, 15 bp, Homo sapiens
agtgtctcttttcta

SEQ ID NO: 656524 - DNA, 15 bp, Homo sapiens
gtgtctcttttctaa

SEQ ID NO: 656525 - DNA, 15 bp, Homo sapiens
tgtctcttttctaaa

SEQ ID NO: 656526 - DNA, 15 bp, Homo sapiens
gtctcttttctaaat

SEQ ID NO: 656527 - DNA, 15 bp, Homo sapiens
tctcttttctaaatc

SEQ ID NO: 656528 - DNA, 15 bp, Homo sapiens
ctcttttctaaatct

SEQ ID NO: 656529 - DNA, 15 bp, Homo sapiens
tcttttctaaatctt

SEQ ID NO: 656530 - DNA, 15 bp, Homo sapiens
cttttctaaatcttt

SEQ ID NO: 656531 - DNA, 15 bp, Homo sapiens
ttttctaaatctttg

SEQ ID NO: 656532 - DNA, 15 bp, Homo sapiens
tttctaaatctttgc

SEQ ID NO: 656533 - DNA, 15 bp, Homo sapiens
ttctaaatctttgca

SEQ ID NO: 656534 - DNA, 15 bp, Homo sapiens
tctaaatctttgcat

SEQ ID NO: 656535 - DNA, 15 bp, Homo sapiens
ctaaatctttgcata

SEQ ID NO: 656536 - DNA, 15 bp, Homo sapiens
taaatctttgcatat

SEQ ID NO: 656537 - DNA, 15 bp, Homo sapiens
aaatctttgcatatt

SEQ ID NO: 656538 - DNA, 15 bp, Homo sapiens
aatctttgcatattt

SEQ ID NO: 656539 - DNA, 15 bp, Homo sapiens
atctttgcatattta

SEQ ID NO: 656540 - DNA, 15 bp, Homo sapiens
tctttgcatatttaa

SEQ ID NO: 656541 - DNA, 15 bp, Homo sapiens
ctttgcatatttaaa

SEQ ID NO: 656542 - DNA, 15 bp, Homo sapiens
tttgcatatttaaag

SEQ ID NO: 656543 - DNA, 15 bp, Homo sapiens
ttgcatatttaaagc

SEQ ID NO: 656544 - DNA, 15 bp, Homo sapiens
tgcatatttaaagct

SEQ ID NO: 656545 - DNA, 15 bp, Homo sapiens
gcatatttaaagcta

SEQ ID NO: 656546 - DNA, 15 bp, Homo sapiens
catatttaaagctac

SEQ ID NO: 656547 - DNA, 15 bp, Homo sapiens
atatttaaagctact

SEQ ID NO: 656548 - DNA, 15 bp, Homo sapiens
tatttaaagctacta

SEQ ID NO: 656549 - DNA, 15 bp, Homo sapiens
atttaaagctactag

SEQ ID NO: 656550 - DNA, 15 bp, Homo sapiens
tttaaagctactagt

SEQ ID NO: 656551 - DNA, 15 bp, Homo sapiens
ttaaagctactagtc

SEQ ID NO: 656552 - DNA, 15 bp, Homo sapiens
taaagctactagtct

SEQ ID NO: 656553 - DNA, 15 bp, Homo sapiens
aaagctactagtcta

SEQ ID NO: 656554 - DNA, 15 bp, Homo sapiens
aagctactagtctaa

SEQ ID NO: 656555 - DNA, 15 bp, Homo sapiens
agctactagtctaaa

SEQ ID NO: 656556 - DNA, 15 bp, Homo sapiens
gctactagtctaaat

SEQ ID NO: 656557 - DNA, 15 bp, Homo sapiens
ctactagtctaaatt

SEQ ID NO: 656558 - DNA, 15 bp, Homo sapiens
tactagtctaaatta

SEQ ID NO: 656559 - DNA, 15 bp, Homo sapiens
actagtctaaattag

SEQ ID NO: 656560 - DNA, 15 bp, Homo sapiens
ctagtctaaattaga

SEQ ID NO: 656561 - DNA, 15 bp, Homo sapiens
tagtctaaattagaa

SEQ ID NO: 656562 - DNA, 15 bp, Homo sapiens
agtctaaattagaaa

SEQ ID NO: 656563 - DNA, 15 bp, Homo sapiens
gtctaaattagaaaa

SEQ ID NO: 656564 - DNA, 15 bp, Homo sapiens
tctaaattagaaaac

SEQ ID NO: 656565 - DNA, 15 bp, Homo sapiens
ctaaattagaaaaca

SEQ ID NO: 656566 - DNA, 15 bp, Homo sapiens
taaattagaaaacac

SEQ ID NO: 656567 - DNA, 15 bp, Homo sapiens
aaattagaaaacaca

SEQ ID NO: 656568 - DNA, 15 bp, Homo sapiens
aattagaaaacacaa

SEQ ID NO: 656569 - DNA, 15 bp, Homo sapiens
attagaaaacacaaa

SEQ ID NO: 656570 - DNA, 15 bp, Homo sapiens
ttagaaaacacaaac

SEQ ID NO: 656571 - DNA, 15 bp, Homo sapiens
tagaaaacacaaacc

SEQ ID NO: 656572 - DNA, 15 bp, Homo sapiens
agaaaacacaaacca

SEQ ID NO: 656573 - DNA, 15 bp, Homo sapiens
gaaaacacaaaccat

SEQ ID NO: 656574 - DNA, 15 bp, Homo sapiens
aaaacacaaaccatt

SEQ ID NO: 656575 - DNA, 15 bp, Homo sapiens
aaacacaaaccattg

SEQ ID NO: 656576 - DNA, 15 bp, Homo sapiens
aacacaaaccattgg

SEQ ID NO: 656577 - DNA, 15 bp, Homo sapiens
acacaaaccattggc

SEQ ID NO: 656578 - DNA, 15 bp, Homo sapiens
cacaaaccattggct

SEQ ID NO: 656579 - DNA, 15 bp, Homo sapiens
acaaaccattggctt

SEQ ID NO: 656580 - DNA, 15 bp, Homo sapiens
caaaccattggctta

SEQ ID NO: 656581 - DNA, 15 bp, Homo sapiens
aaaccattggcttat

SEQ ID NO: 656582 - DNA, 15 bp, Homo sapiens
aaccattggcttatt

SEQ ID NO: 656583 - DNA, 15 bp, Homo sapiens
accattggcttattt

SEQ ID NO: 656584 - DNA, 15 bp, Homo sapiens
ccattggcttatttt

SEQ ID NO: 656585 - DNA, 15 bp, Homo sapiens
cattggcttattttt

SEQ ID NO: 656586 - DNA, 15 bp, Homo sapiens
attggcttattttta

SEQ ID NO: 656587 - DNA, 15 bp, Homo sapiens
ttggcttatttttat

SEQ ID NO: 656588 - DNA, 15 bp, Homo sapiens
tggcttatttttatt

SEQ ID NO: 656589 - DNA, 15 bp, Homo sapiens
ggcttatttttattt

SEQ ID NO: 656590 - DNA, 15 bp, Homo sapiens
gcttatttttattta

SEQ ID NO: 656591 - DNA, 15 bp, Homo sapiens
cttatttttatttag

SEQ ID NO: 656592 - DNA, 15 bp, Homo sapiens
ttatttttatttagt

SEQ ID NO: 656593 - DNA, 15 bp, Homo sapiens
tatttttatttagtt

SEQ ID NO: 656594 - DNA, 15 bp, Homo sapiens
atttttatttagttt

SEQ ID NO: 656595 - DNA, 15 bp, Homo sapiens
tttttatttagttta

SEQ ID NO: 656596 - DNA, 15 bp, Homo sapiens
ttttatttagtttat

SEQ ID NO: 656597 - DNA, 15 bp, Homo sapiens
tttatttagtttata

SEQ ID NO: 656598 - DNA, 15 bp, Homo sapiens
ttatttagtttatat

SEQ ID NO: 656599 - DNA, 15 bp, Homo sapiens
tatttagtttatatt

SEQ ID NO: 656600 - DNA, 15 bp, Homo sapiens
atttagtttatatta

SEQ ID NO: 656601 - DNA, 15 bp, Homo sapiens
tttagtttatattaa

SEQ ID NO: 656602 - DNA, 15 bp, Homo sapiens
ttagtttatattaag

SEQ ID NO: 656603 - DNA, 15 bp, Homo sapiens
tagtttatattaagg

SEQ ID NO: 656604 - DNA, 15 bp, Homo sapiens
agtttatattaaggt

SEQ ID NO: 656605 - DNA, 15 bp, Homo sapiens
gtttatattaaggtt

SEQ ID NO: 656606 - DNA, 15 bp, Homo sapiens
tttatattaaggttt

SEQ ID NO: 656607 - DNA, 15 bp, Homo sapiens
ttatattaaggtttt

SEQ ID NO: 656608 - DNA, 15 bp, Homo sapiens
tatattaaggtttta

SEQ ID NO: 656609 - DNA, 15 bp, Homo sapiens
atattaaggttttag

SEQ ID NO: 656610 - DNA, 15 bp, Homo sapiens
tattaaggttttaga

SEQ ID NO: 656611 - DNA, 15 bp, Homo sapiens
attaaggttttagaa

SEQ ID NO: 656612 - DNA, 15 bp, Homo sapiens
ttaaggttttagaat

SEQ ID NO: 656613 - DNA, 15 bp, Homo sapiens
taaggttttagaata

SEQ ID NO: 656614 - DNA, 15 bp, Homo sapiens
aaggttttagaataa

SEQ ID NO: 656615 - DNA, 15 bp, Homo sapiens
aggttttagaataat

SEQ ID NO: 656616 - DNA, 15 bp, Homo sapiens
ggttttagaataatt

SEQ ID NO: 656617 - DNA, 15 bp, Homo sapiens
gttttagaataattt

SEQ ID NO: 656618 - DNA, 15 bp, Homo sapiens
ttttagaataatttt

SEQ ID NO: 656619 - DNA, 15 bp, Homo sapiens
tttagaataatttta

SEQ ID NO: 656620 - DNA, 15 bp, Homo sapiens
ttagaataattttag

SEQ ID NO: 656621 - DNA, 15 bp, Homo sapiens
tagaataattttaga

SEQ ID NO: 656622 - DNA, 15 bp, Homo sapiens
agaataattttagaa

SEQ ID NO: 656623 - DNA, 15 bp, Homo sapiens
gaataattttagaat

SEQ ID NO: 656624 - DNA, 15 bp, Homo sapiens
aataattttagaata

SEQ ID NO: 656625 - DNA, 15 bp, Homo sapiens
ataattttagaataa

SEQ ID NO: 656626 - DNA, 15 bp, Homo sapiens
taattttagaataat

SEQ ID NO: 656627 - DNA, 15 bp, Homo sapiens
aattttagaataatt

SEQ ID NO: 656628 - DNA, 15 bp, Homo sapiens
attttagaataattt

SEQ ID NO: 656629 - DNA, 15 bp, Homo sapiens
ttttagaataattta

SEQ ID NO: 656630 - DNA, 15 bp, Homo sapiens
tttagaataatttag

SEQ ID NO: 656631 - DNA, 15 bp, Homo sapiens
ttagaataatttaga

SEQ ID NO: 656632 - DNA, 15 bp, Homo sapiens
tagaataatttagaa

SEQ ID NO: 656633 - DNA, 15 bp, Homo sapiens
agaataatttagaat

SEQ ID NO: 656634 - DNA, 15 bp, Homo sapiens
gaataatttagaata

SEQ ID NO: 656635 - DNA, 15 bp, Homo sapiens
aataatttagaataa

SEQ ID NO: 656636 - DNA, 15 bp, Homo sapiens
ataatttagaataat

SEQ ID NO: 656637 - DNA, 15 bp, Homo sapiens
taatttagaataatt

SEQ ID NO: 656638 - DNA, 15 bp, Homo sapiens
aatttagaataattt

SEQ ID NO: 656639 - DNA, 15 bp, Homo sapiens
atttagaataatttt

SEQ ID NO: 656640 - DNA, 15 bp, Homo sapiens
aataatttagaatat

SEQ ID NO: 656641 - DNA, 15 bp, Homo sapiens
ataatttagaatatt

SEQ ID NO: 656642 - DNA, 15 bp, Homo sapiens
taatttagaatattt

SEQ ID NO: 656643 - DNA, 15 bp, Homo sapiens
aatttagaatatttt

SEQ ID NO: 656644 - DNA, 15 bp, Homo sapiens
atttagaatattttt

SEQ ID NO: 656645 - DNA, 15 bp, Homo sapiens
tttagaatatttttt

SEQ ID NO: 656646 - DNA, 15 bp, Homo sapiens
ttagaatattttttt

SEQ ID NO: 656647 - DNA, 15 bp, Homo sapiens
tagaatatttttttg

SEQ ID NO: 656648 - DNA, 15 bp, Homo sapiens
agaatatttttttgc

SEQ ID NO: 656649 - DNA, 15 bp, Homo sapiens
gaatatttttttgcc

SEQ ID NO: 656650 - DNA, 15 bp, Homo sapiens
aatatttttttgcca

SEQ ID NO: 656651 - DNA, 15 bp, Homo sapiens
atatttttttgccaa

SEQ ID NO: 656652 - DNA, 15 bp, Homo sapiens
tatttttttgccaac

SEQ ID NO: 656653 - DNA, 15 bp, Homo sapiens
atttttttgccaaca

SEQ ID NO: 656654 - DNA, 15 bp, Homo sapiens
tttttttgccaacat

SEQ ID NO: 656655 - DNA, 15 bp, Homo sapiens
ttttttgccaacatg

SEQ ID NO: 656656 - DNA, 15 bp, Homo sapiens
tttttgccaacatgt

SEQ ID NO: 656657 - DNA, 15 bp, Homo sapiens
ttttgccaacatgta

SEQ ID NO: 656658 - DNA, 15 bp, Homo sapiens
tttgccaacatgtaa

SEQ ID NO: 656659 - DNA, 15 bp, Homo sapiens
ttgccaacatgtaaa

SEQ ID NO: 656660 - DNA, 15 bp, Homo sapiens
tgccaacatgtaaaa

SEQ ID NO: 656661 - DNA, 15 bp, Homo sapiens
gccaacatgtaaaaa

SEQ ID NO: 656662 - DNA, 15 bp, Homo sapiens
ccaacatgtaaaaat

SEQ ID NO: 656663 - DNA, 15 bp, Homo sapiens
caacatgtaaaaatc

SEQ ID NO: 656664 - DNA, 15 bp, Homo sapiens
aacatgtaaaaatct

SEQ ID NO: 656665 - DNA, 15 bp, Homo sapiens
acatgtaaaaatctg

SEQ ID NO: 656666 - DNA, 15 bp, Homo sapiens
catgtaaaaatctgg

SEQ ID NO: 656667 - DNA, 15 bp, Homo sapiens
atgtaaaaatctggg

SEQ ID NO: 656668 - DNA, 15 bp, Homo sapiens
tgtaaaaatctgggg

SEQ ID NO: 656669 - DNA, 15 bp, Homo sapiens
gtaaaaatctggggc

SEQ ID NO: 656670 - DNA, 15 bp, Homo sapiens
taaaaatctggggct

SEQ ID NO: 656671 - DNA, 15 bp, Homo sapiens
aaaaatctggggcta

SEQ ID NO: 656672 - DNA, 15 bp, Homo sapiens
aaaatctggggctac

SEQ ID NO: 656673 - DNA, 15 bp, Homo sapiens
aaatctggggctaca

SEQ ID NO: 656674 - DNA, 15 bp, Homo sapiens
aatctggggctacag

SEQ ID NO: 656675 - DNA, 15 bp, Homo sapiens
atctggggctacagg

SEQ ID NO: 656676 - DNA, 15 bp, Homo sapiens
tctggggctacaggc

SEQ ID NO: 656677 - DNA, 15 bp, Homo sapiens
ctggggctacaggct

SEQ ID NO: 656678 - DNA, 15 bp, Homo sapiens
tggggctacaggctg

SEQ ID NO: 656679 - DNA, 15 bp, Homo sapiens
ggggctacaggctgg

SEQ ID NO: 656680 - DNA, 15 bp, Homo sapiens
gggctacaggctggg

SEQ ID NO: 656681 - DNA, 15 bp, Homo sapiens
ggctacaggctgggt

SEQ ID NO: 656682 - DNA, 15 bp, Homo sapiens
gctacaggctgggtg

SEQ ID NO: 656683 - DNA, 15 bp, Homo sapiens
ctacaggctgggtgc

SEQ ID NO: 656684 - DNA, 15 bp, Homo sapiens
tacaggctgggtgcg

SEQ ID NO: 656685 - DNA, 15 bp, Homo sapiens
acaggctgggtgcgg

SEQ ID NO: 656686 - DNA, 15 bp, Homo sapiens
caggctgggtgcggt

SEQ ID NO: 656687 - DNA, 15 bp, Homo sapiens
aggctgggtgcggtg

SEQ ID NO: 656688 - DNA, 15 bp, Homo sapiens
ggctgggtgcggtgg

SEQ ID NO: 656689 - DNA, 15 bp, Homo sapiens
gctgggtgcggtggc

SEQ ID NO: 656690 - DNA, 15 bp, Homo sapiens
ctgggtgcggtggct

SEQ ID NO: 656691 - DNA, 15 bp, Homo sapiens
tgggtgcggtggctc

SEQ ID NO: 656692 - DNA, 15 bp, Homo sapiens
gggtgcggtggctca

SEQ ID NO: 656693 - DNA, 15 bp, Homo sapiens
ggtgcggtggctcat

SEQ ID NO: 656694 - DNA, 15 bp, Homo sapiens
gtgcggtggctcatg

SEQ ID NO: 656695 - DNA, 15 bp, Homo sapiens
tgcggtggctcatgc

SEQ ID NO: 656696 - DNA, 15 bp, Homo sapiens
gcggtggctcatgcc

SEQ ID NO: 656697 - DNA, 15 bp, Homo sapiens
cggtggctcatgcct

SEQ ID NO: 656698 - DNA, 15 bp, Homo sapiens
tgtaatctcagcacc

SEQ ID NO: 656699 - DNA, 15 bp, Homo sapiens
gtaatctcagcacct

SEQ ID NO: 656700 - DNA, 15 bp, Homo sapiens
taatctcagcacctc

SEQ ID NO: 656701 - DNA, 15 bp, Homo sapiens
aatctcagcacctca

SEQ ID NO: 656702 - DNA, 15 bp, Homo sapiens
atctcagcacctcag

SEQ ID NO: 656703 - DNA, 15 bp, Homo sapiens
tctcagcacctcagg

SEQ ID NO: 656704 - DNA, 15 bp, Homo sapiens
ctcagcacctcaggc

SEQ ID NO: 656705 - DNA, 15 bp, Homo sapiens
tcagcacctcaggcc

SEQ ID NO: 656706 - DNA, 15 bp, Homo sapiens
cagcacctcaggccg

SEQ ID NO: 656707 - DNA, 15 bp, Homo sapiens
agcacctcaggccga

SEQ ID NO: 656708 - DNA, 15 bp, Homo sapiens
gcacctcaggccgag

SEQ ID NO: 656709 - DNA, 15 bp, Homo sapiens
cacctcaggccgagg

SEQ ID NO: 656710 - DNA, 15 bp, Homo sapiens
acctcaggccgaggc

SEQ ID NO: 656711 - DNA, 15 bp, Homo sapiens
cctcaggccgaggcg

SEQ ID NO: 656712 - DNA, 15 bp, Homo sapiens
ctcaggccgaggcgg

SEQ ID NO: 656713 - DNA, 15 bp, Homo sapiens
tcaggccgaggcggg

SEQ ID NO: 656714 - DNA, 15 bp, Homo sapiens
caggccgaggcgggt

SEQ ID NO: 656715 - DNA, 15 bp, Homo sapiens
aggcgggtggatcac

SEQ ID NO: 656716 - DNA, 15 bp, Homo sapiens
ggcgggtggatcact

SEQ ID NO: 656717 - DNA, 15 bp, Homo sapiens
gcgggtggatcactt

SEQ ID NO: 656718 - DNA, 15 bp, Homo sapiens
cgggtggatcacttg

SEQ ID NO: 656719 - DNA, 15 bp, Homo sapiens
gggtggatcacttga

SEQ ID NO: 656720 - DNA, 15 bp, Homo sapiens
ggtggatcacttgag

SEQ ID NO: 656721 - DNA, 15 bp, Homo sapiens
gtggatcacttgagg

SEQ ID NO: 656722 - DNA, 15 bp, Homo sapiens
tggatcacttgaggt

SEQ ID NO: 656723 - DNA, 15 bp, Homo sapiens
ggatcacttgaggtc

SEQ ID NO: 656724 - DNA, 15 bp, Homo sapiens
gatcacttgaggtca

SEQ ID NO: 656725 - DNA, 15 bp, Homo sapiens
atcacttgaggtcag

SEQ ID NO: 656726 - DNA, 15 bp, Homo sapiens
tcacttgaggtcagg

SEQ ID NO: 656727 - DNA, 15 bp, Homo sapiens
cacttgaggtcagga

SEQ ID NO: 656728 - DNA, 15 bp, Homo sapiens
acttgaggtcaggag

SEQ ID NO: 656729 - DNA, 15 bp, Homo sapiens
cttgaggtcaggagt

SEQ ID NO: 656730 - DNA, 15 bp, Homo sapiens
ttgaggtcaggagtt

SEQ ID NO: 656731 - DNA, 15 bp, Homo sapiens
tgaggtcaggagttc

SEQ ID NO: 656732 - DNA, 15 bp, Homo sapiens
gaggtcaggagttca

SEQ ID NO: 656733 - DNA, 15 bp, Homo sapiens
aggtcaggagttcaa

SEQ ID NO: 656734 - DNA, 15 bp, Homo sapiens
ggtcaggagttcaag

SEQ ID NO: 656735 - DNA, 15 bp, Homo sapiens
gtcaggagttcaaga

SEQ ID NO: 656736 - DNA, 15 bp, Homo sapiens
tcaggagttcaagac

SEQ ID NO: 656737 - DNA, 15 bp, Homo sapiens
caagaccagcctggc

SEQ ID NO: 656738 - DNA, 15 bp, Homo sapiens
aagaccagcctggcc

SEQ ID NO: 656739 - DNA, 15 bp, Homo sapiens
accagcctggccaac

SEQ ID NO: 656740 - DNA, 15 bp, Homo sapiens
ccagcctggccaaca

SEQ ID NO: 656741 - DNA, 15 bp, Homo sapiens
cagcctggccaacat

SEQ ID NO: 656742 - DNA, 15 bp, Homo sapiens
agcctggccaacatg

SEQ ID NO: 656743 - DNA, 15 bp, Homo sapiens
gcctggccaacatgg

SEQ ID NO: 656744 - DNA, 15 bp, Homo sapiens
cctggccaacatggc

SEQ ID NO: 656745 - DNA, 15 bp, Homo sapiens
ctggccaacatggcg

SEQ ID NO: 656746 - DNA, 15 bp, Homo sapiens
tggccaacatggcga

SEQ ID NO: 656747 - DNA, 15 bp, Homo sapiens
ggccaacatggcgaa

SEQ ID NO: 656748 - DNA, 15 bp, Homo sapiens
gccaacatggcgaaa

SEQ ID NO: 656749 - DNA, 15 bp, Homo sapiens
ccaacatggcgaaac

SEQ ID NO: 656750 - DNA, 15 bp, Homo sapiens
caacatggcgaaacc

SEQ ID NO: 656751 - DNA, 15 bp, Homo sapiens
aacatggcgaaacct

SEQ ID NO: 656752 - DNA, 15 bp, Homo sapiens
acatggcgaaacctc

SEQ ID NO: 656753 - DNA, 15 bp, Homo sapiens
catggcgaaacctca

SEQ ID NO: 656754 - DNA, 15 bp, Homo sapiens
atggcgaaacctcat

SEQ ID NO: 656755 - DNA, 15 bp, Homo sapiens
tggcgaaacctcatc

SEQ ID NO: 656756 - DNA, 15 bp, Homo sapiens
ggcgaaacctcatct

SEQ ID NO: 656757 - DNA, 15 bp, Homo sapiens
gcgaaacctcatctc

SEQ ID NO: 656758 - DNA, 15 bp, Homo sapiens
cgaaacctcatctct

SEQ ID NO: 656759 - DNA, 15 bp, Homo sapiens
gaaacctcatctcta

SEQ ID NO: 656760 - DNA, 15 bp, Homo sapiens
tacaaaaaaatacaa

SEQ ID NO: 656761 - DNA, 15 bp, Homo sapiens
acaaaaaaatacaaa

SEQ ID NO: 656762 - DNA, 15 bp, Homo sapiens
caaaaaaatacaaaa

SEQ ID NO: 656763 - DNA, 15 bp, Homo sapiens
aaaaaaatacaaaaa

SEQ ID NO: 656764 - DNA, 15 bp, Homo sapiens
aaaaaatacaaaaat

SEQ ID NO: 656765 - DNA, 15 bp, Homo sapiens
aaaaatacaaaaatt

SEQ ID NO: 656766 - DNA, 15 bp, Homo sapiens
aaaatacaaaaatta

SEQ ID NO: 656767 - DNA, 15 bp, Homo sapiens
aaatacaaaaattag

SEQ ID NO: 656768 - DNA, 15 bp, Homo sapiens
aatacaaaaattagc

SEQ ID NO: 656769 - DNA, 15 bp, Homo sapiens
atacaaaaattagcc

SEQ ID NO: 656770 - DNA, 15 bp, Homo sapiens
tacaaaaattagcca

SEQ ID NO: 656771 - DNA, 15 bp, Homo sapiens
caaaaattagccagg

SEQ ID NO: 656772 - DNA, 15 bp, Homo sapiens
aaaaattagccaggt

SEQ ID NO: 656773 - DNA, 15 bp, Homo sapiens
aaaattagccaggta

SEQ ID NO: 656774 - DNA, 15 bp, Homo sapiens
aaattagccaggtat

SEQ ID NO: 656775 - DNA, 15 bp, Homo sapiens
aattagccaggtatg

SEQ ID NO: 656776 - DNA, 15 bp, Homo sapiens
attagccaggtatgg

SEQ ID NO: 656777 - DNA, 15 bp, Homo sapiens
ttagccaggtatggt

SEQ ID NO: 656778 - DNA, 15 bp, Homo sapiens
agccaggtatggtga

SEQ ID NO: 656779 - DNA, 15 bp, Homo sapiens
gccaggtatggtgat

SEQ ID NO: 656780 - DNA, 15 bp, Homo sapiens
ccaggtatggtgatg

SEQ ID NO: 656781 - DNA, 15 bp, Homo sapiens
caggtatggtgatgt

SEQ ID NO: 656782 - DNA, 15 bp, Homo sapiens
aggtatggtgatgtg

SEQ ID NO: 656783 - DNA, 15 bp, Homo sapiens
ggtatggtgatgtgt

SEQ ID NO: 656784 - DNA, 15 bp, Homo sapiens
gtatggtgatgtgtg

SEQ ID NO: 656785 - DNA, 15 bp, Homo sapiens
tatggtgatgtgtgc

SEQ ID NO: 656786 - DNA, 15 bp, Homo sapiens
atggtgatgtgtgcc

SEQ ID NO: 656787 - DNA, 15 bp, Homo sapiens
tggtgatgtgtgcct

SEQ ID NO: 656788 - DNA, 15 bp, Homo sapiens
ggtgatgtgtgcctg

SEQ ID NO: 656789 - DNA, 15 bp, Homo sapiens
gtgatgtgtgcctgt

SEQ ID NO: 656790 - DNA, 15 bp, Homo sapiens
tgatgtgtgcctgta

SEQ ID NO: 656791 - DNA, 15 bp, Homo sapiens
gatgtgtgcctgtaa

SEQ ID NO: 656792 - DNA, 15 bp, Homo sapiens
atgtgtgcctgtaat

SEQ ID NO: 656793 - DNA, 15 bp, Homo sapiens
tgtgtgcctgtaatc

SEQ ID NO: 656794 - DNA, 15 bp, Homo sapiens
gtgtgcctgtaatcc

SEQ ID NO: 656795 - DNA, 15 bp, Homo sapiens
tgtgcctgtaatccc

SEQ ID NO: 656796 - DNA, 15 bp, Homo sapiens
gtgcctgtaatccca

SEQ ID NO: 656797 - DNA, 15 bp, Homo sapiens
tgcctgtaatcccag

SEQ ID NO: 656798 - DNA, 15 bp, Homo sapiens
gcctgtaatcccagc

SEQ ID NO: 656799 - DNA, 15 bp, Homo sapiens
cctgtaatcccagct

SEQ ID NO: 656800 - DNA, 15 bp, Homo sapiens
ctgtaatcccagcta

SEQ ID NO: 656801 - DNA, 15 bp, Homo sapiens
tgtaatcccagctac

SEQ ID NO: 656802 - DNA, 15 bp, Homo sapiens
taatcccagctactt

SEQ ID NO: 656803 - DNA, 15 bp, Homo sapiens
aatcccagctacttg

SEQ ID NO: 656804 - DNA, 15 bp, Homo sapiens
atcccagctacttgg

SEQ ID NO: 656805 - DNA, 15 bp, Homo sapiens
ttgggaggctgaggc

SEQ ID NO: 656806 - DNA, 15 bp, Homo sapiens
tgggaggctgaggca

SEQ ID NO: 656807 - DNA, 15 bp, Homo sapiens
ctgaggcaggagaaa

SEQ ID NO: 656808 - DNA, 15 bp, Homo sapiens
tgaggcaggagaaag

SEQ ID NO: 656809 - DNA, 15 bp, Homo sapiens
gaggcaggagaaagg

SEQ ID NO: 656810 - DNA, 15 bp, Homo sapiens
aggcaggagaaagga

SEQ ID NO: 656811 - DNA, 15 bp, Homo sapiens
ggcaggagaaaggag

SEQ ID NO: 656812 - DNA, 15 bp, Homo sapiens
gcaggagaaaggaga

SEQ ID NO: 656813 - DNA, 15 bp, Homo sapiens
caggagaaaggagaa

SEQ ID NO: 656814 - DNA, 15 bp, Homo sapiens
aggagaaaggagaat

SEQ ID NO: 656815 - DNA, 15 bp, Homo sapiens
ggagaaaggagaatc

SEQ ID NO: 656816 - DNA, 15 bp, Homo sapiens
gagaaaggagaatcg

SEQ ID NO: 656817 - DNA, 15 bp, Homo sapiens
agaaaggagaatcgc

SEQ ID NO: 656818 - DNA, 15 bp, Homo sapiens
gaaaggagaatcgct

SEQ ID NO: 656819 - DNA, 15 bp, Homo sapiens
aaaggagaatcgctt

SEQ ID NO: 656820 - DNA, 15 bp, Homo sapiens
aaggagaatcgcttg

SEQ ID NO: 656821 - DNA, 15 bp, Homo sapiens
aggagaatcgcttga

SEQ ID NO: 656822 - DNA, 15 bp, Homo sapiens
ggagaatcgcttgaa

SEQ ID NO: 656823 - DNA, 15 bp, Homo sapiens
gagaatcgcttgaac

SEQ ID NO: 656824 - DNA, 15 bp, Homo sapiens
agaatcgcttgaacc

SEQ ID NO: 656825 - DNA, 15 bp, Homo sapiens
gaatcgcttgaaccc

SEQ ID NO: 656826 - DNA, 15 bp, Homo sapiens
aatcgcttgaaccca

SEQ ID NO: 656827 - DNA, 15 bp, Homo sapiens
atcgcttgaacccag

SEQ ID NO: 656828 - DNA, 15 bp, Homo sapiens
tcgcttgaacccagg

SEQ ID NO: 656829 - DNA, 15 bp, Homo sapiens
cgcttgaacccagga

SEQ ID NO: 656830 - DNA, 15 bp, Homo sapiens
gcttgaacccaggag

SEQ ID NO: 656831 - DNA, 15 bp, Homo sapiens
cttgaacccaggagg

SEQ ID NO: 656832 - DNA, 15 bp, Homo sapiens
ttgaacccaggaggc

SEQ ID NO: 656833 - DNA, 15 bp, Homo sapiens
tgaacccaggaggca

SEQ ID NO: 656834 - DNA, 15 bp, Homo sapiens
gaacccaggaggcag

SEQ ID NO: 656835 - DNA, 15 bp, Homo sapiens
aacccaggaggcaga

SEQ ID NO: 656836 - DNA, 15 bp, Homo sapiens
acccaggaggcagag

SEQ ID NO: 656837 - DNA, 15 bp, Homo sapiens
cccaggaggcagagg

SEQ ID NO: 656838 - DNA, 15 bp, Homo sapiens
ccaggaggcagaggc

SEQ ID NO: 656839 - DNA, 15 bp, Homo sapiens
caggaggcagaggct

SEQ ID NO: 656840 - DNA, 15 bp, Homo sapiens
aggaggcagaggcta

SEQ ID NO: 656841 - DNA, 15 bp, Homo sapiens
ggaggcagaggctac

SEQ ID NO: 656842 - DNA, 15 bp, Homo sapiens
gaggcagaggctaca

SEQ ID NO: 656843 - DNA, 15 bp, Homo sapiens
aggcagaggctacag

SEQ ID NO: 656844 - DNA, 15 bp, Homo sapiens
ggcagaggctacagt

SEQ ID NO: 656845 - DNA, 15 bp, Homo sapiens
gcagaggctacagtg

SEQ ID NO: 656846 - DNA, 15 bp, Homo sapiens
cagaggctacagtga

SEQ ID NO: 656847 - DNA, 15 bp, Homo sapiens
agaggctacagtgag

SEQ ID NO: 656848 - DNA, 15 bp, Homo sapiens
gaggctacagtgagc

SEQ ID NO: 656849 - DNA, 15 bp, Homo sapiens
aggctacagtgagct

SEQ ID NO: 656850 - DNA, 15 bp, Homo sapiens
ggctacagtgagctg

SEQ ID NO: 656851 - DNA, 15 bp, Homo sapiens
gctacagtgagctga

SEQ ID NO: 656852 - DNA, 15 bp, Homo sapiens
ctacagtgagctgag

SEQ ID NO: 656853 - DNA, 15 bp, Homo sapiens
tacagtgagctgaga

SEQ ID NO: 656854 - DNA, 15 bp, Homo sapiens
acagtgagctgagat

SEQ ID NO: 656855 - DNA, 15 bp, Homo sapiens
cagtgagctgagatc

SEQ ID NO: 656856 - DNA, 15 bp, Homo sapiens
agtgagctgagatca

SEQ ID NO: 656857 - DNA, 15 bp, Homo sapiens
gtgagctgagatcat

SEQ ID NO: 656858 - DNA, 15 bp, Homo sapiens
tgagctgagatcatg

SEQ ID NO: 656859 - DNA, 15 bp, Homo sapiens
gagctgagatcatgc

SEQ ID NO: 656860 - DNA, 15 bp, Homo sapiens
agctgagatcatgcc

SEQ ID NO: 656861 - DNA, 15 bp, Homo sapiens
gctgagatcatgcca

SEQ ID NO: 656862 - DNA, 15 bp, Homo sapiens
ctgagatcatgccac

SEQ ID NO: 656863 - DNA, 15 bp, Homo sapiens
tgagatcatgccact

SEQ ID NO: 656864 - DNA, 15 bp, Homo sapiens
gagatcatgccacta

SEQ ID NO: 656865 - DNA, 15 bp, Homo sapiens
agatcatgccactac

SEQ ID NO: 656866 - DNA, 15 bp, Homo sapiens
gatcatgccactaca

SEQ ID NO: 656867 - DNA, 15 bp, Homo sapiens
atcatgccactacac

SEQ ID NO: 656868 - DNA, 15 bp, Homo sapiens
tcatgccactacact

SEQ ID NO: 656869 - DNA, 15 bp, Homo sapiens
catgccactacactc

SEQ ID NO: 656870 - DNA, 15 bp, Homo sapiens
atgccactacactcc

SEQ ID NO: 656871 - DNA, 15 bp, Homo sapiens
tgccactacactcca

SEQ ID NO: 656872 - DNA, 15 bp, Homo sapiens
gccactacactccag

SEQ ID NO: 656873 - DNA, 15 bp, Homo sapiens
ccactacactccagc

SEQ ID NO: 656874 - DNA, 15 bp, Homo sapiens
cactacactccagcc

SEQ ID NO: 656875 - DNA, 15 bp, Homo sapiens
actacactccagcct

SEQ ID NO: 656876 - DNA, 15 bp, Homo sapiens
ctacactccagcctg

SEQ ID NO: 656877 - DNA, 15 bp, Homo sapiens
tacactccagcctgg

SEQ ID NO: 656878 - DNA, 15 bp, Homo sapiens
acactccagcctggg

SEQ ID NO: 656879 - DNA, 15 bp, Homo sapiens
tgacagagtgagact

SEQ ID NO: 656880 - DNA, 15 bp, Homo sapiens
gacagagtgagactc

SEQ ID NO: 656881 - DNA, 15 bp, Homo sapiens
acagagtgagactcc

SEQ ID NO: 656882 - DNA, 15 bp, Homo sapiens
cagagtgagactcca

SEQ ID NO: 656883 - DNA, 15 bp, Homo sapiens
agagtgagactccat

SEQ ID NO: 656884 - DNA, 15 bp, Homo sapiens
gagtgagactccatc

SEQ ID NO: 656885 - DNA, 15 bp, Homo sapiens
agtgagactccatct

SEQ ID NO: 656886 - DNA, 15 bp, Homo sapiens
gtgagactccatctc

SEQ ID NO: 656887 - DNA, 15 bp, Homo sapiens
tgagactccatctca

SEQ ID NO: 656888 - DNA, 15 bp, Homo sapiens
gagactccatctcaa

SEQ ID NO: 656889 - DNA, 15 bp, Homo sapiens
agactccatctcaaa

SEQ ID NO: 656890 - DNA, 15 bp, Homo sapiens
gactccatctcaaaa

SEQ ID NO: 656891 - DNA, 15 bp, Homo sapiens
actccatctcaaaac

SEQ ID NO: 656892 - DNA, 15 bp, Homo sapiens
ctccatctcaaaaca

SEQ ID NO: 656893 - DNA, 15 bp, Homo sapiens
tccatctcaaaacaa

SEQ ID NO: 656894 - DNA, 15 bp, Homo sapiens
ccatctcaaaacaaa

SEQ ID NO: 656895 - DNA, 15 bp, Homo sapiens
catctcaaaacaaaa

SEQ ID NO: 656896 - DNA, 15 bp, Homo sapiens
atctcaaaacaaaac

SEQ ID NO: 656897 - DNA, 15 bp, Homo sapiens
tctcaaaacaaaaca

SEQ ID NO: 656898 - DNA, 15 bp, Homo sapiens
ctcaaaacaaaacaa

SEQ ID NO: 656899 - DNA, 15 bp, Homo sapiens
tcaaaacaaaacaaa

SEQ ID NO: 656900 - DNA, 15 bp, Homo sapiens
caaaacaaaacaaaa

SEQ ID NO: 656901 - DNA, 15 bp, Homo sapiens
aaaacaaaacaaaaa

SEQ ID NO: 656902 - DNA, 15 bp, Homo sapiens
aaacaaaacaaaaag

SEQ ID NO: 656903 - DNA, 15 bp, Homo sapiens
aacaaaacaaaaagt

SEQ ID NO: 656904 - DNA, 15 bp, Homo sapiens
acaaaacaaaaagtg

SEQ ID NO: 656905 - DNA, 15 bp, Homo sapiens
caaaacaaaaagtgg

SEQ ID NO: 656906 - DNA, 15 bp, Homo sapiens
aaaacaaaaagtgga

SEQ ID NO: 656907 - DNA, 15 bp, Homo sapiens
aaacaaaaagtggaa

SEQ ID NO: 656908 - DNA, 15 bp, Homo sapiens
aacaaaaagtggaac

SEQ ID NO: 656909 - DNA, 15 bp, Homo sapiens
acaaaaagtggaact

SEQ ID NO: 656910 - DNA, 15 bp, Homo sapiens
caaaaagtggaacta

SEQ ID NO: 656911 - DNA, 15 bp, Homo sapiens
aaaaagtggaactac

SEQ ID NO: 656912 - DNA, 15 bp, Homo sapiens
aaaagtggaactaca

SEQ ID NO: 656913 - DNA, 15 bp, Homo sapiens
aaagtggaactacag

SEQ ID NO: 656914 - DNA, 15 bp, Homo sapiens
aagtggaactacaga

SEQ ID NO: 656915 - DNA, 15 bp, Homo sapiens
agtggaactacagaa

SEQ ID NO: 656916 - DNA, 15 bp, Homo sapiens
gtggaactacagaaa

SEQ ID NO: 656917 - DNA, 15 bp, Homo sapiens
tggaactacagaaaa

SEQ ID NO: 656918 - DNA, 15 bp, Homo sapiens
ggaactacagaaaac

SEQ ID NO: 656919 - DNA, 15 bp, Homo sapiens
gaactacagaaaact

SEQ ID NO: 656920 - DNA, 15 bp, Homo sapiens
aactacagaaaactt

SEQ ID NO: 656921 - DNA, 15 bp, Homo sapiens
actacagaaaacttc

SEQ ID NO: 656922 - DNA, 15 bp, Homo sapiens
ctacagaaaacttcc

SEQ ID NO: 656923 - DNA, 15 bp, Homo sapiens
tacagaaaacttcca

SEQ ID NO: 656924 - DNA, 15 bp, Homo sapiens
acagaaaacttccaa

SEQ ID NO: 656925 - DNA, 15 bp, Homo sapiens
cagaaaacttccaat

SEQ ID NO: 656926 - DNA, 15 bp, Homo sapiens
agaaaacttccaatt

SEQ ID NO: 656927 - DNA, 15 bp, Homo sapiens
gaaaacttccaattt

SEQ ID NO: 656928 - DNA, 15 bp, Homo sapiens
aaaacttccaatttc

SEQ ID NO: 656929 - DNA, 15 bp, Homo sapiens
aaacttccaatttct

SEQ ID NO: 656930 - DNA, 15 bp, Homo sapiens
aacttccaatttctg

SEQ ID NO: 656931 - DNA, 15 bp, Homo sapiens
acttccaatttctgg

SEQ ID NO: 656932 - DNA, 15 bp, Homo sapiens
cttccaatttctggc

SEQ ID NO: 656933 - DNA, 15 bp, Homo sapiens
ttccaatttctggct

SEQ ID NO: 656934 - DNA, 15 bp, Homo sapiens
tccaatttctggctt

SEQ ID NO: 656935 - DNA, 15 bp, Homo sapiens
ccaatttctggcttc

SEQ ID NO: 656936 - DNA, 15 bp, Homo sapiens
caatttctggcttca

SEQ ID NO: 656937 - DNA, 15 bp, Homo sapiens
aatttctggcttcac

SEQ ID NO: 656938 - DNA, 15 bp, Homo sapiens
atttctggcttcact

SEQ ID NO: 656939 - DNA, 15 bp, Homo sapiens
tttctggcttcactt

SEQ ID NO: 656940 - DNA, 15 bp, Homo sapiens
ttctggcttcacttt

SEQ ID NO: 656941 - DNA, 15 bp, Homo sapiens
tctggcttcacttta

SEQ ID NO: 656942 - DNA, 15 bp, Homo sapiens
ctggcttcactttaa

SEQ ID NO: 656943 - DNA, 15 bp, Homo sapiens
tggcttcactttaaa

SEQ ID NO: 656944 - DNA, 15 bp, Homo sapiens
ggcttcactttaaaa

SEQ ID NO: 656945 - DNA, 15 bp, Homo sapiens
gcttcactttaaaaa

SEQ ID NO: 656946 - DNA, 15 bp, Homo sapiens
cttcactttaaaaat

SEQ ID NO: 656947 - DNA, 15 bp, Homo sapiens
ttcactttaaaaatt

SEQ ID NO: 656948 - DNA, 15 bp, Homo sapiens
tcactttaaaaattg

SEQ ID NO: 656949 - DNA, 15 bp, Homo sapiens
cactttaaaaattgg

SEQ ID NO: 656950 - DNA, 15 bp, Homo sapiens
actttaaaaattgga

SEQ ID NO: 656951 - DNA, 15 bp, Homo sapiens
ctttaaaaattggaa

SEQ ID NO: 656952 - DNA, 15 bp, Homo sapiens
tttaaaaattggaac

SEQ ID NO: 656953 - DNA, 15 bp, Homo sapiens
ttaaaaattggaacg

SEQ ID NO: 656954 - DNA, 15 bp, Homo sapiens
taaaaattggaacgt

SEQ ID NO: 656955 - DNA, 15 bp, Homo sapiens
aaaaattggaacgtc

SEQ ID NO: 656956 - DNA, 15 bp, Homo sapiens
aaaattggaacgtca

SEQ ID NO: 656957 - DNA, 15 bp, Homo sapiens
aaattggaacgtcat

SEQ ID NO: 656958 - DNA, 15 bp, Homo sapiens
aattggaacgtcatc

SEQ ID NO: 656959 - DNA, 15 bp, Homo sapiens
attggaacgtcatct

SEQ ID NO: 656960 - DNA, 15 bp, Homo sapiens
ttggaacgtcatctt

SEQ ID NO: 656961 - DNA, 15 bp, Homo sapiens
tggaacgtcatcttc

SEQ ID NO: 656962 - DNA, 15 bp, Homo sapiens
ggaacgtcatcttcc

SEQ ID NO: 656963 - DNA, 15 bp, Homo sapiens
gaacgtcatcttcca

SEQ ID NO: 656964 - DNA, 15 bp, Homo sapiens
aacgtcatcttccac

SEQ ID NO: 656965 - DNA, 15 bp, Homo sapiens
acgtcatcttccacc

SEQ ID NO: 656966 - DNA, 15 bp, Homo sapiens
cgtcatcttccacca

SEQ ID NO: 656967 - DNA, 15 bp, Homo sapiens
gtcatcttccaccat

SEQ ID NO: 656968 - DNA, 15 bp, Homo sapiens
tcatcttccaccatt

SEQ ID NO: 656969 - DNA, 15 bp, Homo sapiens
catcttccaccattt

SEQ ID NO: 656970 - DNA, 15 bp, Homo sapiens
atcttccaccatttt

SEQ ID NO: 656971 - DNA, 15 bp, Homo sapiens
tcttccaccattttc

SEQ ID NO: 656972 - DNA, 15 bp, Homo sapiens
cttccaccattttcc

SEQ ID NO: 656973 - DNA, 15 bp, Homo sapiens
ttccaccattttcca

SEQ ID NO: 656974 - DNA, 15 bp, Homo sapiens
tccaccattttccat

SEQ ID NO: 656975 - DNA, 15 bp, Homo sapiens
ccaccattttccatt

SEQ ID NO: 656976 - DNA, 15 bp, Homo sapiens
caccattttccattt

SEQ ID NO: 656977 - DNA, 15 bp, Homo sapiens
accattttccatttc

SEQ ID NO: 656978 - DNA, 15 bp, Homo sapiens
ccattttccatttca

SEQ ID NO: 656979 - DNA, 15 bp, Homo sapiens
cattttccatttcat

SEQ ID NO: 656980 - DNA, 15 bp, Homo sapiens
attttccatttcatt

SEQ ID NO: 656981 - DNA, 15 bp, Homo sapiens
ttttccatttcattt

SEQ ID NO: 656982 - DNA, 15 bp, Homo sapiens
tttccatttcatttc

SEQ ID NO: 656983 - DNA, 15 bp, Homo sapiens
ttccatttcatttca

SEQ ID NO: 656984 - DNA, 15 bp, Homo sapiens
tccatttcatttcaa

SEQ ID NO: 656985 - DNA, 15 bp, Homo sapiens
ccatttcatttcaag

SEQ ID NO: 656986 - DNA, 15 bp, Homo sapiens
catttcatttcaagt

SEQ ID NO: 656987 - DNA, 15 bp, Homo sapiens
atttcatttcaagtg

SEQ ID NO: 656988 - DNA, 15 bp, Homo sapiens
tttcatttcaagtgc

SEQ ID NO: 656989 - DNA, 15 bp, Homo sapiens
ttcatttcaagtgct

SEQ ID NO: 656990 - DNA, 15 bp, Homo sapiens
tcatttcaagtgctt

SEQ ID NO: 656991 - DNA, 15 bp, Homo sapiens
catttcaagtgcttt

SEQ ID NO: 656992 - DNA, 15 bp, Homo sapiens
atttcaagtgctttt

SEQ ID NO: 656993 - DNA, 15 bp, Homo sapiens
tttcaagtgcttttc

SEQ ID NO: 656994 - DNA, 15 bp, Homo sapiens
ttcaagtgcttttca

SEQ ID NO: 656995 - DNA, 15 bp, Homo sapiens
tcaagtgcttttcat

SEQ ID NO: 656996 - DNA, 15 bp, Homo sapiens
caagtgcttttcatt

SEQ ID NO: 656997 - DNA, 15 bp, Homo sapiens
aagtgcttttcattc

SEQ ID NO: 656998 - DNA, 15 bp, Homo sapiens
agtgcttttcattcc

SEQ ID NO: 656999 - DNA, 15 bp, Homo sapiens
gtgcttttcattccc

SEQ ID NO: 657000 - DNA, 15 bp, Homo sapiens
tgcttttcattccct

SEQ ID NO: 657001 - DNA, 15 bp, Homo sapiens
gcttttcattccctt

SEQ ID NO: 657002 - DNA, 15 bp, Homo sapiens
cttttcattccctta

SEQ ID NO: 657003 - DNA, 15 bp, Homo sapiens
ttttcattcccttag

SEQ ID NO: 657004 - DNA, 15 bp, Homo sapiens
tttcattcccttagg

SEQ ID NO: 657005 - DNA, 15 bp, Homo sapiens
ttcattcccttaggc

SEQ ID NO: 657006 - DNA, 15 bp, Homo sapiens
tcattcccttaggct

SEQ ID NO: 657007 - DNA, 15 bp, Homo sapiens
cattcccttaggctt

SEQ ID NO: 657008 - DNA, 15 bp, Homo sapiens
attcccttaggcttt

SEQ ID NO: 657009 - DNA, 15 bp, Homo sapiens
ttcccttaggcttta

SEQ ID NO: 657010 - DNA, 15 bp, Homo sapiens
tcccttaggctttaa

SEQ ID NO: 657011 - DNA, 15 bp, Homo sapiens
cccttaggctttaaa

SEQ ID NO: 657012 - DNA, 15 bp, Homo sapiens
ccttaggctttaaac

SEQ ID NO: 657013 - DNA, 15 bp, Homo sapiens
cttaggctttaaact

SEQ ID NO: 657014 - DNA, 15 bp, Homo sapiens
ttaggctttaaactg

SEQ ID NO: 657015 - DNA, 15 bp, Homo sapiens
taggctttaaactgg

SEQ ID NO: 657016 - DNA, 15 bp, Homo sapiens
aggctttaaactggg

SEQ ID NO: 657017 - DNA, 15 bp, Homo sapiens
ggctttaaactgggc

SEQ ID NO: 657018 - DNA, 15 bp, Homo sapiens
gctttaaactgggct

SEQ ID NO: 657019 - DNA, 15 bp, Homo sapiens
ctttaaactgggctc

SEQ ID NO: 657020 - DNA, 15 bp, Homo sapiens
tttaaactgggctcc

SEQ ID NO: 657021 - DNA, 15 bp, Homo sapiens
ttaaactgggctccc

SEQ ID NO: 657022 - DNA, 15 bp, Homo sapiens
taaactgggctcccg

SEQ ID NO: 657023 - DNA, 15 bp, Homo sapiens
aaactgggctcccgg

SEQ ID NO: 657024 - DNA, 15 bp, Homo sapiens
aactgggctcccggg

SEQ ID NO: 657025 - DNA, 15 bp, Homo sapiens
actgggctcccgggg

SEQ ID NO: 657026 - DNA, 15 bp, Homo sapiens
ctgggctcccgggga

SEQ ID NO: 657027 - DNA, 15 bp, Homo sapiens
tgggctcccggggat

SEQ ID NO: 657028 - DNA, 15 bp, Homo sapiens
gggctcccggggatg

SEQ ID NO: 657029 - DNA, 15 bp, Homo sapiens
ggctcccggggatgt

SEQ ID NO: 657030 - DNA, 15 bp, Homo sapiens
gctcccggggatgtt

SEQ ID NO: 657031 - DNA, 15 bp, Homo sapiens
ctcccggggatgttc

SEQ ID NO: 657032 - DNA, 15 bp, Homo sapiens
tcccggggatgttca

SEQ ID NO: 657033 - DNA, 15 bp, Homo sapiens
cccggggatgttcag

SEQ ID NO: 657034 - DNA, 15 bp, Homo sapiens
ccggggatgttcaga

SEQ ID NO: 657035 - DNA, 15 bp, Homo sapiens
cggggatgttcagat

SEQ ID NO: 657036 - DNA, 15 bp, Homo sapiens
ggggatgttcagatt

SEQ ID NO: 657037 - DNA, 15 bp, Homo sapiens
gggatgttcagattt

SEQ ID NO: 657038 - DNA, 15 bp, Homo sapiens
ggatgttcagatttg

SEQ ID NO: 657039 - DNA, 15 bp, Homo sapiens
gatgttcagatttgc

SEQ ID NO: 657040 - DNA, 15 bp, Homo sapiens
atgttcagatttgca

SEQ ID NO: 657041 - DNA, 15 bp, Homo sapiens
tgttcagatttgcaa

SEQ ID NO: 657042 - DNA, 15 bp, Homo sapiens
gttcagatttgcaat

SEQ ID NO: 657043 - DNA, 15 bp, Homo sapiens
ttcagatttgcaatt

SEQ ID NO: 657044 - DNA, 15 bp, Homo sapiens
tcagatttgcaattc

SEQ ID NO: 657045 - DNA, 15 bp, Homo sapiens
cagatttgcaattct

SEQ ID NO: 657046 - DNA, 15 bp, Homo sapiens
agatttgcaattctg

SEQ ID NO: 657047 - DNA, 15 bp, Homo sapiens
gatttgcaattctgg

SEQ ID NO: 657048 - DNA, 15 bp, Homo sapiens
atttgcaattctggc

SEQ ID NO: 657049 - DNA, 15 bp, Homo sapiens
tttgcaattctggcc

SEQ ID NO: 657050 - DNA, 15 bp, Homo sapiens
ttgcaattctggcct

SEQ ID NO: 657051 - DNA, 15 bp, Homo sapiens
tgcaattctggccta

SEQ ID NO: 657052 - DNA, 15 bp, Homo sapiens
gcaattctggcctaa

SEQ ID NO: 657053 - DNA, 15 bp, Homo sapiens
caattctggcctaaa

SEQ ID NO: 657054 - DNA, 15 bp, Homo sapiens
aattctggcctaaaa

SEQ ID NO: 657055 - DNA, 15 bp, Homo sapiens
attctggcctaaaac

SEQ ID NO: 657056 - DNA, 15 bp, Homo sapiens
ttctggcctaaaaca

SEQ ID NO: 657057 - DNA, 15 bp, Homo sapiens
tctggcctaaaacaa

SEQ ID NO: 657058 - DNA, 15 bp, Homo sapiens
ctggcctaaaacaat

SEQ ID NO: 657059 - DNA, 15 bp, Homo sapiens
tggcctaaaacaatt

SEQ ID NO: 657060 - DNA, 15 bp, Homo sapiens
ggcctaaaacaattc

SEQ ID NO: 657061 - DNA, 15 bp, Homo sapiens
gcctaaaacaattcc

SEQ ID NO: 657062 - DNA, 15 bp, Homo sapiens
cctaaaacaattcct

SEQ ID NO: 657063 - DNA, 15 bp, Homo sapiens
ctaaaacaattcctg

SEQ ID NO: 657064 - DNA, 15 bp, Homo sapiens
taaaacaattcctgc

SEQ ID NO: 657065 - DNA, 15 bp, Homo sapiens
aaaacaattcctgct

SEQ ID NO: 657066 - DNA, 15 bp, Homo sapiens
aaacaattcctgctt

SEQ ID NO: 657067 - DNA, 15 bp, Homo sapiens
aacaattcctgctta

SEQ ID NO: 657068 - DNA, 15 bp, Homo sapiens
acaattcctgcttat

SEQ ID NO: 657069 - DNA, 15 bp, Homo sapiens
caattcctgcttatg

SEQ ID NO: 657070 - DNA, 15 bp, Homo sapiens
aattcctgcttatga

SEQ ID NO: 657071 - DNA, 15 bp, Homo sapiens
attcctgcttatgaa

SEQ ID NO: 657072 - DNA, 15 bp, Homo sapiens
ttcctgcttatgaac

SEQ ID NO: 657073 - DNA, 15 bp, Homo sapiens
tcctgcttatgaact

SEQ ID NO: 657074 - DNA, 15 bp, Homo sapiens
cctgcttatgaactg

SEQ ID NO: 657075 - DNA, 15 bp, Homo sapiens
ctgcttatgaactga

SEQ ID NO: 657076 - DNA, 15 bp, Homo sapiens
tgcttatgaactgag

SEQ ID NO: 657077 - DNA, 15 bp, Homo sapiens
gcttatgaactgagc

SEQ ID NO: 657078 - DNA, 15 bp, Homo sapiens
cttatgaactgagca

SEQ ID NO: 657079 - DNA, 15 bp, Homo sapiens
ttatgaactgagcag

SEQ ID NO: 657080 - DNA, 15 bp, Homo sapiens
tatgaactgagcagt

SEQ ID NO: 657081 - DNA, 15 bp, Homo sapiens
atgaactgagcagtg

SEQ ID NO: 657082 - DNA, 15 bp, Homo sapiens
tgaactgagcagtgt

SEQ ID NO: 657083 - DNA, 15 bp, Homo sapiens
gaactgagcagtgtg

SEQ ID NO: 657084 - DNA, 15 bp, Homo sapiens
aactgagcagtgtga

SEQ ID NO: 657085 - DNA, 15 bp, Homo sapiens
actgagcagtgtgac

SEQ ID NO: 657086 - DNA, 15 bp, Homo sapiens
ctgagcagtgtgaca

SEQ ID NO: 657087 - DNA, 15 bp, Homo sapiens
tgagcagtgtgacac

SEQ ID NO: 657088 - DNA, 15 bp, Homo sapiens
gagcagtgtgacaca

SEQ ID NO: 657089 - DNA, 15 bp, Homo sapiens
agcagtgtgacacac

SEQ ID NO: 657090 - DNA, 15 bp, Homo sapiens
gcagtgtgacacaca

SEQ ID NO: 657091 - DNA, 15 bp, Homo sapiens
cagtgtgacacacaa

SEQ ID NO: 657092 - DNA, 15 bp, Homo sapiens
agtgtgacacacaaa

SEQ ID NO: 657093 - DNA, 15 bp, Homo sapiens
gtgtgacacacaaag

SEQ ID NO: 657094 - DNA, 15 bp, Homo sapiens
tgtgacacacaaaga

SEQ ID NO: 657095 - DNA, 15 bp, Homo sapiens
gtgacacacaaagac

SEQ ID NO: 657096 - DNA, 15 bp, Homo sapiens
tgacacacaaagaca

SEQ ID NO: 657097 - DNA, 15 bp, Homo sapiens
gacacacaaagacac

SEQ ID NO: 657098 - DNA, 15 bp, Homo sapiens
acacacaaagacaca

SEQ ID NO: 657099 - DNA, 15 bp, Homo sapiens
cacacaaagacacat

SEQ ID NO: 657100 - DNA, 15 bp, Homo sapiens
acacaaagacacatc

SEQ ID NO: 657101 - DNA, 15 bp, Homo sapiens
cacaaagacacatcc

SEQ ID NO: 657102 - DNA, 15 bp, Homo sapiens
acaaagacacatccc

SEQ ID NO: 657103 - DNA, 15 bp, Homo sapiens
caaagacacatccct

SEQ ID NO: 657104 - DNA, 15 bp, Homo sapiens
aaagacacatccctt

SEQ ID NO: 657105 - DNA, 15 bp, Homo sapiens
aagacacatccctta

SEQ ID NO: 657106 - DNA, 15 bp, Homo sapiens
agacacatcccttat

SEQ ID NO: 657107 - DNA, 15 bp, Homo sapiens
gacacatcccttatc

SEQ ID NO: 657108 - DNA, 15 bp, Homo sapiens
acacatcccttatcc

SEQ ID NO: 657109 - DNA, 15 bp, Homo sapiens
cacatcccttatccc

SEQ ID NO: 657110 - DNA, 15 bp, Homo sapiens
acatcccttatccct

SEQ ID NO: 657111 - DNA, 15 bp, Homo sapiens
catcccttatcccta

SEQ ID NO: 657112 - DNA, 15 bp, Homo sapiens
atcccttatccctat

SEQ ID NO: 657113 - DNA, 15 bp, Homo sapiens
tcccttatccctatc

SEQ ID NO: 657114 - DNA, 15 bp, Homo sapiens
cccttatccctatcc

SEQ ID NO: 657115 - DNA, 15 bp, Homo sapiens
ccttatccctatccc

SEQ ID NO: 657116 - DNA, 15 bp, Homo sapiens
cttatccctatcccc

SEQ ID NO: 657117 - DNA, 15 bp, Homo sapiens
ttatccctatcccca

SEQ ID NO: 657118 - DNA, 15 bp, Homo sapiens
tatccctatccccat

SEQ ID NO: 657119 - DNA, 15 bp, Homo sapiens
atccctatccccatc

SEQ ID NO: 657120 - DNA, 15 bp, Homo sapiens
tccctatccccatcc

SEQ ID NO: 657121 - DNA, 15 bp, Homo sapiens
ccctatccccatccc

SEQ ID NO: 657122 - DNA, 15 bp, Homo sapiens
cctatccccatccca

SEQ ID NO: 657123 - DNA, 15 bp, Homo sapiens
ctatccccatcccag

SEQ ID NO: 657124 - DNA, 15 bp, Homo sapiens
tatccccatcccagg

SEQ ID NO: 657125 - DNA, 15 bp, Homo sapiens
atccccatcccaggc

SEQ ID NO: 657126 - DNA, 15 bp, Homo sapiens
tccccatcccaggca

SEQ ID NO: 657127 - DNA, 15 bp, Homo sapiens
ccccatcccaggcag

SEQ ID NO: 657128 - DNA, 15 bp, Homo sapiens
cccatcccaggcaga

SEQ ID NO: 657129 - DNA, 15 bp, Homo sapiens
ccatcccaggcagac

SEQ ID NO: 657130 - DNA, 15 bp, Homo sapiens
catcccaggcagacc

SEQ ID NO: 657131 - DNA, 15 bp, Homo sapiens
atcccaggcagaccc

SEQ ID NO: 657132 - DNA, 15 bp, Homo sapiens
tcccaggcagaccct

SEQ ID NO: 657133 - DNA, 15 bp, Homo sapiens
cccaggcagaccctc

SEQ ID NO: 657134 - DNA, 15 bp, Homo sapiens
ccaggcagaccctct

SEQ ID NO: 657135 - DNA, 15 bp, Homo sapiens
caggcagaccctctg

SEQ ID NO: 657136 - DNA, 15 bp, Homo sapiens
aggcagaccctctgt

SEQ ID NO: 657137 - DNA, 15 bp, Homo sapiens
ggcagaccctctgtg

SEQ ID NO: 657138 - DNA, 15 bp, Homo sapiens
gcagaccctctgtgc

SEQ ID NO: 657139 - DNA, 15 bp, Homo sapiens
cagaccctctgtgca

SEQ ID NO: 657140 - DNA, 15 bp, Homo sapiens
agaccctctgtgcat

SEQ ID NO: 657141 - DNA, 15 bp, Homo sapiens
gaccctctgtgcatg

SEQ ID NO: 657142 - DNA, 15 bp, Homo sapiens
accctctgtgcatga

SEQ ID NO: 657143 - DNA, 15 bp, Homo sapiens
ccctctgtgcatgac

SEQ ID NO: 657144 - DNA, 15 bp, Homo sapiens
cctctgtgcatgaca

SEQ ID NO: 657145 - DNA, 15 bp, Homo sapiens
ctctgtgcatgacag

SEQ ID NO: 657146 - DNA, 15 bp, Homo sapiens
tctgtgcatgacagt

SEQ ID NO: 657147 - DNA, 15 bp, Homo sapiens
ctgtgcatgacagtg

SEQ ID NO: 657148 - DNA, 15 bp, Homo sapiens
tgtgcatgacagtgc

SEQ ID NO: 657149 - DNA, 15 bp, Homo sapiens
gtgcatgacagtgca

SEQ ID NO: 657150 - DNA, 15 bp, Homo sapiens
tgcatgacagtgcag

SEQ ID NO: 657151 - DNA, 15 bp, Homo sapiens
gcatgacagtgcagg

SEQ ID NO: 657152 - DNA, 15 bp, Homo sapiens
catgacagtgcaggt

SEQ ID NO: 657153 - DNA, 15 bp, Homo sapiens
atgacagtgcaggtg

SEQ ID NO: 657154 - DNA, 15 bp, Homo sapiens
tgacagtgcaggtga

SEQ ID NO: 657155 - DNA, 15 bp, Homo sapiens
gacagtgcaggtgag

SEQ ID NO: 657156 - DNA, 15 bp, Homo sapiens
acagtgcaggtgagc

SEQ ID NO: 657157 - DNA, 15 bp, Homo sapiens
cagtgcaggtgagca

SEQ ID NO: 657158 - DNA, 15 bp, Homo sapiens
agtgcaggtgagcag

SEQ ID NO: 657159 - DNA, 15 bp, Homo sapiens
gtgcaggtgagcagc

SEQ ID NO: 657160 - DNA, 15 bp, Homo sapiens
tgcaggtgagcagct

SEQ ID NO: 657161 - DNA, 15 bp, Homo sapiens
gcaggtgagcagctt

SEQ ID NO: 657162 - DNA, 15 bp, Homo sapiens
caggtgagcagcttt

SEQ ID NO: 657163 - DNA, 15 bp, Homo sapiens
aggtgagcagctttg

SEQ ID NO: 657164 - DNA, 15 bp, Homo sapiens
ggtgagcagctttgg

SEQ ID NO: 657165 - DNA, 15 bp, Homo sapiens
gtgagcagctttggg

SEQ ID NO: 657166 - DNA, 15 bp, Homo sapiens
tgagcagctttgggg

SEQ ID NO: 657167 - DNA, 15 bp, Homo sapiens
gagcagctttggggg

SEQ ID NO: 657168 - DNA, 15 bp, Homo sapiens
agcagctttgggggc

SEQ ID NO: 657169 - DNA, 15 bp, Homo sapiens
gcagctttgggggct

SEQ ID NO: 657170 - DNA, 15 bp, Homo sapiens
cagctttgggggcta

SEQ ID NO: 657171 - DNA, 15 bp, Homo sapiens
agctttgggggctac

SEQ ID NO: 657172 - DNA, 15 bp, Homo sapiens
gctttgggggctact

SEQ ID NO: 657173 - DNA, 15 bp, Homo sapiens
ctttgggggctacta

SEQ ID NO: 657174 - DNA, 15 bp, Homo sapiens
tttgggggctactac

SEQ ID NO: 657175 - DNA, 15 bp, Homo sapiens
ttgggggctactact

SEQ ID NO: 657176 - DNA, 15 bp, Homo sapiens
tgggggctactactc

SEQ ID NO: 657177 - DNA, 15 bp, Homo sapiens
gggggctactactca

SEQ ID NO: 657178 - DNA, 15 bp, Homo sapiens
ggggctactactcac

SEQ ID NO: 657179 - DNA, 15 bp, Homo sapiens
gggctactactcaca

SEQ ID NO: 657180 - DNA, 15 bp, Homo sapiens
ggctactactcacat

SEQ ID NO: 657181 - DNA, 15 bp, Homo sapiens
gctactactcacatc

SEQ ID NO: 657182 - DNA, 15 bp, Homo sapiens
ctactactcacatca

SEQ ID NO: 657183 - DNA, 15 bp, Homo sapiens
tactactcacatcat

SEQ ID NO: 657184 - DNA, 15 bp, Homo sapiens
actactcacatcata

SEQ ID NO: 657185 - DNA, 15 bp, Homo sapiens
ctactcacatcataa

SEQ ID NO: 657186 - DNA, 15 bp, Homo sapiens
tactcacatcataat

SEQ ID NO: 657187 - DNA, 15 bp, Homo sapiens
actcacatcataatc

SEQ ID NO: 657188 - DNA, 15 bp, Homo sapiens
ctcacatcataatct

SEQ ID NO: 657189 - DNA, 15 bp, Homo sapiens
tcacatcataatctc

SEQ ID NO: 657190 - DNA, 15 bp, Homo sapiens
cacatcataatctct

SEQ ID NO: 657191 - DNA, 15 bp, Homo sapiens
acatcataatctcta

SEQ ID NO: 657192 - DNA, 15 bp, Homo sapiens
catcataatctctac

SEQ ID NO: 657193 - DNA, 15 bp, Homo sapiens
atcataatctctaca

SEQ ID NO: 657194 - DNA, 15 bp, Homo sapiens
tcataatctctacag

SEQ ID NO: 657195 - DNA, 15 bp, Homo sapiens
cataatctctacagc

SEQ ID NO: 657196 - DNA, 15 bp, Homo sapiens
ataatctctacagca

SEQ ID NO: 657197 - DNA, 15 bp, Homo sapiens
taatctctacagcaa

SEQ ID NO: 657198 - DNA, 15 bp, Homo sapiens
aatctctacagcaac

SEQ ID NO: 657199 - DNA, 15 bp, Homo sapiens
atctctacagcaaca

SEQ ID NO: 657200 - DNA, 15 bp, Homo sapiens
tctctacagcaacaa

SEQ ID NO: 657201 - DNA, 15 bp, Homo sapiens
ctctacagcaacaaa

SEQ ID NO: 657202 - DNA, 15 bp, Homo sapiens
tctacagcaacaaag

SEQ ID NO: 657203 - DNA, 15 bp, Homo sapiens
ctacagcaacaaagt

SEQ ID NO: 657204 - DNA, 15 bp, Homo sapiens
tacagcaacaaagtt

SEQ ID NO: 657205 - DNA, 15 bp, Homo sapiens
acagcaacaaagtta

SEQ ID NO: 657206 - DNA, 15 bp, Homo sapiens
cagcaacaaagttat

SEQ ID NO: 657207 - DNA, 15 bp, Homo sapiens
agcaacaaagttatc

SEQ ID NO: 657208 - DNA, 15 bp, Homo sapiens
gcaacaaagttatct

SEQ ID NO: 657209 - DNA, 15 bp, Homo sapiens
caacaaagttatctc

SEQ ID NO: 657210 - DNA, 15 bp, Homo sapiens
aacaaagttatctct

SEQ ID NO: 657211 - DNA, 15 bp, Homo sapiens
acaaagttatctctc

SEQ ID NO: 657212 - DNA, 15 bp, Homo sapiens
caaagttatctctca

SEQ ID NO: 657213 - DNA, 15 bp, Homo sapiens
aaagttatctctcat

SEQ ID NO: 657214 - DNA, 15 bp, Homo sapiens
aagttatctctcatt

SEQ ID NO: 657215 - DNA, 15 bp, Homo sapiens
agttatctctcatta

SEQ ID NO: 657216 - DNA, 15 bp, Homo sapiens
gttatctctcattat

SEQ ID NO: 657217 - DNA, 15 bp, Homo sapiens
ttatctctcattata

SEQ ID NO: 657218 - DNA, 15 bp, Homo sapiens
tatctctcattatat

SEQ ID NO: 657219 - DNA, 15 bp, Homo sapiens
atctctcattatatt

SEQ ID NO: 657220 - DNA, 15 bp, Homo sapiens
tctctcattatattt

SEQ ID NO: 657221 - DNA, 15 bp, Homo sapiens
ctctcattatattta

SEQ ID NO: 657222 - DNA, 15 bp, Homo sapiens
tctcattatatttat

SEQ ID NO: 657223 - DNA, 15 bp, Homo sapiens
ctcattatatttatc

SEQ ID NO: 657224 - DNA, 15 bp, Homo sapiens
tcattatatttatca

SEQ ID NO: 657225 - DNA, 15 bp, Homo sapiens
cattatatttatcat

SEQ ID NO: 657226 - DNA, 15 bp, Homo sapiens
attatatttatcatt

SEQ ID NO: 657227 - DNA, 15 bp, Homo sapiens
ttatatttatcattc

SEQ ID NO: 657228 - DNA, 15 bp, Homo sapiens
tatatttatcattca

SEQ ID NO: 657229 - DNA, 15 bp, Homo sapiens
atatttatcattcat

SEQ ID NO: 657230 - DNA, 15 bp, Homo sapiens
tatttatcattcatt

SEQ ID NO: 657231 - DNA, 15 bp, Homo sapiens
atttatcattcattt

SEQ ID NO: 657232 - DNA, 15 bp, Homo sapiens
tttatcattcattta

SEQ ID NO: 657233 - DNA, 15 bp, Homo sapiens
ttatcattcatttat

SEQ ID NO: 657234 - DNA, 15 bp, Homo sapiens
tatcattcatttatt

SEQ ID NO: 657235 - DNA, 15 bp, Homo sapiens
atcattcatttattc

SEQ ID NO: 657236 - DNA, 15 bp, Homo sapiens
tcattcatttattca

SEQ ID NO: 657237 - DNA, 15 bp, Homo sapiens
cattcatttattcat

SEQ ID NO: 657238 - DNA, 15 bp, Homo sapiens
attcatttattcatt

SEQ ID NO: 657239 - DNA, 15 bp, Homo sapiens
ttcatttattcattc

SEQ ID NO: 657240 - DNA, 15 bp, Homo sapiens
tcatttattcattca

SEQ ID NO: 657241 - DNA, 15 bp, Homo sapiens
catttattcattcac

SEQ ID NO: 657242 - DNA, 15 bp, Homo sapiens
atttattcattcact

SEQ ID NO: 657243 - DNA, 15 bp, Homo sapiens
tttattcattcactc

SEQ ID NO: 657244 - DNA, 15 bp, Homo sapiens
ttattcattcactct

SEQ ID NO: 657245 - DNA, 15 bp, Homo sapiens
tattcattcactctt

SEQ ID NO: 657246 - DNA, 15 bp, Homo sapiens
attcattcactcttt

SEQ ID NO: 657247 - DNA, 15 bp, Homo sapiens
ttcattcactctttc

SEQ ID NO: 657248 - DNA, 15 bp, Homo sapiens
tcattcactctttcg

SEQ ID NO: 657249 - DNA, 15 bp, Homo sapiens
cattcactctttcgt

SEQ ID NO: 657250 - DNA, 15 bp, Homo sapiens
attcactctttcgtt

SEQ ID NO: 657251 - DNA, 15 bp, Homo sapiens
ttcactctttcgtta

SEQ ID NO: 657252 - DNA, 15 bp, Homo sapiens
tcactctttcgttaa

SEQ ID NO: 657253 - DNA, 15 bp, Homo sapiens
cactctttcgttaat

SEQ ID NO: 657254 - DNA, 15 bp, Homo sapiens
actctttcgttaatt

SEQ ID NO: 657255 - DNA, 15 bp, Homo sapiens
ctctttcgttaatta

SEQ ID NO: 657256 - DNA, 15 bp, Homo sapiens
tctttcgttaattaa

SEQ ID NO: 657257 - DNA, 15 bp, Homo sapiens
ctttcgttaattaag

SEQ ID NO: 657258 - DNA, 15 bp, Homo sapiens
tttcgttaattaagt

SEQ ID NO: 657259 - DNA, 15 bp, Homo sapiens
ttcgttaattaagta

SEQ ID NO: 657260 - DNA, 15 bp, Homo sapiens
tcgttaattaagtac

SEQ ID NO: 657261 - DNA, 15 bp, Homo sapiens
cgttaattaagtaca

SEQ ID NO: 657262 - DNA, 15 bp, Homo sapiens
gttaattaagtacat

SEQ ID NO: 657263 - DNA, 15 bp, Homo sapiens
ttaattaagtacatg

SEQ ID NO: 657264 - DNA, 15 bp, Homo sapiens
taattaagtacatgt

SEQ ID NO: 657265 - DNA, 15 bp, Homo sapiens
aattaagtacatgtt

SEQ ID NO: 657266 - DNA, 15 bp, Homo sapiens
attaagtacatgttg

SEQ ID NO: 657267 - DNA, 15 bp, Homo sapiens
ttaagtacatgttga

SEQ ID NO: 657268 - DNA, 15 bp, Homo sapiens
taagtacatgttgac

SEQ ID NO: 657269 - DNA, 15 bp, Homo sapiens
aagtacatgttgact

SEQ ID NO: 657270 - DNA, 15 bp, Homo sapiens
agtacatgttgacta

SEQ ID NO: 657271 - DNA, 15 bp, Homo sapiens
gtacatgttgactat

SEQ ID NO: 657272 - DNA, 15 bp, Homo sapiens
tacatgttgactata

SEQ ID NO: 657273 - DNA, 15 bp, Homo sapiens
acatgttgactatag

SEQ ID NO: 657274 - DNA, 15 bp, Homo sapiens
catgttgactatagt

SEQ ID NO: 657275 - DNA, 15 bp, Homo sapiens
atgttgactatagtt

SEQ ID NO: 657276 - DNA, 15 bp, Homo sapiens
tgttgactatagtta

SEQ ID NO: 657277 - DNA, 15 bp, Homo sapiens
gttgactatagttag

SEQ ID NO: 657278 - DNA, 15 bp, Homo sapiens
ttgactatagttaga

SEQ ID NO: 657279 - DNA, 15 bp, Homo sapiens
tgactatagttagag

SEQ ID NO: 657280 - DNA, 15 bp, Homo sapiens
gactatagttagagg

SEQ ID NO: 657281 - DNA, 15 bp, Homo sapiens
actatagttagaggc

SEQ ID NO: 657282 - DNA, 15 bp, Homo sapiens
ctatagttagaggct

SEQ ID NO: 657283 - DNA, 15 bp, Homo sapiens
tatagttagaggcta

SEQ ID NO: 657284 - DNA, 15 bp, Homo sapiens
atagttagaggctaa

SEQ ID NO: 657285 - DNA, 15 bp, Homo sapiens
tagttagaggctaag

SEQ ID NO: 657286 - DNA, 15 bp, Homo sapiens
agttagaggctaaga

SEQ ID NO: 657287 - DNA, 15 bp, Homo sapiens
gttagaggctaagac

SEQ ID NO: 657288 - DNA, 15 bp, Homo sapiens
ttagaggctaagaca

SEQ ID NO: 657289 - DNA, 15 bp, Homo sapiens
tagaggctaagacaa

SEQ ID NO: 657290 - DNA, 15 bp, Homo sapiens
agaggctaagacaag

SEQ ID NO: 657291 - DNA, 15 bp, Homo sapiens
gaggctaagacaagt

SEQ ID NO: 657292 - DNA, 15 bp, Homo sapiens
aggctaagacaagta

SEQ ID NO: 657293 - DNA, 15 bp, Homo sapiens
ggctaagacaagtag

SEQ ID NO: 657294 - DNA, 15 bp, Homo sapiens
gctaagacaagtaga

SEQ ID NO: 657295 - DNA, 15 bp, Homo sapiens
ctaagacaagtagaa

SEQ ID NO: 657296 - DNA, 15 bp, Homo sapiens
taagacaagtagaag

SEQ ID NO: 657297 - DNA, 15 bp, Homo sapiens
aagacaagtagaagg

SEQ ID NO: 657298 - DNA, 15 bp, Homo sapiens
agacaagtagaagga

SEQ ID NO: 657299 - DNA, 15 bp, Homo sapiens
gacaagtagaaggag

SEQ ID NO: 657300 - DNA, 15 bp, Homo sapiens
acaagtagaaggaga

SEQ ID NO: 657301 - DNA, 15 bp, Homo sapiens
caagtagaaggagac

SEQ ID NO: 657302 - DNA, 15 bp, Homo sapiens
aagtagaaggagaca

SEQ ID NO: 657303 - DNA, 15 bp, Homo sapiens
agtagaaggagacag

SEQ ID NO: 657304 - DNA, 15 bp, Homo sapiens
gtagaaggagacagg

SEQ ID NO: 657305 - DNA, 15 bp, Homo sapiens
tagaaggagacaggc

SEQ ID NO: 657306 - DNA, 15 bp, Homo sapiens
agaaggagacaggca

SEQ ID NO: 657307 - DNA, 15 bp, Homo sapiens
gaaggagacaggcaa

SEQ ID NO: 657308 - DNA, 15 bp, Homo sapiens
aaggagacaggcaat

SEQ ID NO: 657309 - DNA, 15 bp, Homo sapiens
aggagacaggcaatt

SEQ ID NO: 657310 - DNA, 15 bp, Homo sapiens
ggagacaggcaattg

SEQ ID NO: 657311 - DNA, 15 bp, Homo sapiens
gagacaggcaattgc

SEQ ID NO: 657312 - DNA, 15 bp, Homo sapiens
agacaggcaattgca

SEQ ID NO: 657313 - DNA, 15 bp, Homo sapiens
gacaggcaattgcat

SEQ ID NO: 657314 - DNA, 15 bp, Homo sapiens
acaggcaattgcatc

SEQ ID NO: 657315 - DNA, 15 bp, Homo sapiens
caggcaattgcatct

SEQ ID NO: 657316 - DNA, 15 bp, Homo sapiens
aggcaattgcatctg

SEQ ID NO: 657317 - DNA, 15 bp, Homo sapiens
ggcaattgcatctgt

SEQ ID NO: 657318 - DNA, 15 bp, Homo sapiens
gcaattgcatctgtc

SEQ ID NO: 657319 - DNA, 15 bp, Homo sapiens
caattgcatctgtct

SEQ ID NO: 657320 - DNA, 15 bp, Homo sapiens
aattgcatctgtctt

SEQ ID NO: 657321 - DNA, 15 bp, Homo sapiens
attgcatctgtcttg

SEQ ID NO: 657322 - DNA, 15 bp, Homo sapiens
ttgcatctgtcttgc

SEQ ID NO: 657323 - DNA, 15 bp, Homo sapiens
tgcatctgtcttgct

SEQ ID NO: 657324 - DNA, 15 bp, Homo sapiens
gcatctgtcttgctc

SEQ ID NO: 657325 - DNA, 15 bp, Homo sapiens
catctgtcttgctct

SEQ ID NO: 657326 - DNA, 15 bp, Homo sapiens
atctgtcttgctctc

SEQ ID NO: 657327 - DNA, 15 bp, Homo sapiens
tctgtcttgctctct

SEQ ID NO: 657328 - DNA, 15 bp, Homo sapiens
ctgtcttgctctctg

SEQ ID NO: 657329 - DNA, 15 bp, Homo sapiens
tgtcttgctctctga

SEQ ID NO: 657330 - DNA, 15 bp, Homo sapiens
gtcttgctctctgaa

SEQ ID NO: 657331 - DNA, 15 bp, Homo sapiens
tcttgctctctgaag

SEQ ID NO: 657332 - DNA, 15 bp, Homo sapiens
cttgctctctgaagc

SEQ ID NO: 657333 - DNA, 15 bp, Homo sapiens
ttgctctctgaagca

SEQ ID NO: 657334 - DNA, 15 bp, Homo sapiens
tgctctctgaagcat

SEQ ID NO: 657335 - DNA, 15 bp, Homo sapiens
gctctctgaagcata

SEQ ID NO: 657336 - DNA, 15 bp, Homo sapiens
ctctctgaagcataa

SEQ ID NO: 657337 - DNA, 15 bp, Homo sapiens
tctctgaagcataaa

SEQ ID NO: 657338 - DNA, 15 bp, Homo sapiens
ctctgaagcataaat

SEQ ID NO: 657339 - DNA, 15 bp, Homo sapiens
tctgaagcataaatt

SEQ ID NO: 657340 - DNA, 15 bp, Homo sapiens
ctgaagcataaatta

SEQ ID NO: 657341 - DNA, 15 bp, Homo sapiens
tgaagcataaattat

SEQ ID NO: 657342 - DNA, 15 bp, Homo sapiens
gaagcataaattata

SEQ ID NO: 657343 - DNA, 15 bp, Homo sapiens
aagcataaattatat

SEQ ID NO: 657344 - DNA, 15 bp, Homo sapiens
agcataaattatata

SEQ ID NO: 657345 - DNA, 15 bp, Homo sapiens
gcataaattatatac

SEQ ID NO: 657346 - DNA, 15 bp, Homo sapiens
cataaattatataca

SEQ ID NO: 657347 - DNA, 15 bp, Homo sapiens
ataaattatatacat

SEQ ID NO: 657348 - DNA, 15 bp, Homo sapiens
taaattatatacatg

SEQ ID NO: 657349 - DNA, 15 bp, Homo sapiens
aaattatatacatgc

SEQ ID NO: 657350 - DNA, 15 bp, Homo sapiens
aattatatacatgcc

SEQ ID NO: 657351 - DNA, 15 bp, Homo sapiens
attatatacatgcct

SEQ ID NO: 657352 - DNA, 15 bp, Homo sapiens
ttatatacatgcctg

SEQ ID NO: 657353 - DNA, 15 bp, Homo sapiens
tatatacatgcctgg

SEQ ID NO: 657354 - DNA, 15 bp, Homo sapiens
atatacatgcctggt

SEQ ID NO: 657355 - DNA, 15 bp, Homo sapiens
tatacatgcctggtg

SEQ ID NO: 657356 - DNA, 15 bp, Homo sapiens
atacatgcctggtgc

SEQ ID NO: 657357 - DNA, 15 bp, Homo sapiens
tacatgcctggtgca

SEQ ID NO: 657358 - DNA, 15 bp, Homo sapiens
acatgcctggtgcaa

SEQ ID NO: 657359 - DNA, 15 bp, Homo sapiens
catgcctggtgcaaa

SEQ ID NO: 657360 - DNA, 15 bp, Homo sapiens
atgcctggtgcaaaa

SEQ ID NO: 657361 - DNA, 15 bp, Homo sapiens
tgcctggtgcaaaaa

SEQ ID NO: 657362 - DNA, 15 bp, Homo sapiens
gcctggtgcaaaaat

SEQ ID NO: 657363 - DNA, 15 bp, Homo sapiens
cctggtgcaaaaatg

SEQ ID NO: 657364 - DNA, 15 bp, Homo sapiens
ctggtgcaaaaatga

SEQ ID NO: 657365 - DNA, 15 bp, Homo sapiens
tggtgcaaaaatgat

SEQ ID NO: 657366 - DNA, 15 bp, Homo sapiens
ggtgcaaaaatgatg

SEQ ID NO: 657367 - DNA, 15 bp, Homo sapiens
gtgcaaaaatgatgc

SEQ ID NO: 657368 - DNA, 15 bp, Homo sapiens
tgcaaaaatgatgct

SEQ ID NO: 657369 - DNA, 15 bp, Homo sapiens
gcaaaaatgatgctt

SEQ ID NO: 657370 - DNA, 15 bp, Homo sapiens
caaaaatgatgctta

SEQ ID NO: 657371 - DNA, 15 bp, Homo sapiens
aaaaatgatgcttat

SEQ ID NO: 657372 - DNA, 15 bp, Homo sapiens
aaaatgatgcttata

SEQ ID NO: 657373 - DNA, 15 bp, Homo sapiens
aaatgatgcttatat

SEQ ID NO: 657374 - DNA, 15 bp, Homo sapiens
aatgatgcttatatc

SEQ ID NO: 657375 - DNA, 15 bp, Homo sapiens
atgatgcttatatca

SEQ ID NO: 657376 - DNA, 15 bp, Homo sapiens
tgatgcttatatcat

SEQ ID NO: 657377 - DNA, 15 bp, Homo sapiens
gatgcttatatcatc

SEQ ID NO: 657378 - DNA, 15 bp, Homo sapiens
atgcttatatcatca

SEQ ID NO: 657379 - DNA, 15 bp, Homo sapiens
tgcttatatcatcaa

SEQ ID NO: 657380 - DNA, 15 bp, Homo sapiens
gcttatatcatcaat

SEQ ID NO: 657381 - DNA, 15 bp, Homo sapiens
cttatatcatcaatc

SEQ ID NO: 657382 - DNA, 15 bp, Homo sapiens
ttatatcatcaatca

SEQ ID NO: 657383 - DNA, 15 bp, Homo sapiens
tatatcatcaatcat

SEQ ID NO: 657384 - DNA, 15 bp, Homo sapiens
atatcatcaatcatt

SEQ ID NO: 657385 - DNA, 15 bp, Homo sapiens
tatcatcaatcatta

SEQ ID NO: 657386 - DNA, 15 bp, Homo sapiens
atcatcaatcattat

SEQ ID NO: 657387 - DNA, 15 bp, Homo sapiens
tcatcaatcattatc

SEQ ID NO: 657388 - DNA, 15 bp, Homo sapiens
catcaatcattatct

SEQ ID NO: 657389 - DNA, 15 bp, Homo sapiens
atcaatcattatctt

SEQ ID NO: 657390 - DNA, 15 bp, Homo sapiens
tcaatcattatcttt

SEQ ID NO: 657391 - DNA, 15 bp, Homo sapiens
caatcattatctttt

SEQ ID NO: 657392 - DNA, 15 bp, Homo sapiens
aatcattatctttta

SEQ ID NO: 657393 - DNA, 15 bp, Homo sapiens
atcattatcttttat

SEQ ID NO: 657394 - DNA, 15 bp, Homo sapiens
tcattatcttttata

SEQ ID NO: 657395 - DNA, 15 bp, Homo sapiens
cattatcttttatat

SEQ ID NO: 657396 - DNA, 15 bp, Homo sapiens
attatcttttatata

SEQ ID NO: 657397 - DNA, 15 bp, Homo sapiens
ttatcttttatatac

SEQ ID NO: 657398 - DNA, 15 bp, Homo sapiens
tatcttttatatacc

SEQ ID NO: 657399 - DNA, 15 bp, Homo sapiens
atcttttatatacct

SEQ ID NO: 657400 - DNA, 15 bp, Homo sapiens
tcttttatataccta

SEQ ID NO: 657401 - DNA, 15 bp, Homo sapiens
cttttatatacctat

SEQ ID NO: 657402 - DNA, 15 bp, Homo sapiens
ttttatatacctatt

SEQ ID NO: 657403 - DNA, 15 bp, Homo sapiens
tttatatacctatta

SEQ ID NO: 657404 - DNA, 15 bp, Homo sapiens
ttatatacctattat

SEQ ID NO: 657405 - DNA, 15 bp, Homo sapiens
tatatacctattata

SEQ ID NO: 657406 - DNA, 15 bp, Homo sapiens
atatacctattatag

SEQ ID NO: 657407 - DNA, 15 bp, Homo sapiens
tatacctattataga

SEQ ID NO: 657408 - DNA, 15 bp, Homo sapiens
atacctattatagat

SEQ ID NO: 657409 - DNA, 15 bp, Homo sapiens
tacctattatagatt

SEQ ID NO: 657410 - DNA, 15 bp, Homo sapiens
acctattatagattc

SEQ ID NO: 657411 - DNA, 15 bp, Homo sapiens
cctattatagattca

SEQ ID NO: 657412 - DNA, 15 bp, Homo sapiens
ctattatagattcaa

SEQ ID NO: 657413 - DNA, 15 bp, Homo sapiens
tattatagattcaat

SEQ ID NO: 657414 - DNA, 15 bp, Homo sapiens
attatagattcaata

SEQ ID NO: 657415 - DNA, 15 bp, Homo sapiens
ttatagattcaataa

SEQ ID NO: 657416 - DNA, 15 bp, Homo sapiens
tatagattcaataac

SEQ ID NO: 657417 - DNA, 15 bp, Homo sapiens
atagattcaataact

SEQ ID NO: 657418 - DNA, 15 bp, Homo sapiens
tagattcaataactg

SEQ ID NO: 657419 - DNA, 15 bp, Homo sapiens
agattcaataactgt

SEQ ID NO: 657420 - DNA, 15 bp, Homo sapiens
gattcaataactgtt

SEQ ID NO: 657421 - DNA, 15 bp, Homo sapiens
attcaataactgtta

SEQ ID NO: 657422 - DNA, 15 bp, Homo sapiens
ttcaataactgttag

SEQ ID NO: 657423 - DNA, 15 bp, Homo sapiens
tcaataactgttaga

SEQ ID NO: 657424 - DNA, 15 bp, Homo sapiens
caataactgttagaa

SEQ ID NO: 657425 - DNA, 15 bp, Homo sapiens
aataactgttagaat

SEQ ID NO: 657426 - DNA, 15 bp, Homo sapiens
ataactgttagaatt

SEQ ID NO: 657427 - DNA, 15 bp, Homo sapiens
taactgttagaattc

SEQ ID NO: 657428 - DNA, 15 bp, Homo sapiens
aactgttagaattct

SEQ ID NO: 657429 - DNA, 15 bp, Homo sapiens
actgttagaattcta

SEQ ID NO: 657430 - DNA, 15 bp, Homo sapiens
ctgttagaattctag

SEQ ID NO: 657431 - DNA, 15 bp, Homo sapiens
tgttagaattctaga

SEQ ID NO: 657432 - DNA, 15 bp, Homo sapiens
gttagaattctagaa

SEQ ID NO: 657433 - DNA, 15 bp, Homo sapiens
ttagaattctagaaa

SEQ ID NO: 657434 - DNA, 15 bp, Homo sapiens
tagaattctagaaaa

SEQ ID NO: 657435 - DNA, 15 bp, Homo sapiens
agaattctagaaaaa

SEQ ID NO: 657436 - DNA, 15 bp, Homo sapiens
gaattctagaaaaat

SEQ ID NO: 657437 - DNA, 15 bp, Homo sapiens
aattctagaaaaatc

SEQ ID NO: 657438 - DNA, 15 bp, Homo sapiens
attctagaaaaatca

SEQ ID NO: 657439 - DNA, 15 bp, Homo sapiens
ttctagaaaaatcaa

SEQ ID NO: 657440 - DNA, 15 bp, Homo sapiens
tctagaaaaatcaac

SEQ ID NO: 657441 - DNA, 15 bp, Homo sapiens
ctagaaaaatcaact

SEQ ID NO: 657442 - DNA, 15 bp, Homo sapiens
tagaaaaatcaactc

SEQ ID NO: 657443 - DNA, 15 bp, Homo sapiens
agaaaaatcaactca

SEQ ID NO: 657444 - DNA, 15 bp, Homo sapiens
gaaaaatcaactcaa

SEQ ID NO: 657445 - DNA, 15 bp, Homo sapiens
aaaaatcaactcaat

SEQ ID NO: 657446 - DNA, 15 bp, Homo sapiens
aaaatcaactcaatc

SEQ ID NO: 657447 - DNA, 15 bp, Homo sapiens
aaatcaactcaatct

SEQ ID NO: 657448 - DNA, 15 bp, Homo sapiens
aatcaactcaatctg

SEQ ID NO: 657449 - DNA, 15 bp, Homo sapiens
atcaactcaatctgg

SEQ ID NO: 657450 - DNA, 15 bp, Homo sapiens
tcaactcaatctggt

SEQ ID NO: 657451 - DNA, 15 bp, Homo sapiens
caactcaatctggtg

SEQ ID NO: 657452 - DNA, 15 bp, Homo sapiens
aactcaatctggtga

SEQ ID NO: 657453 - DNA, 15 bp, Homo sapiens
actcaatctggtgat

SEQ ID NO: 657454 - DNA, 15 bp, Homo sapiens
ctcaatctggtgatc

SEQ ID NO: 657455 - DNA, 15 bp, Homo sapiens
tcaatctggtgatct

SEQ ID NO: 657456 - DNA, 15 bp, Homo sapiens
caatctggtgatctt

SEQ ID NO: 657457 - DNA, 15 bp, Homo sapiens
aatctggtgatcttt

SEQ ID NO: 657458 - DNA, 15 bp, Homo sapiens
atctggtgatctttc

SEQ ID NO: 657459 - DNA, 15 bp, Homo sapiens
tctggtgatctttca

SEQ ID NO: 657460 - DNA, 15 bp, Homo sapiens
ctggtgatctttcaa

SEQ ID NO: 657461 - DNA, 15 bp, Homo sapiens
tggtgatctttcaag

SEQ ID NO: 657462 - DNA, 15 bp, Homo sapiens
ggtgatctttcaagc

SEQ ID NO: 657463 - DNA, 15 bp, Homo sapiens
gtgatctttcaagcc

SEQ ID NO: 657464 - DNA, 15 bp, Homo sapiens
tgatctttcaagcct

SEQ ID NO: 657465 - DNA, 15 bp, Homo sapiens
gatctttcaagcctg

SEQ ID NO: 657466 - DNA, 15 bp, Homo sapiens
atctttcaagcctgc

SEQ ID NO: 657467 - DNA, 15 bp, Homo sapiens
tctttcaagcctgct

SEQ ID NO: 657468 - DNA, 15 bp, Homo sapiens
ctttcaagcctgctt

SEQ ID NO: 657469 - DNA, 15 bp, Homo sapiens
tttcaagcctgcttt

SEQ ID NO: 657470 - DNA, 15 bp, Homo sapiens
ttcaagcctgctttt

SEQ ID NO: 657471 - DNA, 15 bp, Homo sapiens
tcaagcctgcttttt

SEQ ID NO: 657472 - DNA, 15 bp, Homo sapiens
caagcctgctttttc

SEQ ID NO: 657473 - DNA, 15 bp, Homo sapiens
aagcctgctttttct

SEQ ID NO: 657474 - DNA, 15 bp, Homo sapiens
agcctgctttttctt

SEQ ID NO: 657475 - DNA, 15 bp, Homo sapiens
gcctgctttttcttt

SEQ ID NO: 657476 - DNA, 15 bp, Homo sapiens
cctgctttttctttt

SEQ ID NO: 657477 - DNA, 15 bp, Homo sapiens
ctgctttttctttta

SEQ ID NO: 657478 - DNA, 15 bp, Homo sapiens
tgctttttcttttaa

SEQ ID NO: 657479 - DNA, 15 bp, Homo sapiens
gctttttcttttaaa

SEQ ID NO: 657480 - DNA, 15 bp, Homo sapiens
ctttttcttttaaaa

SEQ ID NO: 657481 - DNA, 15 bp, Homo sapiens
tttttcttttaaaaa

SEQ ID NO: 657482 - DNA, 15 bp, Homo sapiens
ttttcttttaaaaaa

SEQ ID NO: 657483 - DNA, 15 bp, Homo sapiens
tttcttttaaaaaaa

SEQ ID NO: 657484 - DNA, 15 bp, Homo sapiens
ttcttttaaaaaaat

SEQ ID NO: 657485 - DNA, 15 bp, Homo sapiens
tcttttaaaaaaatt

SEQ ID NO: 657486 - DNA, 15 bp, Homo sapiens
cttttaaaaaaattt

SEQ ID NO: 657487 - DNA, 15 bp, Homo sapiens
ttttaaaaaaatttt

SEQ ID NO: 657488 - DNA, 15 bp, Homo sapiens
tttaaaaaaattttt

SEQ ID NO: 657489 - DNA, 15 bp, Homo sapiens
ttaaaaaaatttttt

SEQ ID NO: 657490 - DNA, 15 bp, Homo sapiens
taaaaaaattttttc

SEQ ID NO: 657491 - DNA, 15 bp, Homo sapiens
aaaaaaattttttca

SEQ ID NO: 657492 - DNA, 15 bp, Homo sapiens
aaaaaattttttcag

SEQ ID NO: 657493 - DNA, 15 bp, Homo sapiens
aaaaattttttcaga

SEQ ID NO: 657494 - DNA, 15 bp, Homo sapiens
aaaattttttcagaa

SEQ ID NO: 657495 - DNA, 15 bp, Homo sapiens
aaattttttcagaag

SEQ ID NO: 657496 - DNA, 15 bp, Homo sapiens
aattttttcagaagt

SEQ ID NO: 657497 - DNA, 15 bp, Homo sapiens
attttttcagaagtc

SEQ ID NO: 657498 - DNA, 15 bp, Homo sapiens
ttttttcagaagtct

SEQ ID NO: 657499 - DNA, 15 bp, Homo sapiens
tttttcagaagtctt

SEQ ID NO: 657500 - DNA, 15 bp, Homo sapiens
ttttcagaagtcttt

SEQ ID NO: 657501 - DNA, 15 bp, Homo sapiens
tttcagaagtctttt

SEQ ID NO: 657502 - DNA, 15 bp, Homo sapiens
ttcagaagtcttttt

SEQ ID NO: 657503 - DNA, 15 bp, Homo sapiens
tcagaagtctttttc

SEQ ID NO: 657504 - DNA, 15 bp, Homo sapiens
cagaagtctttttcc

SEQ ID NO: 657505 - DNA, 15 bp, Homo sapiens
agaagtctttttccc

SEQ ID NO: 657506 - DNA, 15 bp, Homo sapiens
gaagtctttttcccc

SEQ ID NO: 657507 - DNA, 15 bp, Homo sapiens
aagtctttttccccc

SEQ ID NO: 657508 - DNA, 15 bp, Homo sapiens
agtctttttccccct

SEQ ID NO: 657509 - DNA, 15 bp, Homo sapiens
gtctttttccccctc

SEQ ID NO: 657510 - DNA, 15 bp, Homo sapiens
tctttttccccctca

SEQ ID NO: 657511 - DNA, 15 bp, Homo sapiens
ctttttccccctcaa

SEQ ID NO: 657512 - DNA, 15 bp, Homo sapiens
tttttccccctcaaa

SEQ ID NO: 657513 - DNA, 15 bp, Homo sapiens
ttttccccctcaaac

SEQ ID NO: 657514 - DNA, 15 bp, Homo sapiens
tttccccctcaaaca

SEQ ID NO: 657515 - DNA, 15 bp, Homo sapiens
ttccccctcaaacaa

SEQ ID NO: 657516 - DNA, 15 bp, Homo sapiens
tccccctcaaacaat

SEQ ID NO: 657517 - DNA, 15 bp, Homo sapiens
ccccctcaaacaatt

SEQ ID NO: 657518 - DNA, 15 bp, Homo sapiens
cccctcaaacaattt

SEQ ID NO: 657519 - DNA, 15 bp, Homo sapiens
ccctcaaacaatttt

SEQ ID NO: 657520 - DNA, 15 bp, Homo sapiens
cctcaaacaattttc

SEQ ID NO: 657521 - DNA, 15 bp, Homo sapiens
ctcaaacaattttct

SEQ ID NO: 657522 - DNA, 15 bp, Homo sapiens
tcaaacaattttctt

SEQ ID NO: 657523 - DNA, 15 bp, Homo sapiens
caaacaattttcttt

SEQ ID NO: 657524 - DNA, 15 bp, Homo sapiens
aaacaattttctttt

SEQ ID NO: 657525 - DNA, 15 bp, Homo sapiens
aacaattttcttttc

SEQ ID NO: 657526 - DNA, 15 bp, Homo sapiens
acaattttcttttct

SEQ ID NO: 657527 - DNA, 15 bp, Homo sapiens
caattttcttttctt

SEQ ID NO: 657528 - DNA, 15 bp, Homo sapiens
aattttcttttcttt

SEQ ID NO: 657529 - DNA, 15 bp, Homo sapiens
attttcttttctttt

SEQ ID NO: 657530 - DNA, 15 bp, Homo sapiens
tcttttctttttttt

SEQ ID NO: 657531 - DNA, 15 bp, Homo sapiens
cttttcttttttttt

SEQ ID NO: 657532 - DNA, 15 bp, Homo sapiens
ttttttttttgagac

SEQ ID NO: 657533 - DNA, 15 bp, Homo sapiens
tttttttttgagacg

SEQ ID NO: 657534 - DNA, 15 bp, Homo sapiens
ttttttttgagacgg

SEQ ID NO: 657535 - DNA, 15 bp, Homo sapiens
tttttttgagacgga

SEQ ID NO: 657536 - DNA, 15 bp, Homo sapiens
ttttttgagacggag

SEQ ID NO: 657537 - DNA, 15 bp, Homo sapiens
tttttgagacggagt

SEQ ID NO: 657538 - DNA, 15 bp, Homo sapiens
ttttgagacggagtc

SEQ ID NO: 657539 - DNA, 15 bp, Homo sapiens
tttgagacggagtct

SEQ ID NO: 657540 - DNA, 15 bp, Homo sapiens
ttgagacggagtctt

SEQ ID NO: 657541 - DNA, 15 bp, Homo sapiens
tgagacggagtcttg

SEQ ID NO: 657542 - DNA, 15 bp, Homo sapiens
gagacggagtcttgc

SEQ ID NO: 657543 - DNA, 15 bp, Homo sapiens
agacggagtcttgct

SEQ ID NO: 657544 - DNA, 15 bp, Homo sapiens
gacggagtcttgctc

SEQ ID NO: 657545 - DNA, 15 bp, Homo sapiens
acggagtcttgctct

SEQ ID NO: 657546 - DNA, 15 bp, Homo sapiens
cggagtcttgctctg

SEQ ID NO: 657547 - DNA, 15 bp, Homo sapiens
ggagtcttgctctgt

SEQ ID NO: 657548 - DNA, 15 bp, Homo sapiens
gagtcttgctctgtc

SEQ ID NO: 657549 - DNA, 15 bp, Homo sapiens
tcttgctctgtcacc

SEQ ID NO: 657550 - DNA, 15 bp, Homo sapiens
cttgctctgtcaccc

SEQ ID NO: 657551 - DNA, 15 bp, Homo sapiens
ttgctctgtcaccca

SEQ ID NO: 657552 - DNA, 15 bp, Homo sapiens
tgctctgtcacccag

SEQ ID NO: 657553 - DNA, 15 bp, Homo sapiens
gctctgtcacccagg

SEQ ID NO: 657554 - DNA, 15 bp, Homo sapiens
ctctgtcacccaggc

SEQ ID NO: 657555 - DNA, 15 bp, Homo sapiens
tctgtcacccaggct

SEQ ID NO: 657556 - DNA, 15 bp, Homo sapiens
ctgtcacccaggctg

SEQ ID NO: 657557 - DNA, 15 bp, Homo sapiens
tgtcacccaggctgg

SEQ ID NO: 657558 - DNA, 15 bp, Homo sapiens
gtcacccaggctgga

SEQ ID NO: 657559 - DNA, 15 bp, Homo sapiens
tcacccaggctggag

SEQ ID NO: 657560 - DNA, 15 bp, Homo sapiens
cacccaggctggagt

SEQ ID NO: 657561 - DNA, 15 bp, Homo sapiens
acccaggctggagtg

SEQ ID NO: 657562 - DNA, 15 bp, Homo sapiens
tggagtgcagtggcg

SEQ ID NO: 657563 - DNA, 15 bp, Homo sapiens
ggagtgcagtggcgc

SEQ ID NO: 657564 - DNA, 15 bp, Homo sapiens
gagtgcagtggcgcg

SEQ ID NO: 657565 - DNA, 15 bp, Homo sapiens
agtgcagtggcgcga

SEQ ID NO: 657566 - DNA, 15 bp, Homo sapiens
gtgcagtggcgcgat

SEQ ID NO: 657567 - DNA, 15 bp, Homo sapiens
tgcagtggcgcgatc

SEQ ID NO: 657568 - DNA, 15 bp, Homo sapiens
gcagtggcgcgatct

SEQ ID NO: 657569 - DNA, 15 bp, Homo sapiens
cagtggcgcgatctt

SEQ ID NO: 657570 - DNA, 15 bp, Homo sapiens
agtggcgcgatcttg

SEQ ID NO: 657571 - DNA, 15 bp, Homo sapiens
gtggcgcgatcttgg

SEQ ID NO: 657572 - DNA, 15 bp, Homo sapiens
tggcgcgatcttggc

SEQ ID NO: 657573 - DNA, 15 bp, Homo sapiens
ggcgcgatcttggct

SEQ ID NO: 657574 - DNA, 15 bp, Homo sapiens
gcgcgatcttggctc

SEQ ID NO: 657575 - DNA, 15 bp, Homo sapiens
cgcgatcttggctca

SEQ ID NO: 657576 - DNA, 15 bp, Homo sapiens
gcgatcttggctcac

SEQ ID NO: 657577 - DNA, 15 bp, Homo sapiens
cgatcttggctcact

SEQ ID NO: 657578 - DNA, 15 bp, Homo sapiens
cttggctcactgcaa

SEQ ID NO: 657579 - DNA, 15 bp, Homo sapiens
ttggctcactgcaag

SEQ ID NO: 657580 - DNA, 15 bp, Homo sapiens
tggctcactgcaagc

SEQ ID NO: 657581 - DNA, 15 bp, Homo sapiens
ggctcactgcaagct

SEQ ID NO: 657582 - DNA, 15 bp, Homo sapiens
gctcactgcaagctc

SEQ ID NO: 657583 - DNA, 15 bp, Homo sapiens
ctcactgcaagctct

SEQ ID NO: 657584 - DNA, 15 bp, Homo sapiens
tcactgcaagctctg

SEQ ID NO: 657585 - DNA, 15 bp, Homo sapiens
cactgcaagctctgc

SEQ ID NO: 657586 - DNA, 15 bp, Homo sapiens
actgcaagctctgcc

SEQ ID NO: 657587 - DNA, 15 bp, Homo sapiens
ctgcaagctctgcct

SEQ ID NO: 657588 - DNA, 15 bp, Homo sapiens
tgcaagctctgcctc

SEQ ID NO: 657589 - DNA, 15 bp, Homo sapiens
gcaagctctgcctcc

SEQ ID NO: 657590 - DNA, 15 bp, Homo sapiens
caagctctgcctccc

SEQ ID NO: 657591 - DNA, 15 bp, Homo sapiens
aagctctgcctccca

SEQ ID NO: 657592 - DNA, 15 bp, Homo sapiens
agctctgcctcccag

SEQ ID NO: 657593 - DNA, 15 bp, Homo sapiens
gctctgcctcccagg

SEQ ID NO: 657594 - DNA, 15 bp, Homo sapiens
ctctgcctcccaggt

SEQ ID NO: 657595 - DNA, 15 bp, Homo sapiens
tctgcctcccaggtt

SEQ ID NO: 657596 - DNA, 15 bp, Homo sapiens
ctgcctcccaggttc

SEQ ID NO: 657597 - DNA, 15 bp, Homo sapiens
tgcctcccaggttca

SEQ ID NO: 657598 - DNA, 15 bp, Homo sapiens
gcctcccaggttcat

SEQ ID NO: 657599 - DNA, 15 bp, Homo sapiens
cctcccaggttcata

SEQ ID NO: 657600 - DNA, 15 bp, Homo sapiens
ctcccaggttcatac

SEQ ID NO: 657601 - DNA, 15 bp, Homo sapiens
tcccaggttcatacc

SEQ ID NO: 657602 - DNA, 15 bp, Homo sapiens
cccaggttcatacca

SEQ ID NO: 657603 - DNA, 15 bp, Homo sapiens
ccaggttcataccat

SEQ ID NO: 657604 - DNA, 15 bp, Homo sapiens
caggttcataccatt

SEQ ID NO: 657605 - DNA, 15 bp, Homo sapiens
aggttcataccattc

SEQ ID NO: 657606 - DNA, 15 bp, Homo sapiens
ggttcataccattct

SEQ ID NO: 657607 - DNA, 15 bp, Homo sapiens
gttcataccattctc

SEQ ID NO: 657608 - DNA, 15 bp, Homo sapiens
ttcataccattctcc

SEQ ID NO: 657609 - DNA, 15 bp, Homo sapiens
tcataccattctcct

SEQ ID NO: 657610 - DNA, 15 bp, Homo sapiens
cataccattctcctg

SEQ ID NO: 657611 - DNA, 15 bp, Homo sapiens
ataccattctcctgc

SEQ ID NO: 657612 - DNA, 15 bp, Homo sapiens
taccattctcctgcc

SEQ ID NO: 657613 - DNA, 15 bp, Homo sapiens
accattctcctgcct

SEQ ID NO: 657614 - DNA, 15 bp, Homo sapiens
ccattctcctgcctc

SEQ ID NO: 657615 - DNA, 15 bp, Homo sapiens
cattctcctgcctca

SEQ ID NO: 657616 - DNA, 15 bp, Homo sapiens
attctcctgcctcag

SEQ ID NO: 657617 - DNA, 15 bp, Homo sapiens
ttctcctgcctcagc

SEQ ID NO: 657618 - DNA, 15 bp, Homo sapiens
tctcctgcctcagcc

SEQ ID NO: 657619 - DNA, 15 bp, Homo sapiens
ctcctgcctcagcct

SEQ ID NO: 657620 - DNA, 15 bp, Homo sapiens
tcctgcctcagcctc

SEQ ID NO: 657621 - DNA, 15 bp, Homo sapiens
tgcctcagcctcccg

SEQ ID NO: 657622 - DNA, 15 bp, Homo sapiens
gcctcagcctcccga

SEQ ID NO: 657623 - DNA, 15 bp, Homo sapiens
cctcagcctcccgag

SEQ ID NO: 657624 - DNA, 15 bp, Homo sapiens
ctcagcctcccgagt

SEQ ID NO: 657625 - DNA, 15 bp, Homo sapiens
tcagcctcccgagta

SEQ ID NO: 657626 - DNA, 15 bp, Homo sapiens
cagcctcccgagtag

SEQ ID NO: 657627 - DNA, 15 bp, Homo sapiens
agcctcccgagtagc

SEQ ID NO: 657628 - DNA, 15 bp, Homo sapiens
gcctcccgagtagct

SEQ ID NO: 657629 - DNA, 15 bp, Homo sapiens
cctcccgagtagctg

SEQ ID NO: 657630 - DNA, 15 bp, Homo sapiens
ctcccgagtagctgg

SEQ ID NO: 657631 - DNA, 15 bp, Homo sapiens
tcccgagtagctggg

SEQ ID NO: 657632 - DNA, 15 bp, Homo sapiens
cccgagtagctggga

SEQ ID NO: 657633 - DNA, 15 bp, Homo sapiens
ccgagtagctgggac

SEQ ID NO: 657634 - DNA, 15 bp, Homo sapiens
cgagtagctgggacc

SEQ ID NO: 657635 - DNA, 15 bp, Homo sapiens
gagtagctgggacca

SEQ ID NO: 657636 - DNA, 15 bp, Homo sapiens
agtagctgggaccac

SEQ ID NO: 657637 - DNA, 15 bp, Homo sapiens
gtagctgggaccaca

SEQ ID NO: 657638 - DNA, 15 bp, Homo sapiens
tagctgggaccacag

SEQ ID NO: 657639 - DNA, 15 bp, Homo sapiens
agctgggaccacagg

SEQ ID NO: 657640 - DNA, 15 bp, Homo sapiens
gctgggaccacaggc

SEQ ID NO: 657641 - DNA, 15 bp, Homo sapiens
ctgggaccacaggcg

SEQ ID NO: 657642 - DNA, 15 bp, Homo sapiens
tgggaccacaggcga

SEQ ID NO: 657643 - DNA, 15 bp, Homo sapiens
gggaccacaggcgac

SEQ ID NO: 657644 - DNA, 15 bp, Homo sapiens
ggaccacaggcgacc

SEQ ID NO: 657645 - DNA, 15 bp, Homo sapiens
gaccacaggcgacca

SEQ ID NO: 657646 - DNA, 15 bp, Homo sapiens
accacaggcgaccac

SEQ ID NO: 657647 - DNA, 15 bp, Homo sapiens
ccacaggcgaccacc

SEQ ID NO: 657648 - DNA, 15 bp, Homo sapiens
cacaggcgaccacca

SEQ ID NO: 657649 - DNA, 15 bp, Homo sapiens
acaggcgaccaccac

SEQ ID NO: 657650 - DNA, 15 bp, Homo sapiens
caggcgaccaccacc

SEQ ID NO: 657651 - DNA, 15 bp, Homo sapiens
aggcgaccaccacca

SEQ ID NO: 657652 - DNA, 15 bp, Homo sapiens
ggcgaccaccaccac

SEQ ID NO: 657653 - DNA, 15 bp, Homo sapiens
gcgaccaccaccacg

SEQ ID NO: 657654 - DNA, 15 bp, Homo sapiens
cgaccaccaccacgc

SEQ ID NO: 657655 - DNA, 15 bp, Homo sapiens
gaccaccaccacgcc

SEQ ID NO: 657656 - DNA, 15 bp, Homo sapiens
accaccaccacgccc

SEQ ID NO: 657657 - DNA, 15 bp, Homo sapiens
ccaccaccacgccca

SEQ ID NO: 657658 - DNA, 15 bp, Homo sapiens
caccaccacgcccag

SEQ ID NO: 657659 - DNA, 15 bp, Homo sapiens
accaccacgcccagc

SEQ ID NO: 657660 - DNA, 15 bp, Homo sapiens
ccaccacgcccagct

SEQ ID NO: 657661 - DNA, 15 bp, Homo sapiens
caccacgcccagcta

SEQ ID NO: 657662 - DNA, 15 bp, Homo sapiens
accacgcccagctaa

SEQ ID NO: 657663 - DNA, 15 bp, Homo sapiens
ccacgcccagctaat

SEQ ID NO: 657664 - DNA, 15 bp, Homo sapiens
cacgcccagctaatt

SEQ ID NO: 657665 - DNA, 15 bp, Homo sapiens
acgcccagctaattt

SEQ ID NO: 657666 - DNA, 15 bp, Homo sapiens
cgcccagctaatttt

SEQ ID NO: 657667 - DNA, 15 bp, Homo sapiens
gcccagctaattttt

SEQ ID NO: 657668 - DNA, 15 bp, Homo sapiens
cccagctaatttttt

SEQ ID NO: 657669 - DNA, 15 bp, Homo sapiens
ccagctaattttttg

SEQ ID NO: 657670 - DNA, 15 bp, Homo sapiens
cagctaattttttgt

SEQ ID NO: 657671 - DNA, 15 bp, Homo sapiens
agctaattttttgta

SEQ ID NO: 657672 - DNA, 15 bp, Homo sapiens
gctaattttttgtat

SEQ ID NO: 657673 - DNA, 15 bp, Homo sapiens
ctaattttttgtatt

SEQ ID NO: 657674 - DNA, 15 bp, Homo sapiens
taattttttgtattt

SEQ ID NO: 657675 - DNA, 15 bp, Homo sapiens
aattttttgtatttt

SEQ ID NO: 657676 - DNA, 15 bp, Homo sapiens
attttttgtattttt

SEQ ID NO: 657677 - DNA, 15 bp, Homo sapiens
ttttttgtattttta

SEQ ID NO: 657678 - DNA, 15 bp, Homo sapiens
tttttgtatttttag

SEQ ID NO: 657679 - DNA, 15 bp, Homo sapiens
atttttagtagagac

SEQ ID NO: 657680 - DNA, 15 bp, Homo sapiens
tttttagtagagacg

SEQ ID NO: 657681 - DNA, 15 bp, Homo sapiens
ttttagtagagacgg

SEQ ID NO: 657682 - DNA, 15 bp, Homo sapiens
tttagtagagacggg

SEQ ID NO: 657683 - DNA, 15 bp, Homo sapiens
ttagtagagacgggg

SEQ ID NO: 657684 - DNA, 15 bp, Homo sapiens
tagtagagacggggt

SEQ ID NO: 657685 - DNA, 15 bp, Homo sapiens
agtagagacggggtt

SEQ ID NO: 657686 - DNA, 15 bp, Homo sapiens
gtagagacggggttt

SEQ ID NO: 657687 - DNA, 15 bp, Homo sapiens
tagagacggggtttc

SEQ ID NO: 657688 - DNA, 15 bp, Homo sapiens
agagacggggtttca

SEQ ID NO: 657689 - DNA, 15 bp, Homo sapiens
gagacggggtttcac

SEQ ID NO: 657690 - DNA, 15 bp, Homo sapiens
agacggggtttcacc

SEQ ID NO: 657691 - DNA, 15 bp, Homo sapiens
gacggggtttcaccg

SEQ ID NO: 657692 - DNA, 15 bp, Homo sapiens
acggggtttcaccgt

SEQ ID NO: 657693 - DNA, 15 bp, Homo sapiens
cggggtttcaccgtg

SEQ ID NO: 657694 - DNA, 15 bp, Homo sapiens
ggggtttcaccgtgt

SEQ ID NO: 657695 - DNA, 15 bp, Homo sapiens
gggtttcaccgtgtt

SEQ ID NO: 657696 - DNA, 15 bp, Homo sapiens
ggtttcaccgtgtta

SEQ ID NO: 657697 - DNA, 15 bp, Homo sapiens
gtttcaccgtgttag

SEQ ID NO: 657698 - DNA, 15 bp, Homo sapiens
tttcaccgtgttagc

SEQ ID NO: 657699 - DNA, 15 bp, Homo sapiens
ttcaccgtgttagcc

SEQ ID NO: 657700 - DNA, 15 bp, Homo sapiens
tcaccgtgttagcca

SEQ ID NO: 657701 - DNA, 15 bp, Homo sapiens
caccgtgttagccag

SEQ ID NO: 657702 - DNA, 15 bp, Homo sapiens
accgtgttagccagg

SEQ ID NO: 657703 - DNA, 15 bp, Homo sapiens
ccgtgttagccagga

SEQ ID NO: 657704 - DNA, 15 bp, Homo sapiens
cgtgttagccaggat

SEQ ID NO: 657705 - DNA, 15 bp, Homo sapiens
gtgttagccaggatg

SEQ ID NO: 657706 - DNA, 15 bp, Homo sapiens
tgttagccaggatgg

SEQ ID NO: 657707 - DNA, 15 bp, Homo sapiens
gttagccaggatggt

SEQ ID NO: 657708 - DNA, 15 bp, Homo sapiens
ttagccaggatggtc

SEQ ID NO: 657709 - DNA, 15 bp, Homo sapiens
tagccaggatggtct

SEQ ID NO: 657710 - DNA, 15 bp, Homo sapiens
agccaggatggtctc

SEQ ID NO: 657711 - DNA, 15 bp, Homo sapiens
gccaggatggtctcg

SEQ ID NO: 657712 - DNA, 15 bp, Homo sapiens
ccaggatggtctcga

SEQ ID NO: 657713 - DNA, 15 bp, Homo sapiens
caggatggtctcgat

SEQ ID NO: 657714 - DNA, 15 bp, Homo sapiens
aggatggtctcgatc

SEQ ID NO: 657715 - DNA, 15 bp, Homo sapiens
ggatggtctcgatct

SEQ ID NO: 657716 - DNA, 15 bp, Homo sapiens
gatggtctcgatctt

SEQ ID NO: 657717 - DNA, 15 bp, Homo sapiens
atggtctcgatcttc

SEQ ID NO: 657718 - DNA, 15 bp, Homo sapiens
tggtctcgatcttct

SEQ ID NO: 657719 - DNA, 15 bp, Homo sapiens
ggtctcgatcttctg

SEQ ID NO: 657720 - DNA, 15 bp, Homo sapiens
gtctcgatcttctga

SEQ ID NO: 657721 - DNA, 15 bp, Homo sapiens
tctcgatcttctgac

SEQ ID NO: 657722 - DNA, 15 bp, Homo sapiens
ctcgatcttctgacc

SEQ ID NO: 657723 - DNA, 15 bp, Homo sapiens
tcgatcttctgacct

SEQ ID NO: 657724 - DNA, 15 bp, Homo sapiens
cgatcttctgacctc

SEQ ID NO: 657725 - DNA, 15 bp, Homo sapiens
gatcttctgacctcg

SEQ ID NO: 657726 - DNA, 15 bp, Homo sapiens
atcttctgacctcgt

SEQ ID NO: 657727 - DNA, 15 bp, Homo sapiens
tcttctgacctcgtg

SEQ ID NO: 657728 - DNA, 15 bp, Homo sapiens
cttctgacctcgtga

SEQ ID NO: 657729 - DNA, 15 bp, Homo sapiens
ttctgacctcgtgat

SEQ ID NO: 657730 - DNA, 15 bp, Homo sapiens
tctgacctcgtgatc

SEQ ID NO: 657731 - DNA, 15 bp, Homo sapiens
ctgacctcgtgatcc

SEQ ID NO: 657732 - DNA, 15 bp, Homo sapiens
tgacctcgtgatccg

SEQ ID NO: 657733 - DNA, 15 bp, Homo sapiens
gacctcgtgatccgc

SEQ ID NO: 657734 - DNA, 15 bp, Homo sapiens
acctcgtgatccgcc

SEQ ID NO: 657735 - DNA, 15 bp, Homo sapiens
cctcgtgatccgccc

SEQ ID NO: 657736 - DNA, 15 bp, Homo sapiens
ctcgtgatccgcccg

SEQ ID NO: 657737 - DNA, 15 bp, Homo sapiens
tcgtgatccgcccgc

SEQ ID NO: 657738 - DNA, 15 bp, Homo sapiens
cgtgatccgcccgcc

SEQ ID NO: 657739 - DNA, 15 bp, Homo sapiens
gtgatccgcccgcct

SEQ ID NO: 657740 - DNA, 15 bp, Homo sapiens
tgatccgcccgcctc

SEQ ID NO: 657741 - DNA, 15 bp, Homo sapiens
gatccgcccgcctcg

SEQ ID NO: 657742 - DNA, 15 bp, Homo sapiens
atccgcccgcctcgg

SEQ ID NO: 657743 - DNA, 15 bp, Homo sapiens
tccgcccgcctcggc

SEQ ID NO: 657744 - DNA, 15 bp, Homo sapiens
ccgcccgcctcggcc

SEQ ID NO: 657745 - DNA, 15 bp, Homo sapiens
cgcccgcctcggcct

SEQ ID NO: 657746 - DNA, 15 bp, Homo sapiens
gcccgcctcggcctc

SEQ ID NO: 657747 - DNA, 15 bp, Homo sapiens
cccgcctcggcctcc

SEQ ID NO: 657748 - DNA, 15 bp, Homo sapiens
ccgcctcggcctccc

SEQ ID NO: 657749 - DNA, 15 bp, Homo sapiens
cgcctcggcctccca

SEQ ID NO: 657750 - DNA, 15 bp, Homo sapiens
gcctcggcctcccaa

SEQ ID NO: 657751 - DNA, 15 bp, Homo sapiens
cctcggcctcccaag

SEQ ID NO: 657752 - DNA, 15 bp, Homo sapiens
ctcggcctcccaagg

SEQ ID NO: 657753 - DNA, 15 bp, Homo sapiens
tcggcctcccaaggt

SEQ ID NO: 657754 - DNA, 15 bp, Homo sapiens
cggcctcccaaggtg

SEQ ID NO: 657755 - DNA, 15 bp, Homo sapiens
ggcctcccaaggtgc

SEQ ID NO: 657756 - DNA, 15 bp, Homo sapiens
gcctcccaaggtgct

SEQ ID NO: 657757 - DNA, 15 bp, Homo sapiens
cctcccaaggtgctg

SEQ ID NO: 657758 - DNA, 15 bp, Homo sapiens
ctcccaaggtgctgg

SEQ ID NO: 657759 - DNA, 15 bp, Homo sapiens
tcccaaggtgctggg

SEQ ID NO: 657760 - DNA, 15 bp, Homo sapiens
cccaaggtgctggga

SEQ ID NO: 657761 - DNA, 15 bp, Homo sapiens
ccaaggtgctgggat

SEQ ID NO: 657762 - DNA, 15 bp, Homo sapiens
caaggtgctgggatt

SEQ ID NO: 657763 - DNA, 15 bp, Homo sapiens
aaggtgctgggatta

SEQ ID NO: 657764 - DNA, 15 bp, Homo sapiens
aggtgctgggattac

SEQ ID NO: 657765 - DNA, 15 bp, Homo sapiens
ggtgctgggattaca

SEQ ID NO: 657766 - DNA, 15 bp, Homo sapiens
gtgctgggattacag

SEQ ID NO: 657767 - DNA, 15 bp, Homo sapiens
tgctgggattacagg

SEQ ID NO: 657768 - DNA, 15 bp, Homo sapiens
gctgggattacagga

SEQ ID NO: 657769 - DNA, 15 bp, Homo sapiens
ctgggattacaggag

SEQ ID NO: 657770 - DNA, 15 bp, Homo sapiens
tgggattacaggagt

SEQ ID NO: 657771 - DNA, 15 bp, Homo sapiens
gggattacaggagtg

SEQ ID NO: 657772 - DNA, 15 bp, Homo sapiens
ggattacaggagtga

SEQ ID NO: 657773 - DNA, 15 bp, Homo sapiens
gattacaggagtgag

SEQ ID NO: 657774 - DNA, 15 bp, Homo sapiens
attacaggagtgagc

SEQ ID NO: 657775 - DNA, 15 bp, Homo sapiens
ttacaggagtgagcc

SEQ ID NO: 657776 - DNA, 15 bp, Homo sapiens
tacaggagtgagcca

SEQ ID NO: 657777 - DNA, 15 bp, Homo sapiens
acaggagtgagccac

SEQ ID NO: 657778 - DNA, 15 bp, Homo sapiens
caggagtgagccacc

SEQ ID NO: 657779 - DNA, 15 bp, Homo sapiens
aggagtgagccaccg

SEQ ID NO: 657780 - DNA, 15 bp, Homo sapiens
ggagtgagccaccgc

SEQ ID NO: 657781 - DNA, 15 bp, Homo sapiens
gagtgagccaccgcg

SEQ ID NO: 657782 - DNA, 15 bp, Homo sapiens
agtgagccaccgcgc

SEQ ID NO: 657783 - DNA, 15 bp, Homo sapiens
gtgagccaccgcgcc

SEQ ID NO: 657784 - DNA, 15 bp, Homo sapiens
tgagccaccgcgcct

SEQ ID NO: 657785 - DNA, 15 bp, Homo sapiens
gagccaccgcgcctg

SEQ ID NO: 657786 - DNA, 15 bp, Homo sapiens
agccaccgcgcctgg

SEQ ID NO: 657787 - DNA, 15 bp, Homo sapiens
gccaccgcgcctggc

SEQ ID NO: 657788 - DNA, 15 bp, Homo sapiens
ccaccgcgcctggcc

SEQ ID NO: 657789 - DNA, 15 bp, Homo sapiens
caccgcgcctggcca

SEQ ID NO: 657790 - DNA, 15 bp, Homo sapiens
accgcgcctggccaa

SEQ ID NO: 657791 - DNA, 15 bp, Homo sapiens
ccgcgcctggccaac

SEQ ID NO: 657792 - DNA, 15 bp, Homo sapiens
cgcgcctggccaaca

SEQ ID NO: 657793 - DNA, 15 bp, Homo sapiens
gcgcctggccaacaa

SEQ ID NO: 657794 - DNA, 15 bp, Homo sapiens
cgcctggccaacaat

SEQ ID NO: 657795 - DNA, 15 bp, Homo sapiens
gcctggccaacaatt

SEQ ID NO: 657796 - DNA, 15 bp, Homo sapiens
cctggccaacaattt

SEQ ID NO: 657797 - DNA, 15 bp, Homo sapiens
ctggccaacaatttt

SEQ ID NO: 657798 - DNA, 15 bp, Homo sapiens
tggccaacaattttc

SEQ ID NO: 657799 - DNA, 15 bp, Homo sapiens
ggccaacaattttct

SEQ ID NO: 657800 - DNA, 15 bp, Homo sapiens
gccaacaattttctt

SEQ ID NO: 657801 - DNA, 15 bp, Homo sapiens
ccaacaattttctta

SEQ ID NO: 657802 - DNA, 15 bp, Homo sapiens
caacaattttcttaa

SEQ ID NO: 657803 - DNA, 15 bp, Homo sapiens
aacaattttcttaaa

SEQ ID NO: 657804 - DNA, 15 bp, Homo sapiens
acaattttcttaaag

SEQ ID NO: 657805 - DNA, 15 bp, Homo sapiens
caattttcttaaagg

SEQ ID NO: 657806 - DNA, 15 bp, Homo sapiens
aattttcttaaagga

SEQ ID NO: 657807 - DNA, 15 bp, Homo sapiens
attttcttaaaggaa

SEQ ID NO: 657808 - DNA, 15 bp, Homo sapiens
ttttcttaaaggaag

SEQ ID NO: 657809 - DNA, 15 bp, Homo sapiens
tttcttaaaggaagc

SEQ ID NO: 657810 - DNA, 15 bp, Homo sapiens
ttcttaaaggaagct

SEQ ID NO: 657811 - DNA, 15 bp, Homo sapiens
tcttaaaggaagcta

SEQ ID NO: 657812 - DNA, 15 bp, Homo sapiens
cttaaaggaagctat

SEQ ID NO: 657813 - DNA, 15 bp, Homo sapiens
ttaaaggaagctatt

SEQ ID NO: 657814 - DNA, 15 bp, Homo sapiens
taaaggaagctattg

SEQ ID NO: 657815 - DNA, 15 bp, Homo sapiens
aaaggaagctattgt

SEQ ID NO: 657816 - DNA, 15 bp, Homo sapiens
aaggaagctattgtg

SEQ ID NO: 657817 - DNA, 15 bp, Homo sapiens
aggaagctattgtgg

SEQ ID NO: 657818 - DNA, 15 bp, Homo sapiens
ggaagctattgtggt

SEQ ID NO: 657819 - DNA, 15 bp, Homo sapiens
gaagctattgtggtc

SEQ ID NO: 657820 - DNA, 15 bp, Homo sapiens
aagctattgtggtca

SEQ ID NO: 657821 - DNA, 15 bp, Homo sapiens
agctattgtggtcaa

SEQ ID NO: 657822 - DNA, 15 bp, Homo sapiens
gctattgtggtcaaa

SEQ ID NO: 657823 - DNA, 15 bp, Homo sapiens
ctattgtggtcaaat

SEQ ID NO: 657824 - DNA, 15 bp, Homo sapiens
tattgtggtcaaata

SEQ ID NO: 657825 - DNA, 15 bp, Homo sapiens
attgtggtcaaataa

SEQ ID NO: 657826 - DNA, 15 bp, Homo sapiens
ttgtggtcaaataaa

SEQ ID NO: 657827 - DNA, 15 bp, Homo sapiens
tgtggtcaaataaag

SEQ ID NO: 657828 - DNA, 15 bp, Homo sapiens
gtggtcaaataaagg

SEQ ID NO: 657829 - DNA, 15 bp, Homo sapiens
tggtcaaataaaggt

SEQ ID NO: 657830 - DNA, 15 bp, Homo sapiens
ggtcaaataaaggtt

SEQ ID NO: 657831 - DNA, 15 bp, Homo sapiens
gtcaaataaaggttt

SEQ ID NO: 657832 - DNA, 15 bp, Homo sapiens
tcaaataaaggtttg

SEQ ID NO: 657833 - DNA, 15 bp, Homo sapiens
caaataaaggtttgg

SEQ ID NO: 657834 - DNA, 15 bp, Homo sapiens
aaataaaggtttgga

SEQ ID NO: 657835 - DNA, 15 bp, Homo sapiens
aataaaggtttggag

SEQ ID NO: 657836 - DNA, 15 bp, Homo sapiens
ataaaggtttggagg

SEQ ID NO: 657837 - DNA, 15 bp, Homo sapiens
taaaggtttggaggt

SEQ ID NO: 657838 - DNA, 15 bp, Homo sapiens
aaaggtttggaggtc

SEQ ID NO: 657839 - DNA, 15 bp, Homo sapiens
aaggtttggaggtct

SEQ ID NO: 657840 - DNA, 15 bp, Homo sapiens
aggtttggaggtctg

SEQ ID NO: 657841 - DNA, 15 bp, Homo sapiens
ggtttggaggtctga

SEQ ID NO: 657842 - DNA, 15 bp, Homo sapiens
gtttggaggtctgag

SEQ ID NO: 657843 - DNA, 15 bp, Homo sapiens
tttggaggtctgagc

SEQ ID NO: 657844 - DNA, 15 bp, Homo sapiens
ttggaggtctgagct

SEQ ID NO: 657845 - DNA, 15 bp, Homo sapiens
tggaggtctgagctc

SEQ ID NO: 657846 - DNA, 15 bp, Homo sapiens
ggaggtctgagctct

SEQ ID NO: 657847 - DNA, 15 bp, Homo sapiens
gaggtctgagctctc

SEQ ID NO: 657848 - DNA, 15 bp, Homo sapiens
aggtctgagctctcc

SEQ ID NO: 657849 - DNA, 15 bp, Homo sapiens
ggtctgagctctccc

SEQ ID NO: 657850 - DNA, 15 bp, Homo sapiens
gtctgagctctcccc

SEQ ID NO: 657851 - DNA, 15 bp, Homo sapiens
tctgagctctccccc

SEQ ID NO: 657852 - DNA, 15 bp, Homo sapiens
ctgagctctcccccc

SEQ ID NO: 657853 - DNA, 15 bp, Homo sapiens
tgagctctcccccct

SEQ ID NO: 657854 - DNA, 15 bp, Homo sapiens
gagctctcccccctt

SEQ ID NO: 657855 - DNA, 15 bp, Homo sapiens
agctctccccccttc

SEQ ID NO: 657856 - DNA, 15 bp, Homo sapiens
gctctccccccttca

SEQ ID NO: 657857 - DNA, 15 bp, Homo sapiens
ctctccccccttcat

SEQ ID NO: 657858 - DNA, 15 bp, Homo sapiens
tctccccccttcatg

SEQ ID NO: 657859 - DNA, 15 bp, Homo sapiens
ctccccccttcatgc

SEQ ID NO: 657860 - DNA, 15 bp, Homo sapiens
tccccccttcatgct

SEQ ID NO: 657861 - DNA, 15 bp, Homo sapiens
ccccccttcatgctt

SEQ ID NO: 657862 - DNA, 15 bp, Homo sapiens
cccccttcatgcttg

SEQ ID NO: 657863 - DNA, 15 bp, Homo sapiens
ccccttcatgcttgt

SEQ ID NO: 657864 - DNA, 15 bp, Homo sapiens
cccttcatgcttgtt

SEQ ID NO: 657865 - DNA, 15 bp, Homo sapiens
ccttcatgcttgttc

SEQ ID NO: 657866 - DNA, 15 bp, Homo sapiens
cttcatgcttgttca

SEQ ID NO: 657867 - DNA, 15 bp, Homo sapiens
ttcatgcttgttcag

SEQ ID NO: 657868 - DNA, 15 bp, Homo sapiens
tcatgcttgttcagt

SEQ ID NO: 657869 - DNA, 15 bp, Homo sapiens
catgcttgttcagtc

SEQ ID NO: 657870 - DNA, 15 bp, Homo sapiens
atgcttgttcagtcc

SEQ ID NO: 657871 - DNA, 15 bp, Homo sapiens
tgcttgttcagtcct

SEQ ID NO: 657872 - DNA, 15 bp, Homo sapiens
gcttgttcagtcctc

SEQ ID NO: 657873 - DNA, 15 bp, Homo sapiens
cttgttcagtcctct

SEQ ID NO: 657874 - DNA, 15 bp, Homo sapiens
ttgttcagtcctctt

SEQ ID NO: 657875 - DNA, 15 bp, Homo sapiens
tgttcagtcctcttc

SEQ ID NO: 657876 - DNA, 15 bp, Homo sapiens
gttcagtcctcttct

SEQ ID NO: 657877 - DNA, 15 bp, Homo sapiens
ttcagtcctcttctt

SEQ ID NO: 657878 - DNA, 15 bp, Homo sapiens
tcagtcctcttctta

SEQ ID NO: 657879 - DNA, 15 bp, Homo sapiens
cagtcctcttcttac

SEQ ID NO: 657880 - DNA, 15 bp, Homo sapiens
agtcctcttcttact

SEQ ID NO: 657881 - DNA, 15 bp, Homo sapiens
gtcctcttcttactc

SEQ ID NO: 657882 - DNA, 15 bp, Homo sapiens
tcctcttcttactcc

SEQ ID NO: 657883 - DNA, 15 bp, Homo sapiens
cctcttcttactcct

SEQ ID NO: 657884 - DNA, 15 bp, Homo sapiens
ctcttcttactcctt

SEQ ID NO: 657885 - DNA, 15 bp, Homo sapiens
tcttcttactccttt

SEQ ID NO: 657886 - DNA, 15 bp, Homo sapiens
cttcttactcctttt

SEQ ID NO: 657887 - DNA, 15 bp, Homo sapiens
ttcttactccttttt

SEQ ID NO: 657888 - DNA, 15 bp, Homo sapiens
tcttactcctttttc

SEQ ID NO: 657889 - DNA, 15 bp, Homo sapiens
cttactcctttttca

SEQ ID NO: 657890 - DNA, 15 bp, Homo sapiens
ttactcctttttcat

SEQ ID NO: 657891 - DNA, 15 bp, Homo sapiens
tactcctttttcata

SEQ ID NO: 657892 - DNA, 15 bp, Homo sapiens
actcctttttcatag

SEQ ID NO: 657893 - DNA, 15 bp, Homo sapiens
ctcctttttcataga

SEQ ID NO: 657894 - DNA, 15 bp, Homo sapiens
tcctttttcatagaa

SEQ ID NO: 657895 - DNA, 15 bp, Homo sapiens
cctttttcatagaac

SEQ ID NO: 657896 - DNA, 15 bp, Homo sapiens
ctttttcatagaaca

SEQ ID NO: 657897 - DNA, 15 bp, Homo sapiens
tttttcatagaacac

SEQ ID NO: 657898 - DNA, 15 bp, Homo sapiens
ttttcatagaacaca

SEQ ID NO: 657899 - DNA, 15 bp, Homo sapiens
tttcatagaacacag

SEQ ID NO: 657900 - DNA, 15 bp, Homo sapiens
ttcatagaacacagt

SEQ ID NO: 657901 - DNA, 15 bp, Homo sapiens
tcatagaacacagtt

SEQ ID NO: 657902 - DNA, 15 bp, Homo sapiens
catagaacacagttt

SEQ ID NO: 657903 - DNA, 15 bp, Homo sapiens
atagaacacagtttg

SEQ ID NO: 657904 - DNA, 15 bp, Homo sapiens
tagaacacagtttga

SEQ ID NO: 657905 - DNA, 15 bp, Homo sapiens
agaacacagtttgaa

SEQ ID NO: 657906 - DNA, 15 bp, Homo sapiens
gaacacagtttgaaa

SEQ ID NO: 657907 - DNA, 15 bp, Homo sapiens
aacacagtttgaaaa

SEQ ID NO: 657908 - DNA, 15 bp, Homo sapiens
acacagtttgaaaac

SEQ ID NO: 657909 - DNA, 15 bp, Homo sapiens
cacagtttgaaaact

SEQ ID NO: 657910 - DNA, 15 bp, Homo sapiens
acagtttgaaaactg

SEQ ID NO: 657911 - DNA, 15 bp, Homo sapiens
cagtttgaaaactgc

SEQ ID NO: 657912 - DNA, 15 bp, Homo sapiens
agtttgaaaactgcc

SEQ ID NO: 657913 - DNA, 15 bp, Homo sapiens
gtttgaaaactgcca

SEQ ID NO: 657914 - DNA, 15 bp, Homo sapiens
tttgaaaactgccag

SEQ ID NO: 657915 - DNA, 15 bp, Homo sapiens
ttgaaaactgccagt

SEQ ID NO: 657916 - DNA, 15 bp, Homo sapiens
tgaaaactgccagtc

SEQ ID NO: 657917 - DNA, 15 bp, Homo sapiens
gaaaactgccagtcc

SEQ ID NO: 657918 - DNA, 15 bp, Homo sapiens
aaaactgccagtccc

SEQ ID NO: 657919 - DNA, 15 bp, Homo sapiens
aaactgccagtccct

SEQ ID NO: 657920 - DNA, 15 bp, Homo sapiens
aactgccagtccctt

SEQ ID NO: 657921 - DNA, 15 bp, Homo sapiens
actgccagtccctta

SEQ ID NO: 657922 - DNA, 15 bp, Homo sapiens
ctgccagtcccttaa

SEQ ID NO: 657923 - DNA, 15 bp, Homo sapiens
tgccagtcccttaaa

SEQ ID NO: 657924 - DNA, 15 bp, Homo sapiens
gccagtcccttaaac

SEQ ID NO: 657925 - DNA, 15 bp, Homo sapiens
ccagtcccttaaaca

SEQ ID NO: 657926 - DNA, 15 bp, Homo sapiens
cagtcccttaaacac

SEQ ID NO: 657927 - DNA, 15 bp, Homo sapiens
agtcccttaaacacc

SEQ ID NO: 657928 - DNA, 15 bp, Homo sapiens
gtcccttaaacacca

SEQ ID NO: 657929 - DNA, 15 bp, Homo sapiens
tcccttaaacaccac

SEQ ID NO: 657930 - DNA, 15 bp, Homo sapiens
cccttaaacaccacc

SEQ ID NO: 657931 - DNA, 15 bp, Homo sapiens
ccttaaacaccaccc

SEQ ID NO: 657932 - DNA, 15 bp, Homo sapiens
cttaaacaccaccct

SEQ ID NO: 657933 - DNA, 15 bp, Homo sapiens
ttaaacaccaccctc

SEQ ID NO: 657934 - DNA, 15 bp, Homo sapiens
taaacaccaccctct

SEQ ID NO: 657935 - DNA, 15 bp, Homo sapiens
aaacaccaccctctc

SEQ ID NO: 657936 - DNA, 15 bp, Homo sapiens
aacaccaccctctcc

SEQ ID NO: 657937 - DNA, 15 bp, Homo sapiens
acaccaccctctcca

SEQ ID NO: 657938 - DNA, 15 bp, Homo sapiens
caccaccctctccat

SEQ ID NO: 657939 - DNA, 15 bp, Homo sapiens
accaccctctccatt

SEQ ID NO: 657940 - DNA, 15 bp, Homo sapiens
ccaccctctccattt

SEQ ID NO: 657941 - DNA, 15 bp, Homo sapiens
caccctctccatttc

SEQ ID NO: 657942 - DNA, 15 bp, Homo sapiens
accctctccatttcc

SEQ ID NO: 657943 - DNA, 15 bp, Homo sapiens
ccctctccatttcca

SEQ ID NO: 657944 - DNA, 15 bp, Homo sapiens
cctctccatttccag

SEQ ID NO: 657945 - DNA, 15 bp, Homo sapiens
ctctccatttccaga

SEQ ID NO: 657946 - DNA, 15 bp, Homo sapiens
tctccatttccagac

SEQ ID NO: 657947 - DNA, 15 bp, Homo sapiens
ctccatttccagaca

SEQ ID NO: 657948 - DNA, 15 bp, Homo sapiens
tccatttccagacaa

SEQ ID NO: 657949 - DNA, 15 bp, Homo sapiens
ccatttccagacaag

SEQ ID NO: 657950 - DNA, 15 bp, Homo sapiens
catttccagacaagt

SEQ ID NO: 657951 - DNA, 15 bp, Homo sapiens
atttccagacaagtc

SEQ ID NO: 657952 - DNA, 15 bp, Homo sapiens
tttccagacaagtct

SEQ ID NO: 657953 - DNA, 15 bp, Homo sapiens
ttccagacaagtctg

SEQ ID NO: 657954 - DNA, 15 bp, Homo sapiens
tccagacaagtctga

SEQ ID NO: 657955 - DNA, 15 bp, Homo sapiens
ccagacaagtctgaa

SEQ ID NO: 657956 - DNA, 15 bp, Homo sapiens
cagacaagtctgaag

SEQ ID NO: 657957 - DNA, 15 bp, Homo sapiens
agacaagtctgaagt

SEQ ID NO: 657958 - DNA, 15 bp, Homo sapiens
gacaagtctgaagtg

SEQ ID NO: 657959 - DNA, 15 bp, Homo sapiens
acaagtctgaagtga

SEQ ID NO: 657960 - DNA, 15 bp, Homo sapiens
caagtctgaagtgac

SEQ ID NO: 657961 - DNA, 15 bp, Homo sapiens
aagtctgaagtgact

SEQ ID NO: 657962 - DNA, 15 bp, Homo sapiens
agtctgaagtgactt

SEQ ID NO: 657963 - DNA, 15 bp, Homo sapiens
gtctgaagtgacttg

SEQ ID NO: 657964 - DNA, 15 bp, Homo sapiens
tctgaagtgacttgc

SEQ ID NO: 657965 - DNA, 15 bp, Homo sapiens
ctgaagtgacttgct

SEQ ID NO: 657966 - DNA, 15 bp, Homo sapiens
tgaagtgacttgctc

SEQ ID NO: 657967 - DNA, 15 bp, Homo sapiens
gaagtgacttgctca

SEQ ID NO: 657968 - DNA, 15 bp, Homo sapiens
aagtgacttgctcaa

SEQ ID NO: 657969 - DNA, 15 bp, Homo sapiens
agtgacttgctcaag

SEQ ID NO: 657970 - DNA, 15 bp, Homo sapiens
gtgacttgctcaagg

SEQ ID NO: 657971 - DNA, 15 bp, Homo sapiens
tgacttgctcaagga

SEQ ID NO: 657972 - DNA, 15 bp, Homo sapiens
gacttgctcaaggat

SEQ ID NO: 657973 - DNA, 15 bp, Homo sapiens
acttgctcaaggata

SEQ ID NO: 657974 - DNA, 15 bp, Homo sapiens
cttgctcaaggatat

SEQ ID NO: 657975 - DNA, 15 bp, Homo sapiens
ttgctcaaggatatt

SEQ ID NO: 657976 - DNA, 15 bp, Homo sapiens
tgctcaaggatattt

SEQ ID NO: 657977 - DNA, 15 bp, Homo sapiens
gctcaaggatatttg

SEQ ID NO: 657978 - DNA, 15 bp, Homo sapiens
ctcaaggatatttgg

SEQ ID NO: 657979 - DNA, 15 bp, Homo sapiens
tcaaggatatttggt

SEQ ID NO: 657980 - DNA, 15 bp, Homo sapiens
caaggatatttggtc

SEQ ID NO: 657981 - DNA, 15 bp, Homo sapiens
aaggatatttggtcc

SEQ ID NO: 657982 - DNA, 15 bp, Homo sapiens
aggatatttggtcct

SEQ ID NO: 657983 - DNA, 15 bp, Homo sapiens
ggatatttggtcctt

SEQ ID NO: 657984 - DNA, 15 bp, Homo sapiens
gatatttggtccttt

SEQ ID NO: 657985 - DNA, 15 bp, Homo sapiens
atatttggtcctttc

SEQ ID NO: 657986 - DNA, 15 bp, Homo sapiens
tatttggtcctttcc

SEQ ID NO: 657987 - DNA, 15 bp, Homo sapiens
atttggtcctttcct

SEQ ID NO: 657988 - DNA, 15 bp, Homo sapiens
tttggtcctttcctg

SEQ ID NO: 657989 - DNA, 15 bp, Homo sapiens
ttggtcctttcctgg

SEQ ID NO: 657990 - DNA, 15 bp, Homo sapiens
tggtcctttcctggc

SEQ ID NO: 657991 - DNA, 15 bp, Homo sapiens
ggtcctttcctggca

SEQ ID NO: 657992 - DNA, 15 bp, Homo sapiens
gtcctttcctggcag

SEQ ID NO: 657993 - DNA, 15 bp, Homo sapiens
tcctttcctggcaga

SEQ ID NO: 657994 - DNA, 15 bp, Homo sapiens
cctttcctggcagaa

SEQ ID NO: 657995 - DNA, 15 bp, Homo sapiens
ctttcctggcagaac

SEQ ID NO: 657996 - DNA, 15 bp, Homo sapiens
tttcctggcagaacc

SEQ ID NO: 657997 - DNA, 15 bp, Homo sapiens
ttcctggcagaacca

SEQ ID NO: 657998 - DNA, 15 bp, Homo sapiens
tcctggcagaaccag

SEQ ID NO: 657999 - DNA, 15 bp, Homo sapiens
cctggcagaaccagg

SEQ ID NO: 658000 - DNA, 15 bp, Homo sapiens
ctggcagaaccaggg

SEQ ID NO: 658001 - DNA, 15 bp, Homo sapiens
tggcagaaccagggc

SEQ ID NO: 658002 - DNA, 15 bp, Homo sapiens
ggcagaaccagggct

SEQ ID NO: 658003 - DNA, 15 bp, Homo sapiens
gcagaaccagggcta

SEQ ID NO: 658004 - DNA, 15 bp, Homo sapiens
cagaaccagggctag

SEQ ID NO: 658005 - DNA, 15 bp, Homo sapiens
agaaccagggctaga

SEQ ID NO: 658006 - DNA, 15 bp, Homo sapiens
gaaccagggctagat

SEQ ID NO: 658007 - DNA, 15 bp, Homo sapiens
aaccagggctagatc

SEQ ID NO: 658008 - DNA, 15 bp, Homo sapiens
accagggctagatcc

SEQ ID NO: 658009 - DNA, 15 bp, Homo sapiens
ccagggctagatccc

SEQ ID NO: 658010 - DNA, 15 bp, Homo sapiens
cagggctagatcccc

SEQ ID NO: 658011 - DNA, 15 bp, Homo sapiens
agggctagatcccca

SEQ ID NO: 658012 - DNA, 15 bp, Homo sapiens
gggctagatccccaa

SEQ ID NO: 658013 - DNA, 15 bp, Homo sapiens
ggctagatccccaaa

SEQ ID NO: 658014 - DNA, 15 bp, Homo sapiens
gctagatccccaaac

SEQ ID NO: 658015 - DNA, 15 bp, Homo sapiens
ctagatccccaaact

SEQ ID NO: 658016 - DNA, 15 bp, Homo sapiens
tagatccccaaactt

SEQ ID NO: 658017 - DNA, 15 bp, Homo sapiens
agatccccaaacttc

SEQ ID NO: 658018 - DNA, 15 bp, Homo sapiens
gatccccaaacttct

SEQ ID NO: 658019 - DNA, 15 bp, Homo sapiens
atccccaaacttctg

SEQ ID NO: 658020 - DNA, 15 bp, Homo sapiens
tccccaaacttctgc

SEQ ID NO: 658021 - DNA, 15 bp, Homo sapiens
ccccaaacttctgcc

SEQ ID NO: 658022 - DNA, 15 bp, Homo sapiens
cccaaacttctgcct

SEQ ID NO: 658023 - DNA, 15 bp, Homo sapiens
ccaaacttctgcctt

SEQ ID NO: 658024 - DNA, 15 bp, Homo sapiens
caaacttctgccttc

SEQ ID NO: 658025 - DNA, 15 bp, Homo sapiens
aaacttctgccttca

SEQ ID NO: 658026 - DNA, 15 bp, Homo sapiens
aacttctgccttcag

SEQ ID NO: 658027 - DNA, 15 bp, Homo sapiens
acttctgccttcagg

SEQ ID NO: 658028 - DNA, 15 bp, Homo sapiens
cttctgccttcaggt

SEQ ID NO: 658029 - DNA, 15 bp, Homo sapiens
ttctgccttcaggtc

SEQ ID NO: 658030 - DNA, 15 bp, Homo sapiens
tctgccttcaggtca

SEQ ID NO: 658031 - DNA, 15 bp, Homo sapiens
ctgccttcaggtcat

SEQ ID NO: 658032 - DNA, 15 bp, Homo sapiens
tgccttcaggtcatc

SEQ ID NO: 658033 - DNA, 15 bp, Homo sapiens
gccttcaggtcatca

SEQ ID NO: 658034 - DNA, 15 bp, Homo sapiens
ccttcaggtcatcac

SEQ ID NO: 658035 - DNA, 15 bp, Homo sapiens
cttcaggtcatcaca

SEQ ID NO: 658036 - DNA, 15 bp, Homo sapiens
ttcaggtcatcacac

SEQ ID NO: 658037 - DNA, 15 bp, Homo sapiens
tcaggtcatcacacc

SEQ ID NO: 658038 - DNA, 15 bp, Homo sapiens
caggtcatcacacca

SEQ ID NO: 658039 - DNA, 15 bp, Homo sapiens
aggtcatcacaccaa

SEQ ID NO: 658040 - DNA, 15 bp, Homo sapiens
ggtcatcacaccaac

SEQ ID NO: 658041 - DNA, 15 bp, Homo sapiens
gtcatcacaccaacc

SEQ ID NO: 658042 - DNA, 15 bp, Homo sapiens
tcatcacaccaacca

SEQ ID NO: 658043 - DNA, 15 bp, Homo sapiens
catcacaccaaccac

SEQ ID NO: 658044 - DNA, 15 bp, Homo sapiens
atcacaccaaccacg

SEQ ID NO: 658045 - DNA, 15 bp, Homo sapiens
tcacaccaaccacgc

SEQ ID NO: 658046 - DNA, 15 bp, Homo sapiens
cacaccaaccacgcc

SEQ ID NO: 658047 - DNA, 15 bp, Homo sapiens
acaccaaccacgcca

SEQ ID NO: 658048 - DNA, 15 bp, Homo sapiens
caccaaccacgccac

SEQ ID NO: 658049 - DNA, 15 bp, Homo sapiens
accaaccacgccacc

SEQ ID NO: 658050 - DNA, 15 bp, Homo sapiens
ccaaccacgccaccc

SEQ ID NO: 658051 - DNA, 15 bp, Homo sapiens
caaccacgccaccct

SEQ ID NO: 658052 - DNA, 15 bp, Homo sapiens
aaccacgccaccctg

SEQ ID NO: 658053 - DNA, 15 bp, Homo sapiens
accacgccaccctgc

SEQ ID NO: 658054 - DNA, 15 bp, Homo sapiens
ccacgccaccctgct

SEQ ID NO: 658055 - DNA, 15 bp, Homo sapiens
cacgccaccctgctc

SEQ ID NO: 658056 - DNA, 15 bp, Homo sapiens
acgccaccctgctct

SEQ ID NO: 658057 - DNA, 15 bp, Homo sapiens
cgccaccctgctctc

SEQ ID NO: 658058 - DNA, 15 bp, Homo sapiens
gccaccctgctctct

SEQ ID NO: 658059 - DNA, 15 bp, Homo sapiens
ccaccctgctctctt

SEQ ID NO: 658060 - DNA, 15 bp, Homo sapiens
caccctgctctcttc

SEQ ID NO: 658061 - DNA, 15 bp, Homo sapiens
accctgctctcttcc

SEQ ID NO: 658062 - DNA, 15 bp, Homo sapiens
ccctgctctcttcct

SEQ ID NO: 658063 - DNA, 15 bp, Homo sapiens
cctgctctcttcctg

SEQ ID NO: 658064 - DNA, 15 bp, Homo sapiens
ctgctctcttcctgt

SEQ ID NO: 658065 - DNA, 15 bp, Homo sapiens
tgctctcttcctgtg

SEQ ID NO: 658066 - DNA, 15 bp, Homo sapiens
gctctcttcctgtgt

SEQ ID NO: 658067 - DNA, 15 bp, Homo sapiens
ctctcttcctgtgtg

SEQ ID NO: 658068 - DNA, 15 bp, Homo sapiens
tctcttcctgtgtgt

SEQ ID NO: 658069 - DNA, 15 bp, Homo sapiens
ctcttcctgtgtgtc

SEQ ID NO: 658070 - DNA, 15 bp, Homo sapiens
tcttcctgtgtgtct

SEQ ID NO: 658071 - DNA, 15 bp, Homo sapiens
cttcctgtgtgtctg

SEQ ID NO: 658072 - DNA, 15 bp, Homo sapiens
ttcctgtgtgtctgt

SEQ ID NO: 658073 - DNA, 15 bp, Homo sapiens
tcctgtgtgtctgtc

SEQ ID NO: 658074 - DNA, 15 bp, Homo sapiens
cctgtgtgtctgtct

SEQ ID NO: 658075 - DNA, 15 bp, Homo sapiens
ctgtgtgtctgtctg

SEQ ID NO: 658076 - DNA, 15 bp, Homo sapiens
tgtgtgtctgtctgg

SEQ ID NO: 658077 - DNA, 15 bp, Homo sapiens
gtgtgtctgtctggt

SEQ ID NO: 658078 - DNA, 15 bp, Homo sapiens
tgtgtctgtctggtt

SEQ ID NO: 658079 - DNA, 15 bp, Homo sapiens
gtgtctgtctggtta

SEQ ID NO: 658080 - DNA, 15 bp, Homo sapiens
tgtctgtctggttac

SEQ ID NO: 658081 - DNA, 15 bp, Homo sapiens
gtctgtctggttaca

SEQ ID NO: 658082 - DNA, 15 bp, Homo sapiens
tctgtctggttacag

SEQ ID NO: 658083 - DNA, 15 bp, Homo sapiens
ctgtctggttacagg

SEQ ID NO: 658084 - DNA, 15 bp, Homo sapiens
tgtctggttacaggg

SEQ ID NO: 658085 - DNA, 15 bp, Homo sapiens
gtctggttacagggt

SEQ ID NO: 658086 - DNA, 15 bp, Homo sapiens
tctggttacagggtg

SEQ ID NO: 658087 - DNA, 15 bp, Homo sapiens
ctggttacagggtga

SEQ ID NO: 658088 - DNA, 15 bp, Homo sapiens
tggttacagggtgat

SEQ ID NO: 658089 - DNA, 15 bp, Homo sapiens
ggttacagggtgatc

SEQ ID NO: 658090 - DNA, 15 bp, Homo sapiens
gttacagggtgatct

SEQ ID NO: 658091 - DNA, 15 bp, Homo sapiens
ttacagggtgatctc

SEQ ID NO: 658092 - DNA, 15 bp, Homo sapiens
tacagggtgatctct

SEQ ID NO: 658093 - DNA, 15 bp, Homo sapiens
acagggtgatctctg

SEQ ID NO: 658094 - DNA, 15 bp, Homo sapiens
cagggtgatctctgc

SEQ ID NO: 658095 - DNA, 15 bp, Homo sapiens
agggtgatctctgca

SEQ ID NO: 658096 - DNA, 15 bp, Homo sapiens
gggtgatctctgcag

SEQ ID NO: 658097 - DNA, 15 bp, Homo sapiens
ggtgatctctgcagt

SEQ ID NO: 658098 - DNA, 15 bp, Homo sapiens
gtgatctctgcagtt

SEQ ID NO: 658099 - DNA, 15 bp, Homo sapiens
tgatctctgcagttg

SEQ ID NO: 658100 - DNA, 15 bp, Homo sapiens
gatctctgcagttgt

SEQ ID NO: 658101 - DNA, 15 bp, Homo sapiens
atctctgcagttgta

SEQ ID NO: 658102 - DNA, 15 bp, Homo sapiens
tctctgcagttgtac

SEQ ID NO: 658103 - DNA, 15 bp, Homo sapiens
ctctgcagttgtact

SEQ ID NO: 658104 - DNA, 15 bp, Homo sapiens
tctgcagttgtactg

SEQ ID NO: 658105 - DNA, 15 bp, Homo sapiens
ctgcagttgtactga

SEQ ID NO: 658106 - DNA, 15 bp, Homo sapiens
tgcagttgtactgag

SEQ ID NO: 658107 - DNA, 15 bp, Homo sapiens
gcagttgtactgagt

SEQ ID NO: 658108 - DNA, 15 bp, Homo sapiens
cagttgtactgagtg

SEQ ID NO: 658109 - DNA, 15 bp, Homo sapiens
agttgtactgagtgc

SEQ ID NO: 658110 - DNA, 15 bp, Homo sapiens
gttgtactgagtgca

SEQ ID NO: 658111 - DNA, 15 bp, Homo sapiens
ttgtactgagtgcaa

SEQ ID NO: 658112 - DNA, 15 bp, Homo sapiens
tgtactgagtgcaac

SEQ ID NO: 658113 - DNA, 15 bp, Homo sapiens
gtactgagtgcaaca

SEQ ID NO: 658114 - DNA, 15 bp, Homo sapiens
tactgagtgcaacag

SEQ ID NO: 658115 - DNA, 15 bp, Homo sapiens
actgagtgcaacagc

SEQ ID NO: 658116 - DNA, 15 bp, Homo sapiens
ctgagtgcaacagct

SEQ ID NO: 658117 - DNA, 15 bp, Homo sapiens
tgagtgcaacagctc

SEQ ID NO: 658118 - DNA, 15 bp, Homo sapiens
gagtgcaacagctct

SEQ ID NO: 658119 - DNA, 15 bp, Homo sapiens
agtgcaacagctctt

SEQ ID NO: 658120 - DNA, 15 bp, Homo sapiens
gtgcaacagctcttg

SEQ ID NO: 658121 - DNA, 15 bp, Homo sapiens
tgcaacagctcttgg

SEQ ID NO: 658122 - DNA, 15 bp, Homo sapiens
gcaacagctcttgga

SEQ ID NO: 658123 - DNA, 15 bp, Homo sapiens
caacagctcttggaa

SEQ ID NO: 658124 - DNA, 15 bp, Homo sapiens
aacagctcttggaag

SEQ ID NO: 658125 - DNA, 15 bp, Homo sapiens
acagctcttggaaga

SEQ ID NO: 658126 - DNA, 15 bp, Homo sapiens
cagctcttggaagag

SEQ ID NO: 658127 - DNA, 15 bp, Homo sapiens
agctcttggaagagc

SEQ ID NO: 658128 - DNA, 15 bp, Homo sapiens
gctcttggaagagcc

SEQ ID NO: 658129 - DNA, 15 bp, Homo sapiens
ctcttggaagagcct

SEQ ID NO: 658130 - DNA, 15 bp, Homo sapiens
tcttggaagagcctt

SEQ ID NO: 658131 - DNA, 15 bp, Homo sapiens
cttggaagagccttc

SEQ ID NO: 658132 - DNA, 15 bp, Homo sapiens
ttggaagagccttct

SEQ ID NO: 658133 - DNA, 15 bp, Homo sapiens
tggaagagccttctc

SEQ ID NO: 658134 - DNA, 15 bp, Homo sapiens
ggaagagccttctct

SEQ ID NO: 658135 - DNA, 15 bp, Homo sapiens
gaagagccttctctt

SEQ ID NO: 658136 - DNA, 15 bp, Homo sapiens
aagagccttctctta

SEQ ID NO: 658137 - DNA, 15 bp, Homo sapiens
agagccttctcttac

SEQ ID NO: 658138 - DNA, 15 bp, Homo sapiens
gagccttctcttaca

SEQ ID NO: 658139 - DNA, 15 bp, Homo sapiens
agccttctcttacac

SEQ ID NO: 658140 - DNA, 15 bp, Homo sapiens
gccttctcttacacc

SEQ ID NO: 658141 - DNA, 15 bp, Homo sapiens
ccttctcttacaccc

SEQ ID NO: 658142 - DNA, 15 bp, Homo sapiens
cttctcttacacccc

SEQ ID NO: 658143 - DNA, 15 bp, Homo sapiens
ttctcttacacccca

SEQ ID NO: 658144 - DNA, 15 bp, Homo sapiens
tctcttacaccccaa

SEQ ID NO: 658145 - DNA, 15 bp, Homo sapiens
ctcttacaccccaag

SEQ ID NO: 658146 - DNA, 15 bp, Homo sapiens
tcttacaccccaagt

SEQ ID NO: 658147 - DNA, 15 bp, Homo sapiens
cttacaccccaagtt

SEQ ID NO: 658148 - DNA, 15 bp, Homo sapiens
ttacaccccaagtta

SEQ ID NO: 658149 - DNA, 15 bp, Homo sapiens
tacaccccaagttat

SEQ ID NO: 658150 - DNA, 15 bp, Homo sapiens
acaccccaagttatg

SEQ ID NO: 658151 - DNA, 15 bp, Homo sapiens
caccccaagttatgc

SEQ ID NO: 658152 - DNA, 15 bp, Homo sapiens
accccaagttatgca

SEQ ID NO: 658153 - DNA, 15 bp, Homo sapiens
ccccaagttatgcaa

SEQ ID NO: 658154 - DNA, 15 bp, Homo sapiens
cccaagttatgcaaa

SEQ ID NO: 658155 - DNA, 15 bp, Homo sapiens
ccaagttatgcaaaa

SEQ ID NO: 658156 - DNA, 15 bp, Homo sapiens
caagttatgcaaaag

SEQ ID NO: 658157 - DNA, 15 bp, Homo sapiens
aagttatgcaaaagc

SEQ ID NO: 658158 - DNA, 15 bp, Homo sapiens
agttatgcaaaagct

SEQ ID NO: 658159 - DNA, 15 bp, Homo sapiens
gttatgcaaaagcta

SEQ ID NO: 658160 - DNA, 15 bp, Homo sapiens
ttatgcaaaagctaa

SEQ ID NO: 658161 - DNA, 15 bp, Homo sapiens
tatgcaaaagctaaa

SEQ ID NO: 658162 - DNA, 15 bp, Homo sapiens
atgcaaaagctaaaa

SEQ ID NO: 658163 - DNA, 15 bp, Homo sapiens
tgcaaaagctaaaat

SEQ ID NO: 658164 - DNA, 15 bp, Homo sapiens
gcaaaagctaaaata

SEQ ID NO: 658165 - DNA, 15 bp, Homo sapiens
caaaagctaaaatat

SEQ ID NO: 658166 - DNA, 15 bp, Homo sapiens
aaaagctaaaatatc

SEQ ID NO: 658167 - DNA, 15 bp, Homo sapiens
aaagctaaaatatca

SEQ ID NO: 658168 - DNA, 15 bp, Homo sapiens
aagctaaaatatcag

SEQ ID NO: 658169 - DNA, 15 bp, Homo sapiens
agctaaaatatcagc

SEQ ID NO: 658170 - DNA, 15 bp, Homo sapiens
gctaaaatatcagct

SEQ ID NO: 658171 - DNA, 15 bp, Homo sapiens
ctaaaatatcagctg

SEQ ID NO: 658172 - DNA, 15 bp, Homo sapiens
taaaatatcagctgc

SEQ ID NO: 658173 - DNA, 15 bp, Homo sapiens
aaaatatcagctgca

SEQ ID NO: 658174 - DNA, 15 bp, Homo sapiens
aaatatcagctgcac

SEQ ID NO: 658175 - DNA, 15 bp, Homo sapiens
aatatcagctgcacg

SEQ ID NO: 658176 - DNA, 15 bp, Homo sapiens
atatcagctgcacgc

SEQ ID NO: 658177 - DNA, 15 bp, Homo sapiens
tatcagctgcacgct

SEQ ID NO: 658178 - DNA, 15 bp, Homo sapiens
atcagctgcacgctt

SEQ ID NO: 658179 - DNA, 15 bp, Homo sapiens
tcagctgcacgcttt

SEQ ID NO: 658180 - DNA, 15 bp, Homo sapiens
cagctgcacgctttt

SEQ ID NO: 658181 - DNA, 15 bp, Homo sapiens
agctgcacgcttttt

SEQ ID NO: 658182 - DNA, 15 bp, Homo sapiens
gctgcacgctttttt

SEQ ID NO: 658183 - DNA, 15 bp, Homo sapiens
ctgcacgcttttttc

SEQ ID NO: 658184 - DNA, 15 bp, Homo sapiens
tgcacgcttttttca

SEQ ID NO: 658185 - DNA, 15 bp, Homo sapiens
gcacgcttttttcaa

SEQ ID NO: 658186 - DNA, 15 bp, Homo sapiens
cacgcttttttcaac

SEQ ID NO: 658187 - DNA, 15 bp, Homo sapiens
acgcttttttcaact

SEQ ID NO: 658188 - DNA, 15 bp, Homo sapiens
cgcttttttcaactg

SEQ ID NO: 658189 - DNA, 15 bp, Homo sapiens
gcttttttcaactgc

SEQ ID NO: 658190 - DNA, 15 bp, Homo sapiens
cttttttcaactgct

SEQ ID NO: 658191 - DNA, 15 bp, Homo sapiens
ttttttcaactgctg

SEQ ID NO: 658192 - DNA, 15 bp, Homo sapiens
tttttcaactgctgg

SEQ ID NO: 658193 - DNA, 15 bp, Homo sapiens
ttttcaactgctgga

SEQ ID NO: 658194 - DNA, 15 bp, Homo sapiens
tttcaactgctggac

SEQ ID NO: 658195 - DNA, 15 bp, Homo sapiens
ttcaactgctggacc

SEQ ID NO: 658196 - DNA, 15 bp, Homo sapiens
tcaactgctggaccg

SEQ ID NO: 658197 - DNA, 15 bp, Homo sapiens
caactgctggaccga

SEQ ID NO: 658198 - DNA, 15 bp, Homo sapiens
aactgctggaccgac

SEQ ID NO: 658199 - DNA, 15 bp, Homo sapiens
actgctggaccgaca

SEQ ID NO: 658200 - DNA, 15 bp, Homo sapiens
ctgctggaccgacaa

SEQ ID NO: 658201 - DNA, 15 bp, Homo sapiens
tgctggaccgacaac

SEQ ID NO: 658202 - DNA, 15 bp, Homo sapiens
gctggaccgacaacc

SEQ ID NO: 658203 - DNA, 15 bp, Homo sapiens
ctggaccgacaaccc

SEQ ID NO: 658204 - DNA, 15 bp, Homo sapiens
tggaccgacaacccc

SEQ ID NO: 658205 - DNA, 15 bp, Homo sapiens
ggaccgacaaccccc

SEQ ID NO: 658206 - DNA, 15 bp, Homo sapiens
gaccgacaaccccca

SEQ ID NO: 658207 - DNA, 15 bp, Homo sapiens
accgacaacccccaa

SEQ ID NO: 658208 - DNA, 15 bp, Homo sapiens
ccgacaacccccaat

SEQ ID NO: 658209 - DNA, 15 bp, Homo sapiens
cgacaacccccaatc

SEQ ID NO: 658210 - DNA, 15 bp, Homo sapiens
gacaacccccaatca

SEQ ID NO: 658211 - DNA, 15 bp, Homo sapiens
acaacccccaatcag

SEQ ID NO: 658212 - DNA, 15 bp, Homo sapiens
caacccccaatcagt

SEQ ID NO: 658213 - DNA, 15 bp, Homo sapiens
aacccccaatcagtg

SEQ ID NO: 658214 - DNA, 15 bp, Homo sapiens
acccccaatcagtgt

SEQ ID NO: 658215 - DNA, 15 bp, Homo sapiens
cccccaatcagtgta

SEQ ID NO: 658216 - DNA, 15 bp, Homo sapiens
ccccaatcagtgtat

SEQ ID NO: 658217 - DNA, 15 bp, Homo sapiens
cccaatcagtgtata

SEQ ID NO: 658218 - DNA, 15 bp, Homo sapiens
ccaatcagtgtatac

SEQ ID NO: 658219 - DNA, 15 bp, Homo sapiens
caatcagtgtataca

SEQ ID NO: 658220 - DNA, 15 bp, Homo sapiens
aatcagtgtatacaa

SEQ ID NO: 658221 - DNA, 15 bp, Homo sapiens
atcagtgtatacaat

SEQ ID NO: 658222 - DNA, 15 bp, Homo sapiens
tcagtgtatacaata

SEQ ID NO: 658223 - DNA, 15 bp, Homo sapiens
cagtgtatacaatac

SEQ ID NO: 658224 - DNA, 15 bp, Homo sapiens
agtgtatacaatact

SEQ ID NO: 658225 - DNA, 15 bp, Homo sapiens
gtgtatacaatactg

SEQ ID NO: 658226 - DNA, 15 bp, Homo sapiens
tgtatacaatactgc

SEQ ID NO: 658227 - DNA, 15 bp, Homo sapiens
gtatacaatactgca

SEQ ID NO: 658228 - DNA, 15 bp, Homo sapiens
tatacaatactgcag

SEQ ID NO: 658229 - DNA, 15 bp, Homo sapiens
atacaatactgcagg

SEQ ID NO: 658230 - DNA, 15 bp, Homo sapiens
tacaatactgcaggt

SEQ ID NO: 658231 - DNA, 15 bp, Homo sapiens
acaatactgcaggtg

SEQ ID NO: 658232 - DNA, 15 bp, Homo sapiens
caatactgcaggtga

SEQ ID NO: 658233 - DNA, 15 bp, Homo sapiens
aatactgcaggtgaa

SEQ ID NO: 658234 - DNA, 15 bp, Homo sapiens
atactgcaggtgaaa

SEQ ID NO: 658235 - DNA, 15 bp, Homo sapiens
tactgcaggtgaaaa

SEQ ID NO: 658236 - DNA, 15 bp, Homo sapiens
actgcaggtgaaaaa

SEQ ID NO: 658237 - DNA, 15 bp, Homo sapiens
ctgcaggtgaaaaat

SEQ ID NO: 658238 - DNA, 15 bp, Homo sapiens
tgcaggtgaaaaatg

SEQ ID NO: 658239 - DNA, 15 bp, Homo sapiens
gcaggtgaaaaatgg

SEQ ID NO: 658240 - DNA, 15 bp, Homo sapiens
caggtgaaaaatggg

SEQ ID NO: 658241 - DNA, 15 bp, Homo sapiens
aggtgaaaaatgggt

SEQ ID NO: 658242 - DNA, 15 bp, Homo sapiens
ggtgaaaaatgggta

SEQ ID NO: 658243 - DNA, 15 bp, Homo sapiens
gtgaaaaatgggtaa

SEQ ID NO: 658244 - DNA, 15 bp, Homo sapiens
tgaaaaatgggtaag

SEQ ID NO: 658245 - DNA, 15 bp, Homo sapiens
gaaaaatgggtaagt

SEQ ID NO: 658246 - DNA, 15 bp, Homo sapiens
aaaaatgggtaagtg

SEQ ID NO: 658247 - DNA, 15 bp, Homo sapiens
aaaatgggtaagtgt

SEQ ID NO: 658248 - DNA, 15 bp, Homo sapiens
aaatgggtaagtgtt

SEQ ID NO: 658249 - DNA, 15 bp, Homo sapiens
aatgggtaagtgttg

SEQ ID NO: 658250 - DNA, 15 bp, Homo sapiens
atgggtaagtgttgg

SEQ ID NO: 658251 - DNA, 15 bp, Homo sapiens
tgggtaagtgttgga

SEQ ID NO: 658252 - DNA, 15 bp, Homo sapiens
gggtaagtgttggaa

SEQ ID NO: 658253 - DNA, 15 bp, Homo sapiens
ggtaagtgttggaat

SEQ ID NO: 658254 - DNA, 15 bp, Homo sapiens
gtaagtgttggaata

SEQ ID NO: 658255 - DNA, 15 bp, Homo sapiens
taagtgttggaatac

SEQ ID NO: 658256 - DNA, 15 bp, Homo sapiens
aagtgttggaatact

SEQ ID NO: 658257 - DNA, 15 bp, Homo sapiens
agtgttggaatacta

SEQ ID NO: 658258 - DNA, 15 bp, Homo sapiens
gtgttggaatactat

SEQ ID NO: 658259 - DNA, 15 bp, Homo sapiens
tgttggaatactatg

SEQ ID NO: 658260 - DNA, 15 bp, Homo sapiens
gttggaatactatgc

SEQ ID NO: 658261 - DNA, 15 bp, Homo sapiens
ttggaatactatgca

SEQ ID NO: 658262 - DNA, 15 bp, Homo sapiens
tggaatactatgcag

SEQ ID NO: 658263 - DNA, 15 bp, Homo sapiens
ggaatactatgcagc

SEQ ID NO: 658264 - DNA, 15 bp, Homo sapiens
gaatactatgcagcc

SEQ ID NO: 658265 - DNA, 15 bp, Homo sapiens
aatactatgcagcca

SEQ ID NO: 658266 - DNA, 15 bp, Homo sapiens
atactatgcagccat

SEQ ID NO: 658267 - DNA, 15 bp, Homo sapiens
tactatgcagccata

SEQ ID NO: 658268 - DNA, 15 bp, Homo sapiens
actatgcagccataa

SEQ ID NO: 658269 - DNA, 15 bp, Homo sapiens
ctatgcagccataaa

SEQ ID NO: 658270 - DNA, 15 bp, Homo sapiens
tatgcagccataaaa

SEQ ID NO: 658271 - DNA, 15 bp, Homo sapiens
atgcagccataaaaa

SEQ ID NO: 658272 - DNA, 15 bp, Homo sapiens
tgcagccataaaaaa

SEQ ID NO: 658273 - DNA, 15 bp, Homo sapiens
gcagccataaaaaag

SEQ ID NO: 658274 - DNA, 15 bp, Homo sapiens
cagccataaaaaagg

SEQ ID NO: 658275 - DNA, 15 bp, Homo sapiens
agccataaaaaagga

SEQ ID NO: 658276 - DNA, 15 bp, Homo sapiens
gccataaaaaaggat

SEQ ID NO: 658277 - DNA, 15 bp, Homo sapiens
ccataaaaaaggatg

SEQ ID NO: 658278 - DNA, 15 bp, Homo sapiens
cataaaaaaggatga

SEQ ID NO: 658279 - DNA, 15 bp, Homo sapiens
ataaaaaaggatgag

SEQ ID NO: 658280 - DNA, 15 bp, Homo sapiens
taaaaaaggatgagt

SEQ ID NO: 658281 - DNA, 15 bp, Homo sapiens
aaaaaaggatgagtt

SEQ ID NO: 658282 - DNA, 15 bp, Homo sapiens
aaaaaggatgagttc

SEQ ID NO: 658283 - DNA, 15 bp, Homo sapiens
aaaaggatgagttca

SEQ ID NO: 658284 - DNA, 15 bp, Homo sapiens
aaaggatgagttcat

SEQ ID NO: 658285 - DNA, 15 bp, Homo sapiens
aaggatgagttcatg

SEQ ID NO: 658286 - DNA, 15 bp, Homo sapiens
aggatgagttcatgt

SEQ ID NO: 658287 - DNA, 15 bp, Homo sapiens
ggatgagttcatgtc

SEQ ID NO: 658288 - DNA, 15 bp, Homo sapiens
gatgagttcatgtcc

SEQ ID NO: 658289 - DNA, 15 bp, Homo sapiens
atgagttcatgtcct

SEQ ID NO: 658290 - DNA, 15 bp, Homo sapiens
tgagttcatgtcctt

SEQ ID NO: 658291 - DNA, 15 bp, Homo sapiens
gagttcatgtccttt

SEQ ID NO: 658292 - DNA, 15 bp, Homo sapiens
agttcatgtcctttg

SEQ ID NO: 658293 - DNA, 15 bp, Homo sapiens
gttcatgtcctttgc

SEQ ID NO: 658294 - DNA, 15 bp, Homo sapiens
ttcatgtcctttgca

SEQ ID NO: 658295 - DNA, 15 bp, Homo sapiens
tcatgtcctttgcag

SEQ ID NO: 658296 - DNA, 15 bp, Homo sapiens
catgtcctttgcagg

SEQ ID NO: 658297 - DNA, 15 bp, Homo sapiens
atgtcctttgcaggg

SEQ ID NO: 658298 - DNA, 15 bp, Homo sapiens
tgtcctttgcaggga

SEQ ID NO: 658299 - DNA, 15 bp, Homo sapiens
gtcctttgcagggac

SEQ ID NO: 658300 - DNA, 15 bp, Homo sapiens
tcctttgcagggaca

SEQ ID NO: 658301 - DNA, 15 bp, Homo sapiens
cctttgcagggacag

SEQ ID NO: 658302 - DNA, 15 bp, Homo sapiens
ctttgcagggacagg

SEQ ID NO: 658303 - DNA, 15 bp, Homo sapiens
tttgcagggacaggg

SEQ ID NO: 658304 - DNA, 15 bp, Homo sapiens
ttgcagggacaggga

SEQ ID NO: 658305 - DNA, 15 bp, Homo sapiens
tgcagggacagggat

SEQ ID NO: 658306 - DNA, 15 bp, Homo sapiens
gcagggacagggatg

SEQ ID NO: 658307 - DNA, 15 bp, Homo sapiens
cagggacagggatga

SEQ ID NO: 658308 - DNA, 15 bp, Homo sapiens
agggacagggatgaa

SEQ ID NO: 658309 - DNA, 15 bp, Homo sapiens
gggacagggatgaag

SEQ ID NO: 658310 - DNA, 15 bp, Homo sapiens
ggacagggatgaagc

SEQ ID NO: 658311 - DNA, 15 bp, Homo sapiens
gacagggatgaagct

SEQ ID NO: 658312 - DNA, 15 bp, Homo sapiens
acagggatgaagctg

SEQ ID NO: 658313 - DNA, 15 bp, Homo sapiens
cagggatgaagctgg

SEQ ID NO: 658314 - DNA, 15 bp, Homo sapiens
agggatgaagctgga

SEQ ID NO: 658315 - DNA, 15 bp, Homo sapiens
gggatgaagctggaa

SEQ ID NO: 658316 - DNA, 15 bp, Homo sapiens
ggatgaagctggaaa

SEQ ID NO: 658317 - DNA, 15 bp, Homo sapiens
gatgaagctggaaac

SEQ ID NO: 658318 - DNA, 15 bp, Homo sapiens
atgaagctggaaacc

SEQ ID NO: 658319 - DNA, 15 bp, Homo sapiens
tgaagctggaaacca

SEQ ID NO: 658320 - DNA, 15 bp, Homo sapiens
gaagctggaaaccat

SEQ ID NO: 658321 - DNA, 15 bp, Homo sapiens
aagctggaaaccatc

SEQ ID NO: 658322 - DNA, 15 bp, Homo sapiens
agctggaaaccatca

SEQ ID NO: 658323 - DNA, 15 bp, Homo sapiens
gctggaaaccatcat

SEQ ID NO: 658324 - DNA, 15 bp, Homo sapiens
ctggaaaccatcatt

SEQ ID NO: 658325 - DNA, 15 bp, Homo sapiens
tggaaaccatcattc

SEQ ID NO: 658326 - DNA, 15 bp, Homo sapiens
ggaaaccatcattct

SEQ ID NO: 658327 - DNA, 15 bp, Homo sapiens
gaaaccatcattctc

SEQ ID NO: 658328 - DNA, 15 bp, Homo sapiens
aaaccatcattctca

SEQ ID NO: 658329 - DNA, 15 bp, Homo sapiens
aaccatcattctcag

SEQ ID NO: 658330 - DNA, 15 bp, Homo sapiens
accatcattctcagc

SEQ ID NO: 658331 - DNA, 15 bp, Homo sapiens
ccatcattctcagca

SEQ ID NO: 658332 - DNA, 15 bp, Homo sapiens
catcattctcagcaa

SEQ ID NO: 658333 - DNA, 15 bp, Homo sapiens
atcattctcagcaaa

SEQ ID NO: 658334 - DNA, 15 bp, Homo sapiens
tcattctcagcaaac

SEQ ID NO: 658335 - DNA, 15 bp, Homo sapiens
cattctcagcaaact

SEQ ID NO: 658336 - DNA, 15 bp, Homo sapiens
attctcagcaaacta

SEQ ID NO: 658337 - DNA, 15 bp, Homo sapiens
ttctcagcaaactaa

SEQ ID NO: 658338 - DNA, 15 bp, Homo sapiens
tctcagcaaactaac

SEQ ID NO: 658339 - DNA, 15 bp, Homo sapiens
ctcagcaaactaaca

SEQ ID NO: 658340 - DNA, 15 bp, Homo sapiens
tcagcaaactaacac

SEQ ID NO: 658341 - DNA, 15 bp, Homo sapiens
cagcaaactaacaca

SEQ ID NO: 658342 - DNA, 15 bp, Homo sapiens
agcaaactaacacaa

SEQ ID NO: 658343 - DNA, 15 bp, Homo sapiens
gcaaactaacacaag

SEQ ID NO: 658344 - DNA, 15 bp, Homo sapiens
caaactaacacaaga

SEQ ID NO: 658345 - DNA, 15 bp, Homo sapiens
aaactaacacaagaa

SEQ ID NO: 658346 - DNA, 15 bp, Homo sapiens
aactaacacaagaac

SEQ ID NO: 658347 - DNA, 15 bp, Homo sapiens
actaacacaagaaca

SEQ ID NO: 658348 - DNA, 15 bp, Homo sapiens
ctaacacaagaacag

SEQ ID NO: 658349 - DNA, 15 bp, Homo sapiens
taacacaagaacaga

SEQ ID NO: 658350 - DNA, 15 bp, Homo sapiens
aacacaagaacagaa

SEQ ID NO: 658351 - DNA, 15 bp, Homo sapiens
acacaagaacagaaa

SEQ ID NO: 658352 - DNA, 15 bp, Homo sapiens
cacaagaacagaaaa

SEQ ID NO: 658353 - DNA, 15 bp, Homo sapiens
acaagaacagaaaac

SEQ ID NO: 658354 - DNA, 15 bp, Homo sapiens
caagaacagaaaacc

SEQ ID NO: 658355 - DNA, 15 bp, Homo sapiens
aagaacagaaaacca

SEQ ID NO: 658356 - DNA, 15 bp, Homo sapiens
agaacagaaaaccaa

SEQ ID NO: 658357 - DNA, 15 bp, Homo sapiens
gaacagaaaaccaaa

SEQ ID NO: 658358 - DNA, 15 bp, Homo sapiens
aacagaaaaccaaac

SEQ ID NO: 658359 - DNA, 15 bp, Homo sapiens
acagaaaaccaaaca

SEQ ID NO: 658360 - DNA, 15 bp, Homo sapiens
cagaaaaccaaacac

SEQ ID NO: 658361 - DNA, 15 bp, Homo sapiens
agaaaaccaaacacc

SEQ ID NO: 658362 - DNA, 15 bp, Homo sapiens
gaaaaccaaacacca

SEQ ID NO: 658363 - DNA, 15 bp, Homo sapiens
aaaaccaaacaccac

SEQ ID NO: 658364 - DNA, 15 bp, Homo sapiens
aaaccaaacaccaca

SEQ ID NO: 658365 - DNA, 15 bp, Homo sapiens
aaccaaacaccacat

SEQ ID NO: 658366 - DNA, 15 bp, Homo sapiens
accaaacaccacatg

SEQ ID NO: 658367 - DNA, 15 bp, Homo sapiens
ccaaacaccacatgt

SEQ ID NO: 658368 - DNA, 15 bp, Homo sapiens
caaacaccacatgtt

SEQ ID NO: 658369 - DNA, 15 bp, Homo sapiens
aaacaccacatgttc

SEQ ID NO: 658370 - DNA, 15 bp, Homo sapiens
aacaccacatgttct

SEQ ID NO: 658371 - DNA, 15 bp, Homo sapiens
acaccacatgttctc

SEQ ID NO: 658372 - DNA, 15 bp, Homo sapiens
caccacatgttctca

SEQ ID NO: 658373 - DNA, 15 bp, Homo sapiens
accacatgttctcac

SEQ ID NO: 658374 - DNA, 15 bp, Homo sapiens
cacatgttctcactc

SEQ ID NO: 658375 - DNA, 15 bp, Homo sapiens
acatgttctcactca

SEQ ID NO: 658376 - DNA, 15 bp, Homo sapiens
catgttctcactcat

SEQ ID NO: 658377 - DNA, 15 bp, Homo sapiens
tgttctcactcataa

SEQ ID NO: 658378 - DNA, 15 bp, Homo sapiens
gttctcactcataag

SEQ ID NO: 658379 - DNA, 15 bp, Homo sapiens
ttctcactcataagt

SEQ ID NO: 658380 - DNA, 15 bp, Homo sapiens
tctcactcataagtg

SEQ ID NO: 658381 - DNA, 15 bp, Homo sapiens
ctcactcataagtgg

SEQ ID NO: 658382 - DNA, 15 bp, Homo sapiens
tcactcataagtggg

SEQ ID NO: 658383 - DNA, 15 bp, Homo sapiens
cactcataagtggga

SEQ ID NO: 658384 - DNA, 15 bp, Homo sapiens
actcataagtgggag

SEQ ID NO: 658385 - DNA, 15 bp, Homo sapiens
ctcataagtgggagt

SEQ ID NO: 658386 - DNA, 15 bp, Homo sapiens
tcataagtgggagtt

SEQ ID NO: 658387 - DNA, 15 bp, Homo sapiens
cataagtgggagttg

SEQ ID NO: 658388 - DNA, 15 bp, Homo sapiens
ataagtgggagttga

SEQ ID NO: 658389 - DNA, 15 bp, Homo sapiens
taagtgggagttgaa

SEQ ID NO: 658390 - DNA, 15 bp, Homo sapiens
aagtgggagttgaac

SEQ ID NO: 658391 - DNA, 15 bp, Homo sapiens
agtgggagttgaaca

SEQ ID NO: 658392 - DNA, 15 bp, Homo sapiens
gtgggagttgaacaa

SEQ ID NO: 658393 - DNA, 15 bp, Homo sapiens
tgggagttgaacaaa

SEQ ID NO: 658394 - DNA, 15 bp, Homo sapiens
gggagttgaacaaac

SEQ ID NO: 658395 - DNA, 15 bp, Homo sapiens
ggagttgaacaaaca

SEQ ID NO: 658396 - DNA, 15 bp, Homo sapiens
gagttgaacaaacag

SEQ ID NO: 658397 - DNA, 15 bp, Homo sapiens
agttgaacaaacaga

SEQ ID NO: 658398 - DNA, 15 bp, Homo sapiens
gttgaacaaacagaa

SEQ ID NO: 658399 - DNA, 15 bp, Homo sapiens
ttgaacaaacagaac

SEQ ID NO: 658400 - DNA, 15 bp, Homo sapiens
tgaacaaacagaaca

SEQ ID NO: 658401 - DNA, 15 bp, Homo sapiens
gaacaaacagaacac

SEQ ID NO: 658402 - DNA, 15 bp, Homo sapiens
aacaaacagaacaca

SEQ ID NO: 658403 - DNA, 15 bp, Homo sapiens
acaaacagaacacat

SEQ ID NO: 658404 - DNA, 15 bp, Homo sapiens
caaacagaacacatg

SEQ ID NO: 658405 - DNA, 15 bp, Homo sapiens
aaacagaacacatgg

SEQ ID NO: 658406 - DNA, 15 bp, Homo sapiens
aacagaacacatgga

SEQ ID NO: 658407 - DNA, 15 bp, Homo sapiens
acagaacacatggac

SEQ ID NO: 658408 - DNA, 15 bp, Homo sapiens
cagaacacatggaca

SEQ ID NO: 658409 - DNA, 15 bp, Homo sapiens
agaacacatggacac

SEQ ID NO: 658410 - DNA, 15 bp, Homo sapiens
gaacacatggacaca

SEQ ID NO: 658411 - DNA, 15 bp, Homo sapiens
aacacatggacacag

SEQ ID NO: 658412 - DNA, 15 bp, Homo sapiens
acacatggacacagg

SEQ ID NO: 658413 - DNA, 15 bp, Homo sapiens
cacatggacacaggg

SEQ ID NO: 658414 - DNA, 15 bp, Homo sapiens
acatggacacagggt

SEQ ID NO: 658415 - DNA, 15 bp, Homo sapiens
catggacacagggtg

SEQ ID NO: 658416 - DNA, 15 bp, Homo sapiens
atggacacagggtgg

SEQ ID NO: 658417 - DNA, 15 bp, Homo sapiens
tggacacagggtggg

SEQ ID NO: 658418 - DNA, 15 bp, Homo sapiens
ggacacagggtgggg

SEQ ID NO: 658419 - DNA, 15 bp, Homo sapiens
gacacagggtgggga

SEQ ID NO: 658420 - DNA, 15 bp, Homo sapiens
acacagggtggggaa

SEQ ID NO: 658421 - DNA, 15 bp, Homo sapiens
cacagggtggggaac

SEQ ID NO: 658422 - DNA, 15 bp, Homo sapiens
acagggtggggaaca

SEQ ID NO: 658423 - DNA, 15 bp, Homo sapiens
cagggtggggaacat

SEQ ID NO: 658424 - DNA, 15 bp, Homo sapiens
agggtggggaacatc

SEQ ID NO: 658425 - DNA, 15 bp, Homo sapiens
gggtggggaacatca

SEQ ID NO: 658426 - DNA, 15 bp, Homo sapiens
ggtggggaacatcac

SEQ ID NO: 658427 - DNA, 15 bp, Homo sapiens
gtggggaacatcaca

SEQ ID NO: 658428 - DNA, 15 bp, Homo sapiens
tggggaacatcacac

SEQ ID NO: 658429 - DNA, 15 bp, Homo sapiens
ggggaacatcacaca

SEQ ID NO: 658430 - DNA, 15 bp, Homo sapiens
gggaacatcacacac

SEQ ID NO: 658431 - DNA, 15 bp, Homo sapiens
ggaacatcacacacc

SEQ ID NO: 658432 - DNA, 15 bp, Homo sapiens
gaacatcacacaccg

SEQ ID NO: 658433 - DNA, 15 bp, Homo sapiens
aacatcacacaccgg

SEQ ID NO: 658434 - DNA, 15 bp, Homo sapiens
acatcacacaccggg

SEQ ID NO: 658435 - DNA, 15 bp, Homo sapiens
catcacacaccgggg

SEQ ID NO: 658436 - DNA, 15 bp, Homo sapiens
atcacacaccggggc

SEQ ID NO: 658437 - DNA, 15 bp, Homo sapiens
tcacacaccggggcc

SEQ ID NO: 658438 - DNA, 15 bp, Homo sapiens
cacacaccggggcct

SEQ ID NO: 658439 - DNA, 15 bp, Homo sapiens
acacaccggggcctg

SEQ ID NO: 658440 - DNA, 15 bp, Homo sapiens
cacaccggggcctgt

SEQ ID NO: 658441 - DNA, 15 bp, Homo sapiens
acaccggggcctgtc

SEQ ID NO: 658442 - DNA, 15 bp, Homo sapiens
caccggggcctgtca

SEQ ID NO: 658443 - DNA, 15 bp, Homo sapiens
accggggcctgtcag

SEQ ID NO: 658444 - DNA, 15 bp, Homo sapiens
ccggggcctgtcagg

SEQ ID NO: 658445 - DNA, 15 bp, Homo sapiens
cggggcctgtcaggg

SEQ ID NO: 658446 - DNA, 15 bp, Homo sapiens
ggggcctgtcagggg

SEQ ID NO: 658447 - DNA, 15 bp, Homo sapiens
gggcctgtcagggga

SEQ ID NO: 658448 - DNA, 15 bp, Homo sapiens
ggcctgtcaggggat

SEQ ID NO: 658449 - DNA, 15 bp, Homo sapiens
gcctgtcaggggatg

SEQ ID NO: 658450 - DNA, 15 bp, Homo sapiens
cctgtcaggggatgg

SEQ ID NO: 658451 - DNA, 15 bp, Homo sapiens
ctgtcaggggatggt

SEQ ID NO: 658452 - DNA, 15 bp, Homo sapiens
tgtcaggggatggtg

SEQ ID NO: 658453 - DNA, 15 bp, Homo sapiens
gtcaggggatggtgt

SEQ ID NO: 658454 - DNA, 15 bp, Homo sapiens
tcaggggatggtgtg

SEQ ID NO: 658455 - DNA, 15 bp, Homo sapiens
caggggatggtgtgg

SEQ ID NO: 658456 - DNA, 15 bp, Homo sapiens
aggggatggtgtggg

SEQ ID NO: 658457 - DNA, 15 bp, Homo sapiens
ggggatggtgtgggg

SEQ ID NO: 658458 - DNA, 15 bp, Homo sapiens
gggatggtgtggggt

SEQ ID NO: 658459 - DNA, 15 bp, Homo sapiens
ggatggtgtggggta

SEQ ID NO: 658460 - DNA, 15 bp, Homo sapiens
gatggtgtggggtag

SEQ ID NO: 658461 - DNA, 15 bp, Homo sapiens
atggtgtggggtagg

SEQ ID NO: 658462 - DNA, 15 bp, Homo sapiens
tggtgtggggtaggg

SEQ ID NO: 658463 - DNA, 15 bp, Homo sapiens
ggtgtggggtagggg

SEQ ID NO: 658464 - DNA, 15 bp, Homo sapiens
gtgtggggtagggga

SEQ ID NO: 658465 - DNA, 15 bp, Homo sapiens
tgtggggtaggggag

SEQ ID NO: 658466 - DNA, 15 bp, Homo sapiens
gtggggtaggggagg

SEQ ID NO: 658467 - DNA, 15 bp, Homo sapiens
tggggtaggggaggg

SEQ ID NO: 658468 - DNA, 15 bp, Homo sapiens
ggggtaggggaggga

SEQ ID NO: 658469 - DNA, 15 bp, Homo sapiens
gggtaggggagggat

SEQ ID NO: 658470 - DNA, 15 bp, Homo sapiens
ggtaggggagggata

SEQ ID NO: 658471 - DNA, 15 bp, Homo sapiens
gtaggggagggatag

SEQ ID NO: 658472 - DNA, 15 bp, Homo sapiens
taggggagggatagc

SEQ ID NO: 658473 - DNA, 15 bp, Homo sapiens
aggggagggatagca

SEQ ID NO: 658474 - DNA, 15 bp, Homo sapiens
ggggagggatagcat

SEQ ID NO: 658475 - DNA, 15 bp, Homo sapiens
gggagggatagcatt

SEQ ID NO: 658476 - DNA, 15 bp, Homo sapiens
ggagggatagcatta

SEQ ID NO: 658477 - DNA, 15 bp, Homo sapiens
gagggatagcattag

SEQ ID NO: 658478 - DNA, 15 bp, Homo sapiens
agggatagcattagg

SEQ ID NO: 658479 - DNA, 15 bp, Homo sapiens
gggatagcattagga

SEQ ID NO: 658480 - DNA, 15 bp, Homo sapiens
ggatagcattaggag

SEQ ID NO: 658481 - DNA, 15 bp, Homo sapiens
gatagcattaggaga

SEQ ID NO: 658482 - DNA, 15 bp, Homo sapiens
atagcattaggagaa

SEQ ID NO: 658483 - DNA, 15 bp, Homo sapiens
tagcattaggagaaa

SEQ ID NO: 658484 - DNA, 15 bp, Homo sapiens
agcattaggagaaat

SEQ ID NO: 658485 - DNA, 15 bp, Homo sapiens
gcattaggagaaata

SEQ ID NO: 658486 - DNA, 15 bp, Homo sapiens
cattaggagaaatac

SEQ ID NO: 658487 - DNA, 15 bp, Homo sapiens
attaggagaaatacc

SEQ ID NO: 658488 - DNA, 15 bp, Homo sapiens
ttaggagaaatacct

SEQ ID NO: 658489 - DNA, 15 bp, Homo sapiens
taggagaaataccta

SEQ ID NO: 658490 - DNA, 15 bp, Homo sapiens
aggagaaatacctaa

SEQ ID NO: 658491 - DNA, 15 bp, Homo sapiens
ggagaaatacctaat

SEQ ID NO: 658492 - DNA, 15 bp, Homo sapiens
gagaaatacctaatg

SEQ ID NO: 658493 - DNA, 15 bp, Homo sapiens
agaaatacctaatgt

SEQ ID NO: 658494 - DNA, 15 bp, Homo sapiens
gaaatacctaatgta

SEQ ID NO: 658495 - DNA, 15 bp, Homo sapiens
aaatacctaatgtag

SEQ ID NO: 658496 - DNA, 15 bp, Homo sapiens
aatacctaatgtaga

SEQ ID NO: 658497 - DNA, 15 bp, Homo sapiens
atacctaatgtagat

SEQ ID NO: 658498 - DNA, 15 bp, Homo sapiens
tacctaatgtagatg

SEQ ID NO: 658499 - DNA, 15 bp, Homo sapiens
acctaatgtagatga

SEQ ID NO: 658500 - DNA, 15 bp, Homo sapiens
cctaatgtagatgac

SEQ ID NO: 658501 - DNA, 15 bp, Homo sapiens
ctaatgtagatgaca

SEQ ID NO: 658502 - DNA, 15 bp, Homo sapiens
taatgtagatgacag

SEQ ID NO: 658503 - DNA, 15 bp, Homo sapiens
aatgtagatgacagg

SEQ ID NO: 658504 - DNA, 15 bp, Homo sapiens
atgtagatgacaggt

SEQ ID NO: 658505 - DNA, 15 bp, Homo sapiens
tgtagatgacaggtt

SEQ ID NO: 658506 - DNA, 15 bp, Homo sapiens
gtagatgacaggttg

SEQ ID NO: 658507 - DNA, 15 bp, Homo sapiens
tagatgacaggttga

SEQ ID NO: 658508 - DNA, 15 bp, Homo sapiens
agatgacaggttgat

SEQ ID NO: 658509 - DNA, 15 bp, Homo sapiens
gatgacaggttgatg

SEQ ID NO: 658510 - DNA, 15 bp, Homo sapiens
atgacaggttgatgg

SEQ ID NO: 658511 - DNA, 15 bp, Homo sapiens
tgacaggttgatggg

SEQ ID NO: 658512 - DNA, 15 bp, Homo sapiens
gacaggttgatgggt

SEQ ID NO: 658513 - DNA, 15 bp, Homo sapiens
acaggttgatgggtg

SEQ ID NO: 658514 - DNA, 15 bp, Homo sapiens
caggttgatgggtgc

SEQ ID NO: 658515 - DNA, 15 bp, Homo sapiens
aggttgatgggtgca

SEQ ID NO: 658516 - DNA, 15 bp, Homo sapiens
ggttgatgggtgcag

SEQ ID NO: 658517 - DNA, 15 bp, Homo sapiens
gttgatgggtgcagc

SEQ ID NO: 658518 - DNA, 15 bp, Homo sapiens
ttgatgggtgcagca

SEQ ID NO: 658519 - DNA, 15 bp, Homo sapiens
tgatgggtgcagcaa

SEQ ID NO: 658520 - DNA, 15 bp, Homo sapiens
gatgggtgcagcaaa

SEQ ID NO: 658521 - DNA, 15 bp, Homo sapiens
atgggtgcagcaaac

SEQ ID NO: 658522 - DNA, 15 bp, Homo sapiens
tgggtgcagcaaacc

SEQ ID NO: 658523 - DNA, 15 bp, Homo sapiens
gggtgcagcaaacca

SEQ ID NO: 658524 - DNA, 15 bp, Homo sapiens
ggtgcagcaaaccac

SEQ ID NO: 658525 - DNA, 15 bp, Homo sapiens
gtgcagcaaaccacc

SEQ ID NO: 658526 - DNA, 15 bp, Homo sapiens
tgcagcaaaccacca

SEQ ID NO: 658527 - DNA, 15 bp, Homo sapiens
gcagcaaaccaccat

SEQ ID NO: 658528 - DNA, 15 bp, Homo sapiens
cagcaaaccaccatg

SEQ ID NO: 658529 - DNA, 15 bp, Homo sapiens
agcaaaccaccatga

SEQ ID NO: 658530 - DNA, 15 bp, Homo sapiens
gcaaaccaccatgac

SEQ ID NO: 658531 - DNA, 15 bp, Homo sapiens
caaaccaccatgaca

SEQ ID NO: 658532 - DNA, 15 bp, Homo sapiens
aaaccaccatgacac

SEQ ID NO: 658533 - DNA, 15 bp, Homo sapiens
aaccaccatgacacg

SEQ ID NO: 658534 - DNA, 15 bp, Homo sapiens
accaccatgacacgt

SEQ ID NO: 658535 - DNA, 15 bp, Homo sapiens
ccaccatgacacgtg

SEQ ID NO: 658536 - DNA, 15 bp, Homo sapiens
caccatgacacgtgt

SEQ ID NO: 658537 - DNA, 15 bp, Homo sapiens
accatgacacgtgta

SEQ ID NO: 658538 - DNA, 15 bp, Homo sapiens
ccatgacacgtgtat

SEQ ID NO: 658539 - DNA, 15 bp, Homo sapiens
catgacacgtgtata

SEQ ID NO: 658540 - DNA, 15 bp, Homo sapiens
atgacacgtgtatac

SEQ ID NO: 658541 - DNA, 15 bp, Homo sapiens
tgacacgtgtatacc

SEQ ID NO: 658542 - DNA, 15 bp, Homo sapiens
gacacgtgtatacct

SEQ ID NO: 658543 - DNA, 15 bp, Homo sapiens
acacgtgtataccta

SEQ ID NO: 658544 - DNA, 15 bp, Homo sapiens
cacgtgtatacctat

SEQ ID NO: 658545 - DNA, 15 bp, Homo sapiens
acgtgtatacctata

SEQ ID NO: 658546 - DNA, 15 bp, Homo sapiens
cgtgtatacctatat

SEQ ID NO: 658547 - DNA, 15 bp, Homo sapiens
gtgtatacctatata

SEQ ID NO: 658548 - DNA, 15 bp, Homo sapiens
tgtatacctatataa

SEQ ID NO: 658549 - DNA, 15 bp, Homo sapiens
gtatacctatataac

SEQ ID NO: 658550 - DNA, 15 bp, Homo sapiens
tatacctatataaca

SEQ ID NO: 658551 - DNA, 15 bp, Homo sapiens
atacctatataacaa

SEQ ID NO: 658552 - DNA, 15 bp, Homo sapiens
tacctatataacaag

SEQ ID NO: 658553 - DNA, 15 bp, Homo sapiens
acctatataacaagc

SEQ ID NO: 658554 - DNA, 15 bp, Homo sapiens
aacaagcctgcacat

SEQ ID NO: 658555 - DNA, 15 bp, Homo sapiens
acaagcctgcacatt

SEQ ID NO: 658556 - DNA, 15 bp, Homo sapiens
caagcctgcacattc

SEQ ID NO: 658557 - DNA, 15 bp, Homo sapiens
aagcctgcacattct

SEQ ID NO: 658558 - DNA, 15 bp, Homo sapiens
agcctgcacattcta

SEQ ID NO: 658559 - DNA, 15 bp, Homo sapiens
gcctgcacattctac

SEQ ID NO: 658560 - DNA, 15 bp, Homo sapiens
cctgcacattctaca

SEQ ID NO: 658561 - DNA, 15 bp, Homo sapiens
ctgcacattctacac

SEQ ID NO: 658562 - DNA, 15 bp, Homo sapiens
tgcacattctacaca

SEQ ID NO: 658563 - DNA, 15 bp, Homo sapiens
gcacattctacacat

SEQ ID NO: 658564 - DNA, 15 bp, Homo sapiens
cacattctacacatc

SEQ ID NO: 658565 - DNA, 15 bp, Homo sapiens
acattctacacatct

SEQ ID NO: 658566 - DNA, 15 bp, Homo sapiens
cattctacacatcta

SEQ ID NO: 658567 - DNA, 15 bp, Homo sapiens
attctacacatctac

SEQ ID NO: 658568 - DNA, 15 bp, Homo sapiens
ttctacacatctacc

SEQ ID NO: 658569 - DNA, 15 bp, Homo sapiens
tctacacatctaccc

SEQ ID NO: 658570 - DNA, 15 bp, Homo sapiens
ctacacatctacccc

SEQ ID NO: 658571 - DNA, 15 bp, Homo sapiens
tacacatctacccca

SEQ ID NO: 658572 - DNA, 15 bp, Homo sapiens
acacatctaccccag

SEQ ID NO: 658573 - DNA, 15 bp, Homo sapiens
cacatctaccccaga

SEQ ID NO: 658574 - DNA, 15 bp, Homo sapiens
acatctaccccagaa

SEQ ID NO: 658575 - DNA, 15 bp, Homo sapiens
catctaccccagaac

SEQ ID NO: 658576 - DNA, 15 bp, Homo sapiens
atctaccccagaact

SEQ ID NO: 658577 - DNA, 15 bp, Homo sapiens
tctaccccagaactt

SEQ ID NO: 658578 - DNA, 15 bp, Homo sapiens
ctaccccagaactta

SEQ ID NO: 658579 - DNA, 15 bp, Homo sapiens
taccccagaacttaa

SEQ ID NO: 658580 - DNA, 15 bp, Homo sapiens
accccagaacttaaa

SEQ ID NO: 658581 - DNA, 15 bp, Homo sapiens
ccccagaacttaaag

SEQ ID NO: 658582 - DNA, 15 bp, Homo sapiens
cccagaacttaaagt

SEQ ID NO: 658583 - DNA, 15 bp, Homo sapiens
ccagaacttaaagtc

SEQ ID NO: 658584 - DNA, 15 bp, Homo sapiens
cagaacttaaagtct

SEQ ID NO: 658585 - DNA, 15 bp, Homo sapiens
agaacttaaagtcta

SEQ ID NO: 658586 - DNA, 15 bp, Homo sapiens
gaacttaaagtctaa

SEQ ID NO: 658587 - DNA, 15 bp, Homo sapiens
aacttaaagtctaat

SEQ ID NO: 658588 - DNA, 15 bp, Homo sapiens
acttaaagtctaata

SEQ ID NO: 658589 - DNA, 15 bp, Homo sapiens
cttaaagtctaataa

SEQ ID NO: 658590 - DNA, 15 bp, Homo sapiens
ttaaagtctaataaa

SEQ ID NO: 658591 - DNA, 15 bp, Homo sapiens
taaagtctaataaaa

SEQ ID NO: 658592 - DNA, 15 bp, Homo sapiens
aaagtctaataaaat

SEQ ID NO: 658593 - DNA, 15 bp, Homo sapiens
aagtctaataaaata

SEQ ID NO: 658594 - DNA, 15 bp, Homo sapiens
agtctaataaaataa

SEQ ID NO: 658595 - DNA, 15 bp, Homo sapiens
gtctaataaaataaa

SEQ ID NO: 658596 - DNA, 15 bp, Homo sapiens
tctaataaaataaat

SEQ ID NO: 658597 - DNA, 15 bp, Homo sapiens
ctaataaaataaata

SEQ ID NO: 658598 - DNA, 15 bp, Homo sapiens
taataaaataaataa

SEQ ID NO: 658599 - DNA, 15 bp, Homo sapiens
aataaaataaataaa

SEQ ID NO: 658600 - DNA, 15 bp, Homo sapiens
ataaaataaataaat

SEQ ID NO: 658601 - DNA, 15 bp, Homo sapiens
taaaataaataaata

SEQ ID NO: 658602 - DNA, 15 bp, Homo sapiens
aaaataaataaataa

SEQ ID NO: 658603 - DNA, 15 bp, Homo sapiens
aaataaataaataaa

SEQ ID NO: 658604 - DNA, 15 bp, Homo sapiens
aataaataaataaat

SEQ ID NO: 658605 - DNA, 15 bp, Homo sapiens
ataaataaataaata

SEQ ID NO: 658606 - DNA, 15 bp, Homo sapiens
taaataaataaataa

SEQ ID NO: 658607 - DNA, 15 bp, Homo sapiens
aataaataaataaaa

SEQ ID NO: 658608 - DNA, 15 bp, Homo sapiens
ataaataaataaaat

SEQ ID NO: 658609 - DNA, 15 bp, Homo sapiens
taaataaataaaatg

SEQ ID NO: 658610 - DNA, 15 bp, Homo sapiens
aaataaataaaatgt

SEQ ID NO: 658611 - DNA, 15 bp, Homo sapiens
aataaataaaatgtg

SEQ ID NO: 658612 - DNA, 15 bp, Homo sapiens
ataaataaaatgtgt

SEQ ID NO: 658613 - DNA, 15 bp, Homo sapiens
taaataaaatgtgta

SEQ ID NO: 658614 - DNA, 15 bp, Homo sapiens
aaataaaatgtgtaa

SEQ ID NO: 658615 - DNA, 15 bp, Homo sapiens
aataaaatgtgtaag

SEQ ID NO: 658616 - DNA, 15 bp, Homo sapiens
ataaaatgtgtaagt

SEQ ID NO: 658617 - DNA, 15 bp, Homo sapiens
taaaatgtgtaagta

SEQ ID NO: 658618 - DNA, 15 bp, Homo sapiens
aaaatgtgtaagtat

SEQ ID NO: 658619 - DNA, 15 bp, Homo sapiens
aaatgtgtaagtatt

SEQ ID NO: 658620 - DNA, 15 bp, Homo sapiens
aatgtgtaagtattg

SEQ ID NO: 658621 - DNA, 15 bp, Homo sapiens
atgtgtaagtattga

SEQ ID NO: 658622 - DNA, 15 bp, Homo sapiens
tgtgtaagtattgat

SEQ ID NO: 658623 - DNA, 15 bp, Homo sapiens
gtgtaagtattgatg

SEQ ID NO: 658624 - DNA, 15 bp, Homo sapiens
tgtaagtattgatga

SEQ ID NO: 658625 - DNA, 15 bp, Homo sapiens
gtaagtattgatgag

SEQ ID NO: 658626 - DNA, 15 bp, Homo sapiens
taagtattgatgagg

SEQ ID NO: 658627 - DNA, 15 bp, Homo sapiens
aagtattgatgaggg

SEQ ID NO: 658628 - DNA, 15 bp, Homo sapiens
agtattgatgagggg

SEQ ID NO: 658629 - DNA, 15 bp, Homo sapiens
gtattgatgaggggt

SEQ ID NO: 658630 - DNA, 15 bp, Homo sapiens
tattgatgaggggta

SEQ ID NO: 658631 - DNA, 15 bp, Homo sapiens
attgatgaggggtaa

SEQ ID NO: 658632 - DNA, 15 bp, Homo sapiens
ttgatgaggggtaag

SEQ ID NO: 658633 - DNA, 15 bp, Homo sapiens
tgatgaggggtaagg

SEQ ID NO: 658634 - DNA, 15 bp, Homo sapiens
gatgaggggtaaggt

SEQ ID NO: 658635 - DNA, 15 bp, Homo sapiens
atgaggggtaaggtt

SEQ ID NO: 658636 - DNA, 15 bp, Homo sapiens
tgaggggtaaggttg

SEQ ID NO: 658637 - DNA, 15 bp, Homo sapiens
gaggggtaaggttgt

SEQ ID NO: 658638 - DNA, 15 bp, Homo sapiens
aggggtaaggttgtg

SEQ ID NO: 658639 - DNA, 15 bp, Homo sapiens
ggggtaaggttgtgc

SEQ ID NO: 658640 - DNA, 15 bp, Homo sapiens
gggtaaggttgtgcg

SEQ ID NO: 658641 - DNA, 15 bp, Homo sapiens
ggtaaggttgtgcgt

SEQ ID NO: 658642 - DNA, 15 bp, Homo sapiens
gtaaggttgtgcgta

SEQ ID NO: 658643 - DNA, 15 bp, Homo sapiens
taaggttgtgcgtat

SEQ ID NO: 658644 - DNA, 15 bp, Homo sapiens
aaggttgtgcgtatg

SEQ ID NO: 658645 - DNA, 15 bp, Homo sapiens
aggttgtgcgtatgt

SEQ ID NO: 658646 - DNA, 15 bp, Homo sapiens
ggttgtgcgtatgtg

SEQ ID NO: 658647 - DNA, 15 bp, Homo sapiens
gttgtgcgtatgtgt

SEQ ID NO: 658648 - DNA, 15 bp, Homo sapiens
ttgtgcgtatgtgtg

SEQ ID NO: 658649 - DNA, 15 bp, Homo sapiens
tgtgcgtatgtgtgt

SEQ ID NO: 658650 - DNA, 15 bp, Homo sapiens
gtgcgtatgtgtgtg

SEQ ID NO: 658651 - DNA, 15 bp, Homo sapiens
tgcgtatgtgtgtgc

SEQ ID NO: 658652 - DNA, 15 bp, Homo sapiens
gcgtatgtgtgtgca

SEQ ID NO: 658653 - DNA, 15 bp, Homo sapiens
cgtatgtgtgtgcag

SEQ ID NO: 658654 - DNA, 15 bp, Homo sapiens
gtatgtgtgtgcagg

SEQ ID NO: 658655 - DNA, 15 bp, Homo sapiens
tatgtgtgtgcagga

SEQ ID NO: 658656 - DNA, 15 bp, Homo sapiens
atgtgtgtgcaggac

SEQ ID NO: 658657 - DNA, 15 bp, Homo sapiens
tgtgtgtgcaggaca

SEQ ID NO: 658658 - DNA, 15 bp, Homo sapiens
gtgtgtgcaggacag

SEQ ID NO: 658659 - DNA, 15 bp, Homo sapiens
tgtgtgcaggacagc

SEQ ID NO: 658660 - DNA, 15 bp, Homo sapiens
gtgtgcaggacagcc

SEQ ID NO: 658661 - DNA, 15 bp, Homo sapiens
tgtgcaggacagcca

SEQ ID NO: 658662 - DNA, 15 bp, Homo sapiens
gtgcaggacagccat

SEQ ID NO: 658663 - DNA, 15 bp, Homo sapiens
tgcaggacagccatt

SEQ ID NO: 658664 - DNA, 15 bp, Homo sapiens
gcaggacagccatta

SEQ ID NO: 658665 - DNA, 15 bp, Homo sapiens
caggacagccattag

SEQ ID NO: 658666 - DNA, 15 bp, Homo sapiens
aggacagccattagg

SEQ ID NO: 658667 - DNA, 15 bp, Homo sapiens
ggacagccattaggg

SEQ ID NO: 658668 - DNA, 15 bp, Homo sapiens
gacagccattaggga

SEQ ID NO: 658669 - DNA, 15 bp, Homo sapiens
acagccattagggat

SEQ ID NO: 658670 - DNA, 15 bp, Homo sapiens
cagccattagggatg

SEQ ID NO: 658671 - DNA, 15 bp, Homo sapiens
agccattagggatgg

SEQ ID NO: 658672 - DNA, 15 bp, Homo sapiens
gccattagggatggc

SEQ ID NO: 658673 - DNA, 15 bp, Homo sapiens
ccattagggatggcc

SEQ ID NO: 658674 - DNA, 15 bp, Homo sapiens
cattagggatggcca

SEQ ID NO: 658675 - DNA, 15 bp, Homo sapiens
attagggatggccat

SEQ ID NO: 658676 - DNA, 15 bp, Homo sapiens
ttagggatggccata

SEQ ID NO: 658677 - DNA, 15 bp, Homo sapiens
tagggatggccatac

SEQ ID NO: 658678 - DNA, 15 bp, Homo sapiens
agggatggccataca

SEQ ID NO: 658679 - DNA, 15 bp, Homo sapiens
gggatggccatacaa

SEQ ID NO: 658680 - DNA, 15 bp, Homo sapiens
ggatggccatacaat

SEQ ID NO: 658681 - DNA, 15 bp, Homo sapiens
gatggccatacaata

SEQ ID NO: 658682 - DNA, 15 bp, Homo sapiens
atggccatacaatac

SEQ ID NO: 658683 - DNA, 15 bp, Homo sapiens
tggccatacaatacc

SEQ ID NO: 658684 - DNA, 15 bp, Homo sapiens
ggccatacaatacca

SEQ ID NO: 658685 - DNA, 15 bp, Homo sapiens
gccatacaataccac

SEQ ID NO: 658686 - DNA, 15 bp, Homo sapiens
ccatacaataccact

SEQ ID NO: 658687 - DNA, 15 bp, Homo sapiens
catacaataccactt

SEQ ID NO: 658688 - DNA, 15 bp, Homo sapiens
atacaataccacttg

SEQ ID NO: 658689 - DNA, 15 bp, Homo sapiens
tacaataccacttgg

SEQ ID NO: 658690 - DNA, 15 bp, Homo sapiens
acaataccacttggc

SEQ ID NO: 658691 - DNA, 15 bp, Homo sapiens
caataccacttggct

SEQ ID NO: 658692 - DNA, 15 bp, Homo sapiens
aataccacttggctt

SEQ ID NO: 658693 - DNA, 15 bp, Homo sapiens
ataccacttggcttc

SEQ ID NO: 658694 - DNA, 15 bp, Homo sapiens
taccacttggcttct

SEQ ID NO: 658695 - DNA, 15 bp, Homo sapiens
accacttggcttcta

SEQ ID NO: 658696 - DNA, 15 bp, Homo sapiens
ccacttggcttctaa

SEQ ID NO: 658697 - DNA, 15 bp, Homo sapiens
cacttggcttctaaa

SEQ ID NO: 658698 - DNA, 15 bp, Homo sapiens
acttggcttctaaat

SEQ ID NO: 658699 - DNA, 15 bp, Homo sapiens
cttggcttctaaatt

SEQ ID NO: 658700 - DNA, 15 bp, Homo sapiens
ttggcttctaaattc

SEQ ID NO: 658701 - DNA, 15 bp, Homo sapiens
tggcttctaaattcc

SEQ ID NO: 658702 - DNA, 15 bp, Homo sapiens
ggcttctaaattcct

SEQ ID NO: 658703 - DNA, 15 bp, Homo sapiens
gcttctaaattcctg

SEQ ID NO: 658704 - DNA, 15 bp, Homo sapiens
cttctaaattcctgc

SEQ ID NO: 658705 - DNA, 15 bp, Homo sapiens
ttctaaattcctgct

SEQ ID NO: 658706 - DNA, 15 bp, Homo sapiens
tctaaattcctgctg

SEQ ID NO: 658707 - DNA, 15 bp, Homo sapiens
ctaaattcctgctgt

SEQ ID NO: 658708 - DNA, 15 bp, Homo sapiens
taaattcctgctgta

SEQ ID NO: 658709 - DNA, 15 bp, Homo sapiens
aaattcctgctgtat

SEQ ID NO: 658710 - DNA, 15 bp, Homo sapiens
aattcctgctgtata

SEQ ID NO: 658711 - DNA, 15 bp, Homo sapiens
attcctgctgtatat

SEQ ID NO: 658712 - DNA, 15 bp, Homo sapiens
ttcctgctgtatatg

SEQ ID NO: 658713 - DNA, 15 bp, Homo sapiens
tcctgctgtatatgg

SEQ ID NO: 658714 - DNA, 15 bp, Homo sapiens
cctgctgtatatggg

SEQ ID NO: 658715 - DNA, 15 bp, Homo sapiens
ctgctgtatatgggt

SEQ ID NO: 658716 - DNA, 15 bp, Homo sapiens
tgctgtatatgggtt

SEQ ID NO: 658717 - DNA, 15 bp, Homo sapiens
gctgtatatgggttc

SEQ ID NO: 658718 - DNA, 15 bp, Homo sapiens
ctgtatatgggttca

SEQ ID NO: 658719 - DNA, 15 bp, Homo sapiens
tgtatatgggttcat

SEQ ID NO: 658720 - DNA, 15 bp, Homo sapiens
gtatatgggttcatt

SEQ ID NO: 658721 - DNA, 15 bp, Homo sapiens
tatatgggttcattc

SEQ ID NO: 658722 - DNA, 15 bp, Homo sapiens
atatgggttcattca

SEQ ID NO: 658723 - DNA, 15 bp, Homo sapiens
tatgggttcattcat

SEQ ID NO: 658724 - DNA, 15 bp, Homo sapiens
atgggttcattcata

SEQ ID NO: 658725 - DNA, 15 bp, Homo sapiens
tgggttcattcatac

SEQ ID NO: 658726 - DNA, 15 bp, Homo sapiens
gggttcattcataca

SEQ ID NO: 658727 - DNA, 15 bp, Homo sapiens
ggttcattcatacat

SEQ ID NO: 658728 - DNA, 15 bp, Homo sapiens
gttcattcatacata

SEQ ID NO: 658729 - DNA, 15 bp, Homo sapiens
ttcattcatacatac

SEQ ID NO: 658730 - DNA, 15 bp, Homo sapiens
tcattcatacatact

SEQ ID NO: 658731 - DNA, 15 bp, Homo sapiens
cattcatacatactt

SEQ ID NO: 658732 - DNA, 15 bp, Homo sapiens
attcatacatacttg

SEQ ID NO: 658733 - DNA, 15 bp, Homo sapiens
ttcatacatacttgg

SEQ ID NO: 658734 - DNA, 15 bp, Homo sapiens
tcatacatacttgga

SEQ ID NO: 658735 - DNA, 15 bp, Homo sapiens
catacatacttggag

SEQ ID NO: 658736 - DNA, 15 bp, Homo sapiens
atacatacttggaga

SEQ ID NO: 658737 - DNA, 15 bp, Homo sapiens
tacatacttggagaa

SEQ ID NO: 658738 - DNA, 15 bp, Homo sapiens
acatacttggagaag

SEQ ID NO: 658739 - DNA, 15 bp, Homo sapiens
catacttggagaaga

SEQ ID NO: 658740 - DNA, 15 bp, Homo sapiens
atacttggagaagac

SEQ ID NO: 658741 - DNA, 15 bp, Homo sapiens
tacttggagaagaca

SEQ ID NO: 658742 - DNA, 15 bp, Homo sapiens
acttggagaagacaa

SEQ ID NO: 658743 - DNA, 15 bp, Homo sapiens
cttggagaagacaaa

SEQ ID NO: 658744 - DNA, 15 bp, Homo sapiens
ttggagaagacaaac

SEQ ID NO: 658745 - DNA, 15 bp, Homo sapiens
tggagaagacaaaca

SEQ ID NO: 658746 - DNA, 15 bp, Homo sapiens
ggagaagacaaacag

SEQ ID NO: 658747 - DNA, 15 bp, Homo sapiens
gagaagacaaacagt

SEQ ID NO: 658748 - DNA, 15 bp, Homo sapiens
agaagacaaacagta

SEQ ID NO: 658749 - DNA, 15 bp, Homo sapiens
gaagacaaacagtag

SEQ ID NO: 658750 - DNA, 15 bp, Homo sapiens
aagacaaacagtaga

SEQ ID NO: 658751 - DNA, 15 bp, Homo sapiens
agacaaacagtagat

SEQ ID NO: 658752 - DNA, 15 bp, Homo sapiens
gacaaacagtagatt

SEQ ID NO: 658753 - DNA, 15 bp, Homo sapiens
acaaacagtagattt

SEQ ID NO: 658754 - DNA, 15 bp, Homo sapiens
caaacagtagattta

SEQ ID NO: 658755 - DNA, 15 bp, Homo sapiens
aaacagtagatttat

SEQ ID NO: 658756 - DNA, 15 bp, Homo sapiens
aacagtagatttata

SEQ ID NO: 658757 - DNA, 15 bp, Homo sapiens
acagtagatttataa

SEQ ID NO: 658758 - DNA, 15 bp, Homo sapiens
cagtagatttataaa

SEQ ID NO: 658759 - DNA, 15 bp, Homo sapiens
agtagatttataaat

SEQ ID NO: 658760 - DNA, 15 bp, Homo sapiens
gtagatttataaata

SEQ ID NO: 658761 - DNA, 15 bp, Homo sapiens
tagatttataaatac

SEQ ID NO: 658762 - DNA, 15 bp, Homo sapiens
agatttataaataca

SEQ ID NO: 658763 - DNA, 15 bp, Homo sapiens
gatttataaatacaa

SEQ ID NO: 658764 - DNA, 15 bp, Homo sapiens
atttataaatacaaa

SEQ ID NO: 658765 - DNA, 15 bp, Homo sapiens
tttataaatacaaag

SEQ ID NO: 658766 - DNA, 15 bp, Homo sapiens
ttataaatacaaagg

SEQ ID NO: 658767 - DNA, 15 bp, Homo sapiens
tataaatacaaagga

SEQ ID NO: 658768 - DNA, 15 bp, Homo sapiens
ataaatacaaaggaa

SEQ ID NO: 658769 - DNA, 15 bp, Homo sapiens
taaatacaaaggaat

SEQ ID NO: 658770 - DNA, 15 bp, Homo sapiens
aaatacaaaggaata

SEQ ID NO: 658771 - DNA, 15 bp, Homo sapiens
aatacaaaggaataa

SEQ ID NO: 658772 - DNA, 15 bp, Homo sapiens
atacaaaggaataaa

SEQ ID NO: 658773 - DNA, 15 bp, Homo sapiens
tacaaaggaataaag

SEQ ID NO: 658774 - DNA, 15 bp, Homo sapiens
acaaaggaataaagt

SEQ ID NO: 658775 - DNA, 15 bp, Homo sapiens
caaaggaataaagta

SEQ ID NO: 658776 - DNA, 15 bp, Homo sapiens
aaaggaataaagtaa

SEQ ID NO: 658777 - DNA, 15 bp, Homo sapiens
aaggaataaagtaaa

SEQ ID NO: 658778 - DNA, 15 bp, Homo sapiens
aggaataaagtaaat

SEQ ID NO: 658779 - DNA, 15 bp, Homo sapiens
ggaataaagtaaatt

SEQ ID NO: 658780 - DNA, 15 bp, Homo sapiens
gaataaagtaaatta

SEQ ID NO: 658781 - DNA, 15 bp, Homo sapiens
aataaagtaaattag

SEQ ID NO: 658782 - DNA, 15 bp, Homo sapiens
ataaagtaaattagc

SEQ ID NO: 658783 - DNA, 15 bp, Homo sapiens
taaagtaaattagca

SEQ ID NO: 658784 - DNA, 15 bp, Homo sapiens
aaagtaaattagcat

SEQ ID NO: 658785 - DNA, 15 bp, Homo sapiens
aagtaaattagcatc

SEQ ID NO: 658786 - DNA, 15 bp, Homo sapiens
agtaaattagcatca

SEQ ID NO: 658787 - DNA, 15 bp, Homo sapiens
gtaaattagcatcaa

SEQ ID NO: 658788 - DNA, 15 bp, Homo sapiens
taaattagcatcaaa

SEQ ID NO: 658789 - DNA, 15 bp, Homo sapiens
aaattagcatcaaaa

SEQ ID NO: 658790 - DNA, 15 bp, Homo sapiens
aattagcatcaaaaa

SEQ ID NO: 658791 - DNA, 15 bp, Homo sapiens
attagcatcaaaaat

SEQ ID NO: 658792 - DNA, 15 bp, Homo sapiens
ttagcatcaaaaatt

SEQ ID NO: 658793 - DNA, 15 bp, Homo sapiens
tagcatcaaaaatta

SEQ ID NO: 658794 - DNA, 15 bp, Homo sapiens
agcatcaaaaattat

SEQ ID NO: 658795 - DNA, 15 bp, Homo sapiens
gcatcaaaaattatt

SEQ ID NO: 658796 - DNA, 15 bp, Homo sapiens
catcaaaaattattc

SEQ ID NO: 658797 - DNA, 15 bp, Homo sapiens
atcaaaaattattcc

SEQ ID NO: 658798 - DNA, 15 bp, Homo sapiens
tcaaaaattattcct

SEQ ID NO: 658799 - DNA, 15 bp, Homo sapiens
caaaaattattccta

SEQ ID NO: 658800 - DNA, 15 bp, Homo sapiens
aaaaattattcctaa

SEQ ID NO: 658801 - DNA, 15 bp, Homo sapiens
aaaattattcctaaa

SEQ ID NO: 658802 - DNA, 15 bp, Homo sapiens
aaattattcctaaag

SEQ ID NO: 658803 - DNA, 15 bp, Homo sapiens
aattattcctaaagc

SEQ ID NO: 658804 - DNA, 15 bp, Homo sapiens
attattcctaaagct

SEQ ID NO: 658805 - DNA, 15 bp, Homo sapiens
ttattcctaaagctg

SEQ ID NO: 658806 - DNA, 15 bp, Homo sapiens
tattcctaaagctgg

SEQ ID NO: 658807 - DNA, 15 bp, Homo sapiens
attcctaaagctggc

SEQ ID NO: 658808 - DNA, 15 bp, Homo sapiens
ttcctaaagctggca

SEQ ID NO: 658809 - DNA, 15 bp, Homo sapiens
tcctaaagctggcat

SEQ ID NO: 658810 - DNA, 15 bp, Homo sapiens
cctaaagctggcatt

SEQ ID NO: 658811 - DNA, 15 bp, Homo sapiens
ctaaagctggcattt

SEQ ID NO: 658812 - DNA, 15 bp, Homo sapiens
taaagctggcatttg

SEQ ID NO: 658813 - DNA, 15 bp, Homo sapiens
aaagctggcatttga

SEQ ID NO: 658814 - DNA, 15 bp, Homo sapiens
aagctggcatttgaa

SEQ ID NO: 658815 - DNA, 15 bp, Homo sapiens
agctggcatttgaac

SEQ ID NO: 658816 - DNA, 15 bp, Homo sapiens
gctggcatttgaaca

SEQ ID NO: 658817 - DNA, 15 bp, Homo sapiens
ctggcatttgaacaa

SEQ ID NO: 658818 - DNA, 15 bp, Homo sapiens
tggcatttgaacaag

SEQ ID NO: 658819 - DNA, 15 bp, Homo sapiens
ggcatttgaacaagg

SEQ ID NO: 658820 - DNA, 15 bp, Homo sapiens
gcatttgaacaaggt

SEQ ID NO: 658821 - DNA, 15 bp, Homo sapiens
catttgaacaaggtg

SEQ ID NO: 658822 - DNA, 15 bp, Homo sapiens
atttgaacaaggtga

SEQ ID NO: 658823 - DNA, 15 bp, Homo sapiens
tttgaacaaggtgat

SEQ ID NO: 658824 - DNA, 15 bp, Homo sapiens
ttgaacaaggtgatg

SEQ ID NO: 658825 - DNA, 15 bp, Homo sapiens
tgaacaaggtgatga

SEQ ID NO: 658826 - DNA, 15 bp, Homo sapiens
gaacaaggtgatgac

SEQ ID NO: 658827 - DNA, 15 bp, Homo sapiens
aacaaggtgatgaca

SEQ ID NO: 658828 - DNA, 15 bp, Homo sapiens
acaaggtgatgacat

SEQ ID NO: 658829 - DNA, 15 bp, Homo sapiens
caaggtgatgacatt

SEQ ID NO: 658830 - DNA, 15 bp, Homo sapiens
aaggtgatgacattc

SEQ ID NO: 658831 - DNA, 15 bp, Homo sapiens
aggtgatgacattca

SEQ ID NO: 658832 - DNA, 15 bp, Homo sapiens
ggtgatgacattcag

SEQ ID NO: 658833 - DNA, 15 bp, Homo sapiens
gtgatgacattcagt

SEQ ID NO: 658834 - DNA, 15 bp, Homo sapiens
tgatgacattcagtg

SEQ ID NO: 658835 - DNA, 15 bp, Homo sapiens
gatgacattcagtga

SEQ ID NO: 658836 - DNA, 15 bp, Homo sapiens
atgacattcagtgaa

SEQ ID NO: 658837 - DNA, 15 bp, Homo sapiens
tgacattcagtgaat

SEQ ID NO: 658838 - DNA, 15 bp, Homo sapiens
gacattcagtgaatg

SEQ ID NO: 658839 - DNA, 15 bp, Homo sapiens
acattcagtgaatgc

SEQ ID NO: 658840 - DNA, 15 bp, Homo sapiens
cattcagtgaatgct

SEQ ID NO: 658841 - DNA, 15 bp, Homo sapiens
attcagtgaatgcta

SEQ ID NO: 658842 - DNA, 15 bp, Homo sapiens
ttcagtgaatgctaa

SEQ ID NO: 658843 - DNA, 15 bp, Homo sapiens
tcagtgaatgctaaa

SEQ ID NO: 658844 - DNA, 15 bp, Homo sapiens
cagtgaatgctaaat

SEQ ID NO: 658845 - DNA, 15 bp, Homo sapiens
agtgaatgctaaatt

SEQ ID NO: 658846 - DNA, 15 bp, Homo sapiens
gtgaatgctaaattc

SEQ ID NO: 658847 - DNA, 15 bp, Homo sapiens
tgaatgctaaattct

SEQ ID NO: 658848 - DNA, 15 bp, Homo sapiens
gaatgctaaattctg

SEQ ID NO: 658849 - DNA, 15 bp, Homo sapiens
aatgctaaattctgt

SEQ ID NO: 658850 - DNA, 15 bp, Homo sapiens
atgctaaattctgtg

SEQ ID NO: 658851 - DNA, 15 bp, Homo sapiens
tgctaaattctgtgt

SEQ ID NO: 658852 - DNA, 15 bp, Homo sapiens
gctaaattctgtgta

SEQ ID NO: 658853 - DNA, 15 bp, Homo sapiens
ctaaattctgtgtaa

SEQ ID NO: 658854 - DNA, 15 bp, Homo sapiens
taaattctgtgtaat

SEQ ID NO: 658855 - DNA, 15 bp, Homo sapiens
aaattctgtgtaata

SEQ ID NO: 658856 - DNA, 15 bp, Homo sapiens
aattctgtgtaatat

SEQ ID NO: 658857 - DNA, 15 bp, Homo sapiens
attctgtgtaatata

SEQ ID NO: 658858 - DNA, 15 bp, Homo sapiens
ttctgtgtaatataa

SEQ ID NO: 658859 - DNA, 15 bp, Homo sapiens
tctgtgtaatataaa

SEQ ID NO: 658860 - DNA, 15 bp, Homo sapiens
ctgtgtaatataaaa

SEQ ID NO: 658861 - DNA, 15 bp, Homo sapiens
tgtgtaatataaaat

SEQ ID NO: 658862 - DNA, 15 bp, Homo sapiens
gtgtaatataaaata

SEQ ID NO: 658863 - DNA, 15 bp, Homo sapiens
tgtaatataaaatac

SEQ ID NO: 658864 - DNA, 15 bp, Homo sapiens
gtaatataaaataca

SEQ ID NO: 658865 - DNA, 15 bp, Homo sapiens
taatataaaatacac

SEQ ID NO: 658866 - DNA, 15 bp, Homo sapiens
aatataaaatacact

SEQ ID NO: 658867 - DNA, 15 bp, Homo sapiens
atataaaatacactt

SEQ ID NO: 658868 - DNA, 15 bp, Homo sapiens
tataaaatacactta

SEQ ID NO: 658869 - DNA, 15 bp, Homo sapiens
ataaaatacacttag

SEQ ID NO: 658870 - DNA, 15 bp, Homo sapiens
taaaatacacttagt

SEQ ID NO: 658871 - DNA, 15 bp, Homo sapiens
aaaatacacttagtt

SEQ ID NO: 658872 - DNA, 15 bp, Homo sapiens
aaatacacttagttc

SEQ ID NO: 658873 - DNA, 15 bp, Homo sapiens
aatacacttagttcc

SEQ ID NO: 658874 - DNA, 15 bp, Homo sapiens
atacacttagttccc

SEQ ID NO: 658875 - DNA, 15 bp, Homo sapiens
tacacttagttccca

SEQ ID NO: 658876 - DNA, 15 bp, Homo sapiens
acacttagttcccaa

SEQ ID NO: 658877 - DNA, 15 bp, Homo sapiens
cacttagttcccaaa

SEQ ID NO: 658878 - DNA, 15 bp, Homo sapiens
acttagttcccaaat

SEQ ID NO: 658879 - DNA, 15 bp, Homo sapiens
cttagttcccaaatg

SEQ ID NO: 658880 - DNA, 15 bp, Homo sapiens
ttagttcccaaatga

SEQ ID NO: 658881 - DNA, 15 bp, Homo sapiens
tagttcccaaatgaa

SEQ ID NO: 658882 - DNA, 15 bp, Homo sapiens
agttcccaaatgaat

SEQ ID NO: 658883 - DNA, 15 bp, Homo sapiens
gttcccaaatgaatg

SEQ ID NO: 658884 - DNA, 15 bp, Homo sapiens
ttcccaaatgaatga

SEQ ID NO: 658885 - DNA, 15 bp, Homo sapiens
tcccaaatgaatgaa

SEQ ID NO: 658886 - DNA, 15 bp, Homo sapiens
cccaaatgaatgaag

SEQ ID NO: 658887 - DNA, 15 bp, Homo sapiens
ccaaatgaatgaagc

SEQ ID NO: 658888 - DNA, 15 bp, Homo sapiens
caaatgaatgaagcc

SEQ ID NO: 658889 - DNA, 15 bp, Homo sapiens
aaatgaatgaagcca

SEQ ID NO: 658890 - DNA, 15 bp, Homo sapiens
aatgaatgaagccag

SEQ ID NO: 658891 - DNA, 15 bp, Homo sapiens
atgaatgaagccagt

SEQ ID NO: 658892 - DNA, 15 bp, Homo sapiens
tgaatgaagccagtt

SEQ ID NO: 658893 - DNA, 15 bp, Homo sapiens
gaatgaagccagttg

SEQ ID NO: 658894 - DNA, 15 bp, Homo sapiens
aatgaagccagttgt

SEQ ID NO: 658895 - DNA, 15 bp, Homo sapiens
atgaagccagttgtc

SEQ ID NO: 658896 - DNA, 15 bp, Homo sapiens
tgaagccagttgtcc

SEQ ID NO: 658897 - DNA, 15 bp, Homo sapiens
gaagccagttgtcct

SEQ ID NO: 658898 - DNA, 15 bp, Homo sapiens
aagccagttgtcctc

SEQ ID NO: 658899 - DNA, 15 bp, Homo sapiens
agccagttgtcctct

SEQ ID NO: 658900 - DNA, 15 bp, Homo sapiens
gccagttgtcctctg

SEQ ID NO: 658901 - DNA, 15 bp, Homo sapiens
ccagttgtcctctga

SEQ ID NO: 658902 - DNA, 15 bp, Homo sapiens
cagttgtcctctgag

SEQ ID NO: 658903 - DNA, 15 bp, Homo sapiens
agttgtcctctgaga

SEQ ID NO: 658904 - DNA, 15 bp, Homo sapiens
gttgtcctctgagat

SEQ ID NO: 658905 - DNA, 15 bp, Homo sapiens
ttgtcctctgagatc

SEQ ID NO: 658906 - DNA, 15 bp, Homo sapiens
tgtcctctgagatct

SEQ ID NO: 658907 - DNA, 15 bp, Homo sapiens
gtcctctgagatcta

SEQ ID NO: 658908 - DNA, 15 bp, Homo sapiens
tcctctgagatctac

SEQ ID NO: 658909 - DNA, 15 bp, Homo sapiens
cctctgagatctacc

SEQ ID NO: 658910 - DNA, 15 bp, Homo sapiens
ctctgagatctacct

SEQ ID NO: 658911 - DNA, 15 bp, Homo sapiens
tctgagatctaccta

SEQ ID NO: 658912 - DNA, 15 bp, Homo sapiens
ctgagatctacctaa

SEQ ID NO: 658913 - DNA, 15 bp, Homo sapiens
tgagatctacctaac

SEQ ID NO: 658914 - DNA, 15 bp, Homo sapiens
gagatctacctaacc

SEQ ID NO: 658915 - DNA, 15 bp, Homo sapiens
agatctacctaacca

SEQ ID NO: 658916 - DNA, 15 bp, Homo sapiens
gatctacctaaccac

SEQ ID NO: 658917 - DNA, 15 bp, Homo sapiens
atctacctaaccact

SEQ ID NO: 658918 - DNA, 15 bp, Homo sapiens
tctacctaaccactg

SEQ ID NO: 658919 - DNA, 15 bp, Homo sapiens
ctacctaaccactgt

SEQ ID NO: 658920 - DNA, 15 bp, Homo sapiens
tacctaaccactgtg

SEQ ID NO: 658921 - DNA, 15 bp, Homo sapiens
acctaaccactgtgt

SEQ ID NO: 658922 - DNA, 15 bp, Homo sapiens
cctaaccactgtgtt

SEQ ID NO: 658923 - DNA, 15 bp, Homo sapiens
ctaaccactgtgttt

SEQ ID NO: 658924 - DNA, 15 bp, Homo sapiens
taaccactgtgtttt

SEQ ID NO: 658925 - DNA, 15 bp, Homo sapiens
aaccactgtgttttc

SEQ ID NO: 658926 - DNA, 15 bp, Homo sapiens
accactgtgttttct

SEQ ID NO: 658927 - DNA, 15 bp, Homo sapiens
ccactgtgttttcta

SEQ ID NO: 658928 - DNA, 15 bp, Homo sapiens
cactgtgttttctat

SEQ ID NO: 658929 - DNA, 15 bp, Homo sapiens
actgtgttttctatt

SEQ ID NO: 658930 - DNA, 15 bp, Homo sapiens
ctgtgttttctattg

SEQ ID NO: 658931 - DNA, 15 bp, Homo sapiens
tgtgttttctattga

SEQ ID NO: 658932 - DNA, 15 bp, Homo sapiens
gtgttttctattgat

SEQ ID NO: 658933 - DNA, 15 bp, Homo sapiens
tgttttctattgatg

SEQ ID NO: 658934 - DNA, 15 bp, Homo sapiens
gttttctattgatgt

SEQ ID NO: 658935 - DNA, 15 bp, Homo sapiens
ttttctattgatgtt

SEQ ID NO: 658936 - DNA, 15 bp, Homo sapiens
tttctattgatgttc

SEQ ID NO: 658937 - DNA, 15 bp, Homo sapiens
ttctattgatgttct

SEQ ID NO: 658938 - DNA, 15 bp, Homo sapiens
tctattgatgttctg

SEQ ID NO: 658939 - DNA, 15 bp, Homo sapiens
ctattgatgttctga

SEQ ID NO: 658940 - DNA, 15 bp, Homo sapiens
tattgatgttctgat

SEQ ID NO: 658941 - DNA, 15 bp, Homo sapiens
attgatgttctgata

SEQ ID NO: 658942 - DNA, 15 bp, Homo sapiens
ttgatgttctgatac

SEQ ID NO: 658943 - DNA, 15 bp, Homo sapiens
tgatgttctgataca

SEQ ID NO: 658944 - DNA, 15 bp, Homo sapiens
gatgttctgatacag

SEQ ID NO: 658945 - DNA, 15 bp, Homo sapiens
atgttctgatacaga

SEQ ID NO: 658946 - DNA, 15 bp, Homo sapiens
tgttctgatacagaa

SEQ ID NO: 658947 - DNA, 15 bp, Homo sapiens
gttctgatacagaat

SEQ ID NO: 658948 - DNA, 15 bp, Homo sapiens
ttctgatacagaatg

SEQ ID NO: 658949 - DNA, 15 bp, Homo sapiens
tctgatacagaatgt

SEQ ID NO: 658950 - DNA, 15 bp, Homo sapiens
ctgatacagaatgta

SEQ ID NO: 658951 - DNA, 15 bp, Homo sapiens
tgatacagaatgtag

SEQ ID NO: 658952 - DNA, 15 bp, Homo sapiens
gatacagaatgtaga

SEQ ID NO: 658953 - DNA, 15 bp, Homo sapiens
atacagaatgtagaa

SEQ ID NO: 658954 - DNA, 15 bp, Homo sapiens
tacagaatgtagaaa

SEQ ID NO: 658955 - DNA, 15 bp, Homo sapiens
acagaatgtagaaaa

SEQ ID NO: 658956 - DNA, 15 bp, Homo sapiens
cagaatgtagaaaaa

SEQ ID NO: 658957 - DNA, 15 bp, Homo sapiens
agaatgtagaaaaat

SEQ ID NO: 658958 - DNA, 15 bp, Homo sapiens
gaatgtagaaaaatc

SEQ ID NO: 658959 - DNA, 15 bp, Homo sapiens
aatgtagaaaaatca

SEQ ID NO: 658960 - DNA, 15 bp, Homo sapiens
atgtagaaaaatcac

SEQ ID NO: 658961 - DNA, 15 bp, Homo sapiens
tgtagaaaaatcact

SEQ ID NO: 658962 - DNA, 15 bp, Homo sapiens
gtagaaaaatcactt

SEQ ID NO: 658963 - DNA, 15 bp, Homo sapiens
tagaaaaatcacttc

SEQ ID NO: 658964 - DNA, 15 bp, Homo sapiens
agaaaaatcacttct

SEQ ID NO: 658965 - DNA, 15 bp, Homo sapiens
gaaaaatcacttctt

SEQ ID NO: 658966 - DNA, 15 bp, Homo sapiens
aaaaatcacttcttc

SEQ ID NO: 658967 - DNA, 15 bp, Homo sapiens
aaaatcacttcttcc

SEQ ID NO: 658968 - DNA, 15 bp, Homo sapiens
aaatcacttcttcct

SEQ ID NO: 658969 - DNA, 15 bp, Homo sapiens
aatcacttcttcctg

SEQ ID NO: 658970 - DNA, 15 bp, Homo sapiens
atcacttcttcctgt

SEQ ID NO: 658971 - DNA, 15 bp, Homo sapiens
tcacttcttcctgtc

SEQ ID NO: 658972 - DNA, 15 bp, Homo sapiens
cacttcttcctgtcc

SEQ ID NO: 658973 - DNA, 15 bp, Homo sapiens
acttcttcctgtcca

SEQ ID NO: 658974 - DNA, 15 bp, Homo sapiens
cttcttcctgtccaa

SEQ ID NO: 658975 - DNA, 15 bp, Homo sapiens
ttcttcctgtccaat

SEQ ID NO: 658976 - DNA, 15 bp, Homo sapiens
tcttcctgtccaata

SEQ ID NO: 658977 - DNA, 15 bp, Homo sapiens
cttcctgtccaataa

SEQ ID NO: 658978 - DNA, 15 bp, Homo sapiens
ttcctgtccaataac

SEQ ID NO: 658979 - DNA, 15 bp, Homo sapiens
tcctgtccaataaca

SEQ ID NO: 658980 - DNA, 15 bp, Homo sapiens
cctgtccaataacat

SEQ ID NO: 658981 - DNA, 15 bp, Homo sapiens
ctgtccaataacatt

SEQ ID NO: 658982 - DNA, 15 bp, Homo sapiens
tgtccaataacattg

SEQ ID NO: 658983 - DNA, 15 bp, Homo sapiens
gtccaataacattga

SEQ ID NO: 658984 - DNA, 15 bp, Homo sapiens
tccaataacattgat

SEQ ID NO: 658985 - DNA, 15 bp, Homo sapiens
ccaataacattgatt

SEQ ID NO: 658986 - DNA, 15 bp, Homo sapiens
caataacattgattt

SEQ ID NO: 658987 - DNA, 15 bp, Homo sapiens
aataacattgattta

SEQ ID NO: 658988 - DNA, 15 bp, Homo sapiens
ataacattgatttaa

SEQ ID NO: 658989 - DNA, 15 bp, Homo sapiens
taacattgatttaat

SEQ ID NO: 658990 - DNA, 15 bp, Homo sapiens
aacattgatttaatt

SEQ ID NO: 658991 - DNA, 15 bp, Homo sapiens
acattgatttaattc

SEQ ID NO: 658992 - DNA, 15 bp, Homo sapiens
cattgatttaattca

SEQ ID NO: 658993 - DNA, 15 bp, Homo sapiens
attgatttaattcat

SEQ ID NO: 658994 - DNA, 15 bp, Homo sapiens
ttgatttaattcatg

SEQ ID NO: 658995 - DNA, 15 bp, Homo sapiens
tgatttaattcatgt

SEQ ID NO: 658996 - DNA, 15 bp, Homo sapiens
gatttaattcatgtt

SEQ ID NO: 658997 - DNA, 15 bp, Homo sapiens
atttaattcatgttc

SEQ ID NO: 658998 - DNA, 15 bp, Homo sapiens
tttaattcatgttca

SEQ ID NO: 658999 - DNA, 15 bp, Homo sapiens
ttaattcatgttcat

SEQ ID NO: 659000 - DNA, 15 bp, Homo sapiens
taattcatgttcatc

SEQ ID NO: 659001 - DNA, 15 bp, Homo sapiens
aattcatgttcatct

SEQ ID NO: 659002 - DNA, 15 bp, Homo sapiens
attcatgttcatctt

SEQ ID NO: 659003 - DNA, 15 bp, Homo sapiens
ttcatgttcatcttg

SEQ ID NO: 659004 - DNA, 15 bp, Homo sapiens
tcatgttcatcttga

SEQ ID NO: 659005 - DNA, 15 bp, Homo sapiens
catgttcatcttgat

SEQ ID NO: 659006 - DNA, 15 bp, Homo sapiens
atgttcatcttgatt

SEQ ID NO: 659007 - DNA, 15 bp, Homo sapiens
tgttcatcttgattc

SEQ ID NO: 659008 - DNA, 15 bp, Homo sapiens
gttcatcttgattca

SEQ ID NO: 659009 - DNA, 15 bp, Homo sapiens
ttcatcttgattcaa

SEQ ID NO: 659010 - DNA, 15 bp, Homo sapiens
tcatcttgattcaag

SEQ ID NO: 659011 - DNA, 15 bp, Homo sapiens
catcttgattcaagt

SEQ ID NO: 659012 - DNA, 15 bp, Homo sapiens
atcttgattcaagtt

SEQ ID NO: 659013 - DNA, 15 bp, Homo sapiens
tcttgattcaagttt

SEQ ID NO: 659014 - DNA, 15 bp, Homo sapiens
cttgattcaagtttt

SEQ ID NO: 659015 - DNA, 15 bp, Homo sapiens
ttgattcaagtttta

SEQ ID NO: 659016 - DNA, 15 bp, Homo sapiens
tgattcaagttttag

SEQ ID NO: 659017 - DNA, 15 bp, Homo sapiens
gattcaagttttagc

SEQ ID NO: 659018 - DNA, 15 bp, Homo sapiens
attcaagttttagct

SEQ ID NO: 659019 - DNA, 15 bp, Homo sapiens
ttcaagttttagctt

SEQ ID NO: 659020 - DNA, 15 bp, Homo sapiens
tcaagttttagctta

SEQ ID NO: 659021 - DNA, 15 bp, Homo sapiens
caagttttagcttat

SEQ ID NO: 659022 - DNA, 15 bp, Homo sapiens
aagttttagcttatg

SEQ ID NO: 659023 - DNA, 15 bp, Homo sapiens
agttttagcttatgt

SEQ ID NO: 659024 - DNA, 15 bp, Homo sapiens
gttttagcttatgtg

SEQ ID NO: 659025 - DNA, 15 bp, Homo sapiens
ttttagcttatgtgg

SEQ ID NO: 659026 - DNA, 15 bp, Homo sapiens
tttagcttatgtgga

SEQ ID NO: 659027 - DNA, 15 bp, Homo sapiens
ttagcttatgtggat

SEQ ID NO: 659028 - DNA, 15 bp, Homo sapiens
tagcttatgtggatg

SEQ ID NO: 659029 - DNA, 15 bp, Homo sapiens
agcttatgtggatgt

SEQ ID NO: 659030 - DNA, 15 bp, Homo sapiens
gcttatgtggatgtc

SEQ ID NO: 659031 - DNA, 15 bp, Homo sapiens
cttatgtggatgtcc

SEQ ID NO: 659032 - DNA, 15 bp, Homo sapiens
ttatgtggatgtcct

SEQ ID NO: 659033 - DNA, 15 bp, Homo sapiens
tatgtggatgtcctg

SEQ ID NO: 659034 - DNA, 15 bp, Homo sapiens
atgtggatgtcctga

SEQ ID NO: 659035 - DNA, 15 bp, Homo sapiens
tgtggatgtcctgaa

SEQ ID NO: 659036 - DNA, 15 bp, Homo sapiens
gtggatgtcctgaaa

SEQ ID NO: 659037 - DNA, 15 bp, Homo sapiens
tggatgtcctgaaaa

SEQ ID NO: 659038 - DNA, 15 bp, Homo sapiens
ggatgtcctgaaaat

SEQ ID NO: 659039 - DNA, 15 bp, Homo sapiens
gatgtcctgaaaatt

SEQ ID NO: 659040 - DNA, 15 bp, Homo sapiens
atgtcctgaaaatta

SEQ ID NO: 659041 - DNA, 15 bp, Homo sapiens
tgtcctgaaaattaa

SEQ ID NO: 659042 - DNA, 15 bp, Homo sapiens
gtcctgaaaattaat

SEQ ID NO: 659043 - DNA, 15 bp, Homo sapiens
tcctgaaaattaatt

SEQ ID NO: 659044 - DNA, 15 bp, Homo sapiens
cctgaaaattaattc

SEQ ID NO: 659045 - DNA, 15 bp, Homo sapiens
ctgaaaattaattca

SEQ ID NO: 659046 - DNA, 15 bp, Homo sapiens
tgaaaattaattcaa

SEQ ID NO: 659047 - DNA, 15 bp, Homo sapiens
gaaaattaattcaat

SEQ ID NO: 659048 - DNA, 15 bp, Homo sapiens
aaaattaattcaatc

SEQ ID NO: 659049 - DNA, 15 bp, Homo sapiens
aaattaattcaatct

SEQ ID NO: 659050 - DNA, 15 bp, Homo sapiens
aattaattcaatctc

SEQ ID NO: 659051 - DNA, 15 bp, Homo sapiens
attaattcaatctca

SEQ ID NO: 659052 - DNA, 15 bp, Homo sapiens
ttaattcaatctcaa

SEQ ID NO: 659053 - DNA, 15 bp, Homo sapiens
taattcaatctcaac

SEQ ID NO: 659054 - DNA, 15 bp, Homo sapiens
aattcaatctcaaca

SEQ ID NO: 659055 - DNA, 15 bp, Homo sapiens
attcaatctcaacaa

SEQ ID NO: 659056 - DNA, 15 bp, Homo sapiens
ttcaatctcaacaaa

SEQ ID NO: 659057 - DNA, 15 bp, Homo sapiens
tcaatctcaacaaaa

SEQ ID NO: 659058 - DNA, 15 bp, Homo sapiens
caatctcaacaaaat

SEQ ID NO: 659059 - DNA, 15 bp, Homo sapiens
aatctcaacaaaata

SEQ ID NO: 659060 - DNA, 15 bp, Homo sapiens
atctcaacaaaatat

SEQ ID NO: 659061 - DNA, 15 bp, Homo sapiens
tctcaacaaaatatc

SEQ ID NO: 659062 - DNA, 15 bp, Homo sapiens
ctcaacaaaatatct

SEQ ID NO: 659063 - DNA, 15 bp, Homo sapiens
tcaacaaaatatctg

SEQ ID NO: 659064 - DNA, 15 bp, Homo sapiens
caacaaaatatctgt

SEQ ID NO: 659065 - DNA, 15 bp, Homo sapiens
aacaaaatatctgtt

SEQ ID NO: 659066 - DNA, 15 bp, Homo sapiens
acaaaatatctgttc

SEQ ID NO: 659067 - DNA, 15 bp, Homo sapiens
caaaatatctgttct

SEQ ID NO: 659068 - DNA, 15 bp, Homo sapiens
aaaatatctgttctt

SEQ ID NO: 659069 - DNA, 15 bp, Homo sapiens
aaatatctgttcttc

SEQ ID NO: 659070 - DNA, 15 bp, Homo sapiens
aatatctgttcttct

SEQ ID NO: 659071 - DNA, 15 bp, Homo sapiens
atatctgttcttcta

SEQ ID NO: 659072 - DNA, 15 bp, Homo sapiens
tatctgttcttctaa

SEQ ID NO: 659073 - DNA, 15 bp, Homo sapiens
atctgttcttctaat

SEQ ID NO: 659074 - DNA, 15 bp, Homo sapiens
tctgttcttctaatt

SEQ ID NO: 659075 - DNA, 15 bp, Homo sapiens
ctgttcttctaattg

SEQ ID NO: 659076 - DNA, 15 bp, Homo sapiens
tgttcttctaattga

SEQ ID NO: 659077 - DNA, 15 bp, Homo sapiens
gttcttctaattgat

SEQ ID NO: 659078 - DNA, 15 bp, Homo sapiens
ttcttctaattgata

SEQ ID NO: 659079 - DNA, 15 bp, Homo sapiens
tcttctaattgatag

SEQ ID NO: 659080 - DNA, 15 bp, Homo sapiens
cttctaattgataga

SEQ ID NO: 659081 - DNA, 15 bp, Homo sapiens
ttctaattgatagat

SEQ ID NO: 659082 - DNA, 15 bp, Homo sapiens
tctaattgatagata

SEQ ID NO: 659083 - DNA, 15 bp, Homo sapiens
ctaattgatagatag

SEQ ID NO: 659084 - DNA, 15 bp, Homo sapiens
taattgatagatagg

SEQ ID NO: 659085 - DNA, 15 bp, Homo sapiens
aattgatagataggt

SEQ ID NO: 659086 - DNA, 15 bp, Homo sapiens
attgatagataggta

SEQ ID NO: 659087 - DNA, 15 bp, Homo sapiens
ttgatagataggtat

SEQ ID NO: 659088 - DNA, 15 bp, Homo sapiens
tgatagataggtatt

SEQ ID NO: 659089 - DNA, 15 bp, Homo sapiens
gatagataggtattt

SEQ ID NO: 659090 - DNA, 15 bp, Homo sapiens
atagataggtatttg

SEQ ID NO: 659091 - DNA, 15 bp, Homo sapiens
tagataggtatttgt

SEQ ID NO: 659092 - DNA, 15 bp, Homo sapiens
agataggtatttgta

SEQ ID NO: 659093 - DNA, 15 bp, Homo sapiens
gataggtatttgtaa

SEQ ID NO: 659094 - DNA, 15 bp, Homo sapiens
ataggtatttgtaaa

SEQ ID NO: 659095 - DNA, 15 bp, Homo sapiens
taggtatttgtaaat

SEQ ID NO: 659096 - DNA, 15 bp, Homo sapiens
aggtatttgtaaatc

SEQ ID NO: 659097 - DNA, 15 bp, Homo sapiens
ggtatttgtaaatct

SEQ ID NO: 659098 - DNA, 15 bp, Homo sapiens
gtatttgtaaatctt

SEQ ID NO: 659099 - DNA, 15 bp, Homo sapiens
tatttgtaaatcttc

SEQ ID NO: 659100 - DNA, 15 bp, Homo sapiens
atttgtaaatcttct

SEQ ID NO: 659101 - DNA, 15 bp, Homo sapiens
tttgtaaatcttctc

SEQ ID NO: 659102 - DNA, 15 bp, Homo sapiens
ttgtaaatcttctct

SEQ ID NO: 659103 - DNA, 15 bp, Homo sapiens
tgtaaatcttctcta

SEQ ID NO: 659104 - DNA, 15 bp, Homo sapiens
gtaaatcttctctac

SEQ ID NO: 659105 - DNA, 15 bp, Homo sapiens
taaatcttctctacc

SEQ ID NO: 659106 - DNA, 15 bp, Homo sapiens
aaatcttctctacct

SEQ ID NO: 659107 - DNA, 15 bp, Homo sapiens
aatcttctctaccta

SEQ ID NO: 659108 - DNA, 15 bp, Homo sapiens
atcttctctacctat

SEQ ID NO: 659109 - DNA, 15 bp, Homo sapiens
tcttctctacctatt

SEQ ID NO: 659110 - DNA, 15 bp, Homo sapiens
cttctctacctattt

SEQ ID NO: 659111 - DNA, 15 bp, Homo sapiens
ttctctacctatttt

SEQ ID NO: 659112 - DNA, 15 bp, Homo sapiens
tctctacctattttt

SEQ ID NO: 659113 - DNA, 15 bp, Homo sapiens
ctctacctatttttg

SEQ ID NO: 659114 - DNA, 15 bp, Homo sapiens
tctacctatttttga

SEQ ID NO: 659115 - DNA, 15 bp, Homo sapiens
ctacctatttttgaa

SEQ ID NO: 659116 - DNA, 15 bp, Homo sapiens
tacctatttttgaaa

SEQ ID NO: 659117 - DNA, 15 bp, Homo sapiens
acctatttttgaaaa

SEQ ID NO: 659118 - DNA, 15 bp, Homo sapiens
cctatttttgaaaat

SEQ ID NO: 659119 - DNA, 15 bp, Homo sapiens
ctatttttgaaaatt

SEQ ID NO: 659120 - DNA, 15 bp, Homo sapiens
tatttttgaaaattt

SEQ ID NO: 659121 - DNA, 15 bp, Homo sapiens
atttttgaaaatttt

SEQ ID NO: 659122 - DNA, 15 bp, Homo sapiens
tttttgaaaatttta

SEQ ID NO: 659123 - DNA, 15 bp, Homo sapiens
ttttgaaaattttag

SEQ ID NO: 659124 - DNA, 15 bp, Homo sapiens
tttgaaaattttagt

SEQ ID NO: 659125 - DNA, 15 bp, Homo sapiens
ttgaaaattttagta

SEQ ID NO: 659126 - DNA, 15 bp, Homo sapiens
tgaaaattttagtat

SEQ ID NO: 659127 - DNA, 15 bp, Homo sapiens
gaaaattttagtatg

SEQ ID NO: 659128 - DNA, 15 bp, Homo sapiens
aaaattttagtatgt

SEQ ID NO: 659129 - DNA, 15 bp, Homo sapiens
aaattttagtatgtt

SEQ ID NO: 659130 - DNA, 15 bp, Homo sapiens
aattttagtatgttc

SEQ ID NO: 659131 - DNA, 15 bp, Homo sapiens
attttagtatgttcc

SEQ ID NO: 659132 - DNA, 15 bp, Homo sapiens
ttttagtatgttcca

SEQ ID NO: 659133 - DNA, 15 bp, Homo sapiens
tttagtatgttccag

SEQ ID NO: 659134 - DNA, 15 bp, Homo sapiens
ttagtatgttccaga

SEQ ID NO: 659135 - DNA, 15 bp, Homo sapiens
tagtatgttccagaa

SEQ ID NO: 659136 - DNA, 15 bp, Homo sapiens
agtatgttccagaaa

SEQ ID NO: 659137 - DNA, 15 bp, Homo sapiens
gtatgttccagaaag

SEQ ID NO: 659138 - DNA, 15 bp, Homo sapiens
tatgttccagaaagc

SEQ ID NO: 659139 - DNA, 15 bp, Homo sapiens
atgttccagaaagca

SEQ ID NO: 659140 - DNA, 15 bp, Homo sapiens
tgttccagaaagcaa

SEQ ID NO: 659141 - DNA, 15 bp, Homo sapiens
gttccagaaagcaaa

SEQ ID NO: 659142 - DNA, 15 bp, Homo sapiens
ttccagaaagcaaag

SEQ ID NO: 659143 - DNA, 15 bp, Homo sapiens
tccagaaagcaaagc

SEQ ID NO: 659144 - DNA, 15 bp, Homo sapiens
ccagaaagcaaagca

SEQ ID NO: 659145 - DNA, 15 bp, Homo sapiens
cagaaagcaaagcaa

SEQ ID NO: 659146 - DNA, 15 bp, Homo sapiens
agaaagcaaagcaaa

SEQ ID NO: 659147 - DNA, 15 bp, Homo sapiens
gaaagcaaagcaaac

SEQ ID NO: 659148 - DNA, 15 bp, Homo sapiens
aaagcaaagcaaacc

SEQ ID NO: 659149 - DNA, 15 bp, Homo sapiens
aagcaaagcaaacct

SEQ ID NO: 659150 - DNA, 15 bp, Homo sapiens
agcaaagcaaaccta

SEQ ID NO: 659151 - DNA, 15 bp, Homo sapiens
gcaaagcaaacctaa

SEQ ID NO: 659152 - DNA, 15 bp, Homo sapiens
caaagcaaacctaaa

SEQ ID NO: 659153 - DNA, 15 bp, Homo sapiens
aaagcaaacctaaac

SEQ ID NO: 659154 - DNA, 15 bp, Homo sapiens
aagcaaacctaaaca

SEQ ID NO: 659155 - DNA, 15 bp, Homo sapiens
agcaaacctaaacac

SEQ ID NO: 659156 - DNA, 15 bp, Homo sapiens
gcaaacctaaacact

SEQ ID NO: 659157 - DNA, 15 bp, Homo sapiens
caaacctaaacacta

SEQ ID NO: 659158 - DNA, 15 bp, Homo sapiens
aaacctaaacactag

SEQ ID NO: 659159 - DNA, 15 bp, Homo sapiens
aacctaaacactagt

SEQ ID NO: 659160 - DNA, 15 bp, Homo sapiens
acctaaacactagta

SEQ ID NO: 659161 - DNA, 15 bp, Homo sapiens
cctaaacactagtaa

SEQ ID NO: 659162 - DNA, 15 bp, Homo sapiens
ctaaacactagtaaa

SEQ ID NO: 659163 - DNA, 15 bp, Homo sapiens
taaacactagtaaag

SEQ ID NO: 659164 - DNA, 15 bp, Homo sapiens
aaacactagtaaagc

SEQ ID NO: 659165 - DNA, 15 bp, Homo sapiens
aacactagtaaagct

SEQ ID NO: 659166 - DNA, 15 bp, Homo sapiens
acactagtaaagcta

SEQ ID NO: 659167 - DNA, 15 bp, Homo sapiens
cactagtaaagctaa

SEQ ID NO: 659168 - DNA, 15 bp, Homo sapiens
actagtaaagctaag

SEQ ID NO: 659169 - DNA, 15 bp, Homo sapiens
ctagtaaagctaagc

SEQ ID NO: 659170 - DNA, 15 bp, Homo sapiens
tagtaaagctaagct

SEQ ID NO: 659171 - DNA, 15 bp, Homo sapiens
agtaaagctaagcta

SEQ ID NO: 659172 - DNA, 15 bp, Homo sapiens
gtaaagctaagctaa

SEQ ID NO: 659173 - DNA, 15 bp, Homo sapiens
taaagctaagctaaa

SEQ ID NO: 659174 - DNA, 15 bp, Homo sapiens
aaagctaagctaaat

SEQ ID NO: 659175 - DNA, 15 bp, Homo sapiens
aagctaagctaaatt

SEQ ID NO: 659176 - DNA, 15 bp, Homo sapiens
agctaagctaaattc

SEQ ID NO: 659177 - DNA, 15 bp, Homo sapiens
gctaagctaaattct

SEQ ID NO: 659178 - DNA, 15 bp, Homo sapiens
ctaagctaaattctg

SEQ ID NO: 659179 - DNA, 15 bp, Homo sapiens
taagctaaattctgt

SEQ ID NO: 659180 - DNA, 15 bp, Homo sapiens
aagctaaattctgta

SEQ ID NO: 659181 - DNA, 15 bp, Homo sapiens
agctaaattctgtaa

SEQ ID NO: 659182 - DNA, 15 bp, Homo sapiens
gctaaattctgtaat

SEQ ID NO: 659183 - DNA, 15 bp, Homo sapiens
ctaaattctgtaatc

SEQ ID NO: 659184 - DNA, 15 bp, Homo sapiens
taaattctgtaatct

SEQ ID NO: 659185 - DNA, 15 bp, Homo sapiens
aaattctgtaatctt

SEQ ID NO: 659186 - DNA, 15 bp, Homo sapiens
aattctgtaatcttt

SEQ ID NO: 659187 - DNA, 15 bp, Homo sapiens
attctgtaatctttc

SEQ ID NO: 659188 - DNA, 15 bp, Homo sapiens
ttctgtaatctttct

SEQ ID NO: 659189 - DNA, 15 bp, Homo sapiens
tctgtaatctttcta

SEQ ID NO: 659190 - DNA, 15 bp, Homo sapiens
ctgtaatctttctaa

SEQ ID NO: 659191 - DNA, 15 bp, Homo sapiens
tgtaatctttctaaa

SEQ ID NO: 659192 - DNA, 15 bp, Homo sapiens
gtaatctttctaaat

SEQ ID NO: 659193 - DNA, 15 bp, Homo sapiens
taatctttctaaatt

SEQ ID NO: 659194 - DNA, 15 bp, Homo sapiens
aatctttctaaattg

SEQ ID NO: 659195 - DNA, 15 bp, Homo sapiens
atctttctaaattgg

SEQ ID NO: 659196 - DNA, 15 bp, Homo sapiens
tctttctaaattggt

SEQ ID NO: 659197 - DNA, 15 bp, Homo sapiens
ctttctaaattggta

SEQ ID NO: 659198 - DNA, 15 bp, Homo sapiens
tttctaaattggtaa

SEQ ID NO: 659199 - DNA, 15 bp, Homo sapiens
ttctaaattggtaaa

SEQ ID NO: 659200 - DNA, 15 bp, Homo sapiens
tctaaattggtaaaa

SEQ ID NO: 659201 - DNA, 15 bp, Homo sapiens
ctaaattggtaaaat

SEQ ID NO: 659202 - DNA, 15 bp, Homo sapiens
taaattggtaaaatt

SEQ ID NO: 659203 - DNA, 15 bp, Homo sapiens
aaattggtaaaattt

SEQ ID NO: 659204 - DNA, 15 bp, Homo sapiens
aattggtaaaatttc

SEQ ID NO: 659205 - DNA, 15 bp, Homo sapiens
attggtaaaatttct

SEQ ID NO: 659206 - DNA, 15 bp, Homo sapiens
ttggtaaaatttctc

SEQ ID NO: 659207 - DNA, 15 bp, Homo sapiens
tggtaaaatttctcc

SEQ ID NO: 659208 - DNA, 15 bp, Homo sapiens
ggtaaaatttctcct

SEQ ID NO: 659209 - DNA, 15 bp, Homo sapiens
gtaaaatttctcctt

SEQ ID NO: 659210 - DNA, 15 bp, Homo sapiens
taaaatttctccttc

SEQ ID NO: 659211 - DNA, 15 bp, Homo sapiens
aaaatttctccttca

SEQ ID NO: 659212 - DNA, 15 bp, Homo sapiens
aaatttctccttcag

SEQ ID NO: 659213 - DNA, 15 bp, Homo sapiens
aatttctccttcagt

SEQ ID NO: 659214 - DNA, 15 bp, Homo sapiens
atttctccttcagtt

SEQ ID NO: 659215 - DNA, 15 bp, Homo sapiens
tttctccttcagttc

SEQ ID NO: 659216 - DNA, 15 bp, Homo sapiens
ttctccttcagttca

SEQ ID NO: 659217 - DNA, 15 bp, Homo sapiens
tctccttcagttcag

SEQ ID NO: 659218 - DNA, 15 bp, Homo sapiens
ctccttcagttcagt

SEQ ID NO: 659219 - DNA, 15 bp, Homo sapiens
tccttcagttcagta

SEQ ID NO: 659220 - DNA, 15 bp, Homo sapiens
ccttcagttcagtaa

SEQ ID NO: 659221 - DNA, 15 bp, Homo sapiens
cttcagttcagtaaa

SEQ ID NO: 659222 - DNA, 15 bp, Homo sapiens
ttcagttcagtaaat

SEQ ID NO: 659223 - DNA, 15 bp, Homo sapiens
tcagttcagtaaatg

SEQ ID NO: 659224 - DNA, 15 bp, Homo sapiens
cagttcagtaaatgt

SEQ ID NO: 659225 - DNA, 15 bp, Homo sapiens
agttcagtaaatgta

SEQ ID NO: 659226 - DNA, 15 bp, Homo sapiens
gttcagtaaatgtaa

SEQ ID NO: 659227 - DNA, 15 bp, Homo sapiens
ttcagtaaatgtaaa

SEQ ID NO: 659228 - DNA, 15 bp, Homo sapiens
tcagtaaatgtaaag

SEQ ID NO: 659229 - DNA, 15 bp, Homo sapiens
cagtaaatgtaaagt

SEQ ID NO: 659230 - DNA, 15 bp, Homo sapiens
agtaaatgtaaagtt

SEQ ID NO: 659231 - DNA, 15 bp, Homo sapiens
gtaaatgtaaagttt

SEQ ID NO: 659232 - DNA, 15 bp, Homo sapiens
taaatgtaaagtttc

SEQ ID NO: 659233 - DNA, 15 bp, Homo sapiens
aaatgtaaagtttct

SEQ ID NO: 659234 - DNA, 15 bp, Homo sapiens
aatgtaaagtttctg

SEQ ID NO: 659235 - DNA, 15 bp, Homo sapiens
atgtaaagtttctgt

SEQ ID NO: 659236 - DNA, 15 bp, Homo sapiens
tgtaaagtttctgtg

SEQ ID NO: 659237 - DNA, 15 bp, Homo sapiens
gtaaagtttctgtgt

SEQ ID NO: 659238 - DNA, 15 bp, Homo sapiens
taaagtttctgtgtg

SEQ ID NO: 659239 - DNA, 15 bp, Homo sapiens
aaagtttctgtgtgg

SEQ ID NO: 659240 - DNA, 15 bp, Homo sapiens
aagtttctgtgtggt

SEQ ID NO: 659241 - DNA, 15 bp, Homo sapiens
agtttctgtgtggtc

SEQ ID NO: 659242 - DNA, 15 bp, Homo sapiens
gtttctgtgtggtct

SEQ ID NO: 659243 - DNA, 15 bp, Homo sapiens
tttctgtgtggtcta

SEQ ID NO: 659244 - DNA, 15 bp, Homo sapiens
ttctgtgtggtctat

SEQ ID NO: 659245 - DNA, 15 bp, Homo sapiens
tctgtgtggtctatt

SEQ ID NO: 659246 - DNA, 15 bp, Homo sapiens
ctgtgtggtctatta

SEQ ID NO: 659247 - DNA, 15 bp, Homo sapiens
tgtgtggtctattaa

SEQ ID NO: 659248 - DNA, 15 bp, Homo sapiens
gtgtggtctattaaa

SEQ ID NO: 659249 - DNA, 15 bp, Homo sapiens
tgtggtctattaaat

SEQ ID NO: 659250 - DNA, 15 bp, Homo sapiens
gtggtctattaaatg

SEQ ID NO: 659251 - DNA, 15 bp, Homo sapiens
tggtctattaaatgt

SEQ ID NO: 659252 - DNA, 15 bp, Homo sapiens
ggtctattaaatgtc

SEQ ID NO: 659253 - DNA, 15 bp, Homo sapiens
gtctattaaatgtct

SEQ ID NO: 659254 - DNA, 15 bp, Homo sapiens
tctattaaatgtcta

SEQ ID NO: 659255 - DNA, 15 bp, Homo sapiens
ctattaaatgtctat

SEQ ID NO: 659256 - DNA, 15 bp, Homo sapiens
tattaaatgtctatc

SEQ ID NO: 659257 - DNA, 15 bp, Homo sapiens
attaaatgtctatcc

SEQ ID NO: 659258 - DNA, 15 bp, Homo sapiens
ttaaatgtctatcca

SEQ ID NO: 659259 - DNA, 15 bp, Homo sapiens
taaatgtctatccat

SEQ ID NO: 659260 - DNA, 15 bp, Homo sapiens
aaatgtctatccatt

SEQ ID NO: 659261 - DNA, 15 bp, Homo sapiens
aatgtctatccattt

SEQ ID NO: 659262 - DNA, 15 bp, Homo sapiens
atgtctatccatttc

SEQ ID NO: 659263 - DNA, 15 bp, Homo sapiens
tgtctatccatttct

SEQ ID NO: 659264 - DNA, 15 bp, Homo sapiens
gtctatccatttcta

SEQ ID NO: 659265 - DNA, 15 bp, Homo sapiens
tctatccatttctag

SEQ ID NO: 659266 - DNA, 15 bp, Homo sapiens
ctatccatttctaga

SEQ ID NO: 659267 - DNA, 15 bp, Homo sapiens
tatccatttctagat

SEQ ID NO: 659268 - DNA, 15 bp, Homo sapiens
atccatttctagatt

SEQ ID NO: 659269 - DNA, 15 bp, Homo sapiens
tccatttctagattt

SEQ ID NO: 659270 - DNA, 15 bp, Homo sapiens
ccatttctagatttt

SEQ ID NO: 659271 - DNA, 15 bp, Homo sapiens
catttctagatttta

SEQ ID NO: 659272 - DNA, 15 bp, Homo sapiens
atttctagattttat

SEQ ID NO: 659273 - DNA, 15 bp, Homo sapiens
tttctagattttata

SEQ ID NO: 659274 - DNA, 15 bp, Homo sapiens
ttctagattttataa

SEQ ID NO: 659275 - DNA, 15 bp, Homo sapiens
tctagattttataag

SEQ ID NO: 659276 - DNA, 15 bp, Homo sapiens
ctagattttataagt

SEQ ID NO: 659277 - DNA, 15 bp, Homo sapiens
tagattttataagtt

SEQ ID NO: 659278 - DNA, 15 bp, Homo sapiens
agattttataagtta

SEQ ID NO: 659279 - DNA, 15 bp, Homo sapiens
gattttataagttag

SEQ ID NO: 659280 - DNA, 15 bp, Homo sapiens
attttataagttaga

SEQ ID NO: 659281 - DNA, 15 bp, Homo sapiens
ttttataagttagag

SEQ ID NO: 659282 - DNA, 15 bp, Homo sapiens
tttataagttagagt

SEQ ID NO: 659283 - DNA, 15 bp, Homo sapiens
ttataagttagagtt

SEQ ID NO: 659284 - DNA, 15 bp, Homo sapiens
tataagttagagttt

SEQ ID NO: 659285 - DNA, 15 bp, Homo sapiens
ataagttagagtttt

SEQ ID NO: 659286 - DNA, 15 bp, Homo sapiens
taagttagagtttta

SEQ ID NO: 659287 - DNA, 15 bp, Homo sapiens
aagttagagttttaa

SEQ ID NO: 659288 - DNA, 15 bp, Homo sapiens
agttagagttttaag

SEQ ID NO: 659289 - DNA, 15 bp, Homo sapiens
gttagagttttaagc

SEQ ID NO: 659290 - DNA, 15 bp, Homo sapiens
ttagagttttaagca

SEQ ID NO: 659291 - DNA, 15 bp, Homo sapiens
tagagttttaagcac

SEQ ID NO: 659292 - DNA, 15 bp, Homo sapiens
agagttttaagcaca

SEQ ID NO: 659293 - DNA, 15 bp, Homo sapiens
gagttttaagcacac

SEQ ID NO: 659294 - DNA, 15 bp, Homo sapiens
agttttaagcacacc

SEQ ID NO: 659295 - DNA, 15 bp, Homo sapiens
gttttaagcacacca

SEQ ID NO: 659296 - DNA, 15 bp, Homo sapiens
ttttaagcacaccaa

SEQ ID NO: 659297 - DNA, 15 bp, Homo sapiens
tttaagcacaccaaa

SEQ ID NO: 659298 - DNA, 15 bp, Homo sapiens
ttaagcacaccaaag

SEQ ID NO: 659299 - DNA, 15 bp, Homo sapiens
taagcacaccaaagt

SEQ ID NO: 659300 - DNA, 15 bp, Homo sapiens
aagcacaccaaagta

SEQ ID NO: 659301 - DNA, 15 bp, Homo sapiens
agcacaccaaagtac

SEQ ID NO: 659302 - DNA, 15 bp, Homo sapiens
gcacaccaaagtaca

SEQ ID NO: 659303 - DNA, 15 bp, Homo sapiens
cacaccaaagtacaa

SEQ ID NO: 659304 - DNA, 15 bp, Homo sapiens
acaccaaagtacaat

SEQ ID NO: 659305 - DNA, 15 bp, Homo sapiens
caccaaagtacaata

SEQ ID NO: 659306 - DNA, 15 bp, Homo sapiens
accaaagtacaatag

SEQ ID NO: 659307 - DNA, 15 bp, Homo sapiens
ccaaagtacaataga

SEQ ID NO: 659308 - DNA, 15 bp, Homo sapiens
caaagtacaatagaa

SEQ ID NO: 659309 - DNA, 15 bp, Homo sapiens
aaagtacaatagaaa

SEQ ID NO: 659310 - DNA, 15 bp, Homo sapiens
aagtacaatagaaag

SEQ ID NO: 659311 - DNA, 15 bp, Homo sapiens
agtacaatagaaagt

SEQ ID NO: 659312 - DNA, 15 bp, Homo sapiens
gtacaatagaaagta

SEQ ID NO: 659313 - DNA, 15 bp, Homo sapiens
tacaatagaaagtat

SEQ ID NO: 659314 - DNA, 15 bp, Homo sapiens
acaatagaaagtatt

SEQ ID NO: 659315 - DNA, 15 bp, Homo sapiens
caatagaaagtattc

SEQ ID NO: 659316 - DNA, 15 bp, Homo sapiens
aatagaaagtattca

SEQ ID NO: 659317 - DNA, 15 bp, Homo sapiens
atagaaagtattcac

SEQ ID NO: 659318 - DNA, 15 bp, Homo sapiens
tagaaagtattcacc

SEQ ID NO: 659319 - DNA, 15 bp, Homo sapiens
agaaagtattcacct

SEQ ID NO: 659320 - DNA, 15 bp, Homo sapiens
gaaagtattcacctt

SEQ ID NO: 659321 - DNA, 15 bp, Homo sapiens
aaagtattcaccttt

SEQ ID NO: 659322 - DNA, 15 bp, Homo sapiens
aagtattcacctttg

SEQ ID NO: 659323 - DNA, 15 bp, Homo sapiens
agtattcacctttgc

SEQ ID NO: 659324 - DNA, 15 bp, Homo sapiens
gtattcacctttgca

SEQ ID NO: 659325 - DNA, 15 bp, Homo sapiens
tattcacctttgcag

SEQ ID NO: 659326 - DNA, 15 bp, Homo sapiens
attcacctttgcagt

SEQ ID NO: 659327 - DNA, 15 bp, Homo sapiens
ttcacctttgcagta

SEQ ID NO: 659328 - DNA, 15 bp, Homo sapiens
tcacctttgcagtac

SEQ ID NO: 659329 - DNA, 15 bp, Homo sapiens
cacctttgcagtaca

SEQ ID NO: 659330 - DNA, 15 bp, Homo sapiens
acctttgcagtacag

SEQ ID NO: 659331 - DNA, 15 bp, Homo sapiens
cctttgcagtacaga

SEQ ID NO: 659332 - DNA, 15 bp, Homo sapiens
ctttgcagtacagac

SEQ ID NO: 659333 - DNA, 15 bp, Homo sapiens
tttgcagtacagacc

SEQ ID NO: 659334 - DNA, 15 bp, Homo sapiens
ttgcagtacagacct

SEQ ID NO: 659335 - DNA, 15 bp, Homo sapiens
tgcagtacagacctc

SEQ ID NO: 659336 - DNA, 15 bp, Homo sapiens
gcagtacagacctca

SEQ ID NO: 659337 - DNA, 15 bp, Homo sapiens
cagtacagacctcag

SEQ ID NO: 659338 - DNA, 15 bp, Homo sapiens
agtacagacctcagg

SEQ ID NO: 659339 - DNA, 15 bp, Homo sapiens
gtacagacctcaggt

SEQ ID NO: 659340 - DNA, 15 bp, Homo sapiens
tacagacctcaggta

SEQ ID NO: 659341 - DNA, 15 bp, Homo sapiens
acagacctcaggtaa

SEQ ID NO: 659342 - DNA, 15 bp, Homo sapiens
cagacctcaggtaac

SEQ ID NO: 659343 - DNA, 15 bp, Homo sapiens
agacctcaggtaact

SEQ ID NO: 659344 - DNA, 15 bp, Homo sapiens
gacctcaggtaactt

SEQ ID NO: 659345 - DNA, 15 bp, Homo sapiens
acctcaggtaacttt

SEQ ID NO: 659346 - DNA, 15 bp, Homo sapiens
cctcaggtaactttc

SEQ ID NO: 659347 - DNA, 15 bp, Homo sapiens
ctcaggtaactttct

SEQ ID NO: 659348 - DNA, 15 bp, Homo sapiens
tcaggtaactttctt

SEQ ID NO: 659349 - DNA, 15 bp, Homo sapiens
caggtaactttcttt

SEQ ID NO: 659350 - DNA, 15 bp, Homo sapiens
aggtaactttctttc

SEQ ID NO: 659351 - DNA, 15 bp, Homo sapiens
ggtaactttctttct

SEQ ID NO: 659352 - DNA, 15 bp, Homo sapiens
gtaactttctttcta

SEQ ID NO: 659353 - DNA, 15 bp, Homo sapiens
taactttctttctag

SEQ ID NO: 659354 - DNA, 15 bp, Homo sapiens
aactttctttctagg

SEQ ID NO: 659355 - DNA, 15 bp, Homo sapiens
actttctttctaggt

SEQ ID NO: 659356 - DNA, 15 bp, Homo sapiens
ctttctttctaggtc

SEQ ID NO: 659357 - DNA, 15 bp, Homo sapiens
tttctttctaggtcg

SEQ ID NO: 659358 - DNA, 15 bp, Homo sapiens
ttctttctaggtcgt

SEQ ID NO: 659359 - DNA, 15 bp, Homo sapiens
tctttctaggtcgtt

SEQ ID NO: 659360 - DNA, 15 bp, Homo sapiens
ctttctaggtcgttt

SEQ ID NO: 659361 - DNA, 15 bp, Homo sapiens
tttctaggtcgtttt

SEQ ID NO: 659362 - DNA, 15 bp, Homo sapiens
ttctaggtcgtttta

SEQ ID NO: 659363 - DNA, 15 bp, Homo sapiens
tctaggtcgttttaa

SEQ ID NO: 659364 - DNA, 15 bp, Homo sapiens
ctaggtcgttttaag

SEQ ID NO: 659365 - DNA, 15 bp, Homo sapiens
taggtcgttttaagt

SEQ ID NO: 659366 - DNA, 15 bp, Homo sapiens
aggtcgttttaagtg

SEQ ID NO: 659367 - DNA, 15 bp, Homo sapiens
ggtcgttttaagtgt

SEQ ID NO: 659368 - DNA, 15 bp, Homo sapiens
gtcgttttaagtgta

SEQ ID NO: 659369 - DNA, 15 bp, Homo sapiens
tcgttttaagtgtaa

SEQ ID NO: 659370 - DNA, 15 bp, Homo sapiens
cgttttaagtgtaac

SEQ ID NO: 659371 - DNA, 15 bp, Homo sapiens
gttttaagtgtaaca

SEQ ID NO: 659372 - DNA, 15 bp, Homo sapiens
ttttaagtgtaacat

SEQ ID NO: 659373 - DNA, 15 bp, Homo sapiens
tttaagtgtaacatt

SEQ ID NO: 659374 - DNA, 15 bp, Homo sapiens
ttaagtgtaacatta

SEQ ID NO: 659375 - DNA, 15 bp, Homo sapiens
taagtgtaacattat

SEQ ID NO: 659376 - DNA, 15 bp, Homo sapiens
aagtgtaacattatt

SEQ ID NO: 659377 - DNA, 15 bp, Homo sapiens
agtgtaacattattt

SEQ ID NO: 659378 - DNA, 15 bp, Homo sapiens
gtgtaacattatttt

SEQ ID NO: 659379 - DNA, 15 bp, Homo sapiens
tgtaacattattttt

SEQ ID NO: 659380 - DNA, 15 bp, Homo sapiens
gtaacattattttta

SEQ ID NO: 659381 - DNA, 15 bp, Homo sapiens
taacattatttttag

SEQ ID NO: 659382 - DNA, 15 bp, Homo sapiens
aacattatttttagt

SEQ ID NO: 659383 - DNA, 15 bp, Homo sapiens
acattatttttagtc

SEQ ID NO: 659384 - DNA, 15 bp, Homo sapiens
cattatttttagtct

SEQ ID NO: 659385 - DNA, 15 bp, Homo sapiens
attatttttagtctt

SEQ ID NO: 659386 - DNA, 15 bp, Homo sapiens
ttatttttagtcttt

SEQ ID NO: 659387 - DNA, 15 bp, Homo sapiens
tatttttagtcttta

SEQ ID NO: 659388 - DNA, 15 bp, Homo sapiens
atttttagtctttag

SEQ ID NO: 659389 - DNA, 15 bp, Homo sapiens
tttttagtctttagg

SEQ ID NO: 659390 - DNA, 15 bp, Homo sapiens
ttttagtctttagga

SEQ ID NO: 659391 - DNA, 15 bp, Homo sapiens
tttagtctttaggag

SEQ ID NO: 659392 - DNA, 15 bp, Homo sapiens
ttagtctttaggaga

SEQ ID NO: 659393 - DNA, 15 bp, Homo sapiens
tagtctttaggagaa

SEQ ID NO: 659394 - DNA, 15 bp, Homo sapiens
agtctttaggagaac

SEQ ID NO: 659395 - DNA, 15 bp, Homo sapiens
gtctttaggagaaca

SEQ ID NO: 659396 - DNA, 15 bp, Homo sapiens
tctttaggagaacaa

SEQ ID NO: 659397 - DNA, 15 bp, Homo sapiens
ctttaggagaacaaa

SEQ ID NO: 659398 - DNA, 15 bp, Homo sapiens
tttaggagaacaaag

SEQ ID NO: 659399 - DNA, 15 bp, Homo sapiens
ttaggagaacaaagc

SEQ ID NO: 659400 - DNA, 15 bp, Homo sapiens
taggagaacaaagct

SEQ ID NO: 659401 - DNA, 15 bp, Homo sapiens
aggagaacaaagcta

SEQ ID NO: 659402 - DNA, 15 bp, Homo sapiens
ggagaacaaagctat

SEQ ID NO: 659403 - DNA, 15 bp, Homo sapiens
gagaacaaagctata

SEQ ID NO: 659404 - DNA, 15 bp, Homo sapiens
agaacaaagctatag

SEQ ID NO: 659405 - DNA, 15 bp, Homo sapiens
gaacaaagctatagg

SEQ ID NO: 659406 - DNA, 15 bp, Homo sapiens
aacaaagctataggg

SEQ ID NO: 659407 - DNA, 15 bp, Homo sapiens
acaaagctatagggt

SEQ ID NO: 659408 - DNA, 15 bp, Homo sapiens
caaagctatagggtt

SEQ ID NO: 659409 - DNA, 15 bp, Homo sapiens
aaagctatagggttt

SEQ ID NO: 659410 - DNA, 15 bp, Homo sapiens
aagctatagggtttg

SEQ ID NO: 659411 - DNA, 15 bp, Homo sapiens
agctatagggtttgg

SEQ ID NO: 659412 - DNA, 15 bp, Homo sapiens
gctatagggtttgga

SEQ ID NO: 659413 - DNA, 15 bp, Homo sapiens
ctatagggtttggac

SEQ ID NO: 659414 - DNA, 15 bp, Homo sapiens
tatagggtttggaca

SEQ ID NO: 659415 - DNA, 15 bp, Homo sapiens
atagggtttggacag

SEQ ID NO: 659416 - DNA, 15 bp, Homo sapiens
tagggtttggacagt

SEQ ID NO: 659417 - DNA, 15 bp, Homo sapiens
agggtttggacagtt

SEQ ID NO: 659418 - DNA, 15 bp, Homo sapiens
gggtttggacagtta

SEQ ID NO: 659419 - DNA, 15 bp, Homo sapiens
ggtttggacagttac

SEQ ID NO: 659420 - DNA, 15 bp, Homo sapiens
gtttggacagttact

SEQ ID NO: 659421 - DNA, 15 bp, Homo sapiens
tttggacagttactg

SEQ ID NO: 659422 - DNA, 15 bp, Homo sapiens
ttggacagttactgg

SEQ ID NO: 659423 - DNA, 15 bp, Homo sapiens
tggacagttactggc

SEQ ID NO: 659424 - DNA, 15 bp, Homo sapiens
ggacagttactggct

SEQ ID NO: 659425 - DNA, 15 bp, Homo sapiens
gacagttactggctt

SEQ ID NO: 659426 - DNA, 15 bp, Homo sapiens
acagttactggcttc

SEQ ID NO: 659427 - DNA, 15 bp, Homo sapiens
cagttactggcttct

SEQ ID NO: 659428 - DNA, 15 bp, Homo sapiens
agttactggcttctg

SEQ ID NO: 659429 - DNA, 15 bp, Homo sapiens
gttactggcttctgt

SEQ ID NO: 659430 - DNA, 15 bp, Homo sapiens
ttactggcttctgtg

SEQ ID NO: 659431 - DNA, 15 bp, Homo sapiens
tactggcttctgtga

SEQ ID NO: 659432 - DNA, 15 bp, Homo sapiens
actggcttctgtgat

SEQ ID NO: 659433 - DNA, 15 bp, Homo sapiens
ctggcttctgtgatg

SEQ ID NO: 659434 - DNA, 15 bp, Homo sapiens
tggcttctgtgatgt

SEQ ID NO: 659435 - DNA, 15 bp, Homo sapiens
ggcttctgtgatgtc

SEQ ID NO: 659436 - DNA, 15 bp, Homo sapiens
gcttctgtgatgtca

SEQ ID NO: 659437 - DNA, 15 bp, Homo sapiens
cttctgtgatgtcat

SEQ ID NO: 659438 - DNA, 15 bp, Homo sapiens
ttctgtgatgtcata

SEQ ID NO: 659439 - DNA, 15 bp, Homo sapiens
tctgtgatgtcatat

SEQ ID NO: 659440 - DNA, 15 bp, Homo sapiens
ctgtgatgtcatatc

SEQ ID NO: 659441 - DNA, 15 bp, Homo sapiens
tgtgatgtcatatct

SEQ ID NO: 659442 - DNA, 15 bp, Homo sapiens
gtgatgtcatatctt

SEQ ID NO: 659443 - DNA, 15 bp, Homo sapiens
tgatgtcatatcttc

SEQ ID NO: 659444 - DNA, 15 bp, Homo sapiens
gatgtcatatcttcc

SEQ ID NO: 659445 - DNA, 15 bp, Homo sapiens
atgtcatatcttcca

SEQ ID NO: 659446 - DNA, 15 bp, Homo sapiens
tgtcatatcttccag

SEQ ID NO: 659447 - DNA, 15 bp, Homo sapiens
gtcatatcttccagc

SEQ ID NO: 659448 - DNA, 15 bp, Homo sapiens
tcatatcttccagct

SEQ ID NO: 659449 - DNA, 15 bp, Homo sapiens
catatcttccagcta

SEQ ID NO: 659450 - DNA, 15 bp, Homo sapiens
atatcttccagctat

SEQ ID NO: 659451 - DNA, 15 bp, Homo sapiens
tatcttccagctatt

SEQ ID NO: 659452 - DNA, 15 bp, Homo sapiens
atcttccagctattc

SEQ ID NO: 659453 - DNA, 15 bp, Homo sapiens
tcttccagctattct

SEQ ID NO: 659454 - DNA, 15 bp, Homo sapiens
cttccagctattctc

SEQ ID NO: 659455 - DNA, 15 bp, Homo sapiens
ttccagctattctct

SEQ ID NO: 659456 - DNA, 15 bp, Homo sapiens
tccagctattctctt

SEQ ID NO: 659457 - DNA, 15 bp, Homo sapiens
ccagctattctcttc

SEQ ID NO: 659458 - DNA, 15 bp, Homo sapiens
cagctattctcttct

SEQ ID NO: 659459 - DNA, 15 bp, Homo sapiens
agctattctcttcta

SEQ ID NO: 659460 - DNA, 15 bp, Homo sapiens
gctattctcttctat

SEQ ID NO: 659461 - DNA, 15 bp, Homo sapiens
ctattctcttctatt

SEQ ID NO: 659462 - DNA, 15 bp, Homo sapiens
tattctcttctattc

SEQ ID NO: 659463 - DNA, 15 bp, Homo sapiens
attctcttctattca

SEQ ID NO: 659464 - DNA, 15 bp, Homo sapiens
ttctcttctattcag

SEQ ID NO: 659465 - DNA, 15 bp, Homo sapiens
tctcttctattcaga

SEQ ID NO: 659466 - DNA, 15 bp, Homo sapiens
ctcttctattcagaa

SEQ ID NO: 659467 - DNA, 15 bp, Homo sapiens
tcttctattcagaat

SEQ ID NO: 659468 - DNA, 15 bp, Homo sapiens
cttctattcagaatg

SEQ ID NO: 659469 - DNA, 15 bp, Homo sapiens
ttctattcagaatgt

SEQ ID NO: 659470 - DNA, 15 bp, Homo sapiens
tctattcagaatgtc

SEQ ID NO: 659471 - DNA, 15 bp, Homo sapiens
ctattcagaatgtca

SEQ ID NO: 659472 - DNA, 15 bp, Homo sapiens
tattcagaatgtcag

SEQ ID NO: 659473 - DNA, 15 bp, Homo sapiens
attcagaatgtcagg

SEQ ID NO: 659474 - DNA, 15 bp, Homo sapiens
ttcagaatgtcagga

SEQ ID NO: 659475 - DNA, 15 bp, Homo sapiens
tcagaatgtcaggaa

SEQ ID NO: 659476 - DNA, 15 bp, Homo sapiens
cagaatgtcaggaat

SEQ ID NO: 659477 - DNA, 15 bp, Homo sapiens
agaatgtcaggaata

SEQ ID NO: 659478 - DNA, 15 bp, Homo sapiens
gaatgtcaggaatag

SEQ ID NO: 659479 - DNA, 15 bp, Homo sapiens
aatgtcaggaataga

SEQ ID NO: 659480 - DNA, 15 bp, Homo sapiens
atgtcaggaatagat

SEQ ID NO: 659481 - DNA, 15 bp, Homo sapiens
tgtcaggaatagatg

SEQ ID NO: 659482 - DNA, 15 bp, Homo sapiens
gtcaggaatagatgg

SEQ ID NO: 659483 - DNA, 15 bp, Homo sapiens
tcaggaatagatggc

SEQ ID NO: 659484 - DNA, 15 bp, Homo sapiens
caggaatagatggca

SEQ ID NO: 659485 - DNA, 15 bp, Homo sapiens
aggaatagatggcaa

SEQ ID NO: 659486 - DNA, 15 bp, Homo sapiens
ggaatagatggcaag

SEQ ID NO: 659487 - DNA, 15 bp, Homo sapiens
gaatagatggcaaga

SEQ ID NO: 659488 - DNA, 15 bp, Homo sapiens
aatagatggcaagaa

SEQ ID NO: 659489 - DNA, 15 bp, Homo sapiens
atagatggcaagaaa

SEQ ID NO: 659490 - DNA, 15 bp, Homo sapiens
tagatggcaagaaaa

SEQ ID NO: 659491 - DNA, 15 bp, Homo sapiens
agatggcaagaaaat

SEQ ID NO: 659492 - DNA, 15 bp, Homo sapiens
gatggcaagaaaatc

SEQ ID NO: 659493 - DNA, 15 bp, Homo sapiens
atggcaagaaaatcc

SEQ ID NO: 659494 - DNA, 15 bp, Homo sapiens
tggcaagaaaatccc

SEQ ID NO: 659495 - DNA, 15 bp, Homo sapiens
ggcaagaaaatcccc

SEQ ID NO: 659496 - DNA, 15 bp, Homo sapiens
gcaagaaaatcccct

SEQ ID NO: 659497 - DNA, 15 bp, Homo sapiens
caagaaaatcccctt

SEQ ID NO: 659498 - DNA, 15 bp, Homo sapiens
aagaaaatcccctta

SEQ ID NO: 659499 - DNA, 15 bp, Homo sapiens
agaaaatccccttat

SEQ ID NO: 659500 - DNA, 15 bp, Homo sapiens
gaaaatccccttatg

SEQ ID NO: 659501 - DNA, 15 bp, Homo sapiens
aaaatccccttatgt

SEQ ID NO: 659502 - DNA, 15 bp, Homo sapiens
aaatccccttatgtt

SEQ ID NO: 659503 - DNA, 15 bp, Homo sapiens
aatccccttatgtta

SEQ ID NO: 659504 - DNA, 15 bp, Homo sapiens
atccccttatgttag

SEQ ID NO: 659505 - DNA, 15 bp, Homo sapiens
tccccttatgttaga

SEQ ID NO: 659506 - DNA, 15 bp, Homo sapiens
ccccttatgttagac

SEQ ID NO: 659507 - DNA, 15 bp, Homo sapiens
cccttatgttagact

SEQ ID NO: 659508 - DNA, 15 bp, Homo sapiens
ccttatgttagactg

SEQ ID NO: 659509 - DNA, 15 bp, Homo sapiens
cttatgttagactgg

SEQ ID NO: 659510 - DNA, 15 bp, Homo sapiens
ttatgttagactggg

SEQ ID NO: 659511 - DNA, 15 bp, Homo sapiens
tatgttagactggga

SEQ ID NO: 659512 - DNA, 15 bp, Homo sapiens
atgttagactgggaa

SEQ ID NO: 659513 - DNA, 15 bp, Homo sapiens
tgttagactgggaat

SEQ ID NO: 659514 - DNA, 15 bp, Homo sapiens
gttagactgggaata

SEQ ID NO: 659515 - DNA, 15 bp, Homo sapiens
ttagactgggaatag

SEQ ID NO: 659516 - DNA, 15 bp, Homo sapiens
tagactgggaatagg

SEQ ID NO: 659517 - DNA, 15 bp, Homo sapiens
agactgggaataggg

SEQ ID NO: 659518 - DNA, 15 bp, Homo sapiens
gactgggaatagggg

SEQ ID NO: 659519 - DNA, 15 bp, Homo sapiens
actgggaataggggg

SEQ ID NO: 659520 - DNA, 15 bp, Homo sapiens
ctgggaataggggga

SEQ ID NO: 659521 - DNA, 15 bp, Homo sapiens
tgggaatagggggag

SEQ ID NO: 659522 - DNA, 15 bp, Homo sapiens
gggaatagggggagt

SEQ ID NO: 659523 - DNA, 15 bp, Homo sapiens
ggaatagggggagtc

SEQ ID NO: 659524 - DNA, 15 bp, Homo sapiens
gaatagggggagtca

SEQ ID NO: 659525 - DNA, 15 bp, Homo sapiens
aatagggggagtcaa

SEQ ID NO: 659526 - DNA, 15 bp, Homo sapiens
atagggggagtcaaa

SEQ ID NO: 659527 - DNA, 15 bp, Homo sapiens
tagggggagtcaaat

SEQ ID NO: 659528 - DNA, 15 bp, Homo sapiens
agggggagtcaaatg

SEQ ID NO: 659529 - DNA, 15 bp, Homo sapiens
gggggagtcaaatgt

SEQ ID NO: 659530 - DNA, 15 bp, Homo sapiens
ggggagtcaaatgtc

SEQ ID NO: 659531 - DNA, 15 bp, Homo sapiens
gggagtcaaatgtct

SEQ ID NO: 659532 - DNA, 15 bp, Homo sapiens
ggagtcaaatgtctt

SEQ ID NO: 659533 - DNA, 15 bp, Homo sapiens
gagtcaaatgtcttt

SEQ ID NO: 659534 - DNA, 15 bp, Homo sapiens
agtcaaatgtcttta

SEQ ID NO: 659535 - DNA, 15 bp, Homo sapiens
gtcaaatgtctttaa

SEQ ID NO: 659536 - DNA, 15 bp, Homo sapiens
tcaaatgtctttaat

SEQ ID NO: 659537 - DNA, 15 bp, Homo sapiens
caaatgtctttaatt

SEQ ID NO: 659538 - DNA, 15 bp, Homo sapiens
aaatgtctttaattt

SEQ ID NO: 659539 - DNA, 15 bp, Homo sapiens
aatgtctttaatttc

SEQ ID NO: 659540 - DNA, 15 bp, Homo sapiens
atgtctttaatttcg

SEQ ID NO: 659541 - DNA, 15 bp, Homo sapiens
tgtctttaatttcgt

SEQ ID NO: 659542 - DNA, 15 bp, Homo sapiens
gtctttaatttcgtt

SEQ ID NO: 659543 - DNA, 15 bp, Homo sapiens
tctttaatttcgttg

SEQ ID NO: 659544 - DNA, 15 bp, Homo sapiens
ctttaatttcgttgc

SEQ ID NO: 659545 - DNA, 15 bp, Homo sapiens
tttaatttcgttgcc

SEQ ID NO: 659546 - DNA, 15 bp, Homo sapiens
ttaatttcgttgccc

SEQ ID NO: 659547 - DNA, 15 bp, Homo sapiens
taatttcgttgccca

SEQ ID NO: 659548 - DNA, 15 bp, Homo sapiens
aatttcgttgcccaa

SEQ ID NO: 659549 - DNA, 15 bp, Homo sapiens
atttcgttgcccaag

SEQ ID NO: 659550 - DNA, 15 bp, Homo sapiens
tttcgttgcccaagc

SEQ ID NO: 659551 - DNA, 15 bp, Homo sapiens
ttcgttgcccaagcc

SEQ ID NO: 659552 - DNA, 15 bp, Homo sapiens
tcgttgcccaagcct

SEQ ID NO: 659553 - DNA, 15 bp, Homo sapiens
cgttgcccaagcctt

SEQ ID NO: 659554 - DNA, 15 bp, Homo sapiens
gttgcccaagccttc

SEQ ID NO: 659555 - DNA, 15 bp, Homo sapiens
ttgcccaagccttcc

SEQ ID NO: 659556 - DNA, 15 bp, Homo sapiens
tgcccaagccttcct

SEQ ID NO: 659557 - DNA, 15 bp, Homo sapiens
gcccaagccttcctt

SEQ ID NO: 659558 - DNA, 15 bp, Homo sapiens
cccaagccttccttt

SEQ ID NO: 659559 - DNA, 15 bp, Homo sapiens
ccaagccttccttta

SEQ ID NO: 659560 - DNA, 15 bp, Homo sapiens
caagccttcctttat

SEQ ID NO: 659561 - DNA, 15 bp, Homo sapiens
aagccttcctttata

SEQ ID NO: 659562 - DNA, 15 bp, Homo sapiens
agccttcctttatac

SEQ ID NO: 659563 - DNA, 15 bp, Homo sapiens
gccttcctttatact

SEQ ID NO: 659564 - DNA, 15 bp, Homo sapiens
ccttcctttatacta

SEQ ID NO: 659565 - DNA, 15 bp, Homo sapiens
cttcctttatactac

SEQ ID NO: 659566 - DNA, 15 bp, Homo sapiens
ttcctttatactaca

SEQ ID NO: 659567 - DNA, 15 bp, Homo sapiens
tcctttatactacat

SEQ ID NO: 659568 - DNA, 15 bp, Homo sapiens
cctttatactacatc

SEQ ID NO: 659569 - DNA, 15 bp, Homo sapiens
ctttatactacatct

SEQ ID NO: 659570 - DNA, 15 bp, Homo sapiens
tttatactacatctt

SEQ ID NO: 659571 - DNA, 15 bp, Homo sapiens
ttatactacatcttt

SEQ ID NO: 659572 - DNA, 15 bp, Homo sapiens
tatactacatctttc

SEQ ID NO: 659573 - DNA, 15 bp, Homo sapiens
atactacatctttca

SEQ ID NO: 659574 - DNA, 15 bp, Homo sapiens
tactacatctttcag

SEQ ID NO: 659575 - DNA, 15 bp, Homo sapiens
actacatctttcaga

SEQ ID NO: 659576 - DNA, 15 bp, Homo sapiens
ctacatctttcagaa

SEQ ID NO: 659577 - DNA, 15 bp, Homo sapiens
tacatctttcagaac

SEQ ID NO: 659578 - DNA, 15 bp, Homo sapiens
acatctttcagaaca

SEQ ID NO: 659579 - DNA, 15 bp, Homo sapiens
catctttcagaacac

SEQ ID NO: 659580 - DNA, 15 bp, Homo sapiens
atctttcagaacaca

SEQ ID NO: 659581 - DNA, 15 bp, Homo sapiens
tctttcagaacacaa

SEQ ID NO: 659582 - DNA, 15 bp, Homo sapiens
ctttcagaacacaaa

SEQ ID NO: 659583 - DNA, 15 bp, Homo sapiens
tttcagaacacaaaa

SEQ ID NO: 659584 - DNA, 15 bp, Homo sapiens
ttcagaacacaaaat

SEQ ID NO: 659585 - DNA, 15 bp, Homo sapiens
tcagaacacaaaatg

SEQ ID NO: 659586 - DNA, 15 bp, Homo sapiens
cagaacacaaaatgg

SEQ ID NO: 659587 - DNA, 15 bp, Homo sapiens
agaacacaaaatgga

SEQ ID NO: 659588 - DNA, 15 bp, Homo sapiens
gaacacaaaatggaa

SEQ ID NO: 659589 - DNA, 15 bp, Homo sapiens
aacacaaaatggaat

SEQ ID NO: 659590 - DNA, 15 bp, Homo sapiens
acacaaaatggaatg

SEQ ID NO: 659591 - DNA, 15 bp, Homo sapiens
cacaaaatggaatgt

SEQ ID NO: 659592 - DNA, 15 bp, Homo sapiens
acaaaatggaatgtc

SEQ ID NO: 659593 - DNA, 15 bp, Homo sapiens
caaaatggaatgtcc

SEQ ID NO: 659594 - DNA, 15 bp, Homo sapiens
aaaatggaatgtcct

SEQ ID NO: 659595 - DNA, 15 bp, Homo sapiens
aaatggaatgtcctt

SEQ ID NO: 659596 - DNA, 15 bp, Homo sapiens
aatggaatgtccttt

SEQ ID NO: 659597 - DNA, 15 bp, Homo sapiens
atggaatgtcctttt

SEQ ID NO: 659598 - DNA, 15 bp, Homo sapiens
tggaatgtcctttta

SEQ ID NO: 659599 - DNA, 15 bp, Homo sapiens
ggaatgtccttttat

SEQ ID NO: 659600 - DNA, 15 bp, Homo sapiens
gaatgtccttttatt

SEQ ID NO: 659601 - DNA, 15 bp, Homo sapiens
aatgtccttttatta

SEQ ID NO: 659602 - DNA, 15 bp, Homo sapiens
atgtccttttattaa

SEQ ID NO: 659603 - DNA, 15 bp, Homo sapiens
tgtccttttattaag

SEQ ID NO: 659604 - DNA, 15 bp, Homo sapiens
gtccttttattaagt

SEQ ID NO: 659605 - DNA, 15 bp, Homo sapiens
tccttttattaagtt

SEQ ID NO: 659606 - DNA, 15 bp, Homo sapiens
ccttttattaagttg

SEQ ID NO: 659607 - DNA, 15 bp, Homo sapiens
cttttattaagttgc

SEQ ID NO: 659608 - DNA, 15 bp, Homo sapiens
ttttattaagttgct

SEQ ID NO: 659609 - DNA, 15 bp, Homo sapiens
tttattaagttgctg

SEQ ID NO: 659610 - DNA, 15 bp, Homo sapiens
ttattaagttgctgt

SEQ ID NO: 659611 - DNA, 15 bp, Homo sapiens
tattaagttgctgtc

SEQ ID NO: 659612 - DNA, 15 bp, Homo sapiens
attaagttgctgtct

SEQ ID NO: 659613 - DNA, 15 bp, Homo sapiens
ttaagttgctgtctt

SEQ ID NO: 659614 - DNA, 15 bp, Homo sapiens
taagttgctgtcttt

SEQ ID NO: 659615 - DNA, 15 bp, Homo sapiens
aagttgctgtcttta

SEQ ID NO: 659616 - DNA, 15 bp, Homo sapiens
agttgctgtctttat

SEQ ID NO: 659617 - DNA, 15 bp, Homo sapiens
gttgctgtctttata

SEQ ID NO: 659618 - DNA, 15 bp, Homo sapiens
ttgctgtctttatac

SEQ ID NO: 659619 - DNA, 15 bp, Homo sapiens
tgctgtctttatact

SEQ ID NO: 659620 - DNA, 15 bp, Homo sapiens
gctgtctttatactt

SEQ ID NO: 659621 - DNA, 15 bp, Homo sapiens
ctgtctttatacttt

SEQ ID NO: 659622 - DNA, 15 bp, Homo sapiens
tgtctttatactttg

SEQ ID NO: 659623 - DNA, 15 bp, Homo sapiens
gtctttatactttgc

SEQ ID NO: 659624 - DNA, 15 bp, Homo sapiens
tctttatactttgca

SEQ ID NO: 659625 - DNA, 15 bp, Homo sapiens
ctttatactttgcac

SEQ ID NO: 659626 - DNA, 15 bp, Homo sapiens
tttatactttgcact

SEQ ID NO: 659627 - DNA, 15 bp, Homo sapiens
ttatactttgcactt

SEQ ID NO: 659628 - DNA, 15 bp, Homo sapiens
tatactttgcacttt

SEQ ID NO: 659629 - DNA, 15 bp, Homo sapiens
atactttgcactttg

SEQ ID NO: 659630 - DNA, 15 bp, Homo sapiens
tactttgcactttgg

SEQ ID NO: 659631 - DNA, 15 bp, Homo sapiens
actttgcactttggc

SEQ ID NO: 659632 - DNA, 15 bp, Homo sapiens
ctttgcactttggca

SEQ ID NO: 659633 - DNA, 15 bp, Homo sapiens
tttgcactttggcag

SEQ ID NO: 659634 - DNA, 15 bp, Homo sapiens
ttgcactttggcagc

SEQ ID NO: 659635 - DNA, 15 bp, Homo sapiens
tgcactttggcagca

SEQ ID NO: 659636 - DNA, 15 bp, Homo sapiens
gcactttggcagcat

SEQ ID NO: 659637 - DNA, 15 bp, Homo sapiens
cactttggcagcatg

SEQ ID NO: 659638 - DNA, 15 bp, Homo sapiens
actttggcagcatgg

SEQ ID NO: 659639 - DNA, 15 bp, Homo sapiens
ctttggcagcatggt

SEQ ID NO: 659640 - DNA, 15 bp, Homo sapiens
tttggcagcatggtt

SEQ ID NO: 659641 - DNA, 15 bp, Homo sapiens
ttggcagcatggttt

SEQ ID NO: 659642 - DNA, 15 bp, Homo sapiens
tggcagcatggtttg

SEQ ID NO: 659643 - DNA, 15 bp, Homo sapiens
ggcagcatggtttga

SEQ ID NO: 659644 - DNA, 15 bp, Homo sapiens
gcagcatggtttgaa

SEQ ID NO: 659645 - DNA, 15 bp, Homo sapiens
cagcatggtttgaag

SEQ ID NO: 659646 - DNA, 15 bp, Homo sapiens
agcatggtttgaagg

SEQ ID NO: 659647 - DNA, 15 bp, Homo sapiens
gcatggtttgaaggt

SEQ ID NO: 659648 - DNA, 15 bp, Homo sapiens
catggtttgaaggta

SEQ ID NO: 659649 - DNA, 15 bp, Homo sapiens
atggtttgaaggtat

SEQ ID NO: 659650 - DNA, 15 bp, Homo sapiens
tggtttgaaggtatc

SEQ ID NO: 659651 - DNA, 15 bp, Homo sapiens
ggtttgaaggtatct

SEQ ID NO: 659652 - DNA, 15 bp, Homo sapiens
gtttgaaggtatctc

SEQ ID NO: 659653 - DNA, 15 bp, Homo sapiens
tttgaaggtatctca

SEQ ID NO: 659654 - DNA, 15 bp, Homo sapiens
ttgaaggtatctcaa

SEQ ID NO: 659655 - DNA, 15 bp, Homo sapiens
tgaaggtatctcaag

SEQ ID NO: 659656 - DNA, 15 bp, Homo sapiens
gaaggtatctcaagc

SEQ ID NO: 659657 - DNA, 15 bp, Homo sapiens
aaggtatctcaagca

SEQ ID NO: 659658 - DNA, 15 bp, Homo sapiens
aggtatctcaagcag

SEQ ID NO: 659659 - DNA, 15 bp, Homo sapiens
ggtatctcaagcagg

SEQ ID NO: 659660 - DNA, 15 bp, Homo sapiens
gtatctcaagcaggg

SEQ ID NO: 659661 - DNA, 15 bp, Homo sapiens
tatctcaagcaggga

SEQ ID NO: 659662 - DNA, 15 bp, Homo sapiens
atctcaagcagggat

SEQ ID NO: 659663 - DNA, 15 bp, Homo sapiens
tctcaagcagggatt

SEQ ID NO: 659664 - DNA, 15 bp, Homo sapiens
ctcaagcagggattt

SEQ ID NO: 659665 - DNA, 15 bp, Homo sapiens
tcaagcagggatttt

SEQ ID NO: 659666 - DNA, 15 bp, Homo sapiens
caagcagggatttta

SEQ ID NO: 659667 - DNA, 15 bp, Homo sapiens
aagcagggattttaa

SEQ ID NO: 659668 - DNA, 15 bp, Homo sapiens
agcagggattttaaa

SEQ ID NO: 659669 - DNA, 15 bp, Homo sapiens
gcagggattttaaac

SEQ ID NO: 659670 - DNA, 15 bp, Homo sapiens
cagggattttaaact

SEQ ID NO: 659671 - DNA, 15 bp, Homo sapiens
agggattttaaactc

SEQ ID NO: 659672 - DNA, 15 bp, Homo sapiens
gggattttaaactca

SEQ ID NO: 659673 - DNA, 15 bp, Homo sapiens
ggattttaaactcaa

SEQ ID NO: 659674 - DNA, 15 bp, Homo sapiens
gattttaaactcaag

SEQ ID NO: 659675 - DNA, 15 bp, Homo sapiens
attttaaactcaaga

SEQ ID NO: 659676 - DNA, 15 bp, Homo sapiens
ttttaaactcaagat

SEQ ID NO: 659677 - DNA, 15 bp, Homo sapiens
tttaaactcaagatt

SEQ ID NO: 659678 - DNA, 15 bp, Homo sapiens
ttaaactcaagattt

SEQ ID NO: 659679 - DNA, 15 bp, Homo sapiens
taaactcaagattta

SEQ ID NO: 659680 - DNA, 15 bp, Homo sapiens
aaactcaagatttag

SEQ ID NO: 659681 - DNA, 15 bp, Homo sapiens
aactcaagatttagg

SEQ ID NO: 659682 - DNA, 15 bp, Homo sapiens
actcaagatttaggt

SEQ ID NO: 659683 - DNA, 15 bp, Homo sapiens
ctcaagatttaggtg

SEQ ID NO: 659684 - DNA, 15 bp, Homo sapiens
tcaagatttaggtgt

SEQ ID NO: 659685 - DNA, 15 bp, Homo sapiens
caagatttaggtgtg

SEQ ID NO: 659686 - DNA, 15 bp, Homo sapiens
aagatttaggtgtgt

SEQ ID NO: 659687 - DNA, 15 bp, Homo sapiens
agatttaggtgtgtt

SEQ ID NO: 659688 - DNA, 15 bp, Homo sapiens
gatttaggtgtgttt

SEQ ID NO: 659689 - DNA, 15 bp, Homo sapiens
atttaggtgtgtttt

SEQ ID NO: 659690 - DNA, 15 bp, Homo sapiens
tttaggtgtgttttc

SEQ ID NO: 659691 - DNA, 15 bp, Homo sapiens
ttaggtgtgttttca

SEQ ID NO: 659692 - DNA, 15 bp, Homo sapiens
taggtgtgttttcaa

SEQ ID NO: 659693 - DNA, 15 bp, Homo sapiens
aggtgtgttttcaat

SEQ ID NO: 659694 - DNA, 15 bp, Homo sapiens
ggtgtgttttcaata

SEQ ID NO: 659695 - DNA, 15 bp, Homo sapiens
gtgtgttttcaatat

SEQ ID NO: 659696 - DNA, 15 bp, Homo sapiens
tgtgttttcaatatt

SEQ ID NO: 659697 - DNA, 15 bp, Homo sapiens
gtgttttcaatattc

SEQ ID NO: 659698 - DNA, 15 bp, Homo sapiens
tgttttcaatattct

SEQ ID NO: 659699 - DNA, 15 bp, Homo sapiens
gttttcaatattcta

SEQ ID NO: 659700 - DNA, 15 bp, Homo sapiens
ttttcaatattctag

SEQ ID NO: 659701 - DNA, 15 bp, Homo sapiens
tttcaatattctagg

SEQ ID NO: 659702 - DNA, 15 bp, Homo sapiens
ttcaatattctaggc

SEQ ID NO: 659703 - DNA, 15 bp, Homo sapiens
tcaatattctaggct

SEQ ID NO: 659704 - DNA, 15 bp, Homo sapiens
caatattctaggctt

SEQ ID NO: 659705 - DNA, 15 bp, Homo sapiens
aatattctaggcttc

SEQ ID NO: 659706 - DNA, 15 bp, Homo sapiens
atattctaggcttca

SEQ ID NO: 659707 - DNA, 15 bp, Homo sapiens
tattctaggcttcag

SEQ ID NO: 659708 - DNA, 15 bp, Homo sapiens
attctaggcttcagt

SEQ ID NO: 659709 - DNA, 15 bp, Homo sapiens
ttctaggcttcagta

SEQ ID NO: 659710 - DNA, 15 bp, Homo sapiens
tctaggcttcagtaa

SEQ ID NO: 659711 - DNA, 15 bp, Homo sapiens
ctaggcttcagtaag

SEQ ID NO: 659712 - DNA, 15 bp, Homo sapiens
taggcttcagtaaga

SEQ ID NO: 659713 - DNA, 15 bp, Homo sapiens
aggcttcagtaagag

SEQ ID NO: 659714 - DNA, 15 bp, Homo sapiens
ggcttcagtaagagc

SEQ ID NO: 659715 - DNA, 15 bp, Homo sapiens
gcttcagtaagagca

SEQ ID NO: 659716 - DNA, 15 bp, Homo sapiens
cttcagtaagagcat

SEQ ID NO: 659717 - DNA, 15 bp, Homo sapiens
ttcagtaagagcatc

SEQ ID NO: 659718 - DNA, 15 bp, Homo sapiens
tcagtaagagcatct

SEQ ID NO: 659719 - DNA, 15 bp, Homo sapiens
cagtaagagcatctc

SEQ ID NO: 659720 - DNA, 15 bp, Homo sapiens
agtaagagcatctct

SEQ ID NO: 659721 - DNA, 15 bp, Homo sapiens
gtaagagcatctcta

SEQ ID NO: 659722 - DNA, 15 bp, Homo sapiens
taagagcatctctaa

SEQ ID NO: 659723 - DNA, 15 bp, Homo sapiens
aagagcatctctaat

SEQ ID NO: 659724 - DNA, 15 bp, Homo sapiens
agagcatctctaatt

SEQ ID NO: 659725 - DNA, 15 bp, Homo sapiens
gagcatctctaattt

SEQ ID NO: 659726 - DNA, 15 bp, Homo sapiens
agcatctctaatttt

SEQ ID NO: 659727 - DNA, 15 bp, Homo sapiens
gcatctctaattttg

SEQ ID NO: 659728 - DNA, 15 bp, Homo sapiens
catctctaattttga

SEQ ID NO: 659729 - DNA, 15 bp, Homo sapiens
atctctaattttgat

SEQ ID NO: 659730 - DNA, 15 bp, Homo sapiens
tctctaattttgatc

SEQ ID NO: 659731 - DNA, 15 bp, Homo sapiens
ctctaattttgatcc

SEQ ID NO: 659732 - DNA, 15 bp, Homo sapiens
tctaattttgatcct

SEQ ID NO: 659733 - DNA, 15 bp, Homo sapiens
ctaattttgatcctc

SEQ ID NO: 659734 - DNA, 15 bp, Homo sapiens
taattttgatcctcc

SEQ ID NO: 659735 - DNA, 15 bp, Homo sapiens
aattttgatcctccc

SEQ ID NO: 659736 - DNA, 15 bp, Homo sapiens
attttgatcctccca

SEQ ID NO: 659737 - DNA, 15 bp, Homo sapiens
ttttgatcctcccat

SEQ ID NO: 659738 - DNA, 15 bp, Homo sapiens
tttgatcctcccatc

SEQ ID NO: 659739 - DNA, 15 bp, Homo sapiens
ttgatcctcccatcc

SEQ ID NO: 659740 - DNA, 15 bp, Homo sapiens
tgatcctcccatcca

SEQ ID NO: 659741 - DNA, 15 bp, Homo sapiens
gatcctcccatccac

SEQ ID NO: 659742 - DNA, 15 bp, Homo sapiens
atcctcccatccaca

SEQ ID NO: 659743 - DNA, 15 bp, Homo sapiens
tcctcccatccacag

SEQ ID NO: 659744 - DNA, 15 bp, Homo sapiens
cctcccatccacagg

SEQ ID NO: 659745 - DNA, 15 bp, Homo sapiens
ctcccatccacagga

SEQ ID NO: 659746 - DNA, 15 bp, Homo sapiens
tcccatccacaggac

SEQ ID NO: 659747 - DNA, 15 bp, Homo sapiens
cccatccacaggaca

SEQ ID NO: 659748 - DNA, 15 bp, Homo sapiens
ccatccacaggacaa

SEQ ID NO: 659749 - DNA, 15 bp, Homo sapiens
catccacaggacaac

SEQ ID NO: 659750 - DNA, 15 bp, Homo sapiens
atccacaggacaact

SEQ ID NO: 659751 - DNA, 15 bp, Homo sapiens
tccacaggacaactt

SEQ ID NO: 659752 - DNA, 15 bp, Homo sapiens
ccacaggacaacttc

SEQ ID NO: 659753 - DNA, 15 bp, Homo sapiens
cacaggacaacttcc

SEQ ID NO: 659754 - DNA, 15 bp, Homo sapiens
acaggacaacttcca

SEQ ID NO: 659755 - DNA, 15 bp, Homo sapiens
caggacaacttccag

SEQ ID NO: 659756 - DNA, 15 bp, Homo sapiens
aggacaacttccagg

SEQ ID NO: 659757 - DNA, 15 bp, Homo sapiens
ggacaacttccaggg

SEQ ID NO: 659758 - DNA, 15 bp, Homo sapiens
gacaacttccagggg

SEQ ID NO: 659759 - DNA, 15 bp, Homo sapiens
acaacttccagggga

SEQ ID NO: 659760 - DNA, 15 bp, Homo sapiens
caacttccaggggaa

SEQ ID NO: 659761 - DNA, 15 bp, Homo sapiens
aacttccaggggaag

SEQ ID NO: 659762 - DNA, 15 bp, Homo sapiens
acttccaggggaaga

SEQ ID NO: 659763 - DNA, 15 bp, Homo sapiens
cttccaggggaagat

SEQ ID NO: 659764 - DNA, 15 bp, Homo sapiens
ttccaggggaagatt

SEQ ID NO: 659765 - DNA, 15 bp, Homo sapiens
tccaggggaagattg

SEQ ID NO: 659766 - DNA, 15 bp, Homo sapiens
ccaggggaagattga

SEQ ID NO: 659767 - DNA, 15 bp, Homo sapiens
caggggaagattgat

SEQ ID NO: 659768 - DNA, 15 bp, Homo sapiens
aggggaagattgatt

SEQ ID NO: 659769 - DNA, 15 bp, Homo sapiens
ggggaagattgattt

SEQ ID NO: 659770 - DNA, 15 bp, Homo sapiens
gggaagattgatttt

SEQ ID NO: 659771 - DNA, 15 bp, Homo sapiens
ggaagattgattttg

SEQ ID NO: 659772 - DNA, 15 bp, Homo sapiens
gaagattgattttgt

SEQ ID NO: 659773 - DNA, 15 bp, Homo sapiens
aagattgattttgtt

SEQ ID NO: 659774 - DNA, 15 bp, Homo sapiens
agattgattttgttg

SEQ ID NO: 659775 - DNA, 15 bp, Homo sapiens
gattgattttgttga

SEQ ID NO: 659776 - DNA, 15 bp, Homo sapiens
attgattttgttgat

SEQ ID NO: 659777 - DNA, 15 bp, Homo sapiens
ttgattttgttgatt

SEQ ID NO: 659778 - DNA, 15 bp, Homo sapiens
tgattttgttgattg

SEQ ID NO: 659779 - DNA, 15 bp, Homo sapiens
gattttgttgattgt

SEQ ID NO: 659780 - DNA, 15 bp, Homo sapiens
attttgttgattgta

SEQ ID NO: 659781 - DNA, 15 bp, Homo sapiens
ttttgttgattgtaa

SEQ ID NO: 659782 - DNA, 15 bp, Homo sapiens
tttgttgattgtaaa

SEQ ID NO: 659783 - DNA, 15 bp, Homo sapiens
ttgttgattgtaaat

SEQ ID NO: 659784 - DNA, 15 bp, Homo sapiens
tgttgattgtaaatt

SEQ ID NO: 659785 - DNA, 15 bp, Homo sapiens
gttgattgtaaattt

SEQ ID NO: 659786 - DNA, 15 bp, Homo sapiens
ttgattgtaaattta

SEQ ID NO: 659787 - DNA, 15 bp, Homo sapiens
tgattgtaaatttac

SEQ ID NO: 659788 - DNA, 15 bp, Homo sapiens
gattgtaaatttaca

SEQ ID NO: 659789 - DNA, 15 bp, Homo sapiens
attgtaaatttacat

SEQ ID NO: 659790 - DNA, 15 bp, Homo sapiens
ttgtaaatttacata

SEQ ID NO: 659791 - DNA, 15 bp, Homo sapiens
tgtaaatttacatat

SEQ ID NO: 659792 - DNA, 15 bp, Homo sapiens
gtaaatttacatatc

SEQ ID NO: 659793 - DNA, 15 bp, Homo sapiens
taaatttacatatcc

SEQ ID NO: 659794 - DNA, 15 bp, Homo sapiens
aaatttacatatcct

SEQ ID NO: 659795 - DNA, 15 bp, Homo sapiens
aatttacatatcctt

SEQ ID NO: 659796 - DNA, 15 bp, Homo sapiens
atttacatatccttc

SEQ ID NO: 659797 - DNA, 15 bp, Homo sapiens
tttacatatccttct

SEQ ID NO: 659798 - DNA, 15 bp, Homo sapiens
ttacatatccttctc

SEQ ID NO: 659799 - DNA, 15 bp, Homo sapiens
tacatatccttctcg

SEQ ID NO: 659800 - DNA, 15 bp, Homo sapiens
acatatccttctcga

SEQ ID NO: 659801 - DNA, 15 bp, Homo sapiens
catatccttctcgac

SEQ ID NO: 659802 - DNA, 15 bp, Homo sapiens
atatccttctcgacc

SEQ ID NO: 659803 - DNA, 15 bp, Homo sapiens
tatccttctcgacct

SEQ ID NO: 659804 - DNA, 15 bp, Homo sapiens
atccttctcgacctg

SEQ ID NO: 659805 - DNA, 15 bp, Homo sapiens
tccttctcgacctga

SEQ ID NO: 659806 - DNA, 15 bp, Homo sapiens
ccttctcgacctgac

SEQ ID NO: 659807 - DNA, 15 bp, Homo sapiens
cttctcgacctgact

SEQ ID NO: 659808 - DNA, 15 bp, Homo sapiens
ttctcgacctgactc

SEQ ID NO: 659809 - DNA, 15 bp, Homo sapiens
tctcgacctgactcg

SEQ ID NO: 659810 - DNA, 15 bp, Homo sapiens
ctcgacctgactcgc

SEQ ID NO: 659811 - DNA, 15 bp, Homo sapiens
tcgacctgactcgca

SEQ ID NO: 659812 - DNA, 15 bp, Homo sapiens
cgacctgactcgcaa

SEQ ID NO: 659813 - DNA, 15 bp, Homo sapiens
gacctgactcgcaag

SEQ ID NO: 659814 - DNA, 15 bp, Homo sapiens
acctgactcgcaagt

SEQ ID NO: 659815 - DNA, 15 bp, Homo sapiens
cctgactcgcaagtt

SEQ ID NO: 659816 - DNA, 15 bp, Homo sapiens
ctgactcgcaagttc

SEQ ID NO: 659817 - DNA, 15 bp, Homo sapiens
tgactcgcaagttct

SEQ ID NO: 659818 - DNA, 15 bp, Homo sapiens
gactcgcaagttctg

SEQ ID NO: 659819 - DNA, 15 bp, Homo sapiens
actcgcaagttctga

SEQ ID NO: 659820 - DNA, 15 bp, Homo sapiens
ctcgcaagttctgaa

SEQ ID NO: 659821 - DNA, 15 bp, Homo sapiens
tcgcaagttctgaat

SEQ ID NO: 659822 - DNA, 15 bp, Homo sapiens
cgcaagttctgaatg

SEQ ID NO: 659823 - DNA, 15 bp, Homo sapiens
gcaagttctgaatgg

SEQ ID NO: 659824 - DNA, 15 bp, Homo sapiens
caagttctgaatggt

SEQ ID NO: 659825 - DNA, 15 bp, Homo sapiens
aagttctgaatggtc

SEQ ID NO: 659826 - DNA, 15 bp, Homo sapiens
agttctgaatggtct

SEQ ID NO: 659827 - DNA, 15 bp, Homo sapiens
gttctgaatggtctc

SEQ ID NO: 659828 - DNA, 15 bp, Homo sapiens
ttctgaatggtctct

SEQ ID NO: 659829 - DNA, 15 bp, Homo sapiens
tctgaatggtctctc

SEQ ID NO: 659830 - DNA, 15 bp, Homo sapiens
ctgaatggtctctca

SEQ ID NO: 659831 - DNA, 15 bp, Homo sapiens
tgaatggtctctcag

SEQ ID NO: 659832 - DNA, 15 bp, Homo sapiens
gaatggtctctcagt

SEQ ID NO: 659833 - DNA, 15 bp, Homo sapiens
aatggtctctcagtg

SEQ ID NO: 659834 - DNA, 15 bp, Homo sapiens
atggtctctcagtgt

SEQ ID NO: 659835 - DNA, 15 bp, Homo sapiens
tggtctctcagtgtc

SEQ ID NO: 659836 - DNA, 15 bp, Homo sapiens
ggtctctcagtgtcg

SEQ ID NO: 659837 - DNA, 15 bp, Homo sapiens
gtctctcagtgtcga

SEQ ID NO: 659838 - DNA, 15 bp, Homo sapiens
tctctcagtgtcgat

SEQ ID NO: 659839 - DNA, 15 bp, Homo sapiens
ctctcagtgtcgatt

SEQ ID NO: 659840 - DNA, 15 bp, Homo sapiens
tctcagtgtcgatta

SEQ ID NO: 659841 - DNA, 15 bp, Homo sapiens
ctcagtgtcgattag

SEQ ID NO: 659842 - DNA, 15 bp, Homo sapiens
tcagtgtcgattagt

SEQ ID NO: 659843 - DNA, 15 bp, Homo sapiens
cagtgtcgattagtc

SEQ ID NO: 659844 - DNA, 15 bp, Homo sapiens
agtgtcgattagtcc

SEQ ID NO: 659845 - DNA, 15 bp, Homo sapiens
gtgtcgattagtcca

SEQ ID NO: 659846 - DNA, 15 bp, Homo sapiens
tgtcgattagtccag

SEQ ID NO: 659847 - DNA, 15 bp, Homo sapiens
gtcgattagtccagg

SEQ ID NO: 659848 - DNA, 15 bp, Homo sapiens
tcgattagtccaggg

SEQ ID NO: 659849 - DNA, 15 bp, Homo sapiens
cgattagtccagggc

SEQ ID NO: 659850 - DNA, 15 bp, Homo sapiens
gattagtccagggca

SEQ ID NO: 659851 - DNA, 15 bp, Homo sapiens
attagtccagggcag

SEQ ID NO: 659852 - DNA, 15 bp, Homo sapiens
ttagtccagggcaga

SEQ ID NO: 659853 - DNA, 15 bp, Homo sapiens
tagtccagggcagac

SEQ ID NO: 659854 - DNA, 15 bp, Homo sapiens
agtccagggcagaca

SEQ ID NO: 659855 - DNA, 15 bp, Homo sapiens
gtccagggcagacac

SEQ ID NO: 659856 - DNA, 15 bp, Homo sapiens
tccagggcagacact

SEQ ID NO: 659857 - DNA, 15 bp, Homo sapiens
ccagggcagacactg

SEQ ID NO: 659858 - DNA, 15 bp, Homo sapiens
cagggcagacactgg

SEQ ID NO: 659859 - DNA, 15 bp, Homo sapiens
agggcagacactggc

SEQ ID NO: 659860 - DNA, 15 bp, Homo sapiens
gggcagacactggcg

SEQ ID NO: 659861 - DNA, 15 bp, Homo sapiens
ggcagacactggcgt

SEQ ID NO: 659862 - DNA, 15 bp, Homo sapiens
gcagacactggcgtt

SEQ ID NO: 659863 - DNA, 15 bp, Homo sapiens
cagacactggcgttt

SEQ ID NO: 659864 - DNA, 15 bp, Homo sapiens
agacactggcgtttg

SEQ ID NO: 659865 - DNA, 15 bp, Homo sapiens
gacactggcgtttgt

SEQ ID NO: 659866 - DNA, 15 bp, Homo sapiens
acactggcgtttgtt

SEQ ID NO: 659867 - DNA, 15 bp, Homo sapiens
cactggcgtttgttg

SEQ ID NO: 659868 - DNA, 15 bp, Homo sapiens
actggcgtttgttgg

SEQ ID NO: 659869 - DNA, 15 bp, Homo sapiens
ctggcgtttgttggg

SEQ ID NO: 659870 - DNA, 15 bp, Homo sapiens
tggcgtttgttggga

SEQ ID NO: 659871 - DNA, 15 bp, Homo sapiens
ggcgtttgttgggag

SEQ ID NO: 659872 - DNA, 15 bp, Homo sapiens
gcgtttgttgggagc

SEQ ID NO: 659873 - DNA, 15 bp, Homo sapiens
cgtttgttgggagca

SEQ ID NO: 659874 - DNA, 15 bp, Homo sapiens
gtttgttgggagcag

SEQ ID NO: 659875 - DNA, 15 bp, Homo sapiens
tttgttgggagcagt

SEQ ID NO: 659876 - DNA, 15 bp, Homo sapiens
ttgttgggagcagtg

SEQ ID NO: 659877 - DNA, 15 bp, Homo sapiens
tgttgggagcagtgg

SEQ ID NO: 659878 - DNA, 15 bp, Homo sapiens
gttgggagcagtgga

SEQ ID NO: 659879 - DNA, 15 bp, Homo sapiens
ttgggagcagtggat

SEQ ID NO: 659880 - DNA, 15 bp, Homo sapiens
tgggagcagtggatg

SEQ ID NO: 659881 - DNA, 15 bp, Homo sapiens
gggagcagtggatgt

SEQ ID NO: 659882 - DNA, 15 bp, Homo sapiens
ggagcagtggatgtg

SEQ ID NO: 659883 - DNA, 15 bp, Homo sapiens
gagcagtggatgtgg

SEQ ID NO: 659884 - DNA, 15 bp, Homo sapiens
agcagtggatgtggc

SEQ ID NO: 659885 - DNA, 15 bp, Homo sapiens
gcagtggatgtggca

SEQ ID NO: 659886 - DNA, 15 bp, Homo sapiens
cagtggatgtggcaa

SEQ ID NO: 659887 - DNA, 15 bp, Homo sapiens
agtggatgtggcaaa

SEQ ID NO: 659888 - DNA, 15 bp, Homo sapiens
gtggatgtggcaaaa

SEQ ID NO: 659889 - DNA, 15 bp, Homo sapiens
tggatgtggcaaaag

SEQ ID NO: 659890 - DNA, 15 bp, Homo sapiens
ggatgtggcaaaagc

SEQ ID NO: 659891 - DNA, 15 bp, Homo sapiens
gatgtggcaaaagca

SEQ ID NO: 659892 - DNA, 15 bp, Homo sapiens
atgtggcaaaagcac

SEQ ID NO: 659893 - DNA, 15 bp, Homo sapiens
tgtggcaaaagcact

SEQ ID NO: 659894 - DNA, 15 bp, Homo sapiens
gtggcaaaagcacta

SEQ ID NO: 659895 - DNA, 15 bp, Homo sapiens
tggcaaaagcactag

SEQ ID NO: 659896 - DNA, 15 bp, Homo sapiens
ggcaaaagcactagc

SEQ ID NO: 659897 - DNA, 15 bp, Homo sapiens
gcaaaagcactagca

SEQ ID NO: 659898 - DNA, 15 bp, Homo sapiens
caaaagcactagcat

SEQ ID NO: 659899 - DNA, 15 bp, Homo sapiens
aaaagcactagcatt

SEQ ID NO: 659900 - DNA, 15 bp, Homo sapiens
aaagcactagcattc

SEQ ID NO: 659901 - DNA, 15 bp, Homo sapiens
aagcactagcattca

SEQ ID NO: 659902 - DNA, 15 bp, Homo sapiens
agcactagcattcag

SEQ ID NO: 659903 - DNA, 15 bp, Homo sapiens
gcactagcattcagc

SEQ ID NO: 659904 - DNA, 15 bp, Homo sapiens
cactagcattcagct

SEQ ID NO: 659905 - DNA, 15 bp, Homo sapiens
actagcattcagctg

SEQ ID NO: 659906 - DNA, 15 bp, Homo sapiens
ctagcattcagctgt

SEQ ID NO: 659907 - DNA, 15 bp, Homo sapiens
tagcattcagctgtt

SEQ ID NO: 659908 - DNA, 15 bp, Homo sapiens
agcattcagctgttg

SEQ ID NO: 659909 - DNA, 15 bp, Homo sapiens
gcattcagctgttgg

SEQ ID NO: 659910 - DNA, 15 bp, Homo sapiens
cattcagctgttgga

SEQ ID NO: 659911 - DNA, 15 bp, Homo sapiens
attcagctgttggaa

SEQ ID NO: 659912 - DNA, 15 bp, Homo sapiens
ttcagctgttggaac

SEQ ID NO: 659913 - DNA, 15 bp, Homo sapiens
tcagctgttggaacg

SEQ ID NO: 659914 - DNA, 15 bp, Homo sapiens
cagctgttggaacgt

SEQ ID NO: 659915 - DNA, 15 bp, Homo sapiens
agctgttggaacgtt

SEQ ID NO: 659916 - DNA, 15 bp, Homo sapiens
gctgttggaacgttt

SEQ ID NO: 659917 - DNA, 15 bp, Homo sapiens
ctgttggaacgtttc

SEQ ID NO: 659918 - DNA, 15 bp, Homo sapiens
tgttggaacgtttct

SEQ ID NO: 659919 - DNA, 15 bp, Homo sapiens
gttggaacgtttcta

SEQ ID NO: 659920 - DNA, 15 bp, Homo sapiens
ttggaacgtttctat

SEQ ID NO: 659921 - DNA, 15 bp, Homo sapiens
tggaacgtttctatg

SEQ ID NO: 659922 - DNA, 15 bp, Homo sapiens
ggaacgtttctatga

SEQ ID NO: 659923 - DNA, 15 bp, Homo sapiens
gaacgtttctatgat

SEQ ID NO: 659924 - DNA, 15 bp, Homo sapiens
aacgtttctatgatc

SEQ ID NO: 659925 - DNA, 15 bp, Homo sapiens
acgtttctatgatcc

SEQ ID NO: 659926 - DNA, 15 bp, Homo sapiens
cgtttctatgatcct

SEQ ID NO: 659927 - DNA, 15 bp, Homo sapiens
gtttctatgatcctg

SEQ ID NO: 659928 - DNA, 15 bp, Homo sapiens
tttctatgatcctga

SEQ ID NO: 659929 - DNA, 15 bp, Homo sapiens
ttctatgatcctgat

SEQ ID NO: 659930 - DNA, 15 bp, Homo sapiens
tctatgatcctgatc

SEQ ID NO: 659931 - DNA, 15 bp, Homo sapiens
ctatgatcctgatca

SEQ ID NO: 659932 - DNA, 15 bp, Homo sapiens
tatgatcctgatcaa

SEQ ID NO: 659933 - DNA, 15 bp, Homo sapiens
atgatcctgatcaag

SEQ ID NO: 659934 - DNA, 15 bp, Homo sapiens
tgatcctgatcaagg

SEQ ID NO: 659935 - DNA, 15 bp, Homo sapiens
gatcctgatcaaggg

SEQ ID NO: 659936 - DNA, 15 bp, Homo sapiens
atcctgatcaaggga

SEQ ID NO: 659937 - DNA, 15 bp, Homo sapiens
tcctgatcaagggaa

SEQ ID NO: 659938 - DNA, 15 bp, Homo sapiens
cctgatcaagggaag

SEQ ID NO: 659939 - DNA, 15 bp, Homo sapiens
ctgatcaagggaagg

SEQ ID NO: 659940 - DNA, 15 bp, Homo sapiens
tgatcaagggaaggt

SEQ ID NO: 659941 - DNA, 15 bp, Homo sapiens
gatcaagggaaggtg

SEQ ID NO: 659942 - DNA, 15 bp, Homo sapiens
atcaagggaaggtgg

SEQ ID NO: 659943 - DNA, 15 bp, Homo sapiens
tcaagggaaggtggt

SEQ ID NO: 659944 - DNA, 15 bp, Homo sapiens
caagggaaggtggta

SEQ ID NO: 659945 - DNA, 15 bp, Homo sapiens
aagggaaggtggtaa

SEQ ID NO: 659946 - DNA, 15 bp, Homo sapiens
agggaaggtggtaag

SEQ ID NO: 659947 - DNA, 15 bp, Homo sapiens
gggaaggtggtaagc

SEQ ID NO: 659948 - DNA, 15 bp, Homo sapiens
ggaaggtggtaagcc

SEQ ID NO: 659949 - DNA, 15 bp, Homo sapiens
gaaggtggtaagcca

SEQ ID NO: 659950 - DNA, 15 bp, Homo sapiens
aaggtggtaagccac

SEQ ID NO: 659951 - DNA, 15 bp, Homo sapiens
aggtggtaagccacg

SEQ ID NO: 659952 - DNA, 15 bp, Homo sapiens
ggtggtaagccacgc

SEQ ID NO: 659953 - DNA, 15 bp, Homo sapiens
gtggtaagccacgca

SEQ ID NO: 659954 - DNA, 15 bp, Homo sapiens
tggtaagccacgcaa

SEQ ID NO: 659955 - DNA, 15 bp, Homo sapiens
ggtaagccacgcaac

SEQ ID NO: 659956 - DNA, 15 bp, Homo sapiens
gtaagccacgcaacc

SEQ ID NO: 659957 - DNA, 15 bp, Homo sapiens
taagccacgcaacct

SEQ ID NO: 659958 - DNA, 15 bp, Homo sapiens
aagccacgcaacctt

SEQ ID NO: 659959 - DNA, 15 bp, Homo sapiens
agccacgcaaccttt

SEQ ID NO: 659960 - DNA, 15 bp, Homo sapiens
gccacgcaacctttt

SEQ ID NO: 659961 - DNA, 15 bp, Homo sapiens
ccacgcaaccttttt

SEQ ID NO: 659962 - DNA, 15 bp, Homo sapiens
cacgcaacctttttg

SEQ ID NO: 659963 - DNA, 15 bp, Homo sapiens
acgcaacctttttga

SEQ ID NO: 659964 - DNA, 15 bp, Homo sapiens
cgcaacctttttgag

SEQ ID NO: 659965 - DNA, 15 bp, Homo sapiens
gcaacctttttgaga

SEQ ID NO: 659966 - DNA, 15 bp, Homo sapiens
caacctttttgagaa

SEQ ID NO: 659967 - DNA, 15 bp, Homo sapiens
aacctttttgagaat

SEQ ID NO: 659968 - DNA, 15 bp, Homo sapiens
acctttttgagaatt

SEQ ID NO: 659969 - DNA, 15 bp, Homo sapiens
cctttttgagaattt

SEQ ID NO: 659970 - DNA, 15 bp, Homo sapiens
ctttttgagaatttt

SEQ ID NO: 659971 - DNA, 15 bp, Homo sapiens
tttttgagaattttg

SEQ ID NO: 659972 - DNA, 15 bp, Homo sapiens
ttttgagaattttgc

SEQ ID NO: 659973 - DNA, 15 bp, Homo sapiens
tttgagaattttgcc

SEQ ID NO: 659974 - DNA, 15 bp, Homo sapiens
ttgagaattttgcct

SEQ ID NO: 659975 - DNA, 15 bp, Homo sapiens
tgagaattttgcctt

SEQ ID NO: 659976 - DNA, 15 bp, Homo sapiens
gagaattttgccttc

SEQ ID NO: 659977 - DNA, 15 bp, Homo sapiens
agaattttgccttct

SEQ ID NO: 659978 - DNA, 15 bp, Homo sapiens
gaattttgccttctg

SEQ ID NO: 659979 - DNA, 15 bp, Homo sapiens
aattttgccttctgc

SEQ ID NO: 659980 - DNA, 15 bp, Homo sapiens
attttgccttctgca

SEQ ID NO: 659981 - DNA, 15 bp, Homo sapiens
ttttgccttctgcag

SEQ ID NO: 659982 - DNA, 15 bp, Homo sapiens
tttgccttctgcaga

SEQ ID NO: 659983 - DNA, 15 bp, Homo sapiens
ttgccttctgcagag

SEQ ID NO: 659984 - DNA, 15 bp, Homo sapiens
tgccttctgcagagt

SEQ ID NO: 659985 - DNA, 15 bp, Homo sapiens
gccttctgcagagta

SEQ ID NO: 659986 - DNA, 15 bp, Homo sapiens
ccttctgcagagtat

SEQ ID NO: 659987 - DNA, 15 bp, Homo sapiens
cttctgcagagtatt

SEQ ID NO: 659988 - DNA, 15 bp, Homo sapiens
ttctgcagagtattt

SEQ ID NO: 659989 - DNA, 15 bp, Homo sapiens
tctgcagagtatttc

SEQ ID NO: 659990 - DNA, 15 bp, Homo sapiens
ctgcagagtatttcc

SEQ ID NO: 659991 - DNA, 15 bp, Homo sapiens
tgcagagtatttcca

SEQ ID NO: 659992 - DNA, 15 bp, Homo sapiens
gcagagtatttccaa

SEQ ID NO: 659993 - DNA, 15 bp, Homo sapiens
cagagtatttccaac

SEQ ID NO: 659994 - DNA, 15 bp, Homo sapiens
agagtatttccaacc

SEQ ID NO: 659995 - DNA, 15 bp, Homo sapiens
gagtatttccaaccc

SEQ ID NO: 659996 - DNA, 15 bp, Homo sapiens
agtatttccaacccc

SEQ ID NO: 659997 - DNA, 15 bp, Homo sapiens
gtatttccaacccct

SEQ ID NO: 659998 - DNA, 15 bp, Homo sapiens
tatttccaaccccta

SEQ ID NO: 659999 - DNA, 15 bp, Homo sapiens
atttccaacccctaa

SEQ ID NO: 660000 - DNA, 15 bp, Homo sapiens
tttccaacccctaaa

SEQ ID NO: 660001 - DNA, 15 bp, Homo sapiens
ttccaacccctaaaa

SEQ ID NO: 660002 - DNA, 15 bp, Homo sapiens
tccaacccctaaaag

SEQ ID NO: 660003 - DNA, 15 bp, Homo sapiens
ccaacccctaaaagt

SEQ ID NO: 660004 - DNA, 15 bp, Homo sapiens
caacccctaaaagtg

SEQ ID NO: 660005 - DNA, 15 bp, Homo sapiens
aacccctaaaagtgg

SEQ ID NO: 660006 - DNA, 15 bp, Homo sapiens
acccctaaaagtggg

SEQ ID NO: 660007 - DNA, 15 bp, Homo sapiens
cccctaaaagtgggc

SEQ ID NO: 660008 - DNA, 15 bp, Homo sapiens
ccctaaaagtgggct

SEQ ID NO: 660009 - DNA, 15 bp, Homo sapiens
cctaaaagtgggctt

SEQ ID NO: 660010 - DNA, 15 bp, Homo sapiens
ctaaaagtgggcttc

SEQ ID NO: 660011 - DNA, 15 bp, Homo sapiens
taaaagtgggcttca

SEQ ID NO: 660012 - DNA, 15 bp, Homo sapiens
aaaagtgggcttcaa

SEQ ID NO: 660013 - DNA, 15 bp, Homo sapiens
aaagtgggcttcaag

SEQ ID NO: 660014 - DNA, 15 bp, Homo sapiens
aagtgggcttcaagt

SEQ ID NO: 660015 - DNA, 15 bp, Homo sapiens
agtgggcttcaagtt

SEQ ID NO: 660016 - DNA, 15 bp, Homo sapiens
gtgggcttcaagttt

SEQ ID NO: 660017 - DNA, 15 bp, Homo sapiens
tgggcttcaagtttt

SEQ ID NO: 660018 - DNA, 15 bp, Homo sapiens
gggcttcaagttttt

SEQ ID NO: 660019 - DNA, 15 bp, Homo sapiens
ggcttcaagtttttg

SEQ ID NO: 660020 - DNA, 15 bp, Homo sapiens
gcttcaagtttttgc

SEQ ID NO: 660021 - DNA, 15 bp, Homo sapiens
cttcaagtttttgct

SEQ ID NO: 660022 - DNA, 15 bp, Homo sapiens
ttcaagtttttgctt

SEQ ID NO: 660023 - DNA, 15 bp, Homo sapiens
tcaagtttttgcttt

SEQ ID NO: 660024 - DNA, 15 bp, Homo sapiens
caagtttttgctttg

SEQ ID NO: 660025 - DNA, 15 bp, Homo sapiens
aagtttttgctttgc

SEQ ID NO: 660026 - DNA, 15 bp, Homo sapiens
agtttttgctttgcc

SEQ ID NO: 660027 - DNA, 15 bp, Homo sapiens
gtttttgctttgcca

SEQ ID NO: 660028 - DNA, 15 bp, Homo sapiens
tttttgctttgccag

SEQ ID NO: 660029 - DNA, 15 bp, Homo sapiens
ttttgctttgccaga

SEQ ID NO: 660030 - DNA, 15 bp, Homo sapiens
tttgctttgccagac

SEQ ID NO: 660031 - DNA, 15 bp, Homo sapiens
ttgctttgccagact

SEQ ID NO: 660032 - DNA, 15 bp, Homo sapiens
tgctttgccagactc

SEQ ID NO: 660033 - DNA, 15 bp, Homo sapiens
gctttgccagactca

SEQ ID NO: 660034 - DNA, 15 bp, Homo sapiens
ctttgccagactcac

SEQ ID NO: 660035 - DNA, 15 bp, Homo sapiens
tttgccagactcact

SEQ ID NO: 660036 - DNA, 15 bp, Homo sapiens
ttgccagactcactt

SEQ ID NO: 660037 - DNA, 15 bp, Homo sapiens
tgccagactcacttt

SEQ ID NO: 660038 - DNA, 15 bp, Homo sapiens
gccagactcacttta

SEQ ID NO: 660039 - DNA, 15 bp, Homo sapiens
ccagactcactttaa

SEQ ID NO: 660040 - DNA, 15 bp, Homo sapiens
cagactcactttaaa

SEQ ID NO: 660041 - DNA, 15 bp, Homo sapiens
agactcactttaaaa

SEQ ID NO: 660042 - DNA, 15 bp, Homo sapiens
gactcactttaaaat

SEQ ID NO: 660043 - DNA, 15 bp, Homo sapiens
actcactttaaaatg

SEQ ID NO: 660044 - DNA, 15 bp, Homo sapiens
ctcactttaaaatgc

SEQ ID NO: 660045 - DNA, 15 bp, Homo sapiens
tcactttaaaatgct

SEQ ID NO: 660046 - DNA, 15 bp, Homo sapiens
cactttaaaatgctt

SEQ ID NO: 660047 - DNA, 15 bp, Homo sapiens
actttaaaatgcttg

SEQ ID NO: 660048 - DNA, 15 bp, Homo sapiens
ctttaaaatgcttgc

SEQ ID NO: 660049 - DNA, 15 bp, Homo sapiens
tttaaaatgcttgcc

SEQ ID NO: 660050 - DNA, 15 bp, Homo sapiens
ttaaaatgcttgcct

SEQ ID NO: 660051 - DNA, 15 bp, Homo sapiens
taaaatgcttgccta

SEQ ID NO: 660052 - DNA, 15 bp, Homo sapiens
aaaatgcttgcctaa

SEQ ID NO: 660053 - DNA, 15 bp, Homo sapiens
aaatgcttgcctaag

SEQ ID NO: 660054 - DNA, 15 bp, Homo sapiens
aatgcttgcctaagg

SEQ ID NO: 660055 - DNA, 15 bp, Homo sapiens
atgcttgcctaaggc

SEQ ID NO: 660056 - DNA, 15 bp, Homo sapiens
tgcttgcctaaggca

SEQ ID NO: 660057 - DNA, 15 bp, Homo sapiens
gcttgcctaaggcac

SEQ ID NO: 660058 - DNA, 15 bp, Homo sapiens
cttgcctaaggcact

SEQ ID NO: 660059 - DNA, 15 bp, Homo sapiens
ttgcctaaggcactt

SEQ ID NO: 660060 - DNA, 15 bp, Homo sapiens
tgcctaaggcactta

SEQ ID NO: 660061 - DNA, 15 bp, Homo sapiens
gcctaaggcacttac

SEQ ID NO: 660062 - DNA, 15 bp, Homo sapiens
cctaaggcacttacc

SEQ ID NO: 660063 - DNA, 15 bp, Homo sapiens
ctaaggcacttaccc

SEQ ID NO: 660064 - DNA, 15 bp, Homo sapiens
taaggcacttacccc

SEQ ID NO: 660065 - DNA, 15 bp, Homo sapiens
aaggcacttacccca

SEQ ID NO: 660066 - DNA, 15 bp, Homo sapiens
aggcacttaccccat

SEQ ID NO: 660067 - DNA, 15 bp, Homo sapiens
ggcacttaccccatg

SEQ ID NO: 660068 - DNA, 15 bp, Homo sapiens
gcacttaccccatgc

SEQ ID NO: 660069 - DNA, 15 bp, Homo sapiens
cacttaccccatgca

SEQ ID NO: 660070 - DNA, 15 bp, Homo sapiens
acttaccccatgcat

SEQ ID NO: 660071 - DNA, 15 bp, Homo sapiens
cttaccccatgcata

SEQ ID NO: 660072 - DNA, 15 bp, Homo sapiens
ttaccccatgcatat

SEQ ID NO: 660073 - DNA, 15 bp, Homo sapiens
taccccatgcatatt

SEQ ID NO: 660074 - DNA, 15 bp, Homo sapiens
accccatgcatattt

SEQ ID NO: 660075 - DNA, 15 bp, Homo sapiens
ccccatgcatatttt

SEQ ID NO: 660076 - DNA, 15 bp, Homo sapiens
cccatgcatattttc

SEQ ID NO: 660077 - DNA, 15 bp, Homo sapiens
ccatgcatattttcc

SEQ ID NO: 660078 - DNA, 15 bp, Homo sapiens
catgcatattttcca

SEQ ID NO: 660079 - DNA, 15 bp, Homo sapiens
atgcatattttccag

SEQ ID NO: 660080 - DNA, 15 bp, Homo sapiens
tgcatattttccagt

SEQ ID NO: 660081 - DNA, 15 bp, Homo sapiens
gcatattttccagtc

SEQ ID NO: 660082 - DNA, 15 bp, Homo sapiens
catattttccagtcc

SEQ ID NO: 660083 - DNA, 15 bp, Homo sapiens
atattttccagtccc

SEQ ID NO: 660084 - DNA, 15 bp, Homo sapiens
tattttccagtccca

SEQ ID NO: 660085 - DNA, 15 bp, Homo sapiens
attttccagtcccag

SEQ ID NO: 660086 - DNA, 15 bp, Homo sapiens
ttttccagtcccagt

SEQ ID NO: 660087 - DNA, 15 bp, Homo sapiens
tttccagtcccagtc

SEQ ID NO: 660088 - DNA, 15 bp, Homo sapiens
ttccagtcccagtca

SEQ ID NO: 660089 - DNA, 15 bp, Homo sapiens
tccagtcccagtcat

SEQ ID NO: 660090 - DNA, 15 bp, Homo sapiens
ccagtcccagtcatt

SEQ ID NO: 660091 - DNA, 15 bp, Homo sapiens
cagtcccagtcattt

SEQ ID NO: 660092 - DNA, 15 bp, Homo sapiens
agtcccagtcatttg

SEQ ID NO: 660093 - DNA, 15 bp, Homo sapiens
gtcccagtcatttgc

SEQ ID NO: 660094 - DNA, 15 bp, Homo sapiens
tcccagtcatttgct

SEQ ID NO: 660095 - DNA, 15 bp, Homo sapiens
cccagtcatttgctg

SEQ ID NO: 660096 - DNA, 15 bp, Homo sapiens
ccagtcatttgctgc

SEQ ID NO: 660097 - DNA, 15 bp, Homo sapiens
cagtcatttgctgct

SEQ ID NO: 660098 - DNA, 15 bp, Homo sapiens
agtcatttgctgctt

SEQ ID NO: 660099 - DNA, 15 bp, Homo sapiens
gtcatttgctgcttc

SEQ ID NO: 660100 - DNA, 15 bp, Homo sapiens
tcatttgctgcttca

SEQ ID NO: 660101 - DNA, 15 bp, Homo sapiens
catttgctgcttcac

SEQ ID NO: 660102 - DNA, 15 bp, Homo sapiens
atttgctgcttcacc

SEQ ID NO: 660103 - DNA, 15 bp, Homo sapiens
tttgctgcttcacct

SEQ ID NO: 660104 - DNA, 15 bp, Homo sapiens
ttgctgcttcacctg

SEQ ID NO: 660105 - DNA, 15 bp, Homo sapiens
tgctgcttcacctga

SEQ ID NO: 660106 - DNA, 15 bp, Homo sapiens
gctgcttcacctgat

SEQ ID NO: 660107 - DNA, 15 bp, Homo sapiens
ctgcttcacctgatt

SEQ ID NO: 660108 - DNA, 15 bp, Homo sapiens
tgcttcacctgattc

SEQ ID NO: 660109 - DNA, 15 bp, Homo sapiens
gcttcacctgattct

SEQ ID NO: 660110 - DNA, 15 bp, Homo sapiens
cttcacctgattcta

SEQ ID NO: 660111 - DNA, 15 bp, Homo sapiens
ttcacctgattctac

SEQ ID NO: 660112 - DNA, 15 bp, Homo sapiens
tcacctgattctacc

SEQ ID NO: 660113 - DNA, 15 bp, Homo sapiens
cacctgattctacct

SEQ ID NO: 660114 - DNA, 15 bp, Homo sapiens
acctgattctacctc

SEQ ID NO: 660115 - DNA, 15 bp, Homo sapiens
cctgattctacctca

SEQ ID NO: 660116 - DNA, 15 bp, Homo sapiens
ctgattctacctcac

SEQ ID NO: 660117 - DNA, 15 bp, Homo sapiens
tgattctacctcaca

SEQ ID NO: 660118 - DNA, 15 bp, Homo sapiens
gattctacctcacaa

SEQ ID NO: 660119 - DNA, 15 bp, Homo sapiens
attctacctcacaat

SEQ ID NO: 660120 - DNA, 15 bp, Homo sapiens
ttctacctcacaatt

SEQ ID NO: 660121 - DNA, 15 bp, Homo sapiens
tctacctcacaattt

SEQ ID NO: 660122 - DNA, 15 bp, Homo sapiens
ctacctcacaatttc

SEQ ID NO: 660123 - DNA, 15 bp, Homo sapiens
tacctcacaatttct

SEQ ID NO: 660124 - DNA, 15 bp, Homo sapiens
acctcacaatttcta

SEQ ID NO: 660125 - DNA, 15 bp, Homo sapiens
cctcacaatttctaa

SEQ ID NO: 660126 - DNA, 15 bp, Homo sapiens
ctcacaatttctaat

SEQ ID NO: 660127 - DNA, 15 bp, Homo sapiens
tcacaatttctaatg

SEQ ID NO: 660128 - DNA, 15 bp, Homo sapiens
cacaatttctaatgt

SEQ ID NO: 660129 - DNA, 15 bp, Homo sapiens
acaatttctaatgtc

SEQ ID NO: 660130 - DNA, 15 bp, Homo sapiens
caatttctaatgtca

SEQ ID NO: 660131 - DNA, 15 bp, Homo sapiens
aatttctaatgtcag

SEQ ID NO: 660132 - DNA, 15 bp, Homo sapiens
atttctaatgtcaga

SEQ ID NO: 660133 - DNA, 15 bp, Homo sapiens
tttctaatgtcagat

SEQ ID NO: 660134 - DNA, 15 bp, Homo sapiens
ttctaatgtcagatt

SEQ ID NO: 660135 - DNA, 15 bp, Homo sapiens
tctaatgtcagattt

SEQ ID NO: 660136 - DNA, 15 bp, Homo sapiens
ctaatgtcagatttt

SEQ ID NO: 660137 - DNA, 15 bp, Homo sapiens
taatgtcagattttc

SEQ ID NO: 660138 - DNA, 15 bp, Homo sapiens
aatgtcagattttcc

SEQ ID NO: 660139 - DNA, 15 bp, Homo sapiens
atgtcagattttccc

SEQ ID NO: 660140 - DNA, 15 bp, Homo sapiens
tgtcagattttcccc

SEQ ID NO: 660141 - DNA, 15 bp, Homo sapiens
gtcagattttcccca

SEQ ID NO: 660142 - DNA, 15 bp, Homo sapiens
tcagattttccccag

SEQ ID NO: 660143 - DNA, 15 bp, Homo sapiens
cagattttccccagt

SEQ ID NO: 660144 - DNA, 15 bp, Homo sapiens
agattttccccagtt

SEQ ID NO: 660145 - DNA, 15 bp, Homo sapiens
gattttccccagttc

SEQ ID NO: 660146 - DNA, 15 bp, Homo sapiens
attttccccagttcc

SEQ ID NO: 660147 - DNA, 15 bp, Homo sapiens
ttttccccagttcca

SEQ ID NO: 660148 - DNA, 15 bp, Homo sapiens
tttccccagttccag

SEQ ID NO: 660149 - DNA, 15 bp, Homo sapiens
ttccccagttccaga

SEQ ID NO: 660150 - DNA, 15 bp, Homo sapiens
tccccagttccagat

SEQ ID NO: 660151 - DNA, 15 bp, Homo sapiens
ccccagttccagatg

SEQ ID NO: 660152 - DNA, 15 bp, Homo sapiens
cccagttccagatgg

SEQ ID NO: 660153 - DNA, 15 bp, Homo sapiens
ccagttccagatggc

SEQ ID NO: 660154 - DNA, 15 bp, Homo sapiens
cagttccagatggcc

SEQ ID NO: 660155 - DNA, 15 bp, Homo sapiens
agttccagatggcct

SEQ ID NO: 660156 - DNA, 15 bp, Homo sapiens
gttccagatggcctg

SEQ ID NO: 660157 - DNA, 15 bp, Homo sapiens
ttccagatggcctgc

SEQ ID NO: 660158 - DNA, 15 bp, Homo sapiens
tccagatggcctgct

SEQ ID NO: 660159 - DNA, 15 bp, Homo sapiens
ccagatggcctgctg

SEQ ID NO: 660160 - DNA, 15 bp, Homo sapiens
cagatggcctgctga

SEQ ID NO: 660161 - DNA, 15 bp, Homo sapiens
agatggcctgctgac

SEQ ID NO: 660162 - DNA, 15 bp, Homo sapiens
gatggcctgctgacc

SEQ ID NO: 660163 - DNA, 15 bp, Homo sapiens
atggcctgctgacca

SEQ ID NO: 660164 - DNA, 15 bp, Homo sapiens
tggcctgctgaccag

SEQ ID NO: 660165 - DNA, 15 bp, Homo sapiens
ggcctgctgaccagt

SEQ ID NO: 660166 - DNA, 15 bp, Homo sapiens
gcctgctgaccagtt

SEQ ID NO: 660167 - DNA, 15 bp, Homo sapiens
cctgctgaccagtta

SEQ ID NO: 660168 - DNA, 15 bp, Homo sapiens
ctgctgaccagttag

SEQ ID NO: 660169 - DNA, 15 bp, Homo sapiens
tgctgaccagttagg

SEQ ID NO: 660170 - DNA, 15 bp, Homo sapiens
gctgaccagttaggc

SEQ ID NO: 660171 - DNA, 15 bp, Homo sapiens
ctgaccagttaggca

SEQ ID NO: 660172 - DNA, 15 bp, Homo sapiens
tgaccagttaggcaa

SEQ ID NO: 660173 - DNA, 15 bp, Homo sapiens
gaccagttaggcaaa

SEQ ID NO: 660174 - DNA, 15 bp, Homo sapiens
accagttaggcaaag

SEQ ID NO: 660175 - DNA, 15 bp, Homo sapiens
ccagttaggcaaaga

SEQ ID NO: 660176 - DNA, 15 bp, Homo sapiens
cagttaggcaaagaa

SEQ ID NO: 660177 - DNA, 15 bp, Homo sapiens
agttaggcaaagaaa

SEQ ID NO: 660178 - DNA, 15 bp, Homo sapiens
gttaggcaaagaaaa

SEQ ID NO: 660179 - DNA, 15 bp, Homo sapiens
ttaggcaaagaaaac

SEQ ID NO: 660180 - DNA, 15 bp, Homo sapiens
taggcaaagaaaact

SEQ ID NO: 660181 - DNA, 15 bp, Homo sapiens
aggcaaagaaaactg

SEQ ID NO: 660182 - DNA, 15 bp, Homo sapiens
ggcaaagaaaactgg

SEQ ID NO: 660183 - DNA, 15 bp, Homo sapiens
gcaaagaaaactggg

SEQ ID NO: 660184 - DNA, 15 bp, Homo sapiens
caaagaaaactgggc

SEQ ID NO: 660185 - DNA, 15 bp, Homo sapiens
aaagaaaactgggca

SEQ ID NO: 660186 - DNA, 15 bp, Homo sapiens
aagaaaactgggcac

SEQ ID NO: 660187 - DNA, 15 bp, Homo sapiens
agaaaactgggcaca

SEQ ID NO: 660188 - DNA, 15 bp, Homo sapiens
gaaaactgggcacac

SEQ ID NO: 660189 - DNA, 15 bp, Homo sapiens
aaaactgggcacact

SEQ ID NO: 660190 - DNA, 15 bp, Homo sapiens
aaactgggcacactg

SEQ ID NO: 660191 - DNA, 15 bp, Homo sapiens
aactgggcacactgc

SEQ ID NO: 660192 - DNA, 15 bp, Homo sapiens
actgggcacactgca

SEQ ID NO: 660193 - DNA, 15 bp, Homo sapiens
ctgggcacactgcaa

SEQ ID NO: 660194 - DNA, 15 bp, Homo sapiens
tgggcacactgcaaa

SEQ ID NO: 660195 - DNA, 15 bp, Homo sapiens
gggcacactgcaaag

SEQ ID NO: 660196 - DNA, 15 bp, Homo sapiens
ggcacactgcaaagc

SEQ ID NO: 660197 - DNA, 15 bp, Homo sapiens
gcacactgcaaagct

SEQ ID NO: 660198 - DNA, 15 bp, Homo sapiens
cacactgcaaagctg

SEQ ID NO: 660199 - DNA, 15 bp, Homo sapiens
acactgcaaagctgg

SEQ ID NO: 660200 - DNA, 15 bp, Homo sapiens
cactgcaaagctgga

SEQ ID NO: 660201 - DNA, 15 bp, Homo sapiens
actgcaaagctggag

SEQ ID NO: 660202 - DNA, 15 bp, Homo sapiens
ctgcaaagctggaga

SEQ ID NO: 660203 - DNA, 15 bp, Homo sapiens
tgcaaagctggagat

SEQ ID NO: 660204 - DNA, 15 bp, Homo sapiens
gcaaagctggagatg

SEQ ID NO: 660205 - DNA, 15 bp, Homo sapiens
caaagctggagatga

SEQ ID NO: 660206 - DNA, 15 bp, Homo sapiens
aaagctggagatgag

SEQ ID NO: 660207 - DNA, 15 bp, Homo sapiens
aagctggagatgagt

SEQ ID NO: 660208 - DNA, 15 bp, Homo sapiens
agctggagatgagtg

SEQ ID NO: 660209 - DNA, 15 bp, Homo sapiens
gctggagatgagtgt

SEQ ID NO: 660210 - DNA, 15 bp, Homo sapiens
ctggagatgagtgta

SEQ ID NO: 660211 - DNA, 15 bp, Homo sapiens
tggagatgagtgtat

SEQ ID NO: 660212 - DNA, 15 bp, Homo sapiens
ggagatgagtgtatt

SEQ ID NO: 660213 - DNA, 15 bp, Homo sapiens
gagatgagtgtattt

SEQ ID NO: 660214 - DNA, 15 bp, Homo sapiens
agatgagtgtattta

SEQ ID NO: 660215 - DNA, 15 bp, Homo sapiens
gatgagtgtatttaa

SEQ ID NO: 660216 - DNA, 15 bp, Homo sapiens
atgagtgtatttaat

SEQ ID NO: 660217 - DNA, 15 bp, Homo sapiens
tgagtgtatttaata

SEQ ID NO: 660218 - DNA, 15 bp, Homo sapiens
gagtgtatttaatag

SEQ ID NO: 660219 - DNA, 15 bp, Homo sapiens
agtgtatttaataga

SEQ ID NO: 660220 - DNA, 15 bp, Homo sapiens
gtgtatttaatagaa

SEQ ID NO: 660221 - DNA, 15 bp, Homo sapiens
tgtatttaatagaag

SEQ ID NO: 660222 - DNA, 15 bp, Homo sapiens
gtatttaatagaagc

SEQ ID NO: 660223 - DNA, 15 bp, Homo sapiens
tatttaatagaagca

SEQ ID NO: 660224 - DNA, 15 bp, Homo sapiens
atttaatagaagcac

SEQ ID NO: 660225 - DNA, 15 bp, Homo sapiens
tttaatagaagcact

SEQ ID NO: 660226 - DNA, 15 bp, Homo sapiens
ttaatagaagcactc

SEQ ID NO: 660227 - DNA, 15 bp, Homo sapiens
taatagaagcactca

SEQ ID NO: 660228 - DNA, 15 bp, Homo sapiens
aatagaagcactcac

SEQ ID NO: 660229 - DNA, 15 bp, Homo sapiens
atagaagcactcact

SEQ ID NO: 660230 - DNA, 15 bp, Homo sapiens
tagaagcactcactt

SEQ ID NO: 660231 - DNA, 15 bp, Homo sapiens
agaagcactcactta

SEQ ID NO: 660232 - DNA, 15 bp, Homo sapiens
gaagcactcacttac

SEQ ID NO: 660233 - DNA, 15 bp, Homo sapiens
aagcactcacttacc

SEQ ID NO: 660234 - DNA, 15 bp, Homo sapiens
agcactcacttaccc

SEQ ID NO: 660235 - DNA, 15 bp, Homo sapiens
gcactcacttacccg

SEQ ID NO: 660236 - DNA, 15 bp, Homo sapiens
cactcacttacccgt

SEQ ID NO: 660237 - DNA, 15 bp, Homo sapiens
actcacttacccgta

SEQ ID NO: 660238 - DNA, 15 bp, Homo sapiens
ctcacttacccgtaa

SEQ ID NO: 660239 - DNA, 15 bp, Homo sapiens
tcacttacccgtaaa

SEQ ID NO: 660240 - DNA, 15 bp, Homo sapiens
cacttacccgtaaat

SEQ ID NO: 660241 - DNA, 15 bp, Homo sapiens
acttacccgtaaatg

SEQ ID NO: 660242 - DNA, 15 bp, Homo sapiens
cttacccgtaaatgg

SEQ ID NO: 660243 - DNA, 15 bp, Homo sapiens
ttacccgtaaatgga

SEQ ID NO: 660244 - DNA, 15 bp, Homo sapiens
tacccgtaaatggag

SEQ ID NO: 660245 - DNA, 15 bp, Homo sapiens
acccgtaaatggagc

SEQ ID NO: 660246 - DNA, 15 bp, Homo sapiens
cccgtaaatggagca

SEQ ID NO: 660247 - DNA, 15 bp, Homo sapiens
ccgtaaatggagcag

SEQ ID NO: 660248 - DNA, 15 bp, Homo sapiens
cgtaaatggagcaga

SEQ ID NO: 660249 - DNA, 15 bp, Homo sapiens
gtaaatggagcagaa

SEQ ID NO: 660250 - DNA, 15 bp, Homo sapiens
taaatggagcagaaa

SEQ ID NO: 660251 - DNA, 15 bp, Homo sapiens
aaatggagcagaaag

SEQ ID NO: 660252 - DNA, 15 bp, Homo sapiens
aatggagcagaaagt

SEQ ID NO: 660253 - DNA, 15 bp, Homo sapiens
atggagcagaaagtg

SEQ ID NO: 660254 - DNA, 15 bp, Homo sapiens
tggagcagaaagtgc

SEQ ID NO: 660255 - DNA, 15 bp, Homo sapiens
ggagcagaaagtgca

SEQ ID NO: 660256 - DNA, 15 bp, Homo sapiens
gagcagaaagtgcag

SEQ ID NO: 660257 - DNA, 15 bp, Homo sapiens
agcagaaagtgcaga

SEQ ID NO: 660258 - DNA, 15 bp, Homo sapiens
gcagaaagtgcagac

SEQ ID NO: 660259 - DNA, 15 bp, Homo sapiens
cagaaagtgcagact

SEQ ID NO: 660260 - DNA, 15 bp, Homo sapiens
agaaagtgcagacta

SEQ ID NO: 660261 - DNA, 15 bp, Homo sapiens
gaaagtgcagactaa

SEQ ID NO: 660262 - DNA, 15 bp, Homo sapiens
aaagtgcagactaat

SEQ ID NO: 660263 - DNA, 15 bp, Homo sapiens
aagtgcagactaatc

SEQ ID NO: 660264 - DNA, 15 bp, Homo sapiens
agtgcagactaatca

SEQ ID NO: 660265 - DNA, 15 bp, Homo sapiens
gtgcagactaatcag

SEQ ID NO: 660266 - DNA, 15 bp, Homo sapiens
tgcagactaatcagg

SEQ ID NO: 660267 - DNA, 15 bp, Homo sapiens
gcagactaatcagga

SEQ ID NO: 660268 - DNA, 15 bp, Homo sapiens
cagactaatcaggaa

SEQ ID NO: 660269 - DNA, 15 bp, Homo sapiens
agactaatcaggaaa

SEQ ID NO: 660270 - DNA, 15 bp, Homo sapiens
gactaatcaggaaac

SEQ ID NO: 660271 - DNA, 15 bp, Homo sapiens
actaatcaggaaact

SEQ ID NO: 660272 - DNA, 15 bp, Homo sapiens
ctaatcaggaaacta

SEQ ID NO: 660273 - DNA, 15 bp, Homo sapiens
taatcaggaaactaa

SEQ ID NO: 660274 - DNA, 15 bp, Homo sapiens
aatcaggaaactaat

SEQ ID NO: 660275 - DNA, 15 bp, Homo sapiens
atcaggaaactaatg

SEQ ID NO: 660276 - DNA, 15 bp, Homo sapiens
tcaggaaactaatga

SEQ ID NO: 660277 - DNA, 15 bp, Homo sapiens
caggaaactaatgac

SEQ ID NO: 660278 - DNA, 15 bp, Homo sapiens
aggaaactaatgacc

SEQ ID NO: 660279 - DNA, 15 bp, Homo sapiens
ggaaactaatgacca

SEQ ID NO: 660280 - DNA, 15 bp, Homo sapiens
gaaactaatgaccag

SEQ ID NO: 660281 - DNA, 15 bp, Homo sapiens
aaactaatgaccagg

SEQ ID NO: 660282 - DNA, 15 bp, Homo sapiens
aactaatgaccagga

SEQ ID NO: 660283 - DNA, 15 bp, Homo sapiens
actaatgaccaggaa

SEQ ID NO: 660284 - DNA, 15 bp, Homo sapiens
ctaatgaccaggaat

SEQ ID NO: 660285 - DNA, 15 bp, Homo sapiens
taatgaccaggaatg

SEQ ID NO: 660286 - DNA, 15 bp, Homo sapiens
aatgaccaggaatgg

SEQ ID NO: 660287 - DNA, 15 bp, Homo sapiens
atgaccaggaatgga

SEQ ID NO: 660288 - DNA, 15 bp, Homo sapiens
tgaccaggaatggaa

SEQ ID NO: 660289 - DNA, 15 bp, Homo sapiens
gaccaggaatggaaa

SEQ ID NO: 660290 - DNA, 15 bp, Homo sapiens
accaggaatggaaaa

SEQ ID NO: 660291 - DNA, 15 bp, Homo sapiens
ccaggaatggaaaaa

SEQ ID NO: 660292 - DNA, 15 bp, Homo sapiens
caggaatggaaaaag

SEQ ID NO: 660293 - DNA, 15 bp, Homo sapiens
aggaatggaaaaagt

SEQ ID NO: 660294 - DNA, 15 bp, Homo sapiens
ggaatggaaaaagta

SEQ ID NO: 660295 - DNA, 15 bp, Homo sapiens
gaatggaaaaagtag

SEQ ID NO: 660296 - DNA, 15 bp, Homo sapiens
aatggaaaaagtaga

SEQ ID NO: 660297 - DNA, 15 bp, Homo sapiens
atggaaaaagtagag

SEQ ID NO: 660298 - DNA, 15 bp, Homo sapiens
tggaaaaagtagagt

SEQ ID NO: 660299 - DNA, 15 bp, Homo sapiens
ggaaaaagtagagtg

SEQ ID NO: 660300 - DNA, 15 bp, Homo sapiens
gaaaaagtagagtga

SEQ ID NO: 660301 - DNA, 15 bp, Homo sapiens
aaaaagtagagtgat

SEQ ID NO: 660302 - DNA, 15 bp, Homo sapiens
aaaagtagagtgata

SEQ ID NO: 660303 - DNA, 15 bp, Homo sapiens
aaagtagagtgataa

SEQ ID NO: 660304 - DNA, 15 bp, Homo sapiens
aagtagagtgataag

SEQ ID NO: 660305 - DNA, 15 bp, Homo sapiens
agtagagtgataagg

SEQ ID NO: 660306 - DNA, 15 bp, Homo sapiens
gtagagtgataaggg

SEQ ID NO: 660307 - DNA, 15 bp, Homo sapiens
tagagtgataaggga

SEQ ID NO: 660308 - DNA, 15 bp, Homo sapiens
agagtgataagggaa

SEQ ID NO: 660309 - DNA, 15 bp, Homo sapiens
gagtgataagggaaa

SEQ ID NO: 660310 - DNA, 15 bp, Homo sapiens
agtgataagggaaat

SEQ ID NO: 660311 - DNA, 15 bp, Homo sapiens
gtgataagggaaata

SEQ ID NO: 660312 - DNA, 15 bp, Homo sapiens
tgataagggaaataa

SEQ ID NO: 660313 - DNA, 15 bp, Homo sapiens
gataagggaaataat

SEQ ID NO: 660314 - DNA, 15 bp, Homo sapiens
ataagggaaataatg

SEQ ID NO: 660315 - DNA, 15 bp, Homo sapiens
taagggaaataatga

SEQ ID NO: 660316 - DNA, 15 bp, Homo sapiens
aagggaaataatgat

SEQ ID NO: 660317 - DNA, 15 bp, Homo sapiens
agggaaataatgata

SEQ ID NO: 660318 - DNA, 15 bp, Homo sapiens
gggaaataatgataa

SEQ ID NO: 660319 - DNA, 15 bp, Homo sapiens
ggaaataatgataaa

SEQ ID NO: 660320 - DNA, 15 bp, Homo sapiens
gaaataatgataaat

SEQ ID NO: 660321 - DNA, 15 bp, Homo sapiens
aaataatgataaatg

SEQ ID NO: 660322 - DNA, 15 bp, Homo sapiens
aataatgataaatga

SEQ ID NO: 660323 - DNA, 15 bp, Homo sapiens
ataatgataaatgag

SEQ ID NO: 660324 - DNA, 15 bp, Homo sapiens
taatgataaatgagc

SEQ ID NO: 660325 - DNA, 15 bp, Homo sapiens
aatgataaatgagca

SEQ ID NO: 660326 - DNA, 15 bp, Homo sapiens
atgataaatgagcaa

SEQ ID NO: 660327 - DNA, 15 bp, Homo sapiens
tgataaatgagcaag

SEQ ID NO: 660328 - DNA, 15 bp, Homo sapiens
gataaatgagcaaga

SEQ ID NO: 660329 - DNA, 15 bp, Homo sapiens
ataaatgagcaagaa

SEQ ID NO: 660330 - DNA, 15 bp, Homo sapiens
taaatgagcaagaaa

SEQ ID NO: 660331 - DNA, 15 bp, Homo sapiens
aaatgagcaagaaag

SEQ ID NO: 660332 - DNA, 15 bp, Homo sapiens
aatgagcaagaaagg

SEQ ID NO: 660333 - DNA, 15 bp, Homo sapiens
atgagcaagaaagga

SEQ ID NO: 660334 - DNA, 15 bp, Homo sapiens
tgagcaagaaaggag

SEQ ID NO: 660335 - DNA, 15 bp, Homo sapiens
gagcaagaaaggaga

SEQ ID NO: 660336 - DNA, 15 bp, Homo sapiens
agcaagaaaggagag

SEQ ID NO: 660337 - DNA, 15 bp, Homo sapiens
gcaagaaaggagagt

SEQ ID NO: 660338 - DNA, 15 bp, Homo sapiens
caagaaaggagagtt

SEQ ID NO: 660339 - DNA, 15 bp, Homo sapiens
aagaaaggagagtta

SEQ ID NO: 660340 - DNA, 15 bp, Homo sapiens
agaaaggagagttag

SEQ ID NO: 660341 - DNA, 15 bp, Homo sapiens
gaaaggagagttagc

SEQ ID NO: 660342 - DNA, 15 bp, Homo sapiens
aaaggagagttagca

SEQ ID NO: 660343 - DNA, 15 bp, Homo sapiens
aaggagagttagcat

SEQ ID NO: 660344 - DNA, 15 bp, Homo sapiens
aggagagttagcatg

SEQ ID NO: 660345 - DNA, 15 bp, Homo sapiens
ggagagttagcatga

SEQ ID NO: 660346 - DNA, 15 bp, Homo sapiens
gagagttagcatgaa

SEQ ID NO: 660347 - DNA, 15 bp, Homo sapiens
agagttagcatgaaa

SEQ ID NO: 660348 - DNA, 15 bp, Homo sapiens
gagttagcatgaaaa

SEQ ID NO: 660349 - DNA, 15 bp, Homo sapiens
agttagcatgaaaag

SEQ ID NO: 660350 - DNA, 15 bp, Homo sapiens
gttagcatgaaaaga

SEQ ID NO: 660351 - DNA, 15 bp, Homo sapiens
ttagcatgaaaagat

SEQ ID NO: 660352 - DNA, 15 bp, Homo sapiens
tagcatgaaaagatc

SEQ ID NO: 660353 - DNA, 15 bp, Homo sapiens
agcatgaaaagatct

SEQ ID NO: 660354 - DNA, 15 bp, Homo sapiens
gcatgaaaagatcta

SEQ ID NO: 660355 - DNA, 15 bp, Homo sapiens
catgaaaagatctaa

SEQ ID NO: 660356 - DNA, 15 bp, Homo sapiens
atgaaaagatctaag

SEQ ID NO: 660357 - DNA, 15 bp, Homo sapiens
tgaaaagatctaaga

SEQ ID NO: 660358 - DNA, 15 bp, Homo sapiens
gaaaagatctaagac

SEQ ID NO: 660359 - DNA, 15 bp, Homo sapiens
aaaagatctaagaca

SEQ ID NO: 660360 - DNA, 15 bp, Homo sapiens
aaagatctaagacaa

SEQ ID NO: 660361 - DNA, 15 bp, Homo sapiens
aagatctaagacaat

SEQ ID NO: 660362 - DNA, 15 bp, Homo sapiens
agatctaagacaatc

SEQ ID NO: 660363 - DNA, 15 bp, Homo sapiens
gatctaagacaatcc

SEQ ID NO: 660364 - DNA, 15 bp, Homo sapiens
atctaagacaatcct

SEQ ID NO: 660365 - DNA, 15 bp, Homo sapiens
tctaagacaatcctt

SEQ ID NO: 660366 - DNA, 15 bp, Homo sapiens
ctaagacaatccttg

SEQ ID NO: 660367 - DNA, 15 bp, Homo sapiens
taagacaatccttgt

SEQ ID NO: 660368 - DNA, 15 bp, Homo sapiens
aagacaatccttgtt

SEQ ID NO: 660369 - DNA, 15 bp, Homo sapiens
agacaatccttgttc

SEQ ID NO: 660370 - DNA, 15 bp, Homo sapiens
gacaatccttgttca

SEQ ID NO: 660371 - DNA, 15 bp, Homo sapiens
acaatccttgttcaa

SEQ ID NO: 660372 - DNA, 15 bp, Homo sapiens
caatccttgttcaag

SEQ ID NO: 660373 - DNA, 15 bp, Homo sapiens
aatccttgttcaaga

SEQ ID NO: 660374 - DNA, 15 bp, Homo sapiens
atccttgttcaagaa

SEQ ID NO: 660375 - DNA, 15 bp, Homo sapiens
tccttgttcaagaag

SEQ ID NO: 660376 - DNA, 15 bp, Homo sapiens
ccttgttcaagaagc

SEQ ID NO: 660377 - DNA, 15 bp, Homo sapiens
cttgttcaagaagct

SEQ ID NO: 660378 - DNA, 15 bp, Homo sapiens
ttgttcaagaagctg

SEQ ID NO: 660379 - DNA, 15 bp, Homo sapiens
tgttcaagaagctga

SEQ ID NO: 660380 - DNA, 15 bp, Homo sapiens
gttcaagaagctgaa

SEQ ID NO: 660381 - DNA, 15 bp, Homo sapiens
ttcaagaagctgaaa

SEQ ID NO: 660382 - DNA, 15 bp, Homo sapiens
tcaagaagctgaaat

SEQ ID NO: 660383 - DNA, 15 bp, Homo sapiens
caagaagctgaaatc

SEQ ID NO: 660384 - DNA, 15 bp, Homo sapiens
aagaagctgaaatct

SEQ ID NO: 660385 - DNA, 15 bp, Homo sapiens
agaagctgaaatcta

SEQ ID NO: 660386 - DNA, 15 bp, Homo sapiens
gaagctgaaatctaa

SEQ ID NO: 660387 - DNA, 15 bp, Homo sapiens
aagctgaaatctaaa

SEQ ID NO: 660388 - DNA, 15 bp, Homo sapiens
agctgaaatctaaat

SEQ ID NO: 660389 - DNA, 15 bp, Homo sapiens
gctgaaatctaaata

SEQ ID NO: 660390 - DNA, 15 bp, Homo sapiens
ctgaaatctaaataa

SEQ ID NO: 660391 - DNA, 15 bp, Homo sapiens
tgaaatctaaataac

SEQ ID NO: 660392 - DNA, 15 bp, Homo sapiens
gaaatctaaataacg

SEQ ID NO: 660393 - DNA, 15 bp, Homo sapiens
aaatctaaataacgc

SEQ ID NO: 660394 - DNA, 15 bp, Homo sapiens
aatctaaataacgca

SEQ ID NO: 660395 - DNA, 15 bp, Homo sapiens
atctaaataacgcaa

SEQ ID NO: 660396 - DNA, 15 bp, Homo sapiens
tctaaataacgcaag

SEQ ID NO: 660397 - DNA, 15 bp, Homo sapiens
ctaaataacgcaagg

SEQ ID NO: 660398 - DNA, 15 bp, Homo sapiens
taaataacgcaagga

SEQ ID NO: 660399 - DNA, 15 bp, Homo sapiens
aaataacgcaaggaa

SEQ ID NO: 660400 - DNA, 15 bp, Homo sapiens
aataacgcaaggaac

SEQ ID NO: 660401 - DNA, 15 bp, Homo sapiens
ataacgcaaggaact

SEQ ID NO: 660402 - DNA, 15 bp, Homo sapiens
taacgcaaggaactc

SEQ ID NO: 660403 - DNA, 15 bp, Homo sapiens
aacgcaaggaactca

SEQ ID NO: 660404 - DNA, 15 bp, Homo sapiens
acgcaaggaactcag

SEQ ID NO: 660405 - DNA, 15 bp, Homo sapiens
cgcaaggaactcaga

SEQ ID NO: 660406 - DNA, 15 bp, Homo sapiens
gcaaggaactcagat

SEQ ID NO: 660407 - DNA, 15 bp, Homo sapiens
caaggaactcagatt

SEQ ID NO: 660408 - DNA, 15 bp, Homo sapiens
aaggaactcagattg

SEQ ID NO: 660409 - DNA, 15 bp, Homo sapiens
aggaactcagattga

SEQ ID NO: 660410 - DNA, 15 bp, Homo sapiens
ggaactcagattgag

SEQ ID NO: 660411 - DNA, 15 bp, Homo sapiens
gaactcagattgaga

SEQ ID NO: 660412 - DNA, 15 bp, Homo sapiens
aactcagattgagag

SEQ ID NO: 660413 - DNA, 15 bp, Homo sapiens
actcagattgagagc

SEQ ID NO: 660414 - DNA, 15 bp, Homo sapiens
ctcagattgagagcc

SEQ ID NO: 660415 - DNA, 15 bp, Homo sapiens
tcagattgagagcca

SEQ ID NO: 660416 - DNA, 15 bp, Homo sapiens
cagattgagagccat

SEQ ID NO: 660417 - DNA, 15 bp, Homo sapiens
agattgagagccatg

SEQ ID NO: 660418 - DNA, 15 bp, Homo sapiens
gattgagagccatgt

SEQ ID NO: 660419 - DNA, 15 bp, Homo sapiens
attgagagccatgta

SEQ ID NO: 660420 - DNA, 15 bp, Homo sapiens
ttgagagccatgtac

SEQ ID NO: 660421 - DNA, 15 bp, Homo sapiens
tgagagccatgtacc

SEQ ID NO: 660422 - DNA, 15 bp, Homo sapiens
gagagccatgtacca

SEQ ID NO: 660423 - DNA, 15 bp, Homo sapiens
agagccatgtaccat

SEQ ID NO: 660424 - DNA, 15 bp, Homo sapiens
gagccatgtaccata

SEQ ID NO: 660425 - DNA, 15 bp, Homo sapiens
agccatgtaccataa

SEQ ID NO: 660426 - DNA, 15 bp, Homo sapiens
gccatgtaccataaa

SEQ ID NO: 660427 - DNA, 15 bp, Homo sapiens
ccatgtaccataaat

SEQ ID NO: 660428 - DNA, 15 bp, Homo sapiens
catgtaccataaatc

SEQ ID NO: 660429 - DNA, 15 bp, Homo sapiens
atgtaccataaatct

SEQ ID NO: 660430 - DNA, 15 bp, Homo sapiens
tgtaccataaatctt

SEQ ID NO: 660431 - DNA, 15 bp, Homo sapiens
gtaccataaatcttt

SEQ ID NO: 660432 - DNA, 15 bp, Homo sapiens
taccataaatcttta

SEQ ID NO: 660433 - DNA, 15 bp, Homo sapiens
accataaatctttag

SEQ ID NO: 660434 - DNA, 15 bp, Homo sapiens
ccataaatctttagc

SEQ ID NO: 660435 - DNA, 15 bp, Homo sapiens
cataaatctttagca

SEQ ID NO: 660436 - DNA, 15 bp, Homo sapiens
ataaatctttagcaa

SEQ ID NO: 660437 - DNA, 15 bp, Homo sapiens
taaatctttagcaag

SEQ ID NO: 660438 - DNA, 15 bp, Homo sapiens
aaatctttagcaagg

SEQ ID NO: 660439 - DNA, 15 bp, Homo sapiens
aatctttagcaagga

SEQ ID NO: 660440 - DNA, 15 bp, Homo sapiens
atctttagcaaggat

SEQ ID NO: 660441 - DNA, 15 bp, Homo sapiens
tctttagcaaggata

SEQ ID NO: 660442 - DNA, 15 bp, Homo sapiens
ctttagcaaggatat

SEQ ID NO: 660443 - DNA, 15 bp, Homo sapiens
tttagcaaggatatt

SEQ ID NO: 660444 - DNA, 15 bp, Homo sapiens
ttagcaaggatattt

SEQ ID NO: 660445 - DNA, 15 bp, Homo sapiens
tagcaaggatatttg

SEQ ID NO: 660446 - DNA, 15 bp, Homo sapiens
agcaaggatatttga

SEQ ID NO: 660447 - DNA, 15 bp, Homo sapiens
gcaaggatatttgaa

SEQ ID NO: 660448 - DNA, 15 bp, Homo sapiens
caaggatatttgaaa

SEQ ID NO: 660449 - DNA, 15 bp, Homo sapiens
aaggatatttgaaat

SEQ ID NO: 660450 - DNA, 15 bp, Homo sapiens
aggatatttgaaatt

SEQ ID NO: 660451 - DNA, 15 bp, Homo sapiens
ggatatttgaaattt

SEQ ID NO: 660452 - DNA, 15 bp, Homo sapiens
gatatttgaaatttt

SEQ ID NO: 660453 - DNA, 15 bp, Homo sapiens
atatttgaaattttg

SEQ ID NO: 660454 - DNA, 15 bp, Homo sapiens
tatttgaaattttgg

SEQ ID NO: 660455 - DNA, 15 bp, Homo sapiens
atttgaaattttggt

SEQ ID NO: 660456 - DNA, 15 bp, Homo sapiens
tttgaaattttggtg

SEQ ID NO: 660457 - DNA, 15 bp, Homo sapiens
ttgaaattttggtga

SEQ ID NO: 660458 - DNA, 15 bp, Homo sapiens
tgaaattttggtgaa

SEQ ID NO: 660459 - DNA, 15 bp, Homo sapiens
gaaattttggtgaat

SEQ ID NO: 660460 - DNA, 15 bp, Homo sapiens
aaattttggtgaata

SEQ ID NO: 660461 - DNA, 15 bp, Homo sapiens
aattttggtgaatag

SEQ ID NO: 660462 - DNA, 15 bp, Homo sapiens
attttggtgaatagc

SEQ ID NO: 660463 - DNA, 15 bp, Homo sapiens
ttttggtgaatagct

SEQ ID NO: 660464 - DNA, 15 bp, Homo sapiens
tttggtgaatagctt

SEQ ID NO: 660465 - DNA, 15 bp, Homo sapiens
ttggtgaatagcttt

SEQ ID NO: 660466 - DNA, 15 bp, Homo sapiens
tggtgaatagctttg

SEQ ID NO: 660467 - DNA, 15 bp, Homo sapiens
ggtgaatagctttgg

SEQ ID NO: 660468 - DNA, 15 bp, Homo sapiens
gtgaatagctttggt

SEQ ID NO: 660469 - DNA, 15 bp, Homo sapiens
tgaatagctttggta

SEQ ID NO: 660470 - DNA, 15 bp, Homo sapiens
gaatagctttggtat

SEQ ID NO: 660471 - DNA, 15 bp, Homo sapiens
aatagctttggtatt

SEQ ID NO: 660472 - DNA, 15 bp, Homo sapiens
atagctttggtattt

SEQ ID NO: 660473 - DNA, 15 bp, Homo sapiens
tagctttggtattta

SEQ ID NO: 660474 - DNA, 15 bp, Homo sapiens
agctttggtatttat

SEQ ID NO: 660475 - DNA, 15 bp, Homo sapiens
gctttggtatttatt

SEQ ID NO: 660476 - DNA, 15 bp, Homo sapiens
ctttggtatttattt

SEQ ID NO: 660477 - DNA, 15 bp, Homo sapiens
tttggtatttatttt

SEQ ID NO: 660478 - DNA, 15 bp, Homo sapiens
ttggtatttattttt

SEQ ID NO: 660479 - DNA, 15 bp, Homo sapiens
tggtatttatttttc

SEQ ID NO: 660480 - DNA, 15 bp, Homo sapiens
ggtatttatttttca

SEQ ID NO: 660481 - DNA, 15 bp, Homo sapiens
gtatttatttttcat

SEQ ID NO: 660482 - DNA, 15 bp, Homo sapiens
tatttatttttcata

SEQ ID NO: 660483 - DNA, 15 bp, Homo sapiens
atttatttttcataa

SEQ ID NO: 660484 - DNA, 15 bp, Homo sapiens
tttatttttcataac

SEQ ID NO: 660485 - DNA, 15 bp, Homo sapiens
ttatttttcataaca

SEQ ID NO: 660486 - DNA, 15 bp, Homo sapiens
tatttttcataacat

SEQ ID NO: 660487 - DNA, 15 bp, Homo sapiens
atttttcataacatt

SEQ ID NO: 660488 - DNA, 15 bp, Homo sapiens
tttttcataacattt

SEQ ID NO: 660489 - DNA, 15 bp, Homo sapiens
ttttcataacatttc

SEQ ID NO: 660490 - DNA, 15 bp, Homo sapiens
tttcataacatttct

SEQ ID NO: 660491 - DNA, 15 bp, Homo sapiens
ttcataacatttctt

SEQ ID NO: 660492 - DNA, 15 bp, Homo sapiens
tcataacatttcttt

SEQ ID NO: 660493 - DNA, 15 bp, Homo sapiens
cataacatttctttc

SEQ ID NO: 660494 - DNA, 15 bp, Homo sapiens
ataacatttctttct

SEQ ID NO: 660495 - DNA, 15 bp, Homo sapiens
taacatttctttctc

SEQ ID NO: 660496 - DNA, 15 bp, Homo sapiens
aacatttctttctct

SEQ ID NO: 660497 - DNA, 15 bp, Homo sapiens
acatttctttctctt

SEQ ID NO: 660498 - DNA, 15 bp, Homo sapiens
catttctttctcttt

SEQ ID NO: 660499 - DNA, 15 bp, Homo sapiens
atttctttctctttt

SEQ ID NO: 660500 - DNA, 15 bp, Homo sapiens
tttctttctcttttc

SEQ ID NO: 660501 - DNA, 15 bp, Homo sapiens
ttctttctcttttct

SEQ ID NO: 660502 - DNA, 15 bp, Homo sapiens
tctttctcttttctg

SEQ ID NO: 660503 - DNA, 15 bp, Homo sapiens
ctttctcttttctgt

SEQ ID NO: 660504 - DNA, 15 bp, Homo sapiens
tttctcttttctgtc

SEQ ID NO: 660505 - DNA, 15 bp, Homo sapiens
ttctcttttctgtcc

SEQ ID NO: 660506 - DNA, 15 bp, Homo sapiens
tctcttttctgtcct

SEQ ID NO: 660507 - DNA, 15 bp, Homo sapiens
ctcttttctgtcctt

SEQ ID NO: 660508 - DNA, 15 bp, Homo sapiens
tcttttctgtccttt

SEQ ID NO: 660509 - DNA, 15 bp, Homo sapiens
cttttctgtcctttt

SEQ ID NO: 660510 - DNA, 15 bp, Homo sapiens
ttttctgtccttttt

SEQ ID NO: 660511 - DNA, 15 bp, Homo sapiens
tttctgtcctttttt

SEQ ID NO: 660512 - DNA, 15 bp, Homo sapiens
ttctgtccttttttt

SEQ ID NO: 660513 - DNA, 15 bp, Homo sapiens
tctgtcctttttttc

SEQ ID NO: 660514 - DNA, 15 bp, Homo sapiens
ctgtcctttttttct

SEQ ID NO: 660515 - DNA, 15 bp, Homo sapiens
tgtcctttttttctt

SEQ ID NO: 660516 - DNA, 15 bp, Homo sapiens
gtcctttttttcttt

SEQ ID NO: 660517 - DNA, 15 bp, Homo sapiens
tcctttttttctttc

SEQ ID NO: 660518 - DNA, 15 bp, Homo sapiens
cctttttttctttct

SEQ ID NO: 660519 - DNA, 15 bp, Homo sapiens
ctttttttctttctt

SEQ ID NO: 660520 - DNA, 15 bp, Homo sapiens
tttttttctttcttt

SEQ ID NO: 660521 - DNA, 15 bp, Homo sapiens
ttttttctttcttta

SEQ ID NO: 660522 - DNA, 15 bp, Homo sapiens
tttttctttctttaa

SEQ ID NO: 660523 - DNA, 15 bp, Homo sapiens
ttttctttctttaaa

SEQ ID NO: 660524 - DNA, 15 bp, Homo sapiens
tttctttctttaaaa

SEQ ID NO: 660525 - DNA, 15 bp, Homo sapiens
ttctttctttaaaag

SEQ ID NO: 660526 - DNA, 15 bp, Homo sapiens
tctttctttaaaagt

SEQ ID NO: 660527 - DNA, 15 bp, Homo sapiens
ctttctttaaaagta

SEQ ID NO: 660528 - DNA, 15 bp, Homo sapiens
tttctttaaaagtaa

SEQ ID NO: 660529 - DNA, 15 bp, Homo sapiens
ttctttaaaagtaat

SEQ ID NO: 660530 - DNA, 15 bp, Homo sapiens
tctttaaaagtaata

SEQ ID NO: 660531 - DNA, 15 bp, Homo sapiens
ctttaaaagtaatat

SEQ ID NO: 660532 - DNA, 15 bp, Homo sapiens
tttaaaagtaatata

SEQ ID NO: 660533 - DNA, 15 bp, Homo sapiens
ttaaaagtaatatat

SEQ ID NO: 660534 - DNA, 15 bp, Homo sapiens
taaaagtaatatatg

SEQ ID NO: 660535 - DNA, 15 bp, Homo sapiens
aaaagtaatatatgc

SEQ ID NO: 660536 - DNA, 15 bp, Homo sapiens
aaagtaatatatgca

SEQ ID NO: 660537 - DNA, 15 bp, Homo sapiens
aagtaatatatgcag

SEQ ID NO: 660538 - DNA, 15 bp, Homo sapiens
agtaatatatgcaga

SEQ ID NO: 660539 - DNA, 15 bp, Homo sapiens
gtaatatatgcagaa

SEQ ID NO: 660540 - DNA, 15 bp, Homo sapiens
taatatatgcagaag

SEQ ID NO: 660541 - DNA, 15 bp, Homo sapiens
aatatatgcagaagg

SEQ ID NO: 660542 - DNA, 15 bp, Homo sapiens
atatatgcagaaggt

SEQ ID NO: 660543 - DNA, 15 bp, Homo sapiens
tatatgcagaaggtc

SEQ ID NO: 660544 - DNA, 15 bp, Homo sapiens
atatgcagaaggtca

SEQ ID NO: 660545 - DNA, 15 bp, Homo sapiens
tatgcagaaggtcac

SEQ ID NO: 660546 - DNA, 15 bp, Homo sapiens
atgcagaaggtcaca

SEQ ID NO: 660547 - DNA, 15 bp, Homo sapiens
tgcagaaggtcacaa

SEQ ID NO: 660548 - DNA, 15 bp, Homo sapiens
gcagaaggtcacaaa

SEQ ID NO: 660549 - DNA, 15 bp, Homo sapiens
cagaaggtcacaaaa

SEQ ID NO: 660550 - DNA, 15 bp, Homo sapiens
agaaggtcacaaaat

SEQ ID NO: 660551 - DNA, 15 bp, Homo sapiens
gaaggtcacaaaatc

SEQ ID NO: 660552 - DNA, 15 bp, Homo sapiens
aaggtcacaaaatca

SEQ ID NO: 660553 - DNA, 15 bp, Homo sapiens
aggtcacaaaatcaa

SEQ ID NO: 660554 - DNA, 15 bp, Homo sapiens
ggtcacaaaatcaaa

SEQ ID NO: 660555 - DNA, 15 bp, Homo sapiens
gtcacaaaatcaaat

SEQ ID NO: 660556 - DNA, 15 bp, Homo sapiens
tcacaaaatcaaata

SEQ ID NO: 660557 - DNA, 15 bp, Homo sapiens
cacaaaatcaaataa

SEQ ID NO: 660558 - DNA, 15 bp, Homo sapiens
acaaaatcaaataat

SEQ ID NO: 660559 - DNA, 15 bp, Homo sapiens
caaaatcaaataata

SEQ ID NO: 660560 - DNA, 15 bp, Homo sapiens
aaaatcaaataataa

SEQ ID NO: 660561 - DNA, 15 bp, Homo sapiens
aaatcaaataataaa

SEQ ID NO: 660562 - DNA, 15 bp, Homo sapiens
aatcaaataataaat

SEQ ID NO: 660563 - DNA, 15 bp, Homo sapiens
atcaaataataaata

SEQ ID NO: 660564 - DNA, 15 bp, Homo sapiens
tcaaataataaatat

SEQ ID NO: 660565 - DNA, 15 bp, Homo sapiens
caaataataaatatt

SEQ ID NO: 660566 - DNA, 15 bp, Homo sapiens
aaataataaatattt

SEQ ID NO: 660567 - DNA, 15 bp, Homo sapiens
aataataaatattta

SEQ ID NO: 660568 - DNA, 15 bp, Homo sapiens
ataataaatatttat

SEQ ID NO: 660569 - DNA, 15 bp, Homo sapiens
taataaatatttata

SEQ ID NO: 660570 - DNA, 15 bp, Homo sapiens
aataaatatttataa

SEQ ID NO: 660571 - DNA, 15 bp, Homo sapiens
ataaatatttataat

SEQ ID NO: 660572 - DNA, 15 bp, Homo sapiens
taaatatttataata

SEQ ID NO: 660573 - DNA, 15 bp, Homo sapiens
aaatatttataataa

SEQ ID NO: 660574 - DNA, 15 bp, Homo sapiens
aatatttataataaa

SEQ ID NO: 660575 - DNA, 15 bp, Homo sapiens
atatttataataaaa

SEQ ID NO: 660576 - DNA, 15 bp, Homo sapiens
tatttataataaaaa

SEQ ID NO: 660577 - DNA, 15 bp, Homo sapiens
atttataataaaaag

SEQ ID NO: 660578 - DNA, 15 bp, Homo sapiens
tttataataaaaagc

SEQ ID NO: 660579 - DNA, 15 bp, Homo sapiens
ttataataaaaagcc

SEQ ID NO: 660580 - DNA, 15 bp, Homo sapiens
tataataaaaagcca

SEQ ID NO: 660581 - DNA, 15 bp, Homo sapiens
ataataaaaagccac

SEQ ID NO: 660582 - DNA, 15 bp, Homo sapiens
taataaaaagccacc

SEQ ID NO: 660583 - DNA, 15 bp, Homo sapiens
aataaaaagccaccc

SEQ ID NO: 660584 - DNA, 15 bp, Homo sapiens
ataaaaagccacccc

SEQ ID NO: 660585 - DNA, 15 bp, Homo sapiens
taaaaagccaccccc

SEQ ID NO: 660586 - DNA, 15 bp, Homo sapiens
aaaaagccacccccc

SEQ ID NO: 660587 - DNA, 15 bp, Homo sapiens
aaaagccacccccct

SEQ ID NO: 660588 - DNA, 15 bp, Homo sapiens
aaagccacccccctg

SEQ ID NO: 660589 - DNA, 15 bp, Homo sapiens
aagccacccccctgc

SEQ ID NO: 660590 - DNA, 15 bp, Homo sapiens
agccacccccctgct

SEQ ID NO: 660591 - DNA, 15 bp, Homo sapiens
gccacccccctgctt

SEQ ID NO: 660592 - DNA, 15 bp, Homo sapiens
ccacccccctgcttt

SEQ ID NO: 660593 - DNA, 15 bp, Homo sapiens
cacccccctgcttta

SEQ ID NO: 660594 - DNA, 15 bp, Homo sapiens
acccccctgctttat

SEQ ID NO: 660595 - DNA, 15 bp, Homo sapiens
cccccctgctttatg

SEQ ID NO: 660596 - DNA, 15 bp, Homo sapiens
ccccctgctttatgc

SEQ ID NO: 660597 - DNA, 15 bp, Homo sapiens
cccctgctttatgct

SEQ ID NO: 660598 - DNA, 15 bp, Homo sapiens
ccctgctttatgctt

SEQ ID NO: 660599 - DNA, 15 bp, Homo sapiens
cctgctttatgctta

SEQ ID NO: 660600 - DNA, 15 bp, Homo sapiens
ctgctttatgcttac

SEQ ID NO: 660601 - DNA, 15 bp, Homo sapiens
tgctttatgcttaca

SEQ ID NO: 660602 - DNA, 15 bp, Homo sapiens
gctttatgcttacac

SEQ ID NO: 660603 - DNA, 15 bp, Homo sapiens
ctttatgcttacact

SEQ ID NO: 660604 - DNA, 15 bp, Homo sapiens
tttatgcttacactc

SEQ ID NO: 660605 - DNA, 15 bp, Homo sapiens
ttatgcttacactcc

SEQ ID NO: 660606 - DNA, 15 bp, Homo sapiens
tatgcttacactccc

SEQ ID NO: 660607 - DNA, 15 bp, Homo sapiens
atgcttacactccca

SEQ ID NO: 660608 - DNA, 15 bp, Homo sapiens
tgcttacactcccac

SEQ ID NO: 660609 - DNA, 15 bp, Homo sapiens
gcttacactcccact

SEQ ID NO: 660610 - DNA, 15 bp, Homo sapiens
cttacactcccactc

SEQ ID NO: 660611 - DNA, 15 bp, Homo sapiens
ttacactcccactcc

SEQ ID NO: 660612 - DNA, 15 bp, Homo sapiens
tacactcccactcca

SEQ ID NO: 660613 - DNA, 15 bp, Homo sapiens
acactcccactccac

SEQ ID NO: 660614 - DNA, 15 bp, Homo sapiens
cactcccactccaca

SEQ ID NO: 660615 - DNA, 15 bp, Homo sapiens
actcccactccacat

SEQ ID NO: 660616 - DNA, 15 bp, Homo sapiens
ctcccactccacatt

SEQ ID NO: 660617 - DNA, 15 bp, Homo sapiens
tcccactccacattt

SEQ ID NO: 660618 - DNA, 15 bp, Homo sapiens
cccactccacatttc

SEQ ID NO: 660619 - DNA, 15 bp, Homo sapiens
ccactccacatttct

SEQ ID NO: 660620 - DNA, 15 bp, Homo sapiens
cactccacatttctc

SEQ ID NO: 660621 - DNA, 15 bp, Homo sapiens
actccacatttctct

SEQ ID NO: 660622 - DNA, 15 bp, Homo sapiens
ctccacatttctctg

SEQ ID NO: 660623 - DNA, 15 bp, Homo sapiens
tccacatttctctgc

SEQ ID NO: 660624 - DNA, 15 bp, Homo sapiens
ccacatttctctgct

SEQ ID NO: 660625 - DNA, 15 bp, Homo sapiens
cacatttctctgctc

SEQ ID NO: 660626 - DNA, 15 bp, Homo sapiens
acatttctctgctca

SEQ ID NO: 660627 - DNA, 15 bp, Homo sapiens
catttctctgctcaa

SEQ ID NO: 660628 - DNA, 15 bp, Homo sapiens
atttctctgctcaaa

SEQ ID NO: 660629 - DNA, 15 bp, Homo sapiens
tttctctgctcaaag

SEQ ID NO: 660630 - DNA, 15 bp, Homo sapiens
ttctctgctcaaagg

SEQ ID NO: 660631 - DNA, 15 bp, Homo sapiens
tctctgctcaaaggc

SEQ ID NO: 660632 - DNA, 15 bp, Homo sapiens
ctctgctcaaaggca

SEQ ID NO: 660633 - DNA, 15 bp, Homo sapiens
tctgctcaaaggcaa

SEQ ID NO: 660634 - DNA, 15 bp, Homo sapiens
ctgctcaaaggcaac

SEQ ID NO: 660635 - DNA, 15 bp, Homo sapiens
tgctcaaaggcaact

SEQ ID NO: 660636 - DNA, 15 bp, Homo sapiens
gctcaaaggcaacta

SEQ ID NO: 660637 - DNA, 15 bp, Homo sapiens
ctcaaaggcaactat

SEQ ID NO: 660638 - DNA, 15 bp, Homo sapiens
tcaaaggcaactatt

SEQ ID NO: 660639 - DNA, 15 bp, Homo sapiens
caaaggcaactattt

SEQ ID NO: 660640 - DNA, 15 bp, Homo sapiens
aaaggcaactatttt

SEQ ID NO: 660641 - DNA, 15 bp, Homo sapiens
aaggcaactattttt

SEQ ID NO: 660642 - DNA, 15 bp, Homo sapiens
aggcaactatttttg

SEQ ID NO: 660643 - DNA, 15 bp, Homo sapiens
ggcaactatttttga

SEQ ID NO: 660644 - DNA, 15 bp, Homo sapiens
gcaactatttttgac

SEQ ID NO: 660645 - DNA, 15 bp, Homo sapiens
caactatttttgacc

SEQ ID NO: 660646 - DNA, 15 bp, Homo sapiens
aactatttttgacca

SEQ ID NO: 660647 - DNA, 15 bp, Homo sapiens
actatttttgaccac

SEQ ID NO: 660648 - DNA, 15 bp, Homo sapiens
ctatttttgaccact

SEQ ID NO: 660649 - DNA, 15 bp, Homo sapiens
tatttttgaccactt

SEQ ID NO: 660650 - DNA, 15 bp, Homo sapiens
atttttgaccacttg

SEQ ID NO: 660651 - DNA, 15 bp, Homo sapiens
tttttgaccacttga

SEQ ID NO: 660652 - DNA, 15 bp, Homo sapiens
ttttgaccacttgat

SEQ ID NO: 660653 - DNA, 15 bp, Homo sapiens
tttgaccacttgatg

SEQ ID NO: 660654 - DNA, 15 bp, Homo sapiens
ttgaccacttgatgt

SEQ ID NO: 660655 - DNA, 15 bp, Homo sapiens
tgaccacttgatgtt

SEQ ID NO: 660656 - DNA, 15 bp, Homo sapiens
gaccacttgatgttt

SEQ ID NO: 660657 - DNA, 15 bp, Homo sapiens
accacttgatgtttt

SEQ ID NO: 660658 - DNA, 15 bp, Homo sapiens
ccacttgatgttttt

SEQ ID NO: 660659 - DNA, 15 bp, Homo sapiens
cacttgatgtttttt

SEQ ID NO: 660660 - DNA, 15 bp, Homo sapiens
acttgatgttttttg

SEQ ID NO: 660661 - DNA, 15 bp, Homo sapiens
cttgatgttttttga

SEQ ID NO: 660662 - DNA, 15 bp, Homo sapiens
ttgatgttttttgat

SEQ ID NO: 660663 - DNA, 15 bp, Homo sapiens
tgatgttttttgatc

SEQ ID NO: 660664 - DNA, 15 bp, Homo sapiens
gatgttttttgatct

SEQ ID NO: 660665 - DNA, 15 bp, Homo sapiens
atgttttttgatctc

SEQ ID NO: 660666 - DNA, 15 bp, Homo sapiens
tgttttttgatctcc

SEQ ID NO: 660667 - DNA, 15 bp, Homo sapiens
gttttttgatctccc

SEQ ID NO: 660668 - DNA, 15 bp, Homo sapiens
ttttttgatctccca

SEQ ID NO: 660669 - DNA, 15 bp, Homo sapiens
tttttgatctcccaa

SEQ ID NO: 660670 - DNA, 15 bp, Homo sapiens
ttttgatctcccaat

SEQ ID NO: 660671 - DNA, 15 bp, Homo sapiens
tttgatctcccaatg

SEQ ID NO: 660672 - DNA, 15 bp, Homo sapiens
ttgatctcccaatgg

SEQ ID NO: 660673 - DNA, 15 bp, Homo sapiens
tgatctcccaatggt

SEQ ID NO: 660674 - DNA, 15 bp, Homo sapiens
gatctcccaatggtg

SEQ ID NO: 660675 - DNA, 15 bp, Homo sapiens
atctcccaatggtga

SEQ ID NO: 660676 - DNA, 15 bp, Homo sapiens
tctcccaatggtgac

SEQ ID NO: 660677 - DNA, 15 bp, Homo sapiens
ctcccaatggtgact

SEQ ID NO: 660678 - DNA, 15 bp, Homo sapiens
tcccaatggtgactt

SEQ ID NO: 660679 - DNA, 15 bp, Homo sapiens
cccaatggtgacttt

SEQ ID NO: 660680 - DNA, 15 bp, Homo sapiens
ccaatggtgactttt

SEQ ID NO: 660681 - DNA, 15 bp, Homo sapiens
caatggtgactttta

SEQ ID NO: 660682 - DNA, 15 bp, Homo sapiens
aatggtgacttttat

SEQ ID NO: 660683 - DNA, 15 bp, Homo sapiens
atggtgacttttatg

SEQ ID NO: 660684 - DNA, 15 bp, Homo sapiens
tggtgacttttatgt

SEQ ID NO: 660685 - DNA, 15 bp, Homo sapiens
ggtgacttttatgtc

SEQ ID NO: 660686 - DNA, 15 bp, Homo sapiens
gtgacttttatgtct

SEQ ID NO: 660687 - DNA, 15 bp, Homo sapiens
tgacttttatgtctt

SEQ ID NO: 660688 - DNA, 15 bp, Homo sapiens
gacttttatgtcttt

SEQ ID NO: 660689 - DNA, 15 bp, Homo sapiens
acttttatgtcttta

SEQ ID NO: 660690 - DNA, 15 bp, Homo sapiens
cttttatgtctttaa

SEQ ID NO: 660691 - DNA, 15 bp, Homo sapiens
ttttatgtctttaaa

SEQ ID NO: 660692 - DNA, 15 bp, Homo sapiens
tttatgtctttaaat

SEQ ID NO: 660693 - DNA, 15 bp, Homo sapiens
ttatgtctttaaata

SEQ ID NO: 660694 - DNA, 15 bp, Homo sapiens
tatgtctttaaataa

SEQ ID NO: 660695 - DNA, 15 bp, Homo sapiens
atgtctttaaataat

SEQ ID NO: 660696 - DNA, 15 bp, Homo sapiens
tgtctttaaataata

SEQ ID NO: 660697 - DNA, 15 bp, Homo sapiens
gtctttaaataatat

SEQ ID NO: 660698 - DNA, 15 bp, Homo sapiens
tctttaaataatatg

SEQ ID NO: 660699 - DNA, 15 bp, Homo sapiens
ctttaaataatatgc

SEQ ID NO: 660700 - DNA, 15 bp, Homo sapiens
tttaaataatatgct

SEQ ID NO: 660701 - DNA, 15 bp, Homo sapiens
ttaaataatatgctc

SEQ ID NO: 660702 - DNA, 15 bp, Homo sapiens
taaataatatgctca

SEQ ID NO: 660703 - DNA, 15 bp, Homo sapiens
aaataatatgctcat

SEQ ID NO: 660704 - DNA, 15 bp, Homo sapiens
aataatatgctcatg

SEQ ID NO: 660705 - DNA, 15 bp, Homo sapiens
ataatatgctcatgc

SEQ ID NO: 660706 - DNA, 15 bp, Homo sapiens
taatatgctcatgct

SEQ ID NO: 660707 - DNA, 15 bp, Homo sapiens
aatatgctcatgcta

SEQ ID NO: 660708 - DNA, 15 bp, Homo sapiens
atatgctcatgctat

SEQ ID NO: 660709 - DNA, 15 bp, Homo sapiens
tatgctcatgctatt

SEQ ID NO: 660710 - DNA, 15 bp, Homo sapiens
atgctcatgctattt

SEQ ID NO: 660711 - DNA, 15 bp, Homo sapiens
tgctcatgctatttc

SEQ ID NO: 660712 - DNA, 15 bp, Homo sapiens
gctcatgctatttca

SEQ ID NO: 660713 - DNA, 15 bp, Homo sapiens
ctcatgctatttcat

SEQ ID NO: 660714 - DNA, 15 bp, Homo sapiens
tcatgctatttcatg

SEQ ID NO: 660715 - DNA, 15 bp, Homo sapiens
catgctatttcatga

SEQ ID NO: 660716 - DNA, 15 bp, Homo sapiens
atgctatttcatgat

SEQ ID NO: 660717 - DNA, 15 bp, Homo sapiens
tgctatttcatgatt

SEQ ID NO: 660718 - DNA, 15 bp, Homo sapiens
gctatttcatgattt

SEQ ID NO: 660719 - DNA, 15 bp, Homo sapiens
ctatttcatgattta

SEQ ID NO: 660720 - DNA, 15 bp, Homo sapiens
tatttcatgatttaa

SEQ ID NO: 660721 - DNA, 15 bp, Homo sapiens
atttcatgatttaac

SEQ ID NO: 660722 - DNA, 15 bp, Homo sapiens
tttcatgatttaaca

SEQ ID NO: 660723 - DNA, 15 bp, Homo sapiens
ttcatgatttaacaa

SEQ ID NO: 660724 - DNA, 15 bp, Homo sapiens
tcatgatttaacaaa

SEQ ID NO: 660725 - DNA, 15 bp, Homo sapiens
catgatttaacaaat

SEQ ID NO: 660726 - DNA, 15 bp, Homo sapiens
atgatttaacaaatt

SEQ ID NO: 660727 - DNA, 15 bp, Homo sapiens
tgatttaacaaattt

SEQ ID NO: 660728 - DNA, 15 bp, Homo sapiens
gatttaacaaattta

SEQ ID NO: 660729 - DNA, 15 bp, Homo sapiens
atttaacaaatttag

SEQ ID NO: 660730 - DNA, 15 bp, Homo sapiens
tttaacaaatttaga

SEQ ID NO: 660731 - DNA, 15 bp, Homo sapiens
ttaacaaatttagac

SEQ ID NO: 660732 - DNA, 15 bp, Homo sapiens
taacaaatttagact

SEQ ID NO: 660733 - DNA, 15 bp, Homo sapiens
aacaaatttagactc

SEQ ID NO: 660734 - DNA, 15 bp, Homo sapiens
acaaatttagactct

SEQ ID NO: 660735 - DNA, 15 bp, Homo sapiens
caaatttagactctc

SEQ ID NO: 660736 - DNA, 15 bp, Homo sapiens
aaatttagactctct

SEQ ID NO: 660737 - DNA, 15 bp, Homo sapiens
aatttagactctctg

SEQ ID NO: 660738 - DNA, 15 bp, Homo sapiens
atttagactctctgt

SEQ ID NO: 660739 - DNA, 15 bp, Homo sapiens
tttagactctctgtg

SEQ ID NO: 660740 - DNA, 15 bp, Homo sapiens
ttagactctctgtga

SEQ ID NO: 660741 - DNA, 15 bp, Homo sapiens
tagactctctgtgat

SEQ ID NO: 660742 - DNA, 15 bp, Homo sapiens
agactctctgtgatt

SEQ ID NO: 660743 - DNA, 15 bp, Homo sapiens
gactctctgtgattt

SEQ ID NO: 660744 - DNA, 15 bp, Homo sapiens
actctctgtgattta

SEQ ID NO: 660745 - DNA, 15 bp, Homo sapiens
ctctctgtgatttat

SEQ ID NO: 660746 - DNA, 15 bp, Homo sapiens
tctctgtgatttatt

SEQ ID NO: 660747 - DNA, 15 bp, Homo sapiens
ctctgtgatttattc

SEQ ID NO: 660748 - DNA, 15 bp, Homo sapiens
tctgtgatttattct

SEQ ID NO: 660749 - DNA, 15 bp, Homo sapiens
ctgtgatttattctc

SEQ ID NO: 660750 - DNA, 15 bp, Homo sapiens
tgtgatttattctca

SEQ ID NO: 660751 - DNA, 15 bp, Homo sapiens
gtgatttattctcaa

SEQ ID NO: 660752 - DNA, 15 bp, Homo sapiens
tgatttattctcaag

SEQ ID NO: 660753 - DNA, 15 bp, Homo sapiens
gatttattctcaaga

SEQ ID NO: 660754 - DNA, 15 bp, Homo sapiens
atttattctcaagag

SEQ ID NO: 660755 - DNA, 15 bp, Homo sapiens
tttattctcaagaga

SEQ ID NO: 660756 - DNA, 15 bp, Homo sapiens
ttattctcaagagat

SEQ ID NO: 660757 - DNA, 15 bp, Homo sapiens
tattctcaagagata

SEQ ID NO: 660758 - DNA, 15 bp, Homo sapiens
attctcaagagataa

SEQ ID NO: 660759 - DNA, 15 bp, Homo sapiens
ttctcaagagataaa

SEQ ID NO: 660760 - DNA, 15 bp, Homo sapiens
tctcaagagataaaa

SEQ ID NO: 660761 - DNA, 15 bp, Homo sapiens
ctcaagagataaaaa

SEQ ID NO: 660762 - DNA, 15 bp, Homo sapiens
tcaagagataaaaat

SEQ ID NO: 660763 - DNA, 15 bp, Homo sapiens
caagagataaaaatc

SEQ ID NO: 660764 - DNA, 15 bp, Homo sapiens
aagagataaaaatct

SEQ ID NO: 660765 - DNA, 15 bp, Homo sapiens
agagataaaaatcta

SEQ ID NO: 660766 - DNA, 15 bp, Homo sapiens
gagataaaaatctac

SEQ ID NO: 660767 - DNA, 15 bp, Homo sapiens
agataaaaatctact

SEQ ID NO: 660768 - DNA, 15 bp, Homo sapiens
gataaaaatctactt

SEQ ID NO: 660769 - DNA, 15 bp, Homo sapiens
ataaaaatctactta

SEQ ID NO: 660770 - DNA, 15 bp, Homo sapiens
taaaaatctacttac

SEQ ID NO: 660771 - DNA, 15 bp, Homo sapiens
aaaaatctacttact

SEQ ID NO: 660772 - DNA, 15 bp, Homo sapiens
aaaatctacttactc

SEQ ID NO: 660773 - DNA, 15 bp, Homo sapiens
aaatctacttactct

SEQ ID NO: 660774 - DNA, 15 bp, Homo sapiens
aatctacttactctc

SEQ ID NO: 660775 - DNA, 15 bp, Homo sapiens
atctacttactctca

SEQ ID NO: 660776 - DNA, 15 bp, Homo sapiens
tctacttactctcac

SEQ ID NO: 660777 - DNA, 15 bp, Homo sapiens
ctacttactctcacc

SEQ ID NO: 660778 - DNA, 15 bp, Homo sapiens
tacttactctcacca

SEQ ID NO: 660779 - DNA, 15 bp, Homo sapiens
acttactctcaccac

SEQ ID NO: 660780 - DNA, 15 bp, Homo sapiens
cttactctcaccact

SEQ ID NO: 660781 - DNA, 15 bp, Homo sapiens
ttactctcaccactc

SEQ ID NO: 660782 - DNA, 15 bp, Homo sapiens
tactctcaccactcc

SEQ ID NO: 660783 - DNA, 15 bp, Homo sapiens
actctcaccactccc

SEQ ID NO: 660784 - DNA, 15 bp, Homo sapiens
ctctcaccactccct

SEQ ID NO: 660785 - DNA, 15 bp, Homo sapiens
tctcaccactccctc

SEQ ID NO: 660786 - DNA, 15 bp, Homo sapiens
ctcaccactccctcc

SEQ ID NO: 660787 - DNA, 15 bp, Homo sapiens
tcaccactccctcct

SEQ ID NO: 660788 - DNA, 15 bp, Homo sapiens
caccactccctcctt

SEQ ID NO: 660789 - DNA, 15 bp, Homo sapiens
accactccctccttt

SEQ ID NO: 660790 - DNA, 15 bp, Homo sapiens
ccactccctcctttt

SEQ ID NO: 660791 - DNA, 15 bp, Homo sapiens
cactccctccttttg

SEQ ID NO: 660792 - DNA, 15 bp, Homo sapiens
actccctccttttgc

SEQ ID NO: 660793 - DNA, 15 bp, Homo sapiens
ctccctccttttgcc

SEQ ID NO: 660794 - DNA, 15 bp, Homo sapiens
tccctccttttgcct

SEQ ID NO: 660795 - DNA, 15 bp, Homo sapiens
ccctccttttgccta

SEQ ID NO: 660796 - DNA, 15 bp, Homo sapiens
cctccttttgcctac

SEQ ID NO: 660797 - DNA, 15 bp, Homo sapiens
ctccttttgcctacc

SEQ ID NO: 660798 - DNA, 15 bp, Homo sapiens
tccttttgcctacct

SEQ ID NO: 660799 - DNA, 15 bp, Homo sapiens
ccttttgcctacctc

SEQ ID NO: 660800 - DNA, 15 bp, Homo sapiens
cttttgcctacctcc

SEQ ID NO: 660801 - DNA, 15 bp, Homo sapiens
ttttgcctacctcct

SEQ ID NO: 660802 - DNA, 15 bp, Homo sapiens
tttgcctacctcctc

SEQ ID NO: 660803 - DNA, 15 bp, Homo sapiens
ttgcctacctcctcc

SEQ ID NO: 660804 - DNA, 15 bp, Homo sapiens
tgcctacctcctccc

SEQ ID NO: 660805 - DNA, 15 bp, Homo sapiens
gcctacctcctccca

SEQ ID NO: 660806 - DNA, 15 bp, Homo sapiens
cctacctcctcccaa

SEQ ID NO: 660807 - DNA, 15 bp, Homo sapiens
ctacctcctcccaat

SEQ ID NO: 660808 - DNA, 15 bp, Homo sapiens
tacctcctcccaata

SEQ ID NO: 660809 - DNA, 15 bp, Homo sapiens
acctcctcccaatat

SEQ ID NO: 660810 - DNA, 15 bp, Homo sapiens
cctcctcccaatata

SEQ ID NO: 660811 - DNA, 15 bp, Homo sapiens
ctcctcccaatatag

SEQ ID NO: 660812 - DNA, 15 bp, Homo sapiens
tcctcccaatatagt

SEQ ID NO: 660813 - DNA, 15 bp, Homo sapiens
cctcccaatatagtt

SEQ ID NO: 660814 - DNA, 15 bp, Homo sapiens
ctcccaatatagtta

SEQ ID NO: 660815 - DNA, 15 bp, Homo sapiens
tcccaatatagttat

SEQ ID NO: 660816 - DNA, 15 bp, Homo sapiens
cccaatatagttata

SEQ ID NO: 660817 - DNA, 15 bp, Homo sapiens
ccaatatagttatat

SEQ ID NO: 660818 - DNA, 15 bp, Homo sapiens
caatatagttatatc

SEQ ID NO: 660819 - DNA, 15 bp, Homo sapiens
aatatagttatatca

SEQ ID NO: 660820 - DNA, 15 bp, Homo sapiens
atatagttatatcat

SEQ ID NO: 660821 - DNA, 15 bp, Homo sapiens
tatagttatatcatt

SEQ ID NO: 660822 - DNA, 15 bp, Homo sapiens
atagttatatcattt

SEQ ID NO: 660823 - DNA, 15 bp, Homo sapiens
tagttatatcatttt

SEQ ID NO: 660824 - DNA, 15 bp, Homo sapiens
agttatatcattttt

SEQ ID NO: 660825 - DNA, 15 bp, Homo sapiens
gttatatcatttttt

SEQ ID NO: 660826 - DNA, 15 bp, Homo sapiens
ttatatcatttttta

SEQ ID NO: 660827 - DNA, 15 bp, Homo sapiens
tatatcattttttag

SEQ ID NO: 660828 - DNA, 15 bp, Homo sapiens
atatcattttttagg

SEQ ID NO: 660829 - DNA, 15 bp, Homo sapiens
tatcattttttaggc

SEQ ID NO: 660830 - DNA, 15 bp, Homo sapiens
atcattttttaggcc

SEQ ID NO: 660831 - DNA, 15 bp, Homo sapiens
tcattttttaggcct

SEQ ID NO: 660832 - DNA, 15 bp, Homo sapiens
cattttttaggcctt

SEQ ID NO: 660833 - DNA, 15 bp, Homo sapiens
attttttaggccttc

SEQ ID NO: 660834 - DNA, 15 bp, Homo sapiens
ttttttaggccttct

SEQ ID NO: 660835 - DNA, 15 bp, Homo sapiens
tttttaggccttcta

SEQ ID NO: 660836 - DNA, 15 bp, Homo sapiens
ttttaggccttctat

SEQ ID NO: 660837 - DNA, 15 bp, Homo sapiens
tttaggccttctatt

SEQ ID NO: 660838 - DNA, 15 bp, Homo sapiens
ttaggccttctattt

SEQ ID NO: 660839 - DNA, 15 bp, Homo sapiens
taggccttctattta

SEQ ID NO: 660840 - DNA, 15 bp, Homo sapiens
aggccttctatttat

SEQ ID NO: 660841 - DNA, 15 bp, Homo sapiens
ggccttctatttata

SEQ ID NO: 660842 - DNA, 15 bp, Homo sapiens
gccttctatttataa

SEQ ID NO: 660843 - DNA, 15 bp, Homo sapiens
ccttctatttataaa

SEQ ID NO: 660844 - DNA, 15 bp, Homo sapiens
cttctatttataaat

SEQ ID NO: 660845 - DNA, 15 bp, Homo sapiens
ttctatttataaatt

SEQ ID NO: 660846 - DNA, 15 bp, Homo sapiens
tctatttataaattt

SEQ ID NO: 660847 - DNA, 15 bp, Homo sapiens
ctatttataaatttg

SEQ ID NO: 660848 - DNA, 15 bp, Homo sapiens
tatttataaatttgt

SEQ ID NO: 660849 - DNA, 15 bp, Homo sapiens
atttataaatttgta

SEQ ID NO: 660850 - DNA, 15 bp, Homo sapiens
tttataaatttgtaa

SEQ ID NO: 660851 - DNA, 15 bp, Homo sapiens
ttataaatttgtaaa

SEQ ID NO: 660852 - DNA, 15 bp, Homo sapiens
tataaatttgtaaac

SEQ ID NO: 660853 - DNA, 15 bp, Homo sapiens
ataaatttgtaaact

SEQ ID NO: 660854 - DNA, 15 bp, Homo sapiens
taaatttgtaaactt

SEQ ID NO: 660855 - DNA, 15 bp, Homo sapiens
aaatttgtaaacttc

SEQ ID NO: 660856 - DNA, 15 bp, Homo sapiens
aatttgtaaacttct

SEQ ID NO: 660857 - DNA, 15 bp, Homo sapiens
atttgtaaacttctg

SEQ ID NO: 660858 - DNA, 15 bp, Homo sapiens
tttgtaaacttctga

SEQ ID NO: 660859 - DNA, 15 bp, Homo sapiens
ttgtaaacttctgat

SEQ ID NO: 660860 - DNA, 15 bp, Homo sapiens
tgtaaacttctgatc

SEQ ID NO: 660861 - DNA, 15 bp, Homo sapiens
gtaaacttctgatct

SEQ ID NO: 660862 - DNA, 15 bp, Homo sapiens
taaacttctgatctg

SEQ ID NO: 660863 - DNA, 15 bp, Homo sapiens
aaacttctgatctgc

SEQ ID NO: 660864 - DNA, 15 bp, Homo sapiens
aacttctgatctgct

SEQ ID NO: 660865 - DNA, 15 bp, Homo sapiens
acttctgatctgctt

SEQ ID NO: 660866 - DNA, 15 bp, Homo sapiens
cttctgatctgcttc

SEQ ID NO: 660867 - DNA, 15 bp, Homo sapiens
ttctgatctgcttcc

SEQ ID NO: 660868 - DNA, 15 bp, Homo sapiens
tctgatctgcttccg

SEQ ID NO: 660869 - DNA, 15 bp, Homo sapiens
ctgatctgcttccgt

SEQ ID NO: 660870 - DNA, 15 bp, Homo sapiens
tgatctgcttccgtt

SEQ ID NO: 660871 - DNA, 15 bp, Homo sapiens
gatctgcttccgttg

SEQ ID NO: 660872 - DNA, 15 bp, Homo sapiens
atctgcttccgttgc

SEQ ID NO: 660873 - DNA, 15 bp, Homo sapiens
tctgcttccgttgct

SEQ ID NO: 660874 - DNA, 15 bp, Homo sapiens
ctgcttccgttgctc

SEQ ID NO: 660875 - DNA, 15 bp, Homo sapiens
tgcttccgttgctct

SEQ ID NO: 660876 - DNA, 15 bp, Homo sapiens
gcttccgttgctctt

SEQ ID NO: 660877 - DNA, 15 bp, Homo sapiens
cttccgttgctcttc

SEQ ID NO: 660878 - DNA, 15 bp, Homo sapiens
ttccgttgctcttcc

SEQ ID NO: 660879 - DNA, 15 bp, Homo sapiens
tccgttgctcttcca

SEQ ID NO: 660880 - DNA, 15 bp, Homo sapiens
ccgttgctcttccac

SEQ ID NO: 660881 - DNA, 15 bp, Homo sapiens
cgttgctcttccacc

SEQ ID NO: 660882 - DNA, 15 bp, Homo sapiens
gttgctcttccacca

SEQ ID NO: 660883 - DNA, 15 bp, Homo sapiens
ttgctcttccaccac

SEQ ID NO: 660884 - DNA, 15 bp, Homo sapiens
tgctcttccaccacc

SEQ ID NO: 660885 - DNA, 15 bp, Homo sapiens
gctcttccaccacct

SEQ ID NO: 660886 - DNA, 15 bp, Homo sapiens
ctcttccaccacctg

SEQ ID NO: 660887 - DNA, 15 bp, Homo sapiens
tcttccaccacctgt

SEQ ID NO: 660888 - DNA, 15 bp, Homo sapiens
cttccaccacctgta

SEQ ID NO: 660889 - DNA, 15 bp, Homo sapiens
ttccaccacctgtag

SEQ ID NO: 660890 - DNA, 15 bp, Homo sapiens
tccaccacctgtaga

SEQ ID NO: 660891 - DNA, 15 bp, Homo sapiens
ccaccacctgtagat

SEQ ID NO: 660892 - DNA, 15 bp, Homo sapiens
caccacctgtagata

SEQ ID NO: 660893 - DNA, 15 bp, Homo sapiens
accacctgtagatag

SEQ ID NO: 660894 - DNA, 15 bp, Homo sapiens
ccacctgtagatagt

SEQ ID NO: 660895 - DNA, 15 bp, Homo sapiens
cacctgtagatagtt

SEQ ID NO: 660896 - DNA, 15 bp, Homo sapiens
acctgtagatagttc

SEQ ID NO: 660897 - DNA, 15 bp, Homo sapiens
cctgtagatagttcc

SEQ ID NO: 660898 - DNA, 15 bp, Homo sapiens
ctgtagatagttcct

SEQ ID NO: 660899 - DNA, 15 bp, Homo sapiens
tgtagatagttcctc

SEQ ID NO: 660900 - DNA, 15 bp, Homo sapiens
gtagatagttcctct

SEQ ID NO: 660901 - DNA, 15 bp, Homo sapiens
tagatagttcctctt

SEQ ID NO: 660902 - DNA, 15 bp, Homo sapiens
agatagttcctcttg

SEQ ID NO: 660903 - DNA, 15 bp, Homo sapiens
gatagttcctcttga

SEQ ID NO: 660904 - DNA, 15 bp, Homo sapiens
atagttcctcttgaa

SEQ ID NO: 660905 - DNA, 15 bp, Homo sapiens
tagttcctcttgaat

SEQ ID NO: 660906 - DNA, 15 bp, Homo sapiens
agttcctcttgaatt

SEQ ID NO: 660907 - DNA, 15 bp, Homo sapiens
gttcctcttgaattc

SEQ ID NO: 660908 - DNA, 15 bp, Homo sapiens
ttcctcttgaattct

SEQ ID NO: 660909 - DNA, 15 bp, Homo sapiens
tcctcttgaattctc

SEQ ID NO: 660910 - DNA, 15 bp, Homo sapiens
cctcttgaattctca

SEQ ID NO: 660911 - DNA, 15 bp, Homo sapiens
ctcttgaattctcac

SEQ ID NO: 660912 - DNA, 15 bp, Homo sapiens
tcttgaattctcact

SEQ ID NO: 660913 - DNA, 15 bp, Homo sapiens
cttgaattctcactt

SEQ ID NO: 660914 - DNA, 15 bp, Homo sapiens
ttgaattctcacttt

SEQ ID NO: 660915 - DNA, 15 bp, Homo sapiens
tgaattctcactttc

SEQ ID NO: 660916 - DNA, 15 bp, Homo sapiens
gaattctcactttct

SEQ ID NO: 660917 - DNA, 15 bp, Homo sapiens
aattctcactttcta

SEQ ID NO: 660918 - DNA, 15 bp, Homo sapiens
attctcactttctaa

SEQ ID NO: 660919 - DNA, 15 bp, Homo sapiens
ttctcactttctaaa

SEQ ID NO: 660920 - DNA, 15 bp, Homo sapiens
tctcactttctaaaa

SEQ ID NO: 660921 - DNA, 15 bp, Homo sapiens
ctcactttctaaaag

SEQ ID NO: 660922 - DNA, 15 bp, Homo sapiens
tcactttctaaaaga

SEQ ID NO: 660923 - DNA, 15 bp, Homo sapiens
cactttctaaaagaa

SEQ ID NO: 660924 - DNA, 15 bp, Homo sapiens
actttctaaaagaaa

SEQ ID NO: 660925 - DNA, 15 bp, Homo sapiens
ctttctaaaagaaaa

SEQ ID NO: 660926 - DNA, 15 bp, Homo sapiens
tttctaaaagaaaaa

SEQ ID NO: 660927 - DNA, 15 bp, Homo sapiens
ttctaaaagaaaaat

SEQ ID NO: 660928 - DNA, 15 bp, Homo sapiens
tctaaaagaaaaatg

SEQ ID NO: 660929 - DNA, 15 bp, Homo sapiens
ctaaaagaaaaatgt

SEQ ID NO: 660930 - DNA, 15 bp, Homo sapiens
taaaagaaaaatgtt

SEQ ID NO: 660931 - DNA, 15 bp, Homo sapiens
aaaagaaaaatgtta

SEQ ID NO: 660932 - DNA, 15 bp, Homo sapiens
aaagaaaaatgttag

SEQ ID NO: 660933 - DNA, 15 bp, Homo sapiens
aagaaaaatgttagc

SEQ ID NO: 660934 - DNA, 15 bp, Homo sapiens
agaaaaatgttagca

SEQ ID NO: 660935 - DNA, 15 bp, Homo sapiens
gaaaaatgttagcaa

SEQ ID NO: 660936 - DNA, 15 bp, Homo sapiens
aaaaatgttagcaat

SEQ ID NO: 660937 - DNA, 15 bp, Homo sapiens
aaaatgttagcaatc

SEQ ID NO: 660938 - DNA, 15 bp, Homo sapiens
aaatgttagcaatcc

SEQ ID NO: 660939 - DNA, 15 bp, Homo sapiens
aatgttagcaatcct

SEQ ID NO: 660940 - DNA, 15 bp, Homo sapiens
atgttagcaatccta

SEQ ID NO: 660941 - DNA, 15 bp, Homo sapiens
tgttagcaatcctac

SEQ ID NO: 660942 - DNA, 15 bp, Homo sapiens
gttagcaatcctacc

SEQ ID NO: 660943 - DNA, 15 bp, Homo sapiens
ttagcaatcctacct

SEQ ID NO: 660944 - DNA, 15 bp, Homo sapiens
tagcaatcctacctt

SEQ ID NO: 660945 - DNA, 15 bp, Homo sapiens
agcaatcctaccttt

SEQ ID NO: 660946 - DNA, 15 bp, Homo sapiens
gcaatcctaccttta

SEQ ID NO: 660947 - DNA, 15 bp, Homo sapiens
caatcctacctttat

SEQ ID NO: 660948 - DNA, 15 bp, Homo sapiens
aatcctacctttatt

SEQ ID NO: 660949 - DNA, 15 bp, Homo sapiens
atcctacctttattt

SEQ ID NO: 660950 - DNA, 15 bp, Homo sapiens
tcctacctttatttt

SEQ ID NO: 660951 - DNA, 15 bp, Homo sapiens
cctacctttattttc

SEQ ID NO: 660952 - DNA, 15 bp, Homo sapiens
ctacctttattttca

SEQ ID NO: 660953 - DNA, 15 bp, Homo sapiens
tacctttattttcac

SEQ ID NO: 660954 - DNA, 15 bp, Homo sapiens
acctttattttcacc

SEQ ID NO: 660955 - DNA, 15 bp, Homo sapiens
cctttattttcacct

SEQ ID NO: 660956 - DNA, 15 bp, Homo sapiens
ctttattttcacctc

SEQ ID NO: 660957 - DNA, 15 bp, Homo sapiens
tttattttcacctct

SEQ ID NO: 660958 - DNA, 15 bp, Homo sapiens
ttattttcacctctt

SEQ ID NO: 660959 - DNA, 15 bp, Homo sapiens
tattttcacctctta

SEQ ID NO: 660960 - DNA, 15 bp, Homo sapiens
attttcacctcttac

SEQ ID NO: 660961 - DNA, 15 bp, Homo sapiens
ttttcacctcttact

SEQ ID NO: 660962 - DNA, 15 bp, Homo sapiens
tttcacctcttactc

SEQ ID NO: 660963 - DNA, 15 bp, Homo sapiens
ttcacctcttactct

SEQ ID NO: 660964 - DNA, 15 bp, Homo sapiens
tcacctcttactctt

SEQ ID NO: 660965 - DNA, 15 bp, Homo sapiens
cacctcttactcttt

SEQ ID NO: 660966 - DNA, 15 bp, Homo sapiens
acctcttactctttt

SEQ ID NO: 660967 - DNA, 15 bp, Homo sapiens
cctcttactcttttc

SEQ ID NO: 660968 - DNA, 15 bp, Homo sapiens
ctcttactcttttca

SEQ ID NO: 660969 - DNA, 15 bp, Homo sapiens
tcttactcttttcac

SEQ ID NO: 660970 - DNA, 15 bp, Homo sapiens
cttactcttttcacc

SEQ ID NO: 660971 - DNA, 15 bp, Homo sapiens
ttactcttttcacct

SEQ ID NO: 660972 - DNA, 15 bp, Homo sapiens
tactcttttcacctc

SEQ ID NO: 660973 - DNA, 15 bp, Homo sapiens
actcttttcacctct

SEQ ID NO: 660974 - DNA, 15 bp, Homo sapiens
ctcttttcacctctt

SEQ ID NO: 660975 - DNA, 15 bp, Homo sapiens
tcttttcacctctta

SEQ ID NO: 660976 - DNA, 15 bp, Homo sapiens
cttttcacctcttac

SEQ ID NO: 660977 - DNA, 15 bp, Homo sapiens
tttcacctcttactt

SEQ ID NO: 660978 - DNA, 15 bp, Homo sapiens
ttcacctcttacttc

SEQ ID NO: 660979 - DNA, 15 bp, Homo sapiens
tcacctcttacttct

SEQ ID NO: 660980 - DNA, 15 bp, Homo sapiens
cacctcttacttctt

SEQ ID NO: 660981 - DNA, 15 bp, Homo sapiens
acctcttacttcttt

SEQ ID NO: 660982 - DNA, 15 bp, Homo sapiens
cctcttacttctttt

SEQ ID NO: 660983 - DNA, 15 bp, Homo sapiens
ctcttacttctttta

SEQ ID NO: 660984 - DNA, 15 bp, Homo sapiens
tcttacttcttttac

SEQ ID NO: 660985 - DNA, 15 bp, Homo sapiens
cttacttcttttacc

SEQ ID NO: 660986 - DNA, 15 bp, Homo sapiens
ttacttcttttacct

SEQ ID NO: 660987 - DNA, 15 bp, Homo sapiens
tacttcttttacctc

SEQ ID NO: 660988 - DNA, 15 bp, Homo sapiens
acttcttttacctct

SEQ ID NO: 660989 - DNA, 15 bp, Homo sapiens
cttcttttacctctt

SEQ ID NO: 660990 - DNA, 15 bp, Homo sapiens
ttcttttacctctta

SEQ ID NO: 660991 - DNA, 15 bp, Homo sapiens
tcttttacctcttaa

SEQ ID NO: 660992 - DNA, 15 bp, Homo sapiens
cttttacctcttaag

SEQ ID NO: 660993 - DNA, 15 bp, Homo sapiens
ttttacctcttaagt

SEQ ID NO: 660994 - DNA, 15 bp, Homo sapiens
tttacctcttaagtt

SEQ ID NO: 660995 - DNA, 15 bp, Homo sapiens
ttacctcttaagttc

SEQ ID NO: 660996 - DNA, 15 bp, Homo sapiens
tacctcttaagttct

SEQ ID NO: 660997 - DNA, 15 bp, Homo sapiens
acctcttaagttcta

SEQ ID NO: 660998 - DNA, 15 bp, Homo sapiens
cctcttaagttctaa

SEQ ID NO: 660999 - DNA, 15 bp, Homo sapiens
ctcttaagttctaac

SEQ ID NO: 661000 - DNA, 15 bp, Homo sapiens
tcttaagttctaact

SEQ ID NO: 661001 - DNA, 15 bp, Homo sapiens
cttaagttctaactg

SEQ ID NO: 661002 - DNA, 15 bp, Homo sapiens
ttaagttctaactgc

SEQ ID NO: 661003 - DNA, 15 bp, Homo sapiens
taagttctaactgca

SEQ ID NO: 661004 - DNA, 15 bp, Homo sapiens
aagttctaactgcac

SEQ ID NO: 661005 - DNA, 15 bp, Homo sapiens
agttctaactgcact

SEQ ID NO: 661006 - DNA, 15 bp, Homo sapiens
gttctaactgcactt

SEQ ID NO: 661007 - DNA, 15 bp, Homo sapiens
ttctaactgcacttt

SEQ ID NO: 661008 - DNA, 15 bp, Homo sapiens
tctaactgcactttt

SEQ ID NO: 661009 - DNA, 15 bp, Homo sapiens
ctaactgcactttta

SEQ ID NO: 661010 - DNA, 15 bp, Homo sapiens
taactgcacttttat

SEQ ID NO: 661011 - DNA, 15 bp, Homo sapiens
aactgcacttttatc

SEQ ID NO: 661012 - DNA, 15 bp, Homo sapiens
actgcacttttatca

SEQ ID NO: 661013 - DNA, 15 bp, Homo sapiens
ctgcacttttatcaa

SEQ ID NO: 661014 - DNA, 15 bp, Homo sapiens
tgcacttttatcaag

SEQ ID NO: 661015 - DNA, 15 bp, Homo sapiens
gcacttttatcaaga

SEQ ID NO: 661016 - DNA, 15 bp, Homo sapiens
cacttttatcaagaa

SEQ ID NO: 661017 - DNA, 15 bp, Homo sapiens
acttttatcaagaat

SEQ ID NO: 661018 - DNA, 15 bp, Homo sapiens
cttttatcaagaatt

SEQ ID NO: 661019 - DNA, 15 bp, Homo sapiens
ttttatcaagaattc

SEQ ID NO: 661020 - DNA, 15 bp, Homo sapiens
tttatcaagaattca

SEQ ID NO: 661021 - DNA, 15 bp, Homo sapiens
ttatcaagaattcag

SEQ ID NO: 661022 - DNA, 15 bp, Homo sapiens
tatcaagaattcaga

SEQ ID NO: 661023 - DNA, 15 bp, Homo sapiens
atcaagaattcagag

SEQ ID NO: 661024 - DNA, 15 bp, Homo sapiens
tcaagaattcagagc

SEQ ID NO: 661025 - DNA, 15 bp, Homo sapiens
caagaattcagagca

SEQ ID NO: 661026 - DNA, 15 bp, Homo sapiens
aagaattcagagcac

SEQ ID NO: 661027 - DNA, 15 bp, Homo sapiens
agaattcagagcaca

SEQ ID NO: 661028 - DNA, 15 bp, Homo sapiens
gaattcagagcacat

SEQ ID NO: 661029 - DNA, 15 bp, Homo sapiens
aattcagagcacatt

SEQ ID NO: 661030 - DNA, 15 bp, Homo sapiens
attcagagcacattc

SEQ ID NO: 661031 - DNA, 15 bp, Homo sapiens
ttcagagcacattct

SEQ ID NO: 661032 - DNA, 15 bp, Homo sapiens
tcagagcacattctg

SEQ ID NO: 661033 - DNA, 15 bp, Homo sapiens
cagagcacattctgt

SEQ ID NO: 661034 - DNA, 15 bp, Homo sapiens
agagcacattctgtt

SEQ ID NO: 661035 - DNA, 15 bp, Homo sapiens
gagcacattctgttt

SEQ ID NO: 661036 - DNA, 15 bp, Homo sapiens
agcacattctgttta

SEQ ID NO: 661037 - DNA, 15 bp, Homo sapiens
gcacattctgtttat

SEQ ID NO: 661038 - DNA, 15 bp, Homo sapiens
cacattctgtttata

SEQ ID NO: 661039 - DNA, 15 bp, Homo sapiens
acattctgtttataa

SEQ ID NO: 661040 - DNA, 15 bp, Homo sapiens
cattctgtttataac

SEQ ID NO: 661041 - DNA, 15 bp, Homo sapiens
attctgtttataaca

SEQ ID NO: 661042 - DNA, 15 bp, Homo sapiens
ttctgtttataacat

SEQ ID NO: 661043 - DNA, 15 bp, Homo sapiens
tctgtttataacatt

SEQ ID NO: 661044 - DNA, 15 bp, Homo sapiens
ctgtttataacatta

SEQ ID NO: 661045 - DNA, 15 bp, Homo sapiens
tgtttataacattat

SEQ ID NO: 661046 - DNA, 15 bp, Homo sapiens
gtttataacattatc

SEQ ID NO: 661047 - DNA, 15 bp, Homo sapiens
tttataacattatct

SEQ ID NO: 661048 - DNA, 15 bp, Homo sapiens
ttataacattatctt

SEQ ID NO: 661049 - DNA, 15 bp, Homo sapiens
tataacattatcttt

SEQ ID NO: 661050 - DNA, 15 bp, Homo sapiens
ataacattatctttc

SEQ ID NO: 661051 - DNA, 15 bp, Homo sapiens
taacattatctttcc

SEQ ID NO: 661052 - DNA, 15 bp, Homo sapiens
aacattatctttcct

SEQ ID NO: 661053 - DNA, 15 bp, Homo sapiens
acattatctttcctg

SEQ ID NO: 661054 - DNA, 15 bp, Homo sapiens
cattatctttcctgc

SEQ ID NO: 661055 - DNA, 15 bp, Homo sapiens
attatctttcctgcc

SEQ ID NO: 661056 - DNA, 15 bp, Homo sapiens
ttatctttcctgcct

SEQ ID NO: 661057 - DNA, 15 bp, Homo sapiens
tatctttcctgcctt

SEQ ID NO: 661058 - DNA, 15 bp, Homo sapiens
atctttcctgccttc

SEQ ID NO: 661059 - DNA, 15 bp, Homo sapiens
tctttcctgccttca

SEQ ID NO: 661060 - DNA, 15 bp, Homo sapiens
ctttcctgccttcac

SEQ ID NO: 661061 - DNA, 15 bp, Homo sapiens
tttcctgccttcact

SEQ ID NO: 661062 - DNA, 15 bp, Homo sapiens
ttcctgccttcactc

SEQ ID NO: 661063 - DNA, 15 bp, Homo sapiens
tcctgccttcactct

SEQ ID NO: 661064 - DNA, 15 bp, Homo sapiens
cctgccttcactcta

SEQ ID NO: 661065 - DNA, 15 bp, Homo sapiens
ctgccttcactctaa

SEQ ID NO: 661066 - DNA, 15 bp, Homo sapiens
tgccttcactctaag

SEQ ID NO: 661067 - DNA, 15 bp, Homo sapiens
gccttcactctaagt

SEQ ID NO: 661068 - DNA, 15 bp, Homo sapiens
ccttcactctaagtt

SEQ ID NO: 661069 - DNA, 15 bp, Homo sapiens
cttcactctaagttg

SEQ ID NO: 661070 - DNA, 15 bp, Homo sapiens
ttcactctaagttga

SEQ ID NO: 661071 - DNA, 15 bp, Homo sapiens
tcactctaagttgat

SEQ ID NO: 661072 - DNA, 15 bp, Homo sapiens
cactctaagttgatt

SEQ ID NO: 661073 - DNA, 15 bp, Homo sapiens
actctaagttgattc

SEQ ID NO: 661074 - DNA, 15 bp, Homo sapiens
ctctaagttgattct

SEQ ID NO: 661075 - DNA, 15 bp, Homo sapiens
tctaagttgattcta

SEQ ID NO: 661076 - DNA, 15 bp, Homo sapiens
ctaagttgattctaa

SEQ ID NO: 661077 - DNA, 15 bp, Homo sapiens
taagttgattctaaa

SEQ ID NO: 661078 - DNA, 15 bp, Homo sapiens
aagttgattctaaaa

SEQ ID NO: 661079 - DNA, 15 bp, Homo sapiens
agttgattctaaaag

SEQ ID NO: 661080 - DNA, 15 bp, Homo sapiens
gttgattctaaaagt

SEQ ID NO: 661081 - DNA, 15 bp, Homo sapiens
ttgattctaaaagtt

SEQ ID NO: 661082 - DNA, 15 bp, Homo sapiens
tgattctaaaagttg

SEQ ID NO: 661083 - DNA, 15 bp, Homo sapiens
gattctaaaagttga

SEQ ID NO: 661084 - DNA, 15 bp, Homo sapiens
attctaaaagttgaa

SEQ ID NO: 661085 - DNA, 15 bp, Homo sapiens
ttctaaaagttgaaa

SEQ ID NO: 661086 - DNA, 15 bp, Homo sapiens
tctaaaagttgaaaa

SEQ ID NO: 661087 - DNA, 15 bp, Homo sapiens
ctaaaagttgaaaat

SEQ ID NO: 661088 - DNA, 15 bp, Homo sapiens
taaaagttgaaaatc

SEQ ID NO: 661089 - DNA, 15 bp, Homo sapiens
aaaagttgaaaatca

SEQ ID NO: 661090 - DNA, 15 bp, Homo sapiens
aaagttgaaaatcaa

SEQ ID NO: 661091 - DNA, 15 bp, Homo sapiens
aagttgaaaatcaat

SEQ ID NO: 661092 - DNA, 15 bp, Homo sapiens
agttgaaaatcaatt

SEQ ID NO: 661093 - DNA, 15 bp, Homo sapiens
gttgaaaatcaattg

SEQ ID NO: 661094 - DNA, 15 bp, Homo sapiens
ttgaaaatcaattga

SEQ ID NO: 661095 - DNA, 15 bp, Homo sapiens
tgaaaatcaattgac

SEQ ID NO: 661096 - DNA, 15 bp, Homo sapiens
gaaaatcaattgaca

SEQ ID NO: 661097 - DNA, 15 bp, Homo sapiens
aaaatcaattgacag

SEQ ID NO: 661098 - DNA, 15 bp, Homo sapiens
aaatcaattgacagc

SEQ ID NO: 661099 - DNA, 15 bp, Homo sapiens
aatcaattgacagct

SEQ ID NO: 661100 - DNA, 15 bp, Homo sapiens
atcaattgacagctt

SEQ ID NO: 661101 - DNA, 15 bp, Homo sapiens
tcaattgacagcttt

SEQ ID NO: 661102 - DNA, 15 bp, Homo sapiens
caattgacagctttt

SEQ ID NO: 661103 - DNA, 15 bp, Homo sapiens
aattgacagcttttt

SEQ ID NO: 661104 - DNA, 15 bp, Homo sapiens
attgacagctttttt

SEQ ID NO: 661105 - DNA, 15 bp, Homo sapiens
ttgacagctttttta

SEQ ID NO: 661106 - DNA, 15 bp, Homo sapiens
tgacagcttttttaa

SEQ ID NO: 661107 - DNA, 15 bp, Homo sapiens
gacagcttttttaat

SEQ ID NO: 661108 - DNA, 15 bp, Homo sapiens
acagcttttttaatg

SEQ ID NO: 661109 - DNA, 15 bp, Homo sapiens
cagcttttttaatga

SEQ ID NO: 661110 - DNA, 15 bp, Homo sapiens
agcttttttaatgat

SEQ ID NO: 661111 - DNA, 15 bp, Homo sapiens
gcttttttaatgatt

SEQ ID NO: 661112 - DNA, 15 bp, Homo sapiens
cttttttaatgatta

SEQ ID NO: 661113 - DNA, 15 bp, Homo sapiens
ttttttaatgattat

SEQ ID NO: 661114 - DNA, 15 bp, Homo sapiens
tttttaatgattatg

SEQ ID NO: 661115 - DNA, 15 bp, Homo sapiens
ttttaatgattatgt

SEQ ID NO: 661116 - DNA, 15 bp, Homo sapiens
tttaatgattatgta

SEQ ID NO: 661117 - DNA, 15 bp, Homo sapiens
ttaatgattatgtaa

SEQ ID NO: 661118 - DNA, 15 bp, Homo sapiens
taatgattatgtaaa

SEQ ID NO: 661119 - DNA, 15 bp, Homo sapiens
aatgattatgtaaat

SEQ ID NO: 661120 - DNA, 15 bp, Homo sapiens
atgattatgtaaata

SEQ ID NO: 661121 - DNA, 15 bp, Homo sapiens
tgattatgtaaatat

SEQ ID NO: 661122 - DNA, 15 bp, Homo sapiens
gattatgtaaatatt

SEQ ID NO: 661123 - DNA, 15 bp, Homo sapiens
attatgtaaatattg

SEQ ID NO: 661124 - DNA, 15 bp, Homo sapiens
ttatgtaaatattgt

SEQ ID NO: 661125 - DNA, 15 bp, Homo sapiens
tatgtaaatattgtt

SEQ ID NO: 661126 - DNA, 15 bp, Homo sapiens
atgtaaatattgttc

SEQ ID NO: 661127 - DNA, 15 bp, Homo sapiens
tgtaaatattgttca

SEQ ID NO: 661128 - DNA, 15 bp, Homo sapiens
gtaaatattgttcat

SEQ ID NO: 661129 - DNA, 15 bp, Homo sapiens
taaatattgttcatc

SEQ ID NO: 661130 - DNA, 15 bp, Homo sapiens
aaatattgttcatcc

SEQ ID NO: 661131 - DNA, 15 bp, Homo sapiens
aatattgttcatcct

SEQ ID NO: 661132 - DNA, 15 bp, Homo sapiens
atattgttcatcctt

SEQ ID NO: 661133 - DNA, 15 bp, Homo sapiens
tattgttcatccttc

SEQ ID NO: 661134 - DNA, 15 bp, Homo sapiens
attgttcatccttca

SEQ ID NO: 661135 - DNA, 15 bp, Homo sapiens
ttgttcatccttcag

SEQ ID NO: 661136 - DNA, 15 bp, Homo sapiens
tgttcatccttcagt

SEQ ID NO: 661137 - DNA, 15 bp, Homo sapiens
gttcatccttcagtc

SEQ ID NO: 661138 - DNA, 15 bp, Homo sapiens
ttcatccttcagtca

SEQ ID NO: 661139 - DNA, 15 bp, Homo sapiens
tcatccttcagtcaa

SEQ ID NO: 661140 - DNA, 15 bp, Homo sapiens
catccttcagtcaaa

SEQ ID NO: 661141 - DNA, 15 bp, Homo sapiens
atccttcagtcaaat

SEQ ID NO: 661142 - DNA, 15 bp, Homo sapiens
tccttcagtcaaata

SEQ ID NO: 661143 - DNA, 15 bp, Homo sapiens
ccttcagtcaaatag

SEQ ID NO: 661144 - DNA, 15 bp, Homo sapiens
cttcagtcaaatagt

SEQ ID NO: 661145 - DNA, 15 bp, Homo sapiens
ttcagtcaaatagtg

SEQ ID NO: 661146 - DNA, 15 bp, Homo sapiens
tcagtcaaatagtga

SEQ ID NO: 661147 - DNA, 15 bp, Homo sapiens
cagtcaaatagtgag

SEQ ID NO: 661148 - DNA, 15 bp, Homo sapiens
agtcaaatagtgagt

SEQ ID NO: 661149 - DNA, 15 bp, Homo sapiens
gtcaaatagtgagtt

SEQ ID NO: 661150 - DNA, 15 bp, Homo sapiens
tcaaatagtgagtta

SEQ ID NO: 661151 - DNA, 15 bp, Homo sapiens
caaatagtgagttac

SEQ ID NO: 661152 - DNA, 15 bp, Homo sapiens
aaatagtgagttaca

SEQ ID NO: 661153 - DNA, 15 bp, Homo sapiens
aatagtgagttacat

SEQ ID NO: 661154 - DNA, 15 bp, Homo sapiens
atagtgagttacatt

SEQ ID NO: 661155 - DNA, 15 bp, Homo sapiens
tagtgagttacattt

SEQ ID NO: 661156 - DNA, 15 bp, Homo sapiens
agtgagttacattta

SEQ ID NO: 661157 - DNA, 15 bp, Homo sapiens
gtgagttacatttac

SEQ ID NO: 661158 - DNA, 15 bp, Homo sapiens
tgagttacatttaca

SEQ ID NO: 661159 - DNA, 15 bp, Homo sapiens
gagttacatttacat

SEQ ID NO: 661160 - DNA, 15 bp, Homo sapiens
agttacatttacatt

SEQ ID NO: 661161 - DNA, 15 bp, Homo sapiens
gttacatttacatta

SEQ ID NO: 661162 - DNA, 15 bp, Homo sapiens
ttacatttacattat

SEQ ID NO: 661163 - DNA, 15 bp, Homo sapiens
tacatttacattata

SEQ ID NO: 661164 - DNA, 15 bp, Homo sapiens
acatttacattatat

SEQ ID NO: 661165 - DNA, 15 bp, Homo sapiens
catttacattatatt

SEQ ID NO: 661166 - DNA, 15 bp, Homo sapiens
atttacattatattt

SEQ ID NO: 661167 - DNA, 15 bp, Homo sapiens
tttacattatatttt

SEQ ID NO: 661168 - DNA, 15 bp, Homo sapiens
ttacattatattttt

SEQ ID NO: 661169 - DNA, 15 bp, Homo sapiens
tacattatatttttt

SEQ ID NO: 661170 - DNA, 15 bp, Homo sapiens
acattatattttttt

SEQ ID NO: 661171 - DNA, 15 bp, Homo sapiens
cattatatttttttg

SEQ ID NO: 661172 - DNA, 15 bp, Homo sapiens
attatatttttttga

SEQ ID NO: 661173 - DNA, 15 bp, Homo sapiens
ttatatttttttgat

SEQ ID NO: 661174 - DNA, 15 bp, Homo sapiens
tatatttttttgatt

SEQ ID NO: 661175 - DNA, 15 bp, Homo sapiens
atatttttttgattg

SEQ ID NO: 661176 - DNA, 15 bp, Homo sapiens
tatttttttgattgt

SEQ ID NO: 661177 - DNA, 15 bp, Homo sapiens
atttttttgattgtt

SEQ ID NO: 661178 - DNA, 15 bp, Homo sapiens
tttttttgattgttt

SEQ ID NO: 661179 - DNA, 15 bp, Homo sapiens
ttttttgattgtttt

SEQ ID NO: 661180 - DNA, 15 bp, Homo sapiens
tttttgattgttttt

SEQ ID NO: 661181 - DNA, 15 bp, Homo sapiens
ttttgattgtttttc

SEQ ID NO: 661182 - DNA, 15 bp, Homo sapiens
tttgattgtttttct

SEQ ID NO: 661183 - DNA, 15 bp, Homo sapiens
ttgattgtttttctg

SEQ ID NO: 661184 - DNA, 15 bp, Homo sapiens
tgattgtttttctga

SEQ ID NO: 661185 - DNA, 15 bp, Homo sapiens
gattgtttttctgaa

SEQ ID NO: 661186 - DNA, 15 bp, Homo sapiens
attgtttttctgaaa

SEQ ID NO: 661187 - DNA, 15 bp, Homo sapiens
ttgtttttctgaaag

SEQ ID NO: 661188 - DNA, 15 bp, Homo sapiens
tgtttttctgaaagg

SEQ ID NO: 661189 - DNA, 15 bp, Homo sapiens
gtttttctgaaaggt

SEQ ID NO: 661190 - DNA, 15 bp, Homo sapiens
tttttctgaaaggtt

SEQ ID NO: 661191 - DNA, 15 bp, Homo sapiens
ttttctgaaaggttt

SEQ ID NO: 661192 - DNA, 15 bp, Homo sapiens
tttctgaaaggtttc

SEQ ID NO: 661193 - DNA, 15 bp, Homo sapiens
ttctgaaaggtttct

SEQ ID NO: 661194 - DNA, 15 bp, Homo sapiens
tctgaaaggtttctt

SEQ ID NO: 661195 - DNA, 15 bp, Homo sapiens
ctgaaaggtttcttt

SEQ ID NO: 661196 - DNA, 15 bp, Homo sapiens
tgaaaggtttctttt

SEQ ID NO: 661197 - DNA, 15 bp, Homo sapiens
gaaaggtttcttttt

SEQ ID NO: 661198 - DNA, 15 bp, Homo sapiens
aaaggtttctttttt

SEQ ID NO: 661199 - DNA, 15 bp, Homo sapiens
aaggtttcttttttt

SEQ ID NO: 661200 - DNA, 15 bp, Homo sapiens
aggtttctttttttc

SEQ ID NO: 661201 - DNA, 15 bp, Homo sapiens
ggtttctttttttct

SEQ ID NO: 661202 - DNA, 15 bp, Homo sapiens
gtttctttttttctt

SEQ ID NO: 661203 - DNA, 15 bp, Homo sapiens
tttctttttttcttg

SEQ ID NO: 661204 - DNA, 15 bp, Homo sapiens
ttctttttttcttgc

SEQ ID NO: 661205 - DNA, 15 bp, Homo sapiens
tctttttttcttgca

SEQ ID NO: 661206 - DNA, 15 bp, Homo sapiens
ctttttttcttgcat

SEQ ID NO: 661207 - DNA, 15 bp, Homo sapiens
tttttttcttgcatt

SEQ ID NO: 661208 - DNA, 15 bp, Homo sapiens
ttttttcttgcattc

SEQ ID NO: 661209 - DNA, 15 bp, Homo sapiens
tttttcttgcattct

SEQ ID NO: 661210 - DNA, 15 bp, Homo sapiens
ttttcttgcattctt

SEQ ID NO: 661211 - DNA, 15 bp, Homo sapiens
tttcttgcattcttt

SEQ ID NO: 661212 - DNA, 15 bp, Homo sapiens
ttcttgcattctttg

SEQ ID NO: 661213 - DNA, 15 bp, Homo sapiens
tcttgcattctttgt

SEQ ID NO: 661214 - DNA, 15 bp, Homo sapiens
cttgcattctttgtc

SEQ ID NO: 661215 - DNA, 15 bp, Homo sapiens
ttgcattctttgtct

SEQ ID NO: 661216 - DNA, 15 bp, Homo sapiens
tgcattctttgtctt

SEQ ID NO: 661217 - DNA, 15 bp, Homo sapiens
gcattctttgtcttc

SEQ ID NO: 661218 - DNA, 15 bp, Homo sapiens
cattctttgtcttca

SEQ ID NO: 661219 - DNA, 15 bp, Homo sapiens
attctttgtcttcat

SEQ ID NO: 661220 - DNA, 15 bp, Homo sapiens
ttctttgtcttcatg

SEQ ID NO: 661221 - DNA, 15 bp, Homo sapiens
tctttgtcttcatga

SEQ ID NO: 661222 - DNA, 15 bp, Homo sapiens
ctttgtcttcatgaa

SEQ ID NO: 661223 - DNA, 15 bp, Homo sapiens
tttgtcttcatgaaa

SEQ ID NO: 661224 - DNA, 15 bp, Homo sapiens
ttgtcttcatgaaaa

SEQ ID NO: 661225 - DNA, 15 bp, Homo sapiens
tgtcttcatgaaaac

SEQ ID NO: 661226 - DNA, 15 bp, Homo sapiens
gtcttcatgaaaacc

SEQ ID NO: 661227 - DNA, 15 bp, Homo sapiens
tcttcatgaaaacct

SEQ ID NO: 661228 - DNA, 15 bp, Homo sapiens
cttcatgaaaacctt

SEQ ID NO: 661229 - DNA, 15 bp, Homo sapiens
ttcatgaaaaccttt

SEQ ID NO: 661230 - DNA, 15 bp, Homo sapiens
tcatgaaaacctttg

SEQ ID NO: 661231 - DNA, 15 bp, Homo sapiens
catgaaaacctttgt

SEQ ID NO: 661232 - DNA, 15 bp, Homo sapiens
atgaaaacctttgtg

SEQ ID NO: 661233 - DNA, 15 bp, Homo sapiens
tgaaaacctttgtgt

SEQ ID NO: 661234 - DNA, 15 bp, Homo sapiens
gaaaacctttgtgtt

SEQ ID NO: 661235 - DNA, 15 bp, Homo sapiens
aaaacctttgtgttc

SEQ ID NO: 661236 - DNA, 15 bp, Homo sapiens
aaacctttgtgttct

SEQ ID NO: 661237 - DNA, 15 bp, Homo sapiens
aacctttgtgttctt

SEQ ID NO: 661238 - DNA, 15 bp, Homo sapiens
acctttgtgttcttc

SEQ ID NO: 661239 - DNA, 15 bp, Homo sapiens
cctttgtgttcttcc

SEQ ID NO: 661240 - DNA, 15 bp, Homo sapiens
ctttgtgttcttcca

SEQ ID NO: 661241 - DNA, 15 bp, Homo sapiens
tttgtgttcttccaa

SEQ ID NO: 661242 - DNA, 15 bp, Homo sapiens
ttgtgttcttccaat

SEQ ID NO: 661243 - DNA, 15 bp, Homo sapiens
tgtgttcttccaatg

SEQ ID NO: 661244 - DNA, 15 bp, Homo sapiens
gtgttcttccaatgt

SEQ ID NO: 661245 - DNA, 15 bp, Homo sapiens
tgttcttccaatgtc

SEQ ID NO: 661246 - DNA, 15 bp, Homo sapiens
gttcttccaatgtct

SEQ ID NO: 661247 - DNA, 15 bp, Homo sapiens
ttcttccaatgtctc

SEQ ID NO: 661248 - DNA, 15 bp, Homo sapiens
tcttccaatgtctct

SEQ ID NO: 661249 - DNA, 15 bp, Homo sapiens
cttccaatgtctctg

SEQ ID NO: 661250 - DNA, 15 bp, Homo sapiens
ttccaatgtctctgt

SEQ ID NO: 661251 - DNA, 15 bp, Homo sapiens
tccaatgtctctgtc

SEQ ID NO: 661252 - DNA, 15 bp, Homo sapiens
ccaatgtctctgtca

SEQ ID NO: 661253 - DNA, 15 bp, Homo sapiens
caatgtctctgtcag

SEQ ID NO: 661254 - DNA, 15 bp, Homo sapiens
aatgtctctgtcagg

SEQ ID NO: 661255 - DNA, 15 bp, Homo sapiens
atgtctctgtcaggc

SEQ ID NO: 661256 - DNA, 15 bp, Homo sapiens
tgtctctgtcaggcc

SEQ ID NO: 661257 - DNA, 15 bp, Homo sapiens
gtctctgtcaggcca

SEQ ID NO: 661258 - DNA, 15 bp, Homo sapiens
tctctgtcaggccat

SEQ ID NO: 661259 - DNA, 15 bp, Homo sapiens
ctctgtcaggccatc

SEQ ID NO: 661260 - DNA, 15 bp, Homo sapiens
tctgtcaggccatct

SEQ ID NO: 661261 - DNA, 15 bp, Homo sapiens
ctgtcaggccatctc

SEQ ID NO: 661262 - DNA, 15 bp, Homo sapiens
tgtcaggccatctct

SEQ ID NO: 661263 - DNA, 15 bp, Homo sapiens
gtcaggccatctctt

SEQ ID NO: 661264 - DNA, 15 bp, Homo sapiens
tcaggccatctcttc

SEQ ID NO: 661265 - DNA, 15 bp, Homo sapiens
caggccatctcttcc

SEQ ID NO: 661266 - DNA, 15 bp, Homo sapiens
aggccatctcttccc

SEQ ID NO: 661267 - DNA, 15 bp, Homo sapiens
ggccatctcttccct

SEQ ID NO: 661268 - DNA, 15 bp, Homo sapiens
gccatctcttccctc

SEQ ID NO: 661269 - DNA, 15 bp, Homo sapiens
ccatctcttccctca

SEQ ID NO: 661270 - DNA, 15 bp, Homo sapiens
catctcttccctcat

SEQ ID NO: 661271 - DNA, 15 bp, Homo sapiens
atctcttccctcatt

SEQ ID NO: 661272 - DNA, 15 bp, Homo sapiens
tctcttccctcattt

SEQ ID NO: 661273 - DNA, 15 bp, Homo sapiens
ctcttccctcatttc

SEQ ID NO: 661274 - DNA, 15 bp, Homo sapiens
tcttccctcatttct

SEQ ID NO: 661275 - DNA, 15 bp, Homo sapiens
cttccctcatttctg

SEQ ID NO: 661276 - DNA, 15 bp, Homo sapiens
ttccctcatttctgt

SEQ ID NO: 661277 - DNA, 15 bp, Homo sapiens
tccctcatttctgtc

SEQ ID NO: 661278 - DNA, 15 bp, Homo sapiens
ccctcatttctgtca

SEQ ID NO: 661279 - DNA, 15 bp, Homo sapiens
cctcatttctgtcac

SEQ ID NO: 661280 - DNA, 15 bp, Homo sapiens
ctcatttctgtcact

SEQ ID NO: 661281 - DNA, 15 bp, Homo sapiens
tcatttctgtcactc

SEQ ID NO: 661282 - DNA, 15 bp, Homo sapiens
catttctgtcactcg

SEQ ID NO: 661283 - DNA, 15 bp, Homo sapiens
atttctgtcactcgc

SEQ ID NO: 661284 - DNA, 15 bp, Homo sapiens
tttctgtcactcgca

SEQ ID NO: 661285 - DNA, 15 bp, Homo sapiens
ttctgtcactcgcaa

SEQ ID NO: 661286 - DNA, 15 bp, Homo sapiens
tctgtcactcgcaac

SEQ ID NO: 661287 - DNA, 15 bp, Homo sapiens
ctgtcactcgcaacg

SEQ ID NO: 661288 - DNA, 15 bp, Homo sapiens
tgtcactcgcaacgt

SEQ ID NO: 661289 - DNA, 15 bp, Homo sapiens
gtcactcgcaacgtt

SEQ ID NO: 661290 - DNA, 15 bp, Homo sapiens
tcactcgcaacgttt

SEQ ID NO: 661291 - DNA, 15 bp, Homo sapiens
cactcgcaacgtttg

SEQ ID NO: 661292 - DNA, 15 bp, Homo sapiens
actcgcaacgtttgc

SEQ ID NO: 661293 - DNA, 15 bp, Homo sapiens
ctcgcaacgtttgcc

SEQ ID NO: 661294 - DNA, 15 bp, Homo sapiens
tcgcaacgtttgcct

SEQ ID NO: 661295 - DNA, 15 bp, Homo sapiens
cgcaacgtttgcctg

SEQ ID NO: 661296 - DNA, 15 bp, Homo sapiens
gcaacgtttgcctgt

SEQ ID NO: 661297 - DNA, 15 bp, Homo sapiens
caacgtttgcctgtt

SEQ ID NO: 661298 - DNA, 15 bp, Homo sapiens
aacgtttgcctgttg

SEQ ID NO: 661299 - DNA, 15 bp, Homo sapiens
acgtttgcctgttga

SEQ ID NO: 661300 - DNA, 15 bp, Homo sapiens
cgtttgcctgttgaa

SEQ ID NO: 661301 - DNA, 15 bp, Homo sapiens
gtttgcctgttgaac

SEQ ID NO: 661302 - DNA, 15 bp, Homo sapiens
tttgcctgttgaaca

SEQ ID NO: 661303 - DNA, 15 bp, Homo sapiens
ttgcctgttgaacag

SEQ ID NO: 661304 - DNA, 15 bp, Homo sapiens
tgcctgttgaacagt

SEQ ID NO: 661305 - DNA, 15 bp, Homo sapiens
gcctgttgaacagtc

SEQ ID NO: 661306 - DNA, 15 bp, Homo sapiens
cctgttgaacagtca

SEQ ID NO: 661307 - DNA, 15 bp, Homo sapiens
ctgttgaacagtcat

SEQ ID NO: 661308 - DNA, 15 bp, Homo sapiens
tgttgaacagtcatc

SEQ ID NO: 661309 - DNA, 15 bp, Homo sapiens
gttgaacagtcatca

SEQ ID NO: 661310 - DNA, 15 bp, Homo sapiens
ttgaacagtcatcat

SEQ ID NO: 661311 - DNA, 15 bp, Homo sapiens
tgaacagtcatcatc

SEQ ID NO: 661312 - DNA, 15 bp, Homo sapiens
gaacagtcatcatcc

SEQ ID NO: 661313 - DNA, 15 bp, Homo sapiens
aacagtcatcatcct

SEQ ID NO: 661314 - DNA, 15 bp, Homo sapiens
acagtcatcatcctg

SEQ ID NO: 661315 - DNA, 15 bp, Homo sapiens
cagtcatcatcctgt

SEQ ID NO: 661316 - DNA, 15 bp, Homo sapiens
agtcatcatcctgtg

SEQ ID NO: 661317 - DNA, 15 bp, Homo sapiens
gtcatcatcctgtga

SEQ ID NO: 661318 - DNA, 15 bp, Homo sapiens
tcatcatcctgtgag

SEQ ID NO: 661319 - DNA, 15 bp, Homo sapiens
catcatcctgtgagt

SEQ ID NO: 661320 - DNA, 15 bp, Homo sapiens
atcatcctgtgagtt

SEQ ID NO: 661321 - DNA, 15 bp, Homo sapiens
tcatcctgtgagttc

SEQ ID NO: 661322 - DNA, 15 bp, Homo sapiens
catcctgtgagttcc

SEQ ID NO: 661323 - DNA, 15 bp, Homo sapiens
atcctgtgagttccc

SEQ ID NO: 661324 - DNA, 15 bp, Homo sapiens
tcctgtgagttccct

SEQ ID NO: 661325 - DNA, 15 bp, Homo sapiens
cctgtgagttccctg

SEQ ID NO: 661326 - DNA, 15 bp, Homo sapiens
ctgtgagttccctgt

SEQ ID NO: 661327 - DNA, 15 bp, Homo sapiens
tgtgagttccctgtg

SEQ ID NO: 661328 - DNA, 15 bp, Homo sapiens
gtgagttccctgtga

SEQ ID NO: 661329 - DNA, 15 bp, Homo sapiens
tgagttccctgtgat

SEQ ID NO: 661330 - DNA, 15 bp, Homo sapiens
gagttccctgtgata

SEQ ID NO: 661331 - DNA, 15 bp, Homo sapiens
agttccctgtgatat

SEQ ID NO: 661332 - DNA, 15 bp, Homo sapiens
gttccctgtgatatt

SEQ ID NO: 661333 - DNA, 15 bp, Homo sapiens
ttccctgtgatattt

SEQ ID NO: 661334 - DNA, 15 bp, Homo sapiens
tccctgtgatatttc

SEQ ID NO: 661335 - DNA, 15 bp, Homo sapiens
ccctgtgatatttcc

SEQ ID NO: 661336 - DNA, 15 bp, Homo sapiens
cctgtgatatttcct

SEQ ID NO: 661337 - DNA, 15 bp, Homo sapiens
ctgtgatatttcctt

SEQ ID NO: 661338 - DNA, 15 bp, Homo sapiens
tgtgatatttccttg

SEQ ID NO: 661339 - DNA, 15 bp, Homo sapiens
gtgatatttccttgg

SEQ ID NO: 661340 - DNA, 15 bp, Homo sapiens
tgatatttccttgga

SEQ ID NO: 661341 - DNA, 15 bp, Homo sapiens
gatatttccttggat

SEQ ID NO: 661342 - DNA, 15 bp, Homo sapiens
atatttccttggatt

SEQ ID NO: 661343 - DNA, 15 bp, Homo sapiens
tatttccttggatta

SEQ ID NO: 661344 - DNA, 15 bp, Homo sapiens
atttccttggattag

SEQ ID NO: 661345 - DNA, 15 bp, Homo sapiens
tttccttggattaga

SEQ ID NO: 661346 - DNA, 15 bp, Homo sapiens
ttccttggattagat

SEQ ID NO: 661347 - DNA, 15 bp, Homo sapiens
tccttggattagatc

SEQ ID NO: 661348 - DNA, 15 bp, Homo sapiens
ccttggattagatcc

SEQ ID NO: 661349 - DNA, 15 bp, Homo sapiens
cttggattagatcca

SEQ ID NO: 661350 - DNA, 15 bp, Homo sapiens
ttggattagatccat

SEQ ID NO: 661351 - DNA, 15 bp, Homo sapiens
tggattagatccatt

SEQ ID NO: 661352 - DNA, 15 bp, Homo sapiens
ggattagatccatta

SEQ ID NO: 661353 - DNA, 15 bp, Homo sapiens
gattagatccattat

SEQ ID NO: 661354 - DNA, 15 bp, Homo sapiens
attagatccattatt

SEQ ID NO: 661355 - DNA, 15 bp, Homo sapiens
ttagatccattattt

SEQ ID NO: 661356 - DNA, 15 bp, Homo sapiens
tagatccattatttc

SEQ ID NO: 661357 - DNA, 15 bp, Homo sapiens
agatccattatttcg

SEQ ID NO: 661358 - DNA, 15 bp, Homo sapiens
gatccattatttcgt

SEQ ID NO: 661359 - DNA, 15 bp, Homo sapiens
atccattatttcgta

SEQ ID NO: 661360 - DNA, 15 bp, Homo sapiens
tccattatttcgtag

SEQ ID NO: 661361 - DNA, 15 bp, Homo sapiens
ccattatttcgtagt

SEQ ID NO: 661362 - DNA, 15 bp, Homo sapiens
cattatttcgtagtt

SEQ ID NO: 661363 - DNA, 15 bp, Homo sapiens
attatttcgtagttc

SEQ ID NO: 661364 - DNA, 15 bp, Homo sapiens
ttatttcgtagttcc

SEQ ID NO: 661365 - DNA, 15 bp, Homo sapiens
tatttcgtagttccc

SEQ ID NO: 661366 - DNA, 15 bp, Homo sapiens
atttcgtagttccca

SEQ ID NO: 661367 - DNA, 15 bp, Homo sapiens
tttcgtagttcccat

SEQ ID NO: 661368 - DNA, 15 bp, Homo sapiens
ttcgtagttcccata

SEQ ID NO: 661369 - DNA, 15 bp, Homo sapiens
tcgtagttcccatac

SEQ ID NO: 661370 - DNA, 15 bp, Homo sapiens
cgtagttcccataca

SEQ ID NO: 661371 - DNA, 15 bp, Homo sapiens
gtagttcccatacat

SEQ ID NO: 661372 - DNA, 15 bp, Homo sapiens
tagttcccatacatt

SEQ ID NO: 661373 - DNA, 15 bp, Homo sapiens
agttcccatacattc

SEQ ID NO: 661374 - DNA, 15 bp, Homo sapiens
gttcccatacattcc

SEQ ID NO: 661375 - DNA, 15 bp, Homo sapiens
ttcccatacattcct

SEQ ID NO: 661376 - DNA, 15 bp, Homo sapiens
tcccatacattcctt

SEQ ID NO: 661377 - DNA, 15 bp, Homo sapiens
cccatacattccttt

SEQ ID NO: 661378 - DNA, 15 bp, Homo sapiens
ccatacattcctttt

SEQ ID NO: 661379 - DNA, 15 bp, Homo sapiens
catacattccttttt

SEQ ID NO: 661380 - DNA, 15 bp, Homo sapiens
atacattcctttttc

SEQ ID NO: 661381 - DNA, 15 bp, Homo sapiens
tacattcctttttct

SEQ ID NO: 661382 - DNA, 15 bp, Homo sapiens
acattcctttttcta

SEQ ID NO: 661383 - DNA, 15 bp, Homo sapiens
cattcctttttctag

SEQ ID NO: 661384 - DNA, 15 bp, Homo sapiens
attcctttttctagt

SEQ ID NO: 661385 - DNA, 15 bp, Homo sapiens
ttcctttttctagtt

SEQ ID NO: 661386 - DNA, 15 bp, Homo sapiens
tcctttttctagttt

SEQ ID NO: 661387 - DNA, 15 bp, Homo sapiens
cctttttctagtttt

SEQ ID NO: 661388 - DNA, 15 bp, Homo sapiens
ctttttctagttttt

SEQ ID NO: 661389 - DNA, 15 bp, Homo sapiens
tttttctagttttta

SEQ ID NO: 661390 - DNA, 15 bp, Homo sapiens
ttttctagtttttac

SEQ ID NO: 661391 - DNA, 15 bp, Homo sapiens
tttctagtttttacc

SEQ ID NO: 661392 - DNA, 15 bp, Homo sapiens
ttctagtttttaccc

SEQ ID NO: 661393 - DNA, 15 bp, Homo sapiens
tctagtttttacccc

SEQ ID NO: 661394 - DNA, 15 bp, Homo sapiens
ctagtttttaccccc

SEQ ID NO: 661395 - DNA, 15 bp, Homo sapiens
tagtttttaccccct

SEQ ID NO: 661396 - DNA, 15 bp, Homo sapiens
agtttttaccccctt

SEQ ID NO: 661397 - DNA, 15 bp, Homo sapiens
gtttttacccccttt

SEQ ID NO: 661398 - DNA, 15 bp, Homo sapiens
tttttaccccctttt

SEQ ID NO: 661399 - DNA, 15 bp, Homo sapiens
ttttacccccttttg

SEQ ID NO: 661400 - DNA, 15 bp, Homo sapiens
tttacccccttttgt

SEQ ID NO: 661401 - DNA, 15 bp, Homo sapiens
ttacccccttttgtt

SEQ ID NO: 661402 - DNA, 15 bp, Homo sapiens
tacccccttttgttg

SEQ ID NO: 661403 - DNA, 15 bp, Homo sapiens
acccccttttgttgg

SEQ ID NO: 661404 - DNA, 15 bp, Homo sapiens
cccccttttgttgga

SEQ ID NO: 661405 - DNA, 15 bp, Homo sapiens
ccccttttgttggag

SEQ ID NO: 661406 - DNA, 15 bp, Homo sapiens
cccttttgttggagc

SEQ ID NO: 661407 - DNA, 15 bp, Homo sapiens
ccttttgttggagct

SEQ ID NO: 661408 - DNA, 15 bp, Homo sapiens
cttttgttggagctc

SEQ ID NO: 661409 - DNA, 15 bp, Homo sapiens
ttttgttggagctca

SEQ ID NO: 661410 - DNA, 15 bp, Homo sapiens
tttgttggagctcat

SEQ ID NO: 661411 - DNA, 15 bp, Homo sapiens
ttgttggagctcatc

SEQ ID NO: 661412 - DNA, 15 bp, Homo sapiens
tgttggagctcatcc

SEQ ID NO: 661413 - DNA, 15 bp, Homo sapiens
gttggagctcatcca

SEQ ID NO: 661414 - DNA, 15 bp, Homo sapiens
ttggagctcatccaa

SEQ ID NO: 661415 - DNA, 15 bp, Homo sapiens
tggagctcatccaaa

SEQ ID NO: 661416 - DNA, 15 bp, Homo sapiens
ggagctcatccaaaa

SEQ ID NO: 661417 - DNA, 15 bp, Homo sapiens
gagctcatccaaaag

SEQ ID NO: 661418 - DNA, 15 bp, Homo sapiens
agctcatccaaaagc

SEQ ID NO: 661419 - DNA, 15 bp, Homo sapiens
gctcatccaaaagca

SEQ ID NO: 661420 - DNA, 15 bp, Homo sapiens
ctcatccaaaagcaa

SEQ ID NO: 661421 - DNA, 15 bp, Homo sapiens
tcatccaaaagcaaa

SEQ ID NO: 661422 - DNA, 15 bp, Homo sapiens
catccaaaagcaaat

SEQ ID NO: 661423 - DNA, 15 bp, Homo sapiens
atccaaaagcaaatt

SEQ ID NO: 661424 - DNA, 15 bp, Homo sapiens
tccaaaagcaaattt

SEQ ID NO: 661425 - DNA, 15 bp, Homo sapiens
ccaaaagcaaatttc

SEQ ID NO: 661426 - DNA, 15 bp, Homo sapiens
caaaagcaaatttct

SEQ ID NO: 661427 - DNA, 15 bp, Homo sapiens
aaaagcaaatttcta

SEQ ID NO: 661428 - DNA, 15 bp, Homo sapiens
aaagcaaatttctaa

SEQ ID NO: 661429 - DNA, 15 bp, Homo sapiens
aagcaaatttctaag

SEQ ID NO: 661430 - DNA, 15 bp, Homo sapiens
agcaaatttctaaga

SEQ ID NO: 661431 - DNA, 15 bp, Homo sapiens
gcaaatttctaagaa

SEQ ID NO: 661432 - DNA, 15 bp, Homo sapiens
caaatttctaagaaa

SEQ ID NO: 661433 - DNA, 15 bp, Homo sapiens
aaatttctaagaaat

SEQ ID NO: 661434 - DNA, 15 bp, Homo sapiens
aatttctaagaaata

SEQ ID NO: 661435 - DNA, 15 bp, Homo sapiens
atttctaagaaatag

SEQ ID NO: 661436 - DNA, 15 bp, Homo sapiens
tttctaagaaatagt

SEQ ID NO: 661437 - DNA, 15 bp, Homo sapiens
ttctaagaaatagtt

SEQ ID NO: 661438 - DNA, 15 bp, Homo sapiens
tctaagaaatagttc

SEQ ID NO: 661439 - DNA, 15 bp, Homo sapiens
ctaagaaatagttca

SEQ ID NO: 661440 - DNA, 15 bp, Homo sapiens
taagaaatagttcat

SEQ ID NO: 661441 - DNA, 15 bp, Homo sapiens
aagaaatagttcata

SEQ ID NO: 661442 - DNA, 15 bp, Homo sapiens
agaaatagttcatag

SEQ ID NO: 661443 - DNA, 15 bp, Homo sapiens
gaaatagttcataga

SEQ ID NO: 661444 - DNA, 15 bp, Homo sapiens
aaatagttcatagat

SEQ ID NO: 661445 - DNA, 15 bp, Homo sapiens
aatagttcatagata

SEQ ID NO: 661446 - DNA, 15 bp, Homo sapiens
atagttcatagatat

SEQ ID NO: 661447 - DNA, 15 bp, Homo sapiens
tagttcatagatatg

SEQ ID NO: 661448 - DNA, 15 bp, Homo sapiens
agttcatagatatgg

SEQ ID NO: 661449 - DNA, 15 bp, Homo sapiens
gttcatagatatggg

SEQ ID NO: 661450 - DNA, 15 bp, Homo sapiens
ttcatagatatgggt

SEQ ID NO: 661451 - DNA, 15 bp, Homo sapiens
tcatagatatgggtc

SEQ ID NO: 661452 - DNA, 15 bp, Homo sapiens
catagatatgggtct

SEQ ID NO: 661453 - DNA, 15 bp, Homo sapiens
atagatatgggtctg

SEQ ID NO: 661454 - DNA, 15 bp, Homo sapiens
tagatatgggtctga

SEQ ID NO: 661455 - DNA, 15 bp, Homo sapiens
agatatgggtctgaa

SEQ ID NO: 661456 - DNA, 15 bp, Homo sapiens
gatatgggtctgaaa

SEQ ID NO: 661457 - DNA, 15 bp, Homo sapiens
atatgggtctgaaaa

SEQ ID NO: 661458 - DNA, 15 bp, Homo sapiens
tatgggtctgaaaat

SEQ ID NO: 661459 - DNA, 15 bp, Homo sapiens
atgggtctgaaaatg

SEQ ID NO: 661460 - DNA, 15 bp, Homo sapiens
tgggtctgaaaatgt

SEQ ID NO: 661461 - DNA, 15 bp, Homo sapiens
gggtctgaaaatgtt

SEQ ID NO: 661462 - DNA, 15 bp, Homo sapiens
ggtctgaaaatgttt

SEQ ID NO: 661463 - DNA, 15 bp, Homo sapiens
gtctgaaaatgtttt

SEQ ID NO: 661464 - DNA, 15 bp, Homo sapiens
tctgaaaatgttttg

SEQ ID NO: 661465 - DNA, 15 bp, Homo sapiens
ctgaaaatgttttgt

SEQ ID NO: 661466 - DNA, 15 bp, Homo sapiens
tgaaaatgttttgtt

SEQ ID NO: 661467 - DNA, 15 bp, Homo sapiens
gaaaatgttttgttt

SEQ ID NO: 661468 - DNA, 15 bp, Homo sapiens
aaaatgttttgtttt

SEQ ID NO: 661469 - DNA, 15 bp, Homo sapiens
aaatgttttgttttg

SEQ ID NO: 661470 - DNA, 15 bp, Homo sapiens
aatgttttgttttgc

SEQ ID NO: 661471 - DNA, 15 bp, Homo sapiens
atgttttgttttgct

SEQ ID NO: 661472 - DNA, 15 bp, Homo sapiens
tgttttgttttgctt

SEQ ID NO: 661473 - DNA, 15 bp, Homo sapiens
gttttgttttgcttc

SEQ ID NO: 661474 - DNA, 15 bp, Homo sapiens
ttttgttttgcttca

SEQ ID NO: 661475 - DNA, 15 bp, Homo sapiens
tttgttttgcttcat

SEQ ID NO: 661476 - DNA, 15 bp, Homo sapiens
ttgttttgcttcata

SEQ ID NO: 661477 - DNA, 15 bp, Homo sapiens
tgttttgcttcatac

SEQ ID NO: 661478 - DNA, 15 bp, Homo sapiens
gttttgcttcatact

SEQ ID NO: 661479 - DNA, 15 bp, Homo sapiens
ttttgcttcatactt

SEQ ID NO: 661480 - DNA, 15 bp, Homo sapiens
tttgcttcatacttg

SEQ ID NO: 661481 - DNA, 15 bp, Homo sapiens
ttgcttcatacttga

SEQ ID NO: 661482 - DNA, 15 bp, Homo sapiens
tgcttcatacttgat

SEQ ID NO: 661483 - DNA, 15 bp, Homo sapiens
gcttcatacttgatt

SEQ ID NO: 661484 - DNA, 15 bp, Homo sapiens
cttcatacttgatta

SEQ ID NO: 661485 - DNA, 15 bp, Homo sapiens
ttcatacttgattaa

SEQ ID NO: 661486 - DNA, 15 bp, Homo sapiens
tcatacttgattaat

SEQ ID NO: 661487 - DNA, 15 bp, Homo sapiens
catacttgattaatt

SEQ ID NO: 661488 - DNA, 15 bp, Homo sapiens
atacttgattaattg

SEQ ID NO: 661489 - DNA, 15 bp, Homo sapiens
tacttgattaattgt

SEQ ID NO: 661490 - DNA, 15 bp, Homo sapiens
acttgattaattgtt

SEQ ID NO: 661491 - DNA, 15 bp, Homo sapiens
cttgattaattgttt

SEQ ID NO: 661492 - DNA, 15 bp, Homo sapiens
ttgattaattgttta

SEQ ID NO: 661493 - DNA, 15 bp, Homo sapiens
tgattaattgtttaa

SEQ ID NO: 661494 - DNA, 15 bp, Homo sapiens
gattaattgtttaat

SEQ ID NO: 661495 - DNA, 15 bp, Homo sapiens
attaattgtttaatc

SEQ ID NO: 661496 - DNA, 15 bp, Homo sapiens
ttaattgtttaatcc

SEQ ID NO: 661497 - DNA, 15 bp, Homo sapiens
taattgtttaatccc

SEQ ID NO: 661498 - DNA, 15 bp, Homo sapiens
aattgtttaatccct

SEQ ID NO: 661499 - DNA, 15 bp, Homo sapiens
attgtttaatcccta

SEQ ID NO: 661500 - DNA, 15 bp, Homo sapiens
ttgtttaatccctat

SEQ ID NO: 661501 - DNA, 15 bp, Homo sapiens
tgtttaatccctata

SEQ ID NO: 661502 - DNA, 15 bp, Homo sapiens
gtttaatccctatat

SEQ ID NO: 661503 - DNA, 15 bp, Homo sapiens
tttaatccctatatt

SEQ ID NO: 661504 - DNA, 15 bp, Homo sapiens
ttaatccctatattt

SEQ ID NO: 661505 - DNA, 15 bp, Homo sapiens
taatccctatatttt

SEQ ID NO: 661506 - DNA, 15 bp, Homo sapiens
aatccctatattttg

SEQ ID NO: 661507 - DNA, 15 bp, Homo sapiens
atccctatattttga

SEQ ID NO: 661508 - DNA, 15 bp, Homo sapiens
tccctatattttgaa

SEQ ID NO: 661509 - DNA, 15 bp, Homo sapiens
ccctatattttgaaa

SEQ ID NO: 661510 - DNA, 15 bp, Homo sapiens
cctatattttgaaag

SEQ ID NO: 661511 - DNA, 15 bp, Homo sapiens
ctatattttgaaagt

SEQ ID NO: 661512 - DNA, 15 bp, Homo sapiens
tatattttgaaagtg

SEQ ID NO: 661513 - DNA, 15 bp, Homo sapiens
atattttgaaagtgg

SEQ ID NO: 661514 - DNA, 15 bp, Homo sapiens
tattttgaaagtggc

SEQ ID NO: 661515 - DNA, 15 bp, Homo sapiens
attttgaaagtggcc

SEQ ID NO: 661516 - DNA, 15 bp, Homo sapiens
ttttgaaagtggcct

SEQ ID NO: 661517 - DNA, 15 bp, Homo sapiens
tttgaaagtggcctt

SEQ ID NO: 661518 - DNA, 15 bp, Homo sapiens
ttgaaagtggccttt

SEQ ID NO: 661519 - DNA, 15 bp, Homo sapiens
tgaaagtggcctttc

SEQ ID NO: 661520 - DNA, 15 bp, Homo sapiens
gaaagtggcctttct

SEQ ID NO: 661521 - DNA, 15 bp, Homo sapiens
aaagtggcctttctg

SEQ ID NO: 661522 - DNA, 15 bp, Homo sapiens
aagtggcctttctga

SEQ ID NO: 661523 - DNA, 15 bp, Homo sapiens
agtggcctttctgac

SEQ ID NO: 661524 - DNA, 15 bp, Homo sapiens
gtggcctttctgact

SEQ ID NO: 661525 - DNA, 15 bp, Homo sapiens
tggcctttctgactt

SEQ ID NO: 661526 - DNA, 15 bp, Homo sapiens
ggcctttctgacttc

SEQ ID NO: 661527 - DNA, 15 bp, Homo sapiens
gcctttctgacttcc

SEQ ID NO: 661528 - DNA, 15 bp, Homo sapiens
cctttctgacttccc

SEQ ID NO: 661529 - DNA, 15 bp, Homo sapiens
ctttctgacttccct

SEQ ID NO: 661530 - DNA, 15 bp, Homo sapiens
tttctgacttccctg

SEQ ID NO: 661531 - DNA, 15 bp, Homo sapiens
ttctgacttccctga

SEQ ID NO: 661532 - DNA, 15 bp, Homo sapiens
tctgacttccctgaa

SEQ ID NO: 661533 - DNA, 15 bp, Homo sapiens
ctgacttccctgaat

SEQ ID NO: 661534 - DNA, 15 bp, Homo sapiens
tgacttccctgaata

SEQ ID NO: 661535 - DNA, 15 bp, Homo sapiens
gacttccctgaatag

SEQ ID NO: 661536 - DNA, 15 bp, Homo sapiens
acttccctgaatagt

SEQ ID NO: 661537 - DNA, 15 bp, Homo sapiens
cttccctgaatagta

SEQ ID NO: 661538 - DNA, 15 bp, Homo sapiens
ttccctgaatagtat

SEQ ID NO: 661539 - DNA, 15 bp, Homo sapiens
tccctgaatagtata

SEQ ID NO: 661540 - DNA, 15 bp, Homo sapiens
ccctgaatagtataa

SEQ ID NO: 661541 - DNA, 15 bp, Homo sapiens
cctgaatagtataat

SEQ ID NO: 661542 - DNA, 15 bp, Homo sapiens
ctgaatagtataatc

SEQ ID NO: 661543 - DNA, 15 bp, Homo sapiens
tgaatagtataatct

SEQ ID NO: 661544 - DNA, 15 bp, Homo sapiens
gaatagtataatctt

SEQ ID NO: 661545 - DNA, 15 bp, Homo sapiens
aatagtataatcttt

SEQ ID NO: 661546 - DNA, 15 bp, Homo sapiens
atagtataatcttta

SEQ ID NO: 661547 - DNA, 15 bp, Homo sapiens
tagtataatctttaa

SEQ ID NO: 661548 - DNA, 15 bp, Homo sapiens
agtataatctttaat

SEQ ID NO: 661549 - DNA, 15 bp, Homo sapiens
gtataatctttaatg

SEQ ID NO: 661550 - DNA, 15 bp, Homo sapiens
tataatctttaatgt

SEQ ID NO: 661551 - DNA, 15 bp, Homo sapiens
ataatctttaatgta

SEQ ID NO: 661552 - DNA, 15 bp, Homo sapiens
taatctttaatgtaa

SEQ ID NO: 661553 - DNA, 15 bp, Homo sapiens
aatctttaatgtaat

SEQ ID NO: 661554 - DNA, 15 bp, Homo sapiens
atctttaatgtaata

SEQ ID NO: 661555 - DNA, 15 bp, Homo sapiens
tctttaatgtaatat

SEQ ID NO: 661556 - DNA, 15 bp, Homo sapiens
ctttaatgtaatata

SEQ ID NO: 661557 - DNA, 15 bp, Homo sapiens
tttaatgtaatatac

SEQ ID NO: 661558 - DNA, 15 bp, Homo sapiens
ttaatgtaatatact

SEQ ID NO: 661559 - DNA, 15 bp, Homo sapiens
taatgtaatatacta

SEQ ID NO: 661560 - DNA, 15 bp, Homo sapiens
aatgtaatatactat

SEQ ID NO: 661561 - DNA, 15 bp, Homo sapiens
atgtaatatactatt

SEQ ID NO: 661562 - DNA, 15 bp, Homo sapiens
tgtaatatactatta

SEQ ID NO: 661563 - DNA, 15 bp, Homo sapiens
gtaatatactattat

SEQ ID NO: 661564 - DNA, 15 bp, Homo sapiens
taatatactattatg

SEQ ID NO: 661565 - DNA, 15 bp, Homo sapiens
aatatactattatga

SEQ ID NO: 661566 - DNA, 15 bp, Homo sapiens
atatactattatgaa

SEQ ID NO: 661567 - DNA, 15 bp, Homo sapiens
tatactattatgaag

SEQ ID NO: 661568 - DNA, 15 bp, Homo sapiens
atactattatgaaga

SEQ ID NO: 661569 - DNA, 15 bp, Homo sapiens
tactattatgaagag

SEQ ID NO: 661570 - DNA, 15 bp, Homo sapiens
actattatgaagagt

SEQ ID NO: 661571 - DNA, 15 bp, Homo sapiens
ctattatgaagagta

SEQ ID NO: 661572 - DNA, 15 bp, Homo sapiens
tattatgaagagtat

SEQ ID NO: 661573 - DNA, 15 bp, Homo sapiens
attatgaagagtata

SEQ ID NO: 661574 - DNA, 15 bp, Homo sapiens
ttatgaagagtataa

SEQ ID NO: 661575 - DNA, 15 bp, Homo sapiens
tatgaagagtataac

SEQ ID NO: 661576 - DNA, 15 bp, Homo sapiens
atgaagagtataaca

SEQ ID NO: 661577 - DNA, 15 bp, Homo sapiens
tgaagagtataacat

SEQ ID NO: 661578 - DNA, 15 bp, Homo sapiens
gaagagtataacatt

SEQ ID NO: 661579 - DNA, 15 bp, Homo sapiens
aagagtataacatta

SEQ ID NO: 661580 - DNA, 15 bp, Homo sapiens
agagtataacattat

SEQ ID NO: 661581 - DNA, 15 bp, Homo sapiens
gagtataacattatg

SEQ ID NO: 661582 - DNA, 15 bp, Homo sapiens
agtataacattatga

SEQ ID NO: 661583 - DNA, 15 bp, Homo sapiens
gtataacattatgaa

SEQ ID NO: 661584 - DNA, 15 bp, Homo sapiens
tataacattatgaag

SEQ ID NO: 661585 - DNA, 15 bp, Homo sapiens
ataacattatgaaga

SEQ ID NO: 661586 - DNA, 15 bp, Homo sapiens
taacattatgaagag

SEQ ID NO: 661587 - DNA, 15 bp, Homo sapiens
aacattatgaagaga

SEQ ID NO: 661588 - DNA, 15 bp, Homo sapiens
acattatgaagagaa

SEQ ID NO: 661589 - DNA, 15 bp, Homo sapiens
cattatgaagagaaa

SEQ ID NO: 661590 - DNA, 15 bp, Homo sapiens
attatgaagagaaat

SEQ ID NO: 661591 - DNA, 15 bp, Homo sapiens
ttatgaagagaaatg

SEQ ID NO: 661592 - DNA, 15 bp, Homo sapiens
tatgaagagaaatgc

SEQ ID NO: 661593 - DNA, 15 bp, Homo sapiens
atgaagagaaatgct

SEQ ID NO: 661594 - DNA, 15 bp, Homo sapiens
tgaagagaaatgcta

SEQ ID NO: 661595 - DNA, 15 bp, Homo sapiens
gaagagaaatgctaa

SEQ ID NO: 661596 - DNA, 15 bp, Homo sapiens
aagagaaatgctaag

SEQ ID NO: 661597 - DNA, 15 bp, Homo sapiens
agagaaatgctaaga

SEQ ID NO: 661598 - DNA, 15 bp, Homo sapiens
gagaaatgctaagaa

SEQ ID NO: 661599 - DNA, 15 bp, Homo sapiens
agaaatgctaagaaa

SEQ ID NO: 661600 - DNA, 15 bp, Homo sapiens
gaaatgctaagaaaa

SEQ ID NO: 661601 - DNA, 15 bp, Homo sapiens
aaatgctaagaaaat

SEQ ID NO: 661602 - DNA, 15 bp, Homo sapiens
aatgctaagaaaatt

SEQ ID NO: 661603 - DNA, 15 bp, Homo sapiens
atgctaagaaaattt

SEQ ID NO: 661604 - DNA, 15 bp, Homo sapiens
tgctaagaaaatttt

SEQ ID NO: 661605 - DNA, 15 bp, Homo sapiens
gctaagaaaattttg

SEQ ID NO: 661606 - DNA, 15 bp, Homo sapiens
ctaagaaaattttga

SEQ ID NO: 661607 - DNA, 15 bp, Homo sapiens
taagaaaattttgaa

SEQ ID NO: 661608 - DNA, 15 bp, Homo sapiens
aagaaaattttgaaa

SEQ ID NO: 661609 - DNA, 15 bp, Homo sapiens
agaaaattttgaaaa

SEQ ID NO: 661610 - DNA, 15 bp, Homo sapiens
gaaaattttgaaaaa

SEQ ID NO: 661611 - DNA, 15 bp, Homo sapiens
aaaattttgaaaaag

SEQ ID NO: 661612 - DNA, 15 bp, Homo sapiens
aaattttgaaaaagg

SEQ ID NO: 661613 - DNA, 15 bp, Homo sapiens
aattttgaaaaaggc

SEQ ID NO: 661614 - DNA, 15 bp, Homo sapiens
attttgaaaaaggca

SEQ ID NO: 661615 - DNA, 15 bp, Homo sapiens
ttttgaaaaaggcaa

SEQ ID NO: 661616 - DNA, 15 bp, Homo sapiens
tttgaaaaaggcaac

SEQ ID NO: 661617 - DNA, 15 bp, Homo sapiens
ttgaaaaaggcaact

SEQ ID NO: 661618 - DNA, 15 bp, Homo sapiens
tgaaaaaggcaacta

SEQ ID NO: 661619 - DNA, 15 bp, Homo sapiens
gaaaaaggcaactaa

SEQ ID NO: 661620 - DNA, 15 bp, Homo sapiens
aaaaaggcaactaaa

SEQ ID NO: 661621 - DNA, 15 bp, Homo sapiens
aaaaggcaactaaag

SEQ ID NO: 661622 - DNA, 15 bp, Homo sapiens
aaaggcaactaaaga

SEQ ID NO: 661623 - DNA, 15 bp, Homo sapiens
aaggcaactaaagat

SEQ ID NO: 661624 - DNA, 15 bp, Homo sapiens
aggcaactaaagatt

SEQ ID NO: 661625 - DNA, 15 bp, Homo sapiens
ggcaactaaagattt

SEQ ID NO: 661626 - DNA, 15 bp, Homo sapiens
gcaactaaagatttc

SEQ ID NO: 661627 - DNA, 15 bp, Homo sapiens
caactaaagatttcc

SEQ ID NO: 661628 - DNA, 15 bp, Homo sapiens
aactaaagatttcct

SEQ ID NO: 661629 - DNA, 15 bp, Homo sapiens
actaaagatttcctt

SEQ ID NO: 661630 - DNA, 15 bp, Homo sapiens
ctaaagatttccttg

SEQ ID NO: 661631 - DNA, 15 bp, Homo sapiens
taaagatttccttgt

SEQ ID NO: 661632 - DNA, 15 bp, Homo sapiens
aaagatttccttgta

SEQ ID NO: 661633 - DNA, 15 bp, Homo sapiens
aagatttccttgtat

SEQ ID NO: 661634 - DNA, 15 bp, Homo sapiens
agatttccttgtata

SEQ ID NO: 661635 - DNA, 15 bp, Homo sapiens
gatttccttgtataa

SEQ ID NO: 661636 - DNA, 15 bp, Homo sapiens
atttccttgtataaa

SEQ ID NO: 661637 - DNA, 15 bp, Homo sapiens
tttccttgtataaag

SEQ ID NO: 661638 - DNA, 15 bp, Homo sapiens
ttccttgtataaagc

SEQ ID NO: 661639 - DNA, 15 bp, Homo sapiens
tccttgtataaagca

SEQ ID NO: 661640 - DNA, 15 bp, Homo sapiens
ccttgtataaagcaa

SEQ ID NO: 661641 - DNA, 15 bp, Homo sapiens
cttgtataaagcaaa

SEQ ID NO: 661642 - DNA, 15 bp, Homo sapiens
ttgtataaagcaaag

SEQ ID NO: 661643 - DNA, 15 bp, Homo sapiens
tgtataaagcaaagc

SEQ ID NO: 661644 - DNA, 15 bp, Homo sapiens
gtataaagcaaagca

SEQ ID NO: 661645 - DNA, 15 bp, Homo sapiens
tataaagcaaagcaa

SEQ ID NO: 661646 - DNA, 15 bp, Homo sapiens
ataaagcaaagcaag

SEQ ID NO: 661647 - DNA, 15 bp, Homo sapiens
taaagcaaagcaagg

SEQ ID NO: 661648 - DNA, 15 bp, Homo sapiens
aaagcaaagcaagga

SEQ ID NO: 661649 - DNA, 15 bp, Homo sapiens
aagcaaagcaaggaa

SEQ ID NO: 661650 - DNA, 15 bp, Homo sapiens
agcaaagcaaggaaa

SEQ ID NO: 661651 - DNA, 15 bp, Homo sapiens
gcaaagcaaggaaac

SEQ ID NO: 661652 - DNA, 15 bp, Homo sapiens
caaagcaaggaaaca

SEQ ID NO: 661653 - DNA, 15 bp, Homo sapiens
aaagcaaggaaacaa

SEQ ID NO: 661654 - DNA, 15 bp, Homo sapiens
aagcaaggaaacaag

SEQ ID NO: 661655 - DNA, 15 bp, Homo sapiens
agcaaggaaacaagc

SEQ ID NO: 661656 - DNA, 15 bp, Homo sapiens
gcaaggaaacaagca

SEQ ID NO: 661657 - DNA, 15 bp, Homo sapiens
caaggaaacaagcaa

SEQ ID NO: 661658 - DNA, 15 bp, Homo sapiens
aaggaaacaagcaaa

SEQ ID NO: 661659 - DNA, 15 bp, Homo sapiens
aggaaacaagcaaac

SEQ ID NO: 661660 - DNA, 15 bp, Homo sapiens
ggaaacaagcaaaca

SEQ ID NO: 661661 - DNA, 15 bp, Homo sapiens
gaaacaagcaaacag

SEQ ID NO: 661662 - DNA, 15 bp, Homo sapiens
aaacaagcaaacaga

SEQ ID NO: 661663 - DNA, 15 bp, Homo sapiens
aacaagcaaacagaa

SEQ ID NO: 661664 - DNA, 15 bp, Homo sapiens
acaagcaaacagaaa

SEQ ID NO: 661665 - DNA, 15 bp, Homo sapiens
caagcaaacagaaat

SEQ ID NO: 661666 - DNA, 15 bp, Homo sapiens
aagcaaacagaaatt

SEQ ID NO: 661667 - DNA, 15 bp, Homo sapiens
agcaaacagaaattg

SEQ ID NO: 661668 - DNA, 15 bp, Homo sapiens
gcaaacagaaattga

SEQ ID NO: 661669 - DNA, 15 bp, Homo sapiens
caaacagaaattgac

SEQ ID NO: 661670 - DNA, 15 bp, Homo sapiens
aaacagaaattgaca

SEQ ID NO: 661671 - DNA, 15 bp, Homo sapiens
aacagaaattgacag

SEQ ID NO: 661672 - DNA, 15 bp, Homo sapiens
acagaaattgacaga

SEQ ID NO: 661673 - DNA, 15 bp, Homo sapiens
cagaaattgacagaa

SEQ ID NO: 661674 - DNA, 15 bp, Homo sapiens
agaaattgacagaat

SEQ ID NO: 661675 - DNA, 15 bp, Homo sapiens
gaaattgacagaatc

SEQ ID NO: 661676 - DNA, 15 bp, Homo sapiens
aaattgacagaatcc

SEQ ID NO: 661677 - DNA, 15 bp, Homo sapiens
aattgacagaatcca

SEQ ID NO: 661678 - DNA, 15 bp, Homo sapiens
attgacagaatccag

SEQ ID NO: 661679 - DNA, 15 bp, Homo sapiens
ttgacagaatccagg

SEQ ID NO: 661680 - DNA, 15 bp, Homo sapiens
tgacagaatccagga

SEQ ID NO: 661681 - DNA, 15 bp, Homo sapiens
gacagaatccaggaa

SEQ ID NO: 661682 - DNA, 15 bp, Homo sapiens
acagaatccaggaag

SEQ ID NO: 661683 - DNA, 15 bp, Homo sapiens
cagaatccaggaagt

SEQ ID NO: 661684 - DNA, 15 bp, Homo sapiens
agaatccaggaagtt

SEQ ID NO: 661685 - DNA, 15 bp, Homo sapiens
gaatccaggaagtta

SEQ ID NO: 661686 - DNA, 15 bp, Homo sapiens
aatccaggaagttat

SEQ ID NO: 661687 - DNA, 15 bp, Homo sapiens
atccaggaagttata

SEQ ID NO: 661688 - DNA, 15 bp, Homo sapiens
tccaggaagttataa

SEQ ID NO: 661689 - DNA, 15 bp, Homo sapiens
ccaggaagttataaa

SEQ ID NO: 661690 - DNA, 15 bp, Homo sapiens
caggaagttataaaa

SEQ ID NO: 661691 - DNA, 15 bp, Homo sapiens
aggaagttataaaaa

SEQ ID NO: 661692 - DNA, 15 bp, Homo sapiens
ggaagttataaaaat

SEQ ID NO: 661693 - DNA, 15 bp, Homo sapiens
gaagttataaaaata

SEQ ID NO: 661694 - DNA, 15 bp, Homo sapiens
aagttataaaaataa

SEQ ID NO: 661695 - DNA, 15 bp, Homo sapiens
agttataaaaataag

SEQ ID NO: 661696 - DNA, 15 bp, Homo sapiens
gttataaaaataagg

SEQ ID NO: 661697 - DNA, 15 bp, Homo sapiens
ttataaaaataagga

SEQ ID NO: 661698 - DNA, 15 bp, Homo sapiens
tataaaaataaggac

SEQ ID NO: 661699 - DNA, 15 bp, Homo sapiens
ataaaaataaggact

SEQ ID NO: 661700 - DNA, 15 bp, Homo sapiens
taaaaataaggacta

SEQ ID NO: 661701 - DNA, 15 bp, Homo sapiens
aaaaataaggactaa

SEQ ID NO: 661702 - DNA, 15 bp, Homo sapiens
aaaataaggactaag

SEQ ID NO: 661703 - DNA, 15 bp, Homo sapiens
aaataaggactaagt

SEQ ID NO: 661704 - DNA, 15 bp, Homo sapiens
aataaggactaagta

SEQ ID NO: 661705 - DNA, 15 bp, Homo sapiens
ataaggactaagtat

SEQ ID NO: 661706 - DNA, 15 bp, Homo sapiens
taaggactaagtatt

SEQ ID NO: 661707 - DNA, 15 bp, Homo sapiens
aaggactaagtattg

SEQ ID NO: 661708 - DNA, 15 bp, Homo sapiens
aggactaagtattga

SEQ ID NO: 661709 - DNA, 15 bp, Homo sapiens
ggactaagtattgat

SEQ ID NO: 661710 - DNA, 15 bp, Homo sapiens
gactaagtattgatt

SEQ ID NO: 661711 - DNA, 15 bp, Homo sapiens
actaagtattgattg

SEQ ID NO: 661712 - DNA, 15 bp, Homo sapiens
ctaagtattgattgc

SEQ ID NO: 661713 - DNA, 15 bp, Homo sapiens
taagtattgattgcc

SEQ ID NO: 661714 - DNA, 15 bp, Homo sapiens
aagtattgattgcct

SEQ ID NO: 661715 - DNA, 15 bp, Homo sapiens
agtattgattgccta

SEQ ID NO: 661716 - DNA, 15 bp, Homo sapiens
gtattgattgcctat

SEQ ID NO: 661717 - DNA, 15 bp, Homo sapiens
tattgattgcctata

SEQ ID NO: 661718 - DNA, 15 bp, Homo sapiens
attgattgcctataa

SEQ ID NO: 661719 - DNA, 15 bp, Homo sapiens
ttgattgcctataat

SEQ ID NO: 661720 - DNA, 15 bp, Homo sapiens
tgattgcctataatt

SEQ ID NO: 661721 - DNA, 15 bp, Homo sapiens
gattgcctataattt

SEQ ID NO: 661722 - DNA, 15 bp, Homo sapiens
attgcctataattta

SEQ ID NO: 661723 - DNA, 15 bp, Homo sapiens
ttgcctataatttat

SEQ ID NO: 661724 - DNA, 15 bp, Homo sapiens
tgcctataatttata

SEQ ID NO: 661725 - DNA, 15 bp, Homo sapiens
gcctataatttataa

SEQ ID NO: 661726 - DNA, 15 bp, Homo sapiens
cctataatttataat

SEQ ID NO: 661727 - DNA, 15 bp, Homo sapiens
ctataatttataatc

SEQ ID NO: 661728 - DNA, 15 bp, Homo sapiens
tataatttataatcc

SEQ ID NO: 661729 - DNA, 15 bp, Homo sapiens
ataatttataatccc

SEQ ID NO: 661730 - DNA, 15 bp, Homo sapiens
taatttataatccct

SEQ ID NO: 661731 - DNA, 15 bp, Homo sapiens
aatttataatccctt

SEQ ID NO: 661732 - DNA, 15 bp, Homo sapiens
atttataatcccttc

SEQ ID NO: 661733 - DNA, 15 bp, Homo sapiens
tttataatcccttct

SEQ ID NO: 661734 - DNA, 15 bp, Homo sapiens
ttataatcccttctg

SEQ ID NO: 661735 - DNA, 15 bp, Homo sapiens
tataatcccttctgt

SEQ ID NO: 661736 - DNA, 15 bp, Homo sapiens
ataatcccttctgtt

SEQ ID NO: 661737 - DNA, 15 bp, Homo sapiens
taatcccttctgtta

SEQ ID NO: 661738 - DNA, 15 bp, Homo sapiens
aatcccttctgttat

SEQ ID NO: 661739 - DNA, 15 bp, Homo sapiens
atcccttctgttatt

SEQ ID NO: 661740 - DNA, 15 bp, Homo sapiens
tcccttctgttatta

SEQ ID NO: 661741 - DNA, 15 bp, Homo sapiens
cccttctgttattaa

SEQ ID NO: 661742 - DNA, 15 bp, Homo sapiens
ccttctgttattaag

SEQ ID NO: 661743 - DNA, 15 bp, Homo sapiens
cttctgttattaagt

SEQ ID NO: 661744 - DNA, 15 bp, Homo sapiens
ttctgttattaagtt

SEQ ID NO: 661745 - DNA, 15 bp, Homo sapiens
tctgttattaagttg

SEQ ID NO: 661746 - DNA, 15 bp, Homo sapiens
ctgttattaagttga

SEQ ID NO: 661747 - DNA, 15 bp, Homo sapiens
tgttattaagttgag

SEQ ID NO: 661748 - DNA, 15 bp, Homo sapiens
gttattaagttgagg

SEQ ID NO: 661749 - DNA, 15 bp, Homo sapiens
ttattaagttgaggt

SEQ ID NO: 661750 - DNA, 15 bp, Homo sapiens
tattaagttgaggta

SEQ ID NO: 661751 - DNA, 15 bp, Homo sapiens
attaagttgaggtat

SEQ ID NO: 661752 - DNA, 15 bp, Homo sapiens
ttaagttgaggtata

SEQ ID NO: 661753 - DNA, 15 bp, Homo sapiens
taagttgaggtataa

SEQ ID NO: 661754 - DNA, 15 bp, Homo sapiens
aagttgaggtataaa

SEQ ID NO: 661755 - DNA, 15 bp, Homo sapiens
agttgaggtataaag

SEQ ID NO: 661756 - DNA, 15 bp, Homo sapiens
gttgaggtataaaga

SEQ ID NO: 661757 - DNA, 15 bp, Homo sapiens
ttgaggtataaagat

SEQ ID NO: 661758 - DNA, 15 bp, Homo sapiens
tgaggtataaagatt

SEQ ID NO: 661759 - DNA, 15 bp, Homo sapiens
gaggtataaagattg

SEQ ID NO: 661760 - DNA, 15 bp, Homo sapiens
aggtataaagattgt

SEQ ID NO: 661761 - DNA, 15 bp, Homo sapiens
ggtataaagattgta

SEQ ID NO: 661762 - DNA, 15 bp, Homo sapiens
gtataaagattgtaa

SEQ ID NO: 661763 - DNA, 15 bp, Homo sapiens
tataaagattgtaaa

SEQ ID NO: 661764 - DNA, 15 bp, Homo sapiens
ataaagattgtaaat

SEQ ID NO: 661765 - DNA, 15 bp, Homo sapiens
taaagattgtaaatt

SEQ ID NO: 661766 - DNA, 15 bp, Homo sapiens
aaagattgtaaattt

SEQ ID NO: 661767 - DNA, 15 bp, Homo sapiens
aagattgtaaatttg

SEQ ID NO: 661768 - DNA, 15 bp, Homo sapiens
agattgtaaatttgt

SEQ ID NO: 661769 - DNA, 15 bp, Homo sapiens
gattgtaaatttgtt

SEQ ID NO: 661770 - DNA, 15 bp, Homo sapiens
attgtaaatttgttt

SEQ ID NO: 661771 - DNA, 15 bp, Homo sapiens
ttgtaaatttgtttg

SEQ ID NO: 661772 - DNA, 15 bp, Homo sapiens
tgtaaatttgtttga

SEQ ID NO: 661773 - DNA, 15 bp, Homo sapiens
gtaaatttgtttgaa

SEQ ID NO: 661774 - DNA, 15 bp, Homo sapiens
taaatttgtttgaaa

SEQ ID NO: 661775 - DNA, 15 bp, Homo sapiens
aaatttgtttgaaag

SEQ ID NO: 661776 - DNA, 15 bp, Homo sapiens
aatttgtttgaaagt

SEQ ID NO: 661777 - DNA, 15 bp, Homo sapiens
atttgtttgaaagta

SEQ ID NO: 661778 - DNA, 15 bp, Homo sapiens
tttgtttgaaagtat

SEQ ID NO: 661779 - DNA, 15 bp, Homo sapiens
ttgtttgaaagtatt

SEQ ID NO: 661780 - DNA, 15 bp, Homo sapiens
tgtttgaaagtattt

SEQ ID NO: 661781 - DNA, 15 bp, Homo sapiens
gtttgaaagtatttg

SEQ ID NO: 661782 - DNA, 15 bp, Homo sapiens
tttgaaagtatttgg

SEQ ID NO: 661783 - DNA, 15 bp, Homo sapiens
ttgaaagtatttggt

SEQ ID NO: 661784 - DNA, 15 bp, Homo sapiens
tgaaagtatttggta

SEQ ID NO: 661785 - DNA, 15 bp, Homo sapiens
gaaagtatttggtaa

SEQ ID NO: 661786 - DNA, 15 bp, Homo sapiens
aaagtatttggtaac

SEQ ID NO: 661787 - DNA, 15 bp, Homo sapiens
aagtatttggtaacc

SEQ ID NO: 661788 - DNA, 15 bp, Homo sapiens
agtatttggtaacca

SEQ ID NO: 661789 - DNA, 15 bp, Homo sapiens
gtatttggtaaccaa

SEQ ID NO: 661790 - DNA, 15 bp, Homo sapiens
tatttggtaaccaat

SEQ ID NO: 661791 - DNA, 15 bp, Homo sapiens
atttggtaaccaata

SEQ ID NO: 661792 - DNA, 15 bp, Homo sapiens
tttggtaaccaataa

SEQ ID NO: 661793 - DNA, 15 bp, Homo sapiens
ttggtaaccaataaa

SEQ ID NO: 661794 - DNA, 15 bp, Homo sapiens
tggtaaccaataaac

SEQ ID NO: 661795 - DNA, 15 bp, Homo sapiens
ggtaaccaataaacc

SEQ ID NO: 661796 - DNA, 15 bp, Homo sapiens
gtaaccaataaacct

SEQ ID NO: 661797 - DNA, 15 bp, Homo sapiens
taaccaataaaccta

SEQ ID NO: 661798 - DNA, 15 bp, Homo sapiens
aaccaataaacctag

SEQ ID NO: 661799 - DNA, 15 bp, Homo sapiens
accaataaacctaga

SEQ ID NO: 661800 - DNA, 15 bp, Homo sapiens
ccaataaacctagaa

SEQ ID NO: 661801 - DNA, 15 bp, Homo sapiens
caataaacctagaaa

SEQ ID NO: 661802 - DNA, 15 bp, Homo sapiens
aataaacctagaaag

SEQ ID NO: 661803 - DNA, 15 bp, Homo sapiens
ataaacctagaaagc

SEQ ID NO: 661804 - DNA, 15 bp, Homo sapiens
taaacctagaaagcc

SEQ ID NO: 661805 - DNA, 15 bp, Homo sapiens
aaacctagaaagccc

SEQ ID NO: 661806 - DNA, 15 bp, Homo sapiens
aacctagaaagccca

SEQ ID NO: 661807 - DNA, 15 bp, Homo sapiens
acctagaaagcccat

SEQ ID NO: 661808 - DNA, 15 bp, Homo sapiens
cctagaaagcccatt

SEQ ID NO: 661809 - DNA, 15 bp, Homo sapiens
ctagaaagcccattg

SEQ ID NO: 661810 - DNA, 15 bp, Homo sapiens
tagaaagcccattgt

SEQ ID NO: 661811 - DNA, 15 bp, Homo sapiens
agaaagcccattgta

SEQ ID NO: 661812 - DNA, 15 bp, Homo sapiens
gaaagcccattgtaa

SEQ ID NO: 661813 - DNA, 15 bp, Homo sapiens
aaagcccattgtaac

SEQ ID NO: 661814 - DNA, 15 bp, Homo sapiens
aagcccattgtaacc

SEQ ID NO: 661815 - DNA, 15 bp, Homo sapiens
agcccattgtaacca

SEQ ID NO: 661816 - DNA, 15 bp, Homo sapiens
gcccattgtaaccag

SEQ ID NO: 661817 - DNA, 15 bp, Homo sapiens
cccattgtaaccaga

SEQ ID NO: 661818 - DNA, 15 bp, Homo sapiens
ccattgtaaccagag

SEQ ID NO: 661819 - DNA, 15 bp, Homo sapiens
cattgtaaccagagg

SEQ ID NO: 661820 - DNA, 15 bp, Homo sapiens
attgtaaccagaggt

SEQ ID NO: 661821 - DNA, 15 bp, Homo sapiens
ttgtaaccagaggta

SEQ ID NO: 661822 - DNA, 15 bp, Homo sapiens
tgtaaccagaggtat

SEQ ID NO: 661823 - DNA, 15 bp, Homo sapiens
gtaaccagaggtata

SEQ ID NO: 661824 - DNA, 15 bp, Homo sapiens
taaccagaggtataa

SEQ ID NO: 661825 - DNA, 15 bp, Homo sapiens
aaccagaggtataat

SEQ ID NO: 661826 - DNA, 15 bp, Homo sapiens
accagaggtataatt

SEQ ID NO: 661827 - DNA, 15 bp, Homo sapiens
ccagaggtataattc

SEQ ID NO: 661828 - DNA, 15 bp, Homo sapiens
cagaggtataattct

SEQ ID NO: 661829 - DNA, 15 bp, Homo sapiens
agaggtataattctg

SEQ ID NO: 661830 - DNA, 15 bp, Homo sapiens
gaggtataattctga

SEQ ID NO: 661831 - DNA, 15 bp, Homo sapiens
aggtataattctgat

SEQ ID NO: 661832 - DNA, 15 bp, Homo sapiens
ggtataattctgata

SEQ ID NO: 661833 - DNA, 15 bp, Homo sapiens
gtataattctgataa

SEQ ID NO: 661834 - DNA, 15 bp, Homo sapiens
tataattctgataag

SEQ ID NO: 661835 - DNA, 15 bp, Homo sapiens
ataattctgataagt

SEQ ID NO: 661836 - DNA, 15 bp, Homo sapiens
taattctgataagtc

SEQ ID NO: 661837 - DNA, 15 bp, Homo sapiens
aattctgataagtca

SEQ ID NO: 661838 - DNA, 15 bp, Homo sapiens
attctgataagtcag

SEQ ID NO: 661839 - DNA, 15 bp, Homo sapiens
ttctgataagtcaga

SEQ ID NO: 661840 - DNA, 15 bp, Homo sapiens
tctgataagtcagag

SEQ ID NO: 661841 - DNA, 15 bp, Homo sapiens
ctgataagtcagagg

SEQ ID NO: 661842 - DNA, 15 bp, Homo sapiens
tgataagtcagaggg

SEQ ID NO: 661843 - DNA, 15 bp, Homo sapiens
gataagtcagagggt

SEQ ID NO: 661844 - DNA, 15 bp, Homo sapiens
ataagtcagagggtt

SEQ ID NO: 661845 - DNA, 15 bp, Homo sapiens
taagtcagagggttc

SEQ ID NO: 661846 - DNA, 15 bp, Homo sapiens
aagtcagagggttca

SEQ ID NO: 661847 - DNA, 15 bp, Homo sapiens
agtcagagggttcaa

SEQ ID NO: 661848 - DNA, 15 bp, Homo sapiens
gtcagagggttcaat

SEQ ID NO: 661849 - DNA, 15 bp, Homo sapiens
tcagagggttcaatt

SEQ ID NO: 661850 - DNA, 15 bp, Homo sapiens
cagagggttcaattt

SEQ ID NO: 661851 - DNA, 15 bp, Homo sapiens
agagggttcaatttt

SEQ ID NO: 661852 - DNA, 15 bp, Homo sapiens
gagggttcaattttc

SEQ ID NO: 661853 - DNA, 15 bp, Homo sapiens
agggttcaattttcc

SEQ ID NO: 661854 - DNA, 15 bp, Homo sapiens
gggttcaattttcca

SEQ ID NO: 661855 - DNA, 15 bp, Homo sapiens
ggttcaattttccaa

SEQ ID NO: 661856 - DNA, 15 bp, Homo sapiens
gttcaattttccaaa

SEQ ID NO: 661857 - DNA, 15 bp, Homo sapiens
ttcaattttccaaaa

SEQ ID NO: 661858 - DNA, 15 bp, Homo sapiens
tcaattttccaaaat

SEQ ID NO: 661859 - DNA, 15 bp, Homo sapiens
caattttccaaaatg

SEQ ID NO: 661860 - DNA, 15 bp, Homo sapiens
aattttccaaaatgt

SEQ ID NO: 661861 - DNA, 15 bp, Homo sapiens
attttccaaaatgtc

SEQ ID NO: 661862 - DNA, 15 bp, Homo sapiens
ttttccaaaatgtca

SEQ ID NO: 661863 - DNA, 15 bp, Homo sapiens
tttccaaaatgtcac

SEQ ID NO: 661864 - DNA, 15 bp, Homo sapiens
ttccaaaatgtcact

SEQ ID NO: 661865 - DNA, 15 bp, Homo sapiens
tccaaaatgtcactt

SEQ ID NO: 661866 - DNA, 15 bp, Homo sapiens
ccaaaatgtcacttc

SEQ ID NO: 661867 - DNA, 15 bp, Homo sapiens
caaaatgtcacttct

SEQ ID NO: 661868 - DNA, 15 bp, Homo sapiens
aaaatgtcacttctg

SEQ ID NO: 661869 - DNA, 15 bp, Homo sapiens
aaatgtcacttctgg

SEQ ID NO: 661870 - DNA, 15 bp, Homo sapiens
aatgtcacttctggc

SEQ ID NO: 661871 - DNA, 15 bp, Homo sapiens
atgtcacttctggca

SEQ ID NO: 661872 - DNA, 15 bp, Homo sapiens
tgtcacttctggcat

SEQ ID NO: 661873 - DNA, 15 bp, Homo sapiens
gtcacttctggcatg

SEQ ID NO: 661874 - DNA, 15 bp, Homo sapiens
tcacttctggcatgc

SEQ ID NO: 661875 - DNA, 15 bp, Homo sapiens
cacttctggcatgcc

SEQ ID NO: 661876 - DNA, 15 bp, Homo sapiens
acttctggcatgcct

SEQ ID NO: 661877 - DNA, 15 bp, Homo sapiens
cttctggcatgcctg

SEQ ID NO: 661878 - DNA, 15 bp, Homo sapiens
ttctggcatgcctgc

SEQ ID NO: 661879 - DNA, 15 bp, Homo sapiens
tctggcatgcctgca

SEQ ID NO: 661880 - DNA, 15 bp, Homo sapiens
ctggcatgcctgcag

SEQ ID NO: 661881 - DNA, 15 bp, Homo sapiens
tggcatgcctgcagc

SEQ ID NO: 661882 - DNA, 15 bp, Homo sapiens
ggcatgcctgcagcc

SEQ ID NO: 661883 - DNA, 15 bp, Homo sapiens
gcatgcctgcagcca

SEQ ID NO: 661884 - DNA, 15 bp, Homo sapiens
catgcctgcagccaa

SEQ ID NO: 661885 - DNA, 15 bp, Homo sapiens
atgcctgcagccaac

SEQ ID NO: 661886 - DNA, 15 bp, Homo sapiens
tgcctgcagccaaca

SEQ ID NO: 661887 - DNA, 15 bp, Homo sapiens
gcctgcagccaacat

SEQ ID NO: 661888 - DNA, 15 bp, Homo sapiens
cctgcagccaacata

SEQ ID NO: 661889 - DNA, 15 bp, Homo sapiens
ctgcagccaacatag

SEQ ID NO: 661890 - DNA, 15 bp, Homo sapiens
tgcagccaacataga

SEQ ID NO: 661891 - DNA, 15 bp, Homo sapiens
gcagccaacatagat

SEQ ID NO: 661892 - DNA, 15 bp, Homo sapiens
cagccaacatagatt

SEQ ID NO: 661893 - DNA, 15 bp, Homo sapiens
agccaacatagattg

SEQ ID NO: 661894 - DNA, 15 bp, Homo sapiens
gccaacatagattgt

SEQ ID NO: 661895 - DNA, 15 bp, Homo sapiens
ccaacatagattgtg

SEQ ID NO: 661896 - DNA, 15 bp, Homo sapiens
caacatagattgtga

SEQ ID NO: 661897 - DNA, 15 bp, Homo sapiens
aacatagattgtgaa

SEQ ID NO: 661898 - DNA, 15 bp, Homo sapiens
acatagattgtgaac

SEQ ID NO: 661899 - DNA, 15 bp, Homo sapiens
catagattgtgaact

SEQ ID NO: 661900 - DNA, 15 bp, Homo sapiens
atagattgtgaacta

SEQ ID NO: 661901 - DNA, 15 bp, Homo sapiens
tagattgtgaactat

SEQ ID NO: 661902 - DNA, 15 bp, Homo sapiens
agattgtgaactatg

SEQ ID NO: 661903 - DNA, 15 bp, Homo sapiens
gattgtgaactatgc

SEQ ID NO: 661904 - DNA, 15 bp, Homo sapiens
attgtgaactatgca

SEQ ID NO: 661905 - DNA, 15 bp, Homo sapiens
ttgtgaactatgcaa

SEQ ID NO: 661906 - DNA, 15 bp, Homo sapiens
tgtgaactatgcaag

SEQ ID NO: 661907 - DNA, 15 bp, Homo sapiens
gtgaactatgcaagg

SEQ ID NO: 661908 - DNA, 15 bp, Homo sapiens
tgaactatgcaaggt

SEQ ID NO: 661909 - DNA, 15 bp, Homo sapiens
gaactatgcaaggta

SEQ ID NO: 661910 - DNA, 15 bp, Homo sapiens
aactatgcaaggtac

SEQ ID NO: 661911 - DNA, 15 bp, Homo sapiens
actatgcaaggtaca

SEQ ID NO: 661912 - DNA, 15 bp, Homo sapiens
ctatgcaaggtacag

SEQ ID NO: 661913 - DNA, 15 bp, Homo sapiens
tatgcaaggtacagg

SEQ ID NO: 661914 - DNA, 15 bp, Homo sapiens
atgcaaggtacagga

SEQ ID NO: 661915 - DNA, 15 bp, Homo sapiens
tgcaaggtacaggaa

SEQ ID NO: 661916 - DNA, 15 bp, Homo sapiens
gcaaggtacaggaaa

SEQ ID NO: 661917 - DNA, 15 bp, Homo sapiens
caaggtacaggaaac

SEQ ID NO: 661918 - DNA, 15 bp, Homo sapiens
aaggtacaggaaact

SEQ ID NO: 661919 - DNA, 15 bp, Homo sapiens
aggtacaggaaactg

SEQ ID NO: 661920 - DNA, 15 bp, Homo sapiens
ggtacaggaaactga

SEQ ID NO: 661921 - DNA, 15 bp, Homo sapiens
gtacaggaaactgaa

SEQ ID NO: 661922 - DNA, 15 bp, Homo sapiens
tacaggaaactgaat

SEQ ID NO: 661923 - DNA, 15 bp, Homo sapiens
acaggaaactgaatc

SEQ ID NO: 661924 - DNA, 15 bp, Homo sapiens
caggaaactgaatcc

SEQ ID NO: 661925 - DNA, 15 bp, Homo sapiens
aggaaactgaatccc

SEQ ID NO: 661926 - DNA, 15 bp, Homo sapiens
ggaaactgaatccct

SEQ ID NO: 661927 - DNA, 15 bp, Homo sapiens
gaaactgaatccctc

SEQ ID NO: 661928 - DNA, 15 bp, Homo sapiens
aaactgaatccctca

SEQ ID NO: 661929 - DNA, 15 bp, Homo sapiens
aactgaatccctcat

SEQ ID NO: 661930 - DNA, 15 bp, Homo sapiens
actgaatccctcata

SEQ ID NO: 661931 - DNA, 15 bp, Homo sapiens
ctgaatccctcatat

SEQ ID NO: 661932 - DNA, 15 bp, Homo sapiens
tgaatccctcatatt

SEQ ID NO: 661933 - DNA, 15 bp, Homo sapiens
gaatccctcatattt

SEQ ID NO: 661934 - DNA, 15 bp, Homo sapiens
aatccctcatattta

SEQ ID NO: 661935 - DNA, 15 bp, Homo sapiens
atccctcatatttac

SEQ ID NO: 661936 - DNA, 15 bp, Homo sapiens
tccctcatatttact

SEQ ID NO: 661937 - DNA, 15 bp, Homo sapiens
ccctcatatttactt

SEQ ID NO: 661938 - DNA, 15 bp, Homo sapiens
cctcatatttacttt

SEQ ID NO: 661939 - DNA, 15 bp, Homo sapiens
ctcatatttactttt

SEQ ID NO: 661940 - DNA, 15 bp, Homo sapiens
tcatatttacttttc

SEQ ID NO: 661941 - DNA, 15 bp, Homo sapiens
catatttacttttcc

SEQ ID NO: 661942 - DNA, 15 bp, Homo sapiens
atatttacttttcca

SEQ ID NO: 661943 - DNA, 15 bp, Homo sapiens
tatttacttttccaa

SEQ ID NO: 661944 - DNA, 15 bp, Homo sapiens
atttacttttccaac

SEQ ID NO: 661945 - DNA, 15 bp, Homo sapiens
tttacttttccaaca

SEQ ID NO: 661946 - DNA, 15 bp, Homo sapiens
ttacttttccaacat

SEQ ID NO: 661947 - DNA, 15 bp, Homo sapiens
tacttttccaacatt

SEQ ID NO: 661948 - DNA, 15 bp, Homo sapiens
acttttccaacatta

SEQ ID NO: 661949 - DNA, 15 bp, Homo sapiens
cttttccaacattaa

SEQ ID NO: 661950 - DNA, 15 bp, Homo sapiens
ttttccaacattaac

SEQ ID NO: 661951 - DNA, 15 bp, Homo sapiens
tttccaacattaaca

SEQ ID NO: 661952 - DNA, 15 bp, Homo sapiens
ttccaacattaacat

SEQ ID NO: 661953 - DNA, 15 bp, Homo sapiens
tccaacattaacatg

SEQ ID NO: 661954 - DNA, 15 bp, Homo sapiens
ccaacattaacatgt

SEQ ID NO: 661955 - DNA, 15 bp, Homo sapiens
caacattaacatgta

SEQ ID NO: 661956 - DNA, 15 bp, Homo sapiens
aacattaacatgtac

SEQ ID NO: 661957 - DNA, 15 bp, Homo sapiens
acattaacatgtaca

SEQ ID NO: 661958 - DNA, 15 bp, Homo sapiens
cattaacatgtacat

SEQ ID NO: 661959 - DNA, 15 bp, Homo sapiens
attaacatgtacatt

SEQ ID NO: 661960 - DNA, 15 bp, Homo sapiens
ttaacatgtacatta

SEQ ID NO: 661961 - DNA, 15 bp, Homo sapiens
taacatgtacattaa

SEQ ID NO: 661962 - DNA, 15 bp, Homo sapiens
aacatgtacattaag

SEQ ID NO: 661963 - DNA, 15 bp, Homo sapiens
acatgtacattaagt

SEQ ID NO: 661964 - DNA, 15 bp, Homo sapiens
catgtacattaagta

SEQ ID NO: 661965 - DNA, 15 bp, Homo sapiens
atgtacattaagtat

SEQ ID NO: 661966 - DNA, 15 bp, Homo sapiens
tgtacattaagtata

SEQ ID NO: 661967 - DNA, 15 bp, Homo sapiens
gtacattaagtatat

SEQ ID NO: 661968 - DNA, 15 bp, Homo sapiens
tacattaagtatatt

SEQ ID NO: 661969 - DNA, 15 bp, Homo sapiens
acattaagtatattt

SEQ ID NO: 661970 - DNA, 15 bp, Homo sapiens
cattaagtatatttc

SEQ ID NO: 661971 - DNA, 15 bp, Homo sapiens
attaagtatatttct

SEQ ID NO: 661972 - DNA, 15 bp, Homo sapiens
ttaagtatatttctc

SEQ ID NO: 661973 - DNA, 15 bp, Homo sapiens
taagtatatttctct

SEQ ID NO: 661974 - DNA, 15 bp, Homo sapiens
aagtatatttctctg

SEQ ID NO: 661975 - DNA, 15 bp, Homo sapiens
agtatatttctctga

SEQ ID NO: 661976 - DNA, 15 bp, Homo sapiens
gtatatttctctgaa

SEQ ID NO: 661977 - DNA, 15 bp, Homo sapiens
tatatttctctgaat

SEQ ID NO: 661978 - DNA, 15 bp, Homo sapiens
atatttctctgaata

SEQ ID NO: 661979 - DNA, 15 bp, Homo sapiens
tatttctctgaatat

SEQ ID NO: 661980 - DNA, 15 bp, Homo sapiens
atttctctgaatatg

SEQ ID NO: 661981 - DNA, 15 bp, Homo sapiens
tttctctgaatatgc

SEQ ID NO: 661982 - DNA, 15 bp, Homo sapiens
ttctctgaatatgcc

SEQ ID NO: 661983 - DNA, 15 bp, Homo sapiens
tctctgaatatgccc

SEQ ID NO: 661984 - DNA, 15 bp, Homo sapiens
ctctgaatatgccca

SEQ ID NO: 661985 - DNA, 15 bp, Homo sapiens
tctgaatatgcccag

SEQ ID NO: 661986 - DNA, 15 bp, Homo sapiens
ctgaatatgcccagt

SEQ ID NO: 661987 - DNA, 15 bp, Homo sapiens
tgaatatgcccagtg

SEQ ID NO: 661988 - DNA, 15 bp, Homo sapiens
gaatatgcccagtga

SEQ ID NO: 661989 - DNA, 15 bp, Homo sapiens
aatatgcccagtgaa

SEQ ID NO: 661990 - DNA, 15 bp, Homo sapiens
atatgcccagtgaat

SEQ ID NO: 661991 - DNA, 15 bp, Homo sapiens
tatgcccagtgaatg

SEQ ID NO: 661992 - DNA, 15 bp, Homo sapiens
atgcccagtgaatgt

SEQ ID NO: 661993 - DNA, 15 bp, Homo sapiens
tgcccagtgaatgtt

SEQ ID NO: 661994 - DNA, 15 bp, Homo sapiens
gcccagtgaatgttc

SEQ ID NO: 661995 - DNA, 15 bp, Homo sapiens
cccagtgaatgttct

SEQ ID NO: 661996 - DNA, 15 bp, Homo sapiens
ccagtgaatgttctg

SEQ ID NO: 661997 - DNA, 15 bp, Homo sapiens
cagtgaatgttctgg

SEQ ID NO: 661998 - DNA, 15 bp, Homo sapiens
agtgaatgttctggt

SEQ ID NO: 661999 - DNA, 15 bp, Homo sapiens
gtgaatgttctggtc

SEQ ID NO: 662000 - DNA, 15 bp, Homo sapiens
tgaatgttctggtca

SEQ ID NO: 662001 - DNA, 15 bp, Homo sapiens
gaatgttctggtcac

SEQ ID NO: 662002 - DNA, 15 bp, Homo sapiens
aatgttctggtcaca

SEQ ID NO: 662003 - DNA, 15 bp, Homo sapiens
atgttctggtcacag

SEQ ID NO: 662004 - DNA, 15 bp, Homo sapiens
tgttctggtcacagg

SEQ ID NO: 662005 - DNA, 15 bp, Homo sapiens
gttctggtcacaggt

SEQ ID NO: 662006 - DNA, 15 bp, Homo sapiens
ttctggtcacaggtc

SEQ ID NO: 662007 - DNA, 15 bp, Homo sapiens
tctggtcacaggtcg

SEQ ID NO: 662008 - DNA, 15 bp, Homo sapiens
ctggtcacaggtcga

SEQ ID NO: 662009 - DNA, 15 bp, Homo sapiens
tggtcacaggtcgaa

SEQ ID NO: 662010 - DNA, 15 bp, Homo sapiens
ggtcacaggtcgaaa

SEQ ID NO: 662011 - DNA, 15 bp, Homo sapiens
gtcacaggtcgaaag

SEQ ID NO: 662012 - DNA, 15 bp, Homo sapiens
tcacaggtcgaaagc

SEQ ID NO: 662013 - DNA, 15 bp, Homo sapiens
cacaggtcgaaagca

SEQ ID NO: 662014 - DNA, 15 bp, Homo sapiens
acaggtcgaaagcaa

SEQ ID NO: 662015 - DNA, 15 bp, Homo sapiens
caggtcgaaagcaag

SEQ ID NO: 662016 - DNA, 15 bp, Homo sapiens
aggtcgaaagcaagg

SEQ ID NO: 662017 - DNA, 15 bp, Homo sapiens
ggtcgaaagcaaggc

SEQ ID NO: 662018 - DNA, 15 bp, Homo sapiens
gtcgaaagcaaggcc

SEQ ID NO: 662019 - DNA, 15 bp, Homo sapiens
tcgaaagcaaggcca

SEQ ID NO: 662020 - DNA, 15 bp, Homo sapiens
cgaaagcaaggccaa

SEQ ID NO: 662021 - DNA, 15 bp, Homo sapiens
gaaagcaaggccaat

SEQ ID NO: 662022 - DNA, 15 bp, Homo sapiens
aaagcaaggccaata

SEQ ID NO: 662023 - DNA, 15 bp, Homo sapiens
aagcaaggccaataa

SEQ ID NO: 662024 - DNA, 15 bp, Homo sapiens
agcaaggccaataag

SEQ ID NO: 662025 - DNA, 15 bp, Homo sapiens
gcaaggccaataagg

SEQ ID NO: 662026 - DNA, 15 bp, Homo sapiens
caaggccaataagga

SEQ ID NO: 662027 - DNA, 15 bp, Homo sapiens
aaggccaataaggaa

SEQ ID NO: 662028 - DNA, 15 bp, Homo sapiens
aggccaataaggaaa

SEQ ID NO: 662029 - DNA, 15 bp, Homo sapiens
ggccaataaggaaat

SEQ ID NO: 662030 - DNA, 15 bp, Homo sapiens
gccaataaggaaatc

SEQ ID NO: 662031 - DNA, 15 bp, Homo sapiens
ccaataaggaaatca

SEQ ID NO: 662032 - DNA, 15 bp, Homo sapiens
caataaggaaatcat

SEQ ID NO: 662033 - DNA, 15 bp, Homo sapiens
aataaggaaatcatt

SEQ ID NO: 662034 - DNA, 15 bp, Homo sapiens
ataaggaaatcatta

SEQ ID NO: 662035 - DNA, 15 bp, Homo sapiens
taaggaaatcattat

SEQ ID NO: 662036 - DNA, 15 bp, Homo sapiens
aaggaaatcattatg

SEQ ID NO: 662037 - DNA, 15 bp, Homo sapiens
aggaaatcattatga

SEQ ID NO: 662038 - DNA, 15 bp, Homo sapiens
ggaaatcattatgac

SEQ ID NO: 662039 - DNA, 15 bp, Homo sapiens
gaaatcattatgact

SEQ ID NO: 662040 - DNA, 15 bp, Homo sapiens
aaatcattatgactt

SEQ ID NO: 662041 - DNA, 15 bp, Homo sapiens
aatcattatgacttc

SEQ ID NO: 662042 - DNA, 15 bp, Homo sapiens
atcattatgacttct

SEQ ID NO: 662043 - DNA, 15 bp, Homo sapiens
tcattatgacttctt

SEQ ID NO: 662044 - DNA, 15 bp, Homo sapiens
cattatgacttcttg

SEQ ID NO: 662045 - DNA, 15 bp, Homo sapiens
attatgacttcttgc

SEQ ID NO: 662046 - DNA, 15 bp, Homo sapiens
ttatgacttcttgca

SEQ ID NO: 662047 - DNA, 15 bp, Homo sapiens
tatgacttcttgcat

SEQ ID NO: 662048 - DNA, 15 bp, Homo sapiens
ccttgggctaacaat

SEQ ID NO: 662049 - DNA, 15 bp, Homo sapiens
cttgggctaacaatt

SEQ ID NO: 662050 - DNA, 15 bp, Homo sapiens
ttgggctaacaattg

SEQ ID NO: 662051 - DNA, 15 bp, Homo sapiens
tgggctaacaattgt

SEQ ID NO: 662052 - DNA, 15 bp, Homo sapiens
gggctaacaattgtg

SEQ ID NO: 662053 - DNA, 15 bp, Homo sapiens
ggctaacaattgtgt

SEQ ID NO: 662054 - DNA, 15 bp, Homo sapiens
gctaacaattgtgtt

SEQ ID NO: 662055 - DNA, 15 bp, Homo sapiens
ctaacaattgtgtta

SEQ ID NO: 662056 - DNA, 15 bp, Homo sapiens
taacaattgtgttaa

SEQ ID NO: 662057 - DNA, 15 bp, Homo sapiens
aacaattgtgttaac

SEQ ID NO: 662058 - DNA, 15 bp, Homo sapiens
acaattgtgttaaca

SEQ ID NO: 662059 - DNA, 15 bp, Homo sapiens
caattgtgttaacag

SEQ ID NO: 662060 - DNA, 15 bp, Homo sapiens
aattgtgttaacagg

SEQ ID NO: 662061 - DNA, 15 bp, Homo sapiens
attgtgttaacagga

SEQ ID NO: 662062 - DNA, 15 bp, Homo sapiens
ttgtgttaacaggac

SEQ ID NO: 662063 - DNA, 15 bp, Homo sapiens
tgtgttaacaggaca

SEQ ID NO: 662064 - DNA, 15 bp, Homo sapiens
gtgttaacaggacat

SEQ ID NO: 662065 - DNA, 15 bp, Homo sapiens
tgttaacaggacata

SEQ ID NO: 662066 - DNA, 15 bp, Homo sapiens
gttaacaggacatag

SEQ ID NO: 662067 - DNA, 15 bp, Homo sapiens
ttaacaggacatagc

SEQ ID NO: 662068 - DNA, 15 bp, Homo sapiens
taacaggacatagca

SEQ ID NO: 662069 - DNA, 15 bp, Homo sapiens
aacaggacatagcag

SEQ ID NO: 662070 - DNA, 15 bp, Homo sapiens
acaggacatagcagg

SEQ ID NO: 662071 - DNA, 15 bp, Homo sapiens
caggacatagcaggt

SEQ ID NO: 662072 - DNA, 15 bp, Homo sapiens
aggacatagcaggtg

SEQ ID NO: 662073 - DNA, 15 bp, Homo sapiens
ggacatagcaggtgc

SEQ ID NO: 662074 - DNA, 15 bp, Homo sapiens
gacatagcaggtgca

SEQ ID NO: 662075 - DNA, 15 bp, Homo sapiens
acatagcaggtgcaa

SEQ ID NO: 662076 - DNA, 15 bp, Homo sapiens
catagcaggtgcaag

SEQ ID NO: 662077 - DNA, 15 bp, Homo sapiens
atagcaggtgcaagg

SEQ ID NO: 662078 - DNA, 15 bp, Homo sapiens
tagcaggtgcaagga

SEQ ID NO: 662079 - DNA, 15 bp, Homo sapiens
agcaggtgcaaggac

SEQ ID NO: 662080 - DNA, 15 bp, Homo sapiens
gcaggtgcaaggacc

SEQ ID NO: 662081 - DNA, 15 bp, Homo sapiens
caggtgcaaggaccc

SEQ ID NO: 662082 - DNA, 15 bp, Homo sapiens
aggtgcaaggaccca

SEQ ID NO: 662083 - DNA, 15 bp, Homo sapiens
ggtgcaaggacccac

SEQ ID NO: 662084 - DNA, 15 bp, Homo sapiens
gtgcaaggacccact

SEQ ID NO: 662085 - DNA, 15 bp, Homo sapiens
tgcaaggacccactg

SEQ ID NO: 662086 - DNA, 15 bp, Homo sapiens
gcaaggacccactgg

SEQ ID NO: 662087 - DNA, 15 bp, Homo sapiens
caaggacccactggt

SEQ ID NO: 662088 - DNA, 15 bp, Homo sapiens
aaggacccactggtc

SEQ ID NO: 662089 - DNA, 15 bp, Homo sapiens
aggacccactggtca

SEQ ID NO: 662090 - DNA, 15 bp, Homo sapiens
ggacccactggtcat

SEQ ID NO: 662091 - DNA, 15 bp, Homo sapiens
gacccactggtcatc

SEQ ID NO: 662092 - DNA, 15 bp, Homo sapiens
acccactggtcatcc

SEQ ID NO: 662093 - DNA, 15 bp, Homo sapiens
cccactggtcatcct

SEQ ID NO: 662094 - DNA, 15 bp, Homo sapiens
ccactggtcatcctg

SEQ ID NO: 662095 - DNA, 15 bp, Homo sapiens
cactggtcatcctgc

SEQ ID NO: 662096 - DNA, 15 bp, Homo sapiens
actggtcatcctgct

SEQ ID NO: 662097 - DNA, 15 bp, Homo sapiens
ctggtcatcctgcta

SEQ ID NO: 662098 - DNA, 15 bp, Homo sapiens
tggtcatcctgctac

SEQ ID NO: 662099 - DNA, 15 bp, Homo sapiens
ggtcatcctgctacc

SEQ ID NO: 662100 - DNA, 15 bp, Homo sapiens
gtcatcctgctacct

SEQ ID NO: 662101 - DNA, 15 bp, Homo sapiens
tcatcctgctacctg

SEQ ID NO: 662102 - DNA, 15 bp, Homo sapiens
catcctgctacctga

SEQ ID NO: 662103 - DNA, 15 bp, Homo sapiens
atcctgctacctgat

SEQ ID NO: 662104 - DNA, 15 bp, Homo sapiens
tcctgctacctgatc

SEQ ID NO: 662105 - DNA, 15 bp, Homo sapiens
cctgctacctgatca

SEQ ID NO: 662106 - DNA, 15 bp, Homo sapiens
ctgctacctgatcag

SEQ ID NO: 662107 - DNA, 15 bp, Homo sapiens
tgctacctgatcaga

SEQ ID NO: 662108 - DNA, 15 bp, Homo sapiens
gctacctgatcagaa

SEQ ID NO: 662109 - DNA, 15 bp, Homo sapiens
ctacctgatcagaag

SEQ ID NO: 662110 - DNA, 15 bp, Homo sapiens
tacctgatcagaagg

SEQ ID NO: 662111 - DNA, 15 bp, Homo sapiens
acctgatcagaagga

SEQ ID NO: 662112 - DNA, 15 bp, Homo sapiens
cctgatcagaaggaa

SEQ ID NO: 662113 - DNA, 15 bp, Homo sapiens
ctgatcagaaggaag

SEQ ID NO: 662114 - DNA, 15 bp, Homo sapiens
tgatcagaaggaagg

SEQ ID NO: 662115 - DNA, 15 bp, Homo sapiens
gatcagaaggaagga

SEQ ID NO: 662116 - DNA, 15 bp, Homo sapiens
atcagaaggaaggaa

SEQ ID NO: 662117 - DNA, 15 bp, Homo sapiens
tcagaaggaaggaaa

SEQ ID NO: 662118 - DNA, 15 bp, Homo sapiens
cagaaggaaggaaag

SEQ ID NO: 662119 - DNA, 15 bp, Homo sapiens
agaaggaaggaaagt

SEQ ID NO: 662120 - DNA, 15 bp, Homo sapiens
gaaggaaggaaagtt

SEQ ID NO: 662121 - DNA, 15 bp, Homo sapiens
aaggaaggaaagttg

SEQ ID NO: 662122 - DNA, 15 bp, Homo sapiens
aggaaggaaagttgt

SEQ ID NO: 662123 - DNA, 15 bp, Homo sapiens
ggaaggaaagttgta

SEQ ID NO: 662124 - DNA, 15 bp, Homo sapiens
gaaggaaagttgtat

SEQ ID NO: 662125 - DNA, 15 bp, Homo sapiens
aaggaaagttgtatt

SEQ ID NO: 662126 - DNA, 15 bp, Homo sapiens
aggaaagttgtattt

SEQ ID NO: 662127 - DNA, 15 bp, Homo sapiens
ggaaagttgtatttg

SEQ ID NO: 662128 - DNA, 15 bp, Homo sapiens
gaaagttgtatttgt

SEQ ID NO: 662129 - DNA, 15 bp, Homo sapiens
aaagttgtatttgtt

SEQ ID NO: 662130 - DNA, 15 bp, Homo sapiens
aagttgtatttgttg

SEQ ID NO: 662131 - DNA, 15 bp, Homo sapiens
agttgtatttgttgc

SEQ ID NO: 662132 - DNA, 15 bp, Homo sapiens
gttgtatttgttgct

SEQ ID NO: 662133 - DNA, 15 bp, Homo sapiens
ttgtatttgttgctc

SEQ ID NO: 662134 - DNA, 15 bp, Homo sapiens
tgtatttgttgctca

SEQ ID NO: 662135 - DNA, 15 bp, Homo sapiens
gtatttgttgctcac

SEQ ID NO: 662136 - DNA, 15 bp, Homo sapiens
tatttgttgctcacc

SEQ ID NO: 662137 - DNA, 15 bp, Homo sapiens
atttgttgctcacct

SEQ ID NO: 662138 - DNA, 15 bp, Homo sapiens
tttgttgctcaccta

SEQ ID NO: 662139 - DNA, 15 bp, Homo sapiens
ttgttgctcacctac

SEQ ID NO: 662140 - DNA, 15 bp, Homo sapiens
tgttgctcacctact

SEQ ID NO: 662141 - DNA, 15 bp, Homo sapiens
gttgctcacctacta

SEQ ID NO: 662142 - DNA, 15 bp, Homo sapiens
ttgctcacctactat

SEQ ID NO: 662143 - DNA, 15 bp, Homo sapiens
tgctcacctactatg

SEQ ID NO: 662144 - DNA, 15 bp, Homo sapiens
gctcacctactatgt

SEQ ID NO: 662145 - DNA, 15 bp, Homo sapiens
ctcacctactatgtt

SEQ ID NO: 662146 - DNA, 15 bp, Homo sapiens
tcacctactatgttt

SEQ ID NO: 662147 - DNA, 15 bp, Homo sapiens
cacctactatgtttt

SEQ ID NO: 662148 - DNA, 15 bp, Homo sapiens
acctactatgtttta

SEQ ID NO: 662149 - DNA, 15 bp, Homo sapiens
cctactatgttttag

SEQ ID NO: 662150 - DNA, 15 bp, Homo sapiens
ctactatgttttagg

SEQ ID NO: 662151 - DNA, 15 bp, Homo sapiens
tactatgttttaggc

SEQ ID NO: 662152 - DNA, 15 bp, Homo sapiens
actatgttttaggca

SEQ ID NO: 662153 - DNA, 15 bp, Homo sapiens
ctatgttttaggcat

SEQ ID NO: 662154 - DNA, 15 bp, Homo sapiens
tatgttttaggcata

SEQ ID NO: 662155 - DNA, 15 bp, Homo sapiens
atgttttaggcatag

SEQ ID NO: 662156 - DNA, 15 bp, Homo sapiens
tgttttaggcatagt

SEQ ID NO: 662157 - DNA, 15 bp, Homo sapiens
gttttaggcatagta

SEQ ID NO: 662158 - DNA, 15 bp, Homo sapiens
ttttaggcatagtac

SEQ ID NO: 662159 - DNA, 15 bp, Homo sapiens
tttaggcatagtact

SEQ ID NO: 662160 - DNA, 15 bp, Homo sapiens
ttaggcatagtacta

SEQ ID NO: 662161 - DNA, 15 bp, Homo sapiens
taggcatagtactag

SEQ ID NO: 662162 - DNA, 15 bp, Homo sapiens
aggcatagtactagg

SEQ ID NO: 662163 - DNA, 15 bp, Homo sapiens
ggcatagtactaggt

SEQ ID NO: 662164 - DNA, 15 bp, Homo sapiens
gcatagtactaggtg

SEQ ID NO: 662165 - DNA, 15 bp, Homo sapiens
catagtactaggtgc

SEQ ID NO: 662166 - DNA, 15 bp, Homo sapiens
atagtactaggtgct

SEQ ID NO: 662167 - DNA, 15 bp, Homo sapiens
tagtactaggtgctt

SEQ ID NO: 662168 - DNA, 15 bp, Homo sapiens
agtactaggtgcttt

SEQ ID NO: 662169 - DNA, 15 bp, Homo sapiens
gtactaggtgctttt

SEQ ID NO: 662170 - DNA, 15 bp, Homo sapiens
tactaggtgctttta

SEQ ID NO: 662171 - DNA, 15 bp, Homo sapiens
actaggtgcttttac

SEQ ID NO: 662172 - DNA, 15 bp, Homo sapiens
ctaggtgcttttacc

SEQ ID NO: 662173 - DNA, 15 bp, Homo sapiens
taggtgcttttacct

SEQ ID NO: 662174 - DNA, 15 bp, Homo sapiens
aggtgcttttaccta

SEQ ID NO: 662175 - DNA, 15 bp, Homo sapiens
ggtgcttttacctag

SEQ ID NO: 662176 - DNA, 15 bp, Homo sapiens
gtgcttttacctagt

SEQ ID NO: 662177 - DNA, 15 bp, Homo sapiens
tgcttttacctagta

SEQ ID NO: 662178 - DNA, 15 bp, Homo sapiens
gcttttacctagtac

SEQ ID NO: 662179 - DNA, 15 bp, Homo sapiens
cttttacctagtact

SEQ ID NO: 662180 - DNA, 15 bp, Homo sapiens
ttttacctagtactt

SEQ ID NO: 662181 - DNA, 15 bp, Homo sapiens
tttacctagtactta

SEQ ID NO: 662182 - DNA, 15 bp, Homo sapiens
ttacctagtacttaa

SEQ ID NO: 662183 - DNA, 15 bp, Homo sapiens
tacctagtacttaat

SEQ ID NO: 662184 - DNA, 15 bp, Homo sapiens
acctagtacttaatt

SEQ ID NO: 662185 - DNA, 15 bp, Homo sapiens
cctagtacttaattc

SEQ ID NO: 662186 - DNA, 15 bp, Homo sapiens
ctagtacttaattcc

SEQ ID NO: 662187 - DNA, 15 bp, Homo sapiens
tagtacttaattccc

SEQ ID NO: 662188 - DNA, 15 bp, Homo sapiens
agtacttaattccct

SEQ ID NO: 662189 - DNA, 15 bp, Homo sapiens
gtacttaattccctt

SEQ ID NO: 662190 - DNA, 15 bp, Homo sapiens
tacttaattccctta

SEQ ID NO: 662191 - DNA, 15 bp, Homo sapiens
acttaattcccttat

SEQ ID NO: 662192 - DNA, 15 bp, Homo sapiens
cttaattcccttatc

SEQ ID NO: 662193 - DNA, 15 bp, Homo sapiens
ttaattcccttatcc

SEQ ID NO: 662194 - DNA, 15 bp, Homo sapiens
taattcccttatcct

SEQ ID NO: 662195 - DNA, 15 bp, Homo sapiens
aattcccttatcctc

SEQ ID NO: 662196 - DNA, 15 bp, Homo sapiens
attcccttatcctca

SEQ ID NO: 662197 - DNA, 15 bp, Homo sapiens
ttcccttatcctcaa

SEQ ID NO: 662198 - DNA, 15 bp, Homo sapiens
tcccttatcctcaac

SEQ ID NO: 662199 - DNA, 15 bp, Homo sapiens
cccttatcctcaact

SEQ ID NO: 662200 - DNA, 15 bp, Homo sapiens
ccttatcctcaactc

SEQ ID NO: 662201 - DNA, 15 bp, Homo sapiens
cttatcctcaactca

SEQ ID NO: 662202 - DNA, 15 bp, Homo sapiens
ttatcctcaactcat

SEQ ID NO: 662203 - DNA, 15 bp, Homo sapiens
tatcctcaactcatt

SEQ ID NO: 662204 - DNA, 15 bp, Homo sapiens
atcctcaactcattt

SEQ ID NO: 662205 - DNA, 15 bp, Homo sapiens
tcctcaactcattta

SEQ ID NO: 662206 - DNA, 15 bp, Homo sapiens
cctcaactcatttat

SEQ ID NO: 662207 - DNA, 15 bp, Homo sapiens
ctcaactcatttatt

SEQ ID NO: 662208 - DNA, 15 bp, Homo sapiens
tcaactcatttattc

SEQ ID NO: 662209 - DNA, 15 bp, Homo sapiens
caactcatttattcc

SEQ ID NO: 662210 - DNA, 15 bp, Homo sapiens
aactcatttattcct

SEQ ID NO: 662211 - DNA, 15 bp, Homo sapiens
actcatttattcctc

SEQ ID NO: 662212 - DNA, 15 bp, Homo sapiens
ctcatttattcctcg

SEQ ID NO: 662213 - DNA, 15 bp, Homo sapiens
tcatttattcctcgc

SEQ ID NO: 662214 - DNA, 15 bp, Homo sapiens
catttattcctcgca

SEQ ID NO: 662215 - DNA, 15 bp, Homo sapiens
atttattcctcgcaa

SEQ ID NO: 662216 - DNA, 15 bp, Homo sapiens
tttattcctcgcaat

SEQ ID NO: 662217 - DNA, 15 bp, Homo sapiens
ttattcctcgcaata

SEQ ID NO: 662218 - DNA, 15 bp, Homo sapiens
tattcctcgcaataa

SEQ ID NO: 662219 - DNA, 15 bp, Homo sapiens
attcctcgcaataac

SEQ ID NO: 662220 - DNA, 15 bp, Homo sapiens
ttcctcgcaataacc

SEQ ID NO: 662221 - DNA, 15 bp, Homo sapiens
tcctcgcaataacct

SEQ ID NO: 662222 - DNA, 15 bp, Homo sapiens
cctcgcaataacctg

SEQ ID NO: 662223 - DNA, 15 bp, Homo sapiens
ctcgcaataacctga

SEQ ID NO: 662224 - DNA, 15 bp, Homo sapiens
tcgcaataacctgat

SEQ ID NO: 662225 - DNA, 15 bp, Homo sapiens
cgcaataacctgata

SEQ ID NO: 662226 - DNA, 15 bp, Homo sapiens
gcaataacctgataa

SEQ ID NO: 662227 - DNA, 15 bp, Homo sapiens
caataacctgataag

SEQ ID NO: 662228 - DNA, 15 bp, Homo sapiens
aataacctgataagg

SEQ ID NO: 662229 - DNA, 15 bp, Homo sapiens
ataacctgataaggg

SEQ ID NO: 662230 - DNA, 15 bp, Homo sapiens
taacctgataaggga

SEQ ID NO: 662231 - DNA, 15 bp, Homo sapiens
aacctgataagggag

SEQ ID NO: 662232 - DNA, 15 bp, Homo sapiens
acctgataagggaga

SEQ ID NO: 662233 - DNA, 15 bp, Homo sapiens
cctgataagggagat

SEQ ID NO: 662234 - DNA, 15 bp, Homo sapiens
ctgataagggagatg

SEQ ID NO: 662235 - DNA, 15 bp, Homo sapiens
tgataagggagatgt

SEQ ID NO: 662236 - DNA, 15 bp, Homo sapiens
gataagggagatgtt

SEQ ID NO: 662237 - DNA, 15 bp, Homo sapiens
ataagggagatgttt

SEQ ID NO: 662238 - DNA, 15 bp, Homo sapiens
taagggagatgtttt

SEQ ID NO: 662239 - DNA, 15 bp, Homo sapiens
aagggagatgttttt

SEQ ID NO: 662240 - DNA, 15 bp, Homo sapiens
agggagatgttttta

SEQ ID NO: 662241 - DNA, 15 bp, Homo sapiens
gggagatgtttttat

SEQ ID NO: 662242 - DNA, 15 bp, Homo sapiens
ggagatgtttttatc

SEQ ID NO: 662243 - DNA, 15 bp, Homo sapiens
gagatgtttttatcc

SEQ ID NO: 662244 - DNA, 15 bp, Homo sapiens
agatgtttttatcct

SEQ ID NO: 662245 - DNA, 15 bp, Homo sapiens
gatgtttttatcctc

SEQ ID NO: 662246 - DNA, 15 bp, Homo sapiens
atgtttttatcctca

SEQ ID NO: 662247 - DNA, 15 bp, Homo sapiens
tgtttttatcctcat

SEQ ID NO: 662248 - DNA, 15 bp, Homo sapiens
gtttttatcctcatt

SEQ ID NO: 662249 - DNA, 15 bp, Homo sapiens
tttttatcctcattt

SEQ ID NO: 662250 - DNA, 15 bp, Homo sapiens
ttttatcctcatttt

SEQ ID NO: 662251 - DNA, 15 bp, Homo sapiens
tttatcctcatttta

SEQ ID NO: 662252 - DNA, 15 bp, Homo sapiens
ttatcctcattttac

SEQ ID NO: 662253 - DNA, 15 bp, Homo sapiens
tatcctcattttaca

SEQ ID NO: 662254 - DNA, 15 bp, Homo sapiens
atcctcattttacat

SEQ ID NO: 662255 - DNA, 15 bp, Homo sapiens
tcctcattttacata

SEQ ID NO: 662256 - DNA, 15 bp, Homo sapiens
cctcattttacatat

SEQ ID NO: 662257 - DNA, 15 bp, Homo sapiens
ctcattttacatata

SEQ ID NO: 662258 - DNA, 15 bp, Homo sapiens
tcattttacatataa

SEQ ID NO: 662259 - DNA, 15 bp, Homo sapiens
cattttacatataag

SEQ ID NO: 662260 - DNA, 15 bp, Homo sapiens
attttacatataagg

SEQ ID NO: 662261 - DNA, 15 bp, Homo sapiens
ttttacatataagga

SEQ ID NO: 662262 - DNA, 15 bp, Homo sapiens
tttacatataaggaa

SEQ ID NO: 662263 - DNA, 15 bp, Homo sapiens
ttacatataaggaaa

SEQ ID NO: 662264 - DNA, 15 bp, Homo sapiens
tacatataaggaaac

SEQ ID NO: 662265 - DNA, 15 bp, Homo sapiens
acatataaggaaaca

SEQ ID NO: 662266 - DNA, 15 bp, Homo sapiens
catataaggaaacag

SEQ ID NO: 662267 - DNA, 15 bp, Homo sapiens
atataaggaaacagg

SEQ ID NO: 662268 - DNA, 15 bp, Homo sapiens
tataaggaaacaggc

SEQ ID NO: 662269 - DNA, 15 bp, Homo sapiens
ataaggaaacaggcc

SEQ ID NO: 662270 - DNA, 15 bp, Homo sapiens
taaggaaacaggcct

SEQ ID NO: 662271 - DNA, 15 bp, Homo sapiens
aaggaaacaggccta

SEQ ID NO: 662272 - DNA, 15 bp, Homo sapiens
aggaaacaggcctag

SEQ ID NO: 662273 - DNA, 15 bp, Homo sapiens
ggaaacaggcctaga

SEQ ID NO: 662274 - DNA, 15 bp, Homo sapiens
gaaacaggcctagag

SEQ ID NO: 662275 - DNA, 15 bp, Homo sapiens
aaacaggcctagaga

SEQ ID NO: 662276 - DNA, 15 bp, Homo sapiens
aacaggcctagagaa

SEQ ID NO: 662277 - DNA, 15 bp, Homo sapiens
acaggcctagagaaa

SEQ ID NO: 662278 - DNA, 15 bp, Homo sapiens
caggcctagagaaat

SEQ ID NO: 662279 - DNA, 15 bp, Homo sapiens
aggcctagagaaatg

SEQ ID NO: 662280 - DNA, 15 bp, Homo sapiens
ggcctagagaaatga

SEQ ID NO: 662281 - DNA, 15 bp, Homo sapiens
gcctagagaaatgag

SEQ ID NO: 662282 - DNA, 15 bp, Homo sapiens
cctagagaaatgagc

SEQ ID NO: 662283 - DNA, 15 bp, Homo sapiens
ctagagaaatgagca

SEQ ID NO: 662284 - DNA, 15 bp, Homo sapiens
tagagaaatgagcac

SEQ ID NO: 662285 - DNA, 15 bp, Homo sapiens
agagaaatgagcaca

SEQ ID NO: 662286 - DNA, 15 bp, Homo sapiens
gagaaatgagcacag

SEQ ID NO: 662287 - DNA, 15 bp, Homo sapiens
agaaatgagcacagt

SEQ ID NO: 662288 - DNA, 15 bp, Homo sapiens
gaaatgagcacagtg

SEQ ID NO: 662289 - DNA, 15 bp, Homo sapiens
aaatgagcacagtgt

SEQ ID NO: 662290 - DNA, 15 bp, Homo sapiens
aatgagcacagtgtc

SEQ ID NO: 662291 - DNA, 15 bp, Homo sapiens
atgagcacagtgtcc

SEQ ID NO: 662292 - DNA, 15 bp, Homo sapiens
tgagcacagtgtcca

SEQ ID NO: 662293 - DNA, 15 bp, Homo sapiens
gagcacagtgtccaa

SEQ ID NO: 662294 - DNA, 15 bp, Homo sapiens
agcacagtgtccaaa

SEQ ID NO: 662295 - DNA, 15 bp, Homo sapiens
gcacagtgtccaaag

SEQ ID NO: 662296 - DNA, 15 bp, Homo sapiens
cacagtgtccaaagt

SEQ ID NO: 662297 - DNA, 15 bp, Homo sapiens
acagtgtccaaagtc

SEQ ID NO: 662298 - DNA, 15 bp, Homo sapiens
cagtgtccaaagtca

SEQ ID NO: 662299 - DNA, 15 bp, Homo sapiens
agtgtccaaagtcac

SEQ ID NO: 662300 - DNA, 15 bp, Homo sapiens
gtgtccaaagtcaca

SEQ ID NO: 662301 - DNA, 15 bp, Homo sapiens
tgtccaaagtcacat

SEQ ID NO: 662302 - DNA, 15 bp, Homo sapiens
gtccaaagtcacata

SEQ ID NO: 662303 - DNA, 15 bp, Homo sapiens
tccaaagtcacatag

SEQ ID NO: 662304 - DNA, 15 bp, Homo sapiens
ccaaagtcacatagt

SEQ ID NO: 662305 - DNA, 15 bp, Homo sapiens
caaagtcacatagtt

SEQ ID NO: 662306 - DNA, 15 bp, Homo sapiens
aaagtcacatagtta

SEQ ID NO: 662307 - DNA, 15 bp, Homo sapiens
aagtcacatagttaa

SEQ ID NO: 662308 - DNA, 15 bp, Homo sapiens
agtcacatagttaat

SEQ ID NO: 662309 - DNA, 15 bp, Homo sapiens
gtcacatagttaata

SEQ ID NO: 662310 - DNA, 15 bp, Homo sapiens
tcacatagttaataa

SEQ ID NO: 662311 - DNA, 15 bp, Homo sapiens
cacatagttaataag

SEQ ID NO: 662312 - DNA, 15 bp, Homo sapiens
acatagttaataaga

SEQ ID NO: 662313 - DNA, 15 bp, Homo sapiens
catagttaataagat

SEQ ID NO: 662314 - DNA, 15 bp, Homo sapiens
atagttaataagatg

SEQ ID NO: 662315 - DNA, 15 bp, Homo sapiens
tagttaataagatgt

SEQ ID NO: 662316 - DNA, 15 bp, Homo sapiens
agttaataagatgtg

SEQ ID NO: 662317 - DNA, 15 bp, Homo sapiens
gttaataagatgtga

SEQ ID NO: 662318 - DNA, 15 bp, Homo sapiens
ttaataagatgtgaa

SEQ ID NO: 662319 - DNA, 15 bp, Homo sapiens
taataagatgtgaag

SEQ ID NO: 662320 - DNA, 15 bp, Homo sapiens
aataagatgtgaagc

SEQ ID NO: 662321 - DNA, 15 bp, Homo sapiens
ataagatgtgaagct

SEQ ID NO: 662322 - DNA, 15 bp, Homo sapiens
taagatgtgaagctc

SEQ ID NO: 662323 - DNA, 15 bp, Homo sapiens
aagatgtgaagctct

SEQ ID NO: 662324 - DNA, 15 bp, Homo sapiens
agatgtgaagctctg

SEQ ID NO: 662325 - DNA, 15 bp, Homo sapiens
gatgtgaagctctga

SEQ ID NO: 662326 - DNA, 15 bp, Homo sapiens
atgtgaagctctgag

SEQ ID NO: 662327 - DNA, 15 bp, Homo sapiens
tgtgaagctctgagt

SEQ ID NO: 662328 - DNA, 15 bp, Homo sapiens
gtgaagctctgagtt

SEQ ID NO: 662329 - DNA, 15 bp, Homo sapiens
tgaagctctgagttt

SEQ ID NO: 662330 - DNA, 15 bp, Homo sapiens
gaagctctgagtttg

SEQ ID NO: 662331 - DNA, 15 bp, Homo sapiens
aagctctgagtttga

SEQ ID NO: 662332 - DNA, 15 bp, Homo sapiens
agctctgagtttgaa

SEQ ID NO: 662333 - DNA, 15 bp, Homo sapiens
gctctgagtttgaaa

SEQ ID NO: 662334 - DNA, 15 bp, Homo sapiens
ctctgagtttgaaag

SEQ ID NO: 662335 - DNA, 15 bp, Homo sapiens
tctgagtttgaaagt

SEQ ID NO: 662336 - DNA, 15 bp, Homo sapiens
ctgagtttgaaagtc

SEQ ID NO: 662337 - DNA, 15 bp, Homo sapiens
tgagtttgaaagtct

SEQ ID NO: 662338 - DNA, 15 bp, Homo sapiens
gagtttgaaagtctc

SEQ ID NO: 662339 - DNA, 15 bp, Homo sapiens
agtttgaaagtctcc

SEQ ID NO: 662340 - DNA, 15 bp, Homo sapiens
gtttgaaagtctccg

SEQ ID NO: 662341 - DNA, 15 bp, Homo sapiens
tttgaaagtctccgg

SEQ ID NO: 662342 - DNA, 15 bp, Homo sapiens
ttgaaagtctccggt

SEQ ID NO: 662343 - DNA, 15 bp, Homo sapiens
tgaaagtctccggtt

SEQ ID NO: 662344 - DNA, 15 bp, Homo sapiens
gaaagtctccggttt

SEQ ID NO: 662345 - DNA, 15 bp, Homo sapiens
aaagtctccggtttc

SEQ ID NO: 662346 - DNA, 15 bp, Homo sapiens
aagtctccggtttca

SEQ ID NO: 662347 - DNA, 15 bp, Homo sapiens
agtctccggtttcaa

SEQ ID NO: 662348 - DNA, 15 bp, Homo sapiens
gtctccggtttcaaa

SEQ ID NO: 662349 - DNA, 15 bp, Homo sapiens
tctccggtttcaaag

SEQ ID NO: 662350 - DNA, 15 bp, Homo sapiens
ctccggtttcaaagc

SEQ ID NO: 662351 - DNA, 15 bp, Homo sapiens
tccggtttcaaagcc

SEQ ID NO: 662352 - DNA, 15 bp, Homo sapiens
ccggtttcaaagcca

SEQ ID NO: 662353 - DNA, 15 bp, Homo sapiens
cggtttcaaagccat

SEQ ID NO: 662354 - DNA, 15 bp, Homo sapiens
ggtttcaaagccatg

SEQ ID NO: 662355 - DNA, 15 bp, Homo sapiens
gtttcaaagccatga

SEQ ID NO: 662356 - DNA, 15 bp, Homo sapiens
tttcaaagccatgaa

SEQ ID NO: 662357 - DNA, 15 bp, Homo sapiens
ttcaaagccatgaaa

SEQ ID NO: 662358 - DNA, 15 bp, Homo sapiens
tcaaagccatgaaac

SEQ ID NO: 662359 - DNA, 15 bp, Homo sapiens
caaagccatgaaact

SEQ ID NO: 662360 - DNA, 15 bp, Homo sapiens
aaagccatgaaactt

SEQ ID NO: 662361 - DNA, 15 bp, Homo sapiens
aagccatgaaactta

SEQ ID NO: 662362 - DNA, 15 bp, Homo sapiens
agccatgaaacttat

SEQ ID NO: 662363 - DNA, 15 bp, Homo sapiens
gccatgaaacttatg

SEQ ID NO: 662364 - DNA, 15 bp, Homo sapiens
ccatgaaacttatgg

SEQ ID NO: 662365 - DNA, 15 bp, Homo sapiens
catgaaacttatggc

SEQ ID NO: 662366 - DNA, 15 bp, Homo sapiens
atgaaacttatggct

SEQ ID NO: 662367 - DNA, 15 bp, Homo sapiens
tgaaacttatggctc

SEQ ID NO: 662368 - DNA, 15 bp, Homo sapiens
gaaacttatggctcc

SEQ ID NO: 662369 - DNA, 15 bp, Homo sapiens
aaacttatggctccc

SEQ ID NO: 662370 - DNA, 15 bp, Homo sapiens
aacttatggctcccc

SEQ ID NO: 662371 - DNA, 15 bp, Homo sapiens
acttatggctccccg

SEQ ID NO: 662372 - DNA, 15 bp, Homo sapiens
cttatggctccccgt

SEQ ID NO: 662373 - DNA, 15 bp, Homo sapiens
ttatggctccccgtt

SEQ ID NO: 662374 - DNA, 15 bp, Homo sapiens
tatggctccccgttt

SEQ ID NO: 662375 - DNA, 15 bp, Homo sapiens
atggctccccgtttt

SEQ ID NO: 662376 - DNA, 15 bp, Homo sapiens
tggctccccgtttta

SEQ ID NO: 662377 - DNA, 15 bp, Homo sapiens
ggctccccgttttag

SEQ ID NO: 662378 - DNA, 15 bp, Homo sapiens
gctccccgttttaga

SEQ ID NO: 662379 - DNA, 15 bp, Homo sapiens
ctccccgttttagac

SEQ ID NO: 662380 - DNA, 15 bp, Homo sapiens
tccccgttttagaca

SEQ ID NO: 662381 - DNA, 15 bp, Homo sapiens
ccccgttttagacac

SEQ ID NO: 662382 - DNA, 15 bp, Homo sapiens
cccgttttagacact

SEQ ID NO: 662383 - DNA, 15 bp, Homo sapiens
ccgttttagacactt

SEQ ID NO: 662384 - DNA, 15 bp, Homo sapiens
cgttttagacacttc

SEQ ID NO: 662385 - DNA, 15 bp, Homo sapiens
gttttagacacttcc

SEQ ID NO: 662386 - DNA, 15 bp, Homo sapiens
ttttagacacttcct

SEQ ID NO: 662387 - DNA, 15 bp, Homo sapiens
tttagacacttcctt

SEQ ID NO: 662388 - DNA, 15 bp, Homo sapiens
ttagacacttccttt

SEQ ID NO: 662389 - DNA, 15 bp, Homo sapiens
tagacacttcctttt

SEQ ID NO: 662390 - DNA, 15 bp, Homo sapiens
agacacttccttttg

SEQ ID NO: 662391 - DNA, 15 bp, Homo sapiens
gacacttccttttgg

SEQ ID NO: 662392 - DNA, 15 bp, Homo sapiens
acacttccttttggg

SEQ ID NO: 662393 - DNA, 15 bp, Homo sapiens
cacttccttttggga

SEQ ID NO: 662394 - DNA, 15 bp, Homo sapiens
acttccttttgggaa

SEQ ID NO: 662395 - DNA, 15 bp, Homo sapiens
cttccttttgggaag

SEQ ID NO: 662396 - DNA, 15 bp, Homo sapiens
ttccttttgggaaga

SEQ ID NO: 662397 - DNA, 15 bp, Homo sapiens
tccttttgggaagag

SEQ ID NO: 662398 - DNA, 15 bp, Homo sapiens
ccttttgggaagagt

SEQ ID NO: 662399 - DNA, 15 bp, Homo sapiens
cttttgggaagagtg

SEQ ID NO: 662400 - DNA, 15 bp, Homo sapiens
ttttgggaagagtgt

SEQ ID NO: 662401 - DNA, 15 bp, Homo sapiens
tttgggaagagtgtg

SEQ ID NO: 662402 - DNA, 15 bp, Homo sapiens
ttgggaagagtgtgg

SEQ ID NO: 662403 - DNA, 15 bp, Homo sapiens
tgggaagagtgtgga

SEQ ID NO: 662404 - DNA, 15 bp, Homo sapiens
gggaagagtgtggag

SEQ ID NO: 662405 - DNA, 15 bp, Homo sapiens
ggaagagtgtggagg

SEQ ID NO: 662406 - DNA, 15 bp, Homo sapiens
gaagagtgtggagga

SEQ ID NO: 662407 - DNA, 15 bp, Homo sapiens
aagagtgtggaggaa

SEQ ID NO: 662408 - DNA, 15 bp, Homo sapiens
agagtgtggaggaat

SEQ ID NO: 662409 - DNA, 15 bp, Homo sapiens
gagtgtggaggaatt

SEQ ID NO: 662410 - DNA, 15 bp, Homo sapiens
agtgtggaggaatta

SEQ ID NO: 662411 - DNA, 15 bp, Homo sapiens
gtgtggaggaattaa

SEQ ID NO: 662412 - DNA, 15 bp, Homo sapiens
tgtggaggaattaat

SEQ ID NO: 662413 - DNA, 15 bp, Homo sapiens
gtggaggaattaatc

SEQ ID NO: 662414 - DNA, 15 bp, Homo sapiens
tggaggaattaatca

SEQ ID NO: 662415 - DNA, 15 bp, Homo sapiens
ggaggaattaatcag

SEQ ID NO: 662416 - DNA, 15 bp, Homo sapiens
gaggaattaatcaga

SEQ ID NO: 662417 - DNA, 15 bp, Homo sapiens
aggaattaatcagaa

SEQ ID NO: 662418 - DNA, 15 bp, Homo sapiens
ggaattaatcagaaa

SEQ ID NO: 662419 - DNA, 15 bp, Homo sapiens
gaattaatcagaaag

SEQ ID NO: 662420 - DNA, 15 bp, Homo sapiens
aattaatcagaaaga

SEQ ID NO: 662421 - DNA, 15 bp, Homo sapiens
attaatcagaaagaa

SEQ ID NO: 662422 - DNA, 15 bp, Homo sapiens
ttaatcagaaagaag

SEQ ID NO: 662423 - DNA, 15 bp, Homo sapiens
taatcagaaagaaga

SEQ ID NO: 662424 - DNA, 15 bp, Homo sapiens
aatcagaaagaagaa

SEQ ID NO: 662425 - DNA, 15 bp, Homo sapiens
atcagaaagaagaaa

SEQ ID NO: 662426 - DNA, 15 bp, Homo sapiens
tcagaaagaagaaag

SEQ ID NO: 662427 - DNA, 15 bp, Homo sapiens
cagaaagaagaaagt

SEQ ID NO: 662428 - DNA, 15 bp, Homo sapiens
agaaagaagaaagtc

SEQ ID NO: 662429 - DNA, 15 bp, Homo sapiens
gaaagaagaaagtca

SEQ ID NO: 662430 - DNA, 15 bp, Homo sapiens
aaagaagaaagtcat

SEQ ID NO: 662431 - DNA, 15 bp, Homo sapiens
aagaagaaagtcata

SEQ ID NO: 662432 - DNA, 15 bp, Homo sapiens
agaagaaagtcatac

SEQ ID NO: 662433 - DNA, 15 bp, Homo sapiens
gaagaaagtcatact

SEQ ID NO: 662434 - DNA, 15 bp, Homo sapiens
aagaaagtcatactc

SEQ ID NO: 662435 - DNA, 15 bp, Homo sapiens
agaaagtcatactca

SEQ ID NO: 662436 - DNA, 15 bp, Homo sapiens
gaaagtcatactcaa

SEQ ID NO: 662437 - DNA, 15 bp, Homo sapiens
aaagtcatactcaaa

SEQ ID NO: 662438 - DNA, 15 bp, Homo sapiens
aagtcatactcaaat

SEQ ID NO: 662439 - DNA, 15 bp, Homo sapiens
agtcatactcaaata

SEQ ID NO: 662440 - DNA, 15 bp, Homo sapiens
gtcatactcaaatag

SEQ ID NO: 662441 - DNA, 15 bp, Homo sapiens
tcatactcaaatagg

SEQ ID NO: 662442 - DNA, 15 bp, Homo sapiens
catactcaaataggt

SEQ ID NO: 662443 - DNA, 15 bp, Homo sapiens
atactcaaataggtg

SEQ ID NO: 662444 - DNA, 15 bp, Homo sapiens
tactcaaataggtgg

SEQ ID NO: 662445 - DNA, 15 bp, Homo sapiens
actcaaataggtggt

SEQ ID NO: 662446 - DNA, 15 bp, Homo sapiens
ctcaaataggtggta

SEQ ID NO: 662447 - DNA, 15 bp, Homo sapiens
tcaaataggtggtag

SEQ ID NO: 662448 - DNA, 15 bp, Homo sapiens
caaataggtggtagg

SEQ ID NO: 662449 - DNA, 15 bp, Homo sapiens
aaataggtggtagga

SEQ ID NO: 662450 - DNA, 15 bp, Homo sapiens
aataggtggtaggag

SEQ ID NO: 662451 - DNA, 15 bp, Homo sapiens
ataggtggtaggagc

SEQ ID NO: 662452 - DNA, 15 bp, Homo sapiens
taggtggtaggagca

SEQ ID NO: 662453 - DNA, 15 bp, Homo sapiens
aggtggtaggagcag

SEQ ID NO: 662454 - DNA, 15 bp, Homo sapiens
ggtggtaggagcaga

SEQ ID NO: 662455 - DNA, 15 bp, Homo sapiens
gtggtaggagcagag

SEQ ID NO: 662456 - DNA, 15 bp, Homo sapiens
tggtaggagcagaga

SEQ ID NO: 662457 - DNA, 15 bp, Homo sapiens
ggtaggagcagagac

SEQ ID NO: 662458 - DNA, 15 bp, Homo sapiens
gtaggagcagagaca

SEQ ID NO: 662459 - DNA, 15 bp, Homo sapiens
taggagcagagacaa

SEQ ID NO: 662460 - DNA, 15 bp, Homo sapiens
aggagcagagacaat

SEQ ID NO: 662461 - DNA, 15 bp, Homo sapiens
ggagcagagacaatt

SEQ ID NO: 662462 - DNA, 15 bp, Homo sapiens
gagcagagacaattc

SEQ ID NO: 662463 - DNA, 15 bp, Homo sapiens
agcagagacaattca

SEQ ID NO: 662464 - DNA, 15 bp, Homo sapiens
gcagagacaattcaa

SEQ ID NO: 662465 - DNA, 15 bp, Homo sapiens
cagagacaattcaat

SEQ ID NO: 662466 - DNA, 15 bp, Homo sapiens
agagacaattcaata

SEQ ID NO: 662467 - DNA, 15 bp, Homo sapiens
gagacaattcaatac

SEQ ID NO: 662468 - DNA, 15 bp, Homo sapiens
agacaattcaataca

SEQ ID NO: 662469 - DNA, 15 bp, Homo sapiens
gacaattcaatacag

SEQ ID NO: 662470 - DNA, 15 bp, Homo sapiens
acaattcaatacaga

SEQ ID NO: 662471 - DNA, 15 bp, Homo sapiens
caattcaatacagac

SEQ ID NO: 662472 - DNA, 15 bp, Homo sapiens
aattcaatacagaca

SEQ ID NO: 662473 - DNA, 15 bp, Homo sapiens
attcaatacagacag

SEQ ID NO: 662474 - DNA, 15 bp, Homo sapiens
ttcaatacagacaga

SEQ ID NO: 662475 - DNA, 15 bp, Homo sapiens
tcaatacagacagaa

SEQ ID NO: 662476 - DNA, 15 bp, Homo sapiens
caatacagacagaag

SEQ ID NO: 662477 - DNA, 15 bp, Homo sapiens
aatacagacagaagt

SEQ ID NO: 662478 - DNA, 15 bp, Homo sapiens
atacagacagaagtc

SEQ ID NO: 662479 - DNA, 15 bp, Homo sapiens
tacagacagaagtct

SEQ ID NO: 662480 - DNA, 15 bp, Homo sapiens
acagacagaagtctt

SEQ ID NO: 662481 - DNA, 15 bp, Homo sapiens
cagacagaagtctta

SEQ ID NO: 662482 - DNA, 15 bp, Homo sapiens
agacagaagtcttag

SEQ ID NO: 662483 - DNA, 15 bp, Homo sapiens
gacagaagtcttaga

SEQ ID NO: 662484 - DNA, 15 bp, Homo sapiens
acagaagtcttagat

SEQ ID NO: 662485 - DNA, 15 bp, Homo sapiens
cagaagtcttagatg

SEQ ID NO: 662486 - DNA, 15 bp, Homo sapiens
agaagtcttagatga

SEQ ID NO: 662487 - DNA, 15 bp, Homo sapiens
gaagtcttagatgag

SEQ ID NO: 662488 - DNA, 15 bp, Homo sapiens
aagtcttagatgaga

SEQ ID NO: 662489 - DNA, 15 bp, Homo sapiens
agtcttagatgagag

SEQ ID NO: 662490 - DNA, 15 bp, Homo sapiens
gtcttagatgagagc

SEQ ID NO: 662491 - DNA, 15 bp, Homo sapiens
tcttagatgagagca

SEQ ID NO: 662492 - DNA, 15 bp, Homo sapiens
cttagatgagagcag

SEQ ID NO: 662493 - DNA, 15 bp, Homo sapiens
ttagatgagagcagt

SEQ ID NO: 662494 - DNA, 15 bp, Homo sapiens
tagatgagagcagtg

SEQ ID NO: 662495 - DNA, 15 bp, Homo sapiens
agatgagagcagtga

SEQ ID NO: 662496 - DNA, 15 bp, Homo sapiens
gatgagagcagtgag

SEQ ID NO: 662497 - DNA, 15 bp, Homo sapiens
atgagagcagtgagc

SEQ ID NO: 662498 - DNA, 15 bp, Homo sapiens
tgagagcagtgagcc

SEQ ID NO: 662499 - DNA, 15 bp, Homo sapiens
gagagcagtgagcca

SEQ ID NO: 662500 - DNA, 15 bp, Homo sapiens
agagcagtgagccag

SEQ ID NO: 662501 - DNA, 15 bp, Homo sapiens
gagcagtgagccagg

SEQ ID NO: 662502 - DNA, 15 bp, Homo sapiens
agcagtgagccaggg

SEQ ID NO: 662503 - DNA, 15 bp, Homo sapiens
gcagtgagccagggc

SEQ ID NO: 662504 - DNA, 15 bp, Homo sapiens
cagtgagccagggca

SEQ ID NO: 662505 - DNA, 15 bp, Homo sapiens
agtgagccagggcac

SEQ ID NO: 662506 - DNA, 15 bp, Homo sapiens
gtgagccagggcact

SEQ ID NO: 662507 - DNA, 15 bp, Homo sapiens
tgagccagggcactg

SEQ ID NO: 662508 - DNA, 15 bp, Homo sapiens
gagccagggcactgg

SEQ ID NO: 662509 - DNA, 15 bp, Homo sapiens
agccagggcactgga

SEQ ID NO: 662510 - DNA, 15 bp, Homo sapiens
gccagggcactggac

SEQ ID NO: 662511 - DNA, 15 bp, Homo sapiens
ccagggcactggact

SEQ ID NO: 662512 - DNA, 15 bp, Homo sapiens
cagggcactggactg

SEQ ID NO: 662513 - DNA, 15 bp, Homo sapiens
agggcactggactgg

SEQ ID NO: 662514 - DNA, 15 bp, Homo sapiens
gggcactggactggg

SEQ ID NO: 662515 - DNA, 15 bp, Homo sapiens
ggcactggactggga

SEQ ID NO: 662516 - DNA, 15 bp, Homo sapiens
gcactggactgggac

SEQ ID NO: 662517 - DNA, 15 bp, Homo sapiens
cactggactgggact

SEQ ID NO: 662518 - DNA, 15 bp, Homo sapiens
actggactgggactc

SEQ ID NO: 662519 - DNA, 15 bp, Homo sapiens
ctggactgggactca

SEQ ID NO: 662520 - DNA, 15 bp, Homo sapiens
tggactgggactcag

SEQ ID NO: 662521 - DNA, 15 bp, Homo sapiens
ggactgggactcagg

SEQ ID NO: 662522 - DNA, 15 bp, Homo sapiens
gactgggactcagga

SEQ ID NO: 662523 - DNA, 15 bp, Homo sapiens
actgggactcaggag

SEQ ID NO: 662524 - DNA, 15 bp, Homo sapiens
ctgggactcaggagg

SEQ ID NO: 662525 - DNA, 15 bp, Homo sapiens
tgggactcaggaggc

SEQ ID NO: 662526 - DNA, 15 bp, Homo sapiens
gggactcaggaggct

SEQ ID NO: 662527 - DNA, 15 bp, Homo sapiens
ggactcaggaggctt

SEQ ID NO: 662528 - DNA, 15 bp, Homo sapiens
gactcaggaggcttc

SEQ ID NO: 662529 - DNA, 15 bp, Homo sapiens
actcaggaggcttcc

SEQ ID NO: 662530 - DNA, 15 bp, Homo sapiens
ctcaggaggcttccc

SEQ ID NO: 662531 - DNA, 15 bp, Homo sapiens
tcaggaggcttcccc

SEQ ID NO: 662532 - DNA, 15 bp, Homo sapiens
caggaggcttcccct

SEQ ID NO: 662533 - DNA, 15 bp, Homo sapiens
aggaggcttccccta

SEQ ID NO: 662534 - DNA, 15 bp, Homo sapiens
ggaggcttcccctag

SEQ ID NO: 662535 - DNA, 15 bp, Homo sapiens
gaggcttcccctaga

SEQ ID NO: 662536 - DNA, 15 bp, Homo sapiens
aggcttcccctagac

SEQ ID NO: 662537 - DNA, 15 bp, Homo sapiens
ggcttcccctagact

SEQ ID NO: 662538 - DNA, 15 bp, Homo sapiens
gcttcccctagactc

SEQ ID NO: 662539 - DNA, 15 bp, Homo sapiens
cttcccctagactct

SEQ ID NO: 662540 - DNA, 15 bp, Homo sapiens
ttcccctagactctg

SEQ ID NO: 662541 - DNA, 15 bp, Homo sapiens
tcccctagactctgg

SEQ ID NO: 662542 - DNA, 15 bp, Homo sapiens
cccctagactctggt

SEQ ID NO: 662543 - DNA, 15 bp, Homo sapiens
ccctagactctggtt

SEQ ID NO: 662544 - DNA, 15 bp, Homo sapiens
cctagactctggttc

SEQ ID NO: 662545 - DNA, 15 bp, Homo sapiens
ctagactctggttcc

SEQ ID NO: 662546 - DNA, 15 bp, Homo sapiens
tagactctggttcca

SEQ ID NO: 662547 - DNA, 15 bp, Homo sapiens
agactctggttccac

SEQ ID NO: 662548 - DNA, 15 bp, Homo sapiens
gactctggttccacc

SEQ ID NO: 662549 - DNA, 15 bp, Homo sapiens
actctggttccaccg

SEQ ID NO: 662550 - DNA, 15 bp, Homo sapiens
ctctggttccaccga

SEQ ID NO: 662551 - DNA, 15 bp, Homo sapiens
tctggttccaccgat

SEQ ID NO: 662552 - DNA, 15 bp, Homo sapiens
ctggttccaccgatg

SEQ ID NO: 662553 - DNA, 15 bp, Homo sapiens
tggttccaccgatgc

SEQ ID NO: 662554 - DNA, 15 bp, Homo sapiens
ggttccaccgatgca

SEQ ID NO: 662555 - DNA, 15 bp, Homo sapiens
gttccaccgatgcag

SEQ ID NO: 662556 - DNA, 15 bp, Homo sapiens
ttccaccgatgcagc

SEQ ID NO: 662557 - DNA, 15 bp, Homo sapiens
tccaccgatgcagcc

SEQ ID NO: 662558 - DNA, 15 bp, Homo sapiens
ccaccgatgcagcct

SEQ ID NO: 662559 - DNA, 15 bp, Homo sapiens
caccgatgcagcctc

SEQ ID NO: 662560 - DNA, 15 bp, Homo sapiens
accgatgcagcctca

SEQ ID NO: 662561 - DNA, 15 bp, Homo sapiens
ccgatgcagcctcag

SEQ ID NO: 662562 - DNA, 15 bp, Homo sapiens
cgatgcagcctcagg

SEQ ID NO: 662563 - DNA, 15 bp, Homo sapiens
gatgcagcctcaggc

SEQ ID NO: 662564 - DNA, 15 bp, Homo sapiens
atgcagcctcaggca

SEQ ID NO: 662565 - DNA, 15 bp, Homo sapiens
tgcagcctcaggcag

SEQ ID NO: 662566 - DNA, 15 bp, Homo sapiens
gcagcctcaggcagg

SEQ ID NO: 662567 - DNA, 15 bp, Homo sapiens
cagcctcaggcagga

SEQ ID NO: 662568 - DNA, 15 bp, Homo sapiens
agcctcaggcaggac

SEQ ID NO: 662569 - DNA, 15 bp, Homo sapiens
gcctcaggcaggact

SEQ ID NO: 662570 - DNA, 15 bp, Homo sapiens
cctcaggcaggactt

SEQ ID NO: 662571 - DNA, 15 bp, Homo sapiens
ctcaggcaggacttc

SEQ ID NO: 662572 - DNA, 15 bp, Homo sapiens
tcaggcaggacttca

SEQ ID NO: 662573 - DNA, 15 bp, Homo sapiens
caggcaggacttcac

SEQ ID NO: 662574 - DNA, 15 bp, Homo sapiens
aggcaggacttcacc

SEQ ID NO: 662575 - DNA, 15 bp, Homo sapiens
ggcaggacttcacct

SEQ ID NO: 662576 - DNA, 15 bp, Homo sapiens
gcaggacttcacctc

SEQ ID NO: 662577 - DNA, 15 bp, Homo sapiens
caggacttcacctct

SEQ ID NO: 662578 - DNA, 15 bp, Homo sapiens
aggacttcacctctc

SEQ ID NO: 662579 - DNA, 15 bp, Homo sapiens
ggacttcacctctct

SEQ ID NO: 662580 - DNA, 15 bp, Homo sapiens
gacttcacctctctg

SEQ ID NO: 662581 - DNA, 15 bp, Homo sapiens
acttcacctctctgg

SEQ ID NO: 662582 - DNA, 15 bp, Homo sapiens
cttcacctctctggg

SEQ ID NO: 662583 - DNA, 15 bp, Homo sapiens
ttcacctctctgggc

SEQ ID NO: 662584 - DNA, 15 bp, Homo sapiens
tcacctctctgggca

SEQ ID NO: 662585 - DNA, 15 bp, Homo sapiens
cacctctctgggcat

SEQ ID NO: 662586 - DNA, 15 bp, Homo sapiens
acctctctgggcatc

SEQ ID NO: 662587 - DNA, 15 bp, Homo sapiens
cctctctgggcatcc

SEQ ID NO: 662588 - DNA, 15 bp, Homo sapiens
ctctctgggcatccg

SEQ ID NO: 662589 - DNA, 15 bp, Homo sapiens
tctctgggcatccgt

SEQ ID NO: 662590 - DNA, 15 bp, Homo sapiens
ctctgggcatccgtt

SEQ ID NO: 662591 - DNA, 15 bp, Homo sapiens
tctgggcatccgttt

SEQ ID NO: 662592 - DNA, 15 bp, Homo sapiens
ctgggcatccgtttc

SEQ ID NO: 662593 - DNA, 15 bp, Homo sapiens
tgggcatccgtttct

SEQ ID NO: 662594 - DNA, 15 bp, Homo sapiens
gggcatccgtttctt

SEQ ID NO: 662595 - DNA, 15 bp, Homo sapiens
ggcatccgtttcttc

SEQ ID NO: 662596 - DNA, 15 bp, Homo sapiens
gcatccgtttcttca

SEQ ID NO: 662597 - DNA, 15 bp, Homo sapiens
catccgtttcttcat

SEQ ID NO: 662598 - DNA, 15 bp, Homo sapiens
atccgtttcttcata

SEQ ID NO: 662599 - DNA, 15 bp, Homo sapiens
tccgtttcttcatat

SEQ ID NO: 662600 - DNA, 15 bp, Homo sapiens
ccgtttcttcatatg

SEQ ID NO: 662601 - DNA, 15 bp, Homo sapiens
cgtttcttcatatgt

SEQ ID NO: 662602 - DNA, 15 bp, Homo sapiens
gtttcttcatatgtt

SEQ ID NO: 662603 - DNA, 15 bp, Homo sapiens
tttcttcatatgtta

SEQ ID NO: 662604 - DNA, 15 bp, Homo sapiens
ttcttcatatgttaa

SEQ ID NO: 662605 - DNA, 15 bp, Homo sapiens
tcttcatatgttaaa

SEQ ID NO: 662606 - DNA, 15 bp, Homo sapiens
cttcatatgttaaac

SEQ ID NO: 662607 - DNA, 15 bp, Homo sapiens
ttcatatgttaaaca

SEQ ID NO: 662608 - DNA, 15 bp, Homo sapiens
tcatatgttaaacat

SEQ ID NO: 662609 - DNA, 15 bp, Homo sapiens
catatgttaaacata

SEQ ID NO: 662610 - DNA, 15 bp, Homo sapiens
atatgttaaacatac

SEQ ID NO: 662611 - DNA, 15 bp, Homo sapiens
tatgttaaacatacg

SEQ ID NO: 662612 - DNA, 15 bp, Homo sapiens
atgttaaacatacgg

SEQ ID NO: 662613 - DNA, 15 bp, Homo sapiens
tgttaaacatacggg

SEQ ID NO: 662614 - DNA, 15 bp, Homo sapiens
gttaaacatacgggg

SEQ ID NO: 662615 - DNA, 15 bp, Homo sapiens
ttaaacatacggggt

SEQ ID NO: 662616 - DNA, 15 bp, Homo sapiens
taaacatacggggtt

SEQ ID NO: 662617 - DNA, 15 bp, Homo sapiens
aaacatacggggttt

SEQ ID NO: 662618 - DNA, 15 bp, Homo sapiens
aacatacggggtttt

SEQ ID NO: 662619 - DNA, 15 bp, Homo sapiens
acatacggggtttta

SEQ ID NO: 662620 - DNA, 15 bp, Homo sapiens
catacggggttttaa

SEQ ID NO: 662621 - DNA, 15 bp, Homo sapiens
atacggggttttaat

SEQ ID NO: 662622 - DNA, 15 bp, Homo sapiens
tacggggttttaatt

SEQ ID NO: 662623 - DNA, 15 bp, Homo sapiens
acggggttttaatta

SEQ ID NO: 662624 - DNA, 15 bp, Homo sapiens
cggggttttaattag

SEQ ID NO: 662625 - DNA, 15 bp, Homo sapiens
ggggttttaattaga

SEQ ID NO: 662626 - DNA, 15 bp, Homo sapiens
gggttttaattagat

SEQ ID NO: 662627 - DNA, 15 bp, Homo sapiens
ggttttaattagatg

SEQ ID NO: 662628 - DNA, 15 bp, Homo sapiens
gttttaattagatga

SEQ ID NO: 662629 - DNA, 15 bp, Homo sapiens
ttttaattagatgat

SEQ ID NO: 662630 - DNA, 15 bp, Homo sapiens
tttaattagatgatc

SEQ ID NO: 662631 - DNA, 15 bp, Homo sapiens
ttaattagatgatcg

SEQ ID NO: 662632 - DNA, 15 bp, Homo sapiens
taattagatgatcgc

SEQ ID NO: 662633 - DNA, 15 bp, Homo sapiens
aattagatgatcgct

SEQ ID NO: 662634 - DNA, 15 bp, Homo sapiens
attagatgatcgctg

SEQ ID NO: 662635 - DNA, 15 bp, Homo sapiens
ttagatgatcgctga

SEQ ID NO: 662636 - DNA, 15 bp, Homo sapiens
tagatgatcgctgaa

SEQ ID NO: 662637 - DNA, 15 bp, Homo sapiens
agatgatcgctgaag

SEQ ID NO: 662638 - DNA, 15 bp, Homo sapiens
gatgatcgctgaaga

SEQ ID NO: 662639 - DNA, 15 bp, Homo sapiens
atgatcgctgaagac

SEQ ID NO: 662640 - DNA, 15 bp, Homo sapiens
tgatcgctgaagacc

SEQ ID NO: 662641 - DNA, 15 bp, Homo sapiens
gatcgctgaagaccc

SEQ ID NO: 662642 - DNA, 15 bp, Homo sapiens
atcgctgaagacccc

SEQ ID NO: 662643 - DNA, 15 bp, Homo sapiens
tcgctgaagacccct

SEQ ID NO: 662644 - DNA, 15 bp, Homo sapiens
cgctgaagacccctc

SEQ ID NO: 662645 - DNA, 15 bp, Homo sapiens
gctgaagacccctct

SEQ ID NO: 662646 - DNA, 15 bp, Homo sapiens
ctgaagacccctcta

SEQ ID NO: 662647 - DNA, 15 bp, Homo sapiens
tgaagacccctctag

SEQ ID NO: 662648 - DNA, 15 bp, Homo sapiens
gaagacccctctagc

SEQ ID NO: 662649 - DNA, 15 bp, Homo sapiens
aagacccctctagcc

SEQ ID NO: 662650 - DNA, 15 bp, Homo sapiens
agacccctctagccc

SEQ ID NO: 662651 - DNA, 15 bp, Homo sapiens
gacccctctagccct

SEQ ID NO: 662652 - DNA, 15 bp, Homo sapiens
acccctctagcccta

SEQ ID NO: 662653 - DNA, 15 bp, Homo sapiens
cccctctagccctaa

SEQ ID NO: 662654 - DNA, 15 bp, Homo sapiens
ccctctagccctaaa

SEQ ID NO: 662655 - DNA, 15 bp, Homo sapiens
cctctagccctaaaa

SEQ ID NO: 662656 - DNA, 15 bp, Homo sapiens
ctctagccctaaaac

SEQ ID NO: 662657 - DNA, 15 bp, Homo sapiens
tctagccctaaaact

SEQ ID NO: 662658 - DNA, 15 bp, Homo sapiens
ctagccctaaaactc

SEQ ID NO: 662659 - DNA, 15 bp, Homo sapiens
tagccctaaaactct

SEQ ID NO: 662660 - DNA, 15 bp, Homo sapiens
agccctaaaactctg

SEQ ID NO: 662661 - DNA, 15 bp, Homo sapiens
gccctaaaactctgt

SEQ ID NO: 662662 - DNA, 15 bp, Homo sapiens
ccctaaaactctgtg

SEQ ID NO: 662663 - DNA, 15 bp, Homo sapiens
cctaaaactctgtgt

SEQ ID NO: 662664 - DNA, 15 bp, Homo sapiens
ctaaaactctgtgtc

SEQ ID NO: 662665 - DNA, 15 bp, Homo sapiens
taaaactctgtgtct

SEQ ID NO: 662666 - DNA, 15 bp, Homo sapiens
aaaactctgtgtctc

SEQ ID NO: 662667 - DNA, 15 bp, Homo sapiens
aaactctgtgtctct

SEQ ID NO: 662668 - DNA, 15 bp, Homo sapiens
aactctgtgtctctt

SEQ ID NO: 662669 - DNA, 15 bp, Homo sapiens
actctgtgtctctta

SEQ ID NO: 662670 - DNA, 15 bp, Homo sapiens
ctctgtgtctcttaa

SEQ ID NO: 662671 - DNA, 15 bp, Homo sapiens
tctgtgtctcttaag

SEQ ID NO: 662672 - DNA, 15 bp, Homo sapiens
ctgtgtctcttaagt

SEQ ID NO: 662673 - DNA, 15 bp, Homo sapiens
tgtgtctcttaagtg

SEQ ID NO: 662674 - DNA, 15 bp, Homo sapiens
gtgtctcttaagtgc

SEQ ID NO: 662675 - DNA, 15 bp, Homo sapiens
tgtctcttaagtgct

SEQ ID NO: 662676 - DNA, 15 bp, Homo sapiens
gtctcttaagtgcta

SEQ ID NO: 662677 - DNA, 15 bp, Homo sapiens
tctcttaagtgctaa

SEQ ID NO: 662678 - DNA, 15 bp, Homo sapiens
ctcttaagtgctaag

SEQ ID NO: 662679 - DNA, 15 bp, Homo sapiens
tcttaagtgctaaga

SEQ ID NO: 662680 - DNA, 15 bp, Homo sapiens
cttaagtgctaagag

SEQ ID NO: 662681 - DNA, 15 bp, Homo sapiens
ttaagtgctaagagg

SEQ ID NO: 662682 - DNA, 15 bp, Homo sapiens
taagtgctaagaggg

SEQ ID NO: 662683 - DNA, 15 bp, Homo sapiens
aagtgctaagagggc

SEQ ID NO: 662684 - DNA, 15 bp, Homo sapiens
agtgctaagagggca

SEQ ID NO: 662685 - DNA, 15 bp, Homo sapiens
gtgctaagagggcac

SEQ ID NO: 662686 - DNA, 15 bp, Homo sapiens
tgctaagagggcacc

SEQ ID NO: 662687 - DNA, 15 bp, Homo sapiens
gctaagagggcacca

SEQ ID NO: 662688 - DNA, 15 bp, Homo sapiens
ctaagagggcaccaa

SEQ ID NO: 662689 - DNA, 15 bp, Homo sapiens
taagagggcaccaac

SEQ ID NO: 662690 - DNA, 15 bp, Homo sapiens
aagagggcaccaaca

SEQ ID NO: 662691 - DNA, 15 bp, Homo sapiens
agagggcaccaacag

SEQ ID NO: 662692 - DNA, 15 bp, Homo sapiens
gagggcaccaacagc

SEQ ID NO: 662693 - DNA, 15 bp, Homo sapiens
agggcaccaacagcg

SEQ ID NO: 662694 - DNA, 15 bp, Homo sapiens
gggcaccaacagcgt

SEQ ID NO: 662695 - DNA, 15 bp, Homo sapiens
ggcaccaacagcgtt

SEQ ID NO: 662696 - DNA, 15 bp, Homo sapiens
gcaccaacagcgttc

SEQ ID NO: 662697 - DNA, 15 bp, Homo sapiens
caccaacagcgttcc

SEQ ID NO: 662698 - DNA, 15 bp, Homo sapiens
accaacagcgttcct

SEQ ID NO: 662699 - DNA, 15 bp, Homo sapiens
ccaacagcgttcctc

SEQ ID NO: 662700 - DNA, 15 bp, Homo sapiens
caacagcgttcctcc

SEQ ID NO: 662701 - DNA, 15 bp, Homo sapiens
aacagcgttcctcct

SEQ ID NO: 662702 - DNA, 15 bp, Homo sapiens
acagcgttcctcctc

SEQ ID NO: 662703 - DNA, 15 bp, Homo sapiens
cagcgttcctcctcc

SEQ ID NO: 662704 - DNA, 15 bp, Homo sapiens
agcgttcctcctccc

SEQ ID NO: 662705 - DNA, 15 bp, Homo sapiens
gcgttcctcctcccc

SEQ ID NO: 662706 - DNA, 15 bp, Homo sapiens
cgttcctcctcccca

SEQ ID NO: 662707 - DNA, 15 bp, Homo sapiens
gttcctcctccccaa

SEQ ID NO: 662708 - DNA, 15 bp, Homo sapiens
ttcctcctccccaag

SEQ ID NO: 662709 - DNA, 15 bp, Homo sapiens
tcctcctccccaagg

SEQ ID NO: 662710 - DNA, 15 bp, Homo sapiens
cctcctccccaagga

SEQ ID NO: 662711 - DNA, 15 bp, Homo sapiens
ctcctccccaaggag

SEQ ID NO: 662712 - DNA, 15 bp, Homo sapiens
tcctccccaaggagc

SEQ ID NO: 662713 - DNA, 15 bp, Homo sapiens
cctccccaaggagca

SEQ ID NO: 662714 - DNA, 15 bp, Homo sapiens
ctccccaaggagcat

SEQ ID NO: 662715 - DNA, 15 bp, Homo sapiens
tccccaaggagcata

SEQ ID NO: 662716 - DNA, 15 bp, Homo sapiens
ccccaaggagcataa

SEQ ID NO: 662717 - DNA, 15 bp, Homo sapiens
cccaaggagcataat

SEQ ID NO: 662718 - DNA, 15 bp, Homo sapiens
ccaaggagcataatg

SEQ ID NO: 662719 - DNA, 15 bp, Homo sapiens
caaggagcataatgt

SEQ ID NO: 662720 - DNA, 15 bp, Homo sapiens
aaggagcataatgtg

SEQ ID NO: 662721 - DNA, 15 bp, Homo sapiens
aggagcataatgtga

SEQ ID NO: 662722 - DNA, 15 bp, Homo sapiens
ggagcataatgtgat

SEQ ID NO: 662723 - DNA, 15 bp, Homo sapiens
gagcataatgtgatg

SEQ ID NO: 662724 - DNA, 15 bp, Homo sapiens
agcataatgtgatgg

SEQ ID NO: 662725 - DNA, 15 bp, Homo sapiens
gcataatgtgatggt

SEQ ID NO: 662726 - DNA, 15 bp, Homo sapiens
cataatgtgatggtt

SEQ ID NO: 662727 - DNA, 15 bp, Homo sapiens
ataatgtgatggttc

SEQ ID NO: 662728 - DNA, 15 bp, Homo sapiens
taatgtgatggttcc

SEQ ID NO: 662729 - DNA, 15 bp, Homo sapiens
aatgtgatggttcct

SEQ ID NO: 662730 - DNA, 15 bp, Homo sapiens
atgtgatggttcctg

SEQ ID NO: 662731 - DNA, 15 bp, Homo sapiens
tgtgatggttcctgc

SEQ ID NO: 662732 - DNA, 15 bp, Homo sapiens
gtgatggttcctgcc

SEQ ID NO: 662733 - DNA, 15 bp, Homo sapiens
tgatggttcctgccg

SEQ ID NO: 662734 - DNA, 15 bp, Homo sapiens
gatggttcctgccgg

SEQ ID NO: 662735 - DNA, 15 bp, Homo sapiens
atggttcctgccggc

SEQ ID NO: 662736 - DNA, 15 bp, Homo sapiens
tggttcctgccggcc

SEQ ID NO: 662737 - DNA, 15 bp, Homo sapiens
ggttcctgccggccc

SEQ ID NO: 662738 - DNA, 15 bp, Homo sapiens
gttcctgccggccct

SEQ ID NO: 662739 - DNA, 15 bp, Homo sapiens
ttcctgccggccctg

SEQ ID NO: 662740 - DNA, 15 bp, Homo sapiens
tcctgccggccctgg

SEQ ID NO: 662741 - DNA, 15 bp, Homo sapiens
cctgccggccctggc

SEQ ID NO: 662742 - DNA, 15 bp, Homo sapiens
ctgccggccctggct

SEQ ID NO: 662743 - DNA, 15 bp, Homo sapiens
tgccggccctggctg

SEQ ID NO: 662744 - DNA, 15 bp, Homo sapiens
gccggccctggctga

SEQ ID NO: 662745 - DNA, 15 bp, Homo sapiens
ccggccctggctgac

SEQ ID NO: 662746 - DNA, 15 bp, Homo sapiens
cggccctggctgact

SEQ ID NO: 662747 - DNA, 15 bp, Homo sapiens
ggccctggctgactc

SEQ ID NO: 662748 - DNA, 15 bp, Homo sapiens
gccctggctgactct

SEQ ID NO: 662749 - DNA, 15 bp, Homo sapiens
ccctggctgactctc

SEQ ID NO: 662750 - DNA, 15 bp, Homo sapiens
cctggctgactctcg

SEQ ID NO: 662751 - DNA, 15 bp, Homo sapiens
ctggctgactctcgc

SEQ ID NO: 662752 - DNA, 15 bp, Homo sapiens
tggctgactctcgcc

SEQ ID NO: 662753 - DNA, 15 bp, Homo sapiens
ggctgactctcgccg

SEQ ID NO: 662754 - DNA, 15 bp, Homo sapiens
gctgactctcgccgt

SEQ ID NO: 662755 - DNA, 15 bp, Homo sapiens
ctgactctcgccgtc

SEQ ID NO: 662756 - DNA, 15 bp, Homo sapiens
tgactctcgccgtcc

SEQ ID NO: 662757 - DNA, 15 bp, Homo sapiens
gactctcgccgtcct

SEQ ID NO: 662758 - DNA, 15 bp, Homo sapiens
actctcgccgtcctt

SEQ ID NO: 662759 - DNA, 15 bp, Homo sapiens
ctctcgccgtccttg

SEQ ID NO: 662760 - DNA, 15 bp, Homo sapiens
tctcgccgtccttgg

SEQ ID NO: 662761 - DNA, 15 bp, Homo sapiens
ctcgccgtccttgga

SEQ ID NO: 662762 - DNA, 15 bp, Homo sapiens
tcgccgtccttggag

SEQ ID NO: 662763 - DNA, 15 bp, Homo sapiens
cgccgtccttggaga

SEQ ID NO: 662764 - DNA, 15 bp, Homo sapiens
gccgtccttggagat

SEQ ID NO: 662765 - DNA, 15 bp, Homo sapiens
ccgtccttggagata

SEQ ID NO: 662766 - DNA, 15 bp, Homo sapiens
cgtccttggagataa

SEQ ID NO: 662767 - DNA, 15 bp, Homo sapiens
gtccttggagataat

SEQ ID NO: 662768 - DNA, 15 bp, Homo sapiens
tccttggagataatt

SEQ ID NO: 662769 - DNA, 15 bp, Homo sapiens
ccttggagataattg

SEQ ID NO: 662770 - DNA, 15 bp, Homo sapiens
cttggagataattgg

SEQ ID NO: 662771 - DNA, 15 bp, Homo sapiens
ttggagataattggg

SEQ ID NO: 662772 - DNA, 15 bp, Homo sapiens
tggagataattgggt

SEQ ID NO: 662773 - DNA, 15 bp, Homo sapiens
ggagataattgggtt

SEQ ID NO: 662774 - DNA, 15 bp, Homo sapiens
gagataattgggttc

SEQ ID NO: 662775 - DNA, 15 bp, Homo sapiens
agataattgggttca

SEQ ID NO: 662776 - DNA, 15 bp, Homo sapiens
gataattgggttcag

SEQ ID NO: 662777 - DNA, 15 bp, Homo sapiens
ataattgggttcagt

SEQ ID NO: 662778 - DNA, 15 bp, Homo sapiens
taattgggttcagtg

SEQ ID NO: 662779 - DNA, 15 bp, Homo sapiens
aattgggttcagtgc

SEQ ID NO: 662780 - DNA, 15 bp, Homo sapiens
attgggttcagtgcc

SEQ ID NO: 662781 - DNA, 15 bp, Homo sapiens
ttgggttcagtgcca

SEQ ID NO: 662782 - DNA, 15 bp, Homo sapiens
tgggttcagtgccac

SEQ ID NO: 662783 - DNA, 15 bp, Homo sapiens
gggttcagtgccacc

SEQ ID NO: 662784 - DNA, 15 bp, Homo sapiens
ggttcagtgccacct

SEQ ID NO: 662785 - DNA, 15 bp, Homo sapiens
gttcagtgccacctg

SEQ ID NO: 662786 - DNA, 15 bp, Homo sapiens
ttcagtgccacctgg

SEQ ID NO: 662787 - DNA, 15 bp, Homo sapiens
tcagtgccacctgga

SEQ ID NO: 662788 - DNA, 15 bp, Homo sapiens
cagtgccacctggac

SEQ ID NO: 662789 - DNA, 15 bp, Homo sapiens
agtgccacctggacc

SEQ ID NO: 662790 - DNA, 15 bp, Homo sapiens
gtgccacctggacca

SEQ ID NO: 662791 - DNA, 15 bp, Homo sapiens
tgccacctggaccag

SEQ ID NO: 662792 - DNA, 15 bp, Homo sapiens
gccacctggaccaga

SEQ ID NO: 662793 - DNA, 15 bp, Homo sapiens
ccacctggaccagaa

SEQ ID NO: 662794 - DNA, 15 bp, Homo sapiens
cacctggaccagaac

SEQ ID NO: 662795 - DNA, 15 bp, Homo sapiens
acctggaccagaact

SEQ ID NO: 662796 - DNA, 15 bp, Homo sapiens
cctggaccagaactg

SEQ ID NO: 662797 - DNA, 15 bp, Homo sapiens
ctggaccagaactgg

SEQ ID NO: 662798 - DNA, 15 bp, Homo sapiens
tggaccagaactggg

SEQ ID NO: 662799 - DNA, 15 bp, Homo sapiens
ggaccagaactgggg

SEQ ID NO: 662800 - DNA, 15 bp, Homo sapiens
gaccagaactgggga

SEQ ID NO: 662801 - DNA, 15 bp, Homo sapiens
accagaactggggat

SEQ ID NO: 662802 - DNA, 15 bp, Homo sapiens
ccagaactggggatg

SEQ ID NO: 662803 - DNA, 15 bp, Homo sapiens
cagaactggggatgc

SEQ ID NO: 662804 - DNA, 15 bp, Homo sapiens
agaactggggatgcg

SEQ ID NO: 662805 - DNA, 15 bp, Homo sapiens
gaactggggatgcgg

SEQ ID NO: 662806 - DNA, 15 bp, Homo sapiens
aactggggatgcgga

SEQ ID NO: 662807 - DNA, 15 bp, Homo sapiens
actggggatgcggaa

SEQ ID NO: 662808 - DNA, 15 bp, Homo sapiens
ctggggatgcggaag

SEQ ID NO: 662809 - DNA, 15 bp, Homo sapiens
tggggatgcggaagc

SEQ ID NO: 662810 - DNA, 15 bp, Homo sapiens
ggggatgcggaagca

SEQ ID NO: 662811 - DNA, 15 bp, Homo sapiens
gggatgcggaagcaa

SEQ ID NO: 662812 - DNA, 15 bp, Homo sapiens
ggatgcggaagcaag

SEQ ID NO: 662813 - DNA, 15 bp, Homo sapiens
gatgcggaagcaaga

SEQ ID NO: 662814 - DNA, 15 bp, Homo sapiens
atgcggaagcaagag

SEQ ID NO: 662815 - DNA, 15 bp, Homo sapiens
tgcggaagcaagagg

SEQ ID NO: 662816 - DNA, 15 bp, Homo sapiens
gcggaagcaagaggc

SEQ ID NO: 662817 - DNA, 15 bp, Homo sapiens
cggaagcaagaggcg

SEQ ID NO: 662818 - DNA, 15 bp, Homo sapiens
ggaagcaagaggcga

SEQ ID NO: 662819 - DNA, 15 bp, Homo sapiens
gaagcaagaggcgag

SEQ ID NO: 662820 - DNA, 15 bp, Homo sapiens
aagcaagaggcgagt

SEQ ID NO: 662821 - DNA, 15 bp, Homo sapiens
agcaagaggcgagtc

SEQ ID NO: 662822 - DNA, 15 bp, Homo sapiens
gcaagaggcgagtct

SEQ ID NO: 662823 - DNA, 15 bp, Homo sapiens
caagaggcgagtcta

SEQ ID NO: 662824 - DNA, 15 bp, Homo sapiens
aagaggcgagtctat

SEQ ID NO: 662825 - DNA, 15 bp, Homo sapiens
agaggcgagtctatt

SEQ ID NO: 662826 - DNA, 15 bp, Homo sapiens
gaggcgagtctattg

SEQ ID NO: 662827 - DNA, 15 bp, Homo sapiens
aggcgagtctattgc

SEQ ID NO: 662828 - DNA, 15 bp, Homo sapiens
ggcgagtctattgct

SEQ ID NO: 662829 - DNA, 15 bp, Homo sapiens
gcgagtctattgctc

SEQ ID NO: 662830 - DNA, 15 bp, Homo sapiens
cgagtctattgctct

SEQ ID NO: 662831 - DNA, 15 bp, Homo sapiens
gagtctattgctctc

SEQ ID NO: 662832 - DNA, 15 bp, Homo sapiens
agtctattgctctct

SEQ ID NO: 662833 - DNA, 15 bp, Homo sapiens
gtctattgctctctc

SEQ ID NO: 662834 - DNA, 15 bp, Homo sapiens
tctattgctctctct

SEQ ID NO: 662835 - DNA, 15 bp, Homo sapiens
ctattgctctctctc

SEQ ID NO: 662836 - DNA, 15 bp, Homo sapiens
tattgctctctctcg

SEQ ID NO: 662837 - DNA, 15 bp, Homo sapiens
attgctctctctcgg

SEQ ID NO: 662838 - DNA, 15 bp, Homo sapiens
ttgctctctctcggt

SEQ ID NO: 662839 - DNA, 15 bp, Homo sapiens
tgctctctctcggtc

SEQ ID NO: 662840 - DNA, 15 bp, Homo sapiens
gctctctctcggtcc

SEQ ID NO: 662841 - DNA, 15 bp, Homo sapiens
ctctctctcggtcct

SEQ ID NO: 662842 - DNA, 15 bp, Homo sapiens
tctctctcggtcctg

SEQ ID NO: 662843 - DNA, 15 bp, Homo sapiens
ctctctcggtcctgg

SEQ ID NO: 662844 - DNA, 15 bp, Homo sapiens
tctctcggtcctggg

SEQ ID NO: 662845 - DNA, 15 bp, Homo sapiens
ctctcggtcctgggc

SEQ ID NO: 662846 - DNA, 15 bp, Homo sapiens
tctcggtcctgggcc

SEQ ID NO: 662847 - DNA, 15 bp, Homo sapiens
ctcggtcctgggccg

SEQ ID NO: 662848 - DNA, 15 bp, Homo sapiens
tcggtcctgggccgc

SEQ ID NO: 662849 - DNA, 15 bp, Homo sapiens
cggtcctgggccgcc

SEQ ID NO: 662850 - DNA, 15 bp, Homo sapiens
ggtcctgggccgccc

SEQ ID NO: 662851 - DNA, 15 bp, Homo sapiens
gtcctgggccgccct

SEQ ID NO: 662852 - DNA, 15 bp, Homo sapiens
tcctgggccgccctg

SEQ ID NO: 662853 - DNA, 15 bp, Homo sapiens
cctgggccgccctgt

SEQ ID NO: 662854 - DNA, 15 bp, Homo sapiens
ctgggccgccctgtg

SEQ ID NO: 662855 - DNA, 15 bp, Homo sapiens
tgggccgccctgtga

SEQ ID NO: 662856 - DNA, 15 bp, Homo sapiens
gggccgccctgtgat

SEQ ID NO: 662857 - DNA, 15 bp, Homo sapiens
ggccgccctgtgatt

SEQ ID NO: 662858 - DNA, 15 bp, Homo sapiens
gccgccctgtgattg

SEQ ID NO: 662859 - DNA, 15 bp, Homo sapiens
ccgccctgtgattgt

SEQ ID NO: 662860 - DNA, 15 bp, Homo sapiens
cgccctgtgattgtt

SEQ ID NO: 662861 - DNA, 15 bp, Homo sapiens
gccctgtgattgttg

SEQ ID NO: 662862 - DNA, 15 bp, Homo sapiens
ccctgtgattgttgg

SEQ ID NO: 662863 - DNA, 15 bp, Homo sapiens
cctgtgattgttggg

SEQ ID NO: 662864 - DNA, 15 bp, Homo sapiens
ctgtgattgttgggc

SEQ ID NO: 662865 - DNA, 15 bp, Homo sapiens
tgtgattgttgggcg

SEQ ID NO: 662866 - DNA, 15 bp, Homo sapiens
gtgattgttgggcgt

SEQ ID NO: 662867 - DNA, 15 bp, Homo sapiens
tgattgttgggcgtc

SEQ ID NO: 662868 - DNA, 15 bp, Homo sapiens
gattgttgggcgtcc

SEQ ID NO: 662869 - DNA, 15 bp, Homo sapiens
attgttgggcgtccg

SEQ ID NO: 662870 - DNA, 15 bp, Homo sapiens
ttgttgggcgtccgg

SEQ ID NO: 662871 - DNA, 15 bp, Homo sapiens
tgttgggcgtccgga

SEQ ID NO: 662872 - DNA, 15 bp, Homo sapiens
gttgggcgtccggaa

SEQ ID NO: 662873 - DNA, 15 bp, Homo sapiens
ttgggcgtccggaaa

SEQ ID NO: 662874 - DNA, 15 bp, Homo sapiens
tgggcgtccggaaac

SEQ ID NO: 662875 - DNA, 15 bp, Homo sapiens
gggcgtccggaaact

SEQ ID NO: 662876 - DNA, 15 bp, Homo sapiens
ggcgtccggaaactg

SEQ ID NO: 662877 - DNA, 15 bp, Homo sapiens
gcgtccggaaactgt

SEQ ID NO: 662878 - DNA, 15 bp, Homo sapiens
cgtccggaaactgtc

SEQ ID NO: 662879 - DNA, 15 bp, Homo sapiens
gtccggaaactgtct

SEQ ID NO: 662880 - DNA, 15 bp, Homo sapiens
tccggaaactgtctc

SEQ ID NO: 662881 - DNA, 15 bp, Homo sapiens
ccggaaactgtctcc

SEQ ID NO: 662882 - DNA, 15 bp, Homo sapiens
cggaaactgtctccc

SEQ ID NO: 662883 - DNA, 15 bp, Homo sapiens
ggaaactgtctcccc

SEQ ID NO: 662884 - DNA, 15 bp, Homo sapiens
gaaactgtctcccct

SEQ ID NO: 662885 - DNA, 15 bp, Homo sapiens
aaactgtctccccta

SEQ ID NO: 662886 - DNA, 15 bp, Homo sapiens
aactgtctcccctat

SEQ ID NO: 662887 - DNA, 15 bp, Homo sapiens
actgtctcccctatg

SEQ ID NO: 662888 - DNA, 15 bp, Homo sapiens
ctgtctcccctatgg

SEQ ID NO: 662889 - DNA, 15 bp, Homo sapiens
tgtctcccctatggg

SEQ ID NO: 662890 - DNA, 15 bp, Homo sapiens
gtctcccctatgggt

SEQ ID NO: 662891 - DNA, 15 bp, Homo sapiens
tctcccctatgggtt

SEQ ID NO: 662892 - DNA, 15 bp, Homo sapiens
ctcccctatgggttt

SEQ ID NO: 662893 - DNA, 15 bp, Homo sapiens
tcccctatgggttta

SEQ ID NO: 662894 - DNA, 15 bp, Homo sapiens
cccctatgggtttaa

SEQ ID NO: 662895 - DNA, 15 bp, Homo sapiens
ccctatgggtttaaa

SEQ ID NO: 662896 - DNA, 15 bp, Homo sapiens
cctatgggtttaaaa

SEQ ID NO: 662897 - DNA, 15 bp, Homo sapiens
ctatgggtttaaaaa

SEQ ID NO: 662898 - DNA, 15 bp, Homo sapiens
tatgggtttaaaaac

SEQ ID NO: 662899 - DNA, 15 bp, Homo sapiens
atgggtttaaaaaca

SEQ ID NO: 662900 - DNA, 15 bp, Homo sapiens
tgggtttaaaaacaa

SEQ ID NO: 662901 - DNA, 15 bp, Homo sapiens
gggtttaaaaacaaa

SEQ ID NO: 662902 - DNA, 15 bp, Homo sapiens
ggtttaaaaacaaaa

SEQ ID NO: 662903 - DNA, 15 bp, Homo sapiens
gtttaaaaacaaaac

SEQ ID NO: 662904 - DNA, 15 bp, Homo sapiens
tttaaaaacaaaact

SEQ ID NO: 662905 - DNA, 15 bp, Homo sapiens
ttaaaaacaaaactg

SEQ ID NO: 662906 - DNA, 15 bp, Homo sapiens
taaaaacaaaactga

SEQ ID NO: 662907 - DNA, 15 bp, Homo sapiens
aaaaacaaaactgag

SEQ ID NO: 662908 - DNA, 15 bp, Homo sapiens
aaaacaaaactgagc

SEQ ID NO: 662909 - DNA, 15 bp, Homo sapiens
aaacaaaactgagcg

SEQ ID NO: 662910 - DNA, 15 bp, Homo sapiens
aacaaaactgagcgc

SEQ ID NO: 662911 - DNA, 15 bp, Homo sapiens
acaaaactgagcgcc

SEQ ID NO: 662912 - DNA, 15 bp, Homo sapiens
caaaactgagcgccc

SEQ ID NO: 662913 - DNA, 15 bp, Homo sapiens
aaaactgagcgccca

SEQ ID NO: 662914 - DNA, 15 bp, Homo sapiens
aaactgagcgcccat

SEQ ID NO: 662915 - DNA, 15 bp, Homo sapiens
aactgagcgcccatg

SEQ ID NO: 662916 - DNA, 15 bp, Homo sapiens
actgagcgcccatgg

SEQ ID NO: 662917 - DNA, 15 bp, Homo sapiens
ctgagcgcccatggg

SEQ ID NO: 662918 - DNA, 15 bp, Homo sapiens
tgagcgcccatgggg

SEQ ID NO: 662919 - DNA, 15 bp, Homo sapiens
gagcgcccatggggt

SEQ ID NO: 662920 - DNA, 15 bp, Homo sapiens
agcgcccatggggtg

SEQ ID NO: 662921 - DNA, 15 bp, Homo sapiens
gcgcccatggggtgt

SEQ ID NO: 662922 - DNA, 15 bp, Homo sapiens
cgcccatggggtgtg

SEQ ID NO: 662923 - DNA, 15 bp, Homo sapiens
gcccatggggtgtga

SEQ ID NO: 662924 - DNA, 15 bp, Homo sapiens
cccatggggtgtgac

SEQ ID NO: 662925 - DNA, 15 bp, Homo sapiens
ccatggggtgtgaca

SEQ ID NO: 662926 - DNA, 15 bp, Homo sapiens
catggggtgtgacag

SEQ ID NO: 662927 - DNA, 15 bp, Homo sapiens
atggggtgtgacagt

SEQ ID NO: 662928 - DNA, 15 bp, Homo sapiens
tggggtgtgacagtc

SEQ ID NO: 662929 - DNA, 15 bp, Homo sapiens
ggggtgtgacagtca

SEQ ID NO: 662930 - DNA, 15 bp, Homo sapiens
gggtgtgacagtcat

SEQ ID NO: 662931 - DNA, 15 bp, Homo sapiens
ggtgtgacagtcatc

SEQ ID NO: 662932 - DNA, 15 bp, Homo sapiens
gtgtgacagtcatct

SEQ ID NO: 662933 - DNA, 15 bp, Homo sapiens
tgtgacagtcatctg

SEQ ID NO: 662934 - DNA, 15 bp, Homo sapiens
gtgacagtcatctgc

SEQ ID NO: 662935 - DNA, 15 bp, Homo sapiens
tgacagtcatctgca

SEQ ID NO: 662936 - DNA, 15 bp, Homo sapiens
gacagtcatctgcag

SEQ ID NO: 662937 - DNA, 15 bp, Homo sapiens
acagtcatctgcagg

SEQ ID NO: 662938 - DNA, 15 bp, Homo sapiens
cagtcatctgcaggg

SEQ ID NO: 662939 - DNA, 15 bp, Homo sapiens
agtcatctgcagggg

SEQ ID NO: 662940 - DNA, 15 bp, Homo sapiens
gtcatctgcaggggc

SEQ ID NO: 662941 - DNA, 15 bp, Homo sapiens
tcatctgcaggggct

SEQ ID NO: 662942 - DNA, 15 bp, Homo sapiens
catctgcaggggctt

SEQ ID NO: 662943 - DNA, 15 bp, Homo sapiens
atctgcaggggcttg

SEQ ID NO: 662944 - DNA, 15 bp, Homo sapiens
tctgcaggggcttgg

SEQ ID NO: 662945 - DNA, 15 bp, Homo sapiens
ctgcaggggcttggg

SEQ ID NO: 662946 - DNA, 15 bp, Homo sapiens
tgcaggggcttgggt

SEQ ID NO: 662947 - DNA, 15 bp, Homo sapiens
gcaggggcttgggtg

SEQ ID NO: 662948 - DNA, 15 bp, Homo sapiens
caggggcttgggtgg

SEQ ID NO: 662949 - DNA, 15 bp, Homo sapiens
aggggcttgggtggc

SEQ ID NO: 662950 - DNA, 15 bp, Homo sapiens
ggggcttgggtggcc

SEQ ID NO: 662951 - DNA, 15 bp, Homo sapiens
gggcttgggtggccc

SEQ ID NO: 662952 - DNA, 15 bp, Homo sapiens
ggcttgggtggccca

SEQ ID NO: 662953 - DNA, 15 bp, Homo sapiens
gcttgggtggcccat

SEQ ID NO: 662954 - DNA, 15 bp, Homo sapiens
cttgggtggcccatc

SEQ ID NO: 662955 - DNA, 15 bp, Homo sapiens
ttgggtggcccatca

SEQ ID NO: 662956 - DNA, 15 bp, Homo sapiens
tgggtggcccatcag

SEQ ID NO: 662957 - DNA, 15 bp, Homo sapiens
gggtggcccatcagg

SEQ ID NO: 662958 - DNA, 15 bp, Homo sapiens
ggtggcccatcaggc

SEQ ID NO: 662959 - DNA, 15 bp, Homo sapiens
gtggcccatcaggcg

SEQ ID NO: 662960 - DNA, 15 bp, Homo sapiens
tggcccatcaggcga

SEQ ID NO: 662961 - DNA, 15 bp, Homo sapiens
ggcccatcaggcgag

SEQ ID NO: 662962 - DNA, 15 bp, Homo sapiens
gcccatcaggcgagg

SEQ ID NO: 662963 - DNA, 15 bp, Homo sapiens
cccatcaggcgaggc

SEQ ID NO: 662964 - DNA, 15 bp, Homo sapiens
ccatcaggcgaggct

SEQ ID NO: 662965 - DNA, 15 bp, Homo sapiens
catcaggcgaggctt

SEQ ID NO: 662966 - DNA, 15 bp, Homo sapiens
atcaggcgaggcttt

SEQ ID NO: 662967 - DNA, 15 bp, Homo sapiens
tcaggcgaggctttc

SEQ ID NO: 662968 - DNA, 15 bp, Homo sapiens
caggcgaggctttct

SEQ ID NO: 662969 - DNA, 15 bp, Homo sapiens
aggcgaggctttctc

SEQ ID NO: 662970 - DNA, 15 bp, Homo sapiens
ggcgaggctttctcg

SEQ ID NO: 662971 - DNA, 15 bp, Homo sapiens
gcgaggctttctcgg

SEQ ID NO: 662972 - DNA, 15 bp, Homo sapiens
cgaggctttctcggc

SEQ ID NO: 662973 - DNA, 15 bp, Homo sapiens
gaggctttctcggca

SEQ ID NO: 662974 - DNA, 15 bp, Homo sapiens
aggctttctcggcac

SEQ ID NO: 662975 - DNA, 15 bp, Homo sapiens
ggctttctcggcacc

SEQ ID NO: 662976 - DNA, 15 bp, Homo sapiens
gctttctcggcaccc

SEQ ID NO: 662977 - DNA, 15 bp, Homo sapiens
ctttctcggcacccg

SEQ ID NO: 662978 - DNA, 15 bp, Homo sapiens
tttctcggcacccga

SEQ ID NO: 662979 - DNA, 15 bp, Homo sapiens
ttctcggcacccgag

SEQ ID NO: 662980 - DNA, 15 bp, Homo sapiens
tctcggcacccgagg

SEQ ID NO: 662981 - DNA, 15 bp, Homo sapiens
ctcggcacccgaggc

SEQ ID NO: 662982 - DNA, 15 bp, Homo sapiens
tcggcacccgaggct

SEQ ID NO: 662983 - DNA, 15 bp, Homo sapiens
cggcacccgaggctc

SEQ ID NO: 662984 - DNA, 15 bp, Homo sapiens
ggcacccgaggctcc

SEQ ID NO: 662985 - DNA, 15 bp, Homo sapiens
gcacccgaggctcca

SEQ ID NO: 662986 - DNA, 15 bp, Homo sapiens
cacccgaggctccag

SEQ ID NO: 662987 - DNA, 15 bp, Homo sapiens
acccgaggctccagc

SEQ ID NO: 662988 - DNA, 15 bp, Homo sapiens
cccgaggctccagcc

SEQ ID NO: 662989 - DNA, 15 bp, Homo sapiens
ccgaggctccagcct

SEQ ID NO: 662990 - DNA, 15 bp, Homo sapiens
cgaggctccagcctg

SEQ ID NO: 662991 - DNA, 15 bp, Homo sapiens
gaggctccagcctga

SEQ ID NO: 662992 - DNA, 15 bp, Homo sapiens
aggctccagcctgat

SEQ ID NO: 662993 - DNA, 15 bp, Homo sapiens
ggctccagcctgatc

SEQ ID NO: 662994 - DNA, 15 bp, Homo sapiens
gctccagcctgatct

SEQ ID NO: 662995 - DNA, 15 bp, Homo sapiens
ctccagcctgatctc

SEQ ID NO: 662996 - DNA, 15 bp, Homo sapiens
tccagcctgatctcg

SEQ ID NO: 662997 - DNA, 15 bp, Homo sapiens
ccagcctgatctcgg

SEQ ID NO: 662998 - DNA, 15 bp, Homo sapiens
cagcctgatctcggt

SEQ ID NO: 662999 - DNA, 15 bp, Homo sapiens
agcctgatctcggtc

SEQ ID NO: 663000 - DNA, 15 bp, Homo sapiens
gcctgatctcggtct

SEQ ID NO: 663001 - DNA, 15 bp, Homo sapiens
cctgatctcggtctt

SEQ ID NO: 663002 - DNA, 15 bp, Homo sapiens
ctgatctcggtctta

SEQ ID NO: 663003 - DNA, 15 bp, Homo sapiens
tgatctcggtcttat

SEQ ID NO: 663004 - DNA, 15 bp, Homo sapiens
gatctcggtcttatc

SEQ ID NO: 663005 - DNA, 15 bp, Homo sapiens
atctcggtcttatcc

SEQ ID NO: 663006 - DNA, 15 bp, Homo sapiens
tctcggtcttatcct

SEQ ID NO: 663007 - DNA, 15 bp, Homo sapiens
ctcggtcttatcctg

SEQ ID NO: 663008 - DNA, 15 bp, Homo sapiens
tcggtcttatcctgc

SEQ ID NO: 663009 - DNA, 15 bp, Homo sapiens
cggtcttatcctgcg

SEQ ID NO: 663010 - DNA, 15 bp, Homo sapiens
ggtcttatcctgcga

SEQ ID NO: 663011 - DNA, 15 bp, Homo sapiens
gtcttatcctgcgac

SEQ ID NO: 663012 - DNA, 15 bp, Homo sapiens
tcttatcctgcgacc

SEQ ID NO: 663013 - DNA, 15 bp, Homo sapiens
cttatcctgcgaccg

SEQ ID NO: 663014 - DNA, 15 bp, Homo sapiens
ttatcctgcgaccgg

SEQ ID NO: 663015 - DNA, 15 bp, Homo sapiens
tatcctgcgaccggg

SEQ ID NO: 663016 - DNA, 15 bp, Homo sapiens
atcctgcgaccgggc

SEQ ID NO: 663017 - DNA, 15 bp, Homo sapiens
tcctgcgaccgggct

SEQ ID NO: 663018 - DNA, 15 bp, Homo sapiens
cctgcgaccgggctg

SEQ ID NO: 663019 - DNA, 15 bp, Homo sapiens
ctgcgaccgggctgg

SEQ ID NO: 663020 - DNA, 15 bp, Homo sapiens
tgcgaccgggctggt

SEQ ID NO: 663021 - DNA, 15 bp, Homo sapiens
gcgaccgggctggtt

SEQ ID NO: 663022 - DNA, 15 bp, Homo sapiens
cgaccgggctggttc

SEQ ID NO: 663023 - DNA, 15 bp, Homo sapiens
gaccgggctggttct

SEQ ID NO: 663024 - DNA, 15 bp, Homo sapiens
accgggctggttctg

SEQ ID NO: 663025 - DNA, 15 bp, Homo sapiens
ccgggctggttctgg

SEQ ID NO: 663026 - DNA, 15 bp, Homo sapiens
cgggctggttctggc

SEQ ID NO: 663027 - DNA, 15 bp, Homo sapiens
gggctggttctggcg

SEQ ID NO: 663028 - DNA, 15 bp, Homo sapiens
ggctggttctggcgg

SEQ ID NO: 663029 - DNA, 15 bp, Homo sapiens
gctggttctggcggg

SEQ ID NO: 663030 - DNA, 15 bp, Homo sapiens
ctggttctggcgggt

SEQ ID NO: 663031 - DNA, 15 bp, Homo sapiens
tggttctggcgggtc

SEQ ID NO: 663032 - DNA, 15 bp, Homo sapiens
ggttctggcgggtcg

SEQ ID NO: 663033 - DNA, 15 bp, Homo sapiens
gttctggcgggtcgc

SEQ ID NO: 663034 - DNA, 15 bp, Homo sapiens
ttctggcgggtcgcc

SEQ ID NO: 663035 - DNA, 15 bp, Homo sapiens
tctggcgggtcgcca

SEQ ID NO: 663036 - DNA, 15 bp, Homo sapiens
ctggcgggtcgccag

SEQ ID NO: 663037 - DNA, 15 bp, Homo sapiens
tggcgggtcgccagg

SEQ ID NO: 663038 - DNA, 15 bp, Homo sapiens
ggcgggtcgccaggg

SEQ ID NO: 663039 - DNA, 15 bp, Homo sapiens
gcgggtcgccagggt

SEQ ID NO: 663040 - DNA, 15 bp, Homo sapiens
cgggtcgccagggtg

SEQ ID NO: 663041 - DNA, 15 bp, Homo sapiens
gggtcgccagggtgg

SEQ ID NO: 663042 - DNA, 15 bp, Homo sapiens
ggtcgccagggtggg

SEQ ID NO: 663043 - DNA, 15 bp, Homo sapiens
gtcgccagggtgggc

SEQ ID NO: 663044 - DNA, 15 bp, Homo sapiens
tcgccagggtgggcg

SEQ ID NO: 663045 - DNA, 15 bp, Homo sapiens
cgccagggtgggcgg

SEQ ID NO: 663046 - DNA, 15 bp, Homo sapiens
gccagggtgggcggc

SEQ ID NO: 663047 - DNA, 15 bp, Homo sapiens
ccagggtgggcggcg

SEQ ID NO: 663048 - DNA, 15 bp, Homo sapiens
cagggtgggcggcgg

SEQ ID NO: 663049 - DNA, 15 bp, Homo sapiens
agggtgggcggcggc

SEQ ID NO: 663050 - DNA, 15 bp, Homo sapiens
gggtgggcggcggcc

SEQ ID NO: 663051 - DNA, 15 bp, Homo sapiens
ggtgggcggcggccc

SEQ ID NO: 663052 - DNA, 15 bp, Homo sapiens
gtgggcggcggcccc

SEQ ID NO: 663053 - DNA, 15 bp, Homo sapiens
tgggcggcggcccca

SEQ ID NO: 663054 - DNA, 15 bp, Homo sapiens
gggcggcggccccag

SEQ ID NO: 663055 - DNA, 15 bp, Homo sapiens
ggcggcggccccagc

SEQ ID NO: 663056 - DNA, 15 bp, Homo sapiens
gcggcggccccagcc

SEQ ID NO: 663057 - DNA, 15 bp, Homo sapiens
cggcggccccagccg

SEQ ID NO: 663058 - DNA, 15 bp, Homo sapiens
ggcggccccagccgg

SEQ ID NO: 663059 - DNA, 15 bp, Homo sapiens
gcggccccagccggg

SEQ ID NO: 663060 - DNA, 15 bp, Homo sapiens
cggccccagccgggc

SEQ ID NO: 663061 - DNA, 15 bp, Homo sapiens
ggccccagccgggcg

SEQ ID NO: 663062 - DNA, 15 bp, Homo sapiens
gccccagccgggcgc

SEQ ID NO: 663063 - DNA, 15 bp, Homo sapiens
ccccagccgggcgcc

SEQ ID NO: 663064 - DNA, 15 bp, Homo sapiens
cccagccgggcgccc

SEQ ID NO: 663065 - DNA, 15 bp, Homo sapiens
ccagccgggcgcccc

SEQ ID NO: 663066 - DNA, 15 bp, Homo sapiens
cagccgggcgccccg

SEQ ID NO: 663067 - DNA, 15 bp, Homo sapiens
agccgggcgccccgg

SEQ ID NO: 663068 - DNA, 15 bp, Homo sapiens
gccgggcgccccggc

SEQ ID NO: 663069 - DNA, 15 bp, Homo sapiens
ccgggcgccccggcg

SEQ ID NO: 663070 - DNA, 15 bp, Homo sapiens
cgggcgccccggcgg

SEQ ID NO: 663071 - DNA, 15 bp, Homo sapiens
gggcgccccggcggc

SEQ ID NO: 663072 - DNA, 15 bp, Homo sapiens
ggcgccccggcggca

SEQ ID NO: 663073 - DNA, 15 bp, Homo sapiens
gcgccccggcggcaa

SEQ ID NO: 663074 - DNA, 15 bp, Homo sapiens
cgccccggcggcaag

SEQ ID NO: 663075 - DNA, 15 bp, Homo sapiens
gccccggcggcaaga

SEQ ID NO: 663076 - DNA, 15 bp, Homo sapiens
ccccggcggcaagag

SEQ ID NO: 663077 - DNA, 15 bp, Homo sapiens
cccggcggcaagagc

SEQ ID NO: 663078 - DNA, 15 bp, Homo sapiens
ccggcggcaagagcg

SEQ ID NO: 663079 - DNA, 15 bp, Homo sapiens
cggcggcaagagcgg

SEQ ID NO: 663080 - DNA, 15 bp, Homo sapiens
ggcggcaagagcggc

SEQ ID NO: 663081 - DNA, 15 bp, Homo sapiens
gcggcaagagcggca

SEQ ID NO: 663082 - DNA, 15 bp, Homo sapiens
cggcaagagcggcag

SEQ ID NO: 663083 - DNA, 15 bp, Homo sapiens
ggcaagagcggcagg

SEQ ID NO: 663084 - DNA, 15 bp, Homo sapiens
gcaagagcggcaggc

SEQ ID NO: 663085 - DNA, 15 bp, Homo sapiens
caagagcggcaggct

SEQ ID NO: 663086 - DNA, 15 bp, Homo sapiens
aagagcggcaggctg

SEQ ID NO: 663087 - DNA, 15 bp, Homo sapiens
agagcggcaggctgc

SEQ ID NO: 663088 - DNA, 15 bp, Homo sapiens
gagcggcaggctgcg

SEQ ID NO: 663089 - DNA, 15 bp, Homo sapiens
agcggcaggctgcgc

SEQ ID NO: 663090 - DNA, 15 bp, Homo sapiens
gcggcaggctgcgcc

SEQ ID NO: 663091 - DNA, 15 bp, Homo sapiens
cggcaggctgcgccc

SEQ ID NO: 663092 - DNA, 15 bp, Homo sapiens
ggcaggctgcgcccc

SEQ ID NO: 663093 - DNA, 15 bp, Homo sapiens
gcaggctgcgcccct

SEQ ID NO: 663094 - DNA, 15 bp, Homo sapiens
caggctgcgcccctg

SEQ ID NO: 663095 - DNA, 15 bp, Homo sapiens
aggctgcgcccctgg

SEQ ID NO: 663096 - DNA, 15 bp, Homo sapiens
ggctgcgcccctggc

SEQ ID NO: 663097 - DNA, 15 bp, Homo sapiens
gctgcgcccctggcc

SEQ ID NO: 663098 - DNA, 15 bp, Homo sapiens
ctgcgcccctggccc

SEQ ID NO: 663099 - DNA, 15 bp, Homo sapiens
tgcgcccctggcccg

SEQ ID NO: 663100 - DNA, 15 bp, Homo sapiens
gcgcccctggcccgc

SEQ ID NO: 663101 - DNA, 15 bp, Homo sapiens
cgcccctggcccgcg

SEQ ID NO: 663102 - DNA, 15 bp, Homo sapiens
gcccctggcccgcgc

SEQ ID NO: 663103 - DNA, 15 bp, Homo sapiens
cccctggcccgcgcc

SEQ ID NO: 663104 - DNA, 15 bp, Homo sapiens
ccctggcccgcgcct

SEQ ID NO: 663105 - DNA, 15 bp, Homo sapiens
cctggcccgcgccta

SEQ ID NO: 663106 - DNA, 15 bp, Homo sapiens
ctggcccgcgcctag

SEQ ID NO: 663107 - DNA, 15 bp, Homo sapiens
tggcccgcgcctagc

SEQ ID NO: 663108 - DNA, 15 bp, Homo sapiens
ggcccgcgcctagcc

SEQ ID NO: 663109 - DNA, 15 bp, Homo sapiens
gcccgcgcctagcct

SEQ ID NO: 663110 - DNA, 15 bp, Homo sapiens
cccgcgcctagcctg

SEQ ID NO: 663111 - DNA, 15 bp, Homo sapiens
ccgcgcctagcctgg

SEQ ID NO: 663112 - DNA, 15 bp, Homo sapiens
cgcgcctagcctggg

SEQ ID NO: 663113 - DNA, 15 bp, Homo sapiens
gcgcctagcctgggg

SEQ ID NO: 663114 - DNA, 15 bp, Homo sapiens
cgcctagcctgggga

SEQ ID NO: 663115 - DNA, 15 bp, Homo sapiens
gcctagcctggggag

SEQ ID NO: 663116 - DNA, 15 bp, Homo sapiens
cctagcctggggaga

SEQ ID NO: 663117 - DNA, 15 bp, Homo sapiens
ctagcctggggagag

SEQ ID NO: 663118 - DNA, 15 bp, Homo sapiens
tagcctggggagaga

SEQ ID NO: 663119 - DNA, 15 bp, Homo sapiens
agcctggggagagag

SEQ ID NO: 663120 - DNA, 15 bp, Homo sapiens
gcctggggagagagc

SEQ ID NO: 663121 - DNA, 15 bp, Homo sapiens
cctggggagagagct

SEQ ID NO: 663122 - DNA, 15 bp, Homo sapiens
ctggggagagagctg

SEQ ID NO: 663123 - DNA, 15 bp, Homo sapiens
tggggagagagctgg

SEQ ID NO: 663124 - DNA, 15 bp, Homo sapiens
ggggagagagctggg

SEQ ID NO: 663125 - DNA, 15 bp, Homo sapiens
gggagagagctgggc

SEQ ID NO: 663126 - DNA, 15 bp, Homo sapiens
ggagagagctgggcg

SEQ ID NO: 663127 - DNA, 15 bp, Homo sapiens
gagagagctgggcgg

SEQ ID NO: 663128 - DNA, 15 bp, Homo sapiens
agagagctgggcggg

SEQ ID NO: 663129 - DNA, 15 bp, Homo sapiens
gagagctgggcgggc

SEQ ID NO: 663130 - DNA, 15 bp, Homo sapiens
agagctgggcgggcg

SEQ ID NO: 663131 - DNA, 15 bp, Homo sapiens
gagctgggcgggcgg

SEQ ID NO: 663132 - DNA, 15 bp, Homo sapiens
agctgggcgggcggc

SEQ ID NO: 663133 - DNA, 15 bp, Homo sapiens
gctgggcgggcggcg

SEQ ID NO: 663134 - DNA, 15 bp, Homo sapiens
ctgggcgggcggcgg

SEQ ID NO: 663135 - DNA, 15 bp, Homo sapiens
tgggcgggcggcggg

SEQ ID NO: 663136 - DNA, 15 bp, Homo sapiens
gggcgggcggcggga

SEQ ID NO: 663137 - DNA, 15 bp, Homo sapiens
ggcgggcggcgggag

SEQ ID NO: 663138 - DNA, 15 bp, Homo sapiens
gcgggcggcgggagc

SEQ ID NO: 663139 - DNA, 15 bp, Homo sapiens
cgggcggcgggagct

SEQ ID NO: 663140 - DNA, 15 bp, Homo sapiens
gggcggcgggagctg

SEQ ID NO: 663141 - DNA, 15 bp, Homo sapiens
ggcggcgggagctgc

SEQ ID NO: 663142 - DNA, 15 bp, Homo sapiens
gcggcgggagctgct

SEQ ID NO: 663143 - DNA, 15 bp, Homo sapiens
cggcgggagctgctc

SEQ ID NO: 663144 - DNA, 15 bp, Homo sapiens
ggcgggagctgctct

SEQ ID NO: 663145 - DNA, 15 bp, Homo sapiens
gcgggagctgctctc

SEQ ID NO: 663146 - DNA, 15 bp, Homo sapiens
cgggagctgctctcg

SEQ ID NO: 663147 - DNA, 15 bp, Homo sapiens
gggagctgctctcgc

SEQ ID NO: 663148 - DNA, 15 bp, Homo sapiens
ggagctgctctcgcg

SEQ ID NO: 663149 - DNA, 15 bp, Homo sapiens
gagctgctctcgcgg

SEQ ID NO: 663150 - DNA, 15 bp, Homo sapiens
agctgctctcgcggg

SEQ ID NO: 663151 - DNA, 15 bp, Homo sapiens
gctgctctcgcgggc

SEQ ID NO: 663152 - DNA, 15 bp, Homo sapiens
ctgctctcgcgggcc

SEQ ID NO: 663153 - DNA, 15 bp, Homo sapiens
tgctctcgcgggccg

SEQ ID NO: 663154 - DNA, 15 bp, Homo sapiens
gctctcgcgggccgc

SEQ ID NO: 663155 - DNA, 15 bp, Homo sapiens
ctctcgcgggccgcg

SEQ ID NO: 663156 - DNA, 15 bp, Homo sapiens
tctcgcgggccgcgg

SEQ ID NO: 663157 - DNA, 15 bp, Homo sapiens
ctcgcgggccgcggc

SEQ ID NO: 663158 - DNA, 15 bp, Homo sapiens
tcgcgggccgcggcc

SEQ ID NO: 663159 - DNA, 15 bp, Homo sapiens
cgcgggccgcggccc

SEQ ID NO: 663160 - DNA, 15 bp, Homo sapiens
gcgggccgcggccct

SEQ ID NO: 663161 - DNA, 15 bp, Homo sapiens
cgggccgcggccctc

SEQ ID NO: 663162 - DNA, 15 bp, Homo sapiens
gggccgcggccctcg

SEQ ID NO: 663163 - DNA, 15 bp, Homo sapiens
ggccgcggccctcgc

SEQ ID NO: 663164 - DNA, 15 bp, Homo sapiens
gccgcggccctcgcc

SEQ ID NO: 663165 - DNA, 15 bp, Homo sapiens
ccgcggccctcgccc

SEQ ID NO: 663166 - DNA, 15 bp, Homo sapiens
cgcggccctcgccct

SEQ ID NO: 663167 - DNA, 15 bp, Homo sapiens
gcggccctcgccctg

SEQ ID NO: 663168 - DNA, 15 bp, Homo sapiens
cggccctcgccctgg

SEQ ID NO: 663169 - DNA, 15 bp, Homo sapiens
ggccctcgccctggc

SEQ ID NO: 663170 - DNA, 15 bp, Homo sapiens
gccctcgccctggct

SEQ ID NO: 663171 - DNA, 15 bp, Homo sapiens
ccctcgccctggctg

SEQ ID NO: 663172 - DNA, 15 bp, Homo sapiens
cctcgccctggctgc

SEQ ID NO: 663173 - DNA, 15 bp, Homo sapiens
ctcgccctggctgca

SEQ ID NO: 663174 - DNA, 15 bp, Homo sapiens
tcgccctggctgcaa

SEQ ID NO: 663175 - DNA, 15 bp, Homo sapiens
cgccctggctgcaac

SEQ ID NO: 663176 - DNA, 15 bp, Homo sapiens
gccctggctgcaacg

SEQ ID NO: 663177 - DNA, 15 bp, Homo sapiens
ccctggctgcaacgg

SEQ ID NO: 663178 - DNA, 15 bp, Homo sapiens
cctggctgcaacggt

SEQ ID NO: 663179 - DNA, 15 bp, Homo sapiens
ctggctgcaacggta

SEQ ID NO: 663180 - DNA, 15 bp, Homo sapiens
tggctgcaacggtag

SEQ ID NO: 663181 - DNA, 15 bp, Homo sapiens
ggctgcaacggtagg

SEQ ID NO: 663182 - DNA, 15 bp, Homo sapiens
gctgcaacggtaggc

SEQ ID NO: 663183 - DNA, 15 bp, Homo sapiens
ctgcaacggtaggcg

SEQ ID NO: 663184 - DNA, 15 bp, Homo sapiens
tgcaacggtaggcgt

SEQ ID NO: 663185 - DNA, 15 bp, Homo sapiens
gcaacggtaggcgtt

SEQ ID NO: 663186 - DNA, 15 bp, Homo sapiens
caacggtaggcgttt

SEQ ID NO: 663187 - DNA, 15 bp, Homo sapiens
aacggtaggcgtttc

SEQ ID NO: 663188 - DNA, 15 bp, Homo sapiens
acggtaggcgtttcc

SEQ ID NO: 663189 - DNA, 15 bp, Homo sapiens
cggtaggcgtttccc

SEQ ID NO: 663190 - DNA, 15 bp, Homo sapiens
ggtaggcgtttcccg

SEQ ID NO: 663191 - DNA, 15 bp, Homo sapiens
gtaggcgtttcccgg

SEQ ID NO: 663192 - DNA, 15 bp, Homo sapiens
taggcgtttcccggg

SEQ ID NO: 663193 - DNA, 15 bp, Homo sapiens
aggcgtttcccgggc

SEQ ID NO: 663194 - DNA, 15 bp, Homo sapiens
ggcgtttcccgggcc

SEQ ID NO: 663195 - DNA, 15 bp, Homo sapiens
gcgtttcccgggccg

SEQ ID NO: 663196 - DNA, 15 bp, Homo sapiens
cgtttcccgggccgg

SEQ ID NO: 663197 - DNA, 15 bp, Homo sapiens
gtttcccgggccgga

SEQ ID NO: 663198 - DNA, 15 bp, Homo sapiens
tttcccgggccggac

SEQ ID NO: 663199 - DNA, 15 bp, Homo sapiens
ttcccgggccggacg

SEQ ID NO: 663200 - DNA, 15 bp, Homo sapiens
tcccgggccggacgc

SEQ ID NO: 663201 - DNA, 15 bp, Homo sapiens
cccgggccggacgcg

SEQ ID NO: 663202 - DNA, 15 bp, Homo sapiens
ccgggccggacgcgc

SEQ ID NO: 663203 - DNA, 15 bp, Homo sapiens
cgggccggacgcgcg

SEQ ID NO: 663204 - DNA, 15 bp, Homo sapiens
gggccggacgcgcgt

SEQ ID NO: 663205 - DNA, 15 bp, Homo sapiens
ggccggacgcgcgtg

SEQ ID NO: 663206 - DNA, 15 bp, Homo sapiens
gccggacgcgcgtgg

SEQ ID NO: 663207 - DNA, 15 bp, Homo sapiens
ccggacgcgcgtggg

SEQ ID NO: 663208 - DNA, 15 bp, Homo sapiens
cggacgcgcgtgggg

SEQ ID NO: 663209 - DNA, 15 bp, Homo sapiens
ggacgcgcgtggggg

SEQ ID NO: 663210 - DNA, 15 bp, Homo sapiens
gacgcgcgtgggggg

SEQ ID NO: 663211 - DNA, 15 bp, Homo sapiens
acgcgcgtggggggc

SEQ ID NO: 663212 - DNA, 15 bp, Homo sapiens
cgcgcgtggggggcg

SEQ ID NO: 663213 - DNA, 15 bp, Homo sapiens
gcgcgtggggggcgg

SEQ ID NO: 663214 - DNA, 15 bp, Homo sapiens
cgcgtggggggcggg

SEQ ID NO: 663215 - DNA, 15 bp, Homo sapiens
gcgtggggggcgggg

SEQ ID NO: 663216 - DNA, 15 bp, Homo sapiens
cgtggggggcggggg

SEQ ID NO: 663217 - DNA, 15 bp, Homo sapiens
gtggggggcgggggc

SEQ ID NO: 663218 - DNA, 15 bp, Homo sapiens
tggggggcgggggcg

SEQ ID NO: 663219 - DNA, 15 bp, Homo sapiens
ggggggcgggggcgg

SEQ ID NO: 663220 - DNA, 15 bp, Homo sapiens
gggggcgggggcggg

SEQ ID NO: 663221 - DNA, 15 bp, Homo sapiens
ggggcgggggcgggg

SEQ ID NO: 663222 - DNA, 15 bp, Homo sapiens
gggcgggggcggggg

SEQ ID NO: 663223 - DNA, 15 bp, Homo sapiens
ggcgggggcgggggc

SEQ ID NO: 663224 - DNA, 15 bp, Homo sapiens
gcgggggcgggggcg

SEQ ID NO: 663225 - DNA, 15 bp, Homo sapiens
cgggggcgggggcgg

SEQ ID NO: 663226 - DNA, 15 bp, Homo sapiens
cgggggcgggggcga

SEQ ID NO: 663227 - DNA, 15 bp, Homo sapiens
gggggcgggggcgag

SEQ ID NO: 663228 - DNA, 15 bp, Homo sapiens
ggggcgggggcgagg

SEQ ID NO: 663229 - DNA, 15 bp, Homo sapiens
gggcgggggcgaggc

SEQ ID NO: 663230 - DNA, 15 bp, Homo sapiens
ggcgggggcgaggcc

SEQ ID NO: 663231 - DNA, 15 bp, Homo sapiens
gcgggggcgaggccg

SEQ ID NO: 663232 - DNA, 15 bp, Homo sapiens
cgggggcgaggccgc

SEQ ID NO: 663233 - DNA, 15 bp, Homo sapiens
gggggcgaggccgcg

SEQ ID NO: 663234 - DNA, 15 bp, Homo sapiens
ggggcgaggccgcgg

SEQ ID NO: 663235 - DNA, 15 bp, Homo sapiens
gggcgaggccgcggc

SEQ ID NO: 663236 - DNA, 15 bp, Homo sapiens
ggcgaggccgcggcg

SEQ ID NO: 663237 - DNA, 15 bp, Homo sapiens
gcgaggccgcggcga

SEQ ID NO: 663238 - DNA, 15 bp, Homo sapiens
cgaggccgcggcgag

SEQ ID NO: 663239 - DNA, 15 bp, Homo sapiens
gaggccgcggcgagc

SEQ ID NO: 663240 - DNA, 15 bp, Homo sapiens
aggccgcggcgagca

SEQ ID NO: 663241 - DNA, 15 bp, Homo sapiens
ggccgcggcgagcaa

SEQ ID NO: 663242 - DNA, 15 bp, Homo sapiens
gccgcggcgagcaaa

SEQ ID NO: 663243 - DNA, 15 bp, Homo sapiens
ccgcggcgagcaaag

SEQ ID NO: 663244 - DNA, 15 bp, Homo sapiens
cgcggcgagcaaagt

SEQ ID NO: 663245 - DNA, 15 bp, Homo sapiens
gcggcgagcaaagtc

SEQ ID NO: 663246 - DNA, 15 bp, Homo sapiens
cggcgagcaaagtcc

SEQ ID NO: 663247 - DNA, 15 bp, Homo sapiens
ggcgagcaaagtcca

SEQ ID NO: 663248 - DNA, 15 bp, Homo sapiens
gcgagcaaagtccag

SEQ ID NO: 663249 - DNA, 15 bp, Homo sapiens
cgagcaaagtccagg

SEQ ID NO: 663250 - DNA, 15 bp, Homo sapiens
gagcaaagtccaggc

SEQ ID NO: 663251 - DNA, 15 bp, Homo sapiens
agcaaagtccaggcc

SEQ ID NO: 663252 - DNA, 15 bp, Homo sapiens
gcaaagtccaggccc

SEQ ID NO: 663253 - DNA, 15 bp, Homo sapiens
caaagtccaggcccc

SEQ ID NO: 663254 - DNA, 15 bp, Homo sapiens
aaagtccaggcccct

SEQ ID NO: 663255 - DNA, 15 bp, Homo sapiens
aagtccaggcccctc

SEQ ID NO: 663256 - DNA, 15 bp, Homo sapiens
agtccaggcccctct

SEQ ID NO: 663257 - DNA, 15 bp, Homo sapiens
gtccaggcccctctg

SEQ ID NO: 663258 - DNA, 15 bp, Homo sapiens
tccaggcccctctgc

SEQ ID NO: 663259 - DNA, 15 bp, Homo sapiens
ccaggcccctctgct

SEQ ID NO: 663260 - DNA, 15 bp, Homo sapiens
caggcccctctgctg

SEQ ID NO: 663261 - DNA, 15 bp, Homo sapiens
aggcccctctgctgc

SEQ ID NO: 663262 - DNA, 15 bp, Homo sapiens
ggcccctctgctgca

SEQ ID NO: 663263 - DNA, 15 bp, Homo sapiens
gcccctctgctgcag

SEQ ID NO: 663264 - DNA, 15 bp, Homo sapiens
cccctctgctgcagc

SEQ ID NO: 663265 - DNA, 15 bp, Homo sapiens
ccctctgctgcagcg

SEQ ID NO: 663266 - DNA, 15 bp, Homo sapiens
cctctgctgcagcgc

SEQ ID NO: 663267 - DNA, 15 bp, Homo sapiens
ctctgctgcagcgcc

SEQ ID NO: 663268 - DNA, 15 bp, Homo sapiens
tctgctgcagcgccc

SEQ ID NO: 663269 - DNA, 15 bp, Homo sapiens
ctgctgcagcgcccg

SEQ ID NO: 663270 - DNA, 15 bp, Homo sapiens
tgctgcagcgcccgc

SEQ ID NO: 663271 - DNA, 15 bp, Homo sapiens
gctgcagcgcccgcg

SEQ ID NO: 663272 - DNA, 15 bp, Homo sapiens
ctgcagcgcccgcgc

SEQ ID NO: 663273 - DNA, 15 bp, Homo sapiens
tgcagcgcccgcgcg

SEQ ID NO: 663274 - DNA, 15 bp, Homo sapiens
gcagcgcccgcgcgt

SEQ ID NO: 663275 - DNA, 15 bp, Homo sapiens
cagcgcccgcgcgtc

SEQ ID NO: 663276 - DNA, 15 bp, Homo sapiens
agcgcccgcgcgtcc

SEQ ID NO: 663277 - DNA, 15 bp, Homo sapiens
gcgcccgcgcgtcca

SEQ ID NO: 663278 - DNA, 15 bp, Homo sapiens
cgcccgcgcgtccag

SEQ ID NO: 663279 - DNA, 15 bp, Homo sapiens
gcccgcgcgtccaga

SEQ ID NO: 663280 - DNA, 15 bp, Homo sapiens
cccgcgcgtccagag

SEQ ID NO: 663281 - DNA, 15 bp, Homo sapiens
ccgcgcgtccagagg

SEQ ID NO: 663282 - DNA, 15 bp, Homo sapiens
cgcgcgtccagaggc

SEQ ID NO: 663283 - DNA, 15 bp, Homo sapiens
gcgcgtccagaggcc

SEQ ID NO: 663284 - DNA, 15 bp, Homo sapiens
cgcgtccagaggccc

SEQ ID NO: 663285 - DNA, 15 bp, Homo sapiens
gcgtccagaggccct

SEQ ID NO: 663286 - DNA, 15 bp, Homo sapiens
cgtccagaggccctg

SEQ ID NO: 663287 - DNA, 15 bp, Homo sapiens
gtccagaggccctgc

SEQ ID NO: 663288 - DNA, 15 bp, Homo sapiens
tccagaggccctgcc

SEQ ID NO: 663289 - DNA, 15 bp, Homo sapiens
ccagaggccctgcca

SEQ ID NO: 663290 - DNA, 15 bp, Homo sapiens
cagaggccctgccag

SEQ ID NO: 663291 - DNA, 15 bp, Homo sapiens
agaggccctgccaga

SEQ ID NO: 663292 - DNA, 15 bp, Homo sapiens
gaggccctgccagac

SEQ ID NO: 663293 - DNA, 15 bp, Homo sapiens
aggccctgccagaca

SEQ ID NO: 663294 - DNA, 15 bp, Homo sapiens
ggccctgccagacac

SEQ ID NO: 663295 - DNA, 15 bp, Homo sapiens
gccctgccagacacg

SEQ ID NO: 663296 - DNA, 15 bp, Homo sapiens
ccctgccagacacgc

SEQ ID NO: 663297 - DNA, 15 bp, Homo sapiens
cctgccagacacgcg

SEQ ID NO: 663298 - DNA, 15 bp, Homo sapiens
ctgccagacacgcgc

SEQ ID NO: 663299 - DNA, 15 bp, Homo sapiens
tgccagacacgcgcg

SEQ ID NO: 663300 - DNA, 15 bp, Homo sapiens
gccagacacgcgcga

SEQ ID NO: 663301 - DNA, 15 bp, Homo sapiens
ccagacacgcgcgag

SEQ ID NO: 663302 - DNA, 15 bp, Homo sapiens
cagacacgcgcgagg

SEQ ID NO: 663303 - DNA, 15 bp, Homo sapiens
agacacgcgcgaggt

SEQ ID NO: 663304 - DNA, 15 bp, Homo sapiens
gacacgcgcgaggtt

SEQ ID NO: 663305 - DNA, 15 bp, Homo sapiens
acacgcgcgaggttc

SEQ ID NO: 663306 - DNA, 15 bp, Homo sapiens
cacgcgcgaggttcg

SEQ ID NO: 663307 - DNA, 15 bp, Homo sapiens
acgcgcgaggttcga

SEQ ID NO: 663308 - DNA, 15 bp, Homo sapiens
cgcgcgaggttcgag

SEQ ID NO: 663309 - DNA, 15 bp, Homo sapiens
gcgcgaggttcgagg

SEQ ID NO: 663310 - DNA, 15 bp, Homo sapiens
cgcgaggttcgaggt

SEQ ID NO: 663311 - DNA, 15 bp, Homo sapiens
gcgaggttcgaggtg

SEQ ID NO: 663312 - DNA, 15 bp, Homo sapiens
cgaggttcgaggtga

SEQ ID NO: 663313 - DNA, 15 bp, Homo sapiens
gaggttcgaggtgag

SEQ ID NO: 663314 - DNA, 15 bp, Homo sapiens
aggttcgaggtgaga

SEQ ID NO: 663315 - DNA, 15 bp, Homo sapiens
ggttcgaggtgagag

SEQ ID NO: 663316 - DNA, 15 bp, Homo sapiens
gttcgaggtgagaga

SEQ ID NO: 663317 - DNA, 15 bp, Homo sapiens
ttcgaggtgagagag

SEQ ID NO: 663318 - DNA, 15 bp, Homo sapiens
tcgaggtgagagagg

SEQ ID NO: 663319 - DNA, 15 bp, Homo sapiens
cgaggtgagagaggt

SEQ ID NO: 663320 - DNA, 15 bp, Homo sapiens
gaggtgagagaggtc

SEQ ID NO: 663321 - DNA, 15 bp, Homo sapiens
aggtgagagaggtcc

SEQ ID NO: 663322 - DNA, 15 bp, Homo sapiens
ggtgagagaggtccg

SEQ ID NO: 663323 - DNA, 15 bp, Homo sapiens
gtgagagaggtccgg

SEQ ID NO: 663324 - DNA, 15 bp, Homo sapiens
tgagagaggtccggg

SEQ ID NO: 663325 - DNA, 15 bp, Homo sapiens
gagagaggtccgggc

SEQ ID NO: 663326 - DNA, 15 bp, Homo sapiens
agagaggtccgggcg

SEQ ID NO: 663327 - DNA, 15 bp, Homo sapiens
gagaggtccgggcgc

SEQ ID NO: 663328 - DNA, 15 bp, Homo sapiens
agaggtccgggcgcg

SEQ ID NO: 663329 - DNA, 15 bp, Homo sapiens
gaggtccgggcgcgt

SEQ ID NO: 663330 - DNA, 15 bp, Homo sapiens
aggtccgggcgcgtc

SEQ ID NO: 663331 - DNA, 15 bp, Homo sapiens
ggtccgggcgcgtct

SEQ ID NO: 663332 - DNA, 15 bp, Homo sapiens
gtccgggcgcgtctg

SEQ ID NO: 663333 - DNA, 15 bp, Homo sapiens
tccgggcgcgtctgg

SEQ ID NO: 663334 - DNA, 15 bp, Homo sapiens
ccgggcgcgtctggc

SEQ ID NO: 663335 - DNA, 15 bp, Homo sapiens
cgggcgcgtctggcc

SEQ ID NO: 663336 - DNA, 15 bp, Homo sapiens
gggcgcgtctggcct

SEQ ID NO: 663337 - DNA, 15 bp, Homo sapiens
ggcgcgtctggcctc

SEQ ID NO: 663338 - DNA, 15 bp, Homo sapiens
gcgcgtctggcctcg

SEQ ID NO: 663339 - DNA, 15 bp, Homo sapiens
cgcgtctggcctcga

SEQ ID NO: 663340 - DNA, 15 bp, Homo sapiens
gcgtctggcctcgaa

SEQ ID NO: 663341 - DNA, 15 bp, Homo sapiens
cgtctggcctcgaag

SEQ ID NO: 663342 - DNA, 15 bp, Homo sapiens
gtctggcctcgaagg

SEQ ID NO: 663343 - DNA, 15 bp, Homo sapiens
tctggcctcgaaggg

SEQ ID NO: 663344 - DNA, 15 bp, Homo sapiens
ctggcctcgaaggga

SEQ ID NO: 663345 - DNA, 15 bp, Homo sapiens
tggcctcgaagggag

SEQ ID NO: 663346 - DNA, 15 bp, Homo sapiens
ggcctcgaagggaga

SEQ ID NO: 663347 - DNA, 15 bp, Homo sapiens
gcctcgaagggagac

SEQ ID NO: 663348 - DNA, 15 bp, Homo sapiens
cctcgaagggagacc

SEQ ID NO: 663349 - DNA, 15 bp, Homo sapiens
ctcgaagggagaccc

SEQ ID NO: 663350 - DNA, 15 bp, Homo sapiens
tcgaagggagacccg

SEQ ID NO: 663351 - DNA, 15 bp, Homo sapiens
cgaagggagacccgg

SEQ ID NO: 663352 - DNA, 15 bp, Homo sapiens
gaagggagacccggg

SEQ ID NO: 663353 - DNA, 15 bp, Homo sapiens
aagggagacccggga

SEQ ID NO: 663354 - DNA, 15 bp, Homo sapiens
agggagacccgggac

SEQ ID NO: 663355 - DNA, 15 bp, Homo sapiens
gggagacccgggacg

SEQ ID NO: 663356 - DNA, 15 bp, Homo sapiens
ggagacccgggacgt

SEQ ID NO: 663357 - DNA, 15 bp, Homo sapiens
gagacccgggacgtg

SEQ ID NO: 663358 - DNA, 15 bp, Homo sapiens
agacccgggacgtgg

SEQ ID NO: 663359 - DNA, 15 bp, Homo sapiens
gacccgggacgtggg

SEQ ID NO: 663360 - DNA, 15 bp, Homo sapiens
acccgggacgtgggg

SEQ ID NO: 663361 - DNA, 15 bp, Homo sapiens
cccgggacgtggggc

SEQ ID NO: 663362 - DNA, 15 bp, Homo sapiens
ccgggacgtggggcg

SEQ ID NO: 663363 - DNA, 15 bp, Homo sapiens
cgggacgtggggcgc

SEQ ID NO: 663364 - DNA, 15 bp, Homo sapiens
gggacgtggggcgcg

SEQ ID NO: 663365 - DNA, 15 bp, Homo sapiens
ggacgtggggcgcgg

SEQ ID NO: 663366 - DNA, 15 bp, Homo sapiens
gacgtggggcgcggg

SEQ ID NO: 663367 - DNA, 15 bp, Homo sapiens
acgtggggcgcgggg

SEQ ID NO: 663368 - DNA, 15 bp, Homo sapiens
cgtggggcgcggggc

SEQ ID NO: 663369 - DNA, 15 bp, Homo sapiens
gtggggcgcggggcg

SEQ ID NO: 663370 - DNA, 15 bp, Homo sapiens
tggggcgcggggcgg

SEQ ID NO: 663371 - DNA, 15 bp, Homo sapiens
ggggcgcggggcggg

SEQ ID NO: 663372 - DNA, 15 bp, Homo sapiens
gggcgcggggcggga

SEQ ID NO: 663373 - DNA, 15 bp, Homo sapiens
ggcgcggggcgggag

SEQ ID NO: 663374 - DNA, 15 bp, Homo sapiens
gcgcggggcgggagt

SEQ ID NO: 663375 - DNA, 15 bp, Homo sapiens
cgcggggcgggagtg

SEQ ID NO: 663376 - DNA, 15 bp, Homo sapiens
gcggggcgggagtgg

SEQ ID NO: 663377 - DNA, 15 bp, Homo sapiens
cggggcgggagtggc

SEQ ID NO: 663378 - DNA, 15 bp, Homo sapiens
ggggcgggagtggcc

SEQ ID NO: 663379 - DNA, 15 bp, Homo sapiens
gggcgggagtggccg

SEQ ID NO: 663380 - DNA, 15 bp, Homo sapiens
ggcgggagtggccgg

SEQ ID NO: 663381 - DNA, 15 bp, Homo sapiens
gcgggagtggccgga

SEQ ID NO: 663382 - DNA, 15 bp, Homo sapiens
cgggagtggccggac

SEQ ID NO: 663383 - DNA, 15 bp, Homo sapiens
gggagtggccggacc

SEQ ID NO: 663384 - DNA, 15 bp, Homo sapiens
ggagtggccggacct

SEQ ID NO: 663385 - DNA, 15 bp, Homo sapiens
gagtggccggacctc

SEQ ID NO: 663386 - DNA, 15 bp, Homo sapiens
agtggccggacctcc

SEQ ID NO: 663387 - DNA, 15 bp, Homo sapiens
gtggccggacctcca

SEQ ID NO: 663388 - DNA, 15 bp, Homo sapiens
tggccggacctccac

SEQ ID NO: 663389 - DNA, 15 bp, Homo sapiens
ggccggacctccacc

SEQ ID NO: 663390 - DNA, 15 bp, Homo sapiens
gccggacctccaccc

SEQ ID NO: 663391 - DNA, 15 bp, Homo sapiens
ccggacctccaccca

SEQ ID NO: 663392 - DNA, 15 bp, Homo sapiens
cggacctccacccag

SEQ ID NO: 663393 - DNA, 15 bp, Homo sapiens
ggacctccacccagt

SEQ ID NO: 663394 - DNA, 15 bp, Homo sapiens
gacctccacccagtg

SEQ ID NO: 663395 - DNA, 15 bp, Homo sapiens
acctccacccagtgc

SEQ ID NO: 663396 - DNA, 15 bp, Homo sapiens
cctccacccagtgcc

SEQ ID NO: 663397 - DNA, 15 bp, Homo sapiens
ctccacccagtgccc

SEQ ID NO: 663398 - DNA, 15 bp, Homo sapiens
tccacccagtgcccc

SEQ ID NO: 663399 - DNA, 15 bp, Homo sapiens
ccacccagtgccccc

SEQ ID NO: 663400 - DNA, 15 bp, Homo sapiens
cacccagtgcccccg

SEQ ID NO: 663401 - DNA, 15 bp, Homo sapiens
acccagtgcccccgg

SEQ ID NO: 663402 - DNA, 15 bp, Homo sapiens
cccagtgcccccggg

SEQ ID NO: 663403 - DNA, 15 bp, Homo sapiens
ccagtgcccccgggc

SEQ ID NO: 663404 - DNA, 15 bp, Homo sapiens
cagtgcccccgggcc

SEQ ID NO: 663405 - DNA, 15 bp, Homo sapiens
agtgcccccgggccc

SEQ ID NO: 663406 - DNA, 15 bp, Homo sapiens
gtgcccccgggcccc

SEQ ID NO: 663407 - DNA, 15 bp, Homo sapiens
tgcccccgggccccg

SEQ ID NO: 663408 - DNA, 15 bp, Homo sapiens
gcccccgggccccgc

SEQ ID NO: 663409 - DNA, 15 bp, Homo sapiens
cccccgggccccgcg

SEQ ID NO: 663410 - DNA, 15 bp, Homo sapiens
ccccgggccccgcga

SEQ ID NO: 663411 - DNA, 15 bp, Homo sapiens
cccgggccccgcgac

SEQ ID NO: 663412 - DNA, 15 bp, Homo sapiens
ccgggccccgcgact

SEQ ID NO: 663413 - DNA, 15 bp, Homo sapiens
cgggccccgcgactc

SEQ ID NO: 663414 - DNA, 15 bp, Homo sapiens
gggccccgcgactcg

SEQ ID NO: 663415 - DNA, 15 bp, Homo sapiens
ggccccgcgactcgt

SEQ ID NO: 663416 - DNA, 15 bp, Homo sapiens
gccccgcgactcgtg

SEQ ID NO: 663417 - DNA, 15 bp, Homo sapiens
ccccgcgactcgtgc

SEQ ID NO: 663418 - DNA, 15 bp, Homo sapiens
cccgcgactcgtgcg

SEQ ID NO: 663419 - DNA, 15 bp, Homo sapiens
ccgcgactcgtgcgc

SEQ ID NO: 663420 - DNA, 15 bp, Homo sapiens
cgcgactcgtgcgcc

SEQ ID NO: 663421 - DNA, 15 bp, Homo sapiens
gcgactcgtgcgccg

SEQ ID NO: 663422 - DNA, 15 bp, Homo sapiens
cgactcgtgcgccgg

SEQ ID NO: 663423 - DNA, 15 bp, Homo sapiens
gactcgtgcgccggg

SEQ ID NO: 663424 - DNA, 15 bp, Homo sapiens
actcgtgcgccgggc

SEQ ID NO: 663425 - DNA, 15 bp, Homo sapiens
ctcgtgcgccgggcc

SEQ ID NO: 663426 - DNA, 15 bp, Homo sapiens
tcgtgcgccgggccg

SEQ ID NO: 663427 - DNA, 15 bp, Homo sapiens
cgtgcgccgggccgc

SEQ ID NO: 663428 - DNA, 15 bp, Homo sapiens
gtgcgccgggccgcc

SEQ ID NO: 663429 - DNA, 15 bp, Homo sapiens
tgcgccgggccgccg

SEQ ID NO: 663430 - DNA, 15 bp, Homo sapiens
gcgccgggccgccgg

SEQ ID NO: 663431 - DNA, 15 bp, Homo sapiens
cgccgggccgccgga

SEQ ID NO: 663432 - DNA, 15 bp, Homo sapiens
gccgggccgccggag

SEQ ID NO: 663433 - DNA, 15 bp, Homo sapiens
ccgggccgccggaga

SEQ ID NO: 663434 - DNA, 15 bp, Homo sapiens
cgggccgccggagag

SEQ ID NO: 663435 - DNA, 15 bp, Homo sapiens
gggccgccggagagg

SEQ ID NO: 663436 - DNA, 15 bp, Homo sapiens
ggccgccggagaggg

SEQ ID NO: 663437 - DNA, 15 bp, Homo sapiens
gccgccggagagggt

SEQ ID NO: 663438 - DNA, 15 bp, Homo sapiens
ccgccggagagggtg

SEQ ID NO: 663439 - DNA, 15 bp, Homo sapiens
cgccggagagggtgt

SEQ ID NO: 663440 - DNA, 15 bp, Homo sapiens
gccggagagggtgta

SEQ ID NO: 663441 - DNA, 15 bp, Homo sapiens
ccggagagggtgtac

SEQ ID NO: 663442 - DNA, 15 bp, Homo sapiens
cggagagggtgtact

SEQ ID NO: 663443 - DNA, 15 bp, Homo sapiens
ggagagggtgtactt

SEQ ID NO: 663444 - DNA, 15 bp, Homo sapiens
gagagggtgtacttg

SEQ ID NO: 663445 - DNA, 15 bp, Homo sapiens
agagggtgtacttgg

SEQ ID NO: 663446 - DNA, 15 bp, Homo sapiens
gagggtgtacttggt

SEQ ID NO: 663447 - DNA, 15 bp, Homo sapiens
agggtgtacttggtt

SEQ ID NO: 663448 - DNA, 15 bp, Homo sapiens
gggtgtacttggttc

SEQ ID NO: 663449 - DNA, 15 bp, Homo sapiens
ggtgtacttggttct

SEQ ID NO: 663450 - DNA, 15 bp, Homo sapiens
gtgtacttggttctg

SEQ ID NO: 663451 - DNA, 15 bp, Homo sapiens
tgtacttggttctga

SEQ ID NO: 663452 - DNA, 15 bp, Homo sapiens
gtacttggttctgag

SEQ ID NO: 663453 - DNA, 15 bp, Homo sapiens
tacttggttctgagg

SEQ ID NO: 663454 - DNA, 15 bp, Homo sapiens
acttggttctgaggc

SEQ ID NO: 663455 - DNA, 15 bp, Homo sapiens
cttggttctgaggct

SEQ ID NO: 663456 - DNA, 15 bp, Homo sapiens
ttggttctgaggctg

SEQ ID NO: 663457 - DNA, 15 bp, Homo sapiens
tggttctgaggctgt

SEQ ID NO: 663458 - DNA, 15 bp, Homo sapiens
ggttctgaggctgtg

SEQ ID NO: 663459 - DNA, 15 bp, Homo sapiens
gttctgaggctgtgg

SEQ ID NO: 663460 - DNA, 15 bp, Homo sapiens
ttctgaggctgtggt

SEQ ID NO: 663461 - DNA, 15 bp, Homo sapiens
tctgaggctgtggtt

SEQ ID NO: 663462 - DNA, 15 bp, Homo sapiens
ctgaggctgtggttt

SEQ ID NO: 663463 - DNA, 15 bp, Homo sapiens
tgaggctgtggtttc

SEQ ID NO: 663464 - DNA, 15 bp, Homo sapiens
gaggctgtggtttct

SEQ ID NO: 663465 - DNA, 15 bp, Homo sapiens
aggctgtggtttctc

SEQ ID NO: 663466 - DNA, 15 bp, Homo sapiens
ggctgtggtttctcc

SEQ ID NO: 663467 - DNA, 15 bp, Homo sapiens
gctgtggtttctcct

SEQ ID NO: 663468 - DNA, 15 bp, Homo sapiens
ctgtggtttctcctc

SEQ ID NO: 663469 - DNA, 15 bp, Homo sapiens
tgtggtttctcctca

SEQ ID NO: 663470 - DNA, 15 bp, Homo sapiens
gtggtttctcctcag

SEQ ID NO: 663471 - DNA, 15 bp, Homo sapiens
tggtttctcctcagg

SEQ ID NO: 663472 - DNA, 15 bp, Homo sapiens
ggtttctcctcaggc

SEQ ID NO: 663473 - DNA, 15 bp, Homo sapiens
gtttctcctcaggct

SEQ ID NO: 663474 - DNA, 15 bp, Homo sapiens
tttctcctcaggctg

SEQ ID NO: 663475 - DNA, 15 bp, Homo sapiens
ttctcctcaggctga

SEQ ID NO: 663476 - DNA, 15 bp, Homo sapiens
tctcctcaggctgag

SEQ ID NO: 663477 - DNA, 15 bp, Homo sapiens
ctcctcaggctgaga

SEQ ID NO: 663478 - DNA, 15 bp, Homo sapiens
tcctcaggctgagat

SEQ ID NO: 663479 - DNA, 15 bp, Homo sapiens
cctcaggctgagatg

SEQ ID NO: 663480 - DNA, 15 bp, Homo sapiens
ctcaggctgagatgg

SEQ ID NO: 663481 - DNA, 15 bp, Homo sapiens
tcaggctgagatgga

SEQ ID NO: 663482 - DNA, 15 bp, Homo sapiens
caggctgagatggat

SEQ ID NO: 663483 - DNA, 15 bp, Homo sapiens
aggctgagatggatc

SEQ ID NO: 663484 - DNA, 15 bp, Homo sapiens
ggctgagatggatct

SEQ ID NO: 663485 - DNA, 15 bp, Homo sapiens
gctgagatggatctt

SEQ ID NO: 663486 - DNA, 15 bp, Homo sapiens
ctgagatggatcttg

SEQ ID NO: 663487 - DNA, 15 bp, Homo sapiens
tgagatggatcttga

SEQ ID NO: 663488 - DNA, 15 bp, Homo sapiens
gagatggatcttgag

SEQ ID NO: 663489 - DNA, 15 bp, Homo sapiens
agatggatcttgagg

SEQ ID NO: 663490 - DNA, 15 bp, Homo sapiens
gatggatcttgaggc

SEQ ID NO: 663491 - DNA, 15 bp, Homo sapiens
atggatcttgaggcg

SEQ ID NO: 663492 - DNA, 15 bp, Homo sapiens
tggatcttgaggcgg

SEQ ID NO: 663493 - DNA, 15 bp, Homo sapiens
ggatcttgaggcggc

SEQ ID NO: 663494 - DNA, 15 bp, Homo sapiens
gatcttgaggcggca

SEQ ID NO: 663495 - DNA, 15 bp, Homo sapiens
atcttgaggcggcaa

SEQ ID NO: 663496 - DNA, 15 bp, Homo sapiens
tcttgaggcggcaaa

SEQ ID NO: 663497 - DNA, 15 bp, Homo sapiens
cttgaggcggcaaag

SEQ ID NO: 663498 - DNA, 15 bp, Homo sapiens
ttgaggcggcaaaga

SEQ ID NO: 663499 - DNA, 15 bp, Homo sapiens
tgaggcggcaaagaa

SEQ ID NO: 663500 - DNA, 15 bp, Homo sapiens
gaggcggcaaagaac

SEQ ID NO: 663501 - DNA, 15 bp, Homo sapiens
aggcggcaaagaacg

SEQ ID NO: 663502 - DNA, 15 bp, Homo sapiens
ggcggcaaagaacgg

SEQ ID NO: 663503 - DNA, 15 bp, Homo sapiens
gcggcaaagaacgga

SEQ ID NO: 663504 - DNA, 15 bp, Homo sapiens
cggcaaagaacggaa

SEQ ID NO: 663505 - DNA, 15 bp, Homo sapiens
ggcaaagaacggaac

SEQ ID NO: 663506 - DNA, 15 bp, Homo sapiens
gcaaagaacggaaca

SEQ ID NO: 663507 - DNA, 15 bp, Homo sapiens
caaagaacggaacag

SEQ ID NO: 663508 - DNA, 15 bp, Homo sapiens
aaagaacggaacagc

SEQ ID NO: 663509 - DNA, 15 bp, Homo sapiens
aagaacggaacagcc

SEQ ID NO: 663510 - DNA, 15 bp, Homo sapiens
agaacggaacagcct

SEQ ID NO: 663511 - DNA, 15 bp, Homo sapiens
gaacggaacagcctg

SEQ ID NO: 663512 - DNA, 15 bp, Homo sapiens
aacggaacagcctgg

SEQ ID NO: 663513 - DNA, 15 bp, Homo sapiens
acggaacagcctggc

SEQ ID NO: 663514 - DNA, 15 bp, Homo sapiens
cggaacagcctggcg

SEQ ID NO: 663515 - DNA, 15 bp, Homo sapiens
ggaacagcctggcgc

SEQ ID NO: 663516 - DNA, 15 bp, Homo sapiens
gaacagcctggcgcc

SEQ ID NO: 663517 - DNA, 15 bp, Homo sapiens
aacagcctggcgccc

SEQ ID NO: 663518 - DNA, 15 bp, Homo sapiens
acagcctggcgcccc

SEQ ID NO: 663519 - DNA, 15 bp, Homo sapiens
cagcctggcgcccca

SEQ ID NO: 663520 - DNA, 15 bp, Homo sapiens
agcctggcgccccac

SEQ ID NO: 663521 - DNA, 15 bp, Homo sapiens
gcctggcgccccacg

SEQ ID NO: 663522 - DNA, 15 bp, Homo sapiens
cctggcgccccacga

SEQ ID NO: 663523 - DNA, 15 bp, Homo sapiens
ctggcgccccacgag

SEQ ID NO: 663524 - DNA, 15 bp, Homo sapiens
tggcgccccacgagc

SEQ ID NO: 663525 - DNA, 15 bp, Homo sapiens
ggcgccccacgagcg

SEQ ID NO: 663526 - DNA, 15 bp, Homo sapiens
gcgccccacgagcgc

SEQ ID NO: 663527 - DNA, 15 bp, Homo sapiens
cgccccacgagcgcg

SEQ ID NO: 663528 - DNA, 15 bp, Homo sapiens
gccccacgagcgcgg

SEQ ID NO: 663529 - DNA, 15 bp, Homo sapiens
ccccacgagcgcgga

SEQ ID NO: 663530 - DNA, 15 bp, Homo sapiens
cccacgagcgcggag

SEQ ID NO: 663531 - DNA, 15 bp, Homo sapiens
ccacgagcgcggagg

SEQ ID NO: 663532 - DNA, 15 bp, Homo sapiens
cacgagcgcggaggg

SEQ ID NO: 663533 - DNA, 15 bp, Homo sapiens
acgagcgcggagggc

SEQ ID NO: 663534 - DNA, 15 bp, Homo sapiens
cgagcgcggagggcg

SEQ ID NO: 663535 - DNA, 15 bp, Homo sapiens
gagcgcggagggcga

SEQ ID NO: 663536 - DNA, 15 bp, Homo sapiens
agcgcggagggcgac

SEQ ID NO: 663537 - DNA, 15 bp, Homo sapiens
gcgcggagggcgact

SEQ ID NO: 663538 - DNA, 15 bp, Homo sapiens
cgcggagggcgactt

SEQ ID NO: 663539 - DNA, 15 bp, Homo sapiens
gcggagggcgacttt

SEQ ID NO: 663540 - DNA, 15 bp, Homo sapiens
cggagggcgactttg

SEQ ID NO: 663541 - DNA, 15 bp, Homo sapiens
ggagggcgactttga

SEQ ID NO: 663542 - DNA, 15 bp, Homo sapiens
gagggcgactttgaa

SEQ ID NO: 663543 - DNA, 15 bp, Homo sapiens
agggcgactttgaac

SEQ ID NO: 663544 - DNA, 15 bp, Homo sapiens
gggcgactttgaact

SEQ ID NO: 663545 - DNA, 15 bp, Homo sapiens
ggcgactttgaactg

SEQ ID NO: 663546 - DNA, 15 bp, Homo sapiens
gcgactttgaactgg

SEQ ID NO: 663547 - DNA, 15 bp, Homo sapiens
cgactttgaactggg

SEQ ID NO: 663548 - DNA, 15 bp, Homo sapiens
gactttgaactgggc

SEQ ID NO: 663549 - DNA, 15 bp, Homo sapiens
actttgaactgggca

SEQ ID NO: 663550 - DNA, 15 bp, Homo sapiens
ctttgaactgggcat

SEQ ID NO: 663551 - DNA, 15 bp, Homo sapiens
tttgaactgggcatc

SEQ ID NO: 663552 - DNA, 15 bp, Homo sapiens
ttgaactgggcatca

SEQ ID NO: 663553 - DNA, 15 bp, Homo sapiens
tgaactgggcatcag

SEQ ID NO: 663554 - DNA, 15 bp, Homo sapiens
gaactgggcatcagc

SEQ ID NO: 663555 - DNA, 15 bp, Homo sapiens
aactgggcatcagca

SEQ ID NO: 663556 - DNA, 15 bp, Homo sapiens
actgggcatcagcag

SEQ ID NO: 663557 - DNA, 15 bp, Homo sapiens
ctgggcatcagcagg

SEQ ID NO: 663558 - DNA, 15 bp, Homo sapiens
tgggcatcagcaggt

SEQ ID NO: 663559 - DNA, 15 bp, Homo sapiens
gggcatcagcaggta

SEQ ID NO: 663560 - DNA, 15 bp, Homo sapiens
ggcatcagcaggtac

SEQ ID NO: 663561 - DNA, 15 bp, Homo sapiens
gcatcagcaggtaca

SEQ ID NO: 663562 - DNA, 15 bp, Homo sapiens
catcagcaggtacat

SEQ ID NO: 663563 - DNA, 15 bp, Homo sapiens
atcagcaggtacatc

SEQ ID NO: 663564 - DNA, 15 bp, Homo sapiens
tcagcaggtacatcc

SEQ ID NO: 663565 - DNA, 15 bp, Homo sapiens
cagcaggtacatccc

SEQ ID NO: 663566 - DNA, 15 bp, Homo sapiens
agcaggtacatcccc

SEQ ID NO: 663567 - DNA, 15 bp, Homo sapiens
gcaggtacatcccca

SEQ ID NO: 663568 - DNA, 15 bp, Homo sapiens
caggtacatccccag

SEQ ID NO: 663569 - DNA, 15 bp, Homo sapiens
aggtacatccccagc

SEQ ID NO: 663570 - DNA, 15 bp, Homo sapiens
ggtacatccccagca

SEQ ID NO: 663571 - DNA, 15 bp, Homo sapiens
gtacatccccagcag

SEQ ID NO: 663572 - DNA, 15 bp, Homo sapiens
tacatccccagcagc

SEQ ID NO: 663573 - DNA, 15 bp, Homo sapiens
acatccccagcagcc

SEQ ID NO: 663574 - DNA, 15 bp, Homo sapiens
catccccagcagcca

SEQ ID NO: 663575 - DNA, 15 bp, Homo sapiens
atccccagcagccac

SEQ ID NO: 663576 - DNA, 15 bp, Homo sapiens
tccccagcagccact

SEQ ID NO: 663577 - DNA, 15 bp, Homo sapiens
ccccagcagccactg

SEQ ID NO: 663578 - DNA, 15 bp, Homo sapiens
cccagcagccactgg

SEQ ID NO: 663579 - DNA, 15 bp, Homo sapiens
ccagcagccactggc

SEQ ID NO: 663580 - DNA, 15 bp, Homo sapiens
cagcagccactggct

SEQ ID NO: 663581 - DNA, 15 bp, Homo sapiens
agcagccactggctt

SEQ ID NO: 663582 - DNA, 15 bp, Homo sapiens
gcagccactggcttt

SEQ ID NO: 663583 - DNA, 15 bp, Homo sapiens
cagccactggctttt

SEQ ID NO: 663584 - DNA, 15 bp, Homo sapiens
agccactggcttttc

SEQ ID NO: 663585 - DNA, 15 bp, Homo sapiens
gccactggcttttcc

SEQ ID NO: 663586 - DNA, 15 bp, Homo sapiens
ccactggcttttccg

SEQ ID NO: 663587 - DNA, 15 bp, Homo sapiens
cactggcttttccgt

SEQ ID NO: 663588 - DNA, 15 bp, Homo sapiens
actggcttttccgtt

SEQ ID NO: 663589 - DNA, 15 bp, Homo sapiens
ctggcttttccgtta

SEQ ID NO: 663590 - DNA, 15 bp, Homo sapiens
tggcttttccgttac

SEQ ID NO: 663591 - DNA, 15 bp, Homo sapiens
ggcttttccgttaca

SEQ ID NO: 663592 - DNA, 15 bp, Homo sapiens
gcttttccgttacac

SEQ ID NO: 663593 - DNA, 15 bp, Homo sapiens
cttttccgttacacg

SEQ ID NO: 663594 - DNA, 15 bp, Homo sapiens
ttttccgttacacgc

SEQ ID NO: 663595 - DNA, 15 bp, Homo sapiens
tttccgttacacgcc

SEQ ID NO: 663596 - DNA, 15 bp, Homo sapiens
ttccgttacacgcca

SEQ ID NO: 663597 - DNA, 15 bp, Homo sapiens
tccgttacacgccaa

SEQ ID NO: 663598 - DNA, 15 bp, Homo sapiens
ccgttacacgccaat

SEQ ID NO: 663599 - DNA, 15 bp, Homo sapiens
cgttacacgccaatc

SEQ ID NO: 663600 - DNA, 15 bp, Homo sapiens
gttacacgccaatca

SEQ ID NO: 663601 - DNA, 15 bp, Homo sapiens
ttacacgccaatcag

SEQ ID NO: 663602 - DNA, 15 bp, Homo sapiens
tacacgccaatcagc

SEQ ID NO: 663603 - DNA, 15 bp, Homo sapiens
acacgccaatcagca

SEQ ID NO: 663604 - DNA, 15 bp, Homo sapiens
cacgccaatcagcag

SEQ ID NO: 663605 - DNA, 15 bp, Homo sapiens
acgccaatcagcagg

SEQ ID NO: 663606 - DNA, 15 bp, Homo sapiens
cgccaatcagcagga

SEQ ID NO: 663607 - DNA, 15 bp, Homo sapiens
gccaatcagcaggac

SEQ ID NO: 663608 - DNA, 15 bp, Homo sapiens
ccaatcagcaggact

SEQ ID NO: 663609 - DNA, 15 bp, Homo sapiens
caatcagcaggacta

SEQ ID NO: 663610 - DNA, 15 bp, Homo sapiens
aatcagcaggactaa

SEQ ID NO: 663611 - DNA, 15 bp, Homo sapiens
atcagcaggactaag

SEQ ID NO: 663612 - DNA, 15 bp, Homo sapiens
tcagcaggactaagt

SEQ ID NO: 663613 - DNA, 15 bp, Homo sapiens
cagcaggactaagtt

SEQ ID NO: 663614 - DNA, 15 bp, Homo sapiens
agcaggactaagttc

SEQ ID NO: 663615 - DNA, 15 bp, Homo sapiens
gcaggactaagttca

SEQ ID NO: 663616 - DNA, 15 bp, Homo sapiens
caggactaagttcac

SEQ ID NO: 663617 - DNA, 15 bp, Homo sapiens
aggactaagttcacc

SEQ ID NO: 663618 - DNA, 15 bp, Homo sapiens
ggactaagttcaccc

SEQ ID NO: 663619 - DNA, 15 bp, Homo sapiens
gactaagttcaccct

SEQ ID NO: 663620 - DNA, 15 bp, Homo sapiens
actaagttcaccctt

SEQ ID NO: 663621 - DNA, 15 bp, Homo sapiens
ctaagttcacccttg

SEQ ID NO: 663622 - DNA, 15 bp, Homo sapiens
taagttcacccttgg

SEQ ID NO: 663623 - DNA, 15 bp, Homo sapiens
aagttcacccttgga

SEQ ID NO: 663624 - DNA, 15 bp, Homo sapiens
agttcacccttggaa

SEQ ID NO: 663625 - DNA, 15 bp, Homo sapiens
gttcacccttggaaa

SEQ ID NO: 663626 - DNA, 15 bp, Homo sapiens
ttcacccttggaaag

SEQ ID NO: 663627 - DNA, 15 bp, Homo sapiens
tcacccttggaaaga

SEQ ID NO: 663628 - DNA, 15 bp, Homo sapiens
cacccttggaaagaa

SEQ ID NO: 663629 - DNA, 15 bp, Homo sapiens
acccttggaaagaag

SEQ ID NO: 663630 - DNA, 15 bp, Homo sapiens
cccttggaaagaagt

SEQ ID NO: 663631 - DNA, 15 bp, Homo sapiens
ccttggaaagaagtt

SEQ ID NO: 663632 - DNA, 15 bp, Homo sapiens
cttggaaagaagttg

SEQ ID NO: 663633 - DNA, 15 bp, Homo sapiens
ttggaaagaagttgt

SEQ ID NO: 663634 - DNA, 15 bp, Homo sapiens
tggaaagaagttgta

SEQ ID NO: 663635 - DNA, 15 bp, Homo sapiens
ggaaagaagttgtaa

SEQ ID NO: 663636 - DNA, 15 bp, Homo sapiens
gaaagaagttgtaaa

SEQ ID NO: 663637 - DNA, 15 bp, Homo sapiens
aaagaagttgtaaaa

SEQ ID NO: 663638 - DNA, 15 bp, Homo sapiens
aagaagttgtaaaaa

SEQ ID NO: 663639 - DNA, 15 bp, Homo sapiens
agaagttgtaaaaat

SEQ ID NO: 663640 - DNA, 15 bp, Homo sapiens
gaagttgtaaaaatc

SEQ ID NO: 663641 - DNA, 15 bp, Homo sapiens
aagttgtaaaaatcg

SEQ ID NO: 663642 - DNA, 15 bp, Homo sapiens
agttgtaaaaatcgg

SEQ ID NO: 663643 - DNA, 15 bp, Homo sapiens
gttgtaaaaatcggt

SEQ ID NO: 663644 - DNA, 15 bp, Homo sapiens
ttgtaaaaatcggtt

SEQ ID NO: 663645 - DNA, 15 bp, Homo sapiens
tgtaaaaatcggttg

SEQ ID NO: 663646 - DNA, 15 bp, Homo sapiens
gtaaaaatcggttga

SEQ ID NO: 663647 - DNA, 15 bp, Homo sapiens
taaaaatcggttgat

SEQ ID NO: 663648 - DNA, 15 bp, Homo sapiens
aaaaatcggttgatg

SEQ ID NO: 663649 - DNA, 15 bp, Homo sapiens
aaaatcggttgatgc

SEQ ID NO: 663650 - DNA, 15 bp, Homo sapiens
aaatcggttgatgcc

SEQ ID NO: 663651 - DNA, 15 bp, Homo sapiens
aatcggttgatgcct

SEQ ID NO: 663652 - DNA, 15 bp, Homo sapiens
atcggttgatgcctt

SEQ ID NO: 663653 - DNA, 15 bp, Homo sapiens
tcggttgatgccttt

SEQ ID NO: 663654 - DNA, 15 bp, Homo sapiens
cggttgatgcctttg

SEQ ID NO: 663655 - DNA, 15 bp, Homo sapiens
ggttgatgcctttga

SEQ ID NO: 663656 - DNA, 15 bp, Homo sapiens
gttgatgcctttgaa

SEQ ID NO: 663657 - DNA, 15 bp, Homo sapiens
ttgatgcctttgaag

SEQ ID NO: 663658 - DNA, 15 bp, Homo sapiens
tgatgcctttgaaga

SEQ ID NO: 663659 - DNA, 15 bp, Homo sapiens
gatgcctttgaagac

SEQ ID NO: 663660 - DNA, 15 bp, Homo sapiens
atgcctttgaagacc

SEQ ID NO: 663661 - DNA, 15 bp, Homo sapiens
tgcctttgaagacct

SEQ ID NO: 663662 - DNA, 15 bp, Homo sapiens
gcctttgaagacctt

SEQ ID NO: 663663 - DNA, 15 bp, Homo sapiens
cctttgaagaccttt

SEQ ID NO: 663664 - DNA, 15 bp, Homo sapiens
ctttgaagacctttg

SEQ ID NO: 663665 - DNA, 15 bp, Homo sapiens
tttgaagacctttgt

SEQ ID NO: 663666 - DNA, 15 bp, Homo sapiens
ttgaagacctttgtt

SEQ ID NO: 663667 - DNA, 15 bp, Homo sapiens
tgaagacctttgttt

SEQ ID NO: 663668 - DNA, 15 bp, Homo sapiens
gaagacctttgtttt

SEQ ID NO: 663669 - DNA, 15 bp, Homo sapiens
aagacctttgttttg

SEQ ID NO: 663670 - DNA, 15 bp, Homo sapiens
agacctttgttttgg

SEQ ID NO: 663671 - DNA, 15 bp, Homo sapiens
gacctttgttttgga

SEQ ID NO: 663672 - DNA, 15 bp, Homo sapiens
acctttgttttggag

SEQ ID NO: 663673 - DNA, 15 bp, Homo sapiens
cctttgttttggagg

SEQ ID NO: 663674 - DNA, 15 bp, Homo sapiens
ctttgttttggaggc

SEQ ID NO: 663675 - DNA, 15 bp, Homo sapiens
tttgttttggaggct

SEQ ID NO: 663676 - DNA, 15 bp, Homo sapiens
ttgttttggaggctt

SEQ ID NO: 663677 - DNA, 15 bp, Homo sapiens
tgttttggaggcttc

SEQ ID NO: 663678 - DNA, 15 bp, Homo sapiens
gttttggaggcttct

SEQ ID NO: 663679 - DNA, 15 bp, Homo sapiens
ttttggaggcttctt

SEQ ID NO: 663680 - DNA, 15 bp, Homo sapiens
tttggaggcttcttt

SEQ ID NO: 663681 - DNA, 15 bp, Homo sapiens
ttggaggcttctttg

SEQ ID NO: 663682 - DNA, 15 bp, Homo sapiens
tggaggcttctttga

SEQ ID NO: 663683 - DNA, 15 bp, Homo sapiens
ggaggcttctttgaa

SEQ ID NO: 663684 - DNA, 15 bp, Homo sapiens
gaggcttctttgaag

SEQ ID NO: 663685 - DNA, 15 bp, Homo sapiens
aggcttctttgaagg

SEQ ID NO: 663686 - DNA, 15 bp, Homo sapiens
ggcttctttgaaggg

SEQ ID NO: 663687 - DNA, 15 bp, Homo sapiens
gcttctttgaagggt

SEQ ID NO: 663688 - DNA, 15 bp, Homo sapiens
cttctttgaagggtc

SEQ ID NO: 663689 - DNA, 15 bp, Homo sapiens
ttctttgaagggtct

SEQ ID NO: 663690 - DNA, 15 bp, Homo sapiens
tctttgaagggtctt

SEQ ID NO: 663691 - DNA, 15 bp, Homo sapiens
ctttgaagggtcttg

SEQ ID NO: 663692 - DNA, 15 bp, Homo sapiens
tttgaagggtcttgc

SEQ ID NO: 663693 - DNA, 15 bp, Homo sapiens
ttgaagggtcttgca

SEQ ID NO: 663694 - DNA, 15 bp, Homo sapiens
tgaagggtcttgcat

SEQ ID NO: 663695 - DNA, 15 bp, Homo sapiens
gaagggtcttgcatc

SEQ ID NO: 663696 - DNA, 15 bp, Homo sapiens
aagggtcttgcatcc

SEQ ID NO: 663697 - DNA, 15 bp, Homo sapiens
agggtcttgcatccg

SEQ ID NO: 663698 - DNA, 15 bp, Homo sapiens
gggtcttgcatccgg

SEQ ID NO: 663699 - DNA, 15 bp, Homo sapiens
ggtcttgcatccggt

SEQ ID NO: 663700 - DNA, 15 bp, Homo sapiens
gtcttgcatccggtt

SEQ ID NO: 663701 - DNA, 15 bp, Homo sapiens
tcttgcatccggttc

SEQ ID NO: 663702 - DNA, 15 bp, Homo sapiens
cttgcatccggttct

SEQ ID NO: 663703 - DNA, 15 bp, Homo sapiens
ttgcatccggttctg

SEQ ID NO: 663704 - DNA, 15 bp, Homo sapiens
tgcatccggttctga

SEQ ID NO: 663705 - DNA, 15 bp, Homo sapiens
gcatccggttctgac

SEQ ID NO: 663706 - DNA, 15 bp, Homo sapiens
catccggttctgacc

SEQ ID NO: 663707 - DNA, 15 bp, Homo sapiens
atccggttctgacct

SEQ ID NO: 663708 - DNA, 15 bp, Homo sapiens
tccggttctgacctt

SEQ ID NO: 663709 - DNA, 15 bp, Homo sapiens
ccggttctgaccttg

SEQ ID NO: 663710 - DNA, 15 bp, Homo sapiens
cggttctgaccttgg

SEQ ID NO: 663711 - DNA, 15 bp, Homo sapiens
ggttctgaccttgga

SEQ ID NO: 663712 - DNA, 15 bp, Homo sapiens
gttctgaccttggag

SEQ ID NO: 663713 - DNA, 15 bp, Homo sapiens
ttctgaccttggagc

SEQ ID NO: 663714 - DNA, 15 bp, Homo sapiens
tctgaccttggagca

SEQ ID NO: 663715 - DNA, 15 bp, Homo sapiens
ctgaccttggagcaa

SEQ ID NO: 663716 - DNA, 15 bp, Homo sapiens
tgaccttggagcaaa

SEQ ID NO: 663717 - DNA, 15 bp, Homo sapiens
gaccttggagcaaac

SEQ ID NO: 663718 - DNA, 15 bp, Homo sapiens
accttggagcaaacg

SEQ ID NO: 663719 - DNA, 15 bp, Homo sapiens
ccttggagcaaacgt

SEQ ID NO: 663720 - DNA, 15 bp, Homo sapiens
cttggagcaaacgtg

SEQ ID NO: 663721 - DNA, 15 bp, Homo sapiens
ttggagcaaacgtgt

SEQ ID NO: 663722 - DNA, 15 bp, Homo sapiens
tggagcaaacgtgtt

SEQ ID NO: 663723 - DNA, 15 bp, Homo sapiens
ggagcaaacgtgttg

SEQ ID NO: 663724 - DNA, 15 bp, Homo sapiens
gagcaaacgtgttgt

SEQ ID NO: 663725 - DNA, 15 bp, Homo sapiens
agcaaacgtgttgtg

SEQ ID NO: 663726 - DNA, 15 bp, Homo sapiens
gcaaacgtgttgtgt

SEQ ID NO: 663727 - DNA, 15 bp, Homo sapiens
caaacgtgttgtgtg

SEQ ID NO: 663728 - DNA, 15 bp, Homo sapiens
aaacgtgttgtgtgg

SEQ ID NO: 663729 - DNA, 15 bp, Homo sapiens
aacgtgttgtgtggc

SEQ ID NO: 663730 - DNA, 15 bp, Homo sapiens
acgtgttgtgtggcc

SEQ ID NO: 663731 - DNA, 15 bp, Homo sapiens
cgtgttgtgtggcct

SEQ ID NO: 663732 - DNA, 15 bp, Homo sapiens
gtgttgtgtggcctc

SEQ ID NO: 663733 - DNA, 15 bp, Homo sapiens
tgttgtgtggcctca

SEQ ID NO: 663734 - DNA, 15 bp, Homo sapiens
gttgtgtggcctcaa

SEQ ID NO: 663735 - DNA, 15 bp, Homo sapiens
ttgtgtggcctcaaa

SEQ ID NO: 663736 - DNA, 15 bp, Homo sapiens
tgtgtggcctcaaag

SEQ ID NO: 663737 - DNA, 15 bp, Homo sapiens
gtgtggcctcaaaga

SEQ ID NO: 663738 - DNA, 15 bp, Homo sapiens
tgtggcctcaaagaa

SEQ ID NO: 663739 - DNA, 15 bp, Homo sapiens
gtggcctcaaagaat

SEQ ID NO: 663740 - DNA, 15 bp, Homo sapiens
tggcctcaaagaatg

SEQ ID NO: 663741 - DNA, 15 bp, Homo sapiens
ggcctcaaagaatgt

SEQ ID NO: 663742 - DNA, 15 bp, Homo sapiens
gcctcaaagaatgtc

SEQ ID NO: 663743 - DNA, 15 bp, Homo sapiens
cctcaaagaatgtca

SEQ ID NO: 663744 - DNA, 15 bp, Homo sapiens
ctcaaagaatgtcac

SEQ ID NO: 663745 - DNA, 15 bp, Homo sapiens
tcaaagaatgtcact

SEQ ID NO: 663746 - DNA, 15 bp, Homo sapiens
caaagaatgtcactg

SEQ ID NO: 663747 - DNA, 15 bp, Homo sapiens
aaagaatgtcactga

SEQ ID NO: 663748 - DNA, 15 bp, Homo sapiens
aagaatgtcactgag

SEQ ID NO: 663749 - DNA, 15 bp, Homo sapiens
agaatgtcactgagg

SEQ ID NO: 663750 - DNA, 15 bp, Homo sapiens
gaatgtcactgaggc

SEQ ID NO: 663751 - DNA, 15 bp, Homo sapiens
aatgtcactgaggct

SEQ ID NO: 663752 - DNA, 15 bp, Homo sapiens
atgtcactgaggctc

SEQ ID NO: 663753 - DNA, 15 bp, Homo sapiens
tgtcactgaggctcc

SEQ ID NO: 663754 - DNA, 15 bp, Homo sapiens
gtcactgaggctcct

SEQ ID NO: 663755 - DNA, 15 bp, Homo sapiens
tcactgaggctcctt

SEQ ID NO: 663756 - DNA, 15 bp, Homo sapiens
cactgaggctccttt

SEQ ID NO: 663757 - DNA, 15 bp, Homo sapiens
actgaggctcctttt

SEQ ID NO: 663758 - DNA, 15 bp, Homo sapiens
ctgaggctccttttg

SEQ ID NO: 663759 - DNA, 15 bp, Homo sapiens
tgaggctccttttgg

SEQ ID NO: 663760 - DNA, 15 bp, Homo sapiens
gaggctccttttgga

SEQ ID NO: 663761 - DNA, 15 bp, Homo sapiens
aggctccttttggaa

SEQ ID NO: 663762 - DNA, 15 bp, Homo sapiens
ggctccttttggaac

SEQ ID NO: 663763 - DNA, 15 bp, Homo sapiens
gctccttttggaaca

SEQ ID NO: 663764 - DNA, 15 bp, Homo sapiens
ctccttttggaacag

SEQ ID NO: 663765 - DNA, 15 bp, Homo sapiens
tccttttggaacaga

SEQ ID NO: 663766 - DNA, 15 bp, Homo sapiens
ccttttggaacagat

SEQ ID NO: 663767 - DNA, 15 bp, Homo sapiens
cttttggaacagatt

SEQ ID NO: 663768 - DNA, 15 bp, Homo sapiens
ttttggaacagattc

SEQ ID NO: 663769 - DNA, 15 bp, Homo sapiens
tttggaacagattca

SEQ ID NO: 663770 - DNA, 15 bp, Homo sapiens
ttggaacagattcag

SEQ ID NO: 663771 - DNA, 15 bp, Homo sapiens
tggaacagattcagg

SEQ ID NO: 663772 - DNA, 15 bp, Homo sapiens
ggaacagattcagga

SEQ ID NO: 663773 - DNA, 15 bp, Homo sapiens
gaacagattcaggaa

SEQ ID NO: 663774 - DNA, 15 bp, Homo sapiens
aacagattcaggaag

SEQ ID NO: 663775 - DNA, 15 bp, Homo sapiens
acagattcaggaaga

SEQ ID NO: 663776 - DNA, 15 bp, Homo sapiens
cagattcaggaagaa

SEQ ID NO: 663777 - DNA, 15 bp, Homo sapiens
agattcaggaagaaa

SEQ ID NO: 663778 - DNA, 15 bp, Homo sapiens
gattcaggaagaaaa

SEQ ID NO: 663779 - DNA, 15 bp, Homo sapiens
attcaggaagaaaag

SEQ ID NO: 663780 - DNA, 15 bp, Homo sapiens
ttcaggaagaaaagg

SEQ ID NO: 663781 - DNA, 15 bp, Homo sapiens
tcaggaagaaaaggc

SEQ ID NO: 663782 - DNA, 15 bp, Homo sapiens
caggaagaaaaggct

SEQ ID NO: 663783 - DNA, 15 bp, Homo sapiens
aggaagaaaaggctg

SEQ ID NO: 663784 - DNA, 15 bp, Homo sapiens
ggaagaaaaggctgt

SEQ ID NO: 663785 - DNA, 15 bp, Homo sapiens
gaagaaaaggctgtc

SEQ ID NO: 663786 - DNA, 15 bp, Homo sapiens
aagaaaaggctgtct

SEQ ID NO: 663787 - DNA, 15 bp, Homo sapiens
agaaaaggctgtctt

SEQ ID NO: 663788 - DNA, 15 bp, Homo sapiens
gaaaaggctgtcttg

SEQ ID NO: 663789 - DNA, 15 bp, Homo sapiens
aaaaggctgtcttga

SEQ ID NO: 663790 - DNA, 15 bp, Homo sapiens
aaaggctgtcttgaa

SEQ ID NO: 663791 - DNA, 15 bp, Homo sapiens
aaggctgtcttgaaa

SEQ ID NO: 663792 - DNA, 15 bp, Homo sapiens
aggctgtcttgaaaa

SEQ ID NO: 663793 - DNA, 15 bp, Homo sapiens
ggctgtcttgaaaag

SEQ ID NO: 663794 - DNA, 15 bp, Homo sapiens
gctgtcttgaaaagt

SEQ ID NO: 663795 - DNA, 15 bp, Homo sapiens
ctgtcttgaaaagtg

SEQ ID NO: 663796 - DNA, 15 bp, Homo sapiens
tgtcttgaaaagtgc

SEQ ID NO: 663797 - DNA, 15 bp, Homo sapiens
gtcttgaaaagtgct

SEQ ID NO: 663798 - DNA, 15 bp, Homo sapiens
tcttgaaaagtgctc

SEQ ID NO: 663799 - DNA, 15 bp, Homo sapiens
cttgaaaagtgctcc

SEQ ID NO: 663800 - DNA, 15 bp, Homo sapiens
ttgaaaagtgctccc

SEQ ID NO: 663801 - DNA, 15 bp, Homo sapiens
tgaaaagtgctccct

SEQ ID NO: 663802 - DNA, 15 bp, Homo sapiens
gaaaagtgctccctt

SEQ ID NO: 663803 - DNA, 15 bp, Homo sapiens
aaaagtgctcccttc

SEQ ID NO: 663804 - DNA, 15 bp, Homo sapiens
aaagtgctcccttcc

SEQ ID NO: 663805 - DNA, 15 bp, Homo sapiens
aagtgctcccttccc

SEQ ID NO: 663806 - DNA, 15 bp, Homo sapiens
agtgctcccttccct

SEQ ID NO: 663807 - DNA, 15 bp, Homo sapiens
gtgctcccttccctt

SEQ ID NO: 663808 - DNA, 15 bp, Homo sapiens
tgctcccttcccttt

SEQ ID NO: 663809 - DNA, 15 bp, Homo sapiens
gctcccttccctttg

SEQ ID NO: 663810 - DNA, 15 bp, Homo sapiens
ctcccttccctttgt

SEQ ID NO: 663811 - DNA, 15 bp, Homo sapiens
tcccttccctttgtg

SEQ ID NO: 663812 - DNA, 15 bp, Homo sapiens
cccttccctttgtgc

SEQ ID NO: 663813 - DNA, 15 bp, Homo sapiens
ccttccctttgtgca

SEQ ID NO: 663814 - DNA, 15 bp, Homo sapiens
cttccctttgtgcag

SEQ ID NO: 663815 - DNA, 15 bp, Homo sapiens
ttccctttgtgcagg

SEQ ID NO: 663816 - DNA, 15 bp, Homo sapiens
tccctttgtgcaggg

SEQ ID NO: 663817 - DNA, 15 bp, Homo sapiens
ccctttgtgcagggg

SEQ ID NO: 663818 - DNA, 15 bp, Homo sapiens
cctttgtgcaggggg

SEQ ID NO: 663819 - DNA, 15 bp, Homo sapiens
ctttgtgcagggggg

SEQ ID NO: 663820 - DNA, 15 bp, Homo sapiens
tttgtgcagggggga

SEQ ID NO: 663821 - DNA, 15 bp, Homo sapiens
ttgtgcaggggggat

SEQ ID NO: 663822 - DNA, 15 bp, Homo sapiens
tgtgcaggggggatt

SEQ ID NO: 663823 - DNA, 15 bp, Homo sapiens
gtgcaggggggattc

SEQ ID NO: 663824 - DNA, 15 bp, Homo sapiens
tgcaggggggattca

SEQ ID NO: 663825 - DNA, 15 bp, Homo sapiens
gcaggggggattcaa

SEQ ID NO: 663826 - DNA, 15 bp, Homo sapiens
caggggggattcaat

SEQ ID NO: 663827 - DNA, 15 bp, Homo sapiens
aggggggattcaatg

SEQ ID NO: 663828 - DNA, 15 bp, Homo sapiens
ggggggattcaatga

SEQ ID NO: 663829 - DNA, 15 bp, Homo sapiens
gggggattcaatgaa

SEQ ID NO: 663830 - DNA, 15 bp, Homo sapiens
ggggattcaatgaat

SEQ ID NO: 663831 - DNA, 15 bp, Homo sapiens
gggattcaatgaata

SEQ ID NO: 663832 - DNA, 15 bp, Homo sapiens
ggattcaatgaatat

SEQ ID NO: 663833 - DNA, 15 bp, Homo sapiens
gattcaatgaatatc

SEQ ID NO: 663834 - DNA, 15 bp, Homo sapiens
attcaatgaatatct

SEQ ID NO: 663835 - DNA, 15 bp, Homo sapiens
ttcaatgaatatctg

SEQ ID NO: 663836 - DNA, 15 bp, Homo sapiens
tcaatgaatatctgc

SEQ ID NO: 663837 - DNA, 15 bp, Homo sapiens
caatgaatatctgca

SEQ ID NO: 663838 - DNA, 15 bp, Homo sapiens
aatgaatatctgcat

SEQ ID NO: 663839 - DNA, 15 bp, Homo sapiens
atgaatatctgcatt

SEQ ID NO: 663840 - DNA, 15 bp, Homo sapiens
tgaatatctgcattg

SEQ ID NO: 663841 - DNA, 15 bp, Homo sapiens
gaatatctgcattgt

SEQ ID NO: 663842 - DNA, 15 bp, Homo sapiens
aatatctgcattgta

SEQ ID NO: 663843 - DNA, 15 bp, Homo sapiens
atatctgcattgtat

SEQ ID NO: 663844 - DNA, 15 bp, Homo sapiens
tatctgcattgtata

SEQ ID NO: 663845 - DNA, 15 bp, Homo sapiens
atctgcattgtataa

SEQ ID NO: 663846 - DNA, 15 bp, Homo sapiens
tctgcattgtataac

SEQ ID NO: 663847 - DNA, 15 bp, Homo sapiens
ctgcattgtataaca

SEQ ID NO: 663848 - DNA, 15 bp, Homo sapiens
tgcattgtataacat

SEQ ID NO: 663849 - DNA, 15 bp, Homo sapiens
gcattgtataacatt

SEQ ID NO: 663850 - DNA, 15 bp, Homo sapiens
cattgtataacattc

SEQ ID NO: 663851 - DNA, 15 bp, Homo sapiens
attgtataacattca

SEQ ID NO: 663852 - DNA, 15 bp, Homo sapiens
ttgtataacattcat

SEQ ID NO: 663853 - DNA, 15 bp, Homo sapiens
tgtataacattcatt

SEQ ID NO: 663854 - DNA, 15 bp, Homo sapiens
gtataacattcattg

SEQ ID NO: 663855 - DNA, 15 bp, Homo sapiens
tataacattcattgt

SEQ ID NO: 663856 - DNA, 15 bp, Homo sapiens
ataacattcattgta

SEQ ID NO: 663857 - DNA, 15 bp, Homo sapiens
taacattcattgtat

SEQ ID NO: 663858 - DNA, 15 bp, Homo sapiens
aacattcattgtatt

SEQ ID NO: 663859 - DNA, 15 bp, Homo sapiens
acattcattgtatta

SEQ ID NO: 663860 - DNA, 15 bp, Homo sapiens
cattcattgtattac

SEQ ID NO: 663861 - DNA, 15 bp, Homo sapiens
attcattgtattacg

SEQ ID NO: 663862 - DNA, 15 bp, Homo sapiens
ttcattgtattacgt

SEQ ID NO: 663863 - DNA, 15 bp, Homo sapiens
tcattgtattacgta

SEQ ID NO: 663864 - DNA, 15 bp, Homo sapiens
cattgtattacgtaa

SEQ ID NO: 663865 - DNA, 15 bp, Homo sapiens
attgtattacgtaac

SEQ ID NO: 663866 - DNA, 15 bp, Homo sapiens
ttgtattacgtaact

SEQ ID NO: 663867 - DNA, 15 bp, Homo sapiens
tgtattacgtaactc

SEQ ID NO: 663868 - DNA, 15 bp, Homo sapiens
gtattacgtaactct

SEQ ID NO: 663869 - DNA, 15 bp, Homo sapiens
tattacgtaactctt

SEQ ID NO: 663870 - DNA, 15 bp, Homo sapiens
attacgtaactcttg

SEQ ID NO: 663871 - DNA, 15 bp, Homo sapiens
ttacgtaactcttga

SEQ ID NO: 663872 - DNA, 15 bp, Homo sapiens
tacgtaactcttgaa

SEQ ID NO: 663873 - DNA, 15 bp, Homo sapiens
acgtaactcttgaaa

SEQ ID NO: 663874 - DNA, 15 bp, Homo sapiens
cgtaactcttgaaac

SEQ ID NO: 663875 - DNA, 15 bp, Homo sapiens
gtaactcttgaaact

SEQ ID NO: 663876 - DNA, 15 bp, Homo sapiens
taactcttgaaactt

SEQ ID NO: 663877 - DNA, 15 bp, Homo sapiens
aactcttgaaacttt

SEQ ID NO: 663878 - DNA, 15 bp, Homo sapiens
actcttgaaactttt

SEQ ID NO: 663879 - DNA, 15 bp, Homo sapiens
ctcttgaaactttta

SEQ ID NO: 663880 - DNA, 15 bp, Homo sapiens
tcttgaaacttttac

SEQ ID NO: 663881 - DNA, 15 bp, Homo sapiens
cttgaaacttttaca

SEQ ID NO: 663882 - DNA, 15 bp, Homo sapiens
ttgaaacttttacaa

SEQ ID NO: 663883 - DNA, 15 bp, Homo sapiens
tgaaacttttacaaa

SEQ ID NO: 663884 - DNA, 15 bp, Homo sapiens
gaaacttttacaaat

SEQ ID NO: 663885 - DNA, 15 bp, Homo sapiens
aaacttttacaaatg

SEQ ID NO: 663886 - DNA, 15 bp, Homo sapiens
aacttttacaaatga

SEQ ID NO: 663887 - DNA, 15 bp, Homo sapiens
acttttacaaatgac

SEQ ID NO: 663888 - DNA, 15 bp, Homo sapiens
cttttacaaatgact

SEQ ID NO: 663889 - DNA, 15 bp, Homo sapiens
ttttacaaatgactt

SEQ ID NO: 663890 - DNA, 15 bp, Homo sapiens
tttacaaatgacttt

SEQ ID NO: 663891 - DNA, 15 bp, Homo sapiens
ttacaaatgactttc

SEQ ID NO: 663892 - DNA, 15 bp, Homo sapiens
tacaaatgactttca

SEQ ID NO: 663893 - DNA, 15 bp, Homo sapiens
acaaatgactttcat

SEQ ID NO: 663894 - DNA, 15 bp, Homo sapiens
caaatgactttcata

SEQ ID NO: 663895 - DNA, 15 bp, Homo sapiens
aaatgactttcatat

SEQ ID NO: 663896 - DNA, 15 bp, Homo sapiens
aatgactttcatata

SEQ ID NO: 663897 - DNA, 15 bp, Homo sapiens
atgactttcatatac

SEQ ID NO: 663898 - DNA, 15 bp, Homo sapiens
tgactttcatataca

SEQ ID NO: 663899 - DNA, 15 bp, Homo sapiens
gactttcatatacat

SEQ ID NO: 663900 - DNA, 15 bp, Homo sapiens
actttcatatacatc

SEQ ID NO: 663901 - DNA, 15 bp, Homo sapiens
ctttcatatacatca

SEQ ID NO: 663902 - DNA, 15 bp, Homo sapiens
tttcatatacatcat

SEQ ID NO: 663903 - DNA, 15 bp, Homo sapiens
ttcatatacatcatc

SEQ ID NO: 663904 - DNA, 15 bp, Homo sapiens
tcatatacatcatct

SEQ ID NO: 663905 - DNA, 15 bp, Homo sapiens
catatacatcatctg

SEQ ID NO: 663906 - DNA, 15 bp, Homo sapiens
atatacatcatctga

SEQ ID NO: 663907 - DNA, 15 bp, Homo sapiens
tatacatcatctgat

SEQ ID NO: 663908 - DNA, 15 bp, Homo sapiens
atacatcatctgatt

SEQ ID NO: 663909 - DNA, 15 bp, Homo sapiens
tacatcatctgattg

SEQ ID NO: 663910 - DNA, 15 bp, Homo sapiens
acatcatctgattgt

SEQ ID NO: 663911 - DNA, 15 bp, Homo sapiens
catcatctgattgtt

SEQ ID NO: 663912 - DNA, 15 bp, Homo sapiens
atcatctgattgttc

SEQ ID NO: 663913 - DNA, 15 bp, Homo sapiens
tcatctgattgttca

SEQ ID NO: 663914 - DNA, 15 bp, Homo sapiens
catctgattgttcag

SEQ ID NO: 663915 - DNA, 15 bp, Homo sapiens
atctgattgttcaga

SEQ ID NO: 663916 - DNA, 15 bp, Homo sapiens
tctgattgttcagac

SEQ ID NO: 663917 - DNA, 15 bp, Homo sapiens
ctgattgttcagact

SEQ ID NO: 663918 - DNA, 15 bp, Homo sapiens
tgattgttcagactt

SEQ ID NO: 663919 - DNA, 15 bp, Homo sapiens
gattgttcagactta

SEQ ID NO: 663920 - DNA, 15 bp, Homo sapiens
attgttcagacttaa

SEQ ID NO: 663921 - DNA, 15 bp, Homo sapiens
ttgttcagacttaaa

SEQ ID NO: 663922 - DNA, 15 bp, Homo sapiens
tgttcagacttaaag

SEQ ID NO: 663923 - DNA, 15 bp, Homo sapiens
gttcagacttaaagg

SEQ ID NO: 663924 - DNA, 15 bp, Homo sapiens
ttcagacttaaaggg

SEQ ID NO: 663925 - DNA, 15 bp, Homo sapiens
tcagacttaaagggt

SEQ ID NO: 663926 - DNA, 15 bp, Homo sapiens
cagacttaaagggtg

SEQ ID NO: 663927 - DNA, 15 bp, Homo sapiens
agacttaaagggtgt

SEQ ID NO: 663928 - DNA, 15 bp, Homo sapiens
gacttaaagggtgtc

SEQ ID NO: 663929 - DNA, 15 bp, Homo sapiens
acttaaagggtgtca

SEQ ID NO: 663930 - DNA, 15 bp, Homo sapiens
cttaaagggtgtcag

SEQ ID NO: 663931 - DNA, 15 bp, Homo sapiens
ttaaagggtgtcaga

SEQ ID NO: 663932 - DNA, 15 bp, Homo sapiens
taaagggtgtcagac

SEQ ID NO: 663933 - DNA, 15 bp, Homo sapiens
aaagggtgtcagaca

SEQ ID NO: 663934 - DNA, 15 bp, Homo sapiens
aagggtgtcagacat

SEQ ID NO: 663935 - DNA, 15 bp, Homo sapiens
agggtgtcagacatc

SEQ ID NO: 663936 - DNA, 15 bp, Homo sapiens
gggtgtcagacatct

SEQ ID NO: 663937 - DNA, 15 bp, Homo sapiens
ggtgtcagacatctg

SEQ ID NO: 663938 - DNA, 15 bp, Homo sapiens
gtgtcagacatctgc

SEQ ID NO: 663939 - DNA, 15 bp, Homo sapiens
tgtcagacatctgct

SEQ ID NO: 663940 - DNA, 15 bp, Homo sapiens
gtcagacatctgctg

SEQ ID NO: 663941 - DNA, 15 bp, Homo sapiens
tcagacatctgctgt

SEQ ID NO: 663942 - DNA, 15 bp, Homo sapiens
cagacatctgctgtt

SEQ ID NO: 663943 - DNA, 15 bp, Homo sapiens
agacatctgctgttg

SEQ ID NO: 663944 - DNA, 15 bp, Homo sapiens
gacatctgctgttga

SEQ ID NO: 663945 - DNA, 15 bp, Homo sapiens
acatctgctgttgat

SEQ ID NO: 663946 - DNA, 15 bp, Homo sapiens
catctgctgttgatg

SEQ ID NO: 663947 - DNA, 15 bp, Homo sapiens
atctgctgttgatgg

SEQ ID NO: 663948 - DNA, 15 bp, Homo sapiens
tctgctgttgatggc

SEQ ID NO: 663949 - DNA, 15 bp, Homo sapiens
ctgctgttgatggct

SEQ ID NO: 663950 - DNA, 15 bp, Homo sapiens
tgctgttgatggctg

SEQ ID NO: 663951 - DNA, 15 bp, Homo sapiens
gctgttgatggctgt

SEQ ID NO: 663952 - DNA, 15 bp, Homo sapiens
ctgttgatggctgtg

SEQ ID NO: 663953 - DNA, 15 bp, Homo sapiens
tgttgatggctgtgc

SEQ ID NO: 663954 - DNA, 15 bp, Homo sapiens
gttgatggctgtgct

SEQ ID NO: 663955 - DNA, 15 bp, Homo sapiens
ttgatggctgtgctt

SEQ ID NO: 663956 - DNA, 15 bp, Homo sapiens
tgatggctgtgcttt

SEQ ID NO: 663957 - DNA, 15 bp, Homo sapiens
gatggctgtgctttt

SEQ ID NO: 663958 - DNA, 15 bp, Homo sapiens
atggctgtgcttttt

SEQ ID NO: 663959 - DNA, 15 bp, Homo sapiens
tggctgtgctttttg

SEQ ID NO: 663960 - DNA, 15 bp, Homo sapiens
ggctgtgctttttga

SEQ ID NO: 663961 - DNA, 15 bp, Homo sapiens
gctgtgctttttgaa

SEQ ID NO: 663962 - DNA, 15 bp, Homo sapiens
ctgtgctttttgaac

SEQ ID NO: 663963 - DNA, 15 bp, Homo sapiens
tgtgctttttgaaca

SEQ ID NO: 663964 - DNA, 15 bp, Homo sapiens
gtgctttttgaacaa

SEQ ID NO: 663965 - DNA, 15 bp, Homo sapiens
tgctttttgaacaag

SEQ ID NO: 663966 - DNA, 15 bp, Homo sapiens
gctttttgaacaagg

SEQ ID NO: 663967 - DNA, 15 bp, Homo sapiens
ctttttgaacaaggg

SEQ ID NO: 663968 - DNA, 15 bp, Homo sapiens
tttttgaacaagggc

SEQ ID NO: 663969 - DNA, 15 bp, Homo sapiens
ttttgaacaagggca

SEQ ID NO: 663970 - DNA, 15 bp, Homo sapiens
tttgaacaagggcag

SEQ ID NO: 663971 - DNA, 15 bp, Homo sapiens
ttgaacaagggcagt

SEQ ID NO: 663972 - DNA, 15 bp, Homo sapiens
tgaacaagggcagtg

SEQ ID NO: 663973 - DNA, 15 bp, Homo sapiens
gaacaagggcagtga

SEQ ID NO: 663974 - DNA, 15 bp, Homo sapiens
aacaagggcagtgaa

SEQ ID NO: 663975 - DNA, 15 bp, Homo sapiens
acaagggcagtgaag

SEQ ID NO: 663976 - DNA, 15 bp, Homo sapiens
caagggcagtgaagc

SEQ ID NO: 663977 - DNA, 15 bp, Homo sapiens
aagggcagtgaagca

SEQ ID NO: 663978 - DNA, 15 bp, Homo sapiens
agggcagtgaagcaa

SEQ ID NO: 663979 - DNA, 15 bp, Homo sapiens
gggcagtgaagcaaa

SEQ ID NO: 663980 - DNA, 15 bp, Homo sapiens
ggcagtgaagcaaaa

SEQ ID NO: 663981 - DNA, 15 bp, Homo sapiens
gcagtgaagcaaaaa

SEQ ID NO: 663982 - DNA, 15 bp, Homo sapiens
cagtgaagcaaaaac

SEQ ID NO: 663983 - DNA, 15 bp, Homo sapiens
agtgaagcaaaaact

SEQ ID NO: 663984 - DNA, 15 bp, Homo sapiens
gtgaagcaaaaactc

SEQ ID NO: 663985 - DNA, 15 bp, Homo sapiens
tgaagcaaaaactcc

SEQ ID NO: 663986 - DNA, 15 bp, Homo sapiens
gaagcaaaaactccc

SEQ ID NO: 663987 - DNA, 15 bp, Homo sapiens
aagcaaaaactccct

SEQ ID NO: 663988 - DNA, 15 bp, Homo sapiens
agcaaaaactccctc

SEQ ID NO: 663989 - DNA, 15 bp, Homo sapiens
gcaaaaactccctcc

SEQ ID NO: 663990 - DNA, 15 bp, Homo sapiens
caaaaactccctccc

SEQ ID NO: 663991 - DNA, 15 bp, Homo sapiens
aaaaactccctcccc

SEQ ID NO: 663992 - DNA, 15 bp, Homo sapiens
aaaactccctcccct

SEQ ID NO: 663993 - DNA, 15 bp, Homo sapiens
aaactccctcccctc

SEQ ID NO: 663994 - DNA, 15 bp, Homo sapiens
aactccctcccctcc

SEQ ID NO: 663995 - DNA, 15 bp, Homo sapiens
actccctcccctcct

SEQ ID NO: 663996 - DNA, 15 bp, Homo sapiens
ctccctcccctcctg

SEQ ID NO: 663997 - DNA, 15 bp, Homo sapiens
tccctcccctcctgc

SEQ ID NO: 663998 - DNA, 15 bp, Homo sapiens
ccctcccctcctgcc

SEQ ID NO: 663999 - DNA, 15 bp, Homo sapiens
cctcccctcctgccc

SEQ ID NO: 664000 - DNA, 15 bp, Homo sapiens
ctcccctcctgccca

SEQ ID NO: 664001 - DNA, 15 bp, Homo sapiens
tcccctcctgcccat

SEQ ID NO: 664002 - DNA, 15 bp, Homo sapiens
cccctcctgcccatc

SEQ ID NO: 664003 - DNA, 15 bp, Homo sapiens
ccctcctgcccatcc

SEQ ID NO: 664004 - DNA, 15 bp, Homo sapiens
cctcctgcccatccc

SEQ ID NO: 664005 - DNA, 15 bp, Homo sapiens
ctcctgcccatcccc

SEQ ID NO: 664006 - DNA, 15 bp, Homo sapiens
tcctgcccatcccct

SEQ ID NO: 664007 - DNA, 15 bp, Homo sapiens
cctgcccatcccctg

SEQ ID NO: 664008 - DNA, 15 bp, Homo sapiens
ctgcccatcccctgt

SEQ ID NO: 664009 - DNA, 15 bp, Homo sapiens
tgcccatcccctgtt

SEQ ID NO: 664010 - DNA, 15 bp, Homo sapiens
gcccatcccctgtta

SEQ ID NO: 664011 - DNA, 15 bp, Homo sapiens
cccatcccctgttat

SEQ ID NO: 664012 - DNA, 15 bp, Homo sapiens
ccatcccctgttatg

SEQ ID NO: 664013 - DNA, 15 bp, Homo sapiens
catcccctgttatgt

SEQ ID NO: 664014 - DNA, 15 bp, Homo sapiens
atcccctgttatgtc

SEQ ID NO: 664015 - DNA, 15 bp, Homo sapiens
tcccctgttatgtct

SEQ ID NO: 664016 - DNA, 15 bp, Homo sapiens
cccctgttatgtctc

SEQ ID NO: 664017 - DNA, 15 bp, Homo sapiens
ccctgttatgtctct

SEQ ID NO: 664018 - DNA, 15 bp, Homo sapiens
cctgttatgtctctt

SEQ ID NO: 664019 - DNA, 15 bp, Homo sapiens
ctgttatgtctcttc

SEQ ID NO: 664020 - DNA, 15 bp, Homo sapiens
tgttatgtctcttcc

SEQ ID NO: 664021 - DNA, 15 bp, Homo sapiens
gttatgtctcttcct

SEQ ID NO: 664022 - DNA, 15 bp, Homo sapiens
ttatgtctcttcctc

SEQ ID NO: 664023 - DNA, 15 bp, Homo sapiens
tatgtctcttcctcc

SEQ ID NO: 664024 - DNA, 15 bp, Homo sapiens
atgtctcttcctcct

SEQ ID NO: 664025 - DNA, 15 bp, Homo sapiens
tgtctcttcctcctt

SEQ ID NO: 664026 - DNA, 15 bp, Homo sapiens
gtctcttcctccttg

SEQ ID NO: 664027 - DNA, 15 bp, Homo sapiens
tctcttcctccttgt

SEQ ID NO: 664028 - DNA, 15 bp, Homo sapiens
ctcttcctccttgtc

SEQ ID NO: 664029 - DNA, 15 bp, Homo sapiens
tcttcctccttgtct

SEQ ID NO: 664030 - DNA, 15 bp, Homo sapiens
cttcctccttgtctt

SEQ ID NO: 664031 - DNA, 15 bp, Homo sapiens
ttcctccttgtctta

SEQ ID NO: 664032 - DNA, 15 bp, Homo sapiens
tcctccttgtcttac

SEQ ID NO: 664033 - DNA, 15 bp, Homo sapiens
cctccttgtcttacc

SEQ ID NO: 664034 - DNA, 15 bp, Homo sapiens
ctccttgtcttaccc

SEQ ID NO: 664035 - DNA, 15 bp, Homo sapiens
tccttgtcttacccc

SEQ ID NO: 664036 - DNA, 15 bp, Homo sapiens
ccttgtcttacccct

SEQ ID NO: 664037 - DNA, 15 bp, Homo sapiens
cttgtcttacccctc

SEQ ID NO: 664038 - DNA, 15 bp, Homo sapiens
ttgtcttacccctcc

SEQ ID NO: 664039 - DNA, 15 bp, Homo sapiens
tgtcttacccctccc

SEQ ID NO: 664040 - DNA, 15 bp, Homo sapiens
gtcttacccctcccc

SEQ ID NO: 664041 - DNA, 15 bp, Homo sapiens
tcttacccctccccc

SEQ ID NO: 664042 - DNA, 15 bp, Homo sapiens
cttacccctccccct

SEQ ID NO: 664043 - DNA, 15 bp, Homo sapiens
ttacccctccccctc

SEQ ID NO: 664044 - DNA, 15 bp, Homo sapiens
tacccctccccctcc

SEQ ID NO: 664045 - DNA, 15 bp, Homo sapiens
acccctccccctcct

SEQ ID NO: 664046 - DNA, 15 bp, Homo sapiens
cccctccccctcctc

SEQ ID NO: 664047 - DNA, 15 bp, Homo sapiens
ccctccccctcctct

SEQ ID NO: 664048 - DNA, 15 bp, Homo sapiens
cctccccctcctctc

SEQ ID NO: 664049 - DNA, 15 bp, Homo sapiens
ctccccctcctctca

SEQ ID NO: 664050 - DNA, 15 bp, Homo sapiens
tccccctcctctcat

SEQ ID NO: 664051 - DNA, 15 bp, Homo sapiens
ccccctcctctcatc

SEQ ID NO: 664052 - DNA, 15 bp, Homo sapiens
cccctcctctcatcg

SEQ ID NO: 664053 - DNA, 15 bp, Homo sapiens
ccctcctctcatcgc

SEQ ID NO: 664054 - DNA, 15 bp, Homo sapiens
cctcctctcatcgcc

SEQ ID NO: 664055 - DNA, 15 bp, Homo sapiens
ctcctctcatcgcca

SEQ ID NO: 664056 - DNA, 15 bp, Homo sapiens
tcctctcatcgccag

SEQ ID NO: 664057 - DNA, 15 bp, Homo sapiens
cctctcatcgccagg

SEQ ID NO: 664058 - DNA, 15 bp, Homo sapiens
ctctcatcgccaggc

SEQ ID NO: 664059 - DNA, 15 bp, Homo sapiens
tctcatcgccaggct

SEQ ID NO: 664060 - DNA, 15 bp, Homo sapiens
ctcatcgccaggctt

SEQ ID NO: 664061 - DNA, 15 bp, Homo sapiens
tcatcgccaggctta

SEQ ID NO: 664062 - DNA, 15 bp, Homo sapiens
catcgccaggcttat

SEQ ID NO: 664063 - DNA, 15 bp, Homo sapiens
atcgccaggcttatt

SEQ ID NO: 664064 - DNA, 15 bp, Homo sapiens
tcgccaggcttattt

SEQ ID NO: 664065 - DNA, 15 bp, Homo sapiens
cgccaggcttatttg

SEQ ID NO: 664066 - DNA, 15 bp, Homo sapiens
gccaggcttatttgt

SEQ ID NO: 664067 - DNA, 15 bp, Homo sapiens
ccaggcttatttgta

SEQ ID NO: 664068 - DNA, 15 bp, Homo sapiens
caggcttatttgtat

SEQ ID NO: 664069 - DNA, 15 bp, Homo sapiens
aggcttatttgtatt

SEQ ID NO: 664070 - DNA, 15 bp, Homo sapiens
ggcttatttgtattt

SEQ ID NO: 664071 - DNA, 15 bp, Homo sapiens
gcttatttgtatttc

SEQ ID NO: 664072 - DNA, 15 bp, Homo sapiens
cttatttgtatttct

SEQ ID NO: 664073 - DNA, 15 bp, Homo sapiens
ttatttgtatttctc

SEQ ID NO: 664074 - DNA, 15 bp, Homo sapiens
tatttgtatttctcc

SEQ ID NO: 664075 - DNA, 15 bp, Homo sapiens
atttgtatttctcct

SEQ ID NO: 664076 - DNA, 15 bp, Homo sapiens
tttgtatttctcctt

SEQ ID NO: 664077 - DNA, 15 bp, Homo sapiens
ttgtatttctccttt

SEQ ID NO: 664078 - DNA, 15 bp, Homo sapiens
tgtatttctcctttc

SEQ ID NO: 664079 - DNA, 15 bp, Homo sapiens
gtatttctcctttct

SEQ ID NO: 664080 - DNA, 15 bp, Homo sapiens
tatttctcctttctg

SEQ ID NO: 664081 - DNA, 15 bp, Homo sapiens
atttctcctttctgg

SEQ ID NO: 664082 - DNA, 15 bp, Homo sapiens
tttctcctttctggg

SEQ ID NO: 664083 - DNA, 15 bp, Homo sapiens
ttctcctttctggga

SEQ ID NO: 664084 - DNA, 15 bp, Homo sapiens
tctcctttctgggag

SEQ ID NO: 664085 - DNA, 15 bp, Homo sapiens
ctcctttctgggagg

SEQ ID NO: 664086 - DNA, 15 bp, Homo sapiens
tcctttctgggagga

SEQ ID NO: 664087 - DNA, 15 bp, Homo sapiens
cctttctgggaggat

SEQ ID NO: 664088 - DNA, 15 bp, Homo sapiens
ctttctgggaggata

SEQ ID NO: 664089 - DNA, 15 bp, Homo sapiens
tttctgggaggatag

SEQ ID NO: 664090 - DNA, 15 bp, Homo sapiens
ttctgggaggatagg

SEQ ID NO: 664091 - DNA, 15 bp, Homo sapiens
tctgggaggataggt

SEQ ID NO: 664092 - DNA, 15 bp, Homo sapiens
ctgggaggataggtg

SEQ ID NO: 664093 - DNA, 15 bp, Homo sapiens
tgggaggataggtgg

SEQ ID NO: 664094 - DNA, 15 bp, Homo sapiens
gggaggataggtggg

SEQ ID NO: 664095 - DNA, 15 bp, Homo sapiens
ggaggataggtgggg

SEQ ID NO: 664096 - DNA, 15 bp, Homo sapiens
gaggataggtgggga

SEQ ID NO: 664097 - DNA, 15 bp, Homo sapiens
aggataggtggggag

SEQ ID NO: 664098 - DNA, 15 bp, Homo sapiens
ggataggtggggagg

SEQ ID NO: 664099 - DNA, 15 bp, Homo sapiens
gataggtggggaggg

SEQ ID NO: 664100 - DNA, 15 bp, Homo sapiens
ataggtggggagggg

SEQ ID NO: 664101 - DNA, 15 bp, Homo sapiens
taggtggggaggggg

SEQ ID NO: 664102 - DNA, 15 bp, Homo sapiens
aggtggggaggggga

SEQ ID NO: 664103 - DNA, 15 bp, Homo sapiens
ggtggggagggggaa

SEQ ID NO: 664104 - DNA, 15 bp, Homo sapiens
gtggggagggggaac

SEQ ID NO: 664105 - DNA, 15 bp, Homo sapiens
tggggagggggaact

SEQ ID NO: 664106 - DNA, 15 bp, Homo sapiens
ggggagggggaactt

SEQ ID NO: 664107 - DNA, 15 bp, Homo sapiens
gggagggggaacttc

SEQ ID NO: 664108 - DNA, 15 bp, Homo sapiens
ggagggggaacttct

SEQ ID NO: 664109 - DNA, 15 bp, Homo sapiens
gagggggaacttctg

SEQ ID NO: 664110 - DNA, 15 bp, Homo sapiens
agggggaacttctgt

SEQ ID NO: 664111 - DNA, 15 bp, Homo sapiens
gggggaacttctgta

SEQ ID NO: 664112 - DNA, 15 bp, Homo sapiens
ggggaacttctgtac

SEQ ID NO: 664113 - DNA, 15 bp, Homo sapiens
gggaacttctgtaca

SEQ ID NO: 664114 - DNA, 15 bp, Homo sapiens
ggaacttctgtacat

SEQ ID NO: 664115 - DNA, 15 bp, Homo sapiens
gaacttctgtacatc

SEQ ID NO: 664116 - DNA, 15 bp, Homo sapiens
aacttctgtacatcc

SEQ ID NO: 664117 - DNA, 15 bp, Homo sapiens
acttctgtacatccg

SEQ ID NO: 664118 - DNA, 15 bp, Homo sapiens
cttctgtacatccga

SEQ ID NO: 664119 - DNA, 15 bp, Homo sapiens
ttctgtacatccgaa

SEQ ID NO: 664120 - DNA, 15 bp, Homo sapiens
tctgtacatccgaat

SEQ ID NO: 664121 - DNA, 15 bp, Homo sapiens
ctgtacatccgaatc

SEQ ID NO: 664122 - DNA, 15 bp, Homo sapiens
tgtacatccgaatca

SEQ ID NO: 664123 - DNA, 15 bp, Homo sapiens
gtacatccgaatcag

SEQ ID NO: 664124 - DNA, 15 bp, Homo sapiens
tacatccgaatcagt

SEQ ID NO: 664125 - DNA, 15 bp, Homo sapiens
acatccgaatcagtt

SEQ ID NO: 664126 - DNA, 15 bp, Homo sapiens
catccgaatcagttt

SEQ ID NO: 664127 - DNA, 15 bp, Homo sapiens
atccgaatcagtttt

SEQ ID NO: 664128 - DNA, 15 bp, Homo sapiens
tccgaatcagttttg

SEQ ID NO: 664129 - DNA, 15 bp, Homo sapiens
ccgaatcagttttgt

SEQ ID NO: 664130 - DNA, 15 bp, Homo sapiens
cgaatcagttttgtt

SEQ ID NO: 664131 - DNA, 15 bp, Homo sapiens
gaatcagttttgttc

SEQ ID NO: 664132 - DNA, 15 bp, Homo sapiens
aatcagttttgttca

SEQ ID NO: 664133 - DNA, 15 bp, Homo sapiens
atcagttttgttcaa

SEQ ID NO: 664134 - DNA, 15 bp, Homo sapiens
tcagttttgttcaag

SEQ ID NO: 664135 - DNA, 15 bp, Homo sapiens
cagttttgttcaagt

SEQ ID NO: 664136 - DNA, 15 bp, Homo sapiens
agttttgttcaagtg

SEQ ID NO: 664137 - DNA, 15 bp, Homo sapiens
gttttgttcaagtgg

SEQ ID NO: 664138 - DNA, 15 bp, Homo sapiens
ttttgttcaagtggt

SEQ ID NO: 664139 - DNA, 15 bp, Homo sapiens
tttgttcaagtggta

SEQ ID NO: 664140 - DNA, 15 bp, Homo sapiens
ttgttcaagtggtag

SEQ ID NO: 664141 - DNA, 15 bp, Homo sapiens
tgttcaagtggtagg

SEQ ID NO: 664142 - DNA, 15 bp, Homo sapiens
gttcaagtggtaggg

SEQ ID NO: 664143 - DNA, 15 bp, Homo sapiens
ttcaagtggtagggg

SEQ ID NO: 664144 - DNA, 15 bp, Homo sapiens
tcaagtggtaggggg

SEQ ID NO: 664145 - DNA, 15 bp, Homo sapiens
caagtggtaggggga

SEQ ID NO: 664146 - DNA, 15 bp, Homo sapiens
aagtggtagggggaa

SEQ ID NO: 664147 - DNA, 15 bp, Homo sapiens
agtggtagggggaag

SEQ ID NO: 664148 - DNA, 15 bp, Homo sapiens
gtggtagggggaagc

SEQ ID NO: 664149 - DNA, 15 bp, Homo sapiens
tggtagggggaagca

SEQ ID NO: 664150 - DNA, 15 bp, Homo sapiens
ggtagggggaagcag

SEQ ID NO: 664151 - DNA, 15 bp, Homo sapiens
gtagggggaagcagc

SEQ ID NO: 664152 - DNA, 15 bp, Homo sapiens
tagggggaagcagcg

SEQ ID NO: 664153 - DNA, 15 bp, Homo sapiens
agggggaagcagcgc

SEQ ID NO: 664154 - DNA, 15 bp, Homo sapiens
gggggaagcagcgct

SEQ ID NO: 664155 - DNA, 15 bp, Homo sapiens
ggggaagcagcgctt

SEQ ID NO: 664156 - DNA, 15 bp, Homo sapiens
gggaagcagcgcttc

SEQ ID NO: 664157 - DNA, 15 bp, Homo sapiens
ggaagcagcgcttcc

SEQ ID NO: 664158 - DNA, 15 bp, Homo sapiens
gaagcagcgcttcct

SEQ ID NO: 664159 - DNA, 15 bp, Homo sapiens
aagcagcgcttcctt

SEQ ID NO: 664160 - DNA, 15 bp, Homo sapiens
agcagcgcttccttt

SEQ ID NO: 664161 - DNA, 15 bp, Homo sapiens
gcagcgcttcctttg

SEQ ID NO: 664162 - DNA, 15 bp, Homo sapiens
cagcgcttcctttgc

SEQ ID NO: 664163 - DNA, 15 bp, Homo sapiens
agcgcttcctttgcc

SEQ ID NO: 664164 - DNA, 15 bp, Homo sapiens
gcgcttcctttgcct

SEQ ID NO: 664165 - DNA, 15 bp, Homo sapiens
cgcttcctttgcctt

SEQ ID NO: 664166 - DNA, 15 bp, Homo sapiens
gcttcctttgccttc

SEQ ID NO: 664167 - DNA, 15 bp, Homo sapiens
cttcctttgccttca

SEQ ID NO: 664168 - DNA, 15 bp, Homo sapiens
ttcctttgccttcat

SEQ ID NO: 664169 - DNA, 15 bp, Homo sapiens
tcctttgccttcatg

SEQ ID NO: 664170 - DNA, 15 bp, Homo sapiens
cctttgccttcatgt

SEQ ID NO: 664171 - DNA, 15 bp, Homo sapiens
ctttgccttcatgtc

SEQ ID NO: 664172 - DNA, 15 bp, Homo sapiens
tttgccttcatgtct

SEQ ID NO: 664173 - DNA, 15 bp, Homo sapiens
ttgccttcatgtctt

SEQ ID NO: 664174 - DNA, 15 bp, Homo sapiens
tgccttcatgtcttt

SEQ ID NO: 664175 - DNA, 15 bp, Homo sapiens
gccttcatgtctttc

SEQ ID NO: 664176 - DNA, 15 bp, Homo sapiens
ccttcatgtctttct

SEQ ID NO: 664177 - DNA, 15 bp, Homo sapiens
cttcatgtctttctc

SEQ ID NO: 664178 - DNA, 15 bp, Homo sapiens
ttcatgtctttctcg

SEQ ID NO: 664179 - DNA, 15 bp, Homo sapiens
tcatgtctttctcgg

SEQ ID NO: 664180 - DNA, 15 bp, Homo sapiens
catgtctttctcggt

SEQ ID NO: 664181 - DNA, 15 bp, Homo sapiens
atgtctttctcggtt

SEQ ID NO: 664182 - DNA, 15 bp, Homo sapiens
tgtctttctcggttc

SEQ ID NO: 664183 - DNA, 15 bp, Homo sapiens
gtctttctcggttcc

SEQ ID NO: 664184 - DNA, 15 bp, Homo sapiens
tctttctcggttccc

SEQ ID NO: 664185 - DNA, 15 bp, Homo sapiens
ctttctcggttcccc

SEQ ID NO: 664186 - DNA, 15 bp, Homo sapiens
tttctcggttcccct

SEQ ID NO: 664187 - DNA, 15 bp, Homo sapiens
ttctcggttcccctg

SEQ ID NO: 664188 - DNA, 15 bp, Homo sapiens
tctcggttcccctgg

SEQ ID NO: 664189 - DNA, 15 bp, Homo sapiens
ctcggttcccctggc

SEQ ID NO: 664190 - DNA, 15 bp, Homo sapiens
tcggttcccctggcc

SEQ ID NO: 664191 - DNA, 15 bp, Homo sapiens
cggttcccctggccc

SEQ ID NO: 664192 - DNA, 15 bp, Homo sapiens
ggttcccctggccct

SEQ ID NO: 664193 - DNA, 15 bp, Homo sapiens
gttcccctggccctt

SEQ ID NO: 664194 - DNA, 15 bp, Homo sapiens
ttcccctggcccttg

SEQ ID NO: 664195 - DNA, 15 bp, Homo sapiens
tcccctggcccttgt

SEQ ID NO: 664196 - DNA, 15 bp, Homo sapiens
cccctggcccttgtt

SEQ ID NO: 664197 - DNA, 15 bp, Homo sapiens
ccctggcccttgtta

SEQ ID NO: 664198 - DNA, 15 bp, Homo sapiens
cctggcccttgttaa

SEQ ID NO: 664199 - DNA, 15 bp, Homo sapiens
ctggcccttgttaaa

SEQ ID NO: 664200 - DNA, 15 bp, Homo sapiens
tggcccttgttaaac

SEQ ID NO: 664201 - DNA, 15 bp, Homo sapiens
ggcccttgttaaact

SEQ ID NO: 664202 - DNA, 15 bp, Homo sapiens
gcccttgttaaactc

SEQ ID NO: 664203 - DNA, 15 bp, Homo sapiens
cccttgttaaactca

SEQ ID NO: 664204 - DNA, 15 bp, Homo sapiens
ccttgttaaactcac

SEQ ID NO: 664205 - DNA, 15 bp, Homo sapiens
cttgttaaactcact

SEQ ID NO: 664206 - DNA, 15 bp, Homo sapiens
ttgttaaactcactt

SEQ ID NO: 664207 - DNA, 15 bp, Homo sapiens
tgttaaactcacttc

SEQ ID NO: 664208 - DNA, 15 bp, Homo sapiens
gttaaactcacttca

SEQ ID NO: 664209 - DNA, 15 bp, Homo sapiens
ttaaactcacttcac

SEQ ID NO: 664210 - DNA, 15 bp, Homo sapiens
taaactcacttcaca

SEQ ID NO: 664211 - DNA, 15 bp, Homo sapiens
aaactcacttcacag

SEQ ID NO: 664212 - DNA, 15 bp, Homo sapiens
aactcacttcacagg

SEQ ID NO: 664213 - DNA, 15 bp, Homo sapiens
actcacttcacaggc

SEQ ID NO: 664214 - DNA, 15 bp, Homo sapiens
ctcacttcacaggct

SEQ ID NO: 664215 - DNA, 15 bp, Homo sapiens
tcacttcacaggctt

SEQ ID NO: 664216 - DNA, 15 bp, Homo sapiens
cacttcacaggcttt

SEQ ID NO: 664217 - DNA, 15 bp, Homo sapiens
acttcacaggcttta

SEQ ID NO: 664218 - DNA, 15 bp, Homo sapiens
cttcacaggctttat

SEQ ID NO: 664219 - DNA, 15 bp, Homo sapiens
ttcacaggctttatg

SEQ ID NO: 664220 - DNA, 15 bp, Homo sapiens
tcacaggctttatga

SEQ ID NO: 664221 - DNA, 15 bp, Homo sapiens
cacaggctttatgag

SEQ ID NO: 664222 - DNA, 15 bp, Homo sapiens
acaggctttatgagc

SEQ ID NO: 664223 - DNA, 15 bp, Homo sapiens
caggctttatgagcg

SEQ ID NO: 664224 - DNA, 15 bp, Homo sapiens
aggctttatgagcgg

SEQ ID NO: 664225 - DNA, 15 bp, Homo sapiens
ggctttatgagcggg

SEQ ID NO: 664226 - DNA, 15 bp, Homo sapiens
gctttatgagcgggg

SEQ ID NO: 664227 - DNA, 15 bp, Homo sapiens
ctttatgagcggggc

SEQ ID NO: 664228 - DNA, 15 bp, Homo sapiens
tttatgagcggggca

SEQ ID NO: 664229 - DNA, 15 bp, Homo sapiens
ttatgagcggggcag

SEQ ID NO: 664230 - DNA, 15 bp, Homo sapiens
tatgagcggggcaga

SEQ ID NO: 664231 - DNA, 15 bp, Homo sapiens
atgagcggggcagaa

SEQ ID NO: 664232 - DNA, 15 bp, Homo sapiens
tgagcggggcagaag

SEQ ID NO: 664233 - DNA, 15 bp, Homo sapiens
gagcggggcagaagt

SEQ ID NO: 664234 - DNA, 15 bp, Homo sapiens
agcggggcagaagtt

SEQ ID NO: 664235 - DNA, 15 bp, Homo sapiens
gcggggcagaagttc

SEQ ID NO: 664236 - DNA, 15 bp, Homo sapiens
cggggcagaagttcc

SEQ ID NO: 664237 - DNA, 15 bp, Homo sapiens
ggggcagaagttccc

SEQ ID NO: 664238 - DNA, 15 bp, Homo sapiens
gggcagaagttccca

SEQ ID NO: 664239 - DNA, 15 bp, Homo sapiens
ggcagaagttcccag

SEQ ID NO: 664240 - DNA, 15 bp, Homo sapiens
gcagaagttcccagt

SEQ ID NO: 664241 - DNA, 15 bp, Homo sapiens
cagaagttcccagtc

SEQ ID NO: 664242 - DNA, 15 bp, Homo sapiens
agaagttcccagtca

SEQ ID NO: 664243 - DNA, 15 bp, Homo sapiens
gaagttcccagtcaa

SEQ ID NO: 664244 - DNA, 15 bp, Homo sapiens
aagttcccagtcaat

SEQ ID NO: 664245 - DNA, 15 bp, Homo sapiens
agttcccagtcaatg

SEQ ID NO: 664246 - DNA, 15 bp, Homo sapiens
gttcccagtcaatgg

SEQ ID NO: 664247 - DNA, 15 bp, Homo sapiens
ttcccagtcaatggc

SEQ ID NO: 664248 - DNA, 15 bp, Homo sapiens
tcccagtcaatggcg

SEQ ID NO: 664249 - DNA, 15 bp, Homo sapiens
cccagtcaatggcgt

SEQ ID NO: 664250 - DNA, 15 bp, Homo sapiens
ccagtcaatggcgtg

SEQ ID NO: 664251 - DNA, 15 bp, Homo sapiens
cagtcaatggcgtgt

SEQ ID NO: 664252 - DNA, 15 bp, Homo sapiens
agtcaatggcgtgtg

SEQ ID NO: 664253 - DNA, 15 bp, Homo sapiens
gtcaatggcgtgtgt

SEQ ID NO: 664254 - DNA, 15 bp, Homo sapiens
tcaatggcgtgtgtc

SEQ ID NO: 664255 - DNA, 15 bp, Homo sapiens
caatggcgtgtgtct

SEQ ID NO: 664256 - DNA, 15 bp, Homo sapiens
aatggcgtgtgtctt

SEQ ID NO: 664257 - DNA, 15 bp, Homo sapiens
atggcgtgtgtcttt

SEQ ID NO: 664258 - DNA, 15 bp, Homo sapiens
tggcgtgtgtctttg

SEQ ID NO: 664259 - DNA, 15 bp, Homo sapiens
ggcgtgtgtctttgt

SEQ ID NO: 664260 - DNA, 15 bp, Homo sapiens
gcgtgtgtctttgtt

SEQ ID NO: 664261 - DNA, 15 bp, Homo sapiens
cgtgtgtctttgttt

SEQ ID NO: 664262 - DNA, 15 bp, Homo sapiens
gtgtgtctttgtttc

SEQ ID NO: 664263 - DNA, 15 bp, Homo sapiens
tgtgtctttgtttcc

SEQ ID NO: 664264 - DNA, 15 bp, Homo sapiens
gtgtctttgtttcct

SEQ ID NO: 664265 - DNA, 15 bp, Homo sapiens
tgtctttgtttcctc

SEQ ID NO: 664266 - DNA, 15 bp, Homo sapiens
gtctttgtttcctct

SEQ ID NO: 664267 - DNA, 15 bp, Homo sapiens
tctttgtttcctctt

SEQ ID NO: 664268 - DNA, 15 bp, Homo sapiens
ctttgtttcctcttt

SEQ ID NO: 664269 - DNA, 15 bp, Homo sapiens
tttgtttcctctttc

SEQ ID NO: 664270 - DNA, 15 bp, Homo sapiens
ttgtttcctctttca

SEQ ID NO: 664271 - DNA, 15 bp, Homo sapiens
tgtttcctctttcac

SEQ ID NO: 664272 - DNA, 15 bp, Homo sapiens
gtttcctctttcact

SEQ ID NO: 664273 - DNA, 15 bp, Homo sapiens
tttcctctttcactg

SEQ ID NO: 664274 - DNA, 15 bp, Homo sapiens
ttcctctttcactgt

SEQ ID NO: 664275 - DNA, 15 bp, Homo sapiens
tcctctttcactgtg

SEQ ID NO: 664276 - DNA, 15 bp, Homo sapiens
cctctttcactgtgg

SEQ ID NO: 664277 - DNA, 15 bp, Homo sapiens
ctctttcactgtggg

SEQ ID NO: 664278 - DNA, 15 bp, Homo sapiens
tctttcactgtggga

SEQ ID NO: 664279 - DNA, 15 bp, Homo sapiens
ctttcactgtgggaa

SEQ ID NO: 664280 - DNA, 15 bp, Homo sapiens
tttcactgtgggaat

SEQ ID NO: 664281 - DNA, 15 bp, Homo sapiens
ttcactgtgggaata

SEQ ID NO: 664282 - DNA, 15 bp, Homo sapiens
tcactgtgggaatag

SEQ ID NO: 664283 - DNA, 15 bp, Homo sapiens
cactgtgggaatagt

SEQ ID NO: 664284 - DNA, 15 bp, Homo sapiens
actgtgggaatagtg

SEQ ID NO: 664285 - DNA, 15 bp, Homo sapiens
ctgtgggaatagtga

SEQ ID NO: 664286 - DNA, 15 bp, Homo sapiens
tgtgggaatagtgaa

SEQ ID NO: 664287 - DNA, 15 bp, Homo sapiens
gtgggaatagtgaat

SEQ ID NO: 664288 - DNA, 15 bp, Homo sapiens
tgggaatagtgaatc

SEQ ID NO: 664289 - DNA, 15 bp, Homo sapiens
gggaatagtgaatca

SEQ ID NO: 664290 - DNA, 15 bp, Homo sapiens
ggaatagtgaatcat

SEQ ID NO: 664291 - DNA, 15 bp, Homo sapiens
gaatagtgaatcatt

SEQ ID NO: 664292 - DNA, 15 bp, Homo sapiens
aatagtgaatcattt

SEQ ID NO: 664293 - DNA, 15 bp, Homo sapiens
atagtgaatcatttt

SEQ ID NO: 664294 - DNA, 15 bp, Homo sapiens
tagtgaatcattttc

SEQ ID NO: 664295 - DNA, 15 bp, Homo sapiens
agtgaatcattttcg

SEQ ID NO: 664296 - DNA, 15 bp, Homo sapiens
gtgaatcattttcgc

SEQ ID NO: 664297 - DNA, 15 bp, Homo sapiens
tgaatcattttcgcc

SEQ ID NO: 664298 - DNA, 15 bp, Homo sapiens
gaatcattttcgcct

SEQ ID NO: 664299 - DNA, 15 bp, Homo sapiens
aatcattttcgcctt

SEQ ID NO: 664300 - DNA, 15 bp, Homo sapiens
atcattttcgccttt

SEQ ID NO: 664301 - DNA, 15 bp, Homo sapiens
tcattttcgccttta

SEQ ID NO: 664302 - DNA, 15 bp, Homo sapiens
cattttcgcctttag

SEQ ID NO: 664303 - DNA, 15 bp, Homo sapiens
attttcgcctttagc

SEQ ID NO: 664304 - DNA, 15 bp, Homo sapiens
ttttcgcctttagcc

SEQ ID NO: 664305 - DNA, 15 bp, Homo sapiens
tttcgcctttagcct

SEQ ID NO: 664306 - DNA, 15 bp, Homo sapiens
ttcgcctttagcctg

SEQ ID NO: 664307 - DNA, 15 bp, Homo sapiens
tcgcctttagcctga

SEQ ID NO: 664308 - DNA, 15 bp, Homo sapiens
cgcctttagcctgaa

SEQ ID NO: 664309 - DNA, 15 bp, Homo sapiens
gcctttagcctgaaa

SEQ ID NO: 664310 - DNA, 15 bp, Homo sapiens
cctttagcctgaaat

SEQ ID NO: 664311 - DNA, 15 bp, Homo sapiens
ctttagcctgaaata

SEQ ID NO: 664312 - DNA, 15 bp, Homo sapiens
tttagcctgaaatag

SEQ ID NO: 664313 - DNA, 15 bp, Homo sapiens
ttagcctgaaatagt

SEQ ID NO: 664314 - DNA, 15 bp, Homo sapiens
tagcctgaaatagtt

SEQ ID NO: 664315 - DNA, 15 bp, Homo sapiens
agcctgaaatagttt

SEQ ID NO: 664316 - DNA, 15 bp, Homo sapiens
gcctgaaatagttta

SEQ ID NO: 664317 - DNA, 15 bp, Homo sapiens
cctgaaatagtttat

SEQ ID NO: 664318 - DNA, 15 bp, Homo sapiens
ctgaaatagtttatg

SEQ ID NO: 664319 - DNA, 15 bp, Homo sapiens
tgaaatagtttatga

SEQ ID NO: 664320 - DNA, 15 bp, Homo sapiens
gaaatagtttatgag

SEQ ID NO: 664321 - DNA, 15 bp, Homo sapiens
aaatagtttatgagg

SEQ ID NO: 664322 - DNA, 15 bp, Homo sapiens
aatagtttatgaggc

SEQ ID NO: 664323 - DNA, 15 bp, Homo sapiens
atagtttatgaggct

SEQ ID NO: 664324 - DNA, 15 bp, Homo sapiens
tagtttatgaggcta

SEQ ID NO: 664325 - DNA, 15 bp, Homo sapiens
agtttatgaggctat

SEQ ID NO: 664326 - DNA, 15 bp, Homo sapiens
gtttatgaggctatt

SEQ ID NO: 664327 - DNA, 15 bp, Homo sapiens
tttatgaggctatta

SEQ ID NO: 664328 - DNA, 15 bp, Homo sapiens
ttatgaggctattac

SEQ ID NO: 664329 - DNA, 15 bp, Homo sapiens
tatgaggctattacg

SEQ ID NO: 664330 - DNA, 15 bp, Homo sapiens
atgaggctattacgg

SEQ ID NO: 664331 - DNA, 15 bp, Homo sapiens
tgaggctattacggt

SEQ ID NO: 664332 - DNA, 15 bp, Homo sapiens
gaggctattacggtc

SEQ ID NO: 664333 - DNA, 15 bp, Homo sapiens
aggctattacggtct

SEQ ID NO: 664334 - DNA, 15 bp, Homo sapiens
ggctattacggtctc

SEQ ID NO: 664335 - DNA, 15 bp, Homo sapiens
gctattacggtctct

SEQ ID NO: 664336 - DNA, 15 bp, Homo sapiens
ctattacggtctctg

SEQ ID NO: 664337 - DNA, 15 bp, Homo sapiens
tattacggtctctga

SEQ ID NO: 664338 - DNA, 15 bp, Homo sapiens
attacggtctctgag

SEQ ID NO: 664339 - DNA, 15 bp, Homo sapiens
ttacggtctctgagt

SEQ ID NO: 664340 - DNA, 15 bp, Homo sapiens
tacggtctctgagtt

SEQ ID NO: 664341 - DNA, 15 bp, Homo sapiens
acggtctctgagttc

SEQ ID NO: 664342 - DNA, 15 bp, Homo sapiens
cggtctctgagttca

SEQ ID NO: 664343 - DNA, 15 bp, Homo sapiens
ggtctctgagttcat

SEQ ID NO: 664344 - DNA, 15 bp, Homo sapiens
gtctctgagttcata

SEQ ID NO: 664345 - DNA, 15 bp, Homo sapiens
tctctgagttcatac

SEQ ID NO: 664346 - DNA, 15 bp, Homo sapiens
ctctgagttcatacc

SEQ ID NO: 664347 - DNA, 15 bp, Homo sapiens
tctgagttcatacca

SEQ ID NO: 664348 - DNA, 15 bp, Homo sapiens
ctgagttcataccag

SEQ ID NO: 664349 - DNA, 15 bp, Homo sapiens
tgagttcataccagg

SEQ ID NO: 664350 - DNA, 15 bp, Homo sapiens
gagttcataccaggc

SEQ ID NO: 664351 - DNA, 15 bp, Homo sapiens
agttcataccaggct

SEQ ID NO: 664352 - DNA, 15 bp, Homo sapiens
gttcataccaggcta

SEQ ID NO: 664353 - DNA, 15 bp, Homo sapiens
ttcataccaggctac

SEQ ID NO: 664354 - DNA, 15 bp, Homo sapiens
tcataccaggctacc

SEQ ID NO: 664355 - DNA, 15 bp, Homo sapiens
cataccaggctaccc

SEQ ID NO: 664356 - DNA, 15 bp, Homo sapiens
ataccaggctaccca

SEQ ID NO: 664357 - DNA, 15 bp, Homo sapiens
taccaggctacccag

SEQ ID NO: 664358 - DNA, 15 bp, Homo sapiens
accaggctacccaga

SEQ ID NO: 664359 - DNA, 15 bp, Homo sapiens
ccaggctacccagaa

SEQ ID NO: 664360 - DNA, 15 bp, Homo sapiens
caggctacccagaaa

SEQ ID NO: 664361 - DNA, 15 bp, Homo sapiens
aggctacccagaaaa

SEQ ID NO: 664362 - DNA, 15 bp, Homo sapiens
ggctacccagaaaaa

SEQ ID NO: 664363 - DNA, 15 bp, Homo sapiens
gctacccagaaaaaa

SEQ ID NO: 664364 - DNA, 15 bp, Homo sapiens
ctacccagaaaaaat

SEQ ID NO: 664365 - DNA, 15 bp, Homo sapiens
tacccagaaaaaatt

SEQ ID NO: 664366 - DNA, 15 bp, Homo sapiens
acccagaaaaaattg

SEQ ID NO: 664367 - DNA, 15 bp, Homo sapiens
cccagaaaaaattga

SEQ ID NO: 664368 - DNA, 15 bp, Homo sapiens
ccagaaaaaattgac

SEQ ID NO: 664369 - DNA, 15 bp, Homo sapiens
cagaaaaaattgacc

SEQ ID NO: 664370 - DNA, 15 bp, Homo sapiens
agaaaaaattgacct

SEQ ID NO: 664371 - DNA, 15 bp, Homo sapiens
gaaaaaattgacctg

SEQ ID NO: 664372 - DNA, 15 bp, Homo sapiens
aaaaaattgacctgt

SEQ ID NO: 664373 - DNA, 15 bp, Homo sapiens
aaaaattgacctgtg

SEQ ID NO: 664374 - DNA, 15 bp, Homo sapiens
aaaattgacctgtgt

SEQ ID NO: 664375 - DNA, 15 bp, Homo sapiens
aaattgacctgtgtc

SEQ ID NO: 664376 - DNA, 15 bp, Homo sapiens
aattgacctgtgtca

SEQ ID NO: 664377 - DNA, 15 bp, Homo sapiens
attgacctgtgtcaa

SEQ ID NO: 664378 - DNA, 15 bp, Homo sapiens
ttgacctgtgtcaag

SEQ ID NO: 664379 - DNA, 15 bp, Homo sapiens
tgacctgtgtcaagt

SEQ ID NO: 664380 - DNA, 15 bp, Homo sapiens
gacctgtgtcaagtg

SEQ ID NO: 664381 - DNA, 15 bp, Homo sapiens
acctgtgtcaagtga

SEQ ID NO: 664382 - DNA, 15 bp, Homo sapiens
cctgtgtcaagtgat

SEQ ID NO: 664383 - DNA, 15 bp, Homo sapiens
ctgtgtcaagtgatc

SEQ ID NO: 664384 - DNA, 15 bp, Homo sapiens
tgtgtcaagtgatca

SEQ ID NO: 664385 - DNA, 15 bp, Homo sapiens
gtgtcaagtgatcac

SEQ ID NO: 664386 - DNA, 15 bp, Homo sapiens
tgtcaagtgatcacc

SEQ ID NO: 664387 - DNA, 15 bp, Homo sapiens
gtcaagtgatcaccc

SEQ ID NO: 664388 - DNA, 15 bp, Homo sapiens
tcaagtgatcaccca

SEQ ID NO: 664389 - DNA, 15 bp, Homo sapiens
caagtgatcacccag

SEQ ID NO: 664390 - DNA, 15 bp, Homo sapiens
aagtgatcacccaga

SEQ ID NO: 664391 - DNA, 15 bp, Homo sapiens
agtgatcacccagag

SEQ ID NO: 664392 - DNA, 15 bp, Homo sapiens
gtgatcacccagagg

SEQ ID NO: 664393 - DNA, 15 bp, Homo sapiens
tgatcacccagaggg

SEQ ID NO: 664394 - DNA, 15 bp, Homo sapiens
gatcacccagaggga

SEQ ID NO: 664395 - DNA, 15 bp, Homo sapiens
atcacccagagggac

SEQ ID NO: 664396 - DNA, 15 bp, Homo sapiens
tcacccagagggaca

SEQ ID NO: 664397 - DNA, 15 bp, Homo sapiens
cacccagagggacaa

SEQ ID NO: 664398 - DNA, 15 bp, Homo sapiens
acccagagggacaaa

SEQ ID NO: 664399 - DNA, 15 bp, Homo sapiens
cccagagggacaaat

SEQ ID NO: 664400 - DNA, 15 bp, Homo sapiens
ccagagggacaaatt

SEQ ID NO: 664401 - DNA, 15 bp, Homo sapiens
cagagggacaaattt

SEQ ID NO: 664402 - DNA, 15 bp, Homo sapiens
agagggacaaattta

SEQ ID NO: 664403 - DNA, 15 bp, Homo sapiens
gagggacaaatttat

SEQ ID NO: 664404 - DNA, 15 bp, Homo sapiens
agggacaaatttatc

SEQ ID NO: 664405 - DNA, 15 bp, Homo sapiens
gggacaaatttatca

SEQ ID NO: 664406 - DNA, 15 bp, Homo sapiens
ggacaaatttatcag

SEQ ID NO: 664407 - DNA, 15 bp, Homo sapiens
gacaaatttatcagt

SEQ ID NO: 664408 - DNA, 15 bp, Homo sapiens
acaaatttatcagtc

SEQ ID NO: 664409 - DNA, 15 bp, Homo sapiens
caaatttatcagtct

SEQ ID NO: 664410 - DNA, 15 bp, Homo sapiens
aaatttatcagtctc

SEQ ID NO: 664411 - DNA, 15 bp, Homo sapiens
aatttatcagtctct

SEQ ID NO: 664412 - DNA, 15 bp, Homo sapiens
atttatcagtctctg

SEQ ID NO: 664413 - DNA, 15 bp, Homo sapiens
tttatcagtctctgt

SEQ ID NO: 664414 - DNA, 15 bp, Homo sapiens
ttatcagtctctgta

SEQ ID NO: 664415 - DNA, 15 bp, Homo sapiens
tatcagtctctgtag

SEQ ID NO: 664416 - DNA, 15 bp, Homo sapiens
atcagtctctgtagt

SEQ ID NO: 664417 - DNA, 15 bp, Homo sapiens
tcagtctctgtagtt

SEQ ID NO: 664418 - DNA, 15 bp, Homo sapiens
cagtctctgtagttt

SEQ ID NO: 664419 - DNA, 15 bp, Homo sapiens
agtctctgtagtttg

SEQ ID NO: 664420 - DNA, 15 bp, Homo sapiens
gtctctgtagtttgt

SEQ ID NO: 664421 - DNA, 15 bp, Homo sapiens
tctctgtagtttgtc

SEQ ID NO: 664422 - DNA, 15 bp, Homo sapiens
ctctgtagtttgtcc

SEQ ID NO: 664423 - DNA, 15 bp, Homo sapiens
tctgtagtttgtcct

SEQ ID NO: 664424 - DNA, 15 bp, Homo sapiens
ctgtagtttgtcctc

SEQ ID NO: 664425 - DNA, 15 bp, Homo sapiens
tgtagtttgtcctca

SEQ ID NO: 664426 - DNA, 15 bp, Homo sapiens
gtagtttgtcctcaa

SEQ ID NO: 664427 - DNA, 15 bp, Homo sapiens
tagtttgtcctcaag

SEQ ID NO: 664428 - DNA, 15 bp, Homo sapiens
agtttgtcctcaagc

SEQ ID NO: 664429 - DNA, 15 bp, Homo sapiens
gtttgtcctcaagct

SEQ ID NO: 664430 - DNA, 15 bp, Homo sapiens
tttgtcctcaagctg

SEQ ID NO: 664431 - DNA, 15 bp, Homo sapiens
ttgtcctcaagctgc

SEQ ID NO: 664432 - DNA, 15 bp, Homo sapiens
tgtcctcaagctgct

SEQ ID NO: 664433 - DNA, 15 bp, Homo sapiens
gtcctcaagctgcta

SEQ ID NO: 664434 - DNA, 15 bp, Homo sapiens
tcctcaagctgctag

SEQ ID NO: 664435 - DNA, 15 bp, Homo sapiens
cctcaagctgctagg

SEQ ID NO: 664436 - DNA, 15 bp, Homo sapiens
ctcaagctgctaggg

SEQ ID NO: 664437 - DNA, 15 bp, Homo sapiens
tcaagctgctagggg

SEQ ID NO: 664438 - DNA, 15 bp, Homo sapiens
caagctgctaggggc

SEQ ID NO: 664439 - DNA, 15 bp, Homo sapiens
aagctgctaggggct

SEQ ID NO: 664440 - DNA, 15 bp, Homo sapiens
agctgctaggggctt

SEQ ID NO: 664441 - DNA, 15 bp, Homo sapiens
gctgctaggggcttg

SEQ ID NO: 664442 - DNA, 15 bp, Homo sapiens
ctgctaggggcttga

SEQ ID NO: 664443 - DNA, 15 bp, Homo sapiens
tgctaggggcttgat

SEQ ID NO: 664444 - DNA, 15 bp, Homo sapiens
gctaggggcttgatt

SEQ ID NO: 664445 - DNA, 15 bp, Homo sapiens
ctaggggcttgatta

SEQ ID NO: 664446 - DNA, 15 bp, Homo sapiens
taggggcttgattag

SEQ ID NO: 664447 - DNA, 15 bp, Homo sapiens
aggggcttgattagc

SEQ ID NO: 664448 - DNA, 15 bp, Homo sapiens
ggggcttgattagct

SEQ ID NO: 664449 - DNA, 15 bp, Homo sapiens
gggcttgattagcta

SEQ ID NO: 664450 - DNA, 15 bp, Homo sapiens
ggcttgattagctaa

SEQ ID NO: 664451 - DNA, 15 bp, Homo sapiens
gcttgattagctaac

SEQ ID NO: 664452 - DNA, 15 bp, Homo sapiens
cttgattagctaact

SEQ ID NO: 664453 - DNA, 15 bp, Homo sapiens
ttgattagctaactg

SEQ ID NO: 664454 - DNA, 15 bp, Homo sapiens
tgattagctaactga

SEQ ID NO: 664455 - DNA, 15 bp, Homo sapiens
gattagctaactgaa

SEQ ID NO: 664456 - DNA, 15 bp, Homo sapiens
attagctaactgaaa

SEQ ID NO: 664457 - DNA, 15 bp, Homo sapiens
ttagctaactgaaaa

SEQ ID NO: 664458 - DNA, 15 bp, Homo sapiens
tagctaactgaaaac

SEQ ID NO: 664459 - DNA, 15 bp, Homo sapiens
agctaactgaaaaca

SEQ ID NO: 664460 - DNA, 15 bp, Homo sapiens
gctaactgaaaacat

SEQ ID NO: 664461 - DNA, 15 bp, Homo sapiens
ctaactgaaaacatg

SEQ ID NO: 664462 - DNA, 15 bp, Homo sapiens
taactgaaaacatgc

SEQ ID NO: 664463 - DNA, 15 bp, Homo sapiens
aactgaaaacatgcc

SEQ ID NO: 664464 - DNA, 15 bp, Homo sapiens
actgaaaacatgcct

SEQ ID NO: 664465 - DNA, 15 bp, Homo sapiens
ctgaaaacatgccta

SEQ ID NO: 664466 - DNA, 15 bp, Homo sapiens
tgaaaacatgcctac

SEQ ID NO: 664467 - DNA, 15 bp, Homo sapiens
gaaaacatgcctacc

SEQ ID NO: 664468 - DNA, 15 bp, Homo sapiens
aaaacatgcctacct

SEQ ID NO: 664469 - DNA, 15 bp, Homo sapiens
aaacatgcctacctg

SEQ ID NO: 664470 - DNA, 15 bp, Homo sapiens
aacatgcctacctga

SEQ ID NO: 664471 - DNA, 15 bp, Homo sapiens
acatgcctacctgat

SEQ ID NO: 664472 - DNA, 15 bp, Homo sapiens
catgcctacctgatg

SEQ ID NO: 664473 - DNA, 15 bp, Homo sapiens
atgcctacctgatgc

SEQ ID NO: 664474 - DNA, 15 bp, Homo sapiens
tgcctacctgatgct

SEQ ID NO: 664475 - DNA, 15 bp, Homo sapiens
gcctacctgatgctt

SEQ ID NO: 664476 - DNA, 15 bp, Homo sapiens
cctacctgatgctta

SEQ ID NO: 664477 - DNA, 15 bp, Homo sapiens
ctacctgatgcttaa

SEQ ID NO: 664478 - DNA, 15 bp, Homo sapiens
tacctgatgcttaaa

SEQ ID NO: 664479 - DNA, 15 bp, Homo sapiens
acctgatgcttaaac

SEQ ID NO: 664480 - DNA, 15 bp, Homo sapiens
cctgatgcttaaact

SEQ ID NO: 664481 - DNA, 15 bp, Homo sapiens
ctgatgcttaaactg

SEQ ID NO: 664482 - DNA, 15 bp, Homo sapiens
tgatgcttaaactga

SEQ ID NO: 664483 - DNA, 15 bp, Homo sapiens
gatgcttaaactgaa

SEQ ID NO: 664484 - DNA, 15 bp, Homo sapiens
atgcttaaactgaag

SEQ ID NO: 664485 - DNA, 15 bp, Homo sapiens
tgcttaaactgaagc

SEQ ID NO: 664486 - DNA, 15 bp, Homo sapiens
gcttaaactgaagca

SEQ ID NO: 664487 - DNA, 15 bp, Homo sapiens
cttaaactgaagcat

SEQ ID NO: 664488 - DNA, 15 bp, Homo sapiens
ttaaactgaagcatt

SEQ ID NO: 664489 - DNA, 15 bp, Homo sapiens
taaactgaagcatta

SEQ ID NO: 664490 - DNA, 15 bp, Homo sapiens
aaactgaagcattat

SEQ ID NO: 664491 - DNA, 15 bp, Homo sapiens
aactgaagcattatt

SEQ ID NO: 664492 - DNA, 15 bp, Homo sapiens
actgaagcattattt

SEQ ID NO: 664493 - DNA, 15 bp, Homo sapiens
ctgaagcattatttt

SEQ ID NO: 664494 - DNA, 15 bp, Homo sapiens
tgaagcattatttta

SEQ ID NO: 664495 - DNA, 15 bp, Homo sapiens
gaagcattattttag

SEQ ID NO: 664496 - DNA, 15 bp, Homo sapiens
aagcattattttagc

SEQ ID NO: 664497 - DNA, 15 bp, Homo sapiens
agcattattttagcc

SEQ ID NO: 664498 - DNA, 15 bp, Homo sapiens
gcattattttagcct

SEQ ID NO: 664499 - DNA, 15 bp, Homo sapiens
cattattttagcctg

SEQ ID NO: 664500 - DNA, 15 bp, Homo sapiens
attattttagcctgt

SEQ ID NO: 664501 - DNA, 15 bp, Homo sapiens
ttattttagcctgtt

SEQ ID NO: 664502 - DNA, 15 bp, Homo sapiens
tattttagcctgtta

SEQ ID NO: 664503 - DNA, 15 bp, Homo sapiens
attttagcctgttaa

SEQ ID NO: 664504 - DNA, 15 bp, Homo sapiens
ttttagcctgttaat

SEQ ID NO: 664505 - DNA, 15 bp, Homo sapiens
tttagcctgttaatg

SEQ ID NO: 664506 - DNA, 15 bp, Homo sapiens
ttagcctgttaatgt

SEQ ID NO: 664507 - DNA, 15 bp, Homo sapiens
tagcctgttaatgtg

SEQ ID NO: 664508 - DNA, 15 bp, Homo sapiens
agcctgttaatgtgg

SEQ ID NO: 664509 - DNA, 15 bp, Homo sapiens
gcctgttaatgtggt

SEQ ID NO: 664510 - DNA, 15 bp, Homo sapiens
cctgttaatgtggtt

SEQ ID NO: 664511 - DNA, 15 bp, Homo sapiens
ctgttaatgtggttg

SEQ ID NO: 664512 - DNA, 15 bp, Homo sapiens
tgttaatgtggttgt

SEQ ID NO: 664513 - DNA, 15 bp, Homo sapiens
gttaatgtggttgtg

SEQ ID NO: 664514 - DNA, 15 bp, Homo sapiens
ttaatgtggttgtgc

SEQ ID NO: 664515 - DNA, 15 bp, Homo sapiens
taatgtggttgtgca

SEQ ID NO: 664516 - DNA, 15 bp, Homo sapiens
aatgtggttgtgcag

SEQ ID NO: 664517 - DNA, 15 bp, Homo sapiens
atgtggttgtgcagt

SEQ ID NO: 664518 - DNA, 15 bp, Homo sapiens
tgtggttgtgcagta

SEQ ID NO: 664519 - DNA, 15 bp, Homo sapiens
gtggttgtgcagtaa

SEQ ID NO: 664520 - DNA, 15 bp, Homo sapiens
tggttgtgcagtaac

SEQ ID NO: 664521 - DNA, 15 bp, Homo sapiens
ggttgtgcagtaacc

SEQ ID NO: 664522 - DNA, 15 bp, Homo sapiens
gttgtgcagtaacct

SEQ ID NO: 664523 - DNA, 15 bp, Homo sapiens
ttgtgcagtaacctt

SEQ ID NO: 664524 - DNA, 15 bp, Homo sapiens
tgtgcagtaaccttg

SEQ ID NO: 664525 - DNA, 15 bp, Homo sapiens
gtgcagtaaccttgc

SEQ ID NO: 664526 - DNA, 15 bp, Homo sapiens
tgcagtaaccttgct

SEQ ID NO: 664527 - DNA, 15 bp, Homo sapiens
gcagtaaccttgctg

SEQ ID NO: 664528 - DNA, 15 bp, Homo sapiens
cagtaaccttgctgt

SEQ ID NO: 664529 - DNA, 15 bp, Homo sapiens
agtaaccttgctgta

SEQ ID NO: 664530 - DNA, 15 bp, Homo sapiens
gtaaccttgctgtat

SEQ ID NO: 664531 - DNA, 15 bp, Homo sapiens
taaccttgctgtatt

SEQ ID NO: 664532 - DNA, 15 bp, Homo sapiens
aaccttgctgtattt

SEQ ID NO: 664533 - DNA, 15 bp, Homo sapiens
accttgctgtatttc

SEQ ID NO: 664534 - DNA, 15 bp, Homo sapiens
ccttgctgtatttct

SEQ ID NO: 664535 - DNA, 15 bp, Homo sapiens
cttgctgtatttctt

SEQ ID NO: 664536 - DNA, 15 bp, Homo sapiens
ttgctgtatttcttc

SEQ ID NO: 664537 - DNA, 15 bp, Homo sapiens
tgctgtatttcttct

SEQ ID NO: 664538 - DNA, 15 bp, Homo sapiens
gctgtatttcttcta

SEQ ID NO: 664539 - DNA, 15 bp, Homo sapiens
ctgtatttcttctaa

SEQ ID NO: 664540 - DNA, 15 bp, Homo sapiens
tgtatttcttctaag

SEQ ID NO: 664541 - DNA, 15 bp, Homo sapiens
gtatttcttctaagc

SEQ ID NO: 664542 - DNA, 15 bp, Homo sapiens
tatttcttctaagca

SEQ ID NO: 664543 - DNA, 15 bp, Homo sapiens
atttcttctaagcac

SEQ ID NO: 664544 - DNA, 15 bp, Homo sapiens
tttcttctaagcacc

SEQ ID NO: 664545 - DNA, 15 bp, Homo sapiens
ttcttctaagcacca

SEQ ID NO: 664546 - DNA, 15 bp, Homo sapiens
tcttctaagcaccat

SEQ ID NO: 664547 - DNA, 15 bp, Homo sapiens
cttctaagcaccatt

SEQ ID NO: 664548 - DNA, 15 bp, Homo sapiens
ttctaagcaccattg

SEQ ID NO: 664549 - DNA, 15 bp, Homo sapiens
tctaagcaccattgt

SEQ ID NO: 664550 - DNA, 15 bp, Homo sapiens
ctaagcaccattgta

SEQ ID NO: 664551 - DNA, 15 bp, Homo sapiens
taagcaccattgtat

SEQ ID NO: 664552 - DNA, 15 bp, Homo sapiens
aagcaccattgtatt

SEQ ID NO: 664553 - DNA, 15 bp, Homo sapiens
agcaccattgtattt

SEQ ID NO: 664554 - DNA, 15 bp, Homo sapiens
gcaccattgtatttt

SEQ ID NO: 664555 - DNA, 15 bp, Homo sapiens
caccattgtattttt

SEQ ID NO: 664556 - DNA, 15 bp, Homo sapiens
accattgtatttttt

SEQ ID NO: 664557 - DNA, 15 bp, Homo sapiens
ccattgtattttttc

SEQ ID NO: 664558 - DNA, 15 bp, Homo sapiens
cattgtattttttca

SEQ ID NO: 664559 - DNA, 15 bp, Homo sapiens
attgtattttttcat

SEQ ID NO: 664560 - DNA, 15 bp, Homo sapiens
ttgtattttttcata

SEQ ID NO: 664561 - DNA, 15 bp, Homo sapiens
tgtattttttcatag

SEQ ID NO: 664562 - DNA, 15 bp, Homo sapiens
gtattttttcataga

SEQ ID NO: 664563 - DNA, 15 bp, Homo sapiens
tattttttcatagaa

SEQ ID NO: 664564 - DNA, 15 bp, Homo sapiens
attttttcatagaaa

SEQ ID NO: 664565 - DNA, 15 bp, Homo sapiens
ttttttcatagaaaa

SEQ ID NO: 664566 - DNA, 15 bp, Homo sapiens
tttttcatagaaaat

SEQ ID NO: 664567 - DNA, 15 bp, Homo sapiens
ttttcatagaaaatt

SEQ ID NO: 664568 - DNA, 15 bp, Homo sapiens
tttcatagaaaattt

SEQ ID NO: 664569 - DNA, 15 bp, Homo sapiens
ttcatagaaaattta

SEQ ID NO: 664570 - DNA, 15 bp, Homo sapiens
tcatagaaaatttag

SEQ ID NO: 664571 - DNA, 15 bp, Homo sapiens
catagaaaatttagt

SEQ ID NO: 664572 - DNA, 15 bp, Homo sapiens
atagaaaatttagtt

SEQ ID NO: 664573 - DNA, 15 bp, Homo sapiens
tagaaaatttagttt

SEQ ID NO: 664574 - DNA, 15 bp, Homo sapiens
agaaaatttagtttt

SEQ ID NO: 664575 - DNA, 15 bp, Homo sapiens
gaaaatttagttttg

SEQ ID NO: 664576 - DNA, 15 bp, Homo sapiens
aaaatttagttttgc

SEQ ID NO: 664577 - DNA, 15 bp, Homo sapiens
aaatttagttttgcc

SEQ ID NO: 664578 - DNA, 15 bp, Homo sapiens
aatttagttttgcca

SEQ ID NO: 664579 - DNA, 15 bp, Homo sapiens
atttagttttgccat

SEQ ID NO: 664580 - DNA, 15 bp, Homo sapiens
tttagttttgccatg

SEQ ID NO: 664581 - DNA, 15 bp, Homo sapiens
ttagttttgccatgt

SEQ ID NO: 664582 - DNA, 15 bp, Homo sapiens
tagttttgccatgta

SEQ ID NO: 664583 - DNA, 15 bp, Homo sapiens
agttttgccatgtag

SEQ ID NO: 664584 - DNA, 15 bp, Homo sapiens
gttttgccatgtaga

SEQ ID NO: 664585 - DNA, 15 bp, Homo sapiens
ttttgccatgtagaa

SEQ ID NO: 664586 - DNA, 15 bp, Homo sapiens
tttgccatgtagaat

SEQ ID NO: 664587 - DNA, 15 bp, Homo sapiens
ttgccatgtagaatt

SEQ ID NO: 664588 - DNA, 15 bp, Homo sapiens
tgccatgtagaattg

SEQ ID NO: 664589 - DNA, 15 bp, Homo sapiens
gccatgtagaattga

SEQ ID NO: 664590 - DNA, 15 bp, Homo sapiens
ccatgtagaattgaa

SEQ ID NO: 664591 - DNA, 15 bp, Homo sapiens
catgtagaattgaaa

SEQ ID NO: 664592 - DNA, 15 bp, Homo sapiens
atgtagaattgaaaa

SEQ ID NO: 664593 - DNA, 15 bp, Homo sapiens
tgtagaattgaaaaa

SEQ ID NO: 664594 - DNA, 15 bp, Homo sapiens
gtagaattgaaaaag

SEQ ID NO: 664595 - DNA, 15 bp, Homo sapiens
tagaattgaaaaagt

SEQ ID NO: 664596 - DNA, 15 bp, Homo sapiens
agaattgaaaaagtg

SEQ ID NO: 664597 - DNA, 15 bp, Homo sapiens
gaattgaaaaagtga

SEQ ID NO: 664598 - DNA, 15 bp, Homo sapiens
aattgaaaaagtgat

SEQ ID NO: 664599 - DNA, 15 bp, Homo sapiens
attgaaaaagtgata

SEQ ID NO: 664600 - DNA, 15 bp, Homo sapiens
ttgaaaaagtgatag

SEQ ID NO: 664601 - DNA, 15 bp, Homo sapiens
tgaaaaagtgataga

SEQ ID NO: 664602 - DNA, 15 bp, Homo sapiens
gaaaaagtgatagat

SEQ ID NO: 664603 - DNA, 15 bp, Homo sapiens
aaaaagtgatagatg

SEQ ID NO: 664604 - DNA, 15 bp, Homo sapiens
aaaagtgatagatgg

SEQ ID NO: 664605 - DNA, 15 bp, Homo sapiens
aaagtgatagatggt

SEQ ID NO: 664606 - DNA, 15 bp, Homo sapiens
aagtgatagatggtg

SEQ ID NO: 664607 - DNA, 15 bp, Homo sapiens
agtgatagatggtgt

SEQ ID NO: 664608 - DNA, 15 bp, Homo sapiens
gtgatagatggtgtt

SEQ ID NO: 664609 - DNA, 15 bp, Homo sapiens
tgatagatggtgtta

SEQ ID NO: 664610 - DNA, 15 bp, Homo sapiens
gatagatggtgttac

SEQ ID NO: 664611 - DNA, 15 bp, Homo sapiens
atagatggtgttact

SEQ ID NO: 664612 - DNA, 15 bp, Homo sapiens
tagatggtgttactt

SEQ ID NO: 664613 - DNA, 15 bp, Homo sapiens
agatggtgttacttc

SEQ ID NO: 664614 - DNA, 15 bp, Homo sapiens
gatggtgttacttcc

SEQ ID NO: 664615 - DNA, 15 bp, Homo sapiens
atggtgttacttcca

SEQ ID NO: 664616 - DNA, 15 bp, Homo sapiens
tggtgttacttccaa

SEQ ID NO: 664617 - DNA, 15 bp, Homo sapiens
ggtgttacttccaat

SEQ ID NO: 664618 - DNA, 15 bp, Homo sapiens
gtgttacttccaatg

SEQ ID NO: 664619 - DNA, 15 bp, Homo sapiens
tgttacttccaatgg

SEQ ID NO: 664620 - DNA, 15 bp, Homo sapiens
gttacttccaatgga

SEQ ID NO: 664621 - DNA, 15 bp, Homo sapiens
ttacttccaatggaa

SEQ ID NO: 664622 - DNA, 15 bp, Homo sapiens
tacttccaatggaag

SEQ ID NO: 664623 - DNA, 15 bp, Homo sapiens
acttccaatggaagt

SEQ ID NO: 664624 - DNA, 15 bp, Homo sapiens
cttccaatggaagta

SEQ ID NO: 664625 - DNA, 15 bp, Homo sapiens
ttccaatggaagtac

SEQ ID NO: 664626 - DNA, 15 bp, Homo sapiens
tccaatggaagtact

SEQ ID NO: 664627 - DNA, 15 bp, Homo sapiens
ccaatggaagtactt

SEQ ID NO: 664628 - DNA, 15 bp, Homo sapiens
caatggaagtactta

SEQ ID NO: 664629 - DNA, 15 bp, Homo sapiens
aatggaagtacttac

SEQ ID NO: 664630 - DNA, 15 bp, Homo sapiens
atggaagtacttaca

SEQ ID NO: 664631 - DNA, 15 bp, Homo sapiens
tggaagtacttacac

SEQ ID NO: 664632 - DNA, 15 bp, Homo sapiens
ggaagtacttacaca

SEQ ID NO: 664633 - DNA, 15 bp, Homo sapiens
gaagtacttacacac

SEQ ID NO: 664634 - DNA, 15 bp, Homo sapiens
aagtacttacacacg

SEQ ID NO: 664635 - DNA, 15 bp, Homo sapiens
agtacttacacacgc

SEQ ID NO: 664636 - DNA, 15 bp, Homo sapiens
gtacttacacacgca

SEQ ID NO: 664637 - DNA, 15 bp, Homo sapiens
tacttacacacgcaa

SEQ ID NO: 664638 - DNA, 15 bp, Homo sapiens
acttacacacgcaat

SEQ ID NO: 664639 - DNA, 15 bp, Homo sapiens
cttacacacgcaata

SEQ ID NO: 664640 - DNA, 15 bp, Homo sapiens
ttacacacgcaatag

SEQ ID NO: 664641 - DNA, 15 bp, Homo sapiens
tacacacgcaataga

SEQ ID NO: 664642 - DNA, 15 bp, Homo sapiens
acacacgcaatagaa

SEQ ID NO: 664643 - DNA, 15 bp, Homo sapiens
cacacgcaatagaaa

SEQ ID NO: 664644 - DNA, 15 bp, Homo sapiens
acacgcaatagaaaa

SEQ ID NO: 664645 - DNA, 15 bp, Homo sapiens
cacgcaatagaaaaa

SEQ ID NO: 664646 - DNA, 15 bp, Homo sapiens
acgcaatagaaaaat

SEQ ID NO: 664647 - DNA, 15 bp, Homo sapiens
cgcaatagaaaaata

SEQ ID NO: 664648 - DNA, 15 bp, Homo sapiens
gcaatagaaaaatat

SEQ ID NO: 664649 - DNA, 15 bp, Homo sapiens
caatagaaaaatatg

SEQ ID NO: 664650 - DNA, 15 bp, Homo sapiens
aatagaaaaatatgg

SEQ ID NO: 664651 - DNA, 15 bp, Homo sapiens
atagaaaaatatggt

SEQ ID NO: 664652 - DNA, 15 bp, Homo sapiens
tagaaaaatatggtt

SEQ ID NO: 664653 - DNA, 15 bp, Homo sapiens
agaaaaatatggttt

SEQ ID NO: 664654 - DNA, 15 bp, Homo sapiens
gaaaaatatggtttt

SEQ ID NO: 664655 - DNA, 15 bp, Homo sapiens
aaaaatatggttttc

SEQ ID NO: 664656 - DNA, 15 bp, Homo sapiens
aaaatatggttttca

SEQ ID NO: 664657 - DNA, 15 bp, Homo sapiens
aaatatggttttcat

SEQ ID NO: 664658 - DNA, 15 bp, Homo sapiens
aatatggttttcatc

SEQ ID NO: 664659 - DNA, 15 bp, Homo sapiens
atatggttttcatca

SEQ ID NO: 664660 - DNA, 15 bp, Homo sapiens
tatggttttcatcag

SEQ ID NO: 664661 - DNA, 15 bp, Homo sapiens
atggttttcatcagc

SEQ ID NO: 664662 - DNA, 15 bp, Homo sapiens
tggttttcatcagct

SEQ ID NO: 664663 - DNA, 15 bp, Homo sapiens
ggttttcatcagctg

SEQ ID NO: 664664 - DNA, 15 bp, Homo sapiens
gttttcatcagctgg

SEQ ID NO: 664665 - DNA, 15 bp, Homo sapiens
ttttcatcagctggc

SEQ ID NO: 664666 - DNA, 15 bp, Homo sapiens
tttcatcagctggct

SEQ ID NO: 664667 - DNA, 15 bp, Homo sapiens
ttcatcagctggctg

SEQ ID NO: 664668 - DNA, 15 bp, Homo sapiens
tcatcagctggctgt

SEQ ID NO: 664669 - DNA, 15 bp, Homo sapiens
catcagctggctgtt

SEQ ID NO: 664670 - DNA, 15 bp, Homo sapiens
atcagctggctgttt

SEQ ID NO: 664671 - DNA, 15 bp, Homo sapiens
tcagctggctgttta

SEQ ID NO: 664672 - DNA, 15 bp, Homo sapiens
cagctggctgtttag

SEQ ID NO: 664673 - DNA, 15 bp, Homo sapiens
agctggctgtttagg

SEQ ID NO: 664674 - DNA, 15 bp, Homo sapiens
gctggctgtttaggc

SEQ ID NO: 664675 - DNA, 15 bp, Homo sapiens
ctggctgtttaggca

SEQ ID NO: 664676 - DNA, 15 bp, Homo sapiens
tggctgtttaggcag

SEQ ID NO: 664677 - DNA, 15 bp, Homo sapiens
ggctgtttaggcagg

SEQ ID NO: 664678 - DNA, 15 bp, Homo sapiens
gctgtttaggcaggg

SEQ ID NO: 664679 - DNA, 15 bp, Homo sapiens
ctgtttaggcaggga

SEQ ID NO: 664680 - DNA, 15 bp, Homo sapiens
tgtttaggcagggat

SEQ ID NO: 664681 - DNA, 15 bp, Homo sapiens
gtttaggcagggatt

SEQ ID NO: 664682 - DNA, 15 bp, Homo sapiens
tttaggcagggattg

SEQ ID NO: 664683 - DNA, 15 bp, Homo sapiens
ttaggcagggattga

SEQ ID NO: 664684 - DNA, 15 bp, Homo sapiens
taggcagggattgac

SEQ ID NO: 664685 - DNA, 15 bp, Homo sapiens
aggcagggattgact

SEQ ID NO: 664686 - DNA, 15 bp, Homo sapiens
ggcagggattgactg

SEQ ID NO: 664687 - DNA, 15 bp, Homo sapiens
gcagggattgactgt

SEQ ID NO: 664688 - DNA, 15 bp, Homo sapiens
cagggattgactgtg

SEQ ID NO: 664689 - DNA, 15 bp, Homo sapiens
agggattgactgtga

SEQ ID NO: 664690 - DNA, 15 bp, Homo sapiens
gggattgactgtgag

SEQ ID NO: 664691 - DNA, 15 bp, Homo sapiens
ggattgactgtgagt

SEQ ID NO: 664692 - DNA, 15 bp, Homo sapiens
gattgactgtgagtc

SEQ ID NO: 664693 - DNA, 15 bp, Homo sapiens
attgactgtgagtct

SEQ ID NO: 664694 - DNA, 15 bp, Homo sapiens
ttgactgtgagtcta

SEQ ID NO: 664695 - DNA, 15 bp, Homo sapiens
tgactgtgagtctat

SEQ ID NO: 664696 - DNA, 15 bp, Homo sapiens
gactgtgagtctatt

SEQ ID NO: 664697 - DNA, 15 bp, Homo sapiens
actgtgagtctatta

SEQ ID NO: 664698 - DNA, 15 bp, Homo sapiens
ctgtgagtctattaa

SEQ ID NO: 664699 - DNA, 15 bp, Homo sapiens
tgtgagtctattaat

SEQ ID NO: 664700 - DNA, 15 bp, Homo sapiens
gtgagtctattaata

SEQ ID NO: 664701 - DNA, 15 bp, Homo sapiens
tgagtctattaatag

SEQ ID NO: 664702 - DNA, 15 bp, Homo sapiens
gagtctattaataga

SEQ ID NO: 664703 - DNA, 15 bp, Homo sapiens
agtctattaatagat

SEQ ID NO: 664704 - DNA, 15 bp, Homo sapiens
gtctattaatagatg

SEQ ID NO: 664705 - DNA, 15 bp, Homo sapiens
tctattaatagatgg

SEQ ID NO: 664706 - DNA, 15 bp, Homo sapiens
ctattaatagatggc

SEQ ID NO: 664707 - DNA, 15 bp, Homo sapiens
tattaatagatggca

SEQ ID NO: 664708 - DNA, 15 bp, Homo sapiens
attaatagatggcat

SEQ ID NO: 664709 - DNA, 15 bp, Homo sapiens
ttaatagatggcatt

SEQ ID NO: 664710 - DNA, 15 bp, Homo sapiens
taatagatggcattt

SEQ ID NO: 664711 - DNA, 15 bp, Homo sapiens
aatagatggcatttt

SEQ ID NO: 664712 - DNA, 15 bp, Homo sapiens
atagatggcattttc

SEQ ID NO: 664713 - DNA, 15 bp, Homo sapiens
tagatggcattttca

SEQ ID NO: 664714 - DNA, 15 bp, Homo sapiens
agatggcattttcat

SEQ ID NO: 664715 - DNA, 15 bp, Homo sapiens
gatggcattttcatg

SEQ ID NO: 664716 - DNA, 15 bp, Homo sapiens
atggcattttcatga

SEQ ID NO: 664717 - DNA, 15 bp, Homo sapiens
tggcattttcatgaa

SEQ ID NO: 664718 - DNA, 15 bp, Homo sapiens
ggcattttcatgaag

SEQ ID NO: 664719 - DNA, 15 bp, Homo sapiens
gcattttcatgaaga

SEQ ID NO: 664720 - DNA, 15 bp, Homo sapiens
cattttcatgaagaa

SEQ ID NO: 664721 - DNA, 15 bp, Homo sapiens
attttcatgaagaag

SEQ ID NO: 664722 - DNA, 15 bp, Homo sapiens
ttttcatgaagaagt

SEQ ID NO: 664723 - DNA, 15 bp, Homo sapiens
tttcatgaagaagtc

SEQ ID NO: 664724 - DNA, 15 bp, Homo sapiens
ttcatgaagaagtct

SEQ ID NO: 664725 - DNA, 15 bp, Homo sapiens
tcatgaagaagtcta

SEQ ID NO: 664726 - DNA, 15 bp, Homo sapiens
catgaagaagtctat

SEQ ID NO: 664727 - DNA, 15 bp, Homo sapiens
atgaagaagtctatt

SEQ ID NO: 664728 - DNA, 15 bp, Homo sapiens
tgaagaagtctattt

SEQ ID NO: 664729 - DNA, 15 bp, Homo sapiens
gaagaagtctattta

SEQ ID NO: 664730 - DNA, 15 bp, Homo sapiens
aagaagtctatttat

SEQ ID NO: 664731 - DNA, 15 bp, Homo sapiens
agaagtctatttatg

SEQ ID NO: 664732 - DNA, 15 bp, Homo sapiens
gaagtctatttatgt

SEQ ID NO: 664733 - DNA, 15 bp, Homo sapiens
aagtctatttatgta

SEQ ID NO: 664734 - DNA, 15 bp, Homo sapiens
agtctatttatgtat

SEQ ID NO: 664735 - DNA, 15 bp, Homo sapiens
gtctatttatgtatt

SEQ ID NO: 664736 - DNA, 15 bp, Homo sapiens
tctatttatgtattg

SEQ ID NO: 664737 - DNA, 15 bp, Homo sapiens
ctatttatgtattgc

SEQ ID NO: 664738 - DNA, 15 bp, Homo sapiens
tatttatgtattgca

SEQ ID NO: 664739 - DNA, 15 bp, Homo sapiens
atttatgtattgcac

SEQ ID NO: 664740 - DNA, 15 bp, Homo sapiens
tttatgtattgcact

SEQ ID NO: 664741 - DNA, 15 bp, Homo sapiens
ttatgtattgcactg

SEQ ID NO: 664742 - DNA, 15 bp, Homo sapiens
tatgtattgcactgg

SEQ ID NO: 664743 - DNA, 15 bp, Homo sapiens
atgtattgcactggc

SEQ ID NO: 664744 - DNA, 15 bp, Homo sapiens
tgtattgcactggct

SEQ ID NO: 664745 - DNA, 15 bp, Homo sapiens
gtattgcactggctt

SEQ ID NO: 664746 - DNA, 15 bp, Homo sapiens
tattgcactggctta

SEQ ID NO: 664747 - DNA, 15 bp, Homo sapiens
attgcactggcttaa

SEQ ID NO: 664748 - DNA, 15 bp, Homo sapiens
ttgcactggcttaac

SEQ ID NO: 664749 - DNA, 15 bp, Homo sapiens
tgcactggcttaaca

SEQ ID NO: 664750 - DNA, 15 bp, Homo sapiens
gcactggcttaacat

SEQ ID NO: 664751 - DNA, 15 bp, Homo sapiens
cactggcttaacatt

SEQ ID NO: 664752 - DNA, 15 bp, Homo sapiens
actggcttaacattt

SEQ ID NO: 664753 - DNA, 15 bp, Homo sapiens
ctggcttaacatttg

SEQ ID NO: 664754 - DNA, 15 bp, Homo sapiens
tggcttaacatttga

SEQ ID NO: 664755 - DNA, 15 bp, Homo sapiens
ggcttaacatttgat

SEQ ID NO: 664756 - DNA, 15 bp, Homo sapiens
gcttaacatttgatg

SEQ ID NO: 664757 - DNA, 15 bp, Homo sapiens
cttaacatttgatgc

SEQ ID NO: 664758 - DNA, 15 bp, Homo sapiens
ttaacatttgatgcg

SEQ ID NO: 664759 - DNA, 15 bp, Homo sapiens
taacatttgatgcgt

SEQ ID NO: 664760 - DNA, 15 bp, Homo sapiens
aacatttgatgcgtg

SEQ ID NO: 664761 - DNA, 15 bp, Homo sapiens
acatttgatgcgtgt

SEQ ID NO: 664762 - DNA, 15 bp, Homo sapiens
catttgatgcgtgtg

SEQ ID NO: 664763 - DNA, 15 bp, Homo sapiens
atttgatgcgtgtgc

SEQ ID NO: 664764 - DNA, 15 bp, Homo sapiens
tttgatgcgtgtgca

SEQ ID NO: 664765 - DNA, 15 bp, Homo sapiens
ttgatgcgtgtgcaa

SEQ ID NO: 664766 - DNA, 15 bp, Homo sapiens
tgatgcgtgtgcaaa

SEQ ID NO: 664767 - DNA, 15 bp, Homo sapiens
gatgcgtgtgcaaag

SEQ ID NO: 664768 - DNA, 15 bp, Homo sapiens
atgcgtgtgcaaagg

SEQ ID NO: 664769 - DNA, 15 bp, Homo sapiens
tgcgtgtgcaaagga

SEQ ID NO: 664770 - DNA, 15 bp, Homo sapiens
gcgtgtgcaaaggag

SEQ ID NO: 664771 - DNA, 15 bp, Homo sapiens
cgtgtgcaaaggagc

SEQ ID NO: 664772 - DNA, 15 bp, Homo sapiens
gtgtgcaaaggagct

SEQ ID NO: 664773 - DNA, 15 bp, Homo sapiens
tgtgcaaaggagcta

SEQ ID NO: 664774 - DNA, 15 bp, Homo sapiens
gtgcaaaggagctat

SEQ ID NO: 664775 - DNA, 15 bp, Homo sapiens
tgcaaaggagctatt

SEQ ID NO: 664776 - DNA, 15 bp, Homo sapiens
gcaaaggagctattc

SEQ ID NO: 664777 - DNA, 15 bp, Homo sapiens
caaaggagctattcc

SEQ ID NO: 664778 - DNA, 15 bp, Homo sapiens
aaaggagctattcct

SEQ ID NO: 664779 - DNA, 15 bp, Homo sapiens
aaggagctattccta

SEQ ID NO: 664780 - DNA, 15 bp, Homo sapiens
aggagctattcctac

SEQ ID NO: 664781 - DNA, 15 bp, Homo sapiens
ggagctattcctaca

SEQ ID NO: 664782 - DNA, 15 bp, Homo sapiens
gagctattcctacaa

SEQ ID NO: 664783 - DNA, 15 bp, Homo sapiens
agctattcctacaaa

SEQ ID NO: 664784 - DNA, 15 bp, Homo sapiens
gctattcctacaaaa

SEQ ID NO: 664785 - DNA, 15 bp, Homo sapiens
ctattcctacaaaag

SEQ ID NO: 664786 - DNA, 15 bp, Homo sapiens
tattcctacaaaagg

SEQ ID NO: 664787 - DNA, 15 bp, Homo sapiens
attcctacaaaaggt

SEQ ID NO: 664788 - DNA, 15 bp, Homo sapiens
ttcctacaaaaggtg

SEQ ID NO: 664789 - DNA, 15 bp, Homo sapiens
tcctacaaaaggtgt

SEQ ID NO: 664790 - DNA, 15 bp, Homo sapiens
cctacaaaaggtgta

SEQ ID NO: 664791 - DNA, 15 bp, Homo sapiens
ctacaaaaggtgtag

SEQ ID NO: 664792 - DNA, 15 bp, Homo sapiens
tacaaaaggtgtagt

SEQ ID NO: 664793 - DNA, 15 bp, Homo sapiens
acaaaaggtgtagta

SEQ ID NO: 664794 - DNA, 15 bp, Homo sapiens
caaaaggtgtagtaa

SEQ ID NO: 664795 - DNA, 15 bp, Homo sapiens
aaaaggtgtagtaac

SEQ ID NO: 664796 - DNA, 15 bp, Homo sapiens
aaaggtgtagtaaca

SEQ ID NO: 664797 - DNA, 15 bp, Homo sapiens
aaggtgtagtaacac

SEQ ID NO: 664798 - DNA, 15 bp, Homo sapiens
aggtgtagtaacact

SEQ ID NO: 664799 - DNA, 15 bp, Homo sapiens
ggtgtagtaacactt

SEQ ID NO: 664800 - DNA, 15 bp, Homo sapiens
gtgtagtaacacttc

SEQ ID NO: 664801 - DNA, 15 bp, Homo sapiens
tgtagtaacacttca

SEQ ID NO: 664802 - DNA, 15 bp, Homo sapiens
gtagtaacacttcag

SEQ ID NO: 664803 - DNA, 15 bp, Homo sapiens
tagtaacacttcaga

SEQ ID NO: 664804 - DNA, 15 bp, Homo sapiens
agtaacacttcagaa

SEQ ID NO: 664805 - DNA, 15 bp, Homo sapiens
gtaacacttcagaac

SEQ ID NO: 664806 - DNA, 15 bp, Homo sapiens
taacacttcagaacc

SEQ ID NO: 664807 - DNA, 15 bp, Homo sapiens
aacacttcagaaccc

SEQ ID NO: 664808 - DNA, 15 bp, Homo sapiens
acacttcagaaccca

SEQ ID NO: 664809 - DNA, 15 bp, Homo sapiens
cacttcagaacccag

SEQ ID NO: 664810 - DNA, 15 bp, Homo sapiens
acttcagaacccagg

SEQ ID NO: 664811 - DNA, 15 bp, Homo sapiens
cttcagaacccagga

SEQ ID NO: 664812 - DNA, 15 bp, Homo sapiens
ttcagaacccaggaa

SEQ ID NO: 664813 - DNA, 15 bp, Homo sapiens
tcagaacccaggaaa

SEQ ID NO: 664814 - DNA, 15 bp, Homo sapiens
cagaacccaggaaag

SEQ ID NO: 664815 - DNA, 15 bp, Homo sapiens
agaacccaggaaagt

SEQ ID NO: 664816 - DNA, 15 bp, Homo sapiens
gaacccaggaaagtc

SEQ ID NO: 664817 - DNA, 15 bp, Homo sapiens
aacccaggaaagtcc

SEQ ID NO: 664818 - DNA, 15 bp, Homo sapiens
acccaggaaagtcct

SEQ ID NO: 664819 - DNA, 15 bp, Homo sapiens
cccaggaaagtcctc

SEQ ID NO: 664820 - DNA, 15 bp, Homo sapiens
ccaggaaagtcctca

SEQ ID NO: 664821 - DNA, 15 bp, Homo sapiens
caggaaagtcctcag

SEQ ID NO: 664822 - DNA, 15 bp, Homo sapiens
aggaaagtcctcaga

SEQ ID NO: 664823 - DNA, 15 bp, Homo sapiens
ggaaagtcctcagag

SEQ ID NO: 664824 - DNA, 15 bp, Homo sapiens
gaaagtcctcagagg

SEQ ID NO: 664825 - DNA, 15 bp, Homo sapiens
aaagtcctcagaggg

SEQ ID NO: 664826 - DNA, 15 bp, Homo sapiens
aagtcctcagagggg

SEQ ID NO: 664827 - DNA, 15 bp, Homo sapiens
agtcctcagagggga

SEQ ID NO: 664828 - DNA, 15 bp, Homo sapiens
gtcctcagaggggaa

SEQ ID NO: 664829 - DNA, 15 bp, Homo sapiens
tcctcagaggggaag

SEQ ID NO: 664830 - DNA, 15 bp, Homo sapiens
cctcagaggggaagc

SEQ ID NO: 664831 - DNA, 15 bp, Homo sapiens
ctcagaggggaagcc

SEQ ID NO: 664832 - DNA, 15 bp, Homo sapiens
tcagaggggaagccc

SEQ ID NO: 664833 - DNA, 15 bp, Homo sapiens
cagaggggaagccca

SEQ ID NO: 664834 - DNA, 15 bp, Homo sapiens
agaggggaagcccac

SEQ ID NO: 664835 - DNA, 15 bp, Homo sapiens
gaggggaagcccaca

SEQ ID NO: 664836 - DNA, 15 bp, Homo sapiens
aggggaagcccacag

SEQ ID NO: 664837 - DNA, 15 bp, Homo sapiens
ggggaagcccacagc

SEQ ID NO: 664838 - DNA, 15 bp, Homo sapiens
gggaagcccacagct

SEQ ID NO: 664839 - DNA, 15 bp, Homo sapiens
ggaagcccacagctt

SEQ ID NO: 664840 - DNA, 15 bp, Homo sapiens
gaagcccacagcttc

SEQ ID NO: 664841 - DNA, 15 bp, Homo sapiens
aagcccacagcttct

SEQ ID NO: 664842 - DNA, 15 bp, Homo sapiens
agcccacagcttctg

SEQ ID NO: 664843 - DNA, 15 bp, Homo sapiens
gcccacagcttctgc

SEQ ID NO: 664844 - DNA, 15 bp, Homo sapiens
cccacagcttctgct

SEQ ID NO: 664845 - DNA, 15 bp, Homo sapiens
ccacagcttctgctg

SEQ ID NO: 664846 - DNA, 15 bp, Homo sapiens
cacagcttctgctgg

SEQ ID NO: 664847 - DNA, 15 bp, Homo sapiens
acagcttctgctgga

SEQ ID NO: 664848 - DNA, 15 bp, Homo sapiens
cagcttctgctggaa

SEQ ID NO: 664849 - DNA, 15 bp, Homo sapiens
agcttctgctggaaa

SEQ ID NO: 664850 - DNA, 15 bp, Homo sapiens
gcttctgctggaaag

SEQ ID NO: 664851 - DNA, 15 bp, Homo sapiens
cttctgctggaaaga

SEQ ID NO: 664852 - DNA, 15 bp, Homo sapiens
ttctgctggaaagaa

SEQ ID NO: 664853 - DNA, 15 bp, Homo sapiens
tctgctggaaagaag

SEQ ID NO: 664854 - DNA, 15 bp, Homo sapiens
ctgctggaaagaaga

SEQ ID NO: 664855 - DNA, 15 bp, Homo sapiens
tgctggaaagaagaa

SEQ ID NO: 664856 - DNA, 15 bp, Homo sapiens
gctggaaagaagaaa

SEQ ID NO: 664857 - DNA, 15 bp, Homo sapiens
ctggaaagaagaaag

SEQ ID NO: 664858 - DNA, 15 bp, Homo sapiens
tggaaagaagaaagc

SEQ ID NO: 664859 - DNA, 15 bp, Homo sapiens
ggaaagaagaaagca

SEQ ID NO: 664860 - DNA, 15 bp, Homo sapiens
gaaagaagaaagcag

SEQ ID NO: 664861 - DNA, 15 bp, Homo sapiens
aaagaagaaagcagc

SEQ ID NO: 664862 - DNA, 15 bp, Homo sapiens
aagaagaaagcagct

SEQ ID NO: 664863 - DNA, 15 bp, Homo sapiens
agaagaaagcagctc

SEQ ID NO: 664864 - DNA, 15 bp, Homo sapiens
gaagaaagcagctca

SEQ ID NO: 664865 - DNA, 15 bp, Homo sapiens
aagaaagcagctcaa

SEQ ID NO: 664866 - DNA, 15 bp, Homo sapiens
agaaagcagctcaaa

SEQ ID NO: 664867 - DNA, 15 bp, Homo sapiens
gaaagcagctcaaaa

SEQ ID NO: 664868 - DNA, 15 bp, Homo sapiens
aaagcagctcaaaag

SEQ ID NO: 664869 - DNA, 15 bp, Homo sapiens
aagcagctcaaaaga

SEQ ID NO: 664870 - DNA, 15 bp, Homo sapiens
agcagctcaaaagag

SEQ ID NO: 664871 - DNA, 15 bp, Homo sapiens
gcagctcaaaagaga

SEQ ID NO: 664872 - DNA, 15 bp, Homo sapiens
cagctcaaaagagaa

SEQ ID NO: 664873 - DNA, 15 bp, Homo sapiens
agctcaaaagagaaa

SEQ ID NO: 664874 - DNA, 15 bp, Homo sapiens
gctcaaaagagaaat

SEQ ID NO: 664875 - DNA, 15 bp, Homo sapiens
ctcaaaagagaaata

SEQ ID NO: 664876 - DNA, 15 bp, Homo sapiens
tcaaaagagaaatac

SEQ ID NO: 664877 - DNA, 15 bp, Homo sapiens
caaaagagaaataca

SEQ ID NO: 664878 - DNA, 15 bp, Homo sapiens
aaaagagaaatacag

SEQ ID NO: 664879 - DNA, 15 bp, Homo sapiens
aaagagaaatacaga

SEQ ID NO: 664880 - DNA, 15 bp, Homo sapiens
aagagaaatacagaa

SEQ ID NO: 664881 - DNA, 15 bp, Homo sapiens
agagaaatacagaaa

SEQ ID NO: 664882 - DNA, 15 bp, Homo sapiens
gagaaatacagaaag

SEQ ID NO: 664883 - DNA, 15 bp, Homo sapiens
agaaatacagaaagt

SEQ ID NO: 664884 - DNA, 15 bp, Homo sapiens
gaaatacagaaagtt

SEQ ID NO: 664885 - DNA, 15 bp, Homo sapiens
aaatacagaaagtta

SEQ ID NO: 664886 - DNA, 15 bp, Homo sapiens
aatacagaaagttaa

SEQ ID NO: 664887 - DNA, 15 bp, Homo sapiens
atacagaaagttaac

SEQ ID NO: 664888 - DNA, 15 bp, Homo sapiens
tacagaaagttaaca

SEQ ID NO: 664889 - DNA, 15 bp, Homo sapiens
acagaaagttaacaa

SEQ ID NO: 664890 - DNA, 15 bp, Homo sapiens
cagaaagttaacaat

SEQ ID NO: 664891 - DNA, 15 bp, Homo sapiens
agaaagttaacaata

SEQ ID NO: 664892 - DNA, 15 bp, Homo sapiens
gaaagttaacaataa

SEQ ID NO: 664893 - DNA, 15 bp, Homo sapiens
aaagttaacaataag

SEQ ID NO: 664894 - DNA, 15 bp, Homo sapiens
aagttaacaataagt

SEQ ID NO: 664895 - DNA, 15 bp, Homo sapiens
agttaacaataagtt

SEQ ID NO: 664896 - DNA, 15 bp, Homo sapiens
gttaacaataagtta

SEQ ID NO: 664897 - DNA, 15 bp, Homo sapiens
ttaacaataagttaa

SEQ ID NO: 664898 - DNA, 15 bp, Homo sapiens
taacaataagttaag

SEQ ID NO: 664899 - DNA, 15 bp, Homo sapiens
aacaataagttaaga

SEQ ID NO: 664900 - DNA, 15 bp, Homo sapiens
acaataagttaagac

SEQ ID NO: 664901 - DNA, 15 bp, Homo sapiens
caataagttaagacc

SEQ ID NO: 664902 - DNA, 15 bp, Homo sapiens
aataagttaagacca

SEQ ID NO: 664903 - DNA, 15 bp, Homo sapiens
ataagttaagaccac

SEQ ID NO: 664904 - DNA, 15 bp, Homo sapiens
taagttaagaccaca

SEQ ID NO: 664905 - DNA, 15 bp, Homo sapiens
aagttaagaccacat

SEQ ID NO: 664906 - DNA, 15 bp, Homo sapiens
agttaagaccacatg

SEQ ID NO: 664907 - DNA, 15 bp, Homo sapiens
gttaagaccacatga

SEQ ID NO: 664908 - DNA, 15 bp, Homo sapiens
ttaagaccacatgat

SEQ ID NO: 664909 - DNA, 15 bp, Homo sapiens
taagaccacatgatt

SEQ ID NO: 664910 - DNA, 15 bp, Homo sapiens
aagaccacatgatta

SEQ ID NO: 664911 - DNA, 15 bp, Homo sapiens
agaccacatgattat

SEQ ID NO: 664912 - DNA, 15 bp, Homo sapiens
gaccacatgattatg

SEQ ID NO: 664913 - DNA, 15 bp, Homo sapiens
accacatgattatga

SEQ ID NO: 664914 - DNA, 15 bp, Homo sapiens
ccacatgattatgaa

SEQ ID NO: 664915 - DNA, 15 bp, Homo sapiens
cacatgattatgaaa

SEQ ID NO: 664916 - DNA, 15 bp, Homo sapiens
acatgattatgaaat

SEQ ID NO: 664917 - DNA, 15 bp, Homo sapiens
catgattatgaaatc

SEQ ID NO: 664918 - DNA, 15 bp, Homo sapiens
atgattatgaaatca

SEQ ID NO: 664919 - DNA, 15 bp, Homo sapiens
tgattatgaaatcaa

SEQ ID NO: 664920 - DNA, 15 bp, Homo sapiens
gattatgaaatcaaa

SEQ ID NO: 664921 - DNA, 15 bp, Homo sapiens
attatgaaatcaaat

SEQ ID NO: 664922 - DNA, 15 bp, Homo sapiens
ttatgaaatcaaatg

SEQ ID NO: 664923 - DNA, 15 bp, Homo sapiens
tatgaaatcaaatgt

SEQ ID NO: 664924 - DNA, 15 bp, Homo sapiens
atgaaatcaaatgta

SEQ ID NO: 664925 - DNA, 15 bp, Homo sapiens
tgaaatcaaatgtag

SEQ ID NO: 664926 - DNA, 15 bp, Homo sapiens
gaaatcaaatgtagt

SEQ ID NO: 664927 - DNA, 15 bp, Homo sapiens
aaatcaaatgtagtg

SEQ ID NO: 664928 - DNA, 15 bp, Homo sapiens
aatcaaatgtagtga

SEQ ID NO: 664929 - DNA, 15 bp, Homo sapiens
atcaaatgtagtgaa

SEQ ID NO: 664930 - DNA, 15 bp, Homo sapiens
tcaaatgtagtgaaa

SEQ ID NO: 664931 - DNA, 15 bp, Homo sapiens
caaatgtagtgaaac

SEQ ID NO: 664932 - DNA, 15 bp, Homo sapiens
aaatgtagtgaaact

SEQ ID NO: 664933 - DNA, 15 bp, Homo sapiens
aatgtagtgaaacta

SEQ ID NO: 664934 - DNA, 15 bp, Homo sapiens
atgtagtgaaactaa

SEQ ID NO: 664935 - DNA, 15 bp, Homo sapiens
tgtagtgaaactaat

SEQ ID NO: 664936 - DNA, 15 bp, Homo sapiens
gtagtgaaactaatt

SEQ ID NO: 664937 - DNA, 15 bp, Homo sapiens
tagtgaaactaattt

SEQ ID NO: 664938 - DNA, 15 bp, Homo sapiens
agtgaaactaatttt

SEQ ID NO: 664939 - DNA, 15 bp, Homo sapiens
gtgaaactaattttt

SEQ ID NO: 664940 - DNA, 15 bp, Homo sapiens
tgaaactaattttta

SEQ ID NO: 664941 - DNA, 15 bp, Homo sapiens
gaaactaatttttat

SEQ ID NO: 664942 - DNA, 15 bp, Homo sapiens
aaactaatttttata

SEQ ID NO: 664943 - DNA, 15 bp, Homo sapiens
aactaatttttataa

SEQ ID NO: 664944 - DNA, 15 bp, Homo sapiens
actaatttttataaa

SEQ ID NO: 664945 - DNA, 15 bp, Homo sapiens
ctaatttttataaaa

SEQ ID NO: 664946 - DNA, 15 bp, Homo sapiens
taatttttataaaag

SEQ ID NO: 664947 - DNA, 15 bp, Homo sapiens
aatttttataaaagc

SEQ ID NO: 664948 - DNA, 15 bp, Homo sapiens
atttttataaaagca

SEQ ID NO: 664949 - DNA, 15 bp, Homo sapiens
tttttataaaagcag

SEQ ID NO: 664950 - DNA, 15 bp, Homo sapiens
ttttataaaagcaga

SEQ ID NO: 664951 - DNA, 15 bp, Homo sapiens
tttataaaagcagac

SEQ ID NO: 664952 - DNA, 15 bp, Homo sapiens
ttataaaagcagacc

SEQ ID NO: 664953 - DNA, 15 bp, Homo sapiens
tataaaagcagacca

SEQ ID NO: 664954 - DNA, 15 bp, Homo sapiens
ataaaagcagaccaa

SEQ ID NO: 664955 - DNA, 15 bp, Homo sapiens
taaaagcagaccaaa

SEQ ID NO: 664956 - DNA, 15 bp, Homo sapiens
aaaagcagaccaaag

SEQ ID NO: 664957 - DNA, 15 bp, Homo sapiens
aaagcagaccaaaga

SEQ ID NO: 664958 - DNA, 15 bp, Homo sapiens
aagcagaccaaagat

SEQ ID NO: 664959 - DNA, 15 bp, Homo sapiens
agcagaccaaagata

SEQ ID NO: 664960 - DNA, 15 bp, Homo sapiens
gcagaccaaagataa

SEQ ID NO: 664961 - DNA, 15 bp, Homo sapiens
cagaccaaagataat

SEQ ID NO: 664962 - DNA, 15 bp, Homo sapiens
agaccaaagataata

SEQ ID NO: 664963 - DNA, 15 bp, Homo sapiens
gaccaaagataatat

SEQ ID NO: 664964 - DNA, 15 bp, Homo sapiens
accaaagataatata

SEQ ID NO: 664965 - DNA, 15 bp, Homo sapiens
ccaaagataatatat

SEQ ID NO: 664966 - DNA, 15 bp, Homo sapiens
caaagataatatatt

SEQ ID NO: 664967 - DNA, 15 bp, Homo sapiens
aaagataatatattt

SEQ ID NO: 664968 - DNA, 15 bp, Homo sapiens
aagataatatattta

SEQ ID NO: 664969 - DNA, 15 bp, Homo sapiens
agataatatatttaa

SEQ ID NO: 664970 - DNA, 15 bp, Homo sapiens
gataatatatttaaa

SEQ ID NO: 664971 - DNA, 15 bp, Homo sapiens
ataatatatttaaag

SEQ ID NO: 664972 - DNA, 15 bp, Homo sapiens
taatatatttaaagg

SEQ ID NO: 664973 - DNA, 15 bp, Homo sapiens
aatatatttaaagga

SEQ ID NO: 664974 - DNA, 15 bp, Homo sapiens
atatatttaaaggaa

SEQ ID NO: 664975 - DNA, 15 bp, Homo sapiens
tatatttaaaggaag

SEQ ID NO: 664976 - DNA, 15 bp, Homo sapiens
atatttaaaggaagt

SEQ ID NO: 664977 - DNA, 15 bp, Homo sapiens
tatttaaaggaagtt

SEQ ID NO: 664978 - DNA, 15 bp, Homo sapiens
atttaaaggaagtta

SEQ ID NO: 664979 - DNA, 15 bp, Homo sapiens
tttaaaggaagttaa

SEQ ID NO: 664980 - DNA, 15 bp, Homo sapiens
ttaaaggaagttaag

SEQ ID NO: 664981 - DNA, 15 bp, Homo sapiens
taaaggaagttaagc

SEQ ID NO: 664982 - DNA, 15 bp, Homo sapiens
aaaggaagttaagcc

SEQ ID NO: 664983 - DNA, 15 bp, Homo sapiens
aaggaagttaagcct

SEQ ID NO: 664984 - DNA, 15 bp, Homo sapiens
aggaagttaagcctg

SEQ ID NO: 664985 - DNA, 15 bp, Homo sapiens
ggaagttaagcctgc

SEQ ID NO: 664986 - DNA, 15 bp, Homo sapiens
gaagttaagcctgct

SEQ ID NO: 664987 - DNA, 15 bp, Homo sapiens
aagttaagcctgctt

SEQ ID NO: 664988 - DNA, 15 bp, Homo sapiens
agttaagcctgcttc

SEQ ID NO: 664989 - DNA, 15 bp, Homo sapiens
gttaagcctgcttca

SEQ ID NO: 664990 - DNA, 15 bp, Homo sapiens
ttaagcctgcttcaa

SEQ ID NO: 664991 - DNA, 15 bp, Homo sapiens
taagcctgcttcaat

SEQ ID NO: 664992 - DNA, 15 bp, Homo sapiens
aagcctgcttcaatc

SEQ ID NO: 664993 - DNA, 15 bp, Homo sapiens
agcctgcttcaatca

SEQ ID NO: 664994 - DNA, 15 bp, Homo sapiens
gcctgcttcaatcaa

SEQ ID NO: 664995 - DNA, 15 bp, Homo sapiens
cctgcttcaatcaaa

SEQ ID NO: 664996 - DNA, 15 bp, Homo sapiens
ctgcttcaatcaaat

SEQ ID NO: 664997 - DNA, 15 bp, Homo sapiens
tgcttcaatcaaatt

SEQ ID NO: 664998 - DNA, 15 bp, Homo sapiens
gcttcaatcaaatta

SEQ ID NO: 664999 - DNA, 15 bp, Homo sapiens
cttcaatcaaattag

SEQ ID NO: 665000 - DNA, 15 bp, Homo sapiens
ttcaatcaaattagt

SEQ ID NO: 665001 - DNA, 15 bp, Homo sapiens
tcaatcaaattagtt

SEQ ID NO: 665002 - DNA, 15 bp, Homo sapiens
caatcaaattagtta

SEQ ID NO: 665003 - DNA, 15 bp, Homo sapiens
aatcaaattagttat

SEQ ID NO: 665004 - DNA, 15 bp, Homo sapiens
atcaaattagttata

SEQ ID NO: 665005 - DNA, 15 bp, Homo sapiens
tcaaattagttatat

SEQ ID NO: 665006 - DNA, 15 bp, Homo sapiens
caaattagttatatt

SEQ ID NO: 665007 - DNA, 15 bp, Homo sapiens
aaattagttatattc

SEQ ID NO: 665008 - DNA, 15 bp, Homo sapiens
aattagttatattct

SEQ ID NO: 665009 - DNA, 15 bp, Homo sapiens
attagttatattctt

SEQ ID NO: 665010 - DNA, 15 bp, Homo sapiens
ttagttatattcttg

SEQ ID NO: 665011 - DNA, 15 bp, Homo sapiens
tagttatattcttgt

SEQ ID NO: 665012 - DNA, 15 bp, Homo sapiens
agttatattcttgtt

SEQ ID NO: 665013 - DNA, 15 bp, Homo sapiens
gttatattcttgttc

SEQ ID NO: 665014 - DNA, 15 bp, Homo sapiens
ttatattcttgttct

SEQ ID NO: 665015 - DNA, 15 bp, Homo sapiens
tatattcttgttcta

SEQ ID NO: 665016 - DNA, 15 bp, Homo sapiens
atattcttgttctaa

SEQ ID NO: 665017 - DNA, 15 bp, Homo sapiens
tattcttgttctaat

SEQ ID NO: 665018 - DNA, 15 bp, Homo sapiens
attcttgttctaatt

SEQ ID NO: 665019 - DNA, 15 bp, Homo sapiens
ttcttgttctaatta

SEQ ID NO: 665020 - DNA, 15 bp, Homo sapiens
tcttgttctaattat

SEQ ID NO: 665021 - DNA, 15 bp, Homo sapiens
cttgttctaattatg

SEQ ID NO: 665022 - DNA, 15 bp, Homo sapiens
ttgttctaattatgt

SEQ ID NO: 665023 - DNA, 15 bp, Homo sapiens
tgttctaattatgtt

SEQ ID NO: 665024 - DNA, 15 bp, Homo sapiens
gttctaattatgttg

SEQ ID NO: 665025 - DNA, 15 bp, Homo sapiens
ttctaattatgttgc

SEQ ID NO: 665026 - DNA, 15 bp, Homo sapiens
tctaattatgttgct

SEQ ID NO: 665027 - DNA, 15 bp, Homo sapiens
ctaattatgttgcta

SEQ ID NO: 665028 - DNA, 15 bp, Homo sapiens
taattatgttgctat

SEQ ID NO: 665029 - DNA, 15 bp, Homo sapiens
aattatgttgctatt

SEQ ID NO: 665030 - DNA, 15 bp, Homo sapiens
attatgttgctattg

SEQ ID NO: 665031 - DNA, 15 bp, Homo sapiens
ttatgttgctattgc

SEQ ID NO: 665032 - DNA, 15 bp, Homo sapiens
tatgttgctattgcc

SEQ ID NO: 665033 - DNA, 15 bp, Homo sapiens
atgttgctattgccc

SEQ ID NO: 665034 - DNA, 15 bp, Homo sapiens
tgttgctattgccca

SEQ ID NO: 665035 - DNA, 15 bp, Homo sapiens
gttgctattgcccat

SEQ ID NO: 665036 - DNA, 15 bp, Homo sapiens
ttgctattgcccatg

SEQ ID NO: 665037 - DNA, 15 bp, Homo sapiens
tgctattgcccatgg

SEQ ID NO: 665038 - DNA, 15 bp, Homo sapiens
gctattgcccatggc

SEQ ID NO: 665039 - DNA, 15 bp, Homo sapiens
ctattgcccatggca

SEQ ID NO: 665040 - DNA, 15 bp, Homo sapiens
tattgcccatggcac

SEQ ID NO: 665041 - DNA, 15 bp, Homo sapiens
attgcccatggcaca

SEQ ID NO: 665042 - DNA, 15 bp, Homo sapiens
ttgcccatggcacat

SEQ ID NO: 665043 - DNA, 15 bp, Homo sapiens
tgcccatggcacatt

SEQ ID NO: 665044 - DNA, 15 bp, Homo sapiens
gcccatggcacattc

SEQ ID NO: 665045 - DNA, 15 bp, Homo sapiens
cccatggcacattct

SEQ ID NO: 665046 - DNA, 15 bp, Homo sapiens
ccatggcacattctt

SEQ ID NO: 665047 - DNA, 15 bp, Homo sapiens
catggcacattcttt

SEQ ID NO: 665048 - DNA, 15 bp, Homo sapiens
atggcacattctttt

SEQ ID NO: 665049 - DNA, 15 bp, Homo sapiens
tggcacattcttttg

SEQ ID NO: 665050 - DNA, 15 bp, Homo sapiens
ggcacattcttttga

SEQ ID NO: 665051 - DNA, 15 bp, Homo sapiens
gcacattcttttgaa

SEQ ID NO: 665052 - DNA, 15 bp, Homo sapiens
cacattcttttgaac

SEQ ID NO: 665053 - DNA, 15 bp, Homo sapiens
acattcttttgaaca

SEQ ID NO: 665054 - DNA, 15 bp, Homo sapiens
cattcttttgaacat

SEQ ID NO: 665055 - DNA, 15 bp, Homo sapiens
attcttttgaacata

SEQ ID NO: 665056 - DNA, 15 bp, Homo sapiens
ttcttttgaacatat

SEQ ID NO: 665057 - DNA, 15 bp, Homo sapiens
tcttttgaacatatt

SEQ ID NO: 665058 - DNA, 15 bp, Homo sapiens
cttttgaacatattt

SEQ ID NO: 665059 - DNA, 15 bp, Homo sapiens
ttttgaacatattta

SEQ ID NO: 665060 - DNA, 15 bp, Homo sapiens
tttgaacatatttag

SEQ ID NO: 665061 - DNA, 15 bp, Homo sapiens
ttgaacatatttagt

SEQ ID NO: 665062 - DNA, 15 bp, Homo sapiens
tgaacatatttagtg

SEQ ID NO: 665063 - DNA, 15 bp, Homo sapiens
gaacatatttagtgg

SEQ ID NO: 665064 - DNA, 15 bp, Homo sapiens
aacatatttagtggc

SEQ ID NO: 665065 - DNA, 15 bp, Homo sapiens
acatatttagtggca

SEQ ID NO: 665066 - DNA, 15 bp, Homo sapiens
catatttagtggcag

SEQ ID NO: 665067 - DNA, 15 bp, Homo sapiens
atatttagtggcaga

SEQ ID NO: 665068 - DNA, 15 bp, Homo sapiens
tatttagtggcagat

SEQ ID NO: 665069 - DNA, 15 bp, Homo sapiens
atttagtggcagatg

SEQ ID NO: 665070 - DNA, 15 bp, Homo sapiens
tttagtggcagatgt

SEQ ID NO: 665071 - DNA, 15 bp, Homo sapiens
ttagtggcagatgtt

SEQ ID NO: 665072 - DNA, 15 bp, Homo sapiens
tagtggcagatgttt

SEQ ID NO: 665073 - DNA, 15 bp, Homo sapiens
agtggcagatgtttg

SEQ ID NO: 665074 - DNA, 15 bp, Homo sapiens
gtggcagatgtttgt

SEQ ID NO: 665075 - DNA, 15 bp, Homo sapiens
tggcagatgtttgtc

SEQ ID NO: 665076 - DNA, 15 bp, Homo sapiens
ggcagatgtttgtcc

SEQ ID NO: 665077 - DNA, 15 bp, Homo sapiens
gcagatgtttgtcca

SEQ ID NO: 665078 - DNA, 15 bp, Homo sapiens
cagatgtttgtccag

SEQ ID NO: 665079 - DNA, 15 bp, Homo sapiens
agatgtttgtccagt

SEQ ID NO: 665080 - DNA, 15 bp, Homo sapiens
gatgtttgtccagtg

SEQ ID NO: 665081 - DNA, 15 bp, Homo sapiens
atgtttgtccagtga

SEQ ID NO: 665082 - DNA, 15 bp, Homo sapiens
tgtttgtccagtgat

SEQ ID NO: 665083 - DNA, 15 bp, Homo sapiens
gtttgtccagtgatt

SEQ ID NO: 665084 - DNA, 15 bp, Homo sapiens
tttgtccagtgattt

SEQ ID NO: 665085 - DNA, 15 bp, Homo sapiens
ttgtccagtgatttt

SEQ ID NO: 665086 - DNA, 15 bp, Homo sapiens
tgtccagtgatttta

SEQ ID NO: 665087 - DNA, 15 bp, Homo sapiens
gtccagtgattttag

SEQ ID NO: 665088 - DNA, 15 bp, Homo sapiens
tccagtgattttagt

SEQ ID NO: 665089 - DNA, 15 bp, Homo sapiens
ccagtgattttagtc

SEQ ID NO: 665090 - DNA, 15 bp, Homo sapiens
cagtgattttagtca

SEQ ID NO: 665091 - DNA, 15 bp, Homo sapiens
agtgattttagtcaa

SEQ ID NO: 665092 - DNA, 15 bp, Homo sapiens
gtgattttagtcaat

SEQ ID NO: 665093 - DNA, 15 bp, Homo sapiens
tgattttagtcaata

SEQ ID NO: 665094 - DNA, 15 bp, Homo sapiens
gattttagtcaatac

SEQ ID NO: 665095 - DNA, 15 bp, Homo sapiens
attttagtcaatact

SEQ ID NO: 665096 - DNA, 15 bp, Homo sapiens
ttttagtcaatactt

SEQ ID NO: 665097 - DNA, 15 bp, Homo sapiens
tttagtcaatacttt

SEQ ID NO: 665098 - DNA, 15 bp, Homo sapiens
ttagtcaatacttta

SEQ ID NO: 665099 - DNA, 15 bp, Homo sapiens
tagtcaatactttac

SEQ ID NO: 665100 - DNA, 15 bp, Homo sapiens
agtcaatactttaca

SEQ ID NO: 665101 - DNA, 15 bp, Homo sapiens
gtcaatactttacat

SEQ ID NO: 665102 - DNA, 15 bp, Homo sapiens
tcaatactttacata

SEQ ID NO: 665103 - DNA, 15 bp, Homo sapiens
caatactttacataa

SEQ ID NO: 665104 - DNA, 15 bp, Homo sapiens
aatactttacataat

SEQ ID NO: 665105 - DNA, 15 bp, Homo sapiens
atactttacataatt

SEQ ID NO: 665106 - DNA, 15 bp, Homo sapiens
tactttacataattt

SEQ ID NO: 665107 - DNA, 15 bp, Homo sapiens
actttacataatttg

SEQ ID NO: 665108 - DNA, 15 bp, Homo sapiens
ctttacataatttgg

SEQ ID NO: 665109 - DNA, 15 bp, Homo sapiens
tttacataatttgga

SEQ ID NO: 665110 - DNA, 15 bp, Homo sapiens
ttacataatttggaa

SEQ ID NO: 665111 - DNA, 15 bp, Homo sapiens
tacataatttggaat

SEQ ID NO: 665112 - DNA, 15 bp, Homo sapiens
acataatttggaatc

SEQ ID NO: 665113 - DNA, 15 bp, Homo sapiens
cataatttggaatca

SEQ ID NO: 665114 - DNA, 15 bp, Homo sapiens
ataatttggaatcat

SEQ ID NO: 665115 - DNA, 15 bp, Homo sapiens
taatttggaatcatc

SEQ ID NO: 665116 - DNA, 15 bp, Homo sapiens
aatttggaatcatct

SEQ ID NO: 665117 - DNA, 15 bp, Homo sapiens
atttggaatcatctt

SEQ ID NO: 665118 - DNA, 15 bp, Homo sapiens
tttggaatcatctta

SEQ ID NO: 665119 - DNA, 15 bp, Homo sapiens
ttggaatcatcttat

SEQ ID NO: 665120 - DNA, 15 bp, Homo sapiens
tggaatcatcttatg

SEQ ID NO: 665121 - DNA, 15 bp, Homo sapiens
ggaatcatcttatga

SEQ ID NO: 665122 - DNA, 15 bp, Homo sapiens
gaatcatcttatgag

SEQ ID NO: 665123 - DNA, 15 bp, Homo sapiens
aatcatcttatgagt

SEQ ID NO: 665124 - DNA, 15 bp, Homo sapiens
atcatcttatgagta

SEQ ID NO: 665125 - DNA, 15 bp, Homo sapiens
tcatcttatgagtaa

SEQ ID NO: 665126 - DNA, 15 bp, Homo sapiens
catcttatgagtaaa

SEQ ID NO: 665127 - DNA, 15 bp, Homo sapiens
atcttatgagtaaaa

SEQ ID NO: 665128 - DNA, 15 bp, Homo sapiens
tcttatgagtaaaac

SEQ ID NO: 665129 - DNA, 15 bp, Homo sapiens
cttatgagtaaaact

SEQ ID NO: 665130 - DNA, 15 bp, Homo sapiens
ttatgagtaaaactt

SEQ ID NO: 665131 - DNA, 15 bp, Homo sapiens
tatgagtaaaacttt

SEQ ID NO: 665132 - DNA, 15 bp, Homo sapiens
atgagtaaaacttta

SEQ ID NO: 665133 - DNA, 15 bp, Homo sapiens
tgagtaaaactttat

SEQ ID NO: 665134 - DNA, 15 bp, Homo sapiens
gagtaaaactttatc

SEQ ID NO: 665135 - DNA, 15 bp, Homo sapiens
agtaaaactttatca

SEQ ID NO: 665136 - DNA, 15 bp, Homo sapiens
gtaaaactttatcat

SEQ ID NO: 665137 - DNA, 15 bp, Homo sapiens
taaaactttatcatt

SEQ ID NO: 665138 - DNA, 15 bp, Homo sapiens
aaaactttatcattt

SEQ ID NO: 665139 - DNA, 15 bp, Homo sapiens
aaactttatcattta

SEQ ID NO: 665140 - DNA, 15 bp, Homo sapiens
aactttatcatttac

SEQ ID NO: 665141 - DNA, 15 bp, Homo sapiens
actttatcatttacc

SEQ ID NO: 665142 - DNA, 15 bp, Homo sapiens
ctttatcatttacct

SEQ ID NO: 665143 - DNA, 15 bp, Homo sapiens
tttatcatttacctg

SEQ ID NO: 665144 - DNA, 15 bp, Homo sapiens
ttatcatttacctgg

SEQ ID NO: 665145 - DNA, 15 bp, Homo sapiens
tatcatttacctgga

SEQ ID NO: 665146 - DNA, 15 bp, Homo sapiens
atcatttacctggat

SEQ ID NO: 665147 - DNA, 15 bp, Homo sapiens
tcatttacctggata

SEQ ID NO: 665148 - DNA, 15 bp, Homo sapiens
catttacctggataa

SEQ ID NO: 665149 - DNA, 15 bp, Homo sapiens
atttacctggataaa

SEQ ID NO: 665150 - DNA, 15 bp, Homo sapiens
tttacctggataaat

SEQ ID NO: 665151 - DNA, 15 bp, Homo sapiens
ttacctggataaatg

SEQ ID NO: 665152 - DNA, 15 bp, Homo sapiens
tacctggataaatgc

SEQ ID NO: 665153 - DNA, 15 bp, Homo sapiens
acctggataaatgca

SEQ ID NO: 665154 - DNA, 15 bp, Homo sapiens
cctggataaatgcat

SEQ ID NO: 665155 - DNA, 15 bp, Homo sapiens
ctggataaatgcatc

SEQ ID NO: 665156 - DNA, 15 bp, Homo sapiens
tggataaatgcatca

SEQ ID NO: 665157 - DNA, 15 bp, Homo sapiens
ggataaatgcatcat

SEQ ID NO: 665158 - DNA, 15 bp, Homo sapiens
gataaatgcatcata

SEQ ID NO: 665159 - DNA, 15 bp, Homo sapiens
ataaatgcatcatat

SEQ ID NO: 665160 - DNA, 15 bp, Homo sapiens
taaatgcatcatatt

SEQ ID NO: 665161 - DNA, 15 bp, Homo sapiens
aaatgcatcatattt

SEQ ID NO: 665162 - DNA, 15 bp, Homo sapiens
aatgcatcatattta

SEQ ID NO: 665163 - DNA, 15 bp, Homo sapiens
atgcatcatatttat

SEQ ID NO: 665164 - DNA, 15 bp, Homo sapiens
tgcatcatatttatg

SEQ ID NO: 665165 - DNA, 15 bp, Homo sapiens
gcatcatatttatgt

SEQ ID NO: 665166 - DNA, 15 bp, Homo sapiens
catcatatttatgta

SEQ ID NO: 665167 - DNA, 15 bp, Homo sapiens
atcatatttatgtaa

SEQ ID NO: 665168 - DNA, 15 bp, Homo sapiens
tcatatttatgtaaa

SEQ ID NO: 665169 - DNA, 15 bp, Homo sapiens
catatttatgtaaaa

SEQ ID NO: 665170 - DNA, 15 bp, Homo sapiens
atatttatgtaaaaa

SEQ ID NO: 665171 - DNA, 15 bp, Homo sapiens
tatttatgtaaaaat

SEQ ID NO: 665172 - DNA, 15 bp, Homo sapiens
atttatgtaaaaatc

SEQ ID NO: 665173 - DNA, 15 bp, Homo sapiens
tttatgtaaaaatca

SEQ ID NO: 665174 - DNA, 15 bp, Homo sapiens
ttatgtaaaaatcat

SEQ ID NO: 665175 - DNA, 15 bp, Homo sapiens
tatgtaaaaatcatc

SEQ ID NO: 665176 - DNA, 15 bp, Homo sapiens
atgtaaaaatcatca

SEQ ID NO: 665177 - DNA, 15 bp, Homo sapiens
tgtaaaaatcatcat

SEQ ID NO: 665178 - DNA, 15 bp, Homo sapiens
gtaaaaatcatcata

SEQ ID NO: 665179 - DNA, 15 bp, Homo sapiens
taaaaatcatcatat

SEQ ID NO: 665180 - DNA, 15 bp, Homo sapiens
aaaaatcatcatata

SEQ ID NO: 665181 - DNA, 15 bp, Homo sapiens
aaaatcatcatatat

SEQ ID NO: 665182 - DNA, 15 bp, Homo sapiens
aaatcatcatatata

SEQ ID NO: 665183 - DNA, 15 bp, Homo sapiens
aatcatcatatatat

SEQ ID NO: 665184 - DNA, 15 bp, Homo sapiens
atcatcatatatata

SEQ ID NO: 665185 - DNA, 15 bp, Homo sapiens
tcatcatatatatat

SEQ ID NO: 665186 - DNA, 15 bp, Homo sapiens
catcatatatatata

SEQ ID NO: 665187 - DNA, 15 bp, Homo sapiens
atcatatatatataa

SEQ ID NO: 665188 - DNA, 15 bp, Homo sapiens
tcatatatatataaa

SEQ ID NO: 665189 - DNA, 15 bp, Homo sapiens
catatatatataaat

SEQ ID NO: 665190 - DNA, 15 bp, Homo sapiens
atatatatataaatc

SEQ ID NO: 665191 - DNA, 15 bp, Homo sapiens
tatatatataaatca

SEQ ID NO: 665192 - DNA, 15 bp, Homo sapiens
atatatataaatcat

SEQ ID NO: 665193 - DNA, 15 bp, Homo sapiens
tatatataaatcatc

SEQ ID NO: 665194 - DNA, 15 bp, Homo sapiens
atatataaatcatca

SEQ ID NO: 665195 - DNA, 15 bp, Homo sapiens
tatataaatcatcat

SEQ ID NO: 665196 - DNA, 15 bp, Homo sapiens
atataaatcatcata

SEQ ID NO: 665197 - DNA, 15 bp, Homo sapiens
tataaatcatcatac

SEQ ID NO: 665198 - DNA, 15 bp, Homo sapiens
ataaatcatcataca

SEQ ID NO: 665199 - DNA, 15 bp, Homo sapiens
taaatcatcatacac

SEQ ID NO: 665200 - DNA, 15 bp, Homo sapiens
aaatcatcatacaca

SEQ ID NO: 665201 - DNA, 15 bp, Homo sapiens
aatcatcatacacac

SEQ ID NO: 665202 - DNA, 15 bp, Homo sapiens
atcatcatacacaca

SEQ ID NO: 665203 - DNA, 15 bp, Homo sapiens
tcatcatacacacac

SEQ ID NO: 665204 - DNA, 15 bp, Homo sapiens
catcatacacacaca

SEQ ID NO: 665205 - DNA, 15 bp, Homo sapiens
atcatacacacacac

SEQ ID NO: 665206 - DNA, 15 bp, Homo sapiens
tcatacacacacaca

SEQ ID NO: 665207 - DNA, 15 bp, Homo sapiens
catacacacacacac

SEQ ID NO: 665208 - DNA, 15 bp, Homo sapiens
atacacacacacaca

SEQ ID NO: 665209 - DNA, 15 bp, Homo sapiens
tacacacacacacac

SEQ ID NO: 665210 - DNA, 15 bp, Homo sapiens
acacacacacacaca

SEQ ID NO: 665211 - DNA, 15 bp, Homo sapiens
cacacacacacacac

SEQ ID NO: 665212 - DNA, 15 bp, Homo sapiens
acacacacacacact

SEQ ID NO: 665213 - DNA, 15 bp, Homo sapiens
cacacacacacactc

SEQ ID NO: 665214 - DNA, 15 bp, Homo sapiens
acacacacacactcc

SEQ ID NO: 665215 - DNA, 15 bp, Homo sapiens
cacacacacactccc

SEQ ID NO: 665216 - DNA, 15 bp, Homo sapiens
acacacacactccct

SEQ ID NO: 665217 - DNA, 15 bp, Homo sapiens
cacacacactccctc

SEQ ID NO: 665218 - DNA, 15 bp, Homo sapiens
acacacactccctca

SEQ ID NO: 665219 - DNA, 15 bp, Homo sapiens
cacacactccctcat

SEQ ID NO: 665220 - DNA, 15 bp, Homo sapiens
acacactccctcata

SEQ ID NO: 665221 - DNA, 15 bp, Homo sapiens
cacactccctcatag

SEQ ID NO: 665222 - DNA, 15 bp, Homo sapiens
acactccctcataga

SEQ ID NO: 665223 - DNA, 15 bp, Homo sapiens
cactccctcatagag

SEQ ID NO: 665224 - DNA, 15 bp, Homo sapiens
actccctcatagagt

SEQ ID NO: 665225 - DNA, 15 bp, Homo sapiens
ctccctcatagagtt

SEQ ID NO: 665226 - DNA, 15 bp, Homo sapiens
tccctcatagagttt

SEQ ID NO: 665227 - DNA, 15 bp, Homo sapiens
ccctcatagagttta

SEQ ID NO: 665228 - DNA, 15 bp, Homo sapiens
cctcatagagtttat

SEQ ID NO: 665229 - DNA, 15 bp, Homo sapiens
ctcatagagtttata

SEQ ID NO: 665230 - DNA, 15 bp, Homo sapiens
tcatagagtttatat

SEQ ID NO: 665231 - DNA, 15 bp, Homo sapiens
catagagtttatatt

SEQ ID NO: 665232 - DNA, 15 bp, Homo sapiens
atagagtttatatta

SEQ ID NO: 665233 - DNA, 15 bp, Homo sapiens
tagagtttatattat

SEQ ID NO: 665234 - DNA, 15 bp, Homo sapiens
agagtttatattata

SEQ ID NO: 665235 - DNA, 15 bp, Homo sapiens
gagtttatattatag

SEQ ID NO: 665236 - DNA, 15 bp, Homo sapiens
agtttatattatagt

SEQ ID NO: 665237 - DNA, 15 bp, Homo sapiens
gtttatattatagta

SEQ ID NO: 665238 - DNA, 15 bp, Homo sapiens
tttatattatagtac

SEQ ID NO: 665239 - DNA, 15 bp, Homo sapiens
ttatattatagtacg

SEQ ID NO: 665240 - DNA, 15 bp, Homo sapiens
tatattatagtacgg

SEQ ID NO: 665241 - DNA, 15 bp, Homo sapiens
atattatagtacgga

SEQ ID NO: 665242 - DNA, 15 bp, Homo sapiens
tattatagtacggag

SEQ ID NO: 665243 - DNA, 15 bp, Homo sapiens
attatagtacggagg

SEQ ID NO: 665244 - DNA, 15 bp, Homo sapiens
ttatagtacggagga

SEQ ID NO: 665245 - DNA, 15 bp, Homo sapiens
tatagtacggaggac

SEQ ID NO: 665246 - DNA, 15 bp, Homo sapiens
atagtacggaggaca

SEQ ID NO: 665247 - DNA, 15 bp, Homo sapiens
tagtacggaggacag

SEQ ID NO: 665248 - DNA, 15 bp, Homo sapiens
agtacggaggacaga

SEQ ID NO: 665249 - DNA, 15 bp, Homo sapiens
gtacggaggacagac

SEQ ID NO: 665250 - DNA, 15 bp, Homo sapiens
tacggaggacagaca

SEQ ID NO: 665251 - DNA, 15 bp, Homo sapiens
acggaggacagacat

SEQ ID NO: 665252 - DNA, 15 bp, Homo sapiens
cggaggacagacata

SEQ ID NO: 665253 - DNA, 15 bp, Homo sapiens
ggaggacagacataa

SEQ ID NO: 665254 - DNA, 15 bp, Homo sapiens
gaggacagacataaa

SEQ ID NO: 665255 - DNA, 15 bp, Homo sapiens
aggacagacataaat

SEQ ID NO: 665256 - DNA, 15 bp, Homo sapiens
ggacagacataaata

SEQ ID NO: 665257 - DNA, 15 bp, Homo sapiens
gacagacataaataa

SEQ ID NO: 665258 - DNA, 15 bp, Homo sapiens
acagacataaataat

SEQ ID NO: 665259 - DNA, 15 bp, Homo sapiens
cagacataaataatg

SEQ ID NO: 665260 - DNA, 15 bp, Homo sapiens
agacataaataatgt

SEQ ID NO: 665261 - DNA, 15 bp, Homo sapiens
gacataaataatgta

SEQ ID NO: 665262 - DNA, 15 bp, Homo sapiens
acataaataatgtac

SEQ ID NO: 665263 - DNA, 15 bp, Homo sapiens
cataaataatgtaca

SEQ ID NO: 665264 - DNA, 15 bp, Homo sapiens
ataaataatgtacat

SEQ ID NO: 665265 - DNA, 15 bp, Homo sapiens
taaataatgtacata

SEQ ID NO: 665266 - DNA, 15 bp, Homo sapiens
aaataatgtacatac

SEQ ID NO: 665267 - DNA, 15 bp, Homo sapiens
aataatgtacatact

SEQ ID NO: 665268 - DNA, 15 bp, Homo sapiens
ataatgtacatacta

SEQ ID NO: 665269 - DNA, 15 bp, Homo sapiens
taatgtacatactaa

SEQ ID NO: 665270 - DNA, 15 bp, Homo sapiens
aatgtacatactaaa

SEQ ID NO: 665271 - DNA, 15 bp, Homo sapiens
atgtacatactaaat

SEQ ID NO: 665272 - DNA, 15 bp, Homo sapiens
tgtacatactaaata

SEQ ID NO: 665273 - DNA, 15 bp, Homo sapiens
gtacatactaaataa

SEQ ID NO: 665274 - DNA, 15 bp, Homo sapiens
tacatactaaataag

SEQ ID NO: 665275 - DNA, 15 bp, Homo sapiens
acatactaaataagt

SEQ ID NO: 665276 - DNA, 15 bp, Homo sapiens
catactaaataagta

SEQ ID NO: 665277 - DNA, 15 bp, Homo sapiens
atactaaataagtaa

SEQ ID NO: 665278 - DNA, 15 bp, Homo sapiens
tactaaataagtaaa

SEQ ID NO: 665279 - DNA, 15 bp, Homo sapiens
actaaataagtaaac

SEQ ID NO: 665280 - DNA, 15 bp, Homo sapiens
ctaaataagtaaacc

SEQ ID NO: 665281 - DNA, 15 bp, Homo sapiens
taaataagtaaacca

SEQ ID NO: 665282 - DNA, 15 bp, Homo sapiens
aaataagtaaaccac

SEQ ID NO: 665283 - DNA, 15 bp, Homo sapiens
aataagtaaaccaca

SEQ ID NO: 665284 - DNA, 15 bp, Homo sapiens
ataagtaaaccacag

SEQ ID NO: 665285 - DNA, 15 bp, Homo sapiens
taagtaaaccacagc

SEQ ID NO: 665286 - DNA, 15 bp, Homo sapiens
aagtaaaccacagcc

SEQ ID NO: 665287 - DNA, 15 bp, Homo sapiens
agtaaaccacagcca

SEQ ID NO: 665288 - DNA, 15 bp, Homo sapiens
gtaaaccacagccaa

SEQ ID NO: 665289 - DNA, 15 bp, Homo sapiens
taaaccacagccaat

SEQ ID NO: 665290 - DNA, 15 bp, Homo sapiens
aaaccacagccaatg

SEQ ID NO: 665291 - DNA, 15 bp, Homo sapiens
aaccacagccaatgt

SEQ ID NO: 665292 - DNA, 15 bp, Homo sapiens
accacagccaatgtt

SEQ ID NO: 665293 - DNA, 15 bp, Homo sapiens
ccacagccaatgtta

SEQ ID NO: 665294 - DNA, 15 bp, Homo sapiens
cacagccaatgttag

SEQ ID NO: 665295 - DNA, 15 bp, Homo sapiens
acagccaatgttaga

SEQ ID NO: 665296 - DNA, 15 bp, Homo sapiens
cagccaatgttagaa

SEQ ID NO: 665297 - DNA, 15 bp, Homo sapiens
agccaatgttagaag

SEQ ID NO: 665298 - DNA, 15 bp, Homo sapiens
gccaatgttagaagg

SEQ ID NO: 665299 - DNA, 15 bp, Homo sapiens
ccaatgttagaaggt

SEQ ID NO: 665300 - DNA, 15 bp, Homo sapiens
caatgttagaaggta

SEQ ID NO: 665301 - DNA, 15 bp, Homo sapiens
aatgttagaaggtaa

SEQ ID NO: 665302 - DNA, 15 bp, Homo sapiens
atgttagaaggtaat

SEQ ID NO: 665303 - DNA, 15 bp, Homo sapiens
tgttagaaggtaatt

SEQ ID NO: 665304 - DNA, 15 bp, Homo sapiens
gttagaaggtaatta

SEQ ID NO: 665305 - DNA, 15 bp, Homo sapiens
ttagaaggtaattaa

SEQ ID NO: 665306 - DNA, 15 bp, Homo sapiens
tagaaggtaattaac

SEQ ID NO: 665307 - DNA, 15 bp, Homo sapiens
agaaggtaattaacg

SEQ ID NO: 665308 - DNA, 15 bp, Homo sapiens
gaaggtaattaacgc

SEQ ID NO: 665309 - DNA, 15 bp, Homo sapiens
aaggtaattaacgcc

SEQ ID NO: 665310 - DNA, 15 bp, Homo sapiens
aggtaattaacgcca

SEQ ID NO: 665311 - DNA, 15 bp, Homo sapiens
ggtaattaacgccat

SEQ ID NO: 665312 - DNA, 15 bp, Homo sapiens
gtaattaacgccatg

SEQ ID NO: 665313 - DNA, 15 bp, Homo sapiens
taattaacgccatgg

SEQ ID NO: 665314 - DNA, 15 bp, Homo sapiens
aattaacgccatgga

SEQ ID NO: 665315 - DNA, 15 bp, Homo sapiens
attaacgccatggaa

SEQ ID NO: 665316 - DNA, 15 bp, Homo sapiens
ttaacgccatggaaa

SEQ ID NO: 665317 - DNA, 15 bp, Homo sapiens
taacgccatggaaaa

SEQ ID NO: 665318 - DNA, 15 bp, Homo sapiens
aacgccatggaaaaa

SEQ ID NO: 665319 - DNA, 15 bp, Homo sapiens
acgccatggaaaaaa

SEQ ID NO: 665320 - DNA, 15 bp, Homo sapiens
cgccatggaaaaaag

SEQ ID NO: 665321 - DNA, 15 bp, Homo sapiens
gccatggaaaaaagc

SEQ ID NO: 665322 - DNA, 15 bp, Homo sapiens
ccatggaaaaaagca

SEQ ID NO: 665323 - DNA, 15 bp, Homo sapiens
catggaaaaaagcat

SEQ ID NO: 665324 - DNA, 15 bp, Homo sapiens
atggaaaaaagcatt

SEQ ID NO: 665325 - DNA, 15 bp, Homo sapiens
tggaaaaaagcatta

SEQ ID NO: 665326 - DNA, 15 bp, Homo sapiens
ggaaaaaagcattaa

SEQ ID NO: 665327 - DNA, 15 bp, Homo sapiens
gaaaaaagcattaat

SEQ ID NO: 665328 - DNA, 15 bp, Homo sapiens
aaaaaagcattaatc

SEQ ID NO: 665329 - DNA, 15 bp, Homo sapiens
aaaaagcattaatcc

SEQ ID NO: 665330 - DNA, 15 bp, Homo sapiens
aaaagcattaatcca

SEQ ID NO: 665331 - DNA, 15 bp, Homo sapiens
aaagcattaatccag

SEQ ID NO: 665332 - DNA, 15 bp, Homo sapiens
aagcattaatccagg

SEQ ID NO: 665333 - DNA, 15 bp, Homo sapiens
agcattaatccaggt

SEQ ID NO: 665334 - DNA, 15 bp, Homo sapiens
gcattaatccaggtt

SEQ ID NO: 665335 - DNA, 15 bp, Homo sapiens
cattaatccaggtta

SEQ ID NO: 665336 - DNA, 15 bp, Homo sapiens
attaatccaggttaa

SEQ ID NO: 665337 - DNA, 15 bp, Homo sapiens
ttaatccaggttaag

SEQ ID NO: 665338 - DNA, 15 bp, Homo sapiens
taatccaggttaagg

SEQ ID NO: 665339 - DNA, 15 bp, Homo sapiens
aatccaggttaaggg

SEQ ID NO: 665340 - DNA, 15 bp, Homo sapiens
atccaggttaagggg

SEQ ID NO: 665341 - DNA, 15 bp, Homo sapiens
tccaggttaagggga

SEQ ID NO: 665342 - DNA, 15 bp, Homo sapiens
ccaggttaaggggat

SEQ ID NO: 665343 - DNA, 15 bp, Homo sapiens
caggttaaggggatc

SEQ ID NO: 665344 - DNA, 15 bp, Homo sapiens
aggttaaggggatca

SEQ ID NO: 665345 - DNA, 15 bp, Homo sapiens
ggttaaggggatcag

SEQ ID NO: 665346 - DNA, 15 bp, Homo sapiens
gttaaggggatcagg

SEQ ID NO: 665347 - DNA, 15 bp, Homo sapiens
ttaaggggatcagga

SEQ ID NO: 665348 - DNA, 15 bp, Homo sapiens
taaggggatcaggag

SEQ ID NO: 665349 - DNA, 15 bp, Homo sapiens
aaggggatcaggagt

SEQ ID NO: 665350 - DNA, 15 bp, Homo sapiens
aggggatcaggagta

SEQ ID NO: 665351 - DNA, 15 bp, Homo sapiens
ggggatcaggagtac

SEQ ID NO: 665352 - DNA, 15 bp, Homo sapiens
gggatcaggagtaca

SEQ ID NO: 665353 - DNA, 15 bp, Homo sapiens
ggatcaggagtacaa

SEQ ID NO: 665354 - DNA, 15 bp, Homo sapiens
gatcaggagtacaaa

SEQ ID NO: 665355 - DNA, 15 bp, Homo sapiens
atcaggagtacaaaa

SEQ ID NO: 665356 - DNA, 15 bp, Homo sapiens
tcaggagtacaaaag

SEQ ID NO: 665357 - DNA, 15 bp, Homo sapiens
caggagtacaaaagg

SEQ ID NO: 665358 - DNA, 15 bp, Homo sapiens
aggagtacaaaaggg

SEQ ID NO: 665359 - DNA, 15 bp, Homo sapiens
ggagtacaaaagggg

SEQ ID NO: 665360 - DNA, 15 bp, Homo sapiens
gagtacaaaagggga

SEQ ID NO: 665361 - DNA, 15 bp, Homo sapiens
agtacaaaaggggag

SEQ ID NO: 665362 - DNA, 15 bp, Homo sapiens
gtacaaaaggggagt

SEQ ID NO: 665363 - DNA, 15 bp, Homo sapiens
tacaaaaggggagta

SEQ ID NO: 665364 - DNA, 15 bp, Homo sapiens
acaaaaggggagtac

SEQ ID NO: 665365 - DNA, 15 bp, Homo sapiens
caaaaggggagtact

SEQ ID NO: 665366 - DNA, 15 bp, Homo sapiens
aaaaggggagtactt

SEQ ID NO: 665367 - DNA, 15 bp, Homo sapiens
aaaggggagtacttt

SEQ ID NO: 665368 - DNA, 15 bp, Homo sapiens
aaggggagtactttg

SEQ ID NO: 665369 - DNA, 15 bp, Homo sapiens
aggggagtactttgt

SEQ ID NO: 665370 - DNA, 15 bp, Homo sapiens
ggggagtactttgta

SEQ ID NO: 665371 - DNA, 15 bp, Homo sapiens
gggagtactttgtaa

SEQ ID NO: 665372 - DNA, 15 bp, Homo sapiens
ggagtactttgtaat

SEQ ID NO: 665373 - DNA, 15 bp, Homo sapiens
gagtactttgtaatt

SEQ ID NO: 665374 - DNA, 15 bp, Homo sapiens
agtactttgtaattt

SEQ ID NO: 665375 - DNA, 15 bp, Homo sapiens
gtactttgtaatttt

SEQ ID NO: 665376 - DNA, 15 bp, Homo sapiens
tactttgtaatttta

SEQ ID NO: 665377 - DNA, 15 bp, Homo sapiens
actttgtaattttaa

SEQ ID NO: 665378 - DNA, 15 bp, Homo sapiens
ctttgtaattttaag

SEQ ID NO: 665379 - DNA, 15 bp, Homo sapiens
tttgtaattttaagt

SEQ ID NO: 665380 - DNA, 15 bp, Homo sapiens
ttgtaattttaagta

SEQ ID NO: 665381 - DNA, 15 bp, Homo sapiens
tgtaattttaagtag

SEQ ID NO: 665382 - DNA, 15 bp, Homo sapiens
gtaattttaagtagg

SEQ ID NO: 665383 - DNA, 15 bp, Homo sapiens
taattttaagtaggg

SEQ ID NO: 665384 - DNA, 15 bp, Homo sapiens
aattttaagtagggt

SEQ ID NO: 665385 - DNA, 15 bp, Homo sapiens
attttaagtagggtg

SEQ ID NO: 665386 - DNA, 15 bp, Homo sapiens
ttttaagtagggtgg

SEQ ID NO: 665387 - DNA, 15 bp, Homo sapiens
tttaagtagggtggt

SEQ ID NO: 665388 - DNA, 15 bp, Homo sapiens
ttaagtagggtggtt

SEQ ID NO: 665389 - DNA, 15 bp, Homo sapiens
taagtagggtggtta

SEQ ID NO: 665390 - DNA, 15 bp, Homo sapiens
aagtagggtggttag

SEQ ID NO: 665391 - DNA, 15 bp, Homo sapiens
agtagggtggttagg

SEQ ID NO: 665392 - DNA, 15 bp, Homo sapiens
gtagggtggttaggg

SEQ ID NO: 665393 - DNA, 15 bp, Homo sapiens
tagggtggttagggt

SEQ ID NO: 665394 - DNA, 15 bp, Homo sapiens
agggtggttagggta

SEQ ID NO: 665395 - DNA, 15 bp, Homo sapiens
gggtggttagggtag

SEQ ID NO: 665396 - DNA, 15 bp, Homo sapiens
ggtggttagggtaga

SEQ ID NO: 665397 - DNA, 15 bp, Homo sapiens
gtggttagggtagat

SEQ ID NO: 665398 - DNA, 15 bp, Homo sapiens
tggttagggtagatc

SEQ ID NO: 665399 - DNA, 15 bp, Homo sapiens
ggttagggtagatct

SEQ ID NO: 665400 - DNA, 15 bp, Homo sapiens
gttagggtagatctt

SEQ ID NO: 665401 - DNA, 15 bp, Homo sapiens
ttagggtagatctta

SEQ ID NO: 665402 - DNA, 15 bp, Homo sapiens
tagggtagatcttat

SEQ ID NO: 665403 - DNA, 15 bp, Homo sapiens
agggtagatcttatt

SEQ ID NO: 665404 - DNA, 15 bp, Homo sapiens
gggtagatcttattt

SEQ ID NO: 665405 - DNA, 15 bp, Homo sapiens
ggtagatcttatttt

SEQ ID NO: 665406 - DNA, 15 bp, Homo sapiens
gtagatcttatttta

SEQ ID NO: 665407 - DNA, 15 bp, Homo sapiens
tagatcttattttaa

SEQ ID NO: 665408 - DNA, 15 bp, Homo sapiens
agatcttattttaaa

SEQ ID NO: 665409 - DNA, 15 bp, Homo sapiens
gatcttattttaaag

SEQ ID NO: 665410 - DNA, 15 bp, Homo sapiens
atcttattttaaagg

SEQ ID NO: 665411 - DNA, 15 bp, Homo sapiens
tcttattttaaaggt

SEQ ID NO: 665412 - DNA, 15 bp, Homo sapiens
cttattttaaaggta

SEQ ID NO: 665413 - DNA, 15 bp, Homo sapiens
ttattttaaaggtaa

SEQ ID NO: 665414 - DNA, 15 bp, Homo sapiens
tattttaaaggtaat

SEQ ID NO: 665415 - DNA, 15 bp, Homo sapiens
attttaaaggtaata

SEQ ID NO: 665416 - DNA, 15 bp, Homo sapiens
ttttaaaggtaatat

SEQ ID NO: 665417 - DNA, 15 bp, Homo sapiens
tttaaaggtaatatt

SEQ ID NO: 665418 - DNA, 15 bp, Homo sapiens
ttaaaggtaatattt

SEQ ID NO: 665419 - DNA, 15 bp, Homo sapiens
taaaggtaatatttg

SEQ ID NO: 665420 - DNA, 15 bp, Homo sapiens
aaaggtaatatttga

SEQ ID NO: 665421 - DNA, 15 bp, Homo sapiens
aaggtaatatttgag

SEQ ID NO: 665422 - DNA, 15 bp, Homo sapiens
aggtaatatttgagc

SEQ ID NO: 665423 - DNA, 15 bp, Homo sapiens
ggtaatatttgagca

SEQ ID NO: 665424 - DNA, 15 bp, Homo sapiens
gtaatatttgagcaa

SEQ ID NO: 665425 - DNA, 15 bp, Homo sapiens
taatatttgagcaaa

SEQ ID NO: 665426 - DNA, 15 bp, Homo sapiens
aatatttgagcaaag

SEQ ID NO: 665427 - DNA, 15 bp, Homo sapiens
atatttgagcaaaga

SEQ ID NO: 665428 - DNA, 15 bp, Homo sapiens
tatttgagcaaagac

SEQ ID NO: 665429 - DNA, 15 bp, Homo sapiens
atttgagcaaagact

SEQ ID NO: 665430 - DNA, 15 bp, Homo sapiens
tttgagcaaagactt

SEQ ID NO: 665431 - DNA, 15 bp, Homo sapiens
ttgagcaaagacttg

SEQ ID NO: 665432 - DNA, 15 bp, Homo sapiens
tgagcaaagacttga

SEQ ID NO: 665433 - DNA, 15 bp, Homo sapiens
gagcaaagacttgaa

SEQ ID NO: 665434 - DNA, 15 bp, Homo sapiens
agcaaagacttgaaa

SEQ ID NO: 665435 - DNA, 15 bp, Homo sapiens
gcaaagacttgaaag

SEQ ID NO: 665436 - DNA, 15 bp, Homo sapiens
caaagacttgaaaga

SEQ ID NO: 665437 - DNA, 15 bp, Homo sapiens
aaagacttgaaagaa

SEQ ID NO: 665438 - DNA, 15 bp, Homo sapiens
aagacttgaaagaaa

SEQ ID NO: 665439 - DNA, 15 bp, Homo sapiens
agacttgaaagaaat

SEQ ID NO: 665440 - DNA, 15 bp, Homo sapiens
gacttgaaagaaatg

SEQ ID NO: 665441 - DNA, 15 bp, Homo sapiens
acttgaaagaaatga

SEQ ID NO: 665442 - DNA, 15 bp, Homo sapiens
cttgaaagaaatgag

SEQ ID NO: 665443 - DNA, 15 bp, Homo sapiens
ttgaaagaaatgaga

SEQ ID NO: 665444 - DNA, 15 bp, Homo sapiens
tgaaagaaatgagag

SEQ ID NO: 665445 - DNA, 15 bp, Homo sapiens
gaaagaaatgagagg

SEQ ID NO: 665446 - DNA, 15 bp, Homo sapiens
aaagaaatgagagga

SEQ ID NO: 665447 - DNA, 15 bp, Homo sapiens
aagaaatgagaggag

SEQ ID NO: 665448 - DNA, 15 bp, Homo sapiens
agaaatgagaggaga

SEQ ID NO: 665449 - DNA, 15 bp, Homo sapiens
gaaatgagaggagac

SEQ ID NO: 665450 - DNA, 15 bp, Homo sapiens
aaatgagaggagaca

SEQ ID NO: 665451 - DNA, 15 bp, Homo sapiens
aatgagaggagacag

SEQ ID NO: 665452 - DNA, 15 bp, Homo sapiens
atgagaggagacagc

SEQ ID NO: 665453 - DNA, 15 bp, Homo sapiens
tgagaggagacagct

SEQ ID NO: 665454 - DNA, 15 bp, Homo sapiens
gagaggagacagctg

SEQ ID NO: 665455 - DNA, 15 bp, Homo sapiens
agaggagacagctgt

SEQ ID NO: 665456 - DNA, 15 bp, Homo sapiens
gaggagacagctgtg

SEQ ID NO: 665457 - DNA, 15 bp, Homo sapiens
aggagacagctgtgt

SEQ ID NO: 665458 - DNA, 15 bp, Homo sapiens
ggagacagctgtgtg

SEQ ID NO: 665459 - DNA, 15 bp, Homo sapiens
gagacagctgtgtgg

SEQ ID NO: 665460 - DNA, 15 bp, Homo sapiens
agacagctgtgtggg

SEQ ID NO: 665461 - DNA, 15 bp, Homo sapiens
gacagctgtgtgggt

SEQ ID NO: 665462 - DNA, 15 bp, Homo sapiens
acagctgtgtgggta

SEQ ID NO: 665463 - DNA, 15 bp, Homo sapiens
cagctgtgtgggtat

SEQ ID NO: 665464 - DNA, 15 bp, Homo sapiens
agctgtgtgggtatc

SEQ ID NO: 665465 - DNA, 15 bp, Homo sapiens
gctgtgtgggtatct

SEQ ID NO: 665466 - DNA, 15 bp, Homo sapiens
ctgtgtgggtatcta

SEQ ID NO: 665467 - DNA, 15 bp, Homo sapiens
tgtgtgggtatctaa

SEQ ID NO: 665468 - DNA, 15 bp, Homo sapiens
gtgtgggtatctaag

SEQ ID NO: 665469 - DNA, 15 bp, Homo sapiens
tgtgggtatctaagg

SEQ ID NO: 665470 - DNA, 15 bp, Homo sapiens
gtgggtatctaaggg

SEQ ID NO: 665471 - DNA, 15 bp, Homo sapiens
tgggtatctaagggg

SEQ ID NO: 665472 - DNA, 15 bp, Homo sapiens
gggtatctaagggga

SEQ ID NO: 665473 - DNA, 15 bp, Homo sapiens
ggtatctaaggggag

SEQ ID NO: 665474 - DNA, 15 bp, Homo sapiens
gtatctaaggggaga

SEQ ID NO: 665475 - DNA, 15 bp, Homo sapiens
tatctaaggggagag

SEQ ID NO: 665476 - DNA, 15 bp, Homo sapiens
atctaaggggagagc

SEQ ID NO: 665477 - DNA, 15 bp, Homo sapiens
tctaaggggagagca

SEQ ID NO: 665478 - DNA, 15 bp, Homo sapiens
ctaaggggagagcat

SEQ ID NO: 665479 - DNA, 15 bp, Homo sapiens
taaggggagagcatt

SEQ ID NO: 665480 - DNA, 15 bp, Homo sapiens
aaggggagagcattc

SEQ ID NO: 665481 - DNA, 15 bp, Homo sapiens
aggggagagcattcc

SEQ ID NO: 665482 - DNA, 15 bp, Homo sapiens
ggggagagcattccc

SEQ ID NO: 665483 - DNA, 15 bp, Homo sapiens
gggagagcattcccg

SEQ ID NO: 665484 - DNA, 15 bp, Homo sapiens
ggagagcattcccgg

SEQ ID NO: 665485 - DNA, 15 bp, Homo sapiens
gagagcattcccgga

SEQ ID NO: 665486 - DNA, 15 bp, Homo sapiens
agagcattcccggaa

SEQ ID NO: 665487 - DNA, 15 bp, Homo sapiens
gagcattcccggaaa

SEQ ID NO: 665488 - DNA, 15 bp, Homo sapiens
agcattcccggaaaa

SEQ ID NO: 665489 - DNA, 15 bp, Homo sapiens
gcattcccggaaaag

SEQ ID NO: 665490 - DNA, 15 bp, Homo sapiens
cattcccggaaaagg

SEQ ID NO: 665491 - DNA, 15 bp, Homo sapiens
attcccggaaaaggt

SEQ ID NO: 665492 - DNA, 15 bp, Homo sapiens
ttcccggaaaaggta

SEQ ID NO: 665493 - DNA, 15 bp, Homo sapiens
tcccggaaaaggtaa

SEQ ID NO: 665494 - DNA, 15 bp, Homo sapiens
cccggaaaaggtaac

SEQ ID NO: 665495 - DNA, 15 bp, Homo sapiens
ccggaaaaggtaact

SEQ ID NO: 665496 - DNA, 15 bp, Homo sapiens
cggaaaaggtaactg

SEQ ID NO: 665497 - DNA, 15 bp, Homo sapiens
ggaaaaggtaactgg

SEQ ID NO: 665498 - DNA, 15 bp, Homo sapiens
gaaaaggtaactggc

SEQ ID NO: 665499 - DNA, 15 bp, Homo sapiens
aaaaggtaactggca

SEQ ID NO: 665500 - DNA, 15 bp, Homo sapiens
aaaggtaactggcaa

SEQ ID NO: 665501 - DNA, 15 bp, Homo sapiens
aaggtaactggcaat

SEQ ID NO: 665502 - DNA, 15 bp, Homo sapiens
aggtaactggcaatg

SEQ ID NO: 665503 - DNA, 15 bp, Homo sapiens
ggtaactggcaatgc

SEQ ID NO: 665504 - DNA, 15 bp, Homo sapiens
gtaactggcaatgca

SEQ ID NO: 665505 - DNA, 15 bp, Homo sapiens
taactggcaatgcaa

SEQ ID NO: 665506 - DNA, 15 bp, Homo sapiens
aactggcaatgcaaa

SEQ ID NO: 665507 - DNA, 15 bp, Homo sapiens
actggcaatgcaaag

SEQ ID NO: 665508 - DNA, 15 bp, Homo sapiens
ctggcaatgcaaaga

SEQ ID NO: 665509 - DNA, 15 bp, Homo sapiens
tggcaatgcaaagac

SEQ ID NO: 665510 - DNA, 15 bp, Homo sapiens
ggcaatgcaaagacc

SEQ ID NO: 665511 - DNA, 15 bp, Homo sapiens
gcaatgcaaagaccc

SEQ ID NO: 665512 - DNA, 15 bp, Homo sapiens
caatgcaaagaccct

SEQ ID NO: 665513 - DNA, 15 bp, Homo sapiens
aatgcaaagaccctg

SEQ ID NO: 665514 - DNA, 15 bp, Homo sapiens
atgcaaagaccctga

SEQ ID NO: 665515 - DNA, 15 bp, Homo sapiens
tgcaaagaccctgag

SEQ ID NO: 665516 - DNA, 15 bp, Homo sapiens
gcaaagaccctgagt

SEQ ID NO: 665517 - DNA, 15 bp, Homo sapiens
caaagaccctgagtc

SEQ ID NO: 665518 - DNA, 15 bp, Homo sapiens
aaagaccctgagtca

SEQ ID NO: 665519 - DNA, 15 bp, Homo sapiens
aagaccctgagtcag

SEQ ID NO: 665520 - DNA, 15 bp, Homo sapiens
agaccctgagtcagg

SEQ ID NO: 665521 - DNA, 15 bp, Homo sapiens
gaccctgagtcaggt

SEQ ID NO: 665522 - DNA, 15 bp, Homo sapiens
accctgagtcaggta

SEQ ID NO: 665523 - DNA, 15 bp, Homo sapiens
ccctgagtcaggtac

SEQ ID NO: 665524 - DNA, 15 bp, Homo sapiens
cctgagtcaggtaca

SEQ ID NO: 665525 - DNA, 15 bp, Homo sapiens
ctgagtcaggtacat

SEQ ID NO: 665526 - DNA, 15 bp, Homo sapiens
tgagtcaggtacatg

SEQ ID NO: 665527 - DNA, 15 bp, Homo sapiens
gagtcaggtacatgt

SEQ ID NO: 665528 - DNA, 15 bp, Homo sapiens
agtcaggtacatgtt

SEQ ID NO: 665529 - DNA, 15 bp, Homo sapiens
gtcaggtacatgttt

SEQ ID NO: 665530 - DNA, 15 bp, Homo sapiens
tcaggtacatgtttg

SEQ ID NO: 665531 - DNA, 15 bp, Homo sapiens
caggtacatgtttgg

SEQ ID NO: 665532 - DNA, 15 bp, Homo sapiens
aggtacatgtttggt

SEQ ID NO: 665533 - DNA, 15 bp, Homo sapiens
ggtacatgtttggtg

SEQ ID NO: 665534 - DNA, 15 bp, Homo sapiens
gtacatgtttggtga

SEQ ID NO: 665535 - DNA, 15 bp, Homo sapiens
tacatgtttggtgag

SEQ ID NO: 665536 - DNA, 15 bp, Homo sapiens
acatgtttggtgagt

SEQ ID NO: 665537 - DNA, 15 bp, Homo sapiens
catgtttggtgagtt

SEQ ID NO: 665538 - DNA, 15 bp, Homo sapiens
atgtttggtgagttc

SEQ ID NO: 665539 - DNA, 15 bp, Homo sapiens
tgtttggtgagttca

SEQ ID NO: 665540 - DNA, 15 bp, Homo sapiens
gtttggtgagttcat

SEQ ID NO: 665541 - DNA, 15 bp, Homo sapiens
tttggtgagttcatg

SEQ ID NO: 665542 - DNA, 15 bp, Homo sapiens
ttggtgagttcatgg

SEQ ID NO: 665543 - DNA, 15 bp, Homo sapiens
tggtgagttcatgga

SEQ ID NO: 665544 - DNA, 15 bp, Homo sapiens
ggtgagttcatggaa

SEQ ID NO: 665545 - DNA, 15 bp, Homo sapiens
gtgagttcatggaac

SEQ ID NO: 665546 - DNA, 15 bp, Homo sapiens
tgagttcatggaaca

SEQ ID NO: 665547 - DNA, 15 bp, Homo sapiens
gagttcatggaacag

SEQ ID NO: 665548 - DNA, 15 bp, Homo sapiens
agttcatggaacagc

SEQ ID NO: 665549 - DNA, 15 bp, Homo sapiens
gttcatggaacagca

SEQ ID NO: 665550 - DNA, 15 bp, Homo sapiens
ttcatggaacagcag

SEQ ID NO: 665551 - DNA, 15 bp, Homo sapiens
tcatggaacagcaga

SEQ ID NO: 665552 - DNA, 15 bp, Homo sapiens
catggaacagcagag

SEQ ID NO: 665553 - DNA, 15 bp, Homo sapiens
atggaacagcagaga

SEQ ID NO: 665554 - DNA, 15 bp, Homo sapiens
tggaacagcagagag

SEQ ID NO: 665555 - DNA, 15 bp, Homo sapiens
ggaacagcagagagt

SEQ ID NO: 665556 - DNA, 15 bp, Homo sapiens
gaacagcagagagtc

SEQ ID NO: 665557 - DNA, 15 bp, Homo sapiens
aacagcagagagtcc

SEQ ID NO: 665558 - DNA, 15 bp, Homo sapiens
acagcagagagtcca

SEQ ID NO: 665559 - DNA, 15 bp, Homo sapiens
cagcagagagtccag

SEQ ID NO: 665560 - DNA, 15 bp, Homo sapiens
agcagagagtccagg

SEQ ID NO: 665561 - DNA, 15 bp, Homo sapiens
gcagagagtccaggc

SEQ ID NO: 665562 - DNA, 15 bp, Homo sapiens
cagagagtccaggct

SEQ ID NO: 665563 - DNA, 15 bp, Homo sapiens
agagagtccaggctg

SEQ ID NO: 665564 - DNA, 15 bp, Homo sapiens
gagagtccaggctgg

SEQ ID NO: 665565 - DNA, 15 bp, Homo sapiens
agagtccaggctggt

SEQ ID NO: 665566 - DNA, 15 bp, Homo sapiens
gagtccaggctggtt

SEQ ID NO: 665567 - DNA, 15 bp, Homo sapiens
agtccaggctggttg

SEQ ID NO: 665568 - DNA, 15 bp, Homo sapiens
gtccaggctggttgg

SEQ ID NO: 665569 - DNA, 15 bp, Homo sapiens
tccaggctggttgga

SEQ ID NO: 665570 - DNA, 15 bp, Homo sapiens
ccaggctggttggag

SEQ ID NO: 665571 - DNA, 15 bp, Homo sapiens
caggctggttggagc

SEQ ID NO: 665572 - DNA, 15 bp, Homo sapiens
aggctggttggagca

SEQ ID NO: 665573 - DNA, 15 bp, Homo sapiens
ggctggttggagcag

SEQ ID NO: 665574 - DNA, 15 bp, Homo sapiens
gctggttggagcaga

SEQ ID NO: 665575 - DNA, 15 bp, Homo sapiens
ctggttggagcagag

SEQ ID NO: 665576 - DNA, 15 bp, Homo sapiens
tggttggagcagagt

SEQ ID NO: 665577 - DNA, 15 bp, Homo sapiens
ggttggagcagagta

SEQ ID NO: 665578 - DNA, 15 bp, Homo sapiens
gttggagcagagtaa

SEQ ID NO: 665579 - DNA, 15 bp, Homo sapiens
ttggagcagagtaag

SEQ ID NO: 665580 - DNA, 15 bp, Homo sapiens
tggagcagagtaagc

SEQ ID NO: 665581 - DNA, 15 bp, Homo sapiens
ggagcagagtaagca

SEQ ID NO: 665582 - DNA, 15 bp, Homo sapiens
gagcagagtaagcag

SEQ ID NO: 665583 - DNA, 15 bp, Homo sapiens
agcagagtaagcagg

SEQ ID NO: 665584 - DNA, 15 bp, Homo sapiens
gcagagtaagcaggt

SEQ ID NO: 665585 - DNA, 15 bp, Homo sapiens
cagagtaagcaggtt

SEQ ID NO: 665586 - DNA, 15 bp, Homo sapiens
agagtaagcaggttt

SEQ ID NO: 665587 - DNA, 15 bp, Homo sapiens
gagtaagcaggtttg

SEQ ID NO: 665588 - DNA, 15 bp, Homo sapiens
agtaagcaggtttgg

SEQ ID NO: 665589 - DNA, 15 bp, Homo sapiens
gtaagcaggtttggg

SEQ ID NO: 665590 - DNA, 15 bp, Homo sapiens
taagcaggtttggga

SEQ ID NO: 665591 - DNA, 15 bp, Homo sapiens
aagcaggtttgggag

SEQ ID NO: 665592 - DNA, 15 bp, Homo sapiens
agcaggtttgggagt

SEQ ID NO: 665593 - DNA, 15 bp, Homo sapiens
gcaggtttgggagta

SEQ ID NO: 665594 - DNA, 15 bp, Homo sapiens
caggtttgggagtag

SEQ ID NO: 665595 - DNA, 15 bp, Homo sapiens
aggtttgggagtagg

SEQ ID NO: 665596 - DNA, 15 bp, Homo sapiens
ggtttgggagtaggg

SEQ ID NO: 665597 - DNA, 15 bp, Homo sapiens
gtttgggagtaggga

SEQ ID NO: 665598 - DNA, 15 bp, Homo sapiens
tttgggagtagggat

SEQ ID NO: 665599 - DNA, 15 bp, Homo sapiens
ttgggagtagggatg

SEQ ID NO: 665600 - DNA, 15 bp, Homo sapiens
tgggagtagggatgt

SEQ ID NO: 665601 - DNA, 15 bp, Homo sapiens
gggagtagggatgtg

SEQ ID NO: 665602 - DNA, 15 bp, Homo sapiens
ggagtagggatgtgg

SEQ ID NO: 665603 - DNA, 15 bp, Homo sapiens
gagtagggatgtggt

SEQ ID NO: 665604 - DNA, 15 bp, Homo sapiens
agtagggatgtggtc

SEQ ID NO: 665605 - DNA, 15 bp, Homo sapiens
gtagggatgtggtca

SEQ ID NO: 665606 - DNA, 15 bp, Homo sapiens
tagggatgtggtcag

SEQ ID NO: 665607 - DNA, 15 bp, Homo sapiens
agggatgtggtcaga

SEQ ID NO: 665608 - DNA, 15 bp, Homo sapiens
gggatgtggtcagag

SEQ ID NO: 665609 - DNA, 15 bp, Homo sapiens
ggatgtggtcagaga

SEQ ID NO: 665610 - DNA, 15 bp, Homo sapiens
gatgtggtcagagag

SEQ ID NO: 665611 - DNA, 15 bp, Homo sapiens
atgtggtcagagagg

SEQ ID NO: 665612 - DNA, 15 bp, Homo sapiens
tgtggtcagagagga

SEQ ID NO: 665613 - DNA, 15 bp, Homo sapiens
gtggtcagagaggaa

SEQ ID NO: 665614 - DNA, 15 bp, Homo sapiens
tggtcagagaggaaa

SEQ ID NO: 665615 - DNA, 15 bp, Homo sapiens
ggtcagagaggaaat

SEQ ID NO: 665616 - DNA, 15 bp, Homo sapiens
gtcagagaggaaata

SEQ ID NO: 665617 - DNA, 15 bp, Homo sapiens
tcagagaggaaataa

SEQ ID NO: 665618 - DNA, 15 bp, Homo sapiens
cagagaggaaataag

SEQ ID NO: 665619 - DNA, 15 bp, Homo sapiens
agagaggaaataagc

SEQ ID NO: 665620 - DNA, 15 bp, Homo sapiens
gagaggaaataagca

SEQ ID NO: 665621 - DNA, 15 bp, Homo sapiens
agaggaaataagcaa

SEQ ID NO: 665622 - DNA, 15 bp, Homo sapiens
gaggaaataagcaaa

SEQ ID NO: 665623 - DNA, 15 bp, Homo sapiens
aggaaataagcaaac

SEQ ID NO: 665624 - DNA, 15 bp, Homo sapiens
ggaaataagcaaaca

SEQ ID NO: 665625 - DNA, 15 bp, Homo sapiens
gaaataagcaaacag

SEQ ID NO: 665626 - DNA, 15 bp, Homo sapiens
aaataagcaaacaga

SEQ ID NO: 665627 - DNA, 15 bp, Homo sapiens
aataagcaaacagat

SEQ ID NO: 665628 - DNA, 15 bp, Homo sapiens
ataagcaaacagatc

SEQ ID NO: 665629 - DNA, 15 bp, Homo sapiens
taagcaaacagatcg

SEQ ID NO: 665630 - DNA, 15 bp, Homo sapiens
aagcaaacagatcgt

SEQ ID NO: 665631 - DNA, 15 bp, Homo sapiens
agcaaacagatcgtg

SEQ ID NO: 665632 - DNA, 15 bp, Homo sapiens
gcaaacagatcgtgt

SEQ ID NO: 665633 - DNA, 15 bp, Homo sapiens
caaacagatcgtgta

SEQ ID NO: 665634 - DNA, 15 bp, Homo sapiens
aaacagatcgtgtag

SEQ ID NO: 665635 - DNA, 15 bp, Homo sapiens
aacagatcgtgtagg

SEQ ID NO: 665636 - DNA, 15 bp, Homo sapiens
acagatcgtgtagga

SEQ ID NO: 665637 - DNA, 15 bp, Homo sapiens
cagatcgtgtaggac

SEQ ID NO: 665638 - DNA, 15 bp, Homo sapiens
agatcgtgtaggacc

SEQ ID NO: 665639 - DNA, 15 bp, Homo sapiens
gatcgtgtaggacct

SEQ ID NO: 665640 - DNA, 15 bp, Homo sapiens
atcgtgtaggacctc

SEQ ID NO: 665641 - DNA, 15 bp, Homo sapiens
tcgtgtaggacctca

SEQ ID NO: 665642 - DNA, 15 bp, Homo sapiens
cgtgtaggacctcag

SEQ ID NO: 665643 - DNA, 15 bp, Homo sapiens
gtgtaggacctcaga

SEQ ID NO: 665644 - DNA, 15 bp, Homo sapiens
tgtaggacctcagag

SEQ ID NO: 665645 - DNA, 15 bp, Homo sapiens
gtaggacctcagagg

SEQ ID NO: 665646 - DNA, 15 bp, Homo sapiens
taggacctcagaggt

SEQ ID NO: 665647 - DNA, 15 bp, Homo sapiens
aggacctcagaggtt

SEQ ID NO: 665648 - DNA, 15 bp, Homo sapiens
ggacctcagaggtta

SEQ ID NO: 665649 - DNA, 15 bp, Homo sapiens
gacctcagaggttaa

SEQ ID NO: 665650 - DNA, 15 bp, Homo sapiens
acctcagaggttaat

SEQ ID NO: 665651 - DNA, 15 bp, Homo sapiens
cctcagaggttaatg

SEQ ID NO: 665652 - DNA, 15 bp, Homo sapiens
ctcagaggttaatgc

SEQ ID NO: 665653 - DNA, 15 bp, Homo sapiens
tcagaggttaatgca

SEQ ID NO: 665654 - DNA, 15 bp, Homo sapiens
cagaggttaatgcaa

SEQ ID NO: 665655 - DNA, 15 bp, Homo sapiens
agaggttaatgcaag

SEQ ID NO: 665656 - DNA, 15 bp, Homo sapiens
gaggttaatgcaagg

SEQ ID NO: 665657 - DNA, 15 bp, Homo sapiens
aggttaatgcaagga

SEQ ID NO: 665658 - DNA, 15 bp, Homo sapiens
ggttaatgcaaggat

SEQ ID NO: 665659 - DNA, 15 bp, Homo sapiens
gttaatgcaaggatt

SEQ ID NO: 665660 - DNA, 15 bp, Homo sapiens
ttaatgcaaggattt

SEQ ID NO: 665661 - DNA, 15 bp, Homo sapiens
taatgcaaggatttt

SEQ ID NO: 665662 - DNA, 15 bp, Homo sapiens
aatgcaaggattttg

SEQ ID NO: 665663 - DNA, 15 bp, Homo sapiens
atgcaaggattttgg

SEQ ID NO: 665664 - DNA, 15 bp, Homo sapiens
tgcaaggattttggc

SEQ ID NO: 665665 - DNA, 15 bp, Homo sapiens
gcaaggattttggct

SEQ ID NO: 665666 - DNA, 15 bp, Homo sapiens
caaggattttggctt

SEQ ID NO: 665667 - DNA, 15 bp, Homo sapiens
aaggattttggcttt

SEQ ID NO: 665668 - DNA, 15 bp, Homo sapiens
aggattttggctttt

SEQ ID NO: 665669 - DNA, 15 bp, Homo sapiens
ggattttggctttta

SEQ ID NO: 665670 - DNA, 15 bp, Homo sapiens
gattttggcttttat

SEQ ID NO: 665671 - DNA, 15 bp, Homo sapiens
attttggcttttatt

SEQ ID NO: 665672 - DNA, 15 bp, Homo sapiens
ttttggcttttattg

SEQ ID NO: 665673 - DNA, 15 bp, Homo sapiens
tttggcttttattgt

SEQ ID NO: 665674 - DNA, 15 bp, Homo sapiens
ttggcttttattgta

SEQ ID NO: 665675 - DNA, 15 bp, Homo sapiens
tggcttttattgtaa

SEQ ID NO: 665676 - DNA, 15 bp, Homo sapiens
ggcttttattgtaag

SEQ ID NO: 665677 - DNA, 15 bp, Homo sapiens
gcttttattgtaaga

SEQ ID NO: 665678 - DNA, 15 bp, Homo sapiens
cttttattgtaagaa

SEQ ID NO: 665679 - DNA, 15 bp, Homo sapiens
ttttattgtaagaaa

SEQ ID NO: 665680 - DNA, 15 bp, Homo sapiens
tttattgtaagaaaa

SEQ ID NO: 665681 - DNA, 15 bp, Homo sapiens
ttattgtaagaaaaa

SEQ ID NO: 665682 - DNA, 15 bp, Homo sapiens
tattgtaagaaaaag

SEQ ID NO: 665683 - DNA, 15 bp, Homo sapiens
attgtaagaaaaagg

SEQ ID NO: 665684 - DNA, 15 bp, Homo sapiens
ttgtaagaaaaagga

SEQ ID NO: 665685 - DNA, 15 bp, Homo sapiens
tgtaagaaaaaggaa

SEQ ID NO: 665686 - DNA, 15 bp, Homo sapiens
gtaagaaaaaggaaa

SEQ ID NO: 665687 - DNA, 15 bp, Homo sapiens
taagaaaaaggaaag

SEQ ID NO: 665688 - DNA, 15 bp, Homo sapiens
aagaaaaaggaaagc

SEQ ID NO: 665689 - DNA, 15 bp, Homo sapiens
agaaaaaggaaagcc

SEQ ID NO: 665690 - DNA, 15 bp, Homo sapiens
gaaaaaggaaagcca

SEQ ID NO: 665691 - DNA, 15 bp, Homo sapiens
aaaaaggaaagccat

SEQ ID NO: 665692 - DNA, 15 bp, Homo sapiens
aaaaggaaagccatt

SEQ ID NO: 665693 - DNA, 15 bp, Homo sapiens
aaaggaaagccattg

SEQ ID NO: 665694 - DNA, 15 bp, Homo sapiens
aaggaaagccattgt

SEQ ID NO: 665695 - DNA, 15 bp, Homo sapiens
aggaaagccattgta

SEQ ID NO: 665696 - DNA, 15 bp, Homo sapiens
ggaaagccattgtag

SEQ ID NO: 665697 - DNA, 15 bp, Homo sapiens
gaaagccattgtagg

SEQ ID NO: 665698 - DNA, 15 bp, Homo sapiens
aaagccattgtaggt

SEQ ID NO: 665699 - DNA, 15 bp, Homo sapiens
aagccattgtaggtt

SEQ ID NO: 665700 - DNA, 15 bp, Homo sapiens
agccattgtaggttt

SEQ ID NO: 665701 - DNA, 15 bp, Homo sapiens
gccattgtaggtttt

SEQ ID NO: 665702 - DNA, 15 bp, Homo sapiens
ccattgtaggttttt

SEQ ID NO: 665703 - DNA, 15 bp, Homo sapiens
cattgtaggtttttg

SEQ ID NO: 665704 - DNA, 15 bp, Homo sapiens
attgtaggtttttga

SEQ ID NO: 665705 - DNA, 15 bp, Homo sapiens
ttgtaggtttttgag

SEQ ID NO: 665706 - DNA, 15 bp, Homo sapiens
tgtaggtttttgagc

SEQ ID NO: 665707 - DNA, 15 bp, Homo sapiens
gtaggtttttgagca

SEQ ID NO: 665708 - DNA, 15 bp, Homo sapiens
taggtttttgagcaa

SEQ ID NO: 665709 - DNA, 15 bp, Homo sapiens
aggtttttgagcaaa

SEQ ID NO: 665710 - DNA, 15 bp, Homo sapiens
ggtttttgagcaaag

SEQ ID NO: 665711 - DNA, 15 bp, Homo sapiens
gtttttgagcaaaga

SEQ ID NO: 665712 - DNA, 15 bp, Homo sapiens
tttttgagcaaagaa

SEQ ID NO: 665713 - DNA, 15 bp, Homo sapiens
ttttgagcaaagaag

SEQ ID NO: 665714 - DNA, 15 bp, Homo sapiens
tttgagcaaagaagt

SEQ ID NO: 665715 - DNA, 15 bp, Homo sapiens
ttgagcaaagaagta

SEQ ID NO: 665716 - DNA, 15 bp, Homo sapiens
tgagcaaagaagtag

SEQ ID NO: 665717 - DNA, 15 bp, Homo sapiens
gagcaaagaagtagt

SEQ ID NO: 665718 - DNA, 15 bp, Homo sapiens
agcaaagaagtagtg

SEQ ID NO: 665719 - DNA, 15 bp, Homo sapiens
gcaaagaagtagtgt

SEQ ID NO: 665720 - DNA, 15 bp, Homo sapiens
caaagaagtagtgta

SEQ ID NO: 665721 - DNA, 15 bp, Homo sapiens
aaagaagtagtgtat

SEQ ID NO: 665722 - DNA, 15 bp, Homo sapiens
aagaagtagtgtatg

SEQ ID NO: 665723 - DNA, 15 bp, Homo sapiens
agaagtagtgtatgg

SEQ ID NO: 665724 - DNA, 15 bp, Homo sapiens
gaagtagtgtatggc

SEQ ID NO: 665725 - DNA, 15 bp, Homo sapiens
aagtagtgtatggct

SEQ ID NO: 665726 - DNA, 15 bp, Homo sapiens
agtagtgtatggctt

SEQ ID NO: 665727 - DNA, 15 bp, Homo sapiens
gtagtgtatggcttg

SEQ ID NO: 665728 - DNA, 15 bp, Homo sapiens
tagtgtatggcttgg

SEQ ID NO: 665729 - DNA, 15 bp, Homo sapiens
agtgtatggcttggc

SEQ ID NO: 665730 - DNA, 15 bp, Homo sapiens
gtgtatggcttggca

SEQ ID NO: 665731 - DNA, 15 bp, Homo sapiens
tgtatggcttggcat

SEQ ID NO: 665732 - DNA, 15 bp, Homo sapiens
gtatggcttggcatt

SEQ ID NO: 665733 - DNA, 15 bp, Homo sapiens
tatggcttggcattt

SEQ ID NO: 665734 - DNA, 15 bp, Homo sapiens
atggcttggcatttt

SEQ ID NO: 665735 - DNA, 15 bp, Homo sapiens
tggcttggcattttg

SEQ ID NO: 665736 - DNA, 15 bp, Homo sapiens
ggcttggcattttga

SEQ ID NO: 665737 - DNA, 15 bp, Homo sapiens
gcttggcattttgaa

SEQ ID NO: 665738 - DNA, 15 bp, Homo sapiens
cttggcattttgaaa

SEQ ID NO: 665739 - DNA, 15 bp, Homo sapiens
ttggcattttgaaat

SEQ ID NO: 665740 - DNA, 15 bp, Homo sapiens
tggcattttgaaata

SEQ ID NO: 665741 - DNA, 15 bp, Homo sapiens
ggcattttgaaataa

SEQ ID NO: 665742 - DNA, 15 bp, Homo sapiens
gcattttgaaataat

SEQ ID NO: 665743 - DNA, 15 bp, Homo sapiens
cattttgaaataatt

SEQ ID NO: 665744 - DNA, 15 bp, Homo sapiens
attttgaaataatta

SEQ ID NO: 665745 - DNA, 15 bp, Homo sapiens
ttttgaaataattac

SEQ ID NO: 665746 - DNA, 15 bp, Homo sapiens
tttgaaataattact

SEQ ID NO: 665747 - DNA, 15 bp, Homo sapiens
ttgaaataattactc

SEQ ID NO: 665748 - DNA, 15 bp, Homo sapiens
tgaaataattactct

SEQ ID NO: 665749 - DNA, 15 bp, Homo sapiens
gaaataattactctg

SEQ ID NO: 665750 - DNA, 15 bp, Homo sapiens
aaataattactctga

SEQ ID NO: 665751 - DNA, 15 bp, Homo sapiens
aataattactctgac

SEQ ID NO: 665752 - DNA, 15 bp, Homo sapiens
ataattactctgact

SEQ ID NO: 665753 - DNA, 15 bp, Homo sapiens
taattactctgactg

SEQ ID NO: 665754 - DNA, 15 bp, Homo sapiens
aattactctgactgc

SEQ ID NO: 665755 - DNA, 15 bp, Homo sapiens
attactctgactgct

SEQ ID NO: 665756 - DNA, 15 bp, Homo sapiens
ttactctgactgcta

SEQ ID NO: 665757 - DNA, 15 bp, Homo sapiens
tactctgactgctag

SEQ ID NO: 665758 - DNA, 15 bp, Homo sapiens
actctgactgctagt

SEQ ID NO: 665759 - DNA, 15 bp, Homo sapiens
ctctgactgctagtt

SEQ ID NO: 665760 - DNA, 15 bp, Homo sapiens
tctgactgctagttg

SEQ ID NO: 665761 - DNA, 15 bp, Homo sapiens
ctgactgctagttga

SEQ ID NO: 665762 - DNA, 15 bp, Homo sapiens
tgactgctagttgaa

SEQ ID NO: 665763 - DNA, 15 bp, Homo sapiens
gactgctagttgaag

SEQ ID NO: 665764 - DNA, 15 bp, Homo sapiens
actgctagttgaaga

SEQ ID NO: 665765 - DNA, 15 bp, Homo sapiens
ctgctagttgaagat

SEQ ID NO: 665766 - DNA, 15 bp, Homo sapiens
tgctagttgaagata

SEQ ID NO: 665767 - DNA, 15 bp, Homo sapiens
gctagttgaagatag

SEQ ID NO: 665768 - DNA, 15 bp, Homo sapiens
ctagttgaagataga

SEQ ID NO: 665769 - DNA, 15 bp, Homo sapiens
tagttgaagatagac

SEQ ID NO: 665770 - DNA, 15 bp, Homo sapiens
agttgaagatagact

SEQ ID NO: 665771 - DNA, 15 bp, Homo sapiens
gttgaagatagactg

SEQ ID NO: 665772 - DNA, 15 bp, Homo sapiens
ttgaagatagactga

SEQ ID NO: 665773 - DNA, 15 bp, Homo sapiens
tgaagatagactgaa

SEQ ID NO: 665774 - DNA, 15 bp, Homo sapiens
gaagatagactgaag

SEQ ID NO: 665775 - DNA, 15 bp, Homo sapiens
aagatagactgaagc

SEQ ID NO: 665776 - DNA, 15 bp, Homo sapiens
agatagactgaagcg

SEQ ID NO: 665777 - DNA, 15 bp, Homo sapiens
gatagactgaagcgg

SEQ ID NO: 665778 - DNA, 15 bp, Homo sapiens
atagactgaagcggc

SEQ ID NO: 665779 - DNA, 15 bp, Homo sapiens
tagactgaagcggca

SEQ ID NO: 665780 - DNA, 15 bp, Homo sapiens
agactgaagcggcat

SEQ ID NO: 665781 - DNA, 15 bp, Homo sapiens
gactgaagcggcata

SEQ ID NO: 665782 - DNA, 15 bp, Homo sapiens
actgaagcggcatag

SEQ ID NO: 665783 - DNA, 15 bp, Homo sapiens
ctgaagcggcatagg

SEQ ID NO: 665784 - DNA, 15 bp, Homo sapiens
tgaagcggcataggt

SEQ ID NO: 665785 - DNA, 15 bp, Homo sapiens
gaagcggcataggtg

SEQ ID NO: 665786 - DNA, 15 bp, Homo sapiens
aagcggcataggtgg

SEQ ID NO: 665787 - DNA, 15 bp, Homo sapiens
agcggcataggtgga

SEQ ID NO: 665788 - DNA, 15 bp, Homo sapiens
gcggcataggtggaa

SEQ ID NO: 665789 - DNA, 15 bp, Homo sapiens
cggcataggtggaag

SEQ ID NO: 665790 - DNA, 15 bp, Homo sapiens
ggcataggtggaagt

SEQ ID NO: 665791 - DNA, 15 bp, Homo sapiens
gcataggtggaagtg

SEQ ID NO: 665792 - DNA, 15 bp, Homo sapiens
cataggtggaagtgg

SEQ ID NO: 665793 - DNA, 15 bp, Homo sapiens
ataggtggaagtgga

SEQ ID NO: 665794 - DNA, 15 bp, Homo sapiens
taggtggaagtggag

SEQ ID NO: 665795 - DNA, 15 bp, Homo sapiens
aggtggaagtggaga

SEQ ID NO: 665796 - DNA, 15 bp, Homo sapiens
ggtggaagtggagag

SEQ ID NO: 665797 - DNA, 15 bp, Homo sapiens
gtggaagtggagaga

SEQ ID NO: 665798 - DNA, 15 bp, Homo sapiens
tggaagtggagagac

SEQ ID NO: 665799 - DNA, 15 bp, Homo sapiens
ggaagtggagagact

SEQ ID NO: 665800 - DNA, 15 bp, Homo sapiens
gaagtggagagacta

SEQ ID NO: 665801 - DNA, 15 bp, Homo sapiens
aagtggagagactag

SEQ ID NO: 665802 - DNA, 15 bp, Homo sapiens
agtggagagactagg

SEQ ID NO: 665803 - DNA, 15 bp, Homo sapiens
gtggagagactaggc

SEQ ID NO: 665804 - DNA, 15 bp, Homo sapiens
tggagagactaggca

SEQ ID NO: 665805 - DNA, 15 bp, Homo sapiens
ggagagactaggcag

SEQ ID NO: 665806 - DNA, 15 bp, Homo sapiens
gagagactaggcagg

SEQ ID NO: 665807 - DNA, 15 bp, Homo sapiens
agagactaggcagga

SEQ ID NO: 665808 - DNA, 15 bp, Homo sapiens
gagactaggcaggag

SEQ ID NO: 665809 - DNA, 15 bp, Homo sapiens
agactaggcaggagg

SEQ ID NO: 665810 - DNA, 15 bp, Homo sapiens
gactaggcaggaggc

SEQ ID NO: 665811 - DNA, 15 bp, Homo sapiens
actaggcaggaggct

SEQ ID NO: 665812 - DNA, 15 bp, Homo sapiens
ctaggcaggaggctg

SEQ ID NO: 665813 - DNA, 15 bp, Homo sapiens
taggcaggaggctgc

SEQ ID NO: 665814 - DNA, 15 bp, Homo sapiens
aggcaggaggctgcc

SEQ ID NO: 665815 - DNA, 15 bp, Homo sapiens
ggcaggaggctgccc

SEQ ID NO: 665816 - DNA, 15 bp, Homo sapiens
gcaggaggctgccct

SEQ ID NO: 665817 - DNA, 15 bp, Homo sapiens
caggaggctgcccta

SEQ ID NO: 665818 - DNA, 15 bp, Homo sapiens
aggaggctgccctac

SEQ ID NO: 665819 - DNA, 15 bp, Homo sapiens
ggaggctgccctact

SEQ ID NO: 665820 - DNA, 15 bp, Homo sapiens
gaggctgccctactg

SEQ ID NO: 665821 - DNA, 15 bp, Homo sapiens
aggctgccctactgg

SEQ ID NO: 665822 - DNA, 15 bp, Homo sapiens
ggctgccctactggt

SEQ ID NO: 665823 - DNA, 15 bp, Homo sapiens
gctgccctactggtg

SEQ ID NO: 665824 - DNA, 15 bp, Homo sapiens
ctgccctactggtga

SEQ ID NO: 665825 - DNA, 15 bp, Homo sapiens
tgccctactggtgac

SEQ ID NO: 665826 - DNA, 15 bp, Homo sapiens
gccctactggtgaca

SEQ ID NO: 665827 - DNA, 15 bp, Homo sapiens
ccctactggtgacag

SEQ ID NO: 665828 - DNA, 15 bp, Homo sapiens
cctactggtgacagc

SEQ ID NO: 665829 - DNA, 15 bp, Homo sapiens
ctactggtgacagca

SEQ ID NO: 665830 - DNA, 15 bp, Homo sapiens
tactggtgacagcaa

SEQ ID NO: 665831 - DNA, 15 bp, Homo sapiens
actggtgacagcaat

SEQ ID NO: 665832 - DNA, 15 bp, Homo sapiens
ctggtgacagcaatg

SEQ ID NO: 665833 - DNA, 15 bp, Homo sapiens
tggtgacagcaatga

SEQ ID NO: 665834 - DNA, 15 bp, Homo sapiens
ggtgacagcaatgaa

SEQ ID NO: 665835 - DNA, 15 bp, Homo sapiens
gtgacagcaatgaaa

SEQ ID NO: 665836 - DNA, 15 bp, Homo sapiens
tgacagcaatgaaac

SEQ ID NO: 665837 - DNA, 15 bp, Homo sapiens
gacagcaatgaaact

SEQ ID NO: 665838 - DNA, 15 bp, Homo sapiens
acagcaatgaaactg

SEQ ID NO: 665839 - DNA, 15 bp, Homo sapiens
cagcaatgaaactgg

SEQ ID NO: 665840 - DNA, 15 bp, Homo sapiens
agcaatgaaactggt

SEQ ID NO: 665841 - DNA, 15 bp, Homo sapiens
gcaatgaaactggtg

SEQ ID NO: 665842 - DNA, 15 bp, Homo sapiens
caatgaaactggtga

SEQ ID NO: 665843 - DNA, 15 bp, Homo sapiens
aatgaaactggtgat

SEQ ID NO: 665844 - DNA, 15 bp, Homo sapiens
atgaaactggtgata

SEQ ID NO: 665845 - DNA, 15 bp, Homo sapiens
tgaaactggtgataa

SEQ ID NO: 665846 - DNA, 15 bp, Homo sapiens
gaaactggtgataag

SEQ ID NO: 665847 - DNA, 15 bp, Homo sapiens
aaactggtgataagt

SEQ ID NO: 665848 - DNA, 15 bp, Homo sapiens
aactggtgataagtg

SEQ ID NO: 665849 - DNA, 15 bp, Homo sapiens
actggtgataagtgg

SEQ ID NO: 665850 - DNA, 15 bp, Homo sapiens
ctggtgataagtggt

SEQ ID NO: 665851 - DNA, 15 bp, Homo sapiens
tggtgataagtggtt

SEQ ID NO: 665852 - DNA, 15 bp, Homo sapiens
ggtgataagtggtta

SEQ ID NO: 665853 - DNA, 15 bp, Homo sapiens
gtgataagtggttaa

SEQ ID NO: 665854 - DNA, 15 bp, Homo sapiens
tgataagtggttaaa

SEQ ID NO: 665855 - DNA, 15 bp, Homo sapiens
gataagtggttaaat

SEQ ID NO: 665856 - DNA, 15 bp, Homo sapiens
ataagtggttaaatt

SEQ ID NO: 665857 - DNA, 15 bp, Homo sapiens
taagtggttaaattc

SEQ ID NO: 665858 - DNA, 15 bp, Homo sapiens
aagtggttaaattct

SEQ ID NO: 665859 - DNA, 15 bp, Homo sapiens
agtggttaaattcta

SEQ ID NO: 665860 - DNA, 15 bp, Homo sapiens
gtggttaaattctag

SEQ ID NO: 665861 - DNA, 15 bp, Homo sapiens
tggttaaattctaga

SEQ ID NO: 665862 - DNA, 15 bp, Homo sapiens
ggttaaattctagat

SEQ ID NO: 665863 - DNA, 15 bp, Homo sapiens
gttaaattctagatg

SEQ ID NO: 665864 - DNA, 15 bp, Homo sapiens
ttaaattctagatgt

SEQ ID NO: 665865 - DNA, 15 bp, Homo sapiens
taaattctagatgta

SEQ ID NO: 665866 - DNA, 15 bp, Homo sapiens
aaattctagatgtac

SEQ ID NO: 665867 - DNA, 15 bp, Homo sapiens
aattctagatgtact

SEQ ID NO: 665868 - DNA, 15 bp, Homo sapiens
attctagatgtactt

SEQ ID NO: 665869 - DNA, 15 bp, Homo sapiens
ttctagatgtacttt

SEQ ID NO: 665870 - DNA, 15 bp, Homo sapiens
tctagatgtactttg

SEQ ID NO: 665871 - DNA, 15 bp, Homo sapiens
ctagatgtactttga

SEQ ID NO: 665872 - DNA, 15 bp, Homo sapiens
tagatgtactttgaa

SEQ ID NO: 665873 - DNA, 15 bp, Homo sapiens
agatgtactttgaat

SEQ ID NO: 665874 - DNA, 15 bp, Homo sapiens
gatgtactttgaatg

SEQ ID NO: 665875 - DNA, 15 bp, Homo sapiens
atgtactttgaatgt

SEQ ID NO: 665876 - DNA, 15 bp, Homo sapiens
tgtactttgaatgta

SEQ ID NO: 665877 - DNA, 15 bp, Homo sapiens
gtactttgaatgtat

SEQ ID NO: 665878 - DNA, 15 bp, Homo sapiens
tactttgaatgtatc

SEQ ID NO: 665879 - DNA, 15 bp, Homo sapiens
actttgaatgtatca

SEQ ID NO: 665880 - DNA, 15 bp, Homo sapiens
ctttgaatgtatcac

SEQ ID NO: 665881 - DNA, 15 bp, Homo sapiens
tttgaatgtatcacc

SEQ ID NO: 665882 - DNA, 15 bp, Homo sapiens
ttgaatgtatcacca

SEQ ID NO: 665883 - DNA, 15 bp, Homo sapiens
tgaatgtatcaccaa

SEQ ID NO: 665884 - DNA, 15 bp, Homo sapiens
gaatgtatcaccaac

SEQ ID NO: 665885 - DNA, 15 bp, Homo sapiens
aatgtatcaccaaca

SEQ ID NO: 665886 - DNA, 15 bp, Homo sapiens
atgtatcaccaacaa

SEQ ID NO: 665887 - DNA, 15 bp, Homo sapiens
tgtatcaccaacaag

SEQ ID NO: 665888 - DNA, 15 bp, Homo sapiens
gtatcaccaacaaga

SEQ ID NO: 665889 - DNA, 15 bp, Homo sapiens
tatcaccaacaagat

SEQ ID NO: 665890 - DNA, 15 bp, Homo sapiens
atcaccaacaagatt

SEQ ID NO: 665891 - DNA, 15 bp, Homo sapiens
tcaccaacaagattg

SEQ ID NO: 665892 - DNA, 15 bp, Homo sapiens
caccaacaagattgc

SEQ ID NO: 665893 - DNA, 15 bp, Homo sapiens
accaacaagattgcc

SEQ ID NO: 665894 - DNA, 15 bp, Homo sapiens
ccaacaagattgcct

SEQ ID NO: 665895 - DNA, 15 bp, Homo sapiens
caacaagattgcctg

SEQ ID NO: 665896 - DNA, 15 bp, Homo sapiens
aacaagattgcctga

SEQ ID NO: 665897 - DNA, 15 bp, Homo sapiens
acaagattgcctgac

SEQ ID NO: 665898 - DNA, 15 bp, Homo sapiens
caagattgcctgaca

SEQ ID NO: 665899 - DNA, 15 bp, Homo sapiens
aagattgcctgacac

SEQ ID NO: 665900 - DNA, 15 bp, Homo sapiens
agattgcctgacacc

SEQ ID NO: 665901 - DNA, 15 bp, Homo sapiens
gattgcctgacacca

SEQ ID NO: 665902 - DNA, 15 bp, Homo sapiens
attgcctgacaccac

SEQ ID NO: 665903 - DNA, 15 bp, Homo sapiens
ttgcctgacaccact

SEQ ID NO: 665904 - DNA, 15 bp, Homo sapiens
tgcctgacaccactc

SEQ ID NO: 665905 - DNA, 15 bp, Homo sapiens
gcctgacaccactct

SEQ ID NO: 665906 - DNA, 15 bp, Homo sapiens
cctgacaccactctc

SEQ ID NO: 665907 - DNA, 15 bp, Homo sapiens
ctgacaccactctcc

SEQ ID NO: 665908 - DNA, 15 bp, Homo sapiens
tgacaccactctcca

SEQ ID NO: 665909 - DNA, 15 bp, Homo sapiens
gacaccactctccac

SEQ ID NO: 665910 - DNA, 15 bp, Homo sapiens
acaccactctccaca

SEQ ID NO: 665911 - DNA, 15 bp, Homo sapiens
caccactctccacaa

SEQ ID NO: 665912 - DNA, 15 bp, Homo sapiens
accactctccacaat

SEQ ID NO: 665913 - DNA, 15 bp, Homo sapiens
ccactctccacaatc

SEQ ID NO: 665914 - DNA, 15 bp, Homo sapiens
cactctccacaatcc

SEQ ID NO: 665915 - DNA, 15 bp, Homo sapiens
actctccacaatcct

SEQ ID NO: 665916 - DNA, 15 bp, Homo sapiens
ctctccacaatcctt

SEQ ID NO: 665917 - DNA, 15 bp, Homo sapiens
tctccacaatccttc

SEQ ID NO: 665918 - DNA, 15 bp, Homo sapiens
ctccacaatccttca

SEQ ID NO: 665919 - DNA, 15 bp, Homo sapiens
tccacaatccttcag

SEQ ID NO: 665920 - DNA, 15 bp, Homo sapiens
ccacaatccttcaga

SEQ ID NO: 665921 - DNA, 15 bp, Homo sapiens
cacaatccttcagaa

SEQ ID NO: 665922 - DNA, 15 bp, Homo sapiens
acaatccttcagaag

SEQ ID NO: 665923 - DNA, 15 bp, Homo sapiens
caatccttcagaaga

SEQ ID NO: 665924 - DNA, 15 bp, Homo sapiens
aatccttcagaagaa

SEQ ID NO: 665925 - DNA, 15 bp, Homo sapiens
atccttcagaagaat

SEQ ID NO: 665926 - DNA, 15 bp, Homo sapiens
tccttcagaagaata

SEQ ID NO: 665927 - DNA, 15 bp, Homo sapiens
ccttcagaagaatag

SEQ ID NO: 665928 - DNA, 15 bp, Homo sapiens
cttcagaagaataga

SEQ ID NO: 665929 - DNA, 15 bp, Homo sapiens
ttcagaagaatagac

SEQ ID NO: 665930 - DNA, 15 bp, Homo sapiens
tcagaagaatagaca

SEQ ID NO: 665931 - DNA, 15 bp, Homo sapiens
cagaagaatagacat

SEQ ID NO: 665932 - DNA, 15 bp, Homo sapiens
agaagaatagacatt

SEQ ID NO: 665933 - DNA, 15 bp, Homo sapiens
gaagaatagacattc

SEQ ID NO: 665934 - DNA, 15 bp, Homo sapiens
aagaatagacattcc

SEQ ID NO: 665935 - DNA, 15 bp, Homo sapiens
agaatagacattcct

SEQ ID NO: 665936 - DNA, 15 bp, Homo sapiens
gaatagacattccta

SEQ ID NO: 665937 - DNA, 15 bp, Homo sapiens
aatagacattcctaa

SEQ ID NO: 665938 - DNA, 15 bp, Homo sapiens
atagacattcctaat

SEQ ID NO: 665939 - DNA, 15 bp, Homo sapiens
tagacattcctaatt

SEQ ID NO: 665940 - DNA, 15 bp, Homo sapiens
agacattcctaattt

SEQ ID NO: 665941 - DNA, 15 bp, Homo sapiens
gacattcctaatttt

SEQ ID NO: 665942 - DNA, 15 bp, Homo sapiens
acattcctaatttta

SEQ ID NO: 665943 - DNA, 15 bp, Homo sapiens
cattcctaattttaa

SEQ ID NO: 665944 - DNA, 15 bp, Homo sapiens
attcctaattttaaa

SEQ ID NO: 665945 - DNA, 15 bp, Homo sapiens
ttcctaattttaaat

SEQ ID NO: 665946 - DNA, 15 bp, Homo sapiens
tcctaattttaaatc

SEQ ID NO: 665947 - DNA, 15 bp, Homo sapiens
cctaattttaaatca

SEQ ID NO: 665948 - DNA, 15 bp, Homo sapiens
ctaattttaaatcat

SEQ ID NO: 665949 - DNA, 15 bp, Homo sapiens
taattttaaatcatg

SEQ ID NO: 665950 - DNA, 15 bp, Homo sapiens
aattttaaatcatga

SEQ ID NO: 665951 - DNA, 15 bp, Homo sapiens
attttaaatcatgat

SEQ ID NO: 665952 - DNA, 15 bp, Homo sapiens
ttttaaatcatgatt

SEQ ID NO: 665953 - DNA, 15 bp, Homo sapiens
tttaaatcatgattt

SEQ ID NO: 665954 - DNA, 15 bp, Homo sapiens
ttaaatcatgatttt

SEQ ID NO: 665955 - DNA, 15 bp, Homo sapiens
taaatcatgattttt

SEQ ID NO: 665956 - DNA, 15 bp, Homo sapiens
aaatcatgatttttt

SEQ ID NO: 665957 - DNA, 15 bp, Homo sapiens
aatcatgattttttt

SEQ ID NO: 665958 - DNA, 15 bp, Homo sapiens
atcatgatttttttt

SEQ ID NO: 665959 - DNA, 15 bp, Homo sapiens
tcatgatttttttta

SEQ ID NO: 665960 - DNA, 15 bp, Homo sapiens
catgattttttttaa

SEQ ID NO: 665961 - DNA, 15 bp, Homo sapiens
atgattttttttaat

SEQ ID NO: 665962 - DNA, 15 bp, Homo sapiens
tgattttttttaatt

SEQ ID NO: 665963 - DNA, 15 bp, Homo sapiens
gattttttttaattt

SEQ ID NO: 665964 - DNA, 15 bp, Homo sapiens
attttttttaatttt

SEQ ID NO: 665965 - DNA, 15 bp, Homo sapiens
ttttttttaatttta

SEQ ID NO: 665966 - DNA, 15 bp, Homo sapiens
tttttttaattttag

SEQ ID NO: 665967 - DNA, 15 bp, Homo sapiens
ttttttaattttaga

SEQ ID NO: 665968 - DNA, 15 bp, Homo sapiens
tttttaattttagaa

SEQ ID NO: 665969 - DNA, 15 bp, Homo sapiens
ttttaattttagaaa

SEQ ID NO: 665970 - DNA, 15 bp, Homo sapiens
tttaattttagaaaa

SEQ ID NO: 665971 - DNA, 15 bp, Homo sapiens
ttaattttagaaaac

SEQ ID NO: 665972 - DNA, 15 bp, Homo sapiens
taattttagaaaaca

SEQ ID NO: 665973 - DNA, 15 bp, Homo sapiens
aattttagaaaacaa

SEQ ID NO: 665974 - DNA, 15 bp, Homo sapiens
attttagaaaacaaa

SEQ ID NO: 665975 - DNA, 15 bp, Homo sapiens
ttttagaaaacaaat

SEQ ID NO: 665976 - DNA, 15 bp, Homo sapiens
tttagaaaacaaata

SEQ ID NO: 665977 - DNA, 15 bp, Homo sapiens
ttagaaaacaaataa

SEQ ID NO: 665978 - DNA, 15 bp, Homo sapiens
tagaaaacaaataac

SEQ ID NO: 665979 - DNA, 15 bp, Homo sapiens
agaaaacaaataact

SEQ ID NO: 665980 - DNA, 15 bp, Homo sapiens
gaaaacaaataactt

SEQ ID NO: 665981 - DNA, 15 bp, Homo sapiens
aaaacaaataactta

SEQ ID NO: 665982 - DNA, 15 bp, Homo sapiens
aaacaaataacttaa

SEQ ID NO: 665983 - DNA, 15 bp, Homo sapiens
aacaaataacttaat

SEQ ID NO: 665984 - DNA, 15 bp, Homo sapiens
acaaataacttaatt

SEQ ID NO: 665985 - DNA, 15 bp, Homo sapiens
caaataacttaattg

SEQ ID NO: 665986 - DNA, 15 bp, Homo sapiens
aaataacttaattga

SEQ ID NO: 665987 - DNA, 15 bp, Homo sapiens
aataacttaattgac

SEQ ID NO: 665988 - DNA, 15 bp, Homo sapiens
ataacttaattgact

SEQ ID NO: 665989 - DNA, 15 bp, Homo sapiens
taacttaattgactt

SEQ ID NO: 665990 - DNA, 15 bp, Homo sapiens
aacttaattgactta

SEQ ID NO: 665991 - DNA, 15 bp, Homo sapiens
acttaattgacttag

SEQ ID NO: 665992 - DNA, 15 bp, Homo sapiens
cttaattgacttagc

SEQ ID NO: 665993 - DNA, 15 bp, Homo sapiens
ttaattgacttagcg

SEQ ID NO: 665994 - DNA, 15 bp, Homo sapiens
taattgacttagcga

SEQ ID NO: 665995 - DNA, 15 bp, Homo sapiens
aattgacttagcgac

SEQ ID NO: 665996 - DNA, 15 bp, Homo sapiens
attgacttagcgaca

SEQ ID NO: 665997 - DNA, 15 bp, Homo sapiens
ttgacttagcgacac

SEQ ID NO: 665998 - DNA, 15 bp, Homo sapiens
tgacttagcgacact

SEQ ID NO: 665999 - DNA, 15 bp, Homo sapiens
gacttagcgacactg

SEQ ID NO: 666000 - DNA, 15 bp, Homo sapiens
acttagcgacactgt

SEQ ID NO: 666001 - DNA, 15 bp, Homo sapiens
cttagcgacactgtt

SEQ ID NO: 666002 - DNA, 15 bp, Homo sapiens
ttagcgacactgtta

SEQ ID NO: 666003 - DNA, 15 bp, Homo sapiens
tagcgacactgttag

SEQ ID NO: 666004 - DNA, 15 bp, Homo sapiens
agcgacactgttagc

SEQ ID NO: 666005 - DNA, 15 bp, Homo sapiens
gcgacactgttagca

SEQ ID NO: 666006 - DNA, 15 bp, Homo sapiens
cgacactgttagcat

SEQ ID NO: 666007 - DNA, 15 bp, Homo sapiens
gacactgttagcata

SEQ ID NO: 666008 - DNA, 15 bp, Homo sapiens
acactgttagcatac

SEQ ID NO: 666009 - DNA, 15 bp, Homo sapiens
cactgttagcatact

SEQ ID NO: 666010 - DNA, 15 bp, Homo sapiens
actgttagcatactt

SEQ ID NO: 666011 - DNA, 15 bp, Homo sapiens
ctgttagcatactta

SEQ ID NO: 666012 - DNA, 15 bp, Homo sapiens
tgttagcatacttat

SEQ ID NO: 666013 - DNA, 15 bp, Homo sapiens
gttagcatacttatc

SEQ ID NO: 666014 - DNA, 15 bp, Homo sapiens
ttagcatacttatct

SEQ ID NO: 666015 - DNA, 15 bp, Homo sapiens
tagcatacttatctt

SEQ ID NO: 666016 - DNA, 15 bp, Homo sapiens
agcatacttatcttt

SEQ ID NO: 666017 - DNA, 15 bp, Homo sapiens
gcatacttatctttc

SEQ ID NO: 666018 - DNA, 15 bp, Homo sapiens
catacttatctttcc

SEQ ID NO: 666019 - DNA, 15 bp, Homo sapiens
atacttatctttcct

SEQ ID NO: 666020 - DNA, 15 bp, Homo sapiens
tacttatctttcctg

SEQ ID NO: 666021 - DNA, 15 bp, Homo sapiens
acttatctttcctgt

SEQ ID NO: 666022 - DNA, 15 bp, Homo sapiens
cttatctttcctgtg

SEQ ID NO: 666023 - DNA, 15 bp, Homo sapiens
ttatctttcctgtgt

SEQ ID NO: 666024 - DNA, 15 bp, Homo sapiens
tatctttcctgtgta

SEQ ID NO: 666025 - DNA, 15 bp, Homo sapiens
atctttcctgtgtat

SEQ ID NO: 666026 - DNA, 15 bp, Homo sapiens
tctttcctgtgtatg

SEQ ID NO: 666027 - DNA, 15 bp, Homo sapiens
ctttcctgtgtatgt

SEQ ID NO: 666028 - DNA, 15 bp, Homo sapiens
tttcctgtgtatgtg

SEQ ID NO: 666029 - DNA, 15 bp, Homo sapiens
ttcctgtgtatgtga

SEQ ID NO: 666030 - DNA, 15 bp, Homo sapiens
tcctgtgtatgtgag

SEQ ID NO: 666031 - DNA, 15 bp, Homo sapiens
cctgtgtatgtgagc

SEQ ID NO: 666032 - DNA, 15 bp, Homo sapiens
ctgtgtatgtgagct

SEQ ID NO: 666033 - DNA, 15 bp, Homo sapiens
tgtgtatgtgagctc

SEQ ID NO: 666034 - DNA, 15 bp, Homo sapiens
gtgtatgtgagctct

SEQ ID NO: 666035 - DNA, 15 bp, Homo sapiens
tgtatgtgagctctg

SEQ ID NO: 666036 - DNA, 15 bp, Homo sapiens
gtatgtgagctctgt

SEQ ID NO: 666037 - DNA, 15 bp, Homo sapiens
tatgtgagctctgta

SEQ ID NO: 666038 - DNA, 15 bp, Homo sapiens
atgtgagctctgtaa

SEQ ID NO: 666039 - DNA, 15 bp, Homo sapiens
tgtgagctctgtaag

SEQ ID NO: 666040 - DNA, 15 bp, Homo sapiens
gtgagctctgtaagg

SEQ ID NO: 666041 - DNA, 15 bp, Homo sapiens
tgagctctgtaaggc

SEQ ID NO: 666042 - DNA, 15 bp, Homo sapiens
gagctctgtaaggca

SEQ ID NO: 666043 - DNA, 15 bp, Homo sapiens
agctctgtaaggcag

SEQ ID NO: 666044 - DNA, 15 bp, Homo sapiens
gctctgtaaggcagg

SEQ ID NO: 666045 - DNA, 15 bp, Homo sapiens
ctctgtaaggcaggc

SEQ ID NO: 666046 - DNA, 15 bp, Homo sapiens
tctgtaaggcaggcg

SEQ ID NO: 666047 - DNA, 15 bp, Homo sapiens
ctgtaaggcaggcga

SEQ ID NO: 666048 - DNA, 15 bp, Homo sapiens
tgtaaggcaggcgac

SEQ ID NO: 666049 - DNA, 15 bp, Homo sapiens
gtaaggcaggcgacc

SEQ ID NO: 666050 - DNA, 15 bp, Homo sapiens
taaggcaggcgacca

SEQ ID NO: 666051 - DNA, 15 bp, Homo sapiens
aaggcaggcgaccat

SEQ ID NO: 666052 - DNA, 15 bp, Homo sapiens
aggcaggcgaccatt

SEQ ID NO: 666053 - DNA, 15 bp, Homo sapiens
ggcaggcgaccattt

SEQ ID NO: 666054 - DNA, 15 bp, Homo sapiens
gcaggcgaccatttc

SEQ ID NO: 666055 - DNA, 15 bp, Homo sapiens
caggcgaccatttct

SEQ ID NO: 666056 - DNA, 15 bp, Homo sapiens
aggcgaccatttctt

SEQ ID NO: 666057 - DNA, 15 bp, Homo sapiens
ggcgaccatttctta

SEQ ID NO: 666058 - DNA, 15 bp, Homo sapiens
gcgaccatttcttat

SEQ ID NO: 666059 - DNA, 15 bp, Homo sapiens
cgaccatttcttatg

SEQ ID NO: 666060 - DNA, 15 bp, Homo sapiens
gaccatttcttatgt

SEQ ID NO: 666061 - DNA, 15 bp, Homo sapiens
accatttcttatgta

SEQ ID NO: 666062 - DNA, 15 bp, Homo sapiens
ccatttcttatgtat

SEQ ID NO: 666063 - DNA, 15 bp, Homo sapiens
catttcttatgtatc

SEQ ID NO: 666064 - DNA, 15 bp, Homo sapiens
atttcttatgtatcc

SEQ ID NO: 666065 - DNA, 15 bp, Homo sapiens
tttcttatgtatcca

SEQ ID NO: 666066 - DNA, 15 bp, Homo sapiens
ttcttatgtatccat

SEQ ID NO: 666067 - DNA, 15 bp, Homo sapiens
tcttatgtatccatg

SEQ ID NO: 666068 - DNA, 15 bp, Homo sapiens
cttatgtatccatgt

SEQ ID NO: 666069 - DNA, 15 bp, Homo sapiens
ttatgtatccatgta

SEQ ID NO: 666070 - DNA, 15 bp, Homo sapiens
tatgtatccatgtat

SEQ ID NO: 666071 - DNA, 15 bp, Homo sapiens
atgtatccatgtatc

SEQ ID NO: 666072 - DNA, 15 bp, Homo sapiens
tgtatccatgtatct

SEQ ID NO: 666073 - DNA, 15 bp, Homo sapiens
gtatccatgtatctt

SEQ ID NO: 666074 - DNA, 15 bp, Homo sapiens
tatccatgtatcttt

SEQ ID NO: 666075 - DNA, 15 bp, Homo sapiens
atccatgtatctttg

SEQ ID NO: 666076 - DNA, 15 bp, Homo sapiens
tccatgtatctttgt

SEQ ID NO: 666077 - DNA, 15 bp, Homo sapiens
ccatgtatctttgta

SEQ ID NO: 666078 - DNA, 15 bp, Homo sapiens
catgtatctttgtag

SEQ ID NO: 666079 - DNA, 15 bp, Homo sapiens
atgtatctttgtagt

SEQ ID NO: 666080 - DNA, 15 bp, Homo sapiens
tgtatctttgtagta

SEQ ID NO: 666081 - DNA, 15 bp, Homo sapiens
gtatctttgtagtac

SEQ ID NO: 666082 - DNA, 15 bp, Homo sapiens
tatctttgtagtacc

SEQ ID NO: 666083 - DNA, 15 bp, Homo sapiens
atctttgtagtacct

SEQ ID NO: 666084 - DNA, 15 bp, Homo sapiens
tctttgtagtacctt

SEQ ID NO: 666085 - DNA, 15 bp, Homo sapiens
ctttgtagtaccttc

SEQ ID NO: 666086 - DNA, 15 bp, Homo sapiens
tttgtagtaccttcg

SEQ ID NO: 666087 - DNA, 15 bp, Homo sapiens
ttgtagtaccttcga

SEQ ID NO: 666088 - DNA, 15 bp, Homo sapiens
tgtagtaccttcgac

SEQ ID NO: 666089 - DNA, 15 bp, Homo sapiens
gtagtaccttcgaca

SEQ ID NO: 666090 - DNA, 15 bp, Homo sapiens
tagtaccttcgacag

SEQ ID NO: 666091 - DNA, 15 bp, Homo sapiens
agtaccttcgacagt

SEQ ID NO: 666092 - DNA, 15 bp, Homo sapiens
gtaccttcgacagtt

SEQ ID NO: 666093 - DNA, 15 bp, Homo sapiens
taccttcgacagtta

SEQ ID NO: 666094 - DNA, 15 bp, Homo sapiens
accttcgacagttac

SEQ ID NO: 666095 - DNA, 15 bp, Homo sapiens
ccttcgacagttact

SEQ ID NO: 666096 - DNA, 15 bp, Homo sapiens
cttcgacagttactt

SEQ ID NO: 666097 - DNA, 15 bp, Homo sapiens
ttcgacagttacttt

SEQ ID NO: 666098 - DNA, 15 bp, Homo sapiens
tcgacagttactttt

SEQ ID NO: 666099 - DNA, 15 bp, Homo sapiens
cgacagttacttttg

SEQ ID NO: 666100 - DNA, 15 bp, Homo sapiens
gacagttacttttgt

SEQ ID NO: 666101 - DNA, 15 bp, Homo sapiens
acagttacttttgtg

SEQ ID NO: 666102 - DNA, 15 bp, Homo sapiens
cagttacttttgtgc

SEQ ID NO: 666103 - DNA, 15 bp, Homo sapiens
agttacttttgtgct

SEQ ID NO: 666104 - DNA, 15 bp, Homo sapiens
gttacttttgtgctt

SEQ ID NO: 666105 - DNA, 15 bp, Homo sapiens
ttacttttgtgcttg

SEQ ID NO: 666106 - DNA, 15 bp, Homo sapiens
tacttttgtgcttgc

SEQ ID NO: 666107 - DNA, 15 bp, Homo sapiens
acttttgtgcttgct

SEQ ID NO: 666108 - DNA, 15 bp, Homo sapiens
cttttgtgcttgcta

SEQ ID NO: 666109 - DNA, 15 bp, Homo sapiens
ttttgtgcttgctat

SEQ ID NO: 666110 - DNA, 15 bp, Homo sapiens
tttgtgcttgctatg

SEQ ID NO: 666111 - DNA, 15 bp, Homo sapiens
ttgtgcttgctatgt

SEQ ID NO: 666112 - DNA, 15 bp, Homo sapiens
tgtgcttgctatgtt

SEQ ID NO: 666113 - DNA, 15 bp, Homo sapiens
gtgcttgctatgttt

SEQ ID NO: 666114 - DNA, 15 bp, Homo sapiens
tgcttgctatgtttg

SEQ ID NO: 666115 - DNA, 15 bp, Homo sapiens
gcttgctatgtttgt

SEQ ID NO: 666116 - DNA, 15 bp, Homo sapiens
cttgctatgtttgtt

SEQ ID NO: 666117 - DNA, 15 bp, Homo sapiens
ttgctatgtttgttg

SEQ ID NO: 666118 - DNA, 15 bp, Homo sapiens
tgctatgtttgttga

SEQ ID NO: 666119 - DNA, 15 bp, Homo sapiens
gctatgtttgttgaa

SEQ ID NO: 666120 - DNA, 15 bp, Homo sapiens
ctatgtttgttgaac

SEQ ID NO: 666121 - DNA, 15 bp, Homo sapiens
tatgtttgttgaact

SEQ ID NO: 666122 - DNA, 15 bp, Homo sapiens
atgtttgttgaactg

SEQ ID NO: 666123 - DNA, 15 bp, Homo sapiens
tgtttgttgaactga

SEQ ID NO: 666124 - DNA, 15 bp, Homo sapiens
gtttgttgaactgaa

SEQ ID NO: 666125 - DNA, 15 bp, Homo sapiens
tttgttgaactgaat

SEQ ID NO: 666126 - DNA, 15 bp, Homo sapiens
ttgttgaactgaata

SEQ ID NO: 666127 - DNA, 15 bp, Homo sapiens
tgttgaactgaataa

SEQ ID NO: 666128 - DNA, 15 bp, Homo sapiens
gttgaactgaataat

SEQ ID NO: 666129 - DNA, 15 bp, Homo sapiens
ttgaactgaataatt

SEQ ID NO: 666130 - DNA, 15 bp, Homo sapiens
tgaactgaataattt

SEQ ID NO: 666131 - DNA, 15 bp, Homo sapiens
gaactgaataatttt

SEQ ID NO: 666132 - DNA, 15 bp, Homo sapiens
aactgaataattttg

SEQ ID NO: 666133 - DNA, 15 bp, Homo sapiens
actgaataattttga

SEQ ID NO: 666134 - DNA, 15 bp, Homo sapiens
ctgaataattttgac

SEQ ID NO: 666135 - DNA, 15 bp, Homo sapiens
tgaataattttgaca

SEQ ID NO: 666136 - DNA, 15 bp, Homo sapiens
gaataattttgacat

SEQ ID NO: 666137 - DNA, 15 bp, Homo sapiens
aataattttgacatt

SEQ ID NO: 666138 - DNA, 15 bp, Homo sapiens
ataattttgacattt

SEQ ID NO: 666139 - DNA, 15 bp, Homo sapiens
taattttgacatttt

SEQ ID NO: 666140 - DNA, 15 bp, Homo sapiens
aattttgacattttg

SEQ ID NO: 666141 - DNA, 15 bp, Homo sapiens
attttgacattttgt

SEQ ID NO: 666142 - DNA, 15 bp, Homo sapiens
ttttgacattttgtg

SEQ ID NO: 666143 - DNA, 15 bp, Homo sapiens
tttgacattttgtga

SEQ ID NO: 666144 - DNA, 15 bp, Homo sapiens
ttgacattttgtgaa

SEQ ID NO: 666145 - DNA, 15 bp, Homo sapiens
tgacattttgtgaac

SEQ ID NO: 666146 - DNA, 15 bp, Homo sapiens
gacattttgtgaaca

SEQ ID NO: 666147 - DNA, 15 bp, Homo sapiens
acattttgtgaacat

SEQ ID NO: 666148 - DNA, 15 bp, Homo sapiens
cattttgtgaacatc

SEQ ID NO: 666149 - DNA, 15 bp, Homo sapiens
attttgtgaacatca

SEQ ID NO: 666150 - DNA, 15 bp, Homo sapiens
ttttgtgaacatcac

SEQ ID NO: 666151 - DNA, 15 bp, Homo sapiens
tttgtgaacatcact

SEQ ID NO: 666152 - DNA, 15 bp, Homo sapiens
ttgtgaacatcactc

SEQ ID NO: 666153 - DNA, 15 bp, Homo sapiens
tgtgaacatcactct

SEQ ID NO: 666154 - DNA, 15 bp, Homo sapiens
gtgaacatcactctt

SEQ ID NO: 666155 - DNA, 15 bp, Homo sapiens
tgaacatcactctta

SEQ ID NO: 666156 - DNA, 15 bp, Homo sapiens
gaacatcactcttat

SEQ ID NO: 666157 - DNA, 15 bp, Homo sapiens
aacatcactcttata

SEQ ID NO: 666158 - DNA, 15 bp, Homo sapiens
acatcactcttatat

SEQ ID NO: 666159 - DNA, 15 bp, Homo sapiens
catcactcttatatt

SEQ ID NO: 666160 - DNA, 15 bp, Homo sapiens
atcactcttatattt

SEQ ID NO: 666161 - DNA, 15 bp, Homo sapiens
tcactcttatatttg

SEQ ID NO: 666162 - DNA, 15 bp, Homo sapiens
cactcttatatttga

SEQ ID NO: 666163 - DNA, 15 bp, Homo sapiens
actcttatatttgaa

SEQ ID NO: 666164 - DNA, 15 bp, Homo sapiens
ctcttatatttgaaa

SEQ ID NO: 666165 - DNA, 15 bp, Homo sapiens
tcttatatttgaaaa

SEQ ID NO: 666166 - DNA, 15 bp, Homo sapiens
cttatatttgaaaat

SEQ ID NO: 666167 - DNA, 15 bp, Homo sapiens
ttatatttgaaaata

SEQ ID NO: 666168 - DNA, 15 bp, Homo sapiens
tatatttgaaaatat

SEQ ID NO: 666169 - DNA, 15 bp, Homo sapiens
atatttgaaaatata

SEQ ID NO: 666170 - DNA, 15 bp, Homo sapiens
tatttgaaaatataa

SEQ ID NO: 666171 - DNA, 15 bp, Homo sapiens
atttgaaaatataat

SEQ ID NO: 666172 - DNA, 15 bp, Homo sapiens
tttgaaaatataata

SEQ ID NO: 666173 - DNA, 15 bp, Homo sapiens
ttgaaaatataatag

SEQ ID NO: 666174 - DNA, 15 bp, Homo sapiens
tgaaaatataatagt

SEQ ID NO: 666175 - DNA, 15 bp, Homo sapiens
gaaaatataatagtt

SEQ ID NO: 666176 - DNA, 15 bp, Homo sapiens
aaaatataatagttg

SEQ ID NO: 666177 - DNA, 15 bp, Homo sapiens
aaatataatagttga

SEQ ID NO: 666178 - DNA, 15 bp, Homo sapiens
aatataatagttgaa

SEQ ID NO: 666179 - DNA, 15 bp, Homo sapiens
atataatagttgaat

SEQ ID NO: 666180 - DNA, 15 bp, Homo sapiens
tataatagttgaata

SEQ ID NO: 666181 - DNA, 15 bp, Homo sapiens
ataatagttgaatat

SEQ ID NO: 666182 - DNA, 15 bp, Homo sapiens
taatagttgaatatt

SEQ ID NO: 666183 - DNA, 15 bp, Homo sapiens
aatagttgaatattg

SEQ ID NO: 666184 - DNA, 15 bp, Homo sapiens
atagttgaatattgt

SEQ ID NO: 666185 - DNA, 15 bp, Homo sapiens
tagttgaatattgta

SEQ ID NO: 666186 - DNA, 15 bp, Homo sapiens
agttgaatattgtaa

SEQ ID NO: 666187 - DNA, 15 bp, Homo sapiens
gttgaatattgtaac

SEQ ID NO: 666188 - DNA, 15 bp, Homo sapiens
ttgaatattgtaact

SEQ ID NO: 666189 - DNA, 15 bp, Homo sapiens
tgaatattgtaacta

SEQ ID NO: 666190 - DNA, 15 bp, Homo sapiens
gaatattgtaactaa

SEQ ID NO: 666191 - DNA, 15 bp, Homo sapiens
aatattgtaactaaa

SEQ ID NO: 666192 - DNA, 15 bp, Homo sapiens
atattgtaactaaac

SEQ ID NO: 666193 - DNA, 15 bp, Homo sapiens
tattgtaactaaaca

SEQ ID NO: 666194 - DNA, 15 bp, Homo sapiens
attgtaactaaacat

SEQ ID NO: 666195 - DNA, 15 bp, Homo sapiens
ttgtaactaaacata

SEQ ID NO: 666196 - DNA, 15 bp, Homo sapiens
tgtaactaaacatat

SEQ ID NO: 666197 - DNA, 15 bp, Homo sapiens
gtaactaaacatatt

SEQ ID NO: 666198 - DNA, 15 bp, Homo sapiens
taactaaacatattt

SEQ ID NO: 666199 - DNA, 15 bp, Homo sapiens
aactaaacatattta

SEQ ID NO: 666200 - DNA, 15 bp, Homo sapiens
actaaacatatttat

SEQ ID NO: 666201 - DNA, 15 bp, Homo sapiens
ctaaacatatttatg

SEQ ID NO: 666202 - DNA, 15 bp, Homo sapiens
taaacatatttatgt

SEQ ID NO: 666203 - DNA, 15 bp, Homo sapiens
aaacatatttatgtt

SEQ ID NO: 666204 - DNA, 15 bp, Homo sapiens
aacatatttatgttc

SEQ ID NO: 666205 - DNA, 15 bp, Homo sapiens
acatatttatgttca

SEQ ID NO: 666206 - DNA, 15 bp, Homo sapiens
catatttatgttcaa

SEQ ID NO: 666207 - DNA, 15 bp, Homo sapiens
atatttatgttcaat

SEQ ID NO: 666208 - DNA, 15 bp, Homo sapiens
tatttatgttcaatt

SEQ ID NO: 666209 - DNA, 15 bp, Homo sapiens
atttatgttcaattg

SEQ ID NO: 666210 - DNA, 15 bp, Homo sapiens
tttatgttcaattga

SEQ ID NO: 666211 - DNA, 15 bp, Homo sapiens
ttatgttcaattgat

SEQ ID NO: 666212 - DNA, 15 bp, Homo sapiens
tatgttcaattgatt

SEQ ID NO: 666213 - DNA, 15 bp, Homo sapiens
atgttcaattgattg

SEQ ID NO: 666214 - DNA, 15 bp, Homo sapiens
tgttcaattgattgt

SEQ ID NO: 666215 - DNA, 15 bp, Homo sapiens
gttcaattgattgta

SEQ ID NO: 666216 - DNA, 15 bp, Homo sapiens
ttcaattgattgtaa

SEQ ID NO: 666217 - DNA, 15 bp, Homo sapiens
tcaattgattgtaaa

SEQ ID NO: 666218 - DNA, 15 bp, Homo sapiens
caattgattgtaaaa

SEQ ID NO: 666219 - DNA, 15 bp, Homo sapiens
aattgattgtaaaac

SEQ ID NO: 666220 - DNA, 15 bp, Homo sapiens
attgattgtaaaaca

SEQ ID NO: 666221 - DNA, 15 bp, Homo sapiens
ttgattgtaaaacat

SEQ ID NO: 666222 - DNA, 15 bp, Homo sapiens
tgattgtaaaacatt

SEQ ID NO: 666223 - DNA, 15 bp, Homo sapiens
gattgtaaaacattt

SEQ ID NO: 666224 - DNA, 15 bp, Homo sapiens
attgtaaaacatttt

SEQ ID NO: 666225 - DNA, 15 bp, Homo sapiens
ttgtaaaacattttg

SEQ ID NO: 666226 - DNA, 15 bp, Homo sapiens
tgtaaaacattttgt

SEQ ID NO: 666227 - DNA, 15 bp, Homo sapiens
gtaaaacattttgta

SEQ ID NO: 666228 - DNA, 15 bp, Homo sapiens
taaaacattttgtaa

SEQ ID NO: 666229 - DNA, 15 bp, Homo sapiens
aaaacattttgtaac

SEQ ID NO: 666230 - DNA, 15 bp, Homo sapiens
aaacattttgtaaca

SEQ ID NO: 666231 - DNA, 15 bp, Homo sapiens
aacattttgtaacag

SEQ ID NO: 666232 - DNA, 15 bp, Homo sapiens
acattttgtaacagt

SEQ ID NO: 666233 - DNA, 15 bp, Homo sapiens
cattttgtaacagtt

SEQ ID NO: 666234 - DNA, 15 bp, Homo sapiens
attttgtaacagttt

SEQ ID NO: 666235 - DNA, 15 bp, Homo sapiens
ttttgtaacagtttt

SEQ ID NO: 666236 - DNA, 15 bp, Homo sapiens
tttgtaacagtttta

SEQ ID NO: 666237 - DNA, 15 bp, Homo sapiens
ttgtaacagttttaa

SEQ ID NO: 666238 - DNA, 15 bp, Homo sapiens
tgtaacagttttaaa

SEQ ID NO: 666239 - DNA, 15 bp, Homo sapiens
gtaacagttttaaat

SEQ ID NO: 666240 - DNA, 15 bp, Homo sapiens
taacagttttaaatt

SEQ ID NO: 666241 - DNA, 15 bp, Homo sapiens
aacagttttaaattg

SEQ ID NO: 666242 - DNA, 15 bp, Homo sapiens
acagttttaaattga

SEQ ID NO: 666243 - DNA, 15 bp, Homo sapiens
cagttttaaattgaa

SEQ ID NO: 666244 - DNA, 15 bp, Homo sapiens
agttttaaattgaag

SEQ ID NO: 666245 - DNA, 15 bp, Homo sapiens
gttttaaattgaagc

SEQ ID NO: 666246 - DNA, 15 bp, Homo sapiens
ttttaaattgaagca

SEQ ID NO: 666247 - DNA, 15 bp, Homo sapiens
tttaaattgaagcaa

SEQ ID NO: 666248 - DNA, 15 bp, Homo sapiens
ttaaattgaagcaat

SEQ ID NO: 666249 - DNA, 15 bp, Homo sapiens
taaattgaagcaatt

SEQ ID NO: 666250 - DNA, 15 bp, Homo sapiens
aaattgaagcaattc

SEQ ID NO: 666251 - DNA, 15 bp, Homo sapiens
aattgaagcaattct

SEQ ID NO: 666252 - DNA, 15 bp, Homo sapiens
attgaagcaattcta

SEQ ID NO: 666253 - DNA, 15 bp, Homo sapiens
ttgaagcaattctat

SEQ ID NO: 666254 - DNA, 15 bp, Homo sapiens
tgaagcaattctatt

SEQ ID NO: 666255 - DNA, 15 bp, Homo sapiens
gaagcaattctattt

SEQ ID NO: 666256 - DNA, 15 bp, Homo sapiens
aagcaattctatttt

SEQ ID NO: 666257 - DNA, 15 bp, Homo sapiens
agcaattctattttt

SEQ ID NO: 666258 - DNA, 15 bp, Homo sapiens
gcaattctatttttt

SEQ ID NO: 666259 - DNA, 15 bp, Homo sapiens
caattctatttttta

SEQ ID NO: 666260 - DNA, 15 bp, Homo sapiens
aattctattttttac

SEQ ID NO: 666261 - DNA, 15 bp, Homo sapiens
attctattttttaca

SEQ ID NO: 666262 - DNA, 15 bp, Homo sapiens
ttctattttttacag

SEQ ID NO: 666263 - DNA, 15 bp, Homo sapiens
tctattttttacagc

SEQ ID NO: 666264 - DNA, 15 bp, Homo sapiens
ctattttttacagca

SEQ ID NO: 666265 - DNA, 15 bp, Homo sapiens
tattttttacagcaa

SEQ ID NO: 666266 - DNA, 15 bp, Homo sapiens
attttttacagcaaa

SEQ ID NO: 666267 - DNA, 15 bp, Homo sapiens
ttttttacagcaaac

SEQ ID NO: 666268 - DNA, 15 bp, Homo sapiens
tttttacagcaaaca

SEQ ID NO: 666269 - DNA, 15 bp, Homo sapiens
ttttacagcaaacaa

SEQ ID NO: 666270 - DNA, 15 bp, Homo sapiens
tttacagcaaacaaa

SEQ ID NO: 666271 - DNA, 15 bp, Homo sapiens
ttacagcaaacaaaa

SEQ ID NO: 666272 - DNA, 15 bp, Homo sapiens
tacagcaaacaaaaa

SEQ ID NO: 666273 - DNA, 15 bp, Homo sapiens
acagcaaacaaaaaa

SEQ ID NO: 666274 - DNA, 15 bp, Homo sapiens
cagcaaacaaaaaag

SEQ ID NO: 666275 - DNA, 15 bp, Homo sapiens
agcaaacaaaaaagg

SEQ ID NO: 666276 - DNA, 15 bp, Homo sapiens
gcaaacaaaaaagga

SEQ ID NO: 666277 - DNA, 15 bp, Homo sapiens
caaacaaaaaaggaa

SEQ ID NO: 666278 - DNA, 15 bp, Homo sapiens
aaacaaaaaaggaaa

SEQ ID NO: 666279 - DNA, 15 bp, Homo sapiens
aacaaaaaaggaaaa

SEQ ID NO: 666280 - DNA, 15 bp, Homo sapiens
acaaaaaaggaaaaa

SEQ ID NO: 666281 - DNA, 15 bp, Homo sapiens
caaaaaaggaaaaaa

SEQ ID NO: 666282 - DNA, 15 bp, Homo sapiens
aaaaaaggaaaaaaa

SEQ ID NO: 666283 - DNA, 15 bp, Homo sapiens
aaaaaggaaaaaaac

SEQ ID NO: 666284 - DNA, 15 bp, Homo sapiens
aaaaggaaaaaaacg

SEQ ID NO: 666285 - DNA, 15 bp, Homo sapiens
aaaggaaaaaaacga

SEQ ID NO: 666286 - DNA, 15 bp, Homo sapiens
aaggaaaaaaacgaa

SEQ ID NO: 666287 - DNA, 15 bp, Homo sapiens
aggaaaaaaacgaag

SEQ ID NO: 666288 - DNA, 15 bp, Homo sapiens
ggaaaaaaacgaaga

SEQ ID NO: 666289 - DNA, 15 bp, Homo sapiens
gaaaaaaacgaagac

SEQ ID NO: 666290 - DNA, 15 bp, Homo sapiens
aaaaaaacgaagaca

SEQ ID NO: 666291 - DNA, 15 bp, Homo sapiens
aaaaaacgaagacag

SEQ ID NO: 666292 - DNA, 15 bp, Homo sapiens
aaaaacgaagacagt

SEQ ID NO: 666293 - DNA, 15 bp, Homo sapiens
aaaacgaagacagtg

SEQ ID NO: 666294 - DNA, 15 bp, Homo sapiens
aaacgaagacagtga

SEQ ID NO: 666295 - DNA, 15 bp, Homo sapiens
aacgaagacagtgaa

SEQ ID NO: 666296 - DNA, 15 bp, Homo sapiens
acgaagacagtgaaa

SEQ ID NO: 666297 - DNA, 15 bp, Homo sapiens
cgaagacagtgaaaa

SEQ ID NO: 666298 - DNA, 15 bp, Homo sapiens
gaagacagtgaaaat

SEQ ID NO: 666299 - DNA, 15 bp, Homo sapiens
aagacagtgaaaatg

SEQ ID NO: 666300 - DNA, 15 bp, Homo sapiens
agacagtgaaaatga

SEQ ID NO: 666301 - DNA, 15 bp, Homo sapiens
gacagtgaaaatgat

SEQ ID NO: 666302 - DNA, 15 bp, Homo sapiens
acagtgaaaatgatt

SEQ ID NO: 666303 - DNA, 15 bp, Homo sapiens
cagtgaaaatgattg

SEQ ID NO: 666304 - DNA, 15 bp, Homo sapiens
agtgaaaatgattgg

SEQ ID NO: 666305 - DNA, 15 bp, Homo sapiens
gtgaaaatgattgga

SEQ ID NO: 666306 - DNA, 15 bp, Homo sapiens
tgaaaatgattggag

SEQ ID NO: 666307 - DNA, 15 bp, Homo sapiens
gaaaatgattggagt

SEQ ID NO: 666308 - DNA, 15 bp, Homo sapiens
aaaatgattggagta

SEQ ID NO: 666309 - DNA, 15 bp, Homo sapiens
aaatgattggagtat

SEQ ID NO: 666310 - DNA, 15 bp, Homo sapiens
aatgattggagtatt

SEQ ID NO: 666311 - DNA, 15 bp, Homo sapiens
atgattggagtatta

SEQ ID NO: 666312 - DNA, 15 bp, Homo sapiens
tgattggagtattaa

SEQ ID NO: 666313 - DNA, 15 bp, Homo sapiens
gattggagtattaac

SEQ ID NO: 666314 - DNA, 15 bp, Homo sapiens
attggagtattaaca

SEQ ID NO: 666315 - DNA, 15 bp, Homo sapiens
ttggagtattaacat

SEQ ID NO: 666316 - DNA, 15 bp, Homo sapiens
tggagtattaacatt

SEQ ID NO: 666317 - DNA, 15 bp, Homo sapiens
ggagtattaacattg

SEQ ID NO: 666318 - DNA, 15 bp, Homo sapiens
gagtattaacattgg

SEQ ID NO: 666319 - DNA, 15 bp, Homo sapiens
agtattaacattggt

SEQ ID NO: 666320 - DNA, 15 bp, Homo sapiens
gtattaacattggta

SEQ ID NO: 666321 - DNA, 15 bp, Homo sapiens
tattaacattggtaa

SEQ ID NO: 666322 - DNA, 15 bp, Homo sapiens
attaacattggtaag

SEQ ID NO: 666323 - DNA, 15 bp, Homo sapiens
ttaacattggtaagc

SEQ ID NO: 666324 - DNA, 15 bp, Homo sapiens
taacattggtaagct

SEQ ID NO: 666325 - DNA, 15 bp, Homo sapiens
aacattggtaagctg

SEQ ID NO: 666326 - DNA, 15 bp, Homo sapiens
acattggtaagctgt

SEQ ID NO: 666327 - DNA, 15 bp, Homo sapiens
cattggtaagctgtg

SEQ ID NO: 666328 - DNA, 15 bp, Homo sapiens
attggtaagctgtga

SEQ ID NO: 666329 - DNA, 15 bp, Homo sapiens
ttggtaagctgtgaa

SEQ ID NO: 666330 - DNA, 15 bp, Homo sapiens
tggtaagctgtgaaa

SEQ ID NO: 666331 - DNA, 15 bp, Homo sapiens
ggtaagctgtgaaat

SEQ ID NO: 666332 - DNA, 15 bp, Homo sapiens
gtaagctgtgaaatg

SEQ ID NO: 666333 - DNA, 15 bp, Homo sapiens
taagctgtgaaatgt

SEQ ID NO: 666334 - DNA, 15 bp, Homo sapiens
aagctgtgaaatgtt

SEQ ID NO: 666335 - DNA, 15 bp, Homo sapiens
agctgtgaaatgtta

SEQ ID NO: 666336 - DNA, 15 bp, Homo sapiens
gctgtgaaatgttaa

SEQ ID NO: 666337 - DNA, 15 bp, Homo sapiens
ctgtgaaatgttaaa

SEQ ID NO: 666338 - DNA, 15 bp, Homo sapiens
tgtgaaatgttaaat

SEQ ID NO: 666339 - DNA, 15 bp, Homo sapiens
gtgaaatgttaaatg

SEQ ID NO: 666340 - DNA, 15 bp, Homo sapiens
tgaaatgttaaatgt

SEQ ID NO: 666341 - DNA, 15 bp, Homo sapiens
gaaatgttaaatgtg

SEQ ID NO: 666342 - DNA, 15 bp, Homo sapiens
aaatgttaaatgtga

SEQ ID NO: 666343 - DNA, 15 bp, Homo sapiens
aatgttaaatgtgaa

SEQ ID NO: 666344 - DNA, 15 bp, Homo sapiens
atgttaaatgtgaat

SEQ ID NO: 666345 - DNA, 15 bp, Homo sapiens
tgttaaatgtgaata

SEQ ID NO: 666346 - DNA, 15 bp, Homo sapiens
gttaaatgtgaataa

SEQ ID NO: 666347 - DNA, 15 bp, Homo sapiens
ttaaatgtgaataat

SEQ ID NO: 666348 - DNA, 15 bp, Homo sapiens
taaatgtgaataatc

SEQ ID NO: 666349 - DNA, 15 bp, Homo sapiens
aaatgtgaataatcc

SEQ ID NO: 666350 - DNA, 15 bp, Homo sapiens
aatgtgaataatcct

SEQ ID NO: 666351 - DNA, 15 bp, Homo sapiens
atgtgaataatccta

SEQ ID NO: 666352 - DNA, 15 bp, Homo sapiens
tgtgaataatcctac

SEQ ID NO: 666353 - DNA, 15 bp, Homo sapiens
gtgaataatcctacc

SEQ ID NO: 666354 - DNA, 15 bp, Homo sapiens
tgaataatcctacct

SEQ ID NO: 666355 - DNA, 15 bp, Homo sapiens
gaataatcctacctt

SEQ ID NO: 666356 - DNA, 15 bp, Homo sapiens
aataatcctaccttt

SEQ ID NO: 666357 - DNA, 15 bp, Homo sapiens
ataatcctacctttt

SEQ ID NO: 666358 - DNA, 15 bp, Homo sapiens
taatcctacctttta

SEQ ID NO: 666359 - DNA, 15 bp, Homo sapiens
aatcctaccttttat

SEQ ID NO: 666360 - DNA, 15 bp, Homo sapiens
atcctaccttttatt

SEQ ID NO: 666361 - DNA, 15 bp, Homo sapiens
tcctaccttttattc

SEQ ID NO: 666362 - DNA, 15 bp, Homo sapiens
cctaccttttattca

SEQ ID NO: 666363 - DNA, 15 bp, Homo sapiens
ctaccttttattcaa

SEQ ID NO: 666364 - DNA, 15 bp, Homo sapiens
taccttttattcaaa

SEQ ID NO: 666365 - DNA, 15 bp, Homo sapiens
accttttattcaaat

SEQ ID NO: 666366 - DNA, 15 bp, Homo sapiens
ccttttattcaaatt

SEQ ID NO: 666367 - DNA, 15 bp, Homo sapiens
cttttattcaaattt

SEQ ID NO: 666368 - DNA, 15 bp, Homo sapiens
ttttattcaaatttg

SEQ ID NO: 666369 - DNA, 15 bp, Homo sapiens
tttattcaaatttga

SEQ ID NO: 666370 - DNA, 15 bp, Homo sapiens
ttattcaaatttgag

SEQ ID NO: 666371 - DNA, 15 bp, Homo sapiens
tattcaaatttgagg

SEQ ID NO: 666372 - DNA, 15 bp, Homo sapiens
attcaaatttgaggt

SEQ ID NO: 666373 - DNA, 15 bp, Homo sapiens
ttcaaatttgaggta

SEQ ID NO: 666374 - DNA, 15 bp, Homo sapiens
tcaaatttgaggtat

SEQ ID NO: 666375 - DNA, 15 bp, Homo sapiens
caaatttgaggtatt

SEQ ID NO: 666376 - DNA, 15 bp, Homo sapiens
aaatttgaggtattg

SEQ ID NO: 666377 - DNA, 15 bp, Homo sapiens
aatttgaggtattga

SEQ ID NO: 666378 - DNA, 15 bp, Homo sapiens
atttgaggtattgaa

SEQ ID NO: 666379 - DNA, 15 bp, Homo sapiens
tttgaggtattgaat

SEQ ID NO: 666380 - DNA, 15 bp, Homo sapiens
ttgaggtattgaatc

SEQ ID NO: 666381 - DNA, 15 bp, Homo sapiens
tgaggtattgaatca

SEQ ID NO: 666382 - DNA, 15 bp, Homo sapiens
gaggtattgaatcaa

SEQ ID NO: 666383 - DNA, 15 bp, Homo sapiens
aggtattgaatcaat

SEQ ID NO: 666384 - DNA, 15 bp, Homo sapiens
ggtattgaatcaatt

SEQ ID NO: 666385 - DNA, 15 bp, Homo sapiens
gtattgaatcaatta

SEQ ID NO: 666386 - DNA, 15 bp, Homo sapiens
tattgaatcaattac

SEQ ID NO: 666387 - DNA, 15 bp, Homo sapiens
attgaatcaattacc

SEQ ID NO: 666388 - DNA, 15 bp, Homo sapiens
ttgaatcaattacct

SEQ ID NO: 666389 - DNA, 15 bp, Homo sapiens
tgaatcaattacctt

SEQ ID NO: 666390 - DNA, 15 bp, Homo sapiens
gaatcaattaccttt

SEQ ID NO: 666391 - DNA, 15 bp, Homo sapiens
aatcaattaccttta

SEQ ID NO: 666392 - DNA, 15 bp, Homo sapiens
atcaattacctttaa

SEQ ID NO: 666393 - DNA, 15 bp, Homo sapiens
tcaattacctttaaa

SEQ ID NO: 666394 - DNA, 15 bp, Homo sapiens
caattacctttaaag

SEQ ID NO: 666395 - DNA, 15 bp, Homo sapiens
aattacctttaaagc

SEQ ID NO: 666396 - DNA, 15 bp, Homo sapiens
attacctttaaagca

SEQ ID NO: 666397 - DNA, 15 bp, Homo sapiens
ttacctttaaagcaa

SEQ ID NO: 666398 - DNA, 15 bp, Homo sapiens
tacctttaaagcaaa

SEQ ID NO: 666399 - DNA, 15 bp, Homo sapiens
acctttaaagcaaat

SEQ ID NO: 666400 - DNA, 15 bp, Homo sapiens
cctttaaagcaaata

SEQ ID NO: 666401 - DNA, 15 bp, Homo sapiens
ctttaaagcaaatac

SEQ ID NO: 666402 - DNA, 15 bp, Homo sapiens
tttaaagcaaatact

SEQ ID NO: 666403 - DNA, 15 bp, Homo sapiens
ttaaagcaaatactt

SEQ ID NO: 666404 - DNA, 15 bp, Homo sapiens
aatgttggcctgcct

SEQ ID NO: 666405 - DNA, 15 bp, Homo sapiens
atgttggcctgcctt

SEQ ID NO: 666406 - DNA, 15 bp, Homo sapiens
tgttggcctgccttg

SEQ ID NO: 666407 - DNA, 15 bp, Homo sapiens
gttggcctgccttgc

SEQ ID NO: 666408 - DNA, 15 bp, Homo sapiens
ttggcctgccttgct

SEQ ID NO: 666409 - DNA, 15 bp, Homo sapiens
tggcctgccttgcta

SEQ ID NO: 666410 - DNA, 15 bp, Homo sapiens
ggcctgccttgctag

SEQ ID NO: 666411 - DNA, 15 bp, Homo sapiens
gcctgccttgctaga

SEQ ID NO: 666412 - DNA, 15 bp, Homo sapiens
cctgccttgctagat

SEQ ID NO: 666413 - DNA, 15 bp, Homo sapiens
ctgccttgctagatt

SEQ ID NO: 666414 - DNA, 15 bp, Homo sapiens
tgccttgctagattg

SEQ ID NO: 666415 - DNA, 15 bp, Homo sapiens
gccttgctagattgg

SEQ ID NO: 666416 - DNA, 15 bp, Homo sapiens
ccttgctagattggg

SEQ ID NO: 666417 - DNA, 15 bp, Homo sapiens
cttgctagattgggg

SEQ ID NO: 666418 - DNA, 15 bp, Homo sapiens
ttgctagattgggga

SEQ ID NO: 666419 - DNA, 15 bp, Homo sapiens
tgctagattggggaa

SEQ ID NO: 666420 - DNA, 15 bp, Homo sapiens
gctagattggggaag

SEQ ID NO: 666421 - DNA, 15 bp, Homo sapiens
ctagattggggaagt

SEQ ID NO: 666422 - DNA, 15 bp, Homo sapiens
tagattggggaagtt

SEQ ID NO: 666423 - DNA, 15 bp, Homo sapiens
agattggggaagttc

SEQ ID NO: 666424 - DNA, 15 bp, Homo sapiens
gattggggaagttct

SEQ ID NO: 666425 - DNA, 15 bp, Homo sapiens
attggggaagttctc

SEQ ID NO: 666426 - DNA, 15 bp, Homo sapiens
ttggggaagttctcc

SEQ ID NO: 666427 - DNA, 15 bp, Homo sapiens
tggggaagttctcct

SEQ ID NO: 666428 - DNA, 15 bp, Homo sapiens
ggggaagttctcctg

SEQ ID NO: 666429 - DNA, 15 bp, Homo sapiens
gggaagttctcctgg

SEQ ID NO: 666430 - DNA, 15 bp, Homo sapiens
ggaagttctcctgga

SEQ ID NO: 666431 - DNA, 15 bp, Homo sapiens
gaagttctcctggat

SEQ ID NO: 666432 - DNA, 15 bp, Homo sapiens
aagttctcctggata

SEQ ID NO: 666433 - DNA, 15 bp, Homo sapiens
agttctcctggataa

SEQ ID NO: 666434 - DNA, 15 bp, Homo sapiens
gttctcctggataat

SEQ ID NO: 666435 - DNA, 15 bp, Homo sapiens
ttctcctggataata

SEQ ID NO: 666436 - DNA, 15 bp, Homo sapiens
tctcctggataatat

SEQ ID NO: 666437 - DNA, 15 bp, Homo sapiens
ctcctggataatatc

SEQ ID NO: 666438 - DNA, 15 bp, Homo sapiens
tcctggataatatcc

SEQ ID NO: 666439 - DNA, 15 bp, Homo sapiens
cctggataatatcct

SEQ ID NO: 666440 - DNA, 15 bp, Homo sapiens
ctggataatatcctg

SEQ ID NO: 666441 - DNA, 15 bp, Homo sapiens
tggataatatcctgc

SEQ ID NO: 666442 - DNA, 15 bp, Homo sapiens
ggataatatcctgca

SEQ ID NO: 666443 - DNA, 15 bp, Homo sapiens
gataatatcctgcag

SEQ ID NO: 666444 - DNA, 15 bp, Homo sapiens
ataatatcctgcaga

SEQ ID NO: 666445 - DNA, 15 bp, Homo sapiens
taatatcctgcagag

SEQ ID NO: 666446 - DNA, 15 bp, Homo sapiens
aatatcctgcagagt

SEQ ID NO: 666447 - DNA, 15 bp, Homo sapiens
atatcctgcagagtg

SEQ ID NO: 666448 - DNA, 15 bp, Homo sapiens
tatcctgcagagtgt

SEQ ID NO: 666449 - DNA, 15 bp, Homo sapiens
atcctgcagagtgtt

SEQ ID NO: 666450 - DNA, 15 bp, Homo sapiens
tcctgcagagtgttt

SEQ ID NO: 666451 - DNA, 15 bp, Homo sapiens
cctgcagagtgtttt

SEQ ID NO: 666452 - DNA, 15 bp, Homo sapiens
ctgcagagtgttttc

SEQ ID NO: 666453 - DNA, 15 bp, Homo sapiens
tgcagagtgttttcc

SEQ ID NO: 666454 - DNA, 15 bp, Homo sapiens
gcagagtgttttcca

SEQ ID NO: 666455 - DNA, 15 bp, Homo sapiens
cagagtgttttccaa

SEQ ID NO: 666456 - DNA, 15 bp, Homo sapiens
agagtgttttccaac

SEQ ID NO: 666457 - DNA, 15 bp, Homo sapiens
gagtgttttccaact

SEQ ID NO: 666458 - DNA, 15 bp, Homo sapiens
agtgttttccaactt

SEQ ID NO: 666459 - DNA, 15 bp, Homo sapiens
gtgttttccaacttg

SEQ ID NO: 666460 - DNA, 15 bp, Homo sapiens
tgttttccaacttgg

SEQ ID NO: 666461 - DNA, 15 bp, Homo sapiens
gttttccaacttggt

SEQ ID NO: 666462 - DNA, 15 bp, Homo sapiens
ttttccaacttggtt

SEQ ID NO: 666463 - DNA, 15 bp, Homo sapiens
tttccaacttggttc

SEQ ID NO: 666464 - DNA, 15 bp, Homo sapiens
ttccaacttggttcc

SEQ ID NO: 666465 - DNA, 15 bp, Homo sapiens
tccaacttggttcca

SEQ ID NO: 666466 - DNA, 15 bp, Homo sapiens
ccaacttggttccat

SEQ ID NO: 666467 - DNA, 15 bp, Homo sapiens
caacttggttccatt

SEQ ID NO: 666468 - DNA, 15 bp, Homo sapiens
aacttggttccatta

SEQ ID NO: 666469 - DNA, 15 bp, Homo sapiens
acttggttccattaa

SEQ ID NO: 666470 - DNA, 15 bp, Homo sapiens
cttggttccattaat

SEQ ID NO: 666471 - DNA, 15 bp, Homo sapiens
ttggttccattaatc

SEQ ID NO: 666472 - DNA, 15 bp, Homo sapiens
tggttccattaatcc

SEQ ID NO: 666473 - DNA, 15 bp, Homo sapiens
ggttccattaatcct

SEQ ID NO: 666474 - DNA, 15 bp, Homo sapiens
gttccattaatcctg

SEQ ID NO: 666475 - DNA, 15 bp, Homo sapiens
ttccattaatcctgt

SEQ ID NO: 666476 - DNA, 15 bp, Homo sapiens
tccattaatcctgtc

SEQ ID NO: 666477 - DNA, 15 bp, Homo sapiens
ccattaatcctgtca

SEQ ID NO: 666478 - DNA, 15 bp, Homo sapiens
cattaatcctgtcac

SEQ ID NO: 666479 - DNA, 15 bp, Homo sapiens
attaatcctgtcact

SEQ ID NO: 666480 - DNA, 15 bp, Homo sapiens
ttaatcctgtcactt

SEQ ID NO: 666481 - DNA, 15 bp, Homo sapiens
taatcctgtcacttt

SEQ ID NO: 666482 - DNA, 15 bp, Homo sapiens
aatcctgtcactttc

SEQ ID NO: 666483 - DNA, 15 bp, Homo sapiens
atcctgtcactttca

SEQ ID NO: 666484 - DNA, 15 bp, Homo sapiens
tcctgtcactttcag

SEQ ID NO: 666485 - DNA, 15 bp, Homo sapiens
cctgtcactttcagg

SEQ ID NO: 666486 - DNA, 15 bp, Homo sapiens
ctgtcactttcaggt

SEQ ID NO: 666487 - DNA, 15 bp, Homo sapiens
tgtcactttcaggta

SEQ ID NO: 666488 - DNA, 15 bp, Homo sapiens
gtcactttcaggtac

SEQ ID NO: 666489 - DNA, 15 bp, Homo sapiens
tcactttcaggtaca

SEQ ID NO: 666490 - DNA, 15 bp, Homo sapiens
cactttcaggtacac

SEQ ID NO: 666491 - DNA, 15 bp, Homo sapiens
actttcaggtacacc

SEQ ID NO: 666492 - DNA, 15 bp, Homo sapiens
ctttcaggtacacca

SEQ ID NO: 666493 - DNA, 15 bp, Homo sapiens
tttcaggtacaccaa

SEQ ID NO: 666494 - DNA, 15 bp, Homo sapiens
ttcaggtacaccaat

SEQ ID NO: 666495 - DNA, 15 bp, Homo sapiens
tcaggtacaccaatc

SEQ ID NO: 666496 - DNA, 15 bp, Homo sapiens
caggtacaccaatca

SEQ ID NO: 666497 - DNA, 15 bp, Homo sapiens
aggtacaccaatcac

SEQ ID NO: 666498 - DNA, 15 bp, Homo sapiens
ggtacaccaatcaca

SEQ ID NO: 666499 - DNA, 15 bp, Homo sapiens
gtacaccaatcacac

SEQ ID NO: 666500 - DNA, 15 bp, Homo sapiens
tacaccaatcacaca

SEQ ID NO: 666501 - DNA, 15 bp, Homo sapiens
acaccaatcacacat

SEQ ID NO: 666502 - DNA, 15 bp, Homo sapiens
caccaatcacacata

SEQ ID NO: 666503 - DNA, 15 bp, Homo sapiens
accaatcacacatag

SEQ ID NO: 666504 - DNA, 15 bp, Homo sapiens
ccaatcacacataga

SEQ ID NO: 666505 - DNA, 15 bp, Homo sapiens
caatcacacatagat

SEQ ID NO: 666506 - DNA, 15 bp, Homo sapiens
aatcacacatagatt

SEQ ID NO: 666507 - DNA, 15 bp, Homo sapiens
atcacacatagattt

SEQ ID NO: 666508 - DNA, 15 bp, Homo sapiens
tcacacatagatttg

SEQ ID NO: 666509 - DNA, 15 bp, Homo sapiens
cacacatagatttgg

SEQ ID NO: 666510 - DNA, 15 bp, Homo sapiens
acacatagatttggt

SEQ ID NO: 666511 - DNA, 15 bp, Homo sapiens
cacatagatttggtc

SEQ ID NO: 666512 - DNA, 15 bp, Homo sapiens
acatagatttggtct

SEQ ID NO: 666513 - DNA, 15 bp, Homo sapiens
catagatttggtctt

SEQ ID NO: 666514 - DNA, 15 bp, Homo sapiens
atagatttggtcttt

SEQ ID NO: 666515 - DNA, 15 bp, Homo sapiens
tagatttggtctttt

SEQ ID NO: 666516 - DNA, 15 bp, Homo sapiens
agatttggtcttttc

SEQ ID NO: 666517 - DNA, 15 bp, Homo sapiens
gatttggtcttttca

SEQ ID NO: 666518 - DNA, 15 bp, Homo sapiens
atttggtcttttcac

SEQ ID NO: 666519 - DNA, 15 bp, Homo sapiens
tttggtcttttcaca

SEQ ID NO: 666520 - DNA, 15 bp, Homo sapiens
ttggtcttttcacat

SEQ ID NO: 666521 - DNA, 15 bp, Homo sapiens
tggtcttttcacata

SEQ ID NO: 666522 - DNA, 15 bp, Homo sapiens
ggtcttttcacatag

SEQ ID NO: 666523 - DNA, 15 bp, Homo sapiens
gtcttttcacatagt

SEQ ID NO: 666524 - DNA, 15 bp, Homo sapiens
tcttttcacatagtc

SEQ ID NO: 666525 - DNA, 15 bp, Homo sapiens
cttttcacatagtcc

SEQ ID NO: 666526 - DNA, 15 bp, Homo sapiens
ttttcacatagtccc

SEQ ID NO: 666527 - DNA, 15 bp, Homo sapiens
tttcacatagtccca

SEQ ID NO: 666528 - DNA, 15 bp, Homo sapiens
ttcacatagtcccat

SEQ ID NO: 666529 - DNA, 15 bp, Homo sapiens
tcacatagtcccata

SEQ ID NO: 666530 - DNA, 15 bp, Homo sapiens
cacatagtcccatat

SEQ ID NO: 666531 - DNA, 15 bp, Homo sapiens
acatagtcccatatt

SEQ ID NO: 666532 - DNA, 15 bp, Homo sapiens
catagtcccatattt

SEQ ID NO: 666533 - DNA, 15 bp, Homo sapiens
atagtcccatatttc

SEQ ID NO: 666534 - DNA, 15 bp, Homo sapiens
tagtcccatatttct

SEQ ID NO: 666535 - DNA, 15 bp, Homo sapiens
agtcccatatttctt

SEQ ID NO: 666536 - DNA, 15 bp, Homo sapiens
gtcccatatttcttg

SEQ ID NO: 666537 - DNA, 15 bp, Homo sapiens
tcccatatttcttgg

SEQ ID NO: 666538 - DNA, 15 bp, Homo sapiens
cccatatttcttgga

SEQ ID NO: 666539 - DNA, 15 bp, Homo sapiens
ccatatttcttggag

SEQ ID NO: 666540 - DNA, 15 bp, Homo sapiens
catatttcttggagg

SEQ ID NO: 666541 - DNA, 15 bp, Homo sapiens
atatttcttggaggc

SEQ ID NO: 666542 - DNA, 15 bp, Homo sapiens
tatttcttggaggct

SEQ ID NO: 666543 - DNA, 15 bp, Homo sapiens
atttcttggaggctt

SEQ ID NO: 666544 - DNA, 15 bp, Homo sapiens
tttcttggaggcttt

SEQ ID NO: 666545 - DNA, 15 bp, Homo sapiens
ttcttggaggctttg

SEQ ID NO: 666546 - DNA, 15 bp, Homo sapiens
tcttggaggctttgc

SEQ ID NO: 666547 - DNA, 15 bp, Homo sapiens
cttggaggctttgct

SEQ ID NO: 666548 - DNA, 15 bp, Homo sapiens
ttggaggctttgctt

SEQ ID NO: 666549 - DNA, 15 bp, Homo sapiens
tggaggctttgcttg

SEQ ID NO: 666550 - DNA, 15 bp, Homo sapiens
ggaggctttgcttgt

SEQ ID NO: 666551 - DNA, 15 bp, Homo sapiens
gaggctttgcttgtt

SEQ ID NO: 666552 - DNA, 15 bp, Homo sapiens
aggctttgcttgttt

SEQ ID NO: 666553 - DNA, 15 bp, Homo sapiens
ggctttgcttgtttc

SEQ ID NO: 666554 - DNA, 15 bp, Homo sapiens
gctttgcttgtttct

SEQ ID NO: 666555 - DNA, 15 bp, Homo sapiens
ctttgcttgtttctt

SEQ ID NO: 666556 - DNA, 15 bp, Homo sapiens
tttgcttgtttcttt

SEQ ID NO: 666557 - DNA, 15 bp, Homo sapiens
ttgcttgtttctttt

SEQ ID NO: 666558 - DNA, 15 bp, Homo sapiens
tgcttgtttcttttt

SEQ ID NO: 666559 - DNA, 15 bp, Homo sapiens
gcttgtttcttttta

SEQ ID NO: 666560 - DNA, 15 bp, Homo sapiens
cttgtttctttttat

SEQ ID NO: 666561 - DNA, 15 bp, Homo sapiens
ttgtttctttttatt

SEQ ID NO: 666562 - DNA, 15 bp, Homo sapiens
tgtttctttttattc

SEQ ID NO: 666563 - DNA, 15 bp, Homo sapiens
gtttctttttattct

SEQ ID NO: 666564 - DNA, 15 bp, Homo sapiens
tttctttttattctt

SEQ ID NO: 666565 - DNA, 15 bp, Homo sapiens
ttctttttattcttt

SEQ ID NO: 666566 - DNA, 15 bp, Homo sapiens
tctttttattctttt

SEQ ID NO: 666567 - DNA, 15 bp, Homo sapiens
ctttttattcttttt

SEQ ID NO: 666568 - DNA, 15 bp, Homo sapiens
tttttattctttttt

SEQ ID NO: 666569 - DNA, 15 bp, Homo sapiens
ttttattcttttttc

SEQ ID NO: 666570 - DNA, 15 bp, Homo sapiens
tttattcttttttct

SEQ ID NO: 666571 - DNA, 15 bp, Homo sapiens
ttattcttttttctc

SEQ ID NO: 666572 - DNA, 15 bp, Homo sapiens
tattcttttttctct

SEQ ID NO: 666573 - DNA, 15 bp, Homo sapiens
attcttttttctcta

SEQ ID NO: 666574 - DNA, 15 bp, Homo sapiens
ttcttttttctctaa

SEQ ID NO: 666575 - DNA, 15 bp, Homo sapiens
tcttttttctctaaa

SEQ ID NO: 666576 - DNA, 15 bp, Homo sapiens
cttttttctctaaac

SEQ ID NO: 666577 - DNA, 15 bp, Homo sapiens
ttttttctctaaact

SEQ ID NO: 666578 - DNA, 15 bp, Homo sapiens
tttttctctaaactc

SEQ ID NO: 666579 - DNA, 15 bp, Homo sapiens
ttttctctaaactcc

SEQ ID NO: 666580 - DNA, 15 bp, Homo sapiens
tttctctaaactcct

SEQ ID NO: 666581 - DNA, 15 bp, Homo sapiens
ttctctaaactcctc

SEQ ID NO: 666582 - DNA, 15 bp, Homo sapiens
tctctaaactcctct

SEQ ID NO: 666583 - DNA, 15 bp, Homo sapiens
ctctaaactcctctt

SEQ ID NO: 666584 - DNA, 15 bp, Homo sapiens
tctaaactcctcttc

SEQ ID NO: 666585 - DNA, 15 bp, Homo sapiens
ctaaactcctcttct

SEQ ID NO: 666586 - DNA, 15 bp, Homo sapiens
taaactcctcttctt

SEQ ID NO: 666587 - DNA, 15 bp, Homo sapiens
aaactcctcttcttg

SEQ ID NO: 666588 - DNA, 15 bp, Homo sapiens
aactcctcttcttgt

SEQ ID NO: 666589 - DNA, 15 bp, Homo sapiens
actcctcttcttgtt

SEQ ID NO: 666590 - DNA, 15 bp, Homo sapiens
ctcctcttcttgttt

SEQ ID NO: 666591 - DNA, 15 bp, Homo sapiens
tcctcttcttgtttc

SEQ ID NO: 666592 - DNA, 15 bp, Homo sapiens
cctcttcttgtttca

SEQ ID NO: 666593 - DNA, 15 bp, Homo sapiens
ctcttcttgtttcat

SEQ ID NO: 666594 - DNA, 15 bp, Homo sapiens
tcttcttgtttcatt

SEQ ID NO: 666595 - DNA, 15 bp, Homo sapiens
cttcttgtttcattt

SEQ ID NO: 666596 - DNA, 15 bp, Homo sapiens
ttcttgtttcatttc

SEQ ID NO: 666597 - DNA, 15 bp, Homo sapiens
tcttgtttcatttca

SEQ ID NO: 666598 - DNA, 15 bp, Homo sapiens
cttgtttcatttcat

SEQ ID NO: 666599 - DNA, 15 bp, Homo sapiens
ttgtttcatttcatt

SEQ ID NO: 666600 - DNA, 15 bp, Homo sapiens
tgtttcatttcattc

SEQ ID NO: 666601 - DNA, 15 bp, Homo sapiens
gtttcatttcattca

SEQ ID NO: 666602 - DNA, 15 bp, Homo sapiens
tttcatttcattcat

SEQ ID NO: 666603 - DNA, 15 bp, Homo sapiens
ttcatttcattcatt

SEQ ID NO: 666604 - DNA, 15 bp, Homo sapiens
tcatttcattcattt

SEQ ID NO: 666605 - DNA, 15 bp, Homo sapiens
catttcattcatttg

SEQ ID NO: 666606 - DNA, 15 bp, Homo sapiens
atttcattcatttga

SEQ ID NO: 666607 - DNA, 15 bp, Homo sapiens
tttcattcatttgat

SEQ ID NO: 666608 - DNA, 15 bp, Homo sapiens
ttcattcatttgatc

SEQ ID NO: 666609 - DNA, 15 bp, Homo sapiens
tcattcatttgatct

SEQ ID NO: 666610 - DNA, 15 bp, Homo sapiens
cattcatttgatctt

SEQ ID NO: 666611 - DNA, 15 bp, Homo sapiens
attcatttgatcttc

SEQ ID NO: 666612 - DNA, 15 bp, Homo sapiens
ttcatttgatcttca

SEQ ID NO: 666613 - DNA, 15 bp, Homo sapiens
tcatttgatcttcaa

SEQ ID NO: 666614 - DNA, 15 bp, Homo sapiens
catttgatcttcaat

SEQ ID NO: 666615 - DNA, 15 bp, Homo sapiens
atttgatcttcaatc

SEQ ID NO: 666616 - DNA, 15 bp, Homo sapiens
tttgatcttcaatca

SEQ ID NO: 666617 - DNA, 15 bp, Homo sapiens
ttgatcttcaatcac

SEQ ID NO: 666618 - DNA, 15 bp, Homo sapiens
tgatcttcaatcact

SEQ ID NO: 666619 - DNA, 15 bp, Homo sapiens
gatcttcaatcactg

SEQ ID NO: 666620 - DNA, 15 bp, Homo sapiens
atcttcaatcactga

SEQ ID NO: 666621 - DNA, 15 bp, Homo sapiens
tcttcaatcactgat

SEQ ID NO: 666622 - DNA, 15 bp, Homo sapiens
cttcaatcactgata

SEQ ID NO: 666623 - DNA, 15 bp, Homo sapiens
ttcaatcactgatac

SEQ ID NO: 666624 - DNA, 15 bp, Homo sapiens
tcaatcactgatacc

SEQ ID NO: 666625 - DNA, 15 bp, Homo sapiens
caatcactgataccc

SEQ ID NO: 666626 - DNA, 15 bp, Homo sapiens
aatcactgataccct

SEQ ID NO: 666627 - DNA, 15 bp, Homo sapiens
atcactgataccctt

SEQ ID NO: 666628 - DNA, 15 bp, Homo sapiens
tcactgatacccttt

SEQ ID NO: 666629 - DNA, 15 bp, Homo sapiens
cactgataccctttc

SEQ ID NO: 666630 - DNA, 15 bp, Homo sapiens
actgataccctttct

SEQ ID NO: 666631 - DNA, 15 bp, Homo sapiens
ctgataccctttctt

SEQ ID NO: 666632 - DNA, 15 bp, Homo sapiens
tgataccctttcttc

SEQ ID NO: 666633 - DNA, 15 bp, Homo sapiens
gataccctttcttcc

SEQ ID NO: 666634 - DNA, 15 bp, Homo sapiens
ataccctttcttcca

SEQ ID NO: 666635 - DNA, 15 bp, Homo sapiens
taccctttcttccac

SEQ ID NO: 666636 - DNA, 15 bp, Homo sapiens
accctttcttccact

SEQ ID NO: 666637 - DNA, 15 bp, Homo sapiens
ccctttcttccactt

SEQ ID NO: 666638 - DNA, 15 bp, Homo sapiens
cctttcttccacttg

SEQ ID NO: 666639 - DNA, 15 bp, Homo sapiens
ctttcttccacttga

SEQ ID NO: 666640 - DNA, 15 bp, Homo sapiens
tttcttccacttgat

SEQ ID NO: 666641 - DNA, 15 bp, Homo sapiens
ttcttccacttgatc

SEQ ID NO: 666642 - DNA, 15 bp, Homo sapiens
tcttccacttgatcg

SEQ ID NO: 666643 - DNA, 15 bp, Homo sapiens
cttccacttgatcga

SEQ ID NO: 666644 - DNA, 15 bp, Homo sapiens
ttccacttgatcgaa

SEQ ID NO: 666645 - DNA, 15 bp, Homo sapiens
tccacttgatcgaat

SEQ ID NO: 666646 - DNA, 15 bp, Homo sapiens
ccacttgatcgaatt

SEQ ID NO: 666647 - DNA, 15 bp, Homo sapiens
cacttgatcgaattg

SEQ ID NO: 666648 - DNA, 15 bp, Homo sapiens
acttgatcgaattgg

SEQ ID NO: 666649 - DNA, 15 bp, Homo sapiens
cttgatcgaattggc

SEQ ID NO: 666650 - DNA, 15 bp, Homo sapiens
ttgatcgaattggct

SEQ ID NO: 666651 - DNA, 15 bp, Homo sapiens
tgatcgaattggcta

SEQ ID NO: 666652 - DNA, 15 bp, Homo sapiens
gatcgaattggctac

SEQ ID NO: 666653 - DNA, 15 bp, Homo sapiens
atcgaattggctact

SEQ ID NO: 666654 - DNA, 15 bp, Homo sapiens
tcgaattggctactg

SEQ ID NO: 666655 - DNA, 15 bp, Homo sapiens
cgaattggctactga

SEQ ID NO: 666656 - DNA, 15 bp, Homo sapiens
gaattggctactgaa

SEQ ID NO: 666657 - DNA, 15 bp, Homo sapiens
aattggctactgaag

SEQ ID NO: 666658 - DNA, 15 bp, Homo sapiens
attggctactgaagc

SEQ ID NO: 666659 - DNA, 15 bp, Homo sapiens
ttggctactgaagct

SEQ ID NO: 666660 - DNA, 15 bp, Homo sapiens
tggctactgaagctt

SEQ ID NO: 666661 - DNA, 15 bp, Homo sapiens
ggctactgaagcttg

SEQ ID NO: 666662 - DNA, 15 bp, Homo sapiens
gctactgaagcttgt

SEQ ID NO: 666663 - DNA, 15 bp, Homo sapiens
ctactgaagcttgtg

SEQ ID NO: 666664 - DNA, 15 bp, Homo sapiens
tactgaagcttgtgc

SEQ ID NO: 666665 - DNA, 15 bp, Homo sapiens
actgaagcttgtgct

SEQ ID NO: 666666 - DNA, 15 bp, Homo sapiens
ctgaagcttgtgctt

SEQ ID NO: 666667 - DNA, 15 bp, Homo sapiens
tgaagcttgtgcttt

SEQ ID NO: 666668 - DNA, 15 bp, Homo sapiens
gaagcttgtgctttc

SEQ ID NO: 666669 - DNA, 15 bp, Homo sapiens
aagcttgtgctttcg

SEQ ID NO: 666670 - DNA, 15 bp, Homo sapiens
agcttgtgctttcgt

SEQ ID NO: 666671 - DNA, 15 bp, Homo sapiens
gcttgtgctttcgtc

SEQ ID NO: 666672 - DNA, 15 bp, Homo sapiens
cttgtgctttcgtca

SEQ ID NO: 666673 - DNA, 15 bp, Homo sapiens
ttgtgctttcgtcac

SEQ ID NO: 666674 - DNA, 15 bp, Homo sapiens
tgtgctttcgtcaca

SEQ ID NO: 666675 - DNA, 15 bp, Homo sapiens
gtgctttcgtcacat

SEQ ID NO: 666676 - DNA, 15 bp, Homo sapiens
tgctttcgtcacata

SEQ ID NO: 666677 - DNA, 15 bp, Homo sapiens
gctttcgtcacatag

SEQ ID NO: 666678 - DNA, 15 bp, Homo sapiens
ctttcgtcacatagt

SEQ ID NO: 666679 - DNA, 15 bp, Homo sapiens
tttcgtcacatagtt

SEQ ID NO: 666680 - DNA, 15 bp, Homo sapiens
ttcgtcacatagttc

SEQ ID NO: 666681 - DNA, 15 bp, Homo sapiens
tcgtcacatagttct

SEQ ID NO: 666682 - DNA, 15 bp, Homo sapiens
cgtcacatagttctt

SEQ ID NO: 666683 - DNA, 15 bp, Homo sapiens
gtcacatagttcttg

SEQ ID NO: 666684 - DNA, 15 bp, Homo sapiens
tcacatagttcttgt

SEQ ID NO: 666685 - DNA, 15 bp, Homo sapiens
cacatagttcttgtg

SEQ ID NO: 666686 - DNA, 15 bp, Homo sapiens
acatagttcttgtgc

SEQ ID NO: 666687 - DNA, 15 bp, Homo sapiens
catagttcttgtgcc

SEQ ID NO: 666688 - DNA, 15 bp, Homo sapiens
atagttcttgtgcca

SEQ ID NO: 666689 - DNA, 15 bp, Homo sapiens
tagttcttgtgccat

SEQ ID NO: 666690 - DNA, 15 bp, Homo sapiens
agttcttgtgccatg

SEQ ID NO: 666691 - DNA, 15 bp, Homo sapiens
gttcttgtgccatgg

SEQ ID NO: 666692 - DNA, 15 bp, Homo sapiens
ttcttgtgccatggt

SEQ ID NO: 666693 - DNA, 15 bp, Homo sapiens
tcttgtgccatggtt

SEQ ID NO: 666694 - DNA, 15 bp, Homo sapiens
cttgtgccatggttt

SEQ ID NO: 666695 - DNA, 15 bp, Homo sapiens
ttgtgccatggtttt

SEQ ID NO: 666696 - DNA, 15 bp, Homo sapiens
tgtgccatggttttc

SEQ ID NO: 666697 - DNA, 15 bp, Homo sapiens
gtgccatggttttca

SEQ ID NO: 666698 - DNA, 15 bp, Homo sapiens
tgccatggttttcag

SEQ ID NO: 666699 - DNA, 15 bp, Homo sapiens
gccatggttttcagc

SEQ ID NO: 666700 - DNA, 15 bp, Homo sapiens
ccatggttttcagct

SEQ ID NO: 666701 - DNA, 15 bp, Homo sapiens
catggttttcagctc

SEQ ID NO: 666702 - DNA, 15 bp, Homo sapiens
atggttttcagctcc

SEQ ID NO: 666703 - DNA, 15 bp, Homo sapiens
tggttttcagctcca

SEQ ID NO: 666704 - DNA, 15 bp, Homo sapiens
ggttttcagctccat

SEQ ID NO: 666705 - DNA, 15 bp, Homo sapiens
gttttcagctccatc

SEQ ID NO: 666706 - DNA, 15 bp, Homo sapiens
ttttcagctccatca

SEQ ID NO: 666707 - DNA, 15 bp, Homo sapiens
tttcagctccatcag

SEQ ID NO: 666708 - DNA, 15 bp, Homo sapiens
ttcagctccatcagg

SEQ ID NO: 666709 - DNA, 15 bp, Homo sapiens
tcagctccatcaggt

SEQ ID NO: 666710 - DNA, 15 bp, Homo sapiens
cagctccatcaggtc

SEQ ID NO: 666711 - DNA, 15 bp, Homo sapiens
agctccatcaggtcc

SEQ ID NO: 666712 - DNA, 15 bp, Homo sapiens
gctccatcaggtcct

SEQ ID NO: 666713 - DNA, 15 bp, Homo sapiens
ctccatcaggtcctt

SEQ ID NO: 666714 - DNA, 15 bp, Homo sapiens
tccatcaggtccttt

SEQ ID NO: 666715 - DNA, 15 bp, Homo sapiens
ccatcaggtccttta

SEQ ID NO: 666716 - DNA, 15 bp, Homo sapiens
catcaggtcctttaa

SEQ ID NO: 666717 - DNA, 15 bp, Homo sapiens
atcaggtcctttaag

SEQ ID NO: 666718 - DNA, 15 bp, Homo sapiens
tcaggtcctttaagg

SEQ ID NO: 666719 - DNA, 15 bp, Homo sapiens
caggtcctttaagga

SEQ ID NO: 666720 - DNA, 15 bp, Homo sapiens
aggtcctttaaggac

SEQ ID NO: 666721 - DNA, 15 bp, Homo sapiens
ggtcctttaaggact

SEQ ID NO: 666722 - DNA, 15 bp, Homo sapiens
gtcctttaaggactt

SEQ ID NO: 666723 - DNA, 15 bp, Homo sapiens
tcctttaaggacttc

SEQ ID NO: 666724 - DNA, 15 bp, Homo sapiens
cctttaaggacttct

SEQ ID NO: 666725 - DNA, 15 bp, Homo sapiens
ctttaaggacttctc

SEQ ID NO: 666726 - DNA, 15 bp, Homo sapiens
tttaaggacttctct

SEQ ID NO: 666727 - DNA, 15 bp, Homo sapiens
ttaaggacttctctg

SEQ ID NO: 666728 - DNA, 15 bp, Homo sapiens
taaggacttctctgc

SEQ ID NO: 666729 - DNA, 15 bp, Homo sapiens
aaggacttctctgca

SEQ ID NO: 666730 - DNA, 15 bp, Homo sapiens
aggacttctctgcat

SEQ ID NO: 666731 - DNA, 15 bp, Homo sapiens
ggacttctctgcatc

SEQ ID NO: 666732 - DNA, 15 bp, Homo sapiens
gacttctctgcatcg

SEQ ID NO: 666733 - DNA, 15 bp, Homo sapiens
acttctctgcatcgg

SEQ ID NO: 666734 - DNA, 15 bp, Homo sapiens
cttctctgcatcggt

SEQ ID NO: 666735 - DNA, 15 bp, Homo sapiens
ttctctgcatcggtt

SEQ ID NO: 666736 - DNA, 15 bp, Homo sapiens
tctctgcatcggtta

SEQ ID NO: 666737 - DNA, 15 bp, Homo sapiens
ctctgcatcggttat

SEQ ID NO: 666738 - DNA, 15 bp, Homo sapiens
tctgcatcggttatt

SEQ ID NO: 666739 - DNA, 15 bp, Homo sapiens
ctgcatcggttattc

SEQ ID NO: 666740 - DNA, 15 bp, Homo sapiens
tgcatcggttattct

SEQ ID NO: 666741 - DNA, 15 bp, Homo sapiens
gcatcggttattcta

SEQ ID NO: 666742 - DNA, 15 bp, Homo sapiens
catcggttattctag

SEQ ID NO: 666743 - DNA, 15 bp, Homo sapiens
atcggttattctagt

SEQ ID NO: 666744 - DNA, 15 bp, Homo sapiens
tcggttattctagtt

SEQ ID NO: 666745 - DNA, 15 bp, Homo sapiens
cggttattctagtta

SEQ ID NO: 666746 - DNA, 15 bp, Homo sapiens
ggttattctagttag

SEQ ID NO: 666747 - DNA, 15 bp, Homo sapiens
gttattctagttagc

SEQ ID NO: 666748 - DNA, 15 bp, Homo sapiens
ttattctagttagcc

SEQ ID NO: 666749 - DNA, 15 bp, Homo sapiens
tattctagttagcca

SEQ ID NO: 666750 - DNA, 15 bp, Homo sapiens
attctagttagccat

SEQ ID NO: 666751 - DNA, 15 bp, Homo sapiens
ttctagttagccatt

SEQ ID NO: 666752 - DNA, 15 bp, Homo sapiens
tctagttagccattc

SEQ ID NO: 666753 - DNA, 15 bp, Homo sapiens
ctagttagccattca

SEQ ID NO: 666754 - DNA, 15 bp, Homo sapiens
tagttagccattcat

SEQ ID NO: 666755 - DNA, 15 bp, Homo sapiens
agttagccattcatc

SEQ ID NO: 666756 - DNA, 15 bp, Homo sapiens
gttagccattcatct

SEQ ID NO: 666757 - DNA, 15 bp, Homo sapiens
ttagccattcatcta

SEQ ID NO: 666758 - DNA, 15 bp, Homo sapiens
tagccattcatctat

SEQ ID NO: 666759 - DNA, 15 bp, Homo sapiens
agccattcatctatt

SEQ ID NO: 666760 - DNA, 15 bp, Homo sapiens
gccattcatctattc

SEQ ID NO: 666761 - DNA, 15 bp, Homo sapiens
ccattcatctattct

SEQ ID NO: 666762 - DNA, 15 bp, Homo sapiens
cattcatctattctt

SEQ ID NO: 666763 - DNA, 15 bp, Homo sapiens
attcatctattcttt

SEQ ID NO: 666764 - DNA, 15 bp, Homo sapiens
ttcatctattctttt

SEQ ID NO: 666765 - DNA, 15 bp, Homo sapiens
tcatctattcttttt

SEQ ID NO: 666766 - DNA, 15 bp, Homo sapiens
catctattctttttt

SEQ ID NO: 666767 - DNA, 15 bp, Homo sapiens
atctattcttttttc

SEQ ID NO: 666768 - DNA, 15 bp, Homo sapiens
tctattcttttttct

SEQ ID NO: 666769 - DNA, 15 bp, Homo sapiens
ctattcttttttcta

SEQ ID NO: 666770 - DNA, 15 bp, Homo sapiens
tattcttttttctag

SEQ ID NO: 666771 - DNA, 15 bp, Homo sapiens
attcttttttctagg

SEQ ID NO: 666772 - DNA, 15 bp, Homo sapiens
ttcttttttctaggt

SEQ ID NO: 666773 - DNA, 15 bp, Homo sapiens
tcttttttctaggtt

SEQ ID NO: 666774 - DNA, 15 bp, Homo sapiens
cttttttctaggttt

SEQ ID NO: 666775 - DNA, 15 bp, Homo sapiens
ttttttctaggtttt

SEQ ID NO: 666776 - DNA, 15 bp, Homo sapiens
tttttctaggttttt

SEQ ID NO: 666777 - DNA, 15 bp, Homo sapiens
ttttctaggttttta

SEQ ID NO: 666778 - DNA, 15 bp, Homo sapiens
tttctaggtttttaa

SEQ ID NO: 666779 - DNA, 15 bp, Homo sapiens
ttctaggtttttaac

SEQ ID NO: 666780 - DNA, 15 bp, Homo sapiens
tctaggtttttaact

SEQ ID NO: 666781 - DNA, 15 bp, Homo sapiens
ctaggtttttaactt

SEQ ID NO: 666782 - DNA, 15 bp, Homo sapiens
taggtttttaacttc

SEQ ID NO: 666783 - DNA, 15 bp, Homo sapiens
aggtttttaacttct

SEQ ID NO: 666784 - DNA, 15 bp, Homo sapiens
ggtttttaacttctt

SEQ ID NO: 666785 - DNA, 15 bp, Homo sapiens
gtttttaacttcttt

SEQ ID NO: 666786 - DNA, 15 bp, Homo sapiens
tttttaacttctttg

SEQ ID NO: 666787 - DNA, 15 bp, Homo sapiens
ttttaacttctttgc

SEQ ID NO: 666788 - DNA, 15 bp, Homo sapiens
tttaacttctttgcc

SEQ ID NO: 666789 - DNA, 15 bp, Homo sapiens
ttaacttctttgcca

SEQ ID NO: 666790 - DNA, 15 bp, Homo sapiens
taacttctttgccat

SEQ ID NO: 666791 - DNA, 15 bp, Homo sapiens
aacttctttgccatg

SEQ ID NO: 666792 - DNA, 15 bp, Homo sapiens
acttctttgccatgg

SEQ ID NO: 666793 - DNA, 15 bp, Homo sapiens
cttctttgccatggg

SEQ ID NO: 666794 - DNA, 15 bp, Homo sapiens
ttctttgccatgggt

SEQ ID NO: 666795 - DNA, 15 bp, Homo sapiens
tctttgccatgggtt

SEQ ID NO: 666796 - DNA, 15 bp, Homo sapiens
ctttgccatgggttc

SEQ ID NO: 666797 - DNA, 15 bp, Homo sapiens
tttgccatgggttcg

SEQ ID NO: 666798 - DNA, 15 bp, Homo sapiens
ttgccatgggttcga

SEQ ID NO: 666799 - DNA, 15 bp, Homo sapiens
tgccatgggttcgaa

SEQ ID NO: 666800 - DNA, 15 bp, Homo sapiens
gccatgggttcgaac

SEQ ID NO: 666801 - DNA, 15 bp, Homo sapiens
ccatgggttcgaact

SEQ ID NO: 666802 - DNA, 15 bp, Homo sapiens
catgggttcgaactt

SEQ ID NO: 666803 - DNA, 15 bp, Homo sapiens
atgggttcgaacttc

SEQ ID NO: 666804 - DNA, 15 bp, Homo sapiens
tgggttcgaacttcc

SEQ ID NO: 666805 - DNA, 15 bp, Homo sapiens
gggttcgaacttccg

SEQ ID NO: 666806 - DNA, 15 bp, Homo sapiens
ggttcgaacttccgt

SEQ ID NO: 666807 - DNA, 15 bp, Homo sapiens
gttcgaacttccgtc

SEQ ID NO: 666808 - DNA, 15 bp, Homo sapiens
ttcgaacttccgtct

SEQ ID NO: 666809 - DNA, 15 bp, Homo sapiens
tcgaacttccgtctt

SEQ ID NO: 666810 - DNA, 15 bp, Homo sapiens
cgaacttccgtcttt

SEQ ID NO: 666811 - DNA, 15 bp, Homo sapiens
gaacttccgtcttta

SEQ ID NO: 666812 - DNA, 15 bp, Homo sapiens
aacttccgtctttag

SEQ ID NO: 666813 - DNA, 15 bp, Homo sapiens
acttccgtctttagc

SEQ ID NO: 666814 - DNA, 15 bp, Homo sapiens
cttccgtctttagct

SEQ ID NO: 666815 - DNA, 15 bp, Homo sapiens
ttccgtctttagctc

SEQ ID NO: 666816 - DNA, 15 bp, Homo sapiens
tccgtctttagctca

SEQ ID NO: 666817 - DNA, 15 bp, Homo sapiens
ccgtctttagctcag

SEQ ID NO: 666818 - DNA, 15 bp, Homo sapiens
cgtctttagctcaga

SEQ ID NO: 666819 - DNA, 15 bp, Homo sapiens
gtctttagctcagag

SEQ ID NO: 666820 - DNA, 15 bp, Homo sapiens
tctttagctcagaga

SEQ ID NO: 666821 - DNA, 15 bp, Homo sapiens
ctttagctcagagaa

SEQ ID NO: 666822 - DNA, 15 bp, Homo sapiens
tttagctcagagaag

SEQ ID NO: 666823 - DNA, 15 bp, Homo sapiens
ttagctcagagaagt

SEQ ID NO: 666824 - DNA, 15 bp, Homo sapiens
tagctcagagaagtt

SEQ ID NO: 666825 - DNA, 15 bp, Homo sapiens
agctcagagaagttt

SEQ ID NO: 666826 - DNA, 15 bp, Homo sapiens
gctcagagaagtttg

SEQ ID NO: 666827 - DNA, 15 bp, Homo sapiens
ctcagagaagtttga

SEQ ID NO: 666828 - DNA, 15 bp, Homo sapiens
tcagagaagtttgat

SEQ ID NO: 666829 - DNA, 15 bp, Homo sapiens
cagagaagtttgatc

SEQ ID NO: 666830 - DNA, 15 bp, Homo sapiens
agagaagtttgatca

SEQ ID NO: 666831 - DNA, 15 bp, Homo sapiens
gagaagtttgatcat

SEQ ID NO: 666832 - DNA, 15 bp, Homo sapiens
agaagtttgatcatc

SEQ ID NO: 666833 - DNA, 15 bp, Homo sapiens
gaagtttgatcatct

SEQ ID NO: 666834 - DNA, 15 bp, Homo sapiens
aagtttgatcatctg

SEQ ID NO: 666835 - DNA, 15 bp, Homo sapiens
agtttgatcatctgt

SEQ ID NO: 666836 - DNA, 15 bp, Homo sapiens
gtttgatcatctgta

SEQ ID NO: 666837 - DNA, 15 bp, Homo sapiens
tttgatcatctgtag

SEQ ID NO: 666838 - DNA, 15 bp, Homo sapiens
ttgatcatctgtagc

SEQ ID NO: 666839 - DNA, 15 bp, Homo sapiens
tgatcatctgtagcc

SEQ ID NO: 666840 - DNA, 15 bp, Homo sapiens
gatcatctgtagcct

SEQ ID NO: 666841 - DNA, 15 bp, Homo sapiens
atcatctgtagcctt

SEQ ID NO: 666842 - DNA, 15 bp, Homo sapiens
tcatctgtagccttc

SEQ ID NO: 666843 - DNA, 15 bp, Homo sapiens
catctgtagccttct

SEQ ID NO: 666844 - DNA, 15 bp, Homo sapiens
atctgtagccttctt

SEQ ID NO: 666845 - DNA, 15 bp, Homo sapiens
tctgtagccttcttc

SEQ ID NO: 666846 - DNA, 15 bp, Homo sapiens
ctgtagccttcttct

SEQ ID NO: 666847 - DNA, 15 bp, Homo sapiens
tgtagccttcttctc

SEQ ID NO: 666848 - DNA, 15 bp, Homo sapiens
gtagccttcttctct

SEQ ID NO: 666849 - DNA, 15 bp, Homo sapiens
tagccttcttctctc

SEQ ID NO: 666850 - DNA, 15 bp, Homo sapiens
agccttcttctctca

SEQ ID NO: 666851 - DNA, 15 bp, Homo sapiens
gccttcttctctcaa

SEQ ID NO: 666852 - DNA, 15 bp, Homo sapiens
ccttcttctctcaac

SEQ ID NO: 666853 - DNA, 15 bp, Homo sapiens
cttcttctctcaact

SEQ ID NO: 666854 - DNA, 15 bp, Homo sapiens
ttcttctctcaactc

SEQ ID NO: 666855 - DNA, 15 bp, Homo sapiens
tcttctctcaactca

SEQ ID NO: 666856 - DNA, 15 bp, Homo sapiens
cttctctcaactcat

SEQ ID NO: 666857 - DNA, 15 bp, Homo sapiens
ttctctcaactcatc

SEQ ID NO: 666858 - DNA, 15 bp, Homo sapiens
tctctcaactcatca

SEQ ID NO: 666859 - DNA, 15 bp, Homo sapiens
ctctcaactcatcaa

SEQ ID NO: 666860 - DNA, 15 bp, Homo sapiens
tctcaactcatcaaa

SEQ ID NO: 666861 - DNA, 15 bp, Homo sapiens
ctcaactcatcaaag

SEQ ID NO: 666862 - DNA, 15 bp, Homo sapiens
tcaactcatcaaagt

SEQ ID NO: 666863 - DNA, 15 bp, Homo sapiens
caactcatcaaagtc

SEQ ID NO: 666864 - DNA, 15 bp, Homo sapiens
aactcatcaaagtca

SEQ ID NO: 666865 - DNA, 15 bp, Homo sapiens
actcatcaaagtcat

SEQ ID NO: 666866 - DNA, 15 bp, Homo sapiens
ctcatcaaagtcatt

SEQ ID NO: 666867 - DNA, 15 bp, Homo sapiens
tcatcaaagtcattc

SEQ ID NO: 666868 - DNA, 15 bp, Homo sapiens
catcaaagtcattct

SEQ ID NO: 666869 - DNA, 15 bp, Homo sapiens
atcaaagtcattctc

SEQ ID NO: 666870 - DNA, 15 bp, Homo sapiens
tcaaagtcattctcc

SEQ ID NO: 666871 - DNA, 15 bp, Homo sapiens
caaagtcattctccg

SEQ ID NO: 666872 - DNA, 15 bp, Homo sapiens
aaagtcattctccgt

SEQ ID NO: 666873 - DNA, 15 bp, Homo sapiens
aagtcattctccgtc

SEQ ID NO: 666874 - DNA, 15 bp, Homo sapiens
agtcattctccgtcc

SEQ ID NO: 666875 - DNA, 15 bp, Homo sapiens
gtcattctccgtcct

SEQ ID NO: 666876 - DNA, 15 bp, Homo sapiens
tcattctccgtcctg

SEQ ID NO: 666877 - DNA, 15 bp, Homo sapiens
cattctccgtcctgc

SEQ ID NO: 666878 - DNA, 15 bp, Homo sapiens
attctccgtcctgct

SEQ ID NO: 666879 - DNA, 15 bp, Homo sapiens
ttctccgtcctgctt

SEQ ID NO: 666880 - DNA, 15 bp, Homo sapiens
tctccgtcctgcttt

SEQ ID NO: 666881 - DNA, 15 bp, Homo sapiens
ctccgtcctgctttg

SEQ ID NO: 666882 - DNA, 15 bp, Homo sapiens
tccgtcctgctttgt

SEQ ID NO: 666883 - DNA, 15 bp, Homo sapiens
ccgtcctgctttgtt

SEQ ID NO: 666884 - DNA, 15 bp, Homo sapiens
cgtcctgctttgttc

SEQ ID NO: 666885 - DNA, 15 bp, Homo sapiens
gtcctgctttgttcc

SEQ ID NO: 666886 - DNA, 15 bp, Homo sapiens
tcctgctttgttcca

SEQ ID NO: 666887 - DNA, 15 bp, Homo sapiens
cctgctttgttccat

SEQ ID NO: 666888 - DNA, 15 bp, Homo sapiens
ctgctttgttccatt

SEQ ID NO: 666889 - DNA, 15 bp, Homo sapiens
tgctttgttccattg

SEQ ID NO: 666890 - DNA, 15 bp, Homo sapiens
gctttgttccattgc

SEQ ID NO: 666891 - DNA, 15 bp, Homo sapiens
ctttgttccattgct

SEQ ID NO: 666892 - DNA, 15 bp, Homo sapiens
tttgttccattgctg

SEQ ID NO: 666893 - DNA, 15 bp, Homo sapiens
ttgttccattgctgg

SEQ ID NO: 666894 - DNA, 15 bp, Homo sapiens
tgttccattgctggt

SEQ ID NO: 666895 - DNA, 15 bp, Homo sapiens
gttccattgctggtg

SEQ ID NO: 666896 - DNA, 15 bp, Homo sapiens
ttccattgctggtga

SEQ ID NO: 666897 - DNA, 15 bp, Homo sapiens
tccattgctggtgag

SEQ ID NO: 666898 - DNA, 15 bp, Homo sapiens
ccattgctggtgagg

SEQ ID NO: 666899 - DNA, 15 bp, Homo sapiens
cattgctggtgagga

SEQ ID NO: 666900 - DNA, 15 bp, Homo sapiens
attgctggtgaggag

SEQ ID NO: 666901 - DNA, 15 bp, Homo sapiens
ttgctggtgaggagc

SEQ ID NO: 666902 - DNA, 15 bp, Homo sapiens
tgctggtgaggagct

SEQ ID NO: 666903 - DNA, 15 bp, Homo sapiens
gctggtgaggagctg

SEQ ID NO: 666904 - DNA, 15 bp, Homo sapiens
ctggtgaggagctgc

SEQ ID NO: 666905 - DNA, 15 bp, Homo sapiens
tggtgaggagctgca

SEQ ID NO: 666906 - DNA, 15 bp, Homo sapiens
ggtgaggagctgcat

SEQ ID NO: 666907 - DNA, 15 bp, Homo sapiens
gtgaggagctgcatt

SEQ ID NO: 666908 - DNA, 15 bp, Homo sapiens
tgaggagctgcattc

SEQ ID NO: 666909 - DNA, 15 bp, Homo sapiens
gaggagctgcattcc

SEQ ID NO: 666910 - DNA, 15 bp, Homo sapiens
aggagctgcattcct

SEQ ID NO: 666911 - DNA, 15 bp, Homo sapiens
ggagctgcattcctt

SEQ ID NO: 666912 - DNA, 15 bp, Homo sapiens
gagctgcattccttt

SEQ ID NO: 666913 - DNA, 15 bp, Homo sapiens
agctgcattcctttg

SEQ ID NO: 666914 - DNA, 15 bp, Homo sapiens
gctgcattcctttgg

SEQ ID NO: 666915 - DNA, 15 bp, Homo sapiens
ctgcattcctttgga

SEQ ID NO: 666916 - DNA, 15 bp, Homo sapiens
tgcattcctttggag

SEQ ID NO: 666917 - DNA, 15 bp, Homo sapiens
gcattcctttggagg

SEQ ID NO: 666918 - DNA, 15 bp, Homo sapiens
cattcctttggagga

SEQ ID NO: 666919 - DNA, 15 bp, Homo sapiens
attcctttggaggag

SEQ ID NO: 666920 - DNA, 15 bp, Homo sapiens
ttcctttggaggagg

SEQ ID NO: 666921 - DNA, 15 bp, Homo sapiens
tcctttggaggagga

SEQ ID NO: 666922 - DNA, 15 bp, Homo sapiens
cctttggaggaggag

SEQ ID NO: 666923 - DNA, 15 bp, Homo sapiens
ctttggaggaggaga

SEQ ID NO: 666924 - DNA, 15 bp, Homo sapiens
tttggaggaggagag

SEQ ID NO: 666925 - DNA, 15 bp, Homo sapiens
ttggaggaggagagg

SEQ ID NO: 666926 - DNA, 15 bp, Homo sapiens
tggaggaggagaggc

SEQ ID NO: 666927 - DNA, 15 bp, Homo sapiens
ggaggaggagaggcg

SEQ ID NO: 666928 - DNA, 15 bp, Homo sapiens
gaggaggagaggcgc

SEQ ID NO: 666929 - DNA, 15 bp, Homo sapiens
aggaggagaggcgct

SEQ ID NO: 666930 - DNA, 15 bp, Homo sapiens
ggaggagaggcgctc

SEQ ID NO: 666931 - DNA, 15 bp, Homo sapiens
gaggagaggcgctct

SEQ ID NO: 666932 - DNA, 15 bp, Homo sapiens
aggagaggcgctctg

SEQ ID NO: 666933 - DNA, 15 bp, Homo sapiens
ggagaggcgctctga

SEQ ID NO: 666934 - DNA, 15 bp, Homo sapiens
gagaggcgctctgat

SEQ ID NO: 666935 - DNA, 15 bp, Homo sapiens
agaggcgctctgatt

SEQ ID NO: 666936 - DNA, 15 bp, Homo sapiens
gaggcgctctgattt

SEQ ID NO: 666937 - DNA, 15 bp, Homo sapiens
aggcgctctgatttt

SEQ ID NO: 666938 - DNA, 15 bp, Homo sapiens
ggcgctctgattttt

SEQ ID NO: 666939 - DNA, 15 bp, Homo sapiens
gcgctctgattttta

SEQ ID NO: 666940 - DNA, 15 bp, Homo sapiens
cgctctgatttttag

SEQ ID NO: 666941 - DNA, 15 bp, Homo sapiens
gctctgatttttaga

SEQ ID NO: 666942 - DNA, 15 bp, Homo sapiens
ctctgatttttagaa

SEQ ID NO: 666943 - DNA, 15 bp, Homo sapiens
tctgatttttagaat

SEQ ID NO: 666944 - DNA, 15 bp, Homo sapiens
ctgatttttagaatt

SEQ ID NO: 666945 - DNA, 15 bp, Homo sapiens
tgatttttagaattt

SEQ ID NO: 666946 - DNA, 15 bp, Homo sapiens
gatttttagaatttt

SEQ ID NO: 666947 - DNA, 15 bp, Homo sapiens
atttttagaattttc

SEQ ID NO: 666948 - DNA, 15 bp, Homo sapiens
tttttagaattttca

SEQ ID NO: 666949 - DNA, 15 bp, Homo sapiens
ttttagaattttcag

SEQ ID NO: 666950 - DNA, 15 bp, Homo sapiens
tttagaattttcagt

SEQ ID NO: 666951 - DNA, 15 bp, Homo sapiens
ttagaattttcagtt

SEQ ID NO: 666952 - DNA, 15 bp, Homo sapiens
tagaattttcagttt

SEQ ID NO: 666953 - DNA, 15 bp, Homo sapiens
agaattttcagtttt

SEQ ID NO: 666954 - DNA, 15 bp, Homo sapiens
gaattttcagttttt

SEQ ID NO: 666955 - DNA, 15 bp, Homo sapiens
aattttcagtttttc

SEQ ID NO: 666956 - DNA, 15 bp, Homo sapiens
attttcagtttttct

SEQ ID NO: 666957 - DNA, 15 bp, Homo sapiens
ttttcagtttttctg

SEQ ID NO: 666958 - DNA, 15 bp, Homo sapiens
tttcagtttttctgt

SEQ ID NO: 666959 - DNA, 15 bp, Homo sapiens
ttcagtttttctgtt

SEQ ID NO: 666960 - DNA, 15 bp, Homo sapiens
tcagtttttctgttc

SEQ ID NO: 666961 - DNA, 15 bp, Homo sapiens
cagtttttctgttct

SEQ ID NO: 666962 - DNA, 15 bp, Homo sapiens
agtttttctgttctg

SEQ ID NO: 666963 - DNA, 15 bp, Homo sapiens
gtttttctgttctgt

SEQ ID NO: 666964 - DNA, 15 bp, Homo sapiens
tttttctgttctgtt

SEQ ID NO: 666965 - DNA, 15 bp, Homo sapiens
ttttctgttctgttt

SEQ ID NO: 666966 - DNA, 15 bp, Homo sapiens
tttctgttctgtttt

SEQ ID NO: 666967 - DNA, 15 bp, Homo sapiens
ttctgttctgttttt

SEQ ID NO: 666968 - DNA, 15 bp, Homo sapiens
tctgttctgtttttt

SEQ ID NO: 666969 - DNA, 15 bp, Homo sapiens
ctgttctgttttttc

SEQ ID NO: 666970 - DNA, 15 bp, Homo sapiens
tgttctgttttttcc

SEQ ID NO: 666971 - DNA, 15 bp, Homo sapiens
gttctgttttttccc

SEQ ID NO: 666972 - DNA, 15 bp, Homo sapiens
ttctgttttttcccc

SEQ ID NO: 666973 - DNA, 15 bp, Homo sapiens
tctgttttttcccca

SEQ ID NO: 666974 - DNA, 15 bp, Homo sapiens
ctgttttttccccat

SEQ ID NO: 666975 - DNA, 15 bp, Homo sapiens
tgttttttccccatc

SEQ ID NO: 666976 - DNA, 15 bp, Homo sapiens
gttttttccccatct

SEQ ID NO: 666977 - DNA, 15 bp, Homo sapiens
ttttttccccatctt

SEQ ID NO: 666978 - DNA, 15 bp, Homo sapiens
tttttccccatcttt

SEQ ID NO: 666979 - DNA, 15 bp, Homo sapiens
ttttccccatctttg

SEQ ID NO: 666980 - DNA, 15 bp, Homo sapiens
tttccccatctttgt

SEQ ID NO: 666981 - DNA, 15 bp, Homo sapiens
ttccccatctttgtg

SEQ ID NO: 666982 - DNA, 15 bp, Homo sapiens
tccccatctttgtgg

SEQ ID NO: 666983 - DNA, 15 bp, Homo sapiens
ccccatctttgtggt

SEQ ID NO: 666984 - DNA, 15 bp, Homo sapiens
cccatctttgtggtt

SEQ ID NO: 666985 - DNA, 15 bp, Homo sapiens
ccatctttgtggttt

SEQ ID NO: 666986 - DNA, 15 bp, Homo sapiens
catctttgtggtttt

SEQ ID NO: 666987 - DNA, 15 bp, Homo sapiens
atctttgtggtttta

SEQ ID NO: 666988 - DNA, 15 bp, Homo sapiens
tctttgtggttttat

SEQ ID NO: 666989 - DNA, 15 bp, Homo sapiens
ctttgtggttttatc

SEQ ID NO: 666990 - DNA, 15 bp, Homo sapiens
tttgtggttttatct

SEQ ID NO: 666991 - DNA, 15 bp, Homo sapiens
ttgtggttttatcta

SEQ ID NO: 666992 - DNA, 15 bp, Homo sapiens
tgtggttttatctac

SEQ ID NO: 666993 - DNA, 15 bp, Homo sapiens
gtggttttatctacc

SEQ ID NO: 666994 - DNA, 15 bp, Homo sapiens
tggttttatctacct

SEQ ID NO: 666995 - DNA, 15 bp, Homo sapiens
ggttttatctacctt

SEQ ID NO: 666996 - DNA, 15 bp, Homo sapiens
gttttatctaccttt

SEQ ID NO: 666997 - DNA, 15 bp, Homo sapiens
ttttatctacctttg

SEQ ID NO: 666998 - DNA, 15 bp, Homo sapiens
tttatctacctttgg

SEQ ID NO: 666999 - DNA, 15 bp, Homo sapiens
ttatctacctttggt

SEQ ID NO: 667000 - DNA, 15 bp, Homo sapiens
tatctacctttggtt

SEQ ID NO: 667001 - DNA, 15 bp, Homo sapiens
atctacctttggttt

SEQ ID NO: 667002 - DNA, 15 bp, Homo sapiens
tctacctttggtttt

SEQ ID NO: 667003 - DNA, 15 bp, Homo sapiens
ctacctttggttttt

SEQ ID NO: 667004 - DNA, 15 bp, Homo sapiens
tacctttggtttttg

SEQ ID NO: 667005 - DNA, 15 bp, Homo sapiens
acctttggtttttga

SEQ ID NO: 667006 - DNA, 15 bp, Homo sapiens
cctttggtttttgat

SEQ ID NO: 667007 - DNA, 15 bp, Homo sapiens
ctttggtttttgatg

SEQ ID NO: 667008 - DNA, 15 bp, Homo sapiens
tttggtttttgatga

SEQ ID NO: 667009 - DNA, 15 bp, Homo sapiens
ttggtttttgatgat

SEQ ID NO: 667010 - DNA, 15 bp, Homo sapiens
tggtttttgatgatg

SEQ ID NO: 667011 - DNA, 15 bp, Homo sapiens
ggtttttgatgatgg

SEQ ID NO: 667012 - DNA, 15 bp, Homo sapiens
gtttttgatgatggt

SEQ ID NO: 667013 - DNA, 15 bp, Homo sapiens
tttttgatgatggtg

SEQ ID NO: 667014 - DNA, 15 bp, Homo sapiens
ttttgatgatggtga

SEQ ID NO: 667015 - DNA, 15 bp, Homo sapiens
tttgatgatggtgac

SEQ ID NO: 667016 - DNA, 15 bp, Homo sapiens
ttgatgatggtgacg

SEQ ID NO: 667017 - DNA, 15 bp, Homo sapiens
tgatgatggtgacgt

SEQ ID NO: 667018 - DNA, 15 bp, Homo sapiens
gatgatggtgacgta

SEQ ID NO: 667019 - DNA, 15 bp, Homo sapiens
atgatggtgacgtac

SEQ ID NO: 667020 - DNA, 15 bp, Homo sapiens
tgatggtgacgtaca

SEQ ID NO: 667021 - DNA, 15 bp, Homo sapiens
gatggtgacgtacag

SEQ ID NO: 667022 - DNA, 15 bp, Homo sapiens
atggtgacgtacaga

SEQ ID NO: 667023 - DNA, 15 bp, Homo sapiens
tggtgacgtacagat

SEQ ID NO: 667024 - DNA, 15 bp, Homo sapiens
ggtgacgtacagatg

SEQ ID NO: 667025 - DNA, 15 bp, Homo sapiens
gtgacgtacagatgg

SEQ ID NO: 667026 - DNA, 15 bp, Homo sapiens
tgacgtacagatggg

SEQ ID NO: 667027 - DNA, 15 bp, Homo sapiens
gacgtacagatgggt

SEQ ID NO: 667028 - DNA, 15 bp, Homo sapiens
acgtacagatgggtt

SEQ ID NO: 667029 - DNA, 15 bp, Homo sapiens
cgtacagatgggttt

SEQ ID NO: 667030 - DNA, 15 bp, Homo sapiens
gtacagatgggtttt

SEQ ID NO: 667031 - DNA, 15 bp, Homo sapiens
tacagatgggttttg

SEQ ID NO: 667032 - DNA, 15 bp, Homo sapiens
acagatgggttttgg

SEQ ID NO: 667033 - DNA, 15 bp, Homo sapiens
cagatgggttttggc

SEQ ID NO: 667034 - DNA, 15 bp, Homo sapiens
agatgggttttggcg

SEQ ID NO: 667035 - DNA, 15 bp, Homo sapiens
gatgggttttggcgt

SEQ ID NO: 667036 - DNA, 15 bp, Homo sapiens
atgggttttggcgtg

SEQ ID NO: 667037 - DNA, 15 bp, Homo sapiens
tgggttttggcgtgg

SEQ ID NO: 667038 - DNA, 15 bp, Homo sapiens
gggttttggcgtgga

SEQ ID NO: 667039 - DNA, 15 bp, Homo sapiens
ggttttggcgtggat

SEQ ID NO: 667040 - DNA, 15 bp, Homo sapiens
gttttggcgtggatg

SEQ ID NO: 667041 - DNA, 15 bp, Homo sapiens
ttttggcgtggatgt

SEQ ID NO: 667042 - DNA, 15 bp, Homo sapiens
tttggcgtggatgtc

SEQ ID NO: 667043 - DNA, 15 bp, Homo sapiens
ttggcgtggatgtcc

SEQ ID NO: 667044 - DNA, 15 bp, Homo sapiens
tggcgtggatgtcct

SEQ ID NO: 667045 - DNA, 15 bp, Homo sapiens
ggcgtggatgtcctt

SEQ ID NO: 667046 - DNA, 15 bp, Homo sapiens
gcgtggatgtccttt

SEQ ID NO: 667047 - DNA, 15 bp, Homo sapiens
cgtggatgtcctttc

SEQ ID NO: 667048 - DNA, 15 bp, Homo sapiens
gtggatgtcctttct

SEQ ID NO: 667049 - DNA, 15 bp, Homo sapiens
tggatgtcctttctg

SEQ ID NO: 667050 - DNA, 15 bp, Homo sapiens
ggatgtcctttctgt

SEQ ID NO: 667051 - DNA, 15 bp, Homo sapiens
gatgtcctttctgtt

SEQ ID NO: 667052 - DNA, 15 bp, Homo sapiens
atgtcctttctgttt

SEQ ID NO: 667053 - DNA, 15 bp, Homo sapiens
tgtcctttctgtttg

SEQ ID NO: 667054 - DNA, 15 bp, Homo sapiens
gtcctttctgtttgt

SEQ ID NO: 667055 - DNA, 15 bp, Homo sapiens
tcctttctgtttgtt

SEQ ID NO: 667056 - DNA, 15 bp, Homo sapiens
cctttctgtttgtta

SEQ ID NO: 667057 - DNA, 15 bp, Homo sapiens
ctttctgtttgttag

SEQ ID NO: 667058 - DNA, 15 bp, Homo sapiens
tttctgtttgttagt

SEQ ID NO: 667059 - DNA, 15 bp, Homo sapiens
ttctgtttgttagtt

SEQ ID NO: 667060 - DNA, 15 bp, Homo sapiens
tctgtttgttagttt

SEQ ID NO: 667061 - DNA, 15 bp, Homo sapiens
ctgtttgttagtttt

SEQ ID NO: 667062 - DNA, 15 bp, Homo sapiens
tgtttgttagttttc

SEQ ID NO: 667063 - DNA, 15 bp, Homo sapiens
gtttgttagttttcc

SEQ ID NO: 667064 - DNA, 15 bp, Homo sapiens
tttgttagttttcct

SEQ ID NO: 667065 - DNA, 15 bp, Homo sapiens
ttgttagttttcctt

SEQ ID NO: 667066 - DNA, 15 bp, Homo sapiens
tgttagttttccttc

SEQ ID NO: 667067 - DNA, 15 bp, Homo sapiens
gttagttttccttct

SEQ ID NO: 667068 - DNA, 15 bp, Homo sapiens
ttagttttccttcta

SEQ ID NO: 667069 - DNA, 15 bp, Homo sapiens
tagttttccttctaa

SEQ ID NO: 667070 - DNA, 15 bp, Homo sapiens
agttttccttctaac

SEQ ID NO: 667071 - DNA, 15 bp, Homo sapiens
gttttccttctaaca

SEQ ID NO: 667072 - DNA, 15 bp, Homo sapiens
ttttccttctaacag

SEQ ID NO: 667073 - DNA, 15 bp, Homo sapiens
tttccttctaacagt

SEQ ID NO: 667074 - DNA, 15 bp, Homo sapiens
ttccttctaacagtc

SEQ ID NO: 667075 - DNA, 15 bp, Homo sapiens
tccttctaacagtca

SEQ ID NO: 667076 - DNA, 15 bp, Homo sapiens
ccttctaacagtcag

SEQ ID NO: 667077 - DNA, 15 bp, Homo sapiens
cttctaacagtcagg

SEQ ID NO: 667078 - DNA, 15 bp, Homo sapiens
ttctaacagtcagga

SEQ ID NO: 667079 - DNA, 15 bp, Homo sapiens
tctaacagtcaggac

SEQ ID NO: 667080 - DNA, 15 bp, Homo sapiens
ctaacagtcaggacc

SEQ ID NO: 667081 - DNA, 15 bp, Homo sapiens
taacagtcaggaccc

SEQ ID NO: 667082 - DNA, 15 bp, Homo sapiens
aacagtcaggaccct

SEQ ID NO: 667083 - DNA, 15 bp, Homo sapiens
acagtcaggaccctc

SEQ ID NO: 667084 - DNA, 15 bp, Homo sapiens
cagtcaggaccctca

SEQ ID NO: 667085 - DNA, 15 bp, Homo sapiens
agtcaggaccctcag

SEQ ID NO: 667086 - DNA, 15 bp, Homo sapiens
gtcaggaccctcagc

SEQ ID NO: 667087 - DNA, 15 bp, Homo sapiens
tcaggaccctcagcc

SEQ ID NO: 667088 - DNA, 15 bp, Homo sapiens
caggaccctcagccg

SEQ ID NO: 667089 - DNA, 15 bp, Homo sapiens
aggaccctcagccgc

SEQ ID NO: 667090 - DNA, 15 bp, Homo sapiens
ggaccctcagccgca

SEQ ID NO: 667091 - DNA, 15 bp, Homo sapiens
gaccctcagccgcag

SEQ ID NO: 667092 - DNA, 15 bp, Homo sapiens
accctcagccgcagg

SEQ ID NO: 667093 - DNA, 15 bp, Homo sapiens
ccctcagccgcaggt

SEQ ID NO: 667094 - DNA, 15 bp, Homo sapiens
cctcagccgcaggtc

SEQ ID NO: 667095 - DNA, 15 bp, Homo sapiens
ctcagccgcaggtct

SEQ ID NO: 667096 - DNA, 15 bp, Homo sapiens
tcagccgcaggtctg

SEQ ID NO: 667097 - DNA, 15 bp, Homo sapiens
cagccgcaggtctgt

SEQ ID NO: 667098 - DNA, 15 bp, Homo sapiens
agccgcaggtctgtt

SEQ ID NO: 667099 - DNA, 15 bp, Homo sapiens
gccgcaggtctgttg

SEQ ID NO: 667100 - DNA, 15 bp, Homo sapiens
ccgcaggtctgttgg

SEQ ID NO: 667101 - DNA, 15 bp, Homo sapiens
cgcaggtctgttgga

SEQ ID NO: 667102 - DNA, 15 bp, Homo sapiens
gcaggtctgttggag

SEQ ID NO: 667103 - DNA, 15 bp, Homo sapiens
caggtctgttggagt

SEQ ID NO: 667104 - DNA, 15 bp, Homo sapiens
aggtctgttggagtt

SEQ ID NO: 667105 - DNA, 15 bp, Homo sapiens
ggtctgttggagttt

SEQ ID NO: 667106 - DNA, 15 bp, Homo sapiens
gtctgttggagtttg

SEQ ID NO: 667107 - DNA, 15 bp, Homo sapiens
tctgttggagtttgc

SEQ ID NO: 667108 - DNA, 15 bp, Homo sapiens
ctgttggagtttgct

SEQ ID NO: 667109 - DNA, 15 bp, Homo sapiens
tgttggagtttgctg

SEQ ID NO: 667110 - DNA, 15 bp, Homo sapiens
gttggagtttgctgg

SEQ ID NO: 667111 - DNA, 15 bp, Homo sapiens
ttggagtttgctgga

SEQ ID NO: 667112 - DNA, 15 bp, Homo sapiens
tggagtttgctggag

SEQ ID NO: 667113 - DNA, 15 bp, Homo sapiens
ggagtttgctggagg

SEQ ID NO: 667114 - DNA, 15 bp, Homo sapiens
gagtttgctggaggt

SEQ ID NO: 667115 - DNA, 15 bp, Homo sapiens
agtttgctggaggtc

SEQ ID NO: 667116 - DNA, 15 bp, Homo sapiens
gtttgctggaggtcc

SEQ ID NO: 667117 - DNA, 15 bp, Homo sapiens
tttgctggaggtcca

SEQ ID NO: 667118 - DNA, 15 bp, Homo sapiens
ttgctggaggtccac

SEQ ID NO: 667119 - DNA, 15 bp, Homo sapiens
tgctggaggtccact

SEQ ID NO: 667120 - DNA, 15 bp, Homo sapiens
gctggaggtccactc

SEQ ID NO: 667121 - DNA, 15 bp, Homo sapiens
ctggaggtccactcc

SEQ ID NO: 667122 - DNA, 15 bp, Homo sapiens
tggaggtccactcca

SEQ ID NO: 667123 - DNA, 15 bp, Homo sapiens
ggaggtccactccag

SEQ ID NO: 667124 - DNA, 15 bp, Homo sapiens
gaggtccactccaga

SEQ ID NO: 667125 - DNA, 15 bp, Homo sapiens
aggtccactccagac

SEQ ID NO: 667126 - DNA, 15 bp, Homo sapiens
ggtccactccagacc

SEQ ID NO: 667127 - DNA, 15 bp, Homo sapiens
gtccactccagaccc

SEQ ID NO: 667128 - DNA, 15 bp, Homo sapiens
tccactccagaccct

SEQ ID NO: 667129 - DNA, 15 bp, Homo sapiens
ccactccagaccctg

SEQ ID NO: 667130 - DNA, 15 bp, Homo sapiens
cactccagaccctgt

SEQ ID NO: 667131 - DNA, 15 bp, Homo sapiens
actccagaccctgtt

SEQ ID NO: 667132 - DNA, 15 bp, Homo sapiens
ctccagaccctgttt

SEQ ID NO: 667133 - DNA, 15 bp, Homo sapiens
tccagaccctgtttt

SEQ ID NO: 667134 - DNA, 15 bp, Homo sapiens
ccagaccctgttttc

SEQ ID NO: 667135 - DNA, 15 bp, Homo sapiens
cagaccctgttttcc

SEQ ID NO: 667136 - DNA, 15 bp, Homo sapiens
agaccctgttttcct

SEQ ID NO: 667137 - DNA, 15 bp, Homo sapiens
gaccctgttttcctg

SEQ ID NO: 667138 - DNA, 15 bp, Homo sapiens
accctgttttcctgg

SEQ ID NO: 667139 - DNA, 15 bp, Homo sapiens
ccctgttttcctggg

SEQ ID NO: 667140 - DNA, 15 bp, Homo sapiens
cctgttttcctgggt

SEQ ID NO: 667141 - DNA, 15 bp, Homo sapiens
ctgttttcctgggta

SEQ ID NO: 667142 - DNA, 15 bp, Homo sapiens
tgttttcctgggtat

SEQ ID NO: 667143 - DNA, 15 bp, Homo sapiens
gttttcctgggtatc

SEQ ID NO: 667144 - DNA, 15 bp, Homo sapiens
ttttcctgggtatca

SEQ ID NO: 667145 - DNA, 15 bp, Homo sapiens
tttcctgggtatcag

SEQ ID NO: 667146 - DNA, 15 bp, Homo sapiens
ttcctgggtatcagc

SEQ ID NO: 667147 - DNA, 15 bp, Homo sapiens
tcctgggtatcagca

SEQ ID NO: 667148 - DNA, 15 bp, Homo sapiens
cctgggtatcagcag

SEQ ID NO: 667149 - DNA, 15 bp, Homo sapiens
ctgggtatcagcagc

SEQ ID NO: 667150 - DNA, 15 bp, Homo sapiens
tgggtatcagcagcg

SEQ ID NO: 667151 - DNA, 15 bp, Homo sapiens
gggtatcagcagcgg

SEQ ID NO: 667152 - DNA, 15 bp, Homo sapiens
ggtatcagcagcgga

SEQ ID NO: 667153 - DNA, 15 bp, Homo sapiens
gtatcagcagcggag

SEQ ID NO: 667154 - DNA, 15 bp, Homo sapiens
tatcagcagcggagg

SEQ ID NO: 667155 - DNA, 15 bp, Homo sapiens
atcagcagcggaggc

SEQ ID NO: 667156 - DNA, 15 bp, Homo sapiens
tcagcagcggaggct

SEQ ID NO: 667157 - DNA, 15 bp, Homo sapiens
cagcagcggaggctg

SEQ ID NO: 667158 - DNA, 15 bp, Homo sapiens
agcagcggaggctgc

SEQ ID NO: 667159 - DNA, 15 bp, Homo sapiens
gcagcggaggctgca

SEQ ID NO: 667160 - DNA, 15 bp, Homo sapiens
cagcggaggctgcag

SEQ ID NO: 667161 - DNA, 15 bp, Homo sapiens
agcggaggctgcaga

SEQ ID NO: 667162 - DNA, 15 bp, Homo sapiens
gcggaggctgcagaa

SEQ ID NO: 667163 - DNA, 15 bp, Homo sapiens
cggaggctgcagaac

SEQ ID NO: 667164 - DNA, 15 bp, Homo sapiens
ggaggctgcagaaca

SEQ ID NO: 667165 - DNA, 15 bp, Homo sapiens
gaggctgcagaacag

SEQ ID NO: 667166 - DNA, 15 bp, Homo sapiens
aggctgcagaacagc

SEQ ID NO: 667167 - DNA, 15 bp, Homo sapiens
ggctgcagaacagcg

SEQ ID NO: 667168 - DNA, 15 bp, Homo sapiens
gctgcagaacagcga

SEQ ID NO: 667169 - DNA, 15 bp, Homo sapiens
ctgcagaacagcgaa

SEQ ID NO: 667170 - DNA, 15 bp, Homo sapiens
tgcagaacagcgaat

SEQ ID NO: 667171 - DNA, 15 bp, Homo sapiens
gcagaacagcgaata

SEQ ID NO: 667172 - DNA, 15 bp, Homo sapiens
cagaacagcgaatat

SEQ ID NO: 667173 - DNA, 15 bp, Homo sapiens
agaacagcgaatatt

SEQ ID NO: 667174 - DNA, 15 bp, Homo sapiens
gaacagcgaatattg

SEQ ID NO: 667175 - DNA, 15 bp, Homo sapiens
aacagcgaatattga

SEQ ID NO: 667176 - DNA, 15 bp, Homo sapiens
acagcgaatattgat

SEQ ID NO: 667177 - DNA, 15 bp, Homo sapiens
cagcgaatattgatg

SEQ ID NO: 667178 - DNA, 15 bp, Homo sapiens
agcgaatattgatga

SEQ ID NO: 667179 - DNA, 15 bp, Homo sapiens
gcgaatattgatgaa

SEQ ID NO: 667180 - DNA, 15 bp, Homo sapiens
cgaatattgatgaac

SEQ ID NO: 667181 - DNA, 15 bp, Homo sapiens
gaatattgatgaaca

SEQ ID NO: 667182 - DNA, 15 bp, Homo sapiens
aatattgatgaacag

SEQ ID NO: 667183 - DNA, 15 bp, Homo sapiens
atattgatgaacagc

SEQ ID NO: 667184 - DNA, 15 bp, Homo sapiens
tattgatgaacagcg

SEQ ID NO: 667185 - DNA, 15 bp, Homo sapiens
attgatgaacagcga

SEQ ID NO: 667186 - DNA, 15 bp, Homo sapiens
ttgatgaacagcgaa

SEQ ID NO: 667187 - DNA, 15 bp, Homo sapiens
tgatgaacagcgaat

SEQ ID NO: 667188 - DNA, 15 bp, Homo sapiens
gatgaacagcgaatg

SEQ ID NO: 667189 - DNA, 15 bp, Homo sapiens
atgaacagcgaatgt

SEQ ID NO: 667190 - DNA, 15 bp, Homo sapiens
tgaacagcgaatgtt

SEQ ID NO: 667191 - DNA, 15 bp, Homo sapiens
gaacagcgaatgttg

SEQ ID NO: 667192 - DNA, 15 bp, Homo sapiens
aacagcgaatgttgc

SEQ ID NO: 667193 - DNA, 15 bp, Homo sapiens
acagcgaatgttgct

SEQ ID NO: 667194 - DNA, 15 bp, Homo sapiens
cagcgaatgttgctg

SEQ ID NO: 667195 - DNA, 15 bp, Homo sapiens
agcgaatgttgctgc

SEQ ID NO: 667196 - DNA, 15 bp, Homo sapiens
gcgaatgttgctgcc

SEQ ID NO: 667197 - DNA, 15 bp, Homo sapiens
cgaatgttgctgcct

SEQ ID NO: 667198 - DNA, 15 bp, Homo sapiens
gaatgttgctgcctg

SEQ ID NO: 667199 - DNA, 15 bp, Homo sapiens
aatgttgctgcctga

SEQ ID NO: 667200 - DNA, 15 bp, Homo sapiens
atgttgctgcctgat

SEQ ID NO: 667201 - DNA, 15 bp, Homo sapiens
tgttgctgcctgatt

SEQ ID NO: 667202 - DNA, 15 bp, Homo sapiens
gttgctgcctgattg

SEQ ID NO: 667203 - DNA, 15 bp, Homo sapiens
ttgctgcctgattgt

SEQ ID NO: 667204 - DNA, 15 bp, Homo sapiens
tgctgcctgattgtt

SEQ ID NO: 667205 - DNA, 15 bp, Homo sapiens
gctgcctgattgttc

SEQ ID NO: 667206 - DNA, 15 bp, Homo sapiens
ctgcctgattgttcc

SEQ ID NO: 667207 - DNA, 15 bp, Homo sapiens
tgcctgattgttcct

SEQ ID NO: 667208 - DNA, 15 bp, Homo sapiens
gcctgattgttcctc

SEQ ID NO: 667209 - DNA, 15 bp, Homo sapiens
cctgattgttcctct

SEQ ID NO: 667210 - DNA, 15 bp, Homo sapiens
ctgattgttcctctg

SEQ ID NO: 667211 - DNA, 15 bp, Homo sapiens
tgattgttcctctgg

SEQ ID NO: 667212 - DNA, 15 bp, Homo sapiens
gattgttcctctgga

SEQ ID NO: 667213 - DNA, 15 bp, Homo sapiens
attgttcctctggaa

SEQ ID NO: 667214 - DNA, 15 bp, Homo sapiens
ttgttcctctggaag

SEQ ID NO: 667215 - DNA, 15 bp, Homo sapiens
tgttcctctggaagt

SEQ ID NO: 667216 - DNA, 15 bp, Homo sapiens
gttcctctggaagtt

SEQ ID NO: 667217 - DNA, 15 bp, Homo sapiens
ttcctctggaagttt

SEQ ID NO: 667218 - DNA, 15 bp, Homo sapiens
tcctctggaagtttc

SEQ ID NO: 667219 - DNA, 15 bp, Homo sapiens
cctctggaagtttcg

SEQ ID NO: 667220 - DNA, 15 bp, Homo sapiens
ctctggaagtttcgt

SEQ ID NO: 667221 - DNA, 15 bp, Homo sapiens
tctggaagtttcgtc

SEQ ID NO: 667222 - DNA, 15 bp, Homo sapiens
ctggaagtttcgtct

SEQ ID NO: 667223 - DNA, 15 bp, Homo sapiens
tggaagtttcgtctc

SEQ ID NO: 667224 - DNA, 15 bp, Homo sapiens
ggaagtttcgtctca

SEQ ID NO: 667225 - DNA, 15 bp, Homo sapiens
gaagtttcgtctcag

SEQ ID NO: 667226 - DNA, 15 bp, Homo sapiens
aagtttcgtctcaga

SEQ ID NO: 667227 - DNA, 15 bp, Homo sapiens
agtttcgtctcagag

SEQ ID NO: 667228 - DNA, 15 bp, Homo sapiens
gtttcgtctcagagg

SEQ ID NO: 667229 - DNA, 15 bp, Homo sapiens
tttcgtctcagaggg

SEQ ID NO: 667230 - DNA, 15 bp, Homo sapiens
ttcgtctcagagggc

SEQ ID NO: 667231 - DNA, 15 bp, Homo sapiens
tcgtctcagagggct

SEQ ID NO: 667232 - DNA, 15 bp, Homo sapiens
cgtctcagagggctg

SEQ ID NO: 667233 - DNA, 15 bp, Homo sapiens
gtctcagagggctgc

SEQ ID NO: 667234 - DNA, 15 bp, Homo sapiens
tctcagagggctgcc

SEQ ID NO: 667235 - DNA, 15 bp, Homo sapiens
ctcagagggctgccc

SEQ ID NO: 667236 - DNA, 15 bp, Homo sapiens
tcagagggctgcccg

SEQ ID NO: 667237 - DNA, 15 bp, Homo sapiens
cagagggctgcccgg

SEQ ID NO: 667238 - DNA, 15 bp, Homo sapiens
agagggctgcccggc

SEQ ID NO: 667239 - DNA, 15 bp, Homo sapiens
gagggctgcccggcc

SEQ ID NO: 667240 - DNA, 15 bp, Homo sapiens
agggctgcccggcca

SEQ ID NO: 667241 - DNA, 15 bp, Homo sapiens
gggctgcccggccat

SEQ ID NO: 667242 - DNA, 15 bp, Homo sapiens
ggctgcccggccatg

SEQ ID NO: 667243 - DNA, 15 bp, Homo sapiens
gctgcccggccatgt

SEQ ID NO: 667244 - DNA, 15 bp, Homo sapiens
ctgcccggccatgtg

SEQ ID NO: 667245 - DNA, 15 bp, Homo sapiens
tgcccggccatgtga

SEQ ID NO: 667246 - DNA, 15 bp, Homo sapiens
gcccggccatgtgag

SEQ ID NO: 667247 - DNA, 15 bp, Homo sapiens
cccggccatgtgagg

SEQ ID NO: 667248 - DNA, 15 bp, Homo sapiens
ccggccatgtgaggt

SEQ ID NO: 667249 - DNA, 15 bp, Homo sapiens
cggccatgtgaggtg

SEQ ID NO: 667250 - DNA, 15 bp, Homo sapiens
ggccatgtgaggtgt

SEQ ID NO: 667251 - DNA, 15 bp, Homo sapiens
gccatgtgaggtgtc

SEQ ID NO: 667252 - DNA, 15 bp, Homo sapiens
ccatgtgaggtgtca

SEQ ID NO: 667253 - DNA, 15 bp, Homo sapiens
catgtgaggtgtcag

SEQ ID NO: 667254 - DNA, 15 bp, Homo sapiens
atgtgaggtgtcagt

SEQ ID NO: 667255 - DNA, 15 bp, Homo sapiens
tgtgaggtgtcagtc

SEQ ID NO: 667256 - DNA, 15 bp, Homo sapiens
gtgaggtgtcagtct

SEQ ID NO: 667257 - DNA, 15 bp, Homo sapiens
tgaggtgtcagtctg

SEQ ID NO: 667258 - DNA, 15 bp, Homo sapiens
gaggtgtcagtctgc

SEQ ID NO: 667259 - DNA, 15 bp, Homo sapiens
aggtgtcagtctgcc

SEQ ID NO: 667260 - DNA, 15 bp, Homo sapiens
ggtgtcagtctgccc

SEQ ID NO: 667261 - DNA, 15 bp, Homo sapiens
gtgtcagtctgcccc

SEQ ID NO: 667262 - DNA, 15 bp, Homo sapiens
tgtcagtctgcccct

SEQ ID NO: 667263 - DNA, 15 bp, Homo sapiens
gtcagtctgccccta

SEQ ID NO: 667264 - DNA, 15 bp, Homo sapiens
tcagtctgcccctac

SEQ ID NO: 667265 - DNA, 15 bp, Homo sapiens
cagtctgcccctact

SEQ ID NO: 667266 - DNA, 15 bp, Homo sapiens
agtctgcccctactg

SEQ ID NO: 667267 - DNA, 15 bp, Homo sapiens
gtctgcccctactgg

SEQ ID NO: 667268 - DNA, 15 bp, Homo sapiens
tctgcccctactggg

SEQ ID NO: 667269 - DNA, 15 bp, Homo sapiens
ctgcccctactgggt

SEQ ID NO: 667270 - DNA, 15 bp, Homo sapiens
tgcccctactgggtg

SEQ ID NO: 667271 - DNA, 15 bp, Homo sapiens
gcccctactgggtgg

SEQ ID NO: 667272 - DNA, 15 bp, Homo sapiens
cccctactgggtggt

SEQ ID NO: 667273 - DNA, 15 bp, Homo sapiens
ccctactgggtggtg

SEQ ID NO: 667274 - DNA, 15 bp, Homo sapiens
cctactgggtggtgc

SEQ ID NO: 667275 - DNA, 15 bp, Homo sapiens
ctactgggtggtgcc

SEQ ID NO: 667276 - DNA, 15 bp, Homo sapiens
tactgggtggtgcct

SEQ ID NO: 667277 - DNA, 15 bp, Homo sapiens
actgggtggtgcctc

SEQ ID NO: 667278 - DNA, 15 bp, Homo sapiens
ctgggtggtgcctcc

SEQ ID NO: 667279 - DNA, 15 bp, Homo sapiens
tgggtggtgcctccc

SEQ ID NO: 667280 - DNA, 15 bp, Homo sapiens
gggtggtgcctccca

SEQ ID NO: 667281 - DNA, 15 bp, Homo sapiens
ggtggtgcctcccag

SEQ ID NO: 667282 - DNA, 15 bp, Homo sapiens
gtggtgcctcccagt

SEQ ID NO: 667283 - DNA, 15 bp, Homo sapiens
tggtgcctcccagtt

SEQ ID NO: 667284 - DNA, 15 bp, Homo sapiens
ggtgcctcccagtta

SEQ ID NO: 667285 - DNA, 15 bp, Homo sapiens
gtgcctcccagttag

SEQ ID NO: 667286 - DNA, 15 bp, Homo sapiens
tgcctcccagttagg

SEQ ID NO: 667287 - DNA, 15 bp, Homo sapiens
gcctcccagttaggc

SEQ ID NO: 667288 - DNA, 15 bp, Homo sapiens
cctcccagttaggct

SEQ ID NO: 667289 - DNA, 15 bp, Homo sapiens
ctcccagttaggcta

SEQ ID NO: 667290 - DNA, 15 bp, Homo sapiens
tcccagttaggctac

SEQ ID NO: 667291 - DNA, 15 bp, Homo sapiens
cccagttaggctact

SEQ ID NO: 667292 - DNA, 15 bp, Homo sapiens
ccagttaggctactc

SEQ ID NO: 667293 - DNA, 15 bp, Homo sapiens
cagttaggctactcg

SEQ ID NO: 667294 - DNA, 15 bp, Homo sapiens
agttaggctactcgg

SEQ ID NO: 667295 - DNA, 15 bp, Homo sapiens
gttaggctactcggg

SEQ ID NO: 667296 - DNA, 15 bp, Homo sapiens
ttaggctactcgggg

SEQ ID NO: 667297 - DNA, 15 bp, Homo sapiens
taggctactcggggg

SEQ ID NO: 667298 - DNA, 15 bp, Homo sapiens
aggctactcgggggt

SEQ ID NO: 667299 - DNA, 15 bp, Homo sapiens
ggctactcgggggtc

SEQ ID NO: 667300 - DNA, 15 bp, Homo sapiens
gctactcgggggtca

SEQ ID NO: 667301 - DNA, 15 bp, Homo sapiens
ctactcgggggtcag

SEQ ID NO: 667302 - DNA, 15 bp, Homo sapiens
tactcgggggtcagg

SEQ ID NO: 667303 - DNA, 15 bp, Homo sapiens
actcgggggtcaggg

SEQ ID NO: 667304 - DNA, 15 bp, Homo sapiens
ctcgggggtcaggga

SEQ ID NO: 667305 - DNA, 15 bp, Homo sapiens
tcgggggtcagggac

SEQ ID NO: 667306 - DNA, 15 bp, Homo sapiens
cgggggtcagggacc

SEQ ID NO: 667307 - DNA, 15 bp, Homo sapiens
gggggtcagggaccc

SEQ ID NO: 667308 - DNA, 15 bp, Homo sapiens
ggggtcagggaccca

SEQ ID NO: 667309 - DNA, 15 bp, Homo sapiens
gggtcagggacccac

SEQ ID NO: 667310 - DNA, 15 bp, Homo sapiens
ggtcagggacccact

SEQ ID NO: 667311 - DNA, 15 bp, Homo sapiens
gtcagggacccactt

SEQ ID NO: 667312 - DNA, 15 bp, Homo sapiens
tcagggacccacttg

SEQ ID NO: 667313 - DNA, 15 bp, Homo sapiens
cagggacccacttga

SEQ ID NO: 667314 - DNA, 15 bp, Homo sapiens
agggacccacttgag

SEQ ID NO: 667315 - DNA, 15 bp, Homo sapiens
gggacccacttgaga

SEQ ID NO: 667316 - DNA, 15 bp, Homo sapiens
ggacccacttgagaa

SEQ ID NO: 667317 - DNA, 15 bp, Homo sapiens
gacccacttgagaag

SEQ ID NO: 667318 - DNA, 15 bp, Homo sapiens
acccacttgagaagg

SEQ ID NO: 667319 - DNA, 15 bp, Homo sapiens
cccacttgagaaggc

SEQ ID NO: 667320 - DNA, 15 bp, Homo sapiens
ccacttgagaaggca

SEQ ID NO: 667321 - DNA, 15 bp, Homo sapiens
cacttgagaaggcag

SEQ ID NO: 667322 - DNA, 15 bp, Homo sapiens
acttgagaaggcagt

SEQ ID NO: 667323 - DNA, 15 bp, Homo sapiens
cttgagaaggcagtc

SEQ ID NO: 667324 - DNA, 15 bp, Homo sapiens
ttgagaaggcagtct

SEQ ID NO: 667325 - DNA, 15 bp, Homo sapiens
tgagaaggcagtctg

SEQ ID NO: 667326 - DNA, 15 bp, Homo sapiens
gagaaggcagtctgt

SEQ ID NO: 667327 - DNA, 15 bp, Homo sapiens
agaaggcagtctgtc

SEQ ID NO: 667328 - DNA, 15 bp, Homo sapiens
gaaggcagtctgtcc

SEQ ID NO: 667329 - DNA, 15 bp, Homo sapiens
aaggcagtctgtcca

SEQ ID NO: 667330 - DNA, 15 bp, Homo sapiens
aggcagtctgtccat

SEQ ID NO: 667331 - DNA, 15 bp, Homo sapiens
ggcagtctgtccatt

SEQ ID NO: 667332 - DNA, 15 bp, Homo sapiens
gcagtctgtccattc

SEQ ID NO: 667333 - DNA, 15 bp, Homo sapiens
cagtctgtccattct

SEQ ID NO: 667334 - DNA, 15 bp, Homo sapiens
agtctgtccattctc

SEQ ID NO: 667335 - DNA, 15 bp, Homo sapiens
gtctgtccattctca

SEQ ID NO: 667336 - DNA, 15 bp, Homo sapiens
tctgtccattctcag

SEQ ID NO: 667337 - DNA, 15 bp, Homo sapiens
ctgtccattctcaga

SEQ ID NO: 667338 - DNA, 15 bp, Homo sapiens
tgtccattctcagat

SEQ ID NO: 667339 - DNA, 15 bp, Homo sapiens
gtccattctcagatc

SEQ ID NO: 667340 - DNA, 15 bp, Homo sapiens
tccattctcagatct

SEQ ID NO: 667341 - DNA, 15 bp, Homo sapiens
ccattctcagatctc

SEQ ID NO: 667342 - DNA, 15 bp, Homo sapiens
cattctcagatctca

SEQ ID NO: 667343 - DNA, 15 bp, Homo sapiens
attctcagatctcaa

SEQ ID NO: 667344 - DNA, 15 bp, Homo sapiens
ttctcagatctcaaa

SEQ ID NO: 667345 - DNA, 15 bp, Homo sapiens
tctcagatctcaaat

SEQ ID NO: 667346 - DNA, 15 bp, Homo sapiens
ctcagatctcaaatg

SEQ ID NO: 667347 - DNA, 15 bp, Homo sapiens
tcagatctcaaatgc

SEQ ID NO: 667348 - DNA, 15 bp, Homo sapiens
cagatctcaaatgct

SEQ ID NO: 667349 - DNA, 15 bp, Homo sapiens
agatctcaaatgctg

SEQ ID NO: 667350 - DNA, 15 bp, Homo sapiens
gatctcaaatgctgt

SEQ ID NO: 667351 - DNA, 15 bp, Homo sapiens
atctcaaatgctgtg

SEQ ID NO: 667352 - DNA, 15 bp, Homo sapiens
tctcaaatgctgtgc

SEQ ID NO: 667353 - DNA, 15 bp, Homo sapiens
ctcaaatgctgtgct

SEQ ID NO: 667354 - DNA, 15 bp, Homo sapiens
tcaaatgctgtgctg

SEQ ID NO: 667355 - DNA, 15 bp, Homo sapiens
caaatgctgtgctgg

SEQ ID NO: 667356 - DNA, 15 bp, Homo sapiens
aaatgctgtgctggg

SEQ ID NO: 667357 - DNA, 15 bp, Homo sapiens
aatgctgtgctggga

SEQ ID NO: 667358 - DNA, 15 bp, Homo sapiens
atgctgtgctgggag

SEQ ID NO: 667359 - DNA, 15 bp, Homo sapiens
tgctgtgctgggaga

SEQ ID NO: 667360 - DNA, 15 bp, Homo sapiens
gctgtgctgggagaa

SEQ ID NO: 667361 - DNA, 15 bp, Homo sapiens
ctgtgctgggagaac

SEQ ID NO: 667362 - DNA, 15 bp, Homo sapiens
tgtgctgggagaacc

SEQ ID NO: 667363 - DNA, 15 bp, Homo sapiens
gtgctgggagaacca

SEQ ID NO: 667364 - DNA, 15 bp, Homo sapiens
tgctgggagaaccac

SEQ ID NO: 667365 - DNA, 15 bp, Homo sapiens
gctgggagaaccact

SEQ ID NO: 667366 - DNA, 15 bp, Homo sapiens
ctgggagaaccacta

SEQ ID NO: 667367 - DNA, 15 bp, Homo sapiens
tgggagaaccactac

SEQ ID NO: 667368 - DNA, 15 bp, Homo sapiens
gggagaaccactact

SEQ ID NO: 667369 - DNA, 15 bp, Homo sapiens
ggagaaccactactc

SEQ ID NO: 667370 - DNA, 15 bp, Homo sapiens
gagaaccactactct

SEQ ID NO: 667371 - DNA, 15 bp, Homo sapiens
agaaccactactctc

SEQ ID NO: 667372 - DNA, 15 bp, Homo sapiens
gaaccactactctct

SEQ ID NO: 667373 - DNA, 15 bp, Homo sapiens
aaccactactctctt

SEQ ID NO: 667374 - DNA, 15 bp, Homo sapiens
accactactctcttg

SEQ ID NO: 667375 - DNA, 15 bp, Homo sapiens
ccactactctcttga

SEQ ID NO: 667376 - DNA, 15 bp, Homo sapiens
cactactctcttgaa

SEQ ID NO: 667377 - DNA, 15 bp, Homo sapiens
actactctcttgaaa

SEQ ID NO: 667378 - DNA, 15 bp, Homo sapiens
ctactctcttgaaac

SEQ ID NO: 667379 - DNA, 15 bp, Homo sapiens
tactctcttgaaacc

SEQ ID NO: 667380 - DNA, 15 bp, Homo sapiens
actctcttgaaacct

SEQ ID NO: 667381 - DNA, 15 bp, Homo sapiens
ctctcttgaaacctg

SEQ ID NO: 667382 - DNA, 15 bp, Homo sapiens
tctcttgaaacctgt

SEQ ID NO: 667383 - DNA, 15 bp, Homo sapiens
ctcttgaaacctgtc

SEQ ID NO: 667384 - DNA, 15 bp, Homo sapiens
tcttgaaacctgtca

SEQ ID NO: 667385 - DNA, 15 bp, Homo sapiens
cttgaaacctgtcag

SEQ ID NO: 667386 - DNA, 15 bp, Homo sapiens
ttgaaacctgtcaga

SEQ ID NO: 667387 - DNA, 15 bp, Homo sapiens
tgaaacctgtcagac

SEQ ID NO: 667388 - DNA, 15 bp, Homo sapiens
gaaacctgtcagaca

SEQ ID NO: 667389 - DNA, 15 bp, Homo sapiens
aaacctgtcagacag

SEQ ID NO: 667390 - DNA, 15 bp, Homo sapiens
aacctgtcagacagg

SEQ ID NO: 667391 - DNA, 15 bp, Homo sapiens
acctgtcagacaggg

SEQ ID NO: 667392 - DNA, 15 bp, Homo sapiens
cctgtcagacaggga

SEQ ID NO: 667393 - DNA, 15 bp, Homo sapiens
ctgtcagacagggac

SEQ ID NO: 667394 - DNA, 15 bp, Homo sapiens
tgtcagacagggaca

SEQ ID NO: 667395 - DNA, 15 bp, Homo sapiens
gtcagacagggacat

SEQ ID NO: 667396 - DNA, 15 bp, Homo sapiens
tcagacagggacatt

SEQ ID NO: 667397 - DNA, 15 bp, Homo sapiens
cagacagggacattt

SEQ ID NO: 667398 - DNA, 15 bp, Homo sapiens
agacagggacattta

SEQ ID NO: 667399 - DNA, 15 bp, Homo sapiens
gacagggacatttaa

SEQ ID NO: 667400 - DNA, 15 bp, Homo sapiens
acagggacatttaag

SEQ ID NO: 667401 - DNA, 15 bp, Homo sapiens
cagggacatttaagt

SEQ ID NO: 667402 - DNA, 15 bp, Homo sapiens
agggacatttaagtc

SEQ ID NO: 667403 - DNA, 15 bp, Homo sapiens
gggacatttaagtct

SEQ ID NO: 667404 - DNA, 15 bp, Homo sapiens
ggacatttaagtctg

SEQ ID NO: 667405 - DNA, 15 bp, Homo sapiens
gacatttaagtctgc

SEQ ID NO: 667406 - DNA, 15 bp, Homo sapiens
acatttaagtctgca

SEQ ID NO: 667407 - DNA, 15 bp, Homo sapiens
catttaagtctgcag

SEQ ID NO: 667408 - DNA, 15 bp, Homo sapiens
atttaagtctgcaga

SEQ ID NO: 667409 - DNA, 15 bp, Homo sapiens
tttaagtctgcagag

SEQ ID NO: 667410 - DNA, 15 bp, Homo sapiens
ttaagtctgcagagg

SEQ ID NO: 667411 - DNA, 15 bp, Homo sapiens
taagtctgcagaggt

SEQ ID NO: 667412 - DNA, 15 bp, Homo sapiens
aagtctgcagaggtt

SEQ ID NO: 667413 - DNA, 15 bp, Homo sapiens
agtctgcagaggttt

SEQ ID NO: 667414 - DNA, 15 bp, Homo sapiens
gtctgcagaggtttc

SEQ ID NO: 667415 - DNA, 15 bp, Homo sapiens
tctgcagaggtttct

SEQ ID NO: 667416 - DNA, 15 bp, Homo sapiens
ctgcagaggtttctg

SEQ ID NO: 667417 - DNA, 15 bp, Homo sapiens
tgcagaggtttctgc

SEQ ID NO: 667418 - DNA, 15 bp, Homo sapiens
gcagaggtttctgct

SEQ ID NO: 667419 - DNA, 15 bp, Homo sapiens
cagaggtttctgctg

SEQ ID NO: 667420 - DNA, 15 bp, Homo sapiens
agaggtttctgctgc

SEQ ID NO: 667421 - DNA, 15 bp, Homo sapiens
gaggtttctgctgcc

SEQ ID NO: 667422 - DNA, 15 bp, Homo sapiens
aggtttctgctgcct

SEQ ID NO: 667423 - DNA, 15 bp, Homo sapiens
ggtttctgctgcctt

SEQ ID NO: 667424 - DNA, 15 bp, Homo sapiens
gtttctgctgccttt

SEQ ID NO: 667425 - DNA, 15 bp, Homo sapiens
tttctgctgcctttt

SEQ ID NO: 667426 - DNA, 15 bp, Homo sapiens
ttctgctgccttttg

SEQ ID NO: 667427 - DNA, 15 bp, Homo sapiens
tctgctgccttttgt

SEQ ID NO: 667428 - DNA, 15 bp, Homo sapiens
ctgctgccttttgtt

SEQ ID NO: 667429 - DNA, 15 bp, Homo sapiens
tgctgccttttgttc

SEQ ID NO: 667430 - DNA, 15 bp, Homo sapiens
gctgccttttgttca

SEQ ID NO: 667431 - DNA, 15 bp, Homo sapiens
ctgccttttgttcag

SEQ ID NO: 667432 - DNA, 15 bp, Homo sapiens
tgccttttgttcagc

SEQ ID NO: 667433 - DNA, 15 bp, Homo sapiens
gccttttgttcagct

SEQ ID NO: 667434 - DNA, 15 bp, Homo sapiens
ccttttgttcagcta

SEQ ID NO: 667435 - DNA, 15 bp, Homo sapiens
cttttgttcagctat

SEQ ID NO: 667436 - DNA, 15 bp, Homo sapiens
ttttgttcagctatg

SEQ ID NO: 667437 - DNA, 15 bp, Homo sapiens
tttgttcagctatgc

SEQ ID NO: 667438 - DNA, 15 bp, Homo sapiens
ttgttcagctatgcc

SEQ ID NO: 667439 - DNA, 15 bp, Homo sapiens
tgttcagctatgccc

SEQ ID NO: 667440 - DNA, 15 bp, Homo sapiens
gttcagctatgccct

SEQ ID NO: 667441 - DNA, 15 bp, Homo sapiens
ttcagctatgcccta

SEQ ID NO: 667442 - DNA, 15 bp, Homo sapiens
tcagctatgccctac

SEQ ID NO: 667443 - DNA, 15 bp, Homo sapiens
cagctatgccctacc

SEQ ID NO: 667444 - DNA, 15 bp, Homo sapiens
agctatgccctaccc

SEQ ID NO: 667445 - DNA, 15 bp, Homo sapiens
gctatgccctacccc

SEQ ID NO: 667446 - DNA, 15 bp, Homo sapiens
ctatgccctacccct

SEQ ID NO: 667447 - DNA, 15 bp, Homo sapiens
tatgccctaccccta

SEQ ID NO: 667448 - DNA, 15 bp, Homo sapiens
atgccctacccctag

SEQ ID NO: 667449 - DNA, 15 bp, Homo sapiens
tgccctacccctaga

SEQ ID NO: 667450 - DNA, 15 bp, Homo sapiens
gccctacccctagag

SEQ ID NO: 667451 - DNA, 15 bp, Homo sapiens
ccctacccctagagg

SEQ ID NO: 667452 - DNA, 15 bp, Homo sapiens
cctacccctagaggc

SEQ ID NO: 667453 - DNA, 15 bp, Homo sapiens
ctacccctagaggca

SEQ ID NO: 667454 - DNA, 15 bp, Homo sapiens
tacccctagaggcag

SEQ ID NO: 667455 - DNA, 15 bp, Homo sapiens
acccctagaggcaga

SEQ ID NO: 667456 - DNA, 15 bp, Homo sapiens
cccctagaggcagag

SEQ ID NO: 667457 - DNA, 15 bp, Homo sapiens
ccctagaggcagagt

SEQ ID NO: 667458 - DNA, 15 bp, Homo sapiens
cctagaggcagagtc

SEQ ID NO: 667459 - DNA, 15 bp, Homo sapiens
ctagaggcagagtct

SEQ ID NO: 667460 - DNA, 15 bp, Homo sapiens
tagaggcagagtcta

SEQ ID NO: 667461 - DNA, 15 bp, Homo sapiens
agaggcagagtctac

SEQ ID NO: 667462 - DNA, 15 bp, Homo sapiens
gaggcagagtctaca

SEQ ID NO: 667463 - DNA, 15 bp, Homo sapiens
aggcagagtctacag

SEQ ID NO: 667464 - DNA, 15 bp, Homo sapiens
ggcagagtctacaga

SEQ ID NO: 667465 - DNA, 15 bp, Homo sapiens
gcagagtctacagag

SEQ ID NO: 667466 - DNA, 15 bp, Homo sapiens
cagagtctacagagg

SEQ ID NO: 667467 - DNA, 15 bp, Homo sapiens
agagtctacagaggc

SEQ ID NO: 667468 - DNA, 15 bp, Homo sapiens
gagtctacagaggca

SEQ ID NO: 667469 - DNA, 15 bp, Homo sapiens
agtctacagaggcag

SEQ ID NO: 667470 - DNA, 15 bp, Homo sapiens
gtctacagaggcagg

SEQ ID NO: 667471 - DNA, 15 bp, Homo sapiens
tctacagaggcaggc

SEQ ID NO: 667472 - DNA, 15 bp, Homo sapiens
ctacagaggcaggca

SEQ ID NO: 667473 - DNA, 15 bp, Homo sapiens
tacagaggcaggcag

SEQ ID NO: 667474 - DNA, 15 bp, Homo sapiens
acagaggcaggcagg

SEQ ID NO: 667475 - DNA, 15 bp, Homo sapiens
cagaggcaggcaggt

SEQ ID NO: 667476 - DNA, 15 bp, Homo sapiens
agaggcaggcaggtc

SEQ ID NO: 667477 - DNA, 15 bp, Homo sapiens
gaggcaggcaggtct

SEQ ID NO: 667478 - DNA, 15 bp, Homo sapiens
aggcaggcaggtctc

SEQ ID NO: 667479 - DNA, 15 bp, Homo sapiens
ggcaggcaggtctct

SEQ ID NO: 667480 - DNA, 15 bp, Homo sapiens
gcaggcaggtctctt

SEQ ID NO: 667481 - DNA, 15 bp, Homo sapiens
caggcaggtctcttt

SEQ ID NO: 667482 - DNA, 15 bp, Homo sapiens
aggcaggtctctttg

SEQ ID NO: 667483 - DNA, 15 bp, Homo sapiens
ggcaggtctctttga

SEQ ID NO: 667484 - DNA, 15 bp, Homo sapiens
gcaggtctctttgag

SEQ ID NO: 667485 - DNA, 15 bp, Homo sapiens
caggtctctttgagc

SEQ ID NO: 667486 - DNA, 15 bp, Homo sapiens
aggtctctttgagct

SEQ ID NO: 667487 - DNA, 15 bp, Homo sapiens
ggtctctttgagctg

SEQ ID NO: 667488 - DNA, 15 bp, Homo sapiens
gtctctttgagctgt

SEQ ID NO: 667489 - DNA, 15 bp, Homo sapiens
tctctttgagctgtg

SEQ ID NO: 667490 - DNA, 15 bp, Homo sapiens
ctctttgagctgtgg

SEQ ID NO: 667491 - DNA, 15 bp, Homo sapiens
tctttgagctgtggt

SEQ ID NO: 667492 - DNA, 15 bp, Homo sapiens
ctttgagctgtggtg

SEQ ID NO: 667493 - DNA, 15 bp, Homo sapiens
tttgagctgtggtgg

SEQ ID NO: 667494 - DNA, 15 bp, Homo sapiens
ttgagctgtggtggg

SEQ ID NO: 667495 - DNA, 15 bp, Homo sapiens
tgagctgtggtgggc

SEQ ID NO: 667496 - DNA, 15 bp, Homo sapiens
gagctgtggtgggct

SEQ ID NO: 667497 - DNA, 15 bp, Homo sapiens
agctgtggtgggctc

SEQ ID NO: 667498 - DNA, 15 bp, Homo sapiens
gctgtggtgggctcc

SEQ ID NO: 667499 - DNA, 15 bp, Homo sapiens
ctgtggtgggctcca

SEQ ID NO: 667500 - DNA, 15 bp, Homo sapiens
tgtggtgggctccac

SEQ ID NO: 667501 - DNA, 15 bp, Homo sapiens
gtggtgggctccacc

SEQ ID NO: 667502 - DNA, 15 bp, Homo sapiens
tggtgggctccaccc

SEQ ID NO: 667503 - DNA, 15 bp, Homo sapiens
ggtgggctccaccca

SEQ ID NO: 667504 - DNA, 15 bp, Homo sapiens
gtgggctccacccag

SEQ ID NO: 667505 - DNA, 15 bp, Homo sapiens
tgggctccacccagt

SEQ ID NO: 667506 - DNA, 15 bp, Homo sapiens
gggctccacccagtt

SEQ ID NO: 667507 - DNA, 15 bp, Homo sapiens
ggctccacccagttc

SEQ ID NO: 667508 - DNA, 15 bp, Homo sapiens
gctccacccagttcc

SEQ ID NO: 667509 - DNA, 15 bp, Homo sapiens
ctccacccagttcct

SEQ ID NO: 667510 - DNA, 15 bp, Homo sapiens
tccacccagttcctg

SEQ ID NO: 667511 - DNA, 15 bp, Homo sapiens
ccacccagttcctgg

SEQ ID NO: 667512 - DNA, 15 bp, Homo sapiens
cacccagttcctggc

SEQ ID NO: 667513 - DNA, 15 bp, Homo sapiens
acccagttcctggcc

SEQ ID NO: 667514 - DNA, 15 bp, Homo sapiens
cccagttcctggccg

SEQ ID NO: 667515 - DNA, 15 bp, Homo sapiens
ccagttcctggccgc

SEQ ID NO: 667516 - DNA, 15 bp, Homo sapiens
cagttcctggccgct

SEQ ID NO: 667517 - DNA, 15 bp, Homo sapiens
agttcctggccgctt

SEQ ID NO: 667518 - DNA, 15 bp, Homo sapiens
gttcctggccgcttt

SEQ ID NO: 667519 - DNA, 15 bp, Homo sapiens
ttcctggccgctttg

SEQ ID NO: 667520 - DNA, 15 bp, Homo sapiens
tcctggccgctttgt

SEQ ID NO: 667521 - DNA, 15 bp, Homo sapiens
cctggccgctttgtt

SEQ ID NO: 667522 - DNA, 15 bp, Homo sapiens
ctggccgctttgttt

SEQ ID NO: 667523 - DNA, 15 bp, Homo sapiens
tggccgctttgttta

SEQ ID NO: 667524 - DNA, 15 bp, Homo sapiens
ggccgctttgtttac

SEQ ID NO: 667525 - DNA, 15 bp, Homo sapiens
gccgctttgtttacc

SEQ ID NO: 667526 - DNA, 15 bp, Homo sapiens
ccgctttgtttacct

SEQ ID NO: 667527 - DNA, 15 bp, Homo sapiens
cgctttgtttaccta

SEQ ID NO: 667528 - DNA, 15 bp, Homo sapiens
gctttgtttacctac

SEQ ID NO: 667529 - DNA, 15 bp, Homo sapiens
ctttgtttacctact

SEQ ID NO: 667530 - DNA, 15 bp, Homo sapiens
tttgtttacctactc

SEQ ID NO: 667531 - DNA, 15 bp, Homo sapiens
ttgtttacctactca

SEQ ID NO: 667532 - DNA, 15 bp, Homo sapiens
tgtttacctactcaa

SEQ ID NO: 667533 - DNA, 15 bp, Homo sapiens
gtttacctactcaag

SEQ ID NO: 667534 - DNA, 15 bp, Homo sapiens
tttacctactcaaga

SEQ ID NO: 667535 - DNA, 15 bp, Homo sapiens
ttacctactcaagag

SEQ ID NO: 667536 - DNA, 15 bp, Homo sapiens
tacctactcaagagc

SEQ ID NO: 667537 - DNA, 15 bp, Homo sapiens
acctactcaagagct

SEQ ID NO: 667538 - DNA, 15 bp, Homo sapiens
cctactcaagagctt

SEQ ID NO: 667539 - DNA, 15 bp, Homo sapiens
ctactcaagagcttc

SEQ ID NO: 667540 - DNA, 15 bp, Homo sapiens
tactcaagagcttcc

SEQ ID NO: 667541 - DNA, 15 bp, Homo sapiens
actcaagagcttcct

SEQ ID NO: 667542 - DNA, 15 bp, Homo sapiens
ctcaagagcttcctg

SEQ ID NO: 667543 - DNA, 15 bp, Homo sapiens
tcaagagcttcctgg

SEQ ID NO: 667544 - DNA, 15 bp, Homo sapiens
caagagcttcctggc

SEQ ID NO: 667545 - DNA, 15 bp, Homo sapiens
aagagcttcctggcc

SEQ ID NO: 667546 - DNA, 15 bp, Homo sapiens
agagcttcctggccg

SEQ ID NO: 667547 - DNA, 15 bp, Homo sapiens
gagcttcctggccgc

SEQ ID NO: 667548 - DNA, 15 bp, Homo sapiens
agcttcctggccgct

SEQ ID NO: 667549 - DNA, 15 bp, Homo sapiens
gcttcctggccgctt

SEQ ID NO: 667550 - DNA, 15 bp, Homo sapiens
cttcctggccgcttt

SEQ ID NO: 667551 - DNA, 15 bp, Homo sapiens
tttacctactcaagt

SEQ ID NO: 667552 - DNA, 15 bp, Homo sapiens
ttacctactcaagtc

SEQ ID NO: 667553 - DNA, 15 bp, Homo sapiens
tacctactcaagtct

SEQ ID NO: 667554 - DNA, 15 bp, Homo sapiens
acctactcaagtctc

SEQ ID NO: 667555 - DNA, 15 bp, Homo sapiens
cctactcaagtctca

SEQ ID NO: 667556 - DNA, 15 bp, Homo sapiens
ctactcaagtctcag

SEQ ID NO: 667557 - DNA, 15 bp, Homo sapiens
tactcaagtctcagc

SEQ ID NO: 667558 - DNA, 15 bp, Homo sapiens
actcaagtctcagct

SEQ ID NO: 667559 - DNA, 15 bp, Homo sapiens
ctcaagtctcagcta

SEQ ID NO: 667560 - DNA, 15 bp, Homo sapiens
tcaagtctcagctat

SEQ ID NO: 667561 - DNA, 15 bp, Homo sapiens
caagtctcagctatg

SEQ ID NO: 667562 - DNA, 15 bp, Homo sapiens
aagtctcagctatgg

SEQ ID NO: 667563 - DNA, 15 bp, Homo sapiens
agtctcagctatgga

SEQ ID NO: 667564 - DNA, 15 bp, Homo sapiens
gtctcagctatggag

SEQ ID NO: 667565 - DNA, 15 bp, Homo sapiens
tctcagctatggagg

SEQ ID NO: 667566 - DNA, 15 bp, Homo sapiens
ctcagctatggaggg

SEQ ID NO: 667567 - DNA, 15 bp, Homo sapiens
tcagctatggagggc

SEQ ID NO: 667568 - DNA, 15 bp, Homo sapiens
cagctatggagggca

SEQ ID NO: 667569 - DNA, 15 bp, Homo sapiens
agctatggagggcac

SEQ ID NO: 667570 - DNA, 15 bp, Homo sapiens
gctatggagggcacc

SEQ ID NO: 667571 - DNA, 15 bp, Homo sapiens
ctatggagggcaccc

SEQ ID NO: 667572 - DNA, 15 bp, Homo sapiens
tatggagggcaccct

SEQ ID NO: 667573 - DNA, 15 bp, Homo sapiens
atggagggcaccctt

SEQ ID NO: 667574 - DNA, 15 bp, Homo sapiens
tggagggcacccttc

SEQ ID NO: 667575 - DNA, 15 bp, Homo sapiens
ggagggcacccttcc

SEQ ID NO: 667576 - DNA, 15 bp, Homo sapiens
gagggcacccttccc

SEQ ID NO: 667577 - DNA, 15 bp, Homo sapiens
agggcacccttcccc

SEQ ID NO: 667578 - DNA, 15 bp, Homo sapiens
gggcacccttccccc

SEQ ID NO: 667579 - DNA, 15 bp, Homo sapiens
ggcacccttccccca

SEQ ID NO: 667580 - DNA, 15 bp, Homo sapiens
gcacccttcccccag

SEQ ID NO: 667581 - DNA, 15 bp, Homo sapiens
cacccttcccccagc

SEQ ID NO: 667582 - DNA, 15 bp, Homo sapiens
acccttcccccagcc

SEQ ID NO: 667583 - DNA, 15 bp, Homo sapiens
cccttcccccagcct

SEQ ID NO: 667584 - DNA, 15 bp, Homo sapiens
ccttcccccagcctc

SEQ ID NO: 667585 - DNA, 15 bp, Homo sapiens
cttcccccagcctcg

SEQ ID NO: 667586 - DNA, 15 bp, Homo sapiens
ttcccccagcctcgc

SEQ ID NO: 667587 - DNA, 15 bp, Homo sapiens
tcccccagcctcgct

SEQ ID NO: 667588 - DNA, 15 bp, Homo sapiens
cccccagcctcgctg

SEQ ID NO: 667589 - DNA, 15 bp, Homo sapiens
ccccagcctcgctgc

SEQ ID NO: 667590 - DNA, 15 bp, Homo sapiens
cccagcctcgctgcc

SEQ ID NO: 667591 - DNA, 15 bp, Homo sapiens
ccagcctcgctgcca

SEQ ID NO: 667592 - DNA, 15 bp, Homo sapiens
cagcctcgctgccac

SEQ ID NO: 667593 - DNA, 15 bp, Homo sapiens
agcctcgctgccacc

SEQ ID NO: 667594 - DNA, 15 bp, Homo sapiens
gcctcgctgccacct

SEQ ID NO: 667595 - DNA, 15 bp, Homo sapiens
cctcgctgccacctt

SEQ ID NO: 667596 - DNA, 15 bp, Homo sapiens
ctcgctgccaccttg

SEQ ID NO: 667597 - DNA, 15 bp, Homo sapiens
tcgctgccaccttgc

SEQ ID NO: 667598 - DNA, 15 bp, Homo sapiens
cgctgccaccttgca

SEQ ID NO: 667599 - DNA, 15 bp, Homo sapiens
gctgccaccttgcag

SEQ ID NO: 667600 - DNA, 15 bp, Homo sapiens
ctgccaccttgcaga

SEQ ID NO: 667601 - DNA, 15 bp, Homo sapiens
tgccaccttgcagat

SEQ ID NO: 667602 - DNA, 15 bp, Homo sapiens
gccaccttgcagatt

SEQ ID NO: 667603 - DNA, 15 bp, Homo sapiens
ccaccttgcagattg

SEQ ID NO: 667604 - DNA, 15 bp, Homo sapiens
caccttgcagattga

SEQ ID NO: 667605 - DNA, 15 bp, Homo sapiens
accttgcagattgat

SEQ ID NO: 667606 - DNA, 15 bp, Homo sapiens
ccttgcagattgatt

SEQ ID NO: 667607 - DNA, 15 bp, Homo sapiens
cttgcagattgattt

SEQ ID NO: 667608 - DNA, 15 bp, Homo sapiens
ttgcagattgatttc

SEQ ID NO: 667609 - DNA, 15 bp, Homo sapiens
tgcagattgatttca

SEQ ID NO: 667610 - DNA, 15 bp, Homo sapiens
gcagattgatttcag

SEQ ID NO: 667611 - DNA, 15 bp, Homo sapiens
cagattgatttcaga

SEQ ID NO: 667612 - DNA, 15 bp, Homo sapiens
agattgatttcagac

SEQ ID NO: 667613 - DNA, 15 bp, Homo sapiens
gattgatttcagact

SEQ ID NO: 667614 - DNA, 15 bp, Homo sapiens
attgatttcagactg

SEQ ID NO: 667615 - DNA, 15 bp, Homo sapiens
ttgatttcagactgc

SEQ ID NO: 667616 - DNA, 15 bp, Homo sapiens
tgatttcagactgct

SEQ ID NO: 667617 - DNA, 15 bp, Homo sapiens
gatttcagactgctg

SEQ ID NO: 667618 - DNA, 15 bp, Homo sapiens
atttcagactgctgt

SEQ ID NO: 667619 - DNA, 15 bp, Homo sapiens
tttcagactgctgtg

SEQ ID NO: 667620 - DNA, 15 bp, Homo sapiens
ttcagactgctgtgc

SEQ ID NO: 667621 - DNA, 15 bp, Homo sapiens
tcagactgctgtgct

SEQ ID NO: 667622 - DNA, 15 bp, Homo sapiens
cagactgctgtgcta

SEQ ID NO: 667623 - DNA, 15 bp, Homo sapiens
agactgctgtgctag

SEQ ID NO: 667624 - DNA, 15 bp, Homo sapiens
gactgctgtgctagc

SEQ ID NO: 667625 - DNA, 15 bp, Homo sapiens
actgctgtgctagca

SEQ ID NO: 667626 - DNA, 15 bp, Homo sapiens
ctgctgtgctagcaa

SEQ ID NO: 667627 - DNA, 15 bp, Homo sapiens
tgctgtgctagcaat

SEQ ID NO: 667628 - DNA, 15 bp, Homo sapiens
gctgtgctagcaatg

SEQ ID NO: 667629 - DNA, 15 bp, Homo sapiens
ctgtgctagcaatga

SEQ ID NO: 667630 - DNA, 15 bp, Homo sapiens
tgtgctagcaatgag

SEQ ID NO: 667631 - DNA, 15 bp, Homo sapiens
gtgctagcaatgagc

SEQ ID NO: 667632 - DNA, 15 bp, Homo sapiens
tgctagcaatgagcg

SEQ ID NO: 667633 - DNA, 15 bp, Homo sapiens
gctagcaatgagcga

SEQ ID NO: 667634 - DNA, 15 bp, Homo sapiens
ctagcaatgagcgag

SEQ ID NO: 667635 - DNA, 15 bp, Homo sapiens
tagcaatgagcgagg

SEQ ID NO: 667636 - DNA, 15 bp, Homo sapiens
agcaatgagcgaggc

SEQ ID NO: 667637 - DNA, 15 bp, Homo sapiens
gcaatgagcgaggct

SEQ ID NO: 667638 - DNA, 15 bp, Homo sapiens
caatgagcgaggctt

SEQ ID NO: 667639 - DNA, 15 bp, Homo sapiens
aatgagcgaggcttc

SEQ ID NO: 667640 - DNA, 15 bp, Homo sapiens
atgagcgaggcttcg

SEQ ID NO: 667641 - DNA, 15 bp, Homo sapiens
tgagcgaggcttcgt

SEQ ID NO: 667642 - DNA, 15 bp, Homo sapiens
gagcgaggcttcgtg

SEQ ID NO: 667643 - DNA, 15 bp, Homo sapiens
agcgaggcttcgtgg

SEQ ID NO: 667644 - DNA, 15 bp, Homo sapiens
gcgaggcttcgtggg

SEQ ID NO: 667645 - DNA, 15 bp, Homo sapiens
cgaggcttcgtgggt

SEQ ID NO: 667646 - DNA, 15 bp, Homo sapiens
gaggcttcgtgggtg

SEQ ID NO: 667647 - DNA, 15 bp, Homo sapiens
aggcttcgtgggtgt

SEQ ID NO: 667648 - DNA, 15 bp, Homo sapiens
ggcttcgtgggtgtg

SEQ ID NO: 667649 - DNA, 15 bp, Homo sapiens
gcttcgtgggtgtgg

SEQ ID NO: 667650 - DNA, 15 bp, Homo sapiens
cttcgtgggtgtggg

SEQ ID NO: 667651 - DNA, 15 bp, Homo sapiens
ttcgtgggtgtggga

SEQ ID NO: 667652 - DNA, 15 bp, Homo sapiens
tcgtgggtgtgggac

SEQ ID NO: 667653 - DNA, 15 bp, Homo sapiens
cgtgggtgtgggacc

SEQ ID NO: 667654 - DNA, 15 bp, Homo sapiens
gtgggtgtgggaccc

SEQ ID NO: 667655 - DNA, 15 bp, Homo sapiens
tgggtgtgggaccct

SEQ ID NO: 667656 - DNA, 15 bp, Homo sapiens
gggtgtgggaccctc

SEQ ID NO: 667657 - DNA, 15 bp, Homo sapiens
ggtgtgggaccctct

SEQ ID NO: 667658 - DNA, 15 bp, Homo sapiens
gtgtgggaccctctg

SEQ ID NO: 667659 - DNA, 15 bp, Homo sapiens
tgtgggaccctctga

SEQ ID NO: 667660 - DNA, 15 bp, Homo sapiens
gtgggaccctctgag

SEQ ID NO: 667661 - DNA, 15 bp, Homo sapiens
tgggaccctctgagc

SEQ ID NO: 667662 - DNA, 15 bp, Homo sapiens
gggaccctctgagcc

SEQ ID NO: 667663 - DNA, 15 bp, Homo sapiens
ggaccctctgagcca

SEQ ID NO: 667664 - DNA, 15 bp, Homo sapiens
gaccctctgagccag

SEQ ID NO: 667665 - DNA, 15 bp, Homo sapiens
accctctgagccagg

SEQ ID NO: 667666 - DNA, 15 bp, Homo sapiens
ccctctgagccaggc

SEQ ID NO: 667667 - DNA, 15 bp, Homo sapiens
cctctgagccaggcg

SEQ ID NO: 667668 - DNA, 15 bp, Homo sapiens
ctctgagccaggcgt

SEQ ID NO: 667669 - DNA, 15 bp, Homo sapiens
tctgagccaggcgtg

SEQ ID NO: 667670 - DNA, 15 bp, Homo sapiens
ctgagccaggcgtgg

SEQ ID NO: 667671 - DNA, 15 bp, Homo sapiens
tgagccaggcgtggg

SEQ ID NO: 667672 - DNA, 15 bp, Homo sapiens
gagccaggcgtggga

SEQ ID NO: 667673 - DNA, 15 bp, Homo sapiens
agccaggcgtgggat

SEQ ID NO: 667674 - DNA, 15 bp, Homo sapiens
gccaggcgtgggatg

SEQ ID NO: 667675 - DNA, 15 bp, Homo sapiens
ccaggcgtgggatgt

SEQ ID NO: 667676 - DNA, 15 bp, Homo sapiens
caggcgtgggatgta

SEQ ID NO: 667677 - DNA, 15 bp, Homo sapiens
aggcgtgggatgtaa

SEQ ID NO: 667678 - DNA, 15 bp, Homo sapiens
ggcgtgggatgtaat

SEQ ID NO: 667679 - DNA, 15 bp, Homo sapiens
gcgtgggatgtaatc

SEQ ID NO: 667680 - DNA, 15 bp, Homo sapiens
cgtgggatgtaatct

SEQ ID NO: 667681 - DNA, 15 bp, Homo sapiens
gtgggatgtaatctc

SEQ ID NO: 667682 - DNA, 15 bp, Homo sapiens
tgggatgtaatctcc

SEQ ID NO: 667683 - DNA, 15 bp, Homo sapiens
gggatgtaatctcct

SEQ ID NO: 667684 - DNA, 15 bp, Homo sapiens
ggatgtaatctcctg

SEQ ID NO: 667685 - DNA, 15 bp, Homo sapiens
gatgtaatctcctga

SEQ ID NO: 667686 - DNA, 15 bp, Homo sapiens
atgtaatctcctgat

SEQ ID NO: 667687 - DNA, 15 bp, Homo sapiens
tgtaatctcctgatg

SEQ ID NO: 667688 - DNA, 15 bp, Homo sapiens
gtaatctcctgatgt

SEQ ID NO: 667689 - DNA, 15 bp, Homo sapiens
taatctcctgatgtg

SEQ ID NO: 667690 - DNA, 15 bp, Homo sapiens
aatctcctgatgtgc

SEQ ID NO: 667691 - DNA, 15 bp, Homo sapiens
atctcctgatgtgcc

SEQ ID NO: 667692 - DNA, 15 bp, Homo sapiens
tctcctgatgtgccg

SEQ ID NO: 667693 - DNA, 15 bp, Homo sapiens
ctcctgatgtgccgt

SEQ ID NO: 667694 - DNA, 15 bp, Homo sapiens
tcctgatgtgccgtt

SEQ ID NO: 667695 - DNA, 15 bp, Homo sapiens
cctgatgtgccgttt

SEQ ID NO: 667696 - DNA, 15 bp, Homo sapiens
ctgatgtgccgtttg

SEQ ID NO: 667697 - DNA, 15 bp, Homo sapiens
tgatgtgccgtttgc

SEQ ID NO: 667698 - DNA, 15 bp, Homo sapiens
gatgtgccgtttgct

SEQ ID NO: 667699 - DNA, 15 bp, Homo sapiens
atgtgccgtttgcta

SEQ ID NO: 667700 - DNA, 15 bp, Homo sapiens
tgtgccgtttgctaa

SEQ ID NO: 667701 - DNA, 15 bp, Homo sapiens
gtgccgtttgctaag

SEQ ID NO: 667702 - DNA, 15 bp, Homo sapiens
tgccgtttgctaaga

SEQ ID NO: 667703 - DNA, 15 bp, Homo sapiens
gccgtttgctaagac

SEQ ID NO: 667704 - DNA, 15 bp, Homo sapiens
ccgtttgctaagacc

SEQ ID NO: 667705 - DNA, 15 bp, Homo sapiens
cgtttgctaagacca

SEQ ID NO: 667706 - DNA, 15 bp, Homo sapiens
gtttgctaagaccat

SEQ ID NO: 667707 - DNA, 15 bp, Homo sapiens
tttgctaagaccatt

SEQ ID NO: 667708 - DNA, 15 bp, Homo sapiens
ttgctaagaccattg

SEQ ID NO: 667709 - DNA, 15 bp, Homo sapiens
tgctaagaccattgg

SEQ ID NO: 667710 - DNA, 15 bp, Homo sapiens
gctaagaccattgga

SEQ ID NO: 667711 - DNA, 15 bp, Homo sapiens
ctaagaccattggaa

SEQ ID NO: 667712 - DNA, 15 bp, Homo sapiens
taagaccattggaaa

SEQ ID NO: 667713 - DNA, 15 bp, Homo sapiens
aagaccattggaaaa

SEQ ID NO: 667714 - DNA, 15 bp, Homo sapiens
agaccattggaaaag

SEQ ID NO: 667715 - DNA, 15 bp, Homo sapiens
gaccattggaaaagc

SEQ ID NO: 667716 - DNA, 15 bp, Homo sapiens
accattggaaaagcg

SEQ ID NO: 667717 - DNA, 15 bp, Homo sapiens
ccattggaaaagcgc

SEQ ID NO: 667718 - DNA, 15 bp, Homo sapiens
cattggaaaagcgca

SEQ ID NO: 667719 - DNA, 15 bp, Homo sapiens
attggaaaagcgcag

SEQ ID NO: 667720 - DNA, 15 bp, Homo sapiens
ttggaaaagcgcagt

SEQ ID NO: 667721 - DNA, 15 bp, Homo sapiens
tggaaaagcgcagta

SEQ ID NO: 667722 - DNA, 15 bp, Homo sapiens
ggaaaagcgcagtat

SEQ ID NO: 667723 - DNA, 15 bp, Homo sapiens
gaaaagcgcagtatt

SEQ ID NO: 667724 - DNA, 15 bp, Homo sapiens
aaaagcgcagtatta

SEQ ID NO: 667725 - DNA, 15 bp, Homo sapiens
aaagcgcagtattag

SEQ ID NO: 667726 - DNA, 15 bp, Homo sapiens
aagcgcagtattagg

SEQ ID NO: 667727 - DNA, 15 bp, Homo sapiens
agcgcagtattaggg

SEQ ID NO: 667728 - DNA, 15 bp, Homo sapiens
gcgcagtattagggt

SEQ ID NO: 667729 - DNA, 15 bp, Homo sapiens
cgcagtattagggtg

SEQ ID NO: 667730 - DNA, 15 bp, Homo sapiens
gcagtattagggtga

SEQ ID NO: 667731 - DNA, 15 bp, Homo sapiens
cagtattagggtgag

SEQ ID NO: 667732 - DNA, 15 bp, Homo sapiens
agtattagggtgaga

SEQ ID NO: 667733 - DNA, 15 bp, Homo sapiens
gtattagggtgagag

SEQ ID NO: 667734 - DNA, 15 bp, Homo sapiens
tattagggtgagagt

SEQ ID NO: 667735 - DNA, 15 bp, Homo sapiens
attagggtgagagtg

SEQ ID NO: 667736 - DNA, 15 bp, Homo sapiens
ttagggtgagagtga

SEQ ID NO: 667737 - DNA, 15 bp, Homo sapiens
tagggtgagagtgac

SEQ ID NO: 667738 - DNA, 15 bp, Homo sapiens
agggtgagagtgacc

SEQ ID NO: 667739 - DNA, 15 bp, Homo sapiens
gggtgagagtgaccc

SEQ ID NO: 667740 - DNA, 15 bp, Homo sapiens
ggtgagagtgacccg

SEQ ID NO: 667741 - DNA, 15 bp, Homo sapiens
gtgagagtgacccga

SEQ ID NO: 667742 - DNA, 15 bp, Homo sapiens
tgagagtgacccgat

SEQ ID NO: 667743 - DNA, 15 bp, Homo sapiens
gagagtgacccgatt

SEQ ID NO: 667744 - DNA, 15 bp, Homo sapiens
agagtgacccgattt

SEQ ID NO: 667745 - DNA, 15 bp, Homo sapiens
gagtgacccgatttt

SEQ ID NO: 667746 - DNA, 15 bp, Homo sapiens
agtgacccgattttc

SEQ ID NO: 667747 - DNA, 15 bp, Homo sapiens
gtgacccgattttcc

SEQ ID NO: 667748 - DNA, 15 bp, Homo sapiens
tgacccgattttcca

SEQ ID NO: 667749 - DNA, 15 bp, Homo sapiens
gacccgattttccag

SEQ ID NO: 667750 - DNA, 15 bp, Homo sapiens
acccgattttccagg

SEQ ID NO: 667751 - DNA, 15 bp, Homo sapiens
cccgattttccaggt

SEQ ID NO: 667752 - DNA, 15 bp, Homo sapiens
ccgattttccaggtg

SEQ ID NO: 667753 - DNA, 15 bp, Homo sapiens
cgattttccaggtgc

SEQ ID NO: 667754 - DNA, 15 bp, Homo sapiens
gattttccaggtgcc

SEQ ID NO: 667755 - DNA, 15 bp, Homo sapiens
attttccaggtgccg

SEQ ID NO: 667756 - DNA, 15 bp, Homo sapiens
ttttccaggtgccgt

SEQ ID NO: 667757 - DNA, 15 bp, Homo sapiens
tttccaggtgccgtc

SEQ ID NO: 667758 - DNA, 15 bp, Homo sapiens
ttccaggtgccgtct

SEQ ID NO: 667759 - DNA, 15 bp, Homo sapiens
tccaggtgccgtctg

SEQ ID NO: 667760 - DNA, 15 bp, Homo sapiens
ccaggtgccgtctgt

SEQ ID NO: 667761 - DNA, 15 bp, Homo sapiens
caggtgccgtctgtc

SEQ ID NO: 667762 - DNA, 15 bp, Homo sapiens
aggtgccgtctgtca

SEQ ID NO: 667763 - DNA, 15 bp, Homo sapiens
ggtgccgtctgtcac

SEQ ID NO: 667764 - DNA, 15 bp, Homo sapiens
gtgccgtctgtcaca

SEQ ID NO: 667765 - DNA, 15 bp, Homo sapiens
tgccgtctgtcacag

SEQ ID NO: 667766 - DNA, 15 bp, Homo sapiens
gccgtctgtcacagc

SEQ ID NO: 667767 - DNA, 15 bp, Homo sapiens
ccgtctgtcacagct

SEQ ID NO: 667768 - DNA, 15 bp, Homo sapiens
cgtctgtcacagctt

SEQ ID NO: 667769 - DNA, 15 bp, Homo sapiens
gtctgtcacagcttt

SEQ ID NO: 667770 - DNA, 15 bp, Homo sapiens
tctgtcacagctttg

SEQ ID NO: 667771 - DNA, 15 bp, Homo sapiens
ctgtcacagctttgc

SEQ ID NO: 667772 - DNA, 15 bp, Homo sapiens
tgtcacagctttgct

SEQ ID NO: 667773 - DNA, 15 bp, Homo sapiens
gtcacagctttgctt

SEQ ID NO: 667774 - DNA, 15 bp, Homo sapiens
tcacagctttgcttg

SEQ ID NO: 667775 - DNA, 15 bp, Homo sapiens
cacagctttgcttgg

SEQ ID NO: 667776 - DNA, 15 bp, Homo sapiens
acagctttgcttggc

SEQ ID NO: 667777 - DNA, 15 bp, Homo sapiens
cagctttgcttggct

SEQ ID NO: 667778 - DNA, 15 bp, Homo sapiens
agctttgcttggcta

SEQ ID NO: 667779 - DNA, 15 bp, Homo sapiens
gctttgcttggctag

SEQ ID NO: 667780 - DNA, 15 bp, Homo sapiens
ctttgcttggctagg

SEQ ID NO: 667781 - DNA, 15 bp, Homo sapiens
tttgcttggctagga

SEQ ID NO: 667782 - DNA, 15 bp, Homo sapiens
ttgcttggctaggaa

SEQ ID NO: 667783 - DNA, 15 bp, Homo sapiens
tgcttggctaggaaa

SEQ ID NO: 667784 - DNA, 15 bp, Homo sapiens
gcttggctaggaaag

SEQ ID NO: 667785 - DNA, 15 bp, Homo sapiens
cttggctaggaaagg

SEQ ID NO: 667786 - DNA, 15 bp, Homo sapiens
ttggctaggaaaggg

SEQ ID NO: 667787 - DNA, 15 bp, Homo sapiens
tggctaggaaaggga

SEQ ID NO: 667788 - DNA, 15 bp, Homo sapiens
ggctaggaaagggaa

SEQ ID NO: 667789 - DNA, 15 bp, Homo sapiens
gctaggaaagggaat

SEQ ID NO: 667790 - DNA, 15 bp, Homo sapiens
ctaggaaagggaatt

SEQ ID NO: 667791 - DNA, 15 bp, Homo sapiens
taggaaagggaattc

SEQ ID NO: 667792 - DNA, 15 bp, Homo sapiens
aggaaagggaattcc

SEQ ID NO: 667793 - DNA, 15 bp, Homo sapiens
ggaaagggaattccc

SEQ ID NO: 667794 - DNA, 15 bp, Homo sapiens
gaaagggaattccct

SEQ ID NO: 667795 - DNA, 15 bp, Homo sapiens
aaagggaattccctg

SEQ ID NO: 667796 - DNA, 15 bp, Homo sapiens
aagggaattccctga

SEQ ID NO: 667797 - DNA, 15 bp, Homo sapiens
agggaattccctgac

SEQ ID NO: 667798 - DNA, 15 bp, Homo sapiens
gggaattccctgacc

SEQ ID NO: 667799 - DNA, 15 bp, Homo sapiens
ggaattccctgacct

SEQ ID NO: 667800 - DNA, 15 bp, Homo sapiens
gaattccctgacctc

SEQ ID NO: 667801 - DNA, 15 bp, Homo sapiens
aattccctgacctct

SEQ ID NO: 667802 - DNA, 15 bp, Homo sapiens
attccctgacctctt

SEQ ID NO: 667803 - DNA, 15 bp, Homo sapiens
ttccctgacctcttg

SEQ ID NO: 667804 - DNA, 15 bp, Homo sapiens
tccctgacctcttgt

SEQ ID NO: 667805 - DNA, 15 bp, Homo sapiens
ccctgacctcttgtg

SEQ ID NO: 667806 - DNA, 15 bp, Homo sapiens
cctgacctcttgtgc

SEQ ID NO: 667807 - DNA, 15 bp, Homo sapiens
ctgacctcttgtgct

SEQ ID NO: 667808 - DNA, 15 bp, Homo sapiens
tgacctcttgtgctt

SEQ ID NO: 667809 - DNA, 15 bp, Homo sapiens
gacctcttgtgcttc

SEQ ID NO: 667810 - DNA, 15 bp, Homo sapiens
acctcttgtgcttct

SEQ ID NO: 667811 - DNA, 15 bp, Homo sapiens
cctcttgtgcttctc

SEQ ID NO: 667812 - DNA, 15 bp, Homo sapiens
ctcttgtgcttctcg

SEQ ID NO: 667813 - DNA, 15 bp, Homo sapiens
tcttgtgcttctcgg

SEQ ID NO: 667814 - DNA, 15 bp, Homo sapiens
cttgtgcttctcggg

SEQ ID NO: 667815 - DNA, 15 bp, Homo sapiens
ttgtgcttctcgggt

SEQ ID NO: 667816 - DNA, 15 bp, Homo sapiens
tgtgcttctcgggtg

SEQ ID NO: 667817 - DNA, 15 bp, Homo sapiens
gtgcttctcgggtga

SEQ ID NO: 667818 - DNA, 15 bp, Homo sapiens
tgcttctcgggtgag

SEQ ID NO: 667819 - DNA, 15 bp, Homo sapiens
gcttctcgggtgagg

SEQ ID NO: 667820 - DNA, 15 bp, Homo sapiens
cttctcgggtgaggg

SEQ ID NO: 667821 - DNA, 15 bp, Homo sapiens
ttctcgggtgagggg

SEQ ID NO: 667822 - DNA, 15 bp, Homo sapiens
tctcgggtgagggga

SEQ ID NO: 667823 - DNA, 15 bp, Homo sapiens
ctcgggtgaggggat

SEQ ID NO: 667824 - DNA, 15 bp, Homo sapiens
tcgggtgaggggatg

SEQ ID NO: 667825 - DNA, 15 bp, Homo sapiens
cgggtgaggggatgc

SEQ ID NO: 667826 - DNA, 15 bp, Homo sapiens
gggtgaggggatgct

SEQ ID NO: 667827 - DNA, 15 bp, Homo sapiens
ggtgaggggatgctt

SEQ ID NO: 667828 - DNA, 15 bp, Homo sapiens
gtgaggggatgcttc

SEQ ID NO: 667829 - DNA, 15 bp, Homo sapiens
tgaggggatgcttcc

SEQ ID NO: 667830 - DNA, 15 bp, Homo sapiens
gaggggatgcttccc

SEQ ID NO: 667831 - DNA, 15 bp, Homo sapiens
aggggatgcttcccc

SEQ ID NO: 667832 - DNA, 15 bp, Homo sapiens
ggggatgcttccccc

SEQ ID NO: 667833 - DNA, 15 bp, Homo sapiens
gggatgcttccccct

SEQ ID NO: 667834 - DNA, 15 bp, Homo sapiens
ggatgcttccccctg

SEQ ID NO: 667835 - DNA, 15 bp, Homo sapiens
gatgcttccccctgc

SEQ ID NO: 667836 - DNA, 15 bp, Homo sapiens
atgcttccccctgct

SEQ ID NO: 667837 - DNA, 15 bp, Homo sapiens
tgcttccccctgctt

SEQ ID NO: 667838 - DNA, 15 bp, Homo sapiens
gcttccccctgcttt

SEQ ID NO: 667839 - DNA, 15 bp, Homo sapiens
cttccccctgctttg

SEQ ID NO: 667840 - DNA, 15 bp, Homo sapiens
ttccccctgctttgg

SEQ ID NO: 667841 - DNA, 15 bp, Homo sapiens
tccccctgctttggc

SEQ ID NO: 667842 - DNA, 15 bp, Homo sapiens
ccccctgctttggct

SEQ ID NO: 667843 - DNA, 15 bp, Homo sapiens
cccctgctttggctc

SEQ ID NO: 667844 - DNA, 15 bp, Homo sapiens
ccctgctttggctca

SEQ ID NO: 667845 - DNA, 15 bp, Homo sapiens
cctgctttggctcat

SEQ ID NO: 667846 - DNA, 15 bp, Homo sapiens
ctgctttggctcatg

SEQ ID NO: 667847 - DNA, 15 bp, Homo sapiens
tgctttggctcatgc

SEQ ID NO: 667848 - DNA, 15 bp, Homo sapiens
gctttggctcatgct

SEQ ID NO: 667849 - DNA, 15 bp, Homo sapiens
ctttggctcatgctc

SEQ ID NO: 667850 - DNA, 15 bp, Homo sapiens
tttggctcatgctcg

SEQ ID NO: 667851 - DNA, 15 bp, Homo sapiens
ttggctcatgctcgg

SEQ ID NO: 667852 - DNA, 15 bp, Homo sapiens
tggctcatgctcggt

SEQ ID NO: 667853 - DNA, 15 bp, Homo sapiens
ggctcatgctcggtg

SEQ ID NO: 667854 - DNA, 15 bp, Homo sapiens
gctcatgctcggtgc

SEQ ID NO: 667855 - DNA, 15 bp, Homo sapiens
ctcatgctcggtgcg

SEQ ID NO: 667856 - DNA, 15 bp, Homo sapiens
tcatgctcggtgcgc

SEQ ID NO: 667857 - DNA, 15 bp, Homo sapiens
catgctcggtgcgct

SEQ ID NO: 667858 - DNA, 15 bp, Homo sapiens
atgctcggtgcgctg

SEQ ID NO: 667859 - DNA, 15 bp, Homo sapiens
tgctcggtgcgctgc

SEQ ID NO: 667860 - DNA, 15 bp, Homo sapiens
gctcggtgcgctgca

SEQ ID NO: 667861 - DNA, 15 bp, Homo sapiens
ctcggtgcgctgcac

SEQ ID NO: 667862 - DNA, 15 bp, Homo sapiens
tcggtgcgctgcacc

SEQ ID NO: 667863 - DNA, 15 bp, Homo sapiens
cggtgcgctgcacct

SEQ ID NO: 667864 - DNA, 15 bp, Homo sapiens
ggtgcgctgcaccta

SEQ ID NO: 667865 - DNA, 15 bp, Homo sapiens
gtgcgctgcacctac

SEQ ID NO: 667866 - DNA, 15 bp, Homo sapiens
tgcgctgcacctact

SEQ ID NO: 667867 - DNA, 15 bp, Homo sapiens
gcgctgcacctactg

SEQ ID NO: 667868 - DNA, 15 bp, Homo sapiens
cgctgcacctactgt

SEQ ID NO: 667869 - DNA, 15 bp, Homo sapiens
gctgcacctactgtc

SEQ ID NO: 667870 - DNA, 15 bp, Homo sapiens
ctgcacctactgtcc

SEQ ID NO: 667871 - DNA, 15 bp, Homo sapiens
tgcacctactgtcct

SEQ ID NO: 667872 - DNA, 15 bp, Homo sapiens
gcacctactgtcctg

SEQ ID NO: 667873 - DNA, 15 bp, Homo sapiens
cacctactgtcctgc

SEQ ID NO: 667874 - DNA, 15 bp, Homo sapiens
acctactgtcctgca

SEQ ID NO: 667875 - DNA, 15 bp, Homo sapiens
cctactgtcctgcac

SEQ ID NO: 667876 - DNA, 15 bp, Homo sapiens
ctactgtcctgcacc

SEQ ID NO: 667877 - DNA, 15 bp, Homo sapiens
tactgtcctgcaccc

SEQ ID NO: 667878 - DNA, 15 bp, Homo sapiens
actgtcctgcaccca

SEQ ID NO: 667879 - DNA, 15 bp, Homo sapiens
ctgtcctgcacccac

SEQ ID NO: 667880 - DNA, 15 bp, Homo sapiens
tgtcctgcacccact

SEQ ID NO: 667881 - DNA, 15 bp, Homo sapiens
gtcctgcacccactg

SEQ ID NO: 667882 - DNA, 15 bp, Homo sapiens
tcctgcacccactgt

SEQ ID NO: 667883 - DNA, 15 bp, Homo sapiens
cctgcacccactgtc

SEQ ID NO: 667884 - DNA, 15 bp, Homo sapiens
ctgcacccactgtcc

SEQ ID NO: 667885 - DNA, 15 bp, Homo sapiens
tgcacccactgtccg

SEQ ID NO: 667886 - DNA, 15 bp, Homo sapiens
gcacccactgtccga

SEQ ID NO: 667887 - DNA, 15 bp, Homo sapiens
cacccactgtccgac

SEQ ID NO: 667888 - DNA, 15 bp, Homo sapiens
acccactgtccgaca

SEQ ID NO: 667889 - DNA, 15 bp, Homo sapiens
cccactgtccgacaa

SEQ ID NO: 667890 - DNA, 15 bp, Homo sapiens
ccactgtccgacaag

SEQ ID NO: 667891 - DNA, 15 bp, Homo sapiens
cactgtccgacaagc

SEQ ID NO: 667892 - DNA, 15 bp, Homo sapiens
actgtccgacaagcc

SEQ ID NO: 667893 - DNA, 15 bp, Homo sapiens
ctgtccgacaagccg

SEQ ID NO: 667894 - DNA, 15 bp, Homo sapiens
tgtccgacaagccgc

SEQ ID NO: 667895 - DNA, 15 bp, Homo sapiens
gtccgacaagccgca

SEQ ID NO: 667896 - DNA, 15 bp, Homo sapiens
tccgacaagccgcag

SEQ ID NO: 667897 - DNA, 15 bp, Homo sapiens
ccgacaagccgcagt

SEQ ID NO: 667898 - DNA, 15 bp, Homo sapiens
cgacaagccgcagtg

SEQ ID NO: 667899 - DNA, 15 bp, Homo sapiens
gacaagccgcagtga

SEQ ID NO: 667900 - DNA, 15 bp, Homo sapiens
acaagccgcagtgag

SEQ ID NO: 667901 - DNA, 15 bp, Homo sapiens
caagccgcagtgaga

SEQ ID NO: 667902 - DNA, 15 bp, Homo sapiens
aagccgcagtgagat

SEQ ID NO: 667903 - DNA, 15 bp, Homo sapiens
agccgcagtgagatg

SEQ ID NO: 667904 - DNA, 15 bp, Homo sapiens
gccgcagtgagatga

SEQ ID NO: 667905 - DNA, 15 bp, Homo sapiens
ccgcagtgagatgaa

SEQ ID NO: 667906 - DNA, 15 bp, Homo sapiens
cgcagtgagatgaac

SEQ ID NO: 667907 - DNA, 15 bp, Homo sapiens
gcagtgagatgaacc

SEQ ID NO: 667908 - DNA, 15 bp, Homo sapiens
cagtgagatgaacct

SEQ ID NO: 667909 - DNA, 15 bp, Homo sapiens
agtgagatgaacctg

SEQ ID NO: 667910 - DNA, 15 bp, Homo sapiens
gtgagatgaacctgg

SEQ ID NO: 667911 - DNA, 15 bp, Homo sapiens
tgagatgaacctggg

SEQ ID NO: 667912 - DNA, 15 bp, Homo sapiens
gagatgaacctgggg

SEQ ID NO: 667913 - DNA, 15 bp, Homo sapiens
agatgaacctggggc

SEQ ID NO: 667914 - DNA, 15 bp, Homo sapiens
gatgaacctggggcc

SEQ ID NO: 667915 - DNA, 15 bp, Homo sapiens
atgaacctggggcct

SEQ ID NO: 667916 - DNA, 15 bp, Homo sapiens
tgaacctggggcctc

SEQ ID NO: 667917 - DNA, 15 bp, Homo sapiens
gaacctggggcctca

SEQ ID NO: 667918 - DNA, 15 bp, Homo sapiens
aacctggggcctcag

SEQ ID NO: 667919 - DNA, 15 bp, Homo sapiens
acctggggcctcagt

SEQ ID NO: 667920 - DNA, 15 bp, Homo sapiens
cctggggcctcagta

SEQ ID NO: 667921 - DNA, 15 bp, Homo sapiens
ctggggcctcagtag

SEQ ID NO: 667922 - DNA, 15 bp, Homo sapiens
tggggcctcagtagg

SEQ ID NO: 667923 - DNA, 15 bp, Homo sapiens
ggggcctcagtagga

SEQ ID NO: 667924 - DNA, 15 bp, Homo sapiens
gggcctcagtaggaa

SEQ ID NO: 667925 - DNA, 15 bp, Homo sapiens
ggcctcagtaggaaa

SEQ ID NO: 667926 - DNA, 15 bp, Homo sapiens
gcctcagtaggaaat

SEQ ID NO: 667927 - DNA, 15 bp, Homo sapiens
cctcagtaggaaatg

SEQ ID NO: 667928 - DNA, 15 bp, Homo sapiens
ctcagtaggaaatgc

SEQ ID NO: 667929 - DNA, 15 bp, Homo sapiens
tcagtaggaaatgca

SEQ ID NO: 667930 - DNA, 15 bp, Homo sapiens
cagtaggaaatgcag

SEQ ID NO: 667931 - DNA, 15 bp, Homo sapiens
agtaggaaatgcaga

SEQ ID NO: 667932 - DNA, 15 bp, Homo sapiens
gtaggaaatgcagaa

SEQ ID NO: 667933 - DNA, 15 bp, Homo sapiens
taggaaatgcagaaa

SEQ ID NO: 667934 - DNA, 15 bp, Homo sapiens
aggaaatgcagaaat

SEQ ID NO: 667935 - DNA, 15 bp, Homo sapiens
ggaaatgcagaaatc

SEQ ID NO: 667936 - DNA, 15 bp, Homo sapiens
gaaatgcagaaatca

SEQ ID NO: 667937 - DNA, 15 bp, Homo sapiens
aaatgcagaaatcac

SEQ ID NO: 667938 - DNA, 15 bp, Homo sapiens
aatgcagaaatcacc

SEQ ID NO: 667939 - DNA, 15 bp, Homo sapiens
atgcagaaatcacct

SEQ ID NO: 667940 - DNA, 15 bp, Homo sapiens
tgcagaaatcacctg

SEQ ID NO: 667941 - DNA, 15 bp, Homo sapiens
gcagaaatcacctgt

SEQ ID NO: 667942 - DNA, 15 bp, Homo sapiens
cagaaatcacctgtt

SEQ ID NO: 667943 - DNA, 15 bp, Homo sapiens
agaaatcacctgtta

SEQ ID NO: 667944 - DNA, 15 bp, Homo sapiens
gaaatcacctgttat

SEQ ID NO: 667945 - DNA, 15 bp, Homo sapiens
aaatcacctgttatc

SEQ ID NO: 667946 - DNA, 15 bp, Homo sapiens
aatcacctgttatct

SEQ ID NO: 667947 - DNA, 15 bp, Homo sapiens
atcacctgttatctg

SEQ ID NO: 667948 - DNA, 15 bp, Homo sapiens
tcacctgttatctgt

SEQ ID NO: 667949 - DNA, 15 bp, Homo sapiens
cacctgttatctgtg

SEQ ID NO: 667950 - DNA, 15 bp, Homo sapiens
acctgttatctgtgt

SEQ ID NO: 667951 - DNA, 15 bp, Homo sapiens
cctgttatctgtgtc

SEQ ID NO: 667952 - DNA, 15 bp, Homo sapiens
ctgttatctgtgtca

SEQ ID NO: 667953 - DNA, 15 bp, Homo sapiens
tgttatctgtgtcac

SEQ ID NO: 667954 - DNA, 15 bp, Homo sapiens
gttatctgtgtcact

SEQ ID NO: 667955 - DNA, 15 bp, Homo sapiens
ttatctgtgtcactt

SEQ ID NO: 667956 - DNA, 15 bp, Homo sapiens
tatctgtgtcacttg

SEQ ID NO: 667957 - DNA, 15 bp, Homo sapiens
atctgtgtcacttgc

SEQ ID NO: 667958 - DNA, 15 bp, Homo sapiens
tctgtgtcacttgca

SEQ ID NO: 667959 - DNA, 15 bp, Homo sapiens
ctgtgtcacttgcac

SEQ ID NO: 667960 - DNA, 15 bp, Homo sapiens
tgtgtcacttgcact

SEQ ID NO: 667961 - DNA, 15 bp, Homo sapiens
gtgtcacttgcactg

SEQ ID NO: 667962 - DNA, 15 bp, Homo sapiens
tgtcacttgcactgg

SEQ ID NO: 667963 - DNA, 15 bp, Homo sapiens
gtcacttgcactggg

SEQ ID NO: 667964 - DNA, 15 bp, Homo sapiens
tcacttgcactggga

SEQ ID NO: 667965 - DNA, 15 bp, Homo sapiens
cacttgcactgggag

SEQ ID NO: 667966 - DNA, 15 bp, Homo sapiens
acttgcactgggagc

SEQ ID NO: 667967 - DNA, 15 bp, Homo sapiens
cttgcactgggagct

SEQ ID NO: 667968 - DNA, 15 bp, Homo sapiens
ttgcactgggagctg

SEQ ID NO: 667969 - DNA, 15 bp, Homo sapiens
tgcactgggagctgt

SEQ ID NO: 667970 - DNA, 15 bp, Homo sapiens
gcactgggagctgtt

SEQ ID NO: 667971 - DNA, 15 bp, Homo sapiens
cactgggagctgttg

SEQ ID NO: 667972 - DNA, 15 bp, Homo sapiens
actgggagctgttga

SEQ ID NO: 667973 - DNA, 15 bp, Homo sapiens
ctgggagctgttgac

SEQ ID NO: 667974 - DNA, 15 bp, Homo sapiens
tgggagctgttgact

SEQ ID NO: 667975 - DNA, 15 bp, Homo sapiens
gggagctgttgactg

SEQ ID NO: 667976 - DNA, 15 bp, Homo sapiens
ggagctgttgactgg

SEQ ID NO: 667977 - DNA, 15 bp, Homo sapiens
gagctgttgactgga

SEQ ID NO: 667978 - DNA, 15 bp, Homo sapiens
agctgttgactggag

SEQ ID NO: 667979 - DNA, 15 bp, Homo sapiens
gctgttgactggagc

SEQ ID NO: 667980 - DNA, 15 bp, Homo sapiens
ctgttgactggagct

SEQ ID NO: 667981 - DNA, 15 bp, Homo sapiens
tgttgactggagctg

SEQ ID NO: 667982 - DNA, 15 bp, Homo sapiens
gttgactggagctgt

SEQ ID NO: 667983 - DNA, 15 bp, Homo sapiens
ttgactggagctgtt

SEQ ID NO: 667984 - DNA, 15 bp, Homo sapiens
tgactggagctgttc

SEQ ID NO: 667985 - DNA, 15 bp, Homo sapiens
gactggagctgttcc

SEQ ID NO: 667986 - DNA, 15 bp, Homo sapiens
actggagctgttcct

SEQ ID NO: 667987 - DNA, 15 bp, Homo sapiens
ctggagctgttccta

SEQ ID NO: 667988 - DNA, 15 bp, Homo sapiens
tggagctgttcctaa

SEQ ID NO: 667989 - DNA, 15 bp, Homo sapiens
ggagctgttcctaat

SEQ ID NO: 667990 - DNA, 15 bp, Homo sapiens
gagctgttcctaatc

SEQ ID NO: 667991 - DNA, 15 bp, Homo sapiens
agctgttcctaatca

SEQ ID NO: 667992 - DNA, 15 bp, Homo sapiens
gctgttcctaatcag

SEQ ID NO: 667993 - DNA, 15 bp, Homo sapiens
ctgttcctaatcagc

SEQ ID NO: 667994 - DNA, 15 bp, Homo sapiens
tgttcctaatcagct

SEQ ID NO: 667995 - DNA, 15 bp, Homo sapiens
gttcctaatcagcta

SEQ ID NO: 667996 - DNA, 15 bp, Homo sapiens
ttcctaatcagctat

SEQ ID NO: 667997 - DNA, 15 bp, Homo sapiens
tcctaatcagctatc

SEQ ID NO: 667998 - DNA, 15 bp, Homo sapiens
cctaatcagctatct

SEQ ID NO: 667999 - DNA, 15 bp, Homo sapiens
ctaatcagctatctt

SEQ ID NO: 668000 - DNA, 15 bp, Homo sapiens
taatcagctatcttg

SEQ ID NO: 668001 - DNA, 15 bp, Homo sapiens
aatcagctatcttgg

SEQ ID NO: 668002 - DNA, 15 bp, Homo sapiens
atcagctatcttgga

SEQ ID NO: 668003 - DNA, 15 bp, Homo sapiens
tcagctatcttggaa

SEQ ID NO: 668004 - DNA, 15 bp, Homo sapiens
cagctatcttggaac

SEQ ID NO: 668005 - DNA, 15 bp, Homo sapiens
agctatcttggaacc

SEQ ID NO: 668006 - DNA, 15 bp, Homo sapiens
gctatcttggaaccg

SEQ ID NO: 668007 - DNA, 15 bp, Homo sapiens
ctatcttggaaccgc

SEQ ID NO: 668008 - DNA, 15 bp, Homo sapiens
tatcttggaaccgcc

SEQ ID NO: 668009 - DNA, 15 bp, Homo sapiens
atcttggaaccgcct

SEQ ID NO: 668010 - DNA, 15 bp, Homo sapiens
tcttggaaccgcctc

SEQ ID NO: 668011 - DNA, 15 bp, Homo sapiens
cttggaaccgcctct

SEQ ID NO: 668012 - DNA, 15 bp, Homo sapiens
ttggaaccgcctctg

SEQ ID NO: 668013 - DNA, 15 bp, Homo sapiens
tggaaccgcctctga

SEQ ID NO: 668014 - DNA, 15 bp, Homo sapiens
ggaaccgcctctgaa

SEQ ID NO: 668015 - DNA, 15 bp, Homo sapiens
gaaccgcctctgaaa

SEQ ID NO: 668016 - DNA, 15 bp, Homo sapiens
aaccgcctctgaaag

SEQ ID NO: 668017 - DNA, 15 bp, Homo sapiens
accgcctctgaaagc

SEQ ID NO: 668018 - DNA, 15 bp, Homo sapiens
ccgcctctgaaagct

SEQ ID NO: 668019 - DNA, 15 bp, Homo sapiens
cgcctctgaaagctg

SEQ ID NO: 668020 - DNA, 15 bp, Homo sapiens
gcctctgaaagctgg

SEQ ID NO: 668021 - DNA, 15 bp, Homo sapiens
cctctgaaagctggt

SEQ ID NO: 668022 - DNA, 15 bp, Homo sapiens
ctctgaaagctggtt

SEQ ID NO: 668023 - DNA, 15 bp, Homo sapiens
tctgaaagctggttt

SEQ ID NO: 668024 - DNA, 15 bp, Homo sapiens
ctgaaagctggtttt

SEQ ID NO: 668025 - DNA, 15 bp, Homo sapiens
gaaagctggttttaa

SEQ ID NO: 668026 - DNA, 15 bp, Homo sapiens
aaagctggttttaat

SEQ ID NO: 668027 - DNA, 15 bp, Homo sapiens
aagctggttttaatg

SEQ ID NO: 668028 - DNA, 15 bp, Homo sapiens
agctggttttaatgc

SEQ ID NO: 668029 - DNA, 15 bp, Homo sapiens
gctggttttaatgca

SEQ ID NO: 668030 - DNA, 15 bp, Homo sapiens
ctggttttaatgcat

SEQ ID NO: 668031 - DNA, 15 bp, Homo sapiens
tggttttaatgcata

SEQ ID NO: 668032 - DNA, 15 bp, Homo sapiens
ggttttaatgcatag

SEQ ID NO: 668033 - DNA, 15 bp, Homo sapiens
gttttaatgcatagg

SEQ ID NO: 668034 - DNA, 15 bp, Homo sapiens
ttttaatgcataggt

SEQ ID NO: 668035 - DNA, 15 bp, Homo sapiens
tttaatgcataggtt

SEQ ID NO: 668036 - DNA, 15 bp, Homo sapiens
ttaatgcataggttt

SEQ ID NO: 668037 - DNA, 15 bp, Homo sapiens
taatgcataggtttt

SEQ ID NO: 668038 - DNA, 15 bp, Homo sapiens
aatgcataggtttta

SEQ ID NO: 668039 - DNA, 15 bp, Homo sapiens
atgcataggttttaa

SEQ ID NO: 668040 - DNA, 15 bp, Homo sapiens
tgcataggttttaaa

SEQ ID NO: 668041 - DNA, 15 bp, Homo sapiens
gcataggttttaaat

SEQ ID NO: 668042 - DNA, 15 bp, Homo sapiens
cataggttttaaatc

SEQ ID NO: 668043 - DNA, 15 bp, Homo sapiens
ataggttttaaatct

SEQ ID NO: 668044 - DNA, 15 bp, Homo sapiens
taggttttaaatctg

SEQ ID NO: 668045 - DNA, 15 bp, Homo sapiens
aggttttaaatctgc

SEQ ID NO: 668046 - DNA, 15 bp, Homo sapiens
ggttttaaatctgcc

SEQ ID NO: 668047 - DNA, 15 bp, Homo sapiens
gttttaaatctgcct

SEQ ID NO: 668048 - DNA, 15 bp, Homo sapiens
ttttaaatctgcctc

SEQ ID NO: 668049 - DNA, 15 bp, Homo sapiens
tttaaatctgcctcc

SEQ ID NO: 668050 - DNA, 15 bp, Homo sapiens
ttaaatctgcctcct

SEQ ID NO: 668051 - DNA, 15 bp, Homo sapiens
taaatctgcctccta

SEQ ID NO: 668052 - DNA, 15 bp, Homo sapiens
aaatctgcctcctac

SEQ ID NO: 668053 - DNA, 15 bp, Homo sapiens
aatctgcctcctaca

SEQ ID NO: 668054 - DNA, 15 bp, Homo sapiens
atctgcctcctacag

SEQ ID NO: 668055 - DNA, 15 bp, Homo sapiens
tctgcctcctacaga

SEQ ID NO: 668056 - DNA, 15 bp, Homo sapiens
ctgcctcctacagaa

SEQ ID NO: 668057 - DNA, 15 bp, Homo sapiens
tgcctcctacagaaa

SEQ ID NO: 668058 - DNA, 15 bp, Homo sapiens
gcctcctacagaaaa

SEQ ID NO: 668059 - DNA, 15 bp, Homo sapiens
cctcctacagaaaat

SEQ ID NO: 668060 - DNA, 15 bp, Homo sapiens
ctcctacagaaaata

SEQ ID NO: 668061 - DNA, 15 bp, Homo sapiens
tcctacagaaaatac

SEQ ID NO: 668062 - DNA, 15 bp, Homo sapiens
cctacagaaaataca

SEQ ID NO: 668063 - DNA, 15 bp, Homo sapiens
ctacagaaaatacaa

SEQ ID NO: 668064 - DNA, 15 bp, Homo sapiens
tacagaaaatacaat

SEQ ID NO: 668065 - DNA, 15 bp, Homo sapiens
acagaaaatacaatc

SEQ ID NO: 668066 - DNA, 15 bp, Homo sapiens
cagaaaatacaatcc

SEQ ID NO: 668067 - DNA, 15 bp, Homo sapiens
agaaaatacaatcct

SEQ ID NO: 668068 - DNA, 15 bp, Homo sapiens
gaaaatacaatccta

SEQ ID NO: 668069 - DNA, 15 bp, Homo sapiens
aaaatacaatcctac

SEQ ID NO: 668070 - DNA, 15 bp, Homo sapiens
aaatacaatcctaca

SEQ ID NO: 668071 - DNA, 15 bp, Homo sapiens
aatacaatcctacaa

SEQ ID NO: 668072 - DNA, 15 bp, Homo sapiens
atacaatcctacaaa

SEQ ID NO: 668073 - DNA, 15 bp, Homo sapiens
tacaatcctacaaac

SEQ ID NO: 668074 - DNA, 15 bp, Homo sapiens
acaatcctacaaacc

SEQ ID NO: 668075 - DNA, 15 bp, Homo sapiens
caatcctacaaacct

SEQ ID NO: 668076 - DNA, 15 bp, Homo sapiens
aatcctacaaacctt

SEQ ID NO: 668077 - DNA, 15 bp, Homo sapiens
atcctacaaacctta

SEQ ID NO: 668078 - DNA, 15 bp, Homo sapiens
tcctacaaaccttaa

SEQ ID NO: 668079 - DNA, 15 bp, Homo sapiens
cctacaaaccttaat

SEQ ID NO: 668080 - DNA, 15 bp, Homo sapiens
ctacaaaccttaatg

SEQ ID NO: 668081 - DNA, 15 bp, Homo sapiens
tacaaaccttaatgt

SEQ ID NO: 668082 - DNA, 15 bp, Homo sapiens
acaaaccttaatgta

SEQ ID NO: 668083 - DNA, 15 bp, Homo sapiens
caaaccttaatgtag

SEQ ID NO: 668084 - DNA, 15 bp, Homo sapiens
aaaccttaatgtagg

SEQ ID NO: 668085 - DNA, 15 bp, Homo sapiens
aaccttaatgtagga

SEQ ID NO: 668086 - DNA, 15 bp, Homo sapiens
accttaatgtaggaa

SEQ ID NO: 668087 - DNA, 15 bp, Homo sapiens
ccttaatgtaggaac

SEQ ID NO: 668088 - DNA, 15 bp, Homo sapiens
cttaatgtaggaaca

SEQ ID NO: 668089 - DNA, 15 bp, Homo sapiens
ttaatgtaggaacag

SEQ ID NO: 668090 - DNA, 15 bp, Homo sapiens
taatgtaggaacaga

SEQ ID NO: 668091 - DNA, 15 bp, Homo sapiens
aatgtaggaacagaa

SEQ ID NO: 668092 - DNA, 15 bp, Homo sapiens
atgtaggaacagaaa

SEQ ID NO: 668093 - DNA, 15 bp, Homo sapiens
tgtaggaacagaaat

SEQ ID NO: 668094 - DNA, 15 bp, Homo sapiens
gtaggaacagaaatt

SEQ ID NO: 668095 - DNA, 15 bp, Homo sapiens
taggaacagaaattt

SEQ ID NO: 668096 - DNA, 15 bp, Homo sapiens
aggaacagaaatttt

SEQ ID NO: 668097 - DNA, 15 bp, Homo sapiens
ggaacagaaattttc

SEQ ID NO: 668098 - DNA, 15 bp, Homo sapiens
gaacagaaattttca

SEQ ID NO: 668099 - DNA, 15 bp, Homo sapiens
aacagaaattttcat

SEQ ID NO: 668100 - DNA, 15 bp, Homo sapiens
acagaaattttcatt

SEQ ID NO: 668101 - DNA, 15 bp, Homo sapiens
cagaaattttcattt

SEQ ID NO: 668102 - DNA, 15 bp, Homo sapiens
agaaattttcatttg

SEQ ID NO: 668103 - DNA, 15 bp, Homo sapiens
gaaattttcatttga

SEQ ID NO: 668104 - DNA, 15 bp, Homo sapiens
aaattttcatttgaa

SEQ ID NO: 668105 - DNA, 15 bp, Homo sapiens
aattttcatttgaat

SEQ ID NO: 668106 - DNA, 15 bp, Homo sapiens
attttcatttgaatt

SEQ ID NO: 668107 - DNA, 15 bp, Homo sapiens
ttttcatttgaattt

SEQ ID NO: 668108 - DNA, 15 bp, Homo sapiens
tttcatttgaattta

SEQ ID NO: 668109 - DNA, 15 bp, Homo sapiens
ttcatttgaatttag

SEQ ID NO: 668110 - DNA, 15 bp, Homo sapiens
tcatttgaatttaga

SEQ ID NO: 668111 - DNA, 15 bp, Homo sapiens
catttgaatttagaa

SEQ ID NO: 668112 - DNA, 15 bp, Homo sapiens
atttgaatttagaag

SEQ ID NO: 668113 - DNA, 15 bp, Homo sapiens
tttgaatttagaagt

SEQ ID NO: 668114 - DNA, 15 bp, Homo sapiens
ttgaatttagaagtt

SEQ ID NO: 668115 - DNA, 15 bp, Homo sapiens
tgaatttagaagttt

SEQ ID NO: 668116 - DNA, 15 bp, Homo sapiens
gaatttagaagtttt

SEQ ID NO: 668117 - DNA, 15 bp, Homo sapiens
aatttagaagtttta

SEQ ID NO: 668118 - DNA, 15 bp, Homo sapiens
atttagaagttttag

SEQ ID NO: 668119 - DNA, 15 bp, Homo sapiens
tttagaagttttagc

SEQ ID NO: 668120 - DNA, 15 bp, Homo sapiens
ttagaagttttagct

SEQ ID NO: 668121 - DNA, 15 bp, Homo sapiens
tagaagttttagctt

SEQ ID NO: 668122 - DNA, 15 bp, Homo sapiens
agaagttttagctta

SEQ ID NO: 668123 - DNA, 15 bp, Homo sapiens
gaagttttagcttaa

SEQ ID NO: 668124 - DNA, 15 bp, Homo sapiens
aagttttagcttaag

SEQ ID NO: 668125 - DNA, 15 bp, Homo sapiens
agttttagcttaagt

SEQ ID NO: 668126 - DNA, 15 bp, Homo sapiens
gttttagcttaagtt

SEQ ID NO: 668127 - DNA, 15 bp, Homo sapiens
ttttagcttaagtta

SEQ ID NO: 668128 - DNA, 15 bp, Homo sapiens
tttagcttaagttaa

SEQ ID NO: 668129 - DNA, 15 bp, Homo sapiens
ttagcttaagttaaa

SEQ ID NO: 668130 - DNA, 15 bp, Homo sapiens
tagcttaagttaaac

SEQ ID NO: 668131 - DNA, 15 bp, Homo sapiens
agcttaagttaaact

SEQ ID NO: 668132 - DNA, 15 bp, Homo sapiens
gcttaagttaaactt

SEQ ID NO: 668133 - DNA, 15 bp, Homo sapiens
cttaagttaaactta

SEQ ID NO: 668134 - DNA, 15 bp, Homo sapiens
ttaagttaaacttaa

SEQ ID NO: 668135 - DNA, 15 bp, Homo sapiens
taagttaaacttaaa

SEQ ID NO: 668136 - DNA, 15 bp, Homo sapiens
aagttaaacttaaat

SEQ ID NO: 668137 - DNA, 15 bp, Homo sapiens
agttaaacttaaatt

SEQ ID NO: 668138 - DNA, 15 bp, Homo sapiens
gttaaacttaaattt

SEQ ID NO: 668139 - DNA, 15 bp, Homo sapiens
ttaaacttaaattta

SEQ ID NO: 668140 - DNA, 15 bp, Homo sapiens
taaacttaaatttaa

SEQ ID NO: 668141 - DNA, 15 bp, Homo sapiens
aaacttaaatttaat

SEQ ID NO: 668142 - DNA, 15 bp, Homo sapiens
aacttaaatttaata

SEQ ID NO: 668143 - DNA, 15 bp, Homo sapiens
acttaaatttaatat

SEQ ID NO: 668144 - DNA, 15 bp, Homo sapiens
cttaaatttaatatt

SEQ ID NO: 668145 - DNA, 15 bp, Homo sapiens
ttaaatttaatattt

SEQ ID NO: 668146 - DNA, 15 bp, Homo sapiens
taaatttaatattta

SEQ ID NO: 668147 - DNA, 15 bp, Homo sapiens
aaatttaatatttat

SEQ ID NO: 668148 - DNA, 15 bp, Homo sapiens
aatttaatatttatt

SEQ ID NO: 668149 - DNA, 15 bp, Homo sapiens
atttaatatttattt

SEQ ID NO: 668150 - DNA, 15 bp, Homo sapiens
tttaatatttatttt

SEQ ID NO: 668151 - DNA, 15 bp, Homo sapiens
ttaatatttattttc

SEQ ID NO: 668152 - DNA, 15 bp, Homo sapiens
taatatttattttca

SEQ ID NO: 668153 - DNA, 15 bp, Homo sapiens
aatatttattttcac

SEQ ID NO: 668154 - DNA, 15 bp, Homo sapiens
atatttattttcacc

SEQ ID NO: 668155 - DNA, 15 bp, Homo sapiens
tatttattttcacct

SEQ ID NO: 668156 - DNA, 15 bp, Homo sapiens
atttattttcacctc

SEQ ID NO: 668157 - DNA, 15 bp, Homo sapiens
tttattttcacctct

SEQ ID NO: 668158 - DNA, 15 bp, Homo sapiens
ttattttcacctctt

SEQ ID NO: 668159 - DNA, 15 bp, Homo sapiens
tattttcacctctta

SEQ ID NO: 668160 - DNA, 15 bp, Homo sapiens
attttcacctcttac

SEQ ID NO: 668161 - DNA, 15 bp, Homo sapiens
ttttcacctcttact

SEQ ID NO: 668162 - DNA, 15 bp, Homo sapiens
tttcacctcttacta

SEQ ID NO: 668163 - DNA, 15 bp, Homo sapiens
ttcacctcttactag

SEQ ID NO: 668164 - DNA, 15 bp, Homo sapiens
tcacctcttactaga

SEQ ID NO: 668165 - DNA, 15 bp, Homo sapiens
cacctcttactagat

SEQ ID NO: 668166 - DNA, 15 bp, Homo sapiens
acctcttactagata

SEQ ID NO: 668167 - DNA, 15 bp, Homo sapiens
cctcttactagatat

SEQ ID NO: 668168 - DNA, 15 bp, Homo sapiens
ctcttactagatatc

SEQ ID NO: 668169 - DNA, 15 bp, Homo sapiens
tcttactagatatct

SEQ ID NO: 668170 - DNA, 15 bp, Homo sapiens
cttactagatatctt

SEQ ID NO: 668171 - DNA, 15 bp, Homo sapiens
ttactagatatctta

SEQ ID NO: 668172 - DNA, 15 bp, Homo sapiens
tactagatatcttaa

SEQ ID NO: 668173 - DNA, 15 bp, Homo sapiens
actagatatcttaat

SEQ ID NO: 668174 - DNA, 15 bp, Homo sapiens
ctagatatcttaata

SEQ ID NO: 668175 - DNA, 15 bp, Homo sapiens
tagatatcttaatag

SEQ ID NO: 668176 - DNA, 15 bp, Homo sapiens
agatatcttaataga

SEQ ID NO: 668177 - DNA, 15 bp, Homo sapiens
gatatcttaatagat

SEQ ID NO: 668178 - DNA, 15 bp, Homo sapiens
atatcttaatagata

SEQ ID NO: 668179 - DNA, 15 bp, Homo sapiens
tatcttaatagatat

SEQ ID NO: 668180 - DNA, 15 bp, Homo sapiens
atcttaatagatatt

SEQ ID NO: 668181 - DNA, 15 bp, Homo sapiens
tcttaatagatattt

SEQ ID NO: 668182 - DNA, 15 bp, Homo sapiens
cttaatagatatttt

SEQ ID NO: 668183 - DNA, 15 bp, Homo sapiens
ttaatagatattttt

SEQ ID NO: 668184 - DNA, 15 bp, Homo sapiens
taatagatatttttt

SEQ ID NO: 668185 - DNA, 15 bp, Homo sapiens
aatagatattttttg

SEQ ID NO: 668186 - DNA, 15 bp, Homo sapiens
atagatattttttgt

SEQ ID NO: 668187 - DNA, 15 bp, Homo sapiens
tagatattttttgtc

SEQ ID NO: 668188 - DNA, 15 bp, Homo sapiens
agatattttttgtcc

SEQ ID NO: 668189 - DNA, 15 bp, Homo sapiens
gatattttttgtcct

SEQ ID NO: 668190 - DNA, 15 bp, Homo sapiens
atattttttgtcctg

SEQ ID NO: 668191 - DNA, 15 bp, Homo sapiens
tattttttgtcctga

SEQ ID NO: 668192 - DNA, 15 bp, Homo sapiens
attttttgtcctgaa

SEQ ID NO: 668193 - DNA, 15 bp, Homo sapiens
ttttttgtcctgaaa

SEQ ID NO: 668194 - DNA, 15 bp, Homo sapiens
tttttgtcctgaaag

SEQ ID NO: 668195 - DNA, 15 bp, Homo sapiens
ttttgtcctgaaaga

SEQ ID NO: 668196 - DNA, 15 bp, Homo sapiens
tttgtcctgaaagag

SEQ ID NO: 668197 - DNA, 15 bp, Homo sapiens
ttgtcctgaaagagg

SEQ ID NO: 668198 - DNA, 15 bp, Homo sapiens
tgtcctgaaagaggt

SEQ ID NO: 668199 - DNA, 15 bp, Homo sapiens
gtcctgaaagaggtt

SEQ ID NO: 668200 - DNA, 15 bp, Homo sapiens
tcctgaaagaggttg

SEQ ID NO: 668201 - DNA, 15 bp, Homo sapiens
cctgaaagaggttga

SEQ ID NO: 668202 - DNA, 15 bp, Homo sapiens
ctgaaagaggttgag

SEQ ID NO: 668203 - DNA, 15 bp, Homo sapiens
tgaaagaggttgagg

SEQ ID NO: 668204 - DNA, 15 bp, Homo sapiens
gaaagaggttgagga

SEQ ID NO: 668205 - DNA, 15 bp, Homo sapiens
aaagaggttgaggat

SEQ ID NO: 668206 - DNA, 15 bp, Homo sapiens
aagaggttgaggata

SEQ ID NO: 668207 - DNA, 15 bp, Homo sapiens
agaggttgaggataa

SEQ ID NO: 668208 - DNA, 15 bp, Homo sapiens
gaggttgaggataaa

SEQ ID NO: 668209 - DNA, 15 bp, Homo sapiens
aggttgaggataaaa

SEQ ID NO: 668210 - DNA, 15 bp, Homo sapiens
ggttgaggataaaac

SEQ ID NO: 668211 - DNA, 15 bp, Homo sapiens
gttgaggataaaact

SEQ ID NO: 668212 - DNA, 15 bp, Homo sapiens
ttgaggataaaactg

SEQ ID NO: 668213 - DNA, 15 bp, Homo sapiens
tgaggataaaactgt

SEQ ID NO: 668214 - DNA, 15 bp, Homo sapiens
gaggataaaactgtg

SEQ ID NO: 668215 - DNA, 15 bp, Homo sapiens
aggataaaactgtgc

SEQ ID NO: 668216 - DNA, 15 bp, Homo sapiens
ggataaaactgtgct

SEQ ID NO: 668217 - DNA, 15 bp, Homo sapiens
gataaaactgtgctc

SEQ ID NO: 668218 - DNA, 15 bp, Homo sapiens
ataaaactgtgctct

SEQ ID NO: 668219 - DNA, 15 bp, Homo sapiens
taaaactgtgctcta

SEQ ID NO: 668220 - DNA, 15 bp, Homo sapiens
aaaactgtgctctaa

SEQ ID NO: 668221 - DNA, 15 bp, Homo sapiens
aaactgtgctctaac

SEQ ID NO: 668222 - DNA, 15 bp, Homo sapiens
aactgtgctctaaca

SEQ ID NO: 668223 - DNA, 15 bp, Homo sapiens
actgtgctctaacag

SEQ ID NO: 668224 - DNA, 15 bp, Homo sapiens
ctgtgctctaacagg

SEQ ID NO: 668225 - DNA, 15 bp, Homo sapiens
tgtgctctaacagga

SEQ ID NO: 668226 - DNA, 15 bp, Homo sapiens
gtgctctaacaggag

SEQ ID NO: 668227 - DNA, 15 bp, Homo sapiens
tgctctaacaggagt

SEQ ID NO: 668228 - DNA, 15 bp, Homo sapiens
gctctaacaggagtt

SEQ ID NO: 668229 - DNA, 15 bp, Homo sapiens
ctctaacaggagtta

SEQ ID NO: 668230 - DNA, 15 bp, Homo sapiens
tctaacaggagttag

SEQ ID NO: 668231 - DNA, 15 bp, Homo sapiens
ctaacaggagttaga

SEQ ID NO: 668232 - DNA, 15 bp, Homo sapiens
taacaggagttagaa

SEQ ID NO: 668233 - DNA, 15 bp, Homo sapiens
aacaggagttagaaa

SEQ ID NO: 668234 - DNA, 15 bp, Homo sapiens
acaggagttagaaat

SEQ ID NO: 668235 - DNA, 15 bp, Homo sapiens
caggagttagaaata

SEQ ID NO: 668236 - DNA, 15 bp, Homo sapiens
aggagttagaaatat

SEQ ID NO: 668237 - DNA, 15 bp, Homo sapiens
ggagttagaaatata

SEQ ID NO: 668238 - DNA, 15 bp, Homo sapiens
gagttagaaatatat

SEQ ID NO: 668239 - DNA, 15 bp, Homo sapiens
agttagaaatatatt

SEQ ID NO: 668240 - DNA, 15 bp, Homo sapiens
gttagaaatatatta

SEQ ID NO: 668241 - DNA, 15 bp, Homo sapiens
ttagaaatatattat

SEQ ID NO: 668242 - DNA, 15 bp, Homo sapiens
tagaaatatattatt

SEQ ID NO: 668243 - DNA, 15 bp, Homo sapiens
agaaatatattattt

SEQ ID NO: 668244 - DNA, 15 bp, Homo sapiens
gaaatatattatttt

SEQ ID NO: 668245 - DNA, 15 bp, Homo sapiens
aaatatattattttc

SEQ ID NO: 668246 - DNA, 15 bp, Homo sapiens
aatatattattttct

SEQ ID NO: 668247 - DNA, 15 bp, Homo sapiens
atatattattttctg

SEQ ID NO: 668248 - DNA, 15 bp, Homo sapiens
tatattattttctgg

SEQ ID NO: 668249 - DNA, 15 bp, Homo sapiens
atattattttctgga

SEQ ID NO: 668250 - DNA, 15 bp, Homo sapiens
tattattttctggaa

SEQ ID NO: 668251 - DNA, 15 bp, Homo sapiens
attattttctggaaa

SEQ ID NO: 668252 - DNA, 15 bp, Homo sapiens
ttattttctggaaaa

SEQ ID NO: 668253 - DNA, 15 bp, Homo sapiens
tattttctggaaaat

SEQ ID NO: 668254 - DNA, 15 bp, Homo sapiens
attttctggaaaatc

SEQ ID NO: 668255 - DNA, 15 bp, Homo sapiens
ttttctggaaaatca

SEQ ID NO: 668256 - DNA, 15 bp, Homo sapiens
tttctggaaaatcac

SEQ ID NO: 668257 - DNA, 15 bp, Homo sapiens
ttctggaaaatcact

SEQ ID NO: 668258 - DNA, 15 bp, Homo sapiens
tctggaaaatcactg

SEQ ID NO: 668259 - DNA, 15 bp, Homo sapiens
ctggaaaatcactga

SEQ ID NO: 668260 - DNA, 15 bp, Homo sapiens
tggaaaatcactgaa

SEQ ID NO: 668261 - DNA, 15 bp, Homo sapiens
ggaaaatcactgaaa

SEQ ID NO: 668262 - DNA, 15 bp, Homo sapiens
gaaaatcactgaaaa

SEQ ID NO: 668263 - DNA, 15 bp, Homo sapiens
aaaatcactgaaaac

SEQ ID NO: 668264 - DNA, 15 bp, Homo sapiens
aaatcactgaaaaca

SEQ ID NO: 668265 - DNA, 15 bp, Homo sapiens
aatcactgaaaacaa

SEQ ID NO: 668266 - DNA, 15 bp, Homo sapiens
atcactgaaaacaaa

SEQ ID NO: 668267 - DNA, 15 bp, Homo sapiens
tcactgaaaacaaac

SEQ ID NO: 668268 - DNA, 15 bp, Homo sapiens
cactgaaaacaaacc

SEQ ID NO: 668269 - DNA, 15 bp, Homo sapiens
actgaaaacaaacct

SEQ ID NO: 668270 - DNA, 15 bp, Homo sapiens
ctgaaaacaaaccta

SEQ ID NO: 668271 - DNA, 15 bp, Homo sapiens
tgaaaacaaacctag

SEQ ID NO: 668272 - DNA, 15 bp, Homo sapiens
gaaaacaaacctagg

SEQ ID NO: 668273 - DNA, 15 bp, Homo sapiens
aaaacaaacctaggt

SEQ ID NO: 668274 - DNA, 15 bp, Homo sapiens
aaacaaacctaggtt

SEQ ID NO: 668275 - DNA, 15 bp, Homo sapiens
aacaaacctaggttt

SEQ ID NO: 668276 - DNA, 15 bp, Homo sapiens
acaaacctaggttta

SEQ ID NO: 668277 - DNA, 15 bp, Homo sapiens
caaacctaggtttac

SEQ ID NO: 668278 - DNA, 15 bp, Homo sapiens
aaacctaggtttact

SEQ ID NO: 668279 - DNA, 15 bp, Homo sapiens
aacctaggtttactt

SEQ ID NO: 668280 - DNA, 15 bp, Homo sapiens
acctaggtttactta

SEQ ID NO: 668281 - DNA, 15 bp, Homo sapiens
cctaggtttacttag

SEQ ID NO: 668282 - DNA, 15 bp, Homo sapiens
ctaggtttacttagg

SEQ ID NO: 668283 - DNA, 15 bp, Homo sapiens
taggtttacttagga

SEQ ID NO: 668284 - DNA, 15 bp, Homo sapiens
aggtttacttaggat

SEQ ID NO: 668285 - DNA, 15 bp, Homo sapiens
ggtttacttaggatg

SEQ ID NO: 668286 - DNA, 15 bp, Homo sapiens
gtttacttaggatgt

SEQ ID NO: 668287 - DNA, 15 bp, Homo sapiens
tttacttaggatgtt

SEQ ID NO: 668288 - DNA, 15 bp, Homo sapiens
ttacttaggatgttg

SEQ ID NO: 668289 - DNA, 15 bp, Homo sapiens
tacttaggatgttgc

SEQ ID NO: 668290 - DNA, 15 bp, Homo sapiens
acttaggatgttgct

SEQ ID NO: 668291 - DNA, 15 bp, Homo sapiens
cttaggatgttgctg

SEQ ID NO: 668292 - DNA, 15 bp, Homo sapiens
ttaggatgttgctgt

SEQ ID NO: 668293 - DNA, 15 bp, Homo sapiens
taggatgttgctgtg

SEQ ID NO: 668294 - DNA, 15 bp, Homo sapiens
aggatgttgctgtga

SEQ ID NO: 668295 - DNA, 15 bp, Homo sapiens
ggatgttgctgtgaa

SEQ ID NO: 668296 - DNA, 15 bp, Homo sapiens
gatgttgctgtgaaa

SEQ ID NO: 668297 - DNA, 15 bp, Homo sapiens
atgttgctgtgaaat

SEQ ID NO: 668298 - DNA, 15 bp, Homo sapiens
tgttgctgtgaaatt

SEQ ID NO: 668299 - DNA, 15 bp, Homo sapiens
gttgctgtgaaattc

SEQ ID NO: 668300 - DNA, 15 bp, Homo sapiens
ttgctgtgaaattca

SEQ ID NO: 668301 - DNA, 15 bp, Homo sapiens
tgctgtgaaattcac

SEQ ID NO: 668302 - DNA, 15 bp, Homo sapiens
gctgtgaaattcacc

SEQ ID NO: 668303 - DNA, 15 bp, Homo sapiens
ctgtgaaattcacct

SEQ ID NO: 668304 - DNA, 15 bp, Homo sapiens
tgtgaaattcacctc

SEQ ID NO: 668305 - DNA, 15 bp, Homo sapiens
gtgaaattcacctcg

SEQ ID NO: 668306 - DNA, 15 bp, Homo sapiens
tgaaattcacctcgt

SEQ ID NO: 668307 - DNA, 15 bp, Homo sapiens
gaaattcacctcgtt

SEQ ID NO: 668308 - DNA, 15 bp, Homo sapiens
aaattcacctcgttt

SEQ ID NO: 668309 - DNA, 15 bp, Homo sapiens
aattcacctcgtttt

SEQ ID NO: 668310 - DNA, 15 bp, Homo sapiens
attcacctcgtttta

SEQ ID NO: 668311 - DNA, 15 bp, Homo sapiens
ttcacctcgttttaa

SEQ ID NO: 668312 - DNA, 15 bp, Homo sapiens
tcacctcgttttaaa

SEQ ID NO: 668313 - DNA, 15 bp, Homo sapiens
cacctcgttttaaat

SEQ ID NO: 668314 - DNA, 15 bp, Homo sapiens
acctcgttttaaatt

SEQ ID NO: 668315 - DNA, 15 bp, Homo sapiens
cctcgttttaaattt

SEQ ID NO: 668316 - DNA, 15 bp, Homo sapiens
ctcgttttaaattta

SEQ ID NO: 668317 - DNA, 15 bp, Homo sapiens
tcgttttaaatttat

SEQ ID NO: 668318 - DNA, 15 bp, Homo sapiens
cgttttaaatttatg

SEQ ID NO: 668319 - DNA, 15 bp, Homo sapiens
gttttaaatttatgc

SEQ ID NO: 668320 - DNA, 15 bp, Homo sapiens
ttttaaatttatgct

SEQ ID NO: 668321 - DNA, 15 bp, Homo sapiens
tttaaatttatgctt

SEQ ID NO: 668322 - DNA, 15 bp, Homo sapiens
ttaaatttatgctta

SEQ ID NO: 668323 - DNA, 15 bp, Homo sapiens
taaatttatgcttag

SEQ ID NO: 668324 - DNA, 15 bp, Homo sapiens
aaatttatgcttaga

SEQ ID NO: 668325 - DNA, 15 bp, Homo sapiens
aatttatgcttagag

SEQ ID NO: 668326 - DNA, 15 bp, Homo sapiens
atttatgcttagagg

SEQ ID NO: 668327 - DNA, 15 bp, Homo sapiens
tttatgcttagaggc

SEQ ID NO: 668328 - DNA, 15 bp, Homo sapiens
ttatgcttagaggct

SEQ ID NO: 668329 - DNA, 15 bp, Homo sapiens
tatgcttagaggctg

SEQ ID NO: 668330 - DNA, 15 bp, Homo sapiens
atgcttagaggctgt

SEQ ID NO: 668331 - DNA, 15 bp, Homo sapiens
tgcttagaggctgta

SEQ ID NO: 668332 - DNA, 15 bp, Homo sapiens
gcttagaggctgtaa

SEQ ID NO: 668333 - DNA, 15 bp, Homo sapiens
cttagaggctgtaaa

SEQ ID NO: 668334 - DNA, 15 bp, Homo sapiens
ttagaggctgtaaaa

SEQ ID NO: 668335 - DNA, 15 bp, Homo sapiens
tagaggctgtaaaat

SEQ ID NO: 668336 - DNA, 15 bp, Homo sapiens
agaggctgtaaaatt

SEQ ID NO: 668337 - DNA, 15 bp, Homo sapiens
gaggctgtaaaattg

SEQ ID NO: 668338 - DNA, 15 bp, Homo sapiens
aggctgtaaaattgt

SEQ ID NO: 668339 - DNA, 15 bp, Homo sapiens
ggctgtaaaattgta

SEQ ID NO: 668340 - DNA, 15 bp, Homo sapiens
gctgtaaaattgtat

SEQ ID NO: 668341 - DNA, 15 bp, Homo sapiens
ctgtaaaattgtatt

SEQ ID NO: 668342 - DNA, 15 bp, Homo sapiens
tgtaaaattgtattc

SEQ ID NO: 668343 - DNA, 15 bp, Homo sapiens
gtaaaattgtattca

SEQ ID NO: 668344 - DNA, 15 bp, Homo sapiens
taaaattgtattcaa

SEQ ID NO: 668345 - DNA, 15 bp, Homo sapiens
aaaattgtattcaat

SEQ ID NO: 668346 - DNA, 15 bp, Homo sapiens
aaattgtattcaatt

SEQ ID NO: 668347 - DNA, 15 bp, Homo sapiens
aattgtattcaatta

SEQ ID NO: 668348 - DNA, 15 bp, Homo sapiens
attgtattcaattaa

SEQ ID NO: 668349 - DNA, 15 bp, Homo sapiens
ttgtattcaattaat

SEQ ID NO: 668350 - DNA, 15 bp, Homo sapiens
tgtattcaattaata

SEQ ID NO: 668351 - DNA, 15 bp, Homo sapiens
gtattcaattaatat

SEQ ID NO: 668352 - DNA, 15 bp, Homo sapiens
tattcaattaatatg

SEQ ID NO: 668353 - DNA, 15 bp, Homo sapiens
attcaattaatatga

SEQ ID NO: 668354 - DNA, 15 bp, Homo sapiens
ttcaattaatatgaa

SEQ ID NO: 668355 - DNA, 15 bp, Homo sapiens
tcaattaatatgaaa

SEQ ID NO: 668356 - DNA, 15 bp, Homo sapiens
caattaatatgaaaa

SEQ ID NO: 668357 - DNA, 15 bp, Homo sapiens
aattaatatgaaaac

SEQ ID NO: 668358 - DNA, 15 bp, Homo sapiens
attaatatgaaaaca

SEQ ID NO: 668359 - DNA, 15 bp, Homo sapiens
ttaatatgaaaacat

SEQ ID NO: 668360 - DNA, 15 bp, Homo sapiens
taatatgaaaacatt

SEQ ID NO: 668361 - DNA, 15 bp, Homo sapiens
aatatgaaaacattt

SEQ ID NO: 668362 - DNA, 15 bp, Homo sapiens
atatgaaaacattta

SEQ ID NO: 668363 - DNA, 15 bp, Homo sapiens
tatgaaaacatttaa

SEQ ID NO: 668364 - DNA, 15 bp, Homo sapiens
atgaaaacatttaaa

SEQ ID NO: 668365 - DNA, 15 bp, Homo sapiens
tgaaaacatttaaaa

SEQ ID NO: 668366 - DNA, 15 bp, Homo sapiens
gaaaacatttaaaat

SEQ ID NO: 668367 - DNA, 15 bp, Homo sapiens
aaaacatttaaaatg

SEQ ID NO: 668368 - DNA, 15 bp, Homo sapiens
aaacatttaaaatgc

SEQ ID NO: 668369 - DNA, 15 bp, Homo sapiens
aacatttaaaatgct

SEQ ID NO: 668370 - DNA, 15 bp, Homo sapiens
acatttaaaatgctt

SEQ ID NO: 668371 - DNA, 15 bp, Homo sapiens
catttaaaatgcttt

SEQ ID NO: 668372 - DNA, 15 bp, Homo sapiens
atttaaaatgctttt

SEQ ID NO: 668373 - DNA, 15 bp, Homo sapiens
tttaaaatgcttttt

SEQ ID NO: 668374 - DNA, 15 bp, Homo sapiens
ttaaaatgcttttta

SEQ ID NO: 668375 - DNA, 15 bp, Homo sapiens
taaaatgctttttaa

SEQ ID NO: 668376 - DNA, 15 bp, Homo sapiens
aaaatgctttttaat

SEQ ID NO: 668377 - DNA, 15 bp, Homo sapiens
aaatgctttttaatg

SEQ ID NO: 668378 - DNA, 15 bp, Homo sapiens
aatgctttttaatgt

SEQ ID NO: 668379 - DNA, 15 bp, Homo sapiens
atgctttttaatgtt

SEQ ID NO: 668380 - DNA, 15 bp, Homo sapiens
tgctttttaatgtta

SEQ ID NO: 668381 - DNA, 15 bp, Homo sapiens
gctttttaatgttaa

SEQ ID NO: 668382 - DNA, 15 bp, Homo sapiens
ctttttaatgttaac

SEQ ID NO: 668383 - DNA, 15 bp, Homo sapiens
tttttaatgttaaca

SEQ ID NO: 668384 - DNA, 15 bp, Homo sapiens
ttttaatgttaacaa

SEQ ID NO: 668385 - DNA, 15 bp, Homo sapiens
tttaatgttaacaac

SEQ ID NO: 668386 - DNA, 15 bp, Homo sapiens
ttaatgttaacaacc

SEQ ID NO: 668387 - DNA, 15 bp, Homo sapiens
taatgttaacaacct

SEQ ID NO: 668388 - DNA, 15 bp, Homo sapiens
aatgttaacaacctg

SEQ ID NO: 668389 - DNA, 15 bp, Homo sapiens
atgttaacaacctga

SEQ ID NO: 668390 - DNA, 15 bp, Homo sapiens
tgttaacaacctgac

SEQ ID NO: 668391 - DNA, 15 bp, Homo sapiens
gttaacaacctgacc

SEQ ID NO: 668392 - DNA, 15 bp, Homo sapiens
ttaacaacctgaccc

SEQ ID NO: 668393 - DNA, 15 bp, Homo sapiens
taacaacctgaccct

SEQ ID NO: 668394 - DNA, 15 bp, Homo sapiens
aacaacctgaccctg

SEQ ID NO: 668395 - DNA, 15 bp, Homo sapiens
acaacctgaccctgt

SEQ ID NO: 668396 - DNA, 15 bp, Homo sapiens
caacctgaccctgtg

SEQ ID NO: 668397 - DNA, 15 bp, Homo sapiens
aacctgaccctgtgc

SEQ ID NO: 668398 - DNA, 15 bp, Homo sapiens
acctgaccctgtgct

SEQ ID NO: 668399 - DNA, 15 bp, Homo sapiens
cctgaccctgtgctt

SEQ ID NO: 668400 - DNA, 15 bp, Homo sapiens
ctgaccctgtgcttt

SEQ ID NO: 668401 - DNA, 15 bp, Homo sapiens
tgaccctgtgctttt

SEQ ID NO: 668402 - DNA, 15 bp, Homo sapiens
gaccctgtgctttta

SEQ ID NO: 668403 - DNA, 15 bp, Homo sapiens
accctgtgcttttaa

SEQ ID NO: 668404 - DNA, 15 bp, Homo sapiens
ccctgtgcttttaac

SEQ ID NO: 668405 - DNA, 15 bp, Homo sapiens
cctgtgcttttaact

SEQ ID NO: 668406 - DNA, 15 bp, Homo sapiens
ctgtgcttttaacta

SEQ ID NO: 668407 - DNA, 15 bp, Homo sapiens
tgtgcttttaactat

SEQ ID NO: 668408 - DNA, 15 bp, Homo sapiens
gtgcttttaactata

SEQ ID NO: 668409 - DNA, 15 bp, Homo sapiens
tgcttttaactatag

SEQ ID NO: 668410 - DNA, 15 bp, Homo sapiens
gcttttaactatagc

SEQ ID NO: 668411 - DNA, 15 bp, Homo sapiens
cttttaactatagct

SEQ ID NO: 668412 - DNA, 15 bp, Homo sapiens
ttttaactatagctg

SEQ ID NO: 668413 - DNA, 15 bp, Homo sapiens
tttaactatagctga

SEQ ID NO: 668414 - DNA, 15 bp, Homo sapiens
ttaactatagctgac

SEQ ID NO: 668415 - DNA, 15 bp, Homo sapiens
taactatagctgaca

SEQ ID NO: 668416 - DNA, 15 bp, Homo sapiens
aactatagctgacag

SEQ ID NO: 668417 - DNA, 15 bp, Homo sapiens
actatagctgacaga

SEQ ID NO: 668418 - DNA, 15 bp, Homo sapiens
ctatagctgacagac

SEQ ID NO: 668419 - DNA, 15 bp, Homo sapiens
tatagctgacagact

SEQ ID NO: 668420 - DNA, 15 bp, Homo sapiens
atagctgacagactc

SEQ ID NO: 668421 - DNA, 15 bp, Homo sapiens
tagctgacagactca

SEQ ID NO: 668422 - DNA, 15 bp, Homo sapiens
agctgacagactcaa

SEQ ID NO: 668423 - DNA, 15 bp, Homo sapiens
gctgacagactcaag

SEQ ID NO: 668424 - DNA, 15 bp, Homo sapiens
ctgacagactcaagt

SEQ ID NO: 668425 - DNA, 15 bp, Homo sapiens
tgacagactcaagtg

SEQ ID NO: 668426 - DNA, 15 bp, Homo sapiens
gacagactcaagtgt

SEQ ID NO: 668427 - DNA, 15 bp, Homo sapiens
acagactcaagtgtt

SEQ ID NO: 668428 - DNA, 15 bp, Homo sapiens
cagactcaagtgttc

SEQ ID NO: 668429 - DNA, 15 bp, Homo sapiens
agactcaagtgttct

SEQ ID NO: 668430 - DNA, 15 bp, Homo sapiens
gactcaagtgttctg

SEQ ID NO: 668431 - DNA, 15 bp, Homo sapiens
actcaagtgttctgt

SEQ ID NO: 668432 - DNA, 15 bp, Homo sapiens
ctcaagtgttctgtt

SEQ ID NO: 668433 - DNA, 15 bp, Homo sapiens
tcaagtgttctgttt

SEQ ID NO: 668434 - DNA, 15 bp, Homo sapiens
caagtgttctgtttt

SEQ ID NO: 668435 - DNA, 15 bp, Homo sapiens
aagtgttctgttttc

SEQ ID NO: 668436 - DNA, 15 bp, Homo sapiens
agtgttctgttttcc

SEQ ID NO: 668437 - DNA, 15 bp, Homo sapiens
gtgttctgttttcct

SEQ ID NO: 668438 - DNA, 15 bp, Homo sapiens
tgttctgttttcctt

SEQ ID NO: 668439 - DNA, 15 bp, Homo sapiens
gttctgttttccttt

SEQ ID NO: 668440 - DNA, 15 bp, Homo sapiens
ttctgttttcctttt

SEQ ID NO: 668441 - DNA, 15 bp, Homo sapiens
tctgttttccttttc

SEQ ID NO: 668442 - DNA, 15 bp, Homo sapiens
ctgttttccttttcc

SEQ ID NO: 668443 - DNA, 15 bp, Homo sapiens
tgttttccttttccc

SEQ ID NO: 668444 - DNA, 15 bp, Homo sapiens
gttttccttttccca

SEQ ID NO: 668445 - DNA, 15 bp, Homo sapiens
ttttccttttcccag

SEQ ID NO: 668446 - DNA, 15 bp, Homo sapiens
tttccttttcccaga

SEQ ID NO: 668447 - DNA, 15 bp, Homo sapiens
ttccttttcccagaa

SEQ ID NO: 668448 - DNA, 15 bp, Homo sapiens
tccttttcccagaac

SEQ ID NO: 668449 - DNA, 15 bp, Homo sapiens
ccttttcccagaacc

SEQ ID NO: 668450 - DNA, 15 bp, Homo sapiens
cttttcccagaacca

SEQ ID NO: 668451 - DNA, 15 bp, Homo sapiens
ttttcccagaaccac

SEQ ID NO: 668452 - DNA, 15 bp, Homo sapiens
tttcccagaaccact

SEQ ID NO: 668453 - DNA, 15 bp, Homo sapiens
ttcccagaaccacta

SEQ ID NO: 668454 - DNA, 15 bp, Homo sapiens
tcccagaaccactaa

SEQ ID NO: 668455 - DNA, 15 bp, Homo sapiens
cccagaaccactaaa

SEQ ID NO: 668456 - DNA, 15 bp, Homo sapiens
ccagaaccactaaaa

SEQ ID NO: 668457 - DNA, 15 bp, Homo sapiens
cagaaccactaaaaa

SEQ ID NO: 668458 - DNA, 15 bp, Homo sapiens
agaaccactaaaaat

SEQ ID NO: 668459 - DNA, 15 bp, Homo sapiens
gaaccactaaaaatg

SEQ ID NO: 668460 - DNA, 15 bp, Homo sapiens
aaccactaaaaatga

SEQ ID NO: 668461 - DNA, 15 bp, Homo sapiens
accactaaaaatgaa

SEQ ID NO: 668462 - DNA, 15 bp, Homo sapiens
ccactaaaaatgaac

SEQ ID NO: 668463 - DNA, 15 bp, Homo sapiens
cactaaaaatgaacc

SEQ ID NO: 668464 - DNA, 15 bp, Homo sapiens
actaaaaatgaacct

SEQ ID NO: 668465 - DNA, 15 bp, Homo sapiens
ctaaaaatgaacctt

SEQ ID NO: 668466 - DNA, 15 bp, Homo sapiens
taaaaatgaaccttt

SEQ ID NO: 668467 - DNA, 15 bp, Homo sapiens
aaaaatgaacctttg

SEQ ID NO: 668468 - DNA, 15 bp, Homo sapiens
aaaatgaacctttgg

SEQ ID NO: 668469 - DNA, 15 bp, Homo sapiens
aaatgaacctttggg

SEQ ID NO: 668470 - DNA, 15 bp, Homo sapiens
aatgaacctttggga

SEQ ID NO: 668471 - DNA, 15 bp, Homo sapiens
atgaacctttgggac

SEQ ID NO: 668472 - DNA, 15 bp, Homo sapiens
tgaacctttgggaca

SEQ ID NO: 668473 - DNA, 15 bp, Homo sapiens
gaacctttgggacac

SEQ ID NO: 668474 - DNA, 15 bp, Homo sapiens
aacctttgggacact

SEQ ID NO: 668475 - DNA, 15 bp, Homo sapiens
acctttgggacactg

SEQ ID NO: 668476 - DNA, 15 bp, Homo sapiens
cctttgggacactgg

SEQ ID NO: 668477 - DNA, 15 bp, Homo sapiens
ctttgggacactggt

SEQ ID NO: 668478 - DNA, 15 bp, Homo sapiens
tttgggacactggtc

SEQ ID NO: 668479 - DNA, 15 bp, Homo sapiens
ttgggacactggtcc

SEQ ID NO: 668480 - DNA, 15 bp, Homo sapiens
tgggacactggtccc

SEQ ID NO: 668481 - DNA, 15 bp, Homo sapiens
gggacactggtccct

SEQ ID NO: 668482 - DNA, 15 bp, Homo sapiens
ggacactggtccctt

SEQ ID NO: 668483 - DNA, 15 bp, Homo sapiens
gacactggtcccttt

SEQ ID NO: 668484 - DNA, 15 bp, Homo sapiens
acactggtccctttg

SEQ ID NO: 668485 - DNA, 15 bp, Homo sapiens
cactggtccctttgt

SEQ ID NO: 668486 - DNA, 15 bp, Homo sapiens
actggtccctttgtg

SEQ ID NO: 668487 - DNA, 15 bp, Homo sapiens
ctggtccctttgtga

SEQ ID NO: 668488 - DNA, 15 bp, Homo sapiens
tggtccctttgtgac

SEQ ID NO: 668489 - DNA, 15 bp, Homo sapiens
ggtccctttgtgaca

SEQ ID NO: 668490 - DNA, 15 bp, Homo sapiens
gtccctttgtgacaa

SEQ ID NO: 668491 - DNA, 15 bp, Homo sapiens
tccctttgtgacaat

SEQ ID NO: 668492 - DNA, 15 bp, Homo sapiens
ccctttgtgacaatt

SEQ ID NO: 668493 - DNA, 15 bp, Homo sapiens
cctttgtgacaattt

SEQ ID NO: 668494 - DNA, 15 bp, Homo sapiens
ctttgtgacaatttt

SEQ ID NO: 668495 - DNA, 15 bp, Homo sapiens
tttgtgacaatttta

SEQ ID NO: 668496 - DNA, 15 bp, Homo sapiens
ttgtgacaattttag

SEQ ID NO: 668497 - DNA, 15 bp, Homo sapiens
tgtgacaattttagg

SEQ ID NO: 668498 - DNA, 15 bp, Homo sapiens
gtgacaattttaggg

SEQ ID NO: 668499 - DNA, 15 bp, Homo sapiens
tgacaattttaggga

SEQ ID NO: 668500 - DNA, 15 bp, Homo sapiens
gacaattttagggac

SEQ ID NO: 668501 - DNA, 15 bp, Homo sapiens
acaattttagggacc

SEQ ID NO: 668502 - DNA, 15 bp, Homo sapiens
caattttagggaccc

SEQ ID NO: 668503 - DNA, 15 bp, Homo sapiens
aattttagggaccca

SEQ ID NO: 668504 - DNA, 15 bp, Homo sapiens
attttagggacccag

SEQ ID NO: 668505 - DNA, 15 bp, Homo sapiens
ttttagggacccagc

SEQ ID NO: 668506 - DNA, 15 bp, Homo sapiens
tttagggacccagct

SEQ ID NO: 668507 - DNA, 15 bp, Homo sapiens
ttagggacccagctc

SEQ ID NO: 668508 - DNA, 15 bp, Homo sapiens
tagggacccagctcc

SEQ ID NO: 668509 - DNA, 15 bp, Homo sapiens
agggacccagctcca

SEQ ID NO: 668510 - DNA, 15 bp, Homo sapiens
gggacccagctccat

SEQ ID NO: 668511 - DNA, 15 bp, Homo sapiens
ggacccagctccatt

SEQ ID NO: 668512 - DNA, 15 bp, Homo sapiens
gacccagctccattg

SEQ ID NO: 668513 - DNA, 15 bp, Homo sapiens
acccagctccattgg

SEQ ID NO: 668514 - DNA, 15 bp, Homo sapiens
cccagctccattggc

SEQ ID NO: 668515 - DNA, 15 bp, Homo sapiens
ccagctccattggct

SEQ ID NO: 668516 - DNA, 15 bp, Homo sapiens
cagctccattggctc

SEQ ID NO: 668517 - DNA, 15 bp, Homo sapiens
agctccattggctct

SEQ ID NO: 668518 - DNA, 15 bp, Homo sapiens
gctccattggctctt

SEQ ID NO: 668519 - DNA, 15 bp, Homo sapiens
ctccattggctcttg

SEQ ID NO: 668520 - DNA, 15 bp, Homo sapiens
tccattggctcttga

SEQ ID NO: 668521 - DNA, 15 bp, Homo sapiens
ccattggctcttgac

SEQ ID NO: 668522 - DNA, 15 bp, Homo sapiens
cattggctcttgact

SEQ ID NO: 668523 - DNA, 15 bp, Homo sapiens
attggctcttgactt

SEQ ID NO: 668524 - DNA, 15 bp, Homo sapiens
ctctaaagcctgtaa

SEQ ID NO: 668525 - DNA, 15 bp, Homo sapiens
tctaaagcctgtaag

SEQ ID NO: 668526 - DNA, 15 bp, Homo sapiens
ctaaagcctgtaagc

SEQ ID NO: 668527 - DNA, 15 bp, Homo sapiens
taaagcctgtaagca

SEQ ID NO: 668528 - DNA, 15 bp, Homo sapiens
aaagcctgtaagcat

SEQ ID NO: 668529 - DNA, 15 bp, Homo sapiens
aagcctgtaagcatg

SEQ ID NO: 668530 - DNA, 15 bp, Homo sapiens
agcctgtaagcatga

SEQ ID NO: 668531 - DNA, 15 bp, Homo sapiens
gcctgtaagcatgat

SEQ ID NO: 668532 - DNA, 15 bp, Homo sapiens
cctgtaagcatgatg

SEQ ID NO: 668533 - DNA, 15 bp, Homo sapiens
ctgtaagcatgatgt

SEQ ID NO: 668534 - DNA, 15 bp, Homo sapiens
tgtaagcatgatgtt

SEQ ID NO: 668535 - DNA, 15 bp, Homo sapiens
gtaagcatgatgttt

SEQ ID NO: 668536 - DNA, 15 bp, Homo sapiens
taagcatgatgtttg

SEQ ID NO: 668537 - DNA, 15 bp, Homo sapiens
aagcatgatgtttgt

SEQ ID NO: 668538 - DNA, 15 bp, Homo sapiens
agcatgatgtttgta

SEQ ID NO: 668539 - DNA, 15 bp, Homo sapiens
gcatgatgtttgtat

SEQ ID NO: 668540 - DNA, 15 bp, Homo sapiens
catgatgtttgtatg

SEQ ID NO: 668541 - DNA, 15 bp, Homo sapiens
atgatgtttgtatgt

SEQ ID NO: 668542 - DNA, 15 bp, Homo sapiens
tgatgtttgtatgtc

SEQ ID NO: 668543 - DNA, 15 bp, Homo sapiens
gatgtttgtatgtct

SEQ ID NO: 668544 - DNA, 15 bp, Homo sapiens
atgtttgtatgtctg

SEQ ID NO: 668545 - DNA, 15 bp, Homo sapiens
tgtttgtatgtctgc

SEQ ID NO: 668546 - DNA, 15 bp, Homo sapiens
gtttgtatgtctgca

SEQ ID NO: 668547 - DNA, 15 bp, Homo sapiens
tttgtatgtctgcat

SEQ ID NO: 668548 - DNA, 15 bp, Homo sapiens
ttgtatgtctgcata

SEQ ID NO: 668549 - DNA, 15 bp, Homo sapiens
tgtatgtctgcatag

SEQ ID NO: 668550 - DNA, 15 bp, Homo sapiens
gtatgtctgcatagc

SEQ ID NO: 668551 - DNA, 15 bp, Homo sapiens
tatgtctgcatagca

SEQ ID NO: 668552 - DNA, 15 bp, Homo sapiens
atgtctgcatagcag

SEQ ID NO: 668553 - DNA, 15 bp, Homo sapiens
tgtctgcatagcagt

SEQ ID NO: 668554 - DNA, 15 bp, Homo sapiens
gtctgcatagcagtg

SEQ ID NO: 668555 - DNA, 15 bp, Homo sapiens
tctgcatagcagtgt

SEQ ID NO: 668556 - DNA, 15 bp, Homo sapiens
ctgcatagcagtgtt

SEQ ID NO: 668557 - DNA, 15 bp, Homo sapiens
tgcatagcagtgttg

SEQ ID NO: 668558 - DNA, 15 bp, Homo sapiens
gcatagcagtgttgc

SEQ ID NO: 668559 - DNA, 15 bp, Homo sapiens
catagcagtgttgct

SEQ ID NO: 668560 - DNA, 15 bp, Homo sapiens
atagcagtgttgctg

SEQ ID NO: 668561 - DNA, 15 bp, Homo sapiens
tagcagtgttgctga

SEQ ID NO: 668562 - DNA, 15 bp, Homo sapiens
agcagtgttgctgat

SEQ ID NO: 668563 - DNA, 15 bp, Homo sapiens
gcagtgttgctgatt

SEQ ID NO: 668564 - DNA, 15 bp, Homo sapiens
cagtgttgctgattg

SEQ ID NO: 668565 - DNA, 15 bp, Homo sapiens
agtgttgctgattgt

SEQ ID NO: 668566 - DNA, 15 bp, Homo sapiens
gtgttgctgattgta

SEQ ID NO: 668567 - DNA, 15 bp, Homo sapiens
tgttgctgattgtaa

SEQ ID NO: 668568 - DNA, 15 bp, Homo sapiens
gttgctgattgtaac

SEQ ID NO: 668569 - DNA, 15 bp, Homo sapiens
ttgctgattgtaacg

SEQ ID NO: 668570 - DNA, 15 bp, Homo sapiens
tgctgattgtaacga

SEQ ID NO: 668571 - DNA, 15 bp, Homo sapiens
gctgattgtaacgag

SEQ ID NO: 668572 - DNA, 15 bp, Homo sapiens
ctgattgtaacgagt

SEQ ID NO: 668573 - DNA, 15 bp, Homo sapiens
tgattgtaacgagtg

SEQ ID NO: 668574 - DNA, 15 bp, Homo sapiens
gattgtaacgagtgc

SEQ ID NO: 668575 - DNA, 15 bp, Homo sapiens
attgtaacgagtgct

SEQ ID NO: 668576 - DNA, 15 bp, Homo sapiens
ttgtaacgagtgctg

SEQ ID NO: 668577 - DNA, 15 bp, Homo sapiens
tgtaacgagtgctgt

SEQ ID NO: 668578 - DNA, 15 bp, Homo sapiens
gtaacgagtgctgtc

SEQ ID NO: 668579 - DNA, 15 bp, Homo sapiens
taacgagtgctgtct

SEQ ID NO: 668580 - DNA, 15 bp, Homo sapiens
aacgagtgctgtctg

SEQ ID NO: 668581 - DNA, 15 bp, Homo sapiens
acgagtgctgtctgt

SEQ ID NO: 668582 - DNA, 15 bp, Homo sapiens
cgagtgctgtctgta

SEQ ID NO: 668583 - DNA, 15 bp, Homo sapiens
gagtgctgtctgtat

SEQ ID NO: 668584 - DNA, 15 bp, Homo sapiens
agtgctgtctgtatg

SEQ ID NO: 668585 - DNA, 15 bp, Homo sapiens
gtgctgtctgtatgc

SEQ ID NO: 668586 - DNA, 15 bp, Homo sapiens
tgctgtctgtatgct

SEQ ID NO: 668587 - DNA, 15 bp, Homo sapiens
gctgtctgtatgcta

SEQ ID NO: 668588 - DNA, 15 bp, Homo sapiens
ctgtctgtatgctaa

SEQ ID NO: 668589 - DNA, 15 bp, Homo sapiens
tgtctgtatgctaaa

SEQ ID NO: 668590 - DNA, 15 bp, Homo sapiens
gtctgtatgctaaaa

SEQ ID NO: 668591 - DNA, 15 bp, Homo sapiens
tctgtatgctaaaag

SEQ ID NO: 668592 - DNA, 15 bp, Homo sapiens
ctgtatgctaaaagg

SEQ ID NO: 668593 - DNA, 15 bp, Homo sapiens
tgtatgctaaaaggc

SEQ ID NO: 668594 - DNA, 15 bp, Homo sapiens
gtatgctaaaaggcc

SEQ ID NO: 668595 - DNA, 15 bp, Homo sapiens
tatgctaaaaggcct

SEQ ID NO: 668596 - DNA, 15 bp, Homo sapiens
atgctaaaaggcctg

SEQ ID NO: 668597 - DNA, 15 bp, Homo sapiens
tgctaaaaggcctga

SEQ ID NO: 668598 - DNA, 15 bp, Homo sapiens
gctaaaaggcctgaa

SEQ ID NO: 668599 - DNA, 15 bp, Homo sapiens
ctaaaaggcctgaaa

SEQ ID NO: 668600 - DNA, 15 bp, Homo sapiens
taaaaggcctgaaag

SEQ ID NO: 668601 - DNA, 15 bp, Homo sapiens
aaaaggcctgaaagg

SEQ ID NO: 668602 - DNA, 15 bp, Homo sapiens
aaaggcctgaaaggt

SEQ ID NO: 668603 - DNA, 15 bp, Homo sapiens
aaggcctgaaaggtg

SEQ ID NO: 668604 - DNA, 15 bp, Homo sapiens
aggcctgaaaggtgt

SEQ ID NO: 668605 - DNA, 15 bp, Homo sapiens
ggcctgaaaggtgtc

SEQ ID NO: 668606 - DNA, 15 bp, Homo sapiens
gcctgaaaggtgtct

SEQ ID NO: 668607 - DNA, 15 bp, Homo sapiens
cctgaaaggtgtcta

SEQ ID NO: 668608 - DNA, 15 bp, Homo sapiens
ctgaaaggtgtctat

SEQ ID NO: 668609 - DNA, 15 bp, Homo sapiens
tgaaaggtgtctatc

SEQ ID NO: 668610 - DNA, 15 bp, Homo sapiens
gaaaggtgtctatct

SEQ ID NO: 668611 - DNA, 15 bp, Homo sapiens
aaaggtgtctatctg

SEQ ID NO: 668612 - DNA, 15 bp, Homo sapiens
aaggtgtctatctgg

SEQ ID NO: 668613 - DNA, 15 bp, Homo sapiens
aggtgtctatctgga

SEQ ID NO: 668614 - DNA, 15 bp, Homo sapiens
ggtgtctatctggaa

SEQ ID NO: 668615 - DNA, 15 bp, Homo sapiens
gtgtctatctggaag

SEQ ID NO: 668616 - DNA, 15 bp, Homo sapiens
tgtctatctggaagc

SEQ ID NO: 668617 - DNA, 15 bp, Homo sapiens
gtctatctggaagca

SEQ ID NO: 668618 - DNA, 15 bp, Homo sapiens
tctatctggaagcag

SEQ ID NO: 668619 - DNA, 15 bp, Homo sapiens
ctatctggaagcagt

SEQ ID NO: 668620 - DNA, 15 bp, Homo sapiens
tatctggaagcagtt

SEQ ID NO: 668621 - DNA, 15 bp, Homo sapiens
atctggaagcagttt

SEQ ID NO: 668622 - DNA, 15 bp, Homo sapiens
tctggaagcagttta

SEQ ID NO: 668623 - DNA, 15 bp, Homo sapiens
ctggaagcagtttat

SEQ ID NO: 668624 - DNA, 15 bp, Homo sapiens
tggaagcagtttata

SEQ ID NO: 668625 - DNA, 15 bp, Homo sapiens
ggaagcagtttataa

SEQ ID NO: 668626 - DNA, 15 bp, Homo sapiens
gaagcagtttataaa

SEQ ID NO: 668627 - DNA, 15 bp, Homo sapiens
aagcagtttataaaa

SEQ ID NO: 668628 - DNA, 15 bp, Homo sapiens
agcagtttataaaat

SEQ ID NO: 668629 - DNA, 15 bp, Homo sapiens
gcagtttataaaatt

SEQ ID NO: 668630 - DNA, 15 bp, Homo sapiens
cagtttataaaatta

SEQ ID NO: 668631 - DNA, 15 bp, Homo sapiens
agtttataaaattag

SEQ ID NO: 668632 - DNA, 15 bp, Homo sapiens
gtttataaaattaga

SEQ ID NO: 668633 - DNA, 15 bp, Homo sapiens
tttataaaattagat

SEQ ID NO: 668634 - DNA, 15 bp, Homo sapiens
ttataaaattagata

SEQ ID NO: 668635 - DNA, 15 bp, Homo sapiens
tataaaattagataa

SEQ ID NO: 668636 - DNA, 15 bp, Homo sapiens
ataaaattagataat

SEQ ID NO: 668637 - DNA, 15 bp, Homo sapiens
taaaattagataata

SEQ ID NO: 668638 - DNA, 15 bp, Homo sapiens
aaaattagataataa

SEQ ID NO: 668639 - DNA, 15 bp, Homo sapiens
aaattagataataaa

SEQ ID NO: 668640 - DNA, 15 bp, Homo sapiens
aattagataataaaa

SEQ ID NO: 668641 - DNA, 15 bp, Homo sapiens
attagataataaaaa

SEQ ID NO: 668642 - DNA, 15 bp, Homo sapiens
ttagataataaaaat

SEQ ID NO: 668643 - DNA, 15 bp, Homo sapiens
tagataataaaaatt

SEQ ID NO: 668644 - DNA, 15 bp, Homo sapiens
agataataaaaattt

SEQ ID NO: 668645 - DNA, 15 bp, Homo sapiens
gataataaaaatttg

SEQ ID NO: 668646 - DNA, 15 bp, Homo sapiens
ataataaaaatttga

SEQ ID NO: 668647 - DNA, 15 bp, Homo sapiens
taataaaaatttgaa

SEQ ID NO: 668648 - DNA, 15 bp, Homo sapiens
aataaaaatttgaaa

SEQ ID NO: 668649 - DNA, 15 bp, Homo sapiens
ataaaaatttgaaag

SEQ ID NO: 668650 - DNA, 15 bp, Homo sapiens
taaaaatttgaaagt

SEQ ID NO: 668651 - DNA, 15 bp, Homo sapiens
aaaaatttgaaagta

SEQ ID NO: 668652 - DNA, 15 bp, Homo sapiens
aaaatttgaaagtat

SEQ ID NO: 668653 - DNA, 15 bp, Homo sapiens
aaatttgaaagtatt

SEQ ID NO: 668654 - DNA, 15 bp, Homo sapiens
aatttgaaagtattg

SEQ ID NO: 668655 - DNA, 15 bp, Homo sapiens
atttgaaagtattga

SEQ ID NO: 668656 - DNA, 15 bp, Homo sapiens
tttgaaagtattgat

SEQ ID NO: 668657 - DNA, 15 bp, Homo sapiens
ttgaaagtattgata

SEQ ID NO: 668658 - DNA, 15 bp, Homo sapiens
tgaaagtattgatat

SEQ ID NO: 668659 - DNA, 15 bp, Homo sapiens
gaaagtattgatatg

SEQ ID NO: 668660 - DNA, 15 bp, Homo sapiens
aaagtattgatatgt

SEQ ID NO: 668661 - DNA, 15 bp, Homo sapiens
aagtattgatatgta

SEQ ID NO: 668662 - DNA, 15 bp, Homo sapiens
agtattgatatgtac

SEQ ID NO: 668663 - DNA, 15 bp, Homo sapiens
gtattgatatgtact

SEQ ID NO: 668664 - DNA, 15 bp, Homo sapiens
tattgatatgtactt

SEQ ID NO: 668665 - DNA, 15 bp, Homo sapiens
attgatatgtactta

SEQ ID NO: 668666 - DNA, 15 bp, Homo sapiens
ttgatatgtacttat

SEQ ID NO: 668667 - DNA, 15 bp, Homo sapiens
tgatatgtacttatt

SEQ ID NO: 668668 - DNA, 15 bp, Homo sapiens
gatatgtacttatta

SEQ ID NO: 668669 - DNA, 15 bp, Homo sapiens
atatgtacttattat

SEQ ID NO: 668670 - DNA, 15 bp, Homo sapiens
tatgtacttattatt

SEQ ID NO: 668671 - DNA, 15 bp, Homo sapiens
atgtacttattattt

SEQ ID NO: 668672 - DNA, 15 bp, Homo sapiens
tgtacttattatttt

SEQ ID NO: 668673 - DNA, 15 bp, Homo sapiens
gtacttattattttt

SEQ ID NO: 668674 - DNA, 15 bp, Homo sapiens
tacttattatttttt

SEQ ID NO: 668675 - DNA, 15 bp, Homo sapiens
acttattatttttta

SEQ ID NO: 668676 - DNA, 15 bp, Homo sapiens
cttattattttttaa

SEQ ID NO: 668677 - DNA, 15 bp, Homo sapiens
ttattattttttaaa

SEQ ID NO: 668678 - DNA, 15 bp, Homo sapiens
tattattttttaaaa

SEQ ID NO: 668679 - DNA, 15 bp, Homo sapiens
attattttttaaaat

SEQ ID NO: 668680 - DNA, 15 bp, Homo sapiens
ttattttttaaaata

SEQ ID NO: 668681 - DNA, 15 bp, Homo sapiens
tattttttaaaatac

SEQ ID NO: 668682 - DNA, 15 bp, Homo sapiens
attttttaaaatact

SEQ ID NO: 668683 - DNA, 15 bp, Homo sapiens
ttttttaaaatacta

SEQ ID NO: 668684 - DNA, 15 bp, Homo sapiens
tttttaaaatactaa

SEQ ID NO: 668685 - DNA, 15 bp, Homo sapiens
ttttaaaatactaac

SEQ ID NO: 668686 - DNA, 15 bp, Homo sapiens
tttaaaatactaact

SEQ ID NO: 668687 - DNA, 15 bp, Homo sapiens
ttaaaatactaactt

SEQ ID NO: 668688 - DNA, 15 bp, Homo sapiens
taaaatactaacttt

SEQ ID NO: 668689 - DNA, 15 bp, Homo sapiens
aaaatactaactttc

SEQ ID NO: 668690 - DNA, 15 bp, Homo sapiens
aaatactaactttct

SEQ ID NO: 668691 - DNA, 15 bp, Homo sapiens
aatactaactttcta

SEQ ID NO: 668692 - DNA, 15 bp, Homo sapiens
atactaactttctac

SEQ ID NO: 668693 - DNA, 15 bp, Homo sapiens
tactaactttctact

SEQ ID NO: 668694 - DNA, 15 bp, Homo sapiens
actaactttctacta

SEQ ID NO: 668695 - DNA, 15 bp, Homo sapiens
ctaactttctactaa

SEQ ID NO: 668696 - DNA, 15 bp, Homo sapiens
taactttctactaat

SEQ ID NO: 668697 - DNA, 15 bp, Homo sapiens
aactttctactaatt

SEQ ID NO: 668698 - DNA, 15 bp, Homo sapiens
actttctactaattt

SEQ ID NO: 668699 - DNA, 15 bp, Homo sapiens
ctttctactaatttg

SEQ ID NO: 668700 - DNA, 15 bp, Homo sapiens
tttctactaatttgg

SEQ ID NO: 668701 - DNA, 15 bp, Homo sapiens
ttctactaatttggt

SEQ ID NO: 668702 - DNA, 15 bp, Homo sapiens
tctactaatttggta

SEQ ID NO: 668703 - DNA, 15 bp, Homo sapiens
ctactaatttggtaa

SEQ ID NO: 668704 - DNA, 15 bp, Homo sapiens
tactaatttggtaaa

SEQ ID NO: 668705 - DNA, 15 bp, Homo sapiens
actaatttggtaaaa

SEQ ID NO: 668706 - DNA, 15 bp, Homo sapiens
ctaatttggtaaaac

SEQ ID NO: 668707 - DNA, 15 bp, Homo sapiens
taatttggtaaaaca

SEQ ID NO: 668708 - DNA, 15 bp, Homo sapiens
aatttggtaaaacat

SEQ ID NO: 668709 - DNA, 15 bp, Homo sapiens
atttggtaaaacatt

SEQ ID NO: 668710 - DNA, 15 bp, Homo sapiens
tttggtaaaacattc

SEQ ID NO: 668711 - DNA, 15 bp, Homo sapiens
ttggtaaaacattcc

SEQ ID NO: 668712 - DNA, 15 bp, Homo sapiens
tggtaaaacattcca

SEQ ID NO: 668713 - DNA, 15 bp, Homo sapiens
ggtaaaacattccaa

SEQ ID NO: 668714 - DNA, 15 bp, Homo sapiens
gtaaaacattccaaa

SEQ ID NO: 668715 - DNA, 15 bp, Homo sapiens
taaaacattccaaat

SEQ ID NO: 668716 - DNA, 15 bp, Homo sapiens
aaaacattccaaatt

SEQ ID NO: 668717 - DNA, 15 bp, Homo sapiens
aaacattccaaattc

SEQ ID NO: 668718 - DNA, 15 bp, Homo sapiens
aacattccaaattcg

SEQ ID NO: 668719 - DNA, 15 bp, Homo sapiens
acattccaaattcgt

SEQ ID NO: 668720 - DNA, 15 bp, Homo sapiens
cattccaaattcgtt

SEQ ID NO: 668721 - DNA, 15 bp, Homo sapiens
attccaaattcgttt

SEQ ID NO: 668722 - DNA, 15 bp, Homo sapiens
ttccaaattcgtttg

SEQ ID NO: 668723 - DNA, 15 bp, Homo sapiens
tccaaattcgtttga

SEQ ID NO: 668724 - DNA, 15 bp, Homo sapiens
ccaaattcgtttgaa

SEQ ID NO: 668725 - DNA, 15 bp, Homo sapiens
caaattcgtttgaat

SEQ ID NO: 668726 - DNA, 15 bp, Homo sapiens
aaattcgtttgaatt

SEQ ID NO: 668727 - DNA, 15 bp, Homo sapiens
aattcgtttgaattc

SEQ ID NO: 668728 - DNA, 15 bp, Homo sapiens
attcgtttgaattca

SEQ ID NO: 668729 - DNA, 15 bp, Homo sapiens
ttcgtttgaattcat

SEQ ID NO: 668730 - DNA, 15 bp, Homo sapiens
tcgtttgaattcatg

SEQ ID NO: 668731 - DNA, 15 bp, Homo sapiens
cgtttgaattcatga

SEQ ID NO: 668732 - DNA, 15 bp, Homo sapiens
gtttgaattcatgac

SEQ ID NO: 668733 - DNA, 15 bp, Homo sapiens
tttgaattcatgaca

SEQ ID NO: 668734 - DNA, 15 bp, Homo sapiens
ttgaattcatgacat

SEQ ID NO: 668735 - DNA, 15 bp, Homo sapiens
tgaattcatgacatt

SEQ ID NO: 668736 - DNA, 15 bp, Homo sapiens
gaattcatgacattt

SEQ ID NO: 668737 - DNA, 15 bp, Homo sapiens
aattcatgacatttt

SEQ ID NO: 668738 - DNA, 15 bp, Homo sapiens
attcatgacatttta

SEQ ID NO: 668739 - DNA, 15 bp, Homo sapiens
ttcatgacattttat

SEQ ID NO: 668740 - DNA, 15 bp, Homo sapiens
tcatgacattttatc

SEQ ID NO: 668741 - DNA, 15 bp, Homo sapiens
catgacattttatca

SEQ ID NO: 668742 - DNA, 15 bp, Homo sapiens
atgacattttatcat

SEQ ID NO: 668743 - DNA, 15 bp, Homo sapiens
tgacattttatcata

SEQ ID NO: 668744 - DNA, 15 bp, Homo sapiens
gacattttatcatat

SEQ ID NO: 668745 - DNA, 15 bp, Homo sapiens
acattttatcatatc

SEQ ID NO: 668746 - DNA, 15 bp, Homo sapiens
cattttatcatatct

SEQ ID NO: 668747 - DNA, 15 bp, Homo sapiens
attttatcatatctt

SEQ ID NO: 668748 - DNA, 15 bp, Homo sapiens
ttttatcatatcttt

SEQ ID NO: 668749 - DNA, 15 bp, Homo sapiens
tttatcatatctttt

SEQ ID NO: 668750 - DNA, 15 bp, Homo sapiens
ttatcatatcttttt

SEQ ID NO: 668751 - DNA, 15 bp, Homo sapiens
tatcatatctttttt

SEQ ID NO: 668752 - DNA, 15 bp, Homo sapiens
atcatatcttttttt

SEQ ID NO: 668753 - DNA, 15 bp, Homo sapiens
tcatatcttttttta

SEQ ID NO: 668754 - DNA, 15 bp, Homo sapiens
catatctttttttaa

SEQ ID NO: 668755 - DNA, 15 bp, Homo sapiens
atatctttttttaaa

SEQ ID NO: 668756 - DNA, 15 bp, Homo sapiens
tatctttttttaaaa

SEQ ID NO: 668757 - DNA, 15 bp, Homo sapiens
atctttttttaaaat

SEQ ID NO: 668758 - DNA, 15 bp, Homo sapiens
tctttttttaaaata

SEQ ID NO: 668759 - DNA, 15 bp, Homo sapiens
ctttttttaaaatat

SEQ ID NO: 668760 - DNA, 15 bp, Homo sapiens
tttttttaaaatatt

SEQ ID NO: 668761 - DNA, 15 bp, Homo sapiens
ttttttaaaatattt

SEQ ID NO: 668762 - DNA, 15 bp, Homo sapiens
tttttaaaatatttc

SEQ ID NO: 668763 - DNA, 15 bp, Homo sapiens
ttttaaaatatttca

SEQ ID NO: 668764 - DNA, 15 bp, Homo sapiens
tttaaaatatttcaa

SEQ ID NO: 668765 - DNA, 15 bp, Homo sapiens
ttaaaatatttcaaa

SEQ ID NO: 668766 - DNA, 15 bp, Homo sapiens
taaaatatttcaaat

SEQ ID NO: 668767 - DNA, 15 bp, Homo sapiens
aaaatatttcaaatt

SEQ ID NO: 668768 - DNA, 15 bp, Homo sapiens
aaatatttcaaattc

SEQ ID NO: 668769 - DNA, 15 bp, Homo sapiens
aatatttcaaattct

SEQ ID NO: 668770 - DNA, 15 bp, Homo sapiens
atatttcaaattctg

SEQ ID NO: 668771 - DNA, 15 bp, Homo sapiens
tatttcaaattctga

SEQ ID NO: 668772 - DNA, 15 bp, Homo sapiens
atttcaaattctgac

SEQ ID NO: 668773 - DNA, 15 bp, Homo sapiens
tttcaaattctgaca

SEQ ID NO: 668774 - DNA, 15 bp, Homo sapiens
ttcaaattctgacaa

SEQ ID NO: 668775 - DNA, 15 bp, Homo sapiens
tcaaattctgacaaa

SEQ ID NO: 668776 - DNA, 15 bp, Homo sapiens
caaattctgacaaat

SEQ ID NO: 668777 - DNA, 15 bp, Homo sapiens
aaattctgacaaata

SEQ ID NO: 668778 - DNA, 15 bp, Homo sapiens
aattctgacaaatag

SEQ ID NO: 668779 - DNA, 15 bp, Homo sapiens
attctgacaaatagg

SEQ ID NO: 668780 - DNA, 15 bp, Homo sapiens
ttctgacaaatagga

SEQ ID NO: 668781 - DNA, 15 bp, Homo sapiens
tctgacaaataggaa

SEQ ID NO: 668782 - DNA, 15 bp, Homo sapiens
ctgacaaataggaac

SEQ ID NO: 668783 - DNA, 15 bp, Homo sapiens
tgacaaataggaaca

SEQ ID NO: 668784 - DNA, 15 bp, Homo sapiens
gacaaataggaacaa

SEQ ID NO: 668785 - DNA, 15 bp, Homo sapiens
acaaataggaacaaa

SEQ ID NO: 668786 - DNA, 15 bp, Homo sapiens
caaataggaacaaag

SEQ ID NO: 668787 - DNA, 15 bp, Homo sapiens
aaataggaacaaagt

SEQ ID NO: 668788 - DNA, 15 bp, Homo sapiens
aataggaacaaagtt

SEQ ID NO: 668789 - DNA, 15 bp, Homo sapiens
ataggaacaaagttt

SEQ ID NO: 668790 - DNA, 15 bp, Homo sapiens
taggaacaaagtttt

SEQ ID NO: 668791 - DNA, 15 bp, Homo sapiens
aggaacaaagttttt

SEQ ID NO: 668792 - DNA, 15 bp, Homo sapiens
ggaacaaagtttttt

SEQ ID NO: 668793 - DNA, 15 bp, Homo sapiens
gaacaaagttttttg

SEQ ID NO: 668794 - DNA, 15 bp, Homo sapiens
aacaaagttttttgg

SEQ ID NO: 668795 - DNA, 15 bp, Homo sapiens
acaaagttttttggt

SEQ ID NO: 668796 - DNA, 15 bp, Homo sapiens
caaagttttttggtt

SEQ ID NO: 668797 - DNA, 15 bp, Homo sapiens
aaagttttttggttc

SEQ ID NO: 668798 - DNA, 15 bp, Homo sapiens
aagttttttggttct

SEQ ID NO: 668799 - DNA, 15 bp, Homo sapiens
agttttttggttctt

SEQ ID NO: 668800 - DNA, 15 bp, Homo sapiens
gttttttggttcttt

SEQ ID NO: 668801 - DNA, 15 bp, Homo sapiens
ttttttggttctttt

SEQ ID NO: 668802 - DNA, 15 bp, Homo sapiens
tttttggttcttttt

SEQ ID NO: 668803 - DNA, 15 bp, Homo sapiens
ttttggttcttttta

SEQ ID NO: 668804 - DNA, 15 bp, Homo sapiens
tttggttctttttat

SEQ ID NO: 668805 - DNA, 15 bp, Homo sapiens
ttggttctttttata

SEQ ID NO: 668806 - DNA, 15 bp, Homo sapiens
tggttctttttataa

SEQ ID NO: 668807 - DNA, 15 bp, Homo sapiens
ggttctttttataaa

SEQ ID NO: 668808 - DNA, 15 bp, Homo sapiens
gttctttttataaag

SEQ ID NO: 668809 - DNA, 15 bp, Homo sapiens
ttctttttataaaga

SEQ ID NO: 668810 - DNA, 15 bp, Homo sapiens
tctttttataaagaa

SEQ ID NO: 668811 - DNA, 15 bp, Homo sapiens
ctttttataaagaat

SEQ ID NO: 668812 - DNA, 15 bp, Homo sapiens
tttttataaagaatg

SEQ ID NO: 668813 - DNA, 15 bp, Homo sapiens
ttttataaagaatgt

SEQ ID NO: 668814 - DNA, 15 bp, Homo sapiens
tttataaagaatgtg

SEQ ID NO: 668815 - DNA, 15 bp, Homo sapiens
ttataaagaatgtgg

SEQ ID NO: 668816 - DNA, 15 bp, Homo sapiens
tataaagaatgtgga

SEQ ID NO: 668817 - DNA, 15 bp, Homo sapiens
ataaagaatgtggaa

SEQ ID NO: 668818 - DNA, 15 bp, Homo sapiens
taaagaatgtggaaa

SEQ ID NO: 668819 - DNA, 15 bp, Homo sapiens
aaagaatgtggaaaa

SEQ ID NO: 668820 - DNA, 15 bp, Homo sapiens
aagaatgtggaaaaa

SEQ ID NO: 668821 - DNA, 15 bp, Homo sapiens
agaatgtggaaaaat

SEQ ID NO: 668822 - DNA, 15 bp, Homo sapiens
gaatgtggaaaaatc

SEQ ID NO: 668823 - DNA, 15 bp, Homo sapiens
aatgtggaaaaatca

SEQ ID NO: 668824 - DNA, 15 bp, Homo sapiens
atgtggaaaaatcaa

SEQ ID NO: 668825 - DNA, 15 bp, Homo sapiens
tgtggaaaaatcaat

SEQ ID NO: 668826 - DNA, 15 bp, Homo sapiens
gtggaaaaatcaata

SEQ ID NO: 668827 - DNA, 15 bp, Homo sapiens
tggaaaaatcaatat

SEQ ID NO: 668828 - DNA, 15 bp, Homo sapiens
ggaaaaatcaatatg

SEQ ID NO: 668829 - DNA, 15 bp, Homo sapiens
gaaaaatcaatatgg

SEQ ID NO: 668830 - DNA, 15 bp, Homo sapiens
aaaaatcaatatgga

SEQ ID NO: 668831 - DNA, 15 bp, Homo sapiens
aaaatcaatatggaa

SEQ ID NO: 668832 - DNA, 15 bp, Homo sapiens
aaatcaatatggaaa

SEQ ID NO: 668833 - DNA, 15 bp, Homo sapiens
aatcaatatggaaag

SEQ ID NO: 668834 - DNA, 15 bp, Homo sapiens
atcaatatggaaagg

SEQ ID NO: 668835 - DNA, 15 bp, Homo sapiens
tcaatatggaaaggg

SEQ ID NO: 668836 - DNA, 15 bp, Homo sapiens
caatatggaaagggc

SEQ ID NO: 668837 - DNA, 15 bp, Homo sapiens
aatatggaaagggcg

SEQ ID NO: 668838 - DNA, 15 bp, Homo sapiens
atatggaaagggcga

SEQ ID NO: 668839 - DNA, 15 bp, Homo sapiens
tatggaaagggcgat

SEQ ID NO: 668840 - DNA, 15 bp, Homo sapiens
atggaaagggcgatt

SEQ ID NO: 668841 - DNA, 15 bp, Homo sapiens
tggaaagggcgattt

SEQ ID NO: 668842 - DNA, 15 bp, Homo sapiens
ggaaagggcgatttc

SEQ ID NO: 668843 - DNA, 15 bp, Homo sapiens
gaaagggcgatttca

SEQ ID NO: 668844 - DNA, 15 bp, Homo sapiens
aaagggcgatttcac

SEQ ID NO: 668845 - DNA, 15 bp, Homo sapiens
aagggcgatttcaca

SEQ ID NO: 668846 - DNA, 15 bp, Homo sapiens
agggcgatttcacat

SEQ ID NO: 668847 - DNA, 15 bp, Homo sapiens
gggcgatttcacatg

SEQ ID NO: 668848 - DNA, 15 bp, Homo sapiens
ggcgatttcacatgt

SEQ ID NO: 668849 - DNA, 15 bp, Homo sapiens
gcgatttcacatgtt

SEQ ID NO: 668850 - DNA, 15 bp, Homo sapiens
cgatttcacatgttc

SEQ ID NO: 668851 - DNA, 15 bp, Homo sapiens
gatttcacatgttca

SEQ ID NO: 668852 - DNA, 15 bp, Homo sapiens
atttcacatgttcaa

SEQ ID NO: 668853 - DNA, 15 bp, Homo sapiens
tttcacatgttcaat

SEQ ID NO: 668854 - DNA, 15 bp, Homo sapiens
ttcacatgttcaatc

SEQ ID NO: 668855 - DNA, 15 bp, Homo sapiens
tcacatgttcaatct

SEQ ID NO: 668856 - DNA, 15 bp, Homo sapiens
cacatgttcaatctg

SEQ ID NO: 668857 - DNA, 15 bp, Homo sapiens
acatgttcaatctgc

SEQ ID NO: 668858 - DNA, 15 bp, Homo sapiens
catgttcaatctgct

SEQ ID NO: 668859 - DNA, 15 bp, Homo sapiens
atgttcaatctgctt

SEQ ID NO: 668860 - DNA, 15 bp, Homo sapiens
tgttcaatctgctta

SEQ ID NO: 668861 - DNA, 15 bp, Homo sapiens
gttcaatctgcttat

SEQ ID NO: 668862 - DNA, 15 bp, Homo sapiens
ttcaatctgcttatt

SEQ ID NO: 668863 - DNA, 15 bp, Homo sapiens
tcaatctgcttatta

SEQ ID NO: 668864 - DNA, 15 bp, Homo sapiens
caatctgcttattac

SEQ ID NO: 668865 - DNA, 15 bp, Homo sapiens
aatctgcttattact

SEQ ID NO: 668866 - DNA, 15 bp, Homo sapiens
atctgcttattacta

SEQ ID NO: 668867 - DNA, 15 bp, Homo sapiens
tctgcttattactat

SEQ ID NO: 668868 - DNA, 15 bp, Homo sapiens
ctgcttattactata

SEQ ID NO: 668869 - DNA, 15 bp, Homo sapiens
tgcttattactatat

SEQ ID NO: 668870 - DNA, 15 bp, Homo sapiens
gcttattactatatt

SEQ ID NO: 668871 - DNA, 15 bp, Homo sapiens
cttattactatattt

SEQ ID NO: 668872 - DNA, 15 bp, Homo sapiens
ttattactatatttg

SEQ ID NO: 668873 - DNA, 15 bp, Homo sapiens
tattactatatttgc

SEQ ID NO: 668874 - DNA, 15 bp, Homo sapiens
attactatatttgca

SEQ ID NO: 668875 - DNA, 15 bp, Homo sapiens
ttactatatttgcaa

SEQ ID NO: 668876 - DNA, 15 bp, Homo sapiens
tactatatttgcaat

SEQ ID NO: 668877 - DNA, 15 bp, Homo sapiens
actatatttgcaata

SEQ ID NO: 668878 - DNA, 15 bp, Homo sapiens
ctatatttgcaatat

SEQ ID NO: 668879 - DNA, 15 bp, Homo sapiens
tatatttgcaatatg

SEQ ID NO: 668880 - DNA, 15 bp, Homo sapiens
atatttgcaatatgt

SEQ ID NO: 668881 - DNA, 15 bp, Homo sapiens
tatttgcaatatgta

SEQ ID NO: 668882 - DNA, 15 bp, Homo sapiens
atttgcaatatgtaa

SEQ ID NO: 668883 - DNA, 15 bp, Homo sapiens
tttgcaatatgtaaa

SEQ ID NO: 668884 - DNA, 15 bp, Homo sapiens
ttgcaatatgtaaat

SEQ ID NO: 668885 - DNA, 15 bp, Homo sapiens
tgcaatatgtaaata

SEQ ID NO: 668886 - DNA, 15 bp, Homo sapiens
gcaatatgtaaatag

SEQ ID NO: 668887 - DNA, 15 bp, Homo sapiens
caatatgtaaatagt

SEQ ID NO: 668888 - DNA, 15 bp, Homo sapiens
aatatgtaaatagta

SEQ ID NO: 668889 - DNA, 15 bp, Homo sapiens
atatgtaaatagtag

SEQ ID NO: 668890 - DNA, 15 bp, Homo sapiens
tatgtaaatagtagt

SEQ ID NO: 668891 - DNA, 15 bp, Homo sapiens
atgtaaatagtagtg

SEQ ID NO: 668892 - DNA, 15 bp, Homo sapiens
tgtaaatagtagtga

SEQ ID NO: 668893 - DNA, 15 bp, Homo sapiens
gtaaatagtagtgaa

SEQ ID NO: 668894 - DNA, 15 bp, Homo sapiens
taaatagtagtgaac

SEQ ID NO: 668895 - DNA, 15 bp, Homo sapiens
aaatagtagtgaact

SEQ ID NO: 668896 - DNA, 15 bp, Homo sapiens
aatagtagtgaactt

SEQ ID NO: 668897 - DNA, 15 bp, Homo sapiens
atagtagtgaacttt

SEQ ID NO: 668898 - DNA, 15 bp, Homo sapiens
tagtagtgaactttt

SEQ ID NO: 668899 - DNA, 15 bp, Homo sapiens
agtagtgaacttttc

SEQ ID NO: 668900 - DNA, 15 bp, Homo sapiens
gtagtgaacttttca

SEQ ID NO: 668901 - DNA, 15 bp, Homo sapiens
tagtgaacttttcag

SEQ ID NO: 668902 - DNA, 15 bp, Homo sapiens
agtgaacttttcagt

SEQ ID NO: 668903 - DNA, 15 bp, Homo sapiens
gtgaacttttcagta

SEQ ID NO: 668904 - DNA, 15 bp, Homo sapiens
tgaacttttcagtac

SEQ ID NO: 668905 - DNA, 15 bp, Homo sapiens
gaacttttcagtaca

SEQ ID NO: 668906 - DNA, 15 bp, Homo sapiens
aacttttcagtacaa

SEQ ID NO: 668907 - DNA, 15 bp, Homo sapiens
acttttcagtacaat

SEQ ID NO: 668908 - DNA, 15 bp, Homo sapiens
cttttcagtacaata

SEQ ID NO: 668909 - DNA, 15 bp, Homo sapiens
ttttcagtacaataa

SEQ ID NO: 668910 - DNA, 15 bp, Homo sapiens
tttcagtacaataag

SEQ ID NO: 668911 - DNA, 15 bp, Homo sapiens
ttcagtacaataaga

SEQ ID NO: 668912 - DNA, 15 bp, Homo sapiens
tcagtacaataagat

SEQ ID NO: 668913 - DNA, 15 bp, Homo sapiens
cagtacaataagata

SEQ ID NO: 668914 - DNA, 15 bp, Homo sapiens
agtacaataagatat

SEQ ID NO: 668915 - DNA, 15 bp, Homo sapiens
gtacaataagatata

SEQ ID NO: 668916 - DNA, 15 bp, Homo sapiens
tacaataagatatac

SEQ ID NO: 668917 - DNA, 15 bp, Homo sapiens
acaataagatataca

SEQ ID NO: 668918 - DNA, 15 bp, Homo sapiens
caataagatatacaa

SEQ ID NO: 668919 - DNA, 15 bp, Homo sapiens
aataagatatacaag

SEQ ID NO: 668920 - DNA, 15 bp, Homo sapiens
ataagatatacaagt

SEQ ID NO: 668921 - DNA, 15 bp, Homo sapiens
taagatatacaagtc

SEQ ID NO: 668922 - DNA, 15 bp, Homo sapiens
aagatatacaagtct

SEQ ID NO: 668923 - DNA, 15 bp, Homo sapiens
agatatacaagtcta

SEQ ID NO: 668924 - DNA, 15 bp, Homo sapiens
gatatacaagtctag

SEQ ID NO: 668925 - DNA, 15 bp, Homo sapiens
atatacaagtctaga

SEQ ID NO: 668926 - DNA, 15 bp, Homo sapiens
tatacaagtctagaa

SEQ ID NO: 668927 - DNA, 15 bp, Homo sapiens
atacaagtctagaat

SEQ ID NO: 668928 - DNA, 15 bp, Homo sapiens
tacaagtctagaata

SEQ ID NO: 668929 - DNA, 15 bp, Homo sapiens
acaagtctagaatat

SEQ ID NO: 668930 - DNA, 15 bp, Homo sapiens
caagtctagaatata

SEQ ID NO: 668931 - DNA, 15 bp, Homo sapiens
aagtctagaatataa

SEQ ID NO: 668932 - DNA, 15 bp, Homo sapiens
agtctagaatataat

SEQ ID NO: 668933 - DNA, 15 bp, Homo sapiens
gtctagaatataatt

SEQ ID NO: 668934 - DNA, 15 bp, Homo sapiens
tctagaatataatta

SEQ ID NO: 668935 - DNA, 15 bp, Homo sapiens
ctagaatataattat

SEQ ID NO: 668936 - DNA, 15 bp, Homo sapiens
tagaatataattatt

SEQ ID NO: 668937 - DNA, 15 bp, Homo sapiens
agaatataattatta

SEQ ID NO: 668938 - DNA, 15 bp, Homo sapiens
gaatataattattaa

SEQ ID NO: 668939 - DNA, 15 bp, Homo sapiens
aatataattattaaa

SEQ ID NO: 668940 - DNA, 15 bp, Homo sapiens
atataattattaaag

SEQ ID NO: 668941 - DNA, 15 bp, Homo sapiens
tataattattaaaga

SEQ ID NO: 668942 - DNA, 15 bp, Homo sapiens
ataattattaaagag

SEQ ID NO: 668943 - DNA, 15 bp, Homo sapiens
taattattaaagagg

SEQ ID NO: 668944 - DNA, 15 bp, Homo sapiens
aattattaaagagga

SEQ ID NO: 668945 - DNA, 15 bp, Homo sapiens
attattaaagaggag

SEQ ID NO: 668946 - DNA, 15 bp, Homo sapiens
ttattaaagaggagt

SEQ ID NO: 668947 - DNA, 15 bp, Homo sapiens
tattaaagaggagtt

SEQ ID NO: 668948 - DNA, 15 bp, Homo sapiens
attaaagaggagtta

SEQ ID NO: 668949 - DNA, 15 bp, Homo sapiens
ttaaagaggagttaa

SEQ ID NO: 668950 - DNA, 15 bp, Homo sapiens
taaagaggagttaaa

SEQ ID NO: 668951 - DNA, 15 bp, Homo sapiens
aaagaggagttaaat

SEQ ID NO: 668952 - DNA, 15 bp, Homo sapiens
aagaggagttaaatt

SEQ ID NO: 668953 - DNA, 15 bp, Homo sapiens
agaggagttaaattg

SEQ ID NO: 668954 - DNA, 15 bp, Homo sapiens
gaggagttaaattgt

SEQ ID NO: 668955 - DNA, 15 bp, Homo sapiens
aggagttaaattgta

SEQ ID NO: 668956 - DNA, 15 bp, Homo sapiens
ggagttaaattgtat

SEQ ID NO: 668957 - DNA, 15 bp, Homo sapiens
gagttaaattgtatc

SEQ ID NO: 668958 - DNA, 15 bp, Homo sapiens
agttaaattgtatcc

SEQ ID NO: 668959 - DNA, 15 bp, Homo sapiens
gttaaattgtatcca

SEQ ID NO: 668960 - DNA, 15 bp, Homo sapiens
ttaaattgtatccac

SEQ ID NO: 668961 - DNA, 15 bp, Homo sapiens
taaattgtatccaca

SEQ ID NO: 668962 - DNA, 15 bp, Homo sapiens
aaattgtatccacaa

SEQ ID NO: 668963 - DNA, 15 bp, Homo sapiens
aattgtatccacaag

SEQ ID NO: 668964 - DNA, 15 bp, Homo sapiens
attgtatccacaagt

SEQ ID NO: 668965 - DNA, 15 bp, Homo sapiens
ttgtatccacaagtt

SEQ ID NO: 668966 - DNA, 15 bp, Homo sapiens
tgtatccacaagtta

SEQ ID NO: 668967 - DNA, 15 bp, Homo sapiens
gtatccacaagttat

SEQ ID NO: 668968 - DNA, 15 bp, Homo sapiens
tatccacaagttatc

SEQ ID NO: 668969 - DNA, 15 bp, Homo sapiens
atccacaagttatca

SEQ ID NO: 668970 - DNA, 15 bp, Homo sapiens
tccacaagttatcaa

SEQ ID NO: 668971 - DNA, 15 bp, Homo sapiens
ccacaagttatcaat

SEQ ID NO: 668972 - DNA, 15 bp, Homo sapiens
cacaagttatcaata

SEQ ID NO: 668973 - DNA, 15 bp, Homo sapiens
acaagttatcaatat

SEQ ID NO: 668974 - DNA, 15 bp, Homo sapiens
caagttatcaatatc

SEQ ID NO: 668975 - DNA, 15 bp, Homo sapiens
aagttatcaatatca

SEQ ID NO: 668976 - DNA, 15 bp, Homo sapiens
agttatcaatatcag

SEQ ID NO: 668977 - DNA, 15 bp, Homo sapiens
gttatcaatatcagt

SEQ ID NO: 668978 - DNA, 15 bp, Homo sapiens
ttatcaatatcagtt

SEQ ID NO: 668979 - DNA, 15 bp, Homo sapiens
tatcaatatcagtta

SEQ ID NO: 668980 - DNA, 15 bp, Homo sapiens
atcaatatcagttaa

SEQ ID NO: 668981 - DNA, 15 bp, Homo sapiens
tcaatatcagttaaa

SEQ ID NO: 668982 - DNA, 15 bp, Homo sapiens
caatatcagttaaaa

SEQ ID NO: 668983 - DNA, 15 bp, Homo sapiens
aatatcagttaaaaa

SEQ ID NO: 668984 - DNA, 15 bp, Homo sapiens
atatcagttaaaaac

SEQ ID NO: 668985 - DNA, 15 bp, Homo sapiens
tatcagttaaaaaca

SEQ ID NO: 668986 - DNA, 15 bp, Homo sapiens
atcagttaaaaacaa

SEQ ID NO: 668987 - DNA, 15 bp, Homo sapiens
tcagttaaaaacaaa

SEQ ID NO: 668988 - DNA, 15 bp, Homo sapiens
cagttaaaaacaaat

SEQ ID NO: 668989 - DNA, 15 bp, Homo sapiens
agttaaaaacaaatc

SEQ ID NO: 668990 - DNA, 15 bp, Homo sapiens
gttaaaaacaaatca

SEQ ID NO: 668991 - DNA, 15 bp, Homo sapiens
ttaaaaacaaatcat

SEQ ID NO: 668992 - DNA, 15 bp, Homo sapiens
taaaaacaaatcatt

SEQ ID NO: 668993 - DNA, 15 bp, Homo sapiens
aaaaacaaatcatta

SEQ ID NO: 668994 - DNA, 15 bp, Homo sapiens
aaaacaaatcattaa

SEQ ID NO: 668995 - DNA, 15 bp, Homo sapiens
aaacaaatcattaac

SEQ ID NO: 668996 - DNA, 15 bp, Homo sapiens
aacaaatcattaact

SEQ ID NO: 668997 - DNA, 15 bp, Homo sapiens
acaaatcattaactt

SEQ ID NO: 668998 - DNA, 15 bp, Homo sapiens
caaatcattaacttt

SEQ ID NO: 668999 - DNA, 15 bp, Homo sapiens
aaatcattaactttt

SEQ ID NO: 669000 - DNA, 15 bp, Homo sapiens
aatcattaacttttt

SEQ ID NO: 669001 - DNA, 15 bp, Homo sapiens
atcattaactttttt

SEQ ID NO: 669002 - DNA, 15 bp, Homo sapiens
tcattaacttttttg

SEQ ID NO: 669003 - DNA, 15 bp, Homo sapiens
cattaacttttttgc

SEQ ID NO: 669004 - DNA, 15 bp, Homo sapiens
attaacttttttgca

SEQ ID NO: 669005 - DNA, 15 bp, Homo sapiens
ttaacttttttgcag

SEQ ID NO: 669006 - DNA, 15 bp, Homo sapiens
taacttttttgcagt

SEQ ID NO: 669007 - DNA, 15 bp, Homo sapiens
aacttttttgcagtt

SEQ ID NO: 669008 - DNA, 15 bp, Homo sapiens
acttttttgcagtta

SEQ ID NO: 669009 - DNA, 15 bp, Homo sapiens
cttttttgcagttaa

SEQ ID NO: 669010 - DNA, 15 bp, Homo sapiens
ttttttgcagttaac

SEQ ID NO: 669011 - DNA, 15 bp, Homo sapiens
tttttgcagttaaca

SEQ ID NO: 669012 - DNA, 15 bp, Homo sapiens
ttttgcagttaacaa

SEQ ID NO: 669013 - DNA, 15 bp, Homo sapiens
tttgcagttaacaac

SEQ ID NO: 669014 - DNA, 15 bp, Homo sapiens
ttgcagttaacaaca

SEQ ID NO: 669015 - DNA, 15 bp, Homo sapiens
tgcagttaacaacaa

SEQ ID NO: 669016 - DNA, 15 bp, Homo sapiens
gcagttaacaacaaa

SEQ ID NO: 669017 - DNA, 15 bp, Homo sapiens
cagttaacaacaaaa

SEQ ID NO: 669018 - DNA, 15 bp, Homo sapiens
agttaacaacaaaaa

SEQ ID NO: 669019 - DNA, 15 bp, Homo sapiens
gttaacaacaaaaat

SEQ ID NO: 669020 - DNA, 15 bp, Homo sapiens
ttaacaacaaaaatt

SEQ ID NO: 669021 - DNA, 15 bp, Homo sapiens
taacaacaaaaattt

SEQ ID NO: 669022 - DNA, 15 bp, Homo sapiens
aacaacaaaaattta

SEQ ID NO: 669023 - DNA, 15 bp, Homo sapiens
acaacaaaaatttat

SEQ ID NO: 669024 - DNA, 15 bp, Homo sapiens
caacaaaaatttatc

SEQ ID NO: 669025 - DNA, 15 bp, Homo sapiens
aacaaaaatttatcc

SEQ ID NO: 669026 - DNA, 15 bp, Homo sapiens
acaaaaatttatcca

SEQ ID NO: 669027 - DNA, 15 bp, Homo sapiens
caaaaatttatccat

SEQ ID NO: 669028 - DNA, 15 bp, Homo sapiens
aaaaatttatccatt

SEQ ID NO: 669029 - DNA, 15 bp, Homo sapiens
aaaatttatccattt

SEQ ID NO: 669030 - DNA, 15 bp, Homo sapiens
aaatttatccatttt

SEQ ID NO: 669031 - DNA, 15 bp, Homo sapiens
aatttatccattttc

SEQ ID NO: 669032 - DNA, 15 bp, Homo sapiens
atttatccattttct

SEQ ID NO: 669033 - DNA, 15 bp, Homo sapiens
tttatccattttctt

SEQ ID NO: 669034 - DNA, 15 bp, Homo sapiens
ttatccattttcttt

SEQ ID NO: 669035 - DNA, 15 bp, Homo sapiens
tatccattttctttg

SEQ ID NO: 669036 - DNA, 15 bp, Homo sapiens
atccattttctttgg

SEQ ID NO: 669037 - DNA, 15 bp, Homo sapiens
tccattttctttggc

SEQ ID NO: 669038 - DNA, 15 bp, Homo sapiens
ccattttctttggct

SEQ ID NO: 669039 - DNA, 15 bp, Homo sapiens
cattttctttggcta

SEQ ID NO: 669040 - DNA, 15 bp, Homo sapiens
attttctttggctaa

SEQ ID NO: 669041 - DNA, 15 bp, Homo sapiens
ttttctttggctaac

SEQ ID NO: 669042 - DNA, 15 bp, Homo sapiens
tttctttggctaaca

SEQ ID NO: 669043 - DNA, 15 bp, Homo sapiens
ttctttggctaacag

SEQ ID NO: 669044 - DNA, 15 bp, Homo sapiens
tctttggctaacagt

SEQ ID NO: 669045 - DNA, 15 bp, Homo sapiens
ctttggctaacagtt

SEQ ID NO: 669046 - DNA, 15 bp, Homo sapiens
tttggctaacagttc

SEQ ID NO: 669047 - DNA, 15 bp, Homo sapiens
ttggctaacagttca

SEQ ID NO: 669048 - DNA, 15 bp, Homo sapiens
tggctaacagttcaa

SEQ ID NO: 669049 - DNA, 15 bp, Homo sapiens
ggctaacagttcaag

SEQ ID NO: 669050 - DNA, 15 bp, Homo sapiens
gctaacagttcaagt

SEQ ID NO: 669051 - DNA, 15 bp, Homo sapiens
ctaacagttcaagta

SEQ ID NO: 669052 - DNA, 15 bp, Homo sapiens
taacagttcaagtaa

SEQ ID NO: 669053 - DNA, 15 bp, Homo sapiens
aacagttcaagtaaa

SEQ ID NO: 669054 - DNA, 15 bp, Homo sapiens
acagttcaagtaaat

SEQ ID NO: 669055 - DNA, 15 bp, Homo sapiens
cagttcaagtaaata

SEQ ID NO: 669056 - DNA, 15 bp, Homo sapiens
agttcaagtaaatag

SEQ ID NO: 669057 - DNA, 15 bp, Homo sapiens
gttcaagtaaataga

SEQ ID NO: 669058 - DNA, 15 bp, Homo sapiens
ttcaagtaaatagat

SEQ ID NO: 669059 - DNA, 15 bp, Homo sapiens
tcaagtaaatagatt

SEQ ID NO: 669060 - DNA, 15 bp, Homo sapiens
caagtaaatagattt

SEQ ID NO: 669061 - DNA, 15 bp, Homo sapiens
aagtaaatagatttg

SEQ ID NO: 669062 - DNA, 15 bp, Homo sapiens
agtaaatagatttgc

SEQ ID NO: 669063 - DNA, 15 bp, Homo sapiens
gtaaatagatttgcc

SEQ ID NO: 669064 - DNA, 15 bp, Homo sapiens
taaatagatttgcca

SEQ ID NO: 669065 - DNA, 15 bp, Homo sapiens
aaatagatttgccat

SEQ ID NO: 669066 - DNA, 15 bp, Homo sapiens
aatagatttgccatc

SEQ ID NO: 669067 - DNA, 15 bp, Homo sapiens
atagatttgccatca

SEQ ID NO: 669068 - DNA, 15 bp, Homo sapiens
tagatttgccatcat

SEQ ID NO: 669069 - DNA, 15 bp, Homo sapiens
agatttgccatcatg

SEQ ID NO: 669070 - DNA, 15 bp, Homo sapiens
gatttgccatcatgg

SEQ ID NO: 669071 - DNA, 15 bp, Homo sapiens
atttgccatcatgga

SEQ ID NO: 669072 - DNA, 15 bp, Homo sapiens
tttgccatcatggag

SEQ ID NO: 669073 - DNA, 15 bp, Homo sapiens
ttgccatcatggagc

SEQ ID NO: 669074 - DNA, 15 bp, Homo sapiens
tgccatcatggagct

SEQ ID NO: 669075 - DNA, 15 bp, Homo sapiens
gccatcatggagctc

SEQ ID NO: 669076 - DNA, 15 bp, Homo sapiens
ccatcatggagctca

SEQ ID NO: 669077 - DNA, 15 bp, Homo sapiens
catcatggagctcat

SEQ ID NO: 669078 - DNA, 15 bp, Homo sapiens
atcatggagctcatc

SEQ ID NO: 669079 - DNA, 15 bp, Homo sapiens
tcatggagctcatca

SEQ ID NO: 669080 - DNA, 15 bp, Homo sapiens
catggagctcatcac

SEQ ID NO: 669081 - DNA, 15 bp, Homo sapiens
atggagctcatcact

SEQ ID NO: 669082 - DNA, 15 bp, Homo sapiens
tggagctcatcactt

SEQ ID NO: 669083 - DNA, 15 bp, Homo sapiens
ggagctcatcacttt

SEQ ID NO: 669084 - DNA, 15 bp, Homo sapiens
gagctcatcacttta

SEQ ID NO: 669085 - DNA, 15 bp, Homo sapiens
agctcatcactttat

SEQ ID NO: 669086 - DNA, 15 bp, Homo sapiens
gctcatcactttata

SEQ ID NO: 669087 - DNA, 15 bp, Homo sapiens
ctcatcactttataa

SEQ ID NO: 669088 - DNA, 15 bp, Homo sapiens
tcatcactttataat

SEQ ID NO: 669089 - DNA, 15 bp, Homo sapiens
catcactttataatt

SEQ ID NO: 669090 - DNA, 15 bp, Homo sapiens
atcactttataattt

SEQ ID NO: 669091 - DNA, 15 bp, Homo sapiens
tcactttataattta

SEQ ID NO: 669092 - DNA, 15 bp, Homo sapiens
cactttataatttaa

SEQ ID NO: 669093 - DNA, 15 bp, Homo sapiens
actttataatttaaa

SEQ ID NO: 669094 - DNA, 15 bp, Homo sapiens
ctttataatttaaaa

SEQ ID NO: 669095 - DNA, 15 bp, Homo sapiens
tttataatttaaaaa

SEQ ID NO: 669096 - DNA, 15 bp, Homo sapiens
ttataatttaaaaaa

SEQ ID NO: 669097 - DNA, 15 bp, Homo sapiens
tataatttaaaaaaa

SEQ ID NO: 669098 - DNA, 15 bp, Homo sapiens
ataatttaaaaaaag

SEQ ID NO: 669099 - DNA, 15 bp, Homo sapiens
taatttaaaaaaaga

SEQ ID NO: 669100 - DNA, 15 bp, Homo sapiens
aatttaaaaaaagaa

SEQ ID NO: 669101 - DNA, 15 bp, Homo sapiens
atttaaaaaaagaaa

SEQ ID NO: 669102 - DNA, 15 bp, Homo sapiens
tttaaaaaaagaaaa

SEQ ID NO: 669103 - DNA, 15 bp, Homo sapiens
ttaaaaaaagaaaaa

SEQ ID NO: 669104 - DNA, 15 bp, Homo sapiens
taaaaaaagaaaaat

SEQ ID NO: 669105 - DNA, 15 bp, Homo sapiens
aaaaaaagaaaaatg

SEQ ID NO: 669106 - DNA, 15 bp, Homo sapiens
aaaaaagaaaaatgt

SEQ ID NO: 669107 - DNA, 15 bp, Homo sapiens
aaaaagaaaaatgta

SEQ ID NO: 669108 - DNA, 15 bp, Homo sapiens
aaaagaaaaatgtaa

SEQ ID NO: 669109 - DNA, 15 bp, Homo sapiens
aaagaaaaatgtaat

SEQ ID NO: 669110 - DNA, 15 bp, Homo sapiens
aagaaaaatgtaatg

SEQ ID NO: 669111 - DNA, 15 bp, Homo sapiens
agaaaaatgtaatgt

SEQ ID NO: 669112 - DNA, 15 bp, Homo sapiens
gaaaaatgtaatgtc

SEQ ID NO: 669113 - DNA, 15 bp, Homo sapiens
aaaaatgtaatgtct

SEQ ID NO: 669114 - DNA, 15 bp, Homo sapiens
aaaatgtaatgtctg

SEQ ID NO: 669115 - DNA, 15 bp, Homo sapiens
aaatgtaatgtctgt

SEQ ID NO: 669116 - DNA, 15 bp, Homo sapiens
aatgtaatgtctgtt

SEQ ID NO: 669117 - DNA, 15 bp, Homo sapiens
atgtaatgtctgttt

SEQ ID NO: 669118 - DNA, 15 bp, Homo sapiens
tgtaatgtctgtttg

SEQ ID NO: 669119 - DNA, 15 bp, Homo sapiens
gtaatgtctgtttgt

SEQ ID NO: 669120 - DNA, 15 bp, Homo sapiens
taatgtctgtttgtt

SEQ ID NO: 669121 - DNA, 15 bp, Homo sapiens
aatgtctgtttgtta

SEQ ID NO: 669122 - DNA, 15 bp, Homo sapiens
atgtctgtttgttat

SEQ ID NO: 669123 - DNA, 15 bp, Homo sapiens
tgtctgtttgttata

SEQ ID NO: 669124 - DNA, 15 bp, Homo sapiens
gtctgtttgttataa

SEQ ID NO: 669125 - DNA, 15 bp, Homo sapiens
tctgtttgttataat

SEQ ID NO: 669126 - DNA, 15 bp, Homo sapiens
ctgtttgttataatg

SEQ ID NO: 669127 - DNA, 15 bp, Homo sapiens
tgtttgttataatgt

SEQ ID NO: 669128 - DNA, 15 bp, Homo sapiens
gtttgttataatgtc

SEQ ID NO: 669129 - DNA, 15 bp, Homo sapiens
tttgttataatgtcc

SEQ ID NO: 669130 - DNA, 15 bp, Homo sapiens
ttgttataatgtcct

SEQ ID NO: 669131 - DNA, 15 bp, Homo sapiens
tgttataatgtccta

SEQ ID NO: 669132 - DNA, 15 bp, Homo sapiens
gttataatgtcctat

SEQ ID NO: 669133 - DNA, 15 bp, Homo sapiens
ttataatgtcctata

SEQ ID NO: 669134 - DNA, 15 bp, Homo sapiens
tataatgtcctatac

SEQ ID NO: 669135 - DNA, 15 bp, Homo sapiens
ataatgtcctataca

SEQ ID NO: 669136 - DNA, 15 bp, Homo sapiens
taatgtcctatacag

SEQ ID NO: 669137 - DNA, 15 bp, Homo sapiens
aatgtcctatacagt

SEQ ID NO: 669138 - DNA, 15 bp, Homo sapiens
atgtcctatacagtt

SEQ ID NO: 669139 - DNA, 15 bp, Homo sapiens
tgtcctatacagttt

SEQ ID NO: 669140 - DNA, 15 bp, Homo sapiens
gtcctatacagtttt

SEQ ID NO: 669141 - DNA, 15 bp, Homo sapiens
tcctatacagttttt

SEQ ID NO: 669142 - DNA, 15 bp, Homo sapiens
cctatacagtttttg

SEQ ID NO: 669143 - DNA, 15 bp, Homo sapiens
ctatacagtttttgt

SEQ ID NO: 669144 - DNA, 15 bp, Homo sapiens
tatacagtttttgtt

SEQ ID NO: 669145 - DNA, 15 bp, Homo sapiens
atacagtttttgttt

SEQ ID NO: 669146 - DNA, 15 bp, Homo sapiens
tacagtttttgtttt

SEQ ID NO: 669147 - DNA, 15 bp, Homo sapiens
acagtttttgtttta

SEQ ID NO: 669148 - DNA, 15 bp, Homo sapiens
cagtttttgttttaa

SEQ ID NO: 669149 - DNA, 15 bp, Homo sapiens
agtttttgttttaag

SEQ ID NO: 669150 - DNA, 15 bp, Homo sapiens
gtttttgttttaagt

SEQ ID NO: 669151 - DNA, 15 bp, Homo sapiens
tttttgttttaagtt

SEQ ID NO: 669152 - DNA, 15 bp, Homo sapiens
ttttgttttaagttt

SEQ ID NO: 669153 - DNA, 15 bp, Homo sapiens
tttgttttaagttta

SEQ ID NO: 669154 - DNA, 15 bp, Homo sapiens
ttgttttaagtttag

SEQ ID NO: 669155 - DNA, 15 bp, Homo sapiens
tgttttaagtttagt

SEQ ID NO: 669156 - DNA, 15 bp, Homo sapiens
gttttaagtttagta

SEQ ID NO: 669157 - DNA, 15 bp, Homo sapiens
ttttaagtttagtaa

SEQ ID NO: 669158 - DNA, 15 bp, Homo sapiens
tttaagtttagtaaa

SEQ ID NO: 669159 - DNA, 15 bp, Homo sapiens
ttaagtttagtaaat

SEQ ID NO: 669160 - DNA, 15 bp, Homo sapiens
taagtttagtaaatt

SEQ ID NO: 669161 - DNA, 15 bp, Homo sapiens
aagtttagtaaattg

SEQ ID NO: 669162 - DNA, 15 bp, Homo sapiens
agtttagtaaattga

SEQ ID NO: 669163 - DNA, 15 bp, Homo sapiens
gtttagtaaattgat

SEQ ID NO: 669164 - DNA, 15 bp, Homo sapiens
tttagtaaattgatt

SEQ ID NO: 669165 - DNA, 15 bp, Homo sapiens
ttagtaaattgatta

SEQ ID NO: 669166 - DNA, 15 bp, Homo sapiens
tagtaaattgattaa

SEQ ID NO: 669167 - DNA, 15 bp, Homo sapiens
agtaaattgattaat

SEQ ID NO: 669168 - DNA, 15 bp, Homo sapiens
gtaaattgattaatt

SEQ ID NO: 669169 - DNA, 15 bp, Homo sapiens
taaattgattaattt

SEQ ID NO: 669170 - DNA, 15 bp, Homo sapiens
aaattgattaatttc

SEQ ID NO: 669171 - DNA, 15 bp, Homo sapiens
aattgattaatttcc

SEQ ID NO: 669172 - DNA, 15 bp, Homo sapiens
attgattaatttcca

SEQ ID NO: 669173 - DNA, 15 bp, Homo sapiens
ttgattaatttccag

SEQ ID NO: 669174 - DNA, 15 bp, Homo sapiens
tgattaatttccagt

SEQ ID NO: 669175 - DNA, 15 bp, Homo sapiens
gattaatttccagtt

SEQ ID NO: 669176 - DNA, 15 bp, Homo sapiens
attaatttccagttc

SEQ ID NO: 669177 - DNA, 15 bp, Homo sapiens
ttaatttccagttct

SEQ ID NO: 669178 - DNA, 15 bp, Homo sapiens
taatttccagttctg

SEQ ID NO: 669179 - DNA, 15 bp, Homo sapiens
aatttccagttctga

SEQ ID NO: 669180 - DNA, 15 bp, Homo sapiens
atttccagttctgaa

SEQ ID NO: 669181 - DNA, 15 bp, Homo sapiens
tttccagttctgaaa

SEQ ID NO: 669182 - DNA, 15 bp, Homo sapiens
ttccagttctgaaaa

SEQ ID NO: 669183 - DNA, 15 bp, Homo sapiens
tccagttctgaaaat

SEQ ID NO: 669184 - DNA, 15 bp, Homo sapiens
ccagttctgaaaatt

SEQ ID NO: 669185 - DNA, 15 bp, Homo sapiens
cagttctgaaaattt

SEQ ID NO: 669186 - DNA, 15 bp, Homo sapiens
agttctgaaaatttc

SEQ ID NO: 669187 - DNA, 15 bp, Homo sapiens
gttctgaaaatttct

SEQ ID NO: 669188 - DNA, 15 bp, Homo sapiens
ttctgaaaatttctc

SEQ ID NO: 669189 - DNA, 15 bp, Homo sapiens
tctgaaaatttctcc

SEQ ID NO: 669190 - DNA, 15 bp, Homo sapiens
ctgaaaatttctcct

SEQ ID NO: 669191 - DNA, 15 bp, Homo sapiens
tgaaaatttctcctg

SEQ ID NO: 669192 - DNA, 15 bp, Homo sapiens
gaaaatttctcctga

SEQ ID NO: 669193 - DNA, 15 bp, Homo sapiens
aaaatttctcctgaa

SEQ ID NO: 669194 - DNA, 15 bp, Homo sapiens
aaatttctcctgaaa

SEQ ID NO: 669195 - DNA, 15 bp, Homo sapiens
aatttctcctgaaag

SEQ ID NO: 669196 - DNA, 15 bp, Homo sapiens
atttctcctgaaaga

SEQ ID NO: 669197 - DNA, 15 bp, Homo sapiens
tttctcctgaaagag

SEQ ID NO: 669198 - DNA, 15 bp, Homo sapiens
ttctcctgaaagaga

SEQ ID NO: 669199 - DNA, 15 bp, Homo sapiens
tctcctgaaagagat

SEQ ID NO: 669200 - DNA, 15 bp, Homo sapiens
ctcctgaaagagatg

SEQ ID NO: 669201 - DNA, 15 bp, Homo sapiens
tcctgaaagagatga

SEQ ID NO: 669202 - DNA, 15 bp, Homo sapiens
cctgaaagagatgaa

SEQ ID NO: 669203 - DNA, 15 bp, Homo sapiens
ctgaaagagatgaat

SEQ ID NO: 669204 - DNA, 15 bp, Homo sapiens
tgaaagagatgaata

SEQ ID NO: 669205 - DNA, 15 bp, Homo sapiens
gaaagagatgaataa

SEQ ID NO: 669206 - DNA, 15 bp, Homo sapiens
aaagagatgaataaa

SEQ ID NO: 669207 - DNA, 15 bp, Homo sapiens
aagagatgaataaag

SEQ ID NO: 669208 - DNA, 15 bp, Homo sapiens
agagatgaataaagg

SEQ ID NO: 669209 - DNA, 15 bp, Homo sapiens
gagatgaataaagga

SEQ ID NO: 669210 - DNA, 15 bp, Homo sapiens
agatgaataaaggat

SEQ ID NO: 669211 - DNA, 15 bp, Homo sapiens
gatgaataaaggatg

SEQ ID NO: 669212 - DNA, 15 bp, Homo sapiens
atgaataaaggatgg

SEQ ID NO: 669213 - DNA, 15 bp, Homo sapiens
tgaataaaggatggt

SEQ ID NO: 669214 - DNA, 15 bp, Homo sapiens
gaataaaggatggta

SEQ ID NO: 669215 - DNA, 15 bp, Homo sapiens
aataaaggatggtag

SEQ ID NO: 669216 - DNA, 15 bp, Homo sapiens
ataaaggatggtagg

SEQ ID NO: 669217 - DNA, 15 bp, Homo sapiens
taaaggatggtaggg

SEQ ID NO: 669218 - DNA, 15 bp, Homo sapiens
aaaggatggtagggt

SEQ ID NO: 669219 - DNA, 15 bp, Homo sapiens
aaggatggtagggtg

SEQ ID NO: 669220 - DNA, 15 bp, Homo sapiens
aggatggtagggtgg

SEQ ID NO: 669221 - DNA, 15 bp, Homo sapiens
ggatggtagggtggg

SEQ ID NO: 669222 - DNA, 15 bp, Homo sapiens
gatggtagggtgggg

SEQ ID NO: 669223 - DNA, 15 bp, Homo sapiens
atggtagggtggggg

SEQ ID NO: 669224 - DNA, 15 bp, Homo sapiens
tggtagggtgggggt

SEQ ID NO: 669225 - DNA, 15 bp, Homo sapiens
ggtagggtgggggtg

SEQ ID NO: 669226 - DNA, 15 bp, Homo sapiens
gtagggtgggggtgg

SEQ ID NO: 669227 - DNA, 15 bp, Homo sapiens
tagggtgggggtggt

SEQ ID NO: 669228 - DNA, 15 bp, Homo sapiens
agggtgggggtggtg

SEQ ID NO: 669229 - DNA, 15 bp, Homo sapiens
gggtgggggtggtgg

SEQ ID NO: 669230 - DNA, 15 bp, Homo sapiens
ggtgggggtggtggc

SEQ ID NO: 669231 - DNA, 15 bp, Homo sapiens
gtgggggtggtggct

SEQ ID NO: 669232 - DNA, 15 bp, Homo sapiens
tgggggtggtggctc

SEQ ID NO: 669233 - DNA, 15 bp, Homo sapiens
gggggtggtggctca

SEQ ID NO: 669234 - DNA, 15 bp, Homo sapiens
ggggtggtggctcat

SEQ ID NO: 669235 - DNA, 15 bp, Homo sapiens
gggtggtggctcatg

SEQ ID NO: 669236 - DNA, 15 bp, Homo sapiens
ggtggtggctcatgc

SEQ ID NO: 669237 - DNA, 15 bp, Homo sapiens
gtggtggctcatgct

SEQ ID NO: 669238 - DNA, 15 bp, Homo sapiens
tggtggctcatgcta

SEQ ID NO: 669239 - DNA, 15 bp, Homo sapiens
ggtggctcatgctat

SEQ ID NO: 669240 - DNA, 15 bp, Homo sapiens
gtggctcatgctata

SEQ ID NO: 669241 - DNA, 15 bp, Homo sapiens
tggctcatgctataa

SEQ ID NO: 669242 - DNA, 15 bp, Homo sapiens
ggctcatgctataat

SEQ ID NO: 669243 - DNA, 15 bp, Homo sapiens
gctcatgctataatc

SEQ ID NO: 669244 - DNA, 15 bp, Homo sapiens
ctcatgctataatcc

SEQ ID NO: 669245 - DNA, 15 bp, Homo sapiens
tcatgctataatccc

SEQ ID NO: 669246 - DNA, 15 bp, Homo sapiens
catgctataatccca

SEQ ID NO: 669247 - DNA, 15 bp, Homo sapiens
atgctataatcccag

SEQ ID NO: 669248 - DNA, 15 bp, Homo sapiens
tgctataatcccagc

SEQ ID NO: 669249 - DNA, 15 bp, Homo sapiens
gctataatcccagca

SEQ ID NO: 669250 - DNA, 15 bp, Homo sapiens
ctataatcccagcac

SEQ ID NO: 669251 - DNA, 15 bp, Homo sapiens
tataatcccagcact

SEQ ID NO: 669252 - DNA, 15 bp, Homo sapiens
ataatcccagcactt

SEQ ID NO: 669253 - DNA, 15 bp, Homo sapiens
gcactttgggaggcg

SEQ ID NO: 669254 - DNA, 15 bp, Homo sapiens
cactttgggaggcgg

SEQ ID NO: 669255 - DNA, 15 bp, Homo sapiens
actttgggaggcgga

SEQ ID NO: 669256 - DNA, 15 bp, Homo sapiens
ctttgggaggcggag

SEQ ID NO: 669257 - DNA, 15 bp, Homo sapiens
tttgggaggcggagg

SEQ ID NO: 669258 - DNA, 15 bp, Homo sapiens
ttgggaggcggaggt

SEQ ID NO: 669259 - DNA, 15 bp, Homo sapiens
tgggaggcggaggtg

SEQ ID NO: 669260 - DNA, 15 bp, Homo sapiens
gggaggcggaggtga

SEQ ID NO: 669261 - DNA, 15 bp, Homo sapiens
ggaggcggaggtgag

SEQ ID NO: 669262 - DNA, 15 bp, Homo sapiens
gaggcggaggtgagc

SEQ ID NO: 669263 - DNA, 15 bp, Homo sapiens
aggcggaggtgagca

SEQ ID NO: 669264 - DNA, 15 bp, Homo sapiens
ggcggaggtgagcag

SEQ ID NO: 669265 - DNA, 15 bp, Homo sapiens
gcggaggtgagcaga

SEQ ID NO: 669266 - DNA, 15 bp, Homo sapiens
cggaggtgagcagat

SEQ ID NO: 669267 - DNA, 15 bp, Homo sapiens
ggaggtgagcagatc

SEQ ID NO: 669268 - DNA, 15 bp, Homo sapiens
gaggtgagcagatca

SEQ ID NO: 669269 - DNA, 15 bp, Homo sapiens
aggtgagcagatcac

SEQ ID NO: 669270 - DNA, 15 bp, Homo sapiens
ggtgagcagatcact

SEQ ID NO: 669271 - DNA, 15 bp, Homo sapiens
gtgagcagatcactt

SEQ ID NO: 669272 - DNA, 15 bp, Homo sapiens
tgagcagatcacttg

SEQ ID NO: 669273 - DNA, 15 bp, Homo sapiens
gagcagatcacttga

SEQ ID NO: 669274 - DNA, 15 bp, Homo sapiens
agcagatcacttgag

SEQ ID NO: 669275 - DNA, 15 bp, Homo sapiens
gcagatcacttgagg

SEQ ID NO: 669276 - DNA, 15 bp, Homo sapiens
cagatcacttgaggt

SEQ ID NO: 669277 - DNA, 15 bp, Homo sapiens
agatcacttgaggtc

SEQ ID NO: 669278 - DNA, 15 bp, Homo sapiens
gatcacttgaggtca

SEQ ID NO: 669279 - DNA, 15 bp, Homo sapiens
atcacttgaggtcag

SEQ ID NO: 669280 - DNA, 15 bp, Homo sapiens
tcacttgaggtcagg

SEQ ID NO: 669281 - DNA, 15 bp, Homo sapiens
cacttgaggtcagga

SEQ ID NO: 669282 - DNA, 15 bp, Homo sapiens
acttgaggtcaggag

SEQ ID NO: 669283 - DNA, 15 bp, Homo sapiens
cttgaggtcaggagt

SEQ ID NO: 669284 - DNA, 15 bp, Homo sapiens
ttgaggtcaggagtt

SEQ ID NO: 669285 - DNA, 15 bp, Homo sapiens
tgaggtcaggagttc

SEQ ID NO: 669286 - DNA, 15 bp, Homo sapiens
gaggtcaggagttcg

SEQ ID NO: 669287 - DNA, 15 bp, Homo sapiens
aggtcaggagttcga

SEQ ID NO: 669288 - DNA, 15 bp, Homo sapiens
ggtcaggagttcgag

SEQ ID NO: 669289 - DNA, 15 bp, Homo sapiens
gtcaggagttcgaga

SEQ ID NO: 669290 - DNA, 15 bp, Homo sapiens
tcaggagttcgagac

SEQ ID NO: 669291 - DNA, 15 bp, Homo sapiens
caggagttcgagacc

SEQ ID NO: 669292 - DNA, 15 bp, Homo sapiens
aggagttcgagacca

SEQ ID NO: 669293 - DNA, 15 bp, Homo sapiens
tcgagaccagcctgg

SEQ ID NO: 669294 - DNA, 15 bp, Homo sapiens
cgagaccagcctggc

SEQ ID NO: 669295 - DNA, 15 bp, Homo sapiens
gagaccagcctggcc

SEQ ID NO: 669296 - DNA, 15 bp, Homo sapiens
agaccagcctggcca

SEQ ID NO: 669297 - DNA, 15 bp, Homo sapiens
gaccagcctggccaa

SEQ ID NO: 669298 - DNA, 15 bp, Homo sapiens
accagcctggccaac

SEQ ID NO: 669299 - DNA, 15 bp, Homo sapiens
ccagcctggccaaca

SEQ ID NO: 669300 - DNA, 15 bp, Homo sapiens
cagcctggccaacat

SEQ ID NO: 669301 - DNA, 15 bp, Homo sapiens
agcctggccaacatg

SEQ ID NO: 669302 - DNA, 15 bp, Homo sapiens
gcctggccaacatgg

SEQ ID NO: 669303 - DNA, 15 bp, Homo sapiens
cctggccaacatggt

SEQ ID NO: 669304 - DNA, 15 bp, Homo sapiens
ctggccaacatggtg

SEQ ID NO: 669305 - DNA, 15 bp, Homo sapiens
tggccaacatggtga

SEQ ID NO: 669306 - DNA, 15 bp, Homo sapiens
ggccaacatggtgaa

SEQ ID NO: 669307 - DNA, 15 bp, Homo sapiens
gccaacatggtgaaa

SEQ ID NO: 669308 - DNA, 15 bp, Homo sapiens
ccaacatggtgaaac

SEQ ID NO: 669309 - DNA, 15 bp, Homo sapiens
caacatggtgaaacc

SEQ ID NO: 669310 - DNA, 15 bp, Homo sapiens
aacatggtgaaaccc

SEQ ID NO: 669311 - DNA, 15 bp, Homo sapiens
acatggtgaaacccc

SEQ ID NO: 669312 - DNA, 15 bp, Homo sapiens
catggtgaaacccca

SEQ ID NO: 669313 - DNA, 15 bp, Homo sapiens
atggtgaaaccccat

SEQ ID NO: 669314 - DNA, 15 bp, Homo sapiens
tggtgaaaccccatc

SEQ ID NO: 669315 - DNA, 15 bp, Homo sapiens
ggtgaaaccccatct

SEQ ID NO: 669316 - DNA, 15 bp, Homo sapiens
gtgaaaccccatctc

SEQ ID NO: 669317 - DNA, 15 bp, Homo sapiens
tgaaaccccatctcc

SEQ ID NO: 669318 - DNA, 15 bp, Homo sapiens
gaaaccccatctcca

SEQ ID NO: 669319 - DNA, 15 bp, Homo sapiens
aaaccccatctccac

SEQ ID NO: 669320 - DNA, 15 bp, Homo sapiens
aaccccatctccact

SEQ ID NO: 669321 - DNA, 15 bp, Homo sapiens
accccatctccacta

SEQ ID NO: 669322 - DNA, 15 bp, Homo sapiens
ccccatctccactaa

SEQ ID NO: 669323 - DNA, 15 bp, Homo sapiens
cccatctccactaaa

SEQ ID NO: 669324 - DNA, 15 bp, Homo sapiens
ccatctccactaaaa

SEQ ID NO: 669325 - DNA, 15 bp, Homo sapiens
catctccactaaaaa

SEQ ID NO: 669326 - DNA, 15 bp, Homo sapiens
atctccactaaaaat

SEQ ID NO: 669327 - DNA, 15 bp, Homo sapiens
tctccactaaaaata

SEQ ID NO: 669328 - DNA, 15 bp, Homo sapiens
ctccactaaaaatac

SEQ ID NO: 669329 - DNA, 15 bp, Homo sapiens
tccactaaaaataca

SEQ ID NO: 669330 - DNA, 15 bp, Homo sapiens
ccactaaaaatacaa

SEQ ID NO: 669331 - DNA, 15 bp, Homo sapiens
cactaaaaatacaaa

SEQ ID NO: 669332 - DNA, 15 bp, Homo sapiens
ctaaaaatacaaaaa

SEQ ID NO: 669333 - DNA, 15 bp, Homo sapiens
taaaaatacaaaaat

SEQ ID NO: 669334 - DNA, 15 bp, Homo sapiens
aaaaatacaaaaatt

SEQ ID NO: 669335 - DNA, 15 bp, Homo sapiens
aaaatacaaaaatta

SEQ ID NO: 669336 - DNA, 15 bp, Homo sapiens
aaatacaaaaattag

SEQ ID NO: 669337 - DNA, 15 bp, Homo sapiens
aatacaaaaattagc

SEQ ID NO: 669338 - DNA, 15 bp, Homo sapiens
atacaaaaattagcc

SEQ ID NO: 669339 - DNA, 15 bp, Homo sapiens
tacaaaaattagcca

SEQ ID NO: 669340 - DNA, 15 bp, Homo sapiens
acaaaaattagccag

SEQ ID NO: 669341 - DNA, 15 bp, Homo sapiens
caaaaattagccagg

SEQ ID NO: 669342 - DNA, 15 bp, Homo sapiens
aaaaattagccaggt

SEQ ID NO: 669343 - DNA, 15 bp, Homo sapiens
aaaattagccaggta

SEQ ID NO: 669344 - DNA, 15 bp, Homo sapiens
aaattagccaggtat

SEQ ID NO: 669345 - DNA, 15 bp, Homo sapiens
aattagccaggtatg

SEQ ID NO: 669346 - DNA, 15 bp, Homo sapiens
attagccaggtatgg

SEQ ID NO: 669347 - DNA, 15 bp, Homo sapiens
ttagccaggtatggt

SEQ ID NO: 669348 - DNA, 15 bp, Homo sapiens
tagccaggtatggtg

SEQ ID NO: 669349 - DNA, 15 bp, Homo sapiens
agccaggtatggtgg

SEQ ID NO: 669350 - DNA, 15 bp, Homo sapiens
gccaggtatggtggt

SEQ ID NO: 669351 - DNA, 15 bp, Homo sapiens
ccaggtatggtggtg

SEQ ID NO: 669352 - DNA, 15 bp, Homo sapiens
caggtatggtggtgc

SEQ ID NO: 669353 - DNA, 15 bp, Homo sapiens
aggtatggtggtgca

SEQ ID NO: 669354 - DNA, 15 bp, Homo sapiens
ggtatggtggtgcat

SEQ ID NO: 669355 - DNA, 15 bp, Homo sapiens
gtatggtggtgcatg

SEQ ID NO: 669356 - DNA, 15 bp, Homo sapiens
tatggtggtgcatgc

SEQ ID NO: 669357 - DNA, 15 bp, Homo sapiens
atggtggtgcatgcc

SEQ ID NO: 669358 - DNA, 15 bp, Homo sapiens
tggtggtgcatgcct

SEQ ID NO: 669359 - DNA, 15 bp, Homo sapiens
ggtggtgcatgcctg

SEQ ID NO: 669360 - DNA, 15 bp, Homo sapiens
gtggtgcatgcctgt

SEQ ID NO: 669361 - DNA, 15 bp, Homo sapiens
tggtgcatgcctgta

SEQ ID NO: 669362 - DNA, 15 bp, Homo sapiens
ggtgcatgcctgtaa

SEQ ID NO: 669363 - DNA, 15 bp, Homo sapiens
gtgcatgcctgtaat

SEQ ID NO: 669364 - DNA, 15 bp, Homo sapiens
tgcatgcctgtaatc

SEQ ID NO: 669365 - DNA, 15 bp, Homo sapiens
gcatgcctgtaatcc

SEQ ID NO: 669366 - DNA, 15 bp, Homo sapiens
aatcccagctactcg

SEQ ID NO: 669367 - DNA, 15 bp, Homo sapiens
atcccagctactcgg

SEQ ID NO: 669368 - DNA, 15 bp, Homo sapiens
tcccagctactcggg

SEQ ID NO: 669369 - DNA, 15 bp, Homo sapiens
cccagctactcggga

SEQ ID NO: 669370 - DNA, 15 bp, Homo sapiens
ccagctactcgggag

SEQ ID NO: 669371 - DNA, 15 bp, Homo sapiens
cagctactcgggagg

SEQ ID NO: 669372 - DNA, 15 bp, Homo sapiens
agctactcgggaggc

SEQ ID NO: 669373 - DNA, 15 bp, Homo sapiens
gctactcgggaggct

SEQ ID NO: 669374 - DNA, 15 bp, Homo sapiens
ctactcgggaggctg

SEQ ID NO: 669375 - DNA, 15 bp, Homo sapiens
tactcgggaggctga

SEQ ID NO: 669376 - DNA, 15 bp, Homo sapiens
actcgggaggctgag

SEQ ID NO: 669377 - DNA, 15 bp, Homo sapiens
ctcgggaggctgagg

SEQ ID NO: 669378 - DNA, 15 bp, Homo sapiens
tcgggaggctgaggc

SEQ ID NO: 669379 - DNA, 15 bp, Homo sapiens
cgggaggctgaggca

SEQ ID NO: 669380 - DNA, 15 bp, Homo sapiens
ggctgaggcaggaga

SEQ ID NO: 669381 - DNA, 15 bp, Homo sapiens
gctgaggcaggagaa

SEQ ID NO: 669382 - DNA, 15 bp, Homo sapiens
ctgaggcaggagaat

SEQ ID NO: 669383 - DNA, 15 bp, Homo sapiens
tgaggcaggagaatc

SEQ ID NO: 669384 - DNA, 15 bp, Homo sapiens
gaggcaggagaatca

SEQ ID NO: 669385 - DNA, 15 bp, Homo sapiens
aggcaggagaatcac

SEQ ID NO: 669386 - DNA, 15 bp, Homo sapiens
ggcaggagaatcact

SEQ ID NO: 669387 - DNA, 15 bp, Homo sapiens
gcaggagaatcactt

SEQ ID NO: 669388 - DNA, 15 bp, Homo sapiens
caggagaatcacttg

SEQ ID NO: 669389 - DNA, 15 bp, Homo sapiens
aggagaatcacttga

SEQ ID NO: 669390 - DNA, 15 bp, Homo sapiens
ggagaatcacttgaa

SEQ ID NO: 669391 - DNA, 15 bp, Homo sapiens
gagaatcacttgaat

SEQ ID NO: 669392 - DNA, 15 bp, Homo sapiens
agaatcacttgaatc

SEQ ID NO: 669393 - DNA, 15 bp, Homo sapiens
gaatcacttgaatcc

SEQ ID NO: 669394 - DNA, 15 bp, Homo sapiens
aatcacttgaatcca

SEQ ID NO: 669395 - DNA, 15 bp, Homo sapiens
atcacttgaatccag

SEQ ID NO: 669396 - DNA, 15 bp, Homo sapiens
tcacttgaatccagg

SEQ ID NO: 669397 - DNA, 15 bp, Homo sapiens
cacttgaatccagga

SEQ ID NO: 669398 - DNA, 15 bp, Homo sapiens
acttgaatccaggag

SEQ ID NO: 669399 - DNA, 15 bp, Homo sapiens
cttgaatccaggagg

SEQ ID NO: 669400 - DNA, 15 bp, Homo sapiens
ttgaatccaggaggc

SEQ ID NO: 669401 - DNA, 15 bp, Homo sapiens
tgaatccaggaggcg

SEQ ID NO: 669402 - DNA, 15 bp, Homo sapiens
gaatccaggaggcgg

SEQ ID NO: 669403 - DNA, 15 bp, Homo sapiens
aatccaggaggcgga

SEQ ID NO: 669404 - DNA, 15 bp, Homo sapiens
atccaggaggcggag

SEQ ID NO: 669405 - DNA, 15 bp, Homo sapiens
tccaggaggcggagg

SEQ ID NO: 669406 - DNA, 15 bp, Homo sapiens
ccaggaggcggaggt

SEQ ID NO: 669407 - DNA, 15 bp, Homo sapiens
caggaggcggaggtt

SEQ ID NO: 669408 - DNA, 15 bp, Homo sapiens
aggaggcggaggttg

SEQ ID NO: 669409 - DNA, 15 bp, Homo sapiens
ggaggcggaggttgc

SEQ ID NO: 669410 - DNA, 15 bp, Homo sapiens
gaggcggaggttgca

SEQ ID NO: 669411 - DNA, 15 bp, Homo sapiens
aggcggaggttgcag

SEQ ID NO: 669412 - DNA, 15 bp, Homo sapiens
ggcggaggttgcagt

SEQ ID NO: 669413 - DNA, 15 bp, Homo sapiens
gcggaggttgcagtg

SEQ ID NO: 669414 - DNA, 15 bp, Homo sapiens
cggaggttgcagtga

SEQ ID NO: 669415 - DNA, 15 bp, Homo sapiens
ggaggttgcagtgag

SEQ ID NO: 669416 - DNA, 15 bp, Homo sapiens
gaggttgcagtgagc

SEQ ID NO: 669417 - DNA, 15 bp, Homo sapiens
aggttgcagtgagct

SEQ ID NO: 669418 - DNA, 15 bp, Homo sapiens
ggttgcagtgagctg

SEQ ID NO: 669419 - DNA, 15 bp, Homo sapiens
gttgcagtgagctga

SEQ ID NO: 669420 - DNA, 15 bp, Homo sapiens
ttgcagtgagctgag

SEQ ID NO: 669421 - DNA, 15 bp, Homo sapiens
tgcagtgagctgaga

SEQ ID NO: 669422 - DNA, 15 bp, Homo sapiens
gcagtgagctgagat

SEQ ID NO: 669423 - DNA, 15 bp, Homo sapiens
cagtgagctgagatg

SEQ ID NO: 669424 - DNA, 15 bp, Homo sapiens
agtgagctgagatgg

SEQ ID NO: 669425 - DNA, 15 bp, Homo sapiens
gtgagctgagatggt

SEQ ID NO: 669426 - DNA, 15 bp, Homo sapiens
tgagctgagatggtg

SEQ ID NO: 669427 - DNA, 15 bp, Homo sapiens
gagctgagatggtgc

SEQ ID NO: 669428 - DNA, 15 bp, Homo sapiens
agctgagatggtgcc

SEQ ID NO: 669429 - DNA, 15 bp, Homo sapiens
gctgagatggtgcca

SEQ ID NO: 669430 - DNA, 15 bp, Homo sapiens
ctgagatggtgccac

SEQ ID NO: 669431 - DNA, 15 bp, Homo sapiens
tgagatggtgccact

SEQ ID NO: 669432 - DNA, 15 bp, Homo sapiens
ctccagcctgggtga

SEQ ID NO: 669433 - DNA, 15 bp, Homo sapiens
tccagcctgggtgac

SEQ ID NO: 669434 - DNA, 15 bp, Homo sapiens
ccagcctgggtgaca

SEQ ID NO: 669435 - DNA, 15 bp, Homo sapiens
cagcctgggtgacag

SEQ ID NO: 669436 - DNA, 15 bp, Homo sapiens
agcctgggtgacaga

SEQ ID NO: 669437 - DNA, 15 bp, Homo sapiens
gcctgggtgacagag

SEQ ID NO: 669438 - DNA, 15 bp, Homo sapiens
cctgggtgacagagt

SEQ ID NO: 669439 - DNA, 15 bp, Homo sapiens
ctgggtgacagagtg

SEQ ID NO: 669440 - DNA, 15 bp, Homo sapiens
tgggtgacagagtga

SEQ ID NO: 669441 - DNA, 15 bp, Homo sapiens
gggtgacagagtgag

SEQ ID NO: 669442 - DNA, 15 bp, Homo sapiens
ggtgacagagtgaga

SEQ ID NO: 669443 - DNA, 15 bp, Homo sapiens
gtgacagagtgagac

SEQ ID NO: 669444 - DNA, 15 bp, Homo sapiens
tgacagagtgagact

SEQ ID NO: 669445 - DNA, 15 bp, Homo sapiens
gacagagtgagactc

SEQ ID NO: 669446 - DNA, 15 bp, Homo sapiens
acagagtgagactca

SEQ ID NO: 669447 - DNA, 15 bp, Homo sapiens
cagagtgagactcag

SEQ ID NO: 669448 - DNA, 15 bp, Homo sapiens
agagtgagactcagt

SEQ ID NO: 669449 - DNA, 15 bp, Homo sapiens
gagtgagactcagtt

SEQ ID NO: 669450 - DNA, 15 bp, Homo sapiens
agtgagactcagttt

SEQ ID NO: 669451 - DNA, 15 bp, Homo sapiens
gtgagactcagtttc

SEQ ID NO: 669452 - DNA, 15 bp, Homo sapiens
tgagactcagtttca

SEQ ID NO: 669453 - DNA, 15 bp, Homo sapiens
gagactcagtttcag

SEQ ID NO: 669454 - DNA, 15 bp, Homo sapiens
agactcagtttcaga

SEQ ID NO: 669455 - DNA, 15 bp, Homo sapiens
gactcagtttcagaa

SEQ ID NO: 669456 - DNA, 15 bp, Homo sapiens
actcagtttcagaaa

SEQ ID NO: 669457 - DNA, 15 bp, Homo sapiens
ctcagtttcagaaaa

SEQ ID NO: 669458 - DNA, 15 bp, Homo sapiens
tcagtttcagaaaag

SEQ ID NO: 669459 - DNA, 15 bp, Homo sapiens
cagtttcagaaaaga

SEQ ID NO: 669460 - DNA, 15 bp, Homo sapiens
agtttcagaaaagaa

SEQ ID NO: 669461 - DNA, 15 bp, Homo sapiens
gtttcagaaaagaaa

SEQ ID NO: 669462 - DNA, 15 bp, Homo sapiens
tttcagaaaagaaaa

SEQ ID NO: 669463 - DNA, 15 bp, Homo sapiens
ttcagaaaagaaaag

SEQ ID NO: 669464 - DNA, 15 bp, Homo sapiens
tcagaaaagaaaaga

SEQ ID NO: 669465 - DNA, 15 bp, Homo sapiens
cagaaaagaaaagaa

SEQ ID NO: 669466 - DNA, 15 bp, Homo sapiens
agaaaagaaaagaaa

SEQ ID NO: 669467 - DNA, 15 bp, Homo sapiens
gaaaagaaaagaaaa

SEQ ID NO: 669468 - DNA, 15 bp, Homo sapiens
aaaagaaaagaaaag

SEQ ID NO: 669469 - DNA, 15 bp, Homo sapiens
aaagaaaagaaaaga

SEQ ID NO: 669470 - DNA, 15 bp, Homo sapiens
aagaaaagaaaagaa

SEQ ID NO: 669471 - DNA, 15 bp, Homo sapiens
aaagaaaaaagaaaa

SEQ ID NO: 669472 - DNA, 15 bp, Homo sapiens
aagaaaaaagaaaag

SEQ ID NO: 669473 - DNA, 15 bp, Homo sapiens
agaaaaaagaaaaga

SEQ ID NO: 669474 - DNA, 15 bp, Homo sapiens
gaaaaaagaaaagag

SEQ ID NO: 669475 - DNA, 15 bp, Homo sapiens
aaaaaagaaaagaga

SEQ ID NO: 669476 - DNA, 15 bp, Homo sapiens
aaaaagaaaagagaa

SEQ ID NO: 669477 - DNA, 15 bp, Homo sapiens
aaaagaaaagagaag

SEQ ID NO: 669478 - DNA, 15 bp, Homo sapiens
aaagaaaagagaagg

SEQ ID NO: 669479 - DNA, 15 bp, Homo sapiens
aagaaaagagaaggt

SEQ ID NO: 669480 - DNA, 15 bp, Homo sapiens
agaaaagagaaggta

SEQ ID NO: 669481 - DNA, 15 bp, Homo sapiens
gaaaagagaaggtat

SEQ ID NO: 669482 - DNA, 15 bp, Homo sapiens
aaaagagaaggtatt

SEQ ID NO: 669483 - DNA, 15 bp, Homo sapiens
aaagagaaggtattt

SEQ ID NO: 669484 - DNA, 15 bp, Homo sapiens
aagagaaggtattta

SEQ ID NO: 669485 - DNA, 15 bp, Homo sapiens
agagaaggtatttaa

SEQ ID NO: 669486 - DNA, 15 bp, Homo sapiens
gagaaggtatttaat

SEQ ID NO: 669487 - DNA, 15 bp, Homo sapiens
agaaggtatttaata

SEQ ID NO: 669488 - DNA, 15 bp, Homo sapiens
gaaggtatttaatag

SEQ ID NO: 669489 - DNA, 15 bp, Homo sapiens
aaggtatttaataga

SEQ ID NO: 669490 - DNA, 15 bp, Homo sapiens
aggtatttaatagag

SEQ ID NO: 669491 - DNA, 15 bp, Homo sapiens
ggtatttaatagagc

SEQ ID NO: 669492 - DNA, 15 bp, Homo sapiens
gtatttaatagagcc

SEQ ID NO: 669493 - DNA, 15 bp, Homo sapiens
tatttaatagagcct

SEQ ID NO: 669494 - DNA, 15 bp, Homo sapiens
atttaatagagcctt

SEQ ID NO: 669495 - DNA, 15 bp, Homo sapiens
tttaatagagccttt

SEQ ID NO: 669496 - DNA, 15 bp, Homo sapiens
ttaatagagcctttc

SEQ ID NO: 669497 - DNA, 15 bp, Homo sapiens
taatagagcctttct

SEQ ID NO: 669498 - DNA, 15 bp, Homo sapiens
aatagagcctttctc

SEQ ID NO: 669499 - DNA, 15 bp, Homo sapiens
atagagcctttctct

SEQ ID NO: 669500 - DNA, 15 bp, Homo sapiens
tagagcctttctctt

SEQ ID NO: 669501 - DNA, 15 bp, Homo sapiens
agagcctttctcttt

SEQ ID NO: 669502 - DNA, 15 bp, Homo sapiens
gagcctttctctttt

SEQ ID NO: 669503 - DNA, 15 bp, Homo sapiens
agcctttctcttttt

SEQ ID NO: 669504 - DNA, 15 bp, Homo sapiens
gcctttctctttttt

SEQ ID NO: 669505 - DNA, 15 bp, Homo sapiens
cctttctcttttttt

SEQ ID NO: 669506 - DNA, 15 bp, Homo sapiens
ctttctctttttttt

SEQ ID NO: 669507 - DNA, 15 bp, Homo sapiens
tttctcttttttttc

SEQ ID NO: 669508 - DNA, 15 bp, Homo sapiens
ttctcttttttttca

SEQ ID NO: 669509 - DNA, 15 bp, Homo sapiens
tctcttttttttcag

SEQ ID NO: 669510 - DNA, 15 bp, Homo sapiens
ctcttttttttcaga

SEQ ID NO: 669511 - DNA, 15 bp, Homo sapiens
tcttttttttcagat

SEQ ID NO: 669512 - DNA, 15 bp, Homo sapiens
cttttttttcagata

SEQ ID NO: 669513 - DNA, 15 bp, Homo sapiens
ttttttttcagatat

SEQ ID NO: 669514 - DNA, 15 bp, Homo sapiens
tttttttcagatatg

SEQ ID NO: 669515 - DNA, 15 bp, Homo sapiens
ttttttcagatatgc

SEQ ID NO: 669516 - DNA, 15 bp, Homo sapiens
tttttcagatatgca

SEQ ID NO: 669517 - DNA, 15 bp, Homo sapiens
ttttcagatatgcat

SEQ ID NO: 669518 - DNA, 15 bp, Homo sapiens
tttcagatatgcata

SEQ ID NO: 669519 - DNA, 15 bp, Homo sapiens
ttcagatatgcatat

SEQ ID NO: 669520 - DNA, 15 bp, Homo sapiens
tcagatatgcatatt

SEQ ID NO: 669521 - DNA, 15 bp, Homo sapiens
cagatatgcatatta

SEQ ID NO: 669522 - DNA, 15 bp, Homo sapiens
agatatgcatattac

SEQ ID NO: 669523 - DNA, 15 bp, Homo sapiens
gatatgcatattact

SEQ ID NO: 669524 - DNA, 15 bp, Homo sapiens
atatgcatattacta

SEQ ID NO: 669525 - DNA, 15 bp, Homo sapiens
tatgcatattactac

SEQ ID NO: 669526 - DNA, 15 bp, Homo sapiens
atgcatattactact

SEQ ID NO: 669527 - DNA, 15 bp, Homo sapiens
tgcatattactactc

SEQ ID NO: 669528 - DNA, 15 bp, Homo sapiens
gcatattactactca

SEQ ID NO: 669529 - DNA, 15 bp, Homo sapiens
catattactactcag

SEQ ID NO: 669530 - DNA, 15 bp, Homo sapiens
atattactactcagg

SEQ ID NO: 669531 - DNA, 15 bp, Homo sapiens
tattactactcagga

SEQ ID NO: 669532 - DNA, 15 bp, Homo sapiens
attactactcaggat

SEQ ID NO: 669533 - DNA, 15 bp, Homo sapiens
ttactactcaggatt

SEQ ID NO: 669534 - DNA, 15 bp, Homo sapiens
tactactcaggattg

SEQ ID NO: 669535 - DNA, 15 bp, Homo sapiens
actactcaggattgg

SEQ ID NO: 669536 - DNA, 15 bp, Homo sapiens
ctactcaggattggg

SEQ ID NO: 669537 - DNA, 15 bp, Homo sapiens
tactcaggattgggt

SEQ ID NO: 669538 - DNA, 15 bp, Homo sapiens
actcaggattgggtg

SEQ ID NO: 669539 - DNA, 15 bp, Homo sapiens
ctcaggattgggtgc

SEQ ID NO: 669540 - DNA, 15 bp, Homo sapiens
tcaggattgggtgct

SEQ ID NO: 669541 - DNA, 15 bp, Homo sapiens
caggattgggtgctg

SEQ ID NO: 669542 - DNA, 15 bp, Homo sapiens
aggattgggtgctgg

SEQ ID NO: 669543 - DNA, 15 bp, Homo sapiens
ggattgggtgctgga

SEQ ID NO: 669544 - DNA, 15 bp, Homo sapiens
gattgggtgctggag

SEQ ID NO: 669545 - DNA, 15 bp, Homo sapiens
attgggtgctggagt

SEQ ID NO: 669546 - DNA, 15 bp, Homo sapiens
ttgggtgctggagtt

SEQ ID NO: 669547 - DNA, 15 bp, Homo sapiens
tgggtgctggagttc

SEQ ID NO: 669548 - DNA, 15 bp, Homo sapiens
gggtgctggagttct

SEQ ID NO: 669549 - DNA, 15 bp, Homo sapiens
ggtgctggagttctt

SEQ ID NO: 669550 - DNA, 15 bp, Homo sapiens
gtgctggagttcttg

SEQ ID NO: 669551 - DNA, 15 bp, Homo sapiens
tgctggagttcttgt

SEQ ID NO: 669552 - DNA, 15 bp, Homo sapiens
gctggagttcttgtt

SEQ ID NO: 669553 - DNA, 15 bp, Homo sapiens
ctggagttcttgttg

SEQ ID NO: 669554 - DNA, 15 bp, Homo sapiens
tggagttcttgttgc

SEQ ID NO: 669555 - DNA, 15 bp, Homo sapiens
ggagttcttgttgct

SEQ ID NO: 669556 - DNA, 15 bp, Homo sapiens
gagttcttgttgctg

SEQ ID NO: 669557 - DNA, 15 bp, Homo sapiens
agttcttgttgctgc

SEQ ID NO: 669558 - DNA, 15 bp, Homo sapiens
gttcttgttgctgcc

SEQ ID NO: 669559 - DNA, 15 bp, Homo sapiens
ttcttgttgctgcct

SEQ ID NO: 669560 - DNA, 15 bp, Homo sapiens
tcttgttgctgccta

SEQ ID NO: 669561 - DNA, 15 bp, Homo sapiens
cttgttgctgcctat

SEQ ID NO: 669562 - DNA, 15 bp, Homo sapiens
ttgttgctgcctata

SEQ ID NO: 669563 - DNA, 15 bp, Homo sapiens
tgttgctgcctatat

SEQ ID NO: 669564 - DNA, 15 bp, Homo sapiens
gttgctgcctatata

SEQ ID NO: 669565 - DNA, 15 bp, Homo sapiens
ttgctgcctatatac

SEQ ID NO: 669566 - DNA, 15 bp, Homo sapiens
tgctgcctatataca

SEQ ID NO: 669567 - DNA, 15 bp, Homo sapiens
gctgcctatatacaa

SEQ ID NO: 669568 - DNA, 15 bp, Homo sapiens
ctgcctatatacaag

SEQ ID NO: 669569 - DNA, 15 bp, Homo sapiens
tgcctatatacaagt

SEQ ID NO: 669570 - DNA, 15 bp, Homo sapiens
gcctatatacaagtt

SEQ ID NO: 669571 - DNA, 15 bp, Homo sapiens
cctatatacaagttt

SEQ ID NO: 669572 - DNA, 15 bp, Homo sapiens
ctatatacaagtttc

SEQ ID NO: 669573 - DNA, 15 bp, Homo sapiens
tatatacaagtttca

SEQ ID NO: 669574 - DNA, 15 bp, Homo sapiens
atatacaagtttcat

SEQ ID NO: 669575 - DNA, 15 bp, Homo sapiens
tatacaagtttcatt

SEQ ID NO: 669576 - DNA, 15 bp, Homo sapiens
atacaagtttcattt

SEQ ID NO: 669577 - DNA, 15 bp, Homo sapiens
tacaagtttcatttt

SEQ ID NO: 669578 - DNA, 15 bp, Homo sapiens
acaagtttcattttg

SEQ ID NO: 669579 - DNA, 15 bp, Homo sapiens
caagtttcattttgg

SEQ ID NO: 669580 - DNA, 15 bp, Homo sapiens
aagtttcattttgga

SEQ ID NO: 669581 - DNA, 15 bp, Homo sapiens
agtttcattttggac

SEQ ID NO: 669582 - DNA, 15 bp, Homo sapiens
gtttcattttggact

SEQ ID NO: 669583 - DNA, 15 bp, Homo sapiens
tttcattttggactt

SEQ ID NO: 669584 - DNA, 15 bp, Homo sapiens
ttcattttggacttt

SEQ ID NO: 669585 - DNA, 15 bp, Homo sapiens
tcattttggactttg

SEQ ID NO: 669586 - DNA, 15 bp, Homo sapiens
cattttggactttgg

SEQ ID NO: 669587 - DNA, 15 bp, Homo sapiens
attttggactttggc

SEQ ID NO: 669588 - DNA, 15 bp, Homo sapiens
ttttggactttggca

SEQ ID NO: 669589 - DNA, 15 bp, Homo sapiens
tttggactttggcag

SEQ ID NO: 669590 - DNA, 15 bp, Homo sapiens
ttggactttggcagc

SEQ ID NO: 669591 - DNA, 15 bp, Homo sapiens
tggactttggcagct

SEQ ID NO: 669592 - DNA, 15 bp, Homo sapiens
ggactttggcagctg

SEQ ID NO: 669593 - DNA, 15 bp, Homo sapiens
gactttggcagctgg

SEQ ID NO: 669594 - DNA, 15 bp, Homo sapiens
actttggcagctggt

SEQ ID NO: 669595 - DNA, 15 bp, Homo sapiens
ctttggcagctggtc

SEQ ID NO: 669596 - DNA, 15 bp, Homo sapiens
tttggcagctggtcg

SEQ ID NO: 669597 - DNA, 15 bp, Homo sapiens
ttggcagctggtcga

SEQ ID NO: 669598 - DNA, 15 bp, Homo sapiens
tggcagctggtcgac

SEQ ID NO: 669599 - DNA, 15 bp, Homo sapiens
ggcagctggtcgaca

SEQ ID NO: 669600 - DNA, 15 bp, Homo sapiens
gcagctggtcgacag

SEQ ID NO: 669601 - DNA, 15 bp, Homo sapiens
cagctggtcgacaga

SEQ ID NO: 669602 - DNA, 15 bp, Homo sapiens
agctggtcgacagat

SEQ ID NO: 669603 - DNA, 15 bp, Homo sapiens
gctggtcgacagatc

SEQ ID NO: 669604 - DNA, 15 bp, Homo sapiens
ctggtcgacagatca

SEQ ID NO: 669605 - DNA, 15 bp, Homo sapiens
tggtcgacagatcag

SEQ ID NO: 669606 - DNA, 15 bp, Homo sapiens
ggtcgacagatcagg

SEQ ID NO: 669607 - DNA, 15 bp, Homo sapiens
gtcgacagatcagga

SEQ ID NO: 669608 - DNA, 15 bp, Homo sapiens
tcgacagatcaggaa

SEQ ID NO: 669609 - DNA, 15 bp, Homo sapiens
cgacagatcaggaaa

SEQ ID NO: 669610 - DNA, 15 bp, Homo sapiens
gacagatcaggaaaa

SEQ ID NO: 669611 - DNA, 15 bp, Homo sapiens
acagatcaggaaaat

SEQ ID NO: 669612 - DNA, 15 bp, Homo sapiens
cagatcaggaaaatt

SEQ ID NO: 669613 - DNA, 15 bp, Homo sapiens
agatcaggaaaatta

SEQ ID NO: 669614 - DNA, 15 bp, Homo sapiens
gatcaggaaaattag

SEQ ID NO: 669615 - DNA, 15 bp, Homo sapiens
atcaggaaaattagg

SEQ ID NO: 669616 - DNA, 15 bp, Homo sapiens
tcaggaaaattaggc

SEQ ID NO: 669617 - DNA, 15 bp, Homo sapiens
caggaaaattaggca

SEQ ID NO: 669618 - DNA, 15 bp, Homo sapiens
aggaaaattaggcag

SEQ ID NO: 669619 - DNA, 15 bp, Homo sapiens
ggaaaattaggcaga

SEQ ID NO: 669620 - DNA, 15 bp, Homo sapiens
gaaaattaggcagaa

SEQ ID NO: 669621 - DNA, 15 bp, Homo sapiens
aaaattaggcagaag

SEQ ID NO: 669622 - DNA, 15 bp, Homo sapiens
aaattaggcagaagt

SEQ ID NO: 669623 - DNA, 15 bp, Homo sapiens
aattaggcagaagtt

SEQ ID NO: 669624 - DNA, 15 bp, Homo sapiens
attaggcagaagttt

SEQ ID NO: 669625 - DNA, 15 bp, Homo sapiens
ttaggcagaagtttt

SEQ ID NO: 669626 - DNA, 15 bp, Homo sapiens
taggcagaagttttt

SEQ ID NO: 669627 - DNA, 15 bp, Homo sapiens
aggcagaagtttttt

SEQ ID NO: 669628 - DNA, 15 bp, Homo sapiens
ggcagaagttttttc

SEQ ID NO: 669629 - DNA, 15 bp, Homo sapiens
gcagaagttttttca

SEQ ID NO: 669630 - DNA, 15 bp, Homo sapiens
cagaagttttttcat

SEQ ID NO: 669631 - DNA, 15 bp, Homo sapiens
agaagttttttcatg

SEQ ID NO: 669632 - DNA, 15 bp, Homo sapiens
gaagttttttcatgc

SEQ ID NO: 669633 - DNA, 15 bp, Homo sapiens
aagttttttcatgct

SEQ ID NO: 669634 - DNA, 15 bp, Homo sapiens
agttttttcatgcta

SEQ ID NO: 669635 - DNA, 15 bp, Homo sapiens
gttttttcatgctat

SEQ ID NO: 669636 - DNA, 15 bp, Homo sapiens
ttttttcatgctatt

SEQ ID NO: 669637 - DNA, 15 bp, Homo sapiens
tttttcatgctattc

SEQ ID NO: 669638 - DNA, 15 bp, Homo sapiens
ttttcatgctattct

SEQ ID NO: 669639 - DNA, 15 bp, Homo sapiens
tttcatgctattcta

SEQ ID NO: 669640 - DNA, 15 bp, Homo sapiens
ttcatgctattctac

SEQ ID NO: 669641 - DNA, 15 bp, Homo sapiens
tcatgctattctacg

SEQ ID NO: 669642 - DNA, 15 bp, Homo sapiens
catgctattctacga

SEQ ID NO: 669643 - DNA, 15 bp, Homo sapiens
atgctattctacgac

SEQ ID NO: 669644 - DNA, 15 bp, Homo sapiens
tgctattctacgaca

SEQ ID NO: 669645 - DNA, 15 bp, Homo sapiens
gctattctacgacag

SEQ ID NO: 669646 - DNA, 15 bp, Homo sapiens
ctattctacgacagg

SEQ ID NO: 669647 - DNA, 15 bp, Homo sapiens
tattctacgacagga

SEQ ID NO: 669648 - DNA, 15 bp, Homo sapiens
attctacgacaggaa

SEQ ID NO: 669649 - DNA, 15 bp, Homo sapiens
ttctacgacaggaaa

SEQ ID NO: 669650 - DNA, 15 bp, Homo sapiens
tctacgacaggaaat

SEQ ID NO: 669651 - DNA, 15 bp, Homo sapiens
ctacgacaggaaata

SEQ ID NO: 669652 - DNA, 15 bp, Homo sapiens
tacgacaggaaatag

SEQ ID NO: 669653 - DNA, 15 bp, Homo sapiens
acgacaggaaatagg

SEQ ID NO: 669654 - DNA, 15 bp, Homo sapiens
cgacaggaaatagga

SEQ ID NO: 669655 - DNA, 15 bp, Homo sapiens
gacaggaaataggat

SEQ ID NO: 669656 - DNA, 15 bp, Homo sapiens
acaggaaataggatg

SEQ ID NO: 669657 - DNA, 15 bp, Homo sapiens
caggaaataggatgg

SEQ ID NO: 669658 - DNA, 15 bp, Homo sapiens
aggaaataggatggt

SEQ ID NO: 669659 - DNA, 15 bp, Homo sapiens
ggaaataggatggtt

SEQ ID NO: 669660 - DNA, 15 bp, Homo sapiens
gaaataggatggttt

SEQ ID NO: 669661 - DNA, 15 bp, Homo sapiens
aaataggatggtttg

SEQ ID NO: 669662 - DNA, 15 bp, Homo sapiens
aataggatggtttga

SEQ ID NO: 669663 - DNA, 15 bp, Homo sapiens
ataggatggtttgac

SEQ ID NO: 669664 - DNA, 15 bp, Homo sapiens
taggatggtttgaca

SEQ ID NO: 669665 - DNA, 15 bp, Homo sapiens
aggatggtttgacat

SEQ ID NO: 669666 - DNA, 15 bp, Homo sapiens
ggatggtttgacatc

SEQ ID NO: 669667 - DNA, 15 bp, Homo sapiens
gatggtttgacatca

SEQ ID NO: 669668 - DNA, 15 bp, Homo sapiens
atggtttgacatcaa

SEQ ID NO: 669669 - DNA, 15 bp, Homo sapiens
tggtttgacatcaac

SEQ ID NO: 669670 - DNA, 15 bp, Homo sapiens
ggtttgacatcaacg

SEQ ID NO: 669671 - DNA, 15 bp, Homo sapiens
gtttgacatcaacga

SEQ ID NO: 669672 - DNA, 15 bp, Homo sapiens
tttgacatcaacgac

SEQ ID NO: 669673 - DNA, 15 bp, Homo sapiens
ttgacatcaacgaca

SEQ ID NO: 669674 - DNA, 15 bp, Homo sapiens
tgacatcaacgacac

SEQ ID NO: 669675 - DNA, 15 bp, Homo sapiens
gacatcaacgacacc

SEQ ID NO: 669676 - DNA, 15 bp, Homo sapiens
acatcaacgacacca

SEQ ID NO: 669677 - DNA, 15 bp, Homo sapiens
catcaacgacaccac

SEQ ID NO: 669678 - DNA, 15 bp, Homo sapiens
atcaacgacaccact

SEQ ID NO: 669679 - DNA, 15 bp, Homo sapiens
tcaacgacaccactg

SEQ ID NO: 669680 - DNA, 15 bp, Homo sapiens
caacgacaccactga

SEQ ID NO: 669681 - DNA, 15 bp, Homo sapiens
aacgacaccactgaa

SEQ ID NO: 669682 - DNA, 15 bp, Homo sapiens
acgacaccactgaac

SEQ ID NO: 669683 - DNA, 15 bp, Homo sapiens
cgacaccactgaact

SEQ ID NO: 669684 - DNA, 15 bp, Homo sapiens
gacaccactgaactc

SEQ ID NO: 669685 - DNA, 15 bp, Homo sapiens
acaccactgaactca

SEQ ID NO: 669686 - DNA, 15 bp, Homo sapiens
caccactgaactcaa

SEQ ID NO: 669687 - DNA, 15 bp, Homo sapiens
accactgaactcaat

SEQ ID NO: 669688 - DNA, 15 bp, Homo sapiens
ccactgaactcaata

SEQ ID NO: 669689 - DNA, 15 bp, Homo sapiens
cactgaactcaatac

SEQ ID NO: 669690 - DNA, 15 bp, Homo sapiens
actgaactcaatacg

SEQ ID NO: 669691 - DNA, 15 bp, Homo sapiens
ctgaactcaatacgc

SEQ ID NO: 669692 - DNA, 15 bp, Homo sapiens
tgaactcaatacgcg

SEQ ID NO: 669693 - DNA, 15 bp, Homo sapiens
gaactcaatacgcgg

SEQ ID NO: 669694 - DNA, 15 bp, Homo sapiens
aactcaatacgcggc

SEQ ID NO: 669695 - DNA, 15 bp, Homo sapiens
actcaatacgcggct

SEQ ID NO: 669696 - DNA, 15 bp, Homo sapiens
ctcaatacgcggcta

SEQ ID NO: 669697 - DNA, 15 bp, Homo sapiens
tcaatacgcggctaa

SEQ ID NO: 669698 - DNA, 15 bp, Homo sapiens
caatacgcggctaac

SEQ ID NO: 669699 - DNA, 15 bp, Homo sapiens
aatacgcggctaaca

SEQ ID NO: 669700 - DNA, 15 bp, Homo sapiens
atacgcggctaacag

SEQ ID NO: 669701 - DNA, 15 bp, Homo sapiens
tacgcggctaacaga

SEQ ID NO: 669702 - DNA, 15 bp, Homo sapiens
acgcggctaacagag

SEQ ID NO: 669703 - DNA, 15 bp, Homo sapiens
cgcggctaacagagt

SEQ ID NO: 669704 - DNA, 15 bp, Homo sapiens
gcggctaacagagta

SEQ ID NO: 669705 - DNA, 15 bp, Homo sapiens
cggctaacagagtag

SEQ ID NO: 669706 - DNA, 15 bp, Homo sapiens
ggctaacagagtagg

SEQ ID NO: 669707 - DNA, 15 bp, Homo sapiens
gctaacagagtaggt

SEQ ID NO: 669708 - DNA, 15 bp, Homo sapiens
ctaacagagtaggta

SEQ ID NO: 669709 - DNA, 15 bp, Homo sapiens
taacagagtaggtac

SEQ ID NO: 669710 - DNA, 15 bp, Homo sapiens
aacagagtaggtaca

SEQ ID NO: 669711 - DNA, 15 bp, Homo sapiens
acagagtaggtacat

SEQ ID NO: 669712 - DNA, 15 bp, Homo sapiens
cagagtaggtacatt

SEQ ID NO: 669713 - DNA, 15 bp, Homo sapiens
agagtaggtacattg

SEQ ID NO: 669714 - DNA, 15 bp, Homo sapiens
gagtaggtacattgt

SEQ ID NO: 669715 - DNA, 15 bp, Homo sapiens
agtaggtacattgtt

SEQ ID NO: 669716 - DNA, 15 bp, Homo sapiens
gtaggtacattgtta

SEQ ID NO: 669717 - DNA, 15 bp, Homo sapiens
taggtacattgttaa

SEQ ID NO: 669718 - DNA, 15 bp, Homo sapiens
aggtacattgttaat

SEQ ID NO: 669719 - DNA, 15 bp, Homo sapiens
ggtacattgttaatg

SEQ ID NO: 669720 - DNA, 15 bp, Homo sapiens
gtacattgttaatgt

SEQ ID NO: 669721 - DNA, 15 bp, Homo sapiens
tacattgttaatgtc

SEQ ID NO: 669722 - DNA, 15 bp, Homo sapiens
acattgttaatgtca

SEQ ID NO: 669723 - DNA, 15 bp, Homo sapiens
cattgttaatgtcac

SEQ ID NO: 669724 - DNA, 15 bp, Homo sapiens
attgttaatgtcaca

SEQ ID NO: 669725 - DNA, 15 bp, Homo sapiens
ttgttaatgtcacac

SEQ ID NO: 669726 - DNA, 15 bp, Homo sapiens
tgttaatgtcacact

SEQ ID NO: 669727 - DNA, 15 bp, Homo sapiens
gttaatgtcacactt

SEQ ID NO: 669728 - DNA, 15 bp, Homo sapiens
ttaatgtcacacttt

SEQ ID NO: 669729 - DNA, 15 bp, Homo sapiens
taatgtcacactttc

SEQ ID NO: 669730 - DNA, 15 bp, Homo sapiens
aatgtcacactttca

SEQ ID NO: 669731 - DNA, 15 bp, Homo sapiens
atgtcacactttcat

SEQ ID NO: 669732 - DNA, 15 bp, Homo sapiens
tgtcacactttcata

SEQ ID NO: 669733 - DNA, 15 bp, Homo sapiens
gtcacactttcatat

SEQ ID NO: 669734 - DNA, 15 bp, Homo sapiens
tcacactttcatata

SEQ ID NO: 669735 - DNA, 15 bp, Homo sapiens
cacactttcatatag

SEQ ID NO: 669736 - DNA, 15 bp, Homo sapiens
acactttcatataga

SEQ ID NO: 669737 - DNA, 15 bp, Homo sapiens
cactttcatatagaa

SEQ ID NO: 669738 - DNA, 15 bp, Homo sapiens
actttcatatagaaa

SEQ ID NO: 669739 - DNA, 15 bp, Homo sapiens
ctttcatatagaaat

SEQ ID NO: 669740 - DNA, 15 bp, Homo sapiens
tttcatatagaaatt

SEQ ID NO: 669741 - DNA, 15 bp, Homo sapiens
ttcatatagaaatta

SEQ ID NO: 669742 - DNA, 15 bp, Homo sapiens
tcatatagaaattaa

SEQ ID NO: 669743 - DNA, 15 bp, Homo sapiens
catatagaaattaat

SEQ ID NO: 669744 - DNA, 15 bp, Homo sapiens
atatagaaattaatt

SEQ ID NO: 669745 - DNA, 15 bp, Homo sapiens
tatagaaattaatta

SEQ ID NO: 669746 - DNA, 15 bp, Homo sapiens
atagaaattaattac

SEQ ID NO: 669747 - DNA, 15 bp, Homo sapiens
tagaaattaattact

SEQ ID NO: 669748 - DNA, 15 bp, Homo sapiens
agaaattaattactg

SEQ ID NO: 669749 - DNA, 15 bp, Homo sapiens
gaaattaattactgt

SEQ ID NO: 669750 - DNA, 15 bp, Homo sapiens
aaattaattactgtg

SEQ ID NO: 669751 - DNA, 15 bp, Homo sapiens
aattaattactgtgt

SEQ ID NO: 669752 - DNA, 15 bp, Homo sapiens
attaattactgtgtg

SEQ ID NO: 669753 - DNA, 15 bp, Homo sapiens
ttaattactgtgtga

SEQ ID NO: 669754 - DNA, 15 bp, Homo sapiens
taattactgtgtgaa

SEQ ID NO: 669755 - DNA, 15 bp, Homo sapiens
aattactgtgtgaaa

SEQ ID NO: 669756 - DNA, 15 bp, Homo sapiens
attactgtgtgaaaa

SEQ ID NO: 669757 - DNA, 15 bp, Homo sapiens
ttactgtgtgaaaat

SEQ ID NO: 669758 - DNA, 15 bp, Homo sapiens
tactgtgtgaaaata

SEQ ID NO: 669759 - DNA, 15 bp, Homo sapiens
actgtgtgaaaatat

SEQ ID NO: 669760 - DNA, 15 bp, Homo sapiens
ctgtgtgaaaatatg

SEQ ID NO: 669761 - DNA, 15 bp, Homo sapiens
tgtgtgaaaatatgt

SEQ ID NO: 669762 - DNA, 15 bp, Homo sapiens
gtgtgaaaatatgtc

SEQ ID NO: 669763 - DNA, 15 bp, Homo sapiens
tgtgaaaatatgtca

SEQ ID NO: 669764 - DNA, 15 bp, Homo sapiens
gtgaaaatatgtcaa

SEQ ID NO: 669765 - DNA, 15 bp, Homo sapiens
tgaaaatatgtcaag

SEQ ID NO: 669766 - DNA, 15 bp, Homo sapiens
gaaaatatgtcaagg

SEQ ID NO: 669767 - DNA, 15 bp, Homo sapiens
aaaatatgtcaagga

SEQ ID NO: 669768 - DNA, 15 bp, Homo sapiens
aaatatgtcaaggaa

SEQ ID NO: 669769 - DNA, 15 bp, Homo sapiens
aatatgtcaaggaaa

SEQ ID NO: 669770 - DNA, 15 bp, Homo sapiens
atatgtcaaggaaag

SEQ ID NO: 669771 - DNA, 15 bp, Homo sapiens
tatgtcaaggaaaga

SEQ ID NO: 669772 - DNA, 15 bp, Homo sapiens
atgtcaaggaaagat

SEQ ID NO: 669773 - DNA, 15 bp, Homo sapiens
tgtcaaggaaagatt

SEQ ID NO: 669774 - DNA, 15 bp, Homo sapiens
gtcaaggaaagattt

SEQ ID NO: 669775 - DNA, 15 bp, Homo sapiens
tcaaggaaagatttt

SEQ ID NO: 669776 - DNA, 15 bp, Homo sapiens
caaggaaagatttta

SEQ ID NO: 669777 - DNA, 15 bp, Homo sapiens
aaggaaagattttaa

SEQ ID NO: 669778 - DNA, 15 bp, Homo sapiens
aggaaagattttaaa

SEQ ID NO: 669779 - DNA, 15 bp, Homo sapiens
ggaaagattttaaat

SEQ ID NO: 669780 - DNA, 15 bp, Homo sapiens
gaaagattttaaatg

SEQ ID NO: 669781 - DNA, 15 bp, Homo sapiens
aaagattttaaatga

SEQ ID NO: 669782 - DNA, 15 bp, Homo sapiens
aagattttaaatgaa

SEQ ID NO: 669783 - DNA, 15 bp, Homo sapiens
agattttaaatgaaa

SEQ ID NO: 669784 - DNA, 15 bp, Homo sapiens
gattttaaatgaaaa

SEQ ID NO: 669785 - DNA, 15 bp, Homo sapiens
attttaaatgaaaaa

SEQ ID NO: 669786 - DNA, 15 bp, Homo sapiens
ttttaaatgaaaaat

SEQ ID NO: 669787 - DNA, 15 bp, Homo sapiens
tttaaatgaaaaatg

SEQ ID NO: 669788 - DNA, 15 bp, Homo sapiens
ttaaatgaaaaatgt

SEQ ID NO: 669789 - DNA, 15 bp, Homo sapiens
taaatgaaaaatgtt

SEQ ID NO: 669790 - DNA, 15 bp, Homo sapiens
aaatgaaaaatgtta

SEQ ID NO: 669791 - DNA, 15 bp, Homo sapiens
aatgaaaaatgttac

SEQ ID NO: 669792 - DNA, 15 bp, Homo sapiens
atgaaaaatgttact

SEQ ID NO: 669793 - DNA, 15 bp, Homo sapiens
tgaaaaatgttacta

SEQ ID NO: 669794 - DNA, 15 bp, Homo sapiens
gaaaaatgttactag

SEQ ID NO: 669795 - DNA, 15 bp, Homo sapiens
aaaaatgttactaga

SEQ ID NO: 669796 - DNA, 15 bp, Homo sapiens
aaaatgttactagat

SEQ ID NO: 669797 - DNA, 15 bp, Homo sapiens
aaatgttactagatt

SEQ ID NO: 669798 - DNA, 15 bp, Homo sapiens
aatgttactagattg

SEQ ID NO: 669799 - DNA, 15 bp, Homo sapiens
atgttactagattga

SEQ ID NO: 669800 - DNA, 15 bp, Homo sapiens
tgttactagattgag

SEQ ID NO: 669801 - DNA, 15 bp, Homo sapiens
gttactagattgagc

SEQ ID NO: 669802 - DNA, 15 bp, Homo sapiens
ttactagattgagca

SEQ ID NO: 669803 - DNA, 15 bp, Homo sapiens
tactagattgagcat

SEQ ID NO: 669804 - DNA, 15 bp, Homo sapiens
actagattgagcatc

SEQ ID NO: 669805 - DNA, 15 bp, Homo sapiens
ctagattgagcatct

SEQ ID NO: 669806 - DNA, 15 bp, Homo sapiens
tagattgagcatctg

SEQ ID NO: 669807 - DNA, 15 bp, Homo sapiens
agattgagcatctga

SEQ ID NO: 669808 - DNA, 15 bp, Homo sapiens
gattgagcatctgat

SEQ ID NO: 669809 - DNA, 15 bp, Homo sapiens
attgagcatctgatc

SEQ ID NO: 669810 - DNA, 15 bp, Homo sapiens
ttgagcatctgatct

SEQ ID NO: 669811 - DNA, 15 bp, Homo sapiens
tgagcatctgatcta

SEQ ID NO: 669812 - DNA, 15 bp, Homo sapiens
gagcatctgatctat

SEQ ID NO: 669813 - DNA, 15 bp, Homo sapiens
agcatctgatctata

SEQ ID NO: 669814 - DNA, 15 bp, Homo sapiens
gcatctgatctatat

SEQ ID NO: 669815 - DNA, 15 bp, Homo sapiens
catctgatctatatt

SEQ ID NO: 669816 - DNA, 15 bp, Homo sapiens
atctgatctatatta

SEQ ID NO: 669817 - DNA, 15 bp, Homo sapiens
tctgatctatattag

SEQ ID NO: 669818 - DNA, 15 bp, Homo sapiens
ctgatctatattaga

SEQ ID NO: 669819 - DNA, 15 bp, Homo sapiens
tgatctatattagaa

SEQ ID NO: 669820 - DNA, 15 bp, Homo sapiens
gatctatattagaaa

SEQ ID NO: 669821 - DNA, 15 bp, Homo sapiens
atctatattagaaat

SEQ ID NO: 669822 - DNA, 15 bp, Homo sapiens
tctatattagaaatc

SEQ ID NO: 669823 - DNA, 15 bp, Homo sapiens
ctatattagaaatcg

SEQ ID NO: 669824 - DNA, 15 bp, Homo sapiens
tatattagaaatcga

SEQ ID NO: 669825 - DNA, 15 bp, Homo sapiens
atattagaaatcgat

SEQ ID NO: 669826 - DNA, 15 bp, Homo sapiens
tattagaaatcgatc

SEQ ID NO: 669827 - DNA, 15 bp, Homo sapiens
attagaaatcgatca

SEQ ID NO: 669828 - DNA, 15 bp, Homo sapiens
ttagaaatcgatcat

SEQ ID NO: 669829 - DNA, 15 bp, Homo sapiens
tagaaatcgatcatc

SEQ ID NO: 669830 - DNA, 15 bp, Homo sapiens
agaaatcgatcatct

SEQ ID NO: 669831 - DNA, 15 bp, Homo sapiens
gaaatcgatcatctg

SEQ ID NO: 669832 - DNA, 15 bp, Homo sapiens
aaatcgatcatctgg

SEQ ID NO: 669833 - DNA, 15 bp, Homo sapiens
aatcgatcatctggc

SEQ ID NO: 669834 - DNA, 15 bp, Homo sapiens
atcgatcatctggca

SEQ ID NO: 669835 - DNA, 15 bp, Homo sapiens
tcgatcatctggcag

SEQ ID NO: 669836 - DNA, 15 bp, Homo sapiens
cgatcatctggcagc

SEQ ID NO: 669837 - DNA, 15 bp, Homo sapiens
gatcatctggcagcc

SEQ ID NO: 669838 - DNA, 15 bp, Homo sapiens
atcatctggcagcca

SEQ ID NO: 669839 - DNA, 15 bp, Homo sapiens
tcatctggcagccat

SEQ ID NO: 669840 - DNA, 15 bp, Homo sapiens
catctggcagccatg

SEQ ID NO: 669841 - DNA, 15 bp, Homo sapiens
atctggcagccatgt

SEQ ID NO: 669842 - DNA, 15 bp, Homo sapiens
tctggcagccatgtc

SEQ ID NO: 669843 - DNA, 15 bp, Homo sapiens
ctggcagccatgtct

SEQ ID NO: 669844 - DNA, 15 bp, Homo sapiens
tggcagccatgtcta

SEQ ID NO: 669845 - DNA, 15 bp, Homo sapiens
ggcagccatgtctag

SEQ ID NO: 669846 - DNA, 15 bp, Homo sapiens
gcagccatgtctagc

SEQ ID NO: 669847 - DNA, 15 bp, Homo sapiens
cagccatgtctagca

SEQ ID NO: 669848 - DNA, 15 bp, Homo sapiens
agccatgtctagcag

SEQ ID NO: 669849 - DNA, 15 bp, Homo sapiens
gccatgtctagcagc

SEQ ID NO: 669850 - DNA, 15 bp, Homo sapiens
ccatgtctagcagca

SEQ ID NO: 669851 - DNA, 15 bp, Homo sapiens
catgtctagcagcat

SEQ ID NO: 669852 - DNA, 15 bp, Homo sapiens
atgtctagcagcatc

SEQ ID NO: 669853 - DNA, 15 bp, Homo sapiens
tgtctagcagcatct

SEQ ID NO: 669854 - DNA, 15 bp, Homo sapiens
gtctagcagcatcta

SEQ ID NO: 669855 - DNA, 15 bp, Homo sapiens
tctagcagcatctat

SEQ ID NO: 669856 - DNA, 15 bp, Homo sapiens
ctagcagcatctata

SEQ ID NO: 669857 - DNA, 15 bp, Homo sapiens
tagcagcatctatag

SEQ ID NO: 669858 - DNA, 15 bp, Homo sapiens
agcagcatctatagc

SEQ ID NO: 669859 - DNA, 15 bp, Homo sapiens
gcagcatctatagcc

SEQ ID NO: 669860 - DNA, 15 bp, Homo sapiens
cagcatctatagcct

SEQ ID NO: 669861 - DNA, 15 bp, Homo sapiens
agcatctatagccta

SEQ ID NO: 669862 - DNA, 15 bp, Homo sapiens
gcatctatagcctat

SEQ ID NO: 669863 - DNA, 15 bp, Homo sapiens
catctatagcctatg

SEQ ID NO: 669864 - DNA, 15 bp, Homo sapiens
atctatagcctatgc

SEQ ID NO: 669865 - DNA, 15 bp, Homo sapiens
tctatagcctatgcc

SEQ ID NO: 669866 - DNA, 15 bp, Homo sapiens
ctatagcctatgcca

SEQ ID NO: 669867 - DNA, 15 bp, Homo sapiens
tatagcctatgccat

SEQ ID NO: 669868 - DNA, 15 bp, Homo sapiens
atagcctatgccatt

SEQ ID NO: 669869 - DNA, 15 bp, Homo sapiens
tagcctatgccattg

SEQ ID NO: 669870 - DNA, 15 bp, Homo sapiens
agcctatgccattgc

SEQ ID NO: 669871 - DNA, 15 bp, Homo sapiens
gcctatgccattgca

SEQ ID NO: 669872 - DNA, 15 bp, Homo sapiens
cctatgccattgcat

SEQ ID NO: 669873 - DNA, 15 bp, Homo sapiens
ctatgccattgcatg

SEQ ID NO: 669874 - DNA, 15 bp, Homo sapiens
tatgccattgcatgt

SEQ ID NO: 669875 - DNA, 15 bp, Homo sapiens
atgccattgcatgtt

SEQ ID NO: 669876 - DNA, 15 bp, Homo sapiens
tgccattgcatgttg

SEQ ID NO: 669877 - DNA, 15 bp, Homo sapiens
gccattgcatgttgg

SEQ ID NO: 669878 - DNA, 15 bp, Homo sapiens
ccattgcatgttggc

SEQ ID NO: 669879 - DNA, 15 bp, Homo sapiens
cattgcatgttggct

SEQ ID NO: 669880 - DNA, 15 bp, Homo sapiens
attgcatgttggctt

SEQ ID NO: 669881 - DNA, 15 bp, Homo sapiens
ttgcatgttggcttt

SEQ ID NO: 669882 - DNA, 15 bp, Homo sapiens
tgcatgttggctttc

SEQ ID NO: 669883 - DNA, 15 bp, Homo sapiens
gcatgttggctttcc

SEQ ID NO: 669884 - DNA, 15 bp, Homo sapiens
catgttggctttccc

SEQ ID NO: 669885 - DNA, 15 bp, Homo sapiens
atgttggctttcccc

SEQ ID NO: 669886 - DNA, 15 bp, Homo sapiens
tgttggctttccccc

SEQ ID NO: 669887 - DNA, 15 bp, Homo sapiens
gttggctttccccca

SEQ ID NO: 669888 - DNA, 15 bp, Homo sapiens
ttggctttcccccaa

SEQ ID NO: 669889 - DNA, 15 bp, Homo sapiens
tggctttcccccaag

SEQ ID NO: 669890 - DNA, 15 bp, Homo sapiens
ggctttcccccaagg

SEQ ID NO: 669891 - DNA, 15 bp, Homo sapiens
gctttcccccaaggt

SEQ ID NO: 669892 - DNA, 15 bp, Homo sapiens
ctttcccccaaggtg

SEQ ID NO: 669893 - DNA, 15 bp, Homo sapiens
tttcccccaaggtgc

SEQ ID NO: 669894 - DNA, 15 bp, Homo sapiens
ttcccccaaggtgca

SEQ ID NO: 669895 - DNA, 15 bp, Homo sapiens
tcccccaaggtgcat

SEQ ID NO: 669896 - DNA, 15 bp, Homo sapiens
cccccaaggtgcata

SEQ ID NO: 669897 - DNA, 15 bp, Homo sapiens
ccccaaggtgcatag

SEQ ID NO: 669898 - DNA, 15 bp, Homo sapiens
cccaaggtgcatagt

SEQ ID NO: 669899 - DNA, 15 bp, Homo sapiens
ccaaggtgcatagta

SEQ ID NO: 669900 - DNA, 15 bp, Homo sapiens
caaggtgcatagtag

SEQ ID NO: 669901 - DNA, 15 bp, Homo sapiens
aaggtgcatagtagg

SEQ ID NO: 669902 - DNA, 15 bp, Homo sapiens
aggtgcatagtaggt

SEQ ID NO: 669903 - DNA, 15 bp, Homo sapiens
ggtgcatagtaggtt

SEQ ID NO: 669904 - DNA, 15 bp, Homo sapiens
gtgcatagtaggttt

SEQ ID NO: 669905 - DNA, 15 bp, Homo sapiens
tgcatagtaggttta

SEQ ID NO: 669906 - DNA, 15 bp, Homo sapiens
gcatagtaggtttat

SEQ ID NO: 669907 - DNA, 15 bp, Homo sapiens
catagtaggtttatt

SEQ ID NO: 669908 - DNA, 15 bp, Homo sapiens
atagtaggtttattt

SEQ ID NO: 669909 - DNA, 15 bp, Homo sapiens
tagtaggtttatttg

SEQ ID NO: 669910 - DNA, 15 bp, Homo sapiens
agtaggtttatttga

SEQ ID NO: 669911 - DNA, 15 bp, Homo sapiens
gtaggtttatttgag

SEQ ID NO: 669912 - DNA, 15 bp, Homo sapiens
taggtttatttgagg

SEQ ID NO: 669913 - DNA, 15 bp, Homo sapiens
aggtttatttgagga

SEQ ID NO: 669914 - DNA, 15 bp, Homo sapiens
ggtttatttgaggac

SEQ ID NO: 669915 - DNA, 15 bp, Homo sapiens
gtttatttgaggact

SEQ ID NO: 669916 - DNA, 15 bp, Homo sapiens
tttatttgaggactg

SEQ ID NO: 669917 - DNA, 15 bp, Homo sapiens
ttatttgaggactga

SEQ ID NO: 669918 - DNA, 15 bp, Homo sapiens
tatttgaggactgaa

SEQ ID NO: 669919 - DNA, 15 bp, Homo sapiens
atttgaggactgaat

SEQ ID NO: 669920 - DNA, 15 bp, Homo sapiens
tttgaggactgaatt

SEQ ID NO: 669921 - DNA, 15 bp, Homo sapiens
ttgaggactgaattc

SEQ ID NO: 669922 - DNA, 15 bp, Homo sapiens
tgaggactgaattca

SEQ ID NO: 669923 - DNA, 15 bp, Homo sapiens
gaggactgaattcac

SEQ ID NO: 669924 - DNA, 15 bp, Homo sapiens
aggactgaattcaca

SEQ ID NO: 669925 - DNA, 15 bp, Homo sapiens
ggactgaattcacat

SEQ ID NO: 669926 - DNA, 15 bp, Homo sapiens
gactgaattcacatc

SEQ ID NO: 669927 - DNA, 15 bp, Homo sapiens
actgaattcacatct

SEQ ID NO: 669928 - DNA, 15 bp, Homo sapiens
ctgaattcacatctt

SEQ ID NO: 669929 - DNA, 15 bp, Homo sapiens
tgaattcacatctta

SEQ ID NO: 669930 - DNA, 15 bp, Homo sapiens
gaattcacatcttat

SEQ ID NO: 669931 - DNA, 15 bp, Homo sapiens
aattcacatcttata

SEQ ID NO: 669932 - DNA, 15 bp, Homo sapiens
attcacatcttatac

SEQ ID NO: 669933 - DNA, 15 bp, Homo sapiens
ttcacatcttatacc

SEQ ID NO: 669934 - DNA, 15 bp, Homo sapiens
tcacatcttatacct

SEQ ID NO: 669935 - DNA, 15 bp, Homo sapiens
cacatcttatacctg

SEQ ID NO: 669936 - DNA, 15 bp, Homo sapiens
acatcttatacctgt

SEQ ID NO: 669937 - DNA, 15 bp, Homo sapiens
catcttatacctgtt

SEQ ID NO: 669938 - DNA, 15 bp, Homo sapiens
atcttatacctgttt

SEQ ID NO: 669939 - DNA, 15 bp, Homo sapiens
tcttatacctgttta

SEQ ID NO: 669940 - DNA, 15 bp, Homo sapiens
cttatacctgtttat

SEQ ID NO: 669941 - DNA, 15 bp, Homo sapiens
ttatacctgtttatt

SEQ ID NO: 669942 - DNA, 15 bp, Homo sapiens
tatacctgtttattt

SEQ ID NO: 669943 - DNA, 15 bp, Homo sapiens
atacctgtttatttc

SEQ ID NO: 669944 - DNA, 15 bp, Homo sapiens
tacctgtttatttct

SEQ ID NO: 669945 - DNA, 15 bp, Homo sapiens
acctgtttatttctc

SEQ ID NO: 669946 - DNA, 15 bp, Homo sapiens
cctgtttatttctca

SEQ ID NO: 669947 - DNA, 15 bp, Homo sapiens
ctgtttatttctcat

SEQ ID NO: 669948 - DNA, 15 bp, Homo sapiens
tgtttatttctcatg

SEQ ID NO: 669949 - DNA, 15 bp, Homo sapiens
gtttatttctcatgg

SEQ ID NO: 669950 - DNA, 15 bp, Homo sapiens
tttatttctcatgga

SEQ ID NO: 669951 - DNA, 15 bp, Homo sapiens
ttatttctcatggaa

SEQ ID NO: 669952 - DNA, 15 bp, Homo sapiens
tatttctcatggaac

SEQ ID NO: 669953 - DNA, 15 bp, Homo sapiens
atttctcatggaact

SEQ ID NO: 669954 - DNA, 15 bp, Homo sapiens
tttctcatggaactt

SEQ ID NO: 669955 - DNA, 15 bp, Homo sapiens
ttctcatggaacttt

SEQ ID NO: 669956 - DNA, 15 bp, Homo sapiens
tctcatggaactttc

SEQ ID NO: 669957 - DNA, 15 bp, Homo sapiens
ctcatggaactttct

SEQ ID NO: 669958 - DNA, 15 bp, Homo sapiens
tcatggaactttcta

SEQ ID NO: 669959 - DNA, 15 bp, Homo sapiens
catggaactttctac

SEQ ID NO: 669960 - DNA, 15 bp, Homo sapiens
atggaactttctact

SEQ ID NO: 669961 - DNA, 15 bp, Homo sapiens
tggaactttctactg

SEQ ID NO: 669962 - DNA, 15 bp, Homo sapiens
ggaactttctactgc

SEQ ID NO: 669963 - DNA, 15 bp, Homo sapiens
gaactttctactgca

SEQ ID NO: 669964 - DNA, 15 bp, Homo sapiens
aactttctactgcag

SEQ ID NO: 669965 - DNA, 15 bp, Homo sapiens
actttctactgcagg

SEQ ID NO: 669966 - DNA, 15 bp, Homo sapiens
ctttctactgcagga

SEQ ID NO: 669967 - DNA, 15 bp, Homo sapiens
tttctactgcaggac

SEQ ID NO: 669968 - DNA, 15 bp, Homo sapiens
ttctactgcaggacg

SEQ ID NO: 669969 - DNA, 15 bp, Homo sapiens
tctactgcaggacgt

SEQ ID NO: 669970 - DNA, 15 bp, Homo sapiens
ctactgcaggacgtg

SEQ ID NO: 669971 - DNA, 15 bp, Homo sapiens
tactgcaggacgtga

SEQ ID NO: 669972 - DNA, 15 bp, Homo sapiens
actgcaggacgtgac

SEQ ID NO: 669973 - DNA, 15 bp, Homo sapiens
ctgcaggacgtgaca

SEQ ID NO: 669974 - DNA, 15 bp, Homo sapiens
tgcaggacgtgacag

SEQ ID NO: 669975 - DNA, 15 bp, Homo sapiens
gcaggacgtgacagg

SEQ ID NO: 669976 - DNA, 15 bp, Homo sapiens
caggacgtgacaggt

SEQ ID NO: 669977 - DNA, 15 bp, Homo sapiens
aggacgtgacaggtg

SEQ ID NO: 669978 - DNA, 15 bp, Homo sapiens
ggacgtgacaggtgc

SEQ ID NO: 669979 - DNA, 15 bp, Homo sapiens
gacgtgacaggtgct

SEQ ID NO: 669980 - DNA, 15 bp, Homo sapiens
acgtgacaggtgcta

SEQ ID NO: 669981 - DNA, 15 bp, Homo sapiens
cgtgacaggtgctag

SEQ ID NO: 669982 - DNA, 15 bp, Homo sapiens
gtgacaggtgctaga

SEQ ID NO: 669983 - DNA, 15 bp, Homo sapiens
tgacaggtgctagac

SEQ ID NO: 669984 - DNA, 15 bp, Homo sapiens
gacaggtgctagact

SEQ ID NO: 669985 - DNA, 15 bp, Homo sapiens
acaggtgctagactg

SEQ ID NO: 669986 - DNA, 15 bp, Homo sapiens
caggtgctagactgt

SEQ ID NO: 669987 - DNA, 15 bp, Homo sapiens
aggtgctagactgtc

SEQ ID NO: 669988 - DNA, 15 bp, Homo sapiens
ggtgctagactgtca

SEQ ID NO: 669989 - DNA, 15 bp, Homo sapiens
gtgctagactgtcag

SEQ ID NO: 669990 - DNA, 15 bp, Homo sapiens
tgctagactgtcagt

SEQ ID NO: 669991 - DNA, 15 bp, Homo sapiens
gctagactgtcagta

SEQ ID NO: 669992 - DNA, 15 bp, Homo sapiens
ctagactgtcagtaa

SEQ ID NO: 669993 - DNA, 15 bp, Homo sapiens
tagactgtcagtaaa

SEQ ID NO: 669994 - DNA, 15 bp, Homo sapiens
agactgtcagtaaag

SEQ ID NO: 669995 - DNA, 15 bp, Homo sapiens
gactgtcagtaaaga

SEQ ID NO: 669996 - DNA, 15 bp, Homo sapiens
actgtcagtaaagat

SEQ ID NO: 669997 - DNA, 15 bp, Homo sapiens
ctgtcagtaaagatg

SEQ ID NO: 669998 - DNA, 15 bp, Homo sapiens
tgtcagtaaagatgg

SEQ ID NO: 669999 - DNA, 15 bp, Homo sapiens
gtcagtaaagatggt

SEQ ID NO: 670000 - DNA, 15 bp, Homo sapiens
tcagtaaagatggtt

SEQ ID NO: 670001 - DNA, 15 bp, Homo sapiens
cagtaaagatggttg

SEQ ID NO: 670002 - DNA, 15 bp, Homo sapiens
agtaaagatggttga

SEQ ID NO: 670003 - DNA, 15 bp, Homo sapiens
gtaaagatggttgaa

SEQ ID NO: 670004 - DNA, 15 bp, Homo sapiens
taaagatggttgaat

SEQ ID NO: 670005 - DNA, 15 bp, Homo sapiens
aaagatggttgaatc

SEQ ID NO: 670006 - DNA, 15 bp, Homo sapiens
aagatggttgaatca

SEQ ID NO: 670007 - DNA, 15 bp, Homo sapiens
agatggttgaatcaa

SEQ ID NO: 670008 - DNA, 15 bp, Homo sapiens
gatggttgaatcaat

SEQ ID NO: 670009 - DNA, 15 bp, Homo sapiens
atggttgaatcaatg

SEQ ID NO: 670010 - DNA, 15 bp, Homo sapiens
tggttgaatcaatga

SEQ ID NO: 670011 - DNA, 15 bp, Homo sapiens
ggttgaatcaatgaa

SEQ ID NO: 670012 - DNA, 15 bp, Homo sapiens
gttgaatcaatgaat

SEQ ID NO: 670013 - DNA, 15 bp, Homo sapiens
ttgaatcaatgaata

SEQ ID NO: 670014 - DNA, 15 bp, Homo sapiens
tgaatcaatgaatag

SEQ ID NO: 670015 - DNA, 15 bp, Homo sapiens
gaatcaatgaataga

SEQ ID NO: 670016 - DNA, 15 bp, Homo sapiens
aatcaatgaatagat

SEQ ID NO: 670017 - DNA, 15 bp, Homo sapiens
atcaatgaatagatg

SEQ ID NO: 670018 - DNA, 15 bp, Homo sapiens
tcaatgaatagatga

SEQ ID NO: 670019 - DNA, 15 bp, Homo sapiens
caatgaatagatgat

SEQ ID NO: 670020 - DNA, 15 bp, Homo sapiens
aatgaatagatgatt

SEQ ID NO: 670021 - DNA, 15 bp, Homo sapiens
atgaatagatgattg

SEQ ID NO: 670022 - DNA, 15 bp, Homo sapiens
tgaatagatgattga

SEQ ID NO: 670023 - DNA, 15 bp, Homo sapiens
gaatagatgattgaa

SEQ ID NO: 670024 - DNA, 15 bp, Homo sapiens
aatagatgattgaat

SEQ ID NO: 670025 - DNA, 15 bp, Homo sapiens
atagatgattgaatt

SEQ ID NO: 670026 - DNA, 15 bp, Homo sapiens
tagatgattgaatta

SEQ ID NO: 670027 - DNA, 15 bp, Homo sapiens
agatgattgaattaa

SEQ ID NO: 670028 - DNA, 15 bp, Homo sapiens
gatgattgaattaat

SEQ ID NO: 670029 - DNA, 15 bp, Homo sapiens
atgattgaattaatt

SEQ ID NO: 670030 - DNA, 15 bp, Homo sapiens
tgattgaattaattt

SEQ ID NO: 670031 - DNA, 15 bp, Homo sapiens
gattgaattaattta

SEQ ID NO: 670032 - DNA, 15 bp, Homo sapiens
attgaattaatttac

SEQ ID NO: 670033 - DNA, 15 bp, Homo sapiens
ttgaattaatttaca

SEQ ID NO: 670034 - DNA, 15 bp, Homo sapiens
tgaattaatttacaa

SEQ ID NO: 670035 - DNA, 15 bp, Homo sapiens
gaattaatttacaaa

SEQ ID NO: 670036 - DNA, 15 bp, Homo sapiens
aattaatttacaaag

SEQ ID NO: 670037 - DNA, 15 bp, Homo sapiens
attaatttacaaaga

SEQ ID NO: 670038 - DNA, 15 bp, Homo sapiens
ttaatttacaaagag

SEQ ID NO: 670039 - DNA, 15 bp, Homo sapiens
taatttacaaagaga

SEQ ID NO: 670040 - DNA, 15 bp, Homo sapiens
aatttacaaagagac

SEQ ID NO: 670041 - DNA, 15 bp, Homo sapiens
atttacaaagagact

SEQ ID NO: 670042 - DNA, 15 bp, Homo sapiens
tttacaaagagactt

SEQ ID NO: 670043 - DNA, 15 bp, Homo sapiens
ttacaaagagacttg

SEQ ID NO: 670044 - DNA, 15 bp, Homo sapiens
tacaaagagacttgc

SEQ ID NO: 670045 - DNA, 15 bp, Homo sapiens
acaaagagacttgct

SEQ ID NO: 670046 - DNA, 15 bp, Homo sapiens
caaagagacttgctt

SEQ ID NO: 670047 - DNA, 15 bp, Homo sapiens
aaagagacttgcttt

SEQ ID NO: 670048 - DNA, 15 bp, Homo sapiens
aagagacttgcttta

SEQ ID NO: 670049 - DNA, 15 bp, Homo sapiens
agagacttgctttag

SEQ ID NO: 670050 - DNA, 15 bp, Homo sapiens
gagacttgctttagt

SEQ ID NO: 670051 - DNA, 15 bp, Homo sapiens
agacttgctttagta

SEQ ID NO: 670052 - DNA, 15 bp, Homo sapiens
gacttgctttagtaa

SEQ ID NO: 670053 - DNA, 15 bp, Homo sapiens
acttgctttagtaat

SEQ ID NO: 670054 - DNA, 15 bp, Homo sapiens
cttgctttagtaatt

SEQ ID NO: 670055 - DNA, 15 bp, Homo sapiens
ttgctttagtaattg

SEQ ID NO: 670056 - DNA, 15 bp, Homo sapiens
tgctttagtaattgt

SEQ ID NO: 670057 - DNA, 15 bp, Homo sapiens
gctttagtaattgtc

SEQ ID NO: 670058 - DNA, 15 bp, Homo sapiens
ctttagtaattgtca

SEQ ID NO: 670059 - DNA, 15 bp, Homo sapiens
tttagtaattgtcaa

SEQ ID NO: 670060 - DNA, 15 bp, Homo sapiens
ttagtaattgtcaac

SEQ ID NO: 670061 - DNA, 15 bp, Homo sapiens
tagtaattgtcaact

SEQ ID NO: 670062 - DNA, 15 bp, Homo sapiens
agtaattgtcaactc

SEQ ID NO: 670063 - DNA, 15 bp, Homo sapiens
gtaattgtcaactct

SEQ ID NO: 670064 - DNA, 15 bp, Homo sapiens
taattgtcaactctt

SEQ ID NO: 670065 - DNA, 15 bp, Homo sapiens
aattgtcaactcttc

SEQ ID NO: 670066 - DNA, 15 bp, Homo sapiens
attgtcaactcttca

SEQ ID NO: 670067 - DNA, 15 bp, Homo sapiens
ttgtcaactcttcac

SEQ ID NO: 670068 - DNA, 15 bp, Homo sapiens
tgtcaactcttcact

SEQ ID NO: 670069 - DNA, 15 bp, Homo sapiens
gtcaactcttcactt

SEQ ID NO: 670070 - DNA, 15 bp, Homo sapiens
tcaactcttcactta

SEQ ID NO: 670071 - DNA, 15 bp, Homo sapiens
caactcttcacttat

SEQ ID NO: 670072 - DNA, 15 bp, Homo sapiens
aactcttcacttatt

SEQ ID NO: 670073 - DNA, 15 bp, Homo sapiens
actcttcacttattc

SEQ ID NO: 670074 - DNA, 15 bp, Homo sapiens
ctcttcacttattca

SEQ ID NO: 670075 - DNA, 15 bp, Homo sapiens
tcttcacttattcaa

SEQ ID NO: 670076 - DNA, 15 bp, Homo sapiens
cttcacttattcaac

SEQ ID NO: 670077 - DNA, 15 bp, Homo sapiens
ttcacttattcaaca

SEQ ID NO: 670078 - DNA, 15 bp, Homo sapiens
tcacttattcaacaa

SEQ ID NO: 670079 - DNA, 15 bp, Homo sapiens
cacttattcaacaaa

SEQ ID NO: 670080 - DNA, 15 bp, Homo sapiens
acttattcaacaaat

SEQ ID NO: 670081 - DNA, 15 bp, Homo sapiens
cttattcaacaaata

SEQ ID NO: 670082 - DNA, 15 bp, Homo sapiens
ttattcaacaaatat

SEQ ID NO: 670083 - DNA, 15 bp, Homo sapiens
tattcaacaaatatt

SEQ ID NO: 670084 - DNA, 15 bp, Homo sapiens
attcaacaaatattt

SEQ ID NO: 670085 - DNA, 15 bp, Homo sapiens
ttcaacaaatatttg

SEQ ID NO: 670086 - DNA, 15 bp, Homo sapiens
tcaacaaatatttga

SEQ ID NO: 670087 - DNA, 15 bp, Homo sapiens
caacaaatatttgag

SEQ ID NO: 670088 - DNA, 15 bp, Homo sapiens
aacaaatatttgagg

SEQ ID NO: 670089 - DNA, 15 bp, Homo sapiens
acaaatatttgaggg

SEQ ID NO: 670090 - DNA, 15 bp, Homo sapiens
caaatatttgagggt

SEQ ID NO: 670091 - DNA, 15 bp, Homo sapiens
aaatatttgagggtg

SEQ ID NO: 670092 - DNA, 15 bp, Homo sapiens
aatatttgagggtgt

SEQ ID NO: 670093 - DNA, 15 bp, Homo sapiens
atatttgagggtgtt

SEQ ID NO: 670094 - DNA, 15 bp, Homo sapiens
tatttgagggtgttt

SEQ ID NO: 670095 - DNA, 15 bp, Homo sapiens
atttgagggtgtttc

SEQ ID NO: 670096 - DNA, 15 bp, Homo sapiens
tttgagggtgtttca

SEQ ID NO: 670097 - DNA, 15 bp, Homo sapiens
ttgagggtgtttcat

SEQ ID NO: 670098 - DNA, 15 bp, Homo sapiens
tgagggtgtttcatg

SEQ ID NO: 670099 - DNA, 15 bp, Homo sapiens
gagggtgtttcatgt

SEQ ID NO: 670100 - DNA, 15 bp, Homo sapiens
agggtgtttcatgtg

SEQ ID NO: 670101 - DNA, 15 bp, Homo sapiens
gggtgtttcatgtgc

SEQ ID NO: 670102 - DNA, 15 bp, Homo sapiens
ggtgtttcatgtgcg

SEQ ID NO: 670103 - DNA, 15 bp, Homo sapiens
gtgtttcatgtgcga

SEQ ID NO: 670104 - DNA, 15 bp, Homo sapiens
tgtttcatgtgcgaa

SEQ ID NO: 670105 - DNA, 15 bp, Homo sapiens
gtttcatgtgcgaag

SEQ ID NO: 670106 - DNA, 15 bp, Homo sapiens
tttcatgtgcgaagt

SEQ ID NO: 670107 - DNA, 15 bp, Homo sapiens
ttcatgtgcgaagta

SEQ ID NO: 670108 - DNA, 15 bp, Homo sapiens
tcatgtgcgaagtac

SEQ ID NO: 670109 - DNA, 15 bp, Homo sapiens
catgtgcgaagtacc

SEQ ID NO: 670110 - DNA, 15 bp, Homo sapiens
atgtgcgaagtacca

SEQ ID NO: 670111 - DNA, 15 bp, Homo sapiens
tgtgcgaagtaccat

SEQ ID NO: 670112 - DNA, 15 bp, Homo sapiens
gtgcgaagtaccatt

SEQ ID NO: 670113 - DNA, 15 bp, Homo sapiens
tgcgaagtaccattc

SEQ ID NO: 670114 - DNA, 15 bp, Homo sapiens
gcgaagtaccattct

SEQ ID NO: 670115 - DNA, 15 bp, Homo sapiens
cgaagtaccattctg

SEQ ID NO: 670116 - DNA, 15 bp, Homo sapiens
gaagtaccattctgt

SEQ ID NO: 670117 - DNA, 15 bp, Homo sapiens
aagtaccattctgtg

SEQ ID NO: 670118 - DNA, 15 bp, Homo sapiens
agtaccattctgtgt

SEQ ID NO: 670119 - DNA, 15 bp, Homo sapiens
gtaccattctgtgtg

SEQ ID NO: 670120 - DNA, 15 bp, Homo sapiens
taccattctgtgtgt

SEQ ID NO: 670121 - DNA, 15 bp, Homo sapiens
accattctgtgtgtt

SEQ ID NO: 670122 - DNA, 15 bp, Homo sapiens
ccattctgtgtgttc

SEQ ID NO: 670123 - DNA, 15 bp, Homo sapiens
cattctgtgtgttcg

SEQ ID NO: 670124 - DNA, 15 bp, Homo sapiens
attctgtgtgttcgt

SEQ ID NO: 670125 - DNA, 15 bp, Homo sapiens
ttctgtgtgttcgta

SEQ ID NO: 670126 - DNA, 15 bp, Homo sapiens
tctgtgtgttcgtaa

SEQ ID NO: 670127 - DNA, 15 bp, Homo sapiens
ctgtgtgttcgtaat

SEQ ID NO: 670128 - DNA, 15 bp, Homo sapiens
tgtgtgttcgtaata

SEQ ID NO: 670129 - DNA, 15 bp, Homo sapiens
gtgtgttcgtaatat

SEQ ID NO: 670130 - DNA, 15 bp, Homo sapiens
tgtgttcgtaatata

SEQ ID NO: 670131 - DNA, 15 bp, Homo sapiens
gtgttcgtaatatat

SEQ ID NO: 670132 - DNA, 15 bp, Homo sapiens
tgttcgtaatatatc

SEQ ID NO: 670133 - DNA, 15 bp, Homo sapiens
gttcgtaatatatca

SEQ ID NO: 670134 - DNA, 15 bp, Homo sapiens
ttcgtaatatatcag

SEQ ID NO: 670135 - DNA, 15 bp, Homo sapiens
tcgtaatatatcagt

SEQ ID NO: 670136 - DNA, 15 bp, Homo sapiens
cgtaatatatcagtg

SEQ ID NO: 670137 - DNA, 15 bp, Homo sapiens
gtaatatatcagtga

SEQ ID NO: 670138 - DNA, 15 bp, Homo sapiens
taatatatcagtgaa

SEQ ID NO: 670139 - DNA, 15 bp, Homo sapiens
aatatatcagtgaac

SEQ ID NO: 670140 - DNA, 15 bp, Homo sapiens
atatatcagtgaaca

SEQ ID NO: 670141 - DNA, 15 bp, Homo sapiens
tatatcagtgaacaa

SEQ ID NO: 670142 - DNA, 15 bp, Homo sapiens
atatcagtgaacaaa

SEQ ID NO: 670143 - DNA, 15 bp, Homo sapiens
tatcagtgaacaaag

SEQ ID NO: 670144 - DNA, 15 bp, Homo sapiens
atcagtgaacaaagc

SEQ ID NO: 670145 - DNA, 15 bp, Homo sapiens
tcagtgaacaaagca

SEQ ID NO: 670146 - DNA, 15 bp, Homo sapiens
cagtgaacaaagcac

SEQ ID NO: 670147 - DNA, 15 bp, Homo sapiens
agtgaacaaagcaca

SEQ ID NO: 670148 - DNA, 15 bp, Homo sapiens
gtgaacaaagcacag

SEQ ID NO: 670149 - DNA, 15 bp, Homo sapiens
tgaacaaagcacaga

SEQ ID NO: 670150 - DNA, 15 bp, Homo sapiens
gaacaaagcacagat

SEQ ID NO: 670151 - DNA, 15 bp, Homo sapiens
aacaaagcacagatc

SEQ ID NO: 670152 - DNA, 15 bp, Homo sapiens
acaaagcacagatct

SEQ ID NO: 670153 - DNA, 15 bp, Homo sapiens
caaagcacagatctc

SEQ ID NO: 670154 - DNA, 15 bp, Homo sapiens
aaagcacagatctct

SEQ ID NO: 670155 - DNA, 15 bp, Homo sapiens
aagcacagatctctg

SEQ ID NO: 670156 - DNA, 15 bp, Homo sapiens
agcacagatctctgt

SEQ ID NO: 670157 - DNA, 15 bp, Homo sapiens
gcacagatctctgtc

SEQ ID NO: 670158 - DNA, 15 bp, Homo sapiens
cacagatctctgtcc

SEQ ID NO: 670159 - DNA, 15 bp, Homo sapiens
acagatctctgtcct

SEQ ID NO: 670160 - DNA, 15 bp, Homo sapiens
cagatctctgtcctt

SEQ ID NO: 670161 - DNA, 15 bp, Homo sapiens
agatctctgtccttt

SEQ ID NO: 670162 - DNA, 15 bp, Homo sapiens
gatctctgtcctttt

SEQ ID NO: 670163 - DNA, 15 bp, Homo sapiens
atctctgtccttttg

SEQ ID NO: 670164 - DNA, 15 bp, Homo sapiens
tctctgtccttttgg

SEQ ID NO: 670165 - DNA, 15 bp, Homo sapiens
ctctgtccttttggt

SEQ ID NO: 670166 - DNA, 15 bp, Homo sapiens
tctgtccttttggtg

SEQ ID NO: 670167 - DNA, 15 bp, Homo sapiens
ctgtccttttggtgc

SEQ ID NO: 670168 - DNA, 15 bp, Homo sapiens
tgtccttttggtgct

SEQ ID NO: 670169 - DNA, 15 bp, Homo sapiens
gtccttttggtgctt

SEQ ID NO: 670170 - DNA, 15 bp, Homo sapiens
tccttttggtgctta

SEQ ID NO: 670171 - DNA, 15 bp, Homo sapiens
ccttttggtgcttac

SEQ ID NO: 670172 - DNA, 15 bp, Homo sapiens
cttttggtgcttaca

SEQ ID NO: 670173 - DNA, 15 bp, Homo sapiens
ttttggtgcttacat

SEQ ID NO: 670174 - DNA, 15 bp, Homo sapiens
tttggtgcttacatt

SEQ ID NO: 670175 - DNA, 15 bp, Homo sapiens
ttggtgcttacattc

SEQ ID NO: 670176 - DNA, 15 bp, Homo sapiens
tggtgcttacattcc

SEQ ID NO: 670177 - DNA, 15 bp, Homo sapiens
ggtgcttacattcca

SEQ ID NO: 670178 - DNA, 15 bp, Homo sapiens
gtgcttacattccag

SEQ ID NO: 670179 - DNA, 15 bp, Homo sapiens
tgcttacattccagt

SEQ ID NO: 670180 - DNA, 15 bp, Homo sapiens
gcttacattccagta

SEQ ID NO: 670181 - DNA, 15 bp, Homo sapiens
cttacattccagtag

SEQ ID NO: 670182 - DNA, 15 bp, Homo sapiens
ttacattccagtaga

SEQ ID NO: 670183 - DNA, 15 bp, Homo sapiens
tacattccagtagag

SEQ ID NO: 670184 - DNA, 15 bp, Homo sapiens
acattccagtagagg

SEQ ID NO: 670185 - DNA, 15 bp, Homo sapiens
cattccagtagaggg

SEQ ID NO: 670186 - DNA, 15 bp, Homo sapiens
attccagtagaggga

SEQ ID NO: 670187 - DNA, 15 bp, Homo sapiens
ttccagtagagggag

SEQ ID NO: 670188 - DNA, 15 bp, Homo sapiens
tccagtagagggaga

SEQ ID NO: 670189 - DNA, 15 bp, Homo sapiens
ccagtagagggagat

SEQ ID NO: 670190 - DNA, 15 bp, Homo sapiens
cagtagagggagata

SEQ ID NO: 670191 - DNA, 15 bp, Homo sapiens
agtagagggagatag

SEQ ID NO: 670192 - DNA, 15 bp, Homo sapiens
gtagagggagataga

SEQ ID NO: 670193 - DNA, 15 bp, Homo sapiens
tagagggagatagat

SEQ ID NO: 670194 - DNA, 15 bp, Homo sapiens
agagggagatagatg

SEQ ID NO: 670195 - DNA, 15 bp, Homo sapiens
gagggagatagatga

SEQ ID NO: 670196 - DNA, 15 bp, Homo sapiens
agggagatagatgat

SEQ ID NO: 670197 - DNA, 15 bp, Homo sapiens
gggagatagatgata

SEQ ID NO: 670198 - DNA, 15 bp, Homo sapiens
ggagatagatgataa

SEQ ID NO: 670199 - DNA, 15 bp, Homo sapiens
gagatagatgataaa

SEQ ID NO: 670200 - DNA, 15 bp, Homo sapiens
agatagatgataaac

SEQ ID NO: 670201 - DNA, 15 bp, Homo sapiens
gatagatgataaact

SEQ ID NO: 670202 - DNA, 15 bp, Homo sapiens
atagatgataaactt

SEQ ID NO: 670203 - DNA, 15 bp, Homo sapiens
tagatgataaacttt

SEQ ID NO: 670204 - DNA, 15 bp, Homo sapiens
agatgataaactttc

SEQ ID NO: 670205 - DNA, 15 bp, Homo sapiens
gatgataaactttcc

SEQ ID NO: 670206 - DNA, 15 bp, Homo sapiens
atgataaactttcct

SEQ ID NO: 670207 - DNA, 15 bp, Homo sapiens
tgataaactttcctg

SEQ ID NO: 670208 - DNA, 15 bp, Homo sapiens
gataaactttcctga

SEQ ID NO: 670209 - DNA, 15 bp, Homo sapiens
ataaactttcctgac

SEQ ID NO: 670210 - DNA, 15 bp, Homo sapiens
taaactttcctgact

SEQ ID NO: 670211 - DNA, 15 bp, Homo sapiens
aaactttcctgactg

SEQ ID NO: 670212 - DNA, 15 bp, Homo sapiens
aactttcctgactgg

SEQ ID NO: 670213 - DNA, 15 bp, Homo sapiens
actttcctgactggg

SEQ ID NO: 670214 - DNA, 15 bp, Homo sapiens
ctttcctgactggga

SEQ ID NO: 670215 - DNA, 15 bp, Homo sapiens
tttcctgactgggag

SEQ ID NO: 670216 - DNA, 15 bp, Homo sapiens
ttcctgactgggagt

SEQ ID NO: 670217 - DNA, 15 bp, Homo sapiens
tcctgactgggagtc

SEQ ID NO: 670218 - DNA, 15 bp, Homo sapiens
cctgactgggagtcc

SEQ ID NO: 670219 - DNA, 15 bp, Homo sapiens
ctgactgggagtcct

SEQ ID NO: 670220 - DNA, 15 bp, Homo sapiens
tgactgggagtcctg

SEQ ID NO: 670221 - DNA, 15 bp, Homo sapiens
gactgggagtcctgg

SEQ ID NO: 670222 - DNA, 15 bp, Homo sapiens
actgggagtcctggc

SEQ ID NO: 670223 - DNA, 15 bp, Homo sapiens
ctgggagtcctggca

SEQ ID NO: 670224 - DNA, 15 bp, Homo sapiens
tgggagtcctggcaa

SEQ ID NO: 670225 - DNA, 15 bp, Homo sapiens
gggagtcctggcaaa

SEQ ID NO: 670226 - DNA, 15 bp, Homo sapiens
ggagtcctggcaaag

SEQ ID NO: 670227 - DNA, 15 bp, Homo sapiens
gagtcctggcaaagg

SEQ ID NO: 670228 - DNA, 15 bp, Homo sapiens
agtcctggcaaaggc

SEQ ID NO: 670229 - DNA, 15 bp, Homo sapiens
gtcctggcaaaggca

SEQ ID NO: 670230 - DNA, 15 bp, Homo sapiens
tcctggcaaaggcat

SEQ ID NO: 670231 - DNA, 15 bp, Homo sapiens
cctggcaaaggcatc

SEQ ID NO: 670232 - DNA, 15 bp, Homo sapiens
ctggcaaaggcatcc

SEQ ID NO: 670233 - DNA, 15 bp, Homo sapiens
tggcaaaggcatcct

SEQ ID NO: 670234 - DNA, 15 bp, Homo sapiens
ggcaaaggcatcctg

SEQ ID NO: 670235 - DNA, 15 bp, Homo sapiens
gcaaaggcatcctga

SEQ ID NO: 670236 - DNA, 15 bp, Homo sapiens
caaaggcatcctgag

SEQ ID NO: 670237 - DNA, 15 bp, Homo sapiens
aaaggcatcctgagc

SEQ ID NO: 670238 - DNA, 15 bp, Homo sapiens
aaggcatcctgagca

SEQ ID NO: 670239 - DNA, 15 bp, Homo sapiens
aggcatcctgagcaa

SEQ ID NO: 670240 - DNA, 15 bp, Homo sapiens
ggcatcctgagcaaa

SEQ ID NO: 670241 - DNA, 15 bp, Homo sapiens
gcatcctgagcaaat

SEQ ID NO: 670242 - DNA, 15 bp, Homo sapiens
catcctgagcaaata

SEQ ID NO: 670243 - DNA, 15 bp, Homo sapiens
atcctgagcaaataa

SEQ ID NO: 670244 - DNA, 15 bp, Homo sapiens
tcctgagcaaataag

SEQ ID NO: 670245 - DNA, 15 bp, Homo sapiens
cctgagcaaataagt

SEQ ID NO: 670246 - DNA, 15 bp, Homo sapiens
ctgagcaaataagtc

SEQ ID NO: 670247 - DNA, 15 bp, Homo sapiens
tgagcaaataagtca

SEQ ID NO: 670248 - DNA, 15 bp, Homo sapiens
gagcaaataagtcaa

SEQ ID NO: 670249 - DNA, 15 bp, Homo sapiens
agcaaataagtcaaa

SEQ ID NO: 670250 - DNA, 15 bp, Homo sapiens
gcaaataagtcaaaa

SEQ ID NO: 670251 - DNA, 15 bp, Homo sapiens
caaataagtcaaaaa

SEQ ID NO: 670252 - DNA, 15 bp, Homo sapiens
aaataagtcaaaaaa

SEQ ID NO: 670253 - DNA, 15 bp, Homo sapiens
aataagtcaaaaaaa

SEQ ID NO: 670254 - DNA, 15 bp, Homo sapiens
ataagtcaaaaaaaa

SEQ ID NO: 670255 - DNA, 15 bp, Homo sapiens
taagtcaaaaaaaaa

SEQ ID NO: 670256 - DNA, 15 bp, Homo sapiens
aagtcaaaaaaaaaa

SEQ ID NO: 670257 - DNA, 15 bp, Homo sapiens
agtcaaaaaaaaaaa

SEQ ID NO: 670258 - DNA, 15 bp, Homo sapiens
gtcaaaaaaaaaaaa

SEQ ID NO: 670259 - DNA, 15 bp, Homo sapiens
tcaaaaaaaaaaaaa

SEQ ID NO: 670260 - DNA, 15 bp, Homo sapiens
caaaaaaaaaaaaaa

SEQ ID NO: 670261 - DNA, 15 bp, Homo sapiens
aaaaaaaaaaaaaaa

SEQ ID NO: 670262 - DNA, 15 bp, Homo sapiens
aaaaaaaaaaaaaag

SEQ ID NO: 670263 - DNA, 15 bp, Homo sapiens
aaaaaaaaaaaaagg

SEQ ID NO: 670264 - DNA, 15 bp, Homo sapiens
aaaaaaaaaaaaggg

SEQ ID NO: 670265 - DNA, 15 bp, Homo sapiens
aaaaaaaaaaaggga

SEQ ID NO: 670266 - DNA, 15 bp, Homo sapiens
aaaaaaaaaagggaa

SEQ ID NO: 670267 - DNA, 15 bp, Homo sapiens
aaaaaaaaagggaaa

SEQ ID NO: 670268 - DNA, 15 bp, Homo sapiens
aaaaaaaagggaaaa

SEQ ID NO: 670269 - DNA, 15 bp, Homo sapiens
aaaaaaagggaaaag

SEQ ID NO: 670270 - DNA, 15 bp, Homo sapiens
aaaaaagggaaaagc

SEQ ID NO: 670271 - DNA, 15 bp, Homo sapiens
aaaaagggaaaagca

SEQ ID NO: 670272 - DNA, 15 bp, Homo sapiens
aaaagggaaaagcaa

SEQ ID NO: 670273 - DNA, 15 bp, Homo sapiens
aaagggaaaagcaag

SEQ ID NO: 670274 - DNA, 15 bp, Homo sapiens
aagggaaaagcaaga

SEQ ID NO: 670275 - DNA, 15 bp, Homo sapiens
agggaaaagcaagac

SEQ ID NO: 670276 - DNA, 15 bp, Homo sapiens
gggaaaagcaagaca

SEQ ID NO: 670277 - DNA, 15 bp, Homo sapiens
ggaaaagcaagacat

SEQ ID NO: 670278 - DNA, 15 bp, Homo sapiens
gaaaagcaagacatt

SEQ ID NO: 670279 - DNA, 15 bp, Homo sapiens
aaaagcaagacattt

SEQ ID NO: 670280 - DNA, 15 bp, Homo sapiens
aaagcaagacattta

SEQ ID NO: 670281 - DNA, 15 bp, Homo sapiens
aagcaagacatttag

SEQ ID NO: 670282 - DNA, 15 bp, Homo sapiens
agcaagacatttagg

SEQ ID NO: 670283 - DNA, 15 bp, Homo sapiens
gcaagacatttaggg

SEQ ID NO: 670284 - DNA, 15 bp, Homo sapiens
caagacatttagggc

SEQ ID NO: 670285 - DNA, 15 bp, Homo sapiens
aagacatttagggcc

SEQ ID NO: 670286 - DNA, 15 bp, Homo sapiens
agacatttagggcct

SEQ ID NO: 670287 - DNA, 15 bp, Homo sapiens
gacatttagggcctt

SEQ ID NO: 670288 - DNA, 15 bp, Homo sapiens
acatttagggccttg

SEQ ID NO: 670289 - DNA, 15 bp, Homo sapiens
catttagggccttgt

SEQ ID NO: 670290 - DNA, 15 bp, Homo sapiens
atttagggccttgta

SEQ ID NO: 670291 - DNA, 15 bp, Homo sapiens
tttagggccttgtaa

SEQ ID NO: 670292 - DNA, 15 bp, Homo sapiens
ttagggccttgtaaa

SEQ ID NO: 670293 - DNA, 15 bp, Homo sapiens
tagggccttgtaaac

SEQ ID NO: 670294 - DNA, 15 bp, Homo sapiens
agggccttgtaaacc

SEQ ID NO: 670295 - DNA, 15 bp, Homo sapiens
gggccttgtaaacct

SEQ ID NO: 670296 - DNA, 15 bp, Homo sapiens
ggccttgtaaacctc

SEQ ID NO: 670297 - DNA, 15 bp, Homo sapiens
gccttgtaaacctcc

SEQ ID NO: 670298 - DNA, 15 bp, Homo sapiens
ccttgtaaacctcca

SEQ ID NO: 670299 - DNA, 15 bp, Homo sapiens
cttgtaaacctccac

SEQ ID NO: 670300 - DNA, 15 bp, Homo sapiens
ttgtaaacctccaca

SEQ ID NO: 670301 - DNA, 15 bp, Homo sapiens
tgtaaacctccacaa

SEQ ID NO: 670302 - DNA, 15 bp, Homo sapiens
gtaaacctccacaaa

SEQ ID NO: 670303 - DNA, 15 bp, Homo sapiens
taaacctccacaaag

SEQ ID NO: 670304 - DNA, 15 bp, Homo sapiens
aaacctccacaaaga

SEQ ID NO: 670305 - DNA, 15 bp, Homo sapiens
aacctccacaaagac

SEQ ID NO: 670306 - DNA, 15 bp, Homo sapiens
acctccacaaagact

SEQ ID NO: 670307 - DNA, 15 bp, Homo sapiens
cctccacaaagactt

SEQ ID NO: 670308 - DNA, 15 bp, Homo sapiens
ctccacaaagacttc

SEQ ID NO: 670309 - DNA, 15 bp, Homo sapiens
tccacaaagacttca

SEQ ID NO: 670310 - DNA, 15 bp, Homo sapiens
ccacaaagacttcaa

SEQ ID NO: 670311 - DNA, 15 bp, Homo sapiens
cacaaagacttcaag

SEQ ID NO: 670312 - DNA, 15 bp, Homo sapiens
acaaagacttcaaga

SEQ ID NO: 670313 - DNA, 15 bp, Homo sapiens
caaagacttcaagac

SEQ ID NO: 670314 - DNA, 15 bp, Homo sapiens
aaagacttcaagact

SEQ ID NO: 670315 - DNA, 15 bp, Homo sapiens
aagacttcaagactt

SEQ ID NO: 670316 - DNA, 15 bp, Homo sapiens
agacttcaagacttc

SEQ ID NO: 670317 - DNA, 15 bp, Homo sapiens
gacttcaagacttca

SEQ ID NO: 670318 - DNA, 15 bp, Homo sapiens
acttcaagacttcag

SEQ ID NO: 670319 - DNA, 15 bp, Homo sapiens
cttcaagacttcagc

SEQ ID NO: 670320 - DNA, 15 bp, Homo sapiens
ttcaagacttcagct

SEQ ID NO: 670321 - DNA, 15 bp, Homo sapiens
tcaagacttcagctt

SEQ ID NO: 670322 - DNA, 15 bp, Homo sapiens
caagacttcagcttt

SEQ ID NO: 670323 - DNA, 15 bp, Homo sapiens
aagacttcagctttc

SEQ ID NO: 670324 - DNA, 15 bp, Homo sapiens
agacttcagctttca

SEQ ID NO: 670325 - DNA, 15 bp, Homo sapiens
gacttcagctttcac

SEQ ID NO: 670326 - DNA, 15 bp, Homo sapiens
acttcagctttcacc

SEQ ID NO: 670327 - DNA, 15 bp, Homo sapiens
cttcagctttcaccc

SEQ ID NO: 670328 - DNA, 15 bp, Homo sapiens
ttcagctttcaccca

SEQ ID NO: 670329 - DNA, 15 bp, Homo sapiens
tcagctttcacccag

SEQ ID NO: 670330 - DNA, 15 bp, Homo sapiens
cagctttcacccagt

SEQ ID NO: 670331 - DNA, 15 bp, Homo sapiens
agctttcacccagtg

SEQ ID NO: 670332 - DNA, 15 bp, Homo sapiens
gctttcacccagtga

SEQ ID NO: 670333 - DNA, 15 bp, Homo sapiens
ctttcacccagtgaa

SEQ ID NO: 670334 - DNA, 15 bp, Homo sapiens
tttcacccagtgaaa

SEQ ID NO: 670335 - DNA, 15 bp, Homo sapiens
ttcacccagtgaaat

SEQ ID NO: 670336 - DNA, 15 bp, Homo sapiens
tcacccagtgaaatg

SEQ ID NO: 670337 - DNA, 15 bp, Homo sapiens
cacccagtgaaatgg

SEQ ID NO: 670338 - DNA, 15 bp, Homo sapiens
acccagtgaaatggc

SEQ ID NO: 670339 - DNA, 15 bp, Homo sapiens
cccagtgaaatggca

SEQ ID NO: 670340 - DNA, 15 bp, Homo sapiens
ccagtgaaatggcag

SEQ ID NO: 670341 - DNA, 15 bp, Homo sapiens
cagtgaaatggcagc

SEQ ID NO: 670342 - DNA, 15 bp, Homo sapiens
agtgaaatggcagcc

SEQ ID NO: 670343 - DNA, 15 bp, Homo sapiens
gtgaaatggcagccg

SEQ ID NO: 670344 - DNA, 15 bp, Homo sapiens
tgaaatggcagccgc

SEQ ID NO: 670345 - DNA, 15 bp, Homo sapiens
gaaatggcagccgct

SEQ ID NO: 670346 - DNA, 15 bp, Homo sapiens
aaatggcagccgctg

SEQ ID NO: 670347 - DNA, 15 bp, Homo sapiens
aatggcagccgctgg

SEQ ID NO: 670348 - DNA, 15 bp, Homo sapiens
atggcagccgctgga

SEQ ID NO: 670349 - DNA, 15 bp, Homo sapiens
tggcagccgctggaa

SEQ ID NO: 670350 - DNA, 15 bp, Homo sapiens
ggcagccgctggaag

SEQ ID NO: 670351 - DNA, 15 bp, Homo sapiens
gcagccgctggaagt

SEQ ID NO: 670352 - DNA, 15 bp, Homo sapiens
cagccgctggaagtt

SEQ ID NO: 670353 - DNA, 15 bp, Homo sapiens
agccgctggaagttt

SEQ ID NO: 670354 - DNA, 15 bp, Homo sapiens
gccgctggaagtttc

SEQ ID NO: 670355 - DNA, 15 bp, Homo sapiens
ccgctggaagtttct

SEQ ID NO: 670356 - DNA, 15 bp, Homo sapiens
cgctggaagtttctg

SEQ ID NO: 670357 - DNA, 15 bp, Homo sapiens
gctggaagtttctga

SEQ ID NO: 670358 - DNA, 15 bp, Homo sapiens
ctggaagtttctgag

SEQ ID NO: 670359 - DNA, 15 bp, Homo sapiens
tggaagtttctgagc

SEQ ID NO: 670360 - DNA, 15 bp, Homo sapiens
ggaagtttctgagct

SEQ ID NO: 670361 - DNA, 15 bp, Homo sapiens
gaagtttctgagctg

SEQ ID NO: 670362 - DNA, 15 bp, Homo sapiens
aagtttctgagctga

SEQ ID NO: 670363 - DNA, 15 bp, Homo sapiens
agtttctgagctgag

SEQ ID NO: 670364 - DNA, 15 bp, Homo sapiens
gtttctgagctgagg

SEQ ID NO: 670365 - DNA, 15 bp, Homo sapiens
tttctgagctgagga

SEQ ID NO: 670366 - DNA, 15 bp, Homo sapiens
ttctgagctgaggag

SEQ ID NO: 670367 - DNA, 15 bp, Homo sapiens
tctgagctgaggagt

SEQ ID NO: 670368 - DNA, 15 bp, Homo sapiens
ctgagctgaggagta

SEQ ID NO: 670369 - DNA, 15 bp, Homo sapiens
tgagctgaggagtag

SEQ ID NO: 670370 - DNA, 15 bp, Homo sapiens
gagctgaggagtagc

SEQ ID NO: 670371 - DNA, 15 bp, Homo sapiens
agctgaggagtagca

SEQ ID NO: 670372 - DNA, 15 bp, Homo sapiens
gctgaggagtagcat

SEQ ID NO: 670373 - DNA, 15 bp, Homo sapiens
ctgaggagtagcatg

SEQ ID NO: 670374 - DNA, 15 bp, Homo sapiens
tgaggagtagcatgg

SEQ ID NO: 670375 - DNA, 15 bp, Homo sapiens
gaggagtagcatggt

SEQ ID NO: 670376 - DNA, 15 bp, Homo sapiens
aggagtagcatggtc

SEQ ID NO: 670377 - DNA, 15 bp, Homo sapiens
ggagtagcatggtca

SEQ ID NO: 670378 - DNA, 15 bp, Homo sapiens
gagtagcatggtcag

SEQ ID NO: 670379 - DNA, 15 bp, Homo sapiens
agtagcatggtcaga

SEQ ID NO: 670380 - DNA, 15 bp, Homo sapiens
gtagcatggtcagac

SEQ ID NO: 670381 - DNA, 15 bp, Homo sapiens
tagcatggtcagact

SEQ ID NO: 670382 - DNA, 15 bp, Homo sapiens
agcatggtcagactt

SEQ ID NO: 670383 - DNA, 15 bp, Homo sapiens
gcatggtcagacttg

SEQ ID NO: 670384 - DNA, 15 bp, Homo sapiens
catggtcagacttgc

SEQ ID NO: 670385 - DNA, 15 bp, Homo sapiens
atggtcagacttgca

SEQ ID NO: 670386 - DNA, 15 bp, Homo sapiens
tggtcagacttgcat

SEQ ID NO: 670387 - DNA, 15 bp, Homo sapiens
ggtcagacttgcatt

SEQ ID NO: 670388 - DNA, 15 bp, Homo sapiens
gtcagacttgcattt

SEQ ID NO: 670389 - DNA, 15 bp, Homo sapiens
tcagacttgcatttt

SEQ ID NO: 670390 - DNA, 15 bp, Homo sapiens
cagacttgcattttc

SEQ ID NO: 670391 - DNA, 15 bp, Homo sapiens
agacttgcattttca

SEQ ID NO: 670392 - DNA, 15 bp, Homo sapiens
gacttgcattttcaa

SEQ ID NO: 670393 - DNA, 15 bp, Homo sapiens
acttgcattttcaaa

SEQ ID NO: 670394 - DNA, 15 bp, Homo sapiens
cttgcattttcaaag

SEQ ID NO: 670395 - DNA, 15 bp, Homo sapiens
ttgcattttcaaagc

SEQ ID NO: 670396 - DNA, 15 bp, Homo sapiens
tgcattttcaaagca

SEQ ID NO: 670397 - DNA, 15 bp, Homo sapiens
gcattttcaaagcat

SEQ ID NO: 670398 - DNA, 15 bp, Homo sapiens
cattttcaaagcatc

SEQ ID NO: 670399 - DNA, 15 bp, Homo sapiens
attttcaaagcatcc

SEQ ID NO: 670400 - DNA, 15 bp, Homo sapiens
ttttcaaagcatccc

SEQ ID NO: 670401 - DNA, 15 bp, Homo sapiens
tttcaaagcatccca

SEQ ID NO: 670402 - DNA, 15 bp, Homo sapiens
ttcaaagcatcccac

SEQ ID NO: 670403 - DNA, 15 bp, Homo sapiens
tcaaagcatcccact

SEQ ID NO: 670404 - DNA, 15 bp, Homo sapiens
caaagcatcccactg

SEQ ID NO: 670405 - DNA, 15 bp, Homo sapiens
aaagcatcccactgg

SEQ ID NO: 670406 - DNA, 15 bp, Homo sapiens
aagcatcccactggc

SEQ ID NO: 670407 - DNA, 15 bp, Homo sapiens
agcatcccactggct

SEQ ID NO: 670408 - DNA, 15 bp, Homo sapiens
gcatcccactggctg

SEQ ID NO: 670409 - DNA, 15 bp, Homo sapiens
catcccactggctgc

SEQ ID NO: 670410 - DNA, 15 bp, Homo sapiens
atcccactggctgct

SEQ ID NO: 670411 - DNA, 15 bp, Homo sapiens
tcccactggctgctg

SEQ ID NO: 670412 - DNA, 15 bp, Homo sapiens
cccactggctgctgt

SEQ ID NO: 670413 - DNA, 15 bp, Homo sapiens
ccactggctgctgtg

SEQ ID NO: 670414 - DNA, 15 bp, Homo sapiens
cactggctgctgtgt

SEQ ID NO: 670415 - DNA, 15 bp, Homo sapiens
actggctgctgtgtt

SEQ ID NO: 670416 - DNA, 15 bp, Homo sapiens
ctggctgctgtgttg

SEQ ID NO: 670417 - DNA, 15 bp, Homo sapiens
tggctgctgtgttga

SEQ ID NO: 670418 - DNA, 15 bp, Homo sapiens
ggctgctgtgttgag

SEQ ID NO: 670419 - DNA, 15 bp, Homo sapiens
gctgctgtgttgaga

SEQ ID NO: 670420 - DNA, 15 bp, Homo sapiens
ctgctgtgttgagaa

SEQ ID NO: 670421 - DNA, 15 bp, Homo sapiens
tgctgtgttgagaat

SEQ ID NO: 670422 - DNA, 15 bp, Homo sapiens
gctgtgttgagaata

SEQ ID NO: 670423 - DNA, 15 bp, Homo sapiens
ctgtgttgagaatag

SEQ ID NO: 670424 - DNA, 15 bp, Homo sapiens
tgtgttgagaataga

SEQ ID NO: 670425 - DNA, 15 bp, Homo sapiens
gtgttgagaatagac

SEQ ID NO: 670426 - DNA, 15 bp, Homo sapiens
tgttgagaatagact

SEQ ID NO: 670427 - DNA, 15 bp, Homo sapiens
gttgagaatagactt

SEQ ID NO: 670428 - DNA, 15 bp, Homo sapiens
ttgagaatagacttg

SEQ ID NO: 670429 - DNA, 15 bp, Homo sapiens
tgagaatagacttgg

SEQ ID NO: 670430 - DNA, 15 bp, Homo sapiens
gagaatagacttggt

SEQ ID NO: 670431 - DNA, 15 bp, Homo sapiens
agaatagacttggtt

SEQ ID NO: 670432 - DNA, 15 bp, Homo sapiens
gaatagacttggttg

SEQ ID NO: 670433 - DNA, 15 bp, Homo sapiens
aatagacttggttgg

SEQ ID NO: 670434 - DNA, 15 bp, Homo sapiens
atagacttggttggg

SEQ ID NO: 670435 - DNA, 15 bp, Homo sapiens
tagacttggttggga

SEQ ID NO: 670436 - DNA, 15 bp, Homo sapiens
agacttggttgggaa

SEQ ID NO: 670437 - DNA, 15 bp, Homo sapiens
gacttggttgggaat

SEQ ID NO: 670438 - DNA, 15 bp, Homo sapiens
acttggttgggaata

SEQ ID NO: 670439 - DNA, 15 bp, Homo sapiens
cttggttgggaatag

SEQ ID NO: 670440 - DNA, 15 bp, Homo sapiens
ttggttgggaatagg

SEQ ID NO: 670441 - DNA, 15 bp, Homo sapiens
tggttgggaataggg

SEQ ID NO: 670442 - DNA, 15 bp, Homo sapiens
ggttgggaataggga

SEQ ID NO: 670443 - DNA, 15 bp, Homo sapiens
gttgggaatagggac

SEQ ID NO: 670444 - DNA, 15 bp, Homo sapiens
ttgggaatagggaca

SEQ ID NO: 670445 - DNA, 15 bp, Homo sapiens
tgggaatagggacaa

SEQ ID NO: 670446 - DNA, 15 bp, Homo sapiens
gggaatagggacaag

SEQ ID NO: 670447 - DNA, 15 bp, Homo sapiens
ggaatagggacaaga

SEQ ID NO: 670448 - DNA, 15 bp, Homo sapiens
gaatagggacaagag

SEQ ID NO: 670449 - DNA, 15 bp, Homo sapiens
aatagggacaagagt

SEQ ID NO: 670450 - DNA, 15 bp, Homo sapiens
atagggacaagagta

SEQ ID NO: 670451 - DNA, 15 bp, Homo sapiens
tagggacaagagtag

SEQ ID NO: 670452 - DNA, 15 bp, Homo sapiens
agggacaagagtaga

SEQ ID NO: 670453 - DNA, 15 bp, Homo sapiens
gggacaagagtagaa

SEQ ID NO: 670454 - DNA, 15 bp, Homo sapiens
ggacaagagtagaag

SEQ ID NO: 670455 - DNA, 15 bp, Homo sapiens
gacaagagtagaagc

SEQ ID NO: 670456 - DNA, 15 bp, Homo sapiens
acaagagtagaagca

SEQ ID NO: 670457 - DNA, 15 bp, Homo sapiens
caagagtagaagcaa

SEQ ID NO: 670458 - DNA, 15 bp, Homo sapiens
aagagtagaagcaaa

SEQ ID NO: 670459 - DNA, 15 bp, Homo sapiens
agagtagaagcaaag

SEQ ID NO: 670460 - DNA, 15 bp, Homo sapiens
gagtagaagcaaaga

SEQ ID NO: 670461 - DNA, 15 bp, Homo sapiens
agtagaagcaaagat

SEQ ID NO: 670462 - DNA, 15 bp, Homo sapiens
gtagaagcaaagatc

SEQ ID NO: 670463 - DNA, 15 bp, Homo sapiens
tagaagcaaagatct

SEQ ID NO: 670464 - DNA, 15 bp, Homo sapiens
agaagcaaagatctc

SEQ ID NO: 670465 - DNA, 15 bp, Homo sapiens
gaagcaaagatctct

SEQ ID NO: 670466 - DNA, 15 bp, Homo sapiens
aagcaaagatctctt

SEQ ID NO: 670467 - DNA, 15 bp, Homo sapiens
agcaaagatctcttc

SEQ ID NO: 670468 - DNA, 15 bp, Homo sapiens
gcaaagatctcttcc

SEQ ID NO: 670469 - DNA, 15 bp, Homo sapiens
caaagatctcttccc

SEQ ID NO: 670470 - DNA, 15 bp, Homo sapiens
aaagatctcttccct

SEQ ID NO: 670471 - DNA, 15 bp, Homo sapiens
aagatctcttcccta

SEQ ID NO: 670472 - DNA, 15 bp, Homo sapiens
agatctcttccctat

SEQ ID NO: 670473 - DNA, 15 bp, Homo sapiens
gatctcttccctatt

SEQ ID NO: 670474 - DNA, 15 bp, Homo sapiens
atctcttccctatta

SEQ ID NO: 670475 - DNA, 15 bp, Homo sapiens
tctcttccctattac

SEQ ID NO: 670476 - DNA, 15 bp, Homo sapiens
ctcttccctattact

SEQ ID NO: 670477 - DNA, 15 bp, Homo sapiens
tcttccctattactt

SEQ ID NO: 670478 - DNA, 15 bp, Homo sapiens
cttccctattacttc

SEQ ID NO: 670479 - DNA, 15 bp, Homo sapiens
ttccctattacttcc

SEQ ID NO: 670480 - DNA, 15 bp, Homo sapiens
tccctattacttccc

SEQ ID NO: 670481 - DNA, 15 bp, Homo sapiens
ccctattacttccct

SEQ ID NO: 670482 - DNA, 15 bp, Homo sapiens
cctattacttcccta

SEQ ID NO: 670483 - DNA, 15 bp, Homo sapiens
ctattacttccctat

SEQ ID NO: 670484 - DNA, 15 bp, Homo sapiens
tattacttccctata

SEQ ID NO: 670485 - DNA, 15 bp, Homo sapiens
attacttccctataa

SEQ ID NO: 670486 - DNA, 15 bp, Homo sapiens
ttacttccctataag

SEQ ID NO: 670487 - DNA, 15 bp, Homo sapiens
tacttccctataaga

SEQ ID NO: 670488 - DNA, 15 bp, Homo sapiens
acttccctataagaa

SEQ ID NO: 670489 - DNA, 15 bp, Homo sapiens
cttccctataagaag

SEQ ID NO: 670490 - DNA, 15 bp, Homo sapiens
ttccctataagaaga

SEQ ID NO: 670491 - DNA, 15 bp, Homo sapiens
tccctataagaagaa

SEQ ID NO: 670492 - DNA, 15 bp, Homo sapiens
ccctataagaagaaa

SEQ ID NO: 670493 - DNA, 15 bp, Homo sapiens
cctataagaagaaat

SEQ ID NO: 670494 - DNA, 15 bp, Homo sapiens
ctataagaagaaatg

SEQ ID NO: 670495 - DNA, 15 bp, Homo sapiens
tataagaagaaatgc

SEQ ID NO: 670496 - DNA, 15 bp, Homo sapiens
ataagaagaaatgca

SEQ ID NO: 670497 - DNA, 15 bp, Homo sapiens
taagaagaaatgcag

SEQ ID NO: 670498 - DNA, 15 bp, Homo sapiens
aagaagaaatgcagt

SEQ ID NO: 670499 - DNA, 15 bp, Homo sapiens
agaagaaatgcagta

SEQ ID NO: 670500 - DNA, 15 bp, Homo sapiens
gaagaaatgcagtaa

SEQ ID NO: 670501 - DNA, 15 bp, Homo sapiens
aagaaatgcagtaat

SEQ ID NO: 670502 - DNA, 15 bp, Homo sapiens
agaaatgcagtaata

SEQ ID NO: 670503 - DNA, 15 bp, Homo sapiens
gaaatgcagtaatac

SEQ ID NO: 670504 - DNA, 15 bp, Homo sapiens
aaatgcagtaatact

SEQ ID NO: 670505 - DNA, 15 bp, Homo sapiens
aatgcagtaatactt

SEQ ID NO: 670506 - DNA, 15 bp, Homo sapiens
atgcagtaatacttc

SEQ ID NO: 670507 - DNA, 15 bp, Homo sapiens
tgcagtaatacttcc

SEQ ID NO: 670508 - DNA, 15 bp, Homo sapiens
gcagtaatacttccc

SEQ ID NO: 670509 - DNA, 15 bp, Homo sapiens
cagtaatacttccct

SEQ ID NO: 670510 - DNA, 15 bp, Homo sapiens
agtaatacttcccta

SEQ ID NO: 670511 - DNA, 15 bp, Homo sapiens
gtaatacttccctac

SEQ ID NO: 670512 - DNA, 15 bp, Homo sapiens
taatacttccctact

SEQ ID NO: 670513 - DNA, 15 bp, Homo sapiens
aatacttccctacta

SEQ ID NO: 670514 - DNA, 15 bp, Homo sapiens
atacttccctactac

SEQ ID NO: 670515 - DNA, 15 bp, Homo sapiens
tacttccctactact

SEQ ID NO: 670516 - DNA, 15 bp, Homo sapiens
acttccctactactg

SEQ ID NO: 670517 - DNA, 15 bp, Homo sapiens
cttccctactactgt

SEQ ID NO: 670518 - DNA, 15 bp, Homo sapiens
ttccctactactgtt

SEQ ID NO: 670519 - DNA, 15 bp, Homo sapiens
tccctactactgttg

SEQ ID NO: 670520 - DNA, 15 bp, Homo sapiens
ccctactactgttgc

SEQ ID NO: 670521 - DNA, 15 bp, Homo sapiens
cctactactgttgct

SEQ ID NO: 670522 - DNA, 15 bp, Homo sapiens
ctactactgttgctt

SEQ ID NO: 670523 - DNA, 15 bp, Homo sapiens
tactactgttgctta

SEQ ID NO: 670524 - DNA, 15 bp, Homo sapiens
actactgttgcttat

SEQ ID NO: 670525 - DNA, 15 bp, Homo sapiens
ctactgttgcttatt

SEQ ID NO: 670526 - DNA, 15 bp, Homo sapiens
tactgttgcttatta

SEQ ID NO: 670527 - DNA, 15 bp, Homo sapiens
actgttgcttattat

SEQ ID NO: 670528 - DNA, 15 bp, Homo sapiens
ctgttgcttattatt

SEQ ID NO: 670529 - DNA, 15 bp, Homo sapiens
tgttgcttattattg

SEQ ID NO: 670530 - DNA, 15 bp, Homo sapiens
gttgcttattattgt

SEQ ID NO: 670531 - DNA, 15 bp, Homo sapiens
ttgcttattattgtt

SEQ ID NO: 670532 - DNA, 15 bp, Homo sapiens
tgcttattattgttg

SEQ ID NO: 670533 - DNA, 15 bp, Homo sapiens
gcttattattgttgc

SEQ ID NO: 670534 - DNA, 15 bp, Homo sapiens
cttattattgttgca

SEQ ID NO: 670535 - DNA, 15 bp, Homo sapiens
ttattattgttgcaa

SEQ ID NO: 670536 - DNA, 15 bp, Homo sapiens
tattattgttgcaat

SEQ ID NO: 670537 - DNA, 15 bp, Homo sapiens
attattgttgcaatg

SEQ ID NO: 670538 - DNA, 15 bp, Homo sapiens
ttattgttgcaatgt

SEQ ID NO: 670539 - DNA, 15 bp, Homo sapiens
tattgttgcaatgtt

SEQ ID NO: 670540 - DNA, 15 bp, Homo sapiens
attgttgcaatgttc

SEQ ID NO: 670541 - DNA, 15 bp, Homo sapiens
ttgttgcaatgttct

SEQ ID NO: 670542 - DNA, 15 bp, Homo sapiens
tgttgcaatgttctt

SEQ ID NO: 670543 - DNA, 15 bp, Homo sapiens
gttgcaatgttcttc

SEQ ID NO: 670544 - DNA, 15 bp, Homo sapiens
ttgcaatgttcttct

SEQ ID NO: 670545 - DNA, 15 bp, Homo sapiens
tgcaatgttcttctt

SEQ ID NO: 670546 - DNA, 15 bp, Homo sapiens
gcaatgttcttctta

SEQ ID NO: 670547 - DNA, 15 bp, Homo sapiens
caatgttcttcttaa

SEQ ID NO: 670548 - DNA, 15 bp, Homo sapiens
aatgttcttcttaat

SEQ ID NO: 670549 - DNA, 15 bp, Homo sapiens
atgttcttcttaatt

SEQ ID NO: 670550 - DNA, 15 bp, Homo sapiens
tgttcttcttaattc

SEQ ID NO: 670551 - DNA, 15 bp, Homo sapiens
gttcttcttaattct

SEQ ID NO: 670552 - DNA, 15 bp, Homo sapiens
ttcttcttaattctt

SEQ ID NO: 670553 - DNA, 15 bp, Homo sapiens
tcttcttaattcttg

SEQ ID NO: 670554 - DNA, 15 bp, Homo sapiens
cttcttaattcttgc

SEQ ID NO: 670555 - DNA, 15 bp, Homo sapiens
ttcttaattcttgct

SEQ ID NO: 670556 - DNA, 15 bp, Homo sapiens
tcttaattcttgctt

SEQ ID NO: 670557 - DNA, 15 bp, Homo sapiens
cttaattcttgcttt

SEQ ID NO: 670558 - DNA, 15 bp, Homo sapiens
ttaattcttgctttt

SEQ ID NO: 670559 - DNA, 15 bp, Homo sapiens
taattcttgctttta

SEQ ID NO: 670560 - DNA, 15 bp, Homo sapiens
aattcttgcttttaa

SEQ ID NO: 670561 - DNA, 15 bp, Homo sapiens
attcttgcttttaaa

SEQ ID NO: 670562 - DNA, 15 bp, Homo sapiens
ttcttgcttttaaac

SEQ ID NO: 670563 - DNA, 15 bp, Homo sapiens
tcttgcttttaaaca

SEQ ID NO: 670564 - DNA, 15 bp, Homo sapiens
cttgcttttaaacag

SEQ ID NO: 670565 - DNA, 15 bp, Homo sapiens
ttgcttttaaacaga

SEQ ID NO: 670566 - DNA, 15 bp, Homo sapiens
tgcttttaaacagat

SEQ ID NO: 670567 - DNA, 15 bp, Homo sapiens
gcttttaaacagata

SEQ ID NO: 670568 - DNA, 15 bp, Homo sapiens
cttttaaacagatac

SEQ ID NO: 670569 - DNA, 15 bp, Homo sapiens
ttttaaacagataca

SEQ ID NO: 670570 - DNA, 15 bp, Homo sapiens
tttaaacagatacat

SEQ ID NO: 670571 - DNA, 15 bp, Homo sapiens
ttaaacagatacatt

SEQ ID NO: 670572 - DNA, 15 bp, Homo sapiens
taaacagatacattt

SEQ ID NO: 670573 - DNA, 15 bp, Homo sapiens
aaacagatacatttt

SEQ ID NO: 670574 - DNA, 15 bp, Homo sapiens
aacagatacattttt

SEQ ID NO: 670575 - DNA, 15 bp, Homo sapiens
acagatacattttta

SEQ ID NO: 670576 - DNA, 15 bp, Homo sapiens
cagatacatttttat

SEQ ID NO: 670577 - DNA, 15 bp, Homo sapiens
agatacatttttatg

SEQ ID NO: 670578 - DNA, 15 bp, Homo sapiens
gatacatttttatgc

SEQ ID NO: 670579 - DNA, 15 bp, Homo sapiens
atacatttttatgct

SEQ ID NO: 670580 - DNA, 15 bp, Homo sapiens
tacatttttatgctc

SEQ ID NO: 670581 - DNA, 15 bp, Homo sapiens
acatttttatgctca

SEQ ID NO: 670582 - DNA, 15 bp, Homo sapiens
catttttatgctcaa

SEQ ID NO: 670583 - DNA, 15 bp, Homo sapiens
atttttatgctcaaa

SEQ ID NO: 670584 - DNA, 15 bp, Homo sapiens
tttttatgctcaaaa

SEQ ID NO: 670585 - DNA, 15 bp, Homo sapiens
ttttatgctcaaaat

SEQ ID NO: 670586 - DNA, 15 bp, Homo sapiens
tttatgctcaaaatg

SEQ ID NO: 670587 - DNA, 15 bp, Homo sapiens
ttatgctcaaaatgt

SEQ ID NO: 670588 - DNA, 15 bp, Homo sapiens
tatgctcaaaatgtt

SEQ ID NO: 670589 - DNA, 15 bp, Homo sapiens
atgctcaaaatgtta

SEQ ID NO: 670590 - DNA, 15 bp, Homo sapiens
tgctcaaaatgttaa

SEQ ID NO: 670591 - DNA, 15 bp, Homo sapiens
gctcaaaatgttaat

SEQ ID NO: 670592 - DNA, 15 bp, Homo sapiens
ctcaaaatgttaatg

SEQ ID NO: 670593 - DNA, 15 bp, Homo sapiens
tcaaaatgttaatgc

SEQ ID NO: 670594 - DNA, 15 bp, Homo sapiens
caaaatgttaatgct

SEQ ID NO: 670595 - DNA, 15 bp, Homo sapiens
aaaatgttaatgctt

SEQ ID NO: 670596 - DNA, 15 bp, Homo sapiens
aaatgttaatgcttc

SEQ ID NO: 670597 - DNA, 15 bp, Homo sapiens
aatgttaatgcttct

SEQ ID NO: 670598 - DNA, 15 bp, Homo sapiens
atgttaatgcttctc

SEQ ID NO: 670599 - DNA, 15 bp, Homo sapiens
tgttaatgcttctct

SEQ ID NO: 670600 - DNA, 15 bp, Homo sapiens
gttaatgcttctctc

SEQ ID NO: 670601 - DNA, 15 bp, Homo sapiens
ttaatgcttctctca

SEQ ID NO: 670602 - DNA, 15 bp, Homo sapiens
taatgcttctctcat

SEQ ID NO: 670603 - DNA, 15 bp, Homo sapiens
aatgcttctctcata

SEQ ID NO: 670604 - DNA, 15 bp, Homo sapiens
atgcttctctcatag

SEQ ID NO: 670605 - DNA, 15 bp, Homo sapiens
tgcttctctcatagg

SEQ ID NO: 670606 - DNA, 15 bp, Homo sapiens
gcttctctcatagga

SEQ ID NO: 670607 - DNA, 15 bp, Homo sapiens
cttctctcataggat

SEQ ID NO: 670608 - DNA, 15 bp, Homo sapiens
ttctctcataggatt

SEQ ID NO: 670609 - DNA, 15 bp, Homo sapiens
tctctcataggattg

SEQ ID NO: 670610 - DNA, 15 bp, Homo sapiens
ctctcataggattga

SEQ ID NO: 670611 - DNA, 15 bp, Homo sapiens
tctcataggattgac

SEQ ID NO: 670612 - DNA, 15 bp, Homo sapiens
ctcataggattgact

SEQ ID NO: 670613 - DNA, 15 bp, Homo sapiens
tcataggattgactc

SEQ ID NO: 670614 - DNA, 15 bp, Homo sapiens
cataggattgactca

SEQ ID NO: 670615 - DNA, 15 bp, Homo sapiens
ataggattgactcat

SEQ ID NO: 670616 - DNA, 15 bp, Homo sapiens
taggattgactcatt

SEQ ID NO: 670617 - DNA, 15 bp, Homo sapiens
aggattgactcattt

SEQ ID NO: 670618 - DNA, 15 bp, Homo sapiens
ggattgactcattta

SEQ ID NO: 670619 - DNA, 15 bp, Homo sapiens
gattgactcatttaa

SEQ ID NO: 670620 - DNA, 15 bp, Homo sapiens
attgactcatttaat

SEQ ID NO: 670621 - DNA, 15 bp, Homo sapiens
ttgactcatttaata

SEQ ID NO: 670622 - DNA, 15 bp, Homo sapiens
tgactcatttaatag

SEQ ID NO: 670623 - DNA, 15 bp, Homo sapiens
gactcatttaatagt

SEQ ID NO: 670624 - DNA, 15 bp, Homo sapiens
actcatttaatagta

SEQ ID NO: 670625 - DNA, 15 bp, Homo sapiens
ctcatttaatagtat

SEQ ID NO: 670626 - DNA, 15 bp, Homo sapiens
tcatttaatagtatc

SEQ ID NO: 670627 - DNA, 15 bp, Homo sapiens
catttaatagtatca

SEQ ID NO: 670628 - DNA, 15 bp, Homo sapiens
atttaatagtatcaa

SEQ ID NO: 670629 - DNA, 15 bp, Homo sapiens
tttaatagtatcaac

SEQ ID NO: 670630 - DNA, 15 bp, Homo sapiens
ttaatagtatcaact

SEQ ID NO: 670631 - DNA, 15 bp, Homo sapiens
taatagtatcaactt

SEQ ID NO: 670632 - DNA, 15 bp, Homo sapiens
aatagtatcaactta

SEQ ID NO: 670633 - DNA, 15 bp, Homo sapiens
atagtatcaacttaa

SEQ ID NO: 670634 - DNA, 15 bp, Homo sapiens
tagtatcaacttaat

SEQ ID NO: 670635 - DNA, 15 bp, Homo sapiens
agtatcaacttaatg

SEQ ID NO: 670636 - DNA, 15 bp, Homo sapiens
gtatcaacttaatga

SEQ ID NO: 670637 - DNA, 15 bp, Homo sapiens
tatcaacttaatgat

SEQ ID NO: 670638 - DNA, 15 bp, Homo sapiens
atcaacttaatgata

SEQ ID NO: 670639 - DNA, 15 bp, Homo sapiens
tcaacttaatgatac

SEQ ID NO: 670640 - DNA, 15 bp, Homo sapiens
caacttaatgatact

SEQ ID NO: 670641 - DNA, 15 bp, Homo sapiens
aacttaatgatacta

SEQ ID NO: 670642 - DNA, 15 bp, Homo sapiens
acttaatgatactaa

SEQ ID NO: 670643 - DNA, 15 bp, Homo sapiens
cttaatgatactaac

SEQ ID NO: 670644 - DNA, 15 bp, Homo sapiens
ttaatgatactaact

SEQ ID NO: 670645 - DNA, 15 bp, Homo sapiens
taatgatactaactt

SEQ ID NO: 670646 - DNA, 15 bp, Homo sapiens
aatgatactaactta

SEQ ID NO: 670647 - DNA, 15 bp, Homo sapiens
atgatactaacttat

SEQ ID NO: 670648 - DNA, 15 bp, Homo sapiens
tgatactaacttatt

SEQ ID NO: 670649 - DNA, 15 bp, Homo sapiens
gatactaacttatta

SEQ ID NO: 670650 - DNA, 15 bp, Homo sapiens
atactaacttattag

SEQ ID NO: 670651 - DNA, 15 bp, Homo sapiens
tactaacttattaga

SEQ ID NO: 670652 - DNA, 15 bp, Homo sapiens
actaacttattagaa

SEQ ID NO: 670653 - DNA, 15 bp, Homo sapiens
ctaacttattagaag

SEQ ID NO: 670654 - DNA, 15 bp, Homo sapiens
taacttattagaagc

SEQ ID NO: 670655 - DNA, 15 bp, Homo sapiens
aacttattagaagca

SEQ ID NO: 670656 - DNA, 15 bp, Homo sapiens
acttattagaagcat

SEQ ID NO: 670657 - DNA, 15 bp, Homo sapiens
cttattagaagcatt

SEQ ID NO: 670658 - DNA, 15 bp, Homo sapiens
ttattagaagcattg

SEQ ID NO: 670659 - DNA, 15 bp, Homo sapiens
tattagaagcattga

SEQ ID NO: 670660 - DNA, 15 bp, Homo sapiens
attagaagcattgat

SEQ ID NO: 670661 - DNA, 15 bp, Homo sapiens
ttagaagcattgatc

SEQ ID NO: 670662 - DNA, 15 bp, Homo sapiens
tagaagcattgatca

SEQ ID NO: 670663 - DNA, 15 bp, Homo sapiens
agaagcattgatcaa

SEQ ID NO: 670664 - DNA, 15 bp, Homo sapiens
gaagcattgatcaat

SEQ ID NO: 670665 - DNA, 15 bp, Homo sapiens
aagcattgatcaatc

SEQ ID NO: 670666 - DNA, 15 bp, Homo sapiens
agcattgatcaatcc

SEQ ID NO: 670667 - DNA, 15 bp, Homo sapiens
gcattgatcaatcct

SEQ ID NO: 670668 - DNA, 15 bp, Homo sapiens
cattgatcaatcctg

SEQ ID NO: 670669 - DNA, 15 bp, Homo sapiens
attgatcaatcctga

SEQ ID NO: 670670 - DNA, 15 bp, Homo sapiens
ttgatcaatcctgaa

SEQ ID NO: 670671 - DNA, 15 bp, Homo sapiens
tgatcaatcctgaat

SEQ ID NO: 670672 - DNA, 15 bp, Homo sapiens
gatcaatcctgaatt

SEQ ID NO: 670673 - DNA, 15 bp, Homo sapiens
atcaatcctgaattt

SEQ ID NO: 670674 - DNA, 15 bp, Homo sapiens
tcaatcctgaatttc

SEQ ID NO: 670675 - DNA, 15 bp, Homo sapiens
caatcctgaatttct

SEQ ID NO: 670676 - DNA, 15 bp, Homo sapiens
aatcctgaatttctt

SEQ ID NO: 670677 - DNA, 15 bp, Homo sapiens
atcctgaatttcttc

SEQ ID NO: 670678 - DNA, 15 bp, Homo sapiens
tcctgaatttcttcc

SEQ ID NO: 670679 - DNA, 15 bp, Homo sapiens
cctgaatttcttcct

SEQ ID NO: 670680 - DNA, 15 bp, Homo sapiens
ctgaatttcttcctt

SEQ ID NO: 670681 - DNA, 15 bp, Homo sapiens
tgaatttcttccttt

SEQ ID NO: 670682 - DNA, 15 bp, Homo sapiens
gaatttcttcctttg

SEQ ID NO: 670683 - DNA, 15 bp, Homo sapiens
aatttcttcctttgt

SEQ ID NO: 670684 - DNA, 15 bp, Homo sapiens
atttcttcctttgtg

SEQ ID NO: 670685 - DNA, 15 bp, Homo sapiens
tttcttcctttgtgc

SEQ ID NO: 670686 - DNA, 15 bp, Homo sapiens
ttcttcctttgtgcg

SEQ ID NO: 670687 - DNA, 15 bp, Homo sapiens
tcttcctttgtgcgg

SEQ ID NO: 670688 - DNA, 15 bp, Homo sapiens
cttcctttgtgcggt

SEQ ID NO: 670689 - DNA, 15 bp, Homo sapiens
ttcctttgtgcggtg

SEQ ID NO: 670690 - DNA, 15 bp, Homo sapiens
tcctttgtgcggtgt

SEQ ID NO: 670691 - DNA, 15 bp, Homo sapiens
cctttgtgcggtgtt

SEQ ID NO: 670692 - DNA, 15 bp, Homo sapiens
ctttgtgcggtgttt

SEQ ID NO: 670693 - DNA, 15 bp, Homo sapiens
tttgtgcggtgttta

SEQ ID NO: 670694 - DNA, 15 bp, Homo sapiens
ttgtgcggtgtttag

SEQ ID NO: 670695 - DNA, 15 bp, Homo sapiens
tgtgcggtgtttagg

SEQ ID NO: 670696 - DNA, 15 bp, Homo sapiens
gtgcggtgtttaggt

SEQ ID NO: 670697 - DNA, 15 bp, Homo sapiens
tgcggtgtttaggtg

SEQ ID NO: 670698 - DNA, 15 bp, Homo sapiens
gcggtgtttaggtgg

SEQ ID NO: 670699 - DNA, 15 bp, Homo sapiens
cggtgtttaggtggg

SEQ ID NO: 670700 - DNA, 15 bp, Homo sapiens
ggtgtttaggtgggg

SEQ ID NO: 670701 - DNA, 15 bp, Homo sapiens
gtgtttaggtgggga

SEQ ID NO: 670702 - DNA, 15 bp, Homo sapiens
tgtttaggtggggaa

SEQ ID NO: 670703 - DNA, 15 bp, Homo sapiens
gtttaggtggggaag

SEQ ID NO: 670704 - DNA, 15 bp, Homo sapiens
tttaggtggggaaga

SEQ ID NO: 670705 - DNA, 15 bp, Homo sapiens
ttaggtggggaagat

SEQ ID NO: 670706 - DNA, 15 bp, Homo sapiens
taggtggggaagatg

SEQ ID NO: 670707 - DNA, 15 bp, Homo sapiens
aggtggggaagatgt

SEQ ID NO: 670708 - DNA, 15 bp, Homo sapiens
ggtggggaagatgtt

SEQ ID NO: 670709 - DNA, 15 bp, Homo sapiens
gtggggaagatgtta

SEQ ID NO: 670710 - DNA, 15 bp, Homo sapiens
tggggaagatgttat

SEQ ID NO: 670711 - DNA, 15 bp, Homo sapiens
ggggaagatgttatt

SEQ ID NO: 670712 - DNA, 15 bp, Homo sapiens
gggaagatgttattc

SEQ ID NO: 670713 - DNA, 15 bp, Homo sapiens
ggaagatgttattca

SEQ ID NO: 670714 - DNA, 15 bp, Homo sapiens
gaagatgttattcaa

SEQ ID NO: 670715 - DNA, 15 bp, Homo sapiens
aagatgttattcaag

SEQ ID NO: 670716 - DNA, 15 bp, Homo sapiens
agatgttattcaaga

SEQ ID NO: 670717 - DNA, 15 bp, Homo sapiens
gatgttattcaagag

SEQ ID NO: 670718 - DNA, 15 bp, Homo sapiens
atgttattcaagagg

SEQ ID NO: 670719 - DNA, 15 bp, Homo sapiens
tgttattcaagaggc

SEQ ID NO: 670720 - DNA, 15 bp, Homo sapiens
gttattcaagaggct

SEQ ID NO: 670721 - DNA, 15 bp, Homo sapiens
ttattcaagaggcta

SEQ ID NO: 670722 - DNA, 15 bp, Homo sapiens
tattcaagaggctaa

SEQ ID NO: 670723 - DNA, 15 bp, Homo sapiens
attcaagaggctaag

SEQ ID NO: 670724 - DNA, 15 bp, Homo sapiens
ttcaagaggctaaga

SEQ ID NO: 670725 - DNA, 15 bp, Homo sapiens
tcaagaggctaagac

SEQ ID NO: 670726 - DNA, 15 bp, Homo sapiens
caagaggctaagact

SEQ ID NO: 670727 - DNA, 15 bp, Homo sapiens
aagaggctaagactc

SEQ ID NO: 670728 - DNA, 15 bp, Homo sapiens
agaggctaagactct

SEQ ID NO: 670729 - DNA, 15 bp, Homo sapiens
gaggctaagactctg

SEQ ID NO: 670730 - DNA, 15 bp, Homo sapiens
aggctaagactctga

SEQ ID NO: 670731 - DNA, 15 bp, Homo sapiens
ggctaagactctgaa

SEQ ID NO: 670732 - DNA, 15 bp, Homo sapiens
gctaagactctgaaa

SEQ ID NO: 670733 - DNA, 15 bp, Homo sapiens
ctaagactctgaaag

SEQ ID NO: 670734 - DNA, 15 bp, Homo sapiens
taagactctgaaaga

SEQ ID NO: 670735 - DNA, 15 bp, Homo sapiens
aagactctgaaagag

SEQ ID NO: 670736 - DNA, 15 bp, Homo sapiens
agactctgaaagagg

SEQ ID NO: 670737 - DNA, 15 bp, Homo sapiens
gactctgaaagaggc

SEQ ID NO: 670738 - DNA, 15 bp, Homo sapiens
actctgaaagaggct

SEQ ID NO: 670739 - DNA, 15 bp, Homo sapiens
ctctgaaagaggctt

SEQ ID NO: 670740 - DNA, 15 bp, Homo sapiens
tctgaaagaggcttg

SEQ ID NO: 670741 - DNA, 15 bp, Homo sapiens
ctgaaagaggcttgc

SEQ ID NO: 670742 - DNA, 15 bp, Homo sapiens
tgaaagaggcttgca

SEQ ID NO: 670743 - DNA, 15 bp, Homo sapiens
gaaagaggcttgcag

SEQ ID NO: 670744 - DNA, 15 bp, Homo sapiens
aaagaggcttgcagt

SEQ ID NO: 670745 - DNA, 15 bp, Homo sapiens
aagaggcttgcagtc

SEQ ID NO: 670746 - DNA, 15 bp, Homo sapiens
agaggcttgcagtca

SEQ ID NO: 670747 - DNA, 15 bp, Homo sapiens
gaggcttgcagtcag

SEQ ID NO: 670748 - DNA, 15 bp, Homo sapiens
aggcttgcagtcagt

SEQ ID NO: 670749 - DNA, 15 bp, Homo sapiens
ggcttgcagtcagtg

SEQ ID NO: 670750 - DNA, 15 bp, Homo sapiens
gcttgcagtcagtga

SEQ ID NO: 670751 - DNA, 15 bp, Homo sapiens
cttgcagtcagtgaa

SEQ ID NO: 670752 - DNA, 15 bp, Homo sapiens
ttgcagtcagtgaac

SEQ ID NO: 670753 - DNA, 15 bp, Homo sapiens
tgcagtcagtgaaca

SEQ ID NO: 670754 - DNA, 15 bp, Homo sapiens
gcagtcagtgaacaa

SEQ ID NO: 670755 - DNA, 15 bp, Homo sapiens
cagtcagtgaacaaa

SEQ ID NO: 670756 - DNA, 15 bp, Homo sapiens
agtcagtgaacaaat

SEQ ID NO: 670757 - DNA, 15 bp, Homo sapiens
gtcagtgaacaaatt

SEQ ID NO: 670758 - DNA, 15 bp, Homo sapiens
tcagtgaacaaattt

SEQ ID NO: 670759 - DNA, 15 bp, Homo sapiens
cagtgaacaaatttt

SEQ ID NO: 670760 - DNA, 15 bp, Homo sapiens
agtgaacaaatttta

SEQ ID NO: 670761 - DNA, 15 bp, Homo sapiens
gtgaacaaattttac

SEQ ID NO: 670762 - DNA, 15 bp, Homo sapiens
tgaacaaattttact

SEQ ID NO: 670763 - DNA, 15 bp, Homo sapiens
gaacaaattttactt

SEQ ID NO: 670764 - DNA, 15 bp, Homo sapiens
aacaaattttacttg

SEQ ID NO: 670765 - DNA, 15 bp, Homo sapiens
acaaattttacttgt

SEQ ID NO: 670766 - DNA, 15 bp, Homo sapiens
caaattttacttgtc

SEQ ID NO: 670767 - DNA, 15 bp, Homo sapiens
aaattttacttgtct

SEQ ID NO: 670768 - DNA, 15 bp, Homo sapiens
aattttacttgtcta

SEQ ID NO: 670769 - DNA, 15 bp, Homo sapiens
attttacttgtctat

SEQ ID NO: 670770 - DNA, 15 bp, Homo sapiens
ttttacttgtctatg

SEQ ID NO: 670771 - DNA, 15 bp, Homo sapiens
tttacttgtctatgt

SEQ ID NO: 670772 - DNA, 15 bp, Homo sapiens
ttacttgtctatgtg

SEQ ID NO: 670773 - DNA, 15 bp, Homo sapiens
tacttgtctatgtgt

SEQ ID NO: 670774 - DNA, 15 bp, Homo sapiens
acttgtctatgtgtt

SEQ ID NO: 670775 - DNA, 15 bp, Homo sapiens
cttgtctatgtgttt

SEQ ID NO: 670776 - DNA, 15 bp, Homo sapiens
ttgtctatgtgtttg

SEQ ID NO: 670777 - DNA, 15 bp, Homo sapiens
tgtctatgtgtttgt

SEQ ID NO: 670778 - DNA, 15 bp, Homo sapiens
gtctatgtgtttgtt

SEQ ID NO: 670779 - DNA, 15 bp, Homo sapiens
tctatgtgtttgttg

SEQ ID NO: 670780 - DNA, 15 bp, Homo sapiens
ctatgtgtttgttgg

SEQ ID NO: 670781 - DNA, 15 bp, Homo sapiens
tatgtgtttgttgga

SEQ ID NO: 670782 - DNA, 15 bp, Homo sapiens
atgtgtttgttggat

SEQ ID NO: 670783 - DNA, 15 bp, Homo sapiens
tgtgtttgttggatg

SEQ ID NO: 670784 - DNA, 15 bp, Homo sapiens
gtgtttgttggatgt

SEQ ID NO: 670785 - DNA, 15 bp, Homo sapiens
tgtttgttggatgtc

SEQ ID NO: 670786 - DNA, 15 bp, Homo sapiens
gtttgttggatgtct

SEQ ID NO: 670787 - DNA, 15 bp, Homo sapiens
tttgttggatgtcta

SEQ ID NO: 670788 - DNA, 15 bp, Homo sapiens
ttgttggatgtctac

SEQ ID NO: 670789 - DNA, 15 bp, Homo sapiens
tgttggatgtctact

SEQ ID NO: 670790 - DNA, 15 bp, Homo sapiens
gttggatgtctactt

SEQ ID NO: 670791 - DNA, 15 bp, Homo sapiens
ttggatgtctacttc

SEQ ID NO: 670792 - DNA, 15 bp, Homo sapiens
tggatgtctacttca

SEQ ID NO: 670793 - DNA, 15 bp, Homo sapiens
ggatgtctacttcat

SEQ ID NO: 670794 - DNA, 15 bp, Homo sapiens
gatgtctacttcatc

SEQ ID NO: 670795 - DNA, 15 bp, Homo sapiens
atgtctacttcatct

SEQ ID NO: 670796 - DNA, 15 bp, Homo sapiens
tgtctacttcatctt

SEQ ID NO: 670797 - DNA, 15 bp, Homo sapiens
gtctacttcatcttt

SEQ ID NO: 670798 - DNA, 15 bp, Homo sapiens
tctacttcatctttc

SEQ ID NO: 670799 - DNA, 15 bp, Homo sapiens
ctacttcatctttct

SEQ ID NO: 670800 - DNA, 15 bp, Homo sapiens
tacttcatctttcta

SEQ ID NO: 670801 - DNA, 15 bp, Homo sapiens
acttcatctttctaa

SEQ ID NO: 670802 - DNA, 15 bp, Homo sapiens
cttcatctttctaac

SEQ ID NO: 670803 - DNA, 15 bp, Homo sapiens
ttcatctttctaact

SEQ ID NO: 670804 - DNA, 15 bp, Homo sapiens
tcatctttctaactg

SEQ ID NO: 670805 - DNA, 15 bp, Homo sapiens
catctttctaactga

SEQ ID NO: 670806 - DNA, 15 bp, Homo sapiens
atctttctaactgaa

SEQ ID NO: 670807 - DNA, 15 bp, Homo sapiens
tctttctaactgaaa

SEQ ID NO: 670808 - DNA, 15 bp, Homo sapiens
ctttctaactgaaac

SEQ ID NO: 670809 - DNA, 15 bp, Homo sapiens
tttctaactgaaacc

SEQ ID NO: 670810 - DNA, 15 bp, Homo sapiens
ttctaactgaaacct

SEQ ID NO: 670811 - DNA, 15 bp, Homo sapiens
tctaactgaaacctc

SEQ ID NO: 670812 - DNA, 15 bp, Homo sapiens
ctaactgaaacctcc

SEQ ID NO: 670813 - DNA, 15 bp, Homo sapiens
taactgaaacctcct

SEQ ID NO: 670814 - DNA, 15 bp, Homo sapiens
aactgaaacctcctg

SEQ ID NO: 670815 - DNA, 15 bp, Homo sapiens
actgaaacctcctgc

SEQ ID NO: 670816 - DNA, 15 bp, Homo sapiens
ctgaaacctcctgcc

SEQ ID NO: 670817 - DNA, 15 bp, Homo sapiens
tgaaacctcctgcct

SEQ ID NO: 670818 - DNA, 15 bp, Homo sapiens
gaaacctcctgcctg

SEQ ID NO: 670819 - DNA, 15 bp, Homo sapiens
aaacctcctgcctgt

SEQ ID NO: 670820 - DNA, 15 bp, Homo sapiens
aacctcctgcctgta

SEQ ID NO: 670821 - DNA, 15 bp, Homo sapiens
acctcctgcctgtaa

SEQ ID NO: 670822 - DNA, 15 bp, Homo sapiens
cctcctgcctgtaac

SEQ ID NO: 670823 - DNA, 15 bp, Homo sapiens
ctcctgcctgtaacc

SEQ ID NO: 670824 - DNA, 15 bp, Homo sapiens
tcctgcctgtaacca

SEQ ID NO: 670825 - DNA, 15 bp, Homo sapiens
cctgcctgtaaccac

SEQ ID NO: 670826 - DNA, 15 bp, Homo sapiens
ctgcctgtaaccact

SEQ ID NO: 670827 - DNA, 15 bp, Homo sapiens
tgcctgtaaccactt

SEQ ID NO: 670828 - DNA, 15 bp, Homo sapiens
gcctgtaaccactta

SEQ ID NO: 670829 - DNA, 15 bp, Homo sapiens
cctgtaaccacttag

SEQ ID NO: 670830 - DNA, 15 bp, Homo sapiens
ctgtaaccacttagg

SEQ ID NO: 670831 - DNA, 15 bp, Homo sapiens
tgtaaccacttaggt

SEQ ID NO: 670832 - DNA, 15 bp, Homo sapiens
gtaaccacttaggtg

SEQ ID NO: 670833 - DNA, 15 bp, Homo sapiens
taaccacttaggtgt

SEQ ID NO: 670834 - DNA, 15 bp, Homo sapiens
aaccacttaggtgtg

SEQ ID NO: 670835 - DNA, 15 bp, Homo sapiens
accacttaggtgtga

SEQ ID NO: 670836 - DNA, 15 bp, Homo sapiens
ccacttaggtgtgat

SEQ ID NO: 670837 - DNA, 15 bp, Homo sapiens
cacttaggtgtgatc

SEQ ID NO: 670838 - DNA, 15 bp, Homo sapiens
acttaggtgtgatct

SEQ ID NO: 670839 - DNA, 15 bp, Homo sapiens
cttaggtgtgatctt

SEQ ID NO: 670840 - DNA, 15 bp, Homo sapiens
ttaggtgtgatcttt

SEQ ID NO: 670841 - DNA, 15 bp, Homo sapiens
taggtgtgatctttt

SEQ ID NO: 670842 - DNA, 15 bp, Homo sapiens
aggtgtgatcttttt

SEQ ID NO: 670843 - DNA, 15 bp, Homo sapiens
ggtgtgatctttttt

SEQ ID NO: 670844 - DNA, 15 bp, Homo sapiens
gtgtgatctttttta

SEQ ID NO: 670845 - DNA, 15 bp, Homo sapiens
tgtgatcttttttag

SEQ ID NO: 670846 - DNA, 15 bp, Homo sapiens
gtgatcttttttagt

SEQ ID NO: 670847 - DNA, 15 bp, Homo sapiens
tgatcttttttagtg

SEQ ID NO: 670848 - DNA, 15 bp, Homo sapiens
gatcttttttagtga

SEQ ID NO: 670849 - DNA, 15 bp, Homo sapiens
atcttttttagtgac

SEQ ID NO: 670850 - DNA, 15 bp, Homo sapiens
tcttttttagtgaca

SEQ ID NO: 670851 - DNA, 15 bp, Homo sapiens
cttttttagtgacat

SEQ ID NO: 670852 - DNA, 15 bp, Homo sapiens
ttttttagtgacatc

SEQ ID NO: 670853 - DNA, 15 bp, Homo sapiens
tttttagtgacatct

SEQ ID NO: 670854 - DNA, 15 bp, Homo sapiens
ttttagtgacatctc

SEQ ID NO: 670855 - DNA, 15 bp, Homo sapiens
tttagtgacatctcc

SEQ ID NO: 670856 - DNA, 15 bp, Homo sapiens
ttagtgacatctcca

SEQ ID NO: 670857 - DNA, 15 bp, Homo sapiens
tagtgacatctccaa

SEQ ID NO: 670858 - DNA, 15 bp, Homo sapiens
agtgacatctccaaa

SEQ ID NO: 670859 - DNA, 15 bp, Homo sapiens
gtgacatctccaaaa

SEQ ID NO: 670860 - DNA, 15 bp, Homo sapiens
tgacatctccaaaat

SEQ ID NO: 670861 - DNA, 15 bp, Homo sapiens
gacatctccaaaatc

SEQ ID NO: 670862 - DNA, 15 bp, Homo sapiens
acatctccaaaatca

SEQ ID NO: 670863 - DNA, 15 bp, Homo sapiens
catctccaaaatcag

SEQ ID NO: 670864 - DNA, 15 bp, Homo sapiens
atctccaaaatcagt

SEQ ID NO: 670865 - DNA, 15 bp, Homo sapiens
tctccaaaatcagtg

SEQ ID NO: 670866 - DNA, 15 bp, Homo sapiens
ctccaaaatcagtga

SEQ ID NO: 670867 - DNA, 15 bp, Homo sapiens
tccaaaatcagtgaa

SEQ ID NO: 670868 - DNA, 15 bp, Homo sapiens
ccaaaatcagtgaag

SEQ ID NO: 670869 - DNA, 15 bp, Homo sapiens
caaaatcagtgaagg

SEQ ID NO: 670870 - DNA, 15 bp, Homo sapiens
aaaatcagtgaagga

SEQ ID NO: 670871 - DNA, 15 bp, Homo sapiens
aaatcagtgaaggaa

SEQ ID NO: 670872 - DNA, 15 bp, Homo sapiens
aatcagtgaaggaat

SEQ ID NO: 670873 - DNA, 15 bp, Homo sapiens
atcagtgaaggaatt

SEQ ID NO: 670874 - DNA, 15 bp, Homo sapiens
tcagtgaaggaattg

SEQ ID NO: 670875 - DNA, 15 bp, Homo sapiens
cagtgaaggaattgg

SEQ ID NO: 670876 - DNA, 15 bp, Homo sapiens
agtgaaggaattggt

SEQ ID NO: 670877 - DNA, 15 bp, Homo sapiens
gtgaaggaattggtg

SEQ ID NO: 670878 - DNA, 15 bp, Homo sapiens
tgaaggaattggtga

SEQ ID NO: 670879 - DNA, 15 bp, Homo sapiens
gaaggaattggtgac

SEQ ID NO: 670880 - DNA, 15 bp, Homo sapiens
aaggaattggtgaca

SEQ ID NO: 670881 - DNA, 15 bp, Homo sapiens
aggaattggtgacaa

SEQ ID NO: 670882 - DNA, 15 bp, Homo sapiens
ggaattggtgacaag

SEQ ID NO: 670883 - DNA, 15 bp, Homo sapiens
gaattggtgacaagg

SEQ ID NO: 670884 - DNA, 15 bp, Homo sapiens
aattggtgacaaggt

SEQ ID NO: 670885 - DNA, 15 bp, Homo sapiens
attggtgacaaggtt

SEQ ID NO: 670886 - DNA, 15 bp, Homo sapiens
ttggtgacaaggttg

SEQ ID NO: 670887 - DNA, 15 bp, Homo sapiens
tggtgacaaggttgg

SEQ ID NO: 670888 - DNA, 15 bp, Homo sapiens
ggtgacaaggttgga

SEQ ID NO: 670889 - DNA, 15 bp, Homo sapiens
gtgacaaggttggaa

SEQ ID NO: 670890 - DNA, 15 bp, Homo sapiens
tgacaaggttggaat

SEQ ID NO: 670891 - DNA, 15 bp, Homo sapiens
gacaaggttggaatg

SEQ ID NO: 670892 - DNA, 15 bp, Homo sapiens
acaaggttggaatgt

SEQ ID NO: 670893 - DNA, 15 bp, Homo sapiens
caaggttggaatgtt

SEQ ID NO: 670894 - DNA, 15 bp, Homo sapiens
aaggttggaatgttc

SEQ ID NO: 670895 - DNA, 15 bp, Homo sapiens
aggttggaatgttct

SEQ ID NO: 670896 - DNA, 15 bp, Homo sapiens
ggttggaatgttctt

SEQ ID NO: 670897 - DNA, 15 bp, Homo sapiens
gttggaatgttcttt

SEQ ID NO: 670898 - DNA, 15 bp, Homo sapiens
ttggaatgttctttc

SEQ ID NO: 670899 - DNA, 15 bp, Homo sapiens
tggaatgttctttca

SEQ ID NO: 670900 - DNA, 15 bp, Homo sapiens
ggaatgttctttcaa

SEQ ID NO: 670901 - DNA, 15 bp, Homo sapiens
gaatgttctttcaag

SEQ ID NO: 670902 - DNA, 15 bp, Homo sapiens
aatgttctttcaagc

SEQ ID NO: 670903 - DNA, 15 bp, Homo sapiens
atgttctttcaagca

SEQ ID NO: 670904 - DNA, 15 bp, Homo sapiens
tgttctttcaagcag

SEQ ID NO: 670905 - DNA, 15 bp, Homo sapiens
gttctttcaagcagt

SEQ ID NO: 670906 - DNA, 15 bp, Homo sapiens
ttctttcaagcagta

SEQ ID NO: 670907 - DNA, 15 bp, Homo sapiens
tctttcaagcagtag

SEQ ID NO: 670908 - DNA, 15 bp, Homo sapiens
ctttcaagcagtagc

SEQ ID NO: 670909 - DNA, 15 bp, Homo sapiens
tttcaagcagtagcc

SEQ ID NO: 670910 - DNA, 15 bp, Homo sapiens
ttcaagcagtagcca

SEQ ID NO: 670911 - DNA, 15 bp, Homo sapiens
tcaagcagtagccac

SEQ ID NO: 670912 - DNA, 15 bp, Homo sapiens
caagcagtagccacg

SEQ ID NO: 670913 - DNA, 15 bp, Homo sapiens
aagcagtagccacgt

SEQ ID NO: 670914 - DNA, 15 bp, Homo sapiens
agcagtagccacgtt

SEQ ID NO: 670915 - DNA, 15 bp, Homo sapiens
gcagtagccacgttt

SEQ ID NO: 670916 - DNA, 15 bp, Homo sapiens
cagtagccacgtttt

SEQ ID NO: 670917 - DNA, 15 bp, Homo sapiens
agtagccacgttttt

SEQ ID NO: 670918 - DNA, 15 bp, Homo sapiens
gtagccacgtttttt

SEQ ID NO: 670919 - DNA, 15 bp, Homo sapiens
tagccacgttttttg

SEQ ID NO: 670920 - DNA, 15 bp, Homo sapiens
agccacgttttttgc

SEQ ID NO: 670921 - DNA, 15 bp, Homo sapiens
gccacgttttttgca

SEQ ID NO: 670922 - DNA, 15 bp, Homo sapiens
ccacgttttttgcag

SEQ ID NO: 670923 - DNA, 15 bp, Homo sapiens
cacgttttttgcagg

SEQ ID NO: 670924 - DNA, 15 bp, Homo sapiens
acgttttttgcagga

SEQ ID NO: 670925 - DNA, 15 bp, Homo sapiens
cgttttttgcaggat

SEQ ID NO: 670926 - DNA, 15 bp, Homo sapiens
gttttttgcaggatt

SEQ ID NO: 670927 - DNA, 15 bp, Homo sapiens
ttttttgcaggattc

SEQ ID NO: 670928 - DNA, 15 bp, Homo sapiens
tttttgcaggattca

SEQ ID NO: 670929 - DNA, 15 bp, Homo sapiens
ttttgcaggattcat

SEQ ID NO: 670930 - DNA, 15 bp, Homo sapiens
tttgcaggattcata

SEQ ID NO: 670931 - DNA, 15 bp, Homo sapiens
ttgcaggattcatag

SEQ ID NO: 670932 - DNA, 15 bp, Homo sapiens
tgcaggattcatagt

SEQ ID NO: 670933 - DNA, 15 bp, Homo sapiens
gcaggattcatagtg

SEQ ID NO: 670934 - DNA, 15 bp, Homo sapiens
caggattcatagtgg

SEQ ID NO: 670935 - DNA, 15 bp, Homo sapiens
aggattcatagtggg

SEQ ID NO: 670936 - DNA, 15 bp, Homo sapiens
ggattcatagtggga

SEQ ID NO: 670937 - DNA, 15 bp, Homo sapiens
gattcatagtgggat

SEQ ID NO: 670938 - DNA, 15 bp, Homo sapiens
attcatagtgggatt

SEQ ID NO: 670939 - DNA, 15 bp, Homo sapiens
ttcatagtgggattc

SEQ ID NO: 670940 - DNA, 15 bp, Homo sapiens
tcatagtgggattca

SEQ ID NO: 670941 - DNA, 15 bp, Homo sapiens
catagtgggattcat

SEQ ID NO: 670942 - DNA, 15 bp, Homo sapiens
atagtgggattcatc

SEQ ID NO: 670943 - DNA, 15 bp, Homo sapiens
tagtgggattcatca

SEQ ID NO: 670944 - DNA, 15 bp, Homo sapiens
agtgggattcatcag

SEQ ID NO: 670945 - DNA, 15 bp, Homo sapiens
gtgggattcatcaga

SEQ ID NO: 670946 - DNA, 15 bp, Homo sapiens
tgggattcatcagag

SEQ ID NO: 670947 - DNA, 15 bp, Homo sapiens
gggattcatcagagg

SEQ ID NO: 670948 - DNA, 15 bp, Homo sapiens
ggattcatcagagga

SEQ ID NO: 670949 - DNA, 15 bp, Homo sapiens
gattcatcagaggat

SEQ ID NO: 670950 - DNA, 15 bp, Homo sapiens
attcatcagaggatg

SEQ ID NO: 670951 - DNA, 15 bp, Homo sapiens
ttcatcagaggatgg

SEQ ID NO: 670952 - DNA, 15 bp, Homo sapiens
tcatcagaggatgga

SEQ ID NO: 670953 - DNA, 15 bp, Homo sapiens
catcagaggatggaa

SEQ ID NO: 670954 - DNA, 15 bp, Homo sapiens
atcagaggatggaag

SEQ ID NO: 670955 - DNA, 15 bp, Homo sapiens
tcagaggatggaagc

SEQ ID NO: 670956 - DNA, 15 bp, Homo sapiens
cagaggatggaagct

SEQ ID NO: 670957 - DNA, 15 bp, Homo sapiens
agaggatggaagctc

SEQ ID NO: 670958 - DNA, 15 bp, Homo sapiens
gaggatggaagctca

SEQ ID NO: 670959 - DNA, 15 bp, Homo sapiens
aggatggaagctcac

SEQ ID NO: 670960 - DNA, 15 bp, Homo sapiens
ggatggaagctcacc

SEQ ID NO: 670961 - DNA, 15 bp, Homo sapiens
gatggaagctcaccc

SEQ ID NO: 670962 - DNA, 15 bp, Homo sapiens
atggaagctcaccct

SEQ ID NO: 670963 - DNA, 15 bp, Homo sapiens
tggaagctcaccctt

SEQ ID NO: 670964 - DNA, 15 bp, Homo sapiens
ggaagctcacccttg

SEQ ID NO: 670965 - DNA, 15 bp, Homo sapiens
gaagctcacccttgt

SEQ ID NO: 670966 - DNA, 15 bp, Homo sapiens
aagctcacccttgtg

SEQ ID NO: 670967 - DNA, 15 bp, Homo sapiens
agctcacccttgtga

SEQ ID NO: 670968 - DNA, 15 bp, Homo sapiens
gctcacccttgtgat

SEQ ID NO: 670969 - DNA, 15 bp, Homo sapiens
ctcacccttgtgata

SEQ ID NO: 670970 - DNA, 15 bp, Homo sapiens
tcacccttgtgataa

SEQ ID NO: 670971 - DNA, 15 bp, Homo sapiens
cacccttgtgataat

SEQ ID NO: 670972 - DNA, 15 bp, Homo sapiens
acccttgtgataatg

SEQ ID NO: 670973 - DNA, 15 bp, Homo sapiens
cccttgtgataatgg

SEQ ID NO: 670974 - DNA, 15 bp, Homo sapiens
ccttgtgataatggc

SEQ ID NO: 670975 - DNA, 15 bp, Homo sapiens
cttgtgataatggcc

SEQ ID NO: 670976 - DNA, 15 bp, Homo sapiens
ttgtgataatggcca

SEQ ID NO: 670977 - DNA, 15 bp, Homo sapiens
tgtgataatggccat

SEQ ID NO: 670978 - DNA, 15 bp, Homo sapiens
gtgataatggccatc

SEQ ID NO: 670979 - DNA, 15 bp, Homo sapiens
tgataatggccatca

SEQ ID NO: 670980 - DNA, 15 bp, Homo sapiens
gataatggccatcag

SEQ ID NO: 670981 - DNA, 15 bp, Homo sapiens
ataatggccatcagc

SEQ ID NO: 670982 - DNA, 15 bp, Homo sapiens
taatggccatcagcc

SEQ ID NO: 670983 - DNA, 15 bp, Homo sapiens
aatggccatcagccc

SEQ ID NO: 670984 - DNA, 15 bp, Homo sapiens
atggccatcagccct

SEQ ID NO: 670985 - DNA, 15 bp, Homo sapiens
tggccatcagcccta

SEQ ID NO: 670986 - DNA, 15 bp, Homo sapiens
ggccatcagccctat

SEQ ID NO: 670987 - DNA, 15 bp, Homo sapiens
gccatcagccctatt

SEQ ID NO: 670988 - DNA, 15 bp, Homo sapiens
ccatcagccctattc

SEQ ID NO: 670989 - DNA, 15 bp, Homo sapiens
catcagccctattct

SEQ ID NO: 670990 - DNA, 15 bp, Homo sapiens
atcagccctattcta

SEQ ID NO: 670991 - DNA, 15 bp, Homo sapiens
tcagccctattctag

SEQ ID NO: 670992 - DNA, 15 bp, Homo sapiens
cagccctattctagg

SEQ ID NO: 670993 - DNA, 15 bp, Homo sapiens
agccctattctagga

SEQ ID NO: 670994 - DNA, 15 bp, Homo sapiens
gccctattctaggac

SEQ ID NO: 670995 - DNA, 15 bp, Homo sapiens
ccctattctaggact

SEQ ID NO: 670996 - DNA, 15 bp, Homo sapiens
cctattctaggactc

SEQ ID NO: 670997 - DNA, 15 bp, Homo sapiens
ctattctaggactct

SEQ ID NO: 670998 - DNA, 15 bp, Homo sapiens
tattctaggactctc

SEQ ID NO: 670999 - DNA, 15 bp, Homo sapiens
attctaggactctct

SEQ ID NO: 671000 - DNA, 15 bp, Homo sapiens
ttctaggactctctg

SEQ ID NO: 671001 - DNA, 15 bp, Homo sapiens
tctaggactctctgc

SEQ ID NO: 671002 - DNA, 15 bp, Homo sapiens
ctaggactctctgca

SEQ ID NO: 671003 - DNA, 15 bp, Homo sapiens
taggactctctgcag

SEQ ID NO: 671004 - DNA, 15 bp, Homo sapiens
aggactctctgcagc

SEQ ID NO: 671005 - DNA, 15 bp, Homo sapiens
ggactctctgcagcc

SEQ ID NO: 671006 - DNA, 15 bp, Homo sapiens
gactctctgcagccg

SEQ ID NO: 671007 - DNA, 15 bp, Homo sapiens
actctctgcagccgt

SEQ ID NO: 671008 - DNA, 15 bp, Homo sapiens
ctctctgcagccgtt

SEQ ID NO: 671009 - DNA, 15 bp, Homo sapiens
tctctgcagccgttt

SEQ ID NO: 671010 - DNA, 15 bp, Homo sapiens
ctctgcagccgtttg

SEQ ID NO: 671011 - DNA, 15 bp, Homo sapiens
tctgcagccgtttgg

SEQ ID NO: 671012 - DNA, 15 bp, Homo sapiens
ctgcagccgtttggg

SEQ ID NO: 671013 - DNA, 15 bp, Homo sapiens
tgcagccgtttgggc

SEQ ID NO: 671014 - DNA, 15 bp, Homo sapiens
gcagccgtttgggca

SEQ ID NO: 671015 - DNA, 15 bp, Homo sapiens
cagccgtttgggcaa

SEQ ID NO: 671016 - DNA, 15 bp, Homo sapiens
agccgtttgggcaaa

SEQ ID NO: 671017 - DNA, 15 bp, Homo sapiens
gccgtttgggcaaag

SEQ ID NO: 671018 - DNA, 15 bp, Homo sapiens
ccgtttgggcaaagg

SEQ ID NO: 671019 - DNA, 15 bp, Homo sapiens
cgtttgggcaaaggt

SEQ ID NO: 671020 - DNA, 15 bp, Homo sapiens
gtttgggcaaaggta

SEQ ID NO: 671021 - DNA, 15 bp, Homo sapiens
tttgggcaaaggtat

SEQ ID NO: 671022 - DNA, 15 bp, Homo sapiens
ttgggcaaaggtatg

SEQ ID NO: 671023 - DNA, 15 bp, Homo sapiens
tgggcaaaggtatgt

SEQ ID NO: 671024 - DNA, 15 bp, Homo sapiens
gggcaaaggtatgtg

SEQ ID NO: 671025 - DNA, 15 bp, Homo sapiens
ggcaaaggtatgtga

SEQ ID NO: 671026 - DNA, 15 bp, Homo sapiens
gcaaaggtatgtgaa

SEQ ID NO: 671027 - DNA, 15 bp, Homo sapiens
caaaggtatgtgaaa

SEQ ID NO: 671028 - DNA, 15 bp, Homo sapiens
aaaggtatgtgaaag

SEQ ID NO: 671029 - DNA, 15 bp, Homo sapiens
aaggtatgtgaaagc

SEQ ID NO: 671030 - DNA, 15 bp, Homo sapiens
aggtatgtgaaagct

SEQ ID NO: 671031 - DNA, 15 bp, Homo sapiens
ggtatgtgaaagctg

SEQ ID NO: 671032 - DNA, 15 bp, Homo sapiens
gtatgtgaaagctgg

SEQ ID NO: 671033 - DNA, 15 bp, Homo sapiens
tatgtgaaagctggg

SEQ ID NO: 671034 - DNA, 15 bp, Homo sapiens
atgtgaaagctgggc

SEQ ID NO: 671035 - DNA, 15 bp, Homo sapiens
tgtgaaagctgggcc

SEQ ID NO: 671036 - DNA, 15 bp, Homo sapiens
gtgaaagctgggcct

SEQ ID NO: 671037 - DNA, 15 bp, Homo sapiens
tgaaagctgggcctt

SEQ ID NO: 671038 - DNA, 15 bp, Homo sapiens
gaaagctgggccttt

SEQ ID NO: 671039 - DNA, 15 bp, Homo sapiens
aaagctgggcctttt

SEQ ID NO: 671040 - DNA, 15 bp, Homo sapiens
aagctgggccttttt

SEQ ID NO: 671041 - DNA, 15 bp, Homo sapiens
agctgggccttttta

SEQ ID NO: 671042 - DNA, 15 bp, Homo sapiens
gctgggcctttttat

SEQ ID NO: 671043 - DNA, 15 bp, Homo sapiens
ctgggcctttttatg

SEQ ID NO: 671044 - DNA, 15 bp, Homo sapiens
tgggcctttttatgt

SEQ ID NO: 671045 - DNA, 15 bp, Homo sapiens
gggcctttttatgtg

SEQ ID NO: 671046 - DNA, 15 bp, Homo sapiens
ggcctttttatgtgt

SEQ ID NO: 671047 - DNA, 15 bp, Homo sapiens
gcctttttatgtgtg

SEQ ID NO: 671048 - DNA, 15 bp, Homo sapiens
cctttttatgtgtgt

SEQ ID NO: 671049 - DNA, 15 bp, Homo sapiens
ctttttatgtgtgtt

SEQ ID NO: 671050 - DNA, 15 bp, Homo sapiens
tttttatgtgtgtta

SEQ ID NO: 671051 - DNA, 15 bp, Homo sapiens
ttttatgtgtgttaa

SEQ ID NO: 671052 - DNA, 15 bp, Homo sapiens
tttatgtgtgttaac

SEQ ID NO: 671053 - DNA, 15 bp, Homo sapiens
ttatgtgtgttaacc

SEQ ID NO: 671054 - DNA, 15 bp, Homo sapiens
tatgtgtgttaaccc

SEQ ID NO: 671055 - DNA, 15 bp, Homo sapiens
atgtgtgttaacccc

SEQ ID NO: 671056 - DNA, 15 bp, Homo sapiens
tgtgtgttaacccct

SEQ ID NO: 671057 - DNA, 15 bp, Homo sapiens
gtgtgttaacccctg

SEQ ID NO: 671058 - DNA, 15 bp, Homo sapiens
tgtgttaacccctgc

SEQ ID NO: 671059 - DNA, 15 bp, Homo sapiens
gtgttaacccctgca

SEQ ID NO: 671060 - DNA, 15 bp, Homo sapiens
tgttaacccctgcac

SEQ ID NO: 671061 - DNA, 15 bp, Homo sapiens
gttaacccctgcaca

SEQ ID NO: 671062 - DNA, 15 bp, Homo sapiens
ttaacccctgcacac

SEQ ID NO: 671063 - DNA, 15 bp, Homo sapiens
taacccctgcacaca

SEQ ID NO: 671064 - DNA, 15 bp, Homo sapiens
aacccctgcacacag

SEQ ID NO: 671065 - DNA, 15 bp, Homo sapiens
acccctgcacacagt

SEQ ID NO: 671066 - DNA, 15 bp, Homo sapiens
cccctgcacacagta

SEQ ID NO: 671067 - DNA, 15 bp, Homo sapiens
ccctgcacacagtaa

SEQ ID NO: 671068 - DNA, 15 bp, Homo sapiens
cctgcacacagtaat

SEQ ID NO: 671069 - DNA, 15 bp, Homo sapiens
ctgcacacagtaatc

SEQ ID NO: 671070 - DNA, 15 bp, Homo sapiens
tgcacacagtaatct

SEQ ID NO: 671071 - DNA, 15 bp, Homo sapiens
gcacacagtaatctt

SEQ ID NO: 671072 - DNA, 15 bp, Homo sapiens
cacacagtaatcttt

SEQ ID NO: 671073 - DNA, 15 bp, Homo sapiens
acacagtaatcttta

SEQ ID NO: 671074 - DNA, 15 bp, Homo sapiens
cacagtaatctttaa

SEQ ID NO: 671075 - DNA, 15 bp, Homo sapiens
acagtaatctttaat

SEQ ID NO: 671076 - DNA, 15 bp, Homo sapiens
cagtaatctttaata

SEQ ID NO: 671077 - DNA, 15 bp, Homo sapiens
agtaatctttaatat

SEQ ID NO: 671078 - DNA, 15 bp, Homo sapiens
gtaatctttaatatg

SEQ ID NO: 671079 - DNA, 15 bp, Homo sapiens
taatctttaatatgc

SEQ ID NO: 671080 - DNA, 15 bp, Homo sapiens
aatctttaatatgca

SEQ ID NO: 671081 - DNA, 15 bp, Homo sapiens
atctttaatatgcag

SEQ ID NO: 671082 - DNA, 15 bp, Homo sapiens
tctttaatatgcaga

SEQ ID NO: 671083 - DNA, 15 bp, Homo sapiens
ctttaatatgcagaa

SEQ ID NO: 671084 - DNA, 15 bp, Homo sapiens
tttaatatgcagaag

SEQ ID NO: 671085 - DNA, 15 bp, Homo sapiens
ttaatatgcagaagt

SEQ ID NO: 671086 - DNA, 15 bp, Homo sapiens
taatatgcagaagtc

SEQ ID NO: 671087 - DNA, 15 bp, Homo sapiens
aatatgcagaagtct

SEQ ID NO: 671088 - DNA, 15 bp, Homo sapiens
atatgcagaagtctc

SEQ ID NO: 671089 - DNA, 15 bp, Homo sapiens
tatgcagaagtctcg

SEQ ID NO: 671090 - DNA, 15 bp, Homo sapiens
atgcagaagtctcgt

SEQ ID NO: 671091 - DNA, 15 bp, Homo sapiens
tgcagaagtctcgta

SEQ ID NO: 671092 - DNA, 15 bp, Homo sapiens
gcagaagtctcgtac

SEQ ID NO: 671093 - DNA, 15 bp, Homo sapiens
cagaagtctcgtact

SEQ ID NO: 671094 - DNA, 15 bp, Homo sapiens
agaagtctcgtactt

SEQ ID NO: 671095 - DNA, 15 bp, Homo sapiens
gaagtctcgtacttg

SEQ ID NO: 671096 - DNA, 15 bp, Homo sapiens
aagtctcgtacttgt

SEQ ID NO: 671097 - DNA, 15 bp, Homo sapiens
agtctcgtacttgta

SEQ ID NO: 671098 - DNA, 15 bp, Homo sapiens
gtctcgtacttgtac

SEQ ID NO: 671099 - DNA, 15 bp, Homo sapiens
tctcgtacttgtacc

SEQ ID NO: 671100 - DNA, 15 bp, Homo sapiens
ctcgtacttgtacct

SEQ ID NO: 671101 - DNA, 15 bp, Homo sapiens
tcgtacttgtacctg

SEQ ID NO: 671102 - DNA, 15 bp, Homo sapiens
cgtacttgtacctgt

SEQ ID NO: 671103 - DNA, 15 bp, Homo sapiens
gtacttgtacctgtt

SEQ ID NO: 671104 - DNA, 15 bp, Homo sapiens
tacttgtacctgttc

SEQ ID NO: 671105 - DNA, 15 bp, Homo sapiens
acttgtacctgttca

SEQ ID NO: 671106 - DNA, 15 bp, Homo sapiens
cttgtacctgttcag

SEQ ID NO: 671107 - DNA, 15 bp, Homo sapiens
ttgtacctgttcagg

SEQ ID NO: 671108 - DNA, 15 bp, Homo sapiens
tgtacctgttcaggt

SEQ ID NO: 671109 - DNA, 15 bp, Homo sapiens
gtacctgttcaggtc

SEQ ID NO: 671110 - DNA, 15 bp, Homo sapiens
tacctgttcaggtct

SEQ ID NO: 671111 - DNA, 15 bp, Homo sapiens
acctgttcaggtcta

SEQ ID NO: 671112 - DNA, 15 bp, Homo sapiens
cctgttcaggtctac

SEQ ID NO: 671113 - DNA, 15 bp, Homo sapiens
ctgttcaggtctaca

SEQ ID NO: 671114 - DNA, 15 bp, Homo sapiens
tgttcaggtctacat

SEQ ID NO: 671115 - DNA, 15 bp, Homo sapiens
gttcaggtctacatt

SEQ ID NO: 671116 - DNA, 15 bp, Homo sapiens
ttcaggtctacatta

SEQ ID NO: 671117 - DNA, 15 bp, Homo sapiens
tcaggtctacattaa

SEQ ID NO: 671118 - DNA, 15 bp, Homo sapiens
caggtctacattaaa

SEQ ID NO: 671119 - DNA, 15 bp, Homo sapiens
aggtctacattaaat

SEQ ID NO: 671120 - DNA, 15 bp, Homo sapiens
ggtctacattaaatg

SEQ ID NO: 671121 - DNA, 15 bp, Homo sapiens
gtctacattaaatgt

SEQ ID NO: 671122 - DNA, 15 bp, Homo sapiens
tctacattaaatgtc

SEQ ID NO: 671123 - DNA, 15 bp, Homo sapiens
ctacattaaatgtca

SEQ ID NO: 671124 - DNA, 15 bp, Homo sapiens
tacattaaatgtcag

SEQ ID NO: 671125 - DNA, 15 bp, Homo sapiens
acattaaatgtcagt

SEQ ID NO: 671126 - DNA, 15 bp, Homo sapiens
cattaaatgtcagtt

SEQ ID NO: 671127 - DNA, 15 bp, Homo sapiens
attaaatgtcagttg

SEQ ID NO: 671128 - DNA, 15 bp, Homo sapiens
ttaaatgtcagttga

SEQ ID NO: 671129 - DNA, 15 bp, Homo sapiens
taaatgtcagttgaa

SEQ ID NO: 671130 - DNA, 15 bp, Homo sapiens
aaatgtcagttgaaa

SEQ ID NO: 671131 - DNA, 15 bp, Homo sapiens
aatgtcagttgaaac

SEQ ID NO: 671132 - DNA, 15 bp, Homo sapiens
atgtcagttgaaact

SEQ ID NO: 671133 - DNA, 15 bp, Homo sapiens
tgtcagttgaaacta

SEQ ID NO: 671134 - DNA, 15 bp, Homo sapiens
gtcagttgaaactac

SEQ ID NO: 671135 - DNA, 15 bp, Homo sapiens
tcagttgaaactaca

SEQ ID NO: 671136 - DNA, 15 bp, Homo sapiens
cagttgaaactacat

SEQ ID NO: 671137 - DNA, 15 bp, Homo sapiens
agttgaaactacatc

SEQ ID NO: 671138 - DNA, 15 bp, Homo sapiens
gttgaaactacatcc

SEQ ID NO: 671139 - DNA, 15 bp, Homo sapiens
ttgaaactacatcca

SEQ ID NO: 671140 - DNA, 15 bp, Homo sapiens
tgaaactacatccag

SEQ ID NO: 671141 - DNA, 15 bp, Homo sapiens
gaaactacatccagt

SEQ ID NO: 671142 - DNA, 15 bp, Homo sapiens
aaactacatccagta

SEQ ID NO: 671143 - DNA, 15 bp, Homo sapiens
aactacatccagtaa

SEQ ID NO: 671144 - DNA, 15 bp, Homo sapiens
actacatccagtaac

SEQ ID NO: 671145 - DNA, 15 bp, Homo sapiens
ctacatccagtaaca

SEQ ID NO: 671146 - DNA, 15 bp, Homo sapiens
tacatccagtaacat

SEQ ID NO: 671147 - DNA, 15 bp, Homo sapiens
acatccagtaacatg

SEQ ID NO: 671148 - DNA, 15 bp, Homo sapiens
catccagtaacatgg

SEQ ID NO: 671149 - DNA, 15 bp, Homo sapiens
atccagtaacatggt

SEQ ID NO: 671150 - DNA, 15 bp, Homo sapiens
tccagtaacatggtg

SEQ ID NO: 671151 - DNA, 15 bp, Homo sapiens
ccagtaacatggtgt

SEQ ID NO: 671152 - DNA, 15 bp, Homo sapiens
cagtaacatggtgtt

SEQ ID NO: 671153 - DNA, 15 bp, Homo sapiens
agtaacatggtgtta

SEQ ID NO: 671154 - DNA, 15 bp, Homo sapiens
gtaacatggtgttaa

SEQ ID NO: 671155 - DNA, 15 bp, Homo sapiens
taacatggtgttaat

SEQ ID NO: 671156 - DNA, 15 bp, Homo sapiens
aacatggtgttaata

SEQ ID NO: 671157 - DNA, 15 bp, Homo sapiens
acatggtgttaatat

SEQ ID NO: 671158 - DNA, 15 bp, Homo sapiens
catggtgttaatatg

SEQ ID NO: 671159 - DNA, 15 bp, Homo sapiens
atggtgttaatatga

SEQ ID NO: 671160 - DNA, 15 bp, Homo sapiens
tggtgttaatatgat

SEQ ID NO: 671161 - DNA, 15 bp, Homo sapiens
ggtgttaatatgatg

SEQ ID NO: 671162 - DNA, 15 bp, Homo sapiens
gtgttaatatgatgc

SEQ ID NO: 671163 - DNA, 15 bp, Homo sapiens
tgttaatatgatgct

SEQ ID NO: 671164 - DNA, 15 bp, Homo sapiens
gttaatatgatgctt

SEQ ID NO: 671165 - DNA, 15 bp, Homo sapiens
ttaatatgatgcttt

SEQ ID NO: 671166 - DNA, 15 bp, Homo sapiens
taatatgatgctttc

SEQ ID NO: 671167 - DNA, 15 bp, Homo sapiens
aatatgatgctttca

SEQ ID NO: 671168 - DNA, 15 bp, Homo sapiens
atatgatgctttcat

SEQ ID NO: 671169 - DNA, 15 bp, Homo sapiens
tatgatgctttcata

SEQ ID NO: 671170 - DNA, 15 bp, Homo sapiens
atgatgctttcataa

SEQ ID NO: 671171 - DNA, 15 bp, Homo sapiens
tgatgctttcataag

SEQ ID NO: 671172 - DNA, 15 bp, Homo sapiens
gatgctttcataagg

SEQ ID NO: 671173 - DNA, 15 bp, Homo sapiens
atgctttcataagga

SEQ ID NO: 671174 - DNA, 15 bp, Homo sapiens
tgctttcataaggaa

SEQ ID NO: 671175 - DNA, 15 bp, Homo sapiens
gctttcataaggaaa

SEQ ID NO: 671176 - DNA, 15 bp, Homo sapiens
ctttcataaggaaat

SEQ ID NO: 671177 - DNA, 15 bp, Homo sapiens
tttcataaggaaatt

SEQ ID NO: 671178 - DNA, 15 bp, Homo sapiens
ttcataaggaaatta

SEQ ID NO: 671179 - DNA, 15 bp, Homo sapiens
tcataaggaaattaa

SEQ ID NO: 671180 - DNA, 15 bp, Homo sapiens
cataaggaaattaat

SEQ ID NO: 671181 - DNA, 15 bp, Homo sapiens
ataaggaaattaatt

SEQ ID NO: 671182 - DNA, 15 bp, Homo sapiens
taaggaaattaattt

SEQ ID NO: 671183 - DNA, 15 bp, Homo sapiens
aaggaaattaatttt

SEQ ID NO: 671184 - DNA, 15 bp, Homo sapiens
aggaaattaattttt

SEQ ID NO: 671185 - DNA, 15 bp, Homo sapiens
ggaaattaattttta

SEQ ID NO: 671186 - DNA, 15 bp, Homo sapiens
gaaattaatttttaa

SEQ ID NO: 671187 - DNA, 15 bp, Homo sapiens
aaattaatttttaac

SEQ ID NO: 671188 - DNA, 15 bp, Homo sapiens
aattaatttttaaca

SEQ ID NO: 671189 - DNA, 15 bp, Homo sapiens
attaatttttaacat

SEQ ID NO: 671190 - DNA, 15 bp, Homo sapiens
ttaatttttaacata

SEQ ID NO: 671191 - DNA, 15 bp, Homo sapiens
taatttttaacataa

SEQ ID NO: 671192 - DNA, 15 bp, Homo sapiens
aatttttaacataat

SEQ ID NO: 671193 - DNA, 15 bp, Homo sapiens
atttttaacataatt

SEQ ID NO: 671194 - DNA, 15 bp, Homo sapiens
tttttaacataattc

SEQ ID NO: 671195 - DNA, 15 bp, Homo sapiens
ttttaacataattca

SEQ ID NO: 671196 - DNA, 15 bp, Homo sapiens
tttaacataattcaa

SEQ ID NO: 671197 - DNA, 15 bp, Homo sapiens
ttaacataattcaaa

SEQ ID NO: 671198 - DNA, 15 bp, Homo sapiens
taacataattcaaaa

SEQ ID NO: 671199 - DNA, 15 bp, Homo sapiens
aacataattcaaaat

SEQ ID NO: 671200 - DNA, 15 bp, Homo sapiens
acataattcaaaatg

SEQ ID NO: 671201 - DNA, 15 bp, Homo sapiens
cataattcaaaatgt

SEQ ID NO: 671202 - DNA, 15 bp, Homo sapiens
ataattcaaaatgtc

SEQ ID NO: 671203 - DNA, 15 bp, Homo sapiens
taattcaaaatgtca

SEQ ID NO: 671204 - DNA, 15 bp, Homo sapiens
aattcaaaatgtcac

SEQ ID NO: 671205 - DNA, 15 bp, Homo sapiens
attcaaaatgtcaca

SEQ ID NO: 671206 - DNA, 15 bp, Homo sapiens
ttcaaaatgtcacag

SEQ ID NO: 671207 - DNA, 15 bp, Homo sapiens
tcaaaatgtcacagg

SEQ ID NO: 671208 - DNA, 15 bp, Homo sapiens
caaaatgtcacaggc

SEQ ID NO: 671209 - DNA, 15 bp, Homo sapiens
aaaatgtcacaggct

SEQ ID NO: 671210 - DNA, 15 bp, Homo sapiens
aaatgtcacaggctg

SEQ ID NO: 671211 - DNA, 15 bp, Homo sapiens
aatgtcacaggctgg

SEQ ID NO: 671212 - DNA, 15 bp, Homo sapiens
atgtcacaggctggg

SEQ ID NO: 671213 - DNA, 15 bp, Homo sapiens
tgtcacaggctgggt

SEQ ID NO: 671214 - DNA, 15 bp, Homo sapiens
gtcacaggctgggtg

SEQ ID NO: 671215 - DNA, 15 bp, Homo sapiens
tcacaggctgggtgt

SEQ ID NO: 671216 - DNA, 15 bp, Homo sapiens
cacaggctgggtgtg

SEQ ID NO: 671217 - DNA, 15 bp, Homo sapiens
acaggctgggtgtgg

SEQ ID NO: 671218 - DNA, 15 bp, Homo sapiens
caggctgggtgtggt

SEQ ID NO: 671219 - DNA, 15 bp, Homo sapiens
aggctgggtgtggtg

SEQ ID NO: 671220 - DNA, 15 bp, Homo sapiens
ggctgggtgtggtga

SEQ ID NO: 671221 - DNA, 15 bp, Homo sapiens
gctgggtgtggtgac

SEQ ID NO: 671222 - DNA, 15 bp, Homo sapiens
ctgggtgtggtgact

SEQ ID NO: 671223 - DNA, 15 bp, Homo sapiens
tgggtgtggtgactc

SEQ ID NO: 671224 - DNA, 15 bp, Homo sapiens
gggtgtggtgactca

SEQ ID NO: 671225 - DNA, 15 bp, Homo sapiens
ggtgtggtgactcat

SEQ ID NO: 671226 - DNA, 15 bp, Homo sapiens
gtgtggtgactcatt

SEQ ID NO: 671227 - DNA, 15 bp, Homo sapiens
tgtggtgactcattc

SEQ ID NO: 671228 - DNA, 15 bp, Homo sapiens
gtggtgactcattcc

SEQ ID NO: 671229 - DNA, 15 bp, Homo sapiens
tggtgactcattcct

SEQ ID NO: 671230 - DNA, 15 bp, Homo sapiens
ggtgactcattcctg

SEQ ID NO: 671231 - DNA, 15 bp, Homo sapiens
gtgactcattcctgt

SEQ ID NO: 671232 - DNA, 15 bp, Homo sapiens
tgactcattcctgta

SEQ ID NO: 671233 - DNA, 15 bp, Homo sapiens
gactcattcctgtat

SEQ ID NO: 671234 - DNA, 15 bp, Homo sapiens
actcattcctgtatc

SEQ ID NO: 671235 - DNA, 15 bp, Homo sapiens
ctcattcctgtatcc

SEQ ID NO: 671236 - DNA, 15 bp, Homo sapiens
tcattcctgtatccc

SEQ ID NO: 671237 - DNA, 15 bp, Homo sapiens
cattcctgtatccca

SEQ ID NO: 671238 - DNA, 15 bp, Homo sapiens
attcctgtatcccag

SEQ ID NO: 671239 - DNA, 15 bp, Homo sapiens
ttcctgtatcccagc

SEQ ID NO: 671240 - DNA, 15 bp, Homo sapiens
tcctgtatcccagca

SEQ ID NO: 671241 - DNA, 15 bp, Homo sapiens
cctgtatcccagcac

SEQ ID NO: 671242 - DNA, 15 bp, Homo sapiens
ctgtatcccagcact

SEQ ID NO: 671243 - DNA, 15 bp, Homo sapiens
tgtatcccagcactt

SEQ ID NO: 671244 - DNA, 15 bp, Homo sapiens
gtatcccagcacttt

SEQ ID NO: 671245 - DNA, 15 bp, Homo sapiens
tatcccagcactttg

SEQ ID NO: 671246 - DNA, 15 bp, Homo sapiens
tgggaggccaaggta

SEQ ID NO: 671247 - DNA, 15 bp, Homo sapiens
gggaggccaaggtac

SEQ ID NO: 671248 - DNA, 15 bp, Homo sapiens
ggaggccaaggtaca

SEQ ID NO: 671249 - DNA, 15 bp, Homo sapiens
gaggccaaggtacat

SEQ ID NO: 671250 - DNA, 15 bp, Homo sapiens
aggccaaggtacata

SEQ ID NO: 671251 - DNA, 15 bp, Homo sapiens
ggccaaggtacataa

SEQ ID NO: 671252 - DNA, 15 bp, Homo sapiens
gccaaggtacataaa

SEQ ID NO: 671253 - DNA, 15 bp, Homo sapiens
ccaaggtacataaat

SEQ ID NO: 671254 - DNA, 15 bp, Homo sapiens
caaggtacataaatc

SEQ ID NO: 671255 - DNA, 15 bp, Homo sapiens
aaggtacataaatca

SEQ ID NO: 671256 - DNA, 15 bp, Homo sapiens
aggtacataaatcac

SEQ ID NO: 671257 - DNA, 15 bp, Homo sapiens
ggtacataaatcact

SEQ ID NO: 671258 - DNA, 15 bp, Homo sapiens
gtacataaatcactt

SEQ ID NO: 671259 - DNA, 15 bp, Homo sapiens
tacataaatcacttg

SEQ ID NO: 671260 - DNA, 15 bp, Homo sapiens
acataaatcacttga

SEQ ID NO: 671261 - DNA, 15 bp, Homo sapiens
cataaatcacttgag

SEQ ID NO: 671262 - DNA, 15 bp, Homo sapiens
ataaatcacttgagg

SEQ ID NO: 671263 - DNA, 15 bp, Homo sapiens
taaatcacttgaggt

SEQ ID NO: 671264 - DNA, 15 bp, Homo sapiens
aaatcacttgaggtc

SEQ ID NO: 671265 - DNA, 15 bp, Homo sapiens
aatcacttgaggtca

SEQ ID NO: 671266 - DNA, 15 bp, Homo sapiens
gaggtcaggagttcc

SEQ ID NO: 671267 - DNA, 15 bp, Homo sapiens
aggtcaggagttcca

SEQ ID NO: 671268 - DNA, 15 bp, Homo sapiens
ggtcaggagttccag

SEQ ID NO: 671269 - DNA, 15 bp, Homo sapiens
gtcaggagttccaga

SEQ ID NO: 671270 - DNA, 15 bp, Homo sapiens
tcaggagttccagac

SEQ ID NO: 671271 - DNA, 15 bp, Homo sapiens
caggagttccagacc

SEQ ID NO: 671272 - DNA, 15 bp, Homo sapiens
aggagttccagacca

SEQ ID NO: 671273 - DNA, 15 bp, Homo sapiens
ggagttccagaccag

SEQ ID NO: 671274 - DNA, 15 bp, Homo sapiens
gagttccagaccagc

SEQ ID NO: 671275 - DNA, 15 bp, Homo sapiens
agttccagaccagcc

SEQ ID NO: 671276 - DNA, 15 bp, Homo sapiens
gttccagaccagcct

SEQ ID NO: 671277 - DNA, 15 bp, Homo sapiens
ttccagaccagcctg

SEQ ID NO: 671278 - DNA, 15 bp, Homo sapiens
tccagaccagcctgg

SEQ ID NO: 671279 - DNA, 15 bp, Homo sapiens
ccagaccagcctgga

SEQ ID NO: 671280 - DNA, 15 bp, Homo sapiens
cagaccagcctggac

SEQ ID NO: 671281 - DNA, 15 bp, Homo sapiens
agcctggacaacatg

SEQ ID NO: 671282 - DNA, 15 bp, Homo sapiens
gcctggacaacatgg

SEQ ID NO: 671283 - DNA, 15 bp, Homo sapiens
cctggacaacatggc

SEQ ID NO: 671284 - DNA, 15 bp, Homo sapiens
ctggacaacatggca

SEQ ID NO: 671285 - DNA, 15 bp, Homo sapiens
tggacaacatggcaa

SEQ ID NO: 671286 - DNA, 15 bp, Homo sapiens
ggacaacatggcaaa

SEQ ID NO: 671287 - DNA, 15 bp, Homo sapiens
gacaacatggcaaaa

SEQ ID NO: 671288 - DNA, 15 bp, Homo sapiens
acaacatggcaaaac

SEQ ID NO: 671289 - DNA, 15 bp, Homo sapiens
caacatggcaaaact

SEQ ID NO: 671290 - DNA, 15 bp, Homo sapiens
aacatggcaaaactc

SEQ ID NO: 671291 - DNA, 15 bp, Homo sapiens
acatggcaaaactct

SEQ ID NO: 671292 - DNA, 15 bp, Homo sapiens
catggcaaaactctg

SEQ ID NO: 671293 - DNA, 15 bp, Homo sapiens
atggcaaaactctgt

SEQ ID NO: 671294 - DNA, 15 bp, Homo sapiens
tggcaaaactctgtc

SEQ ID NO: 671295 - DNA, 15 bp, Homo sapiens
ggcaaaactctgtct

SEQ ID NO: 671296 - DNA, 15 bp, Homo sapiens
gcaaaactctgtctc

SEQ ID NO: 671297 - DNA, 15 bp, Homo sapiens
caaaactctgtctct

SEQ ID NO: 671298 - DNA, 15 bp, Homo sapiens
aaaactctgtctcta

SEQ ID NO: 671299 - DNA, 15 bp, Homo sapiens
aaactctgtctctac

SEQ ID NO: 671300 - DNA, 15 bp, Homo sapiens
aactctgtctctact

SEQ ID NO: 671301 - DNA, 15 bp, Homo sapiens
actctgtctctacta

SEQ ID NO: 671302 - DNA, 15 bp, Homo sapiens
ctctgtctctactaa

SEQ ID NO: 671303 - DNA, 15 bp, Homo sapiens
tctgtctctactaaa

SEQ ID NO: 671304 - DNA, 15 bp, Homo sapiens
ctgtctctactaaaa

SEQ ID NO: 671305 - DNA, 15 bp, Homo sapiens
tgtctctactaaaaa

SEQ ID NO: 671306 - DNA, 15 bp, Homo sapiens
gtctctactaaaaat

SEQ ID NO: 671307 - DNA, 15 bp, Homo sapiens
ctctactaaaaatat

SEQ ID NO: 671308 - DNA, 15 bp, Homo sapiens
tctactaaaaatatg

SEQ ID NO: 671309 - DNA, 15 bp, Homo sapiens
ctactaaaaatatga

SEQ ID NO: 671310 - DNA, 15 bp, Homo sapiens
tactaaaaatatgaa

SEQ ID NO: 671311 - DNA, 15 bp, Homo sapiens
actaaaaatatgaaa

SEQ ID NO: 671312 - DNA, 15 bp, Homo sapiens
ctaaaaatatgaaaa

SEQ ID NO: 671313 - DNA, 15 bp, Homo sapiens
taaaaatatgaaaaa

SEQ ID NO: 671314 - DNA, 15 bp, Homo sapiens
aaaaatatgaaaaac

SEQ ID NO: 671315 - DNA, 15 bp, Homo sapiens
aaaatatgaaaaact

SEQ ID NO: 671316 - DNA, 15 bp, Homo sapiens
aaatatgaaaaacta

SEQ ID NO: 671317 - DNA, 15 bp, Homo sapiens
aatatgaaaaactag

SEQ ID NO: 671318 - DNA, 15 bp, Homo sapiens
atatgaaaaactagc

SEQ ID NO: 671319 - DNA, 15 bp, Homo sapiens
tatgaaaaactagcc

SEQ ID NO: 671320 - DNA, 15 bp, Homo sapiens
atgaaaaactagcct

SEQ ID NO: 671321 - DNA, 15 bp, Homo sapiens
tgaaaaactagcctt

SEQ ID NO: 671322 - DNA, 15 bp, Homo sapiens
gaaaaactagccttg

SEQ ID NO: 671323 - DNA, 15 bp, Homo sapiens
aaaaactagccttgc

SEQ ID NO: 671324 - DNA, 15 bp, Homo sapiens
aaaactagccttgcg

SEQ ID NO: 671325 - DNA, 15 bp, Homo sapiens
aaactagccttgcgt

SEQ ID NO: 671326 - DNA, 15 bp, Homo sapiens
aactagccttgcgtg

SEQ ID NO: 671327 - DNA, 15 bp, Homo sapiens
actagccttgcgtgg

SEQ ID NO: 671328 - DNA, 15 bp, Homo sapiens
ctagccttgcgtggt

SEQ ID NO: 671329 - DNA, 15 bp, Homo sapiens
tagccttgcgtggtg

SEQ ID NO: 671330 - DNA, 15 bp, Homo sapiens
agccttgcgtggtgg

SEQ ID NO: 671331 - DNA, 15 bp, Homo sapiens
gccttgcgtggtggt

SEQ ID NO: 671332 - DNA, 15 bp, Homo sapiens
ccttgcgtggtggtg

SEQ ID NO: 671333 - DNA, 15 bp, Homo sapiens
cttgcgtggtggtgc

SEQ ID NO: 671334 - DNA, 15 bp, Homo sapiens
ttgcgtggtggtgca

SEQ ID NO: 671335 - DNA, 15 bp, Homo sapiens
tgcgtggtggtgcat

SEQ ID NO: 671336 - DNA, 15 bp, Homo sapiens
gcgtggtggtgcatg

SEQ ID NO: 671337 - DNA, 15 bp, Homo sapiens
cgtggtggtgcatga

SEQ ID NO: 671338 - DNA, 15 bp, Homo sapiens
gtggtggtgcatgac

SEQ ID NO: 671339 - DNA, 15 bp, Homo sapiens
tggtggtgcatgact

SEQ ID NO: 671340 - DNA, 15 bp, Homo sapiens
ggtggtgcatgactg

SEQ ID NO: 671341 - DNA, 15 bp, Homo sapiens
gtggtgcatgactgt

SEQ ID NO: 671342 - DNA, 15 bp, Homo sapiens
tggtgcatgactgta

SEQ ID NO: 671343 - DNA, 15 bp, Homo sapiens
ggtgcatgactgtaa

SEQ ID NO: 671344 - DNA, 15 bp, Homo sapiens
gtgcatgactgtaat

SEQ ID NO: 671345 - DNA, 15 bp, Homo sapiens
tgcatgactgtaatc

SEQ ID NO: 671346 - DNA, 15 bp, Homo sapiens
gcatgactgtaatcc

SEQ ID NO: 671347 - DNA, 15 bp, Homo sapiens
catgactgtaatccc

SEQ ID NO: 671348 - DNA, 15 bp, Homo sapiens
atgactgtaatccca

SEQ ID NO: 671349 - DNA, 15 bp, Homo sapiens
tgactgtaatcccag

SEQ ID NO: 671350 - DNA, 15 bp, Homo sapiens
gactgtaatcccagc

SEQ ID NO: 671351 - DNA, 15 bp, Homo sapiens
actgtaatcccagct

SEQ ID NO: 671352 - DNA, 15 bp, Homo sapiens
taatcccagctactt

SEQ ID NO: 671353 - DNA, 15 bp, Homo sapiens
aatcccagctacttg

SEQ ID NO: 671354 - DNA, 15 bp, Homo sapiens
atcccagctacttgg

SEQ ID NO: 671355 - DNA, 15 bp, Homo sapiens
cttgggaggctgaga

SEQ ID NO: 671356 - DNA, 15 bp, Homo sapiens
ttgggaggctgagac

SEQ ID NO: 671357 - DNA, 15 bp, Homo sapiens
tgggaggctgagaca

SEQ ID NO: 671358 - DNA, 15 bp, Homo sapiens
gggaggctgagacag

SEQ ID NO: 671359 - DNA, 15 bp, Homo sapiens
ggaggctgagacagg

SEQ ID NO: 671360 - DNA, 15 bp, Homo sapiens
gaggctgagacagga

SEQ ID NO: 671361 - DNA, 15 bp, Homo sapiens
aggctgagacaggag

SEQ ID NO: 671362 - DNA, 15 bp, Homo sapiens
ggctgagacaggaga

SEQ ID NO: 671363 - DNA, 15 bp, Homo sapiens
gctgagacaggagaa

SEQ ID NO: 671364 - DNA, 15 bp, Homo sapiens
ctgagacaggagaat

SEQ ID NO: 671365 - DNA, 15 bp, Homo sapiens
tgagacaggagaatc

SEQ ID NO: 671366 - DNA, 15 bp, Homo sapiens
gagacaggagaatcg

SEQ ID NO: 671367 - DNA, 15 bp, Homo sapiens
agacaggagaatcgc

SEQ ID NO: 671368 - DNA, 15 bp, Homo sapiens
gacaggagaatcgct

SEQ ID NO: 671369 - DNA, 15 bp, Homo sapiens
acaggagaatcgctg

SEQ ID NO: 671370 - DNA, 15 bp, Homo sapiens
caggagaatcgctga

SEQ ID NO: 671371 - DNA, 15 bp, Homo sapiens
aggagaatcgctgaa

SEQ ID NO: 671372 - DNA, 15 bp, Homo sapiens
ggagaatcgctgaac

SEQ ID NO: 671373 - DNA, 15 bp, Homo sapiens
gagaatcgctgaact

SEQ ID NO: 671374 - DNA, 15 bp, Homo sapiens
agaatcgctgaactc

SEQ ID NO: 671375 - DNA, 15 bp, Homo sapiens
gaatcgctgaactca

SEQ ID NO: 671376 - DNA, 15 bp, Homo sapiens
aatcgctgaactcag

SEQ ID NO: 671377 - DNA, 15 bp, Homo sapiens
atcgctgaactcagg

SEQ ID NO: 671378 - DNA, 15 bp, Homo sapiens
tcgctgaactcagga

SEQ ID NO: 671379 - DNA, 15 bp, Homo sapiens
cgctgaactcaggag

SEQ ID NO: 671380 - DNA, 15 bp, Homo sapiens
gctgaactcaggagg

SEQ ID NO: 671381 - DNA, 15 bp, Homo sapiens
ctgaactcaggaggt

SEQ ID NO: 671382 - DNA, 15 bp, Homo sapiens
tgaactcaggaggtg

SEQ ID NO: 671383 - DNA, 15 bp, Homo sapiens
gaactcaggaggtgg

SEQ ID NO: 671384 - DNA, 15 bp, Homo sapiens
aactcaggaggtgga

SEQ ID NO: 671385 - DNA, 15 bp, Homo sapiens
actcaggaggtggag

SEQ ID NO: 671386 - DNA, 15 bp, Homo sapiens
ctcaggaggtggagg

SEQ ID NO: 671387 - DNA, 15 bp, Homo sapiens
tcaggaggtggaggt

SEQ ID NO: 671388 - DNA, 15 bp, Homo sapiens
caggaggtggaggtc

SEQ ID NO: 671389 - DNA, 15 bp, Homo sapiens
aggaggtggaggtcg

SEQ ID NO: 671390 - DNA, 15 bp, Homo sapiens
ggaggtggaggtcgc

SEQ ID NO: 671391 - DNA, 15 bp, Homo sapiens
gaggtggaggtcgca

SEQ ID NO: 671392 - DNA, 15 bp, Homo sapiens
aggtggaggtcgcag

SEQ ID NO: 671393 - DNA, 15 bp, Homo sapiens
ggtggaggtcgcagt

SEQ ID NO: 671394 - DNA, 15 bp, Homo sapiens
gtggaggtcgcagtg

SEQ ID NO: 671395 - DNA, 15 bp, Homo sapiens
tggaggtcgcagtga

SEQ ID NO: 671396 - DNA, 15 bp, Homo sapiens
ggaggtcgcagtgag

SEQ ID NO: 671397 - DNA, 15 bp, Homo sapiens
gaggtcgcagtgagc

SEQ ID NO: 671398 - DNA, 15 bp, Homo sapiens
aggtcgcagtgagcc

SEQ ID NO: 671399 - DNA, 15 bp, Homo sapiens
ggtcgcagtgagccc

SEQ ID NO: 671400 - DNA, 15 bp, Homo sapiens
gtcgcagtgagccca

SEQ ID NO: 671401 - DNA, 15 bp, Homo sapiens
tcgcagtgagcccag

SEQ ID NO: 671402 - DNA, 15 bp, Homo sapiens
cgcagtgagcccaga

SEQ ID NO: 671403 - DNA, 15 bp, Homo sapiens
gcagtgagcccagat

SEQ ID NO: 671404 - DNA, 15 bp, Homo sapiens
cagtgagcccagatc

SEQ ID NO: 671405 - DNA, 15 bp, Homo sapiens
agtgagcccagatca

SEQ ID NO: 671406 - DNA, 15 bp, Homo sapiens
gtgagcccagatcat

SEQ ID NO: 671407 - DNA, 15 bp, Homo sapiens
tgagcccagatcatg

SEQ ID NO: 671408 - DNA, 15 bp, Homo sapiens
gagcccagatcatgc

SEQ ID NO: 671409 - DNA, 15 bp, Homo sapiens
agcccagatcatgcc

SEQ ID NO: 671410 - DNA, 15 bp, Homo sapiens
gcccagatcatgcca

SEQ ID NO: 671411 - DNA, 15 bp, Homo sapiens
cccagatcatgccac

SEQ ID NO: 671412 - DNA, 15 bp, Homo sapiens
ccagatcatgccact

SEQ ID NO: 671413 - DNA, 15 bp, Homo sapiens
cagatcatgccactt

SEQ ID NO: 671414 - DNA, 15 bp, Homo sapiens
agatcatgccacttc

SEQ ID NO: 671415 - DNA, 15 bp, Homo sapiens
gatcatgccacttca

SEQ ID NO: 671416 - DNA, 15 bp, Homo sapiens
atcatgccacttcac

SEQ ID NO: 671417 - DNA, 15 bp, Homo sapiens
tcatgccacttcact

SEQ ID NO: 671418 - DNA, 15 bp, Homo sapiens
catgccacttcactc

SEQ ID NO: 671419 - DNA, 15 bp, Homo sapiens
atgccacttcactcc

SEQ ID NO: 671420 - DNA, 15 bp, Homo sapiens
tgccacttcactcca

SEQ ID NO: 671421 - DNA, 15 bp, Homo sapiens
gccacttcactccag

SEQ ID NO: 671422 - DNA, 15 bp, Homo sapiens
ccacttcactccagc

SEQ ID NO: 671423 - DNA, 15 bp, Homo sapiens
cacttcactccagct

SEQ ID NO: 671424 - DNA, 15 bp, Homo sapiens
acttcactccagctt

SEQ ID NO: 671425 - DNA, 15 bp, Homo sapiens
cttcactccagcttg

SEQ ID NO: 671426 - DNA, 15 bp, Homo sapiens
ttcactccagcttgg

SEQ ID NO: 671427 - DNA, 15 bp, Homo sapiens
tcactccagcttggg

SEQ ID NO: 671428 - DNA, 15 bp, Homo sapiens
cactccagcttgggt

SEQ ID NO: 671429 - DNA, 15 bp, Homo sapiens
actccagcttgggtg

SEQ ID NO: 671430 - DNA, 15 bp, Homo sapiens
ctccagcttgggtga

SEQ ID NO: 671431 - DNA, 15 bp, Homo sapiens
tccagcttgggtgac

SEQ ID NO: 671432 - DNA, 15 bp, Homo sapiens
ccagcttgggtgaca

SEQ ID NO: 671433 - DNA, 15 bp, Homo sapiens
cagcttgggtgacag

SEQ ID NO: 671434 - DNA, 15 bp, Homo sapiens
agcttgggtgacaga

SEQ ID NO: 671435 - DNA, 15 bp, Homo sapiens
gcttgggtgacagag

SEQ ID NO: 671436 - DNA, 15 bp, Homo sapiens
cttgggtgacagagt

SEQ ID NO: 671437 - DNA, 15 bp, Homo sapiens
ttgggtgacagagta

SEQ ID NO: 671438 - DNA, 15 bp, Homo sapiens
tgggtgacagagtaa

SEQ ID NO: 671439 - DNA, 15 bp, Homo sapiens
gggtgacagagtaag

SEQ ID NO: 671440 - DNA, 15 bp, Homo sapiens
ggtgacagagtaaga

SEQ ID NO: 671441 - DNA, 15 bp, Homo sapiens
gtgacagagtaagac

SEQ ID NO: 671442 - DNA, 15 bp, Homo sapiens
tgacagagtaagact

SEQ ID NO: 671443 - DNA, 15 bp, Homo sapiens
gacagagtaagactt

SEQ ID NO: 671444 - DNA, 15 bp, Homo sapiens
acagagtaagacttc

SEQ ID NO: 671445 - DNA, 15 bp, Homo sapiens
cagagtaagacttca

SEQ ID NO: 671446 - DNA, 15 bp, Homo sapiens
agagtaagacttcat

SEQ ID NO: 671447 - DNA, 15 bp, Homo sapiens
gagtaagacttcatc

SEQ ID NO: 671448 - DNA, 15 bp, Homo sapiens
agtaagacttcatct

SEQ ID NO: 671449 - DNA, 15 bp, Homo sapiens
gtaagacttcatctc

SEQ ID NO: 671450 - DNA, 15 bp, Homo sapiens
taagacttcatctca

SEQ ID NO: 671451 - DNA, 15 bp, Homo sapiens
aagacttcatctcaa

SEQ ID NO: 671452 - DNA, 15 bp, Homo sapiens
agacttcatctcaaa

SEQ ID NO: 671453 - DNA, 15 bp, Homo sapiens
gacttcatctcaaaa

SEQ ID NO: 671454 - DNA, 15 bp, Homo sapiens
acttcatctcaaaaa

SEQ ID NO: 671455 - DNA, 15 bp, Homo sapiens
cttcatctcaaaaaa

SEQ ID NO: 671456 - DNA, 15 bp, Homo sapiens
ttcatctcaaaaaaa

SEQ ID NO: 671457 - DNA, 15 bp, Homo sapiens
tcatctcaaaaaaaa

SEQ ID NO: 671458 - DNA, 15 bp, Homo sapiens
catctcaaaaaaaaa

SEQ ID NO: 671459 - DNA, 15 bp, Homo sapiens
atctcaaaaaaaaaa

SEQ ID NO: 671460 - DNA, 15 bp, Homo sapiens
tctcaaaaaaaaaaa

SEQ ID NO: 671461 - DNA, 15 bp, Homo sapiens
ctcaaaaaaaaaaaa

SEQ ID NO: 671462 - DNA, 15 bp, Homo sapiens
aaaaaaaaaaaaaat

SEQ ID NO: 671463 - DNA, 15 bp, Homo sapiens
aaaaaaaaaaaaatt

SEQ ID NO: 671464 - DNA, 15 bp, Homo sapiens
aaaaaaaaaaaattc

SEQ ID NO: 671465 - DNA, 15 bp, Homo sapiens
aaaaaaaaaaattca

SEQ ID NO: 671466 - DNA, 15 bp, Homo sapiens
aaaaaaaaaattcac

SEQ ID NO: 671467 - DNA, 15 bp, Homo sapiens
aaaaaaaaattcaca

SEQ ID NO: 671468 - DNA, 15 bp, Homo sapiens
aaaaaaaattcacag

SEQ ID NO: 671469 - DNA, 15 bp, Homo sapiens
aaaaaaattcacagt

SEQ ID NO: 671470 - DNA, 15 bp, Homo sapiens
aaaaaattcacagtt

SEQ ID NO: 671471 - DNA, 15 bp, Homo sapiens
aaaaattcacagttc

SEQ ID NO: 671472 - DNA, 15 bp, Homo sapiens
aaaattcacagttct

SEQ ID NO: 671473 - DNA, 15 bp, Homo sapiens
aaattcacagttctt

SEQ ID NO: 671474 - DNA, 15 bp, Homo sapiens
aattcacagttctta

SEQ ID NO: 671475 - DNA, 15 bp, Homo sapiens
attcacagttcttac

SEQ ID NO: 671476 - DNA, 15 bp, Homo sapiens
ttcacagttcttact

SEQ ID NO: 671477 - DNA, 15 bp, Homo sapiens
tcacagttcttactt

SEQ ID NO: 671478 - DNA, 15 bp, Homo sapiens
cacagttcttacttc

SEQ ID NO: 671479 - DNA, 15 bp, Homo sapiens
acagttcttacttcg

SEQ ID NO: 671480 - DNA, 15 bp, Homo sapiens
cagttcttacttcga

SEQ ID NO: 671481 - DNA, 15 bp, Homo sapiens
agttcttacttcgat

SEQ ID NO: 671482 - DNA, 15 bp, Homo sapiens
gttcttacttcgatt

SEQ ID NO: 671483 - DNA, 15 bp, Homo sapiens
ttcttacttcgatta

SEQ ID NO: 671484 - DNA, 15 bp, Homo sapiens
tcttacttcgattac

SEQ ID NO: 671485 - DNA, 15 bp, Homo sapiens
cttacttcgattacc

SEQ ID NO: 671486 - DNA, 15 bp, Homo sapiens
ttacttcgattaccc

SEQ ID NO: 671487 - DNA, 15 bp, Homo sapiens
tacttcgattaccct

SEQ ID NO: 671488 - DNA, 15 bp, Homo sapiens
acttcgattaccctt

SEQ ID NO: 671489 - DNA, 15 bp, Homo sapiens
cttcgattaccctta

SEQ ID NO: 671490 - DNA, 15 bp, Homo sapiens
ttcgattacccttag

SEQ ID NO: 671491 - DNA, 15 bp, Homo sapiens
tcgattacccttagt

SEQ ID NO: 671492 - DNA, 15 bp, Homo sapiens
cgattacccttagtt

SEQ ID NO: 671493 - DNA, 15 bp, Homo sapiens
gattacccttagtta

SEQ ID NO: 671494 - DNA, 15 bp, Homo sapiens
attacccttagttaa

SEQ ID NO: 671495 - DNA, 15 bp, Homo sapiens
ttacccttagttaag

SEQ ID NO: 671496 - DNA, 15 bp, Homo sapiens
tacccttagttaagg

SEQ ID NO: 671497 - DNA, 15 bp, Homo sapiens
acccttagttaagga

SEQ ID NO: 671498 - DNA, 15 bp, Homo sapiens
cccttagttaaggaa

SEQ ID NO: 671499 - DNA, 15 bp, Homo sapiens
ccttagttaaggaag

SEQ ID NO: 671500 - DNA, 15 bp, Homo sapiens
cttagttaaggaagt

SEQ ID NO: 671501 - DNA, 15 bp, Homo sapiens
ttagttaaggaagtg

SEQ ID NO: 671502 - DNA, 15 bp, Homo sapiens
tagttaaggaagtgc

SEQ ID NO: 671503 - DNA, 15 bp, Homo sapiens
agttaaggaagtgca

SEQ ID NO: 671504 - DNA, 15 bp, Homo sapiens
gttaaggaagtgcaa

SEQ ID NO: 671505 - DNA, 15 bp, Homo sapiens
ttaaggaagtgcaac

SEQ ID NO: 671506 - DNA, 15 bp, Homo sapiens
taaggaagtgcaact

SEQ ID NO: 671507 - DNA, 15 bp, Homo sapiens
aaggaagtgcaactt

SEQ ID NO: 671508 - DNA, 15 bp, Homo sapiens
aggaagtgcaacttt

SEQ ID NO: 671509 - DNA, 15 bp, Homo sapiens
ggaagtgcaacttta

SEQ ID NO: 671510 - DNA, 15 bp, Homo sapiens
gaagtgcaactttaa

SEQ ID NO: 671511 - DNA, 15 bp, Homo sapiens
aagtgcaactttaaa

SEQ ID NO: 671512 - DNA, 15 bp, Homo sapiens
agtgcaactttaaaa

SEQ ID NO: 671513 - DNA, 15 bp, Homo sapiens
gtgcaactttaaaat

SEQ ID NO: 671514 - DNA, 15 bp, Homo sapiens
tgcaactttaaaata

SEQ ID NO: 671515 - DNA, 15 bp, Homo sapiens
gcaactttaaaatat

SEQ ID NO: 671516 - DNA, 15 bp, Homo sapiens
caactttaaaatata

SEQ ID NO: 671517 - DNA, 15 bp, Homo sapiens
aactttaaaatataa

SEQ ID NO: 671518 - DNA, 15 bp, Homo sapiens
actttaaaatataac

SEQ ID NO: 671519 - DNA, 15 bp, Homo sapiens
ctttaaaatataaca

SEQ ID NO: 671520 - DNA, 15 bp, Homo sapiens
tttaaaatataacat

SEQ ID NO: 671521 - DNA, 15 bp, Homo sapiens
ttaaaatataacatt

SEQ ID NO: 671522 - DNA, 15 bp, Homo sapiens
taaaatataacattt

SEQ ID NO: 671523 - DNA, 15 bp, Homo sapiens
aaaatataacatttc

SEQ ID NO: 671524 - DNA, 15 bp, Homo sapiens
aaatataacatttcc

SEQ ID NO: 671525 - DNA, 15 bp, Homo sapiens
aatataacatttccc

SEQ ID NO: 671526 - DNA, 15 bp, Homo sapiens
atataacatttccct

SEQ ID NO: 671527 - DNA, 15 bp, Homo sapiens
tataacatttccctc

SEQ ID NO: 671528 - DNA, 15 bp, Homo sapiens
ataacatttccctca

SEQ ID NO: 671529 - DNA, 15 bp, Homo sapiens
taacatttccctcaa

SEQ ID NO: 671530 - DNA, 15 bp, Homo sapiens
aacatttccctcaaa

SEQ ID NO: 671531 - DNA, 15 bp, Homo sapiens
acatttccctcaaat

SEQ ID NO: 671532 - DNA, 15 bp, Homo sapiens
catttccctcaaatt

SEQ ID NO: 671533 - DNA, 15 bp, Homo sapiens
atttccctcaaatta

SEQ ID NO: 671534 - DNA, 15 bp, Homo sapiens
tttccctcaaattat

SEQ ID NO: 671535 - DNA, 15 bp, Homo sapiens
ttccctcaaattatt

SEQ ID NO: 671536 - DNA, 15 bp, Homo sapiens
tccctcaaattattg

SEQ ID NO: 671537 - DNA, 15 bp, Homo sapiens
ccctcaaattattgc

SEQ ID NO: 671538 - DNA, 15 bp, Homo sapiens
cctcaaattattgca

SEQ ID NO: 671539 - DNA, 15 bp, Homo sapiens
ctcaaattattgcat

SEQ ID NO: 671540 - DNA, 15 bp, Homo sapiens
tcaaattattgcatg

SEQ ID NO: 671541 - DNA, 15 bp, Homo sapiens
caaattattgcatga

SEQ ID NO: 671542 - DNA, 15 bp, Homo sapiens
aaattattgcatgaa

SEQ ID NO: 671543 - DNA, 15 bp, Homo sapiens
aattattgcatgaac

SEQ ID NO: 671544 - DNA, 15 bp, Homo sapiens
attattgcatgaaca

SEQ ID NO: 671545 - DNA, 15 bp, Homo sapiens
ttattgcatgaacat

SEQ ID NO: 671546 - DNA, 15 bp, Homo sapiens
tattgcatgaacata

SEQ ID NO: 671547 - DNA, 15 bp, Homo sapiens
attgcatgaacataa

SEQ ID NO: 671548 - DNA, 15 bp, Homo sapiens
ttgcatgaacataaa

SEQ ID NO: 671549 - DNA, 15 bp, Homo sapiens
tgcatgaacataaaa

SEQ ID NO: 671550 - DNA, 15 bp, Homo sapiens
gcatgaacataaaaa

SEQ ID NO: 671551 - DNA, 15 bp, Homo sapiens
catgaacataaaaat

SEQ ID NO: 671552 - DNA, 15 bp, Homo sapiens
atgaacataaaaatt

SEQ ID NO: 671553 - DNA, 15 bp, Homo sapiens
tgaacataaaaattt

SEQ ID NO: 671554 - DNA, 15 bp, Homo sapiens
gaacataaaaatttt

SEQ ID NO: 671555 - DNA, 15 bp, Homo sapiens
aacataaaaatttta

SEQ ID NO: 671556 - DNA, 15 bp, Homo sapiens
acataaaaattttaa

SEQ ID NO: 671557 - DNA, 15 bp, Homo sapiens
cataaaaattttaaa

SEQ ID NO: 671558 - DNA, 15 bp, Homo sapiens
ataaaaattttaaat

SEQ ID NO: 671559 - DNA, 15 bp, Homo sapiens
taaaaattttaaata

SEQ ID NO: 671560 - DNA, 15 bp, Homo sapiens
aaaaattttaaatag

SEQ ID NO: 671561 - DNA, 15 bp, Homo sapiens
aaaattttaaataga

SEQ ID NO: 671562 - DNA, 15 bp, Homo sapiens
aaattttaaatagag

SEQ ID NO: 671563 - DNA, 15 bp, Homo sapiens
aattttaaatagagt

SEQ ID NO: 671564 - DNA, 15 bp, Homo sapiens
attttaaatagagtt

SEQ ID NO: 671565 - DNA, 15 bp, Homo sapiens
ttttaaatagagttt

SEQ ID NO: 671566 - DNA, 15 bp, Homo sapiens
tttaaatagagtttg

SEQ ID NO: 671567 - DNA, 15 bp, Homo sapiens
ttaaatagagtttgt

SEQ ID NO: 671568 - DNA, 15 bp, Homo sapiens
taaatagagtttgta

SEQ ID NO: 671569 - DNA, 15 bp, Homo sapiens
aaatagagtttgtat

SEQ ID NO: 671570 - DNA, 15 bp, Homo sapiens
aatagagtttgtatt

SEQ ID NO: 671571 - DNA, 15 bp, Homo sapiens
atagagtttgtattt

SEQ ID NO: 671572 - DNA, 15 bp, Homo sapiens
tagagtttgtatttg

SEQ ID NO: 671573 - DNA, 15 bp, Homo sapiens
agagtttgtatttgt

SEQ ID NO: 671574 - DNA, 15 bp, Homo sapiens
gagtttgtatttgtt

SEQ ID NO: 671575 - DNA, 15 bp, Homo sapiens
agtttgtatttgttc

SEQ ID NO: 671576 - DNA, 15 bp, Homo sapiens
gtttgtatttgttct

SEQ ID NO: 671577 - DNA, 15 bp, Homo sapiens
tttgtatttgttcta

SEQ ID NO: 671578 - DNA, 15 bp, Homo sapiens
ttgtatttgttctat

SEQ ID NO: 671579 - DNA, 15 bp, Homo sapiens
tgtatttgttctatt

SEQ ID NO: 671580 - DNA, 15 bp, Homo sapiens
gtatttgttctattt

SEQ ID NO: 671581 - DNA, 15 bp, Homo sapiens
tatttgttctatttg

SEQ ID NO: 671582 - DNA, 15 bp, Homo sapiens
atttgttctatttgt

SEQ ID NO: 671583 - DNA, 15 bp, Homo sapiens
tttgttctatttgtt

SEQ ID NO: 671584 - DNA, 15 bp, Homo sapiens
ttgttctatttgttt

SEQ ID NO: 671585 - DNA, 15 bp, Homo sapiens
tgttctatttgtttt

SEQ ID NO: 671586 - DNA, 15 bp, Homo sapiens
gttctatttgtttta

SEQ ID NO: 671587 - DNA, 15 bp, Homo sapiens
ttctatttgttttaa

SEQ ID NO: 671588 - DNA, 15 bp, Homo sapiens
tctatttgttttaat

SEQ ID NO: 671589 - DNA, 15 bp, Homo sapiens
ctatttgttttaatc

SEQ ID NO: 671590 - DNA, 15 bp, Homo sapiens
tatttgttttaatca

SEQ ID NO: 671591 - DNA, 15 bp, Homo sapiens
atttgttttaatcat

SEQ ID NO: 671592 - DNA, 15 bp, Homo sapiens
tttgttttaatcatt

SEQ ID NO: 671593 - DNA, 15 bp, Homo sapiens
ttgttttaatcatta

SEQ ID NO: 671594 - DNA, 15 bp, Homo sapiens
tgttttaatcattac

SEQ ID NO: 671595 - DNA, 15 bp, Homo sapiens
gttttaatcattacc

SEQ ID NO: 671596 - DNA, 15 bp, Homo sapiens
ttttaatcattacct

SEQ ID NO: 671597 - DNA, 15 bp, Homo sapiens
tttaatcattacctg

SEQ ID NO: 671598 - DNA, 15 bp, Homo sapiens
ttaatcattacctgt

SEQ ID NO: 671599 - DNA, 15 bp, Homo sapiens
taatcattacctgtg

SEQ ID NO: 671600 - DNA, 15 bp, Homo sapiens
aatcattacctgtga

SEQ ID NO: 671601 - DNA, 15 bp, Homo sapiens
atcattacctgtgat

SEQ ID NO: 671602 - DNA, 15 bp, Homo sapiens
tcattacctgtgatg

SEQ ID NO: 671603 - DNA, 15 bp, Homo sapiens
cattacctgtgatgg

SEQ ID NO: 671604 - DNA, 15 bp, Homo sapiens
attacctgtgatggt

SEQ ID NO: 671605 - DNA, 15 bp, Homo sapiens
ttacctgtgatggtt

SEQ ID NO: 671606 - DNA, 15 bp, Homo sapiens
tacctgtgatggtta

SEQ ID NO: 671607 - DNA, 15 bp, Homo sapiens
acctgtgatggttaa

SEQ ID NO: 671608 - DNA, 15 bp, Homo sapiens
cctgtgatggttaag

SEQ ID NO: 671609 - DNA, 15 bp, Homo sapiens
ctgtgatggttaagt

SEQ ID NO: 671610 - DNA, 15 bp, Homo sapiens
tgtgatggttaagtg

SEQ ID NO: 671611 - DNA, 15 bp, Homo sapiens
gtgatggttaagtgg

SEQ ID NO: 671612 - DNA, 15 bp, Homo sapiens
tgatggttaagtggc

SEQ ID NO: 671613 - DNA, 15 bp, Homo sapiens
gatggttaagtggca

SEQ ID NO: 671614 - DNA, 15 bp, Homo sapiens
atggttaagtggcac

SEQ ID NO: 671615 - DNA, 15 bp, Homo sapiens
tggttaagtggcact

SEQ ID NO: 671616 - DNA, 15 bp, Homo sapiens
ggttaagtggcactc

SEQ ID NO: 671617 - DNA, 15 bp, Homo sapiens
gttaagtggcactct

SEQ ID NO: 671618 - DNA, 15 bp, Homo sapiens
ttaagtggcactctg

SEQ ID NO: 671619 - DNA, 15 bp, Homo sapiens
taagtggcactctgc

SEQ ID NO: 671620 - DNA, 15 bp, Homo sapiens
aagtggcactctgcc

SEQ ID NO: 671621 - DNA, 15 bp, Homo sapiens
agtggcactctgcca

SEQ ID NO: 671622 - DNA, 15 bp, Homo sapiens
gtggcactctgccag

SEQ ID NO: 671623 - DNA, 15 bp, Homo sapiens
tggcactctgccagt

SEQ ID NO: 671624 - DNA, 15 bp, Homo sapiens
ggcactctgccagtt

SEQ ID NO: 671625 - DNA, 15 bp, Homo sapiens
gcactctgccagttt

SEQ ID NO: 671626 - DNA, 15 bp, Homo sapiens
cactctgccagtttt

SEQ ID NO: 671627 - DNA, 15 bp, Homo sapiens
actctgccagttttg

SEQ ID NO: 671628 - DNA, 15 bp, Homo sapiens
ctctgccagttttgc

SEQ ID NO: 671629 - DNA, 15 bp, Homo sapiens
tctgccagttttgcc

SEQ ID NO: 671630 - DNA, 15 bp, Homo sapiens
ctgccagttttgcct

SEQ ID NO: 671631 - DNA, 15 bp, Homo sapiens
tgccagttttgcctg

SEQ ID NO: 671632 - DNA, 15 bp, Homo sapiens
gccagttttgcctgg

SEQ ID NO: 671633 - DNA, 15 bp, Homo sapiens
ccagttttgcctggc

SEQ ID NO: 671634 - DNA, 15 bp, Homo sapiens
cagttttgcctggca

SEQ ID NO: 671635 - DNA, 15 bp, Homo sapiens
agttttgcctggcaa

SEQ ID NO: 671636 - DNA, 15 bp, Homo sapiens
gttttgcctggcaat

SEQ ID NO: 671637 - DNA, 15 bp, Homo sapiens
ttttgcctggcaata

SEQ ID NO: 671638 - DNA, 15 bp, Homo sapiens
tttgcctggcaataa

SEQ ID NO: 671639 - DNA, 15 bp, Homo sapiens
ttgcctggcaataaa

SEQ ID NO: 671640 - DNA, 15 bp, Homo sapiens
tgcctggcaataaaa

SEQ ID NO: 671641 - DNA, 15 bp, Homo sapiens
gcctggcaataaaat

SEQ ID NO: 671642 - DNA, 15 bp, Homo sapiens
cctggcaataaaata

SEQ ID NO: 671643 - DNA, 15 bp, Homo sapiens
ctggcaataaaatac

SEQ ID NO: 671644 - DNA, 15 bp, Homo sapiens
tggcaataaaataca

SEQ ID NO: 671645 - DNA, 15 bp, Homo sapiens
ggcaataaaatacac

SEQ ID NO: 671646 - DNA, 15 bp, Homo sapiens
gcaataaaatacaca

SEQ ID NO: 671647 - DNA, 15 bp, Homo sapiens
caataaaatacacaa

SEQ ID NO: 671648 - DNA, 15 bp, Homo sapiens
aataaaatacacaaa

SEQ ID NO: 671649 - DNA, 15 bp, Homo sapiens
ataaaatacacaaaa

SEQ ID NO: 671650 - DNA, 15 bp, Homo sapiens
taaaatacacaaaat

SEQ ID NO: 671651 - DNA, 15 bp, Homo sapiens
aaaatacacaaaatg

SEQ ID NO: 671652 - DNA, 15 bp, Homo sapiens
aaatacacaaaatgt

SEQ ID NO: 671653 - DNA, 15 bp, Homo sapiens
aatacacaaaatgta

SEQ ID NO: 671654 - DNA, 15 bp, Homo sapiens
atacacaaaatgtat

SEQ ID NO: 671655 - DNA, 15 bp, Homo sapiens
tacacaaaatgtatt

SEQ ID NO: 671656 - DNA, 15 bp, Homo sapiens
acacaaaatgtattc

SEQ ID NO: 671657 - DNA, 15 bp, Homo sapiens
cacaaaatgtattct

SEQ ID NO: 671658 - DNA, 15 bp, Homo sapiens
acaaaatgtattcta

SEQ ID NO: 671659 - DNA, 15 bp, Homo sapiens
caaaatgtattctac

SEQ ID NO: 671660 - DNA, 15 bp, Homo sapiens
aaaatgtattctact

SEQ ID NO: 671661 - DNA, 15 bp, Homo sapiens
aaatgtattctactt

SEQ ID NO: 671662 - DNA, 15 bp, Homo sapiens
aatgtattctacttt

SEQ ID NO: 671663 - DNA, 15 bp, Homo sapiens
atgtattctacttta

SEQ ID NO: 671664 - DNA, 15 bp, Homo sapiens
tgtattctactttag

SEQ ID NO: 671665 - DNA, 15 bp, Homo sapiens
gtattctactttagc

SEQ ID NO: 671666 - DNA, 15 bp, Homo sapiens
tattctactttagcc

SEQ ID NO: 671667 - DNA, 15 bp, Homo sapiens
attctactttagcca

SEQ ID NO: 671668 - DNA, 15 bp, Homo sapiens
ttctactttagccaa

SEQ ID NO: 671669 - DNA, 15 bp, Homo sapiens
tctactttagccaac

SEQ ID NO: 671670 - DNA, 15 bp, Homo sapiens
ctactttagccaaca

SEQ ID NO: 671671 - DNA, 15 bp, Homo sapiens
tactttagccaacac

SEQ ID NO: 671672 - DNA, 15 bp, Homo sapiens
actttagccaacact

SEQ ID NO: 671673 - DNA, 15 bp, Homo sapiens
ctttagccaacactt

SEQ ID NO: 671674 - DNA, 15 bp, Homo sapiens
tttagccaacacttc

SEQ ID NO: 671675 - DNA, 15 bp, Homo sapiens
ttagccaacacttca

SEQ ID NO: 671676 - DNA, 15 bp, Homo sapiens
tagccaacacttcag

SEQ ID NO: 671677 - DNA, 15 bp, Homo sapiens
agccaacacttcaga

SEQ ID NO: 671678 - DNA, 15 bp, Homo sapiens
gccaacacttcagag

SEQ ID NO: 671679 - DNA, 15 bp, Homo sapiens
ccaacacttcagagt

SEQ ID NO: 671680 - DNA, 15 bp, Homo sapiens
caacacttcagagtt

SEQ ID NO: 671681 - DNA, 15 bp, Homo sapiens
aacacttcagagttg

SEQ ID NO: 671682 - DNA, 15 bp, Homo sapiens
acacttcagagttga

SEQ ID NO: 671683 - DNA, 15 bp, Homo sapiens
cacttcagagttgag

SEQ ID NO: 671684 - DNA, 15 bp, Homo sapiens
acttcagagttgaga

SEQ ID NO: 671685 - DNA, 15 bp, Homo sapiens
cttcagagttgagaa

SEQ ID NO: 671686 - DNA, 15 bp, Homo sapiens
ttcagagttgagaaa

SEQ ID NO: 671687 - DNA, 15 bp, Homo sapiens
tcagagttgagaaat

SEQ ID NO: 671688 - DNA, 15 bp, Homo sapiens
cagagttgagaaatt

SEQ ID NO: 671689 - DNA, 15 bp, Homo sapiens
agagttgagaaattt

SEQ ID NO: 671690 - DNA, 15 bp, Homo sapiens
gagttgagaaatttt

SEQ ID NO: 671691 - DNA, 15 bp, Homo sapiens
agttgagaaatttta

SEQ ID NO: 671692 - DNA, 15 bp, Homo sapiens
gttgagaaattttac

SEQ ID NO: 671693 - DNA, 15 bp, Homo sapiens
ttgagaaattttact

SEQ ID NO: 671694 - DNA, 15 bp, Homo sapiens
tgagaaattttactg

SEQ ID NO: 671695 - DNA, 15 bp, Homo sapiens
gagaaattttactgg

SEQ ID NO: 671696 - DNA, 15 bp, Homo sapiens
agaaattttactggc

SEQ ID NO: 671697 - DNA, 15 bp, Homo sapiens
gaaattttactggca

SEQ ID NO: 671698 - DNA, 15 bp, Homo sapiens
aaattttactggcaa

SEQ ID NO: 671699 - DNA, 15 bp, Homo sapiens
aattttactggcaat

SEQ ID NO: 671700 - DNA, 15 bp, Homo sapiens
attttactggcaatt

SEQ ID NO: 671701 - DNA, 15 bp, Homo sapiens
ttttactggcaattt

SEQ ID NO: 671702 - DNA, 15 bp, Homo sapiens
tttactggcaatttt

SEQ ID NO: 671703 - DNA, 15 bp, Homo sapiens
ttactggcaattttt

SEQ ID NO: 671704 - DNA, 15 bp, Homo sapiens
tactggcaatttttg

SEQ ID NO: 671705 - DNA, 15 bp, Homo sapiens
actggcaatttttgc

SEQ ID NO: 671706 - DNA, 15 bp, Homo sapiens
ctggcaatttttgct

SEQ ID NO: 671707 - DNA, 15 bp, Homo sapiens
tggcaatttttgctc

SEQ ID NO: 671708 - DNA, 15 bp, Homo sapiens
ggcaatttttgctca

SEQ ID NO: 671709 - DNA, 15 bp, Homo sapiens
gcaatttttgctcat

SEQ ID NO: 671710 - DNA, 15 bp, Homo sapiens
caatttttgctcatc

SEQ ID NO: 671711 - DNA, 15 bp, Homo sapiens
aatttttgctcatcc

SEQ ID NO: 671712 - DNA, 15 bp, Homo sapiens
atttttgctcatcct

SEQ ID NO: 671713 - DNA, 15 bp, Homo sapiens
tttttgctcatcctg

SEQ ID NO: 671714 - DNA, 15 bp, Homo sapiens
ttttgctcatcctga

SEQ ID NO: 671715 - DNA, 15 bp, Homo sapiens
tttgctcatcctgac

SEQ ID NO: 671716 - DNA, 15 bp, Homo sapiens
ttgctcatcctgacg

SEQ ID NO: 671717 - DNA, 15 bp, Homo sapiens
tgctcatcctgacgt

SEQ ID NO: 671718 - DNA, 15 bp, Homo sapiens
gctcatcctgacgtt

SEQ ID NO: 671719 - DNA, 15 bp, Homo sapiens
ctcatcctgacgttg

SEQ ID NO: 671720 - DNA, 15 bp, Homo sapiens
tcatcctgacgttga

SEQ ID NO: 671721 - DNA, 15 bp, Homo sapiens
catcctgacgttgat

SEQ ID NO: 671722 - DNA, 15 bp, Homo sapiens
atcctgacgttgatg

SEQ ID NO: 671723 - DNA, 15 bp, Homo sapiens
tcctgacgttgatga

SEQ ID NO: 671724 - DNA, 15 bp, Homo sapiens
cctgacgttgatgat

SEQ ID NO: 671725 - DNA, 15 bp, Homo sapiens
ctgacgttgatgatt

SEQ ID NO: 671726 - DNA, 15 bp, Homo sapiens
tgacgttgatgattt

SEQ ID NO: 671727 - DNA, 15 bp, Homo sapiens
gacgttgatgattta

SEQ ID NO: 671728 - DNA, 15 bp, Homo sapiens
acgttgatgatttac

SEQ ID NO: 671729 - DNA, 15 bp, Homo sapiens
cgttgatgatttaca

SEQ ID NO: 671730 - DNA, 15 bp, Homo sapiens
gttgatgatttacac

SEQ ID NO: 671731 - DNA, 15 bp, Homo sapiens
ttgatgatttacaca

SEQ ID NO: 671732 - DNA, 15 bp, Homo sapiens
tgatgatttacacag

SEQ ID NO: 671733 - DNA, 15 bp, Homo sapiens
gatgatttacacagt

SEQ ID NO: 671734 - DNA, 15 bp, Homo sapiens
atgatttacacagtg

SEQ ID NO: 671735 - DNA, 15 bp, Homo sapiens
tgatttacacagtga

SEQ ID NO: 671736 - DNA, 15 bp, Homo sapiens
gatttacacagtgaa

SEQ ID NO: 671737 - DNA, 15 bp, Homo sapiens
atttacacagtgaac

SEQ ID NO: 671738 - DNA, 15 bp, Homo sapiens
tttacacagtgaact

SEQ ID NO: 671739 - DNA, 15 bp, Homo sapiens
ttacacagtgaacta

SEQ ID NO: 671740 - DNA, 15 bp, Homo sapiens
tacacagtgaactac

SEQ ID NO: 671741 - DNA, 15 bp, Homo sapiens
acacagtgaactacc

SEQ ID NO: 671742 - DNA, 15 bp, Homo sapiens
cacagtgaactacct

SEQ ID NO: 671743 - DNA, 15 bp, Homo sapiens
acagtgaactacctg

SEQ ID NO: 671744 - DNA, 15 bp, Homo sapiens
cagtgaactacctgt

SEQ ID NO: 671745 - DNA, 15 bp, Homo sapiens
agtgaactacctgta

SEQ ID NO: 671746 - DNA, 15 bp, Homo sapiens
gtgaactacctgtat

SEQ ID NO: 671747 - DNA, 15 bp, Homo sapiens
tgaactacctgtatc

SEQ ID NO: 671748 - DNA, 15 bp, Homo sapiens
gaactacctgtatct

SEQ ID NO: 671749 - DNA, 15 bp, Homo sapiens
aactacctgtatctc

SEQ ID NO: 671750 - DNA, 15 bp, Homo sapiens
actacctgtatctct

SEQ ID NO: 671751 - DNA, 15 bp, Homo sapiens
ctacctgtatctctt

SEQ ID NO: 671752 - DNA, 15 bp, Homo sapiens
tacctgtatctcttt

SEQ ID NO: 671753 - DNA, 15 bp, Homo sapiens
acctgtatctctttt

SEQ ID NO: 671754 - DNA, 15 bp, Homo sapiens
cctgtatctcttttg

SEQ ID NO: 671755 - DNA, 15 bp, Homo sapiens
ctgtatctcttttgt

SEQ ID NO: 671756 - DNA, 15 bp, Homo sapiens
tgtatctcttttgtt

SEQ ID NO: 671757 - DNA, 15 bp, Homo sapiens
gtatctcttttgttt

SEQ ID NO: 671758 - DNA, 15 bp, Homo sapiens
tatctcttttgtttt

SEQ ID NO: 671759 - DNA, 15 bp, Homo sapiens
atctcttttgttttg

SEQ ID NO: 671760 - DNA, 15 bp, Homo sapiens
tctcttttgttttga

SEQ ID NO: 671761 - DNA, 15 bp, Homo sapiens
ctcttttgttttgat

SEQ ID NO: 671762 - DNA, 15 bp, Homo sapiens
tcttttgttttgatt

SEQ ID NO: 671763 - DNA, 15 bp, Homo sapiens
cttttgttttgattc

SEQ ID NO: 671764 - DNA, 15 bp, Homo sapiens
ttttgttttgattct

SEQ ID NO: 671765 - DNA, 15 bp, Homo sapiens
tttgttttgattctt

SEQ ID NO: 671766 - DNA, 15 bp, Homo sapiens
ttgttttgattcttc

SEQ ID NO: 671767 - DNA, 15 bp, Homo sapiens
tgttttgattcttcc

SEQ ID NO: 671768 - DNA, 15 bp, Homo sapiens
gttttgattcttcct

SEQ ID NO: 671769 - DNA, 15 bp, Homo sapiens
ttttgattcttcctt

SEQ ID NO: 671770 - DNA, 15 bp, Homo sapiens
tttgattcttccttt

SEQ ID NO: 671771 - DNA, 15 bp, Homo sapiens
ttgattcttcctttg

SEQ ID NO: 671772 - DNA, 15 bp, Homo sapiens
tgattcttcctttgc

SEQ ID NO: 671773 - DNA, 15 bp, Homo sapiens
gattcttcctttgct

SEQ ID NO: 671774 - DNA, 15 bp, Homo sapiens
attcttcctttgctt

SEQ ID NO: 671775 - DNA, 15 bp, Homo sapiens
ttcttcctttgcttt

SEQ ID NO: 671776 - DNA, 15 bp, Homo sapiens
tcttcctttgctttt

SEQ ID NO: 671777 - DNA, 15 bp, Homo sapiens
cttcctttgcttttc

SEQ ID NO: 671778 - DNA, 15 bp, Homo sapiens
ttcctttgcttttct

SEQ ID NO: 671779 - DNA, 15 bp, Homo sapiens
tcctttgcttttctc

SEQ ID NO: 671780 - DNA, 15 bp, Homo sapiens
cctttgcttttctcc

SEQ ID NO: 671781 - DNA, 15 bp, Homo sapiens
ctttgcttttctcct

SEQ ID NO: 671782 - DNA, 15 bp, Homo sapiens
tttgcttttctcctg

SEQ ID NO: 671783 - DNA, 15 bp, Homo sapiens
ttgcttttctcctga

SEQ ID NO: 671784 - DNA, 15 bp, Homo sapiens
tgcttttctcctgaa

SEQ ID NO: 671785 - DNA, 15 bp, Homo sapiens
gcttttctcctgaaa

SEQ ID NO: 671786 - DNA, 15 bp, Homo sapiens
cttttctcctgaaac

SEQ ID NO: 671787 - DNA, 15 bp, Homo sapiens
ttttctcctgaaaca

SEQ ID NO: 671788 - DNA, 15 bp, Homo sapiens
tttctcctgaaacat

SEQ ID NO: 671789 - DNA, 15 bp, Homo sapiens
ttctcctgaaacatc

SEQ ID NO: 671790 - DNA, 15 bp, Homo sapiens
tctcctgaaacatct

SEQ ID NO: 671791 - DNA, 15 bp, Homo sapiens
ctcctgaaacatctt

SEQ ID NO: 671792 - DNA, 15 bp, Homo sapiens
tcctgaaacatcttg

SEQ ID NO: 671793 - DNA, 15 bp, Homo sapiens
cctgaaacatcttgt

SEQ ID NO: 671794 - DNA, 15 bp, Homo sapiens
ctgaaacatcttgtt

SEQ ID NO: 671795 - DNA, 15 bp, Homo sapiens
tgaaacatcttgttt

SEQ ID NO: 671796 - DNA, 15 bp, Homo sapiens
gaaacatcttgtttg

SEQ ID NO: 671797 - DNA, 15 bp, Homo sapiens
aaacatcttgtttgg

SEQ ID NO: 671798 - DNA, 15 bp, Homo sapiens
aacatcttgtttggc

SEQ ID NO: 671799 - DNA, 15 bp, Homo sapiens
acatcttgtttggct

SEQ ID NO: 671800 - DNA, 15 bp, Homo sapiens
catcttgtttggcta

SEQ ID NO: 671801 - DNA, 15 bp, Homo sapiens
atcttgtttggctat

SEQ ID NO: 671802 - DNA, 15 bp, Homo sapiens
tcttgtttggctatc

SEQ ID NO: 671803 - DNA, 15 bp, Homo sapiens
cttgtttggctatct

SEQ ID NO: 671804 - DNA, 15 bp, Homo sapiens
ttgtttggctatctt

SEQ ID NO: 671805 - DNA, 15 bp, Homo sapiens
tgtttggctatctta

SEQ ID NO: 671806 - DNA, 15 bp, Homo sapiens
gtttggctatcttat

SEQ ID NO: 671807 - DNA, 15 bp, Homo sapiens
tttggctatcttatt

SEQ ID NO: 671808 - DNA, 15 bp, Homo sapiens
ttggctatcttatta

SEQ ID NO: 671809 - DNA, 15 bp, Homo sapiens
tggctatcttattat

SEQ ID NO: 671810 - DNA, 15 bp, Homo sapiens
ggctatcttattatt

SEQ ID NO: 671811 - DNA, 15 bp, Homo sapiens
gctatcttattattc

SEQ ID NO: 671812 - DNA, 15 bp, Homo sapiens
ctatcttattattca

SEQ ID NO: 671813 - DNA, 15 bp, Homo sapiens
tatcttattattcag

SEQ ID NO: 671814 - DNA, 15 bp, Homo sapiens
atcttattattcagc

SEQ ID NO: 671815 - DNA, 15 bp, Homo sapiens
tcttattattcagca

SEQ ID NO: 671816 - DNA, 15 bp, Homo sapiens
cttattattcagcag

SEQ ID NO: 671817 - DNA, 15 bp, Homo sapiens
ttattattcagcaga

SEQ ID NO: 671818 - DNA, 15 bp, Homo sapiens
tattattcagcagaa

SEQ ID NO: 671819 - DNA, 15 bp, Homo sapiens
attattcagcagaat

SEQ ID NO: 671820 - DNA, 15 bp, Homo sapiens
ttattcagcagaatg

SEQ ID NO: 671821 - DNA, 15 bp, Homo sapiens
tattcagcagaatgc

SEQ ID NO: 671822 - DNA, 15 bp, Homo sapiens
attcagcagaatgcc

SEQ ID NO: 671823 - DNA, 15 bp, Homo sapiens
ttcagcagaatgccc

SEQ ID NO: 671824 - DNA, 15 bp, Homo sapiens
tcagcagaatgccca

SEQ ID NO: 671825 - DNA, 15 bp, Homo sapiens
cagcagaatgcccat

SEQ ID NO: 671826 - DNA, 15 bp, Homo sapiens
agcagaatgcccatg

SEQ ID NO: 671827 - DNA, 15 bp, Homo sapiens
gcagaatgcccatga

SEQ ID NO: 671828 - DNA, 15 bp, Homo sapiens
cagaatgcccatgag

SEQ ID NO: 671829 - DNA, 15 bp, Homo sapiens
agaatgcccatgagg

SEQ ID NO: 671830 - DNA, 15 bp, Homo sapiens
gaatgcccatgagga

SEQ ID NO: 671831 - DNA, 15 bp, Homo sapiens
aatgcccatgaggag

SEQ ID NO: 671832 - DNA, 15 bp, Homo sapiens
atgcccatgaggagg

SEQ ID NO: 671833 - DNA, 15 bp, Homo sapiens
tgcccatgaggaggt

SEQ ID NO: 671834 - DNA, 15 bp, Homo sapiens
gcccatgaggaggtc

SEQ ID NO: 671835 - DNA, 15 bp, Homo sapiens
cccatgaggaggtct

SEQ ID NO: 671836 - DNA, 15 bp, Homo sapiens
ccatgaggaggtctg

SEQ ID NO: 671837 - DNA, 15 bp, Homo sapiens
catgaggaggtctgg

SEQ ID NO: 671838 - DNA, 15 bp, Homo sapiens
atgaggaggtctgga

SEQ ID NO: 671839 - DNA, 15 bp, Homo sapiens
tgaggaggtctggaa

SEQ ID NO: 671840 - DNA, 15 bp, Homo sapiens
gaggaggtctggaag

SEQ ID NO: 671841 - DNA, 15 bp, Homo sapiens
aggaggtctggaagt

SEQ ID NO: 671842 - DNA, 15 bp, Homo sapiens
ggaggtctggaagta

SEQ ID NO: 671843 - DNA, 15 bp, Homo sapiens
gaggtctggaagtat

SEQ ID NO: 671844 - DNA, 15 bp, Homo sapiens
aggtctggaagtatt

SEQ ID NO: 671845 - DNA, 15 bp, Homo sapiens
ggtctggaagtattg

SEQ ID NO: 671846 - DNA, 15 bp, Homo sapiens
gtctggaagtattgt

SEQ ID NO: 671847 - DNA, 15 bp, Homo sapiens
tctggaagtattgtt

SEQ ID NO: 671848 - DNA, 15 bp, Homo sapiens
ctggaagtattgttt

SEQ ID NO: 671849 - DNA, 15 bp, Homo sapiens
tggaagtattgtttt

SEQ ID NO: 671850 - DNA, 15 bp, Homo sapiens
ggaagtattgttttt

SEQ ID NO: 671851 - DNA, 15 bp, Homo sapiens
gaagtattgttttta

SEQ ID NO: 671852 - DNA, 15 bp, Homo sapiens
aagtattgtttttat

SEQ ID NO: 671853 - DNA, 15 bp, Homo sapiens
agtattgtttttata

SEQ ID NO: 671854 - DNA, 15 bp, Homo sapiens
gtattgtttttatag

SEQ ID NO: 671855 - DNA, 15 bp, Homo sapiens
tattgtttttatagt

SEQ ID NO: 671856 - DNA, 15 bp, Homo sapiens
attgtttttatagta

SEQ ID NO: 671857 - DNA, 15 bp, Homo sapiens
ttgtttttatagtaa

SEQ ID NO: 671858 - DNA, 15 bp, Homo sapiens
tgtttttatagtaat

SEQ ID NO: 671859 - DNA, 15 bp, Homo sapiens
gtttttatagtaatt

SEQ ID NO: 671860 - DNA, 15 bp, Homo sapiens
tttttatagtaatta

SEQ ID NO: 671861 - DNA, 15 bp, Homo sapiens
ttttatagtaattaa

SEQ ID NO: 671862 - DNA, 15 bp, Homo sapiens
tttatagtaattaaa

SEQ ID NO: 671863 - DNA, 15 bp, Homo sapiens
ttatagtaattaaaa

SEQ ID NO: 671864 - DNA, 15 bp, Homo sapiens
tatagtaattaaaaa

SEQ ID NO: 671865 - DNA, 15 bp, Homo sapiens
atagtaattaaaaat

SEQ ID NO: 671866 - DNA, 15 bp, Homo sapiens
tagtaattaaaaatt

SEQ ID NO: 671867 - DNA, 15 bp, Homo sapiens
agtaattaaaaattg

SEQ ID NO: 671868 - DNA, 15 bp, Homo sapiens
gtaattaaaaattgt

SEQ ID NO: 671869 - DNA, 15 bp, Homo sapiens
taattaaaaattgtg

SEQ ID NO: 671870 - DNA, 15 bp, Homo sapiens
aattaaaaattgtga

SEQ ID NO: 671871 - DNA, 15 bp, Homo sapiens
attaaaaattgtgac

SEQ ID NO: 671872 - DNA, 15 bp, Homo sapiens
ttaaaaattgtgaca

SEQ ID NO: 671873 - DNA, 15 bp, Homo sapiens
taaaaattgtgacac

SEQ ID NO: 671874 - DNA, 15 bp, Homo sapiens
aaaaattgtgacaca

SEQ ID NO: 671875 - DNA, 15 bp, Homo sapiens
aaaattgtgacacaa

SEQ ID NO: 671876 - DNA, 15 bp, Homo sapiens
aaattgtgacacaag

SEQ ID NO: 671877 - DNA, 15 bp, Homo sapiens
aattgtgacacaagt

SEQ ID NO: 671878 - DNA, 15 bp, Homo sapiens
attgtgacacaagtc

SEQ ID NO: 671879 - DNA, 15 bp, Homo sapiens
ttgtgacacaagtcc

SEQ ID NO: 671880 - DNA, 15 bp, Homo sapiens
tgtgacacaagtcca

SEQ ID NO: 671881 - DNA, 15 bp, Homo sapiens
gtgacacaagtccaa

SEQ ID NO: 671882 - DNA, 15 bp, Homo sapiens
tgacacaagtccaaa

SEQ ID NO: 671883 - DNA, 15 bp, Homo sapiens
gacacaagtccaaag

SEQ ID NO: 671884 - DNA, 15 bp, Homo sapiens
acacaagtccaaagt

SEQ ID NO: 671885 - DNA, 15 bp, Homo sapiens
cacaagtccaaagtg

SEQ ID NO: 671886 - DNA, 15 bp, Homo sapiens
acaagtccaaagtgg

SEQ ID NO: 671887 - DNA, 15 bp, Homo sapiens
caagtccaaagtggg

SEQ ID NO: 671888 - DNA, 15 bp, Homo sapiens
aagtccaaagtgggt

SEQ ID NO: 671889 - DNA, 15 bp, Homo sapiens
agtccaaagtgggtg

SEQ ID NO: 671890 - DNA, 15 bp, Homo sapiens
gtccaaagtgggtgg

SEQ ID NO: 671891 - DNA, 15 bp, Homo sapiens
tccaaagtgggtgga

SEQ ID NO: 671892 - DNA, 15 bp, Homo sapiens
ccaaagtgggtggat

SEQ ID NO: 671893 - DNA, 15 bp, Homo sapiens
caaagtgggtggatc

SEQ ID NO: 671894 - DNA, 15 bp, Homo sapiens
aaagtgggtggatca

SEQ ID NO: 671895 - DNA, 15 bp, Homo sapiens
aagtgggtggatcac

SEQ ID NO: 671896 - DNA, 15 bp, Homo sapiens
agtgggtggatcacg

SEQ ID NO: 671897 - DNA, 15 bp, Homo sapiens
gtgggtggatcacga

SEQ ID NO: 671898 - DNA, 15 bp, Homo sapiens
tgggtggatcacgag

SEQ ID NO: 671899 - DNA, 15 bp, Homo sapiens
gggtggatcacgagg

SEQ ID NO: 671900 - DNA, 15 bp, Homo sapiens
ggtggatcacgaggt

SEQ ID NO: 671901 - DNA, 15 bp, Homo sapiens
gtggatcacgaggtc

SEQ ID NO: 671902 - DNA, 15 bp, Homo sapiens
tggatcacgaggtca

SEQ ID NO: 671903 - DNA, 15 bp, Homo sapiens
ggatcacgaggtcag

SEQ ID NO: 671904 - DNA, 15 bp, Homo sapiens
gatcacgaggtcagg

SEQ ID NO: 671905 - DNA, 15 bp, Homo sapiens
atcacgaggtcagga

SEQ ID NO: 671906 - DNA, 15 bp, Homo sapiens
tcacgaggtcaggag

SEQ ID NO: 671907 - DNA, 15 bp, Homo sapiens
cacgaggtcaggaga

SEQ ID NO: 671908 - DNA, 15 bp, Homo sapiens
acgaggtcaggagat

SEQ ID NO: 671909 - DNA, 15 bp, Homo sapiens
cgaggtcaggagatt

SEQ ID NO: 671910 - DNA, 15 bp, Homo sapiens
gaggtcaggagattg

SEQ ID NO: 671911 - DNA, 15 bp, Homo sapiens
aggtcaggagattga

SEQ ID NO: 671912 - DNA, 15 bp, Homo sapiens
ggtcaggagattgag

SEQ ID NO: 671913 - DNA, 15 bp, Homo sapiens
gtcaggagattgaga

SEQ ID NO: 671914 - DNA, 15 bp, Homo sapiens
tcaggagattgagac

SEQ ID NO: 671915 - DNA, 15 bp, Homo sapiens
caggagattgagacc

SEQ ID NO: 671916 - DNA, 15 bp, Homo sapiens
aggagattgagacca

SEQ ID NO: 671917 - DNA, 15 bp, Homo sapiens
ggagattgagaccat

SEQ ID NO: 671918 - DNA, 15 bp, Homo sapiens
gagattgagaccatc

SEQ ID NO: 671919 - DNA, 15 bp, Homo sapiens
agattgagaccatcc

SEQ ID NO: 671920 - DNA, 15 bp, Homo sapiens
gattgagaccatcct

SEQ ID NO: 671921 - DNA, 15 bp, Homo sapiens
attgagaccatcctg

SEQ ID NO: 671922 - DNA, 15 bp, Homo sapiens
ttgagaccatcctgg

SEQ ID NO: 671923 - DNA, 15 bp, Homo sapiens
tgagaccatcctggc

SEQ ID NO: 671924 - DNA, 15 bp, Homo sapiens
gagaccatcctggct

SEQ ID NO: 671925 - DNA, 15 bp, Homo sapiens
agaccatcctggcta

SEQ ID NO: 671926 - DNA, 15 bp, Homo sapiens
gaccatcctggctaa

SEQ ID NO: 671927 - DNA, 15 bp, Homo sapiens
accatcctggctaac

SEQ ID NO: 671928 - DNA, 15 bp, Homo sapiens
ccatcctggctaaca

SEQ ID NO: 671929 - DNA, 15 bp, Homo sapiens
catcctggctaacac

SEQ ID NO: 671930 - DNA, 15 bp, Homo sapiens
atcctggctaacaca

SEQ ID NO: 671931 - DNA, 15 bp, Homo sapiens
tcctggctaacacag

SEQ ID NO: 671932 - DNA, 15 bp, Homo sapiens
cctggctaacacagt

SEQ ID NO: 671933 - DNA, 15 bp, Homo sapiens
ctggctaacacagtg

SEQ ID NO: 671934 - DNA, 15 bp, Homo sapiens
tggctaacacagtga

SEQ ID NO: 671935 - DNA, 15 bp, Homo sapiens
ggctaacacagtgaa

SEQ ID NO: 671936 - DNA, 15 bp, Homo sapiens
gctaacacagtgaaa

SEQ ID NO: 671937 - DNA, 15 bp, Homo sapiens
ctaacacagtgaaac

SEQ ID NO: 671938 - DNA, 15 bp, Homo sapiens
taacacagtgaaacc

SEQ ID NO: 671939 - DNA, 15 bp, Homo sapiens
aacacagtgaaaccc

SEQ ID NO: 671940 - DNA, 15 bp, Homo sapiens
acacagtgaaaccct

SEQ ID NO: 671941 - DNA, 15 bp, Homo sapiens
cacagtgaaaccctg

SEQ ID NO: 671942 - DNA, 15 bp, Homo sapiens
acagtgaaaccctgt

SEQ ID NO: 671943 - DNA, 15 bp, Homo sapiens
cagtgaaaccctgtc

SEQ ID NO: 671944 - DNA, 15 bp, Homo sapiens
agtgaaaccctgtct

SEQ ID NO: 671945 - DNA, 15 bp, Homo sapiens
gtgaaaccctgtctc

SEQ ID NO: 671946 - DNA, 15 bp, Homo sapiens
tgaaaccctgtctct

SEQ ID NO: 671947 - DNA, 15 bp, Homo sapiens
gaaaccctgtctcta

SEQ ID NO: 671948 - DNA, 15 bp, Homo sapiens
aaaccctgtctctac

SEQ ID NO: 671949 - DNA, 15 bp, Homo sapiens
aaccctgtctctact

SEQ ID NO: 671950 - DNA, 15 bp, Homo sapiens
accctgtctctacta

SEQ ID NO: 671951 - DNA, 15 bp, Homo sapiens
ccctgtctctactaa

SEQ ID NO: 671952 - DNA, 15 bp, Homo sapiens
cctgtctctactaaa

SEQ ID NO: 671953 - DNA, 15 bp, Homo sapiens
actaaaaatacaaat

SEQ ID NO: 671954 - DNA, 15 bp, Homo sapiens
ctaaaaatacaaata

SEQ ID NO: 671955 - DNA, 15 bp, Homo sapiens
taaaaatacaaataa

SEQ ID NO: 671956 - DNA, 15 bp, Homo sapiens
aaaaatacaaataat

SEQ ID NO: 671957 - DNA, 15 bp, Homo sapiens
aaaatacaaataatt

SEQ ID NO: 671958 - DNA, 15 bp, Homo sapiens
aaatacaaataatta

SEQ ID NO: 671959 - DNA, 15 bp, Homo sapiens
aatacaaataattag

SEQ ID NO: 671960 - DNA, 15 bp, Homo sapiens
atacaaataattagc

SEQ ID NO: 671961 - DNA, 15 bp, Homo sapiens
tacaaataattagcc

SEQ ID NO: 671962 - DNA, 15 bp, Homo sapiens
acaaataattagcca

SEQ ID NO: 671963 - DNA, 15 bp, Homo sapiens
caaataattagccag

SEQ ID NO: 671964 - DNA, 15 bp, Homo sapiens
aaataattagccagg

SEQ ID NO: 671965 - DNA, 15 bp, Homo sapiens
aataattagccaggc

SEQ ID NO: 671966 - DNA, 15 bp, Homo sapiens
ataattagccaggcg

SEQ ID NO: 671967 - DNA, 15 bp, Homo sapiens
taattagccaggcgt

SEQ ID NO: 671968 - DNA, 15 bp, Homo sapiens
aattagccaggcgtg

SEQ ID NO: 671969 - DNA, 15 bp, Homo sapiens
attagccaggcgtgg

SEQ ID NO: 671970 - DNA, 15 bp, Homo sapiens
ttagccaggcgtggt

SEQ ID NO: 671971 - DNA, 15 bp, Homo sapiens
tagccaggcgtggtg

SEQ ID NO: 671972 - DNA, 15 bp, Homo sapiens
agccaggcgtggtgg

SEQ ID NO: 671973 - DNA, 15 bp, Homo sapiens
gccaggcgtggtggt

SEQ ID NO: 671974 - DNA, 15 bp, Homo sapiens
ccaggcgtggtggtg

SEQ ID NO: 671975 - DNA, 15 bp, Homo sapiens
caggcgtggtggtgt

SEQ ID NO: 671976 - DNA, 15 bp, Homo sapiens
aggcgtggtggtgtg

SEQ ID NO: 671977 - DNA, 15 bp, Homo sapiens
ggcgtggtggtgtgc

SEQ ID NO: 671978 - DNA, 15 bp, Homo sapiens
gcgtggtggtgtgca

SEQ ID NO: 671979 - DNA, 15 bp, Homo sapiens
cgtggtggtgtgcac

SEQ ID NO: 671980 - DNA, 15 bp, Homo sapiens
gtggtggtgtgcact

SEQ ID NO: 671981 - DNA, 15 bp, Homo sapiens
tggtggtgtgcactt

SEQ ID NO: 671982 - DNA, 15 bp, Homo sapiens
ggtggtgtgcacttg

SEQ ID NO: 671983 - DNA, 15 bp, Homo sapiens
gtggtgtgcacttgt

SEQ ID NO: 671984 - DNA, 15 bp, Homo sapiens
tggtgtgcacttgta

SEQ ID NO: 671985 - DNA, 15 bp, Homo sapiens
ggtgtgcacttgtag

SEQ ID NO: 671986 - DNA, 15 bp, Homo sapiens
gtgtgcacttgtagt

SEQ ID NO: 671987 - DNA, 15 bp, Homo sapiens
tgtgcacttgtagtc

SEQ ID NO: 671988 - DNA, 15 bp, Homo sapiens
gtgcacttgtagtcc

SEQ ID NO: 671989 - DNA, 15 bp, Homo sapiens
tgcacttgtagtccc

SEQ ID NO: 671990 - DNA, 15 bp, Homo sapiens
gcacttgtagtccca

SEQ ID NO: 671991 - DNA, 15 bp, Homo sapiens
cacttgtagtcccag

SEQ ID NO: 671992 - DNA, 15 bp, Homo sapiens
acttgtagtcccagc

SEQ ID NO: 671993 - DNA, 15 bp, Homo sapiens
cttgtagtcccagct

SEQ ID NO: 671994 - DNA, 15 bp, Homo sapiens
ttgtagtcccagcta

SEQ ID NO: 671995 - DNA, 15 bp, Homo sapiens
tagtcccagctactc

SEQ ID NO: 671996 - DNA, 15 bp, Homo sapiens
agtcccagctactcg

SEQ ID NO: 671997 - DNA, 15 bp, Homo sapiens
gtcccagctactcgg

SEQ ID NO: 671998 - DNA, 15 bp, Homo sapiens
gaggctgaggcagaa

SEQ ID NO: 671999 - DNA, 15 bp, Homo sapiens
aggctgaggcagaag

SEQ ID NO: 672000 - DNA, 15 bp, Homo sapiens
ggctgaggcagaaga

SEQ ID NO: 672001 - DNA, 15 bp, Homo sapiens
gctgaggcagaagaa

SEQ ID NO: 672002 - DNA, 15 bp, Homo sapiens
ctgaggcagaagaat

SEQ ID NO: 672003 - DNA, 15 bp, Homo sapiens
tgaggcagaagaatc

SEQ ID NO: 672004 - DNA, 15 bp, Homo sapiens
gaggcagaagaatca

SEQ ID NO: 672005 - DNA, 15 bp, Homo sapiens
aggcagaagaatcac

SEQ ID NO: 672006 - DNA, 15 bp, Homo sapiens
ggcagaagaatcact

SEQ ID NO: 672007 - DNA, 15 bp, Homo sapiens
gcagaagaatcactt

SEQ ID NO: 672008 - DNA, 15 bp, Homo sapiens
cagaagaatcacttg

SEQ ID NO: 672009 - DNA, 15 bp, Homo sapiens
agaagaatcacttga

SEQ ID NO: 672010 - DNA, 15 bp, Homo sapiens
gaagaatcacttgaa

SEQ ID NO: 672011 - DNA, 15 bp, Homo sapiens
aagaatcacttgaaa

SEQ ID NO: 672012 - DNA, 15 bp, Homo sapiens
agaatcacttgaaac

SEQ ID NO: 672013 - DNA, 15 bp, Homo sapiens
gaatcacttgaaact

SEQ ID NO: 672014 - DNA, 15 bp, Homo sapiens
aatcacttgaaactg

SEQ ID NO: 672015 - DNA, 15 bp, Homo sapiens
atcacttgaaactgg

SEQ ID NO: 672016 - DNA, 15 bp, Homo sapiens
tcacttgaaactggg

SEQ ID NO: 672017 - DNA, 15 bp, Homo sapiens
cacttgaaactggga

SEQ ID NO: 672018 - DNA, 15 bp, Homo sapiens
acttgaaactgggag

SEQ ID NO: 672019 - DNA, 15 bp, Homo sapiens
cttgaaactgggagg

SEQ ID NO: 672020 - DNA, 15 bp, Homo sapiens
ttgaaactgggaggc

SEQ ID NO: 672021 - DNA, 15 bp, Homo sapiens
tgaaactgggaggca

SEQ ID NO: 672022 - DNA, 15 bp, Homo sapiens
gaaactgggaggcag

SEQ ID NO: 672023 - DNA, 15 bp, Homo sapiens
aaactgggaggcaga

SEQ ID NO: 672024 - DNA, 15 bp, Homo sapiens
aactgggaggcagag

SEQ ID NO: 672025 - DNA, 15 bp, Homo sapiens
actgggaggcagagg

SEQ ID NO: 672026 - DNA, 15 bp, Homo sapiens
ctgggaggcagaggt

SEQ ID NO: 672027 - DNA, 15 bp, Homo sapiens
tgggaggcagaggtt

SEQ ID NO: 672028 - DNA, 15 bp, Homo sapiens
gggaggcagaggtta

SEQ ID NO: 672029 - DNA, 15 bp, Homo sapiens
ggaggcagaggttac

SEQ ID NO: 672030 - DNA, 15 bp, Homo sapiens
gaggcagaggttaca

SEQ ID NO: 672031 - DNA, 15 bp, Homo sapiens
aggcagaggttacag

SEQ ID NO: 672032 - DNA, 15 bp, Homo sapiens
ggcagaggttacagt

SEQ ID NO: 672033 - DNA, 15 bp, Homo sapiens
gcagaggttacagtg

SEQ ID NO: 672034 - DNA, 15 bp, Homo sapiens
cagaggttacagtga

SEQ ID NO: 672035 - DNA, 15 bp, Homo sapiens
agaggttacagtgag

SEQ ID NO: 672036 - DNA, 15 bp, Homo sapiens
gaggttacagtgagc

SEQ ID NO: 672037 - DNA, 15 bp, Homo sapiens
aggttacagtgagcc

SEQ ID NO: 672038 - DNA, 15 bp, Homo sapiens
ggttacagtgagccg

SEQ ID NO: 672039 - DNA, 15 bp, Homo sapiens
gttacagtgagccga

SEQ ID NO: 672040 - DNA, 15 bp, Homo sapiens
ttacagtgagccgag

SEQ ID NO: 672041 - DNA, 15 bp, Homo sapiens
tacagtgagccgaga

SEQ ID NO: 672042 - DNA, 15 bp, Homo sapiens
acagtgagccgagat

SEQ ID NO: 672043 - DNA, 15 bp, Homo sapiens
cagtgagccgagatc

SEQ ID NO: 672044 - DNA, 15 bp, Homo sapiens
agtgagccgagatcg

SEQ ID NO: 672045 - DNA, 15 bp, Homo sapiens
gtgagccgagatcgt

SEQ ID NO: 672046 - DNA, 15 bp, Homo sapiens
tgagccgagatcgtg

SEQ ID NO: 672047 - DNA, 15 bp, Homo sapiens
gagccgagatcgtgc

SEQ ID NO: 672048 - DNA, 15 bp, Homo sapiens
agccgagatcgtgcc

SEQ ID NO: 672049 - DNA, 15 bp, Homo sapiens
gccgagatcgtgcca

SEQ ID NO: 672050 - DNA, 15 bp, Homo sapiens
ccgagatcgtgccac

SEQ ID NO: 672051 - DNA, 15 bp, Homo sapiens
cgagatcgtgccact

SEQ ID NO: 672052 - DNA, 15 bp, Homo sapiens
gagatcgtgccactg

SEQ ID NO: 672053 - DNA, 15 bp, Homo sapiens
agatcgtgccactgc

SEQ ID NO: 672054 - DNA, 15 bp, Homo sapiens
gatcgtgccactgca

SEQ ID NO: 672055 - DNA, 15 bp, Homo sapiens
atcgtgccactgcac

SEQ ID NO: 672056 - DNA, 15 bp, Homo sapiens
tcgtgccactgcact

SEQ ID NO: 672057 - DNA, 15 bp, Homo sapiens
cgtgccactgcactc

SEQ ID NO: 672058 - DNA, 15 bp, Homo sapiens
ccactgcactccagt

SEQ ID NO: 672059 - DNA, 15 bp, Homo sapiens
cactgcactccagtc

SEQ ID NO: 672060 - DNA, 15 bp, Homo sapiens
actgcactccagtct

SEQ ID NO: 672061 - DNA, 15 bp, Homo sapiens
ctgcactccagtctg

SEQ ID NO: 672062 - DNA, 15 bp, Homo sapiens
tgcactccagtctgg

SEQ ID NO: 672063 - DNA, 15 bp, Homo sapiens
gcactccagtctggg

SEQ ID NO: 672064 - DNA, 15 bp, Homo sapiens
cactccagtctgggc

SEQ ID NO: 672065 - DNA, 15 bp, Homo sapiens
actccagtctgggca

SEQ ID NO: 672066 - DNA, 15 bp, Homo sapiens
ctccagtctgggcaa

SEQ ID NO: 672067 - DNA, 15 bp, Homo sapiens
tccagtctgggcaac

SEQ ID NO: 672068 - DNA, 15 bp, Homo sapiens
ccagtctgggcaaca

SEQ ID NO: 672069 - DNA, 15 bp, Homo sapiens
cagtctgggcaacag

SEQ ID NO: 672070 - DNA, 15 bp, Homo sapiens
agtctgggcaacaga

SEQ ID NO: 672071 - DNA, 15 bp, Homo sapiens
gtctgggcaacagag

SEQ ID NO: 672072 - DNA, 15 bp, Homo sapiens
tctgggcaacagagt

SEQ ID NO: 672073 - DNA, 15 bp, Homo sapiens
ctgggcaacagagtg

SEQ ID NO: 672074 - DNA, 15 bp, Homo sapiens
tgggcaacagagtga

SEQ ID NO: 672075 - DNA, 15 bp, Homo sapiens
gggcaacagagtgag

SEQ ID NO: 672076 - DNA, 15 bp, Homo sapiens
ggcaacagagtgaga

SEQ ID NO: 672077 - DNA, 15 bp, Homo sapiens
gcaacagagtgagac

SEQ ID NO: 672078 - DNA, 15 bp, Homo sapiens
caacagagtgagacc

SEQ ID NO: 672079 - DNA, 15 bp, Homo sapiens
aacagagtgagaccc

SEQ ID NO: 672080 - DNA, 15 bp, Homo sapiens
acagagtgagacccc

SEQ ID NO: 672081 - DNA, 15 bp, Homo sapiens
cagagtgagaccccg

SEQ ID NO: 672082 - DNA, 15 bp, Homo sapiens
agagtgagaccccgt

SEQ ID NO: 672083 - DNA, 15 bp, Homo sapiens
gagtgagaccccgtc

SEQ ID NO: 672084 - DNA, 15 bp, Homo sapiens
agtgagaccccgtct

SEQ ID NO: 672085 - DNA, 15 bp, Homo sapiens
gtgagaccccgtctc

SEQ ID NO: 672086 - DNA, 15 bp, Homo sapiens
tgagaccccgtctca

SEQ ID NO: 672087 - DNA, 15 bp, Homo sapiens
gagaccccgtctcaa

SEQ ID NO: 672088 - DNA, 15 bp, Homo sapiens
agaccccgtctcaaa

SEQ ID NO: 672089 - DNA, 15 bp, Homo sapiens
gaccccgtctcaaaa

SEQ ID NO: 672090 - DNA, 15 bp, Homo sapiens
accccgtctcaaaaa

SEQ ID NO: 672091 - DNA, 15 bp, Homo sapiens
ccccgtctcaaaaaa

SEQ ID NO: 672092 - DNA, 15 bp, Homo sapiens
cccgtctcaaaaaaa

SEQ ID NO: 672093 - DNA, 15 bp, Homo sapiens
ccgtctcaaaaaaaa

SEQ ID NO: 672094 - DNA, 15 bp, Homo sapiens
cgtctcaaaaaaaaa

SEQ ID NO: 672095 - DNA, 15 bp, Homo sapiens
gtctcaaaaaaaaaa

SEQ ID NO: 672096 - DNA, 15 bp, Homo sapiens
aaaaaaaaaaaattg

SEQ ID NO: 672097 - DNA, 15 bp, Homo sapiens
aaaaaaaaaaattgt

SEQ ID NO: 672098 - DNA, 15 bp, Homo sapiens
aaaaaaaaaattgtg

SEQ ID NO: 672099 - DNA, 15 bp, Homo sapiens
aaaaaaaaattgtga

SEQ ID NO: 672100 - DNA, 15 bp, Homo sapiens
aaaaaaaattgtgac

SEQ ID NO: 672101 - DNA, 15 bp, Homo sapiens
aaaaaaattgtgaca

SEQ ID NO: 672102 - DNA, 15 bp, Homo sapiens
aaaaaattgtgacac

SEQ ID NO: 672103 - DNA, 15 bp, Homo sapiens
aaattgtgacacaat

SEQ ID NO: 672104 - DNA, 15 bp, Homo sapiens
aattgtgacacaata

SEQ ID NO: 672105 - DNA, 15 bp, Homo sapiens
attgtgacacaataa

SEQ ID NO: 672106 - DNA, 15 bp, Homo sapiens
ttgtgacacaataaa

SEQ ID NO: 672107 - DNA, 15 bp, Homo sapiens
tgtgacacaataaag

SEQ ID NO: 672108 - DNA, 15 bp, Homo sapiens
gtgacacaataaagt

SEQ ID NO: 672109 - DNA, 15 bp, Homo sapiens
tgacacaataaagtt

SEQ ID NO: 672110 - DNA, 15 bp, Homo sapiens
gacacaataaagtta

SEQ ID NO: 672111 - DNA, 15 bp, Homo sapiens
acacaataaagttaa

SEQ ID NO: 672112 - DNA, 15 bp, Homo sapiens
cacaataaagttaag

SEQ ID NO: 672113 - DNA, 15 bp, Homo sapiens
acaataaagttaaga

SEQ ID NO: 672114 - DNA, 15 bp, Homo sapiens
caataaagttaagaa

SEQ ID NO: 672115 - DNA, 15 bp, Homo sapiens
aataaagttaagaat

SEQ ID NO: 672116 - DNA, 15 bp, Homo sapiens
ataaagttaagaatg

SEQ ID NO: 672117 - DNA, 15 bp, Homo sapiens
taaagttaagaatgg

SEQ ID NO: 672118 - DNA, 15 bp, Homo sapiens
aaagttaagaatggt

SEQ ID NO: 672119 - DNA, 15 bp, Homo sapiens
aagttaagaatggta

SEQ ID NO: 672120 - DNA, 15 bp, Homo sapiens
agttaagaatggtaa

SEQ ID NO: 672121 - DNA, 15 bp, Homo sapiens
gttaagaatggtaaa

SEQ ID NO: 672122 - DNA, 15 bp, Homo sapiens
ttaagaatggtaaat

SEQ ID NO: 672123 - DNA, 15 bp, Homo sapiens
taagaatggtaaatt

SEQ ID NO: 672124 - DNA, 15 bp, Homo sapiens
aagaatggtaaattc

SEQ ID NO: 672125 - DNA, 15 bp, Homo sapiens
agaatggtaaattct

SEQ ID NO: 672126 - DNA, 15 bp, Homo sapiens
gaatggtaaattctt

SEQ ID NO: 672127 - DNA, 15 bp, Homo sapiens
aatggtaaattcttt

SEQ ID NO: 672128 - DNA, 15 bp, Homo sapiens
atggtaaattctttc

SEQ ID NO: 672129 - DNA, 15 bp, Homo sapiens
tggtaaattctttca

SEQ ID NO: 672130 - DNA, 15 bp, Homo sapiens
ggtaaattctttcaa

SEQ ID NO: 672131 - DNA, 15 bp, Homo sapiens
gtaaattctttcaaa

SEQ ID NO: 672132 - DNA, 15 bp, Homo sapiens
taaattctttcaaag

SEQ ID NO: 672133 - DNA, 15 bp, Homo sapiens
aaattctttcaaagc

SEQ ID NO: 672134 - DNA, 15 bp, Homo sapiens
aattctttcaaagca

SEQ ID NO: 672135 - DNA, 15 bp, Homo sapiens
attctttcaaagcag

SEQ ID NO: 672136 - DNA, 15 bp, Homo sapiens
ttctttcaaagcagt

SEQ ID NO: 672137 - DNA, 15 bp, Homo sapiens
tctttcaaagcagta

SEQ ID NO: 672138 - DNA, 15 bp, Homo sapiens
ctttcaaagcagtaa

SEQ ID NO: 672139 - DNA, 15 bp, Homo sapiens
tttcaaagcagtaaa

SEQ ID NO: 672140 - DNA, 15 bp, Homo sapiens
ttcaaagcagtaaag

SEQ ID NO: 672141 - DNA, 15 bp, Homo sapiens
tcaaagcagtaaagt

SEQ ID NO: 672142 - DNA, 15 bp, Homo sapiens
caaagcagtaaagtt

SEQ ID NO: 672143 - DNA, 15 bp, Homo sapiens
aaagcagtaaagttt

SEQ ID NO: 672144 - DNA, 15 bp, Homo sapiens
aagcagtaaagtttt

SEQ ID NO: 672145 - DNA, 15 bp, Homo sapiens
agcagtaaagtttta

SEQ ID NO: 672146 - DNA, 15 bp, Homo sapiens
gcagtaaagttttat

SEQ ID NO: 672147 - DNA, 15 bp, Homo sapiens
cagtaaagttttatt

SEQ ID NO: 672148 - DNA, 15 bp, Homo sapiens
agtaaagttttattt

SEQ ID NO: 672149 - DNA, 15 bp, Homo sapiens
gtaaagttttatttt

SEQ ID NO: 672150 - DNA, 15 bp, Homo sapiens
taaagttttatttta

SEQ ID NO: 672151 - DNA, 15 bp, Homo sapiens
aaagttttattttat

SEQ ID NO: 672152 - DNA, 15 bp, Homo sapiens
aagttttattttatt

SEQ ID NO: 672153 - DNA, 15 bp, Homo sapiens
agttttattttattt

SEQ ID NO: 672154 - DNA, 15 bp, Homo sapiens
tttattttattttac

SEQ ID NO: 672155 - DNA, 15 bp, Homo sapiens
ttattttattttacc

SEQ ID NO: 672156 - DNA, 15 bp, Homo sapiens
tattttattttacct

SEQ ID NO: 672157 - DNA, 15 bp, Homo sapiens
attttattttacctt

SEQ ID NO: 672158 - DNA, 15 bp, Homo sapiens
ttttattttacctta

SEQ ID NO: 672159 - DNA, 15 bp, Homo sapiens
tttattttaccttac

SEQ ID NO: 672160 - DNA, 15 bp, Homo sapiens
ttattttaccttaca

SEQ ID NO: 672161 - DNA, 15 bp, Homo sapiens
tattttaccttacaa

SEQ ID NO: 672162 - DNA, 15 bp, Homo sapiens
attttaccttacaac

SEQ ID NO: 672163 - DNA, 15 bp, Homo sapiens
ttttaccttacaact

SEQ ID NO: 672164 - DNA, 15 bp, Homo sapiens
tttaccttacaacta

SEQ ID NO: 672165 - DNA, 15 bp, Homo sapiens
ttaccttacaactaa

SEQ ID NO: 672166 - DNA, 15 bp, Homo sapiens
taccttacaactaac

SEQ ID NO: 672167 - DNA, 15 bp, Homo sapiens
accttacaactaaca

SEQ ID NO: 672168 - DNA, 15 bp, Homo sapiens
ccttacaactaacaa

SEQ ID NO: 672169 - DNA, 15 bp, Homo sapiens
cttacaactaacaaa

SEQ ID NO: 672170 - DNA, 15 bp, Homo sapiens
ttacaactaacaaag

SEQ ID NO: 672171 - DNA, 15 bp, Homo sapiens
tacaactaacaaaga

SEQ ID NO: 672172 - DNA, 15 bp, Homo sapiens
acaactaacaaagaa

SEQ ID NO: 672173 - DNA, 15 bp, Homo sapiens
caactaacaaagaaa

SEQ ID NO: 672174 - DNA, 15 bp, Homo sapiens
aactaacaaagaaaa

SEQ ID NO: 672175 - DNA, 15 bp, Homo sapiens
actaacaaagaaaaa

SEQ ID NO: 672176 - DNA, 15 bp, Homo sapiens
ctaacaaagaaaaac

SEQ ID NO: 672177 - DNA, 15 bp, Homo sapiens
taacaaagaaaaaca

SEQ ID NO: 672178 - DNA, 15 bp, Homo sapiens
aacaaagaaaaacag

SEQ ID NO: 672179 - DNA, 15 bp, Homo sapiens
acaaagaaaaacagt

SEQ ID NO: 672180 - DNA, 15 bp, Homo sapiens
caaagaaaaacagta

SEQ ID NO: 672181 - DNA, 15 bp, Homo sapiens
aaagaaaaacagtag

SEQ ID NO: 672182 - DNA, 15 bp, Homo sapiens
aagaaaaacagtaga

SEQ ID NO: 672183 - DNA, 15 bp, Homo sapiens
agaaaaacagtagat

SEQ ID NO: 672184 - DNA, 15 bp, Homo sapiens
gaaaaacagtagatg

SEQ ID NO: 672185 - DNA, 15 bp, Homo sapiens
aaaaacagtagatgt

SEQ ID NO: 672186 - DNA, 15 bp, Homo sapiens
aaaacagtagatgtg

SEQ ID NO: 672187 - DNA, 15 bp, Homo sapiens
aaacagtagatgtgg

SEQ ID NO: 672188 - DNA, 15 bp, Homo sapiens
aacagtagatgtgga

SEQ ID NO: 672189 - DNA, 15 bp, Homo sapiens
acagtagatgtggaa

SEQ ID NO: 672190 - DNA, 15 bp, Homo sapiens
cagtagatgtggaac

SEQ ID NO: 672191 - DNA, 15 bp, Homo sapiens
agtagatgtggaact

SEQ ID NO: 672192 - DNA, 15 bp, Homo sapiens
gtagatgtggaactt

SEQ ID NO: 672193 - DNA, 15 bp, Homo sapiens
tagatgtggaacttg

SEQ ID NO: 672194 - DNA, 15 bp, Homo sapiens
agatgtggaacttga

SEQ ID NO: 672195 - DNA, 15 bp, Homo sapiens
gatgtggaacttgac

SEQ ID NO: 672196 - DNA, 15 bp, Homo sapiens
atgtggaacttgaca

SEQ ID NO: 672197 - DNA, 15 bp, Homo sapiens
tgtggaacttgacag

SEQ ID NO: 672198 - DNA, 15 bp, Homo sapiens
gtggaacttgacagt

SEQ ID NO: 672199 - DNA, 15 bp, Homo sapiens
tggaacttgacagtg

SEQ ID NO: 672200 - DNA, 15 bp, Homo sapiens
ggaacttgacagtgt

SEQ ID NO: 672201 - DNA, 15 bp, Homo sapiens
gaacttgacagtgtt

SEQ ID NO: 672202 - DNA, 15 bp, Homo sapiens
aacttgacagtgttc

SEQ ID NO: 672203 - DNA, 15 bp, Homo sapiens
acttgacagtgttcc

SEQ ID NO: 672204 - DNA, 15 bp, Homo sapiens
cttgacagtgttccc

SEQ ID NO: 672205 - DNA, 15 bp, Homo sapiens
ttgacagtgttccca

SEQ ID NO: 672206 - DNA, 15 bp, Homo sapiens
tgacagtgttcccaa

SEQ ID NO: 672207 - DNA, 15 bp, Homo sapiens
gacagtgttcccaag

SEQ ID NO: 672208 - DNA, 15 bp, Homo sapiens
acagtgttcccaaga

SEQ ID NO: 672209 - DNA, 15 bp, Homo sapiens
cagtgttcccaagag

SEQ ID NO: 672210 - DNA, 15 bp, Homo sapiens
agtgttcccaagagt

SEQ ID NO: 672211 - DNA, 15 bp, Homo sapiens
gtgttcccaagagtg

SEQ ID NO: 672212 - DNA, 15 bp, Homo sapiens
tgttcccaagagtgc

SEQ ID NO: 672213 - DNA, 15 bp, Homo sapiens
gttcccaagagtgct

SEQ ID NO: 672214 - DNA, 15 bp, Homo sapiens
ttcccaagagtgcta

SEQ ID NO: 672215 - DNA, 15 bp, Homo sapiens
tcccaagagtgctat

SEQ ID NO: 672216 - DNA, 15 bp, Homo sapiens
cccaagagtgctatt

SEQ ID NO: 672217 - DNA, 15 bp, Homo sapiens
ccaagagtgctattt

SEQ ID NO: 672218 - DNA, 15 bp, Homo sapiens
caagagtgctattta

SEQ ID NO: 672219 - DNA, 15 bp, Homo sapiens
aagagtgctatttag

SEQ ID NO: 672220 - DNA, 15 bp, Homo sapiens
agagtgctatttaga

SEQ ID NO: 672221 - DNA, 15 bp, Homo sapiens
gagtgctatttagag

SEQ ID NO: 672222 - DNA, 15 bp, Homo sapiens
agtgctatttagaga

SEQ ID NO: 672223 - DNA, 15 bp, Homo sapiens
gtgctatttagagaa

SEQ ID NO: 672224 - DNA, 15 bp, Homo sapiens
tgctatttagagaat

SEQ ID NO: 672225 - DNA, 15 bp, Homo sapiens
gctatttagagaatt

SEQ ID NO: 672226 - DNA, 15 bp, Homo sapiens
ctatttagagaatta

SEQ ID NO: 672227 - DNA, 15 bp, Homo sapiens
tatttagagaattat

SEQ ID NO: 672228 - DNA, 15 bp, Homo sapiens
atttagagaattatg

SEQ ID NO: 672229 - DNA, 15 bp, Homo sapiens
tttagagaattatgt

SEQ ID NO: 672230 - DNA, 15 bp, Homo sapiens
ttagagaattatgtg

SEQ ID NO: 672231 - DNA, 15 bp, Homo sapiens
tagagaattatgtgt

SEQ ID NO: 672232 - DNA, 15 bp, Homo sapiens
agagaattatgtgtg

SEQ ID NO: 672233 - DNA, 15 bp, Homo sapiens
gagaattatgtgtgg

SEQ ID NO: 672234 - DNA, 15 bp, Homo sapiens
agaattatgtgtgga

SEQ ID NO: 672235 - DNA, 15 bp, Homo sapiens
gaattatgtgtggat

SEQ ID NO: 672236 - DNA, 15 bp, Homo sapiens
aattatgtgtggatt

SEQ ID NO: 672237 - DNA, 15 bp, Homo sapiens
attatgtgtggattt

SEQ ID NO: 672238 - DNA, 15 bp, Homo sapiens
ttatgtgtggatttt

SEQ ID NO: 672239 - DNA, 15 bp, Homo sapiens
tatgtgtggattttc

SEQ ID NO: 672240 - DNA, 15 bp, Homo sapiens
atgtgtggattttct

SEQ ID NO: 672241 - DNA, 15 bp, Homo sapiens
tgtgtggattttctt

SEQ ID NO: 672242 - DNA, 15 bp, Homo sapiens
gtgtggattttcttt

SEQ ID NO: 672243 - DNA, 15 bp, Homo sapiens
tgtggattttctttt

SEQ ID NO: 672244 - DNA, 15 bp, Homo sapiens
gtggattttcttttt

SEQ ID NO: 672245 - DNA, 15 bp, Homo sapiens
tggattttctttttt

SEQ ID NO: 672246 - DNA, 15 bp, Homo sapiens
ggattttcttttttc

SEQ ID NO: 672247 - DNA, 15 bp, Homo sapiens
gattttcttttttcc

SEQ ID NO: 672248 - DNA, 15 bp, Homo sapiens
attttcttttttcct

SEQ ID NO: 672249 - DNA, 15 bp, Homo sapiens
ttttcttttttcctg

SEQ ID NO: 672250 - DNA, 15 bp, Homo sapiens
tttcttttttcctga

SEQ ID NO: 672251 - DNA, 15 bp, Homo sapiens
ttcttttttcctgag

SEQ ID NO: 672252 - DNA, 15 bp, Homo sapiens
tcttttttcctgagt

SEQ ID NO: 672253 - DNA, 15 bp, Homo sapiens
cttttttcctgagta

SEQ ID NO: 672254 - DNA, 15 bp, Homo sapiens
ttttttcctgagtac

SEQ ID NO: 672255 - DNA, 15 bp, Homo sapiens
tttttcctgagtact

SEQ ID NO: 672256 - DNA, 15 bp, Homo sapiens
ttttcctgagtactc

SEQ ID NO: 672257 - DNA, 15 bp, Homo sapiens
tttcctgagtactct

SEQ ID NO: 672258 - DNA, 15 bp, Homo sapiens
ttcctgagtactctt

SEQ ID NO: 672259 - DNA, 15 bp, Homo sapiens
tcctgagtactcttg

SEQ ID NO: 672260 - DNA, 15 bp, Homo sapiens
cctgagtactcttgg

SEQ ID NO: 672261 - DNA, 15 bp, Homo sapiens
ctgagtactcttggg

SEQ ID NO: 672262 - DNA, 15 bp, Homo sapiens
tgagtactcttgggg

SEQ ID NO: 672263 - DNA, 15 bp, Homo sapiens
gagtactcttgggga

SEQ ID NO: 672264 - DNA, 15 bp, Homo sapiens
agtactcttggggag

SEQ ID NO: 672265 - DNA, 15 bp, Homo sapiens
gtactcttggggagc

SEQ ID NO: 672266 - DNA, 15 bp, Homo sapiens
tactcttggggagcc

SEQ ID NO: 672267 - DNA, 15 bp, Homo sapiens
actcttggggagcct

SEQ ID NO: 672268 - DNA, 15 bp, Homo sapiens
ctcttggggagccta

SEQ ID NO: 672269 - DNA, 15 bp, Homo sapiens
tcttggggagcctat

SEQ ID NO: 672270 - DNA, 15 bp, Homo sapiens
cttggggagcctatc

SEQ ID NO: 672271 - DNA, 15 bp, Homo sapiens
ttggggagcctatca

SEQ ID NO: 672272 - DNA, 15 bp, Homo sapiens
tggggagcctatcac

SEQ ID NO: 672273 - DNA, 15 bp, Homo sapiens
ggggagcctatcacc

SEQ ID NO: 672274 - DNA, 15 bp, Homo sapiens
gggagcctatcacca

SEQ ID NO: 672275 - DNA, 15 bp, Homo sapiens
ggagcctatcaccag

SEQ ID NO: 672276 - DNA, 15 bp, Homo sapiens
gagcctatcaccagg

SEQ ID NO: 672277 - DNA, 15 bp, Homo sapiens
agcctatcaccaggg

SEQ ID NO: 672278 - DNA, 15 bp, Homo sapiens
gcctatcaccagggt

SEQ ID NO: 672279 - DNA, 15 bp, Homo sapiens
cctatcaccagggtg

SEQ ID NO: 672280 - DNA, 15 bp, Homo sapiens
ctatcaccagggtgg

SEQ ID NO: 672281 - DNA, 15 bp, Homo sapiens
tatcaccagggtggg

SEQ ID NO: 672282 - DNA, 15 bp, Homo sapiens
atcaccagggtgggt

SEQ ID NO: 672283 - DNA, 15 bp, Homo sapiens
tcaccagggtgggtc

SEQ ID NO: 672284 - DNA, 15 bp, Homo sapiens
caccagggtgggtca

SEQ ID NO: 672285 - DNA, 15 bp, Homo sapiens
accagggtgggtcag

SEQ ID NO: 672286 - DNA, 15 bp, Homo sapiens
ccagggtgggtcaga

SEQ ID NO: 672287 - DNA, 15 bp, Homo sapiens
cagggtgggtcagat

SEQ ID NO: 672288 - DNA, 15 bp, Homo sapiens
agggtgggtcagata

SEQ ID NO: 672289 - DNA, 15 bp, Homo sapiens
gggtgggtcagatat

SEQ ID NO: 672290 - DNA, 15 bp, Homo sapiens
ggtgggtcagatata

SEQ ID NO: 672291 - DNA, 15 bp, Homo sapiens
gtgggtcagatatag

SEQ ID NO: 672292 - DNA, 15 bp, Homo sapiens
tgggtcagatatagc

SEQ ID NO: 672293 - DNA, 15 bp, Homo sapiens
gggtcagatatagcc

SEQ ID NO: 672294 - DNA, 15 bp, Homo sapiens
ggtcagatatagcct

SEQ ID NO: 672295 - DNA, 15 bp, Homo sapiens
gtcagatatagcctt

SEQ ID NO: 672296 - DNA, 15 bp, Homo sapiens
tcagatatagccttt

SEQ ID NO: 672297 - DNA, 15 bp, Homo sapiens
cagatatagcctttg

SEQ ID NO: 672298 - DNA, 15 bp, Homo sapiens
agatatagcctttga

SEQ ID NO: 672299 - DNA, 15 bp, Homo sapiens
gatatagcctttgag

SEQ ID NO: 672300 - DNA, 15 bp, Homo sapiens
atatagcctttgagg

SEQ ID NO: 672301 - DNA, 15 bp, Homo sapiens
tatagcctttgaggg

SEQ ID NO: 672302 - DNA, 15 bp, Homo sapiens
atagcctttgaggga

SEQ ID NO: 672303 - DNA, 15 bp, Homo sapiens
tagcctttgagggat

SEQ ID NO: 672304 - DNA, 15 bp, Homo sapiens
agcctttgagggatg

SEQ ID NO: 672305 - DNA, 15 bp, Homo sapiens
gcctttgagggatgt

SEQ ID NO: 672306 - DNA, 15 bp, Homo sapiens
cctttgagggatgtg

SEQ ID NO: 672307 - DNA, 15 bp, Homo sapiens
ctttgagggatgtgg

SEQ ID NO: 672308 - DNA, 15 bp, Homo sapiens
tttgagggatgtgga

SEQ ID NO: 672309 - DNA, 15 bp, Homo sapiens
ttgagggatgtggac

SEQ ID NO: 672310 - DNA, 15 bp, Homo sapiens
tgagggatgtggacg

SEQ ID NO: 672311 - DNA, 15 bp, Homo sapiens
gagggatgtggacgc

SEQ ID NO: 672312 - DNA, 15 bp, Homo sapiens
agggatgtggacgca

SEQ ID NO: 672313 - DNA, 15 bp, Homo sapiens
gggatgtggacgcag

SEQ ID NO: 672314 - DNA, 15 bp, Homo sapiens
ggatgtggacgcagc

SEQ ID NO: 672315 - DNA, 15 bp, Homo sapiens
gatgtggacgcagcc

SEQ ID NO: 672316 - DNA, 15 bp, Homo sapiens
atgtggacgcagcca

SEQ ID NO: 672317 - DNA, 15 bp, Homo sapiens
tgtggacgcagccat

SEQ ID NO: 672318 - DNA, 15 bp, Homo sapiens
gtggacgcagccatt

SEQ ID NO: 672319 - DNA, 15 bp, Homo sapiens
tggacgcagccattg

SEQ ID NO: 672320 - DNA, 15 bp, Homo sapiens
ggacgcagccattgg

SEQ ID NO: 672321 - DNA, 15 bp, Homo sapiens
gacgcagccattgga

SEQ ID NO: 672322 - DNA, 15 bp, Homo sapiens
acgcagccattggat

SEQ ID NO: 672323 - DNA, 15 bp, Homo sapiens
cgcagccattggatc

SEQ ID NO: 672324 - DNA, 15 bp, Homo sapiens
gcagccattggatcc

SEQ ID NO: 672325 - DNA, 15 bp, Homo sapiens
cagccattggatcca

SEQ ID NO: 672326 - DNA, 15 bp, Homo sapiens
agccattggatccag

SEQ ID NO: 672327 - DNA, 15 bp, Homo sapiens
gccattggatccaga

SEQ ID NO: 672328 - DNA, 15 bp, Homo sapiens
ccattggatccagaa

SEQ ID NO: 672329 - DNA, 15 bp, Homo sapiens
cattggatccagaac

SEQ ID NO: 672330 - DNA, 15 bp, Homo sapiens
attggatccagaaca

SEQ ID NO: 672331 - DNA, 15 bp, Homo sapiens
ttggatccagaacac

SEQ ID NO: 672332 - DNA, 15 bp, Homo sapiens
tggatccagaacact

SEQ ID NO: 672333 - DNA, 15 bp, Homo sapiens
ggatccagaacactg

SEQ ID NO: 672334 - DNA, 15 bp, Homo sapiens
gatccagaacactgg

SEQ ID NO: 672335 - DNA, 15 bp, Homo sapiens
atccagaacactggc

SEQ ID NO: 672336 - DNA, 15 bp, Homo sapiens
tccagaacactggca

SEQ ID NO: 672337 - DNA, 15 bp, Homo sapiens
ccagaacactggcat

SEQ ID NO: 672338 - DNA, 15 bp, Homo sapiens
cagaacactggcatt

SEQ ID NO: 672339 - DNA, 15 bp, Homo sapiens
agaacactggcattt

SEQ ID NO: 672340 - DNA, 15 bp, Homo sapiens
gaacactggcatttg

SEQ ID NO: 672341 - DNA, 15 bp, Homo sapiens
aacactggcatttgc

SEQ ID NO: 672342 - DNA, 15 bp, Homo sapiens
acactggcatttgct

SEQ ID NO: 672343 - DNA, 15 bp, Homo sapiens
cactggcatttgcta

SEQ ID NO: 672344 - DNA, 15 bp, Homo sapiens
actggcatttgctac

SEQ ID NO: 672345 - DNA, 15 bp, Homo sapiens
ctggcatttgctaca

SEQ ID NO: 672346 - DNA, 15 bp, Homo sapiens
tggcatttgctacat

SEQ ID NO: 672347 - DNA, 15 bp, Homo sapiens
ggcatttgctacatg

SEQ ID NO: 672348 - DNA, 15 bp, Homo sapiens
gcatttgctacatga

SEQ ID NO: 672349 - DNA, 15 bp, Homo sapiens
catttgctacatgac

SEQ ID NO: 672350 - DNA, 15 bp, Homo sapiens
atttgctacatgact

SEQ ID NO: 672351 - DNA, 15 bp, Homo sapiens
tttgctacatgactt

SEQ ID NO: 672352 - DNA, 15 bp, Homo sapiens
ttgctacatgacttt

SEQ ID NO: 672353 - DNA, 15 bp, Homo sapiens
tgctacatgacttta

SEQ ID NO: 672354 - DNA, 15 bp, Homo sapiens
gctacatgactttaa

SEQ ID NO: 672355 - DNA, 15 bp, Homo sapiens
ctacatgactttaat

SEQ ID NO: 672356 - DNA, 15 bp, Homo sapiens
tacatgactttaata

SEQ ID NO: 672357 - DNA, 15 bp, Homo sapiens
acatgactttaatat

SEQ ID NO: 672358 - DNA, 15 bp, Homo sapiens
catgactttaatatt

SEQ ID NO: 672359 - DNA, 15 bp, Homo sapiens
atgactttaatattt

SEQ ID NO: 672360 - DNA, 15 bp, Homo sapiens
tgactttaatatttg

SEQ ID NO: 672361 - DNA, 15 bp, Homo sapiens
gactttaatatttgt

SEQ ID NO: 672362 - DNA, 15 bp, Homo sapiens
actttaatatttgtt

SEQ ID NO: 672363 - DNA, 15 bp, Homo sapiens
ctttaatatttgtta

SEQ ID NO: 672364 - DNA, 15 bp, Homo sapiens
tttaatatttgttaa

SEQ ID NO: 672365 - DNA, 15 bp, Homo sapiens
ttaatatttgttaaa

SEQ ID NO: 672366 - DNA, 15 bp, Homo sapiens
taatatttgttaaag

SEQ ID NO: 672367 - DNA, 15 bp, Homo sapiens
aatatttgttaaagg

SEQ ID NO: 672368 - DNA, 15 bp, Homo sapiens
atatttgttaaagga

SEQ ID NO: 672369 - DNA, 15 bp, Homo sapiens
tatttgttaaaggag

SEQ ID NO: 672370 - DNA, 15 bp, Homo sapiens
atttgttaaaggaga

SEQ ID NO: 672371 - DNA, 15 bp, Homo sapiens
tttgttaaaggagag

SEQ ID NO: 672372 - DNA, 15 bp, Homo sapiens
ttgttaaaggagagg

SEQ ID NO: 672373 - DNA, 15 bp, Homo sapiens
tgttaaaggagaggg

SEQ ID NO: 672374 - DNA, 15 bp, Homo sapiens
gttaaaggagagggt

SEQ ID NO: 672375 - DNA, 15 bp, Homo sapiens
ttaaaggagagggtt

SEQ ID NO: 672376 - DNA, 15 bp, Homo sapiens
taaaggagagggttt

SEQ ID NO: 672377 - DNA, 15 bp, Homo sapiens
aaaggagagggtttg

SEQ ID NO: 672378 - DNA, 15 bp, Homo sapiens
aaggagagggtttgg

SEQ ID NO: 672379 - DNA, 15 bp, Homo sapiens
aggagagggtttggg

SEQ ID NO: 672380 - DNA, 15 bp, Homo sapiens
ggagagggtttggga

SEQ ID NO: 672381 - DNA, 15 bp, Homo sapiens
gagagggtttgggaa

SEQ ID NO: 672382 - DNA, 15 bp, Homo sapiens
agagggtttgggaag

SEQ ID NO: 672383 - DNA, 15 bp, Homo sapiens
gagggtttgggaaga

SEQ ID NO: 672384 - DNA, 15 bp, Homo sapiens
agggtttgggaagaa

SEQ ID NO: 672385 - DNA, 15 bp, Homo sapiens
gggtttgggaagaaa

SEQ ID NO: 672386 - DNA, 15 bp, Homo sapiens
ggtttgggaagaaaa

SEQ ID NO: 672387 - DNA, 15 bp, Homo sapiens
gtttgggaagaaaaa

SEQ ID NO: 672388 - DNA, 15 bp, Homo sapiens
tttgggaagaaaaag

SEQ ID NO: 672389 - DNA, 15 bp, Homo sapiens
ttgggaagaaaaagt

SEQ ID NO: 672390 - DNA, 15 bp, Homo sapiens
tgggaagaaaaagta

SEQ ID NO: 672391 - DNA, 15 bp, Homo sapiens
gggaagaaaaagtag

SEQ ID NO: 672392 - DNA, 15 bp, Homo sapiens
ggaagaaaaagtagg

SEQ ID NO: 672393 - DNA, 15 bp, Homo sapiens
gaagaaaaagtaggt

SEQ ID NO: 672394 - DNA, 15 bp, Homo sapiens
aagaaaaagtaggtt

SEQ ID NO: 672395 - DNA, 15 bp, Homo sapiens
agaaaaagtaggtta

SEQ ID NO: 672396 - DNA, 15 bp, Homo sapiens
gaaaaagtaggttaa

SEQ ID NO: 672397 - DNA, 15 bp, Homo sapiens
aaaaagtaggttaaa

SEQ ID NO: 672398 - DNA, 15 bp, Homo sapiens
aaaagtaggttaaag

SEQ ID NO: 672399 - DNA, 15 bp, Homo sapiens
aaagtaggttaaagg

SEQ ID NO: 672400 - DNA, 15 bp, Homo sapiens
aagtaggttaaaggg

SEQ ID NO: 672401 - DNA, 15 bp, Homo sapiens
agtaggttaaagggt

SEQ ID NO: 672402 - DNA, 15 bp, Homo sapiens
gtaggttaaagggtt

SEQ ID NO: 672403 - DNA, 15 bp, Homo sapiens
taggttaaagggttg

SEQ ID NO: 672404 - DNA, 15 bp, Homo sapiens
aggttaaagggttga

SEQ ID NO: 672405 - DNA, 15 bp, Homo sapiens
ggttaaagggttgac

SEQ ID NO: 672406 - DNA, 15 bp, Homo sapiens
gttaaagggttgacc

SEQ ID NO: 672407 - DNA, 15 bp, Homo sapiens
ttaaagggttgacca

SEQ ID NO: 672408 - DNA, 15 bp, Homo sapiens
taaagggttgaccag

SEQ ID NO: 672409 - DNA, 15 bp, Homo sapiens
aaagggttgaccaga

SEQ ID NO: 672410 - DNA, 15 bp, Homo sapiens
aagggttgaccagag

SEQ ID NO: 672411 - DNA, 15 bp, Homo sapiens
agggttgaccagagt

SEQ ID NO: 672412 - DNA, 15 bp, Homo sapiens
gggttgaccagagtg

SEQ ID NO: 672413 - DNA, 15 bp, Homo sapiens
ggttgaccagagtgc

SEQ ID NO: 672414 - DNA, 15 bp, Homo sapiens
gttgaccagagtgcc

SEQ ID NO: 672415 - DNA, 15 bp, Homo sapiens
ttgaccagagtgcct

SEQ ID NO: 672416 - DNA, 15 bp, Homo sapiens
tgaccagagtgcctt

SEQ ID NO: 672417 - DNA, 15 bp, Homo sapiens
gaccagagtgccttt

SEQ ID NO: 672418 - DNA, 15 bp, Homo sapiens
accagagtgccttta

SEQ ID NO: 672419 - DNA, 15 bp, Homo sapiens
ccagagtgcctttaa

SEQ ID NO: 672420 - DNA, 15 bp, Homo sapiens
cagagtgcctttaaa

SEQ ID NO: 672421 - DNA, 15 bp, Homo sapiens
agagtgcctttaaac

SEQ ID NO: 672422 - DNA, 15 bp, Homo sapiens
gagtgcctttaaact

SEQ ID NO: 672423 - DNA, 15 bp, Homo sapiens
agtgcctttaaactt

SEQ ID NO: 672424 - DNA, 15 bp, Homo sapiens
gtgcctttaaacttt

SEQ ID NO: 672425 - DNA, 15 bp, Homo sapiens
tgcctttaaactttt

SEQ ID NO: 672426 - DNA, 15 bp, Homo sapiens
gcctttaaacttttc

SEQ ID NO: 672427 - DNA, 15 bp, Homo sapiens
cctttaaacttttct

SEQ ID NO: 672428 - DNA, 15 bp, Homo sapiens
ctttaaacttttctc

SEQ ID NO: 672429 - DNA, 15 bp, Homo sapiens
tttaaacttttctcc

SEQ ID NO: 672430 - DNA, 15 bp, Homo sapiens
ttaaacttttctccc

SEQ ID NO: 672431 - DNA, 15 bp, Homo sapiens
taaacttttctccct

SEQ ID NO: 672432 - DNA, 15 bp, Homo sapiens
aaacttttctcccta

SEQ ID NO: 672433 - DNA, 15 bp, Homo sapiens
aacttttctccctat

SEQ ID NO: 672434 - DNA, 15 bp, Homo sapiens
acttttctccctata

SEQ ID NO: 672435 - DNA, 15 bp, Homo sapiens
cttttctccctatac

SEQ ID NO: 672436 - DNA, 15 bp, Homo sapiens
ttttctccctataca

SEQ ID NO: 672437 - DNA, 15 bp, Homo sapiens
tttctccctatacaa

SEQ ID NO: 672438 - DNA, 15 bp, Homo sapiens
ttctccctatacaaa

SEQ ID NO: 672439 - DNA, 15 bp, Homo sapiens
tctccctatacaaaa

SEQ ID NO: 672440 - DNA, 15 bp, Homo sapiens
ctccctatacaaaag

SEQ ID NO: 672441 - DNA, 15 bp, Homo sapiens
tccctatacaaaagt

SEQ ID NO: 672442 - DNA, 15 bp, Homo sapiens
ccctatacaaaagtg

SEQ ID NO: 672443 - DNA, 15 bp, Homo sapiens
cctatacaaaagtga

SEQ ID NO: 672444 - DNA, 15 bp, Homo sapiens
ctatacaaaagtgat

SEQ ID NO: 672445 - DNA, 15 bp, Homo sapiens
tatacaaaagtgatc

SEQ ID NO: 672446 - DNA, 15 bp, Homo sapiens
atacaaaagtgatca

SEQ ID NO: 672447 - DNA, 15 bp, Homo sapiens
tacaaaagtgatcac

SEQ ID NO: 672448 - DNA, 15 bp, Homo sapiens
acaaaagtgatcact

SEQ ID NO: 672449 - DNA, 15 bp, Homo sapiens
caaaagtgatcactg

SEQ ID NO: 672450 - DNA, 15 bp, Homo sapiens
aaaagtgatcactgt

SEQ ID NO: 672451 - DNA, 15 bp, Homo sapiens
aaagtgatcactgtt

SEQ ID NO: 672452 - DNA, 15 bp, Homo sapiens
aagtgatcactgttt

SEQ ID NO: 672453 - DNA, 15 bp, Homo sapiens
agtgatcactgtttc

SEQ ID NO: 672454 - DNA, 15 bp, Homo sapiens
gtgatcactgtttct

SEQ ID NO: 672455 - DNA, 15 bp, Homo sapiens
tgatcactgtttctt

SEQ ID NO: 672456 - DNA, 15 bp, Homo sapiens
gatcactgtttcttt

SEQ ID NO: 672457 - DNA, 15 bp, Homo sapiens
atcactgtttctttt

SEQ ID NO: 672458 - DNA, 15 bp, Homo sapiens
tcactgtttcttttc

SEQ ID NO: 672459 - DNA, 15 bp, Homo sapiens
cactgtttcttttct

SEQ ID NO: 672460 - DNA, 15 bp, Homo sapiens
actgtttcttttctg

SEQ ID NO: 672461 - DNA, 15 bp, Homo sapiens
ctgtttcttttctgt

SEQ ID NO: 672462 - DNA, 15 bp, Homo sapiens
tgtttcttttctgtc

SEQ ID NO: 672463 - DNA, 15 bp, Homo sapiens
gtttcttttctgtcc

SEQ ID NO: 672464 - DNA, 15 bp, Homo sapiens
tttcttttctgtcca

SEQ ID NO: 672465 - DNA, 15 bp, Homo sapiens
ttcttttctgtccag

SEQ ID NO: 672466 - DNA, 15 bp, Homo sapiens
tcttttctgtccaga

SEQ ID NO: 672467 - DNA, 15 bp, Homo sapiens
cttttctgtccagat

SEQ ID NO: 672468 - DNA, 15 bp, Homo sapiens
ttttctgtccagata

SEQ ID NO: 672469 - DNA, 15 bp, Homo sapiens
tttctgtccagatac

SEQ ID NO: 672470 - DNA, 15 bp, Homo sapiens
ttctgtccagatact

SEQ ID NO: 672471 - DNA, 15 bp, Homo sapiens
tctgtccagatactc

SEQ ID NO: 672472 - DNA, 15 bp, Homo sapiens
ctgtccagatactct

SEQ ID NO: 672473 - DNA, 15 bp, Homo sapiens
tgtccagatactctc

SEQ ID NO: 672474 - DNA, 15 bp, Homo sapiens
gtccagatactctcg

SEQ ID NO: 672475 - DNA, 15 bp, Homo sapiens
tccagatactctcgg

SEQ ID NO: 672476 - DNA, 15 bp, Homo sapiens
ccagatactctcggc

SEQ ID NO: 672477 - DNA, 15 bp, Homo sapiens
cagatactctcggca

SEQ ID NO: 672478 - DNA, 15 bp, Homo sapiens
agatactctcggcat

SEQ ID NO: 672479 - DNA, 15 bp, Homo sapiens
gatactctcggcatt

SEQ ID NO: 672480 - DNA, 15 bp, Homo sapiens
atactctcggcattt

SEQ ID NO: 672481 - DNA, 15 bp, Homo sapiens
tactctcggcattta

SEQ ID NO: 672482 - DNA, 15 bp, Homo sapiens
actctcggcatttag

SEQ ID NO: 672483 - DNA, 15 bp, Homo sapiens
ctctcggcatttagt

SEQ ID NO: 672484 - DNA, 15 bp, Homo sapiens
tctcggcatttagtg

SEQ ID NO: 672485 - DNA, 15 bp, Homo sapiens
ctcggcatttagtga

SEQ ID NO: 672486 - DNA, 15 bp, Homo sapiens
tcggcatttagtgac

SEQ ID NO: 672487 - DNA, 15 bp, Homo sapiens
cggcatttagtgaca

SEQ ID NO: 672488 - DNA, 15 bp, Homo sapiens
ggcatttagtgacaa

SEQ ID NO: 672489 - DNA, 15 bp, Homo sapiens
gcatttagtgacaaa

SEQ ID NO: 672490 - DNA, 15 bp, Homo sapiens
catttagtgacaaag

SEQ ID NO: 672491 - DNA, 15 bp, Homo sapiens
atttagtgacaaaga

SEQ ID NO: 672492 - DNA, 15 bp, Homo sapiens
tttagtgacaaagaa

SEQ ID NO: 672493 - DNA, 15 bp, Homo sapiens
ttagtgacaaagaac

SEQ ID NO: 672494 - DNA, 15 bp, Homo sapiens
tagtgacaaagaact

SEQ ID NO: 672495 - DNA, 15 bp, Homo sapiens
agtgacaaagaacta

SEQ ID NO: 672496 - DNA, 15 bp, Homo sapiens
gtgacaaagaactag

SEQ ID NO: 672497 - DNA, 15 bp, Homo sapiens
tgacaaagaactagc

SEQ ID NO: 672498 - DNA, 15 bp, Homo sapiens
gacaaagaactagct

SEQ ID NO: 672499 - DNA, 15 bp, Homo sapiens
acaaagaactagctg

SEQ ID NO: 672500 - DNA, 15 bp, Homo sapiens
caaagaactagctgc

SEQ ID NO: 672501 - DNA, 15 bp, Homo sapiens
aaagaactagctgct

SEQ ID NO: 672502 - DNA, 15 bp, Homo sapiens
aagaactagctgctt

SEQ ID NO: 672503 - DNA, 15 bp, Homo sapiens
agaactagctgctta

SEQ ID NO: 672504 - DNA, 15 bp, Homo sapiens
gaactagctgcttat

SEQ ID NO: 672505 - DNA, 15 bp, Homo sapiens
aactagctgcttatg

SEQ ID NO: 672506 - DNA, 15 bp, Homo sapiens
actagctgcttatgc

SEQ ID NO: 672507 - DNA, 15 bp, Homo sapiens
ctagctgcttatgca

SEQ ID NO: 672508 - DNA, 15 bp, Homo sapiens
tagctgcttatgcaa

SEQ ID NO: 672509 - DNA, 15 bp, Homo sapiens
agctgcttatgcaaa

SEQ ID NO: 672510 - DNA, 15 bp, Homo sapiens
gctgcttatgcaaaa

SEQ ID NO: 672511 - DNA, 15 bp, Homo sapiens
ctgcttatgcaaaag

SEQ ID NO: 672512 - DNA, 15 bp, Homo sapiens
tgcttatgcaaaagc

SEQ ID NO: 672513 - DNA, 15 bp, Homo sapiens
gcttatgcaaaagca

SEQ ID NO: 672514 - DNA, 15 bp, Homo sapiens
cttatgcaaaagcag

SEQ ID NO: 672515 - DNA, 15 bp, Homo sapiens
ttatgcaaaagcagg

SEQ ID NO: 672516 - DNA, 15 bp, Homo sapiens
tatgcaaaagcaggc

SEQ ID NO: 672517 - DNA, 15 bp, Homo sapiens
atgcaaaagcaggcg

SEQ ID NO: 672518 - DNA, 15 bp, Homo sapiens
tgcaaaagcaggcgc

SEQ ID NO: 672519 - DNA, 15 bp, Homo sapiens
gcaaaagcaggcgcc

SEQ ID NO: 672520 - DNA, 15 bp, Homo sapiens
caaaagcaggcgccg

SEQ ID NO: 672521 - DNA, 15 bp, Homo sapiens
aaaagcaggcgccgt

SEQ ID NO: 672522 - DNA, 15 bp, Homo sapiens
aaagcaggcgccgtg

SEQ ID NO: 672523 - DNA, 15 bp, Homo sapiens
aagcaggcgccgtgg

SEQ ID NO: 672524 - DNA, 15 bp, Homo sapiens
agcaggcgccgtggc

SEQ ID NO: 672525 - DNA, 15 bp, Homo sapiens
gcaggcgccgtggca

SEQ ID NO: 672526 - DNA, 15 bp, Homo sapiens
caggcgccgtggcag

SEQ ID NO: 672527 - DNA, 15 bp, Homo sapiens
aggcgccgtggcaga

SEQ ID NO: 672528 - DNA, 15 bp, Homo sapiens
ggcgccgtggcagaa

SEQ ID NO: 672529 - DNA, 15 bp, Homo sapiens
gcgccgtggcagaag

SEQ ID NO: 672530 - DNA, 15 bp, Homo sapiens
cgccgtggcagaaga

SEQ ID NO: 672531 - DNA, 15 bp, Homo sapiens
gccgtggcagaagag

SEQ ID NO: 672532 - DNA, 15 bp, Homo sapiens
ccgtggcagaagagg

SEQ ID NO: 672533 - DNA, 15 bp, Homo sapiens
cgtggcagaagaggc

SEQ ID NO: 672534 - DNA, 15 bp, Homo sapiens
gtggcagaagaggct

SEQ ID NO: 672535 - DNA, 15 bp, Homo sapiens
tggcagaagaggctc

SEQ ID NO: 672536 - DNA, 15 bp, Homo sapiens
ggcagaagaggctct

SEQ ID NO: 672537 - DNA, 15 bp, Homo sapiens
gcagaagaggctctg

SEQ ID NO: 672538 - DNA, 15 bp, Homo sapiens
cagaagaggctctgg

SEQ ID NO: 672539 - DNA, 15 bp, Homo sapiens
agaagaggctctggg

SEQ ID NO: 672540 - DNA, 15 bp, Homo sapiens
gaagaggctctgggg

SEQ ID NO: 672541 - DNA, 15 bp, Homo sapiens
aagaggctctggggg

SEQ ID NO: 672542 - DNA, 15 bp, Homo sapiens
agaggctctgggggc

SEQ ID NO: 672543 - DNA, 15 bp, Homo sapiens
gaggctctgggggcc

SEQ ID NO: 672544 - DNA, 15 bp, Homo sapiens
aggctctgggggcca

SEQ ID NO: 672545 - DNA, 15 bp, Homo sapiens
ggctctgggggccat

SEQ ID NO: 672546 - DNA, 15 bp, Homo sapiens
gctctgggggccatc

SEQ ID NO: 672547 - DNA, 15 bp, Homo sapiens
ctctgggggccatca

SEQ ID NO: 672548 - DNA, 15 bp, Homo sapiens
tctgggggccatcag

SEQ ID NO: 672549 - DNA, 15 bp, Homo sapiens
ctgggggccatcagg

SEQ ID NO: 672550 - DNA, 15 bp, Homo sapiens
tgggggccatcagga

SEQ ID NO: 672551 - DNA, 15 bp, Homo sapiens
gggggccatcaggac

SEQ ID NO: 672552 - DNA, 15 bp, Homo sapiens
ggggccatcaggact

SEQ ID NO: 672553 - DNA, 15 bp, Homo sapiens
gggccatcaggactg

SEQ ID NO: 672554 - DNA, 15 bp, Homo sapiens
ggccatcaggactgt

SEQ ID NO: 672555 - DNA, 15 bp, Homo sapiens
gccatcaggactgtg

SEQ ID NO: 672556 - DNA, 15 bp, Homo sapiens
ccatcaggactgtga

SEQ ID NO: 672557 - DNA, 15 bp, Homo sapiens
catcaggactgtgat

SEQ ID NO: 672558 - DNA, 15 bp, Homo sapiens
atcaggactgtgata

SEQ ID NO: 672559 - DNA, 15 bp, Homo sapiens
tcaggactgtgatag

SEQ ID NO: 672560 - DNA, 15 bp, Homo sapiens
caggactgtgatagc

SEQ ID NO: 672561 - DNA, 15 bp, Homo sapiens
aggactgtgatagct

SEQ ID NO: 672562 - DNA, 15 bp, Homo sapiens
ggactgtgatagctt

SEQ ID NO: 672563 - DNA, 15 bp, Homo sapiens
gactgtgatagcttt

SEQ ID NO: 672564 - DNA, 15 bp, Homo sapiens
actgtgatagctttc

SEQ ID NO: 672565 - DNA, 15 bp, Homo sapiens
ctgtgatagctttcg

SEQ ID NO: 672566 - DNA, 15 bp, Homo sapiens
tgtgatagctttcgg

SEQ ID NO: 672567 - DNA, 15 bp, Homo sapiens
gtgatagctttcggg

SEQ ID NO: 672568 - DNA, 15 bp, Homo sapiens
tgatagctttcgggg

SEQ ID NO: 672569 - DNA, 15 bp, Homo sapiens
gatagctttcggggg

SEQ ID NO: 672570 - DNA, 15 bp, Homo sapiens
atagctttcgggggc

SEQ ID NO: 672571 - DNA, 15 bp, Homo sapiens
tagctttcgggggcc

SEQ ID NO: 672572 - DNA, 15 bp, Homo sapiens
agctttcgggggcca

SEQ ID NO: 672573 - DNA, 15 bp, Homo sapiens
gctttcgggggccag

SEQ ID NO: 672574 - DNA, 15 bp, Homo sapiens
ctttcgggggccaga

SEQ ID NO: 672575 - DNA, 15 bp, Homo sapiens
tttcgggggccagaa

SEQ ID NO: 672576 - DNA, 15 bp, Homo sapiens
ttcgggggccagaac

SEQ ID NO: 672577 - DNA, 15 bp, Homo sapiens
tcgggggccagaaca

SEQ ID NO: 672578 - DNA, 15 bp, Homo sapiens
cgggggccagaacaa

SEQ ID NO: 672579 - DNA, 15 bp, Homo sapiens
gggggccagaacaaa

SEQ ID NO: 672580 - DNA, 15 bp, Homo sapiens
ggggccagaacaaag

SEQ ID NO: 672581 - DNA, 15 bp, Homo sapiens
gggccagaacaaaga

SEQ ID NO: 672582 - DNA, 15 bp, Homo sapiens
ggccagaacaaagag

SEQ ID NO: 672583 - DNA, 15 bp, Homo sapiens
gccagaacaaagagc

SEQ ID NO: 672584 - DNA, 15 bp, Homo sapiens
ccagaacaaagagct

SEQ ID NO: 672585 - DNA, 15 bp, Homo sapiens
cagaacaaagagctg

SEQ ID NO: 672586 - DNA, 15 bp, Homo sapiens
agaacaaagagctgg

SEQ ID NO: 672587 - DNA, 15 bp, Homo sapiens
gaacaaagagctgga

SEQ ID NO: 672588 - DNA, 15 bp, Homo sapiens
aacaaagagctggaa

SEQ ID NO: 672589 - DNA, 15 bp, Homo sapiens
acaaagagctggaaa

SEQ ID NO: 672590 - DNA, 15 bp, Homo sapiens
caaagagctggaaag

SEQ ID NO: 672591 - DNA, 15 bp, Homo sapiens
aaagagctggaaagg

SEQ ID NO: 672592 - DNA, 15 bp, Homo sapiens
aagagctggaaaggt

SEQ ID NO: 672593 - DNA, 15 bp, Homo sapiens
agagctggaaaggtc

SEQ ID NO: 672594 - DNA, 15 bp, Homo sapiens
gagctggaaaggtca

SEQ ID NO: 672595 - DNA, 15 bp, Homo sapiens
agctggaaaggtcag

SEQ ID NO: 672596 - DNA, 15 bp, Homo sapiens
gctggaaaggtcagg

SEQ ID NO: 672597 - DNA, 15 bp, Homo sapiens
ctggaaaggtcagga

SEQ ID NO: 672598 - DNA, 15 bp, Homo sapiens
tggaaaggtcaggaa

SEQ ID NO: 672599 - DNA, 15 bp, Homo sapiens
ggaaaggtcaggaag

SEQ ID NO: 672600 - DNA, 15 bp, Homo sapiens
gaaaggtcaggaagg

SEQ ID NO: 672601 - DNA, 15 bp, Homo sapiens
aaaggtcaggaaggt

SEQ ID NO: 672602 - DNA, 15 bp, Homo sapiens
aaggtcaggaaggtt

SEQ ID NO: 672603 - DNA, 15 bp, Homo sapiens
aggtcaggaaggttc

SEQ ID NO: 672604 - DNA, 15 bp, Homo sapiens
ggtcaggaaggttct

SEQ ID NO: 672605 - DNA, 15 bp, Homo sapiens
gtcaggaaggttctt

SEQ ID NO: 672606 - DNA, 15 bp, Homo sapiens
tcaggaaggttcttt

SEQ ID NO: 672607 - DNA, 15 bp, Homo sapiens
caggaaggttcttta

SEQ ID NO: 672608 - DNA, 15 bp, Homo sapiens
aggaaggttctttag

SEQ ID NO: 672609 - DNA, 15 bp, Homo sapiens
ggaaggttctttagc

SEQ ID NO: 672610 - DNA, 15 bp, Homo sapiens
gaaggttctttagcc

SEQ ID NO: 672611 - DNA, 15 bp, Homo sapiens
aaggttctttagcca

SEQ ID NO: 672612 - DNA, 15 bp, Homo sapiens
aggttctttagccac

SEQ ID NO: 672613 - DNA, 15 bp, Homo sapiens
ggttctttagccact

SEQ ID NO: 672614 - DNA, 15 bp, Homo sapiens
gttctttagccactg

SEQ ID NO: 672615 - DNA, 15 bp, Homo sapiens
ttctttagccactgg

SEQ ID NO: 672616 - DNA, 15 bp, Homo sapiens
tctttagccactggt

SEQ ID NO: 672617 - DNA, 15 bp, Homo sapiens
ctttagccactggtt

SEQ ID NO: 672618 - DNA, 15 bp, Homo sapiens
tttagccactggttt

SEQ ID NO: 672619 - DNA, 15 bp, Homo sapiens
ttagccactggttta

SEQ ID NO: 672620 - DNA, 15 bp, Homo sapiens
tagccactggtttaa

SEQ ID NO: 672621 - DNA, 15 bp, Homo sapiens
agccactggtttaag

SEQ ID NO: 672622 - DNA, 15 bp, Homo sapiens
gccactggtttaagg

SEQ ID NO: 672623 - DNA, 15 bp, Homo sapiens
ccactggtttaagga

SEQ ID NO: 672624 - DNA, 15 bp, Homo sapiens
cactggtttaaggaa

SEQ ID NO: 672625 - DNA, 15 bp, Homo sapiens
actggtttaaggaat

SEQ ID NO: 672626 - DNA, 15 bp, Homo sapiens
ctggtttaaggaatg

SEQ ID NO: 672627 - DNA, 15 bp, Homo sapiens
tggtttaaggaatgt

SEQ ID NO: 672628 - DNA, 15 bp, Homo sapiens
ggtttaaggaatgtg

SEQ ID NO: 672629 - DNA, 15 bp, Homo sapiens
gtttaaggaatgtgt

SEQ ID NO: 672630 - DNA, 15 bp, Homo sapiens
tttaaggaatgtgtt

SEQ ID NO: 672631 - DNA, 15 bp, Homo sapiens
ttaaggaatgtgttt

SEQ ID NO: 672632 - DNA, 15 bp, Homo sapiens
taaggaatgtgtttt

SEQ ID NO: 672633 - DNA, 15 bp, Homo sapiens
aaggaatgtgttttt

SEQ ID NO: 672634 - DNA, 15 bp, Homo sapiens
aggaatgtgttttta

SEQ ID NO: 672635 - DNA, 15 bp, Homo sapiens
ggaatgtgtttttac

SEQ ID NO: 672636 - DNA, 15 bp, Homo sapiens
gaatgtgtttttaca

SEQ ID NO: 672637 - DNA, 15 bp, Homo sapiens
aatgtgtttttacat

SEQ ID NO: 672638 - DNA, 15 bp, Homo sapiens
atgtgtttttacatt

SEQ ID NO: 672639 - DNA, 15 bp, Homo sapiens
tgtgtttttacattt

SEQ ID NO: 672640 - DNA, 15 bp, Homo sapiens
gtgtttttacatttt

SEQ ID NO: 672641 - DNA, 15 bp, Homo sapiens
tgtttttacattttg

SEQ ID NO: 672642 - DNA, 15 bp, Homo sapiens
gtttttacattttgt

SEQ ID NO: 672643 - DNA, 15 bp, Homo sapiens
tttttacattttgtt

SEQ ID NO: 672644 - DNA, 15 bp, Homo sapiens
ttttacattttgttg

SEQ ID NO: 672645 - DNA, 15 bp, Homo sapiens
tttacattttgttgc

SEQ ID NO: 672646 - DNA, 15 bp, Homo sapiens
ttacattttgttgct

SEQ ID NO: 672647 - DNA, 15 bp, Homo sapiens
tacattttgttgctt

SEQ ID NO: 672648 - DNA, 15 bp, Homo sapiens
acattttgttgcttc

SEQ ID NO: 672649 - DNA, 15 bp, Homo sapiens
cattttgttgcttct

SEQ ID NO: 672650 - DNA, 15 bp, Homo sapiens
attttgttgcttctt

SEQ ID NO: 672651 - DNA, 15 bp, Homo sapiens
ttttgttgcttcttc

SEQ ID NO: 672652 - DNA, 15 bp, Homo sapiens
tttgttgcttcttct

SEQ ID NO: 672653 - DNA, 15 bp, Homo sapiens
ttgttgcttcttctt

SEQ ID NO: 672654 - DNA, 15 bp, Homo sapiens
tgttgcttcttcttt

SEQ ID NO: 672655 - DNA, 15 bp, Homo sapiens
gttgcttcttctttg

SEQ ID NO: 672656 - DNA, 15 bp, Homo sapiens
ttgcttcttctttgt

SEQ ID NO: 672657 - DNA, 15 bp, Homo sapiens
tgcttcttctttgtg

SEQ ID NO: 672658 - DNA, 15 bp, Homo sapiens
gcttcttctttgtgg

SEQ ID NO: 672659 - DNA, 15 bp, Homo sapiens
cttcttctttgtggt

SEQ ID NO: 672660 - DNA, 15 bp, Homo sapiens
ttcttctttgtggta

SEQ ID NO: 672661 - DNA, 15 bp, Homo sapiens
tcttctttgtggtat

SEQ ID NO: 672662 - DNA, 15 bp, Homo sapiens
cttctttgtggtatg

SEQ ID NO: 672663 - DNA, 15 bp, Homo sapiens
ttctttgtggtatgt

SEQ ID NO: 672664 - DNA, 15 bp, Homo sapiens
tctttgtggtatgtg

SEQ ID NO: 672665 - DNA, 15 bp, Homo sapiens
ctttgtggtatgtgt

SEQ ID NO: 672666 - DNA, 15 bp, Homo sapiens
tttgtggtatgtgtt

SEQ ID NO: 672667 - DNA, 15 bp, Homo sapiens
ttgtggtatgtgttt

SEQ ID NO: 672668 - DNA, 15 bp, Homo sapiens
tgtggtatgtgtttt

SEQ ID NO: 672669 - DNA, 15 bp, Homo sapiens
gtggtatgtgttttt

SEQ ID NO: 672670 - DNA, 15 bp, Homo sapiens
tggtatgtgtttttt

SEQ ID NO: 672671 - DNA, 15 bp, Homo sapiens
ggtatgtgtttttta

SEQ ID NO: 672672 - DNA, 15 bp, Homo sapiens
gtatgtgttttttac

SEQ ID NO: 672673 - DNA, 15 bp, Homo sapiens
tatgtgttttttacc

SEQ ID NO: 672674 - DNA, 15 bp, Homo sapiens
atgtgttttttacct

SEQ ID NO: 672675 - DNA, 15 bp, Homo sapiens
tgtgttttttacctt

SEQ ID NO: 672676 - DNA, 15 bp, Homo sapiens
gtgttttttaccttc

SEQ ID NO: 672677 - DNA, 15 bp, Homo sapiens
tgttttttaccttcc

SEQ ID NO: 672678 - DNA, 15 bp, Homo sapiens
gttttttaccttccc

SEQ ID NO: 672679 - DNA, 15 bp, Homo sapiens
ttttttaccttccct

SEQ ID NO: 672680 - DNA, 15 bp, Homo sapiens
tttttaccttccctt

SEQ ID NO: 672681 - DNA, 15 bp, Homo sapiens
ttttaccttcccttt

SEQ ID NO: 672682 - DNA, 15 bp, Homo sapiens
tttaccttccctttc

SEQ ID NO: 672683 - DNA, 15 bp, Homo sapiens
ttaccttccctttcc

SEQ ID NO: 672684 - DNA, 15 bp, Homo sapiens
taccttccctttcct

SEQ ID NO: 672685 - DNA, 15 bp, Homo sapiens
accttccctttccta

SEQ ID NO: 672686 - DNA, 15 bp, Homo sapiens
ccttccctttcctaa

SEQ ID NO: 672687 - DNA, 15 bp, Homo sapiens
cttccctttcctaat

SEQ ID NO: 672688 - DNA, 15 bp, Homo sapiens
ttccctttcctaata

SEQ ID NO: 672689 - DNA, 15 bp, Homo sapiens
tccctttcctaatat

SEQ ID NO: 672690 - DNA, 15 bp, Homo sapiens
ccctttcctaatatt

SEQ ID NO: 672691 - DNA, 15 bp, Homo sapiens
cctttcctaatatta

SEQ ID NO: 672692 - DNA, 15 bp, Homo sapiens
ctttcctaatattaa

SEQ ID NO: 672693 - DNA, 15 bp, Homo sapiens
tttcctaatattaac

SEQ ID NO: 672694 - DNA, 15 bp, Homo sapiens
ttcctaatattaacc

SEQ ID NO: 672695 - DNA, 15 bp, Homo sapiens
tcctaatattaaccc

SEQ ID NO: 672696 - DNA, 15 bp, Homo sapiens
cctaatattaaccct

SEQ ID NO: 672697 - DNA, 15 bp, Homo sapiens
ctaatattaaccctt

SEQ ID NO: 672698 - DNA, 15 bp, Homo sapiens
taatattaacccttc

SEQ ID NO: 672699 - DNA, 15 bp, Homo sapiens
aatattaacccttct

SEQ ID NO: 672700 - DNA, 15 bp, Homo sapiens
atattaacccttctc

SEQ ID NO: 672701 - DNA, 15 bp, Homo sapiens
tattaacccttctcg

SEQ ID NO: 672702 - DNA, 15 bp, Homo sapiens
attaacccttctcgc

SEQ ID NO: 672703 - DNA, 15 bp, Homo sapiens
ttaacccttctcgca

SEQ ID NO: 672704 - DNA, 15 bp, Homo sapiens
taacccttctcgcat

SEQ ID NO: 672705 - DNA, 15 bp, Homo sapiens
aacccttctcgcata

SEQ ID NO: 672706 - DNA, 15 bp, Homo sapiens
acccttctcgcataa

SEQ ID NO: 672707 - DNA, 15 bp, Homo sapiens
cccttctcgcataaa

SEQ ID NO: 672708 - DNA, 15 bp, Homo sapiens
ccttctcgcataaat

SEQ ID NO: 672709 - DNA, 15 bp, Homo sapiens
cttctcgcataaatt

SEQ ID NO: 672710 - DNA, 15 bp, Homo sapiens
ttctcgcataaatta

SEQ ID NO: 672711 - DNA, 15 bp, Homo sapiens
tctcgcataaattat

SEQ ID NO: 672712 - DNA, 15 bp, Homo sapiens
ctcgcataaattata

SEQ ID NO: 672713 - DNA, 15 bp, Homo sapiens
tcgcataaattataa

SEQ ID NO: 672714 - DNA, 15 bp, Homo sapiens
cgcataaattataag

SEQ ID NO: 672715 - DNA, 15 bp, Homo sapiens
gcataaattataagc

SEQ ID NO: 672716 - DNA, 15 bp, Homo sapiens
cataaattataagca

SEQ ID NO: 672717 - DNA, 15 bp, Homo sapiens
ataaattataagcac

SEQ ID NO: 672718 - DNA, 15 bp, Homo sapiens
taaattataagcacc

SEQ ID NO: 672719 - DNA, 15 bp, Homo sapiens
aaattataagcaccc

SEQ ID NO: 672720 - DNA, 15 bp, Homo sapiens
aattataagcaccct

SEQ ID NO: 672721 - DNA, 15 bp, Homo sapiens
attataagcaccctt

SEQ ID NO: 672722 - DNA, 15 bp, Homo sapiens
ttataagcacccttt

SEQ ID NO: 672723 - DNA, 15 bp, Homo sapiens
tataagcacccttta

SEQ ID NO: 672724 - DNA, 15 bp, Homo sapiens
ataagcaccctttac

SEQ ID NO: 672725 - DNA, 15 bp, Homo sapiens
taagcaccctttact

SEQ ID NO: 672726 - DNA, 15 bp, Homo sapiens
aagcaccctttactg

SEQ ID NO: 672727 - DNA, 15 bp, Homo sapiens
agcaccctttactga

SEQ ID NO: 672728 - DNA, 15 bp, Homo sapiens
gcaccctttactgat

SEQ ID NO: 672729 - DNA, 15 bp, Homo sapiens
caccctttactgatg

SEQ ID NO: 672730 - DNA, 15 bp, Homo sapiens
accctttactgatgg

SEQ ID NO: 672731 - DNA, 15 bp, Homo sapiens
ccctttactgatggc

SEQ ID NO: 672732 - DNA, 15 bp, Homo sapiens
cctttactgatggct

SEQ ID NO: 672733 - DNA, 15 bp, Homo sapiens
ctttactgatggcta

SEQ ID NO: 672734 - DNA, 15 bp, Homo sapiens
tttactgatggctat

SEQ ID NO: 672735 - DNA, 15 bp, Homo sapiens
ttactgatggctata

SEQ ID NO: 672736 - DNA, 15 bp, Homo sapiens
tactgatggctatag

SEQ ID NO: 672737 - DNA, 15 bp, Homo sapiens
actgatggctatagt

SEQ ID NO: 672738 - DNA, 15 bp, Homo sapiens
ctgatggctatagtt

SEQ ID NO: 672739 - DNA, 15 bp, Homo sapiens
tgatggctatagttg

SEQ ID NO: 672740 - DNA, 15 bp, Homo sapiens
gatggctatagttga

SEQ ID NO: 672741 - DNA, 15 bp, Homo sapiens
atggctatagttgaa

SEQ ID NO: 672742 - DNA, 15 bp, Homo sapiens
tggctatagttgaat

SEQ ID NO: 672743 - DNA, 15 bp, Homo sapiens
ggctatagttgaatg

SEQ ID NO: 672744 - DNA, 15 bp, Homo sapiens
gctatagttgaatgt

SEQ ID NO: 672745 - DNA, 15 bp, Homo sapiens
ctatagttgaatgtc

SEQ ID NO: 672746 - DNA, 15 bp, Homo sapiens
tatagttgaatgtca

SEQ ID NO: 672747 - DNA, 15 bp, Homo sapiens
atagttgaatgtcag

SEQ ID NO: 672748 - DNA, 15 bp, Homo sapiens
tagttgaatgtcaga

SEQ ID NO: 672749 - DNA, 15 bp, Homo sapiens
agttgaatgtcagac

SEQ ID NO: 672750 - DNA, 15 bp, Homo sapiens
gttgaatgtcagact

SEQ ID NO: 672751 - DNA, 15 bp, Homo sapiens
ttgaatgtcagactc

SEQ ID NO: 672752 - DNA, 15 bp, Homo sapiens
tgaatgtcagactct

SEQ ID NO: 672753 - DNA, 15 bp, Homo sapiens
gaatgtcagactcta

SEQ ID NO: 672754 - DNA, 15 bp, Homo sapiens
aatgtcagactctaa

SEQ ID NO: 672755 - DNA, 15 bp, Homo sapiens
atgtcagactctaaa

SEQ ID NO: 672756 - DNA, 15 bp, Homo sapiens
tgtcagactctaaag

SEQ ID NO: 672757 - DNA, 15 bp, Homo sapiens
gtcagactctaaagc

SEQ ID NO: 672758 - DNA, 15 bp, Homo sapiens
tcagactctaaagca

SEQ ID NO: 672759 - DNA, 15 bp, Homo sapiens
cagactctaaagcaa

SEQ ID NO: 672760 - DNA, 15 bp, Homo sapiens
agactctaaagcaag

SEQ ID NO: 672761 - DNA, 15 bp, Homo sapiens
gactctaaagcaaga

SEQ ID NO: 672762 - DNA, 15 bp, Homo sapiens
actctaaagcaagat

SEQ ID NO: 672763 - DNA, 15 bp, Homo sapiens
ctctaaagcaagatt

SEQ ID NO: 672764 - DNA, 15 bp, Homo sapiens
tctaaagcaagattc

SEQ ID NO: 672765 - DNA, 15 bp, Homo sapiens
ctaaagcaagattct

SEQ ID NO: 672766 - DNA, 15 bp, Homo sapiens
taaagcaagattctt

SEQ ID NO: 672767 - DNA, 15 bp, Homo sapiens
aaagcaagattctta

SEQ ID NO: 672768 - DNA, 15 bp, Homo sapiens
aagcaagattcttaa

SEQ ID NO: 672769 - DNA, 15 bp, Homo sapiens
agcaagattcttaat

SEQ ID NO: 672770 - DNA, 15 bp, Homo sapiens
gcaagattcttaatc

SEQ ID NO: 672771 - DNA, 15 bp, Homo sapiens
caagattcttaatca

SEQ ID NO: 672772 - DNA, 15 bp, Homo sapiens
aagattcttaatcat

SEQ ID NO: 672773 - DNA, 15 bp, Homo sapiens
agattcttaatcatt

SEQ ID NO: 672774 - DNA, 15 bp, Homo sapiens
gattcttaatcattt

SEQ ID NO: 672775 - DNA, 15 bp, Homo sapiens
attcttaatcattta

SEQ ID NO: 672776 - DNA, 15 bp, Homo sapiens
ttcttaatcatttat

SEQ ID NO: 672777 - DNA, 15 bp, Homo sapiens
tcttaatcatttatg

SEQ ID NO: 672778 - DNA, 15 bp, Homo sapiens
cttaatcatttatgt

SEQ ID NO: 672779 - DNA, 15 bp, Homo sapiens
ttaatcatttatgtt

SEQ ID NO: 672780 - DNA, 15 bp, Homo sapiens
taatcatttatgttc

SEQ ID NO: 672781 - DNA, 15 bp, Homo sapiens
aatcatttatgttcc

SEQ ID NO: 672782 - DNA, 15 bp, Homo sapiens
atcatttatgttcca

SEQ ID NO: 672783 - DNA, 15 bp, Homo sapiens
tcatttatgttccat

SEQ ID NO: 672784 - DNA, 15 bp, Homo sapiens
catttatgttccatg

SEQ ID NO: 672785 - DNA, 15 bp, Homo sapiens
atttatgttccatgg

SEQ ID NO: 672786 - DNA, 15 bp, Homo sapiens
tttatgttccatgga

SEQ ID NO: 672787 - DNA, 15 bp, Homo sapiens
ttatgttccatggac

SEQ ID NO: 672788 - DNA, 15 bp, Homo sapiens
tatgttccatggact

SEQ ID NO: 672789 - DNA, 15 bp, Homo sapiens
atgttccatggactc

SEQ ID NO: 672790 - DNA, 15 bp, Homo sapiens
tgttccatggactct

SEQ ID NO: 672791 - DNA, 15 bp, Homo sapiens
gttccatggactctt

SEQ ID NO: 672792 - DNA, 15 bp, Homo sapiens
ttccatggactcttt

SEQ ID NO: 672793 - DNA, 15 bp, Homo sapiens
tccatggactctttt

SEQ ID NO: 672794 - DNA, 15 bp, Homo sapiens
ccatggactcttttg

SEQ ID NO: 672795 - DNA, 15 bp, Homo sapiens
catggactcttttgg

SEQ ID NO: 672796 - DNA, 15 bp, Homo sapiens
atggactcttttggc

SEQ ID NO: 672797 - DNA, 15 bp, Homo sapiens
tggactcttttggct

SEQ ID NO: 672798 - DNA, 15 bp, Homo sapiens
ggactcttttggcta

SEQ ID NO: 672799 - DNA, 15 bp, Homo sapiens
gactcttttggctat

SEQ ID NO: 672800 - DNA, 15 bp, Homo sapiens
actcttttggctatg

SEQ ID NO: 672801 - DNA, 15 bp, Homo sapiens
ctcttttggctatgt

SEQ ID NO: 672802 - DNA, 15 bp, Homo sapiens
tcttttggctatgtg

SEQ ID NO: 672803 - DNA, 15 bp, Homo sapiens
cttttggctatgtga

SEQ ID NO: 672804 - DNA, 15 bp, Homo sapiens
ttttggctatgtgat

SEQ ID NO: 672805 - DNA, 15 bp, Homo sapiens
tttggctatgtgata

SEQ ID NO: 672806 - DNA, 15 bp, Homo sapiens
ttggctatgtgataa

SEQ ID NO: 672807 - DNA, 15 bp, Homo sapiens
tggctatgtgataat

SEQ ID NO: 672808 - DNA, 15 bp, Homo sapiens
ggctatgtgataata

SEQ ID NO: 672809 - DNA, 15 bp, Homo sapiens
gctatgtgataatac

SEQ ID NO: 672810 - DNA, 15 bp, Homo sapiens
ctatgtgataataca

SEQ ID NO: 672811 - DNA, 15 bp, Homo sapiens
tatgtgataatacaa

SEQ ID NO: 672812 - DNA, 15 bp, Homo sapiens
atgtgataatacaaa

SEQ ID NO: 672813 - DNA, 15 bp, Homo sapiens
tgtgataatacaaat

SEQ ID NO: 672814 - DNA, 15 bp, Homo sapiens
gtgataatacaaatg

SEQ ID NO: 672815 - DNA, 15 bp, Homo sapiens
tgataatacaaatgg

SEQ ID NO: 672816 - DNA, 15 bp, Homo sapiens
gataatacaaatgga

SEQ ID NO: 672817 - DNA, 15 bp, Homo sapiens
ataatacaaatggac

SEQ ID NO: 672818 - DNA, 15 bp, Homo sapiens
taatacaaatggact

SEQ ID NO: 672819 - DNA, 15 bp, Homo sapiens
aatacaaatggactc

SEQ ID NO: 672820 - DNA, 15 bp, Homo sapiens
atacaaatggactcc

SEQ ID NO: 672821 - DNA, 15 bp, Homo sapiens
tacaaatggactccc

SEQ ID NO: 672822 - DNA, 15 bp, Homo sapiens
acaaatggactccct

SEQ ID NO: 672823 - DNA, 15 bp, Homo sapiens
caaatggactccctt

SEQ ID NO: 672824 - DNA, 15 bp, Homo sapiens
aaatggactcccttg

SEQ ID NO: 672825 - DNA, 15 bp, Homo sapiens
aatggactcccttgt

SEQ ID NO: 672826 - DNA, 15 bp, Homo sapiens
atggactcccttgtt

SEQ ID NO: 672827 - DNA, 15 bp, Homo sapiens
tggactcccttgttt

SEQ ID NO: 672828 - DNA, 15 bp, Homo sapiens
ggactcccttgtttt

SEQ ID NO: 672829 - DNA, 15 bp, Homo sapiens
gactcccttgttttt

SEQ ID NO: 672830 - DNA, 15 bp, Homo sapiens
actcccttgttttta

SEQ ID NO: 672831 - DNA, 15 bp, Homo sapiens
ctcccttgtttttaa

SEQ ID NO: 672832 - DNA, 15 bp, Homo sapiens
tcccttgtttttaaa

SEQ ID NO: 672833 - DNA, 15 bp, Homo sapiens
cccttgtttttaaat

SEQ ID NO: 672834 - DNA, 15 bp, Homo sapiens
ccttgtttttaaatg

SEQ ID NO: 672835 - DNA, 15 bp, Homo sapiens
cttgtttttaaatgc

SEQ ID NO: 672836 - DNA, 15 bp, Homo sapiens
ttgtttttaaatgca

SEQ ID NO: 672837 - DNA, 15 bp, Homo sapiens
tgtttttaaatgcat

SEQ ID NO: 672838 - DNA, 15 bp, Homo sapiens
gtttttaaatgcata

SEQ ID NO: 672839 - DNA, 15 bp, Homo sapiens
tttttaaatgcataa

SEQ ID NO: 672840 - DNA, 15 bp, Homo sapiens
ttttaaatgcataaa

SEQ ID NO: 672841 - DNA, 15 bp, Homo sapiens
tttaaatgcataaac

SEQ ID NO: 672842 - DNA, 15 bp, Homo sapiens
ttaaatgcataaacc

SEQ ID NO: 672843 - DNA, 15 bp, Homo sapiens
taaatgcataaacca

SEQ ID NO: 672844 - DNA, 15 bp, Homo sapiens
aaatgcataaaccaa

SEQ ID NO: 672845 - DNA, 15 bp, Homo sapiens
aatgcataaaccaaa

SEQ ID NO: 672846 - DNA, 15 bp, Homo sapiens
atgcataaaccaaaa

SEQ ID NO: 672847 - DNA, 15 bp, Homo sapiens
tgcataaaccaaaat

SEQ ID NO: 672848 - DNA, 15 bp, Homo sapiens
gcataaaccaaaata

SEQ ID NO: 672849 - DNA, 15 bp, Homo sapiens
cataaaccaaaatat

SEQ ID NO: 672850 - DNA, 15 bp, Homo sapiens
ataaaccaaaatatg

SEQ ID NO: 672851 - DNA, 15 bp, Homo sapiens
taaaccaaaatatgc

SEQ ID NO: 672852 - DNA, 15 bp, Homo sapiens
aaaccaaaatatgct

SEQ ID NO: 672853 - DNA, 15 bp, Homo sapiens
aaccaaaatatgcta

SEQ ID NO: 672854 - DNA, 15 bp, Homo sapiens
accaaaatatgctag

SEQ ID NO: 672855 - DNA, 15 bp, Homo sapiens
ccaaaatatgctagc

SEQ ID NO: 672856 - DNA, 15 bp, Homo sapiens
caaaatatgctagcc

SEQ ID NO: 672857 - DNA, 15 bp, Homo sapiens
aaaatatgctagccc

SEQ ID NO: 672858 - DNA, 15 bp, Homo sapiens
aaatatgctagccct

SEQ ID NO: 672859 - DNA, 15 bp, Homo sapiens
aatatgctagccctt

SEQ ID NO: 672860 - DNA, 15 bp, Homo sapiens
atatgctagcccttt

SEQ ID NO: 672861 - DNA, 15 bp, Homo sapiens
tatgctagccctttg

SEQ ID NO: 672862 - DNA, 15 bp, Homo sapiens
atgctagccctttgg

SEQ ID NO: 672863 - DNA, 15 bp, Homo sapiens
tgctagccctttggg

SEQ ID NO: 672864 - DNA, 15 bp, Homo sapiens
gctagccctttggga

SEQ ID NO: 672865 - DNA, 15 bp, Homo sapiens
ctagccctttgggaa

SEQ ID NO: 672866 - DNA, 15 bp, Homo sapiens
tagccctttgggaag

SEQ ID NO: 672867 - DNA, 15 bp, Homo sapiens
agccctttgggaagc

SEQ ID NO: 672868 - DNA, 15 bp, Homo sapiens
gccctttgggaagcc

SEQ ID NO: 672869 - DNA, 15 bp, Homo sapiens
ccctttgggaagcca

SEQ ID NO: 672870 - DNA, 15 bp, Homo sapiens
cctttgggaagccaa

SEQ ID NO: 672871 - DNA, 15 bp, Homo sapiens
ctttgggaagccaag

SEQ ID NO: 672872 - DNA, 15 bp, Homo sapiens
tttgggaagccaagg

SEQ ID NO: 672873 - DNA, 15 bp, Homo sapiens
ttgggaagccaaggc

SEQ ID NO: 672874 - DNA, 15 bp, Homo sapiens
tgggaagccaaggca

SEQ ID NO: 672875 - DNA, 15 bp, Homo sapiens
gggaagccaaggcag

SEQ ID NO: 672876 - DNA, 15 bp, Homo sapiens
ggaagccaaggcagg

SEQ ID NO: 672877 - DNA, 15 bp, Homo sapiens
gaagccaaggcagga

SEQ ID NO: 672878 - DNA, 15 bp, Homo sapiens
aagccaaggcaggag

SEQ ID NO: 672879 - DNA, 15 bp, Homo sapiens
agccaaggcaggagg

SEQ ID NO: 672880 - DNA, 15 bp, Homo sapiens
gccaaggcaggaggg

SEQ ID NO: 672881 - DNA, 15 bp, Homo sapiens
ccaaggcaggagggt

SEQ ID NO: 672882 - DNA, 15 bp, Homo sapiens
caaggcaggagggta

SEQ ID NO: 672883 - DNA, 15 bp, Homo sapiens
aaggcaggagggtag

SEQ ID NO: 672884 - DNA, 15 bp, Homo sapiens
aggcaggagggtagc

SEQ ID NO: 672885 - DNA, 15 bp, Homo sapiens
ggcaggagggtagct

SEQ ID NO: 672886 - DNA, 15 bp, Homo sapiens
gcaggagggtagctg

SEQ ID NO: 672887 - DNA, 15 bp, Homo sapiens
caggagggtagctgg

SEQ ID NO: 672888 - DNA, 15 bp, Homo sapiens
aggagggtagctgga

SEQ ID NO: 672889 - DNA, 15 bp, Homo sapiens
ggagggtagctggaa

SEQ ID NO: 672890 - DNA, 15 bp, Homo sapiens
gagggtagctggaat

SEQ ID NO: 672891 - DNA, 15 bp, Homo sapiens
agggtagctggaatc

SEQ ID NO: 672892 - DNA, 15 bp, Homo sapiens
gggtagctggaatcc

SEQ ID NO: 672893 - DNA, 15 bp, Homo sapiens
ggtagctggaatcca

SEQ ID NO: 672894 - DNA, 15 bp, Homo sapiens
gtagctggaatccag

SEQ ID NO: 672895 - DNA, 15 bp, Homo sapiens
tagctggaatccagg

SEQ ID NO: 672896 - DNA, 15 bp, Homo sapiens
agctggaatccagga

SEQ ID NO: 672897 - DNA, 15 bp, Homo sapiens
gctggaatccaggag

SEQ ID NO: 672898 - DNA, 15 bp, Homo sapiens
ctggaatccaggagc

SEQ ID NO: 672899 - DNA, 15 bp, Homo sapiens
tggaatccaggagct

SEQ ID NO: 672900 - DNA, 15 bp, Homo sapiens
ggaatccaggagctc

SEQ ID NO: 672901 - DNA, 15 bp, Homo sapiens
gaatccaggagctca

SEQ ID NO: 672902 - DNA, 15 bp, Homo sapiens
aatccaggagctcaa

SEQ ID NO: 672903 - DNA, 15 bp, Homo sapiens
atccaggagctcaag

SEQ ID NO: 672904 - DNA, 15 bp, Homo sapiens
tccaggagctcaaga

SEQ ID NO: 672905 - DNA, 15 bp, Homo sapiens
ccaggagctcaagac

SEQ ID NO: 672906 - DNA, 15 bp, Homo sapiens
caggagctcaagacc

SEQ ID NO: 672907 - DNA, 15 bp, Homo sapiens
aggagctcaagacca

SEQ ID NO: 672908 - DNA, 15 bp, Homo sapiens
ggagctcaagaccag

SEQ ID NO: 672909 - DNA, 15 bp, Homo sapiens
gagctcaagaccagc

SEQ ID NO: 672910 - DNA, 15 bp, Homo sapiens
agctcaagaccagcc

SEQ ID NO: 672911 - DNA, 15 bp, Homo sapiens
gctcaagaccagcct

SEQ ID NO: 672912 - DNA, 15 bp, Homo sapiens
ctcaagaccagcctg

SEQ ID NO: 672913 - DNA, 15 bp, Homo sapiens
tcaagaccagcctgg

SEQ ID NO: 672914 - DNA, 15 bp, Homo sapiens
caagaccagcctggg

SEQ ID NO: 672915 - DNA, 15 bp, Homo sapiens
aagaccagcctgggc

SEQ ID NO: 672916 - DNA, 15 bp, Homo sapiens
agaccagcctgggca

SEQ ID NO: 672917 - DNA, 15 bp, Homo sapiens
gaccagcctgggcaa

SEQ ID NO: 672918 - DNA, 15 bp, Homo sapiens
accagcctgggcaat

SEQ ID NO: 672919 - DNA, 15 bp, Homo sapiens
ccagcctgggcaatg

SEQ ID NO: 672920 - DNA, 15 bp, Homo sapiens
cagcctgggcaatgt

SEQ ID NO: 672921 - DNA, 15 bp, Homo sapiens
agcctgggcaatgta

SEQ ID NO: 672922 - DNA, 15 bp, Homo sapiens
gcctgggcaatgtag

SEQ ID NO: 672923 - DNA, 15 bp, Homo sapiens
cctgggcaatgtagt

SEQ ID NO: 672924 - DNA, 15 bp, Homo sapiens
ctgggcaatgtagta

SEQ ID NO: 672925 - DNA, 15 bp, Homo sapiens
tgggcaatgtagtaa

SEQ ID NO: 672926 - DNA, 15 bp, Homo sapiens
gggcaatgtagtaag

SEQ ID NO: 672927 - DNA, 15 bp, Homo sapiens
ggcaatgtagtaaga

SEQ ID NO: 672928 - DNA, 15 bp, Homo sapiens
gcaatgtagtaagac

SEQ ID NO: 672929 - DNA, 15 bp, Homo sapiens
caatgtagtaagacc

SEQ ID NO: 672930 - DNA, 15 bp, Homo sapiens
aatgtagtaagaccc

SEQ ID NO: 672931 - DNA, 15 bp, Homo sapiens
atgtagtaagaccct

SEQ ID NO: 672932 - DNA, 15 bp, Homo sapiens
tgtagtaagaccctg

SEQ ID NO: 672933 - DNA, 15 bp, Homo sapiens
gtagtaagaccctgg

SEQ ID NO: 672934 - DNA, 15 bp, Homo sapiens
tagtaagaccctggc

SEQ ID NO: 672935 - DNA, 15 bp, Homo sapiens
agtaagaccctggct

SEQ ID NO: 672936 - DNA, 15 bp, Homo sapiens
gtaagaccctggctc

SEQ ID NO: 672937 - DNA, 15 bp, Homo sapiens
taagaccctggctct

SEQ ID NO: 672938 - DNA, 15 bp, Homo sapiens
aagaccctggctcta

SEQ ID NO: 672939 - DNA, 15 bp, Homo sapiens
agaccctggctctac

SEQ ID NO: 672940 - DNA, 15 bp, Homo sapiens
gaccctggctctaca

SEQ ID NO: 672941 - DNA, 15 bp, Homo sapiens
accctggctctacaa

SEQ ID NO: 672942 - DNA, 15 bp, Homo sapiens
ccctggctctacaat

SEQ ID NO: 672943 - DNA, 15 bp, Homo sapiens
cctggctctacaatt

SEQ ID NO: 672944 - DNA, 15 bp, Homo sapiens
ctggctctacaattt

SEQ ID NO: 672945 - DNA, 15 bp, Homo sapiens
tggctctacaatttt

SEQ ID NO: 672946 - DNA, 15 bp, Homo sapiens
ggctctacaattttt

SEQ ID NO: 672947 - DNA, 15 bp, Homo sapiens
gctctacaatttttt

SEQ ID NO: 672948 - DNA, 15 bp, Homo sapiens
ctctacaattttttt

SEQ ID NO: 672949 - DNA, 15 bp, Homo sapiens
tctacaatttttttt

SEQ ID NO: 672950 - DNA, 15 bp, Homo sapiens
ctacaattttttttt

SEQ ID NO: 672951 - DNA, 15 bp, Homo sapiens
tacaatttttttttt

SEQ ID NO: 672952 - DNA, 15 bp, Homo sapiens
acaattttttttttt

SEQ ID NO: 672953 - DNA, 15 bp, Homo sapiens
caatttttttttttt

SEQ ID NO: 672954 - DNA, 15 bp, Homo sapiens
aattttttttttttt

SEQ ID NO: 672955 - DNA, 15 bp, Homo sapiens
atttttttttttttt

SEQ ID NO: 672956 - DNA, 15 bp, Homo sapiens
ttttttttttttaat

SEQ ID NO: 672957 - DNA, 15 bp, Homo sapiens
tttttttttttaata

SEQ ID NO: 672958 - DNA, 15 bp, Homo sapiens
ttttttttttaataa

SEQ ID NO: 672959 - DNA, 15 bp, Homo sapiens
tttttttttaataag

SEQ ID NO: 672960 - DNA, 15 bp, Homo sapiens
ttttttttaataagc

SEQ ID NO: 672961 - DNA, 15 bp, Homo sapiens
tttttttaataagct

SEQ ID NO: 672962 - DNA, 15 bp, Homo sapiens
ttttttaataagctg

SEQ ID NO: 672963 - DNA, 15 bp, Homo sapiens
tttttaataagctga

SEQ ID NO: 672964 - DNA, 15 bp, Homo sapiens
ttttaataagctgag

SEQ ID NO: 672965 - DNA, 15 bp, Homo sapiens
tttaataagctgagt

SEQ ID NO: 672966 - DNA, 15 bp, Homo sapiens
ttaataagctgagtg

SEQ ID NO: 672967 - DNA, 15 bp, Homo sapiens
taataagctgagtgt

SEQ ID NO: 672968 - DNA, 15 bp, Homo sapiens
aataagctgagtgtg

SEQ ID NO: 672969 - DNA, 15 bp, Homo sapiens
ataagctgagtgtgg

SEQ ID NO: 672970 - DNA, 15 bp, Homo sapiens
taagctgagtgtggt

SEQ ID NO: 672971 - DNA, 15 bp, Homo sapiens
aagctgagtgtggtg

SEQ ID NO: 672972 - DNA, 15 bp, Homo sapiens
agctgagtgtggtgg

SEQ ID NO: 672973 - DNA, 15 bp, Homo sapiens
gctgagtgtggtggt

SEQ ID NO: 672974 - DNA, 15 bp, Homo sapiens
ctgagtgtggtggtg

SEQ ID NO: 672975 - DNA, 15 bp, Homo sapiens
tgagtgtggtggtgt

SEQ ID NO: 672976 - DNA, 15 bp, Homo sapiens
gagtgtggtggtgtg

SEQ ID NO: 672977 - DNA, 15 bp, Homo sapiens
agtgtggtggtgtgc

SEQ ID NO: 672978 - DNA, 15 bp, Homo sapiens
gtgtggtggtgtgca

SEQ ID NO: 672979 - DNA, 15 bp, Homo sapiens
tgtggtggtgtgcac

SEQ ID NO: 672980 - DNA, 15 bp, Homo sapiens
gtggtggtgtgcacc

SEQ ID NO: 672981 - DNA, 15 bp, Homo sapiens
tggtggtgtgcacct

SEQ ID NO: 672982 - DNA, 15 bp, Homo sapiens
ggtggtgtgcacctg

SEQ ID NO: 672983 - DNA, 15 bp, Homo sapiens
gtggtgtgcacctgt

SEQ ID NO: 672984 - DNA, 15 bp, Homo sapiens
tggtgtgcacctgtg

SEQ ID NO: 672985 - DNA, 15 bp, Homo sapiens
ggtgtgcacctgtgg

SEQ ID NO: 672986 - DNA, 15 bp, Homo sapiens
gtgtgcacctgtggt

SEQ ID NO: 672987 - DNA, 15 bp, Homo sapiens
tgtgcacctgtggtc

SEQ ID NO: 672988 - DNA, 15 bp, Homo sapiens
gtgcacctgtggtcc

SEQ ID NO: 672989 - DNA, 15 bp, Homo sapiens
tgcacctgtggtccc

SEQ ID NO: 672990 - DNA, 15 bp, Homo sapiens
gcacctgtggtccca

SEQ ID NO: 672991 - DNA, 15 bp, Homo sapiens
cacctgtggtcccag

SEQ ID NO: 672992 - DNA, 15 bp, Homo sapiens
acctgtggtcccagc

SEQ ID NO: 672993 - DNA, 15 bp, Homo sapiens
cctgtggtcccagct

SEQ ID NO: 672994 - DNA, 15 bp, Homo sapiens
ctgtggtcccagcta

SEQ ID NO: 672995 - DNA, 15 bp, Homo sapiens
tgtggtcccagctac

SEQ ID NO: 672996 - DNA, 15 bp, Homo sapiens
gtggtcccagctact

SEQ ID NO: 672997 - DNA, 15 bp, Homo sapiens
tggtcccagctactc

SEQ ID NO: 672998 - DNA, 15 bp, Homo sapiens
ggtcccagctactca

SEQ ID NO: 672999 - DNA, 15 bp, Homo sapiens
gtcccagctactcag

SEQ ID NO: 673000 - DNA, 15 bp, Homo sapiens
tcccagctactcagg

SEQ ID NO: 673001 - DNA, 15 bp, Homo sapiens
cccagctactcagga

SEQ ID NO: 673002 - DNA, 15 bp, Homo sapiens
ccagctactcaggag

SEQ ID NO: 673003 - DNA, 15 bp, Homo sapiens
cagctactcaggagg

SEQ ID NO: 673004 - DNA, 15 bp, Homo sapiens
agctactcaggaggc

SEQ ID NO: 673005 - DNA, 15 bp, Homo sapiens
gctactcaggaggct

SEQ ID NO: 673006 - DNA, 15 bp, Homo sapiens
ctactcaggaggctg

SEQ ID NO: 673007 - DNA, 15 bp, Homo sapiens
tactcaggaggctga

SEQ ID NO: 673008 - DNA, 15 bp, Homo sapiens
actcaggaggctgag

SEQ ID NO: 673009 - DNA, 15 bp, Homo sapiens
ctcaggaggctgagg

SEQ ID NO: 673010 - DNA, 15 bp, Homo sapiens
tcaggaggctgaggc

SEQ ID NO: 673011 - DNA, 15 bp, Homo sapiens
caggaggctgaggca

SEQ ID NO: 673012 - DNA, 15 bp, Homo sapiens
aggaggctgaggcag

SEQ ID NO: 673013 - DNA, 15 bp, Homo sapiens
gaggcaggagaatcc

SEQ ID NO: 673014 - DNA, 15 bp, Homo sapiens
aggcaggagaatccc

SEQ ID NO: 673015 - DNA, 15 bp, Homo sapiens
ggcaggagaatccct

SEQ ID NO: 673016 - DNA, 15 bp, Homo sapiens
gcaggagaatccctt

SEQ ID NO: 673017 - DNA, 15 bp, Homo sapiens
caggagaatcccttg

SEQ ID NO: 673018 - DNA, 15 bp, Homo sapiens
aggagaatcccttga

SEQ ID NO: 673019 - DNA, 15 bp, Homo sapiens
ggagaatcccttgag

SEQ ID NO: 673020 - DNA, 15 bp, Homo sapiens
gagaatcccttgagc

SEQ ID NO: 673021 - DNA, 15 bp, Homo sapiens
agaatcccttgagcc

SEQ ID NO: 673022 - DNA, 15 bp, Homo sapiens
gaatcccttgagccc

SEQ ID NO: 673023 - DNA, 15 bp, Homo sapiens
aatcccttgagccca

SEQ ID NO: 673024 - DNA, 15 bp, Homo sapiens
atcccttgagcccag

SEQ ID NO: 673025 - DNA, 15 bp, Homo sapiens
tcccttgagcccaga

SEQ ID NO: 673026 - DNA, 15 bp, Homo sapiens
cccttgagcccagaa

SEQ ID NO: 673027 - DNA, 15 bp, Homo sapiens
ccttgagcccagaat

SEQ ID NO: 673028 - DNA, 15 bp, Homo sapiens
cttgagcccagaatg

SEQ ID NO: 673029 - DNA, 15 bp, Homo sapiens
ttgagcccagaatgt

SEQ ID NO: 673030 - DNA, 15 bp, Homo sapiens
tgagcccagaatgtc

SEQ ID NO: 673031 - DNA, 15 bp, Homo sapiens
gagcccagaatgtca

SEQ ID NO: 673032 - DNA, 15 bp, Homo sapiens
agcccagaatgtcaa

SEQ ID NO: 673033 - DNA, 15 bp, Homo sapiens
gcccagaatgtcaag

SEQ ID NO: 673034 - DNA, 15 bp, Homo sapiens
cccagaatgtcaagg

SEQ ID NO: 673035 - DNA, 15 bp, Homo sapiens
ccagaatgtcaaggg

SEQ ID NO: 673036 - DNA, 15 bp, Homo sapiens
cagaatgtcaagggt

SEQ ID NO: 673037 - DNA, 15 bp, Homo sapiens
agaatgtcaagggtg

SEQ ID NO: 673038 - DNA, 15 bp, Homo sapiens
gaatgtcaagggtgc

SEQ ID NO: 673039 - DNA, 15 bp, Homo sapiens
aatgtcaagggtgca

SEQ ID NO: 673040 - DNA, 15 bp, Homo sapiens
atgtcaagggtgcag

SEQ ID NO: 673041 - DNA, 15 bp, Homo sapiens
tgtcaagggtgcagt

SEQ ID NO: 673042 - DNA, 15 bp, Homo sapiens
gtcaagggtgcagtg

SEQ ID NO: 673043 - DNA, 15 bp, Homo sapiens
tcaagggtgcagtga

SEQ ID NO: 673044 - DNA, 15 bp, Homo sapiens
caagggtgcagtgag

SEQ ID NO: 673045 - DNA, 15 bp, Homo sapiens
aagggtgcagtgagc

SEQ ID NO: 673046 - DNA, 15 bp, Homo sapiens
agggtgcagtgagct

SEQ ID NO: 673047 - DNA, 15 bp, Homo sapiens
gggtgcagtgagctg

SEQ ID NO: 673048 - DNA, 15 bp, Homo sapiens
ggtgcagtgagctga

SEQ ID NO: 673049 - DNA, 15 bp, Homo sapiens
gtgcagtgagctgaa

SEQ ID NO: 673050 - DNA, 15 bp, Homo sapiens
tgcagtgagctgaac

SEQ ID NO: 673051 - DNA, 15 bp, Homo sapiens
gcagtgagctgaact

SEQ ID NO: 673052 - DNA, 15 bp, Homo sapiens
cagtgagctgaactc

SEQ ID NO: 673053 - DNA, 15 bp, Homo sapiens
agtgagctgaactcc

SEQ ID NO: 673054 - DNA, 15 bp, Homo sapiens
gtgagctgaactcca

SEQ ID NO: 673055 - DNA, 15 bp, Homo sapiens
tgagctgaactccag

SEQ ID NO: 673056 - DNA, 15 bp, Homo sapiens
gagctgaactccagc

SEQ ID NO: 673057 - DNA, 15 bp, Homo sapiens
agctgaactccagcc

SEQ ID NO: 673058 - DNA, 15 bp, Homo sapiens
gctgaactccagcct

SEQ ID NO: 673059 - DNA, 15 bp, Homo sapiens
ctgaactccagcctg

SEQ ID NO: 673060 - DNA, 15 bp, Homo sapiens
tgaactccagcctgg

SEQ ID NO: 673061 - DNA, 15 bp, Homo sapiens
gaactccagcctgga

SEQ ID NO: 673062 - DNA, 15 bp, Homo sapiens
aactccagcctggat

SEQ ID NO: 673063 - DNA, 15 bp, Homo sapiens
actccagcctggatg

SEQ ID NO: 673064 - DNA, 15 bp, Homo sapiens
ctccagcctggatga

SEQ ID NO: 673065 - DNA, 15 bp, Homo sapiens
tccagcctggatgat

SEQ ID NO: 673066 - DNA, 15 bp, Homo sapiens
ccagcctggatgata

SEQ ID NO: 673067 - DNA, 15 bp, Homo sapiens
cagcctggatgatag

SEQ ID NO: 673068 - DNA, 15 bp, Homo sapiens
agcctggatgataga

SEQ ID NO: 673069 - DNA, 15 bp, Homo sapiens
gcctggatgatagag

SEQ ID NO: 673070 - DNA, 15 bp, Homo sapiens
cctggatgatagagt

SEQ ID NO: 673071 - DNA, 15 bp, Homo sapiens
ctggatgatagagtg

SEQ ID NO: 673072 - DNA, 15 bp, Homo sapiens
tggatgatagagtga

SEQ ID NO: 673073 - DNA, 15 bp, Homo sapiens
ggatgatagagtgag

SEQ ID NO: 673074 - DNA, 15 bp, Homo sapiens
gatgatagagtgagc

SEQ ID NO: 673075 - DNA, 15 bp, Homo sapiens
atgatagagtgagcc

SEQ ID NO: 673076 - DNA, 15 bp, Homo sapiens
tgatagagtgagcct

SEQ ID NO: 673077 - DNA, 15 bp, Homo sapiens
gatagagtgagcctc

SEQ ID NO: 673078 - DNA, 15 bp, Homo sapiens
atagagtgagcctct

SEQ ID NO: 673079 - DNA, 15 bp, Homo sapiens
tagagtgagcctcta

SEQ ID NO: 673080 - DNA, 15 bp, Homo sapiens
agagtgagcctctat

SEQ ID NO: 673081 - DNA, 15 bp, Homo sapiens
gagtgagcctctatc

SEQ ID NO: 673082 - DNA, 15 bp, Homo sapiens
agtgagcctctatca

SEQ ID NO: 673083 - DNA, 15 bp, Homo sapiens
gtgagcctctatcac

SEQ ID NO: 673084 - DNA, 15 bp, Homo sapiens
tgagcctctatcaca

SEQ ID NO: 673085 - DNA, 15 bp, Homo sapiens
gagcctctatcacaa

SEQ ID NO: 673086 - DNA, 15 bp, Homo sapiens
agcctctatcacaaa

SEQ ID NO: 673087 - DNA, 15 bp, Homo sapiens
gcctctatcacaaaa

SEQ ID NO: 673088 - DNA, 15 bp, Homo sapiens
cctctatcacaaaaa

SEQ ID NO: 673089 - DNA, 15 bp, Homo sapiens
ctctatcacaaaaaa

SEQ ID NO: 673090 - DNA, 15 bp, Homo sapiens
tctatcacaaaaaaa

SEQ ID NO: 673091 - DNA, 15 bp, Homo sapiens
ctatcacaaaaaaag

SEQ ID NO: 673092 - DNA, 15 bp, Homo sapiens
tatcacaaaaaaaga

SEQ ID NO: 673093 - DNA, 15 bp, Homo sapiens
atcacaaaaaaagag

SEQ ID NO: 673094 - DNA, 15 bp, Homo sapiens
tcacaaaaaaagagt

SEQ ID NO: 673095 - DNA, 15 bp, Homo sapiens
cacaaaaaaagagta

SEQ ID NO: 673096 - DNA, 15 bp, Homo sapiens
acaaaaaaagagtaa

SEQ ID NO: 673097 - DNA, 15 bp, Homo sapiens
caaaaaaagagtaaa

SEQ ID NO: 673098 - DNA, 15 bp, Homo sapiens
aaaaaaagagtaaaa

SEQ ID NO: 673099 - DNA, 15 bp, Homo sapiens
aaaaaagagtaaaaa

SEQ ID NO: 673100 - DNA, 15 bp, Homo sapiens
aaaaagagtaaaaat

SEQ ID NO: 673101 - DNA, 15 bp, Homo sapiens
aaaagagtaaaaatt

SEQ ID NO: 673102 - DNA, 15 bp, Homo sapiens
aaagagtaaaaattt

SEQ ID NO: 673103 - DNA, 15 bp, Homo sapiens
aagagtaaaaatttt

SEQ ID NO: 673104 - DNA, 15 bp, Homo sapiens
agagtaaaaattttt

SEQ ID NO: 673105 - DNA, 15 bp, Homo sapiens
gagtaaaaatttttt

SEQ ID NO: 673106 - DNA, 15 bp, Homo sapiens
agtaaaaatttttta

SEQ ID NO: 673107 - DNA, 15 bp, Homo sapiens
gtaaaaattttttaa

SEQ ID NO: 673108 - DNA, 15 bp, Homo sapiens
taaaaattttttaaa

SEQ ID NO: 673109 - DNA, 15 bp, Homo sapiens
aaaaattttttaaaa

SEQ ID NO: 673110 - DNA, 15 bp, Homo sapiens
aaaattttttaaaaa

SEQ ID NO: 673111 - DNA, 15 bp, Homo sapiens
aaattttttaaaaac

SEQ ID NO: 673112 - DNA, 15 bp, Homo sapiens
aattttttaaaaacc

SEQ ID NO: 673113 - DNA, 15 bp, Homo sapiens
attttttaaaaacca

SEQ ID NO: 673114 - DNA, 15 bp, Homo sapiens
ttttttaaaaaccaa

SEQ ID NO: 673115 - DNA, 15 bp, Homo sapiens
tttttaaaaaccaaa

SEQ ID NO: 673116 - DNA, 15 bp, Homo sapiens
ttttaaaaaccaaaa

SEQ ID NO: 673117 - DNA, 15 bp, Homo sapiens
tttaaaaaccaaaaa

SEQ ID NO: 673118 - DNA, 15 bp, Homo sapiens
ttaaaaaccaaaaaa

SEQ ID NO: 673119 - DNA, 15 bp, Homo sapiens
taaaaaccaaaaaat

SEQ ID NO: 673120 - DNA, 15 bp, Homo sapiens
aaaaaccaaaaaata

SEQ ID NO: 673121 - DNA, 15 bp, Homo sapiens
aaaaccaaaaaataa

SEQ ID NO: 673122 - DNA, 15 bp, Homo sapiens
aaaccaaaaaataaa

SEQ ID NO: 673123 - DNA, 15 bp, Homo sapiens
aaccaaaaaataaat

SEQ ID NO: 673124 - DNA, 15 bp, Homo sapiens
accaaaaaataaata

SEQ ID NO: 673125 - DNA, 15 bp, Homo sapiens
ccaaaaaataaataa

SEQ ID NO: 673126 - DNA, 15 bp, Homo sapiens
caaaaaataaataaa

SEQ ID NO: 673127 - DNA, 15 bp, Homo sapiens
aaaaaataaataaat

SEQ ID NO: 673128 - DNA, 15 bp, Homo sapiens
aaaaataaataaata

SEQ ID NO: 673129 - DNA, 15 bp, Homo sapiens
aataaataaataaaa

SEQ ID NO: 673130 - DNA, 15 bp, Homo sapiens
ataaataaataaaag

SEQ ID NO: 673131 - DNA, 15 bp, Homo sapiens
taaataaataaaagc

SEQ ID NO: 673132 - DNA, 15 bp, Homo sapiens
aaataaataaaagcc

SEQ ID NO: 673133 - DNA, 15 bp, Homo sapiens
aataaataaaagccc

SEQ ID NO: 673134 - DNA, 15 bp, Homo sapiens
ataaataaaagcccc

SEQ ID NO: 673135 - DNA, 15 bp, Homo sapiens
taaataaaagcccca

SEQ ID NO: 673136 - DNA, 15 bp, Homo sapiens
aaataaaagccccaa

SEQ ID NO: 673137 - DNA, 15 bp, Homo sapiens
aataaaagccccaaa

SEQ ID NO: 673138 - DNA, 15 bp, Homo sapiens
ataaaagccccaaaa

SEQ ID NO: 673139 - DNA, 15 bp, Homo sapiens
taaaagccccaaaaa

SEQ ID NO: 673140 - DNA, 15 bp, Homo sapiens
aaaagccccaaaaaa

SEQ ID NO: 673141 - DNA, 15 bp, Homo sapiens
aaagccccaaaaaac

SEQ ID NO: 673142 - DNA, 15 bp, Homo sapiens
aagccccaaaaaaca

SEQ ID NO: 673143 - DNA, 15 bp, Homo sapiens
agccccaaaaaacaa

SEQ ID NO: 673144 - DNA, 15 bp, Homo sapiens
gccccaaaaaacaaa

SEQ ID NO: 673145 - DNA, 15 bp, Homo sapiens
ccccaaaaaacaaaa

SEQ ID NO: 673146 - DNA, 15 bp, Homo sapiens
cccaaaaaacaaaat

SEQ ID NO: 673147 - DNA, 15 bp, Homo sapiens
ccaaaaaacaaaata

SEQ ID NO: 673148 - DNA, 15 bp, Homo sapiens
caaaaaacaaaataa

SEQ ID NO: 673149 - DNA, 15 bp, Homo sapiens
aaaaaacaaaataag

SEQ ID NO: 673150 - DNA, 15 bp, Homo sapiens
aaaaacaaaataagt

SEQ ID NO: 673151 - DNA, 15 bp, Homo sapiens
aaaacaaaataagta

SEQ ID NO: 673152 - DNA, 15 bp, Homo sapiens
aaacaaaataagtag

SEQ ID NO: 673153 - DNA, 15 bp, Homo sapiens
aacaaaataagtagg

SEQ ID NO: 673154 - DNA, 15 bp, Homo sapiens
acaaaataagtaggg

SEQ ID NO: 673155 - DNA, 15 bp, Homo sapiens
caaaataagtagggt

SEQ ID NO: 673156 - DNA, 15 bp, Homo sapiens
aaaataagtagggtt

SEQ ID NO: 673157 - DNA, 15 bp, Homo sapiens
aaataagtagggtta

SEQ ID NO: 673158 - DNA, 15 bp, Homo sapiens
aataagtagggttac

SEQ ID NO: 673159 - DNA, 15 bp, Homo sapiens
ataagtagggttaca

SEQ ID NO: 673160 - DNA, 15 bp, Homo sapiens
taagtagggttacaa

SEQ ID NO: 673161 - DNA, 15 bp, Homo sapiens
aagtagggttacaaa

SEQ ID NO: 673162 - DNA, 15 bp, Homo sapiens
agtagggttacaaag

SEQ ID NO: 673163 - DNA, 15 bp, Homo sapiens
gtagggttacaaagg

SEQ ID NO: 673164 - DNA, 15 bp, Homo sapiens
tagggttacaaagga

SEQ ID NO: 673165 - DNA, 15 bp, Homo sapiens
agggttacaaaggaa

SEQ ID NO: 673166 - DNA, 15 bp, Homo sapiens
gggttacaaaggaaa

SEQ ID NO: 673167 - DNA, 15 bp, Homo sapiens
ggttacaaaggaaaa

SEQ ID NO: 673168 - DNA, 15 bp, Homo sapiens
gttacaaaggaaaat

SEQ ID NO: 673169 - DNA, 15 bp, Homo sapiens
ttacaaaggaaaata

SEQ ID NO: 673170 - DNA, 15 bp, Homo sapiens
tacaaaggaaaataa

SEQ ID NO: 673171 - DNA, 15 bp, Homo sapiens
acaaaggaaaataat

SEQ ID NO: 673172 - DNA, 15 bp, Homo sapiens
caaaggaaaataatt

SEQ ID NO: 673173 - DNA, 15 bp, Homo sapiens
aaaggaaaataatta

SEQ ID NO: 673174 - DNA, 15 bp, Homo sapiens
aaggaaaataattat

SEQ ID NO: 673175 - DNA, 15 bp, Homo sapiens
aggaaaataattata

SEQ ID NO: 673176 - DNA, 15 bp, Homo sapiens
ggaaaataattatat

SEQ ID NO: 673177 - DNA, 15 bp, Homo sapiens
gaaaataattatatt

SEQ ID NO: 673178 - DNA, 15 bp, Homo sapiens
aaaataattatatta

SEQ ID NO: 673179 - DNA, 15 bp, Homo sapiens
aaataattatattaa

SEQ ID NO: 673180 - DNA, 15 bp, Homo sapiens
aataattatattaaa

SEQ ID NO: 673181 - DNA, 15 bp, Homo sapiens
ataattatattaaaa

SEQ ID NO: 673182 - DNA, 15 bp, Homo sapiens
taattatattaaaaa

SEQ ID NO: 673183 - DNA, 15 bp, Homo sapiens
aattatattaaaaat

SEQ ID NO: 673184 - DNA, 15 bp, Homo sapiens
attatattaaaaata

SEQ ID NO: 673185 - DNA, 15 bp, Homo sapiens
ttatattaaaaatac

SEQ ID NO: 673186 - DNA, 15 bp, Homo sapiens
tatattaaaaatact

SEQ ID NO: 673187 - DNA, 15 bp, Homo sapiens
atattaaaaatactt

SEQ ID NO: 673188 - DNA, 15 bp, Homo sapiens
tattaaaaatactta

SEQ ID NO: 673189 - DNA, 15 bp, Homo sapiens
attaaaaatacttat

SEQ ID NO: 673190 - DNA, 15 bp, Homo sapiens
ttaaaaatacttatc

SEQ ID NO: 673191 - DNA, 15 bp, Homo sapiens
taaaaatacttatca

SEQ ID NO: 673192 - DNA, 15 bp, Homo sapiens
aaaaatacttatcaa

SEQ ID NO: 673193 - DNA, 15 bp, Homo sapiens
aaaatacttatcaaa

SEQ ID NO: 673194 - DNA, 15 bp, Homo sapiens
aaatacttatcaaaa

SEQ ID NO: 673195 - DNA, 15 bp, Homo sapiens
aatacttatcaaaat

SEQ ID NO: 673196 - DNA, 15 bp, Homo sapiens
atacttatcaaaata

SEQ ID NO: 673197 - DNA, 15 bp, Homo sapiens
tacttatcaaaatat

SEQ ID NO: 673198 - DNA, 15 bp, Homo sapiens
acttatcaaaatatt

SEQ ID NO: 673199 - DNA, 15 bp, Homo sapiens
cttatcaaaatattt

SEQ ID NO: 673200 - DNA, 15 bp, Homo sapiens
ttatcaaaatatttt

SEQ ID NO: 673201 - DNA, 15 bp, Homo sapiens
tatcaaaatattttt

SEQ ID NO: 673202 - DNA, 15 bp, Homo sapiens
atcaaaatatttttt

SEQ ID NO: 673203 - DNA, 15 bp, Homo sapiens
tcaaaatatttttta

SEQ ID NO: 673204 - DNA, 15 bp, Homo sapiens
caaaatattttttat

SEQ ID NO: 673205 - DNA, 15 bp, Homo sapiens
aaaatattttttatt

SEQ ID NO: 673206 - DNA, 15 bp, Homo sapiens
aaatattttttattt

SEQ ID NO: 673207 - DNA, 15 bp, Homo sapiens
aatattttttatttt

SEQ ID NO: 673208 - DNA, 15 bp, Homo sapiens
atattttttatttta

SEQ ID NO: 673209 - DNA, 15 bp, Homo sapiens
tattttttattttat

SEQ ID NO: 673210 - DNA, 15 bp, Homo sapiens
attttttattttatt

SEQ ID NO: 673211 - DNA, 15 bp, Homo sapiens
ttttttattttattt

SEQ ID NO: 673212 - DNA, 15 bp, Homo sapiens
tttttattttatttt

SEQ ID NO: 673213 - DNA, 15 bp, Homo sapiens
ttattttattttact

SEQ ID NO: 673214 - DNA, 15 bp, Homo sapiens
tattttattttactc

SEQ ID NO: 673215 - DNA, 15 bp, Homo sapiens
attttattttactcc

SEQ ID NO: 673216 - DNA, 15 bp, Homo sapiens
ttttattttactcct

SEQ ID NO: 673217 - DNA, 15 bp, Homo sapiens
tttattttactcctt

SEQ ID NO: 673218 - DNA, 15 bp, Homo sapiens
ttattttactcctta

SEQ ID NO: 673219 - DNA, 15 bp, Homo sapiens
tattttactccttaa

SEQ ID NO: 673220 - DNA, 15 bp, Homo sapiens
attttactccttaat

SEQ ID NO: 673221 - DNA, 15 bp, Homo sapiens
ttttactccttaatg

SEQ ID NO: 673222 - DNA, 15 bp, Homo sapiens
tttactccttaatga

SEQ ID NO: 673223 - DNA, 15 bp, Homo sapiens
ttactccttaatgac

SEQ ID NO: 673224 - DNA, 15 bp, Homo sapiens
tactccttaatgact

SEQ ID NO: 673225 - DNA, 15 bp, Homo sapiens
actccttaatgacta

SEQ ID NO: 673226 - DNA, 15 bp, Homo sapiens
ctccttaatgactat

SEQ ID NO: 673227 - DNA, 15 bp, Homo sapiens
tccttaatgactatg

SEQ ID NO: 673228 - DNA, 15 bp, Homo sapiens
ccttaatgactatga

SEQ ID NO: 673229 - DNA, 15 bp, Homo sapiens
cttaatgactatgaa

SEQ ID NO: 673230 - DNA, 15 bp, Homo sapiens
ttaatgactatgaac

SEQ ID NO: 673231 - DNA, 15 bp, Homo sapiens
taatgactatgaact

SEQ ID NO: 673232 - DNA, 15 bp, Homo sapiens
aatgactatgaactg

SEQ ID NO: 673233 - DNA, 15 bp, Homo sapiens
atgactatgaactgg

SEQ ID NO: 673234 - DNA, 15 bp, Homo sapiens
tgactatgaactgga

SEQ ID NO: 673235 - DNA, 15 bp, Homo sapiens
gactatgaactggaa

SEQ ID NO: 673236 - DNA, 15 bp, Homo sapiens
actatgaactggaat

SEQ ID NO: 673237 - DNA, 15 bp, Homo sapiens
ctatgaactggaata

SEQ ID NO: 673238 - DNA, 15 bp, Homo sapiens
tatgaactggaatat

SEQ ID NO: 673239 - DNA, 15 bp, Homo sapiens
atgaactggaatata

SEQ ID NO: 673240 - DNA, 15 bp, Homo sapiens
tgaactggaatatag

SEQ ID NO: 673241 - DNA, 15 bp, Homo sapiens
gaactggaatataga

SEQ ID NO: 673242 - DNA, 15 bp, Homo sapiens
aactggaatatagaa

SEQ ID NO: 673243 - DNA, 15 bp, Homo sapiens
actggaatatagaag

SEQ ID NO: 673244 - DNA, 15 bp, Homo sapiens
ctggaatatagaaga

SEQ ID NO: 673245 - DNA, 15 bp, Homo sapiens
tggaatatagaagag

SEQ ID NO: 673246 - DNA, 15 bp, Homo sapiens
ggaatatagaagaga

SEQ ID NO: 673247 - DNA, 15 bp, Homo sapiens
gaatatagaagagaa

SEQ ID NO: 673248 - DNA, 15 bp, Homo sapiens
aatatagaagagaaa

SEQ ID NO: 673249 - DNA, 15 bp, Homo sapiens
atatagaagagaaaa

SEQ ID NO: 673250 - DNA, 15 bp, Homo sapiens
tatagaagagaaaaa

SEQ ID NO: 673251 - DNA, 15 bp, Homo sapiens
atagaagagaaaaac

SEQ ID NO: 673252 - DNA, 15 bp, Homo sapiens
tagaagagaaaaacc

SEQ ID NO: 673253 - DNA, 15 bp, Homo sapiens
agaagagaaaaacct

SEQ ID NO: 673254 - DNA, 15 bp, Homo sapiens
gaagagaaaaacctg

SEQ ID NO: 673255 - DNA, 15 bp, Homo sapiens
aagagaaaaacctga

SEQ ID NO: 673256 - DNA, 15 bp, Homo sapiens
agagaaaaacctgag

SEQ ID NO: 673257 - DNA, 15 bp, Homo sapiens
gagaaaaacctgaga

SEQ ID NO: 673258 - DNA, 15 bp, Homo sapiens
agaaaaacctgagaa

SEQ ID NO: 673259 - DNA, 15 bp, Homo sapiens
gaaaaacctgagaaa

SEQ ID NO: 673260 - DNA, 15 bp, Homo sapiens
aaaaacctgagaaaa

SEQ ID NO: 673261 - DNA, 15 bp, Homo sapiens
aaaacctgagaaaac

SEQ ID NO: 673262 - DNA, 15 bp, Homo sapiens
aaacctgagaaaaca

SEQ ID NO: 673263 - DNA, 15 bp, Homo sapiens
aacctgagaaaacat

SEQ ID NO: 673264 - DNA, 15 bp, Homo sapiens
acctgagaaaacatc

SEQ ID NO: 673265 - DNA, 15 bp, Homo sapiens
cctgagaaaacatcg

SEQ ID NO: 673266 - DNA, 15 bp, Homo sapiens
ctgagaaaacatcga

SEQ ID NO: 673267 - DNA, 15 bp, Homo sapiens
tgagaaaacatcgac

SEQ ID NO: 673268 - DNA, 15 bp, Homo sapiens
gagaaaacatcgact

SEQ ID NO: 673269 - DNA, 15 bp, Homo sapiens
agaaaacatcgactt

SEQ ID NO: 673270 - DNA, 15 bp, Homo sapiens
gaaaacatcgacttc

SEQ ID NO: 673271 - DNA, 15 bp, Homo sapiens
aaaacatcgacttcc

SEQ ID NO: 673272 - DNA, 15 bp, Homo sapiens
aaacatcgacttcct

SEQ ID NO: 673273 - DNA, 15 bp, Homo sapiens
aacatcgacttccta

SEQ ID NO: 673274 - DNA, 15 bp, Homo sapiens
acatcgacttcctag

SEQ ID NO: 673275 - DNA, 15 bp, Homo sapiens
catcgacttcctagt

SEQ ID NO: 673276 - DNA, 15 bp, Homo sapiens
atcgacttcctagtt

SEQ ID NO: 673277 - DNA, 15 bp, Homo sapiens
tcgacttcctagtta

SEQ ID NO: 673278 - DNA, 15 bp, Homo sapiens
cgacttcctagttat

SEQ ID NO: 673279 - DNA, 15 bp, Homo sapiens
gacttcctagttata

SEQ ID NO: 673280 - DNA, 15 bp, Homo sapiens
acttcctagttatag

SEQ ID NO: 673281 - DNA, 15 bp, Homo sapiens
cttcctagttatagc

SEQ ID NO: 673282 - DNA, 15 bp, Homo sapiens
ttcctagttatagcc

SEQ ID NO: 673283 - DNA, 15 bp, Homo sapiens
tcctagttatagccc

SEQ ID NO: 673284 - DNA, 15 bp, Homo sapiens
cctagttatagccca

SEQ ID NO: 673285 - DNA, 15 bp, Homo sapiens
ctagttatagcccag

SEQ ID NO: 673286 - DNA, 15 bp, Homo sapiens
tagttatagcccaga

SEQ ID NO: 673287 - DNA, 15 bp, Homo sapiens
agttatagcccagaa

SEQ ID NO: 673288 - DNA, 15 bp, Homo sapiens
gttatagcccagaat

SEQ ID NO: 673289 - DNA, 15 bp, Homo sapiens
ttatagcccagaatt

SEQ ID NO: 673290 - DNA, 15 bp, Homo sapiens
tatagcccagaattc

SEQ ID NO: 673291 - DNA, 15 bp, Homo sapiens
atagcccagaattct

SEQ ID NO: 673292 - DNA, 15 bp, Homo sapiens
tagcccagaattctt

SEQ ID NO: 673293 - DNA, 15 bp, Homo sapiens
agcccagaattcttt

SEQ ID NO: 673294 - DNA, 15 bp, Homo sapiens
gcccagaattctttg

SEQ ID NO: 673295 - DNA, 15 bp, Homo sapiens
cccagaattctttgt

SEQ ID NO: 673296 - DNA, 15 bp, Homo sapiens
ccagaattctttgta

SEQ ID NO: 673297 - DNA, 15 bp, Homo sapiens
cagaattctttgtag

SEQ ID NO: 673298 - DNA, 15 bp, Homo sapiens
agaattctttgtagg

SEQ ID NO: 673299 - DNA, 15 bp, Homo sapiens
gaattctttgtaggg

SEQ ID NO: 673300 - DNA, 15 bp, Homo sapiens
aattctttgtagggc

SEQ ID NO: 673301 - DNA, 15 bp, Homo sapiens
attctttgtagggcc

SEQ ID NO: 673302 - DNA, 15 bp, Homo sapiens
ttctttgtagggcct

SEQ ID NO: 673303 - DNA, 15 bp, Homo sapiens
tctttgtagggcctt

SEQ ID NO: 673304 - DNA, 15 bp, Homo sapiens
ctttgtagggccttg

SEQ ID NO: 673305 - DNA, 15 bp, Homo sapiens
tttgtagggccttgt

SEQ ID NO: 673306 - DNA, 15 bp, Homo sapiens
ttgtagggccttgtg

SEQ ID NO: 673307 - DNA, 15 bp, Homo sapiens
tgtagggccttgtgg

SEQ ID NO: 673308 - DNA, 15 bp, Homo sapiens
gtagggccttgtggg

SEQ ID NO: 673309 - DNA, 15 bp, Homo sapiens
tagggccttgtgggt

SEQ ID NO: 673310 - DNA, 15 bp, Homo sapiens
agggccttgtgggtc

SEQ ID NO: 673311 - DNA, 15 bp, Homo sapiens
gggccttgtgggtcc

SEQ ID NO: 673312 - DNA, 15 bp, Homo sapiens
ggccttgtgggtcct

SEQ ID NO: 673313 - DNA, 15 bp, Homo sapiens
gccttgtgggtcctc

SEQ ID NO: 673314 - DNA, 15 bp, Homo sapiens
ccttgtgggtcctcc

SEQ ID NO: 673315 - DNA, 15 bp, Homo sapiens
cttgtgggtcctcca

SEQ ID NO: 673316 - DNA, 15 bp, Homo sapiens
ttgtgggtcctccat

SEQ ID NO: 673317 - DNA, 15 bp, Homo sapiens
tgtgggtcctccata

SEQ ID NO: 673318 - DNA, 15 bp, Homo sapiens
gtgggtcctccataa

SEQ ID NO: 673319 - DNA, 15 bp, Homo sapiens
tgggtcctccataac

SEQ ID NO: 673320 - DNA, 15 bp, Homo sapiens
gggtcctccataaca

SEQ ID NO: 673321 - DNA, 15 bp, Homo sapiens
ggtcctccataacaa

SEQ ID NO: 673322 - DNA, 15 bp, Homo sapiens
gtcctccataacaat

SEQ ID NO: 673323 - DNA, 15 bp, Homo sapiens
tcctccataacaatg

SEQ ID NO: 673324 - DNA, 15 bp, Homo sapiens
cctccataacaatga

SEQ ID NO: 673325 - DNA, 15 bp, Homo sapiens
ctccataacaatgag

SEQ ID NO: 673326 - DNA, 15 bp, Homo sapiens
tccataacaatgagg

SEQ ID NO: 673327 - DNA, 15 bp, Homo sapiens
ccataacaatgaggc

SEQ ID NO: 673328 - DNA, 15 bp, Homo sapiens
cataacaatgaggca

SEQ ID NO: 673329 - DNA, 15 bp, Homo sapiens
ataacaatgaggcag

SEQ ID NO: 673330 - DNA, 15 bp, Homo sapiens
taacaatgaggcagg

SEQ ID NO: 673331 - DNA, 15 bp, Homo sapiens
aacaatgaggcaggg

SEQ ID NO: 673332 - DNA, 15 bp, Homo sapiens
acaatgaggcagggc

SEQ ID NO: 673333 - DNA, 15 bp, Homo sapiens
caatgaggcagggct

SEQ ID NO: 673334 - DNA, 15 bp, Homo sapiens
aatgaggcagggctt

SEQ ID NO: 673335 - DNA, 15 bp, Homo sapiens
atgaggcagggcttc

SEQ ID NO: 673336 - DNA, 15 bp, Homo sapiens
tgaggcagggcttcc

SEQ ID NO: 673337 - DNA, 15 bp, Homo sapiens
gaggcagggcttccc

SEQ ID NO: 673338 - DNA, 15 bp, Homo sapiens
aggcagggcttccca

SEQ ID NO: 673339 - DNA, 15 bp, Homo sapiens
ggcagggcttcccac

SEQ ID NO: 673340 - DNA, 15 bp, Homo sapiens
gcagggcttcccacc

SEQ ID NO: 673341 - DNA, 15 bp, Homo sapiens
cagggcttcccaccc

SEQ ID NO: 673342 - DNA, 15 bp, Homo sapiens
agggcttcccaccca

SEQ ID NO: 673343 - DNA, 15 bp, Homo sapiens
gggcttcccacccag

SEQ ID NO: 673344 - DNA, 15 bp, Homo sapiens
ggcttcccacccagg

SEQ ID NO: 673345 - DNA, 15 bp, Homo sapiens
gcttcccacccaggc

SEQ ID NO: 673346 - DNA, 15 bp, Homo sapiens
cttcccacccaggcc

SEQ ID NO: 673347 - DNA, 15 bp, Homo sapiens
ttcccacccaggcct

SEQ ID NO: 673348 - DNA, 15 bp, Homo sapiens
tcccacccaggcctc

SEQ ID NO: 673349 - DNA, 15 bp, Homo sapiens
cccacccaggcctct

SEQ ID NO: 673350 - DNA, 15 bp, Homo sapiens
ccacccaggcctctg

SEQ ID NO: 673351 - DNA, 15 bp, Homo sapiens
cacccaggcctctgg

SEQ ID NO: 673352 - DNA, 15 bp, Homo sapiens
acccaggcctctggc

SEQ ID NO: 673353 - DNA, 15 bp, Homo sapiens
cccaggcctctggca

SEQ ID NO: 673354 - DNA, 15 bp, Homo sapiens
ccaggcctctggcat

SEQ ID NO: 673355 - DNA, 15 bp, Homo sapiens
caggcctctggcatt

SEQ ID NO: 673356 - DNA, 15 bp, Homo sapiens
aggcctctggcattc

SEQ ID NO: 673357 - DNA, 15 bp, Homo sapiens
ggcctctggcattca

SEQ ID NO: 673358 - DNA, 15 bp, Homo sapiens
gcctctggcattcaa

SEQ ID NO: 673359 - DNA, 15 bp, Homo sapiens
cctctggcattcaac

SEQ ID NO: 673360 - DNA, 15 bp, Homo sapiens
ctctggcattcaact

SEQ ID NO: 673361 - DNA, 15 bp, Homo sapiens
tctggcattcaactt

SEQ ID NO: 673362 - DNA, 15 bp, Homo sapiens
ctggcattcaacttt

SEQ ID NO: 673363 - DNA, 15 bp, Homo sapiens
tggcattcaacttta

SEQ ID NO: 673364 - DNA, 15 bp, Homo sapiens
ggcattcaactttaa

SEQ ID NO: 673365 - DNA, 15 bp, Homo sapiens
gcattcaactttaat

SEQ ID NO: 673366 - DNA, 15 bp, Homo sapiens
cattcaactttaatg

SEQ ID NO: 673367 - DNA, 15 bp, Homo sapiens
attcaactttaatga

SEQ ID NO: 673368 - DNA, 15 bp, Homo sapiens
ttcaactttaatgat

SEQ ID NO: 673369 - DNA, 15 bp, Homo sapiens
tcaactttaatgatc

SEQ ID NO: 673370 - DNA, 15 bp, Homo sapiens
caactttaatgatcc

SEQ ID NO: 673371 - DNA, 15 bp, Homo sapiens
aactttaatgatcca

SEQ ID NO: 673372 - DNA, 15 bp, Homo sapiens
actttaatgatccag

SEQ ID NO: 673373 - DNA, 15 bp, Homo sapiens
ctttaatgatccagg

SEQ ID NO: 673374 - DNA, 15 bp, Homo sapiens
tttaatgatccagga

SEQ ID NO: 673375 - DNA, 15 bp, Homo sapiens
ttaatgatccaggat

SEQ ID NO: 673376 - DNA, 15 bp, Homo sapiens
taatgatccaggata

SEQ ID NO: 673377 - DNA, 15 bp, Homo sapiens
aatgatccaggataa

SEQ ID NO: 673378 - DNA, 15 bp, Homo sapiens
atgatccaggataag

SEQ ID NO: 673379 - DNA, 15 bp, Homo sapiens
tgatccaggataagc

SEQ ID NO: 673380 - DNA, 15 bp, Homo sapiens
gatccaggataagcc

SEQ ID NO: 673381 - DNA, 15 bp, Homo sapiens
atccaggataagcct

SEQ ID NO: 673382 - DNA, 15 bp, Homo sapiens
tccaggataagcctg

SEQ ID NO: 673383 - DNA, 15 bp, Homo sapiens
ccaggataagcctgg

SEQ ID NO: 673384 - DNA, 15 bp, Homo sapiens
caggataagcctgga

SEQ ID NO: 673385 - DNA, 15 bp, Homo sapiens
aggataagcctggaa

SEQ ID NO: 673386 - DNA, 15 bp, Homo sapiens
ggataagcctggaaa

SEQ ID NO: 673387 - DNA, 15 bp, Homo sapiens
gataagcctggaaaa

SEQ ID NO: 673388 - DNA, 15 bp, Homo sapiens
ataagcctggaaaat

SEQ ID NO: 673389 - DNA, 15 bp, Homo sapiens
taagcctggaaaatt

SEQ ID NO: 673390 - DNA, 15 bp, Homo sapiens
aagcctggaaaattg

SEQ ID NO: 673391 - DNA, 15 bp, Homo sapiens
agcctggaaaattga

SEQ ID NO: 673392 - DNA, 15 bp, Homo sapiens
gcctggaaaattgac

SEQ ID NO: 673393 - DNA, 15 bp, Homo sapiens
cctggaaaattgacc

SEQ ID NO: 673394 - DNA, 15 bp, Homo sapiens
ctggaaaattgacca

SEQ ID NO: 673395 - DNA, 15 bp, Homo sapiens
tggaaaattgaccag

SEQ ID NO: 673396 - DNA, 15 bp, Homo sapiens
ggaaaattgaccagt

SEQ ID NO: 673397 - DNA, 15 bp, Homo sapiens
gaaaattgaccagta

SEQ ID NO: 673398 - DNA, 15 bp, Homo sapiens
aaaattgaccagtat

SEQ ID NO: 673399 - DNA, 15 bp, Homo sapiens
aaattgaccagtatc

SEQ ID NO: 673400 - DNA, 15 bp, Homo sapiens
aattgaccagtatct

SEQ ID NO: 673401 - DNA, 15 bp, Homo sapiens
attgaccagtatctg

SEQ ID NO: 673402 - DNA, 15 bp, Homo sapiens
ttgaccagtatctgg

SEQ ID NO: 673403 - DNA, 15 bp, Homo sapiens
tgaccagtatctgga

SEQ ID NO: 673404 - DNA, 15 bp, Homo sapiens
gaccagtatctggag

SEQ ID NO: 673405 - DNA, 15 bp, Homo sapiens
accagtatctggagg

SEQ ID NO: 673406 - DNA, 15 bp, Homo sapiens
ccagtatctggaggc

SEQ ID NO: 673407 - DNA, 15 bp, Homo sapiens
cagtatctggaggca

SEQ ID NO: 673408 - DNA, 15 bp, Homo sapiens
agtatctggaggcat

SEQ ID NO: 673409 - DNA, 15 bp, Homo sapiens
gtatctggaggcatg

SEQ ID NO: 673410 - DNA, 15 bp, Homo sapiens
tatctggaggcatgt

SEQ ID NO: 673411 - DNA, 15 bp, Homo sapiens
atctggaggcatgtt

SEQ ID NO: 673412 - DNA, 15 bp, Homo sapiens
tctggaggcatgttg

SEQ ID NO: 673413 - DNA, 15 bp, Homo sapiens
ctggaggcatgttgc

SEQ ID NO: 673414 - DNA, 15 bp, Homo sapiens
tggaggcatgttgca

SEQ ID NO: 673415 - DNA, 15 bp, Homo sapiens
ggaggcatgttgcaa

SEQ ID NO: 673416 - DNA, 15 bp, Homo sapiens
gaggcatgttgcaaa

SEQ ID NO: 673417 - DNA, 15 bp, Homo sapiens
aggcatgttgcaaac

SEQ ID NO: 673418 - DNA, 15 bp, Homo sapiens
ggcatgttgcaaact

SEQ ID NO: 673419 - DNA, 15 bp, Homo sapiens
gcatgttgcaaactc

SEQ ID NO: 673420 - DNA, 15 bp, Homo sapiens
catgttgcaaactct

SEQ ID NO: 673421 - DNA, 15 bp, Homo sapiens
atgttgcaaactctt

SEQ ID NO: 673422 - DNA, 15 bp, Homo sapiens
tgttgcaaactcttc

SEQ ID NO: 673423 - DNA, 15 bp, Homo sapiens
gttgcaaactcttct

SEQ ID NO: 673424 - DNA, 15 bp, Homo sapiens
ttgcaaactcttctc

SEQ ID NO: 673425 - DNA, 15 bp, Homo sapiens
tgcaaactcttctct

SEQ ID NO: 673426 - DNA, 15 bp, Homo sapiens
gcaaactcttctctg

SEQ ID NO: 673427 - DNA, 15 bp, Homo sapiens
caaactcttctctga

SEQ ID NO: 673428 - DNA, 15 bp, Homo sapiens
aaactcttctctgaa

SEQ ID NO: 673429 - DNA, 15 bp, Homo sapiens
aactcttctctgaaa

SEQ ID NO: 673430 - DNA, 15 bp, Homo sapiens
actcttctctgaaaa

SEQ ID NO: 673431 - DNA, 15 bp, Homo sapiens
ctcttctctgaaaaa

SEQ ID NO: 673432 - DNA, 15 bp, Homo sapiens
tcttctctgaaaaaa

SEQ ID NO: 673433 - DNA, 15 bp, Homo sapiens
cttctctgaaaaaat

SEQ ID NO: 673434 - DNA, 15 bp, Homo sapiens
ttctctgaaaaaatt

SEQ ID NO: 673435 - DNA, 15 bp, Homo sapiens
tctctgaaaaaatta

SEQ ID NO: 673436 - DNA, 15 bp, Homo sapiens
ctctgaaaaaattat

SEQ ID NO: 673437 - DNA, 15 bp, Homo sapiens
tctgaaaaaattatc

SEQ ID NO: 673438 - DNA, 15 bp, Homo sapiens
ctgaaaaaattatca

SEQ ID NO: 673439 - DNA, 15 bp, Homo sapiens
tgaaaaaattatcaa

SEQ ID NO: 673440 - DNA, 15 bp, Homo sapiens
gaaaaaattatcaag

SEQ ID NO: 673441 - DNA, 15 bp, Homo sapiens
aaaaaattatcaagg

SEQ ID NO: 673442 - DNA, 15 bp, Homo sapiens
aaaaattatcaaggc

SEQ ID NO: 673443 - DNA, 15 bp, Homo sapiens
aaaattatcaaggca

SEQ ID NO: 673444 - DNA, 15 bp, Homo sapiens
aaattatcaaggcat

SEQ ID NO: 673445 - DNA, 15 bp, Homo sapiens
aattatcaaggcatg

SEQ ID NO: 673446 - DNA, 15 bp, Homo sapiens
attatcaaggcatga

SEQ ID NO: 673447 - DNA, 15 bp, Homo sapiens
ttatcaaggcatgat

SEQ ID NO: 673448 - DNA, 15 bp, Homo sapiens
tatcaaggcatgatt

SEQ ID NO: 673449 - DNA, 15 bp, Homo sapiens
atcaaggcatgattg

SEQ ID NO: 673450 - DNA, 15 bp, Homo sapiens
tcaaggcatgattga

SEQ ID NO: 673451 - DNA, 15 bp, Homo sapiens
caaggcatgattgac

SEQ ID NO: 673452 - DNA, 15 bp, Homo sapiens
aaggcatgattgaca

SEQ ID NO: 673453 - DNA, 15 bp, Homo sapiens
aggcatgattgacat

SEQ ID NO: 673454 - DNA, 15 bp, Homo sapiens
ggcatgattgacata

SEQ ID NO: 673455 - DNA, 15 bp, Homo sapiens
gcatgattgacatat

SEQ ID NO: 673456 - DNA, 15 bp, Homo sapiens
catgattgacatatg

SEQ ID NO: 673457 - DNA, 15 bp, Homo sapiens
atgattgacatatga

SEQ ID NO: 673458 - DNA, 15 bp, Homo sapiens
tgattgacatatgaa

SEQ ID NO: 673459 - DNA, 15 bp, Homo sapiens
gattgacatatgaaa

SEQ ID NO: 673460 - DNA, 15 bp, Homo sapiens
attgacatatgaaaa

SEQ ID NO: 673461 - DNA, 15 bp, Homo sapiens
ttgacatatgaaaag

SEQ ID NO: 673462 - DNA, 15 bp, Homo sapiens
tgacatatgaaaagc

SEQ ID NO: 673463 - DNA, 15 bp, Homo sapiens
gacatatgaaaagct

SEQ ID NO: 673464 - DNA, 15 bp, Homo sapiens
acatatgaaaagctg

SEQ ID NO: 673465 - DNA, 15 bp, Homo sapiens
catatgaaaagctgt

SEQ ID NO: 673466 - DNA, 15 bp, Homo sapiens
atatgaaaagctgtg

SEQ ID NO: 673467 - DNA, 15 bp, Homo sapiens
tatgaaaagctgtgt

SEQ ID NO: 673468 - DNA, 15 bp, Homo sapiens
atgaaaagctgtgta

SEQ ID NO: 673469 - DNA, 15 bp, Homo sapiens
tgaaaagctgtgtat

SEQ ID NO: 673470 - DNA, 15 bp, Homo sapiens
gaaaagctgtgtata

SEQ ID NO: 673471 - DNA, 15 bp, Homo sapiens
aaaagctgtgtatac

SEQ ID NO: 673472 - DNA, 15 bp, Homo sapiens
aaagctgtgtataca

SEQ ID NO: 673473 - DNA, 15 bp, Homo sapiens
aagctgtgtatacat

SEQ ID NO: 673474 - DNA, 15 bp, Homo sapiens
agctgtgtatacatc

SEQ ID NO: 673475 - DNA, 15 bp, Homo sapiens
gctgtgtatacatct

SEQ ID NO: 673476 - DNA, 15 bp, Homo sapiens
ctgtgtatacatctt

SEQ ID NO: 673477 - DNA, 15 bp, Homo sapiens
tgtgtatacatcttt

SEQ ID NO: 673478 - DNA, 15 bp, Homo sapiens
gtgtatacatcttta

SEQ ID NO: 673479 - DNA, 15 bp, Homo sapiens
tgtatacatctttag

SEQ ID NO: 673480 - DNA, 15 bp, Homo sapiens
gtatacatctttagt

SEQ ID NO: 673481 - DNA, 15 bp, Homo sapiens
tatacatctttagtg

SEQ ID NO: 673482 - DNA, 15 bp, Homo sapiens
atacatctttagtgt

SEQ ID NO: 673483 - DNA, 15 bp, Homo sapiens
tacatctttagtgtg

SEQ ID NO: 673484 - DNA, 15 bp, Homo sapiens
acatctttagtgtgt

SEQ ID NO: 673485 - DNA, 15 bp, Homo sapiens
catctttagtgtgta

SEQ ID NO: 673486 - DNA, 15 bp, Homo sapiens
atctttagtgtgtat

SEQ ID NO: 673487 - DNA, 15 bp, Homo sapiens
tctttagtgtgtata

SEQ ID NO: 673488 - DNA, 15 bp, Homo sapiens
ctttagtgtgtatat

SEQ ID NO: 673489 - DNA, 15 bp, Homo sapiens
tttagtgtgtatatc

SEQ ID NO: 673490 - DNA, 15 bp, Homo sapiens
ttagtgtgtatatct

SEQ ID NO: 673491 - DNA, 15 bp, Homo sapiens
tagtgtgtatatctc

SEQ ID NO: 673492 - DNA, 15 bp, Homo sapiens
agtgtgtatatctca

SEQ ID NO: 673493 - DNA, 15 bp, Homo sapiens
gtgtgtatatctcaa

SEQ ID NO: 673494 - DNA, 15 bp, Homo sapiens
tgtgtatatctcaat

SEQ ID NO: 673495 - DNA, 15 bp, Homo sapiens
gtgtatatctcaatg

SEQ ID NO: 673496 - DNA, 15 bp, Homo sapiens
tgtatatctcaatga

SEQ ID NO: 673497 - DNA, 15 bp, Homo sapiens
gtatatctcaatgag

SEQ ID NO: 673498 - DNA, 15 bp, Homo sapiens
tatatctcaatgagt

SEQ ID NO: 673499 - DNA, 15 bp, Homo sapiens
atatctcaatgagtt

SEQ ID NO: 673500 - DNA, 15 bp, Homo sapiens
tatctcaatgagttt

SEQ ID NO: 673501 - DNA, 15 bp, Homo sapiens
atctcaatgagtttg

SEQ ID NO: 673502 - DNA, 15 bp, Homo sapiens
tctcaatgagtttgg

SEQ ID NO: 673503 - DNA, 15 bp, Homo sapiens
ctcaatgagtttggg

SEQ ID NO: 673504 - DNA, 15 bp, Homo sapiens
tcaatgagtttgggg

SEQ ID NO: 673505 - DNA, 15 bp, Homo sapiens
caatgagtttgggga

SEQ ID NO: 673506 - DNA, 15 bp, Homo sapiens
aatgagtttggggat

SEQ ID NO: 673507 - DNA, 15 bp, Homo sapiens
atgagtttggggata

SEQ ID NO: 673508 - DNA, 15 bp, Homo sapiens
tgagtttggggataa

SEQ ID NO: 673509 - DNA, 15 bp, Homo sapiens
gagtttggggataag

SEQ ID NO: 673510 - DNA, 15 bp, Homo sapiens
agtttggggataaga

SEQ ID NO: 673511 - DNA, 15 bp, Homo sapiens
gtttggggataagaa

SEQ ID NO: 673512 - DNA, 15 bp, Homo sapiens
tttggggataagaat

SEQ ID NO: 673513 - DNA, 15 bp, Homo sapiens
ttggggataagaata

SEQ ID NO: 673514 - DNA, 15 bp, Homo sapiens
tggggataagaatac

SEQ ID NO: 673515 - DNA, 15 bp, Homo sapiens
ggggataagaataca

SEQ ID NO: 673516 - DNA, 15 bp, Homo sapiens
gggataagaatacac

SEQ ID NO: 673517 - DNA, 15 bp, Homo sapiens
ggataagaatacacc

SEQ ID NO: 673518 - DNA, 15 bp, Homo sapiens
gataagaatacacct

SEQ ID NO: 673519 - DNA, 15 bp, Homo sapiens
ataagaatacaccta

SEQ ID NO: 673520 - DNA, 15 bp, Homo sapiens
taagaatacacctat

SEQ ID NO: 673521 - DNA, 15 bp, Homo sapiens
aagaatacacctatg

SEQ ID NO: 673522 - DNA, 15 bp, Homo sapiens
agaatacacctatga

SEQ ID NO: 673523 - DNA, 15 bp, Homo sapiens
gaatacacctatgaa

SEQ ID NO: 673524 - DNA, 15 bp, Homo sapiens
aatacacctatgaaa

SEQ ID NO: 673525 - DNA, 15 bp, Homo sapiens
atacacctatgaaaa

SEQ ID NO: 673526 - DNA, 15 bp, Homo sapiens
tacacctatgaaaaa

SEQ ID NO: 673527 - DNA, 15 bp, Homo sapiens
acacctatgaaaaag

SEQ ID NO: 673528 - DNA, 15 bp, Homo sapiens
cacctatgaaaaagg

SEQ ID NO: 673529 - DNA, 15 bp, Homo sapiens
acctatgaaaaaggc

SEQ ID NO: 673530 - DNA, 15 bp, Homo sapiens
cctatgaaaaaggct

SEQ ID NO: 673531 - DNA, 15 bp, Homo sapiens
ctatgaaaaaggcta

SEQ ID NO: 673532 - DNA, 15 bp, Homo sapiens
tatgaaaaaggctat

SEQ ID NO: 673533 - DNA, 15 bp, Homo sapiens
atgaaaaaggctatt

SEQ ID NO: 673534 - DNA, 15 bp, Homo sapiens
tgaaaaaggctattc

SEQ ID NO: 673535 - DNA, 15 bp, Homo sapiens
gaaaaaggctattct

SEQ ID NO: 673536 - DNA, 15 bp, Homo sapiens
aaaaaggctattctg

SEQ ID NO: 673537 - DNA, 15 bp, Homo sapiens
aaaaggctattctgc

SEQ ID NO: 673538 - DNA, 15 bp, Homo sapiens
aaaggctattctgct

SEQ ID NO: 673539 - DNA, 15 bp, Homo sapiens
aaggctattctgctc

SEQ ID NO: 673540 - DNA, 15 bp, Homo sapiens
aggctattctgctct

SEQ ID NO: 673541 - DNA, 15 bp, Homo sapiens
ggctattctgctcta

SEQ ID NO: 673542 - DNA, 15 bp, Homo sapiens
gctattctgctctac

SEQ ID NO: 673543 - DNA, 15 bp, Homo sapiens
ctattctgctctact

SEQ ID NO: 673544 - DNA, 15 bp, Homo sapiens
tattctgctctactt

SEQ ID NO: 673545 - DNA, 15 bp, Homo sapiens
attctgctctactta

SEQ ID NO: 673546 - DNA, 15 bp, Homo sapiens
ttctgctctacttaa

SEQ ID NO: 673547 - DNA, 15 bp, Homo sapiens
tctgctctacttaaa

SEQ ID NO: 673548 - DNA, 15 bp, Homo sapiens
ctgctctacttaaat

SEQ ID NO: 673549 - DNA, 15 bp, Homo sapiens
tgctctacttaaatg

SEQ ID NO: 673550 - DNA, 15 bp, Homo sapiens
gctctacttaaatga

SEQ ID NO: 673551 - DNA, 15 bp, Homo sapiens
ctctacttaaatgaa

SEQ ID NO: 673552 - DNA, 15 bp, Homo sapiens
tctacttaaatgaaa

SEQ ID NO: 673553 - DNA, 15 bp, Homo sapiens
ctacttaaatgaaaa

SEQ ID NO: 673554 - DNA, 15 bp, Homo sapiens
tacttaaatgaaaat

SEQ ID NO: 673555 - DNA, 15 bp, Homo sapiens
acttaaatgaaaata

SEQ ID NO: 673556 - DNA, 15 bp, Homo sapiens
cttaaatgaaaataa

SEQ ID NO: 673557 - DNA, 15 bp, Homo sapiens
ttaaatgaaaataat

SEQ ID NO: 673558 - DNA, 15 bp, Homo sapiens
taaatgaaaataatt

SEQ ID NO: 673559 - DNA, 15 bp, Homo sapiens
aaatgaaaataatta

SEQ ID NO: 673560 - DNA, 15 bp, Homo sapiens
aatgaaaataattac

SEQ ID NO: 673561 - DNA, 15 bp, Homo sapiens
atgaaaataattact

SEQ ID NO: 673562 - DNA, 15 bp, Homo sapiens
tgaaaataattactt

SEQ ID NO: 673563 - DNA, 15 bp, Homo sapiens
gaaaataattactta

SEQ ID NO: 673564 - DNA, 15 bp, Homo sapiens
aaaataattacttag

SEQ ID NO: 673565 - DNA, 15 bp, Homo sapiens
aaataattacttagg

SEQ ID NO: 673566 - DNA, 15 bp, Homo sapiens
aataattacttaggg

SEQ ID NO: 673567 - DNA, 15 bp, Homo sapiens
ataattacttagggt

SEQ ID NO: 673568 - DNA, 15 bp, Homo sapiens
taattacttagggtt

SEQ ID NO: 673569 - DNA, 15 bp, Homo sapiens
aattacttagggttt

SEQ ID NO: 673570 - DNA, 15 bp, Homo sapiens
attacttagggtttt

SEQ ID NO: 673571 - DNA, 15 bp, Homo sapiens
ttacttagggtttta

SEQ ID NO: 673572 - DNA, 15 bp, Homo sapiens
tacttagggttttat

SEQ ID NO: 673573 - DNA, 15 bp, Homo sapiens
acttagggttttatt

SEQ ID NO: 673574 - DNA, 15 bp, Homo sapiens
cttagggttttattt

SEQ ID NO: 673575 - DNA, 15 bp, Homo sapiens
ttagggttttattta

SEQ ID NO: 673576 - DNA, 15 bp, Homo sapiens
tagggttttatttaa

SEQ ID NO: 673577 - DNA, 15 bp, Homo sapiens
agggttttatttaaa

SEQ ID NO: 673578 - DNA, 15 bp, Homo sapiens
gggttttatttaaat

SEQ ID NO: 673579 - DNA, 15 bp, Homo sapiens
ggttttatttaaata

SEQ ID NO: 673580 - DNA, 15 bp, Homo sapiens
gttttatttaaataa

SEQ ID NO: 673581 - DNA, 15 bp, Homo sapiens
ttttatttaaataac

SEQ ID NO: 673582 - DNA, 15 bp, Homo sapiens
tttatttaaataaca

SEQ ID NO: 673583 - DNA, 15 bp, Homo sapiens
ttatttaaataacaa

SEQ ID NO: 673584 - DNA, 15 bp, Homo sapiens
tatttaaataacaat

SEQ ID NO: 673585 - DNA, 15 bp, Homo sapiens
atttaaataacaata

SEQ ID NO: 673586 - DNA, 15 bp, Homo sapiens
tttaaataacaatat

SEQ ID NO: 673587 - DNA, 15 bp, Homo sapiens
ttaaataacaatatc

SEQ ID NO: 673588 - DNA, 15 bp, Homo sapiens
taaataacaatatcc

SEQ ID NO: 673589 - DNA, 15 bp, Homo sapiens
aaataacaatatccc

SEQ ID NO: 673590 - DNA, 15 bp, Homo sapiens
aataacaatatcccc

SEQ ID NO: 673591 - DNA, 15 bp, Homo sapiens
ataacaatatcccct

SEQ ID NO: 673592 - DNA, 15 bp, Homo sapiens
taacaatatccccta

SEQ ID NO: 673593 - DNA, 15 bp, Homo sapiens
aacaatatcccctac

SEQ ID NO: 673594 - DNA, 15 bp, Homo sapiens
acaatatcccctact

SEQ ID NO: 673595 - DNA, 15 bp, Homo sapiens
caatatcccctactg

SEQ ID NO: 673596 - DNA, 15 bp, Homo sapiens
aatatcccctactgt

SEQ ID NO: 673597 - DNA, 15 bp, Homo sapiens
atatcccctactgta

SEQ ID NO: 673598 - DNA, 15 bp, Homo sapiens
tatcccctactgtag

SEQ ID NO: 673599 - DNA, 15 bp, Homo sapiens
atcccctactgtagt

SEQ ID NO: 673600 - DNA, 15 bp, Homo sapiens
tcccctactgtagtt

SEQ ID NO: 673601 - DNA, 15 bp, Homo sapiens
cccctactgtagttg

SEQ ID NO: 673602 - DNA, 15 bp, Homo sapiens
ccctactgtagttga

SEQ ID NO: 673603 - DNA, 15 bp, Homo sapiens
cctactgtagttgaa

SEQ ID NO: 673604 - DNA, 15 bp, Homo sapiens
ctactgtagttgaag

SEQ ID NO: 673605 - DNA, 15 bp, Homo sapiens
tactgtagttgaagt

SEQ ID NO: 673606 - DNA, 15 bp, Homo sapiens
actgtagttgaagta

SEQ ID NO: 673607 - DNA, 15 bp, Homo sapiens
ctgtagttgaagtat

SEQ ID NO: 673608 - DNA, 15 bp, Homo sapiens
tgtagttgaagtatg

SEQ ID NO: 673609 - DNA, 15 bp, Homo sapiens
gtagttgaagtatga

SEQ ID NO: 673610 - DNA, 15 bp, Homo sapiens
tagttgaagtatgat

SEQ ID NO: 673611 - DNA, 15 bp, Homo sapiens
agttgaagtatgatt

SEQ ID NO: 673612 - DNA, 15 bp, Homo sapiens
gttgaagtatgattc

SEQ ID NO: 673613 - DNA, 15 bp, Homo sapiens
ttgaagtatgattcc

SEQ ID NO: 673614 - DNA, 15 bp, Homo sapiens
tgaagtatgattcca

SEQ ID NO: 673615 - DNA, 15 bp, Homo sapiens
gaagtatgattccat

SEQ ID NO: 673616 - DNA, 15 bp, Homo sapiens
aagtatgattccata

SEQ ID NO: 673617 - DNA, 15 bp, Homo sapiens
agtatgattccatat

SEQ ID NO: 673618 - DNA, 15 bp, Homo sapiens
gtatgattccatata

SEQ ID NO: 673619 - DNA, 15 bp, Homo sapiens
tatgattccatataa

SEQ ID NO: 673620 - DNA, 15 bp, Homo sapiens
atgattccatataaa

SEQ ID NO: 673621 - DNA, 15 bp, Homo sapiens
tgattccatataaag

SEQ ID NO: 673622 - DNA, 15 bp, Homo sapiens
gattccatataaagt

SEQ ID NO: 673623 - DNA, 15 bp, Homo sapiens
attccatataaagta

SEQ ID NO: 673624 - DNA, 15 bp, Homo sapiens
ttccatataaagtat

SEQ ID NO: 673625 - DNA, 15 bp, Homo sapiens
tccatataaagtatt

SEQ ID NO: 673626 - DNA, 15 bp, Homo sapiens
ccatataaagtattt

SEQ ID NO: 673627 - DNA, 15 bp, Homo sapiens
catataaagtatttt

SEQ ID NO: 673628 - DNA, 15 bp, Homo sapiens
atataaagtattttc

SEQ ID NO: 673629 - DNA, 15 bp, Homo sapiens
tataaagtattttct

SEQ ID NO: 673630 - DNA, 15 bp, Homo sapiens
ataaagtattttctt

SEQ ID NO: 673631 - DNA, 15 bp, Homo sapiens
taaagtattttcttt

SEQ ID NO: 673632 - DNA, 15 bp, Homo sapiens
aaagtattttctttg

SEQ ID NO: 673633 - DNA, 15 bp, Homo sapiens
aagtattttctttgg

SEQ ID NO: 673634 - DNA, 15 bp, Homo sapiens
agtattttctttggc

SEQ ID NO: 673635 - DNA, 15 bp, Homo sapiens
gtattttctttggct

SEQ ID NO: 673636 - DNA, 15 bp, Homo sapiens
tattttctttggcta

SEQ ID NO: 673637 - DNA, 15 bp, Homo sapiens
attttctttggctat

SEQ ID NO: 673638 - DNA, 15 bp, Homo sapiens
ttttctttggctatt

SEQ ID NO: 673639 - DNA, 15 bp, Homo sapiens
tttctttggctattc

SEQ ID NO: 673640 - DNA, 15 bp, Homo sapiens
ttctttggctattct

SEQ ID NO: 673641 - DNA, 15 bp, Homo sapiens
tctttggctattcta

SEQ ID NO: 673642 - DNA, 15 bp, Homo sapiens
ctttggctattctat

SEQ ID NO: 673643 - DNA, 15 bp, Homo sapiens
tttggctattctatg

SEQ ID NO: 673644 - DNA, 15 bp, Homo sapiens
ttggctattctatgg

SEQ ID NO: 673645 - DNA, 15 bp, Homo sapiens
tggctattctatggg

SEQ ID NO: 673646 - DNA, 15 bp, Homo sapiens
ggctattctatggga

SEQ ID NO: 673647 - DNA, 15 bp, Homo sapiens
gctattctatgggac

SEQ ID NO: 673648 - DNA, 15 bp, Homo sapiens
ctattctatgggact

SEQ ID NO: 673649 - DNA, 15 bp, Homo sapiens
tattctatgggactc

SEQ ID NO: 673650 - DNA, 15 bp, Homo sapiens
attctatgggactct

SEQ ID NO: 673651 - DNA, 15 bp, Homo sapiens
ttctatgggactctt

SEQ ID NO: 673652 - DNA, 15 bp, Homo sapiens
tctatgggactcttg

SEQ ID NO: 673653 - DNA, 15 bp, Homo sapiens
ctatgggactcttga

SEQ ID NO: 673654 - DNA, 15 bp, Homo sapiens
tatgggactcttgat

SEQ ID NO: 673655 - DNA, 15 bp, Homo sapiens
atgggactcttgata

SEQ ID NO: 673656 - DNA, 15 bp, Homo sapiens
tgggactcttgatac

SEQ ID NO: 673657 - DNA, 15 bp, Homo sapiens
gggactcttgatact

SEQ ID NO: 673658 - DNA, 15 bp, Homo sapiens
ggactcttgatactc

SEQ ID NO: 673659 - DNA, 15 bp, Homo sapiens
gactcttgatactca

SEQ ID NO: 673660 - DNA, 15 bp, Homo sapiens
actcttgatactcac

SEQ ID NO: 673661 - DNA, 15 bp, Homo sapiens
ctcttgatactcaca

SEQ ID NO: 673662 - DNA, 15 bp, Homo sapiens
tcttgatactcacaa

SEQ ID NO: 673663 - DNA, 15 bp, Homo sapiens
cttgatactcacaac

SEQ ID NO: 673664 - DNA, 15 bp, Homo sapiens
ttgatactcacaact

SEQ ID NO: 673665 - DNA, 15 bp, Homo sapiens
tgatactcacaactc

SEQ ID NO: 673666 - DNA, 15 bp, Homo sapiens
gatactcacaactct

SEQ ID NO: 673667 - DNA, 15 bp, Homo sapiens
atactcacaactctt

SEQ ID NO: 673668 - DNA, 15 bp, Homo sapiens
tactcacaactcttg

SEQ ID NO: 673669 - DNA, 15 bp, Homo sapiens
actcacaactcttgg

SEQ ID NO: 673670 - DNA, 15 bp, Homo sapiens
ctcacaactcttgga

SEQ ID NO: 673671 - DNA, 15 bp, Homo sapiens
tcacaactcttggat

SEQ ID NO: 673672 - DNA, 15 bp, Homo sapiens
cacaactcttggata

SEQ ID NO: 673673 - DNA, 15 bp, Homo sapiens
acaactcttggatat

SEQ ID NO: 673674 - DNA, 15 bp, Homo sapiens
caactcttggatata

SEQ ID NO: 673675 - DNA, 15 bp, Homo sapiens
aactcttggatataa

SEQ ID NO: 673676 - DNA, 15 bp, Homo sapiens
actcttggatataaa

SEQ ID NO: 673677 - DNA, 15 bp, Homo sapiens
ctcttggatataaaa

SEQ ID NO: 673678 - DNA, 15 bp, Homo sapiens
tcttggatataaaaa

SEQ ID NO: 673679 - DNA, 15 bp, Homo sapiens
cttggatataaaaat

SEQ ID NO: 673680 - DNA, 15 bp, Homo sapiens
ttggatataaaaatt

SEQ ID NO: 673681 - DNA, 15 bp, Homo sapiens
tggatataaaaattc

SEQ ID NO: 673682 - DNA, 15 bp, Homo sapiens
ggatataaaaattct

SEQ ID NO: 673683 - DNA, 15 bp, Homo sapiens
gatataaaaattctc

SEQ ID NO: 673684 - DNA, 15 bp, Homo sapiens
atataaaaattctct

SEQ ID NO: 673685 - DNA, 15 bp, Homo sapiens
tataaaaattctctg

SEQ ID NO: 673686 - DNA, 15 bp, Homo sapiens
ataaaaattctctgg

SEQ ID NO: 673687 - DNA, 15 bp, Homo sapiens
taaaaattctctgga

SEQ ID NO: 673688 - DNA, 15 bp, Homo sapiens
aaaaattctctggaa

SEQ ID NO: 673689 - DNA, 15 bp, Homo sapiens
aaaattctctggaaa

SEQ ID NO: 673690 - DNA, 15 bp, Homo sapiens
aaattctctggaaat

SEQ ID NO: 673691 - DNA, 15 bp, Homo sapiens
aattctctggaaatt

SEQ ID NO: 673692 - DNA, 15 bp, Homo sapiens
attctctggaaattc

SEQ ID NO: 673693 - DNA, 15 bp, Homo sapiens
ttctctggaaattct

SEQ ID NO: 673694 - DNA, 15 bp, Homo sapiens
tctctggaaattctc

SEQ ID NO: 673695 - DNA, 15 bp, Homo sapiens
ctctggaaattctct

SEQ ID NO: 673696 - DNA, 15 bp, Homo sapiens
tctggaaattctcta

SEQ ID NO: 673697 - DNA, 15 bp, Homo sapiens
ctggaaattctctag

SEQ ID NO: 673698 - DNA, 15 bp, Homo sapiens
tggaaattctctagc

SEQ ID NO: 673699 - DNA, 15 bp, Homo sapiens
ggaaattctctagca

SEQ ID NO: 673700 - DNA, 15 bp, Homo sapiens
gaaattctctagcat

SEQ ID NO: 673701 - DNA, 15 bp, Homo sapiens
aaattctctagcatt

SEQ ID NO: 673702 - DNA, 15 bp, Homo sapiens
aattctctagcatta

SEQ ID NO: 673703 - DNA, 15 bp, Homo sapiens
attctctagcattaa

SEQ ID NO: 673704 - DNA, 15 bp, Homo sapiens
ttctctagcattaaa

SEQ ID NO: 673705 - DNA, 15 bp, Homo sapiens
tctctagcattaaaa

SEQ ID NO: 673706 - DNA, 15 bp, Homo sapiens
ctctagcattaaaaa

SEQ ID NO: 673707 - DNA, 15 bp, Homo sapiens
tctagcattaaaaac

SEQ ID NO: 673708 - DNA, 15 bp, Homo sapiens
ctagcattaaaaaca

SEQ ID NO: 673709 - DNA, 15 bp, Homo sapiens
tagcattaaaaacaa

SEQ ID NO: 673710 - DNA, 15 bp, Homo sapiens
agcattaaaaacaaa

SEQ ID NO: 673711 - DNA, 15 bp, Homo sapiens
gcattaaaaacaaag

SEQ ID NO: 673712 - DNA, 15 bp, Homo sapiens
cattaaaaacaaagt

SEQ ID NO: 673713 - DNA, 15 bp, Homo sapiens
attaaaaacaaagtt

SEQ ID NO: 673714 - DNA, 15 bp, Homo sapiens
ttaaaaacaaagttt

SEQ ID NO: 673715 - DNA, 15 bp, Homo sapiens
taaaaacaaagtttc

SEQ ID NO: 673716 - DNA, 15 bp, Homo sapiens
aaaaacaaagtttcc

SEQ ID NO: 673717 - DNA, 15 bp, Homo sapiens
aaaacaaagtttccc

SEQ ID NO: 673718 - DNA, 15 bp, Homo sapiens
aaacaaagtttccct

SEQ ID NO: 673719 - DNA, 15 bp, Homo sapiens
aacaaagtttccctt

SEQ ID NO: 673720 - DNA, 15 bp, Homo sapiens
acaaagtttccctta

SEQ ID NO: 673721 - DNA, 15 bp, Homo sapiens
caaagtttcccttat

SEQ ID NO: 673722 - DNA, 15 bp, Homo sapiens
aaagtttcccttatt

SEQ ID NO: 673723 - DNA, 15 bp, Homo sapiens
aagtttcccttattc

SEQ ID NO: 673724 - DNA, 15 bp, Homo sapiens
agtttcccttattcc

SEQ ID NO: 673725 - DNA, 15 bp, Homo sapiens
gtttcccttattccc

SEQ ID NO: 673726 - DNA, 15 bp, Homo sapiens
tttcccttattcccc

SEQ ID NO: 673727 - DNA, 15 bp, Homo sapiens
ttcccttattccccc

SEQ ID NO: 673728 - DNA, 15 bp, Homo sapiens
tcccttattcccccc

SEQ ID NO: 673729 - DNA, 15 bp, Homo sapiens
cccttattcccccca

SEQ ID NO: 673730 - DNA, 15 bp, Homo sapiens
ccttattccccccat

SEQ ID NO: 673731 - DNA, 15 bp, Homo sapiens
cttattccccccatt

SEQ ID NO: 673732 - DNA, 15 bp, Homo sapiens
ttattccccccattt

SEQ ID NO: 673733 - DNA, 15 bp, Homo sapiens
tattccccccattta

SEQ ID NO: 673734 - DNA, 15 bp, Homo sapiens
attccccccatttaa

SEQ ID NO: 673735 - DNA, 15 bp, Homo sapiens
ttccccccatttaat

SEQ ID NO: 673736 - DNA, 15 bp, Homo sapiens
tccccccatttaatt

SEQ ID NO: 673737 - DNA, 15 bp, Homo sapiens
ccccccatttaattt

SEQ ID NO: 673738 - DNA, 15 bp, Homo sapiens
cccccatttaatttt

SEQ ID NO: 673739 - DNA, 15 bp, Homo sapiens
ccccatttaattttc

SEQ ID NO: 673740 - DNA, 15 bp, Homo sapiens
cccatttaattttct

SEQ ID NO: 673741 - DNA, 15 bp, Homo sapiens
ccatttaattttcta

SEQ ID NO: 673742 - DNA, 15 bp, Homo sapiens
catttaattttctac

SEQ ID NO: 673743 - DNA, 15 bp, Homo sapiens
atttaattttctact

SEQ ID NO: 673744 - DNA, 15 bp, Homo sapiens
tttaattttctactt

SEQ ID NO: 673745 - DNA, 15 bp, Homo sapiens
ttaattttctacttt

SEQ ID NO: 673746 - DNA, 15 bp, Homo sapiens
taattttctactttt

SEQ ID NO: 673747 - DNA, 15 bp, Homo sapiens
aattttctacttttc

SEQ ID NO: 673748 - DNA, 15 bp, Homo sapiens
attttctacttttct

SEQ ID NO: 673749 - DNA, 15 bp, Homo sapiens
ttttctacttttcta

SEQ ID NO: 673750 - DNA, 15 bp, Homo sapiens
tttctacttttctat

SEQ ID NO: 673751 - DNA, 15 bp, Homo sapiens
ttctacttttctatt

SEQ ID NO: 673752 - DNA, 15 bp, Homo sapiens
tctacttttctattc

SEQ ID NO: 673753 - DNA, 15 bp, Homo sapiens
ctacttttctattcc

SEQ ID NO: 673754 - DNA, 15 bp, Homo sapiens
tacttttctattcct

SEQ ID NO: 673755 - DNA, 15 bp, Homo sapiens
acttttctattcctt

SEQ ID NO: 673756 - DNA, 15 bp, Homo sapiens
cttttctattcctta

SEQ ID NO: 673757 - DNA, 15 bp, Homo sapiens
ttttctattccttaa

SEQ ID NO: 673758 - DNA, 15 bp, Homo sapiens
tttctattccttaat

SEQ ID NO: 673759 - DNA, 15 bp, Homo sapiens
ttctattccttaatc

SEQ ID NO: 673760 - DNA, 15 bp, Homo sapiens
tctattccttaatcc

SEQ ID NO: 673761 - DNA, 15 bp, Homo sapiens
ctattccttaatccc

SEQ ID NO: 673762 - DNA, 15 bp, Homo sapiens
tattccttaatccct

SEQ ID NO: 673763 - DNA, 15 bp, Homo sapiens
attccttaatccctc

SEQ ID NO: 673764 - DNA, 15 bp, Homo sapiens
ttccttaatccctct

SEQ ID NO: 673765 - DNA, 15 bp, Homo sapiens
tccttaatccctctt

SEQ ID NO: 673766 - DNA, 15 bp, Homo sapiens
ccttaatccctcttc

SEQ ID NO: 673767 - DNA, 15 bp, Homo sapiens
cttaatccctcttca

SEQ ID NO: 673768 - DNA, 15 bp, Homo sapiens
ttaatccctcttcaa

SEQ ID NO: 673769 - DNA, 15 bp, Homo sapiens
taatccctcttcaaa

SEQ ID NO: 673770 - DNA, 15 bp, Homo sapiens
aatccctcttcaaag

SEQ ID NO: 673771 - DNA, 15 bp, Homo sapiens
atccctcttcaaagc

SEQ ID NO: 673772 - DNA, 15 bp, Homo sapiens
tccctcttcaaagcc

SEQ ID NO: 673773 - DNA, 15 bp, Homo sapiens
ccctcttcaaagcca

SEQ ID NO: 673774 - DNA, 15 bp, Homo sapiens
cctcttcaaagccaa

SEQ ID NO: 673775 - DNA, 15 bp, Homo sapiens
ctcttcaaagccaac

SEQ ID NO: 673776 - DNA, 15 bp, Homo sapiens
tcttcaaagccaaca

SEQ ID NO: 673777 - DNA, 15 bp, Homo sapiens
cttcaaagccaacat

SEQ ID NO: 673778 - DNA, 15 bp, Homo sapiens
ttcaaagccaacatg

SEQ ID NO: 673779 - DNA, 15 bp, Homo sapiens
tcaaagccaacatgt

SEQ ID NO: 673780 - DNA, 15 bp, Homo sapiens
caaagccaacatgtt

SEQ ID NO: 673781 - DNA, 15 bp, Homo sapiens
aaagccaacatgttt

SEQ ID NO: 673782 - DNA, 15 bp, Homo sapiens
aagccaacatgtttc

SEQ ID NO: 673783 - DNA, 15 bp, Homo sapiens
agccaacatgtttct

SEQ ID NO: 673784 - DNA, 15 bp, Homo sapiens
gccaacatgtttctg

SEQ ID NO: 673785 - DNA, 15 bp, Homo sapiens
ccaacatgtttctga

SEQ ID NO: 673786 - DNA, 15 bp, Homo sapiens
caacatgtttctgat

SEQ ID NO: 673787 - DNA, 15 bp, Homo sapiens
aacatgtttctgatc

SEQ ID NO: 673788 - DNA, 15 bp, Homo sapiens
acatgtttctgatcc

SEQ ID NO: 673789 - DNA, 15 bp, Homo sapiens
catgtttctgatcct

SEQ ID NO: 673790 - DNA, 15 bp, Homo sapiens
atgtttctgatcctc

SEQ ID NO: 673791 - DNA, 15 bp, Homo sapiens
tgtttctgatcctct

SEQ ID NO: 673792 - DNA, 15 bp, Homo sapiens
gtttctgatcctcta

SEQ ID NO: 673793 - DNA, 15 bp, Homo sapiens
tttctgatcctctaa

SEQ ID NO: 673794 - DNA, 15 bp, Homo sapiens
ttctgatcctctaac

SEQ ID NO: 673795 - DNA, 15 bp, Homo sapiens
tctgatcctctaacc

SEQ ID NO: 673796 - DNA, 15 bp, Homo sapiens
ctgatcctctaacct

SEQ ID NO: 673797 - DNA, 15 bp, Homo sapiens
tgatcctctaacctc

SEQ ID NO: 673798 - DNA, 15 bp, Homo sapiens
gatcctctaacctct

SEQ ID NO: 673799 - DNA, 15 bp, Homo sapiens
atcctctaacctctt

SEQ ID NO: 673800 - DNA, 15 bp, Homo sapiens
tcctctaacctcttc

SEQ ID NO: 673801 - DNA, 15 bp, Homo sapiens
cctctaacctcttcc

SEQ ID NO: 673802 - DNA, 15 bp, Homo sapiens
ctctaacctcttcct

SEQ ID NO: 673803 - DNA, 15 bp, Homo sapiens
tctaacctcttcctt

SEQ ID NO: 673804 - DNA, 15 bp, Homo sapiens
ctaacctcttccttt

SEQ ID NO: 673805 - DNA, 15 bp, Homo sapiens
taacctcttcctttt

SEQ ID NO: 673806 - DNA, 15 bp, Homo sapiens
aacctcttccttttt

SEQ ID NO: 673807 - DNA, 15 bp, Homo sapiens
acctcttcctttttt

SEQ ID NO: 673808 - DNA, 15 bp, Homo sapiens
cctcttccttttttc

SEQ ID NO: 673809 - DNA, 15 bp, Homo sapiens
ctcttccttttttct

SEQ ID NO: 673810 - DNA, 15 bp, Homo sapiens
tcttccttttttctc

SEQ ID NO: 673811 - DNA, 15 bp, Homo sapiens
cttccttttttctct

SEQ ID NO: 673812 - DNA, 15 bp, Homo sapiens
ttccttttttctctc

SEQ ID NO: 673813 - DNA, 15 bp, Homo sapiens
tccttttttctctct

SEQ ID NO: 673814 - DNA, 15 bp, Homo sapiens
ccttttttctctctc

SEQ ID NO: 673815 - DNA, 15 bp, Homo sapiens
cttttttctctctca

SEQ ID NO: 673816 - DNA, 15 bp, Homo sapiens
ttttttctctctcac

SEQ ID NO: 673817 - DNA, 15 bp, Homo sapiens
tttttctctctcact

SEQ ID NO: 673818 - DNA, 15 bp, Homo sapiens
ttttctctctcactg

SEQ ID NO: 673819 - DNA, 15 bp, Homo sapiens
tttctctctcactgc

SEQ ID NO: 673820 - DNA, 15 bp, Homo sapiens
ttctctctcactgct

SEQ ID NO: 673821 - DNA, 15 bp, Homo sapiens
tctctctcactgctg

SEQ ID NO: 673822 - DNA, 15 bp, Homo sapiens
ctctctcactgctgc

SEQ ID NO: 673823 - DNA, 15 bp, Homo sapiens
tctctcactgctgct

SEQ ID NO: 673824 - DNA, 15 bp, Homo sapiens
ctctcactgctgctt

SEQ ID NO: 673825 - DNA, 15 bp, Homo sapiens
tctcactgctgcttc

SEQ ID NO: 673826 - DNA, 15 bp, Homo sapiens
ctcactgctgcttcc

SEQ ID NO: 673827 - DNA, 15 bp, Homo sapiens
tcactgctgcttcct

SEQ ID NO: 673828 - DNA, 15 bp, Homo sapiens
cactgctgcttcctg

SEQ ID NO: 673829 - DNA, 15 bp, Homo sapiens
actgctgcttcctgt

SEQ ID NO: 673830 - DNA, 15 bp, Homo sapiens
ctgctgcttcctgta

SEQ ID NO: 673831 - DNA, 15 bp, Homo sapiens
tgctgcttcctgtac

SEQ ID NO: 673832 - DNA, 15 bp, Homo sapiens
gctgcttcctgtaca

SEQ ID NO: 673833 - DNA, 15 bp, Homo sapiens
ctgcttcctgtacat

SEQ ID NO: 673834 - DNA, 15 bp, Homo sapiens
tgcttcctgtacata

SEQ ID NO: 673835 - DNA, 15 bp, Homo sapiens
gcttcctgtacataa

SEQ ID NO: 673836 - DNA, 15 bp, Homo sapiens
cttcctgtacataat

SEQ ID NO: 673837 - DNA, 15 bp, Homo sapiens
ttcctgtacataata

SEQ ID NO: 673838 - DNA, 15 bp, Homo sapiens
tcctgtacataatag

SEQ ID NO: 673839 - DNA, 15 bp, Homo sapiens
cctgtacataatagt

SEQ ID NO: 673840 - DNA, 15 bp, Homo sapiens
ctgtacataatagtc

SEQ ID NO: 673841 - DNA, 15 bp, Homo sapiens
tgtacataatagtcc

SEQ ID NO: 673842 - DNA, 15 bp, Homo sapiens
gtacataatagtcca

SEQ ID NO: 673843 - DNA, 15 bp, Homo sapiens
tacataatagtccac

SEQ ID NO: 673844 - DNA, 15 bp, Homo sapiens
acataatagtccaca

SEQ ID NO: 673845 - DNA, 15 bp, Homo sapiens
cataatagtccacac

SEQ ID NO: 673846 - DNA, 15 bp, Homo sapiens
ataatagtccacaca

SEQ ID NO: 673847 - DNA, 15 bp, Homo sapiens
taatagtccacacag

SEQ ID NO: 673848 - DNA, 15 bp, Homo sapiens
aatagtccacacaga

SEQ ID NO: 673849 - DNA, 15 bp, Homo sapiens
atagtccacacagac

SEQ ID NO: 673850 - DNA, 15 bp, Homo sapiens
tagtccacacagacc

SEQ ID NO: 673851 - DNA, 15 bp, Homo sapiens
agtccacacagacca

SEQ ID NO: 673852 - DNA, 15 bp, Homo sapiens
gtccacacagaccac

SEQ ID NO: 673853 - DNA, 15 bp, Homo sapiens
tccacacagaccaca

SEQ ID NO: 673854 - DNA, 15 bp, Homo sapiens
ccacacagaccacac

SEQ ID NO: 673855 - DNA, 15 bp, Homo sapiens
cacacagaccacact

SEQ ID NO: 673856 - DNA, 15 bp, Homo sapiens
acacagaccacacta

SEQ ID NO: 673857 - DNA, 15 bp, Homo sapiens
cacagaccacactaa

SEQ ID NO: 673858 - DNA, 15 bp, Homo sapiens
acagaccacactaac

SEQ ID NO: 673859 - DNA, 15 bp, Homo sapiens
cagaccacactaacc

SEQ ID NO: 673860 - DNA, 15 bp, Homo sapiens
agaccacactaaccc

SEQ ID NO: 673861 - DNA, 15 bp, Homo sapiens
gaccacactaaccct

SEQ ID NO: 673862 - DNA, 15 bp, Homo sapiens
accacactaaccctc

SEQ ID NO: 673863 - DNA, 15 bp, Homo sapiens
ccacactaaccctca

SEQ ID NO: 673864 - DNA, 15 bp, Homo sapiens
cacactaaccctcag

SEQ ID NO: 673865 - DNA, 15 bp, Homo sapiens
acactaaccctcagt

SEQ ID NO: 673866 - DNA, 15 bp, Homo sapiens
cactaaccctcagtt

SEQ ID NO: 673867 - DNA, 15 bp, Homo sapiens
actaaccctcagttg

SEQ ID NO: 673868 - DNA, 15 bp, Homo sapiens
ctaaccctcagttgg

SEQ ID NO: 673869 - DNA, 15 bp, Homo sapiens
taaccctcagttgga

SEQ ID NO: 673870 - DNA, 15 bp, Homo sapiens
aaccctcagttggac

SEQ ID NO: 673871 - DNA, 15 bp, Homo sapiens
accctcagttggacc

SEQ ID NO: 673872 - DNA, 15 bp, Homo sapiens
ccctcagttggacct

SEQ ID NO: 673873 - DNA, 15 bp, Homo sapiens
cctcagttggacctc

SEQ ID NO: 673874 - DNA, 15 bp, Homo sapiens
ctcagttggacctca

SEQ ID NO: 673875 - DNA, 15 bp, Homo sapiens
tcagttggacctcag

SEQ ID NO: 673876 - DNA, 15 bp, Homo sapiens
cagttggacctcagg

SEQ ID NO: 673877 - DNA, 15 bp, Homo sapiens
agttggacctcagga

SEQ ID NO: 673878 - DNA, 15 bp, Homo sapiens
gttggacctcaggat

SEQ ID NO: 673879 - DNA, 15 bp, Homo sapiens
ttggacctcaggatg

SEQ ID NO: 673880 - DNA, 15 bp, Homo sapiens
tggacctcaggatgt

SEQ ID NO: 673881 - DNA, 15 bp, Homo sapiens
ggacctcaggatgtc

SEQ ID NO: 673882 - DNA, 15 bp, Homo sapiens
gacctcaggatgtca

SEQ ID NO: 673883 - DNA, 15 bp, Homo sapiens
acctcaggatgtcag

SEQ ID NO: 673884 - DNA, 15 bp, Homo sapiens
cctcaggatgtcagt

SEQ ID NO: 673885 - DNA, 15 bp, Homo sapiens
ctcaggatgtcagtg

SEQ ID NO: 673886 - DNA, 15 bp, Homo sapiens
tcaggatgtcagtgt

SEQ ID NO: 673887 - DNA, 15 bp, Homo sapiens
caggatgtcagtgta

SEQ ID NO: 673888 - DNA, 15 bp, Homo sapiens
aggatgtcagtgtaa

SEQ ID NO: 673889 - DNA, 15 bp, Homo sapiens
ggatgtcagtgtaat

SEQ ID NO: 673890 - DNA, 15 bp, Homo sapiens
gatgtcagtgtaatc

SEQ ID NO: 673891 - DNA, 15 bp, Homo sapiens
atgtcagtgtaatct

SEQ ID NO: 673892 - DNA, 15 bp, Homo sapiens
tgtcagtgtaatctg

SEQ ID NO: 673893 - DNA, 15 bp, Homo sapiens
gtcagtgtaatctgt

SEQ ID NO: 673894 - DNA, 15 bp, Homo sapiens
tcagtgtaatctgtg

SEQ ID NO: 673895 - DNA, 15 bp, Homo sapiens
cagtgtaatctgtgc

SEQ ID NO: 673896 - DNA, 15 bp, Homo sapiens
agtgtaatctgtgcc

SEQ ID NO: 673897 - DNA, 15 bp, Homo sapiens
gtgtaatctgtgccg

SEQ ID NO: 673898 - DNA, 15 bp, Homo sapiens
tgtaatctgtgccgc

SEQ ID NO: 673899 - DNA, 15 bp, Homo sapiens
gtaatctgtgccgct

SEQ ID NO: 673900 - DNA, 15 bp, Homo sapiens
taatctgtgccgctc

SEQ ID NO: 673901 - DNA, 15 bp, Homo sapiens
aatctgtgccgctcc

SEQ ID NO: 673902 - DNA, 15 bp, Homo sapiens
atctgtgccgctcca

SEQ ID NO: 673903 - DNA, 15 bp, Homo sapiens
tctgtgccgctccat

SEQ ID NO: 673904 - DNA, 15 bp, Homo sapiens
ctgtgccgctccatt

SEQ ID NO: 673905 - DNA, 15 bp, Homo sapiens
tgtgccgctccatta

SEQ ID NO: 673906 - DNA, 15 bp, Homo sapiens
gtgccgctccattag

SEQ ID NO: 673907 - DNA, 15 bp, Homo sapiens
tgccgctccattagc

SEQ ID NO: 673908 - DNA, 15 bp, Homo sapiens
gccgctccattagcc

SEQ ID NO: 673909 - DNA, 15 bp, Homo sapiens
ccgctccattagccc

SEQ ID NO: 673910 - DNA, 15 bp, Homo sapiens
cgctccattagcccc

SEQ ID NO: 673911 - DNA, 15 bp, Homo sapiens
gctccattagccccg

SEQ ID NO: 673912 - DNA, 15 bp, Homo sapiens
ctccattagccccgg

SEQ ID NO: 673913 - DNA, 15 bp, Homo sapiens
tccattagccccggt

SEQ ID NO: 673914 - DNA, 15 bp, Homo sapiens
ccattagccccggta

SEQ ID NO: 673915 - DNA, 15 bp, Homo sapiens
cattagccccggtaa

SEQ ID NO: 673916 - DNA, 15 bp, Homo sapiens
attagccccggtaag

SEQ ID NO: 673917 - DNA, 15 bp, Homo sapiens
ttagccccggtaagc

SEQ ID NO: 673918 - DNA, 15 bp, Homo sapiens
tagccccggtaagcg

SEQ ID NO: 673919 - DNA, 15 bp, Homo sapiens
agccccggtaagcga

SEQ ID NO: 673920 - DNA, 15 bp, Homo sapiens
gccccggtaagcgag

SEQ ID NO: 673921 - DNA, 15 bp, Homo sapiens
ccccggtaagcgagc

SEQ ID NO: 673922 - DNA, 15 bp, Homo sapiens
cccggtaagcgagcc

SEQ ID NO: 673923 - DNA, 15 bp, Homo sapiens
ccggtaagcgagcca

SEQ ID NO: 673924 - DNA, 15 bp, Homo sapiens
cggtaagcgagccac

SEQ ID NO: 673925 - DNA, 15 bp, Homo sapiens
ggtaagcgagccacc

SEQ ID NO: 673926 - DNA, 15 bp, Homo sapiens
gtaagcgagccacct

SEQ ID NO: 673927 - DNA, 15 bp, Homo sapiens
taagcgagccaccta

SEQ ID NO: 673928 - DNA, 15 bp, Homo sapiens
aagcgagccacctaa

SEQ ID NO: 673929 - DNA, 15 bp, Homo sapiens
agcgagccacctaag

SEQ ID NO: 673930 - DNA, 15 bp, Homo sapiens
gcgagccacctaagc

SEQ ID NO: 673931 - DNA, 15 bp, Homo sapiens
cgagccacctaagca

SEQ ID NO: 673932 - DNA, 15 bp, Homo sapiens
gagccacctaagcaa

SEQ ID NO: 673933 - DNA, 15 bp, Homo sapiens
agccacctaagcaaa

SEQ ID NO: 673934 - DNA, 15 bp, Homo sapiens
gccacctaagcaaag

SEQ ID NO: 673935 - DNA, 15 bp, Homo sapiens
ccacctaagcaaagg

SEQ ID NO: 673936 - DNA, 15 bp, Homo sapiens
cacctaagcaaaggt

SEQ ID NO: 673937 - DNA, 15 bp, Homo sapiens
acctaagcaaaggta

SEQ ID NO: 673938 - DNA, 15 bp, Homo sapiens
cctaagcaaaggtaa

SEQ ID NO: 673939 - DNA, 15 bp, Homo sapiens
ctaagcaaaggtaat

SEQ ID NO: 673940 - DNA, 15 bp, Homo sapiens
taagcaaaggtaatt

SEQ ID NO: 673941 - DNA, 15 bp, Homo sapiens
aagcaaaggtaatta

SEQ ID NO: 673942 - DNA, 15 bp, Homo sapiens
agcaaaggtaattac

SEQ ID NO: 673943 - DNA, 15 bp, Homo sapiens
gcaaaggtaattaca

SEQ ID NO: 673944 - DNA, 15 bp, Homo sapiens
caaaggtaattacag

SEQ ID NO: 673945 - DNA, 15 bp, Homo sapiens
aaaggtaattacagt

SEQ ID NO: 673946 - DNA, 15 bp, Homo sapiens
aaggtaattacagtg

SEQ ID NO: 673947 - DNA, 15 bp, Homo sapiens
aggtaattacagtgt

SEQ ID NO: 673948 - DNA, 15 bp, Homo sapiens
ggtaattacagtgtg

SEQ ID NO: 673949 - DNA, 15 bp, Homo sapiens
gtaattacagtgtgt

SEQ ID NO: 673950 - DNA, 15 bp, Homo sapiens
taattacagtgtgtc

SEQ ID NO: 673951 - DNA, 15 bp, Homo sapiens
aattacagtgtgtcc

SEQ ID NO: 673952 - DNA, 15 bp, Homo sapiens
attacagtgtgtccg

SEQ ID NO: 673953 - DNA, 15 bp, Homo sapiens
ttacagtgtgtccgc

SEQ ID NO: 673954 - DNA, 15 bp, Homo sapiens
tacagtgtgtccgct

SEQ ID NO: 673955 - DNA, 15 bp, Homo sapiens
acagtgtgtccgctg

SEQ ID NO: 673956 - DNA, 15 bp, Homo sapiens
cagtgtgtccgctgc

SEQ ID NO: 673957 - DNA, 15 bp, Homo sapiens
agtgtgtccgctgct

SEQ ID NO: 673958 - DNA, 15 bp, Homo sapiens
gtgtgtccgctgctg

SEQ ID NO: 673959 - DNA, 15 bp, Homo sapiens
tgtgtccgctgctgt

SEQ ID NO: 673960 - DNA, 15 bp, Homo sapiens
gtgtccgctgctgtc

SEQ ID NO: 673961 - DNA, 15 bp, Homo sapiens
tgtccgctgctgtca

SEQ ID NO: 673962 - DNA, 15 bp, Homo sapiens
gtccgctgctgtcac

SEQ ID NO: 673963 - DNA, 15 bp, Homo sapiens
tccgctgctgtcact

SEQ ID NO: 673964 - DNA, 15 bp, Homo sapiens
ccgctgctgtcactg

SEQ ID NO: 673965 - DNA, 15 bp, Homo sapiens
cgctgctgtcactgg

SEQ ID NO: 673966 - DNA, 15 bp, Homo sapiens
gctgctgtcactgga

SEQ ID NO: 673967 - DNA, 15 bp, Homo sapiens
ctgctgtcactggag

SEQ ID NO: 673968 - DNA, 15 bp, Homo sapiens
tgctgtcactggagc

SEQ ID NO: 673969 - DNA, 15 bp, Homo sapiens
gctgtcactggagct

SEQ ID NO: 673970 - DNA, 15 bp, Homo sapiens
ctgtcactggagctg

SEQ ID NO: 673971 - DNA, 15 bp, Homo sapiens
tgtcactggagctgt

SEQ ID NO: 673972 - DNA, 15 bp, Homo sapiens
gtcactggagctgtg

SEQ ID NO: 673973 - DNA, 15 bp, Homo sapiens
tcactggagctgtgt

SEQ ID NO: 673974 - DNA, 15 bp, Homo sapiens
cactggagctgtgtg

SEQ ID NO: 673975 - DNA, 15 bp, Homo sapiens
actggagctgtgtgt

SEQ ID NO: 673976 - DNA, 15 bp, Homo sapiens
ctggagctgtgtgtc

SEQ ID NO: 673977 - DNA, 15 bp, Homo sapiens
tggagctgtgtgtca

SEQ ID NO: 673978 - DNA, 15 bp, Homo sapiens
ggagctgtgtgtcac

SEQ ID NO: 673979 - DNA, 15 bp, Homo sapiens
gagctgtgtgtcaca

SEQ ID NO: 673980 - DNA, 15 bp, Homo sapiens
agctgtgtgtcacac

SEQ ID NO: 673981 - DNA, 15 bp, Homo sapiens
gctgtgtgtcacact

SEQ ID NO: 673982 - DNA, 15 bp, Homo sapiens
ctgtgtgtcacactg

SEQ ID NO: 673983 - DNA, 15 bp, Homo sapiens
tgtgtgtcacactgg

SEQ ID NO: 673984 - DNA, 15 bp, Homo sapiens
gtgtgtcacactggg

SEQ ID NO: 673985 - DNA, 15 bp, Homo sapiens
tgtgtcacactgggc

SEQ ID NO: 673986 - DNA, 15 bp, Homo sapiens
gtgtcacactgggca

SEQ ID NO: 673987 - DNA, 15 bp, Homo sapiens
tgtcacactgggcag

SEQ ID NO: 673988 - DNA, 15 bp, Homo sapiens
gtcacactgggcaga

SEQ ID NO: 673989 - DNA, 15 bp, Homo sapiens
tcacactgggcagat

SEQ ID NO: 673990 - DNA, 15 bp, Homo sapiens
cacactgggcagatg

SEQ ID NO: 673991 - DNA, 15 bp, Homo sapiens
acactgggcagatgc

SEQ ID NO: 673992 - DNA, 15 bp, Homo sapiens
cactgggcagatgca

SEQ ID NO: 673993 - DNA, 15 bp, Homo sapiens
actgggcagatgcaa

SEQ ID NO: 673994 - DNA, 15 bp, Homo sapiens
ctgggcagatgcaag

SEQ ID NO: 673995 - DNA, 15 bp, Homo sapiens
tgggcagatgcaagt

SEQ ID NO: 673996 - DNA, 15 bp, Homo sapiens
gggcagatgcaagtc

SEQ ID NO: 673997 - DNA, 15 bp, Homo sapiens
ggcagatgcaagtct

SEQ ID NO: 673998 - DNA, 15 bp, Homo sapiens
gcagatgcaagtctt

SEQ ID NO: 673999 - DNA, 15 bp, Homo sapiens
cagatgcaagtcttc

SEQ ID NO: 674000 - DNA, 15 bp, Homo sapiens
agatgcaagtcttcc

SEQ ID NO: 674001 - DNA, 15 bp, Homo sapiens
gatgcaagtcttcct

SEQ ID NO: 674002 - DNA, 15 bp, Homo sapiens
atgcaagtcttcctg

SEQ ID NO: 674003 - DNA, 15 bp, Homo sapiens
tgcaagtcttcctgc

SEQ ID NO: 674004 - DNA, 15 bp, Homo sapiens
gcaagtcttcctgcc

SEQ ID NO: 674005 - DNA, 15 bp, Homo sapiens
caagtcttcctgcca

SEQ ID NO: 674006 - DNA, 15 bp, Homo sapiens
aagtcttcctgccac

SEQ ID NO: 674007 - DNA, 15 bp, Homo sapiens
agtcttcctgccacg

SEQ ID NO: 674008 - DNA, 15 bp, Homo sapiens
gtcttcctgccacgc

SEQ ID NO: 674009 - DNA, 15 bp, Homo sapiens
tcttcctgccacgcc

SEQ ID NO: 674010 - DNA, 15 bp, Homo sapiens
cttcctgccacgcct

SEQ ID NO: 674011 - DNA, 15 bp, Homo sapiens
ttcctgccacgcctt

SEQ ID NO: 674012 - DNA, 15 bp, Homo sapiens
tcctgccacgccttg

SEQ ID NO: 674013 - DNA, 15 bp, Homo sapiens
cctgccacgccttga

SEQ ID NO: 674014 - DNA, 15 bp, Homo sapiens
ctgccacgccttgag

SEQ ID NO: 674015 - DNA, 15 bp, Homo sapiens
tgccacgccttgagg

SEQ ID NO: 674016 - DNA, 15 bp, Homo sapiens
gccacgccttgaggc

SEQ ID NO: 674017 - DNA, 15 bp, Homo sapiens
ccacgccttgaggct

SEQ ID NO: 674018 - DNA, 15 bp, Homo sapiens
cacgccttgaggctc

SEQ ID NO: 674019 - DNA, 15 bp, Homo sapiens
acgccttgaggctca

SEQ ID NO: 674020 - DNA, 15 bp, Homo sapiens
cgccttgaggctcag

SEQ ID NO: 674021 - DNA, 15 bp, Homo sapiens
gccttgaggctcagc

SEQ ID NO: 674022 - DNA, 15 bp, Homo sapiens
ccttgaggctcagcc

SEQ ID NO: 674023 - DNA, 15 bp, Homo sapiens
cttgaggctcagcca

SEQ ID NO: 674024 - DNA, 15 bp, Homo sapiens
ttgaggctcagccac

SEQ ID NO: 674025 - DNA, 15 bp, Homo sapiens
tgaggctcagccaca

SEQ ID NO: 674026 - DNA, 15 bp, Homo sapiens
gaggctcagccacac

SEQ ID NO: 674027 - DNA, 15 bp, Homo sapiens
aggctcagccacaca

SEQ ID NO: 674028 - DNA, 15 bp, Homo sapiens
ggctcagccacacag

SEQ ID NO: 674029 - DNA, 15 bp, Homo sapiens
gctcagccacacagg

SEQ ID NO: 674030 - DNA, 15 bp, Homo sapiens
ctcagccacacagga

SEQ ID NO: 674031 - DNA, 15 bp, Homo sapiens
tcagccacacaggag

SEQ ID NO: 674032 - DNA, 15 bp, Homo sapiens
cagccacacaggaga

SEQ ID NO: 674033 - DNA, 15 bp, Homo sapiens
agccacacaggagaa

SEQ ID NO: 674034 - DNA, 15 bp, Homo sapiens
gccacacaggagaaa

SEQ ID NO: 674035 - DNA, 15 bp, Homo sapiens
ccacacaggagaaat

SEQ ID NO: 674036 - DNA, 15 bp, Homo sapiens
cacacaggagaaatc

SEQ ID NO: 674037 - DNA, 15 bp, Homo sapiens
acacaggagaaatca

SEQ ID NO: 674038 - DNA, 15 bp, Homo sapiens
cacaggagaaatcac

SEQ ID NO: 674039 - DNA, 15 bp, Homo sapiens
acaggagaaatcaca

SEQ ID NO: 674040 - DNA, 15 bp, Homo sapiens
caggagaaatcacag

SEQ ID NO: 674041 - DNA, 15 bp, Homo sapiens
aggagaaatcacagc

SEQ ID NO: 674042 - DNA, 15 bp, Homo sapiens
ggagaaatcacagcg

SEQ ID NO: 674043 - DNA, 15 bp, Homo sapiens
gagaaatcacagcgc

SEQ ID NO: 674044 - DNA, 15 bp, Homo sapiens
agaaatcacagcgct

SEQ ID NO: 674045 - DNA, 15 bp, Homo sapiens
gaaatcacagcgcta

SEQ ID NO: 674046 - DNA, 15 bp, Homo sapiens
aaatcacagcgctag

SEQ ID NO: 674047 - DNA, 15 bp, Homo sapiens
aatcacagcgctagc

SEQ ID NO: 674048 - DNA, 15 bp, Homo sapiens
atcacagcgctagct

SEQ ID NO: 674049 - DNA, 15 bp, Homo sapiens
tcacagcgctagctg

SEQ ID NO: 674050 - DNA, 15 bp, Homo sapiens
cacagcgctagctgt

SEQ ID NO: 674051 - DNA, 15 bp, Homo sapiens
acagcgctagctgtg

SEQ ID NO: 674052 - DNA, 15 bp, Homo sapiens
cagcgctagctgtgg

SEQ ID NO: 674053 - DNA, 15 bp, Homo sapiens
agcgctagctgtggc

SEQ ID NO: 674054 - DNA, 15 bp, Homo sapiens
gcgctagctgtggcc

SEQ ID NO: 674055 - DNA, 15 bp, Homo sapiens
cgctagctgtggcct

SEQ ID NO: 674056 - DNA, 15 bp, Homo sapiens
gctagctgtggcctg

SEQ ID NO: 674057 - DNA, 15 bp, Homo sapiens
ctagctgtggcctgc

SEQ ID NO: 674058 - DNA, 15 bp, Homo sapiens
tagctgtggcctgct

SEQ ID NO: 674059 - DNA, 15 bp, Homo sapiens
agctgtggcctgctg

SEQ ID NO: 674060 - DNA, 15 bp, Homo sapiens
gctgtggcctgctgg

SEQ ID NO: 674061 - DNA, 15 bp, Homo sapiens
ctgtggcctgctggc

SEQ ID NO: 674062 - DNA, 15 bp, Homo sapiens
tgtggcctgctggct

SEQ ID NO: 674063 - DNA, 15 bp, Homo sapiens
gtggcctgctggcta

SEQ ID NO: 674064 - DNA, 15 bp, Homo sapiens
tggcctgctggctac

SEQ ID NO: 674065 - DNA, 15 bp, Homo sapiens
ggcctgctggctacc

SEQ ID NO: 674066 - DNA, 15 bp, Homo sapiens
gcctgctggctaccc

SEQ ID NO: 674067 - DNA, 15 bp, Homo sapiens
cctgctggctacccc

SEQ ID NO: 674068 - DNA, 15 bp, Homo sapiens
ctgctggctaccccc

SEQ ID NO: 674069 - DNA, 15 bp, Homo sapiens
tgctggctaccccca

SEQ ID NO: 674070 - DNA, 15 bp, Homo sapiens
gctggctacccccag

SEQ ID NO: 674071 - DNA, 15 bp, Homo sapiens
ctggctacccccaga

SEQ ID NO: 674072 - DNA, 15 bp, Homo sapiens
tggctacccccagag

SEQ ID NO: 674073 - DNA, 15 bp, Homo sapiens
ggctacccccagaga

SEQ ID NO: 674074 - DNA, 15 bp, Homo sapiens
gctacccccagagat

SEQ ID NO: 674075 - DNA, 15 bp, Homo sapiens
ctacccccagagatg

SEQ ID NO: 674076 - DNA, 15 bp, Homo sapiens
tacccccagagatgc

SEQ ID NO: 674077 - DNA, 15 bp, Homo sapiens
acccccagagatgca

SEQ ID NO: 674078 - DNA, 15 bp, Homo sapiens
cccccagagatgcag

SEQ ID NO: 674079 - DNA, 15 bp, Homo sapiens
ccccagagatgcagc

SEQ ID NO: 674080 - DNA, 15 bp, Homo sapiens
cccagagatgcagct

SEQ ID NO: 674081 - DNA, 15 bp, Homo sapiens
ccagagatgcagctg

SEQ ID NO: 674082 - DNA, 15 bp, Homo sapiens
cagagatgcagctgt

SEQ ID NO: 674083 - DNA, 15 bp, Homo sapiens
agagatgcagctgtg

SEQ ID NO: 674084 - DNA, 15 bp, Homo sapiens
gagatgcagctgtgc

SEQ ID NO: 674085 - DNA, 15 bp, Homo sapiens
agatgcagctgtgct

SEQ ID NO: 674086 - DNA, 15 bp, Homo sapiens
gatgcagctgtgctc

SEQ ID NO: 674087 - DNA, 15 bp, Homo sapiens
atgcagctgtgctct

SEQ ID NO: 674088 - DNA, 15 bp, Homo sapiens
tgcagctgtgctcta

SEQ ID NO: 674089 - DNA, 15 bp, Homo sapiens
gcagctgtgctctat

SEQ ID NO: 674090 - DNA, 15 bp, Homo sapiens
cagctgtgctctatg

SEQ ID NO: 674091 - DNA, 15 bp, Homo sapiens
agctgtgctctatga

SEQ ID NO: 674092 - DNA, 15 bp, Homo sapiens
gctgtgctctatgaa

SEQ ID NO: 674093 - DNA, 15 bp, Homo sapiens
ctgtgctctatgaat

SEQ ID NO: 674094 - DNA, 15 bp, Homo sapiens
tgtgctctatgaatg

SEQ ID NO: 674095 - DNA, 15 bp, Homo sapiens
gtgctctatgaatgc

SEQ ID NO: 674096 - DNA, 15 bp, Homo sapiens
tgctctatgaatgca

SEQ ID NO: 674097 - DNA, 15 bp, Homo sapiens
gctctatgaatgcag

SEQ ID NO: 674098 - DNA, 15 bp, Homo sapiens
ctctatgaatgcagc

SEQ ID NO: 674099 - DNA, 15 bp, Homo sapiens
tctatgaatgcagcc

SEQ ID NO: 674100 - DNA, 15 bp, Homo sapiens
ctatgaatgcagccc

SEQ ID NO: 674101 - DNA, 15 bp, Homo sapiens
tatgaatgcagcccc

SEQ ID NO: 674102 - DNA, 15 bp, Homo sapiens
atgaatgcagccccc

SEQ ID NO: 674103 - DNA, 15 bp, Homo sapiens
tgaatgcagccccca

SEQ ID NO: 674104 - DNA, 15 bp, Homo sapiens
gaatgcagcccccaa

SEQ ID NO: 674105 - DNA, 15 bp, Homo sapiens
aatgcagcccccaac

SEQ ID NO: 674106 - DNA, 15 bp, Homo sapiens
atgcagcccccaacc

SEQ ID NO: 674107 - DNA, 15 bp, Homo sapiens
tgcagcccccaacca

SEQ ID NO: 674108 - DNA, 15 bp, Homo sapiens
gcagcccccaaccag

SEQ ID NO: 674109 - DNA, 15 bp, Homo sapiens
cagcccccaaccaga

SEQ ID NO: 674110 - DNA, 15 bp, Homo sapiens
agcccccaaccagag

SEQ ID NO: 674111 - DNA, 15 bp, Homo sapiens
gcccccaaccagagg

SEQ ID NO: 674112 - DNA, 15 bp, Homo sapiens
cccccaaccagagga

SEQ ID NO: 674113 - DNA, 15 bp, Homo sapiens
ccccaaccagaggaa

SEQ ID NO: 674114 - DNA, 15 bp, Homo sapiens
cccaaccagaggaaa

SEQ ID NO: 674115 - DNA, 15 bp, Homo sapiens
ccaaccagaggaaag

SEQ ID NO: 674116 - DNA, 15 bp, Homo sapiens
caaccagaggaaagc

SEQ ID NO: 674117 - DNA, 15 bp, Homo sapiens
aaccagaggaaagca

SEQ ID NO: 674118 - DNA, 15 bp, Homo sapiens
accagaggaaagcac

SEQ ID NO: 674119 - DNA, 15 bp, Homo sapiens
ccagaggaaagcacc

SEQ ID NO: 674120 - DNA, 15 bp, Homo sapiens
cagaggaaagcaccc

SEQ ID NO: 674121 - DNA, 15 bp, Homo sapiens
agaggaaagcaccct

SEQ ID NO: 674122 - DNA, 15 bp, Homo sapiens
gaggaaagcaccctg

SEQ ID NO: 674123 - DNA, 15 bp, Homo sapiens
aggaaagcaccctga

SEQ ID NO: 674124 - DNA, 15 bp, Homo sapiens
ggaaagcaccctgaa

SEQ ID NO: 674125 - DNA, 15 bp, Homo sapiens
gaaagcaccctgaag

SEQ ID NO: 674126 - DNA, 15 bp, Homo sapiens
aaagcaccctgaaga

SEQ ID NO: 674127 - DNA, 15 bp, Homo sapiens
aagcaccctgaagac

SEQ ID NO: 674128 - DNA, 15 bp, Homo sapiens
agcaccctgaagacc

SEQ ID NO: 674129 - DNA, 15 bp, Homo sapiens
gcaccctgaagacct

SEQ ID NO: 674130 - DNA, 15 bp, Homo sapiens
caccctgaagacctg

SEQ ID NO: 674131 - DNA, 15 bp, Homo sapiens
accctgaagacctgg

SEQ ID NO: 674132 - DNA, 15 bp, Homo sapiens
ccctgaagacctggg

SEQ ID NO: 674133 - DNA, 15 bp, Homo sapiens
cctgaagacctgggt

SEQ ID NO: 674134 - DNA, 15 bp, Homo sapiens
ctgaagacctgggtg

SEQ ID NO: 674135 - DNA, 15 bp, Homo sapiens
tgaagacctgggtgc

SEQ ID NO: 674136 - DNA, 15 bp, Homo sapiens
gaagacctgggtgct

SEQ ID NO: 674137 - DNA, 15 bp, Homo sapiens
aagacctgggtgctt

SEQ ID NO: 674138 - DNA, 15 bp, Homo sapiens
agacctgggtgcttt

SEQ ID NO: 674139 - DNA, 15 bp, Homo sapiens
gacctgggtgcttta

SEQ ID NO: 674140 - DNA, 15 bp, Homo sapiens
acctgggtgctttac

SEQ ID NO: 674141 - DNA, 15 bp, Homo sapiens
cctgggtgctttacg

SEQ ID NO: 674142 - DNA, 15 bp, Homo sapiens
ctgggtgctttacgc

SEQ ID NO: 674143 - DNA, 15 bp, Homo sapiens
tgggtgctttacgca

SEQ ID NO: 674144 - DNA, 15 bp, Homo sapiens
gggtgctttacgcaa

SEQ ID NO: 674145 - DNA, 15 bp, Homo sapiens
ggtgctttacgcaat

SEQ ID NO: 674146 - DNA, 15 bp, Homo sapiens
gtgctttacgcaata

SEQ ID NO: 674147 - DNA, 15 bp, Homo sapiens
tgctttacgcaataa

SEQ ID NO: 674148 - DNA, 15 bp, Homo sapiens
gctttacgcaataaa

SEQ ID NO: 674149 - DNA, 15 bp, Homo sapiens
ctttacgcaataaaa

SEQ ID NO: 674150 - DNA, 15 bp, Homo sapiens
tttacgcaataaaaa

SEQ ID NO: 674151 - DNA, 15 bp, Homo sapiens
ttacgcaataaaaaa

SEQ ID NO: 674152 - DNA, 15 bp, Homo sapiens
tacgcaataaaaaag

SEQ ID NO: 674153 - DNA, 15 bp, Homo sapiens
acgcaataaaaaaga

SEQ ID NO: 674154 - DNA, 15 bp, Homo sapiens
cgcaataaaaaagac

SEQ ID NO: 674155 - DNA, 15 bp, Homo sapiens
gcaataaaaaagaca

SEQ ID NO: 674156 - DNA, 15 bp, Homo sapiens
caataaaaaagacaa

SEQ ID NO: 674157 - DNA, 15 bp, Homo sapiens
aataaaaaagacaaa

SEQ ID NO: 674158 - DNA, 15 bp, Homo sapiens
ataaaaaagacaaac

SEQ ID NO: 674159 - DNA, 15 bp, Homo sapiens
taaaaaagacaaacc

SEQ ID NO: 674160 - DNA, 15 bp, Homo sapiens
aaaaaagacaaacct

SEQ ID NO: 674161 - DNA, 15 bp, Homo sapiens
aaaaagacaaacctt

SEQ ID NO: 674162 - DNA, 15 bp, Homo sapiens
aaaagacaaaccttc

SEQ ID NO: 674163 - DNA, 15 bp, Homo sapiens
aaagacaaaccttct

SEQ ID NO: 674164 - DNA, 15 bp, Homo sapiens
aagacaaaccttctg

SEQ ID NO: 674165 - DNA, 15 bp, Homo sapiens
agacaaaccttctga

SEQ ID NO: 674166 - DNA, 15 bp, Homo sapiens
gacaaaccttctgat

SEQ ID NO: 674167 - DNA, 15 bp, Homo sapiens
acaaaccttctgatg

SEQ ID NO: 674168 - DNA, 15 bp, Homo sapiens
caaaccttctgatgg

SEQ ID NO: 674169 - DNA, 15 bp, Homo sapiens
aaaccttctgatggc

SEQ ID NO: 674170 - DNA, 15 bp, Homo sapiens
aaccttctgatggca

SEQ ID NO: 674171 - DNA, 15 bp, Homo sapiens
accttctgatggcag

SEQ ID NO: 674172 - DNA, 15 bp, Homo sapiens
ccttctgatggcaga

SEQ ID NO: 674173 - DNA, 15 bp, Homo sapiens
cttctgatggcagaa

SEQ ID NO: 674174 - DNA, 15 bp, Homo sapiens
ttctgatggcagaat

SEQ ID NO: 674175 - DNA, 15 bp, Homo sapiens
tctgatggcagaata

SEQ ID NO: 674176 - DNA, 15 bp, Homo sapiens
ctgatggcagaatat

SEQ ID NO: 674177 - DNA, 15 bp, Homo sapiens
tgatggcagaatatg

SEQ ID NO: 674178 - DNA, 15 bp, Homo sapiens
gatggcagaatatgt

SEQ ID NO: 674179 - DNA, 15 bp, Homo sapiens
atggcagaatatgtt

SEQ ID NO: 674180 - DNA, 15 bp, Homo sapiens
tggcagaatatgttt

SEQ ID NO: 674181 - DNA, 15 bp, Homo sapiens
ggcagaatatgtttt

SEQ ID NO: 674182 - DNA, 15 bp, Homo sapiens
gcagaatatgttttt

SEQ ID NO: 674183 - DNA, 15 bp, Homo sapiens
cagaatatgtttttt

SEQ ID NO: 674184 - DNA, 15 bp, Homo sapiens
agaatatgtttttta

SEQ ID NO: 674185 - DNA, 15 bp, Homo sapiens
gaatatgttttttaa

SEQ ID NO: 674186 - DNA, 15 bp, Homo sapiens
aatatgttttttaaa

SEQ ID NO: 674187 - DNA, 15 bp, Homo sapiens
atatgttttttaaaa

SEQ ID NO: 674188 - DNA, 15 bp, Homo sapiens
tatgttttttaaaag

SEQ ID NO: 674189 - DNA, 15 bp, Homo sapiens
atgttttttaaaaga

SEQ ID NO: 674190 - DNA, 15 bp, Homo sapiens
tgttttttaaaagac

SEQ ID NO: 674191 - DNA, 15 bp, Homo sapiens
gttttttaaaagact

SEQ ID NO: 674192 - DNA, 15 bp, Homo sapiens
ttttttaaaagacta

SEQ ID NO: 674193 - DNA, 15 bp, Homo sapiens
tttttaaaagactaa

SEQ ID NO: 674194 - DNA, 15 bp, Homo sapiens
ttttaaaagactaat

SEQ ID NO: 674195 - DNA, 15 bp, Homo sapiens
tttaaaagactaatg

SEQ ID NO: 674196 - DNA, 15 bp, Homo sapiens
ttaaaagactaatga

SEQ ID NO: 674197 - DNA, 15 bp, Homo sapiens
taaaagactaatgaa

SEQ ID NO: 674198 - DNA, 15 bp, Homo sapiens
aaaagactaatgaat

SEQ ID NO: 674199 - DNA, 15 bp, Homo sapiens
aaagactaatgaatt

SEQ ID NO: 674200 - DNA, 15 bp, Homo sapiens
aagactaatgaattc

SEQ ID NO: 674201 - DNA, 15 bp, Homo sapiens
agactaatgaattct

SEQ ID NO: 674202 - DNA, 15 bp, Homo sapiens
gactaatgaattctc

SEQ ID NO: 674203 - DNA, 15 bp, Homo sapiens
actaatgaattctca

SEQ ID NO: 674204 - DNA, 15 bp, Homo sapiens
ctaatgaattctcat

SEQ ID NO: 674205 - DNA, 15 bp, Homo sapiens
taatgaattctcatg

SEQ ID NO: 674206 - DNA, 15 bp, Homo sapiens
aatgaattctcatgt

SEQ ID NO: 674207 - DNA, 15 bp, Homo sapiens
atgaattctcatgtt

SEQ ID NO: 674208 - DNA, 15 bp, Homo sapiens
tgaattctcatgttt

SEQ ID NO: 674209 - DNA, 15 bp, Homo sapiens
gaattctcatgtttt

SEQ ID NO: 674210 - DNA, 15 bp, Homo sapiens
aattctcatgtttta

SEQ ID NO: 674211 - DNA, 15 bp, Homo sapiens
attctcatgttttat

SEQ ID NO: 674212 - DNA, 15 bp, Homo sapiens
ttctcatgttttatt

SEQ ID NO: 674213 - DNA, 15 bp, Homo sapiens
tctcatgttttattt

SEQ ID NO: 674214 - DNA, 15 bp, Homo sapiens
ctcatgttttatttg

SEQ ID NO: 674215 - DNA, 15 bp, Homo sapiens
tcatgttttatttgg

SEQ ID NO: 674216 - DNA, 15 bp, Homo sapiens
catgttttatttggt

SEQ ID NO: 674217 - DNA, 15 bp, Homo sapiens
atgttttatttggtt

SEQ ID NO: 674218 - DNA, 15 bp, Homo sapiens
tgttttatttggttc

SEQ ID NO: 674219 - DNA, 15 bp, Homo sapiens
gttttatttggttca

SEQ ID NO: 674220 - DNA, 15 bp, Homo sapiens
ttttatttggttcaa

SEQ ID NO: 674221 - DNA, 15 bp, Homo sapiens
tttatttggttcaac

SEQ ID NO: 674222 - DNA, 15 bp, Homo sapiens
ttatttggttcaaca

SEQ ID NO: 674223 - DNA, 15 bp, Homo sapiens
tatttggttcaacac

SEQ ID NO: 674224 - DNA, 15 bp, Homo sapiens
atttggttcaacact

SEQ ID NO: 674225 - DNA, 15 bp, Homo sapiens
tttggttcaacacta

SEQ ID NO: 674226 - DNA, 15 bp, Homo sapiens
ttggttcaacactaa

SEQ ID NO: 674227 - DNA, 15 bp, Homo sapiens
tggttcaacactaaa

SEQ ID NO: 674228 - DNA, 15 bp, Homo sapiens
ggttcaacactaaaa

SEQ ID NO: 674229 - DNA, 15 bp, Homo sapiens
gttcaacactaaaac

SEQ ID NO: 674230 - DNA, 15 bp, Homo sapiens
ttcaacactaaaact

SEQ ID NO: 674231 - DNA, 15 bp, Homo sapiens
tcaacactaaaactg

SEQ ID NO: 674232 - DNA, 15 bp, Homo sapiens
caacactaaaactgg

SEQ ID NO: 674233 - DNA, 15 bp, Homo sapiens
aacactaaaactggt

SEQ ID NO: 674234 - DNA, 15 bp, Homo sapiens
acactaaaactggtg

SEQ ID NO: 674235 - DNA, 15 bp, Homo sapiens
cactaaaactggtgt

SEQ ID NO: 674236 - DNA, 15 bp, Homo sapiens
actaaaactggtgtt

SEQ ID NO: 674237 - DNA, 15 bp, Homo sapiens
ctaaaactggtgttg

SEQ ID NO: 674238 - DNA, 15 bp, Homo sapiens
taaaactggtgttgc

SEQ ID NO: 674239 - DNA, 15 bp, Homo sapiens
aaaactggtgttgct

SEQ ID NO: 674240 - DNA, 15 bp, Homo sapiens
aaactggtgttgctg

SEQ ID NO: 674241 - DNA, 15 bp, Homo sapiens
aactggtgttgctgt

SEQ ID NO: 674242 - DNA, 15 bp, Homo sapiens
actggtgttgctgtg

SEQ ID NO: 674243 - DNA, 15 bp, Homo sapiens
ctggtgttgctgtgt

SEQ ID NO: 674244 - DNA, 15 bp, Homo sapiens
tggtgttgctgtgtt

SEQ ID NO: 674245 - DNA, 15 bp, Homo sapiens
ggtgttgctgtgttt

SEQ ID NO: 674246 - DNA, 15 bp, Homo sapiens
gtgttgctgtgtttt

SEQ ID NO: 674247 - DNA, 15 bp, Homo sapiens
tgttgctgtgttttg

SEQ ID NO: 674248 - DNA, 15 bp, Homo sapiens
gttgctgtgttttgt

SEQ ID NO: 674249 - DNA, 15 bp, Homo sapiens
ttgctgtgttttgtt

SEQ ID NO: 674250 - DNA, 15 bp, Homo sapiens
tgctgtgttttgttt

SEQ ID NO: 674251 - DNA, 15 bp, Homo sapiens
gctgtgttttgtttt

SEQ ID NO: 674252 - DNA, 15 bp, Homo sapiens
ctgtgttttgttttt

SEQ ID NO: 674253 - DNA, 15 bp, Homo sapiens
tgtgttttgtttttt

SEQ ID NO: 674254 - DNA, 15 bp, Homo sapiens
gtgttttgttttttg

SEQ ID NO: 674255 - DNA, 15 bp, Homo sapiens
tgttttgttttttgt

SEQ ID NO: 674256 - DNA, 15 bp, Homo sapiens
gttttgttttttgtt

SEQ ID NO: 674257 - DNA, 15 bp, Homo sapiens
ttttgttttttgttt

SEQ ID NO: 674258 - DNA, 15 bp, Homo sapiens
tttgttttttgtttt

SEQ ID NO: 674259 - DNA, 15 bp, Homo sapiens
ttgttttttgttttt

SEQ ID NO: 674260 - DNA, 15 bp, Homo sapiens
tgttttttgtttttt

SEQ ID NO: 674261 - DNA, 15 bp, Homo sapiens
gttttttgttttttt

SEQ ID NO: 674262 - DNA, 15 bp, Homo sapiens
ttttttgtttttttt

SEQ ID NO: 674263 - DNA, 15 bp, Homo sapiens
tttttgttttttttt

SEQ ID NO: 674264 - DNA, 15 bp, Homo sapiens
ttttgtttttttttg

SEQ ID NO: 674265 - DNA, 15 bp, Homo sapiens
tttgtttttttttgt

SEQ ID NO: 674266 - DNA, 15 bp, Homo sapiens
ttgtttttttttgtc

SEQ ID NO: 674267 - DNA, 15 bp, Homo sapiens
tgtttttttttgtca

SEQ ID NO: 674268 - DNA, 15 bp, Homo sapiens
gtttttttttgtcac

SEQ ID NO: 674269 - DNA, 15 bp, Homo sapiens
tttttttttgtcaca

SEQ ID NO: 674270 - DNA, 15 bp, Homo sapiens
ttttttttgtcacaa

SEQ ID NO: 674271 - DNA, 15 bp, Homo sapiens
tttttttgtcacaaa

SEQ ID NO: 674272 - DNA, 15 bp, Homo sapiens
ttttttgtcacaaag

SEQ ID NO: 674273 - DNA, 15 bp, Homo sapiens
tttttgtcacaaaga

SEQ ID NO: 674274 - DNA, 15 bp, Homo sapiens
ttttgtcacaaagaa

SEQ ID NO: 674275 - DNA, 15 bp, Homo sapiens
tttgtcacaaagaaa

SEQ ID NO: 674276 - DNA, 15 bp, Homo sapiens
ttgtcacaaagaaaa

SEQ ID NO: 674277 - DNA, 15 bp, Homo sapiens
tgtcacaaagaaaaa

SEQ ID NO: 674278 - DNA, 15 bp, Homo sapiens
gtcacaaagaaaaat

SEQ ID NO: 674279 - DNA, 15 bp, Homo sapiens
tcacaaagaaaaata

SEQ ID NO: 674280 - DNA, 15 bp, Homo sapiens
cacaaagaaaaatat

SEQ ID NO: 674281 - DNA, 15 bp, Homo sapiens
acaaagaaaaatatc

SEQ ID NO: 674282 - DNA, 15 bp, Homo sapiens
caaagaaaaatatcc

SEQ ID NO: 674283 - DNA, 15 bp, Homo sapiens
aaagaaaaatatcct

SEQ ID NO: 674284 - DNA, 15 bp, Homo sapiens
aagaaaaatatccta

SEQ ID NO: 674285 - DNA, 15 bp, Homo sapiens
agaaaaatatcctag

SEQ ID NO: 674286 - DNA, 15 bp, Homo sapiens
gaaaaatatcctagt

SEQ ID NO: 674287 - DNA, 15 bp, Homo sapiens
aaaaatatcctagtt

SEQ ID NO: 674288 - DNA, 15 bp, Homo sapiens
aaaatatcctagttt

SEQ ID NO: 674289 - DNA, 15 bp, Homo sapiens
aaatatcctagtttg

SEQ ID NO: 674290 - DNA, 15 bp, Homo sapiens
aatatcctagtttgt

SEQ ID NO: 674291 - DNA, 15 bp, Homo sapiens
atatcctagtttgtg

SEQ ID NO: 674292 - DNA, 15 bp, Homo sapiens
tatcctagtttgtgt

SEQ ID NO: 674293 - DNA, 15 bp, Homo sapiens
atcctagtttgtgtg

SEQ ID NO: 674294 - DNA, 15 bp, Homo sapiens
tcctagtttgtgtga

SEQ ID NO: 674295 - DNA, 15 bp, Homo sapiens
cctagtttgtgtgat

SEQ ID NO: 674296 - DNA, 15 bp, Homo sapiens
ctagtttgtgtgata

SEQ ID NO: 674297 - DNA, 15 bp, Homo sapiens
tagtttgtgtgatat

SEQ ID NO: 674298 - DNA, 15 bp, Homo sapiens
agtttgtgtgatatt

SEQ ID NO: 674299 - DNA, 15 bp, Homo sapiens
gtttgtgtgatattt

SEQ ID NO: 674300 - DNA, 15 bp, Homo sapiens
tttgtgtgatatttt

SEQ ID NO: 674301 - DNA, 15 bp, Homo sapiens
ttgtgtgatattttc

SEQ ID NO: 674302 - DNA, 15 bp, Homo sapiens
tgtgtgatattttcc

SEQ ID NO: 674303 - DNA, 15 bp, Homo sapiens
gtgtgatattttccc

SEQ ID NO: 674304 - DNA, 15 bp, Homo sapiens
tgtgatattttcccc

SEQ ID NO: 674305 - DNA, 15 bp, Homo sapiens
gtgatattttcccct

SEQ ID NO: 674306 - DNA, 15 bp, Homo sapiens
tgatattttcccctc

SEQ ID NO: 674307 - DNA, 15 bp, Homo sapiens
gatattttcccctcg

SEQ ID NO: 674308 - DNA, 15 bp, Homo sapiens
atattttcccctcga

SEQ ID NO: 674309 - DNA, 15 bp, Homo sapiens
tattttcccctcgaa

SEQ ID NO: 674310 - DNA, 15 bp, Homo sapiens
attttcccctcgaag

SEQ ID NO: 674311 - DNA, 15 bp, Homo sapiens
ttttcccctcgaagt

SEQ ID NO: 674312 - DNA, 15 bp, Homo sapiens
tttcccctcgaagtg

SEQ ID NO: 674313 - DNA, 15 bp, Homo sapiens
ttcccctcgaagtgt

SEQ ID NO: 674314 - DNA, 15 bp, Homo sapiens
tcccctcgaagtgtc

SEQ ID NO: 674315 - DNA, 15 bp, Homo sapiens
cccctcgaagtgtca

SEQ ID NO: 674316 - DNA, 15 bp, Homo sapiens
ccctcgaagtgtcat

SEQ ID NO: 674317 - DNA, 15 bp, Homo sapiens
cctcgaagtgtcatt

SEQ ID NO: 674318 - DNA, 15 bp, Homo sapiens
ctcgaagtgtcattg

SEQ ID NO: 674319 - DNA, 15 bp, Homo sapiens
tcgaagtgtcattgc

SEQ ID NO: 674320 - DNA, 15 bp, Homo sapiens
cgaagtgtcattgca

SEQ ID NO: 674321 - DNA, 15 bp, Homo sapiens
gaagtgtcattgcat

SEQ ID NO: 674322 - DNA, 15 bp, Homo sapiens
aagtgtcattgcata

SEQ ID NO: 674323 - DNA, 15 bp, Homo sapiens
agtgtcattgcatac

SEQ ID NO: 674324 - DNA, 15 bp, Homo sapiens
gtgtcattgcatacc

SEQ ID NO: 674325 - DNA, 15 bp, Homo sapiens
tgtcattgcataccc

SEQ ID NO: 674326 - DNA, 15 bp, Homo sapiens
gtcattgcataccca

SEQ ID NO: 674327 - DNA, 15 bp, Homo sapiens
tcattgcatacccat

SEQ ID NO: 674328 - DNA, 15 bp, Homo sapiens
cattgcatacccatt

SEQ ID NO: 674329 - DNA, 15 bp, Homo sapiens
attgcatacccattg

SEQ ID NO: 674330 - DNA, 15 bp, Homo sapiens
ttgcatacccattgg

SEQ ID NO: 674331 - DNA, 15 bp, Homo sapiens
tgcatacccattgga

SEQ ID NO: 674332 - DNA, 15 bp, Homo sapiens
gcatacccattggat

SEQ ID NO: 674333 - DNA, 15 bp, Homo sapiens
catacccattggatt

SEQ ID NO: 674334 - DNA, 15 bp, Homo sapiens
atacccattggattt

SEQ ID NO: 674335 - DNA, 15 bp, Homo sapiens
tacccattggatttt

SEQ ID NO: 674336 - DNA, 15 bp, Homo sapiens
acccattggattttt

SEQ ID NO: 674337 - DNA, 15 bp, Homo sapiens
cccattggatttttc

SEQ ID NO: 674338 - DNA, 15 bp, Homo sapiens
ccattggatttttct

SEQ ID NO: 674339 - DNA, 15 bp, Homo sapiens
cattggatttttctt

SEQ ID NO: 674340 - DNA, 15 bp, Homo sapiens
attggatttttcttt

SEQ ID NO: 674341 - DNA, 15 bp, Homo sapiens
ttggatttttcttta

SEQ ID NO: 674342 - DNA, 15 bp, Homo sapiens
tggatttttctttaa

SEQ ID NO: 674343 - DNA, 15 bp, Homo sapiens
ggatttttctttaaa

SEQ ID NO: 674344 - DNA, 15 bp, Homo sapiens
gatttttctttaaat

SEQ ID NO: 674345 - DNA, 15 bp, Homo sapiens
atttttctttaaatt

SEQ ID NO: 674346 - DNA, 15 bp, Homo sapiens
tttttctttaaattt

SEQ ID NO: 674347 - DNA, 15 bp, Homo sapiens
ttttctttaaatttc

SEQ ID NO: 674348 - DNA, 15 bp, Homo sapiens
tttctttaaatttca

SEQ ID NO: 674349 - DNA, 15 bp, Homo sapiens
ttctttaaatttcag

SEQ ID NO: 674350 - DNA, 15 bp, Homo sapiens
tctttaaatttcagg

SEQ ID NO: 674351 - DNA, 15 bp, Homo sapiens
ctttaaatttcaggg

SEQ ID NO: 674352 - DNA, 15 bp, Homo sapiens
tttaaatttcaggga

SEQ ID NO: 674353 - DNA, 15 bp, Homo sapiens
ttaaatttcagggag

SEQ ID NO: 674354 - DNA, 15 bp, Homo sapiens
taaatttcagggagc

SEQ ID NO: 674355 - DNA, 15 bp, Homo sapiens
aaatttcagggagcc

SEQ ID NO: 674356 - DNA, 15 bp, Homo sapiens
aatttcagggagccc

SEQ ID NO: 674357 - DNA, 15 bp, Homo sapiens
atttcagggagccca

SEQ ID NO: 674358 - DNA, 15 bp, Homo sapiens
tttcagggagcccaa

SEQ ID NO: 674359 - DNA, 15 bp, Homo sapiens
ttcagggagcccaaa

SEQ ID NO: 674360 - DNA, 15 bp, Homo sapiens
tcagggagcccaaat

SEQ ID NO: 674361 - DNA, 15 bp, Homo sapiens
cagggagcccaaatt

SEQ ID NO: 674362 - DNA, 15 bp, Homo sapiens
agggagcccaaatta

SEQ ID NO: 674363 - DNA, 15 bp, Homo sapiens
gggagcccaaattaa

SEQ ID NO: 674364 - DNA, 15 bp, Homo sapiens
ggagcccaaattaaa

SEQ ID NO: 674365 - DNA, 15 bp, Homo sapiens
gagcccaaattaaat

SEQ ID NO: 674366 - DNA, 15 bp, Homo sapiens
agcccaaattaaatt

SEQ ID NO: 674367 - DNA, 15 bp, Homo sapiens
gcccaaattaaattt

SEQ ID NO: 674368 - DNA, 15 bp, Homo sapiens
cccaaattaaatttt

SEQ ID NO: 674369 - DNA, 15 bp, Homo sapiens
ccaaattaaatttta

SEQ ID NO: 674370 - DNA, 15 bp, Homo sapiens
caaattaaattttac

SEQ ID NO: 674371 - DNA, 15 bp, Homo sapiens
aaattaaattttaca

SEQ ID NO: 674372 - DNA, 15 bp, Homo sapiens
aattaaattttacat

SEQ ID NO: 674373 - DNA, 15 bp, Homo sapiens
attaaattttacata

SEQ ID NO: 674374 - DNA, 15 bp, Homo sapiens
ttaaattttacatac

SEQ ID NO: 674375 - DNA, 15 bp, Homo sapiens
taaattttacatacc

SEQ ID NO: 674376 - DNA, 15 bp, Homo sapiens
aaattttacataccc

SEQ ID NO: 674377 - DNA, 15 bp, Homo sapiens
aattttacataccct

SEQ ID NO: 674378 - DNA, 15 bp, Homo sapiens
attttacataccctc

SEQ ID NO: 674379 - DNA, 15 bp, Homo sapiens
ttttacataccctct

SEQ ID NO: 674380 - DNA, 15 bp, Homo sapiens
tttacataccctctg

SEQ ID NO: 674381 - DNA, 15 bp, Homo sapiens
ttacataccctctgg

SEQ ID NO: 674382 - DNA, 15 bp, Homo sapiens
tacataccctctggg

SEQ ID NO: 674383 - DNA, 15 bp, Homo sapiens
acataccctctgggt

SEQ ID NO: 674384 - DNA, 15 bp, Homo sapiens
cataccctctgggtc

SEQ ID NO: 674385 - DNA, 15 bp, Homo sapiens
ataccctctgggtct

SEQ ID NO: 674386 - DNA, 15 bp, Homo sapiens
taccctctgggtcta

SEQ ID NO: 674387 - DNA, 15 bp, Homo sapiens
accctctgggtctag

SEQ ID NO: 674388 - DNA, 15 bp, Homo sapiens
ccctctgggtctagt

SEQ ID NO: 674389 - DNA, 15 bp, Homo sapiens
cctctgggtctagta

SEQ ID NO: 674390 - DNA, 15 bp, Homo sapiens
ctctgggtctagtat

SEQ ID NO: 674391 - DNA, 15 bp, Homo sapiens
tctgggtctagtatg

SEQ ID NO: 674392 - DNA, 15 bp, Homo sapiens
ctgggtctagtatga

SEQ ID NO: 674393 - DNA, 15 bp, Homo sapiens
tgggtctagtatgaa

SEQ ID NO: 674394 - DNA, 15 bp, Homo sapiens
gggtctagtatgaaa

SEQ ID NO: 674395 - DNA, 15 bp, Homo sapiens
ggtctagtatgaaaa

SEQ ID NO: 674396 - DNA, 15 bp, Homo sapiens
gtctagtatgaaaaa

SEQ ID NO: 674397 - DNA, 15 bp, Homo sapiens
tctagtatgaaaaag

SEQ ID NO: 674398 - DNA, 15 bp, Homo sapiens
ctagtatgaaaaagt

SEQ ID NO: 674399 - DNA, 15 bp, Homo sapiens
tagtatgaaaaagta

SEQ ID NO: 674400 - DNA, 15 bp, Homo sapiens
agtatgaaaaagtag

SEQ ID NO: 674401 - DNA, 15 bp, Homo sapiens
gtatgaaaaagtaga

SEQ ID NO: 674402 - DNA, 15 bp, Homo sapiens
tatgaaaaagtagat

SEQ ID NO: 674403 - DNA, 15 bp, Homo sapiens
atgaaaaagtagatt

SEQ ID NO: 674404 - DNA, 15 bp, Homo sapiens
tgaaaaagtagattt

SEQ ID NO: 674405 - DNA, 15 bp, Homo sapiens
gaaaaagtagatttg

SEQ ID NO: 674406 - DNA, 15 bp, Homo sapiens
aaaaagtagatttga

SEQ ID NO: 674407 - DNA, 15 bp, Homo sapiens
aaaagtagatttgat

SEQ ID NO: 674408 - DNA, 15 bp, Homo sapiens
aaagtagatttgatt

SEQ ID NO: 674409 - DNA, 15 bp, Homo sapiens
aagtagatttgattt

SEQ ID NO: 674410 - DNA, 15 bp, Homo sapiens
agtagatttgattta

SEQ ID NO: 674411 - DNA, 15 bp, Homo sapiens
gtagatttgatttaa

SEQ ID NO: 674412 - DNA, 15 bp, Homo sapiens
tagatttgatttaac

SEQ ID NO: 674413 - DNA, 15 bp, Homo sapiens
agatttgatttaact

SEQ ID NO: 674414 - DNA, 15 bp, Homo sapiens
gatttgatttaactt

SEQ ID NO: 674415 - DNA, 15 bp, Homo sapiens
atttgatttaacttg

SEQ ID NO: 674416 - DNA, 15 bp, Homo sapiens
tttgatttaacttga

SEQ ID NO: 674417 - DNA, 15 bp, Homo sapiens
ttgatttaacttgat

SEQ ID NO: 674418 - DNA, 15 bp, Homo sapiens
tgatttaacttgatg

SEQ ID NO: 674419 - DNA, 15 bp, Homo sapiens
gatttaacttgatga

SEQ ID NO: 674420 - DNA, 15 bp, Homo sapiens
atttaacttgatgaa

SEQ ID NO: 674421 - DNA, 15 bp, Homo sapiens
tttaacttgatgaaa

SEQ ID NO: 674422 - DNA, 15 bp, Homo sapiens
ttaacttgatgaaaa

SEQ ID NO: 674423 - DNA, 15 bp, Homo sapiens
taacttgatgaaaaa

SEQ ID NO: 674424 - DNA, 15 bp, Homo sapiens
aacttgatgaaaaaa

SEQ ID NO: 674425 - DNA, 15 bp, Homo sapiens
acttgatgaaaaaaa

SEQ ID NO: 674426 - DNA, 15 bp, Homo sapiens
cttgatgaaaaaaaa

SEQ ID NO: 674427 - DNA, 15 bp, Homo sapiens
ttgatgaaaaaaaat

SEQ ID NO: 674428 - DNA, 15 bp, Homo sapiens
tgatgaaaaaaaatt

SEQ ID NO: 674429 - DNA, 15 bp, Homo sapiens
gatgaaaaaaaattg

SEQ ID NO: 674430 - DNA, 15 bp, Homo sapiens
atgaaaaaaaattgt

SEQ ID NO: 674431 - DNA, 15 bp, Homo sapiens
tgaaaaaaaattgta

SEQ ID NO: 674432 - DNA, 15 bp, Homo sapiens
gaaaaaaaattgtaa

SEQ ID NO: 674433 - DNA, 15 bp, Homo sapiens
aaaaaaaattgtaat

SEQ ID NO: 674434 - DNA, 15 bp, Homo sapiens
aaaaaaattgtaatt

SEQ ID NO: 674435 - DNA, 15 bp, Homo sapiens
aaaaaattgtaattt

SEQ ID NO: 674436 - DNA, 15 bp, Homo sapiens
aaaaattgtaattta

SEQ ID NO: 674437 - DNA, 15 bp, Homo sapiens
aaaattgtaatttaa

SEQ ID NO: 674438 - DNA, 15 bp, Homo sapiens
aaattgtaatttaac

SEQ ID NO: 674439 - DNA, 15 bp, Homo sapiens
aattgtaatttaaca

SEQ ID NO: 674440 - DNA, 15 bp, Homo sapiens
attgtaatttaacag

SEQ ID NO: 674441 - DNA, 15 bp, Homo sapiens
ttgtaatttaacaga

SEQ ID NO: 674442 - DNA, 15 bp, Homo sapiens
tgtaatttaacagaa

SEQ ID NO: 674443 - DNA, 15 bp, Homo sapiens
gtaatttaacagaat

SEQ ID NO: 674444 - DNA, 15 bp, Homo sapiens
taatttaacagaatc

SEQ ID NO: 674445 - DNA, 15 bp, Homo sapiens
aatttaacagaatca

SEQ ID NO: 674446 - DNA, 15 bp, Homo sapiens
atttaacagaatcat

SEQ ID NO: 674447 - DNA, 15 bp, Homo sapiens
tttaacagaatcatt

SEQ ID NO: 674448 - DNA, 15 bp, Homo sapiens
ttaacagaatcattc

SEQ ID NO: 674449 - DNA, 15 bp, Homo sapiens
taacagaatcattct

SEQ ID NO: 674450 - DNA, 15 bp, Homo sapiens
aacagaatcattcta

SEQ ID NO: 674451 - DNA, 15 bp, Homo sapiens
acagaatcattctag

SEQ ID NO: 674452 - DNA, 15 bp, Homo sapiens
cagaatcattctaga

SEQ ID NO: 674453 - DNA, 15 bp, Homo sapiens
agaatcattctagat

SEQ ID NO: 674454 - DNA, 15 bp, Homo sapiens
gaatcattctagata

SEQ ID NO: 674455 - DNA, 15 bp, Homo sapiens
aatcattctagatat

SEQ ID NO: 674456 - DNA, 15 bp, Homo sapiens
atcattctagatatt

SEQ ID NO: 674457 - DNA, 15 bp, Homo sapiens
tcattctagatattt

SEQ ID NO: 674458 - DNA, 15 bp, Homo sapiens
cattctagatatttt

SEQ ID NO: 674459 - DNA, 15 bp, Homo sapiens
attctagatatttta

SEQ ID NO: 674460 - DNA, 15 bp, Homo sapiens
ttctagatattttaa

SEQ ID NO: 674461 - DNA, 15 bp, Homo sapiens
tctagatattttaaa

SEQ ID NO: 674462 - DNA, 15 bp, Homo sapiens
ctagatattttaaac

SEQ ID NO: 674463 - DNA, 15 bp, Homo sapiens
tagatattttaaact

SEQ ID NO: 674464 - DNA, 15 bp, Homo sapiens
agatattttaaactt

SEQ ID NO: 674465 - DNA, 15 bp, Homo sapiens
gatattttaaacttt

SEQ ID NO: 674466 - DNA, 15 bp, Homo sapiens
atattttaaacttta

SEQ ID NO: 674467 - DNA, 15 bp, Homo sapiens
tattttaaactttat

SEQ ID NO: 674468 - DNA, 15 bp, Homo sapiens
attttaaactttata

SEQ ID NO: 674469 - DNA, 15 bp, Homo sapiens
ttttaaactttatat

SEQ ID NO: 674470 - DNA, 15 bp, Homo sapiens
tttaaactttatatc

SEQ ID NO: 674471 - DNA, 15 bp, Homo sapiens
ttaaactttatatca

SEQ ID NO: 674472 - DNA, 15 bp, Homo sapiens
taaactttatatcaa

SEQ ID NO: 674473 - DNA, 15 bp, Homo sapiens
aaactttatatcaaa

SEQ ID NO: 674474 - DNA, 15 bp, Homo sapiens
aactttatatcaaat

SEQ ID NO: 674475 - DNA, 15 bp, Homo sapiens
actttatatcaaatg

SEQ ID NO: 674476 - DNA, 15 bp, Homo sapiens
ctttatatcaaatgc

SEQ ID NO: 674477 - DNA, 15 bp, Homo sapiens
tttatatcaaatgcc

SEQ ID NO: 674478 - DNA, 15 bp, Homo sapiens
ttatatcaaatgcca

SEQ ID NO: 674479 - DNA, 15 bp, Homo sapiens
tatatcaaatgccag

SEQ ID NO: 674480 - DNA, 15 bp, Homo sapiens
atatcaaatgccagc

SEQ ID NO: 674481 - DNA, 15 bp, Homo sapiens
tatcaaatgccagca

SEQ ID NO: 674482 - DNA, 15 bp, Homo sapiens
atcaaatgccagcag

SEQ ID NO: 674483 - DNA, 15 bp, Homo sapiens
tcaaatgccagcagc

SEQ ID NO: 674484 - DNA, 15 bp, Homo sapiens
caaatgccagcagcc

SEQ ID NO: 674485 - DNA, 15 bp, Homo sapiens
aaatgccagcagcca

SEQ ID NO: 674486 - DNA, 15 bp, Homo sapiens
aatgccagcagccag

SEQ ID NO: 674487 - DNA, 15 bp, Homo sapiens
atgccagcagccagt

SEQ ID NO: 674488 - DNA, 15 bp, Homo sapiens
tgccagcagccagta

SEQ ID NO: 674489 - DNA, 15 bp, Homo sapiens
gccagcagccagtaa

SEQ ID NO: 674490 - DNA, 15 bp, Homo sapiens
ccagcagccagtaat

SEQ ID NO: 674491 - DNA, 15 bp, Homo sapiens
cagcagccagtaata

SEQ ID NO: 674492 - DNA, 15 bp, Homo sapiens
agcagccagtaataa

SEQ ID NO: 674493 - DNA, 15 bp, Homo sapiens
gcagccagtaataat

SEQ ID NO: 674494 - DNA, 15 bp, Homo sapiens
cagccagtaataatg

SEQ ID NO: 674495 - DNA, 15 bp, Homo sapiens
agccagtaataatgc

SEQ ID NO: 674496 - DNA, 15 bp, Homo sapiens
gccagtaataatgca

SEQ ID NO: 674497 - DNA, 15 bp, Homo sapiens
ccagtaataatgcat

SEQ ID NO: 674498 - DNA, 15 bp, Homo sapiens
cagtaataatgcatt

SEQ ID NO: 674499 - DNA, 15 bp, Homo sapiens
agtaataatgcattt

SEQ ID NO: 674500 - DNA, 15 bp, Homo sapiens
gtaataatgcatttg

SEQ ID NO: 674501 - DNA, 15 bp, Homo sapiens
taataatgcatttga

SEQ ID NO: 674502 - DNA, 15 bp, Homo sapiens
aataatgcatttgaa

SEQ ID NO: 674503 - DNA, 15 bp, Homo sapiens
ataatgcatttgaat

SEQ ID NO: 674504 - DNA, 15 bp, Homo sapiens
taatgcatttgaatt

SEQ ID NO: 674505 - DNA, 15 bp, Homo sapiens
aatgcatttgaatta

SEQ ID NO: 674506 - DNA, 15 bp, Homo sapiens
atgcatttgaattat

SEQ ID NO: 674507 - DNA, 15 bp, Homo sapiens
tgcatttgaattatg

SEQ ID NO: 674508 - DNA, 15 bp, Homo sapiens
gcatttgaattatga

SEQ ID NO: 674509 - DNA, 15 bp, Homo sapiens
catttgaattatgat

SEQ ID NO: 674510 - DNA, 15 bp, Homo sapiens
atttgaattatgatt

SEQ ID NO: 674511 - DNA, 15 bp, Homo sapiens
tttgaattatgattc

SEQ ID NO: 674512 - DNA, 15 bp, Homo sapiens
ttgaattatgattca

SEQ ID NO: 674513 - DNA, 15 bp, Homo sapiens
tgaattatgattcaa

SEQ ID NO: 674514 - DNA, 15 bp, Homo sapiens
gaattatgattcaaa

SEQ ID NO: 674515 - DNA, 15 bp, Homo sapiens
aattatgattcaaag

SEQ ID NO: 674516 - DNA, 15 bp, Homo sapiens
attatgattcaaaga

SEQ ID NO: 674517 - DNA, 15 bp, Homo sapiens
ttatgattcaaagat

SEQ ID NO: 674518 - DNA, 15 bp, Homo sapiens
tatgattcaaagata

SEQ ID NO: 674519 - DNA, 15 bp, Homo sapiens
atgattcaaagatat

SEQ ID NO: 674520 - DNA, 15 bp, Homo sapiens
tgattcaaagatatg

SEQ ID NO: 674521 - DNA, 15 bp, Homo sapiens
gattcaaagatatga

SEQ ID NO: 674522 - DNA, 15 bp, Homo sapiens
attcaaagatatgat

SEQ ID NO: 674523 - DNA, 15 bp, Homo sapiens
ttcaaagatatgata

SEQ ID NO: 674524 - DNA, 15 bp, Homo sapiens
tcaaagatatgatag

SEQ ID NO: 674525 - DNA, 15 bp, Homo sapiens
caaagatatgatagt

SEQ ID NO: 674526 - DNA, 15 bp, Homo sapiens
aaagatatgatagta

SEQ ID NO: 674527 - DNA, 15 bp, Homo sapiens
aagatatgatagtaa

SEQ ID NO: 674528 - DNA, 15 bp, Homo sapiens
agatatgatagtaat

SEQ ID NO: 674529 - DNA, 15 bp, Homo sapiens
gatatgatagtaata

SEQ ID NO: 674530 - DNA, 15 bp, Homo sapiens
atatgatagtaatag

SEQ ID NO: 674531 - DNA, 15 bp, Homo sapiens
tatgatagtaataga

SEQ ID NO: 674532 - DNA, 15 bp, Homo sapiens
atgatagtaatagaa

SEQ ID NO: 674533 - DNA, 15 bp, Homo sapiens
tgatagtaatagaat

SEQ ID NO: 674534 - DNA, 15 bp, Homo sapiens
gatagtaatagaatg

SEQ ID NO: 674535 - DNA, 15 bp, Homo sapiens
atagtaatagaatga

SEQ ID NO: 674536 - DNA, 15 bp, Homo sapiens
tagtaatagaatgag

SEQ ID NO: 674537 - DNA, 15 bp, Homo sapiens
agtaatagaatgagc

SEQ ID NO: 674538 - DNA, 15 bp, Homo sapiens
gtaatagaatgagca

SEQ ID NO: 674539 - DNA, 15 bp, Homo sapiens
taatagaatgagcaa

SEQ ID NO: 674540 - DNA, 15 bp, Homo sapiens
aatagaatgagcaaa

SEQ ID NO: 674541 - DNA, 15 bp, Homo sapiens
atagaatgagcaaaa

SEQ ID NO: 674542 - DNA, 15 bp, Homo sapiens
tagaatgagcaaaac

SEQ ID NO: 674543 - DNA, 15 bp, Homo sapiens
agaatgagcaaaact

SEQ ID NO: 674544 - DNA, 15 bp, Homo sapiens
gaatgagcaaaactc

SEQ ID NO: 674545 - DNA, 15 bp, Homo sapiens
aatgagcaaaactca

SEQ ID NO: 674546 - DNA, 15 bp, Homo sapiens
atgagcaaaactcag

SEQ ID NO: 674547 - DNA, 15 bp, Homo sapiens
tgagcaaaactcagg

SEQ ID NO: 674548 - DNA, 15 bp, Homo sapiens
gagcaaaactcagga

SEQ ID NO: 674549 - DNA, 15 bp, Homo sapiens
agcaaaactcaggaa

SEQ ID NO: 674550 - DNA, 15 bp, Homo sapiens
gcaaaactcaggaag

SEQ ID NO: 674551 - DNA, 15 bp, Homo sapiens
caaaactcaggaaga

SEQ ID NO: 674552 - DNA, 15 bp, Homo sapiens
aaaactcaggaagag

SEQ ID NO: 674553 - DNA, 15 bp, Homo sapiens
aaactcaggaagaga

SEQ ID NO: 674554 - DNA, 15 bp, Homo sapiens
aactcaggaagagat

SEQ ID NO: 674555 - DNA, 15 bp, Homo sapiens
actcaggaagagata

SEQ ID NO: 674556 - DNA, 15 bp, Homo sapiens
ctcaggaagagataa

SEQ ID NO: 674557 - DNA, 15 bp, Homo sapiens
tcaggaagagataaa

SEQ ID NO: 674558 - DNA, 15 bp, Homo sapiens
caggaagagataaaa

SEQ ID NO: 674559 - DNA, 15 bp, Homo sapiens
aggaagagataaaag

SEQ ID NO: 674560 - DNA, 15 bp, Homo sapiens
ggaagagataaaagt

SEQ ID NO: 674561 - DNA, 15 bp, Homo sapiens
gaagagataaaagtt

SEQ ID NO: 674562 - DNA, 15 bp, Homo sapiens
aagagataaaagttg

SEQ ID NO: 674563 - DNA, 15 bp, Homo sapiens
agagataaaagttga

SEQ ID NO: 674564 - DNA, 15 bp, Homo sapiens
gagataaaagttgaa

SEQ ID NO: 674565 - DNA, 15 bp, Homo sapiens
agataaaagttgaac

SEQ ID NO: 674566 - DNA, 15 bp, Homo sapiens
gataaaagttgaaca

SEQ ID NO: 674567 - DNA, 15 bp, Homo sapiens
ataaaagttgaacac

SEQ ID NO: 674568 - DNA, 15 bp, Homo sapiens
taaaagttgaacaca

SEQ ID NO: 674569 - DNA, 15 bp, Homo sapiens
aaaagttgaacacaa

SEQ ID NO: 674570 - DNA, 15 bp, Homo sapiens
aaagttgaacacaat

SEQ ID NO: 674571 - DNA, 15 bp, Homo sapiens
aagttgaacacaatg

SEQ ID NO: 674572 - DNA, 15 bp, Homo sapiens
agttgaacacaatga

SEQ ID NO: 674573 - DNA, 15 bp, Homo sapiens
gttgaacacaatgat

SEQ ID NO: 674574 - DNA, 15 bp, Homo sapiens
ttgaacacaatgata

SEQ ID NO: 674575 - DNA, 15 bp, Homo sapiens
tgaacacaatgatac

SEQ ID NO: 674576 - DNA, 15 bp, Homo sapiens
gaacacaatgatact

SEQ ID NO: 674577 - DNA, 15 bp, Homo sapiens
aacacaatgatacta

SEQ ID NO: 674578 - DNA, 15 bp, Homo sapiens
acacaatgatactaa

SEQ ID NO: 674579 - DNA, 15 bp, Homo sapiens
cacaatgatactaat

SEQ ID NO: 674580 - DNA, 15 bp, Homo sapiens
acaatgatactaata

SEQ ID NO: 674581 - DNA, 15 bp, Homo sapiens
caatgatactaatat

SEQ ID NO: 674582 - DNA, 15 bp, Homo sapiens
aatgatactaatata

SEQ ID NO: 674583 - DNA, 15 bp, Homo sapiens
atgatactaatataa

SEQ ID NO: 674584 - DNA, 15 bp, Homo sapiens
tgatactaatataat

SEQ ID NO: 674585 - DNA, 15 bp, Homo sapiens
gatactaatataata

SEQ ID NO: 674586 - DNA, 15 bp, Homo sapiens
atactaatataatag

SEQ ID NO: 674587 - DNA, 15 bp, Homo sapiens
tactaatataatagt

SEQ ID NO: 674588 - DNA, 15 bp, Homo sapiens
actaatataatagta

SEQ ID NO: 674589 - DNA, 15 bp, Homo sapiens
ctaatataatagtaa

SEQ ID NO: 674590 - DNA, 15 bp, Homo sapiens
taatataatagtaag

SEQ ID NO: 674591 - DNA, 15 bp, Homo sapiens
aatataatagtaaga

SEQ ID NO: 674592 - DNA, 15 bp, Homo sapiens
atataatagtaagag

SEQ ID NO: 674593 - DNA, 15 bp, Homo sapiens
tataatagtaagaga

SEQ ID NO: 674594 - DNA, 15 bp, Homo sapiens
ataatagtaagagaa

SEQ ID NO: 674595 - DNA, 15 bp, Homo sapiens
taatagtaagagaaa

SEQ ID NO: 674596 - DNA, 15 bp, Homo sapiens
aatagtaagagaaat

SEQ ID NO: 674597 - DNA, 15 bp, Homo sapiens
atagtaagagaaatg

SEQ ID NO: 674598 - DNA, 15 bp, Homo sapiens
tagtaagagaaatga

SEQ ID NO: 674599 - DNA, 15 bp, Homo sapiens
agtaagagaaatgat

SEQ ID NO: 674600 - DNA, 15 bp, Homo sapiens
gtaagagaaatgatc

SEQ ID NO: 674601 - DNA, 15 bp, Homo sapiens
taagagaaatgatca

SEQ ID NO: 674602 - DNA, 15 bp, Homo sapiens
aagagaaatgatcag

SEQ ID NO: 674603 - DNA, 15 bp, Homo sapiens
agagaaatgatcagg

SEQ ID NO: 674604 - DNA, 15 bp, Homo sapiens
gagaaatgatcaggc

SEQ ID NO: 674605 - DNA, 15 bp, Homo sapiens
agaaatgatcaggct

SEQ ID NO: 674606 - DNA, 15 bp, Homo sapiens
gaaatgatcaggctt

SEQ ID NO: 674607 - DNA, 15 bp, Homo sapiens
aaatgatcaggcttg

SEQ ID NO: 674608 - DNA, 15 bp, Homo sapiens
aatgatcaggcttgc

SEQ ID NO: 674609 - DNA, 15 bp, Homo sapiens
atgatcaggcttgct

SEQ ID NO: 674610 - DNA, 15 bp, Homo sapiens
tgatcaggcttgcta

SEQ ID NO: 674611 - DNA, 15 bp, Homo sapiens
gatcaggcttgctaa

SEQ ID NO: 674612 - DNA, 15 bp, Homo sapiens
atcaggcttgctaac

SEQ ID NO: 674613 - DNA, 15 bp, Homo sapiens
tcaggcttgctaact

SEQ ID NO: 674614 - DNA, 15 bp, Homo sapiens
caggcttgctaacta

SEQ ID NO: 674615 - DNA, 15 bp, Homo sapiens
aggcttgctaactat

SEQ ID NO: 674616 - DNA, 15 bp, Homo sapiens
ggcttgctaactatg

SEQ ID NO: 674617 - DNA, 15 bp, Homo sapiens
gcttgctaactatga

SEQ ID NO: 674618 - DNA, 15 bp, Homo sapiens
cttgctaactatgaa

SEQ ID NO: 674619 - DNA, 15 bp, Homo sapiens
ttgctaactatgaac

SEQ ID NO: 674620 - DNA, 15 bp, Homo sapiens
tgctaactatgaacc

SEQ ID NO: 674621 - DNA, 15 bp, Homo sapiens
gctaactatgaacca

SEQ ID NO: 674622 - DNA, 15 bp, Homo sapiens
ctaactatgaaccag

SEQ ID NO: 674623 - DNA, 15 bp, Homo sapiens
taactatgaaccagc

SEQ ID NO: 674624 - DNA, 15 bp, Homo sapiens
aactatgaaccagct

SEQ ID NO: 674625 - DNA, 15 bp, Homo sapiens
actatgaaccagcta

SEQ ID NO: 674626 - DNA, 15 bp, Homo sapiens
ctatgaaccagctac

SEQ ID NO: 674627 - DNA, 15 bp, Homo sapiens
tatgaaccagctact

SEQ ID NO: 674628 - DNA, 15 bp, Homo sapiens
atgaaccagctactg

SEQ ID NO: 674629 - DNA, 15 bp, Homo sapiens
tgaaccagctactgt

SEQ ID NO: 674630 - DNA, 15 bp, Homo sapiens
gaaccagctactgta

SEQ ID NO: 674631 - DNA, 15 bp, Homo sapiens
aaccagctactgtac

SEQ ID NO: 674632 - DNA, 15 bp, Homo sapiens
accagctactgtact

SEQ ID NO: 674633 - DNA, 15 bp, Homo sapiens
ccagctactgtacta

SEQ ID NO: 674634 - DNA, 15 bp, Homo sapiens
cagctactgtactac

SEQ ID NO: 674635 - DNA, 15 bp, Homo sapiens
agctactgtactact

SEQ ID NO: 674636 - DNA, 15 bp, Homo sapiens
gctactgtactactt

SEQ ID NO: 674637 - DNA, 15 bp, Homo sapiens
ctactgtactacttt

SEQ ID NO: 674638 - DNA, 15 bp, Homo sapiens
tactgtactactttc

SEQ ID NO: 674639 - DNA, 15 bp, Homo sapiens
actgtactactttct

SEQ ID NO: 674640 - DNA, 15 bp, Homo sapiens
ctgtactactttcta

SEQ ID NO: 674641 - DNA, 15 bp, Homo sapiens
tgtactactttctac

SEQ ID NO: 674642 - DNA, 15 bp, Homo sapiens
gtactactttctaca

SEQ ID NO: 674643 - DNA, 15 bp, Homo sapiens
tactactttctacaa

SEQ ID NO: 674644 - DNA, 15 bp, Homo sapiens
actactttctacaat

SEQ ID NO: 674645 - DNA, 15 bp, Homo sapiens
ctactttctacaatt

SEQ ID NO: 674646 - DNA, 15 bp, Homo sapiens
tactttctacaatta

SEQ ID NO: 674647 - DNA, 15 bp, Homo sapiens
actttctacaattat

SEQ ID NO: 674648 - DNA, 15 bp, Homo sapiens
ctttctacaattatc

SEQ ID NO: 674649 - DNA, 15 bp, Homo sapiens
tttctacaattatct

SEQ ID NO: 674650 - DNA, 15 bp, Homo sapiens
ttctacaattatcta

SEQ ID NO: 674651 - DNA, 15 bp, Homo sapiens
tctacaattatctac

SEQ ID NO: 674652 - DNA, 15 bp, Homo sapiens
ctacaattatctacc

SEQ ID NO: 674653 - DNA, 15 bp, Homo sapiens
tacaattatctacca

SEQ ID NO: 674654 - DNA, 15 bp, Homo sapiens
acaattatctaccaa

SEQ ID NO: 674655 - DNA, 15 bp, Homo sapiens
caattatctaccaac

SEQ ID NO: 674656 - DNA, 15 bp, Homo sapiens
aattatctaccaacc

SEQ ID NO: 674657 - DNA, 15 bp, Homo sapiens
attatctaccaacct

SEQ ID NO: 674658 - DNA, 15 bp, Homo sapiens
ttatctaccaacctc

SEQ ID NO: 674659 - DNA, 15 bp, Homo sapiens
tatctaccaacctca

SEQ ID NO: 674660 - DNA, 15 bp, Homo sapiens
atctaccaacctcac

SEQ ID NO: 674661 - DNA, 15 bp, Homo sapiens
tctaccaacctcaca

SEQ ID NO: 674662 - DNA, 15 bp, Homo sapiens
ctaccaacctcacaa

SEQ ID NO: 674663 - DNA, 15 bp, Homo sapiens
taccaacctcacaat

SEQ ID NO: 674664 - DNA, 15 bp, Homo sapiens
accaacctcacaatt

SEQ ID NO: 674665 - DNA, 15 bp, Homo sapiens
ccaacctcacaatta

SEQ ID NO: 674666 - DNA, 15 bp, Homo sapiens
caacctcacaattat

SEQ ID NO: 674667 - DNA, 15 bp, Homo sapiens
aacctcacaattatc

SEQ ID NO: 674668 - DNA, 15 bp, Homo sapiens
acctcacaattatct

SEQ ID NO: 674669 - DNA, 15 bp, Homo sapiens
cctcacaattatctt

SEQ ID NO: 674670 - DNA, 15 bp, Homo sapiens
ctcacaattatcttg

SEQ ID NO: 674671 - DNA, 15 bp, Homo sapiens
tcacaattatcttgc

SEQ ID NO: 674672 - DNA, 15 bp, Homo sapiens
cacaattatcttgca

SEQ ID NO: 674673 - DNA, 15 bp, Homo sapiens
acaattatcttgcaa

SEQ ID NO: 674674 - DNA, 15 bp, Homo sapiens
caattatcttgcaaa

SEQ ID NO: 674675 - DNA, 15 bp, Homo sapiens
aattatcttgcaaat

SEQ ID NO: 674676 - DNA, 15 bp, Homo sapiens
attatcttgcaaatt

SEQ ID NO: 674677 - DNA, 15 bp, Homo sapiens
ttatcttgcaaatta

SEQ ID NO: 674678 - DNA, 15 bp, Homo sapiens
tatcttgcaaattag

SEQ ID NO: 674679 - DNA, 15 bp, Homo sapiens
atcttgcaaattagg

SEQ ID NO: 674680 - DNA, 15 bp, Homo sapiens
tcttgcaaattaggc

SEQ ID NO: 674681 - DNA, 15 bp, Homo sapiens
cttgcaaattaggca

SEQ ID NO: 674682 - DNA, 15 bp, Homo sapiens
ttgcaaattaggcat

SEQ ID NO: 674683 - DNA, 15 bp, Homo sapiens
tgcaaattaggcatt

SEQ ID NO: 674684 - DNA, 15 bp, Homo sapiens
gcaaattaggcatta

SEQ ID NO: 674685 - DNA, 15 bp, Homo sapiens
caaattaggcattat

SEQ ID NO: 674686 - DNA, 15 bp, Homo sapiens
aaattaggcattatt

SEQ ID NO: 674687 - DNA, 15 bp, Homo sapiens
aattaggcattatta

SEQ ID NO: 674688 - DNA, 15 bp, Homo sapiens
attaggcattattaa

SEQ ID NO: 674689 - DNA, 15 bp, Homo sapiens
ttaggcattattaaa

SEQ ID NO: 674690 - DNA, 15 bp, Homo sapiens
taggcattattaaat

SEQ ID NO: 674691 - DNA, 15 bp, Homo sapiens
aggcattattaaatc

SEQ ID NO: 674692 - DNA, 15 bp, Homo sapiens
ggcattattaaatcc

SEQ ID NO: 674693 - DNA, 15 bp, Homo sapiens
gcattattaaatcca

SEQ ID NO: 674694 - DNA, 15 bp, Homo sapiens
cattattaaatccat

SEQ ID NO: 674695 - DNA, 15 bp, Homo sapiens
attattaaatccatt

SEQ ID NO: 674696 - DNA, 15 bp, Homo sapiens
ttattaaatccattt

SEQ ID NO: 674697 - DNA, 15 bp, Homo sapiens
tattaaatccatttt

SEQ ID NO: 674698 - DNA, 15 bp, Homo sapiens
attaaatccattttt

SEQ ID NO: 674699 - DNA, 15 bp, Homo sapiens
ttaaatccatttttc

SEQ ID NO: 674700 - DNA, 15 bp, Homo sapiens
taaatccatttttca

SEQ ID NO: 674701 - DNA, 15 bp, Homo sapiens
aaatccatttttcat

SEQ ID NO: 674702 - DNA, 15 bp, Homo sapiens
aatccatttttcata

SEQ ID NO: 674703 - DNA, 15 bp, Homo sapiens
atccatttttcatat

SEQ ID NO: 674704 - DNA, 15 bp, Homo sapiens
tccatttttcatata

SEQ ID NO: 674705 - DNA, 15 bp, Homo sapiens
ccatttttcatatat

SEQ ID NO: 674706 - DNA, 15 bp, Homo sapiens
catttttcatatatg

SEQ ID NO: 674707 - DNA, 15 bp, Homo sapiens
atttttcatatatga

SEQ ID NO: 674708 - DNA, 15 bp, Homo sapiens
tttttcatatatgaa

SEQ ID NO: 674709 - DNA, 15 bp, Homo sapiens
ttttcatatatgaaa

SEQ ID NO: 674710 - DNA, 15 bp, Homo sapiens
tttcatatatgaaac

SEQ ID NO: 674711 - DNA, 15 bp, Homo sapiens
ttcatatatgaaact

SEQ ID NO: 674712 - DNA, 15 bp, Homo sapiens
tcatatatgaaacta

SEQ ID NO: 674713 - DNA, 15 bp, Homo sapiens
catatatgaaactaa

SEQ ID NO: 674714 - DNA, 15 bp, Homo sapiens
atatatgaaactaaa

SEQ ID NO: 674715 - DNA, 15 bp, Homo sapiens
tatatgaaactaaag

SEQ ID NO: 674716 - DNA, 15 bp, Homo sapiens
atatgaaactaaagt

SEQ ID NO: 674717 - DNA, 15 bp, Homo sapiens
tatgaaactaaagtc

SEQ ID NO: 674718 - DNA, 15 bp, Homo sapiens
atgaaactaaagtct

SEQ ID NO: 674719 - DNA, 15 bp, Homo sapiens
tgaaactaaagtctg

SEQ ID NO: 674720 - DNA, 15 bp, Homo sapiens
gaaactaaagtctgg

SEQ ID NO: 674721 - DNA, 15 bp, Homo sapiens
aaactaaagtctgga

SEQ ID NO: 674722 - DNA, 15 bp, Homo sapiens
aactaaagtctggaa

SEQ ID NO: 674723 - DNA, 15 bp, Homo sapiens
actaaagtctggaaa

SEQ ID NO: 674724 - DNA, 15 bp, Homo sapiens
ctaaagtctggaaaa

SEQ ID NO: 674725 - DNA, 15 bp, Homo sapiens
taaagtctggaaaaa

SEQ ID NO: 674726 - DNA, 15 bp, Homo sapiens
aaagtctggaaaaat

SEQ ID NO: 674727 - DNA, 15 bp, Homo sapiens
aagtctggaaaaatt

SEQ ID NO: 674728 - DNA, 15 bp, Homo sapiens
agtctggaaaaattg

SEQ ID NO: 674729 - DNA, 15 bp, Homo sapiens
gtctggaaaaattga

SEQ ID NO: 674730 - DNA, 15 bp, Homo sapiens
tctggaaaaattgaa

SEQ ID NO: 674731 - DNA, 15 bp, Homo sapiens
ctggaaaaattgaat

SEQ ID NO: 674732 - DNA, 15 bp, Homo sapiens
tggaaaaattgaata

SEQ ID NO: 674733 - DNA, 15 bp, Homo sapiens
ggaaaaattgaataa

SEQ ID NO: 674734 - DNA, 15 bp, Homo sapiens
gaaaaattgaataag

SEQ ID NO: 674735 - DNA, 15 bp, Homo sapiens
aaaaattgaataaga

SEQ ID NO: 674736 - DNA, 15 bp, Homo sapiens
aaaattgaataagaa

SEQ ID NO: 674737 - DNA, 15 bp, Homo sapiens
aaattgaataagaac

SEQ ID NO: 674738 - DNA, 15 bp, Homo sapiens
aattgaataagaact

SEQ ID NO: 674739 - DNA, 15 bp, Homo sapiens
attgaataagaactc

SEQ ID NO: 674740 - DNA, 15 bp, Homo sapiens
ttgaataagaactca

SEQ ID NO: 674741 - DNA, 15 bp, Homo sapiens
tgaataagaactcat

SEQ ID NO: 674742 - DNA, 15 bp, Homo sapiens
gaataagaactcata

SEQ ID NO: 674743 - DNA, 15 bp, Homo sapiens
aataagaactcatat

SEQ ID NO: 674744 - DNA, 15 bp, Homo sapiens
ataagaactcatatt

SEQ ID NO: 674745 - DNA, 15 bp, Homo sapiens
taagaactcatattc

SEQ ID NO: 674746 - DNA, 15 bp, Homo sapiens
aagaactcatattcc

SEQ ID NO: 674747 - DNA, 15 bp, Homo sapiens
agaactcatattcca

SEQ ID NO: 674748 - DNA, 15 bp, Homo sapiens
gaactcatattccat

SEQ ID NO: 674749 - DNA, 15 bp, Homo sapiens
aactcatattccata

SEQ ID NO: 674750 - DNA, 15 bp, Homo sapiens
actcatattccataa

SEQ ID NO: 674751 - DNA, 15 bp, Homo sapiens
ctcatattccataag

SEQ ID NO: 674752 - DNA, 15 bp, Homo sapiens
tcatattccataagt

SEQ ID NO: 674753 - DNA, 15 bp, Homo sapiens
catattccataagta

SEQ ID NO: 674754 - DNA, 15 bp, Homo sapiens
atattccataagtag

SEQ ID NO: 674755 - DNA, 15 bp, Homo sapiens
tattccataagtagt

SEQ ID NO: 674756 - DNA, 15 bp, Homo sapiens
attccataagtagtg

SEQ ID NO: 674757 - DNA, 15 bp, Homo sapiens
ttccataagtagtga

SEQ ID NO: 674758 - DNA, 15 bp, Homo sapiens
tccataagtagtgac

SEQ ID NO: 674759 - DNA, 15 bp, Homo sapiens
ccataagtagtgact

SEQ ID NO: 674760 - DNA, 15 bp, Homo sapiens
cataagtagtgacta

SEQ ID NO: 674761 - DNA, 15 bp, Homo sapiens
ataagtagtgactac

SEQ ID NO: 674762 - DNA, 15 bp, Homo sapiens
taagtagtgactacc

SEQ ID NO: 674763 - DNA, 15 bp, Homo sapiens
aagtagtgactacct

SEQ ID NO: 674764 - DNA, 15 bp, Homo sapiens
agtagtgactacctt

SEQ ID NO: 674765 - DNA, 15 bp, Homo sapiens
gtagtgactacctta

SEQ ID NO: 674766 - DNA, 15 bp, Homo sapiens
tagtgactaccttat

SEQ ID NO: 674767 - DNA, 15 bp, Homo sapiens
agtgactaccttata

SEQ ID NO: 674768 - DNA, 15 bp, Homo sapiens
gtgactaccttataa

SEQ ID NO: 674769 - DNA, 15 bp, Homo sapiens
tgactaccttataac

SEQ ID NO: 674770 - DNA, 15 bp, Homo sapiens
gactaccttataacc

SEQ ID NO: 674771 - DNA, 15 bp, Homo sapiens
actaccttataacct

SEQ ID NO: 674772 - DNA, 15 bp, Homo sapiens
ctaccttataacctg

SEQ ID NO: 674773 - DNA, 15 bp, Homo sapiens
taccttataacctgt

SEQ ID NO: 674774 - DNA, 15 bp, Homo sapiens
accttataacctgta

SEQ ID NO: 674775 - DNA, 15 bp, Homo sapiens
ccttataacctgtat

SEQ ID NO: 674776 - DNA, 15 bp, Homo sapiens
cttataacctgtatc

SEQ ID NO: 674777 - DNA, 15 bp, Homo sapiens
ttataacctgtatct

SEQ ID NO: 674778 - DNA, 15 bp, Homo sapiens
tataacctgtatcta

SEQ ID NO: 674779 - DNA, 15 bp, Homo sapiens
ataacctgtatctag

SEQ ID NO: 674780 - DNA, 15 bp, Homo sapiens
taacctgtatctagc

SEQ ID NO: 674781 - DNA, 15 bp, Homo sapiens
aacctgtatctagct

SEQ ID NO: 674782 - DNA, 15 bp, Homo sapiens
acctgtatctagctt

SEQ ID NO: 674783 - DNA, 15 bp, Homo sapiens
cctgtatctagcttg

SEQ ID NO: 674784 - DNA, 15 bp, Homo sapiens
ctgtatctagcttga

SEQ ID NO: 674785 - DNA, 15 bp, Homo sapiens
tgtatctagcttgac

SEQ ID NO: 674786 - DNA, 15 bp, Homo sapiens
gtatctagcttgaca

SEQ ID NO: 674787 - DNA, 15 bp, Homo sapiens
tatctagcttgacag

SEQ ID NO: 674788 - DNA, 15 bp, Homo sapiens
atctagcttgacaga

SEQ ID NO: 674789 - DNA, 15 bp, Homo sapiens
tctagcttgacagat

SEQ ID NO: 674790 - DNA, 15 bp, Homo sapiens
ctagcttgacagatg

SEQ ID NO: 674791 - DNA, 15 bp, Homo sapiens
tagcttgacagatga

SEQ ID NO: 674792 - DNA, 15 bp, Homo sapiens
agcttgacagatgaa

SEQ ID NO: 674793 - DNA, 15 bp, Homo sapiens
gcttgacagatgaag

SEQ ID NO: 674794 - DNA, 15 bp, Homo sapiens
cttgacagatgaagg

SEQ ID NO: 674795 - DNA, 15 bp, Homo sapiens
ttgacagatgaaggt

SEQ ID NO: 674796 - DNA, 15 bp, Homo sapiens
tgacagatgaaggtc

SEQ ID NO: 674797 - DNA, 15 bp, Homo sapiens
gacagatgaaggtca

SEQ ID NO: 674798 - DNA, 15 bp, Homo sapiens
acagatgaaggtcag

SEQ ID NO: 674799 - DNA, 15 bp, Homo sapiens
cagatgaaggtcagc

SEQ ID NO: 674800 - DNA, 15 bp, Homo sapiens
agatgaaggtcagcc

SEQ ID NO: 674801 - DNA, 15 bp, Homo sapiens
gatgaaggtcagcct

SEQ ID NO: 674802 - DNA, 15 bp, Homo sapiens
atgaaggtcagcctg

SEQ ID NO: 674803 - DNA, 15 bp, Homo sapiens
tgaaggtcagcctga

SEQ ID NO: 674804 - DNA, 15 bp, Homo sapiens
gaaggtcagcctgat

SEQ ID NO: 674805 - DNA, 15 bp, Homo sapiens
aaggtcagcctgatt

SEQ ID NO: 674806 - DNA, 15 bp, Homo sapiens
aggtcagcctgattt

SEQ ID NO: 674807 - DNA, 15 bp, Homo sapiens
ggtcagcctgatttt

SEQ ID NO: 674808 - DNA, 15 bp, Homo sapiens
gtcagcctgattttt

SEQ ID NO: 674809 - DNA, 15 bp, Homo sapiens
tcagcctgattttta

SEQ ID NO: 674810 - DNA, 15 bp, Homo sapiens
cagcctgatttttaa

SEQ ID NO: 674811 - DNA, 15 bp, Homo sapiens
agcctgatttttaaa

SEQ ID NO: 674812 - DNA, 15 bp, Homo sapiens
gcctgatttttaaaa

SEQ ID NO: 674813 - DNA, 15 bp, Homo sapiens
cctgatttttaaaaa

SEQ ID NO: 674814 - DNA, 15 bp, Homo sapiens
ctgatttttaaaaaa

SEQ ID NO: 674815 - DNA, 15 bp, Homo sapiens
tgatttttaaaaaag

SEQ ID NO: 674816 - DNA, 15 bp, Homo sapiens
gatttttaaaaaagt

SEQ ID NO: 674817 - DNA, 15 bp, Homo sapiens
atttttaaaaaagtc

SEQ ID NO: 674818 - DNA, 15 bp, Homo sapiens
tttttaaaaaagtca

SEQ ID NO: 674819 - DNA, 15 bp, Homo sapiens
ttttaaaaaagtcaa

SEQ ID NO: 674820 - DNA, 15 bp, Homo sapiens
tttaaaaaagtcaaa

SEQ ID NO: 674821 - DNA, 15 bp, Homo sapiens
ttaaaaaagtcaaag

SEQ ID NO: 674822 - DNA, 15 bp, Homo sapiens
taaaaaagtcaaaga

SEQ ID NO: 674823 - DNA, 15 bp, Homo sapiens
aaaaaagtcaaagag

SEQ ID NO: 674824 - DNA, 15 bp, Homo sapiens
aaaaagtcaaagaga

SEQ ID NO: 674825 - DNA, 15 bp, Homo sapiens
aaaagtcaaagagag

SEQ ID NO: 674826 - DNA, 15 bp, Homo sapiens
aaagtcaaagagaga

SEQ ID NO: 674827 - DNA, 15 bp, Homo sapiens
aagtcaaagagagaa

SEQ ID NO: 674828 - DNA, 15 bp, Homo sapiens
agtcaaagagagaag

SEQ ID NO: 674829 - DNA, 15 bp, Homo sapiens
gtcaaagagagaagc

SEQ ID NO: 674830 - DNA, 15 bp, Homo sapiens
tcaaagagagaagcc

SEQ ID NO: 674831 - DNA, 15 bp, Homo sapiens
caaagagagaagcct

SEQ ID NO: 674832 - DNA, 15 bp, Homo sapiens
aaagagagaagccta

SEQ ID NO: 674833 - DNA, 15 bp, Homo sapiens
aagagagaagcctat

SEQ ID NO: 674834 - DNA, 15 bp, Homo sapiens
agagagaagcctatg

SEQ ID NO: 674835 - DNA, 15 bp, Homo sapiens
gagagaagcctatgt

SEQ ID NO: 674836 - DNA, 15 bp, Homo sapiens
agagaagcctatgtt

SEQ ID NO: 674837 - DNA, 15 bp, Homo sapiens
gagaagcctatgttt

SEQ ID NO: 674838 - DNA, 15 bp, Homo sapiens
agaagcctatgttta

SEQ ID NO: 674839 - DNA, 15 bp, Homo sapiens
gaagcctatgtttat

SEQ ID NO: 674840 - DNA, 15 bp, Homo sapiens
aagcctatgtttatg

SEQ ID NO: 674841 - DNA, 15 bp, Homo sapiens
agcctatgtttatgt

SEQ ID NO: 674842 - DNA, 15 bp, Homo sapiens
gcctatgtttatgta

SEQ ID NO: 674843 - DNA, 15 bp, Homo sapiens
cctatgtttatgtac

SEQ ID NO: 674844 - DNA, 15 bp, Homo sapiens
ctatgtttatgtaca

SEQ ID NO: 674845 - DNA, 15 bp, Homo sapiens
tatgtttatgtacaa

SEQ ID NO: 674846 - DNA, 15 bp, Homo sapiens
atgtttatgtacaac

SEQ ID NO: 674847 - DNA, 15 bp, Homo sapiens
tgtttatgtacaaca

SEQ ID NO: 674848 - DNA, 15 bp, Homo sapiens
gtttatgtacaacaa

SEQ ID NO: 674849 - DNA, 15 bp, Homo sapiens
tttatgtacaacaac

SEQ ID NO: 674850 - DNA, 15 bp, Homo sapiens
ttatgtacaacaaca

SEQ ID NO: 674851 - DNA, 15 bp, Homo sapiens
tatgtacaacaacat

SEQ ID NO: 674852 - DNA, 15 bp, Homo sapiens
atgtacaacaacatg

SEQ ID NO: 674853 - DNA, 15 bp, Homo sapiens
tgtacaacaacatgt

SEQ ID NO: 674854 - DNA, 15 bp, Homo sapiens
gtacaacaacatgta

SEQ ID NO: 674855 - DNA, 15 bp, Homo sapiens
tacaacaacatgtaa

SEQ ID NO: 674856 - DNA, 15 bp, Homo sapiens
acaacaacatgtaaa

SEQ ID NO: 674857 - DNA, 15 bp, Homo sapiens
caacaacatgtaaaa

SEQ ID NO: 674858 - DNA, 15 bp, Homo sapiens
aacaacatgtaaaat

SEQ ID NO: 674859 - DNA, 15 bp, Homo sapiens
acaacatgtaaaatt

SEQ ID NO: 674860 - DNA, 15 bp, Homo sapiens
caacatgtaaaattt

SEQ ID NO: 674861 - DNA, 15 bp, Homo sapiens
aacatgtaaaatttt

SEQ ID NO: 674862 - DNA, 15 bp, Homo sapiens
acatgtaaaattttc

SEQ ID NO: 674863 - DNA, 15 bp, Homo sapiens
catgtaaaattttca

SEQ ID NO: 674864 - DNA, 15 bp, Homo sapiens
atgtaaaattttcat

SEQ ID NO: 674865 - DNA, 15 bp, Homo sapiens
tgtaaaattttcatc

SEQ ID NO: 674866 - DNA, 15 bp, Homo sapiens
gtaaaattttcatcc

SEQ ID NO: 674867 - DNA, 15 bp, Homo sapiens
taaaattttcatccc

SEQ ID NO: 674868 - DNA, 15 bp, Homo sapiens
aaaattttcatccct

SEQ ID NO: 674869 - DNA, 15 bp, Homo sapiens
aaattttcatccctc

SEQ ID NO: 674870 - DNA, 15 bp, Homo sapiens
aattttcatccctca

SEQ ID NO: 674871 - DNA, 15 bp, Homo sapiens
attttcatccctcac

SEQ ID NO: 674872 - DNA, 15 bp, Homo sapiens
ttttcatccctcacc

SEQ ID NO: 674873 - DNA, 15 bp, Homo sapiens
tttcatccctcaccc

SEQ ID NO: 674874 - DNA, 15 bp, Homo sapiens
ttcatccctcaccca

SEQ ID NO: 674875 - DNA, 15 bp, Homo sapiens
tcatccctcacccag

SEQ ID NO: 674876 - DNA, 15 bp, Homo sapiens
catccctcacccagt

SEQ ID NO: 674877 - DNA, 15 bp, Homo sapiens
atccctcacccagtg

SEQ ID NO: 674878 - DNA, 15 bp, Homo sapiens
tccctcacccagtgg

SEQ ID NO: 674879 - DNA, 15 bp, Homo sapiens
ccctcacccagtgga

SEQ ID NO: 674880 - DNA, 15 bp, Homo sapiens
cctcacccagtggac

SEQ ID NO: 674881 - DNA, 15 bp, Homo sapiens
ctcacccagtggaca

SEQ ID NO: 674882 - DNA, 15 bp, Homo sapiens
tcacccagtggacaa

SEQ ID NO: 674883 - DNA, 15 bp, Homo sapiens
cacccagtggacaat

SEQ ID NO: 674884 - DNA, 15 bp, Homo sapiens
acccagtggacaata

SEQ ID NO: 674885 - DNA, 15 bp, Homo sapiens
cccagtggacaatag

SEQ ID NO: 674886 - DNA, 15 bp, Homo sapiens
ccagtggacaataga

SEQ ID NO: 674887 - DNA, 15 bp, Homo sapiens
cagtggacaatagag

SEQ ID NO: 674888 - DNA, 15 bp, Homo sapiens
agtggacaatagagg

SEQ ID NO: 674889 - DNA, 15 bp, Homo sapiens
gtggacaatagaggg

SEQ ID NO: 674890 - DNA, 15 bp, Homo sapiens
tggacaatagaggga

SEQ ID NO: 674891 - DNA, 15 bp, Homo sapiens
ggacaatagagggac

SEQ ID NO: 674892 - DNA, 15 bp, Homo sapiens
gacaatagagggacg

SEQ ID NO: 674893 - DNA, 15 bp, Homo sapiens
acaatagagggacga

SEQ ID NO: 674894 - DNA, 15 bp, Homo sapiens
caatagagggacgat

SEQ ID NO: 674895 - DNA, 15 bp, Homo sapiens
aatagagggacgatt

SEQ ID NO: 674896 - DNA, 15 bp, Homo sapiens
atagagggacgattt

SEQ ID NO: 674897 - DNA, 15 bp, Homo sapiens
tagagggacgatttt

SEQ ID NO: 674898 - DNA, 15 bp, Homo sapiens
agagggacgattttc

SEQ ID NO: 674899 - DNA, 15 bp, Homo sapiens
gagggacgattttct

SEQ ID NO: 674900 - DNA, 15 bp, Homo sapiens
agggacgattttctt

SEQ ID NO: 674901 - DNA, 15 bp, Homo sapiens
gggacgattttcttt

SEQ ID NO: 674902 - DNA, 15 bp, Homo sapiens
ggacgattttctttt

SEQ ID NO: 674903 - DNA, 15 bp, Homo sapiens
gacgattttcttttc

SEQ ID NO: 674904 - DNA, 15 bp, Homo sapiens
acgattttcttttct

SEQ ID NO: 674905 - DNA, 15 bp, Homo sapiens
cgattttcttttctc

SEQ ID NO: 674906 - DNA, 15 bp, Homo sapiens
gattttcttttctcc

SEQ ID NO: 674907 - DNA, 15 bp, Homo sapiens
attttcttttctcca

SEQ ID NO: 674908 - DNA, 15 bp, Homo sapiens
ttttcttttctccag

SEQ ID NO: 674909 - DNA, 15 bp, Homo sapiens
tttcttttctccaga

SEQ ID NO: 674910 - DNA, 15 bp, Homo sapiens
ttcttttctccagag

SEQ ID NO: 674911 - DNA, 15 bp, Homo sapiens
tcttttctccagaga

SEQ ID NO: 674912 - DNA, 15 bp, Homo sapiens
cttttctccagagaa

SEQ ID NO: 674913 - DNA, 15 bp, Homo sapiens
ttttctccagagaag

SEQ ID NO: 674914 - DNA, 15 bp, Homo sapiens
tttctccagagaaga

SEQ ID NO: 674915 - DNA, 15 bp, Homo sapiens
ttctccagagaagag

SEQ ID NO: 674916 - DNA, 15 bp, Homo sapiens
tctccagagaagaga

SEQ ID NO: 674917 - DNA, 15 bp, Homo sapiens
ctccagagaagagac

SEQ ID NO: 674918 - DNA, 15 bp, Homo sapiens
tccagagaagagaca

SEQ ID NO: 674919 - DNA, 15 bp, Homo sapiens
ccagagaagagacat

SEQ ID NO: 674920 - DNA, 15 bp, Homo sapiens
cagagaagagacatt

SEQ ID NO: 674921 - DNA, 15 bp, Homo sapiens
agagaagagacattg

SEQ ID NO: 674922 - DNA, 15 bp, Homo sapiens
gagaagagacattga

SEQ ID NO: 674923 - DNA, 15 bp, Homo sapiens
agaagagacattgac

SEQ ID NO: 674924 - DNA, 15 bp, Homo sapiens
gaagagacattgacc

SEQ ID NO: 674925 - DNA, 15 bp, Homo sapiens
aagagacattgacca

SEQ ID NO: 674926 - DNA, 15 bp, Homo sapiens
agagacattgaccag

SEQ ID NO: 674927 - DNA, 15 bp, Homo sapiens
gagacattgaccaga

SEQ ID NO: 674928 - DNA, 15 bp, Homo sapiens
agacattgaccagag

SEQ ID NO: 674929 - DNA, 15 bp, Homo sapiens
gacattgaccagagt

SEQ ID NO: 674930 - DNA, 15 bp, Homo sapiens
acattgaccagagtt

SEQ ID NO: 674931 - DNA, 15 bp, Homo sapiens
cattgaccagagtta

SEQ ID NO: 674932 - DNA, 15 bp, Homo sapiens
attgaccagagttaa

SEQ ID NO: 674933 - DNA, 15 bp, Homo sapiens
ttgaccagagttaag

SEQ ID NO: 674934 - DNA, 15 bp, Homo sapiens
tgaccagagttaaga

SEQ ID NO: 674935 - DNA, 15 bp, Homo sapiens
gaccagagttaagaa

SEQ ID NO: 674936 - DNA, 15 bp, Homo sapiens
accagagttaagaat

SEQ ID NO: 674937 - DNA, 15 bp, Homo sapiens
ccagagttaagaatc

SEQ ID NO: 674938 - DNA, 15 bp, Homo sapiens
cagagttaagaatct

SEQ ID NO: 674939 - DNA, 15 bp, Homo sapiens
agagttaagaatcta

SEQ ID NO: 674940 - DNA, 15 bp, Homo sapiens
gagttaagaatctaa

SEQ ID NO: 674941 - DNA, 15 bp, Homo sapiens
agttaagaatctaac

SEQ ID NO: 674942 - DNA, 15 bp, Homo sapiens
gttaagaatctaact

SEQ ID NO: 674943 - DNA, 15 bp, Homo sapiens
ttaagaatctaactg

SEQ ID NO: 674944 - DNA, 15 bp, Homo sapiens
taagaatctaactgt

SEQ ID NO: 674945 - DNA, 15 bp, Homo sapiens
aagaatctaactgtt

SEQ ID NO: 674946 - DNA, 15 bp, Homo sapiens
agaatctaactgttt

SEQ ID NO: 674947 - DNA, 15 bp, Homo sapiens
gaatctaactgttta

SEQ ID NO: 674948 - DNA, 15 bp, Homo sapiens
aatctaactgtttat

SEQ ID NO: 674949 - DNA, 15 bp, Homo sapiens
atctaactgtttatg

SEQ ID NO: 674950 - DNA, 15 bp, Homo sapiens
tctaactgtttatga

SEQ ID NO: 674951 - DNA, 15 bp, Homo sapiens
ctaactgtttatgag

SEQ ID NO: 674952 - DNA, 15 bp, Homo sapiens
taactgtttatgagt

SEQ ID NO: 674953 - DNA, 15 bp, Homo sapiens
aactgtttatgagtt

SEQ ID NO: 674954 - DNA, 15 bp, Homo sapiens
actgtttatgagttc

SEQ ID NO: 674955 - DNA, 15 bp, Homo sapiens
ctgtttatgagttcc

SEQ ID NO: 674956 - DNA, 15 bp, Homo sapiens
tgtttatgagttcca

SEQ ID NO: 674957 - DNA, 15 bp, Homo sapiens
gtttatgagttccag

SEQ ID NO: 674958 - DNA, 15 bp, Homo sapiens
tttatgagttccagt

SEQ ID NO: 674959 - DNA, 15 bp, Homo sapiens
ttatgagttccagtg

SEQ ID NO: 674960 - DNA, 15 bp, Homo sapiens
tatgagttccagtga

SEQ ID NO: 674961 - DNA, 15 bp, Homo sapiens
atgagttccagtgac

SEQ ID NO: 674962 - DNA, 15 bp, Homo sapiens
tgagttccagtgaca

SEQ ID NO: 674963 - DNA, 15 bp, Homo sapiens
gagttccagtgacat

SEQ ID NO: 674964 - DNA, 15 bp, Homo sapiens
agttccagtgacatt

SEQ ID NO: 674965 - DNA, 15 bp, Homo sapiens
gttccagtgacattt

SEQ ID NO: 674966 - DNA, 15 bp, Homo sapiens
ttccagtgacattta

SEQ ID NO: 674967 - DNA, 15 bp, Homo sapiens
tccagtgacatttac

SEQ ID NO: 674968 - DNA, 15 bp, Homo sapiens
ccagtgacatttaca

SEQ ID NO: 674969 - DNA, 15 bp, Homo sapiens
cagtgacatttacaa

SEQ ID NO: 674970 - DNA, 15 bp, Homo sapiens
agtgacatttacaat

SEQ ID NO: 674971 - DNA, 15 bp, Homo sapiens
gtgacatttacaatc

SEQ ID NO: 674972 - DNA, 15 bp, Homo sapiens
tgacatttacaatca

SEQ ID NO: 674973 - DNA, 15 bp, Homo sapiens
gacatttacaatcaa

SEQ ID NO: 674974 - DNA, 15 bp, Homo sapiens
acatttacaatcaat

SEQ ID NO: 674975 - DNA, 15 bp, Homo sapiens
catttacaatcaatt

SEQ ID NO: 674976 - DNA, 15 bp, Homo sapiens
atttacaatcaattc

SEQ ID NO: 674977 - DNA, 15 bp, Homo sapiens
tttacaatcaattct

SEQ ID NO: 674978 - DNA, 15 bp, Homo sapiens
ttacaatcaattctg

SEQ ID NO: 674979 - DNA, 15 bp, Homo sapiens
tacaatcaattctgg

SEQ ID NO: 674980 - DNA, 15 bp, Homo sapiens
acaatcaattctggt

SEQ ID NO: 674981 - DNA, 15 bp, Homo sapiens
caatcaattctggtt

SEQ ID NO: 674982 - DNA, 15 bp, Homo sapiens
aatcaattctggttt

SEQ ID NO: 674983 - DNA, 15 bp, Homo sapiens
atcaattctggtttg

SEQ ID NO: 674984 - DNA, 15 bp, Homo sapiens
tcaattctggtttgg

SEQ ID NO: 674985 - DNA, 15 bp, Homo sapiens
caattctggtttggc

SEQ ID NO: 674986 - DNA, 15 bp, Homo sapiens
aattctggtttggct

SEQ ID NO: 674987 - DNA, 15 bp, Homo sapiens
attctggtttggctt

SEQ ID NO: 674988 - DNA, 15 bp, Homo sapiens
ttctggtttggcttg

SEQ ID NO: 674989 - DNA, 15 bp, Homo sapiens
tctggtttggcttgg

SEQ ID NO: 674990 - DNA, 15 bp, Homo sapiens
ctggtttggcttggt

SEQ ID NO: 674991 - DNA, 15 bp, Homo sapiens
tggtttggcttggtt

SEQ ID NO: 674992 - DNA, 15 bp, Homo sapiens
ggtttggcttggttt

SEQ ID NO: 674993 - DNA, 15 bp, Homo sapiens
gtttggcttggtttc

SEQ ID NO: 674994 - DNA, 15 bp, Homo sapiens
tttggcttggtttct

SEQ ID NO: 674995 - DNA, 15 bp, Homo sapiens
ttggcttggtttctc

SEQ ID NO: 674996 - DNA, 15 bp, Homo sapiens
tggcttggtttctct

SEQ ID NO: 674997 - DNA, 15 bp, Homo sapiens
ggcttggtttctctc

SEQ ID NO: 674998 - DNA, 15 bp, Homo sapiens
gcttggtttctctca

SEQ ID NO: 674999 - DNA, 15 bp, Homo sapiens
cttggtttctctcat

SEQ ID NO: 675000 - DNA, 15 bp, Homo sapiens
ttggtttctctcatt

SEQ ID NO: 675001 - DNA, 15 bp, Homo sapiens
tggtttctctcattc

SEQ ID NO: 675002 - DNA, 15 bp, Homo sapiens
ggtttctctcattcc

SEQ ID NO: 675003 - DNA, 15 bp, Homo sapiens
gtttctctcattccc

SEQ ID NO: 675004 - DNA, 15 bp, Homo sapiens
tttctctcattccct

SEQ ID NO: 675005 - DNA, 15 bp, Homo sapiens
ttctctcattccctc

SEQ ID NO: 675006 - DNA, 15 bp, Homo sapiens
tctctcattccctct

SEQ ID NO: 675007 - DNA, 15 bp, Homo sapiens
ctctcattccctctt

SEQ ID NO: 675008 - DNA, 15 bp, Homo sapiens
tctcattccctctta

SEQ ID NO: 675009 - DNA, 15 bp, Homo sapiens
ctcattccctcttaa

SEQ ID NO: 675010 - DNA, 15 bp, Homo sapiens
tcattccctcttaac

SEQ ID NO: 675011 - DNA, 15 bp, Homo sapiens
cattccctcttaacc

SEQ ID NO: 675012 - DNA, 15 bp, Homo sapiens
attccctcttaaccc

SEQ ID NO: 675013 - DNA, 15 bp, Homo sapiens
ttccctcttaaccct

SEQ ID NO: 675014 - DNA, 15 bp, Homo sapiens
tccctcttaaccctg

SEQ ID NO: 675015 - DNA, 15 bp, Homo sapiens
ccctcttaaccctga

SEQ ID NO: 675016 - DNA, 15 bp, Homo sapiens
cctcttaaccctgac

SEQ ID NO: 675017 - DNA, 15 bp, Homo sapiens
ctcttaaccctgact

SEQ ID NO: 675018 - DNA, 15 bp, Homo sapiens
tcttaaccctgactt

SEQ ID NO: 675019 - DNA, 15 bp, Homo sapiens
cttaaccctgacttg

SEQ ID NO: 675020 - DNA, 15 bp, Homo sapiens
ttaaccctgacttgt

SEQ ID NO: 675021 - DNA, 15 bp, Homo sapiens
taaccctgacttgtg

SEQ ID NO: 675022 - DNA, 15 bp, Homo sapiens
aaccctgacttgtga

SEQ ID NO: 675023 - DNA, 15 bp, Homo sapiens
accctgacttgtgat

SEQ ID NO: 675024 - DNA, 15 bp, Homo sapiens
ccctgacttgtgata

SEQ ID NO: 675025 - DNA, 15 bp, Homo sapiens
cctgacttgtgatat

SEQ ID NO: 675026 - DNA, 15 bp, Homo sapiens
ctgacttgtgatatt

SEQ ID NO: 675027 - DNA, 15 bp, Homo sapiens
tgacttgtgatattg

SEQ ID NO: 675028 - DNA, 15 bp, Homo sapiens
gacttgtgatattgc

SEQ ID NO: 675029 - DNA, 15 bp, Homo sapiens
acttgtgatattgcc

SEQ ID NO: 675030 - DNA, 15 bp, Homo sapiens
cttgtgatattgccg

SEQ ID NO: 675031 - DNA, 15 bp, Homo sapiens
ttgtgatattgccgt

SEQ ID NO: 675032 - DNA, 15 bp, Homo sapiens
tgtgatattgccgtg

SEQ ID NO: 675033 - DNA, 15 bp, Homo sapiens
gtgatattgccgtga

SEQ ID NO: 675034 - DNA, 15 bp, Homo sapiens
tgatattgccgtgaa

SEQ ID NO: 675035 - DNA, 15 bp, Homo sapiens
gatattgccgtgaag

SEQ ID NO: 675036 - DNA, 15 bp, Homo sapiens
atattgccgtgaagg

SEQ ID NO: 675037 - DNA, 15 bp, Homo sapiens
tattgccgtgaaggt

SEQ ID NO: 675038 - DNA, 15 bp, Homo sapiens
attgccgtgaaggtg

SEQ ID NO: 675039 - DNA, 15 bp, Homo sapiens
ttgccgtgaaggtga

SEQ ID NO: 675040 - DNA, 15 bp, Homo sapiens
tgccgtgaaggtgat

SEQ ID NO: 675041 - DNA, 15 bp, Homo sapiens
gccgtgaaggtgatg

SEQ ID NO: 675042 - DNA, 15 bp, Homo sapiens
ccgtgaaggtgatgg

SEQ ID NO: 675043 - DNA, 15 bp, Homo sapiens
cgtgaaggtgatgga

SEQ ID NO: 675044 - DNA, 15 bp, Homo sapiens
gtgaaggtgatggag

SEQ ID NO: 675045 - DNA, 15 bp, Homo sapiens
tgaaggtgatggaga

SEQ ID NO: 675046 - DNA, 15 bp, Homo sapiens
gaaggtgatggagaa

SEQ ID NO: 675047 - DNA, 15 bp, Homo sapiens
aaggtgatggagaag

SEQ ID NO: 675048 - DNA, 15 bp, Homo sapiens
aggtgatggagaagc

SEQ ID NO: 675049 - DNA, 15 bp, Homo sapiens
ggtgatggagaagct

SEQ ID NO: 675050 - DNA, 15 bp, Homo sapiens
gtgatggagaagctc

SEQ ID NO: 675051 - DNA, 15 bp, Homo sapiens
tgatggagaagctct

SEQ ID NO: 675052 - DNA, 15 bp, Homo sapiens
gatggagaagctctt

SEQ ID NO: 675053 - DNA, 15 bp, Homo sapiens
atggagaagctcttc

SEQ ID NO: 675054 - DNA, 15 bp, Homo sapiens
tggagaagctcttcc

SEQ ID NO: 675055 - DNA, 15 bp, Homo sapiens
ggagaagctcttcca

SEQ ID NO: 675056 - DNA, 15 bp, Homo sapiens
gagaagctcttccat

SEQ ID NO: 675057 - DNA, 15 bp, Homo sapiens
agaagctcttccata

SEQ ID NO: 675058 - DNA, 15 bp, Homo sapiens
gaagctcttccatat

SEQ ID NO: 675059 - DNA, 15 bp, Homo sapiens
aagctcttccatatc

SEQ ID NO: 675060 - DNA, 15 bp, Homo sapiens
agctcttccatatcc

SEQ ID NO: 675061 - DNA, 15 bp, Homo sapiens
gctcttccatatccc

SEQ ID NO: 675062 - DNA, 15 bp, Homo sapiens
ctcttccatatccca

SEQ ID NO: 675063 - DNA, 15 bp, Homo sapiens
tcttccatatcccag

SEQ ID NO: 675064 - DNA, 15 bp, Homo sapiens
cttccatatcccagg

SEQ ID NO: 675065 - DNA, 15 bp, Homo sapiens
ttccatatcccaggg

SEQ ID NO: 675066 - DNA, 15 bp, Homo sapiens
tccatatcccagggt

SEQ ID NO: 675067 - DNA, 15 bp, Homo sapiens
ccatatcccagggtg

SEQ ID NO: 675068 - DNA, 15 bp, Homo sapiens
catatcccagggtga

SEQ ID NO: 675069 - DNA, 15 bp, Homo sapiens
atatcccagggtgag

SEQ ID NO: 675070 - DNA, 15 bp, Homo sapiens
tatcccagggtgagc

SEQ ID NO: 675071 - DNA, 15 bp, Homo sapiens
atcccagggtgagcc

SEQ ID NO: 675072 - DNA, 15 bp, Homo sapiens
tcccagggtgagccc

SEQ ID NO: 675073 - DNA, 15 bp, Homo sapiens
cccagggtgagccct

SEQ ID NO: 675074 - DNA, 15 bp, Homo sapiens
ccagggtgagccctc

SEQ ID NO: 675075 - DNA, 15 bp, Homo sapiens
cagggtgagccctca

SEQ ID NO: 675076 - DNA, 15 bp, Homo sapiens
agggtgagccctcaa

SEQ ID NO: 675077 - DNA, 15 bp, Homo sapiens
gggtgagccctcaat

SEQ ID NO: 675078 - DNA, 15 bp, Homo sapiens
ggtgagccctcaatt

SEQ ID NO: 675079 - DNA, 15 bp, Homo sapiens
gtgagccctcaattc

SEQ ID NO: 675080 - DNA, 15 bp, Homo sapiens
tgagccctcaattct

SEQ ID NO: 675081 - DNA, 15 bp, Homo sapiens
gagccctcaattctg

SEQ ID NO: 675082 - DNA, 15 bp, Homo sapiens
agccctcaattctgg

SEQ ID NO: 675083 - DNA, 15 bp, Homo sapiens
gccctcaattctgga

SEQ ID NO: 675084 - DNA, 15 bp, Homo sapiens
ccctcaattctggaa

SEQ ID NO: 675085 - DNA, 15 bp, Homo sapiens
cctcaattctggaat

SEQ ID NO: 675086 - DNA, 15 bp, Homo sapiens
ctcaattctggaata

SEQ ID NO: 675087 - DNA, 15 bp, Homo sapiens
tcaattctggaataa

SEQ ID NO: 675088 - DNA, 15 bp, Homo sapiens
caattctggaataac

SEQ ID NO: 675089 - DNA, 15 bp, Homo sapiens
aattctggaataacc

SEQ ID NO: 675090 - DNA, 15 bp, Homo sapiens
attctggaataacca

SEQ ID NO: 675091 - DNA, 15 bp, Homo sapiens
ttctggaataaccac

SEQ ID NO: 675092 - DNA, 15 bp, Homo sapiens
tctggaataaccaca

SEQ ID NO: 675093 - DNA, 15 bp, Homo sapiens
ctggaataaccacag

SEQ ID NO: 675094 - DNA, 15 bp, Homo sapiens
tggaataaccacagg

SEQ ID NO: 675095 - DNA, 15 bp, Homo sapiens
ggaataaccacagga

SEQ ID NO: 675096 - DNA, 15 bp, Homo sapiens
gaataaccacaggaa

SEQ ID NO: 675097 - DNA, 15 bp, Homo sapiens
aataaccacaggaat

SEQ ID NO: 675098 - DNA, 15 bp, Homo sapiens
ataaccacaggaatg

SEQ ID NO: 675099 - DNA, 15 bp, Homo sapiens
taaccacaggaatgt

SEQ ID NO: 675100 - DNA, 15 bp, Homo sapiens
aaccacaggaatgtt

SEQ ID NO: 675101 - DNA, 15 bp, Homo sapiens
accacaggaatgttg

SEQ ID NO: 675102 - DNA, 15 bp, Homo sapiens
ccacaggaatgttgg

SEQ ID NO: 675103 - DNA, 15 bp, Homo sapiens
cacaggaatgttggt

SEQ ID NO: 675104 - DNA, 15 bp, Homo sapiens
acaggaatgttggtt

SEQ ID NO: 675105 - DNA, 15 bp, Homo sapiens
caggaatgttggttg

SEQ ID NO: 675106 - DNA, 15 bp, Homo sapiens
aggaatgttggttgg

SEQ ID NO: 675107 - DNA, 15 bp, Homo sapiens
ggaatgttggttggc

SEQ ID NO: 675108 - DNA, 15 bp, Homo sapiens
gaatgttggttggct

SEQ ID NO: 675109 - DNA, 15 bp, Homo sapiens
aatgttggttggctt

SEQ ID NO: 675110 - DNA, 15 bp, Homo sapiens
atgttggttggcttg

SEQ ID NO: 675111 - DNA, 15 bp, Homo sapiens
tgttggttggcttgg

SEQ ID NO: 675112 - DNA, 15 bp, Homo sapiens
gttggttggcttgga

SEQ ID NO: 675113 - DNA, 15 bp, Homo sapiens
ttggttggcttggaa

SEQ ID NO: 675114 - DNA, 15 bp, Homo sapiens
tggttggcttggaat

SEQ ID NO: 675115 - DNA, 15 bp, Homo sapiens
ggttggcttggaatg

SEQ ID NO: 675116 - DNA, 15 bp, Homo sapiens
gttggcttggaatgg

SEQ ID NO: 675117 - DNA, 15 bp, Homo sapiens
ttggcttggaatgga

SEQ ID NO: 675118 - DNA, 15 bp, Homo sapiens
tggcttggaatggat

SEQ ID NO: 675119 - DNA, 15 bp, Homo sapiens
ggcttggaatggatg

SEQ ID NO: 675120 - DNA, 15 bp, Homo sapiens
gcttggaatggatga

SEQ ID NO: 675121 - DNA, 15 bp, Homo sapiens
cttggaatggatgaa

SEQ ID NO: 675122 - DNA, 15 bp, Homo sapiens
ttggaatggatgaag

SEQ ID NO: 675123 - DNA, 15 bp, Homo sapiens
tggaatggatgaagg

SEQ ID NO: 675124 - DNA, 15 bp, Homo sapiens
ggaatggatgaaggg

SEQ ID NO: 675125 - DNA, 15 bp, Homo sapiens
gaatggatgaaggga

SEQ ID NO: 675126 - DNA, 15 bp, Homo sapiens
aatggatgaagggaa

SEQ ID NO: 675127 - DNA, 15 bp, Homo sapiens
atggatgaagggaaa

SEQ ID NO: 675128 - DNA, 15 bp, Homo sapiens
tggatgaagggaaat

SEQ ID NO: 675129 - DNA, 15 bp, Homo sapiens
ggatgaagggaaatg

SEQ ID NO: 675130 - DNA, 15 bp, Homo sapiens
gatgaagggaaatgg

SEQ ID NO: 675131 - DNA, 15 bp, Homo sapiens
atgaagggaaatgga

SEQ ID NO: 675132 - DNA, 15 bp, Homo sapiens
tgaagggaaatggaa

SEQ ID NO: 675133 - DNA, 15 bp, Homo sapiens
gaagggaaatggaac

SEQ ID NO: 675134 - DNA, 15 bp, Homo sapiens
aagggaaatggaacc

SEQ ID NO: 675135 - DNA, 15 bp, Homo sapiens
agggaaatggaaccg

SEQ ID NO: 675136 - DNA, 15 bp, Homo sapiens
gggaaatggaaccgg

SEQ ID NO: 675137 - DNA, 15 bp, Homo sapiens
ggaaatggaaccggg

SEQ ID NO: 675138 - DNA, 15 bp, Homo sapiens
gaaatggaaccgggc

SEQ ID NO: 675139 - DNA, 15 bp, Homo sapiens
aaatggaaccgggcc

SEQ ID NO: 675140 - DNA, 15 bp, Homo sapiens
aatggaaccgggcca

SEQ ID NO: 675141 - DNA, 15 bp, Homo sapiens
atggaaccgggccag

SEQ ID NO: 675142 - DNA, 15 bp, Homo sapiens
tggaaccgggccagt

SEQ ID NO: 675143 - DNA, 15 bp, Homo sapiens
ggaaccgggccagta

SEQ ID NO: 675144 - DNA, 15 bp, Homo sapiens
gaaccgggccagtaa

SEQ ID NO: 675145 - DNA, 15 bp, Homo sapiens
aaccgggccagtaaa

SEQ ID NO: 675146 - DNA, 15 bp, Homo sapiens
accgggccagtaaag

SEQ ID NO: 675147 - DNA, 15 bp, Homo sapiens
ccgggccagtaaaga

SEQ ID NO: 675148 - DNA, 15 bp, Homo sapiens
cgggccagtaaagag

SEQ ID NO: 675149 - DNA, 15 bp, Homo sapiens
gggccagtaaagaga

SEQ ID NO: 675150 - DNA, 15 bp, Homo sapiens
ggccagtaaagagaa

SEQ ID NO: 675151 - DNA, 15 bp, Homo sapiens
gccagtaaagagaag

SEQ ID NO: 675152 - DNA, 15 bp, Homo sapiens
ccagtaaagagaagg

SEQ ID NO: 675153 - DNA, 15 bp, Homo sapiens
cagtaaagagaaggc

SEQ ID NO: 675154 - DNA, 15 bp, Homo sapiens
agtaaagagaaggct

SEQ ID NO: 675155 - DNA, 15 bp, Homo sapiens
gtaaagagaaggctt

SEQ ID NO: 675156 - DNA, 15 bp, Homo sapiens
taaagagaaggcttg

SEQ ID NO: 675157 - DNA, 15 bp, Homo sapiens
aaagagaaggcttgg

SEQ ID NO: 675158 - DNA, 15 bp, Homo sapiens
aagagaaggcttgga

SEQ ID NO: 675159 - DNA, 15 bp, Homo sapiens
agagaaggcttggat

SEQ ID NO: 675160 - DNA, 15 bp, Homo sapiens
gagaaggcttggatc

SEQ ID NO: 675161 - DNA, 15 bp, Homo sapiens
agaaggcttggatct

SEQ ID NO: 675162 - DNA, 15 bp, Homo sapiens
gaaggcttggatctg

SEQ ID NO: 675163 - DNA, 15 bp, Homo sapiens
aaggcttggatctgt

SEQ ID NO: 675164 - DNA, 15 bp, Homo sapiens
aggcttggatctgtt

SEQ ID NO: 675165 - DNA, 15 bp, Homo sapiens
ggcttggatctgttc

SEQ ID NO: 675166 - DNA, 15 bp, Homo sapiens
gcttggatctgttct

SEQ ID NO: 675167 - DNA, 15 bp, Homo sapiens
cttggatctgttcta

SEQ ID NO: 675168 - DNA, 15 bp, Homo sapiens
ttggatctgttctag

SEQ ID NO: 675169 - DNA, 15 bp, Homo sapiens
tggatctgttctagg

SEQ ID NO: 675170 - DNA, 15 bp, Homo sapiens
ggatctgttctaggc

SEQ ID NO: 675171 - DNA, 15 bp, Homo sapiens
gatctgttctaggcc

SEQ ID NO: 675172 - DNA, 15 bp, Homo sapiens
atctgttctaggcct

SEQ ID NO: 675173 - DNA, 15 bp, Homo sapiens
tctgttctaggcctg

SEQ ID NO: 675174 - DNA, 15 bp, Homo sapiens
ctgttctaggcctgg

SEQ ID NO: 675175 - DNA, 15 bp, Homo sapiens
tgttctaggcctggc

SEQ ID NO: 675176 - DNA, 15 bp, Homo sapiens
gttctaggcctggct

SEQ ID NO: 675177 - DNA, 15 bp, Homo sapiens
ttctaggcctggctg

SEQ ID NO: 675178 - DNA, 15 bp, Homo sapiens
tctaggcctggctga

SEQ ID NO: 675179 - DNA, 15 bp, Homo sapiens
ctaggcctggctgat

SEQ ID NO: 675180 - DNA, 15 bp, Homo sapiens
taggcctggctgatc

SEQ ID NO: 675181 - DNA, 15 bp, Homo sapiens
aggcctggctgatcc

SEQ ID NO: 675182 - DNA, 15 bp, Homo sapiens
ggcctggctgatcct

SEQ ID NO: 675183 - DNA, 15 bp, Homo sapiens
gcctggctgatcctg

SEQ ID NO: 675184 - DNA, 15 bp, Homo sapiens
cctggctgatcctga

SEQ ID NO: 675185 - DNA, 15 bp, Homo sapiens
ctggctgatcctgaa

SEQ ID NO: 675186 - DNA, 15 bp, Homo sapiens
tggctgatcctgaat

SEQ ID NO: 675187 - DNA, 15 bp, Homo sapiens
ggctgatcctgaatt

SEQ ID NO: 675188 - DNA, 15 bp, Homo sapiens
gctgatcctgaatta

SEQ ID NO: 675189 - DNA, 15 bp, Homo sapiens
ctgatcctgaattag

SEQ ID NO: 675190 - DNA, 15 bp, Homo sapiens
tgatcctgaattagt

SEQ ID NO: 675191 - DNA, 15 bp, Homo sapiens
gatcctgaattagtt

SEQ ID NO: 675192 - DNA, 15 bp, Homo sapiens
atcctgaattagttc

SEQ ID NO: 675193 - DNA, 15 bp, Homo sapiens
tcctgaattagttca

SEQ ID NO: 675194 - DNA, 15 bp, Homo sapiens
cctgaattagttcaa

SEQ ID NO: 675195 - DNA, 15 bp, Homo sapiens
ctgaattagttcaat

SEQ ID NO: 675196 - DNA, 15 bp, Homo sapiens
tgaattagttcaatt

SEQ ID NO: 675197 - DNA, 15 bp, Homo sapiens
gaattagttcaattc

SEQ ID NO: 675198 - DNA, 15 bp, Homo sapiens
aattagttcaattcc

SEQ ID NO: 675199 - DNA, 15 bp, Homo sapiens
attagttcaattccc

SEQ ID NO: 675200 - DNA, 15 bp, Homo sapiens
ttagttcaattccca

SEQ ID NO: 675201 - DNA, 15 bp, Homo sapiens
tagttcaattcccaa

SEQ ID NO: 675202 - DNA, 15 bp, Homo sapiens
agttcaattcccaaa

SEQ ID NO: 675203 - DNA, 15 bp, Homo sapiens
gttcaattcccaaag

SEQ ID NO: 675204 - DNA, 15 bp, Homo sapiens
ttcaattcccaaaga

SEQ ID NO: 675205 - DNA, 15 bp, Homo sapiens
tcaattcccaaagat

SEQ ID NO: 675206 - DNA, 15 bp, Homo sapiens
caattcccaaagatc

SEQ ID NO: 675207 - DNA, 15 bp, Homo sapiens
aattcccaaagatct

SEQ ID NO: 675208 - DNA, 15 bp, Homo sapiens
attcccaaagatctg

SEQ ID NO: 675209 - DNA, 15 bp, Homo sapiens
ttcccaaagatctgg

SEQ ID NO: 675210 - DNA, 15 bp, Homo sapiens
tcccaaagatctggg

SEQ ID NO: 675211 - DNA, 15 bp, Homo sapiens
cccaaagatctgggt

SEQ ID NO: 675212 - DNA, 15 bp, Homo sapiens
ccaaagatctgggtc

SEQ ID NO: 675213 - DNA, 15 bp, Homo sapiens
caaagatctgggtct

SEQ ID NO: 675214 - DNA, 15 bp, Homo sapiens
aaagatctgggtctc

SEQ ID NO: 675215 - DNA, 15 bp, Homo sapiens
aagatctgggtctca

SEQ ID NO: 675216 - DNA, 15 bp, Homo sapiens
agatctgggtctcac

SEQ ID NO: 675217 - DNA, 15 bp, Homo sapiens
gatctgggtctcacc

SEQ ID NO: 675218 - DNA, 15 bp, Homo sapiens
atctgggtctcacca

SEQ ID NO: 675219 - DNA, 15 bp, Homo sapiens
tctgggtctcaccat

SEQ ID NO: 675220 - DNA, 15 bp, Homo sapiens
ctgggtctcaccatg

SEQ ID NO: 675221 - DNA, 15 bp, Homo sapiens
tgggtctcaccatgg

SEQ ID NO: 675222 - DNA, 15 bp, Homo sapiens
gggtctcaccatggg

SEQ ID NO: 675223 - DNA, 15 bp, Homo sapiens
ggtctcaccatgggt

SEQ ID NO: 675224 - DNA, 15 bp, Homo sapiens
gtctcaccatgggtt

SEQ ID NO: 675225 - DNA, 15 bp, Homo sapiens
tctcaccatgggttc

SEQ ID NO: 675226 - DNA, 15 bp, Homo sapiens
ctcaccatgggttca

SEQ ID NO: 675227 - DNA, 15 bp, Homo sapiens
tcaccatgggttcat

SEQ ID NO: 675228 - DNA, 15 bp, Homo sapiens
caccatgggttcatt

SEQ ID NO: 675229 - DNA, 15 bp, Homo sapiens
accatgggttcatta

SEQ ID NO: 675230 - DNA, 15 bp, Homo sapiens
ccatgggttcattac

SEQ ID NO: 675231 - DNA, 15 bp, Homo sapiens
catgggttcattacc

SEQ ID NO: 675232 - DNA, 15 bp, Homo sapiens
atgggttcattacct

SEQ ID NO: 675233 - DNA, 15 bp, Homo sapiens
tgggttcattacctt

SEQ ID NO: 675234 - DNA, 15 bp, Homo sapiens
gggttcattaccttg

SEQ ID NO: 675235 - DNA, 15 bp, Homo sapiens
ggttcattaccttga

SEQ ID NO: 675236 - DNA, 15 bp, Homo sapiens
gttcattaccttgac

SEQ ID NO: 675237 - DNA, 15 bp, Homo sapiens
ttcattaccttgact

SEQ ID NO: 675238 - DNA, 15 bp, Homo sapiens
tcattaccttgactg

SEQ ID NO: 675239 - DNA, 15 bp, Homo sapiens
cattaccttgactga

SEQ ID NO: 675240 - DNA, 15 bp, Homo sapiens
attaccttgactgac

SEQ ID NO: 675241 - DNA, 15 bp, Homo sapiens
ttaccttgactgact

SEQ ID NO: 675242 - DNA, 15 bp, Homo sapiens
taccttgactgactt

SEQ ID NO: 675243 - DNA, 15 bp, Homo sapiens
accttgactgacttt

SEQ ID NO: 675244 - DNA, 15 bp, Homo sapiens
ccttgactgactttg

SEQ ID NO: 675245 - DNA, 15 bp, Homo sapiens
cttgactgactttgt

SEQ ID NO: 675246 - DNA, 15 bp, Homo sapiens
ttgactgactttgtt

SEQ ID NO: 675247 - DNA, 15 bp, Homo sapiens
tgactgactttgtta

SEQ ID NO: 675248 - DNA, 15 bp, Homo sapiens
gactgactttgttac

SEQ ID NO: 675249 - DNA, 15 bp, Homo sapiens
actgactttgttact

SEQ ID NO: 675250 - DNA, 15 bp, Homo sapiens
ctgactttgttactt

SEQ ID NO: 675251 - DNA, 15 bp, Homo sapiens
tgactttgttactta

SEQ ID NO: 675252 - DNA, 15 bp, Homo sapiens
gactttgttacttaa

SEQ ID NO: 675253 - DNA, 15 bp, Homo sapiens
actttgttacttaaa

SEQ ID NO: 675254 - DNA, 15 bp, Homo sapiens
ctttgttacttaaac

SEQ ID NO: 675255 - DNA, 15 bp, Homo sapiens
tttgttacttaaacc

SEQ ID NO: 675256 - DNA, 15 bp, Homo sapiens
ttgttacttaaacct

SEQ ID NO: 675257 - DNA, 15 bp, Homo sapiens
tgttacttaaacctc

SEQ ID NO: 675258 - DNA, 15 bp, Homo sapiens
gttacttaaacctcc

SEQ ID NO: 675259 - DNA, 15 bp, Homo sapiens
ttacttaaacctcca

SEQ ID NO: 675260 - DNA, 15 bp, Homo sapiens
tacttaaacctccaa

SEQ ID NO: 675261 - DNA, 15 bp, Homo sapiens
acttaaacctccaac

SEQ ID NO: 675262 - DNA, 15 bp, Homo sapiens
cttaaacctccaact

SEQ ID NO: 675263 - DNA, 15 bp, Homo sapiens
ttaaacctccaacta

SEQ ID NO: 675264 - DNA, 15 bp, Homo sapiens
taaacctccaactat

SEQ ID NO: 675265 - DNA, 15 bp, Homo sapiens
aaacctccaactata

SEQ ID NO: 675266 - DNA, 15 bp, Homo sapiens
aacctccaactatat

SEQ ID NO: 675267 - DNA, 15 bp, Homo sapiens
acctccaactatata

SEQ ID NO: 675268 - DNA, 15 bp, Homo sapiens
cctccaactatatag

SEQ ID NO: 675269 - DNA, 15 bp, Homo sapiens
ctccaactatatagg

SEQ ID NO: 675270 - DNA, 15 bp, Homo sapiens
tccaactatatagga

SEQ ID NO: 675271 - DNA, 15 bp, Homo sapiens
ccaactatataggag

SEQ ID NO: 675272 - DNA, 15 bp, Homo sapiens
caactatataggagc

SEQ ID NO: 675273 - DNA, 15 bp, Homo sapiens
aactatataggagcc

SEQ ID NO: 675274 - DNA, 15 bp, Homo sapiens
actatataggagccg

SEQ ID NO: 675275 - DNA, 15 bp, Homo sapiens
ctatataggagccga

SEQ ID NO: 675276 - DNA, 15 bp, Homo sapiens
tatataggagccgag

SEQ ID NO: 675277 - DNA, 15 bp, Homo sapiens
atataggagccgagt

SEQ ID NO: 675278 - DNA, 15 bp, Homo sapiens
tataggagccgagtg

SEQ ID NO: 675279 - DNA, 15 bp, Homo sapiens
ataggagccgagtgt

SEQ ID NO: 675280 - DNA, 15 bp, Homo sapiens
taggagccgagtgtg

SEQ ID NO: 675281 - DNA, 15 bp, Homo sapiens
aggagccgagtgtga

SEQ ID NO: 675282 - DNA, 15 bp, Homo sapiens
ggagccgagtgtgac

SEQ ID NO: 675283 - DNA, 15 bp, Homo sapiens
gagccgagtgtgact

SEQ ID NO: 675284 - DNA, 15 bp, Homo sapiens
agccgagtgtgactc

SEQ ID NO: 675285 - DNA, 15 bp, Homo sapiens
gccgagtgtgactcg

SEQ ID NO: 675286 - DNA, 15 bp, Homo sapiens
ccgagtgtgactcgg

SEQ ID NO: 675287 - DNA, 15 bp, Homo sapiens
cgagtgtgactcgga

SEQ ID NO: 675288 - DNA, 15 bp, Homo sapiens
gagtgtgactcggac

SEQ ID NO: 675289 - DNA, 15 bp, Homo sapiens
agtgtgactcggact

SEQ ID NO: 675290 - DNA, 15 bp, Homo sapiens
gtgtgactcggacta

SEQ ID NO: 675291 - DNA, 15 bp, Homo sapiens
tgtgactcggactat

SEQ ID NO: 675292 - DNA, 15 bp, Homo sapiens
gtgactcggactatg

SEQ ID NO: 675293 - DNA, 15 bp, Homo sapiens
tgactcggactatgg

SEQ ID NO: 675294 - DNA, 15 bp, Homo sapiens
gactcggactatgga

SEQ ID NO: 675295 - DNA, 15 bp, Homo sapiens
actcggactatggat

SEQ ID NO: 675296 - DNA, 15 bp, Homo sapiens
ctcggactatggatt

SEQ ID NO: 675297 - DNA, 15 bp, Homo sapiens
tcggactatggattg

SEQ ID NO: 675298 - DNA, 15 bp, Homo sapiens
cggactatggattgt

SEQ ID NO: 675299 - DNA, 15 bp, Homo sapiens
ggactatggattgtt

SEQ ID NO: 675300 - DNA, 15 bp, Homo sapiens
gactatggattgtta

SEQ ID NO: 675301 - DNA, 15 bp, Homo sapiens
actatggattgttat

SEQ ID NO: 675302 - DNA, 15 bp, Homo sapiens
ctatggattgttatt

SEQ ID NO: 675303 - DNA, 15 bp, Homo sapiens
tatggattgttattc

SEQ ID NO: 675304 - DNA, 15 bp, Homo sapiens
atggattgttattct

SEQ ID NO: 675305 - DNA, 15 bp, Homo sapiens
tggattgttattctt

SEQ ID NO: 675306 - DNA, 15 bp, Homo sapiens
ggattgttattctta

SEQ ID NO: 675307 - DNA, 15 bp, Homo sapiens
gattgttattcttaa

SEQ ID NO: 675308 - DNA, 15 bp, Homo sapiens
attgttattcttaat

SEQ ID NO: 675309 - DNA, 15 bp, Homo sapiens
ttgttattcttaatt

SEQ ID NO: 675310 - DNA, 15 bp, Homo sapiens
tgttattcttaatta

SEQ ID NO: 675311 - DNA, 15 bp, Homo sapiens
gttattcttaattat

SEQ ID NO: 675312 - DNA, 15 bp, Homo sapiens
ttattcttaattata

SEQ ID NO: 675313 - DNA, 15 bp, Homo sapiens
tattcttaattataa

SEQ ID NO: 675314 - DNA, 15 bp, Homo sapiens
attcttaattataat

SEQ ID NO: 675315 - DNA, 15 bp, Homo sapiens
ttcttaattataatg

SEQ ID NO: 675316 - DNA, 15 bp, Homo sapiens
tcttaattataatgt

SEQ ID NO: 675317 - DNA, 15 bp, Homo sapiens
cttaattataatgtt

SEQ ID NO: 675318 - DNA, 15 bp, Homo sapiens
ttaattataatgttt

SEQ ID NO: 675319 - DNA, 15 bp, Homo sapiens
taattataatgtttt

SEQ ID NO: 675320 - DNA, 15 bp, Homo sapiens
aattataatgttttc

SEQ ID NO: 675321 - DNA, 15 bp, Homo sapiens
attataatgttttcc

SEQ ID NO: 675322 - DNA, 15 bp, Homo sapiens
ttataatgttttccc

SEQ ID NO: 675323 - DNA, 15 bp, Homo sapiens
tataatgttttccct

SEQ ID NO: 675324 - DNA, 15 bp, Homo sapiens
ataatgttttccctc

SEQ ID NO: 675325 - DNA, 15 bp, Homo sapiens
taatgttttccctct

SEQ ID NO: 675326 - DNA, 15 bp, Homo sapiens
aatgttttccctctc

SEQ ID NO: 675327 - DNA, 15 bp, Homo sapiens
atgttttccctctca

SEQ ID NO: 675328 - DNA, 15 bp, Homo sapiens
tgttttccctctcat

SEQ ID NO: 675329 - DNA, 15 bp, Homo sapiens
gttttccctctcatt

SEQ ID NO: 675330 - DNA, 15 bp, Homo sapiens
ttttccctctcattt

SEQ ID NO: 675331 - DNA, 15 bp, Homo sapiens
tttccctctcatttt

SEQ ID NO: 675332 - DNA, 15 bp, Homo sapiens
ttccctctcattttt

SEQ ID NO: 675333 - DNA, 15 bp, Homo sapiens
tccctctcatttttc

SEQ ID NO: 675334 - DNA, 15 bp, Homo sapiens
ccctctcatttttct

SEQ ID NO: 675335 - DNA, 15 bp, Homo sapiens
cctctcatttttctg

SEQ ID NO: 675336 - DNA, 15 bp, Homo sapiens
ctctcatttttctgg

SEQ ID NO: 675337 - DNA, 15 bp, Homo sapiens
tctcatttttctggt

SEQ ID NO: 675338 - DNA, 15 bp, Homo sapiens
ctcatttttctggta

SEQ ID NO: 675339 - DNA, 15 bp, Homo sapiens
tcatttttctggtag

SEQ ID NO: 675340 - DNA, 15 bp, Homo sapiens
catttttctggtagg

SEQ ID NO: 675341 - DNA, 15 bp, Homo sapiens
atttttctggtaggt

SEQ ID NO: 675342 - DNA, 15 bp, Homo sapiens
tttttctggtaggta

SEQ ID NO: 675343 - DNA, 15 bp, Homo sapiens
ttttctggtaggtat

SEQ ID NO: 675344 - DNA, 15 bp, Homo sapiens
tttctggtaggtatc

SEQ ID NO: 675345 - DNA, 15 bp, Homo sapiens
ttctggtaggtatca

SEQ ID NO: 675346 - DNA, 15 bp, Homo sapiens
tctggtaggtatcag

SEQ ID NO: 675347 - DNA, 15 bp, Homo sapiens
ctggtaggtatcaga

SEQ ID NO: 675348 - DNA, 15 bp, Homo sapiens
tggtaggtatcagaa

SEQ ID NO: 675349 - DNA, 15 bp, Homo sapiens
ggtaggtatcagaaa

SEQ ID NO: 675350 - DNA, 15 bp, Homo sapiens
gtaggtatcagaaac

SEQ ID NO: 675351 - DNA, 15 bp, Homo sapiens
taggtatcagaaaca

SEQ ID NO: 675352 - DNA, 15 bp, Homo sapiens
aggtatcagaaacat

SEQ ID NO: 675353 - DNA, 15 bp, Homo sapiens
ggtatcagaaacatt

SEQ ID NO: 675354 - DNA, 15 bp, Homo sapiens
gtatcagaaacattt

SEQ ID NO: 675355 - DNA, 15 bp, Homo sapiens
tatcagaaacattta

SEQ ID NO: 675356 - DNA, 15 bp, Homo sapiens
atcagaaacatttag

SEQ ID NO: 675357 - DNA, 15 bp, Homo sapiens
tcagaaacatttaga

SEQ ID NO: 675358 - DNA, 15 bp, Homo sapiens
cagaaacatttagaa

SEQ ID NO: 675359 - DNA, 15 bp, Homo sapiens
agaaacatttagaaa

SEQ ID NO: 675360 - DNA, 15 bp, Homo sapiens
gaaacatttagaaaa

SEQ ID NO: 675361 - DNA, 15 bp, Homo sapiens
aaacatttagaaaat

SEQ ID NO: 675362 - DNA, 15 bp, Homo sapiens
aacatttagaaaatg

SEQ ID NO: 675363 - DNA, 15 bp, Homo sapiens
acatttagaaaatgc

SEQ ID NO: 675364 - DNA, 15 bp, Homo sapiens
catttagaaaatgcc

SEQ ID NO: 675365 - DNA, 15 bp, Homo sapiens
atttagaaaatgcca

SEQ ID NO: 675366 - DNA, 15 bp, Homo sapiens
tttagaaaatgccaa

SEQ ID NO: 675367 - DNA, 15 bp, Homo sapiens
ttagaaaatgccaaa

SEQ ID NO: 675368 - DNA, 15 bp, Homo sapiens
tagaaaatgccaaag

SEQ ID NO: 675369 - DNA, 15 bp, Homo sapiens
agaaaatgccaaaga

SEQ ID NO: 675370 - DNA, 15 bp, Homo sapiens
gaaaatgccaaagag

SEQ ID NO: 675371 - DNA, 15 bp, Homo sapiens
aaaatgccaaagaga

SEQ ID NO: 675372 - DNA, 15 bp, Homo sapiens
aaatgccaaagagat

SEQ ID NO: 675373 - DNA, 15 bp, Homo sapiens
aatgccaaagagatt

SEQ ID NO: 675374 - DNA, 15 bp, Homo sapiens
atgccaaagagattg

SEQ ID NO: 675375 - DNA, 15 bp, Homo sapiens
tgccaaagagattgg

SEQ ID NO: 675376 - DNA, 15 bp, Homo sapiens
gccaaagagattgga

SEQ ID NO: 675377 - DNA, 15 bp, Homo sapiens
ccaaagagattggaa

SEQ ID NO: 675378 - DNA, 15 bp, Homo sapiens
caaagagattggaat

SEQ ID NO: 675379 - DNA, 15 bp, Homo sapiens
aaagagattggaatt

SEQ ID NO: 675380 - DNA, 15 bp, Homo sapiens
aagagattggaatta

SEQ ID NO: 675381 - DNA, 15 bp, Homo sapiens
agagattggaattaa

SEQ ID NO: 675382 - DNA, 15 bp, Homo sapiens
gagattggaattaaa

SEQ ID NO: 675383 - DNA, 15 bp, Homo sapiens
agattggaattaaaa

SEQ ID NO: 675384 - DNA, 15 bp, Homo sapiens
gattggaattaaaaa

SEQ ID NO: 675385 - DNA, 15 bp, Homo sapiens
attggaattaaaaaa

SEQ ID NO: 675386 - DNA, 15 bp, Homo sapiens
ttggaattaaaaaag

SEQ ID NO: 675387 - DNA, 15 bp, Homo sapiens
tggaattaaaaaagc

SEQ ID NO: 675388 - DNA, 15 bp, Homo sapiens
ggaattaaaaaagct

SEQ ID NO: 675389 - DNA, 15 bp, Homo sapiens
gaattaaaaaagcta

SEQ ID NO: 675390 - DNA, 15 bp, Homo sapiens
aattaaaaaagctat

SEQ ID NO: 675391 - DNA, 15 bp, Homo sapiens
attaaaaaagctatt

SEQ ID NO: 675392 - DNA, 15 bp, Homo sapiens
ttaaaaaagctattt

SEQ ID NO: 675393 - DNA, 15 bp, Homo sapiens
taaaaaagctatttc

SEQ ID NO: 675394 - DNA, 15 bp, Homo sapiens
aaaaaagctatttca

SEQ ID NO: 675395 - DNA, 15 bp, Homo sapiens
aaaaagctatttcag

SEQ ID NO: 675396 - DNA, 15 bp, Homo sapiens
aaaagctatttcagc

SEQ ID NO: 675397 - DNA, 15 bp, Homo sapiens
aaagctatttcagca

SEQ ID NO: 675398 - DNA, 15 bp, Homo sapiens
aagctatttcagcaa

SEQ ID NO: 675399 - DNA, 15 bp, Homo sapiens
agctatttcagcaaa

SEQ ID NO: 675400 - DNA, 15 bp, Homo sapiens
gctatttcagcaaac

SEQ ID NO: 675401 - DNA, 15 bp, Homo sapiens
ctatttcagcaaaca

SEQ ID NO: 675402 - DNA, 15 bp, Homo sapiens
tatttcagcaaacat

SEQ ID NO: 675403 - DNA, 15 bp, Homo sapiens
atttcagcaaacatt

SEQ ID NO: 675404 - DNA, 15 bp, Homo sapiens
tttcagcaaacattt

SEQ ID NO: 675405 - DNA, 15 bp, Homo sapiens
ttcagcaaacatttc

SEQ ID NO: 675406 - DNA, 15 bp, Homo sapiens
tcagcaaacatttcc

SEQ ID NO: 675407 - DNA, 15 bp, Homo sapiens
cagcaaacatttcca

SEQ ID NO: 675408 - DNA, 15 bp, Homo sapiens
agcaaacatttccat

SEQ ID NO: 675409 - DNA, 15 bp, Homo sapiens
gcaaacatttccatg

SEQ ID NO: 675410 - DNA, 15 bp, Homo sapiens
caaacatttccatgg

SEQ ID NO: 675411 - DNA, 15 bp, Homo sapiens
aaacatttccatggg

SEQ ID NO: 675412 - DNA, 15 bp, Homo sapiens
aacatttccatgggt

SEQ ID NO: 675413 - DNA, 15 bp, Homo sapiens
acatttccatgggta

SEQ ID NO: 675414 - DNA, 15 bp, Homo sapiens
catttccatgggtat

SEQ ID NO: 675415 - DNA, 15 bp, Homo sapiens
atttccatgggtatt

SEQ ID NO: 675416 - DNA, 15 bp, Homo sapiens
tttccatgggtattg

SEQ ID NO: 675417 - DNA, 15 bp, Homo sapiens
ttccatgggtattgc

SEQ ID NO: 675418 - DNA, 15 bp, Homo sapiens
tccatgggtattgcc

SEQ ID NO: 675419 - DNA, 15 bp, Homo sapiens
ccatgggtattgcct

SEQ ID NO: 675420 - DNA, 15 bp, Homo sapiens
catgggtattgcctt

SEQ ID NO: 675421 - DNA, 15 bp, Homo sapiens
atgggtattgccttc

SEQ ID NO: 675422 - DNA, 15 bp, Homo sapiens
tgggtattgccttcc

SEQ ID NO: 675423 - DNA, 15 bp, Homo sapiens
gggtattgccttcct

SEQ ID NO: 675424 - DNA, 15 bp, Homo sapiens
ggtattgccttcctg

SEQ ID NO: 675425 - DNA, 15 bp, Homo sapiens
gtattgccttcctgt

SEQ ID NO: 675426 - DNA, 15 bp, Homo sapiens
tattgccttcctgtt

SEQ ID NO: 675427 - DNA, 15 bp, Homo sapiens
attgccttcctgtta

SEQ ID NO: 675428 - DNA, 15 bp, Homo sapiens
ttgccttcctgttaa

SEQ ID NO: 675429 - DNA, 15 bp, Homo sapiens
tgccttcctgttaat

SEQ ID NO: 675430 - DNA, 15 bp, Homo sapiens
gccttcctgttaata

SEQ ID NO: 675431 - DNA, 15 bp, Homo sapiens
ccttcctgttaatat

SEQ ID NO: 675432 - DNA, 15 bp, Homo sapiens
cttcctgttaatata

SEQ ID NO: 675433 - DNA, 15 bp, Homo sapiens
ttcctgttaatatat

SEQ ID NO: 675434 - DNA, 15 bp, Homo sapiens
tcctgttaatatatg

SEQ ID NO: 675435 - DNA, 15 bp, Homo sapiens
cctgttaatatatgc

SEQ ID NO: 675436 - DNA, 15 bp, Homo sapiens
ctgttaatatatgca

SEQ ID NO: 675437 - DNA, 15 bp, Homo sapiens
tgttaatatatgcat

SEQ ID NO: 675438 - DNA, 15 bp, Homo sapiens
gttaatatatgcatc

SEQ ID NO: 675439 - DNA, 15 bp, Homo sapiens
ttaatatatgcatca

SEQ ID NO: 675440 - DNA, 15 bp, Homo sapiens
taatatatgcatcat

SEQ ID NO: 675441 - DNA, 15 bp, Homo sapiens
aatatatgcatcata

SEQ ID NO: 675442 - DNA, 15 bp, Homo sapiens
atatatgcatcatat

SEQ ID NO: 675443 - DNA, 15 bp, Homo sapiens
tatatgcatcatatg

SEQ ID NO: 675444 - DNA, 15 bp, Homo sapiens
atatgcatcatatgc

SEQ ID NO: 675445 - DNA, 15 bp, Homo sapiens
tatgcatcatatgca

SEQ ID NO: 675446 - DNA, 15 bp, Homo sapiens
atgcatcatatgcac

SEQ ID NO: 675447 - DNA, 15 bp, Homo sapiens
tgcatcatatgcact

SEQ ID NO: 675448 - DNA, 15 bp, Homo sapiens
gcatcatatgcactg

SEQ ID NO: 675449 - DNA, 15 bp, Homo sapiens
catcatatgcactgg

SEQ ID NO: 675450 - DNA, 15 bp, Homo sapiens
atcatatgcactggc

SEQ ID NO: 675451 - DNA, 15 bp, Homo sapiens
tcatatgcactggcc

SEQ ID NO: 675452 - DNA, 15 bp, Homo sapiens
catatgcactggcct

SEQ ID NO: 675453 - DNA, 15 bp, Homo sapiens
atatgcactggcctt

SEQ ID NO: 675454 - DNA, 15 bp, Homo sapiens
tatgcactggccttc

SEQ ID NO: 675455 - DNA, 15 bp, Homo sapiens
atgcactggccttct

SEQ ID NO: 675456 - DNA, 15 bp, Homo sapiens
tgcactggccttctg

SEQ ID NO: 675457 - DNA, 15 bp, Homo sapiens
gcactggccttctgg

SEQ ID NO: 675458 - DNA, 15 bp, Homo sapiens
cactggccttctggt

SEQ ID NO: 675459 - DNA, 15 bp, Homo sapiens
actggccttctggta

SEQ ID NO: 675460 - DNA, 15 bp, Homo sapiens
ctggccttctggtat

SEQ ID NO: 675461 - DNA, 15 bp, Homo sapiens
tggccttctggtatg

SEQ ID NO: 675462 - DNA, 15 bp, Homo sapiens
ggccttctggtatgg

SEQ ID NO: 675463 - DNA, 15 bp, Homo sapiens
gccttctggtatgga

SEQ ID NO: 675464 - DNA, 15 bp, Homo sapiens
ccttctggtatggat

SEQ ID NO: 675465 - DNA, 15 bp, Homo sapiens
cttctggtatggatc

SEQ ID NO: 675466 - DNA, 15 bp, Homo sapiens
ttctggtatggatcc

SEQ ID NO: 675467 - DNA, 15 bp, Homo sapiens
tctggtatggatcca

SEQ ID NO: 675468 - DNA, 15 bp, Homo sapiens
ctggtatggatccac

SEQ ID NO: 675469 - DNA, 15 bp, Homo sapiens
tggtatggatccact

SEQ ID NO: 675470 - DNA, 15 bp, Homo sapiens
ggtatggatccactc

SEQ ID NO: 675471 - DNA, 15 bp, Homo sapiens
gtatggatccactct

SEQ ID NO: 675472 - DNA, 15 bp, Homo sapiens
tatggatccactcta

SEQ ID NO: 675473 - DNA, 15 bp, Homo sapiens
atggatccactctag

SEQ ID NO: 675474 - DNA, 15 bp, Homo sapiens
tggatccactctagt

SEQ ID NO: 675475 - DNA, 15 bp, Homo sapiens
ggatccactctagtc

SEQ ID NO: 675476 - DNA, 15 bp, Homo sapiens
gatccactctagtca

SEQ ID NO: 675477 - DNA, 15 bp, Homo sapiens
atccactctagtcat

SEQ ID NO: 675478 - DNA, 15 bp, Homo sapiens
tccactctagtcata

SEQ ID NO: 675479 - DNA, 15 bp, Homo sapiens
ccactctagtcatat

SEQ ID NO: 675480 - DNA, 15 bp, Homo sapiens
cactctagtcatatc

SEQ ID NO: 675481 - DNA, 15 bp, Homo sapiens
actctagtcatatca

SEQ ID NO: 675482 - DNA, 15 bp, Homo sapiens
ctctagtcatatcaa

SEQ ID NO: 675483 - DNA, 15 bp, Homo sapiens
tctagtcatatcaaa

SEQ ID NO: 675484 - DNA, 15 bp, Homo sapiens
ctagtcatatcaaaa

SEQ ID NO: 675485 - DNA, 15 bp, Homo sapiens
tagtcatatcaaaag

SEQ ID NO: 675486 - DNA, 15 bp, Homo sapiens
agtcatatcaaaaga

SEQ ID NO: 675487 - DNA, 15 bp, Homo sapiens
gtcatatcaaaagaa

SEQ ID NO: 675488 - DNA, 15 bp, Homo sapiens
tcatatcaaaagaat

SEQ ID NO: 675489 - DNA, 15 bp, Homo sapiens
catatcaaaagaata

SEQ ID NO: 675490 - DNA, 15 bp, Homo sapiens
atatcaaaagaatat

SEQ ID NO: 675491 - DNA, 15 bp, Homo sapiens
tatcaaaagaatata

SEQ ID NO: 675492 - DNA, 15 bp, Homo sapiens
atcaaaagaatatac

SEQ ID NO: 675493 - DNA, 15 bp, Homo sapiens
tcaaaagaatatact

SEQ ID NO: 675494 - DNA, 15 bp, Homo sapiens
caaaagaatatacta

SEQ ID NO: 675495 - DNA, 15 bp, Homo sapiens
aaaagaatatactat

SEQ ID NO: 675496 - DNA, 15 bp, Homo sapiens
aaagaatatactatt

SEQ ID NO: 675497 - DNA, 15 bp, Homo sapiens
aagaatatactattg

SEQ ID NO: 675498 - DNA, 15 bp, Homo sapiens
agaatatactattgg

SEQ ID NO: 675499 - DNA, 15 bp, Homo sapiens
gaatatactattgga

SEQ ID NO: 675500 - DNA, 15 bp, Homo sapiens
aatatactattggaa

SEQ ID NO: 675501 - DNA, 15 bp, Homo sapiens
atatactattggaaa

SEQ ID NO: 675502 - DNA, 15 bp, Homo sapiens
tatactattggaaat

SEQ ID NO: 675503 - DNA, 15 bp, Homo sapiens
atactattggaaatg

SEQ ID NO: 675504 - DNA, 15 bp, Homo sapiens
tactattggaaatgc

SEQ ID NO: 675505 - DNA, 15 bp, Homo sapiens
actattggaaatgca

SEQ ID NO: 675506 - DNA, 15 bp, Homo sapiens
ctattggaaatgcaa

SEQ ID NO: 675507 - DNA, 15 bp, Homo sapiens
tattggaaatgcaat

SEQ ID NO: 675508 - DNA, 15 bp, Homo sapiens
attggaaatgcaatg

SEQ ID NO: 675509 - DNA, 15 bp, Homo sapiens
ttggaaatgcaatga

SEQ ID NO: 675510 - DNA, 15 bp, Homo sapiens
tggaaatgcaatgac

SEQ ID NO: 675511 - DNA, 15 bp, Homo sapiens
ggaaatgcaatgaca

SEQ ID NO: 675512 - DNA, 15 bp, Homo sapiens
gaaatgcaatgacag

SEQ ID NO: 675513 - DNA, 15 bp, Homo sapiens
aaatgcaatgacagt

SEQ ID NO: 675514 - DNA, 15 bp, Homo sapiens
aatgcaatgacagta

SEQ ID NO: 675515 - DNA, 15 bp, Homo sapiens
atgcaatgacagtaa

SEQ ID NO: 675516 - DNA, 15 bp, Homo sapiens
tgcaatgacagtaag

SEQ ID NO: 675517 - DNA, 15 bp, Homo sapiens
gcaatgacagtaagt

SEQ ID NO: 675518 - DNA, 15 bp, Homo sapiens
caatgacagtaagta

SEQ ID NO: 675519 - DNA, 15 bp, Homo sapiens
aatgacagtaagtag

SEQ ID NO: 675520 - DNA, 15 bp, Homo sapiens
atgacagtaagtagt

SEQ ID NO: 675521 - DNA, 15 bp, Homo sapiens
tgacagtaagtagtt

SEQ ID NO: 675522 - DNA, 15 bp, Homo sapiens
gacagtaagtagttc

SEQ ID NO: 675523 - DNA, 15 bp, Homo sapiens
acagtaagtagttct

SEQ ID NO: 675524 - DNA, 15 bp, Homo sapiens
cagtaagtagttctc

SEQ ID NO: 675525 - DNA, 15 bp, Homo sapiens
agtaagtagttctcc

SEQ ID NO: 675526 - DNA, 15 bp, Homo sapiens
gtaagtagttctcct

SEQ ID NO: 675527 - DNA, 15 bp, Homo sapiens
taagtagttctccta

SEQ ID NO: 675528 - DNA, 15 bp, Homo sapiens
aagtagttctcctaa

SEQ ID NO: 675529 - DNA, 15 bp, Homo sapiens
agtagttctcctaac

SEQ ID NO: 675530 - DNA, 15 bp, Homo sapiens
gtagttctcctaaca

SEQ ID NO: 675531 - DNA, 15 bp, Homo sapiens
tagttctcctaacat

SEQ ID NO: 675532 - DNA, 15 bp, Homo sapiens
agttctcctaacatt

SEQ ID NO: 675533 - DNA, 15 bp, Homo sapiens
gttctcctaacattt

SEQ ID NO: 675534 - DNA, 15 bp, Homo sapiens
ttctcctaacattta

SEQ ID NO: 675535 - DNA, 15 bp, Homo sapiens
tctcctaacatttat

SEQ ID NO: 675536 - DNA, 15 bp, Homo sapiens
ctcctaacatttatg

SEQ ID NO: 675537 - DNA, 15 bp, Homo sapiens
tcctaacatttatga

SEQ ID NO: 675538 - DNA, 15 bp, Homo sapiens
cctaacatttatgaa

SEQ ID NO: 675539 - DNA, 15 bp, Homo sapiens
ctaacatttatgaag

SEQ ID NO: 675540 - DNA, 15 bp, Homo sapiens
taacatttatgaaga

SEQ ID NO: 675541 - DNA, 15 bp, Homo sapiens
aacatttatgaagaa

SEQ ID NO: 675542 - DNA, 15 bp, Homo sapiens
acatttatgaagaat

SEQ ID NO: 675543 - DNA, 15 bp, Homo sapiens
catttatgaagaata

SEQ ID NO: 675544 - DNA, 15 bp, Homo sapiens
atttatgaagaatat

SEQ ID NO: 675545 - DNA, 15 bp, Homo sapiens
tttatgaagaatatg

SEQ ID NO: 675546 - DNA, 15 bp, Homo sapiens
ttatgaagaatatga

SEQ ID NO: 675547 - DNA, 15 bp, Homo sapiens
tatgaagaatatgaa

SEQ ID NO: 675548 - DNA, 15 bp, Homo sapiens
atgaagaatatgaaa

SEQ ID NO: 675549 - DNA, 15 bp, Homo sapiens
tgaagaatatgaaaa

SEQ ID NO: 675550 - DNA, 15 bp, Homo sapiens
gaagaatatgaaaat

SEQ ID NO: 675551 - DNA, 15 bp, Homo sapiens
aagaatatgaaaatc

SEQ ID NO: 675552 - DNA, 15 bp, Homo sapiens
agaatatgaaaatct

SEQ ID NO: 675553 - DNA, 15 bp, Homo sapiens
gaatatgaaaatctt

SEQ ID NO: 675554 - DNA, 15 bp, Homo sapiens
aatatgaaaatctta

SEQ ID NO: 675555 - DNA, 15 bp, Homo sapiens
atatgaaaatcttat

SEQ ID NO: 675556 - DNA, 15 bp, Homo sapiens
tatgaaaatcttatt

SEQ ID NO: 675557 - DNA, 15 bp, Homo sapiens
atgaaaatcttattt

SEQ ID NO: 675558 - DNA, 15 bp, Homo sapiens
tgaaaatcttatttc

SEQ ID NO: 675559 - DNA, 15 bp, Homo sapiens
gaaaatcttatttct

SEQ ID NO: 675560 - DNA, 15 bp, Homo sapiens
aaaatcttatttctc

SEQ ID NO: 675561 - DNA, 15 bp, Homo sapiens
aaatcttatttctcc

SEQ ID NO: 675562 - DNA, 15 bp, Homo sapiens
aatcttatttctcca

SEQ ID NO: 675563 - DNA, 15 bp, Homo sapiens
atcttatttctccat

SEQ ID NO: 675564 - DNA, 15 bp, Homo sapiens
tcttatttctccatc

SEQ ID NO: 675565 - DNA, 15 bp, Homo sapiens
cttatttctccatct

SEQ ID NO: 675566 - DNA, 15 bp, Homo sapiens
ttatttctccatcta

SEQ ID NO: 675567 - DNA, 15 bp, Homo sapiens
tatttctccatctac

SEQ ID NO: 675568 - DNA, 15 bp, Homo sapiens
atttctccatctacc

SEQ ID NO: 675569 - DNA, 15 bp, Homo sapiens
tttctccatctacct

SEQ ID NO: 675570 - DNA, 15 bp, Homo sapiens
ttctccatctacctt

SEQ ID NO: 675571 - DNA, 15 bp, Homo sapiens
tctccatctaccttc

SEQ ID NO: 675572 - DNA, 15 bp, Homo sapiens
ctccatctaccttct

SEQ ID NO: 675573 - DNA, 15 bp, Homo sapiens
tccatctaccttctc

SEQ ID NO: 675574 - DNA, 15 bp, Homo sapiens
ccatctaccttctct

SEQ ID NO: 675575 - DNA, 15 bp, Homo sapiens
catctaccttctctt

SEQ ID NO: 675576 - DNA, 15 bp, Homo sapiens
atctaccttctcttt

SEQ ID NO: 675577 - DNA, 15 bp, Homo sapiens
tctaccttctctttt

SEQ ID NO: 675578 - DNA, 15 bp, Homo sapiens
ctaccttctcttttc

SEQ ID NO: 675579 - DNA, 15 bp, Homo sapiens
taccttctcttttct

SEQ ID NO: 675580 - DNA, 15 bp, Homo sapiens
accttctcttttctt

SEQ ID NO: 675581 - DNA, 15 bp, Homo sapiens
ccttctcttttcttt

SEQ ID NO: 675582 - DNA, 15 bp, Homo sapiens
cttctcttttctttg

SEQ ID NO: 675583 - DNA, 15 bp, Homo sapiens
ttctcttttctttga

SEQ ID NO: 675584 - DNA, 15 bp, Homo sapiens
tctcttttctttgat

SEQ ID NO: 675585 - DNA, 15 bp, Homo sapiens
ctcttttctttgata

SEQ ID NO: 675586 - DNA, 15 bp, Homo sapiens
tcttttctttgatat

SEQ ID NO: 675587 - DNA, 15 bp, Homo sapiens
cttttctttgatatc

SEQ ID NO: 675588 - DNA, 15 bp, Homo sapiens
ttttctttgatatcg

SEQ ID NO: 675589 - DNA, 15 bp, Homo sapiens
tttctttgatatcgc

SEQ ID NO: 675590 - DNA, 15 bp, Homo sapiens
ttctttgatatcgct

SEQ ID NO: 675591 - DNA, 15 bp, Homo sapiens
tctttgatatcgctc

SEQ ID NO: 675592 - DNA, 15 bp, Homo sapiens
ctttgatatcgctcc

SEQ ID NO: 675593 - DNA, 15 bp, Homo sapiens
tttgatatcgctcct

SEQ ID NO: 675594 - DNA, 15 bp, Homo sapiens
ttgatatcgctcctt

SEQ ID NO: 675595 - DNA, 15 bp, Homo sapiens
tgatatcgctccttt

SEQ ID NO: 675596 - DNA, 15 bp, Homo sapiens
gatatcgctcctttt

SEQ ID NO: 675597 - DNA, 15 bp, Homo sapiens
atatcgctccttttt

SEQ ID NO: 675598 - DNA, 15 bp, Homo sapiens
tatcgctcctttttg

SEQ ID NO: 675599 - DNA, 15 bp, Homo sapiens
atcgctcctttttga

SEQ ID NO: 675600 - DNA, 15 bp, Homo sapiens
tcgctcctttttgaa

SEQ ID NO: 675601 - DNA, 15 bp, Homo sapiens
cgctcctttttgaaa

SEQ ID NO: 675602 - DNA, 15 bp, Homo sapiens
gctcctttttgaaag

SEQ ID NO: 675603 - DNA, 15 bp, Homo sapiens
ctcctttttgaaaga

SEQ ID NO: 675604 - DNA, 15 bp, Homo sapiens
tcctttttgaaagat

SEQ ID NO: 675605 - DNA, 15 bp, Homo sapiens
cctttttgaaagatg

SEQ ID NO: 675606 - DNA, 15 bp, Homo sapiens
ctttttgaaagatga

SEQ ID NO: 675607 - DNA, 15 bp, Homo sapiens
tttttgaaagatgaa

SEQ ID NO: 675608 - DNA, 15 bp, Homo sapiens
ttttgaaagatgaac

SEQ ID NO: 675609 - DNA, 15 bp, Homo sapiens
tttgaaagatgaaca

SEQ ID NO: 675610 - DNA, 15 bp, Homo sapiens
ttgaaagatgaacat

SEQ ID NO: 675611 - DNA, 15 bp, Homo sapiens
tgaaagatgaacatg

SEQ ID NO: 675612 - DNA, 15 bp, Homo sapiens
gaaagatgaacatga

SEQ ID NO: 675613 - DNA, 15 bp, Homo sapiens
aaagatgaacatgat

SEQ ID NO: 675614 - DNA, 15 bp, Homo sapiens
aagatgaacatgatt

SEQ ID NO: 675615 - DNA, 15 bp, Homo sapiens
agatgaacatgatta

SEQ ID NO: 675616 - DNA, 15 bp, Homo sapiens
gatgaacatgattat

SEQ ID NO: 675617 - DNA, 15 bp, Homo sapiens
atgaacatgattata

SEQ ID NO: 675618 - DNA, 15 bp, Homo sapiens
tgaacatgattatag

SEQ ID NO: 675619 - DNA, 15 bp, Homo sapiens
gaacatgattatagg

SEQ ID NO: 675620 - DNA, 15 bp, Homo sapiens
aacatgattataggt

SEQ ID NO: 675621 - DNA, 15 bp, Homo sapiens
acatgattataggtt

SEQ ID NO: 675622 - DNA, 15 bp, Homo sapiens
catgattataggttt

SEQ ID NO: 675623 - DNA, 15 bp, Homo sapiens
atgattataggtttt

SEQ ID NO: 675624 - DNA, 15 bp, Homo sapiens
tgattataggttttt

SEQ ID NO: 675625 - DNA, 15 bp, Homo sapiens
gattataggtttttg

SEQ ID NO: 675626 - DNA, 15 bp, Homo sapiens
attataggtttttgt

SEQ ID NO: 675627 - DNA, 15 bp, Homo sapiens
ttataggtttttgtt

SEQ ID NO: 675628 - DNA, 15 bp, Homo sapiens
tataggtttttgttt

SEQ ID NO: 675629 - DNA, 15 bp, Homo sapiens
ataggtttttgtttt

SEQ ID NO: 675630 - DNA, 15 bp, Homo sapiens
taggtttttgttttt

SEQ ID NO: 675631 - DNA, 15 bp, Homo sapiens
aggtttttgtttttg

SEQ ID NO: 675632 - DNA, 15 bp, Homo sapiens
ggtttttgtttttgg

SEQ ID NO: 675633 - DNA, 15 bp, Homo sapiens
gtttttgtttttggt

SEQ ID NO: 675634 - DNA, 15 bp, Homo sapiens
tttttgtttttggtg

SEQ ID NO: 675635 - DNA, 15 bp, Homo sapiens
ttttgtttttggtga

SEQ ID NO: 675636 - DNA, 15 bp, Homo sapiens
tttgtttttggtgaa

SEQ ID NO: 675637 - DNA, 15 bp, Homo sapiens
ttgtttttggtgaat

SEQ ID NO: 675638 - DNA, 15 bp, Homo sapiens
tgtttttggtgaatc

SEQ ID NO: 675639 - DNA, 15 bp, Homo sapiens
gtttttggtgaatct

SEQ ID NO: 675640 - DNA, 15 bp, Homo sapiens
tttttggtgaatctt

SEQ ID NO: 675641 - DNA, 15 bp, Homo sapiens
ttttggtgaatcttt

SEQ ID NO: 675642 - DNA, 15 bp, Homo sapiens
tttggtgaatctttc

SEQ ID NO: 675643 - DNA, 15 bp, Homo sapiens
ttggtgaatctttcc

SEQ ID NO: 675644 - DNA, 15 bp, Homo sapiens
tggtgaatctttcca

SEQ ID NO: 675645 - DNA, 15 bp, Homo sapiens
ggtgaatctttccac

SEQ ID NO: 675646 - DNA, 15 bp, Homo sapiens
gtgaatctttccact

SEQ ID NO: 675647 - DNA, 15 bp, Homo sapiens
tgaatctttccactg

SEQ ID NO: 675648 - DNA, 15 bp, Homo sapiens
gaatctttccactgt

SEQ ID NO: 675649 - DNA, 15 bp, Homo sapiens
aatctttccactgtc

SEQ ID NO: 675650 - DNA, 15 bp, Homo sapiens
atctttccactgtcc

SEQ ID NO: 675651 - DNA, 15 bp, Homo sapiens
tctttccactgtcca

SEQ ID NO: 675652 - DNA, 15 bp, Homo sapiens
ctttccactgtccag

SEQ ID NO: 675653 - DNA, 15 bp, Homo sapiens
tttccactgtccagt

SEQ ID NO: 675654 - DNA, 15 bp, Homo sapiens
ttccactgtccagtg

SEQ ID NO: 675655 - DNA, 15 bp, Homo sapiens
tccactgtccagtgg

SEQ ID NO: 675656 - DNA, 15 bp, Homo sapiens
ccactgtccagtggg

SEQ ID NO: 675657 - DNA, 15 bp, Homo sapiens
cactgtccagtgggc

SEQ ID NO: 675658 - DNA, 15 bp, Homo sapiens
actgtccagtgggca

SEQ ID NO: 675659 - DNA, 15 bp, Homo sapiens
ctgtccagtgggcag

SEQ ID NO: 675660 - DNA, 15 bp, Homo sapiens
tgtccagtgggcaga

SEQ ID NO: 675661 - DNA, 15 bp, Homo sapiens
gtccagtgggcagag

SEQ ID NO: 675662 - DNA, 15 bp, Homo sapiens
tccagtgggcagagc

SEQ ID NO: 675663 - DNA, 15 bp, Homo sapiens
ccagtgggcagagct

SEQ ID NO: 675664 - DNA, 15 bp, Homo sapiens
cagtgggcagagctg

SEQ ID NO: 675665 - DNA, 15 bp, Homo sapiens
agtgggcagagctga

SEQ ID NO: 675666 - DNA, 15 bp, Homo sapiens
gtgggcagagctgac

SEQ ID NO: 675667 - DNA, 15 bp, Homo sapiens
tgggcagagctgact

SEQ ID NO: 675668 - DNA, 15 bp, Homo sapiens
gggcagagctgactt

SEQ ID NO: 675669 - DNA, 15 bp, Homo sapiens
ggcagagctgacttt

SEQ ID NO: 675670 - DNA, 15 bp, Homo sapiens
gcagagctgactttc

SEQ ID NO: 675671 - DNA, 15 bp, Homo sapiens
cagagctgactttct

SEQ ID NO: 675672 - DNA, 15 bp, Homo sapiens
agagctgactttcta

SEQ ID NO: 675673 - DNA, 15 bp, Homo sapiens
gagctgactttctag

SEQ ID NO: 675674 - DNA, 15 bp, Homo sapiens
agctgactttctagt

SEQ ID NO: 675675 - DNA, 15 bp, Homo sapiens
gctgactttctagta

SEQ ID NO: 675676 - DNA, 15 bp, Homo sapiens
ctgactttctagtat

SEQ ID NO: 675677 - DNA, 15 bp, Homo sapiens
tgactttctagtata

SEQ ID NO: 675678 - DNA, 15 bp, Homo sapiens
gactttctagtatat

SEQ ID NO: 675679 - DNA, 15 bp, Homo sapiens
actttctagtatata

SEQ ID NO: 675680 - DNA, 15 bp, Homo sapiens
ctttctagtatatac

SEQ ID NO: 675681 - DNA, 15 bp, Homo sapiens
tttctagtatataca

SEQ ID NO: 675682 - DNA, 15 bp, Homo sapiens
ttctagtatatacaa

SEQ ID NO: 675683 - DNA, 15 bp, Homo sapiens
tctagtatatacaag

SEQ ID NO: 675684 - DNA, 15 bp, Homo sapiens
ctagtatatacaagt

SEQ ID NO: 675685 - DNA, 15 bp, Homo sapiens
tagtatatacaagtc

SEQ ID NO: 675686 - DNA, 15 bp, Homo sapiens
agtatatacaagtca

SEQ ID NO: 675687 - DNA, 15 bp, Homo sapiens
gtatatacaagtcat

SEQ ID NO: 675688 - DNA, 15 bp, Homo sapiens
tatatacaagtcata

SEQ ID NO: 675689 - DNA, 15 bp, Homo sapiens
atatacaagtcataa

SEQ ID NO: 675690 - DNA, 15 bp, Homo sapiens
tatacaagtcataat

SEQ ID NO: 675691 - DNA, 15 bp, Homo sapiens
atacaagtcataatt

SEQ ID NO: 675692 - DNA, 15 bp, Homo sapiens
tacaagtcataatta

SEQ ID NO: 675693 - DNA, 15 bp, Homo sapiens
acaagtcataattat

SEQ ID NO: 675694 - DNA, 15 bp, Homo sapiens
caagtcataattatg

SEQ ID NO: 675695 - DNA, 15 bp, Homo sapiens
aagtcataattatga

SEQ ID NO: 675696 - DNA, 15 bp, Homo sapiens
agtcataattatgag

SEQ ID NO: 675697 - DNA, 15 bp, Homo sapiens
gtcataattatgagt

SEQ ID NO: 675698 - DNA, 15 bp, Homo sapiens
tcataattatgagtg

SEQ ID NO: 675699 - DNA, 15 bp, Homo sapiens
cataattatgagtgt

SEQ ID NO: 675700 - DNA, 15 bp, Homo sapiens
ataattatgagtgtg

SEQ ID NO: 675701 - DNA, 15 bp, Homo sapiens
taattatgagtgtgg

SEQ ID NO: 675702 - DNA, 15 bp, Homo sapiens
aattatgagtgtgga

SEQ ID NO: 675703 - DNA, 15 bp, Homo sapiens
attatgagtgtggat

SEQ ID NO: 675704 - DNA, 15 bp, Homo sapiens
ttatgagtgtggata

SEQ ID NO: 675705 - DNA, 15 bp, Homo sapiens
tatgagtgtggataa

SEQ ID NO: 675706 - DNA, 15 bp, Homo sapiens
atgagtgtggataag

SEQ ID NO: 675707 - DNA, 15 bp, Homo sapiens
tgagtgtggataaga

SEQ ID NO: 675708 - DNA, 15 bp, Homo sapiens
gagtgtggataagaa

SEQ ID NO: 675709 - DNA, 15 bp, Homo sapiens
agtgtggataagaaa

SEQ ID NO: 675710 - DNA, 15 bp, Homo sapiens
gtgtggataagaaaa

SEQ ID NO: 675711 - DNA, 15 bp, Homo sapiens
tgtggataagaaaat

SEQ ID NO: 675712 - DNA, 15 bp, Homo sapiens
gtggataagaaaata

SEQ ID NO: 675713 - DNA, 15 bp, Homo sapiens
tggataagaaaatag

SEQ ID NO: 675714 - DNA, 15 bp, Homo sapiens
ggataagaaaatagc

SEQ ID NO: 675715 - DNA, 15 bp, Homo sapiens
gataagaaaatagca

SEQ ID NO: 675716 - DNA, 15 bp, Homo sapiens
ataagaaaatagcat

SEQ ID NO: 675717 - DNA, 15 bp, Homo sapiens
taagaaaatagcatg

SEQ ID NO: 675718 - DNA, 15 bp, Homo sapiens
aagaaaatagcatgt

SEQ ID NO: 675719 - DNA, 15 bp, Homo sapiens
agaaaatagcatgtg

SEQ ID NO: 675720 - DNA, 15 bp, Homo sapiens
gaaaatagcatgtgg

SEQ ID NO: 675721 - DNA, 15 bp, Homo sapiens
aaaatagcatgtggt

SEQ ID NO: 675722 - DNA, 15 bp, Homo sapiens
aaatagcatgtggtt

SEQ ID NO: 675723 - DNA, 15 bp, Homo sapiens
aatagcatgtggtta

SEQ ID NO: 675724 - DNA, 15 bp, Homo sapiens
atagcatgtggttag

SEQ ID NO: 675725 - DNA, 15 bp, Homo sapiens
tagcatgtggttaga

SEQ ID NO: 675726 - DNA, 15 bp, Homo sapiens
agcatgtggttagac

SEQ ID NO: 675727 - DNA, 15 bp, Homo sapiens
gcatgtggttagacc

SEQ ID NO: 675728 - DNA, 15 bp, Homo sapiens
catgtggttagacca

SEQ ID NO: 675729 - DNA, 15 bp, Homo sapiens
atgtggttagaccat

SEQ ID NO: 675730 - DNA, 15 bp, Homo sapiens
tgtggttagaccatt

SEQ ID NO: 675731 - DNA, 15 bp, Homo sapiens
gtggttagaccattt

SEQ ID NO: 675732 - DNA, 15 bp, Homo sapiens
tggttagaccatttg

SEQ ID NO: 675733 - DNA, 15 bp, Homo sapiens
ggttagaccatttgt

SEQ ID NO: 675734 - DNA, 15 bp, Homo sapiens
gttagaccatttgtg

SEQ ID NO: 675735 - DNA, 15 bp, Homo sapiens
ttagaccatttgtga

SEQ ID NO: 675736 - DNA, 15 bp, Homo sapiens
tagaccatttgtgaa

SEQ ID NO: 675737 - DNA, 15 bp, Homo sapiens
agaccatttgtgaaa

SEQ ID NO: 675738 - DNA, 15 bp, Homo sapiens
gaccatttgtgaaac

SEQ ID NO: 675739 - DNA, 15 bp, Homo sapiens
accatttgtgaaaca

SEQ ID NO: 675740 - DNA, 15 bp, Homo sapiens
ccatttgtgaaacat

SEQ ID NO: 675741 - DNA, 15 bp, Homo sapiens
catttgtgaaacata

SEQ ID NO: 675742 - DNA, 15 bp, Homo sapiens
atttgtgaaacatat

SEQ ID NO: 675743 - DNA, 15 bp, Homo sapiens
tttgtgaaacatata

SEQ ID NO: 675744 - DNA, 15 bp, Homo sapiens
ttgtgaaacatatac

SEQ ID NO: 675745 - DNA, 15 bp, Homo sapiens
tgtgaaacatataca

SEQ ID NO: 675746 - DNA, 15 bp, Homo sapiens
gtgaaacatatacaa

SEQ ID NO: 675747 - DNA, 15 bp, Homo sapiens
tgaaacatatacaat

SEQ ID NO: 675748 - DNA, 15 bp, Homo sapiens
gaaacatatacaatg

SEQ ID NO: 675749 - DNA, 15 bp, Homo sapiens
aaacatatacaatgt

SEQ ID NO: 675750 - DNA, 15 bp, Homo sapiens
aacatatacaatgta

SEQ ID NO: 675751 - DNA, 15 bp, Homo sapiens
acatatacaatgtat

SEQ ID NO: 675752 - DNA, 15 bp, Homo sapiens
catatacaatgtata

SEQ ID NO: 675753 - DNA, 15 bp, Homo sapiens
atatacaatgtataa

SEQ ID NO: 675754 - DNA, 15 bp, Homo sapiens
tatacaatgtataaa

SEQ ID NO: 675755 - DNA, 15 bp, Homo sapiens
atacaatgtataaaa

SEQ ID NO: 675756 - DNA, 15 bp, Homo sapiens
tacaatgtataaaag

SEQ ID NO: 675757 - DNA, 15 bp, Homo sapiens
acaatgtataaaagg

SEQ ID NO: 675758 - DNA, 15 bp, Homo sapiens
caatgtataaaagga

SEQ ID NO: 675759 - DNA, 15 bp, Homo sapiens
aatgtataaaaggaa

SEQ ID NO: 675760 - DNA, 15 bp, Homo sapiens
atgtataaaaggaaa

SEQ ID NO: 675761 - DNA, 15 bp, Homo sapiens
tgtataaaaggaaat

SEQ ID NO: 675762 - DNA, 15 bp, Homo sapiens
gtataaaaggaaata

SEQ ID NO: 675763 - DNA, 15 bp, Homo sapiens
tataaaaggaaataa

SEQ ID NO: 675764 - DNA, 15 bp, Homo sapiens
ataaaaggaaataaa

SEQ ID NO: 675765 - DNA, 15 bp, Homo sapiens
taaaaggaaataaaa

SEQ ID NO: 675766 - DNA, 15 bp, Homo sapiens
aaaaggaaataaaaa

SEQ ID NO: 675767 - DNA, 15 bp, Homo sapiens
aaaggaaataaaaat

SEQ ID NO: 675768 - DNA, 15 bp, Homo sapiens
aaggaaataaaaatg

SEQ ID NO: 675769 - DNA, 15 bp, Homo sapiens
aggaaataaaaatgg

SEQ ID NO: 675770 - DNA, 15 bp, Homo sapiens
ggaaataaaaatggg

SEQ ID NO: 675771 - DNA, 15 bp, Homo sapiens
gaaataaaaatggga

SEQ ID NO: 675772 - DNA, 15 bp, Homo sapiens
aaataaaaatgggat

SEQ ID NO: 675773 - DNA, 15 bp, Homo sapiens
aataaaaatgggatg

SEQ ID NO: 675774 - DNA, 15 bp, Homo sapiens
ataaaaatgggatga

SEQ ID NO: 675775 - DNA, 15 bp, Homo sapiens
taaaaatgggatgaa

SEQ ID NO: 675776 - DNA, 15 bp, Homo sapiens
aaaaatgggatgaat

SEQ ID NO: 675777 - DNA, 15 bp, Homo sapiens
aaaatgggatgaatt

SEQ ID NO: 675778 - DNA, 15 bp, Homo sapiens
aaatgggatgaattt

SEQ ID NO: 675779 - DNA, 15 bp, Homo sapiens
aatgggatgaattta

SEQ ID NO: 675780 - DNA, 15 bp, Homo sapiens
atgggatgaatttag

SEQ ID NO: 675781 - DNA, 15 bp, Homo sapiens
tgggatgaatttagg

SEQ ID NO: 675782 - DNA, 15 bp, Homo sapiens
gggatgaatttagga

SEQ ID NO: 675783 - DNA, 15 bp, Homo sapiens
ggatgaatttaggaa

SEQ ID NO: 675784 - DNA, 15 bp, Homo sapiens
gatgaatttaggaat

SEQ ID NO: 675785 - DNA, 15 bp, Homo sapiens
atgaatttaggaata

SEQ ID NO: 675786 - DNA, 15 bp, Homo sapiens
tgaatttaggaataa

SEQ ID NO: 675787 - DNA, 15 bp, Homo sapiens
gaatttaggaataaa

SEQ ID NO: 675788 - DNA, 15 bp, Homo sapiens
aatttaggaataaac

SEQ ID NO: 675789 - DNA, 15 bp, Homo sapiens
atttaggaataaaca

SEQ ID NO: 675790 - DNA, 15 bp, Homo sapiens
tttaggaataaacaa

SEQ ID NO: 675791 - DNA, 15 bp, Homo sapiens
ttaggaataaacaaa

SEQ ID NO: 675792 - DNA, 15 bp, Homo sapiens
taggaataaacaaat

SEQ ID NO: 675793 - DNA, 15 bp, Homo sapiens
aggaataaacaaata

SEQ ID NO: 675794 - DNA, 15 bp, Homo sapiens
ggaataaacaaatat

SEQ ID NO: 675795 - DNA, 15 bp, Homo sapiens
gaataaacaaatatg

SEQ ID NO: 675796 - DNA, 15 bp, Homo sapiens
aataaacaaatatgg

SEQ ID NO: 675797 - DNA, 15 bp, Homo sapiens
ataaacaaatatgga

SEQ ID NO: 675798 - DNA, 15 bp, Homo sapiens
taaacaaatatggat

SEQ ID NO: 675799 - DNA, 15 bp, Homo sapiens
aaacaaatatggatg

SEQ ID NO: 675800 - DNA, 15 bp, Homo sapiens
aacaaatatggatgg

SEQ ID NO: 675801 - DNA, 15 bp, Homo sapiens
acaaatatggatggg

SEQ ID NO: 675802 - DNA, 15 bp, Homo sapiens
caaatatggatggga

SEQ ID NO: 675803 - DNA, 15 bp, Homo sapiens
aaatatggatgggag

SEQ ID NO: 675804 - DNA, 15 bp, Homo sapiens
aatatggatgggagc

SEQ ID NO: 675805 - DNA, 15 bp, Homo sapiens
atatggatgggagcc

SEQ ID NO: 675806 - DNA, 15 bp, Homo sapiens
tatggatgggagcca

SEQ ID NO: 675807 - DNA, 15 bp, Homo sapiens
atggatgggagccat

SEQ ID NO: 675808 - DNA, 15 bp, Homo sapiens
tggatgggagccatc

SEQ ID NO: 675809 - DNA, 15 bp, Homo sapiens
ggatgggagccatcc

SEQ ID NO: 675810 - DNA, 15 bp, Homo sapiens
gatgggagccatcct

SEQ ID NO: 675811 - DNA, 15 bp, Homo sapiens
atgggagccatcctc

SEQ ID NO: 675812 - DNA, 15 bp, Homo sapiens
tgggagccatcctcc

SEQ ID NO: 675813 - DNA, 15 bp, Homo sapiens
gggagccatcctccc

SEQ ID NO: 675814 - DNA, 15 bp, Homo sapiens
ggagccatcctccct

SEQ ID NO: 675815 - DNA, 15 bp, Homo sapiens
gagccatcctccctc

SEQ ID NO: 675816 - DNA, 15 bp, Homo sapiens
agccatcctccctct

SEQ ID NO: 675817 - DNA, 15 bp, Homo sapiens
gccatcctccctctg

SEQ ID NO: 675818 - DNA, 15 bp, Homo sapiens
ccatcctccctctgc

SEQ ID NO: 675819 - DNA, 15 bp, Homo sapiens
catcctccctctgcc

SEQ ID NO: 675820 - DNA, 15 bp, Homo sapiens
atcctccctctgccg

SEQ ID NO: 675821 - DNA, 15 bp, Homo sapiens
tcctccctctgccgt

SEQ ID NO: 675822 - DNA, 15 bp, Homo sapiens
cctccctctgccgtt

SEQ ID NO: 675823 - DNA, 15 bp, Homo sapiens
ctccctctgccgttg

SEQ ID NO: 675824 - DNA, 15 bp, Homo sapiens
tccctctgccgttga

SEQ ID NO: 675825 - DNA, 15 bp, Homo sapiens
ccctctgccgttgag

SEQ ID NO: 675826 - DNA, 15 bp, Homo sapiens
cctctgccgttgagt

SEQ ID NO: 675827 - DNA, 15 bp, Homo sapiens
ctctgccgttgagtt

SEQ ID NO: 675828 - DNA, 15 bp, Homo sapiens
tctgccgttgagttt

SEQ ID NO: 675829 - DNA, 15 bp, Homo sapiens
ctgccgttgagtttt

SEQ ID NO: 675830 - DNA, 15 bp, Homo sapiens
tgccgttgagtttta

SEQ ID NO: 675831 - DNA, 15 bp, Homo sapiens
gccgttgagttttat

SEQ ID NO: 675832 - DNA, 15 bp, Homo sapiens
ccgttgagttttatt

SEQ ID NO: 675833 - DNA, 15 bp, Homo sapiens
cgttgagttttattg

SEQ ID NO: 675834 - DNA, 15 bp, Homo sapiens
gttgagttttattgt

SEQ ID NO: 675835 - DNA, 15 bp, Homo sapiens
ttgagttttattgta

SEQ ID NO: 675836 - DNA, 15 bp, Homo sapiens
tgagttttattgtat

SEQ ID NO: 675837 - DNA, 15 bp, Homo sapiens
gagttttattgtata

SEQ ID NO: 675838 - DNA, 15 bp, Homo sapiens
agttttattgtataa

SEQ ID NO: 675839 - DNA, 15 bp, Homo sapiens
gttttattgtataag

SEQ ID NO: 675840 - DNA, 15 bp, Homo sapiens
ttttattgtataaga

SEQ ID NO: 675841 - DNA, 15 bp, Homo sapiens
tttattgtataagaa

SEQ ID NO: 675842 - DNA, 15 bp, Homo sapiens
ttattgtataagaaa

SEQ ID NO: 675843 - DNA, 15 bp, Homo sapiens
tattgtataagaaag

SEQ ID NO: 675844 - DNA, 15 bp, Homo sapiens
attgtataagaaagt

SEQ ID NO: 675845 - DNA, 15 bp, Homo sapiens
ttctgccatgttaat

SEQ ID NO: 675846 - DNA, 15 bp, Homo sapiens
tctgccatgttaatg

SEQ ID NO: 675847 - DNA, 15 bp, Homo sapiens
ctgccatgttaatgc

SEQ ID NO: 675848 - DNA, 15 bp, Homo sapiens
tgccatgttaatgca

SEQ ID NO: 675849 - DNA, 15 bp, Homo sapiens
gccatgttaatgcaa

SEQ ID NO: 675850 - DNA, 15 bp, Homo sapiens
ccatgttaatgcaat

SEQ ID NO: 675851 - DNA, 15 bp, Homo sapiens
catgttaatgcaatt

SEQ ID NO: 675852 - DNA, 15 bp, Homo sapiens
atgttaatgcaatta

SEQ ID NO: 675853 - DNA, 15 bp, Homo sapiens
tgttaatgcaattag

SEQ ID NO: 675854 - DNA, 15 bp, Homo sapiens
gttaatgcaattagt

SEQ ID NO: 675855 - DNA, 15 bp, Homo sapiens
ttaatgcaattagta

SEQ ID NO: 675856 - DNA, 15 bp, Homo sapiens
taatgcaattagtaa

SEQ ID NO: 675857 - DNA, 15 bp, Homo sapiens
aatgcaattagtaat

SEQ ID NO: 675858 - DNA, 15 bp, Homo sapiens
atgcaattagtaatt

SEQ ID NO: 675859 - DNA, 15 bp, Homo sapiens
tgcaattagtaattt

SEQ ID NO: 675860 - DNA, 15 bp, Homo sapiens
gcaattagtaatttg

SEQ ID NO: 675861 - DNA, 15 bp, Homo sapiens
caattagtaatttga

SEQ ID NO: 675862 - DNA, 15 bp, Homo sapiens
aattagtaatttgac

SEQ ID NO: 675863 - DNA, 15 bp, Homo sapiens
attagtaatttgact

SEQ ID NO: 675864 - DNA, 15 bp, Homo sapiens
ttagtaatttgactt

SEQ ID NO: 675865 - DNA, 15 bp, Homo sapiens
tagtaatttgacttt

SEQ ID NO: 675866 - DNA, 15 bp, Homo sapiens
agtaatttgacttta

SEQ ID NO: 675867 - DNA, 15 bp, Homo sapiens
gtaatttgactttaa

SEQ ID NO: 675868 - DNA, 15 bp, Homo sapiens
taatttgactttaat

SEQ ID NO: 675869 - DNA, 15 bp, Homo sapiens
aatttgactttaatc

SEQ ID NO: 675870 - DNA, 15 bp, Homo sapiens
atttgactttaatca

SEQ ID NO: 675871 - DNA, 15 bp, Homo sapiens
tttgactttaatcac

SEQ ID NO: 675872 - DNA, 15 bp, Homo sapiens
ttgactttaatcact

SEQ ID NO: 675873 - DNA, 15 bp, Homo sapiens
tgactttaatcactt

SEQ ID NO: 675874 - DNA, 15 bp, Homo sapiens
gactttaatcacttt

SEQ ID NO: 675875 - DNA, 15 bp, Homo sapiens
actttaatcactttt

SEQ ID NO: 675876 - DNA, 15 bp, Homo sapiens
ctttaatcacttttt

SEQ ID NO: 675877 - DNA, 15 bp, Homo sapiens
tttaatcacttttta

SEQ ID NO: 675878 - DNA, 15 bp, Homo sapiens
ttaatcactttttat

SEQ ID NO: 675879 - DNA, 15 bp, Homo sapiens
taatcactttttata

SEQ ID NO: 675880 - DNA, 15 bp, Homo sapiens
aatcactttttataa

SEQ ID NO: 675881 - DNA, 15 bp, Homo sapiens
atcactttttataat

SEQ ID NO: 675882 - DNA, 15 bp, Homo sapiens
tcactttttataata

SEQ ID NO: 675883 - DNA, 15 bp, Homo sapiens
cactttttataatag

SEQ ID NO: 675884 - DNA, 15 bp, Homo sapiens
actttttataatagt

SEQ ID NO: 675885 - DNA, 15 bp, Homo sapiens
ctttttataatagtt

SEQ ID NO: 675886 - DNA, 15 bp, Homo sapiens
tttttataatagtta

SEQ ID NO: 675887 - DNA, 15 bp, Homo sapiens
ttttataatagttaa

SEQ ID NO: 675888 - DNA, 15 bp, Homo sapiens
tttataatagttaag

SEQ ID NO: 675889 - DNA, 15 bp, Homo sapiens
ttataatagttaaga

SEQ ID NO: 675890 - DNA, 15 bp, Homo sapiens
tataatagttaagat

SEQ ID NO: 675891 - DNA, 15 bp, Homo sapiens
ataatagttaagatg

SEQ ID NO: 675892 - DNA, 15 bp, Homo sapiens
taatagttaagatgt

SEQ ID NO: 675893 - DNA, 15 bp, Homo sapiens
aatagttaagatgta

SEQ ID NO: 675894 - DNA, 15 bp, Homo sapiens
atagttaagatgtaa

SEQ ID NO: 675895 - DNA, 15 bp, Homo sapiens
tagttaagatgtaat

SEQ ID NO: 675896 - DNA, 15 bp, Homo sapiens
agttaagatgtaatt

SEQ ID NO: 675897 - DNA, 15 bp, Homo sapiens
gttaagatgtaattg

SEQ ID NO: 675898 - DNA, 15 bp, Homo sapiens
ttaagatgtaattgg

SEQ ID NO: 675899 - DNA, 15 bp, Homo sapiens
taagatgtaattggt

SEQ ID NO: 675900 - DNA, 15 bp, Homo sapiens
aagatgtaattggta

SEQ ID NO: 675901 - DNA, 15 bp, Homo sapiens
agatgtaattggtaa

SEQ ID NO: 675902 - DNA, 15 bp, Homo sapiens
gatgtaattggtaag

SEQ ID NO: 675903 - DNA, 15 bp, Homo sapiens
atgtaattggtaaga

SEQ ID NO: 675904 - DNA, 15 bp, Homo sapiens
tgtaattggtaagaa

SEQ ID NO: 675905 - DNA, 15 bp, Homo sapiens
gtaattggtaagaag

SEQ ID NO: 675906 - DNA, 15 bp, Homo sapiens
taattggtaagaagg

SEQ ID NO: 675907 - DNA, 15 bp, Homo sapiens
aattggtaagaaggg

SEQ ID NO: 675908 - DNA, 15 bp, Homo sapiens
attggtaagaagggc

SEQ ID NO: 675909 - DNA, 15 bp, Homo sapiens
ttggtaagaagggca

SEQ ID NO: 675910 - DNA, 15 bp, Homo sapiens
tggtaagaagggcag

SEQ ID NO: 675911 - DNA, 15 bp, Homo sapiens
ggtaagaagggcagt

SEQ ID NO: 675912 - DNA, 15 bp, Homo sapiens
gtaagaagggcagtt

SEQ ID NO: 675913 - DNA, 15 bp, Homo sapiens
taagaagggcagttc

SEQ ID NO: 675914 - DNA, 15 bp, Homo sapiens
aagaagggcagttcg

SEQ ID NO: 675915 - DNA, 15 bp, Homo sapiens
agaagggcagttcgt

SEQ ID NO: 675916 - DNA, 15 bp, Homo sapiens
gaagggcagttcgtt

SEQ ID NO: 675917 - DNA, 15 bp, Homo sapiens
aagggcagttcgttc

SEQ ID NO: 675918 - DNA, 15 bp, Homo sapiens
agggcagttcgttca

SEQ ID NO: 675919 - DNA, 15 bp, Homo sapiens
gggcagttcgttcac

SEQ ID NO: 675920 - DNA, 15 bp, Homo sapiens
ggcagttcgttcaca

SEQ ID NO: 675921 - DNA, 15 bp, Homo sapiens
gcagttcgttcacaa

SEQ ID NO: 675922 - DNA, 15 bp, Homo sapiens
cagttcgttcacaat

SEQ ID NO: 675923 - DNA, 15 bp, Homo sapiens
agttcgttcacaatg

SEQ ID NO: 675924 - DNA, 15 bp, Homo sapiens
gttcgttcacaatga

SEQ ID NO: 675925 - DNA, 15 bp, Homo sapiens
ttcgttcacaatgag

SEQ ID NO: 675926 - DNA, 15 bp, Homo sapiens
tcgttcacaatgaga

SEQ ID NO: 675927 - DNA, 15 bp, Homo sapiens
cgttcacaatgagag

SEQ ID NO: 675928 - DNA, 15 bp, Homo sapiens
gttcacaatgagagt

SEQ ID NO: 675929 - DNA, 15 bp, Homo sapiens
ttcacaatgagagta

SEQ ID NO: 675930 - DNA, 15 bp, Homo sapiens
tcacaatgagagtaa

SEQ ID NO: 675931 - DNA, 15 bp, Homo sapiens
cacaatgagagtaat

SEQ ID NO: 675932 - DNA, 15 bp, Homo sapiens
acaatgagagtaata

SEQ ID NO: 675933 - DNA, 15 bp, Homo sapiens
caatgagagtaataa

SEQ ID NO: 675934 - DNA, 15 bp, Homo sapiens
aatgagagtaataat

SEQ ID NO: 675935 - DNA, 15 bp, Homo sapiens
atgagagtaataatc

SEQ ID NO: 675936 - DNA, 15 bp, Homo sapiens
tgagagtaataatcc

SEQ ID NO: 675937 - DNA, 15 bp, Homo sapiens
gagagtaataatcct

SEQ ID NO: 675938 - DNA, 15 bp, Homo sapiens
agagtaataatcctg

SEQ ID NO: 675939 - DNA, 15 bp, Homo sapiens
gagtaataatcctgt

SEQ ID NO: 675940 - DNA, 15 bp, Homo sapiens
agtaataatcctgtg

SEQ ID NO: 675941 - DNA, 15 bp, Homo sapiens
gtaataatcctgtgc

SEQ ID NO: 675942 - DNA, 15 bp, Homo sapiens
taataatcctgtgct

SEQ ID NO: 675943 - DNA, 15 bp, Homo sapiens
aataatcctgtgctt

SEQ ID NO: 675944 - DNA, 15 bp, Homo sapiens
ataatcctgtgcttt

SEQ ID NO: 675945 - DNA, 15 bp, Homo sapiens
taatcctgtgcttta

SEQ ID NO: 675946 - DNA, 15 bp, Homo sapiens
aatcctgtgctttat

SEQ ID NO: 675947 - DNA, 15 bp, Homo sapiens
atcctgtgctttatt

SEQ ID NO: 675948 - DNA, 15 bp, Homo sapiens
tcctgtgctttatta

SEQ ID NO: 675949 - DNA, 15 bp, Homo sapiens
cctgtgctttattat

SEQ ID NO: 675950 - DNA, 15 bp, Homo sapiens
ctgtgctttattatc

SEQ ID NO: 675951 - DNA, 15 bp, Homo sapiens
tgtgctttattatct

SEQ ID NO: 675952 - DNA, 15 bp, Homo sapiens
gtgctttattatcta

SEQ ID NO: 675953 - DNA, 15 bp, Homo sapiens
tgctttattatctat

SEQ ID NO: 675954 - DNA, 15 bp, Homo sapiens
gctttattatctata

SEQ ID NO: 675955 - DNA, 15 bp, Homo sapiens
ctttattatctataa

SEQ ID NO: 675956 - DNA, 15 bp, Homo sapiens
tttattatctataaa

SEQ ID NO: 675957 - DNA, 15 bp, Homo sapiens
ttattatctataaag

SEQ ID NO: 675958 - DNA, 15 bp, Homo sapiens
tattatctataaagg

SEQ ID NO: 675959 - DNA, 15 bp, Homo sapiens
attatctataaaggt

SEQ ID NO: 675960 - DNA, 15 bp, Homo sapiens
ttatctataaaggta

SEQ ID NO: 675961 - DNA, 15 bp, Homo sapiens
tatctataaaggtaa

SEQ ID NO: 675962 - DNA, 15 bp, Homo sapiens
atctataaaggtaac

SEQ ID NO: 675963 - DNA, 15 bp, Homo sapiens
tctataaaggtaact

SEQ ID NO: 675964 - DNA, 15 bp, Homo sapiens
ctataaaggtaactt

SEQ ID NO: 675965 - DNA, 15 bp, Homo sapiens
tataaaggtaactta

SEQ ID NO: 675966 - DNA, 15 bp, Homo sapiens
ataaaggtaacttaa

SEQ ID NO: 675967 - DNA, 15 bp, Homo sapiens
taaaggtaacttaaa

SEQ ID NO: 675968 - DNA, 15 bp, Homo sapiens
aaaggtaacttaaac

SEQ ID NO: 675969 - DNA, 15 bp, Homo sapiens
aaggtaacttaaact

SEQ ID NO: 675970 - DNA, 15 bp, Homo sapiens
aggtaacttaaactc

SEQ ID NO: 675971 - DNA, 15 bp, Homo sapiens
ggtaacttaaactca

SEQ ID NO: 675972 - DNA, 15 bp, Homo sapiens
gtaacttaaactcac

SEQ ID NO: 675973 - DNA, 15 bp, Homo sapiens
taacttaaactcaca

SEQ ID NO: 675974 - DNA, 15 bp, Homo sapiens
aacttaaactcacat

SEQ ID NO: 675975 - DNA, 15 bp, Homo sapiens
acttaaactcacatc

SEQ ID NO: 675976 - DNA, 15 bp, Homo sapiens
cttaaactcacatct

SEQ ID NO: 675977 - DNA, 15 bp, Homo sapiens
ttaaactcacatctg

SEQ ID NO: 675978 - DNA, 15 bp, Homo sapiens
taaactcacatctga

SEQ ID NO: 675979 - DNA, 15 bp, Homo sapiens
aaactcacatctgag

SEQ ID NO: 675980 - DNA, 15 bp, Homo sapiens
aactcacatctgagt

SEQ ID NO: 675981 - DNA, 15 bp, Homo sapiens
actcacatctgagtg

SEQ ID NO: 675982 - DNA, 15 bp, Homo sapiens
ctcacatctgagtgt

SEQ ID NO: 675983 - DNA, 15 bp, Homo sapiens
tcacatctgagtgtt

SEQ ID NO: 675984 - DNA, 15 bp, Homo sapiens
cacatctgagtgttc

SEQ ID NO: 675985 - DNA, 15 bp, Homo sapiens
acatctgagtgttct

SEQ ID NO: 675986 - DNA, 15 bp, Homo sapiens
catctgagtgttctt

SEQ ID NO: 675987 - DNA, 15 bp, Homo sapiens
atctgagtgttcttt

SEQ ID NO: 675988 - DNA, 15 bp, Homo sapiens
tctgagtgttctttg

SEQ ID NO: 675989 - DNA, 15 bp, Homo sapiens
ctgagtgttctttgt

SEQ ID NO: 675990 - DNA, 15 bp, Homo sapiens
tgagtgttctttgta

SEQ ID NO: 675991 - DNA, 15 bp, Homo sapiens
gagtgttctttgtat

SEQ ID NO: 675992 - DNA, 15 bp, Homo sapiens
agtgttctttgtatg

SEQ ID NO: 675993 - DNA, 15 bp, Homo sapiens
gtgttctttgtatga

SEQ ID NO: 675994 - DNA, 15 bp, Homo sapiens
tgttctttgtatgac

SEQ ID NO: 675995 - DNA, 15 bp, Homo sapiens
gttctttgtatgaca

SEQ ID NO: 675996 - DNA, 15 bp, Homo sapiens
ttctttgtatgacac

SEQ ID NO: 675997 - DNA, 15 bp, Homo sapiens
tctttgtatgacaca

SEQ ID NO: 675998 - DNA, 15 bp, Homo sapiens
ctttgtatgacacaa

SEQ ID NO: 675999 - DNA, 15 bp, Homo sapiens
tttgtatgacacaag

SEQ ID NO: 676000 - DNA, 15 bp, Homo sapiens
ttgtatgacacaaga

SEQ ID NO: 676001 - DNA, 15 bp, Homo sapiens
tgtatgacacaagat

SEQ ID NO: 676002 - DNA, 15 bp, Homo sapiens
gtatgacacaagatg

SEQ ID NO: 676003 - DNA, 15 bp, Homo sapiens
tatgacacaagatgc

SEQ ID NO: 676004 - DNA, 15 bp, Homo sapiens
atgacacaagatgct

SEQ ID NO: 676005 - DNA, 15 bp, Homo sapiens
tgacacaagatgcta

SEQ ID NO: 676006 - DNA, 15 bp, Homo sapiens
gacacaagatgctac

SEQ ID NO: 676007 - DNA, 15 bp, Homo sapiens
acacaagatgctaca

SEQ ID NO: 676008 - DNA, 15 bp, Homo sapiens
cacaagatgctacac

SEQ ID NO: 676009 - DNA, 15 bp, Homo sapiens
acaagatgctacacg

SEQ ID NO: 676010 - DNA, 15 bp, Homo sapiens
caagatgctacacgt

SEQ ID NO: 676011 - DNA, 15 bp, Homo sapiens
aagatgctacacgtt

SEQ ID NO: 676012 - DNA, 15 bp, Homo sapiens
agatgctacacgttg

SEQ ID NO: 676013 - DNA, 15 bp, Homo sapiens
gatgctacacgttgt

SEQ ID NO: 676014 - DNA, 15 bp, Homo sapiens
atgctacacgttgta

SEQ ID NO: 676015 - DNA, 15 bp, Homo sapiens
tgctacacgttgtaa

SEQ ID NO: 676016 - DNA, 15 bp, Homo sapiens
gctacacgttgtaat

SEQ ID NO: 676017 - DNA, 15 bp, Homo sapiens
ctacacgttgtaata

SEQ ID NO: 676018 - DNA, 15 bp, Homo sapiens
tacacgttgtaatat

SEQ ID NO: 676019 - DNA, 15 bp, Homo sapiens
acacgttgtaatata

SEQ ID NO: 676020 - DNA, 15 bp, Homo sapiens
cacgttgtaatatac

SEQ ID NO: 676021 - DNA, 15 bp, Homo sapiens
acgttgtaatataca

SEQ ID NO: 676022 - DNA, 15 bp, Homo sapiens
cgttgtaatatacaa

SEQ ID NO: 676023 - DNA, 15 bp, Homo sapiens
gttgtaatatacaag

SEQ ID NO: 676024 - DNA, 15 bp, Homo sapiens
ttgtaatatacaagc

SEQ ID NO: 676025 - DNA, 15 bp, Homo sapiens
tgtaatatacaagca

SEQ ID NO: 676026 - DNA, 15 bp, Homo sapiens
gtaatatacaagcag

SEQ ID NO: 676027 - DNA, 15 bp, Homo sapiens
taatatacaagcagc

SEQ ID NO: 676028 - DNA, 15 bp, Homo sapiens
aatatacaagcagct

SEQ ID NO: 676029 - DNA, 15 bp, Homo sapiens
atatacaagcagctg

SEQ ID NO: 676030 - DNA, 15 bp, Homo sapiens
tatacaagcagctgt

SEQ ID NO: 676031 - DNA, 15 bp, Homo sapiens
atacaagcagctgtg

SEQ ID NO: 676032 - DNA, 15 bp, Homo sapiens
tacaagcagctgtgt

SEQ ID NO: 676033 - DNA, 15 bp, Homo sapiens
acaagcagctgtgta

SEQ ID NO: 676034 - DNA, 15 bp, Homo sapiens
caagcagctgtgtag

SEQ ID NO: 676035 - DNA, 15 bp, Homo sapiens
aagcagctgtgtagg

SEQ ID NO: 676036 - DNA, 15 bp, Homo sapiens
agcagctgtgtaggt

SEQ ID NO: 676037 - DNA, 15 bp, Homo sapiens
gcagctgtgtaggta

SEQ ID NO: 676038 - DNA, 15 bp, Homo sapiens
cagctgtgtaggtaa

SEQ ID NO: 676039 - DNA, 15 bp, Homo sapiens
agctgtgtaggtaaa

SEQ ID NO: 676040 - DNA, 15 bp, Homo sapiens
gctgtgtaggtaaag

SEQ ID NO: 676041 - DNA, 15 bp, Homo sapiens
ctgtgtaggtaaaga

SEQ ID NO: 676042 - DNA, 15 bp, Homo sapiens
tgtgtaggtaaagag

SEQ ID NO: 676043 - DNA, 15 bp, Homo sapiens
gtgtaggtaaagagg

SEQ ID NO: 676044 - DNA, 15 bp, Homo sapiens
tgtaggtaaagaggc

SEQ ID NO: 676045 - DNA, 15 bp, Homo sapiens
gtaggtaaagaggct

SEQ ID NO: 676046 - DNA, 15 bp, Homo sapiens
taggtaaagaggcta

SEQ ID NO: 676047 - DNA, 15 bp, Homo sapiens
aggtaaagaggctag

SEQ ID NO: 676048 - DNA, 15 bp, Homo sapiens
ggtaaagaggctagg

SEQ ID NO: 676049 - DNA, 15 bp, Homo sapiens
gtaaagaggctagga

SEQ ID NO: 676050 - DNA, 15 bp, Homo sapiens
taaagaggctaggac

SEQ ID NO: 676051 - DNA, 15 bp, Homo sapiens
aaagaggctaggact

SEQ ID NO: 676052 - DNA, 15 bp, Homo sapiens
aagaggctaggactt

SEQ ID NO: 676053 - DNA, 15 bp, Homo sapiens
agaggctaggactta

SEQ ID NO: 676054 - DNA, 15 bp, Homo sapiens
gaggctaggacttaa

SEQ ID NO: 676055 - DNA, 15 bp, Homo sapiens
aggctaggacttaac

SEQ ID NO: 676056 - DNA, 15 bp, Homo sapiens
ggctaggacttaaca

SEQ ID NO: 676057 - DNA, 15 bp, Homo sapiens
gctaggacttaacac

SEQ ID NO: 676058 - DNA, 15 bp, Homo sapiens
ctaggacttaacaca

SEQ ID NO: 676059 - DNA, 15 bp, Homo sapiens
taggacttaacacag

SEQ ID NO: 676060 - DNA, 15 bp, Homo sapiens
aggacttaacacagt

SEQ ID NO: 676061 - DNA, 15 bp, Homo sapiens
ggacttaacacagtc

SEQ ID NO: 676062 - DNA, 15 bp, Homo sapiens
gacttaacacagtct

SEQ ID NO: 676063 - DNA, 15 bp, Homo sapiens
acttaacacagtctt

SEQ ID NO: 676064 - DNA, 15 bp, Homo sapiens
cttaacacagtcttt

SEQ ID NO: 676065 - DNA, 15 bp, Homo sapiens
ttaacacagtctttc

SEQ ID NO: 676066 - DNA, 15 bp, Homo sapiens
taacacagtctttcc

SEQ ID NO: 676067 - DNA, 15 bp, Homo sapiens
aacacagtctttcca

SEQ ID NO: 676068 - DNA, 15 bp, Homo sapiens
acacagtctttccag

SEQ ID NO: 676069 - DNA, 15 bp, Homo sapiens
cacagtctttccagg

SEQ ID NO: 676070 - DNA, 15 bp, Homo sapiens
acagtctttccagga

SEQ ID NO: 676071 - DNA, 15 bp, Homo sapiens
cagtctttccaggac

SEQ ID NO: 676072 - DNA, 15 bp, Homo sapiens
agtctttccaggact

SEQ ID NO: 676073 - DNA, 15 bp, Homo sapiens
gtctttccaggactt

SEQ ID NO: 676074 - DNA, 15 bp, Homo sapiens
tctttccaggacttt

SEQ ID NO: 676075 - DNA, 15 bp, Homo sapiens
ctttccaggactttc

SEQ ID NO: 676076 - DNA, 15 bp, Homo sapiens
tttccaggactttcc

SEQ ID NO: 676077 - DNA, 15 bp, Homo sapiens
ttccaggactttccc

SEQ ID NO: 676078 - DNA, 15 bp, Homo sapiens
tccaggactttccca

SEQ ID NO: 676079 - DNA, 15 bp, Homo sapiens
ccaggactttcccag

SEQ ID NO: 676080 - DNA, 15 bp, Homo sapiens
caggactttcccagg

SEQ ID NO: 676081 - DNA, 15 bp, Homo sapiens
aggactttcccaggt

SEQ ID NO: 676082 - DNA, 15 bp, Homo sapiens
ggactttcccaggta

SEQ ID NO: 676083 - DNA, 15 bp, Homo sapiens
gactttcccaggtat

SEQ ID NO: 676084 - DNA, 15 bp, Homo sapiens
actttcccaggtatt

SEQ ID NO: 676085 - DNA, 15 bp, Homo sapiens
ctttcccaggtattt

SEQ ID NO: 676086 - DNA, 15 bp, Homo sapiens
tttcccaggtatttc

SEQ ID NO: 676087 - DNA, 15 bp, Homo sapiens
ttcccaggtatttca

SEQ ID NO: 676088 - DNA, 15 bp, Homo sapiens
tcccaggtatttcat

SEQ ID NO: 676089 - DNA, 15 bp, Homo sapiens
cccaggtatttcatg

SEQ ID NO: 676090 - DNA, 15 bp, Homo sapiens
ccaggtatttcatgt

SEQ ID NO: 676091 - DNA, 15 bp, Homo sapiens
caggtatttcatgtt

SEQ ID NO: 676092 - DNA, 15 bp, Homo sapiens
aggtatttcatgttc

SEQ ID NO: 676093 - DNA, 15 bp, Homo sapiens
ggtatttcatgttct

SEQ ID NO: 676094 - DNA, 15 bp, Homo sapiens
gtatttcatgttctg

SEQ ID NO: 676095 - DNA, 15 bp, Homo sapiens
tatttcatgttctga

SEQ ID NO: 676096 - DNA, 15 bp, Homo sapiens
atttcatgttctgat

SEQ ID NO: 676097 - DNA, 15 bp, Homo sapiens
tttcatgttctgata

SEQ ID NO: 676098 - DNA, 15 bp, Homo sapiens
ttcatgttctgataa

SEQ ID NO: 676099 - DNA, 15 bp, Homo sapiens
tcatgttctgataaa

SEQ ID NO: 676100 - DNA, 15 bp, Homo sapiens
catgttctgataaaa

SEQ ID NO: 676101 - DNA, 15 bp, Homo sapiens
atgttctgataaaat

SEQ ID NO: 676102 - DNA, 15 bp, Homo sapiens
tgttctgataaaatt

SEQ ID NO: 676103 - DNA, 15 bp, Homo sapiens
gttctgataaaattg

SEQ ID NO: 676104 - DNA, 15 bp, Homo sapiens
ttctgataaaattgc

SEQ ID NO: 676105 - DNA, 15 bp, Homo sapiens
tctgataaaattgct

SEQ ID NO: 676106 - DNA, 15 bp, Homo sapiens
ctgataaaattgctg

SEQ ID NO: 676107 - DNA, 15 bp, Homo sapiens
tgataaaattgctgt

SEQ ID NO: 676108 - DNA, 15 bp, Homo sapiens
gataaaattgctgtg

SEQ ID NO: 676109 - DNA, 15 bp, Homo sapiens
ataaaattgctgtgc

SEQ ID NO: 676110 - DNA, 15 bp, Homo sapiens
taaaattgctgtgcc

SEQ ID NO: 676111 - DNA, 15 bp, Homo sapiens
aaaattgctgtgccc

SEQ ID NO: 676112 - DNA, 15 bp, Homo sapiens
aaattgctgtgccca

SEQ ID NO: 676113 - DNA, 15 bp, Homo sapiens
aattgctgtgcccag

SEQ ID NO: 676114 - DNA, 15 bp, Homo sapiens
attgctgtgcccagt

SEQ ID NO: 676115 - DNA, 15 bp, Homo sapiens
ttgctgtgcccagtg

SEQ ID NO: 676116 - DNA, 15 bp, Homo sapiens
tgctgtgcccagtga

SEQ ID NO: 676117 - DNA, 15 bp, Homo sapiens
gctgtgcccagtgag

SEQ ID NO: 676118 - DNA, 15 bp, Homo sapiens
ctgtgcccagtgagt

SEQ ID NO: 676119 - DNA, 15 bp, Homo sapiens
tgtgcccagtgagtg

SEQ ID NO: 676120 - DNA, 15 bp, Homo sapiens
gtgcccagtgagtga

SEQ ID NO: 676121 - DNA, 15 bp, Homo sapiens
tgcccagtgagtgag

SEQ ID NO: 676122 - DNA, 15 bp, Homo sapiens
gcccagtgagtgaga

SEQ ID NO: 676123 - DNA, 15 bp, Homo sapiens
cccagtgagtgagat

SEQ ID NO: 676124 - DNA, 15 bp, Homo sapiens
ccagtgagtgagata

SEQ ID NO: 676125 - DNA, 15 bp, Homo sapiens
cagtgagtgagataa

SEQ ID NO: 676126 - DNA, 15 bp, Homo sapiens
agtgagtgagataaa

SEQ ID NO: 676127 - DNA, 15 bp, Homo sapiens
gtgagtgagataaag

SEQ ID NO: 676128 - DNA, 15 bp, Homo sapiens
tgagtgagataaaga

SEQ ID NO: 676129 - DNA, 15 bp, Homo sapiens
gagtgagataaagaa

SEQ ID NO: 676130 - DNA, 15 bp, Homo sapiens
agtgagataaagaaa

SEQ ID NO: 676131 - DNA, 15 bp, Homo sapiens
gtgagataaagaaag

SEQ ID NO: 676132 - DNA, 15 bp, Homo sapiens
tgagataaagaaagt

SEQ ID NO: 676133 - DNA, 15 bp, Homo sapiens
gagataaagaaagtg

SEQ ID NO: 676134 - DNA, 15 bp, Homo sapiens
agataaagaaagtga

SEQ ID NO: 676135 - DNA, 15 bp, Homo sapiens
gataaagaaagtgaa

SEQ ID NO: 676136 - DNA, 15 bp, Homo sapiens
ataaagaaagtgaac

SEQ ID NO: 676137 - DNA, 15 bp, Homo sapiens
taaagaaagtgaact

SEQ ID NO: 676138 - DNA, 15 bp, Homo sapiens
aaagaaagtgaactt

SEQ ID NO: 676139 - DNA, 15 bp, Homo sapiens
aagaaagtgaactta

SEQ ID NO: 676140 - DNA, 15 bp, Homo sapiens
agaaagtgaacttaa

SEQ ID NO: 676141 - DNA, 15 bp, Homo sapiens
gaaagtgaacttaag

SEQ ID NO: 676142 - DNA, 15 bp, Homo sapiens
aaagtgaacttaaga

SEQ ID NO: 676143 - DNA, 15 bp, Homo sapiens
aagtgaacttaagaa

SEQ ID NO: 676144 - DNA, 15 bp, Homo sapiens
agtgaacttaagaaa

SEQ ID NO: 676145 - DNA, 15 bp, Homo sapiens
gtgaacttaagaaac

SEQ ID NO: 676146 - DNA, 15 bp, Homo sapiens
tgaacttaagaaact

SEQ ID NO: 676147 - DNA, 15 bp, Homo sapiens
gaacttaagaaactg

SEQ ID NO: 676148 - DNA, 15 bp, Homo sapiens
aacttaagaaactgc

SEQ ID NO: 676149 - DNA, 15 bp, Homo sapiens
acttaagaaactgcc

SEQ ID NO: 676150 - DNA, 15 bp, Homo sapiens
cttaagaaactgcca

SEQ ID NO: 676151 - DNA, 15 bp, Homo sapiens
ttaagaaactgccag

SEQ ID NO: 676152 - DNA, 15 bp, Homo sapiens
taagaaactgccagg

SEQ ID NO: 676153 - DNA, 15 bp, Homo sapiens
aagaaactgccaggg

SEQ ID NO: 676154 - DNA, 15 bp, Homo sapiens
agaaactgccagggt

SEQ ID NO: 676155 - DNA, 15 bp, Homo sapiens
gaaactgccagggtt

SEQ ID NO: 676156 - DNA, 15 bp, Homo sapiens
aaactgccagggttt

SEQ ID NO: 676157 - DNA, 15 bp, Homo sapiens
aactgccagggtttg

SEQ ID NO: 676158 - DNA, 15 bp, Homo sapiens
actgccagggtttgc

SEQ ID NO: 676159 - DNA, 15 bp, Homo sapiens
ctgccagggtttgcc

SEQ ID NO: 676160 - DNA, 15 bp, Homo sapiens
tgccagggtttgcca

SEQ ID NO: 676161 - DNA, 15 bp, Homo sapiens
gccagggtttgccat

SEQ ID NO: 676162 - DNA, 15 bp, Homo sapiens
ccagggtttgccatc

SEQ ID NO: 676163 - DNA, 15 bp, Homo sapiens
cagggtttgccatca

SEQ ID NO: 676164 - DNA, 15 bp, Homo sapiens
agggtttgccatcag

SEQ ID NO: 676165 - DNA, 15 bp, Homo sapiens
gggtttgccatcagg

SEQ ID NO: 676166 - DNA, 15 bp, Homo sapiens
ggtttgccatcaggg

SEQ ID NO: 676167 - DNA, 15 bp, Homo sapiens
gtttgccatcagggc

SEQ ID NO: 676168 - DNA, 15 bp, Homo sapiens
tttgccatcagggct

SEQ ID NO: 676169 - DNA, 15 bp, Homo sapiens
ttgccatcagggctg

SEQ ID NO: 676170 - DNA, 15 bp, Homo sapiens
tgccatcagggctgc

SEQ ID NO: 676171 - DNA, 15 bp, Homo sapiens
gccatcagggctgcc

SEQ ID NO: 676172 - DNA, 15 bp, Homo sapiens
ccatcagggctgccc

SEQ ID NO: 676173 - DNA, 15 bp, Homo sapiens
catcagggctgccca

SEQ ID NO: 676174 - DNA, 15 bp, Homo sapiens
atcagggctgcccac

SEQ ID NO: 676175 - DNA, 15 bp, Homo sapiens
tcagggctgcccact

SEQ ID NO: 676176 - DNA, 15 bp, Homo sapiens
cagggctgcccactg

SEQ ID NO: 676177 - DNA, 15 bp, Homo sapiens
agggctgcccactga

SEQ ID NO: 676178 - DNA, 15 bp, Homo sapiens
gggctgcccactgaa

SEQ ID NO: 676179 - DNA, 15 bp, Homo sapiens
ggctgcccactgaaa

SEQ ID NO: 676180 - DNA, 15 bp, Homo sapiens
gctgcccactgaaac

SEQ ID NO: 676181 - DNA, 15 bp, Homo sapiens
ctgcccactgaaact

SEQ ID NO: 676182 - DNA, 15 bp, Homo sapiens
tgcccactgaaactt

SEQ ID NO: 676183 - DNA, 15 bp, Homo sapiens
gcccactgaaacttt

SEQ ID NO: 676184 - DNA, 15 bp, Homo sapiens
cccactgaaactttg

SEQ ID NO: 676185 - DNA, 15 bp, Homo sapiens
ccactgaaactttgg

SEQ ID NO: 676186 - DNA, 15 bp, Homo sapiens
cactgaaactttggg

SEQ ID NO: 676187 - DNA, 15 bp, Homo sapiens
actgaaactttgggt

SEQ ID NO: 676188 - DNA, 15 bp, Homo sapiens
ctgaaactttgggta

SEQ ID NO: 676189 - DNA, 15 bp, Homo sapiens
tgaaactttgggtag

SEQ ID NO: 676190 - DNA, 15 bp, Homo sapiens
gaaactttgggtaga

SEQ ID NO: 676191 - DNA, 15 bp, Homo sapiens
aaactttgggtagaa

SEQ ID NO: 676192 - DNA, 15 bp, Homo sapiens
aactttgggtagaaa

SEQ ID NO: 676193 - DNA, 15 bp, Homo sapiens
actttgggtagaaac

SEQ ID NO: 676194 - DNA, 15 bp, Homo sapiens
ctttgggtagaaact

SEQ ID NO: 676195 - DNA, 15 bp, Homo sapiens
tttgggtagaaactg

SEQ ID NO: 676196 - DNA, 15 bp, Homo sapiens
ttgggtagaaactgt

SEQ ID NO: 676197 - DNA, 15 bp, Homo sapiens
tgggtagaaactgtt

SEQ ID NO: 676198 - DNA, 15 bp, Homo sapiens
gggtagaaactgttg

SEQ ID NO: 676199 - DNA, 15 bp, Homo sapiens
ggtagaaactgttgc

SEQ ID NO: 676200 - DNA, 15 bp, Homo sapiens
gtagaaactgttgct

SEQ ID NO: 676201 - DNA, 15 bp, Homo sapiens
tagaaactgttgcta

SEQ ID NO: 676202 - DNA, 15 bp, Homo sapiens
agaaactgttgctaa

SEQ ID NO: 676203 - DNA, 15 bp, Homo sapiens
gaaactgttgctaaa

SEQ ID NO: 676204 - DNA, 15 bp, Homo sapiens
aaactgttgctaaat

SEQ ID NO: 676205 - DNA, 15 bp, Homo sapiens
aactgttgctaaatt

SEQ ID NO: 676206 - DNA, 15 bp, Homo sapiens
actgttgctaaattt

SEQ ID NO: 676207 - DNA, 15 bp, Homo sapiens
ctgttgctaaatttc

SEQ ID NO: 676208 - DNA, 15 bp, Homo sapiens
tgttgctaaatttcc

SEQ ID NO: 676209 - DNA, 15 bp, Homo sapiens
gttgctaaatttcca

SEQ ID NO: 676210 - DNA, 15 bp, Homo sapiens
ttgctaaatttccaa

SEQ ID NO: 676211 - DNA, 15 bp, Homo sapiens
tgctaaatttccaag

SEQ ID NO: 676212 - DNA, 15 bp, Homo sapiens
gctaaatttccaagc

SEQ ID NO: 676213 - DNA, 15 bp, Homo sapiens
ctaaatttccaagcc

SEQ ID NO: 676214 - DNA, 15 bp, Homo sapiens
taaatttccaagcct

SEQ ID NO: 676215 - DNA, 15 bp, Homo sapiens
aaatttccaagcctt

SEQ ID NO: 676216 - DNA, 15 bp, Homo sapiens
aatttccaagccttt

SEQ ID NO: 676217 - DNA, 15 bp, Homo sapiens
atttccaagccttta

SEQ ID NO: 676218 - DNA, 15 bp, Homo sapiens
tttccaagcctttag

SEQ ID NO: 676219 - DNA, 15 bp, Homo sapiens
ttccaagcctttaga

SEQ ID NO: 676220 - DNA, 15 bp, Homo sapiens
tccaagcctttagag

SEQ ID NO: 676221 - DNA, 15 bp, Homo sapiens
ccaagcctttagagt

SEQ ID NO: 676222 - DNA, 15 bp, Homo sapiens
caagcctttagagtc

SEQ ID NO: 676223 - DNA, 15 bp, Homo sapiens
aagcctttagagtct

SEQ ID NO: 676224 - DNA, 15 bp, Homo sapiens
agcctttagagtctt

SEQ ID NO: 676225 - DNA, 15 bp, Homo sapiens
gcctttagagtcttt

SEQ ID NO: 676226 - DNA, 15 bp, Homo sapiens
cctttagagtctttt

SEQ ID NO: 676227 - DNA, 15 bp, Homo sapiens
ctttagagtcttttg

SEQ ID NO: 676228 - DNA, 15 bp, Homo sapiens
tttagagtcttttgg

SEQ ID NO: 676229 - DNA, 15 bp, Homo sapiens
ttagagtcttttgga

SEQ ID NO: 676230 - DNA, 15 bp, Homo sapiens
tagagtcttttggac

SEQ ID NO: 676231 - DNA, 15 bp, Homo sapiens
agagtcttttggaca

SEQ ID NO: 676232 - DNA, 15 bp, Homo sapiens
gagtcttttggacac

SEQ ID NO: 676233 - DNA, 15 bp, Homo sapiens
agtcttttggacact

SEQ ID NO: 676234 - DNA, 15 bp, Homo sapiens
gtcttttggacactg

SEQ ID NO: 676235 - DNA, 15 bp, Homo sapiens
tcttttggacactgg

SEQ ID NO: 676236 - DNA, 15 bp, Homo sapiens
cttttggacactggc

SEQ ID NO: 676237 - DNA, 15 bp, Homo sapiens
ttttggacactggct

SEQ ID NO: 676238 - DNA, 15 bp, Homo sapiens
tttggacactggctt

SEQ ID NO: 676239 - DNA, 15 bp, Homo sapiens
ttggacactggcttg

SEQ ID NO: 676240 - DNA, 15 bp, Homo sapiens
tggacactggcttga

SEQ ID NO: 676241 - DNA, 15 bp, Homo sapiens
ggacactggcttgat

SEQ ID NO: 676242 - DNA, 15 bp, Homo sapiens
gacactggcttgatt

SEQ ID NO: 676243 - DNA, 15 bp, Homo sapiens
acactggcttgattc

SEQ ID NO: 676244 - DNA, 15 bp, Homo sapiens
cactggcttgattcc

SEQ ID NO: 676245 - DNA, 15 bp, Homo sapiens
actggcttgattcca

SEQ ID NO: 676246 - DNA, 15 bp, Homo sapiens
ctggcttgattccag

SEQ ID NO: 676247 - DNA, 15 bp, Homo sapiens
tggcttgattccagc

SEQ ID NO: 676248 - DNA, 15 bp, Homo sapiens
ggcttgattccagct

SEQ ID NO: 676249 - DNA, 15 bp, Homo sapiens
gcttgattccagctt

SEQ ID NO: 676250 - DNA, 15 bp, Homo sapiens
cttgattccagcttc

SEQ ID NO: 676251 - DNA, 15 bp, Homo sapiens
ttgattccagcttca

SEQ ID NO: 676252 - DNA, 15 bp, Homo sapiens
tgattccagcttcag

SEQ ID NO: 676253 - DNA, 15 bp, Homo sapiens
gattccagcttcaga

SEQ ID NO: 676254 - DNA, 15 bp, Homo sapiens
attccagcttcagaa

SEQ ID NO: 676255 - DNA, 15 bp, Homo sapiens
ttccagcttcagaat

SEQ ID NO: 676256 - DNA, 15 bp, Homo sapiens
tccagcttcagaata

SEQ ID NO: 676257 - DNA, 15 bp, Homo sapiens
ccagcttcagaataa

SEQ ID NO: 676258 - DNA, 15 bp, Homo sapiens
cagcttcagaataag

SEQ ID NO: 676259 - DNA, 15 bp, Homo sapiens
agcttcagaataagc

SEQ ID NO: 676260 - DNA, 15 bp, Homo sapiens
gcttcagaataagca

SEQ ID NO: 676261 - DNA, 15 bp, Homo sapiens
cttcagaataagcag

SEQ ID NO: 676262 - DNA, 15 bp, Homo sapiens
ttcagaataagcagt

SEQ ID NO: 676263 - DNA, 15 bp, Homo sapiens
tcagaataagcagtt

SEQ ID NO: 676264 - DNA, 15 bp, Homo sapiens
cagaataagcagttg

SEQ ID NO: 676265 - DNA, 15 bp, Homo sapiens
agaataagcagttgg

SEQ ID NO: 676266 - DNA, 15 bp, Homo sapiens
gaataagcagttggg

SEQ ID NO: 676267 - DNA, 15 bp, Homo sapiens
aataagcagttggga

SEQ ID NO: 676268 - DNA, 15 bp, Homo sapiens
ataagcagttgggaa

SEQ ID NO: 676269 - DNA, 15 bp, Homo sapiens
taagcagttgggaaa

SEQ ID NO: 676270 - DNA, 15 bp, Homo sapiens
aagcagttgggaaag

SEQ ID NO: 676271 - DNA, 15 bp, Homo sapiens
agcagttgggaaagc

SEQ ID NO: 676272 - DNA, 15 bp, Homo sapiens
gcagttgggaaagct

SEQ ID NO: 676273 - DNA, 15 bp, Homo sapiens
cagttgggaaagcta

SEQ ID NO: 676274 - DNA, 15 bp, Homo sapiens
agttgggaaagctaa

SEQ ID NO: 676275 - DNA, 15 bp, Homo sapiens
gttgggaaagctaaa

SEQ ID NO: 676276 - DNA, 15 bp, Homo sapiens
ttgggaaagctaaat

SEQ ID NO: 676277 - DNA, 15 bp, Homo sapiens
tgggaaagctaaatg

SEQ ID NO: 676278 - DNA, 15 bp, Homo sapiens
gggaaagctaaatga

SEQ ID NO: 676279 - DNA, 15 bp, Homo sapiens
ggaaagctaaatgaa

SEQ ID NO: 676280 - DNA, 15 bp, Homo sapiens
gaaagctaaatgaat

SEQ ID NO: 676281 - DNA, 15 bp, Homo sapiens
aaagctaaatgaata

SEQ ID NO: 676282 - DNA, 15 bp, Homo sapiens
aagctaaatgaatat

SEQ ID NO: 676283 - DNA, 15 bp, Homo sapiens
agctaaatgaatatc

SEQ ID NO: 676284 - DNA, 15 bp, Homo sapiens
gctaaatgaatatct

SEQ ID NO: 676285 - DNA, 15 bp, Homo sapiens
ctaaatgaatatctt

SEQ ID NO: 676286 - DNA, 15 bp, Homo sapiens
taaatgaatatctta

SEQ ID NO: 676287 - DNA, 15 bp, Homo sapiens
aaatgaatatcttaa

SEQ ID NO: 676288 - DNA, 15 bp, Homo sapiens
aatgaatatcttaaa

SEQ ID NO: 676289 - DNA, 15 bp, Homo sapiens
atgaatatcttaaag

SEQ ID NO: 676290 - DNA, 15 bp, Homo sapiens
tgaatatcttaaaga

SEQ ID NO: 676291 - DNA, 15 bp, Homo sapiens
gaatatcttaaagaa

SEQ ID NO: 676292 - DNA, 15 bp, Homo sapiens
aatatcttaaagaaa

SEQ ID NO: 676293 - DNA, 15 bp, Homo sapiens
atatcttaaagaaat

SEQ ID NO: 676294 - DNA, 15 bp, Homo sapiens
tatcttaaagaaatc

SEQ ID NO: 676295 - DNA, 15 bp, Homo sapiens
atcttaaagaaatca

SEQ ID NO: 676296 - DNA, 15 bp, Homo sapiens
tcttaaagaaatcag

SEQ ID NO: 676297 - DNA, 15 bp, Homo sapiens
cttaaagaaatcaga

SEQ ID NO: 676298 - DNA, 15 bp, Homo sapiens
ttaaagaaatcagaa

SEQ ID NO: 676299 - DNA, 15 bp, Homo sapiens
taaagaaatcagaaa

SEQ ID NO: 676300 - DNA, 15 bp, Homo sapiens
aaagaaatcagaaac

SEQ ID NO: 676301 - DNA, 15 bp, Homo sapiens
aagaaatcagaaact

SEQ ID NO: 676302 - DNA, 15 bp, Homo sapiens
agaaatcagaaacta

SEQ ID NO: 676303 - DNA, 15 bp, Homo sapiens
gaaatcagaaactaa

SEQ ID NO: 676304 - DNA, 15 bp, Homo sapiens
aaatcagaaactaag

SEQ ID NO: 676305 - DNA, 15 bp, Homo sapiens
aatcagaaactaagt

SEQ ID NO: 676306 - DNA, 15 bp, Homo sapiens
atcagaaactaagtt

SEQ ID NO: 676307 - DNA, 15 bp, Homo sapiens
tcagaaactaagtta

SEQ ID NO: 676308 - DNA, 15 bp, Homo sapiens
cagaaactaagttag

SEQ ID NO: 676309 - DNA, 15 bp, Homo sapiens
agaaactaagttaga

SEQ ID NO: 676310 - DNA, 15 bp, Homo sapiens
gaaactaagttagat

SEQ ID NO: 676311 - DNA, 15 bp, Homo sapiens
aaactaagttagata

SEQ ID NO: 676312 - DNA, 15 bp, Homo sapiens
aactaagttagataa

SEQ ID NO: 676313 - DNA, 15 bp, Homo sapiens
actaagttagataac

SEQ ID NO: 676314 - DNA, 15 bp, Homo sapiens
ctaagttagataaca

SEQ ID NO: 676315 - DNA, 15 bp, Homo sapiens
taagttagataacaa

SEQ ID NO: 676316 - DNA, 15 bp, Homo sapiens
aagttagataacaac

SEQ ID NO: 676317 - DNA, 15 bp, Homo sapiens
agttagataacaact

SEQ ID NO: 676318 - DNA, 15 bp, Homo sapiens
gttagataacaactc

SEQ ID NO: 676319 - DNA, 15 bp, Homo sapiens
ttagataacaactca

SEQ ID NO: 676320 - DNA, 15 bp, Homo sapiens
tagataacaactcat

SEQ ID NO: 676321 - DNA, 15 bp, Homo sapiens
agataacaactcatg

SEQ ID NO: 676322 - DNA, 15 bp, Homo sapiens
gataacaactcatgg

SEQ ID NO: 676323 - DNA, 15 bp, Homo sapiens
ataacaactcatggt

SEQ ID NO: 676324 - DNA, 15 bp, Homo sapiens
taacaactcatggta

SEQ ID NO: 676325 - DNA, 15 bp, Homo sapiens
aacaactcatggtaa

SEQ ID NO: 676326 - DNA, 15 bp, Homo sapiens
acaactcatggtaat

SEQ ID NO: 676327 - DNA, 15 bp, Homo sapiens
caactcatggtaatg

SEQ ID NO: 676328 - DNA, 15 bp, Homo sapiens
aactcatggtaatga

SEQ ID NO: 676329 - DNA, 15 bp, Homo sapiens
actcatggtaatgac

SEQ ID NO: 676330 - DNA, 15 bp, Homo sapiens
ctcatggtaatgact

SEQ ID NO: 676331 - DNA, 15 bp, Homo sapiens
tcatggtaatgactt

SEQ ID NO: 676332 - DNA, 15 bp, Homo sapiens
catggtaatgacttt

SEQ ID NO: 676333 - DNA, 15 bp, Homo sapiens
atggtaatgactttt

SEQ ID NO: 676334 - DNA, 15 bp, Homo sapiens
tggtaatgacttttt

SEQ ID NO: 676335 - DNA, 15 bp, Homo sapiens
ggtaatgactttttg

SEQ ID NO: 676336 - DNA, 15 bp, Homo sapiens
gtaatgactttttgt

SEQ ID NO: 676337 - DNA, 15 bp, Homo sapiens
taatgactttttgtc

SEQ ID NO: 676338 - DNA, 15 bp, Homo sapiens
aatgactttttgtct

SEQ ID NO: 676339 - DNA, 15 bp, Homo sapiens
atgactttttgtcta

SEQ ID NO: 676340 - DNA, 15 bp, Homo sapiens
tgactttttgtctaa

SEQ ID NO: 676341 - DNA, 15 bp, Homo sapiens
gactttttgtctaat

SEQ ID NO: 676342 - DNA, 15 bp, Homo sapiens
actttttgtctaatc

SEQ ID NO: 676343 - DNA, 15 bp, Homo sapiens
ctttttgtctaatct

SEQ ID NO: 676344 - DNA, 15 bp, Homo sapiens
tttttgtctaatctc

SEQ ID NO: 676345 - DNA, 15 bp, Homo sapiens
ttttgtctaatctca

SEQ ID NO: 676346 - DNA, 15 bp, Homo sapiens
tttgtctaatctcac

SEQ ID NO: 676347 - DNA, 15 bp, Homo sapiens
ttgtctaatctcacc

SEQ ID NO: 676348 - DNA, 15 bp, Homo sapiens
tgtctaatctcacct

SEQ ID NO: 676349 - DNA, 15 bp, Homo sapiens
gtctaatctcaccta

SEQ ID NO: 676350 - DNA, 15 bp, Homo sapiens
tctaatctcacctat

SEQ ID NO: 676351 - DNA, 15 bp, Homo sapiens
ctaatctcacctata

SEQ ID NO: 676352 - DNA, 15 bp, Homo sapiens
taatctcacctatac

SEQ ID NO: 676353 - DNA, 15 bp, Homo sapiens
aatctcacctatacc

SEQ ID NO: 676354 - DNA, 15 bp, Homo sapiens
atctcacctataccc

SEQ ID NO: 676355 - DNA, 15 bp, Homo sapiens
tctcacctatacccc

SEQ ID NO: 676356 - DNA, 15 bp, Homo sapiens
ctcacctatacccct

SEQ ID NO: 676357 - DNA, 15 bp, Homo sapiens
tcacctataccccta

SEQ ID NO: 676358 - DNA, 15 bp, Homo sapiens
cacctatacccctat

SEQ ID NO: 676359 - DNA, 15 bp, Homo sapiens
acctatacccctatc

SEQ ID NO: 676360 - DNA, 15 bp, Homo sapiens
cctatacccctatct

SEQ ID NO: 676361 - DNA, 15 bp, Homo sapiens
ctatacccctatctc

SEQ ID NO: 676362 - DNA, 15 bp, Homo sapiens
tatacccctatctct

SEQ ID NO: 676363 - DNA, 15 bp, Homo sapiens
atacccctatctctc

SEQ ID NO: 676364 - DNA, 15 bp, Homo sapiens
tacccctatctctca

SEQ ID NO: 676365 - DNA, 15 bp, Homo sapiens
acccctatctctcac

SEQ ID NO: 676366 - DNA, 15 bp, Homo sapiens
cccctatctctcacc

SEQ ID NO: 676367 - DNA, 15 bp, Homo sapiens
ccctatctctcacct

SEQ ID NO: 676368 - DNA, 15 bp, Homo sapiens
cctatctctcacctt

SEQ ID NO: 676369 - DNA, 15 bp, Homo sapiens
ctatctctcaccttc

SEQ ID NO: 676370 - DNA, 15 bp, Homo sapiens
tatctctcaccttca

SEQ ID NO: 676371 - DNA, 15 bp, Homo sapiens
atctctcaccttcat

SEQ ID NO: 676372 - DNA, 15 bp, Homo sapiens
tctctcaccttcatt

SEQ ID NO: 676373 - DNA, 15 bp, Homo sapiens
ctctcaccttcattt

SEQ ID NO: 676374 - DNA, 15 bp, Homo sapiens
tctcaccttcatttc

SEQ ID NO: 676375 - DNA, 15 bp, Homo sapiens
ctcaccttcatttca

SEQ ID NO: 676376 - DNA, 15 bp, Homo sapiens
tcaccttcatttcac

SEQ ID NO: 676377 - DNA, 15 bp, Homo sapiens
caccttcatttcaca

SEQ ID NO: 676378 - DNA, 15 bp, Homo sapiens
accttcatttcacac

SEQ ID NO: 676379 - DNA, 15 bp, Homo sapiens
ccttcatttcacacc

SEQ ID NO: 676380 - DNA, 15 bp, Homo sapiens
cttcatttcacacca

SEQ ID NO: 676381 - DNA, 15 bp, Homo sapiens
ttcatttcacaccat

SEQ ID NO: 676382 - DNA, 15 bp, Homo sapiens
tcatttcacaccata

SEQ ID NO: 676383 - DNA, 15 bp, Homo sapiens
catttcacaccataa

SEQ ID NO: 676384 - DNA, 15 bp, Homo sapiens
atttcacaccataat

SEQ ID NO: 676385 - DNA, 15 bp, Homo sapiens
tttcacaccataata

SEQ ID NO: 676386 - DNA, 15 bp, Homo sapiens
ttcacaccataataa

SEQ ID NO: 676387 - DNA, 15 bp, Homo sapiens
tcacaccataataac

SEQ ID NO: 676388 - DNA, 15 bp, Homo sapiens
cacaccataataact

SEQ ID NO: 676389 - DNA, 15 bp, Homo sapiens
acaccataataactt

SEQ ID NO: 676390 - DNA, 15 bp, Homo sapiens
caccataataacttg

SEQ ID NO: 676391 - DNA, 15 bp, Homo sapiens
accataataacttgc

SEQ ID NO: 676392 - DNA, 15 bp, Homo sapiens
ccataataacttgct

SEQ ID NO: 676393 - DNA, 15 bp, Homo sapiens
cataataacttgcta

SEQ ID NO: 676394 - DNA, 15 bp, Homo sapiens
ataataacttgctat

SEQ ID NO: 676395 - DNA, 15 bp, Homo sapiens
taataacttgctatc

SEQ ID NO: 676396 - DNA, 15 bp, Homo sapiens
aataacttgctatca

SEQ ID NO: 676397 - DNA, 15 bp, Homo sapiens
ataacttgctatcaa

SEQ ID NO: 676398 - DNA, 15 bp, Homo sapiens
taacttgctatcaat

SEQ ID NO: 676399 - DNA, 15 bp, Homo sapiens
aacttgctatcaata

SEQ ID NO: 676400 - DNA, 15 bp, Homo sapiens
acttgctatcaatat

SEQ ID NO: 676401 - DNA, 15 bp, Homo sapiens
cttgctatcaatatt

SEQ ID NO: 676402 - DNA, 15 bp, Homo sapiens
ttgctatcaatatta

SEQ ID NO: 676403 - DNA, 15 bp, Homo sapiens
tgctatcaatattaa

SEQ ID NO: 676404 - DNA, 15 bp, Homo sapiens
gctatcaatattaac

SEQ ID NO: 676405 - DNA, 15 bp, Homo sapiens
ctatcaatattaact

SEQ ID NO: 676406 - DNA, 15 bp, Homo sapiens
tatcaatattaactg

SEQ ID NO: 676407 - DNA, 15 bp, Homo sapiens
atcaatattaactgg

SEQ ID NO: 676408 - DNA, 15 bp, Homo sapiens
tcaatattaactggc

SEQ ID NO: 676409 - DNA, 15 bp, Homo sapiens
caatattaactggca

SEQ ID NO: 676410 - DNA, 15 bp, Homo sapiens
aatattaactggcac

SEQ ID NO: 676411 - DNA, 15 bp, Homo sapiens
atattaactggcacc

SEQ ID NO: 676412 - DNA, 15 bp, Homo sapiens
tattaactggcacca

SEQ ID NO: 676413 - DNA, 15 bp, Homo sapiens
attaactggcaccag

SEQ ID NO: 676414 - DNA, 15 bp, Homo sapiens
ttaactggcaccaga

SEQ ID NO: 676415 - DNA, 15 bp, Homo sapiens
taactggcaccagaa

SEQ ID NO: 676416 - DNA, 15 bp, Homo sapiens
aactggcaccagaac

SEQ ID NO: 676417 - DNA, 15 bp, Homo sapiens
actggcaccagaact

SEQ ID NO: 676418 - DNA, 15 bp, Homo sapiens
ctggcaccagaacta

SEQ ID NO: 676419 - DNA, 15 bp, Homo sapiens
tggcaccagaactat

SEQ ID NO: 676420 - DNA, 15 bp, Homo sapiens
ggcaccagaactata

SEQ ID NO: 676421 - DNA, 15 bp, Homo sapiens
gcaccagaactatac

SEQ ID NO: 676422 - DNA, 15 bp, Homo sapiens
caccagaactatacc

SEQ ID NO: 676423 - DNA, 15 bp, Homo sapiens
accagaactatacca

SEQ ID NO: 676424 - DNA, 15 bp, Homo sapiens
ccagaactataccaa

SEQ ID NO: 676425 - DNA, 15 bp, Homo sapiens
cagaactataccaaa

SEQ ID NO: 676426 - DNA, 15 bp, Homo sapiens
agaactataccaaat

SEQ ID NO: 676427 - DNA, 15 bp, Homo sapiens
gaactataccaaata

SEQ ID NO: 676428 - DNA, 15 bp, Homo sapiens
aactataccaaatat

SEQ ID NO: 676429 - DNA, 15 bp, Homo sapiens
actataccaaatatg

SEQ ID NO: 676430 - DNA, 15 bp, Homo sapiens
ctataccaaatatga

SEQ ID NO: 676431 - DNA, 15 bp, Homo sapiens
tataccaaatatgaa

SEQ ID NO: 676432 - DNA, 15 bp, Homo sapiens
ataccaaatatgaat

SEQ ID NO: 676433 - DNA, 15 bp, Homo sapiens
taccaaatatgaatt

SEQ ID NO: 676434 - DNA, 15 bp, Homo sapiens
accaaatatgaattt

SEQ ID NO: 676435 - DNA, 15 bp, Homo sapiens
ccaaatatgaatttt

SEQ ID NO: 676436 - DNA, 15 bp, Homo sapiens
caaatatgaatttta

SEQ ID NO: 676437 - DNA, 15 bp, Homo sapiens
aaatatgaattttat

SEQ ID NO: 676438 - DNA, 15 bp, Homo sapiens
aatatgaattttatg

SEQ ID NO: 676439 - DNA, 15 bp, Homo sapiens
atatgaattttatgt

SEQ ID NO: 676440 - DNA, 15 bp, Homo sapiens
tatgaattttatgtt

SEQ ID NO: 676441 - DNA, 15 bp, Homo sapiens
atgaattttatgttt

SEQ ID NO: 676442 - DNA, 15 bp, Homo sapiens
tgaattttatgtttc

SEQ ID NO: 676443 - DNA, 15 bp, Homo sapiens
gaattttatgtttct

SEQ ID NO: 676444 - DNA, 15 bp, Homo sapiens
aattttatgtttctc

SEQ ID NO: 676445 - DNA, 15 bp, Homo sapiens
attttatgtttctct

SEQ ID NO: 676446 - DNA, 15 bp, Homo sapiens
ttttatgtttctcta

SEQ ID NO: 676447 - DNA, 15 bp, Homo sapiens
tttatgtttctctac

SEQ ID NO: 676448 - DNA, 15 bp, Homo sapiens
ttatgtttctctact

SEQ ID NO: 676449 - DNA, 15 bp, Homo sapiens
tatgtttctctacta

SEQ ID NO: 676450 - DNA, 15 bp, Homo sapiens
atgtttctctactac

SEQ ID NO: 676451 - DNA, 15 bp, Homo sapiens
tgtttctctactaca

SEQ ID NO: 676452 - DNA, 15 bp, Homo sapiens
gtttctctactacag

SEQ ID NO: 676453 - DNA, 15 bp, Homo sapiens
tttctctactacagt

SEQ ID NO: 676454 - DNA, 15 bp, Homo sapiens
ttctctactacagtc

SEQ ID NO: 676455 - DNA, 15 bp, Homo sapiens
tctctactacagtct

SEQ ID NO: 676456 - DNA, 15 bp, Homo sapiens
ctctactacagtctt

SEQ ID NO: 676457 - DNA, 15 bp, Homo sapiens
tctactacagtcttt

SEQ ID NO: 676458 - DNA, 15 bp, Homo sapiens
ctactacagtctttg

SEQ ID NO: 676459 - DNA, 15 bp, Homo sapiens
tactacagtctttgg

SEQ ID NO: 676460 - DNA, 15 bp, Homo sapiens
actacagtctttggt

SEQ ID NO: 676461 - DNA, 15 bp, Homo sapiens
ctacagtctttggta

SEQ ID NO: 676462 - DNA, 15 bp, Homo sapiens
tacagtctttggtaa

SEQ ID NO: 676463 - DNA, 15 bp, Homo sapiens
acagtctttggtaaa

SEQ ID NO: 676464 - DNA, 15 bp, Homo sapiens
cagtctttggtaaag

SEQ ID NO: 676465 - DNA, 15 bp, Homo sapiens
agtctttggtaaagt

SEQ ID NO: 676466 - DNA, 15 bp, Homo sapiens
gtctttggtaaagtt

SEQ ID NO: 676467 - DNA, 15 bp, Homo sapiens
tctttggtaaagttt

SEQ ID NO: 676468 - DNA, 15 bp, Homo sapiens
ctttggtaaagtttc

SEQ ID NO: 676469 - DNA, 15 bp, Homo sapiens
tttggtaaagtttcc

SEQ ID NO: 676470 - DNA, 15 bp, Homo sapiens
ttggtaaagtttcct

SEQ ID NO: 676471 - DNA, 15 bp, Homo sapiens
tggtaaagtttcctt

SEQ ID NO: 676472 - DNA, 15 bp, Homo sapiens
ggtaaagtttccttg

SEQ ID NO: 676473 - DNA, 15 bp, Homo sapiens
gtaaagtttccttga

SEQ ID NO: 676474 - DNA, 15 bp, Homo sapiens
taaagtttccttgaa

SEQ ID NO: 676475 - DNA, 15 bp, Homo sapiens
aaagtttccttgaaa

SEQ ID NO: 676476 - DNA, 15 bp, Homo sapiens
aagtttccttgaaat

SEQ ID NO: 676477 - DNA, 15 bp, Homo sapiens
agtttccttgaaata

SEQ ID NO: 676478 - DNA, 15 bp, Homo sapiens
gtttccttgaaataa

SEQ ID NO: 676479 - DNA, 15 bp, Homo sapiens
tttccttgaaataat

SEQ ID NO: 676480 - DNA, 15 bp, Homo sapiens
ttccttgaaataata

SEQ ID NO: 676481 - DNA, 15 bp, Homo sapiens
tccttgaaataatat

SEQ ID NO: 676482 - DNA, 15 bp, Homo sapiens
ccttgaaataatatt

SEQ ID NO: 676483 - DNA, 15 bp, Homo sapiens
cttgaaataatattt

SEQ ID NO: 676484 - DNA, 15 bp, Homo sapiens
ttgaaataatatttc

SEQ ID NO: 676485 - DNA, 15 bp, Homo sapiens
tgaaataatatttct

SEQ ID NO: 676486 - DNA, 15 bp, Homo sapiens
gaaataatatttctt

SEQ ID NO: 676487 - DNA, 15 bp, Homo sapiens
aataatatttcttat

SEQ ID NO: 676488 - DNA, 15 bp, Homo sapiens
ataatatttcttatt

SEQ ID NO: 676489 - DNA, 15 bp, Homo sapiens
taatatttcttattc

SEQ ID NO: 676490 - DNA, 15 bp, Homo sapiens
atatttcttattcca

SEQ ID NO: 676491 - DNA, 15 bp, Homo sapiens
tatttcttattccaa

SEQ ID NO: 676492 - DNA, 15 bp, Homo sapiens
atttcttattccaat

SEQ ID NO: 676493 - DNA, 15 bp, Homo sapiens
tttcttattccaata

SEQ ID NO: 676494 - DNA, 15 bp, Homo sapiens
ttcttattccaataa

SEQ ID NO: 676495 - DNA, 15 bp, Homo sapiens
tcttattccaataat

SEQ ID NO: 676496 - DNA, 15 bp, Homo sapiens
cttattccaataatt

SEQ ID NO: 676497 - DNA, 15 bp, Homo sapiens
ttattccaataatta

SEQ ID NO: 676498 - DNA, 15 bp, Homo sapiens
tattccaataattat

SEQ ID NO: 676499 - DNA, 15 bp, Homo sapiens
attccaataattatc

SEQ ID NO: 676500 - DNA, 15 bp, Homo sapiens
ttccaataattatca

SEQ ID NO: 676501 - DNA, 15 bp, Homo sapiens
tccaataattatcag

SEQ ID NO: 676502 - DNA, 15 bp, Homo sapiens
ccaataattatcagg

SEQ ID NO: 676503 - DNA, 15 bp, Homo sapiens
caataattatcaggc

SEQ ID NO: 676504 - DNA, 15 bp, Homo sapiens
aataattatcaggcc

SEQ ID NO: 676505 - DNA, 15 bp, Homo sapiens
ataattatcaggcca

SEQ ID NO: 676506 - DNA, 15 bp, Homo sapiens
taattatcaggccaa

SEQ ID NO: 676507 - DNA, 15 bp, Homo sapiens
aattatcaggccaat

SEQ ID NO: 676508 - DNA, 15 bp, Homo sapiens
attatcaggccaatt

SEQ ID NO: 676509 - DNA, 15 bp, Homo sapiens
ttatcaggccaatta

SEQ ID NO: 676510 - DNA, 15 bp, Homo sapiens
tatcaggccaattat

SEQ ID NO: 676511 - DNA, 15 bp, Homo sapiens
atcaggccaattata

SEQ ID NO: 676512 - DNA, 15 bp, Homo sapiens
tcaggccaattataa

SEQ ID NO: 676513 - DNA, 15 bp, Homo sapiens
caggccaattataat

SEQ ID NO: 676514 - DNA, 15 bp, Homo sapiens
aggccaattataata

SEQ ID NO: 676515 - DNA, 15 bp, Homo sapiens
ggccaattataatag

SEQ ID NO: 676516 - DNA, 15 bp, Homo sapiens
gccaattataatagc

SEQ ID NO: 676517 - DNA, 15 bp, Homo sapiens
ccaattataatagca

SEQ ID NO: 676518 - DNA, 15 bp, Homo sapiens
caattataatagcaa

SEQ ID NO: 676519 - DNA, 15 bp, Homo sapiens
aattataatagcaac

SEQ ID NO: 676520 - DNA, 15 bp, Homo sapiens
attataatagcaaca

SEQ ID NO: 676521 - DNA, 15 bp, Homo sapiens
ttataatagcaacat

SEQ ID NO: 676522 - DNA, 15 bp, Homo sapiens
tataatagcaacatt

SEQ ID NO: 676523 - DNA, 15 bp, Homo sapiens
ataatagcaacattt

SEQ ID NO: 676524 - DNA, 15 bp, Homo sapiens
taatagcaacattta

SEQ ID NO: 676525 - DNA, 15 bp, Homo sapiens
aatagcaacatttaa

SEQ ID NO: 676526 - DNA, 15 bp, Homo sapiens
atagcaacatttaaa

SEQ ID NO: 676527 - DNA, 15 bp, Homo sapiens
tagcaacatttaaac

SEQ ID NO: 676528 - DNA, 15 bp, Homo sapiens
agcaacatttaaaca

SEQ ID NO: 676529 - DNA, 15 bp, Homo sapiens
gcaacatttaaacat

SEQ ID NO: 676530 - DNA, 15 bp, Homo sapiens
caacatttaaacatt

SEQ ID NO: 676531 - DNA, 15 bp, Homo sapiens
aacatttaaacattt

SEQ ID NO: 676532 - DNA, 15 bp, Homo sapiens
acatttaaacattta

SEQ ID NO: 676533 - DNA, 15 bp, Homo sapiens
catttaaacatttat

SEQ ID NO: 676534 - DNA, 15 bp, Homo sapiens
atttaaacatttatt

SEQ ID NO: 676535 - DNA, 15 bp, Homo sapiens
tttaaacatttattc

SEQ ID NO: 676536 - DNA, 15 bp, Homo sapiens
ttaaacatttattca

SEQ ID NO: 676537 - DNA, 15 bp, Homo sapiens
taaacatttattcag

SEQ ID NO: 676538 - DNA, 15 bp, Homo sapiens
aaacatttattcagg

SEQ ID NO: 676539 - DNA, 15 bp, Homo sapiens
aacatttattcagga

SEQ ID NO: 676540 - DNA, 15 bp, Homo sapiens
acatttattcaggat

SEQ ID NO: 676541 - DNA, 15 bp, Homo sapiens
catttattcaggata

SEQ ID NO: 676542 - DNA, 15 bp, Homo sapiens
atttattcaggataa

SEQ ID NO: 676543 - DNA, 15 bp, Homo sapiens
tttattcaggataaa

SEQ ID NO: 676544 - DNA, 15 bp, Homo sapiens
ttattcaggataaat

SEQ ID NO: 676545 - DNA, 15 bp, Homo sapiens
tattcaggataaatt

SEQ ID NO: 676546 - DNA, 15 bp, Homo sapiens
attcaggataaattt

SEQ ID NO: 676547 - DNA, 15 bp, Homo sapiens
ttcaggataaatttg

SEQ ID NO: 676548 - DNA, 15 bp, Homo sapiens
tcaggataaatttga

SEQ ID NO: 676549 - DNA, 15 bp, Homo sapiens
caggataaatttgaa

SEQ ID NO: 676550 - DNA, 15 bp, Homo sapiens
aggataaatttgaag

SEQ ID NO: 676551 - DNA, 15 bp, Homo sapiens
ggataaatttgaagg

SEQ ID NO: 676552 - DNA, 15 bp, Homo sapiens
gataaatttgaagga

SEQ ID NO: 676553 - DNA, 15 bp, Homo sapiens
ataaatttgaaggaa

SEQ ID NO: 676554 - DNA, 15 bp, Homo sapiens
taaatttgaaggaaa

SEQ ID NO: 676555 - DNA, 15 bp, Homo sapiens
aaatttgaaggaaat

SEQ ID NO: 676556 - DNA, 15 bp, Homo sapiens
aatttgaaggaaata

SEQ ID NO: 676557 - DNA, 15 bp, Homo sapiens
atttgaaggaaatat

SEQ ID NO: 676558 - DNA, 15 bp, Homo sapiens
tttgaaggaaatata

SEQ ID NO: 676559 - DNA, 15 bp, Homo sapiens
ttgaaggaaatataa

SEQ ID NO: 676560 - DNA, 15 bp, Homo sapiens
tgaaggaaatataac

SEQ ID NO: 676561 - DNA, 15 bp, Homo sapiens
gaaggaaatataaca

SEQ ID NO: 676562 - DNA, 15 bp, Homo sapiens
aaggaaatataacat

SEQ ID NO: 676563 - DNA, 15 bp, Homo sapiens
aggaaatataacatt

SEQ ID NO: 676564 - DNA, 15 bp, Homo sapiens
ggaaatataacattt

SEQ ID NO: 676565 - DNA, 15 bp, Homo sapiens
gaaatataacattta

SEQ ID NO: 676566 - DNA, 15 bp, Homo sapiens
aaatataacatttaa

SEQ ID NO: 676567 - DNA, 15 bp, Homo sapiens
aatataacatttaat

SEQ ID NO: 676568 - DNA, 15 bp, Homo sapiens
atataacatttaatg

SEQ ID NO: 676569 - DNA, 15 bp, Homo sapiens
tataacatttaatga

SEQ ID NO: 676570 - DNA, 15 bp, Homo sapiens
ataacatttaatgaa

SEQ ID NO: 676571 - DNA, 15 bp, Homo sapiens
taacatttaatgaag

SEQ ID NO: 676572 - DNA, 15 bp, Homo sapiens
aacatttaatgaagt

SEQ ID NO: 676573 - DNA, 15 bp, Homo sapiens
acatttaatgaagtc

SEQ ID NO: 676574 - DNA, 15 bp, Homo sapiens
catttaatgaagtcg

SEQ ID NO: 676575 - DNA, 15 bp, Homo sapiens
atttaatgaagtcgt

SEQ ID NO: 676576 - DNA, 15 bp, Homo sapiens
tttaatgaagtcgtg

SEQ ID NO: 676577 - DNA, 15 bp, Homo sapiens
ttaatgaagtcgtgt

SEQ ID NO: 676578 - DNA, 15 bp, Homo sapiens
taatgaagtcgtgtt

SEQ ID NO: 676579 - DNA, 15 bp, Homo sapiens
aatgaagtcgtgttc

SEQ ID NO: 676580 - DNA, 15 bp, Homo sapiens
atgaagtcgtgttca

SEQ ID NO: 676581 - DNA, 15 bp, Homo sapiens
tgaagtcgtgttcaa

SEQ ID NO: 676582 - DNA, 15 bp, Homo sapiens
gaagtcgtgttcaac

SEQ ID NO: 676583 - DNA, 15 bp, Homo sapiens
aagtcgtgttcaact

SEQ ID NO: 676584 - DNA, 15 bp, Homo sapiens
agtcgtgttcaacta

SEQ ID NO: 676585 - DNA, 15 bp, Homo sapiens
gtcgtgttcaactat

SEQ ID NO: 676586 - DNA, 15 bp, Homo sapiens
tcgtgttcaactatc

SEQ ID NO: 676587 - DNA, 15 bp, Homo sapiens
cgtgttcaactatcc

SEQ ID NO: 676588 - DNA, 15 bp, Homo sapiens
gtgttcaactatccc

SEQ ID NO: 676589 - DNA, 15 bp, Homo sapiens
tgttcaactatccca

SEQ ID NO: 676590 - DNA, 15 bp, Homo sapiens
gttcaactatcccac

SEQ ID NO: 676591 - DNA, 15 bp, Homo sapiens
ttcaactatcccacc

SEQ ID NO: 676592 - DNA, 15 bp, Homo sapiens
tcaactatcccaccc

SEQ ID NO: 676593 - DNA, 15 bp, Homo sapiens
caactatcccacccg

SEQ ID NO: 676594 - DNA, 15 bp, Homo sapiens
aactatcccacccga

SEQ ID NO: 676595 - DNA, 15 bp, Homo sapiens
actatcccacccgag

SEQ ID NO: 676596 - DNA, 15 bp, Homo sapiens
ctatcccacccgagc

SEQ ID NO: 676597 - DNA, 15 bp, Homo sapiens
tatcccacccgagca

SEQ ID NO: 676598 - DNA, 15 bp, Homo sapiens
atcccacccgagcaa

SEQ ID NO: 676599 - DNA, 15 bp, Homo sapiens
tcccacccgagcaaa

SEQ ID NO: 676600 - DNA, 15 bp, Homo sapiens
cccacccgagcaaac

SEQ ID NO: 676601 - DNA, 15 bp, Homo sapiens
ccacccgagcaaacg

SEQ ID NO: 676602 - DNA, 15 bp, Homo sapiens
cacccgagcaaacgt

SEQ ID NO: 676603 - DNA, 15 bp, Homo sapiens
acccgagcaaacgtg

SEQ ID NO: 676604 - DNA, 15 bp, Homo sapiens
cccgagcaaacgtgc

SEQ ID NO: 676605 - DNA, 15 bp, Homo sapiens
ccgagcaaacgtgcc

SEQ ID NO: 676606 - DNA, 15 bp, Homo sapiens
cgagcaaacgtgcca

SEQ ID NO: 676607 - DNA, 15 bp, Homo sapiens
gagcaaacgtgccag

SEQ ID NO: 676608 - DNA, 15 bp, Homo sapiens
agcaaacgtgccagt

SEQ ID NO: 676609 - DNA, 15 bp, Homo sapiens
gcaaacgtgccagtg

SEQ ID NO: 676610 - DNA, 15 bp, Homo sapiens
caaacgtgccagtgc

SEQ ID NO: 676611 - DNA, 15 bp, Homo sapiens
aaacgtgccagtgct

SEQ ID NO: 676612 - DNA, 15 bp, Homo sapiens
aacgtgccagtgctt

SEQ ID NO: 676613 - DNA, 15 bp, Homo sapiens
acgtgccagtgcttc

SEQ ID NO: 676614 - DNA, 15 bp, Homo sapiens
cgtgccagtgcttca

SEQ ID NO: 676615 - DNA, 15 bp, Homo sapiens
gtgccagtgcttcag

SEQ ID NO: 676616 - DNA, 15 bp, Homo sapiens
tgccagtgcttcagg

SEQ ID NO: 676617 - DNA, 15 bp, Homo sapiens
gccagtgcttcaggg

SEQ ID NO: 676618 - DNA, 15 bp, Homo sapiens
ccagtgcttcagggg

SEQ ID NO: 676619 - DNA, 15 bp, Homo sapiens
cagtgcttcaggggc

SEQ ID NO: 676620 - DNA, 15 bp, Homo sapiens
agtgcttcaggggct

SEQ ID NO: 676621 - DNA, 15 bp, Homo sapiens
gtgcttcaggggctg

SEQ ID NO: 676622 - DNA, 15 bp, Homo sapiens
tgcttcaggggctga

SEQ ID NO: 676623 - DNA, 15 bp, Homo sapiens
gcttcaggggctgag

SEQ ID NO: 676624 - DNA, 15 bp, Homo sapiens
cttcaggggctgagc

SEQ ID NO: 676625 - DNA, 15 bp, Homo sapiens
ttcaggggctgagcc

SEQ ID NO: 676626 - DNA, 15 bp, Homo sapiens
tcaggggctgagcct

SEQ ID NO: 676627 - DNA, 15 bp, Homo sapiens
caggggctgagcctg

SEQ ID NO: 676628 - DNA, 15 bp, Homo sapiens
aggggctgagcctgg

SEQ ID NO: 676629 - DNA, 15 bp, Homo sapiens
ggggctgagcctgga

SEQ ID NO: 676630 - DNA, 15 bp, Homo sapiens
gggctgagcctggag

SEQ ID NO: 676631 - DNA, 15 bp, Homo sapiens
ggctgagcctggagg

SEQ ID NO: 676632 - DNA, 15 bp, Homo sapiens
gctgagcctggaggt

SEQ ID NO: 676633 - DNA, 15 bp, Homo sapiens
ctgagcctggaggtg

SEQ ID NO: 676634 - DNA, 15 bp, Homo sapiens
tgagcctggaggtga

SEQ ID NO: 676635 - DNA, 15 bp, Homo sapiens
gagcctggaggtgaa

SEQ ID NO: 676636 - DNA, 15 bp, Homo sapiens
agcctggaggtgaag

SEQ ID NO: 676637 - DNA, 15 bp, Homo sapiens
gcctggaggtgaaga

SEQ ID NO: 676638 - DNA, 15 bp, Homo sapiens
cctggaggtgaagaa

SEQ ID NO: 676639 - DNA, 15 bp, Homo sapiens
ctggaggtgaagaaa

SEQ ID NO: 676640 - DNA, 15 bp, Homo sapiens
tggaggtgaagaaag

SEQ ID NO: 676641 - DNA, 15 bp, Homo sapiens
ggaggtgaagaaagg

SEQ ID NO: 676642 - DNA, 15 bp, Homo sapiens
gaggtgaagaaaggc

SEQ ID NO: 676643 - DNA, 15 bp, Homo sapiens
aggtgaagaaaggcc

SEQ ID NO: 676644 - DNA, 15 bp, Homo sapiens
ggtgaagaaaggcca

SEQ ID NO: 676645 - DNA, 15 bp, Homo sapiens
gtgaagaaaggccag

SEQ ID NO: 676646 - DNA, 15 bp, Homo sapiens
tgaagaaaggccaga

SEQ ID NO: 676647 - DNA, 15 bp, Homo sapiens
gaagaaaggccagac

SEQ ID NO: 676648 - DNA, 15 bp, Homo sapiens
aagaaaggccagaca

SEQ ID NO: 676649 - DNA, 15 bp, Homo sapiens
agaaaggccagacac

SEQ ID NO: 676650 - DNA, 15 bp, Homo sapiens
gaaaggccagacact

SEQ ID NO: 676651 - DNA, 15 bp, Homo sapiens
aaaggccagacacta

SEQ ID NO: 676652 - DNA, 15 bp, Homo sapiens
aaggccagacactag

SEQ ID NO: 676653 - DNA, 15 bp, Homo sapiens
aggccagacactagc

SEQ ID NO: 676654 - DNA, 15 bp, Homo sapiens
ggccagacactagcc

SEQ ID NO: 676655 - DNA, 15 bp, Homo sapiens
gccagacactagccc

SEQ ID NO: 676656 - DNA, 15 bp, Homo sapiens
ccagacactagccct

SEQ ID NO: 676657 - DNA, 15 bp, Homo sapiens
cagacactagccctg

SEQ ID NO: 676658 - DNA, 15 bp, Homo sapiens
agacactagccctgg

SEQ ID NO: 676659 - DNA, 15 bp, Homo sapiens
gacactagccctggt

SEQ ID NO: 676660 - DNA, 15 bp, Homo sapiens
acactagccctggtg

SEQ ID NO: 676661 - DNA, 15 bp, Homo sapiens
cactagccctggtgg

SEQ ID NO: 676662 - DNA, 15 bp, Homo sapiens
actagccctggtggg

SEQ ID NO: 676663 - DNA, 15 bp, Homo sapiens
ctagccctggtgggc

SEQ ID NO: 676664 - DNA, 15 bp, Homo sapiens
tagccctggtgggca

SEQ ID NO: 676665 - DNA, 15 bp, Homo sapiens
agccctggtgggcag

SEQ ID NO: 676666 - DNA, 15 bp, Homo sapiens
gccctggtgggcagc

SEQ ID NO: 676667 - DNA, 15 bp, Homo sapiens
ccctggtgggcagca

SEQ ID NO: 676668 - DNA, 15 bp, Homo sapiens
cctggtgggcagcag

SEQ ID NO: 676669 - DNA, 15 bp, Homo sapiens
ctggtgggcagcagt

SEQ ID NO: 676670 - DNA, 15 bp, Homo sapiens
tggtgggcagcagtg

SEQ ID NO: 676671 - DNA, 15 bp, Homo sapiens
ggtgggcagcagtgg

SEQ ID NO: 676672 - DNA, 15 bp, Homo sapiens
gtgggcagcagtggc

SEQ ID NO: 676673 - DNA, 15 bp, Homo sapiens
tgggcagcagtggct

SEQ ID NO: 676674 - DNA, 15 bp, Homo sapiens
gggcagcagtggctg

SEQ ID NO: 676675 - DNA, 15 bp, Homo sapiens
ggcagcagtggctgt

SEQ ID NO: 676676 - DNA, 15 bp, Homo sapiens
gcagcagtggctgtg

SEQ ID NO: 676677 - DNA, 15 bp, Homo sapiens
cagcagtggctgtgg

SEQ ID NO: 676678 - DNA, 15 bp, Homo sapiens
agcagtggctgtggg

SEQ ID NO: 676679 - DNA, 15 bp, Homo sapiens
gcagtggctgtggga

SEQ ID NO: 676680 - DNA, 15 bp, Homo sapiens
cagtggctgtgggaa

SEQ ID NO: 676681 - DNA, 15 bp, Homo sapiens
tgtgggaagagcacg

SEQ ID NO: 676682 - DNA, 15 bp, Homo sapiens
gtgggaagagcacgg

SEQ ID NO: 676683 - DNA, 15 bp, Homo sapiens
tgggaagagcacggt

SEQ ID NO: 676684 - DNA, 15 bp, Homo sapiens
gggaagagcacggtg

SEQ ID NO: 676685 - DNA, 15 bp, Homo sapiens
ggaagagcacggtgg

SEQ ID NO: 676686 - DNA, 15 bp, Homo sapiens
gaagagcacggtggt

SEQ ID NO: 676687 - DNA, 15 bp, Homo sapiens
aagagcacggtggtc

SEQ ID NO: 676688 - DNA, 15 bp, Homo sapiens
agagcacggtggtcc

SEQ ID NO: 676689 - DNA, 15 bp, Homo sapiens
gagcacggtggtcca

SEQ ID NO: 676690 - DNA, 15 bp, Homo sapiens
agcacggtggtccag

SEQ ID NO: 676691 - DNA, 15 bp, Homo sapiens
gcacggtggtccagc

SEQ ID NO: 676692 - DNA, 15 bp, Homo sapiens
cacggtggtccagct

SEQ ID NO: 676693 - DNA, 15 bp, Homo sapiens
acggtggtccagctc

SEQ ID NO: 676694 - DNA, 15 bp, Homo sapiens
cggtggtccagctcc

SEQ ID NO: 676695 - DNA, 15 bp, Homo sapiens
ggtggtccagctcct

SEQ ID NO: 676696 - DNA, 15 bp, Homo sapiens
gtggtccagctcctg

SEQ ID NO: 676697 - DNA, 15 bp, Homo sapiens
tggtccagctcctgg

SEQ ID NO: 676698 - DNA, 15 bp, Homo sapiens
ggtccagctcctgga

SEQ ID NO: 676699 - DNA, 15 bp, Homo sapiens
gtccagctcctggag

SEQ ID NO: 676700 - DNA, 15 bp, Homo sapiens
tccagctcctggagc

SEQ ID NO: 676701 - DNA, 15 bp, Homo sapiens
ccagctcctggagcg

SEQ ID NO: 676702 - DNA, 15 bp, Homo sapiens
cagctcctggagcgg

SEQ ID NO: 676703 - DNA, 15 bp, Homo sapiens
agctcctggagcggt

SEQ ID NO: 676704 - DNA, 15 bp, Homo sapiens
gctcctggagcggtt

SEQ ID NO: 676705 - DNA, 15 bp, Homo sapiens
ctcctggagcggttc

SEQ ID NO: 676706 - DNA, 15 bp, Homo sapiens
tcctggagcggttct

SEQ ID NO: 676707 - DNA, 15 bp, Homo sapiens
cctggagcggttcta

SEQ ID NO: 676708 - DNA, 15 bp, Homo sapiens
ctggagcggttctac

SEQ ID NO: 676709 - DNA, 15 bp, Homo sapiens
tggagcggttctacg

SEQ ID NO: 676710 - DNA, 15 bp, Homo sapiens
ggagcggttctacga

SEQ ID NO: 676711 - DNA, 15 bp, Homo sapiens
gagcggttctacgac

SEQ ID NO: 676712 - DNA, 15 bp, Homo sapiens
agcggttctacgacc

SEQ ID NO: 676713 - DNA, 15 bp, Homo sapiens
gcggttctacgaccc

SEQ ID NO: 676714 - DNA, 15 bp, Homo sapiens
cggttctacgacccc

SEQ ID NO: 676715 - DNA, 15 bp, Homo sapiens
ggttctacgacccct

SEQ ID NO: 676716 - DNA, 15 bp, Homo sapiens
gttctacgacccctt

SEQ ID NO: 676717 - DNA, 15 bp, Homo sapiens
ttctacgaccccttg

SEQ ID NO: 676718 - DNA, 15 bp, Homo sapiens
tctacgaccccttgg

SEQ ID NO: 676719 - DNA, 15 bp, Homo sapiens
ctacgaccccttggc

SEQ ID NO: 676720 - DNA, 15 bp, Homo sapiens
tacgaccccttggcg

SEQ ID NO: 676721 - DNA, 15 bp, Homo sapiens
acgaccccttggcgg

SEQ ID NO: 676722 - DNA, 15 bp, Homo sapiens
cgaccccttggcggg

SEQ ID NO: 676723 - DNA, 15 bp, Homo sapiens
gaccccttggcgggg

SEQ ID NO: 676724 - DNA, 15 bp, Homo sapiens
accccttggcgggga

SEQ ID NO: 676725 - DNA, 15 bp, Homo sapiens
ccccttggcggggac

SEQ ID NO: 676726 - DNA, 15 bp, Homo sapiens
cccttggcggggaca

SEQ ID NO: 676727 - DNA, 15 bp, Homo sapiens
ccttggcggggacag

SEQ ID NO: 676728 - DNA, 15 bp, Homo sapiens
cttggcggggacagt

SEQ ID NO: 676729 - DNA, 15 bp, Homo sapiens
ttggcggggacagtg

SEQ ID NO: 676730 - DNA, 15 bp, Homo sapiens
tggcggggacagtgg

SEQ ID NO: 676731 - DNA, 15 bp, Homo sapiens
ggcggggacagtggt

SEQ ID NO: 676732 - DNA, 15 bp, Homo sapiens
gcggggacagtggtg

SEQ ID NO: 676733 - DNA, 15 bp, Homo sapiens
cggggacagtggtga

SEQ ID NO: 676734 - DNA, 15 bp, Homo sapiens
ggggacagtggtgag

SEQ ID NO: 676735 - DNA, 15 bp, Homo sapiens
gggacagtggtgagc

SEQ ID NO: 676736 - DNA, 15 bp, Homo sapiens
ggacagtggtgagca

SEQ ID NO: 676737 - DNA, 15 bp, Homo sapiens
gacagtggtgagcac

SEQ ID NO: 676738 - DNA, 15 bp, Homo sapiens
acagtggtgagcaca

SEQ ID NO: 676739 - DNA, 15 bp, Homo sapiens
cagtggtgagcacat

SEQ ID NO: 676740 - DNA, 15 bp, Homo sapiens
agtggtgagcacatt

SEQ ID NO: 676741 - DNA, 15 bp, Homo sapiens
gtggtgagcacattt

SEQ ID NO: 676742 - DNA, 15 bp, Homo sapiens
tggtgagcacatttc

SEQ ID NO: 676743 - DNA, 15 bp, Homo sapiens
ggtgagcacatttcc

SEQ ID NO: 676744 - DNA, 15 bp, Homo sapiens
gtgagcacatttcct

SEQ ID NO: 676745 - DNA, 15 bp, Homo sapiens
tgagcacatttcctt

SEQ ID NO: 676746 - DNA, 15 bp, Homo sapiens
gagcacatttcctta

SEQ ID NO: 676747 - DNA, 15 bp, Homo sapiens
agcacatttccttat

SEQ ID NO: 676748 - DNA, 15 bp, Homo sapiens
gcacatttccttata

SEQ ID NO: 676749 - DNA, 15 bp, Homo sapiens
cacatttccttataa

SEQ ID NO: 676750 - DNA, 15 bp, Homo sapiens
acatttccttataac

SEQ ID NO: 676751 - DNA, 15 bp, Homo sapiens
catttccttataact

SEQ ID NO: 676752 - DNA, 15 bp, Homo sapiens
atttccttataactt

SEQ ID NO: 676753 - DNA, 15 bp, Homo sapiens
tttccttataacttg

SEQ ID NO: 676754 - DNA, 15 bp, Homo sapiens
ttccttataacttga

SEQ ID NO: 676755 - DNA, 15 bp, Homo sapiens
tccttataacttgat

SEQ ID NO: 676756 - DNA, 15 bp, Homo sapiens
ccttataacttgatt

SEQ ID NO: 676757 - DNA, 15 bp, Homo sapiens
cttataacttgattg

SEQ ID NO: 676758 - DNA, 15 bp, Homo sapiens
ttataacttgattga

SEQ ID NO: 676759 - DNA, 15 bp, Homo sapiens
tataacttgattgaa

SEQ ID NO: 676760 - DNA, 15 bp, Homo sapiens
ataacttgattgaag

SEQ ID NO: 676761 - DNA, 15 bp, Homo sapiens
taacttgattgaagg

SEQ ID NO: 676762 - DNA, 15 bp, Homo sapiens
aacttgattgaaggc

SEQ ID NO: 676763 - DNA, 15 bp, Homo sapiens
acttgattgaaggct

SEQ ID NO: 676764 - DNA, 15 bp, Homo sapiens
cttgattgaaggcta

SEQ ID NO: 676765 - DNA, 15 bp, Homo sapiens
ttgattgaaggctat

SEQ ID NO: 676766 - DNA, 15 bp, Homo sapiens
tgattgaaggctata

SEQ ID NO: 676767 - DNA, 15 bp, Homo sapiens
gattgaaggctatat

SEQ ID NO: 676768 - DNA, 15 bp, Homo sapiens
attgaaggctatatt

SEQ ID NO: 676769 - DNA, 15 bp, Homo sapiens
ttgaaggctatattt

SEQ ID NO: 676770 - DNA, 15 bp, Homo sapiens
tgaaggctatatttt

SEQ ID NO: 676771 - DNA, 15 bp, Homo sapiens
gaaggctatatttta

SEQ ID NO: 676772 - DNA, 15 bp, Homo sapiens
aaggctatattttaa

SEQ ID NO: 676773 - DNA, 15 bp, Homo sapiens
aggctatattttaat

SEQ ID NO: 676774 - DNA, 15 bp, Homo sapiens
ggctatattttaatt

SEQ ID NO: 676775 - DNA, 15 bp, Homo sapiens
gctatattttaattg

SEQ ID NO: 676776 - DNA, 15 bp, Homo sapiens
ctatattttaattgg

SEQ ID NO: 676777 - DNA, 15 bp, Homo sapiens
tatattttaattggc

SEQ ID NO: 676778 - DNA, 15 bp, Homo sapiens
atattttaattggcc

SEQ ID NO: 676779 - DNA, 15 bp, Homo sapiens
tattttaattggccc

SEQ ID NO: 676780 - DNA, 15 bp, Homo sapiens
attttaattggccca

SEQ ID NO: 676781 - DNA, 15 bp, Homo sapiens
ttttaattggcccaa

SEQ ID NO: 676782 - DNA, 15 bp, Homo sapiens
tttaattggcccaac

SEQ ID NO: 676783 - DNA, 15 bp, Homo sapiens
ttaattggcccaacc

SEQ ID NO: 676784 - DNA, 15 bp, Homo sapiens
taattggcccaacca

SEQ ID NO: 676785 - DNA, 15 bp, Homo sapiens
aattggcccaaccaa

SEQ ID NO: 676786 - DNA, 15 bp, Homo sapiens
attggcccaaccaat

SEQ ID NO: 676787 - DNA, 15 bp, Homo sapiens
ttggcccaaccaata

SEQ ID NO: 676788 - DNA, 15 bp, Homo sapiens
tggcccaaccaatat

SEQ ID NO: 676789 - DNA, 15 bp, Homo sapiens
ggcccaaccaatatt

SEQ ID NO: 676790 - DNA, 15 bp, Homo sapiens
gcccaaccaatattg

SEQ ID NO: 676791 - DNA, 15 bp, Homo sapiens
cccaaccaatattgt

SEQ ID NO: 676792 - DNA, 15 bp, Homo sapiens
ccaaccaatattgtc

SEQ ID NO: 676793 - DNA, 15 bp, Homo sapiens
caaccaatattgtca

SEQ ID NO: 676794 - DNA, 15 bp, Homo sapiens
aaccaatattgtcat

SEQ ID NO: 676795 - DNA, 15 bp, Homo sapiens
accaatattgtcata

SEQ ID NO: 676796 - DNA, 15 bp, Homo sapiens
ccaatattgtcataa

SEQ ID NO: 676797 - DNA, 15 bp, Homo sapiens
caatattgtcataat

SEQ ID NO: 676798 - DNA, 15 bp, Homo sapiens
aatattgtcataatg

SEQ ID NO: 676799 - DNA, 15 bp, Homo sapiens
atattgtcataatgg

SEQ ID NO: 676800 - DNA, 15 bp, Homo sapiens
tattgtcataatgga

SEQ ID NO: 676801 - DNA, 15 bp, Homo sapiens
attgtcataatggaa

SEQ ID NO: 676802 - DNA, 15 bp, Homo sapiens
ttgtcataatggaaa

SEQ ID NO: 676803 - DNA, 15 bp, Homo sapiens
tgtcataatggaaaa

SEQ ID NO: 676804 - DNA, 15 bp, Homo sapiens
gtcataatggaaaat

SEQ ID NO: 676805 - DNA, 15 bp, Homo sapiens
tcataatggaaaata

SEQ ID NO: 676806 - DNA, 15 bp, Homo sapiens
cataatggaaaatat

SEQ ID NO: 676807 - DNA, 15 bp, Homo sapiens
ataatggaaaatatt

SEQ ID NO: 676808 - DNA, 15 bp, Homo sapiens
taatggaaaatattg

SEQ ID NO: 676809 - DNA, 15 bp, Homo sapiens
aatggaaaatattgg

SEQ ID NO: 676810 - DNA, 15 bp, Homo sapiens
atggaaaatattgga

SEQ ID NO: 676811 - DNA, 15 bp, Homo sapiens
tggaaaatattggac

SEQ ID NO: 676812 - DNA, 15 bp, Homo sapiens
ggaaaatattggaca

SEQ ID NO: 676813 - DNA, 15 bp, Homo sapiens
gaaaatattggacaa

SEQ ID NO: 676814 - DNA, 15 bp, Homo sapiens
aaaatattggacaaa

SEQ ID NO: 676815 - DNA, 15 bp, Homo sapiens
aaatattggacaaat

SEQ ID NO: 676816 - DNA, 15 bp, Homo sapiens
aatattggacaaatg

SEQ ID NO: 676817 - DNA, 15 bp, Homo sapiens
atattggacaaatgt

SEQ ID NO: 676818 - DNA, 15 bp, Homo sapiens
tattggacaaatgta

SEQ ID NO: 676819 - DNA, 15 bp, Homo sapiens
attggacaaatgtag

SEQ ID NO: 676820 - DNA, 15 bp, Homo sapiens
ttggacaaatgtaga

SEQ ID NO: 676821 - DNA, 15 bp, Homo sapiens
tggacaaatgtagac

SEQ ID NO: 676822 - DNA, 15 bp, Homo sapiens
ggacaaatgtagacc

SEQ ID NO: 676823 - DNA, 15 bp, Homo sapiens
gacaaatgtagacct

SEQ ID NO: 676824 - DNA, 15 bp, Homo sapiens
acaaatgtagaccta

SEQ ID NO: 676825 - DNA, 15 bp, Homo sapiens
caaatgtagacctag

SEQ ID NO: 676826 - DNA, 15 bp, Homo sapiens
aaatgtagacctaga

SEQ ID NO: 676827 - DNA, 15 bp, Homo sapiens
aatgtagacctagaa

SEQ ID NO: 676828 - DNA, 15 bp, Homo sapiens
atgtagacctagaat

SEQ ID NO: 676829 - DNA, 15 bp, Homo sapiens
tgtagacctagaatc

SEQ ID NO: 676830 - DNA, 15 bp, Homo sapiens
gtagacctagaatcc

SEQ ID NO: 676831 - DNA, 15 bp, Homo sapiens
tagacctagaatcct

SEQ ID NO: 676832 - DNA, 15 bp, Homo sapiens
agacctagaatcctg

SEQ ID NO: 676833 - DNA, 15 bp, Homo sapiens
gacctagaatcctgt

SEQ ID NO: 676834 - DNA, 15 bp, Homo sapiens
acctagaatcctgtt

SEQ ID NO: 676835 - DNA, 15 bp, Homo sapiens
cctagaatcctgttt

SEQ ID NO: 676836 - DNA, 15 bp, Homo sapiens
ctagaatcctgtttg

SEQ ID NO: 676837 - DNA, 15 bp, Homo sapiens
tagaatcctgtttga

SEQ ID NO: 676838 - DNA, 15 bp, Homo sapiens
agaatcctgtttgat

SEQ ID NO: 676839 - DNA, 15 bp, Homo sapiens
gaatcctgtttgata

SEQ ID NO: 676840 - DNA, 15 bp, Homo sapiens
aatcctgtttgatac

SEQ ID NO: 676841 - DNA, 15 bp, Homo sapiens
atcctgtttgataca

SEQ ID NO: 676842 - DNA, 15 bp, Homo sapiens
tcctgtttgatacaa

SEQ ID NO: 676843 - DNA, 15 bp, Homo sapiens
cctgtttgatacaat

SEQ ID NO: 676844 - DNA, 15 bp, Homo sapiens
ctgtttgatacaatg

SEQ ID NO: 676845 - DNA, 15 bp, Homo sapiens
tgtttgatacaatga

SEQ ID NO: 676846 - DNA, 15 bp, Homo sapiens
gtttgatacaatgac

SEQ ID NO: 676847 - DNA, 15 bp, Homo sapiens
tttgatacaatgacc

SEQ ID NO: 676848 - DNA, 15 bp, Homo sapiens
ttgatacaatgacca

SEQ ID NO: 676849 - DNA, 15 bp, Homo sapiens
tgatacaatgaccac

SEQ ID NO: 676850 - DNA, 15 bp, Homo sapiens
gatacaatgaccaca

SEQ ID NO: 676851 - DNA, 15 bp, Homo sapiens
atacaatgaccacat

SEQ ID NO: 676852 - DNA, 15 bp, Homo sapiens
tacaatgaccacatt

SEQ ID NO: 676853 - DNA, 15 bp, Homo sapiens
acaatgaccacattc

SEQ ID NO: 676854 - DNA, 15 bp, Homo sapiens
caatgaccacattct

SEQ ID NO: 676855 - DNA, 15 bp, Homo sapiens
aatgaccacattcta

SEQ ID NO: 676856 - DNA, 15 bp, Homo sapiens
atgaccacattctat

SEQ ID NO: 676857 - DNA, 15 bp, Homo sapiens
tgaccacattctata

SEQ ID NO: 676858 - DNA, 15 bp, Homo sapiens
gaccacattctataa

SEQ ID NO: 676859 - DNA, 15 bp, Homo sapiens
accacattctataaa

SEQ ID NO: 676860 - DNA, 15 bp, Homo sapiens
ccacattctataaac

SEQ ID NO: 676861 - DNA, 15 bp, Homo sapiens
cacattctataaacc

SEQ ID NO: 676862 - DNA, 15 bp, Homo sapiens
acattctataaaccc

SEQ ID NO: 676863 - DNA, 15 bp, Homo sapiens
cattctataaacccc

SEQ ID NO: 676864 - DNA, 15 bp, Homo sapiens
attctataaacccca

SEQ ID NO: 676865 - DNA, 15 bp, Homo sapiens
ttctataaaccccaa

SEQ ID NO: 676866 - DNA, 15 bp, Homo sapiens
tctataaaccccaac

SEQ ID NO: 676867 - DNA, 15 bp, Homo sapiens
ctataaaccccaact

SEQ ID NO: 676868 - DNA, 15 bp, Homo sapiens
tataaaccccaactg

SEQ ID NO: 676869 - DNA, 15 bp, Homo sapiens
ataaaccccaactgg

SEQ ID NO: 676870 - DNA, 15 bp, Homo sapiens
taaaccccaactggc

SEQ ID NO: 676871 - DNA, 15 bp, Homo sapiens
aaaccccaactggca

SEQ ID NO: 676872 - DNA, 15 bp, Homo sapiens
aaccccaactggcac

SEQ ID NO: 676873 - DNA, 15 bp, Homo sapiens
accccaactggcacc

SEQ ID NO: 676874 - DNA, 15 bp, Homo sapiens
ccccaactggcacca

SEQ ID NO: 676875 - DNA, 15 bp, Homo sapiens
cccaactggcaccat

SEQ ID NO: 676876 - DNA, 15 bp, Homo sapiens
ccaactggcaccata

SEQ ID NO: 676877 - DNA, 15 bp, Homo sapiens
caactggcaccatat

SEQ ID NO: 676878 - DNA, 15 bp, Homo sapiens
aactggcaccatatc

SEQ ID NO: 676879 - DNA, 15 bp, Homo sapiens
actggcaccatatct

SEQ ID NO: 676880 - DNA, 15 bp, Homo sapiens
ctggcaccatatctg

SEQ ID NO: 676881 - DNA, 15 bp, Homo sapiens
tggcaccatatctgg

SEQ ID NO: 676882 - DNA, 15 bp, Homo sapiens
ggcaccatatctggg

SEQ ID NO: 676883 - DNA, 15 bp, Homo sapiens
gcaccatatctggga

SEQ ID NO: 676884 - DNA, 15 bp, Homo sapiens
caccatatctgggaa

SEQ ID NO: 676885 - DNA, 15 bp, Homo sapiens
accatatctgggaaa

SEQ ID NO: 676886 - DNA, 15 bp, Homo sapiens
ccatatctgggaaat

SEQ ID NO: 676887 - DNA, 15 bp, Homo sapiens
catatctgggaaata

SEQ ID NO: 676888 - DNA, 15 bp, Homo sapiens
atatctgggaaatat

SEQ ID NO: 676889 - DNA, 15 bp, Homo sapiens
tatctgggaaatata

SEQ ID NO: 676890 - DNA, 15 bp, Homo sapiens
atctgggaaatatat

SEQ ID NO: 676891 - DNA, 15 bp, Homo sapiens
tctgggaaatatatg

SEQ ID NO: 676892 - DNA, 15 bp, Homo sapiens
ctgggaaatatatgg

SEQ ID NO: 676893 - DNA, 15 bp, Homo sapiens
tgggaaatatatggg

SEQ ID NO: 676894 - DNA, 15 bp, Homo sapiens
gggaaatatatgggg

SEQ ID NO: 676895 - DNA, 15 bp, Homo sapiens
ggaaatatatgggga

SEQ ID NO: 676896 - DNA, 15 bp, Homo sapiens
gaaatatatggggac

SEQ ID NO: 676897 - DNA, 15 bp, Homo sapiens
aaatatatggggaca

SEQ ID NO: 676898 - DNA, 15 bp, Homo sapiens
aatatatggggacaa

SEQ ID NO: 676899 - DNA, 15 bp, Homo sapiens
atatatggggacaat

SEQ ID NO: 676900 - DNA, 15 bp, Homo sapiens
tatatggggacaata

SEQ ID NO: 676901 - DNA, 15 bp, Homo sapiens
atatggggacaatag

SEQ ID NO: 676902 - DNA, 15 bp, Homo sapiens
tatggggacaatagg

SEQ ID NO: 676903 - DNA, 15 bp, Homo sapiens
atggggacaatagga

SEQ ID NO: 676904 - DNA, 15 bp, Homo sapiens
tggggacaataggac

SEQ ID NO: 676905 - DNA, 15 bp, Homo sapiens
ggggacaataggaca

SEQ ID NO: 676906 - DNA, 15 bp, Homo sapiens
gggacaataggacag

SEQ ID NO: 676907 - DNA, 15 bp, Homo sapiens
ggacaataggacaga

SEQ ID NO: 676908 - DNA, 15 bp, Homo sapiens
gacaataggacagaa

SEQ ID NO: 676909 - DNA, 15 bp, Homo sapiens
acaataggacagaat

SEQ ID NO: 676910 - DNA, 15 bp, Homo sapiens
caataggacagaatg

SEQ ID NO: 676911 - DNA, 15 bp, Homo sapiens
aataggacagaatgt

SEQ ID NO: 676912 - DNA, 15 bp, Homo sapiens
ataggacagaatgtc

SEQ ID NO: 676913 - DNA, 15 bp, Homo sapiens
taggacagaatgtct

SEQ ID NO: 676914 - DNA, 15 bp, Homo sapiens
aggacagaatgtctg

SEQ ID NO: 676915 - DNA, 15 bp, Homo sapiens
ggacagaatgtctgg

SEQ ID NO: 676916 - DNA, 15 bp, Homo sapiens
gacagaatgtctgga

SEQ ID NO: 676917 - DNA, 15 bp, Homo sapiens
acagaatgtctggaa

SEQ ID NO: 676918 - DNA, 15 bp, Homo sapiens
cagaatgtctggaat

SEQ ID NO: 676919 - DNA, 15 bp, Homo sapiens
agaatgtctggaatt

SEQ ID NO: 676920 - DNA, 15 bp, Homo sapiens
gaatgtctggaattc

SEQ ID NO: 676921 - DNA, 15 bp, Homo sapiens
aatgtctggaattca

SEQ ID NO: 676922 - DNA, 15 bp, Homo sapiens
atgtctggaattcag

SEQ ID NO: 676923 - DNA, 15 bp, Homo sapiens
tgtctggaattcagt

SEQ ID NO: 676924 - DNA, 15 bp, Homo sapiens
gtctggaattcagtc

SEQ ID NO: 676925 - DNA, 15 bp, Homo sapiens
tctggaattcagtct

SEQ ID NO: 676926 - DNA, 15 bp, Homo sapiens
ctggaattcagtcta

SEQ ID NO: 676927 - DNA, 15 bp, Homo sapiens
tggaattcagtctag

SEQ ID NO: 676928 - DNA, 15 bp, Homo sapiens
ggaattcagtctagc

SEQ ID NO: 676929 - DNA, 15 bp, Homo sapiens
gaattcagtctagct

SEQ ID NO: 676930 - DNA, 15 bp, Homo sapiens
aattcagtctagctc

SEQ ID NO: 676931 - DNA, 15 bp, Homo sapiens
attcagtctagctca

SEQ ID NO: 676932 - DNA, 15 bp, Homo sapiens
ttcagtctagctcag

SEQ ID NO: 676933 - DNA, 15 bp, Homo sapiens
tcagtctagctcaga

SEQ ID NO: 676934 - DNA, 15 bp, Homo sapiens
cagtctagctcagaa

SEQ ID NO: 676935 - DNA, 15 bp, Homo sapiens
agtctagctcagaaa

SEQ ID NO: 676936 - DNA, 15 bp, Homo sapiens
gtctagctcagaaaa

SEQ ID NO: 676937 - DNA, 15 bp, Homo sapiens
tctagctcagaaaat

SEQ ID NO: 676938 - DNA, 15 bp, Homo sapiens
ctagctcagaaaata

SEQ ID NO: 676939 - DNA, 15 bp, Homo sapiens
tagctcagaaaatac

SEQ ID NO: 676940 - DNA, 15 bp, Homo sapiens
agctcagaaaatact

SEQ ID NO: 676941 - DNA, 15 bp, Homo sapiens
gctcagaaaatactg

SEQ ID NO: 676942 - DNA, 15 bp, Homo sapiens
ctcagaaaatactga

SEQ ID NO: 676943 - DNA, 15 bp, Homo sapiens
tcagaaaatactgaa

SEQ ID NO: 676944 - DNA, 15 bp, Homo sapiens
cagaaaatactgaat

SEQ ID NO: 676945 - DNA, 15 bp, Homo sapiens
agaaaatactgaata

SEQ ID NO: 676946 - DNA, 15 bp, Homo sapiens
gaaaatactgaatat

SEQ ID NO: 676947 - DNA, 15 bp, Homo sapiens
aaaatactgaatata

SEQ ID NO: 676948 - DNA, 15 bp, Homo sapiens
aaatactgaatataa

SEQ ID NO: 676949 - DNA, 15 bp, Homo sapiens
aatactgaatataag

SEQ ID NO: 676950 - DNA, 15 bp, Homo sapiens
atactgaatataagt

SEQ ID NO: 676951 - DNA, 15 bp, Homo sapiens
tactgaatataagtt

SEQ ID NO: 676952 - DNA, 15 bp, Homo sapiens
actgaatataagttt

SEQ ID NO: 676953 - DNA, 15 bp, Homo sapiens
ctgaatataagttta

SEQ ID NO: 676954 - DNA, 15 bp, Homo sapiens
tgaatataagtttaa

SEQ ID NO: 676955 - DNA, 15 bp, Homo sapiens
gaatataagtttaat

SEQ ID NO: 676956 - DNA, 15 bp, Homo sapiens
aatataagtttaatt

SEQ ID NO: 676957 - DNA, 15 bp, Homo sapiens
atataagtttaattt

SEQ ID NO: 676958 - DNA, 15 bp, Homo sapiens
tataagtttaatttt

SEQ ID NO: 676959 - DNA, 15 bp, Homo sapiens
ataagtttaattttt

SEQ ID NO: 676960 - DNA, 15 bp, Homo sapiens
taagtttaattttta

SEQ ID NO: 676961 - DNA, 15 bp, Homo sapiens
aagtttaatttttac

SEQ ID NO: 676962 - DNA, 15 bp, Homo sapiens
agtttaatttttacc

SEQ ID NO: 676963 - DNA, 15 bp, Homo sapiens
gtttaatttttaccc

SEQ ID NO: 676964 - DNA, 15 bp, Homo sapiens
tttaatttttaccct

SEQ ID NO: 676965 - DNA, 15 bp, Homo sapiens
ttaatttttaccctg

SEQ ID NO: 676966 - DNA, 15 bp, Homo sapiens
taatttttaccctgt

SEQ ID NO: 676967 - DNA, 15 bp, Homo sapiens
aatttttaccctgtc

SEQ ID NO: 676968 - DNA, 15 bp, Homo sapiens
atttttaccctgtca

SEQ ID NO: 676969 - DNA, 15 bp, Homo sapiens
tttttaccctgtcat

SEQ ID NO: 676970 - DNA, 15 bp, Homo sapiens
ttttaccctgtcatg

SEQ ID NO: 676971 - DNA, 15 bp, Homo sapiens
tttaccctgtcatgg

SEQ ID NO: 676972 - DNA, 15 bp, Homo sapiens
ttaccctgtcatggg

SEQ ID NO: 676973 - DNA, 15 bp, Homo sapiens
taccctgtcatgggc

SEQ ID NO: 676974 - DNA, 15 bp, Homo sapiens
accctgtcatgggcc

SEQ ID NO: 676975 - DNA, 15 bp, Homo sapiens
ccctgtcatgggcct

SEQ ID NO: 676976 - DNA, 15 bp, Homo sapiens
cctgtcatgggcctt

SEQ ID NO: 676977 - DNA, 15 bp, Homo sapiens
ctgtcatgggccttt

SEQ ID NO: 676978 - DNA, 15 bp, Homo sapiens
tgtcatgggcctttc

SEQ ID NO: 676979 - DNA, 15 bp, Homo sapiens
gtcatgggcctttcc

SEQ ID NO: 676980 - DNA, 15 bp, Homo sapiens
tcatgggcctttcca

SEQ ID NO: 676981 - DNA, 15 bp, Homo sapiens
catgggcctttccag

SEQ ID NO: 676982 - DNA, 15 bp, Homo sapiens
atgggcctttccagt

SEQ ID NO: 676983 - DNA, 15 bp, Homo sapiens
tgggcctttccagtc

SEQ ID NO: 676984 - DNA, 15 bp, Homo sapiens
gggcctttccagtca

SEQ ID NO: 676985 - DNA, 15 bp, Homo sapiens
ggcctttccagtcag

SEQ ID NO: 676986 - DNA, 15 bp, Homo sapiens
gcctttccagtcagt

SEQ ID NO: 676987 - DNA, 15 bp, Homo sapiens
cctttccagtcagtc

SEQ ID NO: 676988 - DNA, 15 bp, Homo sapiens
ctttccagtcagtct

SEQ ID NO: 676989 - DNA, 15 bp, Homo sapiens
tttccagtcagtctg

SEQ ID NO: 676990 - DNA, 15 bp, Homo sapiens
ttccagtcagtctga

SEQ ID NO: 676991 - DNA, 15 bp, Homo sapiens
tccagtcagtctgat

SEQ ID NO: 676992 - DNA, 15 bp, Homo sapiens
ccagtcagtctgatt

SEQ ID NO: 676993 - DNA, 15 bp, Homo sapiens
cagtcagtctgattg

SEQ ID NO: 676994 - DNA, 15 bp, Homo sapiens
agtcagtctgattgt

SEQ ID NO: 676995 - DNA, 15 bp, Homo sapiens
gtcagtctgattgtt

SEQ ID NO: 676996 - DNA, 15 bp, Homo sapiens
tcagtctgattgttc

SEQ ID NO: 676997 - DNA, 15 bp, Homo sapiens
cagtctgattgttct

SEQ ID NO: 676998 - DNA, 15 bp, Homo sapiens
agtctgattgttcta

SEQ ID NO: 676999 - DNA, 15 bp, Homo sapiens
gtctgattgttctaa

SEQ ID NO: 677000 - DNA, 15 bp, Homo sapiens
tctgattgttctaag

SEQ ID NO: 677001 - DNA, 15 bp, Homo sapiens
ctgattgttctaagc

SEQ ID NO: 677002 - DNA, 15 bp, Homo sapiens
tgattgttctaagca

SEQ ID NO: 677003 - DNA, 15 bp, Homo sapiens
gattgttctaagcaa

SEQ ID NO: 677004 - DNA, 15 bp, Homo sapiens
attgttctaagcaaa

SEQ ID NO: 677005 - DNA, 15 bp, Homo sapiens
ttgttctaagcaaat

SEQ ID NO: 677006 - DNA, 15 bp, Homo sapiens
tgttctaagcaaata

SEQ ID NO: 677007 - DNA, 15 bp, Homo sapiens
gttctaagcaaatac

SEQ ID NO: 677008 - DNA, 15 bp, Homo sapiens
ttctaagcaaatact

SEQ ID NO: 677009 - DNA, 15 bp, Homo sapiens
tctaagcaaatactg

SEQ ID NO: 677010 - DNA, 15 bp, Homo sapiens
ctaagcaaatactga

SEQ ID NO: 677011 - DNA, 15 bp, Homo sapiens
taagcaaatactgac

SEQ ID NO: 677012 - DNA, 15 bp, Homo sapiens
aagcaaatactgact

SEQ ID NO: 677013 - DNA, 15 bp, Homo sapiens
agcaaatactgactt

SEQ ID NO: 677014 - DNA, 15 bp, Homo sapiens
gcaaatactgactta

SEQ ID NO: 677015 - DNA, 15 bp, Homo sapiens
caaatactgacttac

SEQ ID NO: 677016 - DNA, 15 bp, Homo sapiens
aaatactgacttact

SEQ ID NO: 677017 - DNA, 15 bp, Homo sapiens
aatactgacttactg

SEQ ID NO: 677018 - DNA, 15 bp, Homo sapiens
atactgacttactgg

SEQ ID NO: 677019 - DNA, 15 bp, Homo sapiens
tactgacttactggc

SEQ ID NO: 677020 - DNA, 15 bp, Homo sapiens
actgacttactggct

SEQ ID NO: 677021 - DNA, 15 bp, Homo sapiens
ctgacttactggctt

SEQ ID NO: 677022 - DNA, 15 bp, Homo sapiens
tgacttactggctta

SEQ ID NO: 677023 - DNA, 15 bp, Homo sapiens
gacttactggcttat

SEQ ID NO: 677024 - DNA, 15 bp, Homo sapiens
acttactggcttata

SEQ ID NO: 677025 - DNA, 15 bp, Homo sapiens
cttactggcttataa

SEQ ID NO: 677026 - DNA, 15 bp, Homo sapiens
ttactggcttataaa

SEQ ID NO: 677027 - DNA, 15 bp, Homo sapiens
tactggcttataaag

SEQ ID NO: 677028 - DNA, 15 bp, Homo sapiens
actggcttataaagg

SEQ ID NO: 677029 - DNA, 15 bp, Homo sapiens
ctggcttataaaggt

SEQ ID NO: 677030 - DNA, 15 bp, Homo sapiens
tggcttataaaggtg

SEQ ID NO: 677031 - DNA, 15 bp, Homo sapiens
ggcttataaaggtga

SEQ ID NO: 677032 - DNA, 15 bp, Homo sapiens
gcttataaaggtgaa

SEQ ID NO: 677033 - DNA, 15 bp, Homo sapiens
cttataaaggtgaac

SEQ ID NO: 677034 - DNA, 15 bp, Homo sapiens
ttataaaggtgaact

SEQ ID NO: 677035 - DNA, 15 bp, Homo sapiens
tataaaggtgaacta

SEQ ID NO: 677036 - DNA, 15 bp, Homo sapiens
ataaaggtgaactac

SEQ ID NO: 677037 - DNA, 15 bp, Homo sapiens
taaaggtgaactaca

SEQ ID NO: 677038 - DNA, 15 bp, Homo sapiens
aaaggtgaactacag

SEQ ID NO: 677039 - DNA, 15 bp, Homo sapiens
aaggtgaactacaga

SEQ ID NO: 677040 - DNA, 15 bp, Homo sapiens
aggtgaactacagac

SEQ ID NO: 677041 - DNA, 15 bp, Homo sapiens
ggtgaactacagact

SEQ ID NO: 677042 - DNA, 15 bp, Homo sapiens
gtgaactacagactc

SEQ ID NO: 677043 - DNA, 15 bp, Homo sapiens
tgaactacagactcc

SEQ ID NO: 677044 - DNA, 15 bp, Homo sapiens
gaactacagactcct

SEQ ID NO: 677045 - DNA, 15 bp, Homo sapiens
aactacagactcctg

SEQ ID NO: 677046 - DNA, 15 bp, Homo sapiens
actacagactcctgc

SEQ ID NO: 677047 - DNA, 15 bp, Homo sapiens
ctacagactcctgcc

SEQ ID NO: 677048 - DNA, 15 bp, Homo sapiens
tacagactcctgccc

SEQ ID NO: 677049 - DNA, 15 bp, Homo sapiens
acagactcctgccca

SEQ ID NO: 677050 - DNA, 15 bp, Homo sapiens
cagactcctgcccaa

SEQ ID NO: 677051 - DNA, 15 bp, Homo sapiens
agactcctgcccaaa

SEQ ID NO: 677052 - DNA, 15 bp, Homo sapiens
gactcctgcccaaat

SEQ ID NO: 677053 - DNA, 15 bp, Homo sapiens
actcctgcccaaatt

SEQ ID NO: 677054 - DNA, 15 bp, Homo sapiens
ctcctgcccaaattc

SEQ ID NO: 677055 - DNA, 15 bp, Homo sapiens
tcctgcccaaattca

SEQ ID NO: 677056 - DNA, 15 bp, Homo sapiens
cctgcccaaattcaa

SEQ ID NO: 677057 - DNA, 15 bp, Homo sapiens
ctgcccaaattcaaa

SEQ ID NO: 677058 - DNA, 15 bp, Homo sapiens
tgcccaaattcaaag

SEQ ID NO: 677059 - DNA, 15 bp, Homo sapiens
gcccaaattcaaagc

SEQ ID NO: 677060 - DNA, 15 bp, Homo sapiens
cccaaattcaaagct

SEQ ID NO: 677061 - DNA, 15 bp, Homo sapiens
ccaaattcaaagctg

SEQ ID NO: 677062 - DNA, 15 bp, Homo sapiens
caaattcaaagctga

SEQ ID NO: 677063 - DNA, 15 bp, Homo sapiens
aaattcaaagctgac

SEQ ID NO: 677064 - DNA, 15 bp, Homo sapiens
aattcaaagctgact

SEQ ID NO: 677065 - DNA, 15 bp, Homo sapiens
attcaaagctgactt

SEQ ID NO: 677066 - DNA, 15 bp, Homo sapiens
ttcaaagctgacttc

SEQ ID NO: 677067 - DNA, 15 bp, Homo sapiens
tcaaagctgacttcc

SEQ ID NO: 677068 - DNA, 15 bp, Homo sapiens
caaagctgacttcca

SEQ ID NO: 677069 - DNA, 15 bp, Homo sapiens
aaagctgacttccaa

SEQ ID NO: 677070 - DNA, 15 bp, Homo sapiens
aagctgacttccaaa

SEQ ID NO: 677071 - DNA, 15 bp, Homo sapiens
agctgacttccaaaa

SEQ ID NO: 677072 - DNA, 15 bp, Homo sapiens
gctgacttccaaaac

SEQ ID NO: 677073 - DNA, 15 bp, Homo sapiens
ctgacttccaaaaca

SEQ ID NO: 677074 - DNA, 15 bp, Homo sapiens
tgacttccaaaacag

SEQ ID NO: 677075 - DNA, 15 bp, Homo sapiens
gacttccaaaacagg

SEQ ID NO: 677076 - DNA, 15 bp, Homo sapiens
acttccaaaacaggg

SEQ ID NO: 677077 - DNA, 15 bp, Homo sapiens
cttccaaaacagggt

SEQ ID NO: 677078 - DNA, 15 bp, Homo sapiens
ttccaaaacagggtg

SEQ ID NO: 677079 - DNA, 15 bp, Homo sapiens
tccaaaacagggtgc

SEQ ID NO: 677080 - DNA, 15 bp, Homo sapiens
ccaaaacagggtgct

SEQ ID NO: 677081 - DNA, 15 bp, Homo sapiens
caaaacagggtgcta

SEQ ID NO: 677082 - DNA, 15 bp, Homo sapiens
aaaacagggtgctac

SEQ ID NO: 677083 - DNA, 15 bp, Homo sapiens
aaacagggtgctacc

SEQ ID NO: 677084 - DNA, 15 bp, Homo sapiens
aacagggtgctacct

SEQ ID NO: 677085 - DNA, 15 bp, Homo sapiens
acagggtgctacctg

SEQ ID NO: 677086 - DNA, 15 bp, Homo sapiens
cagggtgctacctgc

SEQ ID NO: 677087 - DNA, 15 bp, Homo sapiens
agggtgctacctgct

SEQ ID NO: 677088 - DNA, 15 bp, Homo sapiens
gggtgctacctgctt

SEQ ID NO: 677089 - DNA, 15 bp, Homo sapiens
ggtgctacctgctta

SEQ ID NO: 677090 - DNA, 15 bp, Homo sapiens
gtgctacctgcttat

SEQ ID NO: 677091 - DNA, 15 bp, Homo sapiens
tgctacctgcttatt

SEQ ID NO: 677092 - DNA, 15 bp, Homo sapiens
gctacctgcttattg

SEQ ID NO: 677093 - DNA, 15 bp, Homo sapiens
ctacctgcttattgc

SEQ ID NO: 677094 - DNA, 15 bp, Homo sapiens
tacctgcttattgcc

SEQ ID NO: 677095 - DNA, 15 bp, Homo sapiens
acctgcttattgcct

SEQ ID NO: 677096 - DNA, 15 bp, Homo sapiens
cctgcttattgcctc

SEQ ID NO: 677097 - DNA, 15 bp, Homo sapiens
ctgcttattgcctcc

SEQ ID NO: 677098 - DNA, 15 bp, Homo sapiens
tgcttattgcctccc

SEQ ID NO: 677099 - DNA, 15 bp, Homo sapiens
gcttattgcctcccc

SEQ ID NO: 677100 - DNA, 15 bp, Homo sapiens
cttattgcctcccca

SEQ ID NO: 677101 - DNA, 15 bp, Homo sapiens
ttattgcctccccac

SEQ ID NO: 677102 - DNA, 15 bp, Homo sapiens
tattgcctccccacc

SEQ ID NO: 677103 - DNA, 15 bp, Homo sapiens
attgcctccccaccg

SEQ ID NO: 677104 - DNA, 15 bp, Homo sapiens
ttgcctccccaccgc

SEQ ID NO: 677105 - DNA, 15 bp, Homo sapiens
tgcctccccaccgct

SEQ ID NO: 677106 - DNA, 15 bp, Homo sapiens
gcctccccaccgctt

SEQ ID NO: 677107 - DNA, 15 bp, Homo sapiens
cctccccaccgcttt

SEQ ID NO: 677108 - DNA, 15 bp, Homo sapiens
ctccccaccgctttc

SEQ ID NO: 677109 - DNA, 15 bp, Homo sapiens
tccccaccgctttca

SEQ ID NO: 677110 - DNA, 15 bp, Homo sapiens
ccccaccgctttcag

SEQ ID NO: 677111 - DNA, 15 bp, Homo sapiens
cccaccgctttcagt

SEQ ID NO: 677112 - DNA, 15 bp, Homo sapiens
ccaccgctttcagtt

SEQ ID NO: 677113 - DNA, 15 bp, Homo sapiens
caccgctttcagttt

SEQ ID NO: 677114 - DNA, 15 bp, Homo sapiens
accgctttcagtttt

SEQ ID NO: 677115 - DNA, 15 bp, Homo sapiens
ccgctttcagttttg

SEQ ID NO: 677116 - DNA, 15 bp, Homo sapiens
cgctttcagttttgc

SEQ ID NO: 677117 - DNA, 15 bp, Homo sapiens
gctttcagttttgct

SEQ ID NO: 677118 - DNA, 15 bp, Homo sapiens
ctttcagttttgctg

SEQ ID NO: 677119 - DNA, 15 bp, Homo sapiens
tttcagttttgctgc

SEQ ID NO: 677120 - DNA, 15 bp, Homo sapiens
ttcagttttgctgcc

SEQ ID NO: 677121 - DNA, 15 bp, Homo sapiens
tcagttttgctgcct

SEQ ID NO: 677122 - DNA, 15 bp, Homo sapiens
cagttttgctgcctt

SEQ ID NO: 677123 - DNA, 15 bp, Homo sapiens
agttttgctgccttc

SEQ ID NO: 677124 - DNA, 15 bp, Homo sapiens
gttttgctgccttct

SEQ ID NO: 677125 - DNA, 15 bp, Homo sapiens
ttttgctgccttctc

SEQ ID NO: 677126 - DNA, 15 bp, Homo sapiens
tttgctgccttctct

SEQ ID NO: 677127 - DNA, 15 bp, Homo sapiens
ttgctgccttctctt

SEQ ID NO: 677128 - DNA, 15 bp, Homo sapiens
tgctgccttctctta

SEQ ID NO: 677129 - DNA, 15 bp, Homo sapiens
gctgccttctcttac

SEQ ID NO: 677130 - DNA, 15 bp, Homo sapiens
ctgccttctcttacc

SEQ ID NO: 677131 - DNA, 15 bp, Homo sapiens
tgccttctcttacct

SEQ ID NO: 677132 - DNA, 15 bp, Homo sapiens
gccttctcttacctt

SEQ ID NO: 677133 - DNA, 15 bp, Homo sapiens
ccttctcttaccttg

SEQ ID NO: 677134 - DNA, 15 bp, Homo sapiens
cttctcttaccttga

SEQ ID NO: 677135 - DNA, 15 bp, Homo sapiens
ttctcttaccttgaa

SEQ ID NO: 677136 - DNA, 15 bp, Homo sapiens
tctcttaccttgaat

SEQ ID NO: 677137 - DNA, 15 bp, Homo sapiens
ctcttaccttgaatt

SEQ ID NO: 677138 - DNA, 15 bp, Homo sapiens
tcttaccttgaattc

SEQ ID NO: 677139 - DNA, 15 bp, Homo sapiens
cttaccttgaattct

SEQ ID NO: 677140 - DNA, 15 bp, Homo sapiens
ttaccttgaattctc

SEQ ID NO: 677141 - DNA, 15 bp, Homo sapiens
taccttgaattctcg

SEQ ID NO: 677142 - DNA, 15 bp, Homo sapiens
accttgaattctcgg

SEQ ID NO: 677143 - DNA, 15 bp, Homo sapiens
ccttgaattctcggc

SEQ ID NO: 677144 - DNA, 15 bp, Homo sapiens
cttgaattctcggct

SEQ ID NO: 677145 - DNA, 15 bp, Homo sapiens
ttgaattctcggctc

SEQ ID NO: 677146 - DNA, 15 bp, Homo sapiens
tgaattctcggctct

SEQ ID NO: 677147 - DNA, 15 bp, Homo sapiens
gaattctcggctctc

SEQ ID NO: 677148 - DNA, 15 bp, Homo sapiens
aattctcggctctcg

SEQ ID NO: 677149 - DNA, 15 bp, Homo sapiens
attctcggctctcga

SEQ ID NO: 677150 - DNA, 15 bp, Homo sapiens
ttctcggctctcgaa

SEQ ID NO: 677151 - DNA, 15 bp, Homo sapiens
tctcggctctcgaac

SEQ ID NO: 677152 - DNA, 15 bp, Homo sapiens
ctcggctctcgaact

SEQ ID NO: 677153 - DNA, 15 bp, Homo sapiens
tcggctctcgaactt

SEQ ID NO: 677154 - DNA, 15 bp, Homo sapiens
cggctctcgaacttt

SEQ ID NO: 677155 - DNA, 15 bp, Homo sapiens
ggctctcgaactttg

SEQ ID NO: 677156 - DNA, 15 bp, Homo sapiens
gctctcgaactttga

SEQ ID NO: 677157 - DNA, 15 bp, Homo sapiens
ctctcgaactttgac

SEQ ID NO: 677158 - DNA, 15 bp, Homo sapiens
tctcgaactttgact

SEQ ID NO: 677159 - DNA, 15 bp, Homo sapiens
ctcgaactttgactt

SEQ ID NO: 677160 - DNA, 15 bp, Homo sapiens
tcgaactttgacttt

SEQ ID NO: 677161 - DNA, 15 bp, Homo sapiens
cgaactttgactttg

SEQ ID NO: 677162 - DNA, 15 bp, Homo sapiens
gaactttgactttga

SEQ ID NO: 677163 - DNA, 15 bp, Homo sapiens
aactttgactttgat

SEQ ID NO: 677164 - DNA, 15 bp, Homo sapiens
actttgactttgatc

SEQ ID NO: 677165 - DNA, 15 bp, Homo sapiens
ctttgactttgatcc

SEQ ID NO: 677166 - DNA, 15 bp, Homo sapiens
tttgactttgatcct

SEQ ID NO: 677167 - DNA, 15 bp, Homo sapiens
ttgactttgatcctc

SEQ ID NO: 677168 - DNA, 15 bp, Homo sapiens
tgactttgatcctca

SEQ ID NO: 677169 - DNA, 15 bp, Homo sapiens
gactttgatcctcaa

SEQ ID NO: 677170 - DNA, 15 bp, Homo sapiens
actttgatcctcaac

SEQ ID NO: 677171 - DNA, 15 bp, Homo sapiens
ctttgatcctcaacc

SEQ ID NO: 677172 - DNA, 15 bp, Homo sapiens
tttgatcctcaacct

SEQ ID NO: 677173 - DNA, 15 bp, Homo sapiens
ttgatcctcaacctc

SEQ ID NO: 677174 - DNA, 15 bp, Homo sapiens
tgatcctcaacctcc

SEQ ID NO: 677175 - DNA, 15 bp, Homo sapiens
gatcctcaacctcca

SEQ ID NO: 677176 - DNA, 15 bp, Homo sapiens
atcctcaacctccag

SEQ ID NO: 677177 - DNA, 15 bp, Homo sapiens
tcctcaacctccagc

SEQ ID NO: 677178 - DNA, 15 bp, Homo sapiens
cctcaacctccagcc

SEQ ID NO: 677179 - DNA, 15 bp, Homo sapiens
ctcaacctccagccc

SEQ ID NO: 677180 - DNA, 15 bp, Homo sapiens
tcaacctccagccct

SEQ ID NO: 677181 - DNA, 15 bp, Homo sapiens
caacctccagccctt

SEQ ID NO: 677182 - DNA, 15 bp, Homo sapiens
aacctccagcccttt

SEQ ID NO: 677183 - DNA, 15 bp, Homo sapiens
acctccagccctttc

SEQ ID NO: 677184 - DNA, 15 bp, Homo sapiens
cctccagccctttca

SEQ ID NO: 677185 - DNA, 15 bp, Homo sapiens
ctccagccctttcat

SEQ ID NO: 677186 - DNA, 15 bp, Homo sapiens
tccagccctttcata

SEQ ID NO: 677187 - DNA, 15 bp, Homo sapiens
ccagccctttcatat

SEQ ID NO: 677188 - DNA, 15 bp, Homo sapiens
cagccctttcatatt

SEQ ID NO: 677189 - DNA, 15 bp, Homo sapiens
agccctttcatattt

SEQ ID NO: 677190 - DNA, 15 bp, Homo sapiens
gccctttcatatttg

SEQ ID NO: 677191 - DNA, 15 bp, Homo sapiens
ccctttcatatttgg

SEQ ID NO: 677192 - DNA, 15 bp, Homo sapiens
cctttcatatttggc

SEQ ID NO: 677193 - DNA, 15 bp, Homo sapiens
ctttcatatttggct

SEQ ID NO: 677194 - DNA, 15 bp, Homo sapiens
tttcatatttggctt

SEQ ID NO: 677195 - DNA, 15 bp, Homo sapiens
ttcatatttggcttt

SEQ ID NO: 677196 - DNA, 15 bp, Homo sapiens
tcatatttggctttt

SEQ ID NO: 677197 - DNA, 15 bp, Homo sapiens
catatttggcttttg

SEQ ID NO: 677198 - DNA, 15 bp, Homo sapiens
atatttggcttttgt

SEQ ID NO: 677199 - DNA, 15 bp, Homo sapiens
tatttggcttttgtc

SEQ ID NO: 677200 - DNA, 15 bp, Homo sapiens
atttggcttttgtca

SEQ ID NO: 677201 - DNA, 15 bp, Homo sapiens
tttggcttttgtcat

SEQ ID NO: 677202 - DNA, 15 bp, Homo sapiens
ttggcttttgtcatt

SEQ ID NO: 677203 - DNA, 15 bp, Homo sapiens
tggcttttgtcattg

SEQ ID NO: 677204 - DNA, 15 bp, Homo sapiens
ggcttttgtcattga

SEQ ID NO: 677205 - DNA, 15 bp, Homo sapiens
gcttttgtcattgat

SEQ ID NO: 677206 - DNA, 15 bp, Homo sapiens
cttttgtcattgatt

SEQ ID NO: 677207 - DNA, 15 bp, Homo sapiens
ttttgtcattgattt

SEQ ID NO: 677208 - DNA, 15 bp, Homo sapiens
tttgtcattgatttt

SEQ ID NO: 677209 - DNA, 15 bp, Homo sapiens
ttgtcattgattttc

SEQ ID NO: 677210 - DNA, 15 bp, Homo sapiens
tgtcattgattttct

SEQ ID NO: 677211 - DNA, 15 bp, Homo sapiens
gtcattgattttcta

SEQ ID NO: 677212 - DNA, 15 bp, Homo sapiens
tcattgattttctag

SEQ ID NO: 677213 - DNA, 15 bp, Homo sapiens
cattgattttctagc

SEQ ID NO: 677214 - DNA, 15 bp, Homo sapiens
attgattttctagca

SEQ ID NO: 677215 - DNA, 15 bp, Homo sapiens
ttgattttctagcat

SEQ ID NO: 677216 - DNA, 15 bp, Homo sapiens
tgattttctagcatg

SEQ ID NO: 677217 - DNA, 15 bp, Homo sapiens
gattttctagcatgt

SEQ ID NO: 677218 - DNA, 15 bp, Homo sapiens
attttctagcatgta

SEQ ID NO: 677219 - DNA, 15 bp, Homo sapiens
ttttctagcatgtag

SEQ ID NO: 677220 - DNA, 15 bp, Homo sapiens
tttctagcatgtagc

SEQ ID NO: 677221 - DNA, 15 bp, Homo sapiens
ttctagcatgtagcc

SEQ ID NO: 677222 - DNA, 15 bp, Homo sapiens
tctagcatgtagccc

SEQ ID NO: 677223 - DNA, 15 bp, Homo sapiens
ctagcatgtagcccc

SEQ ID NO: 677224 - DNA, 15 bp, Homo sapiens
tagcatgtagccccg

SEQ ID NO: 677225 - DNA, 15 bp, Homo sapiens
agcatgtagccccgt

SEQ ID NO: 677226 - DNA, 15 bp, Homo sapiens
gcatgtagccccgtg

SEQ ID NO: 677227 - DNA, 15 bp, Homo sapiens
catgtagccccgtgg

SEQ ID NO: 677228 - DNA, 15 bp, Homo sapiens
atgtagccccgtggc

SEQ ID NO: 677229 - DNA, 15 bp, Homo sapiens
tgtagccccgtggct

SEQ ID NO: 677230 - DNA, 15 bp, Homo sapiens
gtagccccgtggctc

SEQ ID NO: 677231 - DNA, 15 bp, Homo sapiens
tagccccgtggctct

SEQ ID NO: 677232 - DNA, 15 bp, Homo sapiens
agccccgtggctctc

SEQ ID NO: 677233 - DNA, 15 bp, Homo sapiens
gccccgtggctctct

SEQ ID NO: 677234 - DNA, 15 bp, Homo sapiens
ccccgtggctctctt

SEQ ID NO: 677235 - DNA, 15 bp, Homo sapiens
cccgtggctctcttc

SEQ ID NO: 677236 - DNA, 15 bp, Homo sapiens
ccgtggctctcttcc

SEQ ID NO: 677237 - DNA, 15 bp, Homo sapiens
cgtggctctcttcct

SEQ ID NO: 677238 - DNA, 15 bp, Homo sapiens
gtggctctcttcctt

SEQ ID NO: 677239 - DNA, 15 bp, Homo sapiens
tggctctcttccttg

SEQ ID NO: 677240 - DNA, 15 bp, Homo sapiens
ggctctcttccttga

SEQ ID NO: 677241 - DNA, 15 bp, Homo sapiens
gctctcttccttgag

SEQ ID NO: 677242 - DNA, 15 bp, Homo sapiens
ctctcttccttgagt

SEQ ID NO: 677243 - DNA, 15 bp, Homo sapiens
tctcttccttgagtg

SEQ ID NO: 677244 - DNA, 15 bp, Homo sapiens
ctcttccttgagtga

SEQ ID NO: 677245 - DNA, 15 bp, Homo sapiens
tcttccttgagtgaa

SEQ ID NO: 677246 - DNA, 15 bp, Homo sapiens
cttccttgagtgaag

SEQ ID NO: 677247 - DNA, 15 bp, Homo sapiens
ttccttgagtgaaga

SEQ ID NO: 677248 - DNA, 15 bp, Homo sapiens
tccttgagtgaagac

SEQ ID NO: 677249 - DNA, 15 bp, Homo sapiens
ccttgagtgaagacc

SEQ ID NO: 677250 - DNA, 15 bp, Homo sapiens
cttgagtgaagacca

SEQ ID NO: 677251 - DNA, 15 bp, Homo sapiens
ttgagtgaagaccaa

SEQ ID NO: 677252 - DNA, 15 bp, Homo sapiens
tgagtgaagaccaac

SEQ ID NO: 677253 - DNA, 15 bp, Homo sapiens
gagtgaagaccaact

SEQ ID NO: 677254 - DNA, 15 bp, Homo sapiens
agtgaagaccaactc

SEQ ID NO: 677255 - DNA, 15 bp, Homo sapiens
gtgaagaccaactct

SEQ ID NO: 677256 - DNA, 15 bp, Homo sapiens
tgaagaccaactctt

SEQ ID NO: 677257 - DNA, 15 bp, Homo sapiens
gaagaccaactctta

SEQ ID NO: 677258 - DNA, 15 bp, Homo sapiens
aagaccaactcttac

SEQ ID NO: 677259 - DNA, 15 bp, Homo sapiens
agaccaactcttact

SEQ ID NO: 677260 - DNA, 15 bp, Homo sapiens
gaccaactcttactg

SEQ ID NO: 677261 - DNA, 15 bp, Homo sapiens
accaactcttactga

SEQ ID NO: 677262 - DNA, 15 bp, Homo sapiens
ccaactcttactgat

SEQ ID NO: 677263 - DNA, 15 bp, Homo sapiens
caactcttactgata

SEQ ID NO: 677264 - DNA, 15 bp, Homo sapiens
aactcttactgataa

SEQ ID NO: 677265 - DNA, 15 bp, Homo sapiens
actcttactgataat

SEQ ID NO: 677266 - DNA, 15 bp, Homo sapiens
ctcttactgataatg

SEQ ID NO: 677267 - DNA, 15 bp, Homo sapiens
tcttactgataatgc

SEQ ID NO: 677268 - DNA, 15 bp, Homo sapiens
cttactgataatgct

SEQ ID NO: 677269 - DNA, 15 bp, Homo sapiens
ttactgataatgctt

SEQ ID NO: 677270 - DNA, 15 bp, Homo sapiens
tactgataatgcttg

SEQ ID NO: 677271 - DNA, 15 bp, Homo sapiens
actgataatgcttgt

SEQ ID NO: 677272 - DNA, 15 bp, Homo sapiens
ctgataatgcttgta

SEQ ID NO: 677273 - DNA, 15 bp, Homo sapiens
tgataatgcttgtat

SEQ ID NO: 677274 - DNA, 15 bp, Homo sapiens
gataatgcttgtatc

SEQ ID NO: 677275 - DNA, 15 bp, Homo sapiens
ataatgcttgtatct

SEQ ID NO: 677276 - DNA, 15 bp, Homo sapiens
taatgcttgtatctg

SEQ ID NO: 677277 - DNA, 15 bp, Homo sapiens
aatgcttgtatctgc

SEQ ID NO: 677278 - DNA, 15 bp, Homo sapiens
atgcttgtatctgcc

SEQ ID NO: 677279 - DNA, 15 bp, Homo sapiens
tgcttgtatctgcca

SEQ ID NO: 677280 - DNA, 15 bp, Homo sapiens
gcttgtatctgccat

SEQ ID NO: 677281 - DNA, 15 bp, Homo sapiens
cttgtatctgccata

SEQ ID NO: 677282 - DNA, 15 bp, Homo sapiens
ttgtatctgccataa

SEQ ID NO: 677283 - DNA, 15 bp, Homo sapiens
tgtatctgccataac

SEQ ID NO: 677284 - DNA, 15 bp, Homo sapiens
gtatctgccataacc

SEQ ID NO: 677285 - DNA, 15 bp, Homo sapiens
tatctgccataacct

SEQ ID NO: 677286 - DNA, 15 bp, Homo sapiens
atctgccataacctt

SEQ ID NO: 677287 - DNA, 15 bp, Homo sapiens
tctgccataaccttg

SEQ ID NO: 677288 - DNA, 15 bp, Homo sapiens
ctgccataaccttgg

SEQ ID NO: 677289 - DNA, 15 bp, Homo sapiens
tgccataaccttggg

SEQ ID NO: 677290 - DNA, 15 bp, Homo sapiens
gccataaccttggga

SEQ ID NO: 677291 - DNA, 15 bp, Homo sapiens
ccataaccttgggac

SEQ ID NO: 677292 - DNA, 15 bp, Homo sapiens
cataaccttgggaca

SEQ ID NO: 677293 - DNA, 15 bp, Homo sapiens
ataaccttgggacag

SEQ ID NO: 677294 - DNA, 15 bp, Homo sapiens
taaccttgggacagc

SEQ ID NO: 677295 - DNA, 15 bp, Homo sapiens
aaccttgggacagca

SEQ ID NO: 677296 - DNA, 15 bp, Homo sapiens
accttgggacagcac

SEQ ID NO: 677297 - DNA, 15 bp, Homo sapiens
ccttgggacagcacc

SEQ ID NO: 677298 - DNA, 15 bp, Homo sapiens
cttgggacagcaccc

SEQ ID NO: 677299 - DNA, 15 bp, Homo sapiens
ttgggacagcaccca

SEQ ID NO: 677300 - DNA, 15 bp, Homo sapiens
tgggacagcacccat

SEQ ID NO: 677301 - DNA, 15 bp, Homo sapiens
gggacagcacccatg

SEQ ID NO: 677302 - DNA, 15 bp, Homo sapiens
ggacagcacccatga

SEQ ID NO: 677303 - DNA, 15 bp, Homo sapiens
gacagcacccatgac

SEQ ID NO: 677304 - DNA, 15 bp, Homo sapiens
acagcacccatgaca

SEQ ID NO: 677305 - DNA, 15 bp, Homo sapiens
cagcacccatgacag

SEQ ID NO: 677306 - DNA, 15 bp, Homo sapiens
agcacccatgacaga

SEQ ID NO: 677307 - DNA, 15 bp, Homo sapiens
gcacccatgacagag

SEQ ID NO: 677308 - DNA, 15 bp, Homo sapiens
cacccatgacagagc

SEQ ID NO: 677309 - DNA, 15 bp, Homo sapiens
acccatgacagagcc

SEQ ID NO: 677310 - DNA, 15 bp, Homo sapiens
cccatgacagagccc

SEQ ID NO: 677311 - DNA, 15 bp, Homo sapiens
ccatgacagagccct

SEQ ID NO: 677312 - DNA, 15 bp, Homo sapiens
catgacagagccctg

SEQ ID NO: 677313 - DNA, 15 bp, Homo sapiens
atgacagagccctgg

SEQ ID NO: 677314 - DNA, 15 bp, Homo sapiens
tgacagagccctggg

SEQ ID NO: 677315 - DNA, 15 bp, Homo sapiens
gacagagccctggga

SEQ ID NO: 677316 - DNA, 15 bp, Homo sapiens
acagagccctgggag

SEQ ID NO: 677317 - DNA, 15 bp, Homo sapiens
cagagccctgggagc

SEQ ID NO: 677318 - DNA, 15 bp, Homo sapiens
agagccctgggagcc

SEQ ID NO: 677319 - DNA, 15 bp, Homo sapiens
gagccctgggagcct

SEQ ID NO: 677320 - DNA, 15 bp, Homo sapiens
agccctgggagcctg

SEQ ID NO: 677321 - DNA, 15 bp, Homo sapiens
gccctgggagcctgt

SEQ ID NO: 677322 - DNA, 15 bp, Homo sapiens
ccctgggagcctgtc

SEQ ID NO: 677323 - DNA, 15 bp, Homo sapiens
cctgggagcctgtcc

SEQ ID NO: 677324 - DNA, 15 bp, Homo sapiens
ctgggagcctgtccc

SEQ ID NO: 677325 - DNA, 15 bp, Homo sapiens
tgggagcctgtcccc

SEQ ID NO: 677326 - DNA, 15 bp, Homo sapiens
gggagcctgtcccca

SEQ ID NO: 677327 - DNA, 15 bp, Homo sapiens
ggagcctgtccccat

SEQ ID NO: 677328 - DNA, 15 bp, Homo sapiens
gagcctgtccccatt

SEQ ID NO: 677329 - DNA, 15 bp, Homo sapiens
agcctgtccccatta

SEQ ID NO: 677330 - DNA, 15 bp, Homo sapiens
gcctgtccccattag

SEQ ID NO: 677331 - DNA, 15 bp, Homo sapiens
cctgtccccattaga

SEQ ID NO: 677332 - DNA, 15 bp, Homo sapiens
ctgtccccattagac

SEQ ID NO: 677333 - DNA, 15 bp, Homo sapiens
tgtccccattagaca

SEQ ID NO: 677334 - DNA, 15 bp, Homo sapiens
gtccccattagacag

SEQ ID NO: 677335 - DNA, 15 bp, Homo sapiens
tccccattagacagt

SEQ ID NO: 677336 - DNA, 15 bp, Homo sapiens
ccccattagacagtc

SEQ ID NO: 677337 - DNA, 15 bp, Homo sapiens
cccattagacagtca

SEQ ID NO: 677338 - DNA, 15 bp, Homo sapiens
ccattagacagtcac

SEQ ID NO: 677339 - DNA, 15 bp, Homo sapiens
cattagacagtcacc

SEQ ID NO: 677340 - DNA, 15 bp, Homo sapiens
attagacagtcacca

SEQ ID NO: 677341 - DNA, 15 bp, Homo sapiens
ttagacagtcaccaa

SEQ ID NO: 677342 - DNA, 15 bp, Homo sapiens
tagacagtcaccaaa

SEQ ID NO: 677343 - DNA, 15 bp, Homo sapiens
agacagtcaccaaag

SEQ ID NO: 677344 - DNA, 15 bp, Homo sapiens
gacagtcaccaaagt

SEQ ID NO: 677345 - DNA, 15 bp, Homo sapiens
acagtcaccaaagtg

SEQ ID NO: 677346 - DNA, 15 bp, Homo sapiens
cagtcaccaaagtgt

SEQ ID NO: 677347 - DNA, 15 bp, Homo sapiens
agtcaccaaagtgtt

SEQ ID NO: 677348 - DNA, 15 bp, Homo sapiens
gtcaccaaagtgtta

SEQ ID NO: 677349 - DNA, 15 bp, Homo sapiens
tcaccaaagtgttaa

SEQ ID NO: 677350 - DNA, 15 bp, Homo sapiens
caccaaagtgttaag

SEQ ID NO: 677351 - DNA, 15 bp, Homo sapiens
accaaagtgttaagc

SEQ ID NO: 677352 - DNA, 15 bp, Homo sapiens
ccaaagtgttaagcc

SEQ ID NO: 677353 - DNA, 15 bp, Homo sapiens
caaagtgttaagcct

SEQ ID NO: 677354 - DNA, 15 bp, Homo sapiens
aaagtgttaagcctt

SEQ ID NO: 677355 - DNA, 15 bp, Homo sapiens
aagtgttaagccttg

SEQ ID NO: 677356 - DNA, 15 bp, Homo sapiens
agtgttaagccttgt

SEQ ID NO: 677357 - DNA, 15 bp, Homo sapiens
gtgttaagccttgtt

SEQ ID NO: 677358 - DNA, 15 bp, Homo sapiens
tgttaagccttgttt

SEQ ID NO: 677359 - DNA, 15 bp, Homo sapiens
gttaagccttgtttc

SEQ ID NO: 677360 - DNA, 15 bp, Homo sapiens
ttaagccttgtttct

SEQ ID NO: 677361 - DNA, 15 bp, Homo sapiens
taagccttgtttctt

SEQ ID NO: 677362 - DNA, 15 bp, Homo sapiens
aagccttgtttcttt

SEQ ID NO: 677363 - DNA, 15 bp, Homo sapiens
agccttgtttctttt

SEQ ID NO: 677364 - DNA, 15 bp, Homo sapiens
gccttgtttctttta

SEQ ID NO: 677365 - DNA, 15 bp, Homo sapiens
ccttgtttcttttat

SEQ ID NO: 677366 - DNA, 15 bp, Homo sapiens
cttgtttcttttatt

SEQ ID NO: 677367 - DNA, 15 bp, Homo sapiens
ttgtttcttttatta

SEQ ID NO: 677368 - DNA, 15 bp, Homo sapiens
tgtttcttttattaa

SEQ ID NO: 677369 - DNA, 15 bp, Homo sapiens
gtttcttttattaat

SEQ ID NO: 677370 - DNA, 15 bp, Homo sapiens
tttcttttattaata

SEQ ID NO: 677371 - DNA, 15 bp, Homo sapiens
ttcttttattaatag

SEQ ID NO: 677372 - DNA, 15 bp, Homo sapiens
tcttttattaatagt

SEQ ID NO: 677373 - DNA, 15 bp, Homo sapiens
cttttattaatagtt

SEQ ID NO: 677374 - DNA, 15 bp, Homo sapiens
ttttattaatagttg

SEQ ID NO: 677375 - DNA, 15 bp, Homo sapiens
tttattaatagttgt

SEQ ID NO: 677376 - DNA, 15 bp, Homo sapiens
ttattaatagttgtt

SEQ ID NO: 677377 - DNA, 15 bp, Homo sapiens
tattaatagttgtta

SEQ ID NO: 677378 - DNA, 15 bp, Homo sapiens
attaatagttgttaa

SEQ ID NO: 677379 - DNA, 15 bp, Homo sapiens
ttaatagttgttaag

SEQ ID NO: 677380 - DNA, 15 bp, Homo sapiens
taatagttgttaagc

SEQ ID NO: 677381 - DNA, 15 bp, Homo sapiens
aatagttgttaagcc

SEQ ID NO: 677382 - DNA, 15 bp, Homo sapiens
atagttgttaagcct

SEQ ID NO: 677383 - DNA, 15 bp, Homo sapiens
tagttgttaagccta

SEQ ID NO: 677384 - DNA, 15 bp, Homo sapiens
agttgttaagcctaa

SEQ ID NO: 677385 - DNA, 15 bp, Homo sapiens
gttgttaagcctaaa

SEQ ID NO: 677386 - DNA, 15 bp, Homo sapiens
ttgttaagcctaaat

SEQ ID NO: 677387 - DNA, 15 bp, Homo sapiens
tgttaagcctaaatc

SEQ ID NO: 677388 - DNA, 15 bp, Homo sapiens
gttaagcctaaatca

SEQ ID NO: 677389 - DNA, 15 bp, Homo sapiens
ttaagcctaaatcag

SEQ ID NO: 677390 - DNA, 15 bp, Homo sapiens
taagcctaaatcagc

SEQ ID NO: 677391 - DNA, 15 bp, Homo sapiens
aagcctaaatcagcc

SEQ ID NO: 677392 - DNA, 15 bp, Homo sapiens
agcctaaatcagcct

SEQ ID NO: 677393 - DNA, 15 bp, Homo sapiens
gcctaaatcagcctt

SEQ ID NO: 677394 - DNA, 15 bp, Homo sapiens
cctaaatcagccttg

SEQ ID NO: 677395 - DNA, 15 bp, Homo sapiens
ctaaatcagccttgt

SEQ ID NO: 677396 - DNA, 15 bp, Homo sapiens
taaatcagccttgtt

SEQ ID NO: 677397 - DNA, 15 bp, Homo sapiens
aaatcagccttgtta

SEQ ID NO: 677398 - DNA, 15 bp, Homo sapiens
aatcagccttgttaa

SEQ ID NO: 677399 - DNA, 15 bp, Homo sapiens
atcagccttgttaag

SEQ ID NO: 677400 - DNA, 15 bp, Homo sapiens
tcagccttgttaagc

SEQ ID NO: 677401 - DNA, 15 bp, Homo sapiens
cagccttgttaagcc

SEQ ID NO: 677402 - DNA, 15 bp, Homo sapiens
agccttgttaagcct

SEQ ID NO: 677403 - DNA, 15 bp, Homo sapiens
gccttgttaagccta

SEQ ID NO: 677404 - DNA, 15 bp, Homo sapiens
ccttgttaagcctaa

SEQ ID NO: 677405 - DNA, 15 bp, Homo sapiens
cttgttaagcctaat

SEQ ID NO: 677406 - DNA, 15 bp, Homo sapiens
ttgttaagcctaatt

SEQ ID NO: 677407 - DNA, 15 bp, Homo sapiens
tgttaagcctaattt

SEQ ID NO: 677408 - DNA, 15 bp, Homo sapiens
gttaagcctaattta

SEQ ID NO: 677409 - DNA, 15 bp, Homo sapiens
ttaagcctaatttag

SEQ ID NO: 677410 - DNA, 15 bp, Homo sapiens
taagcctaatttagt

SEQ ID NO: 677411 - DNA, 15 bp, Homo sapiens
aagcctaatttagtt

SEQ ID NO: 677412 - DNA, 15 bp, Homo sapiens
agcctaatttagttg

SEQ ID NO: 677413 - DNA, 15 bp, Homo sapiens
gcctaatttagttgt

SEQ ID NO: 677414 - DNA, 15 bp, Homo sapiens
cctaatttagttgtt

SEQ ID NO: 677415 - DNA, 15 bp, Homo sapiens
ctaatttagttgttt

SEQ ID NO: 677416 - DNA, 15 bp, Homo sapiens
taatttagttgtttc

SEQ ID NO: 677417 - DNA, 15 bp, Homo sapiens
aatttagttgtttct

SEQ ID NO: 677418 - DNA, 15 bp, Homo sapiens
atttagttgtttctc

SEQ ID NO: 677419 - DNA, 15 bp, Homo sapiens
tttagttgtttctct

SEQ ID NO: 677420 - DNA, 15 bp, Homo sapiens
ttagttgtttctctc

SEQ ID NO: 677421 - DNA, 15 bp, Homo sapiens
tagttgtttctctct

SEQ ID NO: 677422 - DNA, 15 bp, Homo sapiens
agttgtttctctctg

SEQ ID NO: 677423 - DNA, 15 bp, Homo sapiens
gttgtttctctctgg

SEQ ID NO: 677424 - DNA, 15 bp, Homo sapiens
ttgtttctctctgga

SEQ ID NO: 677425 - DNA, 15 bp, Homo sapiens
tgtttctctctggaa

SEQ ID NO: 677426 - DNA, 15 bp, Homo sapiens
gtttctctctggaaa

SEQ ID NO: 677427 - DNA, 15 bp, Homo sapiens
tttctctctggaaat

SEQ ID NO: 677428 - DNA, 15 bp, Homo sapiens
ttctctctggaaatc

SEQ ID NO: 677429 - DNA, 15 bp, Homo sapiens
tctctctggaaatct

SEQ ID NO: 677430 - DNA, 15 bp, Homo sapiens
ctctctggaaatctt

SEQ ID NO: 677431 - DNA, 15 bp, Homo sapiens
tctctggaaatcttc

SEQ ID NO: 677432 - DNA, 15 bp, Homo sapiens
ctctggaaatcttct

SEQ ID NO: 677433 - DNA, 15 bp, Homo sapiens
tctggaaatcttctg

SEQ ID NO: 677434 - DNA, 15 bp, Homo sapiens
ctggaaatcttctgc

SEQ ID NO: 677435 - DNA, 15 bp, Homo sapiens
tggaaatcttctgct

SEQ ID NO: 677436 - DNA, 15 bp, Homo sapiens
ggaaatcttctgctt

SEQ ID NO: 677437 - DNA, 15 bp, Homo sapiens
gaaatcttctgcttt

SEQ ID NO: 677438 - DNA, 15 bp, Homo sapiens
aaatcttctgctttg

SEQ ID NO: 677439 - DNA, 15 bp, Homo sapiens
aatcttctgctttgc

SEQ ID NO: 677440 - DNA, 15 bp, Homo sapiens
atcttctgctttgct

SEQ ID NO: 677441 - DNA, 15 bp, Homo sapiens
tcttctgctttgcta

SEQ ID NO: 677442 - DNA, 15 bp, Homo sapiens
cttctgctttgctat

SEQ ID NO: 677443 - DNA, 15 bp, Homo sapiens
ttctgctttgctatt

SEQ ID NO: 677444 - DNA, 15 bp, Homo sapiens
tctgctttgctatta

SEQ ID NO: 677445 - DNA, 15 bp, Homo sapiens
ctgctttgctattat

SEQ ID NO: 677446 - DNA, 15 bp, Homo sapiens
tgctttgctattata

SEQ ID NO: 677447 - DNA, 15 bp, Homo sapiens
gctttgctattatag

SEQ ID NO: 677448 - DNA, 15 bp, Homo sapiens
ctttgctattatagc

SEQ ID NO: 677449 - DNA, 15 bp, Homo sapiens
tttgctattatagct

SEQ ID NO: 677450 - DNA, 15 bp, Homo sapiens
ttgctattatagcta

SEQ ID NO: 677451 - DNA, 15 bp, Homo sapiens
tgctattatagctat

SEQ ID NO: 677452 - DNA, 15 bp, Homo sapiens
gctattatagctatt

SEQ ID NO: 677453 - DNA, 15 bp, Homo sapiens
ctattatagctattc

SEQ ID NO: 677454 - DNA, 15 bp, Homo sapiens
tattatagctattct

SEQ ID NO: 677455 - DNA, 15 bp, Homo sapiens
attatagctattctg

SEQ ID NO: 677456 - DNA, 15 bp, Homo sapiens
ttatagctattctgc

SEQ ID NO: 677457 - DNA, 15 bp, Homo sapiens
tatagctattctgca

SEQ ID NO: 677458 - DNA, 15 bp, Homo sapiens
atagctattctgcag

SEQ ID NO: 677459 - DNA, 15 bp, Homo sapiens
tagctattctgcagg

SEQ ID NO: 677460 - DNA, 15 bp, Homo sapiens
agctattctgcaggt

SEQ ID NO: 677461 - DNA, 15 bp, Homo sapiens
gctattctgcaggta

SEQ ID NO: 677462 - DNA, 15 bp, Homo sapiens
ctattctgcaggtaa

SEQ ID NO: 677463 - DNA, 15 bp, Homo sapiens
tattctgcaggtaac

SEQ ID NO: 677464 - DNA, 15 bp, Homo sapiens
attctgcaggtaaca

SEQ ID NO: 677465 - DNA, 15 bp, Homo sapiens
ttctgcaggtaacat

SEQ ID NO: 677466 - DNA, 15 bp, Homo sapiens
tctgcaggtaacata

SEQ ID NO: 677467 - DNA, 15 bp, Homo sapiens
ctgcaggtaacatag

SEQ ID NO: 677468 - DNA, 15 bp, Homo sapiens
tgcaggtaacatagg

SEQ ID NO: 677469 - DNA, 15 bp, Homo sapiens
gcaggtaacataggc

SEQ ID NO: 677470 - DNA, 15 bp, Homo sapiens
caggtaacataggca

SEQ ID NO: 677471 - DNA, 15 bp, Homo sapiens
aggtaacataggcaa

SEQ ID NO: 677472 - DNA, 15 bp, Homo sapiens
ggtaacataggcaaa

SEQ ID NO: 677473 - DNA, 15 bp, Homo sapiens
gtaacataggcaaac

SEQ ID NO: 677474 - DNA, 15 bp, Homo sapiens
taacataggcaaacc

SEQ ID NO: 677475 - DNA, 15 bp, Homo sapiens
aacataggcaaacca

SEQ ID NO: 677476 - DNA, 15 bp, Homo sapiens
acataggcaaaccag

SEQ ID NO: 677477 - DNA, 15 bp, Homo sapiens
cataggcaaaccagc

SEQ ID NO: 677478 - DNA, 15 bp, Homo sapiens
ataggcaaaccagct

SEQ ID NO: 677479 - DNA, 15 bp, Homo sapiens
taggcaaaccagctc

SEQ ID NO: 677480 - DNA, 15 bp, Homo sapiens
aggcaaaccagctca

SEQ ID NO: 677481 - DNA, 15 bp, Homo sapiens
ggcaaaccagctcac

SEQ ID NO: 677482 - DNA, 15 bp, Homo sapiens
gcaaaccagctcacc

SEQ ID NO: 677483 - DNA, 15 bp, Homo sapiens
caaaccagctcacca

SEQ ID NO: 677484 - DNA, 15 bp, Homo sapiens
aaaccagctcaccaa

SEQ ID NO: 677485 - DNA, 15 bp, Homo sapiens
aaccagctcaccaaa

SEQ ID NO: 677486 - DNA, 15 bp, Homo sapiens
accagctcaccaaaa

SEQ ID NO: 677487 - DNA, 15 bp, Homo sapiens
ccagctcaccaaaac

SEQ ID NO: 677488 - DNA, 15 bp, Homo sapiens
cagctcaccaaaact

SEQ ID NO: 677489 - DNA, 15 bp, Homo sapiens
agctcaccaaaactc

SEQ ID NO: 677490 - DNA, 15 bp, Homo sapiens
gctcaccaaaactct

SEQ ID NO: 677491 - DNA, 15 bp, Homo sapiens
ctcaccaaaactctg

SEQ ID NO: 677492 - DNA, 15 bp, Homo sapiens
tcaccaaaactctgt

SEQ ID NO: 677493 - DNA, 15 bp, Homo sapiens
caccaaaactctgta

SEQ ID NO: 677494 - DNA, 15 bp, Homo sapiens
accaaaactctgtaa

SEQ ID NO: 677495 - DNA, 15 bp, Homo sapiens
ccaaaactctgtaaa

SEQ ID NO: 677496 - DNA, 15 bp, Homo sapiens
caaaactctgtaaat

SEQ ID NO: 677497 - DNA, 15 bp, Homo sapiens
aaaactctgtaaata

SEQ ID NO: 677498 - DNA, 15 bp, Homo sapiens
aaactctgtaaatat

SEQ ID NO: 677499 - DNA, 15 bp, Homo sapiens
aactctgtaaatatg

SEQ ID NO: 677500 - DNA, 15 bp, Homo sapiens
actctgtaaatatgg

SEQ ID NO: 677501 - DNA, 15 bp, Homo sapiens
ctctgtaaatatggt

SEQ ID NO: 677502 - DNA, 15 bp, Homo sapiens
tctgtaaatatggtg

SEQ ID NO: 677503 - DNA, 15 bp, Homo sapiens
ctgtaaatatggtgt

SEQ ID NO: 677504 - DNA, 15 bp, Homo sapiens
tgtaaatatggtgtg

SEQ ID NO: 677505 - DNA, 15 bp, Homo sapiens
gtaaatatggtgtgc

SEQ ID NO: 677506 - DNA, 15 bp, Homo sapiens
taaatatggtgtgct

SEQ ID NO: 677507 - DNA, 15 bp, Homo sapiens
aaatatggtgtgctg

SEQ ID NO: 677508 - DNA, 15 bp, Homo sapiens
aatatggtgtgctga

SEQ ID NO: 677509 - DNA, 15 bp, Homo sapiens
atatggtgtgctgat

SEQ ID NO: 677510 - DNA, 15 bp, Homo sapiens
tatggtgtgctgata

SEQ ID NO: 677511 - DNA, 15 bp, Homo sapiens
atggtgtgctgatac

SEQ ID NO: 677512 - DNA, 15 bp, Homo sapiens
tggtgtgctgatacg

SEQ ID NO: 677513 - DNA, 15 bp, Homo sapiens
ggtgtgctgatacga

SEQ ID NO: 677514 - DNA, 15 bp, Homo sapiens
gtgtgctgatacgat

SEQ ID NO: 677515 - DNA, 15 bp, Homo sapiens
tgtgctgatacgatg

SEQ ID NO: 677516 - DNA, 15 bp, Homo sapiens
gtgctgatacgatgg

SEQ ID NO: 677517 - DNA, 15 bp, Homo sapiens
tgctgatacgatggt

SEQ ID NO: 677518 - DNA, 15 bp, Homo sapiens
gctgatacgatggtg

SEQ ID NO: 677519 - DNA, 15 bp, Homo sapiens
ctgatacgatggtgg

SEQ ID NO: 677520 - DNA, 15 bp, Homo sapiens
tgatacgatggtggg

SEQ ID NO: 677521 - DNA, 15 bp, Homo sapiens
gatacgatggtggga

SEQ ID NO: 677522 - DNA, 15 bp, Homo sapiens
atacgatggtgggaa

SEQ ID NO: 677523 - DNA, 15 bp, Homo sapiens
tacgatggtgggaat

SEQ ID NO: 677524 - DNA, 15 bp, Homo sapiens
acgatggtgggaatt

SEQ ID NO: 677525 - DNA, 15 bp, Homo sapiens
cgatggtgggaattt

SEQ ID NO: 677526 - DNA, 15 bp, Homo sapiens
gatggtgggaatttt

SEQ ID NO: 677527 - DNA, 15 bp, Homo sapiens
atggtgggaattttt

SEQ ID NO: 677528 - DNA, 15 bp, Homo sapiens
tggtgggaatttttt

SEQ ID NO: 677529 - DNA, 15 bp, Homo sapiens
ggtgggaattttttt

SEQ ID NO: 677530 - DNA, 15 bp, Homo sapiens
gtgggaatttttttc

SEQ ID NO: 677531 - DNA, 15 bp, Homo sapiens
tgggaatttttttct

SEQ ID NO: 677532 - DNA, 15 bp, Homo sapiens
gggaatttttttctt

SEQ ID NO: 677533 - DNA, 15 bp, Homo sapiens
ggaatttttttcttt

SEQ ID NO: 677534 - DNA, 15 bp, Homo sapiens
gaatttttttcttta

SEQ ID NO: 677535 - DNA, 15 bp, Homo sapiens
aatttttttctttat

SEQ ID NO: 677536 - DNA, 15 bp, Homo sapiens
atttttttctttatt

SEQ ID NO: 677537 - DNA, 15 bp, Homo sapiens
tttttttctttattg

SEQ ID NO: 677538 - DNA, 15 bp, Homo sapiens
ttttttctttattga

SEQ ID NO: 677539 - DNA, 15 bp, Homo sapiens
tttttctttattgag

SEQ ID NO: 677540 - DNA, 15 bp, Homo sapiens
ttttctttattgaga

SEQ ID NO: 677541 - DNA, 15 bp, Homo sapiens
tttctttattgagat

SEQ ID NO: 677542 - DNA, 15 bp, Homo sapiens
ttctttattgagatc

SEQ ID NO: 677543 - DNA, 15 bp, Homo sapiens
tctttattgagatca

SEQ ID NO: 677544 - DNA, 15 bp, Homo sapiens
ctttattgagatcaa

SEQ ID NO: 677545 - DNA, 15 bp, Homo sapiens
tttattgagatcaag

SEQ ID NO: 677546 - DNA, 15 bp, Homo sapiens
ttattgagatcaaga

SEQ ID NO: 677547 - DNA, 15 bp, Homo sapiens
tattgagatcaagac

SEQ ID NO: 677548 - DNA, 15 bp, Homo sapiens
attgagatcaagact

SEQ ID NO: 677549 - DNA, 15 bp, Homo sapiens
ttgagatcaagacta

SEQ ID NO: 677550 - DNA, 15 bp, Homo sapiens
tgagatcaagactag

SEQ ID NO: 677551 - DNA, 15 bp, Homo sapiens
gagatcaagactagc

SEQ ID NO: 677552 - DNA, 15 bp, Homo sapiens
agatcaagactagct

SEQ ID NO: 677553 - DNA, 15 bp, Homo sapiens
gatcaagactagctg

SEQ ID NO: 677554 - DNA, 15 bp, Homo sapiens
atcaagactagctgg

SEQ ID NO: 677555 - DNA, 15 bp, Homo sapiens
tcaagactagctgga

SEQ ID NO: 677556 - DNA, 15 bp, Homo sapiens
caagactagctggac

SEQ ID NO: 677557 - DNA, 15 bp, Homo sapiens
aagactagctggact

SEQ ID NO: 677558 - DNA, 15 bp, Homo sapiens
agactagctggactt

SEQ ID NO: 677559 - DNA, 15 bp, Homo sapiens
gactagctggacttg

SEQ ID NO: 677560 - DNA, 15 bp, Homo sapiens
actagctggacttgt

SEQ ID NO: 677561 - DNA, 15 bp, Homo sapiens
ctagctggacttgtg

SEQ ID NO: 677562 - DNA, 15 bp, Homo sapiens
tagctggacttgtgt

SEQ ID NO: 677563 - DNA, 15 bp, Homo sapiens
agctggacttgtgtc

SEQ ID NO: 677564 - DNA, 15 bp, Homo sapiens
gctggacttgtgtct

SEQ ID NO: 677565 - DNA, 15 bp, Homo sapiens
ctggacttgtgtcta

SEQ ID NO: 677566 - DNA, 15 bp, Homo sapiens
tggacttgtgtctat

SEQ ID NO: 677567 - DNA, 15 bp, Homo sapiens
ggacttgtgtctatt

SEQ ID NO: 677568 - DNA, 15 bp, Homo sapiens
gacttgtgtctattc

SEQ ID NO: 677569 - DNA, 15 bp, Homo sapiens
acttgtgtctattcc

SEQ ID NO: 677570 - DNA, 15 bp, Homo sapiens
cttgtgtctattcct

SEQ ID NO: 677571 - DNA, 15 bp, Homo sapiens
ttgtgtctattcctt

SEQ ID NO: 677572 - DNA, 15 bp, Homo sapiens
tgtgtctattccttt

SEQ ID NO: 677573 - DNA, 15 bp, Homo sapiens
gtgtctattcctttg

SEQ ID NO: 677574 - DNA, 15 bp, Homo sapiens
tgtctattcctttgc

SEQ ID NO: 677575 - DNA, 15 bp, Homo sapiens
gtctattcctttgcc

SEQ ID NO: 677576 - DNA, 15 bp, Homo sapiens
tctattcctttgcct

SEQ ID NO: 677577 - DNA, 15 bp, Homo sapiens
ctattcctttgcctg

SEQ ID NO: 677578 - DNA, 15 bp, Homo sapiens
tattcctttgcctgt

SEQ ID NO: 677579 - DNA, 15 bp, Homo sapiens
attcctttgcctgta

SEQ ID NO: 677580 - DNA, 15 bp, Homo sapiens
ttcctttgcctgtaa

SEQ ID NO: 677581 - DNA, 15 bp, Homo sapiens
tcctttgcctgtaag

SEQ ID NO: 677582 - DNA, 15 bp, Homo sapiens
cctttgcctgtaagc

SEQ ID NO: 677583 - DNA, 15 bp, Homo sapiens
ctttgcctgtaagct

SEQ ID NO: 677584 - DNA, 15 bp, Homo sapiens
tttgcctgtaagctt

SEQ ID NO: 677585 - DNA, 15 bp, Homo sapiens
ttgcctgtaagcttt

SEQ ID NO: 677586 - DNA, 15 bp, Homo sapiens
tgcctgtaagcttta

SEQ ID NO: 677587 - DNA, 15 bp, Homo sapiens
gcctgtaagctttac

SEQ ID NO: 677588 - DNA, 15 bp, Homo sapiens
cctgtaagctttacc

SEQ ID NO: 677589 - DNA, 15 bp, Homo sapiens
ctgtaagctttacct

SEQ ID NO: 677590 - DNA, 15 bp, Homo sapiens
tgtaagctttacctt

SEQ ID NO: 677591 - DNA, 15 bp, Homo sapiens
gtaagctttacctta

SEQ ID NO: 677592 - DNA, 15 bp, Homo sapiens
taagctttaccttac

SEQ ID NO: 677593 - DNA, 15 bp, Homo sapiens
aagctttaccttaca

SEQ ID NO: 677594 - DNA, 15 bp, Homo sapiens
agctttaccttacac

SEQ ID NO: 677595 - DNA, 15 bp, Homo sapiens
gctttaccttacacg

SEQ ID NO: 677596 - DNA, 15 bp, Homo sapiens
ctttaccttacacga

SEQ ID NO: 677597 - DNA, 15 bp, Homo sapiens
tttaccttacacgag

SEQ ID NO: 677598 - DNA, 15 bp, Homo sapiens
ttaccttacacgagg

SEQ ID NO: 677599 - DNA, 15 bp, Homo sapiens
taccttacacgaggc

SEQ ID NO: 677600 - DNA, 15 bp, Homo sapiens
accttacacgaggct

SEQ ID NO: 677601 - DNA, 15 bp, Homo sapiens
ccttacacgaggctg

SEQ ID NO: 677602 - DNA, 15 bp, Homo sapiens
cttacacgaggctgt

SEQ ID NO: 677603 - DNA, 15 bp, Homo sapiens
ttacacgaggctgta

SEQ ID NO: 677604 - DNA, 15 bp, Homo sapiens
tacacgaggctgtat

SEQ ID NO: 677605 - DNA, 15 bp, Homo sapiens
acacgaggctgtatt

SEQ ID NO: 677606 - DNA, 15 bp, Homo sapiens
cacgaggctgtattt

SEQ ID NO: 677607 - DNA, 15 bp, Homo sapiens
acgaggctgtatttt

SEQ ID NO: 677608 - DNA, 15 bp, Homo sapiens
cgaggctgtattttc

SEQ ID NO: 677609 - DNA, 15 bp, Homo sapiens
gaggctgtattttca

SEQ ID NO: 677610 - DNA, 15 bp, Homo sapiens
aggctgtattttcaa

SEQ ID NO: 677611 - DNA, 15 bp, Homo sapiens
ggctgtattttcaag

SEQ ID NO: 677612 - DNA, 15 bp, Homo sapiens
gctgtattttcaagt

SEQ ID NO: 677613 - DNA, 15 bp, Homo sapiens
ctgtattttcaagta

SEQ ID NO: 677614 - DNA, 15 bp, Homo sapiens
tgtattttcaagtac

SEQ ID NO: 677615 - DNA, 15 bp, Homo sapiens
gtattttcaagtaca

SEQ ID NO: 677616 - DNA, 15 bp, Homo sapiens
tattttcaagtacat

SEQ ID NO: 677617 - DNA, 15 bp, Homo sapiens
attttcaagtacata

SEQ ID NO: 677618 - DNA, 15 bp, Homo sapiens
ttttcaagtacatat

SEQ ID NO: 677619 - DNA, 15 bp, Homo sapiens
tttcaagtacatatt

SEQ ID NO: 677620 - DNA, 15 bp, Homo sapiens
ttcaagtacatatta

SEQ ID NO: 677621 - DNA, 15 bp, Homo sapiens
tcaagtacatattac

SEQ ID NO: 677622 - DNA, 15 bp, Homo sapiens
caagtacatattaca

SEQ ID NO: 677623 - DNA, 15 bp, Homo sapiens
aagtacatattacaa

SEQ ID NO: 677624 - DNA, 15 bp, Homo sapiens
agtacatattacaac

SEQ ID NO: 677625 - DNA, 15 bp, Homo sapiens
gtacatattacaaca

SEQ ID NO: 677626 - DNA, 15 bp, Homo sapiens
tacatattacaacac

SEQ ID NO: 677627 - DNA, 15 bp, Homo sapiens
acatattacaacact

SEQ ID NO: 677628 - DNA, 15 bp, Homo sapiens
catattacaacactt

SEQ ID NO: 677629 - DNA, 15 bp, Homo sapiens
atattacaacacttc

SEQ ID NO: 677630 - DNA, 15 bp, Homo sapiens
tattacaacacttcc

SEQ ID NO: 677631 - DNA, 15 bp, Homo sapiens
attacaacacttccc

SEQ ID NO: 677632 - DNA, 15 bp, Homo sapiens
ttacaacacttccct

SEQ ID NO: 677633 - DNA, 15 bp, Homo sapiens
tacaacacttcccta

SEQ ID NO: 677634 - DNA, 15 bp, Homo sapiens
acaacacttccctag

SEQ ID NO: 677635 - DNA, 15 bp, Homo sapiens
caacacttccctagg

SEQ ID NO: 677636 - DNA, 15 bp, Homo sapiens
aacacttccctagga

SEQ ID NO: 677637 - DNA, 15 bp, Homo sapiens
acacttccctaggag

SEQ ID NO: 677638 - DNA, 15 bp, Homo sapiens
cacttccctaggagc

SEQ ID NO: 677639 - DNA, 15 bp, Homo sapiens
acttccctaggagca

SEQ ID NO: 677640 - DNA, 15 bp, Homo sapiens
cttccctaggagcac

SEQ ID NO: 677641 - DNA, 15 bp, Homo sapiens
ttccctaggagcacc

SEQ ID NO: 677642 - DNA, 15 bp, Homo sapiens
tccctaggagcacca

SEQ ID NO: 677643 - DNA, 15 bp, Homo sapiens
ccctaggagcaccat

SEQ ID NO: 677644 - DNA, 15 bp, Homo sapiens
cctaggagcaccatg

SEQ ID NO: 677645 - DNA, 15 bp, Homo sapiens
ctaggagcaccatgc

SEQ ID NO: 677646 - DNA, 15 bp, Homo sapiens
taggagcaccatgcc

SEQ ID NO: 677647 - DNA, 15 bp, Homo sapiens
aggagcaccatgcct

SEQ ID NO: 677648 - DNA, 15 bp, Homo sapiens
ggagcaccatgcctc

SEQ ID NO: 677649 - DNA, 15 bp, Homo sapiens
gagcaccatgcctcc

SEQ ID NO: 677650 - DNA, 15 bp, Homo sapiens
agcaccatgcctcct

SEQ ID NO: 677651 - DNA, 15 bp, Homo sapiens
gcaccatgcctcctg

SEQ ID NO: 677652 - DNA, 15 bp, Homo sapiens
caccatgcctcctgc

SEQ ID NO: 677653 - DNA, 15 bp, Homo sapiens
accatgcctcctgcc

SEQ ID NO: 677654 - DNA, 15 bp, Homo sapiens
ccatgcctcctgcct

SEQ ID NO: 677655 - DNA, 15 bp, Homo sapiens
catgcctcctgccta

SEQ ID NO: 677656 - DNA, 15 bp, Homo sapiens
atgcctcctgcctat

SEQ ID NO: 677657 - DNA, 15 bp, Homo sapiens
tgcctcctgcctata

SEQ ID NO: 677658 - DNA, 15 bp, Homo sapiens
gcctcctgcctatag

SEQ ID NO: 677659 - DNA, 15 bp, Homo sapiens
cctcctgcctatagc

SEQ ID NO: 677660 - DNA, 15 bp, Homo sapiens
ctcctgcctatagca

SEQ ID NO: 677661 - DNA, 15 bp, Homo sapiens
tcctgcctatagcaa

SEQ ID NO: 677662 - DNA, 15 bp, Homo sapiens
cctgcctatagcaag

SEQ ID NO: 677663 - DNA, 15 bp, Homo sapiens
ctgcctatagcaagt

SEQ ID NO: 677664 - DNA, 15 bp, Homo sapiens
tgcctatagcaagta

SEQ ID NO: 677665 - DNA, 15 bp, Homo sapiens
gcctatagcaagtaa

SEQ ID NO: 677666 - DNA, 15 bp, Homo sapiens
cctatagcaagtaaa

SEQ ID NO: 677667 - DNA, 15 bp, Homo sapiens
ctatagcaagtaaaa

SEQ ID NO: 677668 - DNA, 15 bp, Homo sapiens
tatagcaagtaaaac

SEQ ID NO: 677669 - DNA, 15 bp, Homo sapiens
atagcaagtaaaaca

SEQ ID NO: 677670 - DNA, 15 bp, Homo sapiens
tagcaagtaaaacaa

SEQ ID NO: 677671 - DNA, 15 bp, Homo sapiens
agcaagtaaaacaaa

SEQ ID NO: 677672 - DNA, 15 bp, Homo sapiens
gcaagtaaaacaaaa

SEQ ID NO: 677673 - DNA, 15 bp, Homo sapiens
caagtaaaacaaaaa

SEQ ID NO: 677674 - DNA, 15 bp, Homo sapiens
aagtaaaacaaaaac

SEQ ID NO: 677675 - DNA, 15 bp, Homo sapiens
agtaaaacaaaaaca

SEQ ID NO: 677676 - DNA, 15 bp, Homo sapiens
gtaaaacaaaaacaa

SEQ ID NO: 677677 - DNA, 15 bp, Homo sapiens
taaaacaaaaacaaa

SEQ ID NO: 677678 - DNA, 15 bp, Homo sapiens
aaaacaaaaacaaaa

SEQ ID NO: 677679 - DNA, 15 bp, Homo sapiens
aaacaaaaacaaaac

SEQ ID NO: 677680 - DNA, 15 bp, Homo sapiens
aacaaaaacaaaacc

SEQ ID NO: 677681 - DNA, 15 bp, Homo sapiens
acaaaaacaaaacca

SEQ ID NO: 677682 - DNA, 15 bp, Homo sapiens
caaaaacaaaaccat

SEQ ID NO: 677683 - DNA, 15 bp, Homo sapiens
aaaaacaaaaccatc

SEQ ID NO: 677684 - DNA, 15 bp, Homo sapiens
aaaacaaaaccatca

SEQ ID NO: 677685 - DNA, 15 bp, Homo sapiens
aaacaaaaccatcac

SEQ ID NO: 677686 - DNA, 15 bp, Homo sapiens
aacaaaaccatcact

SEQ ID NO: 677687 - DNA, 15 bp, Homo sapiens
acaaaaccatcactg

SEQ ID NO: 677688 - DNA, 15 bp, Homo sapiens
caaaaccatcactgc

SEQ ID NO: 677689 - DNA, 15 bp, Homo sapiens
aaaaccatcactgcc

SEQ ID NO: 677690 - DNA, 15 bp, Homo sapiens
aaaccatcactgcca

SEQ ID NO: 677691 - DNA, 15 bp, Homo sapiens
aaccatcactgccag

SEQ ID NO: 677692 - DNA, 15 bp, Homo sapiens
accatcactgccagc

SEQ ID NO: 677693 - DNA, 15 bp, Homo sapiens
ccatcactgccagca

SEQ ID NO: 677694 - DNA, 15 bp, Homo sapiens
catcactgccagcaa

SEQ ID NO: 677695 - DNA, 15 bp, Homo sapiens
atcactgccagcaaa

SEQ ID NO: 677696 - DNA, 15 bp, Homo sapiens
tcactgccagcaaaa

SEQ ID NO: 677697 - DNA, 15 bp, Homo sapiens
cactgccagcaaaaa

SEQ ID NO: 677698 - DNA, 15 bp, Homo sapiens
actgccagcaaaaat

SEQ ID NO: 677699 - DNA, 15 bp, Homo sapiens
ctgccagcaaaaata

SEQ ID NO: 677700 - DNA, 15 bp, Homo sapiens
tgccagcaaaaataa

SEQ ID NO: 677701 - DNA, 15 bp, Homo sapiens
gccagcaaaaataat

SEQ ID NO: 677702 - DNA, 15 bp, Homo sapiens
ccagcaaaaataatc

SEQ ID NO: 677703 - DNA, 15 bp, Homo sapiens
cagcaaaaataatcc

SEQ ID NO: 677704 - DNA, 15 bp, Homo sapiens
agcaaaaataatcct

SEQ ID NO: 677705 - DNA, 15 bp, Homo sapiens
gcaaaaataatcctc

SEQ ID NO: 677706 - DNA, 15 bp, Homo sapiens
caaaaataatcctcc

SEQ ID NO: 677707 - DNA, 15 bp, Homo sapiens
aaaaataatcctccc

SEQ ID NO: 677708 - DNA, 15 bp, Homo sapiens
aaaataatcctccca

SEQ ID NO: 677709 - DNA, 15 bp, Homo sapiens
aaataatcctcccaa

SEQ ID NO: 677710 - DNA, 15 bp, Homo sapiens
aataatcctcccaaa

SEQ ID NO: 677711 - DNA, 15 bp, Homo sapiens
ataatcctcccaaag

SEQ ID NO: 677712 - DNA, 15 bp, Homo sapiens
taatcctcccaaaga

SEQ ID NO: 677713 - DNA, 15 bp, Homo sapiens
aatcctcccaaagac

SEQ ID NO: 677714 - DNA, 15 bp, Homo sapiens
atcctcccaaagaca

SEQ ID NO: 677715 - DNA, 15 bp, Homo sapiens
tcctcccaaagacac

SEQ ID NO: 677716 - DNA, 15 bp, Homo sapiens
cctcccaaagacact

SEQ ID NO: 677717 - DNA, 15 bp, Homo sapiens
ctcccaaagacactg

SEQ ID NO: 677718 - DNA, 15 bp, Homo sapiens
tcccaaagacactgc

SEQ ID NO: 677719 - DNA, 15 bp, Homo sapiens
cccaaagacactgcc

SEQ ID NO: 677720 - DNA, 15 bp, Homo sapiens
ccaaagacactgccc

SEQ ID NO: 677721 - DNA, 15 bp, Homo sapiens
caaagacactgccct

SEQ ID NO: 677722 - DNA, 15 bp, Homo sapiens
aaagacactgccctt

SEQ ID NO: 677723 - DNA, 15 bp, Homo sapiens
aagacactgcccttt

SEQ ID NO: 677724 - DNA, 15 bp, Homo sapiens
agacactgccctttg

SEQ ID NO: 677725 - DNA, 15 bp, Homo sapiens
gacactgccctttgt

SEQ ID NO: 677726 - DNA, 15 bp, Homo sapiens
acactgccctttgta

SEQ ID NO: 677727 - DNA, 15 bp, Homo sapiens
cactgccctttgtaa

SEQ ID NO: 677728 - DNA, 15 bp, Homo sapiens
actgccctttgtaac

SEQ ID NO: 677729 - DNA, 15 bp, Homo sapiens
ctgccctttgtaact

SEQ ID NO: 677730 - DNA, 15 bp, Homo sapiens
tgccctttgtaactt

SEQ ID NO: 677731 - DNA, 15 bp, Homo sapiens
gccctttgtaacttg

SEQ ID NO: 677732 - DNA, 15 bp, Homo sapiens
ccctttgtaacttgt

SEQ ID NO: 677733 - DNA, 15 bp, Homo sapiens
cctttgtaacttgtt

SEQ ID NO: 677734 - DNA, 15 bp, Homo sapiens
ctttgtaacttgttc

SEQ ID NO: 677735 - DNA, 15 bp, Homo sapiens
tttgtaacttgttcc

SEQ ID NO: 677736 - DNA, 15 bp, Homo sapiens
ttgtaacttgttcct

SEQ ID NO: 677737 - DNA, 15 bp, Homo sapiens
tgtaacttgttcctt

SEQ ID NO: 677738 - DNA, 15 bp, Homo sapiens
gtaacttgttccttt

SEQ ID NO: 677739 - DNA, 15 bp, Homo sapiens
taacttgttcctttt

SEQ ID NO: 677740 - DNA, 15 bp, Homo sapiens
aacttgttccttttc

SEQ ID NO: 677741 - DNA, 15 bp, Homo sapiens
acttgttccttttcc

SEQ ID NO: 677742 - DNA, 15 bp, Homo sapiens
cttgttccttttcca

SEQ ID NO: 677743 - DNA, 15 bp, Homo sapiens
ttgttccttttccat

SEQ ID NO: 677744 - DNA, 15 bp, Homo sapiens
tgttccttttccatg

SEQ ID NO: 677745 - DNA, 15 bp, Homo sapiens
gttccttttccatgg

SEQ ID NO: 677746 - DNA, 15 bp, Homo sapiens
ttccttttccatggg

SEQ ID NO: 677747 - DNA, 15 bp, Homo sapiens
tccttttccatggga

SEQ ID NO: 677748 - DNA, 15 bp, Homo sapiens
ccttttccatgggat

SEQ ID NO: 677749 - DNA, 15 bp, Homo sapiens
cttttccatgggatt

SEQ ID NO: 677750 - DNA, 15 bp, Homo sapiens
ttttccatgggattc

SEQ ID NO: 677751 - DNA, 15 bp, Homo sapiens
tttccatgggattct

SEQ ID NO: 677752 - DNA, 15 bp, Homo sapiens
ttccatgggattctt

SEQ ID NO: 677753 - DNA, 15 bp, Homo sapiens
tccatgggattcttg

SEQ ID NO: 677754 - DNA, 15 bp, Homo sapiens
ccatgggattcttgt

SEQ ID NO: 677755 - DNA, 15 bp, Homo sapiens
catgggattcttgtc

SEQ ID NO: 677756 - DNA, 15 bp, Homo sapiens
atgggattcttgtcc

SEQ ID NO: 677757 - DNA, 15 bp, Homo sapiens
tgggattcttgtcct

SEQ ID NO: 677758 - DNA, 15 bp, Homo sapiens
gggattcttgtcctt

SEQ ID NO: 677759 - DNA, 15 bp, Homo sapiens
ggattcttgtcctta

SEQ ID NO: 677760 - DNA, 15 bp, Homo sapiens
gattcttgtccttag

SEQ ID NO: 677761 - DNA, 15 bp, Homo sapiens
attcttgtccttagt

SEQ ID NO: 677762 - DNA, 15 bp, Homo sapiens
ttcttgtccttagtg

SEQ ID NO: 677763 - DNA, 15 bp, Homo sapiens
tcttgtccttagtgc

SEQ ID NO: 677764 - DNA, 15 bp, Homo sapiens
cttgtccttagtgct

SEQ ID NO: 677765 - DNA, 15 bp, Homo sapiens
ttgtccttagtgcta

SEQ ID NO: 677766 - DNA, 15 bp, Homo sapiens
tgtccttagtgctat

SEQ ID NO: 677767 - DNA, 15 bp, Homo sapiens
gtccttagtgctatc

SEQ ID NO: 677768 - DNA, 15 bp, Homo sapiens
tccttagtgctatca

SEQ ID NO: 677769 - DNA, 15 bp, Homo sapiens
ccttagtgctatcag

SEQ ID NO: 677770 - DNA, 15 bp, Homo sapiens
cttagtgctatcaga

SEQ ID NO: 677771 - DNA, 15 bp, Homo sapiens
ttagtgctatcagag

SEQ ID NO: 677772 - DNA, 15 bp, Homo sapiens
tagtgctatcagaga

SEQ ID NO: 677773 - DNA, 15 bp, Homo sapiens
agtgctatcagagag

SEQ ID NO: 677774 - DNA, 15 bp, Homo sapiens
gtgctatcagagagg

SEQ ID NO: 677775 - DNA, 15 bp, Homo sapiens
tgctatcagagaggt

SEQ ID NO: 677776 - DNA, 15 bp, Homo sapiens
gctatcagagaggtg

SEQ ID NO: 677777 - DNA, 15 bp, Homo sapiens
ctatcagagaggtga

SEQ ID NO: 677778 - DNA, 15 bp, Homo sapiens
tatcagagaggtgag

SEQ ID NO: 677779 - DNA, 15 bp, Homo sapiens
atcagagaggtgagg

SEQ ID NO: 677780 - DNA, 15 bp, Homo sapiens
tcagagaggtgaggg

SEQ ID NO: 677781 - DNA, 15 bp, Homo sapiens
cagagaggtgaggga

SEQ ID NO: 677782 - DNA, 15 bp, Homo sapiens
agagaggtgagggaa

SEQ ID NO: 677783 - DNA, 15 bp, Homo sapiens
gagaggtgagggaaa

SEQ ID NO: 677784 - DNA, 15 bp, Homo sapiens
agaggtgagggaaag

SEQ ID NO: 677785 - DNA, 15 bp, Homo sapiens
gaggtgagggaaagt

SEQ ID NO: 677786 - DNA, 15 bp, Homo sapiens
aggtgagggaaagtt

SEQ ID NO: 677787 - DNA, 15 bp, Homo sapiens
ggtgagggaaagtta

SEQ ID NO: 677788 - DNA, 15 bp, Homo sapiens
gtgagggaaagttaa

SEQ ID NO: 677789 - DNA, 15 bp, Homo sapiens
tgagggaaagttaag

SEQ ID NO: 677790 - DNA, 15 bp, Homo sapiens
gagggaaagttaagg

SEQ ID NO: 677791 - DNA, 15 bp, Homo sapiens
agggaaagttaaggc

SEQ ID NO: 677792 - DNA, 15 bp, Homo sapiens
gggaaagttaaggct

SEQ ID NO: 677793 - DNA, 15 bp, Homo sapiens
ggaaagttaaggcta

SEQ ID NO: 677794 - DNA, 15 bp, Homo sapiens
gaaagttaaggctag

SEQ ID NO: 677795 - DNA, 15 bp, Homo sapiens
aaagttaaggctagt

SEQ ID NO: 677796 - DNA, 15 bp, Homo sapiens
aagttaaggctagta

SEQ ID NO: 677797 - DNA, 15 bp, Homo sapiens
agttaaggctagtag

SEQ ID NO: 677798 - DNA, 15 bp, Homo sapiens
gttaaggctagtagt

SEQ ID NO: 677799 - DNA, 15 bp, Homo sapiens
ttaaggctagtagtt

SEQ ID NO: 677800 - DNA, 15 bp, Homo sapiens
taaggctagtagttt

SEQ ID NO: 677801 - DNA, 15 bp, Homo sapiens
aaggctagtagtttt

SEQ ID NO: 677802 - DNA, 15 bp, Homo sapiens
aggctagtagttttc

SEQ ID NO: 677803 - DNA, 15 bp, Homo sapiens
ggctagtagttttca

SEQ ID NO: 677804 - DNA, 15 bp, Homo sapiens
gctagtagttttcag

SEQ ID NO: 677805 - DNA, 15 bp, Homo sapiens
ctagtagttttcagg

SEQ ID NO: 677806 - DNA, 15 bp, Homo sapiens
tagtagttttcaggg

SEQ ID NO: 677807 - DNA, 15 bp, Homo sapiens
agtagttttcaggga

SEQ ID NO: 677808 - DNA, 15 bp, Homo sapiens
gtagttttcagggaa

SEQ ID NO: 677809 - DNA, 15 bp, Homo sapiens
tagttttcagggaaa

SEQ ID NO: 677810 - DNA, 15 bp, Homo sapiens
agttttcagggaaaa

SEQ ID NO: 677811 - DNA, 15 bp, Homo sapiens
gttttcagggaaaag

SEQ ID NO: 677812 - DNA, 15 bp, Homo sapiens
ttttcagggaaaaga

SEQ ID NO: 677813 - DNA, 15 bp, Homo sapiens
tttcagggaaaagag

SEQ ID NO: 677814 - DNA, 15 bp, Homo sapiens
ttcagggaaaagaga

SEQ ID NO: 677815 - DNA, 15 bp, Homo sapiens
tcagggaaaagagag

SEQ ID NO: 677816 - DNA, 15 bp, Homo sapiens
cagggaaaagagagg

SEQ ID NO: 677817 - DNA, 15 bp, Homo sapiens
agggaaaagagaggt

SEQ ID NO: 677818 - DNA, 15 bp, Homo sapiens
gggaaaagagaggta

SEQ ID NO: 677819 - DNA, 15 bp, Homo sapiens
ggaaaagagaggtag

SEQ ID NO: 677820 - DNA, 15 bp, Homo sapiens
gaaaagagaggtaga

SEQ ID NO: 677821 - DNA, 15 bp, Homo sapiens
aaaagagaggtagag

SEQ ID NO: 677822 - DNA, 15 bp, Homo sapiens
aaagagaggtagagg

SEQ ID NO: 677823 - DNA, 15 bp, Homo sapiens
aagagaggtagaggt

SEQ ID NO: 677824 - DNA, 15 bp, Homo sapiens
agagaggtagaggta

SEQ ID NO: 677825 - DNA, 15 bp, Homo sapiens
gagaggtagaggtag

SEQ ID NO: 677826 - DNA, 15 bp, Homo sapiens
agaggtagaggtagg

SEQ ID NO: 677827 - DNA, 15 bp, Homo sapiens
gaggtagaggtagga

SEQ ID NO: 677828 - DNA, 15 bp, Homo sapiens
aggtagaggtaggac

SEQ ID NO: 677829 - DNA, 15 bp, Homo sapiens
ggtagaggtaggacc

SEQ ID NO: 677830 - DNA, 15 bp, Homo sapiens
gtagaggtaggacca

SEQ ID NO: 677831 - DNA, 15 bp, Homo sapiens
tagaggtaggaccag

SEQ ID NO: 677832 - DNA, 15 bp, Homo sapiens
agaggtaggaccaga

SEQ ID NO: 677833 - DNA, 15 bp, Homo sapiens
gaggtaggaccagag

SEQ ID NO: 677834 - DNA, 15 bp, Homo sapiens
aggtaggaccagagt

SEQ ID NO: 677835 - DNA, 15 bp, Homo sapiens
ggtaggaccagagtc

SEQ ID NO: 677836 - DNA, 15 bp, Homo sapiens
gtaggaccagagtca

SEQ ID NO: 677837 - DNA, 15 bp, Homo sapiens
taggaccagagtcaa

SEQ ID NO: 677838 - DNA, 15 bp, Homo sapiens
aggaccagagtcaac

SEQ ID NO: 677839 - DNA, 15 bp, Homo sapiens
ggaccagagtcaacc

SEQ ID NO: 677840 - DNA, 15 bp, Homo sapiens
gaccagagtcaacca

SEQ ID NO: 677841 - DNA, 15 bp, Homo sapiens
accagagtcaaccag

SEQ ID NO: 677842 - DNA, 15 bp, Homo sapiens
ccagagtcaaccagc

SEQ ID NO: 677843 - DNA, 15 bp, Homo sapiens
cagagtcaaccagct

SEQ ID NO: 677844 - DNA, 15 bp, Homo sapiens
agagtcaaccagctt

SEQ ID NO: 677845 - DNA, 15 bp, Homo sapiens
gagtcaaccagcttt

SEQ ID NO: 677846 - DNA, 15 bp, Homo sapiens
agtcaaccagctttt

SEQ ID NO: 677847 - DNA, 15 bp, Homo sapiens
gtcaaccagcttttg

SEQ ID NO: 677848 - DNA, 15 bp, Homo sapiens
tcaaccagcttttgg

SEQ ID NO: 677849 - DNA, 15 bp, Homo sapiens
caaccagcttttggg

SEQ ID NO: 677850 - DNA, 15 bp, Homo sapiens
aaccagcttttgggg

SEQ ID NO: 677851 - DNA, 15 bp, Homo sapiens
accagcttttggggc

SEQ ID NO: 677852 - DNA, 15 bp, Homo sapiens
ccagcttttggggcc

SEQ ID NO: 677853 - DNA, 15 bp, Homo sapiens
cagcttttggggccc

SEQ ID NO: 677854 - DNA, 15 bp, Homo sapiens
agcttttggggccct

SEQ ID NO: 677855 - DNA, 15 bp, Homo sapiens
gcttttggggccctg

SEQ ID NO: 677856 - DNA, 15 bp, Homo sapiens
cttttggggccctgc

SEQ ID NO: 677857 - DNA, 15 bp, Homo sapiens
ttttggggccctgct

SEQ ID NO: 677858 - DNA, 15 bp, Homo sapiens
tttggggccctgctt

SEQ ID NO: 677859 - DNA, 15 bp, Homo sapiens
ttggggccctgcttc

SEQ ID NO: 677860 - DNA, 15 bp, Homo sapiens
tggggccctgcttct

SEQ ID NO: 677861 - DNA, 15 bp, Homo sapiens
ggggccctgcttctg

SEQ ID NO: 677862 - DNA, 15 bp, Homo sapiens
gggccctgcttctga

SEQ ID NO: 677863 - DNA, 15 bp, Homo sapiens
ggccctgcttctgat

SEQ ID NO: 677864 - DNA, 15 bp, Homo sapiens
gccctgcttctgatc

SEQ ID NO: 677865 - DNA, 15 bp, Homo sapiens
ccctgcttctgatca

SEQ ID NO: 677866 - DNA, 15 bp, Homo sapiens
cctgcttctgatcag

SEQ ID NO: 677867 - DNA, 15 bp, Homo sapiens
ctgcttctgatcagc

SEQ ID NO: 677868 - DNA, 15 bp, Homo sapiens
tgcttctgatcagct

SEQ ID NO: 677869 - DNA, 15 bp, Homo sapiens
gcttctgatcagctt

SEQ ID NO: 677870 - DNA, 15 bp, Homo sapiens
cttctgatcagcttt

SEQ ID NO: 677871 - DNA, 15 bp, Homo sapiens
ttctgatcagctttt

SEQ ID NO: 677872 - DNA, 15 bp, Homo sapiens
tctgatcagcttttt

SEQ ID NO: 677873 - DNA, 15 bp, Homo sapiens
ctgatcagctttttc

SEQ ID NO: 677874 - DNA, 15 bp, Homo sapiens
tgatcagctttttca

SEQ ID NO: 677875 - DNA, 15 bp, Homo sapiens
gatcagctttttcac

SEQ ID NO: 677876 - DNA, 15 bp, Homo sapiens
atcagctttttcact

SEQ ID NO: 677877 - DNA, 15 bp, Homo sapiens
tcagctttttcactg

SEQ ID NO: 677878 - DNA, 15 bp, Homo sapiens
cagctttttcactgc

SEQ ID NO: 677879 - DNA, 15 bp, Homo sapiens
agctttttcactgct

SEQ ID NO: 677880 - DNA, 15 bp, Homo sapiens
gctttttcactgctg

SEQ ID NO: 677881 - DNA, 15 bp, Homo sapiens
ctttttcactgctgt

SEQ ID NO: 677882 - DNA, 15 bp, Homo sapiens
tttttcactgctgtg

SEQ ID NO: 677883 - DNA, 15 bp, Homo sapiens
ttttcactgctgtgc

SEQ ID NO: 677884 - DNA, 15 bp, Homo sapiens
tttcactgctgtgca

SEQ ID NO: 677885 - DNA, 15 bp, Homo sapiens
ttcactgctgtgcat

SEQ ID NO: 677886 - DNA, 15 bp, Homo sapiens
tcactgctgtgcatg

SEQ ID NO: 677887 - DNA, 15 bp, Homo sapiens
cactgctgtgcatgg

SEQ ID NO: 677888 - DNA, 15 bp, Homo sapiens
actgctgtgcatggg

SEQ ID NO: 677889 - DNA, 15 bp, Homo sapiens
ctgctgtgcatgggg

SEQ ID NO: 677890 - DNA, 15 bp, Homo sapiens
tgctgtgcatggggg

SEQ ID NO: 677891 - DNA, 15 bp, Homo sapiens
gctgtgcatggggga

SEQ ID NO: 677892 - DNA, 15 bp, Homo sapiens
ctgtgcatgggggaa

SEQ ID NO: 677893 - DNA, 15 bp, Homo sapiens
tgtgcatgggggaag

SEQ ID NO: 677894 - DNA, 15 bp, Homo sapiens
gtgcatgggggaagg

SEQ ID NO: 677895 - DNA, 15 bp, Homo sapiens
tgcatgggggaaggg

SEQ ID NO: 677896 - DNA, 15 bp, Homo sapiens
gcatgggggaagggg

SEQ ID NO: 677897 - DNA, 15 bp, Homo sapiens
catgggggaagggga

SEQ ID NO: 677898 - DNA, 15 bp, Homo sapiens
atgggggaaggggaa

SEQ ID NO: 677899 - DNA, 15 bp, Homo sapiens
tgggggaaggggaaa

SEQ ID NO: 677900 - DNA, 15 bp, Homo sapiens
gggggaaggggaaat

SEQ ID NO: 677901 - DNA, 15 bp, Homo sapiens
ggggaaggggaaatc

SEQ ID NO: 677902 - DNA, 15 bp, Homo sapiens
gggaaggggaaatca

SEQ ID NO: 677903 - DNA, 15 bp, Homo sapiens
ggaaggggaaatcaa

SEQ ID NO: 677904 - DNA, 15 bp, Homo sapiens
gaaggggaaatcaag

SEQ ID NO: 677905 - DNA, 15 bp, Homo sapiens
aaggggaaatcaagt

SEQ ID NO: 677906 - DNA, 15 bp, Homo sapiens
aggggaaatcaagtc

SEQ ID NO: 677907 - DNA, 15 bp, Homo sapiens
ggggaaatcaagtca

SEQ ID NO: 677908 - DNA, 15 bp, Homo sapiens
gggaaatcaagtcaa

SEQ ID NO: 677909 - DNA, 15 bp, Homo sapiens
ggaaatcaagtcaag

SEQ ID NO: 677910 - DNA, 15 bp, Homo sapiens
gaaatcaagtcaagg

SEQ ID NO: 677911 - DNA, 15 bp, Homo sapiens
aaatcaagtcaaggt

SEQ ID NO: 677912 - DNA, 15 bp, Homo sapiens
aatcaagtcaaggtg

SEQ ID NO: 677913 - DNA, 15 bp, Homo sapiens
atcaagtcaaggtga

SEQ ID NO: 677914 - DNA, 15 bp, Homo sapiens
tcaagtcaaggtgaa

SEQ ID NO: 677915 - DNA, 15 bp, Homo sapiens
caagtcaaggtgaag

SEQ ID NO: 677916 - DNA, 15 bp, Homo sapiens
aagtcaaggtgaagg

SEQ ID NO: 677917 - DNA, 15 bp, Homo sapiens
agtcaaggtgaaggg

SEQ ID NO: 677918 - DNA, 15 bp, Homo sapiens
gtcaaggtgaagggt

SEQ ID NO: 677919 - DNA, 15 bp, Homo sapiens
tcaaggtgaagggtt

SEQ ID NO: 677920 - DNA, 15 bp, Homo sapiens
caaggtgaagggtta

SEQ ID NO: 677921 - DNA, 15 bp, Homo sapiens
aaggtgaagggttag

SEQ ID NO: 677922 - DNA, 15 bp, Homo sapiens
aggtgaagggttagg

SEQ ID NO: 677923 - DNA, 15 bp, Homo sapiens
ggtgaagggttagga

SEQ ID NO: 677924 - DNA, 15 bp, Homo sapiens
gtgaagggttaggat

SEQ ID NO: 677925 - DNA, 15 bp, Homo sapiens
tgaagggttaggatt

SEQ ID NO: 677926 - DNA, 15 bp, Homo sapiens
gaagggttaggatta

SEQ ID NO: 677927 - DNA, 15 bp, Homo sapiens
aagggttaggattat

SEQ ID NO: 677928 - DNA, 15 bp, Homo sapiens
agggttaggattatt

SEQ ID NO: 677929 - DNA, 15 bp, Homo sapiens
gggttaggattattc

SEQ ID NO: 677930 - DNA, 15 bp, Homo sapiens
ggttaggattattct

SEQ ID NO: 677931 - DNA, 15 bp, Homo sapiens
gttaggattattctg

SEQ ID NO: 677932 - DNA, 15 bp, Homo sapiens
ttaggattattctgg

SEQ ID NO: 677933 - DNA, 15 bp, Homo sapiens
taggattattctggg

SEQ ID NO: 677934 - DNA, 15 bp, Homo sapiens
aggattattctgggg

SEQ ID NO: 677935 - DNA, 15 bp, Homo sapiens
ggattattctgggga

SEQ ID NO: 677936 - DNA, 15 bp, Homo sapiens
gattattctggggac

SEQ ID NO: 677937 - DNA, 15 bp, Homo sapiens
attattctggggaca

SEQ ID NO: 677938 - DNA, 15 bp, Homo sapiens
ttattctggggacag

SEQ ID NO: 677939 - DNA, 15 bp, Homo sapiens
tattctggggacagc

SEQ ID NO: 677940 - DNA, 15 bp, Homo sapiens
attctggggacagca

SEQ ID NO: 677941 - DNA, 15 bp, Homo sapiens
ttctggggacagcag

SEQ ID NO: 677942 - DNA, 15 bp, Homo sapiens
tctggggacagcaga

SEQ ID NO: 677943 - DNA, 15 bp, Homo sapiens
ctggggacagcagac

SEQ ID NO: 677944 - DNA, 15 bp, Homo sapiens
tggggacagcagacc

SEQ ID NO: 677945 - DNA, 15 bp, Homo sapiens
ggggacagcagacct

SEQ ID NO: 677946 - DNA, 15 bp, Homo sapiens
gggacagcagacctg

SEQ ID NO: 677947 - DNA, 15 bp, Homo sapiens
ggacagcagacctga

SEQ ID NO: 677948 - DNA, 15 bp, Homo sapiens
gacagcagacctgag

SEQ ID NO: 677949 - DNA, 15 bp, Homo sapiens
acagcagacctgagt

SEQ ID NO: 677950 - DNA, 15 bp, Homo sapiens
cagcagacctgagtg

SEQ ID NO: 677951 - DNA, 15 bp, Homo sapiens
agcagacctgagtgg

SEQ ID NO: 677952 - DNA, 15 bp, Homo sapiens
gcagacctgagtggg

SEQ ID NO: 677953 - DNA, 15 bp, Homo sapiens
cagacctgagtggga

SEQ ID NO: 677954 - DNA, 15 bp, Homo sapiens
agacctgagtgggac

SEQ ID NO: 677955 - DNA, 15 bp, Homo sapiens
gacctgagtgggaca

SEQ ID NO: 677956 - DNA, 15 bp, Homo sapiens
acctgagtgggacac

SEQ ID NO: 677957 - DNA, 15 bp, Homo sapiens
cctgagtgggacacc

SEQ ID NO: 677958 - DNA, 15 bp, Homo sapiens
ctgagtgggacacct

SEQ ID NO: 677959 - DNA, 15 bp, Homo sapiens
tgagtgggacacctt

SEQ ID NO: 677960 - DNA, 15 bp, Homo sapiens
gagtgggacaccttg

SEQ ID NO: 677961 - DNA, 15 bp, Homo sapiens
agtgggacaccttga

SEQ ID NO: 677962 - DNA, 15 bp, Homo sapiens
gtgggacaccttgat

SEQ ID NO: 677963 - DNA, 15 bp, Homo sapiens
tgggacaccttgatg

SEQ ID NO: 677964 - DNA, 15 bp, Homo sapiens
gggacaccttgatgc

SEQ ID NO: 677965 - DNA, 15 bp, Homo sapiens
ggacaccttgatgca

SEQ ID NO: 677966 - DNA, 15 bp, Homo sapiens
gacaccttgatgcag

SEQ ID NO: 677967 - DNA, 15 bp, Homo sapiens
acaccttgatgcagg

SEQ ID NO: 677968 - DNA, 15 bp, Homo sapiens
caccttgatgcaggc

SEQ ID NO: 677969 - DNA, 15 bp, Homo sapiens
accttgatgcaggct

SEQ ID NO: 677970 - DNA, 15 bp, Homo sapiens
ccttgatgcaggctt

SEQ ID NO: 677971 - DNA, 15 bp, Homo sapiens
cttgatgcaggcttc

SEQ ID NO: 677972 - DNA, 15 bp, Homo sapiens
ttgatgcaggcttct

SEQ ID NO: 677973 - DNA, 15 bp, Homo sapiens
tgatgcaggcttctt

SEQ ID NO: 677974 - DNA, 15 bp, Homo sapiens
gatgcaggcttcttt

SEQ ID NO: 677975 - DNA, 15 bp, Homo sapiens
atgcaggcttcttta

SEQ ID NO: 677976 - DNA, 15 bp, Homo sapiens
tgcaggcttctttaa

SEQ ID NO: 677977 - DNA, 15 bp, Homo sapiens
gcaggcttctttaac

SEQ ID NO: 677978 - DNA, 15 bp, Homo sapiens
caggcttctttaacg

SEQ ID NO: 677979 - DNA, 15 bp, Homo sapiens
aggcttctttaacgc

SEQ ID NO: 677980 - DNA, 15 bp, Homo sapiens
ggcttctttaacgca

SEQ ID NO: 677981 - DNA, 15 bp, Homo sapiens
gcttctttaacgcag

SEQ ID NO: 677982 - DNA, 15 bp, Homo sapiens
cttctttaacgcaga

SEQ ID NO: 677983 - DNA, 15 bp, Homo sapiens
ttctttaacgcagag

SEQ ID NO: 677984 - DNA, 15 bp, Homo sapiens
tctttaacgcagagt

SEQ ID NO: 677985 - DNA, 15 bp, Homo sapiens
ctttaacgcagagta

SEQ ID NO: 677986 - DNA, 15 bp, Homo sapiens
tttaacgcagagtag

SEQ ID NO: 677987 - DNA, 15 bp, Homo sapiens
ttaacgcagagtagg

SEQ ID NO: 677988 - DNA, 15 bp, Homo sapiens
taacgcagagtagga

SEQ ID NO: 677989 - DNA, 15 bp, Homo sapiens
aacgcagagtaggac

SEQ ID NO: 677990 - DNA, 15 bp, Homo sapiens
acgcagagtaggaca

SEQ ID NO: 677991 - DNA, 15 bp, Homo sapiens
cgcagagtaggacac

SEQ ID NO: 677992 - DNA, 15 bp, Homo sapiens
gcagagtaggacaca

SEQ ID NO: 677993 - DNA, 15 bp, Homo sapiens
cagagtaggacacag

SEQ ID NO: 677994 - DNA, 15 bp, Homo sapiens
agagtaggacacaga

SEQ ID NO: 677995 - DNA, 15 bp, Homo sapiens
gagtaggacacagat

SEQ ID NO: 677996 - DNA, 15 bp, Homo sapiens
agtaggacacagatg

SEQ ID NO: 677997 - DNA, 15 bp, Homo sapiens
gtaggacacagatgg

SEQ ID NO: 677998 - DNA, 15 bp, Homo sapiens
taggacacagatggc

SEQ ID NO: 677999 - DNA, 15 bp, Homo sapiens
aggacacagatggct

SEQ ID NO: 678000 - DNA, 15 bp, Homo sapiens
ggacacagatggctg

SEQ ID NO: 678001 - DNA, 15 bp, Homo sapiens
gacacagatggctgg

SEQ ID NO: 678002 - DNA, 15 bp, Homo sapiens
acacagatggctgga

SEQ ID NO: 678003 - DNA, 15 bp, Homo sapiens
cacagatggctggag

SEQ ID NO: 678004 - DNA, 15 bp, Homo sapiens
acagatggctggagg

SEQ ID NO: 678005 - DNA, 15 bp, Homo sapiens
cagatggctggagga

SEQ ID NO: 678006 - DNA, 15 bp, Homo sapiens
agatggctggaggag

SEQ ID NO: 678007 - DNA, 15 bp, Homo sapiens
gatggctggaggagg

SEQ ID NO: 678008 - DNA, 15 bp, Homo sapiens
atggctggaggaggg

SEQ ID NO: 678009 - DNA, 15 bp, Homo sapiens
tggctggaggagggc

SEQ ID NO: 678010 - DNA, 15 bp, Homo sapiens
ggctggaggagggca

SEQ ID NO: 678011 - DNA, 15 bp, Homo sapiens
gctggaggagggcag

SEQ ID NO: 678012 - DNA, 15 bp, Homo sapiens
ctggaggagggcaga

SEQ ID NO: 678013 - DNA, 15 bp, Homo sapiens
tggaggagggcagac

SEQ ID NO: 678014 - DNA, 15 bp, Homo sapiens
ggaggagggcagaca

SEQ ID NO: 678015 - DNA, 15 bp, Homo sapiens
gaggagggcagacaa

SEQ ID NO: 678016 - DNA, 15 bp, Homo sapiens
aggagggcagacaag

SEQ ID NO: 678017 - DNA, 15 bp, Homo sapiens
ggagggcagacaagg

SEQ ID NO: 678018 - DNA, 15 bp, Homo sapiens
gagggcagacaagga

SEQ ID NO: 678019 - DNA, 15 bp, Homo sapiens
agggcagacaaggac

SEQ ID NO: 678020 - DNA, 15 bp, Homo sapiens
gggcagacaaggaca

SEQ ID NO: 678021 - DNA, 15 bp, Homo sapiens
ggcagacaaggacaa

SEQ ID NO: 678022 - DNA, 15 bp, Homo sapiens
gcagacaaggacaaa

SEQ ID NO: 678023 - DNA, 15 bp, Homo sapiens
cagacaaggacaaag

SEQ ID NO: 678024 - DNA, 15 bp, Homo sapiens
agacaaggacaaaga

SEQ ID NO: 678025 - DNA, 15 bp, Homo sapiens
gacaaggacaaagag

SEQ ID NO: 678026 - DNA, 15 bp, Homo sapiens
acaaggacaaagaga

SEQ ID NO: 678027 - DNA, 15 bp, Homo sapiens
caaggacaaagagaa

SEQ ID NO: 678028 - DNA, 15 bp, Homo sapiens
aaggacaaagagaag

SEQ ID NO: 678029 - DNA, 15 bp, Homo sapiens
aggacaaagagaagt

SEQ ID NO: 678030 - DNA, 15 bp, Homo sapiens
ggacaaagagaagtg

SEQ ID NO: 678031 - DNA, 15 bp, Homo sapiens
gacaaagagaagtgt

SEQ ID NO: 678032 - DNA, 15 bp, Homo sapiens
acaaagagaagtgtg

SEQ ID NO: 678033 - DNA, 15 bp, Homo sapiens
caaagagaagtgtga

SEQ ID NO: 678034 - DNA, 15 bp, Homo sapiens
aaagagaagtgtgaa

SEQ ID NO: 678035 - DNA, 15 bp, Homo sapiens
aagagaagtgtgaaa

SEQ ID NO: 678036 - DNA, 15 bp, Homo sapiens
agagaagtgtgaaaa

SEQ ID NO: 678037 - DNA, 15 bp, Homo sapiens
gagaagtgtgaaaaa

SEQ ID NO: 678038 - DNA, 15 bp, Homo sapiens
agaagtgtgaaaaaa

SEQ ID NO: 678039 - DNA, 15 bp, Homo sapiens
gaagtgtgaaaaaag

SEQ ID NO: 678040 - DNA, 15 bp, Homo sapiens
aagtgtgaaaaaaga

SEQ ID NO: 678041 - DNA, 15 bp, Homo sapiens
agtgtgaaaaaagag

SEQ ID NO: 678042 - DNA, 15 bp, Homo sapiens
gtgtgaaaaaagagg

SEQ ID NO: 678043 - DNA, 15 bp, Homo sapiens
tgtgaaaaaagaggg

SEQ ID NO: 678044 - DNA, 15 bp, Homo sapiens
gtgaaaaaagagggt

SEQ ID NO: 678045 - DNA, 15 bp, Homo sapiens
tgaaaaaagagggtc

SEQ ID NO: 678046 - DNA, 15 bp, Homo sapiens
gaaaaaagagggtca

SEQ ID NO: 678047 - DNA, 15 bp, Homo sapiens
aaaaaagagggtcaa

SEQ ID NO: 678048 - DNA, 15 bp, Homo sapiens
aaaaagagggtcaaa

SEQ ID NO: 678049 - DNA, 15 bp, Homo sapiens
aaaagagggtcaaat

SEQ ID NO: 678050 - DNA, 15 bp, Homo sapiens
aaagagggtcaaatg

SEQ ID NO: 678051 - DNA, 15 bp, Homo sapiens
aagagggtcaaatgt

SEQ ID NO: 678052 - DNA, 15 bp, Homo sapiens
agagggtcaaatgtg

SEQ ID NO: 678053 - DNA, 15 bp, Homo sapiens
gagggtcaaatgtgc

SEQ ID NO: 678054 - DNA, 15 bp, Homo sapiens
agggtcaaatgtgct

SEQ ID NO: 678055 - DNA, 15 bp, Homo sapiens
gggtcaaatgtgcta

SEQ ID NO: 678056 - DNA, 15 bp, Homo sapiens
ggtcaaatgtgctac

SEQ ID NO: 678057 - DNA, 15 bp, Homo sapiens
gtcaaatgtgctacc

SEQ ID NO: 678058 - DNA, 15 bp, Homo sapiens
tcaaatgtgctacca

SEQ ID NO: 678059 - DNA, 15 bp, Homo sapiens
caaatgtgctaccat

SEQ ID NO: 678060 - DNA, 15 bp, Homo sapiens
aaatgtgctaccatt

SEQ ID NO: 678061 - DNA, 15 bp, Homo sapiens
aatgtgctaccattt

SEQ ID NO: 678062 - DNA, 15 bp, Homo sapiens
atgtgctaccatttt

SEQ ID NO: 678063 - DNA, 15 bp, Homo sapiens
tgtgctaccattttg

SEQ ID NO: 678064 - DNA, 15 bp, Homo sapiens
gtgctaccattttgc

SEQ ID NO: 678065 - DNA, 15 bp, Homo sapiens
tgctaccattttgcc

SEQ ID NO: 678066 - DNA, 15 bp, Homo sapiens
gctaccattttgcca

SEQ ID NO: 678067 - DNA, 15 bp, Homo sapiens
ctaccattttgccag

SEQ ID NO: 678068 - DNA, 15 bp, Homo sapiens
taccattttgccagt

SEQ ID NO: 678069 - DNA, 15 bp, Homo sapiens
accattttgccagtt

SEQ ID NO: 678070 - DNA, 15 bp, Homo sapiens
ccattttgccagtta

SEQ ID NO: 678071 - DNA, 15 bp, Homo sapiens
cattttgccagttag

SEQ ID NO: 678072 - DNA, 15 bp, Homo sapiens
attttgccagttaga

SEQ ID NO: 678073 - DNA, 15 bp, Homo sapiens
ttttgccagttagac

SEQ ID NO: 678074 - DNA, 15 bp, Homo sapiens
tttgccagttagacc

SEQ ID NO: 678075 - DNA, 15 bp, Homo sapiens
ttgccagttagacca

SEQ ID NO: 678076 - DNA, 15 bp, Homo sapiens
tgccagttagaccaa

SEQ ID NO: 678077 - DNA, 15 bp, Homo sapiens
gccagttagaccaag

SEQ ID NO: 678078 - DNA, 15 bp, Homo sapiens
ccagttagaccaaga

SEQ ID NO: 678079 - DNA, 15 bp, Homo sapiens
cagttagaccaagat

SEQ ID NO: 678080 - DNA, 15 bp, Homo sapiens
agttagaccaagata

SEQ ID NO: 678081 - DNA, 15 bp, Homo sapiens
gttagaccaagatag

SEQ ID NO: 678082 - DNA, 15 bp, Homo sapiens
ttagaccaagatagg

SEQ ID NO: 678083 - DNA, 15 bp, Homo sapiens
tagaccaagataggg

SEQ ID NO: 678084 - DNA, 15 bp, Homo sapiens
agaccaagataggga

SEQ ID NO: 678085 - DNA, 15 bp, Homo sapiens
gaccaagatagggat

SEQ ID NO: 678086 - DNA, 15 bp, Homo sapiens
accaagatagggatg

SEQ ID NO: 678087 - DNA, 15 bp, Homo sapiens
ccaagatagggatgg

SEQ ID NO: 678088 - DNA, 15 bp, Homo sapiens
caagatagggatggc

SEQ ID NO: 678089 - DNA, 15 bp, Homo sapiens
aagatagggatggct

SEQ ID NO: 678090 - DNA, 15 bp, Homo sapiens
agatagggatggctt

SEQ ID NO: 678091 - DNA, 15 bp, Homo sapiens
gatagggatggctta

SEQ ID NO: 678092 - DNA, 15 bp, Homo sapiens
atagggatggcttaa

SEQ ID NO: 678093 - DNA, 15 bp, Homo sapiens
tagggatggcttaat

SEQ ID NO: 678094 - DNA, 15 bp, Homo sapiens
agggatggcttaatc

SEQ ID NO: 678095 - DNA, 15 bp, Homo sapiens
gggatggcttaatca

SEQ ID NO: 678096 - DNA, 15 bp, Homo sapiens
ggatggcttaatcac

SEQ ID NO: 678097 - DNA, 15 bp, Homo sapiens
gatggcttaatcacc

SEQ ID NO: 678098 - DNA, 15 bp, Homo sapiens
atggcttaatcacca

SEQ ID NO: 678099 - DNA, 15 bp, Homo sapiens
tggcttaatcaccat

SEQ ID NO: 678100 - DNA, 15 bp, Homo sapiens
ggcttaatcaccata

SEQ ID NO: 678101 - DNA, 15 bp, Homo sapiens
gcttaatcaccataa

SEQ ID NO: 678102 - DNA, 15 bp, Homo sapiens
cttaatcaccataaa

SEQ ID NO: 678103 - DNA, 15 bp, Homo sapiens
ttaatcaccataaaa

SEQ ID NO: 678104 - DNA, 15 bp, Homo sapiens
taatcaccataaaaa

SEQ ID NO: 678105 - DNA, 15 bp, Homo sapiens
aatcaccataaaaat

SEQ ID NO: 678106 - DNA, 15 bp, Homo sapiens
atcaccataaaaatc

SEQ ID NO: 678107 - DNA, 15 bp, Homo sapiens
tcaccataaaaatca

SEQ ID NO: 678108 - DNA, 15 bp, Homo sapiens
caccataaaaatcat

SEQ ID NO: 678109 - DNA, 15 bp, Homo sapiens
accataaaaatcatc

SEQ ID NO: 678110 - DNA, 15 bp, Homo sapiens
ccataaaaatcatca

SEQ ID NO: 678111 - DNA, 15 bp, Homo sapiens
cataaaaatcatcat

SEQ ID NO: 678112 - DNA, 15 bp, Homo sapiens
ataaaaatcatcatg

SEQ ID NO: 678113 - DNA, 15 bp, Homo sapiens
taaaaatcatcatgt

SEQ ID NO: 678114 - DNA, 15 bp, Homo sapiens
aaaaatcatcatgtt

SEQ ID NO: 678115 - DNA, 15 bp, Homo sapiens
aaaatcatcatgttg

SEQ ID NO: 678116 - DNA, 15 bp, Homo sapiens
aaatcatcatgttgg

SEQ ID NO: 678117 - DNA, 15 bp, Homo sapiens
aatcatcatgttggc

SEQ ID NO: 678118 - DNA, 15 bp, Homo sapiens
atcatcatgttggcc

SEQ ID NO: 678119 - DNA, 15 bp, Homo sapiens
tcatcatgttggcca

SEQ ID NO: 678120 - DNA, 15 bp, Homo sapiens
catcatgttggccat

SEQ ID NO: 678121 - DNA, 15 bp, Homo sapiens
atcatgttggccatg

SEQ ID NO: 678122 - DNA, 15 bp, Homo sapiens
tcatgttggccatgc

SEQ ID NO: 678123 - DNA, 15 bp, Homo sapiens
catgttggccatgct

SEQ ID NO: 678124 - DNA, 15 bp, Homo sapiens
atgttggccatgctg

SEQ ID NO: 678125 - DNA, 15 bp, Homo sapiens
tgttggccatgctgg

SEQ ID NO: 678126 - DNA, 15 bp, Homo sapiens
gttggccatgctggc

SEQ ID NO: 678127 - DNA, 15 bp, Homo sapiens
ttggccatgctggcc

SEQ ID NO: 678128 - DNA, 15 bp, Homo sapiens
tggccatgctggcct

SEQ ID NO: 678129 - DNA, 15 bp, Homo sapiens
ggccatgctggcctc

SEQ ID NO: 678130 - DNA, 15 bp, Homo sapiens
gccatgctggcctca

SEQ ID NO: 678131 - DNA, 15 bp, Homo sapiens
ccatgctggcctcaa

SEQ ID NO: 678132 - DNA, 15 bp, Homo sapiens
catgctggcctcaat

SEQ ID NO: 678133 - DNA, 15 bp, Homo sapiens
atgctggcctcaatg

SEQ ID NO: 678134 - DNA, 15 bp, Homo sapiens
tgctggcctcaatgg

SEQ ID NO: 678135 - DNA, 15 bp, Homo sapiens
gctggcctcaatggt

SEQ ID NO: 678136 - DNA, 15 bp, Homo sapiens
ctggcctcaatggta

SEQ ID NO: 678137 - DNA, 15 bp, Homo sapiens
tggcctcaatggtat

SEQ ID NO: 678138 - DNA, 15 bp, Homo sapiens
ggcctcaatggtata

SEQ ID NO: 678139 - DNA, 15 bp, Homo sapiens
gcctcaatggtataa

SEQ ID NO: 678140 - DNA, 15 bp, Homo sapiens
cctcaatggtataag

SEQ ID NO: 678141 - DNA, 15 bp, Homo sapiens
ctcaatggtataagt

SEQ ID NO: 678142 - DNA, 15 bp, Homo sapiens
tcaatggtataagtc

SEQ ID NO: 678143 - DNA, 15 bp, Homo sapiens
caatggtataagtct

SEQ ID NO: 678144 - DNA, 15 bp, Homo sapiens
aatggtataagtctt

SEQ ID NO: 678145 - DNA, 15 bp, Homo sapiens
atggtataagtcttg

SEQ ID NO: 678146 - DNA, 15 bp, Homo sapiens
tggtataagtcttgg

SEQ ID NO: 678147 - DNA, 15 bp, Homo sapiens
ggtataagtcttgga

SEQ ID NO: 678148 - DNA, 15 bp, Homo sapiens
gtataagtcttggag

SEQ ID NO: 678149 - DNA, 15 bp, Homo sapiens
tataagtcttggagg

SEQ ID NO: 678150 - DNA, 15 bp, Homo sapiens
ataagtcttggaggg

SEQ ID NO: 678151 - DNA, 15 bp, Homo sapiens
taagtcttggagggt

SEQ ID NO: 678152 - DNA, 15 bp, Homo sapiens
aagtcttggagggtt

SEQ ID NO: 678153 - DNA, 15 bp, Homo sapiens
agtcttggagggttg

SEQ ID NO: 678154 - DNA, 15 bp, Homo sapiens
gtcttggagggttgt

SEQ ID NO: 678155 - DNA, 15 bp, Homo sapiens
tcttggagggttgtt

SEQ ID NO: 678156 - DNA, 15 bp, Homo sapiens
cttggagggttgttg

SEQ ID NO: 678157 - DNA, 15 bp, Homo sapiens
ttggagggttgttgt

SEQ ID NO: 678158 - DNA, 15 bp, Homo sapiens
tggagggttgttgtt

SEQ ID NO: 678159 - DNA, 15 bp, Homo sapiens
ggagggttgttgttt

SEQ ID NO: 678160 - DNA, 15 bp, Homo sapiens
gagggttgttgtttt

SEQ ID NO: 678161 - DNA, 15 bp, Homo sapiens
agggttgttgttttg

SEQ ID NO: 678162 - DNA, 15 bp, Homo sapiens
gggttgttgttttga

SEQ ID NO: 678163 - DNA, 15 bp, Homo sapiens
ggttgttgttttgaa

SEQ ID NO: 678164 - DNA, 15 bp, Homo sapiens
gttgttgttttgaag

SEQ ID NO: 678165 - DNA, 15 bp, Homo sapiens
ttgttgttttgaagc

SEQ ID NO: 678166 - DNA, 15 bp, Homo sapiens
tgttgttttgaagct

SEQ ID NO: 678167 - DNA, 15 bp, Homo sapiens
gttgttttgaagctg

SEQ ID NO: 678168 - DNA, 15 bp, Homo sapiens
ttgttttgaagctgc

SEQ ID NO: 678169 - DNA, 15 bp, Homo sapiens
tgttttgaagctgct

SEQ ID NO: 678170 - DNA, 15 bp, Homo sapiens
gttttgaagctgctg

SEQ ID NO: 678171 - DNA, 15 bp, Homo sapiens
ttttgaagctgctga

SEQ ID NO: 678172 - DNA, 15 bp, Homo sapiens
tttgaagctgctgac

SEQ ID NO: 678173 - DNA, 15 bp, Homo sapiens
ttgaagctgctgaca

SEQ ID NO: 678174 - DNA, 15 bp, Homo sapiens
tgaagctgctgacac

SEQ ID NO: 678175 - DNA, 15 bp, Homo sapiens
gaagctgctgacacc

SEQ ID NO: 678176 - DNA, 15 bp, Homo sapiens
aagctgctgacaccc

SEQ ID NO: 678177 - DNA, 15 bp, Homo sapiens
agctgctgacaccct

SEQ ID NO: 678178 - DNA, 15 bp, Homo sapiens
gctgctgacaccctc

SEQ ID NO: 678179 - DNA, 15 bp, Homo sapiens
ctgctgacaccctca

SEQ ID NO: 678180 - DNA, 15 bp, Homo sapiens
tgctgacaccctcat

SEQ ID NO: 678181 - DNA, 15 bp, Homo sapiens
gctgacaccctcatg

SEQ ID NO: 678182 - DNA, 15 bp, Homo sapiens
ctgacaccctcatgc

SEQ ID NO: 678183 - DNA, 15 bp, Homo sapiens
tgacaccctcatgca

SEQ ID NO: 678184 - DNA, 15 bp, Homo sapiens
gacaccctcatgcaa

SEQ ID NO: 678185 - DNA, 15 bp, Homo sapiens
acaccctcatgcaac

SEQ ID NO: 678186 - DNA, 15 bp, Homo sapiens
caccctcatgcaacg

SEQ ID NO: 678187 - DNA, 15 bp, Homo sapiens
accctcatgcaacga

SEQ ID NO: 678188 - DNA, 15 bp, Homo sapiens
ccctcatgcaacgat

SEQ ID NO: 678189 - DNA, 15 bp, Homo sapiens
cctcatgcaacgatc

SEQ ID NO: 678190 - DNA, 15 bp, Homo sapiens
ctcatgcaacgatcc

SEQ ID NO: 678191 - DNA, 15 bp, Homo sapiens
tcatgcaacgatcct

SEQ ID NO: 678192 - DNA, 15 bp, Homo sapiens
catgcaacgatcctc

SEQ ID NO: 678193 - DNA, 15 bp, Homo sapiens
atgcaacgatcctcc

SEQ ID NO: 678194 - DNA, 15 bp, Homo sapiens
tgcaacgatcctcca

SEQ ID NO: 678195 - DNA, 15 bp, Homo sapiens
gcaacgatcctccaa

SEQ ID NO: 678196 - DNA, 15 bp, Homo sapiens
caacgatcctccaaa

SEQ ID NO: 678197 - DNA, 15 bp, Homo sapiens
aacgatcctccaaat

SEQ ID NO: 678198 - DNA, 15 bp, Homo sapiens
acgatcctccaaatg

SEQ ID NO: 678199 - DNA, 15 bp, Homo sapiens
cgatcctccaaatgg

SEQ ID NO: 678200 - DNA, 15 bp, Homo sapiens
gatcctccaaatgga

SEQ ID NO: 678201 - DNA, 15 bp, Homo sapiens
atcctccaaatggac

SEQ ID NO: 678202 - DNA, 15 bp, Homo sapiens
tcctccaaatggaca

SEQ ID NO: 678203 - DNA, 15 bp, Homo sapiens
cctccaaatggacaa

SEQ ID NO: 678204 - DNA, 15 bp, Homo sapiens
ctccaaatggacaat

SEQ ID NO: 678205 - DNA, 15 bp, Homo sapiens
tccaaatggacaatc

SEQ ID NO: 678206 - DNA, 15 bp, Homo sapiens
ccaaatggacaatct

SEQ ID NO: 678207 - DNA, 15 bp, Homo sapiens
caaatggacaatcta

SEQ ID NO: 678208 - DNA, 15 bp, Homo sapiens
aaatggacaatctag

SEQ ID NO: 678209 - DNA, 15 bp, Homo sapiens
aatggacaatctagt

SEQ ID NO: 678210 - DNA, 15 bp, Homo sapiens
atggacaatctagta

SEQ ID NO: 678211 - DNA, 15 bp, Homo sapiens
tggacaatctagtaa

SEQ ID NO: 678212 - DNA, 15 bp, Homo sapiens
ggacaatctagtaac

SEQ ID NO: 678213 - DNA, 15 bp, Homo sapiens
gacaatctagtaact

SEQ ID NO: 678214 - DNA, 15 bp, Homo sapiens
acaatctagtaactt

SEQ ID NO: 678215 - DNA, 15 bp, Homo sapiens
caatctagtaacttt

SEQ ID NO: 678216 - DNA, 15 bp, Homo sapiens
aatctagtaactttt

SEQ ID NO: 678217 - DNA, 15 bp, Homo sapiens
atctagtaacttttt

SEQ ID NO: 678218 - DNA, 15 bp, Homo sapiens
tctagtaacttttta

SEQ ID NO: 678219 - DNA, 15 bp, Homo sapiens
ctagtaactttttag

SEQ ID NO: 678220 - DNA, 15 bp, Homo sapiens
tagtaactttttagt

SEQ ID NO: 678221 - DNA, 15 bp, Homo sapiens
agtaactttttagtt

SEQ ID NO: 678222 - DNA, 15 bp, Homo sapiens
gtaactttttagttt

SEQ ID NO: 678223 - DNA, 15 bp, Homo sapiens
taactttttagtttt

SEQ ID NO: 678224 - DNA, 15 bp, Homo sapiens
aactttttagttttt

SEQ ID NO: 678225 - DNA, 15 bp, Homo sapiens
actttttagtttttt

SEQ ID NO: 678226 - DNA, 15 bp, Homo sapiens
ctttttagttttttt

SEQ ID NO: 678227 - DNA, 15 bp, Homo sapiens
tttttagtttttttt

SEQ ID NO: 678228 - DNA, 15 bp, Homo sapiens
ttttagttttttttt

SEQ ID NO: 678229 - DNA, 15 bp, Homo sapiens
tttagtttttttttc

SEQ ID NO: 678230 - DNA, 15 bp, Homo sapiens
ttagtttttttttct

SEQ ID NO: 678231 - DNA, 15 bp, Homo sapiens
tagtttttttttctt

SEQ ID NO: 678232 - DNA, 15 bp, Homo sapiens
gtttttttttctttt

SEQ ID NO: 678233 - DNA, 15 bp, Homo sapiens
tttttttttcttttt

SEQ ID NO: 678234 - DNA, 15 bp, Homo sapiens
ttttttttctttttt

SEQ ID NO: 678235 - DNA, 15 bp, Homo sapiens
tttttttctttttta

SEQ ID NO: 678236 - DNA, 15 bp, Homo sapiens
ttttttcttttttat

SEQ ID NO: 678237 - DNA, 15 bp, Homo sapiens
tttttcttttttata

SEQ ID NO: 678238 - DNA, 15 bp, Homo sapiens
ttttcttttttatac

SEQ ID NO: 678239 - DNA, 15 bp, Homo sapiens
tttcttttttatacc

SEQ ID NO: 678240 - DNA, 15 bp, Homo sapiens
ttcttttttataccc

SEQ ID NO: 678241 - DNA, 15 bp, Homo sapiens
tcttttttataccct

SEQ ID NO: 678242 - DNA, 15 bp, Homo sapiens
cttttttataccctt

SEQ ID NO: 678243 - DNA, 15 bp, Homo sapiens
ttttttatacccttc

SEQ ID NO: 678244 - DNA, 15 bp, Homo sapiens
tttttatacccttct

SEQ ID NO: 678245 - DNA, 15 bp, Homo sapiens
ttttatacccttctt

SEQ ID NO: 678246 - DNA, 15 bp, Homo sapiens
tttatacccttctta

SEQ ID NO: 678247 - DNA, 15 bp, Homo sapiens
ttatacccttcttat

SEQ ID NO: 678248 - DNA, 15 bp, Homo sapiens
tatacccttcttata

SEQ ID NO: 678249 - DNA, 15 bp, Homo sapiens
atacccttcttatag

SEQ ID NO: 678250 - DNA, 15 bp, Homo sapiens
tacccttcttatagt

SEQ ID NO: 678251 - DNA, 15 bp, Homo sapiens
acccttcttatagtt

SEQ ID NO: 678252 - DNA, 15 bp, Homo sapiens
cccttcttatagttt

SEQ ID NO: 678253 - DNA, 15 bp, Homo sapiens
ccttcttatagtttg

SEQ ID NO: 678254 - DNA, 15 bp, Homo sapiens
cttcttatagtttgt

SEQ ID NO: 678255 - DNA, 15 bp, Homo sapiens
ttcttatagtttgtg

SEQ ID NO: 678256 - DNA, 15 bp, Homo sapiens
tcttatagtttgtgg

SEQ ID NO: 678257 - DNA, 15 bp, Homo sapiens
cttatagtttgtgga

SEQ ID NO: 678258 - DNA, 15 bp, Homo sapiens
ttatagtttgtggac

SEQ ID NO: 678259 - DNA, 15 bp, Homo sapiens
tatagtttgtggact

SEQ ID NO: 678260 - DNA, 15 bp, Homo sapiens
atagtttgtggactt

SEQ ID NO: 678261 - DNA, 15 bp, Homo sapiens
tagtttgtggacttt

SEQ ID NO: 678262 - DNA, 15 bp, Homo sapiens
agtttgtggactttg

SEQ ID NO: 678263 - DNA, 15 bp, Homo sapiens
gtttgtggactttgg

SEQ ID NO: 678264 - DNA, 15 bp, Homo sapiens
tttgtggactttggt

SEQ ID NO: 678265 - DNA, 15 bp, Homo sapiens
ttgtggactttggtt

SEQ ID NO: 678266 - DNA, 15 bp, Homo sapiens
tgtggactttggttt

SEQ ID NO: 678267 - DNA, 15 bp, Homo sapiens
gtggactttggtttt

SEQ ID NO: 678268 - DNA, 15 bp, Homo sapiens
tggactttggttttc

SEQ ID NO: 678269 - DNA, 15 bp, Homo sapiens
ggactttggttttca

SEQ ID NO: 678270 - DNA, 15 bp, Homo sapiens
gactttggttttcag

SEQ ID NO: 678271 - DNA, 15 bp, Homo sapiens
actttggttttcagc

SEQ ID NO: 678272 - DNA, 15 bp, Homo sapiens
ctttggttttcagct

SEQ ID NO: 678273 - DNA, 15 bp, Homo sapiens
tttggttttcagctt

SEQ ID NO: 678274 - DNA, 15 bp, Homo sapiens
ttggttttcagcttc

SEQ ID NO: 678275 - DNA, 15 bp, Homo sapiens
tggttttcagcttct

SEQ ID NO: 678276 - DNA, 15 bp, Homo sapiens
ggttttcagcttctc

SEQ ID NO: 678277 - DNA, 15 bp, Homo sapiens
gttttcagcttctcg

SEQ ID NO: 678278 - DNA, 15 bp, Homo sapiens
ttttcagcttctcga

SEQ ID NO: 678279 - DNA, 15 bp, Homo sapiens
tttcagcttctcgat

SEQ ID NO: 678280 - DNA, 15 bp, Homo sapiens
ttcagcttctcgatg

SEQ ID NO: 678281 - DNA, 15 bp, Homo sapiens
tcagcttctcgatgg

SEQ ID NO: 678282 - DNA, 15 bp, Homo sapiens
cagcttctcgatggt

SEQ ID NO: 678283 - DNA, 15 bp, Homo sapiens
agcttctcgatggtc

SEQ ID NO: 678284 - DNA, 15 bp, Homo sapiens
gcttctcgatggtca

SEQ ID NO: 678285 - DNA, 15 bp, Homo sapiens
cttctcgatggtcaa

SEQ ID NO: 678286 - DNA, 15 bp, Homo sapiens
ttctcgatggtcaag

SEQ ID NO: 678287 - DNA, 15 bp, Homo sapiens
tctcgatggtcaaga

SEQ ID NO: 678288 - DNA, 15 bp, Homo sapiens
ctcgatggtcaagaa

SEQ ID NO: 678289 - DNA, 15 bp, Homo sapiens
tcgatggtcaagaag

SEQ ID NO: 678290 - DNA, 15 bp, Homo sapiens
cgatggtcaagaagc

SEQ ID NO: 678291 - DNA, 15 bp, Homo sapiens
gatggtcaagaagca

SEQ ID NO: 678292 - DNA, 15 bp, Homo sapiens
atggtcaagaagcaa

SEQ ID NO: 678293 - DNA, 15 bp, Homo sapiens
tggtcaagaagcaaa

SEQ ID NO: 678294 - DNA, 15 bp, Homo sapiens
ggtcaagaagcaaag

SEQ ID NO: 678295 - DNA, 15 bp, Homo sapiens
gtcaagaagcaaaga

SEQ ID NO: 678296 - DNA, 15 bp, Homo sapiens
tcaagaagcaaagaa

SEQ ID NO: 678297 - DNA, 15 bp, Homo sapiens
caagaagcaaagaaa

SEQ ID NO: 678298 - DNA, 15 bp, Homo sapiens
aagaagcaaagaaac

SEQ ID NO: 678299 - DNA, 15 bp, Homo sapiens
agaagcaaagaaact

SEQ ID NO: 678300 - DNA, 15 bp, Homo sapiens
gaagcaaagaaactc

SEQ ID NO: 678301 - DNA, 15 bp, Homo sapiens
aagcaaagaaactca

SEQ ID NO: 678302 - DNA, 15 bp, Homo sapiens
agcaaagaaactcaa

SEQ ID NO: 678303 - DNA, 15 bp, Homo sapiens
gcaaagaaactcaat

SEQ ID NO: 678304 - DNA, 15 bp, Homo sapiens
caaagaaactcaatg

SEQ ID NO: 678305 - DNA, 15 bp, Homo sapiens
aaagaaactcaatgt

SEQ ID NO: 678306 - DNA, 15 bp, Homo sapiens
aagaaactcaatgtc

SEQ ID NO: 678307 - DNA, 15 bp, Homo sapiens
agaaactcaatgtcc

SEQ ID NO: 678308 - DNA, 15 bp, Homo sapiens
gaaactcaatgtcca

SEQ ID NO: 678309 - DNA, 15 bp, Homo sapiens
aaactcaatgtccag

SEQ ID NO: 678310 - DNA, 15 bp, Homo sapiens
aactcaatgtccagt

SEQ ID NO: 678311 - DNA, 15 bp, Homo sapiens
actcaatgtccagtg

SEQ ID NO: 678312 - DNA, 15 bp, Homo sapiens
ctcaatgtccagtgg

SEQ ID NO: 678313 - DNA, 15 bp, Homo sapiens
tcaatgtccagtggc

SEQ ID NO: 678314 - DNA, 15 bp, Homo sapiens
caatgtccagtggct

SEQ ID NO: 678315 - DNA, 15 bp, Homo sapiens
aatgtccagtggctc

SEQ ID NO: 678316 - DNA, 15 bp, Homo sapiens
atgtccagtggctca

SEQ ID NO: 678317 - DNA, 15 bp, Homo sapiens
tgtccagtggctcag

SEQ ID NO: 678318 - DNA, 15 bp, Homo sapiens
gtccagtggctcaga

SEQ ID NO: 678319 - DNA, 15 bp, Homo sapiens
tccagtggctcagag

SEQ ID NO: 678320 - DNA, 15 bp, Homo sapiens
ccagtggctcagagc

SEQ ID NO: 678321 - DNA, 15 bp, Homo sapiens
cagtggctcagagct

SEQ ID NO: 678322 - DNA, 15 bp, Homo sapiens
agtggctcagagctc

SEQ ID NO: 678323 - DNA, 15 bp, Homo sapiens
gtggctcagagctca

SEQ ID NO: 678324 - DNA, 15 bp, Homo sapiens
tggctcagagctcaa

SEQ ID NO: 678325 - DNA, 15 bp, Homo sapiens
ggctcagagctcaac

SEQ ID NO: 678326 - DNA, 15 bp, Homo sapiens
gctcagagctcaact

SEQ ID NO: 678327 - DNA, 15 bp, Homo sapiens
ctcagagctcaactc

SEQ ID NO: 678328 - DNA, 15 bp, Homo sapiens
tcagagctcaactcg

SEQ ID NO: 678329 - DNA, 15 bp, Homo sapiens
cagagctcaactcgg

SEQ ID NO: 678330 - DNA, 15 bp, Homo sapiens
agagctcaactcgga

SEQ ID NO: 678331 - DNA, 15 bp, Homo sapiens
gagctcaactcggaa

SEQ ID NO: 678332 - DNA, 15 bp, Homo sapiens
agctcaactcggaat

SEQ ID NO: 678333 - DNA, 15 bp, Homo sapiens
gctcaactcggaatc

SEQ ID NO: 678334 - DNA, 15 bp, Homo sapiens
ctcaactcggaatcg

SEQ ID NO: 678335 - DNA, 15 bp, Homo sapiens
tcaactcggaatcgt

SEQ ID NO: 678336 - DNA, 15 bp, Homo sapiens
caactcggaatcgtg

SEQ ID NO: 678337 - DNA, 15 bp, Homo sapiens
aactcggaatcgtgt

SEQ ID NO: 678338 - DNA, 15 bp, Homo sapiens
actcggaatcgtgtc

SEQ ID NO: 678339 - DNA, 15 bp, Homo sapiens
ctcggaatcgtgtct

SEQ ID NO: 678340 - DNA, 15 bp, Homo sapiens
tcggaatcgtgtctc

SEQ ID NO: 678341 - DNA, 15 bp, Homo sapiens
cggaatcgtgtctca

SEQ ID NO: 678342 - DNA, 15 bp, Homo sapiens
ggaatcgtgtctcag

SEQ ID NO: 678343 - DNA, 15 bp, Homo sapiens
gaatcgtgtctcagg

SEQ ID NO: 678344 - DNA, 15 bp, Homo sapiens
aatcgtgtctcagga

SEQ ID NO: 678345 - DNA, 15 bp, Homo sapiens
atcgtgtctcaggag

SEQ ID NO: 678346 - DNA, 15 bp, Homo sapiens
tcgtgtctcaggagc

SEQ ID NO: 678347 - DNA, 15 bp, Homo sapiens
cgtgtctcaggagcc

SEQ ID NO: 678348 - DNA, 15 bp, Homo sapiens
gtgtctcaggagcct

SEQ ID NO: 678349 - DNA, 15 bp, Homo sapiens
tgtctcaggagccta

SEQ ID NO: 678350 - DNA, 15 bp, Homo sapiens
gtctcaggagcctat

SEQ ID NO: 678351 - DNA, 15 bp, Homo sapiens
tctcaggagcctatc

SEQ ID NO: 678352 - DNA, 15 bp, Homo sapiens
ctcaggagcctatcc

SEQ ID NO: 678353 - DNA, 15 bp, Homo sapiens
tcaggagcctatcct

SEQ ID NO: 678354 - DNA, 15 bp, Homo sapiens
caggagcctatccta

SEQ ID NO: 678355 - DNA, 15 bp, Homo sapiens
aggagcctatcctat

SEQ ID NO: 678356 - DNA, 15 bp, Homo sapiens
ggagcctatcctatt

SEQ ID NO: 678357 - DNA, 15 bp, Homo sapiens
gagcctatcctattt

SEQ ID NO: 678358 - DNA, 15 bp, Homo sapiens
agcctatcctatttg

SEQ ID NO: 678359 - DNA, 15 bp, Homo sapiens
gcctatcctatttga

SEQ ID NO: 678360 - DNA, 15 bp, Homo sapiens
cctatcctatttgac

SEQ ID NO: 678361 - DNA, 15 bp, Homo sapiens
ctatcctatttgact

SEQ ID NO: 678362 - DNA, 15 bp, Homo sapiens
tatcctatttgactg

SEQ ID NO: 678363 - DNA, 15 bp, Homo sapiens
atcctatttgactgc

SEQ ID NO: 678364 - DNA, 15 bp, Homo sapiens
tcctatttgactgca

SEQ ID NO: 678365 - DNA, 15 bp, Homo sapiens
cctatttgactgcag

SEQ ID NO: 678366 - DNA, 15 bp, Homo sapiens
ctatttgactgcagc

SEQ ID NO: 678367 - DNA, 15 bp, Homo sapiens
tatttgactgcagca

SEQ ID NO: 678368 - DNA, 15 bp, Homo sapiens
atttgactgcagcat

SEQ ID NO: 678369 - DNA, 15 bp, Homo sapiens
tttgactgcagcatt

SEQ ID NO: 678370 - DNA, 15 bp, Homo sapiens
ttgactgcagcattg

SEQ ID NO: 678371 - DNA, 15 bp, Homo sapiens
tgactgcagcattgc

SEQ ID NO: 678372 - DNA, 15 bp, Homo sapiens
gactgcagcattgcc

SEQ ID NO: 678373 - DNA, 15 bp, Homo sapiens
actgcagcattgccg

SEQ ID NO: 678374 - DNA, 15 bp, Homo sapiens
ctgcagcattgccga

SEQ ID NO: 678375 - DNA, 15 bp, Homo sapiens
tgcagcattgccgag

SEQ ID NO: 678376 - DNA, 15 bp, Homo sapiens
gcagcattgccgaga

SEQ ID NO: 678377 - DNA, 15 bp, Homo sapiens
cagcattgccgagaa

SEQ ID NO: 678378 - DNA, 15 bp, Homo sapiens
agcattgccgagaat

SEQ ID NO: 678379 - DNA, 15 bp, Homo sapiens
gcattgccgagaata

SEQ ID NO: 678380 - DNA, 15 bp, Homo sapiens
cattgccgagaatat

SEQ ID NO: 678381 - DNA, 15 bp, Homo sapiens
attgccgagaatatt

SEQ ID NO: 678382 - DNA, 15 bp, Homo sapiens
ttgccgagaatattg

SEQ ID NO: 678383 - DNA, 15 bp, Homo sapiens
tgccgagaatattgc

SEQ ID NO: 678384 - DNA, 15 bp, Homo sapiens
gccgagaatattgcc

SEQ ID NO: 678385 - DNA, 15 bp, Homo sapiens
ccgagaatattgcct

SEQ ID NO: 678386 - DNA, 15 bp, Homo sapiens
cgagaatattgccta

SEQ ID NO: 678387 - DNA, 15 bp, Homo sapiens
gagaatattgcctat

SEQ ID NO: 678388 - DNA, 15 bp, Homo sapiens
agaatattgcctatg

SEQ ID NO: 678389 - DNA, 15 bp, Homo sapiens
gaatattgcctatgg

SEQ ID NO: 678390 - DNA, 15 bp, Homo sapiens
aatattgcctatgga

SEQ ID NO: 678391 - DNA, 15 bp, Homo sapiens
atattgcctatggag

SEQ ID NO: 678392 - DNA, 15 bp, Homo sapiens
tattgcctatggaga

SEQ ID NO: 678393 - DNA, 15 bp, Homo sapiens
attgcctatggagac

SEQ ID NO: 678394 - DNA, 15 bp, Homo sapiens
ttgcctatggagaca

SEQ ID NO: 678395 - DNA, 15 bp, Homo sapiens
tgcctatggagacaa

SEQ ID NO: 678396 - DNA, 15 bp, Homo sapiens
gcctatggagacaac

SEQ ID NO: 678397 - DNA, 15 bp, Homo sapiens
cctatggagacaaca

SEQ ID NO: 678398 - DNA, 15 bp, Homo sapiens
ctatggagacaacag

SEQ ID NO: 678399 - DNA, 15 bp, Homo sapiens
tatggagacaacagc

SEQ ID NO: 678400 - DNA, 15 bp, Homo sapiens
atggagacaacagcc

SEQ ID NO: 678401 - DNA, 15 bp, Homo sapiens
tggagacaacagccg

SEQ ID NO: 678402 - DNA, 15 bp, Homo sapiens
ggagacaacagccgg

SEQ ID NO: 678403 - DNA, 15 bp, Homo sapiens
gagacaacagccggg

SEQ ID NO: 678404 - DNA, 15 bp, Homo sapiens
agacaacagccgggt

SEQ ID NO: 678405 - DNA, 15 bp, Homo sapiens
gacaacagccgggtt

SEQ ID NO: 678406 - DNA, 15 bp, Homo sapiens
acaacagccgggttg

SEQ ID NO: 678407 - DNA, 15 bp, Homo sapiens
caacagccgggttgt

SEQ ID NO: 678408 - DNA, 15 bp, Homo sapiens
aacagccgggttgta

SEQ ID NO: 678409 - DNA, 15 bp, Homo sapiens
acagccgggttgtat

SEQ ID NO: 678410 - DNA, 15 bp, Homo sapiens
cagccgggttgtatc

SEQ ID NO: 678411 - DNA, 15 bp, Homo sapiens
agccgggttgtatca

SEQ ID NO: 678412 - DNA, 15 bp, Homo sapiens
gccgggttgtatcac

SEQ ID NO: 678413 - DNA, 15 bp, Homo sapiens
tcaggcaagttagga

SEQ ID NO: 678414 - DNA, 15 bp, Homo sapiens
caggcaagttaggaa

SEQ ID NO: 678415 - DNA, 15 bp, Homo sapiens
aggcaagttaggaaa

SEQ ID NO: 678416 - DNA, 15 bp, Homo sapiens
ggcaagttaggaaaa

SEQ ID NO: 678417 - DNA, 15 bp, Homo sapiens
gcaagttaggaaaag

SEQ ID NO: 678418 - DNA, 15 bp, Homo sapiens
caagttaggaaaagt

SEQ ID NO: 678419 - DNA, 15 bp, Homo sapiens
aagttaggaaaagtg

SEQ ID NO: 678420 - DNA, 15 bp, Homo sapiens
agttaggaaaagtgg

SEQ ID NO: 678421 - DNA, 15 bp, Homo sapiens
gttaggaaaagtggt

SEQ ID NO: 678422 - DNA, 15 bp, Homo sapiens
ttaggaaaagtggtg

SEQ ID NO: 678423 - DNA, 15 bp, Homo sapiens
taggaaaagtggtga

SEQ ID NO: 678424 - DNA, 15 bp, Homo sapiens
aggaaaagtggtgaa

SEQ ID NO: 678425 - DNA, 15 bp, Homo sapiens
ggaaaagtggtgaag

SEQ ID NO: 678426 - DNA, 15 bp, Homo sapiens
gaaaagtggtgaagt

SEQ ID NO: 678427 - DNA, 15 bp, Homo sapiens
aaaagtggtgaagtg

SEQ ID NO: 678428 - DNA, 15 bp, Homo sapiens
aaagtggtgaagtgt

SEQ ID NO: 678429 - DNA, 15 bp, Homo sapiens
aagtggtgaagtgtg

SEQ ID NO: 678430 - DNA, 15 bp, Homo sapiens
agtggtgaagtgtga

SEQ ID NO: 678431 - DNA, 15 bp, Homo sapiens
gtggtgaagtgtgag

SEQ ID NO: 678432 - DNA, 15 bp, Homo sapiens
tggtgaagtgtgagt

SEQ ID NO: 678433 - DNA, 15 bp, Homo sapiens
ggtgaagtgtgagtg

SEQ ID NO: 678434 - DNA, 15 bp, Homo sapiens
gtgaagtgtgagtga

SEQ ID NO: 678435 - DNA, 15 bp, Homo sapiens
tgaagtgtgagtgag

SEQ ID NO: 678436 - DNA, 15 bp, Homo sapiens
gaagtgtgagtgaga

SEQ ID NO: 678437 - DNA, 15 bp, Homo sapiens
aagtgtgagtgagag

SEQ ID NO: 678438 - DNA, 15 bp, Homo sapiens
agtgtgagtgagagg

SEQ ID NO: 678439 - DNA, 15 bp, Homo sapiens
gtgtgagtgagagga

SEQ ID NO: 678440 - DNA, 15 bp, Homo sapiens
tgtgagtgagaggag

SEQ ID NO: 678441 - DNA, 15 bp, Homo sapiens
gtgagtgagaggagg

SEQ ID NO: 678442 - DNA, 15 bp, Homo sapiens
tgagtgagaggaggt

SEQ ID NO: 678443 - DNA, 15 bp, Homo sapiens
gagtgagaggaggtt

SEQ ID NO: 678444 - DNA, 15 bp, Homo sapiens
agtgagaggaggttt

SEQ ID NO: 678445 - DNA, 15 bp, Homo sapiens
gtgagaggaggtttc

SEQ ID NO: 678446 - DNA, 15 bp, Homo sapiens
tgagaggaggtttct

SEQ ID NO: 678447 - DNA, 15 bp, Homo sapiens
gagaggaggtttctg

SEQ ID NO: 678448 - DNA, 15 bp, Homo sapiens
agaggaggtttctgt

SEQ ID NO: 678449 - DNA, 15 bp, Homo sapiens
gaggaggtttctgtg

SEQ ID NO: 678450 - DNA, 15 bp, Homo sapiens
aggaggtttctgtgc

SEQ ID NO: 678451 - DNA, 15 bp, Homo sapiens
ggaggtttctgtgca

SEQ ID NO: 678452 - DNA, 15 bp, Homo sapiens
gaggtttctgtgcag

SEQ ID NO: 678453 - DNA, 15 bp, Homo sapiens
aggtttctgtgcagg

SEQ ID NO: 678454 - DNA, 15 bp, Homo sapiens
ggtttctgtgcaggt

SEQ ID NO: 678455 - DNA, 15 bp, Homo sapiens
gtttctgtgcaggtg

SEQ ID NO: 678456 - DNA, 15 bp, Homo sapiens
tttctgtgcaggtga

SEQ ID NO: 678457 - DNA, 15 bp, Homo sapiens
ttctgtgcaggtgat

SEQ ID NO: 678458 - DNA, 15 bp, Homo sapiens
tctgtgcaggtgatg

SEQ ID NO: 678459 - DNA, 15 bp, Homo sapiens
ctgtgcaggtgatgc

SEQ ID NO: 678460 - DNA, 15 bp, Homo sapiens
tgtgcaggtgatgca

SEQ ID NO: 678461 - DNA, 15 bp, Homo sapiens
gtgcaggtgatgcag

SEQ ID NO: 678462 - DNA, 15 bp, Homo sapiens
tgcaggtgatgcagt

SEQ ID NO: 678463 - DNA, 15 bp, Homo sapiens
gcaggtgatgcagtc

SEQ ID NO: 678464 - DNA, 15 bp, Homo sapiens
caggtgatgcagtct

SEQ ID NO: 678465 - DNA, 15 bp, Homo sapiens
aggtgatgcagtctc

SEQ ID NO: 678466 - DNA, 15 bp, Homo sapiens
ggtgatgcagtctcc

SEQ ID NO: 678467 - DNA, 15 bp, Homo sapiens
gtgatgcagtctcca

SEQ ID NO: 678468 - DNA, 15 bp, Homo sapiens
tgatgcagtctccaa

SEQ ID NO: 678469 - DNA, 15 bp, Homo sapiens
gatgcagtctccaaa

SEQ ID NO: 678470 - DNA, 15 bp, Homo sapiens
atgcagtctccaaaa

SEQ ID NO: 678471 - DNA, 15 bp, Homo sapiens
tgcagtctccaaaat

SEQ ID NO: 678472 - DNA, 15 bp, Homo sapiens
gcagtctccaaaata

SEQ ID NO: 678473 - DNA, 15 bp, Homo sapiens
cagtctccaaaatac

SEQ ID NO: 678474 - DNA, 15 bp, Homo sapiens
agtctccaaaatacg

SEQ ID NO: 678475 - DNA, 15 bp, Homo sapiens
gtctccaaaatacgc

SEQ ID NO: 678476 - DNA, 15 bp, Homo sapiens
tctccaaaatacgca

SEQ ID NO: 678477 - DNA, 15 bp, Homo sapiens
ctccaaaatacgcaa

SEQ ID NO: 678478 - DNA, 15 bp, Homo sapiens
tccaaaatacgcaac

SEQ ID NO: 678479 - DNA, 15 bp, Homo sapiens
ccaaaatacgcaact

SEQ ID NO: 678480 - DNA, 15 bp, Homo sapiens
caaaatacgcaactc

SEQ ID NO: 678481 - DNA, 15 bp, Homo sapiens
aaaatacgcaactca

SEQ ID NO: 678482 - DNA, 15 bp, Homo sapiens
aaatacgcaactcat

SEQ ID NO: 678483 - DNA, 15 bp, Homo sapiens
aatacgcaactcatt

SEQ ID NO: 678484 - DNA, 15 bp, Homo sapiens
atacgcaactcatta

SEQ ID NO: 678485 - DNA, 15 bp, Homo sapiens
tacgcaactcattac

SEQ ID NO: 678486 - DNA, 15 bp, Homo sapiens
acgcaactcattaca

SEQ ID NO: 678487 - DNA, 15 bp, Homo sapiens
cgcaactcattacac

SEQ ID NO: 678488 - DNA, 15 bp, Homo sapiens
gcaactcattacaca

SEQ ID NO: 678489 - DNA, 15 bp, Homo sapiens
caactcattacacat

SEQ ID NO: 678490 - DNA, 15 bp, Homo sapiens
aactcattacacatt

SEQ ID NO: 678491 - DNA, 15 bp, Homo sapiens
actcattacacatta

SEQ ID NO: 678492 - DNA, 15 bp, Homo sapiens
ctcattacacattat

SEQ ID NO: 678493 - DNA, 15 bp, Homo sapiens
tcattacacattata

SEQ ID NO: 678494 - DNA, 15 bp, Homo sapiens
cattacacattatag

SEQ ID NO: 678495 - DNA, 15 bp, Homo sapiens
attacacattatagg

SEQ ID NO: 678496 - DNA, 15 bp, Homo sapiens
ttacacattataggt

SEQ ID NO: 678497 - DNA, 15 bp, Homo sapiens
tacacattataggtt

SEQ ID NO: 678498 - DNA, 15 bp, Homo sapiens
acacattataggttg

SEQ ID NO: 678499 - DNA, 15 bp, Homo sapiens
cacattataggttga

SEQ ID NO: 678500 - DNA, 15 bp, Homo sapiens
acattataggttgag

SEQ ID NO: 678501 - DNA, 15 bp, Homo sapiens
cattataggttgagt

SEQ ID NO: 678502 - DNA, 15 bp, Homo sapiens
attataggttgagta

SEQ ID NO: 678503 - DNA, 15 bp, Homo sapiens
ttataggttgagtat

SEQ ID NO: 678504 - DNA, 15 bp, Homo sapiens
tataggttgagtatt

SEQ ID NO: 678505 - DNA, 15 bp, Homo sapiens
ataggttgagtattc

SEQ ID NO: 678506 - DNA, 15 bp, Homo sapiens
taggttgagtattct

SEQ ID NO: 678507 - DNA, 15 bp, Homo sapiens
aggttgagtattctt

SEQ ID NO: 678508 - DNA, 15 bp, Homo sapiens
ggttgagtattctta

SEQ ID NO: 678509 - DNA, 15 bp, Homo sapiens
gttgagtattcttat

SEQ ID NO: 678510 - DNA, 15 bp, Homo sapiens
ttgagtattcttatc

SEQ ID NO: 678511 - DNA, 15 bp, Homo sapiens
tgagtattcttatct

SEQ ID NO: 678512 - DNA, 15 bp, Homo sapiens
gagtattcttatcta

SEQ ID NO: 678513 - DNA, 15 bp, Homo sapiens
agtattcttatctaa

SEQ ID NO: 678514 - DNA, 15 bp, Homo sapiens
gtattcttatctaaa

SEQ ID NO: 678515 - DNA, 15 bp, Homo sapiens
tattcttatctaaaa

SEQ ID NO: 678516 - DNA, 15 bp, Homo sapiens
attcttatctaaaat

SEQ ID NO: 678517 - DNA, 15 bp, Homo sapiens
ttcttatctaaaatg

SEQ ID NO: 678518 - DNA, 15 bp, Homo sapiens
tcttatctaaaatgc

SEQ ID NO: 678519 - DNA, 15 bp, Homo sapiens
cttatctaaaatgct

SEQ ID NO: 678520 - DNA, 15 bp, Homo sapiens
ttatctaaaatgctt

SEQ ID NO: 678521 - DNA, 15 bp, Homo sapiens
tatctaaaatgcttg

SEQ ID NO: 678522 - DNA, 15 bp, Homo sapiens
atctaaaatgcttgg

SEQ ID NO: 678523 - DNA, 15 bp, Homo sapiens
tctaaaatgcttggg

SEQ ID NO: 678524 - DNA, 15 bp, Homo sapiens
ctaaaatgcttggga

SEQ ID NO: 678525 - DNA, 15 bp, Homo sapiens
taaaatgcttgggat

SEQ ID NO: 678526 - DNA, 15 bp, Homo sapiens
aaaatgcttgggatc

SEQ ID NO: 678527 - DNA, 15 bp, Homo sapiens
aaatgcttgggatca

SEQ ID NO: 678528 - DNA, 15 bp, Homo sapiens
aatgcttgggatcag

SEQ ID NO: 678529 - DNA, 15 bp, Homo sapiens
atgcttgggatcaga

SEQ ID NO: 678530 - DNA, 15 bp, Homo sapiens
tgcttgggatcagaa

SEQ ID NO: 678531 - DNA, 15 bp, Homo sapiens
gcttgggatcagaag

SEQ ID NO: 678532 - DNA, 15 bp, Homo sapiens
cttgggatcagaagt

SEQ ID NO: 678533 - DNA, 15 bp, Homo sapiens
ttgggatcagaagtg

SEQ ID NO: 678534 - DNA, 15 bp, Homo sapiens
tgggatcagaagtgt

SEQ ID NO: 678535 - DNA, 15 bp, Homo sapiens
gggatcagaagtgtt

SEQ ID NO: 678536 - DNA, 15 bp, Homo sapiens
ggatcagaagtgttt

SEQ ID NO: 678537 - DNA, 15 bp, Homo sapiens
gatcagaagtgtttc

SEQ ID NO: 678538 - DNA, 15 bp, Homo sapiens
atcagaagtgtttca

SEQ ID NO: 678539 - DNA, 15 bp, Homo sapiens
tcagaagtgtttcat

SEQ ID NO: 678540 - DNA, 15 bp, Homo sapiens
cagaagtgtttcata

SEQ ID NO: 678541 - DNA, 15 bp, Homo sapiens
agaagtgtttcatat

SEQ ID NO: 678542 - DNA, 15 bp, Homo sapiens
gaagtgtttcatatt

SEQ ID NO: 678543 - DNA, 15 bp, Homo sapiens
aagtgtttcatattt

SEQ ID NO: 678544 - DNA, 15 bp, Homo sapiens
agtgtttcatatttc

SEQ ID NO: 678545 - DNA, 15 bp, Homo sapiens
gtgtttcatatttca

SEQ ID NO: 678546 - DNA, 15 bp, Homo sapiens
tgtttcatatttcag

SEQ ID NO: 678547 - DNA, 15 bp, Homo sapiens
gtttcatatttcaga

SEQ ID NO: 678548 - DNA, 15 bp, Homo sapiens
tttcatatttcagaa

SEQ ID NO: 678549 - DNA, 15 bp, Homo sapiens
ttcatatttcagaat

SEQ ID NO: 678550 - DNA, 15 bp, Homo sapiens
tcatatttcagaata

SEQ ID NO: 678551 - DNA, 15 bp, Homo sapiens
catatttcagaatat

SEQ ID NO: 678552 - DNA, 15 bp, Homo sapiens
atatttcagaatatt

SEQ ID NO: 678553 - DNA, 15 bp, Homo sapiens
tatttcagaatattt

SEQ ID NO: 678554 - DNA, 15 bp, Homo sapiens
atttcagaatatttg

SEQ ID NO: 678555 - DNA, 15 bp, Homo sapiens
tttcagaatatttgc

SEQ ID NO: 678556 - DNA, 15 bp, Homo sapiens
ttcagaatatttgca

SEQ ID NO: 678557 - DNA, 15 bp, Homo sapiens
tcagaatatttgcat

SEQ ID NO: 678558 - DNA, 15 bp, Homo sapiens
cagaatatttgcatt

SEQ ID NO: 678559 - DNA, 15 bp, Homo sapiens
agaatatttgcatta

SEQ ID NO: 678560 - DNA, 15 bp, Homo sapiens
gaatatttgcattat

SEQ ID NO: 678561 - DNA, 15 bp, Homo sapiens
aatatttgcattata

SEQ ID NO: 678562 - DNA, 15 bp, Homo sapiens
atatttgcattatac

SEQ ID NO: 678563 - DNA, 15 bp, Homo sapiens
tatttgcattatact

SEQ ID NO: 678564 - DNA, 15 bp, Homo sapiens
atttgcattatactc

SEQ ID NO: 678565 - DNA, 15 bp, Homo sapiens
tttgcattatactca

SEQ ID NO: 678566 - DNA, 15 bp, Homo sapiens
ttgcattatactcac

SEQ ID NO: 678567 - DNA, 15 bp, Homo sapiens
tgcattatactcact

SEQ ID NO: 678568 - DNA, 15 bp, Homo sapiens
gcattatactcactg

SEQ ID NO: 678569 - DNA, 15 bp, Homo sapiens
cattatactcactgg

SEQ ID NO: 678570 - DNA, 15 bp, Homo sapiens
attatactcactggc

SEQ ID NO: 678571 - DNA, 15 bp, Homo sapiens
ttatactcactggct

SEQ ID NO: 678572 - DNA, 15 bp, Homo sapiens
tatactcactggctg

SEQ ID NO: 678573 - DNA, 15 bp, Homo sapiens
atactcactggctga

SEQ ID NO: 678574 - DNA, 15 bp, Homo sapiens
tactcactggctgag

SEQ ID NO: 678575 - DNA, 15 bp, Homo sapiens
actcactggctgagc

SEQ ID NO: 678576 - DNA, 15 bp, Homo sapiens
ctcactggctgagca

SEQ ID NO: 678577 - DNA, 15 bp, Homo sapiens
tcactggctgagcat

SEQ ID NO: 678578 - DNA, 15 bp, Homo sapiens
cactggctgagcatc

SEQ ID NO: 678579 - DNA, 15 bp, Homo sapiens
actggctgagcatcc

SEQ ID NO: 678580 - DNA, 15 bp, Homo sapiens
ctggctgagcatccc

SEQ ID NO: 678581 - DNA, 15 bp, Homo sapiens
tggctgagcatccca

SEQ ID NO: 678582 - DNA, 15 bp, Homo sapiens
ggctgagcatcccaa

SEQ ID NO: 678583 - DNA, 15 bp, Homo sapiens
gctgagcatcccaag

SEQ ID NO: 678584 - DNA, 15 bp, Homo sapiens
ctgagcatcccaagt

SEQ ID NO: 678585 - DNA, 15 bp, Homo sapiens
tgagcatcccaagtc

SEQ ID NO: 678586 - DNA, 15 bp, Homo sapiens
gagcatcccaagtcc

SEQ ID NO: 678587 - DNA, 15 bp, Homo sapiens
agcatcccaagtcca

SEQ ID NO: 678588 - DNA, 15 bp, Homo sapiens
gcatcccaagtccag

SEQ ID NO: 678589 - DNA, 15 bp, Homo sapiens
catcccaagtccaga

SEQ ID NO: 678590 - DNA, 15 bp, Homo sapiens
atcccaagtccagaa

SEQ ID NO: 678591 - DNA, 15 bp, Homo sapiens
tcccaagtccagaaa

SEQ ID NO: 678592 - DNA, 15 bp, Homo sapiens
cccaagtccagaaat

SEQ ID NO: 678593 - DNA, 15 bp, Homo sapiens
ccaagtccagaaatc

SEQ ID NO: 678594 - DNA, 15 bp, Homo sapiens
caagtccagaaatcc

SEQ ID NO: 678595 - DNA, 15 bp, Homo sapiens
aagtccagaaatcct

SEQ ID NO: 678596 - DNA, 15 bp, Homo sapiens
agtccagaaatccta

SEQ ID NO: 678597 - DNA, 15 bp, Homo sapiens
gtccagaaatcctaa

SEQ ID NO: 678598 - DNA, 15 bp, Homo sapiens
tccagaaatcctaaa

SEQ ID NO: 678599 - DNA, 15 bp, Homo sapiens
ccagaaatcctaaat

SEQ ID NO: 678600 - DNA, 15 bp, Homo sapiens
cagaaatcctaaatg

SEQ ID NO: 678601 - DNA, 15 bp, Homo sapiens
agaaatcctaaatgt

SEQ ID NO: 678602 - DNA, 15 bp, Homo sapiens
gaaatcctaaatgtt

SEQ ID NO: 678603 - DNA, 15 bp, Homo sapiens
aaatcctaaatgttc

SEQ ID NO: 678604 - DNA, 15 bp, Homo sapiens
aatcctaaatgttcc

SEQ ID NO: 678605 - DNA, 15 bp, Homo sapiens
atcctaaatgttcca

SEQ ID NO: 678606 - DNA, 15 bp, Homo sapiens
tcctaaatgttccaa

SEQ ID NO: 678607 - DNA, 15 bp, Homo sapiens
cctaaatgttccaat

SEQ ID NO: 678608 - DNA, 15 bp, Homo sapiens
ctaaatgttccaatg

SEQ ID NO: 678609 - DNA, 15 bp, Homo sapiens
taaatgttccaatga

SEQ ID NO: 678610 - DNA, 15 bp, Homo sapiens
aaatgttccaatgag

SEQ ID NO: 678611 - DNA, 15 bp, Homo sapiens
aatgttccaatgagc

SEQ ID NO: 678612 - DNA, 15 bp, Homo sapiens
atgttccaatgagca

SEQ ID NO: 678613 - DNA, 15 bp, Homo sapiens
tgttccaatgagcat

SEQ ID NO: 678614 - DNA, 15 bp, Homo sapiens
gttccaatgagcatt

SEQ ID NO: 678615 - DNA, 15 bp, Homo sapiens
ttccaatgagcattt

SEQ ID NO: 678616 - DNA, 15 bp, Homo sapiens
tccaatgagcatttc

SEQ ID NO: 678617 - DNA, 15 bp, Homo sapiens
ccaatgagcatttcc

SEQ ID NO: 678618 - DNA, 15 bp, Homo sapiens
caatgagcatttcct

SEQ ID NO: 678619 - DNA, 15 bp, Homo sapiens
aatgagcatttcctt

SEQ ID NO: 678620 - DNA, 15 bp, Homo sapiens
atgagcatttcctta

SEQ ID NO: 678621 - DNA, 15 bp, Homo sapiens
tgagcatttccttat

SEQ ID NO: 678622 - DNA, 15 bp, Homo sapiens
gagcatttccttatg

SEQ ID NO: 678623 - DNA, 15 bp, Homo sapiens
agcatttccttatgt

SEQ ID NO: 678624 - DNA, 15 bp, Homo sapiens
gcatttccttatgtc

SEQ ID NO: 678625 - DNA, 15 bp, Homo sapiens
catttccttatgtca

SEQ ID NO: 678626 - DNA, 15 bp, Homo sapiens
atttccttatgtcag

SEQ ID NO: 678627 - DNA, 15 bp, Homo sapiens
tttccttatgtcagc

SEQ ID NO: 678628 - DNA, 15 bp, Homo sapiens
ttccttatgtcagca

SEQ ID NO: 678629 - DNA, 15 bp, Homo sapiens
tccttatgtcagcac

SEQ ID NO: 678630 - DNA, 15 bp, Homo sapiens
ccttatgtcagcact

SEQ ID NO: 678631 - DNA, 15 bp, Homo sapiens
cttatgtcagcactc

SEQ ID NO: 678632 - DNA, 15 bp, Homo sapiens
ttatgtcagcactca

SEQ ID NO: 678633 - DNA, 15 bp, Homo sapiens
tatgtcagcactcaa

SEQ ID NO: 678634 - DNA, 15 bp, Homo sapiens
atgtcagcactcaaa

SEQ ID NO: 678635 - DNA, 15 bp, Homo sapiens
tgtcagcactcaaaa

SEQ ID NO: 678636 - DNA, 15 bp, Homo sapiens
gtcagcactcaaaat

SEQ ID NO: 678637 - DNA, 15 bp, Homo sapiens
tcagcactcaaaatg

SEQ ID NO: 678638 - DNA, 15 bp, Homo sapiens
cagcactcaaaatgt

SEQ ID NO: 678639 - DNA, 15 bp, Homo sapiens
agcactcaaaatgtt

SEQ ID NO: 678640 - DNA, 15 bp, Homo sapiens
gcactcaaaatgttt

SEQ ID NO: 678641 - DNA, 15 bp, Homo sapiens
cactcaaaatgtttt

SEQ ID NO: 678642 - DNA, 15 bp, Homo sapiens
actcaaaatgttttg

SEQ ID NO: 678643 - DNA, 15 bp, Homo sapiens
ctcaaaatgttttgg

SEQ ID NO: 678644 - DNA, 15 bp, Homo sapiens
tcaaaatgttttgga

SEQ ID NO: 678645 - DNA, 15 bp, Homo sapiens
caaaatgttttggat

SEQ ID NO: 678646 - DNA, 15 bp, Homo sapiens
aaaatgttttggatt

SEQ ID NO: 678647 - DNA, 15 bp, Homo sapiens
aaatgttttggattt

SEQ ID NO: 678648 - DNA, 15 bp, Homo sapiens
aatgttttggatttt

SEQ ID NO: 678649 - DNA, 15 bp, Homo sapiens
atgttttggattttg

SEQ ID NO: 678650 - DNA, 15 bp, Homo sapiens
tgttttggattttgg

SEQ ID NO: 678651 - DNA, 15 bp, Homo sapiens
gttttggattttgga

SEQ ID NO: 678652 - DNA, 15 bp, Homo sapiens
ttttggattttggag

SEQ ID NO: 678653 - DNA, 15 bp, Homo sapiens
tttggattttggagc

SEQ ID NO: 678654 - DNA, 15 bp, Homo sapiens
ttggattttggagca

SEQ ID NO: 678655 - DNA, 15 bp, Homo sapiens
tggattttggagcat

SEQ ID NO: 678656 - DNA, 15 bp, Homo sapiens
ggattttggagcatt

SEQ ID NO: 678657 - DNA, 15 bp, Homo sapiens
gattttggagcattt

SEQ ID NO: 678658 - DNA, 15 bp, Homo sapiens
attttggagcatttc

SEQ ID NO: 678659 - DNA, 15 bp, Homo sapiens
ttttggagcatttct

SEQ ID NO: 678660 - DNA, 15 bp, Homo sapiens
tttggagcatttctg

SEQ ID NO: 678661 - DNA, 15 bp, Homo sapiens
ttggagcatttctgg

SEQ ID NO: 678662 - DNA, 15 bp, Homo sapiens
tggagcatttctggt

SEQ ID NO: 678663 - DNA, 15 bp, Homo sapiens
ggagcatttctggtg

SEQ ID NO: 678664 - DNA, 15 bp, Homo sapiens
gagcatttctggtgt

SEQ ID NO: 678665 - DNA, 15 bp, Homo sapiens
agcatttctggtgtt

SEQ ID NO: 678666 - DNA, 15 bp, Homo sapiens
gcatttctggtgttc

SEQ ID NO: 678667 - DNA, 15 bp, Homo sapiens
catttctggtgttca

SEQ ID NO: 678668 - DNA, 15 bp, Homo sapiens
atttctggtgttcaa

SEQ ID NO: 678669 - DNA, 15 bp, Homo sapiens
tttctggtgttcaaa

SEQ ID NO: 678670 - DNA, 15 bp, Homo sapiens
ttctggtgttcaaat

SEQ ID NO: 678671 - DNA, 15 bp, Homo sapiens
tctggtgttcaaatt

SEQ ID NO: 678672 - DNA, 15 bp, Homo sapiens
ctggtgttcaaattt

SEQ ID NO: 678673 - DNA, 15 bp, Homo sapiens
tggtgttcaaatttg

SEQ ID NO: 678674 - DNA, 15 bp, Homo sapiens
ggtgttcaaatttgg

SEQ ID NO: 678675 - DNA, 15 bp, Homo sapiens
gtgttcaaatttgga

SEQ ID NO: 678676 - DNA, 15 bp, Homo sapiens
tgttcaaatttggaa

SEQ ID NO: 678677 - DNA, 15 bp, Homo sapiens
gttcaaatttggaat

SEQ ID NO: 678678 - DNA, 15 bp, Homo sapiens
ttcaaatttggaatg

SEQ ID NO: 678679 - DNA, 15 bp, Homo sapiens
tcaaatttggaatgt

SEQ ID NO: 678680 - DNA, 15 bp, Homo sapiens
caaatttggaatgtt

SEQ ID NO: 678681 - DNA, 15 bp, Homo sapiens
aaatttggaatgttc

SEQ ID NO: 678682 - DNA, 15 bp, Homo sapiens
aatttggaatgttca

SEQ ID NO: 678683 - DNA, 15 bp, Homo sapiens
atttggaatgttcaa

SEQ ID NO: 678684 - DNA, 15 bp, Homo sapiens
tttggaatgttcaac

SEQ ID NO: 678685 - DNA, 15 bp, Homo sapiens
ttggaatgttcaacc

SEQ ID NO: 678686 - DNA, 15 bp, Homo sapiens
tggaatgttcaacct

SEQ ID NO: 678687 - DNA, 15 bp, Homo sapiens
ggaatgttcaacctg

SEQ ID NO: 678688 - DNA, 15 bp, Homo sapiens
gaatgttcaacctgt

SEQ ID NO: 678689 - DNA, 15 bp, Homo sapiens
aatgttcaacctgta

SEQ ID NO: 678690 - DNA, 15 bp, Homo sapiens
atgttcaacctgtat

SEQ ID NO: 678691 - DNA, 15 bp, Homo sapiens
tgttcaacctgtatt

SEQ ID NO: 678692 - DNA, 15 bp, Homo sapiens
gttcaacctgtattt

SEQ ID NO: 678693 - DNA, 15 bp, Homo sapiens
ttcaacctgtattta

SEQ ID NO: 678694 - DNA, 15 bp, Homo sapiens
tcaacctgtatttat

SEQ ID NO: 678695 - DNA, 15 bp, Homo sapiens
caacctgtatttata

SEQ ID NO: 678696 - DNA, 15 bp, Homo sapiens
aacctgtatttataa

SEQ ID NO: 678697 - DNA, 15 bp, Homo sapiens
acctgtatttataaa

SEQ ID NO: 678698 - DNA, 15 bp, Homo sapiens
cctgtatttataaac

SEQ ID NO: 678699 - DNA, 15 bp, Homo sapiens
ctgtatttataaacc

SEQ ID NO: 678700 - DNA, 15 bp, Homo sapiens
tgtatttataaacca

SEQ ID NO: 678701 - DNA, 15 bp, Homo sapiens
gtatttataaaccaa

SEQ ID NO: 678702 - DNA, 15 bp, Homo sapiens
tatttataaaccaac

SEQ ID NO: 678703 - DNA, 15 bp, Homo sapiens
atttataaaccaacc

SEQ ID NO: 678704 - DNA, 15 bp, Homo sapiens
tttataaaccaacca

SEQ ID NO: 678705 - DNA, 15 bp, Homo sapiens
ttataaaccaaccaa

SEQ ID NO: 678706 - DNA, 15 bp, Homo sapiens
tataaaccaaccaaa

SEQ ID NO: 678707 - DNA, 15 bp, Homo sapiens
ataaaccaaccaaat

SEQ ID NO: 678708 - DNA, 15 bp, Homo sapiens
taaaccaaccaaatg

SEQ ID NO: 678709 - DNA, 15 bp, Homo sapiens
aaaccaaccaaatga

SEQ ID NO: 678710 - DNA, 15 bp, Homo sapiens
aaccaaccaaatgat

SEQ ID NO: 678711 - DNA, 15 bp, Homo sapiens
accaaccaaatgatt

SEQ ID NO: 678712 - DNA, 15 bp, Homo sapiens
ccaaccaaatgattc

SEQ ID NO: 678713 - DNA, 15 bp, Homo sapiens
caaccaaatgattct

SEQ ID NO: 678714 - DNA, 15 bp, Homo sapiens
aaccaaatgattcta

SEQ ID NO: 678715 - DNA, 15 bp, Homo sapiens
accaaatgattctaa

SEQ ID NO: 678716 - DNA, 15 bp, Homo sapiens
ccaaatgattctaaa

SEQ ID NO: 678717 - DNA, 15 bp, Homo sapiens
caaatgattctaaat

SEQ ID NO: 678718 - DNA, 15 bp, Homo sapiens
aaatgattctaaatg

SEQ ID NO: 678719 - DNA, 15 bp, Homo sapiens
aatgattctaaatgt

SEQ ID NO: 678720 - DNA, 15 bp, Homo sapiens
atgattctaaatgtc

SEQ ID NO: 678721 - DNA, 15 bp, Homo sapiens
tgattctaaatgtcc

SEQ ID NO: 678722 - DNA, 15 bp, Homo sapiens
gattctaaatgtcct

SEQ ID NO: 678723 - DNA, 15 bp, Homo sapiens
attctaaatgtcctc

SEQ ID NO: 678724 - DNA, 15 bp, Homo sapiens
ttctaaatgtcctcg

SEQ ID NO: 678725 - DNA, 15 bp, Homo sapiens
tctaaatgtcctcgc

SEQ ID NO: 678726 - DNA, 15 bp, Homo sapiens
ctaaatgtcctcgct

SEQ ID NO: 678727 - DNA, 15 bp, Homo sapiens
taaatgtcctcgcta

SEQ ID NO: 678728 - DNA, 15 bp, Homo sapiens
aaatgtcctcgctat

SEQ ID NO: 678729 - DNA, 15 bp, Homo sapiens
aatgtcctcgctatc

SEQ ID NO: 678730 - DNA, 15 bp, Homo sapiens
atgtcctcgctatct

SEQ ID NO: 678731 - DNA, 15 bp, Homo sapiens
tgtcctcgctatcta

SEQ ID NO: 678732 - DNA, 15 bp, Homo sapiens
gtcctcgctatctag

SEQ ID NO: 678733 - DNA, 15 bp, Homo sapiens
tcctcgctatctagt

SEQ ID NO: 678734 - DNA, 15 bp, Homo sapiens
cctcgctatctagtt

SEQ ID NO: 678735 - DNA, 15 bp, Homo sapiens
ctcgctatctagttt

SEQ ID NO: 678736 - DNA, 15 bp, Homo sapiens
tcgctatctagttta

SEQ ID NO: 678737 - DNA, 15 bp, Homo sapiens
cgctatctagtttaa

SEQ ID NO: 678738 - DNA, 15 bp, Homo sapiens
gctatctagtttaaa

SEQ ID NO: 678739 - DNA, 15 bp, Homo sapiens
ctatctagtttaaaa

SEQ ID NO: 678740 - DNA, 15 bp, Homo sapiens
tatctagtttaaaac

SEQ ID NO: 678741 - DNA, 15 bp, Homo sapiens
atctagtttaaaacc

SEQ ID NO: 678742 - DNA, 15 bp, Homo sapiens
tctagtttaaaaccc

SEQ ID NO: 678743 - DNA, 15 bp, Homo sapiens
ctagtttaaaaccct

SEQ ID NO: 678744 - DNA, 15 bp, Homo sapiens
tagtttaaaaccctg

SEQ ID NO: 678745 - DNA, 15 bp, Homo sapiens
agtttaaaaccctgc

SEQ ID NO: 678746 - DNA, 15 bp, Homo sapiens
gtttaaaaccctgca

SEQ ID NO: 678747 - DNA, 15 bp, Homo sapiens
tttaaaaccctgcat

SEQ ID NO: 678748 - DNA, 15 bp, Homo sapiens
ttaaaaccctgcatt

SEQ ID NO: 678749 - DNA, 15 bp, Homo sapiens
taaaaccctgcatta

SEQ ID NO: 678750 - DNA, 15 bp, Homo sapiens
aaaaccctgcattag

SEQ ID NO: 678751 - DNA, 15 bp, Homo sapiens
aaaccctgcattaga

SEQ ID NO: 678752 - DNA, 15 bp, Homo sapiens
aaccctgcattagaa

SEQ ID NO: 678753 - DNA, 15 bp, Homo sapiens
accctgcattagaat

SEQ ID NO: 678754 - DNA, 15 bp, Homo sapiens
ccctgcattagaatg

SEQ ID NO: 678755 - DNA, 15 bp, Homo sapiens
cctgcattagaatga

SEQ ID NO: 678756 - DNA, 15 bp, Homo sapiens
ctgcattagaatgag

SEQ ID NO: 678757 - DNA, 15 bp, Homo sapiens
tgcattagaatgagg

SEQ ID NO: 678758 - DNA, 15 bp, Homo sapiens
gcattagaatgaggg

SEQ ID NO: 678759 - DNA, 15 bp, Homo sapiens
cattagaatgagggg

SEQ ID NO: 678760 - DNA, 15 bp, Homo sapiens
attagaatgagggga

SEQ ID NO: 678761 - DNA, 15 bp, Homo sapiens
ttagaatgaggggaa

SEQ ID NO: 678762 - DNA, 15 bp, Homo sapiens
tagaatgaggggaaa

SEQ ID NO: 678763 - DNA, 15 bp, Homo sapiens
agaatgaggggaaaa

SEQ ID NO: 678764 - DNA, 15 bp, Homo sapiens
gaatgaggggaaaag

SEQ ID NO: 678765 - DNA, 15 bp, Homo sapiens
aatgaggggaaaagg

SEQ ID NO: 678766 - DNA, 15 bp, Homo sapiens
atgaggggaaaaggt

SEQ ID NO: 678767 - DNA, 15 bp, Homo sapiens
tgaggggaaaaggtt

SEQ ID NO: 678768 - DNA, 15 bp, Homo sapiens
gaggggaaaaggttc

SEQ ID NO: 678769 - DNA, 15 bp, Homo sapiens
aggggaaaaggttct

SEQ ID NO: 678770 - DNA, 15 bp, Homo sapiens
ggggaaaaggttctt

SEQ ID NO: 678771 - DNA, 15 bp, Homo sapiens
gggaaaaggttctta

SEQ ID NO: 678772 - DNA, 15 bp, Homo sapiens
ggaaaaggttcttag

SEQ ID NO: 678773 - DNA, 15 bp, Homo sapiens
gaaaaggttcttagt

SEQ ID NO: 678774 - DNA, 15 bp, Homo sapiens
aaaaggttcttagtt

SEQ ID NO: 678775 - DNA, 15 bp, Homo sapiens
aaaggttcttagttc

SEQ ID NO: 678776 - DNA, 15 bp, Homo sapiens
aaggttcttagttca

SEQ ID NO: 678777 - DNA, 15 bp, Homo sapiens
aggttcttagttcag

SEQ ID NO: 678778 - DNA, 15 bp, Homo sapiens
ggttcttagttcaga

SEQ ID NO: 678779 - DNA, 15 bp, Homo sapiens
gttcttagttcagat

SEQ ID NO: 678780 - DNA, 15 bp, Homo sapiens
ttcttagttcagatc

SEQ ID NO: 678781 - DNA, 15 bp, Homo sapiens
tcttagttcagatct

SEQ ID NO: 678782 - DNA, 15 bp, Homo sapiens
cttagttcagatctc

SEQ ID NO: 678783 - DNA, 15 bp, Homo sapiens
ttagttcagatctca

SEQ ID NO: 678784 - DNA, 15 bp, Homo sapiens
tagttcagatctcat

SEQ ID NO: 678785 - DNA, 15 bp, Homo sapiens
agttcagatctcatc

SEQ ID NO: 678786 - DNA, 15 bp, Homo sapiens
gttcagatctcatct

SEQ ID NO: 678787 - DNA, 15 bp, Homo sapiens
ttcagatctcatctt

SEQ ID NO: 678788 - DNA, 15 bp, Homo sapiens
tcagatctcatcttc

SEQ ID NO: 678789 - DNA, 15 bp, Homo sapiens
cagatctcatcttcc

SEQ ID NO: 678790 - DNA, 15 bp, Homo sapiens
agatctcatcttcct

SEQ ID NO: 678791 - DNA, 15 bp, Homo sapiens
gatctcatcttcctt

SEQ ID NO: 678792 - DNA, 15 bp, Homo sapiens
atctcatcttccttt

SEQ ID NO: 678793 - DNA, 15 bp, Homo sapiens
tctcatcttcctttt

SEQ ID NO: 678794 - DNA, 15 bp, Homo sapiens
ctcatcttccttttc

SEQ ID NO: 678795 - DNA, 15 bp, Homo sapiens
tcatcttccttttct

SEQ ID NO: 678796 - DNA, 15 bp, Homo sapiens
catcttccttttcta

SEQ ID NO: 678797 - DNA, 15 bp, Homo sapiens
atcttccttttctat

SEQ ID NO: 678798 - DNA, 15 bp, Homo sapiens
tcttccttttctata

SEQ ID NO: 678799 - DNA, 15 bp, Homo sapiens
cttccttttctatac

SEQ ID NO: 678800 - DNA, 15 bp, Homo sapiens
ttccttttctatacc

SEQ ID NO: 678801 - DNA, 15 bp, Homo sapiens
tccttttctatacca

SEQ ID NO: 678802 - DNA, 15 bp, Homo sapiens
ccttttctataccaa

SEQ ID NO: 678803 - DNA, 15 bp, Homo sapiens
cttttctataccaac

SEQ ID NO: 678804 - DNA, 15 bp, Homo sapiens
ttttctataccaact

SEQ ID NO: 678805 - DNA, 15 bp, Homo sapiens
tttctataccaactg

SEQ ID NO: 678806 - DNA, 15 bp, Homo sapiens
ttctataccaactgt

SEQ ID NO: 678807 - DNA, 15 bp, Homo sapiens
tctataccaactgtg

SEQ ID NO: 678808 - DNA, 15 bp, Homo sapiens
ctataccaactgtga

SEQ ID NO: 678809 - DNA, 15 bp, Homo sapiens
tataccaactgtgaa

SEQ ID NO: 678810 - DNA, 15 bp, Homo sapiens
ataccaactgtgaag

SEQ ID NO: 678811 - DNA, 15 bp, Homo sapiens
taccaactgtgaaga

SEQ ID NO: 678812 - DNA, 15 bp, Homo sapiens
accaactgtgaagaa

SEQ ID NO: 678813 - DNA, 15 bp, Homo sapiens
ccaactgtgaagaaa

SEQ ID NO: 678814 - DNA, 15 bp, Homo sapiens
caactgtgaagaaat

SEQ ID NO: 678815 - DNA, 15 bp, Homo sapiens
aactgtgaagaaatg

SEQ ID NO: 678816 - DNA, 15 bp, Homo sapiens
actgtgaagaaatgt

SEQ ID NO: 678817 - DNA, 15 bp, Homo sapiens
ctgtgaagaaatgta

SEQ ID NO: 678818 - DNA, 15 bp, Homo sapiens
tgtgaagaaatgtat

SEQ ID NO: 678819 - DNA, 15 bp, Homo sapiens
gtgaagaaatgtatc

SEQ ID NO: 678820 - DNA, 15 bp, Homo sapiens
tgaagaaatgtatca

SEQ ID NO: 678821 - DNA, 15 bp, Homo sapiens
gaagaaatgtatcaa

SEQ ID NO: 678822 - DNA, 15 bp, Homo sapiens
aagaaatgtatcaaa

SEQ ID NO: 678823 - DNA, 15 bp, Homo sapiens
agaaatgtatcaaat

SEQ ID NO: 678824 - DNA, 15 bp, Homo sapiens
gaaatgtatcaaatg

SEQ ID NO: 678825 - DNA, 15 bp, Homo sapiens
aaatgtatcaaatgc

SEQ ID NO: 678826 - DNA, 15 bp, Homo sapiens
aatgtatcaaatgct

SEQ ID NO: 678827 - DNA, 15 bp, Homo sapiens
atgtatcaaatgcta

SEQ ID NO: 678828 - DNA, 15 bp, Homo sapiens
tgtatcaaatgctac

SEQ ID NO: 678829 - DNA, 15 bp, Homo sapiens
gtatcaaatgctact

SEQ ID NO: 678830 - DNA, 15 bp, Homo sapiens
tatcaaatgctactg

SEQ ID NO: 678831 - DNA, 15 bp, Homo sapiens
atcaaatgctactga

SEQ ID NO: 678832 - DNA, 15 bp, Homo sapiens
tcaaatgctactgaa

SEQ ID NO: 678833 - DNA, 15 bp, Homo sapiens
caaatgctactgaag

SEQ ID NO: 678834 - DNA, 15 bp, Homo sapiens
aaatgctactgaagc

SEQ ID NO: 678835 - DNA, 15 bp, Homo sapiens
aatgctactgaagcc

SEQ ID NO: 678836 - DNA, 15 bp, Homo sapiens
atgctactgaagcca

SEQ ID NO: 678837 - DNA, 15 bp, Homo sapiens
tgctactgaagccaa

SEQ ID NO: 678838 - DNA, 15 bp, Homo sapiens
gctactgaagccaac

SEQ ID NO: 678839 - DNA, 15 bp, Homo sapiens
ctactgaagccaact

SEQ ID NO: 678840 - DNA, 15 bp, Homo sapiens
tactgaagccaactc

SEQ ID NO: 678841 - DNA, 15 bp, Homo sapiens
actgaagccaactct

SEQ ID NO: 678842 - DNA, 15 bp, Homo sapiens
ctgaagccaactctg

SEQ ID NO: 678843 - DNA, 15 bp, Homo sapiens
tgaagccaactctga

SEQ ID NO: 678844 - DNA, 15 bp, Homo sapiens
gaagccaactctgaa

SEQ ID NO: 678845 - DNA, 15 bp, Homo sapiens
aagccaactctgaat

SEQ ID NO: 678846 - DNA, 15 bp, Homo sapiens
agccaactctgaatg

SEQ ID NO: 678847 - DNA, 15 bp, Homo sapiens
gccaactctgaatgt

SEQ ID NO: 678848 - DNA, 15 bp, Homo sapiens
ccaactctgaatgtt

SEQ ID NO: 678849 - DNA, 15 bp, Homo sapiens
caactctgaatgttt

SEQ ID NO: 678850 - DNA, 15 bp, Homo sapiens
aactctgaatgtttt

SEQ ID NO: 678851 - DNA, 15 bp, Homo sapiens
actctgaatgttttc

SEQ ID NO: 678852 - DNA, 15 bp, Homo sapiens
ctctgaatgttttca

SEQ ID NO: 678853 - DNA, 15 bp, Homo sapiens
tctgaatgttttcac

SEQ ID NO: 678854 - DNA, 15 bp, Homo sapiens
ctgaatgttttcaca

SEQ ID NO: 678855 - DNA, 15 bp, Homo sapiens
tgaatgttttcacag

SEQ ID NO: 678856 - DNA, 15 bp, Homo sapiens
gaatgttttcacaga

SEQ ID NO: 678857 - DNA, 15 bp, Homo sapiens
aatgttttcacagag

SEQ ID NO: 678858 - DNA, 15 bp, Homo sapiens
atgttttcacagaga

SEQ ID NO: 678859 - DNA, 15 bp, Homo sapiens
tgttttcacagagaa

SEQ ID NO: 678860 - DNA, 15 bp, Homo sapiens
gttttcacagagaaa

SEQ ID NO: 678861 - DNA, 15 bp, Homo sapiens
ttttcacagagaaat

SEQ ID NO: 678862 - DNA, 15 bp, Homo sapiens
tttcacagagaaata

SEQ ID NO: 678863 - DNA, 15 bp, Homo sapiens
ttcacagagaaatag

SEQ ID NO: 678864 - DNA, 15 bp, Homo sapiens
tcacagagaaatagt

SEQ ID NO: 678865 - DNA, 15 bp, Homo sapiens
cacagagaaatagta

SEQ ID NO: 678866 - DNA, 15 bp, Homo sapiens
acagagaaatagtac

SEQ ID NO: 678867 - DNA, 15 bp, Homo sapiens
cagagaaatagtact

SEQ ID NO: 678868 - DNA, 15 bp, Homo sapiens
agagaaatagtactg

SEQ ID NO: 678869 - DNA, 15 bp, Homo sapiens
gagaaatagtactga

SEQ ID NO: 678870 - DNA, 15 bp, Homo sapiens
agaaatagtactgat

SEQ ID NO: 678871 - DNA, 15 bp, Homo sapiens
gaaatagtactgatg

SEQ ID NO: 678872 - DNA, 15 bp, Homo sapiens
aaatagtactgatgc

SEQ ID NO: 678873 - DNA, 15 bp, Homo sapiens
aatagtactgatgct

SEQ ID NO: 678874 - DNA, 15 bp, Homo sapiens
atagtactgatgctt

SEQ ID NO: 678875 - DNA, 15 bp, Homo sapiens
tagtactgatgcttt

SEQ ID NO: 678876 - DNA, 15 bp, Homo sapiens
agtactgatgctttt

SEQ ID NO: 678877 - DNA, 15 bp, Homo sapiens
gtactgatgcttttc

SEQ ID NO: 678878 - DNA, 15 bp, Homo sapiens
tactgatgcttttca

SEQ ID NO: 678879 - DNA, 15 bp, Homo sapiens
actgatgcttttcag

SEQ ID NO: 678880 - DNA, 15 bp, Homo sapiens
ctgatgcttttcagg

SEQ ID NO: 678881 - DNA, 15 bp, Homo sapiens
tgatgcttttcagga

SEQ ID NO: 678882 - DNA, 15 bp, Homo sapiens
gatgcttttcaggac

SEQ ID NO: 678883 - DNA, 15 bp, Homo sapiens
atgcttttcaggaca

SEQ ID NO: 678884 - DNA, 15 bp, Homo sapiens
tgcttttcaggacag

SEQ ID NO: 678885 - DNA, 15 bp, Homo sapiens
gcttttcaggacaga

SEQ ID NO: 678886 - DNA, 15 bp, Homo sapiens
cttttcaggacagag

SEQ ID NO: 678887 - DNA, 15 bp, Homo sapiens
ttttcaggacagagg

SEQ ID NO: 678888 - DNA, 15 bp, Homo sapiens
tttcaggacagaggc

SEQ ID NO: 678889 - DNA, 15 bp, Homo sapiens
ttcaggacagaggct

SEQ ID NO: 678890 - DNA, 15 bp, Homo sapiens
tcaggacagaggctg

SEQ ID NO: 678891 - DNA, 15 bp, Homo sapiens
caggacagaggctgg

SEQ ID NO: 678892 - DNA, 15 bp, Homo sapiens
aggacagaggctggc

SEQ ID NO: 678893 - DNA, 15 bp, Homo sapiens
ggacagaggctggca

SEQ ID NO: 678894 - DNA, 15 bp, Homo sapiens
gacagaggctggcac

SEQ ID NO: 678895 - DNA, 15 bp, Homo sapiens
acagaggctggcaca

SEQ ID NO: 678896 - DNA, 15 bp, Homo sapiens
cagaggctggcacag

SEQ ID NO: 678897 - DNA, 15 bp, Homo sapiens
agaggctggcacagt

SEQ ID NO: 678898 - DNA, 15 bp, Homo sapiens
gaggctggcacagtg

SEQ ID NO: 678899 - DNA, 15 bp, Homo sapiens
aggctggcacagtgt

SEQ ID NO: 678900 - DNA, 15 bp, Homo sapiens
ggctggcacagtgta

SEQ ID NO: 678901 - DNA, 15 bp, Homo sapiens
gctggcacagtgtaa

SEQ ID NO: 678902 - DNA, 15 bp, Homo sapiens
ctggcacagtgtaaa

SEQ ID NO: 678903 - DNA, 15 bp, Homo sapiens
tggcacagtgtaaag

SEQ ID NO: 678904 - DNA, 15 bp, Homo sapiens
ggcacagtgtaaagg

SEQ ID NO: 678905 - DNA, 15 bp, Homo sapiens
gcacagtgtaaaggg

SEQ ID NO: 678906 - DNA, 15 bp, Homo sapiens
cacagtgtaaagggc

SEQ ID NO: 678907 - DNA, 15 bp, Homo sapiens
acagtgtaaagggct

SEQ ID NO: 678908 - DNA, 15 bp, Homo sapiens
cagtgtaaagggctt

SEQ ID NO: 678909 - DNA, 15 bp, Homo sapiens
agtgtaaagggctta

SEQ ID NO: 678910 - DNA, 15 bp, Homo sapiens
gtgtaaagggcttaa

SEQ ID NO: 678911 - DNA, 15 bp, Homo sapiens
tgtaaagggcttaat

SEQ ID NO: 678912 - DNA, 15 bp, Homo sapiens
gtaaagggcttaatt

SEQ ID NO: 678913 - DNA, 15 bp, Homo sapiens
taaagggcttaattg

SEQ ID NO: 678914 - DNA, 15 bp, Homo sapiens
aaagggcttaattgt

SEQ ID NO: 678915 - DNA, 15 bp, Homo sapiens
aagggcttaattgtt

SEQ ID NO: 678916 - DNA, 15 bp, Homo sapiens
agggcttaattgtta

SEQ ID NO: 678917 - DNA, 15 bp, Homo sapiens
gggcttaattgttag

SEQ ID NO: 678918 - DNA, 15 bp, Homo sapiens
ggcttaattgttagc

SEQ ID NO: 678919 - DNA, 15 bp, Homo sapiens
gcttaattgttagca

SEQ ID NO: 678920 - DNA, 15 bp, Homo sapiens
cttaattgttagcaa

SEQ ID NO: 678921 - DNA, 15 bp, Homo sapiens
ttaattgttagcaat

SEQ ID NO: 678922 - DNA, 15 bp, Homo sapiens
taattgttagcaata

SEQ ID NO: 678923 - DNA, 15 bp, Homo sapiens
aattgttagcaataa

SEQ ID NO: 678924 - DNA, 15 bp, Homo sapiens
attgttagcaataaa

SEQ ID NO: 678925 - DNA, 15 bp, Homo sapiens
ttgttagcaataaac

SEQ ID NO: 678926 - DNA, 15 bp, Homo sapiens
tgttagcaataaacc

SEQ ID NO: 678927 - DNA, 15 bp, Homo sapiens
gttagcaataaacca

SEQ ID NO: 678928 - DNA, 15 bp, Homo sapiens
ttagcaataaaccag

SEQ ID NO: 678929 - DNA, 15 bp, Homo sapiens
tagcaataaaccagt

SEQ ID NO: 678930 - DNA, 15 bp, Homo sapiens
agcaataaaccagtc

SEQ ID NO: 678931 - DNA, 15 bp, Homo sapiens
gcaataaaccagtct

SEQ ID NO: 678932 - DNA, 15 bp, Homo sapiens
caataaaccagtctt

SEQ ID NO: 678933 - DNA, 15 bp, Homo sapiens
aataaaccagtctta

SEQ ID NO: 678934 - DNA, 15 bp, Homo sapiens
ataaaccagtcttat

SEQ ID NO: 678935 - DNA, 15 bp, Homo sapiens
taaaccagtcttatc

SEQ ID NO: 678936 - DNA, 15 bp, Homo sapiens
aaaccagtcttatca

SEQ ID NO: 678937 - DNA, 15 bp, Homo sapiens
aaccagtcttatcaa

SEQ ID NO: 678938 - DNA, 15 bp, Homo sapiens
accagtcttatcaaa

SEQ ID NO: 678939 - DNA, 15 bp, Homo sapiens
ccagtcttatcaaat

SEQ ID NO: 678940 - DNA, 15 bp, Homo sapiens
cagtcttatcaaatt

SEQ ID NO: 678941 - DNA, 15 bp, Homo sapiens
agtcttatcaaattc

SEQ ID NO: 678942 - DNA, 15 bp, Homo sapiens
gtcttatcaaattca

SEQ ID NO: 678943 - DNA, 15 bp, Homo sapiens
tcttatcaaattcag

SEQ ID NO: 678944 - DNA, 15 bp, Homo sapiens
cttatcaaattcaga

SEQ ID NO: 678945 - DNA, 15 bp, Homo sapiens
ttatcaaattcagag

SEQ ID NO: 678946 - DNA, 15 bp, Homo sapiens
tatcaaattcagagc

SEQ ID NO: 678947 - DNA, 15 bp, Homo sapiens
atcaaattcagagcg

SEQ ID NO: 678948 - DNA, 15 bp, Homo sapiens
tcaaattcagagcgt

SEQ ID NO: 678949 - DNA, 15 bp, Homo sapiens
caaattcagagcgta

SEQ ID NO: 678950 - DNA, 15 bp, Homo sapiens
aaattcagagcgtac

SEQ ID NO: 678951 - DNA, 15 bp, Homo sapiens
aattcagagcgtaca

SEQ ID NO: 678952 - DNA, 15 bp, Homo sapiens
attcagagcgtacat

SEQ ID NO: 678953 - DNA, 15 bp, Homo sapiens
ttcagagcgtacatg

SEQ ID NO: 678954 - DNA, 15 bp, Homo sapiens
tcagagcgtacatgt

SEQ ID NO: 678955 - DNA, 15 bp, Homo sapiens
cagagcgtacatgtt

SEQ ID NO: 678956 - DNA, 15 bp, Homo sapiens
agagcgtacatgttt

SEQ ID NO: 678957 - DNA, 15 bp, Homo sapiens
gagcgtacatgtttc

SEQ ID NO: 678958 - DNA, 15 bp, Homo sapiens
agcgtacatgtttct

SEQ ID NO: 678959 - DNA, 15 bp, Homo sapiens
gcgtacatgtttctt

SEQ ID NO: 678960 - DNA, 15 bp, Homo sapiens
cgtacatgtttctta

SEQ ID NO: 678961 - DNA, 15 bp, Homo sapiens
gtacatgtttcttaa

SEQ ID NO: 678962 - DNA, 15 bp, Homo sapiens
tacatgtttcttaaa

SEQ ID NO: 678963 - DNA, 15 bp, Homo sapiens
acatgtttcttaaaa

SEQ ID NO: 678964 - DNA, 15 bp, Homo sapiens
catgtttcttaaaag

SEQ ID NO: 678965 - DNA, 15 bp, Homo sapiens
atgtttcttaaaagg

SEQ ID NO: 678966 - DNA, 15 bp, Homo sapiens
tgtttcttaaaaggg

SEQ ID NO: 678967 - DNA, 15 bp, Homo sapiens
gtttcttaaaaggga

SEQ ID NO: 678968 - DNA, 15 bp, Homo sapiens
tttcttaaaagggat

SEQ ID NO: 678969 - DNA, 15 bp, Homo sapiens
ttcttaaaagggatg

SEQ ID NO: 678970 - DNA, 15 bp, Homo sapiens
tcttaaaagggatgt

SEQ ID NO: 678971 - DNA, 15 bp, Homo sapiens
cttaaaagggatgta

SEQ ID NO: 678972 - DNA, 15 bp, Homo sapiens
ttaaaagggatgtat

SEQ ID NO: 678973 - DNA, 15 bp, Homo sapiens
taaaagggatgtata

SEQ ID NO: 678974 - DNA, 15 bp, Homo sapiens
aaaagggatgtatag

SEQ ID NO: 678975 - DNA, 15 bp, Homo sapiens
aaagggatgtataga

SEQ ID NO: 678976 - DNA, 15 bp, Homo sapiens
aagggatgtatagaa

SEQ ID NO: 678977 - DNA, 15 bp, Homo sapiens
agggatgtatagaat

SEQ ID NO: 678978 - DNA, 15 bp, Homo sapiens
gggatgtatagaatc

SEQ ID NO: 678979 - DNA, 15 bp, Homo sapiens
ggatgtatagaatca

SEQ ID NO: 678980 - DNA, 15 bp, Homo sapiens
gatgtatagaatcag

SEQ ID NO: 678981 - DNA, 15 bp, Homo sapiens
atgtatagaatcagt

SEQ ID NO: 678982 - DNA, 15 bp, Homo sapiens
tgtatagaatcagta

SEQ ID NO: 678983 - DNA, 15 bp, Homo sapiens
gtatagaatcagtac

SEQ ID NO: 678984 - DNA, 15 bp, Homo sapiens
tatagaatcagtacc

SEQ ID NO: 678985 - DNA, 15 bp, Homo sapiens
atagaatcagtaccc

SEQ ID NO: 678986 - DNA, 15 bp, Homo sapiens
tagaatcagtaccct

SEQ ID NO: 678987 - DNA, 15 bp, Homo sapiens
agaatcagtaccctg

SEQ ID NO: 678988 - DNA, 15 bp, Homo sapiens
gaatcagtaccctga

SEQ ID NO: 678989 - DNA, 15 bp, Homo sapiens
aatcagtaccctgag

SEQ ID NO: 678990 - DNA, 15 bp, Homo sapiens
atcagtaccctgagt

SEQ ID NO: 678991 - DNA, 15 bp, Homo sapiens
tcagtaccctgagta

SEQ ID NO: 678992 - DNA, 15 bp, Homo sapiens
cagtaccctgagtat

SEQ ID NO: 678993 - DNA, 15 bp, Homo sapiens
agtaccctgagtatg

SEQ ID NO: 678994 - DNA, 15 bp, Homo sapiens
gtaccctgagtatga

SEQ ID NO: 678995 - DNA, 15 bp, Homo sapiens
taccctgagtatgat

SEQ ID NO: 678996 - DNA, 15 bp, Homo sapiens
accctgagtatgatg

SEQ ID NO: 678997 - DNA, 15 bp, Homo sapiens
ccctgagtatgatgt

SEQ ID NO: 678998 - DNA, 15 bp, Homo sapiens
cctgagtatgatgta

SEQ ID NO: 678999 - DNA, 15 bp, Homo sapiens
ctgagtatgatgtaa

SEQ ID NO: 679000 - DNA, 15 bp, Homo sapiens
tgagtatgatgtaat

SEQ ID NO: 679001 - DNA, 15 bp, Homo sapiens
gagtatgatgtaatc

SEQ ID NO: 679002 - DNA, 15 bp, Homo sapiens
agtatgatgtaatct

SEQ ID NO: 679003 - DNA, 15 bp, Homo sapiens
gtatgatgtaatctt

SEQ ID NO: 679004 - DNA, 15 bp, Homo sapiens
tatgatgtaatcttt

SEQ ID NO: 679005 - DNA, 15 bp, Homo sapiens
atgatgtaatcttta

SEQ ID NO: 679006 - DNA, 15 bp, Homo sapiens
tgatgtaatctttac

SEQ ID NO: 679007 - DNA, 15 bp, Homo sapiens
gatgtaatctttaca

SEQ ID NO: 679008 - DNA, 15 bp, Homo sapiens
atgtaatctttacat

SEQ ID NO: 679009 - DNA, 15 bp, Homo sapiens
tgtaatctttacata

SEQ ID NO: 679010 - DNA, 15 bp, Homo sapiens
gtaatctttacatat

SEQ ID NO: 679011 - DNA, 15 bp, Homo sapiens
taatctttacatata

SEQ ID NO: 679012 - DNA, 15 bp, Homo sapiens
aatctttacatatat

SEQ ID NO: 679013 - DNA, 15 bp, Homo sapiens
atctttacatatatt

SEQ ID NO: 679014 - DNA, 15 bp, Homo sapiens
tctttacatatatta

SEQ ID NO: 679015 - DNA, 15 bp, Homo sapiens
ctttacatatattaa

SEQ ID NO: 679016 - DNA, 15 bp, Homo sapiens
tttacatatattaaa

SEQ ID NO: 679017 - DNA, 15 bp, Homo sapiens
ttacatatattaaaa

SEQ ID NO: 679018 - DNA, 15 bp, Homo sapiens
tacatatattaaaat

SEQ ID NO: 679019 - DNA, 15 bp, Homo sapiens
acatatattaaaatg

SEQ ID NO: 679020 - DNA, 15 bp, Homo sapiens
catatattaaaatgt

SEQ ID NO: 679021 - DNA, 15 bp, Homo sapiens
atatattaaaatgtc

SEQ ID NO: 679022 - DNA, 15 bp, Homo sapiens
tatattaaaatgtct

SEQ ID NO: 679023 - DNA, 15 bp, Homo sapiens
atattaaaatgtctg

SEQ ID NO: 679024 - DNA, 15 bp, Homo sapiens
tattaaaatgtctgg

SEQ ID NO: 679025 - DNA, 15 bp, Homo sapiens
attaaaatgtctggc

SEQ ID NO: 679026 - DNA, 15 bp, Homo sapiens
ttaaaatgtctggca

SEQ ID NO: 679027 - DNA, 15 bp, Homo sapiens
taaaatgtctggcag

SEQ ID NO: 679028 - DNA, 15 bp, Homo sapiens
aaaatgtctggcaga

SEQ ID NO: 679029 - DNA, 15 bp, Homo sapiens
aaatgtctggcagat

SEQ ID NO: 679030 - DNA, 15 bp, Homo sapiens
aatgtctggcagatt

SEQ ID NO: 679031 - DNA, 15 bp, Homo sapiens
atgtctggcagattg

SEQ ID NO: 679032 - DNA, 15 bp, Homo sapiens
tgtctggcagattgc

SEQ ID NO: 679033 - DNA, 15 bp, Homo sapiens
gtctggcagattgct

SEQ ID NO: 679034 - DNA, 15 bp, Homo sapiens
tctggcagattgcta

SEQ ID NO: 679035 - DNA, 15 bp, Homo sapiens
ctggcagattgctat

SEQ ID NO: 679036 - DNA, 15 bp, Homo sapiens
tggcagattgctata

SEQ ID NO: 679037 - DNA, 15 bp, Homo sapiens
ggcagattgctatag

SEQ ID NO: 679038 - DNA, 15 bp, Homo sapiens
gcagattgctatagt

SEQ ID NO: 679039 - DNA, 15 bp, Homo sapiens
cagattgctatagta

SEQ ID NO: 679040 - DNA, 15 bp, Homo sapiens
agattgctatagtac

SEQ ID NO: 679041 - DNA, 15 bp, Homo sapiens
gattgctatagtacc

SEQ ID NO: 679042 - DNA, 15 bp, Homo sapiens
attgctatagtaccc

SEQ ID NO: 679043 - DNA, 15 bp, Homo sapiens
ttgctatagtaccca

SEQ ID NO: 679044 - DNA, 15 bp, Homo sapiens
tgctatagtacccat

SEQ ID NO: 679045 - DNA, 15 bp, Homo sapiens
gctatagtacccata

SEQ ID NO: 679046 - DNA, 15 bp, Homo sapiens
ctatagtacccataa

SEQ ID NO: 679047 - DNA, 15 bp, Homo sapiens
tatagtacccataat

SEQ ID NO: 679048 - DNA, 15 bp, Homo sapiens
atagtacccataatc

SEQ ID NO: 679049 - DNA, 15 bp, Homo sapiens
tagtacccataatca

SEQ ID NO: 679050 - DNA, 15 bp, Homo sapiens
agtacccataatcat

SEQ ID NO: 679051 - DNA, 15 bp, Homo sapiens
gtacccataatcatg

SEQ ID NO: 679052 - DNA, 15 bp, Homo sapiens
tacccataatcatgc

SEQ ID NO: 679053 - DNA, 15 bp, Homo sapiens
acccataatcatgcc

SEQ ID NO: 679054 - DNA, 15 bp, Homo sapiens
cccataatcatgccc

SEQ ID NO: 679055 - DNA, 15 bp, Homo sapiens
ccataatcatgccct

SEQ ID NO: 679056 - DNA, 15 bp, Homo sapiens
cataatcatgccctc

SEQ ID NO: 679057 - DNA, 15 bp, Homo sapiens
ataatcatgccctct

SEQ ID NO: 679058 - DNA, 15 bp, Homo sapiens
taatcatgccctctg

SEQ ID NO: 679059 - DNA, 15 bp, Homo sapiens
aatcatgccctctgt

SEQ ID NO: 679060 - DNA, 15 bp, Homo sapiens
atcatgccctctgtg

SEQ ID NO: 679061 - DNA, 15 bp, Homo sapiens
tcatgccctctgtgc

SEQ ID NO: 679062 - DNA, 15 bp, Homo sapiens
catgccctctgtgcc

SEQ ID NO: 679063 - DNA, 15 bp, Homo sapiens
atgccctctgtgccc

SEQ ID NO: 679064 - DNA, 15 bp, Homo sapiens
tgccctctgtgccca

SEQ ID NO: 679065 - DNA, 15 bp, Homo sapiens
gccctctgtgcccac

SEQ ID NO: 679066 - DNA, 15 bp, Homo sapiens
ccctctgtgcccact

SEQ ID NO: 679067 - DNA, 15 bp, Homo sapiens
cctctgtgcccactc

SEQ ID NO: 679068 - DNA, 15 bp, Homo sapiens
ctctgtgcccactct

SEQ ID NO: 679069 - DNA, 15 bp, Homo sapiens
tctgtgcccactctt

SEQ ID NO: 679070 - DNA, 15 bp, Homo sapiens
ctgtgcccactcttt

SEQ ID NO: 679071 - DNA, 15 bp, Homo sapiens
tgtgcccactctttt

SEQ ID NO: 679072 - DNA, 15 bp, Homo sapiens
gtgcccactctttta

SEQ ID NO: 679073 - DNA, 15 bp, Homo sapiens
tgcccactcttttac

SEQ ID NO: 679074 - DNA, 15 bp, Homo sapiens
gcccactcttttaca

SEQ ID NO: 679075 - DNA, 15 bp, Homo sapiens
cccactcttttacaa

SEQ ID NO: 679076 - DNA, 15 bp, Homo sapiens
ccactcttttacaaa

SEQ ID NO: 679077 - DNA, 15 bp, Homo sapiens
cactcttttacaaag

SEQ ID NO: 679078 - DNA, 15 bp, Homo sapiens
actcttttacaaagt

SEQ ID NO: 679079 - DNA, 15 bp, Homo sapiens
ctcttttacaaagtg

SEQ ID NO: 679080 - DNA, 15 bp, Homo sapiens
tcttttacaaagtga

SEQ ID NO: 679081 - DNA, 15 bp, Homo sapiens
cttttacaaagtgac

SEQ ID NO: 679082 - DNA, 15 bp, Homo sapiens
ttttacaaagtgact

SEQ ID NO: 679083 - DNA, 15 bp, Homo sapiens
tttacaaagtgactt

SEQ ID NO: 679084 - DNA, 15 bp, Homo sapiens
ttacaaagtgacttt

SEQ ID NO: 679085 - DNA, 15 bp, Homo sapiens
tacaaagtgactttc

SEQ ID NO: 679086 - DNA, 15 bp, Homo sapiens
acaaagtgactttct

SEQ ID NO: 679087 - DNA, 15 bp, Homo sapiens
caaagtgactttctc

SEQ ID NO: 679088 - DNA, 15 bp, Homo sapiens
aaagtgactttctct

SEQ ID NO: 679089 - DNA, 15 bp, Homo sapiens
aagtgactttctctt

SEQ ID NO: 679090 - DNA, 15 bp, Homo sapiens
agtgactttctctta

SEQ ID NO: 679091 - DNA, 15 bp, Homo sapiens
gtgactttctcttat

SEQ ID NO: 679092 - DNA, 15 bp, Homo sapiens
tgactttctcttatc

SEQ ID NO: 679093 - DNA, 15 bp, Homo sapiens
gactttctcttatca

SEQ ID NO: 679094 - DNA, 15 bp, Homo sapiens
actttctcttatcaa

SEQ ID NO: 679095 - DNA, 15 bp, Homo sapiens
ctttctcttatcaag

SEQ ID NO: 679096 - DNA, 15 bp, Homo sapiens
tttctcttatcaaga

SEQ ID NO: 679097 - DNA, 15 bp, Homo sapiens
ttctcttatcaagat

SEQ ID NO: 679098 - DNA, 15 bp, Homo sapiens
tctcttatcaagata

SEQ ID NO: 679099 - DNA, 15 bp, Homo sapiens
ctcttatcaagatat

SEQ ID NO: 679100 - DNA, 15 bp, Homo sapiens
tcttatcaagatatt

SEQ ID NO: 679101 - DNA, 15 bp, Homo sapiens
cttatcaagatatta

SEQ ID NO: 679102 - DNA, 15 bp, Homo sapiens
ttatcaagatattac

SEQ ID NO: 679103 - DNA, 15 bp, Homo sapiens
tatcaagatattact

SEQ ID NO: 679104 - DNA, 15 bp, Homo sapiens
atcaagatattactt

SEQ ID NO: 679105 - DNA, 15 bp, Homo sapiens
tcaagatattacttt

SEQ ID NO: 679106 - DNA, 15 bp, Homo sapiens
caagatattactttt

SEQ ID NO: 679107 - DNA, 15 bp, Homo sapiens
aagatattacttttt

SEQ ID NO: 679108 - DNA, 15 bp, Homo sapiens
agatattactttttc

SEQ ID NO: 679109 - DNA, 15 bp, Homo sapiens
gatattactttttcc

SEQ ID NO: 679110 - DNA, 15 bp, Homo sapiens
atattactttttccc

SEQ ID NO: 679111 - DNA, 15 bp, Homo sapiens
tattactttttcccc

SEQ ID NO: 679112 - DNA, 15 bp, Homo sapiens
attactttttcccca

SEQ ID NO: 679113 - DNA, 15 bp, Homo sapiens
ttactttttccccac

SEQ ID NO: 679114 - DNA, 15 bp, Homo sapiens
tactttttccccact

SEQ ID NO: 679115 - DNA, 15 bp, Homo sapiens
actttttccccactc

SEQ ID NO: 679116 - DNA, 15 bp, Homo sapiens
ctttttccccactcc

SEQ ID NO: 679117 - DNA, 15 bp, Homo sapiens
tttttccccactcct

SEQ ID NO: 679118 - DNA, 15 bp, Homo sapiens
ttttccccactcctt

SEQ ID NO: 679119 - DNA, 15 bp, Homo sapiens
tttccccactccttg

SEQ ID NO: 679120 - DNA, 15 bp, Homo sapiens
ttccccactccttga

SEQ ID NO: 679121 - DNA, 15 bp, Homo sapiens
tccccactccttgaa

SEQ ID NO: 679122 - DNA, 15 bp, Homo sapiens
ccccactccttgaat

SEQ ID NO: 679123 - DNA, 15 bp, Homo sapiens
cccactccttgaatc

SEQ ID NO: 679124 - DNA, 15 bp, Homo sapiens
ccactccttgaatct

SEQ ID NO: 679125 - DNA, 15 bp, Homo sapiens
cactccttgaatctg

SEQ ID NO: 679126 - DNA, 15 bp, Homo sapiens
actccttgaatctgg

SEQ ID NO: 679127 - DNA, 15 bp, Homo sapiens
ctccttgaatctgga

SEQ ID NO: 679128 - DNA, 15 bp, Homo sapiens
tccttgaatctggac

SEQ ID NO: 679129 - DNA, 15 bp, Homo sapiens
ccttgaatctggact

SEQ ID NO: 679130 - DNA, 15 bp, Homo sapiens
cttgaatctggactt

SEQ ID NO: 679131 - DNA, 15 bp, Homo sapiens
ttgaatctggacttc

SEQ ID NO: 679132 - DNA, 15 bp, Homo sapiens
tgaatctggacttct

SEQ ID NO: 679133 - DNA, 15 bp, Homo sapiens
gaatctggacttctc

SEQ ID NO: 679134 - DNA, 15 bp, Homo sapiens
aatctggacttctct

SEQ ID NO: 679135 - DNA, 15 bp, Homo sapiens
atctggacttctctt

SEQ ID NO: 679136 - DNA, 15 bp, Homo sapiens
tctggacttctcttg

SEQ ID NO: 679137 - DNA, 15 bp, Homo sapiens
ctggacttctcttgt

SEQ ID NO: 679138 - DNA, 15 bp, Homo sapiens
tggacttctcttgtg

SEQ ID NO: 679139 - DNA, 15 bp, Homo sapiens
ggacttctcttgtga

SEQ ID NO: 679140 - DNA, 15 bp, Homo sapiens
gacttctcttgtgac

SEQ ID NO: 679141 - DNA, 15 bp, Homo sapiens
acttctcttgtgact

SEQ ID NO: 679142 - DNA, 15 bp, Homo sapiens
cttctcttgtgactt

SEQ ID NO: 679143 - DNA, 15 bp, Homo sapiens
ttctcttgtgacttg

SEQ ID NO: 679144 - DNA, 15 bp, Homo sapiens
tctcttgtgacttgg

SEQ ID NO: 679145 - DNA, 15 bp, Homo sapiens
ctcttgtgacttggt

SEQ ID NO: 679146 - DNA, 15 bp, Homo sapiens
tcttgtgacttggtt

SEQ ID NO: 679147 - DNA, 15 bp, Homo sapiens
cttgtgacttggttt

SEQ ID NO: 679148 - DNA, 15 bp, Homo sapiens
ttgtgacttggttta

SEQ ID NO: 679149 - DNA, 15 bp, Homo sapiens
tgtgacttggtttaa

SEQ ID NO: 679150 - DNA, 15 bp, Homo sapiens
gtgacttggtttaat

SEQ ID NO: 679151 - DNA, 15 bp, Homo sapiens
tgacttggtttaatc

SEQ ID NO: 679152 - DNA, 15 bp, Homo sapiens
gacttggtttaatca

SEQ ID NO: 679153 - DNA, 15 bp, Homo sapiens
acttggtttaatcaa

SEQ ID NO: 679154 - DNA, 15 bp, Homo sapiens
cttggtttaatcaac

SEQ ID NO: 679155 - DNA, 15 bp, Homo sapiens
ttggtttaatcaaca

SEQ ID NO: 679156 - DNA, 15 bp, Homo sapiens
tggtttaatcaacaa

SEQ ID NO: 679157 - DNA, 15 bp, Homo sapiens
ggtttaatcaacaaa

SEQ ID NO: 679158 - DNA, 15 bp, Homo sapiens
gtttaatcaacaaaa

SEQ ID NO: 679159 - DNA, 15 bp, Homo sapiens
tttaatcaacaaaat

SEQ ID NO: 679160 - DNA, 15 bp, Homo sapiens
ttaatcaacaaaatg

SEQ ID NO: 679161 - DNA, 15 bp, Homo sapiens
taatcaacaaaatgc

SEQ ID NO: 679162 - DNA, 15 bp, Homo sapiens
aatcaacaaaatgca

SEQ ID NO: 679163 - DNA, 15 bp, Homo sapiens
atcaacaaaatgcag

SEQ ID NO: 679164 - DNA, 15 bp, Homo sapiens
tcaacaaaatgcagc

SEQ ID NO: 679165 - DNA, 15 bp, Homo sapiens
caacaaaatgcagcc

SEQ ID NO: 679166 - DNA, 15 bp, Homo sapiens
aacaaaatgcagcca

SEQ ID NO: 679167 - DNA, 15 bp, Homo sapiens
acaaaatgcagccag

SEQ ID NO: 679168 - DNA, 15 bp, Homo sapiens
caaaatgcagccagg

SEQ ID NO: 679169 - DNA, 15 bp, Homo sapiens
aaaatgcagccaggt

SEQ ID NO: 679170 - DNA, 15 bp, Homo sapiens
aaatgcagccaggtg

SEQ ID NO: 679171 - DNA, 15 bp, Homo sapiens
aatgcagccaggtga

SEQ ID NO: 679172 - DNA, 15 bp, Homo sapiens
atgcagccaggtgat

SEQ ID NO: 679173 - DNA, 15 bp, Homo sapiens
tgcagccaggtgatg

SEQ ID NO: 679174 - DNA, 15 bp, Homo sapiens
gcagccaggtgatgg

SEQ ID NO: 679175 - DNA, 15 bp, Homo sapiens
cagccaggtgatggc

SEQ ID NO: 679176 - DNA, 15 bp, Homo sapiens
agccaggtgatggca

SEQ ID NO: 679177 - DNA, 15 bp, Homo sapiens
gccaggtgatggcat

SEQ ID NO: 679178 - DNA, 15 bp, Homo sapiens
ccaggtgatggcatg

SEQ ID NO: 679179 - DNA, 15 bp, Homo sapiens
caggtgatggcatgt

SEQ ID NO: 679180 - DNA, 15 bp, Homo sapiens
aggtgatggcatgtg

SEQ ID NO: 679181 - DNA, 15 bp, Homo sapiens
ggtgatggcatgtga

SEQ ID NO: 679182 - DNA, 15 bp, Homo sapiens
gtgatggcatgtgac

SEQ ID NO: 679183 - DNA, 15 bp, Homo sapiens
tgatggcatgtgact

SEQ ID NO: 679184 - DNA, 15 bp, Homo sapiens
gatggcatgtgactt

SEQ ID NO: 679185 - DNA, 15 bp, Homo sapiens
atggcatgtgacttc

SEQ ID NO: 679186 - DNA, 15 bp, Homo sapiens
tggcatgtgacttca

SEQ ID NO: 679187 - DNA, 15 bp, Homo sapiens
ggcatgtgacttcag

SEQ ID NO: 679188 - DNA, 15 bp, Homo sapiens
gcatgtgacttcagg

SEQ ID NO: 679189 - DNA, 15 bp, Homo sapiens
catgtgacttcaggg

SEQ ID NO: 679190 - DNA, 15 bp, Homo sapiens
atgtgacttcagggc

SEQ ID NO: 679191 - DNA, 15 bp, Homo sapiens
tgtgacttcagggcc

SEQ ID NO: 679192 - DNA, 15 bp, Homo sapiens
gtgacttcagggcct

SEQ ID NO: 679193 - DNA, 15 bp, Homo sapiens
tgacttcagggccta

SEQ ID NO: 679194 - DNA, 15 bp, Homo sapiens
gacttcagggcctag

SEQ ID NO: 679195 - DNA, 15 bp, Homo sapiens
acttcagggcctagg

SEQ ID NO: 679196 - DNA, 15 bp, Homo sapiens
cttcagggcctaggc

SEQ ID NO: 679197 - DNA, 15 bp, Homo sapiens
ttcagggcctaggcc

SEQ ID NO: 679198 - DNA, 15 bp, Homo sapiens
tcagggcctaggcct

SEQ ID NO: 679199 - DNA, 15 bp, Homo sapiens
cagggcctaggcctc

SEQ ID NO: 679200 - DNA, 15 bp, Homo sapiens
agggcctaggcctca

SEQ ID NO: 679201 - DNA, 15 bp, Homo sapiens
gggcctaggcctcaa

SEQ ID NO: 679202 - DNA, 15 bp, Homo sapiens
ggcctaggcctcaag

SEQ ID NO: 679203 - DNA, 15 bp, Homo sapiens
gcctaggcctcaagg

SEQ ID NO: 679204 - DNA, 15 bp, Homo sapiens
cctaggcctcaaggg

SEQ ID NO: 679205 - DNA, 15 bp, Homo sapiens
ctaggcctcaaggga

SEQ ID NO: 679206 - DNA, 15 bp, Homo sapiens
taggcctcaagggac

SEQ ID NO: 679207 - DNA, 15 bp, Homo sapiens
aggcctcaagggacc

SEQ ID NO: 679208 - DNA, 15 bp, Homo sapiens
ggcctcaagggacct

SEQ ID NO: 679209 - DNA, 15 bp, Homo sapiens
gcctcaagggacctt

SEQ ID NO: 679210 - DNA, 15 bp, Homo sapiens
cctcaagggaccttc

SEQ ID NO: 679211 - DNA, 15 bp, Homo sapiens
ctcaagggaccttca

SEQ ID NO: 679212 - DNA, 15 bp, Homo sapiens
tcaagggaccttcac

SEQ ID NO: 679213 - DNA, 15 bp, Homo sapiens
caagggaccttcacc

SEQ ID NO: 679214 - DNA, 15 bp, Homo sapiens
aagggaccttcacct

SEQ ID NO: 679215 - DNA, 15 bp, Homo sapiens
agggaccttcacctc

SEQ ID NO: 679216 - DNA, 15 bp, Homo sapiens
gggaccttcacctct

SEQ ID NO: 679217 - DNA, 15 bp, Homo sapiens
ggaccttcacctctc

SEQ ID NO: 679218 - DNA, 15 bp, Homo sapiens
gaccttcacctctca

SEQ ID NO: 679219 - DNA, 15 bp, Homo sapiens
accttcacctctcag

SEQ ID NO: 679220 - DNA, 15 bp, Homo sapiens
ccttcacctctcaga

SEQ ID NO: 679221 - DNA, 15 bp, Homo sapiens
cttcacctctcagaa

SEQ ID NO: 679222 - DNA, 15 bp, Homo sapiens
ttcacctctcagaac

SEQ ID NO: 679223 - DNA, 15 bp, Homo sapiens
tcacctctcagaaca

SEQ ID NO: 679224 - DNA, 15 bp, Homo sapiens
cacctctcagaacac

SEQ ID NO: 679225 - DNA, 15 bp, Homo sapiens
acctctcagaacact

SEQ ID NO: 679226 - DNA, 15 bp, Homo sapiens
cctctcagaacactc

SEQ ID NO: 679227 - DNA, 15 bp, Homo sapiens
ctctcagaacactct

SEQ ID NO: 679228 - DNA, 15 bp, Homo sapiens
tctcagaacactctc

SEQ ID NO: 679229 - DNA, 15 bp, Homo sapiens
ctcagaacactctca

SEQ ID NO: 679230 - DNA, 15 bp, Homo sapiens
tcagaacactctcac

SEQ ID NO: 679231 - DNA, 15 bp, Homo sapiens
cagaacactctcact

SEQ ID NO: 679232 - DNA, 15 bp, Homo sapiens
agaacactctcacta

SEQ ID NO: 679233 - DNA, 15 bp, Homo sapiens
gaacactctcactac

SEQ ID NO: 679234 - DNA, 15 bp, Homo sapiens
aacactctcactacc

SEQ ID NO: 679235 - DNA, 15 bp, Homo sapiens
acactctcactacca

SEQ ID NO: 679236 - DNA, 15 bp, Homo sapiens
cactctcactaccaa

SEQ ID NO: 679237 - DNA, 15 bp, Homo sapiens
actctcactaccaag

SEQ ID NO: 679238 - DNA, 15 bp, Homo sapiens
ctctcactaccaagt

SEQ ID NO: 679239 - DNA, 15 bp, Homo sapiens
tctcactaccaagta

SEQ ID NO: 679240 - DNA, 15 bp, Homo sapiens
ctcactaccaagtaa

SEQ ID NO: 679241 - DNA, 15 bp, Homo sapiens
tcactaccaagtaag

SEQ ID NO: 679242 - DNA, 15 bp, Homo sapiens
cactaccaagtaagg

SEQ ID NO: 679243 - DNA, 15 bp, Homo sapiens
actaccaagtaagga

SEQ ID NO: 679244 - DNA, 15 bp, Homo sapiens
ctaccaagtaaggaa

SEQ ID NO: 679245 - DNA, 15 bp, Homo sapiens
taccaagtaaggaag

SEQ ID NO: 679246 - DNA, 15 bp, Homo sapiens
accaagtaaggaagc

SEQ ID NO: 679247 - DNA, 15 bp, Homo sapiens
ccaagtaaggaagct

SEQ ID NO: 679248 - DNA, 15 bp, Homo sapiens
caagtaaggaagctc

SEQ ID NO: 679249 - DNA, 15 bp, Homo sapiens
aagtaaggaagctca

SEQ ID NO: 679250 - DNA, 15 bp, Homo sapiens
agtaaggaagctcaa

SEQ ID NO: 679251 - DNA, 15 bp, Homo sapiens
gtaaggaagctcaat

SEQ ID NO: 679252 - DNA, 15 bp, Homo sapiens
taaggaagctcaatt

SEQ ID NO: 679253 - DNA, 15 bp, Homo sapiens
aaggaagctcaattc

SEQ ID NO: 679254 - DNA, 15 bp, Homo sapiens
aggaagctcaattct

SEQ ID NO: 679255 - DNA, 15 bp, Homo sapiens
ggaagctcaattctg

SEQ ID NO: 679256 - DNA, 15 bp, Homo sapiens
gaagctcaattctga

SEQ ID NO: 679257 - DNA, 15 bp, Homo sapiens
aagctcaattctgaa

SEQ ID NO: 679258 - DNA, 15 bp, Homo sapiens
agctcaattctgaat

SEQ ID NO: 679259 - DNA, 15 bp, Homo sapiens
gctcaattctgaata

SEQ ID NO: 679260 - DNA, 15 bp, Homo sapiens
ctcaattctgaatac

SEQ ID NO: 679261 - DNA, 15 bp, Homo sapiens
tcaattctgaatact

SEQ ID NO: 679262 - DNA, 15 bp, Homo sapiens
caattctgaatacta

SEQ ID NO: 679263 - DNA, 15 bp, Homo sapiens
aattctgaatactag

SEQ ID NO: 679264 - DNA, 15 bp, Homo sapiens
attctgaatactaga

SEQ ID NO: 679265 - DNA, 15 bp, Homo sapiens
ttctgaatactagat

SEQ ID NO: 679266 - DNA, 15 bp, Homo sapiens
tctgaatactagatg

SEQ ID NO: 679267 - DNA, 15 bp, Homo sapiens
ctgaatactagatga

SEQ ID NO: 679268 - DNA, 15 bp, Homo sapiens
tgaatactagatgat

SEQ ID NO: 679269 - DNA, 15 bp, Homo sapiens
gaatactagatgatc

SEQ ID NO: 679270 - DNA, 15 bp, Homo sapiens
aatactagatgatca

SEQ ID NO: 679271 - DNA, 15 bp, Homo sapiens
atactagatgatcag

SEQ ID NO: 679272 - DNA, 15 bp, Homo sapiens
tactagatgatcaga

SEQ ID NO: 679273 - DNA, 15 bp, Homo sapiens
actagatgatcagag

SEQ ID NO: 679274 - DNA, 15 bp, Homo sapiens
ctagatgatcagaga

SEQ ID NO: 679275 - DNA, 15 bp, Homo sapiens
tagatgatcagagac

SEQ ID NO: 679276 - DNA, 15 bp, Homo sapiens
agatgatcagagacc

SEQ ID NO: 679277 - DNA, 15 bp, Homo sapiens
gatgatcagagacca

SEQ ID NO: 679278 - DNA, 15 bp, Homo sapiens
atgatcagagaccat

SEQ ID NO: 679279 - DNA, 15 bp, Homo sapiens
tgatcagagaccatg

SEQ ID NO: 679280 - DNA, 15 bp, Homo sapiens
gatcagagaccatgt

SEQ ID NO: 679281 - DNA, 15 bp, Homo sapiens
atcagagaccatgtc

SEQ ID NO: 679282 - DNA, 15 bp, Homo sapiens
tcagagaccatgtca

SEQ ID NO: 679283 - DNA, 15 bp, Homo sapiens
cagagaccatgtcag

SEQ ID NO: 679284 - DNA, 15 bp, Homo sapiens
agagaccatgtcagg

SEQ ID NO: 679285 - DNA, 15 bp, Homo sapiens
gagaccatgtcagga

SEQ ID NO: 679286 - DNA, 15 bp, Homo sapiens
agaccatgtcaggag

SEQ ID NO: 679287 - DNA, 15 bp, Homo sapiens
gaccatgtcaggaga

SEQ ID NO: 679288 - DNA, 15 bp, Homo sapiens
accatgtcaggagag

SEQ ID NO: 679289 - DNA, 15 bp, Homo sapiens
ccatgtcaggagaga

SEQ ID NO: 679290 - DNA, 15 bp, Homo sapiens
catgtcaggagagac

SEQ ID NO: 679291 - DNA, 15 bp, Homo sapiens
atgtcaggagagaca

SEQ ID NO: 679292 - DNA, 15 bp, Homo sapiens
tgtcaggagagacag

SEQ ID NO: 679293 - DNA, 15 bp, Homo sapiens
gtcaggagagacagt

SEQ ID NO: 679294 - DNA, 15 bp, Homo sapiens
tcaggagagacagtc

SEQ ID NO: 679295 - DNA, 15 bp, Homo sapiens
caggagagacagtcc

SEQ ID NO: 679296 - DNA, 15 bp, Homo sapiens
aggagagacagtccc

SEQ ID NO: 679297 - DNA, 15 bp, Homo sapiens
ggagagacagtccca

SEQ ID NO: 679298 - DNA, 15 bp, Homo sapiens
gagagacagtcccag

SEQ ID NO: 679299 - DNA, 15 bp, Homo sapiens
agagacagtcccagc

SEQ ID NO: 679300 - DNA, 15 bp, Homo sapiens
gagacagtcccagcc

SEQ ID NO: 679301 - DNA, 15 bp, Homo sapiens
agacagtcccagcca

SEQ ID NO: 679302 - DNA, 15 bp, Homo sapiens
gacagtcccagccac

SEQ ID NO: 679303 - DNA, 15 bp, Homo sapiens
acagtcccagccacc

SEQ ID NO: 679304 - DNA, 15 bp, Homo sapiens
cagtcccagccacca

SEQ ID NO: 679305 - DNA, 15 bp, Homo sapiens
agtcccagccaccaa

SEQ ID NO: 679306 - DNA, 15 bp, Homo sapiens
gtcccagccaccaaa

SEQ ID NO: 679307 - DNA, 15 bp, Homo sapiens
tcccagccaccaaat

SEQ ID NO: 679308 - DNA, 15 bp, Homo sapiens
cccagccaccaaatt

SEQ ID NO: 679309 - DNA, 15 bp, Homo sapiens
ccagccaccaaattt

SEQ ID NO: 679310 - DNA, 15 bp, Homo sapiens
cagccaccaaattta

SEQ ID NO: 679311 - DNA, 15 bp, Homo sapiens
agccaccaaatttac

SEQ ID NO: 679312 - DNA, 15 bp, Homo sapiens
gccaccaaatttaca

SEQ ID NO: 679313 - DNA, 15 bp, Homo sapiens
ccaccaaatttacag

SEQ ID NO: 679314 - DNA, 15 bp, Homo sapiens
caccaaatttacaga

SEQ ID NO: 679315 - DNA, 15 bp, Homo sapiens
accaaatttacagat

SEQ ID NO: 679316 - DNA, 15 bp, Homo sapiens
ccaaatttacagata

SEQ ID NO: 679317 - DNA, 15 bp, Homo sapiens
caaatttacagatag

SEQ ID NO: 679318 - DNA, 15 bp, Homo sapiens
aaatttacagatagt

SEQ ID NO: 679319 - DNA, 15 bp, Homo sapiens
aatttacagatagtt

SEQ ID NO: 679320 - DNA, 15 bp, Homo sapiens
atttacagatagttg

SEQ ID NO: 679321 - DNA, 15 bp, Homo sapiens
tttacagatagttgg

SEQ ID NO: 679322 - DNA, 15 bp, Homo sapiens
ttacagatagttggt

SEQ ID NO: 679323 - DNA, 15 bp, Homo sapiens
tacagatagttggtg

SEQ ID NO: 679324 - DNA, 15 bp, Homo sapiens
acagatagttggtga

SEQ ID NO: 679325 - DNA, 15 bp, Homo sapiens
cagatagttggtgag

SEQ ID NO: 679326 - DNA, 15 bp, Homo sapiens
agatagttggtgagg

SEQ ID NO: 679327 - DNA, 15 bp, Homo sapiens
gatagttggtgaggt

SEQ ID NO: 679328 - DNA, 15 bp, Homo sapiens
atagttggtgaggtg

SEQ ID NO: 679329 - DNA, 15 bp, Homo sapiens
tagttggtgaggtga

SEQ ID NO: 679330 - DNA, 15 bp, Homo sapiens
agttggtgaggtgat

SEQ ID NO: 679331 - DNA, 15 bp, Homo sapiens
gttggtgaggtgatc

SEQ ID NO: 679332 - DNA, 15 bp, Homo sapiens
ttggtgaggtgatct

SEQ ID NO: 679333 - DNA, 15 bp, Homo sapiens
tggtgaggtgatctt

SEQ ID NO: 679334 - DNA, 15 bp, Homo sapiens
ggtgaggtgatctta

SEQ ID NO: 679335 - DNA, 15 bp, Homo sapiens
gtgaggtgatcttaa

SEQ ID NO: 679336 - DNA, 15 bp, Homo sapiens
tgaggtgatcttaaa

SEQ ID NO: 679337 - DNA, 15 bp, Homo sapiens
gaggtgatcttaaac

SEQ ID NO: 679338 - DNA, 15 bp, Homo sapiens
aggtgatcttaaact

SEQ ID NO: 679339 - DNA, 15 bp, Homo sapiens
ggtgatcttaaactt

SEQ ID NO: 679340 - DNA, 15 bp, Homo sapiens
gtgatcttaaacttt

SEQ ID NO: 679341 - DNA, 15 bp, Homo sapiens
tgatcttaaactttc

SEQ ID NO: 679342 - DNA, 15 bp, Homo sapiens
gatcttaaactttcc

SEQ ID NO: 679343 - DNA, 15 bp, Homo sapiens
atcttaaactttcca

SEQ ID NO: 679344 - DNA, 15 bp, Homo sapiens
tcttaaactttccag

SEQ ID NO: 679345 - DNA, 15 bp, Homo sapiens
cttaaactttccagc

SEQ ID NO: 679346 - DNA, 15 bp, Homo sapiens
ttaaactttccagcc

SEQ ID NO: 679347 - DNA, 15 bp, Homo sapiens
taaactttccagcct

SEQ ID NO: 679348 - DNA, 15 bp, Homo sapiens
aaactttccagcctc

SEQ ID NO: 679349 - DNA, 15 bp, Homo sapiens
aactttccagcctca

SEQ ID NO: 679350 - DNA, 15 bp, Homo sapiens
actttccagcctcag

SEQ ID NO: 679351 - DNA, 15 bp, Homo sapiens
ctttccagcctcagt

SEQ ID NO: 679352 - DNA, 15 bp, Homo sapiens
tttccagcctcagtc

SEQ ID NO: 679353 - DNA, 15 bp, Homo sapiens
ttccagcctcagtcc

SEQ ID NO: 679354 - DNA, 15 bp, Homo sapiens
tccagcctcagtcct

SEQ ID NO: 679355 - DNA, 15 bp, Homo sapiens
ccagcctcagtcctg

SEQ ID NO: 679356 - DNA, 15 bp, Homo sapiens
cagcctcagtcctgg

SEQ ID NO: 679357 - DNA, 15 bp, Homo sapiens
agcctcagtcctggt

SEQ ID NO: 679358 - DNA, 15 bp, Homo sapiens
gcctcagtcctggtt

SEQ ID NO: 679359 - DNA, 15 bp, Homo sapiens
cctcagtcctggttg

SEQ ID NO: 679360 - DNA, 15 bp, Homo sapiens
ctcagtcctggttgc

SEQ ID NO: 679361 - DNA, 15 bp, Homo sapiens
tcagtcctggttgcc

SEQ ID NO: 679362 - DNA, 15 bp, Homo sapiens
cagtcctggttgcct

SEQ ID NO: 679363 - DNA, 15 bp, Homo sapiens
agtcctggttgcctg

SEQ ID NO: 679364 - DNA, 15 bp, Homo sapiens
gtcctggttgcctga

SEQ ID NO: 679365 - DNA, 15 bp, Homo sapiens
tcctggttgcctgat

SEQ ID NO: 679366 - DNA, 15 bp, Homo sapiens
cctggttgcctgatg

SEQ ID NO: 679367 - DNA, 15 bp, Homo sapiens
ctggttgcctgatga

SEQ ID NO: 679368 - DNA, 15 bp, Homo sapiens
tggttgcctgatgat

SEQ ID NO: 679369 - DNA, 15 bp, Homo sapiens
ggttgcctgatgatt

SEQ ID NO: 679370 - DNA, 15 bp, Homo sapiens
gttgcctgatgatta

SEQ ID NO: 679371 - DNA, 15 bp, Homo sapiens
ttgcctgatgattat

SEQ ID NO: 679372 - DNA, 15 bp, Homo sapiens
tgcctgatgattata

SEQ ID NO: 679373 - DNA, 15 bp, Homo sapiens
gcctgatgattatag

SEQ ID NO: 679374 - DNA, 15 bp, Homo sapiens
cctgatgattatagc

SEQ ID NO: 679375 - DNA, 15 bp, Homo sapiens
ctgatgattatagct

SEQ ID NO: 679376 - DNA, 15 bp, Homo sapiens
tgatgattatagctg

SEQ ID NO: 679377 - DNA, 15 bp, Homo sapiens
gatgattatagctgt

SEQ ID NO: 679378 - DNA, 15 bp, Homo sapiens
atgattatagctgta

SEQ ID NO: 679379 - DNA, 15 bp, Homo sapiens
tgattatagctgtac

SEQ ID NO: 679380 - DNA, 15 bp, Homo sapiens
gattatagctgtaca

SEQ ID NO: 679381 - DNA, 15 bp, Homo sapiens
attatagctgtacaa

SEQ ID NO: 679382 - DNA, 15 bp, Homo sapiens
ttatagctgtacaaa

SEQ ID NO: 679383 - DNA, 15 bp, Homo sapiens
tatagctgtacaaat

SEQ ID NO: 679384 - DNA, 15 bp, Homo sapiens
atagctgtacaaata

SEQ ID NO: 679385 - DNA, 15 bp, Homo sapiens
tagctgtacaaataa

SEQ ID NO: 679386 - DNA, 15 bp, Homo sapiens
agctgtacaaataaa

SEQ ID NO: 679387 - DNA, 15 bp, Homo sapiens
gctgtacaaataaac

SEQ ID NO: 679388 - DNA, 15 bp, Homo sapiens
ctgtacaaataaaca

SEQ ID NO: 679389 - DNA, 15 bp, Homo sapiens
tgtacaaataaacac

SEQ ID NO: 679390 - DNA, 15 bp, Homo sapiens
gtacaaataaacaca

SEQ ID NO: 679391 - DNA, 15 bp, Homo sapiens
tacaaataaacacag

SEQ ID NO: 679392 - DNA, 15 bp, Homo sapiens
acaaataaacacagg

SEQ ID NO: 679393 - DNA, 15 bp, Homo sapiens
caaataaacacaggc

SEQ ID NO: 679394 - DNA, 15 bp, Homo sapiens
aaataaacacaggca

SEQ ID NO: 679395 - DNA, 15 bp, Homo sapiens
aataaacacaggcaa

SEQ ID NO: 679396 - DNA, 15 bp, Homo sapiens
ataaacacaggcaag

SEQ ID NO: 679397 - DNA, 15 bp, Homo sapiens
taaacacaggcaaga

SEQ ID NO: 679398 - DNA, 15 bp, Homo sapiens
aaacacaggcaagat

SEQ ID NO: 679399 - DNA, 15 bp, Homo sapiens
aacacaggcaagatg

SEQ ID NO: 679400 - DNA, 15 bp, Homo sapiens
acacaggcaagatga

SEQ ID NO: 679401 - DNA, 15 bp, Homo sapiens
cacaggcaagatgag

SEQ ID NO: 679402 - DNA, 15 bp, Homo sapiens
acaggcaagatgagc

SEQ ID NO: 679403 - DNA, 15 bp, Homo sapiens
caggcaagatgagca

SEQ ID NO: 679404 - DNA, 15 bp, Homo sapiens
aggcaagatgagcag

SEQ ID NO: 679405 - DNA, 15 bp, Homo sapiens
ggcaagatgagcaga

SEQ ID NO: 679406 - DNA, 15 bp, Homo sapiens
gcaagatgagcagaa

SEQ ID NO: 679407 - DNA, 15 bp, Homo sapiens
caagatgagcagaag

SEQ ID NO: 679408 - DNA, 15 bp, Homo sapiens
aagatgagcagaaga

SEQ ID NO: 679409 - DNA, 15 bp, Homo sapiens
agatgagcagaagaa

SEQ ID NO: 679410 - DNA, 15 bp, Homo sapiens
gatgagcagaagaac

SEQ ID NO: 679411 - DNA, 15 bp, Homo sapiens
atgagcagaagaact

SEQ ID NO: 679412 - DNA, 15 bp, Homo sapiens
tgagcagaagaactg

SEQ ID NO: 679413 - DNA, 15 bp, Homo sapiens
gagcagaagaactgt

SEQ ID NO: 679414 - DNA, 15 bp, Homo sapiens
agcagaagaactgtc

SEQ ID NO: 679415 - DNA, 15 bp, Homo sapiens
gcagaagaactgtct

SEQ ID NO: 679416 - DNA, 15 bp, Homo sapiens
cagaagaactgtcta

SEQ ID NO: 679417 - DNA, 15 bp, Homo sapiens
agaagaactgtctag

SEQ ID NO: 679418 - DNA, 15 bp, Homo sapiens
gaagaactgtctagc

SEQ ID NO: 679419 - DNA, 15 bp, Homo sapiens
aagaactgtctagct

SEQ ID NO: 679420 - DNA, 15 bp, Homo sapiens
agaactgtctagctg

SEQ ID NO: 679421 - DNA, 15 bp, Homo sapiens
gaactgtctagctgt

SEQ ID NO: 679422 - DNA, 15 bp, Homo sapiens
aactgtctagctgtt

SEQ ID NO: 679423 - DNA, 15 bp, Homo sapiens
actgtctagctgtta

SEQ ID NO: 679424 - DNA, 15 bp, Homo sapiens
ctgtctagctgttat

SEQ ID NO: 679425 - DNA, 15 bp, Homo sapiens
tgtctagctgttatc

SEQ ID NO: 679426 - DNA, 15 bp, Homo sapiens
gtctagctgttatca

SEQ ID NO: 679427 - DNA, 15 bp, Homo sapiens
tctagctgttatcaa

SEQ ID NO: 679428 - DNA, 15 bp, Homo sapiens
ctagctgttatcaat

SEQ ID NO: 679429 - DNA, 15 bp, Homo sapiens
tagctgttatcaatc

SEQ ID NO: 679430 - DNA, 15 bp, Homo sapiens
agctgttatcaatca

SEQ ID NO: 679431 - DNA, 15 bp, Homo sapiens
gctgttatcaatcaa

SEQ ID NO: 679432 - DNA, 15 bp, Homo sapiens
ctgttatcaatcaac

SEQ ID NO: 679433 - DNA, 15 bp, Homo sapiens
tgttatcaatcaact

SEQ ID NO: 679434 - DNA, 15 bp, Homo sapiens
gttatcaatcaactg

SEQ ID NO: 679435 - DNA, 15 bp, Homo sapiens
ttatcaatcaactga

SEQ ID NO: 679436 - DNA, 15 bp, Homo sapiens
tatcaatcaactgac

SEQ ID NO: 679437 - DNA, 15 bp, Homo sapiens
atcaatcaactgaca

SEQ ID NO: 679438 - DNA, 15 bp, Homo sapiens
tcaatcaactgacaa

SEQ ID NO: 679439 - DNA, 15 bp, Homo sapiens
caatcaactgacaaa

SEQ ID NO: 679440 - DNA, 15 bp, Homo sapiens
aatcaactgacaaag

SEQ ID NO: 679441 - DNA, 15 bp, Homo sapiens
atcaactgacaaagt

SEQ ID NO: 679442 - DNA, 15 bp, Homo sapiens
tcaactgacaaagta

SEQ ID NO: 679443 - DNA, 15 bp, Homo sapiens
caactgacaaagtaa

SEQ ID NO: 679444 - DNA, 15 bp, Homo sapiens
aactgacaaagtaat

SEQ ID NO: 679445 - DNA, 15 bp, Homo sapiens
actgacaaagtaatg

SEQ ID NO: 679446 - DNA, 15 bp, Homo sapiens
ctgacaaagtaatga

SEQ ID NO: 679447 - DNA, 15 bp, Homo sapiens
tgacaaagtaatgag

SEQ ID NO: 679448 - DNA, 15 bp, Homo sapiens
gacaaagtaatgaga

SEQ ID NO: 679449 - DNA, 15 bp, Homo sapiens
acaaagtaatgagaa

SEQ ID NO: 679450 - DNA, 15 bp, Homo sapiens
caaagtaatgagaaa

SEQ ID NO: 679451 - DNA, 15 bp, Homo sapiens
aaagtaatgagaaac

SEQ ID NO: 679452 - DNA, 15 bp, Homo sapiens
aagtaatgagaaaca

SEQ ID NO: 679453 - DNA, 15 bp, Homo sapiens
agtaatgagaaacaa

SEQ ID NO: 679454 - DNA, 15 bp, Homo sapiens
gtaatgagaaacaat

SEQ ID NO: 679455 - DNA, 15 bp, Homo sapiens
taatgagaaacaata

SEQ ID NO: 679456 - DNA, 15 bp, Homo sapiens
aatgagaaacaataa

SEQ ID NO: 679457 - DNA, 15 bp, Homo sapiens
atgagaaacaataaa

SEQ ID NO: 679458 - DNA, 15 bp, Homo sapiens
tgagaaacaataaac

SEQ ID NO: 679459 - DNA, 15 bp, Homo sapiens
gagaaacaataaact

SEQ ID NO: 679460 - DNA, 15 bp, Homo sapiens
agaaacaataaactg

SEQ ID NO: 679461 - DNA, 15 bp, Homo sapiens
gaaacaataaactga

SEQ ID NO: 679462 - DNA, 15 bp, Homo sapiens
aaacaataaactgat

SEQ ID NO: 679463 - DNA, 15 bp, Homo sapiens
aacaataaactgatt

SEQ ID NO: 679464 - DNA, 15 bp, Homo sapiens
acaataaactgattc

SEQ ID NO: 679465 - DNA, 15 bp, Homo sapiens
caataaactgattca

SEQ ID NO: 679466 - DNA, 15 bp, Homo sapiens
aataaactgattcaa

SEQ ID NO: 679467 - DNA, 15 bp, Homo sapiens
ataaactgattcaag

SEQ ID NO: 679468 - DNA, 15 bp, Homo sapiens
taaactgattcaaga

SEQ ID NO: 679469 - DNA, 15 bp, Homo sapiens
aaactgattcaagac

SEQ ID NO: 679470 - DNA, 15 bp, Homo sapiens
aactgattcaagaca

SEQ ID NO: 679471 - DNA, 15 bp, Homo sapiens
actgattcaagacac

SEQ ID NO: 679472 - DNA, 15 bp, Homo sapiens
ctgattcaagacact

SEQ ID NO: 679473 - DNA, 15 bp, Homo sapiens
tgattcaagacacta

SEQ ID NO: 679474 - DNA, 15 bp, Homo sapiens
gattcaagacactaa

SEQ ID NO: 679475 - DNA, 15 bp, Homo sapiens
attcaagacactaag

SEQ ID NO: 679476 - DNA, 15 bp, Homo sapiens
ttcaagacactaagt

SEQ ID NO: 679477 - DNA, 15 bp, Homo sapiens
tcaagacactaagtt

SEQ ID NO: 679478 - DNA, 15 bp, Homo sapiens
caagacactaagttt

SEQ ID NO: 679479 - DNA, 15 bp, Homo sapiens
aagacactaagtttt

SEQ ID NO: 679480 - DNA, 15 bp, Homo sapiens
agacactaagttttg

SEQ ID NO: 679481 - DNA, 15 bp, Homo sapiens
gacactaagttttgg

SEQ ID NO: 679482 - DNA, 15 bp, Homo sapiens
acactaagttttgga

SEQ ID NO: 679483 - DNA, 15 bp, Homo sapiens
cactaagttttggat

SEQ ID NO: 679484 - DNA, 15 bp, Homo sapiens
actaagttttggatg

SEQ ID NO: 679485 - DNA, 15 bp, Homo sapiens
ctaagttttggatgg

SEQ ID NO: 679486 - DNA, 15 bp, Homo sapiens
taagttttggatggt

SEQ ID NO: 679487 - DNA, 15 bp, Homo sapiens
aagttttggatggtt

SEQ ID NO: 679488 - DNA, 15 bp, Homo sapiens
agttttggatggtta

SEQ ID NO: 679489 - DNA, 15 bp, Homo sapiens
gttttggatggttaa

SEQ ID NO: 679490 - DNA, 15 bp, Homo sapiens
ttttggatggttaat

SEQ ID NO: 679491 - DNA, 15 bp, Homo sapiens
tttggatggttaatt

SEQ ID NO: 679492 - DNA, 15 bp, Homo sapiens
ttggatggttaatta

SEQ ID NO: 679493 - DNA, 15 bp, Homo sapiens
tggatggttaattac

SEQ ID NO: 679494 - DNA, 15 bp, Homo sapiens
ggatggttaattaca

SEQ ID NO: 679495 - DNA, 15 bp, Homo sapiens
gatggttaattacac

SEQ ID NO: 679496 - DNA, 15 bp, Homo sapiens
atggttaattacaca

SEQ ID NO: 679497 - DNA, 15 bp, Homo sapiens
tggttaattacacag

SEQ ID NO: 679498 - DNA, 15 bp, Homo sapiens
ggttaattacacagc

SEQ ID NO: 679499 - DNA, 15 bp, Homo sapiens
gttaattacacagca

SEQ ID NO: 679500 - DNA, 15 bp, Homo sapiens
ttaattacacagcaa

SEQ ID NO: 679501 - DNA, 15 bp, Homo sapiens
taattacacagcaat

SEQ ID NO: 679502 - DNA, 15 bp, Homo sapiens
aattacacagcaata

SEQ ID NO: 679503 - DNA, 15 bp, Homo sapiens
attacacagcaatat

SEQ ID NO: 679504 - DNA, 15 bp, Homo sapiens
ttacacagcaatata

SEQ ID NO: 679505 - DNA, 15 bp, Homo sapiens
tacacagcaatatat

SEQ ID NO: 679506 - DNA, 15 bp, Homo sapiens
acacagcaatatata

SEQ ID NO: 679507 - DNA, 15 bp, Homo sapiens
cacagcaatatataa

SEQ ID NO: 679508 - DNA, 15 bp, Homo sapiens
acagcaatatataac

SEQ ID NO: 679509 - DNA, 15 bp, Homo sapiens
cagcaatatataact

SEQ ID NO: 679510 - DNA, 15 bp, Homo sapiens
agcaatatataactg

SEQ ID NO: 679511 - DNA, 15 bp, Homo sapiens
gcaatatataactga

SEQ ID NO: 679512 - DNA, 15 bp, Homo sapiens
caatatataactgag

SEQ ID NO: 679513 - DNA, 15 bp, Homo sapiens
aatatataactgagg

SEQ ID NO: 679514 - DNA, 15 bp, Homo sapiens
atatataactgaggt

SEQ ID NO: 679515 - DNA, 15 bp, Homo sapiens
tatataactgaggtc

SEQ ID NO: 679516 - DNA, 15 bp, Homo sapiens
atataactgaggtca

SEQ ID NO: 679517 - DNA, 15 bp, Homo sapiens
tataactgaggtcaa

SEQ ID NO: 679518 - DNA, 15 bp, Homo sapiens
ataactgaggtcaaa

SEQ ID NO: 679519 - DNA, 15 bp, Homo sapiens
taactgaggtcaaaa

SEQ ID NO: 679520 - DNA, 15 bp, Homo sapiens
aactgaggtcaaaaa

SEQ ID NO: 679521 - DNA, 15 bp, Homo sapiens
actgaggtcaaaaag

SEQ ID NO: 679522 - DNA, 15 bp, Homo sapiens
ctgaggtcaaaaagc

SEQ ID NO: 679523 - DNA, 15 bp, Homo sapiens
tgaggtcaaaaagca

SEQ ID NO: 679524 - DNA, 15 bp, Homo sapiens
gaggtcaaaaagcac

SEQ ID NO: 679525 - DNA, 15 bp, Homo sapiens
aggtcaaaaagcacc

SEQ ID NO: 679526 - DNA, 15 bp, Homo sapiens
ggtcaaaaagcacca

SEQ ID NO: 679527 - DNA, 15 bp, Homo sapiens
gtcaaaaagcaccag

SEQ ID NO: 679528 - DNA, 15 bp, Homo sapiens
tcaaaaagcaccaga

SEQ ID NO: 679529 - DNA, 15 bp, Homo sapiens
caaaaagcaccagaa

SEQ ID NO: 679530 - DNA, 15 bp, Homo sapiens
aaaaagcaccagaaa

SEQ ID NO: 679531 - DNA, 15 bp, Homo sapiens
aaaagcaccagaaaa

SEQ ID NO: 679532 - DNA, 15 bp, Homo sapiens
aaagcaccagaaaag

SEQ ID NO: 679533 - DNA, 15 bp, Homo sapiens
aagcaccagaaaagc

SEQ ID NO: 679534 - DNA, 15 bp, Homo sapiens
agcaccagaaaagca

SEQ ID NO: 679535 - DNA, 15 bp, Homo sapiens
gcaccagaaaagcaa

SEQ ID NO: 679536 - DNA, 15 bp, Homo sapiens
caccagaaaagcaaa

SEQ ID NO: 679537 - DNA, 15 bp, Homo sapiens
accagaaaagcaaac

SEQ ID NO: 679538 - DNA, 15 bp, Homo sapiens
ccagaaaagcaaaca

SEQ ID NO: 679539 - DNA, 15 bp, Homo sapiens
cagaaaagcaaacag

SEQ ID NO: 679540 - DNA, 15 bp, Homo sapiens
agaaaagcaaacagg

SEQ ID NO: 679541 - DNA, 15 bp, Homo sapiens
gaaaagcaaacagga

SEQ ID NO: 679542 - DNA, 15 bp, Homo sapiens
aaaagcaaacaggaa

SEQ ID NO: 679543 - DNA, 15 bp, Homo sapiens
aaagcaaacaggaat

SEQ ID NO: 679544 - DNA, 15 bp, Homo sapiens
aagcaaacaggaatg

SEQ ID NO: 679545 - DNA, 15 bp, Homo sapiens
agcaaacaggaatga

SEQ ID NO: 679546 - DNA, 15 bp, Homo sapiens
gcaaacaggaatgaa

SEQ ID NO: 679547 - DNA, 15 bp, Homo sapiens
caaacaggaatgaat

SEQ ID NO: 679548 - DNA, 15 bp, Homo sapiens
aaacaggaatgaatc

SEQ ID NO: 679549 - DNA, 15 bp, Homo sapiens
aacaggaatgaatca

SEQ ID NO: 679550 - DNA, 15 bp, Homo sapiens
acaggaatgaatcat

SEQ ID NO: 679551 - DNA, 15 bp, Homo sapiens
caggaatgaatcatt

SEQ ID NO: 679552 - DNA, 15 bp, Homo sapiens
aggaatgaatcattt

SEQ ID NO: 679553 - DNA, 15 bp, Homo sapiens
ggaatgaatcattta

SEQ ID NO: 679554 - DNA, 15 bp, Homo sapiens
gaatgaatcatttat

SEQ ID NO: 679555 - DNA, 15 bp, Homo sapiens
aatgaatcatttatt

SEQ ID NO: 679556 - DNA, 15 bp, Homo sapiens
atgaatcatttattc

SEQ ID NO: 679557 - DNA, 15 bp, Homo sapiens
tgaatcatttattca

SEQ ID NO: 679558 - DNA, 15 bp, Homo sapiens
gaatcatttattcaa

SEQ ID NO: 679559 - DNA, 15 bp, Homo sapiens
aatcatttattcaaa

SEQ ID NO: 679560 - DNA, 15 bp, Homo sapiens
atcatttattcaaac

SEQ ID NO: 679561 - DNA, 15 bp, Homo sapiens
tcatttattcaaaca

SEQ ID NO: 679562 - DNA, 15 bp, Homo sapiens
catttattcaaacaa

SEQ ID NO: 679563 - DNA, 15 bp, Homo sapiens
atttattcaaacaaa

SEQ ID NO: 679564 - DNA, 15 bp, Homo sapiens
tttattcaaacaaaa

SEQ ID NO: 679565 - DNA, 15 bp, Homo sapiens
ttattcaaacaaaac

SEQ ID NO: 679566 - DNA, 15 bp, Homo sapiens
tattcaaacaaaaca

SEQ ID NO: 679567 - DNA, 15 bp, Homo sapiens
attcaaacaaaacaa

SEQ ID NO: 679568 - DNA, 15 bp, Homo sapiens
ttcaaacaaaacaaa

SEQ ID NO: 679569 - DNA, 15 bp, Homo sapiens
tcaaacaaaacaaaa

SEQ ID NO: 679570 - DNA, 15 bp, Homo sapiens
caaacaaaacaaaaa

SEQ ID NO: 679571 - DNA, 15 bp, Homo sapiens
aaacaaaacaaaaag

SEQ ID NO: 679572 - DNA, 15 bp, Homo sapiens
aacaaaacaaaaagc

SEQ ID NO: 679573 - DNA, 15 bp, Homo sapiens
acaaaacaaaaagct

SEQ ID NO: 679574 - DNA, 15 bp, Homo sapiens
caaaacaaaaagcta

SEQ ID NO: 679575 - DNA, 15 bp, Homo sapiens
aaaacaaaaagctat

SEQ ID NO: 679576 - DNA, 15 bp, Homo sapiens
aaacaaaaagctata

SEQ ID NO: 679577 - DNA, 15 bp, Homo sapiens
aacaaaaagctatat

SEQ ID NO: 679578 - DNA, 15 bp, Homo sapiens
acaaaaagctatata

SEQ ID NO: 679579 - DNA, 15 bp, Homo sapiens
caaaaagctatataa

SEQ ID NO: 679580 - DNA, 15 bp, Homo sapiens
aaaaagctatataat

SEQ ID NO: 679581 - DNA, 15 bp, Homo sapiens
aaaagctatataatt

SEQ ID NO: 679582 - DNA, 15 bp, Homo sapiens
aaagctatataattt

SEQ ID NO: 679583 - DNA, 15 bp, Homo sapiens
aagctatataatttt

SEQ ID NO: 679584 - DNA, 15 bp, Homo sapiens
agctatataattttg

SEQ ID NO: 679585 - DNA, 15 bp, Homo sapiens
gctatataattttga

SEQ ID NO: 679586 - DNA, 15 bp, Homo sapiens
ctatataattttgag

SEQ ID NO: 679587 - DNA, 15 bp, Homo sapiens
tatataattttgaga

SEQ ID NO: 679588 - DNA, 15 bp, Homo sapiens
atataattttgagaa

SEQ ID NO: 679589 - DNA, 15 bp, Homo sapiens
tataattttgagaat

SEQ ID NO: 679590 - DNA, 15 bp, Homo sapiens
ataattttgagaatt

SEQ ID NO: 679591 - DNA, 15 bp, Homo sapiens
taattttgagaattt

SEQ ID NO: 679592 - DNA, 15 bp, Homo sapiens
aattttgagaatttc

SEQ ID NO: 679593 - DNA, 15 bp, Homo sapiens
attttgagaatttca

SEQ ID NO: 679594 - DNA, 15 bp, Homo sapiens
ttttgagaatttcat

SEQ ID NO: 679595 - DNA, 15 bp, Homo sapiens
tttgagaatttcatt

SEQ ID NO: 679596 - DNA, 15 bp, Homo sapiens
ttgagaatttcattt

SEQ ID NO: 679597 - DNA, 15 bp, Homo sapiens
tgagaatttcatttt

SEQ ID NO: 679598 - DNA, 15 bp, Homo sapiens
gagaatttcattttt

SEQ ID NO: 679599 - DNA, 15 bp, Homo sapiens
agaatttcatttttt

SEQ ID NO: 679600 - DNA, 15 bp, Homo sapiens
gaatttcattttttg

SEQ ID NO: 679601 - DNA, 15 bp, Homo sapiens
aatttcattttttga

SEQ ID NO: 679602 - DNA, 15 bp, Homo sapiens
atttcattttttgag

SEQ ID NO: 679603 - DNA, 15 bp, Homo sapiens
tttcattttttgaga

SEQ ID NO: 679604 - DNA, 15 bp, Homo sapiens
ttcattttttgagag

SEQ ID NO: 679605 - DNA, 15 bp, Homo sapiens
tcattttttgagagt

SEQ ID NO: 679606 - DNA, 15 bp, Homo sapiens
cattttttgagagta

SEQ ID NO: 679607 - DNA, 15 bp, Homo sapiens
attttttgagagtaa

SEQ ID NO: 679608 - DNA, 15 bp, Homo sapiens
ttttttgagagtaaa

SEQ ID NO: 679609 - DNA, 15 bp, Homo sapiens
tttttgagagtaaaa

SEQ ID NO: 679610 - DNA, 15 bp, Homo sapiens
ttttgagagtaaaaa

SEQ ID NO: 679611 - DNA, 15 bp, Homo sapiens
tttgagagtaaaaac

SEQ ID NO: 679612 - DNA, 15 bp, Homo sapiens
ttgagagtaaaaact

SEQ ID NO: 679613 - DNA, 15 bp, Homo sapiens
tgagagtaaaaacta

SEQ ID NO: 679614 - DNA, 15 bp, Homo sapiens
gagagtaaaaactac

SEQ ID NO: 679615 - DNA, 15 bp, Homo sapiens
agagtaaaaactaca

SEQ ID NO: 679616 - DNA, 15 bp, Homo sapiens
gagtaaaaactacaa

SEQ ID NO: 679617 - DNA, 15 bp, Homo sapiens
agtaaaaactacaaa

SEQ ID NO: 679618 - DNA, 15 bp, Homo sapiens
gtaaaaactacaaaa

SEQ ID NO: 679619 - DNA, 15 bp, Homo sapiens
taaaaactacaaaat

SEQ ID NO: 679620 - DNA, 15 bp, Homo sapiens
aaaaactacaaaatt

SEQ ID NO: 679621 - DNA, 15 bp, Homo sapiens
aaaactacaaaattg

SEQ ID NO: 679622 - DNA, 15 bp, Homo sapiens
aaactacaaaattga

SEQ ID NO: 679623 - DNA, 15 bp, Homo sapiens
aactacaaaattgaa

SEQ ID NO: 679624 - DNA, 15 bp, Homo sapiens
actacaaaattgaac

SEQ ID NO: 679625 - DNA, 15 bp, Homo sapiens
ctacaaaattgaaca

SEQ ID NO: 679626 - DNA, 15 bp, Homo sapiens
tacaaaattgaacag

SEQ ID NO: 679627 - DNA, 15 bp, Homo sapiens
acaaaattgaacagc

SEQ ID NO: 679628 - DNA, 15 bp, Homo sapiens
caaaattgaacagcg

SEQ ID NO: 679629 - DNA, 15 bp, Homo sapiens
aaaattgaacagcga

SEQ ID NO: 679630 - DNA, 15 bp, Homo sapiens
aaattgaacagcgag

SEQ ID NO: 679631 - DNA, 15 bp, Homo sapiens
aattgaacagcgagg

SEQ ID NO: 679632 - DNA, 15 bp, Homo sapiens
attgaacagcgagga

SEQ ID NO: 679633 - DNA, 15 bp, Homo sapiens
ttgaacagcgaggag

SEQ ID NO: 679634 - DNA, 15 bp, Homo sapiens
tgaacagcgaggagg

SEQ ID NO: 679635 - DNA, 15 bp, Homo sapiens
gaacagcgaggagga

SEQ ID NO: 679636 - DNA, 15 bp, Homo sapiens
aacagcgaggaggaa

SEQ ID NO: 679637 - DNA, 15 bp, Homo sapiens
acagcgaggaggaaa

SEQ ID NO: 679638 - DNA, 15 bp, Homo sapiens
cagcgaggaggaaaa

SEQ ID NO: 679639 - DNA, 15 bp, Homo sapiens
agcgaggaggaaaaa

SEQ ID NO: 679640 - DNA, 15 bp, Homo sapiens
gcgaggaggaaaaaa

SEQ ID NO: 679641 - DNA, 15 bp, Homo sapiens
cgaggaggaaaaaat

SEQ ID NO: 679642 - DNA, 15 bp, Homo sapiens
gaggaggaaaaaatt

SEQ ID NO: 679643 - DNA, 15 bp, Homo sapiens
aggaggaaaaaattc

SEQ ID NO: 679644 - DNA, 15 bp, Homo sapiens
ggaggaaaaaattct

SEQ ID NO: 679645 - DNA, 15 bp, Homo sapiens
gaggaaaaaattctg

SEQ ID NO: 679646 - DNA, 15 bp, Homo sapiens
aggaaaaaattctga

SEQ ID NO: 679647 - DNA, 15 bp, Homo sapiens
ggaaaaaattctgac

SEQ ID NO: 679648 - DNA, 15 bp, Homo sapiens
gaaaaaattctgaca

SEQ ID NO: 679649 - DNA, 15 bp, Homo sapiens
aaaaaattctgacaa

SEQ ID NO: 679650 - DNA, 15 bp, Homo sapiens
aaaaattctgacaat

SEQ ID NO: 679651 - DNA, 15 bp, Homo sapiens
aaaattctgacaatg

SEQ ID NO: 679652 - DNA, 15 bp, Homo sapiens
aaattctgacaatgt

SEQ ID NO: 679653 - DNA, 15 bp, Homo sapiens
aattctgacaatgtg

SEQ ID NO: 679654 - DNA, 15 bp, Homo sapiens
attctgacaatgtga

SEQ ID NO: 679655 - DNA, 15 bp, Homo sapiens
ttctgacaatgtgat

SEQ ID NO: 679656 - DNA, 15 bp, Homo sapiens
tctgacaatgtgatt

SEQ ID NO: 679657 - DNA, 15 bp, Homo sapiens
ctgacaatgtgattc

SEQ ID NO: 679658 - DNA, 15 bp, Homo sapiens
tgacaatgtgattca

SEQ ID NO: 679659 - DNA, 15 bp, Homo sapiens
gacaatgtgattcaa

SEQ ID NO: 679660 - DNA, 15 bp, Homo sapiens
acaatgtgattcaac

SEQ ID NO: 679661 - DNA, 15 bp, Homo sapiens
caatgtgattcaaca

SEQ ID NO: 679662 - DNA, 15 bp, Homo sapiens
aatgtgattcaacat

SEQ ID NO: 679663 - DNA, 15 bp, Homo sapiens
atgtgattcaacatt

SEQ ID NO: 679664 - DNA, 15 bp, Homo sapiens
tgtgattcaacatta

SEQ ID NO: 679665 - DNA, 15 bp, Homo sapiens
gtgattcaacattaa

SEQ ID NO: 679666 - DNA, 15 bp, Homo sapiens
tgattcaacattaat

SEQ ID NO: 679667 - DNA, 15 bp, Homo sapiens
gattcaacattaatc

SEQ ID NO: 679668 - DNA, 15 bp, Homo sapiens
attcaacattaatcc

SEQ ID NO: 679669 - DNA, 15 bp, Homo sapiens
ttcaacattaatcct

SEQ ID NO: 679670 - DNA, 15 bp, Homo sapiens
tcaacattaatcctt

SEQ ID NO: 679671 - DNA, 15 bp, Homo sapiens
caacattaatccttt

SEQ ID NO: 679672 - DNA, 15 bp, Homo sapiens
aacattaatccttta

SEQ ID NO: 679673 - DNA, 15 bp, Homo sapiens
acattaatcctttaa

SEQ ID NO: 679674 - DNA, 15 bp, Homo sapiens
cattaatcctttaaa

SEQ ID NO: 679675 - DNA, 15 bp, Homo sapiens
attaatcctttaaaa

SEQ ID NO: 679676 - DNA, 15 bp, Homo sapiens
ttaatcctttaaaag

SEQ ID NO: 679677 - DNA, 15 bp, Homo sapiens
taatcctttaaaagt

SEQ ID NO: 679678 - DNA, 15 bp, Homo sapiens
aatcctttaaaagtc

SEQ ID NO: 679679 - DNA, 15 bp, Homo sapiens
atcctttaaaagtca

SEQ ID NO: 679680 - DNA, 15 bp, Homo sapiens
tcctttaaaagtcac

SEQ ID NO: 679681 - DNA, 15 bp, Homo sapiens
cctttaaaagtcact

SEQ ID NO: 679682 - DNA, 15 bp, Homo sapiens
ctttaaaagtcactg

SEQ ID NO: 679683 - DNA, 15 bp, Homo sapiens
tttaaaagtcactgt

SEQ ID NO: 679684 - DNA, 15 bp, Homo sapiens
ttaaaagtcactgta

SEQ ID NO: 679685 - DNA, 15 bp, Homo sapiens
taaaagtcactgtaa

SEQ ID NO: 679686 - DNA, 15 bp, Homo sapiens
aaaagtcactgtaac

SEQ ID NO: 679687 - DNA, 15 bp, Homo sapiens
aaagtcactgtaaca

SEQ ID NO: 679688 - DNA, 15 bp, Homo sapiens
aagtcactgtaacaa

SEQ ID NO: 679689 - DNA, 15 bp, Homo sapiens
agtcactgtaacaaa

SEQ ID NO: 679690 - DNA, 15 bp, Homo sapiens
gtcactgtaacaaat

SEQ ID NO: 679691 - DNA, 15 bp, Homo sapiens
tcactgtaacaaatt

SEQ ID NO: 679692 - DNA, 15 bp, Homo sapiens
cactgtaacaaattt

SEQ ID NO: 679693 - DNA, 15 bp, Homo sapiens
actgtaacaaattta

SEQ ID NO: 679694 - DNA, 15 bp, Homo sapiens
ctgtaacaaatttaa

SEQ ID NO: 679695 - DNA, 15 bp, Homo sapiens
tgtaacaaatttaaa

SEQ ID NO: 679696 - DNA, 15 bp, Homo sapiens
gtaacaaatttaaac

SEQ ID NO: 679697 - DNA, 15 bp, Homo sapiens
taacaaatttaaaca

SEQ ID NO: 679698 - DNA, 15 bp, Homo sapiens
aacaaatttaaacat

SEQ ID NO: 679699 - DNA, 15 bp, Homo sapiens
acaaatttaaacata

SEQ ID NO: 679700 - DNA, 15 bp, Homo sapiens
caaatttaaacataa

SEQ ID NO: 679701 - DNA, 15 bp, Homo sapiens
aaatttaaacataag

SEQ ID NO: 679702 - DNA, 15 bp, Homo sapiens
aatttaaacataagt

SEQ ID NO: 679703 - DNA, 15 bp, Homo sapiens
atttaaacataagtg

SEQ ID NO: 679704 - DNA, 15 bp, Homo sapiens
tttaaacataagtgc

SEQ ID NO: 679705 - DNA, 15 bp, Homo sapiens
ttaaacataagtgct

SEQ ID NO: 679706 - DNA, 15 bp, Homo sapiens
taaacataagtgctt

SEQ ID NO: 679707 - DNA, 15 bp, Homo sapiens
aaacataagtgcttt

SEQ ID NO: 679708 - DNA, 15 bp, Homo sapiens
aacataagtgcttta

SEQ ID NO: 679709 - DNA, 15 bp, Homo sapiens
acataagtgctttat

SEQ ID NO: 679710 - DNA, 15 bp, Homo sapiens
cataagtgctttatt

SEQ ID NO: 679711 - DNA, 15 bp, Homo sapiens
ataagtgctttattt

SEQ ID NO: 679712 - DNA, 15 bp, Homo sapiens
taagtgctttatttt

SEQ ID NO: 679713 - DNA, 15 bp, Homo sapiens
aagtgctttattttt

SEQ ID NO: 679714 - DNA, 15 bp, Homo sapiens
agtgctttatttttc

SEQ ID NO: 679715 - DNA, 15 bp, Homo sapiens
gtgctttatttttct

SEQ ID NO: 679716 - DNA, 15 bp, Homo sapiens
tgctttatttttcta

SEQ ID NO: 679717 - DNA, 15 bp, Homo sapiens
gctttatttttctat

SEQ ID NO: 679718 - DNA, 15 bp, Homo sapiens
ctttatttttctatt

SEQ ID NO: 679719 - DNA, 15 bp, Homo sapiens
tttatttttctattc

SEQ ID NO: 679720 - DNA, 15 bp, Homo sapiens
ttatttttctattca

SEQ ID NO: 679721 - DNA, 15 bp, Homo sapiens
tatttttctattcac

SEQ ID NO: 679722 - DNA, 15 bp, Homo sapiens
atttttctattcaca

SEQ ID NO: 679723 - DNA, 15 bp, Homo sapiens
tttttctattcacaa

SEQ ID NO: 679724 - DNA, 15 bp, Homo sapiens
ttttctattcacaaa

SEQ ID NO: 679725 - DNA, 15 bp, Homo sapiens
tttctattcacaaaa

SEQ ID NO: 679726 - DNA, 15 bp, Homo sapiens
ttctattcacaaaac

SEQ ID NO: 679727 - DNA, 15 bp, Homo sapiens
tctattcacaaaact

SEQ ID NO: 679728 - DNA, 15 bp, Homo sapiens
ctattcacaaaacta

SEQ ID NO: 679729 - DNA, 15 bp, Homo sapiens
tattcacaaaactaa

SEQ ID NO: 679730 - DNA, 15 bp, Homo sapiens
attcacaaaactaat

SEQ ID NO: 679731 - DNA, 15 bp, Homo sapiens
ttcacaaaactaatt

SEQ ID NO: 679732 - DNA, 15 bp, Homo sapiens
tcacaaaactaatta

SEQ ID NO: 679733 - DNA, 15 bp, Homo sapiens
cacaaaactaattat

SEQ ID NO: 679734 - DNA, 15 bp, Homo sapiens
acaaaactaattata

SEQ ID NO: 679735 - DNA, 15 bp, Homo sapiens
caaaactaattataa

SEQ ID NO: 679736 - DNA, 15 bp, Homo sapiens
aaaactaattataat

SEQ ID NO: 679737 - DNA, 15 bp, Homo sapiens
aaactaattataata

SEQ ID NO: 679738 - DNA, 15 bp, Homo sapiens
aactaattataatac

SEQ ID NO: 679739 - DNA, 15 bp, Homo sapiens
actaattataataca

SEQ ID NO: 679740 - DNA, 15 bp, Homo sapiens
ctaattataatacac

SEQ ID NO: 679741 - DNA, 15 bp, Homo sapiens
taattataatacacc

SEQ ID NO: 679742 - DNA, 15 bp, Homo sapiens
aattataatacacca

SEQ ID NO: 679743 - DNA, 15 bp, Homo sapiens
attataatacaccac

SEQ ID NO: 679744 - DNA, 15 bp, Homo sapiens
ttataatacaccaca

SEQ ID NO: 679745 - DNA, 15 bp, Homo sapiens
tataatacaccacaa

SEQ ID NO: 679746 - DNA, 15 bp, Homo sapiens
ataatacaccacaat

SEQ ID NO: 679747 - DNA, 15 bp, Homo sapiens
taatacaccacaatg

SEQ ID NO: 679748 - DNA, 15 bp, Homo sapiens
aatacaccacaatga

SEQ ID NO: 679749 - DNA, 15 bp, Homo sapiens
atacaccacaatgaa

SEQ ID NO: 679750 - DNA, 15 bp, Homo sapiens
tacaccacaatgaat

SEQ ID NO: 679751 - DNA, 15 bp, Homo sapiens
acaccacaatgaatt

SEQ ID NO: 679752 - DNA, 15 bp, Homo sapiens
caccacaatgaattt

SEQ ID NO: 679753 - DNA, 15 bp, Homo sapiens
accacaatgaatttt

SEQ ID NO: 679754 - DNA, 15 bp, Homo sapiens
ccacaatgaattttg

SEQ ID NO: 679755 - DNA, 15 bp, Homo sapiens
cacaatgaattttgt

SEQ ID NO: 679756 - DNA, 15 bp, Homo sapiens
acaatgaattttgtt

SEQ ID NO: 679757 - DNA, 15 bp, Homo sapiens
caatgaattttgtta

SEQ ID NO: 679758 - DNA, 15 bp, Homo sapiens
aatgaattttgttac

SEQ ID NO: 679759 - DNA, 15 bp, Homo sapiens
atgaattttgttacg

SEQ ID NO: 679760 - DNA, 15 bp, Homo sapiens
tgaattttgttacgg

SEQ ID NO: 679761 - DNA, 15 bp, Homo sapiens
gaattttgttacggt

SEQ ID NO: 679762 - DNA, 15 bp, Homo sapiens
aattttgttacggtt

SEQ ID NO: 679763 - DNA, 15 bp, Homo sapiens
attttgttacggttt

SEQ ID NO: 679764 - DNA, 15 bp, Homo sapiens
ttttgttacggtttt

SEQ ID NO: 679765 - DNA, 15 bp, Homo sapiens
tttgttacggtttta

SEQ ID NO: 679766 - DNA, 15 bp, Homo sapiens
ttgttacggttttat

SEQ ID NO: 679767 - DNA, 15 bp, Homo sapiens
tgttacggttttatg

SEQ ID NO: 679768 - DNA, 15 bp, Homo sapiens
gttacggttttatgt

SEQ ID NO: 679769 - DNA, 15 bp, Homo sapiens
ttacggttttatgtg

SEQ ID NO: 679770 - DNA, 15 bp, Homo sapiens
tacggttttatgtgt

SEQ ID NO: 679771 - DNA, 15 bp, Homo sapiens
acggttttatgtgtg

SEQ ID NO: 679772 - DNA, 15 bp, Homo sapiens
cggttttatgtgtgt

SEQ ID NO: 679773 - DNA, 15 bp, Homo sapiens
ggttttatgtgtgta

SEQ ID NO: 679774 - DNA, 15 bp, Homo sapiens
gttttatgtgtgtaa

SEQ ID NO: 679775 - DNA, 15 bp, Homo sapiens
ttttatgtgtgtaat

SEQ ID NO: 679776 - DNA, 15 bp, Homo sapiens
tttatgtgtgtaata

SEQ ID NO: 679777 - DNA, 15 bp, Homo sapiens
ttatgtgtgtaatag

SEQ ID NO: 679778 - DNA, 15 bp, Homo sapiens
tatgtgtgtaataga

SEQ ID NO: 679779 - DNA, 15 bp, Homo sapiens
atgtgtgtaatagag

SEQ ID NO: 679780 - DNA, 15 bp, Homo sapiens
tgtgtgtaatagagg

SEQ ID NO: 679781 - DNA, 15 bp, Homo sapiens
gtgtgtaatagaggg

SEQ ID NO: 679782 - DNA, 15 bp, Homo sapiens
tgtgtaatagagggt

SEQ ID NO: 679783 - DNA, 15 bp, Homo sapiens
gtgtaatagagggta

SEQ ID NO: 679784 - DNA, 15 bp, Homo sapiens
tgtaatagagggtat

SEQ ID NO: 679785 - DNA, 15 bp, Homo sapiens
gtaatagagggtata

SEQ ID NO: 679786 - DNA, 15 bp, Homo sapiens
taatagagggtatac

SEQ ID NO: 679787 - DNA, 15 bp, Homo sapiens
aatagagggtataca

SEQ ID NO: 679788 - DNA, 15 bp, Homo sapiens
atagagggtatacat

SEQ ID NO: 679789 - DNA, 15 bp, Homo sapiens
tagagggtatacatc

SEQ ID NO: 679790 - DNA, 15 bp, Homo sapiens
agagggtatacatct

SEQ ID NO: 679791 - DNA, 15 bp, Homo sapiens
gagggtatacatctc

SEQ ID NO: 679792 - DNA, 15 bp, Homo sapiens
agggtatacatctcc

SEQ ID NO: 679793 - DNA, 15 bp, Homo sapiens
gggtatacatctcca

SEQ ID NO: 679794 - DNA, 15 bp, Homo sapiens
ggtatacatctccat

SEQ ID NO: 679795 - DNA, 15 bp, Homo sapiens
gtatacatctccata

SEQ ID NO: 679796 - DNA, 15 bp, Homo sapiens
tatacatctccatac

SEQ ID NO: 679797 - DNA, 15 bp, Homo sapiens
atacatctccatact

SEQ ID NO: 679798 - DNA, 15 bp, Homo sapiens
tacatctccatacta

SEQ ID NO: 679799 - DNA, 15 bp, Homo sapiens
acatctccatactac

SEQ ID NO: 679800 - DNA, 15 bp, Homo sapiens
catctccatactact

SEQ ID NO: 679801 - DNA, 15 bp, Homo sapiens
atctccatactacta

SEQ ID NO: 679802 - DNA, 15 bp, Homo sapiens
tctccatactactag

SEQ ID NO: 679803 - DNA, 15 bp, Homo sapiens
ctccatactactagc

SEQ ID NO: 679804 - DNA, 15 bp, Homo sapiens
tccatactactagct

SEQ ID NO: 679805 - DNA, 15 bp, Homo sapiens
ccatactactagcta

SEQ ID NO: 679806 - DNA, 15 bp, Homo sapiens
catactactagctaa

SEQ ID NO: 679807 - DNA, 15 bp, Homo sapiens
atactactagctaat

SEQ ID NO: 679808 - DNA, 15 bp, Homo sapiens
tactactagctaatt

SEQ ID NO: 679809 - DNA, 15 bp, Homo sapiens
actactagctaattt

SEQ ID NO: 679810 - DNA, 15 bp, Homo sapiens
ctactagctaatttg

SEQ ID NO: 679811 - DNA, 15 bp, Homo sapiens
tactagctaatttgt

SEQ ID NO: 679812 - DNA, 15 bp, Homo sapiens
actagctaatttgtc

SEQ ID NO: 679813 - DNA, 15 bp, Homo sapiens
ctagctaatttgtct

SEQ ID NO: 679814 - DNA, 15 bp, Homo sapiens
tagctaatttgtctg

SEQ ID NO: 679815 - DNA, 15 bp, Homo sapiens
agctaatttgtctgt

SEQ ID NO: 679816 - DNA, 15 bp, Homo sapiens
gctaatttgtctgtt

SEQ ID NO: 679817 - DNA, 15 bp, Homo sapiens
ctaatttgtctgttt

SEQ ID NO: 679818 - DNA, 15 bp, Homo sapiens
taatttgtctgtttg

SEQ ID NO: 679819 - DNA, 15 bp, Homo sapiens
aatttgtctgtttgt

SEQ ID NO: 679820 - DNA, 15 bp, Homo sapiens
atttgtctgtttgtt

SEQ ID NO: 679821 - DNA, 15 bp, Homo sapiens
tttgtctgtttgttc

SEQ ID NO: 679822 - DNA, 15 bp, Homo sapiens
ttgtctgtttgttca

SEQ ID NO: 679823 - DNA, 15 bp, Homo sapiens
tgtctgtttgttcaa

SEQ ID NO: 679824 - DNA, 15 bp, Homo sapiens
gtctgtttgttcaaa

SEQ ID NO: 679825 - DNA, 15 bp, Homo sapiens
tctgtttgttcaaaa

SEQ ID NO: 679826 - DNA, 15 bp, Homo sapiens
ctgtttgttcaaaag

SEQ ID NO: 679827 - DNA, 15 bp, Homo sapiens
tgtttgttcaaaaga

SEQ ID NO: 679828 - DNA, 15 bp, Homo sapiens
gtttgttcaaaagag

SEQ ID NO: 679829 - DNA, 15 bp, Homo sapiens
tttgttcaaaagagt

SEQ ID NO: 679830 - DNA, 15 bp, Homo sapiens
ttgttcaaaagagtt

SEQ ID NO: 679831 - DNA, 15 bp, Homo sapiens
tgttcaaaagagtta

SEQ ID NO: 679832 - DNA, 15 bp, Homo sapiens
gttcaaaagagttat

SEQ ID NO: 679833 - DNA, 15 bp, Homo sapiens
ttcaaaagagttatt

SEQ ID NO: 679834 - DNA, 15 bp, Homo sapiens
tcaaaagagttattt

SEQ ID NO: 679835 - DNA, 15 bp, Homo sapiens
caaaagagttatttt

SEQ ID NO: 679836 - DNA, 15 bp, Homo sapiens
aaaagagttattttt

SEQ ID NO: 679837 - DNA, 15 bp, Homo sapiens
aaagagttatttttc

SEQ ID NO: 679838 - DNA, 15 bp, Homo sapiens
aagagttatttttct

SEQ ID NO: 679839 - DNA, 15 bp, Homo sapiens
agagttatttttctc

SEQ ID NO: 679840 - DNA, 15 bp, Homo sapiens
gagttatttttctct

SEQ ID NO: 679841 - DNA, 15 bp, Homo sapiens
agttatttttctctt

SEQ ID NO: 679842 - DNA, 15 bp, Homo sapiens
gttatttttctcttt

SEQ ID NO: 679843 - DNA, 15 bp, Homo sapiens
ttatttttctctttt

SEQ ID NO: 679844 - DNA, 15 bp, Homo sapiens
tatttttctcttttt

SEQ ID NO: 679845 - DNA, 15 bp, Homo sapiens
atttttctctttttt

SEQ ID NO: 679846 - DNA, 15 bp, Homo sapiens
tttttctcttttttt

SEQ ID NO: 679847 - DNA, 15 bp, Homo sapiens
ttttctctttttttc

SEQ ID NO: 679848 - DNA, 15 bp, Homo sapiens
tttctctttttttct

SEQ ID NO: 679849 - DNA, 15 bp, Homo sapiens
ttctctttttttctt

SEQ ID NO: 679850 - DNA, 15 bp, Homo sapiens
tctctttttttcttc

SEQ ID NO: 679851 - DNA, 15 bp, Homo sapiens
ctctttttttcttct

SEQ ID NO: 679852 - DNA, 15 bp, Homo sapiens
tctttttttcttctt

SEQ ID NO: 679853 - DNA, 15 bp, Homo sapiens
ctttttttcttcttt

SEQ ID NO: 679854 - DNA, 15 bp, Homo sapiens
tttttttcttctttg

SEQ ID NO: 679855 - DNA, 15 bp, Homo sapiens
ttttttcttctttga

SEQ ID NO: 679856 - DNA, 15 bp, Homo sapiens
tttttcttctttgag

SEQ ID NO: 679857 - DNA, 15 bp, Homo sapiens
ttttcttctttgaga

SEQ ID NO: 679858 - DNA, 15 bp, Homo sapiens
tttcttctttgagac

SEQ ID NO: 679859 - DNA, 15 bp, Homo sapiens
ttcttctttgagaca

SEQ ID NO: 679860 - DNA, 15 bp, Homo sapiens
tcttctttgagacag

SEQ ID NO: 679861 - DNA, 15 bp, Homo sapiens
cttctttgagacagg

SEQ ID NO: 679862 - DNA, 15 bp, Homo sapiens
ttctttgagacaggg

SEQ ID NO: 679863 - DNA, 15 bp, Homo sapiens
tctttgagacagggt

SEQ ID NO: 679864 - DNA, 15 bp, Homo sapiens
ctttgagacagggtc

SEQ ID NO: 679865 - DNA, 15 bp, Homo sapiens
ttgagacagggtctc

SEQ ID NO: 679866 - DNA, 15 bp, Homo sapiens
tgagacagggtctca

SEQ ID NO: 679867 - DNA, 15 bp, Homo sapiens
gagacagggtctcac

SEQ ID NO: 679868 - DNA, 15 bp, Homo sapiens
agacagggtctcacg

SEQ ID NO: 679869 - DNA, 15 bp, Homo sapiens
gacagggtctcacgc

SEQ ID NO: 679870 - DNA, 15 bp, Homo sapiens
acagggtctcacgct

SEQ ID NO: 679871 - DNA, 15 bp, Homo sapiens
cagggtctcacgctc

SEQ ID NO: 679872 - DNA, 15 bp, Homo sapiens
agggtctcacgctct

SEQ ID NO: 679873 - DNA, 15 bp, Homo sapiens
gggtctcacgctctt

SEQ ID NO: 679874 - DNA, 15 bp, Homo sapiens
ggtctcacgctcttg

SEQ ID NO: 679875 - DNA, 15 bp, Homo sapiens
gtctcacgctcttgc

SEQ ID NO: 679876 - DNA, 15 bp, Homo sapiens
tctcacgctcttgcc

SEQ ID NO: 679877 - DNA, 15 bp, Homo sapiens
ctcacgctcttgccc

SEQ ID NO: 679878 - DNA, 15 bp, Homo sapiens
tcacgctcttgccca

SEQ ID NO: 679879 - DNA, 15 bp, Homo sapiens
cacgctcttgcccag

SEQ ID NO: 679880 - DNA, 15 bp, Homo sapiens
acgctcttgcccagg

SEQ ID NO: 679881 - DNA, 15 bp, Homo sapiens
cgctcttgcccaggc

SEQ ID NO: 679882 - DNA, 15 bp, Homo sapiens
gctcttgcccaggct

SEQ ID NO: 679883 - DNA, 15 bp, Homo sapiens
ctcttgcccaggcta

SEQ ID NO: 679884 - DNA, 15 bp, Homo sapiens
tcttgcccaggctat

SEQ ID NO: 679885 - DNA, 15 bp, Homo sapiens
cttgcccaggctata

SEQ ID NO: 679886 - DNA, 15 bp, Homo sapiens
ttgcccaggctatag

SEQ ID NO: 679887 - DNA, 15 bp, Homo sapiens
tgcccaggctatagc

SEQ ID NO: 679888 - DNA, 15 bp, Homo sapiens
gcccaggctatagca

SEQ ID NO: 679889 - DNA, 15 bp, Homo sapiens
cccaggctatagcat

SEQ ID NO: 679890 - DNA, 15 bp, Homo sapiens
ccaggctatagcata

SEQ ID NO: 679891 - DNA, 15 bp, Homo sapiens
caggctatagcataa

SEQ ID NO: 679892 - DNA, 15 bp, Homo sapiens
aggctatagcataag

SEQ ID NO: 679893 - DNA, 15 bp, Homo sapiens
ggctatagcataagg

SEQ ID NO: 679894 - DNA, 15 bp, Homo sapiens
gctatagcataaggg

SEQ ID NO: 679895 - DNA, 15 bp, Homo sapiens
ctatagcataagggc

SEQ ID NO: 679896 - DNA, 15 bp, Homo sapiens
tatagcataagggca

SEQ ID NO: 679897 - DNA, 15 bp, Homo sapiens
atagcataagggcac

SEQ ID NO: 679898 - DNA, 15 bp, Homo sapiens
tagcataagggcaca

SEQ ID NO: 679899 - DNA, 15 bp, Homo sapiens
agcataagggcacat

SEQ ID NO: 679900 - DNA, 15 bp, Homo sapiens
gcataagggcacatc

SEQ ID NO: 679901 - DNA, 15 bp, Homo sapiens
cataagggcacatca

SEQ ID NO: 679902 - DNA, 15 bp, Homo sapiens
ataagggcacatcac

SEQ ID NO: 679903 - DNA, 15 bp, Homo sapiens
taagggcacatcaca

SEQ ID NO: 679904 - DNA, 15 bp, Homo sapiens
aagggcacatcacag

SEQ ID NO: 679905 - DNA, 15 bp, Homo sapiens
agggcacatcacagc

SEQ ID NO: 679906 - DNA, 15 bp, Homo sapiens
gggcacatcacagct

SEQ ID NO: 679907 - DNA, 15 bp, Homo sapiens
ggcacatcacagctc

SEQ ID NO: 679908 - DNA, 15 bp, Homo sapiens
gcacatcacagctca

SEQ ID NO: 679909 - DNA, 15 bp, Homo sapiens
cacatcacagctcac

SEQ ID NO: 679910 - DNA, 15 bp, Homo sapiens
acatcacagctcact

SEQ ID NO: 679911 - DNA, 15 bp, Homo sapiens
catcacagctcactg

SEQ ID NO: 679912 - DNA, 15 bp, Homo sapiens
atcacagctcactgc

SEQ ID NO: 679913 - DNA, 15 bp, Homo sapiens
tcacagctcactgca

SEQ ID NO: 679914 - DNA, 15 bp, Homo sapiens
cacagctcactgcag

SEQ ID NO: 679915 - DNA, 15 bp, Homo sapiens
acagctcactgcagc

SEQ ID NO: 679916 - DNA, 15 bp, Homo sapiens
cagctcactgcagcc

SEQ ID NO: 679917 - DNA, 15 bp, Homo sapiens
agctcactgcagcca

SEQ ID NO: 679918 - DNA, 15 bp, Homo sapiens
gctcactgcagccac

SEQ ID NO: 679919 - DNA, 15 bp, Homo sapiens
ctcactgcagccaca

SEQ ID NO: 679920 - DNA, 15 bp, Homo sapiens
tcactgcagccacaa

SEQ ID NO: 679921 - DNA, 15 bp, Homo sapiens
cactgcagccacaac

SEQ ID NO: 679922 - DNA, 15 bp, Homo sapiens
actgcagccacaacc

SEQ ID NO: 679923 - DNA, 15 bp, Homo sapiens
ctgcagccacaacct

SEQ ID NO: 679924 - DNA, 15 bp, Homo sapiens
tgcagccacaacctc

SEQ ID NO: 679925 - DNA, 15 bp, Homo sapiens
gcagccacaacctcc

SEQ ID NO: 679926 - DNA, 15 bp, Homo sapiens
cagccacaacctcct

SEQ ID NO: 679927 - DNA, 15 bp, Homo sapiens
agccacaacctcctg

SEQ ID NO: 679928 - DNA, 15 bp, Homo sapiens
gccacaacctcctgg

SEQ ID NO: 679929 - DNA, 15 bp, Homo sapiens
ccacaacctcctggg

SEQ ID NO: 679930 - DNA, 15 bp, Homo sapiens
cacaacctcctgggc

SEQ ID NO: 679931 - DNA, 15 bp, Homo sapiens
acaacctcctgggct

SEQ ID NO: 679932 - DNA, 15 bp, Homo sapiens
caacctcctgggctc

SEQ ID NO: 679933 - DNA, 15 bp, Homo sapiens
aacctcctgggctca

SEQ ID NO: 679934 - DNA, 15 bp, Homo sapiens
cctcctgggctcaac

SEQ ID NO: 679935 - DNA, 15 bp, Homo sapiens
ctcctgggctcaacc

SEQ ID NO: 679936 - DNA, 15 bp, Homo sapiens
tcctgggctcaaccg

SEQ ID NO: 679937 - DNA, 15 bp, Homo sapiens
cctgggctcaaccga

SEQ ID NO: 679938 - DNA, 15 bp, Homo sapiens
ctgggctcaaccgat

SEQ ID NO: 679939 - DNA, 15 bp, Homo sapiens
tgggctcaaccgatc

SEQ ID NO: 679940 - DNA, 15 bp, Homo sapiens
gggctcaaccgatcc

SEQ ID NO: 679941 - DNA, 15 bp, Homo sapiens
ggctcaaccgatcct

SEQ ID NO: 679942 - DNA, 15 bp, Homo sapiens
gctcaaccgatcctc

SEQ ID NO: 679943 - DNA, 15 bp, Homo sapiens
ctcaaccgatcctcc

SEQ ID NO: 679944 - DNA, 15 bp, Homo sapiens
tcaaccgatcctcct

SEQ ID NO: 679945 - DNA, 15 bp, Homo sapiens
caaccgatcctcctg

SEQ ID NO: 679946 - DNA, 15 bp, Homo sapiens
aaccgatcctcctgt

SEQ ID NO: 679947 - DNA, 15 bp, Homo sapiens
accgatcctcctgtc

SEQ ID NO: 679948 - DNA, 15 bp, Homo sapiens
ccgatcctcctgtct

SEQ ID NO: 679949 - DNA, 15 bp, Homo sapiens
cgatcctcctgtctc

SEQ ID NO: 679950 - DNA, 15 bp, Homo sapiens
gatcctcctgtctca

SEQ ID NO: 679951 - DNA, 15 bp, Homo sapiens
atcctcctgtctcag

SEQ ID NO: 679952 - DNA, 15 bp, Homo sapiens
tcctcctgtctcagc

SEQ ID NO: 679953 - DNA, 15 bp, Homo sapiens
cctcctgtctcagcc

SEQ ID NO: 679954 - DNA, 15 bp, Homo sapiens
ctcctgtctcagcct

SEQ ID NO: 679955 - DNA, 15 bp, Homo sapiens
tcctgtctcagcctt

SEQ ID NO: 679956 - DNA, 15 bp, Homo sapiens
cctgtctcagccttc

SEQ ID NO: 679957 - DNA, 15 bp, Homo sapiens
ctgtctcagccttca

SEQ ID NO: 679958 - DNA, 15 bp, Homo sapiens
tgtctcagccttcaa

SEQ ID NO: 679959 - DNA, 15 bp, Homo sapiens
gtctcagccttcaag

SEQ ID NO: 679960 - DNA, 15 bp, Homo sapiens
tctcagccttcaagt

SEQ ID NO: 679961 - DNA, 15 bp, Homo sapiens
ctcagccttcaagta

SEQ ID NO: 679962 - DNA, 15 bp, Homo sapiens
tcagccttcaagtag

SEQ ID NO: 679963 - DNA, 15 bp, Homo sapiens
cagccttcaagtagc

SEQ ID NO: 679964 - DNA, 15 bp, Homo sapiens
agccttcaagtagct

SEQ ID NO: 679965 - DNA, 15 bp, Homo sapiens
gccttcaagtagctt

SEQ ID NO: 679966 - DNA, 15 bp, Homo sapiens
ccttcaagtagcttg

SEQ ID NO: 679967 - DNA, 15 bp, Homo sapiens
cttcaagtagcttgg

SEQ ID NO: 679968 - DNA, 15 bp, Homo sapiens
ttcaagtagcttgga

SEQ ID NO: 679969 - DNA, 15 bp, Homo sapiens
tcaagtagcttggac

SEQ ID NO: 679970 - DNA, 15 bp, Homo sapiens
caagtagcttggact

SEQ ID NO: 679971 - DNA, 15 bp, Homo sapiens
aagtagcttggacta

SEQ ID NO: 679972 - DNA, 15 bp, Homo sapiens
agtagcttggactac

SEQ ID NO: 679973 - DNA, 15 bp, Homo sapiens
gtagcttggactaca

SEQ ID NO: 679974 - DNA, 15 bp, Homo sapiens
tagcttggactacag

SEQ ID NO: 679975 - DNA, 15 bp, Homo sapiens
agcttggactacagg

SEQ ID NO: 679976 - DNA, 15 bp, Homo sapiens
gcttggactacaggc

SEQ ID NO: 679977 - DNA, 15 bp, Homo sapiens
cttggactacaggca

SEQ ID NO: 679978 - DNA, 15 bp, Homo sapiens
ttggactacaggcac

SEQ ID NO: 679979 - DNA, 15 bp, Homo sapiens
tggactacaggcaca

SEQ ID NO: 679980 - DNA, 15 bp, Homo sapiens
ggactacaggcacac

SEQ ID NO: 679981 - DNA, 15 bp, Homo sapiens
gactacaggcacaca

SEQ ID NO: 679982 - DNA, 15 bp, Homo sapiens
actacaggcacacat

SEQ ID NO: 679983 - DNA, 15 bp, Homo sapiens
ctacaggcacacatg

SEQ ID NO: 679984 - DNA, 15 bp, Homo sapiens
tacaggcacacatgc

SEQ ID NO: 679985 - DNA, 15 bp, Homo sapiens
acaggcacacatgca

SEQ ID NO: 679986 - DNA, 15 bp, Homo sapiens
caggcacacatgcac

SEQ ID NO: 679987 - DNA, 15 bp, Homo sapiens
aggcacacatgcacc

SEQ ID NO: 679988 - DNA, 15 bp, Homo sapiens
ggcacacatgcacca

SEQ ID NO: 679989 - DNA, 15 bp, Homo sapiens
gcacacatgcaccac

SEQ ID NO: 679990 - DNA, 15 bp, Homo sapiens
cacacatgcaccacc

SEQ ID NO: 679991 - DNA, 15 bp, Homo sapiens
acacatgcaccacca

SEQ ID NO: 679992 - DNA, 15 bp, Homo sapiens
cacatgcaccaccat

SEQ ID NO: 679993 - DNA, 15 bp, Homo sapiens
acatgcaccaccata

SEQ ID NO: 679994 - DNA, 15 bp, Homo sapiens
catgcaccaccatac

SEQ ID NO: 679995 - DNA, 15 bp, Homo sapiens
atgcaccaccatacc

SEQ ID NO: 679996 - DNA, 15 bp, Homo sapiens
tgcaccaccataccc

SEQ ID NO: 679997 - DNA, 15 bp, Homo sapiens
gcaccaccatacccg

SEQ ID NO: 679998 - DNA, 15 bp, Homo sapiens
caccaccatacccgg

SEQ ID NO: 679999 - DNA, 15 bp, Homo sapiens
accaccatacccggc

SEQ ID NO: 680000 - DNA, 15 bp, Homo sapiens
ccaccatacccggct

SEQ ID NO: 680001 - DNA, 15 bp, Homo sapiens
caccatacccggcta

SEQ ID NO: 680002 - DNA, 15 bp, Homo sapiens
accatacccggctaa

SEQ ID NO: 680003 - DNA, 15 bp, Homo sapiens
ccatacccggctaag

SEQ ID NO: 680004 - DNA, 15 bp, Homo sapiens
catacccggctaagt

SEQ ID NO: 680005 - DNA, 15 bp, Homo sapiens
atacccggctaagtt

SEQ ID NO: 680006 - DNA, 15 bp, Homo sapiens
tacccggctaagttt

SEQ ID NO: 680007 - DNA, 15 bp, Homo sapiens
acccggctaagtttt

SEQ ID NO: 680008 - DNA, 15 bp, Homo sapiens
cccggctaagttttt

SEQ ID NO: 680009 - DNA, 15 bp, Homo sapiens
ccggctaagtttttg

SEQ ID NO: 680010 - DNA, 15 bp, Homo sapiens
cggctaagtttttga

SEQ ID NO: 680011 - DNA, 15 bp, Homo sapiens
ggctaagtttttgat

SEQ ID NO: 680012 - DNA, 15 bp, Homo sapiens
gctaagtttttgatc

SEQ ID NO: 680013 - DNA, 15 bp, Homo sapiens
ctaagtttttgatct

SEQ ID NO: 680014 - DNA, 15 bp, Homo sapiens
taagtttttgatctt

SEQ ID NO: 680015 - DNA, 15 bp, Homo sapiens
aagtttttgatcttg

SEQ ID NO: 680016 - DNA, 15 bp, Homo sapiens
agtttttgatcttgt

SEQ ID NO: 680017 - DNA, 15 bp, Homo sapiens
gtttttgatcttgta

SEQ ID NO: 680018 - DNA, 15 bp, Homo sapiens
tttttgatcttgtag

SEQ ID NO: 680019 - DNA, 15 bp, Homo sapiens
ttttgatcttgtaga

SEQ ID NO: 680020 - DNA, 15 bp, Homo sapiens
tttgatcttgtagag

SEQ ID NO: 680021 - DNA, 15 bp, Homo sapiens
ttgatcttgtagaga

SEQ ID NO: 680022 - DNA, 15 bp, Homo sapiens
tgatcttgtagagac

SEQ ID NO: 680023 - DNA, 15 bp, Homo sapiens
gatcttgtagagaca

SEQ ID NO: 680024 - DNA, 15 bp, Homo sapiens
atcttgtagagacag

SEQ ID NO: 680025 - DNA, 15 bp, Homo sapiens
tcttgtagagacagg

SEQ ID NO: 680026 - DNA, 15 bp, Homo sapiens
cttgtagagacagga

SEQ ID NO: 680027 - DNA, 15 bp, Homo sapiens
ttgtagagacaggac

SEQ ID NO: 680028 - DNA, 15 bp, Homo sapiens
tgtagagacaggacc

SEQ ID NO: 680029 - DNA, 15 bp, Homo sapiens
gtagagacaggacct

SEQ ID NO: 680030 - DNA, 15 bp, Homo sapiens
tagagacaggacctt

SEQ ID NO: 680031 - DNA, 15 bp, Homo sapiens
agagacaggacctta

SEQ ID NO: 680032 - DNA, 15 bp, Homo sapiens
gagacaggaccttac

SEQ ID NO: 680033 - DNA, 15 bp, Homo sapiens
agacaggaccttacc

SEQ ID NO: 680034 - DNA, 15 bp, Homo sapiens
gacaggaccttaccc

SEQ ID NO: 680035 - DNA, 15 bp, Homo sapiens
acaggaccttaccct

SEQ ID NO: 680036 - DNA, 15 bp, Homo sapiens
caggaccttaccctg

SEQ ID NO: 680037 - DNA, 15 bp, Homo sapiens
aggaccttaccctgt

SEQ ID NO: 680038 - DNA, 15 bp, Homo sapiens
ggaccttaccctgtt

SEQ ID NO: 680039 - DNA, 15 bp, Homo sapiens
gaccttaccctgttg

SEQ ID NO: 680040 - DNA, 15 bp, Homo sapiens
accttaccctgttgc

SEQ ID NO: 680041 - DNA, 15 bp, Homo sapiens
ccttaccctgttgcc

SEQ ID NO: 680042 - DNA, 15 bp, Homo sapiens
cttaccctgttgccc

SEQ ID NO: 680043 - DNA, 15 bp, Homo sapiens
ttaccctgttgccca

SEQ ID NO: 680044 - DNA, 15 bp, Homo sapiens
taccctgttgcccag

SEQ ID NO: 680045 - DNA, 15 bp, Homo sapiens
accctgttgcccagg

SEQ ID NO: 680046 - DNA, 15 bp, Homo sapiens
ccctgttgcccaggc

SEQ ID NO: 680047 - DNA, 15 bp, Homo sapiens
cctgttgcccaggct

SEQ ID NO: 680048 - DNA, 15 bp, Homo sapiens
ctgttgcccaggctg

SEQ ID NO: 680049 - DNA, 15 bp, Homo sapiens
ggtctcaaactccta

SEQ ID NO: 680050 - DNA, 15 bp, Homo sapiens
gtctcaaactcctag

SEQ ID NO: 680051 - DNA, 15 bp, Homo sapiens
tctcaaactcctagc

SEQ ID NO: 680052 - DNA, 15 bp, Homo sapiens
ctcaaactcctagct

SEQ ID NO: 680053 - DNA, 15 bp, Homo sapiens
tcaaactcctagctt

SEQ ID NO: 680054 - DNA, 15 bp, Homo sapiens
caaactcctagcttc

SEQ ID NO: 680055 - DNA, 15 bp, Homo sapiens
aaactcctagcttca

SEQ ID NO: 680056 - DNA, 15 bp, Homo sapiens
aactcctagcttcaa

SEQ ID NO: 680057 - DNA, 15 bp, Homo sapiens
actcctagcttcaag

SEQ ID NO: 680058 - DNA, 15 bp, Homo sapiens
ctcctagcttcaagc

SEQ ID NO: 680059 - DNA, 15 bp, Homo sapiens
tcctagcttcaagca

SEQ ID NO: 680060 - DNA, 15 bp, Homo sapiens
cctagcttcaagcaa

SEQ ID NO: 680061 - DNA, 15 bp, Homo sapiens
ctagcttcaagcaat

SEQ ID NO: 680062 - DNA, 15 bp, Homo sapiens
tagcttcaagcaatc

SEQ ID NO: 680063 - DNA, 15 bp, Homo sapiens
agcttcaagcaatcc

SEQ ID NO: 680064 - DNA, 15 bp, Homo sapiens
gcttcaagcaatcct

SEQ ID NO: 680065 - DNA, 15 bp, Homo sapiens
cttcaagcaatcctc

SEQ ID NO: 680066 - DNA, 15 bp, Homo sapiens
ttcaagcaatcctcc

SEQ ID NO: 680067 - DNA, 15 bp, Homo sapiens
tcaagcaatcctcct

SEQ ID NO: 680068 - DNA, 15 bp, Homo sapiens
caagcaatcctccta

SEQ ID NO: 680069 - DNA, 15 bp, Homo sapiens
aagcaatcctcctac

SEQ ID NO: 680070 - DNA, 15 bp, Homo sapiens
agcaatcctcctacc

SEQ ID NO: 680071 - DNA, 15 bp, Homo sapiens
gcaatcctcctacct

SEQ ID NO: 680072 - DNA, 15 bp, Homo sapiens
caatcctcctacctt

SEQ ID NO: 680073 - DNA, 15 bp, Homo sapiens
aatcctcctaccttg

SEQ ID NO: 680074 - DNA, 15 bp, Homo sapiens
atcctcctaccttgg

SEQ ID NO: 680075 - DNA, 15 bp, Homo sapiens
tcctcctaccttggc

SEQ ID NO: 680076 - DNA, 15 bp, Homo sapiens
cctcctaccttggcc

SEQ ID NO: 680077 - DNA, 15 bp, Homo sapiens
ctcctaccttggcct

SEQ ID NO: 680078 - DNA, 15 bp, Homo sapiens
tcctaccttggcctc

SEQ ID NO: 680079 - DNA, 15 bp, Homo sapiens
cctaccttggcctcc

SEQ ID NO: 680080 - DNA, 15 bp, Homo sapiens
ctaccttggcctccc

SEQ ID NO: 680081 - DNA, 15 bp, Homo sapiens
taccttggcctccca

SEQ ID NO: 680082 - DNA, 15 bp, Homo sapiens
accttggcctcccaa

SEQ ID NO: 680083 - DNA, 15 bp, Homo sapiens
ccttggcctcccaaa

SEQ ID NO: 680084 - DNA, 15 bp, Homo sapiens
cttggcctcccaaag

SEQ ID NO: 680085 - DNA, 15 bp, Homo sapiens
ttggcctcccaaagt

SEQ ID NO: 680086 - DNA, 15 bp, Homo sapiens
tggcctcccaaagtg

SEQ ID NO: 680087 - DNA, 15 bp, Homo sapiens
ctcccaaagtgctaa

SEQ ID NO: 680088 - DNA, 15 bp, Homo sapiens
tcccaaagtgctaag

SEQ ID NO: 680089 - DNA, 15 bp, Homo sapiens
cccaaagtgctaaga

SEQ ID NO: 680090 - DNA, 15 bp, Homo sapiens
ccaaagtgctaagat

SEQ ID NO: 680091 - DNA, 15 bp, Homo sapiens
caaagtgctaagatt

SEQ ID NO: 680092 - DNA, 15 bp, Homo sapiens
aaagtgctaagatta

SEQ ID NO: 680093 - DNA, 15 bp, Homo sapiens
aagtgctaagattat

SEQ ID NO: 680094 - DNA, 15 bp, Homo sapiens
agtgctaagattata

SEQ ID NO: 680095 - DNA, 15 bp, Homo sapiens
gtgctaagattatag

SEQ ID NO: 680096 - DNA, 15 bp, Homo sapiens
tgctaagattatagg

SEQ ID NO: 680097 - DNA, 15 bp, Homo sapiens
gctaagattataggc

SEQ ID NO: 680098 - DNA, 15 bp, Homo sapiens
ctaagattataggca

SEQ ID NO: 680099 - DNA, 15 bp, Homo sapiens
taagattataggcat

SEQ ID NO: 680100 - DNA, 15 bp, Homo sapiens
aagattataggcatg

SEQ ID NO: 680101 - DNA, 15 bp, Homo sapiens
agattataggcatga

SEQ ID NO: 680102 - DNA, 15 bp, Homo sapiens
gattataggcatgag

SEQ ID NO: 680103 - DNA, 15 bp, Homo sapiens
attataggcatgagc

SEQ ID NO: 680104 - DNA, 15 bp, Homo sapiens
ttataggcatgagcc

SEQ ID NO: 680105 - DNA, 15 bp, Homo sapiens
tataggcatgagcca

SEQ ID NO: 680106 - DNA, 15 bp, Homo sapiens
ataggcatgagccac

SEQ ID NO: 680107 - DNA, 15 bp, Homo sapiens
taggcatgagccact

SEQ ID NO: 680108 - DNA, 15 bp, Homo sapiens
aggcatgagccactg

SEQ ID NO: 680109 - DNA, 15 bp, Homo sapiens
ggcatgagccactgc

SEQ ID NO: 680110 - DNA, 15 bp, Homo sapiens
gcatgagccactgca

SEQ ID NO: 680111 - DNA, 15 bp, Homo sapiens
catgagccactgcac

SEQ ID NO: 680112 - DNA, 15 bp, Homo sapiens
atgagccactgcacc

SEQ ID NO: 680113 - DNA, 15 bp, Homo sapiens
tgagccactgcaccc

SEQ ID NO: 680114 - DNA, 15 bp, Homo sapiens
gagccactgcaccca

SEQ ID NO: 680115 - DNA, 15 bp, Homo sapiens
agccactgcacccag

SEQ ID NO: 680116 - DNA, 15 bp, Homo sapiens
gccactgcacccagc

SEQ ID NO: 680117 - DNA, 15 bp, Homo sapiens
ccactgcacccagcc

SEQ ID NO: 680118 - DNA, 15 bp, Homo sapiens
cactgcacccagccc

SEQ ID NO: 680119 - DNA, 15 bp, Homo sapiens
actgcacccagccca

SEQ ID NO: 680120 - DNA, 15 bp, Homo sapiens
ctgcacccagcccaa

SEQ ID NO: 680121 - DNA, 15 bp, Homo sapiens
tgcacccagcccaaa

SEQ ID NO: 680122 - DNA, 15 bp, Homo sapiens
gcacccagcccaaaa

SEQ ID NO: 680123 - DNA, 15 bp, Homo sapiens
cacccagcccaaaaa

SEQ ID NO: 680124 - DNA, 15 bp, Homo sapiens
acccagcccaaaaaa

SEQ ID NO: 680125 - DNA, 15 bp, Homo sapiens
cccagcccaaaaaag

SEQ ID NO: 680126 - DNA, 15 bp, Homo sapiens
ccagcccaaaaaagt

SEQ ID NO: 680127 - DNA, 15 bp, Homo sapiens
cagcccaaaaaagtt

SEQ ID NO: 680128 - DNA, 15 bp, Homo sapiens
agcccaaaaaagtta

SEQ ID NO: 680129 - DNA, 15 bp, Homo sapiens
gcccaaaaaagttat

SEQ ID NO: 680130 - DNA, 15 bp, Homo sapiens
cccaaaaaagttatt

SEQ ID NO: 680131 - DNA, 15 bp, Homo sapiens
ccaaaaaagttattt

SEQ ID NO: 680132 - DNA, 15 bp, Homo sapiens
caaaaaagttatttt

SEQ ID NO: 680133 - DNA, 15 bp, Homo sapiens
aaaaaagttatttta

SEQ ID NO: 680134 - DNA, 15 bp, Homo sapiens
aaaaagttattttag

SEQ ID NO: 680135 - DNA, 15 bp, Homo sapiens
aaaagttattttaga

SEQ ID NO: 680136 - DNA, 15 bp, Homo sapiens
aaagttattttagat

SEQ ID NO: 680137 - DNA, 15 bp, Homo sapiens
aagttattttagatc

SEQ ID NO: 680138 - DNA, 15 bp, Homo sapiens
agttattttagatca

SEQ ID NO: 680139 - DNA, 15 bp, Homo sapiens
gttattttagatcac

SEQ ID NO: 680140 - DNA, 15 bp, Homo sapiens
ttattttagatcacc

SEQ ID NO: 680141 - DNA, 15 bp, Homo sapiens
tattttagatcacca

SEQ ID NO: 680142 - DNA, 15 bp, Homo sapiens
attttagatcaccat

SEQ ID NO: 680143 - DNA, 15 bp, Homo sapiens
ttttagatcaccatt

SEQ ID NO: 680144 - DNA, 15 bp, Homo sapiens
tttagatcaccatta

SEQ ID NO: 680145 - DNA, 15 bp, Homo sapiens
ttagatcaccattag

SEQ ID NO: 680146 - DNA, 15 bp, Homo sapiens
tagatcaccattaga

SEQ ID NO: 680147 - DNA, 15 bp, Homo sapiens
agatcaccattagat

SEQ ID NO: 680148 - DNA, 15 bp, Homo sapiens
gatcaccattagatt

SEQ ID NO: 680149 - DNA, 15 bp, Homo sapiens
atcaccattagattg

SEQ ID NO: 680150 - DNA, 15 bp, Homo sapiens
tcaccattagattgt

SEQ ID NO: 680151 - DNA, 15 bp, Homo sapiens
caccattagattgta

SEQ ID NO: 680152 - DNA, 15 bp, Homo sapiens
accattagattgtag

SEQ ID NO: 680153 - DNA, 15 bp, Homo sapiens
ccattagattgtagt

SEQ ID NO: 680154 - DNA, 15 bp, Homo sapiens
cattagattgtagtg

SEQ ID NO: 680155 - DNA, 15 bp, Homo sapiens
attagattgtagtgg

SEQ ID NO: 680156 - DNA, 15 bp, Homo sapiens
ttagattgtagtggt

SEQ ID NO: 680157 - DNA, 15 bp, Homo sapiens
tagattgtagtggtc

SEQ ID NO: 680158 - DNA, 15 bp, Homo sapiens
agattgtagtggtct

SEQ ID NO: 680159 - DNA, 15 bp, Homo sapiens
gattgtagtggtctt

SEQ ID NO: 680160 - DNA, 15 bp, Homo sapiens
attgtagtggtcttt

SEQ ID NO: 680161 - DNA, 15 bp, Homo sapiens
ttgtagtggtctttc

SEQ ID NO: 680162 - DNA, 15 bp, Homo sapiens
tgtagtggtctttcc

SEQ ID NO: 680163 - DNA, 15 bp, Homo sapiens
gtagtggtctttccc

SEQ ID NO: 680164 - DNA, 15 bp, Homo sapiens
tagtggtctttccca

SEQ ID NO: 680165 - DNA, 15 bp, Homo sapiens
agtggtctttcccat

SEQ ID NO: 680166 - DNA, 15 bp, Homo sapiens
gtggtctttcccatc

SEQ ID NO: 680167 - DNA, 15 bp, Homo sapiens
tggtctttcccatca

SEQ ID NO: 680168 - DNA, 15 bp, Homo sapiens
ggtctttcccatcaa

SEQ ID NO: 680169 - DNA, 15 bp, Homo sapiens
gtctttcccatcaaa

SEQ ID NO: 680170 - DNA, 15 bp, Homo sapiens
tctttcccatcaaac

SEQ ID NO: 680171 - DNA, 15 bp, Homo sapiens
ctttcccatcaaaca

SEQ ID NO: 680172 - DNA, 15 bp, Homo sapiens
tttcccatcaaacat

SEQ ID NO: 680173 - DNA, 15 bp, Homo sapiens
ttcccatcaaacata

SEQ ID NO: 680174 - DNA, 15 bp, Homo sapiens
tcccatcaaacataa

SEQ ID NO: 680175 - DNA, 15 bp, Homo sapiens
cccatcaaacataac

SEQ ID NO: 680176 - DNA, 15 bp, Homo sapiens
ccatcaaacataaca

SEQ ID NO: 680177 - DNA, 15 bp, Homo sapiens
catcaaacataacag

SEQ ID NO: 680178 - DNA, 15 bp, Homo sapiens
atcaaacataacagg

SEQ ID NO: 680179 - DNA, 15 bp, Homo sapiens
tcaaacataacaggc

SEQ ID NO: 680180 - DNA, 15 bp, Homo sapiens
caaacataacaggct

SEQ ID NO: 680181 - DNA, 15 bp, Homo sapiens
aaacataacaggctt

SEQ ID NO: 680182 - DNA, 15 bp, Homo sapiens
aacataacaggcttg

SEQ ID NO: 680183 - DNA, 15 bp, Homo sapiens
acataacaggcttgt

SEQ ID NO: 680184 - DNA, 15 bp, Homo sapiens
cataacaggcttgta

SEQ ID NO: 680185 - DNA, 15 bp, Homo sapiens
ataacaggcttgtat

SEQ ID NO: 680186 - DNA, 15 bp, Homo sapiens
taacaggcttgtatc

SEQ ID NO: 680187 - DNA, 15 bp, Homo sapiens
aacaggcttgtatcc

SEQ ID NO: 680188 - DNA, 15 bp, Homo sapiens
acaggcttgtatccc

SEQ ID NO: 680189 - DNA, 15 bp, Homo sapiens
caggcttgtatccct

SEQ ID NO: 680190 - DNA, 15 bp, Homo sapiens
aggcttgtatccctg

SEQ ID NO: 680191 - DNA, 15 bp, Homo sapiens
ggcttgtatccctgt

SEQ ID NO: 680192 - DNA, 15 bp, Homo sapiens
gcttgtatccctgtg

SEQ ID NO: 680193 - DNA, 15 bp, Homo sapiens
cttgtatccctgtgg

SEQ ID NO: 680194 - DNA, 15 bp, Homo sapiens
ttgtatccctgtggt

SEQ ID NO: 680195 - DNA, 15 bp, Homo sapiens
tgtatccctgtggtg

SEQ ID NO: 680196 - DNA, 15 bp, Homo sapiens
gtatccctgtggtga

SEQ ID NO: 680197 - DNA, 15 bp, Homo sapiens
tatccctgtggtgaa

SEQ ID NO: 680198 - DNA, 15 bp, Homo sapiens
atccctgtggtgaac

SEQ ID NO: 680199 - DNA, 15 bp, Homo sapiens
tccctgtggtgaaca

SEQ ID NO: 680200 - DNA, 15 bp, Homo sapiens
ccctgtggtgaacat

SEQ ID NO: 680201 - DNA, 15 bp, Homo sapiens
cctgtggtgaacata

SEQ ID NO: 680202 - DNA, 15 bp, Homo sapiens
ctgtggtgaacatag

SEQ ID NO: 680203 - DNA, 15 bp, Homo sapiens
tgtggtgaacataga

SEQ ID NO: 680204 - DNA, 15 bp, Homo sapiens
gtggtgaacatagaa

SEQ ID NO: 680205 - DNA, 15 bp, Homo sapiens
tggtgaacatagaag

SEQ ID NO: 680206 - DNA, 15 bp, Homo sapiens
ggtgaacatagaagg

SEQ ID NO: 680207 - DNA, 15 bp, Homo sapiens
gtgaacatagaaggc

SEQ ID NO: 680208 - DNA, 15 bp, Homo sapiens
tgaacatagaaggca

SEQ ID NO: 680209 - DNA, 15 bp, Homo sapiens
gaacatagaaggcat

SEQ ID NO: 680210 - DNA, 15 bp, Homo sapiens
aacatagaaggcatt

SEQ ID NO: 680211 - DNA, 15 bp, Homo sapiens
acatagaaggcattg

SEQ ID NO: 680212 - DNA, 15 bp, Homo sapiens
catagaaggcattga

SEQ ID NO: 680213 - DNA, 15 bp, Homo sapiens
atagaaggcattgat

SEQ ID NO: 680214 - DNA, 15 bp, Homo sapiens
tagaaggcattgatt

SEQ ID NO: 680215 - DNA, 15 bp, Homo sapiens
agaaggcattgattt

SEQ ID NO: 680216 - DNA, 15 bp, Homo sapiens
gaaggcattgatttc

SEQ ID NO: 680217 - DNA, 15 bp, Homo sapiens
aaggcattgatttca

SEQ ID NO: 680218 - DNA, 15 bp, Homo sapiens
aggcattgatttcag

SEQ ID NO: 680219 - DNA, 15 bp, Homo sapiens
ggcattgatttcagg

SEQ ID NO: 680220 - DNA, 15 bp, Homo sapiens
gcattgatttcaggg

SEQ ID NO: 680221 - DNA, 15 bp, Homo sapiens
cattgatttcaggga

SEQ ID NO: 680222 - DNA, 15 bp, Homo sapiens
attgatttcagggaa

SEQ ID NO: 680223 - DNA, 15 bp, Homo sapiens
ttgatttcagggaaa

SEQ ID NO: 680224 - DNA, 15 bp, Homo sapiens
tgatttcagggaaat

SEQ ID NO: 680225 - DNA, 15 bp, Homo sapiens
gatttcagggaaatt

SEQ ID NO: 680226 - DNA, 15 bp, Homo sapiens
atttcagggaaatta

SEQ ID NO: 680227 - DNA, 15 bp, Homo sapiens
tttcagggaaattag

SEQ ID NO: 680228 - DNA, 15 bp, Homo sapiens
ttcagggaaattagc

SEQ ID NO: 680229 - DNA, 15 bp, Homo sapiens
tcagggaaattagca

SEQ ID NO: 680230 - DNA, 15 bp, Homo sapiens
cagggaaattagcat

SEQ ID NO: 680231 - DNA, 15 bp, Homo sapiens
agggaaattagcata

SEQ ID NO: 680232 - DNA, 15 bp, Homo sapiens
gggaaattagcatac

SEQ ID NO: 680233 - DNA, 15 bp, Homo sapiens
ggaaattagcataca

SEQ ID NO: 680234 - DNA, 15 bp, Homo sapiens
gaaattagcatacaa

SEQ ID NO: 680235 - DNA, 15 bp, Homo sapiens
aaattagcatacaat

SEQ ID NO: 680236 - DNA, 15 bp, Homo sapiens
aattagcatacaata

SEQ ID NO: 680237 - DNA, 15 bp, Homo sapiens
attagcatacaataa

SEQ ID NO: 680238 - DNA, 15 bp, Homo sapiens
ttagcatacaataat

SEQ ID NO: 680239 - DNA, 15 bp, Homo sapiens
tagcatacaataatg

SEQ ID NO: 680240 - DNA, 15 bp, Homo sapiens
agcatacaataatgt

SEQ ID NO: 680241 - DNA, 15 bp, Homo sapiens
gcatacaataatgta

SEQ ID NO: 680242 - DNA, 15 bp, Homo sapiens
catacaataatgtaa

SEQ ID NO: 680243 - DNA, 15 bp, Homo sapiens
atacaataatgtaat

SEQ ID NO: 680244 - DNA, 15 bp, Homo sapiens
tacaataatgtaatt

SEQ ID NO: 680245 - DNA, 15 bp, Homo sapiens
acaataatgtaattc

SEQ ID NO: 680246 - DNA, 15 bp, Homo sapiens
caataatgtaattca

SEQ ID NO: 680247 - DNA, 15 bp, Homo sapiens
aataatgtaattcat

SEQ ID NO: 680248 - DNA, 15 bp, Homo sapiens
ataatgtaattcata

SEQ ID NO: 680249 - DNA, 15 bp, Homo sapiens
taatgtaattcatac

SEQ ID NO: 680250 - DNA, 15 bp, Homo sapiens
aatgtaattcatacc

SEQ ID NO: 680251 - DNA, 15 bp, Homo sapiens
atgtaattcataccc

SEQ ID NO: 680252 - DNA, 15 bp, Homo sapiens
tgtaattcataccct

SEQ ID NO: 680253 - DNA, 15 bp, Homo sapiens
gtaattcataccctt

SEQ ID NO: 680254 - DNA, 15 bp, Homo sapiens
taattcatacccttt

SEQ ID NO: 680255 - DNA, 15 bp, Homo sapiens
aattcataccctttg

SEQ ID NO: 680256 - DNA, 15 bp, Homo sapiens
attcataccctttgg

SEQ ID NO: 680257 - DNA, 15 bp, Homo sapiens
ttcataccctttggc

SEQ ID NO: 680258 - DNA, 15 bp, Homo sapiens
tcataccctttggca

SEQ ID NO: 680259 - DNA, 15 bp, Homo sapiens
cataccctttggcag

SEQ ID NO: 680260 - DNA, 15 bp, Homo sapiens
ataccctttggcagc

SEQ ID NO: 680261 - DNA, 15 bp, Homo sapiens
taccctttggcagct

SEQ ID NO: 680262 - DNA, 15 bp, Homo sapiens
accctttggcagcta

SEQ ID NO: 680263 - DNA, 15 bp, Homo sapiens
ccctttggcagctaa

SEQ ID NO: 680264 - DNA, 15 bp, Homo sapiens
cctttggcagctaaa

SEQ ID NO: 680265 - DNA, 15 bp, Homo sapiens
ctttggcagctaaaa

SEQ ID NO: 680266 - DNA, 15 bp, Homo sapiens
tttggcagctaaaaa

SEQ ID NO: 680267 - DNA, 15 bp, Homo sapiens
ttggcagctaaaaaa

SEQ ID NO: 680268 - DNA, 15 bp, Homo sapiens
tggcagctaaaaaaa

SEQ ID NO: 680269 - DNA, 15 bp, Homo sapiens
ggcagctaaaaaaat

SEQ ID NO: 680270 - DNA, 15 bp, Homo sapiens
gcagctaaaaaaatt

SEQ ID NO: 680271 - DNA, 15 bp, Homo sapiens
cagctaaaaaaatta

SEQ ID NO: 680272 - DNA, 15 bp, Homo sapiens
agctaaaaaaattaa

SEQ ID NO: 680273 - DNA, 15 bp, Homo sapiens
gctaaaaaaattaaa

SEQ ID NO: 680274 - DNA, 15 bp, Homo sapiens
ctaaaaaaattaaag

SEQ ID NO: 680275 - DNA, 15 bp, Homo sapiens
taaaaaaattaaagt

SEQ ID NO: 680276 - DNA, 15 bp, Homo sapiens
aaaaaaattaaagtg

SEQ ID NO: 680277 - DNA, 15 bp, Homo sapiens
aaaaaattaaagtgc

SEQ ID NO: 680278 - DNA, 15 bp, Homo sapiens
aaaaattaaagtgct

SEQ ID NO: 680279 - DNA, 15 bp, Homo sapiens
aaaattaaagtgctt

SEQ ID NO: 680280 - DNA, 15 bp, Homo sapiens
aaattaaagtgcttg

SEQ ID NO: 680281 - DNA, 15 bp, Homo sapiens
aattaaagtgcttga

SEQ ID NO: 680282 - DNA, 15 bp, Homo sapiens
attaaagtgcttgaa

SEQ ID NO: 680283 - DNA, 15 bp, Homo sapiens
ttaaagtgcttgaaa

SEQ ID NO: 680284 - DNA, 15 bp, Homo sapiens
taaagtgcttgaaag

SEQ ID NO: 680285 - DNA, 15 bp, Homo sapiens
aaagtgcttgaaaga

SEQ ID NO: 680286 - DNA, 15 bp, Homo sapiens
aagtgcttgaaagat

SEQ ID NO: 680287 - DNA, 15 bp, Homo sapiens
agtgcttgaaagatg

SEQ ID NO: 680288 - DNA, 15 bp, Homo sapiens
gtgcttgaaagatgg

SEQ ID NO: 680289 - DNA, 15 bp, Homo sapiens
tgcttgaaagatgga

SEQ ID NO: 680290 - DNA, 15 bp, Homo sapiens
gcttgaaagatggac

SEQ ID NO: 680291 - DNA, 15 bp, Homo sapiens
cttgaaagatggact

SEQ ID NO: 680292 - DNA, 15 bp, Homo sapiens
ttgaaagatggactc

SEQ ID NO: 680293 - DNA, 15 bp, Homo sapiens
tgaaagatggactct

SEQ ID NO: 680294 - DNA, 15 bp, Homo sapiens
gaaagatggactcta

SEQ ID NO: 680295 - DNA, 15 bp, Homo sapiens
aaagatggactctac

SEQ ID NO: 680296 - DNA, 15 bp, Homo sapiens
aagatggactctaca

SEQ ID NO: 680297 - DNA, 15 bp, Homo sapiens
agatggactctacat

SEQ ID NO: 680298 - DNA, 15 bp, Homo sapiens
gatggactctacatt

SEQ ID NO: 680299 - DNA, 15 bp, Homo sapiens
atggactctacattg

SEQ ID NO: 680300 - DNA, 15 bp, Homo sapiens
tggactctacattga

SEQ ID NO: 680301 - DNA, 15 bp, Homo sapiens
ggactctacattgat

SEQ ID NO: 680302 - DNA, 15 bp, Homo sapiens
gactctacattgatg

SEQ ID NO: 680303 - DNA, 15 bp, Homo sapiens
actctacattgatgt

SEQ ID NO: 680304 - DNA, 15 bp, Homo sapiens
ctctacattgatgtc

SEQ ID NO: 680305 - DNA, 15 bp, Homo sapiens
tctacattgatgtcc

SEQ ID NO: 680306 - DNA, 15 bp, Homo sapiens
ctacattgatgtcca

SEQ ID NO: 680307 - DNA, 15 bp, Homo sapiens
tacattgatgtccag

SEQ ID NO: 680308 - DNA, 15 bp, Homo sapiens
acattgatgtccaga

SEQ ID NO: 680309 - DNA, 15 bp, Homo sapiens
cattgatgtccagag

SEQ ID NO: 680310 - DNA, 15 bp, Homo sapiens
attgatgtccagaga

SEQ ID NO: 680311 - DNA, 15 bp, Homo sapiens
ttgatgtccagagag

SEQ ID NO: 680312 - DNA, 15 bp, Homo sapiens
tgatgtccagagaga

SEQ ID NO: 680313 - DNA, 15 bp, Homo sapiens
gatgtccagagagag

SEQ ID NO: 680314 - DNA, 15 bp, Homo sapiens
atgtccagagagagg

SEQ ID NO: 680315 - DNA, 15 bp, Homo sapiens
tgtccagagagagga

SEQ ID NO: 680316 - DNA, 15 bp, Homo sapiens
gtccagagagaggat

SEQ ID NO: 680317 - DNA, 15 bp, Homo sapiens
tccagagagaggatt

SEQ ID NO: 680318 - DNA, 15 bp, Homo sapiens
ccagagagaggattt

SEQ ID NO: 680319 - DNA, 15 bp, Homo sapiens
cagagagaggattta

SEQ ID NO: 680320 - DNA, 15 bp, Homo sapiens
agagagaggatttat

SEQ ID NO: 680321 - DNA, 15 bp, Homo sapiens
gagagaggatttata

SEQ ID NO: 680322 - DNA, 15 bp, Homo sapiens
agagaggatttataa

SEQ ID NO: 680323 - DNA, 15 bp, Homo sapiens
gagaggatttataac

SEQ ID NO: 680324 - DNA, 15 bp, Homo sapiens
agaggatttataacc

SEQ ID NO: 680325 - DNA, 15 bp, Homo sapiens
gaggatttataaccc

SEQ ID NO: 680326 - DNA, 15 bp, Homo sapiens
aggatttataaccca

SEQ ID NO: 680327 - DNA, 15 bp, Homo sapiens
ggatttataacccat

SEQ ID NO: 680328 - DNA, 15 bp, Homo sapiens
gatttataacccatg

SEQ ID NO: 680329 - DNA, 15 bp, Homo sapiens
atttataacccatgt

SEQ ID NO: 680330 - DNA, 15 bp, Homo sapiens
tttataacccatgta

SEQ ID NO: 680331 - DNA, 15 bp, Homo sapiens
ttataacccatgtaa

SEQ ID NO: 680332 - DNA, 15 bp, Homo sapiens
tataacccatgtaag

SEQ ID NO: 680333 - DNA, 15 bp, Homo sapiens
ataacccatgtaagt

SEQ ID NO: 680334 - DNA, 15 bp, Homo sapiens
taacccatgtaagta

SEQ ID NO: 680335 - DNA, 15 bp, Homo sapiens
aacccatgtaagtac

SEQ ID NO: 680336 - DNA, 15 bp, Homo sapiens
acccatgtaagtacc

SEQ ID NO: 680337 - DNA, 15 bp, Homo sapiens
cccatgtaagtacca

SEQ ID NO: 680338 - DNA, 15 bp, Homo sapiens
ccatgtaagtaccaa

SEQ ID NO: 680339 - DNA, 15 bp, Homo sapiens
catgtaagtaccaac

SEQ ID NO: 680340 - DNA, 15 bp, Homo sapiens
atgtaagtaccaaca

SEQ ID NO: 680341 - DNA, 15 bp, Homo sapiens
tgtaagtaccaacaa

SEQ ID NO: 680342 - DNA, 15 bp, Homo sapiens
gtaagtaccaacaaa

SEQ ID NO: 680343 - DNA, 15 bp, Homo sapiens
taagtaccaacaaaa

SEQ ID NO: 680344 - DNA, 15 bp, Homo sapiens
aagtaccaacaaaaa

SEQ ID NO: 680345 - DNA, 15 bp, Homo sapiens
agtaccaacaaaaat

SEQ ID NO: 680346 - DNA, 15 bp, Homo sapiens
gtaccaacaaaaata

SEQ ID NO: 680347 - DNA, 15 bp, Homo sapiens
taccaacaaaaatac

SEQ ID NO: 680348 - DNA, 15 bp, Homo sapiens
accaacaaaaatact

SEQ ID NO: 680349 - DNA, 15 bp, Homo sapiens
ccaacaaaaatactt

SEQ ID NO: 680350 - DNA, 15 bp, Homo sapiens
caacaaaaatactta

SEQ ID NO: 680351 - DNA, 15 bp, Homo sapiens
aacaaaaatacttaa

SEQ ID NO: 680352 - DNA, 15 bp, Homo sapiens
acaaaaatacttaaa

SEQ ID NO: 680353 - DNA, 15 bp, Homo sapiens
caaaaatacttaaaa

SEQ ID NO: 680354 - DNA, 15 bp, Homo sapiens
aaaaatacttaaaaa

SEQ ID NO: 680355 - DNA, 15 bp, Homo sapiens
aaaatacttaaaaat

SEQ ID NO: 680356 - DNA, 15 bp, Homo sapiens
aaatacttaaaaatt

SEQ ID NO: 680357 - DNA, 15 bp, Homo sapiens
aatacttaaaaatta

SEQ ID NO: 680358 - DNA, 15 bp, Homo sapiens
atacttaaaaattag

SEQ ID NO: 680359 - DNA, 15 bp, Homo sapiens
tacttaaaaattaga

SEQ ID NO: 680360 - DNA, 15 bp, Homo sapiens
acttaaaaattagag

SEQ ID NO: 680361 - DNA, 15 bp, Homo sapiens
cttaaaaattagagt

SEQ ID NO: 680362 - DNA, 15 bp, Homo sapiens
ttaaaaattagagta

SEQ ID NO: 680363 - DNA, 15 bp, Homo sapiens
taaaaattagagtaa

SEQ ID NO: 680364 - DNA, 15 bp, Homo sapiens
aaaaattagagtaag

SEQ ID NO: 680365 - DNA, 15 bp, Homo sapiens
aaaattagagtaaga

SEQ ID NO: 680366 - DNA, 15 bp, Homo sapiens
aaattagagtaagac

SEQ ID NO: 680367 - DNA, 15 bp, Homo sapiens
aattagagtaagact

SEQ ID NO: 680368 - DNA, 15 bp, Homo sapiens
attagagtaagactt

SEQ ID NO: 680369 - DNA, 15 bp, Homo sapiens
ttagagtaagacttg

SEQ ID NO: 680370 - DNA, 15 bp, Homo sapiens
tagagtaagacttgc

SEQ ID NO: 680371 - DNA, 15 bp, Homo sapiens
agagtaagacttgca

SEQ ID NO: 680372 - DNA, 15 bp, Homo sapiens
gagtaagacttgcat

SEQ ID NO: 680373 - DNA, 15 bp, Homo sapiens
agtaagacttgcatt

SEQ ID NO: 680374 - DNA, 15 bp, Homo sapiens
gtaagacttgcattg

SEQ ID NO: 680375 - DNA, 15 bp, Homo sapiens
taagacttgcattgt

SEQ ID NO: 680376 - DNA, 15 bp, Homo sapiens
aagacttgcattgtt

SEQ ID NO: 680377 - DNA, 15 bp, Homo sapiens
agacttgcattgtta

SEQ ID NO: 680378 - DNA, 15 bp, Homo sapiens
gacttgcattgttaa

SEQ ID NO: 680379 - DNA, 15 bp, Homo sapiens
acttgcattgttaaa

SEQ ID NO: 680380 - DNA, 15 bp, Homo sapiens
cttgcattgttaaag

SEQ ID NO: 680381 - DNA, 15 bp, Homo sapiens
ttgcattgttaaagt

SEQ ID NO: 680382 - DNA, 15 bp, Homo sapiens
tgcattgttaaagtt

SEQ ID NO: 680383 - DNA, 15 bp, Homo sapiens
gcattgttaaagttt

SEQ ID NO: 680384 - DNA, 15 bp, Homo sapiens
cattgttaaagtttg

SEQ ID NO: 680385 - DNA, 15 bp, Homo sapiens
attgttaaagtttgt

SEQ ID NO: 680386 - DNA, 15 bp, Homo sapiens
ttgttaaagtttgta

SEQ ID NO: 680387 - DNA, 15 bp, Homo sapiens
tgttaaagtttgtag

SEQ ID NO: 680388 - DNA, 15 bp, Homo sapiens
gttaaagtttgtaga

SEQ ID NO: 680389 - DNA, 15 bp, Homo sapiens
ttaaagtttgtagat

SEQ ID NO: 680390 - DNA, 15 bp, Homo sapiens
taaagtttgtagatt

SEQ ID NO: 680391 - DNA, 15 bp, Homo sapiens
aaagtttgtagattt

SEQ ID NO: 680392 - DNA, 15 bp, Homo sapiens
aagtttgtagatttg

SEQ ID NO: 680393 - DNA, 15 bp, Homo sapiens
agtttgtagatttgg

SEQ ID NO: 680394 - DNA, 15 bp, Homo sapiens
gtttgtagatttgga

SEQ ID NO: 680395 - DNA, 15 bp, Homo sapiens
tttgtagatttggat

SEQ ID NO: 680396 - DNA, 15 bp, Homo sapiens
ttgtagatttggatt

SEQ ID NO: 680397 - DNA, 15 bp, Homo sapiens
tgtagatttggattg

SEQ ID NO: 680398 - DNA, 15 bp, Homo sapiens
gtagatttggattgt

SEQ ID NO: 680399 - DNA, 15 bp, Homo sapiens
tagatttggattgtt

SEQ ID NO: 680400 - DNA, 15 bp, Homo sapiens
agatttggattgttg

SEQ ID NO: 680401 - DNA, 15 bp, Homo sapiens
gatttggattgttga

SEQ ID NO: 680402 - DNA, 15 bp, Homo sapiens
atttggattgttgag

SEQ ID NO: 680403 - DNA, 15 bp, Homo sapiens
tttggattgttgagg

SEQ ID NO: 680404 - DNA, 15 bp, Homo sapiens
ttggattgttgaggc

SEQ ID NO: 680405 - DNA, 15 bp, Homo sapiens
tggattgttgaggct

SEQ ID NO: 680406 - DNA, 15 bp, Homo sapiens
ggattgttgaggctt

SEQ ID NO: 680407 - DNA, 15 bp, Homo sapiens
gattgttgaggctta

SEQ ID NO: 680408 - DNA, 15 bp, Homo sapiens
attgttgaggcttaa

SEQ ID NO: 680409 - DNA, 15 bp, Homo sapiens
ttgttgaggcttaaa

SEQ ID NO: 680410 - DNA, 15 bp, Homo sapiens
tgttgaggcttaaat

SEQ ID NO: 680411 - DNA, 15 bp, Homo sapiens
gttgaggcttaaata

SEQ ID NO: 680412 - DNA, 15 bp, Homo sapiens
ttgaggcttaaatac

SEQ ID NO: 680413 - DNA, 15 bp, Homo sapiens
tgaggcttaaatact

SEQ ID NO: 680414 - DNA, 15 bp, Homo sapiens
gaggcttaaatactg

SEQ ID NO: 680415 - DNA, 15 bp, Homo sapiens
aggcttaaatactgc

SEQ ID NO: 680416 - DNA, 15 bp, Homo sapiens
ggcttaaatactgca

SEQ ID NO: 680417 - DNA, 15 bp, Homo sapiens
gcttaaatactgcat

SEQ ID NO: 680418 - DNA, 15 bp, Homo sapiens
cttaaatactgcata

SEQ ID NO: 680419 - DNA, 15 bp, Homo sapiens
ttaaatactgcatag

SEQ ID NO: 680420 - DNA, 15 bp, Homo sapiens
taaatactgcatagt

SEQ ID NO: 680421 - DNA, 15 bp, Homo sapiens
aaatactgcatagtt

SEQ ID NO: 680422 - DNA, 15 bp, Homo sapiens
aatactgcatagttc

SEQ ID NO: 680423 - DNA, 15 bp, Homo sapiens
atactgcatagttct

SEQ ID NO: 680424 - DNA, 15 bp, Homo sapiens
tactgcatagttcta

SEQ ID NO: 680425 - DNA, 15 bp, Homo sapiens
actgcatagttctat

SEQ ID NO: 680426 - DNA, 15 bp, Homo sapiens
ctgcatagttctata

SEQ ID NO: 680427 - DNA, 15 bp, Homo sapiens
tgcatagttctatat

SEQ ID NO: 680428 - DNA, 15 bp, Homo sapiens
gcatagttctatatt

SEQ ID NO: 680429 - DNA, 15 bp, Homo sapiens
catagttctatattc

SEQ ID NO: 680430 - DNA, 15 bp, Homo sapiens
atagttctatattca

SEQ ID NO: 680431 - DNA, 15 bp, Homo sapiens
tagttctatattcac

SEQ ID NO: 680432 - DNA, 15 bp, Homo sapiens
agttctatattcact

SEQ ID NO: 680433 - DNA, 15 bp, Homo sapiens
gttctatattcacta

SEQ ID NO: 680434 - DNA, 15 bp, Homo sapiens
ttctatattcactat

SEQ ID NO: 680435 - DNA, 15 bp, Homo sapiens
tctatattcactatg

SEQ ID NO: 680436 - DNA, 15 bp, Homo sapiens
ctatattcactatgt

SEQ ID NO: 680437 - DNA, 15 bp, Homo sapiens
tatattcactatgtc

SEQ ID NO: 680438 - DNA, 15 bp, Homo sapiens
atattcactatgtca

SEQ ID NO: 680439 - DNA, 15 bp, Homo sapiens
tattcactatgtcat

SEQ ID NO: 680440 - DNA, 15 bp, Homo sapiens
attcactatgtcata

SEQ ID NO: 680441 - DNA, 15 bp, Homo sapiens
ttcactatgtcataa

SEQ ID NO: 680442 - DNA, 15 bp, Homo sapiens
tcactatgtcataat

SEQ ID NO: 680443 - DNA, 15 bp, Homo sapiens
cactatgtcataatt

SEQ ID NO: 680444 - DNA, 15 bp, Homo sapiens
actatgtcataattt

SEQ ID NO: 680445 - DNA, 15 bp, Homo sapiens
ctatgtcataatttg

SEQ ID NO: 680446 - DNA, 15 bp, Homo sapiens
tatgtcataatttgc

SEQ ID NO: 680447 - DNA, 15 bp, Homo sapiens
atgtcataatttgca

SEQ ID NO: 680448 - DNA, 15 bp, Homo sapiens
tgtcataatttgcat

SEQ ID NO: 680449 - DNA, 15 bp, Homo sapiens
gtcataatttgcatt

SEQ ID NO: 680450 - DNA, 15 bp, Homo sapiens
tcataatttgcattg

SEQ ID NO: 680451 - DNA, 15 bp, Homo sapiens
cataatttgcattgc

SEQ ID NO: 680452 - DNA, 15 bp, Homo sapiens
ataatttgcattgct

SEQ ID NO: 680453 - DNA, 15 bp, Homo sapiens
taatttgcattgctg

SEQ ID NO: 680454 - DNA, 15 bp, Homo sapiens
aatttgcattgctgc

SEQ ID NO: 680455 - DNA, 15 bp, Homo sapiens
atttgcattgctgct

SEQ ID NO: 680456 - DNA, 15 bp, Homo sapiens
tttgcattgctgctg

SEQ ID NO: 680457 - DNA, 15 bp, Homo sapiens
ttgcattgctgctgc

SEQ ID NO: 680458 - DNA, 15 bp, Homo sapiens
tgcattgctgctgca

SEQ ID NO: 680459 - DNA, 15 bp, Homo sapiens
gcattgctgctgcat

SEQ ID NO: 680460 - DNA, 15 bp, Homo sapiens
cattgctgctgcatc

SEQ ID NO: 680461 - DNA, 15 bp, Homo sapiens
attgctgctgcatca

SEQ ID NO: 680462 - DNA, 15 bp, Homo sapiens
ttgctgctgcatcag

SEQ ID NO: 680463 - DNA, 15 bp, Homo sapiens
tgctgctgcatcaga

SEQ ID NO: 680464 - DNA, 15 bp, Homo sapiens
gctgctgcatcagag

SEQ ID NO: 680465 - DNA, 15 bp, Homo sapiens
ctgctgcatcagagg

SEQ ID NO: 680466 - DNA, 15 bp, Homo sapiens
tgctgcatcagagga

SEQ ID NO: 680467 - DNA, 15 bp, Homo sapiens
gctgcatcagaggag

SEQ ID NO: 680468 - DNA, 15 bp, Homo sapiens
ctgcatcagaggagc

SEQ ID NO: 680469 - DNA, 15 bp, Homo sapiens
tgcatcagaggagct

SEQ ID NO: 680470 - DNA, 15 bp, Homo sapiens
gcatcagaggagctt

SEQ ID NO: 680471 - DNA, 15 bp, Homo sapiens
catcagaggagctta

SEQ ID NO: 680472 - DNA, 15 bp, Homo sapiens
atcagaggagcttaa

SEQ ID NO: 680473 - DNA, 15 bp, Homo sapiens
tcagaggagcttaaa

SEQ ID NO: 680474 - DNA, 15 bp, Homo sapiens
cagaggagcttaaaa

SEQ ID NO: 680475 - DNA, 15 bp, Homo sapiens
agaggagcttaaaaa

SEQ ID NO: 680476 - DNA, 15 bp, Homo sapiens
gaggagcttaaaaat

SEQ ID NO: 680477 - DNA, 15 bp, Homo sapiens
aggagcttaaaaata

SEQ ID NO: 680478 - DNA, 15 bp, Homo sapiens
ggagcttaaaaatat

SEQ ID NO: 680479 - DNA, 15 bp, Homo sapiens
gagcttaaaaatatt

SEQ ID NO: 680480 - DNA, 15 bp, Homo sapiens
agcttaaaaatattt

SEQ ID NO: 680481 - DNA, 15 bp, Homo sapiens
gcttaaaaatatttc

SEQ ID NO: 680482 - DNA, 15 bp, Homo sapiens
cttaaaaatatttct

SEQ ID NO: 680483 - DNA, 15 bp, Homo sapiens
ttaaaaatatttcta

SEQ ID NO: 680484 - DNA, 15 bp, Homo sapiens
taaaaatatttctac

SEQ ID NO: 680485 - DNA, 15 bp, Homo sapiens
aaaaatatttctacc

SEQ ID NO: 680486 - DNA, 15 bp, Homo sapiens
aaaatatttctacct

SEQ ID NO: 680487 - DNA, 15 bp, Homo sapiens
aaatatttctacctt

SEQ ID NO: 680488 - DNA, 15 bp, Homo sapiens
aatatttctaccttc

SEQ ID NO: 680489 - DNA, 15 bp, Homo sapiens
atatttctaccttct

SEQ ID NO: 680490 - DNA, 15 bp, Homo sapiens
tatttctaccttcta

SEQ ID NO: 680491 - DNA, 15 bp, Homo sapiens
atttctaccttctat

SEQ ID NO: 680492 - DNA, 15 bp, Homo sapiens
tttctaccttctatg

SEQ ID NO: 680493 - DNA, 15 bp, Homo sapiens
ttctaccttctatgg

SEQ ID NO: 680494 - DNA, 15 bp, Homo sapiens
tctaccttctatggc

SEQ ID NO: 680495 - DNA, 15 bp, Homo sapiens
ctaccttctatggca

SEQ ID NO: 680496 - DNA, 15 bp, Homo sapiens
taccttctatggcag

SEQ ID NO: 680497 - DNA, 15 bp, Homo sapiens
accttctatggcaga

SEQ ID NO: 680498 - DNA, 15 bp, Homo sapiens
ccttctatggcagaa

SEQ ID NO: 680499 - DNA, 15 bp, Homo sapiens
cttctatggcagaat

SEQ ID NO: 680500 - DNA, 15 bp, Homo sapiens
ttctatggcagaata

SEQ ID NO: 680501 - DNA, 15 bp, Homo sapiens
tctatggcagaataa

SEQ ID NO: 680502 - DNA, 15 bp, Homo sapiens
ctatggcagaataaa

SEQ ID NO: 680503 - DNA, 15 bp, Homo sapiens
tatggcagaataaat

SEQ ID NO: 680504 - DNA, 15 bp, Homo sapiens
atggcagaataaatt

SEQ ID NO: 680505 - DNA, 15 bp, Homo sapiens
tggcagaataaattt

SEQ ID NO: 680506 - DNA, 15 bp, Homo sapiens
ggcagaataaattta

SEQ ID NO: 680507 - DNA, 15 bp, Homo sapiens
gcagaataaatttag

SEQ ID NO: 680508 - DNA, 15 bp, Homo sapiens
cagaataaatttaga

SEQ ID NO: 680509 - DNA, 15 bp, Homo sapiens
agaataaatttagag

SEQ ID NO: 680510 - DNA, 15 bp, Homo sapiens
gaataaatttagaga

SEQ ID NO: 680511 - DNA, 15 bp, Homo sapiens
aataaatttagagag

SEQ ID NO: 680512 - DNA, 15 bp, Homo sapiens
ataaatttagagagc

SEQ ID NO: 680513 - DNA, 15 bp, Homo sapiens
taaatttagagagca

SEQ ID NO: 680514 - DNA, 15 bp, Homo sapiens
aaatttagagagcat

SEQ ID NO: 680515 - DNA, 15 bp, Homo sapiens
aatttagagagcatg

SEQ ID NO: 680516 - DNA, 15 bp, Homo sapiens
atttagagagcatga

SEQ ID NO: 680517 - DNA, 15 bp, Homo sapiens
tttagagagcatgat

SEQ ID NO: 680518 - DNA, 15 bp, Homo sapiens
ttagagagcatgatt

SEQ ID NO: 680519 - DNA, 15 bp, Homo sapiens
tagagagcatgattc

SEQ ID NO: 680520 - DNA, 15 bp, Homo sapiens
agagagcatgattct

SEQ ID NO: 680521 - DNA, 15 bp, Homo sapiens
gagagcatgattcta

SEQ ID NO: 680522 - DNA, 15 bp, Homo sapiens
agagcatgattctac

SEQ ID NO: 680523 - DNA, 15 bp, Homo sapiens
gagcatgattctact

SEQ ID NO: 680524 - DNA, 15 bp, Homo sapiens
agcatgattctacta

SEQ ID NO: 680525 - DNA, 15 bp, Homo sapiens
gcatgattctactaa

SEQ ID NO: 680526 - DNA, 15 bp, Homo sapiens
catgattctactaat

SEQ ID NO: 680527 - DNA, 15 bp, Homo sapiens
atgattctactaatt

SEQ ID NO: 680528 - DNA, 15 bp, Homo sapiens
tgattctactaattt

SEQ ID NO: 680529 - DNA, 15 bp, Homo sapiens
gattctactaatttc

SEQ ID NO: 680530 - DNA, 15 bp, Homo sapiens
attctactaatttct

SEQ ID NO: 680531 - DNA, 15 bp, Homo sapiens
ttctactaatttcta

SEQ ID NO: 680532 - DNA, 15 bp, Homo sapiens
tctactaatttctac

SEQ ID NO: 680533 - DNA, 15 bp, Homo sapiens
ctactaatttctaca

SEQ ID NO: 680534 - DNA, 15 bp, Homo sapiens
tactaatttctacat

SEQ ID NO: 680535 - DNA, 15 bp, Homo sapiens
actaatttctacatt

SEQ ID NO: 680536 - DNA, 15 bp, Homo sapiens
ctaatttctacattt

SEQ ID NO: 680537 - DNA, 15 bp, Homo sapiens
taatttctacattta

SEQ ID NO: 680538 - DNA, 15 bp, Homo sapiens
aatttctacatttaa

SEQ ID NO: 680539 - DNA, 15 bp, Homo sapiens
atttctacatttaac

SEQ ID NO: 680540 - DNA, 15 bp, Homo sapiens
tttctacatttaaca

SEQ ID NO: 680541 - DNA, 15 bp, Homo sapiens
ttctacatttaacaa

SEQ ID NO: 680542 - DNA, 15 bp, Homo sapiens
tctacatttaacaag

SEQ ID NO: 680543 - DNA, 15 bp, Homo sapiens
ctacatttaacaagt

SEQ ID NO: 680544 - DNA, 15 bp, Homo sapiens
tacatttaacaagtt

SEQ ID NO: 680545 - DNA, 15 bp, Homo sapiens
acatttaacaagttt

SEQ ID NO: 680546 - DNA, 15 bp, Homo sapiens
catttaacaagtttt

SEQ ID NO: 680547 - DNA, 15 bp, Homo sapiens
atttaacaagttttc

SEQ ID NO: 680548 - DNA, 15 bp, Homo sapiens
tttaacaagttttct

SEQ ID NO: 680549 - DNA, 15 bp, Homo sapiens
ttaacaagttttctt

SEQ ID NO: 680550 - DNA, 15 bp, Homo sapiens
taacaagttttctta

SEQ ID NO: 680551 - DNA, 15 bp, Homo sapiens
aacaagttttcttaa

SEQ ID NO: 680552 - DNA, 15 bp, Homo sapiens
acaagttttcttaac

SEQ ID NO: 680553 - DNA, 15 bp, Homo sapiens
caagttttcttaact

SEQ ID NO: 680554 - DNA, 15 bp, Homo sapiens
aagttttcttaactt

SEQ ID NO: 680555 - DNA, 15 bp, Homo sapiens
agttttcttaacttg

SEQ ID NO: 680556 - DNA, 15 bp, Homo sapiens
gttttcttaacttgt

SEQ ID NO: 680557 - DNA, 15 bp, Homo sapiens
ttttcttaacttgtt

SEQ ID NO: 680558 - DNA, 15 bp, Homo sapiens
tttcttaacttgtta

SEQ ID NO: 680559 - DNA, 15 bp, Homo sapiens
ttcttaacttgttaa

SEQ ID NO: 680560 - DNA, 15 bp, Homo sapiens
tcttaacttgttaaa

SEQ ID NO: 680561 - DNA, 15 bp, Homo sapiens
cttaacttgttaaag

SEQ ID NO: 680562 - DNA, 15 bp, Homo sapiens
ttaacttgttaaagg

SEQ ID NO: 680563 - DNA, 15 bp, Homo sapiens
taacttgttaaagga

SEQ ID NO: 680564 - DNA, 15 bp, Homo sapiens
aacttgttaaaggaa

SEQ ID NO: 680565 - DNA, 15 bp, Homo sapiens
acttgttaaaggaat

SEQ ID NO: 680566 - DNA, 15 bp, Homo sapiens
cttgttaaaggaatg

SEQ ID NO: 680567 - DNA, 15 bp, Homo sapiens
ttgttaaaggaatgt

SEQ ID NO: 680568 - DNA, 15 bp, Homo sapiens
tgttaaaggaatgtt

SEQ ID NO: 680569 - DNA, 15 bp, Homo sapiens
gttaaaggaatgtta

SEQ ID NO: 680570 - DNA, 15 bp, Homo sapiens
ttaaaggaatgttag

SEQ ID NO: 680571 - DNA, 15 bp, Homo sapiens
taaaggaatgttagc

SEQ ID NO: 680572 - DNA, 15 bp, Homo sapiens
aaaggaatgttagca

SEQ ID NO: 680573 - DNA, 15 bp, Homo sapiens
aaggaatgttagcaa

SEQ ID NO: 680574 - DNA, 15 bp, Homo sapiens
aggaatgttagcaag

SEQ ID NO: 680575 - DNA, 15 bp, Homo sapiens
ggaatgttagcaagt

SEQ ID NO: 680576 - DNA, 15 bp, Homo sapiens
gaatgttagcaagtc

SEQ ID NO: 680577 - DNA, 15 bp, Homo sapiens
aatgttagcaagtca

SEQ ID NO: 680578 - DNA, 15 bp, Homo sapiens
atgttagcaagtcaa

SEQ ID NO: 680579 - DNA, 15 bp, Homo sapiens
tgttagcaagtcaac

SEQ ID NO: 680580 - DNA, 15 bp, Homo sapiens
gttagcaagtcaaca

SEQ ID NO: 680581 - DNA, 15 bp, Homo sapiens
ttagcaagtcaacat

SEQ ID NO: 680582 - DNA, 15 bp, Homo sapiens
tagcaagtcaacatt

SEQ ID NO: 680583 - DNA, 15 bp, Homo sapiens
agcaagtcaacattc

SEQ ID NO: 680584 - DNA, 15 bp, Homo sapiens
gcaagtcaacattcc

SEQ ID NO: 680585 - DNA, 15 bp, Homo sapiens
caagtcaacattcct

SEQ ID NO: 680586 - DNA, 15 bp, Homo sapiens
aagtcaacattcctt

SEQ ID NO: 680587 - DNA, 15 bp, Homo sapiens
agtcaacattccttc

SEQ ID NO: 680588 - DNA, 15 bp, Homo sapiens
gtcaacattccttcc

SEQ ID NO: 680589 - DNA, 15 bp, Homo sapiens
tcaacattccttccc

SEQ ID NO: 680590 - DNA, 15 bp, Homo sapiens
caacattccttccca

SEQ ID NO: 680591 - DNA, 15 bp, Homo sapiens
aacattccttcccat

SEQ ID NO: 680592 - DNA, 15 bp, Homo sapiens
acattccttcccatc

SEQ ID NO: 680593 - DNA, 15 bp, Homo sapiens
cattccttcccatct

SEQ ID NO: 680594 - DNA, 15 bp, Homo sapiens
attccttcccatctc

SEQ ID NO: 680595 - DNA, 15 bp, Homo sapiens
ttccttcccatctca

SEQ ID NO: 680596 - DNA, 15 bp, Homo sapiens
tccttcccatctcat

SEQ ID NO: 680597 - DNA, 15 bp, Homo sapiens
ccttcccatctcata

SEQ ID NO: 680598 - DNA, 15 bp, Homo sapiens
cttcccatctcatat

SEQ ID NO: 680599 - DNA, 15 bp, Homo sapiens
ttcccatctcatatt

SEQ ID NO: 680600 - DNA, 15 bp, Homo sapiens
tcccatctcatatta

SEQ ID NO: 680601 - DNA, 15 bp, Homo sapiens
cccatctcatattac

SEQ ID NO: 680602 - DNA, 15 bp, Homo sapiens
ccatctcatattacc

SEQ ID NO: 680603 - DNA, 15 bp, Homo sapiens
catctcatattacca

SEQ ID NO: 680604 - DNA, 15 bp, Homo sapiens
atctcatattaccaa

SEQ ID NO: 680605 - DNA, 15 bp, Homo sapiens
tctcatattaccaac

SEQ ID NO: 680606 - DNA, 15 bp, Homo sapiens
ctcatattaccaact

SEQ ID NO: 680607 - DNA, 15 bp, Homo sapiens
tcatattaccaactc

SEQ ID NO: 680608 - DNA, 15 bp, Homo sapiens
catattaccaactca

SEQ ID NO: 680609 - DNA, 15 bp, Homo sapiens
atattaccaactcac

SEQ ID NO: 680610 - DNA, 15 bp, Homo sapiens
tattaccaactcact

SEQ ID NO: 680611 - DNA, 15 bp, Homo sapiens
attaccaactcactc

SEQ ID NO: 680612 - DNA, 15 bp, Homo sapiens
ttaccaactcactcc

SEQ ID NO: 680613 - DNA, 15 bp, Homo sapiens
taccaactcactccc

SEQ ID NO: 680614 - DNA, 15 bp, Homo sapiens
accaactcactccca

SEQ ID NO: 680615 - DNA, 15 bp, Homo sapiens
ccaactcactcccag

SEQ ID NO: 680616 - DNA, 15 bp, Homo sapiens
caactcactcccagc

SEQ ID NO: 680617 - DNA, 15 bp, Homo sapiens
aactcactcccagca

SEQ ID NO: 680618 - DNA, 15 bp, Homo sapiens
actcactcccagcac

SEQ ID NO: 680619 - DNA, 15 bp, Homo sapiens
ctcactcccagcact

SEQ ID NO: 680620 - DNA, 15 bp, Homo sapiens
tcactcccagcactc

SEQ ID NO: 680621 - DNA, 15 bp, Homo sapiens
cactcccagcactca

SEQ ID NO: 680622 - DNA, 15 bp, Homo sapiens
actcccagcactcag

SEQ ID NO: 680623 - DNA, 15 bp, Homo sapiens
ctcccagcactcagt

SEQ ID NO: 680624 - DNA, 15 bp, Homo sapiens
tcccagcactcagtt

SEQ ID NO: 680625 - DNA, 15 bp, Homo sapiens
cccagcactcagttt

SEQ ID NO: 680626 - DNA, 15 bp, Homo sapiens
ccagcactcagttta

SEQ ID NO: 680627 - DNA, 15 bp, Homo sapiens
cagcactcagtttaa

SEQ ID NO: 680628 - DNA, 15 bp, Homo sapiens
agcactcagtttaat

SEQ ID NO: 680629 - DNA, 15 bp, Homo sapiens
gcactcagtttaatg

SEQ ID NO: 680630 - DNA, 15 bp, Homo sapiens
cactcagtttaatga

SEQ ID NO: 680631 - DNA, 15 bp, Homo sapiens
actcagtttaatgat

SEQ ID NO: 680632 - DNA, 15 bp, Homo sapiens
ctcagtttaatgata

SEQ ID NO: 680633 - DNA, 15 bp, Homo sapiens
tcagtttaatgatat

SEQ ID NO: 680634 - DNA, 15 bp, Homo sapiens
cagtttaatgatatg

SEQ ID NO: 680635 - DNA, 15 bp, Homo sapiens
agtttaatgatatgt

SEQ ID NO: 680636 - DNA, 15 bp, Homo sapiens
gtttaatgatatgtt

SEQ ID NO: 680637 - DNA, 15 bp, Homo sapiens
tttaatgatatgttt

SEQ ID NO: 680638 - DNA, 15 bp, Homo sapiens
ttaatgatatgtttt

SEQ ID NO: 680639 - DNA, 15 bp, Homo sapiens
taatgatatgttttg

SEQ ID NO: 680640 - DNA, 15 bp, Homo sapiens
aatgatatgttttgg

SEQ ID NO: 680641 - DNA, 15 bp, Homo sapiens
atgatatgttttggt

SEQ ID NO: 680642 - DNA, 15 bp, Homo sapiens
tgatatgttttggta

SEQ ID NO: 680643 - DNA, 15 bp, Homo sapiens
gatatgttttggtaa

SEQ ID NO: 680644 - DNA, 15 bp, Homo sapiens
atatgttttggtaag

SEQ ID NO: 680645 - DNA, 15 bp, Homo sapiens
tatgttttggtaagt

SEQ ID NO: 680646 - DNA, 15 bp, Homo sapiens
atgttttggtaagtg

SEQ ID NO: 680647 - DNA, 15 bp, Homo sapiens
tgttttggtaagtgc

SEQ ID NO: 680648 - DNA, 15 bp, Homo sapiens
gttttggtaagtgct

SEQ ID NO: 680649 - DNA, 15 bp, Homo sapiens
ttttggtaagtgctt

SEQ ID NO: 680650 - DNA, 15 bp, Homo sapiens
tttggtaagtgctta

SEQ ID NO: 680651 - DNA, 15 bp, Homo sapiens
ttggtaagtgcttaa

SEQ ID NO: 680652 - DNA, 15 bp, Homo sapiens
tggtaagtgcttaat

SEQ ID NO: 680653 - DNA, 15 bp, Homo sapiens
ggtaagtgcttaata

SEQ ID NO: 680654 - DNA, 15 bp, Homo sapiens
gtaagtgcttaatag

SEQ ID NO: 680655 - DNA, 15 bp, Homo sapiens
taagtgcttaataga

SEQ ID NO: 680656 - DNA, 15 bp, Homo sapiens
aagtgcttaatagat

SEQ ID NO: 680657 - DNA, 15 bp, Homo sapiens
agtgcttaatagatg

SEQ ID NO: 680658 - DNA, 15 bp, Homo sapiens
gtgcttaatagatga

SEQ ID NO: 680659 - DNA, 15 bp, Homo sapiens
tgcttaatagatgat

SEQ ID NO: 680660 - DNA, 15 bp, Homo sapiens
gcttaatagatgatt

SEQ ID NO: 680661 - DNA, 15 bp, Homo sapiens
cttaatagatgattc

SEQ ID NO: 680662 - DNA, 15 bp, Homo sapiens
ttaatagatgattca

SEQ ID NO: 680663 - DNA, 15 bp, Homo sapiens
taatagatgattcat

SEQ ID NO: 680664 - DNA, 15 bp, Homo sapiens
aatagatgattcatc

SEQ ID NO: 680665 - DNA, 15 bp, Homo sapiens
atagatgattcatct

SEQ ID NO: 680666 - DNA, 15 bp, Homo sapiens
tagatgattcatctc

SEQ ID NO: 680667 - DNA, 15 bp, Homo sapiens
agatgattcatctct

SEQ ID NO: 680668 - DNA, 15 bp, Homo sapiens
gatgattcatctcta

SEQ ID NO: 680669 - DNA, 15 bp, Homo sapiens
atgattcatctctaa

SEQ ID NO: 680670 - DNA, 15 bp, Homo sapiens
tgattcatctctaaa

SEQ ID NO: 680671 - DNA, 15 bp, Homo sapiens
gattcatctctaaag

SEQ ID NO: 680672 - DNA, 15 bp, Homo sapiens
attcatctctaaaga

SEQ ID NO: 680673 - DNA, 15 bp, Homo sapiens
ttcatctctaaagat

SEQ ID NO: 680674 - DNA, 15 bp, Homo sapiens
tcatctctaaagatg

SEQ ID NO: 680675 - DNA, 15 bp, Homo sapiens
catctctaaagatga

SEQ ID NO: 680676 - DNA, 15 bp, Homo sapiens
atctctaaagatgag

SEQ ID NO: 680677 - DNA, 15 bp, Homo sapiens
tctctaaagatgagt

SEQ ID NO: 680678 - DNA, 15 bp, Homo sapiens
ctctaaagatgagta

SEQ ID NO: 680679 - DNA, 15 bp, Homo sapiens
tctaaagatgagtag

SEQ ID NO: 680680 - DNA, 15 bp, Homo sapiens
ctaaagatgagtaga

SEQ ID NO: 680681 - DNA, 15 bp, Homo sapiens
taaagatgagtagag

SEQ ID NO: 680682 - DNA, 15 bp, Homo sapiens
aaagatgagtagagt

SEQ ID NO: 680683 - DNA, 15 bp, Homo sapiens
aagatgagtagagtt

SEQ ID NO: 680684 - DNA, 15 bp, Homo sapiens
agatgagtagagttc

SEQ ID NO: 680685 - DNA, 15 bp, Homo sapiens
gatgagtagagttca

SEQ ID NO: 680686 - DNA, 15 bp, Homo sapiens
atgagtagagttcat

SEQ ID NO: 680687 - DNA, 15 bp, Homo sapiens
tgagtagagttcatc

SEQ ID NO: 680688 - DNA, 15 bp, Homo sapiens
gagtagagttcatca

SEQ ID NO: 680689 - DNA, 15 bp, Homo sapiens
agtagagttcatcag

SEQ ID NO: 680690 - DNA, 15 bp, Homo sapiens
gtagagttcatcagc

SEQ ID NO: 680691 - DNA, 15 bp, Homo sapiens
tagagttcatcagct

SEQ ID NO: 680692 - DNA, 15 bp, Homo sapiens
agagttcatcagctg

SEQ ID NO: 680693 - DNA, 15 bp, Homo sapiens
gagttcatcagctgt

SEQ ID NO: 680694 - DNA, 15 bp, Homo sapiens
agttcatcagctgta

SEQ ID NO: 680695 - DNA, 15 bp, Homo sapiens
gttcatcagctgtat

SEQ ID NO: 680696 - DNA, 15 bp, Homo sapiens
ttcatcagctgtatc

SEQ ID NO: 680697 - DNA, 15 bp, Homo sapiens
tcatcagctgtatca

SEQ ID NO: 680698 - DNA, 15 bp, Homo sapiens
catcagctgtatcat

SEQ ID NO: 680699 - DNA, 15 bp, Homo sapiens
atcagctgtatcata

SEQ ID NO: 680700 - DNA, 15 bp, Homo sapiens
tcagctgtatcatat

SEQ ID NO: 680701 - DNA, 15 bp, Homo sapiens
cagctgtatcatatc

SEQ ID NO: 680702 - DNA, 15 bp, Homo sapiens
agctgtatcatatca

SEQ ID NO: 680703 - DNA, 15 bp, Homo sapiens
gctgtatcatatcat

SEQ ID NO: 680704 - DNA, 15 bp, Homo sapiens
ctgtatcatatcatg

SEQ ID NO: 680705 - DNA, 15 bp, Homo sapiens
tgtatcatatcatga

SEQ ID NO: 680706 - DNA, 15 bp, Homo sapiens
gtatcatatcatgaa

SEQ ID NO: 680707 - DNA, 15 bp, Homo sapiens
tatcatatcatgaaa

SEQ ID NO: 680708 - DNA, 15 bp, Homo sapiens
atcatatcatgaaaa

SEQ ID NO: 680709 - DNA, 15 bp, Homo sapiens
tcatatcatgaaaag

SEQ ID NO: 680710 - DNA, 15 bp, Homo sapiens
catatcatgaaaagc

SEQ ID NO: 680711 - DNA, 15 bp, Homo sapiens
atatcatgaaaagca

SEQ ID NO: 680712 - DNA, 15 bp, Homo sapiens
tatcatgaaaagcac

SEQ ID NO: 680713 - DNA, 15 bp, Homo sapiens
atcatgaaaagcaca

SEQ ID NO: 680714 - DNA, 15 bp, Homo sapiens
tcatgaaaagcacaa

SEQ ID NO: 680715 - DNA, 15 bp, Homo sapiens
catgaaaagcacaaa

SEQ ID NO: 680716 - DNA, 15 bp, Homo sapiens
atgaaaagcacaaaa

SEQ ID NO: 680717 - DNA, 15 bp, Homo sapiens
tgaaaagcacaaaaa

SEQ ID NO: 680718 - DNA, 15 bp, Homo sapiens
gaaaagcacaaaaag

SEQ ID NO: 680719 - DNA, 15 bp, Homo sapiens
aaaagcacaaaaagt

SEQ ID NO: 680720 - DNA, 15 bp, Homo sapiens
aaagcacaaaaagtc

SEQ ID NO: 680721 - DNA, 15 bp, Homo sapiens
aagcacaaaaagtca

SEQ ID NO: 680722 - DNA, 15 bp, Homo sapiens
agcacaaaaagtcag

SEQ ID NO: 680723 - DNA, 15 bp, Homo sapiens
gcacaaaaagtcagc

SEQ ID NO: 680724 - DNA, 15 bp, Homo sapiens
cacaaaaagtcagct

SEQ ID NO: 680725 - DNA, 15 bp, Homo sapiens
acaaaaagtcagctg

SEQ ID NO: 680726 - DNA, 15 bp, Homo sapiens
caaaaagtcagctga

SEQ ID NO: 680727 - DNA, 15 bp, Homo sapiens
aaaaagtcagctgaa

SEQ ID NO: 680728 - DNA, 15 bp, Homo sapiens
aaaagtcagctgaac

SEQ ID NO: 680729 - DNA, 15 bp, Homo sapiens
aaagtcagctgaact

SEQ ID NO: 680730 - DNA, 15 bp, Homo sapiens
aagtcagctgaacta

SEQ ID NO: 680731 - DNA, 15 bp, Homo sapiens
agtcagctgaactag

SEQ ID NO: 680732 - DNA, 15 bp, Homo sapiens
gtcagctgaactagc

SEQ ID NO: 680733 - DNA, 15 bp, Homo sapiens
tcagctgaactagct

SEQ ID NO: 680734 - DNA, 15 bp, Homo sapiens
cagctgaactagctt

SEQ ID NO: 680735 - DNA, 15 bp, Homo sapiens
agctgaactagcttt

SEQ ID NO: 680736 - DNA, 15 bp, Homo sapiens
gctgaactagctttt

SEQ ID NO: 680737 - DNA, 15 bp, Homo sapiens
ctgaactagcttttc

SEQ ID NO: 680738 - DNA, 15 bp, Homo sapiens
tgaactagcttttcc

SEQ ID NO: 680739 - DNA, 15 bp, Homo sapiens
gaactagcttttccg

SEQ ID NO: 680740 - DNA, 15 bp, Homo sapiens
aactagcttttccgc

SEQ ID NO: 680741 - DNA, 15 bp, Homo sapiens
actagcttttccgca

SEQ ID NO: 680742 - DNA, 15 bp, Homo sapiens
ctagcttttccgcat

SEQ ID NO: 680743 - DNA, 15 bp, Homo sapiens
tagcttttccgcatc

SEQ ID NO: 680744 - DNA, 15 bp, Homo sapiens
agcttttccgcatca

SEQ ID NO: 680745 - DNA, 15 bp, Homo sapiens
gcttttccgcatcag

SEQ ID NO: 680746 - DNA, 15 bp, Homo sapiens
cttttccgcatcagt

SEQ ID NO: 680747 - DNA, 15 bp, Homo sapiens
ttttccgcatcagtc

SEQ ID NO: 680748 - DNA, 15 bp, Homo sapiens
tttccgcatcagtct

SEQ ID NO: 680749 - DNA, 15 bp, Homo sapiens
ttccgcatcagtctc

SEQ ID NO: 680750 - DNA, 15 bp, Homo sapiens
tccgcatcagtctcg

SEQ ID NO: 680751 - DNA, 15 bp, Homo sapiens
ccgcatcagtctcgg

SEQ ID NO: 680752 - DNA, 15 bp, Homo sapiens
cgcatcagtctcggg

SEQ ID NO: 680753 - DNA, 15 bp, Homo sapiens
gcatcagtctcggga

SEQ ID NO: 680754 - DNA, 15 bp, Homo sapiens
catcagtctcgggac

SEQ ID NO: 680755 - DNA, 15 bp, Homo sapiens
atcagtctcgggaca

SEQ ID NO: 680756 - DNA, 15 bp, Homo sapiens
tcagtctcgggacag

SEQ ID NO: 680757 - DNA, 15 bp, Homo sapiens
cagtctcgggacagg

SEQ ID NO: 680758 - DNA, 15 bp, Homo sapiens
agtctcgggacagga

SEQ ID NO: 680759 - DNA, 15 bp, Homo sapiens
gtctcgggacaggat

SEQ ID NO: 680760 - DNA, 15 bp, Homo sapiens
tctcgggacaggatt

SEQ ID NO: 680761 - DNA, 15 bp, Homo sapiens
ctcgggacaggattt

SEQ ID NO: 680762 - DNA, 15 bp, Homo sapiens
tcgggacaggatttc

SEQ ID NO: 680763 - DNA, 15 bp, Homo sapiens
cgggacaggatttcc

SEQ ID NO: 680764 - DNA, 15 bp, Homo sapiens
gggacaggatttcca

SEQ ID NO: 680765 - DNA, 15 bp, Homo sapiens
ggacaggatttccag

SEQ ID NO: 680766 - DNA, 15 bp, Homo sapiens
gacaggatttccagg

SEQ ID NO: 680767 - DNA, 15 bp, Homo sapiens
acaggatttccaggc

SEQ ID NO: 680768 - DNA, 15 bp, Homo sapiens
caggatttccaggct

SEQ ID NO: 680769 - DNA, 15 bp, Homo sapiens
aggatttccaggctg

SEQ ID NO: 680770 - DNA, 15 bp, Homo sapiens
ggatttccaggctga

SEQ ID NO: 680771 - DNA, 15 bp, Homo sapiens
gatttccaggctgaa

SEQ ID NO: 680772 - DNA, 15 bp, Homo sapiens
atttccaggctgaac

SEQ ID NO: 680773 - DNA, 15 bp, Homo sapiens
tttccaggctgaaca

SEQ ID NO: 680774 - DNA, 15 bp, Homo sapiens
ttccaggctgaacag

SEQ ID NO: 680775 - DNA, 15 bp, Homo sapiens
tccaggctgaacagg

SEQ ID NO: 680776 - DNA, 15 bp, Homo sapiens
ccaggctgaacaggc

SEQ ID NO: 680777 - DNA, 15 bp, Homo sapiens
caggctgaacaggcc

SEQ ID NO: 680778 - DNA, 15 bp, Homo sapiens
aggctgaacaggcca

SEQ ID NO: 680779 - DNA, 15 bp, Homo sapiens
ggctgaacaggccac

SEQ ID NO: 680780 - DNA, 15 bp, Homo sapiens
gctgaacaggccaca

SEQ ID NO: 680781 - DNA, 15 bp, Homo sapiens
ctgaacaggccacaa

SEQ ID NO: 680782 - DNA, 15 bp, Homo sapiens
tgaacaggccacaac

SEQ ID NO: 680783 - DNA, 15 bp, Homo sapiens
gaacaggccacaaca

SEQ ID NO: 680784 - DNA, 15 bp, Homo sapiens
aacaggccacaacaa

SEQ ID NO: 680785 - DNA, 15 bp, Homo sapiens
acaggccacaacaaa

SEQ ID NO: 680786 - DNA, 15 bp, Homo sapiens
caggccacaacaaac

SEQ ID NO: 680787 - DNA, 15 bp, Homo sapiens
aggccacaacaaacc

SEQ ID NO: 680788 - DNA, 15 bp, Homo sapiens
ggccacaacaaacct

SEQ ID NO: 680789 - DNA, 15 bp, Homo sapiens
gccacaacaaacctg

SEQ ID NO: 680790 - DNA, 15 bp, Homo sapiens
ccacaacaaacctgt

SEQ ID NO: 680791 - DNA, 15 bp, Homo sapiens
cacaacaaacctgtg

SEQ ID NO: 680792 - DNA, 15 bp, Homo sapiens
acaacaaacctgtga

SEQ ID NO: 680793 - DNA, 15 bp, Homo sapiens
caacaaacctgtgaa

SEQ ID NO: 680794 - DNA, 15 bp, Homo sapiens
aacaaacctgtgaag

SEQ ID NO: 680795 - DNA, 15 bp, Homo sapiens
acaaacctgtgaagc

SEQ ID NO: 680796 - DNA, 15 bp, Homo sapiens
caaacctgtgaagca

SEQ ID NO: 680797 - DNA, 15 bp, Homo sapiens
aaacctgtgaagcat

SEQ ID NO: 680798 - DNA, 15 bp, Homo sapiens
aacctgtgaagcata

SEQ ID NO: 680799 - DNA, 15 bp, Homo sapiens
acctgtgaagcataa

SEQ ID NO: 680800 - DNA, 15 bp, Homo sapiens
cctgtgaagcataaa

SEQ ID NO: 680801 - DNA, 15 bp, Homo sapiens
ctgtgaagcataaat

SEQ ID NO: 680802 - DNA, 15 bp, Homo sapiens
tgtgaagcataaata

SEQ ID NO: 680803 - DNA, 15 bp, Homo sapiens
gtgaagcataaataa

SEQ ID NO: 680804 - DNA, 15 bp, Homo sapiens
tgaagcataaataat

SEQ ID NO: 680805 - DNA, 15 bp, Homo sapiens
gaagcataaataatg

SEQ ID NO: 680806 - DNA, 15 bp, Homo sapiens
aagcataaataatga

SEQ ID NO: 680807 - DNA, 15 bp, Homo sapiens
agcataaataatgat

SEQ ID NO: 680808 - DNA, 15 bp, Homo sapiens
gcataaataatgatt

SEQ ID NO: 680809 - DNA, 15 bp, Homo sapiens
cataaataatgatta

SEQ ID NO: 680810 - DNA, 15 bp, Homo sapiens
ataaataatgattaa

SEQ ID NO: 680811 - DNA, 15 bp, Homo sapiens
taaataatgattaat

SEQ ID NO: 680812 - DNA, 15 bp, Homo sapiens
aaataatgattaatg

SEQ ID NO: 680813 - DNA, 15 bp, Homo sapiens
aataatgattaatga

SEQ ID NO: 680814 - DNA, 15 bp, Homo sapiens
ataatgattaatgat

SEQ ID NO: 680815 - DNA, 15 bp, Homo sapiens
taatgattaatgatt

SEQ ID NO: 680816 - DNA, 15 bp, Homo sapiens
aatgattaatgatta

SEQ ID NO: 680817 - DNA, 15 bp, Homo sapiens
atgattaatgattac

SEQ ID NO: 680818 - DNA, 15 bp, Homo sapiens
tgattaatgattaca

SEQ ID NO: 680819 - DNA, 15 bp, Homo sapiens
gattaatgattacac

SEQ ID NO: 680820 - DNA, 15 bp, Homo sapiens
attaatgattacaca

SEQ ID NO: 680821 - DNA, 15 bp, Homo sapiens
ttaatgattacacaa

SEQ ID NO: 680822 - DNA, 15 bp, Homo sapiens
taatgattacacaaa

SEQ ID NO: 680823 - DNA, 15 bp, Homo sapiens
aatgattacacaaaa

SEQ ID NO: 680824 - DNA, 15 bp, Homo sapiens
atgattacacaaaag

SEQ ID NO: 680825 - DNA, 15 bp, Homo sapiens
tgattacacaaaagg

SEQ ID NO: 680826 - DNA, 15 bp, Homo sapiens
gattacacaaaaggc

SEQ ID NO: 680827 - DNA, 15 bp, Homo sapiens
attacacaaaaggct

SEQ ID NO: 680828 - DNA, 15 bp, Homo sapiens
ttacacaaaaggctc

SEQ ID NO: 680829 - DNA, 15 bp, Homo sapiens
tacacaaaaggctcc

SEQ ID NO: 680830 - DNA, 15 bp, Homo sapiens
acacaaaaggctcca

SEQ ID NO: 680831 - DNA, 15 bp, Homo sapiens
cacaaaaggctccaa

SEQ ID NO: 680832 - DNA, 15 bp, Homo sapiens
acaaaaggctccaaa

SEQ ID NO: 680833 - DNA, 15 bp, Homo sapiens
caaaaggctccaaat

SEQ ID NO: 680834 - DNA, 15 bp, Homo sapiens
aaaaggctccaaata

SEQ ID NO: 680835 - DNA, 15 bp, Homo sapiens
aaaggctccaaatag

SEQ ID NO: 680836 - DNA, 15 bp, Homo sapiens
aaggctccaaatagt

SEQ ID NO: 680837 - DNA, 15 bp, Homo sapiens
aggctccaaatagtg

SEQ ID NO: 680838 - DNA, 15 bp, Homo sapiens
ggctccaaatagtga

SEQ ID NO: 680839 - DNA, 15 bp, Homo sapiens
gctccaaatagtgat

SEQ ID NO: 680840 - DNA, 15 bp, Homo sapiens
ctccaaatagtgatg

SEQ ID NO: 680841 - DNA, 15 bp, Homo sapiens
tccaaatagtgatgg

SEQ ID NO: 680842 - DNA, 15 bp, Homo sapiens
ccaaatagtgatggt

SEQ ID NO: 680843 - DNA, 15 bp, Homo sapiens
caaatagtgatggtg

SEQ ID NO: 680844 - DNA, 15 bp, Homo sapiens
aaatagtgatggtga

SEQ ID NO: 680845 - DNA, 15 bp, Homo sapiens
aatagtgatggtgaa

SEQ ID NO: 680846 - DNA, 15 bp, Homo sapiens
atagtgatggtgaat

SEQ ID NO: 680847 - DNA, 15 bp, Homo sapiens
tagtgatggtgaata

SEQ ID NO: 680848 - DNA, 15 bp, Homo sapiens
agtgatggtgaatac

SEQ ID NO: 680849 - DNA, 15 bp, Homo sapiens
gtgatggtgaataca

SEQ ID NO: 680850 - DNA, 15 bp, Homo sapiens
tgatggtgaatacaa

SEQ ID NO: 680851 - DNA, 15 bp, Homo sapiens
gatggtgaatacaac

SEQ ID NO: 680852 - DNA, 15 bp, Homo sapiens
atggtgaatacaacc

SEQ ID NO: 680853 - DNA, 15 bp, Homo sapiens
tggtgaatacaacca

SEQ ID NO: 680854 - DNA, 15 bp, Homo sapiens
ggtgaatacaaccag

SEQ ID NO: 680855 - DNA, 15 bp, Homo sapiens
gtgaatacaaccagg

SEQ ID NO: 680856 - DNA, 15 bp, Homo sapiens
tgaatacaaccagga

SEQ ID NO: 680857 - DNA, 15 bp, Homo sapiens
gaatacaaccaggac

SEQ ID NO: 680858 - DNA, 15 bp, Homo sapiens
aatacaaccaggact

SEQ ID NO: 680859 - DNA, 15 bp, Homo sapiens
atacaaccaggactt

SEQ ID NO: 680860 - DNA, 15 bp, Homo sapiens
tacaaccaggacttt

SEQ ID NO: 680861 - DNA, 15 bp, Homo sapiens
acaaccaggacttta

SEQ ID NO: 680862 - DNA, 15 bp, Homo sapiens
caaccaggactttat

SEQ ID NO: 680863 - DNA, 15 bp, Homo sapiens
aaccaggactttatt

SEQ ID NO: 680864 - DNA, 15 bp, Homo sapiens
accaggactttattt

SEQ ID NO: 680865 - DNA, 15 bp, Homo sapiens
ccaggactttatttc

SEQ ID NO: 680866 - DNA, 15 bp, Homo sapiens
caggactttatttca

SEQ ID NO: 680867 - DNA, 15 bp, Homo sapiens
aggactttatttcat

SEQ ID NO: 680868 - DNA, 15 bp, Homo sapiens
ggactttatttcatc

SEQ ID NO: 680869 - DNA, 15 bp, Homo sapiens
gactttatttcatct

SEQ ID NO: 680870 - DNA, 15 bp, Homo sapiens
actttatttcatctg

SEQ ID NO: 680871 - DNA, 15 bp, Homo sapiens
ctttatttcatctgg

SEQ ID NO: 680872 - DNA, 15 bp, Homo sapiens
tttatttcatctgga

SEQ ID NO: 680873 - DNA, 15 bp, Homo sapiens
ttatttcatctggat

SEQ ID NO: 680874 - DNA, 15 bp, Homo sapiens
tatttcatctggata

SEQ ID NO: 680875 - DNA, 15 bp, Homo sapiens
atttcatctggatat

SEQ ID NO: 680876 - DNA, 15 bp, Homo sapiens
tttcatctggatatt

SEQ ID NO: 680877 - DNA, 15 bp, Homo sapiens
ttcatctggatattc

SEQ ID NO: 680878 - DNA, 15 bp, Homo sapiens
tcatctggatattca

SEQ ID NO: 680879 - DNA, 15 bp, Homo sapiens
catctggatattcat

SEQ ID NO: 680880 - DNA, 15 bp, Homo sapiens
atctggatattcata

SEQ ID NO: 680881 - DNA, 15 bp, Homo sapiens
tctggatattcatac

SEQ ID NO: 680882 - DNA, 15 bp, Homo sapiens
ctggatattcataca

SEQ ID NO: 680883 - DNA, 15 bp, Homo sapiens
tggatattcatacat

SEQ ID NO: 680884 - DNA, 15 bp, Homo sapiens
ggatattcatacatg

SEQ ID NO: 680885 - DNA, 15 bp, Homo sapiens
gatattcatacatga

SEQ ID NO: 680886 - DNA, 15 bp, Homo sapiens
atattcatacatgaa

SEQ ID NO: 680887 - DNA, 15 bp, Homo sapiens
tattcatacatgaaa

SEQ ID NO: 680888 - DNA, 15 bp, Homo sapiens
attcatacatgaaat

SEQ ID NO: 680889 - DNA, 15 bp, Homo sapiens
ttcatacatgaaatg

SEQ ID NO: 680890 - DNA, 15 bp, Homo sapiens
tcatacatgaaatgt

SEQ ID NO: 680891 - DNA, 15 bp, Homo sapiens
catacatgaaatgtg

SEQ ID NO: 680892 - DNA, 15 bp, Homo sapiens
atacatgaaatgtga

SEQ ID NO: 680893 - DNA, 15 bp, Homo sapiens
tacatgaaatgtgaa

SEQ ID NO: 680894 - DNA, 15 bp, Homo sapiens
acatgaaatgtgaag

SEQ ID NO: 680895 - DNA, 15 bp, Homo sapiens
catgaaatgtgaagt

SEQ ID NO: 680896 - DNA, 15 bp, Homo sapiens
atgaaatgtgaagtc

SEQ ID NO: 680897 - DNA, 15 bp, Homo sapiens
tgaaatgtgaagtct

SEQ ID NO: 680898 - DNA, 15 bp, Homo sapiens
gaaatgtgaagtctt

SEQ ID NO: 680899 - DNA, 15 bp, Homo sapiens
aaatgtgaagtcttg

SEQ ID NO: 680900 - DNA, 15 bp, Homo sapiens
aatgtgaagtcttgc

SEQ ID NO: 680901 - DNA, 15 bp, Homo sapiens
atgtgaagtcttgct

SEQ ID NO: 680902 - DNA, 15 bp, Homo sapiens
tgtgaagtcttgctg

SEQ ID NO: 680903 - DNA, 15 bp, Homo sapiens
gtgaagtcttgctga

SEQ ID NO: 680904 - DNA, 15 bp, Homo sapiens
tgaagtcttgctgac

SEQ ID NO: 680905 - DNA, 15 bp, Homo sapiens
gaagtcttgctgaca

SEQ ID NO: 680906 - DNA, 15 bp, Homo sapiens
aagtcttgctgacat

SEQ ID NO: 680907 - DNA, 15 bp, Homo sapiens
agtcttgctgacatt

SEQ ID NO: 680908 - DNA, 15 bp, Homo sapiens
gtcttgctgacatta

SEQ ID NO: 680909 - DNA, 15 bp, Homo sapiens
tcttgctgacattag

SEQ ID NO: 680910 - DNA, 15 bp, Homo sapiens
cttgctgacattagg

SEQ ID NO: 680911 - DNA, 15 bp, Homo sapiens
ttgctgacattaggt

SEQ ID NO: 680912 - DNA, 15 bp, Homo sapiens
tgctgacattaggta

SEQ ID NO: 680913 - DNA, 15 bp, Homo sapiens
gctgacattaggtaa

SEQ ID NO: 680914 - DNA, 15 bp, Homo sapiens
ctgacattaggtaaa

SEQ ID NO: 680915 - DNA, 15 bp, Homo sapiens
tgacattaggtaaat

SEQ ID NO: 680916 - DNA, 15 bp, Homo sapiens
gacattaggtaaatg

SEQ ID NO: 680917 - DNA, 15 bp, Homo sapiens
acattaggtaaatgt

SEQ ID NO: 680918 - DNA, 15 bp, Homo sapiens
cattaggtaaatgta

SEQ ID NO: 680919 - DNA, 15 bp, Homo sapiens
attaggtaaatgtaa

SEQ ID NO: 680920 - DNA, 15 bp, Homo sapiens
ttaggtaaatgtaac

SEQ ID NO: 680921 - DNA, 15 bp, Homo sapiens
taggtaaatgtaacc

SEQ ID NO: 680922 - DNA, 15 bp, Homo sapiens
aggtaaatgtaacct

SEQ ID NO: 680923 - DNA, 15 bp, Homo sapiens
ggtaaatgtaacctg

SEQ ID NO: 680924 - DNA, 15 bp, Homo sapiens
gtaaatgtaacctga

SEQ ID NO: 680925 - DNA, 15 bp, Homo sapiens
taaatgtaacctgac

SEQ ID NO: 680926 - DNA, 15 bp, Homo sapiens
aaatgtaacctgaca

SEQ ID NO: 680927 - DNA, 15 bp, Homo sapiens
aatgtaacctgacac

SEQ ID NO: 680928 - DNA, 15 bp, Homo sapiens
atgtaacctgacaca

SEQ ID NO: 680929 - DNA, 15 bp, Homo sapiens
tgtaacctgacacaa

SEQ ID NO: 680930 - DNA, 15 bp, Homo sapiens
gtaacctgacacaat

SEQ ID NO: 680931 - DNA, 15 bp, Homo sapiens
taacctgacacaatt

SEQ ID NO: 680932 - DNA, 15 bp, Homo sapiens
aacctgacacaattg

SEQ ID NO: 680933 - DNA, 15 bp, Homo sapiens
acctgacacaattga

SEQ ID NO: 680934 - DNA, 15 bp, Homo sapiens
cctgacacaattgaa

SEQ ID NO: 680935 - DNA, 15 bp, Homo sapiens
ctgacacaattgaag

SEQ ID NO: 680936 - DNA, 15 bp, Homo sapiens
tgacacaattgaagg

SEQ ID NO: 680937 - DNA, 15 bp, Homo sapiens
gacacaattgaaggt

SEQ ID NO: 680938 - DNA, 15 bp, Homo sapiens
acacaattgaaggta

SEQ ID NO: 680939 - DNA, 15 bp, Homo sapiens
cacaattgaaggtaa

SEQ ID NO: 680940 - DNA, 15 bp, Homo sapiens
acaattgaaggtaaa

SEQ ID NO: 680941 - DNA, 15 bp, Homo sapiens
caattgaaggtaaag

SEQ ID NO: 680942 - DNA, 15 bp, Homo sapiens
aattgaaggtaaagc

SEQ ID NO: 680943 - DNA, 15 bp, Homo sapiens
attgaaggtaaagcc

SEQ ID NO: 680944 - DNA, 15 bp, Homo sapiens
ttgaaggtaaagcca

SEQ ID NO: 680945 - DNA, 15 bp, Homo sapiens
tgaaggtaaagccat

SEQ ID NO: 680946 - DNA, 15 bp, Homo sapiens
gaaggtaaagccata

SEQ ID NO: 680947 - DNA, 15 bp, Homo sapiens
aaggtaaagccatat

SEQ ID NO: 680948 - DNA, 15 bp, Homo sapiens
aggtaaagccatatc

SEQ ID NO: 680949 - DNA, 15 bp, Homo sapiens
ggtaaagccatatct

SEQ ID NO: 680950 - DNA, 15 bp, Homo sapiens
gtaaagccatatctg

SEQ ID NO: 680951 - DNA, 15 bp, Homo sapiens
taaagccatatctgt

SEQ ID NO: 680952 - DNA, 15 bp, Homo sapiens
aaagccatatctgta

SEQ ID NO: 680953 - DNA, 15 bp, Homo sapiens
aagccatatctgtag

SEQ ID NO: 680954 - DNA, 15 bp, Homo sapiens
agccatatctgtaga

SEQ ID NO: 680955 - DNA, 15 bp, Homo sapiens
gccatatctgtagat

SEQ ID NO: 680956 - DNA, 15 bp, Homo sapiens
ccatatctgtagata

SEQ ID NO: 680957 - DNA, 15 bp, Homo sapiens
catatctgtagataa

SEQ ID NO: 680958 - DNA, 15 bp, Homo sapiens
atatctgtagataat

SEQ ID NO: 680959 - DNA, 15 bp, Homo sapiens
tatctgtagataatg

SEQ ID NO: 680960 - DNA, 15 bp, Homo sapiens
atctgtagataatgc

SEQ ID NO: 680961 - DNA, 15 bp, Homo sapiens
tctgtagataatgct

SEQ ID NO: 680962 - DNA, 15 bp, Homo sapiens
ctgtagataatgcta

SEQ ID NO: 680963 - DNA, 15 bp, Homo sapiens
tgtagataatgctaa

SEQ ID NO: 680964 - DNA, 15 bp, Homo sapiens
gtagataatgctaag

SEQ ID NO: 680965 - DNA, 15 bp, Homo sapiens
tagataatgctaaga

SEQ ID NO: 680966 - DNA, 15 bp, Homo sapiens
agataatgctaagaa

SEQ ID NO: 680967 - DNA, 15 bp, Homo sapiens
gataatgctaagaaa

SEQ ID NO: 680968 - DNA, 15 bp, Homo sapiens
ataatgctaagaaac

SEQ ID NO: 680969 - DNA, 15 bp, Homo sapiens
taatgctaagaaaca

SEQ ID NO: 680970 - DNA, 15 bp, Homo sapiens
aatgctaagaaacac

SEQ ID NO: 680971 - DNA, 15 bp, Homo sapiens
atgctaagaaacacc

SEQ ID NO: 680972 - DNA, 15 bp, Homo sapiens
tgctaagaaacacct

SEQ ID NO: 680973 - DNA, 15 bp, Homo sapiens
gctaagaaacacctc

SEQ ID NO: 680974 - DNA, 15 bp, Homo sapiens
ctaagaaacacctca

SEQ ID NO: 680975 - DNA, 15 bp, Homo sapiens
taagaaacacctcat

SEQ ID NO: 680976 - DNA, 15 bp, Homo sapiens
aagaaacacctcatt

SEQ ID NO: 680977 - DNA, 15 bp, Homo sapiens
agaaacacctcattc

SEQ ID NO: 680978 - DNA, 15 bp, Homo sapiens
gaaacacctcattca

SEQ ID NO: 680979 - DNA, 15 bp, Homo sapiens
aaacacctcattcat

SEQ ID NO: 680980 - DNA, 15 bp, Homo sapiens
aacacctcattcatt

SEQ ID NO: 680981 - DNA, 15 bp, Homo sapiens
acacctcattcatta

SEQ ID NO: 680982 - DNA, 15 bp, Homo sapiens
cacctcattcattag

SEQ ID NO: 680983 - DNA, 15 bp, Homo sapiens
acctcattcattaga

SEQ ID NO: 680984 - DNA, 15 bp, Homo sapiens
cctcattcattagat

SEQ ID NO: 680985 - DNA, 15 bp, Homo sapiens
ctcattcattagatg

SEQ ID NO: 680986 - DNA, 15 bp, Homo sapiens
tcattcattagatga

SEQ ID NO: 680987 - DNA, 15 bp, Homo sapiens
cattcattagatgac

SEQ ID NO: 680988 - DNA, 15 bp, Homo sapiens
attcattagatgact

SEQ ID NO: 680989 - DNA, 15 bp, Homo sapiens
ttcattagatgacta

SEQ ID NO: 680990 - DNA, 15 bp, Homo sapiens
tcattagatgactag

SEQ ID NO: 680991 - DNA, 15 bp, Homo sapiens
cattagatgactagc

SEQ ID NO: 680992 - DNA, 15 bp, Homo sapiens
attagatgactagca

SEQ ID NO: 680993 - DNA, 15 bp, Homo sapiens
ttagatgactagcac

SEQ ID NO: 680994 - DNA, 15 bp, Homo sapiens
tagatgactagcacc

SEQ ID NO: 680995 - DNA, 15 bp, Homo sapiens
agatgactagcacct

SEQ ID NO: 680996 - DNA, 15 bp, Homo sapiens
gatgactagcaccta

SEQ ID NO: 680997 - DNA, 15 bp, Homo sapiens
atgactagcacctag

SEQ ID NO: 680998 - DNA, 15 bp, Homo sapiens
tgactagcacctagg

SEQ ID NO: 680999 - DNA, 15 bp, Homo sapiens
gactagcacctaggg

SEQ ID NO: 681000 - DNA, 15 bp, Homo sapiens
actagcacctaggga

SEQ ID NO: 681001 - DNA, 15 bp, Homo sapiens
ctagcacctagggac

SEQ ID NO: 681002 - DNA, 15 bp, Homo sapiens
tagcacctagggaca

SEQ ID NO: 681003 - DNA, 15 bp, Homo sapiens
agcacctagggacaa

SEQ ID NO: 681004 - DNA, 15 bp, Homo sapiens
gcacctagggacaaa

SEQ ID NO: 681005 - DNA, 15 bp, Homo sapiens
cacctagggacaaag

SEQ ID NO: 681006 - DNA, 15 bp, Homo sapiens
acctagggacaaagg

SEQ ID NO: 681007 - DNA, 15 bp, Homo sapiens
cctagggacaaaggg

SEQ ID NO: 681008 - DNA, 15 bp, Homo sapiens
ctagggacaaagggg

SEQ ID NO: 681009 - DNA, 15 bp, Homo sapiens
tagggacaaagggga

SEQ ID NO: 681010 - DNA, 15 bp, Homo sapiens
agggacaaaggggaa

SEQ ID NO: 681011 - DNA, 15 bp, Homo sapiens
gggacaaaggggaac

SEQ ID NO: 681012 - DNA, 15 bp, Homo sapiens
ggacaaaggggaaca

SEQ ID NO: 681013 - DNA, 15 bp, Homo sapiens
gacaaaggggaacaa

SEQ ID NO: 681014 - DNA, 15 bp, Homo sapiens
acaaaggggaacaaa

SEQ ID NO: 681015 - DNA, 15 bp, Homo sapiens
caaaggggaacaaat

SEQ ID NO: 681016 - DNA, 15 bp, Homo sapiens
aaaggggaacaaatt

SEQ ID NO: 681017 - DNA, 15 bp, Homo sapiens
aaggggaacaaatta

SEQ ID NO: 681018 - DNA, 15 bp, Homo sapiens
aggggaacaaattag

SEQ ID NO: 681019 - DNA, 15 bp, Homo sapiens
ggggaacaaattagc

SEQ ID NO: 681020 - DNA, 15 bp, Homo sapiens
gggaacaaattagct

SEQ ID NO: 681021 - DNA, 15 bp, Homo sapiens
ggaacaaattagcta

SEQ ID NO: 681022 - DNA, 15 bp, Homo sapiens
gaacaaattagctag

SEQ ID NO: 681023 - DNA, 15 bp, Homo sapiens
aacaaattagctaga

SEQ ID NO: 681024 - DNA, 15 bp, Homo sapiens
acaaattagctagag

SEQ ID NO: 681025 - DNA, 15 bp, Homo sapiens
caaattagctagagc

SEQ ID NO: 681026 - DNA, 15 bp, Homo sapiens
aaattagctagagcc

SEQ ID NO: 681027 - DNA, 15 bp, Homo sapiens
aattagctagagccc

SEQ ID NO: 681028 - DNA, 15 bp, Homo sapiens
attagctagagccct

SEQ ID NO: 681029 - DNA, 15 bp, Homo sapiens
ttagctagagcccta

SEQ ID NO: 681030 - DNA, 15 bp, Homo sapiens
tagctagagccctag

SEQ ID NO: 681031 - DNA, 15 bp, Homo sapiens
agctagagccctaga

SEQ ID NO: 681032 - DNA, 15 bp, Homo sapiens
gctagagccctagag

SEQ ID NO: 681033 - DNA, 15 bp, Homo sapiens
ctagagccctagagt

SEQ ID NO: 681034 - DNA, 15 bp, Homo sapiens
tagagccctagagtg

SEQ ID NO: 681035 - DNA, 15 bp, Homo sapiens
agagccctagagtgc

SEQ ID NO: 681036 - DNA, 15 bp, Homo sapiens
gagccctagagtgct

SEQ ID NO: 681037 - DNA, 15 bp, Homo sapiens
agccctagagtgctc

SEQ ID NO: 681038 - DNA, 15 bp, Homo sapiens
gccctagagtgctct

SEQ ID NO: 681039 - DNA, 15 bp, Homo sapiens
ccctagagtgctctg

SEQ ID NO: 681040 - DNA, 15 bp, Homo sapiens
cctagagtgctctga

SEQ ID NO: 681041 - DNA, 15 bp, Homo sapiens
ctagagtgctctgaa

SEQ ID NO: 681042 - DNA, 15 bp, Homo sapiens
tagagtgctctgaag

SEQ ID NO: 681043 - DNA, 15 bp, Homo sapiens
agagtgctctgaagc

SEQ ID NO: 681044 - DNA, 15 bp, Homo sapiens
gagtgctctgaagct

SEQ ID NO: 681045 - DNA, 15 bp, Homo sapiens
agtgctctgaagcta

SEQ ID NO: 681046 - DNA, 15 bp, Homo sapiens
gtgctctgaagctag

SEQ ID NO: 681047 - DNA, 15 bp, Homo sapiens
tgctctgaagctagg

SEQ ID NO: 681048 - DNA, 15 bp, Homo sapiens
gctctgaagctaggt

SEQ ID NO: 681049 - DNA, 15 bp, Homo sapiens
ctctgaagctaggtc

SEQ ID NO: 681050 - DNA, 15 bp, Homo sapiens
tctgaagctaggtct

SEQ ID NO: 681051 - DNA, 15 bp, Homo sapiens
ctgaagctaggtctt

SEQ ID NO: 681052 - DNA, 15 bp, Homo sapiens
tgaagctaggtctta

SEQ ID NO: 681053 - DNA, 15 bp, Homo sapiens
gaagctaggtcttac

SEQ ID NO: 681054 - DNA, 15 bp, Homo sapiens
aagctaggtcttact

SEQ ID NO: 681055 - DNA, 15 bp, Homo sapiens
agctaggtcttactg

SEQ ID NO: 681056 - DNA, 15 bp, Homo sapiens
gctaggtcttactgc

SEQ ID NO: 681057 - DNA, 15 bp, Homo sapiens
ctaggtcttactgcg

SEQ ID NO: 681058 - DNA, 15 bp, Homo sapiens
taggtcttactgcgt

SEQ ID NO: 681059 - DNA, 15 bp, Homo sapiens
aggtcttactgcgtt

SEQ ID NO: 681060 - DNA, 15 bp, Homo sapiens
ggtcttactgcgttt

SEQ ID NO: 681061 - DNA, 15 bp, Homo sapiens
gtcttactgcgttta

SEQ ID NO: 681062 - DNA, 15 bp, Homo sapiens
tcttactgcgtttaa

SEQ ID NO: 681063 - DNA, 15 bp, Homo sapiens
cttactgcgtttaaa

SEQ ID NO: 681064 - DNA, 15 bp, Homo sapiens
ttactgcgtttaaaa

SEQ ID NO: 681065 - DNA, 15 bp, Homo sapiens
tactgcgtttaaaac

SEQ ID NO: 681066 - DNA, 15 bp, Homo sapiens
actgcgtttaaaaca

SEQ ID NO: 681067 - DNA, 15 bp, Homo sapiens
ctgcgtttaaaacag

SEQ ID NO: 681068 - DNA, 15 bp, Homo sapiens
tgcgtttaaaacaga

SEQ ID NO: 681069 - DNA, 15 bp, Homo sapiens
gcgtttaaaacagaa

SEQ ID NO: 681070 - DNA, 15 bp, Homo sapiens
cgtttaaaacagaac

SEQ ID NO: 681071 - DNA, 15 bp, Homo sapiens
gtttaaaacagaaca

SEQ ID NO: 681072 - DNA, 15 bp, Homo sapiens
tttaaaacagaacaa

SEQ ID NO: 681073 - DNA, 15 bp, Homo sapiens
ttaaaacagaacaaa

SEQ ID NO: 681074 - DNA, 15 bp, Homo sapiens
taaaacagaacaaaa

SEQ ID NO: 681075 - DNA, 15 bp, Homo sapiens
aaaacagaacaaaaa

SEQ ID NO: 681076 - DNA, 15 bp, Homo sapiens
aaacagaacaaaaaa

SEQ ID NO: 681077 - DNA, 15 bp, Homo sapiens
aacagaacaaaaaac

SEQ ID NO: 681078 - DNA, 15 bp, Homo sapiens
acagaacaaaaaacc

SEQ ID NO: 681079 - DNA, 15 bp, Homo sapiens
cagaacaaaaaacct

SEQ ID NO: 681080 - DNA, 15 bp, Homo sapiens
agaacaaaaaacctc

SEQ ID NO: 681081 - DNA, 15 bp, Homo sapiens
gaacaaaaaacctcc

SEQ ID NO: 681082 - DNA, 15 bp, Homo sapiens
aacaaaaaacctcct

SEQ ID NO: 681083 - DNA, 15 bp, Homo sapiens
acaaaaaacctcctt

SEQ ID NO: 681084 - DNA, 15 bp, Homo sapiens
caaaaaacctccttc

SEQ ID NO: 681085 - DNA, 15 bp, Homo sapiens
aaaaaacctccttcc

SEQ ID NO: 681086 - DNA, 15 bp, Homo sapiens
aaaaacctccttcct

SEQ ID NO: 681087 - DNA, 15 bp, Homo sapiens
aaaacctccttccta

SEQ ID NO: 681088 - DNA, 15 bp, Homo sapiens
aaacctccttcctag

SEQ ID NO: 681089 - DNA, 15 bp, Homo sapiens
aacctccttcctaga

SEQ ID NO: 681090 - DNA, 15 bp, Homo sapiens
acctccttcctagaa

SEQ ID NO: 681091 - DNA, 15 bp, Homo sapiens
cctccttcctagaaa

SEQ ID NO: 681092 - DNA, 15 bp, Homo sapiens
ctccttcctagaaaa

SEQ ID NO: 681093 - DNA, 15 bp, Homo sapiens
tccttcctagaaaag

SEQ ID NO: 681094 - DNA, 15 bp, Homo sapiens
ccttcctagaaaagt

SEQ ID NO: 681095 - DNA, 15 bp, Homo sapiens
cttcctagaaaagtc

SEQ ID NO: 681096 - DNA, 15 bp, Homo sapiens
ttcctagaaaagtcc

SEQ ID NO: 681097 - DNA, 15 bp, Homo sapiens
tcctagaaaagtcct

SEQ ID NO: 681098 - DNA, 15 bp, Homo sapiens
cctagaaaagtcctt

SEQ ID NO: 681099 - DNA, 15 bp, Homo sapiens
ctagaaaagtccttc

SEQ ID NO: 681100 - DNA, 15 bp, Homo sapiens
tagaaaagtccttcc

SEQ ID NO: 681101 - DNA, 15 bp, Homo sapiens
agaaaagtccttcct

SEQ ID NO: 681102 - DNA, 15 bp, Homo sapiens
gaaaagtccttccta

SEQ ID NO: 681103 - DNA, 15 bp, Homo sapiens
aaaagtccttcctaa

SEQ ID NO: 681104 - DNA, 15 bp, Homo sapiens
aaagtccttcctaaa

SEQ ID NO: 681105 - DNA, 15 bp, Homo sapiens
aagtccttcctaaag

SEQ ID NO: 681106 - DNA, 15 bp, Homo sapiens
agtccttcctaaagt

SEQ ID NO: 681107 - DNA, 15 bp, Homo sapiens
gtccttcctaaagtg

SEQ ID NO: 681108 - DNA, 15 bp, Homo sapiens
tccttcctaaagtgc

SEQ ID NO: 681109 - DNA, 15 bp, Homo sapiens
ccttcctaaagtgct

SEQ ID NO: 681110 - DNA, 15 bp, Homo sapiens
cttcctaaagtgcta

SEQ ID NO: 681111 - DNA, 15 bp, Homo sapiens
ttcctaaagtgctac

SEQ ID NO: 681112 - DNA, 15 bp, Homo sapiens
tcctaaagtgctact

SEQ ID NO: 681113 - DNA, 15 bp, Homo sapiens
cctaaagtgctactg

SEQ ID NO: 681114 - DNA, 15 bp, Homo sapiens
ctaaagtgctactgg

SEQ ID NO: 681115 - DNA, 15 bp, Homo sapiens
taaagtgctactgga

SEQ ID NO: 681116 - DNA, 15 bp, Homo sapiens
aaagtgctactggaa

SEQ ID NO: 681117 - DNA, 15 bp, Homo sapiens
aagtgctactggaat

SEQ ID NO: 681118 - DNA, 15 bp, Homo sapiens
agtgctactggaatg

SEQ ID NO: 681119 - DNA, 15 bp, Homo sapiens
gtgctactggaatga

SEQ ID NO: 681120 - DNA, 15 bp, Homo sapiens
tgctactggaatgag

SEQ ID NO: 681121 - DNA, 15 bp, Homo sapiens
gctactggaatgagt

SEQ ID NO: 681122 - DNA, 15 bp, Homo sapiens
ctactggaatgagtt

SEQ ID NO: 681123 - DNA, 15 bp, Homo sapiens
tactggaatgagttg

SEQ ID NO: 681124 - DNA, 15 bp, Homo sapiens
actggaatgagttgg

SEQ ID NO: 681125 - DNA, 15 bp, Homo sapiens
ctggaatgagttgga

SEQ ID NO: 681126 - DNA, 15 bp, Homo sapiens
tggaatgagttggaa

SEQ ID NO: 681127 - DNA, 15 bp, Homo sapiens
ggaatgagttggaat

SEQ ID NO: 681128 - DNA, 15 bp, Homo sapiens
gaatgagttggaata

SEQ ID NO: 681129 - DNA, 15 bp, Homo sapiens
aatgagttggaatat

SEQ ID NO: 681130 - DNA, 15 bp, Homo sapiens
atgagttggaatatg

SEQ ID NO: 681131 - DNA, 15 bp, Homo sapiens
tgagttggaatatga

SEQ ID NO: 681132 - DNA, 15 bp, Homo sapiens
gagttggaatatgaa

SEQ ID NO: 681133 - DNA, 15 bp, Homo sapiens
agttggaatatgaat

SEQ ID NO: 681134 - DNA, 15 bp, Homo sapiens
gttggaatatgaatt

SEQ ID NO: 681135 - DNA, 15 bp, Homo sapiens
ttggaatatgaattc

SEQ ID NO: 681136 - DNA, 15 bp, Homo sapiens
tggaatatgaattca

SEQ ID NO: 681137 - DNA, 15 bp, Homo sapiens
ggaatatgaattcat

SEQ ID NO: 681138 - DNA, 15 bp, Homo sapiens
gaatatgaattcatg

SEQ ID NO: 681139 - DNA, 15 bp, Homo sapiens
aatatgaattcatgc

SEQ ID NO: 681140 - DNA, 15 bp, Homo sapiens
atatgaattcatgct

SEQ ID NO: 681141 - DNA, 15 bp, Homo sapiens
tatgaattcatgcta

SEQ ID NO: 681142 - DNA, 15 bp, Homo sapiens
atgaattcatgctac

SEQ ID NO: 681143 - DNA, 15 bp, Homo sapiens
tgaattcatgctaca

SEQ ID NO: 681144 - DNA, 15 bp, Homo sapiens
gaattcatgctacag

SEQ ID NO: 681145 - DNA, 15 bp, Homo sapiens
aattcatgctacagt

SEQ ID NO: 681146 - DNA, 15 bp, Homo sapiens
attcatgctacagtt

SEQ ID NO: 681147 - DNA, 15 bp, Homo sapiens
ttcatgctacagttt

SEQ ID NO: 681148 - DNA, 15 bp, Homo sapiens
tcatgctacagtttt

SEQ ID NO: 681149 - DNA, 15 bp, Homo sapiens
catgctacagttttt

SEQ ID NO: 681150 - DNA, 15 bp, Homo sapiens
atgctacagttttta

SEQ ID NO: 681151 - DNA, 15 bp, Homo sapiens
tgctacagtttttaa

SEQ ID NO: 681152 - DNA, 15 bp, Homo sapiens
gctacagtttttaat

SEQ ID NO: 681153 - DNA, 15 bp, Homo sapiens
ctacagtttttaatg

SEQ ID NO: 681154 - DNA, 15 bp, Homo sapiens
tacagtttttaatga

SEQ ID NO: 681155 - DNA, 15 bp, Homo sapiens
acagtttttaatgaa

SEQ ID NO: 681156 - DNA, 15 bp, Homo sapiens
cagtttttaatgaaa

SEQ ID NO: 681157 - DNA, 15 bp, Homo sapiens
agtttttaatgaaat

SEQ ID NO: 681158 - DNA, 15 bp, Homo sapiens
gtttttaatgaaatt

SEQ ID NO: 681159 - DNA, 15 bp, Homo sapiens
tttttaatgaaattt

SEQ ID NO: 681160 - DNA, 15 bp, Homo sapiens
ttttaatgaaattta

SEQ ID NO: 681161 - DNA, 15 bp, Homo sapiens
tttaatgaaatttaa

SEQ ID NO: 681162 - DNA, 15 bp, Homo sapiens
ttaatgaaatttaaa

SEQ ID NO: 681163 - DNA, 15 bp, Homo sapiens
taatgaaatttaaac

SEQ ID NO: 681164 - DNA, 15 bp, Homo sapiens
aatgaaatttaaact

SEQ ID NO: 681165 - DNA, 15 bp, Homo sapiens
atgaaatttaaactg

SEQ ID NO: 681166 - DNA, 15 bp, Homo sapiens
tgaaatttaaactgt

SEQ ID NO: 681167 - DNA, 15 bp, Homo sapiens
gaaatttaaactgtt

SEQ ID NO: 681168 - DNA, 15 bp, Homo sapiens
aaatttaaactgttt

SEQ ID NO: 681169 - DNA, 15 bp, Homo sapiens
aatttaaactgtttt

SEQ ID NO: 681170 - DNA, 15 bp, Homo sapiens
atttaaactgttttt

SEQ ID NO: 681171 - DNA, 15 bp, Homo sapiens
tttaaactgttttta

SEQ ID NO: 681172 - DNA, 15 bp, Homo sapiens
ttaaactgtttttaa

SEQ ID NO: 681173 - DNA, 15 bp, Homo sapiens
taaactgtttttaaa

SEQ ID NO: 681174 - DNA, 15 bp, Homo sapiens
aaactgtttttaaag

SEQ ID NO: 681175 - DNA, 15 bp, Homo sapiens
aactgtttttaaaga

SEQ ID NO: 681176 - DNA, 15 bp, Homo sapiens
actgtttttaaagag

SEQ ID NO: 681177 - DNA, 15 bp, Homo sapiens
ctgtttttaaagagt

SEQ ID NO: 681178 - DNA, 15 bp, Homo sapiens
tgtttttaaagagta

SEQ ID NO: 681179 - DNA, 15 bp, Homo sapiens
gtttttaaagagtac

SEQ ID NO: 681180 - DNA, 15 bp, Homo sapiens
tttttaaagagtact

SEQ ID NO: 681181 - DNA, 15 bp, Homo sapiens
ttttaaagagtactt

SEQ ID NO: 681182 - DNA, 15 bp, Homo sapiens
tttaaagagtacttg

SEQ ID NO: 681183 - DNA, 15 bp, Homo sapiens
ttaaagagtacttga

SEQ ID NO: 681184 - DNA, 15 bp, Homo sapiens
taaagagtacttgaa

SEQ ID NO: 681185 - DNA, 15 bp, Homo sapiens
aaagagtacttgaag

SEQ ID NO: 681186 - DNA, 15 bp, Homo sapiens
aagagtacttgaaga

SEQ ID NO: 681187 - DNA, 15 bp, Homo sapiens
agagtacttgaagaa

SEQ ID NO: 681188 - DNA, 15 bp, Homo sapiens
gagtacttgaagaaa

SEQ ID NO: 681189 - DNA, 15 bp, Homo sapiens
agtacttgaagaaag

SEQ ID NO: 681190 - DNA, 15 bp, Homo sapiens
gtacttgaagaaagt

SEQ ID NO: 681191 - DNA, 15 bp, Homo sapiens
tacttgaagaaagtt

SEQ ID NO: 681192 - DNA, 15 bp, Homo sapiens
acttgaagaaagttt

SEQ ID NO: 681193 - DNA, 15 bp, Homo sapiens
cttgaagaaagtttg

SEQ ID NO: 681194 - DNA, 15 bp, Homo sapiens
ttgaagaaagtttga

SEQ ID NO: 681195 - DNA, 15 bp, Homo sapiens
tgaagaaagtttgaa

SEQ ID NO: 681196 - DNA, 15 bp, Homo sapiens
gaagaaagtttgaaa

SEQ ID NO: 681197 - DNA, 15 bp, Homo sapiens
aagaaagtttgaaaa

SEQ ID NO: 681198 - DNA, 15 bp, Homo sapiens
agaaagtttgaaaaa

SEQ ID NO: 681199 - DNA, 15 bp, Homo sapiens
gaaagtttgaaaaaa

SEQ ID NO: 681200 - DNA, 15 bp, Homo sapiens
aaagtttgaaaaaaa

SEQ ID NO: 681201 - DNA, 15 bp, Homo sapiens
aagtttgaaaaaaaa

SEQ ID NO: 681202 - DNA, 15 bp, Homo sapiens
agtttgaaaaaaaaa

SEQ ID NO: 681203 - DNA, 15 bp, Homo sapiens
gtttgaaaaaaaaaa

SEQ ID NO: 681204 - DNA, 15 bp, Homo sapiens
tttgaaaaaaaaaaa

SEQ ID NO: 681205 - DNA, 15 bp, Homo sapiens
ttgaaaaaaaaaaaa

SEQ ID NO: 681206 - DNA, 15 bp, Homo sapiens
gaaaaaaaaaaaaag

SEQ ID NO: 681207 - DNA, 15 bp, Homo sapiens
aaaaaaaaaaaaggc

SEQ ID NO: 681208 - DNA, 15 bp, Homo sapiens
aaaaaaaaaaaggca

SEQ ID NO: 681209 - DNA, 15 bp, Homo sapiens
aaaaaaaaaaggcag

SEQ ID NO: 681210 - DNA, 15 bp, Homo sapiens
aaaaaaaaaggcaga

SEQ ID NO: 681211 - DNA, 15 bp, Homo sapiens
aaaaaaaaggcagag

SEQ ID NO: 681212 - DNA, 15 bp, Homo sapiens
aaaaaaaggcagaga

SEQ ID NO: 681213 - DNA, 15 bp, Homo sapiens
aaaaaaggcagagaa

SEQ ID NO: 681214 - DNA, 15 bp, Homo sapiens
aaaaaggcagagaag

SEQ ID NO: 681215 - DNA, 15 bp, Homo sapiens
aaaaggcagagaagg

SEQ ID NO: 681216 - DNA, 15 bp, Homo sapiens
aaaggcagagaagga

SEQ ID NO: 681217 - DNA, 15 bp, Homo sapiens
aaggcagagaaggat

SEQ ID NO: 681218 - DNA, 15 bp, Homo sapiens
aggcagagaaggatg

SEQ ID NO: 681219 - DNA, 15 bp, Homo sapiens
ggcagagaaggatga

SEQ ID NO: 681220 - DNA, 15 bp, Homo sapiens
gcagagaaggatgat

SEQ ID NO: 681221 - DNA, 15 bp, Homo sapiens
cagagaaggatgata

SEQ ID NO: 681222 - DNA, 15 bp, Homo sapiens
agagaaggatgatag

SEQ ID NO: 681223 - DNA, 15 bp, Homo sapiens
gagaaggatgatagg

SEQ ID NO: 681224 - DNA, 15 bp, Homo sapiens
agaaggatgataggt

SEQ ID NO: 681225 - DNA, 15 bp, Homo sapiens
gaaggatgataggtg

SEQ ID NO: 681226 - DNA, 15 bp, Homo sapiens
aaggatgataggtga

SEQ ID NO: 681227 - DNA, 15 bp, Homo sapiens
aggatgataggtgag

SEQ ID NO: 681228 - DNA, 15 bp, Homo sapiens
ggatgataggtgaga

SEQ ID NO: 681229 - DNA, 15 bp, Homo sapiens
gatgataggtgagaa

SEQ ID NO: 681230 - DNA, 15 bp, Homo sapiens
atgataggtgagaaa

SEQ ID NO: 681231 - DNA, 15 bp, Homo sapiens
tgataggtgagaaag

SEQ ID NO: 681232 - DNA, 15 bp, Homo sapiens
gataggtgagaaagg

SEQ ID NO: 681233 - DNA, 15 bp, Homo sapiens
ataggtgagaaaggc

SEQ ID NO: 681234 - DNA, 15 bp, Homo sapiens
taggtgagaaaggct

SEQ ID NO: 681235 - DNA, 15 bp, Homo sapiens
aggtgagaaaggcta

SEQ ID NO: 681236 - DNA, 15 bp, Homo sapiens
ggtgagaaaggctat

SEQ ID NO: 681237 - DNA, 15 bp, Homo sapiens
gtgagaaaggctatt

SEQ ID NO: 681238 - DNA, 15 bp, Homo sapiens
tgagaaaggctattt

SEQ ID NO: 681239 - DNA, 15 bp, Homo sapiens
gagaaaggctatttc

SEQ ID NO: 681240 - DNA, 15 bp, Homo sapiens
agaaaggctatttct

SEQ ID NO: 681241 - DNA, 15 bp, Homo sapiens
gaaaggctatttcta

SEQ ID NO: 681242 - DNA, 15 bp, Homo sapiens
aaaggctatttctag

SEQ ID NO: 681243 - DNA, 15 bp, Homo sapiens
aaggctatttctagg

SEQ ID NO: 681244 - DNA, 15 bp, Homo sapiens
aggctatttctagga

SEQ ID NO: 681245 - DNA, 15 bp, Homo sapiens
ggctatttctaggag

SEQ ID NO: 681246 - DNA, 15 bp, Homo sapiens
gctatttctaggagt

SEQ ID NO: 681247 - DNA, 15 bp, Homo sapiens
ctatttctaggagtc

SEQ ID NO: 681248 - DNA, 15 bp, Homo sapiens
tatttctaggagtca

SEQ ID NO: 681249 - DNA, 15 bp, Homo sapiens
atttctaggagtcaa

SEQ ID NO: 681250 - DNA, 15 bp, Homo sapiens
tttctaggagtcaaa

SEQ ID NO: 681251 - DNA, 15 bp, Homo sapiens
ttctaggagtcaaaa

SEQ ID NO: 681252 - DNA, 15 bp, Homo sapiens
tctaggagtcaaaaa

SEQ ID NO: 681253 - DNA, 15 bp, Homo sapiens
ctaggagtcaaaaag

SEQ ID NO: 681254 - DNA, 15 bp, Homo sapiens
taggagtcaaaaaga

SEQ ID NO: 681255 - DNA, 15 bp, Homo sapiens
aggagtcaaaaagag

SEQ ID NO: 681256 - DNA, 15 bp, Homo sapiens
ggagtcaaaaagaga

SEQ ID NO: 681257 - DNA, 15 bp, Homo sapiens
gagtcaaaaagagaa

SEQ ID NO: 681258 - DNA, 15 bp, Homo sapiens
agtcaaaaagagaaa

SEQ ID NO: 681259 - DNA, 15 bp, Homo sapiens
gtcaaaaagagaaac

SEQ ID NO: 681260 - DNA, 15 bp, Homo sapiens
tcaaaaagagaaact

SEQ ID NO: 681261 - DNA, 15 bp, Homo sapiens
caaaaagagaaactc

SEQ ID NO: 681262 - DNA, 15 bp, Homo sapiens
aaaaagagaaactct

SEQ ID NO: 681263 - DNA, 15 bp, Homo sapiens
aaaagagaaactctt

SEQ ID NO: 681264 - DNA, 15 bp, Homo sapiens
aaagagaaactcttg

SEQ ID NO: 681265 - DNA, 15 bp, Homo sapiens
aagagaaactcttgg

SEQ ID NO: 681266 - DNA, 15 bp, Homo sapiens
agagaaactcttggg

SEQ ID NO: 681267 - DNA, 15 bp, Homo sapiens
gagaaactcttggga

SEQ ID NO: 681268 - DNA, 15 bp, Homo sapiens
agaaactcttgggat

SEQ ID NO: 681269 - DNA, 15 bp, Homo sapiens
gaaactcttgggatc

SEQ ID NO: 681270 - DNA, 15 bp, Homo sapiens
aaactcttgggatca

SEQ ID NO: 681271 - DNA, 15 bp, Homo sapiens
aactcttgggatcaa

SEQ ID NO: 681272 - DNA, 15 bp, Homo sapiens
actcttgggatcaag

SEQ ID NO: 681273 - DNA, 15 bp, Homo sapiens
ctcttgggatcaagt

SEQ ID NO: 681274 - DNA, 15 bp, Homo sapiens
tcttgggatcaagtc

SEQ ID NO: 681275 - DNA, 15 bp, Homo sapiens
cttgggatcaagtca

SEQ ID NO: 681276 - DNA, 15 bp, Homo sapiens
ttgggatcaagtcat

SEQ ID NO: 681277 - DNA, 15 bp, Homo sapiens
tgggatcaagtcatg

SEQ ID NO: 681278 - DNA, 15 bp, Homo sapiens
gggatcaagtcatgc

SEQ ID NO: 681279 - DNA, 15 bp, Homo sapiens
ggatcaagtcatgcc

SEQ ID NO: 681280 - DNA, 15 bp, Homo sapiens
gatcaagtcatgcct

SEQ ID NO: 681281 - DNA, 15 bp, Homo sapiens
atcaagtcatgcctt

SEQ ID NO: 681282 - DNA, 15 bp, Homo sapiens
tcaagtcatgccttc

SEQ ID NO: 681283 - DNA, 15 bp, Homo sapiens
caagtcatgccttcc

SEQ ID NO: 681284 - DNA, 15 bp, Homo sapiens
aagtcatgccttcca

SEQ ID NO: 681285 - DNA, 15 bp, Homo sapiens
agtcatgccttccac

SEQ ID NO: 681286 - DNA, 15 bp, Homo sapiens
gtcatgccttccacc

SEQ ID NO: 681287 - DNA, 15 bp, Homo sapiens
tcatgccttccacca

SEQ ID NO: 681288 - DNA, 15 bp, Homo sapiens
catgccttccaccat

SEQ ID NO: 681289 - DNA, 15 bp, Homo sapiens
atgccttccaccatc

SEQ ID NO: 681290 - DNA, 15 bp, Homo sapiens
tgccttccaccatct

SEQ ID NO: 681291 - DNA, 15 bp, Homo sapiens
gccttccaccatctt

SEQ ID NO: 681292 - DNA, 15 bp, Homo sapiens
ccttccaccatcttt

SEQ ID NO: 681293 - DNA, 15 bp, Homo sapiens
cttccaccatctttc

SEQ ID NO: 681294 - DNA, 15 bp, Homo sapiens
ttccaccatctttct

SEQ ID NO: 681295 - DNA, 15 bp, Homo sapiens
tccaccatctttctc

SEQ ID NO: 681296 - DNA, 15 bp, Homo sapiens
ccaccatctttctcg

SEQ ID NO: 681297 - DNA, 15 bp, Homo sapiens
caccatctttctcga

SEQ ID NO: 681298 - DNA, 15 bp, Homo sapiens
accatctttctcgag

SEQ ID NO: 681299 - DNA, 15 bp, Homo sapiens
ccatctttctcgaga

SEQ ID NO: 681300 - DNA, 15 bp, Homo sapiens
catctttctcgagat

SEQ ID NO: 681301 - DNA, 15 bp, Homo sapiens
atctttctcgagata

SEQ ID NO: 681302 - DNA, 15 bp, Homo sapiens
tctttctcgagatac

SEQ ID NO: 681303 - DNA, 15 bp, Homo sapiens
ctttctcgagatact

SEQ ID NO: 681304 - DNA, 15 bp, Homo sapiens
tttctcgagatactc

SEQ ID NO: 681305 - DNA, 15 bp, Homo sapiens
ttctcgagatactcc

SEQ ID NO: 681306 - DNA, 15 bp, Homo sapiens
tctcgagatactcct

SEQ ID NO: 681307 - DNA, 15 bp, Homo sapiens
ctcgagatactccta

SEQ ID NO: 681308 - DNA, 15 bp, Homo sapiens
tcgagatactcctaa

SEQ ID NO: 681309 - DNA, 15 bp, Homo sapiens
cgagatactcctaat

SEQ ID NO: 681310 - DNA, 15 bp, Homo sapiens
gagatactcctaata

SEQ ID NO: 681311 - DNA, 15 bp, Homo sapiens
agatactcctaataa

SEQ ID NO: 681312 - DNA, 15 bp, Homo sapiens
gatactcctaataag

SEQ ID NO: 681313 - DNA, 15 bp, Homo sapiens
atactcctaataaga

SEQ ID NO: 681314 - DNA, 15 bp, Homo sapiens
tactcctaataagaa

SEQ ID NO: 681315 - DNA, 15 bp, Homo sapiens
actcctaataagaaa

SEQ ID NO: 681316 - DNA, 15 bp, Homo sapiens
ctcctaataagaaat

SEQ ID NO: 681317 - DNA, 15 bp, Homo sapiens
tcctaataagaaatc

SEQ ID NO: 681318 - DNA, 15 bp, Homo sapiens
cctaataagaaatcc

SEQ ID NO: 681319 - DNA, 15 bp, Homo sapiens
ctaataagaaatccc

SEQ ID NO: 681320 - DNA, 15 bp, Homo sapiens
taataagaaatccca

SEQ ID NO: 681321 - DNA, 15 bp, Homo sapiens
aataagaaatcccag

SEQ ID NO: 681322 - DNA, 15 bp, Homo sapiens
ataagaaatcccaga

SEQ ID NO: 681323 - DNA, 15 bp, Homo sapiens
taagaaatcccagat

SEQ ID NO: 681324 - DNA, 15 bp, Homo sapiens
aagaaatcccagatc

SEQ ID NO: 681325 - DNA, 15 bp, Homo sapiens
agaaatcccagatct

SEQ ID NO: 681326 - DNA, 15 bp, Homo sapiens
gaaatcccagatctg

SEQ ID NO: 681327 - DNA, 15 bp, Homo sapiens
aaatcccagatctgg

SEQ ID NO: 681328 - DNA, 15 bp, Homo sapiens
aatcccagatctggc

SEQ ID NO: 681329 - DNA, 15 bp, Homo sapiens
atcccagatctggca

SEQ ID NO: 681330 - DNA, 15 bp, Homo sapiens
tcccagatctggcaa

SEQ ID NO: 681331 - DNA, 15 bp, Homo sapiens
cccagatctggcaag

SEQ ID NO: 681332 - DNA, 15 bp, Homo sapiens
ccagatctggcaagt

SEQ ID NO: 681333 - DNA, 15 bp, Homo sapiens
cagatctggcaagtg

SEQ ID NO: 681334 - DNA, 15 bp, Homo sapiens
agatctggcaagtga

SEQ ID NO: 681335 - DNA, 15 bp, Homo sapiens
gatctggcaagtgag

SEQ ID NO: 681336 - DNA, 15 bp, Homo sapiens
atctggcaagtgaga

SEQ ID NO: 681337 - DNA, 15 bp, Homo sapiens
tctggcaagtgagaa

SEQ ID NO: 681338 - DNA, 15 bp, Homo sapiens
ctggcaagtgagaaa

SEQ ID NO: 681339 - DNA, 15 bp, Homo sapiens
tggcaagtgagaaaa

SEQ ID NO: 681340 - DNA, 15 bp, Homo sapiens
ggcaagtgagaaaag

SEQ ID NO: 681341 - DNA, 15 bp, Homo sapiens
gcaagtgagaaaagt

SEQ ID NO: 681342 - DNA, 15 bp, Homo sapiens
caagtgagaaaagtg

SEQ ID NO: 681343 - DNA, 15 bp, Homo sapiens
aagtgagaaaagtgg

SEQ ID NO: 681344 - DNA, 15 bp, Homo sapiens
agtgagaaaagtggc

SEQ ID NO: 681345 - DNA, 15 bp, Homo sapiens
gtgagaaaagtggcc

SEQ ID NO: 681346 - DNA, 15 bp, Homo sapiens
tgagaaaagtggccc

SEQ ID NO: 681347 - DNA, 15 bp, Homo sapiens
gagaaaagtggccct

SEQ ID NO: 681348 - DNA, 15 bp, Homo sapiens
agaaaagtggccctg

SEQ ID NO: 681349 - DNA, 15 bp, Homo sapiens
gaaaagtggccctgg

SEQ ID NO: 681350 - DNA, 15 bp, Homo sapiens
aaaagtggccctggg

SEQ ID NO: 681351 - DNA, 15 bp, Homo sapiens
aaagtggccctggga

SEQ ID NO: 681352 - DNA, 15 bp, Homo sapiens
aagtggccctgggaa

SEQ ID NO: 681353 - DNA, 15 bp, Homo sapiens
agtggccctgggaag

SEQ ID NO: 681354 - DNA, 15 bp, Homo sapiens
gtggccctgggaagc

SEQ ID NO: 681355 - DNA, 15 bp, Homo sapiens
tggccctgggaagct

SEQ ID NO: 681356 - DNA, 15 bp, Homo sapiens
ggccctgggaagctg

SEQ ID NO: 681357 - DNA, 15 bp, Homo sapiens
gccctgggaagctga

SEQ ID NO: 681358 - DNA, 15 bp, Homo sapiens
ccctgggaagctgaa

SEQ ID NO: 681359 - DNA, 15 bp, Homo sapiens
cctgggaagctgaaa

SEQ ID NO: 681360 - DNA, 15 bp, Homo sapiens
ctgggaagctgaaat

SEQ ID NO: 681361 - DNA, 15 bp, Homo sapiens
tgggaagctgaaata

SEQ ID NO: 681362 - DNA, 15 bp, Homo sapiens
gggaagctgaaataa

SEQ ID NO: 681363 - DNA, 15 bp, Homo sapiens
ggaagctgaaataaa

SEQ ID NO: 681364 - DNA, 15 bp, Homo sapiens
gaagctgaaataaat

SEQ ID NO: 681365 - DNA, 15 bp, Homo sapiens
aagctgaaataaata

SEQ ID NO: 681366 - DNA, 15 bp, Homo sapiens
agctgaaataaatag

SEQ ID NO: 681367 - DNA, 15 bp, Homo sapiens
gctgaaataaatagg

SEQ ID NO: 681368 - DNA, 15 bp, Homo sapiens
ctgaaataaatagga

SEQ ID NO: 681369 - DNA, 15 bp, Homo sapiens
tgaaataaataggag

SEQ ID NO: 681370 - DNA, 15 bp, Homo sapiens
gaaataaataggaga

SEQ ID NO: 681371 - DNA, 15 bp, Homo sapiens
aaataaataggagag

SEQ ID NO: 681372 - DNA, 15 bp, Homo sapiens
aataaataggagaga

SEQ ID NO: 681373 - DNA, 15 bp, Homo sapiens
ataaataggagagaa

SEQ ID NO: 681374 - DNA, 15 bp, Homo sapiens
taaataggagagaag

SEQ ID NO: 681375 - DNA, 15 bp, Homo sapiens
aaataggagagaagc

SEQ ID NO: 681376 - DNA, 15 bp, Homo sapiens
aataggagagaagcc

SEQ ID NO: 681377 - DNA, 15 bp, Homo sapiens
ataggagagaagcct

SEQ ID NO: 681378 - DNA, 15 bp, Homo sapiens
taggagagaagcctg

SEQ ID NO: 681379 - DNA, 15 bp, Homo sapiens
aggagagaagcctga

SEQ ID NO: 681380 - DNA, 15 bp, Homo sapiens
ggagagaagcctgac

SEQ ID NO: 681381 - DNA, 15 bp, Homo sapiens
gagagaagcctgact

SEQ ID NO: 681382 - DNA, 15 bp, Homo sapiens
agagaagcctgactt

SEQ ID NO: 681383 - DNA, 15 bp, Homo sapiens
gagaagcctgactta

SEQ ID NO: 681384 - DNA, 15 bp, Homo sapiens
agaagcctgacttag

SEQ ID NO: 681385 - DNA, 15 bp, Homo sapiens
gaagcctgacttaga

SEQ ID NO: 681386 - DNA, 15 bp, Homo sapiens
aagcctgacttagag

SEQ ID NO: 681387 - DNA, 15 bp, Homo sapiens
agcctgacttagagc

SEQ ID NO: 681388 - DNA, 15 bp, Homo sapiens
gcctgacttagagct

SEQ ID NO: 681389 - DNA, 15 bp, Homo sapiens
cctgacttagagcta

SEQ ID NO: 681390 - DNA, 15 bp, Homo sapiens
ctgacttagagctag

SEQ ID NO: 681391 - DNA, 15 bp, Homo sapiens
tgacttagagctagt

SEQ ID NO: 681392 - DNA, 15 bp, Homo sapiens
gacttagagctagtc

SEQ ID NO: 681393 - DNA, 15 bp, Homo sapiens
acttagagctagtct

SEQ ID NO: 681394 - DNA, 15 bp, Homo sapiens
cttagagctagtctt

SEQ ID NO: 681395 - DNA, 15 bp, Homo sapiens
ttagagctagtcttc

SEQ ID NO: 681396 - DNA, 15 bp, Homo sapiens
tagagctagtcttcc

SEQ ID NO: 681397 - DNA, 15 bp, Homo sapiens
agagctagtcttcca

SEQ ID NO: 681398 - DNA, 15 bp, Homo sapiens
gagctagtcttccac

SEQ ID NO: 681399 - DNA, 15 bp, Homo sapiens
agctagtcttccact

SEQ ID NO: 681400 - DNA, 15 bp, Homo sapiens
gctagtcttccactt

SEQ ID NO: 681401 - DNA, 15 bp, Homo sapiens
ctagtcttccacttt

SEQ ID NO: 681402 - DNA, 15 bp, Homo sapiens
tagtcttccacttta

SEQ ID NO: 681403 - DNA, 15 bp, Homo sapiens
agtcttccactttac

SEQ ID NO: 681404 - DNA, 15 bp, Homo sapiens
gtcttccactttaca

SEQ ID NO: 681405 - DNA, 15 bp, Homo sapiens
tcttccactttacag

SEQ ID NO: 681406 - DNA, 15 bp, Homo sapiens
cttccactttacaga

SEQ ID NO: 681407 - DNA, 15 bp, Homo sapiens
ttccactttacagac

SEQ ID NO: 681408 - DNA, 15 bp, Homo sapiens
tccactttacagaca

SEQ ID NO: 681409 - DNA, 15 bp, Homo sapiens
ccactttacagacag

SEQ ID NO: 681410 - DNA, 15 bp, Homo sapiens
cactttacagacaga

SEQ ID NO: 681411 - DNA, 15 bp, Homo sapiens
actttacagacagaa

SEQ ID NO: 681412 - DNA, 15 bp, Homo sapiens
ctttacagacagaag

SEQ ID NO: 681413 - DNA, 15 bp, Homo sapiens
tttacagacagaagt

SEQ ID NO: 681414 - DNA, 15 bp, Homo sapiens
ttacagacagaagtt

SEQ ID NO: 681415 - DNA, 15 bp, Homo sapiens
tacagacagaagttt

SEQ ID NO: 681416 - DNA, 15 bp, Homo sapiens
acagacagaagtttc

SEQ ID NO: 681417 - DNA, 15 bp, Homo sapiens
cagacagaagtttct

SEQ ID NO: 681418 - DNA, 15 bp, Homo sapiens
agacagaagtttcta

SEQ ID NO: 681419 - DNA, 15 bp, Homo sapiens
gacagaagtttctat

SEQ ID NO: 681420 - DNA, 15 bp, Homo sapiens
acagaagtttctata

SEQ ID NO: 681421 - DNA, 15 bp, Homo sapiens
cagaagtttctatag

SEQ ID NO: 681422 - DNA, 15 bp, Homo sapiens
agaagtttctatagc

SEQ ID NO: 681423 - DNA, 15 bp, Homo sapiens
gaagtttctatagcg

SEQ ID NO: 681424 - DNA, 15 bp, Homo sapiens
aagtttctatagcga

SEQ ID NO: 681425 - DNA, 15 bp, Homo sapiens
agtttctatagcgaa

SEQ ID NO: 681426 - DNA, 15 bp, Homo sapiens
gtttctatagcgaaa

SEQ ID NO: 681427 - DNA, 15 bp, Homo sapiens
tttctatagcgaaat

SEQ ID NO: 681428 - DNA, 15 bp, Homo sapiens
ttctatagcgaaata

SEQ ID NO: 681429 - DNA, 15 bp, Homo sapiens
tctatagcgaaatat

SEQ ID NO: 681430 - DNA, 15 bp, Homo sapiens
ctatagcgaaatatg

SEQ ID NO: 681431 - DNA, 15 bp, Homo sapiens
tatagcgaaatatga

SEQ ID NO: 681432 - DNA, 15 bp, Homo sapiens
atagcgaaatatgaa

SEQ ID NO: 681433 - DNA, 15 bp, Homo sapiens
tagcgaaatatgaat

SEQ ID NO: 681434 - DNA, 15 bp, Homo sapiens
agcgaaatatgaatt

SEQ ID NO: 681435 - DNA, 15 bp, Homo sapiens
gcgaaatatgaatta

SEQ ID NO: 681436 - DNA, 15 bp, Homo sapiens
cgaaatatgaattag

SEQ ID NO: 681437 - DNA, 15 bp, Homo sapiens
gaaatatgaattagg

SEQ ID NO: 681438 - DNA, 15 bp, Homo sapiens
aaatatgaattaggc

SEQ ID NO: 681439 - DNA, 15 bp, Homo sapiens
aatatgaattaggct

SEQ ID NO: 681440 - DNA, 15 bp, Homo sapiens
atatgaattaggctc

SEQ ID NO: 681441 - DNA, 15 bp, Homo sapiens
tatgaattaggctca

SEQ ID NO: 681442 - DNA, 15 bp, Homo sapiens
atgaattaggctcaa

SEQ ID NO: 681443 - DNA, 15 bp, Homo sapiens
tgaattaggctcaaa

SEQ ID NO: 681444 - DNA, 15 bp, Homo sapiens
gaattaggctcaaaa

SEQ ID NO: 681445 - DNA, 15 bp, Homo sapiens
aattaggctcaaaat

SEQ ID NO: 681446 - DNA, 15 bp, Homo sapiens
attaggctcaaaatt

SEQ ID NO: 681447 - DNA, 15 bp, Homo sapiens
ttaggctcaaaatta

SEQ ID NO: 681448 - DNA, 15 bp, Homo sapiens
taggctcaaaattaa

SEQ ID NO: 681449 - DNA, 15 bp, Homo sapiens
aggctcaaaattaaa

SEQ ID NO: 681450 - DNA, 15 bp, Homo sapiens
ggctcaaaattaaaa

SEQ ID NO: 681451 - DNA, 15 bp, Homo sapiens
gctcaaaattaaaat

SEQ ID NO: 681452 - DNA, 15 bp, Homo sapiens
ctcaaaattaaaatg

SEQ ID NO: 681453 - DNA, 15 bp, Homo sapiens
tcaaaattaaaatgt

SEQ ID NO: 681454 - DNA, 15 bp, Homo sapiens
caaaattaaaatgtg

SEQ ID NO: 681455 - DNA, 15 bp, Homo sapiens
aaaattaaaatgtgc

SEQ ID NO: 681456 - DNA, 15 bp, Homo sapiens
aaattaaaatgtgca

SEQ ID NO: 681457 - DNA, 15 bp, Homo sapiens
aattaaaatgtgcaa

SEQ ID NO: 681458 - DNA, 15 bp, Homo sapiens
attaaaatgtgcaat

SEQ ID NO: 681459 - DNA, 15 bp, Homo sapiens
ttaaaatgtgcaatg

SEQ ID NO: 681460 - DNA, 15 bp, Homo sapiens
taaaatgtgcaatgt

SEQ ID NO: 681461 - DNA, 15 bp, Homo sapiens
aaaatgtgcaatgta

SEQ ID NO: 681462 - DNA, 15 bp, Homo sapiens
aaatgtgcaatgtaa

SEQ ID NO: 681463 - DNA, 15 bp, Homo sapiens
aatgtgcaatgtaat

SEQ ID NO: 681464 - DNA, 15 bp, Homo sapiens
atgtgcaatgtaatg

SEQ ID NO: 681465 - DNA, 15 bp, Homo sapiens
tgtgcaatgtaatgc

SEQ ID NO: 681466 - DNA, 15 bp, Homo sapiens
gtgcaatgtaatgct

SEQ ID NO: 681467 - DNA, 15 bp, Homo sapiens
tgcaatgtaatgctt

SEQ ID NO: 681468 - DNA, 15 bp, Homo sapiens
gcaatgtaatgcttc

SEQ ID NO: 681469 - DNA, 15 bp, Homo sapiens
caatgtaatgcttct

SEQ ID NO: 681470 - DNA, 15 bp, Homo sapiens
aatgtaatgcttctg

SEQ ID NO: 681471 - DNA, 15 bp, Homo sapiens
atgtaatgcttctgg

SEQ ID NO: 681472 - DNA, 15 bp, Homo sapiens
tgtaatgcttctgga

SEQ ID NO: 681473 - DNA, 15 bp, Homo sapiens
gtaatgcttctggaa

SEQ ID NO: 681474 - DNA, 15 bp, Homo sapiens
taatgcttctggaaa

SEQ ID NO: 681475 - DNA, 15 bp, Homo sapiens
aatgcttctggaaaa

SEQ ID NO: 681476 - DNA, 15 bp, Homo sapiens
atgcttctggaaaac

SEQ ID NO: 681477 - DNA, 15 bp, Homo sapiens
tgcttctggaaaacc

SEQ ID NO: 681478 - DNA, 15 bp, Homo sapiens
gcttctggaaaacca

SEQ ID NO: 681479 - DNA, 15 bp, Homo sapiens
cttctggaaaaccat

SEQ ID NO: 681480 - DNA, 15 bp, Homo sapiens
ttctggaaaaccatg

SEQ ID NO: 681481 - DNA, 15 bp, Homo sapiens
tctggaaaaccatgc

SEQ ID NO: 681482 - DNA, 15 bp, Homo sapiens
ctggaaaaccatgca

SEQ ID NO: 681483 - DNA, 15 bp, Homo sapiens
tggaaaaccatgcaa

SEQ ID NO: 681484 - DNA, 15 bp, Homo sapiens
ggaaaaccatgcaat

SEQ ID NO: 681485 - DNA, 15 bp, Homo sapiens
gaaaaccatgcaatt

SEQ ID NO: 681486 - DNA, 15 bp, Homo sapiens
aaaaccatgcaattt

SEQ ID NO: 681487 - DNA, 15 bp, Homo sapiens
aaaccatgcaatttt

SEQ ID NO: 681488 - DNA, 15 bp, Homo sapiens
aaccatgcaattttc

SEQ ID NO: 681489 - DNA, 15 bp, Homo sapiens
accatgcaattttca

SEQ ID NO: 681490 - DNA, 15 bp, Homo sapiens
ccatgcaattttcac

SEQ ID NO: 681491 - DNA, 15 bp, Homo sapiens
catgcaattttcaca

SEQ ID NO: 681492 - DNA, 15 bp, Homo sapiens
atgcaattttcacat

SEQ ID NO: 681493 - DNA, 15 bp, Homo sapiens
tgcaattttcacatc

SEQ ID NO: 681494 - DNA, 15 bp, Homo sapiens
gcaattttcacatca

SEQ ID NO: 681495 - DNA, 15 bp, Homo sapiens
caattttcacatcac

SEQ ID NO: 681496 - DNA, 15 bp, Homo sapiens
aattttcacatcact

SEQ ID NO: 681497 - DNA, 15 bp, Homo sapiens
attttcacatcactt

SEQ ID NO: 681498 - DNA, 15 bp, Homo sapiens
ttttcacatcactta

SEQ ID NO: 681499 - DNA, 15 bp, Homo sapiens
tttcacatcacttaa

SEQ ID NO: 681500 - DNA, 15 bp, Homo sapiens
ttcacatcacttaaa

SEQ ID NO: 681501 - DNA, 15 bp, Homo sapiens
tcacatcacttaaaa

SEQ ID NO: 681502 - DNA, 15 bp, Homo sapiens
cacatcacttaaaaa

SEQ ID NO: 681503 - DNA, 15 bp, Homo sapiens
acatcacttaaaaaa

SEQ ID NO: 681504 - DNA, 15 bp, Homo sapiens
catcacttaaaaaaa

SEQ ID NO: 681505 - DNA, 15 bp, Homo sapiens
atcacttaaaaaaag

SEQ ID NO: 681506 - DNA, 15 bp, Homo sapiens
tcacttaaaaaaaga

SEQ ID NO: 681507 - DNA, 15 bp, Homo sapiens
cacttaaaaaaagag

SEQ ID NO: 681508 - DNA, 15 bp, Homo sapiens
acttaaaaaaagagt

SEQ ID NO: 681509 - DNA, 15 bp, Homo sapiens
cttaaaaaaagagta

SEQ ID NO: 681510 - DNA, 15 bp, Homo sapiens
ttaaaaaaagagtaa

SEQ ID NO: 681511 - DNA, 15 bp, Homo sapiens
taaaaaaagagtaaa

SEQ ID NO: 681512 - DNA, 15 bp, Homo sapiens
aaaaaaagagtaaat

SEQ ID NO: 681513 - DNA, 15 bp, Homo sapiens
aaaaaagagtaaatt

SEQ ID NO: 681514 - DNA, 15 bp, Homo sapiens
aaaaagagtaaatta

SEQ ID NO: 681515 - DNA, 15 bp, Homo sapiens
aaaagagtaaattat

SEQ ID NO: 681516 - DNA, 15 bp, Homo sapiens
aaagagtaaattatg

SEQ ID NO: 681517 - DNA, 15 bp, Homo sapiens
aagagtaaattatgt

SEQ ID NO: 681518 - DNA, 15 bp, Homo sapiens
agagtaaattatgtc

SEQ ID NO: 681519 - DNA, 15 bp, Homo sapiens
gagtaaattatgtct

SEQ ID NO: 681520 - DNA, 15 bp, Homo sapiens
agtaaattatgtctt

SEQ ID NO: 681521 - DNA, 15 bp, Homo sapiens
gtaaattatgtcttc

SEQ ID NO: 681522 - DNA, 15 bp, Homo sapiens
taaattatgtcttca

SEQ ID NO: 681523 - DNA, 15 bp, Homo sapiens
aaattatgtcttcaa

SEQ ID NO: 681524 - DNA, 15 bp, Homo sapiens
aattatgtcttcaac

SEQ ID NO: 681525 - DNA, 15 bp, Homo sapiens
attatgtcttcaaca

SEQ ID NO: 681526 - DNA, 15 bp, Homo sapiens
ttatgtcttcaacat

SEQ ID NO: 681527 - DNA, 15 bp, Homo sapiens
tatgtcttcaacatg

SEQ ID NO: 681528 - DNA, 15 bp, Homo sapiens
atgtcttcaacatgt

SEQ ID NO: 681529 - DNA, 15 bp, Homo sapiens
tgtcttcaacatgtg

SEQ ID NO: 681530 - DNA, 15 bp, Homo sapiens
gtcttcaacatgtgc

SEQ ID NO: 681531 - DNA, 15 bp, Homo sapiens
tcttcaacatgtgct

SEQ ID NO: 681532 - DNA, 15 bp, Homo sapiens
cttcaacatgtgctt

SEQ ID NO: 681533 - DNA, 15 bp, Homo sapiens
ttcaacatgtgcttt

SEQ ID NO: 681534 - DNA, 15 bp, Homo sapiens
tcaacatgtgcttta

SEQ ID NO: 681535 - DNA, 15 bp, Homo sapiens
caacatgtgctttaa

SEQ ID NO: 681536 - DNA, 15 bp, Homo sapiens
aacatgtgctttaag

SEQ ID NO: 681537 - DNA, 15 bp, Homo sapiens
acatgtgctttaagt

SEQ ID NO: 681538 - DNA, 15 bp, Homo sapiens
catgtgctttaagtt

SEQ ID NO: 681539 - DNA, 15 bp, Homo sapiens
atgtgctttaagtta

SEQ ID NO: 681540 - DNA, 15 bp, Homo sapiens
tgtgctttaagttaa

SEQ ID NO: 681541 - DNA, 15 bp, Homo sapiens
gtgctttaagttaaa

SEQ ID NO: 681542 - DNA, 15 bp, Homo sapiens
tgctttaagttaaac

SEQ ID NO: 681543 - DNA, 15 bp, Homo sapiens
gctttaagttaaaca

SEQ ID NO: 681544 - DNA, 15 bp, Homo sapiens
ctttaagttaaacaa

SEQ ID NO: 681545 - DNA, 15 bp, Homo sapiens
tttaagttaaacaaa

SEQ ID NO: 681546 - DNA, 15 bp, Homo sapiens
ttaagttaaacaaag

SEQ ID NO: 681547 - DNA, 15 bp, Homo sapiens
taagttaaacaaaga

SEQ ID NO: 681548 - DNA, 15 bp, Homo sapiens
aagttaaacaaagag

SEQ ID NO: 681549 - DNA, 15 bp, Homo sapiens
agttaaacaaagaga

SEQ ID NO: 681550 - DNA, 15 bp, Homo sapiens
gttaaacaaagagaa

SEQ ID NO: 681551 - DNA, 15 bp, Homo sapiens
ttaaacaaagagaaa

SEQ ID NO: 681552 - DNA, 15 bp, Homo sapiens
taaacaaagagaaat

SEQ ID NO: 681553 - DNA, 15 bp, Homo sapiens
aaacaaagagaaata

SEQ ID NO: 681554 - DNA, 15 bp, Homo sapiens
aacaaagagaaataa

SEQ ID NO: 681555 - DNA, 15 bp, Homo sapiens
acaaagagaaataaa

SEQ ID NO: 681556 - DNA, 15 bp, Homo sapiens
caaagagaaataaaa

SEQ ID NO: 681557 - DNA, 15 bp, Homo sapiens
aaagagaaataaaaa

SEQ ID NO: 681558 - DNA, 15 bp, Homo sapiens
aagagaaataaaaat

SEQ ID NO: 681559 - DNA, 15 bp, Homo sapiens
agagaaataaaaata

SEQ ID NO: 681560 - DNA, 15 bp, Homo sapiens
gagaaataaaaataa

SEQ ID NO: 681561 - DNA, 15 bp, Homo sapiens
agaaataaaaataag

SEQ ID NO: 681562 - DNA, 15 bp, Homo sapiens
gaaataaaaataaga

SEQ ID NO: 681563 - DNA, 15 bp, Homo sapiens
aaataaaaataagaa

SEQ ID NO: 681564 - DNA, 15 bp, Homo sapiens
aataaaaataagaac

SEQ ID NO: 681565 - DNA, 15 bp, Homo sapiens
ataaaaataagaaca

SEQ ID NO: 681566 - DNA, 15 bp, Homo sapiens
taaaaataagaacat

SEQ ID NO: 681567 - DNA, 15 bp, Homo sapiens
aaaaataagaacatg

SEQ ID NO: 681568 - DNA, 15 bp, Homo sapiens
aaaataagaacatgc

SEQ ID NO: 681569 - DNA, 15 bp, Homo sapiens
aaataagaacatgct

SEQ ID NO: 681570 - DNA, 15 bp, Homo sapiens
aataagaacatgctc

SEQ ID NO: 681571 - DNA, 15 bp, Homo sapiens
ataagaacatgctct

SEQ ID NO: 681572 - DNA, 15 bp, Homo sapiens
taagaacatgctcta

SEQ ID NO: 681573 - DNA, 15 bp, Homo sapiens
aagaacatgctctag

SEQ ID NO: 681574 - DNA, 15 bp, Homo sapiens
agaacatgctctagc

SEQ ID NO: 681575 - DNA, 15 bp, Homo sapiens
gaacatgctctagcc

SEQ ID NO: 681576 - DNA, 15 bp, Homo sapiens
aacatgctctagccc

SEQ ID NO: 681577 - DNA, 15 bp, Homo sapiens
acatgctctagccca

SEQ ID NO: 681578 - DNA, 15 bp, Homo sapiens
catgctctagcccag

SEQ ID NO: 681579 - DNA, 15 bp, Homo sapiens
atgctctagcccagt

SEQ ID NO: 681580 - DNA, 15 bp, Homo sapiens
tgctctagcccagta

SEQ ID NO: 681581 - DNA, 15 bp, Homo sapiens
gctctagcccagtat

SEQ ID NO: 681582 - DNA, 15 bp, Homo sapiens
ctctagcccagtata

SEQ ID NO: 681583 - DNA, 15 bp, Homo sapiens
tctagcccagtatat

SEQ ID NO: 681584 - DNA, 15 bp, Homo sapiens
ctagcccagtatata

SEQ ID NO: 681585 - DNA, 15 bp, Homo sapiens
tagcccagtatataa

SEQ ID NO: 681586 - DNA, 15 bp, Homo sapiens
agcccagtatataat

SEQ ID NO: 681587 - DNA, 15 bp, Homo sapiens
gcccagtatataatg

SEQ ID NO: 681588 - DNA, 15 bp, Homo sapiens
cccagtatataatga

SEQ ID NO: 681589 - DNA, 15 bp, Homo sapiens
ccagtatataatgat

SEQ ID NO: 681590 - DNA, 15 bp, Homo sapiens
cagtatataatgatg

SEQ ID NO: 681591 - DNA, 15 bp, Homo sapiens
agtatataatgatga

SEQ ID NO: 681592 - DNA, 15 bp, Homo sapiens
gtatataatgatgaa

SEQ ID NO: 681593 - DNA, 15 bp, Homo sapiens
tatataatgatgaaa

SEQ ID NO: 681594 - DNA, 15 bp, Homo sapiens
atataatgatgaaac

SEQ ID NO: 681595 - DNA, 15 bp, Homo sapiens
tataatgatgaaacc

SEQ ID NO: 681596 - DNA, 15 bp, Homo sapiens
ataatgatgaaacca

SEQ ID NO: 681597 - DNA, 15 bp, Homo sapiens
taatgatgaaaccaa

SEQ ID NO: 681598 - DNA, 15 bp, Homo sapiens
aatgatgaaaccaat

SEQ ID NO: 681599 - DNA, 15 bp, Homo sapiens
atgatgaaaccaatg

SEQ ID NO: 681600 - DNA, 15 bp, Homo sapiens
tgatgaaaccaatgt

SEQ ID NO: 681601 - DNA, 15 bp, Homo sapiens
gatgaaaccaatgtc

SEQ ID NO: 681602 - DNA, 15 bp, Homo sapiens
atgaaaccaatgtct

SEQ ID NO: 681603 - DNA, 15 bp, Homo sapiens
tgaaaccaatgtctg

SEQ ID NO: 681604 - DNA, 15 bp, Homo sapiens
gaaaccaatgtctga

SEQ ID NO: 681605 - DNA, 15 bp, Homo sapiens
aaaccaatgtctgag

SEQ ID NO: 681606 - DNA, 15 bp, Homo sapiens
aaccaatgtctgagt

SEQ ID NO: 681607 - DNA, 15 bp, Homo sapiens
accaatgtctgagtg

SEQ ID NO: 681608 - DNA, 15 bp, Homo sapiens
ccaatgtctgagtgg

SEQ ID NO: 681609 - DNA, 15 bp, Homo sapiens
caatgtctgagtgga

SEQ ID NO: 681610 - DNA, 15 bp, Homo sapiens
aatgtctgagtggat

SEQ ID NO: 681611 - DNA, 15 bp, Homo sapiens
atgtctgagtggatt

SEQ ID NO: 681612 - DNA, 15 bp, Homo sapiens
tgtctgagtggatta

SEQ ID NO: 681613 - DNA, 15 bp, Homo sapiens
gtctgagtggattat

SEQ ID NO: 681614 - DNA, 15 bp, Homo sapiens
tctgagtggattata

SEQ ID NO: 681615 - DNA, 15 bp, Homo sapiens
ctgagtggattatat

SEQ ID NO: 681616 - DNA, 15 bp, Homo sapiens
tgagtggattatatt

SEQ ID NO: 681617 - DNA, 15 bp, Homo sapiens
gagtggattatattt

SEQ ID NO: 681618 - DNA, 15 bp, Homo sapiens
agtggattatatttg

SEQ ID NO: 681619 - DNA, 15 bp, Homo sapiens
gtggattatatttgc

SEQ ID NO: 681620 - DNA, 15 bp, Homo sapiens
tggattatatttgca

SEQ ID NO: 681621 - DNA, 15 bp, Homo sapiens
ggattatatttgcag

SEQ ID NO: 681622 - DNA, 15 bp, Homo sapiens
gattatatttgcaga

SEQ ID NO: 681623 - DNA, 15 bp, Homo sapiens
attatatttgcagaa

SEQ ID NO: 681624 - DNA, 15 bp, Homo sapiens
ttatatttgcagaaa

SEQ ID NO: 681625 - DNA, 15 bp, Homo sapiens
tatatttgcagaaaa

SEQ ID NO: 681626 - DNA, 15 bp, Homo sapiens
atatttgcagaaaag

SEQ ID NO: 681627 - DNA, 15 bp, Homo sapiens
tatttgcagaaaagt

SEQ ID NO: 681628 - DNA, 15 bp, Homo sapiens
atttgcagaaaagta

SEQ ID NO: 681629 - DNA, 15 bp, Homo sapiens
tttgcagaaaagtaa

SEQ ID NO: 681630 - DNA, 15 bp, Homo sapiens
ttgcagaaaagtaat

SEQ ID NO: 681631 - DNA, 15 bp, Homo sapiens
tgcagaaaagtaata

SEQ ID NO: 681632 - DNA, 15 bp, Homo sapiens
gcagaaaagtaatac

SEQ ID NO: 681633 - DNA, 15 bp, Homo sapiens
cagaaaagtaataca

SEQ ID NO: 681634 - DNA, 15 bp, Homo sapiens
agaaaagtaatacag

SEQ ID NO: 681635 - DNA, 15 bp, Homo sapiens
gaaaagtaatacaga

SEQ ID NO: 681636 - DNA, 15 bp, Homo sapiens
aaaagtaatacagaa

SEQ ID NO: 681637 - DNA, 15 bp, Homo sapiens
aaagtaatacagaaa

SEQ ID NO: 681638 - DNA, 15 bp, Homo sapiens
aagtaatacagaaac

SEQ ID NO: 681639 - DNA, 15 bp, Homo sapiens
agtaatacagaaacc

SEQ ID NO: 681640 - DNA, 15 bp, Homo sapiens
gtaatacagaaacct

SEQ ID NO: 681641 - DNA, 15 bp, Homo sapiens
taatacagaaacctt

SEQ ID NO: 681642 - DNA, 15 bp, Homo sapiens
aatacagaaaccttt

SEQ ID NO: 681643 - DNA, 15 bp, Homo sapiens
atacagaaaccttta

SEQ ID NO: 681644 - DNA, 15 bp, Homo sapiens
tacagaaacctttag

SEQ ID NO: 681645 - DNA, 15 bp, Homo sapiens
acagaaacctttagg

SEQ ID NO: 681646 - DNA, 15 bp, Homo sapiens
cagaaacctttagga

SEQ ID NO: 681647 - DNA, 15 bp, Homo sapiens
agaaacctttaggaa

SEQ ID NO: 681648 - DNA, 15 bp, Homo sapiens
gaaacctttaggaag

SEQ ID NO: 681649 - DNA, 15 bp, Homo sapiens
aaacctttaggaagt

SEQ ID NO: 681650 - DNA, 15 bp, Homo sapiens
aacctttaggaagtc

SEQ ID NO: 681651 - DNA, 15 bp, Homo sapiens
acctttaggaagtcc

SEQ ID NO: 681652 - DNA, 15 bp, Homo sapiens
cctttaggaagtcct

SEQ ID NO: 681653 - DNA, 15 bp, Homo sapiens
ctttaggaagtcctg

SEQ ID NO: 681654 - DNA, 15 bp, Homo sapiens
tttaggaagtcctgc

SEQ ID NO: 681655 - DNA, 15 bp, Homo sapiens
ttaggaagtcctgcc

SEQ ID NO: 681656 - DNA, 15 bp, Homo sapiens
taggaagtcctgcct

SEQ ID NO: 681657 - DNA, 15 bp, Homo sapiens
aggaagtcctgcctt

SEQ ID NO: 681658 - DNA, 15 bp, Homo sapiens
ggaagtcctgccttg

SEQ ID NO: 681659 - DNA, 15 bp, Homo sapiens
gaagtcctgccttgt

SEQ ID NO: 681660 - DNA, 15 bp, Homo sapiens
aagtcctgccttgtt

SEQ ID NO: 681661 - DNA, 15 bp, Homo sapiens
agtcctgccttgttt

SEQ ID NO: 681662 - DNA, 15 bp, Homo sapiens
gtcctgccttgtttt

SEQ ID NO: 681663 - DNA, 15 bp, Homo sapiens
tcctgccttgttttc

SEQ ID NO: 681664 - DNA, 15 bp, Homo sapiens
cctgccttgttttca

SEQ ID NO: 681665 - DNA, 15 bp, Homo sapiens
ctgccttgttttcac

SEQ ID NO: 681666 - DNA, 15 bp, Homo sapiens
tgccttgttttcacc

SEQ ID NO: 681667 - DNA, 15 bp, Homo sapiens
gccttgttttcacct

SEQ ID NO: 681668 - DNA, 15 bp, Homo sapiens
ccttgttttcacctc

SEQ ID NO: 681669 - DNA, 15 bp, Homo sapiens
cttgttttcacctcg

SEQ ID NO: 681670 - DNA, 15 bp, Homo sapiens
ttgttttcacctcgt

SEQ ID NO: 681671 - DNA, 15 bp, Homo sapiens
tgttttcacctcgtg

SEQ ID NO: 681672 - DNA, 15 bp, Homo sapiens
gttttcacctcgtga

SEQ ID NO: 681673 - DNA, 15 bp, Homo sapiens
ttttcacctcgtgat

SEQ ID NO: 681674 - DNA, 15 bp, Homo sapiens
tttcacctcgtgatt

SEQ ID NO: 681675 - DNA, 15 bp, Homo sapiens
ttcacctcgtgattc

SEQ ID NO: 681676 - DNA, 15 bp, Homo sapiens
tcacctcgtgattca

SEQ ID NO: 681677 - DNA, 15 bp, Homo sapiens
cacctcgtgattcat

SEQ ID NO: 681678 - DNA, 15 bp, Homo sapiens
acctcgtgattcatg

SEQ ID NO: 681679 - DNA, 15 bp, Homo sapiens
cctcgtgattcatga

SEQ ID NO: 681680 - DNA, 15 bp, Homo sapiens
ctcgtgattcatgat

SEQ ID NO: 681681 - DNA, 15 bp, Homo sapiens
tcgtgattcatgatc

SEQ ID NO: 681682 - DNA, 15 bp, Homo sapiens
cgtgattcatgatca

SEQ ID NO: 681683 - DNA, 15 bp, Homo sapiens
gtgattcatgatcac

SEQ ID NO: 681684 - DNA, 15 bp, Homo sapiens
tgattcatgatcacg

SEQ ID NO: 681685 - DNA, 15 bp, Homo sapiens
gattcatgatcacga

SEQ ID NO: 681686 - DNA, 15 bp, Homo sapiens
attcatgatcacgaa

SEQ ID NO: 681687 - DNA, 15 bp, Homo sapiens
ttcatgatcacgaat

SEQ ID NO: 681688 - DNA, 15 bp, Homo sapiens
tcatgatcacgaatc

SEQ ID NO: 681689 - DNA, 15 bp, Homo sapiens
catgatcacgaatca

SEQ ID NO: 681690 - DNA, 15 bp, Homo sapiens
atgatcacgaatcat

SEQ ID NO: 681691 - DNA, 15 bp, Homo sapiens
tgatcacgaatcatt

SEQ ID NO: 681692 - DNA, 15 bp, Homo sapiens
gatcacgaatcattc

SEQ ID NO: 681693 - DNA, 15 bp, Homo sapiens
atcacgaatcattct

SEQ ID NO: 681694 - DNA, 15 bp, Homo sapiens
tcacgaatcattctc

SEQ ID NO: 681695 - DNA, 15 bp, Homo sapiens
cacgaatcattctcc

SEQ ID NO: 681696 - DNA, 15 bp, Homo sapiens
acgaatcattctcca

SEQ ID NO: 681697 - DNA, 15 bp, Homo sapiens
cgaatcattctccag

SEQ ID NO: 681698 - DNA, 15 bp, Homo sapiens
gaatcattctccagc

SEQ ID NO: 681699 - DNA, 15 bp, Homo sapiens
aatcattctccagct

SEQ ID NO: 681700 - DNA, 15 bp, Homo sapiens
atcattctccagcta

SEQ ID NO: 681701 - DNA, 15 bp, Homo sapiens
tcattctccagctac

SEQ ID NO: 681702 - DNA, 15 bp, Homo sapiens
cattctccagctaca

SEQ ID NO: 681703 - DNA, 15 bp, Homo sapiens
attctccagctacac

SEQ ID NO: 681704 - DNA, 15 bp, Homo sapiens
ttctccagctacact

SEQ ID NO: 681705 - DNA, 15 bp, Homo sapiens
tctccagctacactt

SEQ ID NO: 681706 - DNA, 15 bp, Homo sapiens
ctccagctacacttg

SEQ ID NO: 681707 - DNA, 15 bp, Homo sapiens
tccagctacacttgg

SEQ ID NO: 681708 - DNA, 15 bp, Homo sapiens
ccagctacacttggc

SEQ ID NO: 681709 - DNA, 15 bp, Homo sapiens
cagctacacttggca

SEQ ID NO: 681710 - DNA, 15 bp, Homo sapiens
agctacacttggcat

SEQ ID NO: 681711 - DNA, 15 bp, Homo sapiens
gctacacttggcatg

SEQ ID NO: 681712 - DNA, 15 bp, Homo sapiens
ctacacttggcatgg

SEQ ID NO: 681713 - DNA, 15 bp, Homo sapiens
tacacttggcatgga

SEQ ID NO: 681714 - DNA, 15 bp, Homo sapiens
acacttggcatggaa

SEQ ID NO: 681715 - DNA, 15 bp, Homo sapiens
cacttggcatggaat

SEQ ID NO: 681716 - DNA, 15 bp, Homo sapiens
acttggcatggaatt

SEQ ID NO: 681717 - DNA, 15 bp, Homo sapiens
cttggcatggaattc

SEQ ID NO: 681718 - DNA, 15 bp, Homo sapiens
ttggcatggaattcc

SEQ ID NO: 681719 - DNA, 15 bp, Homo sapiens
tggcatggaattccc

SEQ ID NO: 681720 - DNA, 15 bp, Homo sapiens
ggcatggaattccca

SEQ ID NO: 681721 - DNA, 15 bp, Homo sapiens
gcatggaattcccag

SEQ ID NO: 681722 - DNA, 15 bp, Homo sapiens
catggaattcccaga

SEQ ID NO: 681723 - DNA, 15 bp, Homo sapiens
atggaattcccagat

SEQ ID NO: 681724 - DNA, 15 bp, Homo sapiens
tggaattcccagata

SEQ ID NO: 681725 - DNA, 15 bp, Homo sapiens
ggaattcccagatat

SEQ ID NO: 681726 - DNA, 15 bp, Homo sapiens
gaattcccagatatt

SEQ ID NO: 681727 - DNA, 15 bp, Homo sapiens
aattcccagatattt

SEQ ID NO: 681728 - DNA, 15 bp, Homo sapiens
attcccagatattta

SEQ ID NO: 681729 - DNA, 15 bp, Homo sapiens
ttcccagatatttag

SEQ ID NO: 681730 - DNA, 15 bp, Homo sapiens
tcccagatatttagc

SEQ ID NO: 681731 - DNA, 15 bp, Homo sapiens
cccagatatttagca

SEQ ID NO: 681732 - DNA, 15 bp, Homo sapiens
ccagatatttagcag

SEQ ID NO: 681733 - DNA, 15 bp, Homo sapiens
cagatatttagcagc

SEQ ID NO: 681734 - DNA, 15 bp, Homo sapiens
agatatttagcagca

SEQ ID NO: 681735 - DNA, 15 bp, Homo sapiens
gatatttagcagcat

SEQ ID NO: 681736 - DNA, 15 bp, Homo sapiens
atatttagcagcatc

SEQ ID NO: 681737 - DNA, 15 bp, Homo sapiens
tatttagcagcatct

SEQ ID NO: 681738 - DNA, 15 bp, Homo sapiens
atttagcagcatcta

SEQ ID NO: 681739 - DNA, 15 bp, Homo sapiens
tttagcagcatctaa

SEQ ID NO: 681740 - DNA, 15 bp, Homo sapiens
ttagcagcatctaaa

SEQ ID NO: 681741 - DNA, 15 bp, Homo sapiens
tagcagcatctaaac

SEQ ID NO: 681742 - DNA, 15 bp, Homo sapiens
agcagcatctaaaca

SEQ ID NO: 681743 - DNA, 15 bp, Homo sapiens
gcagcatctaaacat

SEQ ID NO: 681744 - DNA, 15 bp, Homo sapiens
cagcatctaaacatg

SEQ ID NO: 681745 - DNA, 15 bp, Homo sapiens
agcatctaaacatgt

SEQ ID NO: 681746 - DNA, 15 bp, Homo sapiens
gcatctaaacatgtt

SEQ ID NO: 681747 - DNA, 15 bp, Homo sapiens
catctaaacatgttt

SEQ ID NO: 681748 - DNA, 15 bp, Homo sapiens
atctaaacatgtttc

SEQ ID NO: 681749 - DNA, 15 bp, Homo sapiens
tctaaacatgtttct

SEQ ID NO: 681750 - DNA, 15 bp, Homo sapiens
ctaaacatgtttctc

SEQ ID NO: 681751 - DNA, 15 bp, Homo sapiens
taaacatgtttctct

SEQ ID NO: 681752 - DNA, 15 bp, Homo sapiens
aaacatgtttctctc

SEQ ID NO: 681753 - DNA, 15 bp, Homo sapiens
aacatgtttctctcc

SEQ ID NO: 681754 - DNA, 15 bp, Homo sapiens
acatgtttctctcca

SEQ ID NO: 681755 - DNA, 15 bp, Homo sapiens
catgtttctctccac

SEQ ID NO: 681756 - DNA, 15 bp, Homo sapiens
atgtttctctccaca

SEQ ID NO: 681757 - DNA, 15 bp, Homo sapiens
tgtttctctccacag

SEQ ID NO: 681758 - DNA, 15 bp, Homo sapiens
gtttctctccacaga

SEQ ID NO: 681759 - DNA, 15 bp, Homo sapiens
tttctctccacagat

SEQ ID NO: 681760 - DNA, 15 bp, Homo sapiens
ttctctccacagatt

SEQ ID NO: 681761 - DNA, 15 bp, Homo sapiens
tctctccacagatta

SEQ ID NO: 681762 - DNA, 15 bp, Homo sapiens
ctctccacagattaa

SEQ ID NO: 681763 - DNA, 15 bp, Homo sapiens
tctccacagattaac

SEQ ID NO: 681764 - DNA, 15 bp, Homo sapiens
ctccacagattaacc

SEQ ID NO: 681765 - DNA, 15 bp, Homo sapiens
tccacagattaacca

SEQ ID NO: 681766 - DNA, 15 bp, Homo sapiens
ccacagattaaccat

SEQ ID NO: 681767 - DNA, 15 bp, Homo sapiens
cacagattaaccatt

SEQ ID NO: 681768 - DNA, 15 bp, Homo sapiens
acagattaaccattc

SEQ ID NO: 681769 - DNA, 15 bp, Homo sapiens
cagattaaccattct

SEQ ID NO: 681770 - DNA, 15 bp, Homo sapiens
agattaaccattctt

SEQ ID NO: 681771 - DNA, 15 bp, Homo sapiens
gattaaccattctta

SEQ ID NO: 681772 - DNA, 15 bp, Homo sapiens
attaaccattcttat

SEQ ID NO: 681773 - DNA, 15 bp, Homo sapiens
ttaaccattcttatt

SEQ ID NO: 681774 - DNA, 15 bp, Homo sapiens
taaccattcttattc

SEQ ID NO: 681775 - DNA, 15 bp, Homo sapiens
aaccattcttattca

SEQ ID NO: 681776 - DNA, 15 bp, Homo sapiens
accattcttattcaa

SEQ ID NO: 681777 - DNA, 15 bp, Homo sapiens
ccattcttattcaag

SEQ ID NO: 681778 - DNA, 15 bp, Homo sapiens
cattcttattcaagt

SEQ ID NO: 681779 - DNA, 15 bp, Homo sapiens
attcttattcaagtg

SEQ ID NO: 681780 - DNA, 15 bp, Homo sapiens
ttcttattcaagtgt

SEQ ID NO: 681781 - DNA, 15 bp, Homo sapiens
tcttattcaagtgtc

SEQ ID NO: 681782 - DNA, 15 bp, Homo sapiens
cttattcaagtgtca

SEQ ID NO: 681783 - DNA, 15 bp, Homo sapiens
ttattcaagtgtcaa

SEQ ID NO: 681784 - DNA, 15 bp, Homo sapiens
tattcaagtgtcaat

SEQ ID NO: 681785 - DNA, 15 bp, Homo sapiens
attcaagtgtcaatt

SEQ ID NO: 681786 - DNA, 15 bp, Homo sapiens
ttcaagtgtcaattt

SEQ ID NO: 681787 - DNA, 15 bp, Homo sapiens
tcaagtgtcaatttt

SEQ ID NO: 681788 - DNA, 15 bp, Homo sapiens
caagtgtcaattttt

SEQ ID NO: 681789 - DNA, 15 bp, Homo sapiens
aagtgtcaatttttt

SEQ ID NO: 681790 - DNA, 15 bp, Homo sapiens
agtgtcaatttttta

SEQ ID NO: 681791 - DNA, 15 bp, Homo sapiens
gtgtcaattttttaa

SEQ ID NO: 681792 - DNA, 15 bp, Homo sapiens
tgtcaattttttaaa

SEQ ID NO: 681793 - DNA, 15 bp, Homo sapiens
gtcaattttttaaaa

SEQ ID NO: 681794 - DNA, 15 bp, Homo sapiens
tcaattttttaaaaa

SEQ ID NO: 681795 - DNA, 15 bp, Homo sapiens
caattttttaaaaaa

SEQ ID NO: 681796 - DNA, 15 bp, Homo sapiens
aattttttaaaaaaa

SEQ ID NO: 681797 - DNA, 15 bp, Homo sapiens
attttttaaaaaaat

SEQ ID NO: 681798 - DNA, 15 bp, Homo sapiens
ttttttaaaaaaatt

SEQ ID NO: 681799 - DNA, 15 bp, Homo sapiens
tttttaaaaaaattt

SEQ ID NO: 681800 - DNA, 15 bp, Homo sapiens
ttttaaaaaaatttc

SEQ ID NO: 681801 - DNA, 15 bp, Homo sapiens
tttaaaaaaatttca

SEQ ID NO: 681802 - DNA, 15 bp, Homo sapiens
ttaaaaaaatttcag

SEQ ID NO: 681803 - DNA, 15 bp, Homo sapiens
taaaaaaatttcagt

SEQ ID NO: 681804 - DNA, 15 bp, Homo sapiens
aaaaaaatttcagtt

SEQ ID NO: 681805 - DNA, 15 bp, Homo sapiens
aaaaaatttcagtta

SEQ ID NO: 681806 - DNA, 15 bp, Homo sapiens
aaaaatttcagttat

SEQ ID NO: 681807 - DNA, 15 bp, Homo sapiens
aaaatttcagttatc

SEQ ID NO: 681808 - DNA, 15 bp, Homo sapiens
aaatttcagttatct

SEQ ID NO: 681809 - DNA, 15 bp, Homo sapiens
aatttcagttatctt

SEQ ID NO: 681810 - DNA, 15 bp, Homo sapiens
atttcagttatcttt

SEQ ID NO: 681811 - DNA, 15 bp, Homo sapiens
tttcagttatctttc

SEQ ID NO: 681812 - DNA, 15 bp, Homo sapiens
ttcagttatctttct

SEQ ID NO: 681813 - DNA, 15 bp, Homo sapiens
tcagttatctttcta

SEQ ID NO: 681814 - DNA, 15 bp, Homo sapiens
cagttatctttctaa

SEQ ID NO: 681815 - DNA, 15 bp, Homo sapiens
agttatctttctaaa

SEQ ID NO: 681816 - DNA, 15 bp, Homo sapiens
gttatctttctaaag

SEQ ID NO: 681817 - DNA, 15 bp, Homo sapiens
ttatctttctaaaga

SEQ ID NO: 681818 - DNA, 15 bp, Homo sapiens
tatctttctaaagaa

SEQ ID NO: 681819 - DNA, 15 bp, Homo sapiens
atctttctaaagaac

SEQ ID NO: 681820 - DNA, 15 bp, Homo sapiens
tctttctaaagaaca

SEQ ID NO: 681821 - DNA, 15 bp, Homo sapiens
ctttctaaagaacag

SEQ ID NO: 681822 - DNA, 15 bp, Homo sapiens
tttctaaagaacagc

SEQ ID NO: 681823 - DNA, 15 bp, Homo sapiens
ttctaaagaacagcc

SEQ ID NO: 681824 - DNA, 15 bp, Homo sapiens
tctaaagaacagcct

SEQ ID NO: 681825 - DNA, 15 bp, Homo sapiens
ctaaagaacagcctt

SEQ ID NO: 681826 - DNA, 15 bp, Homo sapiens
taaagaacagccttt

SEQ ID NO: 681827 - DNA, 15 bp, Homo sapiens
aaagaacagcctttc

SEQ ID NO: 681828 - DNA, 15 bp, Homo sapiens
aagaacagcctttcc

SEQ ID NO: 681829 - DNA, 15 bp, Homo sapiens
agaacagcctttcct

SEQ ID NO: 681830 - DNA, 15 bp, Homo sapiens
gaacagcctttccta

SEQ ID NO: 681831 - DNA, 15 bp, Homo sapiens
aacagcctttcctac

SEQ ID NO: 681832 - DNA, 15 bp, Homo sapiens
acagcctttcctaca

SEQ ID NO: 681833 - DNA, 15 bp, Homo sapiens
cagcctttcctacat

SEQ ID NO: 681834 - DNA, 15 bp, Homo sapiens
agcctttcctacatg

SEQ ID NO: 681835 - DNA, 15 bp, Homo sapiens
gcctttcctacatgt

SEQ ID NO: 681836 - DNA, 15 bp, Homo sapiens
cctttcctacatgta

SEQ ID NO: 681837 - DNA, 15 bp, Homo sapiens
ctttcctacatgtac

SEQ ID NO: 681838 - DNA, 15 bp, Homo sapiens
tttcctacatgtaca

SEQ ID NO: 681839 - DNA, 15 bp, Homo sapiens
ttcctacatgtacag

SEQ ID NO: 681840 - DNA, 15 bp, Homo sapiens
tcctacatgtacaga

SEQ ID NO: 681841 - DNA, 15 bp, Homo sapiens
cctacatgtacagac

SEQ ID NO: 681842 - DNA, 15 bp, Homo sapiens
ctacatgtacagaca

SEQ ID NO: 681843 - DNA, 15 bp, Homo sapiens
tacatgtacagacaa

SEQ ID NO: 681844 - DNA, 15 bp, Homo sapiens
acatgtacagacaat

SEQ ID NO: 681845 - DNA, 15 bp, Homo sapiens
catgtacagacaatt

SEQ ID NO: 681846 - DNA, 15 bp, Homo sapiens
atgtacagacaattc

SEQ ID NO: 681847 - DNA, 15 bp, Homo sapiens
tgtacagacaattca

SEQ ID NO: 681848 - DNA, 15 bp, Homo sapiens
gtacagacaattcat

SEQ ID NO: 681849 - DNA, 15 bp, Homo sapiens
tacagacaattcatg

SEQ ID NO: 681850 - DNA, 15 bp, Homo sapiens
acagacaattcatga

SEQ ID NO: 681851 - DNA, 15 bp, Homo sapiens
cagacaattcatgaa

SEQ ID NO: 681852 - DNA, 15 bp, Homo sapiens
agacaattcatgaaa

SEQ ID NO: 681853 - DNA, 15 bp, Homo sapiens
gacaattcatgaaag

SEQ ID NO: 681854 - DNA, 15 bp, Homo sapiens
acaattcatgaaaga

SEQ ID NO: 681855 - DNA, 15 bp, Homo sapiens
caattcatgaaagaa

SEQ ID NO: 681856 - DNA, 15 bp, Homo sapiens
aattcatgaaagaaa

SEQ ID NO: 681857 - DNA, 15 bp, Homo sapiens
attcatgaaagaaac

SEQ ID NO: 681858 - DNA, 15 bp, Homo sapiens
ttcatgaaagaaaca

SEQ ID NO: 681859 - DNA, 15 bp, Homo sapiens
tcatgaaagaaacac

SEQ ID NO: 681860 - DNA, 15 bp, Homo sapiens
catgaaagaaacaca

SEQ ID NO: 681861 - DNA, 15 bp, Homo sapiens
atgaaagaaacacaa

SEQ ID NO: 681862 - DNA, 15 bp, Homo sapiens
tgaaagaaacacaat

SEQ ID NO: 681863 - DNA, 15 bp, Homo sapiens
gaaagaaacacaatg

SEQ ID NO: 681864 - DNA, 15 bp, Homo sapiens
aaagaaacacaatgc

SEQ ID NO: 681865 - DNA, 15 bp, Homo sapiens
aagaaacacaatgcc

SEQ ID NO: 681866 - DNA, 15 bp, Homo sapiens
agaaacacaatgcca

SEQ ID NO: 681867 - DNA, 15 bp, Homo sapiens
gaaacacaatgccaa

SEQ ID NO: 681868 - DNA, 15 bp, Homo sapiens
aaacacaatgccaaa

SEQ ID NO: 681869 - DNA, 15 bp, Homo sapiens
aacacaatgccaaaa

SEQ ID NO: 681870 - DNA, 15 bp, Homo sapiens
acacaatgccaaaaa

SEQ ID NO: 681871 - DNA, 15 bp, Homo sapiens
cacaatgccaaaaac

SEQ ID NO: 681872 - DNA, 15 bp, Homo sapiens
acaatgccaaaaaca

SEQ ID NO: 681873 - DNA, 15 bp, Homo sapiens
caatgccaaaaacaa

SEQ ID NO: 681874 - DNA, 15 bp, Homo sapiens
aatgccaaaaacaat

SEQ ID NO: 681875 - DNA, 15 bp, Homo sapiens
atgccaaaaacaatg

SEQ ID NO: 681876 - DNA, 15 bp, Homo sapiens
tgccaaaaacaatga

SEQ ID NO: 681877 - DNA, 15 bp, Homo sapiens
gccaaaaacaatgaa

SEQ ID NO: 681878 - DNA, 15 bp, Homo sapiens
ccaaaaacaatgaaa

SEQ ID NO: 681879 - DNA, 15 bp, Homo sapiens
caaaaacaatgaaaa

SEQ ID NO: 681880 - DNA, 15 bp, Homo sapiens
aaaaacaatgaaaac

SEQ ID NO: 681881 - DNA, 15 bp, Homo sapiens
aaaacaatgaaaaca

SEQ ID NO: 681882 - DNA, 15 bp, Homo sapiens
aaacaatgaaaacat

SEQ ID NO: 681883 - DNA, 15 bp, Homo sapiens
aacaatgaaaacatg

SEQ ID NO: 681884 - DNA, 15 bp, Homo sapiens
acaatgaaaacatgt

SEQ ID NO: 681885 - DNA, 15 bp, Homo sapiens
caatgaaaacatgtt

SEQ ID NO: 681886 - DNA, 15 bp, Homo sapiens
aatgaaaacatgttt

SEQ ID NO: 681887 - DNA, 15 bp, Homo sapiens
atgaaaacatgtttt

SEQ ID NO: 681888 - DNA, 15 bp, Homo sapiens
tgaaaacatgtttta

SEQ ID NO: 681889 - DNA, 15 bp, Homo sapiens
gaaaacatgttttac

SEQ ID NO: 681890 - DNA, 15 bp, Homo sapiens
aaaacatgttttact

SEQ ID NO: 681891 - DNA, 15 bp, Homo sapiens
aaacatgttttactt

SEQ ID NO: 681892 - DNA, 15 bp, Homo sapiens
aacatgttttacttc

SEQ ID NO: 681893 - DNA, 15 bp, Homo sapiens
acatgttttacttca

SEQ ID NO: 681894 - DNA, 15 bp, Homo sapiens
catgttttacttcat

SEQ ID NO: 681895 - DNA, 15 bp, Homo sapiens
atgttttacttcata

SEQ ID NO: 681896 - DNA, 15 bp, Homo sapiens
tgttttacttcatag

SEQ ID NO: 681897 - DNA, 15 bp, Homo sapiens
gttttacttcatagg

SEQ ID NO: 681898 - DNA, 15 bp, Homo sapiens
ttttacttcataggt

SEQ ID NO: 681899 - DNA, 15 bp, Homo sapiens
tttacttcataggta

SEQ ID NO: 681900 - DNA, 15 bp, Homo sapiens
ttacttcataggtaa

SEQ ID NO: 681901 - DNA, 15 bp, Homo sapiens
tacttcataggtaaa

SEQ ID NO: 681902 - DNA, 15 bp, Homo sapiens
acttcataggtaaac

SEQ ID NO: 681903 - DNA, 15 bp, Homo sapiens
cttcataggtaaaca

SEQ ID NO: 681904 - DNA, 15 bp, Homo sapiens
ttcataggtaaacaa

SEQ ID NO: 681905 - DNA, 15 bp, Homo sapiens
tcataggtaaacaag

SEQ ID NO: 681906 - DNA, 15 bp, Homo sapiens
cataggtaaacaagt

SEQ ID NO: 681907 - DNA, 15 bp, Homo sapiens
ataggtaaacaagta

SEQ ID NO: 681908 - DNA, 15 bp, Homo sapiens
taggtaaacaagtaa

SEQ ID NO: 681909 - DNA, 15 bp, Homo sapiens
aggtaaacaagtaat

SEQ ID NO: 681910 - DNA, 15 bp, Homo sapiens
ggtaaacaagtaatt

SEQ ID NO: 681911 - DNA, 15 bp, Homo sapiens
gtaaacaagtaattt

SEQ ID NO: 681912 - DNA, 15 bp, Homo sapiens
taaacaagtaattta

SEQ ID NO: 681913 - DNA, 15 bp, Homo sapiens
aaacaagtaatttat

SEQ ID NO: 681914 - DNA, 15 bp, Homo sapiens
aacaagtaatttatg

SEQ ID NO: 681915 - DNA, 15 bp, Homo sapiens
acaagtaatttatgt

SEQ ID NO: 681916 - DNA, 15 bp, Homo sapiens
caagtaatttatgtt

SEQ ID NO: 681917 - DNA, 15 bp, Homo sapiens
aagtaatttatgtta

SEQ ID NO: 681918 - DNA, 15 bp, Homo sapiens
agtaatttatgttat

SEQ ID NO: 681919 - DNA, 15 bp, Homo sapiens
gtaatttatgttatt

SEQ ID NO: 681920 - DNA, 15 bp, Homo sapiens
taatttatgttattt

SEQ ID NO: 681921 - DNA, 15 bp, Homo sapiens
aatttatgttatttt

SEQ ID NO: 681922 - DNA, 15 bp, Homo sapiens
atttatgttattttt

SEQ ID NO: 681923 - DNA, 15 bp, Homo sapiens
tttatgttatttttt

SEQ ID NO: 681924 - DNA, 15 bp, Homo sapiens
ttatgttattttttg

SEQ ID NO: 681925 - DNA, 15 bp, Homo sapiens
tatgttattttttgc

SEQ ID NO: 681926 - DNA, 15 bp, Homo sapiens
atgttattttttgcc

SEQ ID NO: 681927 - DNA, 15 bp, Homo sapiens
tgttattttttgcct

SEQ ID NO: 681928 - DNA, 15 bp, Homo sapiens
gttattttttgcctg

SEQ ID NO: 681929 - DNA, 15 bp, Homo sapiens
ttattttttgcctgt

SEQ ID NO: 681930 - DNA, 15 bp, Homo sapiens
tattttttgcctgtc

SEQ ID NO: 681931 - DNA, 15 bp, Homo sapiens
attttttgcctgtca

SEQ ID NO: 681932 - DNA, 15 bp, Homo sapiens
ttttttgcctgtcaa

SEQ ID NO: 681933 - DNA, 15 bp, Homo sapiens
tttttgcctgtcaaa

SEQ ID NO: 681934 - DNA, 15 bp, Homo sapiens
ttttgcctgtcaaat

SEQ ID NO: 681935 - DNA, 15 bp, Homo sapiens
tttgcctgtcaaatg

SEQ ID NO: 681936 - DNA, 15 bp, Homo sapiens
ttgcctgtcaaatga

SEQ ID NO: 681937 - DNA, 15 bp, Homo sapiens
tgcctgtcaaatgag

SEQ ID NO: 681938 - DNA, 15 bp, Homo sapiens
gcctgtcaaatgagt

SEQ ID NO: 681939 - DNA, 15 bp, Homo sapiens
cctgtcaaatgagta

SEQ ID NO: 681940 - DNA, 15 bp, Homo sapiens
ctgtcaaatgagtaa

SEQ ID NO: 681941 - DNA, 15 bp, Homo sapiens
tgtcaaatgagtaaa

SEQ ID NO: 681942 - DNA, 15 bp, Homo sapiens
gtcaaatgagtaaat

SEQ ID NO: 681943 - DNA, 15 bp, Homo sapiens
tcaaatgagtaaata

SEQ ID NO: 681944 - DNA, 15 bp, Homo sapiens
caaatgagtaaatac

SEQ ID NO: 681945 - DNA, 15 bp, Homo sapiens
aaatgagtaaatact

SEQ ID NO: 681946 - DNA, 15 bp, Homo sapiens
aatgagtaaatactt

SEQ ID NO: 681947 - DNA, 15 bp, Homo sapiens
atgagtaaatacttt

SEQ ID NO: 681948 - DNA, 15 bp, Homo sapiens
tgagtaaatactttt

SEQ ID NO: 681949 - DNA, 15 bp, Homo sapiens
gagtaaatacttttt

SEQ ID NO: 681950 - DNA, 15 bp, Homo sapiens
agtaaatactttttt

SEQ ID NO: 681951 - DNA, 15 bp, Homo sapiens
gtaaatacttttttt

SEQ ID NO: 681952 - DNA, 15 bp, Homo sapiens
taaatactttttttt

SEQ ID NO: 681953 - DNA, 15 bp, Homo sapiens
aaatacttttttttt

SEQ ID NO: 681954 - DNA, 15 bp, Homo sapiens
aatactttttttttt

SEQ ID NO: 681955 - DNA, 15 bp, Homo sapiens
atacttttttttttt

SEQ ID NO: 681956 - DNA, 15 bp, Homo sapiens
tactttttttttttt

SEQ ID NO: 681957 - DNA, 15 bp, Homo sapiens
acttttttttttttt

SEQ ID NO: 681958 - DNA, 15 bp, Homo sapiens
tttttttttttttga

SEQ ID NO: 681959 - DNA, 15 bp, Homo sapiens
ttttttttttttgag

SEQ ID NO: 681960 - DNA, 15 bp, Homo sapiens
tttttttttttgaga

SEQ ID NO: 681961 - DNA, 15 bp, Homo sapiens
ttttttttttgagaa

SEQ ID NO: 681962 - DNA, 15 bp, Homo sapiens
tttttttttgagaaa

SEQ ID NO: 681963 - DNA, 15 bp, Homo sapiens
ttttttttgagaaag

SEQ ID NO: 681964 - DNA, 15 bp, Homo sapiens
tttttttgagaaaga

SEQ ID NO: 681965 - DNA, 15 bp, Homo sapiens
ttttttgagaaagag

SEQ ID NO: 681966 - DNA, 15 bp, Homo sapiens
tttttgagaaagagt

SEQ ID NO: 681967 - DNA, 15 bp, Homo sapiens
ttttgagaaagagtc

SEQ ID NO: 681968 - DNA, 15 bp, Homo sapiens
tttgagaaagagtct

SEQ ID NO: 681969 - DNA, 15 bp, Homo sapiens
ttgagaaagagtctc

SEQ ID NO: 681970 - DNA, 15 bp, Homo sapiens
tgagaaagagtctca

SEQ ID NO: 681971 - DNA, 15 bp, Homo sapiens
gagaaagagtctcac

SEQ ID NO: 681972 - DNA, 15 bp, Homo sapiens
agaaagagtctcact

SEQ ID NO: 681973 - DNA, 15 bp, Homo sapiens
gaaagagtctcactc

SEQ ID NO: 681974 - DNA, 15 bp, Homo sapiens
aaagagtctcactct

SEQ ID NO: 681975 - DNA, 15 bp, Homo sapiens
aagagtctcactctg

SEQ ID NO: 681976 - DNA, 15 bp, Homo sapiens
agagtctcactctgt

SEQ ID NO: 681977 - DNA, 15 bp, Homo sapiens
gagtctcactctgtt

SEQ ID NO: 681978 - DNA, 15 bp, Homo sapiens
agtctcactctgttg

SEQ ID NO: 681979 - DNA, 15 bp, Homo sapiens
gtctcactctgttgc

SEQ ID NO: 681980 - DNA, 15 bp, Homo sapiens
tctcactctgttgcc

SEQ ID NO: 681981 - DNA, 15 bp, Homo sapiens
ctcactctgttgccc

SEQ ID NO: 681982 - DNA, 15 bp, Homo sapiens
tcactctgttgccca

SEQ ID NO: 681983 - DNA, 15 bp, Homo sapiens
cactctgttgcccag

SEQ ID NO: 681984 - DNA, 15 bp, Homo sapiens
actctgttgcccaga

SEQ ID NO: 681985 - DNA, 15 bp, Homo sapiens
ctctgttgcccagac

SEQ ID NO: 681986 - DNA, 15 bp, Homo sapiens
tctgttgcccagact

SEQ ID NO: 681987 - DNA, 15 bp, Homo sapiens
ctgttgcccagactg

SEQ ID NO: 681988 - DNA, 15 bp, Homo sapiens
tgttgcccagactgg

SEQ ID NO: 681989 - DNA, 15 bp, Homo sapiens
gttgcccagactgga

SEQ ID NO: 681990 - DNA, 15 bp, Homo sapiens
ttgcccagactggag

SEQ ID NO: 681991 - DNA, 15 bp, Homo sapiens
tgcccagactggagt

SEQ ID NO: 681992 - DNA, 15 bp, Homo sapiens
gcccagactggagtg

SEQ ID NO: 681993 - DNA, 15 bp, Homo sapiens
cccagactggagtgc

SEQ ID NO: 681994 - DNA, 15 bp, Homo sapiens
ccagactggagtgca

SEQ ID NO: 681995 - DNA, 15 bp, Homo sapiens
cagactggagtgcag

SEQ ID NO: 681996 - DNA, 15 bp, Homo sapiens
agactggagtgcagt

SEQ ID NO: 681997 - DNA, 15 bp, Homo sapiens
gactggagtgcagtg

SEQ ID NO: 681998 - DNA, 15 bp, Homo sapiens
actggagtgcagtgg

SEQ ID NO: 681999 - DNA, 15 bp, Homo sapiens
ctggagtgcagtggc

SEQ ID NO: 682000 - DNA, 15 bp, Homo sapiens
tggagtgcagtggca

SEQ ID NO: 682001 - DNA, 15 bp, Homo sapiens
ggagtgcagtggcat

SEQ ID NO: 682002 - DNA, 15 bp, Homo sapiens
gagtgcagtggcatg

SEQ ID NO: 682003 - DNA, 15 bp, Homo sapiens
agtgcagtggcatga

SEQ ID NO: 682004 - DNA, 15 bp, Homo sapiens
gtgcagtggcatgat

SEQ ID NO: 682005 - DNA, 15 bp, Homo sapiens
tgcagtggcatgatc

SEQ ID NO: 682006 - DNA, 15 bp, Homo sapiens
gcagtggcatgatct

SEQ ID NO: 682007 - DNA, 15 bp, Homo sapiens
cagtggcatgatctc

SEQ ID NO: 682008 - DNA, 15 bp, Homo sapiens
agtggcatgatctca

SEQ ID NO: 682009 - DNA, 15 bp, Homo sapiens
gtggcatgatctcag

SEQ ID NO: 682010 - DNA, 15 bp, Homo sapiens
tggcatgatctcagc

SEQ ID NO: 682011 - DNA, 15 bp, Homo sapiens
ggcatgatctcagct

SEQ ID NO: 682012 - DNA, 15 bp, Homo sapiens
gcatgatctcagctc

SEQ ID NO: 682013 - DNA, 15 bp, Homo sapiens
catgatctcagctca

SEQ ID NO: 682014 - DNA, 15 bp, Homo sapiens
atgatctcagctcac

SEQ ID NO: 682015 - DNA, 15 bp, Homo sapiens
tgatctcagctcact

SEQ ID NO: 682016 - DNA, 15 bp, Homo sapiens
gatctcagctcactg

SEQ ID NO: 682017 - DNA, 15 bp, Homo sapiens
atctcagctcactgc

SEQ ID NO: 682018 - DNA, 15 bp, Homo sapiens
tctcagctcactgca

SEQ ID NO: 682019 - DNA, 15 bp, Homo sapiens
ctcagctcactgcaa

SEQ ID NO: 682020 - DNA, 15 bp, Homo sapiens
tcagctcactgcaac

SEQ ID NO: 682021 - DNA, 15 bp, Homo sapiens
cactgcaacctccat

SEQ ID NO: 682022 - DNA, 15 bp, Homo sapiens
actgcaacctccatc

SEQ ID NO: 682023 - DNA, 15 bp, Homo sapiens
ctgcaacctccatct

SEQ ID NO: 682024 - DNA, 15 bp, Homo sapiens
tgcaacctccatctc

SEQ ID NO: 682025 - DNA, 15 bp, Homo sapiens
gcaacctccatctcc

SEQ ID NO: 682026 - DNA, 15 bp, Homo sapiens
caacctccatctccc

SEQ ID NO: 682027 - DNA, 15 bp, Homo sapiens
aacctccatctccca

SEQ ID NO: 682028 - DNA, 15 bp, Homo sapiens
acctccatctcccag

SEQ ID NO: 682029 - DNA, 15 bp, Homo sapiens
cctccatctcccagt

SEQ ID NO: 682030 - DNA, 15 bp, Homo sapiens
ctccatctcccagtg

SEQ ID NO: 682031 - DNA, 15 bp, Homo sapiens
tccatctcccagtgt

SEQ ID NO: 682032 - DNA, 15 bp, Homo sapiens
ccatctcccagtgtg

SEQ ID NO: 682033 - DNA, 15 bp, Homo sapiens
catctcccagtgtga

SEQ ID NO: 682034 - DNA, 15 bp, Homo sapiens
atctcccagtgtgaa

SEQ ID NO: 682035 - DNA, 15 bp, Homo sapiens
tctcccagtgtgaag

SEQ ID NO: 682036 - DNA, 15 bp, Homo sapiens
ctcccagtgtgaagc

SEQ ID NO: 682037 - DNA, 15 bp, Homo sapiens
tcccagtgtgaagca

SEQ ID NO: 682038 - DNA, 15 bp, Homo sapiens
cccagtgtgaagcaa

SEQ ID NO: 682039 - DNA, 15 bp, Homo sapiens
ccagtgtgaagcaat

SEQ ID NO: 682040 - DNA, 15 bp, Homo sapiens
cagtgtgaagcaatt

SEQ ID NO: 682041 - DNA, 15 bp, Homo sapiens
agtgtgaagcaattc

SEQ ID NO: 682042 - DNA, 15 bp, Homo sapiens
gtgtgaagcaattct

SEQ ID NO: 682043 - DNA, 15 bp, Homo sapiens
tgtgaagcaattctc

SEQ ID NO: 682044 - DNA, 15 bp, Homo sapiens
gtgaagcaattctcg

SEQ ID NO: 682045 - DNA, 15 bp, Homo sapiens
tgaagcaattctcgt

SEQ ID NO: 682046 - DNA, 15 bp, Homo sapiens
gaagcaattctcgtg

SEQ ID NO: 682047 - DNA, 15 bp, Homo sapiens
aagcaattctcgtgc

SEQ ID NO: 682048 - DNA, 15 bp, Homo sapiens
agcaattctcgtgcc

SEQ ID NO: 682049 - DNA, 15 bp, Homo sapiens
gcaattctcgtgcct

SEQ ID NO: 682050 - DNA, 15 bp, Homo sapiens
caattctcgtgcctc

SEQ ID NO: 682051 - DNA, 15 bp, Homo sapiens
aattctcgtgcctca

SEQ ID NO: 682052 - DNA, 15 bp, Homo sapiens
attctcgtgcctcag

SEQ ID NO: 682053 - DNA, 15 bp, Homo sapiens
ttctcgtgcctcagg

SEQ ID NO: 682054 - DNA, 15 bp, Homo sapiens
tctcgtgcctcaggt

SEQ ID NO: 682055 - DNA, 15 bp, Homo sapiens
ctcgtgcctcaggtt

SEQ ID NO: 682056 - DNA, 15 bp, Homo sapiens
tcgtgcctcaggttc

SEQ ID NO: 682057 - DNA, 15 bp, Homo sapiens
cgtgcctcaggttcc

SEQ ID NO: 682058 - DNA, 15 bp, Homo sapiens
gtgcctcaggttccc

SEQ ID NO: 682059 - DNA, 15 bp, Homo sapiens
tgcctcaggttccca

SEQ ID NO: 682060 - DNA, 15 bp, Homo sapiens
gcctcaggttcccaa

SEQ ID NO: 682061 - DNA, 15 bp, Homo sapiens
cctcaggttcccaag

SEQ ID NO: 682062 - DNA, 15 bp, Homo sapiens
ctcaggttcccaagt

SEQ ID NO: 682063 - DNA, 15 bp, Homo sapiens
tcaggttcccaagta

SEQ ID NO: 682064 - DNA, 15 bp, Homo sapiens
caggttcccaagtaa

SEQ ID NO: 682065 - DNA, 15 bp, Homo sapiens
aggttcccaagtaac

SEQ ID NO: 682066 - DNA, 15 bp, Homo sapiens
ggttcccaagtaact

SEQ ID NO: 682067 - DNA, 15 bp, Homo sapiens
gttcccaagtaactc

SEQ ID NO: 682068 - DNA, 15 bp, Homo sapiens
ttcccaagtaactca

SEQ ID NO: 682069 - DNA, 15 bp, Homo sapiens
tcccaagtaactcag

SEQ ID NO: 682070 - DNA, 15 bp, Homo sapiens
cccaagtaactcaga

SEQ ID NO: 682071 - DNA, 15 bp, Homo sapiens
ccaagtaactcagac

SEQ ID NO: 682072 - DNA, 15 bp, Homo sapiens
caagtaactcagact

SEQ ID NO: 682073 - DNA, 15 bp, Homo sapiens
aagtaactcagacta

SEQ ID NO: 682074 - DNA, 15 bp, Homo sapiens
agtaactcagactac

SEQ ID NO: 682075 - DNA, 15 bp, Homo sapiens
gtaactcagactaca

SEQ ID NO: 682076 - DNA, 15 bp, Homo sapiens
taactcagactacag

SEQ ID NO: 682077 - DNA, 15 bp, Homo sapiens
aactcagactacagg

SEQ ID NO: 682078 - DNA, 15 bp, Homo sapiens
actcagactacaggt

SEQ ID NO: 682079 - DNA, 15 bp, Homo sapiens
ctcagactacaggtg

SEQ ID NO: 682080 - DNA, 15 bp, Homo sapiens
tcagactacaggtgt

SEQ ID NO: 682081 - DNA, 15 bp, Homo sapiens
cagactacaggtgtg

SEQ ID NO: 682082 - DNA, 15 bp, Homo sapiens
agactacaggtgtgt

SEQ ID NO: 682083 - DNA, 15 bp, Homo sapiens
ctacaggtgtgtgct

SEQ ID NO: 682084 - DNA, 15 bp, Homo sapiens
tacaggtgtgtgcta

SEQ ID NO: 682085 - DNA, 15 bp, Homo sapiens
acaggtgtgtgctac

SEQ ID NO: 682086 - DNA, 15 bp, Homo sapiens
caggtgtgtgctacc

SEQ ID NO: 682087 - DNA, 15 bp, Homo sapiens
aggtgtgtgctacca

SEQ ID NO: 682088 - DNA, 15 bp, Homo sapiens
ggtgtgtgctaccac

SEQ ID NO: 682089 - DNA, 15 bp, Homo sapiens
gtgtgtgctaccaca

SEQ ID NO: 682090 - DNA, 15 bp, Homo sapiens
tgtgtgctaccacac

SEQ ID NO: 682091 - DNA, 15 bp, Homo sapiens
gtgtgctaccacacc

SEQ ID NO: 682092 - DNA, 15 bp, Homo sapiens
tgtgctaccacacca

SEQ ID NO: 682093 - DNA, 15 bp, Homo sapiens
gtgctaccacaccag

SEQ ID NO: 682094 - DNA, 15 bp, Homo sapiens
tgctaccacaccagc

SEQ ID NO: 682095 - DNA, 15 bp, Homo sapiens
gctaccacaccagct

SEQ ID NO: 682096 - DNA, 15 bp, Homo sapiens
ctaccacaccagcta

SEQ ID NO: 682097 - DNA, 15 bp, Homo sapiens
taccacaccagctaa

SEQ ID NO: 682098 - DNA, 15 bp, Homo sapiens
accacaccagctaat

SEQ ID NO: 682099 - DNA, 15 bp, Homo sapiens
ccacaccagctaatt

SEQ ID NO: 682100 - DNA, 15 bp, Homo sapiens
cacaccagctaattt

SEQ ID NO: 682101 - DNA, 15 bp, Homo sapiens
acaccagctaatttt

SEQ ID NO: 682102 - DNA, 15 bp, Homo sapiens
caccagctaattttt

SEQ ID NO: 682103 - DNA, 15 bp, Homo sapiens
accagctaatttttg

SEQ ID NO: 682104 - DNA, 15 bp, Homo sapiens
gtatttttagtagaa

SEQ ID NO: 682105 - DNA, 15 bp, Homo sapiens
tatttttagtagaaa

SEQ ID NO: 682106 - DNA, 15 bp, Homo sapiens
atttttagtagaaat

SEQ ID NO: 682107 - DNA, 15 bp, Homo sapiens
tttttagtagaaatg

SEQ ID NO: 682108 - DNA, 15 bp, Homo sapiens
ttttagtagaaatgg

SEQ ID NO: 682109 - DNA, 15 bp, Homo sapiens
tttagtagaaatggg

SEQ ID NO: 682110 - DNA, 15 bp, Homo sapiens
ttagtagaaatgggg

SEQ ID NO: 682111 - DNA, 15 bp, Homo sapiens
tagtagaaatggggt

SEQ ID NO: 682112 - DNA, 15 bp, Homo sapiens
agtagaaatggggtt

SEQ ID NO: 682113 - DNA, 15 bp, Homo sapiens
gtagaaatggggttt

SEQ ID NO: 682114 - DNA, 15 bp, Homo sapiens
tagaaatggggtttc

SEQ ID NO: 682115 - DNA, 15 bp, Homo sapiens
agaaatggggtttca

SEQ ID NO: 682116 - DNA, 15 bp, Homo sapiens
gaaatggggtttcac

SEQ ID NO: 682117 - DNA, 15 bp, Homo sapiens
aaatggggtttcacc

SEQ ID NO: 682118 - DNA, 15 bp, Homo sapiens
aatggggtttcacca

SEQ ID NO: 682119 - DNA, 15 bp, Homo sapiens
atggggtttcaccat

SEQ ID NO: 682120 - DNA, 15 bp, Homo sapiens
tggggtttcaccatg

SEQ ID NO: 682121 - DNA, 15 bp, Homo sapiens
ggggtttcaccatgt

SEQ ID NO: 682122 - DNA, 15 bp, Homo sapiens
ggtttcaccatgttg

SEQ ID NO: 682123 - DNA, 15 bp, Homo sapiens
gtttcaccatgttgg

SEQ ID NO: 682124 - DNA, 15 bp, Homo sapiens
tttcaccatgttggc

SEQ ID NO: 682125 - DNA, 15 bp, Homo sapiens
ttcaccatgttggcc

SEQ ID NO: 682126 - DNA, 15 bp, Homo sapiens
tcaccatgttggcca

SEQ ID NO: 682127 - DNA, 15 bp, Homo sapiens
caccatgttggccag

SEQ ID NO: 682128 - DNA, 15 bp, Homo sapiens
accatgttggccaga

SEQ ID NO: 682129 - DNA, 15 bp, Homo sapiens
ccatgttggccagac

SEQ ID NO: 682130 - DNA, 15 bp, Homo sapiens
catgttggccagact

SEQ ID NO: 682131 - DNA, 15 bp, Homo sapiens
atgttggccagactg

SEQ ID NO: 682132 - DNA, 15 bp, Homo sapiens
tgttggccagactgg

SEQ ID NO: 682133 - DNA, 15 bp, Homo sapiens
gttggccagactggt

SEQ ID NO: 682134 - DNA, 15 bp, Homo sapiens
ttggccagactggtc

SEQ ID NO: 682135 - DNA, 15 bp, Homo sapiens
tggccagactggtct

SEQ ID NO: 682136 - DNA, 15 bp, Homo sapiens
ggccagactggtctt

SEQ ID NO: 682137 - DNA, 15 bp, Homo sapiens
gccagactggtcttg

SEQ ID NO: 682138 - DNA, 15 bp, Homo sapiens
ccagactggtcttga

SEQ ID NO: 682139 - DNA, 15 bp, Homo sapiens
cagactggtcttgaa

SEQ ID NO: 682140 - DNA, 15 bp, Homo sapiens
agactggtcttgaac

SEQ ID NO: 682141 - DNA, 15 bp, Homo sapiens
gactggtcttgaact

SEQ ID NO: 682142 - DNA, 15 bp, Homo sapiens
actggtcttgaactc

SEQ ID NO: 682143 - DNA, 15 bp, Homo sapiens
ctggtcttgaactcc

SEQ ID NO: 682144 - DNA, 15 bp, Homo sapiens
tggtcttgaactcct

SEQ ID NO: 682145 - DNA, 15 bp, Homo sapiens
ggtcttgaactcctg

SEQ ID NO: 682146 - DNA, 15 bp, Homo sapiens
gtcttgaactcctgg

SEQ ID NO: 682147 - DNA, 15 bp, Homo sapiens
tcttgaactcctggc

SEQ ID NO: 682148 - DNA, 15 bp, Homo sapiens
cttgaactcctggcc

SEQ ID NO: 682149 - DNA, 15 bp, Homo sapiens
ttgaactcctggcct

SEQ ID NO: 682150 - DNA, 15 bp, Homo sapiens
tgaactcctggcctc

SEQ ID NO: 682151 - DNA, 15 bp, Homo sapiens
gaactcctggcctca

SEQ ID NO: 682152 - DNA, 15 bp, Homo sapiens
ggcctcaagtgatct

SEQ ID NO: 682153 - DNA, 15 bp, Homo sapiens
gcctcaagtgatcta

SEQ ID NO: 682154 - DNA, 15 bp, Homo sapiens
cctcaagtgatctag

SEQ ID NO: 682155 - DNA, 15 bp, Homo sapiens
ctcaagtgatctagt

SEQ ID NO: 682156 - DNA, 15 bp, Homo sapiens
tcaagtgatctagtg

SEQ ID NO: 682157 - DNA, 15 bp, Homo sapiens
caagtgatctagtgt

SEQ ID NO: 682158 - DNA, 15 bp, Homo sapiens
aagtgatctagtgta

SEQ ID NO: 682159 - DNA, 15 bp, Homo sapiens
agtgatctagtgtaa

SEQ ID NO: 682160 - DNA, 15 bp, Homo sapiens
gtgatctagtgtaat

SEQ ID NO: 682161 - DNA, 15 bp, Homo sapiens
tgatctagtgtaatc

SEQ ID NO: 682162 - DNA, 15 bp, Homo sapiens
gatctagtgtaatcc

SEQ ID NO: 682163 - DNA, 15 bp, Homo sapiens
atctagtgtaatccc

SEQ ID NO: 682164 - DNA, 15 bp, Homo sapiens
tctagtgtaatccct

SEQ ID NO: 682165 - DNA, 15 bp, Homo sapiens
ctagtgtaatccctc

SEQ ID NO: 682166 - DNA, 15 bp, Homo sapiens
tagtgtaatccctcc

SEQ ID NO: 682167 - DNA, 15 bp, Homo sapiens
agtgtaatccctccc

SEQ ID NO: 682168 - DNA, 15 bp, Homo sapiens
gtgtaatccctccca

SEQ ID NO: 682169 - DNA, 15 bp, Homo sapiens
tgtaatccctcccaa

SEQ ID NO: 682170 - DNA, 15 bp, Homo sapiens
gtaatccctcccaaa

SEQ ID NO: 682171 - DNA, 15 bp, Homo sapiens
taatccctcccaaag

SEQ ID NO: 682172 - DNA, 15 bp, Homo sapiens
aatccctcccaaagt

SEQ ID NO: 682173 - DNA, 15 bp, Homo sapiens
atccctcccaaagtg

SEQ ID NO: 682174 - DNA, 15 bp, Homo sapiens
tccctcccaaagtgc

SEQ ID NO: 682175 - DNA, 15 bp, Homo sapiens
ccctcccaaagtgct

SEQ ID NO: 682176 - DNA, 15 bp, Homo sapiens
aggcgtgagccacca

SEQ ID NO: 682177 - DNA, 15 bp, Homo sapiens
ggcgtgagccaccat

SEQ ID NO: 682178 - DNA, 15 bp, Homo sapiens
gcgtgagccaccatg

SEQ ID NO: 682179 - DNA, 15 bp, Homo sapiens
cgtgagccaccatgc

SEQ ID NO: 682180 - DNA, 15 bp, Homo sapiens
gtgagccaccatgcc

SEQ ID NO: 682181 - DNA, 15 bp, Homo sapiens
tgagccaccatgcct

SEQ ID NO: 682182 - DNA, 15 bp, Homo sapiens
gagccaccatgccta

SEQ ID NO: 682183 - DNA, 15 bp, Homo sapiens
agccaccatgcctag

SEQ ID NO: 682184 - DNA, 15 bp, Homo sapiens
gccaccatgcctagc

SEQ ID NO: 682185 - DNA, 15 bp, Homo sapiens
ccaccatgcctagcc

SEQ ID NO: 682186 - DNA, 15 bp, Homo sapiens
caccatgcctagcct

SEQ ID NO: 682187 - DNA, 15 bp, Homo sapiens
accatgcctagccta

SEQ ID NO: 682188 - DNA, 15 bp, Homo sapiens
ccatgcctagcctac

SEQ ID NO: 682189 - DNA, 15 bp, Homo sapiens
catgcctagcctaca

SEQ ID NO: 682190 - DNA, 15 bp, Homo sapiens
atgcctagcctacag

SEQ ID NO: 682191 - DNA, 15 bp, Homo sapiens
tgcctagcctacaga

SEQ ID NO: 682192 - DNA, 15 bp, Homo sapiens
gcctagcctacagaa

SEQ ID NO: 682193 - DNA, 15 bp, Homo sapiens
cctagcctacagaat

SEQ ID NO: 682194 - DNA, 15 bp, Homo sapiens
ctagcctacagaatt

SEQ ID NO: 682195 - DNA, 15 bp, Homo sapiens
tagcctacagaattt

SEQ ID NO: 682196 - DNA, 15 bp, Homo sapiens
agcctacagaatttt

SEQ ID NO: 682197 - DNA, 15 bp, Homo sapiens
gcctacagaattttt

SEQ ID NO: 682198 - DNA, 15 bp, Homo sapiens
cctacagaattttta

SEQ ID NO: 682199 - DNA, 15 bp, Homo sapiens
ctacagaatttttat

SEQ ID NO: 682200 - DNA, 15 bp, Homo sapiens
tacagaatttttata

SEQ ID NO: 682201 - DNA, 15 bp, Homo sapiens
acagaatttttataa

SEQ ID NO: 682202 - DNA, 15 bp, Homo sapiens
cagaatttttataat

SEQ ID NO: 682203 - DNA, 15 bp, Homo sapiens
agaatttttataata

SEQ ID NO: 682204 - DNA, 15 bp, Homo sapiens
gaatttttataataa

SEQ ID NO: 682205 - DNA, 15 bp, Homo sapiens
aatttttataataac

SEQ ID NO: 682206 - DNA, 15 bp, Homo sapiens
atttttataataact

SEQ ID NO: 682207 - DNA, 15 bp, Homo sapiens
tttttataataacta

SEQ ID NO: 682208 - DNA, 15 bp, Homo sapiens
ttttataataactag

SEQ ID NO: 682209 - DNA, 15 bp, Homo sapiens
tttataataactaga

SEQ ID NO: 682210 - DNA, 15 bp, Homo sapiens
ttataataactagag

SEQ ID NO: 682211 - DNA, 15 bp, Homo sapiens
tataataactagagt

SEQ ID NO: 682212 - DNA, 15 bp, Homo sapiens
ataataactagagtt

SEQ ID NO: 682213 - DNA, 15 bp, Homo sapiens
taataactagagttg

SEQ ID NO: 682214 - DNA, 15 bp, Homo sapiens
aataactagagttgg

SEQ ID NO: 682215 - DNA, 15 bp, Homo sapiens
ataactagagttggc

SEQ ID NO: 682216 - DNA, 15 bp, Homo sapiens
taactagagttggca

SEQ ID NO: 682217 - DNA, 15 bp, Homo sapiens
aactagagttggcaa

SEQ ID NO: 682218 - DNA, 15 bp, Homo sapiens
actagagttggcaat

SEQ ID NO: 682219 - DNA, 15 bp, Homo sapiens
ctagagttggcaatg

SEQ ID NO: 682220 - DNA, 15 bp, Homo sapiens
tagagttggcaatgg

SEQ ID NO: 682221 - DNA, 15 bp, Homo sapiens
agagttggcaatggt

SEQ ID NO: 682222 - DNA, 15 bp, Homo sapiens
gagttggcaatggtg

SEQ ID NO: 682223 - DNA, 15 bp, Homo sapiens
agttggcaatggtgt

SEQ ID NO: 682224 - DNA, 15 bp, Homo sapiens
gttggcaatggtgtg

SEQ ID NO: 682225 - DNA, 15 bp, Homo sapiens
ttggcaatggtgtga

SEQ ID NO: 682226 - DNA, 15 bp, Homo sapiens
tggcaatggtgtgat

SEQ ID NO: 682227 - DNA, 15 bp, Homo sapiens
ggcaatggtgtgatg

SEQ ID NO: 682228 - DNA, 15 bp, Homo sapiens
gcaatggtgtgatga

SEQ ID NO: 682229 - DNA, 15 bp, Homo sapiens
caatggtgtgatgaa

SEQ ID NO: 682230 - DNA, 15 bp, Homo sapiens
aatggtgtgatgaaa

SEQ ID NO: 682231 - DNA, 15 bp, Homo sapiens
atggtgtgatgaaat

SEQ ID NO: 682232 - DNA, 15 bp, Homo sapiens
tggtgtgatgaaatg

SEQ ID NO: 682233 - DNA, 15 bp, Homo sapiens
ggtgtgatgaaatga

SEQ ID NO: 682234 - DNA, 15 bp, Homo sapiens
gtgtgatgaaatgag

SEQ ID NO: 682235 - DNA, 15 bp, Homo sapiens
tgtgatgaaatgaga

SEQ ID NO: 682236 - DNA, 15 bp, Homo sapiens
gtgatgaaatgagaa

SEQ ID NO: 682237 - DNA, 15 bp, Homo sapiens
tgatgaaatgagaaa

SEQ ID NO: 682238 - DNA, 15 bp, Homo sapiens
gatgaaatgagaaag

SEQ ID NO: 682239 - DNA, 15 bp, Homo sapiens
atgaaatgagaaagg

SEQ ID NO: 682240 - DNA, 15 bp, Homo sapiens
tgaaatgagaaagga

SEQ ID NO: 682241 - DNA, 15 bp, Homo sapiens
gaaatgagaaaggat

SEQ ID NO: 682242 - DNA, 15 bp, Homo sapiens
aaatgagaaaggata

SEQ ID NO: 682243 - DNA, 15 bp, Homo sapiens
aatgagaaaggatac

SEQ ID NO: 682244 - DNA, 15 bp, Homo sapiens
atgagaaaggatacg

SEQ ID NO: 682245 - DNA, 15 bp, Homo sapiens
tgagaaaggatacgt

SEQ ID NO: 682246 - DNA, 15 bp, Homo sapiens
gagaaaggatacgtt

SEQ ID NO: 682247 - DNA, 15 bp, Homo sapiens
agaaaggatacgttt

SEQ ID NO: 682248 - DNA, 15 bp, Homo sapiens
gaaaggatacgttta

SEQ ID NO: 682249 - DNA, 15 bp, Homo sapiens
aaaggatacgtttat

SEQ ID NO: 682250 - DNA, 15 bp, Homo sapiens
aaggatacgtttata

SEQ ID NO: 682251 - DNA, 15 bp, Homo sapiens
aggatacgtttataa

SEQ ID NO: 682252 - DNA, 15 bp, Homo sapiens
ggatacgtttataac

SEQ ID NO: 682253 - DNA, 15 bp, Homo sapiens
gatacgtttataacc

SEQ ID NO: 682254 - DNA, 15 bp, Homo sapiens
atacgtttataacct

SEQ ID NO: 682255 - DNA, 15 bp, Homo sapiens
tacgtttataacctt

SEQ ID NO: 682256 - DNA, 15 bp, Homo sapiens
acgtttataacctta

SEQ ID NO: 682257 - DNA, 15 bp, Homo sapiens
cgtttataaccttat

SEQ ID NO: 682258 - DNA, 15 bp, Homo sapiens
gtttataaccttata

SEQ ID NO: 682259 - DNA, 15 bp, Homo sapiens
tttataaccttatac

SEQ ID NO: 682260 - DNA, 15 bp, Homo sapiens
ttataaccttataca

SEQ ID NO: 682261 - DNA, 15 bp, Homo sapiens
tataaccttatacat

SEQ ID NO: 682262 - DNA, 15 bp, Homo sapiens
ataaccttatacatt

SEQ ID NO: 682263 - DNA, 15 bp, Homo sapiens
taaccttatacatta

SEQ ID NO: 682264 - DNA, 15 bp, Homo sapiens
aaccttatacattat

SEQ ID NO: 682265 - DNA, 15 bp, Homo sapiens
accttatacattatt

SEQ ID NO: 682266 - DNA, 15 bp, Homo sapiens
ccttatacattattt

SEQ ID NO: 682267 - DNA, 15 bp, Homo sapiens
cttatacattatttg

SEQ ID NO: 682268 - DNA, 15 bp, Homo sapiens
ttatacattatttgt

SEQ ID NO: 682269 - DNA, 15 bp, Homo sapiens
tatacattatttgta

SEQ ID NO: 682270 - DNA, 15 bp, Homo sapiens
atacattatttgtaa

SEQ ID NO: 682271 - DNA, 15 bp, Homo sapiens
tacattatttgtaat

SEQ ID NO: 682272 - DNA, 15 bp, Homo sapiens
acattatttgtaatg

SEQ ID NO: 682273 - DNA, 15 bp, Homo sapiens
cattatttgtaatga

SEQ ID NO: 682274 - DNA, 15 bp, Homo sapiens
attatttgtaatgat

SEQ ID NO: 682275 - DNA, 15 bp, Homo sapiens
ttatttgtaatgatg

SEQ ID NO: 682276 - DNA, 15 bp, Homo sapiens
tatttgtaatgatgg

SEQ ID NO: 682277 - DNA, 15 bp, Homo sapiens
atttgtaatgatgga

SEQ ID NO: 682278 - DNA, 15 bp, Homo sapiens
tttgtaatgatggaa

SEQ ID NO: 682279 - DNA, 15 bp, Homo sapiens
ttgtaatgatggaaa

SEQ ID NO: 682280 - DNA, 15 bp, Homo sapiens
tgtaatgatggaaaa

SEQ ID NO: 682281 - DNA, 15 bp, Homo sapiens
gtaatgatggaaaaa

SEQ ID NO: 682282 - DNA, 15 bp, Homo sapiens
taatgatggaaaaac

SEQ ID NO: 682283 - DNA, 15 bp, Homo sapiens
aatgatggaaaaaca

SEQ ID NO: 682284 - DNA, 15 bp, Homo sapiens
atgatggaaaaacaa

SEQ ID NO: 682285 - DNA, 15 bp, Homo sapiens
tgatggaaaaacaaa

SEQ ID NO: 682286 - DNA, 15 bp, Homo sapiens
gatggaaaaacaaaa

SEQ ID NO: 682287 - DNA, 15 bp, Homo sapiens
atggaaaaacaaaat

SEQ ID NO: 682288 - DNA, 15 bp, Homo sapiens
tggaaaaacaaaata

SEQ ID NO: 682289 - DNA, 15 bp, Homo sapiens
ggaaaaacaaaatag

SEQ ID NO: 682290 - DNA, 15 bp, Homo sapiens
gaaaaacaaaatagt

SEQ ID NO: 682291 - DNA, 15 bp, Homo sapiens
aaaaacaaaatagta

SEQ ID NO: 682292 - DNA, 15 bp, Homo sapiens
aaaacaaaatagtag

SEQ ID NO: 682293 - DNA, 15 bp, Homo sapiens
aaacaaaatagtaga

SEQ ID NO: 682294 - DNA, 15 bp, Homo sapiens
aacaaaatagtagag

SEQ ID NO: 682295 - DNA, 15 bp, Homo sapiens
acaaaatagtagaga

SEQ ID NO: 682296 - DNA, 15 bp, Homo sapiens
caaaatagtagagaa

SEQ ID NO: 682297 - DNA, 15 bp, Homo sapiens
aaaatagtagagaag

SEQ ID NO: 682298 - DNA, 15 bp, Homo sapiens
aaatagtagagaagc

SEQ ID NO: 682299 - DNA, 15 bp, Homo sapiens
aatagtagagaagca

SEQ ID NO: 682300 - DNA, 15 bp, Homo sapiens
atagtagagaagcag

SEQ ID NO: 682301 - DNA, 15 bp, Homo sapiens
tagtagagaagcagt

SEQ ID NO: 682302 - DNA, 15 bp, Homo sapiens
agtagagaagcagtt

SEQ ID NO: 682303 - DNA, 15 bp, Homo sapiens
gtagagaagcagtta

SEQ ID NO: 682304 - DNA, 15 bp, Homo sapiens
tagagaagcagttag

SEQ ID NO: 682305 - DNA, 15 bp, Homo sapiens
agagaagcagttaga

SEQ ID NO: 682306 - DNA, 15 bp, Homo sapiens
gagaagcagttagat

SEQ ID NO: 682307 - DNA, 15 bp, Homo sapiens
agaagcagttagata

SEQ ID NO: 682308 - DNA, 15 bp, Homo sapiens
gaagcagttagataa

SEQ ID NO: 682309 - DNA, 15 bp, Homo sapiens
aagcagttagataaa

SEQ ID NO: 682310 - DNA, 15 bp, Homo sapiens
agcagttagataaat

SEQ ID NO: 682311 - DNA, 15 bp, Homo sapiens
gcagttagataaatc

SEQ ID NO: 682312 - DNA, 15 bp, Homo sapiens
cagttagataaatca

SEQ ID NO: 682313 - DNA, 15 bp, Homo sapiens
agttagataaatcat

SEQ ID NO: 682314 - DNA, 15 bp, Homo sapiens
gttagataaatcata

SEQ ID NO: 682315 - DNA, 15 bp, Homo sapiens
ttagataaatcatag

SEQ ID NO: 682316 - DNA, 15 bp, Homo sapiens
tagataaatcatagg

SEQ ID NO: 682317 - DNA, 15 bp, Homo sapiens
agataaatcatagga

SEQ ID NO: 682318 - DNA, 15 bp, Homo sapiens
gataaatcataggaa

SEQ ID NO: 682319 - DNA, 15 bp, Homo sapiens
ataaatcataggaat

SEQ ID NO: 682320 - DNA, 15 bp, Homo sapiens
taaatcataggaatc

SEQ ID NO: 682321 - DNA, 15 bp, Homo sapiens
aaatcataggaatcc

SEQ ID NO: 682322 - DNA, 15 bp, Homo sapiens
aatcataggaatcct

SEQ ID NO: 682323 - DNA, 15 bp, Homo sapiens
atcataggaatccta

SEQ ID NO: 682324 - DNA, 15 bp, Homo sapiens
tcataggaatcctaa

SEQ ID NO: 682325 - DNA, 15 bp, Homo sapiens
cataggaatcctaag

SEQ ID NO: 682326 - DNA, 15 bp, Homo sapiens
ataggaatcctaaga

SEQ ID NO: 682327 - DNA, 15 bp, Homo sapiens
taggaatcctaagac

SEQ ID NO: 682328 - DNA, 15 bp, Homo sapiens
aggaatcctaagact

SEQ ID NO: 682329 - DNA, 15 bp, Homo sapiens
ggaatcctaagactg

SEQ ID NO: 682330 - DNA, 15 bp, Homo sapiens
gaatcctaagactgg

SEQ ID NO: 682331 - DNA, 15 bp, Homo sapiens
aatcctaagactgga

SEQ ID NO: 682332 - DNA, 15 bp, Homo sapiens
atcctaagactggaa

SEQ ID NO: 682333 - DNA, 15 bp, Homo sapiens
tcctaagactggaaa

SEQ ID NO: 682334 - DNA, 15 bp, Homo sapiens
cctaagactggaaat

SEQ ID NO: 682335 - DNA, 15 bp, Homo sapiens
ctaagactggaaatt

SEQ ID NO: 682336 - DNA, 15 bp, Homo sapiens
taagactggaaatta

SEQ ID NO: 682337 - DNA, 15 bp, Homo sapiens
aagactggaaattat

SEQ ID NO: 682338 - DNA, 15 bp, Homo sapiens
agactggaaattata

SEQ ID NO: 682339 - DNA, 15 bp, Homo sapiens
gactggaaattatac

SEQ ID NO: 682340 - DNA, 15 bp, Homo sapiens
actggaaattataca

SEQ ID NO: 682341 - DNA, 15 bp, Homo sapiens
ctggaaattatacaa

SEQ ID NO: 682342 - DNA, 15 bp, Homo sapiens
tggaaattatacaac

SEQ ID NO: 682343 - DNA, 15 bp, Homo sapiens
ggaaattatacaacc

SEQ ID NO: 682344 - DNA, 15 bp, Homo sapiens
gaaattatacaacca

SEQ ID NO: 682345 - DNA, 15 bp, Homo sapiens
aaattatacaaccat

SEQ ID NO: 682346 - DNA, 15 bp, Homo sapiens
aattatacaaccatc

SEQ ID NO: 682347 - DNA, 15 bp, Homo sapiens
attatacaaccatca

SEQ ID NO: 682348 - DNA, 15 bp, Homo sapiens
ttatacaaccatcaa

SEQ ID NO: 682349 - DNA, 15 bp, Homo sapiens
tatacaaccatcaaa

SEQ ID NO: 682350 - DNA, 15 bp, Homo sapiens
atacaaccatcaaaa

SEQ ID NO: 682351 - DNA, 15 bp, Homo sapiens
tacaaccatcaaaat

SEQ ID NO: 682352 - DNA, 15 bp, Homo sapiens
acaaccatcaaaata

SEQ ID NO: 682353 - DNA, 15 bp, Homo sapiens
caaccatcaaaatat

SEQ ID NO: 682354 - DNA, 15 bp, Homo sapiens
aaccatcaaaatatc

SEQ ID NO: 682355 - DNA, 15 bp, Homo sapiens
accatcaaaatatct

SEQ ID NO: 682356 - DNA, 15 bp, Homo sapiens
ccatcaaaatatctc

SEQ ID NO: 682357 - DNA, 15 bp, Homo sapiens
catcaaaatatctca

SEQ ID NO: 682358 - DNA, 15 bp, Homo sapiens
atcaaaatatctcaa

SEQ ID NO: 682359 - DNA, 15 bp, Homo sapiens
tcaaaatatctcaaa

SEQ ID NO: 682360 - DNA, 15 bp, Homo sapiens
caaaatatctcaaag

SEQ ID NO: 682361 - DNA, 15 bp, Homo sapiens
aaaatatctcaaagc

SEQ ID NO: 682362 - DNA, 15 bp, Homo sapiens
aaatatctcaaagca

SEQ ID NO: 682363 - DNA, 15 bp, Homo sapiens
aatatctcaaagcat

SEQ ID NO: 682364 - DNA, 15 bp, Homo sapiens
atatctcaaagcata

SEQ ID NO: 682365 - DNA, 15 bp, Homo sapiens
tatctcaaagcatac

SEQ ID NO: 682366 - DNA, 15 bp, Homo sapiens
atctcaaagcatact

SEQ ID NO: 682367 - DNA, 15 bp, Homo sapiens
tctcaaagcatactt

SEQ ID NO: 682368 - DNA, 15 bp, Homo sapiens
ctcaaagcatactta

SEQ ID NO: 682369 - DNA, 15 bp, Homo sapiens
tcaaagcatacttaa

SEQ ID NO: 682370 - DNA, 15 bp, Homo sapiens
caaagcatacttaat

SEQ ID NO: 682371 - DNA, 15 bp, Homo sapiens
aaagcatacttaata

SEQ ID NO: 682372 - DNA, 15 bp, Homo sapiens
aagcatacttaatag

SEQ ID NO: 682373 - DNA, 15 bp, Homo sapiens
agcatacttaatagc

SEQ ID NO: 682374 - DNA, 15 bp, Homo sapiens
gcatacttaatagca

SEQ ID NO: 682375 - DNA, 15 bp, Homo sapiens
catacttaatagcat

SEQ ID NO: 682376 - DNA, 15 bp, Homo sapiens
atacttaatagcatt

SEQ ID NO: 682377 - DNA, 15 bp, Homo sapiens
tacttaatagcattg

SEQ ID NO: 682378 - DNA, 15 bp, Homo sapiens
acttaatagcattgt

SEQ ID NO: 682379 - DNA, 15 bp, Homo sapiens
cttaatagcattgta

SEQ ID NO: 682380 - DNA, 15 bp, Homo sapiens
ttaatagcattgtaa

SEQ ID NO: 682381 - DNA, 15 bp, Homo sapiens
taatagcattgtaaa

SEQ ID NO: 682382 - DNA, 15 bp, Homo sapiens
aatagcattgtaaac

SEQ ID NO: 682383 - DNA, 15 bp, Homo sapiens
atagcattgtaaact

SEQ ID NO: 682384 - DNA, 15 bp, Homo sapiens
tagcattgtaaactg

SEQ ID NO: 682385 - DNA, 15 bp, Homo sapiens
agcattgtaaactgc

SEQ ID NO: 682386 - DNA, 15 bp, Homo sapiens
gcattgtaaactgct

SEQ ID NO: 682387 - DNA, 15 bp, Homo sapiens
cattgtaaactgctt

SEQ ID NO: 682388 - DNA, 15 bp, Homo sapiens
attgtaaactgcttg

SEQ ID NO: 682389 - DNA, 15 bp, Homo sapiens
ttgtaaactgcttga

SEQ ID NO: 682390 - DNA, 15 bp, Homo sapiens
tgtaaactgcttgaa

SEQ ID NO: 682391 - DNA, 15 bp, Homo sapiens
gtaaactgcttgaaa

SEQ ID NO: 682392 - DNA, 15 bp, Homo sapiens
taaactgcttgaaat

SEQ ID NO: 682393 - DNA, 15 bp, Homo sapiens
aaactgcttgaaata

SEQ ID NO: 682394 - DNA, 15 bp, Homo sapiens
aactgcttgaaataa

SEQ ID NO: 682395 - DNA, 15 bp, Homo sapiens
actgcttgaaataat

SEQ ID NO: 682396 - DNA, 15 bp, Homo sapiens
ctgcttgaaataata

SEQ ID NO: 682397 - DNA, 15 bp, Homo sapiens
tgcttgaaataataa

SEQ ID NO: 682398 - DNA, 15 bp, Homo sapiens
gcttgaaataataag

SEQ ID NO: 682399 - DNA, 15 bp, Homo sapiens
cttgaaataataagc

SEQ ID NO: 682400 - DNA, 15 bp, Homo sapiens
ttgaaataataagca

SEQ ID NO: 682401 - DNA, 15 bp, Homo sapiens
tgaaataataagcaa

SEQ ID NO: 682402 - DNA, 15 bp, Homo sapiens
gaaataataagcaag

SEQ ID NO: 682403 - DNA, 15 bp, Homo sapiens
aaataataagcaaga

SEQ ID NO: 682404 - DNA, 15 bp, Homo sapiens
aataataagcaagaa

SEQ ID NO: 682405 - DNA, 15 bp, Homo sapiens
ataataagcaagaat

SEQ ID NO: 682406 - DNA, 15 bp, Homo sapiens
taataagcaagaatg

SEQ ID NO: 682407 - DNA, 15 bp, Homo sapiens
aataagcaagaatga

SEQ ID NO: 682408 - DNA, 15 bp, Homo sapiens
ataagcaagaatgaa

SEQ ID NO: 682409 - DNA, 15 bp, Homo sapiens
taagcaagaatgaaa

SEQ ID NO: 682410 - DNA, 15 bp, Homo sapiens
aagcaagaatgaaat

SEQ ID NO: 682411 - DNA, 15 bp, Homo sapiens
agcaagaatgaaatt

SEQ ID NO: 682412 - DNA, 15 bp, Homo sapiens
gcaagaatgaaattc

SEQ ID NO: 682413 - DNA, 15 bp, Homo sapiens
caagaatgaaattca

SEQ ID NO: 682414 - DNA, 15 bp, Homo sapiens
aagaatgaaattcac

SEQ ID NO: 682415 - DNA, 15 bp, Homo sapiens
agaatgaaattcaca

SEQ ID NO: 682416 - DNA, 15 bp, Homo sapiens
gaatgaaattcacaa

SEQ ID NO: 682417 - DNA, 15 bp, Homo sapiens
aatgaaattcacaaa

SEQ ID NO: 682418 - DNA, 15 bp, Homo sapiens
atgaaattcacaaaa

SEQ ID NO: 682419 - DNA, 15 bp, Homo sapiens
tgaaattcacaaaaa

SEQ ID NO: 682420 - DNA, 15 bp, Homo sapiens
gaaattcacaaaaaa

SEQ ID NO: 682421 - DNA, 15 bp, Homo sapiens
aaattcacaaaaaag

SEQ ID NO: 682422 - DNA, 15 bp, Homo sapiens
aattcacaaaaaagg

SEQ ID NO: 682423 - DNA, 15 bp, Homo sapiens
attcacaaaaaagga

SEQ ID NO: 682424 - DNA, 15 bp, Homo sapiens
ttcacaaaaaaggac

SEQ ID NO: 682425 - DNA, 15 bp, Homo sapiens
tcacaaaaaaggaca

SEQ ID NO: 682426 - DNA, 15 bp, Homo sapiens
cacaaaaaaggacac

SEQ ID NO: 682427 - DNA, 15 bp, Homo sapiens
acaaaaaaggacaca

SEQ ID NO: 682428 - DNA, 15 bp, Homo sapiens
caaaaaaggacacaa

SEQ ID NO: 682429 - DNA, 15 bp, Homo sapiens
aaaaaaggacacaaa

SEQ ID NO: 682430 - DNA, 15 bp, Homo sapiens
aaaaaggacacaaat

SEQ ID NO: 682431 - DNA, 15 bp, Homo sapiens
aaaaggacacaaata

SEQ ID NO: 682432 - DNA, 15 bp, Homo sapiens
aaaggacacaaatat

SEQ ID NO: 682433 - DNA, 15 bp, Homo sapiens
aaggacacaaatatt

SEQ ID NO: 682434 - DNA, 15 bp, Homo sapiens
aggacacaaatattt

SEQ ID NO: 682435 - DNA, 15 bp, Homo sapiens
ggacacaaatattta

SEQ ID NO: 682436 - DNA, 15 bp, Homo sapiens
gacacaaatatttac

SEQ ID NO: 682437 - DNA, 15 bp, Homo sapiens
acacaaatatttaca

SEQ ID NO: 682438 - DNA, 15 bp, Homo sapiens
cacaaatatttacag

SEQ ID NO: 682439 - DNA, 15 bp, Homo sapiens
acaaatatttacagt

SEQ ID NO: 682440 - DNA, 15 bp, Homo sapiens
caaatatttacagtg

SEQ ID NO: 682441 - DNA, 15 bp, Homo sapiens
aaatatttacagtgt

SEQ ID NO: 682442 - DNA, 15 bp, Homo sapiens
aatatttacagtgta

SEQ ID NO: 682443 - DNA, 15 bp, Homo sapiens
atatttacagtgtaa

SEQ ID NO: 682444 - DNA, 15 bp, Homo sapiens
tatttacagtgtaaa

SEQ ID NO: 682445 - DNA, 15 bp, Homo sapiens
atttacagtgtaaat

SEQ ID NO: 682446 - DNA, 15 bp, Homo sapiens
tttacagtgtaaata

SEQ ID NO: 682447 - DNA, 15 bp, Homo sapiens
ttacagtgtaaatat

SEQ ID NO: 682448 - DNA, 15 bp, Homo sapiens
tacagtgtaaatata

SEQ ID NO: 682449 - DNA, 15 bp, Homo sapiens
acagtgtaaatatac

SEQ ID NO: 682450 - DNA, 15 bp, Homo sapiens
cagtgtaaatataca

SEQ ID NO: 682451 - DNA, 15 bp, Homo sapiens
agtgtaaatatacag

SEQ ID NO: 682452 - DNA, 15 bp, Homo sapiens
gtgtaaatatacagt

SEQ ID NO: 682453 - DNA, 15 bp, Homo sapiens
tgtaaatatacagtc

SEQ ID NO: 682454 - DNA, 15 bp, Homo sapiens
gtaaatatacagtct

SEQ ID NO: 682455 - DNA, 15 bp, Homo sapiens
taaatatacagtcta

SEQ ID NO: 682456 - DNA, 15 bp, Homo sapiens
aaatatacagtctac

SEQ ID NO: 682457 - DNA, 15 bp, Homo sapiens
aatatacagtctaca

SEQ ID NO: 682458 - DNA, 15 bp, Homo sapiens
atatacagtctacat

SEQ ID NO: 682459 - DNA, 15 bp, Homo sapiens
tatacagtctacata

SEQ ID NO: 682460 - DNA, 15 bp, Homo sapiens
atacagtctacatac

SEQ ID NO: 682461 - DNA, 15 bp, Homo sapiens
tacagtctacataca

SEQ ID NO: 682462 - DNA, 15 bp, Homo sapiens
acagtctacatacat

SEQ ID NO: 682463 - DNA, 15 bp, Homo sapiens
cagtctacatacatt

SEQ ID NO: 682464 - DNA, 15 bp, Homo sapiens
agtctacatacatta

SEQ ID NO: 682465 - DNA, 15 bp, Homo sapiens
gtctacatacattat

SEQ ID NO: 682466 - DNA, 15 bp, Homo sapiens
tctacatacattata

SEQ ID NO: 682467 - DNA, 15 bp, Homo sapiens
ctacatacattatag

SEQ ID NO: 682468 - DNA, 15 bp, Homo sapiens
tacatacattatagg

SEQ ID NO: 682469 - DNA, 15 bp, Homo sapiens
acatacattataggt

SEQ ID NO: 682470 - DNA, 15 bp, Homo sapiens
catacattataggtt

SEQ ID NO: 682471 - DNA, 15 bp, Homo sapiens
atacattataggttg

SEQ ID NO: 682472 - DNA, 15 bp, Homo sapiens
tacattataggttgg

SEQ ID NO: 682473 - DNA, 15 bp, Homo sapiens
acattataggttggg

SEQ ID NO: 682474 - DNA, 15 bp, Homo sapiens
cattataggttggga

SEQ ID NO: 682475 - DNA, 15 bp, Homo sapiens
attataggttgggag

SEQ ID NO: 682476 - DNA, 15 bp, Homo sapiens
ttataggttgggagc

SEQ ID NO: 682477 - DNA, 15 bp, Homo sapiens
tataggttgggagca

SEQ ID NO: 682478 - DNA, 15 bp, Homo sapiens
ataggttgggagcat

SEQ ID NO: 682479 - DNA, 15 bp, Homo sapiens
taggttgggagcatc

SEQ ID NO: 682480 - DNA, 15 bp, Homo sapiens
aggttgggagcatca

SEQ ID NO: 682481 - DNA, 15 bp, Homo sapiens
ggttgggagcatcat

SEQ ID NO: 682482 - DNA, 15 bp, Homo sapiens
gttgggagcatcata

SEQ ID NO: 682483 - DNA, 15 bp, Homo sapiens
ttgggagcatcatat

SEQ ID NO: 682484 - DNA, 15 bp, Homo sapiens
tgggagcatcatata

SEQ ID NO: 682485 - DNA, 15 bp, Homo sapiens
gggagcatcatataa

SEQ ID NO: 682486 - DNA, 15 bp, Homo sapiens
ggagcatcatataat

SEQ ID NO: 682487 - DNA, 15 bp, Homo sapiens
gagcatcatataatt

SEQ ID NO: 682488 - DNA, 15 bp, Homo sapiens
agcatcatataatta

SEQ ID NO: 682489 - DNA, 15 bp, Homo sapiens
gcatcatataattat

SEQ ID NO: 682490 - DNA, 15 bp, Homo sapiens
catcatataattata

SEQ ID NO: 682491 - DNA, 15 bp, Homo sapiens
atcatataattatag

SEQ ID NO: 682492 - DNA, 15 bp, Homo sapiens
tcatataattatagt

SEQ ID NO: 682493 - DNA, 15 bp, Homo sapiens
catataattatagtc

SEQ ID NO: 682494 - DNA, 15 bp, Homo sapiens
atataattatagtct

SEQ ID NO: 682495 - DNA, 15 bp, Homo sapiens
tataattatagtctt

SEQ ID NO: 682496 - DNA, 15 bp, Homo sapiens
ataattatagtctta

SEQ ID NO: 682497 - DNA, 15 bp, Homo sapiens
taattatagtcttat

SEQ ID NO: 682498 - DNA, 15 bp, Homo sapiens
aattatagtcttatg

SEQ ID NO: 682499 - DNA, 15 bp, Homo sapiens
attatagtcttatgc

SEQ ID NO: 682500 - DNA, 15 bp, Homo sapiens
ttatagtcttatgcc

SEQ ID NO: 682501 - DNA, 15 bp, Homo sapiens
tatagtcttatgcca

SEQ ID NO: 682502 - DNA, 15 bp, Homo sapiens
atagtcttatgccat

SEQ ID NO: 682503 - DNA, 15 bp, Homo sapiens
tagtcttatgccatg

SEQ ID NO: 682504 - DNA, 15 bp, Homo sapiens
agtcttatgccatgt

SEQ ID NO: 682505 - DNA, 15 bp, Homo sapiens
gtcttatgccatgta

SEQ ID NO: 682506 - DNA, 15 bp, Homo sapiens
tcttatgccatgtaa

SEQ ID NO: 682507 - DNA, 15 bp, Homo sapiens
cttatgccatgtaat

SEQ ID NO: 682508 - DNA, 15 bp, Homo sapiens
ttatgccatgtaatg

SEQ ID NO: 682509 - DNA, 15 bp, Homo sapiens
tatgccatgtaatgg

SEQ ID NO: 682510 - DNA, 15 bp, Homo sapiens
atgccatgtaatgga

SEQ ID NO: 682511 - DNA, 15 bp, Homo sapiens
tgccatgtaatggaa

SEQ ID NO: 682512 - DNA, 15 bp, Homo sapiens
gccatgtaatggaaa

SEQ ID NO: 682513 - DNA, 15 bp, Homo sapiens
ccatgtaatggaaat

SEQ ID NO: 682514 - DNA, 15 bp, Homo sapiens
catgtaatggaaatg

SEQ ID NO: 682515 - DNA, 15 bp, Homo sapiens
atgtaatggaaatgt

SEQ ID NO: 682516 - DNA, 15 bp, Homo sapiens
tgtaatggaaatgta

SEQ ID NO: 682517 - DNA, 15 bp, Homo sapiens
gtaatggaaatgtag

SEQ ID NO: 682518 - DNA, 15 bp, Homo sapiens
taatggaaatgtaga

SEQ ID NO: 682519 - DNA, 15 bp, Homo sapiens
aatggaaatgtagat

SEQ ID NO: 682520 - DNA, 15 bp, Homo sapiens
atggaaatgtagata

SEQ ID NO: 682521 - DNA, 15 bp, Homo sapiens
tggaaatgtagataa

SEQ ID NO: 682522 - DNA, 15 bp, Homo sapiens
ggaaatgtagataac

SEQ ID NO: 682523 - DNA, 15 bp, Homo sapiens
gaaatgtagataact

SEQ ID NO: 682524 - DNA, 15 bp, Homo sapiens
aaatgtagataactt

SEQ ID NO: 682525 - DNA, 15 bp, Homo sapiens
aatgtagataacttt

SEQ ID NO: 682526 - DNA, 15 bp, Homo sapiens
atgtagataactttg

SEQ ID NO: 682527 - DNA, 15 bp, Homo sapiens
tgtagataactttgt

SEQ ID NO: 682528 - DNA, 15 bp, Homo sapiens
gtagataactttgtt

SEQ ID NO: 682529 - DNA, 15 bp, Homo sapiens
tagataactttgttc

SEQ ID NO: 682530 - DNA, 15 bp, Homo sapiens
agataactttgttct

SEQ ID NO: 682531 - DNA, 15 bp, Homo sapiens
gataactttgttctt

SEQ ID NO: 682532 - DNA, 15 bp, Homo sapiens
ataactttgttctta

SEQ ID NO: 682533 - DNA, 15 bp, Homo sapiens
taactttgttcttat

SEQ ID NO: 682534 - DNA, 15 bp, Homo sapiens
aactttgttcttatg

SEQ ID NO: 682535 - DNA, 15 bp, Homo sapiens
actttgttcttatgt

SEQ ID NO: 682536 - DNA, 15 bp, Homo sapiens
ctttgttcttatgta

SEQ ID NO: 682537 - DNA, 15 bp, Homo sapiens
tttgttcttatgtag

SEQ ID NO: 682538 - DNA, 15 bp, Homo sapiens
ttgttcttatgtagt

SEQ ID NO: 682539 - DNA, 15 bp, Homo sapiens
tgttcttatgtagtt

SEQ ID NO: 682540 - DNA, 15 bp, Homo sapiens
gttcttatgtagttt

SEQ ID NO: 682541 - DNA, 15 bp, Homo sapiens
ttcttatgtagtttt

SEQ ID NO: 682542 - DNA, 15 bp, Homo sapiens
tcttatgtagttttt

SEQ ID NO: 682543 - DNA, 15 bp, Homo sapiens
cttatgtagttttta

SEQ ID NO: 682544 - DNA, 15 bp, Homo sapiens
ttatgtagtttttat

SEQ ID NO: 682545 - DNA, 15 bp, Homo sapiens
tatgtagtttttata

SEQ ID NO: 682546 - DNA, 15 bp, Homo sapiens
atgtagtttttatat

SEQ ID NO: 682547 - DNA, 15 bp, Homo sapiens
tgtagtttttatatt

SEQ ID NO: 682548 - DNA, 15 bp, Homo sapiens
gtagtttttatattt

SEQ ID NO: 682549 - DNA, 15 bp, Homo sapiens
tagtttttatattta

SEQ ID NO: 682550 - DNA, 15 bp, Homo sapiens
agtttttatatttaa

SEQ ID NO: 682551 - DNA, 15 bp, Homo sapiens
gtttttatatttaac

SEQ ID NO: 682552 - DNA, 15 bp, Homo sapiens
tttttatatttaaca

SEQ ID NO: 682553 - DNA, 15 bp, Homo sapiens
ttttatatttaacaa

SEQ ID NO: 682554 - DNA, 15 bp, Homo sapiens
tttatatttaacaac

SEQ ID NO: 682555 - DNA, 15 bp, Homo sapiens
ttatatttaacaact

SEQ ID NO: 682556 - DNA, 15 bp, Homo sapiens
tatatttaacaactt

SEQ ID NO: 682557 - DNA, 15 bp, Homo sapiens
atatttaacaacttt

SEQ ID NO: 682558 - DNA, 15 bp, Homo sapiens
tatttaacaactttt

SEQ ID NO: 682559 - DNA, 15 bp, Homo sapiens
atttaacaacttttt

SEQ ID NO: 682560 - DNA, 15 bp, Homo sapiens
tttaacaactttttt

SEQ ID NO: 682561 - DNA, 15 bp, Homo sapiens
ttaacaacttttttt

SEQ ID NO: 682562 - DNA, 15 bp, Homo sapiens
taacaactttttttt

SEQ ID NO: 682563 - DNA, 15 bp, Homo sapiens
aacaacttttttttt

SEQ ID NO: 682564 - DNA, 15 bp, Homo sapiens
acaactttttttttt

SEQ ID NO: 682565 - DNA, 15 bp, Homo sapiens
caacttttttttttt

SEQ ID NO: 682566 - DNA, 15 bp, Homo sapiens
aactttttttttttt

SEQ ID NO: 682567 - DNA, 15 bp, Homo sapiens
actttttttttttta

SEQ ID NO: 682568 - DNA, 15 bp, Homo sapiens
cttttttttttttac

SEQ ID NO: 682569 - DNA, 15 bp, Homo sapiens
ttttttttttttaca

SEQ ID NO: 682570 - DNA, 15 bp, Homo sapiens
tttttttttttacaa

SEQ ID NO: 682571 - DNA, 15 bp, Homo sapiens
ttttttttttacaat

SEQ ID NO: 682572 - DNA, 15 bp, Homo sapiens
tttttttttacaatc

SEQ ID NO: 682573 - DNA, 15 bp, Homo sapiens
ttttttttacaatca

SEQ ID NO: 682574 - DNA, 15 bp, Homo sapiens
tttttttacaatcag

SEQ ID NO: 682575 - DNA, 15 bp, Homo sapiens
ttttttacaatcagc

SEQ ID NO: 682576 - DNA, 15 bp, Homo sapiens
tttttacaatcagca

SEQ ID NO: 682577 - DNA, 15 bp, Homo sapiens
ttttacaatcagcat

SEQ ID NO: 682578 - DNA, 15 bp, Homo sapiens
tttacaatcagcatg

SEQ ID NO: 682579 - DNA, 15 bp, Homo sapiens
ttacaatcagcatgt

SEQ ID NO: 682580 - DNA, 15 bp, Homo sapiens
tacaatcagcatgta

SEQ ID NO: 682581 - DNA, 15 bp, Homo sapiens
acaatcagcatgtaa

SEQ ID NO: 682582 - DNA, 15 bp, Homo sapiens
caatcagcatgtaat

SEQ ID NO: 682583 - DNA, 15 bp, Homo sapiens
aatcagcatgtaata

SEQ ID NO: 682584 - DNA, 15 bp, Homo sapiens
atcagcatgtaatac

SEQ ID NO: 682585 - DNA, 15 bp, Homo sapiens
tcagcatgtaataca

SEQ ID NO: 682586 - DNA, 15 bp, Homo sapiens
cagcatgtaatacat

SEQ ID NO: 682587 - DNA, 15 bp, Homo sapiens
agcatgtaatacatt

SEQ ID NO: 682588 - DNA, 15 bp, Homo sapiens
gcatgtaatacattt

SEQ ID NO: 682589 - DNA, 15 bp, Homo sapiens
catgtaatacattta

SEQ ID NO: 682590 - DNA, 15 bp, Homo sapiens
atgtaatacatttaa

SEQ ID NO: 682591 - DNA, 15 bp, Homo sapiens
tgtaatacatttaaa

SEQ ID NO: 682592 - DNA, 15 bp, Homo sapiens
gtaatacatttaaaa

SEQ ID NO: 682593 - DNA, 15 bp, Homo sapiens
taatacatttaaaat

SEQ ID NO: 682594 - DNA, 15 bp, Homo sapiens
aatacatttaaaatg

SEQ ID NO: 682595 - DNA, 15 bp, Homo sapiens
atacatttaaaatgc

SEQ ID NO: 682596 - DNA, 15 bp, Homo sapiens
tacatttaaaatgca

SEQ ID NO: 682597 - DNA, 15 bp, Homo sapiens
acatttaaaatgcag

SEQ ID NO: 682598 - DNA, 15 bp, Homo sapiens
catttaaaatgcagt

SEQ ID NO: 682599 - DNA, 15 bp, Homo sapiens
atttaaaatgcagtg

SEQ ID NO: 682600 - DNA, 15 bp, Homo sapiens
tttaaaatgcagtgg

SEQ ID NO: 682601 - DNA, 15 bp, Homo sapiens
ttaaaatgcagtggt

SEQ ID NO: 682602 - DNA, 15 bp, Homo sapiens
taaaatgcagtggtc

SEQ ID NO: 682603 - DNA, 15 bp, Homo sapiens
aaaatgcagtggtct

SEQ ID NO: 682604 - DNA, 15 bp, Homo sapiens
aaatgcagtggtcta

SEQ ID NO: 682605 - DNA, 15 bp, Homo sapiens
aatgcagtggtctag

SEQ ID NO: 682606 - DNA, 15 bp, Homo sapiens
atgcagtggtctagt

SEQ ID NO: 682607 - DNA, 15 bp, Homo sapiens
tgcagtggtctagtc

SEQ ID NO: 682608 - DNA, 15 bp, Homo sapiens
gcagtggtctagtct

SEQ ID NO: 682609 - DNA, 15 bp, Homo sapiens
cagtggtctagtctt

SEQ ID NO: 682610 - DNA, 15 bp, Homo sapiens
agtggtctagtcttg

SEQ ID NO: 682611 - DNA, 15 bp, Homo sapiens
gtggtctagtcttgg

SEQ ID NO: 682612 - DNA, 15 bp, Homo sapiens
tggtctagtcttggg

SEQ ID NO: 682613 - DNA, 15 bp, Homo sapiens
ggtctagtcttgggg

SEQ ID NO: 682614 - DNA, 15 bp, Homo sapiens
gtctagtcttggggt

SEQ ID NO: 682615 - DNA, 15 bp, Homo sapiens
tctagtcttggggta

SEQ ID NO: 682616 - DNA, 15 bp, Homo sapiens
ctagtcttggggtag

SEQ ID NO: 682617 - DNA, 15 bp, Homo sapiens
tagtcttggggtaga

SEQ ID NO: 682618 - DNA, 15 bp, Homo sapiens
agtcttggggtagaa

SEQ ID NO: 682619 - DNA, 15 bp, Homo sapiens
gtcttggggtagaag

SEQ ID NO: 682620 - DNA, 15 bp, Homo sapiens
tcttggggtagaaga

SEQ ID NO: 682621 - DNA, 15 bp, Homo sapiens
cttggggtagaagag

SEQ ID NO: 682622 - DNA, 15 bp, Homo sapiens
ttggggtagaagaga

SEQ ID NO: 682623 - DNA, 15 bp, Homo sapiens
tggggtagaagagat

SEQ ID NO: 682624 - DNA, 15 bp, Homo sapiens
ggggtagaagagatg

SEQ ID NO: 682625 - DNA, 15 bp, Homo sapiens
gggtagaagagatga

SEQ ID NO: 682626 - DNA, 15 bp, Homo sapiens
ggtagaagagatgaa

SEQ ID NO: 682627 - DNA, 15 bp, Homo sapiens
gtagaagagatgaaa

SEQ ID NO: 682628 - DNA, 15 bp, Homo sapiens
tagaagagatgaaag

SEQ ID NO: 682629 - DNA, 15 bp, Homo sapiens
agaagagatgaaaga

SEQ ID NO: 682630 - DNA, 15 bp, Homo sapiens
gaagagatgaaagaa

SEQ ID NO: 682631 - DNA, 15 bp, Homo sapiens
aagagatgaaagaag

SEQ ID NO: 682632 - DNA, 15 bp, Homo sapiens
agagatgaaagaaga

SEQ ID NO: 682633 - DNA, 15 bp, Homo sapiens
gagatgaaagaagag

SEQ ID NO: 682634 - DNA, 15 bp, Homo sapiens
agatgaaagaagagg

SEQ ID NO: 682635 - DNA, 15 bp, Homo sapiens
gatgaaagaagaggc

SEQ ID NO: 682636 - DNA, 15 bp, Homo sapiens
atgaaagaagaggca

SEQ ID NO: 682637 - DNA, 15 bp, Homo sapiens
tgaaagaagaggcag

SEQ ID NO: 682638 - DNA, 15 bp, Homo sapiens
gaaagaagaggcagg

SEQ ID NO: 682639 - DNA, 15 bp, Homo sapiens
aaagaagaggcaggg

SEQ ID NO: 682640 - DNA, 15 bp, Homo sapiens
aagaagaggcagggg

SEQ ID NO: 682641 - DNA, 15 bp, Homo sapiens
agaagaggcagggga

SEQ ID NO: 682642 - DNA, 15 bp, Homo sapiens
gaagaggcaggggag

SEQ ID NO: 682643 - DNA, 15 bp, Homo sapiens
aagaggcaggggagg

SEQ ID NO: 682644 - DNA, 15 bp, Homo sapiens
agaggcaggggaggc

SEQ ID NO: 682645 - DNA, 15 bp, Homo sapiens
gaggcaggggaggct

SEQ ID NO: 682646 - DNA, 15 bp, Homo sapiens
aggcaggggaggctg

SEQ ID NO: 682647 - DNA, 15 bp, Homo sapiens
ggcaggggaggctgg

SEQ ID NO: 682648 - DNA, 15 bp, Homo sapiens
gcaggggaggctggc

SEQ ID NO: 682649 - DNA, 15 bp, Homo sapiens
ttttgtatttttttt

SEQ ID NO: 682650 - DNA, 15 bp, Homo sapiens
tttgtattttttttt

SEQ ID NO: 682651 - DNA, 15 bp, Homo sapiens
ttgtatttttttttt

SEQ ID NO: 682652 - DNA, 15 bp, Homo sapiens
tgtatttttttttta

SEQ ID NO: 682653 - DNA, 15 bp, Homo sapiens
gtattttttttttag

SEQ ID NO: 682654 - DNA, 15 bp, Homo sapiens
tattttttttttagt

SEQ ID NO: 682655 - DNA, 15 bp, Homo sapiens
attttttttttagta

SEQ ID NO: 682656 - DNA, 15 bp, Homo sapiens
ttttttttttagtag

SEQ ID NO: 682657 - DNA, 15 bp, Homo sapiens
tttttttttagtaga

SEQ ID NO: 682658 - DNA, 15 bp, Homo sapiens
ttttttttagtagag

SEQ ID NO: 682659 - DNA, 15 bp, Homo sapiens
tttttttagtagaga

SEQ ID NO: 682660 - DNA, 15 bp, Homo sapiens
ttttttagtagagac

SEQ ID NO: 682661 - DNA, 15 bp, Homo sapiens
agagacagggtttca

SEQ ID NO: 682662 - DNA, 15 bp, Homo sapiens
gagacagggtttcac

SEQ ID NO: 682663 - DNA, 15 bp, Homo sapiens
agacagggtttcacc

SEQ ID NO: 682664 - DNA, 15 bp, Homo sapiens
gacagggtttcacca

SEQ ID NO: 682665 - DNA, 15 bp, Homo sapiens
acagggtttcaccat

SEQ ID NO: 682666 - DNA, 15 bp, Homo sapiens
cagggtttcaccatg

SEQ ID NO: 682667 - DNA, 15 bp, Homo sapiens
agggtttcaccatgt

SEQ ID NO: 682668 - DNA, 15 bp, Homo sapiens
ggctggtctcgaact

SEQ ID NO: 682669 - DNA, 15 bp, Homo sapiens
gctggtctcgaactc

SEQ ID NO: 682670 - DNA, 15 bp, Homo sapiens
ctggtctcgaactcc

SEQ ID NO: 682671 - DNA, 15 bp, Homo sapiens
tggtctcgaactcct

SEQ ID NO: 682672 - DNA, 15 bp, Homo sapiens
ggtctcgaactcctg

SEQ ID NO: 682673 - DNA, 15 bp, Homo sapiens
gtctcgaactcctga

SEQ ID NO: 682674 - DNA, 15 bp, Homo sapiens
tctcgaactcctgac

SEQ ID NO: 682675 - DNA, 15 bp, Homo sapiens
ctcgaactcctgacc

SEQ ID NO: 682676 - DNA, 15 bp, Homo sapiens
tcgaactcctgacct

SEQ ID NO: 682677 - DNA, 15 bp, Homo sapiens
cgaactcctgacctc

SEQ ID NO: 682678 - DNA, 15 bp, Homo sapiens
acctcaggtgatcca

SEQ ID NO: 682679 - DNA, 15 bp, Homo sapiens
cctcaggtgatccac

SEQ ID NO: 682680 - DNA, 15 bp, Homo sapiens
ctcaggtgatccact

SEQ ID NO: 682681 - DNA, 15 bp, Homo sapiens
tcaggtgatccactt

SEQ ID NO: 682682 - DNA, 15 bp, Homo sapiens
caggtgatccacttg

SEQ ID NO: 682683 - DNA, 15 bp, Homo sapiens
aggtgatccacttgc

SEQ ID NO: 682684 - DNA, 15 bp, Homo sapiens
ggtgatccacttgcc

SEQ ID NO: 682685 - DNA, 15 bp, Homo sapiens
gtgatccacttgcct

SEQ ID NO: 682686 - DNA, 15 bp, Homo sapiens
tgatccacttgcctc

SEQ ID NO: 682687 - DNA, 15 bp, Homo sapiens
gatccacttgcctca

SEQ ID NO: 682688 - DNA, 15 bp, Homo sapiens
atccacttgcctcag

SEQ ID NO: 682689 - DNA, 15 bp, Homo sapiens
tccacttgcctcagc

SEQ ID NO: 682690 - DNA, 15 bp, Homo sapiens
ccacttgcctcagcc

SEQ ID NO: 682691 - DNA, 15 bp, Homo sapiens
cacttgcctcagcct

SEQ ID NO: 682692 - DNA, 15 bp, Homo sapiens
acttgcctcagcctc

SEQ ID NO: 682693 - DNA, 15 bp, Homo sapiens
cttgcctcagcctcc

SEQ ID NO: 682694 - DNA, 15 bp, Homo sapiens
ttgcctcagcctccc

SEQ ID NO: 682695 - DNA, 15 bp, Homo sapiens
tgcctcagcctccca

SEQ ID NO: 682696 - DNA, 15 bp, Homo sapiens
gcctcagcctcccaa

SEQ ID NO: 682697 - DNA, 15 bp, Homo sapiens
cctcagcctcccaaa

SEQ ID NO: 682698 - DNA, 15 bp, Homo sapiens
ctcagcctcccaaag

SEQ ID NO: 682699 - DNA, 15 bp, Homo sapiens
tcagcctcccaaagt

SEQ ID NO: 682700 - DNA, 15 bp, Homo sapiens
cagcctcccaaagtg

SEQ ID NO: 682701 - DNA, 15 bp, Homo sapiens
agcctcccaaagtgc

SEQ ID NO: 682702 - DNA, 15 bp, Homo sapiens
caaagtgctgggatt

SEQ ID NO: 682703 - DNA, 15 bp, Homo sapiens
aaagtgctgggatta

SEQ ID NO: 682704 - DNA, 15 bp, Homo sapiens
aagtgctgggattac

SEQ ID NO: 682705 - DNA, 15 bp, Homo sapiens
agtgctgggattaca

SEQ ID NO: 682706 - DNA, 15 bp, Homo sapiens
gtgctgggattacag

SEQ ID NO: 682707 - DNA, 15 bp, Homo sapiens
tgctgggattacagg

SEQ ID NO: 682708 - DNA, 15 bp, Homo sapiens
tgggattacaggcat

SEQ ID NO: 682709 - DNA, 15 bp, Homo sapiens
gggattacaggcatg

SEQ ID NO: 682710 - DNA, 15 bp, Homo sapiens
ggattacaggcatga

SEQ ID NO: 682711 - DNA, 15 bp, Homo sapiens
gattacaggcatgag

SEQ ID NO: 682712 - DNA, 15 bp, Homo sapiens
attacaggcatgagc

SEQ ID NO: 682713 - DNA, 15 bp, Homo sapiens
ttacaggcatgagcc

SEQ ID NO: 682714 - DNA, 15 bp, Homo sapiens
tacaggcatgagcca

SEQ ID NO: 682715 - DNA, 15 bp, Homo sapiens
acaggcatgagccac

SEQ ID NO: 682716 - DNA, 15 bp, Homo sapiens
caggcatgagccacc

SEQ ID NO: 682717 - DNA, 15 bp, Homo sapiens
aggcatgagccaccg

SEQ ID NO: 682718 - DNA, 15 bp, Homo sapiens
ggcatgagccaccgt

SEQ ID NO: 682719 - DNA, 15 bp, Homo sapiens
gcatgagccaccgtg

SEQ ID NO: 682720 - DNA, 15 bp, Homo sapiens
catgagccaccgtgc

SEQ ID NO: 682721 - DNA, 15 bp, Homo sapiens
atgagccaccgtgcc

SEQ ID NO: 682722 - DNA, 15 bp, Homo sapiens
gagccaccgtgccca

SEQ ID NO: 682723 - DNA, 15 bp, Homo sapiens
agccaccgtgcccag

SEQ ID NO: 682724 - DNA, 15 bp, Homo sapiens
gccaccgtgcccagc

SEQ ID NO: 682725 - DNA, 15 bp, Homo sapiens
ccaccgtgcccagcc

SEQ ID NO: 682726 - DNA, 15 bp, Homo sapiens
caccgtgcccagcct

SEQ ID NO: 682727 - DNA, 15 bp, Homo sapiens
accgtgcccagcctg

SEQ ID NO: 682728 - DNA, 15 bp, Homo sapiens
ccgtgcccagcctgg

SEQ ID NO: 682729 - DNA, 15 bp, Homo sapiens
cgtgcccagcctggc

SEQ ID NO: 682730 - DNA, 15 bp, Homo sapiens
gtgcccagcctggct

SEQ ID NO: 682731 - DNA, 15 bp, Homo sapiens
tgcccagcctggctg

SEQ ID NO: 682732 - DNA, 15 bp, Homo sapiens
gcccagcctggctgt

SEQ ID NO: 682733 - DNA, 15 bp, Homo sapiens
cccagcctggctgtt

SEQ ID NO: 682734 - DNA, 15 bp, Homo sapiens
ccagcctggctgttt

SEQ ID NO: 682735 - DNA, 15 bp, Homo sapiens
cagcctggctgtttt

SEQ ID NO: 682736 - DNA, 15 bp, Homo sapiens
agcctggctgttttc

SEQ ID NO: 682737 - DNA, 15 bp, Homo sapiens
gcctggctgttttct

SEQ ID NO: 682738 - DNA, 15 bp, Homo sapiens
cctggctgttttctt

SEQ ID NO: 682739 - DNA, 15 bp, Homo sapiens
ctggctgttttcttt

SEQ ID NO: 682740 - DNA, 15 bp, Homo sapiens
tggctgttttctttg

SEQ ID NO: 682741 - DNA, 15 bp, Homo sapiens
ggctgttttctttgt

SEQ ID NO: 682742 - DNA, 15 bp, Homo sapiens
gctgttttctttgta

SEQ ID NO: 682743 - DNA, 15 bp, Homo sapiens
ctgttttctttgtat

SEQ ID NO: 682744 - DNA, 15 bp, Homo sapiens
tgttttctttgtatt

SEQ ID NO: 682745 - DNA, 15 bp, Homo sapiens
gttttctttgtattt

SEQ ID NO: 682746 - DNA, 15 bp, Homo sapiens
ttttctttgtatttt

SEQ ID NO: 682747 - DNA, 15 bp, Homo sapiens
tttctttgtatttta

SEQ ID NO: 682748 - DNA, 15 bp, Homo sapiens
ttctttgtattttaa

SEQ ID NO: 682749 - DNA, 15 bp, Homo sapiens
tctttgtattttaaa

SEQ ID NO: 682750 - DNA, 15 bp, Homo sapiens
ctttgtattttaaaa

SEQ ID NO: 682751 - DNA, 15 bp, Homo sapiens
tttgtattttaaaaa

SEQ ID NO: 682752 - DNA, 15 bp, Homo sapiens
ttgtattttaaaaat

SEQ ID NO: 682753 - DNA, 15 bp, Homo sapiens
tgtattttaaaaatt

SEQ ID NO: 682754 - DNA, 15 bp, Homo sapiens
gtattttaaaaatta

SEQ ID NO: 682755 - DNA, 15 bp, Homo sapiens
tattttaaaaattat

SEQ ID NO: 682756 - DNA, 15 bp, Homo sapiens
attttaaaaattatg

SEQ ID NO: 682757 - DNA, 15 bp, Homo sapiens
ttttaaaaattatgg

SEQ ID NO: 682758 - DNA, 15 bp, Homo sapiens
tttaaaaattatggc

SEQ ID NO: 682759 - DNA, 15 bp, Homo sapiens
ttaaaaattatggcc

SEQ ID NO: 682760 - DNA, 15 bp, Homo sapiens
taaaaattatggcca

SEQ ID NO: 682761 - DNA, 15 bp, Homo sapiens
aaaaattatggccag

SEQ ID NO: 682762 - DNA, 15 bp, Homo sapiens
aaaattatggccagc

SEQ ID NO: 682763 - DNA, 15 bp, Homo sapiens
aaattatggccagcg

SEQ ID NO: 682764 - DNA, 15 bp, Homo sapiens
aattatggccagcgt

SEQ ID NO: 682765 - DNA, 15 bp, Homo sapiens
attatggccagcgtt

SEQ ID NO: 682766 - DNA, 15 bp, Homo sapiens
ttatggccagcgttc

SEQ ID NO: 682767 - DNA, 15 bp, Homo sapiens
tatggccagcgttct

SEQ ID NO: 682768 - DNA, 15 bp, Homo sapiens
atggccagcgttctt

SEQ ID NO: 682769 - DNA, 15 bp, Homo sapiens
tggccagcgttcttt

SEQ ID NO: 682770 - DNA, 15 bp, Homo sapiens
ggccagcgttctttt

SEQ ID NO: 682771 - DNA, 15 bp, Homo sapiens
gccagcgttcttttg

SEQ ID NO: 682772 - DNA, 15 bp, Homo sapiens
ccagcgttcttttgt

SEQ ID NO: 682773 - DNA, 15 bp, Homo sapiens
cagcgttcttttgtg

SEQ ID NO: 682774 - DNA, 15 bp, Homo sapiens
agcgttcttttgtgt

SEQ ID NO: 682775 - DNA, 15 bp, Homo sapiens
gcgttcttttgtgtg

SEQ ID NO: 682776 - DNA, 15 bp, Homo sapiens
cgttcttttgtgtgt

SEQ ID NO: 682777 - DNA, 15 bp, Homo sapiens
gttcttttgtgtgta

SEQ ID NO: 682778 - DNA, 15 bp, Homo sapiens
ttcttttgtgtgtat

SEQ ID NO: 682779 - DNA, 15 bp, Homo sapiens
tcttttgtgtgtatg

SEQ ID NO: 682780 - DNA, 15 bp, Homo sapiens
cttttgtgtgtatgt

SEQ ID NO: 682781 - DNA, 15 bp, Homo sapiens
ttttgtgtgtatgtt

SEQ ID NO: 682782 - DNA, 15 bp, Homo sapiens
tttgtgtgtatgttg

SEQ ID NO: 682783 - DNA, 15 bp, Homo sapiens
ttgtgtgtatgttgg

SEQ ID NO: 682784 - DNA, 15 bp, Homo sapiens
tgtgtgtatgttggg

SEQ ID NO: 682785 - DNA, 15 bp, Homo sapiens
gtgtgtatgttgggc

SEQ ID NO: 682786 - DNA, 15 bp, Homo sapiens
tgtgtatgttgggca

SEQ ID NO: 682787 - DNA, 15 bp, Homo sapiens
gtgtatgttgggcag

SEQ ID NO: 682788 - DNA, 15 bp, Homo sapiens
tgtatgttgggcagg

SEQ ID NO: 682789 - DNA, 15 bp, Homo sapiens
gtatgttgggcaggg

SEQ ID NO: 682790 - DNA, 15 bp, Homo sapiens
tatgttgggcagggg

SEQ ID NO: 682791 - DNA, 15 bp, Homo sapiens
atgttgggcaggggg

SEQ ID NO: 682792 - DNA, 15 bp, Homo sapiens
tgttgggcaggggga

SEQ ID NO: 682793 - DNA, 15 bp, Homo sapiens
gttgggcagggggag

SEQ ID NO: 682794 - DNA, 15 bp, Homo sapiens
ttgggcagggggaga

SEQ ID NO: 682795 - DNA, 15 bp, Homo sapiens
tgggcagggggagag

SEQ ID NO: 682796 - DNA, 15 bp, Homo sapiens
gggcagggggagagg

SEQ ID NO: 682797 - DNA, 15 bp, Homo sapiens
ggcagggggagaggg

SEQ ID NO: 682798 - DNA, 15 bp, Homo sapiens
gcagggggagagggg

SEQ ID NO: 682799 - DNA, 15 bp, Homo sapiens
cagggggagaggggg

SEQ ID NO: 682800 - DNA, 15 bp, Homo sapiens
agggggagaggggga

SEQ ID NO: 682801 - DNA, 15 bp, Homo sapiens
gggggagagggggat

SEQ ID NO: 682802 - DNA, 15 bp, Homo sapiens
ggggagagggggatg

SEQ ID NO: 682803 - DNA, 15 bp, Homo sapiens
gggagagggggatgg

SEQ ID NO: 682804 - DNA, 15 bp, Homo sapiens
ggagagggggatggc

SEQ ID NO: 682805 - DNA, 15 bp, Homo sapiens
gagagggggatggca

SEQ ID NO: 682806 - DNA, 15 bp, Homo sapiens
agagggggatggcag

SEQ ID NO: 682807 - DNA, 15 bp, Homo sapiens
gagggggatggcagt

SEQ ID NO: 682808 - DNA, 15 bp, Homo sapiens
agggggatggcagta

SEQ ID NO: 682809 - DNA, 15 bp, Homo sapiens
gggggatggcagtaa

SEQ ID NO: 682810 - DNA, 15 bp, Homo sapiens
ggggatggcagtaaa

SEQ ID NO: 682811 - DNA, 15 bp, Homo sapiens
gggatggcagtaaaa

SEQ ID NO: 682812 - DNA, 15 bp, Homo sapiens
ggatggcagtaaaag

SEQ ID NO: 682813 - DNA, 15 bp, Homo sapiens
gatggcagtaaaagt

SEQ ID NO: 682814 - DNA, 15 bp, Homo sapiens
atggcagtaaaagtc

SEQ ID NO: 682815 - DNA, 15 bp, Homo sapiens
tggcagtaaaagtca

SEQ ID NO: 682816 - DNA, 15 bp, Homo sapiens
ggcagtaaaagtcac

SEQ ID NO: 682817 - DNA, 15 bp, Homo sapiens
gcagtaaaagtcaca

SEQ ID NO: 682818 - DNA, 15 bp, Homo sapiens
cagtaaaagtcacag

SEQ ID NO: 682819 - DNA, 15 bp, Homo sapiens
agtaaaagtcacagg

SEQ ID NO: 682820 - DNA, 15 bp, Homo sapiens
gtaaaagtcacagga

SEQ ID NO: 682821 - DNA, 15 bp, Homo sapiens
taaaagtcacaggaa

SEQ ID NO: 682822 - DNA, 15 bp, Homo sapiens
aaaagtcacaggaag

SEQ ID NO: 682823 - DNA, 15 bp, Homo sapiens
aaagtcacaggaagt

SEQ ID NO: 682824 - DNA, 15 bp, Homo sapiens
aagtcacaggaagtg

SEQ ID NO: 682825 - DNA, 15 bp, Homo sapiens
agtcacaggaagtgt

SEQ ID NO: 682826 - DNA, 15 bp, Homo sapiens
gtcacaggaagtgta

SEQ ID NO: 682827 - DNA, 15 bp, Homo sapiens
tcacaggaagtgtag

SEQ ID NO: 682828 - DNA, 15 bp, Homo sapiens
cacaggaagtgtagt

SEQ ID NO: 682829 - DNA, 15 bp, Homo sapiens
acaggaagtgtagtt

SEQ ID NO: 682830 - DNA, 15 bp, Homo sapiens
caggaagtgtagttg

SEQ ID NO: 682831 - DNA, 15 bp, Homo sapiens
aggaagtgtagttga

SEQ ID NO: 682832 - DNA, 15 bp, Homo sapiens
ggaagtgtagttgat

SEQ ID NO: 682833 - DNA, 15 bp, Homo sapiens
gaagtgtagttgatg

SEQ ID NO: 682834 - DNA, 15 bp, Homo sapiens
aagtgtagttgatga

SEQ ID NO: 682835 - DNA, 15 bp, Homo sapiens
agtgtagttgatgaa

SEQ ID NO: 682836 - DNA, 15 bp, Homo sapiens
gtgtagttgatgaac

SEQ ID NO: 682837 - DNA, 15 bp, Homo sapiens
tgtagttgatgaacc

SEQ ID NO: 682838 - DNA, 15 bp, Homo sapiens
gtagttgatgaacct

SEQ ID NO: 682839 - DNA, 15 bp, Homo sapiens
tagttgatgaacctt

SEQ ID NO: 682840 - DNA, 15 bp, Homo sapiens
agttgatgaaccttt

SEQ ID NO: 682841 - DNA, 15 bp, Homo sapiens
gttgatgaacctttc

SEQ ID NO: 682842 - DNA, 15 bp, Homo sapiens
ttgatgaacctttct

SEQ ID NO: 682843 - DNA, 15 bp, Homo sapiens
tgatgaacctttcta

SEQ ID NO: 682844 - DNA, 15 bp, Homo sapiens
gatgaacctttctaa

SEQ ID NO: 682845 - DNA, 15 bp, Homo sapiens
atgaacctttctaat

SEQ ID NO: 682846 - DNA, 15 bp, Homo sapiens
tgaacctttctaata

SEQ ID NO: 682847 - DNA, 15 bp, Homo sapiens
gaacctttctaataa

SEQ ID NO: 682848 - DNA, 15 bp, Homo sapiens
aacctttctaataaa

SEQ ID NO: 682849 - DNA, 15 bp, Homo sapiens
acctttctaataaat

SEQ ID NO: 682850 - DNA, 15 bp, Homo sapiens
cctttctaataaatc

SEQ ID NO: 682851 - DNA, 15 bp, Homo sapiens
ctttctaataaatca

SEQ ID NO: 682852 - DNA, 15 bp, Homo sapiens
tttctaataaatcat

SEQ ID NO: 682853 - DNA, 15 bp, Homo sapiens
ttctaataaatcatt

SEQ ID NO: 682854 - DNA, 15 bp, Homo sapiens
tctaataaatcattt

SEQ ID NO: 682855 - DNA, 15 bp, Homo sapiens
ctaataaatcatttt

SEQ ID NO: 682856 - DNA, 15 bp, Homo sapiens
taataaatcatttta

SEQ ID NO: 682857 - DNA, 15 bp, Homo sapiens
aataaatcattttaa

SEQ ID NO: 682858 - DNA, 15 bp, Homo sapiens
ataaatcattttaat

SEQ ID NO: 682859 - DNA, 15 bp, Homo sapiens
taaatcattttaata

SEQ ID NO: 682860 - DNA, 15 bp, Homo sapiens
aaatcattttaataa

SEQ ID NO: 682861 - DNA, 15 bp, Homo sapiens
aatcattttaataat

SEQ ID NO: 682862 - DNA, 15 bp, Homo sapiens
atcattttaataatt

SEQ ID NO: 682863 - DNA, 15 bp, Homo sapiens
tcattttaataattt

SEQ ID NO: 682864 - DNA, 15 bp, Homo sapiens
cattttaataatttc

SEQ ID NO: 682865 - DNA, 15 bp, Homo sapiens
attttaataatttca

SEQ ID NO: 682866 - DNA, 15 bp, Homo sapiens
ttttaataatttcag

SEQ ID NO: 682867 - DNA, 15 bp, Homo sapiens
tttaataatttcagc

SEQ ID NO: 682868 - DNA, 15 bp, Homo sapiens
ttaataatttcagct

SEQ ID NO: 682869 - DNA, 15 bp, Homo sapiens
taataatttcagctg

SEQ ID NO: 682870 - DNA, 15 bp, Homo sapiens
aataatttcagctgc

SEQ ID NO: 682871 - DNA, 15 bp, Homo sapiens
ataatttcagctgct

SEQ ID NO: 682872 - DNA, 15 bp, Homo sapiens
taatttcagctgctc

SEQ ID NO: 682873 - DNA, 15 bp, Homo sapiens
aatttcagctgctca

SEQ ID NO: 682874 - DNA, 15 bp, Homo sapiens
atttcagctgctcag

SEQ ID NO: 682875 - DNA, 15 bp, Homo sapiens
tttcagctgctcagt

SEQ ID NO: 682876 - DNA, 15 bp, Homo sapiens
ttcagctgctcagtt

SEQ ID NO: 682877 - DNA, 15 bp, Homo sapiens
tcagctgctcagtta

SEQ ID NO: 682878 - DNA, 15 bp, Homo sapiens
cagctgctcagttaa

SEQ ID NO: 682879 - DNA, 15 bp, Homo sapiens
agctgctcagttaaa

SEQ ID NO: 682880 - DNA, 15 bp, Homo sapiens
gctgctcagttaaac

SEQ ID NO: 682881 - DNA, 15 bp, Homo sapiens
ctgctcagttaaact

SEQ ID NO: 682882 - DNA, 15 bp, Homo sapiens
tgctcagttaaacta

SEQ ID NO: 682883 - DNA, 15 bp, Homo sapiens
gctcagttaaactaa

SEQ ID NO: 682884 - DNA, 15 bp, Homo sapiens
ctcagttaaactaaa

SEQ ID NO: 682885 - DNA, 15 bp, Homo sapiens
tcagttaaactaaat

SEQ ID NO: 682886 - DNA, 15 bp, Homo sapiens
cagttaaactaaatt

SEQ ID NO: 682887 - DNA, 15 bp, Homo sapiens
agttaaactaaattt

SEQ ID NO: 682888 - DNA, 15 bp, Homo sapiens
gttaaactaaatttg

SEQ ID NO: 682889 - DNA, 15 bp, Homo sapiens
ttaaactaaatttgg

SEQ ID NO: 682890 - DNA, 15 bp, Homo sapiens
taaactaaatttggc

SEQ ID NO: 682891 - DNA, 15 bp, Homo sapiens
aaactaaatttggcc

SEQ ID NO: 682892 - DNA, 15 bp, Homo sapiens
aactaaatttggcct

SEQ ID NO: 682893 - DNA, 15 bp, Homo sapiens
actaaatttggcctg

SEQ ID NO: 682894 - DNA, 15 bp, Homo sapiens
ctaaatttggcctga

SEQ ID NO: 682895 - DNA, 15 bp, Homo sapiens
taaatttggcctgag

SEQ ID NO: 682896 - DNA, 15 bp, Homo sapiens
aaatttggcctgagg

SEQ ID NO: 682897 - DNA, 15 bp, Homo sapiens
aatttggcctgaggc

SEQ ID NO: 682898 - DNA, 15 bp, Homo sapiens
atttggcctgaggct

SEQ ID NO: 682899 - DNA, 15 bp, Homo sapiens
tttggcctgaggctg

SEQ ID NO: 682900 - DNA, 15 bp, Homo sapiens
ttggcctgaggctgc

SEQ ID NO: 682901 - DNA, 15 bp, Homo sapiens
tggcctgaggctgcc

SEQ ID NO: 682902 - DNA, 15 bp, Homo sapiens
ggcctgaggctgcct

SEQ ID NO: 682903 - DNA, 15 bp, Homo sapiens
gcctgaggctgcctg

SEQ ID NO: 682904 - DNA, 15 bp, Homo sapiens
cctgaggctgcctgc

SEQ ID NO: 682905 - DNA, 15 bp, Homo sapiens
ctgaggctgcctgca

SEQ ID NO: 682906 - DNA, 15 bp, Homo sapiens
tgaggctgcctgcat

SEQ ID NO: 682907 - DNA, 15 bp, Homo sapiens
gaggctgcctgcata

SEQ ID NO: 682908 - DNA, 15 bp, Homo sapiens
aggctgcctgcatac

SEQ ID NO: 682909 - DNA, 15 bp, Homo sapiens
ggctgcctgcatact

SEQ ID NO: 682910 - DNA, 15 bp, Homo sapiens
gctgcctgcatactt

SEQ ID NO: 682911 - DNA, 15 bp, Homo sapiens
ctgcctgcatacttt

SEQ ID NO: 682912 - DNA, 15 bp, Homo sapiens
tgcctgcatactttg

SEQ ID NO: 682913 - DNA, 15 bp, Homo sapiens
gcctgcatactttga

SEQ ID NO: 682914 - DNA, 15 bp, Homo sapiens
cctgcatactttgag

SEQ ID NO: 682915 - DNA, 15 bp, Homo sapiens
ctgcatactttgagt

SEQ ID NO: 682916 - DNA, 15 bp, Homo sapiens
tgcatactttgagtt

SEQ ID NO: 682917 - DNA, 15 bp, Homo sapiens
gcatactttgagttc

SEQ ID NO: 682918 - DNA, 15 bp, Homo sapiens
catactttgagttcc

SEQ ID NO: 682919 - DNA, 15 bp, Homo sapiens
atactttgagttccc

SEQ ID NO: 682920 - DNA, 15 bp, Homo sapiens
tactttgagttccca

SEQ ID NO: 682921 - DNA, 15 bp, Homo sapiens
actttgagttcccac

SEQ ID NO: 682922 - DNA, 15 bp, Homo sapiens
ctttgagttcccaca

SEQ ID NO: 682923 - DNA, 15 bp, Homo sapiens
tttgagttcccacag

SEQ ID NO: 682924 - DNA, 15 bp, Homo sapiens
ttgagttcccacaga

SEQ ID NO: 682925 - DNA, 15 bp, Homo sapiens
tgagttcccacagag

SEQ ID NO: 682926 - DNA, 15 bp, Homo sapiens
gagttcccacagagc

SEQ ID NO: 682927 - DNA, 15 bp, Homo sapiens
agttcccacagagca

SEQ ID NO: 682928 - DNA, 15 bp, Homo sapiens
gttcccacagagcaa

SEQ ID NO: 682929 - DNA, 15 bp, Homo sapiens
ttcccacagagcaaa

SEQ ID NO: 682930 - DNA, 15 bp, Homo sapiens
tcccacagagcaaac

SEQ ID NO: 682931 - DNA, 15 bp, Homo sapiens
cccacagagcaaact

SEQ ID NO: 682932 - DNA, 15 bp, Homo sapiens
ccacagagcaaactg

SEQ ID NO: 682933 - DNA, 15 bp, Homo sapiens
cacagagcaaactgc

SEQ ID NO: 682934 - DNA, 15 bp, Homo sapiens
acagagcaaactgca

SEQ ID NO: 682935 - DNA, 15 bp, Homo sapiens
cagagcaaactgcaa

SEQ ID NO: 682936 - DNA, 15 bp, Homo sapiens
agagcaaactgcaag

SEQ ID NO: 682937 - DNA, 15 bp, Homo sapiens
gagcaaactgcaagc

SEQ ID NO: 682938 - DNA, 15 bp, Homo sapiens
agcaaactgcaagca

SEQ ID NO: 682939 - DNA, 15 bp, Homo sapiens
gcaaactgcaagcaa

SEQ ID NO: 682940 - DNA, 15 bp, Homo sapiens
caaactgcaagcaaa

SEQ ID NO: 682941 - DNA, 15 bp, Homo sapiens
aaactgcaagcaaac

SEQ ID NO: 682942 - DNA, 15 bp, Homo sapiens
aactgcaagcaaact

SEQ ID NO: 682943 - DNA, 15 bp, Homo sapiens
actgcaagcaaactt

SEQ ID NO: 682944 - DNA, 15 bp, Homo sapiens
ctgcaagcaaactta

SEQ ID NO: 682945 - DNA, 15 bp, Homo sapiens
tgcaagcaaacttag

SEQ ID NO: 682946 - DNA, 15 bp, Homo sapiens
gcaagcaaacttagt

SEQ ID NO: 682947 - DNA, 15 bp, Homo sapiens
caagcaaacttagta

SEQ ID NO: 682948 - DNA, 15 bp, Homo sapiens
aagcaaacttagtat

SEQ ID NO: 682949 - DNA, 15 bp, Homo sapiens
agcaaacttagtatg

SEQ ID NO: 682950 - DNA, 15 bp, Homo sapiens
gcaaacttagtatgt

SEQ ID NO: 682951 - DNA, 15 bp, Homo sapiens
caaacttagtatgta

SEQ ID NO: 682952 - DNA, 15 bp, Homo sapiens
aaacttagtatgtaa

SEQ ID NO: 682953 - DNA, 15 bp, Homo sapiens
aacttagtatgtaaa

SEQ ID NO: 682954 - DNA, 15 bp, Homo sapiens
acttagtatgtaaac

SEQ ID NO: 682955 - DNA, 15 bp, Homo sapiens
cttagtatgtaaaca

SEQ ID NO: 682956 - DNA, 15 bp, Homo sapiens
ttagtatgtaaacaa

SEQ ID NO: 682957 - DNA, 15 bp, Homo sapiens
tagtatgtaaacaaa

SEQ ID NO: 682958 - DNA, 15 bp, Homo sapiens
agtatgtaaacaaac

SEQ ID NO: 682959 - DNA, 15 bp, Homo sapiens
gtatgtaaacaaact

SEQ ID NO: 682960 - DNA, 15 bp, Homo sapiens
tatgtaaacaaactg

SEQ ID NO: 682961 - DNA, 15 bp, Homo sapiens
atgtaaacaaactgc

SEQ ID NO: 682962 - DNA, 15 bp, Homo sapiens
tgtaaacaaactgca

SEQ ID NO: 682963 - DNA, 15 bp, Homo sapiens
gtaaacaaactgcaa

SEQ ID NO: 682964 - DNA, 15 bp, Homo sapiens
taaacaaactgcaac

SEQ ID NO: 682965 - DNA, 15 bp, Homo sapiens
aaacaaactgcaact

SEQ ID NO: 682966 - DNA, 15 bp, Homo sapiens
aacaaactgcaactt

SEQ ID NO: 682967 - DNA, 15 bp, Homo sapiens
acaaactgcaactta

SEQ ID NO: 682968 - DNA, 15 bp, Homo sapiens
caaactgcaacttat

SEQ ID NO: 682969 - DNA, 15 bp, Homo sapiens
aaactgcaacttatc

SEQ ID NO: 682970 - DNA, 15 bp, Homo sapiens
aactgcaacttatct

SEQ ID NO: 682971 - DNA, 15 bp, Homo sapiens
actgcaacttatctt

SEQ ID NO: 682972 - DNA, 15 bp, Homo sapiens
ctgcaacttatctta

SEQ ID NO: 682973 - DNA, 15 bp, Homo sapiens
tgcaacttatcttag

SEQ ID NO: 682974 - DNA, 15 bp, Homo sapiens
gcaacttatcttagc

SEQ ID NO: 682975 - DNA, 15 bp, Homo sapiens
caacttatcttagca

SEQ ID NO: 682976 - DNA, 15 bp, Homo sapiens
aacttatcttagcag

SEQ ID NO: 682977 - DNA, 15 bp, Homo sapiens
acttatcttagcagt

SEQ ID NO: 682978 - DNA, 15 bp, Homo sapiens
cttatcttagcagta

SEQ ID NO: 682979 - DNA, 15 bp, Homo sapiens
ttatcttagcagtat

SEQ ID NO: 682980 - DNA, 15 bp, Homo sapiens
tatcttagcagtata

SEQ ID NO: 682981 - DNA, 15 bp, Homo sapiens
atcttagcagtatat

SEQ ID NO: 682982 - DNA, 15 bp, Homo sapiens
tcttagcagtatatt

SEQ ID NO: 682983 - DNA, 15 bp, Homo sapiens
cttagcagtatattc

SEQ ID NO: 682984 - DNA, 15 bp, Homo sapiens
ttagcagtatattct

SEQ ID NO: 682985 - DNA, 15 bp, Homo sapiens
tagcagtatattctc

SEQ ID NO: 682986 - DNA, 15 bp, Homo sapiens
agcagtatattctct

SEQ ID NO: 682987 - DNA, 15 bp, Homo sapiens
gcagtatattctctt

SEQ ID NO: 682988 - DNA, 15 bp, Homo sapiens
cagtatattctctta

SEQ ID NO: 682989 - DNA, 15 bp, Homo sapiens
agtatattctcttaa

SEQ ID NO: 682990 - DNA, 15 bp, Homo sapiens
gtatattctcttaag

SEQ ID NO: 682991 - DNA, 15 bp, Homo sapiens
tatattctcttaaga

SEQ ID NO: 682992 - DNA, 15 bp, Homo sapiens
atattctcttaagac

SEQ ID NO: 682993 - DNA, 15 bp, Homo sapiens
tattctcttaagaca

SEQ ID NO: 682994 - DNA, 15 bp, Homo sapiens
attctcttaagacag

SEQ ID NO: 682995 - DNA, 15 bp, Homo sapiens
ttctcttaagacaga

SEQ ID NO: 682996 - DNA, 15 bp, Homo sapiens
tctcttaagacagag

SEQ ID NO: 682997 - DNA, 15 bp, Homo sapiens
ctcttaagacagaga

SEQ ID NO: 682998 - DNA, 15 bp, Homo sapiens
tcttaagacagagac

SEQ ID NO: 682999 - DNA, 15 bp, Homo sapiens
cttaagacagagact

SEQ ID NO: 683000 - DNA, 15 bp, Homo sapiens
ttaagacagagactg

SEQ ID NO: 683001 - DNA, 15 bp, Homo sapiens
taagacagagactgg

SEQ ID NO: 683002 - DNA, 15 bp, Homo sapiens
aagacagagactggc

SEQ ID NO: 683003 - DNA, 15 bp, Homo sapiens
agacagagactggct

SEQ ID NO: 683004 - DNA, 15 bp, Homo sapiens
gacagagactggctg

SEQ ID NO: 683005 - DNA, 15 bp, Homo sapiens
acagagactggctga

SEQ ID NO: 683006 - DNA, 15 bp, Homo sapiens
cagagactggctgag

SEQ ID NO: 683007 - DNA, 15 bp, Homo sapiens
agagactggctgaga

SEQ ID NO: 683008 - DNA, 15 bp, Homo sapiens
gagactggctgagac

SEQ ID NO: 683009 - DNA, 15 bp, Homo sapiens
agactggctgagaca

SEQ ID NO: 683010 - DNA, 15 bp, Homo sapiens
gactggctgagacaa

SEQ ID NO: 683011 - DNA, 15 bp, Homo sapiens
actggctgagacaag

SEQ ID NO: 683012 - DNA, 15 bp, Homo sapiens
ctggctgagacaagt

SEQ ID NO: 683013 - DNA, 15 bp, Homo sapiens
tggctgagacaagtt

SEQ ID NO: 683014 - DNA, 15 bp, Homo sapiens
ggctgagacaagttg

SEQ ID NO: 683015 - DNA, 15 bp, Homo sapiens
gctgagacaagttgc

SEQ ID NO: 683016 - DNA, 15 bp, Homo sapiens
ctgagacaagttgct

SEQ ID NO: 683017 - DNA, 15 bp, Homo sapiens
tgagacaagttgctg

SEQ ID NO: 683018 - DNA, 15 bp, Homo sapiens
gagacaagttgctga

SEQ ID NO: 683019 - DNA, 15 bp, Homo sapiens
agacaagttgctgag

SEQ ID NO: 683020 - DNA, 15 bp, Homo sapiens
gacaagttgctgagt

SEQ ID NO: 683021 - DNA, 15 bp, Homo sapiens
acaagttgctgagtc

SEQ ID NO: 683022 - DNA, 15 bp, Homo sapiens
caagttgctgagtct

SEQ ID NO: 683023 - DNA, 15 bp, Homo sapiens
aagttgctgagtctc

SEQ ID NO: 683024 - DNA, 15 bp, Homo sapiens
agttgctgagtctca

SEQ ID NO: 683025 - DNA, 15 bp, Homo sapiens
gttgctgagtctcag

SEQ ID NO: 683026 - DNA, 15 bp, Homo sapiens
ttgctgagtctcagc

SEQ ID NO: 683027 - DNA, 15 bp, Homo sapiens
tgctgagtctcagcc

SEQ ID NO: 683028 - DNA, 15 bp, Homo sapiens
gctgagtctcagcca

SEQ ID NO: 683029 - DNA, 15 bp, Homo sapiens
ctgagtctcagccaa

SEQ ID NO: 683030 - DNA, 15 bp, Homo sapiens
tgagtctcagccaat

SEQ ID NO: 683031 - DNA, 15 bp, Homo sapiens
gagtctcagccaatc

SEQ ID NO: 683032 - DNA, 15 bp, Homo sapiens
agtctcagccaatca

SEQ ID NO: 683033 - DNA, 15 bp, Homo sapiens
gtctcagccaatcat

SEQ ID NO: 683034 - DNA, 15 bp, Homo sapiens
tctcagccaatcatg

SEQ ID NO: 683035 - DNA, 15 bp, Homo sapiens
ctcagccaatcatgg

SEQ ID NO: 683036 - DNA, 15 bp, Homo sapiens
tcagccaatcatggc

SEQ ID NO: 683037 - DNA, 15 bp, Homo sapiens
cagccaatcatggca

SEQ ID NO: 683038 - DNA, 15 bp, Homo sapiens
agccaatcatggcag

SEQ ID NO: 683039 - DNA, 15 bp, Homo sapiens
gccaatcatggcagc

SEQ ID NO: 683040 - DNA, 15 bp, Homo sapiens
ccaatcatggcagcc

SEQ ID NO: 683041 - DNA, 15 bp, Homo sapiens
caatcatggcagcca

SEQ ID NO: 683042 - DNA, 15 bp, Homo sapiens
aatcatggcagccaa

SEQ ID NO: 683043 - DNA, 15 bp, Homo sapiens
atcatggcagccaag

SEQ ID NO: 683044 - DNA, 15 bp, Homo sapiens
tcatggcagccaagc

SEQ ID NO: 683045 - DNA, 15 bp, Homo sapiens
catggcagccaagca

SEQ ID NO: 683046 - DNA, 15 bp, Homo sapiens
atggcagccaagcat

SEQ ID NO: 683047 - DNA, 15 bp, Homo sapiens
tggcagccaagcatc

SEQ ID NO: 683048 - DNA, 15 bp, Homo sapiens
ggcagccaagcatca

SEQ ID NO: 683049 - DNA, 15 bp, Homo sapiens
gcagccaagcatcag

SEQ ID NO: 683050 - DNA, 15 bp, Homo sapiens
cagccaagcatcagc

SEQ ID NO: 683051 - DNA, 15 bp, Homo sapiens
agccaagcatcagcc

SEQ ID NO: 683052 - DNA, 15 bp, Homo sapiens
gccaagcatcagcca

SEQ ID NO: 683053 - DNA, 15 bp, Homo sapiens
ccaagcatcagccaa

SEQ ID NO: 683054 - DNA, 15 bp, Homo sapiens
caagcatcagccaat

SEQ ID NO: 683055 - DNA, 15 bp, Homo sapiens
aagcatcagccaatc

SEQ ID NO: 683056 - DNA, 15 bp, Homo sapiens
agcatcagccaatca

SEQ ID NO: 683057 - DNA, 15 bp, Homo sapiens
gcatcagccaatcac

SEQ ID NO: 683058 - DNA, 15 bp, Homo sapiens
catcagccaatcaca

SEQ ID NO: 683059 - DNA, 15 bp, Homo sapiens
atcagccaatcacag

SEQ ID NO: 683060 - DNA, 15 bp, Homo sapiens
tcagccaatcacagg

SEQ ID NO: 683061 - DNA, 15 bp, Homo sapiens
cagccaatcacaggc

SEQ ID NO: 683062 - DNA, 15 bp, Homo sapiens
agccaatcacaggct

SEQ ID NO: 683063 - DNA, 15 bp, Homo sapiens
gccaatcacaggcta

SEQ ID NO: 683064 - DNA, 15 bp, Homo sapiens
ccaatcacaggctac

SEQ ID NO: 683065 - DNA, 15 bp, Homo sapiens
caatcacaggctacc

SEQ ID NO: 683066 - DNA, 15 bp, Homo sapiens
aatcacaggctaccg

SEQ ID NO: 683067 - DNA, 15 bp, Homo sapiens
atcacaggctaccga

SEQ ID NO: 683068 - DNA, 15 bp, Homo sapiens
tcacaggctaccgac

SEQ ID NO: 683069 - DNA, 15 bp, Homo sapiens
cacaggctaccgact

SEQ ID NO: 683070 - DNA, 15 bp, Homo sapiens
acaggctaccgactg

SEQ ID NO: 683071 - DNA, 15 bp, Homo sapiens
caggctaccgactga

SEQ ID NO: 683072 - DNA, 15 bp, Homo sapiens
aggctaccgactgat

SEQ ID NO: 683073 - DNA, 15 bp, Homo sapiens
ggctaccgactgatg

SEQ ID NO: 683074 - DNA, 15 bp, Homo sapiens
gctaccgactgatga

SEQ ID NO: 683075 - DNA, 15 bp, Homo sapiens
ctaccgactgatgag

SEQ ID NO: 683076 - DNA, 15 bp, Homo sapiens
taccgactgatgagc

SEQ ID NO: 683077 - DNA, 15 bp, Homo sapiens
accgactgatgagct

SEQ ID NO: 683078 - DNA, 15 bp, Homo sapiens
ccgactgatgagctc

SEQ ID NO: 683079 - DNA, 15 bp, Homo sapiens
cgactgatgagctcc

SEQ ID NO: 683080 - DNA, 15 bp, Homo sapiens
gactgatgagctcct

SEQ ID NO: 683081 - DNA, 15 bp, Homo sapiens
actgatgagctcctg

SEQ ID NO: 683082 - DNA, 15 bp, Homo sapiens
ctgatgagctcctgt

SEQ ID NO: 683083 - DNA, 15 bp, Homo sapiens
tgatgagctcctgtc

SEQ ID NO: 683084 - DNA, 15 bp, Homo sapiens
gatgagctcctgtcc

SEQ ID NO: 683085 - DNA, 15 bp, Homo sapiens
atgagctcctgtcca

SEQ ID NO: 683086 - DNA, 15 bp, Homo sapiens
tgagctcctgtccat

SEQ ID NO: 683087 - DNA, 15 bp, Homo sapiens
gagctcctgtccata

SEQ ID NO: 683088 - DNA, 15 bp, Homo sapiens
agctcctgtccatac

SEQ ID NO: 683089 - DNA, 15 bp, Homo sapiens
gctcctgtccatacc

SEQ ID NO: 683090 - DNA, 15 bp, Homo sapiens
ctcctgtccataccc

SEQ ID NO: 683091 - DNA, 15 bp, Homo sapiens
tcctgtccataccca

SEQ ID NO: 683092 - DNA, 15 bp, Homo sapiens
cctgtccatacccaa

SEQ ID NO: 683093 - DNA, 15 bp, Homo sapiens
ctgtccatacccaac

SEQ ID NO: 683094 - DNA, 15 bp, Homo sapiens
tgtccatacccaaca

SEQ ID NO: 683095 - DNA, 15 bp, Homo sapiens
gtccatacccaacac

SEQ ID NO: 683096 - DNA, 15 bp, Homo sapiens
tccatacccaacacc

SEQ ID NO: 683097 - DNA, 15 bp, Homo sapiens
ccatacccaacacct

SEQ ID NO: 683098 - DNA, 15 bp, Homo sapiens
catacccaacacctg

SEQ ID NO: 683099 - DNA, 15 bp, Homo sapiens
atacccaacacctga

SEQ ID NO: 683100 - DNA, 15 bp, Homo sapiens
tacccaacacctgat

SEQ ID NO: 683101 - DNA, 15 bp, Homo sapiens
acccaacacctgatc

SEQ ID NO: 683102 - DNA, 15 bp, Homo sapiens
cccaacacctgatca

SEQ ID NO: 683103 - DNA, 15 bp, Homo sapiens
ccaacacctgatcac

SEQ ID NO: 683104 - DNA, 15 bp, Homo sapiens
caacacctgatcaca

SEQ ID NO: 683105 - DNA, 15 bp, Homo sapiens
aacacctgatcacat

SEQ ID NO: 683106 - DNA, 15 bp, Homo sapiens
acacctgatcacatc

SEQ ID NO: 683107 - DNA, 15 bp, Homo sapiens
cacctgatcacatca

SEQ ID NO: 683108 - DNA, 15 bp, Homo sapiens
acctgatcacatcac

SEQ ID NO: 683109 - DNA, 15 bp, Homo sapiens
cctgatcacatcacc

SEQ ID NO: 683110 - DNA, 15 bp, Homo sapiens
ctgatcacatcaccc

SEQ ID NO: 683111 - DNA, 15 bp, Homo sapiens
tgatcacatcaccct

SEQ ID NO: 683112 - DNA, 15 bp, Homo sapiens
gatcacatcaccctc

SEQ ID NO: 683113 - DNA, 15 bp, Homo sapiens
atcacatcaccctca

SEQ ID NO: 683114 - DNA, 15 bp, Homo sapiens
tcacatcaccctcaa

SEQ ID NO: 683115 - DNA, 15 bp, Homo sapiens
cacatcaccctcaaa

SEQ ID NO: 683116 - DNA, 15 bp, Homo sapiens
acatcaccctcaaat

SEQ ID NO: 683117 - DNA, 15 bp, Homo sapiens
catcaccctcaaata

SEQ ID NO: 683118 - DNA, 15 bp, Homo sapiens
atcaccctcaaataa

SEQ ID NO: 683119 - DNA, 15 bp, Homo sapiens
tcaccctcaaataaa

SEQ ID NO: 683120 - DNA, 15 bp, Homo sapiens
caccctcaaataaat

SEQ ID NO: 683121 - DNA, 15 bp, Homo sapiens
accctcaaataaata

SEQ ID NO: 683122 - DNA, 15 bp, Homo sapiens
ccctcaaataaataa

SEQ ID NO: 683123 - DNA, 15 bp, Homo sapiens
cctcaaataaataag

SEQ ID NO: 683124 - DNA, 15 bp, Homo sapiens
ctcaaataaataagg

SEQ ID NO: 683125 - DNA, 15 bp, Homo sapiens
tcaaataaataaggt

SEQ ID NO: 683126 - DNA, 15 bp, Homo sapiens
caaataaataaggtg

SEQ ID NO: 683127 - DNA, 15 bp, Homo sapiens
aaataaataaggtga

SEQ ID NO: 683128 - DNA, 15 bp, Homo sapiens
aataaataaggtgaa

SEQ ID NO: 683129 - DNA, 15 bp, Homo sapiens
ataaataaggtgaac

SEQ ID NO: 683130 - DNA, 15 bp, Homo sapiens
taaataaggtgaaca

SEQ ID NO: 683131 - DNA, 15 bp, Homo sapiens
aaataaggtgaacac

SEQ ID NO: 683132 - DNA, 15 bp, Homo sapiens
aataaggtgaacacc

SEQ ID NO: 683133 - DNA, 15 bp, Homo sapiens
ataaggtgaacaccc

SEQ ID NO: 683134 - DNA, 15 bp, Homo sapiens
taaggtgaacaccca

SEQ ID NO: 683135 - DNA, 15 bp, Homo sapiens
aaggtgaacacccaa

SEQ ID NO: 683136 - DNA, 15 bp, Homo sapiens
aggtgaacacccaac

SEQ ID NO: 683137 - DNA, 15 bp, Homo sapiens
ggtgaacacccaact

SEQ ID NO: 683138 - DNA, 15 bp, Homo sapiens
gtgaacacccaactg

SEQ ID NO: 683139 - DNA, 15 bp, Homo sapiens
tgaacacccaactgt

SEQ ID NO: 683140 - DNA, 15 bp, Homo sapiens
gaacacccaactgta

SEQ ID NO: 683141 - DNA, 15 bp, Homo sapiens
aacacccaactgtaa

SEQ ID NO: 683142 - DNA, 15 bp, Homo sapiens
acacccaactgtaac

SEQ ID NO: 683143 - DNA, 15 bp, Homo sapiens
cacccaactgtaacc

SEQ ID NO: 683144 - DNA, 15 bp, Homo sapiens
acccaactgtaacca

SEQ ID NO: 683145 - DNA, 15 bp, Homo sapiens
cccaactgtaaccaa

SEQ ID NO: 683146 - DNA, 15 bp, Homo sapiens
ccaactgtaaccaat

SEQ ID NO: 683147 - DNA, 15 bp, Homo sapiens
caactgtaaccaatc

SEQ ID NO: 683148 - DNA, 15 bp, Homo sapiens
aactgtaaccaatca

SEQ ID NO: 683149 - DNA, 15 bp, Homo sapiens
actgtaaccaatcag

SEQ ID NO: 683150 - DNA, 15 bp, Homo sapiens
ctgtaaccaatcagc

SEQ ID NO: 683151 - DNA, 15 bp, Homo sapiens
tgtaaccaatcagct

SEQ ID NO: 683152 - DNA, 15 bp, Homo sapiens
gtaaccaatcagcta

SEQ ID NO: 683153 - DNA, 15 bp, Homo sapiens
taaccaatcagctat

SEQ ID NO: 683154 - DNA, 15 bp, Homo sapiens
aaccaatcagctatt

SEQ ID NO: 683155 - DNA, 15 bp, Homo sapiens
accaatcagctattt

SEQ ID NO: 683156 - DNA, 15 bp, Homo sapiens
ccaatcagctatttc

SEQ ID NO: 683157 - DNA, 15 bp, Homo sapiens
caatcagctatttct

SEQ ID NO: 683158 - DNA, 15 bp, Homo sapiens
aatcagctatttctg

SEQ ID NO: 683159 - DNA, 15 bp, Homo sapiens
atcagctatttctgt

SEQ ID NO: 683160 - DNA, 15 bp, Homo sapiens
tcagctatttctgta

SEQ ID NO: 683161 - DNA, 15 bp, Homo sapiens
cagctatttctgtag

SEQ ID NO: 683162 - DNA, 15 bp, Homo sapiens
agctatttctgtagg

SEQ ID NO: 683163 - DNA, 15 bp, Homo sapiens
gctatttctgtaggg

SEQ ID NO: 683164 - DNA, 15 bp, Homo sapiens
ctatttctgtagggc

SEQ ID NO: 683165 - DNA, 15 bp, Homo sapiens
tatttctgtagggca

SEQ ID NO: 683166 - DNA, 15 bp, Homo sapiens
atttctgtagggcac

SEQ ID NO: 683167 - DNA, 15 bp, Homo sapiens
tttctgtagggcact

SEQ ID NO: 683168 - DNA, 15 bp, Homo sapiens
ttctgtagggcactt

SEQ ID NO: 683169 - DNA, 15 bp, Homo sapiens
tctgtagggcacttc

SEQ ID NO: 683170 - DNA, 15 bp, Homo sapiens
ctgtagggcacttcc

SEQ ID NO: 683171 - DNA, 15 bp, Homo sapiens
tgtagggcacttcct

SEQ ID NO: 683172 - DNA, 15 bp, Homo sapiens
gtagggcacttcctt

SEQ ID NO: 683173 - DNA, 15 bp, Homo sapiens
tagggcacttccttt

SEQ ID NO: 683174 - DNA, 15 bp, Homo sapiens
agggcacttcctttt

SEQ ID NO: 683175 - DNA, 15 bp, Homo sapiens
gggcacttccttttt

SEQ ID NO: 683176 - DNA, 15 bp, Homo sapiens
ggcacttcctttttc

SEQ ID NO: 683177 - DNA, 15 bp, Homo sapiens
gcacttcctttttct

SEQ ID NO: 683178 - DNA, 15 bp, Homo sapiens
cacttcctttttctg

SEQ ID NO: 683179 - DNA, 15 bp, Homo sapiens
acttcctttttctgt

SEQ ID NO: 683180 - DNA, 15 bp, Homo sapiens
cttcctttttctgtc

SEQ ID NO: 683181 - DNA, 15 bp, Homo sapiens
ttcctttttctgtct

SEQ ID NO: 683182 - DNA, 15 bp, Homo sapiens
tcctttttctgtcta

SEQ ID NO: 683183 - DNA, 15 bp, Homo sapiens
cctttttctgtctat

SEQ ID NO: 683184 - DNA, 15 bp, Homo sapiens
ctttttctgtctata

SEQ ID NO: 683185 - DNA, 15 bp, Homo sapiens
tttttctgtctataa

SEQ ID NO: 683186 - DNA, 15 bp, Homo sapiens
ttttctgtctataaa

SEQ ID NO: 683187 - DNA, 15 bp, Homo sapiens
tttctgtctataaat

SEQ ID NO: 683188 - DNA, 15 bp, Homo sapiens
ttctgtctataaata

SEQ ID NO: 683189 - DNA, 15 bp, Homo sapiens
tctgtctataaatac

SEQ ID NO: 683190 - DNA, 15 bp, Homo sapiens
ctgtctataaatact

SEQ ID NO: 683191 - DNA, 15 bp, Homo sapiens
tgtctataaatactg

SEQ ID NO: 683192 - DNA, 15 bp, Homo sapiens
gtctataaatactgc

SEQ ID NO: 683193 - DNA, 15 bp, Homo sapiens
tctataaatactgcc

SEQ ID NO: 683194 - DNA, 15 bp, Homo sapiens
ctataaatactgcct

SEQ ID NO: 683195 - DNA, 15 bp, Homo sapiens
tataaatactgcctg

SEQ ID NO: 683196 - DNA, 15 bp, Homo sapiens
ataaatactgcctga

SEQ ID NO: 683197 - DNA, 15 bp, Homo sapiens
taaatactgcctgac

SEQ ID NO: 683198 - DNA, 15 bp, Homo sapiens
aaatactgcctgacc

SEQ ID NO: 683199 - DNA, 15 bp, Homo sapiens
aatactgcctgacca

SEQ ID NO: 683200 - DNA, 15 bp, Homo sapiens
atactgcctgaccaa

SEQ ID NO: 683201 - DNA, 15 bp, Homo sapiens
tactgcctgaccaaa

SEQ ID NO: 683202 - DNA, 15 bp, Homo sapiens
actgcctgaccaaat

SEQ ID NO: 683203 - DNA, 15 bp, Homo sapiens
ctgcctgaccaaatt

SEQ ID NO: 683204 - DNA, 15 bp, Homo sapiens
tgcctgaccaaattg

SEQ ID NO: 683205 - DNA, 15 bp, Homo sapiens
gcctgaccaaattgc

SEQ ID NO: 683206 - DNA, 15 bp, Homo sapiens
cctgaccaaattgct

SEQ ID NO: 683207 - DNA, 15 bp, Homo sapiens
ctgaccaaattgctt

SEQ ID NO: 683208 - DNA, 15 bp, Homo sapiens
tgaccaaattgcttg

SEQ ID NO: 683209 - DNA, 15 bp, Homo sapiens
gaccaaattgcttgg

SEQ ID NO: 683210 - DNA, 15 bp, Homo sapiens
accaaattgcttggg

SEQ ID NO: 683211 - DNA, 15 bp, Homo sapiens
ccaaattgcttgggg

SEQ ID NO: 683212 - DNA, 15 bp, Homo sapiens
caaattgcttggggg

SEQ ID NO: 683213 - DNA, 15 bp, Homo sapiens
aaattgcttggggga

SEQ ID NO: 683214 - DNA, 15 bp, Homo sapiens
aattgcttgggggag

SEQ ID NO: 683215 - DNA, 15 bp, Homo sapiens
attgcttgggggagc

SEQ ID NO: 683216 - DNA, 15 bp, Homo sapiens
ttgcttgggggagcc

SEQ ID NO: 683217 - DNA, 15 bp, Homo sapiens
tgcttgggggagcct

SEQ ID NO: 683218 - DNA, 15 bp, Homo sapiens
gcttgggggagcctc

SEQ ID NO: 683219 - DNA, 15 bp, Homo sapiens
cttgggggagcctct

SEQ ID NO: 683220 - DNA, 15 bp, Homo sapiens
ttgggggagcctctg

SEQ ID NO: 683221 - DNA, 15 bp, Homo sapiens
tgggggagcctctga

SEQ ID NO: 683222 - DNA, 15 bp, Homo sapiens
gggggagcctctgaa

SEQ ID NO: 683223 - DNA, 15 bp, Homo sapiens
ggggagcctctgaac

SEQ ID NO: 683224 - DNA, 15 bp, Homo sapiens
gggagcctctgaact

SEQ ID NO: 683225 - DNA, 15 bp, Homo sapiens
ggagcctctgaactg

SEQ ID NO: 683226 - DNA, 15 bp, Homo sapiens
gagcctctgaactgg

SEQ ID NO: 683227 - DNA, 15 bp, Homo sapiens
agcctctgaactggt

SEQ ID NO: 683228 - DNA, 15 bp, Homo sapiens
gcctctgaactggtc

SEQ ID NO: 683229 - DNA, 15 bp, Homo sapiens
cctctgaactggtcc

SEQ ID NO: 683230 - DNA, 15 bp, Homo sapiens
ctctgaactggtcct

SEQ ID NO: 683231 - DNA, 15 bp, Homo sapiens
tctgaactggtcctg

SEQ ID NO: 683232 - DNA, 15 bp, Homo sapiens
ctgaactggtcctgt

SEQ ID NO: 683233 - DNA, 15 bp, Homo sapiens
tgaactggtcctgtt

SEQ ID NO: 683234 - DNA, 15 bp, Homo sapiens
gaactggtcctgttt

SEQ ID NO: 683235 - DNA, 15 bp, Homo sapiens
aactggtcctgtttt

SEQ ID NO: 683236 - DNA, 15 bp, Homo sapiens
actggtcctgttttt

SEQ ID NO: 683237 - DNA, 15 bp, Homo sapiens
ctggtcctgtttttg

SEQ ID NO: 683238 - DNA, 15 bp, Homo sapiens
tggtcctgtttttga

SEQ ID NO: 683239 - DNA, 15 bp, Homo sapiens
ggtcctgtttttgag

SEQ ID NO: 683240 - DNA, 15 bp, Homo sapiens
gtcctgtttttgagt

SEQ ID NO: 683241 - DNA, 15 bp, Homo sapiens
tcctgtttttgagtg

SEQ ID NO: 683242 - DNA, 15 bp, Homo sapiens
cctgtttttgagtgc

SEQ ID NO: 683243 - DNA, 15 bp, Homo sapiens
ctgtttttgagtgct

SEQ ID NO: 683244 - DNA, 15 bp, Homo sapiens
tgtttttgagtgctg

SEQ ID NO: 683245 - DNA, 15 bp, Homo sapiens
gtttttgagtgctgc

SEQ ID NO: 683246 - DNA, 15 bp, Homo sapiens
tttttgagtgctgcc

SEQ ID NO: 683247 - DNA, 15 bp, Homo sapiens
ttttgagtgctgcca

SEQ ID NO: 683248 - DNA, 15 bp, Homo sapiens
tttgagtgctgccag

SEQ ID NO: 683249 - DNA, 15 bp, Homo sapiens
ttgagtgctgccaga

SEQ ID NO: 683250 - DNA, 15 bp, Homo sapiens
tgagtgctgccagat

SEQ ID NO: 683251 - DNA, 15 bp, Homo sapiens
gagtgctgccagatt

SEQ ID NO: 683252 - DNA, 15 bp, Homo sapiens
agtgctgccagattc

SEQ ID NO: 683253 - DNA, 15 bp, Homo sapiens
gtgctgccagattca

SEQ ID NO: 683254 - DNA, 15 bp, Homo sapiens
tgctgccagattcat

SEQ ID NO: 683255 - DNA, 15 bp, Homo sapiens
gctgccagattcatt

SEQ ID NO: 683256 - DNA, 15 bp, Homo sapiens
ctgccagattcatta

SEQ ID NO: 683257 - DNA, 15 bp, Homo sapiens
tgccagattcattaa

SEQ ID NO: 683258 - DNA, 15 bp, Homo sapiens
gccagattcattaat

SEQ ID NO: 683259 - DNA, 15 bp, Homo sapiens
ccagattcattaatc

SEQ ID NO: 683260 - DNA, 15 bp, Homo sapiens
cagattcattaatca

SEQ ID NO: 683261 - DNA, 15 bp, Homo sapiens
agattcattaatcac

SEQ ID NO: 683262 - DNA, 15 bp, Homo sapiens
gattcattaatcact

SEQ ID NO: 683263 - DNA, 15 bp, Homo sapiens
attcattaatcacta

SEQ ID NO: 683264 - DNA, 15 bp, Homo sapiens
ttcattaatcactat

SEQ ID NO: 683265 - DNA, 15 bp, Homo sapiens
tcattaatcactatt

SEQ ID NO: 683266 - DNA, 15 bp, Homo sapiens
cattaatcactattt

SEQ ID NO: 683267 - DNA, 15 bp, Homo sapiens
attaatcactatttg

SEQ ID NO: 683268 - DNA, 15 bp, Homo sapiens
ttaatcactatttgc

SEQ ID NO: 683269 - DNA, 15 bp, Homo sapiens
taatcactatttgct

SEQ ID NO: 683270 - DNA, 15 bp, Homo sapiens
aatcactatttgctc

SEQ ID NO: 683271 - DNA, 15 bp, Homo sapiens
atcactatttgctca

SEQ ID NO: 683272 - DNA, 15 bp, Homo sapiens
tcactatttgctcag

SEQ ID NO: 683273 - DNA, 15 bp, Homo sapiens
cactatttgctcaga

SEQ ID NO: 683274 - DNA, 15 bp, Homo sapiens
actatttgctcagac

SEQ ID NO: 683275 - DNA, 15 bp, Homo sapiens
ctatttgctcagaca

SEQ ID NO: 683276 - DNA, 15 bp, Homo sapiens
tatttgctcagacaa

SEQ ID NO: 683277 - DNA, 15 bp, Homo sapiens
atttgctcagacaac

SEQ ID NO: 683278 - DNA, 15 bp, Homo sapiens
tttgctcagacaact

SEQ ID NO: 683279 - DNA, 15 bp, Homo sapiens
ttgctcagacaactc

SEQ ID NO: 683280 - DNA, 15 bp, Homo sapiens
tgctcagacaactct

SEQ ID NO: 683281 - DNA, 15 bp, Homo sapiens
gctcagacaactcta

SEQ ID NO: 683282 - DNA, 15 bp, Homo sapiens
ctcagacaactctac

SEQ ID NO: 683283 - DNA, 15 bp, Homo sapiens
tcagacaactctact

SEQ ID NO: 683284 - DNA, 15 bp, Homo sapiens
cagacaactctacta

SEQ ID NO: 683285 - DNA, 15 bp, Homo sapiens
agacaactctactat

SEQ ID NO: 683286 - DNA, 15 bp, Homo sapiens
gacaactctactatt

SEQ ID NO: 683287 - DNA, 15 bp, Homo sapiens
acaactctactattt

SEQ ID NO: 683288 - DNA, 15 bp, Homo sapiens
caactctactattta

SEQ ID NO: 683289 - DNA, 15 bp, Homo sapiens
aactctactatttat

SEQ ID NO: 683290 - DNA, 15 bp, Homo sapiens
actctactatttatt

SEQ ID NO: 683291 - DNA, 15 bp, Homo sapiens
ctctactatttattt

SEQ ID NO: 683292 - DNA, 15 bp, Homo sapiens
tctactatttatttg

SEQ ID NO: 683293 - DNA, 15 bp, Homo sapiens
ctactatttatttgt

SEQ ID NO: 683294 - DNA, 15 bp, Homo sapiens
tactatttatttgtc

SEQ ID NO: 683295 - DNA, 15 bp, Homo sapiens
actatttatttgtct

SEQ ID NO: 683296 - DNA, 15 bp, Homo sapiens
ctatttatttgtcta

SEQ ID NO: 683297 - DNA, 15 bp, Homo sapiens
tatttatttgtctaa

SEQ ID NO: 683298 - DNA, 15 bp, Homo sapiens
atttatttgtctaaa

SEQ ID NO: 683299 - DNA, 15 bp, Homo sapiens
tttatttgtctaaag

SEQ ID NO: 683300 - DNA, 15 bp, Homo sapiens
ttatttgtctaaagt

SEQ ID NO: 683301 - DNA, 15 bp, Homo sapiens
tatttgtctaaagtt

SEQ ID NO: 683302 - DNA, 15 bp, Homo sapiens
atttgtctaaagttg

SEQ ID NO: 683303 - DNA, 15 bp, Homo sapiens
tttgtctaaagttgt

SEQ ID NO: 683304 - DNA, 15 bp, Homo sapiens
ttgtctaaagttgtt

SEQ ID NO: 683305 - DNA, 15 bp, Homo sapiens
tgtctaaagttgttt

SEQ ID NO: 683306 - DNA, 15 bp, Homo sapiens
gtctaaagttgtttg

SEQ ID NO: 683307 - DNA, 15 bp, Homo sapiens
tctaaagttgtttgt

SEQ ID NO: 683308 - DNA, 15 bp, Homo sapiens
ctaaagttgtttgtt

SEQ ID NO: 683309 - DNA, 15 bp, Homo sapiens
taaagttgtttgttg

SEQ ID NO: 683310 - DNA, 15 bp, Homo sapiens
aaagttgtttgttgt

SEQ ID NO: 683311 - DNA, 15 bp, Homo sapiens
aagttgtttgttgtt

SEQ ID NO: 683312 - DNA, 15 bp, Homo sapiens
agttgtttgttgttg

SEQ ID NO: 683313 - DNA, 15 bp, Homo sapiens
gttgtttgttgttgt

SEQ ID NO: 683314 - DNA, 15 bp, Homo sapiens
ttgtttgttgttgtt

SEQ ID NO: 683315 - DNA, 15 bp, Homo sapiens
tgtttgttgttgttt

SEQ ID NO: 683316 - DNA, 15 bp, Homo sapiens
gtttgttgttgtttt

SEQ ID NO: 683317 - DNA, 15 bp, Homo sapiens
tttgttgttgttttg

SEQ ID NO: 683318 - DNA, 15 bp, Homo sapiens
ttgttgttgttttgt

SEQ ID NO: 683319 - DNA, 15 bp, Homo sapiens
tgttgttgttttgtt

SEQ ID NO: 683320 - DNA, 15 bp, Homo sapiens
gttgttgttttgttt

SEQ ID NO: 683321 - DNA, 15 bp, Homo sapiens
ttgttgttttgtttt

SEQ ID NO: 683322 - DNA, 15 bp, Homo sapiens
tgttgttttgttttt

SEQ ID NO: 683323 - DNA, 15 bp, Homo sapiens
gttgttttgtttttt

SEQ ID NO: 683324 - DNA, 15 bp, Homo sapiens
ttgttttgttttttg

SEQ ID NO: 683325 - DNA, 15 bp, Homo sapiens
tgttttgttttttgt

SEQ ID NO: 683326 - DNA, 15 bp, Homo sapiens
gttttgttttttgtt

SEQ ID NO: 683327 - DNA, 15 bp, Homo sapiens
ttttgttttttgttt

SEQ ID NO: 683328 - DNA, 15 bp, Homo sapiens
tttgttttttgtttt

SEQ ID NO: 683329 - DNA, 15 bp, Homo sapiens
ttgttttttgttttt

SEQ ID NO: 683330 - DNA, 15 bp, Homo sapiens
tgttttttgtttttg

SEQ ID NO: 683331 - DNA, 15 bp, Homo sapiens
gttttttgtttttgt

SEQ ID NO: 683332 - DNA, 15 bp, Homo sapiens
ttttttgtttttgtt

SEQ ID NO: 683333 - DNA, 15 bp, Homo sapiens
tttttgtttttgttt

SEQ ID NO: 683334 - DNA, 15 bp, Homo sapiens
ttttgtttttgtttt

SEQ ID NO: 683335 - DNA, 15 bp, Homo sapiens
tttgtttttgttttt

SEQ ID NO: 683336 - DNA, 15 bp, Homo sapiens
ttgtttttgtttttt

SEQ ID NO: 683337 - DNA, 15 bp, Homo sapiens
tgtttttgttttttt

SEQ ID NO: 683338 - DNA, 15 bp, Homo sapiens
gtttttgtttttttt

SEQ ID NO: 683339 - DNA, 15 bp, Homo sapiens
tttttgtttttttta

SEQ ID NO: 683340 - DNA, 15 bp, Homo sapiens
ttttgttttttttac

SEQ ID NO: 683341 - DNA, 15 bp, Homo sapiens
tttgttttttttaca

SEQ ID NO: 683342 - DNA, 15 bp, Homo sapiens
ttgttttttttacac

SEQ ID NO: 683343 - DNA, 15 bp, Homo sapiens
tgttttttttacaca

SEQ ID NO: 683344 - DNA, 15 bp, Homo sapiens
gttttttttacacag

SEQ ID NO: 683345 - DNA, 15 bp, Homo sapiens
ttttttttacacagg

SEQ ID NO: 683346 - DNA, 15 bp, Homo sapiens
tttttttacacaggc

SEQ ID NO: 683347 - DNA, 15 bp, Homo sapiens
ttttttacacaggca

SEQ ID NO: 683348 - DNA, 15 bp, Homo sapiens
tttttacacaggcaa

SEQ ID NO: 683349 - DNA, 15 bp, Homo sapiens
ttttacacaggcaag

SEQ ID NO: 683350 - DNA, 15 bp, Homo sapiens
tttacacaggcaagt

SEQ ID NO: 683351 - DNA, 15 bp, Homo sapiens
ttacacaggcaagta

SEQ ID NO: 683352 - DNA, 15 bp, Homo sapiens
tacacaggcaagtaa

SEQ ID NO: 683353 - DNA, 15 bp, Homo sapiens
acacaggcaagtaaa

SEQ ID NO: 683354 - DNA, 15 bp, Homo sapiens
cacaggcaagtaaac

SEQ ID NO: 683355 - DNA, 15 bp, Homo sapiens
acaggcaagtaaacc

SEQ ID NO: 683356 - DNA, 15 bp, Homo sapiens
caggcaagtaaacct

SEQ ID NO: 683357 - DNA, 15 bp, Homo sapiens
aggcaagtaaacctg

SEQ ID NO: 683358 - DNA, 15 bp, Homo sapiens
ggcaagtaaacctga

SEQ ID NO: 683359 - DNA, 15 bp, Homo sapiens
gcaagtaaacctgaa

SEQ ID NO: 683360 - DNA, 15 bp, Homo sapiens
caagtaaacctgaag

SEQ ID NO: 683361 - DNA, 15 bp, Homo sapiens
aagtaaacctgaagc

SEQ ID NO: 683362 - DNA, 15 bp, Homo sapiens
agtaaacctgaagcc

SEQ ID NO: 683363 - DNA, 15 bp, Homo sapiens
gtaaacctgaagcca

SEQ ID NO: 683364 - DNA, 15 bp, Homo sapiens
taaacctgaagccaa

SEQ ID NO: 683365 - DNA, 15 bp, Homo sapiens
aaacctgaagccaaa

SEQ ID NO: 683366 - DNA, 15 bp, Homo sapiens
aacctgaagccaaac

SEQ ID NO: 683367 - DNA, 15 bp, Homo sapiens
acctgaagccaaaca

SEQ ID NO: 683368 - DNA, 15 bp, Homo sapiens
cctgaagccaaacaa

SEQ ID NO: 683369 - DNA, 15 bp, Homo sapiens
ctgaagccaaacaac

SEQ ID NO: 683370 - DNA, 15 bp, Homo sapiens
tgaagccaaacaaca

SEQ ID NO: 683371 - DNA, 15 bp, Homo sapiens
gaagccaaacaacac

SEQ ID NO: 683372 - DNA, 15 bp, Homo sapiens
aagccaaacaacact

SEQ ID NO: 683373 - DNA, 15 bp, Homo sapiens
agccaaacaacactg

SEQ ID NO: 683374 - DNA, 15 bp, Homo sapiens
gccaaacaacactga

SEQ ID NO: 683375 - DNA, 15 bp, Homo sapiens
ccaaacaacactgaa

SEQ ID NO: 683376 - DNA, 15 bp, Homo sapiens
caaacaacactgaat

SEQ ID NO: 683377 - DNA, 15 bp, Homo sapiens
aaacaacactgaatc

SEQ ID NO: 683378 - DNA, 15 bp, Homo sapiens
aacaacactgaatct

SEQ ID NO: 683379 - DNA, 15 bp, Homo sapiens
acaacactgaatcta

SEQ ID NO: 683380 - DNA, 15 bp, Homo sapiens
caacactgaatctat

SEQ ID NO: 683381 - DNA, 15 bp, Homo sapiens
aacactgaatctata

SEQ ID NO: 683382 - DNA, 15 bp, Homo sapiens
acactgaatctataa

SEQ ID NO: 683383 - DNA, 15 bp, Homo sapiens
cactgaatctataaa

SEQ ID NO: 683384 - DNA, 15 bp, Homo sapiens
actgaatctataaac

SEQ ID NO: 683385 - DNA, 15 bp, Homo sapiens
ctgaatctataaaca

SEQ ID NO: 683386 - DNA, 15 bp, Homo sapiens
tgaatctataaacaa

SEQ ID NO: 683387 - DNA, 15 bp, Homo sapiens
gaatctataaacaac

SEQ ID NO: 683388 - DNA, 15 bp, Homo sapiens
aatctataaacaacc

SEQ ID NO: 683389 - DNA, 15 bp, Homo sapiens
atctataaacaacca

SEQ ID NO: 683390 - DNA, 15 bp, Homo sapiens
tctataaacaaccag

SEQ ID NO: 683391 - DNA, 15 bp, Homo sapiens
ctataaacaaccagg

SEQ ID NO: 683392 - DNA, 15 bp, Homo sapiens
tataaacaaccagga

SEQ ID NO: 683393 - DNA, 15 bp, Homo sapiens
ataaacaaccaggag

SEQ ID NO: 683394 - DNA, 15 bp, Homo sapiens
taaacaaccaggaga

SEQ ID NO: 683395 - DNA, 15 bp, Homo sapiens
aaacaaccaggagat

SEQ ID NO: 683396 - DNA, 15 bp, Homo sapiens
aacaaccaggagatg

SEQ ID NO: 683397 - DNA, 15 bp, Homo sapiens
acaaccaggagatgc

SEQ ID NO: 683398 - DNA, 15 bp, Homo sapiens
caaccaggagatgct

SEQ ID NO: 683399 - DNA, 15 bp, Homo sapiens
aaccaggagatgctc

SEQ ID NO: 683400 - DNA, 15 bp, Homo sapiens
accaggagatgctcg

SEQ ID NO: 683401 - DNA, 15 bp, Homo sapiens
ccaggagatgctcgg

SEQ ID NO: 683402 - DNA, 15 bp, Homo sapiens
caggagatgctcggt

SEQ ID NO: 683403 - DNA, 15 bp, Homo sapiens
aggagatgctcggtg

SEQ ID NO: 683404 - DNA, 15 bp, Homo sapiens
ggagatgctcggtgc

SEQ ID NO: 683405 - DNA, 15 bp, Homo sapiens
gagatgctcggtgca

SEQ ID NO: 683406 - DNA, 15 bp, Homo sapiens
agatgctcggtgcag

SEQ ID NO: 683407 - DNA, 15 bp, Homo sapiens
gatgctcggtgcagt

SEQ ID NO: 683408 - DNA, 15 bp, Homo sapiens
atgctcggtgcagtg

SEQ ID NO: 683409 - DNA, 15 bp, Homo sapiens
tgctcggtgcagtga

SEQ ID NO: 683410 - DNA, 15 bp, Homo sapiens
gctcggtgcagtgac

SEQ ID NO: 683411 - DNA, 15 bp, Homo sapiens
ctcggtgcagtgact

SEQ ID NO: 683412 - DNA, 15 bp, Homo sapiens
tcggtgcagtgactc

SEQ ID NO: 683413 - DNA, 15 bp, Homo sapiens
cggtgcagtgactca

SEQ ID NO: 683414 - DNA, 15 bp, Homo sapiens
ggtgcagtgactcat

SEQ ID NO: 683415 - DNA, 15 bp, Homo sapiens
gtgcagtgactcatg

SEQ ID NO: 683416 - DNA, 15 bp, Homo sapiens
tgcagtgactcatgc

SEQ ID NO: 683417 - DNA, 15 bp, Homo sapiens
gcagtgactcatgcc

SEQ ID NO: 683418 - DNA, 15 bp, Homo sapiens
cagtgactcatgcct

SEQ ID NO: 683419 - DNA, 15 bp, Homo sapiens
agtgactcatgcctg

SEQ ID NO: 683420 - DNA, 15 bp, Homo sapiens
gtgactcatgcctgt

SEQ ID NO: 683421 - DNA, 15 bp, Homo sapiens
tgactcatgcctgta

SEQ ID NO: 683422 - DNA, 15 bp, Homo sapiens
gactcatgcctgtaa

SEQ ID NO: 683423 - DNA, 15 bp, Homo sapiens
actcatgcctgtaat

SEQ ID NO: 683424 - DNA, 15 bp, Homo sapiens
ctcatgcctgtaatc

SEQ ID NO: 683425 - DNA, 15 bp, Homo sapiens
tcatgcctgtaatcc

SEQ ID NO: 683426 - DNA, 15 bp, Homo sapiens
catgcctgtaatccc

SEQ ID NO: 683427 - DNA, 15 bp, Homo sapiens
atgcctgtaatccca

SEQ ID NO: 683428 - DNA, 15 bp, Homo sapiens
tgcctgtaatcccag

SEQ ID NO: 683429 - DNA, 15 bp, Homo sapiens
gcctgtaatcccagc

SEQ ID NO: 683430 - DNA, 15 bp, Homo sapiens
cctgtaatcccagca

SEQ ID NO: 683431 - DNA, 15 bp, Homo sapiens
ctgtaatcccagcac

SEQ ID NO: 683432 - DNA, 15 bp, Homo sapiens
tgtaatcccagcact

SEQ ID NO: 683433 - DNA, 15 bp, Homo sapiens
gtaatcccagcactt

SEQ ID NO: 683434 - DNA, 15 bp, Homo sapiens
taatcccagcacttt

SEQ ID NO: 683435 - DNA, 15 bp, Homo sapiens
aatcccagcactttg

SEQ ID NO: 683436 - DNA, 15 bp, Homo sapiens
atcccagcactttga

SEQ ID NO: 683437 - DNA, 15 bp, Homo sapiens
tcccagcactttgag

SEQ ID NO: 683438 - DNA, 15 bp, Homo sapiens
cccagcactttgaga

SEQ ID NO: 683439 - DNA, 15 bp, Homo sapiens
ccagcactttgagag

SEQ ID NO: 683440 - DNA, 15 bp, Homo sapiens
cagcactttgagagg

SEQ ID NO: 683441 - DNA, 15 bp, Homo sapiens
agcactttgagaggc

SEQ ID NO: 683442 - DNA, 15 bp, Homo sapiens
gcactttgagaggcc

SEQ ID NO: 683443 - DNA, 15 bp, Homo sapiens
cactttgagaggcca

SEQ ID NO: 683444 - DNA, 15 bp, Homo sapiens
actttgagaggccaa

SEQ ID NO: 683445 - DNA, 15 bp, Homo sapiens
ctttgagaggccaag

SEQ ID NO: 683446 - DNA, 15 bp, Homo sapiens
tttgagaggccaagg

SEQ ID NO: 683447 - DNA, 15 bp, Homo sapiens
ttgagaggccaaggc

SEQ ID NO: 683448 - DNA, 15 bp, Homo sapiens
tgagaggccaaggca

SEQ ID NO: 683449 - DNA, 15 bp, Homo sapiens
gagaggccaaggcaa

SEQ ID NO: 683450 - DNA, 15 bp, Homo sapiens
agaggccaaggcaag

SEQ ID NO: 683451 - DNA, 15 bp, Homo sapiens
gaggccaaggcaagc

SEQ ID NO: 683452 - DNA, 15 bp, Homo sapiens
aggccaaggcaagca

SEQ ID NO: 683453 - DNA, 15 bp, Homo sapiens
ggccaaggcaagcag

SEQ ID NO: 683454 - DNA, 15 bp, Homo sapiens
gccaaggcaagcaga

SEQ ID NO: 683455 - DNA, 15 bp, Homo sapiens
ccaaggcaagcagat

SEQ ID NO: 683456 - DNA, 15 bp, Homo sapiens
caaggcaagcagatc

SEQ ID NO: 683457 - DNA, 15 bp, Homo sapiens
aaggcaagcagatca

SEQ ID NO: 683458 - DNA, 15 bp, Homo sapiens
aggcaagcagatcac

SEQ ID NO: 683459 - DNA, 15 bp, Homo sapiens
ggcaagcagatcacc

SEQ ID NO: 683460 - DNA, 15 bp, Homo sapiens
gcaagcagatcacct

SEQ ID NO: 683461 - DNA, 15 bp, Homo sapiens
caagcagatcacctg

SEQ ID NO: 683462 - DNA, 15 bp, Homo sapiens
aagcagatcacctga

SEQ ID NO: 683463 - DNA, 15 bp, Homo sapiens
agcagatcacctgag

SEQ ID NO: 683464 - DNA, 15 bp, Homo sapiens
gcagatcacctgagg

SEQ ID NO: 683465 - DNA, 15 bp, Homo sapiens
cagatcacctgaggc

SEQ ID NO: 683466 - DNA, 15 bp, Homo sapiens
agatcacctgaggcc

SEQ ID NO: 683467 - DNA, 15 bp, Homo sapiens
gatcacctgaggcca

SEQ ID NO: 683468 - DNA, 15 bp, Homo sapiens
atcacctgaggccag

SEQ ID NO: 683469 - DNA, 15 bp, Homo sapiens
tcacctgaggccagg

SEQ ID NO: 683470 - DNA, 15 bp, Homo sapiens
cacctgaggccagga

SEQ ID NO: 683471 - DNA, 15 bp, Homo sapiens
acctgaggccaggag

SEQ ID NO: 683472 - DNA, 15 bp, Homo sapiens
cctgaggccaggagt

SEQ ID NO: 683473 - DNA, 15 bp, Homo sapiens
ctgaggccaggagtt

SEQ ID NO: 683474 - DNA, 15 bp, Homo sapiens
tgaggccaggagttg

SEQ ID NO: 683475 - DNA, 15 bp, Homo sapiens
gaggccaggagttgg

SEQ ID NO: 683476 - DNA, 15 bp, Homo sapiens
aggccaggagttgga

SEQ ID NO: 683477 - DNA, 15 bp, Homo sapiens
ggccaggagttggag

SEQ ID NO: 683478 - DNA, 15 bp, Homo sapiens
gccaggagttggaga

SEQ ID NO: 683479 - DNA, 15 bp, Homo sapiens
ccaggagttggagat

SEQ ID NO: 683480 - DNA, 15 bp, Homo sapiens
caggagttggagatc

SEQ ID NO: 683481 - DNA, 15 bp, Homo sapiens
aggagttggagatca

SEQ ID NO: 683482 - DNA, 15 bp, Homo sapiens
ggagttggagatcag

SEQ ID NO: 683483 - DNA, 15 bp, Homo sapiens
gagttggagatcagc

SEQ ID NO: 683484 - DNA, 15 bp, Homo sapiens
agttggagatcagcc

SEQ ID NO: 683485 - DNA, 15 bp, Homo sapiens
gttggagatcagcct

SEQ ID NO: 683486 - DNA, 15 bp, Homo sapiens
ttggagatcagcctg

SEQ ID NO: 683487 - DNA, 15 bp, Homo sapiens
tggagatcagcctgg

SEQ ID NO: 683488 - DNA, 15 bp, Homo sapiens
ggagatcagcctggc

SEQ ID NO: 683489 - DNA, 15 bp, Homo sapiens
gagatcagcctggcc

SEQ ID NO: 683490 - DNA, 15 bp, Homo sapiens
agatcagcctggcca

SEQ ID NO: 683491 - DNA, 15 bp, Homo sapiens
gatcagcctggccac

SEQ ID NO: 683492 - DNA, 15 bp, Homo sapiens
atcagcctggccacc

SEQ ID NO: 683493 - DNA, 15 bp, Homo sapiens
tcagcctggccacca

SEQ ID NO: 683494 - DNA, 15 bp, Homo sapiens
cagcctggccaccat

SEQ ID NO: 683495 - DNA, 15 bp, Homo sapiens
agcctggccaccatg

SEQ ID NO: 683496 - DNA, 15 bp, Homo sapiens
gcctggccaccatgg

SEQ ID NO: 683497 - DNA, 15 bp, Homo sapiens
cctggccaccatggc

SEQ ID NO: 683498 - DNA, 15 bp, Homo sapiens
ctggccaccatggca

SEQ ID NO: 683499 - DNA, 15 bp, Homo sapiens
tggccaccatggcaa

SEQ ID NO: 683500 - DNA, 15 bp, Homo sapiens
ggccaccatggcaaa

SEQ ID NO: 683501 - DNA, 15 bp, Homo sapiens
gccaccatggcaaaa

SEQ ID NO: 683502 - DNA, 15 bp, Homo sapiens
ccaccatggcaaaac

SEQ ID NO: 683503 - DNA, 15 bp, Homo sapiens
caccatggcaaaacc

SEQ ID NO: 683504 - DNA, 15 bp, Homo sapiens
accatggcaaaacca

SEQ ID NO: 683505 - DNA, 15 bp, Homo sapiens
ccatggcaaaaccat

SEQ ID NO: 683506 - DNA, 15 bp, Homo sapiens
catggcaaaaccata

SEQ ID NO: 683507 - DNA, 15 bp, Homo sapiens
atggcaaaaccatat

SEQ ID NO: 683508 - DNA, 15 bp, Homo sapiens
tggcaaaaccatatc

SEQ ID NO: 683509 - DNA, 15 bp, Homo sapiens
ggcaaaaccatatct

SEQ ID NO: 683510 - DNA, 15 bp, Homo sapiens
gcaaaaccatatctc

SEQ ID NO: 683511 - DNA, 15 bp, Homo sapiens
caaaaccatatctct

SEQ ID NO: 683512 - DNA, 15 bp, Homo sapiens
aaaaccatatctcta

SEQ ID NO: 683513 - DNA, 15 bp, Homo sapiens
aaaccatatctctac

SEQ ID NO: 683514 - DNA, 15 bp, Homo sapiens
aaccatatctctaca

SEQ ID NO: 683515 - DNA, 15 bp, Homo sapiens
accatatctctacaa

SEQ ID NO: 683516 - DNA, 15 bp, Homo sapiens
ccatatctctacaaa

SEQ ID NO: 683517 - DNA, 15 bp, Homo sapiens
catatctctacaaaa

SEQ ID NO: 683518 - DNA, 15 bp, Homo sapiens
atatctctacaaaaa

SEQ ID NO: 683519 - DNA, 15 bp, Homo sapiens
tatctctacaaaaaa

SEQ ID NO: 683520 - DNA, 15 bp, Homo sapiens
atctctacaaaaaat

SEQ ID NO: 683521 - DNA, 15 bp, Homo sapiens
tctctacaaaaaata

SEQ ID NO: 683522 - DNA, 15 bp, Homo sapiens
ctctacaaaaaatac

SEQ ID NO: 683523 - DNA, 15 bp, Homo sapiens
tctacaaaaaataca

SEQ ID NO: 683524 - DNA, 15 bp, Homo sapiens
ctacaaaaaatacaa

SEQ ID NO: 683525 - DNA, 15 bp, Homo sapiens
tacaaaaaatacaaa

SEQ ID NO: 683526 - DNA, 15 bp, Homo sapiens
acaaaaaatacaaaa

SEQ ID NO: 683527 - DNA, 15 bp, Homo sapiens
caaaaaatacaaaaa

SEQ ID NO: 683528 - DNA, 15 bp, Homo sapiens
aaaaaatacaaaaaa

SEQ ID NO: 683529 - DNA, 15 bp, Homo sapiens
aaaaatacaaaaaaa

SEQ ID NO: 683530 - DNA, 15 bp, Homo sapiens
aaaatacaaaaaaaa

SEQ ID NO: 683531 - DNA, 15 bp, Homo sapiens
aaatacaaaaaaaaa

SEQ ID NO: 683532 - DNA, 15 bp, Homo sapiens
aatacaaaaaaaaat

SEQ ID NO: 683533 - DNA, 15 bp, Homo sapiens
atacaaaaaaaaatg

SEQ ID NO: 683534 - DNA, 15 bp, Homo sapiens
tacaaaaaaaaatga

SEQ ID NO: 683535 - DNA, 15 bp, Homo sapiens
acaaaaaaaaatgag

SEQ ID NO: 683536 - DNA, 15 bp, Homo sapiens
caaaaaaaaatgagc

SEQ ID NO: 683537 - DNA, 15 bp, Homo sapiens
aaaaaaaaatgagcc

SEQ ID NO: 683538 - DNA, 15 bp, Homo sapiens
aaaaaaaatgagcca

SEQ ID NO: 683539 - DNA, 15 bp, Homo sapiens
aaaaaaatgagccag

SEQ ID NO: 683540 - DNA, 15 bp, Homo sapiens
aaaaaatgagccagg

SEQ ID NO: 683541 - DNA, 15 bp, Homo sapiens
aaaaatgagccaggc

SEQ ID NO: 683542 - DNA, 15 bp, Homo sapiens
aaaatgagccaggca

SEQ ID NO: 683543 - DNA, 15 bp, Homo sapiens
aaatgagccaggcat

SEQ ID NO: 683544 - DNA, 15 bp, Homo sapiens
aatgagccaggcata

SEQ ID NO: 683545 - DNA, 15 bp, Homo sapiens
atgagccaggcatag

SEQ ID NO: 683546 - DNA, 15 bp, Homo sapiens
tgagccaggcatagt

SEQ ID NO: 683547 - DNA, 15 bp, Homo sapiens
gagccaggcatagtg

SEQ ID NO: 683548 - DNA, 15 bp, Homo sapiens
agccaggcatagtgg

SEQ ID NO: 683549 - DNA, 15 bp, Homo sapiens
gccaggcatagtggc

SEQ ID NO: 683550 - DNA, 15 bp, Homo sapiens
ccaggcatagtggca

SEQ ID NO: 683551 - DNA, 15 bp, Homo sapiens
caggcatagtggcac

SEQ ID NO: 683552 - DNA, 15 bp, Homo sapiens
aggcatagtggcacc

SEQ ID NO: 683553 - DNA, 15 bp, Homo sapiens
ggcatagtggcaccc

SEQ ID NO: 683554 - DNA, 15 bp, Homo sapiens
gcatagtggcaccca

SEQ ID NO: 683555 - DNA, 15 bp, Homo sapiens
catagtggcacccac

SEQ ID NO: 683556 - DNA, 15 bp, Homo sapiens
atagtggcacccacc

SEQ ID NO: 683557 - DNA, 15 bp, Homo sapiens
tagtggcacccacct

SEQ ID NO: 683558 - DNA, 15 bp, Homo sapiens
agtggcacccacctg

SEQ ID NO: 683559 - DNA, 15 bp, Homo sapiens
gtggcacccacctgt

SEQ ID NO: 683560 - DNA, 15 bp, Homo sapiens
tggcacccacctgta

SEQ ID NO: 683561 - DNA, 15 bp, Homo sapiens
ggcacccacctgtaa

SEQ ID NO: 683562 - DNA, 15 bp, Homo sapiens
gcacccacctgtaat

SEQ ID NO: 683563 - DNA, 15 bp, Homo sapiens
cacccacctgtaatc

SEQ ID NO: 683564 - DNA, 15 bp, Homo sapiens
acccacctgtaatcc

SEQ ID NO: 683565 - DNA, 15 bp, Homo sapiens
cccacctgtaatccc

SEQ ID NO: 683566 - DNA, 15 bp, Homo sapiens
ccacctgtaatccca

SEQ ID NO: 683567 - DNA, 15 bp, Homo sapiens
cacctgtaatcccag

SEQ ID NO: 683568 - DNA, 15 bp, Homo sapiens
acctgtaatcccagc

SEQ ID NO: 683569 - DNA, 15 bp, Homo sapiens
cctgtaatcccagct

SEQ ID NO: 683570 - DNA, 15 bp, Homo sapiens
ctgtaatcccagcta

SEQ ID NO: 683571 - DNA, 15 bp, Homo sapiens
tgtaatcccagctac

SEQ ID NO: 683572 - DNA, 15 bp, Homo sapiens
gtaatcccagctact

SEQ ID NO: 683573 - DNA, 15 bp, Homo sapiens
taatcccagctactt

SEQ ID NO: 683574 - DNA, 15 bp, Homo sapiens
aatcccagctacttg

SEQ ID NO: 683575 - DNA, 15 bp, Homo sapiens
atcccagctacttgg

SEQ ID NO: 683576 - DNA, 15 bp, Homo sapiens
tcccagctacttggg

SEQ ID NO: 683577 - DNA, 15 bp, Homo sapiens
cccagctacttggga

SEQ ID NO: 683578 - DNA, 15 bp, Homo sapiens
ccagctacttgggag

SEQ ID NO: 683579 - DNA, 15 bp, Homo sapiens
cagctacttgggagg

SEQ ID NO: 683580 - DNA, 15 bp, Homo sapiens
agctacttgggaggc

SEQ ID NO: 683581 - DNA, 15 bp, Homo sapiens
gctacttgggaggct

SEQ ID NO: 683582 - DNA, 15 bp, Homo sapiens
ctacttgggaggctg

SEQ ID NO: 683583 - DNA, 15 bp, Homo sapiens
tacttgggaggctga

SEQ ID NO: 683584 - DNA, 15 bp, Homo sapiens
acttgggaggctgag

SEQ ID NO: 683585 - DNA, 15 bp, Homo sapiens
cttgggaggctgaga

SEQ ID NO: 683586 - DNA, 15 bp, Homo sapiens
ttgggaggctgagac

SEQ ID NO: 683587 - DNA, 15 bp, Homo sapiens
tgggaggctgagaca

SEQ ID NO: 683588 - DNA, 15 bp, Homo sapiens
gggaggctgagacat

SEQ ID NO: 683589 - DNA, 15 bp, Homo sapiens
ggaggctgagacatg

SEQ ID NO: 683590 - DNA, 15 bp, Homo sapiens
gaggctgagacatga

SEQ ID NO: 683591 - DNA, 15 bp, Homo sapiens
aggctgagacatgag

SEQ ID NO: 683592 - DNA, 15 bp, Homo sapiens
ggctgagacatgaga

SEQ ID NO: 683593 - DNA, 15 bp, Homo sapiens
gctgagacatgagac

SEQ ID NO: 683594 - DNA, 15 bp, Homo sapiens
ctgagacatgagact

SEQ ID NO: 683595 - DNA, 15 bp, Homo sapiens
tgagacatgagactc

SEQ ID NO: 683596 - DNA, 15 bp, Homo sapiens
gagacatgagactcg

SEQ ID NO: 683597 - DNA, 15 bp, Homo sapiens
agacatgagactcgc

SEQ ID NO: 683598 - DNA, 15 bp, Homo sapiens
gacatgagactcgct

SEQ ID NO: 683599 - DNA, 15 bp, Homo sapiens
acatgagactcgctt

SEQ ID NO: 683600 - DNA, 15 bp, Homo sapiens
catgagactcgcttg

SEQ ID NO: 683601 - DNA, 15 bp, Homo sapiens
atgagactcgcttga

SEQ ID NO: 683602 - DNA, 15 bp, Homo sapiens
tgagactcgcttgaa

SEQ ID NO: 683603 - DNA, 15 bp, Homo sapiens
gagactcgcttgaac

SEQ ID NO: 683604 - DNA, 15 bp, Homo sapiens
agactcgcttgaacc

SEQ ID NO: 683605 - DNA, 15 bp, Homo sapiens
gactcgcttgaaccc

SEQ ID NO: 683606 - DNA, 15 bp, Homo sapiens
actcgcttgaaccca

SEQ ID NO: 683607 - DNA, 15 bp, Homo sapiens
ctcgcttgaacccag

SEQ ID NO: 683608 - DNA, 15 bp, Homo sapiens
tcgcttgaacccagg

SEQ ID NO: 683609 - DNA, 15 bp, Homo sapiens
cgcttgaacccagga

SEQ ID NO: 683610 - DNA, 15 bp, Homo sapiens
gcttgaacccaggag

SEQ ID NO: 683611 - DNA, 15 bp, Homo sapiens
cttgaacccaggagg

SEQ ID NO: 683612 - DNA, 15 bp, Homo sapiens
ttgaacccaggagga

SEQ ID NO: 683613 - DNA, 15 bp, Homo sapiens
tgaacccaggaggag

SEQ ID NO: 683614 - DNA, 15 bp, Homo sapiens
gaacccaggaggagc

SEQ ID NO: 683615 - DNA, 15 bp, Homo sapiens
aacccaggaggagcg

SEQ ID NO: 683616 - DNA, 15 bp, Homo sapiens
acccaggaggagcgg

SEQ ID NO: 683617 - DNA, 15 bp, Homo sapiens
cccaggaggagcggg

SEQ ID NO: 683618 - DNA, 15 bp, Homo sapiens
ccaggaggagcgggt

SEQ ID NO: 683619 - DNA, 15 bp, Homo sapiens
caggaggagcgggtt

SEQ ID NO: 683620 - DNA, 15 bp, Homo sapiens
aggaggagcgggttg

SEQ ID NO: 683621 - DNA, 15 bp, Homo sapiens
ggaggagcgggttgc

SEQ ID NO: 683622 - DNA, 15 bp, Homo sapiens
gaggagcgggttgca

SEQ ID NO: 683623 - DNA, 15 bp, Homo sapiens
aggagcgggttgcag

SEQ ID NO: 683624 - DNA, 15 bp, Homo sapiens
ggagcgggttgcagt

SEQ ID NO: 683625 - DNA, 15 bp, Homo sapiens
gagcgggttgcagtg

SEQ ID NO: 683626 - DNA, 15 bp, Homo sapiens
agcgggttgcagtga

SEQ ID NO: 683627 - DNA, 15 bp, Homo sapiens
gcgggttgcagtgag

SEQ ID NO: 683628 - DNA, 15 bp, Homo sapiens
cgggttgcagtgagc

SEQ ID NO: 683629 - DNA, 15 bp, Homo sapiens
gggttgcagtgagcc

SEQ ID NO: 683630 - DNA, 15 bp, Homo sapiens
ggttgcagtgagccg

SEQ ID NO: 683631 - DNA, 15 bp, Homo sapiens
gttgcagtgagccga

SEQ ID NO: 683632 - DNA, 15 bp, Homo sapiens
ttgcagtgagccgag

SEQ ID NO: 683633 - DNA, 15 bp, Homo sapiens
tgcagtgagccgaga

SEQ ID NO: 683634 - DNA, 15 bp, Homo sapiens
gcagtgagccgagat

SEQ ID NO: 683635 - DNA, 15 bp, Homo sapiens
cagtgagccgagatc

SEQ ID NO: 683636 - DNA, 15 bp, Homo sapiens
agtgagccgagatca

SEQ ID NO: 683637 - DNA, 15 bp, Homo sapiens
gtgagccgagatcac

SEQ ID NO: 683638 - DNA, 15 bp, Homo sapiens
tgagccgagatcaca

SEQ ID NO: 683639 - DNA, 15 bp, Homo sapiens
gagccgagatcacac

SEQ ID NO: 683640 - DNA, 15 bp, Homo sapiens
agccgagatcacacc

SEQ ID NO: 683641 - DNA, 15 bp, Homo sapiens
gccgagatcacacca

SEQ ID NO: 683642 - DNA, 15 bp, Homo sapiens
ccgagatcacaccac

SEQ ID NO: 683643 - DNA, 15 bp, Homo sapiens
cgagatcacaccact

SEQ ID NO: 683644 - DNA, 15 bp, Homo sapiens
gagatcacaccactg

SEQ ID NO: 683645 - DNA, 15 bp, Homo sapiens
agatcacaccactgc

SEQ ID NO: 683646 - DNA, 15 bp, Homo sapiens
gatcacaccactgca

SEQ ID NO: 683647 - DNA, 15 bp, Homo sapiens
atcacaccactgcaa

SEQ ID NO: 683648 - DNA, 15 bp, Homo sapiens
tcacaccactgcaat

SEQ ID NO: 683649 - DNA, 15 bp, Homo sapiens
cacaccactgcaatc

SEQ ID NO: 683650 - DNA, 15 bp, Homo sapiens
acaccactgcaatcc

SEQ ID NO: 683651 - DNA, 15 bp, Homo sapiens
caccactgcaatcca

SEQ ID NO: 683652 - DNA, 15 bp, Homo sapiens
accactgcaatccag

SEQ ID NO: 683653 - DNA, 15 bp, Homo sapiens
ccactgcaatccagc

SEQ ID NO: 683654 - DNA, 15 bp, Homo sapiens
cactgcaatccagcc

SEQ ID NO: 683655 - DNA, 15 bp, Homo sapiens
actgcaatccagcct

SEQ ID NO: 683656 - DNA, 15 bp, Homo sapiens
ctgcaatccagccta

SEQ ID NO: 683657 - DNA, 15 bp, Homo sapiens
tgcaatccagcctag

SEQ ID NO: 683658 - DNA, 15 bp, Homo sapiens
gcaatccagcctagg

SEQ ID NO: 683659 - DNA, 15 bp, Homo sapiens
caatccagcctaggc

SEQ ID NO: 683660 - DNA, 15 bp, Homo sapiens
aatccagcctaggca

SEQ ID NO: 683661 - DNA, 15 bp, Homo sapiens
atccagcctaggcaa

SEQ ID NO: 683662 - DNA, 15 bp, Homo sapiens
tccagcctaggcaac

SEQ ID NO: 683663 - DNA, 15 bp, Homo sapiens
ccagcctaggcaaca

SEQ ID NO: 683664 - DNA, 15 bp, Homo sapiens
cagcctaggcaacag

SEQ ID NO: 683665 - DNA, 15 bp, Homo sapiens
agcctaggcaacaga

SEQ ID NO: 683666 - DNA, 15 bp, Homo sapiens
gcctaggcaacagag

SEQ ID NO: 683667 - DNA, 15 bp, Homo sapiens
cctaggcaacagaga

SEQ ID NO: 683668 - DNA, 15 bp, Homo sapiens
ctaggcaacagagag

SEQ ID NO: 683669 - DNA, 15 bp, Homo sapiens
taggcaacagagaga

SEQ ID NO: 683670 - DNA, 15 bp, Homo sapiens
aggcaacagagagag

SEQ ID NO: 683671 - DNA, 15 bp, Homo sapiens
ggcaacagagagaga

SEQ ID NO: 683672 - DNA, 15 bp, Homo sapiens
gcaacagagagagac

SEQ ID NO: 683673 - DNA, 15 bp, Homo sapiens
caacagagagagact

SEQ ID NO: 683674 - DNA, 15 bp, Homo sapiens
aacagagagagactg

SEQ ID NO: 683675 - DNA, 15 bp, Homo sapiens
acagagagagactgc

SEQ ID NO: 683676 - DNA, 15 bp, Homo sapiens
cagagagagactgcc

SEQ ID NO: 683677 - DNA, 15 bp, Homo sapiens
agagagagactgcct

SEQ ID NO: 683678 - DNA, 15 bp, Homo sapiens
gagagagactgcctc

SEQ ID NO: 683679 - DNA, 15 bp, Homo sapiens
agagagactgcctca

SEQ ID NO: 683680 - DNA, 15 bp, Homo sapiens
gagagactgcctcaa

SEQ ID NO: 683681 - DNA, 15 bp, Homo sapiens
agagactgcctcaaa

SEQ ID NO: 683682 - DNA, 15 bp, Homo sapiens
gagactgcctcaaaa

SEQ ID NO: 683683 - DNA, 15 bp, Homo sapiens
agactgcctcaaaaa

SEQ ID NO: 683684 - DNA, 15 bp, Homo sapiens
gactgcctcaaaaaa

SEQ ID NO: 683685 - DNA, 15 bp, Homo sapiens
actgcctcaaaaaaa

SEQ ID NO: 683686 - DNA, 15 bp, Homo sapiens
ctgcctcaaaaaaac

SEQ ID NO: 683687 - DNA, 15 bp, Homo sapiens
tgcctcaaaaaaaca

SEQ ID NO: 683688 - DNA, 15 bp, Homo sapiens
gcctcaaaaaaacaa

SEQ ID NO: 683689 - DNA, 15 bp, Homo sapiens
cctcaaaaaaacaaa

SEQ ID NO: 683690 - DNA, 15 bp, Homo sapiens
ctcaaaaaaacaaaa

SEQ ID NO: 683691 - DNA, 15 bp, Homo sapiens
tcaaaaaaacaaaac

SEQ ID NO: 683692 - DNA, 15 bp, Homo sapiens
caaaaaaacaaaaca

SEQ ID NO: 683693 - DNA, 15 bp, Homo sapiens
aaaaaaacaaaacaa

SEQ ID NO: 683694 - DNA, 15 bp, Homo sapiens
aaaaaacaaaacaac

SEQ ID NO: 683695 - DNA, 15 bp, Homo sapiens
aaaaacaaaacaaca

SEQ ID NO: 683696 - DNA, 15 bp, Homo sapiens
aaaacaaaacaacaa

SEQ ID NO: 683697 - DNA, 15 bp, Homo sapiens
aaacaaaacaacaac

SEQ ID NO: 683698 - DNA, 15 bp, Homo sapiens
aacaaaacaacaaca

SEQ ID NO: 683699 - DNA, 15 bp, Homo sapiens
acaaaacaacaacaa

SEQ ID NO: 683700 - DNA, 15 bp, Homo sapiens
caaaacaacaacaac

SEQ ID NO: 683701 - DNA, 15 bp, Homo sapiens
aaaacaacaacaaca

SEQ ID NO: 683702 - DNA, 15 bp, Homo sapiens
aaacaacaacaacaa

SEQ ID NO: 683703 - DNA, 15 bp, Homo sapiens
aacaacaacaacaaa

SEQ ID NO: 683704 - DNA, 15 bp, Homo sapiens
acaacaacaacaaaa

SEQ ID NO: 683705 - DNA, 15 bp, Homo sapiens
caacaacaacaaaaa

SEQ ID NO: 683706 - DNA, 15 bp, Homo sapiens
aacaacaacaaaaaa

SEQ ID NO: 683707 - DNA, 15 bp, Homo sapiens
acaacaacaaaaaaa

SEQ ID NO: 683708 - DNA, 15 bp, Homo sapiens
caacaacaaaaaaaa

SEQ ID NO: 683709 - DNA, 15 bp, Homo sapiens
aacaacaaaaaaaac

SEQ ID NO: 683710 - DNA, 15 bp, Homo sapiens
acaacaaaaaaaaca

SEQ ID NO: 683711 - DNA, 15 bp, Homo sapiens
caacaaaaaaaacaa

SEQ ID NO: 683712 - DNA, 15 bp, Homo sapiens
aacaaaaaaaacaaa

SEQ ID NO: 683713 - DNA, 15 bp, Homo sapiens
acaaaaaaaacaaaa

SEQ ID NO: 683714 - DNA, 15 bp, Homo sapiens
caaaaaaaacaaaac

SEQ ID NO: 683715 - DNA, 15 bp, Homo sapiens
aaaaaaaacaaaaca

SEQ ID NO: 683716 - DNA, 15 bp, Homo sapiens
aaaaaaacaaaacag

SEQ ID NO: 683717 - DNA, 15 bp, Homo sapiens
aaaaaacaaaacagg

SEQ ID NO: 683718 - DNA, 15 bp, Homo sapiens
aaaaacaaaacagga

SEQ ID NO: 683719 - DNA, 15 bp, Homo sapiens
aaaacaaaacaggag

SEQ ID NO: 683720 - DNA, 15 bp, Homo sapiens
aaacaaaacaggaga

SEQ ID NO: 683721 - DNA, 15 bp, Homo sapiens
aacaaaacaggagac

SEQ ID NO: 683722 - DNA, 15 bp, Homo sapiens
acaaaacaggagact

SEQ ID NO: 683723 - DNA, 15 bp, Homo sapiens
caaaacaggagacta

SEQ ID NO: 683724 - DNA, 15 bp, Homo sapiens
aaaacaggagactat

SEQ ID NO: 683725 - DNA, 15 bp, Homo sapiens
aaacaggagactatt

SEQ ID NO: 683726 - DNA, 15 bp, Homo sapiens
aacaggagactattc

SEQ ID NO: 683727 - DNA, 15 bp, Homo sapiens
acaggagactattca

SEQ ID NO: 683728 - DNA, 15 bp, Homo sapiens
caggagactattcag

SEQ ID NO: 683729 - DNA, 15 bp, Homo sapiens
aggagactattcagt

SEQ ID NO: 683730 - DNA, 15 bp, Homo sapiens
ggagactattcagtg

SEQ ID NO: 683731 - DNA, 15 bp, Homo sapiens
gagactattcagtgt

SEQ ID NO: 683732 - DNA, 15 bp, Homo sapiens
agactattcagtgta

SEQ ID NO: 683733 - DNA, 15 bp, Homo sapiens
gactattcagtgtaa

SEQ ID NO: 683734 - DNA, 15 bp, Homo sapiens
actattcagtgtaat

SEQ ID NO: 683735 - DNA, 15 bp, Homo sapiens
ctattcagtgtaatt

SEQ ID NO: 683736 - DNA, 15 bp, Homo sapiens
tattcagtgtaattt

SEQ ID NO: 683737 - DNA, 15 bp, Homo sapiens
attcagtgtaattta

SEQ ID NO: 683738 - DNA, 15 bp, Homo sapiens
ttcagtgtaatttat

SEQ ID NO: 683739 - DNA, 15 bp, Homo sapiens
tcagtgtaatttatt

SEQ ID NO: 683740 - DNA, 15 bp, Homo sapiens
cagtgtaatttattc

SEQ ID NO: 683741 - DNA, 15 bp, Homo sapiens
agtgtaatttattca

SEQ ID NO: 683742 - DNA, 15 bp, Homo sapiens
gtgtaatttattcat

SEQ ID NO: 683743 - DNA, 15 bp, Homo sapiens
tgtaatttattcatt

SEQ ID NO: 683744 - DNA, 15 bp, Homo sapiens
gtaatttattcattc

SEQ ID NO: 683745 - DNA, 15 bp, Homo sapiens
taatttattcattcc

SEQ ID NO: 683746 - DNA, 15 bp, Homo sapiens
aatttattcattcct

SEQ ID NO: 683747 - DNA, 15 bp, Homo sapiens
atttattcattcctt

SEQ ID NO: 683748 - DNA, 15 bp, Homo sapiens
tttattcattccttt

SEQ ID NO: 683749 - DNA, 15 bp, Homo sapiens
ttattcattcctttc

SEQ ID NO: 683750 - DNA, 15 bp, Homo sapiens
tattcattcctttct

SEQ ID NO: 683751 - DNA, 15 bp, Homo sapiens
attcattcctttcta

SEQ ID NO: 683752 - DNA, 15 bp, Homo sapiens
ttcattcctttctaa

SEQ ID NO: 683753 - DNA, 15 bp, Homo sapiens
tcattcctttctaag

SEQ ID NO: 683754 - DNA, 15 bp, Homo sapiens
cattcctttctaaga

SEQ ID NO: 683755 - DNA, 15 bp, Homo sapiens
attcctttctaagag

SEQ ID NO: 683756 - DNA, 15 bp, Homo sapiens
ttcctttctaagaga

SEQ ID NO: 683757 - DNA, 15 bp, Homo sapiens
tcctttctaagagac

SEQ ID NO: 683758 - DNA, 15 bp, Homo sapiens
cctttctaagagacg

SEQ ID NO: 683759 - DNA, 15 bp, Homo sapiens
ctttctaagagacgg

SEQ ID NO: 683760 - DNA, 15 bp, Homo sapiens
tttctaagagacggg

SEQ ID NO: 683761 - DNA, 15 bp, Homo sapiens
ttctaagagacggga

SEQ ID NO: 683762 - DNA, 15 bp, Homo sapiens
tctaagagacgggat

SEQ ID NO: 683763 - DNA, 15 bp, Homo sapiens
ctaagagacgggatc

SEQ ID NO: 683764 - DNA, 15 bp, Homo sapiens
taagagacgggatcg

SEQ ID NO: 683765 - DNA, 15 bp, Homo sapiens
aagagacgggatcgt

SEQ ID NO: 683766 - DNA, 15 bp, Homo sapiens
agagacgggatcgtg

SEQ ID NO: 683767 - DNA, 15 bp, Homo sapiens
gagacgggatcgtgc

SEQ ID NO: 683768 - DNA, 15 bp, Homo sapiens
agacgggatcgtgct

SEQ ID NO: 683769 - DNA, 15 bp, Homo sapiens
gacgggatcgtgctc

SEQ ID NO: 683770 - DNA, 15 bp, Homo sapiens
acgggatcgtgctct

SEQ ID NO: 683771 - DNA, 15 bp, Homo sapiens
cgggatcgtgctctg

SEQ ID NO: 683772 - DNA, 15 bp, Homo sapiens
gggatcgtgctctgt

SEQ ID NO: 683773 - DNA, 15 bp, Homo sapiens
ggatcgtgctctgtt

SEQ ID NO: 683774 - DNA, 15 bp, Homo sapiens
gatcgtgctctgttg

SEQ ID NO: 683775 - DNA, 15 bp, Homo sapiens
atcgtgctctgttgc

SEQ ID NO: 683776 - DNA, 15 bp, Homo sapiens
tcgtgctctgttgcc

SEQ ID NO: 683777 - DNA, 15 bp, Homo sapiens
cgtgctctgttgccc

SEQ ID NO: 683778 - DNA, 15 bp, Homo sapiens
gtgctctgttgccca

SEQ ID NO: 683779 - DNA, 15 bp, Homo sapiens
tgctctgttgcccag

SEQ ID NO: 683780 - DNA, 15 bp, Homo sapiens
gctctgttgcccagg

SEQ ID NO: 683781 - DNA, 15 bp, Homo sapiens
ctctgttgcccaggc

SEQ ID NO: 683782 - DNA, 15 bp, Homo sapiens
tctgttgcccaggct

SEQ ID NO: 683783 - DNA, 15 bp, Homo sapiens
ctgttgcccaggctg

SEQ ID NO: 683784 - DNA, 15 bp, Homo sapiens
tgttgcccaggctgg

SEQ ID NO: 683785 - DNA, 15 bp, Homo sapiens
gttgcccaggctgga

SEQ ID NO: 683786 - DNA, 15 bp, Homo sapiens
ttgcccaggctggag

SEQ ID NO: 683787 - DNA, 15 bp, Homo sapiens
caggctggagtgcag

SEQ ID NO: 683788 - DNA, 15 bp, Homo sapiens
aggctggagtgcagt

SEQ ID NO: 683789 - DNA, 15 bp, Homo sapiens
ggctggagtgcagtg

SEQ ID NO: 683790 - DNA, 15 bp, Homo sapiens
gctggagtgcagtgg

SEQ ID NO: 683791 - DNA, 15 bp, Homo sapiens
ctggagtgcagtggc

SEQ ID NO: 683792 - DNA, 15 bp, Homo sapiens
tggagtgcagtggcg

SEQ ID NO: 683793 - DNA, 15 bp, Homo sapiens
ggagtgcagtggcgc

SEQ ID NO: 683794 - DNA, 15 bp, Homo sapiens
gagtgcagtggcgcg

SEQ ID NO: 683795 - DNA, 15 bp, Homo sapiens
agtgcagtggcgcga

SEQ ID NO: 683796 - DNA, 15 bp, Homo sapiens
gtgcagtggcgcgat

SEQ ID NO: 683797 - DNA, 15 bp, Homo sapiens
tgcagtggcgcgatc

SEQ ID NO: 683798 - DNA, 15 bp, Homo sapiens
gcagtggcgcgatct

SEQ ID NO: 683799 - DNA, 15 bp, Homo sapiens
cagtggcgcgatctc

SEQ ID NO: 683800 - DNA, 15 bp, Homo sapiens
agtggcgcgatctcg

SEQ ID NO: 683801 - DNA, 15 bp, Homo sapiens
gtggcgcgatctcga

SEQ ID NO: 683802 - DNA, 15 bp, Homo sapiens
tggcgcgatctcgac

SEQ ID NO: 683803 - DNA, 15 bp, Homo sapiens
ggcgcgatctcgact

SEQ ID NO: 683804 - DNA, 15 bp, Homo sapiens
gcgcgatctcgactc

SEQ ID NO: 683805 - DNA, 15 bp, Homo sapiens
cgcgatctcgactca

SEQ ID NO: 683806 - DNA, 15 bp, Homo sapiens
gcgatctcgactcac

SEQ ID NO: 683807 - DNA, 15 bp, Homo sapiens
cgatctcgactcact

SEQ ID NO: 683808 - DNA, 15 bp, Homo sapiens
gatctcgactcactg

SEQ ID NO: 683809 - DNA, 15 bp, Homo sapiens
atctcgactcactgc

SEQ ID NO: 683810 - DNA, 15 bp, Homo sapiens
tctcgactcactgca

SEQ ID NO: 683811 - DNA, 15 bp, Homo sapiens
ctcgactcactgcaa

SEQ ID NO: 683812 - DNA, 15 bp, Homo sapiens
tcgactcactgcaag

SEQ ID NO: 683813 - DNA, 15 bp, Homo sapiens
cgactcactgcaagc

SEQ ID NO: 683814 - DNA, 15 bp, Homo sapiens
gactcactgcaagct

SEQ ID NO: 683815 - DNA, 15 bp, Homo sapiens
actcactgcaagctc

SEQ ID NO: 683816 - DNA, 15 bp, Homo sapiens
ctcactgcaagctcc

SEQ ID NO: 683817 - DNA, 15 bp, Homo sapiens
tcactgcaagctcca

SEQ ID NO: 683818 - DNA, 15 bp, Homo sapiens
cactgcaagctccac

SEQ ID NO: 683819 - DNA, 15 bp, Homo sapiens
actgcaagctccacc

SEQ ID NO: 683820 - DNA, 15 bp, Homo sapiens
ctgcaagctccacct

SEQ ID NO: 683821 - DNA, 15 bp, Homo sapiens
tgcaagctccacctc

SEQ ID NO: 683822 - DNA, 15 bp, Homo sapiens
gcaagctccacctcc

SEQ ID NO: 683823 - DNA, 15 bp, Homo sapiens
caagctccacctccc

SEQ ID NO: 683824 - DNA, 15 bp, Homo sapiens
aagctccacctccca

SEQ ID NO: 683825 - DNA, 15 bp, Homo sapiens
agctccacctcccag

SEQ ID NO: 683826 - DNA, 15 bp, Homo sapiens
gctccacctcccagg

SEQ ID NO: 683827 - DNA, 15 bp, Homo sapiens
ctccacctcccaggt

SEQ ID NO: 683828 - DNA, 15 bp, Homo sapiens
tccacctcccaggtt

SEQ ID NO: 683829 - DNA, 15 bp, Homo sapiens
ccacctcccaggttc

SEQ ID NO: 683830 - DNA, 15 bp, Homo sapiens
cacctcccaggttca

SEQ ID NO: 683831 - DNA, 15 bp, Homo sapiens
acctcccaggttcac

SEQ ID NO: 683832 - DNA, 15 bp, Homo sapiens
cctcccaggttcacg

SEQ ID NO: 683833 - DNA, 15 bp, Homo sapiens
ctcccaggttcacgc

SEQ ID NO: 683834 - DNA, 15 bp, Homo sapiens
tcccaggttcacgcc

SEQ ID NO: 683835 - DNA, 15 bp, Homo sapiens
cccaggttcacgcca

SEQ ID NO: 683836 - DNA, 15 bp, Homo sapiens
ccaggttcacgccat

SEQ ID NO: 683837 - DNA, 15 bp, Homo sapiens
caggttcacgccatt

SEQ ID NO: 683838 - DNA, 15 bp, Homo sapiens
aggttcacgccattc

SEQ ID NO: 683839 - DNA, 15 bp, Homo sapiens
ggttcacgccattct

SEQ ID NO: 683840 - DNA, 15 bp, Homo sapiens
gttcacgccattctc

SEQ ID NO: 683841 - DNA, 15 bp, Homo sapiens
ttcacgccattctcc

SEQ ID NO: 683842 - DNA, 15 bp, Homo sapiens
tcacgccattctcct

SEQ ID NO: 683843 - DNA, 15 bp, Homo sapiens
cacgccattctcctg

SEQ ID NO: 683844 - DNA, 15 bp, Homo sapiens
acgccattctcctgc

SEQ ID NO: 683845 - DNA, 15 bp, Homo sapiens
cgccattctcctgcc

SEQ ID NO: 683846 - DNA, 15 bp, Homo sapiens
gccattctcctgcct

SEQ ID NO: 683847 - DNA, 15 bp, Homo sapiens
ccattctcctgcctc

SEQ ID NO: 683848 - DNA, 15 bp, Homo sapiens
cattctcctgcctca

SEQ ID NO: 683849 - DNA, 15 bp, Homo sapiens
attctcctgcctcaa

SEQ ID NO: 683850 - DNA, 15 bp, Homo sapiens
ttctcctgcctcaac

SEQ ID NO: 683851 - DNA, 15 bp, Homo sapiens
tctcctgcctcaacc

SEQ ID NO: 683852 - DNA, 15 bp, Homo sapiens
ctcctgcctcaacct

SEQ ID NO: 683853 - DNA, 15 bp, Homo sapiens
tcctgcctcaacctc

SEQ ID NO: 683854 - DNA, 15 bp, Homo sapiens
cctgcctcaacctcc

SEQ ID NO: 683855 - DNA, 15 bp, Homo sapiens
ctgcctcaacctccc

SEQ ID NO: 683856 - DNA, 15 bp, Homo sapiens
tgcctcaacctccca

SEQ ID NO: 683857 - DNA, 15 bp, Homo sapiens
gcctcaacctcccaa

SEQ ID NO: 683858 - DNA, 15 bp, Homo sapiens
cctcaacctcccaag

SEQ ID NO: 683859 - DNA, 15 bp, Homo sapiens
ctcaacctcccaagt

SEQ ID NO: 683860 - DNA, 15 bp, Homo sapiens
tcaacctcccaagta

SEQ ID NO: 683861 - DNA, 15 bp, Homo sapiens
caacctcccaagtag

SEQ ID NO: 683862 - DNA, 15 bp, Homo sapiens
aacctcccaagtagc

SEQ ID NO: 683863 - DNA, 15 bp, Homo sapiens
acctcccaagtagct

SEQ ID NO: 683864 - DNA, 15 bp, Homo sapiens
ccaagtagctgggac

SEQ ID NO: 683865 - DNA, 15 bp, Homo sapiens
caagtagctgggact

SEQ ID NO: 683866 - DNA, 15 bp, Homo sapiens
aagtagctgggacta

SEQ ID NO: 683867 - DNA, 15 bp, Homo sapiens
agtagctgggactac

SEQ ID NO: 683868 - DNA, 15 bp, Homo sapiens
gtagctgggactaca

SEQ ID NO: 683869 - DNA, 15 bp, Homo sapiens
tagctgggactacag

SEQ ID NO: 683870 - DNA, 15 bp, Homo sapiens
agctgggactacagg

SEQ ID NO: 683871 - DNA, 15 bp, Homo sapiens
gctgggactacaggc

SEQ ID NO: 683872 - DNA, 15 bp, Homo sapiens
ctgggactacaggca

SEQ ID NO: 683873 - DNA, 15 bp, Homo sapiens
tgggactacaggcac

SEQ ID NO: 683874 - DNA, 15 bp, Homo sapiens
gggactacaggcacc

SEQ ID NO: 683875 - DNA, 15 bp, Homo sapiens
ggactacaggcaccc

SEQ ID NO: 683876 - DNA, 15 bp, Homo sapiens
gactacaggcaccca

SEQ ID NO: 683877 - DNA, 15 bp, Homo sapiens
actacaggcacccac

SEQ ID NO: 683878 - DNA, 15 bp, Homo sapiens
ctacaggcacccacc

SEQ ID NO: 683879 - DNA, 15 bp, Homo sapiens
tacaggcacccacca

SEQ ID NO: 683880 - DNA, 15 bp, Homo sapiens
acaggcacccaccac

SEQ ID NO: 683881 - DNA, 15 bp, Homo sapiens
caggcacccaccacg

SEQ ID NO: 683882 - DNA, 15 bp, Homo sapiens
aggcacccaccacga

SEQ ID NO: 683883 - DNA, 15 bp, Homo sapiens
ggcacccaccacgac

SEQ ID NO: 683884 - DNA, 15 bp, Homo sapiens
gcacccaccacgaca

SEQ ID NO: 683885 - DNA, 15 bp, Homo sapiens
cacccaccacgacac

SEQ ID NO: 683886 - DNA, 15 bp, Homo sapiens
acccaccacgacacc

SEQ ID NO: 683887 - DNA, 15 bp, Homo sapiens
cccaccacgacaccc

SEQ ID NO: 683888 - DNA, 15 bp, Homo sapiens
ccaccacgacaccca

SEQ ID NO: 683889 - DNA, 15 bp, Homo sapiens
caccacgacacccag

SEQ ID NO: 683890 - DNA, 15 bp, Homo sapiens
accacgacacccagc

SEQ ID NO: 683891 - DNA, 15 bp, Homo sapiens
ccacgacacccagct

SEQ ID NO: 683892 - DNA, 15 bp, Homo sapiens
cacgacacccagcta

SEQ ID NO: 683893 - DNA, 15 bp, Homo sapiens
acgacacccagctaa

SEQ ID NO: 683894 - DNA, 15 bp, Homo sapiens
cgacacccagctaat

SEQ ID NO: 683895 - DNA, 15 bp, Homo sapiens
gacacccagctaatt

SEQ ID NO: 683896 - DNA, 15 bp, Homo sapiens
ttttttgtattttta

SEQ ID NO: 683897 - DNA, 15 bp, Homo sapiens
tttttagtagagacg

SEQ ID NO: 683898 - DNA, 15 bp, Homo sapiens
ttttagtagagacgg

SEQ ID NO: 683899 - DNA, 15 bp, Homo sapiens
tttagtagagacggg

SEQ ID NO: 683900 - DNA, 15 bp, Homo sapiens
ttagtagagacgggg

SEQ ID NO: 683901 - DNA, 15 bp, Homo sapiens
tagtagagacggggt

SEQ ID NO: 683902 - DNA, 15 bp, Homo sapiens
agtagagacggggtt

SEQ ID NO: 683903 - DNA, 15 bp, Homo sapiens
gtagagacggggttt

SEQ ID NO: 683904 - DNA, 15 bp, Homo sapiens
tagagacggggtttc

SEQ ID NO: 683905 - DNA, 15 bp, Homo sapiens
agagacggggtttca

SEQ ID NO: 683906 - DNA, 15 bp, Homo sapiens
gagacggggtttcac

SEQ ID NO: 683907 - DNA, 15 bp, Homo sapiens
agacggggtttcacc

SEQ ID NO: 683908 - DNA, 15 bp, Homo sapiens
gacggggtttcaccg

SEQ ID NO: 683909 - DNA, 15 bp, Homo sapiens
acggggtttcaccgt

SEQ ID NO: 683910 - DNA, 15 bp, Homo sapiens
cggggtttcaccgtg

SEQ ID NO: 683911 - DNA, 15 bp, Homo sapiens
ggggtttcaccgtga

SEQ ID NO: 683912 - DNA, 15 bp, Homo sapiens
gggtttcaccgtgat

SEQ ID NO: 683913 - DNA, 15 bp, Homo sapiens
ggtttcaccgtgata

SEQ ID NO: 683914 - DNA, 15 bp, Homo sapiens
gtttcaccgtgatag

SEQ ID NO: 683915 - DNA, 15 bp, Homo sapiens
tttcaccgtgatagc

SEQ ID NO: 683916 - DNA, 15 bp, Homo sapiens
ttcaccgtgatagcc

SEQ ID NO: 683917 - DNA, 15 bp, Homo sapiens
tcaccgtgatagcca

SEQ ID NO: 683918 - DNA, 15 bp, Homo sapiens
caccgtgatagccag

SEQ ID NO: 683919 - DNA, 15 bp, Homo sapiens
accgtgatagccagg

SEQ ID NO: 683920 - DNA, 15 bp, Homo sapiens
ccgtgatagccagga

SEQ ID NO: 683921 - DNA, 15 bp, Homo sapiens
cgtgatagccaggac

SEQ ID NO: 683922 - DNA, 15 bp, Homo sapiens
gtgatagccaggacg

SEQ ID NO: 683923 - DNA, 15 bp, Homo sapiens
tgatagccaggacgg

SEQ ID NO: 683924 - DNA, 15 bp, Homo sapiens
gatagccaggacggt

SEQ ID NO: 683925 - DNA, 15 bp, Homo sapiens
atagccaggacggtc

SEQ ID NO: 683926 - DNA, 15 bp, Homo sapiens
tagccaggacggtct

SEQ ID NO: 683927 - DNA, 15 bp, Homo sapiens
agccaggacggtctc

SEQ ID NO: 683928 - DNA, 15 bp, Homo sapiens
gccaggacggtctcg

SEQ ID NO: 683929 - DNA, 15 bp, Homo sapiens
ccaggacggtctcga

SEQ ID NO: 683930 - DNA, 15 bp, Homo sapiens
caggacggtctcgat

SEQ ID NO: 683931 - DNA, 15 bp, Homo sapiens
aggacggtctcgatc

SEQ ID NO: 683932 - DNA, 15 bp, Homo sapiens
ggacggtctcgatct

SEQ ID NO: 683933 - DNA, 15 bp, Homo sapiens
gacggtctcgatctc

SEQ ID NO: 683934 - DNA, 15 bp, Homo sapiens
acggtctcgatctcc

SEQ ID NO: 683935 - DNA, 15 bp, Homo sapiens
cggtctcgatctcct

SEQ ID NO: 683936 - DNA, 15 bp, Homo sapiens
ggtctcgatctcctg

SEQ ID NO: 683937 - DNA, 15 bp, Homo sapiens
gtctcgatctcctga

SEQ ID NO: 683938 - DNA, 15 bp, Homo sapiens
tctcgatctcctgac

SEQ ID NO: 683939 - DNA, 15 bp, Homo sapiens
ctcgatctcctgacc

SEQ ID NO: 683940 - DNA, 15 bp, Homo sapiens
tcgatctcctgacct

SEQ ID NO: 683941 - DNA, 15 bp, Homo sapiens
cgatctcctgacctc

SEQ ID NO: 683942 - DNA, 15 bp, Homo sapiens
gatctcctgacctcg

SEQ ID NO: 683943 - DNA, 15 bp, Homo sapiens
atctcctgacctcgt

SEQ ID NO: 683944 - DNA, 15 bp, Homo sapiens
tctcctgacctcgtg

SEQ ID NO: 683945 - DNA, 15 bp, Homo sapiens
ctcctgacctcgtga

SEQ ID NO: 683946 - DNA, 15 bp, Homo sapiens
tcctgacctcgtgat

SEQ ID NO: 683947 - DNA, 15 bp, Homo sapiens
cctgacctcgtgatc

SEQ ID NO: 683948 - DNA, 15 bp, Homo sapiens
ctgacctcgtgatct

SEQ ID NO: 683949 - DNA, 15 bp, Homo sapiens
tgacctcgtgatctg

SEQ ID NO: 683950 - DNA, 15 bp, Homo sapiens
gacctcgtgatctgc

SEQ ID NO: 683951 - DNA, 15 bp, Homo sapiens
acctcgtgatctgcc

SEQ ID NO: 683952 - DNA, 15 bp, Homo sapiens
cctcgtgatctgccc

SEQ ID NO: 683953 - DNA, 15 bp, Homo sapiens
ctcgtgatctgcccg

SEQ ID NO: 683954 - DNA, 15 bp, Homo sapiens
tcgtgatctgcccgc

SEQ ID NO: 683955 - DNA, 15 bp, Homo sapiens
cgtgatctgcccgcc

SEQ ID NO: 683956 - DNA, 15 bp, Homo sapiens
gtgatctgcccgcct

SEQ ID NO: 683957 - DNA, 15 bp, Homo sapiens
tgatctgcccgcctc

SEQ ID NO: 683958 - DNA, 15 bp, Homo sapiens
gatctgcccgcctcg

SEQ ID NO: 683959 - DNA, 15 bp, Homo sapiens
atctgcccgcctcgg

SEQ ID NO: 683960 - DNA, 15 bp, Homo sapiens
tctgcccgcctcggc

SEQ ID NO: 683961 - DNA, 15 bp, Homo sapiens
ctgcccgcctcggcc

SEQ ID NO: 683962 - DNA, 15 bp, Homo sapiens
tgcccgcctcggcct

SEQ ID NO: 683963 - DNA, 15 bp, Homo sapiens
gcccgcctcggcctc

SEQ ID NO: 683964 - DNA, 15 bp, Homo sapiens
cccgcctcggcctcc

SEQ ID NO: 683965 - DNA, 15 bp, Homo sapiens
ccgcctcggcctccc

SEQ ID NO: 683966 - DNA, 15 bp, Homo sapiens
cgcctcggcctccca

SEQ ID NO: 683967 - DNA, 15 bp, Homo sapiens
cctcccaaagtgcta

SEQ ID NO: 683968 - DNA, 15 bp, Homo sapiens
ctcccaaagtgctag

SEQ ID NO: 683969 - DNA, 15 bp, Homo sapiens
tcccaaagtgctagg

SEQ ID NO: 683970 - DNA, 15 bp, Homo sapiens
cccaaagtgctagga

SEQ ID NO: 683971 - DNA, 15 bp, Homo sapiens
ccaaagtgctaggat

SEQ ID NO: 683972 - DNA, 15 bp, Homo sapiens
caaagtgctaggatt

SEQ ID NO: 683973 - DNA, 15 bp, Homo sapiens
aaagtgctaggatta

SEQ ID NO: 683974 - DNA, 15 bp, Homo sapiens
aagtgctaggattac

SEQ ID NO: 683975 - DNA, 15 bp, Homo sapiens
agtgctaggattaca

SEQ ID NO: 683976 - DNA, 15 bp, Homo sapiens
gtgctaggattacag

SEQ ID NO: 683977 - DNA, 15 bp, Homo sapiens
tgctaggattacagg

SEQ ID NO: 683978 - DNA, 15 bp, Homo sapiens
gctaggattacaggt

SEQ ID NO: 683979 - DNA, 15 bp, Homo sapiens
ctaggattacaggta

SEQ ID NO: 683980 - DNA, 15 bp, Homo sapiens
taggattacaggtat

SEQ ID NO: 683981 - DNA, 15 bp, Homo sapiens
aggattacaggtatg

SEQ ID NO: 683982 - DNA, 15 bp, Homo sapiens
ggattacaggtatga

SEQ ID NO: 683983 - DNA, 15 bp, Homo sapiens
gattacaggtatgag

SEQ ID NO: 683984 - DNA, 15 bp, Homo sapiens
attacaggtatgagc

SEQ ID NO: 683985 - DNA, 15 bp, Homo sapiens
ttacaggtatgagcc

SEQ ID NO: 683986 - DNA, 15 bp, Homo sapiens
tacaggtatgagcca

SEQ ID NO: 683987 - DNA, 15 bp, Homo sapiens
acaggtatgagccac

SEQ ID NO: 683988 - DNA, 15 bp, Homo sapiens
caggtatgagccact

SEQ ID NO: 683989 - DNA, 15 bp, Homo sapiens
aggtatgagccactg

SEQ ID NO: 683990 - DNA, 15 bp, Homo sapiens
ggtatgagccactgt

SEQ ID NO: 683991 - DNA, 15 bp, Homo sapiens
gtatgagccactgtg

SEQ ID NO: 683992 - DNA, 15 bp, Homo sapiens
tatgagccactgtgc

SEQ ID NO: 683993 - DNA, 15 bp, Homo sapiens
atgagccactgtgcc

SEQ ID NO: 683994 - DNA, 15 bp, Homo sapiens
tgagccactgtgcct

SEQ ID NO: 683995 - DNA, 15 bp, Homo sapiens
gagccactgtgcctg

SEQ ID NO: 683996 - DNA, 15 bp, Homo sapiens
agccactgtgcctgg

SEQ ID NO: 683997 - DNA, 15 bp, Homo sapiens
gccactgtgcctggc

SEQ ID NO: 683998 - DNA, 15 bp, Homo sapiens
ccactgtgcctggcc

SEQ ID NO: 683999 - DNA, 15 bp, Homo sapiens
cactgtgcctggccg

SEQ ID NO: 684000 - DNA, 15 bp, Homo sapiens
actgtgcctggccgg

SEQ ID NO: 684001 - DNA, 15 bp, Homo sapiens
ctgtgcctggccggg

SEQ ID NO: 684002 - DNA, 15 bp, Homo sapiens
tgtgcctggccggga

SEQ ID NO: 684003 - DNA, 15 bp, Homo sapiens
gtgcctggccgggat

SEQ ID NO: 684004 - DNA, 15 bp, Homo sapiens
tgcctggccgggatc

SEQ ID NO: 684005 - DNA, 15 bp, Homo sapiens
gcctggccgggatct

SEQ ID NO: 684006 - DNA, 15 bp, Homo sapiens
cctggccgggatcta

SEQ ID NO: 684007 - DNA, 15 bp, Homo sapiens
ctggccgggatctac

SEQ ID NO: 684008 - DNA, 15 bp, Homo sapiens
tggccgggatctact

SEQ ID NO: 684009 - DNA, 15 bp, Homo sapiens
ggccgggatctactt

SEQ ID NO: 684010 - DNA, 15 bp, Homo sapiens
gccgggatctacttt

SEQ ID NO: 684011 - DNA, 15 bp, Homo sapiens
ccgggatctactttt

SEQ ID NO: 684012 - DNA, 15 bp, Homo sapiens
cgggatctacttttt

SEQ ID NO: 684013 - DNA, 15 bp, Homo sapiens
gggatctactttttt

SEQ ID NO: 684014 - DNA, 15 bp, Homo sapiens
ggatctacttttttc

SEQ ID NO: 684015 - DNA, 15 bp, Homo sapiens
gatctacttttttct

SEQ ID NO: 684016 - DNA, 15 bp, Homo sapiens
atctacttttttctt

SEQ ID NO: 684017 - DNA, 15 bp, Homo sapiens
tctacttttttctta

SEQ ID NO: 684018 - DNA, 15 bp, Homo sapiens
ctacttttttcttat

SEQ ID NO: 684019 - DNA, 15 bp, Homo sapiens
tacttttttcttatt

SEQ ID NO: 684020 - DNA, 15 bp, Homo sapiens
acttttttcttattt

SEQ ID NO: 684021 - DNA, 15 bp, Homo sapiens
cttttttcttattta

SEQ ID NO: 684022 - DNA, 15 bp, Homo sapiens
ttttttcttatttag

SEQ ID NO: 684023 - DNA, 15 bp, Homo sapiens
tttttcttatttagg

SEQ ID NO: 684024 - DNA, 15 bp, Homo sapiens
ttttcttatttaggt

SEQ ID NO: 684025 - DNA, 15 bp, Homo sapiens
tttcttatttaggtc

SEQ ID NO: 684026 - DNA, 15 bp, Homo sapiens
ttcttatttaggtca

SEQ ID NO: 684027 - DNA, 15 bp, Homo sapiens
tcttatttaggtcag

SEQ ID NO: 684028 - DNA, 15 bp, Homo sapiens
cttatttaggtcagg

SEQ ID NO: 684029 - DNA, 15 bp, Homo sapiens
ttatttaggtcagga

SEQ ID NO: 684030 - DNA, 15 bp, Homo sapiens
tatttaggtcaggat

SEQ ID NO: 684031 - DNA, 15 bp, Homo sapiens
atttaggtcaggatt

SEQ ID NO: 684032 - DNA, 15 bp, Homo sapiens
tttaggtcaggattg

SEQ ID NO: 684033 - DNA, 15 bp, Homo sapiens
ttaggtcaggattgc

SEQ ID NO: 684034 - DNA, 15 bp, Homo sapiens
taggtcaggattgca

SEQ ID NO: 684035 - DNA, 15 bp, Homo sapiens
aggtcaggattgcag

SEQ ID NO: 684036 - DNA, 15 bp, Homo sapiens
ggtcaggattgcagg

SEQ ID NO: 684037 - DNA, 15 bp, Homo sapiens
gtcaggattgcaggg

SEQ ID NO: 684038 - DNA, 15 bp, Homo sapiens
tcaggattgcaggga

SEQ ID NO: 684039 - DNA, 15 bp, Homo sapiens
caggattgcagggac

SEQ ID NO: 684040 - DNA, 15 bp, Homo sapiens
aggattgcagggaca

SEQ ID NO: 684041 - DNA, 15 bp, Homo sapiens
ggattgcagggacag

SEQ ID NO: 684042 - DNA, 15 bp, Homo sapiens
gattgcagggacagg

SEQ ID NO: 684043 - DNA, 15 bp, Homo sapiens
attgcagggacaggg

SEQ ID NO: 684044 - DNA, 15 bp, Homo sapiens
ttgcagggacaggga

SEQ ID NO: 684045 - DNA, 15 bp, Homo sapiens
tgcagggacagggac

SEQ ID NO: 684046 - DNA, 15 bp, Homo sapiens
gcagggacagggaca

SEQ ID NO: 684047 - DNA, 15 bp, Homo sapiens
cagggacagggacag

SEQ ID NO: 684048 - DNA, 15 bp, Homo sapiens
agggacagggacaga

SEQ ID NO: 684049 - DNA, 15 bp, Homo sapiens
gggacagggacagag

SEQ ID NO: 684050 - DNA, 15 bp, Homo sapiens
ggacagggacagagt

SEQ ID NO: 684051 - DNA, 15 bp, Homo sapiens
gacagggacagagtg

SEQ ID NO: 684052 - DNA, 15 bp, Homo sapiens
acagggacagagtga

SEQ ID NO: 684053 - DNA, 15 bp, Homo sapiens
cagggacagagtgag

SEQ ID NO: 684054 - DNA, 15 bp, Homo sapiens
agggacagagtgaga

SEQ ID NO: 684055 - DNA, 15 bp, Homo sapiens
gggacagagtgagag

SEQ ID NO: 684056 - DNA, 15 bp, Homo sapiens
ggacagagtgagagg

SEQ ID NO: 684057 - DNA, 15 bp, Homo sapiens
gacagagtgagaggg

SEQ ID NO: 684058 - DNA, 15 bp, Homo sapiens
acagagtgagaggga

SEQ ID NO: 684059 - DNA, 15 bp, Homo sapiens
cagagtgagagggac

SEQ ID NO: 684060 - DNA, 15 bp, Homo sapiens
agagtgagagggact

SEQ ID NO: 684061 - DNA, 15 bp, Homo sapiens
gagtgagagggactt

SEQ ID NO: 684062 - DNA, 15 bp, Homo sapiens
agtgagagggacttc

SEQ ID NO: 684063 - DNA, 15 bp, Homo sapiens
gtgagagggacttca

SEQ ID NO: 684064 - DNA, 15 bp, Homo sapiens
tgagagggacttcat

SEQ ID NO: 684065 - DNA, 15 bp, Homo sapiens
gagagggacttcatg

SEQ ID NO: 684066 - DNA, 15 bp, Homo sapiens
agagggacttcatga

SEQ ID NO: 684067 - DNA, 15 bp, Homo sapiens
gagggacttcatgac

SEQ ID NO: 684068 - DNA, 15 bp, Homo sapiens
agggacttcatgact

SEQ ID NO: 684069 - DNA, 15 bp, Homo sapiens
gggacttcatgactg

SEQ ID NO: 684070 - DNA, 15 bp, Homo sapiens
ggacttcatgactgt

SEQ ID NO: 684071 - DNA, 15 bp, Homo sapiens
gacttcatgactgtg

SEQ ID NO: 684072 - DNA, 15 bp, Homo sapiens
acttcatgactgtga

SEQ ID NO: 684073 - DNA, 15 bp, Homo sapiens
cttcatgactgtgat

SEQ ID NO: 684074 - DNA, 15 bp, Homo sapiens
ttcatgactgtgatg

SEQ ID NO: 684075 - DNA, 15 bp, Homo sapiens
tcatgactgtgatgc

SEQ ID NO: 684076 - DNA, 15 bp, Homo sapiens
catgactgtgatgct

SEQ ID NO: 684077 - DNA, 15 bp, Homo sapiens
atgactgtgatgctg

SEQ ID NO: 684078 - DNA, 15 bp, Homo sapiens
tgactgtgatgctgt

SEQ ID NO: 684079 - DNA, 15 bp, Homo sapiens
gactgtgatgctgtt

SEQ ID NO: 684080 - DNA, 15 bp, Homo sapiens
actgtgatgctgttt

SEQ ID NO: 684081 - DNA, 15 bp, Homo sapiens
ctgtgatgctgtttc

SEQ ID NO: 684082 - DNA, 15 bp, Homo sapiens
tgtgatgctgtttca

SEQ ID NO: 684083 - DNA, 15 bp, Homo sapiens
gtgatgctgtttcag

SEQ ID NO: 684084 - DNA, 15 bp, Homo sapiens
tgatgctgtttcagt

SEQ ID NO: 684085 - DNA, 15 bp, Homo sapiens
gatgctgtttcagtt

SEQ ID NO: 684086 - DNA, 15 bp, Homo sapiens
atgctgtttcagtta

SEQ ID NO: 684087 - DNA, 15 bp, Homo sapiens
tgctgtttcagttac

SEQ ID NO: 684088 - DNA, 15 bp, Homo sapiens
gctgtttcagttaca

SEQ ID NO: 684089 - DNA, 15 bp, Homo sapiens
ctgtttcagttacaa

SEQ ID NO: 684090 - DNA, 15 bp, Homo sapiens
tgtttcagttacaaa

SEQ ID NO: 684091 - DNA, 15 bp, Homo sapiens
gtttcagttacaaag

SEQ ID NO: 684092 - DNA, 15 bp, Homo sapiens
tttcagttacaaagt

SEQ ID NO: 684093 - DNA, 15 bp, Homo sapiens
ttcagttacaaagtg

SEQ ID NO: 684094 - DNA, 15 bp, Homo sapiens
tcagttacaaagtgc

SEQ ID NO: 684095 - DNA, 15 bp, Homo sapiens
cagttacaaagtgca

SEQ ID NO: 684096 - DNA, 15 bp, Homo sapiens
agttacaaagtgcat

SEQ ID NO: 684097 - DNA, 15 bp, Homo sapiens
gttacaaagtgcatt

SEQ ID NO: 684098 - DNA, 15 bp, Homo sapiens
ttacaaagtgcattt

SEQ ID NO: 684099 - DNA, 15 bp, Homo sapiens
tacaaagtgcattta

SEQ ID NO: 684100 - DNA, 15 bp, Homo sapiens
acaaagtgcatttat

SEQ ID NO: 684101 - DNA, 15 bp, Homo sapiens
caaagtgcatttata

SEQ ID NO: 684102 - DNA, 15 bp, Homo sapiens
aaagtgcatttatac

SEQ ID NO: 684103 - DNA, 15 bp, Homo sapiens
aagtgcatttataca

SEQ ID NO: 684104 - DNA, 15 bp, Homo sapiens
agtgcatttatacat

SEQ ID NO: 684105 - DNA, 15 bp, Homo sapiens
gtgcatttatacata

SEQ ID NO: 684106 - DNA, 15 bp, Homo sapiens
tgcatttatacataa

SEQ ID NO: 684107 - DNA, 15 bp, Homo sapiens
gcatttatacataag

SEQ ID NO: 684108 - DNA, 15 bp, Homo sapiens
catttatacataaga

SEQ ID NO: 684109 - DNA, 15 bp, Homo sapiens
atttatacataagat

SEQ ID NO: 684110 - DNA, 15 bp, Homo sapiens
tttatacataagatt

SEQ ID NO: 684111 - DNA, 15 bp, Homo sapiens
ttatacataagattt

SEQ ID NO: 684112 - DNA, 15 bp, Homo sapiens
tatacataagatttc

SEQ ID NO: 684113 - DNA, 15 bp, Homo sapiens
atacataagatttca

SEQ ID NO: 684114 - DNA, 15 bp, Homo sapiens
tacataagatttcat

SEQ ID NO: 684115 - DNA, 15 bp, Homo sapiens
acataagatttcatt

SEQ ID NO: 684116 - DNA, 15 bp, Homo sapiens
cataagatttcattt

SEQ ID NO: 684117 - DNA, 15 bp, Homo sapiens
ataagatttcatttg

SEQ ID NO: 684118 - DNA, 15 bp, Homo sapiens
taagatttcatttga

SEQ ID NO: 684119 - DNA, 15 bp, Homo sapiens
aagatttcatttgat

SEQ ID NO: 684120 - DNA, 15 bp, Homo sapiens
agatttcatttgatc

SEQ ID NO: 684121 - DNA, 15 bp, Homo sapiens
gatttcatttgatct

SEQ ID NO: 684122 - DNA, 15 bp, Homo sapiens
atttcatttgatctt

SEQ ID NO: 684123 - DNA, 15 bp, Homo sapiens
tttcatttgatcttt

SEQ ID NO: 684124 - DNA, 15 bp, Homo sapiens
ttcatttgatctttg

SEQ ID NO: 684125 - DNA, 15 bp, Homo sapiens
tcatttgatctttgg

SEQ ID NO: 684126 - DNA, 15 bp, Homo sapiens
catttgatctttggt

SEQ ID NO: 684127 - DNA, 15 bp, Homo sapiens
atttgatctttggtt

SEQ ID NO: 684128 - DNA, 15 bp, Homo sapiens
tttgatctttggtta

SEQ ID NO: 684129 - DNA, 15 bp, Homo sapiens
ttgatctttggttat

SEQ ID NO: 684130 - DNA, 15 bp, Homo sapiens
tgatctttggttata

SEQ ID NO: 684131 - DNA, 15 bp, Homo sapiens
gatctttggttatac

SEQ ID NO: 684132 - DNA, 15 bp, Homo sapiens
atctttggttatacg

SEQ ID NO: 684133 - DNA, 15 bp, Homo sapiens
tctttggttatacgg

SEQ ID NO: 684134 - DNA, 15 bp, Homo sapiens
ctttggttatacggt

SEQ ID NO: 684135 - DNA, 15 bp, Homo sapiens
tttggttatacggta

SEQ ID NO: 684136 - DNA, 15 bp, Homo sapiens
ttggttatacggtaa

SEQ ID NO: 684137 - DNA, 15 bp, Homo sapiens
tggttatacggtaaa

SEQ ID NO: 684138 - DNA, 15 bp, Homo sapiens
ggttatacggtaaac

SEQ ID NO: 684139 - DNA, 15 bp, Homo sapiens
gttatacggtaaaca

SEQ ID NO: 684140 - DNA, 15 bp, Homo sapiens
ttatacggtaaacag

SEQ ID NO: 684141 - DNA, 15 bp, Homo sapiens
tatacggtaaacaga

SEQ ID NO: 684142 - DNA, 15 bp, Homo sapiens
atacggtaaacagaa

SEQ ID NO: 684143 - DNA, 15 bp, Homo sapiens
tacggtaaacagaac

SEQ ID NO: 684144 - DNA, 15 bp, Homo sapiens
acggtaaacagaact

SEQ ID NO: 684145 - DNA, 15 bp, Homo sapiens
cggtaaacagaactt

SEQ ID NO: 684146 - DNA, 15 bp, Homo sapiens
ggtaaacagaactta

SEQ ID NO: 684147 - DNA, 15 bp, Homo sapiens
gtaaacagaacttat

SEQ ID NO: 684148 - DNA, 15 bp, Homo sapiens
taaacagaacttatc

SEQ ID NO: 684149 - DNA, 15 bp, Homo sapiens
aaacagaacttatct

SEQ ID NO: 684150 - DNA, 15 bp, Homo sapiens
aacagaacttatcta

SEQ ID NO: 684151 - DNA, 15 bp, Homo sapiens
acagaacttatctac

SEQ ID NO: 684152 - DNA, 15 bp, Homo sapiens
cagaacttatctacc

SEQ ID NO: 684153 - DNA, 15 bp, Homo sapiens
agaacttatctacca

SEQ ID NO: 684154 - DNA, 15 bp, Homo sapiens
gaacttatctaccag

SEQ ID NO: 684155 - DNA, 15 bp, Homo sapiens
aacttatctaccaga

SEQ ID NO: 684156 - DNA, 15 bp, Homo sapiens
acttatctaccagac

SEQ ID NO: 684157 - DNA, 15 bp, Homo sapiens
cttatctaccagacg

SEQ ID NO: 684158 - DNA, 15 bp, Homo sapiens
ttatctaccagacgg

SEQ ID NO: 684159 - DNA, 15 bp, Homo sapiens
tatctaccagacggg

SEQ ID NO: 684160 - DNA, 15 bp, Homo sapiens
atctaccagacgggt

SEQ ID NO: 684161 - DNA, 15 bp, Homo sapiens
tctaccagacgggtg

SEQ ID NO: 684162 - DNA, 15 bp, Homo sapiens
ctaccagacgggtgt

SEQ ID NO: 684163 - DNA, 15 bp, Homo sapiens
taccagacgggtgta

SEQ ID NO: 684164 - DNA, 15 bp, Homo sapiens
accagacgggtgtaa

SEQ ID NO: 684165 - DNA, 15 bp, Homo sapiens
ccagacgggtgtaaa

SEQ ID NO: 684166 - DNA, 15 bp, Homo sapiens
cagacgggtgtaaaa

SEQ ID NO: 684167 - DNA, 15 bp, Homo sapiens
agacgggtgtaaaag

SEQ ID NO: 684168 - DNA, 15 bp, Homo sapiens
gacgggtgtaaaagt

SEQ ID NO: 684169 - DNA, 15 bp, Homo sapiens
acgggtgtaaaagtt

SEQ ID NO: 684170 - DNA, 15 bp, Homo sapiens
cgggtgtaaaagttt

SEQ ID NO: 684171 - DNA, 15 bp, Homo sapiens
gggtgtaaaagtttg

SEQ ID NO: 684172 - DNA, 15 bp, Homo sapiens
ggtgtaaaagtttgg

SEQ ID NO: 684173 - DNA, 15 bp, Homo sapiens
gtgtaaaagtttgga

SEQ ID NO: 684174 - DNA, 15 bp, Homo sapiens
tgtaaaagtttggag

SEQ ID NO: 684175 - DNA, 15 bp, Homo sapiens
gtaaaagtttggagc

SEQ ID NO: 684176 - DNA, 15 bp, Homo sapiens
taaaagtttggagca

SEQ ID NO: 684177 - DNA, 15 bp, Homo sapiens
aaaagtttggagcag

SEQ ID NO: 684178 - DNA, 15 bp, Homo sapiens
aaagtttggagcaga

SEQ ID NO: 684179 - DNA, 15 bp, Homo sapiens
aagtttggagcagaa

SEQ ID NO: 684180 - DNA, 15 bp, Homo sapiens
agtttggagcagaat

SEQ ID NO: 684181 - DNA, 15 bp, Homo sapiens
gtttggagcagaatg

SEQ ID NO: 684182 - DNA, 15 bp, Homo sapiens
tttggagcagaatgt

SEQ ID NO: 684183 - DNA, 15 bp, Homo sapiens
ttggagcagaatgtt

SEQ ID NO: 684184 - DNA, 15 bp, Homo sapiens
tggagcagaatgttt

SEQ ID NO: 684185 - DNA, 15 bp, Homo sapiens
ggagcagaatgttta

SEQ ID NO: 684186 - DNA, 15 bp, Homo sapiens
gagcagaatgtttaa

SEQ ID NO: 684187 - DNA, 15 bp, Homo sapiens
agcagaatgtttaaa

SEQ ID NO: 684188 - DNA, 15 bp, Homo sapiens
gcagaatgtttaaaa

SEQ ID NO: 684189 - DNA, 15 bp, Homo sapiens
cagaatgtttaaaaa

SEQ ID NO: 684190 - DNA, 15 bp, Homo sapiens
agaatgtttaaaaaa

SEQ ID NO: 684191 - DNA, 15 bp, Homo sapiens
gaatgtttaaaaaat

SEQ ID NO: 684192 - DNA, 15 bp, Homo sapiens
aatgtttaaaaaatt

SEQ ID NO: 684193 - DNA, 15 bp, Homo sapiens
atgtttaaaaaattg

SEQ ID NO: 684194 - DNA, 15 bp, Homo sapiens
tgtttaaaaaattga

SEQ ID NO: 684195 - DNA, 15 bp, Homo sapiens
gtttaaaaaattgag

SEQ ID NO: 684196 - DNA, 15 bp, Homo sapiens
tttaaaaaattgagt

SEQ ID NO: 684197 - DNA, 15 bp, Homo sapiens
ttaaaaaattgagta

SEQ ID NO: 684198 - DNA, 15 bp, Homo sapiens
taaaaaattgagtaa

SEQ ID NO: 684199 - DNA, 15 bp, Homo sapiens
aaaaaattgagtaat

SEQ ID NO: 684200 - DNA, 15 bp, Homo sapiens
aaaaattgagtaatc

SEQ ID NO: 684201 - DNA, 15 bp, Homo sapiens
aaaattgagtaatct

SEQ ID NO: 684202 - DNA, 15 bp, Homo sapiens
aaattgagtaatctc

SEQ ID NO: 684203 - DNA, 15 bp, Homo sapiens
aattgagtaatctct

SEQ ID NO: 684204 - DNA, 15 bp, Homo sapiens
attgagtaatctcta

SEQ ID NO: 684205 - DNA, 15 bp, Homo sapiens
ttgagtaatctctac

SEQ ID NO: 684206 - DNA, 15 bp, Homo sapiens
tgagtaatctctacc

SEQ ID NO: 684207 - DNA, 15 bp, Homo sapiens
gagtaatctctacct

SEQ ID NO: 684208 - DNA, 15 bp, Homo sapiens
agtaatctctacctc

SEQ ID NO: 684209 - DNA, 15 bp, Homo sapiens
gtaatctctacctct

SEQ ID NO: 684210 - DNA, 15 bp, Homo sapiens
taatctctacctctg

SEQ ID NO: 684211 - DNA, 15 bp, Homo sapiens
aatctctacctctgg

SEQ ID NO: 684212 - DNA, 15 bp, Homo sapiens
atctctacctctgga

SEQ ID NO: 684213 - DNA, 15 bp, Homo sapiens
tctctacctctggaa

SEQ ID NO: 684214 - DNA, 15 bp, Homo sapiens
ctctacctctggaaa

SEQ ID NO: 684215 - DNA, 15 bp, Homo sapiens
tctacctctggaaat

SEQ ID NO: 684216 - DNA, 15 bp, Homo sapiens
ctacctctggaaatg

SEQ ID NO: 684217 - DNA, 15 bp, Homo sapiens
tacctctggaaatga

SEQ ID NO: 684218 - DNA, 15 bp, Homo sapiens
acctctggaaatgat

SEQ ID NO: 684219 - DNA, 15 bp, Homo sapiens
cctctggaaatgatt

SEQ ID NO: 684220 - DNA, 15 bp, Homo sapiens
ctctggaaatgatta

SEQ ID NO: 684221 - DNA, 15 bp, Homo sapiens
tctggaaatgattaa

SEQ ID NO: 684222 - DNA, 15 bp, Homo sapiens
ctggaaatgattaat

SEQ ID NO: 684223 - DNA, 15 bp, Homo sapiens
tggaaatgattaatt

SEQ ID NO: 684224 - DNA, 15 bp, Homo sapiens
ggaaatgattaatta

SEQ ID NO: 684225 - DNA, 15 bp, Homo sapiens
gaaatgattaattaa

SEQ ID NO: 684226 - DNA, 15 bp, Homo sapiens
aaatgattaattaaa

SEQ ID NO: 684227 - DNA, 15 bp, Homo sapiens
aatgattaattaaaa

SEQ ID NO: 684228 - DNA, 15 bp, Homo sapiens
atgattaattaaaag

SEQ ID NO: 684229 - DNA, 15 bp, Homo sapiens
tgattaattaaaaga

SEQ ID NO: 684230 - DNA, 15 bp, Homo sapiens
gattaattaaaagat

SEQ ID NO: 684231 - DNA, 15 bp, Homo sapiens
attaattaaaagata

SEQ ID NO: 684232 - DNA, 15 bp, Homo sapiens
ttaattaaaagatat

SEQ ID NO: 684233 - DNA, 15 bp, Homo sapiens
taattaaaagatata

SEQ ID NO: 684234 - DNA, 15 bp, Homo sapiens
aattaaaagatataa

SEQ ID NO: 684235 - DNA, 15 bp, Homo sapiens
attaaaagatataaa

SEQ ID NO: 684236 - DNA, 15 bp, Homo sapiens
ttaaaagatataaaa

SEQ ID NO: 684237 - DNA, 15 bp, Homo sapiens
taaaagatataaaat

SEQ ID NO: 684238 - DNA, 15 bp, Homo sapiens
aaaagatataaaatg

SEQ ID NO: 684239 - DNA, 15 bp, Homo sapiens
aaagatataaaatgc

SEQ ID NO: 684240 - DNA, 15 bp, Homo sapiens
aagatataaaatgct

SEQ ID NO: 684241 - DNA, 15 bp, Homo sapiens
agatataaaatgctc

SEQ ID NO: 684242 - DNA, 15 bp, Homo sapiens
gatataaaatgctct

SEQ ID NO: 684243 - DNA, 15 bp, Homo sapiens
atataaaatgctctc

SEQ ID NO: 684244 - DNA, 15 bp, Homo sapiens
tataaaatgctctct

SEQ ID NO: 684245 - DNA, 15 bp, Homo sapiens
ataaaatgctctctc

SEQ ID NO: 684246 - DNA, 15 bp, Homo sapiens
taaaatgctctctcc

SEQ ID NO: 684247 - DNA, 15 bp, Homo sapiens
aaaatgctctctcca

SEQ ID NO: 684248 - DNA, 15 bp, Homo sapiens
aaatgctctctccag

SEQ ID NO: 684249 - DNA, 15 bp, Homo sapiens
aatgctctctccagc

SEQ ID NO: 684250 - DNA, 15 bp, Homo sapiens
atgctctctccagca

SEQ ID NO: 684251 - DNA, 15 bp, Homo sapiens
tgctctctccagcac

SEQ ID NO: 684252 - DNA, 15 bp, Homo sapiens
gctctctccagcact

SEQ ID NO: 684253 - DNA, 15 bp, Homo sapiens
ctctctccagcacta

SEQ ID NO: 684254 - DNA, 15 bp, Homo sapiens
tctctccagcactat

SEQ ID NO: 684255 - DNA, 15 bp, Homo sapiens
ctctccagcactatg

SEQ ID NO: 684256 - DNA, 15 bp, Homo sapiens
tctccagcactatgt

SEQ ID NO: 684257 - DNA, 15 bp, Homo sapiens
ctccagcactatgta

SEQ ID NO: 684258 - DNA, 15 bp, Homo sapiens
tccagcactatgtaa

SEQ ID NO: 684259 - DNA, 15 bp, Homo sapiens
ccagcactatgtaag

SEQ ID NO: 684260 - DNA, 15 bp, Homo sapiens
cagcactatgtaagg

SEQ ID NO: 684261 - DNA, 15 bp, Homo sapiens
agcactatgtaaggg

SEQ ID NO: 684262 - DNA, 15 bp, Homo sapiens
gcactatgtaagggt

SEQ ID NO: 684263 - DNA, 15 bp, Homo sapiens
cactatgtaagggtg

SEQ ID NO: 684264 - DNA, 15 bp, Homo sapiens
actatgtaagggtgt

SEQ ID NO: 684265 - DNA, 15 bp, Homo sapiens
ctatgtaagggtgtc

SEQ ID NO: 684266 - DNA, 15 bp, Homo sapiens
tatgtaagggtgtcc

SEQ ID NO: 684267 - DNA, 15 bp, Homo sapiens
atgtaagggtgtccc

SEQ ID NO: 684268 - DNA, 15 bp, Homo sapiens
tgtaagggtgtccca

SEQ ID NO: 684269 - DNA, 15 bp, Homo sapiens
gtaagggtgtcccag

SEQ ID NO: 684270 - DNA, 15 bp, Homo sapiens
taagggtgtcccagg

SEQ ID NO: 684271 - DNA, 15 bp, Homo sapiens
aagggtgtcccaggg

SEQ ID NO: 684272 - DNA, 15 bp, Homo sapiens
agggtgtcccaggga

SEQ ID NO: 684273 - DNA, 15 bp, Homo sapiens
gggtgtcccagggag

SEQ ID NO: 684274 - DNA, 15 bp, Homo sapiens
ggtgtcccagggaga

SEQ ID NO: 684275 - DNA, 15 bp, Homo sapiens
gtgtcccagggagaa

SEQ ID NO: 684276 - DNA, 15 bp, Homo sapiens
tgtcccagggagaaa

SEQ ID NO: 684277 - DNA, 15 bp, Homo sapiens
gtcccagggagaaat

SEQ ID NO: 684278 - DNA, 15 bp, Homo sapiens
tcccagggagaaatg

SEQ ID NO: 684279 - DNA, 15 bp, Homo sapiens
cccagggagaaatgt

SEQ ID NO: 684280 - DNA, 15 bp, Homo sapiens
ccagggagaaatgtc

SEQ ID NO: 684281 - DNA, 15 bp, Homo sapiens
cagggagaaatgtct

SEQ ID NO: 684282 - DNA, 15 bp, Homo sapiens
agggagaaatgtctt

SEQ ID NO: 684283 - DNA, 15 bp, Homo sapiens
gggagaaatgtcttg

SEQ ID NO: 684284 - DNA, 15 bp, Homo sapiens
ggagaaatgtcttga

SEQ ID NO: 684285 - DNA, 15 bp, Homo sapiens
gagaaatgtcttgat

SEQ ID NO: 684286 - DNA, 15 bp, Homo sapiens
agaaatgtcttgatc

SEQ ID NO: 684287 - DNA, 15 bp, Homo sapiens
gaaatgtcttgatcc

SEQ ID NO: 684288 - DNA, 15 bp, Homo sapiens
aaatgtcttgatccg

SEQ ID NO: 684289 - DNA, 15 bp, Homo sapiens
aatgtcttgatccga

SEQ ID NO: 684290 - DNA, 15 bp, Homo sapiens
atgtcttgatccgag

SEQ ID NO: 684291 - DNA, 15 bp, Homo sapiens
tgtcttgatccgaga

SEQ ID NO: 684292 - DNA, 15 bp, Homo sapiens
gtcttgatccgagaa

SEQ ID NO: 684293 - DNA, 15 bp, Homo sapiens
tcttgatccgagaat

SEQ ID NO: 684294 - DNA, 15 bp, Homo sapiens
cttgatccgagaatg

SEQ ID NO: 684295 - DNA, 15 bp, Homo sapiens
ttgatccgagaatga

SEQ ID NO: 684296 - DNA, 15 bp, Homo sapiens
tgatccgagaatgat

SEQ ID NO: 684297 - DNA, 15 bp, Homo sapiens
gatccgagaatgatg

SEQ ID NO: 684298 - DNA, 15 bp, Homo sapiens
atccgagaatgatga

SEQ ID NO: 684299 - DNA, 15 bp, Homo sapiens
tccgagaatgatgaa

SEQ ID NO: 684300 - DNA, 15 bp, Homo sapiens
ccgagaatgatgaaa

SEQ ID NO: 684301 - DNA, 15 bp, Homo sapiens
cgagaatgatgaaac

SEQ ID NO: 684302 - DNA, 15 bp, Homo sapiens
gagaatgatgaaacc

SEQ ID NO: 684303 - DNA, 15 bp, Homo sapiens
agaatgatgaaacca

SEQ ID NO: 684304 - DNA, 15 bp, Homo sapiens
gaatgatgaaaccaa

SEQ ID NO: 684305 - DNA, 15 bp, Homo sapiens
aatgatgaaaccaaa

SEQ ID NO: 684306 - DNA, 15 bp, Homo sapiens
atgatgaaaccaaag

SEQ ID NO: 684307 - DNA, 15 bp, Homo sapiens
tgatgaaaccaaagt

SEQ ID NO: 684308 - DNA, 15 bp, Homo sapiens
gatgaaaccaaagtt

SEQ ID NO: 684309 - DNA, 15 bp, Homo sapiens
atgaaaccaaagttc

SEQ ID NO: 684310 - DNA, 15 bp, Homo sapiens
tgaaaccaaagttct

SEQ ID NO: 684311 - DNA, 15 bp, Homo sapiens
gaaaccaaagttcta

SEQ ID NO: 684312 - DNA, 15 bp, Homo sapiens
aaaccaaagttctag

SEQ ID NO: 684313 - DNA, 15 bp, Homo sapiens
aaccaaagttctagt

SEQ ID NO: 684314 - DNA, 15 bp, Homo sapiens
accaaagttctagtt

SEQ ID NO: 684315 - DNA, 15 bp, Homo sapiens
ccaaagttctagttc

SEQ ID NO: 684316 - DNA, 15 bp, Homo sapiens
caaagttctagttct

SEQ ID NO: 684317 - DNA, 15 bp, Homo sapiens
aaagttctagttcta

SEQ ID NO: 684318 - DNA, 15 bp, Homo sapiens
aagttctagttctag

SEQ ID NO: 684319 - DNA, 15 bp, Homo sapiens
agttctagttctagc

SEQ ID NO: 684320 - DNA, 15 bp, Homo sapiens
gttctagttctagct

SEQ ID NO: 684321 - DNA, 15 bp, Homo sapiens
ttctagttctagctc

SEQ ID NO: 684322 - DNA, 15 bp, Homo sapiens
tctagttctagctct

SEQ ID NO: 684323 - DNA, 15 bp, Homo sapiens
ctagttctagctctg

SEQ ID NO: 684324 - DNA, 15 bp, Homo sapiens
tagttctagctctgc

SEQ ID NO: 684325 - DNA, 15 bp, Homo sapiens
agttctagctctgca

SEQ ID NO: 684326 - DNA, 15 bp, Homo sapiens
gttctagctctgcat

SEQ ID NO: 684327 - DNA, 15 bp, Homo sapiens
ttctagctctgcatt

SEQ ID NO: 684328 - DNA, 15 bp, Homo sapiens
tctagctctgcatta

SEQ ID NO: 684329 - DNA, 15 bp, Homo sapiens
ctagctctgcattaa

SEQ ID NO: 684330 - DNA, 15 bp, Homo sapiens
tagctctgcattaaa

SEQ ID NO: 684331 - DNA, 15 bp, Homo sapiens
agctctgcattaaat

SEQ ID NO: 684332 - DNA, 15 bp, Homo sapiens
gctctgcattaaata

SEQ ID NO: 684333 - DNA, 15 bp, Homo sapiens
ctctgcattaaatat

SEQ ID NO: 684334 - DNA, 15 bp, Homo sapiens
tctgcattaaatatg

SEQ ID NO: 684335 - DNA, 15 bp, Homo sapiens
ctgcattaaatatgt

SEQ ID NO: 684336 - DNA, 15 bp, Homo sapiens
tgcattaaatatgtg

SEQ ID NO: 684337 - DNA, 15 bp, Homo sapiens
gcattaaatatgtgt

SEQ ID NO: 684338 - DNA, 15 bp, Homo sapiens
cattaaatatgtgtc

SEQ ID NO: 684339 - DNA, 15 bp, Homo sapiens
attaaatatgtgtcc

SEQ ID NO: 684340 - DNA, 15 bp, Homo sapiens
ttaaatatgtgtcct

SEQ ID NO: 684341 - DNA, 15 bp, Homo sapiens
taaatatgtgtcctt

SEQ ID NO: 684342 - DNA, 15 bp, Homo sapiens
aaatatgtgtcctta

SEQ ID NO: 684343 - DNA, 15 bp, Homo sapiens
aatatgtgtccttac

SEQ ID NO: 684344 - DNA, 15 bp, Homo sapiens
atatgtgtccttacg

SEQ ID NO: 684345 - DNA, 15 bp, Homo sapiens
tatgtgtccttacga

SEQ ID NO: 684346 - DNA, 15 bp, Homo sapiens
atgtgtccttacgag

SEQ ID NO: 684347 - DNA, 15 bp, Homo sapiens
tgtgtccttacgaga

SEQ ID NO: 684348 - DNA, 15 bp, Homo sapiens
gtgtccttacgagaa

SEQ ID NO: 684349 - DNA, 15 bp, Homo sapiens
tgtccttacgagaat

SEQ ID NO: 684350 - DNA, 15 bp, Homo sapiens
gtccttacgagaatc

SEQ ID NO: 684351 - DNA, 15 bp, Homo sapiens
tccttacgagaatcc

SEQ ID NO: 684352 - DNA, 15 bp, Homo sapiens
ccttacgagaatccc

SEQ ID NO: 684353 - DNA, 15 bp, Homo sapiens
cttacgagaatccct

SEQ ID NO: 684354 - DNA, 15 bp, Homo sapiens
ttacgagaatccctc

SEQ ID NO: 684355 - DNA, 15 bp, Homo sapiens
tacgagaatccctca

SEQ ID NO: 684356 - DNA, 15 bp, Homo sapiens
acgagaatccctcaa

SEQ ID NO: 684357 - DNA, 15 bp, Homo sapiens
cgagaatccctcaat

SEQ ID NO: 684358 - DNA, 15 bp, Homo sapiens
gagaatccctcaatt

SEQ ID NO: 684359 - DNA, 15 bp, Homo sapiens
agaatccctcaattt

SEQ ID NO: 684360 - DNA, 15 bp, Homo sapiens
gaatccctcaatttc

SEQ ID NO: 684361 - DNA, 15 bp, Homo sapiens
aatccctcaatttct

SEQ ID NO: 684362 - DNA, 15 bp, Homo sapiens
atccctcaatttctt

SEQ ID NO: 684363 - DNA, 15 bp, Homo sapiens
tccctcaatttcttt

SEQ ID NO: 684364 - DNA, 15 bp, Homo sapiens
ccctcaatttctttg

SEQ ID NO: 684365 - DNA, 15 bp, Homo sapiens
cctcaatttctttgg

SEQ ID NO: 684366 - DNA, 15 bp, Homo sapiens
ctcaatttctttgga

SEQ ID NO: 684367 - DNA, 15 bp, Homo sapiens
tcaatttctttggat

SEQ ID NO: 684368 - DNA, 15 bp, Homo sapiens
caatttctttggatt

SEQ ID NO: 684369 - DNA, 15 bp, Homo sapiens
aatttctttggattt

SEQ ID NO: 684370 - DNA, 15 bp, Homo sapiens
atttctttggatttg

SEQ ID NO: 684371 - DNA, 15 bp, Homo sapiens
tttctttggatttga

SEQ ID NO: 684372 - DNA, 15 bp, Homo sapiens
ttctttggatttgag

SEQ ID NO: 684373 - DNA, 15 bp, Homo sapiens
tctttggatttgagt

SEQ ID NO: 684374 - DNA, 15 bp, Homo sapiens
ctttggatttgagtc

SEQ ID NO: 684375 - DNA, 15 bp, Homo sapiens
tttggatttgagtct

SEQ ID NO: 684376 - DNA, 15 bp, Homo sapiens
ttggatttgagtctc

SEQ ID NO: 684377 - DNA, 15 bp, Homo sapiens
tggatttgagtctcc

SEQ ID NO: 684378 - DNA, 15 bp, Homo sapiens
ggatttgagtctcct

SEQ ID NO: 684379 - DNA, 15 bp, Homo sapiens
gatttgagtctcctc

SEQ ID NO: 684380 - DNA, 15 bp, Homo sapiens
atttgagtctcctca

SEQ ID NO: 684381 - DNA, 15 bp, Homo sapiens
tttgagtctcctcat

SEQ ID NO: 684382 - DNA, 15 bp, Homo sapiens
ttgagtctcctcatc

SEQ ID NO: 684383 - DNA, 15 bp, Homo sapiens
tgagtctcctcatct

SEQ ID NO: 684384 - DNA, 15 bp, Homo sapiens
gagtctcctcatctg

SEQ ID NO: 684385 - DNA, 15 bp, Homo sapiens
agtctcctcatctgt

SEQ ID NO: 684386 - DNA, 15 bp, Homo sapiens
gtctcctcatctgtc

SEQ ID NO: 684387 - DNA, 15 bp, Homo sapiens
tctcctcatctgtca

SEQ ID NO: 684388 - DNA, 15 bp, Homo sapiens
ctcctcatctgtcaa

SEQ ID NO: 684389 - DNA, 15 bp, Homo sapiens
tcctcatctgtcaaa

SEQ ID NO: 684390 - DNA, 15 bp, Homo sapiens
cctcatctgtcaaat

SEQ ID NO: 684391 - DNA, 15 bp, Homo sapiens
ctcatctgtcaaatg

SEQ ID NO: 684392 - DNA, 15 bp, Homo sapiens
tcatctgtcaaatgg

SEQ ID NO: 684393 - DNA, 15 bp, Homo sapiens
catctgtcaaatgga

SEQ ID NO: 684394 - DNA, 15 bp, Homo sapiens
atctgtcaaatggag

SEQ ID NO: 684395 - DNA, 15 bp, Homo sapiens
tctgtcaaatggagg

SEQ ID NO: 684396 - DNA, 15 bp, Homo sapiens
ctgtcaaatggaggg

SEQ ID NO: 684397 - DNA, 15 bp, Homo sapiens
tgtcaaatggagggg

SEQ ID NO: 684398 - DNA, 15 bp, Homo sapiens
gtcaaatggagggga

SEQ ID NO: 684399 - DNA, 15 bp, Homo sapiens
tcaaatggaggggag

SEQ ID NO: 684400 - DNA, 15 bp, Homo sapiens
caaatggaggggagt

SEQ ID NO: 684401 - DNA, 15 bp, Homo sapiens
aaatggaggggagtg

SEQ ID NO: 684402 - DNA, 15 bp, Homo sapiens
aatggaggggagtgt

SEQ ID NO: 684403 - DNA, 15 bp, Homo sapiens
atggaggggagtgtg

SEQ ID NO: 684404 - DNA, 15 bp, Homo sapiens
tggaggggagtgtgt

SEQ ID NO: 684405 - DNA, 15 bp, Homo sapiens
ggaggggagtgtgtg

SEQ ID NO: 684406 - DNA, 15 bp, Homo sapiens
gaggggagtgtgtgt

SEQ ID NO: 684407 - DNA, 15 bp, Homo sapiens
aggggagtgtgtgtg

SEQ ID NO: 684408 - DNA, 15 bp, Homo sapiens
ggggagtgtgtgtgt

SEQ ID NO: 684409 - DNA, 15 bp, Homo sapiens
gggagtgtgtgtgtg

SEQ ID NO: 684410 - DNA, 15 bp, Homo sapiens
ggagtgtgtgtgtgt

SEQ ID NO: 684411 - DNA, 15 bp, Homo sapiens
gagtgtgtgtgtgtg

SEQ ID NO: 684412 - DNA, 15 bp, Homo sapiens
agtgtgtgtgtgtgt

SEQ ID NO: 684413 - DNA, 15 bp, Homo sapiens
gtgtgtgtgtgtgtg

SEQ ID NO: 684414 - DNA, 15 bp, Homo sapiens
tgtgtgtgtgtgtgt

SEQ ID NO: 684415 - DNA, 15 bp, Homo sapiens
tgtgtgtgtgtgtgc

SEQ ID NO: 684416 - DNA, 15 bp, Homo sapiens
gtgtgtgtgtgtgca

SEQ ID NO: 684417 - DNA, 15 bp, Homo sapiens
tgtgtgtgtgtgcac

SEQ ID NO: 684418 - DNA, 15 bp, Homo sapiens
gtgtgtgtgtgcacg

SEQ ID NO: 684419 - DNA, 15 bp, Homo sapiens
tgtgtgtgtgcacgc

SEQ ID NO: 684420 - DNA, 15 bp, Homo sapiens
gtgtgtgtgcacgcg

SEQ ID NO: 684421 - DNA, 15 bp, Homo sapiens
tgtgtgtgcacgcgc

SEQ ID NO: 684422 - DNA, 15 bp, Homo sapiens
gtgtgtgcacgcgcg

SEQ ID NO: 684423 - DNA, 15 bp, Homo sapiens
tgtgtgcacgcgcgc

SEQ ID NO: 684424 - DNA, 15 bp, Homo sapiens
gtgtgcacgcgcgcg

SEQ ID NO: 684425 - DNA, 15 bp, Homo sapiens
tgtgcacgcgcgcgt

SEQ ID NO: 684426 - DNA, 15 bp, Homo sapiens
gtgcacgcgcgcgtg

SEQ ID NO: 684427 - DNA, 15 bp, Homo sapiens
tgcacgcgcgcgtgc

SEQ ID NO: 684428 - DNA, 15 bp, Homo sapiens
gcacgcgcgcgtgca

SEQ ID NO: 684429 - DNA, 15 bp, Homo sapiens
cacgcgcgcgtgcag

SEQ ID NO: 684430 - DNA, 15 bp, Homo sapiens
acgcgcgcgtgcagg

SEQ ID NO: 684431 - DNA, 15 bp, Homo sapiens
cgcgcgcgtgcagga

SEQ ID NO: 684432 - DNA, 15 bp, Homo sapiens
gcgcgcgtgcaggag

SEQ ID NO: 684433 - DNA, 15 bp, Homo sapiens
cgcgcgtgcaggagg

SEQ ID NO: 684434 - DNA, 15 bp, Homo sapiens
gcgcgtgcaggagga

SEQ ID NO: 684435 - DNA, 15 bp, Homo sapiens
cgcgtgcaggaggat

SEQ ID NO: 684436 - DNA, 15 bp, Homo sapiens
gcgtgcaggaggata

SEQ ID NO: 684437 - DNA, 15 bp, Homo sapiens
cgtgcaggaggatac

SEQ ID NO: 684438 - DNA, 15 bp, Homo sapiens
gtgcaggaggatact

SEQ ID NO: 684439 - DNA, 15 bp, Homo sapiens
tgcaggaggatactc

SEQ ID NO: 684440 - DNA, 15 bp, Homo sapiens
gcaggaggatactct

SEQ ID NO: 684441 - DNA, 15 bp, Homo sapiens
caggaggatactcta

SEQ ID NO: 684442 - DNA, 15 bp, Homo sapiens
aggaggatactctag

SEQ ID NO: 684443 - DNA, 15 bp, Homo sapiens
ggaggatactctaga

SEQ ID NO: 684444 - DNA, 15 bp, Homo sapiens
gaggatactctagac

SEQ ID NO: 684445 - DNA, 15 bp, Homo sapiens
aggatactctagaca

SEQ ID NO: 684446 - DNA, 15 bp, Homo sapiens
ggatactctagacac

SEQ ID NO: 684447 - DNA, 15 bp, Homo sapiens
gatactctagacaca

SEQ ID NO: 684448 - DNA, 15 bp, Homo sapiens
atactctagacacac

SEQ ID NO: 684449 - DNA, 15 bp, Homo sapiens
tactctagacacact

SEQ ID NO: 684450 - DNA, 15 bp, Homo sapiens
actctagacacactg

SEQ ID NO: 684451 - DNA, 15 bp, Homo sapiens
ctctagacacactga

SEQ ID NO: 684452 - DNA, 15 bp, Homo sapiens
tctagacacactgag

SEQ ID NO: 684453 - DNA, 15 bp, Homo sapiens
ctagacacactgagg

SEQ ID NO: 684454 - DNA, 15 bp, Homo sapiens
tagacacactgagga

SEQ ID NO: 684455 - DNA, 15 bp, Homo sapiens
agacacactgaggag

SEQ ID NO: 684456 - DNA, 15 bp, Homo sapiens
gacacactgaggagt

SEQ ID NO: 684457 - DNA, 15 bp, Homo sapiens
acacactgaggagta

SEQ ID NO: 684458 - DNA, 15 bp, Homo sapiens
cacactgaggagtag

SEQ ID NO: 684459 - DNA, 15 bp, Homo sapiens
acactgaggagtagg

SEQ ID NO: 684460 - DNA, 15 bp, Homo sapiens
cactgaggagtaggg

SEQ ID NO: 684461 - DNA, 15 bp, Homo sapiens
actgaggagtaggga

SEQ ID NO: 684462 - DNA, 15 bp, Homo sapiens
ctgaggagtagggag

SEQ ID NO: 684463 - DNA, 15 bp, Homo sapiens
tgaggagtagggagt

SEQ ID NO: 684464 - DNA, 15 bp, Homo sapiens
gaggagtagggagtt

SEQ ID NO: 684465 - DNA, 15 bp, Homo sapiens
aggagtagggagttt

SEQ ID NO: 684466 - DNA, 15 bp, Homo sapiens
ggagtagggagtttg

SEQ ID NO: 684467 - DNA, 15 bp, Homo sapiens
gagtagggagtttga

SEQ ID NO: 684468 - DNA, 15 bp, Homo sapiens
agtagggagtttgaa

SEQ ID NO: 684469 - DNA, 15 bp, Homo sapiens
gtagggagtttgaac

SEQ ID NO: 684470 - DNA, 15 bp, Homo sapiens
tagggagtttgaaca

SEQ ID NO: 684471 - DNA, 15 bp, Homo sapiens
agggagtttgaacac

SEQ ID NO: 684472 - DNA, 15 bp, Homo sapiens
gggagtttgaacacc

SEQ ID NO: 684473 - DNA, 15 bp, Homo sapiens
ggagtttgaacacct

SEQ ID NO: 684474 - DNA, 15 bp, Homo sapiens
gagtttgaacacctt

SEQ ID NO: 684475 - DNA, 15 bp, Homo sapiens
agtttgaacaccttc

SEQ ID NO: 684476 - DNA, 15 bp, Homo sapiens
gtttgaacaccttcc

SEQ ID NO: 684477 - DNA, 15 bp, Homo sapiens
tttgaacaccttcct

SEQ ID NO: 684478 - DNA, 15 bp, Homo sapiens
ttgaacaccttcctc

SEQ ID NO: 684479 - DNA, 15 bp, Homo sapiens
tgaacaccttcctct

SEQ ID NO: 684480 - DNA, 15 bp, Homo sapiens
gaacaccttcctctg

SEQ ID NO: 684481 - DNA, 15 bp, Homo sapiens
aacaccttcctctga

SEQ ID NO: 684482 - DNA, 15 bp, Homo sapiens
acaccttcctctgaa

SEQ ID NO: 684483 - DNA, 15 bp, Homo sapiens
caccttcctctgaaa

SEQ ID NO: 684484 - DNA, 15 bp, Homo sapiens
accttcctctgaaaa

SEQ ID NO: 684485 - DNA, 15 bp, Homo sapiens
ccttcctctgaaaat

SEQ ID NO: 684486 - DNA, 15 bp, Homo sapiens
cttcctctgaaaatg

SEQ ID NO: 684487 - DNA, 15 bp, Homo sapiens
ttcctctgaaaatgc

SEQ ID NO: 684488 - DNA, 15 bp, Homo sapiens
tcctctgaaaatgct

SEQ ID NO: 684489 - DNA, 15 bp, Homo sapiens
cctctgaaaatgctt

SEQ ID NO: 684490 - DNA, 15 bp, Homo sapiens
ctctgaaaatgcttc

SEQ ID NO: 684491 - DNA, 15 bp, Homo sapiens
tctgaaaatgcttcc

SEQ ID NO: 684492 - DNA, 15 bp, Homo sapiens
ctgaaaatgcttcca

SEQ ID NO: 684493 - DNA, 15 bp, Homo sapiens
tgaaaatgcttccaa

SEQ ID NO: 684494 - DNA, 15 bp, Homo sapiens
gaaaatgcttccaaa

SEQ ID NO: 684495 - DNA, 15 bp, Homo sapiens
aaaatgcttccaaac

SEQ ID NO: 684496 - DNA, 15 bp, Homo sapiens
aaatgcttccaaact

SEQ ID NO: 684497 - DNA, 15 bp, Homo sapiens
aatgcttccaaactg

SEQ ID NO: 684498 - DNA, 15 bp, Homo sapiens
atgcttccaaactgg

SEQ ID NO: 684499 - DNA, 15 bp, Homo sapiens
tgcttccaaactggt

SEQ ID NO: 684500 - DNA, 15 bp, Homo sapiens
gcttccaaactggta

SEQ ID NO: 684501 - DNA, 15 bp, Homo sapiens
cttccaaactggtag

SEQ ID NO: 684502 - DNA, 15 bp, Homo sapiens
ttccaaactggtagg

SEQ ID NO: 684503 - DNA, 15 bp, Homo sapiens
tccaaactggtaggg

SEQ ID NO: 684504 - DNA, 15 bp, Homo sapiens
ccaaactggtaggga

SEQ ID NO: 684505 - DNA, 15 bp, Homo sapiens
caaactggtagggag

SEQ ID NO: 684506 - DNA, 15 bp, Homo sapiens
aaactggtagggaga

SEQ ID NO: 684507 - DNA, 15 bp, Homo sapiens
aactggtagggagaa

SEQ ID NO: 684508 - DNA, 15 bp, Homo sapiens
actggtagggagaaa

SEQ ID NO: 684509 - DNA, 15 bp, Homo sapiens
ctggtagggagaaag

SEQ ID NO: 684510 - DNA, 15 bp, Homo sapiens
tggtagggagaaaga

SEQ ID NO: 684511 - DNA, 15 bp, Homo sapiens
ggtagggagaaagaa

SEQ ID NO: 684512 - DNA, 15 bp, Homo sapiens
gtagggagaaagaaa

SEQ ID NO: 684513 - DNA, 15 bp, Homo sapiens
tagggagaaagaaag

SEQ ID NO: 684514 - DNA, 15 bp, Homo sapiens
agggagaaagaaagg

SEQ ID NO: 684515 - DNA, 15 bp, Homo sapiens
gggagaaagaaaggt

SEQ ID NO: 684516 - DNA, 15 bp, Homo sapiens
ggagaaagaaaggtg

SEQ ID NO: 684517 - DNA, 15 bp, Homo sapiens
gagaaagaaaggtgg

SEQ ID NO: 684518 - DNA, 15 bp, Homo sapiens
agaaagaaaggtgga

SEQ ID NO: 684519 - DNA, 15 bp, Homo sapiens
gaaagaaaggtggaa

SEQ ID NO: 684520 - DNA, 15 bp, Homo sapiens
aaagaaaggtggaac

SEQ ID NO: 684521 - DNA, 15 bp, Homo sapiens
aagaaaggtggaaca

SEQ ID NO: 684522 - DNA, 15 bp, Homo sapiens
agaaaggtggaacat

SEQ ID NO: 684523 - DNA, 15 bp, Homo sapiens
gaaaggtggaacatg

SEQ ID NO: 684524 - DNA, 15 bp, Homo sapiens
aaaggtggaacatga

SEQ ID NO: 684525 - DNA, 15 bp, Homo sapiens
aaggtggaacatgat

SEQ ID NO: 684526 - DNA, 15 bp, Homo sapiens
aggtggaacatgatg

SEQ ID NO: 684527 - DNA, 15 bp, Homo sapiens
ggtggaacatgatga

SEQ ID NO: 684528 - DNA, 15 bp, Homo sapiens
gtggaacatgatgag

SEQ ID NO: 684529 - DNA, 15 bp, Homo sapiens
tggaacatgatgaga

SEQ ID NO: 684530 - DNA, 15 bp, Homo sapiens
ggaacatgatgagaa

SEQ ID NO: 684531 - DNA, 15 bp, Homo sapiens
gaacatgatgagaat

SEQ ID NO: 684532 - DNA, 15 bp, Homo sapiens
aacatgatgagaatg

SEQ ID NO: 684533 - DNA, 15 bp, Homo sapiens
acatgatgagaatga

SEQ ID NO: 684534 - DNA, 15 bp, Homo sapiens
catgatgagaatgac

SEQ ID NO: 684535 - DNA, 15 bp, Homo sapiens
atgatgagaatgacc

SEQ ID NO: 684536 - DNA, 15 bp, Homo sapiens
tgatgagaatgacct

SEQ ID NO: 684537 - DNA, 15 bp, Homo sapiens
gatgagaatgacctc

SEQ ID NO: 684538 - DNA, 15 bp, Homo sapiens
atgagaatgacctct

SEQ ID NO: 684539 - DNA, 15 bp, Homo sapiens
tgagaatgacctctg

SEQ ID NO: 684540 - DNA, 15 bp, Homo sapiens
gagaatgacctctgt

SEQ ID NO: 684541 - DNA, 15 bp, Homo sapiens
agaatgacctctgtt

SEQ ID NO: 684542 - DNA, 15 bp, Homo sapiens
gaatgacctctgttc

SEQ ID NO: 684543 - DNA, 15 bp, Homo sapiens
aatgacctctgttcc

SEQ ID NO: 684544 - DNA, 15 bp, Homo sapiens
atgacctctgttccc

SEQ ID NO: 684545 - DNA, 15 bp, Homo sapiens
tgacctctgttcccc

SEQ ID NO: 684546 - DNA, 15 bp, Homo sapiens
gacctctgttcccca

SEQ ID NO: 684547 - DNA, 15 bp, Homo sapiens
acctctgttccccaa

SEQ ID NO: 684548 - DNA, 15 bp, Homo sapiens
cctctgttccccaag

SEQ ID NO: 684549 - DNA, 15 bp, Homo sapiens
ctctgttccccaagc

SEQ ID NO: 684550 - DNA, 15 bp, Homo sapiens
tctgttccccaagcc

SEQ ID NO: 684551 - DNA, 15 bp, Homo sapiens
ctgttccccaagccc

SEQ ID NO: 684552 - DNA, 15 bp, Homo sapiens
tgttccccaagcccc

SEQ ID NO: 684553 - DNA, 15 bp, Homo sapiens
gttccccaagccccc

SEQ ID NO: 684554 - DNA, 15 bp, Homo sapiens
ttccccaagccccct

SEQ ID NO: 684555 - DNA, 15 bp, Homo sapiens
tccccaagccccctt

SEQ ID NO: 684556 - DNA, 15 bp, Homo sapiens
ccccaagcccccttt

SEQ ID NO: 684557 - DNA, 15 bp, Homo sapiens
cccaagccccctttc

SEQ ID NO: 684558 - DNA, 15 bp, Homo sapiens
ccaagccccctttca

SEQ ID NO: 684559 - DNA, 15 bp, Homo sapiens
caagccccctttcag

SEQ ID NO: 684560 - DNA, 15 bp, Homo sapiens
aagccccctttcagc

SEQ ID NO: 684561 - DNA, 15 bp, Homo sapiens
agccccctttcagct

SEQ ID NO: 684562 - DNA, 15 bp, Homo sapiens
gccccctttcagctc

SEQ ID NO: 684563 - DNA, 15 bp, Homo sapiens
ccccctttcagctca

SEQ ID NO: 684564 - DNA, 15 bp, Homo sapiens
cccctttcagctcag

SEQ ID NO: 684565 - DNA, 15 bp, Homo sapiens
ccctttcagctcaga

SEQ ID NO: 684566 - DNA, 15 bp, Homo sapiens
cctttcagctcagac

SEQ ID NO: 684567 - DNA, 15 bp, Homo sapiens
ctttcagctcagaca

SEQ ID NO: 684568 - DNA, 15 bp, Homo sapiens
tttcagctcagacat

SEQ ID NO: 684569 - DNA, 15 bp, Homo sapiens
ttcagctcagacatt

SEQ ID NO: 684570 - DNA, 15 bp, Homo sapiens
tcagctcagacattc

SEQ ID NO: 684571 - DNA, 15 bp, Homo sapiens
cagctcagacattct

SEQ ID NO: 684572 - DNA, 15 bp, Homo sapiens
agctcagacattctc

SEQ ID NO: 684573 - DNA, 15 bp, Homo sapiens
gctcagacattctct

SEQ ID NO: 684574 - DNA, 15 bp, Homo sapiens
ctcagacattctctc

SEQ ID NO: 684575 - DNA, 15 bp, Homo sapiens
tcagacattctctca

SEQ ID NO: 684576 - DNA, 15 bp, Homo sapiens
cagacattctctcat

SEQ ID NO: 684577 - DNA, 15 bp, Homo sapiens
agacattctctcatt

SEQ ID NO: 684578 - DNA, 15 bp, Homo sapiens
gacattctctcattt

SEQ ID NO: 684579 - DNA, 15 bp, Homo sapiens
acattctctcatttt

SEQ ID NO: 684580 - DNA, 15 bp, Homo sapiens
cattctctcatttta

SEQ ID NO: 684581 - DNA, 15 bp, Homo sapiens
attctctcattttaa

SEQ ID NO: 684582 - DNA, 15 bp, Homo sapiens
ttctctcattttaaa

SEQ ID NO: 684583 - DNA, 15 bp, Homo sapiens
tctctcattttaaat

SEQ ID NO: 684584 - DNA, 15 bp, Homo sapiens
ctctcattttaaatt

SEQ ID NO: 684585 - DNA, 15 bp, Homo sapiens
tctcattttaaattt

SEQ ID NO: 684586 - DNA, 15 bp, Homo sapiens
ctcattttaaatttg

SEQ ID NO: 684587 - DNA, 15 bp, Homo sapiens
tcattttaaatttgg

SEQ ID NO: 684588 - DNA, 15 bp, Homo sapiens
cattttaaatttggc

SEQ ID NO: 684589 - DNA, 15 bp, Homo sapiens
attttaaatttggcc

SEQ ID NO: 684590 - DNA, 15 bp, Homo sapiens
ttttaaatttggcca

SEQ ID NO: 684591 - DNA, 15 bp, Homo sapiens
tttaaatttggccat

SEQ ID NO: 684592 - DNA, 15 bp, Homo sapiens
ttaaatttggccatg

SEQ ID NO: 684593 - DNA, 15 bp, Homo sapiens
taaatttggccatgg

SEQ ID NO: 684594 - DNA, 15 bp, Homo sapiens
aaatttggccatgga

SEQ ID NO: 684595 - DNA, 15 bp, Homo sapiens
aatttggccatggaa

SEQ ID NO: 684596 - DNA, 15 bp, Homo sapiens
atttggccatggaaa

SEQ ID NO: 684597 - DNA, 15 bp, Homo sapiens
tttggccatggaaat

SEQ ID NO: 684598 - DNA, 15 bp, Homo sapiens
ttggccatggaaatg

SEQ ID NO: 684599 - DNA, 15 bp, Homo sapiens
tggccatggaaatga

SEQ ID NO: 684600 - DNA, 15 bp, Homo sapiens
ggccatggaaatgac

SEQ ID NO: 684601 - DNA, 15 bp, Homo sapiens
gccatggaaatgaca

SEQ ID NO: 684602 - DNA, 15 bp, Homo sapiens
ccatggaaatgacaa

SEQ ID NO: 684603 - DNA, 15 bp, Homo sapiens
catggaaatgacaat

SEQ ID NO: 684604 - DNA, 15 bp, Homo sapiens
atggaaatgacaatt

SEQ ID NO: 684605 - DNA, 15 bp, Homo sapiens
tggaaatgacaattt

SEQ ID NO: 684606 - DNA, 15 bp, Homo sapiens
ggaaatgacaatttg

SEQ ID NO: 684607 - DNA, 15 bp, Homo sapiens
gaaatgacaatttga

SEQ ID NO: 684608 - DNA, 15 bp, Homo sapiens
aaatgacaatttgag

SEQ ID NO: 684609 - DNA, 15 bp, Homo sapiens
aatgacaatttgagg

SEQ ID NO: 684610 - DNA, 15 bp, Homo sapiens
atgacaatttgaggc

SEQ ID NO: 684611 - DNA, 15 bp, Homo sapiens
tgacaatttgaggca

SEQ ID NO: 684612 - DNA, 15 bp, Homo sapiens
gacaatttgaggcac

SEQ ID NO: 684613 - DNA, 15 bp, Homo sapiens
acaatttgaggcact

SEQ ID NO: 684614 - DNA, 15 bp, Homo sapiens
caatttgaggcactc

SEQ ID NO: 684615 - DNA, 15 bp, Homo sapiens
aatttgaggcactcc

SEQ ID NO: 684616 - DNA, 15 bp, Homo sapiens
atttgaggcactcca

SEQ ID NO: 684617 - DNA, 15 bp, Homo sapiens
tttgaggcactccaa

SEQ ID NO: 684618 - DNA, 15 bp, Homo sapiens
ttgaggcactccaag

SEQ ID NO: 684619 - DNA, 15 bp, Homo sapiens
tgaggcactccaaga

SEQ ID NO: 684620 - DNA, 15 bp, Homo sapiens
gaggcactccaagaa

SEQ ID NO: 684621 - DNA, 15 bp, Homo sapiens
aggcactccaagaac

SEQ ID NO: 684622 - DNA, 15 bp, Homo sapiens
ggcactccaagaacc

SEQ ID NO: 684623 - DNA, 15 bp, Homo sapiens
gcactccaagaacct

SEQ ID NO: 684624 - DNA, 15 bp, Homo sapiens
cactccaagaacctg

SEQ ID NO: 684625 - DNA, 15 bp, Homo sapiens
actccaagaacctgg

SEQ ID NO: 684626 - DNA, 15 bp, Homo sapiens
ctccaagaacctggc

SEQ ID NO: 684627 - DNA, 15 bp, Homo sapiens
tccaagaacctggct

SEQ ID NO: 684628 - DNA, 15 bp, Homo sapiens
ccaagaacctggctc

SEQ ID NO: 684629 - DNA, 15 bp, Homo sapiens
caagaacctggctct

SEQ ID NO: 684630 - DNA, 15 bp, Homo sapiens
aagaacctggctctt

SEQ ID NO: 684631 - DNA, 15 bp, Homo sapiens
agaacctggctcttt

SEQ ID NO: 684632 - DNA, 15 bp, Homo sapiens
gaacctggctctttg

SEQ ID NO: 684633 - DNA, 15 bp, Homo sapiens
aacctggctctttgc

SEQ ID NO: 684634 - DNA, 15 bp, Homo sapiens
acctggctctttgca

SEQ ID NO: 684635 - DNA, 15 bp, Homo sapiens
cctggctctttgcag

SEQ ID NO: 684636 - DNA, 15 bp, Homo sapiens
ctggctctttgcaga

SEQ ID NO: 684637 - DNA, 15 bp, Homo sapiens
tggctctttgcagat

SEQ ID NO: 684638 - DNA, 15 bp, Homo sapiens
ggctctttgcagatg

SEQ ID NO: 684639 - DNA, 15 bp, Homo sapiens
gctctttgcagatga

SEQ ID NO: 684640 - DNA, 15 bp, Homo sapiens
ctctttgcagatgag

SEQ ID NO: 684641 - DNA, 15 bp, Homo sapiens
tctttgcagatgagt

SEQ ID NO: 684642 - DNA, 15 bp, Homo sapiens
ctttgcagatgagtg

SEQ ID NO: 684643 - DNA, 15 bp, Homo sapiens
tttgcagatgagtga

SEQ ID NO: 684644 - DNA, 15 bp, Homo sapiens
ttgcagatgagtgaa

SEQ ID NO: 684645 - DNA, 15 bp, Homo sapiens
tgcagatgagtgaaa

SEQ ID NO: 684646 - DNA, 15 bp, Homo sapiens
gcagatgagtgaaag

SEQ ID NO: 684647 - DNA, 15 bp, Homo sapiens
cagatgagtgaaagt

SEQ ID NO: 684648 - DNA, 15 bp, Homo sapiens
agatgagtgaaagtt

SEQ ID NO: 684649 - DNA, 15 bp, Homo sapiens
gatgagtgaaagttg

SEQ ID NO: 684650 - DNA, 15 bp, Homo sapiens
atgagtgaaagttgt

SEQ ID NO: 684651 - DNA, 15 bp, Homo sapiens
tgagtgaaagttgtg

SEQ ID NO: 684652 - DNA, 15 bp, Homo sapiens
gagtgaaagttgtgc

SEQ ID NO: 684653 - DNA, 15 bp, Homo sapiens
agtgaaagttgtgct

SEQ ID NO: 684654 - DNA, 15 bp, Homo sapiens
gtgaaagttgtgcta

SEQ ID NO: 684655 - DNA, 15 bp, Homo sapiens
tgaaagttgtgctaa

SEQ ID NO: 684656 - DNA, 15 bp, Homo sapiens
gaaagttgtgctaag

SEQ ID NO: 684657 - DNA, 15 bp, Homo sapiens
aaagttgtgctaagt

SEQ ID NO: 684658 - DNA, 15 bp, Homo sapiens
aagttgtgctaagta

SEQ ID NO: 684659 - DNA, 15 bp, Homo sapiens
agttgtgctaagtaa

SEQ ID NO: 684660 - DNA, 15 bp, Homo sapiens
gttgtgctaagtaag

SEQ ID NO: 684661 - DNA, 15 bp, Homo sapiens
ttgtgctaagtaaga

SEQ ID NO: 684662 - DNA, 15 bp, Homo sapiens
tgtgctaagtaagac

SEQ ID NO: 684663 - DNA, 15 bp, Homo sapiens
gtgctaagtaagaca

SEQ ID NO: 684664 - DNA, 15 bp, Homo sapiens
tgctaagtaagacac

SEQ ID NO: 684665 - DNA, 15 bp, Homo sapiens
gctaagtaagacact

SEQ ID NO: 684666 - DNA, 15 bp, Homo sapiens
ctaagtaagacactg

SEQ ID NO: 684667 - DNA, 15 bp, Homo sapiens
taagtaagacactgg

SEQ ID NO: 684668 - DNA, 15 bp, Homo sapiens
aagtaagacactgga

SEQ ID NO: 684669 - DNA, 15 bp, Homo sapiens
agtaagacactggag

SEQ ID NO: 684670 - DNA, 15 bp, Homo sapiens
gtaagacactggaga

SEQ ID NO: 684671 - DNA, 15 bp, Homo sapiens
taagacactggagag

SEQ ID NO: 684672 - DNA, 15 bp, Homo sapiens
aagacactggagagg

SEQ ID NO: 684673 - DNA, 15 bp, Homo sapiens
agacactggagaggc

SEQ ID NO: 684674 - DNA, 15 bp, Homo sapiens
gacactggagaggct

SEQ ID NO: 684675 - DNA, 15 bp, Homo sapiens
acactggagaggctg

SEQ ID NO: 684676 - DNA, 15 bp, Homo sapiens
cactggagaggctgt

SEQ ID NO: 684677 - DNA, 15 bp, Homo sapiens
actggagaggctgtc

SEQ ID NO: 684678 - DNA, 15 bp, Homo sapiens
ctggagaggctgtct

SEQ ID NO: 684679 - DNA, 15 bp, Homo sapiens
tggagaggctgtctg

SEQ ID NO: 684680 - DNA, 15 bp, Homo sapiens
ggagaggctgtctga

SEQ ID NO: 684681 - DNA, 15 bp, Homo sapiens
gagaggctgtctgag

SEQ ID NO: 684682 - DNA, 15 bp, Homo sapiens
agaggctgtctgaga

SEQ ID NO: 684683 - DNA, 15 bp, Homo sapiens
gaggctgtctgagag

SEQ ID NO: 684684 - DNA, 15 bp, Homo sapiens
aggctgtctgagagg

SEQ ID NO: 684685 - DNA, 15 bp, Homo sapiens
ggctgtctgagaggt

SEQ ID NO: 684686 - DNA, 15 bp, Homo sapiens
gctgtctgagaggtg

SEQ ID NO: 684687 - DNA, 15 bp, Homo sapiens
ctgtctgagaggtga

SEQ ID NO: 684688 - DNA, 15 bp, Homo sapiens
tgtctgagaggtgag

SEQ ID NO: 684689 - DNA, 15 bp, Homo sapiens
gtctgagaggtgaga

SEQ ID NO: 684690 - DNA, 15 bp, Homo sapiens
tctgagaggtgagag

SEQ ID NO: 684691 - DNA, 15 bp, Homo sapiens
ctgagaggtgagagt

SEQ ID NO: 684692 - DNA, 15 bp, Homo sapiens
tgagaggtgagagtg

SEQ ID NO: 684693 - DNA, 15 bp, Homo sapiens
gagaggtgagagtgt

SEQ ID NO: 684694 - DNA, 15 bp, Homo sapiens
agaggtgagagtgtg

SEQ ID NO: 684695 - DNA, 15 bp, Homo sapiens
gaggtgagagtgtgg

SEQ ID NO: 684696 - DNA, 15 bp, Homo sapiens
aggtgagagtgtggc

SEQ ID NO: 684697 - DNA, 15 bp, Homo sapiens
ggtgagagtgtggca

SEQ ID NO: 684698 - DNA, 15 bp, Homo sapiens
gtgagagtgtggcag

SEQ ID NO: 684699 - DNA, 15 bp, Homo sapiens
tgagagtgtggcagg

SEQ ID NO: 684700 - DNA, 15 bp, Homo sapiens
gagagtgtggcaggg

SEQ ID NO: 684701 - DNA, 15 bp, Homo sapiens
agagtgtggcagggg

SEQ ID NO: 684702 - DNA, 15 bp, Homo sapiens
gagtgtggcaggggc

SEQ ID NO: 684703 - DNA, 15 bp, Homo sapiens
agtgtggcaggggct

SEQ ID NO: 684704 - DNA, 15 bp, Homo sapiens
gtgtggcaggggctg

SEQ ID NO: 684705 - DNA, 15 bp, Homo sapiens
tgtggcaggggctgt

SEQ ID NO: 684706 - DNA, 15 bp, Homo sapiens
gtggcaggggctgtc

SEQ ID NO: 684707 - DNA, 15 bp, Homo sapiens
tggcaggggctgtct

SEQ ID NO: 684708 - DNA, 15 bp, Homo sapiens
ggcaggggctgtctg

SEQ ID NO: 684709 - DNA, 15 bp, Homo sapiens
gcaggggctgtctgg

SEQ ID NO: 684710 - DNA, 15 bp, Homo sapiens
caggggctgtctggc

SEQ ID NO: 684711 - DNA, 15 bp, Homo sapiens
aggggctgtctggcc

SEQ ID NO: 684712 - DNA, 15 bp, Homo sapiens
ggggctgtctggcca

SEQ ID NO: 684713 - DNA, 15 bp, Homo sapiens
gggctgtctggccat

SEQ ID NO: 684714 - DNA, 15 bp, Homo sapiens
ggctgtctggccata

SEQ ID NO: 684715 - DNA, 15 bp, Homo sapiens
gctgtctggccataa

SEQ ID NO: 684716 - DNA, 15 bp, Homo sapiens
ctgtctggccataat

SEQ ID NO: 684717 - DNA, 15 bp, Homo sapiens
tgtctggccataatc

SEQ ID NO: 684718 - DNA, 15 bp, Homo sapiens
gtctggccataatca

SEQ ID NO: 684719 - DNA, 15 bp, Homo sapiens
tctggccataatcag

SEQ ID NO: 684720 - DNA, 15 bp, Homo sapiens
ctggccataatcaga

SEQ ID NO: 684721 - DNA, 15 bp, Homo sapiens
tggccataatcagaa

SEQ ID NO: 684722 - DNA, 15 bp, Homo sapiens
ggccataatcagaat

SEQ ID NO: 684723 - DNA, 15 bp, Homo sapiens
gccataatcagaatg

SEQ ID NO: 684724 - DNA, 15 bp, Homo sapiens
ccataatcagaatgt

SEQ ID NO: 684725 - DNA, 15 bp, Homo sapiens
cataatcagaatgtg

SEQ ID NO: 684726 - DNA, 15 bp, Homo sapiens
ataatcagaatgtga

SEQ ID NO: 684727 - DNA, 15 bp, Homo sapiens
taatcagaatgtgat

SEQ ID NO: 684728 - DNA, 15 bp, Homo sapiens
aatcagaatgtgatt

SEQ ID NO: 684729 - DNA, 15 bp, Homo sapiens
atcagaatgtgattg

SEQ ID NO: 684730 - DNA, 15 bp, Homo sapiens
tcagaatgtgattgt

SEQ ID NO: 684731 - DNA, 15 bp, Homo sapiens
cagaatgtgattgtg

SEQ ID NO: 684732 - DNA, 15 bp, Homo sapiens
agaatgtgattgtgg

SEQ ID NO: 684733 - DNA, 15 bp, Homo sapiens
gaatgtgattgtgga

SEQ ID NO: 684734 - DNA, 15 bp, Homo sapiens
aatgtgattgtggag

SEQ ID NO: 684735 - DNA, 15 bp, Homo sapiens
atgtgattgtggagg

SEQ ID NO: 684736 - DNA, 15 bp, Homo sapiens
tgtgattgtggagga

SEQ ID NO: 684737 - DNA, 15 bp, Homo sapiens
gtgattgtggaggaa

SEQ ID NO: 684738 - DNA, 15 bp, Homo sapiens
tgattgtggaggaac

SEQ ID NO: 684739 - DNA, 15 bp, Homo sapiens
gattgtggaggaaca

SEQ ID NO: 684740 - DNA, 15 bp, Homo sapiens
attgtggaggaacaa

SEQ ID NO: 684741 - DNA, 15 bp, Homo sapiens
ttgtggaggaacaac

SEQ ID NO: 684742 - DNA, 15 bp, Homo sapiens
tgtggaggaacaacc

SEQ ID NO: 684743 - DNA, 15 bp, Homo sapiens
gtggaggaacaacct

SEQ ID NO: 684744 - DNA, 15 bp, Homo sapiens
tggaggaacaacctg

SEQ ID NO: 684745 - DNA, 15 bp, Homo sapiens
ggaggaacaacctga

SEQ ID NO: 684746 - DNA, 15 bp, Homo sapiens
gaggaacaacctgaa

SEQ ID NO: 684747 - DNA, 15 bp, Homo sapiens
aggaacaacctgaac

SEQ ID NO: 684748 - DNA, 15 bp, Homo sapiens
ggaacaacctgaacc

SEQ ID NO: 684749 - DNA, 15 bp, Homo sapiens
gaacaacctgaacca

SEQ ID NO: 684750 - DNA, 15 bp, Homo sapiens
aacaacctgaaccaa

SEQ ID NO: 684751 - DNA, 15 bp, Homo sapiens
acaacctgaaccaat

SEQ ID NO: 684752 - DNA, 15 bp, Homo sapiens
caacctgaaccaatg

SEQ ID NO: 684753 - DNA, 15 bp, Homo sapiens
aacctgaaccaatgc

SEQ ID NO: 684754 - DNA, 15 bp, Homo sapiens
acctgaaccaatgcc

SEQ ID NO: 684755 - DNA, 15 bp, Homo sapiens
cctgaaccaatgccc

SEQ ID NO: 684756 - DNA, 15 bp, Homo sapiens
ctgaaccaatgcccc

SEQ ID NO: 684757 - DNA, 15 bp, Homo sapiens
tgaaccaatgcccct

SEQ ID NO: 684758 - DNA, 15 bp, Homo sapiens
gaaccaatgcccctc

SEQ ID NO: 684759 - DNA, 15 bp, Homo sapiens
aaccaatgcccctca

SEQ ID NO: 684760 - DNA, 15 bp, Homo sapiens
accaatgcccctcat

SEQ ID NO: 684761 - DNA, 15 bp, Homo sapiens
ccaatgcccctcatg

SEQ ID NO: 684762 - DNA, 15 bp, Homo sapiens
caatgcccctcatgg

SEQ ID NO: 684763 - DNA, 15 bp, Homo sapiens
aatgcccctcatggc

SEQ ID NO: 684764 - DNA, 15 bp, Homo sapiens
atgcccctcatggct

SEQ ID NO: 684765 - DNA, 15 bp, Homo sapiens
tgcccctcatggctg

SEQ ID NO: 684766 - DNA, 15 bp, Homo sapiens
gcccctcatggctgg

SEQ ID NO: 684767 - DNA, 15 bp, Homo sapiens
cccctcatggctgga

SEQ ID NO: 684768 - DNA, 15 bp, Homo sapiens
ccctcatggctggag

SEQ ID NO: 684769 - DNA, 15 bp, Homo sapiens
cctcatggctggagg

SEQ ID NO: 684770 - DNA, 15 bp, Homo sapiens
ctcatggctggagga

SEQ ID NO: 684771 - DNA, 15 bp, Homo sapiens
tcatggctggaggag

SEQ ID NO: 684772 - DNA, 15 bp, Homo sapiens
catggctggaggagt

SEQ ID NO: 684773 - DNA, 15 bp, Homo sapiens
atggctggaggagtc

SEQ ID NO: 684774 - DNA, 15 bp, Homo sapiens
tggctggaggagtct

SEQ ID NO: 684775 - DNA, 15 bp, Homo sapiens
ggctggaggagtctg

SEQ ID NO: 684776 - DNA, 15 bp, Homo sapiens
gctggaggagtctga

SEQ ID NO: 684777 - DNA, 15 bp, Homo sapiens
ctggaggagtctgaa

SEQ ID NO: 684778 - DNA, 15 bp, Homo sapiens
tggaggagtctgaaa

SEQ ID NO: 684779 - DNA, 15 bp, Homo sapiens
ggaggagtctgaaaa

SEQ ID NO: 684780 - DNA, 15 bp, Homo sapiens
gaggagtctgaaaag

SEQ ID NO: 684781 - DNA, 15 bp, Homo sapiens
aggagtctgaaaaga

SEQ ID NO: 684782 - DNA, 15 bp, Homo sapiens
ggagtctgaaaagaa

SEQ ID NO: 684783 - DNA, 15 bp, Homo sapiens
gagtctgaaaagaac

SEQ ID NO: 684784 - DNA, 15 bp, Homo sapiens
agtctgaaaagaaca

SEQ ID NO: 684785 - DNA, 15 bp, Homo sapiens
gtctgaaaagaacat

SEQ ID NO: 684786 - DNA, 15 bp, Homo sapiens
tctgaaaagaacatt

SEQ ID NO: 684787 - DNA, 15 bp, Homo sapiens
ctgaaaagaacatta

SEQ ID NO: 684788 - DNA, 15 bp, Homo sapiens
tgaaaagaacattac

SEQ ID NO: 684789 - DNA, 15 bp, Homo sapiens
gaaaagaacattaca

SEQ ID NO: 684790 - DNA, 15 bp, Homo sapiens
aaaagaacattacat

SEQ ID NO: 684791 - DNA, 15 bp, Homo sapiens
aaagaacattacatg

SEQ ID NO: 684792 - DNA, 15 bp, Homo sapiens
aagaacattacatgc

SEQ ID NO: 684793 - DNA, 15 bp, Homo sapiens
agaacattacatgct

SEQ ID NO: 684794 - DNA, 15 bp, Homo sapiens
gaacattacatgctg

SEQ ID NO: 684795 - DNA, 15 bp, Homo sapiens
aacattacatgctgg

SEQ ID NO: 684796 - DNA, 15 bp, Homo sapiens
acattacatgctgga

SEQ ID NO: 684797 - DNA, 15 bp, Homo sapiens
cattacatgctggag

SEQ ID NO: 684798 - DNA, 15 bp, Homo sapiens
attacatgctggagc

SEQ ID NO: 684799 - DNA, 15 bp, Homo sapiens
ttacatgctggagct

SEQ ID NO: 684800 - DNA, 15 bp, Homo sapiens
tacatgctggagctg

SEQ ID NO: 684801 - DNA, 15 bp, Homo sapiens
acatgctggagctgt

SEQ ID NO: 684802 - DNA, 15 bp, Homo sapiens
catgctggagctgtt

SEQ ID NO: 684803 - DNA, 15 bp, Homo sapiens
atgctggagctgttt

SEQ ID NO: 684804 - DNA, 15 bp, Homo sapiens
tgctggagctgtttg

SEQ ID NO: 684805 - DNA, 15 bp, Homo sapiens
gctggagctgtttgc

SEQ ID NO: 684806 - DNA, 15 bp, Homo sapiens
ctggagctgtttgct

SEQ ID NO: 684807 - DNA, 15 bp, Homo sapiens
tggagctgtttgctg

SEQ ID NO: 684808 - DNA, 15 bp, Homo sapiens
ggagctgtttgctga

SEQ ID NO: 684809 - DNA, 15 bp, Homo sapiens
gagctgtttgctgat

SEQ ID NO: 684810 - DNA, 15 bp, Homo sapiens
agctgtttgctgatc

SEQ ID NO: 684811 - DNA, 15 bp, Homo sapiens
gctgtttgctgatct

SEQ ID NO: 684812 - DNA, 15 bp, Homo sapiens
ctgtttgctgatctc

SEQ ID NO: 684813 - DNA, 15 bp, Homo sapiens
tgtttgctgatctct

SEQ ID NO: 684814 - DNA, 15 bp, Homo sapiens
gtttgctgatctctc

SEQ ID NO: 684815 - DNA, 15 bp, Homo sapiens
tttgctgatctctcc

SEQ ID NO: 684816 - DNA, 15 bp, Homo sapiens
ttgctgatctctccg

SEQ ID NO: 684817 - DNA, 15 bp, Homo sapiens
tgctgatctctccgt

SEQ ID NO: 684818 - DNA, 15 bp, Homo sapiens
gctgatctctccgtc

SEQ ID NO: 684819 - DNA, 15 bp, Homo sapiens
ctgatctctccgtcc

SEQ ID NO: 684820 - DNA, 15 bp, Homo sapiens
tgatctctccgtcca

SEQ ID NO: 684821 - DNA, 15 bp, Homo sapiens
gatctctccgtccag

SEQ ID NO: 684822 - DNA, 15 bp, Homo sapiens
atctctccgtccagg

SEQ ID NO: 684823 - DNA, 15 bp, Homo sapiens
tctctccgtccaggt

SEQ ID NO: 684824 - DNA, 15 bp, Homo sapiens
ctctccgtccaggtg

SEQ ID NO: 684825 - DNA, 15 bp, Homo sapiens
tctccgtccaggtgt

SEQ ID NO: 684826 - DNA, 15 bp, Homo sapiens
ctccgtccaggtgtt

SEQ ID NO: 684827 - DNA, 15 bp, Homo sapiens
tccgtccaggtgtta

SEQ ID NO: 684828 - DNA, 15 bp, Homo sapiens
ccgtccaggtgttag

SEQ ID NO: 684829 - DNA, 15 bp, Homo sapiens
cgtccaggtgttagc

SEQ ID NO: 684830 - DNA, 15 bp, Homo sapiens
gtccaggtgttagcc

SEQ ID NO: 684831 - DNA, 15 bp, Homo sapiens
tccaggtgttagcca

SEQ ID NO: 684832 - DNA, 15 bp, Homo sapiens
ccaggtgttagccaa

SEQ ID NO: 684833 - DNA, 15 bp, Homo sapiens
caggtgttagccaaa

SEQ ID NO: 684834 - DNA, 15 bp, Homo sapiens
aggtgttagccaaag

SEQ ID NO: 684835 - DNA, 15 bp, Homo sapiens
ggtgttagccaaagt

SEQ ID NO: 684836 - DNA, 15 bp, Homo sapiens
gtgttagccaaagtc

SEQ ID NO: 684837 - DNA, 15 bp, Homo sapiens
tgttagccaaagtca

SEQ ID NO: 684838 - DNA, 15 bp, Homo sapiens
gttagccaaagtcag

SEQ ID NO: 684839 - DNA, 15 bp, Homo sapiens
ttagccaaagtcaga

SEQ ID NO: 684840 - DNA, 15 bp, Homo sapiens
tagccaaagtcagat

SEQ ID NO: 684841 - DNA, 15 bp, Homo sapiens
agccaaagtcagatg

SEQ ID NO: 684842 - DNA, 15 bp, Homo sapiens
gccaaagtcagatgc

SEQ ID NO: 684843 - DNA, 15 bp, Homo sapiens
ccaaagtcagatgct

SEQ ID NO: 684844 - DNA, 15 bp, Homo sapiens
caaagtcagatgctc

SEQ ID NO: 684845 - DNA, 15 bp, Homo sapiens
aaagtcagatgctct

SEQ ID NO: 684846 - DNA, 15 bp, Homo sapiens
aagtcagatgctctg

SEQ ID NO: 684847 - DNA, 15 bp, Homo sapiens
agtcagatgctctgg

SEQ ID NO: 684848 - DNA, 15 bp, Homo sapiens
gtcagatgctctggc

SEQ ID NO: 684849 - DNA, 15 bp, Homo sapiens
tcagatgctctggcc

SEQ ID NO: 684850 - DNA, 15 bp, Homo sapiens
cagatgctctggcca

SEQ ID NO: 684851 - DNA, 15 bp, Homo sapiens
agatgctctggccac

SEQ ID NO: 684852 - DNA, 15 bp, Homo sapiens
gatgctctggccaca

SEQ ID NO: 684853 - DNA, 15 bp, Homo sapiens
atgctctggccacag

SEQ ID NO: 684854 - DNA, 15 bp, Homo sapiens
tgctctggccacagc

SEQ ID NO: 684855 - DNA, 15 bp, Homo sapiens
gctctggccacagcc

SEQ ID NO: 684856 - DNA, 15 bp, Homo sapiens
ctctggccacagcct

SEQ ID NO: 684857 - DNA, 15 bp, Homo sapiens
tctggccacagcctc

SEQ ID NO: 684858 - DNA, 15 bp, Homo sapiens
ctggccacagcctcg

SEQ ID NO: 684859 - DNA, 15 bp, Homo sapiens
tggccacagcctcgg

SEQ ID NO: 684860 - DNA, 15 bp, Homo sapiens
ggccacagcctcggg

SEQ ID NO: 684861 - DNA, 15 bp, Homo sapiens
gccacagcctcgggt

SEQ ID NO: 684862 - DNA, 15 bp, Homo sapiens
ccacagcctcgggtg

SEQ ID NO: 684863 - DNA, 15 bp, Homo sapiens
cacagcctcgggtgg

SEQ ID NO: 684864 - DNA, 15 bp, Homo sapiens
acagcctcgggtgga

SEQ ID NO: 684865 - DNA, 15 bp, Homo sapiens
cagcctcgggtggac

SEQ ID NO: 684866 - DNA, 15 bp, Homo sapiens
agcctcgggtggaca

SEQ ID NO: 684867 - DNA, 15 bp, Homo sapiens
gcctcgggtggacaa

SEQ ID NO: 684868 - DNA, 15 bp, Homo sapiens
cctcgggtggacaag

SEQ ID NO: 684869 - DNA, 15 bp, Homo sapiens
ctcgggtggacaaga

SEQ ID NO: 684870 - DNA, 15 bp, Homo sapiens
tcgggtggacaagag

SEQ ID NO: 684871 - DNA, 15 bp, Homo sapiens
cgggtggacaagagg

SEQ ID NO: 684872 - DNA, 15 bp, Homo sapiens
gggtggacaagaggc

SEQ ID NO: 684873 - DNA, 15 bp, Homo sapiens
ggtggacaagaggcg

SEQ ID NO: 684874 - DNA, 15 bp, Homo sapiens
gtggacaagaggcgc

SEQ ID NO: 684875 - DNA, 15 bp, Homo sapiens
tggacaagaggcgca

SEQ ID NO: 684876 - DNA, 15 bp, Homo sapiens
ggacaagaggcgcac

SEQ ID NO: 684877 - DNA, 15 bp, Homo sapiens
gacaagaggcgcact

SEQ ID NO: 684878 - DNA, 15 bp, Homo sapiens
acaagaggcgcactc

SEQ ID NO: 684879 - DNA, 15 bp, Homo sapiens
caagaggcgcactca

SEQ ID NO: 684880 - DNA, 15 bp, Homo sapiens
aagaggcgcactcat

SEQ ID NO: 684881 - DNA, 15 bp, Homo sapiens
agaggcgcactcatg

SEQ ID NO: 684882 - DNA, 15 bp, Homo sapiens
gaggcgcactcatga

SEQ ID NO: 684883 - DNA, 15 bp, Homo sapiens
aggcgcactcatgac

SEQ ID NO: 684884 - DNA, 15 bp, Homo sapiens
ggcgcactcatgact

SEQ ID NO: 684885 - DNA, 15 bp, Homo sapiens
gcgcactcatgactc

SEQ ID NO: 684886 - DNA, 15 bp, Homo sapiens
cgcactcatgactct

SEQ ID NO: 684887 - DNA, 15 bp, Homo sapiens
gcactcatgactctt

SEQ ID NO: 684888 - DNA, 15 bp, Homo sapiens
cactcatgactctta

SEQ ID NO: 684889 - DNA, 15 bp, Homo sapiens
actcatgactcttaa

SEQ ID NO: 684890 - DNA, 15 bp, Homo sapiens
ctcatgactcttaac

SEQ ID NO: 684891 - DNA, 15 bp, Homo sapiens
tcatgactcttaaca

SEQ ID NO: 684892 - DNA, 15 bp, Homo sapiens
catgactcttaacaa

SEQ ID NO: 684893 - DNA, 15 bp, Homo sapiens
atgactcttaacaac

SEQ ID NO: 684894 - DNA, 15 bp, Homo sapiens
tgactcttaacaaca

SEQ ID NO: 684895 - DNA, 15 bp, Homo sapiens
gactcttaacaacag

SEQ ID NO: 684896 - DNA, 15 bp, Homo sapiens
actcttaacaacagc

SEQ ID NO: 684897 - DNA, 15 bp, Homo sapiens
ctcttaacaacagca

SEQ ID NO: 684898 - DNA, 15 bp, Homo sapiens
tcttaacaacagcac

SEQ ID NO: 684899 - DNA, 15 bp, Homo sapiens
cttaacaacagcacc

SEQ ID NO: 684900 - DNA, 15 bp, Homo sapiens
ttaacaacagcacct

SEQ ID NO: 684901 - DNA, 15 bp, Homo sapiens
taacaacagcaccta

SEQ ID NO: 684902 - DNA, 15 bp, Homo sapiens
aacaacagcacctac

SEQ ID NO: 684903 - DNA, 15 bp, Homo sapiens
acaacagcacctacc

SEQ ID NO: 684904 - DNA, 15 bp, Homo sapiens
caacagcacctaccc

SEQ ID NO: 684905 - DNA, 15 bp, Homo sapiens
aacagcacctaccct

SEQ ID NO: 684906 - DNA, 15 bp, Homo sapiens
acagcacctaccctc

SEQ ID NO: 684907 - DNA, 15 bp, Homo sapiens
cagcacctaccctca

SEQ ID NO: 684908 - DNA, 15 bp, Homo sapiens
agcacctaccctcaa

SEQ ID NO: 684909 - DNA, 15 bp, Homo sapiens
gcacctaccctcaag

SEQ ID NO: 684910 - DNA, 15 bp, Homo sapiens
cacctaccctcaagc

SEQ ID NO: 684911 - DNA, 15 bp, Homo sapiens
acctaccctcaagcc

SEQ ID NO: 684912 - DNA, 15 bp, Homo sapiens
cctaccctcaagcca

SEQ ID NO: 684913 - DNA, 15 bp, Homo sapiens
ctaccctcaagccag

SEQ ID NO: 684914 - DNA, 15 bp, Homo sapiens
taccctcaagccagc

SEQ ID NO: 684915 - DNA, 15 bp, Homo sapiens
accctcaagccagca

SEQ ID NO: 684916 - DNA, 15 bp, Homo sapiens
ccctcaagccagcaa

SEQ ID NO: 684917 - DNA, 15 bp, Homo sapiens
cctcaagccagcaaa

SEQ ID NO: 684918 - DNA, 15 bp, Homo sapiens
ctcaagccagcaaat

SEQ ID NO: 684919 - DNA, 15 bp, Homo sapiens
tcaagccagcaaatg

SEQ ID NO: 684920 - DNA, 15 bp, Homo sapiens
caagccagcaaatgg

SEQ ID NO: 684921 - DNA, 15 bp, Homo sapiens
aagccagcaaatgga

SEQ ID NO: 684922 - DNA, 15 bp, Homo sapiens
agccagcaaatggag

SEQ ID NO: 684923 - DNA, 15 bp, Homo sapiens
gccagcaaatggagg

SEQ ID NO: 684924 - DNA, 15 bp, Homo sapiens
ccagcaaatggagga

SEQ ID NO: 684925 - DNA, 15 bp, Homo sapiens
cagcaaatggaggag

SEQ ID NO: 684926 - DNA, 15 bp, Homo sapiens
agcaaatggaggagc

SEQ ID NO: 684927 - DNA, 15 bp, Homo sapiens
gcaaatggaggagcc

SEQ ID NO: 684928 - DNA, 15 bp, Homo sapiens
caaatggaggagcca

SEQ ID NO: 684929 - DNA, 15 bp, Homo sapiens
aaatggaggagccag

SEQ ID NO: 684930 - DNA, 15 bp, Homo sapiens
aatggaggagccagg

SEQ ID NO: 684931 - DNA, 15 bp, Homo sapiens
atggaggagccagga

SEQ ID NO: 684932 - DNA, 15 bp, Homo sapiens
tggaggagccaggat

SEQ ID NO: 684933 - DNA, 15 bp, Homo sapiens
ggaggagccaggatt

SEQ ID NO: 684934 - DNA, 15 bp, Homo sapiens
gaggagccaggattt

SEQ ID NO: 684935 - DNA, 15 bp, Homo sapiens
aggagccaggatttg

SEQ ID NO: 684936 - DNA, 15 bp, Homo sapiens
ggagccaggatttga

SEQ ID NO: 684937 - DNA, 15 bp, Homo sapiens
gagccaggatttgag

SEQ ID NO: 684938 - DNA, 15 bp, Homo sapiens
agccaggatttgagc

SEQ ID NO: 684939 - DNA, 15 bp, Homo sapiens
gccaggatttgagcc

SEQ ID NO: 684940 - DNA, 15 bp, Homo sapiens
ccaggatttgagccc

SEQ ID NO: 684941 - DNA, 15 bp, Homo sapiens
caggatttgagccca

SEQ ID NO: 684942 - DNA, 15 bp, Homo sapiens
aggatttgagcccag

SEQ ID NO: 684943 - DNA, 15 bp, Homo sapiens
ggatttgagcccagg

SEQ ID NO: 684944 - DNA, 15 bp, Homo sapiens
gatttgagcccaggt

SEQ ID NO: 684945 - DNA, 15 bp, Homo sapiens
atttgagcccaggtc

SEQ ID NO: 684946 - DNA, 15 bp, Homo sapiens
tttgagcccaggtct

SEQ ID NO: 684947 - DNA, 15 bp, Homo sapiens
ttgagcccaggtctg

SEQ ID NO: 684948 - DNA, 15 bp, Homo sapiens
tgagcccaggtctgt

SEQ ID NO: 684949 - DNA, 15 bp, Homo sapiens
gagcccaggtctgtc

SEQ ID NO: 684950 - DNA, 15 bp, Homo sapiens
agcccaggtctgtct

SEQ ID NO: 684951 - DNA, 15 bp, Homo sapiens
gcccaggtctgtctg

SEQ ID NO: 684952 - DNA, 15 bp, Homo sapiens
cccaggtctgtctga

SEQ ID NO: 684953 - DNA, 15 bp, Homo sapiens
ccaggtctgtctgac

SEQ ID NO: 684954 - DNA, 15 bp, Homo sapiens
caggtctgtctgacc

SEQ ID NO: 684955 - DNA, 15 bp, Homo sapiens
aggtctgtctgaccc

SEQ ID NO: 684956 - DNA, 15 bp, Homo sapiens
ggtctgtctgaccca

SEQ ID NO: 684957 - DNA, 15 bp, Homo sapiens
gtctgtctgacccag

SEQ ID NO: 684958 - DNA, 15 bp, Homo sapiens
tctgtctgacccaga

SEQ ID NO: 684959 - DNA, 15 bp, Homo sapiens
ctgtctgacccagaa

SEQ ID NO: 684960 - DNA, 15 bp, Homo sapiens
tgtctgacccagaac

SEQ ID NO: 684961 - DNA, 15 bp, Homo sapiens
gtctgacccagaacc

SEQ ID NO: 684962 - DNA, 15 bp, Homo sapiens
tctgacccagaacct

SEQ ID NO: 684963 - DNA, 15 bp, Homo sapiens
ctgacccagaacctg

SEQ ID NO: 684964 - DNA, 15 bp, Homo sapiens
tgacccagaacctgt

SEQ ID NO: 684965 - DNA, 15 bp, Homo sapiens
gacccagaacctgtg

SEQ ID NO: 684966 - DNA, 15 bp, Homo sapiens
acccagaacctgtgt

SEQ ID NO: 684967 - DNA, 15 bp, Homo sapiens
cccagaacctgtgtt

SEQ ID NO: 684968 - DNA, 15 bp, Homo sapiens
ccagaacctgtgttc

SEQ ID NO: 684969 - DNA, 15 bp, Homo sapiens
cagaacctgtgttct

SEQ ID NO: 684970 - DNA, 15 bp, Homo sapiens
agaacctgtgttctc

SEQ ID NO: 684971 - DNA, 15 bp, Homo sapiens
gaacctgtgttctca

SEQ ID NO: 684972 - DNA, 15 bp, Homo sapiens
aacctgtgttctcag

SEQ ID NO: 684973 - DNA, 15 bp, Homo sapiens
acctgtgttctcagc

SEQ ID NO: 684974 - DNA, 15 bp, Homo sapiens
cctgtgttctcagcc

SEQ ID NO: 684975 - DNA, 15 bp, Homo sapiens
ctgtgttctcagcca

SEQ ID NO: 684976 - DNA, 15 bp, Homo sapiens
tgtgttctcagccat

SEQ ID NO: 684977 - DNA, 15 bp, Homo sapiens
gtgttctcagccatt

SEQ ID NO: 684978 - DNA, 15 bp, Homo sapiens
tgttctcagccattc

SEQ ID NO: 684979 - DNA, 15 bp, Homo sapiens
gttctcagccattct

SEQ ID NO: 684980 - DNA, 15 bp, Homo sapiens
ttctcagccattctg

SEQ ID NO: 684981 - DNA, 15 bp, Homo sapiens
tctcagccattctgc

SEQ ID NO: 684982 - DNA, 15 bp, Homo sapiens
ctcagccattctgct

SEQ ID NO: 684983 - DNA, 15 bp, Homo sapiens
tcagccattctgctg

SEQ ID NO: 684984 - DNA, 15 bp, Homo sapiens
cagccattctgctgt

SEQ ID NO: 684985 - DNA, 15 bp, Homo sapiens
agccattctgctgta

SEQ ID NO: 684986 - DNA, 15 bp, Homo sapiens
gccattctgctgtat

SEQ ID NO: 684987 - DNA, 15 bp, Homo sapiens
ccattctgctgtatt

SEQ ID NO: 684988 - DNA, 15 bp, Homo sapiens
cattctgctgtatta

SEQ ID NO: 684989 - DNA, 15 bp, Homo sapiens
attctgctgtattat

SEQ ID NO: 684990 - DNA, 15 bp, Homo sapiens
ttctgctgtattatt

SEQ ID NO: 684991 - DNA, 15 bp, Homo sapiens
tctgctgtattattc

SEQ ID NO: 684992 - DNA, 15 bp, Homo sapiens
ctgctgtattattct

SEQ ID NO: 684993 - DNA, 15 bp, Homo sapiens
tgctgtattattcta

SEQ ID NO: 684994 - DNA, 15 bp, Homo sapiens
gctgtattattctac

SEQ ID NO: 684995 - DNA, 15 bp, Homo sapiens
ctgtattattctact

SEQ ID NO: 684996 - DNA, 15 bp, Homo sapiens
tgtattattctacta

SEQ ID NO: 684997 - DNA, 15 bp, Homo sapiens
gtattattctactag

SEQ ID NO: 684998 - DNA, 15 bp, Homo sapiens
tattattctactagt

SEQ ID NO: 684999 - DNA, 15 bp, Homo sapiens
attattctactagtc

SEQ ID NO: 685000 - DNA, 15 bp, Homo sapiens
ttattctactagtca

SEQ ID NO: 685001 - DNA, 15 bp, Homo sapiens
tattctactagtcag

SEQ ID NO: 685002 - DNA, 15 bp, Homo sapiens
attctactagtcagc

SEQ ID NO: 685003 - DNA, 15 bp, Homo sapiens
ttctactagtcagca

SEQ ID NO: 685004 - DNA, 15 bp, Homo sapiens
tctactagtcagcaa

SEQ ID NO: 685005 - DNA, 15 bp, Homo sapiens
ctactagtcagcaaa

SEQ ID NO: 685006 - DNA, 15 bp, Homo sapiens
tactagtcagcaaag

SEQ ID NO: 685007 - DNA, 15 bp, Homo sapiens
actagtcagcaaaga

SEQ ID NO: 685008 - DNA, 15 bp, Homo sapiens
ctagtcagcaaagag

SEQ ID NO: 685009 - DNA, 15 bp, Homo sapiens
tagtcagcaaagagc

SEQ ID NO: 685010 - DNA, 15 bp, Homo sapiens
agtcagcaaagagct

SEQ ID NO: 685011 - DNA, 15 bp, Homo sapiens
gtcagcaaagagctc

SEQ ID NO: 685012 - DNA, 15 bp, Homo sapiens
tcagcaaagagctcc

SEQ ID NO: 685013 - DNA, 15 bp, Homo sapiens
cagcaaagagctcca

SEQ ID NO: 685014 - DNA, 15 bp, Homo sapiens
agcaaagagctccat

SEQ ID NO: 685015 - DNA, 15 bp, Homo sapiens
gcaaagagctccata

SEQ ID NO: 685016 - DNA, 15 bp, Homo sapiens
caaagagctccataa

SEQ ID NO: 685017 - DNA, 15 bp, Homo sapiens
aaagagctccataag

SEQ ID NO: 685018 - DNA, 15 bp, Homo sapiens
aagagctccataaga

SEQ ID NO: 685019 - DNA, 15 bp, Homo sapiens
agagctccataagaa

SEQ ID NO: 685020 - DNA, 15 bp, Homo sapiens
gagctccataagaag

SEQ ID NO: 685021 - DNA, 15 bp, Homo sapiens
agctccataagaagc

SEQ ID NO: 685022 - DNA, 15 bp, Homo sapiens
gctccataagaagca

SEQ ID NO: 685023 - DNA, 15 bp, Homo sapiens
ctccataagaagcat

SEQ ID NO: 685024 - DNA, 15 bp, Homo sapiens
tccataagaagcatc

SEQ ID NO: 685025 - DNA, 15 bp, Homo sapiens
ccataagaagcatcc

SEQ ID NO: 685026 - DNA, 15 bp, Homo sapiens
cataagaagcatcca

SEQ ID NO: 685027 - DNA, 15 bp, Homo sapiens
ataagaagcatccat

SEQ ID NO: 685028 - DNA, 15 bp, Homo sapiens
taagaagcatccatt

SEQ ID NO: 685029 - DNA, 15 bp, Homo sapiens
aagaagcatccattt

SEQ ID NO: 685030 - DNA, 15 bp, Homo sapiens
agaagcatccatttg

SEQ ID NO: 685031 - DNA, 15 bp, Homo sapiens
gaagcatccatttgt

SEQ ID NO: 685032 - DNA, 15 bp, Homo sapiens
aagcatccatttgtc

SEQ ID NO: 685033 - DNA, 15 bp, Homo sapiens
agcatccatttgtcc

SEQ ID NO: 685034 - DNA, 15 bp, Homo sapiens
gcatccatttgtcca

SEQ ID NO: 685035 - DNA, 15 bp, Homo sapiens
catccatttgtccaa

SEQ ID NO: 685036 - DNA, 15 bp, Homo sapiens
atccatttgtccaaa

SEQ ID NO: 685037 - DNA, 15 bp, Homo sapiens
tccatttgtccaaag

SEQ ID NO: 685038 - DNA, 15 bp, Homo sapiens
ccatttgtccaaagg

SEQ ID NO: 685039 - DNA, 15 bp, Homo sapiens
catttgtccaaagga

SEQ ID NO: 685040 - DNA, 15 bp, Homo sapiens
atttgtccaaaggac

SEQ ID NO: 685041 - DNA, 15 bp, Homo sapiens
tttgtccaaaggacc

SEQ ID NO: 685042 - DNA, 15 bp, Homo sapiens
ttgtccaaaggacca

SEQ ID NO: 685043 - DNA, 15 bp, Homo sapiens
tgtccaaaggaccat

SEQ ID NO: 685044 - DNA, 15 bp, Homo sapiens
gtccaaaggaccatt

SEQ ID NO: 685045 - DNA, 15 bp, Homo sapiens
tccaaaggaccattc

SEQ ID NO: 685046 - DNA, 15 bp, Homo sapiens
ccaaaggaccattct

SEQ ID NO: 685047 - DNA, 15 bp, Homo sapiens
caaaggaccattctg

SEQ ID NO: 685048 - DNA, 15 bp, Homo sapiens
aaaggaccattctgt

SEQ ID NO: 685049 - DNA, 15 bp, Homo sapiens
aaggaccattctgta

SEQ ID NO: 685050 - DNA, 15 bp, Homo sapiens
aggaccattctgtat

SEQ ID NO: 685051 - DNA, 15 bp, Homo sapiens
ggaccattctgtatc

SEQ ID NO: 685052 - DNA, 15 bp, Homo sapiens
gaccattctgtatcc

SEQ ID NO: 685053 - DNA, 15 bp, Homo sapiens
accattctgtatccc

SEQ ID NO: 685054 - DNA, 15 bp, Homo sapiens
ccattctgtatccca

SEQ ID NO: 685055 - DNA, 15 bp, Homo sapiens
cattctgtatcccag

SEQ ID NO: 685056 - DNA, 15 bp, Homo sapiens
attctgtatcccagg

SEQ ID NO: 685057 - DNA, 15 bp, Homo sapiens
ttctgtatcccagga

SEQ ID NO: 685058 - DNA, 15 bp, Homo sapiens
tctgtatcccaggag

SEQ ID NO: 685059 - DNA, 15 bp, Homo sapiens
ctgtatcccaggaga

SEQ ID NO: 685060 - DNA, 15 bp, Homo sapiens
tgtatcccaggagag

SEQ ID NO: 685061 - DNA, 15 bp, Homo sapiens
gtatcccaggagaga

SEQ ID NO: 685062 - DNA, 15 bp, Homo sapiens
tatcccaggagagaa

SEQ ID NO: 685063 - DNA, 15 bp, Homo sapiens
atcccaggagagaaa

SEQ ID NO: 685064 - DNA, 15 bp, Homo sapiens
tcccaggagagaaac

SEQ ID NO: 685065 - DNA, 15 bp, Homo sapiens
cccaggagagaaacc

SEQ ID NO: 685066 - DNA, 15 bp, Homo sapiens
ccaggagagaaacca

SEQ ID NO: 685067 - DNA, 15 bp, Homo sapiens
caggagagaaaccat

SEQ ID NO: 685068 - DNA, 15 bp, Homo sapiens
aggagagaaaccatt

SEQ ID NO: 685069 - DNA, 15 bp, Homo sapiens
ggagagaaaccattg

SEQ ID NO: 685070 - DNA, 15 bp, Homo sapiens
gagagaaaccattgc

SEQ ID NO: 685071 - DNA, 15 bp, Homo sapiens
agagaaaccattgcc

SEQ ID NO: 685072 - DNA, 15 bp, Homo sapiens
gagaaaccattgccc

SEQ ID NO: 685073 - DNA, 15 bp, Homo sapiens
agaaaccattgccca

SEQ ID NO: 685074 - DNA, 15 bp, Homo sapiens
gaaaccattgcccag

SEQ ID NO: 685075 - DNA, 15 bp, Homo sapiens
aaaccattgcccagc

SEQ ID NO: 685076 - DNA, 15 bp, Homo sapiens
aaccattgcccagcg

SEQ ID NO: 685077 - DNA, 15 bp, Homo sapiens
accattgcccagcga

SEQ ID NO: 685078 - DNA, 15 bp, Homo sapiens
ccattgcccagcgat

SEQ ID NO: 685079 - DNA, 15 bp, Homo sapiens
cattgcccagcgatt

SEQ ID NO: 685080 - DNA, 15 bp, Homo sapiens
attgcccagcgattt

SEQ ID NO: 685081 - DNA, 15 bp, Homo sapiens
ttgcccagcgatttg

SEQ ID NO: 685082 - DNA, 15 bp, Homo sapiens
tgcccagcgatttgc

SEQ ID NO: 685083 - DNA, 15 bp, Homo sapiens
gcccagcgatttgcc

SEQ ID NO: 685084 - DNA, 15 bp, Homo sapiens
cccagcgatttgcct

SEQ ID NO: 685085 - DNA, 15 bp, Homo sapiens
ccagcgatttgcctt

SEQ ID NO: 685086 - DNA, 15 bp, Homo sapiens
cagcgatttgccttt

SEQ ID NO: 685087 - DNA, 15 bp, Homo sapiens
agcgatttgcctttc

SEQ ID NO: 685088 - DNA, 15 bp, Homo sapiens
gcgatttgcctttcc

SEQ ID NO: 685089 - DNA, 15 bp, Homo sapiens
cgatttgcctttccg

SEQ ID NO: 685090 - DNA, 15 bp, Homo sapiens
gatttgcctttccgg

SEQ ID NO: 685091 - DNA, 15 bp, Homo sapiens
atttgcctttccggt

SEQ ID NO: 685092 - DNA, 15 bp, Homo sapiens
tttgcctttccggta

SEQ ID NO: 685093 - DNA, 15 bp, Homo sapiens
ttgcctttccggtac

SEQ ID NO: 685094 - DNA, 15 bp, Homo sapiens
tgcctttccggtacc

SEQ ID NO: 685095 - DNA, 15 bp, Homo sapiens
gcctttccggtacct

SEQ ID NO: 685096 - DNA, 15 bp, Homo sapiens
cctttccggtacctg

SEQ ID NO: 685097 - DNA, 15 bp, Homo sapiens
ctttccggtacctga

SEQ ID NO: 685098 - DNA, 15 bp, Homo sapiens
tttccggtacctgag

SEQ ID NO: 685099 - DNA, 15 bp, Homo sapiens
ttccggtacctgagc

SEQ ID NO: 685100 - DNA, 15 bp, Homo sapiens
tccggtacctgagct

SEQ ID NO: 685101 - DNA, 15 bp, Homo sapiens
ccggtacctgagctc

SEQ ID NO: 685102 - DNA, 15 bp, Homo sapiens
cggtacctgagctcc

SEQ ID NO: 685103 - DNA, 15 bp, Homo sapiens
ggtacctgagctccc

SEQ ID NO: 685104 - DNA, 15 bp, Homo sapiens
gtacctgagctccct

SEQ ID NO: 685105 - DNA, 15 bp, Homo sapiens
tacctgagctcccta

SEQ ID NO: 685106 - DNA, 15 bp, Homo sapiens
acctgagctccctat

SEQ ID NO: 685107 - DNA, 15 bp, Homo sapiens
cctgagctccctatg

SEQ ID NO: 685108 - DNA, 15 bp, Homo sapiens
ctgagctccctatga

SEQ ID NO: 685109 - DNA, 15 bp, Homo sapiens
tgagctccctatgat

SEQ ID NO: 685110 - DNA, 15 bp, Homo sapiens
gagctccctatgatg

SEQ ID NO: 685111 - DNA, 15 bp, Homo sapiens
agctccctatgatgg

SEQ ID NO: 685112 - DNA, 15 bp, Homo sapiens
gctccctatgatggc

SEQ ID NO: 685113 - DNA, 15 bp, Homo sapiens
ctccctatgatggcc

SEQ ID NO: 685114 - DNA, 15 bp, Homo sapiens
tccctatgatggcca

SEQ ID NO: 685115 - DNA, 15 bp, Homo sapiens
ccctatgatggccag

SEQ ID NO: 685116 - DNA, 15 bp, Homo sapiens
cctatgatggccagc

SEQ ID NO: 685117 - DNA, 15 bp, Homo sapiens
ctatgatggccagca

SEQ ID NO: 685118 - DNA, 15 bp, Homo sapiens
tatgatggccagcat

SEQ ID NO: 685119 - DNA, 15 bp, Homo sapiens
atgatggccagcatc

SEQ ID NO: 685120 - DNA, 15 bp, Homo sapiens
tgatggccagcatct

SEQ ID NO: 685121 - DNA, 15 bp, Homo sapiens
gatggccagcatctg

SEQ ID NO: 685122 - DNA, 15 bp, Homo sapiens
atggccagcatctgc

SEQ ID NO: 685123 - DNA, 15 bp, Homo sapiens
tggccagcatctgcc

SEQ ID NO: 685124 - DNA, 15 bp, Homo sapiens
ggccagcatctgccc

SEQ ID NO: 685125 - DNA, 15 bp, Homo sapiens
gccagcatctgccca

SEQ ID NO: 685126 - DNA, 15 bp, Homo sapiens
ccagcatctgcccac

SEQ ID NO: 685127 - DNA, 15 bp, Homo sapiens
cagcatctgcccact

SEQ ID NO: 685128 - DNA, 15 bp, Homo sapiens
agcatctgcccactt

SEQ ID NO: 685129 - DNA, 15 bp, Homo sapiens
gcatctgcccacttc

SEQ ID NO: 685130 - DNA, 15 bp, Homo sapiens
catctgcccacttct

SEQ ID NO: 685131 - DNA, 15 bp, Homo sapiens
atctgcccacttctc

SEQ ID NO: 685132 - DNA, 15 bp, Homo sapiens
tctgcccacttctca

SEQ ID NO: 685133 - DNA, 15 bp, Homo sapiens
ctgcccacttctcac

SEQ ID NO: 685134 - DNA, 15 bp, Homo sapiens
tgcccacttctcact

SEQ ID NO: 685135 - DNA, 15 bp, Homo sapiens
gcccacttctcactt

SEQ ID NO: 685136 - DNA, 15 bp, Homo sapiens
cccacttctcacttt

SEQ ID NO: 685137 - DNA, 15 bp, Homo sapiens
ccacttctcactttg

SEQ ID NO: 685138 - DNA, 15 bp, Homo sapiens
cacttctcactttga

SEQ ID NO: 685139 - DNA, 15 bp, Homo sapiens
acttctcactttgaa

SEQ ID NO: 685140 - DNA, 15 bp, Homo sapiens
cttctcactttgaag

SEQ ID NO: 685141 - DNA, 15 bp, Homo sapiens
ttctcactttgaagc

SEQ ID NO: 685142 - DNA, 15 bp, Homo sapiens
tctcactttgaagct

SEQ ID NO: 685143 - DNA, 15 bp, Homo sapiens
ctcactttgaagctt

SEQ ID NO: 685144 - DNA, 15 bp, Homo sapiens
tcactttgaagctta

SEQ ID NO: 685145 - DNA, 15 bp, Homo sapiens
cactttgaagcttag

SEQ ID NO: 685146 - DNA, 15 bp, Homo sapiens
actttgaagcttagg

SEQ ID NO: 685147 - DNA, 15 bp, Homo sapiens
ctttgaagcttaggt

SEQ ID NO: 685148 - DNA, 15 bp, Homo sapiens
tttgaagcttaggtt

SEQ ID NO: 685149 - DNA, 15 bp, Homo sapiens
ttgaagcttaggttc

SEQ ID NO: 685150 - DNA, 15 bp, Homo sapiens
tgaagcttaggttct

SEQ ID NO: 685151 - DNA, 15 bp, Homo sapiens
gaagcttaggttctg

SEQ ID NO: 685152 - DNA, 15 bp, Homo sapiens
aagcttaggttctgg

SEQ ID NO: 685153 - DNA, 15 bp, Homo sapiens
agcttaggttctgga

SEQ ID NO: 685154 - DNA, 15 bp, Homo sapiens
gcttaggttctggat

SEQ ID NO: 685155 - DNA, 15 bp, Homo sapiens
cttaggttctggatg

SEQ ID NO: 685156 - DNA, 15 bp, Homo sapiens
ttaggttctggatgc

SEQ ID NO: 685157 - DNA, 15 bp, Homo sapiens
taggttctggatgcc

SEQ ID NO: 685158 - DNA, 15 bp, Homo sapiens
aggttctggatgccc

SEQ ID NO: 685159 - DNA, 15 bp, Homo sapiens
ggttctggatgccca

SEQ ID NO: 685160 - DNA, 15 bp, Homo sapiens
gttctggatgcccag

SEQ ID NO: 685161 - DNA, 15 bp, Homo sapiens
ttctggatgcccagc

SEQ ID NO: 685162 - DNA, 15 bp, Homo sapiens
tctggatgcccagct

SEQ ID NO: 685163 - DNA, 15 bp, Homo sapiens
ctggatgcccagctc

SEQ ID NO: 685164 - DNA, 15 bp, Homo sapiens
tggatgcccagctca

SEQ ID NO: 685165 - DNA, 15 bp, Homo sapiens
ggatgcccagctcac

SEQ ID NO: 685166 - DNA, 15 bp, Homo sapiens
gatgcccagctcaca

SEQ ID NO: 685167 - DNA, 15 bp, Homo sapiens
atgcccagctcacaa

SEQ ID NO: 685168 - DNA, 15 bp, Homo sapiens
tgcccagctcacaag

SEQ ID NO: 685169 - DNA, 15 bp, Homo sapiens
gcccagctcacaaga

SEQ ID NO: 685170 - DNA, 15 bp, Homo sapiens
cccagctcacaagaa

SEQ ID NO: 685171 - DNA, 15 bp, Homo sapiens
ccagctcacaagaat

SEQ ID NO: 685172 - DNA, 15 bp, Homo sapiens
cagctcacaagaatt

SEQ ID NO: 685173 - DNA, 15 bp, Homo sapiens
agctcacaagaattc

SEQ ID NO: 685174 - DNA, 15 bp, Homo sapiens
gctcacaagaattct

SEQ ID NO: 685175 - DNA, 15 bp, Homo sapiens
ctcacaagaattctg

SEQ ID NO: 685176 - DNA, 15 bp, Homo sapiens
tcacaagaattctgg

SEQ ID NO: 685177 - DNA, 15 bp, Homo sapiens
cacaagaattctggc

SEQ ID NO: 685178 - DNA, 15 bp, Homo sapiens
acaagaattctggca

SEQ ID NO: 685179 - DNA, 15 bp, Homo sapiens
caagaattctggcag

SEQ ID NO: 685180 - DNA, 15 bp, Homo sapiens
aagaattctggcagc

SEQ ID NO: 685181 - DNA, 15 bp, Homo sapiens
agaattctggcagct

SEQ ID NO: 685182 - DNA, 15 bp, Homo sapiens
gaattctggcagctg

SEQ ID NO: 685183 - DNA, 15 bp, Homo sapiens
aattctggcagctgg

SEQ ID NO: 685184 - DNA, 15 bp, Homo sapiens
attctggcagctggg

SEQ ID NO: 685185 - DNA, 15 bp, Homo sapiens
ttctggcagctggga

SEQ ID NO: 685186 - DNA, 15 bp, Homo sapiens
tctggcagctgggag

SEQ ID NO: 685187 - DNA, 15 bp, Homo sapiens
ctggcagctgggaga

SEQ ID NO: 685188 - DNA, 15 bp, Homo sapiens
tggcagctgggagat

SEQ ID NO: 685189 - DNA, 15 bp, Homo sapiens
ggcagctgggagatg

SEQ ID NO: 685190 - DNA, 15 bp, Homo sapiens
gcagctgggagatgt

SEQ ID NO: 685191 - DNA, 15 bp, Homo sapiens
cagctgggagatgtc

SEQ ID NO: 685192 - DNA, 15 bp, Homo sapiens
agctgggagatgtcc

SEQ ID NO: 685193 - DNA, 15 bp, Homo sapiens
gctgggagatgtcca

SEQ ID NO: 685194 - DNA, 15 bp, Homo sapiens
ctgggagatgtccag

SEQ ID NO: 685195 - DNA, 15 bp, Homo sapiens
tgggagatgtccagg

SEQ ID NO: 685196 - DNA, 15 bp, Homo sapiens
gggagatgtccaggg

SEQ ID NO: 685197 - DNA, 15 bp, Homo sapiens
ggagatgtccagggc

SEQ ID NO: 685198 - DNA, 15 bp, Homo sapiens
gagatgtccagggca

SEQ ID NO: 685199 - DNA, 15 bp, Homo sapiens
agatgtccagggcat

SEQ ID NO: 685200 - DNA, 15 bp, Homo sapiens
gatgtccagggcatc

SEQ ID NO: 685201 - DNA, 15 bp, Homo sapiens
atgtccagggcatct

SEQ ID NO: 685202 - DNA, 15 bp, Homo sapiens
tgtccagggcatctt

SEQ ID NO: 685203 - DNA, 15 bp, Homo sapiens
gtccagggcatcttg

SEQ ID NO: 685204 - DNA, 15 bp, Homo sapiens
tccagggcatcttga

SEQ ID NO: 685205 - DNA, 15 bp, Homo sapiens
ccagggcatcttgaa

SEQ ID NO: 685206 - DNA, 15 bp, Homo sapiens
cagggcatcttgaac

SEQ ID NO: 685207 - DNA, 15 bp, Homo sapiens
agggcatcttgaact

SEQ ID NO: 685208 - DNA, 15 bp, Homo sapiens
gggcatcttgaactg

SEQ ID NO: 685209 - DNA, 15 bp, Homo sapiens
ggcatcttgaactga

SEQ ID NO: 685210 - DNA, 15 bp, Homo sapiens
gcatcttgaactgag

SEQ ID NO: 685211 - DNA, 15 bp, Homo sapiens
catcttgaactgagc

SEQ ID NO: 685212 - DNA, 15 bp, Homo sapiens
atcttgaactgagcc

SEQ ID NO: 685213 - DNA, 15 bp, Homo sapiens
tcttgaactgagcca

SEQ ID NO: 685214 - DNA, 15 bp, Homo sapiens
cttgaactgagccag

SEQ ID NO: 685215 - DNA, 15 bp, Homo sapiens
ttgaactgagccagc

SEQ ID NO: 685216 - DNA, 15 bp, Homo sapiens
tgaactgagccagct

SEQ ID NO: 685217 - DNA, 15 bp, Homo sapiens
gaactgagccagctg

SEQ ID NO: 685218 - DNA, 15 bp, Homo sapiens
aactgagccagctgc

SEQ ID NO: 685219 - DNA, 15 bp, Homo sapiens
actgagccagctgct

SEQ ID NO: 685220 - DNA, 15 bp, Homo sapiens
ctgagccagctgctc

SEQ ID NO: 685221 - DNA, 15 bp, Homo sapiens
tgagccagctgctca

SEQ ID NO: 685222 - DNA, 15 bp, Homo sapiens
gagccagctgctcaa

SEQ ID NO: 685223 - DNA, 15 bp, Homo sapiens
agccagctgctcaaa

SEQ ID NO: 685224 - DNA, 15 bp, Homo sapiens
gccagctgctcaaac

SEQ ID NO: 685225 - DNA, 15 bp, Homo sapiens
ccagctgctcaaacc

SEQ ID NO: 685226 - DNA, 15 bp, Homo sapiens
cagctgctcaaacca

SEQ ID NO: 685227 - DNA, 15 bp, Homo sapiens
agctgctcaaaccaa

SEQ ID NO: 685228 - DNA, 15 bp, Homo sapiens
gctgctcaaaccaag

SEQ ID NO: 685229 - DNA, 15 bp, Homo sapiens
ctgctcaaaccaagg

SEQ ID NO: 685230 - DNA, 15 bp, Homo sapiens
tgctcaaaccaaggg

SEQ ID NO: 685231 - DNA, 15 bp, Homo sapiens
gctcaaaccaaggga

SEQ ID NO: 685232 - DNA, 15 bp, Homo sapiens
ctcaaaccaagggac

SEQ ID NO: 685233 - DNA, 15 bp, Homo sapiens
tcaaaccaagggacc

SEQ ID NO: 685234 - DNA, 15 bp, Homo sapiens
caaaccaagggacct

SEQ ID NO: 685235 - DNA, 15 bp, Homo sapiens
aaaccaagggacctg

SEQ ID NO: 685236 - DNA, 15 bp, Homo sapiens
aaccaagggacctga

SEQ ID NO: 685237 - DNA, 15 bp, Homo sapiens
accaagggacctgag

SEQ ID NO: 685238 - DNA, 15 bp, Homo sapiens
ccaagggacctgaga

SEQ ID NO: 685239 - DNA, 15 bp, Homo sapiens
caagggacctgagag

SEQ ID NO: 685240 - DNA, 15 bp, Homo sapiens
aagggacctgagagg

SEQ ID NO: 685241 - DNA, 15 bp, Homo sapiens
agggacctgagaggc

SEQ ID NO: 685242 - DNA, 15 bp, Homo sapiens
gggacctgagaggcc

SEQ ID NO: 685243 - DNA, 15 bp, Homo sapiens
ggacctgagaggcca

SEQ ID NO: 685244 - DNA, 15 bp, Homo sapiens
gacctgagaggccag

SEQ ID NO: 685245 - DNA, 15 bp, Homo sapiens
acctgagaggccagg

SEQ ID NO: 685246 - DNA, 15 bp, Homo sapiens
cctgagaggccaggt

SEQ ID NO: 685247 - DNA, 15 bp, Homo sapiens
ctgagaggccaggtc

SEQ ID NO: 685248 - DNA, 15 bp, Homo sapiens
tgagaggccaggtcc

SEQ ID NO: 685249 - DNA, 15 bp, Homo sapiens
gagaggccaggtcca

SEQ ID NO: 685250 - DNA, 15 bp, Homo sapiens
agaggccaggtccac

SEQ ID NO: 685251 - DNA, 15 bp, Homo sapiens
gaggccaggtccacc

SEQ ID NO: 685252 - DNA, 15 bp, Homo sapiens
aggccaggtccacct

SEQ ID NO: 685253 - DNA, 15 bp, Homo sapiens
ggccaggtccacctg

SEQ ID NO: 685254 - DNA, 15 bp, Homo sapiens
gccaggtccacctgt

SEQ ID NO: 685255 - DNA, 15 bp, Homo sapiens
ccaggtccacctgtg

SEQ ID NO: 685256 - DNA, 15 bp, Homo sapiens
caggtccacctgtgg

SEQ ID NO: 685257 - DNA, 15 bp, Homo sapiens
aggtccacctgtggg

SEQ ID NO: 685258 - DNA, 15 bp, Homo sapiens
ggtccacctgtgggg

SEQ ID NO: 685259 - DNA, 15 bp, Homo sapiens
gtccacctgtgggga

SEQ ID NO: 685260 - DNA, 15 bp, Homo sapiens
tccacctgtggggag

SEQ ID NO: 685261 - DNA, 15 bp, Homo sapiens
ccacctgtggggaga

SEQ ID NO: 685262 - DNA, 15 bp, Homo sapiens
cacctgtggggagat

SEQ ID NO: 685263 - DNA, 15 bp, Homo sapiens
acctgtggggagata

SEQ ID NO: 685264 - DNA, 15 bp, Homo sapiens
cctgtggggagatat

SEQ ID NO: 685265 - DNA, 15 bp, Homo sapiens
ctgtggggagatatc

SEQ ID NO: 685266 - DNA, 15 bp, Homo sapiens
tgtggggagatatca

SEQ ID NO: 685267 - DNA, 15 bp, Homo sapiens
gtggggagatatcag

SEQ ID NO: 685268 - DNA, 15 bp, Homo sapiens
tggggagatatcaga

SEQ ID NO: 685269 - DNA, 15 bp, Homo sapiens
ggggagatatcagaa

SEQ ID NO: 685270 - DNA, 15 bp, Homo sapiens
gggagatatcagaag

SEQ ID NO: 685271 - DNA, 15 bp, Homo sapiens
ggagatatcagaagg

SEQ ID NO: 685272 - DNA, 15 bp, Homo sapiens
gagatatcagaaggt

SEQ ID NO: 685273 - DNA, 15 bp, Homo sapiens
agatatcagaaggtt

SEQ ID NO: 685274 - DNA, 15 bp, Homo sapiens
gatatcagaaggttc

SEQ ID NO: 685275 - DNA, 15 bp, Homo sapiens
atatcagaaggttcc

SEQ ID NO: 685276 - DNA, 15 bp, Homo sapiens
tatcagaaggttcct

SEQ ID NO: 685277 - DNA, 15 bp, Homo sapiens
atcagaaggttcctt

SEQ ID NO: 685278 - DNA, 15 bp, Homo sapiens
tcagaaggttcctta

SEQ ID NO: 685279 - DNA, 15 bp, Homo sapiens
cagaaggttccttag

SEQ ID NO: 685280 - DNA, 15 bp, Homo sapiens
agaaggttccttaga

SEQ ID NO: 685281 - DNA, 15 bp, Homo sapiens
gaaggttccttagag

SEQ ID NO: 685282 - DNA, 15 bp, Homo sapiens
aaggttccttagaga

SEQ ID NO: 685283 - DNA, 15 bp, Homo sapiens
aggttccttagagag

SEQ ID NO: 685284 - DNA, 15 bp, Homo sapiens
ggttccttagagagc

SEQ ID NO: 685285 - DNA, 15 bp, Homo sapiens
gttccttagagagct

SEQ ID NO: 685286 - DNA, 15 bp, Homo sapiens
ttccttagagagctg

SEQ ID NO: 685287 - DNA, 15 bp, Homo sapiens
tccttagagagctga

SEQ ID NO: 685288 - DNA, 15 bp, Homo sapiens
ccttagagagctgaa

SEQ ID NO: 685289 - DNA, 15 bp, Homo sapiens
cttagagagctgaat

SEQ ID NO: 685290 - DNA, 15 bp, Homo sapiens
ttagagagctgaatg

SEQ ID NO: 685291 - DNA, 15 bp, Homo sapiens
tagagagctgaatgg

SEQ ID NO: 685292 - DNA, 15 bp, Homo sapiens
agagagctgaatggt

SEQ ID NO: 685293 - DNA, 15 bp, Homo sapiens
gagagctgaatggtt

SEQ ID NO: 685294 - DNA, 15 bp, Homo sapiens
agagctgaatggttc

SEQ ID NO: 685295 - DNA, 15 bp, Homo sapiens
gagctgaatggttca

SEQ ID NO: 685296 - DNA, 15 bp, Homo sapiens
agctgaatggttcag

SEQ ID NO: 685297 - DNA, 15 bp, Homo sapiens
gctgaatggttcaga

SEQ ID NO: 685298 - DNA, 15 bp, Homo sapiens
ctgaatggttcagag

SEQ ID NO: 685299 - DNA, 15 bp, Homo sapiens
tgaatggttcagagg

SEQ ID NO: 685300 - DNA, 15 bp, Homo sapiens
gaatggttcagaggg

SEQ ID NO: 685301 - DNA, 15 bp, Homo sapiens
aatggttcagagggc

SEQ ID NO: 685302 - DNA, 15 bp, Homo sapiens
atggttcagagggct

SEQ ID NO: 685303 - DNA, 15 bp, Homo sapiens
tggttcagagggctt

SEQ ID NO: 685304 - DNA, 15 bp, Homo sapiens
ggttcagagggcttc

SEQ ID NO: 685305 - DNA, 15 bp, Homo sapiens
gttcagagggcttca

SEQ ID NO: 685306 - DNA, 15 bp, Homo sapiens
ttcagagggcttcag

SEQ ID NO: 685307 - DNA, 15 bp, Homo sapiens
tcagagggcttcagc

SEQ ID NO: 685308 - DNA, 15 bp, Homo sapiens
cagagggcttcagca

SEQ ID NO: 685309 - DNA, 15 bp, Homo sapiens
agagggcttcagcaa

SEQ ID NO: 685310 - DNA, 15 bp, Homo sapiens
gagggcttcagcaac

SEQ ID NO: 685311 - DNA, 15 bp, Homo sapiens
agggcttcagcaact

SEQ ID NO: 685312 - DNA, 15 bp, Homo sapiens
gggcttcagcaactt

SEQ ID NO: 685313 - DNA, 15 bp, Homo sapiens
ggcttcagcaacttc

SEQ ID NO: 685314 - DNA, 15 bp, Homo sapiens
gcttcagcaacttct

SEQ ID NO: 685315 - DNA, 15 bp, Homo sapiens
cttcagcaacttctg

SEQ ID NO: 685316 - DNA, 15 bp, Homo sapiens
ttcagcaacttctgt

SEQ ID NO: 685317 - DNA, 15 bp, Homo sapiens
tcagcaacttctgtt

SEQ ID NO: 685318 - DNA, 15 bp, Homo sapiens
cagcaacttctgttc

SEQ ID NO: 685319 - DNA, 15 bp, Homo sapiens
agcaacttctgttca

SEQ ID NO: 685320 - DNA, 15 bp, Homo sapiens
gcaacttctgttcag

SEQ ID NO: 685321 - DNA, 15 bp, Homo sapiens
caacttctgttcagc

SEQ ID NO: 685322 - DNA, 15 bp, Homo sapiens
aacttctgttcagca

SEQ ID NO: 685323 - DNA, 15 bp, Homo sapiens
acttctgttcagcat

SEQ ID NO: 685324 - DNA, 15 bp, Homo sapiens
cttctgttcagcatc

SEQ ID NO: 685325 - DNA, 15 bp, Homo sapiens
ttctgttcagcatct

SEQ ID NO: 685326 - DNA, 15 bp, Homo sapiens
tctgttcagcatctt

SEQ ID NO: 685327 - DNA, 15 bp, Homo sapiens
ctgttcagcatcttc

SEQ ID NO: 685328 - DNA, 15 bp, Homo sapiens
tgttcagcatcttcg

SEQ ID NO: 685329 - DNA, 15 bp, Homo sapiens
gttcagcatcttcgt

SEQ ID NO: 685330 - DNA, 15 bp, Homo sapiens
ttcagcatcttcgtt

SEQ ID NO: 685331 - DNA, 15 bp, Homo sapiens
tcagcatcttcgttc

SEQ ID NO: 685332 - DNA, 15 bp, Homo sapiens
cagcatcttcgttcc

SEQ ID NO: 685333 - DNA, 15 bp, Homo sapiens
agcatcttcgttccc

SEQ ID NO: 685334 - DNA, 15 bp, Homo sapiens
gcatcttcgttcccc

SEQ ID NO: 685335 - DNA, 15 bp, Homo sapiens
catcttcgttcccca

SEQ ID NO: 685336 - DNA, 15 bp, Homo sapiens
atcttcgttccccag

SEQ ID NO: 685337 - DNA, 15 bp, Homo sapiens
tcttcgttccccagg

SEQ ID NO: 685338 - DNA, 15 bp, Homo sapiens
cttcgttccccaggt

SEQ ID NO: 685339 - DNA, 15 bp, Homo sapiens
ttcgttccccaggtg

SEQ ID NO: 685340 - DNA, 15 bp, Homo sapiens
tcgttccccaggtgg

SEQ ID NO: 685341 - DNA, 15 bp, Homo sapiens
cgttccccaggtggc

SEQ ID NO: 685342 - DNA, 15 bp, Homo sapiens
gttccccaggtggcc

SEQ ID NO: 685343 - DNA, 15 bp, Homo sapiens
ttccccaggtggccc

SEQ ID NO: 685344 - DNA, 15 bp, Homo sapiens
tccccaggtggcccc

SEQ ID NO: 685345 - DNA, 15 bp, Homo sapiens
ccccaggtggcccct

SEQ ID NO: 685346 - DNA, 15 bp, Homo sapiens
cccaggtggcccctc

SEQ ID NO: 685347 - DNA, 15 bp, Homo sapiens
ccaggtggcccctct

SEQ ID NO: 685348 - DNA, 15 bp, Homo sapiens
caggtggcccctctc

SEQ ID NO: 685349 - DNA, 15 bp, Homo sapiens
aggtggcccctctcc

SEQ ID NO: 685350 - DNA, 15 bp, Homo sapiens
ggtggcccctctcca

SEQ ID NO: 685351 - DNA, 15 bp, Homo sapiens
gtggcccctctccac

SEQ ID NO: 685352 - DNA, 15 bp, Homo sapiens
tggcccctctccaca

SEQ ID NO: 685353 - DNA, 15 bp, Homo sapiens
ggcccctctccacag

SEQ ID NO: 685354 - DNA, 15 bp, Homo sapiens
gcccctctccacaga

SEQ ID NO: 685355 - DNA, 15 bp, Homo sapiens
cccctctccacagag

SEQ ID NO: 685356 - DNA, 15 bp, Homo sapiens
ccctctccacagagg

SEQ ID NO: 685357 - DNA, 15 bp, Homo sapiens
cctctccacagagga

SEQ ID NO: 685358 - DNA, 15 bp, Homo sapiens
ctctccacagaggat

SEQ ID NO: 685359 - DNA, 15 bp, Homo sapiens
tctccacagaggata

SEQ ID NO: 685360 - DNA, 15 bp, Homo sapiens
ctccacagaggatat

SEQ ID NO: 685361 - DNA, 15 bp, Homo sapiens
tccacagaggatatg

SEQ ID NO: 685362 - DNA, 15 bp, Homo sapiens
ccacagaggatatgt

SEQ ID NO: 685363 - DNA, 15 bp, Homo sapiens
cacagaggatatgtc

SEQ ID NO: 685364 - DNA, 15 bp, Homo sapiens
acagaggatatgtcc

SEQ ID NO: 685365 - DNA, 15 bp, Homo sapiens
cagaggatatgtcct

SEQ ID NO: 685366 - DNA, 15 bp, Homo sapiens
agaggatatgtcctc

SEQ ID NO: 685367 - DNA, 15 bp, Homo sapiens
gaggatatgtcctca

SEQ ID NO: 685368 - DNA, 15 bp, Homo sapiens
aggatatgtcctcac

SEQ ID NO: 685369 - DNA, 15 bp, Homo sapiens
ggatatgtcctcacc

SEQ ID NO: 685370 - DNA, 15 bp, Homo sapiens
gatatgtcctcacct

SEQ ID NO: 685371 - DNA, 15 bp, Homo sapiens
atatgtcctcaccta

SEQ ID NO: 685372 - DNA, 15 bp, Homo sapiens
tatgtcctcacctac

SEQ ID NO: 685373 - DNA, 15 bp, Homo sapiens
atgtcctcacctaca

SEQ ID NO: 685374 - DNA, 15 bp, Homo sapiens
tgtcctcacctacac

SEQ ID NO: 685375 - DNA, 15 bp, Homo sapiens
gtcctcacctacaca

SEQ ID NO: 685376 - DNA, 15 bp, Homo sapiens
tcctcacctacacac

SEQ ID NO: 685377 - DNA, 15 bp, Homo sapiens
cctcacctacacaca

SEQ ID NO: 685378 - DNA, 15 bp, Homo sapiens
ctcacctacacacaa

SEQ ID NO: 685379 - DNA, 15 bp, Homo sapiens
tcacctacacacaat

SEQ ID NO: 685380 - DNA, 15 bp, Homo sapiens
cacctacacacaata

SEQ ID NO: 685381 - DNA, 15 bp, Homo sapiens
acctacacacaatag

SEQ ID NO: 685382 - DNA, 15 bp, Homo sapiens
cctacacacaatagg

SEQ ID NO: 685383 - DNA, 15 bp, Homo sapiens
ctacacacaataggc

SEQ ID NO: 685384 - DNA, 15 bp, Homo sapiens
tacacacaataggcc

SEQ ID NO: 685385 - DNA, 15 bp, Homo sapiens
acacacaataggccc

SEQ ID NO: 685386 - DNA, 15 bp, Homo sapiens
cacacaataggcccc

SEQ ID NO: 685387 - DNA, 15 bp, Homo sapiens
acacaataggcccca

SEQ ID NO: 685388 - DNA, 15 bp, Homo sapiens
cacaataggccccaa

SEQ ID NO: 685389 - DNA, 15 bp, Homo sapiens
acaataggccccaac

SEQ ID NO: 685390 - DNA, 15 bp, Homo sapiens
caataggccccaacc

SEQ ID NO: 685391 - DNA, 15 bp, Homo sapiens
aataggccccaaccc

SEQ ID NO: 685392 - DNA, 15 bp, Homo sapiens
ataggccccaaccca

SEQ ID NO: 685393 - DNA, 15 bp, Homo sapiens
taggccccaacccag

SEQ ID NO: 685394 - DNA, 15 bp, Homo sapiens
aggccccaacccagg

SEQ ID NO: 685395 - DNA, 15 bp, Homo sapiens
ggccccaacccaggt

SEQ ID NO: 685396 - DNA, 15 bp, Homo sapiens
gccccaacccaggtt

SEQ ID NO: 685397 - DNA, 15 bp, Homo sapiens
ccccaacccaggttc

SEQ ID NO: 685398 - DNA, 15 bp, Homo sapiens
cccaacccaggttct

SEQ ID NO: 685399 - DNA, 15 bp, Homo sapiens
ccaacccaggttcta

SEQ ID NO: 685400 - DNA, 15 bp, Homo sapiens
caacccaggttctac

SEQ ID NO: 685401 - DNA, 15 bp, Homo sapiens
aacccaggttctacc

SEQ ID NO: 685402 - DNA, 15 bp, Homo sapiens
acccaggttctacca

SEQ ID NO: 685403 - DNA, 15 bp, Homo sapiens
cccaggttctaccaa

SEQ ID NO: 685404 - DNA, 15 bp, Homo sapiens
ccaggttctaccaaa

SEQ ID NO: 685405 - DNA, 15 bp, Homo sapiens
caggttctaccaaac

SEQ ID NO: 685406 - DNA, 15 bp, Homo sapiens
aggttctaccaaaca

SEQ ID NO: 685407 - DNA, 15 bp, Homo sapiens
ggttctaccaaacac

SEQ ID NO: 685408 - DNA, 15 bp, Homo sapiens
gttctaccaaacacg

SEQ ID NO: 685409 - DNA, 15 bp, Homo sapiens
ttctaccaaacacgg

SEQ ID NO: 685410 - DNA, 15 bp, Homo sapiens
tctaccaaacacgga

SEQ ID NO: 685411 - DNA, 15 bp, Homo sapiens
ctaccaaacacggaa

SEQ ID NO: 685412 - DNA, 15 bp, Homo sapiens
taccaaacacggaag

SEQ ID NO: 685413 - DNA, 15 bp, Homo sapiens
accaaacacggaagc

SEQ ID NO: 685414 - DNA, 15 bp, Homo sapiens
ccaaacacggaagca

SEQ ID NO: 685415 - DNA, 15 bp, Homo sapiens
caaacacggaagcag

SEQ ID NO: 685416 - DNA, 15 bp, Homo sapiens
aaacacggaagcagg

SEQ ID NO: 685417 - DNA, 15 bp, Homo sapiens
aacacggaagcagga

SEQ ID NO: 685418 - DNA, 15 bp, Homo sapiens
acacggaagcaggac

SEQ ID NO: 685419 - DNA, 15 bp, Homo sapiens
cacggaagcaggacc

SEQ ID NO: 685420 - DNA, 15 bp, Homo sapiens
acggaagcaggaccc

SEQ ID NO: 685421 - DNA, 15 bp, Homo sapiens
cggaagcaggaccca

SEQ ID NO: 685422 - DNA, 15 bp, Homo sapiens
ggaagcaggacccat

SEQ ID NO: 685423 - DNA, 15 bp, Homo sapiens
gaagcaggacccatg

SEQ ID NO: 685424 - DNA, 15 bp, Homo sapiens
aagcaggacccatgc

SEQ ID NO: 685425 - DNA, 15 bp, Homo sapiens
agcaggacccatgct

SEQ ID NO: 685426 - DNA, 15 bp, Homo sapiens
gcaggacccatgctg

SEQ ID NO: 685427 - DNA, 15 bp, Homo sapiens
caggacccatgctga

SEQ ID NO: 685428 - DNA, 15 bp, Homo sapiens
aggacccatgctgag

SEQ ID NO: 685429 - DNA, 15 bp, Homo sapiens
ggacccatgctgaga

SEQ ID NO: 685430 - DNA, 15 bp, Homo sapiens
gacccatgctgagaa

SEQ ID NO: 685431 - DNA, 15 bp, Homo sapiens
acccatgctgagaac

SEQ ID NO: 685432 - DNA, 15 bp, Homo sapiens
cccatgctgagaacc

SEQ ID NO: 685433 - DNA, 15 bp, Homo sapiens
ccatgctgagaacct

SEQ ID NO: 685434 - DNA, 15 bp, Homo sapiens
catgctgagaacctg

SEQ ID NO: 685435 - DNA, 15 bp, Homo sapiens
atgctgagaacctgt

SEQ ID NO: 685436 - DNA, 15 bp, Homo sapiens
tgctgagaacctgta

SEQ ID NO: 685437 - DNA, 15 bp, Homo sapiens
gctgagaacctgtag

SEQ ID NO: 685438 - DNA, 15 bp, Homo sapiens
ctgagaacctgtagc

SEQ ID NO: 685439 - DNA, 15 bp, Homo sapiens
tgagaacctgtagct

SEQ ID NO: 685440 - DNA, 15 bp, Homo sapiens
gagaacctgtagctg

SEQ ID NO: 685441 - DNA, 15 bp, Homo sapiens
agaacctgtagctgc

SEQ ID NO: 685442 - DNA, 15 bp, Homo sapiens
gaacctgtagctgct

SEQ ID NO: 685443 - DNA, 15 bp, Homo sapiens
aacctgtagctgctg

SEQ ID NO: 685444 - DNA, 15 bp, Homo sapiens
acctgtagctgctgt

SEQ ID NO: 685445 - DNA, 15 bp, Homo sapiens
cctgtagctgctgtt

SEQ ID NO: 685446 - DNA, 15 bp, Homo sapiens
ctgtagctgctgttt

SEQ ID NO: 685447 - DNA, 15 bp, Homo sapiens
tgtagctgctgtttc

SEQ ID NO: 685448 - DNA, 15 bp, Homo sapiens
gtagctgctgtttct

SEQ ID NO: 685449 - DNA, 15 bp, Homo sapiens
tagctgctgtttcta

SEQ ID NO: 685450 - DNA, 15 bp, Homo sapiens
agctgctgtttctag

SEQ ID NO: 685451 - DNA, 15 bp, Homo sapiens
gctgctgtttctagg

SEQ ID NO: 685452 - DNA, 15 bp, Homo sapiens
ctgctgtttctaggt

SEQ ID NO: 685453 - DNA, 15 bp, Homo sapiens
tgctgtttctaggtc

SEQ ID NO: 685454 - DNA, 15 bp, Homo sapiens
gctgtttctaggtct

SEQ ID NO: 685455 - DNA, 15 bp, Homo sapiens
ctgtttctaggtctg

SEQ ID NO: 685456 - DNA, 15 bp, Homo sapiens
tgtttctaggtctga

SEQ ID NO: 685457 - DNA, 15 bp, Homo sapiens
gtttctaggtctgaa

SEQ ID NO: 685458 - DNA, 15 bp, Homo sapiens
tttctaggtctgaag

SEQ ID NO: 685459 - DNA, 15 bp, Homo sapiens
ttctaggtctgaaga

SEQ ID NO: 685460 - DNA, 15 bp, Homo sapiens
tctaggtctgaagat

SEQ ID NO: 685461 - DNA, 15 bp, Homo sapiens
ctaggtctgaagata

SEQ ID NO: 685462 - DNA, 15 bp, Homo sapiens
taggtctgaagataa

SEQ ID NO: 685463 - DNA, 15 bp, Homo sapiens
aggtctgaagataag

SEQ ID NO: 685464 - DNA, 15 bp, Homo sapiens
ggtctgaagataaga

SEQ ID NO: 685465 - DNA, 15 bp, Homo sapiens
gtctgaagataagaa

SEQ ID NO: 685466 - DNA, 15 bp, Homo sapiens
tctgaagataagaag

SEQ ID NO: 685467 - DNA, 15 bp, Homo sapiens
ctgaagataagaaga

SEQ ID NO: 685468 - DNA, 15 bp, Homo sapiens
tgaagataagaagaa

SEQ ID NO: 685469 - DNA, 15 bp, Homo sapiens
gaagataagaagaat

SEQ ID NO: 685470 - DNA, 15 bp, Homo sapiens
aagataagaagaatg

SEQ ID NO: 685471 - DNA, 15 bp, Homo sapiens
agataagaagaatga

SEQ ID NO: 685472 - DNA, 15 bp, Homo sapiens
gataagaagaatgaa

SEQ ID NO: 685473 - DNA, 15 bp, Homo sapiens
ataagaagaatgaaa

SEQ ID NO: 685474 - DNA, 15 bp, Homo sapiens
taagaagaatgaaaa

SEQ ID NO: 685475 - DNA, 15 bp, Homo sapiens
aagaagaatgaaaag

SEQ ID NO: 685476 - DNA, 15 bp, Homo sapiens
agaagaatgaaaagc

SEQ ID NO: 685477 - DNA, 15 bp, Homo sapiens
gaagaatgaaaagca

SEQ ID NO: 685478 - DNA, 15 bp, Homo sapiens
aagaatgaaaagcat

SEQ ID NO: 685479 - DNA, 15 bp, Homo sapiens
agaatgaaaagcatg

SEQ ID NO: 685480 - DNA, 15 bp, Homo sapiens
gaatgaaaagcatgt

SEQ ID NO: 685481 - DNA, 15 bp, Homo sapiens
aatgaaaagcatgta

SEQ ID NO: 685482 - DNA, 15 bp, Homo sapiens
atgaaaagcatgtac

SEQ ID NO: 685483 - DNA, 15 bp, Homo sapiens
tgaaaagcatgtaca

SEQ ID NO: 685484 - DNA, 15 bp, Homo sapiens
gaaaagcatgtacag

SEQ ID NO: 685485 - DNA, 15 bp, Homo sapiens
aaaagcatgtacagg

SEQ ID NO: 685486 - DNA, 15 bp, Homo sapiens
aaagcatgtacaggc

SEQ ID NO: 685487 - DNA, 15 bp, Homo sapiens
aagcatgtacaggcc

SEQ ID NO: 685488 - DNA, 15 bp, Homo sapiens
agcatgtacaggcca

SEQ ID NO: 685489 - DNA, 15 bp, Homo sapiens
gcatgtacaggccag

SEQ ID NO: 685490 - DNA, 15 bp, Homo sapiens
catgtacaggccagg

SEQ ID NO: 685491 - DNA, 15 bp, Homo sapiens
atgtacaggccaggc

SEQ ID NO: 685492 - DNA, 15 bp, Homo sapiens
tgtacaggccaggca

SEQ ID NO: 685493 - DNA, 15 bp, Homo sapiens
gtacaggccaggcat

SEQ ID NO: 685494 - DNA, 15 bp, Homo sapiens
tacaggccaggcatg

SEQ ID NO: 685495 - DNA, 15 bp, Homo sapiens
acaggccaggcatgg

SEQ ID NO: 685496 - DNA, 15 bp, Homo sapiens
caggccaggcatggt

SEQ ID NO: 685497 - DNA, 15 bp, Homo sapiens
aggccaggcatggtg

SEQ ID NO: 685498 - DNA, 15 bp, Homo sapiens
ggccaggcatggtgg

SEQ ID NO: 685499 - DNA, 15 bp, Homo sapiens
gccaggcatggtggc

SEQ ID NO: 685500 - DNA, 15 bp, Homo sapiens
ccaggcatggtggct

SEQ ID NO: 685501 - DNA, 15 bp, Homo sapiens
caggcatggtggctc

SEQ ID NO: 685502 - DNA, 15 bp, Homo sapiens
aggcatggtggctca

SEQ ID NO: 685503 - DNA, 15 bp, Homo sapiens
ggcatggtggctcat

SEQ ID NO: 685504 - DNA, 15 bp, Homo sapiens
gcatggtggctcatg

SEQ ID NO: 685505 - DNA, 15 bp, Homo sapiens
catggtggctcatgc

SEQ ID NO: 685506 - DNA, 15 bp, Homo sapiens
atggtggctcatgcc

SEQ ID NO: 685507 - DNA, 15 bp, Homo sapiens
tggtggctcatgcct

SEQ ID NO: 685508 - DNA, 15 bp, Homo sapiens
ggtggctcatgcctg

SEQ ID NO: 685509 - DNA, 15 bp, Homo sapiens
gtggctcatgcctgt

SEQ ID NO: 685510 - DNA, 15 bp, Homo sapiens
tggctcatgcctgta

SEQ ID NO: 685511 - DNA, 15 bp, Homo sapiens
ggctcatgcctgtaa

SEQ ID NO: 685512 - DNA, 15 bp, Homo sapiens
gctcatgcctgtaat

SEQ ID NO: 685513 - DNA, 15 bp, Homo sapiens
tcatgcctgtaatct

SEQ ID NO: 685514 - DNA, 15 bp, Homo sapiens
catgcctgtaatctc

SEQ ID NO: 685515 - DNA, 15 bp, Homo sapiens
atgcctgtaatctca

SEQ ID NO: 685516 - DNA, 15 bp, Homo sapiens
tgcctgtaatctcag

SEQ ID NO: 685517 - DNA, 15 bp, Homo sapiens
gcctgtaatctcagc

SEQ ID NO: 685518 - DNA, 15 bp, Homo sapiens
cctgtaatctcagca

SEQ ID NO: 685519 - DNA, 15 bp, Homo sapiens
ctgtaatctcagcac

SEQ ID NO: 685520 - DNA, 15 bp, Homo sapiens
tgtaatctcagcact

SEQ ID NO: 685521 - DNA, 15 bp, Homo sapiens
gtaatctcagcactt

SEQ ID NO: 685522 - DNA, 15 bp, Homo sapiens
taatctcagcacttt

SEQ ID NO: 685523 - DNA, 15 bp, Homo sapiens
aatctcagcactttg

SEQ ID NO: 685524 - DNA, 15 bp, Homo sapiens
atctcagcactttgg

SEQ ID NO: 685525 - DNA, 15 bp, Homo sapiens
tctcagcactttgga

SEQ ID NO: 685526 - DNA, 15 bp, Homo sapiens
ctcagcactttggaa

SEQ ID NO: 685527 - DNA, 15 bp, Homo sapiens
tcagcactttggaag

SEQ ID NO: 685528 - DNA, 15 bp, Homo sapiens
cagcactttggaagg

SEQ ID NO: 685529 - DNA, 15 bp, Homo sapiens
agcactttggaaggc

SEQ ID NO: 685530 - DNA, 15 bp, Homo sapiens
gcactttggaaggct

SEQ ID NO: 685531 - DNA, 15 bp, Homo sapiens
cactttggaaggctg

SEQ ID NO: 685532 - DNA, 15 bp, Homo sapiens
actttggaaggctga

SEQ ID NO: 685533 - DNA, 15 bp, Homo sapiens
ctttggaaggctgag

SEQ ID NO: 685534 - DNA, 15 bp, Homo sapiens
tttggaaggctgagg

SEQ ID NO: 685535 - DNA, 15 bp, Homo sapiens
ttggaaggctgaggc

SEQ ID NO: 685536 - DNA, 15 bp, Homo sapiens
tggaaggctgaggca

SEQ ID NO: 685537 - DNA, 15 bp, Homo sapiens
ggaaggctgaggcag

SEQ ID NO: 685538 - DNA, 15 bp, Homo sapiens
gaaggctgaggcagg

SEQ ID NO: 685539 - DNA, 15 bp, Homo sapiens
aaggctgaggcaggt

SEQ ID NO: 685540 - DNA, 15 bp, Homo sapiens
aggctgaggcaggtg

SEQ ID NO: 685541 - DNA, 15 bp, Homo sapiens
ggctgaggcaggtgg

SEQ ID NO: 685542 - DNA, 15 bp, Homo sapiens
gctgaggcaggtgga

SEQ ID NO: 685543 - DNA, 15 bp, Homo sapiens
ctgaggcaggtggat

SEQ ID NO: 685544 - DNA, 15 bp, Homo sapiens
tgaggcaggtggatc

SEQ ID NO: 685545 - DNA, 15 bp, Homo sapiens
gaggcaggtggatca

SEQ ID NO: 685546 - DNA, 15 bp, Homo sapiens
aggcaggtggatcac

SEQ ID NO: 685547 - DNA, 15 bp, Homo sapiens
ggcaggtggatcacc

SEQ ID NO: 685548 - DNA, 15 bp, Homo sapiens
gcaggtggatcacct

SEQ ID NO: 685549 - DNA, 15 bp, Homo sapiens
caggtggatcacctg

SEQ ID NO: 685550 - DNA, 15 bp, Homo sapiens
aggtggatcacctga

SEQ ID NO: 685551 - DNA, 15 bp, Homo sapiens
ggtggatcacctgag

SEQ ID NO: 685552 - DNA, 15 bp, Homo sapiens
gtggatcacctgagg

SEQ ID NO: 685553 - DNA, 15 bp, Homo sapiens
tggatcacctgaggt

SEQ ID NO: 685554 - DNA, 15 bp, Homo sapiens
ggatcacctgaggtc

SEQ ID NO: 685555 - DNA, 15 bp, Homo sapiens
gatcacctgaggtca

SEQ ID NO: 685556 - DNA, 15 bp, Homo sapiens
atcacctgaggtcag

SEQ ID NO: 685557 - DNA, 15 bp, Homo sapiens
tcacctgaggtcagg

SEQ ID NO: 685558 - DNA, 15 bp, Homo sapiens
cacctgaggtcagga

SEQ ID NO: 685559 - DNA, 15 bp, Homo sapiens
acctgaggtcaggag

SEQ ID NO: 685560 - DNA, 15 bp, Homo sapiens
cctgaggtcaggagt

SEQ ID NO: 685561 - DNA, 15 bp, Homo sapiens
ctgaggtcaggagtt

SEQ ID NO: 685562 - DNA, 15 bp, Homo sapiens
tgaggtcaggagttt

SEQ ID NO: 685563 - DNA, 15 bp, Homo sapiens
gaggtcaggagtttg

SEQ ID NO: 685564 - DNA, 15 bp, Homo sapiens
aggtcaggagtttga

SEQ ID NO: 685565 - DNA, 15 bp, Homo sapiens
ggtcaggagtttgag

SEQ ID NO: 685566 - DNA, 15 bp, Homo sapiens
gtcaggagtttgaga

SEQ ID NO: 685567 - DNA, 15 bp, Homo sapiens
tcaggagtttgagac

SEQ ID NO: 685568 - DNA, 15 bp, Homo sapiens
caggagtttgagacc

SEQ ID NO: 685569 - DNA, 15 bp, Homo sapiens
aggagtttgagacca

SEQ ID NO: 685570 - DNA, 15 bp, Homo sapiens
ggagtttgagaccag

SEQ ID NO: 685571 - DNA, 15 bp, Homo sapiens
gagtttgagaccagc

SEQ ID NO: 685572 - DNA, 15 bp, Homo sapiens
agtttgagaccagcc

SEQ ID NO: 685573 - DNA, 15 bp, Homo sapiens
gtttgagaccagcct

SEQ ID NO: 685574 - DNA, 15 bp, Homo sapiens
tttgagaccagcctg

SEQ ID NO: 685575 - DNA, 15 bp, Homo sapiens
ttgagaccagcctgg

SEQ ID NO: 685576 - DNA, 15 bp, Homo sapiens
tgagaccagcctggc

SEQ ID NO: 685577 - DNA, 15 bp, Homo sapiens
gagaccagcctggcc

SEQ ID NO: 685578 - DNA, 15 bp, Homo sapiens
agaccagcctggcca

SEQ ID NO: 685579 - DNA, 15 bp, Homo sapiens
gaccagcctggccaa

SEQ ID NO: 685580 - DNA, 15 bp, Homo sapiens
accagcctggccaac

SEQ ID NO: 685581 - DNA, 15 bp, Homo sapiens
ccagcctggccaaca

SEQ ID NO: 685582 - DNA, 15 bp, Homo sapiens
cagcctggccaacat

SEQ ID NO: 685583 - DNA, 15 bp, Homo sapiens
agcctggccaacatg

SEQ ID NO: 685584 - DNA, 15 bp, Homo sapiens
gcctggccaacatgg

SEQ ID NO: 685585 - DNA, 15 bp, Homo sapiens
cctggccaacatggt

SEQ ID NO: 685586 - DNA, 15 bp, Homo sapiens
ctggccaacatggta

SEQ ID NO: 685587 - DNA, 15 bp, Homo sapiens
tggccaacatggtaa

SEQ ID NO: 685588 - DNA, 15 bp, Homo sapiens
ggccaacatggtaaa

SEQ ID NO: 685589 - DNA, 15 bp, Homo sapiens
gccaacatggtaaaa

SEQ ID NO: 685590 - DNA, 15 bp, Homo sapiens
ccaacatggtaaaac

SEQ ID NO: 685591 - DNA, 15 bp, Homo sapiens
caacatggtaaaacc

SEQ ID NO: 685592 - DNA, 15 bp, Homo sapiens
aacatggtaaaaccc

SEQ ID NO: 685593 - DNA, 15 bp, Homo sapiens
acatggtaaaacccc

SEQ ID NO: 685594 - DNA, 15 bp, Homo sapiens
catggtaaaaccccg

SEQ ID NO: 685595 - DNA, 15 bp, Homo sapiens
atggtaaaaccccgc

SEQ ID NO: 685596 - DNA, 15 bp, Homo sapiens
tggtaaaaccccgcc

SEQ ID NO: 685597 - DNA, 15 bp, Homo sapiens
ggtaaaaccccgcct

SEQ ID NO: 685598 - DNA, 15 bp, Homo sapiens
gtaaaaccccgcctc

SEQ ID NO: 685599 - DNA, 15 bp, Homo sapiens
taaaaccccgcctct

SEQ ID NO: 685600 - DNA, 15 bp, Homo sapiens
aaaaccccgcctcta

SEQ ID NO: 685601 - DNA, 15 bp, Homo sapiens
aaaccccgcctctac

SEQ ID NO: 685602 - DNA, 15 bp, Homo sapiens
aaccccgcctctact

SEQ ID NO: 685603 - DNA, 15 bp, Homo sapiens
accccgcctctacta

SEQ ID NO: 685604 - DNA, 15 bp, Homo sapiens
ccccgcctctactaa

SEQ ID NO: 685605 - DNA, 15 bp, Homo sapiens
cccgcctctactaaa

SEQ ID NO: 685606 - DNA, 15 bp, Homo sapiens
ccgcctctactaaaa

SEQ ID NO: 685607 - DNA, 15 bp, Homo sapiens
cgcctctactaaaaa

SEQ ID NO: 685608 - DNA, 15 bp, Homo sapiens
gcctctactaaaaat

SEQ ID NO: 685609 - DNA, 15 bp, Homo sapiens
cctctactaaaaata

SEQ ID NO: 685610 - DNA, 15 bp, Homo sapiens
ctctactaaaaatac

SEQ ID NO: 685611 - DNA, 15 bp, Homo sapiens
tctactaaaaataca

SEQ ID NO: 685612 - DNA, 15 bp, Homo sapiens
ctactaaaaatacaa

SEQ ID NO: 685613 - DNA, 15 bp, Homo sapiens
tactaaaaatacaaa

SEQ ID NO: 685614 - DNA, 15 bp, Homo sapiens
actaaaaatacaaaa

SEQ ID NO: 685615 - DNA, 15 bp, Homo sapiens
ctaaaaatacaaaaa

SEQ ID NO: 685616 - DNA, 15 bp, Homo sapiens
taaaaatacaaaaat

SEQ ID NO: 685617 - DNA, 15 bp, Homo sapiens
aaaaatacaaaaatt

SEQ ID NO: 685618 - DNA, 15 bp, Homo sapiens
aaaatacaaaaatta

SEQ ID NO: 685619 - DNA, 15 bp, Homo sapiens
aaatacaaaaattag

SEQ ID NO: 685620 - DNA, 15 bp, Homo sapiens
aatacaaaaattagc

SEQ ID NO: 685621 - DNA, 15 bp, Homo sapiens
atacaaaaattagcc

SEQ ID NO: 685622 - DNA, 15 bp, Homo sapiens
tacaaaaattagcca

SEQ ID NO: 685623 - DNA, 15 bp, Homo sapiens
acaaaaattagccag

SEQ ID NO: 685624 - DNA, 15 bp, Homo sapiens
caaaaattagccagg

SEQ ID NO: 685625 - DNA, 15 bp, Homo sapiens
aaaaattagccaggc

SEQ ID NO: 685626 - DNA, 15 bp, Homo sapiens
aaaattagccaggca

SEQ ID NO: 685627 - DNA, 15 bp, Homo sapiens
aaattagccaggcat

SEQ ID NO: 685628 - DNA, 15 bp, Homo sapiens
aattagccaggcatg

SEQ ID NO: 685629 - DNA, 15 bp, Homo sapiens
attagccaggcatgg

SEQ ID NO: 685630 - DNA, 15 bp, Homo sapiens
ttagccaggcatggt

SEQ ID NO: 685631 - DNA, 15 bp, Homo sapiens
tagccaggcatggtg

SEQ ID NO: 685632 - DNA, 15 bp, Homo sapiens
agccaggcatggtgg

SEQ ID NO: 685633 - DNA, 15 bp, Homo sapiens
gccaggcatggtggt

SEQ ID NO: 685634 - DNA, 15 bp, Homo sapiens
ccaggcatggtggtg

SEQ ID NO: 685635 - DNA, 15 bp, Homo sapiens
caggcatggtggtgg

SEQ ID NO: 685636 - DNA, 15 bp, Homo sapiens
aggcatggtggtggt

SEQ ID NO: 685637 - DNA, 15 bp, Homo sapiens
ggcatggtggtggtt

SEQ ID NO: 685638 - DNA, 15 bp, Homo sapiens
gcatggtggtggttg

SEQ ID NO: 685639 - DNA, 15 bp, Homo sapiens
catggtggtggttgc

SEQ ID NO: 685640 - DNA, 15 bp, Homo sapiens
atggtggtggttgcc

SEQ ID NO: 685641 - DNA, 15 bp, Homo sapiens
tggtggtggttgcct

SEQ ID NO: 685642 - DNA, 15 bp, Homo sapiens
ggtggtggttgcctg

SEQ ID NO: 685643 - DNA, 15 bp, Homo sapiens
gtggtggttgcctgt

SEQ ID NO: 685644 - DNA, 15 bp, Homo sapiens
tggtggttgcctgta

SEQ ID NO: 685645 - DNA, 15 bp, Homo sapiens
ggtggttgcctgtaa

SEQ ID NO: 685646 - DNA, 15 bp, Homo sapiens
gtggttgcctgtaat

SEQ ID NO: 685647 - DNA, 15 bp, Homo sapiens
tggttgcctgtaatc

SEQ ID NO: 685648 - DNA, 15 bp, Homo sapiens
ggttgcctgtaatcc

SEQ ID NO: 685649 - DNA, 15 bp, Homo sapiens
gttgcctgtaatccc

SEQ ID NO: 685650 - DNA, 15 bp, Homo sapiens
ttgcctgtaatccca

SEQ ID NO: 685651 - DNA, 15 bp, Homo sapiens
cttgggaggctgagg

SEQ ID NO: 685652 - DNA, 15 bp, Homo sapiens
ttgggaggctgaggc

SEQ ID NO: 685653 - DNA, 15 bp, Homo sapiens
tgggaggctgaggca

SEQ ID NO: 685654 - DNA, 15 bp, Homo sapiens
gggaggctgaggcag

SEQ ID NO: 685655 - DNA, 15 bp, Homo sapiens
ggaggctgaggcagg

SEQ ID NO: 685656 - DNA, 15 bp, Homo sapiens
gaggctgaggcagga

SEQ ID NO: 685657 - DNA, 15 bp, Homo sapiens
aggctgaggcaggag

SEQ ID NO: 685658 - DNA, 15 bp, Homo sapiens
ggctgaggcaggaga

SEQ ID NO: 685659 - DNA, 15 bp, Homo sapiens
gctgaggcaggagaa

SEQ ID NO: 685660 - DNA, 15 bp, Homo sapiens
ctgaggcaggagaat

SEQ ID NO: 685661 - DNA, 15 bp, Homo sapiens
tgaggcaggagaatc

SEQ ID NO: 685662 - DNA, 15 bp, Homo sapiens
gaggcaggagaatca

SEQ ID NO: 685663 - DNA, 15 bp, Homo sapiens
aggcaggagaatcac

SEQ ID NO: 685664 - DNA, 15 bp, Homo sapiens
ggcaggagaatcact

SEQ ID NO: 685665 - DNA, 15 bp, Homo sapiens
gcaggagaatcactt

SEQ ID NO: 685666 - DNA, 15 bp, Homo sapiens
caggagaatcacttg

SEQ ID NO: 685667 - DNA, 15 bp, Homo sapiens
aggagaatcacttga

SEQ ID NO: 685668 - DNA, 15 bp, Homo sapiens
ggagaatcacttgaa

SEQ ID NO: 685669 - DNA, 15 bp, Homo sapiens
gagaatcacttgaat

SEQ ID NO: 685670 - DNA, 15 bp, Homo sapiens
agaatcacttgaatt

SEQ ID NO: 685671 - DNA, 15 bp, Homo sapiens
gaatcacttgaattt

SEQ ID NO: 685672 - DNA, 15 bp, Homo sapiens
aatcacttgaatttg

SEQ ID NO: 685673 - DNA, 15 bp, Homo sapiens
atcacttgaatttgg

SEQ ID NO: 685674 - DNA, 15 bp, Homo sapiens
tcacttgaatttggg

SEQ ID NO: 685675 - DNA, 15 bp, Homo sapiens
cacttgaatttggga

SEQ ID NO: 685676 - DNA, 15 bp, Homo sapiens
acttgaatttgggag

SEQ ID NO: 685677 - DNA, 15 bp, Homo sapiens
cttgaatttgggagg

SEQ ID NO: 685678 - DNA, 15 bp, Homo sapiens
ttgaatttgggaggc

SEQ ID NO: 685679 - DNA, 15 bp, Homo sapiens
tgaatttgggaggca

SEQ ID NO: 685680 - DNA, 15 bp, Homo sapiens
gaatttgggaggcag

SEQ ID NO: 685681 - DNA, 15 bp, Homo sapiens
aatttgggaggcaga

SEQ ID NO: 685682 - DNA, 15 bp, Homo sapiens
atttgggaggcagag

SEQ ID NO: 685683 - DNA, 15 bp, Homo sapiens
tttgggaggcagaga

SEQ ID NO: 685684 - DNA, 15 bp, Homo sapiens
ttgggaggcagagat

SEQ ID NO: 685685 - DNA, 15 bp, Homo sapiens
tgggaggcagagatt

SEQ ID NO: 685686 - DNA, 15 bp, Homo sapiens
gggaggcagagattg

SEQ ID NO: 685687 - DNA, 15 bp, Homo sapiens
ggaggcagagattgc

SEQ ID NO: 685688 - DNA, 15 bp, Homo sapiens
gaggcagagattgca

SEQ ID NO: 685689 - DNA, 15 bp, Homo sapiens
aggcagagattgcag

SEQ ID NO: 685690 - DNA, 15 bp, Homo sapiens
ggcagagattgcagt

SEQ ID NO: 685691 - DNA, 15 bp, Homo sapiens
gcagagattgcagtc

SEQ ID NO: 685692 - DNA, 15 bp, Homo sapiens
cagagattgcagtca

SEQ ID NO: 685693 - DNA, 15 bp, Homo sapiens
agagattgcagtcag

SEQ ID NO: 685694 - DNA, 15 bp, Homo sapiens
gagattgcagtcagc

SEQ ID NO: 685695 - DNA, 15 bp, Homo sapiens
agattgcagtcagcc

SEQ ID NO: 685696 - DNA, 15 bp, Homo sapiens
gattgcagtcagcca

SEQ ID NO: 685697 - DNA, 15 bp, Homo sapiens
attgcagtcagccaa

SEQ ID NO: 685698 - DNA, 15 bp, Homo sapiens
ttgcagtcagccaag

SEQ ID NO: 685699 - DNA, 15 bp, Homo sapiens
tgcagtcagccaaga

SEQ ID NO: 685700 - DNA, 15 bp, Homo sapiens
gcagtcagccaagat

SEQ ID NO: 685701 - DNA, 15 bp, Homo sapiens
cagtcagccaagatt

SEQ ID NO: 685702 - DNA, 15 bp, Homo sapiens
agtcagccaagattg

SEQ ID NO: 685703 - DNA, 15 bp, Homo sapiens
gtcagccaagattgc

SEQ ID NO: 685704 - DNA, 15 bp, Homo sapiens
tcagccaagattgca

SEQ ID NO: 685705 - DNA, 15 bp, Homo sapiens
cagccaagattgcac

SEQ ID NO: 685706 - DNA, 15 bp, Homo sapiens
agccaagattgcacc

SEQ ID NO: 685707 - DNA, 15 bp, Homo sapiens
gccaagattgcacca

SEQ ID NO: 685708 - DNA, 15 bp, Homo sapiens
ccaagattgcaccac

SEQ ID NO: 685709 - DNA, 15 bp, Homo sapiens
caagattgcaccact

SEQ ID NO: 685710 - DNA, 15 bp, Homo sapiens
aagattgcaccactg

SEQ ID NO: 685711 - DNA, 15 bp, Homo sapiens
agattgcaccactgc

SEQ ID NO: 685712 - DNA, 15 bp, Homo sapiens
gattgcaccactgca

SEQ ID NO: 685713 - DNA, 15 bp, Homo sapiens
attgcaccactgcat

SEQ ID NO: 685714 - DNA, 15 bp, Homo sapiens
ttgcaccactgcatc

SEQ ID NO: 685715 - DNA, 15 bp, Homo sapiens
tgcaccactgcatcc

SEQ ID NO: 685716 - DNA, 15 bp, Homo sapiens
gcaccactgcatccc

SEQ ID NO: 685717 - DNA, 15 bp, Homo sapiens
caccactgcatccca

SEQ ID NO: 685718 - DNA, 15 bp, Homo sapiens
accactgcatcccag

SEQ ID NO: 685719 - DNA, 15 bp, Homo sapiens
ccactgcatcccagc

SEQ ID NO: 685720 - DNA, 15 bp, Homo sapiens
cactgcatcccagcc

SEQ ID NO: 685721 - DNA, 15 bp, Homo sapiens
actgcatcccagcct

SEQ ID NO: 685722 - DNA, 15 bp, Homo sapiens
ctgcatcccagcctg

SEQ ID NO: 685723 - DNA, 15 bp, Homo sapiens
tgcatcccagcctgg

SEQ ID NO: 685724 - DNA, 15 bp, Homo sapiens
gcatcccagcctggg

SEQ ID NO: 685725 - DNA, 15 bp, Homo sapiens
catcccagcctgggt

SEQ ID NO: 685726 - DNA, 15 bp, Homo sapiens
atcccagcctgggtg

SEQ ID NO: 685727 - DNA, 15 bp, Homo sapiens
tcccagcctgggtga

SEQ ID NO: 685728 - DNA, 15 bp, Homo sapiens
cccagcctgggtgac

SEQ ID NO: 685729 - DNA, 15 bp, Homo sapiens
ccagcctgggtgaca

SEQ ID NO: 685730 - DNA, 15 bp, Homo sapiens
cagcctgggtgacag

SEQ ID NO: 685731 - DNA, 15 bp, Homo sapiens
agcctgggtgacaga

SEQ ID NO: 685732 - DNA, 15 bp, Homo sapiens
gcctgggtgacagaa

SEQ ID NO: 685733 - DNA, 15 bp, Homo sapiens
cctgggtgacagaat

SEQ ID NO: 685734 - DNA, 15 bp, Homo sapiens
ctgggtgacagaatg

SEQ ID NO: 685735 - DNA, 15 bp, Homo sapiens
tgggtgacagaatga

SEQ ID NO: 685736 - DNA, 15 bp, Homo sapiens
gggtgacagaatgag

SEQ ID NO: 685737 - DNA, 15 bp, Homo sapiens
ggtgacagaatgaga

SEQ ID NO: 685738 - DNA, 15 bp, Homo sapiens
gtgacagaatgagac

SEQ ID NO: 685739 - DNA, 15 bp, Homo sapiens
tgacagaatgagact

SEQ ID NO: 685740 - DNA, 15 bp, Homo sapiens
gacagaatgagactc

SEQ ID NO: 685741 - DNA, 15 bp, Homo sapiens
acagaatgagactcc

SEQ ID NO: 685742 - DNA, 15 bp, Homo sapiens
cagaatgagactcca

SEQ ID NO: 685743 - DNA, 15 bp, Homo sapiens
agaatgagactccat

SEQ ID NO: 685744 - DNA, 15 bp, Homo sapiens
gaatgagactccatc

SEQ ID NO: 685745 - DNA, 15 bp, Homo sapiens
aatgagactccatct

SEQ ID NO: 685746 - DNA, 15 bp, Homo sapiens
atgagactccatctc

SEQ ID NO: 685747 - DNA, 15 bp, Homo sapiens
tgagactccatctca

SEQ ID NO: 685748 - DNA, 15 bp, Homo sapiens
gagactccatctcaa

SEQ ID NO: 685749 - DNA, 15 bp, Homo sapiens
agactccatctcaaa

SEQ ID NO: 685750 - DNA, 15 bp, Homo sapiens
gactccatctcaaaa

SEQ ID NO: 685751 - DNA, 15 bp, Homo sapiens
actccatctcaaaaa

SEQ ID NO: 685752 - DNA, 15 bp, Homo sapiens
ctccatctcaaaaaa

SEQ ID NO: 685753 - DNA, 15 bp, Homo sapiens
tccatctcaaaaaaa

SEQ ID NO: 685754 - DNA, 15 bp, Homo sapiens
ccatctcaaaaaaaa

SEQ ID NO: 685755 - DNA, 15 bp, Homo sapiens
catctcaaaaaaaaa

SEQ ID NO: 685756 - DNA, 15 bp, Homo sapiens
atctcaaaaaaaaaa

SEQ ID NO: 685757 - DNA, 15 bp, Homo sapiens
tctcaaaaaaaaaag

SEQ ID NO: 685758 - DNA, 15 bp, Homo sapiens
ctcaaaaaaaaaagt

SEQ ID NO: 685759 - DNA, 15 bp, Homo sapiens
tcaaaaaaaaaagta

SEQ ID NO: 685760 - DNA, 15 bp, Homo sapiens
caaaaaaaaaagtaa

SEQ ID NO: 685761 - DNA, 15 bp, Homo sapiens
aaaaaaaaaagtaag

SEQ ID NO: 685762 - DNA, 15 bp, Homo sapiens
aaaaaaaaagtaagg

SEQ ID NO: 685763 - DNA, 15 bp, Homo sapiens
aaaaaaaagtaagga

SEQ ID NO: 685764 - DNA, 15 bp, Homo sapiens
aaaaaaagtaaggaa

SEQ ID NO: 685765 - DNA, 15 bp, Homo sapiens
aaaaaagtaaggaaa

SEQ ID NO: 685766 - DNA, 15 bp, Homo sapiens
aaaaagtaaggaaaa

SEQ ID NO: 685767 - DNA, 15 bp, Homo sapiens
aaaagtaaggaaaaa

SEQ ID NO: 685768 - DNA, 15 bp, Homo sapiens
aaagtaaggaaaaaa

SEQ ID NO: 685769 - DNA, 15 bp, Homo sapiens
aagtaaggaaaaaag

SEQ ID NO: 685770 - DNA, 15 bp, Homo sapiens
agtaaggaaaaaaga

SEQ ID NO: 685771 - DNA, 15 bp, Homo sapiens
gtaaggaaaaaagaa

SEQ ID NO: 685772 - DNA, 15 bp, Homo sapiens
taaggaaaaaagaaa

SEQ ID NO: 685773 - DNA, 15 bp, Homo sapiens
aaggaaaaaagaaaa

SEQ ID NO: 685774 - DNA, 15 bp, Homo sapiens
aggaaaaaagaaaat

SEQ ID NO: 685775 - DNA, 15 bp, Homo sapiens
ggaaaaaagaaaatc

SEQ ID NO: 685776 - DNA, 15 bp, Homo sapiens
gaaaaaagaaaatca

SEQ ID NO: 685777 - DNA, 15 bp, Homo sapiens
aaaaaagaaaatcat

SEQ ID NO: 685778 - DNA, 15 bp, Homo sapiens
aaaaagaaaatcatg

SEQ ID NO: 685779 - DNA, 15 bp, Homo sapiens
aaaagaaaatcatgt

SEQ ID NO: 685780 - DNA, 15 bp, Homo sapiens
aaagaaaatcatgtg

SEQ ID NO: 685781 - DNA, 15 bp, Homo sapiens
aagaaaatcatgtgc

SEQ ID NO: 685782 - DNA, 15 bp, Homo sapiens
agaaaatcatgtgca

SEQ ID NO: 685783 - DNA, 15 bp, Homo sapiens
gaaaatcatgtgcaa

SEQ ID NO: 685784 - DNA, 15 bp, Homo sapiens
aaaatcatgtgcaat

SEQ ID NO: 685785 - DNA, 15 bp, Homo sapiens
aaatcatgtgcaata

SEQ ID NO: 685786 - DNA, 15 bp, Homo sapiens
aatcatgtgcaatag

SEQ ID NO: 685787 - DNA, 15 bp, Homo sapiens
atcatgtgcaatagt

SEQ ID NO: 685788 - DNA, 15 bp, Homo sapiens
tcatgtgcaatagtg

SEQ ID NO: 685789 - DNA, 15 bp, Homo sapiens
catgtgcaatagtgg

SEQ ID NO: 685790 - DNA, 15 bp, Homo sapiens
atgtgcaatagtggt

SEQ ID NO: 685791 - DNA, 15 bp, Homo sapiens
tgtgcaatagtggta

SEQ ID NO: 685792 - DNA, 15 bp, Homo sapiens
gtgcaatagtggtac

SEQ ID NO: 685793 - DNA, 15 bp, Homo sapiens
tgcaatagtggtaca

SEQ ID NO: 685794 - DNA, 15 bp, Homo sapiens
gcaatagtggtacag

SEQ ID NO: 685795 - DNA, 15 bp, Homo sapiens
caatagtggtacaga

SEQ ID NO: 685796 - DNA, 15 bp, Homo sapiens
aatagtggtacagaa

SEQ ID NO: 685797 - DNA, 15 bp, Homo sapiens
atagtggtacagaaa

SEQ ID NO: 685798 - DNA, 15 bp, Homo sapiens
tagtggtacagaaat

SEQ ID NO: 685799 - DNA, 15 bp, Homo sapiens
agtggtacagaaata

SEQ ID NO: 685800 - DNA, 15 bp, Homo sapiens
gtggtacagaaataa

SEQ ID NO: 685801 - DNA, 15 bp, Homo sapiens
tggtacagaaataaa

SEQ ID NO: 685802 - DNA, 15 bp, Homo sapiens
ggtacagaaataaaa

SEQ ID NO: 685803 - DNA, 15 bp, Homo sapiens
gtacagaaataaaaa

SEQ ID NO: 685804 - DNA, 15 bp, Homo sapiens
tacagaaataaaaat

SEQ ID NO: 685805 - DNA, 15 bp, Homo sapiens
acagaaataaaaata

SEQ ID NO: 685806 - DNA, 15 bp, Homo sapiens
cagaaataaaaataa

SEQ ID NO: 685807 - DNA, 15 bp, Homo sapiens
agaaataaaaataaa

SEQ ID NO: 685808 - DNA, 15 bp, Homo sapiens
gaaataaaaataaaa

SEQ ID NO: 685809 - DNA, 15 bp, Homo sapiens
aaataaaaataaaac

SEQ ID NO: 685810 - DNA, 15 bp, Homo sapiens
aataaaaataaaaca

SEQ ID NO: 685811 - DNA, 15 bp, Homo sapiens
ataaaaataaaacac

SEQ ID NO: 685812 - DNA, 15 bp, Homo sapiens
taaaaataaaacacg

SEQ ID NO: 685813 - DNA, 15 bp, Homo sapiens
aaaaataaaacacga

SEQ ID NO: 685814 - DNA, 15 bp, Homo sapiens
aaaataaaacacgaa

SEQ ID NO: 685815 - DNA, 15 bp, Homo sapiens
aaataaaacacgaag

SEQ ID NO: 685816 - DNA, 15 bp, Homo sapiens
aataaaacacgaagc

SEQ ID NO: 685817 - DNA, 15 bp, Homo sapiens
ataaaacacgaagca

SEQ ID NO: 685818 - DNA, 15 bp, Homo sapiens
taaaacacgaagcaa

SEQ ID NO: 685819 - DNA, 15 bp, Homo sapiens
aaaacacgaagcaaa

SEQ ID NO: 685820 - DNA, 15 bp, Homo sapiens
aaacacgaagcaaaa

SEQ ID NO: 685821 - DNA, 15 bp, Homo sapiens
aacacgaagcaaaat

SEQ ID NO: 685822 - DNA, 15 bp, Homo sapiens
acacgaagcaaaatg

SEQ ID NO: 685823 - DNA, 15 bp, Homo sapiens
cacgaagcaaaatgt

SEQ ID NO: 685824 - DNA, 15 bp, Homo sapiens
acgaagcaaaatgtc

SEQ ID NO: 685825 - DNA, 15 bp, Homo sapiens
cgaagcaaaatgtct

SEQ ID NO: 685826 - DNA, 15 bp, Homo sapiens
gaagcaaaatgtctt

SEQ ID NO: 685827 - DNA, 15 bp, Homo sapiens
aagcaaaatgtcttc

SEQ ID NO: 685828 - DNA, 15 bp, Homo sapiens
agcaaaatgtcttca

SEQ ID NO: 685829 - DNA, 15 bp, Homo sapiens
gcaaaatgtcttcac

SEQ ID NO: 685830 - DNA, 15 bp, Homo sapiens
caaaatgtcttcact

SEQ ID NO: 685831 - DNA, 15 bp, Homo sapiens
aaaatgtcttcactt

SEQ ID NO: 685832 - DNA, 15 bp, Homo sapiens
aaatgtcttcacttg

SEQ ID NO: 685833 - DNA, 15 bp, Homo sapiens
aatgtcttcacttga

SEQ ID NO: 685834 - DNA, 15 bp, Homo sapiens
atgtcttcacttgat

SEQ ID NO: 685835 - DNA, 15 bp, Homo sapiens
tgtcttcacttgata

SEQ ID NO: 685836 - DNA, 15 bp, Homo sapiens
gtcttcacttgatac

SEQ ID NO: 685837 - DNA, 15 bp, Homo sapiens
tcttcacttgatact

SEQ ID NO: 685838 - DNA, 15 bp, Homo sapiens
cttcacttgatacta

SEQ ID NO: 685839 - DNA, 15 bp, Homo sapiens
ttcacttgatactag

SEQ ID NO: 685840 - DNA, 15 bp, Homo sapiens
tcacttgatactagt

SEQ ID NO: 685841 - DNA, 15 bp, Homo sapiens
cacttgatactagta

SEQ ID NO: 685842 - DNA, 15 bp, Homo sapiens
acttgatactagtaa

SEQ ID NO: 685843 - DNA, 15 bp, Homo sapiens
cttgatactagtaat

SEQ ID NO: 685844 - DNA, 15 bp, Homo sapiens
ttgatactagtaatt

SEQ ID NO: 685845 - DNA, 15 bp, Homo sapiens
tgatactagtaattt

SEQ ID NO: 685846 - DNA, 15 bp, Homo sapiens
gatactagtaattta

SEQ ID NO: 685847 - DNA, 15 bp, Homo sapiens
atactagtaatttac

SEQ ID NO: 685848 - DNA, 15 bp, Homo sapiens
tactagtaatttact

SEQ ID NO: 685849 - DNA, 15 bp, Homo sapiens
actagtaatttacta

SEQ ID NO: 685850 - DNA, 15 bp, Homo sapiens
ctagtaatttactaa

SEQ ID NO: 685851 - DNA, 15 bp, Homo sapiens
tagtaatttactaat

SEQ ID NO: 685852 - DNA, 15 bp, Homo sapiens
agtaatttactaata

SEQ ID NO: 685853 - DNA, 15 bp, Homo sapiens
gtaatttactaataa

SEQ ID NO: 685854 - DNA, 15 bp, Homo sapiens
taatttactaataat

SEQ ID NO: 685855 - DNA, 15 bp, Homo sapiens
aatttactaataatt

SEQ ID NO: 685856 - DNA, 15 bp, Homo sapiens
atttactaataattt

SEQ ID NO: 685857 - DNA, 15 bp, Homo sapiens
tttactaataattta

SEQ ID NO: 685858 - DNA, 15 bp, Homo sapiens
ttactaataatttat

SEQ ID NO: 685859 - DNA, 15 bp, Homo sapiens
tactaataatttatc

SEQ ID NO: 685860 - DNA, 15 bp, Homo sapiens
actaataatttatca

SEQ ID NO: 685861 - DNA, 15 bp, Homo sapiens
ctaataatttatcag

SEQ ID NO: 685862 - DNA, 15 bp, Homo sapiens
taataatttatcaga

SEQ ID NO: 685863 - DNA, 15 bp, Homo sapiens
aataatttatcagat

SEQ ID NO: 685864 - DNA, 15 bp, Homo sapiens
ataatttatcagatg

SEQ ID NO: 685865 - DNA, 15 bp, Homo sapiens
taatttatcagatgt

SEQ ID NO: 685866 - DNA, 15 bp, Homo sapiens
aatttatcagatgtt

SEQ ID NO: 685867 - DNA, 15 bp, Homo sapiens
atttatcagatgttt

SEQ ID NO: 685868 - DNA, 15 bp, Homo sapiens
tttatcagatgttta

SEQ ID NO: 685869 - DNA, 15 bp, Homo sapiens
ttatcagatgtttac

SEQ ID NO: 685870 - DNA, 15 bp, Homo sapiens
tatcagatgtttact

SEQ ID NO: 685871 - DNA, 15 bp, Homo sapiens
atcagatgtttacta

SEQ ID NO: 685872 - DNA, 15 bp, Homo sapiens
tcagatgtttactat

SEQ ID NO: 685873 - DNA, 15 bp, Homo sapiens
cagatgtttactatg

SEQ ID NO: 685874 - DNA, 15 bp, Homo sapiens
agatgtttactatgt

SEQ ID NO: 685875 - DNA, 15 bp, Homo sapiens
gatgtttactatgtg

SEQ ID NO: 685876 - DNA, 15 bp, Homo sapiens
atgtttactatgtgc

SEQ ID NO: 685877 - DNA, 15 bp, Homo sapiens
tgtttactatgtgca

SEQ ID NO: 685878 - DNA, 15 bp, Homo sapiens
gtttactatgtgcaa

SEQ ID NO: 685879 - DNA, 15 bp, Homo sapiens
tttactatgtgcaag

SEQ ID NO: 685880 - DNA, 15 bp, Homo sapiens
ttactatgtgcaaga

SEQ ID NO: 685881 - DNA, 15 bp, Homo sapiens
tactatgtgcaagac

SEQ ID NO: 685882 - DNA, 15 bp, Homo sapiens
actatgtgcaagaca

SEQ ID NO: 685883 - DNA, 15 bp, Homo sapiens
ctatgtgcaagacat

SEQ ID NO: 685884 - DNA, 15 bp, Homo sapiens
tatgtgcaagacatt

SEQ ID NO: 685885 - DNA, 15 bp, Homo sapiens
atgtgcaagacattg

SEQ ID NO: 685886 - DNA, 15 bp, Homo sapiens
tgtgcaagacattgt

SEQ ID NO: 685887 - DNA, 15 bp, Homo sapiens
gtgcaagacattgtg

SEQ ID NO: 685888 - DNA, 15 bp, Homo sapiens
tgcaagacattgtgt

SEQ ID NO: 685889 - DNA, 15 bp, Homo sapiens
gcaagacattgtgtt

SEQ ID NO: 685890 - DNA, 15 bp, Homo sapiens
caagacattgtgtta

SEQ ID NO: 685891 - DNA, 15 bp, Homo sapiens
aagacattgtgttaa

SEQ ID NO: 685892 - DNA, 15 bp, Homo sapiens
agacattgtgttaat

SEQ ID NO: 685893 - DNA, 15 bp, Homo sapiens
gacattgtgttaatc

SEQ ID NO: 685894 - DNA, 15 bp, Homo sapiens
acattgtgttaatca

SEQ ID NO: 685895 - DNA, 15 bp, Homo sapiens
cattgtgttaatcac

SEQ ID NO: 685896 - DNA, 15 bp, Homo sapiens
attgtgttaatcact

SEQ ID NO: 685897 - DNA, 15 bp, Homo sapiens
ttgtgttaatcactt

SEQ ID NO: 685898 - DNA, 15 bp, Homo sapiens
tgtgttaatcactta

SEQ ID NO: 685899 - DNA, 15 bp, Homo sapiens
gtgttaatcacttaa

SEQ ID NO: 685900 - DNA, 15 bp, Homo sapiens
tgttaatcacttaac

SEQ ID NO: 685901 - DNA, 15 bp, Homo sapiens
gttaatcacttaaca

SEQ ID NO: 685902 - DNA, 15 bp, Homo sapiens
ttaatcacttaacat

SEQ ID NO: 685903 - DNA, 15 bp, Homo sapiens
taatcacttaacatc

SEQ ID NO: 685904 - DNA, 15 bp, Homo sapiens
aatcacttaacatcc

SEQ ID NO: 685905 - DNA, 15 bp, Homo sapiens
atcacttaacatcca

SEQ ID NO: 685906 - DNA, 15 bp, Homo sapiens
tcacttaacatccat

SEQ ID NO: 685907 - DNA, 15 bp, Homo sapiens
cacttaacatccatc

SEQ ID NO: 685908 - DNA, 15 bp, Homo sapiens
acttaacatccatca

SEQ ID NO: 685909 - DNA, 15 bp, Homo sapiens
cttaacatccatcac

SEQ ID NO: 685910 - DNA, 15 bp, Homo sapiens
ttaacatccatcacc

SEQ ID NO: 685911 - DNA, 15 bp, Homo sapiens
taacatccatcacct

SEQ ID NO: 685912 - DNA, 15 bp, Homo sapiens
aacatccatcacctt

SEQ ID NO: 685913 - DNA, 15 bp, Homo sapiens
acatccatcacctta

SEQ ID NO: 685914 - DNA, 15 bp, Homo sapiens
catccatcaccttat

SEQ ID NO: 685915 - DNA, 15 bp, Homo sapiens
atccatcaccttatt

SEQ ID NO: 685916 - DNA, 15 bp, Homo sapiens
tccatcaccttattc

SEQ ID NO: 685917 - DNA, 15 bp, Homo sapiens
ccatcaccttattca

SEQ ID NO: 685918 - DNA, 15 bp, Homo sapiens
catcaccttattcaa

SEQ ID NO: 685919 - DNA, 15 bp, Homo sapiens
atcaccttattcaat

SEQ ID NO: 685920 - DNA, 15 bp, Homo sapiens
tcaccttattcaatc

SEQ ID NO: 685921 - DNA, 15 bp, Homo sapiens
caccttattcaatcc

SEQ ID NO: 685922 - DNA, 15 bp, Homo sapiens
accttattcaatcct

SEQ ID NO: 685923 - DNA, 15 bp, Homo sapiens
ccttattcaatcctc

SEQ ID NO: 685924 - DNA, 15 bp, Homo sapiens
cttattcaatcctca

SEQ ID NO: 685925 - DNA, 15 bp, Homo sapiens
ttattcaatcctcac

SEQ ID NO: 685926 - DNA, 15 bp, Homo sapiens
tattcaatcctcact

SEQ ID NO: 685927 - DNA, 15 bp, Homo sapiens
attcaatcctcactg

SEQ ID NO: 685928 - DNA, 15 bp, Homo sapiens
ttcaatcctcactgc

SEQ ID NO: 685929 - DNA, 15 bp, Homo sapiens
tcaatcctcactgca

SEQ ID NO: 685930 - DNA, 15 bp, Homo sapiens
caatcctcactgcaa

SEQ ID NO: 685931 - DNA, 15 bp, Homo sapiens
aatcctcactgcaaa

SEQ ID NO: 685932 - DNA, 15 bp, Homo sapiens
atcctcactgcaaat

SEQ ID NO: 685933 - DNA, 15 bp, Homo sapiens
tcctcactgcaaatc

SEQ ID NO: 685934 - DNA, 15 bp, Homo sapiens
cctcactgcaaatct

SEQ ID NO: 685935 - DNA, 15 bp, Homo sapiens
ctcactgcaaatcta

SEQ ID NO: 685936 - DNA, 15 bp, Homo sapiens
tcactgcaaatctat

SEQ ID NO: 685937 - DNA, 15 bp, Homo sapiens
cactgcaaatctata

SEQ ID NO: 685938 - DNA, 15 bp, Homo sapiens
actgcaaatctataa

SEQ ID NO: 685939 - DNA, 15 bp, Homo sapiens
ctgcaaatctataac

SEQ ID NO: 685940 - DNA, 15 bp, Homo sapiens
tgcaaatctataaca

SEQ ID NO: 685941 - DNA, 15 bp, Homo sapiens
gcaaatctataacat

SEQ ID NO: 685942 - DNA, 15 bp, Homo sapiens
caaatctataacata

SEQ ID NO: 685943 - DNA, 15 bp, Homo sapiens
aaatctataacatag

SEQ ID NO: 685944 - DNA, 15 bp, Homo sapiens
aatctataacataga

SEQ ID NO: 685945 - DNA, 15 bp, Homo sapiens
atctataacatagat

SEQ ID NO: 685946 - DNA, 15 bp, Homo sapiens
tctataacatagata

SEQ ID NO: 685947 - DNA, 15 bp, Homo sapiens
ctataacatagatat

SEQ ID NO: 685948 - DNA, 15 bp, Homo sapiens
tataacatagatatg

SEQ ID NO: 685949 - DNA, 15 bp, Homo sapiens
ataacatagatatgc

SEQ ID NO: 685950 - DNA, 15 bp, Homo sapiens
taacatagatatgct

SEQ ID NO: 685951 - DNA, 15 bp, Homo sapiens
aacatagatatgctc

SEQ ID NO: 685952 - DNA, 15 bp, Homo sapiens
acatagatatgctca

SEQ ID NO: 685953 - DNA, 15 bp, Homo sapiens
catagatatgctcag

SEQ ID NO: 685954 - DNA, 15 bp, Homo sapiens
atagatatgctcaga

SEQ ID NO: 685955 - DNA, 15 bp, Homo sapiens
tagatatgctcagaa

SEQ ID NO: 685956 - DNA, 15 bp, Homo sapiens
agatatgctcagaat

SEQ ID NO: 685957 - DNA, 15 bp, Homo sapiens
gatatgctcagaatc

SEQ ID NO: 685958 - DNA, 15 bp, Homo sapiens
atatgctcagaatcc

SEQ ID NO: 685959 - DNA, 15 bp, Homo sapiens
tatgctcagaatcct

SEQ ID NO: 685960 - DNA, 15 bp, Homo sapiens
atgctcagaatcctt

SEQ ID NO: 685961 - DNA, 15 bp, Homo sapiens
tgctcagaatccttg

SEQ ID NO: 685962 - DNA, 15 bp, Homo sapiens
gctcagaatccttgt

SEQ ID NO: 685963 - DNA, 15 bp, Homo sapiens
ctcagaatccttgtt

SEQ ID NO: 685964 - DNA, 15 bp, Homo sapiens
tcagaatccttgttt

SEQ ID NO: 685965 - DNA, 15 bp, Homo sapiens
cagaatccttgtttt

SEQ ID NO: 685966 - DNA, 15 bp, Homo sapiens
agaatccttgtttta

SEQ ID NO: 685967 - DNA, 15 bp, Homo sapiens
gaatccttgttttac

SEQ ID NO: 685968 - DNA, 15 bp, Homo sapiens
aatccttgttttaca

SEQ ID NO: 685969 - DNA, 15 bp, Homo sapiens
atccttgttttacag

SEQ ID NO: 685970 - DNA, 15 bp, Homo sapiens
tccttgttttacaga

SEQ ID NO: 685971 - DNA, 15 bp, Homo sapiens
ccttgttttacagat

SEQ ID NO: 685972 - DNA, 15 bp, Homo sapiens
cttgttttacagatg

SEQ ID NO: 685973 - DNA, 15 bp, Homo sapiens
ttgttttacagatga

SEQ ID NO: 685974 - DNA, 15 bp, Homo sapiens
tgttttacagatgag

SEQ ID NO: 685975 - DNA, 15 bp, Homo sapiens
gttttacagatgagg

SEQ ID NO: 685976 - DNA, 15 bp, Homo sapiens
ttttacagatgaggc

SEQ ID NO: 685977 - DNA, 15 bp, Homo sapiens
tttacagatgaggct

SEQ ID NO: 685978 - DNA, 15 bp, Homo sapiens
ttacagatgaggctc

SEQ ID NO: 685979 - DNA, 15 bp, Homo sapiens
tacagatgaggctca

SEQ ID NO: 685980 - DNA, 15 bp, Homo sapiens
acagatgaggctcag

SEQ ID NO: 685981 - DNA, 15 bp, Homo sapiens
cagatgaggctcagg

SEQ ID NO: 685982 - DNA, 15 bp, Homo sapiens
agatgaggctcaggg

SEQ ID NO: 685983 - DNA, 15 bp, Homo sapiens
gatgaggctcagggc

SEQ ID NO: 685984 - DNA, 15 bp, Homo sapiens
atgaggctcagggca

SEQ ID NO: 685985 - DNA, 15 bp, Homo sapiens
tgaggctcagggcag

SEQ ID NO: 685986 - DNA, 15 bp, Homo sapiens
gaggctcagggcagt

SEQ ID NO: 685987 - DNA, 15 bp, Homo sapiens
aggctcagggcagtt

SEQ ID NO: 685988 - DNA, 15 bp, Homo sapiens
ggctcagggcagtta

SEQ ID NO: 685989 - DNA, 15 bp, Homo sapiens
gctcagggcagttaa

SEQ ID NO: 685990 - DNA, 15 bp, Homo sapiens
ctcagggcagttaag

SEQ ID NO: 685991 - DNA, 15 bp, Homo sapiens
tcagggcagttaagc

SEQ ID NO: 685992 - DNA, 15 bp, Homo sapiens
cagggcagttaagca

SEQ ID NO: 685993 - DNA, 15 bp, Homo sapiens
agggcagttaagcaa

SEQ ID NO: 685994 - DNA, 15 bp, Homo sapiens
gggcagttaagcaac

SEQ ID NO: 685995 - DNA, 15 bp, Homo sapiens
ggcagttaagcaact

SEQ ID NO: 685996 - DNA, 15 bp, Homo sapiens
gcagttaagcaactt

SEQ ID NO: 685997 - DNA, 15 bp, Homo sapiens
cagttaagcaacttg

SEQ ID NO: 685998 - DNA, 15 bp, Homo sapiens
agttaagcaacttgc

SEQ ID NO: 685999 - DNA, 15 bp, Homo sapiens
gttaagcaacttgct

SEQ ID NO: 686000 - DNA, 15 bp, Homo sapiens
ttaagcaacttgctc

SEQ ID NO: 686001 - DNA, 15 bp, Homo sapiens
taagcaacttgctca

SEQ ID NO: 686002 - DNA, 15 bp, Homo sapiens
aagcaacttgctcaa

SEQ ID NO: 686003 - DNA, 15 bp, Homo sapiens
agcaacttgctcaag

SEQ ID NO: 686004 - DNA, 15 bp, Homo sapiens
gcaacttgctcaagg

SEQ ID NO: 686005 - DNA, 15 bp, Homo sapiens
caacttgctcaaggt

SEQ ID NO: 686006 - DNA, 15 bp, Homo sapiens
aacttgctcaaggtc

SEQ ID NO: 686007 - DNA, 15 bp, Homo sapiens
acttgctcaaggtca

SEQ ID NO: 686008 - DNA, 15 bp, Homo sapiens
cttgctcaaggtcac

SEQ ID NO: 686009 - DNA, 15 bp, Homo sapiens
ttgctcaaggtcaca

SEQ ID NO: 686010 - DNA, 15 bp, Homo sapiens
tgctcaaggtcacac

SEQ ID NO: 686011 - DNA, 15 bp, Homo sapiens
gctcaaggtcacaca

SEQ ID NO: 686012 - DNA, 15 bp, Homo sapiens
ctcaaggtcacacag

SEQ ID NO: 686013 - DNA, 15 bp, Homo sapiens
tcaaggtcacacagc

SEQ ID NO: 686014 - DNA, 15 bp, Homo sapiens
caaggtcacacagct

SEQ ID NO: 686015 - DNA, 15 bp, Homo sapiens
aaggtcacacagctg

SEQ ID NO: 686016 - DNA, 15 bp, Homo sapiens
aggtcacacagctgg

SEQ ID NO: 686017 - DNA, 15 bp, Homo sapiens
ggtcacacagctggt

SEQ ID NO: 686018 - DNA, 15 bp, Homo sapiens
gtcacacagctggta

SEQ ID NO: 686019 - DNA, 15 bp, Homo sapiens
tcacacagctggtaa

SEQ ID NO: 686020 - DNA, 15 bp, Homo sapiens
cacacagctggtaag

SEQ ID NO: 686021 - DNA, 15 bp, Homo sapiens
acacagctggtaagt

SEQ ID NO: 686022 - DNA, 15 bp, Homo sapiens
cacagctggtaagtg

SEQ ID NO: 686023 - DNA, 15 bp, Homo sapiens
acagctggtaagtgg

SEQ ID NO: 686024 - DNA, 15 bp, Homo sapiens
cagctggtaagtggc

SEQ ID NO: 686025 - DNA, 15 bp, Homo sapiens
agctggtaagtggca

SEQ ID NO: 686026 - DNA, 15 bp, Homo sapiens
gctggtaagtggcag

SEQ ID NO: 686027 - DNA, 15 bp, Homo sapiens
ctggtaagtggcaga

SEQ ID NO: 686028 - DNA, 15 bp, Homo sapiens
tggtaagtggcagag

SEQ ID NO: 686029 - DNA, 15 bp, Homo sapiens
ggtaagtggcagagc

SEQ ID NO: 686030 - DNA, 15 bp, Homo sapiens
gtaagtggcagagca

SEQ ID NO: 686031 - DNA, 15 bp, Homo sapiens
taagtggcagagcag

SEQ ID NO: 686032 - DNA, 15 bp, Homo sapiens
aagtggcagagcaga

SEQ ID NO: 686033 - DNA, 15 bp, Homo sapiens
agtggcagagcagag

SEQ ID NO: 686034 - DNA, 15 bp, Homo sapiens
gtggcagagcagaga

SEQ ID NO: 686035 - DNA, 15 bp, Homo sapiens
tggcagagcagagaa

SEQ ID NO: 686036 - DNA, 15 bp, Homo sapiens
ggcagagcagagaaa

SEQ ID NO: 686037 - DNA, 15 bp, Homo sapiens
gcagagcagagaaag

SEQ ID NO: 686038 - DNA, 15 bp, Homo sapiens
cagagcagagaaagg

SEQ ID NO: 686039 - DNA, 15 bp, Homo sapiens
agagcagagaaaggc

SEQ ID NO: 686040 - DNA, 15 bp, Homo sapiens
gagcagagaaaggct

SEQ ID NO: 686041 - DNA, 15 bp, Homo sapiens
agcagagaaaggctc

SEQ ID NO: 686042 - DNA, 15 bp, Homo sapiens
gcagagaaaggctca

SEQ ID NO: 686043 - DNA, 15 bp, Homo sapiens
cagagaaaggctcat

SEQ ID NO: 686044 - DNA, 15 bp, Homo sapiens
agagaaaggctcatt

SEQ ID NO: 686045 - DNA, 15 bp, Homo sapiens
gagaaaggctcattg

SEQ ID NO: 686046 - DNA, 15 bp, Homo sapiens
agaaaggctcattgg

SEQ ID NO: 686047 - DNA, 15 bp, Homo sapiens
gaaaggctcattggc

SEQ ID NO: 686048 - DNA, 15 bp, Homo sapiens
aaaggctcattggct

SEQ ID NO: 686049 - DNA, 15 bp, Homo sapiens
aaggctcattggctt

SEQ ID NO: 686050 - DNA, 15 bp, Homo sapiens
aggctcattggcttg

SEQ ID NO: 686051 - DNA, 15 bp, Homo sapiens
ggctcattggcttgt

SEQ ID NO: 686052 - DNA, 15 bp, Homo sapiens
gctcattggcttgtc

SEQ ID NO: 686053 - DNA, 15 bp, Homo sapiens
ctcattggcttgtcc

SEQ ID NO: 686054 - DNA, 15 bp, Homo sapiens
tcattggcttgtccc

SEQ ID NO: 686055 - DNA, 15 bp, Homo sapiens
cattggcttgtccca

SEQ ID NO: 686056 - DNA, 15 bp, Homo sapiens
attggcttgtcccaa

SEQ ID NO: 686057 - DNA, 15 bp, Homo sapiens
ttggcttgtcccaac

SEQ ID NO: 686058 - DNA, 15 bp, Homo sapiens
tggcttgtcccaact

SEQ ID NO: 686059 - DNA, 15 bp, Homo sapiens
ggcttgtcccaactc

SEQ ID NO: 686060 - DNA, 15 bp, Homo sapiens
gcttgtcccaactca

SEQ ID NO: 686061 - DNA, 15 bp, Homo sapiens
cttgtcccaactcac

SEQ ID NO: 686062 - DNA, 15 bp, Homo sapiens
ttgtcccaactcaca

SEQ ID NO: 686063 - DNA, 15 bp, Homo sapiens
tgtcccaactcacac

SEQ ID NO: 686064 - DNA, 15 bp, Homo sapiens
gtcccaactcacacc

SEQ ID NO: 686065 - DNA, 15 bp, Homo sapiens
tcccaactcacaccc

SEQ ID NO: 686066 - DNA, 15 bp, Homo sapiens
cccaactcacaccca

SEQ ID NO: 686067 - DNA, 15 bp, Homo sapiens
ccaactcacacccac

SEQ ID NO: 686068 - DNA, 15 bp, Homo sapiens
caactcacacccaca

SEQ ID NO: 686069 - DNA, 15 bp, Homo sapiens
aactcacacccacag

SEQ ID NO: 686070 - DNA, 15 bp, Homo sapiens
actcacacccacagg

SEQ ID NO: 686071 - DNA, 15 bp, Homo sapiens
ctcacacccacagga

SEQ ID NO: 686072 - DNA, 15 bp, Homo sapiens
tcacacccacaggaa

SEQ ID NO: 686073 - DNA, 15 bp, Homo sapiens
cacacccacaggaag

SEQ ID NO: 686074 - DNA, 15 bp, Homo sapiens
acacccacaggaagc

SEQ ID NO: 686075 - DNA, 15 bp, Homo sapiens
cacccacaggaagcc

SEQ ID NO: 686076 - DNA, 15 bp, Homo sapiens
acccacaggaagcca

SEQ ID NO: 686077 - DNA, 15 bp, Homo sapiens
cccacaggaagccag

SEQ ID NO: 686078 - DNA, 15 bp, Homo sapiens
ccacaggaagccaga

SEQ ID NO: 686079 - DNA, 15 bp, Homo sapiens
cacaggaagccagac

SEQ ID NO: 686080 - DNA, 15 bp, Homo sapiens
acaggaagccagact

SEQ ID NO: 686081 - DNA, 15 bp, Homo sapiens
caggaagccagactc

SEQ ID NO: 686082 - DNA, 15 bp, Homo sapiens
aggaagccagactca

SEQ ID NO: 686083 - DNA, 15 bp, Homo sapiens
ggaagccagactcag

SEQ ID NO: 686084 - DNA, 15 bp, Homo sapiens
gaagccagactcagg

SEQ ID NO: 686085 - DNA, 15 bp, Homo sapiens
aagccagactcaggc

SEQ ID NO: 686086 - DNA, 15 bp, Homo sapiens
agccagactcaggcc

SEQ ID NO: 686087 - DNA, 15 bp, Homo sapiens
gccagactcaggcct

SEQ ID NO: 686088 - DNA, 15 bp, Homo sapiens
ccagactcaggcctc

SEQ ID NO: 686089 - DNA, 15 bp, Homo sapiens
cagactcaggcctct

SEQ ID NO: 686090 - DNA, 15 bp, Homo sapiens
agactcaggcctctg

SEQ ID NO: 686091 - DNA, 15 bp, Homo sapiens
gactcaggcctctga

SEQ ID NO: 686092 - DNA, 15 bp, Homo sapiens
actcaggcctctgaa

SEQ ID NO: 686093 - DNA, 15 bp, Homo sapiens
ctcaggcctctgaag

SEQ ID NO: 686094 - DNA, 15 bp, Homo sapiens
tcaggcctctgaagt

SEQ ID NO: 686095 - DNA, 15 bp, Homo sapiens
caggcctctgaagtt

SEQ ID NO: 686096 - DNA, 15 bp, Homo sapiens
aggcctctgaagttc

SEQ ID NO: 686097 - DNA, 15 bp, Homo sapiens
ggcctctgaagttca

SEQ ID NO: 686098 - DNA, 15 bp, Homo sapiens
gcctctgaagttcac

SEQ ID NO: 686099 - DNA, 15 bp, Homo sapiens
cctctgaagttcacc

SEQ ID NO: 686100 - DNA, 15 bp, Homo sapiens
ctctgaagttcacca

SEQ ID NO: 686101 - DNA, 15 bp, Homo sapiens
tctgaagttcaccat

SEQ ID NO: 686102 - DNA, 15 bp, Homo sapiens
ctgaagttcaccatc

SEQ ID NO: 686103 - DNA, 15 bp, Homo sapiens
tgaagttcaccatcc

SEQ ID NO: 686104 - DNA, 15 bp, Homo sapiens
gaagttcaccatccc

SEQ ID NO: 686105 - DNA, 15 bp, Homo sapiens
aagttcaccatccca

SEQ ID NO: 686106 - DNA, 15 bp, Homo sapiens
agttcaccatcccag

SEQ ID NO: 686107 - DNA, 15 bp, Homo sapiens
gttcaccatcccaga

SEQ ID NO: 686108 - DNA, 15 bp, Homo sapiens
ttcaccatcccagac

SEQ ID NO: 686109 - DNA, 15 bp, Homo sapiens
tcaccatcccagacc

SEQ ID NO: 686110 - DNA, 15 bp, Homo sapiens
caccatcccagaccc

SEQ ID NO: 686111 - DNA, 15 bp, Homo sapiens
accatcccagacccc

SEQ ID NO: 686112 - DNA, 15 bp, Homo sapiens
ccatcccagacccca

SEQ ID NO: 686113 - DNA, 15 bp, Homo sapiens
catcccagaccccac

SEQ ID NO: 686114 - DNA, 15 bp, Homo sapiens
atcccagaccccacc

SEQ ID NO: 686115 - DNA, 15 bp, Homo sapiens
tcccagaccccacca

SEQ ID NO: 686116 - DNA, 15 bp, Homo sapiens
cccagaccccaccat

SEQ ID NO: 686117 - DNA, 15 bp, Homo sapiens
ccagaccccaccatg

SEQ ID NO: 686118 - DNA, 15 bp, Homo sapiens
cagaccccaccatgt

SEQ ID NO: 686119 - DNA, 15 bp, Homo sapiens
agaccccaccatgtc

SEQ ID NO: 686120 - DNA, 15 bp, Homo sapiens
gaccccaccatgtcc

SEQ ID NO: 686121 - DNA, 15 bp, Homo sapiens
accccaccatgtccc

SEQ ID NO: 686122 - DNA, 15 bp, Homo sapiens
ccccaccatgtccca

SEQ ID NO: 686123 - DNA, 15 bp, Homo sapiens
cccaccatgtcccat

SEQ ID NO: 686124 - DNA, 15 bp, Homo sapiens
ccaccatgtcccatc

SEQ ID NO: 686125 - DNA, 15 bp, Homo sapiens
caccatgtcccatct

SEQ ID NO: 686126 - DNA, 15 bp, Homo sapiens
accatgtcccatctg

SEQ ID NO: 686127 - DNA, 15 bp, Homo sapiens
ccatgtcccatctgg

SEQ ID NO: 686128 - DNA, 15 bp, Homo sapiens
catgtcccatctggg

SEQ ID NO: 686129 - DNA, 15 bp, Homo sapiens
atgtcccatctgggt

SEQ ID NO: 686130 - DNA, 15 bp, Homo sapiens
tgtcccatctgggtc

SEQ ID NO: 686131 - DNA, 15 bp, Homo sapiens
gtcccatctgggtcc

SEQ ID NO: 686132 - DNA, 15 bp, Homo sapiens
tcccatctgggtccc

SEQ ID NO: 686133 - DNA, 15 bp, Homo sapiens
cccatctgggtccct

SEQ ID NO: 686134 - DNA, 15 bp, Homo sapiens
ccatctgggtccctg

SEQ ID NO: 686135 - DNA, 15 bp, Homo sapiens
catctgggtccctgg

SEQ ID NO: 686136 - DNA, 15 bp, Homo sapiens
atctgggtccctggg

SEQ ID NO: 686137 - DNA, 15 bp, Homo sapiens
tctgggtccctgggg

SEQ ID NO: 686138 - DNA, 15 bp, Homo sapiens
ctgggtccctgggga

SEQ ID NO: 686139 - DNA, 15 bp, Homo sapiens
tgggtccctggggag

SEQ ID NO: 686140 - DNA, 15 bp, Homo sapiens
gggtccctggggagc

SEQ ID NO: 686141 - DNA, 15 bp, Homo sapiens
ggtccctggggagct

SEQ ID NO: 686142 - DNA, 15 bp, Homo sapiens
gtccctggggagctg

SEQ ID NO: 686143 - DNA, 15 bp, Homo sapiens
tccctggggagctgt

SEQ ID NO: 686144 - DNA, 15 bp, Homo sapiens
ccctggggagctgtg

SEQ ID NO: 686145 - DNA, 15 bp, Homo sapiens
cctggggagctgtgg

SEQ ID NO: 686146 - DNA, 15 bp, Homo sapiens
ctggggagctgtggg

SEQ ID NO: 686147 - DNA, 15 bp, Homo sapiens
tggggagctgtggga

SEQ ID NO: 686148 - DNA, 15 bp, Homo sapiens
ggggagctgtgggaa

SEQ ID NO: 686149 - DNA, 15 bp, Homo sapiens
gggagctgtgggaat

SEQ ID NO: 686150 - DNA, 15 bp, Homo sapiens
ggagctgtgggaata

SEQ ID NO: 686151 - DNA, 15 bp, Homo sapiens
gagctgtgggaatat

SEQ ID NO: 686152 - DNA, 15 bp, Homo sapiens
agctgtgggaatatg

SEQ ID NO: 686153 - DNA, 15 bp, Homo sapiens
gctgtgggaatatgg

SEQ ID NO: 686154 - DNA, 15 bp, Homo sapiens
ctgtgggaatatgga

SEQ ID NO: 686155 - DNA, 15 bp, Homo sapiens
tgtgggaatatggat

SEQ ID NO: 686156 - DNA, 15 bp, Homo sapiens
gtgggaatatggatc

SEQ ID NO: 686157 - DNA, 15 bp, Homo sapiens
tgggaatatggatcc

SEQ ID NO: 686158 - DNA, 15 bp, Homo sapiens
gggaatatggatcct

SEQ ID NO: 686159 - DNA, 15 bp, Homo sapiens
ggaatatggatcctt

SEQ ID NO: 686160 - DNA, 15 bp, Homo sapiens
gaatatggatccttg

SEQ ID NO: 686161 - DNA, 15 bp, Homo sapiens
aatatggatccttga

SEQ ID NO: 686162 - DNA, 15 bp, Homo sapiens
atatggatccttgaa

SEQ ID NO: 686163 - DNA, 15 bp, Homo sapiens
tatggatccttgaat

SEQ ID NO: 686164 - DNA, 15 bp, Homo sapiens
atggatccttgaatc

SEQ ID NO: 686165 - DNA, 15 bp, Homo sapiens
tggatccttgaatct

SEQ ID NO: 686166 - DNA, 15 bp, Homo sapiens
ggatccttgaatctg

SEQ ID NO: 686167 - DNA, 15 bp, Homo sapiens
gatccttgaatctga

SEQ ID NO: 686168 - DNA, 15 bp, Homo sapiens
atccttgaatctgac

SEQ ID NO: 686169 - DNA, 15 bp, Homo sapiens
tccttgaatctgacc

SEQ ID NO: 686170 - DNA, 15 bp, Homo sapiens
ccttgaatctgacca

SEQ ID NO: 686171 - DNA, 15 bp, Homo sapiens
cttgaatctgaccag

SEQ ID NO: 686172 - DNA, 15 bp, Homo sapiens
ttgaatctgaccagg

SEQ ID NO: 686173 - DNA, 15 bp, Homo sapiens
tgaatctgaccaggg

SEQ ID NO: 686174 - DNA, 15 bp, Homo sapiens
gaatctgaccagggg

SEQ ID NO: 686175 - DNA, 15 bp, Homo sapiens
aatctgaccaggggg

SEQ ID NO: 686176 - DNA, 15 bp, Homo sapiens
atctgaccagggggt

SEQ ID NO: 686177 - DNA, 15 bp, Homo sapiens
tctgaccagggggtt

SEQ ID NO: 686178 - DNA, 15 bp, Homo sapiens
ctgaccagggggttc

SEQ ID NO: 686179 - DNA, 15 bp, Homo sapiens
tgaccagggggttcc

SEQ ID NO: 686180 - DNA, 15 bp, Homo sapiens
gaccagggggttcct

SEQ ID NO: 686181 - DNA, 15 bp, Homo sapiens
accagggggttcctg

SEQ ID NO: 686182 - DNA, 15 bp, Homo sapiens
ccagggggttcctgg

SEQ ID NO: 686183 - DNA, 15 bp, Homo sapiens
cagggggttcctggg

SEQ ID NO: 686184 - DNA, 15 bp, Homo sapiens
agggggttcctgggt

SEQ ID NO: 686185 - DNA, 15 bp, Homo sapiens
gggggttcctgggtg

SEQ ID NO: 686186 - DNA, 15 bp, Homo sapiens
ggggttcctgggtgc

SEQ ID NO: 686187 - DNA, 15 bp, Homo sapiens
gggttcctgggtgcc

SEQ ID NO: 686188 - DNA, 15 bp, Homo sapiens
ggttcctgggtgcct

SEQ ID NO: 686189 - DNA, 15 bp, Homo sapiens
gttcctgggtgcctc

SEQ ID NO: 686190 - DNA, 15 bp, Homo sapiens
ttcctgggtgcctct

SEQ ID NO: 686191 - DNA, 15 bp, Homo sapiens
tcctgggtgcctctg

SEQ ID NO: 686192 - DNA, 15 bp, Homo sapiens
cctgggtgcctctga

SEQ ID NO: 686193 - DNA, 15 bp, Homo sapiens
ctgggtgcctctgaa

SEQ ID NO: 686194 - DNA, 15 bp, Homo sapiens
tgggtgcctctgaaa

SEQ ID NO: 686195 - DNA, 15 bp, Homo sapiens
gggtgcctctgaaag

SEQ ID NO: 686196 - DNA, 15 bp, Homo sapiens
ggtgcctctgaaagg

SEQ ID NO: 686197 - DNA, 15 bp, Homo sapiens
gtgcctctgaaaggt

SEQ ID NO: 686198 - DNA, 15 bp, Homo sapiens
tgcctctgaaaggtc

SEQ ID NO: 686199 - DNA, 15 bp, Homo sapiens
gcctctgaaaggtca

SEQ ID NO: 686200 - DNA, 15 bp, Homo sapiens
cctctgaaaggtcag

SEQ ID NO: 686201 - DNA, 15 bp, Homo sapiens
ctctgaaaggtcagt

SEQ ID NO: 686202 - DNA, 15 bp, Homo sapiens
tctgaaaggtcagtc

SEQ ID NO: 686203 - DNA, 15 bp, Homo sapiens
ctgaaaggtcagtca

SEQ ID NO: 686204 - DNA, 15 bp, Homo sapiens
tgaaaggtcagtcat

SEQ ID NO: 686205 - DNA, 15 bp, Homo sapiens
gaaaggtcagtcatt

SEQ ID NO: 686206 - DNA, 15 bp, Homo sapiens
aaaggtcagtcattg

SEQ ID NO: 686207 - DNA, 15 bp, Homo sapiens
aaggtcagtcattgt

SEQ ID NO: 686208 - DNA, 15 bp, Homo sapiens
aggtcagtcattgtc

SEQ ID NO: 686209 - DNA, 15 bp, Homo sapiens
ggtcagtcattgtct

SEQ ID NO: 686210 - DNA, 15 bp, Homo sapiens
gtcagtcattgtctt

SEQ ID NO: 686211 - DNA, 15 bp, Homo sapiens
tcagtcattgtcttt

SEQ ID NO: 686212 - DNA, 15 bp, Homo sapiens
cagtcattgtctttg

SEQ ID NO: 686213 - DNA, 15 bp, Homo sapiens
agtcattgtctttgc

SEQ ID NO: 686214 - DNA, 15 bp, Homo sapiens
gtcattgtctttgca

SEQ ID NO: 686215 - DNA, 15 bp, Homo sapiens
tcattgtctttgcac

SEQ ID NO: 686216 - DNA, 15 bp, Homo sapiens
cattgtctttgcact

SEQ ID NO: 686217 - DNA, 15 bp, Homo sapiens
attgtctttgcactc

SEQ ID NO: 686218 - DNA, 15 bp, Homo sapiens
ttgtctttgcactct

SEQ ID NO: 686219 - DNA, 15 bp, Homo sapiens
tgtctttgcactctg

SEQ ID NO: 686220 - DNA, 15 bp, Homo sapiens
gtctttgcactctgg

SEQ ID NO: 686221 - DNA, 15 bp, Homo sapiens
tctttgcactctgga

SEQ ID NO: 686222 - DNA, 15 bp, Homo sapiens
ctttgcactctggat

SEQ ID NO: 686223 - DNA, 15 bp, Homo sapiens
tttgcactctggatg

SEQ ID NO: 686224 - DNA, 15 bp, Homo sapiens
ttgcactctggatgt

SEQ ID NO: 686225 - DNA, 15 bp, Homo sapiens
tgcactctggatgtt

SEQ ID NO: 686226 - DNA, 15 bp, Homo sapiens
gcactctggatgttt

SEQ ID NO: 686227 - DNA, 15 bp, Homo sapiens
cactctggatgtttt

SEQ ID NO: 686228 - DNA, 15 bp, Homo sapiens
actctggatgtttta

SEQ ID NO: 686229 - DNA, 15 bp, Homo sapiens
ctctggatgttttat

SEQ ID NO: 686230 - DNA, 15 bp, Homo sapiens
tctggatgttttata

SEQ ID NO: 686231 - DNA, 15 bp, Homo sapiens
ctggatgttttataa

SEQ ID NO: 686232 - DNA, 15 bp, Homo sapiens
tggatgttttataag

SEQ ID NO: 686233 - DNA, 15 bp, Homo sapiens
ggatgttttataagc

SEQ ID NO: 686234 - DNA, 15 bp, Homo sapiens
gatgttttataagct

SEQ ID NO: 686235 - DNA, 15 bp, Homo sapiens
atgttttataagctc

SEQ ID NO: 686236 - DNA, 15 bp, Homo sapiens
tgttttataagctcc

SEQ ID NO: 686237 - DNA, 15 bp, Homo sapiens
gttttataagctcca

SEQ ID NO: 686238 - DNA, 15 bp, Homo sapiens
ttttataagctccag

SEQ ID NO: 686239 - DNA, 15 bp, Homo sapiens
tttataagctccagg

SEQ ID NO: 686240 - DNA, 15 bp, Homo sapiens
ttataagctccaggg

SEQ ID NO: 686241 - DNA, 15 bp, Homo sapiens
tataagctccaggga

SEQ ID NO: 686242 - DNA, 15 bp, Homo sapiens
ataagctccagggat

SEQ ID NO: 686243 - DNA, 15 bp, Homo sapiens
taagctccagggata

SEQ ID NO: 686244 - DNA, 15 bp, Homo sapiens
aagctccagggatag

SEQ ID NO: 686245 - DNA, 15 bp, Homo sapiens
agctccagggatagt

SEQ ID NO: 686246 - DNA, 15 bp, Homo sapiens
gctccagggatagta

SEQ ID NO: 686247 - DNA, 15 bp, Homo sapiens
ctccagggatagtac

SEQ ID NO: 686248 - DNA, 15 bp, Homo sapiens
tccagggatagtaca

SEQ ID NO: 686249 - DNA, 15 bp, Homo sapiens
ccagggatagtacat

SEQ ID NO: 686250 - DNA, 15 bp, Homo sapiens
cagggatagtacatt

SEQ ID NO: 686251 - DNA, 15 bp, Homo sapiens
agggatagtacattt

SEQ ID NO: 686252 - DNA, 15 bp, Homo sapiens
gggatagtacatttt

SEQ ID NO: 686253 - DNA, 15 bp, Homo sapiens
ggatagtacatttta

SEQ ID NO: 686254 - DNA, 15 bp, Homo sapiens
gatagtacattttac

SEQ ID NO: 686255 - DNA, 15 bp, Homo sapiens
atagtacattttaca

SEQ ID NO: 686256 - DNA, 15 bp, Homo sapiens
tagtacattttacaa

SEQ ID NO: 686257 - DNA, 15 bp, Homo sapiens
agtacattttacaaa

SEQ ID NO: 686258 - DNA, 15 bp, Homo sapiens
gtacattttacaaaa

SEQ ID NO: 686259 - DNA, 15 bp, Homo sapiens
tacattttacaaaaa

SEQ ID NO: 686260 - DNA, 15 bp, Homo sapiens
acattttacaaaaaa

SEQ ID NO: 686261 - DNA, 15 bp, Homo sapiens
cattttacaaaaaaa

SEQ ID NO: 686262 - DNA, 15 bp, Homo sapiens
attttacaaaaaaaa

SEQ ID NO: 686263 - DNA, 15 bp, Homo sapiens
ttttacaaaaaaaaa

SEQ ID NO: 686264 - DNA, 15 bp, Homo sapiens
tttacaaaaaaaaaa

SEQ ID NO: 686265 - DNA, 15 bp, Homo sapiens
ttacaaaaaaaaaat

SEQ ID NO: 686266 - DNA, 15 bp, Homo sapiens
tacaaaaaaaaaatt

SEQ ID NO: 686267 - DNA, 15 bp, Homo sapiens
acaaaaaaaaaatta

SEQ ID NO: 686268 - DNA, 15 bp, Homo sapiens
caaaaaaaaaattat

SEQ ID NO: 686269 - DNA, 15 bp, Homo sapiens
aaaaaaaaaattata

SEQ ID NO: 686270 - DNA, 15 bp, Homo sapiens
aaaaaaaaattatat

SEQ ID NO: 686271 - DNA, 15 bp, Homo sapiens
aaaaaaaattatata

SEQ ID NO: 686272 - DNA, 15 bp, Homo sapiens
aaaaaaattatatat

SEQ ID NO: 686273 - DNA, 15 bp, Homo sapiens
aaaaaattatatata

SEQ ID NO: 686274 - DNA, 15 bp, Homo sapiens
aaaaattatatatat

SEQ ID NO: 686275 - DNA, 15 bp, Homo sapiens
aaaattatatatata

SEQ ID NO: 686276 - DNA, 15 bp, Homo sapiens
aaattatatatatat

SEQ ID NO: 686277 - DNA, 15 bp, Homo sapiens
aattatatatatata

SEQ ID NO: 686278 - DNA, 15 bp, Homo sapiens
attatatatatatat

SEQ ID NO: 686279 - DNA, 15 bp, Homo sapiens
ttatatatatatata

SEQ ID NO: 686280 - DNA, 15 bp, Homo sapiens
tatatatatatatat

SEQ ID NO: 686281 - DNA, 15 bp, Homo sapiens
atatatatatatata

SEQ ID NO: 686282 - DNA, 15 bp, Homo sapiens
tatatatatatatac

SEQ ID NO: 686283 - DNA, 15 bp, Homo sapiens
atatatatatataca

SEQ ID NO: 686284 - DNA, 15 bp, Homo sapiens
tatatatatatacac

SEQ ID NO: 686285 - DNA, 15 bp, Homo sapiens
atatatatatacaca

SEQ ID NO: 686286 - DNA, 15 bp, Homo sapiens
tatatatatacacac

SEQ ID NO: 686287 - DNA, 15 bp, Homo sapiens
atatatatacacaca

SEQ ID NO: 686288 - DNA, 15 bp, Homo sapiens
tatatatacacacac

SEQ ID NO: 686289 - DNA, 15 bp, Homo sapiens
atatatacacacaca

SEQ ID NO: 686290 - DNA, 15 bp, Homo sapiens
tatatacacacacac

SEQ ID NO: 686291 - DNA, 15 bp, Homo sapiens
atatacacacacaca

SEQ ID NO: 686292 - DNA, 15 bp, Homo sapiens
tatacacacacacac

SEQ ID NO: 686293 - DNA, 15 bp, Homo sapiens
atacacacacacaca

SEQ ID NO: 686294 - DNA, 15 bp, Homo sapiens
tacacacacacacac

SEQ ID NO: 686295 - DNA, 15 bp, Homo sapiens
acacacacacacaca

SEQ ID NO: 686296 - DNA, 15 bp, Homo sapiens
cacacacacacacac

SEQ ID NO: 686297 - DNA, 15 bp, Homo sapiens
cacacacacacacat

SEQ ID NO: 686298 - DNA, 15 bp, Homo sapiens
acacacacacacata

SEQ ID NO: 686299 - DNA, 15 bp, Homo sapiens
cacacacacacatat

SEQ ID NO: 686300 - DNA, 15 bp, Homo sapiens
acacacacacatata

SEQ ID NO: 686301 - DNA, 15 bp, Homo sapiens
cacacacacatatat

SEQ ID NO: 686302 - DNA, 15 bp, Homo sapiens
acacacacatatata

SEQ ID NO: 686303 - DNA, 15 bp, Homo sapiens
cacacacatatatat

SEQ ID NO: 686304 - DNA, 15 bp, Homo sapiens
acacacatatatata

SEQ ID NO: 686305 - DNA, 15 bp, Homo sapiens
cacacatatatatat

SEQ ID NO: 686306 - DNA, 15 bp, Homo sapiens
acacatatatatata

SEQ ID NO: 686307 - DNA, 15 bp, Homo sapiens
cacatatatatataa

SEQ ID NO: 686308 - DNA, 15 bp, Homo sapiens
acatatatatataac

SEQ ID NO: 686309 - DNA, 15 bp, Homo sapiens
catatatatataact

SEQ ID NO: 686310 - DNA, 15 bp, Homo sapiens
atatatatataacta

SEQ ID NO: 686311 - DNA, 15 bp, Homo sapiens
tatatatataactaa

SEQ ID NO: 686312 - DNA, 15 bp, Homo sapiens
atatatataactaat

SEQ ID NO: 686313 - DNA, 15 bp, Homo sapiens
tatatataactaatg

SEQ ID NO: 686314 - DNA, 15 bp, Homo sapiens
atatataactaatga

SEQ ID NO: 686315 - DNA, 15 bp, Homo sapiens
tatataactaatgaa

SEQ ID NO: 686316 - DNA, 15 bp, Homo sapiens
atataactaatgaaa

SEQ ID NO: 686317 - DNA, 15 bp, Homo sapiens
tataactaatgaaat

SEQ ID NO: 686318 - DNA, 15 bp, Homo sapiens
ataactaatgaaatc

SEQ ID NO: 686319 - DNA, 15 bp, Homo sapiens
taactaatgaaatct

SEQ ID NO: 686320 - DNA, 15 bp, Homo sapiens
aactaatgaaatctg

SEQ ID NO: 686321 - DNA, 15 bp, Homo sapiens
actaatgaaatctga

SEQ ID NO: 686322 - DNA, 15 bp, Homo sapiens
ctaatgaaatctgaa

SEQ ID NO: 686323 - DNA, 15 bp, Homo sapiens
taatgaaatctgaat

SEQ ID NO: 686324 - DNA, 15 bp, Homo sapiens
aatgaaatctgaata

SEQ ID NO: 686325 - DNA, 15 bp, Homo sapiens
atgaaatctgaataa

SEQ ID NO: 686326 - DNA, 15 bp, Homo sapiens
tgaaatctgaataaa

SEQ ID NO: 686327 - DNA, 15 bp, Homo sapiens
gaaatctgaataaag

SEQ ID NO: 686328 - DNA, 15 bp, Homo sapiens
aaatctgaataaagt

SEQ ID NO: 686329 - DNA, 15 bp, Homo sapiens
aatctgaataaagtc

SEQ ID NO: 686330 - DNA, 15 bp, Homo sapiens
atctgaataaagtct

SEQ ID NO: 686331 - DNA, 15 bp, Homo sapiens
tctgaataaagtctg

SEQ ID NO: 686332 - DNA, 15 bp, Homo sapiens
ctgaataaagtctgt

SEQ ID NO: 686333 - DNA, 15 bp, Homo sapiens
tgaataaagtctgta

SEQ ID NO: 686334 - DNA, 15 bp, Homo sapiens
gaataaagtctgtag

SEQ ID NO: 686335 - DNA, 15 bp, Homo sapiens
aataaagtctgtagt

SEQ ID NO: 686336 - DNA, 15 bp, Homo sapiens
ataaagtctgtagtt

SEQ ID NO: 686337 - DNA, 15 bp, Homo sapiens
taaagtctgtagtta

SEQ ID NO: 686338 - DNA, 15 bp, Homo sapiens
aaagtctgtagttaa

SEQ ID NO: 686339 - DNA, 15 bp, Homo sapiens
aagtctgtagttaat

SEQ ID NO: 686340 - DNA, 15 bp, Homo sapiens
agtctgtagttaata

SEQ ID NO: 686341 - DNA, 15 bp, Homo sapiens
gtctgtagttaatag

SEQ ID NO: 686342 - DNA, 15 bp, Homo sapiens
tctgtagttaatagc

SEQ ID NO: 686343 - DNA, 15 bp, Homo sapiens
ctgtagttaatagca

SEQ ID NO: 686344 - DNA, 15 bp, Homo sapiens
tgtagttaatagcat

SEQ ID NO: 686345 - DNA, 15 bp, Homo sapiens
gtagttaatagcatt

SEQ ID NO: 686346 - DNA, 15 bp, Homo sapiens
tagttaatagcattg

SEQ ID NO: 686347 - DNA, 15 bp, Homo sapiens
agttaatagcattgt

SEQ ID NO: 686348 - DNA, 15 bp, Homo sapiens
gttaatagcattgta

SEQ ID NO: 686349 - DNA, 15 bp, Homo sapiens
ttaatagcattgtac

SEQ ID NO: 686350 - DNA, 15 bp, Homo sapiens
taatagcattgtaca

SEQ ID NO: 686351 - DNA, 15 bp, Homo sapiens
aatagcattgtacat

SEQ ID NO: 686352 - DNA, 15 bp, Homo sapiens
atagcattgtacatt

SEQ ID NO: 686353 - DNA, 15 bp, Homo sapiens
tagcattgtacattg

SEQ ID NO: 686354 - DNA, 15 bp, Homo sapiens
agcattgtacattgt

SEQ ID NO: 686355 - DNA, 15 bp, Homo sapiens
gcattgtacattgtt

SEQ ID NO: 686356 - DNA, 15 bp, Homo sapiens
cattgtacattgttc

SEQ ID NO: 686357 - DNA, 15 bp, Homo sapiens
attgtacattgttca

SEQ ID NO: 686358 - DNA, 15 bp, Homo sapiens
ttgtacattgttcat

SEQ ID NO: 686359 - DNA, 15 bp, Homo sapiens
tgtacattgttcatt

SEQ ID NO: 686360 - DNA, 15 bp, Homo sapiens
gtacattgttcattt

SEQ ID NO: 686361 - DNA, 15 bp, Homo sapiens
tacattgttcatttc

SEQ ID NO: 686362 - DNA, 15 bp, Homo sapiens
acattgttcatttct

SEQ ID NO: 686363 - DNA, 15 bp, Homo sapiens
cattgttcatttctt

SEQ ID NO: 686364 - DNA, 15 bp, Homo sapiens
attgttcatttctta

SEQ ID NO: 686365 - DNA, 15 bp, Homo sapiens
ttgttcatttcttag

SEQ ID NO: 686366 - DNA, 15 bp, Homo sapiens
tgttcatttcttagt

SEQ ID NO: 686367 - DNA, 15 bp, Homo sapiens
gttcatttcttagtg

SEQ ID NO: 686368 - DNA, 15 bp, Homo sapiens
ttcatttcttagtgt

SEQ ID NO: 686369 - DNA, 15 bp, Homo sapiens
tcatttcttagtgtt

SEQ ID NO: 686370 - DNA, 15 bp, Homo sapiens
catttcttagtgttc

SEQ ID NO: 686371 - DNA, 15 bp, Homo sapiens
atttcttagtgttca

SEQ ID NO: 686372 - DNA, 15 bp, Homo sapiens
tttcttagtgttcat

SEQ ID NO: 686373 - DNA, 15 bp, Homo sapiens
ttcttagtgttcata

SEQ ID NO: 686374 - DNA, 15 bp, Homo sapiens
tcttagtgttcataa

SEQ ID NO: 686375 - DNA, 15 bp, Homo sapiens
cttagtgttcataat

SEQ ID NO: 686376 - DNA, 15 bp, Homo sapiens
ttagtgttcataatt

SEQ ID NO: 686377 - DNA, 15 bp, Homo sapiens
tagtgttcataatta

SEQ ID NO: 686378 - DNA, 15 bp, Homo sapiens
agtgttcataattat

SEQ ID NO: 686379 - DNA, 15 bp, Homo sapiens
gtgttcataattata

SEQ ID NO: 686380 - DNA, 15 bp, Homo sapiens
tgttcataattatac

SEQ ID NO: 686381 - DNA, 15 bp, Homo sapiens
gttcataattatact

SEQ ID NO: 686382 - DNA, 15 bp, Homo sapiens
ttcataattatacta

SEQ ID NO: 686383 - DNA, 15 bp, Homo sapiens
tcataattatactat

SEQ ID NO: 686384 - DNA, 15 bp, Homo sapiens
cataattatactatg

SEQ ID NO: 686385 - DNA, 15 bp, Homo sapiens
ataattatactatgg

SEQ ID NO: 686386 - DNA, 15 bp, Homo sapiens
taattatactatggg

SEQ ID NO: 686387 - DNA, 15 bp, Homo sapiens
aattatactatgggt

SEQ ID NO: 686388 - DNA, 15 bp, Homo sapiens
attatactatgggta

SEQ ID NO: 686389 - DNA, 15 bp, Homo sapiens
ttatactatgggtat

SEQ ID NO: 686390 - DNA, 15 bp, Homo sapiens
tatactatgggtatg

SEQ ID NO: 686391 - DNA, 15 bp, Homo sapiens
atactatgggtatgc

SEQ ID NO: 686392 - DNA, 15 bp, Homo sapiens
tactatgggtatgca

SEQ ID NO: 686393 - DNA, 15 bp, Homo sapiens
actatgggtatgcaa

SEQ ID NO: 686394 - DNA, 15 bp, Homo sapiens
ctatgggtatgcaag

SEQ ID NO: 686395 - DNA, 15 bp, Homo sapiens
tatgggtatgcaaga

SEQ ID NO: 686396 - DNA, 15 bp, Homo sapiens
atgggtatgcaagat

SEQ ID NO: 686397 - DNA, 15 bp, Homo sapiens
tgggtatgcaagatg

SEQ ID NO: 686398 - DNA, 15 bp, Homo sapiens
gggtatgcaagatgt

SEQ ID NO: 686399 - DNA, 15 bp, Homo sapiens
ggtatgcaagatgtt

SEQ ID NO: 686400 - DNA, 15 bp, Homo sapiens
gtatgcaagatgtta

SEQ ID NO: 686401 - DNA, 15 bp, Homo sapiens
tatgcaagatgttaa

SEQ ID NO: 686402 - DNA, 15 bp, Homo sapiens
atgcaagatgttaac

SEQ ID NO: 686403 - DNA, 15 bp, Homo sapiens
tgcaagatgttaaca

SEQ ID NO: 686404 - DNA, 15 bp, Homo sapiens
gcaagatgttaacat

SEQ ID NO: 686405 - DNA, 15 bp, Homo sapiens
caagatgttaacatt

SEQ ID NO: 686406 - DNA, 15 bp, Homo sapiens
aagatgttaacatta

SEQ ID NO: 686407 - DNA, 15 bp, Homo sapiens
agatgttaacattag

SEQ ID NO: 686408 - DNA, 15 bp, Homo sapiens
gatgttaacattagg

SEQ ID NO: 686409 - DNA, 15 bp, Homo sapiens
atgttaacattaggg

SEQ ID NO: 686410 - DNA, 15 bp, Homo sapiens
tgttaacattagggg

SEQ ID NO: 686411 - DNA, 15 bp, Homo sapiens
gttaacattagggga

SEQ ID NO: 686412 - DNA, 15 bp, Homo sapiens
ttaacattaggggaa

SEQ ID NO: 686413 - DNA, 15 bp, Homo sapiens
taacattaggggaag

SEQ ID NO: 686414 - DNA, 15 bp, Homo sapiens
aacattaggggaagc

SEQ ID NO: 686415 - DNA, 15 bp, Homo sapiens
acattaggggaagct

SEQ ID NO: 686416 - DNA, 15 bp, Homo sapiens
cattaggggaagctg

SEQ ID NO: 686417 - DNA, 15 bp, Homo sapiens
attaggggaagctgg

SEQ ID NO: 686418 - DNA, 15 bp, Homo sapiens
ttaggggaagctgga

SEQ ID NO: 686419 - DNA, 15 bp, Homo sapiens
taggggaagctggac

SEQ ID NO: 686420 - DNA, 15 bp, Homo sapiens
aggggaagctggaca

SEQ ID NO: 686421 - DNA, 15 bp, Homo sapiens
ggggaagctggacaa

SEQ ID NO: 686422 - DNA, 15 bp, Homo sapiens
gggaagctggacaat

SEQ ID NO: 686423 - DNA, 15 bp, Homo sapiens
ggaagctggacaatg

SEQ ID NO: 686424 - DNA, 15 bp, Homo sapiens
gaagctggacaatgg

SEQ ID NO: 686425 - DNA, 15 bp, Homo sapiens
aagctggacaatggg

SEQ ID NO: 686426 - DNA, 15 bp, Homo sapiens
agctggacaatgggt

SEQ ID NO: 686427 - DNA, 15 bp, Homo sapiens
gctggacaatgggta

SEQ ID NO: 686428 - DNA, 15 bp, Homo sapiens
ctggacaatgggtat

SEQ ID NO: 686429 - DNA, 15 bp, Homo sapiens
tggacaatgggtata

SEQ ID NO: 686430 - DNA, 15 bp, Homo sapiens
ggacaatgggtatat

SEQ ID NO: 686431 - DNA, 15 bp, Homo sapiens
gacaatgggtatatg

SEQ ID NO: 686432 - DNA, 15 bp, Homo sapiens
acaatgggtatatgg

SEQ ID NO: 686433 - DNA, 15 bp, Homo sapiens
caatgggtatatgga

SEQ ID NO: 686434 - DNA, 15 bp, Homo sapiens
aatgggtatatggaa

SEQ ID NO: 686435 - DNA, 15 bp, Homo sapiens
atgggtatatggaaa

SEQ ID NO: 686436 - DNA, 15 bp, Homo sapiens
tgggtatatggaaac

SEQ ID NO: 686437 - DNA, 15 bp, Homo sapiens
gggtatatggaaaca

SEQ ID NO: 686438 - DNA, 15 bp, Homo sapiens
ggtatatggaaacac

SEQ ID NO: 686439 - DNA, 15 bp, Homo sapiens
gtatatggaaacact

SEQ ID NO: 686440 - DNA, 15 bp, Homo sapiens
tatatggaaacactg

SEQ ID NO: 686441 - DNA, 15 bp, Homo sapiens
atatggaaacactgt

SEQ ID NO: 686442 - DNA, 15 bp, Homo sapiens
tatggaaacactgtg

SEQ ID NO: 686443 - DNA, 15 bp, Homo sapiens
atggaaacactgtgt

SEQ ID NO: 686444 - DNA, 15 bp, Homo sapiens
tggaaacactgtgtt

SEQ ID NO: 686445 - DNA, 15 bp, Homo sapiens
ggaaacactgtgtta

SEQ ID NO: 686446 - DNA, 15 bp, Homo sapiens
gaaacactgtgttat

SEQ ID NO: 686447 - DNA, 15 bp, Homo sapiens
aaacactgtgttatt

SEQ ID NO: 686448 - DNA, 15 bp, Homo sapiens
aacactgtgttattt

SEQ ID NO: 686449 - DNA, 15 bp, Homo sapiens
acactgtgttatttt

SEQ ID NO: 686450 - DNA, 15 bp, Homo sapiens
cactgtgttattttt

SEQ ID NO: 686451 - DNA, 15 bp, Homo sapiens
actgtgttatttttg

SEQ ID NO: 686452 - DNA, 15 bp, Homo sapiens
ctgtgttatttttgc

SEQ ID NO: 686453 - DNA, 15 bp, Homo sapiens
tgtgttatttttgca

SEQ ID NO: 686454 - DNA, 15 bp, Homo sapiens
gtgttatttttgcaa

SEQ ID NO: 686455 - DNA, 15 bp, Homo sapiens
tgttatttttgcaat

SEQ ID NO: 686456 - DNA, 15 bp, Homo sapiens
gttatttttgcaatt

SEQ ID NO: 686457 - DNA, 15 bp, Homo sapiens
ttatttttgcaattt

SEQ ID NO: 686458 - DNA, 15 bp, Homo sapiens
tatttttgcaatttt

SEQ ID NO: 686459 - DNA, 15 bp, Homo sapiens
atttttgcaattttt

SEQ ID NO: 686460 - DNA, 15 bp, Homo sapiens
tttttgcaatttttt

SEQ ID NO: 686461 - DNA, 15 bp, Homo sapiens
ttttgcaattttttc

SEQ ID NO: 686462 - DNA, 15 bp, Homo sapiens
tttgcaattttttcc

SEQ ID NO: 686463 - DNA, 15 bp, Homo sapiens
ttgcaattttttcca

SEQ ID NO: 686464 - DNA, 15 bp, Homo sapiens
tgcaattttttccaa

SEQ ID NO: 686465 - DNA, 15 bp, Homo sapiens
gcaattttttccaaa

SEQ ID NO: 686466 - DNA, 15 bp, Homo sapiens
caattttttccaaaa

SEQ ID NO: 686467 - DNA, 15 bp, Homo sapiens
aattttttccaaaat

SEQ ID NO: 686468 - DNA, 15 bp, Homo sapiens
attttttccaaaatc

SEQ ID NO: 686469 - DNA, 15 bp, Homo sapiens
ttttttccaaaatct

SEQ ID NO: 686470 - DNA, 15 bp, Homo sapiens
tttttccaaaatcta

SEQ ID NO: 686471 - DNA, 15 bp, Homo sapiens
ttttccaaaatctaa

SEQ ID NO: 686472 - DNA, 15 bp, Homo sapiens
tttccaaaatctaaa

SEQ ID NO: 686473 - DNA, 15 bp, Homo sapiens
ttccaaaatctaaag

SEQ ID NO: 686474 - DNA, 15 bp, Homo sapiens
tccaaaatctaaagt

SEQ ID NO: 686475 - DNA, 15 bp, Homo sapiens
ccaaaatctaaagtt

SEQ ID NO: 686476 - DNA, 15 bp, Homo sapiens
caaaatctaaagtta

SEQ ID NO: 686477 - DNA, 15 bp, Homo sapiens
aaaatctaaagttat

SEQ ID NO: 686478 - DNA, 15 bp, Homo sapiens
aaatctaaagttatt

SEQ ID NO: 686479 - DNA, 15 bp, Homo sapiens
aatctaaagttattt

SEQ ID NO: 686480 - DNA, 15 bp, Homo sapiens
atctaaagttatttc

SEQ ID NO: 686481 - DNA, 15 bp, Homo sapiens
tctaaagttatttca

SEQ ID NO: 686482 - DNA, 15 bp, Homo sapiens
ctaaagttatttcaa

SEQ ID NO: 686483 - DNA, 15 bp, Homo sapiens
taaagttatttcaaa

SEQ ID NO: 686484 - DNA, 15 bp, Homo sapiens
aaagttatttcaaaa

SEQ ID NO: 686485 - DNA, 15 bp, Homo sapiens
aagttatttcaaaat

SEQ ID NO: 686486 - DNA, 15 bp, Homo sapiens
agttatttcaaaata

SEQ ID NO: 686487 - DNA, 15 bp, Homo sapiens
gttatttcaaaatat

SEQ ID NO: 686488 - DNA, 15 bp, Homo sapiens
ttatttcaaaatata

SEQ ID NO: 686489 - DNA, 15 bp, Homo sapiens
tatttcaaaatatag

SEQ ID NO: 686490 - DNA, 15 bp, Homo sapiens
atttcaaaatatagt

SEQ ID NO: 686491 - DNA, 15 bp, Homo sapiens
tttcaaaatatagtt

SEQ ID NO: 686492 - DNA, 15 bp, Homo sapiens
ttcaaaatatagttt

SEQ ID NO: 686493 - DNA, 15 bp, Homo sapiens
tcaaaatatagttta

SEQ ID NO: 686494 - DNA, 15 bp, Homo sapiens
caaaatatagtttaa

SEQ ID NO: 686495 - DNA, 15 bp, Homo sapiens
aaaatatagtttaaa

SEQ ID NO: 686496 - DNA, 15 bp, Homo sapiens
aaatatagtttaaaa

SEQ ID NO: 686497 - DNA, 15 bp, Homo sapiens
aatatagtttaaaaa

SEQ ID NO: 686498 - DNA, 15 bp, Homo sapiens
atatagtttaaaaag

SEQ ID NO: 686499 - DNA, 15 bp, Homo sapiens
tatagtttaaaaaga

SEQ ID NO: 686500 - DNA, 15 bp, Homo sapiens
atagtttaaaaagag

SEQ ID NO: 686501 - DNA, 15 bp, Homo sapiens
tagtttaaaaagagt

SEQ ID NO: 686502 - DNA, 15 bp, Homo sapiens
agtttaaaaagagtc

SEQ ID NO: 686503 - DNA, 15 bp, Homo sapiens
gtttaaaaagagtcc

SEQ ID NO: 686504 - DNA, 15 bp, Homo sapiens
tttaaaaagagtccc

SEQ ID NO: 686505 - DNA, 15 bp, Homo sapiens
ttaaaaagagtccca

SEQ ID NO: 686506 - DNA, 15 bp, Homo sapiens
taaaaagagtcccag

SEQ ID NO: 686507 - DNA, 15 bp, Homo sapiens
aaaaagagtcccaga

SEQ ID NO: 686508 - DNA, 15 bp, Homo sapiens
aaaagagtcccagag

SEQ ID NO: 686509 - DNA, 15 bp, Homo sapiens
aaagagtcccagaga

SEQ ID NO: 686510 - DNA, 15 bp, Homo sapiens
aagagtcccagagac

SEQ ID NO: 686511 - DNA, 15 bp, Homo sapiens
agagtcccagagaca

SEQ ID NO: 686512 - DNA, 15 bp, Homo sapiens
gagtcccagagacat

SEQ ID NO: 686513 - DNA, 15 bp, Homo sapiens
agtcccagagacatt

SEQ ID NO: 686514 - DNA, 15 bp, Homo sapiens
gtcccagagacattt

SEQ ID NO: 686515 - DNA, 15 bp, Homo sapiens
tcccagagacatttt

SEQ ID NO: 686516 - DNA, 15 bp, Homo sapiens
cccagagacattttt

SEQ ID NO: 686517 - DNA, 15 bp, Homo sapiens
ccagagacatttttc

SEQ ID NO: 686518 - DNA, 15 bp, Homo sapiens
cagagacatttttct

SEQ ID NO: 686519 - DNA, 15 bp, Homo sapiens
agagacatttttcta

SEQ ID NO: 686520 - DNA, 15 bp, Homo sapiens
gagacatttttctat

SEQ ID NO: 686521 - DNA, 15 bp, Homo sapiens
agacatttttctata

SEQ ID NO: 686522 - DNA, 15 bp, Homo sapiens
gacatttttctatag

SEQ ID NO: 686523 - DNA, 15 bp, Homo sapiens
acatttttctatagg

SEQ ID NO: 686524 - DNA, 15 bp, Homo sapiens
catttttctataggt

SEQ ID NO: 686525 - DNA, 15 bp, Homo sapiens
atttttctataggtt

SEQ ID NO: 686526 - DNA, 15 bp, Homo sapiens
tttttctataggttc

SEQ ID NO: 686527 - DNA, 15 bp, Homo sapiens
ttttctataggttca

SEQ ID NO: 686528 - DNA, 15 bp, Homo sapiens
tttctataggttcac

SEQ ID NO: 686529 - DNA, 15 bp, Homo sapiens
ttctataggttcacg

SEQ ID NO: 686530 - DNA, 15 bp, Homo sapiens
tctataggttcacgc

SEQ ID NO: 686531 - DNA, 15 bp, Homo sapiens
ctataggttcacgca

SEQ ID NO: 686532 - DNA, 15 bp, Homo sapiens
tataggttcacgcat

SEQ ID NO: 686533 - DNA, 15 bp, Homo sapiens
ataggttcacgcatt

SEQ ID NO: 686534 - DNA, 15 bp, Homo sapiens
taggttcacgcattt

SEQ ID NO: 686535 - DNA, 15 bp, Homo sapiens
aggttcacgcatttt

SEQ ID NO: 686536 - DNA, 15 bp, Homo sapiens
ggttcacgcattttg

SEQ ID NO: 686537 - DNA, 15 bp, Homo sapiens
gttcacgcattttgt

SEQ ID NO: 686538 - DNA, 15 bp, Homo sapiens
ttcacgcattttgtt

SEQ ID NO: 686539 - DNA, 15 bp, Homo sapiens
tcacgcattttgttt

SEQ ID NO: 686540 - DNA, 15 bp, Homo sapiens
cacgcattttgtttt

SEQ ID NO: 686541 - DNA, 15 bp, Homo sapiens
acgcattttgtttta

SEQ ID NO: 686542 - DNA, 15 bp, Homo sapiens
cgcattttgttttat

SEQ ID NO: 686543 - DNA, 15 bp, Homo sapiens
gcattttgttttatg

SEQ ID NO: 686544 - DNA, 15 bp, Homo sapiens
cattttgttttatgt

SEQ ID NO: 686545 - DNA, 15 bp, Homo sapiens
attttgttttatgtt

SEQ ID NO: 686546 - DNA, 15 bp, Homo sapiens
ttttgttttatgttt

SEQ ID NO: 686547 - DNA, 15 bp, Homo sapiens
tttgttttatgttta

SEQ ID NO: 686548 - DNA, 15 bp, Homo sapiens
ttgttttatgtttat

SEQ ID NO: 686549 - DNA, 15 bp, Homo sapiens
tgttttatgtttata

SEQ ID NO: 686550 - DNA, 15 bp, Homo sapiens
gttttatgtttatac

SEQ ID NO: 686551 - DNA, 15 bp, Homo sapiens
ttttatgtttataca

SEQ ID NO: 686552 - DNA, 15 bp, Homo sapiens
tttatgtttatacaa

SEQ ID NO: 686553 - DNA, 15 bp, Homo sapiens
ttatgtttatacaac

SEQ ID NO: 686554 - DNA, 15 bp, Homo sapiens
tatgtttatacaaca

SEQ ID NO: 686555 - DNA, 15 bp, Homo sapiens
atgtttatacaacag

SEQ ID NO: 686556 - DNA, 15 bp, Homo sapiens
tgtttatacaacagt

SEQ ID NO: 686557 - DNA, 15 bp, Homo sapiens
gtttatacaacagtt

SEQ ID NO: 686558 - DNA, 15 bp, Homo sapiens
tttatacaacagttt

SEQ ID NO: 686559 - DNA, 15 bp, Homo sapiens
ttatacaacagtttt

SEQ ID NO: 686560 - DNA, 15 bp, Homo sapiens
tatacaacagtttta

SEQ ID NO: 686561 - DNA, 15 bp, Homo sapiens
gtttttttgtttgtt

SEQ ID NO: 686562 - DNA, 15 bp, Homo sapiens
tttttttgtttgttt

SEQ ID NO: 686563 - DNA, 15 bp, Homo sapiens
ttttttgtttgtttg

SEQ ID NO: 686564 - DNA, 15 bp, Homo sapiens
tttttgtttgtttgt

SEQ ID NO: 686565 - DNA, 15 bp, Homo sapiens
ttttgtttgtttgtt

SEQ ID NO: 686566 - DNA, 15 bp, Homo sapiens
tttgtttgtttgttt

SEQ ID NO: 686567 - DNA, 15 bp, Homo sapiens
ttgtttgtttgtttg

SEQ ID NO: 686568 - DNA, 15 bp, Homo sapiens
tgtttgtttgtttgt

SEQ ID NO: 686569 - DNA, 15 bp, Homo sapiens
gtttgtttgtttgtt

SEQ ID NO: 686570 - DNA, 15 bp, Homo sapiens
ttgtttgtttgtttt

SEQ ID NO: 686571 - DNA, 15 bp, Homo sapiens
tgtttgtttgttttg

SEQ ID NO: 686572 - DNA, 15 bp, Homo sapiens
gtttgtttgttttga

SEQ ID NO: 686573 - DNA, 15 bp, Homo sapiens
tttgtttgttttgag

SEQ ID NO: 686574 - DNA, 15 bp, Homo sapiens
ttgtttgttttgaga

SEQ ID NO: 686575 - DNA, 15 bp, Homo sapiens
tgtttgttttgagag

SEQ ID NO: 686576 - DNA, 15 bp, Homo sapiens
gtttgttttgagagg

SEQ ID NO: 686577 - DNA, 15 bp, Homo sapiens
tttgttttgagaggg

SEQ ID NO: 686578 - DNA, 15 bp, Homo sapiens
ttgttttgagaggga

SEQ ID NO: 686579 - DNA, 15 bp, Homo sapiens
tgttttgagagggaa

SEQ ID NO: 686580 - DNA, 15 bp, Homo sapiens
gttttgagagggaat

SEQ ID NO: 686581 - DNA, 15 bp, Homo sapiens
ttttgagagggaatc

SEQ ID NO: 686582 - DNA, 15 bp, Homo sapiens
tttgagagggaatcg

SEQ ID NO: 686583 - DNA, 15 bp, Homo sapiens
ttgagagggaatcgc

SEQ ID NO: 686584 - DNA, 15 bp, Homo sapiens
tgagagggaatcgcg

SEQ ID NO: 686585 - DNA, 15 bp, Homo sapiens
gagagggaatcgcgc

SEQ ID NO: 686586 - DNA, 15 bp, Homo sapiens
agagggaatcgcgct

SEQ ID NO: 686587 - DNA, 15 bp, Homo sapiens
gagggaatcgcgctc

SEQ ID NO: 686588 - DNA, 15 bp, Homo sapiens
agggaatcgcgctct

SEQ ID NO: 686589 - DNA, 15 bp, Homo sapiens
gggaatcgcgctctg

SEQ ID NO: 686590 - DNA, 15 bp, Homo sapiens
ggaatcgcgctctgt

SEQ ID NO: 686591 - DNA, 15 bp, Homo sapiens
gaatcgcgctctgtc

SEQ ID NO: 686592 - DNA, 15 bp, Homo sapiens
aatcgcgctctgtca

SEQ ID NO: 686593 - DNA, 15 bp, Homo sapiens
atcgcgctctgtcac

SEQ ID NO: 686594 - DNA, 15 bp, Homo sapiens
tcgcgctctgtcacc

SEQ ID NO: 686595 - DNA, 15 bp, Homo sapiens
cgcgctctgtcaccc

SEQ ID NO: 686596 - DNA, 15 bp, Homo sapiens
gcgctctgtcaccca

SEQ ID NO: 686597 - DNA, 15 bp, Homo sapiens
ctctgtcacccaggc

SEQ ID NO: 686598 - DNA, 15 bp, Homo sapiens
tctgtcacccaggct

SEQ ID NO: 686599 - DNA, 15 bp, Homo sapiens
ctgtcacccaggctg

SEQ ID NO: 686600 - DNA, 15 bp, Homo sapiens
tgtcacccaggctgg

SEQ ID NO: 686601 - DNA, 15 bp, Homo sapiens
gtcacccaggctgga

SEQ ID NO: 686602 - DNA, 15 bp, Homo sapiens
tcacccaggctggaa

SEQ ID NO: 686603 - DNA, 15 bp, Homo sapiens
cacccaggctggaat

SEQ ID NO: 686604 - DNA, 15 bp, Homo sapiens
acccaggctggaatg

SEQ ID NO: 686605 - DNA, 15 bp, Homo sapiens
cccaggctggaatgc

SEQ ID NO: 686606 - DNA, 15 bp, Homo sapiens
ccaggctggaatgca

SEQ ID NO: 686607 - DNA, 15 bp, Homo sapiens
caggctggaatgcag

SEQ ID NO: 686608 - DNA, 15 bp, Homo sapiens
aggctggaatgcagt

SEQ ID NO: 686609 - DNA, 15 bp, Homo sapiens
ggctggaatgcagtg

SEQ ID NO: 686610 - DNA, 15 bp, Homo sapiens
gctggaatgcagtgg

SEQ ID NO: 686611 - DNA, 15 bp, Homo sapiens
ctggaatgcagtggc

SEQ ID NO: 686612 - DNA, 15 bp, Homo sapiens
tggaatgcagtggcg

SEQ ID NO: 686613 - DNA, 15 bp, Homo sapiens
ggaatgcagtggcgc

SEQ ID NO: 686614 - DNA, 15 bp, Homo sapiens
gaatgcagtggcgcg

SEQ ID NO: 686615 - DNA, 15 bp, Homo sapiens
aatgcagtggcgcga

SEQ ID NO: 686616 - DNA, 15 bp, Homo sapiens
atgcagtggcgcgat

SEQ ID NO: 686617 - DNA, 15 bp, Homo sapiens
gtggcgcgatctcgg

SEQ ID NO: 686618 - DNA, 15 bp, Homo sapiens
tggcgcgatctcggc

SEQ ID NO: 686619 - DNA, 15 bp, Homo sapiens
ggcgcgatctcggct

SEQ ID NO: 686620 - DNA, 15 bp, Homo sapiens
gcgcgatctcggctc

SEQ ID NO: 686621 - DNA, 15 bp, Homo sapiens
cgcgatctcggctca

SEQ ID NO: 686622 - DNA, 15 bp, Homo sapiens
gcgatctcggctcac

SEQ ID NO: 686623 - DNA, 15 bp, Homo sapiens
cgatctcggctcact

SEQ ID NO: 686624 - DNA, 15 bp, Homo sapiens
gatctcggctcactg

SEQ ID NO: 686625 - DNA, 15 bp, Homo sapiens
atctcggctcactgt

SEQ ID NO: 686626 - DNA, 15 bp, Homo sapiens
tctcggctcactgta

SEQ ID NO: 686627 - DNA, 15 bp, Homo sapiens
ctcggctcactgtaa

SEQ ID NO: 686628 - DNA, 15 bp, Homo sapiens
tcggctcactgtaac

SEQ ID NO: 686629 - DNA, 15 bp, Homo sapiens
cggctcactgtaacc

SEQ ID NO: 686630 - DNA, 15 bp, Homo sapiens
ggctcactgtaacct

SEQ ID NO: 686631 - DNA, 15 bp, Homo sapiens
gctcactgtaacctc

SEQ ID NO: 686632 - DNA, 15 bp, Homo sapiens
ctcactgtaacctcc

SEQ ID NO: 686633 - DNA, 15 bp, Homo sapiens
tcactgtaacctccg

SEQ ID NO: 686634 - DNA, 15 bp, Homo sapiens
cactgtaacctccgc

SEQ ID NO: 686635 - DNA, 15 bp, Homo sapiens
actgtaacctccgcc

SEQ ID NO: 686636 - DNA, 15 bp, Homo sapiens
ctgtaacctccgcct

SEQ ID NO: 686637 - DNA, 15 bp, Homo sapiens
tgtaacctccgcctc

SEQ ID NO: 686638 - DNA, 15 bp, Homo sapiens
gtaacctccgcctcc

SEQ ID NO: 686639 - DNA, 15 bp, Homo sapiens
taacctccgcctccc

SEQ ID NO: 686640 - DNA, 15 bp, Homo sapiens
aacctccgcctccca

SEQ ID NO: 686641 - DNA, 15 bp, Homo sapiens
acctccgcctcccat

SEQ ID NO: 686642 - DNA, 15 bp, Homo sapiens
cctccgcctcccatg

SEQ ID NO: 686643 - DNA, 15 bp, Homo sapiens
ctccgcctcccatgt

SEQ ID NO: 686644 - DNA, 15 bp, Homo sapiens
tccgcctcccatgtt

SEQ ID NO: 686645 - DNA, 15 bp, Homo sapiens
ccgcctcccatgttc

SEQ ID NO: 686646 - DNA, 15 bp, Homo sapiens
cgcctcccatgttca

SEQ ID NO: 686647 - DNA, 15 bp, Homo sapiens
gcctcccatgttcaa

SEQ ID NO: 686648 - DNA, 15 bp, Homo sapiens
cctcccatgttcaag

SEQ ID NO: 686649 - DNA, 15 bp, Homo sapiens
ctcccatgttcaagc

SEQ ID NO: 686650 - DNA, 15 bp, Homo sapiens
tcccatgttcaagcg

SEQ ID NO: 686651 - DNA, 15 bp, Homo sapiens
cccatgttcaagcga

SEQ ID NO: 686652 - DNA, 15 bp, Homo sapiens
ccatgttcaagcgat

SEQ ID NO: 686653 - DNA, 15 bp, Homo sapiens
catgttcaagcgatt

SEQ ID NO: 686654 - DNA, 15 bp, Homo sapiens
atgttcaagcgattt

SEQ ID NO: 686655 - DNA, 15 bp, Homo sapiens
tgttcaagcgatttt

SEQ ID NO: 686656 - DNA, 15 bp, Homo sapiens
gttcaagcgattttc

SEQ ID NO: 686657 - DNA, 15 bp, Homo sapiens
ttcaagcgattttcc

SEQ ID NO: 686658 - DNA, 15 bp, Homo sapiens
tcaagcgattttcct

SEQ ID NO: 686659 - DNA, 15 bp, Homo sapiens
caagcgattttcctg

SEQ ID NO: 686660 - DNA, 15 bp, Homo sapiens
aagcgattttcctgc

SEQ ID NO: 686661 - DNA, 15 bp, Homo sapiens
agcgattttcctgcc

SEQ ID NO: 686662 - DNA, 15 bp, Homo sapiens
gcgattttcctgcct

SEQ ID NO: 686663 - DNA, 15 bp, Homo sapiens
cgattttcctgcctc

SEQ ID NO: 686664 - DNA, 15 bp, Homo sapiens
gattttcctgcctca

SEQ ID NO: 686665 - DNA, 15 bp, Homo sapiens
attttcctgcctcag

SEQ ID NO: 686666 - DNA, 15 bp, Homo sapiens
ttttcctgcctcagc

SEQ ID NO: 686667 - DNA, 15 bp, Homo sapiens
tttcctgcctcagcc

SEQ ID NO: 686668 - DNA, 15 bp, Homo sapiens
ttcctgcctcagcct

SEQ ID NO: 686669 - DNA, 15 bp, Homo sapiens
ctgcctcagcctccc

SEQ ID NO: 686670 - DNA, 15 bp, Homo sapiens
tgcctcagcctcccg

SEQ ID NO: 686671 - DNA, 15 bp, Homo sapiens
gcctcagcctcccga

SEQ ID NO: 686672 - DNA, 15 bp, Homo sapiens
cctcagcctcccgag

SEQ ID NO: 686673 - DNA, 15 bp, Homo sapiens
ctcagcctcccgagt

SEQ ID NO: 686674 - DNA, 15 bp, Homo sapiens
tcagcctcccgagta

SEQ ID NO: 686675 - DNA, 15 bp, Homo sapiens
cagcctcccgagtag

SEQ ID NO: 686676 - DNA, 15 bp, Homo sapiens
agcctcccgagtagc

SEQ ID NO: 686677 - DNA, 15 bp, Homo sapiens
gcctcccgagtagct

SEQ ID NO: 686678 - DNA, 15 bp, Homo sapiens
cctcccgagtagctg

SEQ ID NO: 686679 - DNA, 15 bp, Homo sapiens
ctcccgagtagctgg

SEQ ID NO: 686680 - DNA, 15 bp, Homo sapiens
tcccgagtagctggg

SEQ ID NO: 686681 - DNA, 15 bp, Homo sapiens
cccgagtagctggga

SEQ ID NO: 686682 - DNA, 15 bp, Homo sapiens
tgggattacaggtgc

SEQ ID NO: 686683 - DNA, 15 bp, Homo sapiens
gggattacaggtgcc

SEQ ID NO: 686684 - DNA, 15 bp, Homo sapiens
ggattacaggtgcct

SEQ ID NO: 686685 - DNA, 15 bp, Homo sapiens
gattacaggtgcctg

SEQ ID NO: 686686 - DNA, 15 bp, Homo sapiens
attacaggtgcctgc

SEQ ID NO: 686687 - DNA, 15 bp, Homo sapiens
ttacaggtgcctgcc

SEQ ID NO: 686688 - DNA, 15 bp, Homo sapiens
tacaggtgcctgcca

SEQ ID NO: 686689 - DNA, 15 bp, Homo sapiens
acaggtgcctgccat

SEQ ID NO: 686690 - DNA, 15 bp, Homo sapiens
caggtgcctgccatt

SEQ ID NO: 686691 - DNA, 15 bp, Homo sapiens
aggtgcctgccatta

SEQ ID NO: 686692 - DNA, 15 bp, Homo sapiens
ggtgcctgccattac

SEQ ID NO: 686693 - DNA, 15 bp, Homo sapiens
gtgcctgccattaca

SEQ ID NO: 686694 - DNA, 15 bp, Homo sapiens
tgcctgccattacac

SEQ ID NO: 686695 - DNA, 15 bp, Homo sapiens
gcctgccattacacc

SEQ ID NO: 686696 - DNA, 15 bp, Homo sapiens
cctgccattacacct

SEQ ID NO: 686697 - DNA, 15 bp, Homo sapiens
ctgccattacacctg

SEQ ID NO: 686698 - DNA, 15 bp, Homo sapiens
tgccattacacctgg

SEQ ID NO: 686699 - DNA, 15 bp, Homo sapiens
gccattacacctggc

SEQ ID NO: 686700 - DNA, 15 bp, Homo sapiens
ccattacacctggct

SEQ ID NO: 686701 - DNA, 15 bp, Homo sapiens
cattacacctggcta

SEQ ID NO: 686702 - DNA, 15 bp, Homo sapiens
attacacctggctaa

SEQ ID NO: 686703 - DNA, 15 bp, Homo sapiens
ttacacctggctaat

SEQ ID NO: 686704 - DNA, 15 bp, Homo sapiens
tacacctggctaatt

SEQ ID NO: 686705 - DNA, 15 bp, Homo sapiens
acacctggctaattt

SEQ ID NO: 686706 - DNA, 15 bp, Homo sapiens
cacctggctaatttt

SEQ ID NO: 686707 - DNA, 15 bp, Homo sapiens
acctggctaattttt

SEQ ID NO: 686708 - DNA, 15 bp, Homo sapiens
cctggctaatttttg

SEQ ID NO: 686709 - DNA, 15 bp, Homo sapiens
ctggctaatttttgt

SEQ ID NO: 686710 - DNA, 15 bp, Homo sapiens
tggctaatttttgta

SEQ ID NO: 686711 - DNA, 15 bp, Homo sapiens
ttttagtagagacgt

SEQ ID NO: 686712 - DNA, 15 bp, Homo sapiens
tttagtagagacgtg

SEQ ID NO: 686713 - DNA, 15 bp, Homo sapiens
ttagtagagacgtgg

SEQ ID NO: 686714 - DNA, 15 bp, Homo sapiens
tagtagagacgtggt

SEQ ID NO: 686715 - DNA, 15 bp, Homo sapiens
agtagagacgtggtt

SEQ ID NO: 686716 - DNA, 15 bp, Homo sapiens
gtagagacgtggttt

SEQ ID NO: 686717 - DNA, 15 bp, Homo sapiens
tagagacgtggtttc

SEQ ID NO: 686718 - DNA, 15 bp, Homo sapiens
agagacgtggtttca

SEQ ID NO: 686719 - DNA, 15 bp, Homo sapiens
gagacgtggtttcac

SEQ ID NO: 686720 - DNA, 15 bp, Homo sapiens
agacgtggtttcacc

SEQ ID NO: 686721 - DNA, 15 bp, Homo sapiens
gacgtggtttcacca

SEQ ID NO: 686722 - DNA, 15 bp, Homo sapiens
acgtggtttcaccat

SEQ ID NO: 686723 - DNA, 15 bp, Homo sapiens
cgtggtttcaccatt

SEQ ID NO: 686724 - DNA, 15 bp, Homo sapiens
gtggtttcaccattt

SEQ ID NO: 686725 - DNA, 15 bp, Homo sapiens
tggtttcaccatttt

SEQ ID NO: 686726 - DNA, 15 bp, Homo sapiens
ggtttcaccattttg

SEQ ID NO: 686727 - DNA, 15 bp, Homo sapiens
gtttcaccattttgg

SEQ ID NO: 686728 - DNA, 15 bp, Homo sapiens
tttcaccattttggc

SEQ ID NO: 686729 - DNA, 15 bp, Homo sapiens
ttcaccattttggcc

SEQ ID NO: 686730 - DNA, 15 bp, Homo sapiens
tcaccattttggcca

SEQ ID NO: 686731 - DNA, 15 bp, Homo sapiens
caccattttggccag

SEQ ID NO: 686732 - DNA, 15 bp, Homo sapiens
accattttggccagg

SEQ ID NO: 686733 - DNA, 15 bp, Homo sapiens
ccattttggccaggt

SEQ ID NO: 686734 - DNA, 15 bp, Homo sapiens
cattttggccaggtt

SEQ ID NO: 686735 - DNA, 15 bp, Homo sapiens
attttggccaggttg

SEQ ID NO: 686736 - DNA, 15 bp, Homo sapiens
ttttggccaggttgg

SEQ ID NO: 686737 - DNA, 15 bp, Homo sapiens
tttggccaggttggt

SEQ ID NO: 686738 - DNA, 15 bp, Homo sapiens
ttggccaggttggtc

SEQ ID NO: 686739 - DNA, 15 bp, Homo sapiens
tggccaggttggtct

SEQ ID NO: 686740 - DNA, 15 bp, Homo sapiens
ggccaggttggtctc

SEQ ID NO: 686741 - DNA, 15 bp, Homo sapiens
gccaggttggtctca

SEQ ID NO: 686742 - DNA, 15 bp, Homo sapiens
ccaggttggtctcaa

SEQ ID NO: 686743 - DNA, 15 bp, Homo sapiens
caggttggtctcaaa

SEQ ID NO: 686744 - DNA, 15 bp, Homo sapiens
aggttggtctcaaac

SEQ ID NO: 686745 - DNA, 15 bp, Homo sapiens
ggttggtctcaaact

SEQ ID NO: 686746 - DNA, 15 bp, Homo sapiens
gtctcaaactcctga

SEQ ID NO: 686747 - DNA, 15 bp, Homo sapiens
tctcaaactcctgac

SEQ ID NO: 686748 - DNA, 15 bp, Homo sapiens
ctcaaactcctgacc

SEQ ID NO: 686749 - DNA, 15 bp, Homo sapiens
tcaaactcctgacct

SEQ ID NO: 686750 - DNA, 15 bp, Homo sapiens
caaactcctgacctc

SEQ ID NO: 686751 - DNA, 15 bp, Homo sapiens
aaactcctgacctca

SEQ ID NO: 686752 - DNA, 15 bp, Homo sapiens
atctgcctgccttgg

SEQ ID NO: 686753 - DNA, 15 bp, Homo sapiens
tctgcctgccttggc

SEQ ID NO: 686754 - DNA, 15 bp, Homo sapiens
ctgcctgccttggcc

SEQ ID NO: 686755 - DNA, 15 bp, Homo sapiens
tgcctgccttggcct

SEQ ID NO: 686756 - DNA, 15 bp, Homo sapiens
gcctgccttggcctc

SEQ ID NO: 686757 - DNA, 15 bp, Homo sapiens
cctgccttggcctcc

SEQ ID NO: 686758 - DNA, 15 bp, Homo sapiens
ctgccttggcctccc

SEQ ID NO: 686759 - DNA, 15 bp, Homo sapiens
tgccttggcctccca

SEQ ID NO: 686760 - DNA, 15 bp, Homo sapiens
aagtgctgggattat

SEQ ID NO: 686761 - DNA, 15 bp, Homo sapiens
agtgctgggattata

SEQ ID NO: 686762 - DNA, 15 bp, Homo sapiens
gtgctgggattatag

SEQ ID NO: 686763 - DNA, 15 bp, Homo sapiens
tgctgggattataga

SEQ ID NO: 686764 - DNA, 15 bp, Homo sapiens
gctgggattatagac

SEQ ID NO: 686765 - DNA, 15 bp, Homo sapiens
ctgggattatagacg

SEQ ID NO: 686766 - DNA, 15 bp, Homo sapiens
tgggattatagacgt

SEQ ID NO: 686767 - DNA, 15 bp, Homo sapiens
gggattatagacgtg

SEQ ID NO: 686768 - DNA, 15 bp, Homo sapiens
ggattatagacgtga

SEQ ID NO: 686769 - DNA, 15 bp, Homo sapiens
gattatagacgtgag

SEQ ID NO: 686770 - DNA, 15 bp, Homo sapiens
attatagacgtgagc

SEQ ID NO: 686771 - DNA, 15 bp, Homo sapiens
ttatagacgtgagcc

SEQ ID NO: 686772 - DNA, 15 bp, Homo sapiens
tatagacgtgagcca

SEQ ID NO: 686773 - DNA, 15 bp, Homo sapiens
atagacgtgagccac

SEQ ID NO: 686774 - DNA, 15 bp, Homo sapiens
tagacgtgagccacc

SEQ ID NO: 686775 - DNA, 15 bp, Homo sapiens
gacgtgagccaccgc

SEQ ID NO: 686776 - DNA, 15 bp, Homo sapiens
acgtgagccaccgcg

SEQ ID NO: 686777 - DNA, 15 bp, Homo sapiens
cgtgagccaccgcgt

SEQ ID NO: 686778 - DNA, 15 bp, Homo sapiens
gtgagccaccgcgtc

SEQ ID NO: 686779 - DNA, 15 bp, Homo sapiens
tgagccaccgcgtct

SEQ ID NO: 686780 - DNA, 15 bp, Homo sapiens
gagccaccgcgtctg

SEQ ID NO: 686781 - DNA, 15 bp, Homo sapiens
agccaccgcgtctgg

SEQ ID NO: 686782 - DNA, 15 bp, Homo sapiens
gccaccgcgtctggc

SEQ ID NO: 686783 - DNA, 15 bp, Homo sapiens
ccaccgcgtctggcc

SEQ ID NO: 686784 - DNA, 15 bp, Homo sapiens
caccgcgtctggcct

SEQ ID NO: 686785 - DNA, 15 bp, Homo sapiens
accgcgtctggcctt

SEQ ID NO: 686786 - DNA, 15 bp, Homo sapiens
ccgcgtctggcctta

SEQ ID NO: 686787 - DNA, 15 bp, Homo sapiens
cgcgtctggccttaa

SEQ ID NO: 686788 - DNA, 15 bp, Homo sapiens
gcgtctggccttaaa

SEQ ID NO: 686789 - DNA, 15 bp, Homo sapiens
cgtctggccttaaat

SEQ ID NO: 686790 - DNA, 15 bp, Homo sapiens
gtctggccttaaatg

SEQ ID NO: 686791 - DNA, 15 bp, Homo sapiens
tctggccttaaatgc

SEQ ID NO: 686792 - DNA, 15 bp, Homo sapiens
ctggccttaaatgca

SEQ ID NO: 686793 - DNA, 15 bp, Homo sapiens
tggccttaaatgcat

SEQ ID NO: 686794 - DNA, 15 bp, Homo sapiens
ggccttaaatgcatt

SEQ ID NO: 686795 - DNA, 15 bp, Homo sapiens
gccttaaatgcattt

SEQ ID NO: 686796 - DNA, 15 bp, Homo sapiens
ccttaaatgcatttt

SEQ ID NO: 686797 - DNA, 15 bp, Homo sapiens
cttaaatgcattttt

SEQ ID NO: 686798 - DNA, 15 bp, Homo sapiens
ttaaatgcattttta

SEQ ID NO: 686799 - DNA, 15 bp, Homo sapiens
taaatgcatttttaa

SEQ ID NO: 686800 - DNA, 15 bp, Homo sapiens
aaatgcatttttaac

SEQ ID NO: 686801 - DNA, 15 bp, Homo sapiens
aatgcatttttaact

SEQ ID NO: 686802 - DNA, 15 bp, Homo sapiens
atgcatttttaactt

SEQ ID NO: 686803 - DNA, 15 bp, Homo sapiens
tgcatttttaactta

SEQ ID NO: 686804 - DNA, 15 bp, Homo sapiens
gcatttttaacttag

SEQ ID NO: 686805 - DNA, 15 bp, Homo sapiens
catttttaacttaga

SEQ ID NO: 686806 - DNA, 15 bp, Homo sapiens
atttttaacttagaa

SEQ ID NO: 686807 - DNA, 15 bp, Homo sapiens
tttttaacttagaat

SEQ ID NO: 686808 - DNA, 15 bp, Homo sapiens
ttttaacttagaata

SEQ ID NO: 686809 - DNA, 15 bp, Homo sapiens
tttaacttagaatat

SEQ ID NO: 686810 - DNA, 15 bp, Homo sapiens
ttaacttagaatatt

SEQ ID NO: 686811 - DNA, 15 bp, Homo sapiens
taacttagaatattt

SEQ ID NO: 686812 - DNA, 15 bp, Homo sapiens
aacttagaatatttt

SEQ ID NO: 686813 - DNA, 15 bp, Homo sapiens
acttagaatattttc

SEQ ID NO: 686814 - DNA, 15 bp, Homo sapiens
cttagaatattttca

SEQ ID NO: 686815 - DNA, 15 bp, Homo sapiens
ttagaatattttcaa

SEQ ID NO: 686816 - DNA, 15 bp, Homo sapiens
tagaatattttcaac

SEQ ID NO: 686817 - DNA, 15 bp, Homo sapiens
agaatattttcaact

SEQ ID NO: 686818 - DNA, 15 bp, Homo sapiens
gaatattttcaactt

SEQ ID NO: 686819 - DNA, 15 bp, Homo sapiens
aatattttcaactta

SEQ ID NO: 686820 - DNA, 15 bp, Homo sapiens
atattttcaacttat

SEQ ID NO: 686821 - DNA, 15 bp, Homo sapiens
tattttcaacttatg

SEQ ID NO: 686822 - DNA, 15 bp, Homo sapiens
attttcaacttatga

SEQ ID NO: 686823 - DNA, 15 bp, Homo sapiens
ttttcaacttatgat

SEQ ID NO: 686824 - DNA, 15 bp, Homo sapiens
tttcaacttatgatg

SEQ ID NO: 686825 - DNA, 15 bp, Homo sapiens
ttcaacttatgatgg

SEQ ID NO: 686826 - DNA, 15 bp, Homo sapiens
tcaacttatgatggg

SEQ ID NO: 686827 - DNA, 15 bp, Homo sapiens
caacttatgatgggt

SEQ ID NO: 686828 - DNA, 15 bp, Homo sapiens
aacttatgatgggtt

SEQ ID NO: 686829 - DNA, 15 bp, Homo sapiens
acttatgatgggttt

SEQ ID NO: 686830 - DNA, 15 bp, Homo sapiens
cttatgatgggttta

SEQ ID NO: 686831 - DNA, 15 bp, Homo sapiens
ttatgatgggtttat

SEQ ID NO: 686832 - DNA, 15 bp, Homo sapiens
tatgatgggtttatc

SEQ ID NO: 686833 - DNA, 15 bp, Homo sapiens
atgatgggtttatct

SEQ ID NO: 686834 - DNA, 15 bp, Homo sapiens
tgatgggtttatctg

SEQ ID NO: 686835 - DNA, 15 bp, Homo sapiens
gatgggtttatctgg

SEQ ID NO: 686836 - DNA, 15 bp, Homo sapiens
atgggtttatctgga

SEQ ID NO: 686837 - DNA, 15 bp, Homo sapiens
tgggtttatctggaa

SEQ ID NO: 686838 - DNA, 15 bp, Homo sapiens
gggtttatctggaag

SEQ ID NO: 686839 - DNA, 15 bp, Homo sapiens
ggtttatctggaagt

SEQ ID NO: 686840 - DNA, 15 bp, Homo sapiens
gtttatctggaagta

SEQ ID NO: 686841 - DNA, 15 bp, Homo sapiens
tttatctggaagtaa

SEQ ID NO: 686842 - DNA, 15 bp, Homo sapiens
ttatctggaagtaac

SEQ ID NO: 686843 - DNA, 15 bp, Homo sapiens
tatctggaagtaacc

SEQ ID NO: 686844 - DNA, 15 bp, Homo sapiens
atctggaagtaaccc

SEQ ID NO: 686845 - DNA, 15 bp, Homo sapiens
tctggaagtaacccc

SEQ ID NO: 686846 - DNA, 15 bp, Homo sapiens
ctggaagtaacccca

SEQ ID NO: 686847 - DNA, 15 bp, Homo sapiens
tggaagtaaccccat

SEQ ID NO: 686848 - DNA, 15 bp, Homo sapiens
ggaagtaaccccatc

SEQ ID NO: 686849 - DNA, 15 bp, Homo sapiens
gaagtaaccccatca

SEQ ID NO: 686850 - DNA, 15 bp, Homo sapiens
aagtaaccccatcat

SEQ ID NO: 686851 - DNA, 15 bp, Homo sapiens
agtaaccccatcata

SEQ ID NO: 686852 - DNA, 15 bp, Homo sapiens
gtaaccccatcataa

SEQ ID NO: 686853 - DNA, 15 bp, Homo sapiens
taaccccatcataag

SEQ ID NO: 686854 - DNA, 15 bp, Homo sapiens
aaccccatcataaga

SEQ ID NO: 686855 - DNA, 15 bp, Homo sapiens
accccatcataagaa

SEQ ID NO: 686856 - DNA, 15 bp, Homo sapiens
ccccatcataagaag

SEQ ID NO: 686857 - DNA, 15 bp, Homo sapiens
cccatcataagaagc

SEQ ID NO: 686858 - DNA, 15 bp, Homo sapiens
ccatcataagaagca

SEQ ID NO: 686859 - DNA, 15 bp, Homo sapiens
catcataagaagcat

SEQ ID NO: 686860 - DNA, 15 bp, Homo sapiens
atcataagaagcatt

SEQ ID NO: 686861 - DNA, 15 bp, Homo sapiens
tcataagaagcattt

SEQ ID NO: 686862 - DNA, 15 bp, Homo sapiens
cataagaagcatttg

SEQ ID NO: 686863 - DNA, 15 bp, Homo sapiens
ataagaagcatttgt

SEQ ID NO: 686864 - DNA, 15 bp, Homo sapiens
taagaagcatttgta

SEQ ID NO: 686865 - DNA, 15 bp, Homo sapiens
aagaagcatttgtat

SEQ ID NO: 686866 - DNA, 15 bp, Homo sapiens
agaagcatttgtatt

SEQ ID NO: 686867 - DNA, 15 bp, Homo sapiens
gaagcatttgtatta

SEQ ID NO: 686868 - DNA, 15 bp, Homo sapiens
aagcatttgtattag

SEQ ID NO: 686869 - DNA, 15 bp, Homo sapiens
agcatttgtattagg

SEQ ID NO: 686870 - DNA, 15 bp, Homo sapiens
gcatttgtattaggg

SEQ ID NO: 686871 - DNA, 15 bp, Homo sapiens
catttgtattagggt

SEQ ID NO: 686872 - DNA, 15 bp, Homo sapiens
atttgtattagggtt

SEQ ID NO: 686873 - DNA, 15 bp, Homo sapiens
tttgtattagggttt

SEQ ID NO: 686874 - DNA, 15 bp, Homo sapiens
ttgtattagggtttt

SEQ ID NO: 686875 - DNA, 15 bp, Homo sapiens
tgtattagggtttta

SEQ ID NO: 686876 - DNA, 15 bp, Homo sapiens
gtattagggttttag

SEQ ID NO: 686877 - DNA, 15 bp, Homo sapiens
tattagggttttagg

SEQ ID NO: 686878 - DNA, 15 bp, Homo sapiens
attagggttttagga

SEQ ID NO: 686879 - DNA, 15 bp, Homo sapiens
ttagggttttaggaa

SEQ ID NO: 686880 - DNA, 15 bp, Homo sapiens
tagggttttaggaaa

SEQ ID NO: 686881 - DNA, 15 bp, Homo sapiens
agggttttaggaaaa

SEQ ID NO: 686882 - DNA, 15 bp, Homo sapiens
gggttttaggaaaag

SEQ ID NO: 686883 - DNA, 15 bp, Homo sapiens
ggttttaggaaaagg

SEQ ID NO: 686884 - DNA, 15 bp, Homo sapiens
gttttaggaaaagga

SEQ ID NO: 686885 - DNA, 15 bp, Homo sapiens
ttttaggaaaaggag

SEQ ID NO: 686886 - DNA, 15 bp, Homo sapiens
tttaggaaaaggagg

SEQ ID NO: 686887 - DNA, 15 bp, Homo sapiens
ttaggaaaaggaggt

SEQ ID NO: 686888 - DNA, 15 bp, Homo sapiens
taggaaaaggaggtt

SEQ ID NO: 686889 - DNA, 15 bp, Homo sapiens
aggaaaaggaggtta

SEQ ID NO: 686890 - DNA, 15 bp, Homo sapiens
ggaaaaggaggttag

SEQ ID NO: 686891 - DNA, 15 bp, Homo sapiens
gaaaaggaggttagt

SEQ ID NO: 686892 - DNA, 15 bp, Homo sapiens
aaaaggaggttagtt

SEQ ID NO: 686893 - DNA, 15 bp, Homo sapiens
aaaggaggttagttg

SEQ ID NO: 686894 - DNA, 15 bp, Homo sapiens
aaggaggttagttgc

SEQ ID NO: 686895 - DNA, 15 bp, Homo sapiens
aggaggttagttgct

SEQ ID NO: 686896 - DNA, 15 bp, Homo sapiens
ggaggttagttgctc

SEQ ID NO: 686897 - DNA, 15 bp, Homo sapiens
gaggttagttgctct

SEQ ID NO: 686898 - DNA, 15 bp, Homo sapiens
aggttagttgctctt

SEQ ID NO: 686899 - DNA, 15 bp, Homo sapiens
ggttagttgctcttt

SEQ ID NO: 686900 - DNA, 15 bp, Homo sapiens
gttagttgctcttta

SEQ ID NO: 686901 - DNA, 15 bp, Homo sapiens
ttagttgctctttat

SEQ ID NO: 686902 - DNA, 15 bp, Homo sapiens
tagttgctctttatt

SEQ ID NO: 686903 - DNA, 15 bp, Homo sapiens
agttgctctttattt

SEQ ID NO: 686904 - DNA, 15 bp, Homo sapiens
gttgctctttatttt

SEQ ID NO: 686905 - DNA, 15 bp, Homo sapiens
ttgctctttattttt

SEQ ID NO: 686906 - DNA, 15 bp, Homo sapiens
tgctctttattttta

SEQ ID NO: 686907 - DNA, 15 bp, Homo sapiens
gctctttatttttat

SEQ ID NO: 686908 - DNA, 15 bp, Homo sapiens
ctctttatttttatt

SEQ ID NO: 686909 - DNA, 15 bp, Homo sapiens
tctttatttttattt

SEQ ID NO: 686910 - DNA, 15 bp, Homo sapiens
ctttatttttatttt

SEQ ID NO: 686911 - DNA, 15 bp, Homo sapiens
ttatttttatttttg

SEQ ID NO: 686912 - DNA, 15 bp, Homo sapiens
tatttttatttttgt

SEQ ID NO: 686913 - DNA, 15 bp, Homo sapiens
atttttatttttgtt

SEQ ID NO: 686914 - DNA, 15 bp, Homo sapiens
tttttatttttgttt

SEQ ID NO: 686915 - DNA, 15 bp, Homo sapiens
ttttatttttgtttg

SEQ ID NO: 686916 - DNA, 15 bp, Homo sapiens
tttatttttgtttgt

SEQ ID NO: 686917 - DNA, 15 bp, Homo sapiens
ttatttttgtttgtt

SEQ ID NO: 686918 - DNA, 15 bp, Homo sapiens
tatttttgtttgttt

SEQ ID NO: 686919 - DNA, 15 bp, Homo sapiens
atttttgtttgtttc

SEQ ID NO: 686920 - DNA, 15 bp, Homo sapiens
tttttgtttgtttct

SEQ ID NO: 686921 - DNA, 15 bp, Homo sapiens
ttttgtttgtttctt

SEQ ID NO: 686922 - DNA, 15 bp, Homo sapiens
tttgtttgtttcttg

SEQ ID NO: 686923 - DNA, 15 bp, Homo sapiens
ttgtttgtttcttga

SEQ ID NO: 686924 - DNA, 15 bp, Homo sapiens
tgtttgtttcttgac

SEQ ID NO: 686925 - DNA, 15 bp, Homo sapiens
gtttgtttcttgacg

SEQ ID NO: 686926 - DNA, 15 bp, Homo sapiens
tttgtttcttgacgc

SEQ ID NO: 686927 - DNA, 15 bp, Homo sapiens
ttgtttcttgacgca

SEQ ID NO: 686928 - DNA, 15 bp, Homo sapiens
tgtttcttgacgcag

SEQ ID NO: 686929 - DNA, 15 bp, Homo sapiens
gtttcttgacgcaga

SEQ ID NO: 686930 - DNA, 15 bp, Homo sapiens
tttcttgacgcagag

SEQ ID NO: 686931 - DNA, 15 bp, Homo sapiens
ttcttgacgcagagt

SEQ ID NO: 686932 - DNA, 15 bp, Homo sapiens
tcttgacgcagagtc

SEQ ID NO: 686933 - DNA, 15 bp, Homo sapiens
cttgacgcagagtct

SEQ ID NO: 686934 - DNA, 15 bp, Homo sapiens
ttgacgcagagtctc

SEQ ID NO: 686935 - DNA, 15 bp, Homo sapiens
tgacgcagagtctca

SEQ ID NO: 686936 - DNA, 15 bp, Homo sapiens
gacgcagagtctcac

SEQ ID NO: 686937 - DNA, 15 bp, Homo sapiens
acgcagagtctcact

SEQ ID NO: 686938 - DNA, 15 bp, Homo sapiens
cgcagagtctcactc

SEQ ID NO: 686939 - DNA, 15 bp, Homo sapiens
gcagagtctcactca

SEQ ID NO: 686940 - DNA, 15 bp, Homo sapiens
cagagtctcactcac

SEQ ID NO: 686941 - DNA, 15 bp, Homo sapiens
agagtctcactcact

SEQ ID NO: 686942 - DNA, 15 bp, Homo sapiens
gagtctcactcactc

SEQ ID NO: 686943 - DNA, 15 bp, Homo sapiens
agtctcactcactct

SEQ ID NO: 686944 - DNA, 15 bp, Homo sapiens
gtctcactcactctg

SEQ ID NO: 686945 - DNA, 15 bp, Homo sapiens
tctcactcactctgt

SEQ ID NO: 686946 - DNA, 15 bp, Homo sapiens
ctcactcactctgtc

SEQ ID NO: 686947 - DNA, 15 bp, Homo sapiens
tcactcactctgtca

SEQ ID NO: 686948 - DNA, 15 bp, Homo sapiens
cactcactctgtcac

SEQ ID NO: 686949 - DNA, 15 bp, Homo sapiens
actcactctgtcacc

SEQ ID NO: 686950 - DNA, 15 bp, Homo sapiens
ctcactctgtcaccc

SEQ ID NO: 686951 - DNA, 15 bp, Homo sapiens
tcactctgtcaccca

SEQ ID NO: 686952 - DNA, 15 bp, Homo sapiens
cactctgtcacccag

SEQ ID NO: 686953 - DNA, 15 bp, Homo sapiens
actctgtcacccagg

SEQ ID NO: 686954 - DNA, 15 bp, Homo sapiens
caggctggaatgcaa

SEQ ID NO: 686955 - DNA, 15 bp, Homo sapiens
aggctggaatgcaat

SEQ ID NO: 686956 - DNA, 15 bp, Homo sapiens
ggctggaatgcaatg

SEQ ID NO: 686957 - DNA, 15 bp, Homo sapiens
gctggaatgcaatgg

SEQ ID NO: 686958 - DNA, 15 bp, Homo sapiens
ctggaatgcaatggc

SEQ ID NO: 686959 - DNA, 15 bp, Homo sapiens
tggaatgcaatggca

SEQ ID NO: 686960 - DNA, 15 bp, Homo sapiens
ggaatgcaatggcac

SEQ ID NO: 686961 - DNA, 15 bp, Homo sapiens
gaatgcaatggcacg

SEQ ID NO: 686962 - DNA, 15 bp, Homo sapiens
aatgcaatggcacga

SEQ ID NO: 686963 - DNA, 15 bp, Homo sapiens
atgcaatggcacgat

SEQ ID NO: 686964 - DNA, 15 bp, Homo sapiens
tgcaatggcacgatc

SEQ ID NO: 686965 - DNA, 15 bp, Homo sapiens
gcaatggcacgatct

SEQ ID NO: 686966 - DNA, 15 bp, Homo sapiens
caatggcacgatctc

SEQ ID NO: 686967 - DNA, 15 bp, Homo sapiens
aatggcacgatctcg

SEQ ID NO: 686968 - DNA, 15 bp, Homo sapiens
atggcacgatctcgg

SEQ ID NO: 686969 - DNA, 15 bp, Homo sapiens
tggcacgatctcggc

SEQ ID NO: 686970 - DNA, 15 bp, Homo sapiens
ggcacgatctcggct

SEQ ID NO: 686971 - DNA, 15 bp, Homo sapiens
gcacgatctcggctc

SEQ ID NO: 686972 - DNA, 15 bp, Homo sapiens
cacgatctcggctca

SEQ ID NO: 686973 - DNA, 15 bp, Homo sapiens
acgatctcggctcac

SEQ ID NO: 686974 - DNA, 15 bp, Homo sapiens
atctcggctcactgc

SEQ ID NO: 686975 - DNA, 15 bp, Homo sapiens
tctcggctcactgca

SEQ ID NO: 686976 - DNA, 15 bp, Homo sapiens
ctcggctcactgcaa

SEQ ID NO: 686977 - DNA, 15 bp, Homo sapiens
tcggctcactgcaac

SEQ ID NO: 686978 - DNA, 15 bp, Homo sapiens
cggctcactgcaacc

SEQ ID NO: 686979 - DNA, 15 bp, Homo sapiens
tcactgcaacctccg

SEQ ID NO: 686980 - DNA, 15 bp, Homo sapiens
cactgcaacctccgt

SEQ ID NO: 686981 - DNA, 15 bp, Homo sapiens
actgcaacctccgtc

SEQ ID NO: 686982 - DNA, 15 bp, Homo sapiens
ctgcaacctccgtct

SEQ ID NO: 686983 - DNA, 15 bp, Homo sapiens
tgcaacctccgtctc

SEQ ID NO: 686984 - DNA, 15 bp, Homo sapiens
gcaacctccgtctct

SEQ ID NO: 686985 - DNA, 15 bp, Homo sapiens
caacctccgtctctc

SEQ ID NO: 686986 - DNA, 15 bp, Homo sapiens
aacctccgtctctca

SEQ ID NO: 686987 - DNA, 15 bp, Homo sapiens
acctccgtctctcag

SEQ ID NO: 686988 - DNA, 15 bp, Homo sapiens
cctccgtctctcagg

SEQ ID NO: 686989 - DNA, 15 bp, Homo sapiens
ctccgtctctcaggt

SEQ ID NO: 686990 - DNA, 15 bp, Homo sapiens
tccgtctctcaggtt

SEQ ID NO: 686991 - DNA, 15 bp, Homo sapiens
ccgtctctcaggttc

SEQ ID NO: 686992 - DNA, 15 bp, Homo sapiens
cgtctctcaggttca

SEQ ID NO: 686993 - DNA, 15 bp, Homo sapiens
gtctctcaggttcaa

SEQ ID NO: 686994 - DNA, 15 bp, Homo sapiens
tctctcaggttcaag

SEQ ID NO: 686995 - DNA, 15 bp, Homo sapiens
ctctcaggttcaagc

SEQ ID NO: 686996 - DNA, 15 bp, Homo sapiens
tctcaggttcaagca

SEQ ID NO: 686997 - DNA, 15 bp, Homo sapiens
ctcaggttcaagcaa

SEQ ID NO: 686998 - DNA, 15 bp, Homo sapiens
tcaggttcaagcaat

SEQ ID NO: 686999 - DNA, 15 bp, Homo sapiens
caggttcaagcaatt

SEQ ID NO: 687000 - DNA, 15 bp, Homo sapiens
aggttcaagcaattc

SEQ ID NO: 687001 - DNA, 15 bp, Homo sapiens
ctgccttagcctcct

SEQ ID NO: 687002 - DNA, 15 bp, Homo sapiens
tgccttagcctcctg

SEQ ID NO: 687003 - DNA, 15 bp, Homo sapiens
gccttagcctcctga

SEQ ID NO: 687004 - DNA, 15 bp, Homo sapiens
ccttagcctcctgaa

SEQ ID NO: 687005 - DNA, 15 bp, Homo sapiens
cttagcctcctgaat

SEQ ID NO: 687006 - DNA, 15 bp, Homo sapiens
ttagcctcctgaata

SEQ ID NO: 687007 - DNA, 15 bp, Homo sapiens
tagcctcctgaatag

SEQ ID NO: 687008 - DNA, 15 bp, Homo sapiens
agcctcctgaatagc

SEQ ID NO: 687009 - DNA, 15 bp, Homo sapiens
gcctcctgaatagct

SEQ ID NO: 687010 - DNA, 15 bp, Homo sapiens
cctcctgaatagctg

SEQ ID NO: 687011 - DNA, 15 bp, Homo sapiens
gggattacaggtgcg

SEQ ID NO: 687012 - DNA, 15 bp, Homo sapiens
ggattacaggtgcgc

SEQ ID NO: 687013 - DNA, 15 bp, Homo sapiens
gattacaggtgcgca

SEQ ID NO: 687014 - DNA, 15 bp, Homo sapiens
attacaggtgcgcac

SEQ ID NO: 687015 - DNA, 15 bp, Homo sapiens
ttacaggtgcgcacc

SEQ ID NO: 687016 - DNA, 15 bp, Homo sapiens
tacaggtgcgcacca

SEQ ID NO: 687017 - DNA, 15 bp, Homo sapiens
acaggtgcgcaccac

SEQ ID NO: 687018 - DNA, 15 bp, Homo sapiens
caggtgcgcaccacc

SEQ ID NO: 687019 - DNA, 15 bp, Homo sapiens
aggtgcgcaccacca

SEQ ID NO: 687020 - DNA, 15 bp, Homo sapiens
ggtgcgcaccaccac

SEQ ID NO: 687021 - DNA, 15 bp, Homo sapiens
gtgcgcaccaccacg

SEQ ID NO: 687022 - DNA, 15 bp, Homo sapiens
tgcgcaccaccacgc

SEQ ID NO: 687023 - DNA, 15 bp, Homo sapiens
gcgcaccaccacgcc

SEQ ID NO: 687024 - DNA, 15 bp, Homo sapiens
cgcaccaccacgccc

SEQ ID NO: 687025 - DNA, 15 bp, Homo sapiens
gcaccaccacgccca

SEQ ID NO: 687026 - DNA, 15 bp, Homo sapiens
caccaccacgcccag

SEQ ID NO: 687027 - DNA, 15 bp, Homo sapiens
accaccacgcccagc

SEQ ID NO: 687028 - DNA, 15 bp, Homo sapiens
atttttgtatttttg

SEQ ID NO: 687029 - DNA, 15 bp, Homo sapiens
tttttgtatttttgg

SEQ ID NO: 687030 - DNA, 15 bp, Homo sapiens
ttttgtatttttggt

SEQ ID NO: 687031 - DNA, 15 bp, Homo sapiens
tttgtatttttggta

SEQ ID NO: 687032 - DNA, 15 bp, Homo sapiens
ttgtatttttggtag

SEQ ID NO: 687033 - DNA, 15 bp, Homo sapiens
tgtatttttggtaga

SEQ ID NO: 687034 - DNA, 15 bp, Homo sapiens
gtatttttggtagag

SEQ ID NO: 687035 - DNA, 15 bp, Homo sapiens
tatttttggtagaga

SEQ ID NO: 687036 - DNA, 15 bp, Homo sapiens
atttttggtagagat

SEQ ID NO: 687037 - DNA, 15 bp, Homo sapiens
tttttggtagagatg

SEQ ID NO: 687038 - DNA, 15 bp, Homo sapiens
ttttggtagagatga

SEQ ID NO: 687039 - DNA, 15 bp, Homo sapiens
tttggtagagatgag

SEQ ID NO: 687040 - DNA, 15 bp, Homo sapiens
ttggtagagatgagg

SEQ ID NO: 687041 - DNA, 15 bp, Homo sapiens
tggtagagatgaggt

SEQ ID NO: 687042 - DNA, 15 bp, Homo sapiens
ggtagagatgaggtt

SEQ ID NO: 687043 - DNA, 15 bp, Homo sapiens
gtagagatgaggttt

SEQ ID NO: 687044 - DNA, 15 bp, Homo sapiens
tagagatgaggtttc

SEQ ID NO: 687045 - DNA, 15 bp, Homo sapiens
agagatgaggtttca

SEQ ID NO: 687046 - DNA, 15 bp, Homo sapiens
gagatgaggtttcac

SEQ ID NO: 687047 - DNA, 15 bp, Homo sapiens
agatgaggtttcacc

SEQ ID NO: 687048 - DNA, 15 bp, Homo sapiens
gatgaggtttcacca

SEQ ID NO: 687049 - DNA, 15 bp, Homo sapiens
atgaggtttcaccaa

SEQ ID NO: 687050 - DNA, 15 bp, Homo sapiens
tgaggtttcaccaag

SEQ ID NO: 687051 - DNA, 15 bp, Homo sapiens
gaggtttcaccaagt

SEQ ID NO: 687052 - DNA, 15 bp, Homo sapiens
aggtttcaccaagtt

SEQ ID NO: 687053 - DNA, 15 bp, Homo sapiens
ggtttcaccaagttg

SEQ ID NO: 687054 - DNA, 15 bp, Homo sapiens
gtttcaccaagttgg

SEQ ID NO: 687055 - DNA, 15 bp, Homo sapiens
tttcaccaagttggt

SEQ ID NO: 687056 - DNA, 15 bp, Homo sapiens
ttcaccaagttggtc

SEQ ID NO: 687057 - DNA, 15 bp, Homo sapiens
tcaccaagttggtca

SEQ ID NO: 687058 - DNA, 15 bp, Homo sapiens
caccaagttggtcag

SEQ ID NO: 687059 - DNA, 15 bp, Homo sapiens
accaagttggtcagg

SEQ ID NO: 687060 - DNA, 15 bp, Homo sapiens
ccaagttggtcaggc

SEQ ID NO: 687061 - DNA, 15 bp, Homo sapiens
caagttggtcaggct

SEQ ID NO: 687062 - DNA, 15 bp, Homo sapiens
aagttggtcaggctg

SEQ ID NO: 687063 - DNA, 15 bp, Homo sapiens
agttggtcaggctgg

SEQ ID NO: 687064 - DNA, 15 bp, Homo sapiens
gttggtcaggctggt

SEQ ID NO: 687065 - DNA, 15 bp, Homo sapiens
ttggtcaggctggtc

SEQ ID NO: 687066 - DNA, 15 bp, Homo sapiens
tggtcaggctggtct

SEQ ID NO: 687067 - DNA, 15 bp, Homo sapiens
ggtcaggctggtctc

SEQ ID NO: 687068 - DNA, 15 bp, Homo sapiens
gtcaggctggtctca

SEQ ID NO: 687069 - DNA, 15 bp, Homo sapiens
tcaggctggtctcaa

SEQ ID NO: 687070 - DNA, 15 bp, Homo sapiens
caggctggtctcaaa

SEQ ID NO: 687071 - DNA, 15 bp, Homo sapiens
aggctggtctcaaac

SEQ ID NO: 687072 - DNA, 15 bp, Homo sapiens
ggctggtctcaaact

SEQ ID NO: 687073 - DNA, 15 bp, Homo sapiens
ctcaaactcctgact

SEQ ID NO: 687074 - DNA, 15 bp, Homo sapiens
tcaaactcctgactt

SEQ ID NO: 687075 - DNA, 15 bp, Homo sapiens
caaactcctgacttc

SEQ ID NO: 687076 - DNA, 15 bp, Homo sapiens
aaactcctgacttca

SEQ ID NO: 687077 - DNA, 15 bp, Homo sapiens
aactcctgacttcaa

SEQ ID NO: 687078 - DNA, 15 bp, Homo sapiens
actcctgacttcaag

SEQ ID NO: 687079 - DNA, 15 bp, Homo sapiens
ctcctgacttcaagt

SEQ ID NO: 687080 - DNA, 15 bp, Homo sapiens
tcctgacttcaagtg

SEQ ID NO: 687081 - DNA, 15 bp, Homo sapiens
cctgacttcaagtga

SEQ ID NO: 687082 - DNA, 15 bp, Homo sapiens
ctgacttcaagtgat

SEQ ID NO: 687083 - DNA, 15 bp, Homo sapiens
tgacttcaagtgatt

SEQ ID NO: 687084 - DNA, 15 bp, Homo sapiens
gacttcaagtgattt

SEQ ID NO: 687085 - DNA, 15 bp, Homo sapiens
acttcaagtgatttc

SEQ ID NO: 687086 - DNA, 15 bp, Homo sapiens
cttcaagtgatttcc

SEQ ID NO: 687087 - DNA, 15 bp, Homo sapiens
ttcaagtgatttccc

SEQ ID NO: 687088 - DNA, 15 bp, Homo sapiens
tcaagtgatttccct

SEQ ID NO: 687089 - DNA, 15 bp, Homo sapiens
caagtgatttccctg

SEQ ID NO: 687090 - DNA, 15 bp, Homo sapiens
aagtgatttccctgc

SEQ ID NO: 687091 - DNA, 15 bp, Homo sapiens
agtgatttccctgcc

SEQ ID NO: 687092 - DNA, 15 bp, Homo sapiens
gtgatttccctgcct

SEQ ID NO: 687093 - DNA, 15 bp, Homo sapiens
tgatttccctgcctc

SEQ ID NO: 687094 - DNA, 15 bp, Homo sapiens
gatttccctgcctcg

SEQ ID NO: 687095 - DNA, 15 bp, Homo sapiens
atttccctgcctcgg

SEQ ID NO: 687096 - DNA, 15 bp, Homo sapiens
tttccctgcctcggc

SEQ ID NO: 687097 - DNA, 15 bp, Homo sapiens
ttccctgcctcggcc

SEQ ID NO: 687098 - DNA, 15 bp, Homo sapiens
tccctgcctcggcct

SEQ ID NO: 687099 - DNA, 15 bp, Homo sapiens
ccctgcctcggcctc

SEQ ID NO: 687100 - DNA, 15 bp, Homo sapiens
cctcggcctcccaag

SEQ ID NO: 687101 - DNA, 15 bp, Homo sapiens
ctcggcctcccaagg

SEQ ID NO: 687102 - DNA, 15 bp, Homo sapiens
tcggcctcccaaggt

SEQ ID NO: 687103 - DNA, 15 bp, Homo sapiens
cggcctcccaaggtg

SEQ ID NO: 687104 - DNA, 15 bp, Homo sapiens
ggcctcccaaggtgc

SEQ ID NO: 687105 - DNA, 15 bp, Homo sapiens
gcctcccaaggtgct

SEQ ID NO: 687106 - DNA, 15 bp, Homo sapiens
cctcccaaggtgctg

SEQ ID NO: 687107 - DNA, 15 bp, Homo sapiens
ctcccaaggtgctgg

SEQ ID NO: 687108 - DNA, 15 bp, Homo sapiens
tcccaaggtgctggg

SEQ ID NO: 687109 - DNA, 15 bp, Homo sapiens
cccaaggtgctggga

SEQ ID NO: 687110 - DNA, 15 bp, Homo sapiens
ccaaggtgctgggat

SEQ ID NO: 687111 - DNA, 15 bp, Homo sapiens
caaggtgctgggatt

SEQ ID NO: 687112 - DNA, 15 bp, Homo sapiens
aaggtgctgggatta

SEQ ID NO: 687113 - DNA, 15 bp, Homo sapiens
aggtgctgggattac

SEQ ID NO: 687114 - DNA, 15 bp, Homo sapiens
ggtgctgggattaca

SEQ ID NO: 687115 - DNA, 15 bp, Homo sapiens
tgggattacaggcgt

SEQ ID NO: 687116 - DNA, 15 bp, Homo sapiens
gggattacaggcgtg

SEQ ID NO: 687117 - DNA, 15 bp, Homo sapiens
ggattacaggcgtga

SEQ ID NO: 687118 - DNA, 15 bp, Homo sapiens
gattacaggcgtgag

SEQ ID NO: 687119 - DNA, 15 bp, Homo sapiens
caggcgtgagccact

SEQ ID NO: 687120 - DNA, 15 bp, Homo sapiens
aggcgtgagccacta

SEQ ID NO: 687121 - DNA, 15 bp, Homo sapiens
ggcgtgagccactat

SEQ ID NO: 687122 - DNA, 15 bp, Homo sapiens
gcgtgagccactata

SEQ ID NO: 687123 - DNA, 15 bp, Homo sapiens
cgtgagccactatac

SEQ ID NO: 687124 - DNA, 15 bp, Homo sapiens
gtgagccactatacc

SEQ ID NO: 687125 - DNA, 15 bp, Homo sapiens
tgagccactatacct

SEQ ID NO: 687126 - DNA, 15 bp, Homo sapiens
gagccactatacctg

SEQ ID NO: 687127 - DNA, 15 bp, Homo sapiens
agccactatacctgg

SEQ ID NO: 687128 - DNA, 15 bp, Homo sapiens
gccactatacctggt

SEQ ID NO: 687129 - DNA, 15 bp, Homo sapiens
ccactatacctggtg

SEQ ID NO: 687130 - DNA, 15 bp, Homo sapiens
cactatacctggtgg

SEQ ID NO: 687131 - DNA, 15 bp, Homo sapiens
actatacctggtggt

SEQ ID NO: 687132 - DNA, 15 bp, Homo sapiens
ctatacctggtggtt

SEQ ID NO: 687133 - DNA, 15 bp, Homo sapiens
tatacctggtggtta

SEQ ID NO: 687134 - DNA, 15 bp, Homo sapiens
atacctggtggttaa

SEQ ID NO: 687135 - DNA, 15 bp, Homo sapiens
tacctggtggttaat

SEQ ID NO: 687136 - DNA, 15 bp, Homo sapiens
acctggtggttaatt

SEQ ID NO: 687137 - DNA, 15 bp, Homo sapiens
cctggtggttaattg

SEQ ID NO: 687138 - DNA, 15 bp, Homo sapiens
ctggtggttaattgc

SEQ ID NO: 687139 - DNA, 15 bp, Homo sapiens
tggtggttaattgct

SEQ ID NO: 687140 - DNA, 15 bp, Homo sapiens
ggtggttaattgctc

SEQ ID NO: 687141 - DNA, 15 bp, Homo sapiens
gtggttaattgctct

SEQ ID NO: 687142 - DNA, 15 bp, Homo sapiens
tggttaattgctctt

SEQ ID NO: 687143 - DNA, 15 bp, Homo sapiens
ggttaattgctctta

SEQ ID NO: 687144 - DNA, 15 bp, Homo sapiens
gttaattgctcttaa

SEQ ID NO: 687145 - DNA, 15 bp, Homo sapiens
ttaattgctcttaaa

SEQ ID NO: 687146 - DNA, 15 bp, Homo sapiens
taattgctcttaaaa

SEQ ID NO: 687147 - DNA, 15 bp, Homo sapiens
aattgctcttaaaag

SEQ ID NO: 687148 - DNA, 15 bp, Homo sapiens
attgctcttaaaagg

SEQ ID NO: 687149 - DNA, 15 bp, Homo sapiens
ttgctcttaaaaggt

SEQ ID NO: 687150 - DNA, 15 bp, Homo sapiens
tgctcttaaaaggta

SEQ ID NO: 687151 - DNA, 15 bp, Homo sapiens
gctcttaaaaggtag

SEQ ID NO: 687152 - DNA, 15 bp, Homo sapiens
ctcttaaaaggtagg

SEQ ID NO: 687153 - DNA, 15 bp, Homo sapiens
tcttaaaaggtaggc

SEQ ID NO: 687154 - DNA, 15 bp, Homo sapiens
cttaaaaggtaggca

SEQ ID NO: 687155 - DNA, 15 bp, Homo sapiens
ttaaaaggtaggcag

SEQ ID NO: 687156 - DNA, 15 bp, Homo sapiens
taaaaggtaggcagt

SEQ ID NO: 687157 - DNA, 15 bp, Homo sapiens
aaaaggtaggcagtt

SEQ ID NO: 687158 - DNA, 15 bp, Homo sapiens
aaaggtaggcagttg

SEQ ID NO: 687159 - DNA, 15 bp, Homo sapiens
aaggtaggcagttgc

SEQ ID NO: 687160 - DNA, 15 bp, Homo sapiens
aggtaggcagttgca

SEQ ID NO: 687161 - DNA, 15 bp, Homo sapiens
ggtaggcagttgcaa

SEQ ID NO: 687162 - DNA, 15 bp, Homo sapiens
gtaggcagttgcaaa

SEQ ID NO: 687163 - DNA, 15 bp, Homo sapiens
taggcagttgcaaag

SEQ ID NO: 687164 - DNA, 15 bp, Homo sapiens
aggcagttgcaaaga

SEQ ID NO: 687165 - DNA, 15 bp, Homo sapiens
ggcagttgcaaagaa

SEQ ID NO: 687166 - DNA, 15 bp, Homo sapiens
gcagttgcaaagaat

SEQ ID NO: 687167 - DNA, 15 bp, Homo sapiens
cagttgcaaagaata

SEQ ID NO: 687168 - DNA, 15 bp, Homo sapiens
agttgcaaagaatac

SEQ ID NO: 687169 - DNA, 15 bp, Homo sapiens
gttgcaaagaatact

SEQ ID NO: 687170 - DNA, 15 bp, Homo sapiens
ttgcaaagaatacta

SEQ ID NO: 687171 - DNA, 15 bp, Homo sapiens
tgcaaagaatactaa

SEQ ID NO: 687172 - DNA, 15 bp, Homo sapiens
gcaaagaatactaaa

SEQ ID NO: 687173 - DNA, 15 bp, Homo sapiens
caaagaatactaaat

SEQ ID NO: 687174 - DNA, 15 bp, Homo sapiens
aaagaatactaaatg

SEQ ID NO: 687175 - DNA, 15 bp, Homo sapiens
aagaatactaaatgt

SEQ ID NO: 687176 - DNA, 15 bp, Homo sapiens
agaatactaaatgtt

SEQ ID NO: 687177 - DNA, 15 bp, Homo sapiens
gaatactaaatgttc

SEQ ID NO: 687178 - DNA, 15 bp, Homo sapiens
aatactaaatgttct

SEQ ID NO: 687179 - DNA, 15 bp, Homo sapiens
atactaaatgttctc

SEQ ID NO: 687180 - DNA, 15 bp, Homo sapiens
tactaaatgttctca

SEQ ID NO: 687181 - DNA, 15 bp, Homo sapiens
actaaatgttctcag

SEQ ID NO: 687182 - DNA, 15 bp, Homo sapiens
ctaaatgttctcaga

SEQ ID NO: 687183 - DNA, 15 bp, Homo sapiens
taaatgttctcagat

SEQ ID NO: 687184 - DNA, 15 bp, Homo sapiens
aaatgttctcagatt

SEQ ID NO: 687185 - DNA, 15 bp, Homo sapiens
aatgttctcagatta

SEQ ID NO: 687186 - DNA, 15 bp, Homo sapiens
atgttctcagattag

SEQ ID NO: 687187 - DNA, 15 bp, Homo sapiens
tgttctcagattagt

SEQ ID NO: 687188 - DNA, 15 bp, Homo sapiens
gttctcagattagtt

SEQ ID NO: 687189 - DNA, 15 bp, Homo sapiens
ttctcagattagttg

SEQ ID NO: 687190 - DNA, 15 bp, Homo sapiens
tctcagattagttgc

SEQ ID NO: 687191 - DNA, 15 bp, Homo sapiens
ctcagattagttgca

SEQ ID NO: 687192 - DNA, 15 bp, Homo sapiens
tcagattagttgcaa

SEQ ID NO: 687193 - DNA, 15 bp, Homo sapiens
cagattagttgcaaa

SEQ ID NO: 687194 - DNA, 15 bp, Homo sapiens
agattagttgcaaaa

SEQ ID NO: 687195 - DNA, 15 bp, Homo sapiens
gattagttgcaaaat

SEQ ID NO: 687196 - DNA, 15 bp, Homo sapiens
attagttgcaaaatc

SEQ ID NO: 687197 - DNA, 15 bp, Homo sapiens
ttagttgcaaaatct

SEQ ID NO: 687198 - DNA, 15 bp, Homo sapiens
tagttgcaaaatctt

SEQ ID NO: 687199 - DNA, 15 bp, Homo sapiens
agttgcaaaatctta

SEQ ID NO: 687200 - DNA, 15 bp, Homo sapiens
gttgcaaaatcttaa

SEQ ID NO: 687201 - DNA, 15 bp, Homo sapiens
ttgcaaaatcttaac

SEQ ID NO: 687202 - DNA, 15 bp, Homo sapiens
tgcaaaatcttaaca

SEQ ID NO: 687203 - DNA, 15 bp, Homo sapiens
gcaaaatcttaacaa

SEQ ID NO: 687204 - DNA, 15 bp, Homo sapiens
caaaatcttaacaac

SEQ ID NO: 687205 - DNA, 15 bp, Homo sapiens
aaaatcttaacaacc

SEQ ID NO: 687206 - DNA, 15 bp, Homo sapiens
aaatcttaacaaccc

SEQ ID NO: 687207 - DNA, 15 bp, Homo sapiens
aatcttaacaaccca

SEQ ID NO: 687208 - DNA, 15 bp, Homo sapiens
atcttaacaacccaa

SEQ ID NO: 687209 - DNA, 15 bp, Homo sapiens
tcttaacaacccaag

SEQ ID NO: 687210 - DNA, 15 bp, Homo sapiens
cttaacaacccaagg

SEQ ID NO: 687211 - DNA, 15 bp, Homo sapiens
ttaacaacccaaggc

SEQ ID NO: 687212 - DNA, 15 bp, Homo sapiens
taacaacccaaggct

SEQ ID NO: 687213 - DNA, 15 bp, Homo sapiens
aacaacccaaggctt

SEQ ID NO: 687214 - DNA, 15 bp, Homo sapiens
acaacccaaggcttc

SEQ ID NO: 687215 - DNA, 15 bp, Homo sapiens
caacccaaggcttca

SEQ ID NO: 687216 - DNA, 15 bp, Homo sapiens
aacccaaggcttcat

SEQ ID NO: 687217 - DNA, 15 bp, Homo sapiens
acccaaggcttcata

SEQ ID NO: 687218 - DNA, 15 bp, Homo sapiens
cccaaggcttcatat

SEQ ID NO: 687219 - DNA, 15 bp, Homo sapiens
ccaaggcttcatatg

SEQ ID NO: 687220 - DNA, 15 bp, Homo sapiens
caaggcttcatatga

SEQ ID NO: 687221 - DNA, 15 bp, Homo sapiens
aaggcttcatatgaa

SEQ ID NO: 687222 - DNA, 15 bp, Homo sapiens
aggcttcatatgaat

SEQ ID NO: 687223 - DNA, 15 bp, Homo sapiens
ggcttcatatgaatt

SEQ ID NO: 687224 - DNA, 15 bp, Homo sapiens
gcttcatatgaattc

SEQ ID NO: 687225 - DNA, 15 bp, Homo sapiens
cttcatatgaattcc

SEQ ID NO: 687226 - DNA, 15 bp, Homo sapiens
ttcatatgaattcca

SEQ ID NO: 687227 - DNA, 15 bp, Homo sapiens
tcatatgaattccac

SEQ ID NO: 687228 - DNA, 15 bp, Homo sapiens
catatgaattccact

SEQ ID NO: 687229 - DNA, 15 bp, Homo sapiens
atatgaattccactt

SEQ ID NO: 687230 - DNA, 15 bp, Homo sapiens
tatgaattccacttc

SEQ ID NO: 687231 - DNA, 15 bp, Homo sapiens
atgaattccacttcc

SEQ ID NO: 687232 - DNA, 15 bp, Homo sapiens
tgaattccacttcca

SEQ ID NO: 687233 - DNA, 15 bp, Homo sapiens
gaattccacttccat

SEQ ID NO: 687234 - DNA, 15 bp, Homo sapiens
aattccacttccatc

SEQ ID NO: 687235 - DNA, 15 bp, Homo sapiens
attccacttccatcg

SEQ ID NO: 687236 - DNA, 15 bp, Homo sapiens
ttccacttccatcgc

SEQ ID NO: 687237 - DNA, 15 bp, Homo sapiens
tccacttccatcgct

SEQ ID NO: 687238 - DNA, 15 bp, Homo sapiens
ccacttccatcgctg

SEQ ID NO: 687239 - DNA, 15 bp, Homo sapiens
cacttccatcgctga

SEQ ID NO: 687240 - DNA, 15 bp, Homo sapiens
acttccatcgctgaa

SEQ ID NO: 687241 - DNA, 15 bp, Homo sapiens
cttccatcgctgaaa

SEQ ID NO: 687242 - DNA, 15 bp, Homo sapiens
ttccatcgctgaaaa

SEQ ID NO: 687243 - DNA, 15 bp, Homo sapiens
tccatcgctgaaaat

SEQ ID NO: 687244 - DNA, 15 bp, Homo sapiens
ccatcgctgaaaatt

SEQ ID NO: 687245 - DNA, 15 bp, Homo sapiens
catcgctgaaaatta

SEQ ID NO: 687246 - DNA, 15 bp, Homo sapiens
atcgctgaaaattaa

SEQ ID NO: 687247 - DNA, 15 bp, Homo sapiens
tcgctgaaaattaaa

SEQ ID NO: 687248 - DNA, 15 bp, Homo sapiens
cgctgaaaattaaaa

SEQ ID NO: 687249 - DNA, 15 bp, Homo sapiens
gctgaaaattaaaac

SEQ ID NO: 687250 - DNA, 15 bp, Homo sapiens
ctgaaaattaaaact

SEQ ID NO: 687251 - DNA, 15 bp, Homo sapiens
tgaaaattaaaactc

SEQ ID NO: 687252 - DNA, 15 bp, Homo sapiens
gaaaattaaaactcc

SEQ ID NO: 687253 - DNA, 15 bp, Homo sapiens
aaaattaaaactcca

SEQ ID NO: 687254 - DNA, 15 bp, Homo sapiens
aaattaaaactccac

SEQ ID NO: 687255 - DNA, 15 bp, Homo sapiens
aattaaaactccact

SEQ ID NO: 687256 - DNA, 15 bp, Homo sapiens
attaaaactccactc

SEQ ID NO: 687257 - DNA, 15 bp, Homo sapiens
ttaaaactccactct

SEQ ID NO: 687258 - DNA, 15 bp, Homo sapiens
taaaactccactctt

SEQ ID NO: 687259 - DNA, 15 bp, Homo sapiens
aaaactccactctta

SEQ ID NO: 687260 - DNA, 15 bp, Homo sapiens
aaactccactcttaa

SEQ ID NO: 687261 - DNA, 15 bp, Homo sapiens
aactccactcttaaa

SEQ ID NO: 687262 - DNA, 15 bp, Homo sapiens
actccactcttaaag

SEQ ID NO: 687263 - DNA, 15 bp, Homo sapiens
ctccactcttaaagg

SEQ ID NO: 687264 - DNA, 15 bp, Homo sapiens
tccactcttaaaggc

SEQ ID NO: 687265 - DNA, 15 bp, Homo sapiens
ccactcttaaaggcc

SEQ ID NO: 687266 - DNA, 15 bp, Homo sapiens
cactcttaaaggcca

SEQ ID NO: 687267 - DNA, 15 bp, Homo sapiens
actcttaaaggccac

SEQ ID NO: 687268 - DNA, 15 bp, Homo sapiens
ctcttaaaggccaca

SEQ ID NO: 687269 - DNA, 15 bp, Homo sapiens
tcttaaaggccacat

SEQ ID NO: 687270 - DNA, 15 bp, Homo sapiens
cttaaaggccacatc

SEQ ID NO: 687271 - DNA, 15 bp, Homo sapiens
ttaaaggccacatca

SEQ ID NO: 687272 - DNA, 15 bp, Homo sapiens
taaaggccacatcaa

SEQ ID NO: 687273 - DNA, 15 bp, Homo sapiens
aaaggccacatcaac

SEQ ID NO: 687274 - DNA, 15 bp, Homo sapiens
aaggccacatcaacc

SEQ ID NO: 687275 - DNA, 15 bp, Homo sapiens
aggccacatcaacct

SEQ ID NO: 687276 - DNA, 15 bp, Homo sapiens
ggccacatcaacctg

SEQ ID NO: 687277 - DNA, 15 bp, Homo sapiens
gccacatcaacctgc

SEQ ID NO: 687278 - DNA, 15 bp, Homo sapiens
ccacatcaacctgct

SEQ ID NO: 687279 - DNA, 15 bp, Homo sapiens
cacatcaacctgcta

SEQ ID NO: 687280 - DNA, 15 bp, Homo sapiens
acatcaacctgctag

SEQ ID NO: 687281 - DNA, 15 bp, Homo sapiens
catcaacctgctagt

SEQ ID NO: 687282 - DNA, 15 bp, Homo sapiens
atcaacctgctagtc

SEQ ID NO: 687283 - DNA, 15 bp, Homo sapiens
tcaacctgctagtca

SEQ ID NO: 687284 - DNA, 15 bp, Homo sapiens
caacctgctagtcat

SEQ ID NO: 687285 - DNA, 15 bp, Homo sapiens
aacctgctagtcatt

SEQ ID NO: 687286 - DNA, 15 bp, Homo sapiens
acctgctagtcattc

SEQ ID NO: 687287 - DNA, 15 bp, Homo sapiens
cctgctagtcattcc

SEQ ID NO: 687288 - DNA, 15 bp, Homo sapiens
ctgctagtcattcca

SEQ ID NO: 687289 - DNA, 15 bp, Homo sapiens
tgctagtcattccat

SEQ ID NO: 687290 - DNA, 15 bp, Homo sapiens
gctagtcattccatt

SEQ ID NO: 687291 - DNA, 15 bp, Homo sapiens
ctagtcattccattt

SEQ ID NO: 687292 - DNA, 15 bp, Homo sapiens
tagtcattccattta

SEQ ID NO: 687293 - DNA, 15 bp, Homo sapiens
agtcattccatttac

SEQ ID NO: 687294 - DNA, 15 bp, Homo sapiens
gtcattccatttacc

SEQ ID NO: 687295 - DNA, 15 bp, Homo sapiens
tcattccatttaccc

SEQ ID NO: 687296 - DNA, 15 bp, Homo sapiens
cattccatttaccca

SEQ ID NO: 687297 - DNA, 15 bp, Homo sapiens
attccatttacccat

SEQ ID NO: 687298 - DNA, 15 bp, Homo sapiens
ttccatttacccatt

SEQ ID NO: 687299 - DNA, 15 bp, Homo sapiens
tccatttacccattt

SEQ ID NO: 687300 - DNA, 15 bp, Homo sapiens
ccatttacccatttt

SEQ ID NO: 687301 - DNA, 15 bp, Homo sapiens
catttacccattttt

SEQ ID NO: 687302 - DNA, 15 bp, Homo sapiens
atttacccatttttc

SEQ ID NO: 687303 - DNA, 15 bp, Homo sapiens
tttacccatttttct

SEQ ID NO: 687304 - DNA, 15 bp, Homo sapiens
ttacccatttttctc

SEQ ID NO: 687305 - DNA, 15 bp, Homo sapiens
tacccatttttctcc

SEQ ID NO: 687306 - DNA, 15 bp, Homo sapiens
acccatttttctccc

SEQ ID NO: 687307 - DNA, 15 bp, Homo sapiens
cccatttttctcccc

SEQ ID NO: 687308 - DNA, 15 bp, Homo sapiens
ccatttttctcccca

SEQ ID NO: 687309 - DNA, 15 bp, Homo sapiens
catttttctccccag

SEQ ID NO: 687310 - DNA, 15 bp, Homo sapiens
atttttctccccagt

SEQ ID NO: 687311 - DNA, 15 bp, Homo sapiens
tttttctccccagtc

SEQ ID NO: 687312 - DNA, 15 bp, Homo sapiens
ttttctccccagtca

SEQ ID NO: 687313 - DNA, 15 bp, Homo sapiens
tttctccccagtcat

SEQ ID NO: 687314 - DNA, 15 bp, Homo sapiens
ttctccccagtcatc

SEQ ID NO: 687315 - DNA, 15 bp, Homo sapiens
tctccccagtcatca

SEQ ID NO: 687316 - DNA, 15 bp, Homo sapiens
ctccccagtcatcat

SEQ ID NO: 687317 - DNA, 15 bp, Homo sapiens
tccccagtcatcatc

SEQ ID NO: 687318 - DNA, 15 bp, Homo sapiens
ccccagtcatcatct

SEQ ID NO: 687319 - DNA, 15 bp, Homo sapiens
cccagtcatcatctt

SEQ ID NO: 687320 - DNA, 15 bp, Homo sapiens
ccagtcatcatcttt

SEQ ID NO: 687321 - DNA, 15 bp, Homo sapiens
cagtcatcatctttc

SEQ ID NO: 687322 - DNA, 15 bp, Homo sapiens
agtcatcatctttct

SEQ ID NO: 687323 - DNA, 15 bp, Homo sapiens
gtcatcatctttctg

SEQ ID NO: 687324 - DNA, 15 bp, Homo sapiens
tcatcatctttctgg

SEQ ID NO: 687325 - DNA, 15 bp, Homo sapiens
catcatctttctggg

SEQ ID NO: 687326 - DNA, 15 bp, Homo sapiens
atcatctttctgggt

SEQ ID NO: 687327 - DNA, 15 bp, Homo sapiens
tcatctttctgggtg

SEQ ID NO: 687328 - DNA, 15 bp, Homo sapiens
catctttctgggtga

SEQ ID NO: 687329 - DNA, 15 bp, Homo sapiens
atctttctgggtgaa

SEQ ID NO: 687330 - DNA, 15 bp, Homo sapiens
tctttctgggtgaac

SEQ ID NO: 687331 - DNA, 15 bp, Homo sapiens
ctttctgggtgaact

SEQ ID NO: 687332 - DNA, 15 bp, Homo sapiens
tttctgggtgaactg

SEQ ID NO: 687333 - DNA, 15 bp, Homo sapiens
ttctgggtgaactgc

SEQ ID NO: 687334 - DNA, 15 bp, Homo sapiens
tctgggtgaactgcc

SEQ ID NO: 687335 - DNA, 15 bp, Homo sapiens
ctgggtgaactgcct

SEQ ID NO: 687336 - DNA, 15 bp, Homo sapiens
tgggtgaactgccta

SEQ ID NO: 687337 - DNA, 15 bp, Homo sapiens
gggtgaactgcctaa

SEQ ID NO: 687338 - DNA, 15 bp, Homo sapiens
ggtgaactgcctaag

SEQ ID NO: 687339 - DNA, 15 bp, Homo sapiens
gtgaactgcctaagg

SEQ ID NO: 687340 - DNA, 15 bp, Homo sapiens
tgaactgcctaaggc

SEQ ID NO: 687341 - DNA, 15 bp, Homo sapiens
gaactgcctaaggca

SEQ ID NO: 687342 - DNA, 15 bp, Homo sapiens
aactgcctaaggcat

SEQ ID NO: 687343 - DNA, 15 bp, Homo sapiens
actgcctaaggcatt

SEQ ID NO: 687344 - DNA, 15 bp, Homo sapiens
ctgcctaaggcattt

SEQ ID NO: 687345 - DNA, 15 bp, Homo sapiens
tgcctaaggcatttg

SEQ ID NO: 687346 - DNA, 15 bp, Homo sapiens
gcctaaggcatttgt

SEQ ID NO: 687347 - DNA, 15 bp, Homo sapiens
cctaaggcatttgtg

SEQ ID NO: 687348 - DNA, 15 bp, Homo sapiens
ctaaggcatttgtgc

SEQ ID NO: 687349 - DNA, 15 bp, Homo sapiens
taaggcatttgtgct

SEQ ID NO: 687350 - DNA, 15 bp, Homo sapiens
aaggcatttgtgctg

SEQ ID NO: 687351 - DNA, 15 bp, Homo sapiens
aggcatttgtgctgt

SEQ ID NO: 687352 - DNA, 15 bp, Homo sapiens
ggcatttgtgctgtt

SEQ ID NO: 687353 - DNA, 15 bp, Homo sapiens
gcatttgtgctgttg

SEQ ID NO: 687354 - DNA, 15 bp, Homo sapiens
catttgtgctgttgg

SEQ ID NO: 687355 - DNA, 15 bp, Homo sapiens
atttgtgctgttggc

SEQ ID NO: 687356 - DNA, 15 bp, Homo sapiens
tttgtgctgttggct

SEQ ID NO: 687357 - DNA, 15 bp, Homo sapiens
ttgtgctgttggctc

SEQ ID NO: 687358 - DNA, 15 bp, Homo sapiens
tgtgctgttggctcc

SEQ ID NO: 687359 - DNA, 15 bp, Homo sapiens
gtgctgttggctccc

SEQ ID NO: 687360 - DNA, 15 bp, Homo sapiens
tgctgttggctccct

SEQ ID NO: 687361 - DNA, 15 bp, Homo sapiens
gctgttggctccctt

SEQ ID NO: 687362 - DNA, 15 bp, Homo sapiens
ctgttggctcccttc

SEQ ID NO: 687363 - DNA, 15 bp, Homo sapiens
tgttggctcccttct

SEQ ID NO: 687364 - DNA, 15 bp, Homo sapiens
gttggctcccttctc

SEQ ID NO: 687365 - DNA, 15 bp, Homo sapiens
ttggctcccttctct

SEQ ID NO: 687366 - DNA, 15 bp, Homo sapiens
tggctcccttctctt

SEQ ID NO: 687367 - DNA, 15 bp, Homo sapiens
ggctcccttctcttt

SEQ ID NO: 687368 - DNA, 15 bp, Homo sapiens
gctcccttctctttt

SEQ ID NO: 687369 - DNA, 15 bp, Homo sapiens
ctcccttctctttta

SEQ ID NO: 687370 - DNA, 15 bp, Homo sapiens
tcccttctcttttaa

SEQ ID NO: 687371 - DNA, 15 bp, Homo sapiens
cccttctcttttaaa

SEQ ID NO: 687372 - DNA, 15 bp, Homo sapiens
ccttctcttttaaac

SEQ ID NO: 687373 - DNA, 15 bp, Homo sapiens
cttctcttttaaaca

SEQ ID NO: 687374 - DNA, 15 bp, Homo sapiens
ttctcttttaaacac

SEQ ID NO: 687375 - DNA, 15 bp, Homo sapiens
tctcttttaaacaca

SEQ ID NO: 687376 - DNA, 15 bp, Homo sapiens
ctcttttaaacacaa

SEQ ID NO: 687377 - DNA, 15 bp, Homo sapiens
tcttttaaacacaaa

SEQ ID NO: 687378 - DNA, 15 bp, Homo sapiens
cttttaaacacaaag

SEQ ID NO: 687379 - DNA, 15 bp, Homo sapiens
ttttaaacacaaagg

SEQ ID NO: 687380 - DNA, 15 bp, Homo sapiens
tttaaacacaaagga

SEQ ID NO: 687381 - DNA, 15 bp, Homo sapiens
ttaaacacaaaggaa

SEQ ID NO: 687382 - DNA, 15 bp, Homo sapiens
taaacacaaaggaaa

SEQ ID NO: 687383 - DNA, 15 bp, Homo sapiens
aaacacaaaggaaat

SEQ ID NO: 687384 - DNA, 15 bp, Homo sapiens
aacacaaaggaaatt

SEQ ID NO: 687385 - DNA, 15 bp, Homo sapiens
acacaaaggaaatta

SEQ ID NO: 687386 - DNA, 15 bp, Homo sapiens
cacaaaggaaattag

SEQ ID NO: 687387 - DNA, 15 bp, Homo sapiens
acaaaggaaattagc

SEQ ID NO: 687388 - DNA, 15 bp, Homo sapiens
caaaggaaattagct

SEQ ID NO: 687389 - DNA, 15 bp, Homo sapiens
aaaggaaattagctt

SEQ ID NO: 687390 - DNA, 15 bp, Homo sapiens
aaggaaattagcttt

SEQ ID NO: 687391 - DNA, 15 bp, Homo sapiens
aggaaattagctttg

SEQ ID NO: 687392 - DNA, 15 bp, Homo sapiens
ggaaattagctttgc

SEQ ID NO: 687393 - DNA, 15 bp, Homo sapiens
gaaattagctttgct

SEQ ID NO: 687394 - DNA, 15 bp, Homo sapiens
aaattagctttgctg

SEQ ID NO: 687395 - DNA, 15 bp, Homo sapiens
aattagctttgctgt

SEQ ID NO: 687396 - DNA, 15 bp, Homo sapiens
attagctttgctgtg

SEQ ID NO: 687397 - DNA, 15 bp, Homo sapiens
ttagctttgctgtgt

SEQ ID NO: 687398 - DNA, 15 bp, Homo sapiens
tagctttgctgtgtt

SEQ ID NO: 687399 - DNA, 15 bp, Homo sapiens
agctttgctgtgttt

SEQ ID NO: 687400 - DNA, 15 bp, Homo sapiens
gctttgctgtgtttt

SEQ ID NO: 687401 - DNA, 15 bp, Homo sapiens
ctttgctgtgttttc

SEQ ID NO: 687402 - DNA, 15 bp, Homo sapiens
tttgctgtgttttct

SEQ ID NO: 687403 - DNA, 15 bp, Homo sapiens
ttgctgtgttttctg

SEQ ID NO: 687404 - DNA, 15 bp, Homo sapiens
tgctgtgttttctgc

SEQ ID NO: 687405 - DNA, 15 bp, Homo sapiens
gctgtgttttctgct

SEQ ID NO: 687406 - DNA, 15 bp, Homo sapiens
ctgtgttttctgctt

SEQ ID NO: 687407 - DNA, 15 bp, Homo sapiens
tgtgttttctgctta

SEQ ID NO: 687408 - DNA, 15 bp, Homo sapiens
gtgttttctgcttac

SEQ ID NO: 687409 - DNA, 15 bp, Homo sapiens
tgttttctgcttaca

SEQ ID NO: 687410 - DNA, 15 bp, Homo sapiens
gttttctgcttacaa

SEQ ID NO: 687411 - DNA, 15 bp, Homo sapiens
ttttctgcttacaaa

SEQ ID NO: 687412 - DNA, 15 bp, Homo sapiens
tttctgcttacaaaa

SEQ ID NO: 687413 - DNA, 15 bp, Homo sapiens
ttctgcttacaaaat

SEQ ID NO: 687414 - DNA, 15 bp, Homo sapiens
tctgcttacaaaatc

SEQ ID NO: 687415 - DNA, 15 bp, Homo sapiens
ctgcttacaaaatca

SEQ ID NO: 687416 - DNA, 15 bp, Homo sapiens
tgcttacaaaatcat

SEQ ID NO: 687417 - DNA, 15 bp, Homo sapiens
gcttacaaaatcatg

SEQ ID NO: 687418 - DNA, 15 bp, Homo sapiens
cttacaaaatcatgc

SEQ ID NO: 687419 - DNA, 15 bp, Homo sapiens
ttacaaaatcatgca

SEQ ID NO: 687420 - DNA, 15 bp, Homo sapiens
tacaaaatcatgcaa

SEQ ID NO: 687421 - DNA, 15 bp, Homo sapiens
acaaaatcatgcaag

SEQ ID NO: 687422 - DNA, 15 bp, Homo sapiens
caaaatcatgcaagt

SEQ ID NO: 687423 - DNA, 15 bp, Homo sapiens
aaaatcatgcaagtt

SEQ ID NO: 687424 - DNA, 15 bp, Homo sapiens
aaatcatgcaagttc

SEQ ID NO: 687425 - DNA, 15 bp, Homo sapiens
aatcatgcaagttct

SEQ ID NO: 687426 - DNA, 15 bp, Homo sapiens
atcatgcaagttctt

SEQ ID NO: 687427 - DNA, 15 bp, Homo sapiens
tcatgcaagttcttg

SEQ ID NO: 687428 - DNA, 15 bp, Homo sapiens
catgcaagttcttgg

SEQ ID NO: 687429 - DNA, 15 bp, Homo sapiens
atgcaagttcttggg

SEQ ID NO: 687430 - DNA, 15 bp, Homo sapiens
tgcaagttcttgggg

SEQ ID NO: 687431 - DNA, 15 bp, Homo sapiens
gcaagttcttggggg

SEQ ID NO: 687432 - DNA, 15 bp, Homo sapiens
caagttcttggggga

SEQ ID NO: 687433 - DNA, 15 bp, Homo sapiens
aagttcttgggggaa

SEQ ID NO: 687434 - DNA, 15 bp, Homo sapiens
agttcttgggggaag

SEQ ID NO: 687435 - DNA, 15 bp, Homo sapiens
gttcttgggggaaga

SEQ ID NO: 687436 - DNA, 15 bp, Homo sapiens
ttcttgggggaagaa

SEQ ID NO: 687437 - DNA, 15 bp, Homo sapiens
tcttgggggaagaag

SEQ ID NO: 687438 - DNA, 15 bp, Homo sapiens
cttgggggaagaagt

SEQ ID NO: 687439 - DNA, 15 bp, Homo sapiens
ttgggggaagaagtg

SEQ ID NO: 687440 - DNA, 15 bp, Homo sapiens
tgggggaagaagtgc

SEQ ID NO: 687441 - DNA, 15 bp, Homo sapiens
gggggaagaagtgct

SEQ ID NO: 687442 - DNA, 15 bp, Homo sapiens
ggggaagaagtgctc

SEQ ID NO: 687443 - DNA, 15 bp, Homo sapiens
gggaagaagtgctca

SEQ ID NO: 687444 - DNA, 15 bp, Homo sapiens
ggaagaagtgctcac

SEQ ID NO: 687445 - DNA, 15 bp, Homo sapiens
gaagaagtgctcaca

SEQ ID NO: 687446 - DNA, 15 bp, Homo sapiens
aagaagtgctcacaa

SEQ ID NO: 687447 - DNA, 15 bp, Homo sapiens
agaagtgctcacaat

SEQ ID NO: 687448 - DNA, 15 bp, Homo sapiens
gaagtgctcacaata

SEQ ID NO: 687449 - DNA, 15 bp, Homo sapiens
aagtgctcacaatat

SEQ ID NO: 687450 - DNA, 15 bp, Homo sapiens
agtgctcacaatata

SEQ ID NO: 687451 - DNA, 15 bp, Homo sapiens
gtgctcacaatataa

SEQ ID NO: 687452 - DNA, 15 bp, Homo sapiens
tgctcacaatataaa

SEQ ID NO: 687453 - DNA, 15 bp, Homo sapiens
gctcacaatataaat

SEQ ID NO: 687454 - DNA, 15 bp, Homo sapiens
ctcacaatataaatg

SEQ ID NO: 687455 - DNA, 15 bp, Homo sapiens
tcacaatataaatgt

SEQ ID NO: 687456 - DNA, 15 bp, Homo sapiens
cacaatataaatgtg

SEQ ID NO: 687457 - DNA, 15 bp, Homo sapiens
acaatataaatgtgg

SEQ ID NO: 687458 - DNA, 15 bp, Homo sapiens
caatataaatgtgga

SEQ ID NO: 687459 - DNA, 15 bp, Homo sapiens
aatataaatgtggat

SEQ ID NO: 687460 - DNA, 15 bp, Homo sapiens
atataaatgtggatg

SEQ ID NO: 687461 - DNA, 15 bp, Homo sapiens
tataaatgtggatgt

SEQ ID NO: 687462 - DNA, 15 bp, Homo sapiens
ataaatgtggatgtg

SEQ ID NO: 687463 - DNA, 15 bp, Homo sapiens
taaatgtggatgtgg

SEQ ID NO: 687464 - DNA, 15 bp, Homo sapiens
aaatgtggatgtgga

SEQ ID NO: 687465 - DNA, 15 bp, Homo sapiens
aatgtggatgtggaa

SEQ ID NO: 687466 - DNA, 15 bp, Homo sapiens
atgtggatgtggaag

SEQ ID NO: 687467 - DNA, 15 bp, Homo sapiens
tgtggatgtggaaga

SEQ ID NO: 687468 - DNA, 15 bp, Homo sapiens
gtggatgtggaagaa

SEQ ID NO: 687469 - DNA, 15 bp, Homo sapiens
tggatgtggaagaaa

SEQ ID NO: 687470 - DNA, 15 bp, Homo sapiens
ggatgtggaagaaag

SEQ ID NO: 687471 - DNA, 15 bp, Homo sapiens
gatgtggaagaaagt

SEQ ID NO: 687472 - DNA, 15 bp, Homo sapiens
atgtggaagaaagta

SEQ ID NO: 687473 - DNA, 15 bp, Homo sapiens
tgtggaagaaagtaa

SEQ ID NO: 687474 - DNA, 15 bp, Homo sapiens
gtggaagaaagtaaa

SEQ ID NO: 687475 - DNA, 15 bp, Homo sapiens
tggaagaaagtaaaa

SEQ ID NO: 687476 - DNA, 15 bp, Homo sapiens
ggaagaaagtaaaag

SEQ ID NO: 687477 - DNA, 15 bp, Homo sapiens
gaagaaagtaaaagt

SEQ ID NO: 687478 - DNA, 15 bp, Homo sapiens
aagaaagtaaaagtt

SEQ ID NO: 687479 - DNA, 15 bp, Homo sapiens
agaaagtaaaagtta

SEQ ID NO: 687480 - DNA, 15 bp, Homo sapiens
gaaagtaaaagttac

SEQ ID NO: 687481 - DNA, 15 bp, Homo sapiens
aaagtaaaagttacc

SEQ ID NO: 687482 - DNA, 15 bp, Homo sapiens
aagtaaaagttacct

SEQ ID NO: 687483 - DNA, 15 bp, Homo sapiens
agtaaaagttacctg

SEQ ID NO: 687484 - DNA, 15 bp, Homo sapiens
gtaaaagttacctga

SEQ ID NO: 687485 - DNA, 15 bp, Homo sapiens
taaaagttacctgaa

SEQ ID NO: 687486 - DNA, 15 bp, Homo sapiens
aaaagttacctgaag

SEQ ID NO: 687487 - DNA, 15 bp, Homo sapiens
aaagttacctgaagt

SEQ ID NO: 687488 - DNA, 15 bp, Homo sapiens
aagttacctgaagta

SEQ ID NO: 687489 - DNA, 15 bp, Homo sapiens
agttacctgaagtat

SEQ ID NO: 687490 - DNA, 15 bp, Homo sapiens
gttacctgaagtatc

SEQ ID NO: 687491 - DNA, 15 bp, Homo sapiens
ttacctgaagtatca

SEQ ID NO: 687492 - DNA, 15 bp, Homo sapiens
tacctgaagtatcag

SEQ ID NO: 687493 - DNA, 15 bp, Homo sapiens
acctgaagtatcaga

SEQ ID NO: 687494 - DNA, 15 bp, Homo sapiens
cctgaagtatcagag

SEQ ID NO: 687495 - DNA, 15 bp, Homo sapiens
ctgaagtatcagagc

SEQ ID NO: 687496 - DNA, 15 bp, Homo sapiens
tgaagtatcagagcc

SEQ ID NO: 687497 - DNA, 15 bp, Homo sapiens
gaagtatcagagcct

SEQ ID NO: 687498 - DNA, 15 bp, Homo sapiens
aagtatcagagccta

SEQ ID NO: 687499 - DNA, 15 bp, Homo sapiens
agtatcagagcctag

SEQ ID NO: 687500 - DNA, 15 bp, Homo sapiens
gtatcagagcctaga

SEQ ID NO: 687501 - DNA, 15 bp, Homo sapiens
tatcagagcctagag

SEQ ID NO: 687502 - DNA, 15 bp, Homo sapiens
atcagagcctagagt

SEQ ID NO: 687503 - DNA, 15 bp, Homo sapiens
tcagagcctagagtt

SEQ ID NO: 687504 - DNA, 15 bp, Homo sapiens
cagagcctagagtta

SEQ ID NO: 687505 - DNA, 15 bp, Homo sapiens
agagcctagagttaa

SEQ ID NO: 687506 - DNA, 15 bp, Homo sapiens
gagcctagagttaaa

SEQ ID NO: 687507 - DNA, 15 bp, Homo sapiens
agcctagagttaaat

SEQ ID NO: 687508 - DNA, 15 bp, Homo sapiens
gcctagagttaaatt

SEQ ID NO: 687509 - DNA, 15 bp, Homo sapiens
cctagagttaaattt

SEQ ID NO: 687510 - DNA, 15 bp, Homo sapiens
ctagagttaaatttt

SEQ ID NO: 687511 - DNA, 15 bp, Homo sapiens
tagagttaaattttg

SEQ ID NO: 687512 - DNA, 15 bp, Homo sapiens
agagttaaattttgt

SEQ ID NO: 687513 - DNA, 15 bp, Homo sapiens
gagttaaattttgtt

SEQ ID NO: 687514 - DNA, 15 bp, Homo sapiens
agttaaattttgttg

SEQ ID NO: 687515 - DNA, 15 bp, Homo sapiens
gttaaattttgttgt

SEQ ID NO: 687516 - DNA, 15 bp, Homo sapiens
ttaaattttgttgta

SEQ ID NO: 687517 - DNA, 15 bp, Homo sapiens
taaattttgttgtag

SEQ ID NO: 687518 - DNA, 15 bp, Homo sapiens
aaattttgttgtagt

SEQ ID NO: 687519 - DNA, 15 bp, Homo sapiens
aattttgttgtagtt

SEQ ID NO: 687520 - DNA, 15 bp, Homo sapiens
attttgttgtagttc

SEQ ID NO: 687521 - DNA, 15 bp, Homo sapiens
ttttgttgtagttct

SEQ ID NO: 687522 - DNA, 15 bp, Homo sapiens
tttgttgtagttctt

SEQ ID NO: 687523 - DNA, 15 bp, Homo sapiens
ttgttgtagttcttg

SEQ ID NO: 687524 - DNA, 15 bp, Homo sapiens
tgttgtagttcttgc

SEQ ID NO: 687525 - DNA, 15 bp, Homo sapiens
gttgtagttcttgct

SEQ ID NO: 687526 - DNA, 15 bp, Homo sapiens
ttgtagttcttgcta

SEQ ID NO: 687527 - DNA, 15 bp, Homo sapiens
tgtagttcttgctag

SEQ ID NO: 687528 - DNA, 15 bp, Homo sapiens
gtagttcttgctaga

SEQ ID NO: 687529 - DNA, 15 bp, Homo sapiens
tagttcttgctagaa

SEQ ID NO: 687530 - DNA, 15 bp, Homo sapiens
agttcttgctagaat

SEQ ID NO: 687531 - DNA, 15 bp, Homo sapiens
gttcttgctagaatt

SEQ ID NO: 687532 - DNA, 15 bp, Homo sapiens
ttcttgctagaattt

SEQ ID NO: 687533 - DNA, 15 bp, Homo sapiens
tcttgctagaatttt

SEQ ID NO: 687534 - DNA, 15 bp, Homo sapiens
cttgctagaatttta

SEQ ID NO: 687535 - DNA, 15 bp, Homo sapiens
ttgctagaattttat

SEQ ID NO: 687536 - DNA, 15 bp, Homo sapiens
tgctagaattttata

SEQ ID NO: 687537 - DNA, 15 bp, Homo sapiens
gctagaattttatat

SEQ ID NO: 687538 - DNA, 15 bp, Homo sapiens
ctagaattttatata

SEQ ID NO: 687539 - DNA, 15 bp, Homo sapiens
tagaattttatataa

SEQ ID NO: 687540 - DNA, 15 bp, Homo sapiens
agaattttatataat

SEQ ID NO: 687541 - DNA, 15 bp, Homo sapiens
gaattttatataatt

SEQ ID NO: 687542 - DNA, 15 bp, Homo sapiens
aattttatataattt

SEQ ID NO: 687543 - DNA, 15 bp, Homo sapiens
attttatataatttt

SEQ ID NO: 687544 - DNA, 15 bp, Homo sapiens
ttttatataattttt

SEQ ID NO: 687545 - DNA, 15 bp, Homo sapiens
tttatataattttta

SEQ ID NO: 687546 - DNA, 15 bp, Homo sapiens
ttatataatttttaa

SEQ ID NO: 687547 - DNA, 15 bp, Homo sapiens
tatataatttttaac

SEQ ID NO: 687548 - DNA, 15 bp, Homo sapiens
atataatttttaaca

SEQ ID NO: 687549 - DNA, 15 bp, Homo sapiens
tataatttttaacaa

SEQ ID NO: 687550 - DNA, 15 bp, Homo sapiens
ataatttttaacaaa

SEQ ID NO: 687551 - DNA, 15 bp, Homo sapiens
taatttttaacaaag

SEQ ID NO: 687552 - DNA, 15 bp, Homo sapiens
aatttttaacaaaga

SEQ ID NO: 687553 - DNA, 15 bp, Homo sapiens
atttttaacaaagat

SEQ ID NO: 687554 - DNA, 15 bp, Homo sapiens
tttttaacaaagatg

SEQ ID NO: 687555 - DNA, 15 bp, Homo sapiens
ttttaacaaagatga

SEQ ID NO: 687556 - DNA, 15 bp, Homo sapiens
tttaacaaagatgaa

SEQ ID NO: 687557 - DNA, 15 bp, Homo sapiens
ttaacaaagatgaaa

SEQ ID NO: 687558 - DNA, 15 bp, Homo sapiens
taacaaagatgaaat

SEQ ID NO: 687559 - DNA, 15 bp, Homo sapiens
aacaaagatgaaatc

SEQ ID NO: 687560 - DNA, 15 bp, Homo sapiens
acaaagatgaaatca

SEQ ID NO: 687561 - DNA, 15 bp, Homo sapiens
caaagatgaaatcat

SEQ ID NO: 687562 - DNA, 15 bp, Homo sapiens
aaagatgaaatcatc

SEQ ID NO: 687563 - DNA, 15 bp, Homo sapiens
aagatgaaatcatcc

SEQ ID NO: 687564 - DNA, 15 bp, Homo sapiens
agatgaaatcatcct

SEQ ID NO: 687565 - DNA, 15 bp, Homo sapiens
gatgaaatcatcctg

SEQ ID NO: 687566 - DNA, 15 bp, Homo sapiens
atgaaatcatcctgt

SEQ ID NO: 687567 - DNA, 15 bp, Homo sapiens
tgaaatcatcctgtt

SEQ ID NO: 687568 - DNA, 15 bp, Homo sapiens
gaaatcatcctgttg

SEQ ID NO: 687569 - DNA, 15 bp, Homo sapiens
aaatcatcctgttgt

SEQ ID NO: 687570 - DNA, 15 bp, Homo sapiens
aatcatcctgttgta

SEQ ID NO: 687571 - DNA, 15 bp, Homo sapiens
atcatcctgttgtat

SEQ ID NO: 687572 - DNA, 15 bp, Homo sapiens
tcatcctgttgtata

SEQ ID NO: 687573 - DNA, 15 bp, Homo sapiens
catcctgttgtataa

SEQ ID NO: 687574 - DNA, 15 bp, Homo sapiens
atcctgttgtataag

SEQ ID NO: 687575 - DNA, 15 bp, Homo sapiens
tcctgttgtataaga

SEQ ID NO: 687576 - DNA, 15 bp, Homo sapiens
cctgttgtataagat

SEQ ID NO: 687577 - DNA, 15 bp, Homo sapiens
ctgttgtataagata

SEQ ID NO: 687578 - DNA, 15 bp, Homo sapiens
tgttgtataagatat

SEQ ID NO: 687579 - DNA, 15 bp, Homo sapiens
gttgtataagatata

SEQ ID NO: 687580 - DNA, 15 bp, Homo sapiens
ttgtataagatataa

SEQ ID NO: 687581 - DNA, 15 bp, Homo sapiens
tgtataagatataaa

SEQ ID NO: 687582 - DNA, 15 bp, Homo sapiens
gtataagatataaaa

SEQ ID NO: 687583 - DNA, 15 bp, Homo sapiens
tataagatataaaat

SEQ ID NO: 687584 - DNA, 15 bp, Homo sapiens
ataagatataaaata

SEQ ID NO: 687585 - DNA, 15 bp, Homo sapiens
taagatataaaatat

SEQ ID NO: 687586 - DNA, 15 bp, Homo sapiens
aagatataaaatatg

SEQ ID NO: 687587 - DNA, 15 bp, Homo sapiens
agatataaaatatgc

SEQ ID NO: 687588 - DNA, 15 bp, Homo sapiens
gatataaaatatgca

SEQ ID NO: 687589 - DNA, 15 bp, Homo sapiens
atataaaatatgcat

SEQ ID NO: 687590 - DNA, 15 bp, Homo sapiens
tataaaatatgcata

SEQ ID NO: 687591 - DNA, 15 bp, Homo sapiens
ataaaatatgcatac

SEQ ID NO: 687592 - DNA, 15 bp, Homo sapiens
taaaatatgcatact

SEQ ID NO: 687593 - DNA, 15 bp, Homo sapiens
aaaatatgcatactt

SEQ ID NO: 687594 - DNA, 15 bp, Homo sapiens
aaatatgcatacttt

SEQ ID NO: 687595 - DNA, 15 bp, Homo sapiens
aatatgcatactttt

SEQ ID NO: 687596 - DNA, 15 bp, Homo sapiens
atatgcatacttttt

SEQ ID NO: 687597 - DNA, 15 bp, Homo sapiens
tatgcatactttttt

SEQ ID NO: 687598 - DNA, 15 bp, Homo sapiens
atgcatacttttttt

SEQ ID NO: 687599 - DNA, 15 bp, Homo sapiens
tgcatactttttttc

SEQ ID NO: 687600 - DNA, 15 bp, Homo sapiens
gcatactttttttcc

SEQ ID NO: 687601 - DNA, 15 bp, Homo sapiens
catactttttttccc

SEQ ID NO: 687602 - DNA, 15 bp, Homo sapiens
atactttttttccca

SEQ ID NO: 687603 - DNA, 15 bp, Homo sapiens
tactttttttcccat

SEQ ID NO: 687604 - DNA, 15 bp, Homo sapiens
actttttttcccatt

SEQ ID NO: 687605 - DNA, 15 bp, Homo sapiens
ctttttttcccattt

SEQ ID NO: 687606 - DNA, 15 bp, Homo sapiens
tttttttcccattta

SEQ ID NO: 687607 - DNA, 15 bp, Homo sapiens
ttttttcccatttaa

SEQ ID NO: 687608 - DNA, 15 bp, Homo sapiens
tttttcccatttaac

SEQ ID NO: 687609 - DNA, 15 bp, Homo sapiens
ttttcccatttaaca

SEQ ID NO: 687610 - DNA, 15 bp, Homo sapiens
tttcccatttaacaa

SEQ ID NO: 687611 - DNA, 15 bp, Homo sapiens
ttcccatttaacaac

SEQ ID NO: 687612 - DNA, 15 bp, Homo sapiens
tcccatttaacaaca

SEQ ID NO: 687613 - DNA, 15 bp, Homo sapiens
cccatttaacaacat

SEQ ID NO: 687614 - DNA, 15 bp, Homo sapiens
ccatttaacaacata

SEQ ID NO: 687615 - DNA, 15 bp, Homo sapiens
catttaacaacataa

SEQ ID NO: 687616 - DNA, 15 bp, Homo sapiens
atttaacaacataat

SEQ ID NO: 687617 - DNA, 15 bp, Homo sapiens
tttaacaacataata

SEQ ID NO: 687618 - DNA, 15 bp, Homo sapiens
ttaacaacataatat

SEQ ID NO: 687619 - DNA, 15 bp, Homo sapiens
taacaacataatatg

SEQ ID NO: 687620 - DNA, 15 bp, Homo sapiens
aacaacataatatga

SEQ ID NO: 687621 - DNA, 15 bp, Homo sapiens
acaacataatatgaa

SEQ ID NO: 687622 - DNA, 15 bp, Homo sapiens
caacataatatgaat

SEQ ID NO: 687623 - DNA, 15 bp, Homo sapiens
aacataatatgaatt

SEQ ID NO: 687624 - DNA, 15 bp, Homo sapiens
acataatatgaatta

SEQ ID NO: 687625 - DNA, 15 bp, Homo sapiens
cataatatgaattag

SEQ ID NO: 687626 - DNA, 15 bp, Homo sapiens
ataatatgaattagg

SEQ ID NO: 687627 - DNA, 15 bp, Homo sapiens
taatatgaattaggt

SEQ ID NO: 687628 - DNA, 15 bp, Homo sapiens
aatatgaattaggtg

SEQ ID NO: 687629 - DNA, 15 bp, Homo sapiens
atatgaattaggtgg

SEQ ID NO: 687630 - DNA, 15 bp, Homo sapiens
tatgaattaggtggg

SEQ ID NO: 687631 - DNA, 15 bp, Homo sapiens
atgaattaggtgggt

SEQ ID NO: 687632 - DNA, 15 bp, Homo sapiens
tgaattaggtgggtg

SEQ ID NO: 687633 - DNA, 15 bp, Homo sapiens
gaattaggtgggtgt

SEQ ID NO: 687634 - DNA, 15 bp, Homo sapiens
aattaggtgggtgtg

SEQ ID NO: 687635 - DNA, 15 bp, Homo sapiens
attaggtgggtgtgg

SEQ ID NO: 687636 - DNA, 15 bp, Homo sapiens
ttaggtgggtgtggt

SEQ ID NO: 687637 - DNA, 15 bp, Homo sapiens
taggtgggtgtggtg

SEQ ID NO: 687638 - DNA, 15 bp, Homo sapiens
aggtgggtgtggtgt

SEQ ID NO: 687639 - DNA, 15 bp, Homo sapiens
ggtgggtgtggtgtc

SEQ ID NO: 687640 - DNA, 15 bp, Homo sapiens
gtgggtgtggtgtca

SEQ ID NO: 687641 - DNA, 15 bp, Homo sapiens
tgggtgtggtgtcac

SEQ ID NO: 687642 - DNA, 15 bp, Homo sapiens
gggtgtggtgtcacg

SEQ ID NO: 687643 - DNA, 15 bp, Homo sapiens
ggtgtggtgtcacgt

SEQ ID NO: 687644 - DNA, 15 bp, Homo sapiens
gtgtggtgtcacgtg

SEQ ID NO: 687645 - DNA, 15 bp, Homo sapiens
tgtggtgtcacgtgc

SEQ ID NO: 687646 - DNA, 15 bp, Homo sapiens
gtggtgtcacgtgcc

SEQ ID NO: 687647 - DNA, 15 bp, Homo sapiens
tggtgtcacgtgcct

SEQ ID NO: 687648 - DNA, 15 bp, Homo sapiens
ggtgtcacgtgcctg

SEQ ID NO: 687649 - DNA, 15 bp, Homo sapiens
gtgtcacgtgcctgt

SEQ ID NO: 687650 - DNA, 15 bp, Homo sapiens
tgtcacgtgcctgta

SEQ ID NO: 687651 - DNA, 15 bp, Homo sapiens
gtcacgtgcctgtaa

SEQ ID NO: 687652 - DNA, 15 bp, Homo sapiens
tcacgtgcctgtaat

SEQ ID NO: 687653 - DNA, 15 bp, Homo sapiens
cacgtgcctgtaatt

SEQ ID NO: 687654 - DNA, 15 bp, Homo sapiens
acgtgcctgtaattt

SEQ ID NO: 687655 - DNA, 15 bp, Homo sapiens
cgtgcctgtaatttc

SEQ ID NO: 687656 - DNA, 15 bp, Homo sapiens
gtgcctgtaatttca

SEQ ID NO: 687657 - DNA, 15 bp, Homo sapiens
tgcctgtaatttcag

SEQ ID NO: 687658 - DNA, 15 bp, Homo sapiens
gcctgtaatttcagc

SEQ ID NO: 687659 - DNA, 15 bp, Homo sapiens
cctgtaatttcagct

SEQ ID NO: 687660 - DNA, 15 bp, Homo sapiens
ctgtaatttcagcta

SEQ ID NO: 687661 - DNA, 15 bp, Homo sapiens
tgtaatttcagctac

SEQ ID NO: 687662 - DNA, 15 bp, Homo sapiens
gtaatttcagctact

SEQ ID NO: 687663 - DNA, 15 bp, Homo sapiens
taatttcagctactc

SEQ ID NO: 687664 - DNA, 15 bp, Homo sapiens
aatttcagctactca

SEQ ID NO: 687665 - DNA, 15 bp, Homo sapiens
atttcagctactcag

SEQ ID NO: 687666 - DNA, 15 bp, Homo sapiens
tttcagctactcagg

SEQ ID NO: 687667 - DNA, 15 bp, Homo sapiens
ttcagctactcagga

SEQ ID NO: 687668 - DNA, 15 bp, Homo sapiens
tcagctactcaggag

SEQ ID NO: 687669 - DNA, 15 bp, Homo sapiens
ggcaggagaatcacc

SEQ ID NO: 687670 - DNA, 15 bp, Homo sapiens
gcaggagaatcacct

SEQ ID NO: 687671 - DNA, 15 bp, Homo sapiens
caggagaatcacctg

SEQ ID NO: 687672 - DNA, 15 bp, Homo sapiens
aggagaatcacctga

SEQ ID NO: 687673 - DNA, 15 bp, Homo sapiens
ggagaatcacctgaa

SEQ ID NO: 687674 - DNA, 15 bp, Homo sapiens
gagaatcacctgaac

SEQ ID NO: 687675 - DNA, 15 bp, Homo sapiens
agaatcacctgaacc

SEQ ID NO: 687676 - DNA, 15 bp, Homo sapiens
gaatcacctgaacct

SEQ ID NO: 687677 - DNA, 15 bp, Homo sapiens
aatcacctgaacctg

SEQ ID NO: 687678 - DNA, 15 bp, Homo sapiens
atcacctgaacctgg

SEQ ID NO: 687679 - DNA, 15 bp, Homo sapiens
tcacctgaacctggg

SEQ ID NO: 687680 - DNA, 15 bp, Homo sapiens
cacctgaacctggga

SEQ ID NO: 687681 - DNA, 15 bp, Homo sapiens
acctgaacctgggag

SEQ ID NO: 687682 - DNA, 15 bp, Homo sapiens
cctgaacctgggagg

SEQ ID NO: 687683 - DNA, 15 bp, Homo sapiens
ctgaacctgggaggc

SEQ ID NO: 687684 - DNA, 15 bp, Homo sapiens
tgaacctgggaggcg

SEQ ID NO: 687685 - DNA, 15 bp, Homo sapiens
gaacctgggaggcgg

SEQ ID NO: 687686 - DNA, 15 bp, Homo sapiens
aacctgggaggcgga

SEQ ID NO: 687687 - DNA, 15 bp, Homo sapiens
acctgggaggcggag

SEQ ID NO: 687688 - DNA, 15 bp, Homo sapiens
cctgggaggcggagg

SEQ ID NO: 687689 - DNA, 15 bp, Homo sapiens
ctgggaggcggaggc

SEQ ID NO: 687690 - DNA, 15 bp, Homo sapiens
tgggaggcggaggct

SEQ ID NO: 687691 - DNA, 15 bp, Homo sapiens
gggaggcggaggctg

SEQ ID NO: 687692 - DNA, 15 bp, Homo sapiens
ggaggcggaggctgc

SEQ ID NO: 687693 - DNA, 15 bp, Homo sapiens
gaggcggaggctgca

SEQ ID NO: 687694 - DNA, 15 bp, Homo sapiens
aggcggaggctgcag

SEQ ID NO: 687695 - DNA, 15 bp, Homo sapiens
ggcggaggctgcagt

SEQ ID NO: 687696 - DNA, 15 bp, Homo sapiens
gcggaggctgcagtg

SEQ ID NO: 687697 - DNA, 15 bp, Homo sapiens
cggaggctgcagtga

SEQ ID NO: 687698 - DNA, 15 bp, Homo sapiens
ggaggctgcagtgag

SEQ ID NO: 687699 - DNA, 15 bp, Homo sapiens
gaggctgcagtgagc

SEQ ID NO: 687700 - DNA, 15 bp, Homo sapiens
aggctgcagtgagcc

SEQ ID NO: 687701 - DNA, 15 bp, Homo sapiens
ggctgcagtgagcca

SEQ ID NO: 687702 - DNA, 15 bp, Homo sapiens
gctgcagtgagccaa

SEQ ID NO: 687703 - DNA, 15 bp, Homo sapiens
ctgcagtgagccaaa

SEQ ID NO: 687704 - DNA, 15 bp, Homo sapiens
tgcagtgagccaaaa

SEQ ID NO: 687705 - DNA, 15 bp, Homo sapiens
gcagtgagccaaaat

SEQ ID NO: 687706 - DNA, 15 bp, Homo sapiens
cagtgagccaaaatc

SEQ ID NO: 687707 - DNA, 15 bp, Homo sapiens
agtgagccaaaatca

SEQ ID NO: 687708 - DNA, 15 bp, Homo sapiens
gtgagccaaaatcat

SEQ ID NO: 687709 - DNA, 15 bp, Homo sapiens
tgagccaaaatcatg

SEQ ID NO: 687710 - DNA, 15 bp, Homo sapiens
gagccaaaatcatgc

SEQ ID NO: 687711 - DNA, 15 bp, Homo sapiens
agccaaaatcatgcc

SEQ ID NO: 687712 - DNA, 15 bp, Homo sapiens
gccaaaatcatgcca

SEQ ID NO: 687713 - DNA, 15 bp, Homo sapiens
ccaaaatcatgccac

SEQ ID NO: 687714 - DNA, 15 bp, Homo sapiens
caaaatcatgccact

SEQ ID NO: 687715 - DNA, 15 bp, Homo sapiens
aaaatcatgccactg

SEQ ID NO: 687716 - DNA, 15 bp, Homo sapiens
aaatcatgccactgc

SEQ ID NO: 687717 - DNA, 15 bp, Homo sapiens
aatcatgccactgca

SEQ ID NO: 687718 - DNA, 15 bp, Homo sapiens
atcatgccactgcac

SEQ ID NO: 687719 - DNA, 15 bp, Homo sapiens
tcatgccactgcact

SEQ ID NO: 687720 - DNA, 15 bp, Homo sapiens
catgccactgcactc

SEQ ID NO: 687721 - DNA, 15 bp, Homo sapiens
atgccactgcactcc

SEQ ID NO: 687722 - DNA, 15 bp, Homo sapiens
ctgcactccagccta

SEQ ID NO: 687723 - DNA, 15 bp, Homo sapiens
tgcactccagcctag

SEQ ID NO: 687724 - DNA, 15 bp, Homo sapiens
gcactccagcctagg

SEQ ID NO: 687725 - DNA, 15 bp, Homo sapiens
cactccagcctaggt

SEQ ID NO: 687726 - DNA, 15 bp, Homo sapiens
actccagcctaggtg

SEQ ID NO: 687727 - DNA, 15 bp, Homo sapiens
ctccagcctaggtga

SEQ ID NO: 687728 - DNA, 15 bp, Homo sapiens
tccagcctaggtgac

SEQ ID NO: 687729 - DNA, 15 bp, Homo sapiens
ccagcctaggtgaca

SEQ ID NO: 687730 - DNA, 15 bp, Homo sapiens
cagcctaggtgacag

SEQ ID NO: 687731 - DNA, 15 bp, Homo sapiens
agcctaggtgacaga

SEQ ID NO: 687732 - DNA, 15 bp, Homo sapiens
gcctaggtgacagaa

SEQ ID NO: 687733 - DNA, 15 bp, Homo sapiens
cctaggtgacagaac

SEQ ID NO: 687734 - DNA, 15 bp, Homo sapiens
ctaggtgacagaaca

SEQ ID NO: 687735 - DNA, 15 bp, Homo sapiens
taggtgacagaacaa

SEQ ID NO: 687736 - DNA, 15 bp, Homo sapiens
aggtgacagaacaag

SEQ ID NO: 687737 - DNA, 15 bp, Homo sapiens
ggtgacagaacaaga

SEQ ID NO: 687738 - DNA, 15 bp, Homo sapiens
gtgacagaacaagac

SEQ ID NO: 687739 - DNA, 15 bp, Homo sapiens
tgacagaacaagact

SEQ ID NO: 687740 - DNA, 15 bp, Homo sapiens
gacagaacaagactc

SEQ ID NO: 687741 - DNA, 15 bp, Homo sapiens
acagaacaagactcc

SEQ ID NO: 687742 - DNA, 15 bp, Homo sapiens
cagaacaagactccg

SEQ ID NO: 687743 - DNA, 15 bp, Homo sapiens
agaacaagactccgt

SEQ ID NO: 687744 - DNA, 15 bp, Homo sapiens
gaacaagactccgtt

SEQ ID NO: 687745 - DNA, 15 bp, Homo sapiens
aacaagactccgttc

SEQ ID NO: 687746 - DNA, 15 bp, Homo sapiens
acaagactccgttca

SEQ ID NO: 687747 - DNA, 15 bp, Homo sapiens
caagactccgttcaa

SEQ ID NO: 687748 - DNA, 15 bp, Homo sapiens
aagactccgttcaaa

SEQ ID NO: 687749 - DNA, 15 bp, Homo sapiens
agactccgttcaaaa

SEQ ID NO: 687750 - DNA, 15 bp, Homo sapiens
gactccgttcaaaaa

SEQ ID NO: 687751 - DNA, 15 bp, Homo sapiens
actccgttcaaaaaa

SEQ ID NO: 687752 - DNA, 15 bp, Homo sapiens
ctccgttcaaaaaat

SEQ ID NO: 687753 - DNA, 15 bp, Homo sapiens
tccgttcaaaaaata

SEQ ID NO: 687754 - DNA, 15 bp, Homo sapiens
ccgttcaaaaaataa

SEQ ID NO: 687755 - DNA, 15 bp, Homo sapiens
cgttcaaaaaataaa

SEQ ID NO: 687756 - DNA, 15 bp, Homo sapiens
gttcaaaaaataaaa

SEQ ID NO: 687757 - DNA, 15 bp, Homo sapiens
ttcaaaaaataaaaa

SEQ ID NO: 687758 - DNA, 15 bp, Homo sapiens
tcaaaaaataaaaaa

SEQ ID NO: 687759 - DNA, 15 bp, Homo sapiens
caaaaaataaaaaag

SEQ ID NO: 687760 - DNA, 15 bp, Homo sapiens
aaaaaataaaaaaga

SEQ ID NO: 687761 - DNA, 15 bp, Homo sapiens
aaaaataaaaaagac

SEQ ID NO: 687762 - DNA, 15 bp, Homo sapiens
aaaataaaaaagaca

SEQ ID NO: 687763 - DNA, 15 bp, Homo sapiens
aaataaaaaagacaa

SEQ ID NO: 687764 - DNA, 15 bp, Homo sapiens
aataaaaaagacaaa

SEQ ID NO: 687765 - DNA, 15 bp, Homo sapiens
ataaaaaagacaaag

SEQ ID NO: 687766 - DNA, 15 bp, Homo sapiens
taaaaaagacaaagc

SEQ ID NO: 687767 - DNA, 15 bp, Homo sapiens
aaaaaagacaaagca

SEQ ID NO: 687768 - DNA, 15 bp, Homo sapiens
aaaaagacaaagcac

SEQ ID NO: 687769 - DNA, 15 bp, Homo sapiens
aaaagacaaagcaca

SEQ ID NO: 687770 - DNA, 15 bp, Homo sapiens
aaagacaaagcacaa

SEQ ID NO: 687771 - DNA, 15 bp, Homo sapiens
aagacaaagcacaaa

SEQ ID NO: 687772 - DNA, 15 bp, Homo sapiens
agacaaagcacaaac

SEQ ID NO: 687773 - DNA, 15 bp, Homo sapiens
gacaaagcacaaacc

SEQ ID NO: 687774 - DNA, 15 bp, Homo sapiens
acaaagcacaaacca

SEQ ID NO: 687775 - DNA, 15 bp, Homo sapiens
caaagcacaaaccaa

SEQ ID NO: 687776 - DNA, 15 bp, Homo sapiens
aaagcacaaaccaac

SEQ ID NO: 687777 - DNA, 15 bp, Homo sapiens
aagcacaaaccaacc

SEQ ID NO: 687778 - DNA, 15 bp, Homo sapiens
agcacaaaccaacct

SEQ ID NO: 687779 - DNA, 15 bp, Homo sapiens
gcacaaaccaaccta

SEQ ID NO: 687780 - DNA, 15 bp, Homo sapiens
cacaaaccaacctaa

SEQ ID NO: 687781 - DNA, 15 bp, Homo sapiens
acaaaccaacctaat

SEQ ID NO: 687782 - DNA, 15 bp, Homo sapiens
caaaccaacctaatg

SEQ ID NO: 687783 - DNA, 15 bp, Homo sapiens
aaaccaacctaatgt

SEQ ID NO: 687784 - DNA, 15 bp, Homo sapiens
aaccaacctaatgtg

SEQ ID NO: 687785 - DNA, 15 bp, Homo sapiens
accaacctaatgtgg

SEQ ID NO: 687786 - DNA, 15 bp, Homo sapiens
ccaacctaatgtgga

SEQ ID NO: 687787 - DNA, 15 bp, Homo sapiens
caacctaatgtggac

SEQ ID NO: 687788 - DNA, 15 bp, Homo sapiens
aacctaatgtggaca

SEQ ID NO: 687789 - DNA, 15 bp, Homo sapiens
acctaatgtggacaa

SEQ ID NO: 687790 - DNA, 15 bp, Homo sapiens
cctaatgtggacaat

SEQ ID NO: 687791 - DNA, 15 bp, Homo sapiens
ctaatgtggacaatg

SEQ ID NO: 687792 - DNA, 15 bp, Homo sapiens
taatgtggacaatgt

SEQ ID NO: 687793 - DNA, 15 bp, Homo sapiens
aatgtggacaatgtc

SEQ ID NO: 687794 - DNA, 15 bp, Homo sapiens
atgtggacaatgtca

SEQ ID NO: 687795 - DNA, 15 bp, Homo sapiens
tgtggacaatgtcat

SEQ ID NO: 687796 - DNA, 15 bp, Homo sapiens
gtggacaatgtcatg

SEQ ID NO: 687797 - DNA, 15 bp, Homo sapiens
tggacaatgtcatgt

SEQ ID NO: 687798 - DNA, 15 bp, Homo sapiens
ggacaatgtcatgtc

SEQ ID NO: 687799 - DNA, 15 bp, Homo sapiens
gacaatgtcatgtca

SEQ ID NO: 687800 - DNA, 15 bp, Homo sapiens
acaatgtcatgtcaa

SEQ ID NO: 687801 - DNA, 15 bp, Homo sapiens
caatgtcatgtcaat

SEQ ID NO: 687802 - DNA, 15 bp, Homo sapiens
aatgtcatgtcaata

SEQ ID NO: 687803 - DNA, 15 bp, Homo sapiens
atgtcatgtcaatac

SEQ ID NO: 687804 - DNA, 15 bp, Homo sapiens
tgtcatgtcaataca

SEQ ID NO: 687805 - DNA, 15 bp, Homo sapiens
gtcatgtcaatacat

SEQ ID NO: 687806 - DNA, 15 bp, Homo sapiens
tcatgtcaatacatc

SEQ ID NO: 687807 - DNA, 15 bp, Homo sapiens
catgtcaatacatcc

SEQ ID NO: 687808 - DNA, 15 bp, Homo sapiens
atgtcaatacatcca

SEQ ID NO: 687809 - DNA, 15 bp, Homo sapiens
tgtcaatacatccag

SEQ ID NO: 687810 - DNA, 15 bp, Homo sapiens
gtcaatacatccaga

SEQ ID NO: 687811 - DNA, 15 bp, Homo sapiens
tcaatacatccagat

SEQ ID NO: 687812 - DNA, 15 bp, Homo sapiens
caatacatccagatc

SEQ ID NO: 687813 - DNA, 15 bp, Homo sapiens
aatacatccagatct

SEQ ID NO: 687814 - DNA, 15 bp, Homo sapiens
atacatccagatcta

SEQ ID NO: 687815 - DNA, 15 bp, Homo sapiens
tacatccagatctat

SEQ ID NO: 687816 - DNA, 15 bp, Homo sapiens
acatccagatctatg

SEQ ID NO: 687817 - DNA, 15 bp, Homo sapiens
catccagatctatgg

SEQ ID NO: 687818 - DNA, 15 bp, Homo sapiens
atccagatctatggt

SEQ ID NO: 687819 - DNA, 15 bp, Homo sapiens
tccagatctatggtt

SEQ ID NO: 687820 - DNA, 15 bp, Homo sapiens
ccagatctatggttc

SEQ ID NO: 687821 - DNA, 15 bp, Homo sapiens
cagatctatggttcc

SEQ ID NO: 687822 - DNA, 15 bp, Homo sapiens
agatctatggttcct

SEQ ID NO: 687823 - DNA, 15 bp, Homo sapiens
gatctatggttcctc

SEQ ID NO: 687824 - DNA, 15 bp, Homo sapiens
atctatggttcctcc

SEQ ID NO: 687825 - DNA, 15 bp, Homo sapiens
tctatggttcctccc

SEQ ID NO: 687826 - DNA, 15 bp, Homo sapiens
ctatggttcctcccg

SEQ ID NO: 687827 - DNA, 15 bp, Homo sapiens
tatggttcctcccgc

SEQ ID NO: 687828 - DNA, 15 bp, Homo sapiens
atggttcctcccgct

SEQ ID NO: 687829 - DNA, 15 bp, Homo sapiens
tggttcctcccgctg

SEQ ID NO: 687830 - DNA, 15 bp, Homo sapiens
ggttcctcccgctgc

SEQ ID NO: 687831 - DNA, 15 bp, Homo sapiens
gttcctcccgctgct

SEQ ID NO: 687832 - DNA, 15 bp, Homo sapiens
ttcctcccgctgctt

SEQ ID NO: 687833 - DNA, 15 bp, Homo sapiens
tcctcccgctgcttc

SEQ ID NO: 687834 - DNA, 15 bp, Homo sapiens
cctcccgctgcttct

SEQ ID NO: 687835 - DNA, 15 bp, Homo sapiens
ctcccgctgcttctc

SEQ ID NO: 687836 - DNA, 15 bp, Homo sapiens
tcccgctgcttctcc

SEQ ID NO: 687837 - DNA, 15 bp, Homo sapiens
cccgctgcttctcct

SEQ ID NO: 687838 - DNA, 15 bp, Homo sapiens
ccgctgcttctcctt

SEQ ID NO: 687839 - DNA, 15 bp, Homo sapiens
cgctgcttctccttc

SEQ ID NO: 687840 - DNA, 15 bp, Homo sapiens
gctgcttctccttct

SEQ ID NO: 687841 - DNA, 15 bp, Homo sapiens
ctgcttctccttctg

SEQ ID NO: 687842 - DNA, 15 bp, Homo sapiens
tgcttctccttctgt

SEQ ID NO: 687843 - DNA, 15 bp, Homo sapiens
gcttctccttctgtc

SEQ ID NO: 687844 - DNA, 15 bp, Homo sapiens
cttctccttctgtct

SEQ ID NO: 687845 - DNA, 15 bp, Homo sapiens
ttctccttctgtctg

SEQ ID NO: 687846 - DNA, 15 bp, Homo sapiens
tctccttctgtctgt

SEQ ID NO: 687847 - DNA, 15 bp, Homo sapiens
ctccttctgtctgtg

SEQ ID NO: 687848 - DNA, 15 bp, Homo sapiens
tccttctgtctgtgc

SEQ ID NO: 687849 - DNA, 15 bp, Homo sapiens
ccttctgtctgtgcc

SEQ ID NO: 687850 - DNA, 15 bp, Homo sapiens
cttctgtctgtgcct

SEQ ID NO: 687851 - DNA, 15 bp, Homo sapiens
ttctgtctgtgcctt

SEQ ID NO: 687852 - DNA, 15 bp, Homo sapiens
tctgtctgtgccttt

SEQ ID NO: 687853 - DNA, 15 bp, Homo sapiens
ctgtctgtgcctttc

SEQ ID NO: 687854 - DNA, 15 bp, Homo sapiens
tgtctgtgcctttca

SEQ ID NO: 687855 - DNA, 15 bp, Homo sapiens
gtctgtgcctttcac

SEQ ID NO: 687856 - DNA, 15 bp, Homo sapiens
tctgtgcctttcact

SEQ ID NO: 687857 - DNA, 15 bp, Homo sapiens
ctgtgcctttcactg

SEQ ID NO: 687858 - DNA, 15 bp, Homo sapiens
tgtgcctttcactga

SEQ ID NO: 687859 - DNA, 15 bp, Homo sapiens
gtgcctttcactgat

SEQ ID NO: 687860 - DNA, 15 bp, Homo sapiens
tgcctttcactgatc

SEQ ID NO: 687861 - DNA, 15 bp, Homo sapiens
gcctttcactgatcc

SEQ ID NO: 687862 - DNA, 15 bp, Homo sapiens
cctttcactgatcca

SEQ ID NO: 687863 - DNA, 15 bp, Homo sapiens
ctttcactgatccat

SEQ ID NO: 687864 - DNA, 15 bp, Homo sapiens
tttcactgatccatt

SEQ ID NO: 687865 - DNA, 15 bp, Homo sapiens
ttcactgatccattt

SEQ ID NO: 687866 - DNA, 15 bp, Homo sapiens
tcactgatccatttc

SEQ ID NO: 687867 - DNA, 15 bp, Homo sapiens
cactgatccatttct

SEQ ID NO: 687868 - DNA, 15 bp, Homo sapiens
actgatccatttctc

SEQ ID NO: 687869 - DNA, 15 bp, Homo sapiens
ctgatccatttctct

SEQ ID NO: 687870 - DNA, 15 bp, Homo sapiens
tgatccatttctctc

SEQ ID NO: 687871 - DNA, 15 bp, Homo sapiens
gatccatttctctct

SEQ ID NO: 687872 - DNA, 15 bp, Homo sapiens
atccatttctctctc

SEQ ID NO: 687873 - DNA, 15 bp, Homo sapiens
tccatttctctctct

SEQ ID NO: 687874 - DNA, 15 bp, Homo sapiens
ccatttctctctctc

SEQ ID NO: 687875 - DNA, 15 bp, Homo sapiens
catttctctctctcc

SEQ ID NO: 687876 - DNA, 15 bp, Homo sapiens
atttctctctctccg

SEQ ID NO: 687877 - DNA, 15 bp, Homo sapiens
tttctctctctccgc

SEQ ID NO: 687878 - DNA, 15 bp, Homo sapiens
ttctctctctccgcc

SEQ ID NO: 687879 - DNA, 15 bp, Homo sapiens
tctctctctccgcca

SEQ ID NO: 687880 - DNA, 15 bp, Homo sapiens
ctctctctccgccac

SEQ ID NO: 687881 - DNA, 15 bp, Homo sapiens
tctctctccgccacc

SEQ ID NO: 687882 - DNA, 15 bp, Homo sapiens
ctctctccgccacct

SEQ ID NO: 687883 - DNA, 15 bp, Homo sapiens
tctctccgccacctg

SEQ ID NO: 687884 - DNA, 15 bp, Homo sapiens
ctctccgccacctgc

SEQ ID NO: 687885 - DNA, 15 bp, Homo sapiens
tctccgccacctgca

SEQ ID NO: 687886 - DNA, 15 bp, Homo sapiens
ctccgccacctgcac

SEQ ID NO: 687887 - DNA, 15 bp, Homo sapiens
tccgccacctgcaca

SEQ ID NO: 687888 - DNA, 15 bp, Homo sapiens
ccgccacctgcacaa

SEQ ID NO: 687889 - DNA, 15 bp, Homo sapiens
cgccacctgcacaaa

SEQ ID NO: 687890 - DNA, 15 bp, Homo sapiens
gccacctgcacaaag

SEQ ID NO: 687891 - DNA, 15 bp, Homo sapiens
ccacctgcacaaagt

SEQ ID NO: 687892 - DNA, 15 bp, Homo sapiens
cacctgcacaaagtc

SEQ ID NO: 687893 - DNA, 15 bp, Homo sapiens
acctgcacaaagtct

SEQ ID NO: 687894 - DNA, 15 bp, Homo sapiens
cctgcacaaagtctg

SEQ ID NO: 687895 - DNA, 15 bp, Homo sapiens
ctgcacaaagtctgt

SEQ ID NO: 687896 - DNA, 15 bp, Homo sapiens
tgcacaaagtctgtt

SEQ ID NO: 687897 - DNA, 15 bp, Homo sapiens
gcacaaagtctgttg

SEQ ID NO: 687898 - DNA, 15 bp, Homo sapiens
cacaaagtctgttgg

SEQ ID NO: 687899 - DNA, 15 bp, Homo sapiens
acaaagtctgttggt

SEQ ID NO: 687900 - DNA, 15 bp, Homo sapiens
caaagtctgttggtt

SEQ ID NO: 687901 - DNA, 15 bp, Homo sapiens
aaagtctgttggttg

SEQ ID NO: 687902 - DNA, 15 bp, Homo sapiens
aagtctgttggttgt

SEQ ID NO: 687903 - DNA, 15 bp, Homo sapiens
agtctgttggttgtt

SEQ ID NO: 687904 - DNA, 15 bp, Homo sapiens
gtctgttggttgttc

SEQ ID NO: 687905 - DNA, 15 bp, Homo sapiens
tctgttggttgttcc

SEQ ID NO: 687906 - DNA, 15 bp, Homo sapiens
ctgttggttgttccc

SEQ ID NO: 687907 - DNA, 15 bp, Homo sapiens
tgttggttgttccca

SEQ ID NO: 687908 - DNA, 15 bp, Homo sapiens
gttggttgttcccaa

SEQ ID NO: 687909 - DNA, 15 bp, Homo sapiens
ttggttgttcccaag

SEQ ID NO: 687910 - DNA, 15 bp, Homo sapiens
tggttgttcccaagg

SEQ ID NO: 687911 - DNA, 15 bp, Homo sapiens
ggttgttcccaaggc

SEQ ID NO: 687912 - DNA, 15 bp, Homo sapiens
gttgttcccaaggct

SEQ ID NO: 687913 - DNA, 15 bp, Homo sapiens
ttgttcccaaggcta

SEQ ID NO: 687914 - DNA, 15 bp, Homo sapiens
tgttcccaaggctag

SEQ ID NO: 687915 - DNA, 15 bp, Homo sapiens
gttcccaaggctaga

SEQ ID NO: 687916 - DNA, 15 bp, Homo sapiens
ttcccaaggctagag

SEQ ID NO: 687917 - DNA, 15 bp, Homo sapiens
tcccaaggctagagg

SEQ ID NO: 687918 - DNA, 15 bp, Homo sapiens
cccaaggctagaggc

SEQ ID NO: 687919 - DNA, 15 bp, Homo sapiens
ccaaggctagaggcg

SEQ ID NO: 687920 - DNA, 15 bp, Homo sapiens
caaggctagaggcgc

SEQ ID NO: 687921 - DNA, 15 bp, Homo sapiens
aaggctagaggcgca

SEQ ID NO: 687922 - DNA, 15 bp, Homo sapiens
aggctagaggcgcac

SEQ ID NO: 687923 - DNA, 15 bp, Homo sapiens
ggctagaggcgcact

SEQ ID NO: 687924 - DNA, 15 bp, Homo sapiens
gctagaggcgcactc

SEQ ID NO: 687925 - DNA, 15 bp, Homo sapiens
ctagaggcgcactct

SEQ ID NO: 687926 - DNA, 15 bp, Homo sapiens
tagaggcgcactctc

SEQ ID NO: 687927 - DNA, 15 bp, Homo sapiens
agaggcgcactctct

SEQ ID NO: 687928 - DNA, 15 bp, Homo sapiens
gaggcgcactctctt

SEQ ID NO: 687929 - DNA, 15 bp, Homo sapiens
aggcgcactctcttt

SEQ ID NO: 687930 - DNA, 15 bp, Homo sapiens
ggcgcactctctttg

SEQ ID NO: 687931 - DNA, 15 bp, Homo sapiens
gcgcactctctttga

SEQ ID NO: 687932 - DNA, 15 bp, Homo sapiens
cgcactctctttgaa

SEQ ID NO: 687933 - DNA, 15 bp, Homo sapiens
gcactctctttgaag

SEQ ID NO: 687934 - DNA, 15 bp, Homo sapiens
cactctctttgaagg

SEQ ID NO: 687935 - DNA, 15 bp, Homo sapiens
actctctttgaaggc

SEQ ID NO: 687936 - DNA, 15 bp, Homo sapiens
ctctctttgaaggcc

SEQ ID NO: 687937 - DNA, 15 bp, Homo sapiens
tctctttgaaggccc

SEQ ID NO: 687938 - DNA, 15 bp, Homo sapiens
ctctttgaaggcccc

SEQ ID NO: 687939 - DNA, 15 bp, Homo sapiens
tctttgaaggcccct

SEQ ID NO: 687940 - DNA, 15 bp, Homo sapiens
ctttgaaggcccctt

SEQ ID NO: 687941 - DNA, 15 bp, Homo sapiens
tttgaaggccccttt

SEQ ID NO: 687942 - DNA, 15 bp, Homo sapiens
ttgaaggcccctttt

SEQ ID NO: 687943 - DNA, 15 bp, Homo sapiens
tgaaggccccttttg

SEQ ID NO: 687944 - DNA, 15 bp, Homo sapiens
gaaggccccttttgt

SEQ ID NO: 687945 - DNA, 15 bp, Homo sapiens
aaggccccttttgtt

SEQ ID NO: 687946 - DNA, 15 bp, Homo sapiens
aggccccttttgttt

SEQ ID NO: 687947 - DNA, 15 bp, Homo sapiens
ggccccttttgtttt

SEQ ID NO: 687948 - DNA, 15 bp, Homo sapiens
gccccttttgttttc

SEQ ID NO: 687949 - DNA, 15 bp, Homo sapiens
ccccttttgttttct

SEQ ID NO: 687950 - DNA, 15 bp, Homo sapiens
cccttttgttttctc

SEQ ID NO: 687951 - DNA, 15 bp, Homo sapiens
ccttttgttttctct

SEQ ID NO: 687952 - DNA, 15 bp, Homo sapiens
cttttgttttctctc

SEQ ID NO: 687953 - DNA, 15 bp, Homo sapiens
ttttgttttctctct

SEQ ID NO: 687954 - DNA, 15 bp, Homo sapiens
tttgttttctctctc

SEQ ID NO: 687955 - DNA, 15 bp, Homo sapiens
ttgttttctctctca

SEQ ID NO: 687956 - DNA, 15 bp, Homo sapiens
tgttttctctctcag

SEQ ID NO: 687957 - DNA, 15 bp, Homo sapiens
gttttctctctcagc

SEQ ID NO: 687958 - DNA, 15 bp, Homo sapiens
ttttctctctcagcc

SEQ ID NO: 687959 - DNA, 15 bp, Homo sapiens
tttctctctcagcct

SEQ ID NO: 687960 - DNA, 15 bp, Homo sapiens
ttctctctcagccta

SEQ ID NO: 687961 - DNA, 15 bp, Homo sapiens
tctctctcagcctat

SEQ ID NO: 687962 - DNA, 15 bp, Homo sapiens
ctctctcagcctatc

SEQ ID NO: 687963 - DNA, 15 bp, Homo sapiens
tctctcagcctatca

SEQ ID NO: 687964 - DNA, 15 bp, Homo sapiens
ctctcagcctatcac

SEQ ID NO: 687965 - DNA, 15 bp, Homo sapiens
tctcagcctatcaca

SEQ ID NO: 687966 - DNA, 15 bp, Homo sapiens
ctcagcctatcacac

SEQ ID NO: 687967 - DNA, 15 bp, Homo sapiens
tcagcctatcacaca

SEQ ID NO: 687968 - DNA, 15 bp, Homo sapiens
cagcctatcacacac

SEQ ID NO: 687969 - DNA, 15 bp, Homo sapiens
agcctatcacacact

SEQ ID NO: 687970 - DNA, 15 bp, Homo sapiens
gcctatcacacacta

SEQ ID NO: 687971 - DNA, 15 bp, Homo sapiens
cctatcacacactac

SEQ ID NO: 687972 - DNA, 15 bp, Homo sapiens
ctatcacacactact

SEQ ID NO: 687973 - DNA, 15 bp, Homo sapiens
tatcacacactactt

SEQ ID NO: 687974 - DNA, 15 bp, Homo sapiens
atcacacactacttc

SEQ ID NO: 687975 - DNA, 15 bp, Homo sapiens
tcacacactacttcc

SEQ ID NO: 687976 - DNA, 15 bp, Homo sapiens
cacacactacttcct

SEQ ID NO: 687977 - DNA, 15 bp, Homo sapiens
acacactacttcctg

SEQ ID NO: 687978 - DNA, 15 bp, Homo sapiens
cacactacttcctgt

SEQ ID NO: 687979 - DNA, 15 bp, Homo sapiens
acactacttcctgtc

SEQ ID NO: 687980 - DNA, 15 bp, Homo sapiens
cactacttcctgtca

SEQ ID NO: 687981 - DNA, 15 bp, Homo sapiens
actacttcctgtcac

SEQ ID NO: 687982 - DNA, 15 bp, Homo sapiens
ctacttcctgtcacg

SEQ ID NO: 687983 - DNA, 15 bp, Homo sapiens
tacttcctgtcacgg

SEQ ID NO: 687984 - DNA, 15 bp, Homo sapiens
acttcctgtcacggt

SEQ ID NO: 687985 - DNA, 15 bp, Homo sapiens
cttcctgtcacggtc

SEQ ID NO: 687986 - DNA, 15 bp, Homo sapiens
ttcctgtcacggtct

SEQ ID NO: 687987 - DNA, 15 bp, Homo sapiens
tcctgtcacggtctt

SEQ ID NO: 687988 - DNA, 15 bp, Homo sapiens
cctgtcacggtcttc

SEQ ID NO: 687989 - DNA, 15 bp, Homo sapiens
ctgtcacggtcttcc

SEQ ID NO: 687990 - DNA, 15 bp, Homo sapiens
tgtcacggtcttcct

SEQ ID NO: 687991 - DNA, 15 bp, Homo sapiens
gtcacggtcttcctt

SEQ ID NO: 687992 - DNA, 15 bp, Homo sapiens
tcacggtcttccttt

SEQ ID NO: 687993 - DNA, 15 bp, Homo sapiens
cacggtcttcctttg

SEQ ID NO: 687994 - DNA, 15 bp, Homo sapiens
acggtcttcctttgc

SEQ ID NO: 687995 - DNA, 15 bp, Homo sapiens
cggtcttcctttgct

SEQ ID NO: 687996 - DNA, 15 bp, Homo sapiens
ggtcttcctttgctg

SEQ ID NO: 687997 - DNA, 15 bp, Homo sapiens
gtcttcctttgctgt

SEQ ID NO: 687998 - DNA, 15 bp, Homo sapiens
tcttcctttgctgta

SEQ ID NO: 687999 - DNA, 15 bp, Homo sapiens
cttcctttgctgtaa

SEQ ID NO: 688000 - DNA, 15 bp, Homo sapiens
ttcctttgctgtaat

SEQ ID NO: 688001 - DNA, 15 bp, Homo sapiens
tcctttgctgtaata

SEQ ID NO: 688002 - DNA, 15 bp, Homo sapiens
cctttgctgtaatag

SEQ ID NO: 688003 - DNA, 15 bp, Homo sapiens
ctttgctgtaataga

SEQ ID NO: 688004 - DNA, 15 bp, Homo sapiens
tttgctgtaatagat

SEQ ID NO: 688005 - DNA, 15 bp, Homo sapiens
ttgctgtaatagatt

SEQ ID NO: 688006 - DNA, 15 bp, Homo sapiens
tgctgtaatagatta

SEQ ID NO: 688007 - DNA, 15 bp, Homo sapiens
gctgtaatagattat

SEQ ID NO: 688008 - DNA, 15 bp, Homo sapiens
ctgtaatagattatc

SEQ ID NO: 688009 - DNA, 15 bp, Homo sapiens
tgtaatagattatcc

SEQ ID NO: 688010 - DNA, 15 bp, Homo sapiens
gtaatagattatcca

SEQ ID NO: 688011 - DNA, 15 bp, Homo sapiens
taatagattatccac

SEQ ID NO: 688012 - DNA, 15 bp, Homo sapiens
aatagattatccacc

SEQ ID NO: 688013 - DNA, 15 bp, Homo sapiens
atagattatccaccc

SEQ ID NO: 688014 - DNA, 15 bp, Homo sapiens
tagattatccacccc

SEQ ID NO: 688015 - DNA, 15 bp, Homo sapiens
agattatccacccct

SEQ ID NO: 688016 - DNA, 15 bp, Homo sapiens
gattatccacccctt

SEQ ID NO: 688017 - DNA, 15 bp, Homo sapiens
attatccaccccttg

SEQ ID NO: 688018 - DNA, 15 bp, Homo sapiens
ttatccaccccttga

SEQ ID NO: 688019 - DNA, 15 bp, Homo sapiens
tatccaccccttgaa

SEQ ID NO: 688020 - DNA, 15 bp, Homo sapiens
atccaccccttgaag

SEQ ID NO: 688021 - DNA, 15 bp, Homo sapiens
tccaccccttgaagg

SEQ ID NO: 688022 - DNA, 15 bp, Homo sapiens
ccaccccttgaaggc

SEQ ID NO: 688023 - DNA, 15 bp, Homo sapiens
caccccttgaaggca

SEQ ID NO: 688024 - DNA, 15 bp, Homo sapiens
accccttgaaggcag

SEQ ID NO: 688025 - DNA, 15 bp, Homo sapiens
ccccttgaaggcagc

SEQ ID NO: 688026 - DNA, 15 bp, Homo sapiens
cccttgaaggcagca

SEQ ID NO: 688027 - DNA, 15 bp, Homo sapiens
ccttgaaggcagcag

SEQ ID NO: 688028 - DNA, 15 bp, Homo sapiens
cttgaaggcagcagc

SEQ ID NO: 688029 - DNA, 15 bp, Homo sapiens
ttgaaggcagcagct

SEQ ID NO: 688030 - DNA, 15 bp, Homo sapiens
tgaaggcagcagctg

SEQ ID NO: 688031 - DNA, 15 bp, Homo sapiens
gaaggcagcagctgt

SEQ ID NO: 688032 - DNA, 15 bp, Homo sapiens
aaggcagcagctgtg

SEQ ID NO: 688033 - DNA, 15 bp, Homo sapiens
aggcagcagctgtgt

SEQ ID NO: 688034 - DNA, 15 bp, Homo sapiens
ggcagcagctgtgtc

SEQ ID NO: 688035 - DNA, 15 bp, Homo sapiens
gcagcagctgtgtct

SEQ ID NO: 688036 - DNA, 15 bp, Homo sapiens
cagcagctgtgtctc

SEQ ID NO: 688037 - DNA, 15 bp, Homo sapiens
agcagctgtgtctca

SEQ ID NO: 688038 - DNA, 15 bp, Homo sapiens
gcagctgtgtctcat

SEQ ID NO: 688039 - DNA, 15 bp, Homo sapiens
cagctgtgtctcatt

SEQ ID NO: 688040 - DNA, 15 bp, Homo sapiens
agctgtgtctcattc

SEQ ID NO: 688041 - DNA, 15 bp, Homo sapiens
gctgtgtctcattca

SEQ ID NO: 688042 - DNA, 15 bp, Homo sapiens
ctgtgtctcattcat

SEQ ID NO: 688043 - DNA, 15 bp, Homo sapiens
tgtgtctcattcatc

SEQ ID NO: 688044 - DNA, 15 bp, Homo sapiens
gtgtctcattcatca

SEQ ID NO: 688045 - DNA, 15 bp, Homo sapiens
tgtctcattcatcat

SEQ ID NO: 688046 - DNA, 15 bp, Homo sapiens
gtctcattcatcatt

SEQ ID NO: 688047 - DNA, 15 bp, Homo sapiens
tctcattcatcattt

SEQ ID NO: 688048 - DNA, 15 bp, Homo sapiens
ctcattcatcatttt

SEQ ID NO: 688049 - DNA, 15 bp, Homo sapiens
tcattcatcatttta

SEQ ID NO: 688050 - DNA, 15 bp, Homo sapiens
cattcatcattttag

SEQ ID NO: 688051 - DNA, 15 bp, Homo sapiens
attcatcattttaga

SEQ ID NO: 688052 - DNA, 15 bp, Homo sapiens
ttcatcattttagac

SEQ ID NO: 688053 - DNA, 15 bp, Homo sapiens
tcatcattttagacc

SEQ ID NO: 688054 - DNA, 15 bp, Homo sapiens
catcattttagaccc

SEQ ID NO: 688055 - DNA, 15 bp, Homo sapiens
atcattttagaccct

SEQ ID NO: 688056 - DNA, 15 bp, Homo sapiens
tcattttagaccctc

SEQ ID NO: 688057 - DNA, 15 bp, Homo sapiens
cattttagaccctct

SEQ ID NO: 688058 - DNA, 15 bp, Homo sapiens
attttagaccctctc

SEQ ID NO: 688059 - DNA, 15 bp, Homo sapiens
ttttagaccctctca

SEQ ID NO: 688060 - DNA, 15 bp, Homo sapiens
tttagaccctctcag

SEQ ID NO: 688061 - DNA, 15 bp, Homo sapiens
ttagaccctctcagc

SEQ ID NO: 688062 - DNA, 15 bp, Homo sapiens
tagaccctctcagca

SEQ ID NO: 688063 - DNA, 15 bp, Homo sapiens
agaccctctcagcag

SEQ ID NO: 688064 - DNA, 15 bp, Homo sapiens
gaccctctcagcagc

SEQ ID NO: 688065 - DNA, 15 bp, Homo sapiens
accctctcagcagcc

SEQ ID NO: 688066 - DNA, 15 bp, Homo sapiens
ccctctcagcagcca

SEQ ID NO: 688067 - DNA, 15 bp, Homo sapiens
cctctcagcagccag

SEQ ID NO: 688068 - DNA, 15 bp, Homo sapiens
ctctcagcagccagc

SEQ ID NO: 688069 - DNA, 15 bp, Homo sapiens
tctcagcagccagcc

SEQ ID NO: 688070 - DNA, 15 bp, Homo sapiens
ctcagcagccagccc

SEQ ID NO: 688071 - DNA, 15 bp, Homo sapiens
tcagcagccagccca

SEQ ID NO: 688072 - DNA, 15 bp, Homo sapiens
cagcagccagcccaa

SEQ ID NO: 688073 - DNA, 15 bp, Homo sapiens
agcagccagcccaat

SEQ ID NO: 688074 - DNA, 15 bp, Homo sapiens
gcagccagcccaatt

SEQ ID NO: 688075 - DNA, 15 bp, Homo sapiens
cagccagcccaatta

SEQ ID NO: 688076 - DNA, 15 bp, Homo sapiens
agccagcccaattag

SEQ ID NO: 688077 - DNA, 15 bp, Homo sapiens
gccagcccaattagg

SEQ ID NO: 688078 - DNA, 15 bp, Homo sapiens
ccagcccaattaggc

SEQ ID NO: 688079 - DNA, 15 bp, Homo sapiens
cagcccaattaggcc

SEQ ID NO: 688080 - DNA, 15 bp, Homo sapiens
agcccaattaggcct

SEQ ID NO: 688081 - DNA, 15 bp, Homo sapiens
gcccaattaggcctt

SEQ ID NO: 688082 - DNA, 15 bp, Homo sapiens
cccaattaggccttg

SEQ ID NO: 688083 - DNA, 15 bp, Homo sapiens
ccaattaggccttgg

SEQ ID NO: 688084 - DNA, 15 bp, Homo sapiens
caattaggccttgga

SEQ ID NO: 688085 - DNA, 15 bp, Homo sapiens
aattaggccttggac

SEQ ID NO: 688086 - DNA, 15 bp, Homo sapiens
attaggccttggacc

SEQ ID NO: 688087 - DNA, 15 bp, Homo sapiens
ttaggccttggacca

SEQ ID NO: 688088 - DNA, 15 bp, Homo sapiens
taggccttggaccaa

SEQ ID NO: 688089 - DNA, 15 bp, Homo sapiens
aggccttggaccaat

SEQ ID NO: 688090 - DNA, 15 bp, Homo sapiens
ggccttggaccaatt

SEQ ID NO: 688091 - DNA, 15 bp, Homo sapiens
gccttggaccaatta

SEQ ID NO: 688092 - DNA, 15 bp, Homo sapiens
ccttggaccaattag

SEQ ID NO: 688093 - DNA, 15 bp, Homo sapiens
cttggaccaattagg

SEQ ID NO: 688094 - DNA, 15 bp, Homo sapiens
ttggaccaattaggc

SEQ ID NO: 688095 - DNA, 15 bp, Homo sapiens
tggaccaattaggcc

SEQ ID NO: 688096 - DNA, 15 bp, Homo sapiens
ggaccaattaggcct

SEQ ID NO: 688097 - DNA, 15 bp, Homo sapiens
gaccaattaggcctg

SEQ ID NO: 688098 - DNA, 15 bp, Homo sapiens
accaattaggcctgc

SEQ ID NO: 688099 - DNA, 15 bp, Homo sapiens
ccaattaggcctgca

SEQ ID NO: 688100 - DNA, 15 bp, Homo sapiens
caattaggcctgcaa

SEQ ID NO: 688101 - DNA, 15 bp, Homo sapiens
aattaggcctgcaaa

SEQ ID NO: 688102 - DNA, 15 bp, Homo sapiens
attaggcctgcaaac

SEQ ID NO: 688103 - DNA, 15 bp, Homo sapiens
ttaggcctgcaaaca

SEQ ID NO: 688104 - DNA, 15 bp, Homo sapiens
taggcctgcaaacat

SEQ ID NO: 688105 - DNA, 15 bp, Homo sapiens
aggcctgcaaacatt

SEQ ID NO: 688106 - DNA, 15 bp, Homo sapiens
ggcctgcaaacatta

SEQ ID NO: 688107 - DNA, 15 bp, Homo sapiens
gcctgcaaacattat

SEQ ID NO: 688108 - DNA, 15 bp, Homo sapiens
cctgcaaacattatt

SEQ ID NO: 688109 - DNA, 15 bp, Homo sapiens
ctgcaaacattattt

SEQ ID NO: 688110 - DNA, 15 bp, Homo sapiens
tgcaaacattatttg

SEQ ID NO: 688111 - DNA, 15 bp, Homo sapiens
gcaaacattatttgt

SEQ ID NO: 688112 - DNA, 15 bp, Homo sapiens
caaacattatttgtt

SEQ ID NO: 688113 - DNA, 15 bp, Homo sapiens
aaacattatttgttg

SEQ ID NO: 688114 - DNA, 15 bp, Homo sapiens
aacattatttgttga

SEQ ID NO: 688115 - DNA, 15 bp, Homo sapiens
acattatttgttgag

SEQ ID NO: 688116 - DNA, 15 bp, Homo sapiens
cattatttgttgagt

SEQ ID NO: 688117 - DNA, 15 bp, Homo sapiens
attatttgttgagtg

SEQ ID NO: 688118 - DNA, 15 bp, Homo sapiens
ttatttgttgagtga

SEQ ID NO: 688119 - DNA, 15 bp, Homo sapiens
tatttgttgagtgaa

SEQ ID NO: 688120 - DNA, 15 bp, Homo sapiens
atttgttgagtgaat

SEQ ID NO: 688121 - DNA, 15 bp, Homo sapiens
tttgttgagtgaata

SEQ ID NO: 688122 - DNA, 15 bp, Homo sapiens
ttgttgagtgaataa

SEQ ID NO: 688123 - DNA, 15 bp, Homo sapiens
tgttgagtgaataag

SEQ ID NO: 688124 - DNA, 15 bp, Homo sapiens
gttgagtgaataagt

SEQ ID NO: 688125 - DNA, 15 bp, Homo sapiens
ttgagtgaataagta

SEQ ID NO: 688126 - DNA, 15 bp, Homo sapiens
tgagtgaataagtaa

SEQ ID NO: 688127 - DNA, 15 bp, Homo sapiens
gagtgaataagtaaa

SEQ ID NO: 688128 - DNA, 15 bp, Homo sapiens
agtgaataagtaaat

SEQ ID NO: 688129 - DNA, 15 bp, Homo sapiens
gtgaataagtaaatg

SEQ ID NO: 688130 - DNA, 15 bp, Homo sapiens
tgaataagtaaatga

SEQ ID NO: 688131 - DNA, 15 bp, Homo sapiens
gaataagtaaatgac

SEQ ID NO: 688132 - DNA, 15 bp, Homo sapiens
aataagtaaatgact

SEQ ID NO: 688133 - DNA, 15 bp, Homo sapiens
ataagtaaatgactc

SEQ ID NO: 688134 - DNA, 15 bp, Homo sapiens
taagtaaatgactct

SEQ ID NO: 688135 - DNA, 15 bp, Homo sapiens
aagtaaatgactctg

SEQ ID NO: 688136 - DNA, 15 bp, Homo sapiens
agtaaatgactctgt

SEQ ID NO: 688137 - DNA, 15 bp, Homo sapiens
gtaaatgactctgtc

SEQ ID NO: 688138 - DNA, 15 bp, Homo sapiens
taaatgactctgtct

SEQ ID NO: 688139 - DNA, 15 bp, Homo sapiens
aaatgactctgtctt

SEQ ID NO: 688140 - DNA, 15 bp, Homo sapiens
aatgactctgtcttt

SEQ ID NO: 688141 - DNA, 15 bp, Homo sapiens
atgactctgtctttg

SEQ ID NO: 688142 - DNA, 15 bp, Homo sapiens
tgactctgtctttga

SEQ ID NO: 688143 - DNA, 15 bp, Homo sapiens
gactctgtctttgaa

SEQ ID NO: 688144 - DNA, 15 bp, Homo sapiens
actctgtctttgaac

SEQ ID NO: 688145 - DNA, 15 bp, Homo sapiens
ctctgtctttgaact

SEQ ID NO: 688146 - DNA, 15 bp, Homo sapiens
tctgtctttgaactg

SEQ ID NO: 688147 - DNA, 15 bp, Homo sapiens
ctgtctttgaactgt

SEQ ID NO: 688148 - DNA, 15 bp, Homo sapiens
tgtctttgaactgta

SEQ ID NO: 688149 - DNA, 15 bp, Homo sapiens
gtctttgaactgtat

SEQ ID NO: 688150 - DNA, 15 bp, Homo sapiens
tctttgaactgtata

SEQ ID NO: 688151 - DNA, 15 bp, Homo sapiens
ctttgaactgtatac

SEQ ID NO: 688152 - DNA, 15 bp, Homo sapiens
tttgaactgtataca

SEQ ID NO: 688153 - DNA, 15 bp, Homo sapiens
ttgaactgtatacac

SEQ ID NO: 688154 - DNA, 15 bp, Homo sapiens
tgaactgtatacaca

SEQ ID NO: 688155 - DNA, 15 bp, Homo sapiens
gaactgtatacacac

SEQ ID NO: 688156 - DNA, 15 bp, Homo sapiens
aactgtatacacact

SEQ ID NO: 688157 - DNA, 15 bp, Homo sapiens
actgtatacacactg

SEQ ID NO: 688158 - DNA, 15 bp, Homo sapiens
ctgtatacacactgc

SEQ ID NO: 688159 - DNA, 15 bp, Homo sapiens
tgtatacacactgca

SEQ ID NO: 688160 - DNA, 15 bp, Homo sapiens
gtatacacactgcat

SEQ ID NO: 688161 - DNA, 15 bp, Homo sapiens
tatacacactgcatc

SEQ ID NO: 688162 - DNA, 15 bp, Homo sapiens
atacacactgcatca

SEQ ID NO: 688163 - DNA, 15 bp, Homo sapiens
tacacactgcatcac

SEQ ID NO: 688164 - DNA, 15 bp, Homo sapiens
acacactgcatcact

SEQ ID NO: 688165 - DNA, 15 bp, Homo sapiens
cacactgcatcactc

SEQ ID NO: 688166 - DNA, 15 bp, Homo sapiens
acactgcatcactca

SEQ ID NO: 688167 - DNA, 15 bp, Homo sapiens
cactgcatcactcac

SEQ ID NO: 688168 - DNA, 15 bp, Homo sapiens
actgcatcactcacc

SEQ ID NO: 688169 - DNA, 15 bp, Homo sapiens
ctgcatcactcacca

SEQ ID NO: 688170 - DNA, 15 bp, Homo sapiens
tgcatcactcaccaa

SEQ ID NO: 688171 - DNA, 15 bp, Homo sapiens
gcatcactcaccaaa

SEQ ID NO: 688172 - DNA, 15 bp, Homo sapiens
catcactcaccaaat

SEQ ID NO: 688173 - DNA, 15 bp, Homo sapiens
atcactcaccaaatc

SEQ ID NO: 688174 - DNA, 15 bp, Homo sapiens
tcactcaccaaatca

SEQ ID NO: 688175 - DNA, 15 bp, Homo sapiens
cactcaccaaatcat

SEQ ID NO: 688176 - DNA, 15 bp, Homo sapiens
actcaccaaatcatg

SEQ ID NO: 688177 - DNA, 15 bp, Homo sapiens
ctcaccaaatcatgt

SEQ ID NO: 688178 - DNA, 15 bp, Homo sapiens
tcaccaaatcatgtt

SEQ ID NO: 688179 - DNA, 15 bp, Homo sapiens
caccaaatcatgttg

SEQ ID NO: 688180 - DNA, 15 bp, Homo sapiens
accaaatcatgttgg

SEQ ID NO: 688181 - DNA, 15 bp, Homo sapiens
ccaaatcatgttggt

SEQ ID NO: 688182 - DNA, 15 bp, Homo sapiens
caaatcatgttggtt

SEQ ID NO: 688183 - DNA, 15 bp, Homo sapiens
aaatcatgttggttt

SEQ ID NO: 688184 - DNA, 15 bp, Homo sapiens
aatcatgttggtttt

SEQ ID NO: 688185 - DNA, 15 bp, Homo sapiens
atcatgttggttttc

SEQ ID NO: 688186 - DNA, 15 bp, Homo sapiens
tcatgttggttttct

SEQ ID NO: 688187 - DNA, 15 bp, Homo sapiens
catgttggttttctt

SEQ ID NO: 688188 - DNA, 15 bp, Homo sapiens
atgttggttttcttt

SEQ ID NO: 688189 - DNA, 15 bp, Homo sapiens
tgttggttttctttt

SEQ ID NO: 688190 - DNA, 15 bp, Homo sapiens
gttggttttcttttc

SEQ ID NO: 688191 - DNA, 15 bp, Homo sapiens
ttggttttcttttct

SEQ ID NO: 688192 - DNA, 15 bp, Homo sapiens
tggttttcttttctg

SEQ ID NO: 688193 - DNA, 15 bp, Homo sapiens
ggttttcttttctga

SEQ ID NO: 688194 - DNA, 15 bp, Homo sapiens
gttttcttttctgat

SEQ ID NO: 688195 - DNA, 15 bp, Homo sapiens
ttttcttttctgata

SEQ ID NO: 688196 - DNA, 15 bp, Homo sapiens
tttcttttctgatat

SEQ ID NO: 688197 - DNA, 15 bp, Homo sapiens
ttcttttctgatatc

SEQ ID NO: 688198 - DNA, 15 bp, Homo sapiens
tcttttctgatatca

SEQ ID NO: 688199 - DNA, 15 bp, Homo sapiens
cttttctgatatcaa

SEQ ID NO: 688200 - DNA, 15 bp, Homo sapiens
ttttctgatatcaaa

SEQ ID NO: 688201 - DNA, 15 bp, Homo sapiens
tttctgatatcaaac

SEQ ID NO: 688202 - DNA, 15 bp, Homo sapiens
ttctgatatcaaacc

SEQ ID NO: 688203 - DNA, 15 bp, Homo sapiens
tctgatatcaaacca

SEQ ID NO: 688204 - DNA, 15 bp, Homo sapiens
ctgatatcaaaccat

SEQ ID NO: 688205 - DNA, 15 bp, Homo sapiens
tgatatcaaaccata

SEQ ID NO: 688206 - DNA, 15 bp, Homo sapiens
gatatcaaaccatag

SEQ ID NO: 688207 - DNA, 15 bp, Homo sapiens
atatcaaaccatagg

SEQ ID NO: 688208 - DNA, 15 bp, Homo sapiens
tatcaaaccataggt

SEQ ID NO: 688209 - DNA, 15 bp, Homo sapiens
atcaaaccataggtg

SEQ ID NO: 688210 - DNA, 15 bp, Homo sapiens
tcaaaccataggtgc

SEQ ID NO: 688211 - DNA, 15 bp, Homo sapiens
caaaccataggtgca

SEQ ID NO: 688212 - DNA, 15 bp, Homo sapiens
aaaccataggtgcat

SEQ ID NO: 688213 - DNA, 15 bp, Homo sapiens
aaccataggtgcatg

SEQ ID NO: 688214 - DNA, 15 bp, Homo sapiens
accataggtgcatgt

SEQ ID NO: 688215 - DNA, 15 bp, Homo sapiens
ccataggtgcatgtg

SEQ ID NO: 688216 - DNA, 15 bp, Homo sapiens
cataggtgcatgtgg

SEQ ID NO: 688217 - DNA, 15 bp, Homo sapiens
ataggtgcatgtgga

SEQ ID NO: 688218 - DNA, 15 bp, Homo sapiens
taggtgcatgtggaa

SEQ ID NO: 688219 - DNA, 15 bp, Homo sapiens
aggtgcatgtggaac

SEQ ID NO: 688220 - DNA, 15 bp, Homo sapiens
ggtgcatgtggaaca

SEQ ID NO: 688221 - DNA, 15 bp, Homo sapiens
gtgcatgtggaacat

SEQ ID NO: 688222 - DNA, 15 bp, Homo sapiens
tgcatgtggaacatt

SEQ ID NO: 688223 - DNA, 15 bp, Homo sapiens
gcatgtggaacattt

SEQ ID NO: 688224 - DNA, 15 bp, Homo sapiens
catgtggaacatttt

SEQ ID NO: 688225 - DNA, 15 bp, Homo sapiens
atgtggaacattttg

SEQ ID NO: 688226 - DNA, 15 bp, Homo sapiens
tgtggaacattttgt

SEQ ID NO: 688227 - DNA, 15 bp, Homo sapiens
gtggaacattttgtg

SEQ ID NO: 688228 - DNA, 15 bp, Homo sapiens
tggaacattttgtgt

SEQ ID NO: 688229 - DNA, 15 bp, Homo sapiens
ggaacattttgtgtt

SEQ ID NO: 688230 - DNA, 15 bp, Homo sapiens
gaacattttgtgttt

SEQ ID NO: 688231 - DNA, 15 bp, Homo sapiens
aacattttgtgtttg

SEQ ID NO: 688232 - DNA, 15 bp, Homo sapiens
acattttgtgtttga

SEQ ID NO: 688233 - DNA, 15 bp, Homo sapiens
cattttgtgtttgac

SEQ ID NO: 688234 - DNA, 15 bp, Homo sapiens
attttgtgtttgact

SEQ ID NO: 688235 - DNA, 15 bp, Homo sapiens
ttttgtgtttgactc

SEQ ID NO: 688236 - DNA, 15 bp, Homo sapiens
tttgtgtttgactct

SEQ ID NO: 688237 - DNA, 15 bp, Homo sapiens
ttgtgtttgactctg

SEQ ID NO: 688238 - DNA, 15 bp, Homo sapiens
tgtgtttgactctgt

SEQ ID NO: 688239 - DNA, 15 bp, Homo sapiens
gtgtttgactctgtg

SEQ ID NO: 688240 - DNA, 15 bp, Homo sapiens
tgtttgactctgtgt

SEQ ID NO: 688241 - DNA, 15 bp, Homo sapiens
gtttgactctgtgtg

SEQ ID NO: 688242 - DNA, 15 bp, Homo sapiens
tttgactctgtgtgg

SEQ ID NO: 688243 - DNA, 15 bp, Homo sapiens
ttgactctgtgtggt

SEQ ID NO: 688244 - DNA, 15 bp, Homo sapiens
tgactctgtgtggta

SEQ ID NO: 688245 - DNA, 15 bp, Homo sapiens
gactctgtgtggtac

SEQ ID NO: 688246 - DNA, 15 bp, Homo sapiens
actctgtgtggtaca

SEQ ID NO: 688247 - DNA, 15 bp, Homo sapiens
ctctgtgtggtacag

SEQ ID NO: 688248 - DNA, 15 bp, Homo sapiens
tctgtgtggtacagg

SEQ ID NO: 688249 - DNA, 15 bp, Homo sapiens
ctgtgtggtacaggg

SEQ ID NO: 688250 - DNA, 15 bp, Homo sapiens
tgtgtggtacaggga

SEQ ID NO: 688251 - DNA, 15 bp, Homo sapiens
gtgtggtacagggag

SEQ ID NO: 688252 - DNA, 15 bp, Homo sapiens
tgtggtacagggaga

SEQ ID NO: 688253 - DNA, 15 bp, Homo sapiens
gtggtacagggagaa

SEQ ID NO: 688254 - DNA, 15 bp, Homo sapiens
tggtacagggagaaa

SEQ ID NO: 688255 - DNA, 15 bp, Homo sapiens
ggtacagggagaaac

SEQ ID NO: 688256 - DNA, 15 bp, Homo sapiens
gtacagggagaaaca

SEQ ID NO: 688257 - DNA, 15 bp, Homo sapiens
tacagggagaaacaa

SEQ ID NO: 688258 - DNA, 15 bp, Homo sapiens
acagggagaaacaaa

SEQ ID NO: 688259 - DNA, 15 bp, Homo sapiens
cagggagaaacaaag

SEQ ID NO: 688260 - DNA, 15 bp, Homo sapiens
agggagaaacaaagg

SEQ ID NO: 688261 - DNA, 15 bp, Homo sapiens
gggagaaacaaaggt

SEQ ID NO: 688262 - DNA, 15 bp, Homo sapiens
ggagaaacaaaggtt

SEQ ID NO: 688263 - DNA, 15 bp, Homo sapiens
gagaaacaaaggttc

SEQ ID NO: 688264 - DNA, 15 bp, Homo sapiens
agaaacaaaggttca

SEQ ID NO: 688265 - DNA, 15 bp, Homo sapiens
gaaacaaaggttcac

SEQ ID NO: 688266 - DNA, 15 bp, Homo sapiens
aaacaaaggttcaca

SEQ ID NO: 688267 - DNA, 15 bp, Homo sapiens
aacaaaggttcacag

SEQ ID NO: 688268 - DNA, 15 bp, Homo sapiens
acaaaggttcacagt

SEQ ID NO: 688269 - DNA, 15 bp, Homo sapiens
caaaggttcacagtt

SEQ ID NO: 688270 - DNA, 15 bp, Homo sapiens
aaaggttcacagttc

SEQ ID NO: 688271 - DNA, 15 bp, Homo sapiens
aaggttcacagttcc

SEQ ID NO: 688272 - DNA, 15 bp, Homo sapiens
aggttcacagttcct

SEQ ID NO: 688273 - DNA, 15 bp, Homo sapiens
ggttcacagttccta

SEQ ID NO: 688274 - DNA, 15 bp, Homo sapiens
gttcacagttcctac

SEQ ID NO: 688275 - DNA, 15 bp, Homo sapiens
ttcacagttcctacc

SEQ ID NO: 688276 - DNA, 15 bp, Homo sapiens
tcacagttcctacct

SEQ ID NO: 688277 - DNA, 15 bp, Homo sapiens
cacagttcctacctc

SEQ ID NO: 688278 - DNA, 15 bp, Homo sapiens
acagttcctacctca

SEQ ID NO: 688279 - DNA, 15 bp, Homo sapiens
cagttcctacctcag

SEQ ID NO: 688280 - DNA, 15 bp, Homo sapiens
agttcctacctcaga

SEQ ID NO: 688281 - DNA, 15 bp, Homo sapiens
gttcctacctcagaa

SEQ ID NO: 688282 - DNA, 15 bp, Homo sapiens
ttcctacctcagaaa

SEQ ID NO: 688283 - DNA, 15 bp, Homo sapiens
tcctacctcagaaag

SEQ ID NO: 688284 - DNA, 15 bp, Homo sapiens
cctacctcagaaaga

SEQ ID NO: 688285 - DNA, 15 bp, Homo sapiens
ctacctcagaaagat

SEQ ID NO: 688286 - DNA, 15 bp, Homo sapiens
tacctcagaaagata

SEQ ID NO: 688287 - DNA, 15 bp, Homo sapiens
acctcagaaagatag

SEQ ID NO: 688288 - DNA, 15 bp, Homo sapiens
cctcagaaagatagc

SEQ ID NO: 688289 - DNA, 15 bp, Homo sapiens
ctcagaaagatagca

SEQ ID NO: 688290 - DNA, 15 bp, Homo sapiens
tcagaaagatagcac

SEQ ID NO: 688291 - DNA, 15 bp, Homo sapiens
cagaaagatagcacc

SEQ ID NO: 688292 - DNA, 15 bp, Homo sapiens
agaaagatagcaccc

SEQ ID NO: 688293 - DNA, 15 bp, Homo sapiens
gaaagatagcaccct

SEQ ID NO: 688294 - DNA, 15 bp, Homo sapiens
aaagatagcacccta

SEQ ID NO: 688295 - DNA, 15 bp, Homo sapiens
aagatagcaccctag

SEQ ID NO: 688296 - DNA, 15 bp, Homo sapiens
agatagcaccctagc

SEQ ID NO: 688297 - DNA, 15 bp, Homo sapiens
gatagcaccctagcc

SEQ ID NO: 688298 - DNA, 15 bp, Homo sapiens
atagcaccctagcca

SEQ ID NO: 688299 - DNA, 15 bp, Homo sapiens
tagcaccctagccac

SEQ ID NO: 688300 - DNA, 15 bp, Homo sapiens
agcaccctagccact

SEQ ID NO: 688301 - DNA, 15 bp, Homo sapiens
gcaccctagccacta

SEQ ID NO: 688302 - DNA, 15 bp, Homo sapiens
caccctagccactag

SEQ ID NO: 688303 - DNA, 15 bp, Homo sapiens
accctagccactagg

SEQ ID NO: 688304 - DNA, 15 bp, Homo sapiens
ccctagccactaggc

SEQ ID NO: 688305 - DNA, 15 bp, Homo sapiens
cctagccactaggca

SEQ ID NO: 688306 - DNA, 15 bp, Homo sapiens
ctagccactaggcag

SEQ ID NO: 688307 - DNA, 15 bp, Homo sapiens
tagccactaggcagc

SEQ ID NO: 688308 - DNA, 15 bp, Homo sapiens
agccactaggcagcc

SEQ ID NO: 688309 - DNA, 15 bp, Homo sapiens
gccactaggcagcca

SEQ ID NO: 688310 - DNA, 15 bp, Homo sapiens
ccactaggcagccac

SEQ ID NO: 688311 - DNA, 15 bp, Homo sapiens
cactaggcagccacc

SEQ ID NO: 688312 - DNA, 15 bp, Homo sapiens
actaggcagccacca

SEQ ID NO: 688313 - DNA, 15 bp, Homo sapiens
ctaggcagccaccat

SEQ ID NO: 688314 - DNA, 15 bp, Homo sapiens
taggcagccaccatc

SEQ ID NO: 688315 - DNA, 15 bp, Homo sapiens
aggcagccaccatct

SEQ ID NO: 688316 - DNA, 15 bp, Homo sapiens
ggcagccaccatctc

SEQ ID NO: 688317 - DNA, 15 bp, Homo sapiens
gcagccaccatctca

SEQ ID NO: 688318 - DNA, 15 bp, Homo sapiens
cagccaccatctcat

SEQ ID NO: 688319 - DNA, 15 bp, Homo sapiens
agccaccatctcatg

SEQ ID NO: 688320 - DNA, 15 bp, Homo sapiens
gccaccatctcatgg

SEQ ID NO: 688321 - DNA, 15 bp, Homo sapiens
ccaccatctcatggc

SEQ ID NO: 688322 - DNA, 15 bp, Homo sapiens
caccatctcatggcc

SEQ ID NO: 688323 - DNA, 15 bp, Homo sapiens
accatctcatggcca

SEQ ID NO: 688324 - DNA, 15 bp, Homo sapiens
ccatctcatggccat

SEQ ID NO: 688325 - DNA, 15 bp, Homo sapiens
catctcatggccatc

SEQ ID NO: 688326 - DNA, 15 bp, Homo sapiens
atctcatggccatca

SEQ ID NO: 688327 - DNA, 15 bp, Homo sapiens
tctcatggccatcat

SEQ ID NO: 688328 - DNA, 15 bp, Homo sapiens
ctcatggccatcatc

SEQ ID NO: 688329 - DNA, 15 bp, Homo sapiens
tcatggccatcatcc

SEQ ID NO: 688330 - DNA, 15 bp, Homo sapiens
catggccatcatcct

SEQ ID NO: 688331 - DNA, 15 bp, Homo sapiens
atggccatcatccta

SEQ ID NO: 688332 - DNA, 15 bp, Homo sapiens
tggccatcatcctac

SEQ ID NO: 688333 - DNA, 15 bp, Homo sapiens
ggccatcatcctact

SEQ ID NO: 688334 - DNA, 15 bp, Homo sapiens
gccatcatcctactc

SEQ ID NO: 688335 - DNA, 15 bp, Homo sapiens
ccatcatcctactcc

SEQ ID NO: 688336 - DNA, 15 bp, Homo sapiens
catcatcctactcca

SEQ ID NO: 688337 - DNA, 15 bp, Homo sapiens
atcatcctactccag

SEQ ID NO: 688338 - DNA, 15 bp, Homo sapiens
tcatcctactccagg

SEQ ID NO: 688339 - DNA, 15 bp, Homo sapiens
catcctactccaggc

SEQ ID NO: 688340 - DNA, 15 bp, Homo sapiens
atcctactccaggcc

SEQ ID NO: 688341 - DNA, 15 bp, Homo sapiens
tcctactccaggcct

SEQ ID NO: 688342 - DNA, 15 bp, Homo sapiens
cctactccaggcctt

SEQ ID NO: 688343 - DNA, 15 bp, Homo sapiens
ctactccaggccttt

SEQ ID NO: 688344 - DNA, 15 bp, Homo sapiens
tactccaggcctttg

SEQ ID NO: 688345 - DNA, 15 bp, Homo sapiens
actccaggcctttgt

SEQ ID NO: 688346 - DNA, 15 bp, Homo sapiens
ctccaggcctttgtc

SEQ ID NO: 688347 - DNA, 15 bp, Homo sapiens
tccaggcctttgtca

SEQ ID NO: 688348 - DNA, 15 bp, Homo sapiens
ccaggcctttgtcat

SEQ ID NO: 688349 - DNA, 15 bp, Homo sapiens
caggcctttgtcatc

SEQ ID NO: 688350 - DNA, 15 bp, Homo sapiens
aggcctttgtcatct

SEQ ID NO: 688351 - DNA, 15 bp, Homo sapiens
ggcctttgtcatctc

SEQ ID NO: 688352 - DNA, 15 bp, Homo sapiens
gcctttgtcatctca

SEQ ID NO: 688353 - DNA, 15 bp, Homo sapiens
cctttgtcatctcat

SEQ ID NO: 688354 - DNA, 15 bp, Homo sapiens
ctttgtcatctcata

SEQ ID NO: 688355 - DNA, 15 bp, Homo sapiens
tttgtcatctcatag

SEQ ID NO: 688356 - DNA, 15 bp, Homo sapiens
ttgtcatctcatagt

SEQ ID NO: 688357 - DNA, 15 bp, Homo sapiens
tgtcatctcatagtt

SEQ ID NO: 688358 - DNA, 15 bp, Homo sapiens
gtcatctcatagttg

SEQ ID NO: 688359 - DNA, 15 bp, Homo sapiens
tcatctcatagttga

SEQ ID NO: 688360 - DNA, 15 bp, Homo sapiens
catctcatagttgaa

SEQ ID NO: 688361 - DNA, 15 bp, Homo sapiens
atctcatagttgaac

SEQ ID NO: 688362 - DNA, 15 bp, Homo sapiens
tctcatagttgaact

SEQ ID NO: 688363 - DNA, 15 bp, Homo sapiens
ctcatagttgaactt

SEQ ID NO: 688364 - DNA, 15 bp, Homo sapiens
tcatagttgaacttt

SEQ ID NO: 688365 - DNA, 15 bp, Homo sapiens
catagttgaactttt

SEQ ID NO: 688366 - DNA, 15 bp, Homo sapiens
atagttgaacttttt

SEQ ID NO: 688367 - DNA, 15 bp, Homo sapiens
tagttgaactttttt

SEQ ID NO: 688368 - DNA, 15 bp, Homo sapiens
agttgaacttttttt

SEQ ID NO: 688369 - DNA, 15 bp, Homo sapiens
gttgaactttttttg

SEQ ID NO: 688370 - DNA, 15 bp, Homo sapiens
ttgaactttttttgt

SEQ ID NO: 688371 - DNA, 15 bp, Homo sapiens
tgaactttttttgta

SEQ ID NO: 688372 - DNA, 15 bp, Homo sapiens
gaactttttttgtag

SEQ ID NO: 688373 - DNA, 15 bp, Homo sapiens
aactttttttgtagt

SEQ ID NO: 688374 - DNA, 15 bp, Homo sapiens
actttttttgtagtc

SEQ ID NO: 688375 - DNA, 15 bp, Homo sapiens
ctttttttgtagtct

SEQ ID NO: 688376 - DNA, 15 bp, Homo sapiens
tttttttgtagtctg

SEQ ID NO: 688377 - DNA, 15 bp, Homo sapiens
ttttttgtagtctgg

SEQ ID NO: 688378 - DNA, 15 bp, Homo sapiens
tttttgtagtctggt

SEQ ID NO: 688379 - DNA, 15 bp, Homo sapiens
ttttgtagtctggtc

SEQ ID NO: 688380 - DNA, 15 bp, Homo sapiens
tttgtagtctggtcc

SEQ ID NO: 688381 - DNA, 15 bp, Homo sapiens
ttgtagtctggtcct

SEQ ID NO: 688382 - DNA, 15 bp, Homo sapiens
tgtagtctggtcctt

SEQ ID NO: 688383 - DNA, 15 bp, Homo sapiens
gtagtctggtccttt

SEQ ID NO: 688384 - DNA, 15 bp, Homo sapiens
tagtctggtcctttt

SEQ ID NO: 688385 - DNA, 15 bp, Homo sapiens
agtctggtccttttt

SEQ ID NO: 688386 - DNA, 15 bp, Homo sapiens
gtctggtcctttttt

SEQ ID NO: 688387 - DNA, 15 bp, Homo sapiens
tctggtccttttttt

SEQ ID NO: 688388 - DNA, 15 bp, Homo sapiens
ctggtcctttttttt

SEQ ID NO: 688389 - DNA, 15 bp, Homo sapiens
tggtccttttttttt

SEQ ID NO: 688390 - DNA, 15 bp, Homo sapiens
ggtcctttttttttt

SEQ ID NO: 688391 - DNA, 15 bp, Homo sapiens
gtccttttttttttt

SEQ ID NO: 688392 - DNA, 15 bp, Homo sapiens
ttttttttttttttc

SEQ ID NO: 688393 - DNA, 15 bp, Homo sapiens
tttttttttttttct

SEQ ID NO: 688394 - DNA, 15 bp, Homo sapiens
ttttttttttttctt

SEQ ID NO: 688395 - DNA, 15 bp, Homo sapiens
tttttttttttcttt

SEQ ID NO: 688396 - DNA, 15 bp, Homo sapiens
ttttttttttctttt

SEQ ID NO: 688397 - DNA, 15 bp, Homo sapiens
tttttttttcttttc

SEQ ID NO: 688398 - DNA, 15 bp, Homo sapiens
ttttttttcttttcc

SEQ ID NO: 688399 - DNA, 15 bp, Homo sapiens
tttttttcttttcct

SEQ ID NO: 688400 - DNA, 15 bp, Homo sapiens
ttttttcttttcctg

SEQ ID NO: 688401 - DNA, 15 bp, Homo sapiens
tttttcttttcctgt

SEQ ID NO: 688402 - DNA, 15 bp, Homo sapiens
ttttcttttcctgtt

SEQ ID NO: 688403 - DNA, 15 bp, Homo sapiens
tttcttttcctgttc

SEQ ID NO: 688404 - DNA, 15 bp, Homo sapiens
ttcttttcctgttct

SEQ ID NO: 688405 - DNA, 15 bp, Homo sapiens
tcttttcctgttctt

SEQ ID NO: 688406 - DNA, 15 bp, Homo sapiens
cttttcctgttctta

SEQ ID NO: 688407 - DNA, 15 bp, Homo sapiens
ttttcctgttcttac

SEQ ID NO: 688408 - DNA, 15 bp, Homo sapiens
tttcctgttcttact

SEQ ID NO: 688409 - DNA, 15 bp, Homo sapiens
ttcctgttcttactc

SEQ ID NO: 688410 - DNA, 15 bp, Homo sapiens
tcctgttcttactct

SEQ ID NO: 688411 - DNA, 15 bp, Homo sapiens
cctgttcttactctg

SEQ ID NO: 688412 - DNA, 15 bp, Homo sapiens
ctgttcttactctgc

SEQ ID NO: 688413 - DNA, 15 bp, Homo sapiens
tgttcttactctgcc

SEQ ID NO: 688414 - DNA, 15 bp, Homo sapiens
gttcttactctgccc

SEQ ID NO: 688415 - DNA, 15 bp, Homo sapiens
ttcttactctgccct

SEQ ID NO: 688416 - DNA, 15 bp, Homo sapiens
tcttactctgccctc

SEQ ID NO: 688417 - DNA, 15 bp, Homo sapiens
cttactctgccctca

SEQ ID NO: 688418 - DNA, 15 bp, Homo sapiens
ttactctgccctcat

SEQ ID NO: 688419 - DNA, 15 bp, Homo sapiens
tactctgccctcatt

SEQ ID NO: 688420 - DNA, 15 bp, Homo sapiens
actctgccctcattc

SEQ ID NO: 688421 - DNA, 15 bp, Homo sapiens
ctctgccctcattct

SEQ ID NO: 688422 - DNA, 15 bp, Homo sapiens
tctgccctcattcta

SEQ ID NO: 688423 - DNA, 15 bp, Homo sapiens
ctgccctcattctag

SEQ ID NO: 688424 - DNA, 15 bp, Homo sapiens
tgccctcattctagc

SEQ ID NO: 688425 - DNA, 15 bp, Homo sapiens
gccctcattctagcc

SEQ ID NO: 688426 - DNA, 15 bp, Homo sapiens
ccctcattctagcca

SEQ ID NO: 688427 - DNA, 15 bp, Homo sapiens
cctcattctagccat

SEQ ID NO: 688428 - DNA, 15 bp, Homo sapiens
ctcattctagccatc

SEQ ID NO: 688429 - DNA, 15 bp, Homo sapiens
tcattctagccatcc

SEQ ID NO: 688430 - DNA, 15 bp, Homo sapiens
cattctagccatcct

SEQ ID NO: 688431 - DNA, 15 bp, Homo sapiens
attctagccatcctt

SEQ ID NO: 688432 - DNA, 15 bp, Homo sapiens
ttctagccatccttc

SEQ ID NO: 688433 - DNA, 15 bp, Homo sapiens
tctagccatccttct

SEQ ID NO: 688434 - DNA, 15 bp, Homo sapiens
ctagccatccttctt

SEQ ID NO: 688435 - DNA, 15 bp, Homo sapiens
tagccatccttcttg

SEQ ID NO: 688436 - DNA, 15 bp, Homo sapiens
agccatccttcttgc

SEQ ID NO: 688437 - DNA, 15 bp, Homo sapiens
gccatccttcttgct

SEQ ID NO: 688438 - DNA, 15 bp, Homo sapiens
ccatccttcttgctg

SEQ ID NO: 688439 - DNA, 15 bp, Homo sapiens
catccttcttgctgg

SEQ ID NO: 688440 - DNA, 15 bp, Homo sapiens
atccttcttgctgga

SEQ ID NO: 688441 - DNA, 15 bp, Homo sapiens
tccttcttgctggag

SEQ ID NO: 688442 - DNA, 15 bp, Homo sapiens
ccttcttgctggagt

SEQ ID NO: 688443 - DNA, 15 bp, Homo sapiens
cttcttgctggagtc

SEQ ID NO: 688444 - DNA, 15 bp, Homo sapiens
ttcttgctggagtca

SEQ ID NO: 688445 - DNA, 15 bp, Homo sapiens
tcttgctggagtcac

SEQ ID NO: 688446 - DNA, 15 bp, Homo sapiens
cttgctggagtcacg

SEQ ID NO: 688447 - DNA, 15 bp, Homo sapiens
ttgctggagtcacgt

SEQ ID NO: 688448 - DNA, 15 bp, Homo sapiens
tgctggagtcacgtt

SEQ ID NO: 688449 - DNA, 15 bp, Homo sapiens
gctggagtcacgtta

SEQ ID NO: 688450 - DNA, 15 bp, Homo sapiens
ctggagtcacgttaa

SEQ ID NO: 688451 - DNA, 15 bp, Homo sapiens
tggagtcacgttaat

SEQ ID NO: 688452 - DNA, 15 bp, Homo sapiens
ggagtcacgttaatt

SEQ ID NO: 688453 - DNA, 15 bp, Homo sapiens
gagtcacgttaattt

SEQ ID NO: 688454 - DNA, 15 bp, Homo sapiens
agtcacgttaatttt

SEQ ID NO: 688455 - DNA, 15 bp, Homo sapiens
gtcacgttaattttc

SEQ ID NO: 688456 - DNA, 15 bp, Homo sapiens
tcacgttaattttct

SEQ ID NO: 688457 - DNA, 15 bp, Homo sapiens
cacgttaattttctc

SEQ ID NO: 688458 - DNA, 15 bp, Homo sapiens
acgttaattttctca

SEQ ID NO: 688459 - DNA, 15 bp, Homo sapiens
cgttaattttctcag

SEQ ID NO: 688460 - DNA, 15 bp, Homo sapiens
gttaattttctcaga

SEQ ID NO: 688461 - DNA, 15 bp, Homo sapiens
ttaattttctcagaa

SEQ ID NO: 688462 - DNA, 15 bp, Homo sapiens
taattttctcagaat

SEQ ID NO: 688463 - DNA, 15 bp, Homo sapiens
aattttctcagaatg

SEQ ID NO: 688464 - DNA, 15 bp, Homo sapiens
attttctcagaatgc

SEQ ID NO: 688465 - DNA, 15 bp, Homo sapiens
ttttctcagaatgct

SEQ ID NO: 688466 - DNA, 15 bp, Homo sapiens
tttctcagaatgctg

SEQ ID NO: 688467 - DNA, 15 bp, Homo sapiens
ttctcagaatgctga

SEQ ID NO: 688468 - DNA, 15 bp, Homo sapiens
tctcagaatgctgat

SEQ ID NO: 688469 - DNA, 15 bp, Homo sapiens
ctcagaatgctgatt

SEQ ID NO: 688470 - DNA, 15 bp, Homo sapiens
tcagaatgctgattt

SEQ ID NO: 688471 - DNA, 15 bp, Homo sapiens
cagaatgctgatttc

SEQ ID NO: 688472 - DNA, 15 bp, Homo sapiens
agaatgctgatttca

SEQ ID NO: 688473 - DNA, 15 bp, Homo sapiens
gaatgctgatttcaa

SEQ ID NO: 688474 - DNA, 15 bp, Homo sapiens
aatgctgatttcaac

SEQ ID NO: 688475 - DNA, 15 bp, Homo sapiens
atgctgatttcaacg

SEQ ID NO: 688476 - DNA, 15 bp, Homo sapiens
tgctgatttcaacgt

SEQ ID NO: 688477 - DNA, 15 bp, Homo sapiens
gctgatttcaacgtg

SEQ ID NO: 688478 - DNA, 15 bp, Homo sapiens
ctgatttcaacgtga

SEQ ID NO: 688479 - DNA, 15 bp, Homo sapiens
tgatttcaacgtgac

SEQ ID NO: 688480 - DNA, 15 bp, Homo sapiens
gatttcaacgtgacc

SEQ ID NO: 688481 - DNA, 15 bp, Homo sapiens
atttcaacgtgacct

SEQ ID NO: 688482 - DNA, 15 bp, Homo sapiens
tttcaacgtgacctg

SEQ ID NO: 688483 - DNA, 15 bp, Homo sapiens
ttcaacgtgacctgt

SEQ ID NO: 688484 - DNA, 15 bp, Homo sapiens
tcaacgtgacctgtc

SEQ ID NO: 688485 - DNA, 15 bp, Homo sapiens
caacgtgacctgtct

SEQ ID NO: 688486 - DNA, 15 bp, Homo sapiens
aacgtgacctgtctc

SEQ ID NO: 688487 - DNA, 15 bp, Homo sapiens
acgtgacctgtctca

SEQ ID NO: 688488 - DNA, 15 bp, Homo sapiens
cgtgacctgtctcat

SEQ ID NO: 688489 - DNA, 15 bp, Homo sapiens
gtgacctgtctcatt

SEQ ID NO: 688490 - DNA, 15 bp, Homo sapiens
tgacctgtctcattc

SEQ ID NO: 688491 - DNA, 15 bp, Homo sapiens
gacctgtctcattca

SEQ ID NO: 688492 - DNA, 15 bp, Homo sapiens
acctgtctcattcat

SEQ ID NO: 688493 - DNA, 15 bp, Homo sapiens
cctgtctcattcatg

SEQ ID NO: 688494 - DNA, 15 bp, Homo sapiens
ctgtctcattcatgg

SEQ ID NO: 688495 - DNA, 15 bp, Homo sapiens
tgtctcattcatggt

SEQ ID NO: 688496 - DNA, 15 bp, Homo sapiens
gtctcattcatggtc

SEQ ID NO: 688497 - DNA, 15 bp, Homo sapiens
tctcattcatggtca

SEQ ID NO: 688498 - DNA, 15 bp, Homo sapiens
ctcattcatggtcat

SEQ ID NO: 688499 - DNA, 15 bp, Homo sapiens
tcattcatggtcatt

SEQ ID NO: 688500 - DNA, 15 bp, Homo sapiens
cattcatggtcattc

SEQ ID NO: 688501 - DNA, 15 bp, Homo sapiens
attcatggtcattca

SEQ ID NO: 688502 - DNA, 15 bp, Homo sapiens
ttcatggtcattcaa

SEQ ID NO: 688503 - DNA, 15 bp, Homo sapiens
tcatggtcattcaac

SEQ ID NO: 688504 - DNA, 15 bp, Homo sapiens
catggtcattcaacc

SEQ ID NO: 688505 - DNA, 15 bp, Homo sapiens
atggtcattcaacct

SEQ ID NO: 688506 - DNA, 15 bp, Homo sapiens
tggtcattcaacctc

SEQ ID NO: 688507 - DNA, 15 bp, Homo sapiens
ggtcattcaacctca

SEQ ID NO: 688508 - DNA, 15 bp, Homo sapiens
gtcattcaacctcaa

SEQ ID NO: 688509 - DNA, 15 bp, Homo sapiens
tcattcaacctcaac

SEQ ID NO: 688510 - DNA, 15 bp, Homo sapiens
cattcaacctcaact

SEQ ID NO: 688511 - DNA, 15 bp, Homo sapiens
attcaacctcaactc

SEQ ID NO: 688512 - DNA, 15 bp, Homo sapiens
ttcaacctcaactca

SEQ ID NO: 688513 - DNA, 15 bp, Homo sapiens
tcaacctcaactcac

SEQ ID NO: 688514 - DNA, 15 bp, Homo sapiens
caacctcaactcaca

SEQ ID NO: 688515 - DNA, 15 bp, Homo sapiens
aacctcaactcacag

SEQ ID NO: 688516 - DNA, 15 bp, Homo sapiens
acctcaactcacagc

SEQ ID NO: 688517 - DNA, 15 bp, Homo sapiens
cctcaactcacagca

SEQ ID NO: 688518 - DNA, 15 bp, Homo sapiens
ctcaactcacagcaa

SEQ ID NO: 688519 - DNA, 15 bp, Homo sapiens
tcaactcacagcaag

SEQ ID NO: 688520 - DNA, 15 bp, Homo sapiens
caactcacagcaagg

SEQ ID NO: 688521 - DNA, 15 bp, Homo sapiens
aactcacagcaaggc

SEQ ID NO: 688522 - DNA, 15 bp, Homo sapiens
actcacagcaaggcc

SEQ ID NO: 688523 - DNA, 15 bp, Homo sapiens
ctcacagcaaggccc

SEQ ID NO: 688524 - DNA, 15 bp, Homo sapiens
tcacagcaaggccct

SEQ ID NO: 688525 - DNA, 15 bp, Homo sapiens
cacagcaaggccctg

SEQ ID NO: 688526 - DNA, 15 bp, Homo sapiens
acagcaaggccctga

SEQ ID NO: 688527 - DNA, 15 bp, Homo sapiens
cagcaaggccctgaa

SEQ ID NO: 688528 - DNA, 15 bp, Homo sapiens
agcaaggccctgaaa

SEQ ID NO: 688529 - DNA, 15 bp, Homo sapiens
gcaaggccctgaaat

SEQ ID NO: 688530 - DNA, 15 bp, Homo sapiens
caaggccctgaaatg

SEQ ID NO: 688531 - DNA, 15 bp, Homo sapiens
aaggccctgaaatgg

SEQ ID NO: 688532 - DNA, 15 bp, Homo sapiens
aggccctgaaatggc

SEQ ID NO: 688533 - DNA, 15 bp, Homo sapiens
ggccctgaaatggct

SEQ ID NO: 688534 - DNA, 15 bp, Homo sapiens
gccctgaaatggctg

SEQ ID NO: 688535 - DNA, 15 bp, Homo sapiens
ccctgaaatggctgt

SEQ ID NO: 688536 - DNA, 15 bp, Homo sapiens
cctgaaatggctgtt

SEQ ID NO: 688537 - DNA, 15 bp, Homo sapiens
ctgaaatggctgttg

SEQ ID NO: 688538 - DNA, 15 bp, Homo sapiens
tgaaatggctgttgc

SEQ ID NO: 688539 - DNA, 15 bp, Homo sapiens
gaaatggctgttgct

SEQ ID NO: 688540 - DNA, 15 bp, Homo sapiens
aaatggctgttgctg

SEQ ID NO: 688541 - DNA, 15 bp, Homo sapiens
aatggctgttgctgg

SEQ ID NO: 688542 - DNA, 15 bp, Homo sapiens
atggctgttgctggc

SEQ ID NO: 688543 - DNA, 15 bp, Homo sapiens
tggctgttgctggct

SEQ ID NO: 688544 - DNA, 15 bp, Homo sapiens
ggctgttgctggcta

SEQ ID NO: 688545 - DNA, 15 bp, Homo sapiens
gctgttgctggctat

SEQ ID NO: 688546 - DNA, 15 bp, Homo sapiens
ctgttgctggctatt

SEQ ID NO: 688547 - DNA, 15 bp, Homo sapiens
tgttgctggctattg

SEQ ID NO: 688548 - DNA, 15 bp, Homo sapiens
gttgctggctattgt

SEQ ID NO: 688549 - DNA, 15 bp, Homo sapiens
ttgctggctattgtt

SEQ ID NO: 688550 - DNA, 15 bp, Homo sapiens
tgctggctattgttc

SEQ ID NO: 688551 - DNA, 15 bp, Homo sapiens
gctggctattgttcc

SEQ ID NO: 688552 - DNA, 15 bp, Homo sapiens
ctggctattgttccg

SEQ ID NO: 688553 - DNA, 15 bp, Homo sapiens
tggctattgttccga

SEQ ID NO: 688554 - DNA, 15 bp, Homo sapiens
ggctattgttccgag

SEQ ID NO: 688555 - DNA, 15 bp, Homo sapiens
gctattgttccgagc

SEQ ID NO: 688556 - DNA, 15 bp, Homo sapiens
ctattgttccgagct

SEQ ID NO: 688557 - DNA, 15 bp, Homo sapiens
tattgttccgagctc

SEQ ID NO: 688558 - DNA, 15 bp, Homo sapiens
attgttccgagctcc

SEQ ID NO: 688559 - DNA, 15 bp, Homo sapiens
ttgttccgagctccc

SEQ ID NO: 688560 - DNA, 15 bp, Homo sapiens
tgttccgagctcccc

SEQ ID NO: 688561 - DNA, 15 bp, Homo sapiens
gttccgagctcccct

SEQ ID NO: 688562 - DNA, 15 bp, Homo sapiens
ttccgagctcccctc

SEQ ID NO: 688563 - DNA, 15 bp, Homo sapiens
tccgagctcccctcc

SEQ ID NO: 688564 - DNA, 15 bp, Homo sapiens
ccgagctcccctccc

SEQ ID NO: 688565 - DNA, 15 bp, Homo sapiens
cgagctcccctccca

SEQ ID NO: 688566 - DNA, 15 bp, Homo sapiens
gagctcccctcccac

SEQ ID NO: 688567 - DNA, 15 bp, Homo sapiens
agctcccctcccact

SEQ ID NO: 688568 - DNA, 15 bp, Homo sapiens
gctcccctcccactg

SEQ ID NO: 688569 - DNA, 15 bp, Homo sapiens
ctcccctcccactgt

SEQ ID NO: 688570 - DNA, 15 bp, Homo sapiens
tcccctcccactgtt

SEQ ID NO: 688571 - DNA, 15 bp, Homo sapiens
cccctcccactgttc

SEQ ID NO: 688572 - DNA, 15 bp, Homo sapiens
ccctcccactgttcc

SEQ ID NO: 688573 - DNA, 15 bp, Homo sapiens
cctcccactgttcct

SEQ ID NO: 688574 - DNA, 15 bp, Homo sapiens
ctcccactgttcctt

SEQ ID NO: 688575 - DNA, 15 bp, Homo sapiens
tcccactgttccttc

SEQ ID NO: 688576 - DNA, 15 bp, Homo sapiens
cccactgttccttca

SEQ ID NO: 688577 - DNA, 15 bp, Homo sapiens
ccactgttccttcac

SEQ ID NO: 688578 - DNA, 15 bp, Homo sapiens
cactgttccttcaca

SEQ ID NO: 688579 - DNA, 15 bp, Homo sapiens
actgttccttcacat

SEQ ID NO: 688580 - DNA, 15 bp, Homo sapiens
ctgttccttcacatc

SEQ ID NO: 688581 - DNA, 15 bp, Homo sapiens
tgttccttcacatcc

SEQ ID NO: 688582 - DNA, 15 bp, Homo sapiens
gttccttcacatcct

SEQ ID NO: 688583 - DNA, 15 bp, Homo sapiens
ttccttcacatcctc

SEQ ID NO: 688584 - DNA, 15 bp, Homo sapiens
tccttcacatcctct

SEQ ID NO: 688585 - DNA, 15 bp, Homo sapiens
ccttcacatcctctc

SEQ ID NO: 688586 - DNA, 15 bp, Homo sapiens
cttcacatcctctct

SEQ ID NO: 688587 - DNA, 15 bp, Homo sapiens
ttcacatcctctctt

SEQ ID NO: 688588 - DNA, 15 bp, Homo sapiens
tcacatcctctcttc

SEQ ID NO: 688589 - DNA, 15 bp, Homo sapiens
cacatcctctcttcc

SEQ ID NO: 688590 - DNA, 15 bp, Homo sapiens
acatcctctcttcca

SEQ ID NO: 688591 - DNA, 15 bp, Homo sapiens
catcctctcttccag

SEQ ID NO: 688592 - DNA, 15 bp, Homo sapiens
atcctctcttccagt

SEQ ID NO: 688593 - DNA, 15 bp, Homo sapiens
tcctctcttccagtg

SEQ ID NO: 688594 - DNA, 15 bp, Homo sapiens
cctctcttccagtgt

SEQ ID NO: 688595 - DNA, 15 bp, Homo sapiens
ctctcttccagtgtt

SEQ ID NO: 688596 - DNA, 15 bp, Homo sapiens
tctcttccagtgttt

SEQ ID NO: 688597 - DNA, 15 bp, Homo sapiens
ctcttccagtgtttc

SEQ ID NO: 688598 - DNA, 15 bp, Homo sapiens
tcttccagtgtttct

SEQ ID NO: 688599 - DNA, 15 bp, Homo sapiens
cttccagtgtttctg

SEQ ID NO: 688600 - DNA, 15 bp, Homo sapiens
ttccagtgtttctgg

SEQ ID NO: 688601 - DNA, 15 bp, Homo sapiens
tccagtgtttctggt

SEQ ID NO: 688602 - DNA, 15 bp, Homo sapiens
ccagtgtttctggtc

SEQ ID NO: 688603 - DNA, 15 bp, Homo sapiens
cagtgtttctggtcc

SEQ ID NO: 688604 - DNA, 15 bp, Homo sapiens
agtgtttctggtcca

SEQ ID NO: 688605 - DNA, 15 bp, Homo sapiens
gtgtttctggtccag

SEQ ID NO: 688606 - DNA, 15 bp, Homo sapiens
tgtttctggtccagt

SEQ ID NO: 688607 - DNA, 15 bp, Homo sapiens
gtttctggtccagtc

SEQ ID NO: 688608 - DNA, 15 bp, Homo sapiens
tttctggtccagtca

SEQ ID NO: 688609 - DNA, 15 bp, Homo sapiens
ttctggtccagtcag

SEQ ID NO: 688610 - DNA, 15 bp, Homo sapiens
tctggtccagtcagt

SEQ ID NO: 688611 - DNA, 15 bp, Homo sapiens
ctggtccagtcagtc

SEQ ID NO: 688612 - DNA, 15 bp, Homo sapiens
tggtccagtcagtcc

SEQ ID NO: 688613 - DNA, 15 bp, Homo sapiens
ggtccagtcagtccc

SEQ ID NO: 688614 - DNA, 15 bp, Homo sapiens
gtccagtcagtccca

SEQ ID NO: 688615 - DNA, 15 bp, Homo sapiens
tccagtcagtcccat

SEQ ID NO: 688616 - DNA, 15 bp, Homo sapiens
ccagtcagtcccata

SEQ ID NO: 688617 - DNA, 15 bp, Homo sapiens
cagtcagtcccatat

SEQ ID NO: 688618 - DNA, 15 bp, Homo sapiens
agtcagtcccatatg

SEQ ID NO: 688619 - DNA, 15 bp, Homo sapiens
gtcagtcccatatgc

SEQ ID NO: 688620 - DNA, 15 bp, Homo sapiens
tcagtcccatatgca

SEQ ID NO: 688621 - DNA, 15 bp, Homo sapiens
cagtcccatatgcag

SEQ ID NO: 688622 - DNA, 15 bp, Homo sapiens
agtcccatatgcagc

SEQ ID NO: 688623 - DNA, 15 bp, Homo sapiens
gtcccatatgcagcc

SEQ ID NO: 688624 - DNA, 15 bp, Homo sapiens
tcccatatgcagccc

SEQ ID NO: 688625 - DNA, 15 bp, Homo sapiens
cccatatgcagccct

SEQ ID NO: 688626 - DNA, 15 bp, Homo sapiens
ccatatgcagccctt

SEQ ID NO: 688627 - DNA, 15 bp, Homo sapiens
catatgcagcccttg

SEQ ID NO: 688628 - DNA, 15 bp, Homo sapiens
atatgcagcccttgg

SEQ ID NO: 688629 - DNA, 15 bp, Homo sapiens
tatgcagcccttggc

SEQ ID NO: 688630 - DNA, 15 bp, Homo sapiens
atgcagcccttggca

SEQ ID NO: 688631 - DNA, 15 bp, Homo sapiens
tgcagcccttggcat

SEQ ID NO: 688632 - DNA, 15 bp, Homo sapiens
gcagcccttggcata

SEQ ID NO: 688633 - DNA, 15 bp, Homo sapiens
cagcccttggcatac

SEQ ID NO: 688634 - DNA, 15 bp, Homo sapiens
agcccttggcatacc

SEQ ID NO: 688635 - DNA, 15 bp, Homo sapiens
gcccttggcatacct

SEQ ID NO: 688636 - DNA, 15 bp, Homo sapiens
cccttggcatacctg

SEQ ID NO: 688637 - DNA, 15 bp, Homo sapiens
ccttggcatacctgt

SEQ ID NO: 688638 - DNA, 15 bp, Homo sapiens
cttggcatacctgta

SEQ ID NO: 688639 - DNA, 15 bp, Homo sapiens
ttggcatacctgtac

SEQ ID NO: 688640 - DNA, 15 bp, Homo sapiens
tggcatacctgtact

SEQ ID NO: 688641 - DNA, 15 bp, Homo sapiens
ggcatacctgtactc

SEQ ID NO: 688642 - DNA, 15 bp, Homo sapiens
gcatacctgtactca

SEQ ID NO: 688643 - DNA, 15 bp, Homo sapiens
catacctgtactcat

SEQ ID NO: 688644 - DNA, 15 bp, Homo sapiens
atacctgtactcata

SEQ ID NO: 688645 - DNA, 15 bp, Homo sapiens
tacctgtactcatac

SEQ ID NO: 688646 - DNA, 15 bp, Homo sapiens
acctgtactcatacc

SEQ ID NO: 688647 - DNA, 15 bp, Homo sapiens
cctgtactcatacca

SEQ ID NO: 688648 - DNA, 15 bp, Homo sapiens
ctgtactcataccat

SEQ ID NO: 688649 - DNA, 15 bp, Homo sapiens
tgtactcataccatt

SEQ ID NO: 688650 - DNA, 15 bp, Homo sapiens
gtactcataccattt

SEQ ID NO: 688651 - DNA, 15 bp, Homo sapiens
tactcataccatttc

SEQ ID NO: 688652 - DNA, 15 bp, Homo sapiens
actcataccatttct

SEQ ID NO: 688653 - DNA, 15 bp, Homo sapiens
ctcataccatttctg

SEQ ID NO: 688654 - DNA, 15 bp, Homo sapiens
tcataccatttctgc

SEQ ID NO: 688655 - DNA, 15 bp, Homo sapiens
cataccatttctgcc

SEQ ID NO: 688656 - DNA, 15 bp, Homo sapiens
ataccatttctgcct

SEQ ID NO: 688657 - DNA, 15 bp, Homo sapiens
taccatttctgcctt

SEQ ID NO: 688658 - DNA, 15 bp, Homo sapiens
accatttctgccttc

SEQ ID NO: 688659 - DNA, 15 bp, Homo sapiens
ccatttctgccttcc

SEQ ID NO: 688660 - DNA, 15 bp, Homo sapiens
catttctgccttcct

SEQ ID NO: 688661 - DNA, 15 bp, Homo sapiens
atttctgccttccta

SEQ ID NO: 688662 - DNA, 15 bp, Homo sapiens
tttctgccttcctag

SEQ ID NO: 688663 - DNA, 15 bp, Homo sapiens
ttctgccttcctaga

SEQ ID NO: 688664 - DNA, 15 bp, Homo sapiens
tctgccttcctagaa

SEQ ID NO: 688665 - DNA, 15 bp, Homo sapiens
ctgccttcctagaat

SEQ ID NO: 688666 - DNA, 15 bp, Homo sapiens
tgccttcctagaatt

SEQ ID NO: 688667 - DNA, 15 bp, Homo sapiens
gccttcctagaattt

SEQ ID NO: 688668 - DNA, 15 bp, Homo sapiens
ccttcctagaatttc

SEQ ID NO: 688669 - DNA, 15 bp, Homo sapiens
cttcctagaatttcc

SEQ ID NO: 688670 - DNA, 15 bp, Homo sapiens
ttcctagaatttcca

SEQ ID NO: 688671 - DNA, 15 bp, Homo sapiens
tcctagaatttccat

SEQ ID NO: 688672 - DNA, 15 bp, Homo sapiens
cctagaatttccatc

SEQ ID NO: 688673 - DNA, 15 bp, Homo sapiens
ctagaatttccatcc

SEQ ID NO: 688674 - DNA, 15 bp, Homo sapiens
tagaatttccatcct

SEQ ID NO: 688675 - DNA, 15 bp, Homo sapiens
agaatttccatcctc

SEQ ID NO: 688676 - DNA, 15 bp, Homo sapiens
gaatttccatcctct

SEQ ID NO: 688677 - DNA, 15 bp, Homo sapiens
aatttccatcctctt

SEQ ID NO: 688678 - DNA, 15 bp, Homo sapiens
atttccatcctcttc

SEQ ID NO: 688679 - DNA, 15 bp, Homo sapiens
tttccatcctcttcc

SEQ ID NO: 688680 - DNA, 15 bp, Homo sapiens
ttccatcctcttccc

SEQ ID NO: 688681 - DNA, 15 bp, Homo sapiens
tccatcctcttcccc

SEQ ID NO: 688682 - DNA, 15 bp, Homo sapiens
ccatcctcttcccct

SEQ ID NO: 688683 - DNA, 15 bp, Homo sapiens
catcctcttccccta

SEQ ID NO: 688684 - DNA, 15 bp, Homo sapiens
atcctcttcccctaa

SEQ ID NO: 688685 - DNA, 15 bp, Homo sapiens
tcctcttcccctaat

SEQ ID NO: 688686 - DNA, 15 bp, Homo sapiens
cctcttcccctaatt

SEQ ID NO: 688687 - DNA, 15 bp, Homo sapiens
ctcttcccctaattc

SEQ ID NO: 688688 - DNA, 15 bp, Homo sapiens
tcttcccctaattcc

SEQ ID NO: 688689 - DNA, 15 bp, Homo sapiens
cttcccctaattcct

SEQ ID NO: 688690 - DNA, 15 bp, Homo sapiens
ttcccctaattcctt

SEQ ID NO: 688691 - DNA, 15 bp, Homo sapiens
tcccctaattccttc

SEQ ID NO: 688692 - DNA, 15 bp, Homo sapiens
cccctaattccttcc

SEQ ID NO: 688693 - DNA, 15 bp, Homo sapiens
ccctaattccttccc

SEQ ID NO: 688694 - DNA, 15 bp, Homo sapiens
cctaattccttccca

SEQ ID NO: 688695 - DNA, 15 bp, Homo sapiens
ctaattccttcccag

SEQ ID NO: 688696 - DNA, 15 bp, Homo sapiens
taattccttcccaga

SEQ ID NO: 688697 - DNA, 15 bp, Homo sapiens
aattccttcccagag

SEQ ID NO: 688698 - DNA, 15 bp, Homo sapiens
attccttcccagagt

SEQ ID NO: 688699 - DNA, 15 bp, Homo sapiens
ttccttcccagagtc

SEQ ID NO: 688700 - DNA, 15 bp, Homo sapiens
tccttcccagagtcc

SEQ ID NO: 688701 - DNA, 15 bp, Homo sapiens
ccttcccagagtccc

SEQ ID NO: 688702 - DNA, 15 bp, Homo sapiens
cttcccagagtccca

SEQ ID NO: 688703 - DNA, 15 bp, Homo sapiens
ttcccagagtcccac

SEQ ID NO: 688704 - DNA, 15 bp, Homo sapiens
tcccagagtcccacg

SEQ ID NO: 688705 - DNA, 15 bp, Homo sapiens
cccagagtcccacgt

SEQ ID NO: 688706 - DNA, 15 bp, Homo sapiens
ccagagtcccacgta

SEQ ID NO: 688707 - DNA, 15 bp, Homo sapiens
cagagtcccacgtat

SEQ ID NO: 688708 - DNA, 15 bp, Homo sapiens
agagtcccacgtatc

SEQ ID NO: 688709 - DNA, 15 bp, Homo sapiens
gagtcccacgtatcc

SEQ ID NO: 688710 - DNA, 15 bp, Homo sapiens
agtcccacgtatcct

SEQ ID NO: 688711 - DNA, 15 bp, Homo sapiens
gtcccacgtatcctt

SEQ ID NO: 688712 - DNA, 15 bp, Homo sapiens
tcccacgtatccttt

SEQ ID NO: 688713 - DNA, 15 bp, Homo sapiens
cccacgtatcctttt

SEQ ID NO: 688714 - DNA, 15 bp, Homo sapiens
ccacgtatccttttc

SEQ ID NO: 688715 - DNA, 15 bp, Homo sapiens
cacgtatccttttca

SEQ ID NO: 688716 - DNA, 15 bp, Homo sapiens
acgtatccttttcaa

SEQ ID NO: 688717 - DNA, 15 bp, Homo sapiens
cgtatccttttcaat

SEQ ID NO: 688718 - DNA, 15 bp, Homo sapiens
gtatccttttcaatt

SEQ ID NO: 688719 - DNA, 15 bp, Homo sapiens
tatccttttcaatta

SEQ ID NO: 688720 - DNA, 15 bp, Homo sapiens
atccttttcaattag

SEQ ID NO: 688721 - DNA, 15 bp, Homo sapiens
tccttttcaattagc

SEQ ID NO: 688722 - DNA, 15 bp, Homo sapiens
ccttttcaattagca

SEQ ID NO: 688723 - DNA, 15 bp, Homo sapiens
cttttcaattagcaa

SEQ ID NO: 688724 - DNA, 15 bp, Homo sapiens
ttttcaattagcaac

SEQ ID NO: 688725 - DNA, 15 bp, Homo sapiens
tttcaattagcaacc

SEQ ID NO: 688726 - DNA, 15 bp, Homo sapiens
ttcaattagcaacct

SEQ ID NO: 688727 - DNA, 15 bp, Homo sapiens
tcaattagcaacctc

SEQ ID NO: 688728 - DNA, 15 bp, Homo sapiens
caattagcaacctct

SEQ ID NO: 688729 - DNA, 15 bp, Homo sapiens
aattagcaacctctc

SEQ ID NO: 688730 - DNA, 15 bp, Homo sapiens
attagcaacctctca

SEQ ID NO: 688731 - DNA, 15 bp, Homo sapiens
ttagcaacctctcaa

SEQ ID NO: 688732 - DNA, 15 bp, Homo sapiens
tagcaacctctcaat

SEQ ID NO: 688733 - DNA, 15 bp, Homo sapiens
agcaacctctcaatg

SEQ ID NO: 688734 - DNA, 15 bp, Homo sapiens
gcaacctctcaatgt

SEQ ID NO: 688735 - DNA, 15 bp, Homo sapiens
caacctctcaatgtg

SEQ ID NO: 688736 - DNA, 15 bp, Homo sapiens
aacctctcaatgtgg

SEQ ID NO: 688737 - DNA, 15 bp, Homo sapiens
acctctcaatgtggt

SEQ ID NO: 688738 - DNA, 15 bp, Homo sapiens
cctctcaatgtggtt

SEQ ID NO: 688739 - DNA, 15 bp, Homo sapiens
ctctcaatgtggtta

SEQ ID NO: 688740 - DNA, 15 bp, Homo sapiens
tctcaatgtggttaa

SEQ ID NO: 688741 - DNA, 15 bp, Homo sapiens
ctcaatgtggttaat

SEQ ID NO: 688742 - DNA, 15 bp, Homo sapiens
tcaatgtggttaatt

SEQ ID NO: 688743 - DNA, 15 bp, Homo sapiens
caatgtggttaattc

SEQ ID NO: 688744 - DNA, 15 bp, Homo sapiens
aatgtggttaattca

SEQ ID NO: 688745 - DNA, 15 bp, Homo sapiens
atgtggttaattcaa

SEQ ID NO: 688746 - DNA, 15 bp, Homo sapiens
tgtggttaattcaat

SEQ ID NO: 688747 - DNA, 15 bp, Homo sapiens
gtggttaattcaatg

SEQ ID NO: 688748 - DNA, 15 bp, Homo sapiens
tggttaattcaatgt

SEQ ID NO: 688749 - DNA, 15 bp, Homo sapiens
ggttaattcaatgtt

SEQ ID NO: 688750 - DNA, 15 bp, Homo sapiens
gttaattcaatgttg

SEQ ID NO: 688751 - DNA, 15 bp, Homo sapiens
ttaattcaatgttgt

SEQ ID NO: 688752 - DNA, 15 bp, Homo sapiens
taattcaatgttgtg

SEQ ID NO: 688753 - DNA, 15 bp, Homo sapiens
aattcaatgttgtgc

SEQ ID NO: 688754 - DNA, 15 bp, Homo sapiens
attcaatgttgtgcc

SEQ ID NO: 688755 - DNA, 15 bp, Homo sapiens
ttcaatgttgtgcct

SEQ ID NO: 688756 - DNA, 15 bp, Homo sapiens
tcaatgttgtgcctt

SEQ ID NO: 688757 - DNA, 15 bp, Homo sapiens
caatgttgtgcctta

SEQ ID NO: 688758 - DNA, 15 bp, Homo sapiens
aatgttgtgccttag

SEQ ID NO: 688759 - DNA, 15 bp, Homo sapiens
atgttgtgccttagg

SEQ ID NO: 688760 - DNA, 15 bp, Homo sapiens
tgttgtgccttagga

SEQ ID NO: 688761 - DNA, 15 bp, Homo sapiens
gttgtgccttaggaa

SEQ ID NO: 688762 - DNA, 15 bp, Homo sapiens
ttgtgccttaggaaa

SEQ ID NO: 688763 - DNA, 15 bp, Homo sapiens
tgtgccttaggaaac

SEQ ID NO: 688764 - DNA, 15 bp, Homo sapiens
gtgccttaggaaact

SEQ ID NO: 688765 - DNA, 15 bp, Homo sapiens
tgccttaggaaactg

SEQ ID NO: 688766 - DNA, 15 bp, Homo sapiens
gccttaggaaactga

SEQ ID NO: 688767 - DNA, 15 bp, Homo sapiens
ccttaggaaactgaa

SEQ ID NO: 688768 - DNA, 15 bp, Homo sapiens
cttaggaaactgaaa

SEQ ID NO: 688769 - DNA, 15 bp, Homo sapiens
ttaggaaactgaaag

SEQ ID NO: 688770 - DNA, 15 bp, Homo sapiens
taggaaactgaaagg

SEQ ID NO: 688771 - DNA, 15 bp, Homo sapiens
aggaaactgaaaggt

SEQ ID NO: 688772 - DNA, 15 bp, Homo sapiens
ggaaactgaaaggtt

SEQ ID NO: 688773 - DNA, 15 bp, Homo sapiens
gaaactgaaaggttg

SEQ ID NO: 688774 - DNA, 15 bp, Homo sapiens
aaactgaaaggttga

SEQ ID NO: 688775 - DNA, 15 bp, Homo sapiens
aactgaaaggttgag

SEQ ID NO: 688776 - DNA, 15 bp, Homo sapiens
actgaaaggttgagg

SEQ ID NO: 688777 - DNA, 15 bp, Homo sapiens
ctgaaaggttgagga

SEQ ID NO: 688778 - DNA, 15 bp, Homo sapiens
tgaaaggttgaggac

SEQ ID NO: 688779 - DNA, 15 bp, Homo sapiens
gaaaggttgaggaca

SEQ ID NO: 688780 - DNA, 15 bp, Homo sapiens
aaaggttgaggacac

SEQ ID NO: 688781 - DNA, 15 bp, Homo sapiens
aaggttgaggacacc

SEQ ID NO: 688782 - DNA, 15 bp, Homo sapiens
aggttgaggacacct

SEQ ID NO: 688783 - DNA, 15 bp, Homo sapiens
ggttgaggacacctt

SEQ ID NO: 688784 - DNA, 15 bp, Homo sapiens
gttgaggacaccttg

SEQ ID NO: 688785 - DNA, 15 bp, Homo sapiens
ttgaggacaccttgc

SEQ ID NO: 688786 - DNA, 15 bp, Homo sapiens
tgaggacaccttgca

SEQ ID NO: 688787 - DNA, 15 bp, Homo sapiens
gaggacaccttgcaa

SEQ ID NO: 688788 - DNA, 15 bp, Homo sapiens
aggacaccttgcaaa

SEQ ID NO: 688789 - DNA, 15 bp, Homo sapiens
ggacaccttgcaaat

SEQ ID NO: 688790 - DNA, 15 bp, Homo sapiens
gacaccttgcaaata

SEQ ID NO: 688791 - DNA, 15 bp, Homo sapiens
acaccttgcaaatag

SEQ ID NO: 688792 - DNA, 15 bp, Homo sapiens
caccttgcaaatagg

SEQ ID NO: 688793 - DNA, 15 bp, Homo sapiens
accttgcaaataggt

SEQ ID NO: 688794 - DNA, 15 bp, Homo sapiens
ccttgcaaataggtg

SEQ ID NO: 688795 - DNA, 15 bp, Homo sapiens
cttgcaaataggtga

SEQ ID NO: 688796 - DNA, 15 bp, Homo sapiens
ttgcaaataggtgaa

SEQ ID NO: 688797 - DNA, 15 bp, Homo sapiens
tgcaaataggtgaaa

SEQ ID NO: 688798 - DNA, 15 bp, Homo sapiens
gcaaataggtgaaac

SEQ ID NO: 688799 - DNA, 15 bp, Homo sapiens
caaataggtgaaacc

SEQ ID NO: 688800 - DNA, 15 bp, Homo sapiens
aaataggtgaaacca

SEQ ID NO: 688801 - DNA, 15 bp, Homo sapiens
aataggtgaaaccat

SEQ ID NO: 688802 - DNA, 15 bp, Homo sapiens
ataggtgaaaccata

SEQ ID NO: 688803 - DNA, 15 bp, Homo sapiens
taggtgaaaccataa

SEQ ID NO: 688804 - DNA, 15 bp, Homo sapiens
aggtgaaaccataaa

SEQ ID NO: 688805 - DNA, 15 bp, Homo sapiens
ggtgaaaccataaat

SEQ ID NO: 688806 - DNA, 15 bp, Homo sapiens
gtgaaaccataaata

SEQ ID NO: 688807 - DNA, 15 bp, Homo sapiens
tgaaaccataaatac

SEQ ID NO: 688808 - DNA, 15 bp, Homo sapiens
gaaaccataaatact

SEQ ID NO: 688809 - DNA, 15 bp, Homo sapiens
aaaccataaatacta

SEQ ID NO: 688810 - DNA, 15 bp, Homo sapiens
aaccataaatactaa

SEQ ID NO: 688811 - DNA, 15 bp, Homo sapiens
accataaatactaaa

SEQ ID NO: 688812 - DNA, 15 bp, Homo sapiens
ccataaatactaaat

SEQ ID NO: 688813 - DNA, 15 bp, Homo sapiens
cataaatactaaata

SEQ ID NO: 688814 - DNA, 15 bp, Homo sapiens
ataaatactaaatac

SEQ ID NO: 688815 - DNA, 15 bp, Homo sapiens
taaatactaaataca

SEQ ID NO: 688816 - DNA, 15 bp, Homo sapiens
aaatactaaatacaa

SEQ ID NO: 688817 - DNA, 15 bp, Homo sapiens
aatactaaatacaag

SEQ ID NO: 688818 - DNA, 15 bp, Homo sapiens
atactaaatacaaga

SEQ ID NO: 688819 - DNA, 15 bp, Homo sapiens
tactaaatacaagaa

SEQ ID NO: 688820 - DNA, 15 bp, Homo sapiens
actaaatacaagaac

SEQ ID NO: 688821 - DNA, 15 bp, Homo sapiens
ctaaatacaagaaca

SEQ ID NO: 688822 - DNA, 15 bp, Homo sapiens
taaatacaagaacat

SEQ ID NO: 688823 - DNA, 15 bp, Homo sapiens
aaatacaagaacatc

SEQ ID NO: 688824 - DNA, 15 bp, Homo sapiens
aatacaagaacatca

SEQ ID NO: 688825 - DNA, 15 bp, Homo sapiens
atacaagaacatcat

SEQ ID NO: 688826 - DNA, 15 bp, Homo sapiens
tacaagaacatcatg

SEQ ID NO: 688827 - DNA, 15 bp, Homo sapiens
acaagaacatcatgg

SEQ ID NO: 688828 - DNA, 15 bp, Homo sapiens
caagaacatcatgga

SEQ ID NO: 688829 - DNA, 15 bp, Homo sapiens
aagaacatcatggat

SEQ ID NO: 688830 - DNA, 15 bp, Homo sapiens
agaacatcatggatg

SEQ ID NO: 688831 - DNA, 15 bp, Homo sapiens
gaacatcatggatgt

SEQ ID NO: 688832 - DNA, 15 bp, Homo sapiens
aacatcatggatgtg

SEQ ID NO: 688833 - DNA, 15 bp, Homo sapiens
acatcatggatgtgt

SEQ ID NO: 688834 - DNA, 15 bp, Homo sapiens
catcatggatgtgtg

SEQ ID NO: 688835 - DNA, 15 bp, Homo sapiens
atcatggatgtgtgg

SEQ ID NO: 688836 - DNA, 15 bp, Homo sapiens
tcatggatgtgtggt

SEQ ID NO: 688837 - DNA, 15 bp, Homo sapiens
catggatgtgtggta

SEQ ID NO: 688838 - DNA, 15 bp, Homo sapiens
atggatgtgtggtac

SEQ ID NO: 688839 - DNA, 15 bp, Homo sapiens
tggatgtgtggtaca

SEQ ID NO: 688840 - DNA, 15 bp, Homo sapiens
ggatgtgtggtacac

SEQ ID NO: 688841 - DNA, 15 bp, Homo sapiens
gatgtgtggtacaca

SEQ ID NO: 688842 - DNA, 15 bp, Homo sapiens
atgtgtggtacacat

SEQ ID NO: 688843 - DNA, 15 bp, Homo sapiens
tgtgtggtacacatt

SEQ ID NO: 688844 - DNA, 15 bp, Homo sapiens
gtgtggtacacattt

SEQ ID NO: 688845 - DNA, 15 bp, Homo sapiens
tgtggtacacatttt

SEQ ID NO: 688846 - DNA, 15 bp, Homo sapiens
gtggtacacattttt

SEQ ID NO: 688847 - DNA, 15 bp, Homo sapiens
tggtacacatttttt

SEQ ID NO: 688848 - DNA, 15 bp, Homo sapiens
ggtacacattttttt

SEQ ID NO: 688849 - DNA, 15 bp, Homo sapiens
gtacacattttttta

SEQ ID NO: 688850 - DNA, 15 bp, Homo sapiens
tacacatttttttat

SEQ ID NO: 688851 - DNA, 15 bp, Homo sapiens
acacatttttttata

SEQ ID NO: 688852 - DNA, 15 bp, Homo sapiens
cacatttttttatac

SEQ ID NO: 688853 - DNA, 15 bp, Homo sapiens
acatttttttatact

SEQ ID NO: 688854 - DNA, 15 bp, Homo sapiens
catttttttatactt

SEQ ID NO: 688855 - DNA, 15 bp, Homo sapiens
atttttttatacttt

SEQ ID NO: 688856 - DNA, 15 bp, Homo sapiens
tttttttatactttc

SEQ ID NO: 688857 - DNA, 15 bp, Homo sapiens
ttttttatactttct

SEQ ID NO: 688858 - DNA, 15 bp, Homo sapiens
tttttatactttctt

SEQ ID NO: 688859 - DNA, 15 bp, Homo sapiens
ttttatactttcttg

SEQ ID NO: 688860 - DNA, 15 bp, Homo sapiens
tttatactttcttgg

SEQ ID NO: 688861 - DNA, 15 bp, Homo sapiens
ttatactttcttggc

SEQ ID NO: 688862 - DNA, 15 bp, Homo sapiens
tatactttcttggca

SEQ ID NO: 688863 - DNA, 15 bp, Homo sapiens
atactttcttggcac

SEQ ID NO: 688864 - DNA, 15 bp, Homo sapiens
tactttcttggcaca

SEQ ID NO: 688865 - DNA, 15 bp, Homo sapiens
actttcttggcacaa

SEQ ID NO: 688866 - DNA, 15 bp, Homo sapiens
ctttcttggcacaaa

SEQ ID NO: 688867 - DNA, 15 bp, Homo sapiens
tttcttggcacaaat

SEQ ID NO: 688868 - DNA, 15 bp, Homo sapiens
ttcttggcacaaata

SEQ ID NO: 688869 - DNA, 15 bp, Homo sapiens
tcttggcacaaatag

SEQ ID NO: 688870 - DNA, 15 bp, Homo sapiens
cttggcacaaatagt

SEQ ID NO: 688871 - DNA, 15 bp, Homo sapiens
ttggcacaaatagtt

SEQ ID NO: 688872 - DNA, 15 bp, Homo sapiens
tggcacaaatagttc

SEQ ID NO: 688873 - DNA, 15 bp, Homo sapiens
ggcacaaatagttca

SEQ ID NO: 688874 - DNA, 15 bp, Homo sapiens
gcacaaatagttcac

SEQ ID NO: 688875 - DNA, 15 bp, Homo sapiens
cacaaatagttcact

SEQ ID NO: 688876 - DNA, 15 bp, Homo sapiens
acaaatagttcacta

SEQ ID NO: 688877 - DNA, 15 bp, Homo sapiens
caaatagttcactac

SEQ ID NO: 688878 - DNA, 15 bp, Homo sapiens
aaatagttcactact

SEQ ID NO: 688879 - DNA, 15 bp, Homo sapiens
aatagttcactactg

SEQ ID NO: 688880 - DNA, 15 bp, Homo sapiens
atagttcactactgt

SEQ ID NO: 688881 - DNA, 15 bp, Homo sapiens
tagttcactactgta

SEQ ID NO: 688882 - DNA, 15 bp, Homo sapiens
agttcactactgtat

SEQ ID NO: 688883 - DNA, 15 bp, Homo sapiens
gttcactactgtata

SEQ ID NO: 688884 - DNA, 15 bp, Homo sapiens
ttcactactgtatat

SEQ ID NO: 688885 - DNA, 15 bp, Homo sapiens
tcactactgtatatt

SEQ ID NO: 688886 - DNA, 15 bp, Homo sapiens
cactactgtatattt

SEQ ID NO: 688887 - DNA, 15 bp, Homo sapiens
actactgtatatttt

SEQ ID NO: 688888 - DNA, 15 bp, Homo sapiens
ctactgtatattttt

SEQ ID NO: 688889 - DNA, 15 bp, Homo sapiens
tactgtatattttta

SEQ ID NO: 688890 - DNA, 15 bp, Homo sapiens
actgtatatttttat

SEQ ID NO: 688891 - DNA, 15 bp, Homo sapiens
ctgtatatttttata

SEQ ID NO: 688892 - DNA, 15 bp, Homo sapiens
tgtatatttttatag

SEQ ID NO: 688893 - DNA, 15 bp, Homo sapiens
gtatatttttatagt

SEQ ID NO: 688894 - DNA, 15 bp, Homo sapiens
tatatttttatagtt

SEQ ID NO: 688895 - DNA, 15 bp, Homo sapiens
atatttttatagttt

SEQ ID NO: 688896 - DNA, 15 bp, Homo sapiens
tatttttatagtttt

SEQ ID NO: 688897 - DNA, 15 bp, Homo sapiens
atttttatagtttta

SEQ ID NO: 688898 - DNA, 15 bp, Homo sapiens
tttttatagttttaa

SEQ ID NO: 688899 - DNA, 15 bp, Homo sapiens
ttttatagttttaag

SEQ ID NO: 688900 - DNA, 15 bp, Homo sapiens
tttatagttttaagg

SEQ ID NO: 688901 - DNA, 15 bp, Homo sapiens
ttatagttttaagga

SEQ ID NO: 688902 - DNA, 15 bp, Homo sapiens
tatagttttaaggat

SEQ ID NO: 688903 - DNA, 15 bp, Homo sapiens
atagttttaaggata

SEQ ID NO: 688904 - DNA, 15 bp, Homo sapiens
tagttttaaggatat

SEQ ID NO: 688905 - DNA, 15 bp, Homo sapiens
agttttaaggatata

SEQ ID NO: 688906 - DNA, 15 bp, Homo sapiens
gttttaaggatatat

SEQ ID NO: 688907 - DNA, 15 bp, Homo sapiens
ttttaaggatatatt

SEQ ID NO: 688908 - DNA, 15 bp, Homo sapiens
tttaaggatatattc

SEQ ID NO: 688909 - DNA, 15 bp, Homo sapiens
ttaaggatatattct

SEQ ID NO: 688910 - DNA, 15 bp, Homo sapiens
taaggatatattcta

SEQ ID NO: 688911 - DNA, 15 bp, Homo sapiens
aaggatatattctat

SEQ ID NO: 688912 - DNA, 15 bp, Homo sapiens
aggatatattctata

SEQ ID NO: 688913 - DNA, 15 bp, Homo sapiens
ggatatattctatat

SEQ ID NO: 688914 - DNA, 15 bp, Homo sapiens
gatatattctatatc

SEQ ID NO: 688915 - DNA, 15 bp, Homo sapiens
atatattctatatct

SEQ ID NO: 688916 - DNA, 15 bp, Homo sapiens
tatattctatatctc

SEQ ID NO: 688917 - DNA, 15 bp, Homo sapiens
atattctatatctcc

SEQ ID NO: 688918 - DNA, 15 bp, Homo sapiens
tattctatatctcca

SEQ ID NO: 688919 - DNA, 15 bp, Homo sapiens
attctatatctccaa

SEQ ID NO: 688920 - DNA, 15 bp, Homo sapiens
ttctatatctccaac

SEQ ID NO: 688921 - DNA, 15 bp, Homo sapiens
tctatatctccaact

SEQ ID NO: 688922 - DNA, 15 bp, Homo sapiens
ctatatctccaacta

SEQ ID NO: 688923 - DNA, 15 bp, Homo sapiens
tatatctccaactac

SEQ ID NO: 688924 - DNA, 15 bp, Homo sapiens
atatctccaactaca

SEQ ID NO: 688925 - DNA, 15 bp, Homo sapiens
tatctccaactacat

SEQ ID NO: 688926 - DNA, 15 bp, Homo sapiens
atctccaactacatt

SEQ ID NO: 688927 - DNA, 15 bp, Homo sapiens
tctccaactacatta

SEQ ID NO: 688928 - DNA, 15 bp, Homo sapiens
ctccaactacattat

SEQ ID NO: 688929 - DNA, 15 bp, Homo sapiens
tccaactacattatg

SEQ ID NO: 688930 - DNA, 15 bp, Homo sapiens
ccaactacattatga

SEQ ID NO: 688931 - DNA, 15 bp, Homo sapiens
caactacattatgag

SEQ ID NO: 688932 - DNA, 15 bp, Homo sapiens
aactacattatgagt

SEQ ID NO: 688933 - DNA, 15 bp, Homo sapiens
actacattatgagtt

SEQ ID NO: 688934 - DNA, 15 bp, Homo sapiens
ctacattatgagttc

SEQ ID NO: 688935 - DNA, 15 bp, Homo sapiens
tacattatgagttct

SEQ ID NO: 688936 - DNA, 15 bp, Homo sapiens
acattatgagttctt

SEQ ID NO: 688937 - DNA, 15 bp, Homo sapiens
cattatgagttcttt

SEQ ID NO: 688938 - DNA, 15 bp, Homo sapiens
attatgagttcttta

SEQ ID NO: 688939 - DNA, 15 bp, Homo sapiens
ttatgagttctttag

SEQ ID NO: 688940 - DNA, 15 bp, Homo sapiens
tatgagttctttagg

SEQ ID NO: 688941 - DNA, 15 bp, Homo sapiens
atgagttctttaggg

SEQ ID NO: 688942 - DNA, 15 bp, Homo sapiens
tgagttctttaggga

SEQ ID NO: 688943 - DNA, 15 bp, Homo sapiens
gagttctttagggat

SEQ ID NO: 688944 - DNA, 15 bp, Homo sapiens
agttctttagggata

SEQ ID NO: 688945 - DNA, 15 bp, Homo sapiens
gttctttagggatag

SEQ ID NO: 688946 - DNA, 15 bp, Homo sapiens
ttctttagggatagg

SEQ ID NO: 688947 - DNA, 15 bp, Homo sapiens
tctttagggatagga

SEQ ID NO: 688948 - DNA, 15 bp, Homo sapiens
ctttagggataggat

SEQ ID NO: 688949 - DNA, 15 bp, Homo sapiens
tttagggataggata

SEQ ID NO: 688950 - DNA, 15 bp, Homo sapiens
ttagggataggatac

SEQ ID NO: 688951 - DNA, 15 bp, Homo sapiens
tagggataggataca

SEQ ID NO: 688952 - DNA, 15 bp, Homo sapiens
agggataggatacat

SEQ ID NO: 688953 - DNA, 15 bp, Homo sapiens
gggataggatacatc

SEQ ID NO: 688954 - DNA, 15 bp, Homo sapiens
ggataggatacatct

SEQ ID NO: 688955 - DNA, 15 bp, Homo sapiens
gataggatacatctt

SEQ ID NO: 688956 - DNA, 15 bp, Homo sapiens
ataggatacatcttt

SEQ ID NO: 688957 - DNA, 15 bp, Homo sapiens
taggatacatctttt

SEQ ID NO: 688958 - DNA, 15 bp, Homo sapiens
aggatacatcttttg

SEQ ID NO: 688959 - DNA, 15 bp, Homo sapiens
ggatacatcttttga

SEQ ID NO: 688960 - DNA, 15 bp, Homo sapiens
gatacatcttttgaa

SEQ ID NO: 688961 - DNA, 15 bp, Homo sapiens
atacatcttttgaag

SEQ ID NO: 688962 - DNA, 15 bp, Homo sapiens
tacatcttttgaagt

SEQ ID NO: 688963 - DNA, 15 bp, Homo sapiens
acatcttttgaagtt

SEQ ID NO: 688964 - DNA, 15 bp, Homo sapiens
catcttttgaagttc

SEQ ID NO: 688965 - DNA, 15 bp, Homo sapiens
atcttttgaagttct

SEQ ID NO: 688966 - DNA, 15 bp, Homo sapiens
tcttttgaagttctc

SEQ ID NO: 688967 - DNA, 15 bp, Homo sapiens
cttttgaagttctca

SEQ ID NO: 688968 - DNA, 15 bp, Homo sapiens
ttttgaagttctcaa

SEQ ID NO: 688969 - DNA, 15 bp, Homo sapiens
tttgaagttctcaag

SEQ ID NO: 688970 - DNA, 15 bp, Homo sapiens
ttgaagttctcaagc

SEQ ID NO: 688971 - DNA, 15 bp, Homo sapiens
tgaagttctcaagct

SEQ ID NO: 688972 - DNA, 15 bp, Homo sapiens
gaagttctcaagctc

SEQ ID NO: 688973 - DNA, 15 bp, Homo sapiens
aagttctcaagctcc

SEQ ID NO: 688974 - DNA, 15 bp, Homo sapiens
agttctcaagctcct

SEQ ID NO: 688975 - DNA, 15 bp, Homo sapiens
gttctcaagctccta

SEQ ID NO: 688976 - DNA, 15 bp, Homo sapiens
ttctcaagctcctag

SEQ ID NO: 688977 - DNA, 15 bp, Homo sapiens
tctcaagctcctaga

SEQ ID NO: 688978 - DNA, 15 bp, Homo sapiens
ctcaagctcctagaa

SEQ ID NO: 688979 - DNA, 15 bp, Homo sapiens
tcaagctcctagaac

SEQ ID NO: 688980 - DNA, 15 bp, Homo sapiens
caagctcctagaact

SEQ ID NO: 688981 - DNA, 15 bp, Homo sapiens
aagctcctagaacta

SEQ ID NO: 688982 - DNA, 15 bp, Homo sapiens
agctcctagaactag

SEQ ID NO: 688983 - DNA, 15 bp, Homo sapiens
gctcctagaactagt

SEQ ID NO: 688984 - DNA, 15 bp, Homo sapiens
ctcctagaactagtg

SEQ ID NO: 688985 - DNA, 15 bp, Homo sapiens
tcctagaactagtgc

SEQ ID NO: 688986 - DNA, 15 bp, Homo sapiens
cctagaactagtgcc

SEQ ID NO: 688987 - DNA, 15 bp, Homo sapiens
ctagaactagtgcct

SEQ ID NO: 688988 - DNA, 15 bp, Homo sapiens
tagaactagtgcctt

SEQ ID NO: 688989 - DNA, 15 bp, Homo sapiens
agaactagtgccttg

SEQ ID NO: 688990 - DNA, 15 bp, Homo sapiens
gaactagtgccttgc

SEQ ID NO: 688991 - DNA, 15 bp, Homo sapiens
aactagtgccttgca

SEQ ID NO: 688992 - DNA, 15 bp, Homo sapiens
actagtgccttgcaa

SEQ ID NO: 688993 - DNA, 15 bp, Homo sapiens
ctagtgccttgcaaa

SEQ ID NO: 688994 - DNA, 15 bp, Homo sapiens
tagtgccttgcaaac

SEQ ID NO: 688995 - DNA, 15 bp, Homo sapiens
agtgccttgcaaaca

SEQ ID NO: 688996 - DNA, 15 bp, Homo sapiens
gtgccttgcaaacag

SEQ ID NO: 688997 - DNA, 15 bp, Homo sapiens
tgccttgcaaacaga

SEQ ID NO: 688998 - DNA, 15 bp, Homo sapiens
gccttgcaaacagaa

SEQ ID NO: 688999 - DNA, 15 bp, Homo sapiens
ccttgcaaacagaaa

SEQ ID NO: 689000 - DNA, 15 bp, Homo sapiens
cttgcaaacagaaag

SEQ ID NO: 689001 - DNA, 15 bp, Homo sapiens
ttgcaaacagaaaga

SEQ ID NO: 689002 - DNA, 15 bp, Homo sapiens
tgcaaacagaaagaa

SEQ ID NO: 689003 - DNA, 15 bp, Homo sapiens
gcaaacagaaagaat

SEQ ID NO: 689004 - DNA, 15 bp, Homo sapiens
caaacagaaagaatt

SEQ ID NO: 689005 - DNA, 15 bp, Homo sapiens
aaacagaaagaattt

SEQ ID NO: 689006 - DNA, 15 bp, Homo sapiens
aacagaaagaatttt

SEQ ID NO: 689007 - DNA, 15 bp, Homo sapiens
acagaaagaatttta

SEQ ID NO: 689008 - DNA, 15 bp, Homo sapiens
cagaaagaattttat

SEQ ID NO: 689009 - DNA, 15 bp, Homo sapiens
agaaagaattttata

SEQ ID NO: 689010 - DNA, 15 bp, Homo sapiens
gaaagaattttatac

SEQ ID NO: 689011 - DNA, 15 bp, Homo sapiens
aaagaattttatacc

SEQ ID NO: 689012 - DNA, 15 bp, Homo sapiens
aagaattttatacct

SEQ ID NO: 689013 - DNA, 15 bp, Homo sapiens
agaattttatacctt

SEQ ID NO: 689014 - DNA, 15 bp, Homo sapiens
gaattttataccttt

SEQ ID NO: 689015 - DNA, 15 bp, Homo sapiens
aattttatacctttt

SEQ ID NO: 689016 - DNA, 15 bp, Homo sapiens
attttataccttttg

SEQ ID NO: 689017 - DNA, 15 bp, Homo sapiens
ttttataccttttga

SEQ ID NO: 689018 - DNA, 15 bp, Homo sapiens
tttataccttttgat

SEQ ID NO: 689019 - DNA, 15 bp, Homo sapiens
ttataccttttgatt

SEQ ID NO: 689020 - DNA, 15 bp, Homo sapiens
tataccttttgattg

SEQ ID NO: 689021 - DNA, 15 bp, Homo sapiens
ataccttttgattga

SEQ ID NO: 689022 - DNA, 15 bp, Homo sapiens
taccttttgattgac

SEQ ID NO: 689023 - DNA, 15 bp, Homo sapiens
accttttgattgaca

SEQ ID NO: 689024 - DNA, 15 bp, Homo sapiens
ccttttgattgacag

SEQ ID NO: 689025 - DNA, 15 bp, Homo sapiens
cttttgattgacaga

SEQ ID NO: 689026 - DNA, 15 bp, Homo sapiens
ttttgattgacagaa

SEQ ID NO: 689027 - DNA, 15 bp, Homo sapiens
tttgattgacagaaa

SEQ ID NO: 689028 - DNA, 15 bp, Homo sapiens
ttgattgacagaaaa

SEQ ID NO: 689029 - DNA, 15 bp, Homo sapiens
tgattgacagaaaat

SEQ ID NO: 689030 - DNA, 15 bp, Homo sapiens
gattgacagaaaata

SEQ ID NO: 689031 - DNA, 15 bp, Homo sapiens
attgacagaaaatat

SEQ ID NO: 689032 - DNA, 15 bp, Homo sapiens
ttgacagaaaatata

SEQ ID NO: 689033 - DNA, 15 bp, Homo sapiens
tgacagaaaatatac

SEQ ID NO: 689034 - DNA, 15 bp, Homo sapiens
gacagaaaatataca

SEQ ID NO: 689035 - DNA, 15 bp, Homo sapiens
acagaaaatatacag

SEQ ID NO: 689036 - DNA, 15 bp, Homo sapiens
cagaaaatatacagt

SEQ ID NO: 689037 - DNA, 15 bp, Homo sapiens
agaaaatatacagtg

SEQ ID NO: 689038 - DNA, 15 bp, Homo sapiens
gaaaatatacagtgg

SEQ ID NO: 689039 - DNA, 15 bp, Homo sapiens
aaaatatacagtgga

SEQ ID NO: 689040 - DNA, 15 bp, Homo sapiens
aaatatacagtggac

SEQ ID NO: 689041 - DNA, 15 bp, Homo sapiens
aatatacagtggact

SEQ ID NO: 689042 - DNA, 15 bp, Homo sapiens
atatacagtggacta

SEQ ID NO: 689043 - DNA, 15 bp, Homo sapiens
tatacagtggactaa

SEQ ID NO: 689044 - DNA, 15 bp, Homo sapiens
atacagtggactaag

SEQ ID NO: 689045 - DNA, 15 bp, Homo sapiens
tacagtggactaaga

SEQ ID NO: 689046 - DNA, 15 bp, Homo sapiens
acagtggactaagaa

SEQ ID NO: 689047 - DNA, 15 bp, Homo sapiens
cagtggactaagaag

SEQ ID NO: 689048 - DNA, 15 bp, Homo sapiens
agtggactaagaaga

SEQ ID NO: 689049 - DNA, 15 bp, Homo sapiens
gtggactaagaagac

SEQ ID NO: 689050 - DNA, 15 bp, Homo sapiens
tggactaagaagacc

SEQ ID NO: 689051 - DNA, 15 bp, Homo sapiens
ggactaagaagacca

SEQ ID NO: 689052 - DNA, 15 bp, Homo sapiens
gactaagaagaccac

SEQ ID NO: 689053 - DNA, 15 bp, Homo sapiens
actaagaagaccaca

SEQ ID NO: 689054 - DNA, 15 bp, Homo sapiens
ctaagaagaccacag

SEQ ID NO: 689055 - DNA, 15 bp, Homo sapiens
taagaagaccacagt

SEQ ID NO: 689056 - DNA, 15 bp, Homo sapiens
aagaagaccacagtg

SEQ ID NO: 689057 - DNA, 15 bp, Homo sapiens
agaagaccacagtgt

SEQ ID NO: 689058 - DNA, 15 bp, Homo sapiens
gaagaccacagtgtc

SEQ ID NO: 689059 - DNA, 15 bp, Homo sapiens
aagaccacagtgtca

SEQ ID NO: 689060 - DNA, 15 bp, Homo sapiens
agaccacagtgtcag

SEQ ID NO: 689061 - DNA, 15 bp, Homo sapiens
gaccacagtgtcagc

SEQ ID NO: 689062 - DNA, 15 bp, Homo sapiens
accacagtgtcagca

SEQ ID NO: 689063 - DNA, 15 bp, Homo sapiens
ccacagtgtcagcac

SEQ ID NO: 689064 - DNA, 15 bp, Homo sapiens
cacagtgtcagcaca

SEQ ID NO: 689065 - DNA, 15 bp, Homo sapiens
acagtgtcagcacac

SEQ ID NO: 689066 - DNA, 15 bp, Homo sapiens
cagtgtcagcacaca

SEQ ID NO: 689067 - DNA, 15 bp, Homo sapiens
agtgtcagcacacag

SEQ ID NO: 689068 - DNA, 15 bp, Homo sapiens
gtgtcagcacacagt

SEQ ID NO: 689069 - DNA, 15 bp, Homo sapiens
tgtcagcacacagtt

SEQ ID NO: 689070 - DNA, 15 bp, Homo sapiens
gtcagcacacagttt

SEQ ID NO: 689071 - DNA, 15 bp, Homo sapiens
tcagcacacagtttc

SEQ ID NO: 689072 - DNA, 15 bp, Homo sapiens
cagcacacagtttca

SEQ ID NO: 689073 - DNA, 15 bp, Homo sapiens
agcacacagtttcac

SEQ ID NO: 689074 - DNA, 15 bp, Homo sapiens
gcacacagtttcacc

SEQ ID NO: 689075 - DNA, 15 bp, Homo sapiens
cacacagtttcacct

SEQ ID NO: 689076 - DNA, 15 bp, Homo sapiens
acacagtttcacctg

SEQ ID NO: 689077 - DNA, 15 bp, Homo sapiens
cacagtttcacctga

SEQ ID NO: 689078 - DNA, 15 bp, Homo sapiens
acagtttcacctgaa

SEQ ID NO: 689079 - DNA, 15 bp, Homo sapiens
cagtttcacctgaaa

SEQ ID NO: 689080 - DNA, 15 bp, Homo sapiens
agtttcacctgaaat

SEQ ID NO: 689081 - DNA, 15 bp, Homo sapiens
gtttcacctgaaata

SEQ ID NO: 689082 - DNA, 15 bp, Homo sapiens
tttcacctgaaatag

SEQ ID NO: 689083 - DNA, 15 bp, Homo sapiens
ttcacctgaaataga

SEQ ID NO: 689084 - DNA, 15 bp, Homo sapiens
tcacctgaaatagat

SEQ ID NO: 689085 - DNA, 15 bp, Homo sapiens
cacctgaaatagatt

SEQ ID NO: 689086 - DNA, 15 bp, Homo sapiens
acctgaaatagattg

SEQ ID NO: 689087 - DNA, 15 bp, Homo sapiens
cctgaaatagattgg

SEQ ID NO: 689088 - DNA, 15 bp, Homo sapiens
ctgaaatagattgga

SEQ ID NO: 689089 - DNA, 15 bp, Homo sapiens
tgaaatagattggag

SEQ ID NO: 689090 - DNA, 15 bp, Homo sapiens
gaaatagattggaga

SEQ ID NO: 689091 - DNA, 15 bp, Homo sapiens
aaatagattggagag

SEQ ID NO: 689092 - DNA, 15 bp, Homo sapiens
aatagattggagagg

SEQ ID NO: 689093 - DNA, 15 bp, Homo sapiens
atagattggagagga

SEQ ID NO: 689094 - DNA, 15 bp, Homo sapiens
tagattggagaggag

SEQ ID NO: 689095 - DNA, 15 bp, Homo sapiens
agattggagaggaga

SEQ ID NO: 689096 - DNA, 15 bp, Homo sapiens
gattggagaggagac

SEQ ID NO: 689097 - DNA, 15 bp, Homo sapiens
attggagaggagaca

SEQ ID NO: 689098 - DNA, 15 bp, Homo sapiens
ttggagaggagacat

SEQ ID NO: 689099 - DNA, 15 bp, Homo sapiens
tggagaggagacata

SEQ ID NO: 689100 - DNA, 15 bp, Homo sapiens
ggagaggagacatat

SEQ ID NO: 689101 - DNA, 15 bp, Homo sapiens
gagaggagacatatt

SEQ ID NO: 689102 - DNA, 15 bp, Homo sapiens
agaggagacatattt

SEQ ID NO: 689103 - DNA, 15 bp, Homo sapiens
gaggagacatatttc

SEQ ID NO: 689104 - DNA, 15 bp, Homo sapiens
aggagacatatttca

SEQ ID NO: 689105 - DNA, 15 bp, Homo sapiens
ggagacatatttcat

SEQ ID NO: 689106 - DNA, 15 bp, Homo sapiens
gagacatatttcatt

SEQ ID NO: 689107 - DNA, 15 bp, Homo sapiens
agacatatttcattt

SEQ ID NO: 689108 - DNA, 15 bp, Homo sapiens
gacatatttcatttt

SEQ ID NO: 689109 - DNA, 15 bp, Homo sapiens
acatatttcattttc

SEQ ID NO: 689110 - DNA, 15 bp, Homo sapiens
catatttcattttca

SEQ ID NO: 689111 - DNA, 15 bp, Homo sapiens
atatttcattttcac

SEQ ID NO: 689112 - DNA, 15 bp, Homo sapiens
tatttcattttcaca

SEQ ID NO: 689113 - DNA, 15 bp, Homo sapiens
atttcattttcacaa

SEQ ID NO: 689114 - DNA, 15 bp, Homo sapiens
tttcattttcacaat

SEQ ID NO: 689115 - DNA, 15 bp, Homo sapiens
ttcattttcacaatg

SEQ ID NO: 689116 - DNA, 15 bp, Homo sapiens
tcattttcacaatga

SEQ ID NO: 689117 - DNA, 15 bp, Homo sapiens
cattttcacaatgaa

SEQ ID NO: 689118 - DNA, 15 bp, Homo sapiens
attttcacaatgaat

SEQ ID NO: 689119 - DNA, 15 bp, Homo sapiens
ttttcacaatgaatg

SEQ ID NO: 689120 - DNA, 15 bp, Homo sapiens
tttcacaatgaatgt

SEQ ID NO: 689121 - DNA, 15 bp, Homo sapiens
ttcacaatgaatgtt

SEQ ID NO: 689122 - DNA, 15 bp, Homo sapiens
tcacaatgaatgttg

SEQ ID NO: 689123 - DNA, 15 bp, Homo sapiens
cacaatgaatgttgg

SEQ ID NO: 689124 - DNA, 15 bp, Homo sapiens
acaatgaatgttggt

SEQ ID NO: 689125 - DNA, 15 bp, Homo sapiens
caatgaatgttggtt

SEQ ID NO: 689126 - DNA, 15 bp, Homo sapiens
aatgaatgttggttc

SEQ ID NO: 689127 - DNA, 15 bp, Homo sapiens
atgaatgttggttcg

SEQ ID NO: 689128 - DNA, 15 bp, Homo sapiens
tgaatgttggttcgg

SEQ ID NO: 689129 - DNA, 15 bp, Homo sapiens
gaatgttggttcggt

SEQ ID NO: 689130 - DNA, 15 bp, Homo sapiens
aatgttggttcggtc

SEQ ID NO: 689131 - DNA, 15 bp, Homo sapiens
atgttggttcggtct

SEQ ID NO: 689132 - DNA, 15 bp, Homo sapiens
tgttggttcggtctc

SEQ ID NO: 689133 - DNA, 15 bp, Homo sapiens
gttggttcggtctct

SEQ ID NO: 689134 - DNA, 15 bp, Homo sapiens
ttggttcggtctctc

SEQ ID NO: 689135 - DNA, 15 bp, Homo sapiens
tggttcggtctctcc

SEQ ID NO: 689136 - DNA, 15 bp, Homo sapiens
ggttcggtctctcct

SEQ ID NO: 689137 - DNA, 15 bp, Homo sapiens
gttcggtctctcctt

SEQ ID NO: 689138 - DNA, 15 bp, Homo sapiens
ttcggtctctccttc

SEQ ID NO: 689139 - DNA, 15 bp, Homo sapiens
tcggtctctccttcc

SEQ ID NO: 689140 - DNA, 15 bp, Homo sapiens
cggtctctccttcct

SEQ ID NO: 689141 - DNA, 15 bp, Homo sapiens
ggtctctccttcctt

SEQ ID NO: 689142 - DNA, 15 bp, Homo sapiens
gtctctccttccttt

SEQ ID NO: 689143 - DNA, 15 bp, Homo sapiens
tctctccttcctttt

SEQ ID NO: 689144 - DNA, 15 bp, Homo sapiens
ctctccttccttttt

SEQ ID NO: 689145 - DNA, 15 bp, Homo sapiens
tctccttcctttttc

SEQ ID NO: 689146 - DNA, 15 bp, Homo sapiens
ctccttcctttttcc

SEQ ID NO: 689147 - DNA, 15 bp, Homo sapiens
tccttcctttttcct

SEQ ID NO: 689148 - DNA, 15 bp, Homo sapiens
ccttcctttttcctt

SEQ ID NO: 689149 - DNA, 15 bp, Homo sapiens
cttcctttttccttt

SEQ ID NO: 689150 - DNA, 15 bp, Homo sapiens
ttcctttttcctttg

SEQ ID NO: 689151 - DNA, 15 bp, Homo sapiens
tcctttttcctttgt

SEQ ID NO: 689152 - DNA, 15 bp, Homo sapiens
cctttttcctttgta

SEQ ID NO: 689153 - DNA, 15 bp, Homo sapiens
ctttttcctttgtat

SEQ ID NO: 689154 - DNA, 15 bp, Homo sapiens
tttttcctttgtatt

SEQ ID NO: 689155 - DNA, 15 bp, Homo sapiens
ttttcctttgtattc

SEQ ID NO: 689156 - DNA, 15 bp, Homo sapiens
tttcctttgtattct

SEQ ID NO: 689157 - DNA, 15 bp, Homo sapiens
ttcctttgtattcta

SEQ ID NO: 689158 - DNA, 15 bp, Homo sapiens
tcctttgtattctag

SEQ ID NO: 689159 - DNA, 15 bp, Homo sapiens
cctttgtattctagg

SEQ ID NO: 689160 - DNA, 15 bp, Homo sapiens
ctttgtattctaggt

SEQ ID NO: 689161 - DNA, 15 bp, Homo sapiens
tttgtattctaggtt

SEQ ID NO: 689162 - DNA, 15 bp, Homo sapiens
ttgtattctaggtta

SEQ ID NO: 689163 - DNA, 15 bp, Homo sapiens
tgtattctaggttag

SEQ ID NO: 689164 - DNA, 15 bp, Homo sapiens
gtattctaggttagt

SEQ ID NO: 689165 - DNA, 15 bp, Homo sapiens
tattctaggttagtt

SEQ ID NO: 689166 - DNA, 15 bp, Homo sapiens
attctaggttagttc

SEQ ID NO: 689167 - DNA, 15 bp, Homo sapiens
ttctaggttagttct

SEQ ID NO: 689168 - DNA, 15 bp, Homo sapiens
tctaggttagttcta

SEQ ID NO: 689169 - DNA, 15 bp, Homo sapiens
ctaggttagttctaa

SEQ ID NO: 689170 - DNA, 15 bp, Homo sapiens
taggttagttctaac

SEQ ID NO: 689171 - DNA, 15 bp, Homo sapiens
aggttagttctaact

SEQ ID NO: 689172 - DNA, 15 bp, Homo sapiens
ggttagttctaactt

SEQ ID NO: 689173 - DNA, 15 bp, Homo sapiens
gttagttctaacttt

SEQ ID NO: 689174 - DNA, 15 bp, Homo sapiens
ttagttctaactttc

SEQ ID NO: 689175 - DNA, 15 bp, Homo sapiens
tagttctaactttct

SEQ ID NO: 689176 - DNA, 15 bp, Homo sapiens
agttctaactttcta

SEQ ID NO: 689177 - DNA, 15 bp, Homo sapiens
gttctaactttctac

SEQ ID NO: 689178 - DNA, 15 bp, Homo sapiens
ttctaactttctacg

SEQ ID NO: 689179 - DNA, 15 bp, Homo sapiens
tctaactttctacgt

SEQ ID NO: 689180 - DNA, 15 bp, Homo sapiens
ctaactttctacgtt

SEQ ID NO: 689181 - DNA, 15 bp, Homo sapiens
taactttctacgttg

SEQ ID NO: 689182 - DNA, 15 bp, Homo sapiens
aactttctacgttgg

SEQ ID NO: 689183 - DNA, 15 bp, Homo sapiens
actttctacgttggt

SEQ ID NO: 689184 - DNA, 15 bp, Homo sapiens
ctttctacgttggta

SEQ ID NO: 689185 - DNA, 15 bp, Homo sapiens
tttctacgttggtac

SEQ ID NO: 689186 - DNA, 15 bp, Homo sapiens
ttctacgttggtacc

SEQ ID NO: 689187 - DNA, 15 bp, Homo sapiens
tctacgttggtacct

SEQ ID NO: 689188 - DNA, 15 bp, Homo sapiens
ctacgttggtacctt

SEQ ID NO: 689189 - DNA, 15 bp, Homo sapiens
tacgttggtaccttc

SEQ ID NO: 689190 - DNA, 15 bp, Homo sapiens
acgttggtaccttca

SEQ ID NO: 689191 - DNA, 15 bp, Homo sapiens
cgttggtaccttcaa

SEQ ID NO: 689192 - DNA, 15 bp, Homo sapiens
gttggtaccttcaac

SEQ ID NO: 689193 - DNA, 15 bp, Homo sapiens
ttggtaccttcaact

SEQ ID NO: 689194 - DNA, 15 bp, Homo sapiens
tggtaccttcaactt

SEQ ID NO: 689195 - DNA, 15 bp, Homo sapiens
ggtaccttcaacttt

SEQ ID NO: 689196 - DNA, 15 bp, Homo sapiens
gtaccttcaactttc

SEQ ID NO: 689197 - DNA, 15 bp, Homo sapiens
taccttcaactttct

SEQ ID NO: 689198 - DNA, 15 bp, Homo sapiens
accttcaactttctg

SEQ ID NO: 689199 - DNA, 15 bp, Homo sapiens
ccttcaactttctgt

SEQ ID NO: 689200 - DNA, 15 bp, Homo sapiens
cttcaactttctgtt

SEQ ID NO: 689201 - DNA, 15 bp, Homo sapiens
ttcaactttctgttt

SEQ ID NO: 689202 - DNA, 15 bp, Homo sapiens
tcaactttctgttta

SEQ ID NO: 689203 - DNA, 15 bp, Homo sapiens
caactttctgtttaa

SEQ ID NO: 689204 - DNA, 15 bp, Homo sapiens
aactttctgtttaat

SEQ ID NO: 689205 - DNA, 15 bp, Homo sapiens
actttctgtttaatc

SEQ ID NO: 689206 - DNA, 15 bp, Homo sapiens
ctttctgtttaatca

SEQ ID NO: 689207 - DNA, 15 bp, Homo sapiens
tttctgtttaatcac

SEQ ID NO: 689208 - DNA, 15 bp, Homo sapiens
ttctgtttaatcaca

SEQ ID NO: 689209 - DNA, 15 bp, Homo sapiens
tctgtttaatcacaa

SEQ ID NO: 689210 - DNA, 15 bp, Homo sapiens
ctgtttaatcacaaa

SEQ ID NO: 689211 - DNA, 15 bp, Homo sapiens
tgtttaatcacaaat

SEQ ID NO: 689212 - DNA, 15 bp, Homo sapiens
gtttaatcacaaatc

SEQ ID NO: 689213 - DNA, 15 bp, Homo sapiens
tttaatcacaaatct

SEQ ID NO: 689214 - DNA, 15 bp, Homo sapiens
ttaatcacaaatctc

SEQ ID NO: 689215 - DNA, 15 bp, Homo sapiens
taatcacaaatctcc

SEQ ID NO: 689216 - DNA, 15 bp, Homo sapiens
aatcacaaatctcct

SEQ ID NO: 689217 - DNA, 15 bp, Homo sapiens
atcacaaatctcctc

SEQ ID NO: 689218 - DNA, 15 bp, Homo sapiens
tcacaaatctcctcc

SEQ ID NO: 689219 - DNA, 15 bp, Homo sapiens
cacaaatctcctcct

SEQ ID NO: 689220 - DNA, 15 bp, Homo sapiens
acaaatctcctcctc

SEQ ID NO: 689221 - DNA, 15 bp, Homo sapiens
caaatctcctcctcc

SEQ ID NO: 689222 - DNA, 15 bp, Homo sapiens
aaatctcctcctcca

SEQ ID NO: 689223 - DNA, 15 bp, Homo sapiens
aatctcctcctccaa

SEQ ID NO: 689224 - DNA, 15 bp, Homo sapiens
atctcctcctccaat

SEQ ID NO: 689225 - DNA, 15 bp, Homo sapiens
tctcctcctccaatt

SEQ ID NO: 689226 - DNA, 15 bp, Homo sapiens
ctcctcctccaattg

SEQ ID NO: 689227 - DNA, 15 bp, Homo sapiens
tcctcctccaattgg

SEQ ID NO: 689228 - DNA, 15 bp, Homo sapiens
cctcctccaattggt

SEQ ID NO: 689229 - DNA, 15 bp, Homo sapiens
ctcctccaattggta

SEQ ID NO: 689230 - DNA, 15 bp, Homo sapiens
tcctccaattggtat

SEQ ID NO: 689231 - DNA, 15 bp, Homo sapiens
cctccaattggtatg

SEQ ID NO: 689232 - DNA, 15 bp, Homo sapiens
ctccaattggtatgt

SEQ ID NO: 689233 - DNA, 15 bp, Homo sapiens
tccaattggtatgtg

SEQ ID NO: 689234 - DNA, 15 bp, Homo sapiens
ccaattggtatgtgt

SEQ ID NO: 689235 - DNA, 15 bp, Homo sapiens
caattggtatgtgtt

SEQ ID NO: 689236 - DNA, 15 bp, Homo sapiens
aattggtatgtgtta

SEQ ID NO: 689237 - DNA, 15 bp, Homo sapiens
attggtatgtgttag

SEQ ID NO: 689238 - DNA, 15 bp, Homo sapiens
ttggtatgtgttagg

SEQ ID NO: 689239 - DNA, 15 bp, Homo sapiens
tggtatgtgttaggt

SEQ ID NO: 689240 - DNA, 15 bp, Homo sapiens
ggtatgtgttaggtc

SEQ ID NO: 689241 - DNA, 15 bp, Homo sapiens
gtatgtgttaggtct

SEQ ID NO: 689242 - DNA, 15 bp, Homo sapiens
tatgtgttaggtctg

SEQ ID NO: 689243 - DNA, 15 bp, Homo sapiens
atgtgttaggtctgt

SEQ ID NO: 689244 - DNA, 15 bp, Homo sapiens
tgtgttaggtctgta

SEQ ID NO: 689245 - DNA, 15 bp, Homo sapiens
gtgttaggtctgtat

SEQ ID NO: 689246 - DNA, 15 bp, Homo sapiens
tgttaggtctgtatt

SEQ ID NO: 689247 - DNA, 15 bp, Homo sapiens
gttaggtctgtattt

SEQ ID NO: 689248 - DNA, 15 bp, Homo sapiens
ttaggtctgtatttt

SEQ ID NO: 689249 - DNA, 15 bp, Homo sapiens
taggtctgtattttc

SEQ ID NO: 689250 - DNA, 15 bp, Homo sapiens
aggtctgtattttct

SEQ ID NO: 689251 - DNA, 15 bp, Homo sapiens
ggtctgtattttctt

SEQ ID NO: 689252 - DNA, 15 bp, Homo sapiens
gtctgtattttcttg

SEQ ID NO: 689253 - DNA, 15 bp, Homo sapiens
tctgtattttcttgt

SEQ ID NO: 689254 - DNA, 15 bp, Homo sapiens
ctgtattttcttgta

SEQ ID NO: 689255 - DNA, 15 bp, Homo sapiens
tgtattttcttgtac

SEQ ID NO: 689256 - DNA, 15 bp, Homo sapiens
gtattttcttgtacg

SEQ ID NO: 689257 - DNA, 15 bp, Homo sapiens
tattttcttgtacgt

SEQ ID NO: 689258 - DNA, 15 bp, Homo sapiens
attttcttgtacgtt

SEQ ID NO: 689259 - DNA, 15 bp, Homo sapiens
ttttcttgtacgttt

SEQ ID NO: 689260 - DNA, 15 bp, Homo sapiens
tttcttgtacgttta

SEQ ID NO: 689261 - DNA, 15 bp, Homo sapiens
ttcttgtacgtttat

SEQ ID NO: 689262 - DNA, 15 bp, Homo sapiens
tcttgtacgtttata

SEQ ID NO: 689263 - DNA, 15 bp, Homo sapiens
cttgtacgtttatat

SEQ ID NO: 689264 - DNA, 15 bp, Homo sapiens
ttgtacgtttatatc

SEQ ID NO: 689265 - DNA, 15 bp, Homo sapiens
tgtacgtttatatca

SEQ ID NO: 689266 - DNA, 15 bp, Homo sapiens
gtacgtttatatcag

SEQ ID NO: 689267 - DNA, 15 bp, Homo sapiens
tacgtttatatcagt

SEQ ID NO: 689268 - DNA, 15 bp, Homo sapiens
acgtttatatcagta

SEQ ID NO: 689269 - DNA, 15 bp, Homo sapiens
cgtttatatcagtag

SEQ ID NO: 689270 - DNA, 15 bp, Homo sapiens
gtttatatcagtagt

SEQ ID NO: 689271 - DNA, 15 bp, Homo sapiens
tttatatcagtagtg

SEQ ID NO: 689272 - DNA, 15 bp, Homo sapiens
ttatatcagtagtgc

SEQ ID NO: 689273 - DNA, 15 bp, Homo sapiens
tatatcagtagtgct

SEQ ID NO: 689274 - DNA, 15 bp, Homo sapiens
atatcagtagtgctt

SEQ ID NO: 689275 - DNA, 15 bp, Homo sapiens
tatcagtagtgctta

SEQ ID NO: 689276 - DNA, 15 bp, Homo sapiens
atcagtagtgcttac

SEQ ID NO: 689277 - DNA, 15 bp, Homo sapiens
tcagtagtgcttacc

SEQ ID NO: 689278 - DNA, 15 bp, Homo sapiens
cagtagtgcttacca

SEQ ID NO: 689279 - DNA, 15 bp, Homo sapiens
agtagtgcttaccaa

SEQ ID NO: 689280 - DNA, 15 bp, Homo sapiens
gtagtgcttaccaaa

SEQ ID NO: 689281 - DNA, 15 bp, Homo sapiens
tagtgcttaccaaaa

SEQ ID NO: 689282 - DNA, 15 bp, Homo sapiens
agtgcttaccaaaat

SEQ ID NO: 689283 - DNA, 15 bp, Homo sapiens
gtgcttaccaaaata

SEQ ID NO: 689284 - DNA, 15 bp, Homo sapiens
tgcttaccaaaataa

SEQ ID NO: 689285 - DNA, 15 bp, Homo sapiens
gcttaccaaaataag

SEQ ID NO: 689286 - DNA, 15 bp, Homo sapiens
cttaccaaaataagt

SEQ ID NO: 689287 - DNA, 15 bp, Homo sapiens
ttaccaaaataagta

SEQ ID NO: 689288 - DNA, 15 bp, Homo sapiens
taccaaaataagtag

SEQ ID NO: 689289 - DNA, 15 bp, Homo sapiens
accaaaataagtaga

SEQ ID NO: 689290 - DNA, 15 bp, Homo sapiens
ccaaaataagtagac

SEQ ID NO: 689291 - DNA, 15 bp, Homo sapiens
caaaataagtagaca

SEQ ID NO: 689292 - DNA, 15 bp, Homo sapiens
aaaataagtagacag

SEQ ID NO: 689293 - DNA, 15 bp, Homo sapiens
aaataagtagacagt

SEQ ID NO: 689294 - DNA, 15 bp, Homo sapiens
aataagtagacagta

SEQ ID NO: 689295 - DNA, 15 bp, Homo sapiens
ataagtagacagtaa

SEQ ID NO: 689296 - DNA, 15 bp, Homo sapiens
taagtagacagtaat

SEQ ID NO: 689297 - DNA, 15 bp, Homo sapiens
aagtagacagtaatc

SEQ ID NO: 689298 - DNA, 15 bp, Homo sapiens
agtagacagtaatcg

SEQ ID NO: 689299 - DNA, 15 bp, Homo sapiens
gtagacagtaatcgt

SEQ ID NO: 689300 - DNA, 15 bp, Homo sapiens
tagacagtaatcgtc

SEQ ID NO: 689301 - DNA, 15 bp, Homo sapiens
agacagtaatcgtct

SEQ ID NO: 689302 - DNA, 15 bp, Homo sapiens
gacagtaatcgtcta

SEQ ID NO: 689303 - DNA, 15 bp, Homo sapiens
acagtaatcgtctac

SEQ ID NO: 689304 - DNA, 15 bp, Homo sapiens
cagtaatcgtctact

SEQ ID NO: 689305 - DNA, 15 bp, Homo sapiens
agtaatcgtctactt

SEQ ID NO: 689306 - DNA, 15 bp, Homo sapiens
gtaatcgtctacttg

SEQ ID NO: 689307 - DNA, 15 bp, Homo sapiens
taatcgtctacttga

SEQ ID NO: 689308 - DNA, 15 bp, Homo sapiens
aatcgtctacttgag

SEQ ID NO: 689309 - DNA, 15 bp, Homo sapiens
atcgtctacttgaga

SEQ ID NO: 689310 - DNA, 15 bp, Homo sapiens
tcgtctacttgagag

SEQ ID NO: 689311 - DNA, 15 bp, Homo sapiens
cgtctacttgagaga

SEQ ID NO: 689312 - DNA, 15 bp, Homo sapiens
gtctacttgagagaa

SEQ ID NO: 689313 - DNA, 15 bp, Homo sapiens
tctacttgagagaac

SEQ ID NO: 689314 - DNA, 15 bp, Homo sapiens
ctacttgagagaact

SEQ ID NO: 689315 - DNA, 15 bp, Homo sapiens
tacttgagagaactg

SEQ ID NO: 689316 - DNA, 15 bp, Homo sapiens
acttgagagaactgt

SEQ ID NO: 689317 - DNA, 15 bp, Homo sapiens
cttgagagaactgtt

SEQ ID NO: 689318 - DNA, 15 bp, Homo sapiens
ttgagagaactgtta

SEQ ID NO: 689319 - DNA, 15 bp, Homo sapiens
tgagagaactgttaa

SEQ ID NO: 689320 - DNA, 15 bp, Homo sapiens
gagagaactgttaaa

SEQ ID NO: 689321 - DNA, 15 bp, Homo sapiens
agagaactgttaaat

SEQ ID NO: 689322 - DNA, 15 bp, Homo sapiens
gagaactgttaaatt

SEQ ID NO: 689323 - DNA, 15 bp, Homo sapiens
agaactgttaaatta

SEQ ID NO: 689324 - DNA, 15 bp, Homo sapiens
gaactgttaaattaa

SEQ ID NO: 689325 - DNA, 15 bp, Homo sapiens
aactgttaaattaag

SEQ ID NO: 689326 - DNA, 15 bp, Homo sapiens
actgttaaattaagg

SEQ ID NO: 689327 - DNA, 15 bp, Homo sapiens
ctgttaaattaaggt

SEQ ID NO: 689328 - DNA, 15 bp, Homo sapiens
tgttaaattaaggtc

SEQ ID NO: 689329 - DNA, 15 bp, Homo sapiens
gttaaattaaggtct

SEQ ID NO: 689330 - DNA, 15 bp, Homo sapiens
ttaaattaaggtctt

SEQ ID NO: 689331 - DNA, 15 bp, Homo sapiens
taaattaaggtcttc

SEQ ID NO: 689332 - DNA, 15 bp, Homo sapiens
aaattaaggtcttca

SEQ ID NO: 689333 - DNA, 15 bp, Homo sapiens
aattaaggtcttcac

SEQ ID NO: 689334 - DNA, 15 bp, Homo sapiens
attaaggtcttcact

SEQ ID NO: 689335 - DNA, 15 bp, Homo sapiens
ttaaggtcttcacta

SEQ ID NO: 689336 - DNA, 15 bp, Homo sapiens
taaggtcttcactat

SEQ ID NO: 689337 - DNA, 15 bp, Homo sapiens
aaggtcttcactata

SEQ ID NO: 689338 - DNA, 15 bp, Homo sapiens
aggtcttcactataa

SEQ ID NO: 689339 - DNA, 15 bp, Homo sapiens
ggtcttcactataac

SEQ ID NO: 689340 - DNA, 15 bp, Homo sapiens
gtcttcactataaca

SEQ ID NO: 689341 - DNA, 15 bp, Homo sapiens
tcttcactataacag

SEQ ID NO: 689342 - DNA, 15 bp, Homo sapiens
cttcactataacagg

SEQ ID NO: 689343 - DNA, 15 bp, Homo sapiens
ttcactataacaggc

SEQ ID NO: 689344 - DNA, 15 bp, Homo sapiens
tcactataacaggcc

SEQ ID NO: 689345 - DNA, 15 bp, Homo sapiens
cactataacaggcca

SEQ ID NO: 689346 - DNA, 15 bp, Homo sapiens
actataacaggccac

SEQ ID NO: 689347 - DNA, 15 bp, Homo sapiens
ctataacaggccacc

SEQ ID NO: 689348 - DNA, 15 bp, Homo sapiens
tataacaggccacca

SEQ ID NO: 689349 - DNA, 15 bp, Homo sapiens
ataacaggccaccaa

SEQ ID NO: 689350 - DNA, 15 bp, Homo sapiens
taacaggccaccaag

SEQ ID NO: 689351 - DNA, 15 bp, Homo sapiens
aacaggccaccaagc

SEQ ID NO: 689352 - DNA, 15 bp, Homo sapiens
acaggccaccaagct

SEQ ID NO: 689353 - DNA, 15 bp, Homo sapiens
caggccaccaagctg

SEQ ID NO: 689354 - DNA, 15 bp, Homo sapiens
aggccaccaagctgt

SEQ ID NO: 689355 - DNA, 15 bp, Homo sapiens
ggccaccaagctgtg

SEQ ID NO: 689356 - DNA, 15 bp, Homo sapiens
gccaccaagctgtgc

SEQ ID NO: 689357 - DNA, 15 bp, Homo sapiens
ccaccaagctgtgcc

SEQ ID NO: 689358 - DNA, 15 bp, Homo sapiens
caccaagctgtgcct

SEQ ID NO: 689359 - DNA, 15 bp, Homo sapiens
accaagctgtgccta

SEQ ID NO: 689360 - DNA, 15 bp, Homo sapiens
ccaagctgtgcctaa

SEQ ID NO: 689361 - DNA, 15 bp, Homo sapiens
caagctgtgcctaaa

SEQ ID NO: 689362 - DNA, 15 bp, Homo sapiens
aagctgtgcctaaaa

SEQ ID NO: 689363 - DNA, 15 bp, Homo sapiens
agctgtgcctaaaaa

SEQ ID NO: 689364 - DNA, 15 bp, Homo sapiens
gctgtgcctaaaaat

SEQ ID NO: 689365 - DNA, 15 bp, Homo sapiens
ctgtgcctaaaaatg

SEQ ID NO: 689366 - DNA, 15 bp, Homo sapiens
tgtgcctaaaaatga

SEQ ID NO: 689367 - DNA, 15 bp, Homo sapiens
gtgcctaaaaatgac

SEQ ID NO: 689368 - DNA, 15 bp, Homo sapiens
tgcctaaaaatgaca

SEQ ID NO: 689369 - DNA, 15 bp, Homo sapiens
gcctaaaaatgacaa

SEQ ID NO: 689370 - DNA, 15 bp, Homo sapiens
cctaaaaatgacaaa

SEQ ID NO: 689371 - DNA, 15 bp, Homo sapiens
ctaaaaatgacaaag

SEQ ID NO: 689372 - DNA, 15 bp, Homo sapiens
taaaaatgacaaagt

SEQ ID NO: 689373 - DNA, 15 bp, Homo sapiens
aaaaatgacaaagtg

SEQ ID NO: 689374 - DNA, 15 bp, Homo sapiens
aaaatgacaaagtgc

SEQ ID NO: 689375 - DNA, 15 bp, Homo sapiens
aaatgacaaagtgct

SEQ ID NO: 689376 - DNA, 15 bp, Homo sapiens
aatgacaaagtgcta

SEQ ID NO: 689377 - DNA, 15 bp, Homo sapiens
atgacaaagtgctat

SEQ ID NO: 689378 - DNA, 15 bp, Homo sapiens
tgacaaagtgctatg

SEQ ID NO: 689379 - DNA, 15 bp, Homo sapiens
gacaaagtgctatgc

SEQ ID NO: 689380 - DNA, 15 bp, Homo sapiens
acaaagtgctatgct

SEQ ID NO: 689381 - DNA, 15 bp, Homo sapiens
caaagtgctatgctt

SEQ ID NO: 689382 - DNA, 15 bp, Homo sapiens
aaagtgctatgctta

SEQ ID NO: 689383 - DNA, 15 bp, Homo sapiens
aagtgctatgcttac

SEQ ID NO: 689384 - DNA, 15 bp, Homo sapiens
agtgctatgcttact

SEQ ID NO: 689385 - DNA, 15 bp, Homo sapiens
gtgctatgcttactg

SEQ ID NO: 689386 - DNA, 15 bp, Homo sapiens
tgctatgcttactga

SEQ ID NO: 689387 - DNA, 15 bp, Homo sapiens
gctatgcttactgac

SEQ ID NO: 689388 - DNA, 15 bp, Homo sapiens
ctatgcttactgact

SEQ ID NO: 689389 - DNA, 15 bp, Homo sapiens
tatgcttactgactt

SEQ ID NO: 689390 - DNA, 15 bp, Homo sapiens
atgcttactgacttg

SEQ ID NO: 689391 - DNA, 15 bp, Homo sapiens
tgcttactgacttgg

SEQ ID NO: 689392 - DNA, 15 bp, Homo sapiens
gcttactgacttgga

SEQ ID NO: 689393 - DNA, 15 bp, Homo sapiens
cttactgacttggaa

SEQ ID NO: 689394 - DNA, 15 bp, Homo sapiens
ttactgacttggaag

SEQ ID NO: 689395 - DNA, 15 bp, Homo sapiens
tactgacttggaagg

SEQ ID NO: 689396 - DNA, 15 bp, Homo sapiens
actgacttggaagga

SEQ ID NO: 689397 - DNA, 15 bp, Homo sapiens
ctgacttggaaggat

SEQ ID NO: 689398 - DNA, 15 bp, Homo sapiens
tgacttggaaggatg

SEQ ID NO: 689399 - DNA, 15 bp, Homo sapiens
gacttggaaggatgt

SEQ ID NO: 689400 - DNA, 15 bp, Homo sapiens
acttggaaggatgtc

SEQ ID NO: 689401 - DNA, 15 bp, Homo sapiens
cttggaaggatgtct

SEQ ID NO: 689402 - DNA, 15 bp, Homo sapiens
ttggaaggatgtctg

SEQ ID NO: 689403 - DNA, 15 bp, Homo sapiens
tggaaggatgtctga

SEQ ID NO: 689404 - DNA, 15 bp, Homo sapiens
ggaaggatgtctgag

SEQ ID NO: 689405 - DNA, 15 bp, Homo sapiens
gaaggatgtctgaga

SEQ ID NO: 689406 - DNA, 15 bp, Homo sapiens
aaggatgtctgagac

SEQ ID NO: 689407 - DNA, 15 bp, Homo sapiens
aggatgtctgagaca

SEQ ID NO: 689408 - DNA, 15 bp, Homo sapiens
ggatgtctgagacat

SEQ ID NO: 689409 - DNA, 15 bp, Homo sapiens
gatgtctgagacata

SEQ ID NO: 689410 - DNA, 15 bp, Homo sapiens
atgtctgagacatat

SEQ ID NO: 689411 - DNA, 15 bp, Homo sapiens
tgtctgagacatatg

SEQ ID NO: 689412 - DNA, 15 bp, Homo sapiens
gtctgagacatatgt

SEQ ID NO: 689413 - DNA, 15 bp, Homo sapiens
tctgagacatatgtt

SEQ ID NO: 689414 - DNA, 15 bp, Homo sapiens
ctgagacatatgttt

SEQ ID NO: 689415 - DNA, 15 bp, Homo sapiens
tgagacatatgtttg

SEQ ID NO: 689416 - DNA, 15 bp, Homo sapiens
gagacatatgtttgg

SEQ ID NO: 689417 - DNA, 15 bp, Homo sapiens
agacatatgtttggc

SEQ ID NO: 689418 - DNA, 15 bp, Homo sapiens
gacatatgtttggca

SEQ ID NO: 689419 - DNA, 15 bp, Homo sapiens
acatatgtttggcag

SEQ ID NO: 689420 - DNA, 15 bp, Homo sapiens
catatgtttggcaga

SEQ ID NO: 689421 - DNA, 15 bp, Homo sapiens
atatgtttggcagaa

SEQ ID NO: 689422 - DNA, 15 bp, Homo sapiens
tatgtttggcagaaa

SEQ ID NO: 689423 - DNA, 15 bp, Homo sapiens
atgtttggcagaaaa

SEQ ID NO: 689424 - DNA, 15 bp, Homo sapiens
tgtttggcagaaaaa

SEQ ID NO: 689425 - DNA, 15 bp, Homo sapiens
gtttggcagaaaaag

SEQ ID NO: 689426 - DNA, 15 bp, Homo sapiens
tttggcagaaaaaga

SEQ ID NO: 689427 - DNA, 15 bp, Homo sapiens
ttggcagaaaaagag

SEQ ID NO: 689428 - DNA, 15 bp, Homo sapiens
tggcagaaaaagagt

SEQ ID NO: 689429 - DNA, 15 bp, Homo sapiens
ggcagaaaaagagta

SEQ ID NO: 689430 - DNA, 15 bp, Homo sapiens
gcagaaaaagagtaa

SEQ ID NO: 689431 - DNA, 15 bp, Homo sapiens
cagaaaaagagtaag

SEQ ID NO: 689432 - DNA, 15 bp, Homo sapiens
agaaaaagagtaagt

SEQ ID NO: 689433 - DNA, 15 bp, Homo sapiens
gaaaaagagtaagtt

SEQ ID NO: 689434 - DNA, 15 bp, Homo sapiens
aaaaagagtaagtta

SEQ ID NO: 689435 - DNA, 15 bp, Homo sapiens
aaaagagtaagttag

SEQ ID NO: 689436 - DNA, 15 bp, Homo sapiens
aaagagtaagttagg

SEQ ID NO: 689437 - DNA, 15 bp, Homo sapiens
aagagtaagttagga

SEQ ID NO: 689438 - DNA, 15 bp, Homo sapiens
agagtaagttaggaa

SEQ ID NO: 689439 - DNA, 15 bp, Homo sapiens
gagtaagttaggaaa

SEQ ID NO: 689440 - DNA, 15 bp, Homo sapiens
agtaagttaggaaag

SEQ ID NO: 689441 - DNA, 15 bp, Homo sapiens
gtaagttaggaaaga

SEQ ID NO: 689442 - DNA, 15 bp, Homo sapiens
taagttaggaaagag

SEQ ID NO: 689443 - DNA, 15 bp, Homo sapiens
aagttaggaaagagc

SEQ ID NO: 689444 - DNA, 15 bp, Homo sapiens
agttaggaaagagca

SEQ ID NO: 689445 - DNA, 15 bp, Homo sapiens
gttaggaaagagcat

SEQ ID NO: 689446 - DNA, 15 bp, Homo sapiens
ttaggaaagagcatg

SEQ ID NO: 689447 - DNA, 15 bp, Homo sapiens
taggaaagagcatga

SEQ ID NO: 689448 - DNA, 15 bp, Homo sapiens
aggaaagagcatgaa

SEQ ID NO: 689449 - DNA, 15 bp, Homo sapiens
ggaaagagcatgaag

SEQ ID NO: 689450 - DNA, 15 bp, Homo sapiens
gaaagagcatgaaga

SEQ ID NO: 689451 - DNA, 15 bp, Homo sapiens
aaagagcatgaagag

SEQ ID NO: 689452 - DNA, 15 bp, Homo sapiens
aagagcatgaagagt

SEQ ID NO: 689453 - DNA, 15 bp, Homo sapiens
agagcatgaagagtt

SEQ ID NO: 689454 - DNA, 15 bp, Homo sapiens
gagcatgaagagttt

SEQ ID NO: 689455 - DNA, 15 bp, Homo sapiens
agcatgaagagttta

SEQ ID NO: 689456 - DNA, 15 bp, Homo sapiens
gcatgaagagtttaa

SEQ ID NO: 689457 - DNA, 15 bp, Homo sapiens
catgaagagtttaat

SEQ ID NO: 689458 - DNA, 15 bp, Homo sapiens
atgaagagtttaatt

SEQ ID NO: 689459 - DNA, 15 bp, Homo sapiens
tgaagagtttaattc

SEQ ID NO: 689460 - DNA, 15 bp, Homo sapiens
gaagagtttaattcc

SEQ ID NO: 689461 - DNA, 15 bp, Homo sapiens
aagagtttaattcca

SEQ ID NO: 689462 - DNA, 15 bp, Homo sapiens
agagtttaattccat

SEQ ID NO: 689463 - DNA, 15 bp, Homo sapiens
gagtttaattccatt

SEQ ID NO: 689464 - DNA, 15 bp, Homo sapiens
agtttaattccattt

SEQ ID NO: 689465 - DNA, 15 bp, Homo sapiens
gtttaattccattta

SEQ ID NO: 689466 - DNA, 15 bp, Homo sapiens
tttaattccatttat

SEQ ID NO: 689467 - DNA, 15 bp, Homo sapiens
ttaattccatttata

SEQ ID NO: 689468 - DNA, 15 bp, Homo sapiens
taattccatttatat

SEQ ID NO: 689469 - DNA, 15 bp, Homo sapiens
aattccatttatata

SEQ ID NO: 689470 - DNA, 15 bp, Homo sapiens
attccatttatataa

SEQ ID NO: 689471 - DNA, 15 bp, Homo sapiens
ttccatttatataaa

SEQ ID NO: 689472 - DNA, 15 bp, Homo sapiens
tccatttatataaaa

SEQ ID NO: 689473 - DNA, 15 bp, Homo sapiens
ccatttatataaaac

SEQ ID NO: 689474 - DNA, 15 bp, Homo sapiens
catttatataaaact

SEQ ID NO: 689475 - DNA, 15 bp, Homo sapiens
atttatataaaactt

SEQ ID NO: 689476 - DNA, 15 bp, Homo sapiens
tttatataaaacttt

SEQ ID NO: 689477 - DNA, 15 bp, Homo sapiens
ttatataaaactttt

SEQ ID NO: 689478 - DNA, 15 bp, Homo sapiens
tatataaaactttta

SEQ ID NO: 689479 - DNA, 15 bp, Homo sapiens
atataaaacttttaa

SEQ ID NO: 689480 - DNA, 15 bp, Homo sapiens
tataaaacttttaaa

SEQ ID NO: 689481 - DNA, 15 bp, Homo sapiens
ataaaacttttaaac

SEQ ID NO: 689482 - DNA, 15 bp, Homo sapiens
taaaacttttaaaca

SEQ ID NO: 689483 - DNA, 15 bp, Homo sapiens
aaaacttttaaacac

SEQ ID NO: 689484 - DNA, 15 bp, Homo sapiens
aaacttttaaacaca

SEQ ID NO: 689485 - DNA, 15 bp, Homo sapiens
aacttttaaacacac

SEQ ID NO: 689486 - DNA, 15 bp, Homo sapiens
acttttaaacacaca

SEQ ID NO: 689487 - DNA, 15 bp, Homo sapiens
cttttaaacacacat

SEQ ID NO: 689488 - DNA, 15 bp, Homo sapiens
ttttaaacacacatg

SEQ ID NO: 689489 - DNA, 15 bp, Homo sapiens
tttaaacacacatgt

SEQ ID NO: 689490 - DNA, 15 bp, Homo sapiens
ttaaacacacatgtt

SEQ ID NO: 689491 - DNA, 15 bp, Homo sapiens
taaacacacatgtta

SEQ ID NO: 689492 - DNA, 15 bp, Homo sapiens
aaacacacatgttat

SEQ ID NO: 689493 - DNA, 15 bp, Homo sapiens
aacacacatgttata

SEQ ID NO: 689494 - DNA, 15 bp, Homo sapiens
acacacatgttatat

SEQ ID NO: 689495 - DNA, 15 bp, Homo sapiens
cacacatgttatata

SEQ ID NO: 689496 - DNA, 15 bp, Homo sapiens
acacatgttatatat

SEQ ID NO: 689497 - DNA, 15 bp, Homo sapiens
cacatgttatatata

SEQ ID NO: 689498 - DNA, 15 bp, Homo sapiens
acatgttatatatat

SEQ ID NO: 689499 - DNA, 15 bp, Homo sapiens
catgttatatatatt

SEQ ID NO: 689500 - DNA, 15 bp, Homo sapiens
atgttatatatatta

SEQ ID NO: 689501 - DNA, 15 bp, Homo sapiens
tgttatatatattac

SEQ ID NO: 689502 - DNA, 15 bp, Homo sapiens
gttatatatattacc

SEQ ID NO: 689503 - DNA, 15 bp, Homo sapiens
ttatatatattacca

SEQ ID NO: 689504 - DNA, 15 bp, Homo sapiens
tatatatattaccaa

SEQ ID NO: 689505 - DNA, 15 bp, Homo sapiens
atatatattaccaaa

SEQ ID NO: 689506 - DNA, 15 bp, Homo sapiens
tatatattaccaaaa

SEQ ID NO: 689507 - DNA, 15 bp, Homo sapiens
atatattaccaaaat

SEQ ID NO: 689508 - DNA, 15 bp, Homo sapiens
tatattaccaaaatg

SEQ ID NO: 689509 - DNA, 15 bp, Homo sapiens
atattaccaaaatgt

SEQ ID NO: 689510 - DNA, 15 bp, Homo sapiens
tattaccaaaatgtt

SEQ ID NO: 689511 - DNA, 15 bp, Homo sapiens
attaccaaaatgtta

SEQ ID NO: 689512 - DNA, 15 bp, Homo sapiens
ttaccaaaatgttaa

SEQ ID NO: 689513 - DNA, 15 bp, Homo sapiens
taccaaaatgttaac

SEQ ID NO: 689514 - DNA, 15 bp, Homo sapiens
accaaaatgttaaca

SEQ ID NO: 689515 - DNA, 15 bp, Homo sapiens
ccaaaatgttaacaa

SEQ ID NO: 689516 - DNA, 15 bp, Homo sapiens
caaaatgttaacaat

SEQ ID NO: 689517 - DNA, 15 bp, Homo sapiens
aaaatgttaacaata

SEQ ID NO: 689518 - DNA, 15 bp, Homo sapiens
aaatgttaacaatag

SEQ ID NO: 689519 - DNA, 15 bp, Homo sapiens
aatgttaacaatagt

SEQ ID NO: 689520 - DNA, 15 bp, Homo sapiens
atgttaacaatagtt

SEQ ID NO: 689521 - DNA, 15 bp, Homo sapiens
tgttaacaatagtta

SEQ ID NO: 689522 - DNA, 15 bp, Homo sapiens
gttaacaatagttat

SEQ ID NO: 689523 - DNA, 15 bp, Homo sapiens
ttaacaatagttatt

SEQ ID NO: 689524 - DNA, 15 bp, Homo sapiens
taacaatagttattt

SEQ ID NO: 689525 - DNA, 15 bp, Homo sapiens
aacaatagttatttc

SEQ ID NO: 689526 - DNA, 15 bp, Homo sapiens
acaatagttatttct

SEQ ID NO: 689527 - DNA, 15 bp, Homo sapiens
caatagttatttcta

SEQ ID NO: 689528 - DNA, 15 bp, Homo sapiens
aatagttatttctag

SEQ ID NO: 689529 - DNA, 15 bp, Homo sapiens
atagttatttctagg

SEQ ID NO: 689530 - DNA, 15 bp, Homo sapiens
tagttatttctaggc

SEQ ID NO: 689531 - DNA, 15 bp, Homo sapiens
agttatttctaggca

SEQ ID NO: 689532 - DNA, 15 bp, Homo sapiens
gttatttctaggcaa

SEQ ID NO: 689533 - DNA, 15 bp, Homo sapiens
ttatttctaggcaac

SEQ ID NO: 689534 - DNA, 15 bp, Homo sapiens
tatttctaggcaacg

SEQ ID NO: 689535 - DNA, 15 bp, Homo sapiens
atttctaggcaacgg

SEQ ID NO: 689536 - DNA, 15 bp, Homo sapiens
tttctaggcaacggt

SEQ ID NO: 689537 - DNA, 15 bp, Homo sapiens
ttctaggcaacggta

SEQ ID NO: 689538 - DNA, 15 bp, Homo sapiens
tctaggcaacggtat

SEQ ID NO: 689539 - DNA, 15 bp, Homo sapiens
ctaggcaacggtatt

SEQ ID NO: 689540 - DNA, 15 bp, Homo sapiens
taggcaacggtattt

SEQ ID NO: 689541 - DNA, 15 bp, Homo sapiens
aggcaacggtatttc

SEQ ID NO: 689542 - DNA, 15 bp, Homo sapiens
ggcaacggtatttct

SEQ ID NO: 689543 - DNA, 15 bp, Homo sapiens
gcaacggtatttctt

SEQ ID NO: 689544 - DNA, 15 bp, Homo sapiens
caacggtatttcttt

SEQ ID NO: 689545 - DNA, 15 bp, Homo sapiens
aacggtatttcttta

SEQ ID NO: 689546 - DNA, 15 bp, Homo sapiens
acggtatttctttat

SEQ ID NO: 689547 - DNA, 15 bp, Homo sapiens
cggtatttctttata

SEQ ID NO: 689548 - DNA, 15 bp, Homo sapiens
ggtatttctttatat

SEQ ID NO: 689549 - DNA, 15 bp, Homo sapiens
gtatttctttatatt

SEQ ID NO: 689550 - DNA, 15 bp, Homo sapiens
tatttctttatattg

SEQ ID NO: 689551 - DNA, 15 bp, Homo sapiens
atttctttatattgt

SEQ ID NO: 689552 - DNA, 15 bp, Homo sapiens
tttctttatattgtt

SEQ ID NO: 689553 - DNA, 15 bp, Homo sapiens
ttctttatattgttc

SEQ ID NO: 689554 - DNA, 15 bp, Homo sapiens
tctttatattgttca

SEQ ID NO: 689555 - DNA, 15 bp, Homo sapiens
ctttatattgttcaa

SEQ ID NO: 689556 - DNA, 15 bp, Homo sapiens
tttatattgttcaat

SEQ ID NO: 689557 - DNA, 15 bp, Homo sapiens
ttatattgttcaatg

SEQ ID NO: 689558 - DNA, 15 bp, Homo sapiens
tatattgttcaatgt

SEQ ID NO: 689559 - DNA, 15 bp, Homo sapiens
atattgttcaatgtt

SEQ ID NO: 689560 - DNA, 15 bp, Homo sapiens
tattgttcaatgttg

SEQ ID NO: 689561 - DNA, 15 bp, Homo sapiens
attgttcaatgttgt

SEQ ID NO: 689562 - DNA, 15 bp, Homo sapiens
ttgttcaatgttgtt

SEQ ID NO: 689563 - DNA, 15 bp, Homo sapiens
tgttcaatgttgttt

SEQ ID NO: 689564 - DNA, 15 bp, Homo sapiens
gttcaatgttgtttg

SEQ ID NO: 689565 - DNA, 15 bp, Homo sapiens
ttcaatgttgtttga

SEQ ID NO: 689566 - DNA, 15 bp, Homo sapiens
tcaatgttgtttgaa

SEQ ID NO: 689567 - DNA, 15 bp, Homo sapiens
caatgttgtttgaag

SEQ ID NO: 689568 - DNA, 15 bp, Homo sapiens
aatgttgtttgaagg

SEQ ID NO: 689569 - DNA, 15 bp, Homo sapiens
atgttgtttgaaggt

SEQ ID NO: 689570 - DNA, 15 bp, Homo sapiens
tgttgtttgaaggtt

SEQ ID NO: 689571 - DNA, 15 bp, Homo sapiens
gttgtttgaaggttt

SEQ ID NO: 689572 - DNA, 15 bp, Homo sapiens
ttgtttgaaggtttt

SEQ ID NO: 689573 - DNA, 15 bp, Homo sapiens
tgtttgaaggttttt

SEQ ID NO: 689574 - DNA, 15 bp, Homo sapiens
gtttgaaggtttttt

SEQ ID NO: 689575 - DNA, 15 bp, Homo sapiens
tttgaaggttttttt

SEQ ID NO: 689576 - DNA, 15 bp, Homo sapiens
ttgaaggttttttta

SEQ ID NO: 689577 - DNA, 15 bp, Homo sapiens
tgaaggtttttttat

SEQ ID NO: 689578 - DNA, 15 bp, Homo sapiens
gaaggtttttttata

SEQ ID NO: 689579 - DNA, 15 bp, Homo sapiens
aaggtttttttatag

SEQ ID NO: 689580 - DNA, 15 bp, Homo sapiens
aggtttttttatagt

SEQ ID NO: 689581 - DNA, 15 bp, Homo sapiens
ggtttttttatagtg

SEQ ID NO: 689582 - DNA, 15 bp, Homo sapiens
gtttttttatagtga

SEQ ID NO: 689583 - DNA, 15 bp, Homo sapiens
tttttttatagtgag

SEQ ID NO: 689584 - DNA, 15 bp, Homo sapiens
ttttttatagtgagc

SEQ ID NO: 689585 - DNA, 15 bp, Homo sapiens
tttttatagtgagca

SEQ ID NO: 689586 - DNA, 15 bp, Homo sapiens
ttttatagtgagcat

SEQ ID NO: 689587 - DNA, 15 bp, Homo sapiens
tttatagtgagcatc

SEQ ID NO: 689588 - DNA, 15 bp, Homo sapiens
ttatagtgagcatca

SEQ ID NO: 689589 - DNA, 15 bp, Homo sapiens
tatagtgagcatcat

SEQ ID NO: 689590 - DNA, 15 bp, Homo sapiens
atagtgagcatcatt

SEQ ID NO: 689591 - DNA, 15 bp, Homo sapiens
tagtgagcatcattt

SEQ ID NO: 689592 - DNA, 15 bp, Homo sapiens
agtgagcatcatttt

SEQ ID NO: 689593 - DNA, 15 bp, Homo sapiens
gtgagcatcattttt

SEQ ID NO: 689594 - DNA, 15 bp, Homo sapiens
tgagcatcattttta

SEQ ID NO: 689595 - DNA, 15 bp, Homo sapiens
gagcatcatttttat

SEQ ID NO: 689596 - DNA, 15 bp, Homo sapiens
agcatcatttttata

SEQ ID NO: 689597 - DNA, 15 bp, Homo sapiens
gcatcatttttataa

SEQ ID NO: 689598 - DNA, 15 bp, Homo sapiens
catcatttttataat

SEQ ID NO: 689599 - DNA, 15 bp, Homo sapiens
atcatttttataata

SEQ ID NO: 689600 - DNA, 15 bp, Homo sapiens
tcatttttataataa

SEQ ID NO: 689601 - DNA, 15 bp, Homo sapiens
catttttataataag

SEQ ID NO: 689602 - DNA, 15 bp, Homo sapiens
atttttataataagg

SEQ ID NO: 689603 - DNA, 15 bp, Homo sapiens
tttttataataagga

SEQ ID NO: 689604 - DNA, 15 bp, Homo sapiens
ttttataataaggag

SEQ ID NO: 689605 - DNA, 15 bp, Homo sapiens
tttataataaggaga

SEQ ID NO: 689606 - DNA, 15 bp, Homo sapiens
ttataataaggagat

SEQ ID NO: 689607 - DNA, 15 bp, Homo sapiens
tataataaggagata

SEQ ID NO: 689608 - DNA, 15 bp, Homo sapiens
ataataaggagatag

SEQ ID NO: 689609 - DNA, 15 bp, Homo sapiens
taataaggagataga

SEQ ID NO: 689610 - DNA, 15 bp, Homo sapiens
aataaggagatagaa

SEQ ID NO: 689611 - DNA, 15 bp, Homo sapiens
ataaggagatagaaa

SEQ ID NO: 689612 - DNA, 15 bp, Homo sapiens
taaggagatagaaaa

SEQ ID NO: 689613 - DNA, 15 bp, Homo sapiens
aaggagatagaaaac

SEQ ID NO: 689614 - DNA, 15 bp, Homo sapiens
aggagatagaaaact

SEQ ID NO: 689615 - DNA, 15 bp, Homo sapiens
ggagatagaaaacta

SEQ ID NO: 689616 - DNA, 15 bp, Homo sapiens
gagatagaaaactat

SEQ ID NO: 689617 - DNA, 15 bp, Homo sapiens
agatagaaaactata

SEQ ID NO: 689618 - DNA, 15 bp, Homo sapiens
gatagaaaactatat

SEQ ID NO: 689619 - DNA, 15 bp, Homo sapiens
atagaaaactatatt

SEQ ID NO: 689620 - DNA, 15 bp, Homo sapiens
tagaaaactatattc

SEQ ID NO: 689621 - DNA, 15 bp, Homo sapiens
agaaaactatattcc

SEQ ID NO: 689622 - DNA, 15 bp, Homo sapiens
gaaaactatattcct

SEQ ID NO: 689623 - DNA, 15 bp, Homo sapiens
aaaactatattcctg

SEQ ID NO: 689624 - DNA, 15 bp, Homo sapiens
aaactatattcctgt

SEQ ID NO: 689625 - DNA, 15 bp, Homo sapiens
aactatattcctgtt

SEQ ID NO: 689626 - DNA, 15 bp, Homo sapiens
actatattcctgttg

SEQ ID NO: 689627 - DNA, 15 bp, Homo sapiens
ctatattcctgttgg

SEQ ID NO: 689628 - DNA, 15 bp, Homo sapiens
tatattcctgttgga

SEQ ID NO: 689629 - DNA, 15 bp, Homo sapiens
atattcctgttggaa

SEQ ID NO: 689630 - DNA, 15 bp, Homo sapiens
tattcctgttggaaa

SEQ ID NO: 689631 - DNA, 15 bp, Homo sapiens
attcctgttggaaaa

SEQ ID NO: 689632 - DNA, 15 bp, Homo sapiens
ttcctgttggaaaat

SEQ ID NO: 689633 - DNA, 15 bp, Homo sapiens
tcctgttggaaaata

SEQ ID NO: 689634 - DNA, 15 bp, Homo sapiens
cctgttggaaaatat

SEQ ID NO: 689635 - DNA, 15 bp, Homo sapiens
ctgttggaaaatata

SEQ ID NO: 689636 - DNA, 15 bp, Homo sapiens
tgttggaaaatataa

SEQ ID NO: 689637 - DNA, 15 bp, Homo sapiens
gttggaaaatataag

SEQ ID NO: 689638 - DNA, 15 bp, Homo sapiens
ttggaaaatataagg

SEQ ID NO: 689639 - DNA, 15 bp, Homo sapiens
tggaaaatataagga

SEQ ID NO: 689640 - DNA, 15 bp, Homo sapiens
ggaaaatataaggat

SEQ ID NO: 689641 - DNA, 15 bp, Homo sapiens
gaaaatataaggatt

SEQ ID NO: 689642 - DNA, 15 bp, Homo sapiens
aaaatataaggattg

SEQ ID NO: 689643 - DNA, 15 bp, Homo sapiens
aaatataaggattgc

SEQ ID NO: 689644 - DNA, 15 bp, Homo sapiens
aatataaggattgcc

SEQ ID NO: 689645 - DNA, 15 bp, Homo sapiens
atataaggattgcct

SEQ ID NO: 689646 - DNA, 15 bp, Homo sapiens
tataaggattgcctt

SEQ ID NO: 689647 - DNA, 15 bp, Homo sapiens
ataaggattgccttt

SEQ ID NO: 689648 - DNA, 15 bp, Homo sapiens
taaggattgcctttc

SEQ ID NO: 689649 - DNA, 15 bp, Homo sapiens
aaggattgcctttct

SEQ ID NO: 689650 - DNA, 15 bp, Homo sapiens
aggattgcctttctt

SEQ ID NO: 689651 - DNA, 15 bp, Homo sapiens
ggattgcctttcttt

SEQ ID NO: 689652 - DNA, 15 bp, Homo sapiens
gattgcctttctttt

SEQ ID NO: 689653 - DNA, 15 bp, Homo sapiens
attgcctttcttttc

SEQ ID NO: 689654 - DNA, 15 bp, Homo sapiens
ttgcctttcttttca

SEQ ID NO: 689655 - DNA, 15 bp, Homo sapiens
tgcctttcttttcat

SEQ ID NO: 689656 - DNA, 15 bp, Homo sapiens
gcctttcttttcatt

SEQ ID NO: 689657 - DNA, 15 bp, Homo sapiens
cctttcttttcattt

SEQ ID NO: 689658 - DNA, 15 bp, Homo sapiens
ctttcttttcatttg

SEQ ID NO: 689659 - DNA, 15 bp, Homo sapiens
tttcttttcatttgg

SEQ ID NO: 689660 - DNA, 15 bp, Homo sapiens
ttcttttcatttggt

SEQ ID NO: 689661 - DNA, 15 bp, Homo sapiens
tcttttcatttggta

SEQ ID NO: 689662 - DNA, 15 bp, Homo sapiens
cttttcatttggtag

SEQ ID NO: 689663 - DNA, 15 bp, Homo sapiens
ttttcatttggtagg

SEQ ID NO: 689664 - DNA, 15 bp, Homo sapiens
tttcatttggtagga

SEQ ID NO: 689665 - DNA, 15 bp, Homo sapiens
ttcatttggtaggac

SEQ ID NO: 689666 - DNA, 15 bp, Homo sapiens
tcatttggtaggact

SEQ ID NO: 689667 - DNA, 15 bp, Homo sapiens
catttggtaggacta

SEQ ID NO: 689668 - DNA, 15 bp, Homo sapiens
atttggtaggactat

SEQ ID NO: 689669 - DNA, 15 bp, Homo sapiens
tttggtaggactatt

SEQ ID NO: 689670 - DNA, 15 bp, Homo sapiens
ttggtaggactattg

SEQ ID NO: 689671 - DNA, 15 bp, Homo sapiens
tggtaggactattgc

SEQ ID NO: 689672 - DNA, 15 bp, Homo sapiens
ggtaggactattgcc

SEQ ID NO: 689673 - DNA, 15 bp, Homo sapiens
gtaggactattgcca

SEQ ID NO: 689674 - DNA, 15 bp, Homo sapiens
taggactattgccag

SEQ ID NO: 689675 - DNA, 15 bp, Homo sapiens
aggactattgccaga

SEQ ID NO: 689676 - DNA, 15 bp, Homo sapiens
ggactattgccagag

SEQ ID NO: 689677 - DNA, 15 bp, Homo sapiens
gactattgccagagc

SEQ ID NO: 689678 - DNA, 15 bp, Homo sapiens
actattgccagagcc

SEQ ID NO: 689679 - DNA, 15 bp, Homo sapiens
ctattgccagagcct

SEQ ID NO: 689680 - DNA, 15 bp, Homo sapiens
tattgccagagccta

SEQ ID NO: 689681 - DNA, 15 bp, Homo sapiens
attgccagagcctac

SEQ ID NO: 689682 - DNA, 15 bp, Homo sapiens
ttgccagagcctact

SEQ ID NO: 689683 - DNA, 15 bp, Homo sapiens
tgccagagcctactg

SEQ ID NO: 689684 - DNA, 15 bp, Homo sapiens
gccagagcctactga

SEQ ID NO: 689685 - DNA, 15 bp, Homo sapiens
ccagagcctactgaa

SEQ ID NO: 689686 - DNA, 15 bp, Homo sapiens
cagagcctactgaat

SEQ ID NO: 689687 - DNA, 15 bp, Homo sapiens
agagcctactgaatt

SEQ ID NO: 689688 - DNA, 15 bp, Homo sapiens
gagcctactgaattt

SEQ ID NO: 689689 - DNA, 15 bp, Homo sapiens
agcctactgaatttc

SEQ ID NO: 689690 - DNA, 15 bp, Homo sapiens
gcctactgaatttca

SEQ ID NO: 689691 - DNA, 15 bp, Homo sapiens
cctactgaatttcat

SEQ ID NO: 689692 - DNA, 15 bp, Homo sapiens
ctactgaatttcatt

SEQ ID NO: 689693 - DNA, 15 bp, Homo sapiens
tactgaatttcattt

SEQ ID NO: 689694 - DNA, 15 bp, Homo sapiens
actgaatttcatttt

SEQ ID NO: 689695 - DNA, 15 bp, Homo sapiens
ctgaatttcattttt

SEQ ID NO: 689696 - DNA, 15 bp, Homo sapiens
tgaatttcatttttg

SEQ ID NO: 689697 - DNA, 15 bp, Homo sapiens
gaatttcatttttgt

SEQ ID NO: 689698 - DNA, 15 bp, Homo sapiens
aatttcatttttgtt

SEQ ID NO: 689699 - DNA, 15 bp, Homo sapiens
atttcatttttgttt

SEQ ID NO: 689700 - DNA, 15 bp, Homo sapiens
tttcatttttgtttt

SEQ ID NO: 689701 - DNA, 15 bp, Homo sapiens
ttcatttttgttttc

SEQ ID NO: 689702 - DNA, 15 bp, Homo sapiens
tcatttttgttttct

SEQ ID NO: 689703 - DNA, 15 bp, Homo sapiens
catttttgttttctt

SEQ ID NO: 689704 - DNA, 15 bp, Homo sapiens
atttttgttttcttt

SEQ ID NO: 689705 - DNA, 15 bp, Homo sapiens
tttttgttttctttt

SEQ ID NO: 689706 - DNA, 15 bp, Homo sapiens
ttttgttttcttttt

SEQ ID NO: 689707 - DNA, 15 bp, Homo sapiens
tttgttttctttttc

SEQ ID NO: 689708 - DNA, 15 bp, Homo sapiens
ttgttttctttttct

SEQ ID NO: 689709 - DNA, 15 bp, Homo sapiens
tgttttctttttctt

SEQ ID NO: 689710 - DNA, 15 bp, Homo sapiens
gttttctttttctta

SEQ ID NO: 689711 - DNA, 15 bp, Homo sapiens
ttttctttttcttaa

SEQ ID NO: 689712 - DNA, 15 bp, Homo sapiens
tttctttttcttaag

SEQ ID NO: 689713 - DNA, 15 bp, Homo sapiens
ttctttttcttaaga

SEQ ID NO: 689714 - DNA, 15 bp, Homo sapiens
tctttttcttaagaa

SEQ ID NO: 689715 - DNA, 15 bp, Homo sapiens
ctttttcttaagaaa

SEQ ID NO: 689716 - DNA, 15 bp, Homo sapiens
tttttcttaagaaac

SEQ ID NO: 689717 - DNA, 15 bp, Homo sapiens
ttttcttaagaaaca

SEQ ID NO: 689718 - DNA, 15 bp, Homo sapiens
tttcttaagaaacat

SEQ ID NO: 689719 - DNA, 15 bp, Homo sapiens
ttcttaagaaacata

SEQ ID NO: 689720 - DNA, 15 bp, Homo sapiens
tcttaagaaacatac

SEQ ID NO: 689721 - DNA, 15 bp, Homo sapiens
cttaagaaacataca

SEQ ID NO: 689722 - DNA, 15 bp, Homo sapiens
ttaagaaacatacaa

SEQ ID NO: 689723 - DNA, 15 bp, Homo sapiens
taagaaacatacaag

SEQ ID NO: 689724 - DNA, 15 bp, Homo sapiens
aagaaacatacaaga

SEQ ID NO: 689725 - DNA, 15 bp, Homo sapiens
agaaacatacaagaa

SEQ ID NO: 689726 - DNA, 15 bp, Homo sapiens
gaaacatacaagaaa

SEQ ID NO: 689727 - DNA, 15 bp, Homo sapiens
aaacatacaagaaat

SEQ ID NO: 689728 - DNA, 15 bp, Homo sapiens
aacatacaagaaatg

SEQ ID NO: 689729 - DNA, 15 bp, Homo sapiens
acatacaagaaatgc

SEQ ID NO: 689730 - DNA, 15 bp, Homo sapiens
catacaagaaatgcc

SEQ ID NO: 689731 - DNA, 15 bp, Homo sapiens
atacaagaaatgccc

SEQ ID NO: 689732 - DNA, 15 bp, Homo sapiens
tacaagaaatgccca

SEQ ID NO: 689733 - DNA, 15 bp, Homo sapiens
acaagaaatgcccat

SEQ ID NO: 689734 - DNA, 15 bp, Homo sapiens
caagaaatgcccatt

SEQ ID NO: 689735 - DNA, 15 bp, Homo sapiens
aagaaatgcccattc

SEQ ID NO: 689736 - DNA, 15 bp, Homo sapiens
agaaatgcccattcc

SEQ ID NO: 689737 - DNA, 15 bp, Homo sapiens
gaaatgcccattcct

SEQ ID NO: 689738 - DNA, 15 bp, Homo sapiens
aaatgcccattcctt

SEQ ID NO: 689739 - DNA, 15 bp, Homo sapiens
aatgcccattccttt

SEQ ID NO: 689740 - DNA, 15 bp, Homo sapiens
atgcccattcctttt

SEQ ID NO: 689741 - DNA, 15 bp, Homo sapiens
tgcccattcctttta

SEQ ID NO: 689742 - DNA, 15 bp, Homo sapiens
gcccattccttttaa

SEQ ID NO: 689743 - DNA, 15 bp, Homo sapiens
cccattccttttaaa

SEQ ID NO: 689744 - DNA, 15 bp, Homo sapiens
ccattccttttaaaa

SEQ ID NO: 689745 - DNA, 15 bp, Homo sapiens
cattccttttaaaat

SEQ ID NO: 689746 - DNA, 15 bp, Homo sapiens
attccttttaaaatc

SEQ ID NO: 689747 - DNA, 15 bp, Homo sapiens
ttccttttaaaatca

SEQ ID NO: 689748 - DNA, 15 bp, Homo sapiens
tccttttaaaatcat

SEQ ID NO: 689749 - DNA, 15 bp, Homo sapiens
ccttttaaaatcatc

SEQ ID NO: 689750 - DNA, 15 bp, Homo sapiens
cttttaaaatcatca

SEQ ID NO: 689751 - DNA, 15 bp, Homo sapiens
ttttaaaatcatcag

SEQ ID NO: 689752 - DNA, 15 bp, Homo sapiens
tttaaaatcatcagt

SEQ ID NO: 689753 - DNA, 15 bp, Homo sapiens
ttaaaatcatcagtt

SEQ ID NO: 689754 - DNA, 15 bp, Homo sapiens
taaaatcatcagtta

SEQ ID NO: 689755 - DNA, 15 bp, Homo sapiens
aaaatcatcagttat

SEQ ID NO: 689756 - DNA, 15 bp, Homo sapiens
aaatcatcagttatt

SEQ ID NO: 689757 - DNA, 15 bp, Homo sapiens
aatcatcagttattt

SEQ ID NO: 689758 - DNA, 15 bp, Homo sapiens
atcatcagttatttt

SEQ ID NO: 689759 - DNA, 15 bp, Homo sapiens
tcatcagttatttta

SEQ ID NO: 689760 - DNA, 15 bp, Homo sapiens
catcagttattttac

SEQ ID NO: 689761 - DNA, 15 bp, Homo sapiens
atcagttattttaca

SEQ ID NO: 689762 - DNA, 15 bp, Homo sapiens
tcagttattttacat

SEQ ID NO: 689763 - DNA, 15 bp, Homo sapiens
cagttattttacatt

SEQ ID NO: 689764 - DNA, 15 bp, Homo sapiens
agttattttacattc

SEQ ID NO: 689765 - DNA, 15 bp, Homo sapiens
gttattttacattcc

SEQ ID NO: 689766 - DNA, 15 bp, Homo sapiens
ttattttacattcca

SEQ ID NO: 689767 - DNA, 15 bp, Homo sapiens
tattttacattccaa

SEQ ID NO: 689768 - DNA, 15 bp, Homo sapiens
attttacattccaaa

SEQ ID NO: 689769 - DNA, 15 bp, Homo sapiens
ttttacattccaaaa

SEQ ID NO: 689770 - DNA, 15 bp, Homo sapiens
tttacattccaaaaa

SEQ ID NO: 689771 - DNA, 15 bp, Homo sapiens
ttacattccaaaaat

SEQ ID NO: 689772 - DNA, 15 bp, Homo sapiens
tacattccaaaaata

SEQ ID NO: 689773 - DNA, 15 bp, Homo sapiens
acattccaaaaatat

SEQ ID NO: 689774 - DNA, 15 bp, Homo sapiens
cattccaaaaatatt

SEQ ID NO: 689775 - DNA, 15 bp, Homo sapiens
attccaaaaatattg

SEQ ID NO: 689776 - DNA, 15 bp, Homo sapiens
ttccaaaaatattgc

SEQ ID NO: 689777 - DNA, 15 bp, Homo sapiens
tccaaaaatattgca

SEQ ID NO: 689778 - DNA, 15 bp, Homo sapiens
ccaaaaatattgcag

SEQ ID NO: 689779 - DNA, 15 bp, Homo sapiens
caaaaatattgcagt

SEQ ID NO: 689780 - DNA, 15 bp, Homo sapiens
aaaaatattgcagtg

SEQ ID NO: 689781 - DNA, 15 bp, Homo sapiens
aaaatattgcagtga

SEQ ID NO: 689782 - DNA, 15 bp, Homo sapiens
aaatattgcagtgag

SEQ ID NO: 689783 - DNA, 15 bp, Homo sapiens
aatattgcagtgaga

SEQ ID NO: 689784 - DNA, 15 bp, Homo sapiens
atattgcagtgagat

SEQ ID NO: 689785 - DNA, 15 bp, Homo sapiens
tattgcagtgagatt

SEQ ID NO: 689786 - DNA, 15 bp, Homo sapiens
attgcagtgagattc

SEQ ID NO: 689787 - DNA, 15 bp, Homo sapiens
ttgcagtgagattct

SEQ ID NO: 689788 - DNA, 15 bp, Homo sapiens
tgcagtgagattctt

SEQ ID NO: 689789 - DNA, 15 bp, Homo sapiens
gcagtgagattcttg

SEQ ID NO: 689790 - DNA, 15 bp, Homo sapiens
cagtgagattcttgt

SEQ ID NO: 689791 - DNA, 15 bp, Homo sapiens
agtgagattcttgta

SEQ ID NO: 689792 - DNA, 15 bp, Homo sapiens
gtgagattcttgtag

SEQ ID NO: 689793 - DNA, 15 bp, Homo sapiens
tgagattcttgtagt

SEQ ID NO: 689794 - DNA, 15 bp, Homo sapiens
gagattcttgtagtc

SEQ ID NO: 689795 - DNA, 15 bp, Homo sapiens
agattcttgtagtca

SEQ ID NO: 689796 - DNA, 15 bp, Homo sapiens
gattcttgtagtcaa

SEQ ID NO: 689797 - DNA, 15 bp, Homo sapiens
attcttgtagtcaat

SEQ ID NO: 689798 - DNA, 15 bp, Homo sapiens
ttcttgtagtcaatg

SEQ ID NO: 689799 - DNA, 15 bp, Homo sapiens
tcttgtagtcaatga

SEQ ID NO: 689800 - DNA, 15 bp, Homo sapiens
cttgtagtcaatgag

SEQ ID NO: 689801 - DNA, 15 bp, Homo sapiens
ttgtagtcaatgagt

SEQ ID NO: 689802 - DNA, 15 bp, Homo sapiens
tgtagtcaatgagtt

SEQ ID NO: 689803 - DNA, 15 bp, Homo sapiens
gtagtcaatgagttc

SEQ ID NO: 689804 - DNA, 15 bp, Homo sapiens
tagtcaatgagttct

SEQ ID NO: 689805 - DNA, 15 bp, Homo sapiens
agtcaatgagttcta

SEQ ID NO: 689806 - DNA, 15 bp, Homo sapiens
gtcaatgagttctac

SEQ ID NO: 689807 - DNA, 15 bp, Homo sapiens
tcaatgagttctacg

SEQ ID NO: 689808 - DNA, 15 bp, Homo sapiens
caatgagttctacgg

SEQ ID NO: 689809 - DNA, 15 bp, Homo sapiens
aatgagttctacgga

SEQ ID NO: 689810 - DNA, 15 bp, Homo sapiens
atgagttctacggac

SEQ ID NO: 689811 - DNA, 15 bp, Homo sapiens
tgagttctacggact

SEQ ID NO: 689812 - DNA, 15 bp, Homo sapiens
gagttctacggactg

SEQ ID NO: 689813 - DNA, 15 bp, Homo sapiens
agttctacggactga

SEQ ID NO: 689814 - DNA, 15 bp, Homo sapiens
gttctacggactgaa

SEQ ID NO: 689815 - DNA, 15 bp, Homo sapiens
ttctacggactgaat

SEQ ID NO: 689816 - DNA, 15 bp, Homo sapiens
tctacggactgaatt

SEQ ID NO: 689817 - DNA, 15 bp, Homo sapiens
ctacggactgaattt

SEQ ID NO: 689818 - DNA, 15 bp, Homo sapiens
tacggactgaatttc

SEQ ID NO: 689819 - DNA, 15 bp, Homo sapiens
acggactgaatttca

SEQ ID NO: 689820 - DNA, 15 bp, Homo sapiens
cggactgaatttcac

SEQ ID NO: 689821 - DNA, 15 bp, Homo sapiens
ggactgaatttcact

SEQ ID NO: 689822 - DNA, 15 bp, Homo sapiens
gactgaatttcactt

SEQ ID NO: 689823 - DNA, 15 bp, Homo sapiens
actgaatttcacttg

SEQ ID NO: 689824 - DNA, 15 bp, Homo sapiens
ctgaatttcacttgt

SEQ ID NO: 689825 - DNA, 15 bp, Homo sapiens
tgaatttcacttgtg

SEQ ID NO: 689826 - DNA, 15 bp, Homo sapiens
gaatttcacttgtgg

SEQ ID NO: 689827 - DNA, 15 bp, Homo sapiens
aatttcacttgtggt

SEQ ID NO: 689828 - DNA, 15 bp, Homo sapiens
atttcacttgtggta

SEQ ID NO: 689829 - DNA, 15 bp, Homo sapiens
tttcacttgtggtaa

SEQ ID NO: 689830 - DNA, 15 bp, Homo sapiens
ttcacttgtggtaag

SEQ ID NO: 689831 - DNA, 15 bp, Homo sapiens
tcacttgtggtaagt

SEQ ID NO: 689832 - DNA, 15 bp, Homo sapiens
cacttgtggtaagta

SEQ ID NO: 689833 - DNA, 15 bp, Homo sapiens
acttgtggtaagtat

SEQ ID NO: 689834 - DNA, 15 bp, Homo sapiens
cttgtggtaagtatt

SEQ ID NO: 689835 - DNA, 15 bp, Homo sapiens
ttgtggtaagtattc

SEQ ID NO: 689836 - DNA, 15 bp, Homo sapiens
tgtggtaagtattct

SEQ ID NO: 689837 - DNA, 15 bp, Homo sapiens
gtggtaagtattcta

SEQ ID NO: 689838 - DNA, 15 bp, Homo sapiens
tggtaagtattctat

SEQ ID NO: 689839 - DNA, 15 bp, Homo sapiens
ggtaagtattctatt

SEQ ID NO: 689840 - DNA, 15 bp, Homo sapiens
gtaagtattctattt

SEQ ID NO: 689841 - DNA, 15 bp, Homo sapiens
taagtattctatttg

SEQ ID NO: 689842 - DNA, 15 bp, Homo sapiens
aagtattctatttgg

SEQ ID NO: 689843 - DNA, 15 bp, Homo sapiens
agtattctatttggg

SEQ ID NO: 689844 - DNA, 15 bp, Homo sapiens
gtattctatttgggg

SEQ ID NO: 689845 - DNA, 15 bp, Homo sapiens
tattctatttgggga

SEQ ID NO: 689846 - DNA, 15 bp, Homo sapiens
attctatttggggat

SEQ ID NO: 689847 - DNA, 15 bp, Homo sapiens
ttctatttggggata

SEQ ID NO: 689848 - DNA, 15 bp, Homo sapiens
tctatttggggatat

SEQ ID NO: 689849 - DNA, 15 bp, Homo sapiens
ctatttggggatatt

SEQ ID NO: 689850 - DNA, 15 bp, Homo sapiens
tatttggggatatta

SEQ ID NO: 689851 - DNA, 15 bp, Homo sapiens
atttggggatattat

SEQ ID NO: 689852 - DNA, 15 bp, Homo sapiens
tttggggatattatt

SEQ ID NO: 689853 - DNA, 15 bp, Homo sapiens
ttggggatattattt

SEQ ID NO: 689854 - DNA, 15 bp, Homo sapiens
tggggatattatttt

SEQ ID NO: 689855 - DNA, 15 bp, Homo sapiens
ggggatattattttt

SEQ ID NO: 689856 - DNA, 15 bp, Homo sapiens
gggatattatttttg

SEQ ID NO: 689857 - DNA, 15 bp, Homo sapiens
ggatattatttttgc

SEQ ID NO: 689858 - DNA, 15 bp, Homo sapiens
gatattatttttgca

SEQ ID NO: 689859 - DNA, 15 bp, Homo sapiens
atattatttttgcat

SEQ ID NO: 689860 - DNA, 15 bp, Homo sapiens
tattatttttgcatg

SEQ ID NO: 689861 - DNA, 15 bp, Homo sapiens
attatttttgcatgt

SEQ ID NO: 689862 - DNA, 15 bp, Homo sapiens
ttatttttgcatgtt

SEQ ID NO: 689863 - DNA, 15 bp, Homo sapiens
tatttttgcatgtta

SEQ ID NO: 689864 - DNA, 15 bp, Homo sapiens
atttttgcatgttac

SEQ ID NO: 689865 - DNA, 15 bp, Homo sapiens
tttttgcatgttact

SEQ ID NO: 689866 - DNA, 15 bp, Homo sapiens
ttttgcatgttactc

SEQ ID NO: 689867 - DNA, 15 bp, Homo sapiens
tttgcatgttactct

SEQ ID NO: 689868 - DNA, 15 bp, Homo sapiens
ttgcatgttactctg

SEQ ID NO: 689869 - DNA, 15 bp, Homo sapiens
tgcatgttactctga

SEQ ID NO: 689870 - DNA, 15 bp, Homo sapiens
gcatgttactctgag

SEQ ID NO: 689871 - DNA, 15 bp, Homo sapiens
catgttactctgagg

SEQ ID NO: 689872 - DNA, 15 bp, Homo sapiens
atgttactctgagga

SEQ ID NO: 689873 - DNA, 15 bp, Homo sapiens
tgttactctgaggaa

SEQ ID NO: 689874 - DNA, 15 bp, Homo sapiens
gttactctgaggaag

SEQ ID NO: 689875 - DNA, 15 bp, Homo sapiens
ttactctgaggaagc

SEQ ID NO: 689876 - DNA, 15 bp, Homo sapiens
tactctgaggaagca

SEQ ID NO: 689877 - DNA, 15 bp, Homo sapiens
actctgaggaagcaa

SEQ ID NO: 689878 - DNA, 15 bp, Homo sapiens
ctctgaggaagcaat

SEQ ID NO: 689879 - DNA, 15 bp, Homo sapiens
tctgaggaagcaatt

SEQ ID NO: 689880 - DNA, 15 bp, Homo sapiens
ctgaggaagcaattt

SEQ ID NO: 689881 - DNA, 15 bp, Homo sapiens
tgaggaagcaatttc

SEQ ID NO: 689882 - DNA, 15 bp, Homo sapiens
gaggaagcaatttct

SEQ ID NO: 689883 - DNA, 15 bp, Homo sapiens
aggaagcaatttctt

SEQ ID NO: 689884 - DNA, 15 bp, Homo sapiens
ggaagcaatttcttg

SEQ ID NO: 689885 - DNA, 15 bp, Homo sapiens
gaagcaatttcttgg

SEQ ID NO: 689886 - DNA, 15 bp, Homo sapiens
aagcaatttcttgga

SEQ ID NO: 689887 - DNA, 15 bp, Homo sapiens
agcaatttcttggag

SEQ ID NO: 689888 - DNA, 15 bp, Homo sapiens
gcaatttcttggagg

SEQ ID NO: 689889 - DNA, 15 bp, Homo sapiens
caatttcttggagga

SEQ ID NO: 689890 - DNA, 15 bp, Homo sapiens
aatttcttggaggaa

SEQ ID NO: 689891 - DNA, 15 bp, Homo sapiens
atttcttggaggaaa

SEQ ID NO: 689892 - DNA, 15 bp, Homo sapiens
tttcttggaggaaat

SEQ ID NO: 689893 - DNA, 15 bp, Homo sapiens
ttcttggaggaaatg

SEQ ID NO: 689894 - DNA, 15 bp, Homo sapiens
tcttggaggaaatgt

SEQ ID NO: 689895 - DNA, 15 bp, Homo sapiens
cttggaggaaatgta

SEQ ID NO: 689896 - DNA, 15 bp, Homo sapiens
ttggaggaaatgtat

SEQ ID NO: 689897 - DNA, 15 bp, Homo sapiens
tggaggaaatgtatt

SEQ ID NO: 689898 - DNA, 15 bp, Homo sapiens
ggaggaaatgtattt

SEQ ID NO: 689899 - DNA, 15 bp, Homo sapiens
gaggaaatgtatttt

SEQ ID NO: 689900 - DNA, 15 bp, Homo sapiens
aggaaatgtattttt

SEQ ID NO: 689901 - DNA, 15 bp, Homo sapiens
ggaaatgtatttttg

SEQ ID NO: 689902 - DNA, 15 bp, Homo sapiens
gaaatgtatttttga

SEQ ID NO: 689903 - DNA, 15 bp, Homo sapiens
aaatgtatttttgaa

SEQ ID NO: 689904 - DNA, 15 bp, Homo sapiens
aatgtatttttgaaa

SEQ ID NO: 689905 - DNA, 15 bp, Homo sapiens
atgtatttttgaaat

SEQ ID NO: 689906 - DNA, 15 bp, Homo sapiens
tgtatttttgaaata

SEQ ID NO: 689907 - DNA, 15 bp, Homo sapiens
gtatttttgaaataa

SEQ ID NO: 689908 - DNA, 15 bp, Homo sapiens
tatttttgaaataaa

SEQ ID NO: 689909 - DNA, 15 bp, Homo sapiens
atttttgaaataaaa

SEQ ID NO: 689910 - DNA, 15 bp, Homo sapiens
tttttgaaataaaaa

SEQ ID NO: 689911 - DNA, 15 bp, Homo sapiens
ttttgaaataaaaac

SEQ ID NO: 689912 - DNA, 15 bp, Homo sapiens
tttgaaataaaaact

SEQ ID NO: 689913 - DNA, 15 bp, Homo sapiens
ttgaaataaaaactg

SEQ ID NO: 689914 - DNA, 15 bp, Homo sapiens
tgaaataaaaactgt

SEQ ID NO: 689915 - DNA, 15 bp, Homo sapiens
gaaataaaaactgtg

SEQ ID NO: 689916 - DNA, 15 bp, Homo sapiens
aaataaaaactgtgt

SEQ ID NO: 689917 - DNA, 15 bp, Homo sapiens
aataaaaactgtgtt

SEQ ID NO: 689918 - DNA, 15 bp, Homo sapiens
ataaaaactgtgttt

SEQ ID NO: 689919 - DNA, 15 bp, Homo sapiens
taaaaactgtgtttt

SEQ ID NO: 689920 - DNA, 15 bp, Homo sapiens
aaaaactgtgtttta

SEQ ID NO: 689921 - DNA, 15 bp, Homo sapiens
aaaactgtgttttat

SEQ ID NO: 689922 - DNA, 15 bp, Homo sapiens
aaactgtgttttata

SEQ ID NO: 689923 - DNA, 15 bp, Homo sapiens
aactgtgttttataa

SEQ ID NO: 689924 - DNA, 15 bp, Homo sapiens
actgtgttttataat

SEQ ID NO: 689925 - DNA, 15 bp, Homo sapiens
ctgtgttttataata

SEQ ID NO: 689926 - DNA, 15 bp, Homo sapiens
tgtgttttataataa

SEQ ID NO: 689927 - DNA, 15 bp, Homo sapiens
gtgttttataataat

SEQ ID NO: 689928 - DNA, 15 bp, Homo sapiens
tgttttataataatt

SEQ ID NO: 689929 - DNA, 15 bp, Homo sapiens
gttttataataattc

SEQ ID NO: 689930 - DNA, 15 bp, Homo sapiens
ttttataataattca

SEQ ID NO: 689931 - DNA, 15 bp, Homo sapiens
tttataataattcaa

SEQ ID NO: 689932 - DNA, 15 bp, Homo sapiens
ttataataattcaat

SEQ ID NO: 689933 - DNA, 15 bp, Homo sapiens
tataataattcaatt

SEQ ID NO: 689934 - DNA, 15 bp, Homo sapiens
ataataattcaattt

SEQ ID NO: 689935 - DNA, 15 bp, Homo sapiens
taataattcaattta

SEQ ID NO: 689936 - DNA, 15 bp, Homo sapiens
aataattcaatttaa

SEQ ID NO: 689937 - DNA, 15 bp, Homo sapiens
ataattcaatttaaa

SEQ ID NO: 689938 - DNA, 15 bp, Homo sapiens
taattcaatttaaaa

SEQ ID NO: 689939 - DNA, 15 bp, Homo sapiens
aattcaatttaaaac

SEQ ID NO: 689940 - DNA, 15 bp, Homo sapiens
attcaatttaaaact

SEQ ID NO: 689941 - DNA, 15 bp, Homo sapiens
ttcaatttaaaactc

SEQ ID NO: 689942 - DNA, 15 bp, Homo sapiens
tcaatttaaaactct

SEQ ID NO: 689943 - DNA, 15 bp, Homo sapiens
caatttaaaactctg

SEQ ID NO: 689944 - DNA, 15 bp, Homo sapiens
aatttaaaactctgt

SEQ ID NO: 689945 - DNA, 15 bp, Homo sapiens
atttaaaactctgtt

SEQ ID NO: 689946 - DNA, 15 bp, Homo sapiens
tttaaaactctgttt

SEQ ID NO: 689947 - DNA, 15 bp, Homo sapiens
ttaaaactctgtttt

SEQ ID NO: 689948 - DNA, 15 bp, Homo sapiens
taaaactctgttttg

SEQ ID NO: 689949 - DNA, 15 bp, Homo sapiens
aaaactctgttttga

SEQ ID NO: 689950 - DNA, 15 bp, Homo sapiens
aaactctgttttgaa

SEQ ID NO: 689951 - DNA, 15 bp, Homo sapiens
aactctgttttgaaa

SEQ ID NO: 689952 - DNA, 15 bp, Homo sapiens
actctgttttgaaat

SEQ ID NO: 689953 - DNA, 15 bp, Homo sapiens
ctctgttttgaaata

SEQ ID NO: 689954 - DNA, 15 bp, Homo sapiens
tctgttttgaaatac

SEQ ID NO: 689955 - DNA, 15 bp, Homo sapiens
ctgttttgaaataca

SEQ ID NO: 689956 - DNA, 15 bp, Homo sapiens
tgttttgaaatacag

SEQ ID NO: 689957 - DNA, 15 bp, Homo sapiens
gttttgaaatacagt

SEQ ID NO: 689958 - DNA, 15 bp, Homo sapiens
ttttgaaatacagtc

SEQ ID NO: 689959 - DNA, 15 bp, Homo sapiens
tttgaaatacagtcc

SEQ ID NO: 689960 - DNA, 15 bp, Homo sapiens
ttgaaatacagtcca

SEQ ID NO: 689961 - DNA, 15 bp, Homo sapiens
tgaaatacagtccaa

SEQ ID NO: 689962 - DNA, 15 bp, Homo sapiens
gaaatacagtccaac

SEQ ID NO: 689963 - DNA, 15 bp, Homo sapiens
aaatacagtccaaca

SEQ ID NO: 689964 - DNA, 15 bp, Homo sapiens
aatacagtccaacat

SEQ ID NO: 689965 - DNA, 15 bp, Homo sapiens
atacagtccaacatt

SEQ ID NO: 689966 - DNA, 15 bp, Homo sapiens
tacagtccaacattt

SEQ ID NO: 689967 - DNA, 15 bp, Homo sapiens
acagtccaacatttt

SEQ ID NO: 689968 - DNA, 15 bp, Homo sapiens
cagtccaacattttc

SEQ ID NO: 689969 - DNA, 15 bp, Homo sapiens
agtccaacattttct

SEQ ID NO: 689970 - DNA, 15 bp, Homo sapiens
gtccaacattttctc

SEQ ID NO: 689971 - DNA, 15 bp, Homo sapiens
tccaacattttctct

SEQ ID NO: 689972 - DNA, 15 bp, Homo sapiens
ccaacattttctctg

SEQ ID NO: 689973 - DNA, 15 bp, Homo sapiens
caacattttctctga

SEQ ID NO: 689974 - DNA, 15 bp, Homo sapiens
aacattttctctgat

SEQ ID NO: 689975 - DNA, 15 bp, Homo sapiens
acattttctctgatt

SEQ ID NO: 689976 - DNA, 15 bp, Homo sapiens
cattttctctgattt

SEQ ID NO: 689977 - DNA, 15 bp, Homo sapiens
attttctctgatttt

SEQ ID NO: 689978 - DNA, 15 bp, Homo sapiens
ttttctctgattttt

SEQ ID NO: 689979 - DNA, 15 bp, Homo sapiens
tttctctgattttta

SEQ ID NO: 689980 - DNA, 15 bp, Homo sapiens
ttctctgatttttaa

SEQ ID NO: 689981 - DNA, 15 bp, Homo sapiens
tctctgatttttaag

SEQ ID NO: 689982 - DNA, 15 bp, Homo sapiens
ctctgatttttaaga

SEQ ID NO: 689983 - DNA, 15 bp, Homo sapiens
tctgatttttaagat

SEQ ID NO: 689984 - DNA, 15 bp, Homo sapiens
ctgatttttaagatg

SEQ ID NO: 689985 - DNA, 15 bp, Homo sapiens
tgatttttaagatga

SEQ ID NO: 689986 - DNA, 15 bp, Homo sapiens
gatttttaagatgaa

SEQ ID NO: 689987 - DNA, 15 bp, Homo sapiens
atttttaagatgaaa

SEQ ID NO: 689988 - DNA, 15 bp, Homo sapiens
tttttaagatgaaag

SEQ ID NO: 689989 - DNA, 15 bp, Homo sapiens
ttttaagatgaaaga

SEQ ID NO: 689990 - DNA, 15 bp, Homo sapiens
tttaagatgaaagaa

SEQ ID NO: 689991 - DNA, 15 bp, Homo sapiens
ttaagatgaaagaaa

SEQ ID NO: 689992 - DNA, 15 bp, Homo sapiens
taagatgaaagaaaa

SEQ ID NO: 689993 - DNA, 15 bp, Homo sapiens
aagatgaaagaaaat

SEQ ID NO: 689994 - DNA, 15 bp, Homo sapiens
agatgaaagaaaata

SEQ ID NO: 689995 - DNA, 15 bp, Homo sapiens
gatgaaagaaaataa

SEQ ID NO: 689996 - DNA, 15 bp, Homo sapiens
atgaaagaaaataag

SEQ ID NO: 689997 - DNA, 15 bp, Homo sapiens
tgaaagaaaataagc

SEQ ID NO: 689998 - DNA, 15 bp, Homo sapiens
gaaagaaaataagca

SEQ ID NO: 689999 - DNA, 15 bp, Homo sapiens
aaagaaaataagcag

SEQ ID NO: 690000 - DNA, 15 bp, Homo sapiens
aagaaaataagcagt

SEQ ID NO: 690001 - DNA, 15 bp, Homo sapiens
agaaaataagcagta

SEQ ID NO: 690002 - DNA, 15 bp, Homo sapiens
gaaaataagcagtag

SEQ ID NO: 690003 - DNA, 15 bp, Homo sapiens
aaaataagcagtagt

SEQ ID NO: 690004 - DNA, 15 bp, Homo sapiens
aaataagcagtagtc

SEQ ID NO: 690005 - DNA, 15 bp, Homo sapiens
aataagcagtagtca

SEQ ID NO: 690006 - DNA, 15 bp, Homo sapiens
ataagcagtagtcaa

SEQ ID NO: 690007 - DNA, 15 bp, Homo sapiens
taagcagtagtcaag

SEQ ID NO: 690008 - DNA, 15 bp, Homo sapiens
aagcagtagtcaagt

SEQ ID NO: 690009 - DNA, 15 bp, Homo sapiens
agcagtagtcaagtt

SEQ ID NO: 690010 - DNA, 15 bp, Homo sapiens
gcagtagtcaagtta

SEQ ID NO: 690011 - DNA, 15 bp, Homo sapiens
cagtagtcaagttag

SEQ ID NO: 690012 - DNA, 15 bp, Homo sapiens
agtagtcaagttagt

SEQ ID NO: 690013 - DNA, 15 bp, Homo sapiens
gtagtcaagttagtc

SEQ ID NO: 690014 - DNA, 15 bp, Homo sapiens
tagtcaagttagtct

SEQ ID NO: 690015 - DNA, 15 bp, Homo sapiens
agtcaagttagtctc

SEQ ID NO: 690016 - DNA, 15 bp, Homo sapiens
gtcaagttagtctcc

SEQ ID NO: 690017 - DNA, 15 bp, Homo sapiens
tcaagttagtctcct

SEQ ID NO: 690018 - DNA, 15 bp, Homo sapiens
caagttagtctcctg

SEQ ID NO: 690019 - DNA, 15 bp, Homo sapiens
aagttagtctcctgt

SEQ ID NO: 690020 - DNA, 15 bp, Homo sapiens
agttagtctcctgtc

SEQ ID NO: 690021 - DNA, 15 bp, Homo sapiens
gttagtctcctgtca

SEQ ID NO: 690022 - DNA, 15 bp, Homo sapiens
ttagtctcctgtcaa

SEQ ID NO: 690023 - DNA, 15 bp, Homo sapiens
tagtctcctgtcaaa

SEQ ID NO: 690024 - DNA, 15 bp, Homo sapiens
agtctcctgtcaaag

SEQ ID NO: 690025 - DNA, 15 bp, Homo sapiens
gtctcctgtcaaagg

SEQ ID NO: 690026 - DNA, 15 bp, Homo sapiens
tctcctgtcaaaggt

SEQ ID NO: 690027 - DNA, 15 bp, Homo sapiens
ctcctgtcaaaggtc

SEQ ID NO: 690028 - DNA, 15 bp, Homo sapiens
tcctgtcaaaggtca

SEQ ID NO: 690029 - DNA, 15 bp, Homo sapiens
cctgtcaaaggtcaa

SEQ ID NO: 690030 - DNA, 15 bp, Homo sapiens
ctgtcaaaggtcaac

SEQ ID NO: 690031 - DNA, 15 bp, Homo sapiens
tgtcaaaggtcaaca

SEQ ID NO: 690032 - DNA, 15 bp, Homo sapiens
gtcaaaggtcaacag

SEQ ID NO: 690033 - DNA, 15 bp, Homo sapiens
tcaaaggtcaacagg

SEQ ID NO: 690034 - DNA, 15 bp, Homo sapiens
caaaggtcaacaggt

SEQ ID NO: 690035 - DNA, 15 bp, Homo sapiens
aaaggtcaacaggta

SEQ ID NO: 690036 - DNA, 15 bp, Homo sapiens
aaggtcaacaggtaa

SEQ ID NO: 690037 - DNA, 15 bp, Homo sapiens
aggtcaacaggtaag

SEQ ID NO: 690038 - DNA, 15 bp, Homo sapiens
ggtcaacaggtaagg

SEQ ID NO: 690039 - DNA, 15 bp, Homo sapiens
gtcaacaggtaaggg

SEQ ID NO: 690040 - DNA, 15 bp, Homo sapiens
tcaacaggtaaggga

SEQ ID NO: 690041 - DNA, 15 bp, Homo sapiens
caacaggtaagggac

SEQ ID NO: 690042 - DNA, 15 bp, Homo sapiens
aacaggtaagggaca

SEQ ID NO: 690043 - DNA, 15 bp, Homo sapiens
acaggtaagggacac

SEQ ID NO: 690044 - DNA, 15 bp, Homo sapiens
caggtaagggacact

SEQ ID NO: 690045 - DNA, 15 bp, Homo sapiens
aggtaagggacactt

SEQ ID NO: 690046 - DNA, 15 bp, Homo sapiens
ggtaagggacacttg

SEQ ID NO: 690047 - DNA, 15 bp, Homo sapiens
gtaagggacacttgg

SEQ ID NO: 690048 - DNA, 15 bp, Homo sapiens
taagggacacttgga

SEQ ID NO: 690049 - DNA, 15 bp, Homo sapiens
aagggacacttggat

SEQ ID NO: 690050 - DNA, 15 bp, Homo sapiens
agggacacttggatg

SEQ ID NO: 690051 - DNA, 15 bp, Homo sapiens
gggacacttggatgt

SEQ ID NO: 690052 - DNA, 15 bp, Homo sapiens
ggacacttggatgtt

SEQ ID NO: 690053 - DNA, 15 bp, Homo sapiens
gacacttggatgttg

SEQ ID NO: 690054 - DNA, 15 bp, Homo sapiens
acacttggatgttgt

SEQ ID NO: 690055 - DNA, 15 bp, Homo sapiens
cacttggatgttgtt

SEQ ID NO: 690056 - DNA, 15 bp, Homo sapiens
acttggatgttgtta

SEQ ID NO: 690057 - DNA, 15 bp, Homo sapiens
cttggatgttgttag

SEQ ID NO: 690058 - DNA, 15 bp, Homo sapiens
ttggatgttgttaga

SEQ ID NO: 690059 - DNA, 15 bp, Homo sapiens
tggatgttgttagaa

SEQ ID NO: 690060 - DNA, 15 bp, Homo sapiens
ggatgttgttagaaa

SEQ ID NO: 690061 - DNA, 15 bp, Homo sapiens
gatgttgttagaaaa

SEQ ID NO: 690062 - DNA, 15 bp, Homo sapiens
atgttgttagaaaat

SEQ ID NO: 690063 - DNA, 15 bp, Homo sapiens
tgttgttagaaaatg

SEQ ID NO: 690064 - DNA, 15 bp, Homo sapiens
gttgttagaaaatga

SEQ ID NO: 690065 - DNA, 15 bp, Homo sapiens
ttgttagaaaatgac

SEQ ID NO: 690066 - DNA, 15 bp, Homo sapiens
tgttagaaaatgaca

SEQ ID NO: 690067 - DNA, 15 bp, Homo sapiens
gttagaaaatgacag

SEQ ID NO: 690068 - DNA, 15 bp, Homo sapiens
ttagaaaatgacaga

SEQ ID NO: 690069 - DNA, 15 bp, Homo sapiens
tagaaaatgacagac

SEQ ID NO: 690070 - DNA, 15 bp, Homo sapiens
agaaaatgacagacc

SEQ ID NO: 690071 - DNA, 15 bp, Homo sapiens
gaaaatgacagacct

SEQ ID NO: 690072 - DNA, 15 bp, Homo sapiens
aaaatgacagacctt

SEQ ID NO: 690073 - DNA, 15 bp, Homo sapiens
aaatgacagacctta

SEQ ID NO: 690074 - DNA, 15 bp, Homo sapiens
aatgacagaccttat

SEQ ID NO: 690075 - DNA, 15 bp, Homo sapiens
atgacagaccttatg

SEQ ID NO: 690076 - DNA, 15 bp, Homo sapiens
tgacagaccttatgt

SEQ ID NO: 690077 - DNA, 15 bp, Homo sapiens
gacagaccttatgta

SEQ ID NO: 690078 - DNA, 15 bp, Homo sapiens
acagaccttatgtac

SEQ ID NO: 690079 - DNA, 15 bp, Homo sapiens
cagaccttatgtaca

SEQ ID NO: 690080 - DNA, 15 bp, Homo sapiens
agaccttatgtacac

SEQ ID NO: 690081 - DNA, 15 bp, Homo sapiens
gaccttatgtacact

SEQ ID NO: 690082 - DNA, 15 bp, Homo sapiens
accttatgtacactg

SEQ ID NO: 690083 - DNA, 15 bp, Homo sapiens
ccttatgtacactga

SEQ ID NO: 690084 - DNA, 15 bp, Homo sapiens
cttatgtacactgag

SEQ ID NO: 690085 - DNA, 15 bp, Homo sapiens
ttatgtacactgagg

SEQ ID NO: 690086 - DNA, 15 bp, Homo sapiens
tatgtacactgaggt

SEQ ID NO: 690087 - DNA, 15 bp, Homo sapiens
atgtacactgaggta

SEQ ID NO: 690088 - DNA, 15 bp, Homo sapiens
tgtacactgaggtaa

SEQ ID NO: 690089 - DNA, 15 bp, Homo sapiens
gtacactgaggtaaa

SEQ ID NO: 690090 - DNA, 15 bp, Homo sapiens
tacactgaggtaaac

SEQ ID NO: 690091 - DNA, 15 bp, Homo sapiens
acactgaggtaaact

SEQ ID NO: 690092 - DNA, 15 bp, Homo sapiens
cactgaggtaaactc

SEQ ID NO: 690093 - DNA, 15 bp, Homo sapiens
actgaggtaaactcc

SEQ ID NO: 690094 - DNA, 15 bp, Homo sapiens
ctgaggtaaactcca

SEQ ID NO: 690095 - DNA, 15 bp, Homo sapiens
tgaggtaaactccag

SEQ ID NO: 690096 - DNA, 15 bp, Homo sapiens
gaggtaaactccaga

SEQ ID NO: 690097 - DNA, 15 bp, Homo sapiens
aggtaaactccagaa

SEQ ID NO: 690098 - DNA, 15 bp, Homo sapiens
ggtaaactccagaat

SEQ ID NO: 690099 - DNA, 15 bp, Homo sapiens
gtaaactccagaata

SEQ ID NO: 690100 - DNA, 15 bp, Homo sapiens
taaactccagaatat

SEQ ID NO: 690101 - DNA, 15 bp, Homo sapiens
aaactccagaatatt

SEQ ID NO: 690102 - DNA, 15 bp, Homo sapiens
aactccagaatattc

SEQ ID NO: 690103 - DNA, 15 bp, Homo sapiens
actccagaatattct

SEQ ID NO: 690104 - DNA, 15 bp, Homo sapiens
ctccagaatattctg

SEQ ID NO: 690105 - DNA, 15 bp, Homo sapiens
tccagaatattctgg

SEQ ID NO: 690106 - DNA, 15 bp, Homo sapiens
ccagaatattctgga

SEQ ID NO: 690107 - DNA, 15 bp, Homo sapiens
cagaatattctggat

SEQ ID NO: 690108 - DNA, 15 bp, Homo sapiens
agaatattctggata

SEQ ID NO: 690109 - DNA, 15 bp, Homo sapiens
gaatattctggatag

SEQ ID NO: 690110 - DNA, 15 bp, Homo sapiens
aatattctggataga

SEQ ID NO: 690111 - DNA, 15 bp, Homo sapiens
atattctggatagac

SEQ ID NO: 690112 - DNA, 15 bp, Homo sapiens
tattctggatagact

SEQ ID NO: 690113 - DNA, 15 bp, Homo sapiens
attctggatagactc

SEQ ID NO: 690114 - DNA, 15 bp, Homo sapiens
ttctggatagactca

SEQ ID NO: 690115 - DNA, 15 bp, Homo sapiens
tctggatagactcag

SEQ ID NO: 690116 - DNA, 15 bp, Homo sapiens
ctggatagactcagt

SEQ ID NO: 690117 - DNA, 15 bp, Homo sapiens
tggatagactcagtt

SEQ ID NO: 690118 - DNA, 15 bp, Homo sapiens
ggatagactcagttc

SEQ ID NO: 690119 - DNA, 15 bp, Homo sapiens
gatagactcagttcc

SEQ ID NO: 690120 - DNA, 15 bp, Homo sapiens
atagactcagttcct

SEQ ID NO: 690121 - DNA, 15 bp, Homo sapiens
tagactcagttcctg

SEQ ID NO: 690122 - DNA, 15 bp, Homo sapiens
agactcagttcctgt

SEQ ID NO: 690123 - DNA, 15 bp, Homo sapiens
gactcagttcctgta

SEQ ID NO: 690124 - DNA, 15 bp, Homo sapiens
actcagttcctgtat

SEQ ID NO: 690125 - DNA, 15 bp, Homo sapiens
ctcagttcctgtatc

SEQ ID NO: 690126 - DNA, 15 bp, Homo sapiens
tcagttcctgtatct

SEQ ID NO: 690127 - DNA, 15 bp, Homo sapiens
cagttcctgtatcta

SEQ ID NO: 690128 - DNA, 15 bp, Homo sapiens
agttcctgtatctac

SEQ ID NO: 690129 - DNA, 15 bp, Homo sapiens
gttcctgtatctact

SEQ ID NO: 690130 - DNA, 15 bp, Homo sapiens
ttcctgtatctactg

SEQ ID NO: 690131 - DNA, 15 bp, Homo sapiens
tcctgtatctactga

SEQ ID NO: 690132 - DNA, 15 bp, Homo sapiens
cctgtatctactgaa

SEQ ID NO: 690133 - DNA, 15 bp, Homo sapiens
ctgtatctactgaac

SEQ ID NO: 690134 - DNA, 15 bp, Homo sapiens
tgtatctactgaaca

SEQ ID NO: 690135 - DNA, 15 bp, Homo sapiens
gtatctactgaacac

SEQ ID NO: 690136 - DNA, 15 bp, Homo sapiens
tatctactgaacaca

SEQ ID NO: 690137 - DNA, 15 bp, Homo sapiens
atctactgaacacat

SEQ ID NO: 690138 - DNA, 15 bp, Homo sapiens
tctactgaacacatt

SEQ ID NO: 690139 - DNA, 15 bp, Homo sapiens
ctactgaacacattc

SEQ ID NO: 690140 - DNA, 15 bp, Homo sapiens
tactgaacacattca

SEQ ID NO: 690141 - DNA, 15 bp, Homo sapiens
actgaacacattcaa

SEQ ID NO: 690142 - DNA, 15 bp, Homo sapiens
ctgaacacattcaag

SEQ ID NO: 690143 - DNA, 15 bp, Homo sapiens
tgaacacattcaagc

SEQ ID NO: 690144 - DNA, 15 bp, Homo sapiens
gaacacattcaagca

SEQ ID NO: 690145 - DNA, 15 bp, Homo sapiens
aacacattcaagcag

SEQ ID NO: 690146 - DNA, 15 bp, Homo sapiens
acacattcaagcagg

SEQ ID NO: 690147 - DNA, 15 bp, Homo sapiens
cacattcaagcaggc

SEQ ID NO: 690148 - DNA, 15 bp, Homo sapiens
acattcaagcaggct

SEQ ID NO: 690149 - DNA, 15 bp, Homo sapiens
cattcaagcaggctg

SEQ ID NO: 690150 - DNA, 15 bp, Homo sapiens
attcaagcaggctga

SEQ ID NO: 690151 - DNA, 15 bp, Homo sapiens
ttcaagcaggctgaa

SEQ ID NO: 690152 - DNA, 15 bp, Homo sapiens
tcaagcaggctgaag

SEQ ID NO: 690153 - DNA, 15 bp, Homo sapiens
caagcaggctgaagt

SEQ ID NO: 690154 - DNA, 15 bp, Homo sapiens
aagcaggctgaagtg

SEQ ID NO: 690155 - DNA, 15 bp, Homo sapiens
agcaggctgaagtgg

SEQ ID NO: 690156 - DNA, 15 bp, Homo sapiens
gcaggctgaagtggc

SEQ ID NO: 690157 - DNA, 15 bp, Homo sapiens
caggctgaagtggct

SEQ ID NO: 690158 - DNA, 15 bp, Homo sapiens
aggctgaagtggctt

SEQ ID NO: 690159 - DNA, 15 bp, Homo sapiens
ggctgaagtggcttc

SEQ ID NO: 690160 - DNA, 15 bp, Homo sapiens
gctgaagtggcttct

SEQ ID NO: 690161 - DNA, 15 bp, Homo sapiens
ctgaagtggcttctt

SEQ ID NO: 690162 - DNA, 15 bp, Homo sapiens
tgaagtggcttcttg

SEQ ID NO: 690163 - DNA, 15 bp, Homo sapiens
gaagtggcttcttgt

SEQ ID NO: 690164 - DNA, 15 bp, Homo sapiens
aagtggcttcttgtt

SEQ ID NO: 690165 - DNA, 15 bp, Homo sapiens
agtggcttcttgttc

SEQ ID NO: 690166 - DNA, 15 bp, Homo sapiens
gtggcttcttgttcc

SEQ ID NO: 690167 - DNA, 15 bp, Homo sapiens
tggcttcttgttccc

SEQ ID NO: 690168 - DNA, 15 bp, Homo sapiens
ggcttcttgttcccc

SEQ ID NO: 690169 - DNA, 15 bp, Homo sapiens
gcttcttgttcccca

SEQ ID NO: 690170 - DNA, 15 bp, Homo sapiens
cttcttgttccccaa

SEQ ID NO: 690171 - DNA, 15 bp, Homo sapiens
ttcttgttccccaaa

SEQ ID NO: 690172 - DNA, 15 bp, Homo sapiens
tcttgttccccaaaa

SEQ ID NO: 690173 - DNA, 15 bp, Homo sapiens
cttgttccccaaaat

SEQ ID NO: 690174 - DNA, 15 bp, Homo sapiens
ttgttccccaaaatg

SEQ ID NO: 690175 - DNA, 15 bp, Homo sapiens
tgttccccaaaatgt

SEQ ID NO: 690176 - DNA, 15 bp, Homo sapiens
gttccccaaaatgta

SEQ ID NO: 690177 - DNA, 15 bp, Homo sapiens
ttccccaaaatgtac

SEQ ID NO: 690178 - DNA, 15 bp, Homo sapiens
tccccaaaatgtaca

SEQ ID NO: 690179 - DNA, 15 bp, Homo sapiens
ccccaaaatgtacat

SEQ ID NO: 690180 - DNA, 15 bp, Homo sapiens
cccaaaatgtacatc

SEQ ID NO: 690181 - DNA, 15 bp, Homo sapiens
ccaaaatgtacatcg

SEQ ID NO: 690182 - DNA, 15 bp, Homo sapiens
caaaatgtacatcgt

SEQ ID NO: 690183 - DNA, 15 bp, Homo sapiens
aaaatgtacatcgta

SEQ ID NO: 690184 - DNA, 15 bp, Homo sapiens
aaatgtacatcgtac

SEQ ID NO: 690185 - DNA, 15 bp, Homo sapiens
aatgtacatcgtaca

SEQ ID NO: 690186 - DNA, 15 bp, Homo sapiens
atgtacatcgtacat

SEQ ID NO: 690187 - DNA, 15 bp, Homo sapiens
tgtacatcgtacata

SEQ ID NO: 690188 - DNA, 15 bp, Homo sapiens
gtacatcgtacatag

SEQ ID NO: 690189 - DNA, 15 bp, Homo sapiens
tacatcgtacatagc

SEQ ID NO: 690190 - DNA, 15 bp, Homo sapiens
acatcgtacatagct

SEQ ID NO: 690191 - DNA, 15 bp, Homo sapiens
catcgtacatagcta

SEQ ID NO: 690192 - DNA, 15 bp, Homo sapiens
atcgtacatagctaa

SEQ ID NO: 690193 - DNA, 15 bp, Homo sapiens
tcgtacatagctaaa

SEQ ID NO: 690194 - DNA, 15 bp, Homo sapiens
cgtacatagctaaat

SEQ ID NO: 690195 - DNA, 15 bp, Homo sapiens
gtacatagctaaata

SEQ ID NO: 690196 - DNA, 15 bp, Homo sapiens
tacatagctaaataa

SEQ ID NO: 690197 - DNA, 15 bp, Homo sapiens
acatagctaaataaa

SEQ ID NO: 690198 - DNA, 15 bp, Homo sapiens
catagctaaataaag

SEQ ID NO: 690199 - DNA, 15 bp, Homo sapiens
atagctaaataaagc

SEQ ID NO: 690200 - DNA, 15 bp, Homo sapiens
tagctaaataaagct

SEQ ID NO: 690201 - DNA, 15 bp, Homo sapiens
agctaaataaagcta

SEQ ID NO: 690202 - DNA, 15 bp, Homo sapiens
gctaaataaagctac

SEQ ID NO: 690203 - DNA, 15 bp, Homo sapiens
ctaaataaagctact

SEQ ID NO: 690204 - DNA, 15 bp, Homo sapiens
taaataaagctactt

SEQ ID NO: 690205 - DNA, 15 bp, Homo sapiens
aaataaagctacttt

SEQ ID NO: 690206 - DNA, 15 bp, Homo sapiens
aataaagctactttt

SEQ ID NO: 690207 - DNA, 15 bp, Homo sapiens
ataaagctacttttg

SEQ ID NO: 690208 - DNA, 15 bp, Homo sapiens
taaagctacttttgg

SEQ ID NO: 690209 - DNA, 15 bp, Homo sapiens
aaagctacttttggc

SEQ ID NO: 690210 - DNA, 15 bp, Homo sapiens
aagctacttttggca

SEQ ID NO: 690211 - DNA, 15 bp, Homo sapiens
agctacttttggcaa

SEQ ID NO: 690212 - DNA, 15 bp, Homo sapiens
gctacttttggcaaa

SEQ ID NO: 690213 - DNA, 15 bp, Homo sapiens
ctacttttggcaaaa

SEQ ID NO: 690214 - DNA, 15 bp, Homo sapiens
tacttttggcaaaag

SEQ ID NO: 690215 - DNA, 15 bp, Homo sapiens
acttttggcaaaagt

SEQ ID NO: 690216 - DNA, 15 bp, Homo sapiens
cttttggcaaaagtc

SEQ ID NO: 690217 - DNA, 15 bp, Homo sapiens
ttttggcaaaagtct

SEQ ID NO: 690218 - DNA, 15 bp, Homo sapiens
tttggcaaaagtcta

SEQ ID NO: 690219 - DNA, 15 bp, Homo sapiens
ttggcaaaagtctat

SEQ ID NO: 690220 - DNA, 15 bp, Homo sapiens
tggcaaaagtctatt

SEQ ID NO: 690221 - DNA, 15 bp, Homo sapiens
ggcaaaagtctattc

SEQ ID NO: 690222 - DNA, 15 bp, Homo sapiens
gcaaaagtctattcc

SEQ ID NO: 690223 - DNA, 15 bp, Homo sapiens
caaaagtctattcct

SEQ ID NO: 690224 - DNA, 15 bp, Homo sapiens
aaaagtctattcctc

SEQ ID NO: 690225 - DNA, 15 bp, Homo sapiens
aaagtctattcctca

SEQ ID NO: 690226 - DNA, 15 bp, Homo sapiens
aagtctattcctcaa

SEQ ID NO: 690227 - DNA, 15 bp, Homo sapiens
agtctattcctcaat

SEQ ID NO: 690228 - DNA, 15 bp, Homo sapiens
gtctattcctcaatc

SEQ ID NO: 690229 - DNA, 15 bp, Homo sapiens
tctattcctcaatcc

SEQ ID NO: 690230 - DNA, 15 bp, Homo sapiens
ctattcctcaatccc

SEQ ID NO: 690231 - DNA, 15 bp, Homo sapiens
tattcctcaatccca

SEQ ID NO: 690232 - DNA, 15 bp, Homo sapiens
attcctcaatcccac

SEQ ID NO: 690233 - DNA, 15 bp, Homo sapiens
ttcctcaatcccacc

SEQ ID NO: 690234 - DNA, 15 bp, Homo sapiens
tcctcaatcccacca

SEQ ID NO: 690235 - DNA, 15 bp, Homo sapiens
cctcaatcccaccag

SEQ ID NO: 690236 - DNA, 15 bp, Homo sapiens
ctcaatcccaccaga

SEQ ID NO: 690237 - DNA, 15 bp, Homo sapiens
tcaatcccaccagat

SEQ ID NO: 690238 - DNA, 15 bp, Homo sapiens
caatcccaccagatg

SEQ ID NO: 690239 - DNA, 15 bp, Homo sapiens
aatcccaccagatgg

SEQ ID NO: 690240 - DNA, 15 bp, Homo sapiens
atcccaccagatgga

SEQ ID NO: 690241 - DNA, 15 bp, Homo sapiens
tcccaccagatggaa

SEQ ID NO: 690242 - DNA, 15 bp, Homo sapiens
cccaccagatggaag

SEQ ID NO: 690243 - DNA, 15 bp, Homo sapiens
ccaccagatggaagt

SEQ ID NO: 690244 - DNA, 15 bp, Homo sapiens
caccagatggaagta

SEQ ID NO: 690245 - DNA, 15 bp, Homo sapiens
accagatggaagtag

SEQ ID NO: 690246 - DNA, 15 bp, Homo sapiens
ccagatggaagtaga

SEQ ID NO: 690247 - DNA, 15 bp, Homo sapiens
cagatggaagtagaa

SEQ ID NO: 690248 - DNA, 15 bp, Homo sapiens
agatggaagtagaac

SEQ ID NO: 690249 - DNA, 15 bp, Homo sapiens
gatggaagtagaacc

SEQ ID NO: 690250 - DNA, 15 bp, Homo sapiens
atggaagtagaacca

SEQ ID NO: 690251 - DNA, 15 bp, Homo sapiens
tggaagtagaaccaa

SEQ ID NO: 690252 - DNA, 15 bp, Homo sapiens
ggaagtagaaccaag

SEQ ID NO: 690253 - DNA, 15 bp, Homo sapiens
gaagtagaaccaaga

SEQ ID NO: 690254 - DNA, 15 bp, Homo sapiens
aagtagaaccaagac

SEQ ID NO: 690255 - DNA, 15 bp, Homo sapiens
agtagaaccaagaca

SEQ ID NO: 690256 - DNA, 15 bp, Homo sapiens
gtagaaccaagacaa

SEQ ID NO: 690257 - DNA, 15 bp, Homo sapiens
tagaaccaagacaag

SEQ ID NO: 690258 - DNA, 15 bp, Homo sapiens
agaaccaagacaagg

SEQ ID NO: 690259 - DNA, 15 bp, Homo sapiens
gaaccaagacaagga

SEQ ID NO: 690260 - DNA, 15 bp, Homo sapiens
aaccaagacaaggac

SEQ ID NO: 690261 - DNA, 15 bp, Homo sapiens
accaagacaaggacc

SEQ ID NO: 690262 - DNA, 15 bp, Homo sapiens
ccaagacaaggacct

SEQ ID NO: 690263 - DNA, 15 bp, Homo sapiens
caagacaaggacctc

SEQ ID NO: 690264 - DNA, 15 bp, Homo sapiens
aagacaaggacctca

SEQ ID NO: 690265 - DNA, 15 bp, Homo sapiens
agacaaggacctcat

SEQ ID NO: 690266 - DNA, 15 bp, Homo sapiens
gacaaggacctcatg

SEQ ID NO: 690267 - DNA, 15 bp, Homo sapiens
acaaggacctcatgg

SEQ ID NO: 690268 - DNA, 15 bp, Homo sapiens
caaggacctcatggc

SEQ ID NO: 690269 - DNA, 15 bp, Homo sapiens
aaggacctcatggcc

SEQ ID NO: 690270 - DNA, 15 bp, Homo sapiens
aggacctcatggcca

SEQ ID NO: 690271 - DNA, 15 bp, Homo sapiens
ggacctcatggccat

SEQ ID NO: 690272 - DNA, 15 bp, Homo sapiens
gacctcatggccatt

SEQ ID NO: 690273 - DNA, 15 bp, Homo sapiens
acctcatggccatta

SEQ ID NO: 690274 - DNA, 15 bp, Homo sapiens
cctcatggccattag

SEQ ID NO: 690275 - DNA, 15 bp, Homo sapiens
ctcatggccattaga

SEQ ID NO: 690276 - DNA, 15 bp, Homo sapiens
tcatggccattagaa

SEQ ID NO: 690277 - DNA, 15 bp, Homo sapiens
catggccattagaaa

SEQ ID NO: 690278 - DNA, 15 bp, Homo sapiens
atggccattagaaat

SEQ ID NO: 690279 - DNA, 15 bp, Homo sapiens
tggccattagaaatc

SEQ ID NO: 690280 - DNA, 15 bp, Homo sapiens
ggccattagaaatct

SEQ ID NO: 690281 - DNA, 15 bp, Homo sapiens
gccattagaaatctc

SEQ ID NO: 690282 - DNA, 15 bp, Homo sapiens
ccattagaaatctca

SEQ ID NO: 690283 - DNA, 15 bp, Homo sapiens
cattagaaatctcag

SEQ ID NO: 690284 - DNA, 15 bp, Homo sapiens
attagaaatctcagg

SEQ ID NO: 690285 - DNA, 15 bp, Homo sapiens
ttagaaatctcaggg

SEQ ID NO: 690286 - DNA, 15 bp, Homo sapiens
tagaaatctcagggt

SEQ ID NO: 690287 - DNA, 15 bp, Homo sapiens
agaaatctcagggtg

SEQ ID NO: 690288 - DNA, 15 bp, Homo sapiens
gaaatctcagggtgg

SEQ ID NO: 690289 - DNA, 15 bp, Homo sapiens
aaatctcagggtggc

SEQ ID NO: 690290 - DNA, 15 bp, Homo sapiens
aatctcagggtggcc

SEQ ID NO: 690291 - DNA, 15 bp, Homo sapiens
atctcagggtggccg

SEQ ID NO: 690292 - DNA, 15 bp, Homo sapiens
tctcagggtggccgg

SEQ ID NO: 690293 - DNA, 15 bp, Homo sapiens
ctcagggtggccggg

SEQ ID NO: 690294 - DNA, 15 bp, Homo sapiens
tcagggtggccgggc

SEQ ID NO: 690295 - DNA, 15 bp, Homo sapiens
cagggtggccgggca

SEQ ID NO: 690296 - DNA, 15 bp, Homo sapiens
agggtggccgggcac

SEQ ID NO: 690297 - DNA, 15 bp, Homo sapiens
gggtggccgggcaca

SEQ ID NO: 690298 - DNA, 15 bp, Homo sapiens
ggtggccgggcacag

SEQ ID NO: 690299 - DNA, 15 bp, Homo sapiens
gtggccgggcacagt

SEQ ID NO: 690300 - DNA, 15 bp, Homo sapiens
tggccgggcacagtg

SEQ ID NO: 690301 - DNA, 15 bp, Homo sapiens
ggccgggcacagtgg

SEQ ID NO: 690302 - DNA, 15 bp, Homo sapiens
gccgggcacagtggc

SEQ ID NO: 690303 - DNA, 15 bp, Homo sapiens
ccgggcacagtggct

SEQ ID NO: 690304 - DNA, 15 bp, Homo sapiens
cgggcacagtggctc

SEQ ID NO: 690305 - DNA, 15 bp, Homo sapiens
gggcacagtggctca

SEQ ID NO: 690306 - DNA, 15 bp, Homo sapiens
gcacagtggctcacg

SEQ ID NO: 690307 - DNA, 15 bp, Homo sapiens
cacagtggctcacgc

SEQ ID NO: 690308 - DNA, 15 bp, Homo sapiens
acagtggctcacgcc

SEQ ID NO: 690309 - DNA, 15 bp, Homo sapiens
cagcactttgggagt

SEQ ID NO: 690310 - DNA, 15 bp, Homo sapiens
agcactttgggagtc

SEQ ID NO: 690311 - DNA, 15 bp, Homo sapiens
gcactttgggagtcg

SEQ ID NO: 690312 - DNA, 15 bp, Homo sapiens
cactttgggagtcgg

SEQ ID NO: 690313 - DNA, 15 bp, Homo sapiens
actttgggagtcgga

SEQ ID NO: 690314 - DNA, 15 bp, Homo sapiens
ctttgggagtcggag

SEQ ID NO: 690315 - DNA, 15 bp, Homo sapiens
tttgggagtcggagg

SEQ ID NO: 690316 - DNA, 15 bp, Homo sapiens
ttgggagtcggaggt

SEQ ID NO: 690317 - DNA, 15 bp, Homo sapiens
tgggagtcggaggtt

SEQ ID NO: 690318 - DNA, 15 bp, Homo sapiens
gggagtcggaggttg

SEQ ID NO: 690319 - DNA, 15 bp, Homo sapiens
ggagtcggaggttgg

SEQ ID NO: 690320 - DNA, 15 bp, Homo sapiens
gagtcggaggttgga

SEQ ID NO: 690321 - DNA, 15 bp, Homo sapiens
agtcggaggttggat

SEQ ID NO: 690322 - DNA, 15 bp, Homo sapiens
gtcggaggttggatc

SEQ ID NO: 690323 - DNA, 15 bp, Homo sapiens
tcggaggttggatca

SEQ ID NO: 690324 - DNA, 15 bp, Homo sapiens
cggaggttggatcac

SEQ ID NO: 690325 - DNA, 15 bp, Homo sapiens
ggaggttggatcact

SEQ ID NO: 690326 - DNA, 15 bp, Homo sapiens
gaggttggatcactt

SEQ ID NO: 690327 - DNA, 15 bp, Homo sapiens
aggttggatcacttg

SEQ ID NO: 690328 - DNA, 15 bp, Homo sapiens
ggttggatcacttga

SEQ ID NO: 690329 - DNA, 15 bp, Homo sapiens
gttggatcacttgag

SEQ ID NO: 690330 - DNA, 15 bp, Homo sapiens
ttggatcacttgagg

SEQ ID NO: 690331 - DNA, 15 bp, Homo sapiens
tggatcacttgaggt

SEQ ID NO: 690332 - DNA, 15 bp, Homo sapiens
atcacttgaggtcaa

SEQ ID NO: 690333 - DNA, 15 bp, Homo sapiens
tcacttgaggtcaag

SEQ ID NO: 690334 - DNA, 15 bp, Homo sapiens
cacttgaggtcaaga

SEQ ID NO: 690335 - DNA, 15 bp, Homo sapiens
acttgaggtcaagag

SEQ ID NO: 690336 - DNA, 15 bp, Homo sapiens
cttgaggtcaagagt

SEQ ID NO: 690337 - DNA, 15 bp, Homo sapiens
ttgaggtcaagagtt

SEQ ID NO: 690338 - DNA, 15 bp, Homo sapiens
tgaggtcaagagttc

SEQ ID NO: 690339 - DNA, 15 bp, Homo sapiens
gaggtcaagagttcg

SEQ ID NO: 690340 - DNA, 15 bp, Homo sapiens
aggtcaagagttcga

SEQ ID NO: 690341 - DNA, 15 bp, Homo sapiens
ggtcaagagttcgag

SEQ ID NO: 690342 - DNA, 15 bp, Homo sapiens
gtcaagagttcgaga

SEQ ID NO: 690343 - DNA, 15 bp, Homo sapiens
tcaagagttcgagac

SEQ ID NO: 690344 - DNA, 15 bp, Homo sapiens
caagagttcgagacc

SEQ ID NO: 690345 - DNA, 15 bp, Homo sapiens
aagagttcgagacca

SEQ ID NO: 690346 - DNA, 15 bp, Homo sapiens
agagttcgagaccag

SEQ ID NO: 690347 - DNA, 15 bp, Homo sapiens
gagttcgagaccagc

SEQ ID NO: 690348 - DNA, 15 bp, Homo sapiens
agttcgagaccagcc

SEQ ID NO: 690349 - DNA, 15 bp, Homo sapiens
gttcgagaccagcct

SEQ ID NO: 690350 - DNA, 15 bp, Homo sapiens
agaccagcctggccg

SEQ ID NO: 690351 - DNA, 15 bp, Homo sapiens
gaccagcctggccga

SEQ ID NO: 690352 - DNA, 15 bp, Homo sapiens
accagcctggccgac

SEQ ID NO: 690353 - DNA, 15 bp, Homo sapiens
ccagcctggccgacg

SEQ ID NO: 690354 - DNA, 15 bp, Homo sapiens
cagcctggccgacgt

SEQ ID NO: 690355 - DNA, 15 bp, Homo sapiens
agcctggccgacgtg

SEQ ID NO: 690356 - DNA, 15 bp, Homo sapiens
gcctggccgacgtgg

SEQ ID NO: 690357 - DNA, 15 bp, Homo sapiens
cctggccgacgtggc

SEQ ID NO: 690358 - DNA, 15 bp, Homo sapiens
ctggccgacgtggca

SEQ ID NO: 690359 - DNA, 15 bp, Homo sapiens
tggccgacgtggcaa

SEQ ID NO: 690360 - DNA, 15 bp, Homo sapiens
ggccgacgtggcaaa

SEQ ID NO: 690361 - DNA, 15 bp, Homo sapiens
gccgacgtggcaaaa

SEQ ID NO: 690362 - DNA, 15 bp, Homo sapiens
ccgacgtggcaaaaa

SEQ ID NO: 690363 - DNA, 15 bp, Homo sapiens
cgacgtggcaaaaac

SEQ ID NO: 690364 - DNA, 15 bp, Homo sapiens
gacgtggcaaaaacc

SEQ ID NO: 690365 - DNA, 15 bp, Homo sapiens
acgtggcaaaaacct

SEQ ID NO: 690366 - DNA, 15 bp, Homo sapiens
cgtggcaaaaacctg

SEQ ID NO: 690367 - DNA, 15 bp, Homo sapiens
gtggcaaaaacctgt

SEQ ID NO: 690368 - DNA, 15 bp, Homo sapiens
tggcaaaaacctgtc

SEQ ID NO: 690369 - DNA, 15 bp, Homo sapiens
ggcaaaaacctgtct

SEQ ID NO: 690370 - DNA, 15 bp, Homo sapiens
gcaaaaacctgtctc

SEQ ID NO: 690371 - DNA, 15 bp, Homo sapiens
caaaaacctgtctct

SEQ ID NO: 690372 - DNA, 15 bp, Homo sapiens
aaaaacctgtctcta

SEQ ID NO: 690373 - DNA, 15 bp, Homo sapiens
aaaacctgtctctac

SEQ ID NO: 690374 - DNA, 15 bp, Homo sapiens
aaacctgtctctact

SEQ ID NO: 690375 - DNA, 15 bp, Homo sapiens
aacctgtctctacta

SEQ ID NO: 690376 - DNA, 15 bp, Homo sapiens
acctgtctctactaa

SEQ ID NO: 690377 - DNA, 15 bp, Homo sapiens
aaaattagccaggcg

SEQ ID NO: 690378 - DNA, 15 bp, Homo sapiens
aaattagccaggcgt

SEQ ID NO: 690379 - DNA, 15 bp, Homo sapiens
aattagccaggcgtg

SEQ ID NO: 690380 - DNA, 15 bp, Homo sapiens
attagccaggcgtgg

SEQ ID NO: 690381 - DNA, 15 bp, Homo sapiens
ttagccaggcgtggt

SEQ ID NO: 690382 - DNA, 15 bp, Homo sapiens
tagccaggcgtggtg

SEQ ID NO: 690383 - DNA, 15 bp, Homo sapiens
agccaggcgtggtgg

SEQ ID NO: 690384 - DNA, 15 bp, Homo sapiens
gccaggcgtggtggt

SEQ ID NO: 690385 - DNA, 15 bp, Homo sapiens
ccaggcgtggtggtg

SEQ ID NO: 690386 - DNA, 15 bp, Homo sapiens
caggcgtggtggtgc

SEQ ID NO: 690387 - DNA, 15 bp, Homo sapiens
aggcgtggtggtgcg

SEQ ID NO: 690388 - DNA, 15 bp, Homo sapiens
ggcgtggtggtgcgt

SEQ ID NO: 690389 - DNA, 15 bp, Homo sapiens
gcgtggtggtgcgtg

SEQ ID NO: 690390 - DNA, 15 bp, Homo sapiens
cgtggtggtgcgtgc

SEQ ID NO: 690391 - DNA, 15 bp, Homo sapiens
gtggtggtgcgtgcc

SEQ ID NO: 690392 - DNA, 15 bp, Homo sapiens
tggtggtgcgtgcct

SEQ ID NO: 690393 - DNA, 15 bp, Homo sapiens
ggtggtgcgtgcctg

SEQ ID NO: 690394 - DNA, 15 bp, Homo sapiens
gtggtgcgtgcctgt

SEQ ID NO: 690395 - DNA, 15 bp, Homo sapiens
tggtgcgtgcctgta

SEQ ID NO: 690396 - DNA, 15 bp, Homo sapiens
ggtgcgtgcctgtaa

SEQ ID NO: 690397 - DNA, 15 bp, Homo sapiens
gtgcgtgcctgtaaa

SEQ ID NO: 690398 - DNA, 15 bp, Homo sapiens
tgcgtgcctgtaaat

SEQ ID NO: 690399 - DNA, 15 bp, Homo sapiens
gcgtgcctgtaaatc

SEQ ID NO: 690400 - DNA, 15 bp, Homo sapiens
cgtgcctgtaaatcc

SEQ ID NO: 690401 - DNA, 15 bp, Homo sapiens
gtgcctgtaaatccc

SEQ ID NO: 690402 - DNA, 15 bp, Homo sapiens
tgcctgtaaatccca

SEQ ID NO: 690403 - DNA, 15 bp, Homo sapiens
gcctgtaaatcccag

SEQ ID NO: 690404 - DNA, 15 bp, Homo sapiens
cctgtaaatcccagc

SEQ ID NO: 690405 - DNA, 15 bp, Homo sapiens
ctgtaaatcccagct

SEQ ID NO: 690406 - DNA, 15 bp, Homo sapiens
tgtaaatcccagcta

SEQ ID NO: 690407 - DNA, 15 bp, Homo sapiens
gtaaatcccagctac

SEQ ID NO: 690408 - DNA, 15 bp, Homo sapiens
aggtcattttcctgt

SEQ ID NO: 690409 - DNA, 15 bp, Homo sapiens
ggtcattttcctgtt

SEQ ID NO: 690410 - DNA, 15 bp, Homo sapiens
gtcattttcctgttt

SEQ ID NO: 690411 - DNA, 15 bp, Homo sapiens
tcattttcctgtttc

SEQ ID NO: 690412 - DNA, 15 bp, Homo sapiens
cattttcctgtttct

SEQ ID NO: 690413 - DNA, 15 bp, Homo sapiens
attttcctgtttcta

SEQ ID NO: 690414 - DNA, 15 bp, Homo sapiens
ttttcctgtttctac

SEQ ID NO: 690415 - DNA, 15 bp, Homo sapiens
tttcctgtttctaca

SEQ ID NO: 690416 - DNA, 15 bp, Homo sapiens
ttcctgtttctacaa

SEQ ID NO: 690417 - DNA, 15 bp, Homo sapiens
tcctgtttctacaac

SEQ ID NO: 690418 - DNA, 15 bp, Homo sapiens
cctgtttctacaaca

SEQ ID NO: 690419 - DNA, 15 bp, Homo sapiens
ctgtttctacaacat

SEQ ID NO: 690420 - DNA, 15 bp, Homo sapiens
tgtttctacaacatg

SEQ ID NO: 690421 - DNA, 15 bp, Homo sapiens
gtttctacaacatgc

SEQ ID NO: 690422 - DNA, 15 bp, Homo sapiens
tttctacaacatgcc

SEQ ID NO: 690423 - DNA, 15 bp, Homo sapiens
ttctacaacatgcct

SEQ ID NO: 690424 - DNA, 15 bp, Homo sapiens
tctacaacatgcctc

SEQ ID NO: 690425 - DNA, 15 bp, Homo sapiens
ctacaacatgcctct

SEQ ID NO: 690426 - DNA, 15 bp, Homo sapiens
tacaacatgcctctc

SEQ ID NO: 690427 - DNA, 15 bp, Homo sapiens
acaacatgcctctca

SEQ ID NO: 690428 - DNA, 15 bp, Homo sapiens
caacatgcctctcac

SEQ ID NO: 690429 - DNA, 15 bp, Homo sapiens
aacatgcctctcact

SEQ ID NO: 690430 - DNA, 15 bp, Homo sapiens
acatgcctctcactt

SEQ ID NO: 690431 - DNA, 15 bp, Homo sapiens
catgcctctcacttt

SEQ ID NO: 690432 - DNA, 15 bp, Homo sapiens
atgcctctcactttg

SEQ ID NO: 690433 - DNA, 15 bp, Homo sapiens
tgcctctcactttgc

SEQ ID NO: 690434 - DNA, 15 bp, Homo sapiens
gcctctcactttgct

SEQ ID NO: 690435 - DNA, 15 bp, Homo sapiens
cctctcactttgcta

SEQ ID NO: 690436 - DNA, 15 bp, Homo sapiens
ctctcactttgctac

SEQ ID NO: 690437 - DNA, 15 bp, Homo sapiens
tctcactttgctaca

SEQ ID NO: 690438 - DNA, 15 bp, Homo sapiens
ctcactttgctacag

SEQ ID NO: 690439 - DNA, 15 bp, Homo sapiens
tcactttgctacagc

SEQ ID NO: 690440 - DNA, 15 bp, Homo sapiens
cactttgctacagct

SEQ ID NO: 690441 - DNA, 15 bp, Homo sapiens
actttgctacagcta

SEQ ID NO: 690442 - DNA, 15 bp, Homo sapiens
ctttgctacagctat

SEQ ID NO: 690443 - DNA, 15 bp, Homo sapiens
tttgctacagctata

SEQ ID NO: 690444 - DNA, 15 bp, Homo sapiens
ttgctacagctataa

SEQ ID NO: 690445 - DNA, 15 bp, Homo sapiens
tgctacagctataaa

SEQ ID NO: 690446 - DNA, 15 bp, Homo sapiens
gctacagctataaaa

SEQ ID NO: 690447 - DNA, 15 bp, Homo sapiens
ctacagctataaaac

SEQ ID NO: 690448 - DNA, 15 bp, Homo sapiens
tacagctataaaacc

SEQ ID NO: 690449 - DNA, 15 bp, Homo sapiens
acagctataaaacct

SEQ ID NO: 690450 - DNA, 15 bp, Homo sapiens
cagctataaaacctc

SEQ ID NO: 690451 - DNA, 15 bp, Homo sapiens
agctataaaacctct

SEQ ID NO: 690452 - DNA, 15 bp, Homo sapiens
gctataaaacctcta

SEQ ID NO: 690453 - DNA, 15 bp, Homo sapiens
ctataaaacctctaa

SEQ ID NO: 690454 - DNA, 15 bp, Homo sapiens
tataaaacctctaaa

SEQ ID NO: 690455 - DNA, 15 bp, Homo sapiens
ataaaacctctaaat

SEQ ID NO: 690456 - DNA, 15 bp, Homo sapiens
taaaacctctaaata

SEQ ID NO: 690457 - DNA, 15 bp, Homo sapiens
aaaacctctaaatat

SEQ ID NO: 690458 - DNA, 15 bp, Homo sapiens
aaacctctaaatatt

SEQ ID NO: 690459 - DNA, 15 bp, Homo sapiens
aacctctaaatattc

SEQ ID NO: 690460 - DNA, 15 bp, Homo sapiens
acctctaaatattca

SEQ ID NO: 690461 - DNA, 15 bp, Homo sapiens
cctctaaatattcat

SEQ ID NO: 690462 - DNA, 15 bp, Homo sapiens
ctctaaatattcatg

SEQ ID NO: 690463 - DNA, 15 bp, Homo sapiens
tctaaatattcatgg

SEQ ID NO: 690464 - DNA, 15 bp, Homo sapiens
ctaaatattcatggc

SEQ ID NO: 690465 - DNA, 15 bp, Homo sapiens
taaatattcatggca

SEQ ID NO: 690466 - DNA, 15 bp, Homo sapiens
aaatattcatggcat

SEQ ID NO: 690467 - DNA, 15 bp, Homo sapiens
aatattcatggcata

SEQ ID NO: 690468 - DNA, 15 bp, Homo sapiens
atattcatggcatat

SEQ ID NO: 690469 - DNA, 15 bp, Homo sapiens
tattcatggcatatt

SEQ ID NO: 690470 - DNA, 15 bp, Homo sapiens
attcatggcatattt

SEQ ID NO: 690471 - DNA, 15 bp, Homo sapiens
ttcatggcatatttt

SEQ ID NO: 690472 - DNA, 15 bp, Homo sapiens
tcatggcatattttt

SEQ ID NO: 690473 - DNA, 15 bp, Homo sapiens
catggcatatttttc

SEQ ID NO: 690474 - DNA, 15 bp, Homo sapiens
atggcatatttttca

SEQ ID NO: 690475 - DNA, 15 bp, Homo sapiens
tggcatatttttcaa

SEQ ID NO: 690476 - DNA, 15 bp, Homo sapiens
ggcatatttttcaaa

SEQ ID NO: 690477 - DNA, 15 bp, Homo sapiens
gcatatttttcaaaa

SEQ ID NO: 690478 - DNA, 15 bp, Homo sapiens
catatttttcaaaag

SEQ ID NO: 690479 - DNA, 15 bp, Homo sapiens
atatttttcaaaagt

SEQ ID NO: 690480 - DNA, 15 bp, Homo sapiens
tatttttcaaaagtc

SEQ ID NO: 690481 - DNA, 15 bp, Homo sapiens
atttttcaaaagtct

SEQ ID NO: 690482 - DNA, 15 bp, Homo sapiens
tttttcaaaagtctt

SEQ ID NO: 690483 - DNA, 15 bp, Homo sapiens
ttttcaaaagtcttc

SEQ ID NO: 690484 - DNA, 15 bp, Homo sapiens
tttcaaaagtcttct

SEQ ID NO: 690485 - DNA, 15 bp, Homo sapiens
ttcaaaagtcttctg

SEQ ID NO: 690486 - DNA, 15 bp, Homo sapiens
tcaaaagtcttctgg

SEQ ID NO: 690487 - DNA, 15 bp, Homo sapiens
caaaagtcttctgga

SEQ ID NO: 690488 - DNA, 15 bp, Homo sapiens
aaaagtcttctggac

SEQ ID NO: 690489 - DNA, 15 bp, Homo sapiens
aaagtcttctggacc

SEQ ID NO: 690490 - DNA, 15 bp, Homo sapiens
aagtcttctggaccg

SEQ ID NO: 690491 - DNA, 15 bp, Homo sapiens
agtcttctggaccgt

SEQ ID NO: 690492 - DNA, 15 bp, Homo sapiens
gtcttctggaccgtt

SEQ ID NO: 690493 - DNA, 15 bp, Homo sapiens
tcttctggaccgttt

SEQ ID NO: 690494 - DNA, 15 bp, Homo sapiens
cttctggaccgttta

SEQ ID NO: 690495 - DNA, 15 bp, Homo sapiens
ttctggaccgtttac

SEQ ID NO: 690496 - DNA, 15 bp, Homo sapiens
tctggaccgtttaca

SEQ ID NO: 690497 - DNA, 15 bp, Homo sapiens
ctggaccgtttacat

SEQ ID NO: 690498 - DNA, 15 bp, Homo sapiens
tggaccgtttacata

SEQ ID NO: 690499 - DNA, 15 bp, Homo sapiens
ggaccgtttacataa

SEQ ID NO: 690500 - DNA, 15 bp, Homo sapiens
gaccgtttacataaa

SEQ ID NO: 690501 - DNA, 15 bp, Homo sapiens
accgtttacataaaa

SEQ ID NO: 690502 - DNA, 15 bp, Homo sapiens
ccgtttacataaaat

SEQ ID NO: 690503 - DNA, 15 bp, Homo sapiens
cgtttacataaaatg

SEQ ID NO: 690504 - DNA, 15 bp, Homo sapiens
gtttacataaaatgt

SEQ ID NO: 690505 - DNA, 15 bp, Homo sapiens
tttacataaaatgtt

SEQ ID NO: 690506 - DNA, 15 bp, Homo sapiens
ttacataaaatgttt

SEQ ID NO: 690507 - DNA, 15 bp, Homo sapiens
tacataaaatgtttt

SEQ ID NO: 690508 - DNA, 15 bp, Homo sapiens
acataaaatgttttg

SEQ ID NO: 690509 - DNA, 15 bp, Homo sapiens
cataaaatgttttgc

SEQ ID NO: 690510 - DNA, 15 bp, Homo sapiens
ataaaatgttttgct

SEQ ID NO: 690511 - DNA, 15 bp, Homo sapiens
taaaatgttttgctt

SEQ ID NO: 690512 - DNA, 15 bp, Homo sapiens
aaaatgttttgctta

SEQ ID NO: 690513 - DNA, 15 bp, Homo sapiens
aaatgttttgcttac

SEQ ID NO: 690514 - DNA, 15 bp, Homo sapiens
aatgttttgcttact

SEQ ID NO: 690515 - DNA, 15 bp, Homo sapiens
atgttttgcttactt

SEQ ID NO: 690516 - DNA, 15 bp, Homo sapiens
tgttttgcttacttc

SEQ ID NO: 690517 - DNA, 15 bp, Homo sapiens
gttttgcttacttct

SEQ ID NO: 690518 - DNA, 15 bp, Homo sapiens
ttttgcttacttctc

SEQ ID NO: 690519 - DNA, 15 bp, Homo sapiens
tttgcttacttctcc

SEQ ID NO: 690520 - DNA, 15 bp, Homo sapiens
ttgcttacttctcca

SEQ ID NO: 690521 - DNA, 15 bp, Homo sapiens
tgcttacttctccaa

SEQ ID NO: 690522 - DNA, 15 bp, Homo sapiens
gcttacttctccaac

SEQ ID NO: 690523 - DNA, 15 bp, Homo sapiens
cttacttctccaaca

SEQ ID NO: 690524 - DNA, 15 bp, Homo sapiens
ttacttctccaacag

SEQ ID NO: 690525 - DNA, 15 bp, Homo sapiens
tacttctccaacagc

SEQ ID NO: 690526 - DNA, 15 bp, Homo sapiens
acttctccaacagcc

SEQ ID NO: 690527 - DNA, 15 bp, Homo sapiens
cttctccaacagccc

SEQ ID NO: 690528 - DNA, 15 bp, Homo sapiens
ttctccaacagcccc

SEQ ID NO: 690529 - DNA, 15 bp, Homo sapiens
tctccaacagccccc

SEQ ID NO: 690530 - DNA, 15 bp, Homo sapiens
ctccaacagcccccg

SEQ ID NO: 690531 - DNA, 15 bp, Homo sapiens
tccaacagcccccga

SEQ ID NO: 690532 - DNA, 15 bp, Homo sapiens
ccaacagcccccgaa

SEQ ID NO: 690533 - DNA, 15 bp, Homo sapiens
caacagcccccgaag

SEQ ID NO: 690534 - DNA, 15 bp, Homo sapiens
aacagcccccgaagg

SEQ ID NO: 690535 - DNA, 15 bp, Homo sapiens
acagcccccgaaggt

SEQ ID NO: 690536 - DNA, 15 bp, Homo sapiens
cagcccccgaaggtg

SEQ ID NO: 690537 - DNA, 15 bp, Homo sapiens
agcccccgaaggtga

SEQ ID NO: 690538 - DNA, 15 bp, Homo sapiens
gcccccgaaggtgaa

SEQ ID NO: 690539 - DNA, 15 bp, Homo sapiens
cccccgaaggtgaat

SEQ ID NO: 690540 - DNA, 15 bp, Homo sapiens
ccccgaaggtgaata

SEQ ID NO: 690541 - DNA, 15 bp, Homo sapiens
cccgaaggtgaatac

SEQ ID NO: 690542 - DNA, 15 bp, Homo sapiens
ccgaaggtgaatact

SEQ ID NO: 690543 - DNA, 15 bp, Homo sapiens
cgaaggtgaatactg

SEQ ID NO: 690544 - DNA, 15 bp, Homo sapiens
gaaggtgaatactga

SEQ ID NO: 690545 - DNA, 15 bp, Homo sapiens
aaggtgaatactgag

SEQ ID NO: 690546 - DNA, 15 bp, Homo sapiens
aggtgaatactgaga

SEQ ID NO: 690547 - DNA, 15 bp, Homo sapiens
ggtgaatactgagaa

SEQ ID NO: 690548 - DNA, 15 bp, Homo sapiens
gtgaatactgagaaa

SEQ ID NO: 690549 - DNA, 15 bp, Homo sapiens
tgaatactgagaaaa

SEQ ID NO: 690550 - DNA, 15 bp, Homo sapiens
gaatactgagaaaaa

SEQ ID NO: 690551 - DNA, 15 bp, Homo sapiens
aatactgagaaaaaa

SEQ ID NO: 690552 - DNA, 15 bp, Homo sapiens
atactgagaaaaaaa

SEQ ID NO: 690553 - DNA, 15 bp, Homo sapiens
tactgagaaaaaaac

SEQ ID NO: 690554 - DNA, 15 bp, Homo sapiens
actgagaaaaaaacc

SEQ ID NO: 690555 - DNA, 15 bp, Homo sapiens
ctgagaaaaaaaccc

SEQ ID NO: 690556 - DNA, 15 bp, Homo sapiens
tgagaaaaaaaccct

SEQ ID NO: 690557 - DNA, 15 bp, Homo sapiens
gagaaaaaaaccctg

SEQ ID NO: 690558 - DNA, 15 bp, Homo sapiens
agaaaaaaaccctgg

SEQ ID NO: 690559 - DNA, 15 bp, Homo sapiens
gaaaaaaaccctggc

SEQ ID NO: 690560 - DNA, 15 bp, Homo sapiens
aaaaaaaccctggct

SEQ ID NO: 690561 - DNA, 15 bp, Homo sapiens
aaaaaaccctggctc

SEQ ID NO: 690562 - DNA, 15 bp, Homo sapiens
aaaaaccctggctcc

SEQ ID NO: 690563 - DNA, 15 bp, Homo sapiens
aaaaccctggctcct

SEQ ID NO: 690564 - DNA, 15 bp, Homo sapiens
aaaccctggctccta

SEQ ID NO: 690565 - DNA, 15 bp, Homo sapiens
aaccctggctcctac

SEQ ID NO: 690566 - DNA, 15 bp, Homo sapiens
accctggctcctact

SEQ ID NO: 690567 - DNA, 15 bp, Homo sapiens
ccctggctcctactc

SEQ ID NO: 690568 - DNA, 15 bp, Homo sapiens
cctggctcctactcc

SEQ ID NO: 690569 - DNA, 15 bp, Homo sapiens
ctggctcctactccc

SEQ ID NO: 690570 - DNA, 15 bp, Homo sapiens
tggctcctactccca

SEQ ID NO: 690571 - DNA, 15 bp, Homo sapiens
ggctcctactcccag

SEQ ID NO: 690572 - DNA, 15 bp, Homo sapiens
gctcctactcccagc

SEQ ID NO: 690573 - DNA, 15 bp, Homo sapiens
ctcctactcccagct

SEQ ID NO: 690574 - DNA, 15 bp, Homo sapiens
tcctactcccagctg

SEQ ID NO: 690575 - DNA, 15 bp, Homo sapiens
cctactcccagctga

SEQ ID NO: 690576 - DNA, 15 bp, Homo sapiens
ctactcccagctgac

SEQ ID NO: 690577 - DNA, 15 bp, Homo sapiens
tactcccagctgaca

SEQ ID NO: 690578 - DNA, 15 bp, Homo sapiens
actcccagctgacag

SEQ ID NO: 690579 - DNA, 15 bp, Homo sapiens
ctcccagctgacagc

SEQ ID NO: 690580 - DNA, 15 bp, Homo sapiens
tcccagctgacagct

SEQ ID NO: 690581 - DNA, 15 bp, Homo sapiens
cccagctgacagctg

SEQ ID NO: 690582 - DNA, 15 bp, Homo sapiens
ccagctgacagctgt

SEQ ID NO: 690583 - DNA, 15 bp, Homo sapiens
cagctgacagctgtt

SEQ ID NO: 690584 - DNA, 15 bp, Homo sapiens
agctgacagctgttt

SEQ ID NO: 690585 - DNA, 15 bp, Homo sapiens
gctgacagctgtttt

SEQ ID NO: 690586 - DNA, 15 bp, Homo sapiens
ctgacagctgttttc

SEQ ID NO: 690587 - DNA, 15 bp, Homo sapiens
tgacagctgttttca

SEQ ID NO: 690588 - DNA, 15 bp, Homo sapiens
gacagctgttttcag

SEQ ID NO: 690589 - DNA, 15 bp, Homo sapiens
acagctgttttcagg

SEQ ID NO: 690590 - DNA, 15 bp, Homo sapiens
cagctgttttcaggt

SEQ ID NO: 690591 - DNA, 15 bp, Homo sapiens
agctgttttcaggtt

SEQ ID NO: 690592 - DNA, 15 bp, Homo sapiens
gctgttttcaggtta

SEQ ID NO: 690593 - DNA, 15 bp, Homo sapiens
ctgttttcaggttac

SEQ ID NO: 690594 - DNA, 15 bp, Homo sapiens
tgttttcaggttacc

SEQ ID NO: 690595 - DNA, 15 bp, Homo sapiens
gttttcaggttaccc

SEQ ID NO: 690596 - DNA, 15 bp, Homo sapiens
ttttcaggttaccct

SEQ ID NO: 690597 - DNA, 15 bp, Homo sapiens
tttcaggttaccctc

SEQ ID NO: 690598 - DNA, 15 bp, Homo sapiens
ttcaggttaccctcg

SEQ ID NO: 690599 - DNA, 15 bp, Homo sapiens
tcaggttaccctcgc

SEQ ID NO: 690600 - DNA, 15 bp, Homo sapiens
caggttaccctcgca

SEQ ID NO: 690601 - DNA, 15 bp, Homo sapiens
aggttaccctcgcaa

SEQ ID NO: 690602 - DNA, 15 bp, Homo sapiens
ggttaccctcgcaac

SEQ ID NO: 690603 - DNA, 15 bp, Homo sapiens
gttaccctcgcaaca

SEQ ID NO: 690604 - DNA, 15 bp, Homo sapiens
ttaccctcgcaacaa

SEQ ID NO: 690605 - DNA, 15 bp, Homo sapiens
taccctcgcaacaac

SEQ ID NO: 690606 - DNA, 15 bp, Homo sapiens
accctcgcaacaacg

SEQ ID NO: 690607 - DNA, 15 bp, Homo sapiens
ccctcgcaacaacgt

SEQ ID NO: 690608 - DNA, 15 bp, Homo sapiens
cctcgcaacaacgtg

SEQ ID NO: 690609 - DNA, 15 bp, Homo sapiens
ctcgcaacaacgtga

SEQ ID NO: 690610 - DNA, 15 bp, Homo sapiens
tcgcaacaacgtgac

SEQ ID NO: 690611 - DNA, 15 bp, Homo sapiens
cgcaacaacgtgact

SEQ ID NO: 690612 - DNA, 15 bp, Homo sapiens
gcaacaacgtgactg

SEQ ID NO: 690613 - DNA, 15 bp, Homo sapiens
caacaacgtgactgc

SEQ ID NO: 690614 - DNA, 15 bp, Homo sapiens
aacaacgtgactgcc

SEQ ID NO: 690615 - DNA, 15 bp, Homo sapiens
acaacgtgactgcca

SEQ ID NO: 690616 - DNA, 15 bp, Homo sapiens
caacgtgactgccac

SEQ ID NO: 690617 - DNA, 15 bp, Homo sapiens
aacgtgactgccacc

SEQ ID NO: 690618 - DNA, 15 bp, Homo sapiens
acgtgactgccacct

SEQ ID NO: 690619 - DNA, 15 bp, Homo sapiens
cgtgactgccacctg

SEQ ID NO: 690620 - DNA, 15 bp, Homo sapiens
gtgactgccacctga

SEQ ID NO: 690621 - DNA, 15 bp, Homo sapiens
tgactgccacctgag

SEQ ID NO: 690622 - DNA, 15 bp, Homo sapiens
gactgccacctgaga

SEQ ID NO: 690623 - DNA, 15 bp, Homo sapiens
actgccacctgagaa

SEQ ID NO: 690624 - DNA, 15 bp, Homo sapiens
ctgccacctgagaag

SEQ ID NO: 690625 - DNA, 15 bp, Homo sapiens
tgccacctgagaagt

SEQ ID NO: 690626 - DNA, 15 bp, Homo sapiens
gccacctgagaagtt

SEQ ID NO: 690627 - DNA, 15 bp, Homo sapiens
ccacctgagaagttg

SEQ ID NO: 690628 - DNA, 15 bp, Homo sapiens
cacctgagaagttgc

SEQ ID NO: 690629 - DNA, 15 bp, Homo sapiens
acctgagaagttgct

SEQ ID NO: 690630 - DNA, 15 bp, Homo sapiens
cctgagaagttgctg

SEQ ID NO: 690631 - DNA, 15 bp, Homo sapiens
ctgagaagttgctgg

SEQ ID NO: 690632 - DNA, 15 bp, Homo sapiens
tgagaagttgctggg

SEQ ID NO: 690633 - DNA, 15 bp, Homo sapiens
gagaagttgctgggg

SEQ ID NO: 690634 - DNA, 15 bp, Homo sapiens
agaagttgctggggc

SEQ ID NO: 690635 - DNA, 15 bp, Homo sapiens
gaagttgctggggct

SEQ ID NO: 690636 - DNA, 15 bp, Homo sapiens
aagttgctggggctt

SEQ ID NO: 690637 - DNA, 15 bp, Homo sapiens
agttgctggggcttt

SEQ ID NO: 690638 - DNA, 15 bp, Homo sapiens
gttgctggggctttc

SEQ ID NO: 690639 - DNA, 15 bp, Homo sapiens
ttgctggggctttcg

SEQ ID NO: 690640 - DNA, 15 bp, Homo sapiens
tgctggggctttcga

SEQ ID NO: 690641 - DNA, 15 bp, Homo sapiens
gctggggctttcgat

SEQ ID NO: 690642 - DNA, 15 bp, Homo sapiens
ctggggctttcgatc

SEQ ID NO: 690643 - DNA, 15 bp, Homo sapiens
tggggctttcgatct

SEQ ID NO: 690644 - DNA, 15 bp, Homo sapiens
ggggctttcgatcta

SEQ ID NO: 690645 - DNA, 15 bp, Homo sapiens
gggctttcgatctag

SEQ ID NO: 690646 - DNA, 15 bp, Homo sapiens
ggctttcgatctagt

SEQ ID NO: 690647 - DNA, 15 bp, Homo sapiens
gctttcgatctagtg

SEQ ID NO: 690648 - DNA, 15 bp, Homo sapiens
ctttcgatctagtgc

SEQ ID NO: 690649 - DNA, 15 bp, Homo sapiens
tttcgatctagtgct

SEQ ID NO: 690650 - DNA, 15 bp, Homo sapiens
ttcgatctagtgctt

SEQ ID NO: 690651 - DNA, 15 bp, Homo sapiens
tcgatctagtgctta

SEQ ID NO: 690652 - DNA, 15 bp, Homo sapiens
cgatctagtgcttag

SEQ ID NO: 690653 - DNA, 15 bp, Homo sapiens
gatctagtgcttagc

SEQ ID NO: 690654 - DNA, 15 bp, Homo sapiens
atctagtgcttagca

SEQ ID NO: 690655 - DNA, 15 bp, Homo sapiens
tctagtgcttagcat

SEQ ID NO: 690656 - DNA, 15 bp, Homo sapiens
ctagtgcttagcata

SEQ ID NO: 690657 - DNA, 15 bp, Homo sapiens
tagtgcttagcatat

SEQ ID NO: 690658 - DNA, 15 bp, Homo sapiens
agtgcttagcatata

SEQ ID NO: 690659 - DNA, 15 bp, Homo sapiens
gtgcttagcatatat

SEQ ID NO: 690660 - DNA, 15 bp, Homo sapiens
tgcttagcatatata

SEQ ID NO: 690661 - DNA, 15 bp, Homo sapiens
gcttagcatatataa

SEQ ID NO: 690662 - DNA, 15 bp, Homo sapiens
cttagcatatataag

SEQ ID NO: 690663 - DNA, 15 bp, Homo sapiens
ttagcatatataagt

SEQ ID NO: 690664 - DNA, 15 bp, Homo sapiens
tagcatatataagtt

SEQ ID NO: 690665 - DNA, 15 bp, Homo sapiens
agcatatataagttt

SEQ ID NO: 690666 - DNA, 15 bp, Homo sapiens
gcatatataagttta

SEQ ID NO: 690667 - DNA, 15 bp, Homo sapiens
catatataagtttac

SEQ ID NO: 690668 - DNA, 15 bp, Homo sapiens
atatataagtttact

SEQ ID NO: 690669 - DNA, 15 bp, Homo sapiens
tatataagtttactc

SEQ ID NO: 690670 - DNA, 15 bp, Homo sapiens
atataagtttactca

SEQ ID NO: 690671 - DNA, 15 bp, Homo sapiens
tataagtttactcat

SEQ ID NO: 690672 - DNA, 15 bp, Homo sapiens
ataagtttactcata

SEQ ID NO: 690673 - DNA, 15 bp, Homo sapiens
taagtttactcatat

SEQ ID NO: 690674 - DNA, 15 bp, Homo sapiens
aagtttactcatata

SEQ ID NO: 690675 - DNA, 15 bp, Homo sapiens
agtttactcatataa

SEQ ID NO: 690676 - DNA, 15 bp, Homo sapiens
gtttactcatataag

SEQ ID NO: 690677 - DNA, 15 bp, Homo sapiens
tttactcatataagg

SEQ ID NO: 690678 - DNA, 15 bp, Homo sapiens
ttactcatataagga

SEQ ID NO: 690679 - DNA, 15 bp, Homo sapiens
tactcatataaggac

SEQ ID NO: 690680 - DNA, 15 bp, Homo sapiens
actcatataaggaca

SEQ ID NO: 690681 - DNA, 15 bp, Homo sapiens
ctcatataaggacag

SEQ ID NO: 690682 - DNA, 15 bp, Homo sapiens
tcatataaggacaga

SEQ ID NO: 690683 - DNA, 15 bp, Homo sapiens
catataaggacagat

SEQ ID NO: 690684 - DNA, 15 bp, Homo sapiens
atataaggacagatt

SEQ ID NO: 690685 - DNA, 15 bp, Homo sapiens
tataaggacagattc

SEQ ID NO: 690686 - DNA, 15 bp, Homo sapiens
ataaggacagattct

SEQ ID NO: 690687 - DNA, 15 bp, Homo sapiens
taaggacagattctg

SEQ ID NO: 690688 - DNA, 15 bp, Homo sapiens
aaggacagattctgt

SEQ ID NO: 690689 - DNA, 15 bp, Homo sapiens
aggacagattctgta

SEQ ID NO: 690690 - DNA, 15 bp, Homo sapiens
ggacagattctgtac

SEQ ID NO: 690691 - DNA, 15 bp, Homo sapiens
gacagattctgtaca

SEQ ID NO: 690692 - DNA, 15 bp, Homo sapiens
acagattctgtacaa

SEQ ID NO: 690693 - DNA, 15 bp, Homo sapiens
cagattctgtacaac

SEQ ID NO: 690694 - DNA, 15 bp, Homo sapiens
agattctgtacaacg

SEQ ID NO: 690695 - DNA, 15 bp, Homo sapiens
gattctgtacaacgt

SEQ ID NO: 690696 - DNA, 15 bp, Homo sapiens
attctgtacaacgtc

SEQ ID NO: 690697 - DNA, 15 bp, Homo sapiens
ttctgtacaacgtct

SEQ ID NO: 690698 - DNA, 15 bp, Homo sapiens
tctgtacaacgtctc

SEQ ID NO: 690699 - DNA, 15 bp, Homo sapiens
ctgtacaacgtctca

SEQ ID NO: 690700 - DNA, 15 bp, Homo sapiens
tgtacaacgtctcat

SEQ ID NO: 690701 - DNA, 15 bp, Homo sapiens
gtacaacgtctcatt

SEQ ID NO: 690702 - DNA, 15 bp, Homo sapiens
tacaacgtctcattt

SEQ ID NO: 690703 - DNA, 15 bp, Homo sapiens
acaacgtctcatttt

SEQ ID NO: 690704 - DNA, 15 bp, Homo sapiens
caacgtctcatttta

SEQ ID NO: 690705 - DNA, 15 bp, Homo sapiens
aacgtctcattttat

SEQ ID NO: 690706 - DNA, 15 bp, Homo sapiens
acgtctcattttatc

SEQ ID NO: 690707 - DNA, 15 bp, Homo sapiens
cgtctcattttatca

SEQ ID NO: 690708 - DNA, 15 bp, Homo sapiens
gtctcattttatcaa

SEQ ID NO: 690709 - DNA, 15 bp, Homo sapiens
tctcattttatcaaa

SEQ ID NO: 690710 - DNA, 15 bp, Homo sapiens
ctcattttatcaaat

SEQ ID NO: 690711 - DNA, 15 bp, Homo sapiens
tcattttatcaaata

SEQ ID NO: 690712 - DNA, 15 bp, Homo sapiens
cattttatcaaataa

SEQ ID NO: 690713 - DNA, 15 bp, Homo sapiens
attttatcaaataaa

SEQ ID NO: 690714 - DNA, 15 bp, Homo sapiens
ttttatcaaataaaa

SEQ ID NO: 690715 - DNA, 15 bp, Homo sapiens
tttatcaaataaaac

SEQ ID NO: 690716 - DNA, 15 bp, Homo sapiens
ttatcaaataaaact

SEQ ID NO: 690717 - DNA, 15 bp, Homo sapiens
tatcaaataaaacta

SEQ ID NO: 690718 - DNA, 15 bp, Homo sapiens
atcaaataaaactaa

SEQ ID NO: 690719 - DNA, 15 bp, Homo sapiens
tcaaataaaactaaa

SEQ ID NO: 690720 - DNA, 15 bp, Homo sapiens
caaataaaactaaaa

SEQ ID NO: 690721 - DNA, 15 bp, Homo sapiens
aaataaaactaaaat

SEQ ID NO: 690722 - DNA, 15 bp, Homo sapiens
aataaaactaaaatc

SEQ ID NO: 690723 - DNA, 15 bp, Homo sapiens
ataaaactaaaatct

SEQ ID NO: 690724 - DNA, 15 bp, Homo sapiens
taaaactaaaatcta

SEQ ID NO: 690725 - DNA, 15 bp, Homo sapiens
aaaactaaaatctaa

SEQ ID NO: 690726 - DNA, 15 bp, Homo sapiens
aaactaaaatctaag

SEQ ID NO: 690727 - DNA, 15 bp, Homo sapiens
aactaaaatctaagt

SEQ ID NO: 690728 - DNA, 15 bp, Homo sapiens
actaaaatctaagtt

SEQ ID NO: 690729 - DNA, 15 bp, Homo sapiens
ctaaaatctaagttt

SEQ ID NO: 690730 - DNA, 15 bp, Homo sapiens
taaaatctaagtttg

SEQ ID NO: 690731 - DNA, 15 bp, Homo sapiens
aaaatctaagtttgc

SEQ ID NO: 690732 - DNA, 15 bp, Homo sapiens
aaatctaagtttgct

SEQ ID NO: 690733 - DNA, 15 bp, Homo sapiens
aatctaagtttgctt

SEQ ID NO: 690734 - DNA, 15 bp, Homo sapiens
atctaagtttgcttg

SEQ ID NO: 690735 - DNA, 15 bp, Homo sapiens
tctaagtttgcttgt

SEQ ID NO: 690736 - DNA, 15 bp, Homo sapiens
ctaagtttgcttgtt

SEQ ID NO: 690737 - DNA, 15 bp, Homo sapiens
taagtttgcttgttt

SEQ ID NO: 690738 - DNA, 15 bp, Homo sapiens
aagtttgcttgtttg

SEQ ID NO: 690739 - DNA, 15 bp, Homo sapiens
agtttgcttgtttgt

SEQ ID NO: 690740 - DNA, 15 bp, Homo sapiens
tgcttgtttgttttt

SEQ ID NO: 690741 - DNA, 15 bp, Homo sapiens
gcttgtttgttttta

SEQ ID NO: 690742 - DNA, 15 bp, Homo sapiens
cttgtttgtttttag

SEQ ID NO: 690743 - DNA, 15 bp, Homo sapiens
ttgtttgtttttaga

SEQ ID NO: 690744 - DNA, 15 bp, Homo sapiens
tgtttgtttttagaa

SEQ ID NO: 690745 - DNA, 15 bp, Homo sapiens
gtttgtttttagaaa

SEQ ID NO: 690746 - DNA, 15 bp, Homo sapiens
tttgtttttagaaaa

SEQ ID NO: 690747 - DNA, 15 bp, Homo sapiens
ttgtttttagaaaaa

SEQ ID NO: 690748 - DNA, 15 bp, Homo sapiens
tgtttttagaaaaat

SEQ ID NO: 690749 - DNA, 15 bp, Homo sapiens
gtttttagaaaaatc

SEQ ID NO: 690750 - DNA, 15 bp, Homo sapiens
tttttagaaaaatct

SEQ ID NO: 690751 - DNA, 15 bp, Homo sapiens
ttttagaaaaatcta

SEQ ID NO: 690752 - DNA, 15 bp, Homo sapiens
tttagaaaaatctag

SEQ ID NO: 690753 - DNA, 15 bp, Homo sapiens
ttagaaaaatctagg

SEQ ID NO: 690754 - DNA, 15 bp, Homo sapiens
tagaaaaatctaggc

SEQ ID NO: 690755 - DNA, 15 bp, Homo sapiens
agaaaaatctaggcc

SEQ ID NO: 690756 - DNA, 15 bp, Homo sapiens
gaaaaatctaggcca

SEQ ID NO: 690757 - DNA, 15 bp, Homo sapiens
aaaaatctaggccag

SEQ ID NO: 690758 - DNA, 15 bp, Homo sapiens
aaaatctaggccagg

SEQ ID NO: 690759 - DNA, 15 bp, Homo sapiens
aaatctaggccaggc

SEQ ID NO: 690760 - DNA, 15 bp, Homo sapiens
aatctaggccaggcg

SEQ ID NO: 690761 - DNA, 15 bp, Homo sapiens
atctaggccaggcgc

SEQ ID NO: 690762 - DNA, 15 bp, Homo sapiens
tctaggccaggcgca

SEQ ID NO: 690763 - DNA, 15 bp, Homo sapiens
ctaggccaggcgcac

SEQ ID NO: 690764 - DNA, 15 bp, Homo sapiens
taggccaggcgcact

SEQ ID NO: 690765 - DNA, 15 bp, Homo sapiens
aggccaggcgcactg

SEQ ID NO: 690766 - DNA, 15 bp, Homo sapiens
ggccaggcgcactgg

SEQ ID NO: 690767 - DNA, 15 bp, Homo sapiens
gccaggcgcactggc

SEQ ID NO: 690768 - DNA, 15 bp, Homo sapiens
ccaggcgcactggct

SEQ ID NO: 690769 - DNA, 15 bp, Homo sapiens
caggcgcactggctc

SEQ ID NO: 690770 - DNA, 15 bp, Homo sapiens
aggcgcactggctca

SEQ ID NO: 690771 - DNA, 15 bp, Homo sapiens
ggcgcactggctcat

SEQ ID NO: 690772 - DNA, 15 bp, Homo sapiens
gcgcactggctcatg

SEQ ID NO: 690773 - DNA, 15 bp, Homo sapiens
cgcactggctcatgc

SEQ ID NO: 690774 - DNA, 15 bp, Homo sapiens
gcactggctcatgcc

SEQ ID NO: 690775 - DNA, 15 bp, Homo sapiens
cactggctcatgcct

SEQ ID NO: 690776 - DNA, 15 bp, Homo sapiens
actggctcatgcctg

SEQ ID NO: 690777 - DNA, 15 bp, Homo sapiens
ctggctcatgcctgt

SEQ ID NO: 690778 - DNA, 15 bp, Homo sapiens
ctttgggaggccaag

SEQ ID NO: 690779 - DNA, 15 bp, Homo sapiens
tttgggaggccaagg

SEQ ID NO: 690780 - DNA, 15 bp, Homo sapiens
ttgggaggccaaggc

SEQ ID NO: 690781 - DNA, 15 bp, Homo sapiens
tgggaggccaaggcg

SEQ ID NO: 690782 - DNA, 15 bp, Homo sapiens
gggaggccaaggcgg

SEQ ID NO: 690783 - DNA, 15 bp, Homo sapiens
ggaggccaaggcgga

SEQ ID NO: 690784 - DNA, 15 bp, Homo sapiens
gaggccaaggcggat

SEQ ID NO: 690785 - DNA, 15 bp, Homo sapiens
aggccaaggcggatg

SEQ ID NO: 690786 - DNA, 15 bp, Homo sapiens
ggccaaggcggatgg

SEQ ID NO: 690787 - DNA, 15 bp, Homo sapiens
gccaaggcggatgga

SEQ ID NO: 690788 - DNA, 15 bp, Homo sapiens
ccaaggcggatggat

SEQ ID NO: 690789 - DNA, 15 bp, Homo sapiens
caaggcggatggatc

SEQ ID NO: 690790 - DNA, 15 bp, Homo sapiens
aaggcggatggatca

SEQ ID NO: 690791 - DNA, 15 bp, Homo sapiens
aggcggatggatcac

SEQ ID NO: 690792 - DNA, 15 bp, Homo sapiens
ggcggatggatcacg

SEQ ID NO: 690793 - DNA, 15 bp, Homo sapiens
gcggatggatcacga

SEQ ID NO: 690794 - DNA, 15 bp, Homo sapiens
cggatggatcacgag

SEQ ID NO: 690795 - DNA, 15 bp, Homo sapiens
ggatggatcacgagg

SEQ ID NO: 690796 - DNA, 15 bp, Homo sapiens
gatggatcacgaggt

SEQ ID NO: 690797 - DNA, 15 bp, Homo sapiens
atggatcacgaggtc

SEQ ID NO: 690798 - DNA, 15 bp, Homo sapiens
ggatcacgaggtcag

SEQ ID NO: 690799 - DNA, 15 bp, Homo sapiens
cacgaggtcaggagt

SEQ ID NO: 690800 - DNA, 15 bp, Homo sapiens
acgaggtcaggagtt

SEQ ID NO: 690801 - DNA, 15 bp, Homo sapiens
cgaggtcaggagttc

SEQ ID NO: 690802 - DNA, 15 bp, Homo sapiens
gaggtcaggagttca

SEQ ID NO: 690803 - DNA, 15 bp, Homo sapiens
aggtcaggagttcaa

SEQ ID NO: 690804 - DNA, 15 bp, Homo sapiens
accagcctggccaag

SEQ ID NO: 690805 - DNA, 15 bp, Homo sapiens
ccagcctggccaaga

SEQ ID NO: 690806 - DNA, 15 bp, Homo sapiens
cagcctggccaagat

SEQ ID NO: 690807 - DNA, 15 bp, Homo sapiens
agcctggccaagatg

SEQ ID NO: 690808 - DNA, 15 bp, Homo sapiens
gcctggccaagatgg

SEQ ID NO: 690809 - DNA, 15 bp, Homo sapiens
cctggccaagatggt

SEQ ID NO: 690810 - DNA, 15 bp, Homo sapiens
ctggccaagatggtg

SEQ ID NO: 690811 - DNA, 15 bp, Homo sapiens
tggccaagatggtga

SEQ ID NO: 690812 - DNA, 15 bp, Homo sapiens
ggccaagatggtgaa

SEQ ID NO: 690813 - DNA, 15 bp, Homo sapiens
gccaagatggtgaaa

SEQ ID NO: 690814 - DNA, 15 bp, Homo sapiens
ccaagatggtgaaac

SEQ ID NO: 690815 - DNA, 15 bp, Homo sapiens
caagatggtgaaacc

SEQ ID NO: 690816 - DNA, 15 bp, Homo sapiens
aagatggtgaaaccc

SEQ ID NO: 690817 - DNA, 15 bp, Homo sapiens
agatggtgaaacccc

SEQ ID NO: 690818 - DNA, 15 bp, Homo sapiens
gatggtgaaaccccg

SEQ ID NO: 690819 - DNA, 15 bp, Homo sapiens
tggtgaaaccccgtt

SEQ ID NO: 690820 - DNA, 15 bp, Homo sapiens
ggtgaaaccccgttt

SEQ ID NO: 690821 - DNA, 15 bp, Homo sapiens
gtgaaaccccgtttc

SEQ ID NO: 690822 - DNA, 15 bp, Homo sapiens
tgaaaccccgtttct

SEQ ID NO: 690823 - DNA, 15 bp, Homo sapiens
gaaaccccgtttcta

SEQ ID NO: 690824 - DNA, 15 bp, Homo sapiens
aaaccccgtttctac

SEQ ID NO: 690825 - DNA, 15 bp, Homo sapiens
aaccccgtttctact

SEQ ID NO: 690826 - DNA, 15 bp, Homo sapiens
accccgtttctacta

SEQ ID NO: 690827 - DNA, 15 bp, Homo sapiens
ccccgtttctactaa

SEQ ID NO: 690828 - DNA, 15 bp, Homo sapiens
cccgtttctactaaa

SEQ ID NO: 690829 - DNA, 15 bp, Homo sapiens
ccgtttctactaaaa

SEQ ID NO: 690830 - DNA, 15 bp, Homo sapiens
cgtttctactaaaaa

SEQ ID NO: 690831 - DNA, 15 bp, Homo sapiens
gtttctactaaaaaa

SEQ ID NO: 690832 - DNA, 15 bp, Homo sapiens
tttctactaaaaaag

SEQ ID NO: 690833 - DNA, 15 bp, Homo sapiens
ttctactaaaaaagc

SEQ ID NO: 690834 - DNA, 15 bp, Homo sapiens
tctactaaaaaagca

SEQ ID NO: 690835 - DNA, 15 bp, Homo sapiens
ctactaaaaaagcaa

SEQ ID NO: 690836 - DNA, 15 bp, Homo sapiens
tactaaaaaagcaaa

SEQ ID NO: 690837 - DNA, 15 bp, Homo sapiens
actaaaaaagcaaaa

SEQ ID NO: 690838 - DNA, 15 bp, Homo sapiens
ctaaaaaagcaaaaa

SEQ ID NO: 690839 - DNA, 15 bp, Homo sapiens
taaaaaagcaaaaaa

SEQ ID NO: 690840 - DNA, 15 bp, Homo sapiens
aaaaaagcaaaaaaa

SEQ ID NO: 690841 - DNA, 15 bp, Homo sapiens
aaaaagcaaaaaaaa

SEQ ID NO: 690842 - DNA, 15 bp, Homo sapiens
aaaagcaaaaaaaat

SEQ ID NO: 690843 - DNA, 15 bp, Homo sapiens
aaagcaaaaaaaatt

SEQ ID NO: 690844 - DNA, 15 bp, Homo sapiens
aagcaaaaaaaatta

SEQ ID NO: 690845 - DNA, 15 bp, Homo sapiens
agcaaaaaaaattag

SEQ ID NO: 690846 - DNA, 15 bp, Homo sapiens
gcaaaaaaaattagc

SEQ ID NO: 690847 - DNA, 15 bp, Homo sapiens
caaaaaaaattagcc

SEQ ID NO: 690848 - DNA, 15 bp, Homo sapiens
ggtgtggtggcaggc

SEQ ID NO: 690849 - DNA, 15 bp, Homo sapiens
gtgtggtggcaggca

SEQ ID NO: 690850 - DNA, 15 bp, Homo sapiens
tgtggtggcaggcac

SEQ ID NO: 690851 - DNA, 15 bp, Homo sapiens
gtggtggcaggcacc

SEQ ID NO: 690852 - DNA, 15 bp, Homo sapiens
tggtggcaggcacct

SEQ ID NO: 690853 - DNA, 15 bp, Homo sapiens
ggtggcaggcacctg

SEQ ID NO: 690854 - DNA, 15 bp, Homo sapiens
gtggcaggcacctgt

SEQ ID NO: 690855 - DNA, 15 bp, Homo sapiens
tggcaggcacctgta

SEQ ID NO: 690856 - DNA, 15 bp, Homo sapiens
ggcaggcacctgtaa

SEQ ID NO: 690857 - DNA, 15 bp, Homo sapiens
gcaggcacctgtaat

SEQ ID NO: 690858 - DNA, 15 bp, Homo sapiens
caggcacctgtaatc

SEQ ID NO: 690859 - DNA, 15 bp, Homo sapiens
aggcacctgtaatcc

SEQ ID NO: 690860 - DNA, 15 bp, Homo sapiens
ggcacctgtaatccc

SEQ ID NO: 690861 - DNA, 15 bp, Homo sapiens
cctgtaatcccagcc

SEQ ID NO: 690862 - DNA, 15 bp, Homo sapiens
ctgtaatcccagcca

SEQ ID NO: 690863 - DNA, 15 bp, Homo sapiens
tgtaatcccagccac

SEQ ID NO: 690864 - DNA, 15 bp, Homo sapiens
gtaatcccagccact

SEQ ID NO: 690865 - DNA, 15 bp, Homo sapiens
taatcccagccactc

SEQ ID NO: 690866 - DNA, 15 bp, Homo sapiens
aatcccagccactca

SEQ ID NO: 690867 - DNA, 15 bp, Homo sapiens
atcccagccactcag

SEQ ID NO: 690868 - DNA, 15 bp, Homo sapiens
tcccagccactcagg

SEQ ID NO: 690869 - DNA, 15 bp, Homo sapiens
cccagccactcagga

SEQ ID NO: 690870 - DNA, 15 bp, Homo sapiens
ccagccactcaggag

SEQ ID NO: 690871 - DNA, 15 bp, Homo sapiens
cagccactcaggagg

SEQ ID NO: 690872 - DNA, 15 bp, Homo sapiens
agccactcaggaggc

SEQ ID NO: 690873 - DNA, 15 bp, Homo sapiens
gccactcaggaggct

SEQ ID NO: 690874 - DNA, 15 bp, Homo sapiens
ccactcaggaggctg

SEQ ID NO: 690875 - DNA, 15 bp, Homo sapiens
cactcaggaggctga

SEQ ID NO: 690876 - DNA, 15 bp, Homo sapiens
actcaggaggctgaa

SEQ ID NO: 690877 - DNA, 15 bp, Homo sapiens
ctcaggaggctgaag

SEQ ID NO: 690878 - DNA, 15 bp, Homo sapiens
tcaggaggctgaagc

SEQ ID NO: 690879 - DNA, 15 bp, Homo sapiens
aggaggctgaagcag

SEQ ID NO: 690880 - DNA, 15 bp, Homo sapiens
ggaggctgaagcaga

SEQ ID NO: 690881 - DNA, 15 bp, Homo sapiens
gaggctgaagcagag

SEQ ID NO: 690882 - DNA, 15 bp, Homo sapiens
aggctgaagcagaga

SEQ ID NO: 690883 - DNA, 15 bp, Homo sapiens
ggctgaagcagagaa

SEQ ID NO: 690884 - DNA, 15 bp, Homo sapiens
gctgaagcagagaat

SEQ ID NO: 690885 - DNA, 15 bp, Homo sapiens
ctgaagcagagaatt

SEQ ID NO: 690886 - DNA, 15 bp, Homo sapiens
tgaagcagagaattg

SEQ ID NO: 690887 - DNA, 15 bp, Homo sapiens
gaagcagagaattgc

SEQ ID NO: 690888 - DNA, 15 bp, Homo sapiens
aagcagagaattgct

SEQ ID NO: 690889 - DNA, 15 bp, Homo sapiens
agcagagaattgctt

SEQ ID NO: 690890 - DNA, 15 bp, Homo sapiens
gcagagaattgcttg

SEQ ID NO: 690891 - DNA, 15 bp, Homo sapiens
cagagaattgcttga

SEQ ID NO: 690892 - DNA, 15 bp, Homo sapiens
agagaattgcttgaa

SEQ ID NO: 690893 - DNA, 15 bp, Homo sapiens
gagaattgcttgaac

SEQ ID NO: 690894 - DNA, 15 bp, Homo sapiens
agaattgcttgaacc

SEQ ID NO: 690895 - DNA, 15 bp, Homo sapiens
gaattgcttgaaccc

SEQ ID NO: 690896 - DNA, 15 bp, Homo sapiens
aattgcttgaacccg

SEQ ID NO: 690897 - DNA, 15 bp, Homo sapiens
attgcttgaacccgg

SEQ ID NO: 690898 - DNA, 15 bp, Homo sapiens
ttgcttgaacccggg

SEQ ID NO: 690899 - DNA, 15 bp, Homo sapiens
tgcttgaacccggga

SEQ ID NO: 690900 - DNA, 15 bp, Homo sapiens
gcttgaacccgggag

SEQ ID NO: 690901 - DNA, 15 bp, Homo sapiens
cttgaacccgggagg

SEQ ID NO: 690902 - DNA, 15 bp, Homo sapiens
ttgaacccgggaggc

SEQ ID NO: 690903 - DNA, 15 bp, Homo sapiens
tgaacccgggaggcg

SEQ ID NO: 690904 - DNA, 15 bp, Homo sapiens
gaacccgggaggcgg

SEQ ID NO: 690905 - DNA, 15 bp, Homo sapiens
aacccgggaggcgga

SEQ ID NO: 690906 - DNA, 15 bp, Homo sapiens
acccgggaggcggag

SEQ ID NO: 690907 - DNA, 15 bp, Homo sapiens
cccgggaggcggagg

SEQ ID NO: 690908 - DNA, 15 bp, Homo sapiens
ccgggaggcggaggt

SEQ ID NO: 690909 - DNA, 15 bp, Homo sapiens
cgggaggcggaggtt

SEQ ID NO: 690910 - DNA, 15 bp, Homo sapiens
gggaggcggaggttg

SEQ ID NO: 690911 - DNA, 15 bp, Homo sapiens
ggaggcggaggttgt

SEQ ID NO: 690912 - DNA, 15 bp, Homo sapiens
gaggcggaggttgta

SEQ ID NO: 690913 - DNA, 15 bp, Homo sapiens
aggcggaggttgtag

SEQ ID NO: 690914 - DNA, 15 bp, Homo sapiens
ggcggaggttgtagt

SEQ ID NO: 690915 - DNA, 15 bp, Homo sapiens
gcggaggttgtagtg

SEQ ID NO: 690916 - DNA, 15 bp, Homo sapiens
cggaggttgtagtga

SEQ ID NO: 690917 - DNA, 15 bp, Homo sapiens
ggttgtagtgagccg

SEQ ID NO: 690918 - DNA, 15 bp, Homo sapiens
gttgtagtgagccga

SEQ ID NO: 690919 - DNA, 15 bp, Homo sapiens
ttgtagtgagccgag

SEQ ID NO: 690920 - DNA, 15 bp, Homo sapiens
tgtagtgagccgagg

SEQ ID NO: 690921 - DNA, 15 bp, Homo sapiens
gtagtgagccgaggt

SEQ ID NO: 690922 - DNA, 15 bp, Homo sapiens
tagtgagccgaggtc

SEQ ID NO: 690923 - DNA, 15 bp, Homo sapiens
agtgagccgaggtca

SEQ ID NO: 690924 - DNA, 15 bp, Homo sapiens
gtgagccgaggtcat

SEQ ID NO: 690925 - DNA, 15 bp, Homo sapiens
tgagccgaggtcatg

SEQ ID NO: 690926 - DNA, 15 bp, Homo sapiens
gagccgaggtcatgc

SEQ ID NO: 690927 - DNA, 15 bp, Homo sapiens
agccgaggtcatgcc

SEQ ID NO: 690928 - DNA, 15 bp, Homo sapiens
gccgaggtcatgcca

SEQ ID NO: 690929 - DNA, 15 bp, Homo sapiens
ccgaggtcatgccac

SEQ ID NO: 690930 - DNA, 15 bp, Homo sapiens
cgaggtcatgccact

SEQ ID NO: 690931 - DNA, 15 bp, Homo sapiens
gaggtcatgccactg

SEQ ID NO: 690932 - DNA, 15 bp, Homo sapiens
aggtcatgccactgc

SEQ ID NO: 690933 - DNA, 15 bp, Homo sapiens
ggtcatgccactgca

SEQ ID NO: 690934 - DNA, 15 bp, Homo sapiens
gtcatgccactgcac

SEQ ID NO: 690935 - DNA, 15 bp, Homo sapiens
ctccagcctgggcga

SEQ ID NO: 690936 - DNA, 15 bp, Homo sapiens
tccagcctgggcgac

SEQ ID NO: 690937 - DNA, 15 bp, Homo sapiens
ccagcctgggcgaca

SEQ ID NO: 690938 - DNA, 15 bp, Homo sapiens
cagcctgggcgacag

SEQ ID NO: 690939 - DNA, 15 bp, Homo sapiens
agcctgggcgacagt

SEQ ID NO: 690940 - DNA, 15 bp, Homo sapiens
gcctgggcgacagtg

SEQ ID NO: 690941 - DNA, 15 bp, Homo sapiens
cctgggcgacagtgt

SEQ ID NO: 690942 - DNA, 15 bp, Homo sapiens
ctgggcgacagtgtg

SEQ ID NO: 690943 - DNA, 15 bp, Homo sapiens
tgggcgacagtgtga

SEQ ID NO: 690944 - DNA, 15 bp, Homo sapiens
gggcgacagtgtgag

SEQ ID NO: 690945 - DNA, 15 bp, Homo sapiens
ggcgacagtgtgaga

SEQ ID NO: 690946 - DNA, 15 bp, Homo sapiens
gcgacagtgtgagac

SEQ ID NO: 690947 - DNA, 15 bp, Homo sapiens
cgacagtgtgagact

SEQ ID NO: 690948 - DNA, 15 bp, Homo sapiens
gacagtgtgagactc

SEQ ID NO: 690949 - DNA, 15 bp, Homo sapiens
acagtgtgagactcg

SEQ ID NO: 690950 - DNA, 15 bp, Homo sapiens
cagtgtgagactcgt

SEQ ID NO: 690951 - DNA, 15 bp, Homo sapiens
agtgtgagactcgtc

SEQ ID NO: 690952 - DNA, 15 bp, Homo sapiens
gtgtgagactcgtct

SEQ ID NO: 690953 - DNA, 15 bp, Homo sapiens
tgtgagactcgtctt

SEQ ID NO: 690954 - DNA, 15 bp, Homo sapiens
gtgagactcgtctta

SEQ ID NO: 690955 - DNA, 15 bp, Homo sapiens
tgagactcgtcttaa

SEQ ID NO: 690956 - DNA, 15 bp, Homo sapiens
gagactcgtcttaaa

SEQ ID NO: 690957 - DNA, 15 bp, Homo sapiens
agactcgtcttaaaa

SEQ ID NO: 690958 - DNA, 15 bp, Homo sapiens
gactcgtcttaaaaa

SEQ ID NO: 690959 - DNA, 15 bp, Homo sapiens
actcgtcttaaaaaa

SEQ ID NO: 690960 - DNA, 15 bp, Homo sapiens
ctcgtcttaaaaaaa

SEQ ID NO: 690961 - DNA, 15 bp, Homo sapiens
tcgtcttaaaaaaaa

SEQ ID NO: 690962 - DNA, 15 bp, Homo sapiens
cgtcttaaaaaaaaa

SEQ ID NO: 690963 - DNA, 15 bp, Homo sapiens
gtcttaaaaaaaaaa

SEQ ID NO: 690964 - DNA, 15 bp, Homo sapiens
tcttaaaaaaaaaag

SEQ ID NO: 690965 - DNA, 15 bp, Homo sapiens
cttaaaaaaaaaaga

SEQ ID NO: 690966 - DNA, 15 bp, Homo sapiens
ttaaaaaaaaaagaa

SEQ ID NO: 690967 - DNA, 15 bp, Homo sapiens
taaaaaaaaaagaaa

SEQ ID NO: 690968 - DNA, 15 bp, Homo sapiens
aaaaaaaaaagaaaa

SEQ ID NO: 690969 - DNA, 15 bp, Homo sapiens
aaaaaaaaagaaaaa

SEQ ID NO: 690970 - DNA, 15 bp, Homo sapiens
aaaaaaaagaaaaag

SEQ ID NO: 690971 - DNA, 15 bp, Homo sapiens
aaaaaaagaaaaaga

SEQ ID NO: 690972 - DNA, 15 bp, Homo sapiens
aaaaaagaaaaagaa

SEQ ID NO: 690973 - DNA, 15 bp, Homo sapiens
aaaaagaaaaagaaa

SEQ ID NO: 690974 - DNA, 15 bp, Homo sapiens
aaaagaaaaagaaaa

SEQ ID NO: 690975 - DNA, 15 bp, Homo sapiens
aagaaaaagaaaaag

SEQ ID NO: 690976 - DNA, 15 bp, Homo sapiens
agaaaaagaaaaaga

SEQ ID NO: 690977 - DNA, 15 bp, Homo sapiens
gaaaaagaaaaagaa

SEQ ID NO: 690978 - DNA, 15 bp, Homo sapiens
aaagaaaaagaaaag

SEQ ID NO: 690979 - DNA, 15 bp, Homo sapiens
aagaaaaagaaaaga

SEQ ID NO: 690980 - DNA, 15 bp, Homo sapiens
agaaaaagaaaagaa

SEQ ID NO: 690981 - DNA, 15 bp, Homo sapiens
gaaaaagaaaagaaa

SEQ ID NO: 690982 - DNA, 15 bp, Homo sapiens
aaaaagaaaagaaaa

SEQ ID NO: 690983 - DNA, 15 bp, Homo sapiens
aaaagaaaagaaaaa

SEQ ID NO: 690984 - DNA, 15 bp, Homo sapiens
aaagaaaagaaaaat

SEQ ID NO: 690985 - DNA, 15 bp, Homo sapiens
aagaaaagaaaaatc

SEQ ID NO: 690986 - DNA, 15 bp, Homo sapiens
agaaaagaaaaatct

SEQ ID NO: 690987 - DNA, 15 bp, Homo sapiens
gaaaagaaaaatcta

SEQ ID NO: 690988 - DNA, 15 bp, Homo sapiens
aaaagaaaaatctaa

SEQ ID NO: 690989 - DNA, 15 bp, Homo sapiens
aaagaaaaatctaag

SEQ ID NO: 690990 - DNA, 15 bp, Homo sapiens
aagaaaaatctaagt

SEQ ID NO: 690991 - DNA, 15 bp, Homo sapiens
agaaaaatctaagta

SEQ ID NO: 690992 - DNA, 15 bp, Homo sapiens
gaaaaatctaagtat

SEQ ID NO: 690993 - DNA, 15 bp, Homo sapiens
aaaaatctaagtatt

SEQ ID NO: 690994 - DNA, 15 bp, Homo sapiens
aaaatctaagtattt

SEQ ID NO: 690995 - DNA, 15 bp, Homo sapiens
aaatctaagtatttg

SEQ ID NO: 690996 - DNA, 15 bp, Homo sapiens
aatctaagtatttga

SEQ ID NO: 690997 - DNA, 15 bp, Homo sapiens
atctaagtatttgag

SEQ ID NO: 690998 - DNA, 15 bp, Homo sapiens
tctaagtatttgagt

SEQ ID NO: 690999 - DNA, 15 bp, Homo sapiens
ctaagtatttgagtg

SEQ ID NO: 691000 - DNA, 15 bp, Homo sapiens
taagtatttgagtga

SEQ ID NO: 691001 - DNA, 15 bp, Homo sapiens
aagtatttgagtgat

SEQ ID NO: 691002 - DNA, 15 bp, Homo sapiens
agtatttgagtgatg

SEQ ID NO: 691003 - DNA, 15 bp, Homo sapiens
gtatttgagtgatgg

SEQ ID NO: 691004 - DNA, 15 bp, Homo sapiens
tatttgagtgatggt

SEQ ID NO: 691005 - DNA, 15 bp, Homo sapiens
atttgagtgatggtg

SEQ ID NO: 691006 - DNA, 15 bp, Homo sapiens
tttgagtgatggtga

SEQ ID NO: 691007 - DNA, 15 bp, Homo sapiens
ttgagtgatggtgaa

SEQ ID NO: 691008 - DNA, 15 bp, Homo sapiens
tgagtgatggtgaat

SEQ ID NO: 691009 - DNA, 15 bp, Homo sapiens
gagtgatggtgaatt

SEQ ID NO: 691010 - DNA, 15 bp, Homo sapiens
agtgatggtgaattt

SEQ ID NO: 691011 - DNA, 15 bp, Homo sapiens
gtgatggtgaatttg

SEQ ID NO: 691012 - DNA, 15 bp, Homo sapiens
tgatggtgaatttgc

SEQ ID NO: 691013 - DNA, 15 bp, Homo sapiens
gatggtgaatttgcc

SEQ ID NO: 691014 - DNA, 15 bp, Homo sapiens
atggtgaatttgcca

SEQ ID NO: 691015 - DNA, 15 bp, Homo sapiens
tggtgaatttgccaa

SEQ ID NO: 691016 - DNA, 15 bp, Homo sapiens
ggtgaatttgccaac

SEQ ID NO: 691017 - DNA, 15 bp, Homo sapiens
gtgaatttgccaact

SEQ ID NO: 691018 - DNA, 15 bp, Homo sapiens
tgaatttgccaactc

SEQ ID NO: 691019 - DNA, 15 bp, Homo sapiens
gaatttgccaactct

SEQ ID NO: 691020 - DNA, 15 bp, Homo sapiens
aatttgccaactctt

SEQ ID NO: 691021 - DNA, 15 bp, Homo sapiens
atttgccaactctta

SEQ ID NO: 691022 - DNA, 15 bp, Homo sapiens
tttgccaactcttaa

SEQ ID NO: 691023 - DNA, 15 bp, Homo sapiens
ttgccaactcttaac

SEQ ID NO: 691024 - DNA, 15 bp, Homo sapiens
tgccaactcttaaca

SEQ ID NO: 691025 - DNA, 15 bp, Homo sapiens
gccaactcttaacat

SEQ ID NO: 691026 - DNA, 15 bp, Homo sapiens
ccaactcttaacatt

SEQ ID NO: 691027 - DNA, 15 bp, Homo sapiens
caactcttaacattc

SEQ ID NO: 691028 - DNA, 15 bp, Homo sapiens
aactcttaacattct

SEQ ID NO: 691029 - DNA, 15 bp, Homo sapiens
actcttaacattctt

SEQ ID NO: 691030 - DNA, 15 bp, Homo sapiens
ctcttaacattctta

SEQ ID NO: 691031 - DNA, 15 bp, Homo sapiens
tcttaacattcttac

SEQ ID NO: 691032 - DNA, 15 bp, Homo sapiens
cttaacattcttaca

SEQ ID NO: 691033 - DNA, 15 bp, Homo sapiens
ttaacattcttacat

SEQ ID NO: 691034 - DNA, 15 bp, Homo sapiens
taacattcttacatc

SEQ ID NO: 691035 - DNA, 15 bp, Homo sapiens
aacattcttacatca

SEQ ID NO: 691036 - DNA, 15 bp, Homo sapiens
acattcttacatcag

SEQ ID NO: 691037 - DNA, 15 bp, Homo sapiens
cattcttacatcaga

SEQ ID NO: 691038 - DNA, 15 bp, Homo sapiens
attcttacatcagac

SEQ ID NO: 691039 - DNA, 15 bp, Homo sapiens
ttcttacatcagact

SEQ ID NO: 691040 - DNA, 15 bp, Homo sapiens
tcttacatcagactt

SEQ ID NO: 691041 - DNA, 15 bp, Homo sapiens
cttacatcagacttg

SEQ ID NO: 691042 - DNA, 15 bp, Homo sapiens
ttacatcagacttgt

SEQ ID NO: 691043 - DNA, 15 bp, Homo sapiens
tacatcagacttgtg

SEQ ID NO: 691044 - DNA, 15 bp, Homo sapiens
acatcagacttgtgt

SEQ ID NO: 691045 - DNA, 15 bp, Homo sapiens
catcagacttgtgtg

SEQ ID NO: 691046 - DNA, 15 bp, Homo sapiens
atcagacttgtgtgt

SEQ ID NO: 691047 - DNA, 15 bp, Homo sapiens
tcagacttgtgtgtt

SEQ ID NO: 691048 - DNA, 15 bp, Homo sapiens
cagacttgtgtgttc

SEQ ID NO: 691049 - DNA, 15 bp, Homo sapiens
agacttgtgtgttca

SEQ ID NO: 691050 - DNA, 15 bp, Homo sapiens
gacttgtgtgttcaa

SEQ ID NO: 691051 - DNA, 15 bp, Homo sapiens
acttgtgtgttcaaa

SEQ ID NO: 691052 - DNA, 15 bp, Homo sapiens
cttgtgtgttcaaat

SEQ ID NO: 691053 - DNA, 15 bp, Homo sapiens
ttgtgtgttcaaatg

SEQ ID NO: 691054 - DNA, 15 bp, Homo sapiens
tgtgtgttcaaatgg

SEQ ID NO: 691055 - DNA, 15 bp, Homo sapiens
gtgtgttcaaatggg

SEQ ID NO: 691056 - DNA, 15 bp, Homo sapiens
tgtgttcaaatgggg

SEQ ID NO: 691057 - DNA, 15 bp, Homo sapiens
gtgttcaaatggggc

SEQ ID NO: 691058 - DNA, 15 bp, Homo sapiens
tgttcaaatggggct

SEQ ID NO: 691059 - DNA, 15 bp, Homo sapiens
gttcaaatggggcta

SEQ ID NO: 691060 - DNA, 15 bp, Homo sapiens
ttcaaatggggctat

SEQ ID NO: 691061 - DNA, 15 bp, Homo sapiens
tcaaatggggctatc

SEQ ID NO: 691062 - DNA, 15 bp, Homo sapiens
caaatggggctatct

SEQ ID NO: 691063 - DNA, 15 bp, Homo sapiens
aaatggggctatcta

SEQ ID NO: 691064 - DNA, 15 bp, Homo sapiens
aatggggctatctag

SEQ ID NO: 691065 - DNA, 15 bp, Homo sapiens
atggggctatctagt

SEQ ID NO: 691066 - DNA, 15 bp, Homo sapiens
tggggctatctagtg

SEQ ID NO: 691067 - DNA, 15 bp, Homo sapiens
ggggctatctagtga

SEQ ID NO: 691068 - DNA, 15 bp, Homo sapiens
gggctatctagtgat

SEQ ID NO: 691069 - DNA, 15 bp, Homo sapiens
ggctatctagtgata

SEQ ID NO: 691070 - DNA, 15 bp, Homo sapiens
gctatctagtgatac

SEQ ID NO: 691071 - DNA, 15 bp, Homo sapiens
ctatctagtgataca

SEQ ID NO: 691072 - DNA, 15 bp, Homo sapiens
tatctagtgatacat

SEQ ID NO: 691073 - DNA, 15 bp, Homo sapiens
atctagtgatacatg

SEQ ID NO: 691074 - DNA, 15 bp, Homo sapiens
tctagtgatacatgg

SEQ ID NO: 691075 - DNA, 15 bp, Homo sapiens
ctagtgatacatggg

SEQ ID NO: 691076 - DNA, 15 bp, Homo sapiens
tagtgatacatggga

SEQ ID NO: 691077 - DNA, 15 bp, Homo sapiens
agtgatacatgggat

SEQ ID NO: 691078 - DNA, 15 bp, Homo sapiens
gtgatacatgggatg

SEQ ID NO: 691079 - DNA, 15 bp, Homo sapiens
tgatacatgggatgg

SEQ ID NO: 691080 - DNA, 15 bp, Homo sapiens
gatacatgggatggt

SEQ ID NO: 691081 - DNA, 15 bp, Homo sapiens
atacatgggatggtg

SEQ ID NO: 691082 - DNA, 15 bp, Homo sapiens
tacatgggatggtgg

SEQ ID NO: 691083 - DNA, 15 bp, Homo sapiens
acatgggatggtggt

SEQ ID NO: 691084 - DNA, 15 bp, Homo sapiens
catgggatggtggtg

SEQ ID NO: 691085 - DNA, 15 bp, Homo sapiens
atgggatggtggtgt

SEQ ID NO: 691086 - DNA, 15 bp, Homo sapiens
tgggatggtggtgtc

SEQ ID NO: 691087 - DNA, 15 bp, Homo sapiens
gggatggtggtgtcc

SEQ ID NO: 691088 - DNA, 15 bp, Homo sapiens
ggatggtggtgtcca

SEQ ID NO: 691089 - DNA, 15 bp, Homo sapiens
gatggtggtgtccac

SEQ ID NO: 691090 - DNA, 15 bp, Homo sapiens
atggtggtgtccact

SEQ ID NO: 691091 - DNA, 15 bp, Homo sapiens
tggtggtgtccactt

SEQ ID NO: 691092 - DNA, 15 bp, Homo sapiens
ggtggtgtccacttt

SEQ ID NO: 691093 - DNA, 15 bp, Homo sapiens
gtggtgtccactttt

SEQ ID NO: 691094 - DNA, 15 bp, Homo sapiens
tggtgtccactttta

SEQ ID NO: 691095 - DNA, 15 bp, Homo sapiens
ggtgtccacttttaa

SEQ ID NO: 691096 - DNA, 15 bp, Homo sapiens
gtgtccacttttaag

SEQ ID NO: 691097 - DNA, 15 bp, Homo sapiens
tgtccacttttaagc

SEQ ID NO: 691098 - DNA, 15 bp, Homo sapiens
gtccacttttaagca

SEQ ID NO: 691099 - DNA, 15 bp, Homo sapiens
tccacttttaagcat

SEQ ID NO: 691100 - DNA, 15 bp, Homo sapiens
ccacttttaagcatt

SEQ ID NO: 691101 - DNA, 15 bp, Homo sapiens
cacttttaagcattt

SEQ ID NO: 691102 - DNA, 15 bp, Homo sapiens
acttttaagcatttt

SEQ ID NO: 691103 - DNA, 15 bp, Homo sapiens
cttttaagcattttc

SEQ ID NO: 691104 - DNA, 15 bp, Homo sapiens
ttttaagcattttcc

SEQ ID NO: 691105 - DNA, 15 bp, Homo sapiens
tttaagcattttcct

SEQ ID NO: 691106 - DNA, 15 bp, Homo sapiens
ttaagcattttcctg

SEQ ID NO: 691107 - DNA, 15 bp, Homo sapiens
taagcattttcctga

SEQ ID NO: 691108 - DNA, 15 bp, Homo sapiens
aagcattttcctgag

SEQ ID NO: 691109 - DNA, 15 bp, Homo sapiens
agcattttcctgaga

SEQ ID NO: 691110 - DNA, 15 bp, Homo sapiens
gcattttcctgagag

SEQ ID NO: 691111 - DNA, 15 bp, Homo sapiens
cattttcctgagaga

SEQ ID NO: 691112 - DNA, 15 bp, Homo sapiens
attttcctgagagaa

SEQ ID NO: 691113 - DNA, 15 bp, Homo sapiens
ttttcctgagagaac

SEQ ID NO: 691114 - DNA, 15 bp, Homo sapiens
tttcctgagagaacc

SEQ ID NO: 691115 - DNA, 15 bp, Homo sapiens
ttcctgagagaacct

SEQ ID NO: 691116 - DNA, 15 bp, Homo sapiens
tcctgagagaacctg

SEQ ID NO: 691117 - DNA, 15 bp, Homo sapiens
cctgagagaacctgg

SEQ ID NO: 691118 - DNA, 15 bp, Homo sapiens
ctgagagaacctggg

SEQ ID NO: 691119 - DNA, 15 bp, Homo sapiens
tgagagaacctgggt

SEQ ID NO: 691120 - DNA, 15 bp, Homo sapiens
gagagaacctgggtt

SEQ ID NO: 691121 - DNA, 15 bp, Homo sapiens
agagaacctgggtta

SEQ ID NO: 691122 - DNA, 15 bp, Homo sapiens
gagaacctgggttat

SEQ ID NO: 691123 - DNA, 15 bp, Homo sapiens
agaacctgggttatg

SEQ ID NO: 691124 - DNA, 15 bp, Homo sapiens
gaacctgggttatgt

SEQ ID NO: 691125 - DNA, 15 bp, Homo sapiens
aacctgggttatgtc

SEQ ID NO: 691126 - DNA, 15 bp, Homo sapiens
acctgggttatgtca

SEQ ID NO: 691127 - DNA, 15 bp, Homo sapiens
cctgggttatgtcag

SEQ ID NO: 691128 - DNA, 15 bp, Homo sapiens
ctgggttatgtcagg

SEQ ID NO: 691129 - DNA, 15 bp, Homo sapiens
tgggttatgtcaggt

SEQ ID NO: 691130 - DNA, 15 bp, Homo sapiens
gggttatgtcaggta

SEQ ID NO: 691131 - DNA, 15 bp, Homo sapiens
ggttatgtcaggtat

SEQ ID NO: 691132 - DNA, 15 bp, Homo sapiens
gttatgtcaggtatg

SEQ ID NO: 691133 - DNA, 15 bp, Homo sapiens
ttatgtcaggtatgt

SEQ ID NO: 691134 - DNA, 15 bp, Homo sapiens
tatgtcaggtatgtc

SEQ ID NO: 691135 - DNA, 15 bp, Homo sapiens
atgtcaggtatgtct

SEQ ID NO: 691136 - DNA, 15 bp, Homo sapiens
tgtcaggtatgtctg

SEQ ID NO: 691137 - DNA, 15 bp, Homo sapiens
gtcaggtatgtctgt

SEQ ID NO: 691138 - DNA, 15 bp, Homo sapiens
tcaggtatgtctgtg

SEQ ID NO: 691139 - DNA, 15 bp, Homo sapiens
caggtatgtctgtgt

SEQ ID NO: 691140 - DNA, 15 bp, Homo sapiens
aggtatgtctgtgtg

SEQ ID NO: 691141 - DNA, 15 bp, Homo sapiens
ggtatgtctgtgtgc

SEQ ID NO: 691142 - DNA, 15 bp, Homo sapiens
gtatgtctgtgtgct

SEQ ID NO: 691143 - DNA, 15 bp, Homo sapiens
tatgtctgtgtgctt

SEQ ID NO: 691144 - DNA, 15 bp, Homo sapiens
atgtctgtgtgcttt

SEQ ID NO: 691145 - DNA, 15 bp, Homo sapiens
tgtctgtgtgctttc

SEQ ID NO: 691146 - DNA, 15 bp, Homo sapiens
gtctgtgtgctttca

SEQ ID NO: 691147 - DNA, 15 bp, Homo sapiens
tctgtgtgctttcag

SEQ ID NO: 691148 - DNA, 15 bp, Homo sapiens
ctgtgtgctttcaga

SEQ ID NO: 691149 - DNA, 15 bp, Homo sapiens
tgtgtgctttcagat

SEQ ID NO: 691150 - DNA, 15 bp, Homo sapiens
gtgtgctttcagatc

SEQ ID NO: 691151 - DNA, 15 bp, Homo sapiens
tgtgctttcagatcg

SEQ ID NO: 691152 - DNA, 15 bp, Homo sapiens
gtgctttcagatcgt

SEQ ID NO: 691153 - DNA, 15 bp, Homo sapiens
tgctttcagatcgtg

SEQ ID NO: 691154 - DNA, 15 bp, Homo sapiens
gctttcagatcgtgc

SEQ ID NO: 691155 - DNA, 15 bp, Homo sapiens
ctttcagatcgtgct

SEQ ID NO: 691156 - DNA, 15 bp, Homo sapiens
tttcagatcgtgctt

SEQ ID NO: 691157 - DNA, 15 bp, Homo sapiens
ttcagatcgtgcttt

SEQ ID NO: 691158 - DNA, 15 bp, Homo sapiens
tcagatcgtgctttc

SEQ ID NO: 691159 - DNA, 15 bp, Homo sapiens
cagatcgtgctttca

SEQ ID NO: 691160 - DNA, 15 bp, Homo sapiens
agatcgtgctttcag

SEQ ID NO: 691161 - DNA, 15 bp, Homo sapiens
gatcgtgctttcagt

SEQ ID NO: 691162 - DNA, 15 bp, Homo sapiens
atcgtgctttcagtc

SEQ ID NO: 691163 - DNA, 15 bp, Homo sapiens
tcgtgctttcagtcc

SEQ ID NO: 691164 - DNA, 15 bp, Homo sapiens
cgtgctttcagtcct

SEQ ID NO: 691165 - DNA, 15 bp, Homo sapiens
gtgctttcagtcctt

SEQ ID NO: 691166 - DNA, 15 bp, Homo sapiens
tgctttcagtcctta

SEQ ID NO: 691167 - DNA, 15 bp, Homo sapiens
gctttcagtccttaa

SEQ ID NO: 691168 - DNA, 15 bp, Homo sapiens
ctttcagtccttaac

SEQ ID NO: 691169 - DNA, 15 bp, Homo sapiens
tttcagtccttaact

SEQ ID NO: 691170 - DNA, 15 bp, Homo sapiens
ttcagtccttaactg

SEQ ID NO: 691171 - DNA, 15 bp, Homo sapiens
tcagtccttaactgg

SEQ ID NO: 691172 - DNA, 15 bp, Homo sapiens
cagtccttaactggg

SEQ ID NO: 691173 - DNA, 15 bp, Homo sapiens
agtccttaactgggc

SEQ ID NO: 691174 - DNA, 15 bp, Homo sapiens
gtccttaactgggca

SEQ ID NO: 691175 - DNA, 15 bp, Homo sapiens
tccttaactgggcaa

SEQ ID NO: 691176 - DNA, 15 bp, Homo sapiens
ccttaactgggcaag

SEQ ID NO: 691177 - DNA, 15 bp, Homo sapiens
cttaactgggcaaga

SEQ ID NO: 691178 - DNA, 15 bp, Homo sapiens
ttaactgggcaagat

SEQ ID NO: 691179 - DNA, 15 bp, Homo sapiens
taactgggcaagata

SEQ ID NO: 691180 - DNA, 15 bp, Homo sapiens
aactgggcaagatac

SEQ ID NO: 691181 - DNA, 15 bp, Homo sapiens
actgggcaagatacg

SEQ ID NO: 691182 - DNA, 15 bp, Homo sapiens
ctgggcaagatacgt

SEQ ID NO: 691183 - DNA, 15 bp, Homo sapiens
tgggcaagatacgtt

SEQ ID NO: 691184 - DNA, 15 bp, Homo sapiens
gggcaagatacgttt

SEQ ID NO: 691185 - DNA, 15 bp, Homo sapiens
ggcaagatacgtttt

SEQ ID NO: 691186 - DNA, 15 bp, Homo sapiens
gcaagatacgttttc

SEQ ID NO: 691187 - DNA, 15 bp, Homo sapiens
caagatacgttttct

SEQ ID NO: 691188 - DNA, 15 bp, Homo sapiens
aagatacgttttcta

SEQ ID NO: 691189 - DNA, 15 bp, Homo sapiens
agatacgttttctag

SEQ ID NO: 691190 - DNA, 15 bp, Homo sapiens
gatacgttttctagt

SEQ ID NO: 691191 - DNA, 15 bp, Homo sapiens
atacgttttctagta

SEQ ID NO: 691192 - DNA, 15 bp, Homo sapiens
tacgttttctagtac

SEQ ID NO: 691193 - DNA, 15 bp, Homo sapiens
acgttttctagtaca

SEQ ID NO: 691194 - DNA, 15 bp, Homo sapiens
cgttttctagtacaa

SEQ ID NO: 691195 - DNA, 15 bp, Homo sapiens
gttttctagtacaag

SEQ ID NO: 691196 - DNA, 15 bp, Homo sapiens
ttttctagtacaagg

SEQ ID NO: 691197 - DNA, 15 bp, Homo sapiens
tttctagtacaagga

SEQ ID NO: 691198 - DNA, 15 bp, Homo sapiens
ttctagtacaaggaa

SEQ ID NO: 691199 - DNA, 15 bp, Homo sapiens
tctagtacaaggaaa

SEQ ID NO: 691200 - DNA, 15 bp, Homo sapiens
ctagtacaaggaaag

SEQ ID NO: 691201 - DNA, 15 bp, Homo sapiens
tagtacaaggaaagt

SEQ ID NO: 691202 - DNA, 15 bp, Homo sapiens
agtacaaggaaagta

SEQ ID NO: 691203 - DNA, 15 bp, Homo sapiens
gtacaaggaaagtat

SEQ ID NO: 691204 - DNA, 15 bp, Homo sapiens
tacaaggaaagtata

SEQ ID NO: 691205 - DNA, 15 bp, Homo sapiens
acaaggaaagtatag

SEQ ID NO: 691206 - DNA, 15 bp, Homo sapiens
caaggaaagtatagg

SEQ ID NO: 691207 - DNA, 15 bp, Homo sapiens
aaggaaagtataggt

SEQ ID NO: 691208 - DNA, 15 bp, Homo sapiens
aggaaagtataggta

SEQ ID NO: 691209 - DNA, 15 bp, Homo sapiens
ggaaagtataggtat

SEQ ID NO: 691210 - DNA, 15 bp, Homo sapiens
gaaagtataggtatg

SEQ ID NO: 691211 - DNA, 15 bp, Homo sapiens
aaagtataggtatgt

SEQ ID NO: 691212 - DNA, 15 bp, Homo sapiens
aagtataggtatgtc

SEQ ID NO: 691213 - DNA, 15 bp, Homo sapiens
agtataggtatgtct

SEQ ID NO: 691214 - DNA, 15 bp, Homo sapiens
gtataggtatgtctg

SEQ ID NO: 691215 - DNA, 15 bp, Homo sapiens
tataggtatgtctga

SEQ ID NO: 691216 - DNA, 15 bp, Homo sapiens
ataggtatgtctgaa

SEQ ID NO: 691217 - DNA, 15 bp, Homo sapiens
taggtatgtctgaat

SEQ ID NO: 691218 - DNA, 15 bp, Homo sapiens
aggtatgtctgaatg

SEQ ID NO: 691219 - DNA, 15 bp, Homo sapiens
ggtatgtctgaatgt

SEQ ID NO: 691220 - DNA, 15 bp, Homo sapiens
gtatgtctgaatgtc

SEQ ID NO: 691221 - DNA, 15 bp, Homo sapiens
tatgtctgaatgtcc

SEQ ID NO: 691222 - DNA, 15 bp, Homo sapiens
atgtctgaatgtcct

SEQ ID NO: 691223 - DNA, 15 bp, Homo sapiens
tgtctgaatgtccta

SEQ ID NO: 691224 - DNA, 15 bp, Homo sapiens
gtctgaatgtcctaa

SEQ ID NO: 691225 - DNA, 15 bp, Homo sapiens
tctgaatgtcctaat

SEQ ID NO: 691226 - DNA, 15 bp, Homo sapiens
ctgaatgtcctaatc

SEQ ID NO: 691227 - DNA, 15 bp, Homo sapiens
tgaatgtcctaatca

SEQ ID NO: 691228 - DNA, 15 bp, Homo sapiens
gaatgtcctaatcaa

SEQ ID NO: 691229 - DNA, 15 bp, Homo sapiens
aatgtcctaatcaaa

SEQ ID NO: 691230 - DNA, 15 bp, Homo sapiens
atgtcctaatcaaaa

SEQ ID NO: 691231 - DNA, 15 bp, Homo sapiens
tgtcctaatcaaaaa

SEQ ID NO: 691232 - DNA, 15 bp, Homo sapiens
gtcctaatcaaaaac

SEQ ID NO: 691233 - DNA, 15 bp, Homo sapiens
tcctaatcaaaaaca

SEQ ID NO: 691234 - DNA, 15 bp, Homo sapiens
cctaatcaaaaacaa

SEQ ID NO: 691235 - DNA, 15 bp, Homo sapiens
ctaatcaaaaacaaa

SEQ ID NO: 691236 - DNA, 15 bp, Homo sapiens
taatcaaaaacaaag

SEQ ID NO: 691237 - DNA, 15 bp, Homo sapiens
aatcaaaaacaaagc

SEQ ID NO: 691238 - DNA, 15 bp, Homo sapiens
atcaaaaacaaagct

SEQ ID NO: 691239 - DNA, 15 bp, Homo sapiens
tcaaaaacaaagctc

SEQ ID NO: 691240 - DNA, 15 bp, Homo sapiens
caaaaacaaagctct

SEQ ID NO: 691241 - DNA, 15 bp, Homo sapiens
aaaaacaaagctctt

SEQ ID NO: 691242 - DNA, 15 bp, Homo sapiens
aaaacaaagctcttc

SEQ ID NO: 691243 - DNA, 15 bp, Homo sapiens
aaacaaagctcttca

SEQ ID NO: 691244 - DNA, 15 bp, Homo sapiens
aacaaagctcttcat

SEQ ID NO: 691245 - DNA, 15 bp, Homo sapiens
acaaagctcttcatg

SEQ ID NO: 691246 - DNA, 15 bp, Homo sapiens
caaagctcttcatgt

SEQ ID NO: 691247 - DNA, 15 bp, Homo sapiens
aaagctcttcatgta

SEQ ID NO: 691248 - DNA, 15 bp, Homo sapiens
aagctcttcatgtaa

SEQ ID NO: 691249 - DNA, 15 bp, Homo sapiens
agctcttcatgtaat

SEQ ID NO: 691250 - DNA, 15 bp, Homo sapiens
gctcttcatgtaatt

SEQ ID NO: 691251 - DNA, 15 bp, Homo sapiens
ctcttcatgtaattc

SEQ ID NO: 691252 - DNA, 15 bp, Homo sapiens
tcttcatgtaattcc

SEQ ID NO: 691253 - DNA, 15 bp, Homo sapiens
cttcatgtaattcca

SEQ ID NO: 691254 - DNA, 15 bp, Homo sapiens
ttcatgtaattccac

SEQ ID NO: 691255 - DNA, 15 bp, Homo sapiens
tcatgtaattccaca

SEQ ID NO: 691256 - DNA, 15 bp, Homo sapiens
catgtaattccacaa

SEQ ID NO: 691257 - DNA, 15 bp, Homo sapiens
atgtaattccacaaa

SEQ ID NO: 691258 - DNA, 15 bp, Homo sapiens
tgtaattccacaaac

SEQ ID NO: 691259 - DNA, 15 bp, Homo sapiens
gtaattccacaaacc

SEQ ID NO: 691260 - DNA, 15 bp, Homo sapiens
taattccacaaacca

SEQ ID NO: 691261 - DNA, 15 bp, Homo sapiens
aattccacaaaccaa

SEQ ID NO: 691262 - DNA, 15 bp, Homo sapiens
attccacaaaccaaa

SEQ ID NO: 691263 - DNA, 15 bp, Homo sapiens
ttccacaaaccaaag

SEQ ID NO: 691264 - DNA, 15 bp, Homo sapiens
tccacaaaccaaaga

SEQ ID NO: 691265 - DNA, 15 bp, Homo sapiens
ccacaaaccaaagac

SEQ ID NO: 691266 - DNA, 15 bp, Homo sapiens
cacaaaccaaagact

SEQ ID NO: 691267 - DNA, 15 bp, Homo sapiens
acaaaccaaagacta

SEQ ID NO: 691268 - DNA, 15 bp, Homo sapiens
caaaccaaagactat

SEQ ID NO: 691269 - DNA, 15 bp, Homo sapiens
aaaccaaagactatt

SEQ ID NO: 691270 - DNA, 15 bp, Homo sapiens
aaccaaagactatta

SEQ ID NO: 691271 - DNA, 15 bp, Homo sapiens
accaaagactattaa

SEQ ID NO: 691272 - DNA, 15 bp, Homo sapiens
ccaaagactattaag

SEQ ID NO: 691273 - DNA, 15 bp, Homo sapiens
caaagactattaaga

SEQ ID NO: 691274 - DNA, 15 bp, Homo sapiens
aaagactattaagaa

SEQ ID NO: 691275 - DNA, 15 bp, Homo sapiens
aagactattaagaaa

SEQ ID NO: 691276 - DNA, 15 bp, Homo sapiens
agactattaagaaaa

SEQ ID NO: 691277 - DNA, 15 bp, Homo sapiens
gactattaagaaaat

SEQ ID NO: 691278 - DNA, 15 bp, Homo sapiens
actattaagaaaatg

SEQ ID NO: 691279 - DNA, 15 bp, Homo sapiens
ctattaagaaaatgt

SEQ ID NO: 691280 - DNA, 15 bp, Homo sapiens
tattaagaaaatgtc

SEQ ID NO: 691281 - DNA, 15 bp, Homo sapiens
attaagaaaatgtct

SEQ ID NO: 691282 - DNA, 15 bp, Homo sapiens
ttaagaaaatgtctc

SEQ ID NO: 691283 - DNA, 15 bp, Homo sapiens
taagaaaatgtctct

SEQ ID NO: 691284 - DNA, 15 bp, Homo sapiens
aagaaaatgtctctc

SEQ ID NO: 691285 - DNA, 15 bp, Homo sapiens
agaaaatgtctctcc

SEQ ID NO: 691286 - DNA, 15 bp, Homo sapiens
gaaaatgtctctcca

SEQ ID NO: 691287 - DNA, 15 bp, Homo sapiens
aaaatgtctctccag

SEQ ID NO: 691288 - DNA, 15 bp, Homo sapiens
aaatgtctctccagc

SEQ ID NO: 691289 - DNA, 15 bp, Homo sapiens
aatgtctctccagca

SEQ ID NO: 691290 - DNA, 15 bp, Homo sapiens
atgtctctccagcag

SEQ ID NO: 691291 - DNA, 15 bp, Homo sapiens
tgtctctccagcagc

SEQ ID NO: 691292 - DNA, 15 bp, Homo sapiens
gtctctccagcagca

SEQ ID NO: 691293 - DNA, 15 bp, Homo sapiens
tctctccagcagcaa

SEQ ID NO: 691294 - DNA, 15 bp, Homo sapiens
ctctccagcagcaag

SEQ ID NO: 691295 - DNA, 15 bp, Homo sapiens
tctccagcagcaagg

SEQ ID NO: 691296 - DNA, 15 bp, Homo sapiens
ctccagcagcaaggt

SEQ ID NO: 691297 - DNA, 15 bp, Homo sapiens
tccagcagcaaggta

SEQ ID NO: 691298 - DNA, 15 bp, Homo sapiens
ccagcagcaaggtaa

SEQ ID NO: 691299 - DNA, 15 bp, Homo sapiens
cagcagcaaggtaag

SEQ ID NO: 691300 - DNA, 15 bp, Homo sapiens
agcagcaaggtaaga

SEQ ID NO: 691301 - DNA, 15 bp, Homo sapiens
gcagcaaggtaagaa

SEQ ID NO: 691302 - DNA, 15 bp, Homo sapiens
cagcaaggtaagaat

SEQ ID NO: 691303 - DNA, 15 bp, Homo sapiens
agcaaggtaagaatc

SEQ ID NO: 691304 - DNA, 15 bp, Homo sapiens
gcaaggtaagaatca

SEQ ID NO: 691305 - DNA, 15 bp, Homo sapiens
caaggtaagaatcac

SEQ ID NO: 691306 - DNA, 15 bp, Homo sapiens
aaggtaagaatcacc

SEQ ID NO: 691307 - DNA, 15 bp, Homo sapiens
aggtaagaatcacca

SEQ ID NO: 691308 - DNA, 15 bp, Homo sapiens
ggtaagaatcaccac

SEQ ID NO: 691309 - DNA, 15 bp, Homo sapiens
gtaagaatcaccact

SEQ ID NO: 691310 - DNA, 15 bp, Homo sapiens
taagaatcaccactc

SEQ ID NO: 691311 - DNA, 15 bp, Homo sapiens
aagaatcaccactca

SEQ ID NO: 691312 - DNA, 15 bp, Homo sapiens
agaatcaccactcat

SEQ ID NO: 691313 - DNA, 15 bp, Homo sapiens
gaatcaccactcatc

SEQ ID NO: 691314 - DNA, 15 bp, Homo sapiens
aatcaccactcatct

SEQ ID NO: 691315 - DNA, 15 bp, Homo sapiens
atcaccactcatctt

SEQ ID NO: 691316 - DNA, 15 bp, Homo sapiens
tcaccactcatcttt

SEQ ID NO: 691317 - DNA, 15 bp, Homo sapiens
caccactcatcttta

SEQ ID NO: 691318 - DNA, 15 bp, Homo sapiens
accactcatctttaa

SEQ ID NO: 691319 - DNA, 15 bp, Homo sapiens
ccactcatctttaat

SEQ ID NO: 691320 - DNA, 15 bp, Homo sapiens
cactcatctttaata

SEQ ID NO: 691321 - DNA, 15 bp, Homo sapiens
actcatctttaatat

SEQ ID NO: 691322 - DNA, 15 bp, Homo sapiens
ctcatctttaatata

SEQ ID NO: 691323 - DNA, 15 bp, Homo sapiens
tcatctttaatataa

SEQ ID NO: 691324 - DNA, 15 bp, Homo sapiens
catctttaatataat

SEQ ID NO: 691325 - DNA, 15 bp, Homo sapiens
atctttaatataatg

SEQ ID NO: 691326 - DNA, 15 bp, Homo sapiens
tctttaatataatga

SEQ ID NO: 691327 - DNA, 15 bp, Homo sapiens
ctttaatataatgaa

SEQ ID NO: 691328 - DNA, 15 bp, Homo sapiens
tttaatataatgaaa

SEQ ID NO: 691329 - DNA, 15 bp, Homo sapiens
ttaatataatgaaaa

SEQ ID NO: 691330 - DNA, 15 bp, Homo sapiens
taatataatgaaaac

SEQ ID NO: 691331 - DNA, 15 bp, Homo sapiens
aatataatgaaaact

SEQ ID NO: 691332 - DNA, 15 bp, Homo sapiens
atataatgaaaactg

SEQ ID NO: 691333 - DNA, 15 bp, Homo sapiens
tataatgaaaactgg

SEQ ID NO: 691334 - DNA, 15 bp, Homo sapiens
ataatgaaaactgga

SEQ ID NO: 691335 - DNA, 15 bp, Homo sapiens
taatgaaaactggaa

SEQ ID NO: 691336 - DNA, 15 bp, Homo sapiens
aatgaaaactggaaa

SEQ ID NO: 691337 - DNA, 15 bp, Homo sapiens
atgaaaactggaaaa

SEQ ID NO: 691338 - DNA, 15 bp, Homo sapiens
tgaaaactggaaaat

SEQ ID NO: 691339 - DNA, 15 bp, Homo sapiens
gaaaactggaaaatc

SEQ ID NO: 691340 - DNA, 15 bp, Homo sapiens
aaaactggaaaatca

SEQ ID NO: 691341 - DNA, 15 bp, Homo sapiens
aaactggaaaatcaa

SEQ ID NO: 691342 - DNA, 15 bp, Homo sapiens
aactggaaaatcaaa

SEQ ID NO: 691343 - DNA, 15 bp, Homo sapiens
actggaaaatcaaaa

SEQ ID NO: 691344 - DNA, 15 bp, Homo sapiens
ctggaaaatcaaaaa

SEQ ID NO: 691345 - DNA, 15 bp, Homo sapiens
tggaaaatcaaaaag

SEQ ID NO: 691346 - DNA, 15 bp, Homo sapiens
ggaaaatcaaaaagg

SEQ ID NO: 691347 - DNA, 15 bp, Homo sapiens
gaaaatcaaaaaggt

SEQ ID NO: 691348 - DNA, 15 bp, Homo sapiens
aaaatcaaaaaggtt

SEQ ID NO: 691349 - DNA, 15 bp, Homo sapiens
aaatcaaaaaggttt

SEQ ID NO: 691350 - DNA, 15 bp, Homo sapiens
aatcaaaaaggttta

SEQ ID NO: 691351 - DNA, 15 bp, Homo sapiens
atcaaaaaggtttat

SEQ ID NO: 691352 - DNA, 15 bp, Homo sapiens
tcaaaaaggtttatg

SEQ ID NO: 691353 - DNA, 15 bp, Homo sapiens
caaaaaggtttatgt

SEQ ID NO: 691354 - DNA, 15 bp, Homo sapiens
aaaaaggtttatgtg

SEQ ID NO: 691355 - DNA, 15 bp, Homo sapiens
aaaaggtttatgtga

SEQ ID NO: 691356 - DNA, 15 bp, Homo sapiens
aaaggtttatgtgaa

SEQ ID NO: 691357 - DNA, 15 bp, Homo sapiens
aaggtttatgtgaac

SEQ ID NO: 691358 - DNA, 15 bp, Homo sapiens
aggtttatgtgaaca

SEQ ID NO: 691359 - DNA, 15 bp, Homo sapiens
ggtttatgtgaacac

SEQ ID NO: 691360 - DNA, 15 bp, Homo sapiens
gtttatgtgaacact

SEQ ID NO: 691361 - DNA, 15 bp, Homo sapiens
tttatgtgaacacta

SEQ ID NO: 691362 - DNA, 15 bp, Homo sapiens
ttatgtgaacactaa

SEQ ID NO: 691363 - DNA, 15 bp, Homo sapiens
tatgtgaacactaag

SEQ ID NO: 691364 - DNA, 15 bp, Homo sapiens
atgtgaacactaagt

SEQ ID NO: 691365 - DNA, 15 bp, Homo sapiens
tgtgaacactaagtc

SEQ ID NO: 691366 - DNA, 15 bp, Homo sapiens
gtgaacactaagtca

SEQ ID NO: 691367 - DNA, 15 bp, Homo sapiens
tgaacactaagtcat

SEQ ID NO: 691368 - DNA, 15 bp, Homo sapiens
gaacactaagtcatg

SEQ ID NO: 691369 - DNA, 15 bp, Homo sapiens
aacactaagtcatgt

SEQ ID NO: 691370 - DNA, 15 bp, Homo sapiens
acactaagtcatgtc

SEQ ID NO: 691371 - DNA, 15 bp, Homo sapiens
cactaagtcatgtct

SEQ ID NO: 691372 - DNA, 15 bp, Homo sapiens
actaagtcatgtctg

SEQ ID NO: 691373 - DNA, 15 bp, Homo sapiens
ctaagtcatgtctgg

SEQ ID NO: 691374 - DNA, 15 bp, Homo sapiens
taagtcatgtctggg

SEQ ID NO: 691375 - DNA, 15 bp, Homo sapiens
aagtcatgtctgggt

SEQ ID NO: 691376 - DNA, 15 bp, Homo sapiens
agtcatgtctgggtg

SEQ ID NO: 691377 - DNA, 15 bp, Homo sapiens
gtcatgtctgggtgg

SEQ ID NO: 691378 - DNA, 15 bp, Homo sapiens
tcatgtctgggtggt

SEQ ID NO: 691379 - DNA, 15 bp, Homo sapiens
catgtctgggtggtg

SEQ ID NO: 691380 - DNA, 15 bp, Homo sapiens
atgtctgggtggtgg

SEQ ID NO: 691381 - DNA, 15 bp, Homo sapiens
tgtctgggtggtggg

SEQ ID NO: 691382 - DNA, 15 bp, Homo sapiens
gtctgggtggtggga

SEQ ID NO: 691383 - DNA, 15 bp, Homo sapiens
tctgggtggtgggat

SEQ ID NO: 691384 - DNA, 15 bp, Homo sapiens
ctgggtggtgggatg

SEQ ID NO: 691385 - DNA, 15 bp, Homo sapiens
tgggtggtgggatga

SEQ ID NO: 691386 - DNA, 15 bp, Homo sapiens
gggtggtgggatgac

SEQ ID NO: 691387 - DNA, 15 bp, Homo sapiens
ggtggtgggatgaca

SEQ ID NO: 691388 - DNA, 15 bp, Homo sapiens
gtggtgggatgacag

SEQ ID NO: 691389 - DNA, 15 bp, Homo sapiens
tggtgggatgacagg

SEQ ID NO: 691390 - DNA, 15 bp, Homo sapiens
ggtgggatgacaggt

SEQ ID NO: 691391 - DNA, 15 bp, Homo sapiens
gtgggatgacaggtg

SEQ ID NO: 691392 - DNA, 15 bp, Homo sapiens
tgggatgacaggtga

SEQ ID NO: 691393 - DNA, 15 bp, Homo sapiens
gggatgacaggtgat

SEQ ID NO: 691394 - DNA, 15 bp, Homo sapiens
ggatgacaggtgatt

SEQ ID NO: 691395 - DNA, 15 bp, Homo sapiens
gatgacaggtgattt

SEQ ID NO: 691396 - DNA, 15 bp, Homo sapiens
atgacaggtgattta

SEQ ID NO: 691397 - DNA, 15 bp, Homo sapiens
tgacaggtgatttaa

SEQ ID NO: 691398 - DNA, 15 bp, Homo sapiens
gacaggtgatttaaa

SEQ ID NO: 691399 - DNA, 15 bp, Homo sapiens
acaggtgatttaaaa

SEQ ID NO: 691400 - DNA, 15 bp, Homo sapiens
caggtgatttaaaaa

SEQ ID NO: 691401 - DNA, 15 bp, Homo sapiens
aggtgatttaaaaat

SEQ ID NO: 691402 - DNA, 15 bp, Homo sapiens
ggtgatttaaaaatt

SEQ ID NO: 691403 - DNA, 15 bp, Homo sapiens
gtgatttaaaaattt

SEQ ID NO: 691404 - DNA, 15 bp, Homo sapiens
tgatttaaaaatttt

SEQ ID NO: 691405 - DNA, 15 bp, Homo sapiens
gatttaaaaattttt

SEQ ID NO: 691406 - DNA, 15 bp, Homo sapiens
atttaaaaatttttc

SEQ ID NO: 691407 - DNA, 15 bp, Homo sapiens
tttaaaaatttttct

SEQ ID NO: 691408 - DNA, 15 bp, Homo sapiens
ttaaaaatttttctt

SEQ ID NO: 691409 - DNA, 15 bp, Homo sapiens
taaaaatttttcttt

SEQ ID NO: 691410 - DNA, 15 bp, Homo sapiens
aaaaatttttcttta

SEQ ID NO: 691411 - DNA, 15 bp, Homo sapiens
aaaatttttctttat

SEQ ID NO: 691412 - DNA, 15 bp, Homo sapiens
aaatttttctttatt

SEQ ID NO: 691413 - DNA, 15 bp, Homo sapiens
aatttttctttattc

SEQ ID NO: 691414 - DNA, 15 bp, Homo sapiens
atttttctttattca

SEQ ID NO: 691415 - DNA, 15 bp, Homo sapiens
tttttctttattcat

SEQ ID NO: 691416 - DNA, 15 bp, Homo sapiens
ttttctttattcata

SEQ ID NO: 691417 - DNA, 15 bp, Homo sapiens
tttctttattcatat

SEQ ID NO: 691418 - DNA, 15 bp, Homo sapiens
ttctttattcatatc

SEQ ID NO: 691419 - DNA, 15 bp, Homo sapiens
tctttattcatatca

SEQ ID NO: 691420 - DNA, 15 bp, Homo sapiens
ctttattcatatcaa

SEQ ID NO: 691421 - DNA, 15 bp, Homo sapiens
tttattcatatcaaa

SEQ ID NO: 691422 - DNA, 15 bp, Homo sapiens
ttattcatatcaaat

SEQ ID NO: 691423 - DNA, 15 bp, Homo sapiens
tattcatatcaaatt

SEQ ID NO: 691424 - DNA, 15 bp, Homo sapiens
attcatatcaaattt

SEQ ID NO: 691425 - DNA, 15 bp, Homo sapiens
ttcatatcaaatttt

SEQ ID NO: 691426 - DNA, 15 bp, Homo sapiens
tcatatcaaattttt

SEQ ID NO: 691427 - DNA, 15 bp, Homo sapiens
catatcaaattttta

SEQ ID NO: 691428 - DNA, 15 bp, Homo sapiens
atatcaaatttttat

SEQ ID NO: 691429 - DNA, 15 bp, Homo sapiens
tatcaaatttttatt

SEQ ID NO: 691430 - DNA, 15 bp, Homo sapiens
atcaaatttttattt

SEQ ID NO: 691431 - DNA, 15 bp, Homo sapiens
tcaaatttttatttt

SEQ ID NO: 691432 - DNA, 15 bp, Homo sapiens
caaatttttattttt

SEQ ID NO: 691433 - DNA, 15 bp, Homo sapiens
aaatttttatttttt

SEQ ID NO: 691434 - DNA, 15 bp, Homo sapiens
aatttttattttttc

SEQ ID NO: 691435 - DNA, 15 bp, Homo sapiens
atttttattttttct

SEQ ID NO: 691436 - DNA, 15 bp, Homo sapiens
tttttattttttcta

SEQ ID NO: 691437 - DNA, 15 bp, Homo sapiens
ttttattttttctac

SEQ ID NO: 691438 - DNA, 15 bp, Homo sapiens
tttattttttctaca

SEQ ID NO: 691439 - DNA, 15 bp, Homo sapiens
ttattttttctacag

SEQ ID NO: 691440 - DNA, 15 bp, Homo sapiens
tattttttctacagt

SEQ ID NO: 691441 - DNA, 15 bp, Homo sapiens
attttttctacagta

SEQ ID NO: 691442 - DNA, 15 bp, Homo sapiens
ttttttctacagtat

SEQ ID NO: 691443 - DNA, 15 bp, Homo sapiens
tttttctacagtata

SEQ ID NO: 691444 - DNA, 15 bp, Homo sapiens
ttttctacagtatac

SEQ ID NO: 691445 - DNA, 15 bp, Homo sapiens
tttctacagtatact

SEQ ID NO: 691446 - DNA, 15 bp, Homo sapiens
ttctacagtatacta

SEQ ID NO: 691447 - DNA, 15 bp, Homo sapiens
tctacagtatactat

SEQ ID NO: 691448 - DNA, 15 bp, Homo sapiens
ctacagtatactatt

SEQ ID NO: 691449 - DNA, 15 bp, Homo sapiens
tacagtatactatta

SEQ ID NO: 691450 - DNA, 15 bp, Homo sapiens
acagtatactattag

SEQ ID NO: 691451 - DNA, 15 bp, Homo sapiens
cagtatactattagt

SEQ ID NO: 691452 - DNA, 15 bp, Homo sapiens
agtatactattagtg

SEQ ID NO: 691453 - DNA, 15 bp, Homo sapiens
gtatactattagtgt

SEQ ID NO: 691454 - DNA, 15 bp, Homo sapiens
tatactattagtgtg

SEQ ID NO: 691455 - DNA, 15 bp, Homo sapiens
atactattagtgtgt

SEQ ID NO: 691456 - DNA, 15 bp, Homo sapiens
tactattagtgtgtt

SEQ ID NO: 691457 - DNA, 15 bp, Homo sapiens
actattagtgtgtta

SEQ ID NO: 691458 - DNA, 15 bp, Homo sapiens
ctattagtgtgttat

SEQ ID NO: 691459 - DNA, 15 bp, Homo sapiens
tattagtgtgttatt

SEQ ID NO: 691460 - DNA, 15 bp, Homo sapiens
attagtgtgttattt

SEQ ID NO: 691461 - DNA, 15 bp, Homo sapiens
ttagtgtgttattta

SEQ ID NO: 691462 - DNA, 15 bp, Homo sapiens
tagtgtgttatttaa

SEQ ID NO: 691463 - DNA, 15 bp, Homo sapiens
agtgtgttatttaaa

SEQ ID NO: 691464 - DNA, 15 bp, Homo sapiens
gtgtgttatttaaat

SEQ ID NO: 691465 - DNA, 15 bp, Homo sapiens
tgtgttatttaaata

SEQ ID NO: 691466 - DNA, 15 bp, Homo sapiens
gtgttatttaaatag

SEQ ID NO: 691467 - DNA, 15 bp, Homo sapiens
tgttatttaaataga

SEQ ID NO: 691468 - DNA, 15 bp, Homo sapiens
gttatttaaatagat

SEQ ID NO: 691469 - DNA, 15 bp, Homo sapiens
ttatttaaatagatg

SEQ ID NO: 691470 - DNA, 15 bp, Homo sapiens
tatttaaatagatgt

SEQ ID NO: 691471 - DNA, 15 bp, Homo sapiens
atttaaatagatgta

SEQ ID NO: 691472 - DNA, 15 bp, Homo sapiens
tttaaatagatgtac

SEQ ID NO: 691473 - DNA, 15 bp, Homo sapiens
ttaaatagatgtact

SEQ ID NO: 691474 - DNA, 15 bp, Homo sapiens
taaatagatgtacta

SEQ ID NO: 691475 - DNA, 15 bp, Homo sapiens
aaatagatgtactac

SEQ ID NO: 691476 - DNA, 15 bp, Homo sapiens
aatagatgtactact

SEQ ID NO: 691477 - DNA, 15 bp, Homo sapiens
atagatgtactactt

SEQ ID NO: 691478 - DNA, 15 bp, Homo sapiens
tagatgtactactta

SEQ ID NO: 691479 - DNA, 15 bp, Homo sapiens
agatgtactacttaa

SEQ ID NO: 691480 - DNA, 15 bp, Homo sapiens
gatgtactacttaaa

SEQ ID NO: 691481 - DNA, 15 bp, Homo sapiens
atgtactacttaaat

SEQ ID NO: 691482 - DNA, 15 bp, Homo sapiens
tgtactacttaaata

SEQ ID NO: 691483 - DNA, 15 bp, Homo sapiens
gtactacttaaataa

SEQ ID NO: 691484 - DNA, 15 bp, Homo sapiens
tactacttaaataat

SEQ ID NO: 691485 - DNA, 15 bp, Homo sapiens
actacttaaataatt

SEQ ID NO: 691486 - DNA, 15 bp, Homo sapiens
ctacttaaataattt

SEQ ID NO: 691487 - DNA, 15 bp, Homo sapiens
tacttaaataatttt

SEQ ID NO: 691488 - DNA, 15 bp, Homo sapiens
acttaaataatttta

SEQ ID NO: 691489 - DNA, 15 bp, Homo sapiens
cttaaataattttaa

SEQ ID NO: 691490 - DNA, 15 bp, Homo sapiens
ttaaataattttaat

SEQ ID NO: 691491 - DNA, 15 bp, Homo sapiens
taaataattttaata

SEQ ID NO: 691492 - DNA, 15 bp, Homo sapiens
aaataattttaatag

SEQ ID NO: 691493 - DNA, 15 bp, Homo sapiens
aataattttaatagt

SEQ ID NO: 691494 - DNA, 15 bp, Homo sapiens
ataattttaatagta

SEQ ID NO: 691495 - DNA, 15 bp, Homo sapiens
taattttaatagtaa

SEQ ID NO: 691496 - DNA, 15 bp, Homo sapiens
aattttaatagtaaa

SEQ ID NO: 691497 - DNA, 15 bp, Homo sapiens
attttaatagtaaag

SEQ ID NO: 691498 - DNA, 15 bp, Homo sapiens
ttttaatagtaaaga

SEQ ID NO: 691499 - DNA, 15 bp, Homo sapiens
tttaatagtaaagaa

SEQ ID NO: 691500 - DNA, 15 bp, Homo sapiens
ttaatagtaaagaag

SEQ ID NO: 691501 - DNA, 15 bp, Homo sapiens
taatagtaaagaaga

SEQ ID NO: 691502 - DNA, 15 bp, Homo sapiens
aatagtaaagaagat

SEQ ID NO: 691503 - DNA, 15 bp, Homo sapiens
atagtaaagaagata

SEQ ID NO: 691504 - DNA, 15 bp, Homo sapiens
tagtaaagaagatac

SEQ ID NO: 691505 - DNA, 15 bp, Homo sapiens
agtaaagaagatact

SEQ ID NO: 691506 - DNA, 15 bp, Homo sapiens
gtaaagaagatactc

SEQ ID NO: 691507 - DNA, 15 bp, Homo sapiens
taaagaagatactct

SEQ ID NO: 691508 - DNA, 15 bp, Homo sapiens
aaagaagatactcta

SEQ ID NO: 691509 - DNA, 15 bp, Homo sapiens
aagaagatactctaa

SEQ ID NO: 691510 - DNA, 15 bp, Homo sapiens
agaagatactctaag

SEQ ID NO: 691511 - DNA, 15 bp, Homo sapiens
gaagatactctaagt

SEQ ID NO: 691512 - DNA, 15 bp, Homo sapiens
aagatactctaagta

SEQ ID NO: 691513 - DNA, 15 bp, Homo sapiens
agatactctaagtaa

SEQ ID NO: 691514 - DNA, 15 bp, Homo sapiens
gatactctaagtaaa

SEQ ID NO: 691515 - DNA, 15 bp, Homo sapiens
atactctaagtaaat

SEQ ID NO: 691516 - DNA, 15 bp, Homo sapiens
tactctaagtaaata

SEQ ID NO: 691517 - DNA, 15 bp, Homo sapiens
actctaagtaaatac

SEQ ID NO: 691518 - DNA, 15 bp, Homo sapiens
ctctaagtaaataca

SEQ ID NO: 691519 - DNA, 15 bp, Homo sapiens
tctaagtaaatacat

SEQ ID NO: 691520 - DNA, 15 bp, Homo sapiens
ctaagtaaatacata

SEQ ID NO: 691521 - DNA, 15 bp, Homo sapiens
taagtaaatacatag

SEQ ID NO: 691522 - DNA, 15 bp, Homo sapiens
aagtaaatacataga

SEQ ID NO: 691523 - DNA, 15 bp, Homo sapiens
agtaaatacatagag

SEQ ID NO: 691524 - DNA, 15 bp, Homo sapiens
gtaaatacatagaga

SEQ ID NO: 691525 - DNA, 15 bp, Homo sapiens
taaatacatagagaa

SEQ ID NO: 691526 - DNA, 15 bp, Homo sapiens
aaatacatagagaaa

SEQ ID NO: 691527 - DNA, 15 bp, Homo sapiens
aatacatagagaaaa

SEQ ID NO: 691528 - DNA, 15 bp, Homo sapiens
atacatagagaaaaa

SEQ ID NO: 691529 - DNA, 15 bp, Homo sapiens
tacatagagaaaaat

SEQ ID NO: 691530 - DNA, 15 bp, Homo sapiens
acatagagaaaaatg

SEQ ID NO: 691531 - DNA, 15 bp, Homo sapiens
catagagaaaaatgt

SEQ ID NO: 691532 - DNA, 15 bp, Homo sapiens
atagagaaaaatgta

SEQ ID NO: 691533 - DNA, 15 bp, Homo sapiens
tagagaaaaatgtaa

SEQ ID NO: 691534 - DNA, 15 bp, Homo sapiens
agagaaaaatgtaag

SEQ ID NO: 691535 - DNA, 15 bp, Homo sapiens
gagaaaaatgtaagg

SEQ ID NO: 691536 - DNA, 15 bp, Homo sapiens
agaaaaatgtaagga

SEQ ID NO: 691537 - DNA, 15 bp, Homo sapiens
gaaaaatgtaaggaa

SEQ ID NO: 691538 - DNA, 15 bp, Homo sapiens
aaaaatgtaaggaat

SEQ ID NO: 691539 - DNA, 15 bp, Homo sapiens
aaaatgtaaggaatt

SEQ ID NO: 691540 - DNA, 15 bp, Homo sapiens
aaatgtaaggaattc

SEQ ID NO: 691541 - DNA, 15 bp, Homo sapiens
aatgtaaggaattcc

SEQ ID NO: 691542 - DNA, 15 bp, Homo sapiens
atgtaaggaattccc

SEQ ID NO: 691543 - DNA, 15 bp, Homo sapiens
tgtaaggaattccca

SEQ ID NO: 691544 - DNA, 15 bp, Homo sapiens
gtaaggaattcccaa

SEQ ID NO: 691545 - DNA, 15 bp, Homo sapiens
taaggaattcccaag

SEQ ID NO: 691546 - DNA, 15 bp, Homo sapiens
aaggaattcccaagg

SEQ ID NO: 691547 - DNA, 15 bp, Homo sapiens
aggaattcccaaggc

SEQ ID NO: 691548 - DNA, 15 bp, Homo sapiens
ggaattcccaaggca

SEQ ID NO: 691549 - DNA, 15 bp, Homo sapiens
gaattcccaaggcac

SEQ ID NO: 691550 - DNA, 15 bp, Homo sapiens
aattcccaaggcacc

SEQ ID NO: 691551 - DNA, 15 bp, Homo sapiens
attcccaaggcaccc

SEQ ID NO: 691552 - DNA, 15 bp, Homo sapiens
ttcccaaggcacccc

SEQ ID NO: 691553 - DNA, 15 bp, Homo sapiens
tcccaaggcacccca

SEQ ID NO: 691554 - DNA, 15 bp, Homo sapiens
cccaaggcaccccag

SEQ ID NO: 691555 - DNA, 15 bp, Homo sapiens
ccaaggcaccccagg

SEQ ID NO: 691556 - DNA, 15 bp, Homo sapiens
caaggcaccccaggt

SEQ ID NO: 691557 - DNA, 15 bp, Homo sapiens
aaggcaccccaggtt

SEQ ID NO: 691558 - DNA, 15 bp, Homo sapiens
aggcaccccaggttt

SEQ ID NO: 691559 - DNA, 15 bp, Homo sapiens
ggcaccccaggtttt

SEQ ID NO: 691560 - DNA, 15 bp, Homo sapiens
gcaccccaggttttg

SEQ ID NO: 691561 - DNA, 15 bp, Homo sapiens
caccccaggttttgt

SEQ ID NO: 691562 - DNA, 15 bp, Homo sapiens
accccaggttttgtg

SEQ ID NO: 691563 - DNA, 15 bp, Homo sapiens
ccccaggttttgtgt

SEQ ID NO: 691564 - DNA, 15 bp, Homo sapiens
cccaggttttgtgtt

SEQ ID NO: 691565 - DNA, 15 bp, Homo sapiens
ccaggttttgtgtta

SEQ ID NO: 691566 - DNA, 15 bp, Homo sapiens
caggttttgtgttaa

SEQ ID NO: 691567 - DNA, 15 bp, Homo sapiens
aggttttgtgttaaa

SEQ ID NO: 691568 - DNA, 15 bp, Homo sapiens
ggttttgtgttaaaa

SEQ ID NO: 691569 - DNA, 15 bp, Homo sapiens
gttttgtgttaaaat

SEQ ID NO: 691570 - DNA, 15 bp, Homo sapiens
ttttgtgttaaaatt

SEQ ID NO: 691571 - DNA, 15 bp, Homo sapiens
tttgtgttaaaattt

SEQ ID NO: 691572 - DNA, 15 bp, Homo sapiens
ttgtgttaaaatttc

SEQ ID NO: 691573 - DNA, 15 bp, Homo sapiens
tgtgttaaaatttca

SEQ ID NO: 691574 - DNA, 15 bp, Homo sapiens
gtgttaaaatttcag

SEQ ID NO: 691575 - DNA, 15 bp, Homo sapiens
tgttaaaatttcaga

SEQ ID NO: 691576 - DNA, 15 bp, Homo sapiens
gttaaaatttcagat

SEQ ID NO: 691577 - DNA, 15 bp, Homo sapiens
ttaaaatttcagatg

SEQ ID NO: 691578 - DNA, 15 bp, Homo sapiens
taaaatttcagatga

SEQ ID NO: 691579 - DNA, 15 bp, Homo sapiens
aaaatttcagatgaa

SEQ ID NO: 691580 - DNA, 15 bp, Homo sapiens
aaatttcagatgaaa

SEQ ID NO: 691581 - DNA, 15 bp, Homo sapiens
aatttcagatgaaat

SEQ ID NO: 691582 - DNA, 15 bp, Homo sapiens
atttcagatgaaatt

SEQ ID NO: 691583 - DNA, 15 bp, Homo sapiens
tttcagatgaaatta

SEQ ID NO: 691584 - DNA, 15 bp, Homo sapiens
ttcagatgaaattaa

SEQ ID NO: 691585 - DNA, 15 bp, Homo sapiens
tcagatgaaattaag

SEQ ID NO: 691586 - DNA, 15 bp, Homo sapiens
cagatgaaattaagt

SEQ ID NO: 691587 - DNA, 15 bp, Homo sapiens
agatgaaattaagta

SEQ ID NO: 691588 - DNA, 15 bp, Homo sapiens
gatgaaattaagtaa

SEQ ID NO: 691589 - DNA, 15 bp, Homo sapiens
atgaaattaagtaaa

SEQ ID NO: 691590 - DNA, 15 bp, Homo sapiens
tgaaattaagtaaat

SEQ ID NO: 691591 - DNA, 15 bp, Homo sapiens
gaaattaagtaaatg

SEQ ID NO: 691592 - DNA, 15 bp, Homo sapiens
aattaagtaaatgtt

SEQ ID NO: 691593 - DNA, 15 bp, Homo sapiens
attaagtaaatgttt

SEQ ID NO: 691594 - DNA, 15 bp, Homo sapiens
ttaagtaaatgttta

SEQ ID NO: 691595 - DNA, 15 bp, Homo sapiens
taagtaaatgtttag

SEQ ID NO: 691596 - DNA, 15 bp, Homo sapiens
aagtaaatgtttagg

SEQ ID NO: 691597 - DNA, 15 bp, Homo sapiens
agtaaatgtttagga

SEQ ID NO: 691598 - DNA, 15 bp, Homo sapiens
gtaaatgtttaggat

SEQ ID NO: 691599 - DNA, 15 bp, Homo sapiens
taaatgtttaggata

SEQ ID NO: 691600 - DNA, 15 bp, Homo sapiens
aaatgtttaggataa

SEQ ID NO: 691601 - DNA, 15 bp, Homo sapiens
aatgtttaggataat

SEQ ID NO: 691602 - DNA, 15 bp, Homo sapiens
atgtttaggataata

SEQ ID NO: 691603 - DNA, 15 bp, Homo sapiens
tgtttaggataatac

SEQ ID NO: 691604 - DNA, 15 bp, Homo sapiens
gtttaggataatacc

SEQ ID NO: 691605 - DNA, 15 bp, Homo sapiens
tttaggataatacca

SEQ ID NO: 691606 - DNA, 15 bp, Homo sapiens
ttaggataataccag

SEQ ID NO: 691607 - DNA, 15 bp, Homo sapiens
taggataataccaga

SEQ ID NO: 691608 - DNA, 15 bp, Homo sapiens
aggataataccagat

SEQ ID NO: 691609 - DNA, 15 bp, Homo sapiens
ggataataccagatc

SEQ ID NO: 691610 - DNA, 15 bp, Homo sapiens
gataataccagatcc

SEQ ID NO: 691611 - DNA, 15 bp, Homo sapiens
ataataccagatcct

SEQ ID NO: 691612 - DNA, 15 bp, Homo sapiens
taataccagatcctt

SEQ ID NO: 691613 - DNA, 15 bp, Homo sapiens
aataccagatccttc

SEQ ID NO: 691614 - DNA, 15 bp, Homo sapiens
ataccagatccttct

SEQ ID NO: 691615 - DNA, 15 bp, Homo sapiens
taccagatccttctg

SEQ ID NO: 691616 - DNA, 15 bp, Homo sapiens
accagatccttctga

SEQ ID NO: 691617 - DNA, 15 bp, Homo sapiens
ccagatccttctgaa

SEQ ID NO: 691618 - DNA, 15 bp, Homo sapiens
cagatccttctgaat

SEQ ID NO: 691619 - DNA, 15 bp, Homo sapiens
agatccttctgaatt

SEQ ID NO: 691620 - DNA, 15 bp, Homo sapiens
gatccttctgaattc

SEQ ID NO: 691621 - DNA, 15 bp, Homo sapiens
atccttctgaattct

SEQ ID NO: 691622 - DNA, 15 bp, Homo sapiens
tccttctgaattctc

SEQ ID NO: 691623 - DNA, 15 bp, Homo sapiens
ccttctgaattctca

SEQ ID NO: 691624 - DNA, 15 bp, Homo sapiens
cttctgaattctcat

SEQ ID NO: 691625 - DNA, 15 bp, Homo sapiens
ttctgaattctcatc

SEQ ID NO: 691626 - DNA, 15 bp, Homo sapiens
tctgaattctcatct

SEQ ID NO: 691627 - DNA, 15 bp, Homo sapiens
ctgaattctcatctc

SEQ ID NO: 691628 - DNA, 15 bp, Homo sapiens
tgaattctcatctca

SEQ ID NO: 691629 - DNA, 15 bp, Homo sapiens
gaattctcatctcat

SEQ ID NO: 691630 - DNA, 15 bp, Homo sapiens
aattctcatctcatc

SEQ ID NO: 691631 - DNA, 15 bp, Homo sapiens
attctcatctcatcg

SEQ ID NO: 691632 - DNA, 15 bp, Homo sapiens
ttctcatctcatcga

SEQ ID NO: 691633 - DNA, 15 bp, Homo sapiens
tctcatctcatcgac

SEQ ID NO: 691634 - DNA, 15 bp, Homo sapiens
ctcatctcatcgact

SEQ ID NO: 691635 - DNA, 15 bp, Homo sapiens
tcatctcatcgactt

SEQ ID NO: 691636 - DNA, 15 bp, Homo sapiens
catctcatcgacttc

SEQ ID NO: 691637 - DNA, 15 bp, Homo sapiens
atctcatcgacttca

SEQ ID NO: 691638 - DNA, 15 bp, Homo sapiens
tctcatcgacttcat

SEQ ID NO: 691639 - DNA, 15 bp, Homo sapiens
ctcatcgacttcatt

SEQ ID NO: 691640 - DNA, 15 bp, Homo sapiens
tcatcgacttcattt

SEQ ID NO: 691641 - DNA, 15 bp, Homo sapiens
catcgacttcatttt

SEQ ID NO: 691642 - DNA, 15 bp, Homo sapiens
atcgacttcattttc

SEQ ID NO: 691643 - DNA, 15 bp, Homo sapiens
tcgacttcattttca

SEQ ID NO: 691644 - DNA, 15 bp, Homo sapiens
cgacttcattttcag

SEQ ID NO: 691645 - DNA, 15 bp, Homo sapiens
gacttcattttcagc

SEQ ID NO: 691646 - DNA, 15 bp, Homo sapiens
acttcattttcagca

SEQ ID NO: 691647 - DNA, 15 bp, Homo sapiens
cttcattttcagcat

SEQ ID NO: 691648 - DNA, 15 bp, Homo sapiens
ttcattttcagcata

SEQ ID NO: 691649 - DNA, 15 bp, Homo sapiens
tcattttcagcatac

SEQ ID NO: 691650 - DNA, 15 bp, Homo sapiens
cattttcagcatact

SEQ ID NO: 691651 - DNA, 15 bp, Homo sapiens
attttcagcatactg

SEQ ID NO: 691652 - DNA, 15 bp, Homo sapiens
ttttcagcatactga

SEQ ID NO: 691653 - DNA, 15 bp, Homo sapiens
tttcagcatactgag

SEQ ID NO: 691654 - DNA, 15 bp, Homo sapiens
ttcagcatactgagg

SEQ ID NO: 691655 - DNA, 15 bp, Homo sapiens
tcagcatactgagga

SEQ ID NO: 691656 - DNA, 15 bp, Homo sapiens
cagcatactgaggat

SEQ ID NO: 691657 - DNA, 15 bp, Homo sapiens
agcatactgaggatc

SEQ ID NO: 691658 - DNA, 15 bp, Homo sapiens
gcatactgaggatct

SEQ ID NO: 691659 - DNA, 15 bp, Homo sapiens
catactgaggatctc

SEQ ID NO: 691660 - DNA, 15 bp, Homo sapiens
atactgaggatctct

SEQ ID NO: 691661 - DNA, 15 bp, Homo sapiens
tactgaggatctctc

SEQ ID NO: 691662 - DNA, 15 bp, Homo sapiens
actgaggatctctcg

SEQ ID NO: 691663 - DNA, 15 bp, Homo sapiens
ctgaggatctctcgc

SEQ ID NO: 691664 - DNA, 15 bp, Homo sapiens
tgaggatctctcgca

SEQ ID NO: 691665 - DNA, 15 bp, Homo sapiens
gaggatctctcgcag

SEQ ID NO: 691666 - DNA, 15 bp, Homo sapiens
aggatctctcgcagg

SEQ ID NO: 691667 - DNA, 15 bp, Homo sapiens
ggatctctcgcaggg

SEQ ID NO: 691668 - DNA, 15 bp, Homo sapiens
gatctctcgcagggt

SEQ ID NO: 691669 - DNA, 15 bp, Homo sapiens
atctctcgcagggtc

SEQ ID NO: 691670 - DNA, 15 bp, Homo sapiens
tctctcgcagggtcc

SEQ ID NO: 691671 - DNA, 15 bp, Homo sapiens
ctctcgcagggtcct

SEQ ID NO: 691672 - DNA, 15 bp, Homo sapiens
tctcgcagggtcctt

SEQ ID NO: 691673 - DNA, 15 bp, Homo sapiens
ctcgcagggtccttg

SEQ ID NO: 691674 - DNA, 15 bp, Homo sapiens
tcgcagggtccttga

SEQ ID NO: 691675 - DNA, 15 bp, Homo sapiens
cgcagggtccttgat

SEQ ID NO: 691676 - DNA, 15 bp, Homo sapiens
gcagggtccttgata

SEQ ID NO: 691677 - DNA, 15 bp, Homo sapiens
cagggtccttgatat

SEQ ID NO: 691678 - DNA, 15 bp, Homo sapiens
agggtccttgatatc

SEQ ID NO: 691679 - DNA, 15 bp, Homo sapiens
gggtccttgatatct

SEQ ID NO: 691680 - DNA, 15 bp, Homo sapiens
ggtccttgatatctt

SEQ ID NO: 691681 - DNA, 15 bp, Homo sapiens
gtccttgatatcttt

SEQ ID NO: 691682 - DNA, 15 bp, Homo sapiens
tccttgatatctttc

SEQ ID NO: 691683 - DNA, 15 bp, Homo sapiens
ccttgatatctttca

SEQ ID NO: 691684 - DNA, 15 bp, Homo sapiens
cttgatatctttcag

SEQ ID NO: 691685 - DNA, 15 bp, Homo sapiens
ttgatatctttcagc

SEQ ID NO: 691686 - DNA, 15 bp, Homo sapiens
tgatatctttcagcg

SEQ ID NO: 691687 - DNA, 15 bp, Homo sapiens
gatatctttcagcgt

SEQ ID NO: 691688 - DNA, 15 bp, Homo sapiens
atatctttcagcgtg

SEQ ID NO: 691689 - DNA, 15 bp, Homo sapiens
tatctttcagcgtgt

SEQ ID NO: 691690 - DNA, 15 bp, Homo sapiens
atctttcagcgtgtt

SEQ ID NO: 691691 - DNA, 15 bp, Homo sapiens
tctttcagcgtgtta

SEQ ID NO: 691692 - DNA, 15 bp, Homo sapiens
ctttcagcgtgttaa

SEQ ID NO: 691693 - DNA, 15 bp, Homo sapiens
tttcagcgtgttaat

SEQ ID NO: 691694 - DNA, 15 bp, Homo sapiens
ttcagcgtgttaata

SEQ ID NO: 691695 - DNA, 15 bp, Homo sapiens
tcagcgtgttaatac

SEQ ID NO: 691696 - DNA, 15 bp, Homo sapiens
cagcgtgttaatact

SEQ ID NO: 691697 - DNA, 15 bp, Homo sapiens
agcgtgttaatactc

SEQ ID NO: 691698 - DNA, 15 bp, Homo sapiens
gcgtgttaatactct

SEQ ID NO: 691699 - DNA, 15 bp, Homo sapiens
cgtgttaatactctg

SEQ ID NO: 691700 - DNA, 15 bp, Homo sapiens
gtgttaatactctga

SEQ ID NO: 691701 - DNA, 15 bp, Homo sapiens
tgttaatactctgaa

SEQ ID NO: 691702 - DNA, 15 bp, Homo sapiens
gttaatactctgaaa

SEQ ID NO: 691703 - DNA, 15 bp, Homo sapiens
ttaatactctgaaat

SEQ ID NO: 691704 - DNA, 15 bp, Homo sapiens
taatactctgaaatt

SEQ ID NO: 691705 - DNA, 15 bp, Homo sapiens
aatactctgaaatta

SEQ ID NO: 691706 - DNA, 15 bp, Homo sapiens
atactctgaaattac

SEQ ID NO: 691707 - DNA, 15 bp, Homo sapiens
tactctgaaattaca

SEQ ID NO: 691708 - DNA, 15 bp, Homo sapiens
actctgaaattacaa

SEQ ID NO: 691709 - DNA, 15 bp, Homo sapiens
ctctgaaattacaaa

SEQ ID NO: 691710 - DNA, 15 bp, Homo sapiens
tctgaaattacaaat

SEQ ID NO: 691711 - DNA, 15 bp, Homo sapiens
ctgaaattacaaatc

SEQ ID NO: 691712 - DNA, 15 bp, Homo sapiens
tgaaattacaaatct

SEQ ID NO: 691713 - DNA, 15 bp, Homo sapiens
gaaattacaaatctc

SEQ ID NO: 691714 - DNA, 15 bp, Homo sapiens
aaattacaaatctca

SEQ ID NO: 691715 - DNA, 15 bp, Homo sapiens
aattacaaatctcaa

SEQ ID NO: 691716 - DNA, 15 bp, Homo sapiens
attacaaatctcaaa

SEQ ID NO: 691717 - DNA, 15 bp, Homo sapiens
ttacaaatctcaaaa

SEQ ID NO: 691718 - DNA, 15 bp, Homo sapiens
tacaaatctcaaaat

SEQ ID NO: 691719 - DNA, 15 bp, Homo sapiens
acaaatctcaaaatc

SEQ ID NO: 691720 - DNA, 15 bp, Homo sapiens
caaatctcaaaatca

SEQ ID NO: 691721 - DNA, 15 bp, Homo sapiens
aaatctcaaaatcac

SEQ ID NO: 691722 - DNA, 15 bp, Homo sapiens
aatctcaaaatcact

SEQ ID NO: 691723 - DNA, 15 bp, Homo sapiens
atctcaaaatcactt

SEQ ID NO: 691724 - DNA, 15 bp, Homo sapiens
tctcaaaatcacttc

SEQ ID NO: 691725 - DNA, 15 bp, Homo sapiens
ctcaaaatcacttca

SEQ ID NO: 691726 - DNA, 15 bp, Homo sapiens
tcaaaatcacttcac

SEQ ID NO: 691727 - DNA, 15 bp, Homo sapiens
caaaatcacttcacg

SEQ ID NO: 691728 - DNA, 15 bp, Homo sapiens
aaaatcacttcacgc

SEQ ID NO: 691729 - DNA, 15 bp, Homo sapiens
aaatcacttcacgcc

SEQ ID NO: 691730 - DNA, 15 bp, Homo sapiens
aatcacttcacgccc

SEQ ID NO: 691731 - DNA, 15 bp, Homo sapiens
atcacttcacgccca

SEQ ID NO: 691732 - DNA, 15 bp, Homo sapiens
tcacttcacgcccat

SEQ ID NO: 691733 - DNA, 15 bp, Homo sapiens
cacttcacgcccata

SEQ ID NO: 691734 - DNA, 15 bp, Homo sapiens
acttcacgcccataa

SEQ ID NO: 691735 - DNA, 15 bp, Homo sapiens
cttcacgcccataaa

SEQ ID NO: 691736 - DNA, 15 bp, Homo sapiens
ttcacgcccataaac

SEQ ID NO: 691737 - DNA, 15 bp, Homo sapiens
tcacgcccataaacc

SEQ ID NO: 691738 - DNA, 15 bp, Homo sapiens
cacgcccataaacca

SEQ ID NO: 691739 - DNA, 15 bp, Homo sapiens
acgcccataaaccaa

SEQ ID NO: 691740 - DNA, 15 bp, Homo sapiens
cgcccataaaccaaa

SEQ ID NO: 691741 - DNA, 15 bp, Homo sapiens
gcccataaaccaaaa

SEQ ID NO: 691742 - DNA, 15 bp, Homo sapiens
cccataaaccaaaat

SEQ ID NO: 691743 - DNA, 15 bp, Homo sapiens
ccataaaccaaaatt

SEQ ID NO: 691744 - DNA, 15 bp, Homo sapiens
cataaaccaaaattc

SEQ ID NO: 691745 - DNA, 15 bp, Homo sapiens
ataaaccaaaattca

SEQ ID NO: 691746 - DNA, 15 bp, Homo sapiens
taaaccaaaattcaa

SEQ ID NO: 691747 - DNA, 15 bp, Homo sapiens
aaaccaaaattcaat

SEQ ID NO: 691748 - DNA, 15 bp, Homo sapiens
aaccaaaattcaatg

SEQ ID NO: 691749 - DNA, 15 bp, Homo sapiens
accaaaattcaatgg

SEQ ID NO: 691750 - DNA, 15 bp, Homo sapiens
ccaaaattcaatggc

SEQ ID NO: 691751 - DNA, 15 bp, Homo sapiens
caaaattcaatggct

SEQ ID NO: 691752 - DNA, 15 bp, Homo sapiens
aaaattcaatggcta

SEQ ID NO: 691753 - DNA, 15 bp, Homo sapiens
aaattcaatggctac

SEQ ID NO: 691754 - DNA, 15 bp, Homo sapiens
aattcaatggctacc

SEQ ID NO: 691755 - DNA, 15 bp, Homo sapiens
attcaatggctacca

SEQ ID NO: 691756 - DNA, 15 bp, Homo sapiens
ttcaatggctaccat

SEQ ID NO: 691757 - DNA, 15 bp, Homo sapiens
tcaatggctaccatc

SEQ ID NO: 691758 - DNA, 15 bp, Homo sapiens
caatggctaccatct

SEQ ID NO: 691759 - DNA, 15 bp, Homo sapiens
aatggctaccatctg

SEQ ID NO: 691760 - DNA, 15 bp, Homo sapiens
atggctaccatctgc

SEQ ID NO: 691761 - DNA, 15 bp, Homo sapiens
tggctaccatctgcc

SEQ ID NO: 691762 - DNA, 15 bp, Homo sapiens
ggctaccatctgcct

SEQ ID NO: 691763 - DNA, 15 bp, Homo sapiens
gctaccatctgccta

SEQ ID NO: 691764 - DNA, 15 bp, Homo sapiens
ctaccatctgcctaa

SEQ ID NO: 691765 - DNA, 15 bp, Homo sapiens
taccatctgcctaat

SEQ ID NO: 691766 - DNA, 15 bp, Homo sapiens
accatctgcctaata

SEQ ID NO: 691767 - DNA, 15 bp, Homo sapiens
ccatctgcctaataa

SEQ ID NO: 691768 - DNA, 15 bp, Homo sapiens
catctgcctaataaa

SEQ ID NO: 691769 - DNA, 15 bp, Homo sapiens
atctgcctaataaac

SEQ ID NO: 691770 - DNA, 15 bp, Homo sapiens
tctgcctaataaacc

SEQ ID NO: 691771 - DNA, 15 bp, Homo sapiens
ctgcctaataaacca

SEQ ID NO: 691772 - DNA, 15 bp, Homo sapiens
tgcctaataaaccaa

SEQ ID NO: 691773 - DNA, 15 bp, Homo sapiens
gcctaataaaccaag

SEQ ID NO: 691774 - DNA, 15 bp, Homo sapiens
cctaataaaccaagc

SEQ ID NO: 691775 - DNA, 15 bp, Homo sapiens
ctaataaaccaagct

SEQ ID NO: 691776 - DNA, 15 bp, Homo sapiens
taataaaccaagctc

SEQ ID NO: 691777 - DNA, 15 bp, Homo sapiens
aataaaccaagctcc

SEQ ID NO: 691778 - DNA, 15 bp, Homo sapiens
ataaaccaagctccc

SEQ ID NO: 691779 - DNA, 15 bp, Homo sapiens
taaaccaagctccca

SEQ ID NO: 691780 - DNA, 15 bp, Homo sapiens
aaaccaagctcccat

SEQ ID NO: 691781 - DNA, 15 bp, Homo sapiens
aaccaagctcccatt

SEQ ID NO: 691782 - DNA, 15 bp, Homo sapiens
accaagctcccattc

SEQ ID NO: 691783 - DNA, 15 bp, Homo sapiens
ccaagctcccattcc

SEQ ID NO: 691784 - DNA, 15 bp, Homo sapiens
caagctcccattcct

SEQ ID NO: 691785 - DNA, 15 bp, Homo sapiens
aagctcccattcctc

SEQ ID NO: 691786 - DNA, 15 bp, Homo sapiens
agctcccattcctca

SEQ ID NO: 691787 - DNA, 15 bp, Homo sapiens
gctcccattcctcag

SEQ ID NO: 691788 - DNA, 15 bp, Homo sapiens
ctcccattcctcagc

SEQ ID NO: 691789 - DNA, 15 bp, Homo sapiens
tcccattcctcagcc

SEQ ID NO: 691790 - DNA, 15 bp, Homo sapiens
cccattcctcagcct

SEQ ID NO: 691791 - DNA, 15 bp, Homo sapiens
ccattcctcagcctg

SEQ ID NO: 691792 - DNA, 15 bp, Homo sapiens
cattcctcagcctgc

SEQ ID NO: 691793 - DNA, 15 bp, Homo sapiens
attcctcagcctgcc

SEQ ID NO: 691794 - DNA, 15 bp, Homo sapiens
ttcctcagcctgcca

SEQ ID NO: 691795 - DNA, 15 bp, Homo sapiens
tcctcagcctgccac

SEQ ID NO: 691796 - DNA, 15 bp, Homo sapiens
cctcagcctgccaca

SEQ ID NO: 691797 - DNA, 15 bp, Homo sapiens
ctcagcctgccacaa

SEQ ID NO: 691798 - DNA, 15 bp, Homo sapiens
tcagcctgccacaaa

SEQ ID NO: 691799 - DNA, 15 bp, Homo sapiens
cagcctgccacaaag

SEQ ID NO: 691800 - DNA, 15 bp, Homo sapiens
agcctgccacaaagg

SEQ ID NO: 691801 - DNA, 15 bp, Homo sapiens
gcctgccacaaaggc

SEQ ID NO: 691802 - DNA, 15 bp, Homo sapiens
cctgccacaaaggct

SEQ ID NO: 691803 - DNA, 15 bp, Homo sapiens
ctgccacaaaggctc

SEQ ID NO: 691804 - DNA, 15 bp, Homo sapiens
tgccacaaaggctct

SEQ ID NO: 691805 - DNA, 15 bp, Homo sapiens
gccacaaaggctctc

SEQ ID NO: 691806 - DNA, 15 bp, Homo sapiens
ccacaaaggctctct

SEQ ID NO: 691807 - DNA, 15 bp, Homo sapiens
cacaaaggctctcta

SEQ ID NO: 691808 - DNA, 15 bp, Homo sapiens
acaaaggctctctat

SEQ ID NO: 691809 - DNA, 15 bp, Homo sapiens
caaaggctctctatg

SEQ ID NO: 691810 - DNA, 15 bp, Homo sapiens
aaaggctctctatga

SEQ ID NO: 691811 - DNA, 15 bp, Homo sapiens
aaggctctctatgat

SEQ ID NO: 691812 - DNA, 15 bp, Homo sapiens
aggctctctatgatc

SEQ ID NO: 691813 - DNA, 15 bp, Homo sapiens
ggctctctatgatct

SEQ ID NO: 691814 - DNA, 15 bp, Homo sapiens
gctctctatgatctt

SEQ ID NO: 691815 - DNA, 15 bp, Homo sapiens
ctctctatgatcttt

SEQ ID NO: 691816 - DNA, 15 bp, Homo sapiens
tctctatgatctttc

SEQ ID NO: 691817 - DNA, 15 bp, Homo sapiens
ctctatgatctttct

SEQ ID NO: 691818 - DNA, 15 bp, Homo sapiens
tctatgatctttcta

SEQ ID NO: 691819 - DNA, 15 bp, Homo sapiens
ctatgatctttctag

SEQ ID NO: 691820 - DNA, 15 bp, Homo sapiens
tatgatctttctagc

SEQ ID NO: 691821 - DNA, 15 bp, Homo sapiens
atgatctttctagct

SEQ ID NO: 691822 - DNA, 15 bp, Homo sapiens
tgatctttctagctt

SEQ ID NO: 691823 - DNA, 15 bp, Homo sapiens
gatctttctagcttt

SEQ ID NO: 691824 - DNA, 15 bp, Homo sapiens
atctttctagctttt

SEQ ID NO: 691825 - DNA, 15 bp, Homo sapiens
tctttctagcttttc

SEQ ID NO: 691826 - DNA, 15 bp, Homo sapiens
ctttctagcttttct

SEQ ID NO: 691827 - DNA, 15 bp, Homo sapiens
tttctagcttttctc

SEQ ID NO: 691828 - DNA, 15 bp, Homo sapiens
ttctagcttttctca

SEQ ID NO: 691829 - DNA, 15 bp, Homo sapiens
tctagcttttctcat

SEQ ID NO: 691830 - DNA, 15 bp, Homo sapiens
ctagcttttctcatc

SEQ ID NO: 691831 - DNA, 15 bp, Homo sapiens
tagcttttctcatca

SEQ ID NO: 691832 - DNA, 15 bp, Homo sapiens
agcttttctcatcac

SEQ ID NO: 691833 - DNA, 15 bp, Homo sapiens
gcttttctcatcacc

SEQ ID NO: 691834 - DNA, 15 bp, Homo sapiens
cttttctcatcacca

SEQ ID NO: 691835 - DNA, 15 bp, Homo sapiens
ttttctcatcaccac

SEQ ID NO: 691836 - DNA, 15 bp, Homo sapiens
tttctcatcaccact

SEQ ID NO: 691837 - DNA, 15 bp, Homo sapiens
ttctcatcaccactg

SEQ ID NO: 691838 - DNA, 15 bp, Homo sapiens
tctcatcaccactga

SEQ ID NO: 691839 - DNA, 15 bp, Homo sapiens
ctcatcaccactgag

SEQ ID NO: 691840 - DNA, 15 bp, Homo sapiens
tcatcaccactgagg

SEQ ID NO: 691841 - DNA, 15 bp, Homo sapiens
catcaccactgaggc

SEQ ID NO: 691842 - DNA, 15 bp, Homo sapiens
atcaccactgaggcc

SEQ ID NO: 691843 - DNA, 15 bp, Homo sapiens
tcaccactgaggccc

SEQ ID NO: 691844 - DNA, 15 bp, Homo sapiens
caccactgaggccca

SEQ ID NO: 691845 - DNA, 15 bp, Homo sapiens
accactgaggcccac

SEQ ID NO: 691846 - DNA, 15 bp, Homo sapiens
ccactgaggcccact

SEQ ID NO: 691847 - DNA, 15 bp, Homo sapiens
cactgaggcccactt

SEQ ID NO: 691848 - DNA, 15 bp, Homo sapiens
actgaggcccacttc

SEQ ID NO: 691849 - DNA, 15 bp, Homo sapiens
ctgaggcccacttcc

SEQ ID NO: 691850 - DNA, 15 bp, Homo sapiens
tgaggcccacttcca

SEQ ID NO: 691851 - DNA, 15 bp, Homo sapiens
gaggcccacttccaa

SEQ ID NO: 691852 - DNA, 15 bp, Homo sapiens
aggcccacttccaat

SEQ ID NO: 691853 - DNA, 15 bp, Homo sapiens
ggcccacttccaatt

SEQ ID NO: 691854 - DNA, 15 bp, Homo sapiens
gcccacttccaattc

SEQ ID NO: 691855 - DNA, 15 bp, Homo sapiens
cccacttccaattct

SEQ ID NO: 691856 - DNA, 15 bp, Homo sapiens
ccacttccaattctg

SEQ ID NO: 691857 - DNA, 15 bp, Homo sapiens
cacttccaattctgc

SEQ ID NO: 691858 - DNA, 15 bp, Homo sapiens
acttccaattctgcc

SEQ ID NO: 691859 - DNA, 15 bp, Homo sapiens
cttccaattctgcca

SEQ ID NO: 691860 - DNA, 15 bp, Homo sapiens
ttccaattctgccag

SEQ ID NO: 691861 - DNA, 15 bp, Homo sapiens
tccaattctgccagg

SEQ ID NO: 691862 - DNA, 15 bp, Homo sapiens
ccaattctgccaggt

SEQ ID NO: 691863 - DNA, 15 bp, Homo sapiens
caattctgccaggtc

SEQ ID NO: 691864 - DNA, 15 bp, Homo sapiens
aattctgccaggtcc

SEQ ID NO: 691865 - DNA, 15 bp, Homo sapiens
attctgccaggtccc

SEQ ID NO: 691866 - DNA, 15 bp, Homo sapiens
ttctgccaggtcccc

SEQ ID NO: 691867 - DNA, 15 bp, Homo sapiens
tctgccaggtcccct

SEQ ID NO: 691868 - DNA, 15 bp, Homo sapiens
ctgccaggtcccctt

SEQ ID NO: 691869 - DNA, 15 bp, Homo sapiens
tgccaggtccccttt

SEQ ID NO: 691870 - DNA, 15 bp, Homo sapiens
gccaggtcccctttc

SEQ ID NO: 691871 - DNA, 15 bp, Homo sapiens
ccaggtcccctttca

SEQ ID NO: 691872 - DNA, 15 bp, Homo sapiens
caggtcccctttcag

SEQ ID NO: 691873 - DNA, 15 bp, Homo sapiens
aggtcccctttcagt

SEQ ID NO: 691874 - DNA, 15 bp, Homo sapiens
ggtcccctttcagtt

SEQ ID NO: 691875 - DNA, 15 bp, Homo sapiens
gtcccctttcagttg

SEQ ID NO: 691876 - DNA, 15 bp, Homo sapiens
tcccctttcagttgt

SEQ ID NO: 691877 - DNA, 15 bp, Homo sapiens
cccctttcagttgtc

SEQ ID NO: 691878 - DNA, 15 bp, Homo sapiens
ccctttcagttgtct

SEQ ID NO: 691879 - DNA, 15 bp, Homo sapiens
cctttcagttgtctc

SEQ ID NO: 691880 - DNA, 15 bp, Homo sapiens
ctttcagttgtctct

SEQ ID NO: 691881 - DNA, 15 bp, Homo sapiens
tttcagttgtctctc

SEQ ID NO: 691882 - DNA, 15 bp, Homo sapiens
ttcagttgtctctcc

SEQ ID NO: 691883 - DNA, 15 bp, Homo sapiens
tcagttgtctctccc

SEQ ID NO: 691884 - DNA, 15 bp, Homo sapiens
cagttgtctctccct

SEQ ID NO: 691885 - DNA, 15 bp, Homo sapiens
agttgtctctccctt

SEQ ID NO: 691886 - DNA, 15 bp, Homo sapiens
gttgtctctcccttc

SEQ ID NO: 691887 - DNA, 15 bp, Homo sapiens
ttgtctctcccttct

SEQ ID NO: 691888 - DNA, 15 bp, Homo sapiens
tgtctctcccttctc

SEQ ID NO: 691889 - DNA, 15 bp, Homo sapiens
gtctctcccttctct

SEQ ID NO: 691890 - DNA, 15 bp, Homo sapiens
tctctcccttctcta

SEQ ID NO: 691891 - DNA, 15 bp, Homo sapiens
ctctcccttctctaa

SEQ ID NO: 691892 - DNA, 15 bp, Homo sapiens
tctcccttctctaac

SEQ ID NO: 691893 - DNA, 15 bp, Homo sapiens
ctcccttctctaaca

SEQ ID NO: 691894 - DNA, 15 bp, Homo sapiens
tcccttctctaacag

SEQ ID NO: 691895 - DNA, 15 bp, Homo sapiens
cccttctctaacagc

SEQ ID NO: 691896 - DNA, 15 bp, Homo sapiens
ccttctctaacagcc

SEQ ID NO: 691897 - DNA, 15 bp, Homo sapiens
cttctctaacagcca

SEQ ID NO: 691898 - DNA, 15 bp, Homo sapiens
ttctctaacagccag

SEQ ID NO: 691899 - DNA, 15 bp, Homo sapiens
tctctaacagccaga

SEQ ID NO: 691900 - DNA, 15 bp, Homo sapiens
ctctaacagccagat

SEQ ID NO: 691901 - DNA, 15 bp, Homo sapiens
tctaacagccagata

SEQ ID NO: 691902 - DNA, 15 bp, Homo sapiens
ctaacagccagataa

SEQ ID NO: 691903 - DNA, 15 bp, Homo sapiens
taacagccagataac

SEQ ID NO: 691904 - DNA, 15 bp, Homo sapiens
aacagccagataact

SEQ ID NO: 691905 - DNA, 15 bp, Homo sapiens
acagccagataactc

SEQ ID NO: 691906 - DNA, 15 bp, Homo sapiens
cagccagataactct

SEQ ID NO: 691907 - DNA, 15 bp, Homo sapiens
agccagataactctc

SEQ ID NO: 691908 - DNA, 15 bp, Homo sapiens
gccagataactctct

SEQ ID NO: 691909 - DNA, 15 bp, Homo sapiens
ccagataactctctt

SEQ ID NO: 691910 - DNA, 15 bp, Homo sapiens
cagataactctcttt

SEQ ID NO: 691911 - DNA, 15 bp, Homo sapiens
agataactctctttg

SEQ ID NO: 691912 - DNA, 15 bp, Homo sapiens
gataactctctttga

SEQ ID NO: 691913 - DNA, 15 bp, Homo sapiens
ataactctctttgaa

SEQ ID NO: 691914 - DNA, 15 bp, Homo sapiens
taactctctttgaaa

SEQ ID NO: 691915 - DNA, 15 bp, Homo sapiens
aactctctttgaaag

SEQ ID NO: 691916 - DNA, 15 bp, Homo sapiens
actctctttgaaagt

SEQ ID NO: 691917 - DNA, 15 bp, Homo sapiens
ctctctttgaaagtg

SEQ ID NO: 691918 - DNA, 15 bp, Homo sapiens
tctctttgaaagtgg

SEQ ID NO: 691919 - DNA, 15 bp, Homo sapiens
ctctttgaaagtgga

SEQ ID NO: 691920 - DNA, 15 bp, Homo sapiens
tctttgaaagtggag

SEQ ID NO: 691921 - DNA, 15 bp, Homo sapiens
ctttgaaagtggagc

SEQ ID NO: 691922 - DNA, 15 bp, Homo sapiens
tttgaaagtggagca

SEQ ID NO: 691923 - DNA, 15 bp, Homo sapiens
ttgaaagtggagcag

SEQ ID NO: 691924 - DNA, 15 bp, Homo sapiens
tgaaagtggagcagg

SEQ ID NO: 691925 - DNA, 15 bp, Homo sapiens
gaaagtggagcagga

SEQ ID NO: 691926 - DNA, 15 bp, Homo sapiens
aaagtggagcaggaa

SEQ ID NO: 691927 - DNA, 15 bp, Homo sapiens
aagtggagcaggaac

SEQ ID NO: 691928 - DNA, 15 bp, Homo sapiens
agtggagcaggaacc

SEQ ID NO: 691929 - DNA, 15 bp, Homo sapiens
gtggagcaggaacca

SEQ ID NO: 691930 - DNA, 15 bp, Homo sapiens
tggagcaggaaccat

SEQ ID NO: 691931 - DNA, 15 bp, Homo sapiens
ggagcaggaaccatg

SEQ ID NO: 691932 - DNA, 15 bp, Homo sapiens
gagcaggaaccatgt

SEQ ID NO: 691933 - DNA, 15 bp, Homo sapiens
agcaggaaccatgtc

SEQ ID NO: 691934 - DNA, 15 bp, Homo sapiens
gcaggaaccatgtct

SEQ ID NO: 691935 - DNA, 15 bp, Homo sapiens
caggaaccatgtctt

SEQ ID NO: 691936 - DNA, 15 bp, Homo sapiens
aggaaccatgtctta

SEQ ID NO: 691937 - DNA, 15 bp, Homo sapiens
ggaaccatgtcttac

SEQ ID NO: 691938 - DNA, 15 bp, Homo sapiens
gaaccatgtcttacc

SEQ ID NO: 691939 - DNA, 15 bp, Homo sapiens
aaccatgtcttacct

SEQ ID NO: 691940 - DNA, 15 bp, Homo sapiens
accatgtcttacctt

SEQ ID NO: 691941 - DNA, 15 bp, Homo sapiens
ccatgtcttaccttt

SEQ ID NO: 691942 - DNA, 15 bp, Homo sapiens
catgtcttacctttt

SEQ ID NO: 691943 - DNA, 15 bp, Homo sapiens
atgtcttaccttttt

SEQ ID NO: 691944 - DNA, 15 bp, Homo sapiens
tgtcttacctttttt

SEQ ID NO: 691945 - DNA, 15 bp, Homo sapiens
gtcttaccttttttt

SEQ ID NO: 691946 - DNA, 15 bp, Homo sapiens
tcttacctttttttt

SEQ ID NO: 691947 - DNA, 15 bp, Homo sapiens
cttaccttttttttt

SEQ ID NO: 691948 - DNA, 15 bp, Homo sapiens
ttacctttttttttt

SEQ ID NO: 691949 - DNA, 15 bp, Homo sapiens
taccttttttttttt

SEQ ID NO: 691950 - DNA, 15 bp, Homo sapiens
cttttttttttttta

SEQ ID NO: 691951 - DNA, 15 bp, Homo sapiens
tttttttttttttaa

SEQ ID NO: 691952 - DNA, 15 bp, Homo sapiens
ttttttttttttaac

SEQ ID NO: 691953 - DNA, 15 bp, Homo sapiens
tttttttttttaacc

SEQ ID NO: 691954 - DNA, 15 bp, Homo sapiens
ttttttttttaaccc

SEQ ID NO: 691955 - DNA, 15 bp, Homo sapiens
tttttttttaacccc

SEQ ID NO: 691956 - DNA, 15 bp, Homo sapiens
ttttttttaaccccc

SEQ ID NO: 691957 - DNA, 15 bp, Homo sapiens
tttttttaaccccca

SEQ ID NO: 691958 - DNA, 15 bp, Homo sapiens
ttttttaacccccac

SEQ ID NO: 691959 - DNA, 15 bp, Homo sapiens
tttttaacccccaca

SEQ ID NO: 691960 - DNA, 15 bp, Homo sapiens
ttttaacccccacag

SEQ ID NO: 691961 - DNA, 15 bp, Homo sapiens
tttaacccccacagt

SEQ ID NO: 691962 - DNA, 15 bp, Homo sapiens
ttaacccccacagtg

SEQ ID NO: 691963 - DNA, 15 bp, Homo sapiens
taacccccacagtgc

SEQ ID NO: 691964 - DNA, 15 bp, Homo sapiens
aacccccacagtgcc

SEQ ID NO: 691965 - DNA, 15 bp, Homo sapiens
acccccacagtgcct

SEQ ID NO: 691966 - DNA, 15 bp, Homo sapiens
cccccacagtgccta

SEQ ID NO: 691967 - DNA, 15 bp, Homo sapiens
ccccacagtgcctat

SEQ ID NO: 691968 - DNA, 15 bp, Homo sapiens
cccacagtgcctatt

SEQ ID NO: 691969 - DNA, 15 bp, Homo sapiens
ccacagtgcctattt

SEQ ID NO: 691970 - DNA, 15 bp, Homo sapiens
cacagtgcctattta

SEQ ID NO: 691971 - DNA, 15 bp, Homo sapiens
acagtgcctatttac

SEQ ID NO: 691972 - DNA, 15 bp, Homo sapiens
cagtgcctatttaca

SEQ ID NO: 691973 - DNA, 15 bp, Homo sapiens
agtgcctatttacat

SEQ ID NO: 691974 - DNA, 15 bp, Homo sapiens
gtgcctatttacatt

SEQ ID NO: 691975 - DNA, 15 bp, Homo sapiens
tgcctatttacattt

SEQ ID NO: 691976 - DNA, 15 bp, Homo sapiens
gcctatttacatttt

SEQ ID NO: 691977 - DNA, 15 bp, Homo sapiens
cctatttacattttc

SEQ ID NO: 691978 - DNA, 15 bp, Homo sapiens
ctatttacattttca

SEQ ID NO: 691979 - DNA, 15 bp, Homo sapiens
tatttacattttcag

SEQ ID NO: 691980 - DNA, 15 bp, Homo sapiens
atttacattttcagc

SEQ ID NO: 691981 - DNA, 15 bp, Homo sapiens
tttacattttcagca

SEQ ID NO: 691982 - DNA, 15 bp, Homo sapiens
ttacattttcagcaa

SEQ ID NO: 691983 - DNA, 15 bp, Homo sapiens
tacattttcagcaaa

SEQ ID NO: 691984 - DNA, 15 bp, Homo sapiens
acattttcagcaaat

SEQ ID NO: 691985 - DNA, 15 bp, Homo sapiens
cattttcagcaaatg

SEQ ID NO: 691986 - DNA, 15 bp, Homo sapiens
attttcagcaaatgt

SEQ ID NO: 691987 - DNA, 15 bp, Homo sapiens
ttttcagcaaatgtt

SEQ ID NO: 691988 - DNA, 15 bp, Homo sapiens
tttcagcaaatgttt

SEQ ID NO: 691989 - DNA, 15 bp, Homo sapiens
ttcagcaaatgttta

SEQ ID NO: 691990 - DNA, 15 bp, Homo sapiens
tcagcaaatgtttaa

SEQ ID NO: 691991 - DNA, 15 bp, Homo sapiens
cagcaaatgtttaat

SEQ ID NO: 691992 - DNA, 15 bp, Homo sapiens
agcaaatgtttaatt

SEQ ID NO: 691993 - DNA, 15 bp, Homo sapiens
gcaaatgtttaattg

SEQ ID NO: 691994 - DNA, 15 bp, Homo sapiens
caaatgtttaattga

SEQ ID NO: 691995 - DNA, 15 bp, Homo sapiens
aaatgtttaattgat

SEQ ID NO: 691996 - DNA, 15 bp, Homo sapiens
aatgtttaattgatt

SEQ ID NO: 691997 - DNA, 15 bp, Homo sapiens
atgtttaattgattt

SEQ ID NO: 691998 - DNA, 15 bp, Homo sapiens
tgtttaattgatttt

SEQ ID NO: 691999 - DNA, 15 bp, Homo sapiens
gtttaattgattttt

SEQ ID NO: 692000 - DNA, 15 bp, Homo sapiens
tttaattgatttttg

SEQ ID NO: 692001 - DNA, 15 bp, Homo sapiens
ttaattgatttttga

SEQ ID NO: 692002 - DNA, 15 bp, Homo sapiens
taattgatttttgag

SEQ ID NO: 692003 - DNA, 15 bp, Homo sapiens
aattgatttttgagc

SEQ ID NO: 692004 - DNA, 15 bp, Homo sapiens
attgatttttgagca

SEQ ID NO: 692005 - DNA, 15 bp, Homo sapiens
ttgatttttgagcat

SEQ ID NO: 692006 - DNA, 15 bp, Homo sapiens
tgatttttgagcata

SEQ ID NO: 692007 - DNA, 15 bp, Homo sapiens
gatttttgagcataa

SEQ ID NO: 692008 - DNA, 15 bp, Homo sapiens
atttttgagcataaa

SEQ ID NO: 692009 - DNA, 15 bp, Homo sapiens
tttttgagcataaaa

SEQ ID NO: 692010 - DNA, 15 bp, Homo sapiens
ttttgagcataaaag

SEQ ID NO: 692011 - DNA, 15 bp, Homo sapiens
tttgagcataaaaga

SEQ ID NO: 692012 - DNA, 15 bp, Homo sapiens
ttgagcataaaagat

SEQ ID NO: 692013 - DNA, 15 bp, Homo sapiens
tgagcataaaagatg

SEQ ID NO: 692014 - DNA, 15 bp, Homo sapiens
gagcataaaagatga

SEQ ID NO: 692015 - DNA, 15 bp, Homo sapiens
agcataaaagatgaa

SEQ ID NO: 692016 - DNA, 15 bp, Homo sapiens
gcataaaagatgaaa

SEQ ID NO: 692017 - DNA, 15 bp, Homo sapiens
cataaaagatgaaaa

SEQ ID NO: 692018 - DNA, 15 bp, Homo sapiens
ataaaagatgaaaac

SEQ ID NO: 692019 - DNA, 15 bp, Homo sapiens
taaaagatgaaaaca

SEQ ID NO: 692020 - DNA, 15 bp, Homo sapiens
aaaagatgaaaacaa

SEQ ID NO: 692021 - DNA, 15 bp, Homo sapiens
aaagatgaaaacaaa

SEQ ID NO: 692022 - DNA, 15 bp, Homo sapiens
aagatgaaaacaaag

SEQ ID NO: 692023 - DNA, 15 bp, Homo sapiens
agatgaaaacaaagt

SEQ ID NO: 692024 - DNA, 15 bp, Homo sapiens
gatgaaaacaaagtt

SEQ ID NO: 692025 - DNA, 15 bp, Homo sapiens
atgaaaacaaagtta

SEQ ID NO: 692026 - DNA, 15 bp, Homo sapiens
tgaaaacaaagttat

SEQ ID NO: 692027 - DNA, 15 bp, Homo sapiens
gaaaacaaagttatc

SEQ ID NO: 692028 - DNA, 15 bp, Homo sapiens
aaaacaaagttatca

SEQ ID NO: 692029 - DNA, 15 bp, Homo sapiens
aaacaaagttatcat

SEQ ID NO: 692030 - DNA, 15 bp, Homo sapiens
aacaaagttatcata

SEQ ID NO: 692031 - DNA, 15 bp, Homo sapiens
acaaagttatcataa

SEQ ID NO: 692032 - DNA, 15 bp, Homo sapiens
caaagttatcataat

SEQ ID NO: 692033 - DNA, 15 bp, Homo sapiens
aaagttatcataata

SEQ ID NO: 692034 - DNA, 15 bp, Homo sapiens
aagttatcataataa

SEQ ID NO: 692035 - DNA, 15 bp, Homo sapiens
agttatcataataag

SEQ ID NO: 692036 - DNA, 15 bp, Homo sapiens
gttatcataataagc

SEQ ID NO: 692037 - DNA, 15 bp, Homo sapiens
ttatcataataagcc

SEQ ID NO: 692038 - DNA, 15 bp, Homo sapiens
tatcataataagccc

SEQ ID NO: 692039 - DNA, 15 bp, Homo sapiens
atcataataagccct

SEQ ID NO: 692040 - DNA, 15 bp, Homo sapiens
tcataataagccctt

SEQ ID NO: 692041 - DNA, 15 bp, Homo sapiens
cataataagcccttt

SEQ ID NO: 692042 - DNA, 15 bp, Homo sapiens
ataataagccctttg

SEQ ID NO: 692043 - DNA, 15 bp, Homo sapiens
taataagccctttga

SEQ ID NO: 692044 - DNA, 15 bp, Homo sapiens
aataagccctttgac

SEQ ID NO: 692045 - DNA, 15 bp, Homo sapiens
ataagccctttgaca

SEQ ID NO: 692046 - DNA, 15 bp, Homo sapiens
taagccctttgacac

SEQ ID NO: 692047 - DNA, 15 bp, Homo sapiens
aagccctttgacaca

SEQ ID NO: 692048 - DNA, 15 bp, Homo sapiens
agccctttgacacat

SEQ ID NO: 692049 - DNA, 15 bp, Homo sapiens
gccctttgacacatt

SEQ ID NO: 692050 - DNA, 15 bp, Homo sapiens
ccctttgacacattt

SEQ ID NO: 692051 - DNA, 15 bp, Homo sapiens
cctttgacacatttc

SEQ ID NO: 692052 - DNA, 15 bp, Homo sapiens
ctttgacacatttcc

SEQ ID NO: 692053 - DNA, 15 bp, Homo sapiens
tttgacacatttcct

SEQ ID NO: 692054 - DNA, 15 bp, Homo sapiens
ttgacacatttccta

SEQ ID NO: 692055 - DNA, 15 bp, Homo sapiens
tgacacatttcctat

SEQ ID NO: 692056 - DNA, 15 bp, Homo sapiens
gacacatttcctata

SEQ ID NO: 692057 - DNA, 15 bp, Homo sapiens
acacatttcctataa

SEQ ID NO: 692058 - DNA, 15 bp, Homo sapiens
cacatttcctataac

SEQ ID NO: 692059 - DNA, 15 bp, Homo sapiens
acatttcctataact

SEQ ID NO: 692060 - DNA, 15 bp, Homo sapiens
catttcctataactg

SEQ ID NO: 692061 - DNA, 15 bp, Homo sapiens
atttcctataactgt

SEQ ID NO: 692062 - DNA, 15 bp, Homo sapiens
tttcctataactgtt

SEQ ID NO: 692063 - DNA, 15 bp, Homo sapiens
ttcctataactgtta

SEQ ID NO: 692064 - DNA, 15 bp, Homo sapiens
tcctataactgttag

SEQ ID NO: 692065 - DNA, 15 bp, Homo sapiens
cctataactgttaga

SEQ ID NO: 692066 - DNA, 15 bp, Homo sapiens
ctataactgttagac

SEQ ID NO: 692067 - DNA, 15 bp, Homo sapiens
tataactgttagaca

SEQ ID NO: 692068 - DNA, 15 bp, Homo sapiens
ataactgttagacag

SEQ ID NO: 692069 - DNA, 15 bp, Homo sapiens
taactgttagacagt

SEQ ID NO: 692070 - DNA, 15 bp, Homo sapiens
aactgttagacagtg

SEQ ID NO: 692071 - DNA, 15 bp, Homo sapiens
actgttagacagtgc

SEQ ID NO: 692072 - DNA, 15 bp, Homo sapiens
ctgttagacagtgct

SEQ ID NO: 692073 - DNA, 15 bp, Homo sapiens
tgttagacagtgcta

SEQ ID NO: 692074 - DNA, 15 bp, Homo sapiens
gttagacagtgctaa

SEQ ID NO: 692075 - DNA, 15 bp, Homo sapiens
ttagacagtgctaaa

SEQ ID NO: 692076 - DNA, 15 bp, Homo sapiens
tagacagtgctaaaa

SEQ ID NO: 692077 - DNA, 15 bp, Homo sapiens
agacagtgctaaaag

SEQ ID NO: 692078 - DNA, 15 bp, Homo sapiens
gacagtgctaaaagt

SEQ ID NO: 692079 - DNA, 15 bp, Homo sapiens
acagtgctaaaagtc

SEQ ID NO: 692080 - DNA, 15 bp, Homo sapiens
cagtgctaaaagtct

SEQ ID NO: 692081 - DNA, 15 bp, Homo sapiens
agtgctaaaagtctt

SEQ ID NO: 692082 - DNA, 15 bp, Homo sapiens
gtgctaaaagtcttg

SEQ ID NO: 692083 - DNA, 15 bp, Homo sapiens
tgctaaaagtcttgc

SEQ ID NO: 692084 - DNA, 15 bp, Homo sapiens
gctaaaagtcttgct

SEQ ID NO: 692085 - DNA, 15 bp, Homo sapiens
ctaaaagtcttgctt

SEQ ID NO: 692086 - DNA, 15 bp, Homo sapiens
taaaagtcttgcttt

SEQ ID NO: 692087 - DNA, 15 bp, Homo sapiens
aaaagtcttgctttt

SEQ ID NO: 692088 - DNA, 15 bp, Homo sapiens
aaagtcttgctttta

SEQ ID NO: 692089 - DNA, 15 bp, Homo sapiens
aagtcttgcttttaa

SEQ ID NO: 692090 - DNA, 15 bp, Homo sapiens
agtcttgcttttaaa

SEQ ID NO: 692091 - DNA, 15 bp, Homo sapiens
gtcttgcttttaaaa

SEQ ID NO: 692092 - DNA, 15 bp, Homo sapiens
tcttgcttttaaaaa

SEQ ID NO: 692093 - DNA, 15 bp, Homo sapiens
cttgcttttaaaaaa

SEQ ID NO: 692094 - DNA, 15 bp, Homo sapiens
ttgcttttaaaaaaa

SEQ ID NO: 692095 - DNA, 15 bp, Homo sapiens
tgcttttaaaaaaat

SEQ ID NO: 692096 - DNA, 15 bp, Homo sapiens
gcttttaaaaaaatt

SEQ ID NO: 692097 - DNA, 15 bp, Homo sapiens
cttttaaaaaaatta

SEQ ID NO: 692098 - DNA, 15 bp, Homo sapiens
ttttaaaaaaattag

SEQ ID NO: 692099 - DNA, 15 bp, Homo sapiens
tttaaaaaaattaga

SEQ ID NO: 692100 - DNA, 15 bp, Homo sapiens
ttaaaaaaattagaa

SEQ ID NO: 692101 - DNA, 15 bp, Homo sapiens
taaaaaaattagaaa

SEQ ID NO: 692102 - DNA, 15 bp, Homo sapiens
aaaaaaattagaaat

SEQ ID NO: 692103 - DNA, 15 bp, Homo sapiens
aaaaaattagaaata

SEQ ID NO: 692104 - DNA, 15 bp, Homo sapiens
aaaaattagaaatat

SEQ ID NO: 692105 - DNA, 15 bp, Homo sapiens
aaaattagaaatatg

SEQ ID NO: 692106 - DNA, 15 bp, Homo sapiens
aaattagaaatatgt

SEQ ID NO: 692107 - DNA, 15 bp, Homo sapiens
aattagaaatatgta

SEQ ID NO: 692108 - DNA, 15 bp, Homo sapiens
attagaaatatgtac

SEQ ID NO: 692109 - DNA, 15 bp, Homo sapiens
ttagaaatatgtacc

SEQ ID NO: 692110 - DNA, 15 bp, Homo sapiens
tagaaatatgtacct

SEQ ID NO: 692111 - DNA, 15 bp, Homo sapiens
agaaatatgtacctt

SEQ ID NO: 692112 - DNA, 15 bp, Homo sapiens
gaaatatgtaccttt

SEQ ID NO: 692113 - DNA, 15 bp, Homo sapiens
aaatatgtacctttg

SEQ ID NO: 692114 - DNA, 15 bp, Homo sapiens
aatatgtacctttgg

SEQ ID NO: 692115 - DNA, 15 bp, Homo sapiens
atatgtacctttggt

SEQ ID NO: 692116 - DNA, 15 bp, Homo sapiens
tatgtacctttggtg

SEQ ID NO: 692117 - DNA, 15 bp, Homo sapiens
atgtacctttggtgg

SEQ ID NO: 692118 - DNA, 15 bp, Homo sapiens
tgtacctttggtgga

SEQ ID NO: 692119 - DNA, 15 bp, Homo sapiens
gtacctttggtggaa

SEQ ID NO: 692120 - DNA, 15 bp, Homo sapiens
tacctttggtggaaa

SEQ ID NO: 692121 - DNA, 15 bp, Homo sapiens
acctttggtggaaag

SEQ ID NO: 692122 - DNA, 15 bp, Homo sapiens
cctttggtggaaaga

SEQ ID NO: 692123 - DNA, 15 bp, Homo sapiens
ctttggtggaaagag

SEQ ID NO: 692124 - DNA, 15 bp, Homo sapiens
tttggtggaaagagc

SEQ ID NO: 692125 - DNA, 15 bp, Homo sapiens
ttggtggaaagagct

SEQ ID NO: 692126 - DNA, 15 bp, Homo sapiens
tggtggaaagagctt

SEQ ID NO: 692127 - DNA, 15 bp, Homo sapiens
ggtggaaagagcttt

SEQ ID NO: 692128 - DNA, 15 bp, Homo sapiens
gtggaaagagctttt

SEQ ID NO: 692129 - DNA, 15 bp, Homo sapiens
tggaaagagcttttc

SEQ ID NO: 692130 - DNA, 15 bp, Homo sapiens
ggaaagagcttttca

SEQ ID NO: 692131 - DNA, 15 bp, Homo sapiens
gaaagagcttttcat

SEQ ID NO: 692132 - DNA, 15 bp, Homo sapiens
aaagagcttttcata

SEQ ID NO: 692133 - DNA, 15 bp, Homo sapiens
aagagcttttcatac

SEQ ID NO: 692134 - DNA, 15 bp, Homo sapiens
agagcttttcataca

SEQ ID NO: 692135 - DNA, 15 bp, Homo sapiens
gagcttttcatacac

SEQ ID NO: 692136 - DNA, 15 bp, Homo sapiens
agcttttcatacact

SEQ ID NO: 692137 - DNA, 15 bp, Homo sapiens
gcttttcatacactt

SEQ ID NO: 692138 - DNA, 15 bp, Homo sapiens
cttttcatacacttt

SEQ ID NO: 692139 - DNA, 15 bp, Homo sapiens
ttttcatacactttt

SEQ ID NO: 692140 - DNA, 15 bp, Homo sapiens
tttcatacacttttt

SEQ ID NO: 692141 - DNA, 15 bp, Homo sapiens
ttcatacactttttt

SEQ ID NO: 692142 - DNA, 15 bp, Homo sapiens
tcatacacttttttc

SEQ ID NO: 692143 - DNA, 15 bp, Homo sapiens
catacacttttttcc

SEQ ID NO: 692144 - DNA, 15 bp, Homo sapiens
atacacttttttcca

SEQ ID NO: 692145 - DNA, 15 bp, Homo sapiens
tacacttttttccac

SEQ ID NO: 692146 - DNA, 15 bp, Homo sapiens
acacttttttccaca

SEQ ID NO: 692147 - DNA, 15 bp, Homo sapiens
cacttttttccacaa

SEQ ID NO: 692148 - DNA, 15 bp, Homo sapiens
acttttttccacaac

SEQ ID NO: 692149 - DNA, 15 bp, Homo sapiens
cttttttccacaact

SEQ ID NO: 692150 - DNA, 15 bp, Homo sapiens
ttttttccacaactc

SEQ ID NO: 692151 - DNA, 15 bp, Homo sapiens
tttttccacaactcc

SEQ ID NO: 692152 - DNA, 15 bp, Homo sapiens
ttttccacaactcca

SEQ ID NO: 692153 - DNA, 15 bp, Homo sapiens
tttccacaactccat

SEQ ID NO: 692154 - DNA, 15 bp, Homo sapiens
ttccacaactccata

SEQ ID NO: 692155 - DNA, 15 bp, Homo sapiens
tccacaactccatag

SEQ ID NO: 692156 - DNA, 15 bp, Homo sapiens
ccacaactccatagg

SEQ ID NO: 692157 - DNA, 15 bp, Homo sapiens
cacaactccataggt

SEQ ID NO: 692158 - DNA, 15 bp, Homo sapiens
acaactccataggtg

SEQ ID NO: 692159 - DNA, 15 bp, Homo sapiens
caactccataggtga

SEQ ID NO: 692160 - DNA, 15 bp, Homo sapiens
aactccataggtgag

SEQ ID NO: 692161 - DNA, 15 bp, Homo sapiens
actccataggtgagt

SEQ ID NO: 692162 - DNA, 15 bp, Homo sapiens
ctccataggtgagtg

SEQ ID NO: 692163 - DNA, 15 bp, Homo sapiens
tccataggtgagtgg

SEQ ID NO: 692164 - DNA, 15 bp, Homo sapiens
ccataggtgagtggg

SEQ ID NO: 692165 - DNA, 15 bp, Homo sapiens
cataggtgagtgggc

SEQ ID NO: 692166 - DNA, 15 bp, Homo sapiens
ataggtgagtgggca

SEQ ID NO: 692167 - DNA, 15 bp, Homo sapiens
taggtgagtgggcat

SEQ ID NO: 692168 - DNA, 15 bp, Homo sapiens
aggtgagtgggcatg

SEQ ID NO: 692169 - DNA, 15 bp, Homo sapiens
ggtgagtgggcatga

SEQ ID NO: 692170 - DNA, 15 bp, Homo sapiens
gtgagtgggcatgaa

SEQ ID NO: 692171 - DNA, 15 bp, Homo sapiens
tgagtgggcatgaag

SEQ ID NO: 692172 - DNA, 15 bp, Homo sapiens
gagtgggcatgaagc

SEQ ID NO: 692173 - DNA, 15 bp, Homo sapiens
agtgggcatgaagct

SEQ ID NO: 692174 - DNA, 15 bp, Homo sapiens
gtgggcatgaagctt

SEQ ID NO: 692175 - DNA, 15 bp, Homo sapiens
tgggcatgaagcttt

SEQ ID NO: 692176 - DNA, 15 bp, Homo sapiens
gggcatgaagctttc

SEQ ID NO: 692177 - DNA, 15 bp, Homo sapiens
ggcatgaagctttcc

SEQ ID NO: 692178 - DNA, 15 bp, Homo sapiens
gcatgaagctttcca

SEQ ID NO: 692179 - DNA, 15 bp, Homo sapiens
catgaagctttccaa

SEQ ID NO: 692180 - DNA, 15 bp, Homo sapiens
atgaagctttccaat

SEQ ID NO: 692181 - DNA, 15 bp, Homo sapiens
tgaagctttccaatg

SEQ ID NO: 692182 - DNA, 15 bp, Homo sapiens
gaagctttccaatgt

SEQ ID NO: 692183 - DNA, 15 bp, Homo sapiens
aagctttccaatgtc

SEQ ID NO: 692184 - DNA, 15 bp, Homo sapiens
agctttccaatgtca

SEQ ID NO: 692185 - DNA, 15 bp, Homo sapiens
gctttccaatgtcat

SEQ ID NO: 692186 - DNA, 15 bp, Homo sapiens
ctttccaatgtcatt

SEQ ID NO: 692187 - DNA, 15 bp, Homo sapiens
tttccaatgtcattt

SEQ ID NO: 692188 - DNA, 15 bp, Homo sapiens
ttccaatgtcatttt

SEQ ID NO: 692189 - DNA, 15 bp, Homo sapiens
tccaatgtcattttc

SEQ ID NO: 692190 - DNA, 15 bp, Homo sapiens
ccaatgtcattttca

SEQ ID NO: 692191 - DNA, 15 bp, Homo sapiens
caatgtcattttcag

SEQ ID NO: 692192 - DNA, 15 bp, Homo sapiens
aatgtcattttcagg

SEQ ID NO: 692193 - DNA, 15 bp, Homo sapiens
atgtcattttcagga

SEQ ID NO: 692194 - DNA, 15 bp, Homo sapiens
tgtcattttcaggaa

SEQ ID NO: 692195 - DNA, 15 bp, Homo sapiens
gtcattttcaggaac

SEQ ID NO: 692196 - DNA, 15 bp, Homo sapiens
tcattttcaggaaca

SEQ ID NO: 692197 - DNA, 15 bp, Homo sapiens
cattttcaggaacag

SEQ ID NO: 692198 - DNA, 15 bp, Homo sapiens
attttcaggaacagg

SEQ ID NO: 692199 - DNA, 15 bp, Homo sapiens
ttttcaggaacagga

SEQ ID NO: 692200 - DNA, 15 bp, Homo sapiens
tttcaggaacaggag

SEQ ID NO: 692201 - DNA, 15 bp, Homo sapiens
ttcaggaacaggagg

SEQ ID NO: 692202 - DNA, 15 bp, Homo sapiens
tcaggaacaggagga

SEQ ID NO: 692203 - DNA, 15 bp, Homo sapiens
caggaacaggaggag

SEQ ID NO: 692204 - DNA, 15 bp, Homo sapiens
aggaacaggaggaga

SEQ ID NO: 692205 - DNA, 15 bp, Homo sapiens
ggaacaggaggagat

SEQ ID NO: 692206 - DNA, 15 bp, Homo sapiens
gaacaggaggagatc

SEQ ID NO: 692207 - DNA, 15 bp, Homo sapiens
aacaggaggagatcc

SEQ ID NO: 692208 - DNA, 15 bp, Homo sapiens
acaggaggagatcct

SEQ ID NO: 692209 - DNA, 15 bp, Homo sapiens
caggaggagatccta

SEQ ID NO: 692210 - DNA, 15 bp, Homo sapiens
aggaggagatcctaa

SEQ ID NO: 692211 - DNA, 15 bp, Homo sapiens
ggaggagatcctaaa

SEQ ID NO: 692212 - DNA, 15 bp, Homo sapiens
gaggagatcctaaaa

SEQ ID NO: 692213 - DNA, 15 bp, Homo sapiens
aggagatcctaaaat

SEQ ID NO: 692214 - DNA, 15 bp, Homo sapiens
ggagatcctaaaata

SEQ ID NO: 692215 - DNA, 15 bp, Homo sapiens
gagatcctaaaatag

SEQ ID NO: 692216 - DNA, 15 bp, Homo sapiens
agatcctaaaatagc

SEQ ID NO: 692217 - DNA, 15 bp, Homo sapiens
gatcctaaaatagca

SEQ ID NO: 692218 - DNA, 15 bp, Homo sapiens
atcctaaaatagcaa

SEQ ID NO: 692219 - DNA, 15 bp, Homo sapiens
tcctaaaatagcaag

SEQ ID NO: 692220 - DNA, 15 bp, Homo sapiens
cctaaaatagcaagt

SEQ ID NO: 692221 - DNA, 15 bp, Homo sapiens
ctaaaatagcaagtt

SEQ ID NO: 692222 - DNA, 15 bp, Homo sapiens
taaaatagcaagttt

SEQ ID NO: 692223 - DNA, 15 bp, Homo sapiens
aaaatagcaagtttt

SEQ ID NO: 692224 - DNA, 15 bp, Homo sapiens
aaatagcaagtttta

SEQ ID NO: 692225 - DNA, 15 bp, Homo sapiens
aatagcaagttttac

SEQ ID NO: 692226 - DNA, 15 bp, Homo sapiens
atagcaagttttacc

SEQ ID NO: 692227 - DNA, 15 bp, Homo sapiens
tagcaagttttacca

SEQ ID NO: 692228 - DNA, 15 bp, Homo sapiens
agcaagttttaccac

SEQ ID NO: 692229 - DNA, 15 bp, Homo sapiens
gcaagttttaccaca

SEQ ID NO: 692230 - DNA, 15 bp, Homo sapiens
caagttttaccacaa

SEQ ID NO: 692231 - DNA, 15 bp, Homo sapiens
aagttttaccacaaa

SEQ ID NO: 692232 - DNA, 15 bp, Homo sapiens
agttttaccacaaat

SEQ ID NO: 692233 - DNA, 15 bp, Homo sapiens
gttttaccacaaatg

SEQ ID NO: 692234 - DNA, 15 bp, Homo sapiens
ttttaccacaaatga

SEQ ID NO: 692235 - DNA, 15 bp, Homo sapiens
tttaccacaaatgac

SEQ ID NO: 692236 - DNA, 15 bp, Homo sapiens
ttaccacaaatgact

SEQ ID NO: 692237 - DNA, 15 bp, Homo sapiens
taccacaaatgactg

SEQ ID NO: 692238 - DNA, 15 bp, Homo sapiens
accacaaatgactgc

SEQ ID NO: 692239 - DNA, 15 bp, Homo sapiens
ccacaaatgactgca

SEQ ID NO: 692240 - DNA, 15 bp, Homo sapiens
cacaaatgactgcaa

SEQ ID NO: 692241 - DNA, 15 bp, Homo sapiens
acaaatgactgcaat

SEQ ID NO: 692242 - DNA, 15 bp, Homo sapiens
caaatgactgcaatg

SEQ ID NO: 692243 - DNA, 15 bp, Homo sapiens
aaatgactgcaatga

SEQ ID NO: 692244 - DNA, 15 bp, Homo sapiens
aatgactgcaatgat

SEQ ID NO: 692245 - DNA, 15 bp, Homo sapiens
atgactgcaatgatt

SEQ ID NO: 692246 - DNA, 15 bp, Homo sapiens
tgactgcaatgatta

SEQ ID NO: 692247 - DNA, 15 bp, Homo sapiens
gactgcaatgattaa

SEQ ID NO: 692248 - DNA, 15 bp, Homo sapiens
actgcaatgattaaa

SEQ ID NO: 692249 - DNA, 15 bp, Homo sapiens
ctgcaatgattaaaa

SEQ ID NO: 692250 - DNA, 15 bp, Homo sapiens
tgcaatgattaaaat

SEQ ID NO: 692251 - DNA, 15 bp, Homo sapiens
gcaatgattaaaata

SEQ ID NO: 692252 - DNA, 15 bp, Homo sapiens
caatgattaaaatat

SEQ ID NO: 692253 - DNA, 15 bp, Homo sapiens
aatgattaaaatatt

SEQ ID NO: 692254 - DNA, 15 bp, Homo sapiens
atgattaaaatatta

SEQ ID NO: 692255 - DNA, 15 bp, Homo sapiens
tgattaaaatattac

SEQ ID NO: 692256 - DNA, 15 bp, Homo sapiens
gattaaaatattaca

SEQ ID NO: 692257 - DNA, 15 bp, Homo sapiens
attaaaatattacaa

SEQ ID NO: 692258 - DNA, 15 bp, Homo sapiens
ttaaaatattacaaa

SEQ ID NO: 692259 - DNA, 15 bp, Homo sapiens
taaaatattacaaac

SEQ ID NO: 692260 - DNA, 15 bp, Homo sapiens
aaaatattacaaact

SEQ ID NO: 692261 - DNA, 15 bp, Homo sapiens
aaatattacaaactc

SEQ ID NO: 692262 - DNA, 15 bp, Homo sapiens
aatattacaaactcc

SEQ ID NO: 692263 - DNA, 15 bp, Homo sapiens
atattacaaactcca

SEQ ID NO: 692264 - DNA, 15 bp, Homo sapiens
tattacaaactccac

SEQ ID NO: 692265 - DNA, 15 bp, Homo sapiens
attacaaactccacc

SEQ ID NO: 692266 - DNA, 15 bp, Homo sapiens
ttacaaactccacca

SEQ ID NO: 692267 - DNA, 15 bp, Homo sapiens
tacaaactccaccaa

SEQ ID NO: 692268 - DNA, 15 bp, Homo sapiens
acaaactccaccaat

SEQ ID NO: 692269 - DNA, 15 bp, Homo sapiens
caaactccaccaata

SEQ ID NO: 692270 - DNA, 15 bp, Homo sapiens
aaactccaccaataa

SEQ ID NO: 692271 - DNA, 15 bp, Homo sapiens
aactccaccaataaa

SEQ ID NO: 692272 - DNA, 15 bp, Homo sapiens
actccaccaataaaa

SEQ ID NO: 692273 - DNA, 15 bp, Homo sapiens
ctccaccaataaaag

SEQ ID NO: 692274 - DNA, 15 bp, Homo sapiens
tccaccaataaaaga

SEQ ID NO: 692275 - DNA, 15 bp, Homo sapiens
ccaccaataaaagaa

SEQ ID NO: 692276 - DNA, 15 bp, Homo sapiens
caccaataaaagaaa

SEQ ID NO: 692277 - DNA, 15 bp, Homo sapiens
accaataaaagaaat

SEQ ID NO: 692278 - DNA, 15 bp, Homo sapiens
ccaataaaagaaatg

SEQ ID NO: 692279 - DNA, 15 bp, Homo sapiens
caataaaagaaatga

SEQ ID NO: 692280 - DNA, 15 bp, Homo sapiens
aataaaagaaatgac

SEQ ID NO: 692281 - DNA, 15 bp, Homo sapiens
ataaaagaaatgaca

SEQ ID NO: 692282 - DNA, 15 bp, Homo sapiens
taaaagaaatgacac

SEQ ID NO: 692283 - DNA, 15 bp, Homo sapiens
aaaagaaatgacact

SEQ ID NO: 692284 - DNA, 15 bp, Homo sapiens
aaagaaatgacacta

SEQ ID NO: 692285 - DNA, 15 bp, Homo sapiens
aagaaatgacactaa

SEQ ID NO: 692286 - DNA, 15 bp, Homo sapiens
agaaatgacactaac

SEQ ID NO: 692287 - DNA, 15 bp, Homo sapiens
gaaatgacactaaca

SEQ ID NO: 692288 - DNA, 15 bp, Homo sapiens
aaatgacactaacaa

SEQ ID NO: 692289 - DNA, 15 bp, Homo sapiens
aatgacactaacaaa

SEQ ID NO: 692290 - DNA, 15 bp, Homo sapiens
atgacactaacaaag

SEQ ID NO: 692291 - DNA, 15 bp, Homo sapiens
tgacactaacaaagg

SEQ ID NO: 692292 - DNA, 15 bp, Homo sapiens
gacactaacaaaggt

SEQ ID NO: 692293 - DNA, 15 bp, Homo sapiens
acactaacaaaggta

SEQ ID NO: 692294 - DNA, 15 bp, Homo sapiens
cactaacaaaggtat

SEQ ID NO: 692295 - DNA, 15 bp, Homo sapiens
actaacaaaggtata

SEQ ID NO: 692296 - DNA, 15 bp, Homo sapiens
ctaacaaaggtatac

SEQ ID NO: 692297 - DNA, 15 bp, Homo sapiens
taacaaaggtataca

SEQ ID NO: 692298 - DNA, 15 bp, Homo sapiens
aacaaaggtatacat

SEQ ID NO: 692299 - DNA, 15 bp, Homo sapiens
acaaaggtatacatc

SEQ ID NO: 692300 - DNA, 15 bp, Homo sapiens
caaaggtatacatct

SEQ ID NO: 692301 - DNA, 15 bp, Homo sapiens
aaaggtatacatctc

SEQ ID NO: 692302 - DNA, 15 bp, Homo sapiens
aaggtatacatctcg

SEQ ID NO: 692303 - DNA, 15 bp, Homo sapiens
aggtatacatctcgg

SEQ ID NO: 692304 - DNA, 15 bp, Homo sapiens
ggtatacatctcgga

SEQ ID NO: 692305 - DNA, 15 bp, Homo sapiens
gtatacatctcggat

SEQ ID NO: 692306 - DNA, 15 bp, Homo sapiens
tatacatctcggatc

SEQ ID NO: 692307 - DNA, 15 bp, Homo sapiens
atacatctcggatca

SEQ ID NO: 692308 - DNA, 15 bp, Homo sapiens
tacatctcggatcac

SEQ ID NO: 692309 - DNA, 15 bp, Homo sapiens
acatctcggatcact

SEQ ID NO: 692310 - DNA, 15 bp, Homo sapiens
catctcggatcactc

SEQ ID NO: 692311 - DNA, 15 bp, Homo sapiens
atctcggatcactca

SEQ ID NO: 692312 - DNA, 15 bp, Homo sapiens
tctcggatcactcat

SEQ ID NO: 692313 - DNA, 15 bp, Homo sapiens
ctcggatcactcatt

SEQ ID NO: 692314 - DNA, 15 bp, Homo sapiens
tcggatcactcattt

SEQ ID NO: 692315 - DNA, 15 bp, Homo sapiens
cggatcactcatttt

SEQ ID NO: 692316 - DNA, 15 bp, Homo sapiens
ggatcactcattttc

SEQ ID NO: 692317 - DNA, 15 bp, Homo sapiens
gatcactcattttcc

SEQ ID NO: 692318 - DNA, 15 bp, Homo sapiens
atcactcattttccc

SEQ ID NO: 692319 - DNA, 15 bp, Homo sapiens
tcactcattttccct

SEQ ID NO: 692320 - DNA, 15 bp, Homo sapiens
cactcattttccctc

SEQ ID NO: 692321 - DNA, 15 bp, Homo sapiens
actcattttccctct

SEQ ID NO: 692322 - DNA, 15 bp, Homo sapiens
ctcattttccctctc

SEQ ID NO: 692323 - DNA, 15 bp, Homo sapiens
tcattttccctctcc

SEQ ID NO: 692324 - DNA, 15 bp, Homo sapiens
cattttccctctcct

SEQ ID NO: 692325 - DNA, 15 bp, Homo sapiens
attttccctctcctt

SEQ ID NO: 692326 - DNA, 15 bp, Homo sapiens
ttttccctctcctta

SEQ ID NO: 692327 - DNA, 15 bp, Homo sapiens
tttccctctccttaa

SEQ ID NO: 692328 - DNA, 15 bp, Homo sapiens
ttccctctccttaat

SEQ ID NO: 692329 - DNA, 15 bp, Homo sapiens
tccctctccttaata

SEQ ID NO: 692330 - DNA, 15 bp, Homo sapiens
ccctctccttaatat

SEQ ID NO: 692331 - DNA, 15 bp, Homo sapiens
cctctccttaatata

SEQ ID NO: 692332 - DNA, 15 bp, Homo sapiens
ctctccttaatatag

SEQ ID NO: 692333 - DNA, 15 bp, Homo sapiens
tctccttaatatagt

SEQ ID NO: 692334 - DNA, 15 bp, Homo sapiens
ctccttaatatagtc

SEQ ID NO: 692335 - DNA, 15 bp, Homo sapiens
tccttaatatagtca

SEQ ID NO: 692336 - DNA, 15 bp, Homo sapiens
ccttaatatagtcac

SEQ ID NO: 692337 - DNA, 15 bp, Homo sapiens
cttaatatagtcacc

SEQ ID NO: 692338 - DNA, 15 bp, Homo sapiens
ttaatatagtcacca

SEQ ID NO: 692339 - DNA, 15 bp, Homo sapiens
taatatagtcaccat

SEQ ID NO: 692340 - DNA, 15 bp, Homo sapiens
aatatagtcaccata

SEQ ID NO: 692341 - DNA, 15 bp, Homo sapiens
atatagtcaccataa

SEQ ID NO: 692342 - DNA, 15 bp, Homo sapiens
tatagtcaccataaa

SEQ ID NO: 692343 - DNA, 15 bp, Homo sapiens
atagtcaccataaaa

SEQ ID NO: 692344 - DNA, 15 bp, Homo sapiens
tagtcaccataaaaa

SEQ ID NO: 692345 - DNA, 15 bp, Homo sapiens
agtcaccataaaaat

SEQ ID NO: 692346 - DNA, 15 bp, Homo sapiens
gtcaccataaaaatt

SEQ ID NO: 692347 - DNA, 15 bp, Homo sapiens
tcaccataaaaattt

SEQ ID NO: 692348 - DNA, 15 bp, Homo sapiens
caccataaaaattta

SEQ ID NO: 692349 - DNA, 15 bp, Homo sapiens
accataaaaatttac

SEQ ID NO: 692350 - DNA, 15 bp, Homo sapiens
ccataaaaatttacc

SEQ ID NO: 692351 - DNA, 15 bp, Homo sapiens
cataaaaatttaccc

SEQ ID NO: 692352 - DNA, 15 bp, Homo sapiens
ataaaaatttaccct

SEQ ID NO: 692353 - DNA, 15 bp, Homo sapiens
taaaaatttacccta

SEQ ID NO: 692354 - DNA, 15 bp, Homo sapiens
aaaaatttaccctac

SEQ ID NO: 692355 - DNA, 15 bp, Homo sapiens
aaaatttaccctacc

SEQ ID NO: 692356 - DNA, 15 bp, Homo sapiens
aaatttaccctaccc

SEQ ID NO: 692357 - DNA, 15 bp, Homo sapiens
aatttaccctaccca

SEQ ID NO: 692358 - DNA, 15 bp, Homo sapiens
atttaccctacccag

SEQ ID NO: 692359 - DNA, 15 bp, Homo sapiens
tttaccctacccagc

SEQ ID NO: 692360 - DNA, 15 bp, Homo sapiens
ttaccctacccagca

SEQ ID NO: 692361 - DNA, 15 bp, Homo sapiens
taccctacccagcat

SEQ ID NO: 692362 - DNA, 15 bp, Homo sapiens
accctacccagcata

SEQ ID NO: 692363 - DNA, 15 bp, Homo sapiens
ccctacccagcatag

SEQ ID NO: 692364 - DNA, 15 bp, Homo sapiens
cctacccagcatagc

SEQ ID NO: 692365 - DNA, 15 bp, Homo sapiens
ctacccagcatagca

SEQ ID NO: 692366 - DNA, 15 bp, Homo sapiens
tacccagcatagcaa

SEQ ID NO: 692367 - DNA, 15 bp, Homo sapiens
acccagcatagcaag

SEQ ID NO: 692368 - DNA, 15 bp, Homo sapiens
cccagcatagcaagg

SEQ ID NO: 692369 - DNA, 15 bp, Homo sapiens
ccagcatagcaaggt

SEQ ID NO: 692370 - DNA, 15 bp, Homo sapiens
cagcatagcaaggtc

SEQ ID NO: 692371 - DNA, 15 bp, Homo sapiens
agcatagcaaggtca

SEQ ID NO: 692372 - DNA, 15 bp, Homo sapiens
gcatagcaaggtcac

SEQ ID NO: 692373 - DNA, 15 bp, Homo sapiens
catagcaaggtcact

SEQ ID NO: 692374 - DNA, 15 bp, Homo sapiens
atagcaaggtcactg

SEQ ID NO: 692375 - DNA, 15 bp, Homo sapiens
tagcaaggtcactgg

SEQ ID NO: 692376 - DNA, 15 bp, Homo sapiens
agcaaggtcactggg

SEQ ID NO: 692377 - DNA, 15 bp, Homo sapiens
gcaaggtcactggga

SEQ ID NO: 692378 - DNA, 15 bp, Homo sapiens
caaggtcactgggac

SEQ ID NO: 692379 - DNA, 15 bp, Homo sapiens
aaggtcactgggaca

SEQ ID NO: 692380 - DNA, 15 bp, Homo sapiens
aggtcactgggacag

SEQ ID NO: 692381 - DNA, 15 bp, Homo sapiens
ggtcactgggacaga

SEQ ID NO: 692382 - DNA, 15 bp, Homo sapiens
gtcactgggacagat

SEQ ID NO: 692383 - DNA, 15 bp, Homo sapiens
tcactgggacagatt

SEQ ID NO: 692384 - DNA, 15 bp, Homo sapiens
cactgggacagattc

SEQ ID NO: 692385 - DNA, 15 bp, Homo sapiens
actgggacagattct

SEQ ID NO: 692386 - DNA, 15 bp, Homo sapiens
ctgggacagattcta

SEQ ID NO: 692387 - DNA, 15 bp, Homo sapiens
tgggacagattctag

SEQ ID NO: 692388 - DNA, 15 bp, Homo sapiens
gggacagattctagt

SEQ ID NO: 692389 - DNA, 15 bp, Homo sapiens
ggacagattctagta

SEQ ID NO: 692390 - DNA, 15 bp, Homo sapiens
gacagattctagtac

SEQ ID NO: 692391 - DNA, 15 bp, Homo sapiens
acagattctagtact

SEQ ID NO: 692392 - DNA, 15 bp, Homo sapiens
cagattctagtactg

SEQ ID NO: 692393 - DNA, 15 bp, Homo sapiens
agattctagtactga

SEQ ID NO: 692394 - DNA, 15 bp, Homo sapiens
gattctagtactgaa

SEQ ID NO: 692395 - DNA, 15 bp, Homo sapiens
attctagtactgaaa

SEQ ID NO: 692396 - DNA, 15 bp, Homo sapiens
ttctagtactgaaag

SEQ ID NO: 692397 - DNA, 15 bp, Homo sapiens
tctagtactgaaaga

SEQ ID NO: 692398 - DNA, 15 bp, Homo sapiens
ctagtactgaaagaa

SEQ ID NO: 692399 - DNA, 15 bp, Homo sapiens
tagtactgaaagaag

SEQ ID NO: 692400 - DNA, 15 bp, Homo sapiens
agtactgaaagaaga

SEQ ID NO: 692401 - DNA, 15 bp, Homo sapiens
gtactgaaagaagag

SEQ ID NO: 692402 - DNA, 15 bp, Homo sapiens
tactgaaagaagagg

SEQ ID NO: 692403 - DNA, 15 bp, Homo sapiens
actgaaagaagagga

SEQ ID NO: 692404 - DNA, 15 bp, Homo sapiens
ctgaaagaagaggag

SEQ ID NO: 692405 - DNA, 15 bp, Homo sapiens
tgaaagaagaggagg

SEQ ID NO: 692406 - DNA, 15 bp, Homo sapiens
gaaagaagaggaggc

SEQ ID NO: 692407 - DNA, 15 bp, Homo sapiens
aaagaagaggaggca

SEQ ID NO: 692408 - DNA, 15 bp, Homo sapiens
aagaagaggaggcaa

SEQ ID NO: 692409 - DNA, 15 bp, Homo sapiens
agaagaggaggcaaa

SEQ ID NO: 692410 - DNA, 15 bp, Homo sapiens
gaagaggaggcaaag

SEQ ID NO: 692411 - DNA, 15 bp, Homo sapiens
aagaggaggcaaaga

SEQ ID NO: 692412 - DNA, 15 bp, Homo sapiens
agaggaggcaaagag

SEQ ID NO: 692413 - DNA, 15 bp, Homo sapiens
gaggaggcaaagagt

SEQ ID NO: 692414 - DNA, 15 bp, Homo sapiens
aggaggcaaagagta

SEQ ID NO: 692415 - DNA, 15 bp, Homo sapiens
ggaggcaaagagtaa

SEQ ID NO: 692416 - DNA, 15 bp, Homo sapiens
gaggcaaagagtaat

SEQ ID NO: 692417 - DNA, 15 bp, Homo sapiens
aggcaaagagtaatg

SEQ ID NO: 692418 - DNA, 15 bp, Homo sapiens
ggcaaagagtaatgg

SEQ ID NO: 692419 - DNA, 15 bp, Homo sapiens
gcaaagagtaatggg

SEQ ID NO: 692420 - DNA, 15 bp, Homo sapiens
caaagagtaatgggt

SEQ ID NO: 692421 - DNA, 15 bp, Homo sapiens
aaagagtaatgggta

SEQ ID NO: 692422 - DNA, 15 bp, Homo sapiens
aagagtaatgggtaa

SEQ ID NO: 692423 - DNA, 15 bp, Homo sapiens
agagtaatgggtaaa

SEQ ID NO: 692424 - DNA, 15 bp, Homo sapiens
gagtaatgggtaaac

SEQ ID NO: 692425 - DNA, 15 bp, Homo sapiens
agtaatgggtaaact

SEQ ID NO: 692426 - DNA, 15 bp, Homo sapiens
gtaatgggtaaactg

SEQ ID NO: 692427 - DNA, 15 bp, Homo sapiens
taatgggtaaactgt

SEQ ID NO: 692428 - DNA, 15 bp, Homo sapiens
aatgggtaaactgta

SEQ ID NO: 692429 - DNA, 15 bp, Homo sapiens
atgggtaaactgtaa

SEQ ID NO: 692430 - DNA, 15 bp, Homo sapiens
tgggtaaactgtaac

SEQ ID NO: 692431 - DNA, 15 bp, Homo sapiens
gggtaaactgtaact

SEQ ID NO: 692432 - DNA, 15 bp, Homo sapiens
ggtaaactgtaactc

SEQ ID NO: 692433 - DNA, 15 bp, Homo sapiens
gtaaactgtaactct

SEQ ID NO: 692434 - DNA, 15 bp, Homo sapiens
taaactgtaactctc

SEQ ID NO: 692435 - DNA, 15 bp, Homo sapiens
aaactgtaactctca

SEQ ID NO: 692436 - DNA, 15 bp, Homo sapiens
aactgtaactctcat

SEQ ID NO: 692437 - DNA, 15 bp, Homo sapiens
actgtaactctcatt

SEQ ID NO: 692438 - DNA, 15 bp, Homo sapiens
ctgtaactctcattc

SEQ ID NO: 692439 - DNA, 15 bp, Homo sapiens
tgtaactctcattct

SEQ ID NO: 692440 - DNA, 15 bp, Homo sapiens
gtaactctcattctc

SEQ ID NO: 692441 - DNA, 15 bp, Homo sapiens
taactctcattctcc

SEQ ID NO: 692442 - DNA, 15 bp, Homo sapiens
aactctcattctcca

SEQ ID NO: 692443 - DNA, 15 bp, Homo sapiens
actctcattctccac

SEQ ID NO: 692444 - DNA, 15 bp, Homo sapiens
ctctcattctccaca

SEQ ID NO: 692445 - DNA, 15 bp, Homo sapiens
tctcattctccacac

SEQ ID NO: 692446 - DNA, 15 bp, Homo sapiens
ctcattctccacacc

SEQ ID NO: 692447 - DNA, 15 bp, Homo sapiens
tcattctccacaccc

SEQ ID NO: 692448 - DNA, 15 bp, Homo sapiens
cattctccacaccct

SEQ ID NO: 692449 - DNA, 15 bp, Homo sapiens
attctccacacccta

SEQ ID NO: 692450 - DNA, 15 bp, Homo sapiens
ttctccacaccctat

SEQ ID NO: 692451 - DNA, 15 bp, Homo sapiens
tctccacaccctata

SEQ ID NO: 692452 - DNA, 15 bp, Homo sapiens
ctccacaccctatac

SEQ ID NO: 692453 - DNA, 15 bp, Homo sapiens
tccacaccctatacc

SEQ ID NO: 692454 - DNA, 15 bp, Homo sapiens
ccacaccctatacct

SEQ ID NO: 692455 - DNA, 15 bp, Homo sapiens
cacaccctataccta

SEQ ID NO: 692456 - DNA, 15 bp, Homo sapiens
acaccctatacctat

SEQ ID NO: 692457 - DNA, 15 bp, Homo sapiens
caccctatacctata

SEQ ID NO: 692458 - DNA, 15 bp, Homo sapiens
accctatacctatac

SEQ ID NO: 692459 - DNA, 15 bp, Homo sapiens
ccctatacctatacc

SEQ ID NO: 692460 - DNA, 15 bp, Homo sapiens
cctatacctatacct

SEQ ID NO: 692461 - DNA, 15 bp, Homo sapiens
ctatacctatacctg

SEQ ID NO: 692462 - DNA, 15 bp, Homo sapiens
tatacctatacctgt

SEQ ID NO: 692463 - DNA, 15 bp, Homo sapiens
atacctatacctgta

SEQ ID NO: 692464 - DNA, 15 bp, Homo sapiens
tacctatacctgtat

SEQ ID NO: 692465 - DNA, 15 bp, Homo sapiens
acctatacctgtatc

SEQ ID NO: 692466 - DNA, 15 bp, Homo sapiens
cctatacctgtatct

SEQ ID NO: 692467 - DNA, 15 bp, Homo sapiens
ctatacctgtatcta

SEQ ID NO: 692468 - DNA, 15 bp, Homo sapiens
tatacctgtatctat

SEQ ID NO: 692469 - DNA, 15 bp, Homo sapiens
atacctgtatctata

SEQ ID NO: 692470 - DNA, 15 bp, Homo sapiens
tacctgtatctatat

SEQ ID NO: 692471 - DNA, 15 bp, Homo sapiens
acctgtatctatatc

SEQ ID NO: 692472 - DNA, 15 bp, Homo sapiens
cctgtatctatatcc

SEQ ID NO: 692473 - DNA, 15 bp, Homo sapiens
ctgtatctatatcct

SEQ ID NO: 692474 - DNA, 15 bp, Homo sapiens
tgtatctatatccta

SEQ ID NO: 692475 - DNA, 15 bp, Homo sapiens
gtatctatatcctat

SEQ ID NO: 692476 - DNA, 15 bp, Homo sapiens
tatctatatcctatt

SEQ ID NO: 692477 - DNA, 15 bp, Homo sapiens
atctatatcctatta

SEQ ID NO: 692478 - DNA, 15 bp, Homo sapiens
tctatatcctattaa

SEQ ID NO: 692479 - DNA, 15 bp, Homo sapiens
ctatatcctattaac

SEQ ID NO: 692480 - DNA, 15 bp, Homo sapiens
tatatcctattaacc

SEQ ID NO: 692481 - DNA, 15 bp, Homo sapiens
atatcctattaacca

SEQ ID NO: 692482 - DNA, 15 bp, Homo sapiens
tatcctattaaccag

SEQ ID NO: 692483 - DNA, 15 bp, Homo sapiens
atcctattaaccagt

SEQ ID NO: 692484 - DNA, 15 bp, Homo sapiens
tcctattaaccagta

SEQ ID NO: 692485 - DNA, 15 bp, Homo sapiens
cctattaaccagtaa

SEQ ID NO: 692486 - DNA, 15 bp, Homo sapiens
ctattaaccagtaat

SEQ ID NO: 692487 - DNA, 15 bp, Homo sapiens
tattaaccagtaatt

SEQ ID NO: 692488 - DNA, 15 bp, Homo sapiens
attaaccagtaattc

SEQ ID NO: 692489 - DNA, 15 bp, Homo sapiens
ttaaccagtaattcc

SEQ ID NO: 692490 - DNA, 15 bp, Homo sapiens
taaccagtaattcca

SEQ ID NO: 692491 - DNA, 15 bp, Homo sapiens
aaccagtaattccag

SEQ ID NO: 692492 - DNA, 15 bp, Homo sapiens
accagtaattccagt

SEQ ID NO: 692493 - DNA, 15 bp, Homo sapiens
ccagtaattccagtt

SEQ ID NO: 692494 - DNA, 15 bp, Homo sapiens
cagtaattccagttt

SEQ ID NO: 692495 - DNA, 15 bp, Homo sapiens
agtaattccagtttt

SEQ ID NO: 692496 - DNA, 15 bp, Homo sapiens
gtaattccagttttt

SEQ ID NO: 692497 - DNA, 15 bp, Homo sapiens
taattccagtttttg

SEQ ID NO: 692498 - DNA, 15 bp, Homo sapiens
aattccagtttttgg

SEQ ID NO: 692499 - DNA, 15 bp, Homo sapiens
attccagtttttggt

SEQ ID NO: 692500 - DNA, 15 bp, Homo sapiens
ttccagtttttggta

SEQ ID NO: 692501 - DNA, 15 bp, Homo sapiens
tccagtttttggtag

SEQ ID NO: 692502 - DNA, 15 bp, Homo sapiens
ccagtttttggtagt

SEQ ID NO: 692503 - DNA, 15 bp, Homo sapiens
cagtttttggtagtg

SEQ ID NO: 692504 - DNA, 15 bp, Homo sapiens
agtttttggtagtgt

SEQ ID NO: 692505 - DNA, 15 bp, Homo sapiens
gtttttggtagtgtt

SEQ ID NO: 692506 - DNA, 15 bp, Homo sapiens
tttttggtagtgttt

SEQ ID NO: 692507 - DNA, 15 bp, Homo sapiens
ttttggtagtgtttg

SEQ ID NO: 692508 - DNA, 15 bp, Homo sapiens
tttggtagtgtttgc

SEQ ID NO: 692509 - DNA, 15 bp, Homo sapiens
ttggtagtgtttgcc

SEQ ID NO: 692510 - DNA, 15 bp, Homo sapiens
tggtagtgtttgccc

SEQ ID NO: 692511 - DNA, 15 bp, Homo sapiens
ggtagtgtttgccct

SEQ ID NO: 692512 - DNA, 15 bp, Homo sapiens
gtagtgtttgcccta

SEQ ID NO: 692513 - DNA, 15 bp, Homo sapiens
tagtgtttgccctag

SEQ ID NO: 692514 - DNA, 15 bp, Homo sapiens
agtgtttgccctaga

SEQ ID NO: 692515 - DNA, 15 bp, Homo sapiens
gtgtttgccctagaa

SEQ ID NO: 692516 - DNA, 15 bp, Homo sapiens
tgtttgccctagaaa

SEQ ID NO: 692517 - DNA, 15 bp, Homo sapiens
gtttgccctagaaac

SEQ ID NO: 692518 - DNA, 15 bp, Homo sapiens
tttgccctagaaaca

SEQ ID NO: 692519 - DNA, 15 bp, Homo sapiens
ttgccctagaaacac

SEQ ID NO: 692520 - DNA, 15 bp, Homo sapiens
tgccctagaaacacc

SEQ ID NO: 692521 - DNA, 15 bp, Homo sapiens
gccctagaaacacct

SEQ ID NO: 692522 - DNA, 15 bp, Homo sapiens
ccctagaaacacctg

SEQ ID NO: 692523 - DNA, 15 bp, Homo sapiens
cctagaaacacctgc

SEQ ID NO: 692524 - DNA, 15 bp, Homo sapiens
ctagaaacacctgca

SEQ ID NO: 692525 - DNA, 15 bp, Homo sapiens
tagaaacacctgcaa

SEQ ID NO: 692526 - DNA, 15 bp, Homo sapiens
agaaacacctgcaaa

SEQ ID NO: 692527 - DNA, 15 bp, Homo sapiens
gaaacacctgcaaac

SEQ ID NO: 692528 - DNA, 15 bp, Homo sapiens
aaacacctgcaaact

SEQ ID NO: 692529 - DNA, 15 bp, Homo sapiens
aacacctgcaaactg

SEQ ID NO: 692530 - DNA, 15 bp, Homo sapiens
acacctgcaaactgg

SEQ ID NO: 692531 - DNA, 15 bp, Homo sapiens
cacctgcaaactggt

SEQ ID NO: 692532 - DNA, 15 bp, Homo sapiens
acctgcaaactggta

SEQ ID NO: 692533 - DNA, 15 bp, Homo sapiens
cctgcaaactggtac

SEQ ID NO: 692534 - DNA, 15 bp, Homo sapiens
ctgcaaactggtact

SEQ ID NO: 692535 - DNA, 15 bp, Homo sapiens
tgcaaactggtactg

SEQ ID NO: 692536 - DNA, 15 bp, Homo sapiens
gcaaactggtactgt

SEQ ID NO: 692537 - DNA, 15 bp, Homo sapiens
caaactggtactgta

SEQ ID NO: 692538 - DNA, 15 bp, Homo sapiens
aaactggtactgtat

SEQ ID NO: 692539 - DNA, 15 bp, Homo sapiens
aactggtactgtatt

SEQ ID NO: 692540 - DNA, 15 bp, Homo sapiens
actggtactgtatta

SEQ ID NO: 692541 - DNA, 15 bp, Homo sapiens
ctggtactgtattaa

SEQ ID NO: 692542 - DNA, 15 bp, Homo sapiens
tggtactgtattaag

SEQ ID NO: 692543 - DNA, 15 bp, Homo sapiens
ggtactgtattaagg

SEQ ID NO: 692544 - DNA, 15 bp, Homo sapiens
gtactgtattaagga

SEQ ID NO: 692545 - DNA, 15 bp, Homo sapiens
tactgtattaaggat

SEQ ID NO: 692546 - DNA, 15 bp, Homo sapiens
actgtattaaggatt

SEQ ID NO: 692547 - DNA, 15 bp, Homo sapiens
ctgtattaaggattt

SEQ ID NO: 692548 - DNA, 15 bp, Homo sapiens
tgtattaaggatttc

SEQ ID NO: 692549 - DNA, 15 bp, Homo sapiens
gtattaaggatttca

SEQ ID NO: 692550 - DNA, 15 bp, Homo sapiens
tattaaggatttcac

SEQ ID NO: 692551 - DNA, 15 bp, Homo sapiens
attaaggatttcaca

SEQ ID NO: 692552 - DNA, 15 bp, Homo sapiens
ttaaggatttcacac

SEQ ID NO: 692553 - DNA, 15 bp, Homo sapiens
taaggatttcacact

SEQ ID NO: 692554 - DNA, 15 bp, Homo sapiens
aaggatttcacactg

SEQ ID NO: 692555 - DNA, 15 bp, Homo sapiens
aggatttcacactgc

SEQ ID NO: 692556 - DNA, 15 bp, Homo sapiens
ggatttcacactgca

SEQ ID NO: 692557 - DNA, 15 bp, Homo sapiens
gatttcacactgcag

SEQ ID NO: 692558 - DNA, 15 bp, Homo sapiens
atttcacactgcagt

SEQ ID NO: 692559 - DNA, 15 bp, Homo sapiens
tttcacactgcagta

SEQ ID NO: 692560 - DNA, 15 bp, Homo sapiens
ttcacactgcagtat

SEQ ID NO: 692561 - DNA, 15 bp, Homo sapiens
tcacactgcagtata

SEQ ID NO: 692562 - DNA, 15 bp, Homo sapiens
cacactgcagtataa

SEQ ID NO: 692563 - DNA, 15 bp, Homo sapiens
acactgcagtataat

SEQ ID NO: 692564 - DNA, 15 bp, Homo sapiens
cactgcagtataatt

SEQ ID NO: 692565 - DNA, 15 bp, Homo sapiens
actgcagtataattt

SEQ ID NO: 692566 - DNA, 15 bp, Homo sapiens
ctgcagtataatttg

SEQ ID NO: 692567 - DNA, 15 bp, Homo sapiens
tgcagtataatttgt

SEQ ID NO: 692568 - DNA, 15 bp, Homo sapiens
gcagtataatttgtt

SEQ ID NO: 692569 - DNA, 15 bp, Homo sapiens
cagtataatttgtta

SEQ ID NO: 692570 - DNA, 15 bp, Homo sapiens
agtataatttgttat

SEQ ID NO: 692571 - DNA, 15 bp, Homo sapiens
gtataatttgttatc

SEQ ID NO: 692572 - DNA, 15 bp, Homo sapiens
tataatttgttatca

SEQ ID NO: 692573 - DNA, 15 bp, Homo sapiens
ataatttgttatcag

SEQ ID NO: 692574 - DNA, 15 bp, Homo sapiens
taatttgttatcagt

SEQ ID NO: 692575 - DNA, 15 bp, Homo sapiens
aatttgttatcagtg

SEQ ID NO: 692576 - DNA, 15 bp, Homo sapiens
atttgttatcagtga

SEQ ID NO: 692577 - DNA, 15 bp, Homo sapiens
tttgttatcagtgaa

SEQ ID NO: 692578 - DNA, 15 bp, Homo sapiens
ttgttatcagtgaaa

SEQ ID NO: 692579 - DNA, 15 bp, Homo sapiens
tgttatcagtgaaaa

SEQ ID NO: 692580 - DNA, 15 bp, Homo sapiens
gttatcagtgaaaaa

SEQ ID NO: 692581 - DNA, 15 bp, Homo sapiens
ttatcagtgaaaaat

SEQ ID NO: 692582 - DNA, 15 bp, Homo sapiens
tatcagtgaaaaatt

SEQ ID NO: 692583 - DNA, 15 bp, Homo sapiens
atcagtgaaaaattg

SEQ ID NO: 692584 - DNA, 15 bp, Homo sapiens
tcagtgaaaaattga

SEQ ID NO: 692585 - DNA, 15 bp, Homo sapiens
cagtgaaaaattgac

SEQ ID NO: 692586 - DNA, 15 bp, Homo sapiens
agtgaaaaattgacc

SEQ ID NO: 692587 - DNA, 15 bp, Homo sapiens
gtgaaaaattgacct

SEQ ID NO: 692588 - DNA, 15 bp, Homo sapiens
tgaaaaattgaccta

SEQ ID NO: 692589 - DNA, 15 bp, Homo sapiens
gaaaaattgacctac

SEQ ID NO: 692590 - DNA, 15 bp, Homo sapiens
aaaaattgacctaca

SEQ ID NO: 692591 - DNA, 15 bp, Homo sapiens
aaaattgacctacaa

SEQ ID NO: 692592 - DNA, 15 bp, Homo sapiens
aaattgacctacaac

SEQ ID NO: 692593 - DNA, 15 bp, Homo sapiens
aattgacctacaacc

SEQ ID NO: 692594 - DNA, 15 bp, Homo sapiens
attgacctacaacca

SEQ ID NO: 692595 - DNA, 15 bp, Homo sapiens
ttgacctacaaccaa

SEQ ID NO: 692596 - DNA, 15 bp, Homo sapiens
tgacctacaaccaaa

SEQ ID NO: 692597 - DNA, 15 bp, Homo sapiens
gacctacaaccaaaa

SEQ ID NO: 692598 - DNA, 15 bp, Homo sapiens
acctacaaccaaaat

SEQ ID NO: 692599 - DNA, 15 bp, Homo sapiens
cctacaaccaaaata

SEQ ID NO: 692600 - DNA, 15 bp, Homo sapiens
ctacaaccaaaatat

SEQ ID NO: 692601 - DNA, 15 bp, Homo sapiens
tacaaccaaaatatt

SEQ ID NO: 692602 - DNA, 15 bp, Homo sapiens
acaaccaaaatattc

SEQ ID NO: 692603 - DNA, 15 bp, Homo sapiens
caaccaaaatattca

SEQ ID NO: 692604 - DNA, 15 bp, Homo sapiens
aaccaaaatattcat

SEQ ID NO: 692605 - DNA, 15 bp, Homo sapiens
accaaaatattcatc

SEQ ID NO: 692606 - DNA, 15 bp, Homo sapiens
ccaaaatattcatca

SEQ ID NO: 692607 - DNA, 15 bp, Homo sapiens
caaaatattcatcag

SEQ ID NO: 692608 - DNA, 15 bp, Homo sapiens
aaaatattcatcagt

SEQ ID NO: 692609 - DNA, 15 bp, Homo sapiens
aaatattcatcagtg

SEQ ID NO: 692610 - DNA, 15 bp, Homo sapiens
aatattcatcagtgg

SEQ ID NO: 692611 - DNA, 15 bp, Homo sapiens
atattcatcagtggt

SEQ ID NO: 692612 - DNA, 15 bp, Homo sapiens
tattcatcagtggtg

SEQ ID NO: 692613 - DNA, 15 bp, Homo sapiens
attcatcagtggtga

SEQ ID NO: 692614 - DNA, 15 bp, Homo sapiens
ttcatcagtggtgaa

SEQ ID NO: 692615 - DNA, 15 bp, Homo sapiens
tcatcagtggtgaac

SEQ ID NO: 692616 - DNA, 15 bp, Homo sapiens
catcagtggtgaaca

SEQ ID NO: 692617 - DNA, 15 bp, Homo sapiens
atcagtggtgaacag

SEQ ID NO: 692618 - DNA, 15 bp, Homo sapiens
tcagtggtgaacagt

SEQ ID NO: 692619 - DNA, 15 bp, Homo sapiens
cagtggtgaacagtg

SEQ ID NO: 692620 - DNA, 15 bp, Homo sapiens
agtggtgaacagtgc

SEQ ID NO: 692621 - DNA, 15 bp, Homo sapiens
gtggtgaacagtgca

SEQ ID NO: 692622 - DNA, 15 bp, Homo sapiens
tggtgaacagtgcat

SEQ ID NO: 692623 - DNA, 15 bp, Homo sapiens
ggtgaacagtgcatt

SEQ ID NO: 692624 - DNA, 15 bp, Homo sapiens
gtgaacagtgcatta

SEQ ID NO: 692625 - DNA, 15 bp, Homo sapiens
tgaacagtgcattaa

SEQ ID NO: 692626 - DNA, 15 bp, Homo sapiens
gaacagtgcattaat

SEQ ID NO: 692627 - DNA, 15 bp, Homo sapiens
aacagtgcattaatt

SEQ ID NO: 692628 - DNA, 15 bp, Homo sapiens
acagtgcattaatta

SEQ ID NO: 692629 - DNA, 15 bp, Homo sapiens
cagtgcattaattac

SEQ ID NO: 692630 - DNA, 15 bp, Homo sapiens
agtgcattaattact

SEQ ID NO: 692631 - DNA, 15 bp, Homo sapiens
gtgcattaattacta

SEQ ID NO: 692632 - DNA, 15 bp, Homo sapiens
tgcattaattactat

SEQ ID NO: 692633 - DNA, 15 bp, Homo sapiens
gcattaattactatg

SEQ ID NO: 692634 - DNA, 15 bp, Homo sapiens
cattaattactatgc

SEQ ID NO: 692635 - DNA, 15 bp, Homo sapiens
attaattactatgca

SEQ ID NO: 692636 - DNA, 15 bp, Homo sapiens
ttaattactatgcat

SEQ ID NO: 692637 - DNA, 15 bp, Homo sapiens
taattactatgcata

SEQ ID NO: 692638 - DNA, 15 bp, Homo sapiens
aattactatgcatag

SEQ ID NO: 692639 - DNA, 15 bp, Homo sapiens
attactatgcatagc

SEQ ID NO: 692640 - DNA, 15 bp, Homo sapiens
ttactatgcatagcc

SEQ ID NO: 692641 - DNA, 15 bp, Homo sapiens
tactatgcatagcca

SEQ ID NO: 692642 - DNA, 15 bp, Homo sapiens
actatgcatagccat

SEQ ID NO: 692643 - DNA, 15 bp, Homo sapiens
ctatgcatagccatg

SEQ ID NO: 692644 - DNA, 15 bp, Homo sapiens
tatgcatagccatgc

SEQ ID NO: 692645 - DNA, 15 bp, Homo sapiens
atgcatagccatgct

SEQ ID NO: 692646 - DNA, 15 bp, Homo sapiens
tgcatagccatgctc

SEQ ID NO: 692647 - DNA, 15 bp, Homo sapiens
gcatagccatgctct

SEQ ID NO: 692648 - DNA, 15 bp, Homo sapiens
catagccatgctctg

SEQ ID NO: 692649 - DNA, 15 bp, Homo sapiens
atagccatgctctgt

SEQ ID NO: 692650 - DNA, 15 bp, Homo sapiens
tagccatgctctgta

SEQ ID NO: 692651 - DNA, 15 bp, Homo sapiens
agccatgctctgtaa

SEQ ID NO: 692652 - DNA, 15 bp, Homo sapiens
gccatgctctgtaac

SEQ ID NO: 692653 - DNA, 15 bp, Homo sapiens
ccatgctctgtaaca

SEQ ID NO: 692654 - DNA, 15 bp, Homo sapiens
catgctctgtaacac

SEQ ID NO: 692655 - DNA, 15 bp, Homo sapiens
atgctctgtaacact

SEQ ID NO: 692656 - DNA, 15 bp, Homo sapiens
tgctctgtaacacta

SEQ ID NO: 692657 - DNA, 15 bp, Homo sapiens
gctctgtaacactat

SEQ ID NO: 692658 - DNA, 15 bp, Homo sapiens
ctctgtaacactatc

SEQ ID NO: 692659 - DNA, 15 bp, Homo sapiens
tctgtaacactatcc

SEQ ID NO: 692660 - DNA, 15 bp, Homo sapiens
ctgtaacactatcca

SEQ ID NO: 692661 - DNA, 15 bp, Homo sapiens
tgtaacactatccaa

SEQ ID NO: 692662 - DNA, 15 bp, Homo sapiens
gtaacactatccaac

SEQ ID NO: 692663 - DNA, 15 bp, Homo sapiens
taacactatccaaca

SEQ ID NO: 692664 - DNA, 15 bp, Homo sapiens
aacactatccaacag

SEQ ID NO: 692665 - DNA, 15 bp, Homo sapiens
acactatccaacagt

SEQ ID NO: 692666 - DNA, 15 bp, Homo sapiens
cactatccaacagtt

SEQ ID NO: 692667 - DNA, 15 bp, Homo sapiens
actatccaacagtta

SEQ ID NO: 692668 - DNA, 15 bp, Homo sapiens
ctatccaacagttaa

SEQ ID NO: 692669 - DNA, 15 bp, Homo sapiens
tatccaacagttaaa

SEQ ID NO: 692670 - DNA, 15 bp, Homo sapiens
atccaacagttaaaa

SEQ ID NO: 692671 - DNA, 15 bp, Homo sapiens
tccaacagttaaaat

SEQ ID NO: 692672 - DNA, 15 bp, Homo sapiens
ccaacagttaaaata

SEQ ID NO: 692673 - DNA, 15 bp, Homo sapiens
caacagttaaaataa

SEQ ID NO: 692674 - DNA, 15 bp, Homo sapiens
aacagttaaaataag

SEQ ID NO: 692675 - DNA, 15 bp, Homo sapiens
acagttaaaataaga

SEQ ID NO: 692676 - DNA, 15 bp, Homo sapiens
cagttaaaataagaa

SEQ ID NO: 692677 - DNA, 15 bp, Homo sapiens
agttaaaataagaaa

SEQ ID NO: 692678 - DNA, 15 bp, Homo sapiens
gttaaaataagaaat

SEQ ID NO: 692679 - DNA, 15 bp, Homo sapiens
ttaaaataagaaata

SEQ ID NO: 692680 - DNA, 15 bp, Homo sapiens
taaaataagaaatag

SEQ ID NO: 692681 - DNA, 15 bp, Homo sapiens
aaaataagaaataga

SEQ ID NO: 692682 - DNA, 15 bp, Homo sapiens
aaataagaaatagac

SEQ ID NO: 692683 - DNA, 15 bp, Homo sapiens
aataagaaatagacc

SEQ ID NO: 692684 - DNA, 15 bp, Homo sapiens
ataagaaatagaccc

SEQ ID NO: 692685 - DNA, 15 bp, Homo sapiens
taagaaatagaccca

SEQ ID NO: 692686 - DNA, 15 bp, Homo sapiens
aagaaatagacccac

SEQ ID NO: 692687 - DNA, 15 bp, Homo sapiens
agaaatagacccaca

SEQ ID NO: 692688 - DNA, 15 bp, Homo sapiens
gaaatagacccacat

SEQ ID NO: 692689 - DNA, 15 bp, Homo sapiens
aaatagacccacata

SEQ ID NO: 692690 - DNA, 15 bp, Homo sapiens
aatagacccacatac

SEQ ID NO: 692691 - DNA, 15 bp, Homo sapiens
atagacccacataca

SEQ ID NO: 692692 - DNA, 15 bp, Homo sapiens
tagacccacatacag

SEQ ID NO: 692693 - DNA, 15 bp, Homo sapiens
agacccacatacagc

SEQ ID NO: 692694 - DNA, 15 bp, Homo sapiens
gacccacatacagca

SEQ ID NO: 692695 - DNA, 15 bp, Homo sapiens
acccacatacagcat

SEQ ID NO: 692696 - DNA, 15 bp, Homo sapiens
cccacatacagcatt

SEQ ID NO: 692697 - DNA, 15 bp, Homo sapiens
ccacatacagcatta

SEQ ID NO: 692698 - DNA, 15 bp, Homo sapiens
cacatacagcattaa

SEQ ID NO: 692699 - DNA, 15 bp, Homo sapiens
acatacagcattaat

SEQ ID NO: 692700 - DNA, 15 bp, Homo sapiens
catacagcattaata

SEQ ID NO: 692701 - DNA, 15 bp, Homo sapiens
atacagcattaatat

SEQ ID NO: 692702 - DNA, 15 bp, Homo sapiens
tacagcattaatatg

SEQ ID NO: 692703 - DNA, 15 bp, Homo sapiens
acagcattaatatgg

SEQ ID NO: 692704 - DNA, 15 bp, Homo sapiens
cagcattaatatgga

SEQ ID NO: 692705 - DNA, 15 bp, Homo sapiens
agcattaatatggaa

SEQ ID NO: 692706 - DNA, 15 bp, Homo sapiens
gcattaatatggaaa

SEQ ID NO: 692707 - DNA, 15 bp, Homo sapiens
cattaatatggaaaa

SEQ ID NO: 692708 - DNA, 15 bp, Homo sapiens
attaatatggaaaaa

SEQ ID NO: 692709 - DNA, 15 bp, Homo sapiens
ttaatatggaaaaac

SEQ ID NO: 692710 - DNA, 15 bp, Homo sapiens
taatatggaaaaact

SEQ ID NO: 692711 - DNA, 15 bp, Homo sapiens
aatatggaaaaacta

SEQ ID NO: 692712 - DNA, 15 bp, Homo sapiens
atatggaaaaactac

SEQ ID NO: 692713 - DNA, 15 bp, Homo sapiens
tatggaaaaactact

SEQ ID NO: 692714 - DNA, 15 bp, Homo sapiens
atggaaaaactacta

SEQ ID NO: 692715 - DNA, 15 bp, Homo sapiens
tggaaaaactactaa

SEQ ID NO: 692716 - DNA, 15 bp, Homo sapiens
ggaaaaactactaag

SEQ ID NO: 692717 - DNA, 15 bp, Homo sapiens
gaaaaactactaagg

SEQ ID NO: 692718 - DNA, 15 bp, Homo sapiens
aaaaactactaaggt

SEQ ID NO: 692719 - DNA, 15 bp, Homo sapiens
aaaactactaaggta

SEQ ID NO: 692720 - DNA, 15 bp, Homo sapiens
aaactactaaggtat

SEQ ID NO: 692721 - DNA, 15 bp, Homo sapiens
aactactaaggtata

SEQ ID NO: 692722 - DNA, 15 bp, Homo sapiens
actactaaggtatat

SEQ ID NO: 692723 - DNA, 15 bp, Homo sapiens
ctactaaggtatatt

SEQ ID NO: 692724 - DNA, 15 bp, Homo sapiens
tactaaggtatattg

SEQ ID NO: 692725 - DNA, 15 bp, Homo sapiens
actaaggtatattgg

SEQ ID NO: 692726 - DNA, 15 bp, Homo sapiens
ctaaggtatattggt

SEQ ID NO: 692727 - DNA, 15 bp, Homo sapiens
taaggtatattggta

SEQ ID NO: 692728 - DNA, 15 bp, Homo sapiens
aaggtatattggtat

SEQ ID NO: 692729 - DNA, 15 bp, Homo sapiens
aggtatattggtata

SEQ ID NO: 692730 - DNA, 15 bp, Homo sapiens
ggtatattggtatat

SEQ ID NO: 692731 - DNA, 15 bp, Homo sapiens
gtatattggtatatt

SEQ ID NO: 692732 - DNA, 15 bp, Homo sapiens
tatattggtatattg

SEQ ID NO: 692733 - DNA, 15 bp, Homo sapiens
atattggtatattga

SEQ ID NO: 692734 - DNA, 15 bp, Homo sapiens
tattggtatattgaa

SEQ ID NO: 692735 - DNA, 15 bp, Homo sapiens
attggtatattgaat

SEQ ID NO: 692736 - DNA, 15 bp, Homo sapiens
ttggtatattgaatt

SEQ ID NO: 692737 - DNA, 15 bp, Homo sapiens
tggtatattgaatta

SEQ ID NO: 692738 - DNA, 15 bp, Homo sapiens
ggtatattgaattaa

SEQ ID NO: 692739 - DNA, 15 bp, Homo sapiens
gtatattgaattaaa

SEQ ID NO: 692740 - DNA, 15 bp, Homo sapiens
tatattgaattaaaa

SEQ ID NO: 692741 - DNA, 15 bp, Homo sapiens
atattgaattaaaag

SEQ ID NO: 692742 - DNA, 15 bp, Homo sapiens
tattgaattaaaagg

SEQ ID NO: 692743 - DNA, 15 bp, Homo sapiens
attgaattaaaaggt

SEQ ID NO: 692744 - DNA, 15 bp, Homo sapiens
ttgaattaaaaggta

SEQ ID NO: 692745 - DNA, 15 bp, Homo sapiens
tgaattaaaaggtac

SEQ ID NO: 692746 - DNA, 15 bp, Homo sapiens
gaattaaaaggtact

SEQ ID NO: 692747 - DNA, 15 bp, Homo sapiens
aattaaaaggtactg

SEQ ID NO: 692748 - DNA, 15 bp, Homo sapiens
attaaaaggtactga

SEQ ID NO: 692749 - DNA, 15 bp, Homo sapiens
ttaaaaggtactgaa

SEQ ID NO: 692750 - DNA, 15 bp, Homo sapiens
taaaaggtactgaat

SEQ ID NO: 692751 - DNA, 15 bp, Homo sapiens
aaaaggtactgaata

SEQ ID NO: 692752 - DNA, 15 bp, Homo sapiens
aaaggtactgaataa

SEQ ID NO: 692753 - DNA, 15 bp, Homo sapiens
aaggtactgaataat

SEQ ID NO: 692754 - DNA, 15 bp, Homo sapiens
aggtactgaataata

SEQ ID NO: 692755 - DNA, 15 bp, Homo sapiens
ggtactgaataatag

SEQ ID NO: 692756 - DNA, 15 bp, Homo sapiens
gtactgaataatagg

SEQ ID NO: 692757 - DNA, 15 bp, Homo sapiens
tactgaataataggg

SEQ ID NO: 692758 - DNA, 15 bp, Homo sapiens
actgaataatagggt

SEQ ID NO: 692759 - DNA, 15 bp, Homo sapiens
ctgaataatagggta

SEQ ID NO: 692760 - DNA, 15 bp, Homo sapiens
tgaataatagggtat

SEQ ID NO: 692761 - DNA, 15 bp, Homo sapiens
gaataatagggtata

SEQ ID NO: 692762 - DNA, 15 bp, Homo sapiens
aataatagggtatat

SEQ ID NO: 692763 - DNA, 15 bp, Homo sapiens
ataatagggtatatt

SEQ ID NO: 692764 - DNA, 15 bp, Homo sapiens
taatagggtatattg

SEQ ID NO: 692765 - DNA, 15 bp, Homo sapiens
aatagggtatattga

SEQ ID NO: 692766 - DNA, 15 bp, Homo sapiens
atagggtatattgaa

SEQ ID NO: 692767 - DNA, 15 bp, Homo sapiens
tagggtatattgaat

SEQ ID NO: 692768 - DNA, 15 bp, Homo sapiens
agggtatattgaata

SEQ ID NO: 692769 - DNA, 15 bp, Homo sapiens
gggtatattgaataa

SEQ ID NO: 692770 - DNA, 15 bp, Homo sapiens
ggtatattgaataaa

SEQ ID NO: 692771 - DNA, 15 bp, Homo sapiens
gtatattgaataaaa

SEQ ID NO: 692772 - DNA, 15 bp, Homo sapiens
tatattgaataaaaa

SEQ ID NO: 692773 - DNA, 15 bp, Homo sapiens
atattgaataaaaag

SEQ ID NO: 692774 - DNA, 15 bp, Homo sapiens
tattgaataaaaagg

SEQ ID NO: 692775 - DNA, 15 bp, Homo sapiens
attgaataaaaaggg

SEQ ID NO: 692776 - DNA, 15 bp, Homo sapiens
ttgaataaaaagggg

SEQ ID NO: 692777 - DNA, 15 bp, Homo sapiens
tgaataaaaagggga

SEQ ID NO: 692778 - DNA, 15 bp, Homo sapiens
gaataaaaaggggaa

SEQ ID NO: 692779 - DNA, 15 bp, Homo sapiens
aataaaaaggggaaa

SEQ ID NO: 692780 - DNA, 15 bp, Homo sapiens
ataaaaaggggaaat

SEQ ID NO: 692781 - DNA, 15 bp, Homo sapiens
taaaaaggggaaatt

SEQ ID NO: 692782 - DNA, 15 bp, Homo sapiens
aaaaaggggaaattc

SEQ ID NO: 692783 - DNA, 15 bp, Homo sapiens
aaaaggggaaattcc

SEQ ID NO: 692784 - DNA, 15 bp, Homo sapiens
aaaggggaaattcca

SEQ ID NO: 692785 - DNA, 15 bp, Homo sapiens
aaggggaaattccaa

SEQ ID NO: 692786 - DNA, 15 bp, Homo sapiens
aggggaaattccaaa

SEQ ID NO: 692787 - DNA, 15 bp, Homo sapiens
ggggaaattccaaaa

SEQ ID NO: 692788 - DNA, 15 bp, Homo sapiens
gggaaattccaaaat

SEQ ID NO: 692789 - DNA, 15 bp, Homo sapiens
ggaaattccaaaatg

SEQ ID NO: 692790 - DNA, 15 bp, Homo sapiens
gaaattccaaaatga

SEQ ID NO: 692791 - DNA, 15 bp, Homo sapiens
aaattccaaaatgat

SEQ ID NO: 692792 - DNA, 15 bp, Homo sapiens
aattccaaaatgata

SEQ ID NO: 692793 - DNA, 15 bp, Homo sapiens
attccaaaatgatat

SEQ ID NO: 692794 - DNA, 15 bp, Homo sapiens
ttccaaaatgatata

SEQ ID NO: 692795 - DNA, 15 bp, Homo sapiens
tccaaaatgatatag

SEQ ID NO: 692796 - DNA, 15 bp, Homo sapiens
ccaaaatgatataga

SEQ ID NO: 692797 - DNA, 15 bp, Homo sapiens
caaaatgatatagac

SEQ ID NO: 692798 - DNA, 15 bp, Homo sapiens
aaaatgatatagact

SEQ ID NO: 692799 - DNA, 15 bp, Homo sapiens
aaatgatatagactg

SEQ ID NO: 692800 - DNA, 15 bp, Homo sapiens
aatgatatagactga

SEQ ID NO: 692801 - DNA, 15 bp, Homo sapiens
atgatatagactgaa

SEQ ID NO: 692802 - DNA, 15 bp, Homo sapiens
tgatatagactgaac

SEQ ID NO: 692803 - DNA, 15 bp, Homo sapiens
gatatagactgaaca

SEQ ID NO: 692804 - DNA, 15 bp, Homo sapiens
atatagactgaacac

SEQ ID NO: 692805 - DNA, 15 bp, Homo sapiens
tatagactgaacaca

SEQ ID NO: 692806 - DNA, 15 bp, Homo sapiens
atagactgaacacat

SEQ ID NO: 692807 - DNA, 15 bp, Homo sapiens
tagactgaacacata

SEQ ID NO: 692808 - DNA, 15 bp, Homo sapiens
agactgaacacataa

SEQ ID NO: 692809 - DNA, 15 bp, Homo sapiens
gactgaacacataat

SEQ ID NO: 692810 - DNA, 15 bp, Homo sapiens
actgaacacataatt

SEQ ID NO: 692811 - DNA, 15 bp, Homo sapiens
ctgaacacataatta

SEQ ID NO: 692812 - DNA, 15 bp, Homo sapiens
tgaacacataattac

SEQ ID NO: 692813 - DNA, 15 bp, Homo sapiens
gaacacataattaca

SEQ ID NO: 692814 - DNA, 15 bp, Homo sapiens
aacacataattacat

SEQ ID NO: 692815 - DNA, 15 bp, Homo sapiens
acacataattacatt

SEQ ID NO: 692816 - DNA, 15 bp, Homo sapiens
cacataattacatta

SEQ ID NO: 692817 - DNA, 15 bp, Homo sapiens
acataattacattaa

SEQ ID NO: 692818 - DNA, 15 bp, Homo sapiens
cataattacattaaa

SEQ ID NO: 692819 - DNA, 15 bp, Homo sapiens
ataattacattaaag

SEQ ID NO: 692820 - DNA, 15 bp, Homo sapiens
taattacattaaagc

SEQ ID NO: 692821 - DNA, 15 bp, Homo sapiens
aattacattaaagca

SEQ ID NO: 692822 - DNA, 15 bp, Homo sapiens
attacattaaagcaa

SEQ ID NO: 692823 - DNA, 15 bp, Homo sapiens
ttacattaaagcaaa

SEQ ID NO: 692824 - DNA, 15 bp, Homo sapiens
tacattaaagcaaat

SEQ ID NO: 692825 - DNA, 15 bp, Homo sapiens
acattaaagcaaata

SEQ ID NO: 692826 - DNA, 15 bp, Homo sapiens
cattaaagcaaatag

SEQ ID NO: 692827 - DNA, 15 bp, Homo sapiens
attaaagcaaatagt

SEQ ID NO: 692828 - DNA, 15 bp, Homo sapiens
ttaaagcaaatagtt

SEQ ID NO: 692829 - DNA, 15 bp, Homo sapiens
taaagcaaatagttt

SEQ ID NO: 692830 - DNA, 15 bp, Homo sapiens
aaagcaaatagtttt

SEQ ID NO: 692831 - DNA, 15 bp, Homo sapiens
aagcaaatagttttt

SEQ ID NO: 692832 - DNA, 15 bp, Homo sapiens
agcaaatagtttttt

SEQ ID NO: 692833 - DNA, 15 bp, Homo sapiens
gcaaatagttttttt

SEQ ID NO: 692834 - DNA, 15 bp, Homo sapiens
caaatagttttttta

SEQ ID NO: 692835 - DNA, 15 bp, Homo sapiens
aaatagtttttttac

SEQ ID NO: 692836 - DNA, 15 bp, Homo sapiens
aatagtttttttaca

SEQ ID NO: 692837 - DNA, 15 bp, Homo sapiens
atagtttttttacac

SEQ ID NO: 692838 - DNA, 15 bp, Homo sapiens
tagtttttttacact

SEQ ID NO: 692839 - DNA, 15 bp, Homo sapiens
agtttttttacacta

SEQ ID NO: 692840 - DNA, 15 bp, Homo sapiens
gtttttttacactat

SEQ ID NO: 692841 - DNA, 15 bp, Homo sapiens
tttttttacactata

SEQ ID NO: 692842 - DNA, 15 bp, Homo sapiens
ttttttacactatat

SEQ ID NO: 692843 - DNA, 15 bp, Homo sapiens
tttttacactatata

SEQ ID NO: 692844 - DNA, 15 bp, Homo sapiens
ttttacactatatac

SEQ ID NO: 692845 - DNA, 15 bp, Homo sapiens
tttacactatataca

SEQ ID NO: 692846 - DNA, 15 bp, Homo sapiens
ttacactatatacac

SEQ ID NO: 692847 - DNA, 15 bp, Homo sapiens
tacactatatacaca

SEQ ID NO: 692848 - DNA, 15 bp, Homo sapiens
acactatatacacat

SEQ ID NO: 692849 - DNA, 15 bp, Homo sapiens
cactatatacacatg

SEQ ID NO: 692850 - DNA, 15 bp, Homo sapiens
actatatacacatgt

SEQ ID NO: 692851 - DNA, 15 bp, Homo sapiens
ctatatacacatgtg

SEQ ID NO: 692852 - DNA, 15 bp, Homo sapiens
tatatacacatgtgt

SEQ ID NO: 692853 - DNA, 15 bp, Homo sapiens
atatacacatgtgtg

SEQ ID NO: 692854 - DNA, 15 bp, Homo sapiens
tatacacatgtgtgt

SEQ ID NO: 692855 - DNA, 15 bp, Homo sapiens
atacacatgtgtgta

SEQ ID NO: 692856 - DNA, 15 bp, Homo sapiens
tacacatgtgtgtaa

SEQ ID NO: 692857 - DNA, 15 bp, Homo sapiens
acacatgtgtgtaaa

SEQ ID NO: 692858 - DNA, 15 bp, Homo sapiens
cacatgtgtgtaaag

SEQ ID NO: 692859 - DNA, 15 bp, Homo sapiens
acatgtgtgtaaagg

SEQ ID NO: 692860 - DNA, 15 bp, Homo sapiens
catgtgtgtaaaggc

SEQ ID NO: 692861 - DNA, 15 bp, Homo sapiens
atgtgtgtaaaggca

SEQ ID NO: 692862 - DNA, 15 bp, Homo sapiens
tgtgtgtaaaggcat

SEQ ID NO: 692863 - DNA, 15 bp, Homo sapiens
gtgtgtaaaggcata

SEQ ID NO: 692864 - DNA, 15 bp, Homo sapiens
tgtgtaaaggcatag

SEQ ID NO: 692865 - DNA, 15 bp, Homo sapiens
gtgtaaaggcatagg

SEQ ID NO: 692866 - DNA, 15 bp, Homo sapiens
tgtaaaggcatagga

SEQ ID NO: 692867 - DNA, 15 bp, Homo sapiens
gtaaaggcataggaa

SEQ ID NO: 692868 - DNA, 15 bp, Homo sapiens
taaaggcataggaaa

SEQ ID NO: 692869 - DNA, 15 bp, Homo sapiens
aaaggcataggaaat

SEQ ID NO: 692870 - DNA, 15 bp, Homo sapiens
aaggcataggaaatt

SEQ ID NO: 692871 - DNA, 15 bp, Homo sapiens
aggcataggaaattg

SEQ ID NO: 692872 - DNA, 15 bp, Homo sapiens
ggcataggaaattgg

SEQ ID NO: 692873 - DNA, 15 bp, Homo sapiens
gcataggaaattgga

SEQ ID NO: 692874 - DNA, 15 bp, Homo sapiens
cataggaaattggaa

SEQ ID NO: 692875 - DNA, 15 bp, Homo sapiens
ataggaaattggaaa

SEQ ID NO: 692876 - DNA, 15 bp, Homo sapiens
taggaaattggaaag

SEQ ID NO: 692877 - DNA, 15 bp, Homo sapiens
aggaaattggaaaga

SEQ ID NO: 692878 - DNA, 15 bp, Homo sapiens
ggaaattggaaagaa

SEQ ID NO: 692879 - DNA, 15 bp, Homo sapiens
gaaattggaaagaac

SEQ ID NO: 692880 - DNA, 15 bp, Homo sapiens
aaattggaaagaaca

SEQ ID NO: 692881 - DNA, 15 bp, Homo sapiens
aattggaaagaacac

SEQ ID NO: 692882 - DNA, 15 bp, Homo sapiens
attggaaagaacaca

SEQ ID NO: 692883 - DNA, 15 bp, Homo sapiens
ttggaaagaacacaa

SEQ ID NO: 692884 - DNA, 15 bp, Homo sapiens
tggaaagaacacaaa

SEQ ID NO: 692885 - DNA, 15 bp, Homo sapiens
ggaaagaacacaaat

SEQ ID NO: 692886 - DNA, 15 bp, Homo sapiens
gaaagaacacaaatt

SEQ ID NO: 692887 - DNA, 15 bp, Homo sapiens
aaagaacacaaattt

SEQ ID NO: 692888 - DNA, 15 bp, Homo sapiens
aagaacacaaatttg

SEQ ID NO: 692889 - DNA, 15 bp, Homo sapiens
agaacacaaatttgc

SEQ ID NO: 692890 - DNA, 15 bp, Homo sapiens
gaacacaaatttgct

SEQ ID NO: 692891 - DNA, 15 bp, Homo sapiens
aacacaaatttgctc

SEQ ID NO: 692892 - DNA, 15 bp, Homo sapiens
acacaaatttgctcc

SEQ ID NO: 692893 - DNA, 15 bp, Homo sapiens
cacaaatttgctcct

SEQ ID NO: 692894 - DNA, 15 bp, Homo sapiens
acaaatttgctcctt

SEQ ID NO: 692895 - DNA, 15 bp, Homo sapiens
caaatttgctccttg

SEQ ID NO: 692896 - DNA, 15 bp, Homo sapiens
aaatttgctccttgt

SEQ ID NO: 692897 - DNA, 15 bp, Homo sapiens
aatttgctccttgta

SEQ ID NO: 692898 - DNA, 15 bp, Homo sapiens
atttgctccttgtat

SEQ ID NO: 692899 - DNA, 15 bp, Homo sapiens
tttgctccttgtatg

SEQ ID NO: 692900 - DNA, 15 bp, Homo sapiens
ttgctccttgtatgt

SEQ ID NO: 692901 - DNA, 15 bp, Homo sapiens
tgctccttgtatgta

SEQ ID NO: 692902 - DNA, 15 bp, Homo sapiens
gctccttgtatgtac

SEQ ID NO: 692903 - DNA, 15 bp, Homo sapiens
ctccttgtatgtact

SEQ ID NO: 692904 - DNA, 15 bp, Homo sapiens
tccttgtatgtactc

SEQ ID NO: 692905 - DNA, 15 bp, Homo sapiens
ccttgtatgtactct

SEQ ID NO: 692906 - DNA, 15 bp, Homo sapiens
cttgtatgtactctt

SEQ ID NO: 692907 - DNA, 15 bp, Homo sapiens
ttgtatgtactcttt

SEQ ID NO: 692908 - DNA, 15 bp, Homo sapiens
tgtatgtactctttt

SEQ ID NO: 692909 - DNA, 15 bp, Homo sapiens
gtatgtactctttta

SEQ ID NO: 692910 - DNA, 15 bp, Homo sapiens
tatgtactcttttac

SEQ ID NO: 692911 - DNA, 15 bp, Homo sapiens
atgtactcttttacc

SEQ ID NO: 692912 - DNA, 15 bp, Homo sapiens
tgtactcttttacct

SEQ ID NO: 692913 - DNA, 15 bp, Homo sapiens
gtactcttttacctt

SEQ ID NO: 692914 - DNA, 15 bp, Homo sapiens
tactcttttaccttt

SEQ ID NO: 692915 - DNA, 15 bp, Homo sapiens
actcttttacctttt

SEQ ID NO: 692916 - DNA, 15 bp, Homo sapiens
ctcttttaccttttt

SEQ ID NO: 692917 - DNA, 15 bp, Homo sapiens
tcttttaccttttta

SEQ ID NO: 692918 - DNA, 15 bp, Homo sapiens
cttttacctttttac

SEQ ID NO: 692919 - DNA, 15 bp, Homo sapiens
ttttacctttttaca

SEQ ID NO: 692920 - DNA, 15 bp, Homo sapiens
tttacctttttacaa

SEQ ID NO: 692921 - DNA, 15 bp, Homo sapiens
ttacctttttacaag

SEQ ID NO: 692922 - DNA, 15 bp, Homo sapiens
tacctttttacaagg

SEQ ID NO: 692923 - DNA, 15 bp, Homo sapiens
acctttttacaagga

SEQ ID NO: 692924 - DNA, 15 bp, Homo sapiens
cctttttacaaggag

SEQ ID NO: 692925 - DNA, 15 bp, Homo sapiens
ctttttacaaggaga

SEQ ID NO: 692926 - DNA, 15 bp, Homo sapiens
tttttacaaggagat

SEQ ID NO: 692927 - DNA, 15 bp, Homo sapiens
ttttacaaggagata

SEQ ID NO: 692928 - DNA, 15 bp, Homo sapiens
tttacaaggagatat

SEQ ID NO: 692929 - DNA, 15 bp, Homo sapiens
ttacaaggagatatc

SEQ ID NO: 692930 - DNA, 15 bp, Homo sapiens
tacaaggagatatct

SEQ ID NO: 692931 - DNA, 15 bp, Homo sapiens
acaaggagatatctt

SEQ ID NO: 692932 - DNA, 15 bp, Homo sapiens
caaggagatatcttt

SEQ ID NO: 692933 - DNA, 15 bp, Homo sapiens
aaggagatatcttta

SEQ ID NO: 692934 - DNA, 15 bp, Homo sapiens
aggagatatctttat

SEQ ID NO: 692935 - DNA, 15 bp, Homo sapiens
ggagatatctttatg

SEQ ID NO: 692936 - DNA, 15 bp, Homo sapiens
gagatatctttatgt

SEQ ID NO: 692937 - DNA, 15 bp, Homo sapiens
agatatctttatgtg

SEQ ID NO: 692938 - DNA, 15 bp, Homo sapiens
gatatctttatgtgt

SEQ ID NO: 692939 - DNA, 15 bp, Homo sapiens
atatctttatgtgtt

SEQ ID NO: 692940 - DNA, 15 bp, Homo sapiens
tatctttatgtgtta

SEQ ID NO: 692941 - DNA, 15 bp, Homo sapiens
atctttatgtgttac

SEQ ID NO: 692942 - DNA, 15 bp, Homo sapiens
tctttatgtgttact

SEQ ID NO: 692943 - DNA, 15 bp, Homo sapiens
ctttatgtgttactt

SEQ ID NO: 692944 - DNA, 15 bp, Homo sapiens
tttatgtgttacttg

SEQ ID NO: 692945 - DNA, 15 bp, Homo sapiens
ttatgtgttacttgt

SEQ ID NO: 692946 - DNA, 15 bp, Homo sapiens
tatgtgttacttgta

SEQ ID NO: 692947 - DNA, 15 bp, Homo sapiens
atgtgttacttgtat

SEQ ID NO: 692948 - DNA, 15 bp, Homo sapiens
tgtgttacttgtata

SEQ ID NO: 692949 - DNA, 15 bp, Homo sapiens
gtgttacttgtataa

SEQ ID NO: 692950 - DNA, 15 bp, Homo sapiens
tgttacttgtataat

SEQ ID NO: 692951 - DNA, 15 bp, Homo sapiens
gttacttgtataatt

SEQ ID NO: 692952 - DNA, 15 bp, Homo sapiens
ttacttgtataattt

SEQ ID NO: 692953 - DNA, 15 bp, Homo sapiens
tacttgtataattta

SEQ ID NO: 692954 - DNA, 15 bp, Homo sapiens
acttgtataatttaa

SEQ ID NO: 692955 - DNA, 15 bp, Homo sapiens
cttgtataatttaat

SEQ ID NO: 692956 - DNA, 15 bp, Homo sapiens
ttgtataatttaatt

SEQ ID NO: 692957 - DNA, 15 bp, Homo sapiens
tgtataatttaattt

SEQ ID NO: 692958 - DNA, 15 bp, Homo sapiens
gtataatttaatttg

SEQ ID NO: 692959 - DNA, 15 bp, Homo sapiens
tataatttaatttga

SEQ ID NO: 692960 - DNA, 15 bp, Homo sapiens
ataatttaatttgaa

SEQ ID NO: 692961 - DNA, 15 bp, Homo sapiens
taatttaatttgaaa

SEQ ID NO: 692962 - DNA, 15 bp, Homo sapiens
aatttaatttgaaaa

SEQ ID NO: 692963 - DNA, 15 bp, Homo sapiens
atttaatttgaaaaa

SEQ ID NO: 692964 - DNA, 15 bp, Homo sapiens
tttaatttgaaaaat

SEQ ID NO: 692965 - DNA, 15 bp, Homo sapiens
ttaatttgaaaaatt

SEQ ID NO: 692966 - DNA, 15 bp, Homo sapiens
taatttgaaaaattt

SEQ ID NO: 692967 - DNA, 15 bp, Homo sapiens
aatttgaaaaattta

SEQ ID NO: 692968 - DNA, 15 bp, Homo sapiens
atttgaaaaatttaa

SEQ ID NO: 692969 - DNA, 15 bp, Homo sapiens
tttgaaaaatttaaa

SEQ ID NO: 692970 - DNA, 15 bp, Homo sapiens
ttgaaaaatttaaaa

SEQ ID NO: 692971 - DNA, 15 bp, Homo sapiens
tgaaaaatttaaaac

SEQ ID NO: 692972 - DNA, 15 bp, Homo sapiens
gaaaaatttaaaact

SEQ ID NO: 692973 - DNA, 15 bp, Homo sapiens
aaaaatttaaaactt

SEQ ID NO: 692974 - DNA, 15 bp, Homo sapiens
aaaatttaaaacttt

SEQ ID NO: 692975 - DNA, 15 bp, Homo sapiens
aaatttaaaactttg

SEQ ID NO: 692976 - DNA, 15 bp, Homo sapiens
aatttaaaactttgc

SEQ ID NO: 692977 - DNA, 15 bp, Homo sapiens
atttaaaactttgct

SEQ ID NO: 692978 - DNA, 15 bp, Homo sapiens
tttaaaactttgctg

SEQ ID NO: 692979 - DNA, 15 bp, Homo sapiens
ttaaaactttgctgc

SEQ ID NO: 692980 - DNA, 15 bp, Homo sapiens
taaaactttgctgcc

SEQ ID NO: 692981 - DNA, 15 bp, Homo sapiens
aaaactttgctgcca

SEQ ID NO: 692982 - DNA, 15 bp, Homo sapiens
aaactttgctgccat

SEQ ID NO: 692983 - DNA, 15 bp, Homo sapiens
aactttgctgccatt

SEQ ID NO: 692984 - DNA, 15 bp, Homo sapiens
actttgctgccattt

SEQ ID NO: 692985 - DNA, 15 bp, Homo sapiens
ctttgctgccatttg

SEQ ID NO: 692986 - DNA, 15 bp, Homo sapiens
tttgctgccatttgc

SEQ ID NO: 692987 - DNA, 15 bp, Homo sapiens
ttgctgccatttgca

SEQ ID NO: 692988 - DNA, 15 bp, Homo sapiens
tgctgccatttgcaa

SEQ ID NO: 692989 - DNA, 15 bp, Homo sapiens
gctgccatttgcaat

SEQ ID NO: 692990 - DNA, 15 bp, Homo sapiens
ctgccatttgcaatt

SEQ ID NO: 692991 - DNA, 15 bp, Homo sapiens
tgccatttgcaattt

SEQ ID NO: 692992 - DNA, 15 bp, Homo sapiens
gccatttgcaatttg

SEQ ID NO: 692993 - DNA, 15 bp, Homo sapiens
ccatttgcaatttgt

SEQ ID NO: 692994 - DNA, 15 bp, Homo sapiens
catttgcaatttgta

SEQ ID NO: 692995 - DNA, 15 bp, Homo sapiens
atttgcaatttgtaa

SEQ ID NO: 692996 - DNA, 15 bp, Homo sapiens
tttgcaatttgtaac

SEQ ID NO: 692997 - DNA, 15 bp, Homo sapiens
ttgcaatttgtaact

SEQ ID NO: 692998 - DNA, 15 bp, Homo sapiens
tgcaatttgtaactg

SEQ ID NO: 692999 - DNA, 15 bp, Homo sapiens
gcaatttgtaactgg

SEQ ID NO: 693000 - DNA, 15 bp, Homo sapiens
caatttgtaactgga

SEQ ID NO: 693001 - DNA, 15 bp, Homo sapiens
aatttgtaactggat

SEQ ID NO: 693002 - DNA, 15 bp, Homo sapiens
atttgtaactggata

SEQ ID NO: 693003 - DNA, 15 bp, Homo sapiens
tttgtaactggatat

SEQ ID NO: 693004 - DNA, 15 bp, Homo sapiens
ttgtaactggatatt

SEQ ID NO: 693005 - DNA, 15 bp, Homo sapiens
tgtaactggatattt

SEQ ID NO: 693006 - DNA, 15 bp, Homo sapiens
gtaactggatatttc

SEQ ID NO: 693007 - DNA, 15 bp, Homo sapiens
taactggatatttcc

SEQ ID NO: 693008 - DNA, 15 bp, Homo sapiens
aactggatatttccc

SEQ ID NO: 693009 - DNA, 15 bp, Homo sapiens
actggatatttccca

SEQ ID NO: 693010 - DNA, 15 bp, Homo sapiens
ctggatatttcccat

SEQ ID NO: 693011 - DNA, 15 bp, Homo sapiens
tggatatttcccatc

SEQ ID NO: 693012 - DNA, 15 bp, Homo sapiens
ggatatttcccatct

SEQ ID NO: 693013 - DNA, 15 bp, Homo sapiens
gatatttcccatctt

SEQ ID NO: 693014 - DNA, 15 bp, Homo sapiens
atatttcccatcttt

SEQ ID NO: 693015 - DNA, 15 bp, Homo sapiens
tatttcccatctttc

SEQ ID NO: 693016 - DNA, 15 bp, Homo sapiens
atttcccatctttct

SEQ ID NO: 693017 - DNA, 15 bp, Homo sapiens
tttcccatctttcta

SEQ ID NO: 693018 - DNA, 15 bp, Homo sapiens
ttcccatctttctat

SEQ ID NO: 693019 - DNA, 15 bp, Homo sapiens
tcccatctttctatt

SEQ ID NO: 693020 - DNA, 15 bp, Homo sapiens
cccatctttctattt

SEQ ID NO: 693021 - DNA, 15 bp, Homo sapiens
ccatctttctatttc

SEQ ID NO: 693022 - DNA, 15 bp, Homo sapiens
catctttctatttcc

SEQ ID NO: 693023 - DNA, 15 bp, Homo sapiens
atctttctatttcca

SEQ ID NO: 693024 - DNA, 15 bp, Homo sapiens
tctttctatttccaa

SEQ ID NO: 693025 - DNA, 15 bp, Homo sapiens
ctttctatttccaac

SEQ ID NO: 693026 - DNA, 15 bp, Homo sapiens
tttctatttccaaca

SEQ ID NO: 693027 - DNA, 15 bp, Homo sapiens
ttctatttccaacaa

SEQ ID NO: 693028 - DNA, 15 bp, Homo sapiens
tctatttccaacaac

SEQ ID NO: 693029 - DNA, 15 bp, Homo sapiens
ctatttccaacaact

SEQ ID NO: 693030 - DNA, 15 bp, Homo sapiens
tatttccaacaactg

SEQ ID NO: 693031 - DNA, 15 bp, Homo sapiens
atttccaacaactgt

SEQ ID NO: 693032 - DNA, 15 bp, Homo sapiens
tttccaacaactgta

SEQ ID NO: 693033 - DNA, 15 bp, Homo sapiens
ttccaacaactgtat

SEQ ID NO: 693034 - DNA, 15 bp, Homo sapiens
tccaacaactgtatt

SEQ ID NO: 693035 - DNA, 15 bp, Homo sapiens
ccaacaactgtattg

SEQ ID NO: 693036 - DNA, 15 bp, Homo sapiens
caacaactgtattgt

SEQ ID NO: 693037 - DNA, 15 bp, Homo sapiens
aacaactgtattgtt

SEQ ID NO: 693038 - DNA, 15 bp, Homo sapiens
acaactgtattgttc

SEQ ID NO: 693039 - DNA, 15 bp, Homo sapiens
caactgtattgttcc

SEQ ID NO: 693040 - DNA, 15 bp, Homo sapiens
aactgtattgttccc

SEQ ID NO: 693041 - DNA, 15 bp, Homo sapiens
actgtattgttcccc

SEQ ID NO: 693042 - DNA, 15 bp, Homo sapiens
ctgtattgttcccca

SEQ ID NO: 693043 - DNA, 15 bp, Homo sapiens
tgtattgttccccaa

SEQ ID NO: 693044 - DNA, 15 bp, Homo sapiens
gtattgttccccaaa

SEQ ID NO: 693045 - DNA, 15 bp, Homo sapiens
tattgttccccaaaa

SEQ ID NO: 693046 - DNA, 15 bp, Homo sapiens
attgttccccaaaac

SEQ ID NO: 693047 - DNA, 15 bp, Homo sapiens
ttgttccccaaaact

SEQ ID NO: 693048 - DNA, 15 bp, Homo sapiens
tgttccccaaaactg

SEQ ID NO: 693049 - DNA, 15 bp, Homo sapiens
gttccccaaaactgt

SEQ ID NO: 693050 - DNA, 15 bp, Homo sapiens
ttccccaaaactgtt

SEQ ID NO: 693051 - DNA, 15 bp, Homo sapiens
tccccaaaactgttt

SEQ ID NO: 693052 - DNA, 15 bp, Homo sapiens
ccccaaaactgtttt

SEQ ID NO: 693053 - DNA, 15 bp, Homo sapiens
cccaaaactgtttta

SEQ ID NO: 693054 - DNA, 15 bp, Homo sapiens
ccaaaactgttttac

SEQ ID NO: 693055 - DNA, 15 bp, Homo sapiens
caaaactgttttact

SEQ ID NO: 693056 - DNA, 15 bp, Homo sapiens
aaaactgttttactg

SEQ ID NO: 693057 - DNA, 15 bp, Homo sapiens
aaactgttttactgg

SEQ ID NO: 693058 - DNA, 15 bp, Homo sapiens
aactgttttactggt

SEQ ID NO: 693059 - DNA, 15 bp, Homo sapiens
actgttttactggtg

SEQ ID NO: 693060 - DNA, 15 bp, Homo sapiens
ctgttttactggtga

SEQ ID NO: 693061 - DNA, 15 bp, Homo sapiens
tgttttactggtgat

SEQ ID NO: 693062 - DNA, 15 bp, Homo sapiens
gttttactggtgatc

SEQ ID NO: 693063 - DNA, 15 bp, Homo sapiens
ttttactggtgatct

SEQ ID NO: 693064 - DNA, 15 bp, Homo sapiens
tttactggtgatctt

SEQ ID NO: 693065 - DNA, 15 bp, Homo sapiens
ttactggtgatcttc

SEQ ID NO: 693066 - DNA, 15 bp, Homo sapiens
tactggtgatcttcc

SEQ ID NO: 693067 - DNA, 15 bp, Homo sapiens
actggtgatcttcca

SEQ ID NO: 693068 - DNA, 15 bp, Homo sapiens
ctggtgatcttccag

SEQ ID NO: 693069 - DNA, 15 bp, Homo sapiens
tggtgatcttccagg

SEQ ID NO: 693070 - DNA, 15 bp, Homo sapiens
ggtgatcttccagga

SEQ ID NO: 693071 - DNA, 15 bp, Homo sapiens
gtgatcttccaggac

SEQ ID NO: 693072 - DNA, 15 bp, Homo sapiens
tgatcttccaggaca

SEQ ID NO: 693073 - DNA, 15 bp, Homo sapiens
gatcttccaggacat

SEQ ID NO: 693074 - DNA, 15 bp, Homo sapiens
atcttccaggacatc

SEQ ID NO: 693075 - DNA, 15 bp, Homo sapiens
tcttccaggacatcc

SEQ ID NO: 693076 - DNA, 15 bp, Homo sapiens
cttccaggacatcct

SEQ ID NO: 693077 - DNA, 15 bp, Homo sapiens
ttccaggacatcctt

SEQ ID NO: 693078 - DNA, 15 bp, Homo sapiens
tccaggacatcctta

SEQ ID NO: 693079 - DNA, 15 bp, Homo sapiens
ccaggacatccttac

SEQ ID NO: 693080 - DNA, 15 bp, Homo sapiens
caggacatccttacc

SEQ ID NO: 693081 - DNA, 15 bp, Homo sapiens
aggacatccttacca

SEQ ID NO: 693082 - DNA, 15 bp, Homo sapiens
ggacatccttaccac

SEQ ID NO: 693083 - DNA, 15 bp, Homo sapiens
gacatccttaccact

SEQ ID NO: 693084 - DNA, 15 bp, Homo sapiens
acatccttaccactt

SEQ ID NO: 693085 - DNA, 15 bp, Homo sapiens
catccttaccacttt

SEQ ID NO: 693086 - DNA, 15 bp, Homo sapiens
atccttaccactttg

SEQ ID NO: 693087 - DNA, 15 bp, Homo sapiens
tccttaccactttgg

SEQ ID NO: 693088 - DNA, 15 bp, Homo sapiens
ccttaccactttggt

SEQ ID NO: 693089 - DNA, 15 bp, Homo sapiens
cttaccactttggtg

SEQ ID NO: 693090 - DNA, 15 bp, Homo sapiens
ttaccactttggtgc

SEQ ID NO: 693091 - DNA, 15 bp, Homo sapiens
taccactttggtgcg

SEQ ID NO: 693092 - DNA, 15 bp, Homo sapiens
accactttggtgcga

SEQ ID NO: 693093 - DNA, 15 bp, Homo sapiens
ccactttggtgcgaa

SEQ ID NO: 693094 - DNA, 15 bp, Homo sapiens
cactttggtgcgaaa

SEQ ID NO: 693095 - DNA, 15 bp, Homo sapiens
actttggtgcgaaag

SEQ ID NO: 693096 - DNA, 15 bp, Homo sapiens
ctttggtgcgaaagc

SEQ ID NO: 693097 - DNA, 15 bp, Homo sapiens
tttggtgcgaaagcc

SEQ ID NO: 693098 - DNA, 15 bp, Homo sapiens
ttggtgcgaaagcca

SEQ ID NO: 693099 - DNA, 15 bp, Homo sapiens
tggtgcgaaagccat

SEQ ID NO: 693100 - DNA, 15 bp, Homo sapiens
ggtgcgaaagccatt

SEQ ID NO: 693101 - DNA, 15 bp, Homo sapiens
gtgcgaaagccattg

SEQ ID NO: 693102 - DNA, 15 bp, Homo sapiens
tgcgaaagccattga

SEQ ID NO: 693103 - DNA, 15 bp, Homo sapiens
gcgaaagccattgat

SEQ ID NO: 693104 - DNA, 15 bp, Homo sapiens
cgaaagccattgata

SEQ ID NO: 693105 - DNA, 15 bp, Homo sapiens
gaaagccattgatac

SEQ ID NO: 693106 - DNA, 15 bp, Homo sapiens
aaagccattgatacg

SEQ ID NO: 693107 - DNA, 15 bp, Homo sapiens
aagccattgatacgc

SEQ ID NO: 693108 - DNA, 15 bp, Homo sapiens
agccattgatacgct

SEQ ID NO: 693109 - DNA, 15 bp, Homo sapiens
gccattgatacgctc

SEQ ID NO: 693110 - DNA, 15 bp, Homo sapiens
ccattgatacgctcc

SEQ ID NO: 693111 - DNA, 15 bp, Homo sapiens
cattgatacgctcca

SEQ ID NO: 693112 - DNA, 15 bp, Homo sapiens
attgatacgctccac

SEQ ID NO: 693113 - DNA, 15 bp, Homo sapiens
ttgatacgctccact

SEQ ID NO: 693114 - DNA, 15 bp, Homo sapiens
tgatacgctccactg

SEQ ID NO: 693115 - DNA, 15 bp, Homo sapiens
gatacgctccactga

SEQ ID NO: 693116 - DNA, 15 bp, Homo sapiens
atacgctccactgat

SEQ ID NO: 693117 - DNA, 15 bp, Homo sapiens
tacgctccactgatg

SEQ ID NO: 693118 - DNA, 15 bp, Homo sapiens
acgctccactgatgt

SEQ ID NO: 693119 - DNA, 15 bp, Homo sapiens
cgctccactgatgtt

SEQ ID NO: 693120 - DNA, 15 bp, Homo sapiens
gctccactgatgtta

SEQ ID NO: 693121 - DNA, 15 bp, Homo sapiens
ctccactgatgttat

SEQ ID NO: 693122 - DNA, 15 bp, Homo sapiens
tccactgatgttatt

SEQ ID NO: 693123 - DNA, 15 bp, Homo sapiens
ccactgatgttattc

SEQ ID NO: 693124 - DNA, 15 bp, Homo sapiens
cactgatgttattca

SEQ ID NO: 693125 - DNA, 15 bp, Homo sapiens
actgatgttattcag

SEQ ID NO: 693126 - DNA, 15 bp, Homo sapiens
ctgatgttattcagc

SEQ ID NO: 693127 - DNA, 15 bp, Homo sapiens
tgatgttattcagct

SEQ ID NO: 693128 - DNA, 15 bp, Homo sapiens
gatgttattcagctt

SEQ ID NO: 693129 - DNA, 15 bp, Homo sapiens
atgttattcagcttt

SEQ ID NO: 693130 - DNA, 15 bp, Homo sapiens
tgttattcagctttg

SEQ ID NO: 693131 - DNA, 15 bp, Homo sapiens
gttattcagctttgc

SEQ ID NO: 693132 - DNA, 15 bp, Homo sapiens
ttattcagctttgcc

SEQ ID NO: 693133 - DNA, 15 bp, Homo sapiens
tattcagctttgcca

SEQ ID NO: 693134 - DNA, 15 bp, Homo sapiens
attcagctttgccaa

SEQ ID NO: 693135 - DNA, 15 bp, Homo sapiens
ttcagctttgccaag

SEQ ID NO: 693136 - DNA, 15 bp, Homo sapiens
tcagctttgccaagt

SEQ ID NO: 693137 - DNA, 15 bp, Homo sapiens
cagctttgccaagtt

SEQ ID NO: 693138 - DNA, 15 bp, Homo sapiens
agctttgccaagttt

SEQ ID NO: 693139 - DNA, 15 bp, Homo sapiens
gctttgccaagtttt

SEQ ID NO: 693140 - DNA, 15 bp, Homo sapiens
ctttgccaagtttta

SEQ ID NO: 693141 - DNA, 15 bp, Homo sapiens
tttgccaagttttac

SEQ ID NO: 693142 - DNA, 15 bp, Homo sapiens
ttgccaagttttact

SEQ ID NO: 693143 - DNA, 15 bp, Homo sapiens
tgccaagttttactt

SEQ ID NO: 693144 - DNA, 15 bp, Homo sapiens
gccaagttttacttg

SEQ ID NO: 693145 - DNA, 15 bp, Homo sapiens
ccaagttttacttgt

SEQ ID NO: 693146 - DNA, 15 bp, Homo sapiens
caagttttacttgta

SEQ ID NO: 693147 - DNA, 15 bp, Homo sapiens
aagttttacttgtat

SEQ ID NO: 693148 - DNA, 15 bp, Homo sapiens
agttttacttgtatt

SEQ ID NO: 693149 - DNA, 15 bp, Homo sapiens
gttttacttgtattc

SEQ ID NO: 693150 - DNA, 15 bp, Homo sapiens
ttttacttgtattcc

SEQ ID NO: 693151 - DNA, 15 bp, Homo sapiens
tttacttgtattcct

SEQ ID NO: 693152 - DNA, 15 bp, Homo sapiens
ttacttgtattcctt

SEQ ID NO: 693153 - DNA, 15 bp, Homo sapiens
tacttgtattccttt

SEQ ID NO: 693154 - DNA, 15 bp, Homo sapiens
acttgtattcctttg

SEQ ID NO: 693155 - DNA, 15 bp, Homo sapiens
cttgtattcctttgt

SEQ ID NO: 693156 - DNA, 15 bp, Homo sapiens
ttgtattcctttgtg

SEQ ID NO: 693157 - DNA, 15 bp, Homo sapiens
tgtattcctttgtgt

SEQ ID NO: 693158 - DNA, 15 bp, Homo sapiens
gtattcctttgtgtg

SEQ ID NO: 693159 - DNA, 15 bp, Homo sapiens
tattcctttgtgtgt

SEQ ID NO: 693160 - DNA, 15 bp, Homo sapiens
attcctttgtgtgtc

SEQ ID NO: 693161 - DNA, 15 bp, Homo sapiens
ttcctttgtgtgtct

SEQ ID NO: 693162 - DNA, 15 bp, Homo sapiens
tcctttgtgtgtctg

SEQ ID NO: 693163 - DNA, 15 bp, Homo sapiens
cctttgtgtgtctgt

SEQ ID NO: 693164 - DNA, 15 bp, Homo sapiens
ctttgtgtgtctgtg

SEQ ID NO: 693165 - DNA, 15 bp, Homo sapiens
tttgtgtgtctgtgt

SEQ ID NO: 693166 - DNA, 15 bp, Homo sapiens
ttgtgtgtctgtgtg

SEQ ID NO: 693167 - DNA, 15 bp, Homo sapiens
tgtgtgtctgtgtgt

SEQ ID NO: 693168 - DNA, 15 bp, Homo sapiens
gtgtgtctgtgtgta

SEQ ID NO: 693169 - DNA, 15 bp, Homo sapiens
tgtgtctgtgtgtat

SEQ ID NO: 693170 - DNA, 15 bp, Homo sapiens
gtgtctgtgtgtata

SEQ ID NO: 693171 - DNA, 15 bp, Homo sapiens
tgtctgtgtgtatat

SEQ ID NO: 693172 - DNA, 15 bp, Homo sapiens
gtctgtgtgtatatt

SEQ ID NO: 693173 - DNA, 15 bp, Homo sapiens
tctgtgtgtatatta

SEQ ID NO: 693174 - DNA, 15 bp, Homo sapiens
ctgtgtgtatattaa

SEQ ID NO: 693175 - DNA, 15 bp, Homo sapiens
tgtgtgtatattaag

SEQ ID NO: 693176 - DNA, 15 bp, Homo sapiens
gtgtgtatattaagt

SEQ ID NO: 693177 - DNA, 15 bp, Homo sapiens
tgtgtatattaagtt

SEQ ID NO: 693178 - DNA, 15 bp, Homo sapiens
gtgtatattaagttc

SEQ ID NO: 693179 - DNA, 15 bp, Homo sapiens
tgtatattaagttct

SEQ ID NO: 693180 - DNA, 15 bp, Homo sapiens
gtatattaagttcta

SEQ ID NO: 693181 - DNA, 15 bp, Homo sapiens
tatattaagttctat

SEQ ID NO: 693182 - DNA, 15 bp, Homo sapiens
atattaagttctata

SEQ ID NO: 693183 - DNA, 15 bp, Homo sapiens
tattaagttctatac

SEQ ID NO: 693184 - DNA, 15 bp, Homo sapiens
attaagttctataca

SEQ ID NO: 693185 - DNA, 15 bp, Homo sapiens
ttaagttctatacaa

SEQ ID NO: 693186 - DNA, 15 bp, Homo sapiens
taagttctatacaat

SEQ ID NO: 693187 - DNA, 15 bp, Homo sapiens
aagttctatacaatt

SEQ ID NO: 693188 - DNA, 15 bp, Homo sapiens
agttctatacaattt

SEQ ID NO: 693189 - DNA, 15 bp, Homo sapiens
gttctatacaatttt

SEQ ID NO: 693190 - DNA, 15 bp, Homo sapiens
ttctatacaatttta

SEQ ID NO: 693191 - DNA, 15 bp, Homo sapiens
tctatacaattttat

SEQ ID NO: 693192 - DNA, 15 bp, Homo sapiens
ctatacaattttatc

SEQ ID NO: 693193 - DNA, 15 bp, Homo sapiens
tatacaattttatca

SEQ ID NO: 693194 - DNA, 15 bp, Homo sapiens
atacaattttatcac

SEQ ID NO: 693195 - DNA, 15 bp, Homo sapiens
tacaattttatcacc

SEQ ID NO: 693196 - DNA, 15 bp, Homo sapiens
acaattttatcacct

SEQ ID NO: 693197 - DNA, 15 bp, Homo sapiens
caattttatcacctg

SEQ ID NO: 693198 - DNA, 15 bp, Homo sapiens
aattttatcacctgc

SEQ ID NO: 693199 - DNA, 15 bp, Homo sapiens
attttatcacctgca

SEQ ID NO: 693200 - DNA, 15 bp, Homo sapiens
ttttatcacctgcat

SEQ ID NO: 693201 - DNA, 15 bp, Homo sapiens
tttatcacctgcata

SEQ ID NO: 693202 - DNA, 15 bp, Homo sapiens
ttatcacctgcatag

SEQ ID NO: 693203 - DNA, 15 bp, Homo sapiens
tatcacctgcatagg

SEQ ID NO: 693204 - DNA, 15 bp, Homo sapiens
atcacctgcataggt

SEQ ID NO: 693205 - DNA, 15 bp, Homo sapiens
tcacctgcataggtt

SEQ ID NO: 693206 - DNA, 15 bp, Homo sapiens
cacctgcataggttc

SEQ ID NO: 693207 - DNA, 15 bp, Homo sapiens
acctgcataggttca

SEQ ID NO: 693208 - DNA, 15 bp, Homo sapiens
cctgcataggttcat

SEQ ID NO: 693209 - DNA, 15 bp, Homo sapiens
ctgcataggttcatg

SEQ ID NO: 693210 - DNA, 15 bp, Homo sapiens
tgcataggttcatgt

SEQ ID NO: 693211 - DNA, 15 bp, Homo sapiens
gcataggttcatgta

SEQ ID NO: 693212 - DNA, 15 bp, Homo sapiens
cataggttcatgtat

SEQ ID NO: 693213 - DNA, 15 bp, Homo sapiens
ataggttcatgtatt

SEQ ID NO: 693214 - DNA, 15 bp, Homo sapiens
taggttcatgtattt

SEQ ID NO: 693215 - DNA, 15 bp, Homo sapiens
aggttcatgtatttg

SEQ ID NO: 693216 - DNA, 15 bp, Homo sapiens
ggttcatgtatttgc

SEQ ID NO: 693217 - DNA, 15 bp, Homo sapiens
gttcatgtatttgct

SEQ ID NO: 693218 - DNA, 15 bp, Homo sapiens
ttcatgtatttgcta

SEQ ID NO: 693219 - DNA, 15 bp, Homo sapiens
tcatgtatttgctac

SEQ ID NO: 693220 - DNA, 15 bp, Homo sapiens
catgtatttgctacc

SEQ ID NO: 693221 - DNA, 15 bp, Homo sapiens
atgtatttgctacca

SEQ ID NO: 693222 - DNA, 15 bp, Homo sapiens
tgtatttgctaccac

SEQ ID NO: 693223 - DNA, 15 bp, Homo sapiens
gtatttgctaccaca

SEQ ID NO: 693224 - DNA, 15 bp, Homo sapiens
tatttgctaccacag

SEQ ID NO: 693225 - DNA, 15 bp, Homo sapiens
atttgctaccacagt

SEQ ID NO: 693226 - DNA, 15 bp, Homo sapiens
tttgctaccacagtc

SEQ ID NO: 693227 - DNA, 15 bp, Homo sapiens
ttgctaccacagtcg

SEQ ID NO: 693228 - DNA, 15 bp, Homo sapiens
tgctaccacagtcga

SEQ ID NO: 693229 - DNA, 15 bp, Homo sapiens
gctaccacagtcgag

SEQ ID NO: 693230 - DNA, 15 bp, Homo sapiens
ctaccacagtcgaga

SEQ ID NO: 693231 - DNA, 15 bp, Homo sapiens
taccacagtcgagac

SEQ ID NO: 693232 - DNA, 15 bp, Homo sapiens
accacagtcgagaca

SEQ ID NO: 693233 - DNA, 15 bp, Homo sapiens
ccacagtcgagacac

SEQ ID NO: 693234 - DNA, 15 bp, Homo sapiens
cacagtcgagacacc

SEQ ID NO: 693235 - DNA, 15 bp, Homo sapiens
acagtcgagacacca

SEQ ID NO: 693236 - DNA, 15 bp, Homo sapiens
cagtcgagacaccaa

SEQ ID NO: 693237 - DNA, 15 bp, Homo sapiens
agtcgagacaccaac

SEQ ID NO: 693238 - DNA, 15 bp, Homo sapiens
gtcgagacaccaact

SEQ ID NO: 693239 - DNA, 15 bp, Homo sapiens
tcgagacaccaactt

SEQ ID NO: 693240 - DNA, 15 bp, Homo sapiens
cgagacaccaactta

SEQ ID NO: 693241 - DNA, 15 bp, Homo sapiens
gagacaccaacttaa

SEQ ID NO: 693242 - DNA, 15 bp, Homo sapiens
agacaccaacttaat

SEQ ID NO: 693243 - DNA, 15 bp, Homo sapiens
gacaccaacttaatt

SEQ ID NO: 693244 - DNA, 15 bp, Homo sapiens
acaccaacttaattc

SEQ ID NO: 693245 - DNA, 15 bp, Homo sapiens
caccaacttaattcc

SEQ ID NO: 693246 - DNA, 15 bp, Homo sapiens
accaacttaattcca

SEQ ID NO: 693247 - DNA, 15 bp, Homo sapiens
ccaacttaattccac

SEQ ID NO: 693248 - DNA, 15 bp, Homo sapiens
caacttaattccact

SEQ ID NO: 693249 - DNA, 15 bp, Homo sapiens
aacttaattccacta

SEQ ID NO: 693250 - DNA, 15 bp, Homo sapiens
acttaattccactag

SEQ ID NO: 693251 - DNA, 15 bp, Homo sapiens
cttaattccactagc

SEQ ID NO: 693252 - DNA, 15 bp, Homo sapiens
ttaattccactagca

SEQ ID NO: 693253 - DNA, 15 bp, Homo sapiens
taattccactagcac

SEQ ID NO: 693254 - DNA, 15 bp, Homo sapiens
aattccactagcaca

SEQ ID NO: 693255 - DNA, 15 bp, Homo sapiens
attccactagcacaa

SEQ ID NO: 693256 - DNA, 15 bp, Homo sapiens
ttccactagcacaaa

SEQ ID NO: 693257 - DNA, 15 bp, Homo sapiens
tccactagcacaaag

SEQ ID NO: 693258 - DNA, 15 bp, Homo sapiens
ccactagcacaaaga

SEQ ID NO: 693259 - DNA, 15 bp, Homo sapiens
cactagcacaaagat

SEQ ID NO: 693260 - DNA, 15 bp, Homo sapiens
actagcacaaagatc

SEQ ID NO: 693261 - DNA, 15 bp, Homo sapiens
ctagcacaaagatcc

SEQ ID NO: 693262 - DNA, 15 bp, Homo sapiens
tagcacaaagatcct

SEQ ID NO: 693263 - DNA, 15 bp, Homo sapiens
agcacaaagatcctg

SEQ ID NO: 693264 - DNA, 15 bp, Homo sapiens
gcacaaagatcctgt

SEQ ID NO: 693265 - DNA, 15 bp, Homo sapiens
cacaaagatcctgtg

SEQ ID NO: 693266 - DNA, 15 bp, Homo sapiens
acaaagatcctgtgt

SEQ ID NO: 693267 - DNA, 15 bp, Homo sapiens
caaagatcctgtgtt

SEQ ID NO: 693268 - DNA, 15 bp, Homo sapiens
aaagatcctgtgttg

SEQ ID NO: 693269 - DNA, 15 bp, Homo sapiens
aagatcctgtgttgc

SEQ ID NO: 693270 - DNA, 15 bp, Homo sapiens
agatcctgtgttgcc

SEQ ID NO: 693271 - DNA, 15 bp, Homo sapiens
gatcctgtgttgccg

SEQ ID NO: 693272 - DNA, 15 bp, Homo sapiens
atcctgtgttgccgt

SEQ ID NO: 693273 - DNA, 15 bp, Homo sapiens
tcctgtgttgccgtt

SEQ ID NO: 693274 - DNA, 15 bp, Homo sapiens
cctgtgttgccgttt

SEQ ID NO: 693275 - DNA, 15 bp, Homo sapiens
ctgtgttgccgtttt

SEQ ID NO: 693276 - DNA, 15 bp, Homo sapiens
tgtgttgccgtttta

SEQ ID NO: 693277 - DNA, 15 bp, Homo sapiens
gtgttgccgttttat

SEQ ID NO: 693278 - DNA, 15 bp, Homo sapiens
tgttgccgttttata

SEQ ID NO: 693279 - DNA, 15 bp, Homo sapiens
gttgccgttttatag

SEQ ID NO: 693280 - DNA, 15 bp, Homo sapiens
ttgccgttttataga

SEQ ID NO: 693281 - DNA, 15 bp, Homo sapiens
tgccgttttatagac

SEQ ID NO: 693282 - DNA, 15 bp, Homo sapiens
gccgttttatagaca

SEQ ID NO: 693283 - DNA, 15 bp, Homo sapiens
ccgttttatagacat

SEQ ID NO: 693284 - DNA, 15 bp, Homo sapiens
cgttttatagacata

SEQ ID NO: 693285 - DNA, 15 bp, Homo sapiens
gttttatagacataa

SEQ ID NO: 693286 - DNA, 15 bp, Homo sapiens
ttttatagacataac

SEQ ID NO: 693287 - DNA, 15 bp, Homo sapiens
tttatagacataacc

SEQ ID NO: 693288 - DNA, 15 bp, Homo sapiens
ttatagacataacct

SEQ ID NO: 693289 - DNA, 15 bp, Homo sapiens
tatagacataacctc

SEQ ID NO: 693290 - DNA, 15 bp, Homo sapiens
atagacataacctcc

SEQ ID NO: 693291 - DNA, 15 bp, Homo sapiens
tagacataacctcct

SEQ ID NO: 693292 - DNA, 15 bp, Homo sapiens
agacataacctcctc

SEQ ID NO: 693293 - DNA, 15 bp, Homo sapiens
gacataacctcctcc

SEQ ID NO: 693294 - DNA, 15 bp, Homo sapiens
acataacctcctcct

SEQ ID NO: 693295 - DNA, 15 bp, Homo sapiens
cataacctcctcctt

SEQ ID NO: 693296 - DNA, 15 bp, Homo sapiens
ataacctcctccttc

SEQ ID NO: 693297 - DNA, 15 bp, Homo sapiens
taacctcctccttcc

SEQ ID NO: 693298 - DNA, 15 bp, Homo sapiens
aacctcctccttccc

SEQ ID NO: 693299 - DNA, 15 bp, Homo sapiens
acctcctccttcccg

SEQ ID NO: 693300 - DNA, 15 bp, Homo sapiens
cctcctccttcccga

SEQ ID NO: 693301 - DNA, 15 bp, Homo sapiens
ctcctccttcccgac

SEQ ID NO: 693302 - DNA, 15 bp, Homo sapiens
tcctccttcccgacc

SEQ ID NO: 693303 - DNA, 15 bp, Homo sapiens
cctccttcccgaccc

SEQ ID NO: 693304 - DNA, 15 bp, Homo sapiens
ctccttcccgacccc

SEQ ID NO: 693305 - DNA, 15 bp, Homo sapiens
tccttcccgacccct

SEQ ID NO: 693306 - DNA, 15 bp, Homo sapiens
ccttcccgacccctc

SEQ ID NO: 693307 - DNA, 15 bp, Homo sapiens
cttcccgacccctcc

SEQ ID NO: 693308 - DNA, 15 bp, Homo sapiens
ttcccgacccctccc

SEQ ID NO: 693309 - DNA, 15 bp, Homo sapiens
tcccgacccctcccc

SEQ ID NO: 693310 - DNA, 15 bp, Homo sapiens
cccgacccctcccct

SEQ ID NO: 693311 - DNA, 15 bp, Homo sapiens
ccgacccctcccctg

SEQ ID NO: 693312 - DNA, 15 bp, Homo sapiens
cgacccctcccctgg

SEQ ID NO: 693313 - DNA, 15 bp, Homo sapiens
gacccctcccctggt

SEQ ID NO: 693314 - DNA, 15 bp, Homo sapiens
acccctcccctggtc

SEQ ID NO: 693315 - DNA, 15 bp, Homo sapiens
cccctcccctggtct

SEQ ID NO: 693316 - DNA, 15 bp, Homo sapiens
ccctcccctggtctc

SEQ ID NO: 693317 - DNA, 15 bp, Homo sapiens
cctcccctggtctcc

SEQ ID NO: 693318 - DNA, 15 bp, Homo sapiens
ctcccctggtctccc

SEQ ID NO: 693319 - DNA, 15 bp, Homo sapiens
tcccctggtctcccc

SEQ ID NO: 693320 - DNA, 15 bp, Homo sapiens
cccctggtctcccca

SEQ ID NO: 693321 - DNA, 15 bp, Homo sapiens
ccctggtctccccat

SEQ ID NO: 693322 - DNA, 15 bp, Homo sapiens
cctggtctccccatc

SEQ ID NO: 693323 - DNA, 15 bp, Homo sapiens
ctggtctccccatcc

SEQ ID NO: 693324 - DNA, 15 bp, Homo sapiens
tggtctccccatcca

SEQ ID NO: 693325 - DNA, 15 bp, Homo sapiens
ggtctccccatccat

SEQ ID NO: 693326 - DNA, 15 bp, Homo sapiens
gtctccccatccata

SEQ ID NO: 693327 - DNA, 15 bp, Homo sapiens
tctccccatccatag

SEQ ID NO: 693328 - DNA, 15 bp, Homo sapiens
ctccccatccatagt

SEQ ID NO: 693329 - DNA, 15 bp, Homo sapiens
tccccatccatagtt

SEQ ID NO: 693330 - DNA, 15 bp, Homo sapiens
ccccatccatagttc

SEQ ID NO: 693331 - DNA, 15 bp, Homo sapiens
cccatccatagttct

SEQ ID NO: 693332 - DNA, 15 bp, Homo sapiens
ccatccatagttcta

SEQ ID NO: 693333 - DNA, 15 bp, Homo sapiens
catccatagttctat

SEQ ID NO: 693334 - DNA, 15 bp, Homo sapiens
atccatagttctatc

SEQ ID NO: 693335 - DNA, 15 bp, Homo sapiens
tccatagttctatcc

SEQ ID NO: 693336 - DNA, 15 bp, Homo sapiens
ccatagttctatccc

SEQ ID NO: 693337 - DNA, 15 bp, Homo sapiens
catagttctatccct

SEQ ID NO: 693338 - DNA, 15 bp, Homo sapiens
atagttctatccctg

SEQ ID NO: 693339 - DNA, 15 bp, Homo sapiens
tagttctatccctgc

SEQ ID NO: 693340 - DNA, 15 bp, Homo sapiens
agttctatccctgcc

SEQ ID NO: 693341 - DNA, 15 bp, Homo sapiens
gttctatccctgccc

SEQ ID NO: 693342 - DNA, 15 bp, Homo sapiens
ttctatccctgccct

SEQ ID NO: 693343 - DNA, 15 bp, Homo sapiens
tctatccctgccctc

SEQ ID NO: 693344 - DNA, 15 bp, Homo sapiens
ctatccctgccctct

SEQ ID NO: 693345 - DNA, 15 bp, Homo sapiens
tatccctgccctctg

SEQ ID NO: 693346 - DNA, 15 bp, Homo sapiens
atccctgccctctga

SEQ ID NO: 693347 - DNA, 15 bp, Homo sapiens
tccctgccctctgac

SEQ ID NO: 693348 - DNA, 15 bp, Homo sapiens
ccctgccctctgacc

SEQ ID NO: 693349 - DNA, 15 bp, Homo sapiens
cctgccctctgacca

SEQ ID NO: 693350 - DNA, 15 bp, Homo sapiens
ctgccctctgaccac

SEQ ID NO: 693351 - DNA, 15 bp, Homo sapiens
tgccctctgaccacc

SEQ ID NO: 693352 - DNA, 15 bp, Homo sapiens
gccctctgaccacca

SEQ ID NO: 693353 - DNA, 15 bp, Homo sapiens
ccctctgaccaccac

SEQ ID NO: 693354 - DNA, 15 bp, Homo sapiens
cctctgaccaccact

SEQ ID NO: 693355 - DNA, 15 bp, Homo sapiens
ctctgaccaccacta

SEQ ID NO: 693356 - DNA, 15 bp, Homo sapiens
tctgaccaccactaa

SEQ ID NO: 693357 - DNA, 15 bp, Homo sapiens
ctgaccaccactaat

SEQ ID NO: 693358 - DNA, 15 bp, Homo sapiens
tgaccaccactaatc

SEQ ID NO: 693359 - DNA, 15 bp, Homo sapiens
gaccaccactaatct

SEQ ID NO: 693360 - DNA, 15 bp, Homo sapiens
accaccactaatctg

SEQ ID NO: 693361 - DNA, 15 bp, Homo sapiens
ccaccactaatctgc

SEQ ID NO: 693362 - DNA, 15 bp, Homo sapiens
caccactaatctgcc

SEQ ID NO: 693363 - DNA, 15 bp, Homo sapiens
accactaatctgcct

SEQ ID NO: 693364 - DNA, 15 bp, Homo sapiens
ccactaatctgcctc

SEQ ID NO: 693365 - DNA, 15 bp, Homo sapiens
cactaatctgcctcc

SEQ ID NO: 693366 - DNA, 15 bp, Homo sapiens
actaatctgcctcca

SEQ ID NO: 693367 - DNA, 15 bp, Homo sapiens
ctaatctgcctccat

SEQ ID NO: 693368 - DNA, 15 bp, Homo sapiens
taatctgcctccatt

SEQ ID NO: 693369 - DNA, 15 bp, Homo sapiens
aatctgcctccattt

SEQ ID NO: 693370 - DNA, 15 bp, Homo sapiens
atctgcctccatttc

SEQ ID NO: 693371 - DNA, 15 bp, Homo sapiens
tctgcctccatttct

SEQ ID NO: 693372 - DNA, 15 bp, Homo sapiens
ctgcctccatttcta

SEQ ID NO: 693373 - DNA, 15 bp, Homo sapiens
tgcctccatttctaa

SEQ ID NO: 693374 - DNA, 15 bp, Homo sapiens
gcctccatttctaaa

SEQ ID NO: 693375 - DNA, 15 bp, Homo sapiens
cctccatttctaaaa

SEQ ID NO: 693376 - DNA, 15 bp, Homo sapiens
ctccatttctaaaat

SEQ ID NO: 693377 - DNA, 15 bp, Homo sapiens
tccatttctaaaatg

SEQ ID NO: 693378 - DNA, 15 bp, Homo sapiens
ccatttctaaaatgt

SEQ ID NO: 693379 - DNA, 15 bp, Homo sapiens
catttctaaaatgtt

SEQ ID NO: 693380 - DNA, 15 bp, Homo sapiens
atttctaaaatgttt

SEQ ID NO: 693381 - DNA, 15 bp, Homo sapiens
tttctaaaatgtttt

SEQ ID NO: 693382 - DNA, 15 bp, Homo sapiens
ttctaaaatgttttt

SEQ ID NO: 693383 - DNA, 15 bp, Homo sapiens
tctaaaatgtttttc

SEQ ID NO: 693384 - DNA, 15 bp, Homo sapiens
ctaaaatgtttttca

SEQ ID NO: 693385 - DNA, 15 bp, Homo sapiens
taaaatgtttttcat

SEQ ID NO: 693386 - DNA, 15 bp, Homo sapiens
aaaatgtttttcatt

SEQ ID NO: 693387 - DNA, 15 bp, Homo sapiens
aaatgtttttcattt

SEQ ID NO: 693388 - DNA, 15 bp, Homo sapiens
aatgtttttcatttc

SEQ ID NO: 693389 - DNA, 15 bp, Homo sapiens
atgtttttcatttca

SEQ ID NO: 693390 - DNA, 15 bp, Homo sapiens
tgtttttcatttcaa

SEQ ID NO: 693391 - DNA, 15 bp, Homo sapiens
gtttttcatttcaaa

SEQ ID NO: 693392 - DNA, 15 bp, Homo sapiens
tttttcatttcaaaa

SEQ ID NO: 693393 - DNA, 15 bp, Homo sapiens
ttttcatttcaaaat

SEQ ID NO: 693394 - DNA, 15 bp, Homo sapiens
tttcatttcaaaatt

SEQ ID NO: 693395 - DNA, 15 bp, Homo sapiens
ttcatttcaaaattt

SEQ ID NO: 693396 - DNA, 15 bp, Homo sapiens
tcatttcaaaatttt

SEQ ID NO: 693397 - DNA, 15 bp, Homo sapiens
catttcaaaattttt

SEQ ID NO: 693398 - DNA, 15 bp, Homo sapiens
atttcaaaatttttt

SEQ ID NO: 693399 - DNA, 15 bp, Homo sapiens
tttcaaaatttttta

SEQ ID NO: 693400 - DNA, 15 bp, Homo sapiens
ttcaaaattttttat

SEQ ID NO: 693401 - DNA, 15 bp, Homo sapiens
tcaaaattttttata

SEQ ID NO: 693402 - DNA, 15 bp, Homo sapiens
caaaattttttataa

SEQ ID NO: 693403 - DNA, 15 bp, Homo sapiens
aaaattttttataaa

SEQ ID NO: 693404 - DNA, 15 bp, Homo sapiens
aaattttttataaat

SEQ ID NO: 693405 - DNA, 15 bp, Homo sapiens
aattttttataaata

SEQ ID NO: 693406 - DNA, 15 bp, Homo sapiens
attttttataaatag

SEQ ID NO: 693407 - DNA, 15 bp, Homo sapiens
ttttttataaataga

SEQ ID NO: 693408 - DNA, 15 bp, Homo sapiens
tttttataaatagaa

SEQ ID NO: 693409 - DNA, 15 bp, Homo sapiens
ttttataaatagaat

SEQ ID NO: 693410 - DNA, 15 bp, Homo sapiens
tttataaatagaatc

SEQ ID NO: 693411 - DNA, 15 bp, Homo sapiens
ttataaatagaatca

SEQ ID NO: 693412 - DNA, 15 bp, Homo sapiens
tataaatagaatcac

SEQ ID NO: 693413 - DNA, 15 bp, Homo sapiens
ataaatagaatcaca

SEQ ID NO: 693414 - DNA, 15 bp, Homo sapiens
taaatagaatcacac

SEQ ID NO: 693415 - DNA, 15 bp, Homo sapiens
aaatagaatcacact

SEQ ID NO: 693416 - DNA, 15 bp, Homo sapiens
aatagaatcacactg

SEQ ID NO: 693417 - DNA, 15 bp, Homo sapiens
atagaatcacactgt

SEQ ID NO: 693418 - DNA, 15 bp, Homo sapiens
tagaatcacactgta

SEQ ID NO: 693419 - DNA, 15 bp, Homo sapiens
agaatcacactgtat

SEQ ID NO: 693420 - DNA, 15 bp, Homo sapiens
gaatcacactgtatg

SEQ ID NO: 693421 - DNA, 15 bp, Homo sapiens
aatcacactgtatgt

SEQ ID NO: 693422 - DNA, 15 bp, Homo sapiens
atcacactgtatgta

SEQ ID NO: 693423 - DNA, 15 bp, Homo sapiens
tcacactgtatgtaa

SEQ ID NO: 693424 - DNA, 15 bp, Homo sapiens
cacactgtatgtaat

SEQ ID NO: 693425 - DNA, 15 bp, Homo sapiens
acactgtatgtaatc

SEQ ID NO: 693426 - DNA, 15 bp, Homo sapiens
cactgtatgtaatct

SEQ ID NO: 693427 - DNA, 15 bp, Homo sapiens
actgtatgtaatctt

SEQ ID NO: 693428 - DNA, 15 bp, Homo sapiens
ctgtatgtaatcttt

SEQ ID NO: 693429 - DNA, 15 bp, Homo sapiens
tgtatgtaatctttt

SEQ ID NO: 693430 - DNA, 15 bp, Homo sapiens
gtatgtaatcttttc

SEQ ID NO: 693431 - DNA, 15 bp, Homo sapiens
tatgtaatcttttct

SEQ ID NO: 693432 - DNA, 15 bp, Homo sapiens
atgtaatcttttcta

SEQ ID NO: 693433 - DNA, 15 bp, Homo sapiens
tgtaatcttttctaa

SEQ ID NO: 693434 - DNA, 15 bp, Homo sapiens
gtaatcttttctaat

SEQ ID NO: 693435 - DNA, 15 bp, Homo sapiens
taatcttttctaatt

SEQ ID NO: 693436 - DNA, 15 bp, Homo sapiens
aatcttttctaattg

SEQ ID NO: 693437 - DNA, 15 bp, Homo sapiens
atcttttctaattgg

SEQ ID NO: 693438 - DNA, 15 bp, Homo sapiens
tcttttctaattggc

SEQ ID NO: 693439 - DNA, 15 bp, Homo sapiens
cttttctaattggct

SEQ ID NO: 693440 - DNA, 15 bp, Homo sapiens
ttttctaattggctg

SEQ ID NO: 693441 - DNA, 15 bp, Homo sapiens
tttctaattggctgc

SEQ ID NO: 693442 - DNA, 15 bp, Homo sapiens
ttctaattggctgct

SEQ ID NO: 693443 - DNA, 15 bp, Homo sapiens
tctaattggctgctt

SEQ ID NO: 693444 - DNA, 15 bp, Homo sapiens
ctaattggctgcttt

SEQ ID NO: 693445 - DNA, 15 bp, Homo sapiens
taattggctgctttt

SEQ ID NO: 693446 - DNA, 15 bp, Homo sapiens
aattggctgcttttc

SEQ ID NO: 693447 - DNA, 15 bp, Homo sapiens
attggctgcttttca

SEQ ID NO: 693448 - DNA, 15 bp, Homo sapiens
ttggctgcttttcac

SEQ ID NO: 693449 - DNA, 15 bp, Homo sapiens
tggctgcttttcact

SEQ ID NO: 693450 - DNA, 15 bp, Homo sapiens
ggctgcttttcactc

SEQ ID NO: 693451 - DNA, 15 bp, Homo sapiens
gctgcttttcactca

SEQ ID NO: 693452 - DNA, 15 bp, Homo sapiens
ctgcttttcactcag

SEQ ID NO: 693453 - DNA, 15 bp, Homo sapiens
tgcttttcactcagc

SEQ ID NO: 693454 - DNA, 15 bp, Homo sapiens
gcttttcactcagca

SEQ ID NO: 693455 - DNA, 15 bp, Homo sapiens
cttttcactcagcat

SEQ ID NO: 693456 - DNA, 15 bp, Homo sapiens
ttttcactcagcatg

SEQ ID NO: 693457 - DNA, 15 bp, Homo sapiens
tttcactcagcatga

SEQ ID NO: 693458 - DNA, 15 bp, Homo sapiens
ttcactcagcatgat

SEQ ID NO: 693459 - DNA, 15 bp, Homo sapiens
tcactcagcatgatt

SEQ ID NO: 693460 - DNA, 15 bp, Homo sapiens
cactcagcatgattc

SEQ ID NO: 693461 - DNA, 15 bp, Homo sapiens
actcagcatgattcc

SEQ ID NO: 693462 - DNA, 15 bp, Homo sapiens
ctcagcatgattccc

SEQ ID NO: 693463 - DNA, 15 bp, Homo sapiens
tcagcatgattccct

SEQ ID NO: 693464 - DNA, 15 bp, Homo sapiens
cagcatgattccctg

SEQ ID NO: 693465 - DNA, 15 bp, Homo sapiens
agcatgattccctgg

SEQ ID NO: 693466 - DNA, 15 bp, Homo sapiens
gcatgattccctgga

SEQ ID NO: 693467 - DNA, 15 bp, Homo sapiens
catgattccctggag

SEQ ID NO: 693468 - DNA, 15 bp, Homo sapiens
atgattccctggaga

SEQ ID NO: 693469 - DNA, 15 bp, Homo sapiens
tgattccctggagat

SEQ ID NO: 693470 - DNA, 15 bp, Homo sapiens
gattccctggagatt

SEQ ID NO: 693471 - DNA, 15 bp, Homo sapiens
attccctggagattc

SEQ ID NO: 693472 - DNA, 15 bp, Homo sapiens
ttccctggagattca

SEQ ID NO: 693473 - DNA, 15 bp, Homo sapiens
tccctggagattcat

SEQ ID NO: 693474 - DNA, 15 bp, Homo sapiens
ccctggagattcatc

SEQ ID NO: 693475 - DNA, 15 bp, Homo sapiens
cctggagattcatcc

SEQ ID NO: 693476 - DNA, 15 bp, Homo sapiens
ctggagattcatcca

SEQ ID NO: 693477 - DNA, 15 bp, Homo sapiens
tggagattcatccag

SEQ ID NO: 693478 - DNA, 15 bp, Homo sapiens
ggagattcatccagt

SEQ ID NO: 693479 - DNA, 15 bp, Homo sapiens
gagattcatccagtc

SEQ ID NO: 693480 - DNA, 15 bp, Homo sapiens
agattcatccagtct

SEQ ID NO: 693481 - DNA, 15 bp, Homo sapiens
gattcatccagtctg

SEQ ID NO: 693482 - DNA, 15 bp, Homo sapiens
attcatccagtctgt

SEQ ID NO: 693483 - DNA, 15 bp, Homo sapiens
ttcatccagtctgtg

SEQ ID NO: 693484 - DNA, 15 bp, Homo sapiens
tcatccagtctgtgt

SEQ ID NO: 693485 - DNA, 15 bp, Homo sapiens
catccagtctgtgtg

SEQ ID NO: 693486 - DNA, 15 bp, Homo sapiens
atccagtctgtgtgt

SEQ ID NO: 693487 - DNA, 15 bp, Homo sapiens
tccagtctgtgtgta

SEQ ID NO: 693488 - DNA, 15 bp, Homo sapiens
ccagtctgtgtgtat

SEQ ID NO: 693489 - DNA, 15 bp, Homo sapiens
cagtctgtgtgtatc

SEQ ID NO: 693490 - DNA, 15 bp, Homo sapiens
agtctgtgtgtatca

SEQ ID NO: 693491 - DNA, 15 bp, Homo sapiens
gtctgtgtgtatcaa

SEQ ID NO: 693492 - DNA, 15 bp, Homo sapiens
tctgtgtgtatcaat

SEQ ID NO: 693493 - DNA, 15 bp, Homo sapiens
ctgtgtgtatcaatt

SEQ ID NO: 693494 - DNA, 15 bp, Homo sapiens
tgtgtgtatcaatta

SEQ ID NO: 693495 - DNA, 15 bp, Homo sapiens
gtgtgtatcaattat

SEQ ID NO: 693496 - DNA, 15 bp, Homo sapiens
tgtgtatcaattatt

SEQ ID NO: 693497 - DNA, 15 bp, Homo sapiens
gtgtatcaattattt

SEQ ID NO: 693498 - DNA, 15 bp, Homo sapiens
tgtatcaattatttg

SEQ ID NO: 693499 - DNA, 15 bp, Homo sapiens
gtatcaattatttgt

SEQ ID NO: 693500 - DNA, 15 bp, Homo sapiens
tatcaattatttgtt

SEQ ID NO: 693501 - DNA, 15 bp, Homo sapiens
atcaattatttgttc

SEQ ID NO: 693502 - DNA, 15 bp, Homo sapiens
tcaattatttgttcc

SEQ ID NO: 693503 - DNA, 15 bp, Homo sapiens
caattatttgttcct

SEQ ID NO: 693504 - DNA, 15 bp, Homo sapiens
aattatttgttcctt

SEQ ID NO: 693505 - DNA, 15 bp, Homo sapiens
attatttgttccttt

SEQ ID NO: 693506 - DNA, 15 bp, Homo sapiens
ttatttgttcctttg

SEQ ID NO: 693507 - DNA, 15 bp, Homo sapiens
tatttgttcctttgt

SEQ ID NO: 693508 - DNA, 15 bp, Homo sapiens
atttgttcctttgta

SEQ ID NO: 693509 - DNA, 15 bp, Homo sapiens
tttgttcctttgtat

SEQ ID NO: 693510 - DNA, 15 bp, Homo sapiens
ttgttcctttgtatg

SEQ ID NO: 693511 - DNA, 15 bp, Homo sapiens
tgttcctttgtatga

SEQ ID NO: 693512 - DNA, 15 bp, Homo sapiens
gttcctttgtatgac

SEQ ID NO: 693513 - DNA, 15 bp, Homo sapiens
ttcctttgtatgact

SEQ ID NO: 693514 - DNA, 15 bp, Homo sapiens
tcctttgtatgactg

SEQ ID NO: 693515 - DNA, 15 bp, Homo sapiens
cctttgtatgactga

SEQ ID NO: 693516 - DNA, 15 bp, Homo sapiens
ctttgtatgactgag

SEQ ID NO: 693517 - DNA, 15 bp, Homo sapiens
tttgtatgactgagt

SEQ ID NO: 693518 - DNA, 15 bp, Homo sapiens
ttgtatgactgagta

SEQ ID NO: 693519 - DNA, 15 bp, Homo sapiens
tgtatgactgagtag

SEQ ID NO: 693520 - DNA, 15 bp, Homo sapiens
gtatgactgagtagt

SEQ ID NO: 693521 - DNA, 15 bp, Homo sapiens
tatgactgagtagtg

SEQ ID NO: 693522 - DNA, 15 bp, Homo sapiens
atgactgagtagtgt

SEQ ID NO: 693523 - DNA, 15 bp, Homo sapiens
tgactgagtagtgtt

SEQ ID NO: 693524 - DNA, 15 bp, Homo sapiens
gactgagtagtgttt

SEQ ID NO: 693525 - DNA, 15 bp, Homo sapiens
actgagtagtgtttc

SEQ ID NO: 693526 - DNA, 15 bp, Homo sapiens
ctgagtagtgtttcc

SEQ ID NO: 693527 - DNA, 15 bp, Homo sapiens
tgagtagtgtttcct

SEQ ID NO: 693528 - DNA, 15 bp, Homo sapiens
gagtagtgtttcctg

SEQ ID NO: 693529 - DNA, 15 bp, Homo sapiens
agtagtgtttcctgg

SEQ ID NO: 693530 - DNA, 15 bp, Homo sapiens
gtagtgtttcctggt

SEQ ID NO: 693531 - DNA, 15 bp, Homo sapiens
tagtgtttcctggta

SEQ ID NO: 693532 - DNA, 15 bp, Homo sapiens
agtgtttcctggtac

SEQ ID NO: 693533 - DNA, 15 bp, Homo sapiens
gtgtttcctggtaca

SEQ ID NO: 693534 - DNA, 15 bp, Homo sapiens
tgtttcctggtacag

SEQ ID NO: 693535 - DNA, 15 bp, Homo sapiens
gtttcctggtacaga

SEQ ID NO: 693536 - DNA, 15 bp, Homo sapiens
tttcctggtacagat

SEQ ID NO: 693537 - DNA, 15 bp, Homo sapiens
ttcctggtacagatg

SEQ ID NO: 693538 - DNA, 15 bp, Homo sapiens
tcctggtacagatgt

SEQ ID NO: 693539 - DNA, 15 bp, Homo sapiens
cctggtacagatgta

SEQ ID NO: 693540 - DNA, 15 bp, Homo sapiens
ctggtacagatgtac

SEQ ID NO: 693541 - DNA, 15 bp, Homo sapiens
tggtacagatgtacc

SEQ ID NO: 693542 - DNA, 15 bp, Homo sapiens
ggtacagatgtacca

SEQ ID NO: 693543 - DNA, 15 bp, Homo sapiens
gtacagatgtaccac

SEQ ID NO: 693544 - DNA, 15 bp, Homo sapiens
tacagatgtaccaca

SEQ ID NO: 693545 - DNA, 15 bp, Homo sapiens
acagatgtaccacag

SEQ ID NO: 693546 - DNA, 15 bp, Homo sapiens
cagatgtaccacagt

SEQ ID NO: 693547 - DNA, 15 bp, Homo sapiens
agatgtaccacagtt

SEQ ID NO: 693548 - DNA, 15 bp, Homo sapiens
gatgtaccacagttg

SEQ ID NO: 693549 - DNA, 15 bp, Homo sapiens
atgtaccacagttgt

SEQ ID NO: 693550 - DNA, 15 bp, Homo sapiens
tgtaccacagttgtt

SEQ ID NO: 693551 - DNA, 15 bp, Homo sapiens
gtaccacagttgttt

SEQ ID NO: 693552 - DNA, 15 bp, Homo sapiens
taccacagttgttta

SEQ ID NO: 693553 - DNA, 15 bp, Homo sapiens
accacagttgtttag

SEQ ID NO: 693554 - DNA, 15 bp, Homo sapiens
ccacagttgtttagt

SEQ ID NO: 693555 - DNA, 15 bp, Homo sapiens
cacagttgtttagtc

SEQ ID NO: 693556 - DNA, 15 bp, Homo sapiens
acagttgtttagtca

SEQ ID NO: 693557 - DNA, 15 bp, Homo sapiens
cagttgtttagtcac

SEQ ID NO: 693558 - DNA, 15 bp, Homo sapiens
agttgtttagtcact

SEQ ID NO: 693559 - DNA, 15 bp, Homo sapiens
gttgtttagtcactc

SEQ ID NO: 693560 - DNA, 15 bp, Homo sapiens
ttgtttagtcactca

SEQ ID NO: 693561 - DNA, 15 bp, Homo sapiens
tgtttagtcactcac

SEQ ID NO: 693562 - DNA, 15 bp, Homo sapiens
gtttagtcactcacc

SEQ ID NO: 693563 - DNA, 15 bp, Homo sapiens
tttagtcactcacct

SEQ ID NO: 693564 - DNA, 15 bp, Homo sapiens
ttagtcactcacctg

SEQ ID NO: 693565 - DNA, 15 bp, Homo sapiens
tagtcactcacctgc

SEQ ID NO: 693566 - DNA, 15 bp, Homo sapiens
agtcactcacctgct

SEQ ID NO: 693567 - DNA, 15 bp, Homo sapiens
gtcactcacctgctg

SEQ ID NO: 693568 - DNA, 15 bp, Homo sapiens
tcactcacctgctga

SEQ ID NO: 693569 - DNA, 15 bp, Homo sapiens
cactcacctgctgaa

SEQ ID NO: 693570 - DNA, 15 bp, Homo sapiens
actcacctgctgaac

SEQ ID NO: 693571 - DNA, 15 bp, Homo sapiens
ctcacctgctgaaca

SEQ ID NO: 693572 - DNA, 15 bp, Homo sapiens
tcacctgctgaacaa

SEQ ID NO: 693573 - DNA, 15 bp, Homo sapiens
cacctgctgaacaac

SEQ ID NO: 693574 - DNA, 15 bp, Homo sapiens
acctgctgaacaact

SEQ ID NO: 693575 - DNA, 15 bp, Homo sapiens
cctgctgaacaactt

SEQ ID NO: 693576 - DNA, 15 bp, Homo sapiens
ctgctgaacaacttc

SEQ ID NO: 693577 - DNA, 15 bp, Homo sapiens
tgctgaacaacttct

SEQ ID NO: 693578 - DNA, 15 bp, Homo sapiens
gctgaacaacttctg

SEQ ID NO: 693579 - DNA, 15 bp, Homo sapiens
ctgaacaacttctgg

SEQ ID NO: 693580 - DNA, 15 bp, Homo sapiens
tgaacaacttctggg

SEQ ID NO: 693581 - DNA, 15 bp, Homo sapiens
gaacaacttctgggc

SEQ ID NO: 693582 - DNA, 15 bp, Homo sapiens
aacaacttctgggct

SEQ ID NO: 693583 - DNA, 15 bp, Homo sapiens
acaacttctgggctg

SEQ ID NO: 693584 - DNA, 15 bp, Homo sapiens
caacttctgggctgt

SEQ ID NO: 693585 - DNA, 15 bp, Homo sapiens
aacttctgggctgtt

SEQ ID NO: 693586 - DNA, 15 bp, Homo sapiens
acttctgggctgttt

SEQ ID NO: 693587 - DNA, 15 bp, Homo sapiens
cttctgggctgtttc

SEQ ID NO: 693588 - DNA, 15 bp, Homo sapiens
ttctgggctgtttct

SEQ ID NO: 693589 - DNA, 15 bp, Homo sapiens
tctgggctgtttcta

SEQ ID NO: 693590 - DNA, 15 bp, Homo sapiens
ctgggctgtttctag

SEQ ID NO: 693591 - DNA, 15 bp, Homo sapiens
tgggctgtttctagg

SEQ ID NO: 693592 - DNA, 15 bp, Homo sapiens
gggctgtttctaggt

SEQ ID NO: 693593 - DNA, 15 bp, Homo sapiens
ggctgtttctaggtt

SEQ ID NO: 693594 - DNA, 15 bp, Homo sapiens
gctgtttctaggttt

SEQ ID NO: 693595 - DNA, 15 bp, Homo sapiens
ctgtttctaggtttt

SEQ ID NO: 693596 - DNA, 15 bp, Homo sapiens
tgtttctaggttttg

SEQ ID NO: 693597 - DNA, 15 bp, Homo sapiens
gtttctaggttttga

SEQ ID NO: 693598 - DNA, 15 bp, Homo sapiens
tttctaggttttgac

SEQ ID NO: 693599 - DNA, 15 bp, Homo sapiens
ttctaggttttgact

SEQ ID NO: 693600 - DNA, 15 bp, Homo sapiens
tctaggttttgacta

SEQ ID NO: 693601 - DNA, 15 bp, Homo sapiens
ctaggttttgactac

SEQ ID NO: 693602 - DNA, 15 bp, Homo sapiens
taggttttgactact

SEQ ID NO: 693603 - DNA, 15 bp, Homo sapiens
aggttttgactacta

SEQ ID NO: 693604 - DNA, 15 bp, Homo sapiens
ggttttgactactaa

SEQ ID NO: 693605 - DNA, 15 bp, Homo sapiens
gttttgactactaaa

SEQ ID NO: 693606 - DNA, 15 bp, Homo sapiens
ttttgactactaaac

SEQ ID NO: 693607 - DNA, 15 bp, Homo sapiens
tttgactactaaaca

SEQ ID NO: 693608 - DNA, 15 bp, Homo sapiens
ttgactactaaacat

SEQ ID NO: 693609 - DNA, 15 bp, Homo sapiens
tgactactaaacata

SEQ ID NO: 693610 - DNA, 15 bp, Homo sapiens
gactactaaacataa

SEQ ID NO: 693611 - DNA, 15 bp, Homo sapiens
actactaaacataaa

SEQ ID NO: 693612 - DNA, 15 bp, Homo sapiens
ctactaaacataaag

SEQ ID NO: 693613 - DNA, 15 bp, Homo sapiens
tactaaacataaagc

SEQ ID NO: 693614 - DNA, 15 bp, Homo sapiens
actaaacataaagct

SEQ ID NO: 693615 - DNA, 15 bp, Homo sapiens
ctaaacataaagctg

SEQ ID NO: 693616 - DNA, 15 bp, Homo sapiens
taaacataaagctgc

SEQ ID NO: 693617 - DNA, 15 bp, Homo sapiens
aaacataaagctgcc

SEQ ID NO: 693618 - DNA, 15 bp, Homo sapiens
aacataaagctgcca

SEQ ID NO: 693619 - DNA, 15 bp, Homo sapiens
acataaagctgccat

SEQ ID NO: 693620 - DNA, 15 bp, Homo sapiens
cataaagctgccatg

SEQ ID NO: 693621 - DNA, 15 bp, Homo sapiens
ataaagctgccatga

SEQ ID NO: 693622 - DNA, 15 bp, Homo sapiens
taaagctgccatgaa

SEQ ID NO: 693623 - DNA, 15 bp, Homo sapiens
aaagctgccatgaac

SEQ ID NO: 693624 - DNA, 15 bp, Homo sapiens
aagctgccatgaaca

SEQ ID NO: 693625 - DNA, 15 bp, Homo sapiens
agctgccatgaacat

SEQ ID NO: 693626 - DNA, 15 bp, Homo sapiens
gctgccatgaacata

SEQ ID NO: 693627 - DNA, 15 bp, Homo sapiens
ctgccatgaacatat

SEQ ID NO: 693628 - DNA, 15 bp, Homo sapiens
tgccatgaacatatg

SEQ ID NO: 693629 - DNA, 15 bp, Homo sapiens
gccatgaacatatgc

SEQ ID NO: 693630 - DNA, 15 bp, Homo sapiens
ccatgaacatatgcc

SEQ ID NO: 693631 - DNA, 15 bp, Homo sapiens
catgaacatatgcct

SEQ ID NO: 693632 - DNA, 15 bp, Homo sapiens
atgaacatatgccta

SEQ ID NO: 693633 - DNA, 15 bp, Homo sapiens
tgaacatatgcctag

SEQ ID NO: 693634 - DNA, 15 bp, Homo sapiens
gaacatatgcctaga

SEQ ID NO: 693635 - DNA, 15 bp, Homo sapiens
aacatatgcctagag

SEQ ID NO: 693636 - DNA, 15 bp, Homo sapiens
acatatgcctagaga

SEQ ID NO: 693637 - DNA, 15 bp, Homo sapiens
catatgcctagagat

SEQ ID NO: 693638 - DNA, 15 bp, Homo sapiens
atatgcctagagatt

SEQ ID NO: 693639 - DNA, 15 bp, Homo sapiens
tatgcctagagattt

SEQ ID NO: 693640 - DNA, 15 bp, Homo sapiens
atgcctagagatttt

SEQ ID NO: 693641 - DNA, 15 bp, Homo sapiens
tgcctagagattttt

SEQ ID NO: 693642 - DNA, 15 bp, Homo sapiens
gcctagagatttttt

SEQ ID NO: 693643 - DNA, 15 bp, Homo sapiens
cctagagattttttg

SEQ ID NO: 693644 - DNA, 15 bp, Homo sapiens
ctagagattttttgt

SEQ ID NO: 693645 - DNA, 15 bp, Homo sapiens
tagagattttttgtg

SEQ ID NO: 693646 - DNA, 15 bp, Homo sapiens
agagattttttgtgt

SEQ ID NO: 693647 - DNA, 15 bp, Homo sapiens
gagattttttgtgtg

SEQ ID NO: 693648 - DNA, 15 bp, Homo sapiens
agattttttgtgtga

SEQ ID NO: 693649 - DNA, 15 bp, Homo sapiens
gattttttgtgtgag

SEQ ID NO: 693650 - DNA, 15 bp, Homo sapiens
attttttgtgtgaga

SEQ ID NO: 693651 - DNA, 15 bp, Homo sapiens
ttttttgtgtgagag

SEQ ID NO: 693652 - DNA, 15 bp, Homo sapiens
tttttgtgtgagagt

SEQ ID NO: 693653 - DNA, 15 bp, Homo sapiens
ttttgtgtgagagtt

SEQ ID NO: 693654 - DNA, 15 bp, Homo sapiens
tttgtgtgagagtta

SEQ ID NO: 693655 - DNA, 15 bp, Homo sapiens
ttgtgtgagagttaa

SEQ ID NO: 693656 - DNA, 15 bp, Homo sapiens
tgtgtgagagttaag

SEQ ID NO: 693657 - DNA, 15 bp, Homo sapiens
gtgtgagagttaagt

SEQ ID NO: 693658 - DNA, 15 bp, Homo sapiens
tgtgagagttaagtt

SEQ ID NO: 693659 - DNA, 15 bp, Homo sapiens
gtgagagttaagttt

SEQ ID NO: 693660 - DNA, 15 bp, Homo sapiens
tgagagttaagtttt

SEQ ID NO: 693661 - DNA, 15 bp, Homo sapiens
gagagttaagttttc

SEQ ID NO: 693662 - DNA, 15 bp, Homo sapiens
agagttaagttttca

SEQ ID NO: 693663 - DNA, 15 bp, Homo sapiens
gagttaagttttcat

SEQ ID NO: 693664 - DNA, 15 bp, Homo sapiens
agttaagttttcatt

SEQ ID NO: 693665 - DNA, 15 bp, Homo sapiens
gttaagttttcattt

SEQ ID NO: 693666 - DNA, 15 bp, Homo sapiens
ttaagttttcattta

SEQ ID NO: 693667 - DNA, 15 bp, Homo sapiens
taagttttcatttat

SEQ ID NO: 693668 - DNA, 15 bp, Homo sapiens
aagttttcatttatc

SEQ ID NO: 693669 - DNA, 15 bp, Homo sapiens
agttttcatttatct

SEQ ID NO: 693670 - DNA, 15 bp, Homo sapiens
gttttcatttatctt

SEQ ID NO: 693671 - DNA, 15 bp, Homo sapiens
ttttcatttatcttg

SEQ ID NO: 693672 - DNA, 15 bp, Homo sapiens
tttcatttatcttgg

SEQ ID NO: 693673 - DNA, 15 bp, Homo sapiens
ttcatttatcttgga

SEQ ID NO: 693674 - DNA, 15 bp, Homo sapiens
tcatttatcttggat

SEQ ID NO: 693675 - DNA, 15 bp, Homo sapiens
catttatcttggata

SEQ ID NO: 693676 - DNA, 15 bp, Homo sapiens
atttatcttggataa

SEQ ID NO: 693677 - DNA, 15 bp, Homo sapiens
tttatcttggataaa

SEQ ID NO: 693678 - DNA, 15 bp, Homo sapiens
ttatcttggataaat

SEQ ID NO: 693679 - DNA, 15 bp, Homo sapiens
tatcttggataaatg

SEQ ID NO: 693680 - DNA, 15 bp, Homo sapiens
atcttggataaatgc

SEQ ID NO: 693681 - DNA, 15 bp, Homo sapiens
tcttggataaatgcc

SEQ ID NO: 693682 - DNA, 15 bp, Homo sapiens
cttggataaatgccc

SEQ ID NO: 693683 - DNA, 15 bp, Homo sapiens
ttggataaatgccca

SEQ ID NO: 693684 - DNA, 15 bp, Homo sapiens
tggataaatgcccaa

SEQ ID NO: 693685 - DNA, 15 bp, Homo sapiens
ggataaatgcccaac

SEQ ID NO: 693686 - DNA, 15 bp, Homo sapiens
gataaatgcccaaca

SEQ ID NO: 693687 - DNA, 15 bp, Homo sapiens
ataaatgcccaacag

SEQ ID NO: 693688 - DNA, 15 bp, Homo sapiens
taaatgcccaacagc

SEQ ID NO: 693689 - DNA, 15 bp, Homo sapiens
aaatgcccaacagca

SEQ ID NO: 693690 - DNA, 15 bp, Homo sapiens
aatgcccaacagcac

SEQ ID NO: 693691 - DNA, 15 bp, Homo sapiens
atgcccaacagcaca

SEQ ID NO: 693692 - DNA, 15 bp, Homo sapiens
tgcccaacagcacaa

SEQ ID NO: 693693 - DNA, 15 bp, Homo sapiens
gcccaacagcacaat

SEQ ID NO: 693694 - DNA, 15 bp, Homo sapiens
cccaacagcacaatt

SEQ ID NO: 693695 - DNA, 15 bp, Homo sapiens
ccaacagcacaattt

SEQ ID NO: 693696 - DNA, 15 bp, Homo sapiens
caacagcacaatttc

SEQ ID NO: 693697 - DNA, 15 bp, Homo sapiens
aacagcacaatttct

SEQ ID NO: 693698 - DNA, 15 bp, Homo sapiens
acagcacaatttcta

SEQ ID NO: 693699 - DNA, 15 bp, Homo sapiens
cagcacaatttctag

SEQ ID NO: 693700 - DNA, 15 bp, Homo sapiens
agcacaatttctagg

SEQ ID NO: 693701 - DNA, 15 bp, Homo sapiens
gcacaatttctaggt

SEQ ID NO: 693702 - DNA, 15 bp, Homo sapiens
cacaatttctaggtc

SEQ ID NO: 693703 - DNA, 15 bp, Homo sapiens
acaatttctaggtca

SEQ ID NO: 693704 - DNA, 15 bp, Homo sapiens
caatttctaggtcat

SEQ ID NO: 693705 - DNA, 15 bp, Homo sapiens
aatttctaggtcata

SEQ ID NO: 693706 - DNA, 15 bp, Homo sapiens
atttctaggtcatat

SEQ ID NO: 693707 - DNA, 15 bp, Homo sapiens
tttctaggtcatatg

SEQ ID NO: 693708 - DNA, 15 bp, Homo sapiens
ttctaggtcatatgg

SEQ ID NO: 693709 - DNA, 15 bp, Homo sapiens
tctaggtcatatggt

SEQ ID NO: 693710 - DNA, 15 bp, Homo sapiens
ctaggtcatatggta

SEQ ID NO: 693711 - DNA, 15 bp, Homo sapiens
taggtcatatggtag

SEQ ID NO: 693712 - DNA, 15 bp, Homo sapiens
aggtcatatggtagt

SEQ ID NO: 693713 - DNA, 15 bp, Homo sapiens
ggtcatatggtagtt

SEQ ID NO: 693714 - DNA, 15 bp, Homo sapiens
gtcatatggtagttg

SEQ ID NO: 693715 - DNA, 15 bp, Homo sapiens
tcatatggtagttgc

SEQ ID NO: 693716 - DNA, 15 bp, Homo sapiens
catatggtagttgca

SEQ ID NO: 693717 - DNA, 15 bp, Homo sapiens
atatggtagttgcat

SEQ ID NO: 693718 - DNA, 15 bp, Homo sapiens
tatggtagttgcatg

SEQ ID NO: 693719 - DNA, 15 bp, Homo sapiens
atggtagttgcatgt

SEQ ID NO: 693720 - DNA, 15 bp, Homo sapiens
tggtagttgcatgtt

SEQ ID NO: 693721 - DNA, 15 bp, Homo sapiens
ggtagttgcatgttt

SEQ ID NO: 693722 - DNA, 15 bp, Homo sapiens
gtagttgcatgttta

SEQ ID NO: 693723 - DNA, 15 bp, Homo sapiens
tagttgcatgtttag

SEQ ID NO: 693724 - DNA, 15 bp, Homo sapiens
agttgcatgtttagt

SEQ ID NO: 693725 - DNA, 15 bp, Homo sapiens
gttgcatgtttagtt

SEQ ID NO: 693726 - DNA, 15 bp, Homo sapiens
ttgcatgtttagttt

SEQ ID NO: 693727 - DNA, 15 bp, Homo sapiens
tgcatgtttagtttc

SEQ ID NO: 693728 - DNA, 15 bp, Homo sapiens
gcatgtttagtttcg

SEQ ID NO: 693729 - DNA, 15 bp, Homo sapiens
catgtttagtttcgt

SEQ ID NO: 693730 - DNA, 15 bp, Homo sapiens
atgtttagtttcgta

SEQ ID NO: 693731 - DNA, 15 bp, Homo sapiens
tgtttagtttcgtaa

SEQ ID NO: 693732 - DNA, 15 bp, Homo sapiens
gtttagtttcgtaag

SEQ ID NO: 693733 - DNA, 15 bp, Homo sapiens
tttagtttcgtaaga

SEQ ID NO: 693734 - DNA, 15 bp, Homo sapiens
ttagtttcgtaagaa

SEQ ID NO: 693735 - DNA, 15 bp, Homo sapiens
tagtttcgtaagaaa

SEQ ID NO: 693736 - DNA, 15 bp, Homo sapiens
agtttcgtaagaaac

SEQ ID NO: 693737 - DNA, 15 bp, Homo sapiens
gtttcgtaagaaact

SEQ ID NO: 693738 - DNA, 15 bp, Homo sapiens
tttcgtaagaaactg

SEQ ID NO: 693739 - DNA, 15 bp, Homo sapiens
ttcgtaagaaactgt

SEQ ID NO: 693740 - DNA, 15 bp, Homo sapiens
tcgtaagaaactgtt

SEQ ID NO: 693741 - DNA, 15 bp, Homo sapiens
cgtaagaaactgtta

SEQ ID NO: 693742 - DNA, 15 bp, Homo sapiens
gtaagaaactgttaa

SEQ ID NO: 693743 - DNA, 15 bp, Homo sapiens
taagaaactgttaaa

SEQ ID NO: 693744 - DNA, 15 bp, Homo sapiens
aagaaactgttaaac

SEQ ID NO: 693745 - DNA, 15 bp, Homo sapiens
agaaactgttaaact

SEQ ID NO: 693746 - DNA, 15 bp, Homo sapiens
gaaactgttaaactg

SEQ ID NO: 693747 - DNA, 15 bp, Homo sapiens
aaactgttaaactgt

SEQ ID NO: 693748 - DNA, 15 bp, Homo sapiens
aactgttaaactgtt

SEQ ID NO: 693749 - DNA, 15 bp, Homo sapiens
actgttaaactgttt

SEQ ID NO: 693750 - DNA, 15 bp, Homo sapiens
ctgttaaactgtttt

SEQ ID NO: 693751 - DNA, 15 bp, Homo sapiens
tgttaaactgttttc

SEQ ID NO: 693752 - DNA, 15 bp, Homo sapiens
gttaaactgttttct

SEQ ID NO: 693753 - DNA, 15 bp, Homo sapiens
ttaaactgttttcta

SEQ ID NO: 693754 - DNA, 15 bp, Homo sapiens
taaactgttttctag

SEQ ID NO: 693755 - DNA, 15 bp, Homo sapiens
aaactgttttctaga

SEQ ID NO: 693756 - DNA, 15 bp, Homo sapiens
aactgttttctagag

SEQ ID NO: 693757 - DNA, 15 bp, Homo sapiens
actgttttctagagt

SEQ ID NO: 693758 - DNA, 15 bp, Homo sapiens
ctgttttctagagtg

SEQ ID NO: 693759 - DNA, 15 bp, Homo sapiens
tgttttctagagtgg

SEQ ID NO: 693760 - DNA, 15 bp, Homo sapiens
gttttctagagtggc

SEQ ID NO: 693761 - DNA, 15 bp, Homo sapiens
ttttctagagtggct

SEQ ID NO: 693762 - DNA, 15 bp, Homo sapiens
tttctagagtggctg

SEQ ID NO: 693763 - DNA, 15 bp, Homo sapiens
ttctagagtggctgt

SEQ ID NO: 693764 - DNA, 15 bp, Homo sapiens
tctagagtggctgta

SEQ ID NO: 693765 - DNA, 15 bp, Homo sapiens
ctagagtggctgtac

SEQ ID NO: 693766 - DNA, 15 bp, Homo sapiens
tagagtggctgtacc

SEQ ID NO: 693767 - DNA, 15 bp, Homo sapiens
agagtggctgtacca

SEQ ID NO: 693768 - DNA, 15 bp, Homo sapiens
gagtggctgtaccat

SEQ ID NO: 693769 - DNA, 15 bp, Homo sapiens
agtggctgtaccatt

SEQ ID NO: 693770 - DNA, 15 bp, Homo sapiens
gtggctgtaccattt

SEQ ID NO: 693771 - DNA, 15 bp, Homo sapiens
tggctgtaccatttt

SEQ ID NO: 693772 - DNA, 15 bp, Homo sapiens
ggctgtaccatttta

SEQ ID NO: 693773 - DNA, 15 bp, Homo sapiens
gctgtaccattttac

SEQ ID NO: 693774 - DNA, 15 bp, Homo sapiens
ctgtaccattttaca

SEQ ID NO: 693775 - DNA, 15 bp, Homo sapiens
tgtaccattttacac

SEQ ID NO: 693776 - DNA, 15 bp, Homo sapiens
gtaccattttacact

SEQ ID NO: 693777 - DNA, 15 bp, Homo sapiens
taccattttacactc

SEQ ID NO: 693778 - DNA, 15 bp, Homo sapiens
accattttacactcc

SEQ ID NO: 693779 - DNA, 15 bp, Homo sapiens
ccattttacactccc

SEQ ID NO: 693780 - DNA, 15 bp, Homo sapiens
cattttacactccca

SEQ ID NO: 693781 - DNA, 15 bp, Homo sapiens
attttacactcccac

SEQ ID NO: 693782 - DNA, 15 bp, Homo sapiens
ttttacactcccacc

SEQ ID NO: 693783 - DNA, 15 bp, Homo sapiens
tttacactcccacca

SEQ ID NO: 693784 - DNA, 15 bp, Homo sapiens
ttacactcccaccac

SEQ ID NO: 693785 - DNA, 15 bp, Homo sapiens
tacactcccaccacc

SEQ ID NO: 693786 - DNA, 15 bp, Homo sapiens
acactcccaccacca

SEQ ID NO: 693787 - DNA, 15 bp, Homo sapiens
cactcccaccaccaa

SEQ ID NO: 693788 - DNA, 15 bp, Homo sapiens
actcccaccaccaat

SEQ ID NO: 693789 - DNA, 15 bp, Homo sapiens
ctcccaccaccaatg

SEQ ID NO: 693790 - DNA, 15 bp, Homo sapiens
tcccaccaccaatgt

SEQ ID NO: 693791 - DNA, 15 bp, Homo sapiens
cccaccaccaatgta

SEQ ID NO: 693792 - DNA, 15 bp, Homo sapiens
ccaccaccaatgtat

SEQ ID NO: 693793 - DNA, 15 bp, Homo sapiens
caccaccaatgtatg

SEQ ID NO: 693794 - DNA, 15 bp, Homo sapiens
accaccaatgtatga

SEQ ID NO: 693795 - DNA, 15 bp, Homo sapiens
ccaccaatgtatgag

SEQ ID NO: 693796 - DNA, 15 bp, Homo sapiens
caccaatgtatgaga

SEQ ID NO: 693797 - DNA, 15 bp, Homo sapiens
accaatgtatgagag

SEQ ID NO: 693798 - DNA, 15 bp, Homo sapiens
ccaatgtatgagaga

SEQ ID NO: 693799 - DNA, 15 bp, Homo sapiens
caatgtatgagagat

SEQ ID NO: 693800 - DNA, 15 bp, Homo sapiens
aatgtatgagagatc

SEQ ID NO: 693801 - DNA, 15 bp, Homo sapiens
atgtatgagagatct

SEQ ID NO: 693802 - DNA, 15 bp, Homo sapiens
tgtatgagagatctg

SEQ ID NO: 693803 - DNA, 15 bp, Homo sapiens
gtatgagagatctgg

SEQ ID NO: 693804 - DNA, 15 bp, Homo sapiens
tatgagagatctggt

SEQ ID NO: 693805 - DNA, 15 bp, Homo sapiens
atgagagatctggtt

SEQ ID NO: 693806 - DNA, 15 bp, Homo sapiens
tgagagatctggttt

SEQ ID NO: 693807 - DNA, 15 bp, Homo sapiens
gagagatctggtttc

SEQ ID NO: 693808 - DNA, 15 bp, Homo sapiens
agagatctggtttct

SEQ ID NO: 693809 - DNA, 15 bp, Homo sapiens
gagatctggtttctc

SEQ ID NO: 693810 - DNA, 15 bp, Homo sapiens
agatctggtttctct

SEQ ID NO: 693811 - DNA, 15 bp, Homo sapiens
gatctggtttctctg

SEQ ID NO: 693812 - DNA, 15 bp, Homo sapiens
atctggtttctctgc

SEQ ID NO: 693813 - DNA, 15 bp, Homo sapiens
tctggtttctctgca

SEQ ID NO: 693814 - DNA, 15 bp, Homo sapiens
ctggtttctctgcat

SEQ ID NO: 693815 - DNA, 15 bp, Homo sapiens
tggtttctctgcatc

SEQ ID NO: 693816 - DNA, 15 bp, Homo sapiens
ggtttctctgcatcc

SEQ ID NO: 693817 - DNA, 15 bp, Homo sapiens
gtttctctgcatcct

SEQ ID NO: 693818 - DNA, 15 bp, Homo sapiens
tttctctgcatcctt

SEQ ID NO: 693819 - DNA, 15 bp, Homo sapiens
ttctctgcatccttg

SEQ ID NO: 693820 - DNA, 15 bp, Homo sapiens
tctctgcatccttgc

SEQ ID NO: 693821 - DNA, 15 bp, Homo sapiens
ctctgcatccttgcc

SEQ ID NO: 693822 - DNA, 15 bp, Homo sapiens
tctgcatccttgcca

SEQ ID NO: 693823 - DNA, 15 bp, Homo sapiens
ctgcatccttgccag

SEQ ID NO: 693824 - DNA, 15 bp, Homo sapiens
tgcatccttgccagt

SEQ ID NO: 693825 - DNA, 15 bp, Homo sapiens
gcatccttgccagta

SEQ ID NO: 693826 - DNA, 15 bp, Homo sapiens
catccttgccagtat

SEQ ID NO: 693827 - DNA, 15 bp, Homo sapiens
atccttgccagtatt

SEQ ID NO: 693828 - DNA, 15 bp, Homo sapiens
tccttgccagtattt

SEQ ID NO: 693829 - DNA, 15 bp, Homo sapiens
ccttgccagtatttg

SEQ ID NO: 693830 - DNA, 15 bp, Homo sapiens
cttgccagtatttgg

SEQ ID NO: 693831 - DNA, 15 bp, Homo sapiens
ttgccagtatttggt

SEQ ID NO: 693832 - DNA, 15 bp, Homo sapiens
tgccagtatttggtg

SEQ ID NO: 693833 - DNA, 15 bp, Homo sapiens
gccagtatttggtgg

SEQ ID NO: 693834 - DNA, 15 bp, Homo sapiens
ccagtatttggtggt

SEQ ID NO: 693835 - DNA, 15 bp, Homo sapiens
cagtatttggtggtg

SEQ ID NO: 693836 - DNA, 15 bp, Homo sapiens
agtatttggtggtgt

SEQ ID NO: 693837 - DNA, 15 bp, Homo sapiens
gtatttggtggtgtc

SEQ ID NO: 693838 - DNA, 15 bp, Homo sapiens
tatttggtggtgtca

SEQ ID NO: 693839 - DNA, 15 bp, Homo sapiens
atttggtggtgtcac

SEQ ID NO: 693840 - DNA, 15 bp, Homo sapiens
tttggtggtgtcact

SEQ ID NO: 693841 - DNA, 15 bp, Homo sapiens
ttggtggtgtcacta

SEQ ID NO: 693842 - DNA, 15 bp, Homo sapiens
tggtggtgtcactat

SEQ ID NO: 693843 - DNA, 15 bp, Homo sapiens
ggtggtgtcactatt

SEQ ID NO: 693844 - DNA, 15 bp, Homo sapiens
gtggtgtcactattt

SEQ ID NO: 693845 - DNA, 15 bp, Homo sapiens
tggtgtcactatttt

SEQ ID NO: 693846 - DNA, 15 bp, Homo sapiens
ggtgtcactattttt

SEQ ID NO: 693847 - DNA, 15 bp, Homo sapiens
gtgtcactatttttt

SEQ ID NO: 693848 - DNA, 15 bp, Homo sapiens
tgtcactatttttta

SEQ ID NO: 693849 - DNA, 15 bp, Homo sapiens
gtcactattttttat

SEQ ID NO: 693850 - DNA, 15 bp, Homo sapiens
tcactattttttatt

SEQ ID NO: 693851 - DNA, 15 bp, Homo sapiens
cactattttttattt

SEQ ID NO: 693852 - DNA, 15 bp, Homo sapiens
actattttttatttt

SEQ ID NO: 693853 - DNA, 15 bp, Homo sapiens
ctattttttatttta

SEQ ID NO: 693854 - DNA, 15 bp, Homo sapiens
tattttttattttag

SEQ ID NO: 693855 - DNA, 15 bp, Homo sapiens
attttttattttagc

SEQ ID NO: 693856 - DNA, 15 bp, Homo sapiens
ttttttattttagct

SEQ ID NO: 693857 - DNA, 15 bp, Homo sapiens
tttttattttagcta

SEQ ID NO: 693858 - DNA, 15 bp, Homo sapiens
ttttattttagctat

SEQ ID NO: 693859 - DNA, 15 bp, Homo sapiens
tttattttagctatc

SEQ ID NO: 693860 - DNA, 15 bp, Homo sapiens
ttattttagctatcc

SEQ ID NO: 693861 - DNA, 15 bp, Homo sapiens
tattttagctatcct

SEQ ID NO: 693862 - DNA, 15 bp, Homo sapiens
attttagctatcctg

SEQ ID NO: 693863 - DNA, 15 bp, Homo sapiens
ttttagctatcctgt

SEQ ID NO: 693864 - DNA, 15 bp, Homo sapiens
tttagctatcctgtt

SEQ ID NO: 693865 - DNA, 15 bp, Homo sapiens
ttagctatcctgtta

SEQ ID NO: 693866 - DNA, 15 bp, Homo sapiens
tagctatcctgttaa

SEQ ID NO: 693867 - DNA, 15 bp, Homo sapiens
agctatcctgttaaa

SEQ ID NO: 693868 - DNA, 15 bp, Homo sapiens
gctatcctgttaaat

SEQ ID NO: 693869 - DNA, 15 bp, Homo sapiens
ctatcctgttaaatg

SEQ ID NO: 693870 - DNA, 15 bp, Homo sapiens
tatcctgttaaatgt

SEQ ID NO: 693871 - DNA, 15 bp, Homo sapiens
atcctgttaaatgta

SEQ ID NO: 693872 - DNA, 15 bp, Homo sapiens
tcctgttaaatgtat

SEQ ID NO: 693873 - DNA, 15 bp, Homo sapiens
cctgttaaatgtata

SEQ ID NO: 693874 - DNA, 15 bp, Homo sapiens
ctgttaaatgtatag

SEQ ID NO: 693875 - DNA, 15 bp, Homo sapiens
tgttaaatgtatagt

SEQ ID NO: 693876 - DNA, 15 bp, Homo sapiens
gttaaatgtatagtg

SEQ ID NO: 693877 - DNA, 15 bp, Homo sapiens
ttaaatgtatagtga

SEQ ID NO: 693878 - DNA, 15 bp, Homo sapiens
taaatgtatagtgat

SEQ ID NO: 693879 - DNA, 15 bp, Homo sapiens
aaatgtatagtgata

SEQ ID NO: 693880 - DNA, 15 bp, Homo sapiens
aatgtatagtgatat

SEQ ID NO: 693881 - DNA, 15 bp, Homo sapiens
atgtatagtgatatt

SEQ ID NO: 693882 - DNA, 15 bp, Homo sapiens
tgtatagtgatattt

SEQ ID NO: 693883 - DNA, 15 bp, Homo sapiens
gtatagtgatatttc

SEQ ID NO: 693884 - DNA, 15 bp, Homo sapiens
tatagtgatatttca

SEQ ID NO: 693885 - DNA, 15 bp, Homo sapiens
atagtgatatttcat

SEQ ID NO: 693886 - DNA, 15 bp, Homo sapiens
tagtgatatttcatt

SEQ ID NO: 693887 - DNA, 15 bp, Homo sapiens
agtgatatttcattg

SEQ ID NO: 693888 - DNA, 15 bp, Homo sapiens
gtgatatttcattgt

SEQ ID NO: 693889 - DNA, 15 bp, Homo sapiens
tgatatttcattgtg

SEQ ID NO: 693890 - DNA, 15 bp, Homo sapiens
gatatttcattgtgg

SEQ ID NO: 693891 - DNA, 15 bp, Homo sapiens
atatttcattgtggt

SEQ ID NO: 693892 - DNA, 15 bp, Homo sapiens
tatttcattgtggtt

SEQ ID NO: 693893 - DNA, 15 bp, Homo sapiens
atttcattgtggttt

SEQ ID NO: 693894 - DNA, 15 bp, Homo sapiens
tttcattgtggtttc

SEQ ID NO: 693895 - DNA, 15 bp, Homo sapiens
ttcattgtggtttca

SEQ ID NO: 693896 - DNA, 15 bp, Homo sapiens
tcattgtggtttcaa

SEQ ID NO: 693897 - DNA, 15 bp, Homo sapiens
cattgtggtttcaat

SEQ ID NO: 693898 - DNA, 15 bp, Homo sapiens
attgtggtttcaatt

SEQ ID NO: 693899 - DNA, 15 bp, Homo sapiens
ttgtggtttcaattt

SEQ ID NO: 693900 - DNA, 15 bp, Homo sapiens
tgtggtttcaatttg

SEQ ID NO: 693901 - DNA, 15 bp, Homo sapiens
gtggtttcaatttgc

SEQ ID NO: 693902 - DNA, 15 bp, Homo sapiens
tggtttcaatttgca

SEQ ID NO: 693903 - DNA, 15 bp, Homo sapiens
ggtttcaatttgcat

SEQ ID NO: 693904 - DNA, 15 bp, Homo sapiens
gtttcaatttgcatt

SEQ ID NO: 693905 - DNA, 15 bp, Homo sapiens
tttcaatttgcattt

SEQ ID NO: 693906 - DNA, 15 bp, Homo sapiens
ttcaatttgcatttc

SEQ ID NO: 693907 - DNA, 15 bp, Homo sapiens
tcaatttgcatttcc

SEQ ID NO: 693908 - DNA, 15 bp, Homo sapiens
caatttgcatttccc

SEQ ID NO: 693909 - DNA, 15 bp, Homo sapiens
aatttgcatttccct

SEQ ID NO: 693910 - DNA, 15 bp, Homo sapiens
atttgcatttcccta

SEQ ID NO: 693911 - DNA, 15 bp, Homo sapiens
tttgcatttccctaa

SEQ ID NO: 693912 - DNA, 15 bp, Homo sapiens
ttgcatttccctaac

SEQ ID NO: 693913 - DNA, 15 bp, Homo sapiens
tgcatttccctaaca

SEQ ID NO: 693914 - DNA, 15 bp, Homo sapiens
gcatttccctaacaa

SEQ ID NO: 693915 - DNA, 15 bp, Homo sapiens
catttccctaacaac

SEQ ID NO: 693916 - DNA, 15 bp, Homo sapiens
atttccctaacaact

SEQ ID NO: 693917 - DNA, 15 bp, Homo sapiens
tttccctaacaacta

SEQ ID NO: 693918 - DNA, 15 bp, Homo sapiens
ttccctaacaactaa

SEQ ID NO: 693919 - DNA, 15 bp, Homo sapiens
tccctaacaactaat

SEQ ID NO: 693920 - DNA, 15 bp, Homo sapiens
ccctaacaactaatg

SEQ ID NO: 693921 - DNA, 15 bp, Homo sapiens
cctaacaactaatga

SEQ ID NO: 693922 - DNA, 15 bp, Homo sapiens
ctaacaactaatgat

SEQ ID NO: 693923 - DNA, 15 bp, Homo sapiens
taacaactaatgata

SEQ ID NO: 693924 - DNA, 15 bp, Homo sapiens
aacaactaatgatat

SEQ ID NO: 693925 - DNA, 15 bp, Homo sapiens
acaactaatgatatt

SEQ ID NO: 693926 - DNA, 15 bp, Homo sapiens
caactaatgatatta

SEQ ID NO: 693927 - DNA, 15 bp, Homo sapiens
aactaatgatattaa

SEQ ID NO: 693928 - DNA, 15 bp, Homo sapiens
actaatgatattaaa

SEQ ID NO: 693929 - DNA, 15 bp, Homo sapiens
ctaatgatattaaac

SEQ ID NO: 693930 - DNA, 15 bp, Homo sapiens
taatgatattaaaca

SEQ ID NO: 693931 - DNA, 15 bp, Homo sapiens
aatgatattaaacac

SEQ ID NO: 693932 - DNA, 15 bp, Homo sapiens
atgatattaaacacc

SEQ ID NO: 693933 - DNA, 15 bp, Homo sapiens
tgatattaaacacct

SEQ ID NO: 693934 - DNA, 15 bp, Homo sapiens
gatattaaacacctt

SEQ ID NO: 693935 - DNA, 15 bp, Homo sapiens
atattaaacaccttt

SEQ ID NO: 693936 - DNA, 15 bp, Homo sapiens
tattaaacacctttt

SEQ ID NO: 693937 - DNA, 15 bp, Homo sapiens
attaaacaccttttc

SEQ ID NO: 693938 - DNA, 15 bp, Homo sapiens
ttaaacaccttttca

SEQ ID NO: 693939 - DNA, 15 bp, Homo sapiens
taaacaccttttcat

SEQ ID NO: 693940 - DNA, 15 bp, Homo sapiens
aaacaccttttcatg

SEQ ID NO: 693941 - DNA, 15 bp, Homo sapiens
aacaccttttcatgt

SEQ ID NO: 693942 - DNA, 15 bp, Homo sapiens
acaccttttcatgtg

SEQ ID NO: 693943 - DNA, 15 bp, Homo sapiens
caccttttcatgtgc

SEQ ID NO: 693944 - DNA, 15 bp, Homo sapiens
accttttcatgtgct

SEQ ID NO: 693945 - DNA, 15 bp, Homo sapiens
ccttttcatgtgctg

SEQ ID NO: 693946 - DNA, 15 bp, Homo sapiens
cttttcatgtgctgc

SEQ ID NO: 693947 - DNA, 15 bp, Homo sapiens
ttttcatgtgctgct

SEQ ID NO: 693948 - DNA, 15 bp, Homo sapiens
tttcatgtgctgctt

SEQ ID NO: 693949 - DNA, 15 bp, Homo sapiens
ttcatgtgctgcttt

SEQ ID NO: 693950 - DNA, 15 bp, Homo sapiens
tcatgtgctgctttg

SEQ ID NO: 693951 - DNA, 15 bp, Homo sapiens
catgtgctgctttgc

SEQ ID NO: 693952 - DNA, 15 bp, Homo sapiens
atgtgctgctttgct

SEQ ID NO: 693953 - DNA, 15 bp, Homo sapiens
tgtgctgctttgcta

SEQ ID NO: 693954 - DNA, 15 bp, Homo sapiens
gtgctgctttgctat

SEQ ID NO: 693955 - DNA, 15 bp, Homo sapiens
tgctgctttgctatg

SEQ ID NO: 693956 - DNA, 15 bp, Homo sapiens
gctgctttgctatgt

SEQ ID NO: 693957 - DNA, 15 bp, Homo sapiens
ctgctttgctatgtt

SEQ ID NO: 693958 - DNA, 15 bp, Homo sapiens
tgctttgctatgttt

SEQ ID NO: 693959 - DNA, 15 bp, Homo sapiens
gctttgctatgttta

SEQ ID NO: 693960 - DNA, 15 bp, Homo sapiens
ctttgctatgtttat

SEQ ID NO: 693961 - DNA, 15 bp, Homo sapiens
tttgctatgtttatg

SEQ ID NO: 693962 - DNA, 15 bp, Homo sapiens
ttgctatgtttatgt

SEQ ID NO: 693963 - DNA, 15 bp, Homo sapiens
tgctatgtttatgtc

SEQ ID NO: 693964 - DNA, 15 bp, Homo sapiens
gctatgtttatgtcc

SEQ ID NO: 693965 - DNA, 15 bp, Homo sapiens
ctatgtttatgtcct

SEQ ID NO: 693966 - DNA, 15 bp, Homo sapiens
tatgtttatgtcctc

SEQ ID NO: 693967 - DNA, 15 bp, Homo sapiens
atgtttatgtcctct

SEQ ID NO: 693968 - DNA, 15 bp, Homo sapiens
tgtttatgtcctctc

SEQ ID NO: 693969 - DNA, 15 bp, Homo sapiens
gtttatgtcctctct

SEQ ID NO: 693970 - DNA, 15 bp, Homo sapiens
tttatgtcctctctg

SEQ ID NO: 693971 - DNA, 15 bp, Homo sapiens
ttatgtcctctctga

SEQ ID NO: 693972 - DNA, 15 bp, Homo sapiens
tatgtcctctctgaa

SEQ ID NO: 693973 - DNA, 15 bp, Homo sapiens
atgtcctctctgaaa

SEQ ID NO: 693974 - DNA, 15 bp, Homo sapiens
tgtcctctctgaaat

SEQ ID NO: 693975 - DNA, 15 bp, Homo sapiens
gtcctctctgaaatg

SEQ ID NO: 693976 - DNA, 15 bp, Homo sapiens
tcctctctgaaatga

SEQ ID NO: 693977 - DNA, 15 bp, Homo sapiens
cctctctgaaatgaa

SEQ ID NO: 693978 - DNA, 15 bp, Homo sapiens
ctctctgaaatgaaa

SEQ ID NO: 693979 - DNA, 15 bp, Homo sapiens
tctctgaaatgaaat

SEQ ID NO: 693980 - DNA, 15 bp, Homo sapiens
ctctgaaatgaaatg

SEQ ID NO: 693981 - DNA, 15 bp, Homo sapiens
tctgaaatgaaatgt

SEQ ID NO: 693982 - DNA, 15 bp, Homo sapiens
ctgaaatgaaatgtc

SEQ ID NO: 693983 - DNA, 15 bp, Homo sapiens
tgaaatgaaatgtct

SEQ ID NO: 693984 - DNA, 15 bp, Homo sapiens
gaaatgaaatgtctg

SEQ ID NO: 693985 - DNA, 15 bp, Homo sapiens
aaatgaaatgtctgc

SEQ ID NO: 693986 - DNA, 15 bp, Homo sapiens
aatgaaatgtctgct

SEQ ID NO: 693987 - DNA, 15 bp, Homo sapiens
atgaaatgtctgctt

SEQ ID NO: 693988 - DNA, 15 bp, Homo sapiens
tgaaatgtctgctta

SEQ ID NO: 693989 - DNA, 15 bp, Homo sapiens
gaaatgtctgcttat

SEQ ID NO: 693990 - DNA, 15 bp, Homo sapiens
aaatgtctgcttatg

SEQ ID NO: 693991 - DNA, 15 bp, Homo sapiens
aatgtctgcttatgt

SEQ ID NO: 693992 - DNA, 15 bp, Homo sapiens
atgtctgcttatgtc

SEQ ID NO: 693993 - DNA, 15 bp, Homo sapiens
tgtctgcttatgtct

SEQ ID NO: 693994 - DNA, 15 bp, Homo sapiens
gtctgcttatgtctt

SEQ ID NO: 693995 - DNA, 15 bp, Homo sapiens
tctgcttatgtcttt

SEQ ID NO: 693996 - DNA, 15 bp, Homo sapiens
ctgcttatgtctttt

SEQ ID NO: 693997 - DNA, 15 bp, Homo sapiens
tgcttatgtcttttg

SEQ ID NO: 693998 - DNA, 15 bp, Homo sapiens
gcttatgtcttttgc

SEQ ID NO: 693999 - DNA, 15 bp, Homo sapiens
cttatgtcttttgcc

SEQ ID NO: 694000 - DNA, 15 bp, Homo sapiens
ttatgtcttttgccc

SEQ ID NO: 694001 - DNA, 15 bp, Homo sapiens
tatgtcttttgccca

SEQ ID NO: 694002 - DNA, 15 bp, Homo sapiens
atgtcttttgcccac

SEQ ID NO: 694003 - DNA, 15 bp, Homo sapiens
tgtcttttgcccact

SEQ ID NO: 694004 - DNA, 15 bp, Homo sapiens
gtcttttgcccactt

SEQ ID NO: 694005 - DNA, 15 bp, Homo sapiens
tcttttgcccacttt

SEQ ID NO: 694006 - DNA, 15 bp, Homo sapiens
cttttgcccactttc

SEQ ID NO: 694007 - DNA, 15 bp, Homo sapiens
ttttgcccactttct

SEQ ID NO: 694008 - DNA, 15 bp, Homo sapiens
tttgcccactttcta

SEQ ID NO: 694009 - DNA, 15 bp, Homo sapiens
ttgcccactttctaa

SEQ ID NO: 694010 - DNA, 15 bp, Homo sapiens
tgcccactttctaat

SEQ ID NO: 694011 - DNA, 15 bp, Homo sapiens
gcccactttctaatt

SEQ ID NO: 694012 - DNA, 15 bp, Homo sapiens
cccactttctaattg

SEQ ID NO: 694013 - DNA, 15 bp, Homo sapiens
ccactttctaattgg

SEQ ID NO: 694014 - DNA, 15 bp, Homo sapiens
cactttctaattgga

SEQ ID NO: 694015 - DNA, 15 bp, Homo sapiens
actttctaattggat

SEQ ID NO: 694016 - DNA, 15 bp, Homo sapiens
ctttctaattggatt

SEQ ID NO: 694017 - DNA, 15 bp, Homo sapiens
tttctaattggatta

SEQ ID NO: 694018 - DNA, 15 bp, Homo sapiens
ttctaattggattat

SEQ ID NO: 694019 - DNA, 15 bp, Homo sapiens
tctaattggattatt

SEQ ID NO: 694020 - DNA, 15 bp, Homo sapiens
ctaattggattattt

SEQ ID NO: 694021 - DNA, 15 bp, Homo sapiens
taattggattattta

SEQ ID NO: 694022 - DNA, 15 bp, Homo sapiens
aattggattatttat

SEQ ID NO: 694023 - DNA, 15 bp, Homo sapiens
attggattatttatt

SEQ ID NO: 694024 - DNA, 15 bp, Homo sapiens
ttggattatttattt

SEQ ID NO: 694025 - DNA, 15 bp, Homo sapiens
tggattatttatttt

SEQ ID NO: 694026 - DNA, 15 bp, Homo sapiens
ggattatttattttt

SEQ ID NO: 694027 - DNA, 15 bp, Homo sapiens
gattatttatttttc

SEQ ID NO: 694028 - DNA, 15 bp, Homo sapiens
attatttatttttct

SEQ ID NO: 694029 - DNA, 15 bp, Homo sapiens
ttatttatttttctg

SEQ ID NO: 694030 - DNA, 15 bp, Homo sapiens
tatttatttttctgt

SEQ ID NO: 694031 - DNA, 15 bp, Homo sapiens
atttatttttctgtt

SEQ ID NO: 694032 - DNA, 15 bp, Homo sapiens
tttatttttctgttg

SEQ ID NO: 694033 - DNA, 15 bp, Homo sapiens
ttatttttctgttga

SEQ ID NO: 694034 - DNA, 15 bp, Homo sapiens
tatttttctgttgag

SEQ ID NO: 694035 - DNA, 15 bp, Homo sapiens
atttttctgttgagt

SEQ ID NO: 694036 - DNA, 15 bp, Homo sapiens
tttttctgttgagtt

SEQ ID NO: 694037 - DNA, 15 bp, Homo sapiens
ttttctgttgagttt

SEQ ID NO: 694038 - DNA, 15 bp, Homo sapiens
tttctgttgagttta

SEQ ID NO: 694039 - DNA, 15 bp, Homo sapiens
ttctgttgagtttat

SEQ ID NO: 694040 - DNA, 15 bp, Homo sapiens
tctgttgagtttata

SEQ ID NO: 694041 - DNA, 15 bp, Homo sapiens
ctgttgagtttatat

SEQ ID NO: 694042 - DNA, 15 bp, Homo sapiens
tgttgagtttatata

SEQ ID NO: 694043 - DNA, 15 bp, Homo sapiens
gttgagtttatatat

SEQ ID NO: 694044 - DNA, 15 bp, Homo sapiens
ttgagtttatatatt

SEQ ID NO: 694045 - DNA, 15 bp, Homo sapiens
tgagtttatatattc

SEQ ID NO: 694046 - DNA, 15 bp, Homo sapiens
gagtttatatattct

SEQ ID NO: 694047 - DNA, 15 bp, Homo sapiens
agtttatatattcta

SEQ ID NO: 694048 - DNA, 15 bp, Homo sapiens
gtttatatattctaa

SEQ ID NO: 694049 - DNA, 15 bp, Homo sapiens
tttatatattctaaa

SEQ ID NO: 694050 - DNA, 15 bp, Homo sapiens
ttatatattctaaac

SEQ ID NO: 694051 - DNA, 15 bp, Homo sapiens
tatatattctaaaca

SEQ ID NO: 694052 - DNA, 15 bp, Homo sapiens
atatattctaaacac

SEQ ID NO: 694053 - DNA, 15 bp, Homo sapiens
tatattctaaacact

SEQ ID NO: 694054 - DNA, 15 bp, Homo sapiens
atattctaaacacta

SEQ ID NO: 694055 - DNA, 15 bp, Homo sapiens
tattctaaacactag

SEQ ID NO: 694056 - DNA, 15 bp, Homo sapiens
attctaaacactagt

SEQ ID NO: 694057 - DNA, 15 bp, Homo sapiens
ttctaaacactagtc

SEQ ID NO: 694058 - DNA, 15 bp, Homo sapiens
tctaaacactagtcc

SEQ ID NO: 694059 - DNA, 15 bp, Homo sapiens
ctaaacactagtcct

SEQ ID NO: 694060 - DNA, 15 bp, Homo sapiens
taaacactagtcctt

SEQ ID NO: 694061 - DNA, 15 bp, Homo sapiens
aaacactagtccttt

SEQ ID NO: 694062 - DNA, 15 bp, Homo sapiens
aacactagtcctttg

SEQ ID NO: 694063 - DNA, 15 bp, Homo sapiens
acactagtcctttgt

SEQ ID NO: 694064 - DNA, 15 bp, Homo sapiens
cactagtcctttgtc

SEQ ID NO: 694065 - DNA, 15 bp, Homo sapiens
actagtcctttgtca

SEQ ID NO: 694066 - DNA, 15 bp, Homo sapiens
ctagtcctttgtcat

SEQ ID NO: 694067 - DNA, 15 bp, Homo sapiens
tagtcctttgtcata

SEQ ID NO: 694068 - DNA, 15 bp, Homo sapiens
agtcctttgtcatat

SEQ ID NO: 694069 - DNA, 15 bp, Homo sapiens
gtcctttgtcatata

SEQ ID NO: 694070 - DNA, 15 bp, Homo sapiens
tcctttgtcatatat

SEQ ID NO: 694071 - DNA, 15 bp, Homo sapiens
cctttgtcatatatg

SEQ ID NO: 694072 - DNA, 15 bp, Homo sapiens
ctttgtcatatatgt

SEQ ID NO: 694073 - DNA, 15 bp, Homo sapiens
tttgtcatatatgtg

SEQ ID NO: 694074 - DNA, 15 bp, Homo sapiens
ttgtcatatatgtgg

SEQ ID NO: 694075 - DNA, 15 bp, Homo sapiens
tgtcatatatgtggt

SEQ ID NO: 694076 - DNA, 15 bp, Homo sapiens
gtcatatatgtggtt

SEQ ID NO: 694077 - DNA, 15 bp, Homo sapiens
tcatatatgtggttt

SEQ ID NO: 694078 - DNA, 15 bp, Homo sapiens
catatatgtggtttg

SEQ ID NO: 694079 - DNA, 15 bp, Homo sapiens
atatatgtggtttga

SEQ ID NO: 694080 - DNA, 15 bp, Homo sapiens
tatatgtggtttgaa

SEQ ID NO: 694081 - DNA, 15 bp, Homo sapiens
atatgtggtttgaaa

SEQ ID NO: 694082 - DNA, 15 bp, Homo sapiens
tatgtggtttgaaat

SEQ ID NO: 694083 - DNA, 15 bp, Homo sapiens
atgtggtttgaaatt

SEQ ID NO: 694084 - DNA, 15 bp, Homo sapiens
tgtggtttgaaattc

SEQ ID NO: 694085 - DNA, 15 bp, Homo sapiens
gtggtttgaaattct

SEQ ID NO: 694086 - DNA, 15 bp, Homo sapiens
tggtttgaaattctt

SEQ ID NO: 694087 - DNA, 15 bp, Homo sapiens
ggtttgaaattcttt

SEQ ID NO: 694088 - DNA, 15 bp, Homo sapiens
gtttgaaattctttt

SEQ ID NO: 694089 - DNA, 15 bp, Homo sapiens
tttgaaattcttttc

SEQ ID NO: 694090 - DNA, 15 bp, Homo sapiens
ttgaaattcttttct

SEQ ID NO: 694091 - DNA, 15 bp, Homo sapiens
tgaaattcttttctc

SEQ ID NO: 694092 - DNA, 15 bp, Homo sapiens
gaaattcttttctcc

SEQ ID NO: 694093 - DNA, 15 bp, Homo sapiens
aaattcttttctccc

SEQ ID NO: 694094 - DNA, 15 bp, Homo sapiens
aattcttttctccca

SEQ ID NO: 694095 - DNA, 15 bp, Homo sapiens
attcttttctcccac

SEQ ID NO: 694096 - DNA, 15 bp, Homo sapiens
ttcttttctcccaca

SEQ ID NO: 694097 - DNA, 15 bp, Homo sapiens
tcttttctcccacac

SEQ ID NO: 694098 - DNA, 15 bp, Homo sapiens
cttttctcccacact

SEQ ID NO: 694099 - DNA, 15 bp, Homo sapiens
ttttctcccacacta

SEQ ID NO: 694100 - DNA, 15 bp, Homo sapiens
tttctcccacactat

SEQ ID NO: 694101 - DNA, 15 bp, Homo sapiens
ttctcccacactatg

SEQ ID NO: 694102 - DNA, 15 bp, Homo sapiens
tctcccacactatgg

SEQ ID NO: 694103 - DNA, 15 bp, Homo sapiens
ctcccacactatggc

SEQ ID NO: 694104 - DNA, 15 bp, Homo sapiens
tcccacactatggca

SEQ ID NO: 694105 - DNA, 15 bp, Homo sapiens
cccacactatggcac

SEQ ID NO: 694106 - DNA, 15 bp, Homo sapiens
ccacactatggcacg

SEQ ID NO: 694107 - DNA, 15 bp, Homo sapiens
cacactatggcacgt

SEQ ID NO: 694108 - DNA, 15 bp, Homo sapiens
acactatggcacgtc

SEQ ID NO: 694109 - DNA, 15 bp, Homo sapiens
cactatggcacgtct

SEQ ID NO: 694110 - DNA, 15 bp, Homo sapiens
actatggcacgtcta

SEQ ID NO: 694111 - DNA, 15 bp, Homo sapiens
ctatggcacgtctat

SEQ ID NO: 694112 - DNA, 15 bp, Homo sapiens
tatggcacgtctatt

SEQ ID NO: 694113 - DNA, 15 bp, Homo sapiens
atggcacgtctattc

SEQ ID NO: 694114 - DNA, 15 bp, Homo sapiens
tggcacgtctattca

SEQ ID NO: 694115 - DNA, 15 bp, Homo sapiens
ggcacgtctattcat

SEQ ID NO: 694116 - DNA, 15 bp, Homo sapiens
gcacgtctattcatc

SEQ ID NO: 694117 - DNA, 15 bp, Homo sapiens
cacgtctattcatct

SEQ ID NO: 694118 - DNA, 15 bp, Homo sapiens
acgtctattcatctt

SEQ ID NO: 694119 - DNA, 15 bp, Homo sapiens
cgtctattcatcttc

SEQ ID NO: 694120 - DNA, 15 bp, Homo sapiens
gtctattcatcttca

SEQ ID NO: 694121 - DNA, 15 bp, Homo sapiens
tctattcatcttcac

SEQ ID NO: 694122 - DNA, 15 bp, Homo sapiens
ctattcatcttcaca

SEQ ID NO: 694123 - DNA, 15 bp, Homo sapiens
tattcatcttcacat

SEQ ID NO: 694124 - DNA, 15 bp, Homo sapiens
attcatcttcacatg

SEQ ID NO: 694125 - DNA, 15 bp, Homo sapiens
ttcatcttcacatgg

SEQ ID NO: 694126 - DNA, 15 bp, Homo sapiens
tcatcttcacatggg

SEQ ID NO: 694127 - DNA, 15 bp, Homo sapiens
catcttcacatgggc

SEQ ID NO: 694128 - DNA, 15 bp, Homo sapiens
atcttcacatgggct

SEQ ID NO: 694129 - DNA, 15 bp, Homo sapiens
tcttcacatgggctt

SEQ ID NO: 694130 - DNA, 15 bp, Homo sapiens
cttcacatgggcttt

SEQ ID NO: 694131 - DNA, 15 bp, Homo sapiens
ttcacatgggctttc

SEQ ID NO: 694132 - DNA, 15 bp, Homo sapiens
tcacatgggctttca

SEQ ID NO: 694133 - DNA, 15 bp, Homo sapiens
cacatgggctttcat

SEQ ID NO: 694134 - DNA, 15 bp, Homo sapiens
acatgggctttcata

SEQ ID NO: 694135 - DNA, 15 bp, Homo sapiens
catgggctttcatag

SEQ ID NO: 694136 - DNA, 15 bp, Homo sapiens
atgggctttcataga

SEQ ID NO: 694137 - DNA, 15 bp, Homo sapiens
tgggctttcatagag

SEQ ID NO: 694138 - DNA, 15 bp, Homo sapiens
gggctttcatagagc

SEQ ID NO: 694139 - DNA, 15 bp, Homo sapiens
ggctttcatagagca

SEQ ID NO: 694140 - DNA, 15 bp, Homo sapiens
gctttcatagagcaa

SEQ ID NO: 694141 - DNA, 15 bp, Homo sapiens
ctttcatagagcaaa

SEQ ID NO: 694142 - DNA, 15 bp, Homo sapiens
tttcatagagcaaaa

SEQ ID NO: 694143 - DNA, 15 bp, Homo sapiens
ttcatagagcaaaag

SEQ ID NO: 694144 - DNA, 15 bp, Homo sapiens
tcatagagcaaaagt

SEQ ID NO: 694145 - DNA, 15 bp, Homo sapiens
catagagcaaaagtt

SEQ ID NO: 694146 - DNA, 15 bp, Homo sapiens
atagagcaaaagttt

SEQ ID NO: 694147 - DNA, 15 bp, Homo sapiens
tagagcaaaagtttt

SEQ ID NO: 694148 - DNA, 15 bp, Homo sapiens
agagcaaaagttttt

SEQ ID NO: 694149 - DNA, 15 bp, Homo sapiens
gagcaaaagttttta

SEQ ID NO: 694150 - DNA, 15 bp, Homo sapiens
agcaaaagtttttaa

SEQ ID NO: 694151 - DNA, 15 bp, Homo sapiens
gcaaaagtttttaat

SEQ ID NO: 694152 - DNA, 15 bp, Homo sapiens
caaaagtttttaatt

SEQ ID NO: 694153 - DNA, 15 bp, Homo sapiens
aaaagtttttaattc

SEQ ID NO: 694154 - DNA, 15 bp, Homo sapiens
aaagtttttaattcc

SEQ ID NO: 694155 - DNA, 15 bp, Homo sapiens
aagtttttaattccg

SEQ ID NO: 694156 - DNA, 15 bp, Homo sapiens
agtttttaattccga

SEQ ID NO: 694157 - DNA, 15 bp, Homo sapiens
gtttttaattccgat

SEQ ID NO: 694158 - DNA, 15 bp, Homo sapiens
tttttaattccgatg

SEQ ID NO: 694159 - DNA, 15 bp, Homo sapiens
ttttaattccgatga

SEQ ID NO: 694160 - DNA, 15 bp, Homo sapiens
tttaattccgatgag

SEQ ID NO: 694161 - DNA, 15 bp, Homo sapiens
ttaattccgatgaga

SEQ ID NO: 694162 - DNA, 15 bp, Homo sapiens
taattccgatgagat

SEQ ID NO: 694163 - DNA, 15 bp, Homo sapiens
aattccgatgagatc

SEQ ID NO: 694164 - DNA, 15 bp, Homo sapiens
attccgatgagatct

SEQ ID NO: 694165 - DNA, 15 bp, Homo sapiens
ttccgatgagatcta

SEQ ID NO: 694166 - DNA, 15 bp, Homo sapiens
tccgatgagatctag

SEQ ID NO: 694167 - DNA, 15 bp, Homo sapiens
ccgatgagatctagg

SEQ ID NO: 694168 - DNA, 15 bp, Homo sapiens
cgatgagatctaggc

SEQ ID NO: 694169 - DNA, 15 bp, Homo sapiens
gatgagatctaggcg

SEQ ID NO: 694170 - DNA, 15 bp, Homo sapiens
atgagatctaggcgc

SEQ ID NO: 694171 - DNA, 15 bp, Homo sapiens
tgagatctaggcgcc

SEQ ID NO: 694172 - DNA, 15 bp, Homo sapiens
gagatctaggcgcca

SEQ ID NO: 694173 - DNA, 15 bp, Homo sapiens
agatctaggcgccat

SEQ ID NO: 694174 - DNA, 15 bp, Homo sapiens
gatctaggcgccatg

SEQ ID NO: 694175 - DNA, 15 bp, Homo sapiens
atctaggcgccatga

SEQ ID NO: 694176 - DNA, 15 bp, Homo sapiens
tctaggcgccatgat

SEQ ID NO: 694177 - DNA, 15 bp, Homo sapiens
ctaggcgccatgatt

SEQ ID NO: 694178 - DNA, 15 bp, Homo sapiens
taggcgccatgattt

SEQ ID NO: 694179 - DNA, 15 bp, Homo sapiens
aggcgccatgatttt

SEQ ID NO: 694180 - DNA, 15 bp, Homo sapiens
ggcgccatgattttt

SEQ ID NO: 694181 - DNA, 15 bp, Homo sapiens
gcgccatgattttta

SEQ ID NO: 694182 - DNA, 15 bp, Homo sapiens
cgccatgatttttaa

SEQ ID NO: 694183 - DNA, 15 bp, Homo sapiens
gccatgatttttaaa

SEQ ID NO: 694184 - DNA, 15 bp, Homo sapiens
ccatgatttttaaat

SEQ ID NO: 694185 - DNA, 15 bp, Homo sapiens
catgatttttaaatt

SEQ ID NO: 694186 - DNA, 15 bp, Homo sapiens
atgatttttaaattc

SEQ ID NO: 694187 - DNA, 15 bp, Homo sapiens
tgatttttaaattca

SEQ ID NO: 694188 - DNA, 15 bp, Homo sapiens
gatttttaaattcag

SEQ ID NO: 694189 - DNA, 15 bp, Homo sapiens
atttttaaattcagc

SEQ ID NO: 694190 - DNA, 15 bp, Homo sapiens
tttttaaattcagca

SEQ ID NO: 694191 - DNA, 15 bp, Homo sapiens
ttttaaattcagcaa

SEQ ID NO: 694192 - DNA, 15 bp, Homo sapiens
tttaaattcagcaat

SEQ ID NO: 694193 - DNA, 15 bp, Homo sapiens
ttaaattcagcaatt

SEQ ID NO: 694194 - DNA, 15 bp, Homo sapiens
taaattcagcaatta

SEQ ID NO: 694195 - DNA, 15 bp, Homo sapiens
aaattcagcaattat

SEQ ID NO: 694196 - DNA, 15 bp, Homo sapiens
aattcagcaattatg

SEQ ID NO: 694197 - DNA, 15 bp, Homo sapiens
attcagcaattatga

SEQ ID NO: 694198 - DNA, 15 bp, Homo sapiens
ttcagcaattatgaa

SEQ ID NO: 694199 - DNA, 15 bp, Homo sapiens
tcagcaattatgaac

SEQ ID NO: 694200 - DNA, 15 bp, Homo sapiens
cagcaattatgaact

SEQ ID NO: 694201 - DNA, 15 bp, Homo sapiens
agcaattatgaactc

SEQ ID NO: 694202 - DNA, 15 bp, Homo sapiens
gcaattatgaactct

SEQ ID NO: 694203 - DNA, 15 bp, Homo sapiens
caattatgaactctc

SEQ ID NO: 694204 - DNA, 15 bp, Homo sapiens
aattatgaactctct

SEQ ID NO: 694205 - DNA, 15 bp, Homo sapiens
attatgaactctctt

SEQ ID NO: 694206 - DNA, 15 bp, Homo sapiens
ttatgaactctcttc

SEQ ID NO: 694207 - DNA, 15 bp, Homo sapiens
tatgaactctcttct

SEQ ID NO: 694208 - DNA, 15 bp, Homo sapiens
atgaactctcttctg

SEQ ID NO: 694209 - DNA, 15 bp, Homo sapiens
tgaactctcttctgg

SEQ ID NO: 694210 - DNA, 15 bp, Homo sapiens
gaactctcttctggc

SEQ ID NO: 694211 - DNA, 15 bp, Homo sapiens
aactctcttctggcc

SEQ ID NO: 694212 - DNA, 15 bp, Homo sapiens
actctcttctggcct

SEQ ID NO: 694213 - DNA, 15 bp, Homo sapiens
ctctcttctggcctc

SEQ ID NO: 694214 - DNA, 15 bp, Homo sapiens
tctcttctggcctcc

SEQ ID NO: 694215 - DNA, 15 bp, Homo sapiens
ctcttctggcctcca

SEQ ID NO: 694216 - DNA, 15 bp, Homo sapiens
tcttctggcctccaa

SEQ ID NO: 694217 - DNA, 15 bp, Homo sapiens
cttctggcctccaac

SEQ ID NO: 694218 - DNA, 15 bp, Homo sapiens
ttctggcctccaact

SEQ ID NO: 694219 - DNA, 15 bp, Homo sapiens
tctggcctccaacta

SEQ ID NO: 694220 - DNA, 15 bp, Homo sapiens
ctggcctccaactat

SEQ ID NO: 694221 - DNA, 15 bp, Homo sapiens
tggcctccaactatt

SEQ ID NO: 694222 - DNA, 15 bp, Homo sapiens
ggcctccaactattc

SEQ ID NO: 694223 - DNA, 15 bp, Homo sapiens
gcctccaactattca

SEQ ID NO: 694224 - DNA, 15 bp, Homo sapiens
cctccaactattcat

SEQ ID NO: 694225 - DNA, 15 bp, Homo sapiens
ctccaactattcata

SEQ ID NO: 694226 - DNA, 15 bp, Homo sapiens
tccaactattcatag

SEQ ID NO: 694227 - DNA, 15 bp, Homo sapiens
ccaactattcataga

SEQ ID NO: 694228 - DNA, 15 bp, Homo sapiens
caactattcatagaa

SEQ ID NO: 694229 - DNA, 15 bp, Homo sapiens
aactattcatagaag

SEQ ID NO: 694230 - DNA, 15 bp, Homo sapiens
actattcatagaagc

SEQ ID NO: 694231 - DNA, 15 bp, Homo sapiens
ctattcatagaagca

SEQ ID NO: 694232 - DNA, 15 bp, Homo sapiens
tattcatagaagcaa

SEQ ID NO: 694233 - DNA, 15 bp, Homo sapiens
attcatagaagcaaa

SEQ ID NO: 694234 - DNA, 15 bp, Homo sapiens
ttcatagaagcaaaa

SEQ ID NO: 694235 - DNA, 15 bp, Homo sapiens
tcatagaagcaaaag

SEQ ID NO: 694236 - DNA, 15 bp, Homo sapiens
catagaagcaaaaga

SEQ ID NO: 694237 - DNA, 15 bp, Homo sapiens
atagaagcaaaagaa

SEQ ID NO: 694238 - DNA, 15 bp, Homo sapiens
tagaagcaaaagaat

SEQ ID NO: 694239 - DNA, 15 bp, Homo sapiens
agaagcaaaagaatt

SEQ ID NO: 694240 - DNA, 15 bp, Homo sapiens
gaagcaaaagaattc

SEQ ID NO: 694241 - DNA, 15 bp, Homo sapiens
aagcaaaagaattcc

SEQ ID NO: 694242 - DNA, 15 bp, Homo sapiens
agcaaaagaattcca

SEQ ID NO: 694243 - DNA, 15 bp, Homo sapiens
gcaaaagaattccat

SEQ ID NO: 694244 - DNA, 15 bp, Homo sapiens
caaaagaattccatc

SEQ ID NO: 694245 - DNA, 15 bp, Homo sapiens
aaaagaattccatca

SEQ ID NO: 694246 - DNA, 15 bp, Homo sapiens
aaagaattccatcag

SEQ ID NO: 694247 - DNA, 15 bp, Homo sapiens
aagaattccatcagc

SEQ ID NO: 694248 - DNA, 15 bp, Homo sapiens
agaattccatcagca

SEQ ID NO: 694249 - DNA, 15 bp, Homo sapiens
gaattccatcagcat

SEQ ID NO: 694250 - DNA, 15 bp, Homo sapiens
aattccatcagcatt

SEQ ID NO: 694251 - DNA, 15 bp, Homo sapiens
attccatcagcatta

SEQ ID NO: 694252 - DNA, 15 bp, Homo sapiens
ttccatcagcattat

SEQ ID NO: 694253 - DNA, 15 bp, Homo sapiens
tccatcagcattatc

SEQ ID NO: 694254 - DNA, 15 bp, Homo sapiens
ccatcagcattatct

SEQ ID NO: 694255 - DNA, 15 bp, Homo sapiens
catcagcattatcta

SEQ ID NO: 694256 - DNA, 15 bp, Homo sapiens
atcagcattatctat

SEQ ID NO: 694257 - DNA, 15 bp, Homo sapiens
tcagcattatctatc

SEQ ID NO: 694258 - DNA, 15 bp, Homo sapiens
cagcattatctatca

SEQ ID NO: 694259 - DNA, 15 bp, Homo sapiens
agcattatctatcag

SEQ ID NO: 694260 - DNA, 15 bp, Homo sapiens
gcattatctatcagt

SEQ ID NO: 694261 - DNA, 15 bp, Homo sapiens
cattatctatcagta

SEQ ID NO: 694262 - DNA, 15 bp, Homo sapiens
attatctatcagtac

SEQ ID NO: 694263 - DNA, 15 bp, Homo sapiens
ttatctatcagtaca

SEQ ID NO: 694264 - DNA, 15 bp, Homo sapiens
tatctatcagtacaa

SEQ ID NO: 694265 - DNA, 15 bp, Homo sapiens
atctatcagtacaac

SEQ ID NO: 694266 - DNA, 15 bp, Homo sapiens
tctatcagtacaaca

SEQ ID NO: 694267 - DNA, 15 bp, Homo sapiens
ctatcagtacaacag

SEQ ID NO: 694268 - DNA, 15 bp, Homo sapiens
tatcagtacaacagt

SEQ ID NO: 694269 - DNA, 15 bp, Homo sapiens
atcagtacaacagtg

SEQ ID NO: 694270 - DNA, 15 bp, Homo sapiens
tcagtacaacagtga

SEQ ID NO: 694271 - DNA, 15 bp, Homo sapiens
cagtacaacagtgat

SEQ ID NO: 694272 - DNA, 15 bp, Homo sapiens
agtacaacagtgatt

SEQ ID NO: 694273 - DNA, 15 bp, Homo sapiens
gtacaacagtgattc

SEQ ID NO: 694274 - DNA, 15 bp, Homo sapiens
tacaacagtgattct

SEQ ID NO: 694275 - DNA, 15 bp, Homo sapiens
acaacagtgattctc

SEQ ID NO: 694276 - DNA, 15 bp, Homo sapiens
caacagtgattctca

SEQ ID NO: 694277 - DNA, 15 bp, Homo sapiens
aacagtgattctcac

SEQ ID NO: 694278 - DNA, 15 bp, Homo sapiens
acagtgattctcact

SEQ ID NO: 694279 - DNA, 15 bp, Homo sapiens
cagtgattctcactg

SEQ ID NO: 694280 - DNA, 15 bp, Homo sapiens
agtgattctcactgc

SEQ ID NO: 694281 - DNA, 15 bp, Homo sapiens
gtgattctcactgct

SEQ ID NO: 694282 - DNA, 15 bp, Homo sapiens
tgattctcactgcta

SEQ ID NO: 694283 - DNA, 15 bp, Homo sapiens
gattctcactgctac

SEQ ID NO: 694284 - DNA, 15 bp, Homo sapiens
attctcactgctact

SEQ ID NO: 694285 - DNA, 15 bp, Homo sapiens
ttctcactgctactg

SEQ ID NO: 694286 - DNA, 15 bp, Homo sapiens
tctcactgctactgg

SEQ ID NO: 694287 - DNA, 15 bp, Homo sapiens
ctcactgctactgga

SEQ ID NO: 694288 - DNA, 15 bp, Homo sapiens
tcactgctactggaa

SEQ ID NO: 694289 - DNA, 15 bp, Homo sapiens
cactgctactggaat

SEQ ID NO: 694290 - DNA, 15 bp, Homo sapiens
actgctactggaatt

SEQ ID NO: 694291 - DNA, 15 bp, Homo sapiens
ctgctactggaatta

SEQ ID NO: 694292 - DNA, 15 bp, Homo sapiens
tgctactggaattaa

SEQ ID NO: 694293 - DNA, 15 bp, Homo sapiens
gctactggaattaag

SEQ ID NO: 694294 - DNA, 15 bp, Homo sapiens
ctactggaattaagt

SEQ ID NO: 694295 - DNA, 15 bp, Homo sapiens
tactggaattaagtt

SEQ ID NO: 694296 - DNA, 15 bp, Homo sapiens
actggaattaagttg

SEQ ID NO: 694297 - DNA, 15 bp, Homo sapiens
ctggaattaagttgg

SEQ ID NO: 694298 - DNA, 15 bp, Homo sapiens
tggaattaagttggt

SEQ ID NO: 694299 - DNA, 15 bp, Homo sapiens
ggaattaagttggtg

SEQ ID NO: 694300 - DNA, 15 bp, Homo sapiens
gaattaagttggtgc

SEQ ID NO: 694301 - DNA, 15 bp, Homo sapiens
aattaagttggtgct

SEQ ID NO: 694302 - DNA, 15 bp, Homo sapiens
attaagttggtgcta

SEQ ID NO: 694303 - DNA, 15 bp, Homo sapiens
ttaagttggtgctaa

SEQ ID NO: 694304 - DNA, 15 bp, Homo sapiens
taagttggtgctaat

SEQ ID NO: 694305 - DNA, 15 bp, Homo sapiens
aagttggtgctaatt

SEQ ID NO: 694306 - DNA, 15 bp, Homo sapiens
agttggtgctaatta

SEQ ID NO: 694307 - DNA, 15 bp, Homo sapiens
gttggtgctaattat

SEQ ID NO: 694308 - DNA, 15 bp, Homo sapiens
ttggtgctaattata

SEQ ID NO: 694309 - DNA, 15 bp, Homo sapiens
tggtgctaattataa

SEQ ID NO: 694310 - DNA, 15 bp, Homo sapiens
ggtgctaattataat

SEQ ID NO: 694311 - DNA, 15 bp, Homo sapiens
gtgctaattataatc

SEQ ID NO: 694312 - DNA, 15 bp, Homo sapiens
tgctaattataatca

SEQ ID NO: 694313 - DNA, 15 bp, Homo sapiens
gctaattataatcat

SEQ ID NO: 694314 - DNA, 15 bp, Homo sapiens
ctaattataatcata

SEQ ID NO: 694315 - DNA, 15 bp, Homo sapiens
taattataatcataa

SEQ ID NO: 694316 - DNA, 15 bp, Homo sapiens
aattataatcataaa

SEQ ID NO: 694317 - DNA, 15 bp, Homo sapiens
attataatcataaac

SEQ ID NO: 694318 - DNA, 15 bp, Homo sapiens
ttataatcataaaca

SEQ ID NO: 694319 - DNA, 15 bp, Homo sapiens
tataatcataaacat

SEQ ID NO: 694320 - DNA, 15 bp, Homo sapiens
ataatcataaacatc

SEQ ID NO: 694321 - DNA, 15 bp, Homo sapiens
taatcataaacatca

SEQ ID NO: 694322 - DNA, 15 bp, Homo sapiens
aatcataaacatcag

SEQ ID NO: 694323 - DNA, 15 bp, Homo sapiens
atcataaacatcagt

SEQ ID NO: 694324 - DNA, 15 bp, Homo sapiens
tcataaacatcagtc

SEQ ID NO: 694325 - DNA, 15 bp, Homo sapiens
cataaacatcagtct

SEQ ID NO: 694326 - DNA, 15 bp, Homo sapiens
ataaacatcagtctc

SEQ ID NO: 694327 - DNA, 15 bp, Homo sapiens
taaacatcagtctcc

SEQ ID NO: 694328 - DNA, 15 bp, Homo sapiens
aaacatcagtctcca

SEQ ID NO: 694329 - DNA, 15 bp, Homo sapiens
aacatcagtctccat

SEQ ID NO: 694330 - DNA, 15 bp, Homo sapiens
acatcagtctccatg

SEQ ID NO: 694331 - DNA, 15 bp, Homo sapiens
catcagtctccatga

SEQ ID NO: 694332 - DNA, 15 bp, Homo sapiens
atcagtctccatgac

SEQ ID NO: 694333 - DNA, 15 bp, Homo sapiens
tcagtctccatgacc

SEQ ID NO: 694334 - DNA, 15 bp, Homo sapiens
cagtctccatgacca

SEQ ID NO: 694335 - DNA, 15 bp, Homo sapiens
agtctccatgaccat

SEQ ID NO: 694336 - DNA, 15 bp, Homo sapiens
gtctccatgaccatt

SEQ ID NO: 694337 - DNA, 15 bp, Homo sapiens
tctccatgaccattc

SEQ ID NO: 694338 - DNA, 15 bp, Homo sapiens
ctccatgaccattca

SEQ ID NO: 694339 - DNA, 15 bp, Homo sapiens
tccatgaccattcac

SEQ ID NO: 694340 - DNA, 15 bp, Homo sapiens
ccatgaccattcact

SEQ ID NO: 694341 - DNA, 15 bp, Homo sapiens
catgaccattcacta

SEQ ID NO: 694342 - DNA, 15 bp, Homo sapiens
atgaccattcactaa

SEQ ID NO: 694343 - DNA, 15 bp, Homo sapiens
tgaccattcactaag

SEQ ID NO: 694344 - DNA, 15 bp, Homo sapiens
gaccattcactaagc

SEQ ID NO: 694345 - DNA, 15 bp, Homo sapiens
accattcactaagca

SEQ ID NO: 694346 - DNA, 15 bp, Homo sapiens
ccattcactaagcaa

SEQ ID NO: 694347 - DNA, 15 bp, Homo sapiens
cattcactaagcaaa

SEQ ID NO: 694348 - DNA, 15 bp, Homo sapiens
attcactaagcaaaa

SEQ ID NO: 694349 - DNA, 15 bp, Homo sapiens
ttcactaagcaaaat

SEQ ID NO: 694350 - DNA, 15 bp, Homo sapiens
tcactaagcaaaatc

SEQ ID NO: 694351 - DNA, 15 bp, Homo sapiens
cactaagcaaaatca

SEQ ID NO: 694352 - DNA, 15 bp, Homo sapiens
actaagcaaaatcac

SEQ ID NO: 694353 - DNA, 15 bp, Homo sapiens
ctaagcaaaatcacc

SEQ ID NO: 694354 - DNA, 15 bp, Homo sapiens
taagcaaaatcacct

SEQ ID NO: 694355 - DNA, 15 bp, Homo sapiens
aagcaaaatcacctc

SEQ ID NO: 694356 - DNA, 15 bp, Homo sapiens
agcaaaatcacctcc

SEQ ID NO: 694357 - DNA, 15 bp, Homo sapiens
gcaaaatcacctcca

SEQ ID NO: 694358 - DNA, 15 bp, Homo sapiens
caaaatcacctccat

SEQ ID NO: 694359 - DNA, 15 bp, Homo sapiens
aaaatcacctccatt

SEQ ID NO: 694360 - DNA, 15 bp, Homo sapiens
aaatcacctccattc

SEQ ID NO: 694361 - DNA, 15 bp, Homo sapiens
aatcacctccattcc

SEQ ID NO: 694362 - DNA, 15 bp, Homo sapiens
atcacctccattcct

SEQ ID NO: 694363 - DNA, 15 bp, Homo sapiens
tcacctccattcctt

SEQ ID NO: 694364 - DNA, 15 bp, Homo sapiens
cacctccattccttt

SEQ ID NO: 694365 - DNA, 15 bp, Homo sapiens
acctccattcctttc

SEQ ID NO: 694366 - DNA, 15 bp, Homo sapiens
cctccattcctttca

SEQ ID NO: 694367 - DNA, 15 bp, Homo sapiens
ctccattcctttcat

SEQ ID NO: 694368 - DNA, 15 bp, Homo sapiens
tccattcctttcatt

SEQ ID NO: 694369 - DNA, 15 bp, Homo sapiens
ccattcctttcattc

SEQ ID NO: 694370 - DNA, 15 bp, Homo sapiens
cattcctttcattcc

SEQ ID NO: 694371 - DNA, 15 bp, Homo sapiens
attcctttcattcca

SEQ ID NO: 694372 - DNA, 15 bp, Homo sapiens
ttcctttcattccaa

SEQ ID NO: 694373 - DNA, 15 bp, Homo sapiens
tcctttcattccaat

SEQ ID NO: 694374 - DNA, 15 bp, Homo sapiens
cctttcattccaatt

SEQ ID NO: 694375 - DNA, 15 bp, Homo sapiens
ctttcattccaatta

SEQ ID NO: 694376 - DNA, 15 bp, Homo sapiens
tttcattccaattaa

SEQ ID NO: 694377 - DNA, 15 bp, Homo sapiens
ttcattccaattaat

SEQ ID NO: 694378 - DNA, 15 bp, Homo sapiens
tcattccaattaatc

SEQ ID NO: 694379 - DNA, 15 bp, Homo sapiens
cattccaattaatct

SEQ ID NO: 694380 - DNA, 15 bp, Homo sapiens
attccaattaatcta

SEQ ID NO: 694381 - DNA, 15 bp, Homo sapiens
ttccaattaatctat

SEQ ID NO: 694382 - DNA, 15 bp, Homo sapiens
tccaattaatctata

SEQ ID NO: 694383 - DNA, 15 bp, Homo sapiens
ccaattaatctataa

SEQ ID NO: 694384 - DNA, 15 bp, Homo sapiens
caattaatctataat

SEQ ID NO: 694385 - DNA, 15 bp, Homo sapiens
aattaatctataatc

SEQ ID NO: 694386 - DNA, 15 bp, Homo sapiens
attaatctataatct

SEQ ID NO: 694387 - DNA, 15 bp, Homo sapiens
ttaatctataatctc

SEQ ID NO: 694388 - DNA, 15 bp, Homo sapiens
taatctataatctca

SEQ ID NO: 694389 - DNA, 15 bp, Homo sapiens
aatctataatctcat

SEQ ID NO: 694390 - DNA, 15 bp, Homo sapiens
atctataatctcatt

SEQ ID NO: 694391 - DNA, 15 bp, Homo sapiens
tctataatctcatta

SEQ ID NO: 694392 - DNA, 15 bp, Homo sapiens
ctataatctcattac

SEQ ID NO: 694393 - DNA, 15 bp, Homo sapiens
tataatctcattaca

SEQ ID NO: 694394 - DNA, 15 bp, Homo sapiens
ataatctcattacaa

SEQ ID NO: 694395 - DNA, 15 bp, Homo sapiens
taatctcattacaaa

SEQ ID NO: 694396 - DNA, 15 bp, Homo sapiens
aatctcattacaaag

SEQ ID NO: 694397 - DNA, 15 bp, Homo sapiens
atctcattacaaaga

SEQ ID NO: 694398 - DNA, 15 bp, Homo sapiens
tctcattacaaagat

SEQ ID NO: 694399 - DNA, 15 bp, Homo sapiens
ctcattacaaagatt

SEQ ID NO: 694400 - DNA, 15 bp, Homo sapiens
tcattacaaagattt

SEQ ID NO: 694401 - DNA, 15 bp, Homo sapiens
cattacaaagatttc

SEQ ID NO: 694402 - DNA, 15 bp, Homo sapiens
attacaaagatttct

SEQ ID NO: 694403 - DNA, 15 bp, Homo sapiens
ttacaaagatttcta

SEQ ID NO: 694404 - DNA, 15 bp, Homo sapiens
attgttaactacggg

SEQ ID NO: 694405 - DNA, 15 bp, Homo sapiens
ttgttaactacgggt

SEQ ID NO: 694406 - DNA, 15 bp, Homo sapiens
tgttaactacgggta

SEQ ID NO: 694407 - DNA, 15 bp, Homo sapiens
gttaactacgggtac

SEQ ID NO: 694408 - DNA, 15 bp, Homo sapiens
ttaactacgggtaca

SEQ ID NO: 694409 - DNA, 15 bp, Homo sapiens
taactacgggtacac

SEQ ID NO: 694410 - DNA, 15 bp, Homo sapiens
aactacgggtacact

SEQ ID NO: 694411 - DNA, 15 bp, Homo sapiens
actacgggtacactg

SEQ ID NO: 694412 - DNA, 15 bp, Homo sapiens
ctacgggtacactgt

SEQ ID NO: 694413 - DNA, 15 bp, Homo sapiens
tacgggtacactgtt

SEQ ID NO: 694414 - DNA, 15 bp, Homo sapiens
acgggtacactgttg

SEQ ID NO: 694415 - DNA, 15 bp, Homo sapiens
cgggtacactgttgt

SEQ ID NO: 694416 - DNA, 15 bp, Homo sapiens
gggtacactgttgta

SEQ ID NO: 694417 - DNA, 15 bp, Homo sapiens
ggtacactgttgtat

SEQ ID NO: 694418 - DNA, 15 bp, Homo sapiens
gtacactgttgtata

SEQ ID NO: 694419 - DNA, 15 bp, Homo sapiens
tacactgttgtatag

SEQ ID NO: 694420 - DNA, 15 bp, Homo sapiens
acactgttgtatagc

SEQ ID NO: 694421 - DNA, 15 bp, Homo sapiens
cactgttgtatagct

SEQ ID NO: 694422 - DNA, 15 bp, Homo sapiens
actgttgtatagctt

SEQ ID NO: 694423 - DNA, 15 bp, Homo sapiens
ctgttgtatagctta

SEQ ID NO: 694424 - DNA, 15 bp, Homo sapiens
tgttgtatagcttac

SEQ ID NO: 694425 - DNA, 15 bp, Homo sapiens
gttgtatagcttact

SEQ ID NO: 694426 - DNA, 15 bp, Homo sapiens
ttgtatagcttactc

SEQ ID NO: 694427 - DNA, 15 bp, Homo sapiens
tgtatagcttactca

SEQ ID NO: 694428 - DNA, 15 bp, Homo sapiens
gtatagcttactcat

SEQ ID NO: 694429 - DNA, 15 bp, Homo sapiens
tatagcttactcatc

SEQ ID NO: 694430 - DNA, 15 bp, Homo sapiens
atagcttactcatct

SEQ ID NO: 694431 - DNA, 15 bp, Homo sapiens
tagcttactcatctt

SEQ ID NO: 694432 - DNA, 15 bp, Homo sapiens
agcttactcatcttg

SEQ ID NO: 694433 - DNA, 15 bp, Homo sapiens
gcttactcatcttgc

SEQ ID NO: 694434 - DNA, 15 bp, Homo sapiens
cttactcatcttgct

SEQ ID NO: 694435 - DNA, 15 bp, Homo sapiens
ttactcatcttgctg

SEQ ID NO: 694436 - DNA, 15 bp, Homo sapiens
tactcatcttgctgt

SEQ ID NO: 694437 - DNA, 15 bp, Homo sapiens
actcatcttgctgta

SEQ ID NO: 694438 - DNA, 15 bp, Homo sapiens
ctcatcttgctgtat

SEQ ID NO: 694439 - DNA, 15 bp, Homo sapiens
tcatcttgctgtatt

SEQ ID NO: 694440 - DNA, 15 bp, Homo sapiens
catcttgctgtatta

SEQ ID NO: 694441 - DNA, 15 bp, Homo sapiens
atcttgctgtattaa

SEQ ID NO: 694442 - DNA, 15 bp, Homo sapiens
tcttgctgtattaaa

SEQ ID NO: 694443 - DNA, 15 bp, Homo sapiens
cttgctgtattaaaa

SEQ ID NO: 694444 - DNA, 15 bp, Homo sapiens
ttgctgtattaaaac

SEQ ID NO: 694445 - DNA, 15 bp, Homo sapiens
tgctgtattaaaact

SEQ ID NO: 694446 - DNA, 15 bp, Homo sapiens
gctgtattaaaactt

SEQ ID NO: 694447 - DNA, 15 bp, Homo sapiens
ctgtattaaaacttt

SEQ ID NO: 694448 - DNA, 15 bp, Homo sapiens
tgtattaaaactttg

SEQ ID NO: 694449 - DNA, 15 bp, Homo sapiens
gtattaaaactttgt

SEQ ID NO: 694450 - DNA, 15 bp, Homo sapiens
tattaaaactttgtg

SEQ ID NO: 694451 - DNA, 15 bp, Homo sapiens
attaaaactttgtgc

SEQ ID NO: 694452 - DNA, 15 bp, Homo sapiens
ttaaaactttgtgcc

SEQ ID NO: 694453 - DNA, 15 bp, Homo sapiens
taaaactttgtgccc

SEQ ID NO: 694454 - DNA, 15 bp, Homo sapiens
aaaactttgtgccca

SEQ ID NO: 694455 - DNA, 15 bp, Homo sapiens
aaactttgtgcccat

SEQ ID NO: 694456 - DNA, 15 bp, Homo sapiens
aactttgtgcccatt

SEQ ID NO: 694457 - DNA, 15 bp, Homo sapiens
actttgtgcccattg

SEQ ID NO: 694458 - DNA, 15 bp, Homo sapiens
ctttgtgcccattga

SEQ ID NO: 694459 - DNA, 15 bp, Homo sapiens
tttgtgcccattgat

SEQ ID NO: 694460 - DNA, 15 bp, Homo sapiens
ttgtgcccattgatt

SEQ ID NO: 694461 - DNA, 15 bp, Homo sapiens
tgtgcccattgatta

SEQ ID NO: 694462 - DNA, 15 bp, Homo sapiens
gtgcccattgattag

SEQ ID NO: 694463 - DNA, 15 bp, Homo sapiens
tgcccattgattagt

SEQ ID NO: 694464 - DNA, 15 bp, Homo sapiens
gcccattgattagta

SEQ ID NO: 694465 - DNA, 15 bp, Homo sapiens
cccattgattagtaa

SEQ ID NO: 694466 - DNA, 15 bp, Homo sapiens
ccattgattagtaac

SEQ ID NO: 694467 - DNA, 15 bp, Homo sapiens
cattgattagtaacc

SEQ ID NO: 694468 - DNA, 15 bp, Homo sapiens
attgattagtaaccc

SEQ ID NO: 694469 - DNA, 15 bp, Homo sapiens
ttgattagtaacccc

SEQ ID NO: 694470 - DNA, 15 bp, Homo sapiens
tgattagtaacccct

SEQ ID NO: 694471 - DNA, 15 bp, Homo sapiens
gattagtaacccctc

SEQ ID NO: 694472 - DNA, 15 bp, Homo sapiens
attagtaacccctcg

SEQ ID NO: 694473 - DNA, 15 bp, Homo sapiens
ttagtaacccctcgt

SEQ ID NO: 694474 - DNA, 15 bp, Homo sapiens
tagtaacccctcgtt

SEQ ID NO: 694475 - DNA, 15 bp, Homo sapiens
agtaacccctcgttt

SEQ ID NO: 694476 - DNA, 15 bp, Homo sapiens
gtaacccctcgtttc

SEQ ID NO: 694477 - DNA, 15 bp, Homo sapiens
taacccctcgtttcg

SEQ ID NO: 694478 - DNA, 15 bp, Homo sapiens
aacccctcgtttcgt

SEQ ID NO: 694479 - DNA, 15 bp, Homo sapiens
acccctcgtttcgtc

SEQ ID NO: 694480 - DNA, 15 bp, Homo sapiens
cccctcgtttcgtcc

SEQ ID NO: 694481 - DNA, 15 bp, Homo sapiens
ccctcgtttcgtcct

SEQ ID NO: 694482 - DNA, 15 bp, Homo sapiens
cctcgtttcgtcctc

SEQ ID NO: 694483 - DNA, 15 bp, Homo sapiens
ctcgtttcgtcctcc

SEQ ID NO: 694484 - DNA, 15 bp, Homo sapiens
tcgtttcgtcctccc

SEQ ID NO: 694485 - DNA, 15 bp, Homo sapiens
cgtttcgtcctcccc

SEQ ID NO: 694486 - DNA, 15 bp, Homo sapiens
gtttcgtcctccccc

SEQ ID NO: 694487 - DNA, 15 bp, Homo sapiens
tttcgtcctccccca

SEQ ID NO: 694488 - DNA, 15 bp, Homo sapiens
ttcgtcctcccccag

SEQ ID NO: 694489 - DNA, 15 bp, Homo sapiens
tcgtcctcccccagc

SEQ ID NO: 694490 - DNA, 15 bp, Homo sapiens
cgtcctcccccagcc

SEQ ID NO: 694491 - DNA, 15 bp, Homo sapiens
gtcctcccccagcca

SEQ ID NO: 694492 - DNA, 15 bp, Homo sapiens
tcctcccccagccac

SEQ ID NO: 694493 - DNA, 15 bp, Homo sapiens
cctcccccagccact

SEQ ID NO: 694494 - DNA, 15 bp, Homo sapiens
ctcccccagccactg

SEQ ID NO: 694495 - DNA, 15 bp, Homo sapiens
tcccccagccactgg

SEQ ID NO: 694496 - DNA, 15 bp, Homo sapiens
cccccagccactggc

SEQ ID NO: 694497 - DNA, 15 bp, Homo sapiens
ccccagccactggca

SEQ ID NO: 694498 - DNA, 15 bp, Homo sapiens
cccagccactggcaa

SEQ ID NO: 694499 - DNA, 15 bp, Homo sapiens
ccagccactggcaac

SEQ ID NO: 694500 - DNA, 15 bp, Homo sapiens
cagccactggcaacc

SEQ ID NO: 694501 - DNA, 15 bp, Homo sapiens
agccactggcaacca

SEQ ID NO: 694502 - DNA, 15 bp, Homo sapiens
gccactggcaaccag

SEQ ID NO: 694503 - DNA, 15 bp, Homo sapiens
ccactggcaaccagc

SEQ ID NO: 694504 - DNA, 15 bp, Homo sapiens
cactggcaaccagca

SEQ ID NO: 694505 - DNA, 15 bp, Homo sapiens
actggcaaccagcat

SEQ ID NO: 694506 - DNA, 15 bp, Homo sapiens
ctggcaaccagcatt

SEQ ID NO: 694507 - DNA, 15 bp, Homo sapiens
tggcaaccagcatta

SEQ ID NO: 694508 - DNA, 15 bp, Homo sapiens
ggcaaccagcattat

SEQ ID NO: 694509 - DNA, 15 bp, Homo sapiens
gcaaccagcattata

SEQ ID NO: 694510 - DNA, 15 bp, Homo sapiens
caaccagcattatac

SEQ ID NO: 694511 - DNA, 15 bp, Homo sapiens
aaccagcattatact

SEQ ID NO: 694512 - DNA, 15 bp, Homo sapiens
accagcattatactc

SEQ ID NO: 694513 - DNA, 15 bp, Homo sapiens
ccagcattatactct

SEQ ID NO: 694514 - DNA, 15 bp, Homo sapiens
cagcattatactctt

SEQ ID NO: 694515 - DNA, 15 bp, Homo sapiens
agcattatactcttt

SEQ ID NO: 694516 - DNA, 15 bp, Homo sapiens
gcattatactctttg

SEQ ID NO: 694517 - DNA, 15 bp, Homo sapiens
cattatactctttga

SEQ ID NO: 694518 - DNA, 15 bp, Homo sapiens
attatactctttgat

SEQ ID NO: 694519 - DNA, 15 bp, Homo sapiens
ttatactctttgatt

SEQ ID NO: 694520 - DNA, 15 bp, Homo sapiens
tatactctttgattc

SEQ ID NO: 694521 - DNA, 15 bp, Homo sapiens
atactctttgattct

SEQ ID NO: 694522 - DNA, 15 bp, Homo sapiens
tactctttgattcta

SEQ ID NO: 694523 - DNA, 15 bp, Homo sapiens
actctttgattctat

SEQ ID NO: 694524 - DNA, 15 bp, Homo sapiens
ctctttgattctatg

SEQ ID NO: 694525 - DNA, 15 bp, Homo sapiens
tctttgattctatga

SEQ ID NO: 694526 - DNA, 15 bp, Homo sapiens
ctttgattctatgag

SEQ ID NO: 694527 - DNA, 15 bp, Homo sapiens
tttgattctatgagt

SEQ ID NO: 694528 - DNA, 15 bp, Homo sapiens
ttgattctatgagtt

SEQ ID NO: 694529 - DNA, 15 bp, Homo sapiens
tgattctatgagttt

SEQ ID NO: 694530 - DNA, 15 bp, Homo sapiens
gattctatgagtttg

SEQ ID NO: 694531 - DNA, 15 bp, Homo sapiens
attctatgagtttga

SEQ ID NO: 694532 - DNA, 15 bp, Homo sapiens
ttctatgagtttgac

SEQ ID NO: 694533 - DNA, 15 bp, Homo sapiens
tctatgagtttgact

SEQ ID NO: 694534 - DNA, 15 bp, Homo sapiens
ctatgagtttgacta

SEQ ID NO: 694535 - DNA, 15 bp, Homo sapiens
tatgagtttgactac

SEQ ID NO: 694536 - DNA, 15 bp, Homo sapiens
atgagtttgactact

SEQ ID NO: 694537 - DNA, 15 bp, Homo sapiens
tgagtttgactactt

SEQ ID NO: 694538 - DNA, 15 bp, Homo sapiens
gagtttgactacttt

SEQ ID NO: 694539 - DNA, 15 bp, Homo sapiens
agtttgactacttta

SEQ ID NO: 694540 - DNA, 15 bp, Homo sapiens
gtttgactactttag

SEQ ID NO: 694541 - DNA, 15 bp, Homo sapiens
tttgactactttagc

SEQ ID NO: 694542 - DNA, 15 bp, Homo sapiens
ttgactactttagct

SEQ ID NO: 694543 - DNA, 15 bp, Homo sapiens
tgactactttagcta

SEQ ID NO: 694544 - DNA, 15 bp, Homo sapiens
gactactttagctac

SEQ ID NO: 694545 - DNA, 15 bp, Homo sapiens
actactttagctacc

SEQ ID NO: 694546 - DNA, 15 bp, Homo sapiens
ctactttagctacct

SEQ ID NO: 694547 - DNA, 15 bp, Homo sapiens
tactttagctacctt

SEQ ID NO: 694548 - DNA, 15 bp, Homo sapiens
actttagctacctta

SEQ ID NO: 694549 - DNA, 15 bp, Homo sapiens
ctttagctaccttat

SEQ ID NO: 694550 - DNA, 15 bp, Homo sapiens
tttagctaccttata

SEQ ID NO: 694551 - DNA, 15 bp, Homo sapiens
ttagctaccttatat

SEQ ID NO: 694552 - DNA, 15 bp, Homo sapiens
tagctaccttatata

SEQ ID NO: 694553 - DNA, 15 bp, Homo sapiens
agctaccttatataa

SEQ ID NO: 694554 - DNA, 15 bp, Homo sapiens
gctaccttatataag

SEQ ID NO: 694555 - DNA, 15 bp, Homo sapiens
ctaccttatataagt

SEQ ID NO: 694556 - DNA, 15 bp, Homo sapiens
taccttatataagtg

SEQ ID NO: 694557 - DNA, 15 bp, Homo sapiens
accttatataagtgg

SEQ ID NO: 694558 - DNA, 15 bp, Homo sapiens
ccttatataagtggt

SEQ ID NO: 694559 - DNA, 15 bp, Homo sapiens
cttatataagtggta

SEQ ID NO: 694560 - DNA, 15 bp, Homo sapiens
ttatataagtggtat

SEQ ID NO: 694561 - DNA, 15 bp, Homo sapiens
tatataagtggtatt

SEQ ID NO: 694562 - DNA, 15 bp, Homo sapiens
atataagtggtatta

SEQ ID NO: 694563 - DNA, 15 bp, Homo sapiens
tataagtggtattat

SEQ ID NO: 694564 - DNA, 15 bp, Homo sapiens
ataagtggtattatg

SEQ ID NO: 694565 - DNA, 15 bp, Homo sapiens
taagtggtattatgt

SEQ ID NO: 694566 - DNA, 15 bp, Homo sapiens
aagtggtattatgta

SEQ ID NO: 694567 - DNA, 15 bp, Homo sapiens
agtggtattatgtac

SEQ ID NO: 694568 - DNA, 15 bp, Homo sapiens
gtggtattatgtact

SEQ ID NO: 694569 - DNA, 15 bp, Homo sapiens
tggtattatgtactg

SEQ ID NO: 694570 - DNA, 15 bp, Homo sapiens
ggtattatgtactgt

SEQ ID NO: 694571 - DNA, 15 bp, Homo sapiens
gtattatgtactgtt

SEQ ID NO: 694572 - DNA, 15 bp, Homo sapiens
tattatgtactgttt

SEQ ID NO: 694573 - DNA, 15 bp, Homo sapiens
attatgtactgttta

SEQ ID NO: 694574 - DNA, 15 bp, Homo sapiens
ttatgtactgtttat

SEQ ID NO: 694575 - DNA, 15 bp, Homo sapiens
tatgtactgtttatc

SEQ ID NO: 694576 - DNA, 15 bp, Homo sapiens
atgtactgtttatct

SEQ ID NO: 694577 - DNA, 15 bp, Homo sapiens
tgtactgtttatctt

SEQ ID NO: 694578 - DNA, 15 bp, Homo sapiens
gtactgtttatcttt

SEQ ID NO: 694579 - DNA, 15 bp, Homo sapiens
tactgtttatctttt

SEQ ID NO: 694580 - DNA, 15 bp, Homo sapiens
actgtttatcttttt

SEQ ID NO: 694581 - DNA, 15 bp, Homo sapiens
ctgtttatcttttta

SEQ ID NO: 694582 - DNA, 15 bp, Homo sapiens
tgtttatctttttat

SEQ ID NO: 694583 - DNA, 15 bp, Homo sapiens
gtttatctttttatg

SEQ ID NO: 694584 - DNA, 15 bp, Homo sapiens
tttatctttttatga

SEQ ID NO: 694585 - DNA, 15 bp, Homo sapiens
ttatctttttatgac

SEQ ID NO: 694586 - DNA, 15 bp, Homo sapiens
tatctttttatgact

SEQ ID NO: 694587 - DNA, 15 bp, Homo sapiens
atctttttatgactg

SEQ ID NO: 694588 - DNA, 15 bp, Homo sapiens
tctttttatgactga

SEQ ID NO: 694589 - DNA, 15 bp, Homo sapiens
ctttttatgactgac

SEQ ID NO: 694590 - DNA, 15 bp, Homo sapiens
tttttatgactgact

SEQ ID NO: 694591 - DNA, 15 bp, Homo sapiens
ttttatgactgactt

SEQ ID NO: 694592 - DNA, 15 bp, Homo sapiens
tttatgactgactta

SEQ ID NO: 694593 - DNA, 15 bp, Homo sapiens
ttatgactgacttat

SEQ ID NO: 694594 - DNA, 15 bp, Homo sapiens
tatgactgacttatt

SEQ ID NO: 694595 - DNA, 15 bp, Homo sapiens
atgactgacttattt

SEQ ID NO: 694596 - DNA, 15 bp, Homo sapiens
tgactgacttatttc

SEQ ID NO: 694597 - DNA, 15 bp, Homo sapiens
gactgacttatttcc

SEQ ID NO: 694598 - DNA, 15 bp, Homo sapiens
actgacttatttccc

SEQ ID NO: 694599 - DNA, 15 bp, Homo sapiens
ctgacttatttccct

SEQ ID NO: 694600 - DNA, 15 bp, Homo sapiens
tgacttatttccctt

SEQ ID NO: 694601 - DNA, 15 bp, Homo sapiens
gacttatttccctta

SEQ ID NO: 694602 - DNA, 15 bp, Homo sapiens
acttatttcccttag

SEQ ID NO: 694603 - DNA, 15 bp, Homo sapiens
cttatttcccttagc

SEQ ID NO: 694604 - DNA, 15 bp, Homo sapiens
ttatttcccttagca

SEQ ID NO: 694605 - DNA, 15 bp, Homo sapiens
tatttcccttagcat

SEQ ID NO: 694606 - DNA, 15 bp, Homo sapiens
atttcccttagcata

SEQ ID NO: 694607 - DNA, 15 bp, Homo sapiens
tttcccttagcatag

SEQ ID NO: 694608 - DNA, 15 bp, Homo sapiens
ttcccttagcatagt

SEQ ID NO: 694609 - DNA, 15 bp, Homo sapiens
tcccttagcatagtg

SEQ ID NO: 694610 - DNA, 15 bp, Homo sapiens
cccttagcatagtgc

SEQ ID NO: 694611 - DNA, 15 bp, Homo sapiens
ccttagcatagtgca

SEQ ID NO: 694612 - DNA, 15 bp, Homo sapiens
cttagcatagtgcat

SEQ ID NO: 694613 - DNA, 15 bp, Homo sapiens
ttagcatagtgcatt

SEQ ID NO: 694614 - DNA, 15 bp, Homo sapiens
tagcatagtgcattc

SEQ ID NO: 694615 - DNA, 15 bp, Homo sapiens
agcatagtgcattca

SEQ ID NO: 694616 - DNA, 15 bp, Homo sapiens
gcatagtgcattcaa

SEQ ID NO: 694617 - DNA, 15 bp, Homo sapiens
catagtgcattcaaa

SEQ ID NO: 694618 - DNA, 15 bp, Homo sapiens
atagtgcattcaaag

SEQ ID NO: 694619 - DNA, 15 bp, Homo sapiens
tagtgcattcaaagt

SEQ ID NO: 694620 - DNA, 15 bp, Homo sapiens
agtgcattcaaagtc

SEQ ID NO: 694621 - DNA, 15 bp, Homo sapiens
gtgcattcaaagtcc

SEQ ID NO: 694622 - DNA, 15 bp, Homo sapiens
tgcattcaaagtcca

SEQ ID NO: 694623 - DNA, 15 bp, Homo sapiens
gcattcaaagtccaa

SEQ ID NO: 694624 - DNA, 15 bp, Homo sapiens
cattcaaagtccaac

SEQ ID NO: 694625 - DNA, 15 bp, Homo sapiens
attcaaagtccaacc

SEQ ID NO: 694626 - DNA, 15 bp, Homo sapiens
ttcaaagtccaacca

SEQ ID NO: 694627 - DNA, 15 bp, Homo sapiens
tcaaagtccaaccat

SEQ ID NO: 694628 - DNA, 15 bp, Homo sapiens
caaagtccaaccatg

SEQ ID NO: 694629 - DNA, 15 bp, Homo sapiens
aaagtccaaccatgt

SEQ ID NO: 694630 - DNA, 15 bp, Homo sapiens
aagtccaaccatgtt

SEQ ID NO: 694631 - DNA, 15 bp, Homo sapiens
agtccaaccatgttg

SEQ ID NO: 694632 - DNA, 15 bp, Homo sapiens
gtccaaccatgttgt

SEQ ID NO: 694633 - DNA, 15 bp, Homo sapiens
tccaaccatgttgtt

SEQ ID NO: 694634 - DNA, 15 bp, Homo sapiens
ccaaccatgttgttg

SEQ ID NO: 694635 - DNA, 15 bp, Homo sapiens
caaccatgttgttgc

SEQ ID NO: 694636 - DNA, 15 bp, Homo sapiens
aaccatgttgttgcc

SEQ ID NO: 694637 - DNA, 15 bp, Homo sapiens
accatgttgttgcct

SEQ ID NO: 694638 - DNA, 15 bp, Homo sapiens
ccatgttgttgccta

SEQ ID NO: 694639 - DNA, 15 bp, Homo sapiens
catgttgttgcctat

SEQ ID NO: 694640 - DNA, 15 bp, Homo sapiens
atgttgttgcctatt

SEQ ID NO: 694641 - DNA, 15 bp, Homo sapiens
tgttgttgcctattg

SEQ ID NO: 694642 - DNA, 15 bp, Homo sapiens
gttgttgcctattgc

SEQ ID NO: 694643 - DNA, 15 bp, Homo sapiens
ttgttgcctattgca

SEQ ID NO: 694644 - DNA, 15 bp, Homo sapiens
tgttgcctattgcag

SEQ ID NO: 694645 - DNA, 15 bp, Homo sapiens
gttgcctattgcaga

SEQ ID NO: 694646 - DNA, 15 bp, Homo sapiens
ttgcctattgcagaa

SEQ ID NO: 694647 - DNA, 15 bp, Homo sapiens
tgcctattgcagaat

SEQ ID NO: 694648 - DNA, 15 bp, Homo sapiens
gcctattgcagaatt

SEQ ID NO: 694649 - DNA, 15 bp, Homo sapiens
cctattgcagaattt

SEQ ID NO: 694650 - DNA, 15 bp, Homo sapiens
ctattgcagaatttc

SEQ ID NO: 694651 - DNA, 15 bp, Homo sapiens
tattgcagaatttcc

SEQ ID NO: 694652 - DNA, 15 bp, Homo sapiens
attgcagaatttcct

SEQ ID NO: 694653 - DNA, 15 bp, Homo sapiens
ttgcagaatttcctt

SEQ ID NO: 694654 - DNA, 15 bp, Homo sapiens
tgcagaatttccttc

SEQ ID NO: 694655 - DNA, 15 bp, Homo sapiens
gcagaatttccttct

SEQ ID NO: 694656 - DNA, 15 bp, Homo sapiens
cagaatttccttctt

SEQ ID NO: 694657 - DNA, 15 bp, Homo sapiens
agaatttccttcttt

SEQ ID NO: 694658 - DNA, 15 bp, Homo sapiens
gaatttccttctttt

SEQ ID NO: 694659 - DNA, 15 bp, Homo sapiens
aatttccttcttttc

SEQ ID NO: 694660 - DNA, 15 bp, Homo sapiens
atttccttcttttca

SEQ ID NO: 694661 - DNA, 15 bp, Homo sapiens
tttccttcttttcaa

SEQ ID NO: 694662 - DNA, 15 bp, Homo sapiens
ttccttcttttcaag

SEQ ID NO: 694663 - DNA, 15 bp, Homo sapiens
tccttcttttcaagg

SEQ ID NO: 694664 - DNA, 15 bp, Homo sapiens
ccttcttttcaaggc

SEQ ID NO: 694665 - DNA, 15 bp, Homo sapiens
cttcttttcaaggct

SEQ ID NO: 694666 - DNA, 15 bp, Homo sapiens
ttcttttcaaggctg

SEQ ID NO: 694667 - DNA, 15 bp, Homo sapiens
tcttttcaaggctga

SEQ ID NO: 694668 - DNA, 15 bp, Homo sapiens
cttttcaaggctgaa

SEQ ID NO: 694669 - DNA, 15 bp, Homo sapiens
ttttcaaggctgaat

SEQ ID NO: 694670 - DNA, 15 bp, Homo sapiens
tttcaaggctgaata

SEQ ID NO: 694671 - DNA, 15 bp, Homo sapiens
ttcaaggctgaataa

SEQ ID NO: 694672 - DNA, 15 bp, Homo sapiens
tcaaggctgaataat

SEQ ID NO: 694673 - DNA, 15 bp, Homo sapiens
caaggctgaataata

SEQ ID NO: 694674 - DNA, 15 bp, Homo sapiens
aaggctgaataatat

SEQ ID NO: 694675 - DNA, 15 bp, Homo sapiens
aggctgaataatatt

SEQ ID NO: 694676 - DNA, 15 bp, Homo sapiens
ggctgaataatattc

SEQ ID NO: 694677 - DNA, 15 bp, Homo sapiens
gctgaataatattcc

SEQ ID NO: 694678 - DNA, 15 bp, Homo sapiens
ctgaataatattcca

SEQ ID NO: 694679 - DNA, 15 bp, Homo sapiens
tgaataatattccag

SEQ ID NO: 694680 - DNA, 15 bp, Homo sapiens
gaataatattccagt

SEQ ID NO: 694681 - DNA, 15 bp, Homo sapiens
aataatattccagtg

SEQ ID NO: 694682 - DNA, 15 bp, Homo sapiens
ataatattccagtgc

SEQ ID NO: 694683 - DNA, 15 bp, Homo sapiens
taatattccagtgca

SEQ ID NO: 694684 - DNA, 15 bp, Homo sapiens
aatattccagtgcat

SEQ ID NO: 694685 - DNA, 15 bp, Homo sapiens
atattccagtgcatg

SEQ ID NO: 694686 - DNA, 15 bp, Homo sapiens
tattccagtgcatgt

SEQ ID NO: 694687 - DNA, 15 bp, Homo sapiens
attccagtgcatgtg

SEQ ID NO: 694688 - DNA, 15 bp, Homo sapiens
ttccagtgcatgtgt

SEQ ID NO: 694689 - DNA, 15 bp, Homo sapiens
tccagtgcatgtgtg

SEQ ID NO: 694690 - DNA, 15 bp, Homo sapiens
ccagtgcatgtgtgt

SEQ ID NO: 694691 - DNA, 15 bp, Homo sapiens
cagtgcatgtgtgta

SEQ ID NO: 694692 - DNA, 15 bp, Homo sapiens
agtgcatgtgtgtac

SEQ ID NO: 694693 - DNA, 15 bp, Homo sapiens
gtgcatgtgtgtacc

SEQ ID NO: 694694 - DNA, 15 bp, Homo sapiens
tgcatgtgtgtacca

SEQ ID NO: 694695 - DNA, 15 bp, Homo sapiens
gcatgtgtgtaccac

SEQ ID NO: 694696 - DNA, 15 bp, Homo sapiens
catgtgtgtaccaca

SEQ ID NO: 694697 - DNA, 15 bp, Homo sapiens
atgtgtgtaccacat

SEQ ID NO: 694698 - DNA, 15 bp, Homo sapiens
tgtgtgtaccacatt

SEQ ID NO: 694699 - DNA, 15 bp, Homo sapiens
gtgtgtaccacattt

SEQ ID NO: 694700 - DNA, 15 bp, Homo sapiens
tgtgtaccacatttt

SEQ ID NO: 694701 - DNA, 15 bp, Homo sapiens
gtgtaccacattttc

SEQ ID NO: 694702 - DNA, 15 bp, Homo sapiens
tgtaccacattttct

SEQ ID NO: 694703 - DNA, 15 bp, Homo sapiens
gtaccacattttctt

SEQ ID NO: 694704 - DNA, 15 bp, Homo sapiens
taccacattttcttt

SEQ ID NO: 694705 - DNA, 15 bp, Homo sapiens
accacattttcttta

SEQ ID NO: 694706 - DNA, 15 bp, Homo sapiens
ccacattttctttat

SEQ ID NO: 694707 - DNA, 15 bp, Homo sapiens
cacattttctttatc

SEQ ID NO: 694708 - DNA, 15 bp, Homo sapiens
acattttctttatcc

SEQ ID NO: 694709 - DNA, 15 bp, Homo sapiens
cattttctttatcca

SEQ ID NO: 694710 - DNA, 15 bp, Homo sapiens
attttctttatccat

SEQ ID NO: 694711 - DNA, 15 bp, Homo sapiens
ttttctttatccatt

SEQ ID NO: 694712 - DNA, 15 bp, Homo sapiens
tttctttatccatta

SEQ ID NO: 694713 - DNA, 15 bp, Homo sapiens
ttctttatccattaa

SEQ ID NO: 694714 - DNA, 15 bp, Homo sapiens
tctttatccattaat

SEQ ID NO: 694715 - DNA, 15 bp, Homo sapiens
ctttatccattaatt

SEQ ID NO: 694716 - DNA, 15 bp, Homo sapiens
tttatccattaattt

SEQ ID NO: 694717 - DNA, 15 bp, Homo sapiens
ttatccattaatttg

SEQ ID NO: 694718 - DNA, 15 bp, Homo sapiens
tatccattaatttgt

SEQ ID NO: 694719 - DNA, 15 bp, Homo sapiens
atccattaatttgtt

SEQ ID NO: 694720 - DNA, 15 bp, Homo sapiens
tccattaatttgttg

SEQ ID NO: 694721 - DNA, 15 bp, Homo sapiens
ccattaatttgttga

SEQ ID NO: 694722 - DNA, 15 bp, Homo sapiens
cattaatttgttgat

SEQ ID NO: 694723 - DNA, 15 bp, Homo sapiens
attaatttgttgatt

SEQ ID NO: 694724 - DNA, 15 bp, Homo sapiens
ttaatttgttgattg

SEQ ID NO: 694725 - DNA, 15 bp, Homo sapiens
taatttgttgattga

SEQ ID NO: 694726 - DNA, 15 bp, Homo sapiens
aatttgttgattgat

SEQ ID NO: 694727 - DNA, 15 bp, Homo sapiens
atttgttgattgata

SEQ ID NO: 694728 - DNA, 15 bp, Homo sapiens
tttgttgattgatag

SEQ ID NO: 694729 - DNA, 15 bp, Homo sapiens
ttgttgattgataga

SEQ ID NO: 694730 - DNA, 15 bp, Homo sapiens
tgttgattgatagac

SEQ ID NO: 694731 - DNA, 15 bp, Homo sapiens
gttgattgatagaca

SEQ ID NO: 694732 - DNA, 15 bp, Homo sapiens
ttgattgatagacat

SEQ ID NO: 694733 - DNA, 15 bp, Homo sapiens
tgattgatagacatt

SEQ ID NO: 694734 - DNA, 15 bp, Homo sapiens
gattgatagacattt

SEQ ID NO: 694735 - DNA, 15 bp, Homo sapiens
attgatagacattta

SEQ ID NO: 694736 - DNA, 15 bp, Homo sapiens
ttgatagacatttag

SEQ ID NO: 694737 - DNA, 15 bp, Homo sapiens
tgatagacatttagg

SEQ ID NO: 694738 - DNA, 15 bp, Homo sapiens
gatagacatttaggt

SEQ ID NO: 694739 - DNA, 15 bp, Homo sapiens
atagacatttaggtt

SEQ ID NO: 694740 - DNA, 15 bp, Homo sapiens
tagacatttaggttg

SEQ ID NO: 694741 - DNA, 15 bp, Homo sapiens
agacatttaggttgg

SEQ ID NO: 694742 - DNA, 15 bp, Homo sapiens
gacatttaggttggt

SEQ ID NO: 694743 - DNA, 15 bp, Homo sapiens
acatttaggttggtt

SEQ ID NO: 694744 - DNA, 15 bp, Homo sapiens
catttaggttggttt

SEQ ID NO: 694745 - DNA, 15 bp, Homo sapiens
atttaggttggtttt

SEQ ID NO: 694746 - DNA, 15 bp, Homo sapiens
tttaggttggttttc

SEQ ID NO: 694747 - DNA, 15 bp, Homo sapiens
ttaggttggttttct

SEQ ID NO: 694748 - DNA, 15 bp, Homo sapiens
taggttggttttcta

SEQ ID NO: 694749 - DNA, 15 bp, Homo sapiens
aggttggttttctac

SEQ ID NO: 694750 - DNA, 15 bp, Homo sapiens
ggttggttttctaca

SEQ ID NO: 694751 - DNA, 15 bp, Homo sapiens
gttggttttctacat

SEQ ID NO: 694752 - DNA, 15 bp, Homo sapiens
ttggttttctacatc

SEQ ID NO: 694753 - DNA, 15 bp, Homo sapiens
tggttttctacatct

SEQ ID NO: 694754 - DNA, 15 bp, Homo sapiens
ggttttctacatctt

SEQ ID NO: 694755 - DNA, 15 bp, Homo sapiens
gttttctacatcttg

SEQ ID NO: 694756 - DNA, 15 bp, Homo sapiens
ttttctacatcttga

SEQ ID NO: 694757 - DNA, 15 bp, Homo sapiens
tttctacatcttgac

SEQ ID NO: 694758 - DNA, 15 bp, Homo sapiens
ttctacatcttgact

SEQ ID NO: 694759 - DNA, 15 bp, Homo sapiens
tctacatcttgacta

SEQ ID NO: 694760 - DNA, 15 bp, Homo sapiens
ctacatcttgactat

SEQ ID NO: 694761 - DNA, 15 bp, Homo sapiens
tacatcttgactatc

SEQ ID NO: 694762 - DNA, 15 bp, Homo sapiens
acatcttgactatca

SEQ ID NO: 694763 - DNA, 15 bp, Homo sapiens
catcttgactatcat

SEQ ID NO: 694764 - DNA, 15 bp, Homo sapiens
atcttgactatcatg

SEQ ID NO: 694765 - DNA, 15 bp, Homo sapiens
tcttgactatcatga

SEQ ID NO: 694766 - DNA, 15 bp, Homo sapiens
cttgactatcatgaa

SEQ ID NO: 694767 - DNA, 15 bp, Homo sapiens
ttgactatcatgaat

SEQ ID NO: 694768 - DNA, 15 bp, Homo sapiens
tgactatcatgaata

SEQ ID NO: 694769 - DNA, 15 bp, Homo sapiens
gactatcatgaatag

SEQ ID NO: 694770 - DNA, 15 bp, Homo sapiens
actatcatgaatagt

SEQ ID NO: 694771 - DNA, 15 bp, Homo sapiens
ctatcatgaatagtg

SEQ ID NO: 694772 - DNA, 15 bp, Homo sapiens
tatcatgaatagtgt

SEQ ID NO: 694773 - DNA, 15 bp, Homo sapiens
atcatgaatagtgtt

SEQ ID NO: 694774 - DNA, 15 bp, Homo sapiens
tcatgaatagtgttg

SEQ ID NO: 694775 - DNA, 15 bp, Homo sapiens
catgaatagtgttgc

SEQ ID NO: 694776 - DNA, 15 bp, Homo sapiens
atgaatagtgttgca

SEQ ID NO: 694777 - DNA, 15 bp, Homo sapiens
tgaatagtgttgcaa

SEQ ID NO: 694778 - DNA, 15 bp, Homo sapiens
gaatagtgttgcaat

SEQ ID NO: 694779 - DNA, 15 bp, Homo sapiens
aatagtgttgcaatg

SEQ ID NO: 694780 - DNA, 15 bp, Homo sapiens
atagtgttgcaatga

SEQ ID NO: 694781 - DNA, 15 bp, Homo sapiens
tagtgttgcaatgaa

SEQ ID NO: 694782 - DNA, 15 bp, Homo sapiens
agtgttgcaatgaac

SEQ ID NO: 694783 - DNA, 15 bp, Homo sapiens
gtgttgcaatgaaca

SEQ ID NO: 694784 - DNA, 15 bp, Homo sapiens
tgttgcaatgaacac

SEQ ID NO: 694785 - DNA, 15 bp, Homo sapiens
gttgcaatgaacaca

SEQ ID NO: 694786 - DNA, 15 bp, Homo sapiens
ttgcaatgaacacag

SEQ ID NO: 694787 - DNA, 15 bp, Homo sapiens
tgcaatgaacacagg

SEQ ID NO: 694788 - DNA, 15 bp, Homo sapiens
gcaatgaacacagga

SEQ ID NO: 694789 - DNA, 15 bp, Homo sapiens
caatgaacacaggag

SEQ ID NO: 694790 - DNA, 15 bp, Homo sapiens
aatgaacacaggaga

SEQ ID NO: 694791 - DNA, 15 bp, Homo sapiens
atgaacacaggagag

SEQ ID NO: 694792 - DNA, 15 bp, Homo sapiens
tgaacacaggagagc

SEQ ID NO: 694793 - DNA, 15 bp, Homo sapiens
gaacacaggagagct

SEQ ID NO: 694794 - DNA, 15 bp, Homo sapiens
aacacaggagagcta

SEQ ID NO: 694795 - DNA, 15 bp, Homo sapiens
acacaggagagctac

SEQ ID NO: 694796 - DNA, 15 bp, Homo sapiens
cacaggagagctact

SEQ ID NO: 694797 - DNA, 15 bp, Homo sapiens
acaggagagctacta

SEQ ID NO: 694798 - DNA, 15 bp, Homo sapiens
caggagagctactat

SEQ ID NO: 694799 - DNA, 15 bp, Homo sapiens
aggagagctactatc

SEQ ID NO: 694800 - DNA, 15 bp, Homo sapiens
ggagagctactatct

SEQ ID NO: 694801 - DNA, 15 bp, Homo sapiens
gagagctactatctc

SEQ ID NO: 694802 - DNA, 15 bp, Homo sapiens
agagctactatctct

SEQ ID NO: 694803 - DNA, 15 bp, Homo sapiens
gagctactatctctt

SEQ ID NO: 694804 - DNA, 15 bp, Homo sapiens
agctactatctctta

SEQ ID NO: 694805 - DNA, 15 bp, Homo sapiens
gctactatctcttag

SEQ ID NO: 694806 - DNA, 15 bp, Homo sapiens
ctactatctcttaga

SEQ ID NO: 694807 - DNA, 15 bp, Homo sapiens
tactatctcttagag

SEQ ID NO: 694808 - DNA, 15 bp, Homo sapiens
actatctcttagaga

SEQ ID NO: 694809 - DNA, 15 bp, Homo sapiens
ctatctcttagagat

SEQ ID NO: 694810 - DNA, 15 bp, Homo sapiens
tatctcttagagatg

SEQ ID NO: 694811 - DNA, 15 bp, Homo sapiens
atctcttagagatga

SEQ ID NO: 694812 - DNA, 15 bp, Homo sapiens
tctcttagagatgat

SEQ ID NO: 694813 - DNA, 15 bp, Homo sapiens
ctcttagagatgata

SEQ ID NO: 694814 - DNA, 15 bp, Homo sapiens
tcttagagatgatat

SEQ ID NO: 694815 - DNA, 15 bp, Homo sapiens
cttagagatgatatc

SEQ ID NO: 694816 - DNA, 15 bp, Homo sapiens
ttagagatgatatca

SEQ ID NO: 694817 - DNA, 15 bp, Homo sapiens
tagagatgatatcat

SEQ ID NO: 694818 - DNA, 15 bp, Homo sapiens
agagatgatatcatg

SEQ ID NO: 694819 - DNA, 15 bp, Homo sapiens
gagatgatatcatgg

SEQ ID NO: 694820 - DNA, 15 bp, Homo sapiens
agatgatatcatggt

SEQ ID NO: 694821 - DNA, 15 bp, Homo sapiens
gatgatatcatggtt

SEQ ID NO: 694822 - DNA, 15 bp, Homo sapiens
atgatatcatggttt

SEQ ID NO: 694823 - DNA, 15 bp, Homo sapiens
tgatatcatggtttt

SEQ ID NO: 694824 - DNA, 15 bp, Homo sapiens
gatatcatggttttt

SEQ ID NO: 694825 - DNA, 15 bp, Homo sapiens
atatcatggttttta

SEQ ID NO: 694826 - DNA, 15 bp, Homo sapiens
tatcatggtttttat

SEQ ID NO: 694827 - DNA, 15 bp, Homo sapiens
atcatggtttttatc

SEQ ID NO: 694828 - DNA, 15 bp, Homo sapiens
tcatggtttttatca

SEQ ID NO: 694829 - DNA, 15 bp, Homo sapiens
catggtttttatcat

SEQ ID NO: 694830 - DNA, 15 bp, Homo sapiens
atggtttttatcatc

SEQ ID NO: 694831 - DNA, 15 bp, Homo sapiens
tggtttttatcatca

SEQ ID NO: 694832 - DNA, 15 bp, Homo sapiens
ggtttttatcatcag

SEQ ID NO: 694833 - DNA, 15 bp, Homo sapiens
gtttttatcatcaga

SEQ ID NO: 694834 - DNA, 15 bp, Homo sapiens
tttttatcatcagaa

SEQ ID NO: 694835 - DNA, 15 bp, Homo sapiens
ttttatcatcagaaa

SEQ ID NO: 694836 - DNA, 15 bp, Homo sapiens
tttatcatcagaaaa

SEQ ID NO: 694837 - DNA, 15 bp, Homo sapiens
ttatcatcagaaaac

SEQ ID NO: 694838 - DNA, 15 bp, Homo sapiens
tatcatcagaaaaca

SEQ ID NO: 694839 - DNA, 15 bp, Homo sapiens
atcatcagaaaacac

SEQ ID NO: 694840 - DNA, 15 bp, Homo sapiens
tcatcagaaaacacc

SEQ ID NO: 694841 - DNA, 15 bp, Homo sapiens
catcagaaaacaccc

SEQ ID NO: 694842 - DNA, 15 bp, Homo sapiens
atcagaaaacaccca

SEQ ID NO: 694843 - DNA, 15 bp, Homo sapiens
tcagaaaacacccac

SEQ ID NO: 694844 - DNA, 15 bp, Homo sapiens
cagaaaacacccact

SEQ ID NO: 694845 - DNA, 15 bp, Homo sapiens
agaaaacacccactg

SEQ ID NO: 694846 - DNA, 15 bp, Homo sapiens
gaaaacacccactga

SEQ ID NO: 694847 - DNA, 15 bp, Homo sapiens
aaaacacccactgat

SEQ ID NO: 694848 - DNA, 15 bp, Homo sapiens
aaacacccactgatt

SEQ ID NO: 694849 - DNA, 15 bp, Homo sapiens
aacacccactgattt

SEQ ID NO: 694850 - DNA, 15 bp, Homo sapiens
acacccactgatttc

SEQ ID NO: 694851 - DNA, 15 bp, Homo sapiens
cacccactgatttct

SEQ ID NO: 694852 - DNA, 15 bp, Homo sapiens
acccactgatttcta

SEQ ID NO: 694853 - DNA, 15 bp, Homo sapiens
cccactgatttctat

SEQ ID NO: 694854 - DNA, 15 bp, Homo sapiens
ccactgatttctatg

SEQ ID NO: 694855 - DNA, 15 bp, Homo sapiens
cactgatttctatgc

SEQ ID NO: 694856 - DNA, 15 bp, Homo sapiens
actgatttctatgct

SEQ ID NO: 694857 - DNA, 15 bp, Homo sapiens
ctgatttctatgcta

SEQ ID NO: 694858 - DNA, 15 bp, Homo sapiens
tgatttctatgctaa

SEQ ID NO: 694859 - DNA, 15 bp, Homo sapiens
gatttctatgctaat

SEQ ID NO: 694860 - DNA, 15 bp, Homo sapiens
atttctatgctaatt

SEQ ID NO: 694861 - DNA, 15 bp, Homo sapiens
tttctatgctaattt

SEQ ID NO: 694862 - DNA, 15 bp, Homo sapiens
ttctatgctaatttt

SEQ ID NO: 694863 - DNA, 15 bp, Homo sapiens
tctatgctaattttg

SEQ ID NO: 694864 - DNA, 15 bp, Homo sapiens
ctatgctaattttgt

SEQ ID NO: 694865 - DNA, 15 bp, Homo sapiens
tatgctaattttgtt

SEQ ID NO: 694866 - DNA, 15 bp, Homo sapiens
atgctaattttgtta

SEQ ID NO: 694867 - DNA, 15 bp, Homo sapiens
tgctaattttgttac

SEQ ID NO: 694868 - DNA, 15 bp, Homo sapiens
gctaattttgttacc

SEQ ID NO: 694869 - DNA, 15 bp, Homo sapiens
ctaattttgttacct

SEQ ID NO: 694870 - DNA, 15 bp, Homo sapiens
taattttgttacctg

SEQ ID NO: 694871 - DNA, 15 bp, Homo sapiens
aattttgttacctgg

SEQ ID NO: 694872 - DNA, 15 bp, Homo sapiens
attttgttacctggg

SEQ ID NO: 694873 - DNA, 15 bp, Homo sapiens
ttttgttacctgggt

SEQ ID NO: 694874 - DNA, 15 bp, Homo sapiens
tttgttacctgggtg

SEQ ID NO: 694875 - DNA, 15 bp, Homo sapiens
ttgttacctgggtgg

SEQ ID NO: 694876 - DNA, 15 bp, Homo sapiens
tgttacctgggtgga

SEQ ID NO: 694877 - DNA, 15 bp, Homo sapiens
gttacctgggtggaa

SEQ ID NO: 694878 - DNA, 15 bp, Homo sapiens
ttacctgggtggaat

SEQ ID NO: 694879 - DNA, 15 bp, Homo sapiens
tacctgggtggaata

SEQ ID NO: 694880 - DNA, 15 bp, Homo sapiens
acctgggtggaataa

SEQ ID NO: 694881 - DNA, 15 bp, Homo sapiens
cctgggtggaataat

SEQ ID NO: 694882 - DNA, 15 bp, Homo sapiens
ctgggtggaataata

SEQ ID NO: 694883 - DNA, 15 bp, Homo sapiens
tgggtggaataatag

SEQ ID NO: 694884 - DNA, 15 bp, Homo sapiens
gggtggaataatagt

SEQ ID NO: 694885 - DNA, 15 bp, Homo sapiens
ggtggaataatagta

SEQ ID NO: 694886 - DNA, 15 bp, Homo sapiens
gtggaataatagtac

SEQ ID NO: 694887 - DNA, 15 bp, Homo sapiens
tggaataatagtaca

SEQ ID NO: 694888 - DNA, 15 bp, Homo sapiens
ggaataatagtacag

SEQ ID NO: 694889 - DNA, 15 bp, Homo sapiens
gaataatagtacagc

SEQ ID NO: 694890 - DNA, 15 bp, Homo sapiens
aataatagtacagct

SEQ ID NO: 694891 - DNA, 15 bp, Homo sapiens
ataatagtacagcta

SEQ ID NO: 694892 - DNA, 15 bp, Homo sapiens
taatagtacagctat

SEQ ID NO: 694893 - DNA, 15 bp, Homo sapiens
aatagtacagctata

SEQ ID NO: 694894 - DNA, 15 bp, Homo sapiens
atagtacagctatat

SEQ ID NO: 694895 - DNA, 15 bp, Homo sapiens
tagtacagctatata

SEQ ID NO: 694896 - DNA, 15 bp, Homo sapiens
agtacagctatatat

SEQ ID NO: 694897 - DNA, 15 bp, Homo sapiens
gtacagctatatatt

SEQ ID NO: 694898 - DNA, 15 bp, Homo sapiens
tacagctatatattc

SEQ ID NO: 694899 - DNA, 15 bp, Homo sapiens
acagctatatattcc

SEQ ID NO: 694900 - DNA, 15 bp, Homo sapiens
cagctatatattcct

SEQ ID NO: 694901 - DNA, 15 bp, Homo sapiens
agctatatattcctc

SEQ ID NO: 694902 - DNA, 15 bp, Homo sapiens
gctatatattcctca

SEQ ID NO: 694903 - DNA, 15 bp, Homo sapiens
ctatatattcctcat

SEQ ID NO: 694904 - DNA, 15 bp, Homo sapiens
tatatattcctcatt

SEQ ID NO: 694905 - DNA, 15 bp, Homo sapiens
atatattcctcattt

SEQ ID NO: 694906 - DNA, 15 bp, Homo sapiens
tatattcctcatttt

SEQ ID NO: 694907 - DNA, 15 bp, Homo sapiens
atattcctcatttta

SEQ ID NO: 694908 - DNA, 15 bp, Homo sapiens
tattcctcattttag

SEQ ID NO: 694909 - DNA, 15 bp, Homo sapiens
attcctcattttaga

SEQ ID NO: 694910 - DNA, 15 bp, Homo sapiens
ttcctcattttagat

SEQ ID NO: 694911 - DNA, 15 bp, Homo sapiens
tcctcattttagata

SEQ ID NO: 694912 - DNA, 15 bp, Homo sapiens
cctcattttagatat

SEQ ID NO: 694913 - DNA, 15 bp, Homo sapiens
ctcattttagatatc

SEQ ID NO: 694914 - DNA, 15 bp, Homo sapiens
tcattttagatatct

SEQ ID NO: 694915 - DNA, 15 bp, Homo sapiens
cattttagatatctt

SEQ ID NO: 694916 - DNA, 15 bp, Homo sapiens
attttagatatcttt

SEQ ID NO: 694917 - DNA, 15 bp, Homo sapiens
ttttagatatctttg

SEQ ID NO: 694918 - DNA, 15 bp, Homo sapiens
tttagatatctttgt

SEQ ID NO: 694919 - DNA, 15 bp, Homo sapiens
ttagatatctttgta

SEQ ID NO: 694920 - DNA, 15 bp, Homo sapiens
tagatatctttgtat

SEQ ID NO: 694921 - DNA, 15 bp, Homo sapiens
agatatctttgtatt

SEQ ID NO: 694922 - DNA, 15 bp, Homo sapiens
gatatctttgtattt

SEQ ID NO: 694923 - DNA, 15 bp, Homo sapiens
atatctttgtatttc

SEQ ID NO: 694924 - DNA, 15 bp, Homo sapiens
tatctttgtatttct

SEQ ID NO: 694925 - DNA, 15 bp, Homo sapiens
atctttgtatttcta

SEQ ID NO: 694926 - DNA, 15 bp, Homo sapiens
tctttgtatttctac

SEQ ID NO: 694927 - DNA, 15 bp, Homo sapiens
ctttgtatttctaca

SEQ ID NO: 694928 - DNA, 15 bp, Homo sapiens
tttgtatttctacat

SEQ ID NO: 694929 - DNA, 15 bp, Homo sapiens
ttgtatttctacata

SEQ ID NO: 694930 - DNA, 15 bp, Homo sapiens
tgtatttctacatac

SEQ ID NO: 694931 - DNA, 15 bp, Homo sapiens
gtatttctacataca

SEQ ID NO: 694932 - DNA, 15 bp, Homo sapiens
tatttctacatacaa

SEQ ID NO: 694933 - DNA, 15 bp, Homo sapiens
atttctacatacaat

SEQ ID NO: 694934 - DNA, 15 bp, Homo sapiens
tttctacatacaata

SEQ ID NO: 694935 - DNA, 15 bp, Homo sapiens
ttctacatacaataa

SEQ ID NO: 694936 - DNA, 15 bp, Homo sapiens
tctacatacaataaa

SEQ ID NO: 694937 - DNA, 15 bp, Homo sapiens
ctacatacaataaaa

SEQ ID NO: 694938 - DNA, 15 bp, Homo sapiens
tacatacaataaaaa

SEQ ID NO: 694939 - DNA, 15 bp, Homo sapiens
acatacaataaaaaa

SEQ ID NO: 694940 - DNA, 15 bp, Homo sapiens
catacaataaaaaag

SEQ ID NO: 694941 - DNA, 15 bp, Homo sapiens
atacaataaaaaagc

SEQ ID NO: 694942 - DNA, 15 bp, Homo sapiens
tacaataaaaaagca

SEQ ID NO: 694943 - DNA, 15 bp, Homo sapiens
acaataaaaaagcag

SEQ ID NO: 694944 - DNA, 15 bp, Homo sapiens
caataaaaaagcaga

SEQ ID NO: 694945 - DNA, 15 bp, Homo sapiens
aataaaaaagcagag

SEQ ID NO: 694946 - DNA, 15 bp, Homo sapiens
ataaaaaagcagagt

SEQ ID NO: 694947 - DNA, 15 bp, Homo sapiens
taaaaaagcagagta

SEQ ID NO: 694948 - DNA, 15 bp, Homo sapiens
aaaaaagcagagtac

SEQ ID NO: 694949 - DNA, 15 bp, Homo sapiens
aaaaagcagagtact

SEQ ID NO: 694950 - DNA, 15 bp, Homo sapiens
aaaagcagagtactt

SEQ ID NO: 694951 - DNA, 15 bp, Homo sapiens
aaagcagagtactta

SEQ ID NO: 694952 - DNA, 15 bp, Homo sapiens
aagcagagtacttag

SEQ ID NO: 694953 - DNA, 15 bp, Homo sapiens
agcagagtacttagt

SEQ ID NO: 694954 - DNA, 15 bp, Homo sapiens
gcagagtacttagtc

SEQ ID NO: 694955 - DNA, 15 bp, Homo sapiens
cagagtacttagtca

SEQ ID NO: 694956 - DNA, 15 bp, Homo sapiens
agagtacttagtcat

SEQ ID NO: 694957 - DNA, 15 bp, Homo sapiens
gagtacttagtcatg

SEQ ID NO: 694958 - DNA, 15 bp, Homo sapiens
agtacttagtcatgt

SEQ ID NO: 694959 - DNA, 15 bp, Homo sapiens
gtacttagtcatgtt

SEQ ID NO: 694960 - DNA, 15 bp, Homo sapiens
tacttagtcatgttg

SEQ ID NO: 694961 - DNA, 15 bp, Homo sapiens
acttagtcatgttga

SEQ ID NO: 694962 - DNA, 15 bp, Homo sapiens
cttagtcatgttgaa

SEQ ID NO: 694963 - DNA, 15 bp, Homo sapiens
ttagtcatgttgaag

SEQ ID NO: 694964 - DNA, 15 bp, Homo sapiens
tagtcatgttgaaga

SEQ ID NO: 694965 - DNA, 15 bp, Homo sapiens
agtcatgttgaagaa

SEQ ID NO: 694966 - DNA, 15 bp, Homo sapiens
gtcatgttgaagaac

SEQ ID NO: 694967 - DNA, 15 bp, Homo sapiens
tcatgttgaagaact

SEQ ID NO: 694968 - DNA, 15 bp, Homo sapiens
catgttgaagaactt

SEQ ID NO: 694969 - DNA, 15 bp, Homo sapiens
atgttgaagaacttt

SEQ ID NO: 694970 - DNA, 15 bp, Homo sapiens
tgttgaagaacttta

SEQ ID NO: 694971 - DNA, 15 bp, Homo sapiens
gttgaagaactttaa

SEQ ID NO: 694972 - DNA, 15 bp, Homo sapiens
ttgaagaactttaaa

SEQ ID NO: 694973 - DNA, 15 bp, Homo sapiens
tgaagaactttaaac

SEQ ID NO: 694974 - DNA, 15 bp, Homo sapiens
gaagaactttaaact

SEQ ID NO: 694975 - DNA, 15 bp, Homo sapiens
aagaactttaaactt

SEQ ID NO: 694976 - DNA, 15 bp, Homo sapiens
agaactttaaacttt

SEQ ID NO: 694977 - DNA, 15 bp, Homo sapiens
gaactttaaactttt

SEQ ID NO: 694978 - DNA, 15 bp, Homo sapiens
aactttaaactttta

SEQ ID NO: 694979 - DNA, 15 bp, Homo sapiens
actttaaacttttag

SEQ ID NO: 694980 - DNA, 15 bp, Homo sapiens
ctttaaacttttagt

SEQ ID NO: 694981 - DNA, 15 bp, Homo sapiens
tttaaacttttagta

SEQ ID NO: 694982 - DNA, 15 bp, Homo sapiens
ttaaacttttagtat

SEQ ID NO: 694983 - DNA, 15 bp, Homo sapiens
taaacttttagtatt

SEQ ID NO: 694984 - DNA, 15 bp, Homo sapiens
aaacttttagtattt

SEQ ID NO: 694985 - DNA, 15 bp, Homo sapiens
aacttttagtatttc

SEQ ID NO: 694986 - DNA, 15 bp, Homo sapiens
acttttagtatttcc

SEQ ID NO: 694987 - DNA, 15 bp, Homo sapiens
cttttagtatttcca

SEQ ID NO: 694988 - DNA, 15 bp, Homo sapiens
ttttagtatttccag

SEQ ID NO: 694989 - DNA, 15 bp, Homo sapiens
tttagtatttccaga

SEQ ID NO: 694990 - DNA, 15 bp, Homo sapiens
ttagtatttccagat

SEQ ID NO: 694991 - DNA, 15 bp, Homo sapiens
tagtatttccagatc

SEQ ID NO: 694992 - DNA, 15 bp, Homo sapiens
agtatttccagatca

SEQ ID NO: 694993 - DNA, 15 bp, Homo sapiens
gtatttccagatcaa

SEQ ID NO: 694994 - DNA, 15 bp, Homo sapiens
tatttccagatcaat

SEQ ID NO: 694995 - DNA, 15 bp, Homo sapiens
atttccagatcaatc

SEQ ID NO: 694996 - DNA, 15 bp, Homo sapiens
tttccagatcaatct

SEQ ID NO: 694997 - DNA, 15 bp, Homo sapiens
ttccagatcaatctt

SEQ ID NO: 694998 - DNA, 15 bp, Homo sapiens
tccagatcaatcttc

SEQ ID NO: 694999 - DNA, 15 bp, Homo sapiens
ccagatcaatcttca

SEQ ID NO: 695000 - DNA, 15 bp, Homo sapiens
cagatcaatcttcaa

SEQ ID NO: 695001 - DNA, 15 bp, Homo sapiens
agatcaatcttcaaa

SEQ ID NO: 695002 - DNA, 15 bp, Homo sapiens
gatcaatcttcaaaa

SEQ ID NO: 695003 - DNA, 15 bp, Homo sapiens
atcaatcttcaaaac

SEQ ID NO: 695004 - DNA, 15 bp, Homo sapiens
tcaatcttcaaaaca

SEQ ID NO: 695005 - DNA, 15 bp, Homo sapiens
caatcttcaaaacaa

SEQ ID NO: 695006 - DNA, 15 bp, Homo sapiens
aatcttcaaaacaag

SEQ ID NO: 695007 - DNA, 15 bp, Homo sapiens
atcttcaaaacaagg

SEQ ID NO: 695008 - DNA, 15 bp, Homo sapiens
tcttcaaaacaagga

SEQ ID NO: 695009 - DNA, 15 bp, Homo sapiens
cttcaaaacaaggac

SEQ ID NO: 695010 - DNA, 15 bp, Homo sapiens
ttcaaaacaaggaca

SEQ ID NO: 695011 - DNA, 15 bp, Homo sapiens
tcaaaacaaggacag

SEQ ID NO: 695012 - DNA, 15 bp, Homo sapiens
caaaacaaggacagg

SEQ ID NO: 695013 - DNA, 15 bp, Homo sapiens
aaaacaaggacaggt

SEQ ID NO: 695014 - DNA, 15 bp, Homo sapiens
aaacaaggacaggtt

SEQ ID NO: 695015 - DNA, 15 bp, Homo sapiens
aacaaggacaggttt

SEQ ID NO: 695016 - DNA, 15 bp, Homo sapiens
acaaggacaggttta

SEQ ID NO: 695017 - DNA, 15 bp, Homo sapiens
caaggacaggtttat

SEQ ID NO: 695018 - DNA, 15 bp, Homo sapiens
aaggacaggtttatc

SEQ ID NO: 695019 - DNA, 15 bp, Homo sapiens
aggacaggtttatct

SEQ ID NO: 695020 - DNA, 15 bp, Homo sapiens
ggacaggtttatctt

SEQ ID NO: 695021 - DNA, 15 bp, Homo sapiens
gacaggtttatcttt

SEQ ID NO: 695022 - DNA, 15 bp, Homo sapiens
acaggtttatctttc

SEQ ID NO: 695023 - DNA, 15 bp, Homo sapiens
caggtttatctttct

SEQ ID NO: 695024 - DNA, 15 bp, Homo sapiens
aggtttatctttctc

SEQ ID NO: 695025 - DNA, 15 bp, Homo sapiens
ggtttatctttctct

SEQ ID NO: 695026 - DNA, 15 bp, Homo sapiens
gtttatctttctctc

SEQ ID NO: 695027 - DNA, 15 bp, Homo sapiens
tttatctttctctca

SEQ ID NO: 695028 - DNA, 15 bp, Homo sapiens
ttatctttctctcac

SEQ ID NO: 695029 - DNA, 15 bp, Homo sapiens
tatctttctctcacc

SEQ ID NO: 695030 - DNA, 15 bp, Homo sapiens
atctttctctcacca

SEQ ID NO: 695031 - DNA, 15 bp, Homo sapiens
tctttctctcaccac

SEQ ID NO: 695032 - DNA, 15 bp, Homo sapiens
ctttctctcaccact

SEQ ID NO: 695033 - DNA, 15 bp, Homo sapiens
tttctctcaccactc

SEQ ID NO: 695034 - DNA, 15 bp, Homo sapiens
ttctctcaccactca

SEQ ID NO: 695035 - DNA, 15 bp, Homo sapiens
tctctcaccactcaa

SEQ ID NO: 695036 - DNA, 15 bp, Homo sapiens
ctctcaccactcaat

SEQ ID NO: 695037 - DNA, 15 bp, Homo sapiens
tctcaccactcaatc

SEQ ID NO: 695038 - DNA, 15 bp, Homo sapiens
ctcaccactcaatct

SEQ ID NO: 695039 - DNA, 15 bp, Homo sapiens
tcaccactcaatcta

SEQ ID NO: 695040 - DNA, 15 bp, Homo sapiens
caccactcaatctat

SEQ ID NO: 695041 - DNA, 15 bp, Homo sapiens
accactcaatctata

SEQ ID NO: 695042 - DNA, 15 bp, Homo sapiens
ccactcaatctatat

SEQ ID NO: 695043 - DNA, 15 bp, Homo sapiens
cactcaatctatata

SEQ ID NO: 695044 - DNA, 15 bp, Homo sapiens
actcaatctatatat

SEQ ID NO: 695045 - DNA, 15 bp, Homo sapiens
ctcaatctatatata

SEQ ID NO: 695046 - DNA, 15 bp, Homo sapiens
tcaatctatatatac

SEQ ID NO: 695047 - DNA, 15 bp, Homo sapiens
caatctatatatacc

SEQ ID NO: 695048 - DNA, 15 bp, Homo sapiens
aatctatatatacct

SEQ ID NO: 695049 - DNA, 15 bp, Homo sapiens
atctatatatacctc

SEQ ID NO: 695050 - DNA, 15 bp, Homo sapiens
tctatatatacctct

SEQ ID NO: 695051 - DNA, 15 bp, Homo sapiens
ctatatatacctctt

SEQ ID NO: 695052 - DNA, 15 bp, Homo sapiens
tatatatacctcttg

SEQ ID NO: 695053 - DNA, 15 bp, Homo sapiens
atatatacctcttgt

SEQ ID NO: 695054 - DNA, 15 bp, Homo sapiens
tatatacctcttgtg

SEQ ID NO: 695055 - DNA, 15 bp, Homo sapiens
atatacctcttgtgg

SEQ ID NO: 695056 - DNA, 15 bp, Homo sapiens
tatacctcttgtggg

SEQ ID NO: 695057 - DNA, 15 bp, Homo sapiens
atacctcttgtgggc

SEQ ID NO: 695058 - DNA, 15 bp, Homo sapiens
tacctcttgtgggca

SEQ ID NO: 695059 - DNA, 15 bp, Homo sapiens
acctcttgtgggcaa

SEQ ID NO: 695060 - DNA, 15 bp, Homo sapiens
cctcttgtgggcaag

SEQ ID NO: 695061 - DNA, 15 bp, Homo sapiens
ctcttgtgggcaagg

SEQ ID NO: 695062 - DNA, 15 bp, Homo sapiens
tcttgtgggcaaggc

SEQ ID NO: 695063 - DNA, 15 bp, Homo sapiens
cttgtgggcaaggcc

SEQ ID NO: 695064 - DNA, 15 bp, Homo sapiens
ttgtgggcaaggcca

SEQ ID NO: 695065 - DNA, 15 bp, Homo sapiens
tgtgggcaaggccag

SEQ ID NO: 695066 - DNA, 15 bp, Homo sapiens
gtgggcaaggccagt

SEQ ID NO: 695067 - DNA, 15 bp, Homo sapiens
tgggcaaggccagtt

SEQ ID NO: 695068 - DNA, 15 bp, Homo sapiens
gggcaaggccagttt

SEQ ID NO: 695069 - DNA, 15 bp, Homo sapiens
ggcaaggccagtttt

SEQ ID NO: 695070 - DNA, 15 bp, Homo sapiens
gcaaggccagttttt

SEQ ID NO: 695071 - DNA, 15 bp, Homo sapiens
caaggccagttttta

SEQ ID NO: 695072 - DNA, 15 bp, Homo sapiens
aaggccagtttttat

SEQ ID NO: 695073 - DNA, 15 bp, Homo sapiens
aggccagtttttatc

SEQ ID NO: 695074 - DNA, 15 bp, Homo sapiens
ggccagtttttatca

SEQ ID NO: 695075 - DNA, 15 bp, Homo sapiens
gccagtttttatcac

SEQ ID NO: 695076 - DNA, 15 bp, Homo sapiens
ccagtttttatcact

SEQ ID NO: 695077 - DNA, 15 bp, Homo sapiens
cagtttttatcactg

SEQ ID NO: 695078 - DNA, 15 bp, Homo sapiens
agtttttatcactgg

SEQ ID NO: 695079 - DNA, 15 bp, Homo sapiens
gtttttatcactgga

SEQ ID NO: 695080 - DNA, 15 bp, Homo sapiens
tttttatcactggag

SEQ ID NO: 695081 - DNA, 15 bp, Homo sapiens
ttttatcactggagc

SEQ ID NO: 695082 - DNA, 15 bp, Homo sapiens
tttatcactggagcc

SEQ ID NO: 695083 - DNA, 15 bp, Homo sapiens
ttatcactggagcct

SEQ ID NO: 695084 - DNA, 15 bp, Homo sapiens
tatcactggagcctt

SEQ ID NO: 695085 - DNA, 15 bp, Homo sapiens
atcactggagccttt

SEQ ID NO: 695086 - DNA, 15 bp, Homo sapiens
tcactggagcctttc

SEQ ID NO: 695087 - DNA, 15 bp, Homo sapiens
cactggagcctttcc

SEQ ID NO: 695088 - DNA, 15 bp, Homo sapiens
actggagcctttccc

SEQ ID NO: 695089 - DNA, 15 bp, Homo sapiens
ctggagcctttcccc

SEQ ID NO: 695090 - DNA, 15 bp, Homo sapiens
tggagcctttcccct

SEQ ID NO: 695091 - DNA, 15 bp, Homo sapiens
ggagcctttcccctt

SEQ ID NO: 695092 - DNA, 15 bp, Homo sapiens
gagcctttccccttt

SEQ ID NO: 695093 - DNA, 15 bp, Homo sapiens
agcctttcccctttt

SEQ ID NO: 695094 - DNA, 15 bp, Homo sapiens
gcctttccccttttt

SEQ ID NO: 695095 - DNA, 15 bp, Homo sapiens
cctttccccttttta

SEQ ID NO: 695096 - DNA, 15 bp, Homo sapiens
ctttcccctttttat

SEQ ID NO: 695097 - DNA, 15 bp, Homo sapiens
tttcccctttttatt

SEQ ID NO: 695098 - DNA, 15 bp, Homo sapiens
ttcccctttttatta

SEQ ID NO: 695099 - DNA, 15 bp, Homo sapiens
tcccctttttattat

SEQ ID NO: 695100 - DNA, 15 bp, Homo sapiens
cccctttttattatg

SEQ ID NO: 695101 - DNA, 15 bp, Homo sapiens
ccctttttattatgt

SEQ ID NO: 695102 - DNA, 15 bp, Homo sapiens
cctttttattatgta

SEQ ID NO: 695103 - DNA, 15 bp, Homo sapiens
ctttttattatgtac

SEQ ID NO: 695104 - DNA, 15 bp, Homo sapiens
tttttattatgtacc

SEQ ID NO: 695105 - DNA, 15 bp, Homo sapiens
ttttattatgtacct

SEQ ID NO: 695106 - DNA, 15 bp, Homo sapiens
tttattatgtacctc

SEQ ID NO: 695107 - DNA, 15 bp, Homo sapiens
ttattatgtacctct

SEQ ID NO: 695108 - DNA, 15 bp, Homo sapiens
tattatgtacctctc

SEQ ID NO: 695109 - DNA, 15 bp, Homo sapiens
attatgtacctctcc

SEQ ID NO: 695110 - DNA, 15 bp, Homo sapiens
ttatgtacctctccc

SEQ ID NO: 695111 - DNA, 15 bp, Homo sapiens
tatgtacctctccct

SEQ ID NO: 695112 - DNA, 15 bp, Homo sapiens
atgtacctctccctc

SEQ ID NO: 695113 - DNA, 15 bp, Homo sapiens
tgtacctctccctca

SEQ ID NO: 695114 - DNA, 15 bp, Homo sapiens
gtacctctccctcac

SEQ ID NO: 695115 - DNA, 15 bp, Homo sapiens
tacctctccctcaca

SEQ ID NO: 695116 - DNA, 15 bp, Homo sapiens
acctctccctcacag

SEQ ID NO: 695117 - DNA, 15 bp, Homo sapiens
cctctccctcacagc

SEQ ID NO: 695118 - DNA, 15 bp, Homo sapiens
ctctccctcacagca

SEQ ID NO: 695119 - DNA, 15 bp, Homo sapiens
tctccctcacagcag

SEQ ID NO: 695120 - DNA, 15 bp, Homo sapiens
ctccctcacagcaga

SEQ ID NO: 695121 - DNA, 15 bp, Homo sapiens
tccctcacagcagag

SEQ ID NO: 695122 - DNA, 15 bp, Homo sapiens
ccctcacagcagagt

SEQ ID NO: 695123 - DNA, 15 bp, Homo sapiens
cctcacagcagagtc

SEQ ID NO: 695124 - DNA, 15 bp, Homo sapiens
ctcacagcagagtca

SEQ ID NO: 695125 - DNA, 15 bp, Homo sapiens
tcacagcagagtcag

SEQ ID NO: 695126 - DNA, 15 bp, Homo sapiens
cacagcagagtcagg

SEQ ID NO: 695127 - DNA, 15 bp, Homo sapiens
acagcagagtcagga

SEQ ID NO: 695128 - DNA, 15 bp, Homo sapiens
cagcagagtcaggac

SEQ ID NO: 695129 - DNA, 15 bp, Homo sapiens
agcagagtcaggact

SEQ ID NO: 695130 - DNA, 15 bp, Homo sapiens
gcagagtcaggactt

SEQ ID NO: 695131 - DNA, 15 bp, Homo sapiens
cagagtcaggacttt

SEQ ID NO: 695132 - DNA, 15 bp, Homo sapiens
agagtcaggacttta

SEQ ID NO: 695133 - DNA, 15 bp, Homo sapiens
gagtcaggactttaa

SEQ ID NO: 695134 - DNA, 15 bp, Homo sapiens
agtcaggactttaac

SEQ ID NO: 695135 - DNA, 15 bp, Homo sapiens
gtcaggactttaact

SEQ ID NO: 695136 - DNA, 15 bp, Homo sapiens
tcaggactttaactt

SEQ ID NO: 695137 - DNA, 15 bp, Homo sapiens
caggactttaacttt

SEQ ID NO: 695138 - DNA, 15 bp, Homo sapiens
aggactttaacttta

SEQ ID NO: 695139 - DNA, 15 bp, Homo sapiens
ggactttaactttac

SEQ ID NO: 695140 - DNA, 15 bp, Homo sapiens
gactttaactttaca

SEQ ID NO: 695141 - DNA, 15 bp, Homo sapiens
actttaactttacac

SEQ ID NO: 695142 - DNA, 15 bp, Homo sapiens
ctttaactttacaca

SEQ ID NO: 695143 - DNA, 15 bp, Homo sapiens
tttaactttacacaa

SEQ ID NO: 695144 - DNA, 15 bp, Homo sapiens
ttaactttacacaat

SEQ ID NO: 695145 - DNA, 15 bp, Homo sapiens
taactttacacaata

SEQ ID NO: 695146 - DNA, 15 bp, Homo sapiens
aactttacacaatac

SEQ ID NO: 695147 - DNA, 15 bp, Homo sapiens
actttacacaatact

SEQ ID NO: 695148 - DNA, 15 bp, Homo sapiens
ctttacacaatacta

SEQ ID NO: 695149 - DNA, 15 bp, Homo sapiens
tttacacaatactat

SEQ ID NO: 695150 - DNA, 15 bp, Homo sapiens
ttacacaatactatg

SEQ ID NO: 695151 - DNA, 15 bp, Homo sapiens
tacacaatactatgg

SEQ ID NO: 695152 - DNA, 15 bp, Homo sapiens
acacaatactatggc

SEQ ID NO: 695153 - DNA, 15 bp, Homo sapiens
cacaatactatggct

SEQ ID NO: 695154 - DNA, 15 bp, Homo sapiens
acaatactatggctc

SEQ ID NO: 695155 - DNA, 15 bp, Homo sapiens
caatactatggctct

SEQ ID NO: 695156 - DNA, 15 bp, Homo sapiens
aatactatggctcta

SEQ ID NO: 695157 - DNA, 15 bp, Homo sapiens
atactatggctctac

SEQ ID NO: 695158 - DNA, 15 bp, Homo sapiens
tactatggctctaca

SEQ ID NO: 695159 - DNA, 15 bp, Homo sapiens
actatggctctacat

SEQ ID NO: 695160 - DNA, 15 bp, Homo sapiens
ctatggctctacata

SEQ ID NO: 695161 - DNA, 15 bp, Homo sapiens
tatggctctacatat

SEQ ID NO: 695162 - DNA, 15 bp, Homo sapiens
atggctctacatatg

SEQ ID NO: 695163 - DNA, 15 bp, Homo sapiens
tggctctacatatga

SEQ ID NO: 695164 - DNA, 15 bp, Homo sapiens
ggctctacatatgaa

SEQ ID NO: 695165 - DNA, 15 bp, Homo sapiens
gctctacatatgaaa

SEQ ID NO: 695166 - DNA, 15 bp, Homo sapiens
ctctacatatgaaat

SEQ ID NO: 695167 - DNA, 15 bp, Homo sapiens
tctacatatgaaatc

SEQ ID NO: 695168 - DNA, 15 bp, Homo sapiens
ctacatatgaaatct

SEQ ID NO: 695169 - DNA, 15 bp, Homo sapiens
tacatatgaaatctt

SEQ ID NO: 695170 - DNA, 15 bp, Homo sapiens
acatatgaaatctta

SEQ ID NO: 695171 - DNA, 15 bp, Homo sapiens
catatgaaatcttaa

SEQ ID NO: 695172 - DNA, 15 bp, Homo sapiens
atatgaaatcttaaa

SEQ ID NO: 695173 - DNA, 15 bp, Homo sapiens
tatgaaatcttaaaa

SEQ ID NO: 695174 - DNA, 15 bp, Homo sapiens
atgaaatcttaaaaa

SEQ ID NO: 695175 - DNA, 15 bp, Homo sapiens
tgaaatcttaaaaat

SEQ ID NO: 695176 - DNA, 15 bp, Homo sapiens
gaaatcttaaaaata

SEQ ID NO: 695177 - DNA, 15 bp, Homo sapiens
aaatcttaaaaatac

SEQ ID NO: 695178 - DNA, 15 bp, Homo sapiens
aatcttaaaaataca

SEQ ID NO: 695179 - DNA, 15 bp, Homo sapiens
atcttaaaaatacat

SEQ ID NO: 695180 - DNA, 15 bp, Homo sapiens
tcttaaaaatacata

SEQ ID NO: 695181 - DNA, 15 bp, Homo sapiens
cttaaaaatacataa

SEQ ID NO: 695182 - DNA, 15 bp, Homo sapiens
ttaaaaatacataaa

SEQ ID NO: 695183 - DNA, 15 bp, Homo sapiens
taaaaatacataaaa

SEQ ID NO: 695184 - DNA, 15 bp, Homo sapiens
aaaaatacataaaaa

SEQ ID NO: 695185 - DNA, 15 bp, Homo sapiens
aaaatacataaaaat

SEQ ID NO: 695186 - DNA, 15 bp, Homo sapiens
aaatacataaaaatt

SEQ ID NO: 695187 - DNA, 15 bp, Homo sapiens
aatacataaaaatta

SEQ ID NO: 695188 - DNA, 15 bp, Homo sapiens
atacataaaaattaa

SEQ ID NO: 695189 - DNA, 15 bp, Homo sapiens
tacataaaaattaat

SEQ ID NO: 695190 - DNA, 15 bp, Homo sapiens
acataaaaattaata

SEQ ID NO: 695191 - DNA, 15 bp, Homo sapiens
cataaaaattaataa

SEQ ID NO: 695192 - DNA, 15 bp, Homo sapiens
ataaaaattaataaa

SEQ ID NO: 695193 - DNA, 15 bp, Homo sapiens
taaaaattaataaat

SEQ ID NO: 695194 - DNA, 15 bp, Homo sapiens
aaaaattaataaatt

SEQ ID NO: 695195 - DNA, 15 bp, Homo sapiens
aaaattaataaattc

SEQ ID NO: 695196 - DNA, 15 bp, Homo sapiens
aaattaataaattct

SEQ ID NO: 695197 - DNA, 15 bp, Homo sapiens
aattaataaattctg

SEQ ID NO: 695198 - DNA, 15 bp, Homo sapiens
attaataaattctgt

SEQ ID NO: 695199 - DNA, 15 bp, Homo sapiens
ttaataaattctgtc

SEQ ID NO: 695200 - DNA, 15 bp, Homo sapiens
taataaattctgtct

SEQ ID NO: 695201 - DNA, 15 bp, Homo sapiens
aataaattctgtcta

SEQ ID NO: 695202 - DNA, 15 bp, Homo sapiens
ataaattctgtctag

SEQ ID NO: 695203 - DNA, 15 bp, Homo sapiens
taaattctgtctaga

SEQ ID NO: 695204 - DNA, 15 bp, Homo sapiens
aaattctgtctagag

SEQ ID NO: 695205 - DNA, 15 bp, Homo sapiens
aattctgtctagagt

SEQ ID NO: 695206 - DNA, 15 bp, Homo sapiens
attctgtctagagta

SEQ ID NO: 695207 - DNA, 15 bp, Homo sapiens
ttctgtctagagtag

SEQ ID NO: 695208 - DNA, 15 bp, Homo sapiens
tctgtctagagtagt

SEQ ID NO: 695209 - DNA, 15 bp, Homo sapiens
ctgtctagagtagta

SEQ ID NO: 695210 - DNA, 15 bp, Homo sapiens
tgtctagagtagtat

SEQ ID NO: 695211 - DNA, 15 bp, Homo sapiens
gtctagagtagtata

SEQ ID NO: 695212 - DNA, 15 bp, Homo sapiens
tctagagtagtatat

SEQ ID NO: 695213 - DNA, 15 bp, Homo sapiens
ctagagtagtatatt

SEQ ID NO: 695214 - DNA, 15 bp, Homo sapiens
tagagtagtatattt

SEQ ID NO: 695215 - DNA, 15 bp, Homo sapiens
agagtagtatatttt

SEQ ID NO: 695216 - DNA, 15 bp, Homo sapiens
gagtagtatattttc

SEQ ID NO: 695217 - DNA, 15 bp, Homo sapiens
agtagtatattttcc

SEQ ID NO: 695218 - DNA, 15 bp, Homo sapiens
gtagtatattttccc

SEQ ID NO: 695219 - DNA, 15 bp, Homo sapiens
tagtatattttccct

SEQ ID NO: 695220 - DNA, 15 bp, Homo sapiens
agtatattttccctg

SEQ ID NO: 695221 - DNA, 15 bp, Homo sapiens
gtatattttccctgg

SEQ ID NO: 695222 - DNA, 15 bp, Homo sapiens
tatattttccctggg

SEQ ID NO: 695223 - DNA, 15 bp, Homo sapiens
atattttccctgggg

SEQ ID NO: 695224 - DNA, 15 bp, Homo sapiens
tattttccctggggt

SEQ ID NO: 695225 - DNA, 15 bp, Homo sapiens
attttccctggggtt

SEQ ID NO: 695226 - DNA, 15 bp, Homo sapiens
ttttccctggggtta

SEQ ID NO: 695227 - DNA, 15 bp, Homo sapiens
tttccctggggttac

SEQ ID NO: 695228 - DNA, 15 bp, Homo sapiens
ttccctggggttaca

SEQ ID NO: 695229 - DNA, 15 bp, Homo sapiens
tccctggggttacag

SEQ ID NO: 695230 - DNA, 15 bp, Homo sapiens
ccctggggttacagt

SEQ ID NO: 695231 - DNA, 15 bp, Homo sapiens
cctggggttacagtt

SEQ ID NO: 695232 - DNA, 15 bp, Homo sapiens
ctggggttacagtta

SEQ ID NO: 695233 - DNA, 15 bp, Homo sapiens
tggggttacagttac

SEQ ID NO: 695234 - DNA, 15 bp, Homo sapiens
ggggttacagttact

SEQ ID NO: 695235 - DNA, 15 bp, Homo sapiens
gggttacagttactt

SEQ ID NO: 695236 - DNA, 15 bp, Homo sapiens
ggttacagttacttt

SEQ ID NO: 695237 - DNA, 15 bp, Homo sapiens
gttacagttactttc

SEQ ID NO: 695238 - DNA, 15 bp, Homo sapiens
ttacagttactttca

SEQ ID NO: 695239 - DNA, 15 bp, Homo sapiens
tacagttactttcat

SEQ ID NO: 695240 - DNA, 15 bp, Homo sapiens
acagttactttcata

SEQ ID NO: 695241 - DNA, 15 bp, Homo sapiens
cagttactttcataa

SEQ ID NO: 695242 - DNA, 15 bp, Homo sapiens
agttactttcataat

SEQ ID NO: 695243 - DNA, 15 bp, Homo sapiens
gttactttcataata

SEQ ID NO: 695244 - DNA, 15 bp, Homo sapiens
ttactttcataataa

SEQ ID NO: 695245 - DNA, 15 bp, Homo sapiens
tactttcataataaa

SEQ ID NO: 695246 - DNA, 15 bp, Homo sapiens
actttcataataaaa

SEQ ID NO: 695247 - DNA, 15 bp, Homo sapiens
ctttcataataaaaa

SEQ ID NO: 695248 - DNA, 15 bp, Homo sapiens
tttcataataaaaat

SEQ ID NO: 695249 - DNA, 15 bp, Homo sapiens
ttcataataaaaatt

SEQ ID NO: 695250 - DNA, 15 bp, Homo sapiens
tcataataaaaatta

SEQ ID NO: 695251 - DNA, 15 bp, Homo sapiens
cataataaaaattag

SEQ ID NO: 695252 - DNA, 15 bp, Homo sapiens
ataataaaaattaga

SEQ ID NO: 695253 - DNA, 15 bp, Homo sapiens
taataaaaattagag

SEQ ID NO: 695254 - DNA, 15 bp, Homo sapiens
aataaaaattagaga

SEQ ID NO: 695255 - DNA, 15 bp, Homo sapiens
ataaaaattagagat

SEQ ID NO: 695256 - DNA, 15 bp, Homo sapiens
taaaaattagagata

SEQ ID NO: 695257 - DNA, 15 bp, Homo sapiens
aaaaattagagataa

SEQ ID NO: 695258 - DNA, 15 bp, Homo sapiens
aaaattagagataag

SEQ ID NO: 695259 - DNA, 15 bp, Homo sapiens
aaattagagataagg

SEQ ID NO: 695260 - DNA, 15 bp, Homo sapiens
aattagagataagga

SEQ ID NO: 695261 - DNA, 15 bp, Homo sapiens
attagagataaggaa

SEQ ID NO: 695262 - DNA, 15 bp, Homo sapiens
ttagagataaggaaa

SEQ ID NO: 695263 - DNA, 15 bp, Homo sapiens
tagagataaggaaag

SEQ ID NO: 695264 - DNA, 15 bp, Homo sapiens
agagataaggaaagg

SEQ ID NO: 695265 - DNA, 15 bp, Homo sapiens
gagataaggaaagga

SEQ ID NO: 695266 - DNA, 15 bp, Homo sapiens
agataaggaaaggac

SEQ ID NO: 695267 - DNA, 15 bp, Homo sapiens
gataaggaaaggact

SEQ ID NO: 695268 - DNA, 15 bp, Homo sapiens
ataaggaaaggactc

SEQ ID NO: 695269 - DNA, 15 bp, Homo sapiens
taaggaaaggactca

SEQ ID NO: 695270 - DNA, 15 bp, Homo sapiens
aaggaaaggactcat

SEQ ID NO: 695271 - DNA, 15 bp, Homo sapiens
aggaaaggactcatt

SEQ ID NO: 695272 - DNA, 15 bp, Homo sapiens
ggaaaggactcattt

SEQ ID NO: 695273 - DNA, 15 bp, Homo sapiens
gaaaggactcattta

SEQ ID NO: 695274 - DNA, 15 bp, Homo sapiens
aaaggactcatttat

SEQ ID NO: 695275 - DNA, 15 bp, Homo sapiens
aaggactcatttatt

SEQ ID NO: 695276 - DNA, 15 bp, Homo sapiens
aggactcatttattg

SEQ ID NO: 695277 - DNA, 15 bp, Homo sapiens
ggactcatttattgg

SEQ ID NO: 695278 - DNA, 15 bp, Homo sapiens
gactcatttattgga

SEQ ID NO: 695279 - DNA, 15 bp, Homo sapiens
actcatttattggaa

SEQ ID NO: 695280 - DNA, 15 bp, Homo sapiens
ctcatttattggaaa

SEQ ID NO: 695281 - DNA, 15 bp, Homo sapiens
tcatttattggaaag

SEQ ID NO: 695282 - DNA, 15 bp, Homo sapiens
catttattggaaagt

SEQ ID NO: 695283 - DNA, 15 bp, Homo sapiens
atttattggaaagtg

SEQ ID NO: 695284 - DNA, 15 bp, Homo sapiens
tttattggaaagtga

SEQ ID NO: 695285 - DNA, 15 bp, Homo sapiens
ttattggaaagtgat

SEQ ID NO: 695286 - DNA, 15 bp, Homo sapiens
tattggaaagtgatt

SEQ ID NO: 695287 - DNA, 15 bp, Homo sapiens
attggaaagtgattt

SEQ ID NO: 695288 - DNA, 15 bp, Homo sapiens
ttggaaagtgatttt

SEQ ID NO: 695289 - DNA, 15 bp, Homo sapiens
tggaaagtgatttta

SEQ ID NO: 695290 - DNA, 15 bp, Homo sapiens
ggaaagtgattttag

SEQ ID NO: 695291 - DNA, 15 bp, Homo sapiens
gaaagtgattttagg

SEQ ID NO: 695292 - DNA, 15 bp, Homo sapiens
aaagtgattttaggt

SEQ ID NO: 695293 - DNA, 15 bp, Homo sapiens
aagtgattttaggta

SEQ ID NO: 695294 - DNA, 15 bp, Homo sapiens
agtgattttaggtaa

SEQ ID NO: 695295 - DNA, 15 bp, Homo sapiens
gtgattttaggtaac

SEQ ID NO: 695296 - DNA, 15 bp, Homo sapiens
tgattttaggtaaca

SEQ ID NO: 695297 - DNA, 15 bp, Homo sapiens
gattttaggtaacat

SEQ ID NO: 695298 - DNA, 15 bp, Homo sapiens
attttaggtaacatt

SEQ ID NO: 695299 - DNA, 15 bp, Homo sapiens
ttttaggtaacattt

SEQ ID NO: 695300 - DNA, 15 bp, Homo sapiens
tttaggtaacatttc

SEQ ID NO: 695301 - DNA, 15 bp, Homo sapiens
ttaggtaacatttct

SEQ ID NO: 695302 - DNA, 15 bp, Homo sapiens
taggtaacatttctg

SEQ ID NO: 695303 - DNA, 15 bp, Homo sapiens
aggtaacatttctgg

SEQ ID NO: 695304 - DNA, 15 bp, Homo sapiens
ggtaacatttctgga

SEQ ID NO: 695305 - DNA, 15 bp, Homo sapiens
gtaacatttctggaa

SEQ ID NO: 695306 - DNA, 15 bp, Homo sapiens
taacatttctggaag

SEQ ID NO: 695307 - DNA, 15 bp, Homo sapiens
aacatttctggaaga

SEQ ID NO: 695308 - DNA, 15 bp, Homo sapiens
acatttctggaagaa

SEQ ID NO: 695309 - DNA, 15 bp, Homo sapiens
catttctggaagaaa

SEQ ID NO: 695310 - DNA, 15 bp, Homo sapiens
atttctggaagaaaa

SEQ ID NO: 695311 - DNA, 15 bp, Homo sapiens
tttctggaagaaaaa

SEQ ID NO: 695312 - DNA, 15 bp, Homo sapiens
ttctggaagaaaaat

SEQ ID NO: 695313 - DNA, 15 bp, Homo sapiens
tctggaagaaaaatg

SEQ ID NO: 695314 - DNA, 15 bp, Homo sapiens
ctggaagaaaaatgt

SEQ ID NO: 695315 - DNA, 15 bp, Homo sapiens
tggaagaaaaatgtc

SEQ ID NO: 695316 - DNA, 15 bp, Homo sapiens
ggaagaaaaatgtct

SEQ ID NO: 695317 - DNA, 15 bp, Homo sapiens
gaagaaaaatgtcta

SEQ ID NO: 695318 - DNA, 15 bp, Homo sapiens
aagaaaaatgtctat

SEQ ID NO: 695319 - DNA, 15 bp, Homo sapiens
agaaaaatgtctata

SEQ ID NO: 695320 - DNA, 15 bp, Homo sapiens
gaaaaatgtctatat

SEQ ID NO: 695321 - DNA, 15 bp, Homo sapiens
aaaaatgtctatatc

SEQ ID NO: 695322 - DNA, 15 bp, Homo sapiens
aaaatgtctatatct

SEQ ID NO: 695323 - DNA, 15 bp, Homo sapiens
aaatgtctatatctt

SEQ ID NO: 695324 - DNA, 15 bp, Homo sapiens
aatgtctatatctta

SEQ ID NO: 695325 - DNA, 15 bp, Homo sapiens
atgtctatatcttaa

SEQ ID NO: 695326 - DNA, 15 bp, Homo sapiens
tgtctatatcttaat

SEQ ID NO: 695327 - DNA, 15 bp, Homo sapiens
gtctatatcttaata

SEQ ID NO: 695328 - DNA, 15 bp, Homo sapiens
tctatatcttaatag

SEQ ID NO: 695329 - DNA, 15 bp, Homo sapiens
ctatatcttaatagt

SEQ ID NO: 695330 - DNA, 15 bp, Homo sapiens
tatatcttaatagtc

SEQ ID NO: 695331 - DNA, 15 bp, Homo sapiens
atatcttaatagtca

SEQ ID NO: 695332 - DNA, 15 bp, Homo sapiens
tatcttaatagtcac

SEQ ID NO: 695333 - DNA, 15 bp, Homo sapiens
atcttaatagtcact

SEQ ID NO: 695334 - DNA, 15 bp, Homo sapiens
tcttaatagtcactt

SEQ ID NO: 695335 - DNA, 15 bp, Homo sapiens
cttaatagtcactta

SEQ ID NO: 695336 - DNA, 15 bp, Homo sapiens
ttaatagtcacttaa

SEQ ID NO: 695337 - DNA, 15 bp, Homo sapiens
taatagtcacttaat

SEQ ID NO: 695338 - DNA, 15 bp, Homo sapiens
aatagtcacttaata

SEQ ID NO: 695339 - DNA, 15 bp, Homo sapiens
atagtcacttaatat

SEQ ID NO: 695340 - DNA, 15 bp, Homo sapiens
tagtcacttaatata

SEQ ID NO: 695341 - DNA, 15 bp, Homo sapiens
agtcacttaatatat

SEQ ID NO: 695342 - DNA, 15 bp, Homo sapiens
gtcacttaatatatg

SEQ ID NO: 695343 - DNA, 15 bp, Homo sapiens
tcacttaatatatga

SEQ ID NO: 695344 - DNA, 15 bp, Homo sapiens
cacttaatatatgat

SEQ ID NO: 695345 - DNA, 15 bp, Homo sapiens
acttaatatatgatg

SEQ ID NO: 695346 - DNA, 15 bp, Homo sapiens
cttaatatatgatgg

SEQ ID NO: 695347 - DNA, 15 bp, Homo sapiens
ttaatatatgatgga

SEQ ID NO: 695348 - DNA, 15 bp, Homo sapiens
taatatatgatggat

SEQ ID NO: 695349 - DNA, 15 bp, Homo sapiens
aatatatgatggatt

SEQ ID NO: 695350 - DNA, 15 bp, Homo sapiens
atatatgatggattg

SEQ ID NO: 695351 - DNA, 15 bp, Homo sapiens
tatatgatggattgt

SEQ ID NO: 695352 - DNA, 15 bp, Homo sapiens
atatgatggattgtg

SEQ ID NO: 695353 - DNA, 15 bp, Homo sapiens
tatgatggattgtgt

SEQ ID NO: 695354 - DNA, 15 bp, Homo sapiens
atgatggattgtgtt

SEQ ID NO: 695355 - DNA, 15 bp, Homo sapiens
tgatggattgtgtta

SEQ ID NO: 695356 - DNA, 15 bp, Homo sapiens
gatggattgtgttac

SEQ ID NO: 695357 - DNA, 15 bp, Homo sapiens
atggattgtgttact

SEQ ID NO: 695358 - DNA, 15 bp, Homo sapiens
tggattgtgttactc

SEQ ID NO: 695359 - DNA, 15 bp, Homo sapiens
ggattgtgttactcc

SEQ ID NO: 695360 - DNA, 15 bp, Homo sapiens
gattgtgttactcct

SEQ ID NO: 695361 - DNA, 15 bp, Homo sapiens
attgtgttactcctc

SEQ ID NO: 695362 - DNA, 15 bp, Homo sapiens
ttgtgttactcctca

SEQ ID NO: 695363 - DNA, 15 bp, Homo sapiens
tgtgttactcctcag

SEQ ID NO: 695364 - DNA, 15 bp, Homo sapiens
gtgttactcctcagt

SEQ ID NO: 695365 - DNA, 15 bp, Homo sapiens
tgttactcctcagtt

SEQ ID NO: 695366 - DNA, 15 bp, Homo sapiens
gttactcctcagttt

SEQ ID NO: 695367 - DNA, 15 bp, Homo sapiens
ttactcctcagtttt

SEQ ID NO: 695368 - DNA, 15 bp, Homo sapiens
tactcctcagttttc

SEQ ID NO: 695369 - DNA, 15 bp, Homo sapiens
actcctcagttttca

SEQ ID NO: 695370 - DNA, 15 bp, Homo sapiens
ctcctcagttttcaa

SEQ ID NO: 695371 - DNA, 15 bp, Homo sapiens
tcctcagttttcaat

SEQ ID NO: 695372 - DNA, 15 bp, Homo sapiens
cctcagttttcaatg

SEQ ID NO: 695373 - DNA, 15 bp, Homo sapiens
ctcagttttcaatgg

SEQ ID NO: 695374 - DNA, 15 bp, Homo sapiens
tcagttttcaatggc

SEQ ID NO: 695375 - DNA, 15 bp, Homo sapiens
cagttttcaatggca

SEQ ID NO: 695376 - DNA, 15 bp, Homo sapiens
agttttcaatggcat

SEQ ID NO: 695377 - DNA, 15 bp, Homo sapiens
gttttcaatggcata

SEQ ID NO: 695378 - DNA, 15 bp, Homo sapiens
ttttcaatggcatat

SEQ ID NO: 695379 - DNA, 15 bp, Homo sapiens
tttcaatggcatata

SEQ ID NO: 695380 - DNA, 15 bp, Homo sapiens
ttcaatggcatatac

SEQ ID NO: 695381 - DNA, 15 bp, Homo sapiens
tcaatggcatatact

SEQ ID NO: 695382 - DNA, 15 bp, Homo sapiens
caatggcatatacta

SEQ ID NO: 695383 - DNA, 15 bp, Homo sapiens
aatggcatatactaa

SEQ ID NO: 695384 - DNA, 15 bp, Homo sapiens
atggcatatactaaa

SEQ ID NO: 695385 - DNA, 15 bp, Homo sapiens
tggcatatactaaaa

SEQ ID NO: 695386 - DNA, 15 bp, Homo sapiens
ggcatatactaaaac

SEQ ID NO: 695387 - DNA, 15 bp, Homo sapiens
gcatatactaaaaca

SEQ ID NO: 695388 - DNA, 15 bp, Homo sapiens
catatactaaaacat

SEQ ID NO: 695389 - DNA, 15 bp, Homo sapiens
atatactaaaacatg

SEQ ID NO: 695390 - DNA, 15 bp, Homo sapiens
tatactaaaacatgg

SEQ ID NO: 695391 - DNA, 15 bp, Homo sapiens
atactaaaacatggc

SEQ ID NO: 695392 - DNA, 15 bp, Homo sapiens
tactaaaacatggcc

SEQ ID NO: 695393 - DNA, 15 bp, Homo sapiens
actaaaacatggccc

SEQ ID NO: 695394 - DNA, 15 bp, Homo sapiens
ctaaaacatggccct

SEQ ID NO: 695395 - DNA, 15 bp, Homo sapiens
taaaacatggccctc

SEQ ID NO: 695396 - DNA, 15 bp, Homo sapiens
aaaacatggccctct

SEQ ID NO: 695397 - DNA, 15 bp, Homo sapiens
aaacatggccctcta

SEQ ID NO: 695398 - DNA, 15 bp, Homo sapiens
aacatggccctctaa

SEQ ID NO: 695399 - DNA, 15 bp, Homo sapiens
acatggccctctaaa

SEQ ID NO: 695400 - DNA, 15 bp, Homo sapiens
catggccctctaaaa

SEQ ID NO: 695401 - DNA, 15 bp, Homo sapiens
atggccctctaaaaa

SEQ ID NO: 695402 - DNA, 15 bp, Homo sapiens
tggccctctaaaaag

SEQ ID NO: 695403 - DNA, 15 bp, Homo sapiens
ggccctctaaaaagg

SEQ ID NO: 695404 - DNA, 15 bp, Homo sapiens
gccctctaaaaaggg

SEQ ID NO: 695405 - DNA, 15 bp, Homo sapiens
ccctctaaaaagggg

SEQ ID NO: 695406 - DNA, 15 bp, Homo sapiens
cctctaaaaaggggg

SEQ ID NO: 695407 - DNA, 15 bp, Homo sapiens
ctctaaaaagggggc

SEQ ID NO: 695408 - DNA, 15 bp, Homo sapiens
tctaaaaagggggca

SEQ ID NO: 695409 - DNA, 15 bp, Homo sapiens
ctaaaaagggggcaa

SEQ ID NO: 695410 - DNA, 15 bp, Homo sapiens
taaaaagggggcaaa

SEQ ID NO: 695411 - DNA, 15 bp, Homo sapiens
aaaaagggggcaaat

SEQ ID NO: 695412 - DNA, 15 bp, Homo sapiens
aaaagggggcaaatg

SEQ ID NO: 695413 - DNA, 15 bp, Homo sapiens
aaagggggcaaatga

SEQ ID NO: 695414 - DNA, 15 bp, Homo sapiens
aagggggcaaatgaa

SEQ ID NO: 695415 - DNA, 15 bp, Homo sapiens
agggggcaaatgaaa

SEQ ID NO: 695416 - DNA, 15 bp, Homo sapiens
gggggcaaatgaaat

SEQ ID NO: 695417 - DNA, 15 bp, Homo sapiens
ggggcaaatgaaatg

SEQ ID NO: 695418 - DNA, 15 bp, Homo sapiens
gggcaaatgaaatga

SEQ ID NO: 695419 - DNA, 15 bp, Homo sapiens
ggcaaatgaaatgag

SEQ ID NO: 695420 - DNA, 15 bp, Homo sapiens
gcaaatgaaatgaga

SEQ ID NO: 695421 - DNA, 15 bp, Homo sapiens
caaatgaaatgagaa

SEQ ID NO: 695422 - DNA, 15 bp, Homo sapiens
aaatgaaatgagaaa

SEQ ID NO: 695423 - DNA, 15 bp, Homo sapiens
aatgaaatgagaaac

SEQ ID NO: 695424 - DNA, 15 bp, Homo sapiens
atgaaatgagaaact

SEQ ID NO: 695425 - DNA, 15 bp, Homo sapiens
tgaaatgagaaactc

SEQ ID NO: 695426 - DNA, 15 bp, Homo sapiens
gaaatgagaaactct

SEQ ID NO: 695427 - DNA, 15 bp, Homo sapiens
aaatgagaaactctc

SEQ ID NO: 695428 - DNA, 15 bp, Homo sapiens
aatgagaaactctct

SEQ ID NO: 695429 - DNA, 15 bp, Homo sapiens
atgagaaactctctg

SEQ ID NO: 695430 - DNA, 15 bp, Homo sapiens
tgagaaactctctga

SEQ ID NO: 695431 - DNA, 15 bp, Homo sapiens
gagaaactctctgaa

SEQ ID NO: 695432 - DNA, 15 bp, Homo sapiens
agaaactctctgaat

SEQ ID NO: 695433 - DNA, 15 bp, Homo sapiens
gaaactctctgaatg

SEQ ID NO: 695434 - DNA, 15 bp, Homo sapiens
aaactctctgaatgt

SEQ ID NO: 695435 - DNA, 15 bp, Homo sapiens
aactctctgaatgtt

SEQ ID NO: 695436 - DNA, 15 bp, Homo sapiens
actctctgaatgttt

SEQ ID NO: 695437 - DNA, 15 bp, Homo sapiens
ctctctgaatgtttt

SEQ ID NO: 695438 - DNA, 15 bp, Homo sapiens
tctctgaatgttttt

SEQ ID NO: 695439 - DNA, 15 bp, Homo sapiens
ctctgaatgtttttc

SEQ ID NO: 695440 - DNA, 15 bp, Homo sapiens
tctgaatgtttttct

SEQ ID NO: 695441 - DNA, 15 bp, Homo sapiens
ctgaatgtttttctc

SEQ ID NO: 695442 - DNA, 15 bp, Homo sapiens
tgaatgtttttctcc

SEQ ID NO: 695443 - DNA, 15 bp, Homo sapiens
gaatgtttttctccc

SEQ ID NO: 695444 - DNA, 15 bp, Homo sapiens
aatgtttttctcccc

SEQ ID NO: 695445 - DNA, 15 bp, Homo sapiens
atgtttttctcccct

SEQ ID NO: 695446 - DNA, 15 bp, Homo sapiens
tgtttttctccccta

SEQ ID NO: 695447 - DNA, 15 bp, Homo sapiens
gtttttctcccctag

SEQ ID NO: 695448 - DNA, 15 bp, Homo sapiens
tttttctcccctagg

SEQ ID NO: 695449 - DNA, 15 bp, Homo sapiens
ttttctcccctaggt

SEQ ID NO: 695450 - DNA, 15 bp, Homo sapiens
tttctcccctaggtg

SEQ ID NO: 695451 - DNA, 15 bp, Homo sapiens
ttctcccctaggtga

SEQ ID NO: 695452 - DNA, 15 bp, Homo sapiens
tctcccctaggtgaa

SEQ ID NO: 695453 - DNA, 15 bp, Homo sapiens
ctcccctaggtgaat

SEQ ID NO: 695454 - DNA, 15 bp, Homo sapiens
tcccctaggtgaatt

SEQ ID NO: 695455 - DNA, 15 bp, Homo sapiens
cccctaggtgaattc

SEQ ID NO: 695456 - DNA, 15 bp, Homo sapiens
ccctaggtgaattca

SEQ ID NO: 695457 - DNA, 15 bp, Homo sapiens
cctaggtgaattcac

SEQ ID NO: 695458 - DNA, 15 bp, Homo sapiens
ctaggtgaattcacc

SEQ ID NO: 695459 - DNA, 15 bp, Homo sapiens
taggtgaattcacct

SEQ ID NO: 695460 - DNA, 15 bp, Homo sapiens
aggtgaattcacctg

SEQ ID NO: 695461 - DNA, 15 bp, Homo sapiens
ggtgaattcacctgc

SEQ ID NO: 695462 - DNA, 15 bp, Homo sapiens
gtgaattcacctgct

SEQ ID NO: 695463 - DNA, 15 bp, Homo sapiens
tgaattcacctgctg

SEQ ID NO: 695464 - DNA, 15 bp, Homo sapiens
gaattcacctgctgc

SEQ ID NO: 695465 - DNA, 15 bp, Homo sapiens
aattcacctgctgct

SEQ ID NO: 695466 - DNA, 15 bp, Homo sapiens
attcacctgctgctt

SEQ ID NO: 695467 - DNA, 15 bp, Homo sapiens
ttcacctgctgctta

SEQ ID NO: 695468 - DNA, 15 bp, Homo sapiens
tcacctgctgcttag

SEQ ID NO: 695469 - DNA, 15 bp, Homo sapiens
cacctgctgcttaga

SEQ ID NO: 695470 - DNA, 15 bp, Homo sapiens
acctgctgcttagaa

SEQ ID NO: 695471 - DNA, 15 bp, Homo sapiens
cctgctgcttagaag

SEQ ID NO: 695472 - DNA, 15 bp, Homo sapiens
ctgctgcttagaagc

SEQ ID NO: 695473 - DNA, 15 bp, Homo sapiens
tgctgcttagaagct

SEQ ID NO: 695474 - DNA, 15 bp, Homo sapiens
gctgcttagaagctt

SEQ ID NO: 695475 - DNA, 15 bp, Homo sapiens
ctgcttagaagctta

SEQ ID NO: 695476 - DNA, 15 bp, Homo sapiens
tgcttagaagcttat

SEQ ID NO: 695477 - DNA, 15 bp, Homo sapiens
gcttagaagcttatt

SEQ ID NO: 695478 - DNA, 15 bp, Homo sapiens
cttagaagcttattt

SEQ ID NO: 695479 - DNA, 15 bp, Homo sapiens
ttagaagcttatttt

SEQ ID NO: 695480 - DNA, 15 bp, Homo sapiens
tagaagcttattttc

SEQ ID NO: 695481 - DNA, 15 bp, Homo sapiens
agaagcttattttct

SEQ ID NO: 695482 - DNA, 15 bp, Homo sapiens
gaagcttattttctc

SEQ ID NO: 695483 - DNA, 15 bp, Homo sapiens
aagcttattttctct

SEQ ID NO: 695484 - DNA, 15 bp, Homo sapiens
agcttattttctctt

SEQ ID NO: 695485 - DNA, 15 bp, Homo sapiens
gcttattttctcttg

SEQ ID NO: 695486 - DNA, 15 bp, Homo sapiens
cttattttctcttga

SEQ ID NO: 695487 - DNA, 15 bp, Homo sapiens
ttattttctcttgat

SEQ ID NO: 695488 - DNA, 15 bp, Homo sapiens
tattttctcttgatt

SEQ ID NO: 695489 - DNA, 15 bp, Homo sapiens
attttctcttgattt

SEQ ID NO: 695490 - DNA, 15 bp, Homo sapiens
ttttctcttgatttc

SEQ ID NO: 695491 - DNA, 15 bp, Homo sapiens
tttctcttgatttct

SEQ ID NO: 695492 - DNA, 15 bp, Homo sapiens
ttctcttgatttctg

SEQ ID NO: 695493 - DNA, 15 bp, Homo sapiens
tctcttgatttctgt

SEQ ID NO: 695494 - DNA, 15 bp, Homo sapiens
ctcttgatttctgtt

SEQ ID NO: 695495 - DNA, 15 bp, Homo sapiens
tcttgatttctgtta

SEQ ID NO: 695496 - DNA, 15 bp, Homo sapiens
cttgatttctgttat

SEQ ID NO: 695497 - DNA, 15 bp, Homo sapiens
ttgatttctgttata

SEQ ID NO: 695498 - DNA, 15 bp, Homo sapiens
tgatttctgttataa

SEQ ID NO: 695499 - DNA, 15 bp, Homo sapiens
gatttctgttataat

SEQ ID NO: 695500 - DNA, 15 bp, Homo sapiens
atttctgttataatg

SEQ ID NO: 695501 - DNA, 15 bp, Homo sapiens
tttctgttataatga

SEQ ID NO: 695502 - DNA, 15 bp, Homo sapiens
ttctgttataatgat

SEQ ID NO: 695503 - DNA, 15 bp, Homo sapiens
tctgttataatgatt

SEQ ID NO: 695504 - DNA, 15 bp, Homo sapiens
ctgttataatgattg

SEQ ID NO: 695505 - DNA, 15 bp, Homo sapiens
tgttataatgattgc

SEQ ID NO: 695506 - DNA, 15 bp, Homo sapiens
gttataatgattgct

SEQ ID NO: 695507 - DNA, 15 bp, Homo sapiens
ttataatgattgctc

SEQ ID NO: 695508 - DNA, 15 bp, Homo sapiens
tataatgattgctct

SEQ ID NO: 695509 - DNA, 15 bp, Homo sapiens
ataatgattgctctt

SEQ ID NO: 695510 - DNA, 15 bp, Homo sapiens
taatgattgctctta

SEQ ID NO: 695511 - DNA, 15 bp, Homo sapiens
aatgattgctcttac

SEQ ID NO: 695512 - DNA, 15 bp, Homo sapiens
atgattgctcttacc

SEQ ID NO: 695513 - DNA, 15 bp, Homo sapiens
tgattgctcttaccc

SEQ ID NO: 695514 - DNA, 15 bp, Homo sapiens
gattgctcttaccct

SEQ ID NO: 695515 - DNA, 15 bp, Homo sapiens
attgctcttaccctt

SEQ ID NO: 695516 - DNA, 15 bp, Homo sapiens
ttgctcttacccttt

SEQ ID NO: 695517 - DNA, 15 bp, Homo sapiens
tgctcttacccttta

SEQ ID NO: 695518 - DNA, 15 bp, Homo sapiens
gctcttaccctttag

SEQ ID NO: 695519 - DNA, 15 bp, Homo sapiens
ctcttaccctttagt

SEQ ID NO: 695520 - DNA, 15 bp, Homo sapiens
tcttaccctttagtt

SEQ ID NO: 695521 - DNA, 15 bp, Homo sapiens
cttaccctttagttt

SEQ ID NO: 695522 - DNA, 15 bp, Homo sapiens
ttaccctttagtttt

SEQ ID NO: 695523 - DNA, 15 bp, Homo sapiens
taccctttagtttta

SEQ ID NO: 695524 - DNA, 15 bp, Homo sapiens
accctttagttttaa

SEQ ID NO: 695525 - DNA, 15 bp, Homo sapiens
ccctttagttttaag

SEQ ID NO: 695526 - DNA, 15 bp, Homo sapiens
cctttagttttaagt

SEQ ID NO: 695527 - DNA, 15 bp, Homo sapiens
ctttagttttaagtt

SEQ ID NO: 695528 - DNA, 15 bp, Homo sapiens
tttagttttaagttt

SEQ ID NO: 695529 - DNA, 15 bp, Homo sapiens
ttagttttaagtttc

SEQ ID NO: 695530 - DNA, 15 bp, Homo sapiens
tagttttaagtttca

SEQ ID NO: 695531 - DNA, 15 bp, Homo sapiens
agttttaagtttcaa

SEQ ID NO: 695532 - DNA, 15 bp, Homo sapiens
gttttaagtttcaaa

SEQ ID NO: 695533 - DNA, 15 bp, Homo sapiens
ttttaagtttcaaaa

SEQ ID NO: 695534 - DNA, 15 bp, Homo sapiens
tttaagtttcaaaat

SEQ ID NO: 695535 - DNA, 15 bp, Homo sapiens
ttaagtttcaaaata

SEQ ID NO: 695536 - DNA, 15 bp, Homo sapiens
taagtttcaaaatag

SEQ ID NO: 695537 - DNA, 15 bp, Homo sapiens
aagtttcaaaatagg

SEQ ID NO: 695538 - DNA, 15 bp, Homo sapiens
agtttcaaaatagga

SEQ ID NO: 695539 - DNA, 15 bp, Homo sapiens
gtttcaaaataggag

SEQ ID NO: 695540 - DNA, 15 bp, Homo sapiens
tttcaaaataggagt

SEQ ID NO: 695541 - DNA, 15 bp, Homo sapiens
ttcaaaataggagtc

SEQ ID NO: 695542 - DNA, 15 bp, Homo sapiens
tcaaaataggagtca

SEQ ID NO: 695543 - DNA, 15 bp, Homo sapiens
caaaataggagtcat

SEQ ID NO: 695544 - DNA, 15 bp, Homo sapiens
aaaataggagtcata

SEQ ID NO: 695545 - DNA, 15 bp, Homo sapiens
aaataggagtcatat

SEQ ID NO: 695546 - DNA, 15 bp, Homo sapiens
aataggagtcatata

SEQ ID NO: 695547 - DNA, 15 bp, Homo sapiens
ataggagtcatataa

SEQ ID NO: 695548 - DNA, 15 bp, Homo sapiens
taggagtcatataac

SEQ ID NO: 695549 - DNA, 15 bp, Homo sapiens
aggagtcatataact

SEQ ID NO: 695550 - DNA, 15 bp, Homo sapiens
ggagtcatataactt

SEQ ID NO: 695551 - DNA, 15 bp, Homo sapiens
gagtcatataacttt

SEQ ID NO: 695552 - DNA, 15 bp, Homo sapiens
agtcatataactttc

SEQ ID NO: 695553 - DNA, 15 bp, Homo sapiens
gtcatataactttcc

SEQ ID NO: 695554 - DNA, 15 bp, Homo sapiens
tcatataactttcct

SEQ ID NO: 695555 - DNA, 15 bp, Homo sapiens
catataactttcctt

SEQ ID NO: 695556 - DNA, 15 bp, Homo sapiens
atataactttcctta

SEQ ID NO: 695557 - DNA, 15 bp, Homo sapiens
tataactttccttaa

SEQ ID NO: 695558 - DNA, 15 bp, Homo sapiens
ataactttccttaaa

SEQ ID NO: 695559 - DNA, 15 bp, Homo sapiens
taactttccttaaag

SEQ ID NO: 695560 - DNA, 15 bp, Homo sapiens
aactttccttaaagc

SEQ ID NO: 695561 - DNA, 15 bp, Homo sapiens
actttccttaaagct

SEQ ID NO: 695562 - DNA, 15 bp, Homo sapiens
ctttccttaaagcta

SEQ ID NO: 695563 - DNA, 15 bp, Homo sapiens
tttccttaaagctat

SEQ ID NO: 695564 - DNA, 15 bp, Homo sapiens
ttccttaaagctatt

SEQ ID NO: 695565 - DNA, 15 bp, Homo sapiens
tccttaaagctattg

SEQ ID NO: 695566 - DNA, 15 bp, Homo sapiens
ccttaaagctattga

SEQ ID NO: 695567 - DNA, 15 bp, Homo sapiens
cttaaagctattgac

SEQ ID NO: 695568 - DNA, 15 bp, Homo sapiens
ttaaagctattgact

SEQ ID NO: 695569 - DNA, 15 bp, Homo sapiens
taaagctattgactg

SEQ ID NO: 695570 - DNA, 15 bp, Homo sapiens
aaagctattgactgt

SEQ ID NO: 695571 - DNA, 15 bp, Homo sapiens
aagctattgactgtc

SEQ ID NO: 695572 - DNA, 15 bp, Homo sapiens
agctattgactgtct

SEQ ID NO: 695573 - DNA, 15 bp, Homo sapiens
gctattgactgtctt

SEQ ID NO: 695574 - DNA, 15 bp, Homo sapiens
ctattgactgtcttt

SEQ ID NO: 695575 - DNA, 15 bp, Homo sapiens
tattgactgtctttt

SEQ ID NO: 695576 - DNA, 15 bp, Homo sapiens
attgactgtcttttt

SEQ ID NO: 695577 - DNA, 15 bp, Homo sapiens
ttgactgtctttttg

SEQ ID NO: 695578 - DNA, 15 bp, Homo sapiens
tgactgtctttttgt

SEQ ID NO: 695579 - DNA, 15 bp, Homo sapiens
gactgtctttttgtc

SEQ ID NO: 695580 - DNA, 15 bp, Homo sapiens
actgtctttttgtcc

SEQ ID NO: 695581 - DNA, 15 bp, Homo sapiens
ctgtctttttgtcct

SEQ ID NO: 695582 - DNA, 15 bp, Homo sapiens
tgtctttttgtcctg

SEQ ID NO: 695583 - DNA, 15 bp, Homo sapiens
gtctttttgtcctgt

SEQ ID NO: 695584 - DNA, 15 bp, Homo sapiens
tctttttgtcctgtt

SEQ ID NO: 695585 - DNA, 15 bp, Homo sapiens
ctttttgtcctgttt

SEQ ID NO: 695586 - DNA, 15 bp, Homo sapiens
tttttgtcctgtttt

SEQ ID NO: 695587 - DNA, 15 bp, Homo sapiens
ttttgtcctgtttta

SEQ ID NO: 695588 - DNA, 15 bp, Homo sapiens
tttgtcctgttttat

SEQ ID NO: 695589 - DNA, 15 bp, Homo sapiens
ttgtcctgttttatt

SEQ ID NO: 695590 - DNA, 15 bp, Homo sapiens
tgtcctgttttattc

SEQ ID NO: 695591 - DNA, 15 bp, Homo sapiens
gtcctgttttattca

SEQ ID NO: 695592 - DNA, 15 bp, Homo sapiens
tcctgttttattcac

SEQ ID NO: 695593 - DNA, 15 bp, Homo sapiens
cctgttttattcacc

SEQ ID NO: 695594 - DNA, 15 bp, Homo sapiens
ctgttttattcacca

SEQ ID NO: 695595 - DNA, 15 bp, Homo sapiens
tgttttattcaccat

SEQ ID NO: 695596 - DNA, 15 bp, Homo sapiens
gttttattcaccatg

SEQ ID NO: 695597 - DNA, 15 bp, Homo sapiens
ttttattcaccatga

SEQ ID NO: 695598 - DNA, 15 bp, Homo sapiens
tttattcaccatgag

SEQ ID NO: 695599 - DNA, 15 bp, Homo sapiens
ttattcaccatgagt

SEQ ID NO: 695600 - DNA, 15 bp, Homo sapiens
tattcaccatgagtt

SEQ ID NO: 695601 - DNA, 15 bp, Homo sapiens
attcaccatgagtta

SEQ ID NO: 695602 - DNA, 15 bp, Homo sapiens
ttcaccatgagttat

SEQ ID NO: 695603 - DNA, 15 bp, Homo sapiens
tcaccatgagttata

SEQ ID NO: 695604 - DNA, 15 bp, Homo sapiens
caccatgagttatag

SEQ ID NO: 695605 - DNA, 15 bp, Homo sapiens
accatgagttatagt

SEQ ID NO: 695606 - DNA, 15 bp, Homo sapiens
ccatgagttatagtg

SEQ ID NO: 695607 - DNA, 15 bp, Homo sapiens
catgagttatagtgt

SEQ ID NO: 695608 - DNA, 15 bp, Homo sapiens
atgagttatagtgtg

SEQ ID NO: 695609 - DNA, 15 bp, Homo sapiens
tgagttatagtgtga

SEQ ID NO: 695610 - DNA, 15 bp, Homo sapiens
gagttatagtgtgac

SEQ ID NO: 695611 - DNA, 15 bp, Homo sapiens
agttatagtgtgaca

SEQ ID NO: 695612 - DNA, 15 bp, Homo sapiens
gttatagtgtgacag

SEQ ID NO: 695613 - DNA, 15 bp, Homo sapiens
ttatagtgtgacagt

SEQ ID NO: 695614 - DNA, 15 bp, Homo sapiens
tatagtgtgacagtt

SEQ ID NO: 695615 - DNA, 15 bp, Homo sapiens
atagtgtgacagtta

SEQ ID NO: 695616 - DNA, 15 bp, Homo sapiens
tagtgtgacagttaa

SEQ ID NO: 695617 - DNA, 15 bp, Homo sapiens
agtgtgacagttaat

SEQ ID NO: 695618 - DNA, 15 bp, Homo sapiens
gtgtgacagttaatt

SEQ ID NO: 695619 - DNA, 15 bp, Homo sapiens
tgtgacagttaattc

SEQ ID NO: 695620 - DNA, 15 bp, Homo sapiens
gtgacagttaattct

SEQ ID NO: 695621 - DNA, 15 bp, Homo sapiens
tgacagttaattctt

SEQ ID NO: 695622 - DNA, 15 bp, Homo sapiens
gacagttaattctta

SEQ ID NO: 695623 - DNA, 15 bp, Homo sapiens
acagttaattcttat

SEQ ID NO: 695624 - DNA, 15 bp, Homo sapiens
cagttaattcttatg

SEQ ID NO: 695625 - DNA, 15 bp, Homo sapiens
agttaattcttatga

SEQ ID NO: 695626 - DNA, 15 bp, Homo sapiens
gttaattcttatgaa

SEQ ID NO: 695627 - DNA, 15 bp, Homo sapiens
ttaattcttatgaaa

SEQ ID NO: 695628 - DNA, 15 bp, Homo sapiens
taattcttatgaaaa

SEQ ID NO: 695629 - DNA, 15 bp, Homo sapiens
aattcttatgaaaat

SEQ ID NO: 695630 - DNA, 15 bp, Homo sapiens
attcttatgaaaatt

SEQ ID NO: 695631 - DNA, 15 bp, Homo sapiens
ttcttatgaaaatta

SEQ ID NO: 695632 - DNA, 15 bp, Homo sapiens
tcttatgaaaattat

SEQ ID NO: 695633 - DNA, 15 bp, Homo sapiens
cttatgaaaattata

SEQ ID NO: 695634 - DNA, 15 bp, Homo sapiens
ttatgaaaattatat

SEQ ID NO: 695635 - DNA, 15 bp, Homo sapiens
tatgaaaattatata

SEQ ID NO: 695636 - DNA, 15 bp, Homo sapiens
atgaaaattatatag

SEQ ID NO: 695637 - DNA, 15 bp, Homo sapiens
tgaaaattatataga

SEQ ID NO: 695638 - DNA, 15 bp, Homo sapiens
gaaaattatatagag

SEQ ID NO: 695639 - DNA, 15 bp, Homo sapiens
aaaattatatagaga

SEQ ID NO: 695640 - DNA, 15 bp, Homo sapiens
aaattatatagagat

SEQ ID NO: 695641 - DNA, 15 bp, Homo sapiens
aattatatagagatg

SEQ ID NO: 695642 - DNA, 15 bp, Homo sapiens
attatatagagatgg

SEQ ID NO: 695643 - DNA, 15 bp, Homo sapiens
ttatatagagatggt

SEQ ID NO: 695644 - DNA, 15 bp, Homo sapiens
tatatagagatggtt

SEQ ID NO: 695645 - DNA, 15 bp, Homo sapiens
atatagagatggtta

SEQ ID NO: 695646 - DNA, 15 bp, Homo sapiens
tatagagatggttaa

SEQ ID NO: 695647 - DNA, 15 bp, Homo sapiens
atagagatggttaaa

SEQ ID NO: 695648 - DNA, 15 bp, Homo sapiens
tagagatggttaaat

SEQ ID NO: 695649 - DNA, 15 bp, Homo sapiens
agagatggttaaatc

SEQ ID NO: 695650 - DNA, 15 bp, Homo sapiens
gagatggttaaatca

SEQ ID NO: 695651 - DNA, 15 bp, Homo sapiens
agatggttaaatcat

SEQ ID NO: 695652 - DNA, 15 bp, Homo sapiens
gatggttaaatcatc

SEQ ID NO: 695653 - DNA, 15 bp, Homo sapiens
atggttaaatcatca

SEQ ID NO: 695654 - DNA, 15 bp, Homo sapiens
tggttaaatcatcag

SEQ ID NO: 695655 - DNA, 15 bp, Homo sapiens
ggttaaatcatcaga

SEQ ID NO: 695656 - DNA, 15 bp, Homo sapiens
gttaaatcatcagaa

SEQ ID NO: 695657 - DNA, 15 bp, Homo sapiens
ttaaatcatcagaaa

SEQ ID NO: 695658 - DNA, 15 bp, Homo sapiens
taaatcatcagaaac

SEQ ID NO: 695659 - DNA, 15 bp, Homo sapiens
aaatcatcagaaact

SEQ ID NO: 695660 - DNA, 15 bp, Homo sapiens
aatcatcagaaactg

SEQ ID NO: 695661 - DNA, 15 bp, Homo sapiens
atcatcagaaactgt

SEQ ID NO: 695662 - DNA, 15 bp, Homo sapiens
tcatcagaaactgta

SEQ ID NO: 695663 - DNA, 15 bp, Homo sapiens
catcagaaactgtaa
